United States Patent Application Publication US 2020/0095579 A1 - sequence listing, part 20

SEQ ID NO: 314073 - DNA, 20 bp, Artificial Sequence
  Description of Artificial Sequence: Synthetic oligonucleotide
  Target: LAMA2; (+) strand; PAM type: YTN; PAM sequence: TTA
atactcaaaactcctcttgt

SEQ ID NO: 314074 - DNA, 20 bp, Artificial Sequence
  Description of Artificial Sequence: Synthetic oligonucleotide
  Target: LAMA2; (+) strand; PAM type: YTN; PAM sequence: CTC
aaaactcctcttgtcttcaa

SEQ ID NO: 314075 - DNA, 20 bp, Artificial Sequence
  Description of Artificial Sequence: Synthetic oligonucleotide
  Target: LAMA2; (+) strand; PAM type: YTN; PAM sequence: CTC
ctcttgtcttcaatatacct

SEQ ID NO: 314076 - DNA, 20 bp, Artificial Sequence
  Description of Artificial Sequence: Synthetic oligonucleotide
  Target: LAMA2; (+) strand; PAM type: YTN; PAM sequence: CTC
ttgtcttcaatatacctacc

SEQ ID NO: 314077 - DNA, 20 bp, Artificial Sequence
  Description of Artificial Sequence: Synthetic oligonucleotide
  Target: LAMA2; (+) strand; PAM type: YTN; PAM sequence: CTT
gtcttcaatatacctaccat

SEQ ID NO: 314078 - DNA, 20 bp, Artificial Sequence
  Description of Artificial Sequence: Synthetic oligonucleotide
  Target: LAMA2; (+) strand; PAM type: YTN; PAM sequence: TTG
tcttcaatatacctaccata

SEQ ID NO: 314079 - DNA, 20 bp, Artificial Sequence
  Description of Artificial Sequence: Synthetic oligonucleotide
  Target: LAMA2; (+) strand; PAM type: YTN; PAM sequence: CTT
caatatacctaccatagact

SEQ ID NO: 314080 - DNA, 20 bp, Artificial Sequence
  Description of Artificial Sequence: Synthetic oligonucleotide
  Target: LAMA2; (+) strand; PAM type: YTN; PAM sequence: TTC
aatatacctaccatagactg

SEQ ID NO: 314081 - DNA, 20 bp, Artificial Sequence
  Description of Artificial Sequence: Synthetic oligonucleotide
  Target: LAMA2; (+) strand; PAM type: YTN; PAM sequence: CTA
ccatagactgtaagggatta

SEQ ID NO: 314082 - DNA, 20 bp, Artificial Sequence
  Description of Artificial Sequence: Synthetic oligonucleotide
  Target: LAMA2; (+) strand; PAM type: YTN; PAM sequence: CTG
taagggattatttcgagtag

SEQ ID NO: 314083 - DNA, 20 bp, Artificial Sequence
  Description of Artificial Sequence: Synthetic oligonucleotide
  Target: LAMA2; (+) strand; PAM type: YTN; PAM sequence: TTA
tttcgagtagtcagttgggg

SEQ ID NO: 314084 - DNA, 20 bp, Artificial Sequence
  Description of Artificial Sequence: Synthetic oligonucleotide
  Target: LAMA2; (+) strand; PAM type: YTN; PAM sequence: TTT
cgagtagtcagttggggttt

SEQ ID NO: 314085 - DNA, 20 bp, Artificial Sequence
  Description of Artificial Sequence: Synthetic oligonucleotide
  Target: LAMA2; (+) strand; PAM type: YTN; PAM sequence: TTC
gagtagtcagttggggtttg

SEQ ID NO: 314086 - DNA, 20 bp, Artificial Sequence
  Description of Artificial Sequence: Synthetic oligonucleotide
  Target: LAMA2; (+) strand; PAM type: YTN; PAM sequence: TTG
gggtttgatatggtgttaat

SEQ ID NO: 314087 - DNA, 20 bp, Artificial Sequence
  Description of Artificial Sequence: Synthetic oligonucleotide
  Target: LAMA2; (+) strand; PAM type: YTN; PAM sequence: TTT
gatatggtgttaattcttta

SEQ ID NO: 314088 - DNA, 20 bp, Artificial Sequence
  Description of Artificial Sequence: Synthetic oligonucleotide
  Target: LAMA2; (+) strand; PAM type: YTN; PAM sequence: TTG
atatggtgttaattctttat

SEQ ID NO: 314089 - DNA, 20 bp, Artificial Sequence
  Description of Artificial Sequence: Synthetic oligonucleotide
  Target: LAMA2; (+) strand; PAM type: YTN; PAM sequence: TTA
attctttatgcatttacatc

SEQ ID NO: 314090 - DNA, 20 bp, Artificial Sequence
  Description of Artificial Sequence: Synthetic oligonucleotide
  Target: LAMA2; (+) strand; PAM type: YTN; PAM sequence: TTC
tttatgcatttacatcattc

SEQ ID NO: 314091 - DNA, 20 bp, Artificial Sequence
  Description of Artificial Sequence: Synthetic oligonucleotide
  Target: LAMA2; (+) strand; PAM type: YTN; PAM sequence: CTT
tatgcatttacatcattcta

SEQ ID NO: 314092 - DNA, 20 bp, Artificial Sequence
  Description of Artificial Sequence: Synthetic oligonucleotide
  Target: LAMA2; (+) strand; PAM type: YTN; PAM sequence: TTT
atgcatttacatcattctat

SEQ ID NO: 314093 - DNA, 20 bp, Artificial Sequence
  Description of Artificial Sequence: Synthetic oligonucleotide
  Target: LAMA2; (+) strand; PAM type: YTN; PAM sequence: TTA
tgcatttacatcattctatc

SEQ ID NO: 314094 - DNA, 20 bp, Artificial Sequence
  Description of Artificial Sequence: Synthetic oligonucleotide
  Target: LAMA2; (+) strand; PAM type: YTN; PAM sequence: TTT
acatcattctatcaatttca

SEQ ID NO: 314095 - DNA, 20 bp, Artificial Sequence
  Description of Artificial Sequence: Synthetic oligonucleotide
  Target: LAMA2; (+) strand; PAM type: YTN; PAM sequence: TTA
catcattctatcaatttcaa

SEQ ID NO: 314096 - DNA, 20 bp, Artificial Sequence
  Description of Artificial Sequence: Synthetic oligonucleotide
  Target: LAMA2; (+) strand; PAM type: YTN; PAM sequence: TTC
tatcaatttcaagtgtgttc

SEQ ID NO: 314097 - DNA, 20 bp, Artificial Sequence
  Description of Artificial Sequence: Synthetic oligonucleotide
  Target: LAMA2; (+) strand; PAM type: YTN; PAM sequence: CTA
tcaatttcaagtgtgttctt

SEQ ID NO: 314098 - DNA, 20 bp, Artificial Sequence
  Description of Artificial Sequence: Synthetic oligonucleotide
  Target: LAMA2; (+) strand; PAM type: YTN; PAM sequence: TTT
caagtgtgttcttttattct

SEQ ID NO: 314099 - DNA, 20 bp, Artificial Sequence
  Description of Artificial Sequence: Synthetic oligonucleotide
  Target: LAMA2; (+) strand; PAM type: YTN; PAM sequence: TTC
aagtgtgttcttttattctt

SEQ ID NO: 314100 - DNA, 20 bp, Artificial Sequence
  Description of Artificial Sequence: Synthetic oligonucleotide
  Target: LAMA2; (+) strand; PAM type: YTN; PAM sequence: TTC
ttttattctttttctttttt

SEQ ID NO: 314101 - DNA, 20 bp, Artificial Sequence
  Description of Artificial Sequence: Synthetic oligonucleotide
  Target: LAMA2; (+) strand; PAM type: YTN; PAM sequence: CTT
ttattctttttcttttttct

SEQ ID NO: 314102 - DNA, 20 bp, Artificial Sequence
  Description of Artificial Sequence: Synthetic oligonucleotide
  Target: LAMA2; (+) strand; PAM type: YTN; PAM sequence: TTT
tattctttttcttttttctt

SEQ ID NO: 314103 - DNA, 20 bp, Artificial Sequence
  Description of Artificial Sequence: Synthetic oligonucleotide
  Target: LAMA2; (+) strand; PAM type: YTN; PAM sequence: TTT
attctttttcttttttcttt

SEQ ID NO: 314104 - DNA, 20 bp, Artificial Sequence
  Description of Artificial Sequence: Synthetic oligonucleotide
  Target: LAMA2; (+) strand; PAM type: YTN; PAM sequence: TTA
ttctttttcttttttcttta

SEQ ID NO: 314105 - DNA, 20 bp, Artificial Sequence
  Description of Artificial Sequence: Synthetic oligonucleotide
  Target: LAMA2; (+) strand; PAM type: YTN; PAM sequence: TTC
tttttcttttttctttaatt

SEQ ID NO: 314106 - DNA, 20 bp, Artificial Sequence
  Description of Artificial Sequence: Synthetic oligonucleotide
  Target: LAMA2; (+) strand; PAM type: YTN; PAM sequence: CTT
tttcttttttctttaatttt

SEQ ID NO: 314107 - DNA, 20 bp, Artificial Sequence
  Description of Artificial Sequence: Synthetic oligonucleotide
  Target: LAMA2; (+) strand; PAM type: YTN; PAM sequence: TTT
ttcttttttctttaattttt

SEQ ID NO: 314108 - DNA, 20 bp, Artificial Sequence
  Description of Artificial Sequence: Synthetic oligonucleotide
  Target: LAMA2; (+) strand; PAM type: YTN; PAM sequence: TTT
tcttttttctttaatttttc

SEQ ID NO: 314109 - DNA, 20 bp, Artificial Sequence
  Description of Artificial Sequence: Synthetic oligonucleotide
  Target: LAMA2; (+) strand; PAM type: YTN; PAM sequence: TTT
cttttttctttaatttttcc

SEQ ID NO: 314110 - DNA, 20 bp, Artificial Sequence
  Description of Artificial Sequence: Synthetic oligonucleotide
  Target: LAMA2; (+) strand; PAM type: YTN; PAM sequence: TTC
ttttttctttaatttttcca

SEQ ID NO: 314111 - DNA, 20 bp, Artificial Sequence
  Description of Artificial Sequence: Synthetic oligonucleotide
  Target: LAMA2; (+) strand; PAM type: YTN; PAM sequence: CTT
ttttctttaatttttccagg

SEQ ID NO: 314112 - DNA, 20 bp, Artificial Sequence
  Description of Artificial Sequence: Synthetic oligonucleotide
  Target: LAMA2; (+) strand; PAM type: YTN; PAM sequence: TTT
tttctttaatttttccaggc

SEQ ID NO: 314113 - DNA, 20 bp, Artificial Sequence
  Description of Artificial Sequence: Synthetic oligonucleotide
  Target: LAMA2; (+) strand; PAM type: YTN; PAM sequence: TTT
ttctttaatttttccaggct

SEQ ID NO: 314114 - DNA, 20 bp, Artificial Sequence
  Description of Artificial Sequence: Synthetic oligonucleotide
  Target: LAMA2; (+) strand; PAM type: YTN; PAM sequence: TTT
tctttaatttttccaggctg

SEQ ID NO: 314115 - DNA, 20 bp, Artificial Sequence
  Description of Artificial Sequence: Synthetic oligonucleotide
  Target: LAMA2; (+) strand; PAM type: YTN; PAM sequence: TTT
ctttaatttttccaggctga

SEQ ID NO: 314116 - DNA, 20 bp, Artificial Sequence
  Description of Artificial Sequence: Synthetic oligonucleotide
  Target: LAMA2; (+) strand; PAM type: YTN; PAM sequence: TTC
tttaatttttccaggctgaa

SEQ ID NO: 314117 - DNA, 20 bp, Artificial Sequence
  Description of Artificial Sequence: Synthetic oligonucleotide
  Target: LAMA2; (+) strand; PAM type: YTN; PAM sequence: CTT
taatttttccaggctgaaat

SEQ ID NO: 314118 - DNA, 20 bp, Artificial Sequence
  Description of Artificial Sequence: Synthetic oligonucleotide
  Target: LAMA2; (+) strand; PAM type: YTN; PAM sequence: TTT
aatttttccaggctgaaata

SEQ ID NO: 314119 - DNA, 20 bp, Artificial Sequence
  Description of Artificial Sequence: Synthetic oligonucleotide
  Target: LAMA2; (+) strand; PAM type: YTN; PAM sequence: TTA
atttttccaggctgaaatag

SEQ ID NO: 314120 - DNA, 20 bp, Artificial Sequence
  Description of Artificial Sequence: Synthetic oligonucleotide
  Target: LAMA2; (+) strand; PAM type: YTN; PAM sequence: TTT
ttccaggctgaaatagttat

SEQ ID NO: 314121 - DNA, 20 bp, Artificial Sequence
  Description of Artificial Sequence: Synthetic oligonucleotide
  Target: LAMA2; (+) strand; PAM type: YTN; PAM sequence: TTT
tccaggctgaaatagttatc

SEQ ID NO: 314122 - DNA, 20 bp, Artificial Sequence
  Description of Artificial Sequence: Synthetic oligonucleotide
  Target: LAMA2; (+) strand; PAM type: YTN; PAM sequence: TTT
ccaggctgaaatagttatct

SEQ ID NO: 314123 - DNA, 20 bp, Artificial Sequence
  Description of Artificial Sequence: Synthetic oligonucleotide
  Target: LAMA2; (+) strand; PAM type: YTN; PAM sequence: TTC
caggctgaaatagttatctt

SEQ ID NO: 314124 - DNA, 20 bp, Artificial Sequence
  Description of Artificial Sequence: Synthetic oligonucleotide
  Target: LAMA2; (+) strand; PAM type: YTN; PAM sequence: CTG
aaatagttatcttttaaagt

SEQ ID NO: 314125 - DNA, 20 bp, Artificial Sequence
  Description of Artificial Sequence: Synthetic oligonucleotide
  Target: LAMA2; (+) strand; PAM type: YTN; PAM sequence: TTA
tcttttaaagtctgttctac

SEQ ID NO: 314126 - DNA, 20 bp, Artificial Sequence
  Description of Artificial Sequence: Synthetic oligonucleotide
  Target: LAMA2; (+) strand; PAM type: YTN; PAM sequence: CTT
ttaaagtctgttctacagca

SEQ ID NO: 314127 - DNA, 20 bp, Artificial Sequence
  Description of Artificial Sequence: Synthetic oligonucleotide
  Target: LAMA2; (+) strand; PAM type: YTN; PAM sequence: TTT
taaagtctgttctacagcag

SEQ ID NO: 314128 - DNA, 20 bp, Artificial Sequence
  Description of Artificial Sequence: Synthetic oligonucleotide
  Target: LAMA2; (+) strand; PAM type: YTN; PAM sequence: TTT
aaagtctgttctacagcagc

SEQ ID NO: 314129 - DNA, 20 bp, Artificial Sequence
  Description of Artificial Sequence: Synthetic oligonucleotide
  Target: LAMA2; (+) strand; PAM type: YTN; PAM sequence: TTA
aagtctgttctacagcagct

SEQ ID NO: 314130 - DNA, 20 bp, Artificial Sequence
  Description of Artificial Sequence: Synthetic oligonucleotide
  Target: LAMA2; (+) strand; PAM type: YTN; PAM sequence: CTG
ttctacagcagctgctccac

SEQ ID NO: 314131 - DNA, 20 bp, Artificial Sequence
  Description of Artificial Sequence: Synthetic oligonucleotide
  Target: LAMA2; (+) strand; PAM type: YTN; PAM sequence: TTC
tacagcagctgctccacccc

SEQ ID NO: 314132 - DNA, 20 bp, Artificial Sequence
  Description of Artificial Sequence: Synthetic oligonucleotide
  Target: LAMA2; (+) strand; PAM type: YTN; PAM sequence: CTA
cagcagctgctccaccccag

SEQ ID NO: 314133 - DNA, 20 bp, Artificial Sequence
  Description of Artificial Sequence: Synthetic oligonucleotide
  Target: LAMA2; (+) strand; PAM type: YTN; PAM sequence: CTG
ctccaccccagtcattgcct

SEQ ID NO: 314134 - DNA, 20 bp, Artificial Sequence
  Description of Artificial Sequence: Synthetic oligonucleotide
  Target: LAMA2; (+) strand; PAM type: YTN; PAM sequence: CTC
caccccagtcattgccttta

SEQ ID NO: 314135 - DNA, 20 bp, Artificial Sequence
  Description of Artificial Sequence: Synthetic oligonucleotide
  Target: LAMA2; (+) strand; PAM type: YTN; PAM sequence: TTG
cctttagctttctctagatt

SEQ ID NO: 314136 - DNA, 20 bp, Artificial Sequence
  Description of Artificial Sequence: Synthetic oligonucleotide
  Target: LAMA2; (+) strand; PAM type: YTN; PAM sequence: CTT
tagctttctctagattgcca

SEQ ID NO: 314137 - DNA, 20 bp, Artificial Sequence
  Description of Artificial Sequence: Synthetic oligonucleotide
  Target: LAMA2; (+) strand; PAM type: YTN; PAM sequence: TTT
agctttctctagattgccat

SEQ ID NO: 314138 - DNA, 20 bp, Artificial Sequence
  Description of Artificial Sequence: Synthetic oligonucleotide
  Target: LAMA2; (+) strand; PAM type: YTN; PAM sequence: TTA
gctttctctagattgccatt

SEQ ID NO: 314139 - DNA, 20 bp, Artificial Sequence
  Description of Artificial Sequence: Synthetic oligonucleotide
  Target: LAMA2; (+) strand; PAM type: YTN; PAM sequence: CTT
tctctagattgccattaggc

SEQ ID NO: 314140 - DNA, 20 bp, Artificial Sequence
  Description of Artificial Sequence: Synthetic oligonucleotide
  Target: LAMA2; (+) strand; PAM type: YTN; PAM sequence: TTT
ctctagattgccattaggcc

SEQ ID NO: 314141 - DNA, 20 bp, Artificial Sequence
  Description of Artificial Sequence: Synthetic oligonucleotide
  Target: LAMA2; (+) strand; PAM type: YTN; PAM sequence: TTC
tctagattgccattaggcct

SEQ ID NO: 314142 - DNA, 20 bp, Artificial Sequence
  Description of Artificial Sequence: Synthetic oligonucleotide
  Target: LAMA2; (+) strand; PAM type: YTN; PAM sequence: CTC
tagattgccattaggccttc

SEQ ID NO: 314143 - DNA, 20 bp, Artificial Sequence
  Description of Artificial Sequence: Synthetic oligonucleotide
  Target: LAMA2; (+) strand; PAM type: YTN; PAM sequence: CTA
gattgccattaggccttctt

SEQ ID NO: 314144 - DNA, 20 bp, Artificial Sequence
  Description of Artificial Sequence: Synthetic oligonucleotide
  Target: LAMA2; (+) strand; PAM type: YTN; PAM sequence: TTG
ccattaggccttcttgaagt

SEQ ID NO: 314145 - DNA, 20 bp, Artificial Sequence
  Description of Artificial Sequence: Synthetic oligonucleotide
  Target: LAMA2; (+) strand; PAM type: YTN; PAM sequence: TTA
ggccttcttgaagtcgtgct

SEQ ID NO: 314146 - DNA, 20 bp, Artificial Sequence
  Description of Artificial Sequence: Synthetic oligonucleotide
  Target: LAMA2; (+) strand; PAM type: YTN; PAM sequence: CTT
cttgaagtcgtgcttattac

SEQ ID NO: 314147 - DNA, 20 bp, Artificial Sequence
  Description of Artificial Sequence: Synthetic oligonucleotide
  Target: LAMA2; (+) strand; PAM type: YTN; PAM sequence: TTC
ttgaagtcgtgcttattaca

SEQ ID NO: 314148 - DNA, 20 bp, Artificial Sequence
  Description of Artificial Sequence: Synthetic oligonucleotide
  Target: LAMA2; (+) strand; PAM type: YTN; PAM sequence: CTT
gaagtcgtgcttattacaga

SEQ ID NO: 314149 - DNA, 20 bp, Artificial Sequence
  Description of Artificial Sequence: Synthetic oligonucleotide
  Target: LAMA2; (+) strand; PAM type: YTN; PAM sequence: TTG
aagtcgtgcttattacagat

SEQ ID NO: 314150 - DNA, 20 bp, Artificial Sequence
  Description of Artificial Sequence: Synthetic oligonucleotide
  Target: LAMA2; (+) strand; PAM type: YTN; PAM sequence: CTT
attacagatatgtgaggagt

SEQ ID NO: 314151 - DNA, 20 bp, Artificial Sequence
  Description of Artificial Sequence: Synthetic oligonucleotide
  Target: LAMA2; (+) strand; PAM type: YTN; PAM sequence: TTA
ttacagatatgtgaggagtg

SEQ ID NO: 314152 - DNA, 20 bp, Artificial Sequence
  Description of Artificial Sequence: Synthetic oligonucleotide
  Target: LAMA2; (+) strand; PAM type: YTN; PAM sequence: TTA
cagatatgtgaggagtgctt

SEQ ID NO: 314153 - DNA, 20 bp, Artificial Sequence
  Description of Artificial Sequence: Synthetic oligonucleotide
  Target: LAMA2; (+) strand; PAM type: YTN; PAM sequence: CTT
tttttagggggggaagggga

SEQ ID NO: 314154 - DNA, 20 bp, Artificial Sequence
  Description of Artificial Sequence: Synthetic oligonucleotide
  Target: LAMA2; (+) strand; PAM type: YTN; PAM sequence: TTT
ttttagggggggaaggggag

SEQ ID NO: 314155 - DNA, 20 bp, Artificial Sequence
  Description of Artificial Sequence: Synthetic oligonucleotide
  Target: LAMA2; (+) strand; PAM type: YTN; PAM sequence: TTT
tttagggggggaaggggaga

SEQ ID NO: 314156 - DNA, 20 bp, Artificial Sequence
  Description of Artificial Sequence: Synthetic oligonucleotide
  Target: LAMA2; (+) strand; PAM type: YTN; PAM sequence: TTT
ttagggggggaaggggagaa

SEQ ID NO: 314157 - DNA, 20 bp, Artificial Sequence
  Description of Artificial Sequence: Synthetic oligonucleotide
  Target: LAMA2; (+) strand; PAM type: YTN; PAM sequence: TTT
tagggggggaaggggagaaa

SEQ ID NO: 314158 - DNA, 20 bp, Artificial Sequence
  Description of Artificial Sequence: Synthetic oligonucleotide
  Target: LAMA2; (+) strand; PAM type: YTN; PAM sequence: TTT
agggggggaaggggagaaac

SEQ ID NO: 314159 - DNA, 20 bp, Artificial Sequence
  Description of Artificial Sequence: Synthetic oligonucleotide
  Target: LAMA2; (+) strand; PAM type: YTN; PAM sequence: TTA
gggggggaaggggagaaaca

SEQ ID NO: 314160 - DNA, 20 bp, Artificial Sequence
  Description of Artificial Sequence: Synthetic oligonucleotide
  Target: LAMA2; (+) strand; PAM type: YTN; PAM sequence: CTT
ttttgttgttgtttttaaca

SEQ ID NO: 314161 - DNA, 20 bp, Artificial Sequence
  Description of Artificial Sequence: Synthetic oligonucleotide
  Target: LAMA2; (+) strand; PAM type: YTN; PAM sequence: TTT
tttgttgttgtttttaacac

SEQ ID NO: 314162 - DNA, 20 bp, Artificial Sequence
  Description of Artificial Sequence: Synthetic oligonucleotide
  Target: LAMA2; (+) strand; PAM type: YTN; PAM sequence: TTT
ttgttgttgtttttaacacc

SEQ ID NO: 314163 - DNA, 20 bp, Artificial Sequence
  Description of Artificial Sequence: Synthetic oligonucleotide
  Target: LAMA2; (+) strand; PAM type: YTN; PAM sequence: TTT
tgttgttgtttttaacaccc

SEQ ID NO: 314164 - DNA, 20 bp, Artificial Sequence
  Description of Artificial Sequence: Synthetic oligonucleotide
  Target: LAMA2; (+) strand; PAM type: YTN; PAM sequence: TTT
gttgttgtttttaacaccct

SEQ ID NO: 314165 - DNA, 20 bp, Artificial Sequence
  Description of Artificial Sequence: Synthetic oligonucleotide
  Target: LAMA2; (+) strand; PAM type: YTN; PAM sequence: TTG
ttgttgtttttaacaccctt

SEQ ID NO: 314166 - DNA, 20 bp, Artificial Sequence
  Description of Artificial Sequence: Synthetic oligonucleotide
  Target: LAMA2; (+) strand; PAM type: YTN; PAM sequence: TTG
ttgtttttaacacccttttc

SEQ ID NO: 314167 - DNA, 20 bp, Artificial Sequence
  Description of Artificial Sequence: Synthetic oligonucleotide
  Target: LAMA2; (+) strand; PAM type: YTN; PAM sequence: TTG
tttttaacacccttttctat

SEQ ID NO: 314168 - DNA, 20 bp, Artificial Sequence
  Description of Artificial Sequence: Synthetic oligonucleotide
  Target: LAMA2; (+) strand; PAM type: YTN; PAM sequence: TTT
ttaacacccttttctatgat

SEQ ID NO: 314169 - DNA, 20 bp, Artificial Sequence
  Description of Artificial Sequence: Synthetic oligonucleotide
  Target: LAMA2; (+) strand; PAM type: YTN; PAM sequence: TTT
taacacccttttctatgatg

SEQ ID NO: 314170 - DNA, 20 bp, Artificial Sequence
  Description of Artificial Sequence: Synthetic oligonucleotide
  Target: LAMA2; (+) strand; PAM type: YTN; PAM sequence: TTT
aacacccttttctatgatgg

SEQ ID NO: 314171 - DNA, 20 bp, Artificial Sequence
  Description of Artificial Sequence: Synthetic oligonucleotide
  Target: LAMA2; (+) strand; PAM type: YTN; PAM sequence: TTA
acacccttttctatgatggc

SEQ ID NO: 314172 - DNA, 20 bp, Artificial Sequence
  Description of Artificial Sequence: Synthetic oligonucleotide
  Target: LAMA2; (+) strand; PAM type: YTN; PAM sequence: CTT
ttctatgatggccagtgttt

SEQ ID NO: 314173 - DNA, 20 bp, Artificial Sequence
  Description of Artificial Sequence: Synthetic oligonucleotide
  Target: LAMA2; (+) strand; PAM type: YTN; PAM sequence: TTT
tctatgatggccagtgtttc

SEQ ID NO: 314174 - DNA, 20 bp, Artificial Sequence
  Description of Artificial Sequence: Synthetic oligonucleotide
  Target: LAMA2; (+) strand; PAM type: YTN; PAM sequence: TTT
ctatgatggccagtgtttca

SEQ ID NO: 314175 - DNA, 20 bp, Artificial Sequence
  Description of Artificial Sequence: Synthetic oligonucleotide
  Target: LAMA2; (+) strand; PAM type: YTN; PAM sequence: TTC
tatgatggccagtgtttcac

SEQ ID NO: 314176 - DNA, 20 bp, Artificial Sequence
  Description of Artificial Sequence: Synthetic oligonucleotide
  Target: LAMA2; (+) strand; PAM type: YTN; PAM sequence: CTA
tgatggccagtgtttcactg

SEQ ID NO: 314177 - DNA, 20 bp, Artificial Sequence
  Description of Artificial Sequence: Synthetic oligonucleotide
  Target: LAMA2; (+) strand; PAM type: YTN; PAM sequence: TTT
cactgatgatcttgttggct

SEQ ID NO: 314178 - DNA, 20 bp, Artificial Sequence
  Description of Artificial Sequence: Synthetic oligonucleotide
  Target: LAMA2; (+) strand; PAM type: YTN; PAM sequence: TTC
actgatgatcttgttggctg

SEQ ID NO: 314179 - DNA, 20 bp, Artificial Sequence
  Description of Artificial Sequence: Synthetic oligonucleotide
  Target: LAMA2; (+) strand; PAM type: YTN; PAM sequence: CTG
atgatcttgttggctgtctc

SEQ ID NO: 314180 - DNA, 20 bp, Artificial Sequence
  Description of Artificial Sequence: Synthetic oligonucleotide
  Target: LAMA2; (+) strand; PAM type: YTN; PAM sequence: CTT
gttggctgtctccgtggctg

SEQ ID NO: 314181 - DNA, 20 bp, Artificial Sequence
  Description of Artificial Sequence: Synthetic oligonucleotide
  Target: LAMA2; (+) strand; PAM type: YTN; PAM sequence: TTG
ttggctgtctccgtggctgg

SEQ ID NO: 314182 - DNA, 20 bp, Artificial Sequence
  Description of Artificial Sequence: Synthetic oligonucleotide
  Target: LAMA2; (+) strand; PAM type: YTN; PAM sequence: TTG
gctgtctccgtggctggatg

SEQ ID NO: 314183 - DNA, 20 bp, Artificial Sequence
  Description of Artificial Sequence: Synthetic oligonucleotide
  Target: LAMA2; (+) strand; PAM type: YTN; PAM sequence: CTG
tctccgtggctggatgagtt

SEQ ID NO: 314184 - DNA, 20 bp, Artificial Sequence
  Description of Artificial Sequence: Synthetic oligonucleotide
  Target: LAMA2; (+) strand; PAM type: YTN; PAM sequence: CTC
cgtggctggatgagttgtct

SEQ ID NO: 314185 - DNA, 20 bp, Artificial Sequence
  Description of Artificial Sequence: Synthetic oligonucleotide
  Target: LAMA2; (+) strand; PAM type: YTN; PAM sequence: CTG
gatgagttgtctcgaagagc

SEQ ID NO: 314186 - DNA, 20 bp, Artificial Sequence
  Description of Artificial Sequence: Synthetic oligonucleotide
  Target: LAMA2; (+) strand; PAM type: YTN; PAM sequence: TTG
tctcgaagagcagtttacac

SEQ ID NO: 314187 - DNA, 20 bp, Artificial Sequence
  Description of Artificial Sequence: Synthetic oligonucleotide
  Target: LAMA2; (+) strand; PAM type: YTN; PAM sequence: CTC
gaagagcagtttacactcag

SEQ ID NO: 314188 - DNA, 20 bp, Artificial Sequence
  Description of Artificial Sequence: Synthetic oligonucleotide
  Target: LAMA2; (+) strand; PAM type: YTN; PAM sequence: TTT
acactcagtagtgaccaggt

SEQ ID NO: 314189 - DNA, 20 bp, Artificial Sequence
  Description of Artificial Sequence: Synthetic oligonucleotide
  Target: LAMA2; (+) strand; PAM type: YTN; PAM sequence: TTA
cactcagtagtgaccaggtc

SEQ ID NO: 314190 - DNA, 20 bp, Artificial Sequence
  Description of Artificial Sequence: Synthetic oligonucleotide
  Target: LAMA2; (+) strand; PAM type: YTN; PAM sequence: CTC
agtagtgaccaggtccttga

SEQ ID NO: 314191 - DNA, 20 bp, Artificial Sequence
  Description of Artificial Sequence: Synthetic oligonucleotide
  Target: LAMA2; (+) strand; PAM type: YTN; PAM sequence: CTT
gagagctcttagctcatcat

SEQ ID NO: 314192 - DNA, 20 bp, Artificial Sequence
  Description of Artificial Sequence: Synthetic oligonucleotide
  Target: LAMA2; (+) strand; PAM type: YTN; PAM sequence: TTG
agagctcttagctcatcatc

SEQ ID NO: 314193 - DNA, 20 bp, Artificial Sequence
  Description of Artificial Sequence: Synthetic oligonucleotide
  Target: LAMA2; (+) strand; PAM type: YTN; PAM sequence: CTC
ttagctcatcatcctttaag

SEQ ID NO: 314194 - DNA, 20 bp, Artificial Sequence
  Description of Artificial Sequence: Synthetic oligonucleotide
  Target: LAMA2; (+) strand; PAM type: YTN; PAM sequence: CTT
agctcatcatcctttaagta

SEQ ID NO: 314195 - DNA, 20 bp, Artificial Sequence
  Description of Artificial Sequence: Synthetic oligonucleotide
  Target: LAMA2; (+) strand; PAM type: YTN; PAM sequence: TTA
gctcatcatcctttaagtat

SEQ ID NO: 314196 - DNA, 20 bp, Artificial Sequence
  Description of Artificial Sequence: Synthetic oligonucleotide
  Target: LAMA2; (+) strand; PAM type: YTN; PAM sequence: CTC
atcatcctttaagtatagtt

SEQ ID NO: 314197 - DNA, 20 bp, Artificial Sequence
  Description of Artificial Sequence: Synthetic oligonucleotide
  Target: LAMA2; (+) strand; PAM type: YTN; PAM sequence: CTT
taagtatagtttggagtatt

SEQ ID NO: 314198 - DNA, 20 bp, Artificial Sequence
  Description of Artificial Sequence: Synthetic oligonucleotide
  Target: LAMA2; (+) strand; PAM type: YTN; PAM sequence: TTT
aagtatagtttggagtattc

SEQ ID NO: 314199 - DNA, 20 bp, Artificial Sequence
  Description of Artificial Sequence: Synthetic oligonucleotide
  Target: LAMA2; (+) strand; PAM type: YTN; PAM sequence: TTA
agtatagtttggagtattct

SEQ ID NO: 314200 - DNA, 20 bp, Artificial Sequence
  Description of Artificial Sequence: Synthetic oligonucleotide
  Target: LAMA2; (+) strand; PAM type: YTN; PAM sequence: TTT
ggagtattcttcccaggctg

SEQ ID NO: 314201 - DNA, 20 bp, Artificial Sequence
  Description of Artificial Sequence: Synthetic oligonucleotide
  Target: LAMA2; (+) strand; PAM type: YTN; PAM sequence: TTG
gagtattcttcccaggctgt

SEQ ID NO: 314202 - DNA, 20 bp, Artificial Sequence
  Description of Artificial Sequence: Synthetic oligonucleotide
  Target: LAMA2; (+) strand; PAM type: YTN; PAM sequence: TTC
ttcccaggctgtactacttc

SEQ ID NO: 314203 - DNA, 20 bp, Artificial Sequence
  Description of Artificial Sequence: Synthetic oligonucleotide
  Target: LAMA2; (+) strand; PAM type: YTN; PAM sequence: CTT
cccaggctgtactacttcat

SEQ ID NO: 314204 - DNA, 20 bp, Artificial Sequence
  Description of Artificial Sequence: Synthetic oligonucleotide
  Target: LAMA2; (+) strand; PAM type: YTN; PAM sequence: TTC
ccaggctgtactacttcatg

SEQ ID NO: 314205 - DNA, 20 bp, Artificial Sequence
  Description of Artificial Sequence: Synthetic oligonucleotide
  Target: LAMA2; (+) strand; PAM type: YTN; PAM sequence: CTG
tactacttcatgcatttttt

SEQ ID NO: 314206 - DNA, 20 bp, Artificial Sequence
  Description of Artificial Sequence: Synthetic oligonucleotide
  Target: LAMA2; (+) strand; PAM type: YTN; PAM sequence: CTA
cttcatgcattttttttttt

SEQ ID NO: 314207 - DNA, 20 bp, Artificial Sequence
  Description of Artificial Sequence: Synthetic oligonucleotide
  Target: LAMA2; (+) strand; PAM type: YTN; PAM sequence: CTT
catgcatttttttttttttt

SEQ ID NO: 314208 - DNA, 20 bp, Artificial Sequence
  Description of Artificial Sequence: Synthetic oligonucleotide
  Target: LAMA2; (+) strand; PAM type: YTN; PAM sequence: TTC
atgcattttttttttttttt

SEQ ID NO: 314209 - DNA, 20 bp, Artificial Sequence
  Description of Artificial Sequence: Synthetic oligonucleotide
  Target: LAMA2; (+) strand; PAM type: YTN; PAM sequence: TTT
tttttttttttttttttttt

SEQ ID NO: 314210 - DNA, 20 bp, Artificial Sequence
  Description of Artificial Sequence: Synthetic oligonucleotide
  Target: LAMA2; (+) strand; PAM type: YTN; PAM sequence: TTT
tttttttttttttttttttg

SEQ ID NO: 314211 - DNA, 20 bp, Artificial Sequence
  Description of Artificial Sequence: Synthetic oligonucleotide
  Target: LAMA2; (+) strand; PAM type: YTN; PAM sequence: TTT
ttttttttttttttttttgc

SEQ ID NO: 314212 - DNA, 20 bp, Artificial Sequence
  Description of Artificial Sequence: Synthetic oligonucleotide
  Target: LAMA2; (+) strand; PAM type: YTN; PAM sequence: TTT
tttttttttttttttttgcc

SEQ ID NO: 314213 - DNA, 20 bp, Artificial Sequence
  Description of Artificial Sequence: Synthetic oligonucleotide
  Target: LAMA2; (+) strand; PAM type: YTN; PAM sequence: TTT
ttttttttttttttttgcct

SEQ ID NO: 314214 - DNA, 20 bp, Artificial Sequence
  Description of Artificial Sequence: Synthetic oligonucleotide
  Target: LAMA2; (+) strand; PAM type: YTN; PAM sequence: TTT
tttttttttttttttgccta

SEQ ID NO: 314215 - DNA, 20 bp, Artificial Sequence
  Description of Artificial Sequence: Synthetic oligonucleotide
  Target: LAMA2; (+) strand; PAM type: YTN; PAM sequence: TTT
ttttttttttttttgcctat

SEQ ID NO: 314216 - DNA, 20 bp, Artificial Sequence
  Description of Artificial Sequence: Synthetic oligonucleotide
  Target: LAMA2; (+) strand; PAM type: YTN; PAM sequence: TTT
tttttttttttttgcctatt

SEQ ID NO: 314217 - DNA, 20 bp, Artificial Sequence
  Description of Artificial Sequence: Synthetic oligonucleotide
  Target: LAMA2; (+) strand; PAM type: YTN; PAM sequence: TTT
ttttttttttttgcctattg

SEQ ID NO: 314218 - DNA, 20 bp, Artificial Sequence
  Description of Artificial Sequence: Synthetic oligonucleotide
  Target: LAMA2; (+) strand; PAM type: YTN; PAM sequence: TTT
tttttttttttgcctattgt

SEQ ID NO: 314219 - DNA, 20 bp, Artificial Sequence
  Description of Artificial Sequence: Synthetic oligonucleotide
  Target: LAMA2; (+) strand; PAM type: YTN; PAM sequence: TTT
ttttttttttgcctattgta

SEQ ID NO: 314220 - DNA, 20 bp, Artificial Sequence
  Description of Artificial Sequence: Synthetic oligonucleotide
  Target: LAMA2; (+) strand; PAM type: YTN; PAM sequence: TTT
tttttttttgcctattgtat

SEQ ID NO: 314221 - DNA, 20 bp, Artificial Sequence
  Description of Artificial Sequence: Synthetic oligonucleotide
  Target: LAMA2; (+) strand; PAM type: YTN; PAM sequence: TTT
ttttttttgcctattgtatt

SEQ ID NO: 314222 - DNA, 20 bp, Artificial Sequence
  Description of Artificial Sequence: Synthetic oligonucleotide
  Target: LAMA2; (+) strand; PAM type: YTN; PAM sequence: TTT
tttttttgcctattgtattt

SEQ ID NO: 314223 - DNA, 20 bp, Artificial Sequence
  Description of Artificial Sequence: Synthetic oligonucleotide
  Target: LAMA2; (+) strand; PAM type: YTN; PAM sequence: TTT
ttttttgcctattgtattta

SEQ ID NO: 314224 - DNA, 20 bp, Artificial Sequence
  Description of Artificial Sequence: Synthetic oligonucleotide
  Target: LAMA2; (+) strand; PAM type: YTN; PAM sequence: TTT
tttttgcctattgtatttag

SEQ ID NO: 314225 - DNA, 20 bp, Artificial Sequence
  Description of Artificial Sequence: Synthetic oligonucleotide
  Target: LAMA2; (+) strand; PAM type: YTN; PAM sequence: TTT
ttttgcctattgtatttaga

SEQ ID NO: 314226 - DNA, 20 bp, Artificial Sequence
  Description of Artificial Sequence: Synthetic oligonucleotide
  Target: LAMA2; (+) strand; PAM type: YTN; PAM sequence: TTT
tttgcctattgtatttagag

SEQ ID NO: 314227 - DNA, 20 bp, Artificial Sequence
  Description of Artificial Sequence: Synthetic oligonucleotide
  Target: LAMA2; (+) strand; PAM type: YTN; PAM sequence: TTT
ttgcctattgtatttagagt

SEQ ID NO: 314228 - DNA, 20 bp, Artificial Sequence
  Description of Artificial Sequence: Synthetic oligonucleotide
  Target: LAMA2; (+) strand; PAM type: YTN; PAM sequence: TTT
tgcctattgtatttagagtt

SEQ ID NO: 314229 - DNA, 20 bp, Artificial Sequence
  Description of Artificial Sequence: Synthetic oligonucleotide
  Target: LAMA2; (+) strand; PAM type: YTN; PAM sequence: TTT
gcctattgtatttagagttt

SEQ ID NO: 314230 - DNA, 20 bp, Artificial Sequence
  Description of Artificial Sequence: Synthetic oligonucleotide
  Target: LAMA2; (+) strand; PAM type: YTN; PAM sequence: TTG
cctattgtatttagagtttt

SEQ ID NO: 314231 - DNA, 20 bp, Artificial Sequence
  Description of Artificial Sequence: Synthetic oligonucleotide
  Target: LAMA2; (+) strand; PAM type: YTN; PAM sequence: CTA
ttgtatttagagtttttcct

SEQ ID NO: 314232 - DNA, 20 bp, Artificial Sequence
  Description of Artificial Sequence: Synthetic oligonucleotide
  Target: LAMA2; (+) strand; PAM type: YTN; PAM sequence: TTG
tatttagagtttttcctgaa

SEQ ID NO: 314233 - DNA, 20 bp, Artificial Sequence
  Description of Artificial Sequence: Synthetic oligonucleotide
  Target: LAMA2; (+) strand; PAM type: YTN; PAM sequence: TTT
agagtttttcctgaaatgaa

SEQ ID NO: 314234 - DNA, 20 bp, Artificial Sequence
  Description of Artificial Sequence: Synthetic oligonucleotide
  Target: LAMA2; (+) strand; PAM type: YTN; PAM sequence: TTA
gagtttttcctgaaatgaat

SEQ ID NO: 314235 - DNA, 20 bp, Artificial Sequence
  Description of Artificial Sequence: Synthetic oligonucleotide
  Target: LAMA2; (+) strand; PAM type: YTN; PAM sequence: TTT
ttcctgaaatgaatttctca

SEQ ID NO: 314236 - DNA, 20 bp, Artificial Sequence
  Description of Artificial Sequence: Synthetic oligonucleotide
  Target: LAMA2; (+) strand; PAM type: YTN; PAM sequence: TTT
tcctgaaatgaatttctcac

SEQ ID NO: 314237 - DNA, 20 bp, Artificial Sequence
  Description of Artificial Sequence: Synthetic oligonucleotide
  Target: LAMA2; (+) strand; PAM type: YTN; PAM sequence: TTT
cctgaaatgaatttctcact

SEQ ID NO: 314238 - DNA, 20 bp, Artificial Sequence
  Description of Artificial Sequence: Synthetic oligonucleotide
  Target: LAMA2; (+) strand; PAM type: YTN; PAM sequence: TTC
ctgaaatgaatttctcacta

SEQ ID NO: 314239 - DNA, 20 bp, Artificial Sequence
  Description of Artificial Sequence: Synthetic oligonucleotide
  Target: LAMA2; (+) strand; PAM type: YTN; PAM sequence: CTG
aaatgaatttctcactatgt

SEQ ID NO: 314240 - DNA, 20 bp, Artificial Sequence
  Description of Artificial Sequence: Synthetic oligonucleotide
  Target: LAMA2; (+) strand; PAM type: YTN; PAM sequence: TTT
ctcactatgtatttgactat

SEQ ID NO: 314241 - DNA, 20 bp, Artificial Sequence
  Description of Artificial Sequence: Synthetic oligonucleotide
  Target: LAMA2; (+) strand; PAM type: YTN; PAM sequence: TTC
tcactatgtatttgactatc

SEQ ID NO: 314242 - DNA, 20 bp, Artificial Sequence
  Description of Artificial Sequence: Synthetic oligonucleotide
  Target: LAMA2; (+) strand; PAM type: YTN; PAM sequence: CTC
actatgtatttgactatcaa

SEQ ID NO: 314243 - DNA, 20 bp, Artificial Sequence
  Description of Artificial Sequence: Synthetic oligonucleotide
  Target: LAMA2; (+) strand; PAM type: YTN; PAM sequence: CTA
tgtatttgactatcaagaag

SEQ ID NO: 314244 - DNA, 20 bp, Artificial Sequence
  Description of Artificial Sequence: Synthetic oligonucleotide
  Target: LAMA2; (+) strand; PAM type: YTN; PAM sequence: TTT
gactatcaagaagagttgta

SEQ ID NO: 314245 - DNA, 20 bp, Artificial Sequence
  Description of Artificial Sequence: Synthetic oligonucleotide
  Target: LAMA2; (+) strand; PAM type: YTN; PAM sequence: TTG
actatcaagaagagttgtat

SEQ ID NO: 314246 - DNA, 20 bp, Artificial Sequence
  Description of Artificial Sequence: Synthetic oligonucleotide
  Target: LAMA2; (+) strand; PAM type: YTN; PAM sequence: CTA
tcaagaagagttgtatcatc

SEQ ID NO: 314247 - DNA, 20 bp, Artificial Sequence
  Description of Artificial Sequence: Synthetic oligonucleotide
  Target: LAMA2; (+) strand; PAM type: YTN; PAM sequence: TTG
tatcatctgcaagtttgagg

SEQ ID NO: 314248 - DNA, 20 bp, Artificial Sequence
  Description of Artificial Sequence: Synthetic oligonucleotide
  Target: LAMA2; (+) strand; PAM type: YTN; PAM sequence: CTG
caagtttgaggtttcacttg

SEQ ID NO: 314249 - DNA, 20 bp, Artificial Sequence
  Description of Artificial Sequence: Synthetic oligonucleotide
  Target: LAMA2; (+) strand; PAM type: YTN; PAM sequence: TTT
gaggtttcacttgaaaatcc

SEQ ID NO: 314250 - DNA, 20 bp, Artificial Sequence
  Description of Artificial Sequence: Synthetic oligonucleotide
  Target: LAMA2; (+) strand; PAM type: YTN; PAM sequence: TTG
aggtttcacttgaaaatcct

SEQ ID NO: 314251 - DNA, 20 bp, Artificial Sequence
  Description of Artificial Sequence: Synthetic oligonucleotide
  Target: LAMA2; (+) strand; PAM type: YTN; PAM sequence: TTT
cacttgaaaatcctattagc

SEQ ID NO: 314252 - DNA, 20 bp, Artificial Sequence
  Description of Artificial Sequence: Synthetic oligonucleotide
  Target: LAMA2; (+) strand; PAM type: YTN; PAM sequence: TTC
acttgaaaatcctattagcc

SEQ ID NO: 314253 - DNA, 20 bp, Artificial Sequence
  Description of Artificial Sequence: Synthetic oligonucleotide
  Target: LAMA2; (+) strand; PAM type: YTN; PAM sequence: CTT
gaaaatcctattagcccata

SEQ ID NO: 314254 - DNA, 20 bp, Artificial Sequence
  Description of Artificial Sequence: Synthetic oligonucleotide
  Target: LAMA2; (+) strand; PAM type: YTN; PAM sequence: TTG
aaaatcctattagcccatac

SEQ ID NO: 314255 - DNA, 20 bp, Artificial Sequence
  Description of Artificial Sequence: Synthetic oligonucleotide
  Target: LAMA2; (+) strand; PAM type: YTN; PAM sequence: CTA
ttagcccatacagggaataa

SEQ ID NO: 314256 - DNA, 20 bp, Artificial Sequence
  Description of Artificial Sequence: Synthetic oligonucleotide
  Target: LAMA2; (+) strand; PAM type: YTN; PAM sequence: TTA
gcccatacagggaataattc

SEQ ID NO: 314257 - DNA, 20 bp, Artificial Sequence
  Description of Artificial Sequence: Synthetic oligonucleotide
  Target: LAMA2; (+) strand; PAM type: YTN; PAM sequence: TTC
attccagtaggttcttaata

SEQ ID NO: 314258 - DNA, 20 bp, Artificial Sequence
  Description of Artificial Sequence: Synthetic oligonucleotide
  Target: LAMA2; (+) strand; PAM type: YTN; PAM sequence: TTC
cagtaggttcttaatagccc

SEQ ID NO: 314259 - DNA, 20 bp, Artificial Sequence
  Description of Artificial Sequence: Synthetic oligonucleotide
  Target: LAMA2; (+) strand; PAM type: YTN; PAM sequence: TTC
ttaatagcccttccctgttc

SEQ ID NO: 314260 - DNA, 20 bp, Artificial Sequence
  Description of Artificial Sequence: Synthetic oligonucleotide
  Target: LAMA2; (+) strand; PAM type: YTN; PAM sequence: CTT
aatagcccttccctgttccc

SEQ ID NO: 314261 - DNA, 20 bp, Artificial Sequence
  Description of Artificial Sequence: Synthetic oligonucleotide
  Target: LAMA2; (+) strand; PAM type: YTN; PAM sequence: TTA
atagcccttccctgttccct

SEQ ID NO: 314262 - DNA, 20 bp, Artificial Sequence
  Description of Artificial Sequence: Synthetic oligonucleotide
  Target: LAMA2; (+) strand; PAM type: YTN; PAM sequence: CTT
ccctgttccctgtttctaat

SEQ ID NO: 314263 - DNA, 20 bp, Artificial Sequence
  Description of Artificial Sequence: Synthetic oligonucleotide
  Target: LAMA2; (+) strand; PAM type: YTN; PAM sequence: TTC
cctgttccctgtttctaatc

SEQ ID NO: 314264 - DNA, 20 bp, Artificial Sequence
  Description of Artificial Sequence: Synthetic oligonucleotide
  Target: LAMA2; (+) strand; PAM type: YTN; PAM sequence: CTG
ttccctgtttctaatccatt

SEQ ID NO: 314265 - DNA, 20 bp, Artificial Sequence
  Description of Artificial Sequence: Synthetic oligonucleotide
  Target: LAMA2; (+) strand; PAM type: YTN; PAM sequence: TTC
cctgtttctaatccatttat

SEQ ID NO: 314266 - DNA, 20 bp, Artificial Sequence
  Description of Artificial Sequence: Synthetic oligonucleotide
  Target: LAMA2; (+) strand; PAM type: YTN; PAM sequence: CTG
tttctaatccatttattgct

SEQ ID NO: 314267 - DNA, 20 bp, Artificial Sequence
  Description of Artificial Sequence: Synthetic oligonucleotide
  Target: LAMA2; (+) strand; PAM type: YTN; PAM sequence: TTT
ctaatccatttattgctctt

SEQ ID NO: 314268 - DNA, 20 bp, Artificial Sequence
  Description of Artificial Sequence: Synthetic oligonucleotide
  Target: LAMA2; (+) strand; PAM type: YTN; PAM sequence: TTC
taatccatttattgctcttt

SEQ ID NO: 314269 - DNA, 20 bp, Artificial Sequence
  Description of Artificial Sequence: Synthetic oligonucleotide
  Target: LAMA2; (+) strand; PAM type: YTN; PAM sequence: CTA
atccatttattgctctttaa

SEQ ID NO: 314270 - DNA, 20 bp, Artificial Sequence
  Description of Artificial Sequence: Synthetic oligonucleotide
  Target: LAMA2; (+) strand; PAM type: YTN; PAM sequence: TTT
attgctctttaaagattacc

SEQ ID NO: 314271 - DNA, 20 bp, Artificial Sequence
  Description of Artificial Sequence: Synthetic oligonucleotide
  Target: LAMA2; (+) strand; PAM type: YTN; PAM sequence: TTA
ttgctctttaaagattacca

SEQ ID NO: 314272 - DNA, 20 bp, Artificial Sequence
  Description of Artificial Sequence: Synthetic oligonucleotide
  Target: LAMA2; (+) strand; PAM type: YTN; PAM sequence: TTG
ctctttaaagattaccatgt

SEQ ID NO: 314273 - DNA, 20 bp, Artificial Sequence
  Description of Artificial Sequence: Synthetic oligonucleotide
  Target: LAMA2; (+) strand; PAM type: YTN; PAM sequence: CTC
tttaaagattaccatgtact

SEQ ID NO: 314274 - DNA, 20 bp, Artificial Sequence
  Description of Artificial Sequence: Synthetic oligonucleotide
  Target: LAMA2; (+) strand; PAM type: YTN; PAM sequence: CTT
taaagattaccatgtactcc

SEQ ID NO: 314275 - DNA, 20 bp, Artificial Sequence
  Description of Artificial Sequence: Synthetic oligonucleotide
  Target: LAMA2; (+) strand; PAM type: YTN; PAM sequence: TTT
aaagattaccatgtactcct

SEQ ID NO: 314276 - DNA, 20 bp, Artificial Sequence
  Description of Artificial Sequence: Synthetic oligonucleotide
  Target: LAMA2; (+) strand; PAM type: YTN; PAM sequence: TTA
aagattaccatgtactcctt

SEQ ID NO: 314277 - DNA, 20 bp, Artificial Sequence
  Description of Artificial Sequence: Synthetic oligonucleotide
  Target: LAMA2; (+) strand; PAM type: YTN; PAM sequence: TTA
ccatgtactcctttttctta

SEQ ID NO: 314278 - DNA, 20 bp, Artificial Sequence
  Description of Artificial Sequence: Synthetic oligonucleotide
  Target: LAMA2; (+) strand; PAM type: YTN; PAM sequence: CTC
ctttttcttattataaaata

SEQ ID NO: 314279 - DNA, 20 bp, Artificial Sequence
  Description of Artificial Sequence: Synthetic oligonucleotide
  Target: LAMA2; (+) strand; PAM type: YTN; PAM sequence: CTT
tttcttattataaaatattg

SEQ ID NO: 314280 - DNA, 20 bp, Artificial Sequence
  Description of Artificial Sequence: Synthetic oligonucleotide
  Target: LAMA2; (+) strand; PAM type: YTN; PAM sequence: TTT
ttcttattataaaatattgc

SEQ ID NO: 314281 - DNA, 20 bp, Artificial Sequence
  Description of Artificial Sequence: Synthetic oligonucleotide
  Target: LAMA2; (+) strand; PAM type: YTN; PAM sequence: TTT
tcttattataaaatattgca

SEQ ID NO: 314282 - DNA, 20 bp, Artificial Sequence
  Description of Artificial Sequence: Synthetic oligonucleotide
  Target: LAMA2; (+) strand; PAM type: YTN; PAM sequence: TTT
cttattataaaatattgcat

SEQ ID NO: 314283 - DNA, 20 bp, Artificial Sequence
  Description of Artificial Sequence: Synthetic oligonucleotide
  Target: LAMA2; (+) strand; PAM type: YTN; PAM sequence: TTC
ttattataaaatattgcata

SEQ ID NO: 314284 - DNA, 20 bp, Artificial Sequence
  Description of Artificial Sequence: Synthetic oligonucleotide
  Target: LAMA2; (+) strand; PAM type: YTN; PAM sequence: CTT
attataaaatattgcatatt

SEQ ID NO: 314285 - DNA, 20 bp, Artificial Sequence
  Description of Artificial Sequence: Synthetic oligonucleotide
  Target: LAMA2; (+) strand; PAM type: YTN; PAM sequence: TTA
ttataaaatattgcatattc

SEQ ID NO: 314286 - DNA, 20 bp, Artificial Sequence
  Description of Artificial Sequence: Synthetic oligonucleotide
  Target: LAMA2; (+) strand; PAM type: YTN; PAM sequence: TTA
taaaatattgcatattcata

SEQ ID NO: 314287 - DNA, 20 bp, Artificial Sequence
  Description of Artificial Sequence: Synthetic oligonucleotide
  Target: LAMA2; (+) strand; PAM type: YTN; PAM sequence: TTG
catattcatattaaaatctg

SEQ ID NO: 314288 - DNA, 20 bp, Artificial Sequence
  Description of Artificial Sequence: Synthetic oligonucleotide
  Target: LAMA2; (+) strand; PAM type: YTN; PAM sequence: TTC
atattaaaatctggaaaatt

SEQ ID NO: 314289 - DNA, 20 bp, Artificial Sequence
  Description of Artificial Sequence: Synthetic oligonucleotide
  Target: LAMA2; (+) strand; PAM type: YTN; PAM sequence: TTA
aaatctggaaaattcataga

SEQ ID NO: 314290 - DNA, 20 bp, Artificial Sequence
  Description of Artificial Sequence: Synthetic oligonucleotide
  Target: LAMA2; (+) strand; PAM type: YTN; PAM sequence: CTG
gaaaattcatagaagcagaa

SEQ ID NO: 314291 - DNA, 20 bp, Artificial Sequence
  Description of Artificial Sequence: Synthetic oligonucleotide
  Target: LAMA2; (+) strand; PAM type: YTN; PAM sequence: TTC
atagaagcagaaataagtaa

SEQ ID NO: 314292 - DNA, 20 bp, Artificial Sequence
  Description of Artificial Sequence: Synthetic oligonucleotide
  Target: LAMA2; (+) strand; PAM type: YTN; PAM sequence: CTA
atgaatcaaaaacaatgtca

SEQ ID NO: 314293 - DNA, 20 bp, Artificial Sequence
  Description of Artificial Sequence: Synthetic oligonucleotide
  Target: LAMA2; (+) strand; PAM type: YTN; PAM sequence: TTT
cttaatcattacaattattt

SEQ ID NO: 314294 - DNA, 20 bp, Artificial Sequence
  Description of Artificial Sequence: Synthetic oligonucleotide
  Target: LAMA2; (+) strand; PAM type: YTN; PAM sequence: TTC
ttaatcattacaattattta

SEQ ID NO: 314295 - DNA, 20 bp, Artificial Sequence
  Description of Artificial Sequence: Synthetic oligonucleotide
  Target: LAMA2; (+) strand; PAM type: YTN; PAM sequence: CTT
aatcattacaattatttatg

SEQ ID NO: 314296 - DNA, 20 bp, Artificial Sequence
  Description of Artificial Sequence: Synthetic oligonucleotide
  Target: LAMA2; (+) strand; PAM type: YTN; PAM sequence: TTA
atcattacaattatttatga

SEQ ID NO: 314297 - DNA, 20 bp, Artificial Sequence
  Description of Artificial Sequence: Synthetic oligonucleotide
  Target: LAMA2; (+) strand; PAM type: YTN; PAM sequence: TTA
caattatttatgaattttgg

SEQ ID NO: 314298 - DNA, 20 bp, Artificial Sequence
  Description of Artificial Sequence: Synthetic oligonucleotide
  Target: LAMA2; (+) strand; PAM type: YTN; PAM sequence: TTA
tttatgaattttggttttaa

SEQ ID NO: 314299 - DNA, 20 bp, Artificial Sequence
  Description of Artificial Sequence: Synthetic oligonucleotide
  Target: LAMA2; (+) strand; PAM type: YTN; PAM sequence: TTT
atgaattttggttttaattt

SEQ ID NO: 314300 - DNA, 20 bp, Artificial Sequence
  Description of Artificial Sequence: Synthetic oligonucleotide
  Target: LAMA2; (+) strand; PAM type: YTN; PAM sequence: TTA
tgaattttggttttaatttt

SEQ ID NO: 314301 - DNA, 20 bp, Artificial Sequence
  Description of Artificial Sequence: Synthetic oligonucleotide
  Target: LAMA2; (+) strand; PAM type: YTN; PAM sequence: TTT
tggttttaatttttcaacat

SEQ ID NO: 314302 - DNA, 20 bp, Artificial Sequence
  Description of Artificial Sequence: Synthetic oligonucleotide
  Target: LAMA2; (+) strand; PAM type: YTN; PAM sequence: TTT
ggttttaatttttcaacatt

SEQ ID NO: 314303 - DNA, 20 bp, Artificial Sequence
  Description of Artificial Sequence: Synthetic oligonucleotide
  Target: LAMA2; (+) strand; PAM type: YTN; PAM sequence: TTG
gttttaatttttcaacattt

SEQ ID NO: 314304 - DNA, 20 bp, Artificial Sequence
  Description of Artificial Sequence: Synthetic oligonucleotide
  Target: LAMA2; (+) strand; PAM type: YTN; PAM sequence: TTT
taatttttcaacatttggtc

SEQ ID NO: 314305 - DNA, 20 bp, Artificial Sequence
  Description of Artificial Sequence: Synthetic oligonucleotide
  Target: LAMA2; (+) strand; PAM type: YTN; PAM sequence: TTT
aatttttcaacatttggtct

SEQ ID NO: 314306 - DNA, 20 bp, Artificial Sequence
  Description of Artificial Sequence: Synthetic oligonucleotide
  Target: LAMA2; (+) strand; PAM type: YTN; PAM sequence: TTA
atttttcaacatttggtcta

SEQ ID NO: 314307 - DNA, 20 bp, Artificial Sequence
  Description of Artificial Sequence: Synthetic oligonucleotide
  Target: LAMA2; (+) strand; PAM type: YTN; PAM sequence: TTT
ttcaacatttggtctacttg

SEQ ID NO: 314308 - DNA, 20 bp, Artificial Sequence
  Description of Artificial Sequence: Synthetic oligonucleotide
  Target: LAMA2; (+) strand; PAM type: YTN; PAM sequence: TTT
tcaacatttggtctacttga

SEQ ID NO: 314309 - DNA, 20 bp, Artificial Sequence
  Description of Artificial Sequence: Synthetic oligonucleotide
  Target: LAMA2; (+) strand; PAM type: YTN; PAM sequence: TTT
caacatttggtctacttgat

SEQ ID NO: 314310 - DNA, 20 bp, Artificial Sequence
  Description of Artificial Sequence: Synthetic oligonucleotide
  Target: LAMA2; (+) strand; PAM type: YTN; PAM sequence: TTC
aacatttggtctacttgatg

SEQ ID NO: 314311 - DNA, 20 bp, Artificial Sequence
  Description of Artificial Sequence: Synthetic oligonucleotide
  Target: LAMA2; (+) strand; PAM type: YTN; PAM sequence: TTT
ggtctacttgatgtgtggca

SEQ ID NO: 314312 - DNA, 20 bp, Artificial Sequence
  Description of Artificial Sequence: Synthetic oligonucleotide
  Target: LAMA2; (+) strand; PAM type: YTN; PAM sequence: TTG
gtctacttgatgtgtggcac

SEQ ID NO: 314313 - DNA, 20 bp, Artificial Sequence
  Description of Artificial Sequence: Synthetic oligonucleotide
  Target: LAMA2; (+) strand; PAM type: YTN; PAM sequence: CTA
cttgatgtgtggcacacatt

SEQ ID NO: 314314 - DNA, 20 bp, Artificial Sequence
  Description of Artificial Sequence: Synthetic oligonucleotide
  Target: LAMA2; (+) strand; PAM type: YTN; PAM sequence: CTT
gatgtgtggcacacattgtt

SEQ ID NO: 314315 - DNA, 20 bp, Artificial Sequence
  Description of Artificial Sequence: Synthetic oligonucleotide
  Target: LAMA2; (+) strand; PAM type: YTN; PAM sequence: TTG
atgtgtggcacacattgttc

SEQ ID NO: 314316 - DNA, 20 bp, Artificial Sequence
  Description of Artificial Sequence: Synthetic oligonucleotide
  Target: LAMA2; (+) strand; PAM type: YTN; PAM sequence: TTG
ttctatgaaatccaaacagt

SEQ ID NO: 314317 - DNA, 20 bp, Artificial Sequence
  Description of Artificial Sequence: Synthetic oligonucleotide
  Target: LAMA2; (+) strand; PAM type: YTN; PAM sequence: TTC
tatgaaatccaaacagtgtt

SEQ ID NO: 314318 - DNA, 20 bp, Artificial Sequence
  Description of Artificial Sequence: Synthetic oligonucleotide
  Target: LAMA2; (+) strand; PAM type: YTN; PAM sequence: CTA
tgaaatccaaacagtgttat

SEQ ID NO: 314319 - DNA, 20 bp, Artificial Sequence
  Description of Artificial Sequence: Synthetic oligonucleotide
  Target: LAMA2; (+) strand; PAM type: YTN; PAM sequence: TTA
ttgtaaagtctctgggcttc

SEQ ID NO: 314320 - DNA, 20 bp, Artificial Sequence
  Description of Artificial Sequence: Synthetic oligonucleotide
  Target: LAMA2; (+) strand; PAM type: YTN; PAM sequence: TTG
taaagtctctgggcttctta

SEQ ID NO: 314321 - DNA, 20 bp, Artificial Sequence
  Description of Artificial Sequence: Synthetic oligonucleotide
  Target: LAMA2; (+) strand; PAM type: YTN; PAM sequence: CTC
tgggcttcttagagcaaaag

SEQ ID NO: 314322 - DNA, 20 bp, Artificial Sequence
  Description of Artificial Sequence: Synthetic oligonucleotide
  Target: LAMA2; (+) strand; PAM type: YTN; PAM sequence: CTG
ggcttcttagagcaaaagtt

SEQ ID NO: 314323 - DNA, 20 bp, Artificial Sequence
  Description of Artificial Sequence: Synthetic oligonucleotide
  Target: LAMA2; (+) strand; PAM type: YTN; PAM sequence: CTT
cttagagcaaaagttttaaa

SEQ ID NO: 314324 - DNA, 20 bp, Artificial Sequence
  Description of Artificial Sequence: Synthetic oligonucleotide
  Target: LAMA2; (+) strand; PAM type: YTN; PAM sequence: TTC
ttagagcaaaagttttaaaa

SEQ ID NO: 314325 - DNA, 20 bp, Artificial Sequence
  Description of Artificial Sequence: Synthetic oligonucleotide
  Target: LAMA2; (+) strand; PAM type: YTN; PAM sequence: CTT
agagcaaaagttttaaaacc

SEQ ID NO: 314326 - DNA, 20 bp, Artificial Sequence
  Description of Artificial Sequence: Synthetic oligonucleotide
  Target: LAMA2; (+) strand; PAM type: YTN; PAM sequence: TTA
gagcaaaagttttaaaacca

SEQ ID NO: 314327 - DNA, 20 bp, Artificial Sequence
  Description of Artificial Sequence: Synthetic oligonucleotide
  Target: LAMA2; (+) strand; PAM type: YTN; PAM sequence: TTT
taaaaccatcatttatatgt

SEQ ID NO: 314328 - DNA, 20 bp, Artificial Sequence
  Description of Artificial Sequence: Synthetic oligonucleotide
  Target: LAMA2; (+) strand; PAM type: YTN; PAM sequence: TTT
aaaaccatcatttatatgtt

SEQ ID NO: 314329 - DNA, 20 bp, Artificial Sequence
  Description of Artificial Sequence: Synthetic oligonucleotide
  Target: LAMA2; (+) strand; PAM type: YTN; PAM sequence: TTA
aaaccatcatttatatgttt

SEQ ID NO: 314330 - DNA, 20 bp, Artificial Sequence
  Description of Artificial Sequence: Synthetic oligonucleotide
  Target: LAMA2; (+) strand; PAM type: YTN; PAM sequence: TTT
atatgtttaatatattttta

SEQ ID NO: 314331 - DNA, 20 bp, Artificial Sequence
  Description of Artificial Sequence: Synthetic oligonucleotide
  Target: LAMA2; (+) strand; PAM type: YTN; PAM sequence: TTA
tatgtttaatatatttttat

SEQ ID NO: 314332 - DNA, 20 bp, Artificial Sequence
  Description of Artificial Sequence: Synthetic oligonucleotide
  Target: LAMA2; (+) strand; PAM type: YTN; PAM sequence: TTT
aatatatttttatctatttc

SEQ ID NO: 314333 - DNA, 20 bp, Artificial Sequence
  Description of Artificial Sequence: Synthetic oligonucleotide
  Target: LAMA2; (+) strand; PAM type: YTN; PAM sequence: TTA
atatatttttatctatttct

SEQ ID NO: 314334 - DNA, 20 bp, Artificial Sequence
  Description of Artificial Sequence: Synthetic oligonucleotide
  Target: LAMA2; (+) strand; PAM type: YTN; PAM sequence: TTT
ttatctatttctagatttat

SEQ ID NO: 314335 - DNA, 20 bp, Artificial Sequence
  Description of Artificial Sequence: Synthetic oligonucleotide
  Target: LAMA2; (+) strand; PAM type: YTN; PAM sequence: TTT
tatctatttctagatttatt

SEQ ID NO: 314336 - DNA, 20 bp, Artificial Sequence
  Description of Artificial Sequence: Synthetic oligonucleotide
  Target: LAMA2; (+) strand; PAM type: YTN; PAM sequence: TTT
atctatttctagatttattt

SEQ ID NO: 314337 - DNA, 20 bp, Artificial Sequence
  Description of Artificial Sequence: Synthetic oligonucleotide
  Target: LAMA2; (+) strand; PAM type: YTN; PAM sequence: TTA
tctatttctagatttatttt

SEQ ID NO: 314338 - DNA, 20 bp, Artificial Sequence
  Description of Artificial Sequence: Synthetic oligonucleotide
  Target: LAMA2; (+) strand; PAM type: YTN; PAM sequence: CTA
tttctagatttattttaaag

SEQ ID NO: 314339 - DNA, 20 bp, Artificial Sequence
  Description of Artificial Sequence: Synthetic oligonucleotide
  Target: LAMA2; (+) strand; PAM type: YTN; PAM sequence: TTT
ctagatttattttaaaggca

SEQ ID NO: 314340 - DNA, 20 bp, Artificial Sequence
  Description of Artificial Sequence: Synthetic oligonucleotide
  Target: LAMA2; (+) strand; PAM type: YTN; PAM sequence: TTC
tagatttattttaaaggcag

SEQ ID NO: 314341 - DNA, 20 bp, Artificial Sequence
  Description of Artificial Sequence: Synthetic oligonucleotide
  Target: LAMA2; (+) strand; PAM type: YTN; PAM sequence: CTA
gatttattttaaaggcagta

SEQ ID NO: 314342 - DNA, 20 bp, Artificial Sequence
  Description of Artificial Sequence: Synthetic oligonucleotide
  Target: LAMA2; (+) strand; PAM type: YTN; PAM sequence: TTT
attttaaaggcagtaaaata

SEQ ID NO: 314343 - DNA, 20 bp, Artificial Sequence
  Description of Artificial Sequence: Synthetic oligonucleotide
  Target: LAMA2; (+) strand; PAM type: YTN; PAM sequence: TTA
ttttaaaggcagtaaaataa

SEQ ID NO: 314344 - DNA, 20 bp, Artificial Sequence
  Description of Artificial Sequence: Synthetic oligonucleotide
  Target: LAMA2; (+) strand; PAM type: YTN; PAM sequence: TTT
taaaggcagtaaaataatct

SEQ ID NO: 314345 - DNA, 20 bp, Artificial Sequence
  Description of Artificial Sequence: Synthetic oligonucleotide
  Target: LAMA2; (+) strand; PAM type: YTN; PAM sequence: TTT
aaaggcagtaaaataatcta

SEQ ID NO: 314346 - DNA, 20 bp, Artificial Sequence
  Description of Artificial Sequence: Synthetic oligonucleotide
  Target: LAMA2; (+) strand; PAM type: YTN; PAM sequence: TTA
aaggcagtaaaataatctaa

SEQ ID NO: 314347 - DNA, 20 bp, Artificial Sequence
  Description of Artificial Sequence: Synthetic oligonucleotide
  Target: LAMA2; (+) strand; PAM type: YTN; PAM sequence: CTA
acaggctcctgggtacccat

SEQ ID NO: 314348 - DNA, 20 bp, Artificial Sequence
  Description of Artificial Sequence: Synthetic oligonucleotide
  Target: LAMA2; (+) strand; PAM type: YTN; PAM sequence: CTC
ctgggtacccatggtgttta

SEQ ID NO: 314349 - DNA, 20 bp, Artificial Sequence
  Description of Artificial Sequence: Synthetic oligonucleotide
  Target: LAMA2; (+) strand; PAM type: YTN; PAM sequence: CTG
ggtacccatggtgtttatta

SEQ ID NO: 314350 - DNA, 20 bp, Artificial Sequence
  Description of Artificial Sequence: Synthetic oligonucleotide
  Target: LAMA2; (+) strand; PAM type: YTN; PAM sequence: TTT
attatattatgaagaaataa

SEQ ID NO: 314351 - DNA, 20 bp, Artificial Sequence
  Description of Artificial Sequence: Synthetic oligonucleotide
  Target: LAMA2; (+) strand; PAM type: YTN; PAM sequence: TTA
ttatattatgaagaaataaa

SEQ ID NO: 314352 - DNA, 20 bp, Artificial Sequence
  Description of Artificial Sequence: Synthetic oligonucleotide
  Target: LAMA2; (+) strand; PAM type: YTN; PAM sequence: TTA
tattatgaagaaataaaata

SEQ ID NO: 314353 - DNA, 20 bp, Artificial Sequence
  Description of Artificial Sequence: Synthetic oligonucleotide
  Target: LAMA2; (+) strand; PAM type: YTN; PAM sequence: TTA
tgaagaaataaaatattact

SEQ ID NO: 314354 - DNA, 20 bp, Artificial Sequence
  Description of Artificial Sequence: Synthetic oligonucleotide
  Target: LAMA2; (+) strand; PAM type: YTN; PAM sequence: TTA
ctcatacagtcgaaacccta

SEQ ID NO: 314355 - DNA, 20 bp, Artificial Sequence
  Description of Artificial Sequence: Synthetic oligonucleotide
  Target: LAMA2; (+) strand; PAM type: YTN; PAM sequence: CTC
atacagtcgaaaccctacaa

SEQ ID NO: 314356 - DNA, 20 bp, Artificial Sequence
  Description of Artificial Sequence: Synthetic oligonucleotide
  Target: LAMA2; (+) strand; PAM type: YTN; PAM sequence: CTA
caattaaattcctttccctc

SEQ ID NO: 314357 - DNA, 20 bp, Artificial Sequence
  Description of Artificial Sequence: Synthetic oligonucleotide
  Target: LAMA2; (+) strand; PAM type: YTN; PAM sequence: TTA
aattcctttccctcccttca

SEQ ID NO: 314358 - DNA, 20 bp, Artificial Sequence
  Description of Artificial Sequence: Synthetic oligonucleotide
  Target: LAMA2; (+) strand; PAM type: YTN; PAM sequence: TTC
ctttccctcccttcagaggg

SEQ ID NO: 314359 - DNA, 20 bp, Artificial Sequence
  Description of Artificial Sequence: Synthetic oligonucleotide
  Target: LAMA2; (+) strand; PAM type: YTN; PAM sequence: CTT
tccctcccttcagagggaac

SEQ ID NO: 314360 - DNA, 20 bp, Artificial Sequence
  Description of Artificial Sequence: Synthetic oligonucleotide
  Target: LAMA2; (+) strand; PAM type: YTN; PAM sequence: TTT
ccctcccttcagagggaacc

SEQ ID NO: 314361 - DNA, 20 bp, Artificial Sequence
  Description of Artificial Sequence: Synthetic oligonucleotide
  Target: LAMA2; (+) strand; PAM type: YTN; PAM sequence: TTC
cctcccttcagagggaacct

SEQ ID NO: 314362 - DNA, 20 bp, Artificial Sequence
  Description of Artificial Sequence: Synthetic oligonucleotide
  Target: LAMA2; (+) strand; PAM type: YTN; PAM sequence: CTC
ccttcagagggaacctatta

SEQ ID NO: 314363 - DNA, 20 bp, Artificial Sequence
  Description of Artificial Sequence: Synthetic oligonucleotide
  Target: LAMA2; (+) strand; PAM type: YTN; PAM sequence: CTT
cagagggaacctattataat

SEQ ID NO: 314364 - DNA, 20 bp, Artificial Sequence
  Description of Artificial Sequence: Synthetic oligonucleotide
  Target: LAMA2; (+) strand; PAM type: YTN; PAM sequence: TTC
agagggaacctattataatg

SEQ ID NO: 314365 - DNA, 20 bp, Artificial Sequence
  Description of Artificial Sequence: Synthetic oligonucleotide
  Target: LAMA2; (+) strand; PAM type: YTN; PAM sequence: CTA
ttataatgtgtgatttgtga

SEQ ID NO: 314366 - DNA, 20 bp, Artificial Sequence
  Description of Artificial Sequence: Synthetic oligonucleotide
  Target: LAMA2; (+) strand; PAM type: YTN; PAM sequence: TTA
taatgtgtgatttgtgatca

SEQ ID NO: 314367 - DNA, 20 bp, Artificial Sequence
  Description of Artificial Sequence: Synthetic oligonucleotide
  Target: LAMA2; (+) strand; PAM type: YTN; PAM sequence: TTT
gtgatcatgaatgatttcaa

SEQ ID NO: 314368 - DNA, 20 bp, Artificial Sequence
  Description of Artificial Sequence: Synthetic oligonucleotide
  Target: LAMA2; (+) strand; PAM type: YTN; PAM sequence: TTG
tgatcatgaatgatttcaac

SEQ ID NO: 314369 - DNA, 20 bp, Artificial Sequence
  Description of Artificial Sequence: Synthetic oligonucleotide
  Target: LAMA2; (+) strand; PAM type: YTN; PAM sequence: TTT
caactagtttttctgatatt

SEQ ID NO: 314370 - DNA, 20 bp, Artificial Sequence
  Description of Artificial Sequence: Synthetic oligonucleotide
  Target: LAMA2; (+) strand; PAM type: YTN; PAM sequence: TTC
aactagtttttctgatattt

SEQ ID NO: 314371 - DNA, 20 bp, Artificial Sequence
  Description of Artificial Sequence: Synthetic oligonucleotide
  Target: LAMA2; (+) strand; PAM type: YTN; PAM sequence: CTA
gtttttctgatatttatatt

SEQ ID NO: 314372 - DNA, 20 bp, Artificial Sequence
  Description of Artificial Sequence: Synthetic oligonucleotide
  Target: LAMA2; (+) strand; PAM type: YTN; PAM sequence: TTT
ttctgatatttatatttatt

SEQ ID NO: 314373 - DNA, 20 bp, Artificial Sequence
  Description of Artificial Sequence: Synthetic oligonucleotide
  Target: LAMA2; (+) strand; PAM type: YTN; PAM sequence: TTT
tctgatatttatatttattc

SEQ ID NO: 314374 - DNA, 20 bp, Artificial Sequence
  Description of Artificial Sequence: Synthetic oligonucleotide
  Target: LAMA2; (+) strand; PAM type: YTN; PAM sequence: TTT
ctgatatttatatttattct

SEQ ID NO: 314375 - DNA, 20 bp, Artificial Sequence
  Description of Artificial Sequence: Synthetic oligonucleotide
  Target: LAMA2; (+) strand; PAM type: YTN; PAM sequence: TTC
tgatatttatatttattctg

SEQ ID NO: 314376 - DNA, 20 bp, Artificial Sequence
  Description of Artificial Sequence: Synthetic oligonucleotide
  Target: LAMA2; (+) strand; PAM type: YTN; PAM sequence: CTG
atatttatatttattctgca

SEQ ID NO: 314377 - DNA, 20 bp, Artificial Sequence
  Description of Artificial Sequence: Synthetic oligonucleotide
  Target: LAMA2; (+) strand; PAM type: YTN; PAM sequence: TTT
atatttattctgcaccttca

SEQ ID NO: 314378 - DNA, 20 bp, Artificial Sequence
  Description of Artificial Sequence: Synthetic oligonucleotide
  Target: LAMA2; (+) strand; PAM type: YTN; PAM sequence: TTA
tatttattctgcaccttcac

SEQ ID NO: 314379 - DNA, 20 bp, Artificial Sequence
  Description of Artificial Sequence: Synthetic oligonucleotide
  Target: LAMA2; (+) strand; PAM type: YTN; PAM sequence: TTT
attctgcaccttcaccctca

SEQ ID NO: 314380 - DNA, 20 bp, Artificial Sequence
  Description of Artificial Sequence: Synthetic oligonucleotide
  Target: LAMA2; (+) strand; PAM type: YTN; PAM sequence: TTA
ttctgcaccttcaccctcat

SEQ ID NO: 314381 - DNA, 20 bp, Artificial Sequence
  Description of Artificial Sequence: Synthetic oligonucleotide
  Target: LAMA2; (+) strand; PAM type: YTN; PAM sequence: TTC
tgcaccttcaccctcatcat

SEQ ID NO: 314382 - DNA, 20 bp, Artificial Sequence
  Description of Artificial Sequence: Synthetic oligonucleotide
  Target: LAMA2; (+) strand; PAM type: YTN; PAM sequence: CTG
caccttcaccctcatcatca

SEQ ID NO: 314383 - DNA, 20 bp, Artificial Sequence
  Description of Artificial Sequence: Synthetic oligonucleotide
  Target: LAMA2; (+) strand; PAM type: YTN; PAM sequence: CTT
caccctcatcatcatcctta

SEQ ID NO: 314384 - DNA, 20 bp, Artificial Sequence
  Description of Artificial Sequence: Synthetic oligonucleotide
  Target: LAMA2; (+) strand; PAM type: YTN; PAM sequence: TTC
accctcatcatcatccttac

SEQ ID NO: 314385 - DNA, 20 bp, Artificial Sequence
  Description of Artificial Sequence: Synthetic oligonucleotide
  Target: LAMA2; (+) strand; PAM type: YTN; PAM sequence: CTC
atcatcatccttacaatagg

SEQ ID NO: 314386 - DNA, 20 bp, Artificial Sequence
  Description of Artificial Sequence: Synthetic oligonucleotide
  Target: LAMA2; (+) strand; PAM type: YTN; PAM sequence: CTT
acaataggctttatcttttg

SEQ ID NO: 314387 - DNA, 20 bp, Artificial Sequence
  Description of Artificial Sequence: Synthetic oligonucleotide
  Target: LAMA2; (+) strand; PAM type: YTN; PAM sequence: TTA
caataggctttatcttttgg

SEQ ID NO: 314388 - DNA, 20 bp, Artificial Sequence
  Description of Artificial Sequence: Synthetic oligonucleotide
  Target: LAMA2; (+) strand; PAM type: YTN; PAM sequence: CTT
tatcttttggaaatacatat

SEQ ID NO: 314389 - DNA, 20 bp, Artificial Sequence
  Description of Artificial Sequence: Synthetic oligonucleotide
  Target: LAMA2; (+) strand; PAM type: YTN; PAM sequence: TTT
atcttttggaaatacatata

SEQ ID NO: 314390 - DNA, 20 bp, Artificial Sequence
  Description of Artificial Sequence: Synthetic oligonucleotide
  Target: LAMA2; (+) strand; PAM type: YTN; PAM sequence: TTA
tcttttggaaatacatataa

SEQ ID NO: 314391 - DNA, 20 bp, Artificial Sequence
  Description of Artificial Sequence: Synthetic oligonucleotide
  Target: LAMA2; (+) strand; PAM type: YTN; PAM sequence: CTT
ttggaaatacatataatatt

SEQ ID NO: 314392 - DNA, 20 bp, Artificial Sequence
  Description of Artificial Sequence: Synthetic oligonucleotide
  Target: LAMA2; (+) strand; PAM type: YTN; PAM sequence: TTT
tggaaatacatataatattg

SEQ ID NO: 314393 - DNA, 20 bp, Artificial Sequence
  Description of Artificial Sequence: Synthetic oligonucleotide
  Target: LAMA2; (+) strand; PAM type: YTN; PAM sequence: TTT
ggaaatacatataatattga

SEQ ID NO: 314394 - DNA, 20 bp, Artificial Sequence
  Description of Artificial Sequence: Synthetic oligonucleotide
  Target: LAMA2; (+) strand; PAM type: YTN; PAM sequence: TTG
gaaatacatataatattgat

SEQ ID NO: 314395 - DNA, 20 bp, Artificial Sequence
  Description of Artificial Sequence: Synthetic oligonucleotide
  Target: LAMA2; (+) strand; PAM type: YTN; PAM sequence: TTG
atgtgctctggttttaatca

SEQ ID NO: 314396 - DNA, 20 bp, Artificial Sequence
  Description of Artificial Sequence: Synthetic oligonucleotide
  Target: LAMA2; (+) strand; PAM type: YTN; PAM sequence: CTC
tggttttaatcatcacctgc

SEQ ID NO: 314397 - DNA, 20 bp, Artificial Sequence
  Description of Artificial Sequence: Synthetic oligonucleotide
  Target: LAMA2; (+) strand; PAM type: YTN; PAM sequence: CTG
gttttaatcatcacctgcct

SEQ ID NO: 314398 - DNA, 20 bp, Artificial Sequence
  Description of Artificial Sequence: Synthetic oligonucleotide
  Target: LAMA2; (+) strand; PAM type: YTN; PAM sequence: TTT
taatcatcacctgcctcttg

SEQ ID NO: 314399 - DNA, 20 bp, Artificial Sequence
  Description of Artificial Sequence: Synthetic oligonucleotide
  Target: LAMA2; (+) strand; PAM type: YTN; PAM sequence: TTT
aatcatcacctgcctcttgc

SEQ ID NO: 314400 - DNA, 20 bp, Artificial Sequence
  Description of Artificial Sequence: Synthetic oligonucleotide
  Target: LAMA2; (+) strand; PAM type: YTN; PAM sequence: TTA
atcatcacctgcctcttgcc

SEQ ID NO: 314401 - DNA, 20 bp, Artificial Sequence
  Description of Artificial Sequence: Synthetic oligonucleotide
  Target: LAMA2; (+) strand; PAM type: YTN; PAM sequence: CTG
cctcttgcctcagcaagctc

SEQ ID NO: 314402 - DNA, 20 bp, Artificial Sequence
  Description of Artificial Sequence: Synthetic oligonucleotide
  Target: LAMA2; (+) strand; PAM type: YTN; PAM sequence: CTC
ttgcctcagcaagctctagg

SEQ ID NO: 314403 - DNA, 20 bp, Artificial Sequence
  Description of Artificial Sequence: Synthetic oligonucleotide
  Target: LAMA2; (+) strand; PAM type: YTN; PAM sequence: CTT
gcctcagcaagctctaggtt

SEQ ID NO: 314404 - DNA, 20 bp, Artificial Sequence
  Description of Artificial Sequence: Synthetic oligonucleotide
  Target: LAMA2; (+) strand; PAM type: YTN; PAM sequence: TTG
cctcagcaagctctaggttg

SEQ ID NO: 314405 - DNA, 20 bp, Artificial Sequence
  Description of Artificial Sequence: Synthetic oligonucleotide
  Target: LAMA2; (+) strand; PAM type: YTN; PAM sequence: CTC
agcaagctctaggttgtatt

SEQ ID NO: 314406 - DNA, 20 bp, Artificial Sequence
  Description of Artificial Sequence: Synthetic oligonucleotide
  Target: LAMA2; (+) strand; PAM type: YTN; PAM sequence: CTC
taggttgtattttaaaggag

SEQ ID NO: 314407 - DNA, 20 bp, Artificial Sequence
  Description of Artificial Sequence: Synthetic oligonucleotide
  Target: LAMA2; (+) strand; PAM type: YTN; PAM sequence: CTA
ggttgtattttaaaggagat

SEQ ID NO: 314408 - DNA, 20 bp, Artificial Sequence
  Description of Artificial Sequence: Synthetic oligonucleotide
  Target: LAMA2; (+) strand; PAM type: YTN; PAM sequence: TTG
tattttaaaggagattaaat

SEQ ID NO: 314409 - DNA, 20 bp, Artificial Sequence
  Description of Artificial Sequence: Synthetic oligonucleotide
  Target: LAMA2; (+) strand; PAM type: YTN; PAM sequence: TTT
taaaggagattaaatatatt

SEQ ID NO: 314410 - DNA, 20 bp, Artificial Sequence
  Description of Artificial Sequence: Synthetic oligonucleotide
  Target: LAMA2; (+) strand; PAM type: YTN; PAM sequence: TTT
aaaggagattaaatatattt

SEQ ID NO: 314411 - DNA, 20 bp, Artificial Sequence
  Description of Artificial Sequence: Synthetic oligonucleotide
  Target: LAMA2; (+) strand; PAM type: YTN; PAM sequence: TTA
aaggagattaaatatatttt

SEQ ID NO: 314412 - DNA, 20 bp, Artificial Sequence
  Description of Artificial Sequence: Synthetic oligonucleotide
  Target: LAMA2; (+) strand; PAM type: YTN; PAM sequence: TTA
aatatattttcactgaattt

SEQ ID NO: 314413 - DNA, 20 bp, Artificial Sequence
  Description of Artificial Sequence: Synthetic oligonucleotide
  Target: LAMA2; (+) strand; PAM type: YTN; PAM sequence: TTT
tcactgaatttaattgtatc

SEQ ID NO: 314414 - DNA, 20 bp, Artificial Sequence
  Description of Artificial Sequence: Synthetic oligonucleotide
  Target: LAMA2; (+) strand; PAM type: YTN; PAM sequence: TTT
cactgaatttaattgtatct

SEQ ID NO: 314415 - DNA, 20 bp, Artificial Sequence
  Description of Artificial Sequence: Synthetic oligonucleotide
  Target: LAMA2; (+) strand; PAM type: YTN; PAM sequence: TTC
actgaatttaattgtatcta

SEQ ID NO: 314416 - DNA, 20 bp, Artificial Sequence
  Description of Artificial Sequence: Synthetic oligonucleotide
  Target: LAMA2; (+) strand; PAM type: YTN; PAM sequence: CTG
aatttaattgtatctaagta

SEQ ID NO: 314417 - DNA, 20 bp, Artificial Sequence
  Description of Artificial Sequence: Synthetic oligonucleotide
  Target: LAMA2; (+) strand; PAM type: YTN; PAM sequence: TTT
aattgtatctaagtaatacc

SEQ ID NO: 314418 - DNA, 20 bp, Artificial Sequence
  Description of Artificial Sequence: Synthetic oligonucleotide
  Target: LAMA2; (+) strand; PAM type: YTN; PAM sequence: TTA
attgtatctaagtaatacct

SEQ ID NO: 314419 - DNA, 20 bp, Artificial Sequence
  Description of Artificial Sequence: Synthetic oligonucleotide
  Target: LAMA2; (+) strand; PAM type: YTN; PAM sequence: TTG
tatctaagtaatacctttcg

SEQ ID NO: 314420 - DNA, 20 bp, Artificial Sequence
  Description of Artificial Sequence: Synthetic oligonucleotide
  Target: LAMA2; (+) strand; PAM type: YTN; PAM sequence: CTA
agtaatacctttcgaagagt

SEQ ID NO: 314421 - DNA, 20 bp, Artificial Sequence
  Description of Artificial Sequence: Synthetic oligonucleotide
  Target: LAMA2; (+) strand; PAM type: YTN; PAM sequence: CTT
tcgaagagtcaaataataca

SEQ ID NO: 314422 - DNA, 20 bp, Artificial Sequence
  Description of Artificial Sequence: Synthetic oligonucleotide
  Target: LAMA2; (+) strand; PAM type: YTN; PAM sequence: TTT
cgaagagtcaaataatacag

SEQ ID NO: 314423 - DNA, 20 bp, Artificial Sequence
  Description of Artificial Sequence: Synthetic oligonucleotide
  Target: LAMA2; (+) strand; PAM type: YTN; PAM sequence: TTC
gaagagtcaaataatacaga

SEQ ID NO: 314424 - DNA, 20 bp, Artificial Sequence
  Description of Artificial Sequence: Synthetic oligonucleotide
  Target: LAMA2; (+) strand; PAM type: YTN; PAM sequence: CTC
ataacaaaaagttgcaattc

SEQ ID NO: 314425 - DNA, 20 bp, Artificial Sequence
  Description of Artificial Sequence: Synthetic oligonucleotide
  Target: LAMA2; (+) strand; PAM type: YTN; PAM sequence: TTG
caattcttccatccctcctt

SEQ ID NO: 314426 - DNA, 20 bp, Artificial Sequence
  Description of Artificial Sequence: Synthetic oligonucleotide
  Target: LAMA2; (+) strand; PAM type: YTN; PAM sequence: TTC
ttccatccctccttcactct

SEQ ID NO: 314427 - DNA, 20 bp, Artificial Sequence
  Description of Artificial Sequence: Synthetic oligonucleotide
  Target: LAMA2; (+) strand; PAM type: YTN; PAM sequence: CTT
ccatccctccttcactctca

SEQ ID NO: 314428 - DNA, 20 bp, Artificial Sequence
  Description of Artificial Sequence: Synthetic oligonucleotide
  Target: LAMA2; (+) strand; PAM type: YTN; PAM sequence: TTC
catccctccttcactctcag

SEQ ID NO: 314429 - DNA, 20 bp, Artificial Sequence
  Description of Artificial Sequence: Synthetic oligonucleotide
  Target: LAMA2; (+) strand; PAM type: YTN; PAM sequence: CTC
cttcactctcagagacatga

SEQ ID NO: 314430 - DNA, 20 bp, Artificial Sequence
  Description of Artificial Sequence: Synthetic oligonucleotide
  Target: LAMA2; (+) strand; PAM type: YTN; PAM sequence: CTT
cactctcagagacatgactg

SEQ ID NO: 314431 - DNA, 20 bp, Artificial Sequence
  Description of Artificial Sequence: Synthetic oligonucleotide
  Target: LAMA2; (+) strand; PAM type: YTN; PAM sequence: TTC
actctcagagacatgactga

SEQ ID NO: 314432 - DNA, 20 bp, Artificial Sequence
  Description of Artificial Sequence: Synthetic oligonucleotide
  Target: LAMA2; (+) strand; PAM type: YTN; PAM sequence: CTC
tcagagacatgactgatcta

SEQ ID NO: 314433 - DNA, 20 bp, Artificial Sequence
  Description of Artificial Sequence: Synthetic oligonucleotide
  Target: LAMA2; (+) strand; PAM type: YTN; PAM sequence: CTC
agagacatgactgatctatc

SEQ ID NO: 314434 - DNA, 20 bp, Artificial Sequence
  Description of Artificial Sequence: Synthetic oligonucleotide
  Target: LAMA2; (+) strand; PAM type: YTN; PAM sequence: CTG
atctatctcagctgtttctt

SEQ ID NO: 314435 - DNA, 20 bp, Artificial Sequence
  Description of Artificial Sequence: Synthetic oligonucleotide
  Target: LAMA2; (+) strand; PAM type: YTN; PAM sequence: CTA
tctcagctgtttcttctagc

SEQ ID NO: 314436 - DNA, 20 bp, Artificial Sequence
  Description of Artificial Sequence: Synthetic oligonucleotide
  Target: LAMA2; (+) strand; PAM type: YTN; PAM sequence: CTC
agctgtttcttctagcattt

SEQ ID NO: 314437 - DNA, 20 bp, Artificial Sequence
  Description of Artificial Sequence: Synthetic oligonucleotide
  Target: LAMA2; (+) strand; PAM type: YTN; PAM sequence: CTG
tttcttctagcatttacccc

SEQ ID NO: 314438 - DNA, 20 bp, Artificial Sequence
  Description of Artificial Sequence: Synthetic oligonucleotide
  Target: LAMA2; (+) strand; PAM type: YTN; PAM sequence: TTT
cttctagcatttacccccgg

SEQ ID NO: 314439 - DNA, 20 bp, Artificial Sequence
  Description of Artificial Sequence: Synthetic oligonucleotide
  Target: LAMA2; (+) strand; PAM type: YTN; PAM sequence: TTC
ttctagcatttacccccgga

SEQ ID NO: 314440 - DNA, 20 bp, Artificial Sequence
  Description of Artificial Sequence: Synthetic oligonucleotide
  Target: LAMA2; (+) strand; PAM type: YTN; PAM sequence: CTT
ctagcatttacccccggatt

SEQ ID NO: 314441 - DNA, 20 bp, Artificial Sequence
  Description of Artificial Sequence: Synthetic oligonucleotide
  Target: LAMA2; (+) strand; PAM type: YTN; PAM sequence: TTC
tagcatttacccccggattt

SEQ ID NO: 314442 - DNA, 20 bp, Artificial Sequence
  Description of Artificial Sequence: Synthetic oligonucleotide
  Target: LAMA2; (+) strand; PAM type: YTN; PAM sequence: CTA
gcatttacccccggatttaa

SEQ ID NO: 314443 - DNA, 20 bp, Artificial Sequence
  Description of Artificial Sequence: Synthetic oligonucleotide
  Target: LAMA2; (+) strand; PAM type: YTN; PAM sequence: TTT
acccccggatttaaaaataa

SEQ ID NO: 314444 - DNA, 20 bp, Artificial Sequence
  Description of Artificial Sequence: Synthetic oligonucleotide
  Target: LAMA2; (+) strand; PAM type: YTN; PAM sequence: TTA
cccccggatttaaaaataat

SEQ ID NO: 314445 - DNA, 20 bp, Artificial Sequence
  Description of Artificial Sequence: Synthetic oligonucleotide
  Target: LAMA2; (+) strand; PAM type: YTN; PAM sequence: TTT
aaaaataatatatttaaaca

SEQ ID NO: 314446 - DNA, 20 bp, Artificial Sequence
  Description of Artificial Sequence: Synthetic oligonucleotide
  Target: LAMA2; (+) strand; PAM type: YTN; PAM sequence: TTA
aaaataatatatttaaacaa

SEQ ID NO: 314447 - DNA, 20 bp, Artificial Sequence
  Description of Artificial Sequence: Synthetic oligonucleotide
  Target: LAMA2; (+) strand; PAM type: YTN; PAM sequence: TTT
aaacaactataacttaattt

SEQ ID NO: 314448 - DNA, 20 bp, Artificial Sequence
  Description of Artificial Sequence: Synthetic oligonucleotide
  Target: LAMA2; (+) strand; PAM type: YTN; PAM sequence: TTA
aacaactataacttaattta

SEQ ID NO: 314449 - DNA, 20 bp, Artificial Sequence
  Description of Artificial Sequence: Synthetic oligonucleotide
  Target: LAMA2; (+) strand; PAM type: YTN; PAM sequence: CTA
taacttaatttaaacatttt

SEQ ID NO: 314450 - DNA, 20 bp, Artificial Sequence
  Description of Artificial Sequence: Synthetic oligonucleotide
  Target: LAMA2; (+) strand; PAM type: YTN; PAM sequence: CTT
aatttaaacattttagacat

SEQ ID NO: 314451 - DNA, 20 bp, Artificial Sequence
  Description of Artificial Sequence: Synthetic oligonucleotide
  Target: LAMA2; (+) strand; PAM type: YTN; PAM sequence: TTA
atttaaacattttagacatt

SEQ ID NO: 314452 - DNA, 20 bp, Artificial Sequence
  Description of Artificial Sequence: Synthetic oligonucleotide
  Target: LAMA2; (+) strand; PAM type: YTN; PAM sequence: TTT
aaacattttagacattatct

SEQ ID NO: 314453 - DNA, 20 bp, Artificial Sequence
  Description of Artificial Sequence: Synthetic oligonucleotide
  Target: LAMA2; (+) strand; PAM type: YTN; PAM sequence: TTA
aacattttagacattatctc

SEQ ID NO: 314454 - DNA, 20 bp, Artificial Sequence
  Description of Artificial Sequence: Synthetic oligonucleotide
  Target: LAMA2; (+) strand; PAM type: YTN; PAM sequence: TTT
tagacattatctcttccttt

SEQ ID NO: 314455 - DNA, 20 bp, Artificial Sequence
  Description of Artificial Sequence: Synthetic oligonucleotide
  Target: LAMA2; (+) strand; PAM type: YTN; PAM sequence: TTT
agacattatctcttcctttc

SEQ ID NO: 314456 - DNA, 20 bp, Artificial Sequence
  Description of Artificial Sequence: Synthetic oligonucleotide
  Target: LAMA2; (+) strand; PAM type: YTN; PAM sequence: TTA
gacattatctcttcctttcc

SEQ ID NO: 314457 - DNA, 20 bp, Artificial Sequence
  Description of Artificial Sequence: Synthetic oligonucleotide
  Target: LAMA2; (+) strand; PAM type: YTN; PAM sequence: TTA
tctcttcctttcctagtatg

SEQ ID NO: 314458 - DNA, 20 bp, Artificial Sequence
  Description of Artificial Sequence: Synthetic oligonucleotide
  Target: LAMA2; (+) strand; PAM type: YTN; PAM sequence: CTC
ttcctttcctagtatggaag

SEQ ID NO: 314459 - DNA, 20 bp, Artificial Sequence
  Description of Artificial Sequence: Synthetic oligonucleotide
  Target: LAMA2; (+) strand; PAM type: YTN; PAM sequence: CTT
cctttcctagtatggaagac

SEQ ID NO: 314460 - DNA, 20 bp, Artificial Sequence
  Description of Artificial Sequence: Synthetic oligonucleotide
  Target: LAMA2; (+) strand; PAM type: YTN; PAM sequence: TTC
ctttcctagtatggaagaca

SEQ ID NO: 314461 - DNA, 20 bp, Artificial Sequence
  Description of Artificial Sequence: Synthetic oligonucleotide
  Target: LAMA2; (+) strand; PAM type: YTN; PAM sequence: CTT
tcctagtatggaagacaaag

SEQ ID NO: 314462 - DNA, 20 bp, Artificial Sequence
  Description of Artificial Sequence: Synthetic oligonucleotide
  Target: LAMA2; (+) strand; PAM type: YTN; PAM sequence: TTT
cctagtatggaagacaaaga

SEQ ID NO: 314463 - DNA, 20 bp, Artificial Sequence
  Description of Artificial Sequence: Synthetic oligonucleotide
  Target: LAMA2; (+) strand; PAM type: YTN; PAM sequence: TTC
ctagtatggaagacaaagat

SEQ ID NO: 314464 - DNA, 20 bp, Artificial Sequence
  Description of Artificial Sequence: Synthetic oligonucleotide
  Target: LAMA2; (+) strand; PAM type: YTN; PAM sequence: CTA
gtatggaagacaaagattga

SEQ ID NO: 314465 - DNA, 20 bp, Artificial Sequence
  Description of Artificial Sequence: Synthetic oligonucleotide
  Target: LAMA2; (+) strand; PAM type: YTN; PAM sequence: TTG
agcactctcatctgaccctc

SEQ ID NO: 314466 - DNA, 20 bp, Artificial Sequence
  Description of Artificial Sequence: Synthetic oligonucleotide
  Target: LAMA2; (+) strand; PAM type: YTN; PAM sequence: CTC
tcatctgaccctcacacatt

SEQ ID NO: 314467 - DNA, 20 bp, Artificial Sequence
  Description of Artificial Sequence: Synthetic oligonucleotide
  Target: LAMA2; (+) strand; PAM type: YTN; PAM sequence: CTC
atctgaccctcacacatttc

SEQ ID NO: 314468 - DNA, 20 bp, Artificial Sequence
  Description of Artificial Sequence: Synthetic oligonucleotide
  Target: LAMA2; (+) strand; PAM type: YTN; PAM sequence: CTG
accctcacacatttctgcct

SEQ ID NO: 314469 - DNA, 20 bp, Artificial Sequence
  Description of Artificial Sequence: Synthetic oligonucleotide
  Target: LAMA2; (+) strand; PAM type: YTN; PAM sequence: CTC
acacatttctgcctacatcc

SEQ ID NO: 314470 - DNA, 20 bp, Artificial Sequence
  Description of Artificial Sequence: Synthetic oligonucleotide
  Target: LAMA2; (+) strand; PAM type: YTN; PAM sequence: TTT
ctgcctacatcctgcaacat

SEQ ID NO: 314471 - DNA, 20 bp, Artificial Sequence
  Description of Artificial Sequence: Synthetic oligonucleotide
  Target: LAMA2; (+) strand; PAM type: YTN; PAM sequence: TTC
tgcctacatcctgcaacata

SEQ ID NO: 314472 - DNA, 20 bp, Artificial Sequence
  Description of Artificial Sequence: Synthetic oligonucleotide
  Target: LAMA2; (+) strand; PAM type: YTN; PAM sequence: CTG
cctacatcctgcaacatata

SEQ ID NO: 314473 - DNA, 20 bp, Artificial Sequence
  Description of Artificial Sequence: Synthetic oligonucleotide
  Target: LAMA2; (+) strand; PAM type: YTN; PAM sequence: CTA
catcctgcaacatatactta

SEQ ID NO: 314474 - DNA, 20 bp, Artificial Sequence
  Description of Artificial Sequence: Synthetic oligonucleotide
  Target: LAMA2; (+) strand; PAM type: YTN; PAM sequence: CTG
caacatatacttaaaataaa

SEQ ID NO: 314475 - DNA, 20 bp, Artificial Sequence
  Description of Artificial Sequence: Synthetic oligonucleotide
  Target: LAMA2; (+) strand; PAM type: YTN; PAM sequence: CTT
aaaataaatatataatgcta

SEQ ID NO: 314476 - DNA, 20 bp, Artificial Sequence
  Description of Artificial Sequence: Synthetic oligonucleotide
  Target: LAMA2; (+) strand; PAM type: YTN; PAM sequence: TTA
aaataaatatataatgctaa

SEQ ID NO: 314477 - DNA, 20 bp, Artificial Sequence
  Description of Artificial Sequence: Synthetic oligonucleotide
  Target: LAMA2; (+) strand; PAM type: YTN; PAM sequence: CTA
acattgttaaaaccatataa

SEQ ID NO: 314478 - DNA, 20 bp, Artificial Sequence
  Description of Artificial Sequence: Synthetic oligonucleotide
  Target: LAMA2; (+) strand; PAM type: YTN; PAM sequence: TTG
ttaaaaccatataaatatta

SEQ ID NO: 314479 - DNA, 20 bp, Artificial Sequence
  Description of Artificial Sequence: Synthetic oligonucleotide
  Target: LAMA2; (+) strand; PAM type: YTN; PAM sequence: TTA
aaaccatataaatattactc

SEQ ID NO: 314480 - DNA, 20 bp, Artificial Sequence
  Description of Artificial Sequence: Synthetic oligonucleotide
  Target: LAMA2; (+) strand; PAM type: YTN; PAM sequence: TTA
ctcacagctgagctctgtgg

SEQ ID NO: 314481 - DNA, 20 bp, Artificial Sequence
  Description of Artificial Sequence: Synthetic oligonucleotide
  Target: LAMA2; (+) strand; PAM type: YTN; PAM sequence: CTC
acagctgagctctgtggtgc

SEQ ID NO: 314482 - DNA, 20 bp, Artificial Sequence
  Description of Artificial Sequence: Synthetic oligonucleotide
  Target: LAMA2; (+) strand; PAM type: YTN; PAM sequence: CTG
agctctgtggtgcactgtgt

SEQ ID NO: 314483 - DNA, 20 bp, Artificial Sequence
  Description of Artificial Sequence: Synthetic oligonucleotide
  Target: LAMA2; (+) strand; PAM type: YTN; PAM sequence: CTC
tgtggtgcactgtgtctctc

SEQ ID NO: 314484 - DNA, 20 bp, Artificial Sequence
  Description of Artificial Sequence: Synthetic oligonucleotide
  Target: LAMA2; (+) strand; PAM type: YTN; PAM sequence: CTG
tggtgcactgtgtctctctt

SEQ ID NO: 314485 - DNA, 20 bp, Artificial Sequence
  Description of Artificial Sequence: Synthetic oligonucleotide
  Target: LAMA2; (+) strand; PAM type: YTN; PAM sequence: CTG
tgtctctcttttcttttttg

SEQ ID NO: 314486 - DNA, 20 bp, Artificial Sequence
  Description of Artificial Sequence: Synthetic oligonucleotide
  Target: LAMA2; (+) strand; PAM type: YTN; PAM sequence: CTC
tcttttcttttttgtacatc

SEQ ID NO: 314487 - DNA, 20 bp, Artificial Sequence
  Description of Artificial Sequence: Synthetic oligonucleotide
  Target: LAMA2; (+) strand; PAM type: YTN; PAM sequence: CTC
ttttcttttttgtacatcgt

SEQ ID NO: 314488 - DNA, 20 bp, Artificial Sequence
  Description of Artificial Sequence: Synthetic oligonucleotide
  Target: LAMA2; (+) strand; PAM type: YTN; PAM sequence: CTT
ttcttttttgtacatcgttg

SEQ ID NO: 314489 - DNA, 20 bp, Artificial Sequence
  Description of Artificial Sequence: Synthetic oligonucleotide
  Target: LAMA2; (+) strand; PAM type: YTN; PAM sequence: TTT
tcttttttgtacatcgttgc

SEQ ID NO: 314490 - DNA, 20 bp, Artificial Sequence
  Description of Artificial Sequence: Synthetic oligonucleotide
  Target: LAMA2; (+) strand; PAM type: YTN; PAM sequence: TTT
cttttttgtacatcgttgcc

SEQ ID NO: 314491 - DNA, 20 bp, Artificial Sequence
  Description of Artificial Sequence: Synthetic oligonucleotide
  Target: LAMA2; (+) strand; PAM type: YTN; PAM sequence: TTC
ttttttgtacatcgttgcct

SEQ ID NO: 314492 - DNA, 20 bp, Artificial Sequence
  Description of Artificial Sequence: Synthetic oligonucleotide
  Target: LAMA2; (+) strand; PAM type: YTN; PAM sequence: CTT
ttttgtacatcgttgcctgg

SEQ ID NO: 314493 - DNA, 20 bp, Artificial Sequence
  Description of Artificial Sequence: Synthetic oligonucleotide
  Target: LAMA2; (+) strand; PAM type: YTN; PAM sequence: TTT
tttgtacatcgttgcctggc

SEQ ID NO: 314494 - DNA, 20 bp, Artificial Sequence
  Description of Artificial Sequence: Synthetic oligonucleotide
  Target: LAMA2; (+) strand; PAM type: YTN; PAM sequence: TTT
ttgtacatcgttgcctggca

SEQ ID NO: 314495 - DNA, 20 bp, Artificial Sequence
  Description of Artificial Sequence: Synthetic oligonucleotide
  Target: LAMA2; (+) strand; PAM type: YTN; PAM sequence: TTT
tgtacatcgttgcctggcat

SEQ ID NO: 314496 - DNA, 20 bp, Artificial Sequence
  Description of Artificial Sequence: Synthetic oligonucleotide
  Target: LAMA2; (+) strand; PAM type: YTN; PAM sequence: TTT
gtacatcgttgcctggcatt

SEQ ID NO: 314497 - DNA, 20 bp, Artificial Sequence
  Description of Artificial Sequence: Synthetic oligonucleotide
  Target: LAMA2; (+) strand; PAM type: YTN; PAM sequence: TTG
tacatcgttgcctggcatta

SEQ ID NO: 314498 - DNA, 20 bp, Artificial Sequence
  Description of Artificial Sequence: Synthetic oligonucleotide
  Target: LAMA2; (+) strand; PAM type: YTN; PAM sequence: TTG
cctggcattaataattgctt

SEQ ID NO: 314499 - DNA, 20 bp, Artificial Sequence
  Description of Artificial Sequence: Synthetic oligonucleotide
  Target: LAMA2; (+) strand; PAM type: YTN; PAM sequence: CTG
gcattaataattgctttgtt

SEQ ID NO: 314500 - DNA, 20 bp, Artificial Sequence
  Description of Artificial Sequence: Synthetic oligonucleotide
  Target: LAMA2; (+) strand; PAM type: YTN; PAM sequence: TTA
ataattgctttgttttgaaa

SEQ ID NO: 314501 - DNA, 20 bp, Artificial Sequence
  Description of Artificial Sequence: Synthetic oligonucleotide
  Target: LAMA2; (+) strand; PAM type: YTN; PAM sequence: TTG
ctttgttttgaaaaattagt

SEQ ID NO: 314502 - DNA, 20 bp, Artificial Sequence
  Description of Artificial Sequence: Synthetic oligonucleotide
  Target: LAMA2; (+) strand; PAM type: YTN; PAM sequence: CTT
tgttttgaaaaattagtctt

SEQ ID NO: 314503 - DNA, 20 bp, Artificial Sequence
  Description of Artificial Sequence: Synthetic oligonucleotide
  Target: LAMA2; (+) strand; PAM type: YTN; PAM sequence: TTT
gttttgaaaaattagtctta

SEQ ID NO: 314504 - DNA, 20 bp, Artificial Sequence
  Description of Artificial Sequence: Synthetic oligonucleotide
  Target: LAMA2; (+) strand; PAM type: YTN; PAM sequence: TTG
ttttgaaaaattagtcttag

SEQ ID NO: 314505 - DNA, 20 bp, Artificial Sequence
  Description of Artificial Sequence: Synthetic oligonucleotide
  Target: LAMA2; (+) strand; PAM type: YTN; PAM sequence: TTT
tgaaaaattagtcttagttt

SEQ ID NO: 314506 - DNA, 20 bp, Artificial Sequence
  Description of Artificial Sequence: Synthetic oligonucleotide
  Target: LAMA2; (+) strand; PAM type: YTN; PAM sequence: TTT
gaaaaattagtcttagttta

SEQ ID NO: 314507 - DNA, 20 bp, Artificial Sequence
  Description of Artificial Sequence: Synthetic oligonucleotide
  Target: LAMA2; (+) strand; PAM type: YTN; PAM sequence: TTG
aaaaattagtcttagtttac

SEQ ID NO: 314508 - DNA, 20 bp, Artificial Sequence
  Description of Artificial Sequence: Synthetic oligonucleotide
  Target: LAMA2; (+) strand; PAM type: YTN; PAM sequence: TTA
gtcttagtttactacataca

SEQ ID NO: 314509 - DNA, 20 bp, Artificial Sequence
  Description of Artificial Sequence: Synthetic oligonucleotide
  Target: LAMA2; (+) strand; PAM type: YTN; PAM sequence: CTT
agtttactacatacatttta

SEQ ID NO: 314510 - DNA, 20 bp, Artificial Sequence
  Description of Artificial Sequence: Synthetic oligonucleotide
  Target: LAMA2; (+) strand; PAM type: YTN; PAM sequence: TTA
gtttactacatacattttac

SEQ ID NO: 314511 - DNA, 20 bp, Artificial Sequence
  Description of Artificial Sequence: Synthetic oligonucleotide
  Target: LAMA2; (+) strand; PAM type: YTN; PAM sequence: TTT
actacatacattttactaat

SEQ ID NO: 314512 - DNA, 20 bp, Artificial Sequence
  Description of Artificial Sequence: Synthetic oligonucleotide
  Target: LAMA2; (+) strand; PAM type: YTN; PAM sequence: TTA
ctacatacattttactaatt

SEQ ID NO: 314513 - DNA, 20 bp, Artificial Sequence
  Description of Artificial Sequence: Synthetic oligonucleotide
  Target: LAMA2; (+) strand; PAM type: YTN; PAM sequence: CTA
catacattttactaatttta

SEQ ID NO: 314514 - DNA, 20 bp, Artificial Sequence
  Description of Artificial Sequence: Synthetic oligonucleotide
  Target: LAMA2; (+) strand; PAM type: YTN; PAM sequence: TTT
tactaattttaaactacact

SEQ ID NO: 314515 - DNA, 20 bp, Artificial Sequence
  Description of Artificial Sequence: Synthetic oligonucleotide
  Target: LAMA2; (+) strand; PAM type: YTN; PAM sequence: TTT
actaattttaaactacactt

SEQ ID NO: 314516 - DNA, 20 bp, Artificial Sequence
  Description of Artificial Sequence: Synthetic oligonucleotide
  Target: LAMA2; (+) strand; PAM type: YTN; PAM sequence: TTA
ctaattttaaactacacttt

SEQ ID NO: 314517 - DNA, 20 bp, Artificial Sequence
  Description of Artificial Sequence: Synthetic oligonucleotide
  Target: LAMA2; (+) strand; PAM type: YTN; PAM sequence: CTA
attttaaactacactttctg

SEQ ID NO: 314518 - DNA, 20 bp, Artificial Sequence
  Description of Artificial Sequence: Synthetic oligonucleotide
  Target: LAMA2; (+) strand; PAM type: YTN; PAM sequence: TTT
taaactacactttctgacag

SEQ ID NO: 314519 - DNA, 20 bp, Artificial Sequence
  Description of Artificial Sequence: Synthetic oligonucleotide
  Target: LAMA2; (+) strand; PAM type: YTN; PAM sequence: TTT
aaactacactttctgacaga

SEQ ID NO: 314520 - DNA, 20 bp, Artificial Sequence
  Description of Artificial Sequence: Synthetic oligonucleotide
  Target: LAMA2; (+) strand; PAM type: YTN; PAM sequence: TTA
aactacactttctgacagaa

SEQ ID NO: 314521 - DNA, 20 bp, Artificial Sequence
  Description of Artificial Sequence: Synthetic oligonucleotide
  Target: LAMA2; (+) strand; PAM type: YTN; PAM sequence: CTA
cactttctgacagaattatt

SEQ ID NO: 314522 - DNA, 20 bp, Artificial Sequence
  Description of Artificial Sequence: Synthetic oligonucleotide
  Target: LAMA2; (+) strand; PAM type: YTN; PAM sequence: CTT
tctgacagaattattaaact

SEQ ID NO: 314523 - DNA, 20 bp, Artificial Sequence
  Description of Artificial Sequence: Synthetic oligonucleotide
  Target: LAMA2; (+) strand; PAM type: YTN; PAM sequence: TTT
ctgacagaattattaaactc

SEQ ID NO: 314524 - DNA, 20 bp, Artificial Sequence
  Description of Artificial Sequence: Synthetic oligonucleotide
  Target: LAMA2; (+) strand; PAM type: YTN; PAM sequence: TTC
tgacagaattattaaactcc

SEQ ID NO: 314525 - DNA, 20 bp, Artificial Sequence
  Description of Artificial Sequence: Synthetic oligonucleotide
  Target: LAMA2; (+) strand; PAM type: YTN; PAM sequence: CTG
acagaattattaaactccct

SEQ ID NO: 314526 - DNA, 20 bp, Artificial Sequence
  Description of Artificial Sequence: Synthetic oligonucleotide
  Target: LAMA2; (+) strand; PAM type: YTN; PAM sequence: TTA
ttaaactcccttcagtatgt

SEQ ID NO: 314527 - DNA, 20 bp, Artificial Sequence
  Description of Artificial Sequence: Synthetic oligonucleotide
  Target: LAMA2; (+) strand; PAM type: YTN; PAM sequence: TTA
aactcccttcagtatgtttc

SEQ ID NO: 314528 - DNA, 20 bp, Artificial Sequence
  Description of Artificial Sequence: Synthetic oligonucleotide
  Target: LAMA2; (+) strand; PAM type: YTN; PAM sequence: CTC
ccttcagtatgtttcatcac

SEQ ID NO: 314529 - DNA, 20 bp, Artificial Sequence
  Description of Artificial Sequence: Synthetic oligonucleotide
  Target: LAMA2; (+) strand; PAM type: YTN; PAM sequence: CTT
cagtatgtttcatcacattt

SEQ ID NO: 314530 - DNA, 20 bp, Artificial Sequence
  Description of Artificial Sequence: Synthetic oligonucleotide
  Target: LAMA2; (+) strand; PAM type: YTN; PAM sequence: TTC
agtatgtttcatcacatttg

SEQ ID NO: 314531 - DNA, 20 bp, Artificial Sequence
  Description of Artificial Sequence: Synthetic oligonucleotide
  Target: LAMA2; (+) strand; PAM type: YTN; PAM sequence: TTT
catcacatttggaaatctat

SEQ ID NO: 314532 - DNA, 20 bp, Artificial Sequence
  Description of Artificial Sequence: Synthetic oligonucleotide
  Target: LAMA2; (+) strand; PAM type: YTN; PAM sequence: TTC
atcacatttggaaatctatt

SEQ ID NO: 314533 - DNA, 20 bp, Artificial Sequence
  Description of Artificial Sequence: Synthetic oligonucleotide
  Target: LAMA2; (+) strand; PAM type: YTN; PAM sequence: TTT
ggaaatctattaattgatga

SEQ ID NO: 314534 - DNA, 20 bp, Artificial Sequence
  Description of Artificial Sequence: Synthetic oligonucleotide
  Target: LAMA2; (+) strand; PAM type: YTN; PAM sequence: TTG
gaaatctattaattgatgat

SEQ ID NO: 314535 - DNA, 20 bp, Artificial Sequence
  Description of Artificial Sequence: Synthetic oligonucleotide
  Target: LAMA2; (+) strand; PAM type: YTN; PAM sequence: CTA
ttaattgatgatttttgtta

SEQ ID NO: 314536 - DNA, 20 bp, Artificial Sequence
  Description of Artificial Sequence: Synthetic oligonucleotide
  Target: LAMA2; (+) strand; PAM type: YTN; PAM sequence: TTA
attgatgatttttgttatta

SEQ ID NO: 314537 - DNA, 20 bp, Artificial Sequence
  Description of Artificial Sequence: Synthetic oligonucleotide
  Target: LAMA2; (+) strand; PAM type: YTN; PAM sequence: TTG
atgatttttgttattatttg

SEQ ID NO: 314538 - DNA, 20 bp, Artificial Sequence
  Description of Artificial Sequence: Synthetic oligonucleotide
  Target: LAMA2; (+) strand; PAM type: YTN; PAM sequence: TTT
ttgttattatttgtgtttca

SEQ ID NO: 314539 - DNA, 20 bp, Artificial Sequence
  Description of Artificial Sequence: Synthetic oligonucleotide
  Target: LAMA2; (+) strand; PAM type: YTN; PAM sequence: TTT
tgttattatttgtgtttcat

SEQ ID NO: 314540 - DNA, 20 bp, Artificial Sequence
  Description of Artificial Sequence: Synthetic oligonucleotide
  Target: LAMA2; (+) strand; PAM type: YTN; PAM sequence: TTT
gttattatttgtgtttcatt

SEQ ID NO: 314541 - DNA, 20 bp, Artificial Sequence
  Description of Artificial Sequence: Synthetic oligonucleotide
  Target: LAMA2; (+) strand; PAM type: YTN; PAM sequence: TTG
ttattatttgtgtttcattg

SEQ ID NO: 314542 - DNA, 20 bp, Artificial Sequence
  Description of Artificial Sequence: Synthetic oligonucleotide
  Target: LAMA2; (+) strand; PAM type: YTN; PAM sequence: TTA
ttatttgtgtttcattgtta

SEQ ID NO: 314543 - DNA, 20 bp, Artificial Sequence
  Description of Artificial Sequence: Synthetic oligonucleotide
  Target: LAMA2; (+) strand; PAM type: YTN; PAM sequence: TTA
tttgtgtttcattgttaaga

SEQ ID NO: 314544 - DNA, 20 bp, Artificial Sequence
  Description of Artificial Sequence: Synthetic oligonucleotide
  Target: LAMA2; (+) strand; PAM type: YTN; PAM sequence: TTT
gtgtttcattgttaagaaaa

SEQ ID NO: 314545 - DNA, 20 bp, Artificial Sequence
  Description of Artificial Sequence: Synthetic oligonucleotide
  Target: LAMA2; (+) strand; PAM type: YTN; PAM sequence: TTG
tgtttcattgttaagaaaac

SEQ ID NO: 314546 - DNA, 20 bp, Artificial Sequence
  Description of Artificial Sequence: Synthetic oligonucleotide
  Target: LAMA2; (+) strand; PAM type: YTN; PAM sequence: TTT
cattgttaagaaaaccatcc

SEQ ID NO: 314547 - DNA, 20 bp, Artificial Sequence
  Description of Artificial Sequence: Synthetic oligonucleotide
  Target: LAMA2; (+) strand; PAM type: YTN; PAM sequence: TTC
attgttaagaaaaccatcct

SEQ ID NO: 314548 - DNA, 20 bp, Artificial Sequence
  Description of Artificial Sequence: Synthetic oligonucleotide
  Target: LAMA2; (+) strand; PAM type: YTN; PAM sequence: TTG
ttaagaaaaccatcctgatg

SEQ ID NO: 314549 - DNA, 20 bp, Artificial Sequence
  Description of Artificial Sequence: Synthetic oligonucleotide
  Target: LAMA2; (+) strand; PAM type: YTN; PAM sequence: TTA
agaaaaccatcctgatgctt

SEQ ID NO: 314550 - DNA, 20 bp, Artificial Sequence
  Description of Artificial Sequence: Synthetic oligonucleotide
  Target: LAMA2; (+) strand; PAM type: YTN; PAM sequence: CTG
atgcttttctctcccacatt

SEQ ID NO: 314551 - DNA, 20 bp, Artificial Sequence
  Description of Artificial Sequence: Synthetic oligonucleotide
  Target: LAMA2; (+) strand; PAM type: YTN; PAM sequence: CTT
ttctctcccacatttttgta

SEQ ID NO: 314552 - DNA, 20 bp, Artificial Sequence
  Description of Artificial Sequence: Synthetic oligonucleotide
  Target: LAMA2; (+) strand; PAM type: YTN; PAM sequence: TTT
tctctcccacatttttgtag

SEQ ID NO: 314553 - DNA, 20 bp, Artificial Sequence
  Description of Artificial Sequence: Synthetic oligonucleotide
  Target: LAMA2; (+) strand; PAM type: YTN; PAM sequence: TTT
ctctcccacatttttgtagc

SEQ ID NO: 314554 - DNA, 20 bp, Artificial Sequence
  Description of Artificial Sequence: Synthetic oligonucleotide
  Target: LAMA2; (+) strand; PAM type: YTN; PAM sequence: TTC
tctcccacatttttgtagct

SEQ ID NO: 314555 - DNA, 20 bp, Artificial Sequence
  Description of Artificial Sequence: Synthetic oligonucleotide
  Target: LAMA2; (+) strand; PAM type: YTN; PAM sequence: CTC
tcccacatttttgtagcttc

SEQ ID NO: 314556 - DNA, 20 bp, Artificial Sequence
  Description of Artificial Sequence: Synthetic oligonucleotide
  Target: LAMA2; (+) strand; PAM type: YTN; PAM sequence: CTC
ccacatttttgtagcttcct

SEQ ID NO: 314557 - DNA, 20 bp, Artificial Sequence
  Description of Artificial Sequence: Synthetic oligonucleotide
  Target: LAMA2; (+) strand; PAM type: YTN; PAM sequence: TTT
ttgtagcttccttagaaaga

SEQ ID NO: 314558 - DNA, 20 bp, Artificial Sequence
  Description of Artificial Sequence: Synthetic oligonucleotide
  Target: LAMA2; (+) strand; PAM type: YTN; PAM sequence: TTT
tgtagcttccttagaaagag

SEQ ID NO: 314559 - DNA, 20 bp, Artificial Sequence
  Description of Artificial Sequence: Synthetic oligonucleotide
  Target: LAMA2; (+) strand; PAM type: YTN; PAM sequence: TTT
gtagcttccttagaaagagt

SEQ ID NO: 314560 - DNA, 20 bp, Artificial Sequence
  Description of Artificial Sequence: Synthetic oligonucleotide
  Target: LAMA2; (+) strand; PAM type: YTN; PAM sequence: TTG
tagcttccttagaaagagtg

SEQ ID NO: 314561 - DNA, 20 bp, Artificial Sequence
  Description of Artificial Sequence: Synthetic oligonucleotide
  Target: LAMA2; (+) strand; PAM type: YTN; PAM sequence: CTT
ccttagaaagagtgaagaaa

SEQ ID NO: 314562 - DNA, 20 bp, Artificial Sequence
  Description of Artificial Sequence: Synthetic oligonucleotide
  Target: LAMA2; (+) strand; PAM type: YTN; PAM sequence: TTC
cttagaaagagtgaagaaaa

SEQ ID NO: 314563 - DNA, 20 bp, Artificial Sequence
  Description of Artificial Sequence: Synthetic oligonucleotide
  Target: LAMA2; (+) strand; PAM type: YTN; PAM sequence: CTT
agaaagagtgaagaaaaggt

SEQ ID NO: 314564 - DNA, 20 bp, Artificial Sequence
  Description of Artificial Sequence: Synthetic oligonucleotide
  Target: LAMA2; (+) strand; PAM type: YTN; PAM sequence: TTA
gaaagagtgaagaaaaggta

SEQ ID NO: 314565 - DNA, 20 bp, Artificial Sequence
  Description of Artificial Sequence: Synthetic oligonucleotide
  Target: LAMA2; (+) strand; PAM type: YTN; PAM sequence: TTT
ttaataaattatgtgtctga

SEQ ID NO: 314566 - DNA, 20 bp, Artificial Sequence
  Description of Artificial Sequence: Synthetic oligonucleotide
  Target: LAMA2; (+) strand; PAM type: YTN; PAM sequence: TTT
taataaattatgtgtctgaa

SEQ ID NO: 314567 - DNA, 20 bp, Artificial Sequence
  Description of Artificial Sequence: Synthetic oligonucleotide
  Target: LAMA2; (+) strand; PAM type: YTN; PAM sequence: TTT
aataaattatgtgtctgaag

SEQ ID NO: 314568 - DNA, 20 bp, Artificial Sequence
  Description of Artificial Sequence: Synthetic oligonucleotide
  Target: LAMA2; (+) strand; PAM type: YTN; PAM sequence: TTA
ataaattatgtgtctgaaga

SEQ ID NO: 314569 - DNA, 20 bp, Artificial Sequence
  Description of Artificial Sequence: Synthetic oligonucleotide
  Target: LAMA2; (+) strand; PAM type: YTN; PAM sequence: TTA
tgtgtctgaagatgccttaa

SEQ ID NO: 314570 - DNA, 20 bp, Artificial Sequence
  Description of Artificial Sequence: Synthetic oligonucleotide
  Target: LAMA2; (+) strand; PAM type: YTN; PAM sequence: CTG
aagatgccttaattcccccc

SEQ ID NO: 314571 - DNA, 20 bp, Artificial Sequence
  Description of Artificial Sequence: Synthetic oligonucleotide
  Target: LAMA2; (+) strand; PAM type: YTN; PAM sequence: CTT
aattcccccctcttttagat

SEQ ID NO: 314572 - DNA, 20 bp, Artificial Sequence
  Description of Artificial Sequence: Synthetic oligonucleotide
  Target: LAMA2; (+) strand; PAM type: YTN; PAM sequence: TTA
attcccccctcttttagata

SEQ ID NO: 314573 - DNA, 20 bp, Artificial Sequence
  Description of Artificial Sequence: Synthetic oligonucleotide
  Target: LAMA2; (+) strand; PAM type: YTN; PAM sequence: TTC
ccccctcttttagatatcag

SEQ ID NO: 314574 - DNA, 20 bp, Artificial Sequence
  Description of Artificial Sequence: Synthetic oligonucleotide
  Target: LAMA2; (+) strand; PAM type: YTN; PAM sequence: CTC
ttttagatatcagctggctc

SEQ ID NO: 314575 - DNA, 20 bp, Artificial Sequence
  Description of Artificial Sequence: Synthetic oligonucleotide
  Target: LAMA2; (+) strand; PAM type: YTN; PAM sequence: CTT
ttagatatcagctggctcta

SEQ ID NO: 314576 - DNA, 20 bp, Artificial Sequence
  Description of Artificial Sequence: Synthetic oligonucleotide
  Target: LAMA2; (+) strand; PAM type: YTN; PAM sequence: TTT
tagatatcagctggctctag

SEQ ID NO: 314577 - DNA, 20 bp, Artificial Sequence
  Description of Artificial Sequence: Synthetic oligonucleotide
  Target: LAMA2; (+) strand; PAM type: YTN; PAM sequence: TTT
agatatcagctggctctaga

SEQ ID NO: 314578 - DNA, 20 bp, Artificial Sequence
  Description of Artificial Sequence: Synthetic oligonucleotide
  Target: LAMA2; (+) strand; PAM type: YTN; PAM sequence: TTA
gatatcagctggctctagaa

SEQ ID NO: 314579 - DNA, 20 bp, Artificial Sequence
  Description of Artificial Sequence: Synthetic oligonucleotide
  Target: LAMA2; (+) strand; PAM type: YTN; PAM sequence: CTG
gctctagaattctaggtaga

SEQ ID NO: 314580 - DNA, 20 bp, Artificial Sequence
  Description of Artificial Sequence: Synthetic oligonucleotide
  Target: LAMA2; (+) strand; PAM type: YTN; PAM sequence: CTC
tagaattctaggtagaaagc

SEQ ID NO: 314581 - DNA, 20 bp, Artificial Sequence
  Description of Artificial Sequence: Synthetic oligonucleotide
  Target: LAMA2; (+) strand; PAM type: YTN; PAM sequence: CTA
gaattctaggtagaaagcat

SEQ ID NO: 314582 - DNA, 20 bp, Artificial Sequence
  Description of Artificial Sequence: Synthetic oligonucleotide
  Target: LAMA2; (+) strand; PAM type: YTN; PAM sequence: TTC
taggtagaaagcatctcttc

SEQ ID NO: 314583 - DNA, 20 bp, Artificial Sequence
  Description of Artificial Sequence: Synthetic oligonucleotide
  Target: LAMA2; (+) strand; PAM type: YTN; PAM sequence: CTA
ggtagaaagcatctcttctc

SEQ ID NO: 314584 - DNA, 20 bp, Artificial Sequence
  Description of Artificial Sequence: Synthetic oligonucleotide
  Target: LAMA2; (+) strand; PAM type: YTN; PAM sequence: CTC
ttctcagaattttgaagata

SEQ ID NO: 314585 - DNA, 20 bp, Artificial Sequence
  Description of Artificial Sequence: Synthetic oligonucleotide
  Target: LAMA2; (+) strand; PAM type: YTN; PAM sequence: CTT
ctcagaattttgaagatatt

SEQ ID NO: 314586 - DNA, 20 bp, Artificial Sequence
  Description of Artificial Sequence: Synthetic oligonucleotide
  Target: LAMA2; (+) strand; PAM type: YTN; PAM sequence: TTC
tcagaattttgaagatattg

SEQ ID NO: 314587 - DNA, 20 bp, Artificial Sequence
  Description of Artificial Sequence: Synthetic oligonucleotide
  Target: LAMA2; (+) strand; PAM type: YTN; PAM sequence: CTC
agaattttgaagatattgct

SEQ ID NO: 314588 - DNA, 20 bp, Artificial Sequence
  Description of Artificial Sequence: Synthetic oligonucleotide
  Target: LAMA2; (+) strand; PAM type: YTN; PAM sequence: TTT
tgaagatattgcttcatggc

SEQ ID NO: 314589 - DNA, 20 bp, Artificial Sequence
  Description of Artificial Sequence: Synthetic oligonucleotide
  Target: LAMA2; (+) strand; PAM type: YTN; PAM sequence: TTT
gaagatattgcttcatggct

SEQ ID NO: 314590 - DNA, 20 bp, Artificial Sequence
  Description of Artificial Sequence: Synthetic oligonucleotide
  Target: LAMA2; (+) strand; PAM type: YTN; PAM sequence: TTG
aagatattgcttcatggctc

SEQ ID NO: 314591 - DNA, 20 bp, Artificial Sequence
  Description of Artificial Sequence: Synthetic oligonucleotide
  Target: LAMA2; (+) strand; PAM type: YTN; PAM sequence: TTG
cttcatggctctcaattctt

SEQ ID NO: 314592 - DNA, 20 bp, Artificial Sequence
  Description of Artificial Sequence: Synthetic oligonucleotide
  Target: LAMA2; (+) strand; PAM type: YTN; PAM sequence: CTT
catggctctcaattcttcac

SEQ ID NO: 314593 - DNA, 20 bp, Artificial Sequence
  Description of Artificial Sequence: Synthetic oligonucleotide
  Target: LAMA2; (+) strand; PAM type: YTN; PAM sequence: TTC
atggctctcaattcttcact

SEQ ID NO: 314594 - DNA, 20 bp, Artificial Sequence
  Description of Artificial Sequence: Synthetic oligonucleotide
  Target: LAMA2; (+) strand; PAM type: YTN; PAM sequence: CTC
tcaattcttcactcacctta

SEQ ID NO: 314595 - DNA, 20 bp, Artificial Sequence
  Description of Artificial Sequence: Synthetic oligonucleotide
  Target: LAMA2; (+) strand; PAM type: YTN; PAM sequence: CTC
aattcttcactcaccttact

SEQ ID NO: 314596 - DNA, 20 bp, Artificial Sequence
  Description of Artificial Sequence: Synthetic oligonucleotide
  Target: LAMA2; (+) strand; PAM type: YTN; PAM sequence: TTC
ttcactcaccttactctatg

SEQ ID NO: 314597 - DNA, 20 bp, Artificial Sequence
  Description of Artificial Sequence: Synthetic oligonucleotide
  Target: LAMA2; (+) strand; PAM type: YTN; PAM sequence: CTT
cactcaccttactctatgaa

SEQ ID NO: 314598 - DNA, 20 bp, Artificial Sequence
  Description of Artificial Sequence: Synthetic oligonucleotide
  Target: LAMA2; (+) strand; PAM type: YTN; PAM sequence: TTC
actcaccttactctatgaac

SEQ ID NO: 314599 - DNA, 20 bp, Artificial Sequence
  Description of Artificial Sequence: Synthetic oligonucleotide
  Target: LAMA2; (+) strand; PAM type: YTN; PAM sequence: CTC
accttactctatgaacccca

SEQ ID NO: 314600 - DNA, 20 bp, Artificial Sequence
  Description of Artificial Sequence: Synthetic oligonucleotide
  Target: LAMA2; (+) strand; PAM type: YTN; PAM sequence: CTT
actctatgaaccccagggtc

SEQ ID NO: 314601 - DNA, 20 bp, Artificial Sequence
  Description of Artificial Sequence: Synthetic oligonucleotide
  Target: LAMA2; (+) strand; PAM type: YTN; PAM sequence: TTA
ctctatgaaccccagggtct

SEQ ID NO: 314602 - DNA, 20 bp, Artificial Sequence
  Description of Artificial Sequence: Synthetic oligonucleotide
  Target: LAMA2; (+) strand; PAM type: YTN; PAM sequence: CTC
tatgaaccccagggtcttta

SEQ ID NO: 314603 - DNA, 20 bp, Artificial Sequence
  Description of Artificial Sequence: Synthetic oligonucleotide
  Target: LAMA2; (+) strand; PAM type: YTN; PAM sequence: CTA
tgaaccccagggtctttaca

SEQ ID NO: 314604 - DNA, 20 bp, Artificial Sequence
  Description of Artificial Sequence: Synthetic oligonucleotide
  Target: LAMA2; (+) strand; PAM type: YTN; PAM sequence: CTT
tacatcccttgaggactgaa

SEQ ID NO: 314605 - DNA, 20 bp, Artificial Sequence
  Description of Artificial Sequence: Synthetic oligonucleotide
  Target: LAMA2; (+) strand; PAM type: YTN; PAM sequence: TTT
acatcccttgaggactgaag

SEQ ID NO: 314606 - DNA, 20 bp, Artificial Sequence
  Description of Artificial Sequence: Synthetic oligonucleotide
  Target: LAMA2; (+) strand; PAM type: YTN; PAM sequence: TTA
catcccttgaggactgaagt

SEQ ID NO: 314607 - DNA, 20 bp, Artificial Sequence
  Description of Artificial Sequence: Synthetic oligonucleotide
  Target: LAMA2; (+) strand; PAM type: YTN; PAM sequence: CTT
gaggactgaagtgtgtttcc

SEQ ID NO: 314608 - DNA, 20 bp, Artificial Sequence
  Description of Artificial Sequence: Synthetic oligonucleotide
  Target: LAMA2; (+) strand; PAM type: YTN; PAM sequence: TTG
aggactgaagtgtgtttcca

SEQ ID NO: 314609 - DNA, 20 bp, Artificial Sequence
  Description of Artificial Sequence: Synthetic oligonucleotide
  Target: LAMA2; (+) strand; PAM type: YTN; PAM sequence: CTG
aagtgtgtttccacttcagg

SEQ ID NO: 314610 - DNA, 20 bp, Artificial Sequence
  Description of Artificial Sequence: Synthetic oligonucleotide
  Target: LAMA2; (+) strand; PAM type: YTN; PAM sequence: TTT
ccacttcaggtgctttgcac

SEQ ID NO: 314611 - DNA, 20 bp, Artificial Sequence
  Description of Artificial Sequence: Synthetic oligonucleotide
  Target: LAMA2; (+) strand; PAM type: YTN; PAM sequence: TTC
cacttcaggtgctttgcact

SEQ ID NO: 314612 - DNA, 20 bp, Artificial Sequence
  Description of Artificial Sequence: Synthetic oligonucleotide
  Target: LAMA2; (+) strand; PAM type: YTN; PAM sequence: CTT
caggtgctttgcactggctg

SEQ ID NO: 314613 - DNA, 20 bp, Artificial Sequence
  Description of Artificial Sequence: Synthetic oligonucleotide
  Target: LAMA2; (+) strand; PAM type: YTN; PAM sequence: TTC
aggtgctttgcactggctgg

SEQ ID NO: 314614 - DNA, 20 bp, Artificial Sequence
  Description of Artificial Sequence: Synthetic oligonucleotide
  Target: LAMA2; (+) strand; PAM type: YTN; PAM sequence: CTT
tgcactggctggtcttctat

SEQ ID NO: 314615 - DNA, 20 bp, Artificial Sequence
  Description of Artificial Sequence: Synthetic oligonucleotide
  Target: LAMA2; (+) strand; PAM type: YTN; PAM sequence: TTT
gcactggctggtcttctatc

SEQ ID NO: 314616 - DNA, 20 bp, Artificial Sequence
  Description of Artificial Sequence: Synthetic oligonucleotide
  Target: LAMA2; (+) strand; PAM type: YTN; PAM sequence: TTG
cactggctggtcttctatct

SEQ ID NO: 314617 - DNA, 20 bp, Artificial Sequence
  Description of Artificial Sequence: Synthetic oligonucleotide
  Target: LAMA2; (+) strand; PAM type: YTN; PAM sequence: CTG
gctggtcttctatctggaat

SEQ ID NO: 314618 - DNA, 20 bp, Artificial Sequence
  Description of Artificial Sequence: Synthetic oligonucleotide
  Target: LAMA2; (+) strand; PAM type: YTN; PAM sequence: CTG
gtcttctatctggaatgctt

SEQ ID NO: 314619 - DNA, 20 bp, Artificial Sequence
  Description of Artificial Sequence: Synthetic oligonucleotide
  Target: LAMA2; (+) strand; PAM type: YTN; PAM sequence: CTT
ctatctggaatgcttctccc

SEQ ID NO: 314620 - DNA, 20 bp, Artificial Sequence
  Description of Artificial Sequence: Synthetic oligonucleotide
  Target: LAMA2; (+) strand; PAM type: YTN; PAM sequence: TTC
tatctggaatgcttctcccc

SEQ ID NO: 314621 - DNA, 20 bp, Artificial Sequence
  Description of Artificial Sequence: Synthetic oligonucleotide
  Target: LAMA2; (+) strand; PAM type: YTN; PAM sequence: CTA
tctggaatgcttctccccaa

SEQ ID NO: 314622 - DNA, 20 bp, Artificial Sequence
  Description of Artificial Sequence: Synthetic oligonucleotide
  Target: LAMA2; (+) strand; PAM type: YTN; PAM sequence: CTG
gaatgcttctccccaagata

SEQ ID NO: 314623 - DNA, 20 bp, Artificial Sequence
  Description of Artificial Sequence: Synthetic oligonucleotide
  Target: LAMA2; (+) strand; PAM type: YTN; PAM sequence: CTT
ctccccaagatatcttctgg

SEQ ID NO: 314624 - DNA, 20 bp, Artificial Sequence
  Description of Artificial Sequence: Synthetic oligonucleotide
  Target: LAMA2; (+) strand; PAM type: YTN; PAM sequence: TTC
tccccaagatatcttctggc

SEQ ID NO: 314625 - DNA, 20 bp, Artificial Sequence
  Description of Artificial Sequence: Synthetic oligonucleotide
  Target: LAMA2; (+) strand; PAM type: YTN; PAM sequence: CTC
cccaagatatcttctggcta

SEQ ID NO: 314626 - DNA, 20 bp, Artificial Sequence
  Description of Artificial Sequence: Synthetic oligonucleotide
  Target: LAMA2; (+) strand; PAM type: YTN; PAM sequence: CTT
ctggctaactctcttttctt

SEQ ID NO: 314627 - DNA, 20 bp, Artificial Sequence
  Description of Artificial Sequence: Synthetic oligonucleotide
  Target: LAMA2; (+) strand; PAM type: YTN; PAM sequence: TTC
tggctaactctcttttcttc

SEQ ID NO: 314628 - DNA, 20 bp, Artificial Sequence
  Description of Artificial Sequence: Synthetic oligonucleotide
  Target: LAMA2; (+) strand; PAM type: YTN; PAM sequence: CTG
gctaactctcttttcttctt

SEQ ID NO: 314629 - DNA, 20 bp, Artificial Sequence
  Description of Artificial Sequence: Synthetic oligonucleotide
  Target: LAMA2; (+) strand; PAM type: YTN; PAM sequence: CTA
actctcttttcttcttagaa

SEQ ID NO: 314630 - DNA, 20 bp, Artificial Sequence
  Description of Artificial Sequence: Synthetic oligonucleotide
  Target: LAMA2; (+) strand; PAM type: YTN; PAM sequence: CTC
tcttttcttcttagaaaact

SEQ ID NO: 314631 - DNA, 20 bp, Artificial Sequence
  Description of Artificial Sequence: Synthetic oligonucleotide
  Target: LAMA2; (+) strand; PAM type: YTN; PAM sequence: CTC
ttttcttcttagaaaactgc

SEQ ID NO: 314632 - DNA, 20 bp, Artificial Sequence
  Description of Artificial Sequence: Synthetic oligonucleotide
  Target: LAMA2; (+) strand; PAM type: YTN; PAM sequence: CTT
ttcttcttagaaaactgcta

SEQ ID NO: 314633 - DNA, 20 bp, Artificial Sequence
  Description of Artificial Sequence: Synthetic oligonucleotide
  Target: LAMA2; (+) strand; PAM type: YTN; PAM sequence: TTT
tcttcttagaaaactgctaa

SEQ ID NO: 314634 - DNA, 20 bp, Artificial Sequence
  Description of Artificial Sequence: Synthetic oligonucleotide
  Target: LAMA2; (+) strand; PAM type: YTN; PAM sequence: TTT
cttcttagaaaactgctaag

SEQ ID NO: 314635 - DNA, 20 bp, Artificial Sequence
  Description of Artificial Sequence: Synthetic oligonucleotide
  Target: LAMA2; (+) strand; PAM type: YTN; PAM sequence: TTC
ttcttagaaaactgctaaga

SEQ ID NO: 314636 - DNA, 20 bp, Artificial Sequence
  Description of Artificial Sequence: Synthetic oligonucleotide
  Target: LAMA2; (+) strand; PAM type: YTN; PAM sequence: CTT
cttagaaaactgctaagatt

SEQ ID NO: 314637 - DNA, 20 bp, Artificial Sequence
  Description of Artificial Sequence: Synthetic oligonucleotide
  Target: LAMA2; (+) strand; PAM type: YTN; PAM sequence: TTC
ttagaaaactgctaagattt

SEQ ID NO: 314638 - DNA, 20 bp, Artificial Sequence
  Description of Artificial Sequence: Synthetic oligonucleotide
  Target: LAMA2; (+) strand; PAM type: YTN; PAM sequence: CTT
agaaaactgctaagatttac

SEQ ID NO: 314639 - DNA, 20 bp, Artificial Sequence
  Description of Artificial Sequence: Synthetic oligonucleotide
  Target: LAMA2; (+) strand; PAM type: YTN; PAM sequence: TTA
gaaaactgctaagatttacc

SEQ ID NO: 314640 - DNA, 20 bp, Artificial Sequence
  Description of Artificial Sequence: Synthetic oligonucleotide
  Target: LAMA2; (+) strand; PAM type: YTN; PAM sequence: CTG
ctaagatttaccattcccaa

SEQ ID NO: 314641 - DNA, 20 bp, Artificial Sequence
  Description of Artificial Sequence: Synthetic oligonucleotide
  Target: LAMA2; (+) strand; PAM type: YTN; PAM sequence: CTA
agatttaccattcccaatga

SEQ ID NO: 314642 - DNA, 20 bp, Artificial Sequence
  Description of Artificial Sequence: Synthetic oligonucleotide
  Target: LAMA2; (+) strand; PAM type: YTN; PAM sequence: TTT
accattcccaatgagccgcc

SEQ ID NO: 314643 - DNA, 20 bp, Artificial Sequence
  Description of Artificial Sequence: Synthetic oligonucleotide
  Target: LAMA2; (+) strand; PAM type: YTN; PAM sequence: TTA
ccattcccaatgagccgcct

SEQ ID NO: 314644 - DNA, 20 bp, Artificial Sequence
  Description of Artificial Sequence: Synthetic oligonucleotide
  Target: LAMA2; (+) strand; PAM type: YTN; PAM sequence: TTC
ccaatgagccgcctcttgtc

SEQ ID NO: 314645 - DNA, 20 bp, Artificial Sequence
  Description of Artificial Sequence: Synthetic oligonucleotide
  Target: LAMA2; (+) strand; PAM type: YTN; PAM sequence: CTC
ttgtccttttatttattttt

SEQ ID NO: 314646 - DNA, 20 bp, Artificial Sequence
  Description of Artificial Sequence: Synthetic oligonucleotide
  Target: LAMA2; (+) strand; PAM type: YTN; PAM sequence: CTT
gtccttttatttatttttgc

SEQ ID NO: 314647 - DNA, 20 bp, Artificial Sequence
  Description of Artificial Sequence: Synthetic oligonucleotide
  Target: LAMA2; (+) strand; PAM type: YTN; PAM sequence: TTG
tccttttatttatttttgca

SEQ ID NO: 314648 - DNA, 20 bp, Artificial Sequence
  Description of Artificial Sequence: Synthetic oligonucleotide
  Target: LAMA2; (+) strand; PAM type: YTN; PAM sequence: CTT
ttatttatttttgcaaactg

SEQ ID NO: 314649 - DNA, 20 bp, Artificial Sequence
  Description of Artificial Sequence: Synthetic oligonucleotide
  Target: LAMA2; (+) strand; PAM type: YTN; PAM sequence: TTT
tatttatttttgcaaactgc

SEQ ID NO: 314650 - DNA, 20 bp, Artificial Sequence
  Description of Artificial Sequence: Synthetic oligonucleotide
  Target: LAMA2; (+) strand; PAM type: YTN; PAM sequence: TTT
atttatttttgcaaactgcc

SEQ ID NO: 314651 - DNA, 20 bp, Artificial Sequence
  Description of Artificial Sequence: Synthetic oligonucleotide
  Target: LAMA2; (+) strand; PAM type: YTN; PAM sequence: TTA
tttatttttgcaaactgccc

SEQ ID NO: 314652 - DNA, 20 bp, Artificial Sequence
  Description of Artificial Sequence: Synthetic oligonucleotide
  Target: LAMA2; (+) strand; PAM type: YTN; PAM sequence: TTT
atttttgcaaactgcccctg

SEQ ID NO: 314653 - DNA, 20 bp, Artificial Sequence
  Description of Artificial Sequence: Synthetic oligonucleotide
  Target: LAMA2; (+) strand; PAM type: YTN; PAM sequence: TTA
tttttgcaaactgcccctgc

SEQ ID NO: 314654 - DNA, 20 bp, Artificial Sequence
  Description of Artificial Sequence: Synthetic oligonucleotide
  Target: LAMA2; (+) strand; PAM type: YTN; PAM sequence: TTT
ttgcaaactgcccctgccca

SEQ ID NO: 314655 - DNA, 20 bp, Artificial Sequence
  Description of Artificial Sequence: Synthetic oligonucleotide
  Target: LAMA2; (+) strand; PAM type: YTN; PAM sequence: TTT
tgcaaactgcccctgcccac

SEQ ID NO: 314656 - DNA, 20 bp, Artificial Sequence
  Description of Artificial Sequence: Synthetic oligonucleotide
  Target: LAMA2; (+) strand; PAM type: YTN; PAM sequence: TTT
gcaaactgcccctgcccact

SEQ ID NO: 314657 - DNA, 20 bp, Artificial Sequence
  Description of Artificial Sequence: Synthetic oligonucleotide
  Target: LAMA2; (+) strand; PAM type: YTN; PAM sequence: TTG
caaactgcccctgcccactg

SEQ ID NO: 314658 - DNA, 20 bp, Artificial Sequence
  Description of Artificial Sequence: Synthetic oligonucleotide
  Target: LAMA2; (+) strand; PAM type: YTN; PAM sequence: CTG
cccctgcccactgccattcc

SEQ ID NO: 314659 - DNA, 20 bp, Artificial Sequence
  Description of Artificial Sequence: Synthetic oligonucleotide
  Target: LAMA2; (+) strand; PAM type: YTN; PAM sequence: CTG
cccactgccattcctggtct

SEQ ID NO: 314660 - DNA, 20 bp, Artificial Sequence
  Description of Artificial Sequence: Synthetic oligonucleotide
  Target: LAMA2; (+) strand; PAM type: YTN; PAM sequence: CTG
ccattcctggtctccctaaa

SEQ ID NO: 314661 - DNA, 20 bp, Artificial Sequence
  Description of Artificial Sequence: Synthetic oligonucleotide
  Target: LAMA2; (+) strand; PAM type: YTN; PAM sequence: TTC
ctggtctccctaaacaagtc

SEQ ID NO: 314662 - DNA, 20 bp, Artificial Sequence
  Description of Artificial Sequence: Synthetic oligonucleotide
  Target: LAMA2; (+) strand; PAM type: YTN; PAM sequence: CTG
gtctccctaaacaagtctta

SEQ ID NO: 314663 - DNA, 20 bp, Artificial Sequence
  Description of Artificial Sequence: Synthetic oligonucleotide
  Target: LAMA2; (+) strand; PAM type: YTN; PAM sequence: CTC
cctaaacaagtcttagtatt

SEQ ID NO: 314664 - DNA, 20 bp, Artificial Sequence
  Description of Artificial Sequence: Synthetic oligonucleotide
  Target: LAMA2; (+) strand; PAM type: YTN; PAM sequence: CTA
aacaagtcttagtatttctt

SEQ ID NO: 314665 - DNA, 20 bp, Artificial Sequence
  Description of Artificial Sequence: Synthetic oligonucleotide
  Target: LAMA2; (+) strand; PAM type: YTN; PAM sequence: CTT
agtatttcttccctttctct

SEQ ID NO: 314666 - DNA, 20 bp, Artificial Sequence
  Description of Artificial Sequence: Synthetic oligonucleotide
  Target: LAMA2; (+) strand; PAM type: YTN; PAM sequence: TTA
gtatttcttccctttctctt

SEQ ID NO: 314667 - DNA, 20 bp, Artificial Sequence
  Description of Artificial Sequence: Synthetic oligonucleotide
  Target: LAMA2; (+) strand; PAM type: YTN; PAM sequence: TTT
cttccctttctcttttcatg

SEQ ID NO: 314668 - DNA, 20 bp, Artificial Sequence
  Description of Artificial Sequence: Synthetic oligonucleotide
  Target: LAMA2; (+) strand; PAM type: YTN; PAM sequence: TTC
ttccctttctcttttcatgt

SEQ ID NO: 314669 - DNA, 20 bp, Artificial Sequence
  Description of Artificial Sequence: Synthetic oligonucleotide
  Target: LAMA2; (+) strand; PAM type: YTN; PAM sequence: CTT
ccctttctcttttcatgttg

SEQ ID NO: 314670 - DNA, 20 bp, Artificial Sequence
  Description of Artificial Sequence: Synthetic oligonucleotide
  Target: LAMA2; (+) strand; PAM type: YTN; PAM sequence: TTC
cctttctcttttcatgttga

SEQ ID NO: 314671 - DNA, 20 bp, Artificial Sequence
  Description of Artificial Sequence: Synthetic oligonucleotide
  Target: LAMA2; (+) strand; PAM type: YTN; PAM sequence: CTT
tctcttttcatgttgaaata

SEQ ID NO: 314672 - DNA, 20 bp, Artificial Sequence
  Description of Artificial Sequence: Synthetic oligonucleotide
  Target: LAMA2; (+) strand; PAM type: YTN; PAM sequence: TTT
ctcttttcatgttgaaatac

SEQ ID NO: 314673 - DNA, 20 bp, Artificial Sequence
  Description of Artificial Sequence: Synthetic oligonucleotide
  Target: LAMA2; (+) strand; PAM type: YTN; PAM sequence: TTC
tcttttcatgttgaaataca

SEQ ID NO: 314674 - DNA, 20 bp, Artificial Sequence
  Description of Artificial Sequence: Synthetic oligonucleotide
  Target: LAMA2; (+) strand; PAM type: YTN; PAM sequence: CTC
ttttcatgttgaaatacact

SEQ ID NO: 314675 - DNA, 20 bp, Artificial Sequence
  Description of Artificial Sequence: Synthetic oligonucleotide
  Target: LAMA2; (+) strand; PAM type: YTN; PAM sequence: CTT
ttcatgttgaaatacactat

SEQ ID NO: 314676 - DNA, 20 bp, Artificial Sequence
  Description of Artificial Sequence: Synthetic oligonucleotide
  Target: LAMA2; (+) strand; PAM type: YTN; PAM sequence: TTT
tcatgttgaaatacactata

SEQ ID NO: 314677 - DNA, 20 bp, Artificial Sequence
  Description of Artificial Sequence: Synthetic oligonucleotide
  Target: LAMA2; (+) strand; PAM type: YTN; PAM sequence: TTT
catgttgaaatacactatat

SEQ ID NO: 314678 - DNA, 20 bp, Artificial Sequence
  Description of Artificial Sequence: Synthetic oligonucleotide
  Target: LAMA2; (+) strand; PAM type: YTN; PAM sequence: TTC
atgttgaaatacactatata

SEQ ID NO: 314679 - DNA, 20 bp, Artificial Sequence
  Description of Artificial Sequence: Synthetic oligonucleotide
  Target: LAMA2; (+) strand; PAM type: YTN; PAM sequence: TTG
aaatacactatatagtttac

SEQ ID NO: 314680 - DNA, 20 bp, Artificial Sequence
  Description of Artificial Sequence: Synthetic oligonucleotide
  Target: LAMA2; (+) strand; PAM type: YTN; PAM sequence: CTA
tatagtttacttatgtatta

SEQ ID NO: 314681 - DNA, 20 bp, Artificial Sequence
  Description of Artificial Sequence: Synthetic oligonucleotide
  Target: LAMA2; (+) strand; PAM type: YTN; PAM sequence: TTT
acttatgtattaggtaaact

SEQ ID NO: 314682 - DNA, 20 bp, Artificial Sequence
  Description of Artificial Sequence: Synthetic oligonucleotide
  Target: LAMA2; (+) strand; PAM type: YTN; PAM sequence: TTA
cttatgtattaggtaaactt

SEQ ID NO: 314683 - DNA, 20 bp, Artificial Sequence
  Description of Artificial Sequence: Synthetic oligonucleotide
  Target: LAMA2; (+) strand; PAM type: YTN; PAM sequence: CTT
atgtattaggtaaacttttt

SEQ ID NO: 314684 - DNA, 20 bp, Artificial Sequence
  Description of Artificial Sequence: Synthetic oligonucleotide
  Target: LAMA2; (+) strand; PAM type: YTN; PAM sequence: TTA
tgtattaggtaaacttttta

SEQ ID NO: 314685 - DNA, 20 bp, Artificial Sequence
  Description of Artificial Sequence: Synthetic oligonucleotide
  Target: LAMA2; (+) strand; PAM type: YTN; PAM sequence: TTA
ggtaaactttttattgcctc

SEQ ID NO: 314686 - DNA, 20 bp, Artificial Sequence
  Description of Artificial Sequence: Synthetic oligonucleotide
  Target: LAMA2; (+) strand; PAM type: YTN; PAM sequence: CTT
tttattgcctctctctgtac

SEQ ID NO: 314687 - DNA, 20 bp, Artificial Sequence
  Description of Artificial Sequence: Synthetic oligonucleotide
  Target: LAMA2; (+) strand; PAM type: YTN; PAM sequence: TTT
ttattgcctctctctgtact

SEQ ID NO: 314688 - DNA, 20 bp, Artificial Sequence
  Description of Artificial Sequence: Synthetic oligonucleotide
  Target: LAMA2; (+) strand; PAM type: YTN; PAM sequence: TTT
tattgcctctctctgtactc

SEQ ID NO: 314689 - DNA, 20 bp, Artificial Sequence
  Description of Artificial Sequence: Synthetic oligonucleotide
  Target: LAMA2; (+) strand; PAM type: YTN; PAM sequence: TTT
attgcctctctctgtactcc

SEQ ID NO: 314690 - DNA, 20 bp, Artificial Sequence
  Description of Artificial Sequence: Synthetic oligonucleotide
  Target: LAMA2; (+) strand; PAM type: YTN; PAM sequence: TTA
ttgcctctctctgtactccc

SEQ ID NO: 314691 - DNA, 20 bp, Artificial Sequence
  Description of Artificial Sequence: Synthetic oligonucleotide
  Target: LAMA2; (+) strand; PAM type: YTN; PAM sequence: TTG
cctctctctgtactccccaa

SEQ ID NO: 314692 - DNA, 20 bp, Artificial Sequence
  Description of Artificial Sequence: Synthetic oligonucleotide
  Target: LAMA2; (+) strand; PAM type: YTN; PAM sequence: CTC
tctctgtactccccaagcta

SEQ ID NO: 314693 - DNA, 20 bp, Artificial Sequence
  Description of Artificial Sequence: Synthetic oligonucleotide
  Target: LAMA2; (+) strand; PAM type: YTN; PAM sequence: CTC
tctgtactccccaagctact

SEQ ID NO: 314694 - DNA, 20 bp, Artificial Sequence
  Description of Artificial Sequence: Synthetic oligonucleotide
  Target: LAMA2; (+) strand; PAM type: YTN; PAM sequence: CTC
tgtactccccaagctacttc

SEQ ID NO: 314695 - DNA, 20 bp, Artificial Sequence
  Description of Artificial Sequence: Synthetic oligonucleotide
  Target: LAMA2; (+) strand; PAM type: YTN; PAM sequence: CTG
tactccccaagctacttctt

SEQ ID NO: 314696 - DNA, 20 bp, Artificial Sequence
  Description of Artificial Sequence: Synthetic oligonucleotide
  Target: LAMA2; (+) strand; PAM type: YTN; PAM sequence: CTC
cccaagctacttcttgaccc

SEQ ID NO: 314697 - DNA, 20 bp, Artificial Sequence
  Description of Artificial Sequence: Synthetic oligonucleotide
  Target: LAMA2; (+) strand; PAM type: YTN; PAM sequence: CTA
cttcttgacccttgaaaaaa

SEQ ID NO: 314698 - DNA, 20 bp, Artificial Sequence
  Description of Artificial Sequence: Synthetic oligonucleotide
  Target: LAMA2; (+) strand; PAM type: YTN; PAM sequence: CTT
cttgacccttgaaaaaatgt

SEQ ID NO: 314699 - DNA, 20 bp, Artificial Sequence
  Description of Artificial Sequence: Synthetic oligonucleotide
  Target: LAMA2; (+) strand; PAM type: YTN; PAM sequence: TTC
ttgacccttgaaaaaatgta

SEQ ID NO: 314700 - DNA, 20 bp, Artificial Sequence
  Description of Artificial Sequence: Synthetic oligonucleotide
  Target: LAMA2; (+) strand; PAM type: YTN; PAM sequence: CTT
gacccttgaaaaaatgtaga

SEQ ID NO: 314701 - DNA, 20 bp, Artificial Sequence
  Description of Artificial Sequence: Synthetic oligonucleotide
  Target: LAMA2; (+) strand; PAM type: YTN; PAM sequence: TTG
acccttgaaaaaatgtagat

SEQ ID NO: 314702 - DNA, 20 bp, Artificial Sequence
  Description of Artificial Sequence: Synthetic oligonucleotide
  Target: LAMA2; (+) strand; PAM type: YTN; PAM sequence: CTT
gaaaaaatgtagattccatg

SEQ ID NO: 314703 - DNA, 20 bp, Artificial Sequence
  Description of Artificial Sequence: Synthetic oligonucleotide
  Target: LAMA2; (+) strand; PAM type: YTN; PAM sequence: TTG
aaaaaatgtagattccatga

SEQ ID NO: 314704 - DNA, 20 bp, Artificial Sequence
  Description of Artificial Sequence: Synthetic oligonucleotide
  Target: LAMA2; (+) strand; PAM type: YTN; PAM sequence: TTC
catgatcgtataaaattttt

SEQ ID NO: 314705 - DNA, 20 bp, Artificial Sequence
  Description of Artificial Sequence: Synthetic oligonucleotide
  Target: LAMA2; (+) strand; PAM type: YTN; PAM sequence: TTT
ttattactttaaaaactttt

SEQ ID NO: 314706 - DNA, 20 bp, Artificial Sequence
  Description of Artificial Sequence: Synthetic oligonucleotide
  Target: LAMA2; (+) strand; PAM type: YTN; PAM sequence: TTT
tattactttaaaaacttttc

SEQ ID NO: 314707 - DNA, 20 bp, Artificial Sequence
  Description of Artificial Sequence: Synthetic oligonucleotide
  Target: LAMA2; (+) strand; PAM type: YTN; PAM sequence: TTT
attactttaaaaacttttct

SEQ ID NO: 314708 - DNA, 20 bp, Artificial Sequence
  Description of Artificial Sequence: Synthetic oligonucleotide
  Target: LAMA2; (+) strand; PAM type: YTN; PAM sequence: TTA
ttactttaaaaacttttcta

SEQ ID NO: 314709 - DNA, 20 bp, Artificial Sequence
  Description of Artificial Sequence: Synthetic oligonucleotide
  Target: LAMA2; (+) strand; PAM type: YTN; PAM sequence: TTA
ctttaaaaacttttctaaat

SEQ ID NO: 314710 - DNA, 20 bp, Artificial Sequence
  Description of Artificial Sequence: Synthetic oligonucleotide
  Target: LAMA2; (+) strand; PAM type: YTN; PAM sequence: CTT
taaaaacttttctaaattaa

SEQ ID NO: 314711 - DNA, 20 bp, Artificial Sequence
  Description of Artificial Sequence: Synthetic oligonucleotide
  Target: LAMA2; (+) strand; PAM type: YTN; PAM sequence: TTT
aaaaacttttctaaattaat

SEQ ID NO: 314712 - DNA, 20 bp, Artificial Sequence
  Description of Artificial Sequence: Synthetic oligonucleotide
  Target: LAMA2; (+) strand; PAM type: YTN; PAM sequence: TTA
aaaacttttctaaattaata

SEQ ID NO: 314713 - DNA, 20 bp, Artificial Sequence
  Description of Artificial Sequence: Synthetic oligonucleotide
  Target: LAMA2; (+) strand; PAM type: YTN; PAM sequence: CTT
ttctaaattaataaattata

SEQ ID NO: 314714 - DNA, 20 bp, Artificial Sequence
  Description of Artificial Sequence: Synthetic oligonucleotide
  Target: LAMA2; (+) strand; PAM type: YTN; PAM sequence: TTT
tctaaattaataaattataa

SEQ ID NO: 314715 - DNA, 20 bp, Artificial Sequence
  Description of Artificial Sequence: Synthetic oligonucleotide
  Target: LAMA2; (+) strand; PAM type: YTN; PAM sequence: TTT
ctaaattaataaattataaa

SEQ ID NO: 314716 - DNA, 20 bp, Artificial Sequence
  Description of Artificial Sequence: Synthetic oligonucleotide
  Target: LAMA2; (+) strand; PAM type: YTN; PAM sequence: TTC
taaattaataaattataaaa

SEQ ID NO: 314717 - DNA, 20 bp, Artificial Sequence
  Description of Artificial Sequence: Synthetic oligonucleotide
  Target: LAMA2; (+) strand; PAM type: YTN; PAM sequence: CTA
aattaataaattataaaaaa

SEQ ID NO: 314718 - DNA, 20 bp, Artificial Sequence
  Description of Artificial Sequence: Synthetic oligonucleotide
  Target: LAMA2; (+) strand; PAM type: YTN; PAM sequence: TTA
ataaattataaaaaattaat

SEQ ID NO: 314719 - DNA, 20 bp, Artificial Sequence
  Description of Artificial Sequence: Synthetic oligonucleotide
  Target: LAMA2; (+) strand; PAM type: YTN; PAM sequence: TTA
taaaaaattaatatattcaa

SEQ ID NO: 314720 - DNA, 20 bp, Artificial Sequence
  Description of Artificial Sequence: Synthetic oligonucleotide
  Target: LAMA2; (+) strand; PAM type: YTN; PAM sequence: TTA
atatattcaaagcaactaga

SEQ ID NO: 314721 - DNA, 20 bp, Artificial Sequence
  Description of Artificial Sequence: Synthetic oligonucleotide
  Target: LAMA2; (+) strand; PAM type: YTN; PAM sequence: TTC
aaagcaactagatgtatgcc

SEQ ID NO: 314722 - DNA, 20 bp, Artificial Sequence
  Description of Artificial Sequence: Synthetic oligonucleotide
  Target: LAMA2; (+) strand; PAM type: YTN; PAM sequence: CTA
gatgtatgcctaaacaccta

SEQ ID NO: 314723 - DNA, 20 bp, Artificial Sequence
  Description of Artificial Sequence: Synthetic oligonucleotide
  Target: LAMA2; (+) strand; PAM type: YTN; PAM sequence: CTA
aacacctagaaaagtgcctg

SEQ ID NO: 314724 - DNA, 20 bp, Artificial Sequence
  Description of Artificial Sequence: Synthetic oligonucleotide
  Target: LAMA2; (+) strand; PAM type: YTN; PAM sequence: CTA
gaaaagtgcctggcgcatgt

SEQ ID NO: 314725 - DNA, 20 bp, Artificial Sequence
  Description of Artificial Sequence: Synthetic oligonucleotide
  Target: LAMA2; (+) strand; PAM type: YTN; PAM sequence: CTG
gcgcatgttagaaattagaa

SEQ ID NO: 314726 - DNA, 20 bp, Artificial Sequence
  Description of Artificial Sequence: Synthetic oligonucleotide
  Target: LAMA2; (+) strand; PAM type: YTN; PAM sequence: TTA
gaaattagaaagtatttctt

SEQ ID NO: 314727 - DNA, 20 bp, Artificial Sequence
  Description of Artificial Sequence: Synthetic oligonucleotide
  Target: LAMA2; (+) strand; PAM type: YTN; PAM sequence: TTA
gaaagtatttcttatgaaca

SEQ ID NO: 314728 - DNA, 20 bp, Artificial Sequence
  Description of Artificial Sequence: Synthetic oligonucleotide
  Target: LAMA2; (+) strand; PAM type: YTN; PAM sequence: TTT
cttatgaacagttttatgat

SEQ ID NO: 314729 - DNA, 20 bp, Artificial Sequence
  Description of Artificial Sequence: Synthetic oligonucleotide
  Target: LAMA2; (+) strand; PAM type: YTN; PAM sequence: TTC
ttatgaacagttttatgatt

SEQ ID NO: 314730 - DNA, 20 bp, Artificial Sequence
  Description of Artificial Sequence: Synthetic oligonucleotide
  Target: LAMA2; (+) strand; PAM type: YTN; PAM sequence: CTT
atgaacagttttatgatttt

SEQ ID NO: 314731 - DNA, 20 bp, Artificial Sequence
  Description of Artificial Sequence: Synthetic oligonucleotide
  Target: LAMA2; (+) strand; PAM type: YTN; PAM sequence: TTA
tgaacagttttatgattttt

SEQ ID NO: 314732 - DNA, 20 bp, Artificial Sequence
  Description of Artificial Sequence: Synthetic oligonucleotide
  Target: LAMA2; (+) strand; PAM type: YTN; PAM sequence: TTT
tatgatttttcacattgaag

SEQ ID NO: 314733 - DNA, 20 bp, Artificial Sequence
  Description of Artificial Sequence: Synthetic oligonucleotide
  Target: LAMA2; (+) strand; PAM type: YTN; PAM sequence: TTT
atgatttttcacattgaagt

SEQ ID NO: 314734 - DNA, 20 bp, Artificial Sequence
  Description of Artificial Sequence: Synthetic oligonucleotide
  Target: LAMA2; (+) strand; PAM type: YTN; PAM sequence: TTA
tgatttttcacattgaagtt

SEQ ID NO: 314735 - DNA, 20 bp, Artificial Sequence
  Description of Artificial Sequence: Synthetic oligonucleotide
  Target: LAMA2; (+) strand; PAM type: YTN; PAM sequence: TTT
ttcacattgaagttgaagag

SEQ ID NO: 314736 - DNA, 20 bp, Artificial Sequence
  Description of Artificial Sequence: Synthetic oligonucleotide
  Target: LAMA2; (+) strand; PAM type: YTN; PAM sequence: TTT
tcacattgaagttgaagagt

SEQ ID NO: 314737 - DNA, 20 bp, Artificial Sequence
  Description of Artificial Sequence: Synthetic oligonucleotide
  Target: LAMA2; (+) strand; PAM type: YTN; PAM sequence: TTT
cacattgaagttgaagagtc

SEQ ID NO: 314738 - DNA, 20 bp, Artificial Sequence
  Description of Artificial Sequence: Synthetic oligonucleotide
  Target: LAMA2; (+) strand; PAM type: YTN; PAM sequence: TTC
acattgaagttgaagagtct

SEQ ID NO: 314739 - DNA, 20 bp, Artificial Sequence
  Description of Artificial Sequence: Synthetic oligonucleotide
  Target: LAMA2; (+) strand; PAM type: YTN; PAM sequence: TTG
aagttgaagagtcttgccaa

SEQ ID NO: 314740 - DNA, 20 bp, Artificial Sequence
  Description of Artificial Sequence: Synthetic oligonucleotide
  Target: LAMA2; (+) strand; PAM type: YTN; PAM sequence: TTG
aagagtcttgccaatttccc

SEQ ID NO: 314741 - DNA, 20 bp, Artificial Sequence
  Description of Artificial Sequence: Synthetic oligonucleotide
  Target: LAMA2; (+) strand; PAM type: YTN; PAM sequence: CTT
gccaatttcccctatcttat

SEQ ID NO: 314742 - DNA, 20 bp, Artificial Sequence
  Description of Artificial Sequence: Synthetic oligonucleotide
  Target: LAMA2; (+) strand; PAM type: YTN; PAM sequence: TTG
ccaatttcccctatcttata

SEQ ID NO: 314743 - DNA, 20 bp, Artificial Sequence
  Description of Artificial Sequence: Synthetic oligonucleotide
  Target: LAMA2; (+) strand; PAM type: YTN; PAM sequence: TTT
cccctatcttatatatgtga

SEQ ID NO: 314744 - DNA, 20 bp, Artificial Sequence
  Description of Artificial Sequence: Synthetic oligonucleotide
  Target: LAMA2; (+) strand; PAM type: YTN; PAM sequence: TTC
ccctatcttatatatgtgat

SEQ ID NO: 314745 - DNA, 20 bp, Artificial Sequence
  Description of Artificial Sequence: Synthetic oligonucleotide
  Target: LAMA2; (+) strand; PAM type: YTN; PAM sequence: CTA
tcttatatatgtgatcagat

SEQ ID NO: 314746 - DNA, 20 bp, Artificial Sequence
  Description of Artificial Sequence: Synthetic oligonucleotide
  Target: LAMA2; (+) strand; PAM type: YTN; PAM sequence: CTT
atatatgtgatcagattttt

SEQ ID NO: 314747 - DNA, 20 bp, Artificial Sequence
  Description of Artificial Sequence: Synthetic oligonucleotide
  Target: LAMA2; (+) strand; PAM type: YTN; PAM sequence: TTA
tatatgtgatcagatttttg

SEQ ID NO: 314748 - DNA, 20 bp, Artificial Sequence
  Description of Artificial Sequence: Synthetic oligonucleotide
  Target: LAMA2; (+) strand; PAM type: YTN; PAM sequence: TTT
ttgcctctgtaaacttttag

SEQ ID NO: 314749 - DNA, 20 bp, Artificial Sequence
  Description of Artificial Sequence: Synthetic oligonucleotide
  Target: LAMA2; (+) strand; PAM type: YTN; PAM sequence: TTT
tgcctctgtaaacttttagg

SEQ ID NO: 314750 - DNA, 20 bp, Artificial Sequence
  Description of Artificial Sequence: Synthetic oligonucleotide
  Target: LAMA2; (+) strand; PAM type: YTN; PAM sequence: TTT
gcctctgtaaacttttagga

SEQ ID NO: 314751 - DNA, 20 bp, Artificial Sequence
  Description of Artificial Sequence: Synthetic oligonucleotide
  Target: LAMA2; (+) strand; PAM type: YTN; PAM sequence: TTG
cctctgtaaacttttaggat

SEQ ID NO: 314752 - DNA, 20 bp, Artificial Sequence
  Description of Artificial Sequence: Synthetic oligonucleotide
  Target: LAMA2; (+) strand; PAM type: YTN; PAM sequence: CTC
tgtaaacttttaggatttta

SEQ ID NO: 314753 - DNA, 20 bp, Artificial Sequence
  Description of Artificial Sequence: Synthetic oligonucleotide
  Target: LAMA2; (+) strand; PAM type: YTN; PAM sequence: CTG
taaacttttaggattttatc

SEQ ID NO: 314754 - DNA, 20 bp, Artificial Sequence
  Description of Artificial Sequence: Synthetic oligonucleotide
  Target: LAMA2; (+) strand; PAM type: YTN; PAM sequence: CTT
ttaggattttatcttgaccc

SEQ ID NO: 314755 - DNA, 20 bp, Artificial Sequence
  Description of Artificial Sequence: Synthetic oligonucleotide
  Target: LAMA2; (+) strand; PAM type: YTN; PAM sequence: TTT
taggattttatcttgacccc

SEQ ID NO: 314756 - DNA, 20 bp, Artificial Sequence
  Description of Artificial Sequence: Synthetic oligonucleotide
  Target: LAMA2; (+) strand; PAM type: YTN; PAM sequence: TTT
aggattttatcttgacccca

SEQ ID NO: 314757 - DNA, 20 bp, Artificial Sequence
  Description of Artificial Sequence: Synthetic oligonucleotide
  Target: LAMA2; (+) strand; PAM type: YTN; PAM sequence: TTA
ggattttatcttgaccccaa

SEQ ID NO: 314758 - DNA, 20 bp, Artificial Sequence
  Description of Artificial Sequence: Synthetic oligonucleotide
  Target: LAMA2; (+) strand; PAM type: YTN; PAM sequence: TTT
tatcttgaccccaaatgttc

SEQ ID NO: 314759 - DNA, 20 bp, Artificial Sequence
  Description of Artificial Sequence: Synthetic oligonucleotide
  Target: LAMA2; (+) strand; PAM type: YTN; PAM sequence: TTT
atcttgaccccaaatgttct

SEQ ID NO: 314760 - DNA, 20 bp, Artificial Sequence
  Description of Artificial Sequence: Synthetic oligonucleotide
  Target: LAMA2; (+) strand; PAM type: YTN; PAM sequence: TTA
tcttgaccccaaatgttctg

SEQ ID NO: 314761 - DNA, 20 bp, Artificial Sequence
  Description of Artificial Sequence: Synthetic oligonucleotide
  Target: LAMA2; (+) strand; PAM type: YTN; PAM sequence: CTT
gaccccaaatgttctgtagt

SEQ ID NO: 314762 - DNA, 20 bp, Artificial Sequence
  Description of Artificial Sequence: Synthetic oligonucleotide
  Target: LAMA2; (+) strand; PAM type: YTN; PAM sequence: TTG
accccaaatgttctgtagtt

SEQ ID NO: 314763 - DNA, 20 bp, Artificial Sequence
  Description of Artificial Sequence: Synthetic oligonucleotide
  Target: LAMA2; (+) strand; PAM type: YTN; PAM sequence: TTC
tgtagtttgatcacaatatg

SEQ ID NO: 314764 - DNA, 20 bp, Artificial Sequence
  Description of Artificial Sequence: Synthetic oligonucleotide
  Target: LAMA2; (+) strand; PAM type: YTN; PAM sequence: CTG
tagtttgatcacaatatgac

SEQ ID NO: 314765 - DNA, 20 bp, Artificial Sequence
  Description of Artificial Sequence: Synthetic oligonucleotide
  Target: LAMA2; (+) strand; PAM type: YTN; PAM sequence: TTT
gatcacaatatgacctgtgc

SEQ ID NO: 314766 - DNA, 20 bp, Artificial Sequence
  Description of Artificial Sequence: Synthetic oligonucleotide
  Target: LAMA2; (+) strand; PAM type: YTN; PAM sequence: TTG
atcacaatatgacctgtgct

SEQ ID NO: 314767 - DNA, 20 bp, Artificial Sequence
  Description of Artificial Sequence: Synthetic oligonucleotide
  Target: LAMA2; (+) strand; PAM type: YTN; PAM sequence: CTG
tgctatgaattttttgaccc

SEQ ID NO: 314768 - DNA, 20 bp, Artificial Sequence
  Description of Artificial Sequence: Synthetic oligonucleotide
  Target: LAMA2; (+) strand; PAM type: YTN; PAM sequence: CTA
tgaattttttgacccgggaa

SEQ ID NO: 314769 - DNA, 20 bp, Artificial Sequence
  Description of Artificial Sequence: Synthetic oligonucleotide
  Target: LAMA2; (+) strand; PAM type: YTN; PAM sequence: TTT
tttgacccgggaaattcata

SEQ ID NO: 314770 - DNA, 20 bp, Artificial Sequence
  Description of Artificial Sequence: Synthetic oligonucleotide
  Target: LAMA2; (+) strand; PAM type: YTN; PAM sequence: TTT
ttgacccgggaaattcatac

SEQ ID NO: 314771 - DNA, 20 bp, Artificial Sequence
  Description of Artificial Sequence: Synthetic oligonucleotide
  Target: LAMA2; (+) strand; PAM type: YTN; PAM sequence: TTT
tgacccgggaaattcataca

SEQ ID NO: 314772 - DNA, 20 bp, Artificial Sequence
  Description of Artificial Sequence: Synthetic oligonucleotide
  Target: LAMA2; (+) strand; PAM type: YTN; PAM sequence: TTT
gacccgggaaattcatacac

SEQ ID NO: 314773 - DNA, 20 bp, Artificial Sequence
  Description of Artificial Sequence: Synthetic oligonucleotide
  Target: LAMA2; (+) strand; PAM type: YTN; PAM sequence: TTG
acccgggaaattcatacacc

SEQ ID NO: 314774 - DNA, 20 bp, Artificial Sequence
  Description of Artificial Sequence: Synthetic oligonucleotide
  Target: LAMA2; (+) strand; PAM type: YTN; PAM sequence: TTC
atacacctaacttaaggatt

SEQ ID NO: 314775 - DNA, 20 bp, Artificial Sequence
  Description of Artificial Sequence: Synthetic oligonucleotide
  Target: LAMA2; (+) strand; PAM type: YTN; PAM sequence: CTA
acttaaggattttaattttt

SEQ ID NO: 314776 - DNA, 20 bp, Artificial Sequence
  Description of Artificial Sequence: Synthetic oligonucleotide
  Target: LAMA2; (+) strand; PAM type: YTN; PAM sequence: CTT
aaggattttaatttttcatt

SEQ ID NO: 314777 - DNA, 20 bp, Artificial Sequence
  Description of Artificial Sequence: Synthetic oligonucleotide
  Target: LAMA2; (+) strand; PAM type: YTN; PAM sequence: TTA
aggattttaatttttcatta

SEQ ID NO: 314778 - DNA, 20 bp, Artificial Sequence
  Description of Artificial Sequence: Synthetic oligonucleotide
  Target: LAMA2; (+) strand; PAM type: YTN; PAM sequence: TTT
taatttttcattattaatta

SEQ ID NO: 314779 - DNA, 20 bp, Artificial Sequence
  Description of Artificial Sequence: Synthetic oligonucleotide
  Target: LAMA2; (+) strand; PAM type: YTN; PAM sequence: TTT
aatttttcattattaattat

SEQ ID NO: 314780 - DNA, 20 bp, Artificial Sequence
  Description of Artificial Sequence: Synthetic oligonucleotide
  Target: LAMA2; (+) strand; PAM type: YTN; PAM sequence: TTA
atttttcattattaattatt

SEQ ID NO: 314781 - DNA, 20 bp, Artificial Sequence
  Description of Artificial Sequence: Synthetic oligonucleotide
  Target: LAMA2; (+) strand; PAM type: YTN; PAM sequence: TTT
ttcattattaattatttaac

SEQ ID NO: 314782 - DNA, 20 bp, Artificial Sequence
  Description of Artificial Sequence: Synthetic oligonucleotide
  Target: LAMA2; (+) strand; PAM type: YTN; PAM sequence: TTT
tcattattaattatttaaca

SEQ ID NO: 314783 - DNA, 20 bp, Artificial Sequence
  Description of Artificial Sequence: Synthetic oligonucleotide
  Target: LAMA2; (+) strand; PAM type: YTN; PAM sequence: TTT
cattattaattatttaacaa

SEQ ID NO: 314784 - DNA, 20 bp, Artificial Sequence
  Description of Artificial Sequence: Synthetic oligonucleotide
  Target: LAMA2; (+) strand; PAM type: YTN; PAM sequence: TTC
attattaattatttaacaat

SEQ ID NO: 314785 - DNA, 20 bp, Artificial Sequence
  Description of Artificial Sequence: Synthetic oligonucleotide
  Target: LAMA2; (+) strand; PAM type: YTN; PAM sequence: TTA
ttaattatttaacaatgtgt

SEQ ID NO: 314786 - DNA, 20 bp, Artificial Sequence
  Description of Artificial Sequence: Synthetic oligonucleotide
  Target: LAMA2; (+) strand; PAM type: YTN; PAM sequence: TTA
attatttaacaatgtgttat

SEQ ID NO: 314787 - DNA, 20 bp, Artificial Sequence
  Description of Artificial Sequence: Synthetic oligonucleotide
  Target: LAMA2; (+) strand; PAM type: YTN; PAM sequence: TTA
tttaacaatgtgttatttat

SEQ ID NO: 314788 - DNA, 20 bp, Artificial Sequence
  Description of Artificial Sequence: Synthetic oligonucleotide
  Target: LAMA2; (+) strand; PAM type: YTN; PAM sequence: TTT
aacaatgtgttatttatcta

SEQ ID NO: 314789 - DNA, 20 bp, Artificial Sequence
  Description of Artificial Sequence: Synthetic oligonucleotide
  Target: LAMA2; (+) strand; PAM type: YTN; PAM sequence: TTA
acaatgtgttatttatctat

SEQ ID NO: 314790 - DNA, 20 bp, Artificial Sequence
  Description of Artificial Sequence: Synthetic oligonucleotide
  Target: LAMA2; (+) strand; PAM type: YTN; PAM sequence: TTA
tttatctatggaactcttct

SEQ ID NO: 314791 - DNA, 20 bp, Artificial Sequence
  Description of Artificial Sequence: Synthetic oligonucleotide
  Target: LAMA2; (+) strand; PAM type: YTN; PAM sequence: TTT
atctatggaactcttctttg

SEQ ID NO: 314792 - DNA, 20 bp, Artificial Sequence
  Description of Artificial Sequence: Synthetic oligonucleotide
  Target: LAMA2; (+) strand; PAM type: YTN; PAM sequence: TTA
tctatggaactcttctttgt

SEQ ID NO: 314793 - DNA, 20 bp, Artificial Sequence
  Description of Artificial Sequence: Synthetic oligonucleotide
  Target: LAMA2; (+) strand; PAM type: YTN; PAM sequence: CTA
tggaactcttctttgttaga

SEQ ID NO: 314794 - DNA, 20 bp, Artificial Sequence
  Description of Artificial Sequence: Synthetic oligonucleotide
  Target: LAMA2; (+) strand; PAM type: YTN; PAM sequence: CTC
ttctttgttagatattgaat

SEQ ID NO: 314795 - DNA, 20 bp, Artificial Sequence
  Description of Artificial Sequence: Synthetic oligonucleotide
  Target: LAMA2; (+) strand; PAM type: YTN; PAM sequence: CTT
ctttgttagatattgaattt

SEQ ID NO: 314796 - DNA, 20 bp, Artificial Sequence
  Description of Artificial Sequence: Synthetic oligonucleotide
  Target: LAMA2; (+) strand; PAM type: YTN; PAM sequence: TTC
tttgttagatattgaatttc

SEQ ID NO: 314797 - DNA, 20 bp, Artificial Sequence
  Description of Artificial Sequence: Synthetic oligonucleotide
  Target: LAMA2; (+) strand; PAM type: YTN; PAM sequence: CTT
tgttagatattgaatttcat

SEQ ID NO: 314798 - DNA, 20 bp, Artificial Sequence
  Description of Artificial Sequence: Synthetic oligonucleotide
  Target: LAMA2; (+) strand; PAM type: YTN; PAM sequence: TTT
gttagatattgaatttcatg

SEQ ID NO: 314799 - DNA, 20 bp, Artificial Sequence
  Description of Artificial Sequence: Synthetic oligonucleotide
  Target: LAMA2; (+) strand; PAM type: YTN; PAM sequence: TTG
ttagatattgaatttcatgg

SEQ ID NO: 314800 - DNA, 20 bp, Artificial Sequence
  Description of Artificial Sequence: Synthetic oligonucleotide
  Target: LAMA2; (+) strand; PAM type: YTN; PAM sequence: TTA
gatattgaatttcatggatt

SEQ ID NO: 314801 - DNA, 20 bp, Artificial Sequence
  Description of Artificial Sequence: Synthetic oligonucleotide
  Target: LAMA2; (+) strand; PAM type: YTN; PAM sequence: TTG
aatttcatggattaatcccc

SEQ ID NO: 314802 - DNA, 20 bp, Artificial Sequence
  Description of Artificial Sequence: Synthetic oligonucleotide
  Target: LAMA2; (+) strand; PAM type: YTN; PAM sequence: TTT
catggattaatcccctagct

SEQ ID NO: 314803 - DNA, 20 bp, Artificial Sequence
  Description of Artificial Sequence: Synthetic oligonucleotide
  Target: LAMA2; (+) strand; PAM type: YTN; PAM sequence: TTC
atggattaatcccctagctt

SEQ ID NO: 314804 - DNA, 20 bp, Artificial Sequence
  Description of Artificial Sequence: Synthetic oligonucleotide
  Target: LAMA2; (+) strand; PAM type: YTN; PAM sequence: TTA
atcccctagctttttgtctt

SEQ ID NO: 314805 - DNA, 20 bp, Artificial Sequence
  Description of Artificial Sequence: Synthetic oligonucleotide
  Target: LAMA2; (+) strand; PAM type: YTN; PAM sequence: CTA
gctttttgtctttggtttat

SEQ ID NO: 314806 - DNA, 20 bp, Artificial Sequence
  Description of Artificial Sequence: Synthetic oligonucleotide
  Target: LAMA2; (+) strand; PAM type: YTN; PAM sequence: CTT
tttgtctttggtttattttg

SEQ ID NO: 314807 - DNA, 20 bp, Artificial Sequence
  Description of Artificial Sequence: Synthetic oligonucleotide
  Target: LAMA2; (+) strand; PAM type: YTN; PAM sequence: TTT
ttgtctttggtttattttga

SEQ ID NO: 314808 - DNA, 20 bp, Artificial Sequence
  Description of Artificial Sequence: Synthetic oligonucleotide
  Target: LAMA2; (+) strand; PAM type: YTN; PAM sequence: TTT
tgtctttggtttattttgat

SEQ ID NO: 314809 - DNA, 20 bp, Artificial Sequence
  Description of Artificial Sequence: Synthetic oligonucleotide
  Target: LAMA2; (+) strand; PAM type: YTN; PAM sequence: TTT
gtctttggtttattttgatt

SEQ ID NO: 314810 - DNA, 20 bp, Artificial Sequence
  Description of Artificial Sequence: Synthetic oligonucleotide
  Target: LAMA2; (+) strand; PAM type: YTN; PAM sequence: TTG
tctttggtttattttgatta

SEQ ID NO: 314811 - DNA, 20 bp, Artificial Sequence
  Description of Artificial Sequence: Synthetic oligonucleotide
  Target: LAMA2; (+) strand; PAM type: YTN; PAM sequence: CTT
tggtttattttgattactct

SEQ ID NO: 314812 - DNA, 20 bp, Artificial Sequence
  Description of Artificial Sequence: Synthetic oligonucleotide
  Target: LAMA2; (+) strand; PAM type: YTN; PAM sequence: TTT
ggtttattttgattactctt

SEQ ID NO: 314813 - DNA, 20 bp, Artificial Sequence
  Description of Artificial Sequence: Synthetic oligonucleotide
  Target: LAMA2; (+) strand; PAM type: YTN; PAM sequence: TTG
gtttattttgattactcttt

SEQ ID NO: 314814 - DNA, 20 bp, Artificial Sequence
  Description of Artificial Sequence: Synthetic oligonucleotide
  Target: LAMA2; (+) strand; PAM type: YTN; PAM sequence: TTT
attttgattactcttttttt

SEQ ID NO: 314815 - DNA, 20 bp, Artificial Sequence
  Description of Artificial Sequence: Synthetic oligonucleotide
  Target: LAMA2; (+) strand; PAM type: YTN; PAM sequence: TTA
ttttgattactctttttttt

SEQ ID NO: 314816 - DNA, 20 bp, Artificial Sequence
  Description of Artificial Sequence: Synthetic oligonucleotide
  Target: LAMA2; (+) strand; PAM type: YTN; PAM sequence: TTT
tgattactcttttttttttt

SEQ ID NO: 314817 - DNA, 20 bp, Artificial Sequence
  Description of Artificial Sequence: Synthetic oligonucleotide
  Target: LAMA2; (+) strand; PAM type: YTN; PAM sequence: TTT
gattactctttttttttttt

SEQ ID NO: 314818 - DNA, 20 bp, Artificial Sequence
  Description of Artificial Sequence: Synthetic oligonucleotide
  Target: LAMA2; (+) strand; PAM type: YTN; PAM sequence: TTG
attactcttttttttttttt

SEQ ID NO: 314819 - DNA, 20 bp, Artificial Sequence
  Description of Artificial Sequence: Synthetic oligonucleotide
  Target: LAMA2; (+) strand; PAM type: YTN; PAM sequence: TTA
ctctttttttttttttcctt

SEQ ID NO: 314820 - DNA, 20 bp, Artificial Sequence
  Description of Artificial Sequence: Synthetic oligonucleotide
  Target: LAMA2; (+) strand; PAM type: YTN; PAM sequence: CTC
tttttttttttttccttttt

SEQ ID NO: 314821 - DNA, 20 bp, Artificial Sequence
  Description of Artificial Sequence: Synthetic oligonucleotide
  Target: LAMA2; (+) strand; PAM type: YTN; PAM sequence: CTT
tttttttttttccttttttt

SEQ ID NO: 314822 - DNA, 20 bp, Artificial Sequence
  Description of Artificial Sequence: Synthetic oligonucleotide
  Target: LAMA2; (+) strand; PAM type: YTN; PAM sequence: TTT
ttttttttttcctttttttt

SEQ ID NO: 314823 - DNA, 20 bp, Artificial Sequence
  Description of Artificial Sequence: Synthetic oligonucleotide
  Target: LAMA2; (+) strand; PAM type: YTN; PAM sequence: TTT
tttttttttccttttttttt

SEQ ID NO: 314824 - DNA, 20 bp, Artificial Sequence
  Description of Artificial Sequence: Synthetic oligonucleotide
  Target: LAMA2; (+) strand; PAM type: YTN; PAM sequence: TTT
ttttttttcctttttttttt

SEQ ID NO: 314825 - DNA, 20 bp, Artificial Sequence
  Description of Artificial Sequence: Synthetic oligonucleotide
  Target: LAMA2; (+) strand; PAM type: YTN; PAM sequence: TTT
tttttttccttttttttttt

SEQ ID NO: 314826 - DNA, 20 bp, Artificial Sequence
  Description of Artificial Sequence: Synthetic oligonucleotide
  Target: LAMA2; (+) strand; PAM type: YTN; PAM sequence: TTT
ttttttcctttttttttttt

SEQ ID NO: 314827 - DNA, 20 bp, Artificial Sequence
  Description of Artificial Sequence: Synthetic oligonucleotide
  Target: LAMA2; (+) strand; PAM type: YTN; PAM sequence: TTT
tttttccttttttttttttg

SEQ ID NO: 314828 - DNA, 20 bp, Artificial Sequence
  Description of Artificial Sequence: Synthetic oligonucleotide
  Target: LAMA2; (+) strand; PAM type: YTN; PAM sequence: TTT
ttttccttttttttttttga

SEQ ID NO: 314829 - DNA, 20 bp, Artificial Sequence
  Description of Artificial Sequence: Synthetic oligonucleotide
  Target: LAMA2; (+) strand; PAM type: YTN; PAM sequence: TTT
tttccttttttttttttgag

SEQ ID NO: 314830 - DNA, 20 bp, Artificial Sequence
  Description of Artificial Sequence: Synthetic oligonucleotide
  Target: LAMA2; (+) strand; PAM type: YTN; PAM sequence: TTT
ttccttttttttttttgaga

SEQ ID NO: 314831 - DNA, 20 bp, Artificial Sequence
  Description of Artificial Sequence: Synthetic oligonucleotide
  Target: LAMA2; (+) strand; PAM type: YTN; PAM sequence: TTT
tccttttttttttttgagac

SEQ ID NO: 314832 - DNA, 20 bp, Artificial Sequence
  Description of Artificial Sequence: Synthetic oligonucleotide
  Target: LAMA2; (+) strand; PAM type: YTN; PAM sequence: TTT
ccttttttttttttgagaca

SEQ ID NO: 314833 - DNA, 20 bp, Artificial Sequence
  Description of Artificial Sequence: Synthetic oligonucleotide
  Target: LAMA2; (+) strand; PAM type: YTN; PAM sequence: TTC
cttttttttttttgagacaa

SEQ ID NO: 314834 - DNA, 20 bp, Artificial Sequence
  Description of Artificial Sequence: Synthetic oligonucleotide
  Target: LAMA2; (+) strand; PAM type: YTN; PAM sequence: CTT
ttttttttttgagacaaagt

SEQ ID NO: 314835 - DNA, 20 bp, Artificial Sequence
  Description of Artificial Sequence: Synthetic oligonucleotide
  Target: LAMA2; (+) strand; PAM type: YTN; PAM sequence: TTT
tttttttttgagacaaagtc

SEQ ID NO: 314836 - DNA, 20 bp, Artificial Sequence
  Description of Artificial Sequence: Synthetic oligonucleotide
  Target: LAMA2; (+) strand; PAM type: YTN; PAM sequence: TTT
ttttttttgagacaaagtct

SEQ ID NO: 314837 - DNA, 20 bp, Artificial Sequence
  Description of Artificial Sequence: Synthetic oligonucleotide
  Target: LAMA2; (+) strand; PAM type: YTN; PAM sequence: TTT
tttttttgagacaaagtctc

SEQ ID NO: 314838 - DNA, 20 bp, Artificial Sequence
  Description of Artificial Sequence: Synthetic oligonucleotide
  Target: LAMA2; (+) strand; PAM type: YTN; PAM sequence: TTT
ttttttgagacaaagtctcg

SEQ ID NO: 314839 - DNA, 20 bp, Artificial Sequence
  Description of Artificial Sequence: Synthetic oligonucleotide
  Target: LAMA2; (+) strand; PAM type: YTN; PAM sequence: TTT
tttttgagacaaagtctcgc

SEQ ID NO: 314840 - DNA, 20 bp, Artificial Sequence
  Description of Artificial Sequence: Synthetic oligonucleotide
  Target: LAMA2; (+) strand; PAM type: YTN; PAM sequence: TTT
ttttgagacaaagtctcgct

SEQ ID NO: 314841 - DNA, 20 bp, Artificial Sequence
  Description of Artificial Sequence: Synthetic oligonucleotide
  Target: LAMA2; (+) strand; PAM type: YTN; PAM sequence: TTT
tttgagacaaagtctcgctc

SEQ ID NO: 314842 - DNA, 20 bp, Artificial Sequence
  Description of Artificial Sequence: Synthetic oligonucleotide
  Target: LAMA2; (+) strand; PAM type: YTN; PAM sequence: TTT
ttgagacaaagtctcgctct

SEQ ID NO: 314843 - DNA, 20 bp, Artificial Sequence
  Description of Artificial Sequence: Synthetic oligonucleotide
  Target: LAMA2; (+) strand; PAM type: YTN; PAM sequence: TTT
tgagacaaagtctcgctctt

SEQ ID NO: 314844 - DNA, 20 bp, Artificial Sequence
  Description of Artificial Sequence: Synthetic oligonucleotide
  Target: LAMA2; (+) strand; PAM type: YTN; PAM sequence: TTT
gagacaaagtctcgctcttg

SEQ ID NO: 314845 - DNA, 20 bp, Artificial Sequence
  Description of Artificial Sequence: Synthetic oligonucleotide
  Target: LAMA2; (+) strand; PAM type: YTN; PAM sequence: TTG
agacaaagtctcgctcttgt

SEQ ID NO: 314846 - DNA, 20 bp, Artificial Sequence
  Description of Artificial Sequence: Synthetic oligonucleotide
  Target: LAMA2; (+) strand; PAM type: YTN; PAM sequence: CTC
gctcttgtcccccaggctgg

SEQ ID NO: 314847 - DNA, 20 bp, Artificial Sequence
  Description of Artificial Sequence: Synthetic oligonucleotide
  Target: LAMA2; (+) strand; PAM type: YTN; PAM sequence: CTC
ttgtcccccaggctggagtg

SEQ ID NO: 314848 - DNA, 20 bp, Artificial Sequence
  Description of Artificial Sequence: Synthetic oligonucleotide
  Target: LAMA2; (+) strand; PAM type: YTN; PAM sequence: CTT
gtcccccaggctggagtgca

SEQ ID NO: 314849 - DNA, 20 bp, Artificial Sequence
  Description of Artificial Sequence: Synthetic oligonucleotide
  Target: LAMA2; (+) strand; PAM type: YTN; PAM sequence: TTG
tcccccaggctggagtgcaa

SEQ ID NO: 314850 - DNA, 20 bp, Artificial Sequence
  Description of Artificial Sequence: Synthetic oligonucleotide
  Target: LAMA2; (+) strand; PAM type: YTN; PAM sequence: CTG
gagtgcaatggcatgatctt

SEQ ID NO: 314851 - DNA, 20 bp, Artificial Sequence
  Description of Artificial Sequence: Synthetic oligonucleotide
  Target: LAMA2; (+) strand; PAM type: YTN; PAM sequence: CTT
ggctcactgcagcctctgcc

SEQ ID NO: 314852 - DNA, 20 bp, Artificial Sequence
  Description of Artificial Sequence: Synthetic oligonucleotide
  Target: LAMA2; (+) strand; PAM type: YTN; PAM sequence: TTG
gctcactgcagcctctgcct

SEQ ID NO: 314853 - DNA, 20 bp, Artificial Sequence
  Description of Artificial Sequence: Synthetic oligonucleotide
  Target: LAMA2; (+) strand; PAM type: YTN; PAM sequence: CTC
actgcagcctctgcctccca

SEQ ID NO: 314854 - DNA, 20 bp, Artificial Sequence
  Description of Artificial Sequence: Synthetic oligonucleotide
  Target: LAMA2; (+) strand; PAM type: YTN; PAM sequence: CTG
cagcctctgcctcccaggtt

SEQ ID NO: 314855 - DNA, 20 bp, Artificial Sequence
  Description of Artificial Sequence: Synthetic oligonucleotide
  Target: LAMA2; (+) strand; PAM type: YTN; PAM sequence: CTC
tgcctcccaggttccagcga

SEQ ID NO: 314856 - DNA, 20 bp, Artificial Sequence
  Description of Artificial Sequence: Synthetic oligonucleotide
  Target: LAMA2; (+) strand; PAM type: YTN; PAM sequence: CTG
cctcccaggttccagcgatt

SEQ ID NO: 314857 - DNA, 20 bp, Artificial Sequence
  Description of Artificial Sequence: Synthetic oligonucleotide
  Target: LAMA2; (+) strand; PAM type: YTN; PAM sequence: CTC
ccaggttccagcgattctcc

SEQ ID NO: 314858 - DNA, 20 bp, Artificial Sequence
  Description of Artificial Sequence: Synthetic oligonucleotide
  Target: LAMA2; (+) strand; PAM type: YTN; PAM sequence: TTC
cagcgattctccggccttgg

SEQ ID NO: 314859 - DNA, 20 bp, Artificial Sequence
  Description of Artificial Sequence: Synthetic oligonucleotide
  Target: LAMA2; (+) strand; PAM type: YTN; PAM sequence: TTC
tccggccttggccccacccc

SEQ ID NO: 314860 - DNA, 20 bp, Artificial Sequence
  Description of Artificial Sequence: Synthetic oligonucleotide
  Target: LAMA2; (+) strand; PAM type: YTN; PAM sequence: CTC
cggccttggccccaccccgc

SEQ ID NO: 314861 - DNA, 20 bp, Artificial Sequence
  Description of Artificial Sequence: Synthetic oligonucleotide
  Target: LAMA2; (+) strand; PAM type: YTN; PAM sequence: CTT
ggccccaccccgcccccgcc

SEQ ID NO: 314862 - DNA, 20 bp, Artificial Sequence
  Description of Artificial Sequence: Synthetic oligonucleotide
  Target: LAMA2; (+) strand; PAM type: YTN; PAM sequence: TTG
gccccaccccgcccccgccg

SEQ ID NO: 314863 - DNA, 20 bp, Artificial Sequence
  Description of Artificial Sequence: Synthetic oligonucleotide
  Target: LAMA2; (+) strand; PAM type: YTN; PAM sequence: CTG
ggatttcaggtgcctgccac

SEQ ID NO: 314864 - DNA, 20 bp, Artificial Sequence
  Description of Artificial Sequence: Synthetic oligonucleotide
  Target: LAMA2; (+) strand; PAM type: YTN; PAM sequence: TTT
caggtgcctgccaccaaacc

SEQ ID NO: 314865 - DNA, 20 bp, Artificial Sequence
  Description of Artificial Sequence: Synthetic oligonucleotide
  Target: LAMA2; (+) strand; PAM type: YTN; PAM sequence: TTC
aggtgcctgccaccaaaccc

SEQ ID NO: 314866 - DNA, 20 bp, Artificial Sequence
  Description of Artificial Sequence: Synthetic oligonucleotide
  Target: LAMA2; (+) strand; PAM type: YTN; PAM sequence: CTG
ccaccaaacccggctaattt

SEQ ID NO: 314867 - DNA, 20 bp, Artificial Sequence
  Description of Artificial Sequence: Synthetic oligonucleotide
  Target: LAMA2; (+) strand; PAM type: YTN; PAM sequence: CTA
atttttgtatttttagtaga

SEQ ID NO: 314868 - DNA, 20 bp, Artificial Sequence
  Description of Artificial Sequence: Synthetic oligonucleotide
  Target: LAMA2; (+) strand; PAM type: YTN; PAM sequence: TTT
ttgtatttttagtagagatg

SEQ ID NO: 314869 - DNA, 20 bp, Artificial Sequence
  Description of Artificial Sequence: Synthetic oligonucleotide
  Target: LAMA2; (+) strand; PAM type: YTN; PAM sequence: TTT
tgtatttttagtagagatgg

SEQ ID NO: 314870 - DNA, 20 bp, Artificial Sequence
  Description of Artificial Sequence: Synthetic oligonucleotide
  Target: LAMA2; (+) strand; PAM type: YTN; PAM sequence: TTT
gtatttttagtagagatggg

SEQ ID NO: 314871 - DNA, 20 bp, Artificial Sequence
  Description of Artificial Sequence: Synthetic oligonucleotide
  Target: LAMA2; (+) strand; PAM type: YTN; PAM sequence: TTG
tatttttagtagagatgggg

SEQ ID NO: 314872 - DNA, 20 bp, Artificial Sequence
  Description of Artificial Sequence: Synthetic oligonucleotide
  Target: LAMA2; (+) strand; PAM type: YTN; PAM sequence: TTT
ttagtagagatggggtttca

SEQ ID NO: 314873 - DNA, 20 bp, Artificial Sequence
  Description of Artificial Sequence: Synthetic oligonucleotide
  Target: LAMA2; (+) strand; PAM type: YTN; PAM sequence: TTT
tagtagagatggggtttcac

SEQ ID NO: 314874 - DNA, 20 bp, Artificial Sequence
  Description of Artificial Sequence: Synthetic oligonucleotide
  Target: LAMA2; (+) strand; PAM type: YTN; PAM sequence: TTT
agtagagatggggtttcacc

SEQ ID NO: 314875 - DNA, 20 bp, Artificial Sequence
  Description of Artificial Sequence: Synthetic oligonucleotide
  Target: LAMA2; (+) strand; PAM type: YTN; PAM sequence: TTA
gtagagatggggtttcacca

SEQ ID NO: 314876 - DNA, 20 bp, Artificial Sequence
  Description of Artificial Sequence: Synthetic oligonucleotide
  Target: LAMA2; (+) strand; PAM type: YTN; PAM sequence: TTT
caccatgtgggccaggctgg

SEQ ID NO: 314877 - DNA, 20 bp, Artificial Sequence
  Description of Artificial Sequence: Synthetic oligonucleotide
  Target: LAMA2; (+) strand; PAM type: YTN; PAM sequence: TTC
accatgtgggccaggctggt

SEQ ID NO: 314878 - DNA, 20 bp, Artificial Sequence
  Description of Artificial Sequence: Synthetic oligonucleotide
  Target: LAMA2; (+) strand; PAM type: YTN; PAM sequence: CTG
gtctggaacgcctgacctcg

SEQ ID NO: 314879 - DNA, 20 bp, Artificial Sequence
  Description of Artificial Sequence: Synthetic oligonucleotide
  Target: LAMA2; (+) strand; PAM type: YTN; PAM sequence: CTG
gaacgcctgacctcgggtga

SEQ ID NO: 314880 - DNA, 20 bp, Artificial Sequence
  Description of Artificial Sequence: Synthetic oligonucleotide
  Target: LAMA2; (+) strand; PAM type: YTN; PAM sequence: CTG
acctcgggtgatccacccgc

SEQ ID NO: 314881 - DNA, 20 bp, Artificial Sequence
  Description of Artificial Sequence: Synthetic oligonucleotide
  Target: LAMA2; (+) strand; PAM type: YTN; PAM sequence: CTC
gggtgatccacccgcctggt

SEQ ID NO: 314882 - DNA, 20 bp, Artificial Sequence
  Description of Artificial Sequence: Synthetic oligonucleotide
  Target: LAMA2; (+) strand; PAM type: YTN; PAM sequence: CTG
gtcctcccaaagtgctggga

SEQ ID NO: 314883 - DNA, 20 bp, Artificial Sequence
  Description of Artificial Sequence: Synthetic oligonucleotide
  Target: LAMA2; (+) strand; PAM type: YTN; PAM sequence: CTC
ccaaagtgctgggattacag

SEQ ID NO: 314884 - DNA, 20 bp, Artificial Sequence
  Description of Artificial Sequence: Synthetic oligonucleotide
  Target: LAMA2; (+) strand; PAM type: YTN; PAM sequence: CTG
ggattacaggcgtgagccac

SEQ ID NO: 314885 - DNA, 20 bp, Artificial Sequence
  Description of Artificial Sequence: Synthetic oligonucleotide
  Target: LAMA2; (+) strand; PAM type: YTN; PAM sequence: TTA
caggcgtgagccaccacgcc

SEQ ID NO: 314886 - DNA, 20 bp, Artificial Sequence
  Description of Artificial Sequence: Synthetic oligonucleotide
  Target: LAMA2; (+) strand; PAM type: YTN; PAM sequence: TTT
ctcttttcttttatttcctt

SEQ ID NO: 314887 - DNA, 20 bp, Artificial Sequence
  Description of Artificial Sequence: Synthetic oligonucleotide
  Target: LAMA2; (+) strand; PAM type: YTN; PAM sequence: TTC
tcttttcttttatttccttt

SEQ ID NO: 314888 - DNA, 20 bp, Artificial Sequence
  Description of Artificial Sequence: Synthetic oligonucleotide
  Target: LAMA2; (+) strand; PAM type: YTN; PAM sequence: CTC
ttttcttttatttccttttc

SEQ ID NO: 314889 - DNA, 20 bp, Artificial Sequence
  Description of Artificial Sequence: Synthetic oligonucleotide
  Target: LAMA2; (+) strand; PAM type: YTN; PAM sequence: CTT
ttcttttatttccttttctt

SEQ ID NO: 314890 - DNA, 20 bp, Artificial Sequence
  Description of Artificial Sequence: Synthetic oligonucleotide
  Target: LAMA2; (+) strand; PAM type: YTN; PAM sequence: TTT
tcttttatttccttttcttt

SEQ ID NO: 314891 - DNA, 20 bp, Artificial Sequence
  Description of Artificial Sequence: Synthetic oligonucleotide
  Target: LAMA2; (+) strand; PAM type: YTN; PAM sequence: TTT
cttttatttccttttcttta

SEQ ID NO: 314892 - DNA, 20 bp, Artificial Sequence
  Description of Artificial Sequence: Synthetic oligonucleotide
  Target: LAMA2; (+) strand; PAM type: YTN; PAM sequence: TTC
ttttatttccttttctttat

SEQ ID NO: 314893 - DNA, 20 bp, Artificial Sequence
  Description of Artificial Sequence: Synthetic oligonucleotide
  Target: LAMA2; (+) strand; PAM type: YTN; PAM sequence: CTT
ttatttccttttctttatat

SEQ ID NO: 314894 - DNA, 20 bp, Artificial Sequence
  Description of Artificial Sequence: Synthetic oligonucleotide
  Target: LAMA2; (+) strand; PAM type: YTN; PAM sequence: TTT
tatttccttttctttatatt

SEQ ID NO: 314895 - DNA, 20 bp, Artificial Sequence
  Description of Artificial Sequence: Synthetic oligonucleotide
  Target: LAMA2; (+) strand; PAM type: YTN; PAM sequence: TTT
atttccttttctttatattc

SEQ ID NO: 314896 - DNA, 20 bp, Artificial Sequence
  Description of Artificial Sequence: Synthetic oligonucleotide
  Target: LAMA2; (+) strand; PAM type: YTN; PAM sequence: TTA
tttccttttctttatattct

SEQ ID NO: 314897 - DNA, 20 bp, Artificial Sequence
  Description of Artificial Sequence: Synthetic oligonucleotide
  Target: LAMA2; (+) strand; PAM type: YTN; PAM sequence: TTT
ccttttctttatattctatt

SEQ ID NO: 314898 - DNA, 20 bp, Artificial Sequence
  Description of Artificial Sequence: Synthetic oligonucleotide
  Target: LAMA2; (+) strand; PAM type: YTN; PAM sequence: TTC
cttttctttatattctattg

SEQ ID NO: 314899 - DNA, 20 bp, Artificial Sequence
  Description of Artificial Sequence: Synthetic oligonucleotide
  Target: LAMA2; (+) strand; PAM type: YTN; PAM sequence: CTT
ttctttatattctattgttt

SEQ ID NO: 314900 - DNA, 20 bp, Artificial Sequence
  Description of Artificial Sequence: Synthetic oligonucleotide
  Target: LAMA2; (+) strand; PAM type: YTN; PAM sequence: TTT
tctttatattctattgtttc

SEQ ID NO: 314901 - DNA, 20 bp, Artificial Sequence
  Description of Artificial Sequence: Synthetic oligonucleotide
  Target: LAMA2; (+) strand; PAM type: YTN; PAM sequence: TTT
ctttatattctattgtttcc

SEQ ID NO: 314902 - DNA, 20 bp, Artificial Sequence
  Description of Artificial Sequence: Synthetic oligonucleotide
  Target: LAMA2; (+) strand; PAM type: YTN; PAM sequence: TTC
tttatattctattgtttccc

SEQ ID NO: 314903 - DNA, 20 bp, Artificial Sequence
  Description of Artificial Sequence: Synthetic oligonucleotide
  Target: LAMA2; (+) strand; PAM type: YTN; PAM sequence: CTT
tatattctattgtttcccct

SEQ ID NO: 314904 - DNA, 20 bp, Artificial Sequence
  Description of Artificial Sequence: Synthetic oligonucleotide
  Target: LAMA2; (+) strand; PAM type: YTN; PAM sequence: TTT
atattctattgtttcccctg

SEQ ID NO: 314905 - DNA, 20 bp, Artificial Sequence
  Description of Artificial Sequence: Synthetic oligonucleotide
  Target: LAMA2; (+) strand; PAM type: YTN; PAM sequence: TTA
tattctattgtttcccctgg

SEQ ID NO: 314906 - DNA, 20 bp, Artificial Sequence
  Description of Artificial Sequence: Synthetic oligonucleotide
  Target: LAMA2; (+) strand; PAM type: YTN; PAM sequence: TTC
tattgtttcccctggggaga

SEQ ID NO: 314907 - DNA, 20 bp, Artificial Sequence
  Description of Artificial Sequence: Synthetic oligonucleotide
  Target: LAMA2; (+) strand; PAM type: YTN; PAM sequence: CTA
ttgtttcccctggggagacc

SEQ ID NO: 314908 - DNA, 20 bp, Artificial Sequence
  Description of Artificial Sequence: Synthetic oligonucleotide
  Target: LAMA2; (+) strand; PAM type: YTN; PAM sequence: TTG
tttcccctggggagacctcc

SEQ ID NO: 314909 - DNA, 20 bp, Artificial Sequence
  Description of Artificial Sequence: Synthetic oligonucleotide
  Target: LAMA2; (+) strand; PAM type: YTN; PAM sequence: TTT
cccctggggagacctcctca

SEQ ID NO: 314910 - DNA, 20 bp, Artificial Sequence
  Description of Artificial Sequence: Synthetic oligonucleotide
  Target: LAMA2; (+) strand; PAM type: YTN; PAM sequence: TTC
ccctggggagacctcctcac

SEQ ID NO: 314911 - DNA, 20 bp, Artificial Sequence
  Description of Artificial Sequence: Synthetic oligonucleotide
  Target: LAMA2; (+) strand; PAM type: YTN; PAM sequence: CTG
gggagacctcctcaccttta

SEQ ID NO: 314912 - DNA, 20 bp, Artificial Sequence
  Description of Artificial Sequence: Synthetic oligonucleotide
  Target: LAMA2; (+) strand; PAM type: YTN; PAM sequence: CTC
ctcacctttatcttacaaca

SEQ ID NO: 314913 - DNA, 20 bp, Artificial Sequence
  Description of Artificial Sequence: Synthetic oligonucleotide
  Target: LAMA2; (+) strand; PAM type: YTN; PAM sequence: CTC
acctttatcttacaacattt

SEQ ID NO: 314914 - DNA, 20 bp, Artificial Sequence
  Description of Artificial Sequence: Synthetic oligonucleotide
  Target: LAMA2; (+) strand; PAM type: YTN; PAM sequence: CTT
tatcttacaacattttaaat

SEQ ID NO: 314915 - DNA, 20 bp, Artificial Sequence
  Description of Artificial Sequence: Synthetic oligonucleotide
  Target: LAMA2; (+) strand; PAM type: YTN; PAM sequence: TTT
atcttacaacattttaaata

SEQ ID NO: 314916 - DNA, 20 bp, Artificial Sequence
  Description of Artificial Sequence: Synthetic oligonucleotide
  Target: LAMA2; (+) strand; PAM type: YTN; PAM sequence: TTA
tcttacaacattttaaatat

SEQ ID NO: 314917 - DNA, 20 bp, Artificial Sequence
  Description of Artificial Sequence: Synthetic oligonucleotide
  Target: LAMA2; (+) strand; PAM type: YTN; PAM sequence: CTT
acaacattttaaatattacc

SEQ ID NO: 314918 - DNA, 20 bp, Artificial Sequence
  Description of Artificial Sequence: Synthetic oligonucleotide
  Target: LAMA2; (+) strand; PAM type: YTN; PAM sequence: TTA
caacattttaaatattacca

SEQ ID NO: 314919 - DNA, 20 bp, Artificial Sequence
  Description of Artificial Sequence: Synthetic oligonucleotide
  Target: LAMA2; (+) strand; PAM type: YTN; PAM sequence: TTT
taaatattaccataatttaa

SEQ ID NO: 314920 - DNA, 20 bp, Artificial Sequence
  Description of Artificial Sequence: Synthetic oligonucleotide
  Target: LAMA2; (+) strand; PAM type: YTN; PAM sequence: TTT
aaatattaccataatttaat

SEQ ID NO: 314921 - DNA, 20 bp, Artificial Sequence
  Description of Artificial Sequence: Synthetic oligonucleotide
  Target: LAMA2; (+) strand; PAM type: YTN; PAM sequence: TTA
aatattaccataatttaata

SEQ ID NO: 314922 - DNA, 20 bp, Artificial Sequence
  Description of Artificial Sequence: Synthetic oligonucleotide
  Target: LAMA2; (+) strand; PAM type: YTN; PAM sequence: TTA
ccataatttaataattcttt

SEQ ID NO: 314923 - DNA, 20 bp, Artificial Sequence
  Description of Artificial Sequence: Synthetic oligonucleotide
  Target: LAMA2; (+) strand; PAM type: YTN; PAM sequence: TTT
aataattcttttgtgctttg

SEQ ID NO: 314924 - DNA, 20 bp, Artificial Sequence
  Description of Artificial Sequence: Synthetic oligonucleotide
  Target: LAMA2; (+) strand; PAM type: YTN; PAM sequence: TTA
ataattcttttgtgctttga

SEQ ID NO: 314925 - DNA, 20 bp, Artificial Sequence
  Description of Artificial Sequence: Synthetic oligonucleotide
  Target: LAMA2; (+) strand; PAM type: YTN; PAM sequence: TTC
ttttgtgctttgagtagtct

SEQ ID NO: 314926 - DNA, 20 bp, Artificial Sequence
  Description of Artificial Sequence: Synthetic oligonucleotide
  Target: LAMA2; (+) strand; PAM type: YTN; PAM sequence: CTT
ttgtgctttgagtagtcttt

SEQ ID NO: 314927 - DNA, 20 bp, Artificial Sequence
  Description of Artificial Sequence: Synthetic oligonucleotide
  Target: LAMA2; (+) strand; PAM type: YTN; PAM sequence: TTT
tgtgctttgagtagtctttt

SEQ ID NO: 314928 - DNA, 20 bp, Artificial Sequence
  Description of Artificial Sequence: Synthetic oligonucleotide
  Target: LAMA2; (+) strand; PAM type: YTN; PAM sequence: TTT
gtgctttgagtagtctttta

SEQ ID NO: 314929 - DNA, 20 bp, Artificial Sequence
  Description of Artificial Sequence: Synthetic oligonucleotide
  Target: LAMA2; (+) strand; PAM type: YTN; PAM sequence: TTG
tgctttgagtagtcttttaa

SEQ ID NO: 314930 - DNA, 20 bp, Artificial Sequence
  Description of Artificial Sequence: Synthetic oligonucleotide
  Target: LAMA2; (+) strand; PAM type: YTN; PAM sequence: CTT
tgagtagtcttttaaaaatt

SEQ ID NO: 314931 - DNA, 20 bp, Artificial Sequence
  Description of Artificial Sequence: Synthetic oligonucleotide
  Target: LAMA2; (+) strand; PAM type: YTN; PAM sequence: TTT
gagtagtcttttaaaaatta

SEQ ID NO: 314932 - DNA, 20 bp, Artificial Sequence
  Description of Artificial Sequence: Synthetic oligonucleotide
  Target: LAMA2; (+) strand; PAM type: YTN; PAM sequence: TTG
agtagtcttttaaaaattaa

SEQ ID NO: 314933 - DNA, 20 bp, Artificial Sequence
  Description of Artificial Sequence: Synthetic oligonucleotide
  Target: LAMA2; (+) strand; PAM type: YTN; PAM sequence: CTT
ttaaaaattaatatctcatc

SEQ ID NO: 314934 - DNA, 20 bp, Artificial Sequence
  Description of Artificial Sequence: Synthetic oligonucleotide
  Target: LAMA2; (+) strand; PAM type: YTN; PAM sequence: TTT
taaaaattaatatctcatcc

SEQ ID NO: 314935 - DNA, 20 bp, Artificial Sequence
  Description of Artificial Sequence: Synthetic oligonucleotide
  Target: LAMA2; (+) strand; PAM type: YTN; PAM sequence: TTT
aaaaattaatatctcatcct

SEQ ID NO: 314936 - DNA, 20 bp, Artificial Sequence
  Description of Artificial Sequence: Synthetic oligonucleotide
  Target: LAMA2; (+) strand; PAM type: YTN; PAM sequence: TTA
aaaattaatatctcatcctg

SEQ ID NO: 314937 - DNA, 20 bp, Artificial Sequence
  Description of Artificial Sequence: Synthetic oligonucleotide
  Target: LAMA2; (+) strand; PAM type: YTN; PAM sequence: TTA
atatctcatcctgttcttgt

SEQ ID NO: 314938 - DNA, 20 bp, Artificial Sequence
  Description of Artificial Sequence: Synthetic oligonucleotide
  Target: LAMA2; (+) strand; PAM type: YTN; PAM sequence: CTC
atcctgttcttgttttgtgc

SEQ ID NO: 314939 - DNA, 20 bp, Artificial Sequence
  Description of Artificial Sequence: Synthetic oligonucleotide
  Target: LAMA2; (+) strand; PAM type: YTN; PAM sequence: CTG
ttcttgttttgtgcatgcca

SEQ ID NO: 314940 - DNA, 20 bp, Artificial Sequence
  Description of Artificial Sequence: Synthetic oligonucleotide
  Target: LAMA2; (+) strand; PAM type: YTN; PAM sequence: TTC
ttgttttgtgcatgccatat

SEQ ID NO: 314941 - DNA, 20 bp, Artificial Sequence
  Description of Artificial Sequence: Synthetic oligonucleotide
  Target: LAMA2; (+) strand; PAM type: YTN; PAM sequence: CTT
gttttgtgcatgccatatgt

SEQ ID NO: 314942 - DNA, 20 bp, Artificial Sequence
  Description of Artificial Sequence: Synthetic oligonucleotide
  Target: LAMA2; (+) strand; PAM type: YTN; PAM sequence: TTG
ttttgtgcatgccatatgtt

SEQ ID NO: 314943 - DNA, 20 bp, Artificial Sequence
  Description of Artificial Sequence: Synthetic oligonucleotide
  Target: LAMA2; (+) strand; PAM type: YTN; PAM sequence: TTT
tgtgcatgccatatgttttg

SEQ ID NO: 314944 - DNA, 20 bp, Artificial Sequence
  Description of Artificial Sequence: Synthetic oligonucleotide
  Target: LAMA2; (+) strand; PAM type: YTN; PAM sequence: TTT
gtgcatgccatatgttttgc

SEQ ID NO: 314945 - DNA, 20 bp, Artificial Sequence
  Description of Artificial Sequence: Synthetic oligonucleotide
  Target: LAMA2; (+) strand; PAM type: YTN; PAM sequence: TTG
tgcatgccatatgttttgct

SEQ ID NO: 314946 - DNA, 20 bp, Artificial Sequence
  Description of Artificial Sequence: Synthetic oligonucleotide
  Target: LAMA2; (+) strand; PAM type: YTN; PAM sequence: TTT
tgctagttctccgagaatat

SEQ ID NO: 314947 - DNA, 20 bp, Artificial Sequence
  Description of Artificial Sequence: Synthetic oligonucleotide
  Target: LAMA2; (+) strand; PAM type: YTN; PAM sequence: TTT
gctagttctccgagaatatt

SEQ ID NO: 314948 - DNA, 20 bp, Artificial Sequence
  Description of Artificial Sequence: Synthetic oligonucleotide
  Target: LAMA2; (+) strand; PAM type: YTN; PAM sequence: TTG
ctagttctccgagaatattg

SEQ ID NO: 314949 - DNA, 20 bp, Artificial Sequence
  Description of Artificial Sequence: Synthetic oligonucleotide
  Target: LAMA2; (+) strand; PAM type: YTN; PAM sequence: CTA
gttctccgagaatattgact

SEQ ID NO: 314950 - DNA, 20 bp, Artificial Sequence
  Description of Artificial Sequence: Synthetic oligonucleotide
  Target: LAMA2; (+) strand; PAM type: YTN; PAM sequence: TTC
tccgagaatattgactcatt

SEQ ID NO: 314951 - DNA, 20 bp, Artificial Sequence
  Description of Artificial Sequence: Synthetic oligonucleotide
  Target: LAMA2; (+) strand; PAM type: YTN; PAM sequence: CTC
cgagaatattgactcatttt

SEQ ID NO: 314952 - DNA, 20 bp, Artificial Sequence
  Description of Artificial Sequence: Synthetic oligonucleotide
  Target: LAMA2; (+) strand; PAM type: YTN; PAM sequence: TTG
actcatttttgaagttttta

SEQ ID NO: 314953 - DNA, 20 bp, Artificial Sequence
  Description of Artificial Sequence: Synthetic oligonucleotide
  Target: LAMA2; (+) strand; PAM type: YTN; PAM sequence: CTC
atttttgaagtttttaatat

SEQ ID NO: 314954 - DNA, 20 bp, Artificial Sequence
  Description of Artificial Sequence: Synthetic oligonucleotide
  Target: LAMA2; (+) strand; PAM type: YTN; PAM sequence: TTT
ttgaagtttttaatattatt

SEQ ID NO: 314955 - DNA, 20 bp, Artificial Sequence
  Description of Artificial Sequence: Synthetic oligonucleotide
  Target: LAMA2; (+) strand; PAM type: YTN; PAM sequence: TTT
tgaagtttttaatattattt

SEQ ID NO: 314956 - DNA, 20 bp, Artificial Sequence
  Description of Artificial Sequence: Synthetic oligonucleotide
  Target: LAMA2; (+) strand; PAM type: YTN; PAM sequence: TTT
gaagtttttaatattatttt

SEQ ID NO: 314957 - DNA, 20 bp, Artificial Sequence
  Description of Artificial Sequence: Synthetic oligonucleotide
  Target: LAMA2; (+) strand; PAM type: YTN; PAM sequence: TTG
aagtttttaatattattttt

SEQ ID NO: 314958 - DNA, 20 bp, Artificial Sequence
  Description of Artificial Sequence: Synthetic oligonucleotide
  Target: LAMA2; (+) strand; PAM type: YTN; PAM sequence: TTT
ttaatattatttttgccttt

SEQ ID NO: 314959 - DNA, 20 bp, Artificial Sequence
  Description of Artificial Sequence: Synthetic oligonucleotide
  Target: LAMA2; (+) strand; PAM type: YTN; PAM sequence: TTT
taatattatttttgcctttg

SEQ ID NO: 314960 - DNA, 20 bp, Artificial Sequence
  Description of Artificial Sequence: Synthetic oligonucleotide
  Target: LAMA2; (+) strand; PAM type: YTN; PAM sequence: TTT
aatattatttttgcctttgt

SEQ ID NO: 314961 - DNA, 20 bp, Artificial Sequence
  Description of Artificial Sequence: Synthetic oligonucleotide
  Target: LAMA2; (+) strand; PAM type: YTN; PAM sequence: TTA
atattatttttgcctttgtt

SEQ ID NO: 314962 - DNA, 20 bp, Artificial Sequence
  Description of Artificial Sequence: Synthetic oligonucleotide
  Target: LAMA2; (+) strand; PAM type: YTN; PAM sequence: TTA
tttttgcctttgtttcctct

SEQ ID NO: 314963 - DNA, 20 bp, Artificial Sequence
  Description of Artificial Sequence: Synthetic oligonucleotide
  Target: LAMA2; (+) strand; PAM type: YTN; PAM sequence: TTT
ttgcctttgtttcctctgtt

SEQ ID NO: 314964 - DNA, 20 bp, Artificial Sequence
  Description of Artificial Sequence: Synthetic oligonucleotide
  Target: LAMA2; (+) strand; PAM type: YTN; PAM sequence: TTT
tgcctttgtttcctctgttt

SEQ ID NO: 314965 - DNA, 20 bp, Artificial Sequence
  Description of Artificial Sequence: Synthetic oligonucleotide
  Target: LAMA2; (+) strand; PAM type: YTN; PAM sequence: TTT
gcctttgtttcctctgtttt

SEQ ID NO: 314966 - DNA, 20 bp, Artificial Sequence
  Description of Artificial Sequence: Synthetic oligonucleotide
  Target: LAMA2; (+) strand; PAM type: YTN; PAM sequence: TTG
cctttgtttcctctgttttg

SEQ ID NO: 314967 - DNA, 20 bp, Artificial Sequence
  Description of Artificial Sequence: Synthetic oligonucleotide
  Target: LAMA2; (+) strand; PAM type: YTN; PAM sequence: CTT
tgtttcctctgttttgtttt

SEQ ID NO: 314968 - DNA, 20 bp, Artificial Sequence
  Description of Artificial Sequence: Synthetic oligonucleotide
  Target: LAMA2; (+) strand; PAM type: YTN; PAM sequence: TTT
gtttcctctgttttgttttc

SEQ ID NO: 314969 - DNA, 20 bp, Artificial Sequence
  Description of Artificial Sequence: Synthetic oligonucleotide
  Target: LAMA2; (+) strand; PAM type: YTN; PAM sequence: TTG
tttcctctgttttgttttct

SEQ ID NO: 314970 - DNA, 20 bp, Artificial Sequence
  Description of Artificial Sequence: Synthetic oligonucleotide
  Target: LAMA2; (+) strand; PAM type: YTN; PAM sequence: TTT
cctctgttttgttttctttc

SEQ ID NO: 314971 - DNA, 20 bp, Artificial Sequence
  Description of Artificial Sequence: Synthetic oligonucleotide
  Target: LAMA2; (+) strand; PAM type: YTN; PAM sequence: TTC
ctctgttttgttttctttca

SEQ ID NO: 314972 - DNA, 20 bp, Artificial Sequence
  Description of Artificial Sequence: Synthetic oligonucleotide
  Target: LAMA2; (+) strand; PAM type: YTN; PAM sequence: CTC
tgttttgttttctttcatgg

SEQ ID NO: 314973 - DNA, 20 bp, Artificial Sequence
  Description of Artificial Sequence: Synthetic oligonucleotide
  Target: LAMA2; (+) strand; PAM type: YTN; PAM sequence: CTG
ttttgttttctttcatggga

SEQ ID NO: 314974 - DNA, 20 bp, Artificial Sequence
  Description of Artificial Sequence: Synthetic oligonucleotide
  Target: LAMA2; (+) strand; PAM type: YTN; PAM sequence: TTT
tgttttctttcatgggagat

SEQ ID NO: 314975 - DNA, 20 bp, Artificial Sequence
  Description of Artificial Sequence: Synthetic oligonucleotide
  Target: LAMA2; (+) strand; PAM type: YTN; PAM sequence: TTT
gttttctttcatgggagata

SEQ ID NO: 314976 - DNA, 20 bp, Artificial Sequence
  Description of Artificial Sequence: Synthetic oligonucleotide
  Target: LAMA2; (+) strand; PAM type: YTN; PAM sequence: TTG
ttttctttcatgggagatac

SEQ ID NO: 314977 - DNA, 20 bp, Artificial Sequence
  Description of Artificial Sequence: Synthetic oligonucleotide
  Target: LAMA2; (+) strand; PAM type: YTN; PAM sequence: TTT
tctttcatgggagatacaaa

SEQ ID NO: 314978 - DNA, 20 bp, Artificial Sequence
  Description of Artificial Sequence: Synthetic oligonucleotide
  Target: LAMA2; (+) strand; PAM type: YTN; PAM sequence: TTT
ctttcatgggagatacaaaa

SEQ ID NO: 314979 - DNA, 20 bp, Artificial Sequence
  Description of Artificial Sequence: Synthetic oligonucleotide
  Target: LAMA2; (+) strand; PAM type: YTN; PAM sequence: TTC
tttcatgggagatacaaaat

SEQ ID NO: 314980 - DNA, 20 bp, Artificial Sequence
  Description of Artificial Sequence: Synthetic oligonucleotide
  Target: LAMA2; (+) strand; PAM type: YTN; PAM sequence: CTT
tcatgggagatacaaaattt

SEQ ID NO: 314981 - DNA, 20 bp, Artificial Sequence
  Description of Artificial Sequence: Synthetic oligonucleotide
  Target: LAMA2; (+) strand; PAM type: YTN; PAM sequence: TTT
catgggagatacaaaatttc

SEQ ID NO: 314982 - DNA, 20 bp, Artificial Sequence
  Description of Artificial Sequence: Synthetic oligonucleotide
  Target: LAMA2; (+) strand; PAM type: YTN; PAM sequence: TTC
atgggagatacaaaatttct

SEQ ID NO: 314983 - DNA, 20 bp, Artificial Sequence
  Description of Artificial Sequence: Synthetic oligonucleotide
  Target: LAMA2; (+) strand; PAM type: YTN; PAM sequence: TTT
ctgggaaaattttgctgtcc

SEQ ID NO: 314984 - DNA, 20 bp, Artificial Sequence
  Description of Artificial Sequence: Synthetic oligonucleotide
  Target: LAMA2; (+) strand; PAM type: YTN; PAM sequence: TTC
tgggaaaattttgctgtcca

SEQ ID NO: 314985 - DNA, 20 bp, Artificial Sequence
  Description of Artificial Sequence: Synthetic oligonucleotide
  Target: LAMA2; (+) strand; PAM type: YTN; PAM sequence: CTG
ggaaaattttgctgtccaat

SEQ ID NO: 314986 - DNA, 20 bp, Artificial Sequence
  Description of Artificial Sequence: Synthetic oligonucleotide
  Target: LAMA2; (+) strand; PAM type: YTN; PAM sequence: TTT
tgctgtccaataatgtttag

SEQ ID NO: 314987 - DNA, 20 bp, Artificial Sequence
  Description of Artificial Sequence: Synthetic oligonucleotide
  Target: LAMA2; (+) strand; PAM type: YTN; PAM sequence: TTT
gctgtccaataatgtttagc

SEQ ID NO: 314988 - DNA, 20 bp, Artificial Sequence
  Description of Artificial Sequence: Synthetic oligonucleotide
  Target: LAMA2; (+) strand; PAM type: YTN; PAM sequence: TTG
ctgtccaataatgtttagct

SEQ ID NO: 314989 - DNA, 20 bp, Artificial Sequence
  Description of Artificial Sequence: Synthetic oligonucleotide
  Target: LAMA2; (+) strand; PAM type: YTN; PAM sequence: CTG
tccaataatgtttagctgag

SEQ ID NO: 314990 - DNA, 20 bp, Artificial Sequence
  Description of Artificial Sequence: Synthetic oligonucleotide
  Target: LAMA2; (+) strand; PAM type: YTN; PAM sequence: TTT
agctgagacactaaaattgt

SEQ ID NO: 314991 - DNA, 20 bp, Artificial Sequence
  Description of Artificial Sequence: Synthetic oligonucleotide
  Target: LAMA2; (+) strand; PAM type: YTN; PAM sequence: TTA
gctgagacactaaaattgtt

SEQ ID NO: 314992 - DNA, 20 bp, Artificial Sequence
  Description of Artificial Sequence: Synthetic oligonucleotide
  Target: LAMA2; (+) strand; PAM type: YTN; PAM sequence: CTG
agacactaaaattgttaaat

SEQ ID NO: 314993 - DNA, 20 bp, Artificial Sequence
  Description of Artificial Sequence: Synthetic oligonucleotide
  Target: LAMA2; (+) strand; PAM type: YTN; PAM sequence: CTA
aaattgttaaatctctgtat

SEQ ID NO: 314994 - DNA, 20 bp, Artificial Sequence
  Description of Artificial Sequence: Synthetic oligonucleotide
  Target: LAMA2; (+) strand; PAM type: YTN; PAM sequence: TTG
ttaaatctctgtatgtcacg

SEQ ID NO: 314995 - DNA, 20 bp, Artificial Sequence
  Description of Artificial Sequence: Synthetic oligonucleotide
  Target: LAMA2; (+) strand; PAM type: YTN; PAM sequence: TTA
aatctctgtatgtcacgaaa

SEQ ID NO: 314996 - DNA, 20 bp, Artificial Sequence
  Description of Artificial Sequence: Synthetic oligonucleotide
  Target: LAMA2; (+) strand; PAM type: YTN; PAM sequence: CTC
tgtatgtcacgaaagcatgt

SEQ ID NO: 314997 - DNA, 20 bp, Artificial Sequence
  Description of Artificial Sequence: Synthetic oligonucleotide
  Target: LAMA2; (+) strand; PAM type: YTN; PAM sequence: CTG
tatgtcacgaaagcatgtta

SEQ ID NO: 314998 - DNA, 20 bp, Artificial Sequence
  Description of Artificial Sequence: Synthetic oligonucleotide
  Target: LAMA2; (+) strand; PAM type: YTN; PAM sequence: TTA
actcaaatatgaacaaggta

SEQ ID NO: 314999 - DNA, 20 bp, Artificial Sequence
  Description of Artificial Sequence: Synthetic oligonucleotide
  Target: LAMA2; (+) strand; PAM type: YTN; PAM sequence: CTC
aaatatgaacaaggtatcat

SEQ ID NO: 315000 - DNA, 20 bp, Artificial Sequence
  Description of Artificial Sequence: Synthetic oligonucleotide
  Target: LAMA2; (+) strand; PAM type: YTN; PAM sequence: TTT
cattggaagactcccaaata

SEQ ID NO: 315001 - DNA, 20 bp, Artificial Sequence
  Description of Artificial Sequence: Synthetic oligonucleotide
  Target: LAMA2; (+) strand; PAM type: YTN; PAM sequence: TTC
attggaagactcccaaatat

SEQ ID NO: 315002 - DNA, 20 bp, Artificial Sequence
  Description of Artificial Sequence: Synthetic oligonucleotide
  Target: LAMA2; (+) strand; PAM type: YTN; PAM sequence: TTG
gaagactcccaaatatcctc

SEQ ID NO: 315003 - DNA, 20 bp, Artificial Sequence
  Description of Artificial Sequence: Synthetic oligonucleotide
  Target: LAMA2; (+) strand; PAM type: YTN; PAM sequence: CTC
ccaaatatcctctcggtagg

SEQ ID NO: 315004 - DNA, 20 bp, Artificial Sequence
  Description of Artificial Sequence: Synthetic oligonucleotide
  Target: LAMA2; (+) strand; PAM type: YTN; PAM sequence: CTC
tcggtaggctatttttatgg

SEQ ID NO: 315005 - DNA, 20 bp, Artificial Sequence
  Description of Artificial Sequence: Synthetic oligonucleotide
  Target: LAMA2; (+) strand; PAM type: YTN; PAM sequence: CTC
ggtaggctatttttatggac

SEQ ID NO: 315006 - DNA, 20 bp, Artificial Sequence
  Description of Artificial Sequence: Synthetic oligonucleotide
  Target: LAMA2; (+) strand; PAM type: YTN; PAM sequence: CTA
tttttatggacaggtatttt

SEQ ID NO: 315007 - DNA, 20 bp, Artificial Sequence
  Description of Artificial Sequence: Synthetic oligonucleotide
  Target: LAMA2; (+) strand; PAM type: YTN; PAM sequence: TTT
ttatggacaggtattttcca

SEQ ID NO: 315008 - DNA, 20 bp, Artificial Sequence
  Description of Artificial Sequence: Synthetic oligonucleotide
  Target: LAMA2; (+) strand; PAM type: YTN; PAM sequence: TTT
tatggacaggtattttccaa

SEQ ID NO: 315009 - DNA, 20 bp, Artificial Sequence
  Description of Artificial Sequence: Synthetic oligonucleotide
  Target: LAMA2; (+) strand; PAM type: YTN; PAM sequence: TTT
atggacaggtattttccaat

SEQ ID NO: 315010 - DNA, 20 bp, Artificial Sequence
  Description of Artificial Sequence: Synthetic oligonucleotide
  Target: LAMA2; (+) strand; PAM type: YTN; PAM sequence: TTA
tggacaggtattttccaatc

SEQ ID NO: 315011 - DNA, 20 bp, Artificial Sequence
  Description of Artificial Sequence: Synthetic oligonucleotide
  Target: LAMA2; (+) strand; PAM type: YTN; PAM sequence: TTT
tccaatctttgtctgctagc

SEQ ID NO: 315012 - DNA, 20 bp, Artificial Sequence
  Description of Artificial Sequence: Synthetic oligonucleotide
  Target: LAMA2; (+) strand; PAM type: YTN; PAM sequence: TTT
ccaatctttgtctgctagca

SEQ ID NO: 315013 - DNA, 20 bp, Artificial Sequence
  Description of Artificial Sequence: Synthetic oligonucleotide
  Target: LAMA2; (+) strand; PAM type: YTN; PAM sequence: TTC
caatctttgtctgctagcat

SEQ ID NO: 315014 - DNA, 20 bp, Artificial Sequence
  Description of Artificial Sequence: Synthetic oligonucleotide
  Target: LAMA2; (+) strand; PAM type: YTN; PAM sequence: CTT
tgtctgctagcatttttgtt

SEQ ID NO: 315015 - DNA, 20 bp, Artificial Sequence
  Description of Artificial Sequence: Synthetic oligonucleotide
  Target: LAMA2; (+) strand; PAM type: YTN; PAM sequence: TTT
gtctgctagcatttttgttg

SEQ ID NO: 315016 - DNA, 20 bp, Artificial Sequence
  Description of Artificial Sequence: Synthetic oligonucleotide
  Target: LAMA2; (+) strand; PAM type: YTN; PAM sequence: TTG
tctgctagcatttttgttga

SEQ ID NO: 315017 - DNA, 20 bp, Artificial Sequence
  Description of Artificial Sequence: Synthetic oligonucleotide
  Target: LAMA2; (+) strand; PAM type: YTN; PAM sequence: CTG
ctagcatttttgttgagaac

SEQ ID NO: 315018 - DNA, 20 bp, Artificial Sequence
  Description of Artificial Sequence: Synthetic oligonucleotide
  Target: LAMA2; (+) strand; PAM type: YTN; PAM sequence: CTA
gcatttttgttgagaacgga

SEQ ID NO: 315019 - DNA, 20 bp, Artificial Sequence
  Description of Artificial Sequence: Synthetic oligonucleotide
  Target: LAMA2; (+) strand; PAM type: YTN; PAM sequence: TTT
ttgttgagaacggagtatga

SEQ ID NO: 315020 - DNA, 20 bp, Artificial Sequence
  Description of Artificial Sequence: Synthetic oligonucleotide
  Target: LAMA2; (+) strand; PAM type: YTN; PAM sequence: TTT
tgttgagaacggagtatgag

SEQ ID NO: 315021 - DNA, 20 bp, Artificial Sequence
  Description of Artificial Sequence: Synthetic oligonucleotide
  Target: LAMA2; (+) strand; PAM type: YTN; PAM sequence: TTT
gttgagaacggagtatgagc

SEQ ID NO: 315022 - DNA, 20 bp, Artificial Sequence
  Description of Artificial Sequence: Synthetic oligonucleotide
  Target: LAMA2; (+) strand; PAM type: YTN; PAM sequence: TTG
ttgagaacggagtatgagct

SEQ ID NO: 315023 - DNA, 20 bp, Artificial Sequence
  Description of Artificial Sequence: Synthetic oligonucleotide
  Target: LAMA2; (+) strand; PAM type: YTN; PAM sequence: TTG
agaacggagtatgagctaag

SEQ ID NO: 315024 - DNA, 20 bp, Artificial Sequence
  Description of Artificial Sequence: Synthetic oligonucleotide
  Target: LAMA2; (+) strand; PAM type: YTN; PAM sequence: CTA
aggatgagaataatcacact

SEQ ID NO: 315025 - DNA, 20 bp, Artificial Sequence
  Description of Artificial Sequence: Synthetic oligonucleotide
  Target: LAMA2; (+) strand; PAM type: YTN; PAM sequence: CTC
tacaatatgtagattttcac

SEQ ID NO: 315026 - DNA, 20 bp, Artificial Sequence
  Description of Artificial Sequence: Synthetic oligonucleotide
  Target: LAMA2; (+) strand; PAM type: YTN; PAM sequence: CTA
caatatgtagattttcactt

SEQ ID NO: 315027 - DNA, 20 bp, Artificial Sequence
  Description of Artificial Sequence: Synthetic oligonucleotide
  Target: LAMA2; (+) strand; PAM type: YTN; PAM sequence: TTT
tcactttttcatttttagta

SEQ ID NO: 315028 - DNA, 20 bp, Artificial Sequence
  Description of Artificial Sequence: Synthetic oligonucleotide
  Target: LAMA2; (+) strand; PAM type: YTN; PAM sequence: TTT
cactttttcatttttagtat

SEQ ID NO: 315029 - DNA, 20 bp, Artificial Sequence
  Description of Artificial Sequence: Synthetic oligonucleotide
  Target: LAMA2; (+) strand; PAM type: YTN; PAM sequence: TTC
actttttcatttttagtatg

SEQ ID NO: 315030 - DNA, 20 bp, Artificial Sequence
  Description of Artificial Sequence: Synthetic oligonucleotide
  Target: LAMA2; (+) strand; PAM type: YTN; PAM sequence: CTT
tttcatttttagtatgaatt

SEQ ID NO: 315031 - DNA, 20 bp, Artificial Sequence
  Description of Artificial Sequence: Synthetic oligonucleotide
  Target: LAMA2; (+) strand; PAM type: YTN; PAM sequence: TTT
ttcatttttagtatgaattc

SEQ ID NO: 315032 - DNA, 20 bp, Artificial Sequence
  Description of Artificial Sequence: Synthetic oligonucleotide
  Target: LAMA2; (+) strand; PAM type: YTN; PAM sequence: TTT
tcatttttagtatgaattct

SEQ ID NO: 315033 - DNA, 20 bp, Artificial Sequence
  Description of Artificial Sequence: Synthetic oligonucleotide
  Target: LAMA2; (+) strand; PAM type: YTN; PAM sequence: TTT
catttttagtatgaattctt

SEQ ID NO: 315034 - DNA, 20 bp, Artificial Sequence
  Description of Artificial Sequence: Synthetic oligonucleotide
  Target: LAMA2; (+) strand; PAM type: YTN; PAM sequence: TTC
atttttagtatgaattctta

SEQ ID NO: 315035 - DNA, 20 bp, Artificial Sequence
  Description of Artificial Sequence: Synthetic oligonucleotide
  Target: LAMA2; (+) strand; PAM type: YTN; PAM sequence: TTT
ttagtatgaattcttatcct

SEQ ID NO: 315036 - DNA, 20 bp, Artificial Sequence
  Description of Artificial Sequence: Synthetic oligonucleotide
  Target: LAMA2; (+) strand; PAM type: YTN; PAM sequence: TTT
tagtatgaattcttatcctc

SEQ ID NO: 315037 - DNA, 20 bp, Artificial Sequence
  Description of Artificial Sequence: Synthetic oligonucleotide
  Target: LAMA2; (+) strand; PAM type: YTN; PAM sequence: TTT
agtatgaattcttatcctca

SEQ ID NO: 315038 - DNA, 20 bp, Artificial Sequence
  Description of Artificial Sequence: Synthetic oligonucleotide
  Target: LAMA2; (+) strand; PAM type: YTN; PAM sequence: TTA
gtatgaattcttatcctcac

SEQ ID NO: 315039 - DNA, 20 bp, Artificial Sequence
  Description of Artificial Sequence: Synthetic oligonucleotide
  Target: LAMA2; (+) strand; PAM type: YTN; PAM sequence: TTC
ttatcctcacccctcatcct

SEQ ID NO: 315040 - DNA, 20 bp, Artificial Sequence
  Description of Artificial Sequence: Synthetic oligonucleotide
  Target: LAMA2; (+) strand; PAM type: YTN; PAM sequence: CTT
atcctcacccctcatccttc

SEQ ID NO: 315041 - DNA, 20 bp, Artificial Sequence
  Description of Artificial Sequence: Synthetic oligonucleotide
  Target: LAMA2; (+) strand; PAM type: YTN; PAM sequence: TTA
tcctcacccctcatccttca

SEQ ID NO: 315042 - DNA, 20 bp, Artificial Sequence
  Description of Artificial Sequence: Synthetic oligonucleotide
  Target: LAMA2; (+) strand; PAM type: YTN; PAM sequence: CTC
acccctcatccttcactgca

SEQ ID NO: 315043 - DNA, 20 bp, Artificial Sequence
  Description of Artificial Sequence: Synthetic oligonucleotide
  Target: LAMA2; (+) strand; PAM type: YTN; PAM sequence: CTC
atccttcactgcatggtaat

SEQ ID NO: 315044 - DNA, 20 bp, Artificial Sequence
  Description of Artificial Sequence: Synthetic oligonucleotide
  Target: LAMA2; (+) strand; PAM type: YTN; PAM sequence: CTT
cactgcatggtaattggaca

SEQ ID NO: 315045 - DNA, 20 bp, Artificial Sequence
  Description of Artificial Sequence: Synthetic oligonucleotide
  Target: LAMA2; (+) strand; PAM type: YTN; PAM sequence: TTC
actgcatggtaattggacac

SEQ ID NO: 315046 - DNA, 20 bp, Artificial Sequence
  Description of Artificial Sequence: Synthetic oligonucleotide
  Target: LAMA2; (+) strand; PAM type: YTN; PAM sequence: CTG
catggtaattggacactttc

SEQ ID NO: 315047 - DNA, 20 bp, Artificial Sequence
  Description of Artificial Sequence: Synthetic oligonucleotide
  Target: LAMA2; (+) strand; PAM type: YTN; PAM sequence: TTG
gacactttcttattaaattt

SEQ ID NO: 315048 - DNA, 20 bp, Artificial Sequence
  Description of Artificial Sequence: Synthetic oligonucleotide
  Target: LAMA2; (+) strand; PAM type: YTN; PAM sequence: CTT
tcttattaaatttccctaga

SEQ ID NO: 315049 - DNA, 20 bp, Artificial Sequence
  Description of Artificial Sequence: Synthetic oligonucleotide
  Target: LAMA2; (+) strand; PAM type: YTN; PAM sequence: TTT
cttattaaatttccctagag

SEQ ID NO: 315050 - DNA, 20 bp, Artificial Sequence
  Description of Artificial Sequence: Synthetic oligonucleotide
  Target: LAMA2; (+) strand; PAM type: YTN; PAM sequence: TTC
ttattaaatttccctagaga

SEQ ID NO: 315051 - DNA, 20 bp, Artificial Sequence
  Description of Artificial Sequence: Synthetic oligonucleotide
  Target: LAMA2; (+) strand; PAM type: YTN; PAM sequence: CTT
attaaatttccctagagaat

SEQ ID NO: 315052 - DNA, 20 bp, Artificial Sequence
  Description of Artificial Sequence: Synthetic oligonucleotide
  Target: LAMA2; (+) strand; PAM type: YTN; PAM sequence: TTA
ttaaatttccctagagaatt

SEQ ID NO: 315053 - DNA, 20 bp, Artificial Sequence
  Description of Artificial Sequence: Synthetic oligonucleotide
  Target: LAMA2; (+) strand; PAM type: YTN; PAM sequence: TTA
aatttccctagagaattgta

SEQ ID NO: 315054 - DNA, 20 bp, Artificial Sequence
  Description of Artificial Sequence: Synthetic oligonucleotide
  Target: LAMA2; (+) strand; PAM type: YTN; PAM sequence: TTT
ccctagagaattgtattagg

SEQ ID NO: 315055 - DNA, 20 bp, Artificial Sequence
  Description of Artificial Sequence: Synthetic oligonucleotide
  Target: LAMA2; (+) strand; PAM type: YTN; PAM sequence: TTC
cctagagaattgtattaggg

SEQ ID NO: 315056 - DNA, 20 bp, Artificial Sequence
  Description of Artificial Sequence: Synthetic oligonucleotide
  Target: LAMA2; (+) strand; PAM type: YTN; PAM sequence: CTA
gagaattgtattagggttct

SEQ ID NO: 315057 - DNA, 20 bp, Artificial Sequence
  Description of Artificial Sequence: Synthetic oligonucleotide
  Target: LAMA2; (+) strand; PAM type: YTN; PAM sequence: TTG
tattagggttctgtagaggg

SEQ ID NO: 315058 - DNA, 20 bp, Artificial Sequence
  Description of Artificial Sequence: Synthetic oligonucleotide
  Target: LAMA2; (+) strand; PAM type: YTN; PAM sequence: TTA
gggttctgtagagggacaga

SEQ ID NO: 315059 - DNA, 20 bp, Artificial Sequence
  Description of Artificial Sequence: Synthetic oligonucleotide
  Target: LAMA2; (+) strand; PAM type: YTN; PAM sequence: TTC
tgtagagggacagaactaat

SEQ ID NO: 315060 - DNA, 20 bp, Artificial Sequence
  Description of Artificial Sequence: Synthetic oligonucleotide
  Target: LAMA2; (+) strand; PAM type: YTN; PAM sequence: CTG
tagagggacagaactaatat

SEQ ID NO: 315061 - DNA, 20 bp, Artificial Sequence
  Description of Artificial Sequence: Synthetic oligonucleotide
  Target: LAMA2; (+) strand; PAM type: YTN; PAM sequence: CTA
atatgatatatatatatata

SEQ ID NO: 315062 - DNA, 20 bp, Artificial Sequence
  Description of Artificial Sequence: Synthetic oligonucleotide
  Target: LAMA2; (+) strand; PAM type: YTN; PAM sequence: TTA
gtttattaagtattaactta

SEQ ID NO: 315063 - DNA, 20 bp, Artificial Sequence
  Description of Artificial Sequence: Synthetic oligonucleotide
  Target: LAMA2; (+) strand; PAM type: YTN; PAM sequence: TTT
attaagtattaacttatacg

SEQ ID NO: 315064 - DNA, 20 bp, Artificial Sequence
  Description of Artificial Sequence: Synthetic oligonucleotide
  Target: LAMA2; (+) strand; PAM type: YTN; PAM sequence: TTA
ttaagtattaacttatacga

SEQ ID NO: 315065 - DNA, 20 bp, Artificial Sequence
  Description of Artificial Sequence: Synthetic oligonucleotide
  Target: LAMA2; (+) strand; PAM type: YTN; PAM sequence: TTA
agtattaacttatacgactg

SEQ ID NO: 315066 - DNA, 20 bp, Artificial Sequence
  Description of Artificial Sequence: Synthetic oligonucleotide
  Target: LAMA2; (+) strand; PAM type: YTN; PAM sequence: TTA
acttatacgactgcatatat

SEQ ID NO: 315067 - DNA, 20 bp, Artificial Sequence
  Description of Artificial Sequence: Synthetic oligonucleotide
  Target: LAMA2; (+) strand; PAM type: YTN; PAM sequence: CTT
atacgactgcatatatatac

SEQ ID NO: 315068 - DNA, 20 bp, Artificial Sequence
  Description of Artificial Sequence: Synthetic oligonucleotide
  Target: LAMA2; (+) strand; PAM type: YTN; PAM sequence: TTA
tacgactgcatatatataca

SEQ ID NO: 315069 - DNA, 20 bp, Artificial Sequence
  Description of Artificial Sequence: Synthetic oligonucleotide
  Target: LAMA2; (+) strand; PAM type: YTN; PAM sequence: CTG
catatatatacatatatata

SEQ ID NO: 315070 - DNA, 20 bp, Artificial Sequence
  Description of Artificial Sequence: Synthetic oligonucleotide
  Target: LAMA2; (+) strand; PAM type: YTN; PAM sequence: TTT
attaagtgttaacttactcg

SEQ ID NO: 315071 - DNA, 20 bp, Artificial Sequence
  Description of Artificial Sequence: Synthetic oligonucleotide
  Target: LAMA2; (+) strand; PAM type: YTN; PAM sequence: TTA
ttaagtgttaacttactcga

SEQ ID NO: 315072 - DNA, 20 bp, Artificial Sequence
  Description of Artificial Sequence: Synthetic oligonucleotide
  Target: LAMA2; (+) strand; PAM type: YTN; PAM sequence: TTA
agtgttaacttactcgatca

SEQ ID NO: 315073 - DNA, 20 bp, Artificial Sequence
  Description of Artificial Sequence: Synthetic oligonucleotide
  Target: LAMA2; (+) strand; PAM type: YTN; PAM sequence: TTA
acttactcgatcacaaggtc

SEQ ID NO: 315074 - DNA, 20 bp, Artificial Sequence
  Description of Artificial Sequence: Synthetic oligonucleotide
  Target: LAMA2; (+) strand; PAM type: YTN; PAM sequence: CTT
actcgatcacaaggtcccac

SEQ ID NO: 315075 - DNA, 20 bp, Artificial Sequence
  Description of Artificial Sequence: Synthetic oligonucleotide
  Target: LAMA2; (+) strand; PAM type: YTN; PAM sequence: TTA
ctcgatcacaaggtcccaca

SEQ ID NO: 315076 - DNA, 20 bp, Artificial Sequence
  Description of Artificial Sequence: Synthetic oligonucleotide
  Target: LAMA2; (+) strand; PAM type: YTN; PAM sequence: CTC
gatcacaaggtcccacaata

SEQ ID NO: 315077 - DNA, 20 bp, Artificial Sequence
  Description of Artificial Sequence: Synthetic oligonucleotide
  Target: LAMA2; (+) strand; PAM type: YTN; PAM sequence: CTG
tctgcaagctgaggagcaag

SEQ ID NO: 315078 - DNA, 20 bp, Artificial Sequence
  Description of Artificial Sequence: Synthetic oligonucleotide
  Target: LAMA2; (+) strand; PAM type: YTN; PAM sequence: CTG
caagctgaggagcaaggaga

SEQ ID NO: 315079 - DNA, 20 bp, Artificial Sequence
  Description of Artificial Sequence: Synthetic oligonucleotide
  Target: LAMA2; (+) strand; PAM type: YTN; PAM sequence: CTG
aggagcaaggagagccagtc

SEQ ID NO: 315080 - DNA, 20 bp, Artificial Sequence
  Description of Artificial Sequence: Synthetic oligonucleotide
  Target: LAMA2; (+) strand; PAM type: YTN; PAM sequence: CTG
ggtcccaaaactgaagaact

SEQ ID NO: 315081 - DNA, 20 bp, Artificial Sequence
  Description of Artificial Sequence: Synthetic oligonucleotide
  Target: LAMA2; (+) strand; PAM type: YTN; PAM sequence: CTG
aagaacttggagtctgatgt

SEQ ID NO: 315082 - DNA, 20 bp, Artificial Sequence
  Description of Artificial Sequence: Synthetic oligonucleotide
  Target: LAMA2; (+) strand; PAM type: YTN; PAM sequence: CTT
ggagtctgatgtttgaggac

SEQ ID NO: 315083 - DNA, 20 bp, Artificial Sequence
  Description of Artificial Sequence: Synthetic oligonucleotide
  Target: LAMA2; (+) strand; PAM type: YTN; PAM sequence: TTG
gagtctgatgtttgaggaca

SEQ ID NO: 315084 - DNA, 20 bp, Artificial Sequence
  Description of Artificial Sequence: Synthetic oligonucleotide
  Target: LAMA2; (+) strand; PAM type: YTN; PAM sequence: CTG
atgtttgaggacaggaagca

SEQ ID NO: 315085 - DNA, 20 bp, Artificial Sequence
  Description of Artificial Sequence: Synthetic oligonucleotide
  Target: LAMA2; (+) strand; PAM type: YTN; PAM sequence: TTT
gaggacaggaagcatccagc

SEQ ID NO: 315086 - DNA, 20 bp, Artificial Sequence
  Description of Artificial Sequence: Synthetic oligonucleotide
  Target: LAMA2; (+) strand; PAM type: YTN; PAM sequence: TTG
aggacaggaagcatccagca

SEQ ID NO: 315087 - DNA, 20 bp, Artificial Sequence
  Description of Artificial Sequence: Synthetic oligonucleotide
  Target: LAMA2; (+) strand; PAM type: YTN; PAM sequence: CTG
ggaggctatgccagtctctc

SEQ ID NO: 315088 - DNA, 20 bp, Artificial Sequence
  Description of Artificial Sequence: Synthetic oligonucleotide
  Target: LAMA2; (+) strand; PAM type: YTN; PAM sequence: CTA
tgccagtctctccttttcac

SEQ ID NO: 315089 - DNA, 20 bp, Artificial Sequence
  Description of Artificial Sequence: Synthetic oligonucleotide
  Target: LAMA2; (+) strand; PAM type: YTN; PAM sequence: CTC
tccttttcacattttctgcc

SEQ ID NO: 315090 - DNA, 20 bp, Artificial Sequence
  Description of Artificial Sequence: Synthetic oligonucleotide
  Target: LAMA2; (+) strand; PAM type: YTN; PAM sequence: CTC
cttttcacattttctgcctg

SEQ ID NO: 315091 - DNA, 20 bp, Artificial Sequence
  Description of Artificial Sequence: Synthetic oligonucleotide
  Target: LAMA2; (+) strand; PAM type: YTN; PAM sequence: CTT
ttcacattttctgcctgctt

SEQ ID NO: 315092 - DNA, 20 bp, Artificial Sequence
  Description of Artificial Sequence: Synthetic oligonucleotide
  Target: LAMA2; (+) strand; PAM type: YTN; PAM sequence: TTT
tcacattttctgcctgcttt

SEQ ID NO: 315093 - DNA, 20 bp, Artificial Sequence
  Description of Artificial Sequence: Synthetic oligonucleotide
  Target: LAMA2; (+) strand; PAM type: YTN; PAM sequence: TTT
cacattttctgcctgcttta

SEQ ID NO: 315094 - DNA, 20 bp, Artificial Sequence
  Description of Artificial Sequence: Synthetic oligonucleotide
  Target: LAMA2; (+) strand; PAM type: YTN; PAM sequence: TTC
acattttctgcctgctttat

SEQ ID NO: 315095 - DNA, 20 bp, Artificial Sequence
  Description of Artificial Sequence: Synthetic oligonucleotide
  Target: LAMA2; (+) strand; PAM type: YTN; PAM sequence: TTT
tctgcctgctttatatttgc

SEQ ID NO: 315096 - DNA, 20 bp, Artificial Sequence
  Description of Artificial Sequence: Synthetic oligonucleotide
  Target: LAMA2; (+) strand; PAM type: YTN; PAM sequence: TTT
ctgcctgctttatatttgct

SEQ ID NO: 315097 - DNA, 20 bp, Artificial Sequence
  Description of Artificial Sequence: Synthetic oligonucleotide
  Target: LAMA2; (+) strand; PAM type: YTN; PAM sequence: TTC
tgcctgctttatatttgctg

SEQ ID NO: 315098 - DNA, 20 bp, Artificial Sequence
  Description of Artificial Sequence: Synthetic oligonucleotide
  Target: LAMA2; (+) strand; PAM type: YTN; PAM sequence: CTG
cctgctttatatttgctggc

SEQ ID NO: 315099 - DNA, 20 bp, Artificial Sequence
  Description of Artificial Sequence: Synthetic oligonucleotide
  Target: LAMA2; (+) strand; PAM type: YTN; PAM sequence: CTG
ctttatatttgctggcggct

SEQ ID NO: 315100 - DNA, 20 bp, Artificial Sequence
  Description of Artificial Sequence: Synthetic oligonucleotide
  Target: LAMA2; (+) strand; PAM type: YTN; PAM sequence: CTT
tatatttgctggcggctgat

SEQ ID NO: 315101 - DNA, 20 bp, Artificial Sequence
  Description of Artificial Sequence: Synthetic oligonucleotide
  Target: LAMA2; (+) strand; PAM type: YTN; PAM sequence: TTT
atatttgctggcggctgatt

SEQ ID NO: 315102 - DNA, 20 bp, Artificial Sequence
  Description of Artificial Sequence: Synthetic oligonucleotide
  Target: LAMA2; (+) strand; PAM type: YTN; PAM sequence: TTA
tatttgctggcggctgatta

SEQ ID NO: 315103 - DNA, 20 bp, Artificial Sequence
  Description of Artificial Sequence: Synthetic oligonucleotide
  Target: LAMA2; (+) strand; PAM type: YTN; PAM sequence: TTT
gctggcggctgattagattg

SEQ ID NO: 315104 - DNA, 20 bp, Artificial Sequence
  Description of Artificial Sequence: Synthetic oligonucleotide
  Target: LAMA2; (+) strand; PAM type: YTN; PAM sequence: TTG
ctggcggctgattagattgt

SEQ ID NO: 315105 - DNA, 20 bp, Artificial Sequence
  Description of Artificial Sequence: Synthetic oligonucleotide
  Target: LAMA2; (+) strand; PAM type: YTN; PAM sequence: CTG
gcggctgattagattgtgcc

SEQ ID NO: 315106 - DNA, 20 bp, Artificial Sequence
  Description of Artificial Sequence: Synthetic oligonucleotide
  Target: LAMA2; (+) strand; PAM type: YTN; PAM sequence: CTG
attagattgtgcccaccaga

SEQ ID NO: 315107 - DNA, 20 bp, Artificial Sequence
  Description of Artificial Sequence: Synthetic oligonucleotide
  Target: LAMA2; (+) strand; PAM type: YTN; PAM sequence: TTA
gattgtgcccaccagattaa

SEQ ID NO: 315108 - DNA, 20 bp, Artificial Sequence
  Description of Artificial Sequence: Synthetic oligonucleotide
  Target: LAMA2; (+) strand; PAM type: YTN; PAM sequence: TTG
tgcccaccagattaagggtg

SEQ ID NO: 315109 - DNA, 20 bp, Artificial Sequence
  Description of Artificial Sequence: Synthetic oligonucleotide
  Target: LAMA2; (+) strand; PAM type: YTN; PAM sequence: TTA
agggtgggtctgcctttccc

SEQ ID NO: 315110 - DNA, 20 bp, Artificial Sequence
  Description of Artificial Sequence: Synthetic oligonucleotide
  Target: LAMA2; (+) strand; PAM type: YTN; PAM sequence: CTG
cctttcccagcccactgact

SEQ ID NO: 315111 - DNA, 20 bp, Artificial Sequence
  Description of Artificial Sequence: Synthetic oligonucleotide
  Target: LAMA2; (+) strand; PAM type: YTN; PAM sequence: CTT
tcccagcccactgactcaaa

SEQ ID NO: 315112 - DNA, 20 bp, Artificial Sequence
  Description of Artificial Sequence: Synthetic oligonucleotide
  Target: LAMA2; (+) strand; PAM type: YTN; PAM sequence: TTT
cccagcccactgactcaaat

SEQ ID NO: 315113 - DNA, 20 bp, Artificial Sequence
  Description of Artificial Sequence: Synthetic oligonucleotide
  Target: LAMA2; (+) strand; PAM type: YTN; PAM sequence: TTC
ccagcccactgactcaaatg

SEQ ID NO: 315114 - DNA, 20 bp, Artificial Sequence
  Description of Artificial Sequence: Synthetic oligonucleotide
  Target: LAMA2; (+) strand; PAM type: YTN; PAM sequence: CTG
actcaaatgttaatttcctt

SEQ ID NO: 315115 - DNA, 20 bp, Artificial Sequence
  Description of Artificial Sequence: Synthetic oligonucleotide
  Target: LAMA2; (+) strand; PAM type: YTN; PAM sequence: CTC
aaatgttaatttcctttggc

SEQ ID NO: 315116 - DNA, 20 bp, Artificial Sequence
  Description of Artificial Sequence: Synthetic oligonucleotide
  Target: LAMA2; (+) strand; PAM type: YTN; PAM sequence: TTA
atttcctttggcaacaccct

SEQ ID NO: 315117 - DNA, 20 bp, Artificial Sequence
  Description of Artificial Sequence: Synthetic oligonucleotide
  Target: LAMA2; (+) strand; PAM type: YTN; PAM sequence: TTT
cctttggcaacaccctcaca

SEQ ID NO: 315118 - DNA, 20 bp, Artificial Sequence
  Description of Artificial Sequence: Synthetic oligonucleotide
  Target: LAMA2; (+) strand; PAM type: YTN; PAM sequence: TTC
ctttggcaacaccctcacag

SEQ ID NO: 315119 - DNA, 20 bp, Artificial Sequence
  Description of Artificial Sequence: Synthetic oligonucleotide
  Target: LAMA2; (+) strand; PAM type: YTN; PAM sequence: CTT
tggcaacaccctcacagata

SEQ ID NO: 315120 - DNA, 20 bp, Artificial Sequence
  Description of Artificial Sequence: Synthetic oligonucleotide
  Target: LAMA2; (+) strand; PAM type: YTN; PAM sequence: TTT
ggcaacaccctcacagatac

SEQ ID NO: 315121 - DNA, 20 bp, Artificial Sequence
  Description of Artificial Sequence: Synthetic oligonucleotide
  Target: LAMA2; (+) strand; PAM type: YTN; PAM sequence: TTG
gcaacaccctcacagataca

SEQ ID NO: 315122 - DNA, 20 bp, Artificial Sequence
  Description of Artificial Sequence: Synthetic oligonucleotide
  Target: LAMA2; (+) strand; PAM type: YTN; PAM sequence: CTC
acagatacacccacgatcaa

SEQ ID NO: 315123 - DNA, 20 bp, Artificial Sequence
  Description of Artificial Sequence: Synthetic oligonucleotide
  Target: LAMA2; (+) strand; PAM type: YTN; PAM sequence: CTT
tgtattcttcaatccaatca

SEQ ID NO: 315124 - DNA, 20 bp, Artificial Sequence
  Description of Artificial Sequence: Synthetic oligonucleotide
  Target: LAMA2; (+) strand; PAM type: YTN; PAM sequence: TTT
gtattcttcaatccaatcaa

SEQ ID NO: 315125 - DNA, 20 bp, Artificial Sequence
  Description of Artificial Sequence: Synthetic oligonucleotide
  Target: LAMA2; (+) strand; PAM type: YTN; PAM sequence: TTG
tattcttcaatccaatcaag

SEQ ID NO: 315126 - DNA, 20 bp, Artificial Sequence
  Description of Artificial Sequence: Synthetic oligonucleotide
  Target: LAMA2; (+) strand; PAM type: YTN; PAM sequence: TTC
ttcaatccaatcaagttgac

SEQ ID NO: 315127 - DNA, 20 bp, Artificial Sequence
  Description of Artificial Sequence: Synthetic oligonucleotide
  Target: LAMA2; (+) strand; PAM type: YTN; PAM sequence: CTT
caatccaatcaagttgacac

SEQ ID NO: 315128 - DNA, 20 bp, Artificial Sequence
  Description of Artificial Sequence: Synthetic oligonucleotide
  Target: LAMA2; (+) strand; PAM type: YTN; PAM sequence: TTC
aatccaatcaagttgacact

SEQ ID NO: 315129 - DNA, 20 bp, Artificial Sequence
  Description of Artificial Sequence: Synthetic oligonucleotide
  Target: LAMA2; (+) strand; PAM type: YTN; PAM sequence: TTG
acacttgtattaaccatcac

SEQ ID NO: 315130 - DNA, 20 bp, Artificial Sequence
  Description of Artificial Sequence: Synthetic oligonucleotide
  Target: LAMA2; (+) strand; PAM type: YTN; PAM sequence: CTT
gtattaaccatcacaagaat

SEQ ID NO: 315131 - DNA, 20 bp, Artificial Sequence
  Description of Artificial Sequence: Synthetic oligonucleotide
  Target: LAMA2; (+) strand; PAM type: YTN; PAM sequence: TTG
tattaaccatcacaagaata

SEQ ID NO: 315132 - DNA, 20 bp, Artificial Sequence
  Description of Artificial Sequence: Synthetic oligonucleotide
  Target: LAMA2; (+) strand; PAM type: YTN; PAM sequence: TTA
accatcacaagaataaattc

SEQ ID NO: 315133 - DNA, 20 bp, Artificial Sequence
  Description of Artificial Sequence: Synthetic oligonucleotide
  Target: LAMA2; (+) strand; PAM type: YTN; PAM sequence: TTC
ccagtggtctcttgccaggt

SEQ ID NO: 315134 - DNA, 20 bp, Artificial Sequence
  Description of Artificial Sequence: Synthetic oligonucleotide
  Target: LAMA2; (+) strand; PAM type: YTN; PAM sequence: CTC
ttgccaggtcagcaatggga

SEQ ID NO: 315135 - DNA, 20 bp, Artificial Sequence
  Description of Artificial Sequence: Synthetic oligonucleotide
  Target: LAMA2; (+) strand; PAM type: YTN; PAM sequence: CTT
gccaggtcagcaatgggata

SEQ ID NO: 315136 - DNA, 20 bp, Artificial Sequence
  Description of Artificial Sequence: Synthetic oligonucleotide
  Target: LAMA2; (+) strand; PAM type: YTN; PAM sequence: TTG
ccaggtcagcaatgggatag

SEQ ID NO: 315137 - DNA, 20 bp, Artificial Sequence
  Description of Artificial Sequence: Synthetic oligonucleotide
  Target: LAMA2; (+) strand; PAM type: YTN; PAM sequence: TTT
atagggttggcagggggatc

SEQ ID NO: 315138 - DNA, 20 bp, Artificial Sequence
  Description of Artificial Sequence: Synthetic oligonucleotide
  Target: LAMA2; (+) strand; PAM type: YTN; PAM sequence: TTA
tagggttggcagggggatct

SEQ ID NO: 315139 - DNA, 20 bp, Artificial Sequence
  Description of Artificial Sequence: Synthetic oligonucleotide
  Target: LAMA2; (+) strand; PAM type: YTN; PAM sequence: TTG
gcagggggatctggatacct

SEQ ID NO: 315140 - DNA, 20 bp, Artificial Sequence
  Description of Artificial Sequence: Synthetic oligonucleotide
  Target: LAMA2; (+) strand; PAM type: YTN; PAM sequence: CTG
gatacctaactaagattttg

SEQ ID NO: 315141 - DNA, 20 bp, Artificial Sequence
  Description of Artificial Sequence: Synthetic oligonucleotide
  Target: LAMA2; (+) strand; PAM type: YTN; PAM sequence: CTA
actaagattttgcagcctca

SEQ ID NO: 315142 - DNA, 20 bp, Artificial Sequence
  Description of Artificial Sequence: Synthetic oligonucleotide
  Target: LAMA2; (+) strand; PAM type: YTN; PAM sequence: CTA
agattttgcagcctcaacac

SEQ ID NO: 315143 - DNA, 20 bp, Artificial Sequence
  Description of Artificial Sequence: Synthetic oligonucleotide
  Target: LAMA2; (+) strand; PAM type: YTN; PAM sequence: TTT
tgcagcctcaacacttactc

SEQ ID NO: 315144 - DNA, 20 bp, Artificial Sequence
  Description of Artificial Sequence: Synthetic oligonucleotide
  Target: LAMA2; (+) strand; PAM type: YTN; PAM sequence: TTT
gcagcctcaacacttactct

SEQ ID NO: 315145 - DNA, 20 bp, Artificial Sequence
  Description of Artificial Sequence: Synthetic oligonucleotide
  Target: LAMA2; (+) strand; PAM type: YTN; PAM sequence: TTG
cagcctcaacacttactcta

SEQ ID NO: 315146 - DNA, 20 bp, Artificial Sequence
  Description of Artificial Sequence: Synthetic oligonucleotide
  Target: LAMA2; (+) strand; PAM type: YTN; PAM sequence: CTC
aacacttactctagccttgt

SEQ ID NO: 315147 - DNA, 20 bp, Artificial Sequence
  Description of Artificial Sequence: Synthetic oligonucleotide
  Target: LAMA2; (+) strand; PAM type: YTN; PAM sequence: CTT
actctagccttgtaaattat

SEQ ID NO: 315148 - DNA, 20 bp, Artificial Sequence
  Description of Artificial Sequence: Synthetic oligonucleotide
  Target: LAMA2; (+) strand; PAM type: YTN; PAM sequence: TTA
ctctagccttgtaaattatt

SEQ ID NO: 315149 - DNA, 20 bp, Artificial Sequence
  Description of Artificial Sequence: Synthetic oligonucleotide
  Target: LAMA2; (+) strand; PAM type: YTN; PAM sequence: CTC
tagccttgtaaattatttgg

SEQ ID NO: 315150 - DNA, 20 bp, Artificial Sequence
  Description of Artificial Sequence: Synthetic oligonucleotide
  Target: LAMA2; (+) strand; PAM type: YTN; PAM sequence: CTA
gccttgtaaattatttggta

SEQ ID NO: 315151 - DNA, 20 bp, Artificial Sequence
  Description of Artificial Sequence: Synthetic oligonucleotide
  Target: LAMA2; (+) strand; PAM type: YTN; PAM sequence: CTT
gtaaattatttggtacttaa

SEQ ID NO: 315152 - DNA, 20 bp, Artificial Sequence
  Description of Artificial Sequence: Synthetic oligonucleotide
  Target: LAMA2; (+) strand; PAM type: YTN; PAM sequence: TTG
taaattatttggtacttaaa

SEQ ID NO: 315153 - DNA, 20 bp, Artificial Sequence
  Description of Artificial Sequence: Synthetic oligonucleotide
  Target: LAMA2; (+) strand; PAM type: YTN; PAM sequence: TTA
tttggtacttaaaatttcag

SEQ ID NO: 315154 - DNA, 20 bp, Artificial Sequence
  Description of Artificial Sequence: Synthetic oligonucleotide
  Target: LAMA2; (+) strand; PAM type: YTN; PAM sequence: TTT
ggtacttaaaatttcagaga

SEQ ID NO: 315155 - DNA, 20 bp, Artificial Sequence
  Description of Artificial Sequence: Synthetic oligonucleotide
  Target: LAMA2; (+) strand; PAM type: YTN; PAM sequence: TTG
gtacttaaaatttcagagac

SEQ ID NO: 315156 - DNA, 20 bp, Artificial Sequence
  Description of Artificial Sequence: Synthetic oligonucleotide
  Target: LAMA2; (+) strand; PAM type: YTN; PAM sequence: CTT
aaaatttcagagacattctg

SEQ ID NO: 315157 - DNA, 20 bp, Artificial Sequence
  Description of Artificial Sequence: Synthetic oligonucleotide
  Target: LAMA2; (+) strand; PAM type: YTN; PAM sequence: TTA
aaatttcagagacattctgg

SEQ ID NO: 315158 - DNA, 20 bp, Artificial Sequence
  Description of Artificial Sequence: Synthetic oligonucleotide
  Target: LAMA2; (+) strand; PAM type: YTN; PAM sequence: TTT
cagagacattctggggatca

SEQ ID NO: 315159 - DNA, 20 bp, Artificial Sequence
  Description of Artificial Sequence: Synthetic oligonucleotide
  Target: LAMA2; (+) strand; PAM type: YTN; PAM sequence: TTC
agagacattctggggatcag

SEQ ID NO: 315160 - DNA, 20 bp, Artificial Sequence
  Description of Artificial Sequence: Synthetic oligonucleotide
  Target: LAMA2; (+) strand; PAM type: YTN; PAM sequence: TTC
tggggatcagcagctcaaat

SEQ ID NO: 315161 - DNA, 20 bp, Artificial Sequence
  Description of Artificial Sequence: Synthetic oligonucleotide
  Target: LAMA2; (+) strand; PAM type: YTN; PAM sequence: CTG
gggatcagcagctcaaataa

SEQ ID NO: 315162 - DNA, 20 bp, Artificial Sequence
  Description of Artificial Sequence: Synthetic oligonucleotide
  Target: LAMA2; (+) strand; PAM type: YTN; PAM sequence: CTC
aaataacacttcttgctgtg

SEQ ID NO: 315163 - DNA, 20 bp, Artificial Sequence
  Description of Artificial Sequence: Synthetic oligonucleotide
  Target: LAMA2; (+) strand; PAM type: YTN; PAM sequence: CTT
cttgctgtggtttgctcctc

SEQ ID NO: 315164 - DNA, 20 bp, Artificial Sequence
  Description of Artificial Sequence: Synthetic oligonucleotide
  Target: LAMA2; (+) strand; PAM type: YTN; PAM sequence: TTC
ttgctgtggtttgctcctcc

SEQ ID NO: 315165 - DNA, 20 bp, Artificial Sequence
  Description of Artificial Sequence: Synthetic oligonucleotide
  Target: LAMA2; (+) strand; PAM type: YTN; PAM sequence: CTT
gctgtggtttgctcctcccc

SEQ ID NO: 315166 - DNA, 20 bp, Artificial Sequence
  Description of Artificial Sequence: Synthetic oligonucleotide
  Target: LAMA2; (+) strand; PAM type: YTN; PAM sequence: TTG
ctgtggtttgctcctcccct

SEQ ID NO: 315167 - DNA, 20 bp, Artificial Sequence
  Description of Artificial Sequence: Synthetic oligonucleotide
  Target: LAMA2; (+) strand; PAM type: YTN; PAM sequence: CTG
tggtttgctcctccccttgg

SEQ ID NO: 315168 - DNA, 20 bp, Artificial Sequence
  Description of Artificial Sequence: Synthetic oligonucleotide
  Target: LAMA2; (+) strand; PAM type: YTN; PAM sequence: TTT
gctcctccccttggcagaca

SEQ ID NO: 315169 - DNA, 20 bp, Artificial Sequence
  Description of Artificial Sequence: Synthetic oligonucleotide
  Target: LAMA2; (+) strand; PAM type: YTN; PAM sequence: TTG
ctcctccccttggcagacac

SEQ ID NO: 315170 - DNA, 20 bp, Artificial Sequence
  Description of Artificial Sequence: Synthetic oligonucleotide
  Target: LAMA2; (+) strand; PAM type: YTN; PAM sequence: CTC
ctccccttggcagacacatc

SEQ ID NO: 315171 - DNA, 20 bp, Artificial Sequence
  Description of Artificial Sequence: Synthetic oligonucleotide
  Target: LAMA2; (+) strand; PAM type: YTN; PAM sequence: CTC
cccttggcagacacatccta

SEQ ID NO: 315172 - DNA, 20 bp, Artificial Sequence
  Description of Artificial Sequence: Synthetic oligonucleotide
  Target: LAMA2; (+) strand; PAM type: YTN; PAM sequence: CTT
ggcagacacatcctatcccc

SEQ ID NO: 315173 - DNA, 20 bp, Artificial Sequence
  Description of Artificial Sequence: Synthetic oligonucleotide
  Target: LAMA2; (+) strand; PAM type: YTN; PAM sequence: TTG
gcagacacatcctatcccca

SEQ ID NO: 315174 - DNA, 20 bp, Artificial Sequence
  Description of Artificial Sequence: Synthetic oligonucleotide
  Target: LAMA2; (+) strand; PAM type: YTN; PAM sequence: CTA
tccccagcttcctctgctct

SEQ ID NO: 315175 - DNA, 20 bp, Artificial Sequence
  Description of Artificial Sequence: Synthetic oligonucleotide
  Target: LAMA2; (+) strand; PAM type: YTN; PAM sequence: CTT
cctctgctctgggctagtac

SEQ ID NO: 315176 - DNA, 20 bp, Artificial Sequence
  Description of Artificial Sequence: Synthetic oligonucleotide
  Target: LAMA2; (+) strand; PAM type: YTN; PAM sequence: TTC
ctctgctctgggctagtacc

SEQ ID NO: 315177 - DNA, 20 bp, Artificial Sequence
  Description of Artificial Sequence: Synthetic oligonucleotide
  Target: LAMA2; (+) strand; PAM type: YTN; PAM sequence: CTC
tgctctgggctagtaccact

SEQ ID NO: 315178 - DNA, 20 bp, Artificial Sequence
  Description of Artificial Sequence: Synthetic oligonucleotide
  Target: LAMA2; (+) strand; PAM type: YTN; PAM sequence: CTG
ctctgggctagtaccactca

SEQ ID NO: 315179 - DNA, 20 bp, Artificial Sequence
  Description of Artificial Sequence: Synthetic oligonucleotide
  Target: LAMA2; (+) strand; PAM type: YTN; PAM sequence: CTC
tgggctagtaccactcactc

SEQ ID NO: 315180 - DNA, 20 bp, Artificial Sequence
  Description of Artificial Sequence: Synthetic oligonucleotide
  Target: LAMA2; (+) strand; PAM type: YTN; PAM sequence: CTG
ggctagtaccactcactcca

SEQ ID NO: 315181 - DNA, 20 bp, Artificial Sequence
  Description of Artificial Sequence: Synthetic oligonucleotide
  Target: LAMA2; (+) strand; PAM type: YTN; PAM sequence: CTA
gtaccactcactccatccac

SEQ ID NO: 315182 - DNA, 20 bp, Artificial Sequence
  Description of Artificial Sequence: Synthetic oligonucleotide
  Target: LAMA2; (+) strand; PAM type: YTN; PAM sequence: CTC
actccatccactttccttcc

SEQ ID NO: 315183 - DNA, 20 bp, Artificial Sequence
  Description of Artificial Sequence: Synthetic oligonucleotide
  Target: LAMA2; (+) strand; PAM type: YTN; PAM sequence: CTC
catccactttccttccatcc

SEQ ID NO: 315184 - DNA, 20 bp, Artificial Sequence
  Description of Artificial Sequence: Synthetic oligonucleotide
  Target: LAMA2; (+) strand; PAM type: YTN; PAM sequence: CTT
tccttccatcctatattaat

SEQ ID NO: 315185 - DNA, 20 bp, Artificial Sequence
  Description of Artificial Sequence: Synthetic oligonucleotide
  Target: LAMA2; (+) strand; PAM type: YTN; PAM sequence: TTT
ccttccatcctatattaatt

SEQ ID NO: 315186 - DNA, 20 bp, Artificial Sequence
  Description of Artificial Sequence: Synthetic oligonucleotide
  Target: LAMA2; (+) strand; PAM type: YTN; PAM sequence: TTC
cttccatcctatattaattt

SEQ ID NO: 315187 - DNA, 20 bp, Artificial Sequence
  Description of Artificial Sequence: Synthetic oligonucleotide
  Target: LAMA2; (+) strand; PAM type: YTN; PAM sequence: CTT
ccatcctatattaatttgtt

SEQ ID NO: 315188 - DNA, 20 bp, Artificial Sequence
  Description of Artificial Sequence: Synthetic oligonucleotide
  Target: LAMA2; (+) strand; PAM type: YTN; PAM sequence: TTC
catcctatattaatttgttg

SEQ ID NO: 315189 - DNA, 20 bp, Artificial Sequence
  Description of Artificial Sequence: Synthetic oligonucleotide
  Target: LAMA2; (+) strand; PAM type: YTN; PAM sequence: CTA
tattaatttgttgacacttc

SEQ ID NO: 315190 - DNA, 20 bp, Artificial Sequence
  Description of Artificial Sequence: Synthetic oligonucleotide
  Target: LAMA2; (+) strand; PAM type: YTN; PAM sequence: TTA
atttgttgacacttcttttc

SEQ ID NO: 315191 - DNA, 20 bp, Artificial Sequence
  Description of Artificial Sequence: Synthetic oligonucleotide
  Target: LAMA2; (+) strand; PAM type: YTN; PAM sequence: TTT
gttgacacttcttttctgat

SEQ ID NO: 315192 - DNA, 20 bp, Artificial Sequence
  Description of Artificial Sequence: Synthetic oligonucleotide
  Target: LAMA2; (+) strand; PAM type: YTN; PAM sequence: TTG
ttgacacttcttttctgatg

SEQ ID NO: 315193 - DNA, 20 bp, Artificial Sequence
  Description of Artificial Sequence: Synthetic oligonucleotide
  Target: LAMA2; (+) strand; PAM type: YTN; PAM sequence: TTG
acacttcttttctgatgtca

SEQ ID NO: 315194 - DNA, 20 bp, Artificial Sequence
  Description of Artificial Sequence: Synthetic oligonucleotide
  Target: LAMA2; (+) strand; PAM type: YTN; PAM sequence: CTT
cttttctgatgtcatcctct

SEQ ID NO: 315195 - DNA, 20 bp, Artificial Sequence
  Description of Artificial Sequence: Synthetic oligonucleotide
  Target: LAMA2; (+) strand; PAM type: YTN; PAM sequence: TTC
ttttctgatgtcatcctctg

SEQ ID NO: 315196 - DNA, 20 bp, Artificial Sequence
  Description of Artificial Sequence: Synthetic oligonucleotide
  Target: LAMA2; (+) strand; PAM type: YTN; PAM sequence: CTT
ttctgatgtcatcctctgga

SEQ ID NO: 315197 - DNA, 20 bp, Artificial Sequence
  Description of Artificial Sequence: Synthetic oligonucleotide
  Target: LAMA2; (+) strand; PAM type: YTN; PAM sequence: TTT
tctgatgtcatcctctggac

SEQ ID NO: 315198 - DNA, 20 bp, Artificial Sequence
  Description of Artificial Sequence: Synthetic oligonucleotide
  Target: LAMA2; (+) strand; PAM type: YTN; PAM sequence: TTT
ctgatgtcatcctctggacc

SEQ ID NO: 315199 - DNA, 20 bp, Artificial Sequence
  Description of Artificial Sequence: Synthetic oligonucleotide
  Target: LAMA2; (+) strand; PAM type: YTN; PAM sequence: TTC
tgatgtcatcctctggacca

SEQ ID NO: 315200 - DNA, 20 bp, Artificial Sequence
  Description of Artificial Sequence: Synthetic oligonucleotide
  Target: LAMA2; (+) strand; PAM type: YTN; PAM sequence: CTG
atgtcatcctctggaccata

SEQ ID NO: 315201 - DNA, 20 bp, Artificial Sequence
  Description of Artificial Sequence: Synthetic oligonucleotide
  Target: LAMA2; (+) strand; PAM type: YTN; PAM sequence: CTC
tggaccatatatatatatat

SEQ ID NO: 315202 - DNA, 20 bp, Artificial Sequence
  Description of Artificial Sequence: Synthetic oligonucleotide
  Target: LAMA2; (+) strand; PAM type: YTN; PAM sequence: CTG
gaccatatatatatatatat

SEQ ID NO: 315203 - DNA, 20 bp, Artificial Sequence
  Description of Artificial Sequence: Synthetic oligonucleotide
  Target: LAMA2; (+) strand; PAM type: YTN; PAM sequence: TTT
atgacttaactcttatttta

SEQ ID NO: 315204 - DNA, 20 bp, Artificial Sequence
  Description of Artificial Sequence: Synthetic oligonucleotide
  Target: LAMA2; (+) strand; PAM type: YTN; PAM sequence: TTA
tgacttaactcttattttag

SEQ ID NO: 315205 - DNA, 20 bp, Artificial Sequence
  Description of Artificial Sequence: Synthetic oligonucleotide
  Target: LAMA2; (+) strand; PAM type: YTN; PAM sequence: CTT
aactcttattttagaagatt

SEQ ID NO: 315206 - DNA, 20 bp, Artificial Sequence
  Description of Artificial Sequence: Synthetic oligonucleotide
  Target: LAMA2; (+) strand; PAM type: YTN; PAM sequence: TTA
actcttattttagaagattt

SEQ ID NO: 315207 - DNA, 20 bp, Artificial Sequence
  Description of Artificial Sequence: Synthetic oligonucleotide
  Target: LAMA2; (+) strand; PAM type: YTN; PAM sequence: CTC
ttattttagaagatttgtag

SEQ ID NO: 315208 - DNA, 20 bp, Artificial Sequence
  Description of Artificial Sequence: Synthetic oligonucleotide
  Target: LAMA2; (+) strand; PAM type: YTN; PAM sequence: CTT
attttagaagatttgtaggt

SEQ ID NO: 315209 - DNA, 20 bp, Artificial Sequence
  Description of Artificial Sequence: Synthetic oligonucleotide
  Target: LAMA2; (+) strand; PAM type: YTN; PAM sequence: TTA
ttttagaagatttgtaggtt

SEQ ID NO: 315210 - DNA, 20 bp, Artificial Sequence
  Description of Artificial Sequence: Synthetic oligonucleotide
  Target: LAMA2; (+) strand; PAM type: YTN; PAM sequence: TTT
tagaagatttgtaggttata

SEQ ID NO: 315211 - DNA, 20 bp, Artificial Sequence
  Description of Artificial Sequence: Synthetic oligonucleotide
  Target: LAMA2; (+) strand; PAM type: YTN; PAM sequence: TTT
agaagatttgtaggttataa

SEQ ID NO: 315212 - DNA, 20 bp, Artificial Sequence
  Description of Artificial Sequence: Synthetic oligonucleotide
  Target: LAMA2; (+) strand; PAM type: YTN; PAM sequence: TTA
gaagatttgtaggttataat

SEQ ID NO: 315213 - DNA, 20 bp, Artificial Sequence
  Description of Artificial Sequence: Synthetic oligonucleotide
  Target: LAMA2; (+) strand; PAM type: YTN; PAM sequence: TTT
gtaggttataatagcattta

SEQ ID NO: 315214 - DNA, 20 bp, Artificial Sequence
  Description of Artificial Sequence: Synthetic oligonucleotide
  Target: LAMA2; (+) strand; PAM type: YTN; PAM sequence: TTG
taggttataatagcatttaa

SEQ ID NO: 315215 - DNA, 20 bp, Artificial Sequence
  Description of Artificial Sequence: Synthetic oligonucleotide
  Target: LAMA2; (+) strand; PAM type: YTN; PAM sequence: TTA
taatagcatttaagtgtgtg

SEQ ID NO: 315216 - DNA, 20 bp, Artificial Sequence
  Description of Artificial Sequence: Synthetic oligonucleotide
  Target: LAMA2; (+) strand; PAM type: YTN; PAM sequence: TTT
aagtgtgtgtgttcatggtc

SEQ ID NO: 315217 - DNA, 20 bp, Artificial Sequence
  Description of Artificial Sequence: Synthetic oligonucleotide
  Target: LAMA2; (+) strand; PAM type: YTN; PAM sequence: TTA
agtgtgtgtgttcatggtca

SEQ ID NO: 315218 - DNA, 20 bp, Artificial Sequence
  Description of Artificial Sequence: Synthetic oligonucleotide
  Target: LAMA2; (+) strand; PAM type: YTN; PAM sequence: TTC
atggtcaggtttaaccaaag

SEQ ID NO: 315219 - DNA, 20 bp, Artificial Sequence
  Description of Artificial Sequence: Synthetic oligonucleotide
  Target: LAMA2; (+) strand; PAM type: YTN; PAM sequence: TTT
aaccaaagtcctaggcctga

SEQ ID NO: 315220 - DNA, 20 bp, Artificial Sequence
  Description of Artificial Sequence: Synthetic oligonucleotide
  Target: LAMA2; (+) strand; PAM type: YTN; PAM sequence: TTA
accaaagtcctaggcctgag

SEQ ID NO: 315221 - DNA, 20 bp, Artificial Sequence
  Description of Artificial Sequence: Synthetic oligonucleotide
  Target: LAMA2; (+) strand; PAM type: YTN; PAM sequence: CTA
ggcctgagtatttcaatgtg

SEQ ID NO: 315222 - DNA, 20 bp, Artificial Sequence
  Description of Artificial Sequence: Synthetic oligonucleotide
  Target: LAMA2; (+) strand; PAM type: YTN; PAM sequence: CTG
agtatttcaatgtgaagaac

SEQ ID NO: 315223 - DNA, 20 bp, Artificial Sequence
  Description of Artificial Sequence: Synthetic oligonucleotide
  Target: LAMA2; (+) strand; PAM type: YTN; PAM sequence: TTT
caatgtgaagaacaaacaga

SEQ ID NO: 315224 - DNA, 20 bp, Artificial Sequence
  Description of Artificial Sequence: Synthetic oligonucleotide
  Target: LAMA2; (+) strand; PAM type: YTN; PAM sequence: TTC
aatgtgaagaacaaacagaa

SEQ ID NO: 315225 - DNA, 20 bp, Artificial Sequence
  Description of Artificial Sequence: Synthetic oligonucleotide
  Target: LAMA2; (+) strand; PAM type: YTN; PAM sequence: TTA
ctttcatacctctatttttg

SEQ ID NO: 315226 - DNA, 20 bp, Artificial Sequence
  Description of Artificial Sequence: Synthetic oligonucleotide
  Target: LAMA2; (+) strand; PAM type: YTN; PAM sequence: CTT
tcatacctctatttttgata

SEQ ID NO: 315227 - DNA, 20 bp, Artificial Sequence
  Description of Artificial Sequence: Synthetic oligonucleotide
  Target: LAMA2; (+) strand; PAM type: YTN; PAM sequence: TTT
catacctctatttttgatag

SEQ ID NO: 315228 - DNA, 20 bp, Artificial Sequence
  Description of Artificial Sequence: Synthetic oligonucleotide
  Target: LAMA2; (+) strand; PAM type: YTN; PAM sequence: TTC
atacctctatttttgatagt

SEQ ID NO: 315229 - DNA, 20 bp, Artificial Sequence
  Description of Artificial Sequence: Synthetic oligonucleotide
  Target: LAMA2; (+) strand; PAM type: YTN; PAM sequence: CTC
tatttttgatagtctgtgat

SEQ ID NO: 315230 - DNA, 20 bp, Artificial Sequence
  Description of Artificial Sequence: Synthetic oligonucleotide
  Target: LAMA2; (+) strand; PAM type: YTN; PAM sequence: CTA
tttttgatagtctgtgattc

SEQ ID NO: 315231 - DNA, 20 bp, Artificial Sequence
  Description of Artificial Sequence: Synthetic oligonucleotide
  Target: LAMA2; (+) strand; PAM type: YTN; PAM sequence: TTT
ttgatagtctgtgattctga

SEQ ID NO: 315232 - DNA, 20 bp, Artificial Sequence
  Description of Artificial Sequence: Synthetic oligonucleotide
  Target: LAMA2; (+) strand; PAM type: YTN; PAM sequence: TTT
tgatagtctgtgattctgag

SEQ ID NO: 315233 - DNA, 20 bp, Artificial Sequence
  Description of Artificial Sequence: Synthetic oligonucleotide
  Target: LAMA2; (+) strand; PAM type: YTN; PAM sequence: TTT
gatagtctgtgattctgagc

SEQ ID NO: 315234 - DNA, 20 bp, Artificial Sequence
  Description of Artificial Sequence: Synthetic oligonucleotide
  Target: LAMA2; (+) strand; PAM type: YTN; PAM sequence: TTG
atagtctgtgattctgagcc

SEQ ID NO: 315235 - DNA, 20 bp, Artificial Sequence
  Description of Artificial Sequence: Synthetic oligonucleotide
  Target: LAMA2; (+) strand; PAM type: YTN; PAM sequence: CTG
tgattctgagccctatctat

SEQ ID NO: 315236 - DNA, 20 bp, Artificial Sequence
  Description of Artificial Sequence: Synthetic oligonucleotide
  Target: LAMA2; (+) strand; PAM type: YTN; PAM sequence: TTC
tgagccctatctatgctttc

SEQ ID NO: 315237 - DNA, 20 bp, Artificial Sequence
  Description of Artificial Sequence: Synthetic oligonucleotide
  Target: LAMA2; (+) strand; PAM type: YTN; PAM sequence: CTG
agccctatctatgctttcag

SEQ ID NO: 315238 - DNA, 20 bp, Artificial Sequence
  Description of Artificial Sequence: Synthetic oligonucleotide
  Target: LAMA2; (+) strand; PAM type: YTN; PAM sequence: CTA
tctatgctttcagtcaaatt

SEQ ID NO: 315239 - DNA, 20 bp, Artificial Sequence
  Description of Artificial Sequence: Synthetic oligonucleotide
  Target: LAMA2; (+) strand; PAM type: YTN; PAM sequence: CTA
tgctttcagtcaaattacca

SEQ ID NO: 315240 - DNA, 20 bp, Artificial Sequence
  Description of Artificial Sequence: Synthetic oligonucleotide
  Target: LAMA2; (+) strand; PAM type: YTN; PAM sequence: CTT
tcagtcaaattaccaatggt

SEQ ID NO: 315241 - DNA, 20 bp, Artificial Sequence
  Description of Artificial Sequence: Synthetic oligonucleotide
  Target: LAMA2; (+) strand; PAM type: YTN; PAM sequence: TTT
cagtcaaattaccaatggta

SEQ ID NO: 315242 - DNA, 20 bp, Artificial Sequence
  Description of Artificial Sequence: Synthetic oligonucleotide
  Target: LAMA2; (+) strand; PAM type: YTN; PAM sequence: TTC
agtcaaattaccaatggtat

SEQ ID NO: 315243 - DNA, 20 bp, Artificial Sequence
  Description of Artificial Sequence: Synthetic oligonucleotide
  Target: LAMA2; (+) strand; PAM type: YTN; PAM sequence: TTA
ccaatggtatgaaactcttt

SEQ ID NO: 315244 - DNA, 20 bp, Artificial Sequence
  Description of Artificial Sequence: Synthetic oligonucleotide
  Target: LAMA2; (+) strand; PAM type: YTN; PAM sequence: CTC
tttaattttgtgtgtctcac

SEQ ID NO: 315245 - DNA, 20 bp, Artificial Sequence
  Description of Artificial Sequence: Synthetic oligonucleotide
  Target: LAMA2; (+) strand; PAM type: YTN; PAM sequence: CTT
taattttgtgtgtctcacgt

SEQ ID NO: 315246 - DNA, 20 bp, Artificial Sequence
  Description of Artificial Sequence: Synthetic oligonucleotide
  Target: LAMA2; (+) strand; PAM type: YTN; PAM sequence: TTT
aattttgtgtgtctcacgtt

SEQ ID NO: 315247 - DNA, 20 bp, Artificial Sequence
  Description of Artificial Sequence: Synthetic oligonucleotide
  Target: LAMA2; (+) strand; PAM type: YTN; PAM sequence: TTA
attttgtgtgtctcacgttt

SEQ ID NO: 315248 - DNA, 20 bp, Artificial Sequence
  Description of Artificial Sequence: Synthetic oligonucleotide
  Target: LAMA2; (+) strand; PAM type: YTN; PAM sequence: TTT
tgtgtgtctcacgtttagag

SEQ ID NO: 315249 - DNA, 20 bp, Artificial Sequence
  Description of Artificial Sequence: Synthetic oligonucleotide
  Target: LAMA2; (+) strand; PAM type: YTN; PAM sequence: TTT
gtgtgtctcacgtttagagg

SEQ ID NO: 315250 - DNA, 20 bp, Artificial Sequence
  Description of Artificial Sequence: Synthetic oligonucleotide
  Target: LAMA2; (+) strand; PAM type: YTN; PAM sequence: TTG
tgtgtctcacgtttagaggg

SEQ ID NO: 315251 - DNA, 20 bp, Artificial Sequence
  Description of Artificial Sequence: Synthetic oligonucleotide
  Target: LAMA2; (+) strand; PAM type: YTN; PAM sequence: CTC
acgtttagagggtagcttaa

SEQ ID NO: 315252 - DNA, 20 bp, Artificial Sequence
  Description of Artificial Sequence: Synthetic oligonucleotide
  Target: LAMA2; (+) strand; PAM type: YTN; PAM sequence: TTT
agagggtagcttaagaggtt

SEQ ID NO: 315253 - DNA, 20 bp, Artificial Sequence
  Description of Artificial Sequence: Synthetic oligonucleotide
  Target: LAMA2; (+) strand; PAM type: YTN; PAM sequence: TTA
gagggtagcttaagaggttc

SEQ ID NO: 315254 - DNA, 20 bp, Artificial Sequence
  Description of Artificial Sequence: Synthetic oligonucleotide
  Target: LAMA2; (+) strand; PAM type: YTN; PAM sequence: CTT
aagaggttctttaactgcat

SEQ ID NO: 315255 - DNA, 20 bp, Artificial Sequence
  Description of Artificial Sequence: Synthetic oligonucleotide
  Target: LAMA2; (+) strand; PAM type: YTN; PAM sequence: TTA
agaggttctttaactgcatg

SEQ ID NO: 315256 - DNA, 20 bp, Artificial Sequence
  Description of Artificial Sequence: Synthetic oligonucleotide
  Target: LAMA2; (+) strand; PAM type: YTN; PAM sequence: TTC
tttaactgcatgactattgt

SEQ ID NO: 315257 - DNA, 20 bp, Artificial Sequence
  Description of Artificial Sequence: Synthetic oligonucleotide
  Target: LAMA2; (+) strand; PAM type: YTN; PAM sequence: CTT
taactgcatgactattgtga

SEQ ID NO: 315258 - DNA, 20 bp, Artificial Sequence
  Description of Artificial Sequence: Synthetic oligonucleotide
  Target: LAMA2; (+) strand; PAM type: YTN; PAM sequence: TTT
aactgcatgactattgtgag

SEQ ID NO: 315259 - DNA, 20 bp, Artificial Sequence
  Description of Artificial Sequence: Synthetic oligonucleotide
  Target: LAMA2; (+) strand; PAM type: YTN; PAM sequence: TTA
actgcatgactattgtgagg

SEQ ID NO: 315260 - DNA, 20 bp, Artificial Sequence
  Description of Artificial Sequence: Synthetic oligonucleotide
  Target: LAMA2; (+) strand; PAM type: YTN; PAM sequence: CTG
catgactattgtgaggagga

SEQ ID NO: 315261 - DNA, 20 bp, Artificial Sequence
  Description of Artificial Sequence: Synthetic oligonucleotide
  Target: LAMA2; (+) strand; PAM type: YTN; PAM sequence: CTA
ttgtgaggaggatacttatg

SEQ ID NO: 315262 - DNA, 20 bp, Artificial Sequence
  Description of Artificial Sequence: Synthetic oligonucleotide
  Target: LAMA2; (+) strand; PAM type: YTN; PAM sequence: TTG
tgaggaggatacttatgagt

SEQ ID NO: 315263 - DNA, 20 bp, Artificial Sequence
  Description of Artificial Sequence: Synthetic oligonucleotide
  Target: LAMA2; (+) strand; PAM type: YTN; PAM sequence: CTT
atgagttgttcttcatttcc

SEQ ID NO: 315264 - DNA, 20 bp, Artificial Sequence
  Description of Artificial Sequence: Synthetic oligonucleotide
  Target: LAMA2; (+) strand; PAM type: YTN; PAM sequence: TTA
tgagttgttcttcatttcca

SEQ ID NO: 315265 - DNA, 20 bp, Artificial Sequence
  Description of Artificial Sequence: Synthetic oligonucleotide
  Target: LAMA2; (+) strand; PAM type: YTN; PAM sequence: TTG
ttcttcatttccatggggac

SEQ ID NO: 315266 - DNA, 20 bp, Artificial Sequence
  Description of Artificial Sequence: Synthetic oligonucleotide
  Target: LAMA2; (+) strand; PAM type: YTN; PAM sequence: TTC
ttcatttccatggggacaag

SEQ ID NO: 315267 - DNA, 20 bp, Artificial Sequence
  Description of Artificial Sequence: Synthetic oligonucleotide
  Target: LAMA2; (+) strand; PAM type: YTN; PAM sequence: CTT
catttccatggggacaagga

SEQ ID NO: 315268 - DNA, 20 bp, Artificial Sequence
  Description of Artificial Sequence: Synthetic oligonucleotide
  Target: LAMA2; (+) strand; PAM type: YTN; PAM sequence: TTC
atttccatggggacaaggac

SEQ ID NO: 315269 - DNA, 20 bp, Artificial Sequence
  Description of Artificial Sequence: Synthetic oligonucleotide
  Target: LAMA2; (+) strand; PAM type: YTN; PAM sequence: TTT
ccatggggacaaggacaatg

SEQ ID NO: 315270 - DNA, 20 bp, Artificial Sequence
  Description of Artificial Sequence: Synthetic oligonucleotide
  Target: LAMA2; (+) strand; PAM type: YTN; PAM sequence: TTC
catggggacaaggacaatga

SEQ ID NO: 315271 - DNA, 20 bp, Artificial Sequence
  Description of Artificial Sequence: Synthetic oligonucleotide
  Target: LAMA2; (+) strand; PAM type: YTN; PAM sequence: TTC
agagtgttattagaagttag

SEQ ID NO: 315272 - DNA, 20 bp, Artificial Sequence
  Description of Artificial Sequence: Synthetic oligonucleotide
  Target: LAMA2; (+) strand; PAM type: YTN; PAM sequence: TTA
ttagaagttaggtagtacct

SEQ ID NO: 315273 - DNA, 20 bp, Artificial Sequence
  Description of Artificial Sequence: Synthetic oligonucleotide
  Target: LAMA2; (+) strand; PAM type: YTN; PAM sequence: TTA
gaagttaggtagtacctttt

SEQ ID NO: 315274 - DNA, 20 bp, Artificial Sequence
  Description of Artificial Sequence: Synthetic oligonucleotide
  Target: LAMA2; (+) strand; PAM type: YTN; PAM sequence: TTA
ggtagtaccttttaattgtt

SEQ ID NO: 315275 - DNA, 20 bp, Artificial Sequence
  Description of Artificial Sequence: Synthetic oligonucleotide
  Target: LAMA2; (+) strand; PAM type: YTN; PAM sequence: CTT
ttaattgttaaacaataaag

SEQ ID NO: 315276 - DNA, 20 bp, Artificial Sequence
  Description of Artificial Sequence: Synthetic oligonucleotide
  Target: LAMA2; (+) strand; PAM type: YTN; PAM sequence: TTT
taattgttaaacaataaagt

SEQ ID NO: 315277 - DNA, 20 bp, Artificial Sequence
  Description of Artificial Sequence: Synthetic oligonucleotide
  Target: LAMA2; (+) strand; PAM type: YTN; PAM sequence: TTT
aattgttaaacaataaagta

SEQ ID NO: 315278 - DNA, 20 bp, Artificial Sequence
  Description of Artificial Sequence: Synthetic oligonucleotide
  Target: LAMA2; (+) strand; PAM type: YTN; PAM sequence: TTA
attgttaaacaataaagtaa

SEQ ID NO: 315279 - DNA, 20 bp, Artificial Sequence
  Description of Artificial Sequence: Synthetic oligonucleotide
  Target: LAMA2; (+) strand; PAM type: YTN; PAM sequence: TTG
ttaaacaataaagtaataac

SEQ ID NO: 315280 - DNA, 20 bp, Artificial Sequence
  Description of Artificial Sequence: Synthetic oligonucleotide
  Target: LAMA2; (+) strand; PAM type: YTN; PAM sequence: TTA
aacaataaagtaataacatt

SEQ ID NO: 315281 - DNA, 20 bp, Artificial Sequence
  Description of Artificial Sequence: Synthetic oligonucleotide
  Target: LAMA2; (+) strand; PAM type: YTN; PAM sequence: TTG
ctcattaggcatgtgcttat

SEQ ID NO: 315282 - DNA, 20 bp, Artificial Sequence
  Description of Artificial Sequence: Synthetic oligonucleotide
  Target: LAMA2; (+) strand; PAM type: YTN; PAM sequence: CTC
attaggcatgtgcttatgaa

SEQ ID NO: 315283 - DNA, 20 bp, Artificial Sequence
  Description of Artificial Sequence: Synthetic oligonucleotide
  Target: LAMA2; (+) strand; PAM type: YTN; PAM sequence: TTA
ggcatgtgcttatgaagaca

SEQ ID NO: 315284 - DNA, 20 bp, Artificial Sequence
  Description of Artificial Sequence: Synthetic oligonucleotide
  Target: LAMA2; (+) strand; PAM type: YTN; PAM sequence: CTT
atgaagacaaaaaggcctga

SEQ ID NO: 315285 - DNA, 20 bp, Artificial Sequence
  Description of Artificial Sequence: Synthetic oligonucleotide
  Target: LAMA2; (+) strand; PAM type: YTN; PAM sequence: TTA
tgaagacaaaaaggcctgat

SEQ ID NO: 315286 - DNA, 20 bp, Artificial Sequence
  Description of Artificial Sequence: Synthetic oligonucleotide
  Target: LAMA2; (+) strand; PAM type: YTN; PAM sequence: CTG
atttactgatttagtgattt

SEQ ID NO: 315287 - DNA, 20 bp, Artificial Sequence
  Description of Artificial Sequence: Synthetic oligonucleotide
  Target: LAMA2; (+) strand; PAM type: YTN; PAM sequence: TTT
actgatttagtgatttagtc

SEQ ID NO: 315288 - DNA, 20 bp, Artificial Sequence
  Description of Artificial Sequence: Synthetic oligonucleotide
  Target: LAMA2; (+) strand; PAM type: YTN; PAM sequence: TTA
ctgatttagtgatttagtcc

SEQ ID NO: 315289 - DNA, 20 bp, Artificial Sequence
  Description of Artificial Sequence: Synthetic oligonucleotide
  Target: LAMA2; (+) strand; PAM type: YTN; PAM sequence: CTG
atttagtgatttagtccaag

SEQ ID NO: 315290 - DNA, 20 bp, Artificial Sequence
  Description of Artificial Sequence: Synthetic oligonucleotide
  Target: LAMA2; (+) strand; PAM type: YTN; PAM sequence: TTT
agtgatttagtccaaggctt

SEQ ID NO: 315291 - DNA, 20 bp, Artificial Sequence
  Description of Artificial Sequence: Synthetic oligonucleotide
  Target: LAMA2; (+) strand; PAM type: YTN; PAM sequence: TTA
gtgatttagtccaaggcttt

SEQ ID NO: 315292 - DNA, 20 bp, Artificial Sequence
  Description of Artificial Sequence: Synthetic oligonucleotide
  Target: LAMA2; (+) strand; PAM type: YTN; PAM sequence: TTT
agtccaaggctttgacatcc

SEQ ID NO: 315293 - DNA, 20 bp, Artificial Sequence
  Description of Artificial Sequence: Synthetic oligonucleotide
  Target: LAMA2; (+) strand; PAM type: YTN; PAM sequence: TTA
gtccaaggctttgacatcca

SEQ ID NO: 315294 - DNA, 20 bp, Artificial Sequence
  Description of Artificial Sequence: Synthetic oligonucleotide
  Target: LAMA2; (+) strand; PAM type: YTN; PAM sequence: CTT
tgacatccatatgatgtgga

SEQ ID NO: 315295 - DNA, 20 bp, Artificial Sequence
  Description of Artificial Sequence: Synthetic oligonucleotide
  Target: LAMA2; (+) strand; PAM type: YTN; PAM sequence: TTT
gacatccatatgatgtggac

SEQ ID NO: 315296 - DNA, 20 bp, Artificial Sequence
  Description of Artificial Sequence: Synthetic oligonucleotide
  Target: LAMA2; (+) strand; PAM type: YTN; PAM sequence: TTG
acatccatatgatgtggacc

SEQ ID NO: 315297 - DNA, 20 bp, Artificial Sequence
  Description of Artificial Sequence: Synthetic oligonucleotide
  Target: LAMA2; (+) strand; PAM type: YTN; PAM sequence: CTC
tgggtactaaagaagtctat

SEQ ID NO: 315298 - DNA, 20 bp, Artificial Sequence
  Description of Artificial Sequence: Synthetic oligonucleotide
  Target: LAMA2; (+) strand; PAM type: YTN; PAM sequence: CTG
ggtactaaagaagtctataa

SEQ ID NO: 315299 - DNA, 20 bp, Artificial Sequence
  Description of Artificial Sequence: Synthetic oligonucleotide
  Target: LAMA2; (+) strand; PAM type: YTN; PAM sequence: CTA
aagaagtctataaatcccaa

SEQ ID NO: 315300 - DNA, 20 bp, Artificial Sequence
  Description of Artificial Sequence: Synthetic oligonucleotide
  Target: LAMA2; (+) strand; PAM type: YTN; PAM sequence: CTA
taaatcccaatcacaactgt

SEQ ID NO: 315301 - DNA, 20 bp, Artificial Sequence
  Description of Artificial Sequence: Synthetic oligonucleotide
  Target: LAMA2; (+) strand; PAM type: YTN; PAM sequence: CTG
tgattaattacaaatatctt

SEQ ID NO: 315302 - DNA, 20 bp, Artificial Sequence
  Description of Artificial Sequence: Synthetic oligonucleotide
  Target: LAMA2; (+) strand; PAM type: YTN; PAM sequence: TTA
attacaaatatcttatgcat

SEQ ID NO: 315303 - DNA, 20 bp, Artificial Sequence
  Description of Artificial Sequence: Synthetic oligonucleotide
  Target: LAMA2; (+) strand; PAM type: YTN; PAM sequence: TTA
caaatatcttatgcatgtat

SEQ ID NO: 315304 - DNA, 20 bp, Artificial Sequence
  Description of Artificial Sequence: Synthetic oligonucleotide
  Target: LAMA2; (+) strand; PAM type: YTN; PAM sequence: CTT
atgcatgtatttctttagct

SEQ ID NO: 315305 - DNA, 20 bp, Artificial Sequence
  Description of Artificial Sequence: Synthetic oligonucleotide
  Target: LAMA2; (+) strand; PAM type: YTN; PAM sequence: TTA
tgcatgtatttctttagcta

SEQ ID NO: 315306 - DNA, 20 bp, Artificial Sequence
  Description of Artificial Sequence: Synthetic oligonucleotide
  Target: LAMA2; (+) strand; PAM type: YTN; PAM sequence: TTT
ctttagctaaagacagaggt

SEQ ID NO: 315307 - DNA, 20 bp, Artificial Sequence
  Description of Artificial Sequence: Synthetic oligonucleotide
  Target: LAMA2; (+) strand; PAM type: YTN; PAM sequence: TTC
tttagctaaagacagaggta

SEQ ID NO: 315308 - DNA, 20 bp, Artificial Sequence
  Description of Artificial Sequence: Synthetic oligonucleotide
  Target: LAMA2; (+) strand; PAM type: YTN; PAM sequence: CTT
tagctaaagacagaggtaga

SEQ ID NO: 315309 - DNA, 20 bp, Artificial Sequence
  Description of Artificial Sequence: Synthetic oligonucleotide
  Target: LAMA2; (+) strand; PAM type: YTN; PAM sequence: TTT
agctaaagacagaggtagaa

SEQ ID NO: 315310 - DNA, 20 bp, Artificial Sequence
  Description of Artificial Sequence: Synthetic oligonucleotide
  Target: LAMA2; (+) strand; PAM type: YTN; PAM sequence: TTA
gctaaagacagaggtagaat

SEQ ID NO: 315311 - DNA, 20 bp, Artificial Sequence
  Description of Artificial Sequence: Synthetic oligonucleotide
  Target: LAMA2; (+) strand; PAM type: YTN; PAM sequence: CTA
aagacagaggtagaatcaaa

SEQ ID NO: 315312 - DNA, 20 bp, Artificial Sequence
  Description of Artificial Sequence: Synthetic oligonucleotide
  Target: LAMA2; (+) strand; PAM type: YTN; PAM sequence: TTA
ctccaagtttactggctcta

SEQ ID NO: 315313 - DNA, 20 bp, Artificial Sequence
  Description of Artificial Sequence: Synthetic oligonucleotide
  Target: LAMA2; (+) strand; PAM type: YTN; PAM sequence: CTC
caagtttactggctctattt

SEQ ID NO: 315314 - DNA, 20 bp, Artificial Sequence
  Description of Artificial Sequence: Synthetic oligonucleotide
  Target: LAMA2; (+) strand; PAM type: YTN; PAM sequence: TTT
actggctctatttctcttca

SEQ ID NO: 315315 - DNA, 20 bp, Artificial Sequence
  Description of Artificial Sequence: Synthetic oligonucleotide
  Target: LAMA2; (+) strand; PAM type: YTN; PAM sequence: TTA
ctggctctatttctcttcat

SEQ ID NO: 315316 - DNA, 20 bp, Artificial Sequence
  Description of Artificial Sequence: Synthetic oligonucleotide
  Target: LAMA2; (+) strand; PAM type: YTN; PAM sequence: CTG
gctctatttctcttcatttg

SEQ ID NO: 315317 - DNA, 20 bp, Artificial Sequence
  Description of Artificial Sequence: Synthetic oligonucleotide
  Target: LAMA2; (+) strand; PAM type: YTN; PAM sequence: CTC
tatttctcttcatttgaaaa

SEQ ID NO: 315318 - DNA, 20 bp, Artificial Sequence
  Description of Artificial Sequence: Synthetic oligonucleotide
  Target: LAMA2; (+) strand; PAM type: YTN; PAM sequence: CTA
tttctcttcatttgaaaaca

SEQ ID NO: 315319 - DNA, 20 bp, Artificial Sequence
  Description of Artificial Sequence: Synthetic oligonucleotide
  Target: LAMA2; (+) strand; PAM type: YTN; PAM sequence: TTT
ctcttcatttgaaaacagaa

SEQ ID NO: 315320 - DNA, 20 bp, Artificial Sequence
  Description of Artificial Sequence: Synthetic oligonucleotide
  Target: LAMA2; (+) strand; PAM type: YTN; PAM sequence: TTC
tcttcatttgaaaacagaat

SEQ ID NO: 315321 - DNA, 20 bp, Artificial Sequence
  Description of Artificial Sequence: Synthetic oligonucleotide
  Target: LAMA2; (+) strand; PAM type: YTN; PAM sequence: CTC
ttcatttgaaaacagaattt

SEQ ID NO: 315322 - DNA, 20 bp, Artificial Sequence
  Description of Artificial Sequence: Synthetic oligonucleotide
  Target: LAMA2; (+) strand; PAM type: YTN; PAM sequence: CTT
catttgaaaacagaattttc

SEQ ID NO: 315323 - DNA, 20 bp, Artificial Sequence
  Description of Artificial Sequence: Synthetic oligonucleotide
  Target: LAMA2; (+) strand; PAM type: YTN; PAM sequence: TTC
atttgaaaacagaattttct

SEQ ID NO: 315324 - DNA, 20 bp, Artificial Sequence
  Description of Artificial Sequence: Synthetic oligonucleotide
  Target: LAMA2; (+) strand; PAM type: YTN; PAM sequence: TTT
gaaaacagaattttctcaaa

SEQ ID NO: 315325 - DNA, 20 bp, Artificial Sequence
  Description of Artificial Sequence: Synthetic oligonucleotide
  Target: LAMA2; (+) strand; PAM type: YTN; PAM sequence: TTG
aaaacagaattttctcaaaa

SEQ ID NO: 315326 - DNA, 20 bp, Artificial Sequence
  Description of Artificial Sequence: Synthetic oligonucleotide
  Target: LAMA2; (+) strand; PAM type: YTN; PAM sequence: TTT
tctcaaaaggcaaaggaaaa

SEQ ID NO: 315327 - DNA, 20 bp, Artificial Sequence
  Description of Artificial Sequence: Synthetic oligonucleotide
  Target: LAMA2; (+) strand; PAM type: YTN; PAM sequence: TTT
ctcaaaaggcaaaggaaaag

SEQ ID NO: 315328 - DNA, 20 bp, Artificial Sequence
  Description of Artificial Sequence: Synthetic oligonucleotide
  Target: LAMA2; (+) strand; PAM type: YTN; PAM sequence: TTC
tcaaaaggcaaaggaaaagt

SEQ ID NO: 315329 - DNA, 20 bp, Artificial Sequence
  Description of Artificial Sequence: Synthetic oligonucleotide
  Target: LAMA2; (+) strand; PAM type: YTN; PAM sequence: CTC
aaaaggcaaaggaaaagttt

SEQ ID NO: 315330 - DNA, 20 bp, Artificial Sequence
  Description of Artificial Sequence: Synthetic oligonucleotide
  Target: LAMA2; (+) strand; PAM type: YTN; PAM sequence: TTT
gtcatccacatctcttatta

SEQ ID NO: 315331 - DNA, 20 bp, Artificial Sequence
  Description of Artificial Sequence: Synthetic oligonucleotide
  Target: LAMA2; (+) strand; PAM type: YTN; PAM sequence: TTG
tcatccacatctcttattaa

SEQ ID NO: 315332 - DNA, 20 bp, Artificial Sequence
  Description of Artificial Sequence: Synthetic oligonucleotide
  Target: LAMA2; (+) strand; PAM type: YTN; PAM sequence: CTC
ttattaatgaaagtgtaaca

SEQ ID NO: 315333 - DNA, 20 bp, Artificial Sequence
  Description of Artificial Sequence: Synthetic oligonucleotide
  Target: LAMA2; (+) strand; PAM type: YTN; PAM sequence: CTT
attaatgaaagtgtaacaat

SEQ ID NO: 315334 - DNA, 20 bp, Artificial Sequence
  Description of Artificial Sequence: Synthetic oligonucleotide
  Target: LAMA2; (+) strand; PAM type: YTN; PAM sequence: TTA
ttaatgaaagtgtaacaatc

SEQ ID NO: 315335 - DNA, 20 bp, Artificial Sequence
  Description of Artificial Sequence: Synthetic oligonucleotide
  Target: LAMA2; (+) strand; PAM type: YTN; PAM sequence: TTA
atgaaagtgtaacaatcata

SEQ ID NO: 315336 - DNA, 20 bp, Artificial Sequence
  Description of Artificial Sequence: Synthetic oligonucleotide
  Target: LAMA2; (+) strand; PAM type: YTN; PAM sequence: CTC
acatttctccttctgaataa

SEQ ID NO: 315337 - DNA, 20 bp, Artificial Sequence
  Description of Artificial Sequence: Synthetic oligonucleotide
  Target: LAMA2; (+) strand; PAM type: YTN; PAM sequence: TTT
ctccttctgaataaaacaaa

SEQ ID NO: 315338 - DNA, 20 bp, Artificial Sequence
  Description of Artificial Sequence: Synthetic oligonucleotide
  Target: LAMA2; (+) strand; PAM type: YTN; PAM sequence: TTC
tccttctgaataaaacaaac

SEQ ID NO: 315339 - DNA, 20 bp, Artificial Sequence
  Description of Artificial Sequence: Synthetic oligonucleotide
  Target: LAMA2; (+) strand; PAM type: YTN; PAM sequence: CTC
cttctgaataaaacaaacta

SEQ ID NO: 315340 - DNA, 20 bp, Artificial Sequence
  Description of Artificial Sequence: Synthetic oligonucleotide
  Target: LAMA2; (+) strand; PAM type: YTN; PAM sequence: CTT
ctgaataaaacaaactactg

SEQ ID NO: 315341 - DNA, 20 bp, Artificial Sequence
  Description of Artificial Sequence: Synthetic oligonucleotide
  Target: LAMA2; (+) strand; PAM type: YTN; PAM sequence: TTC
tgaataaaacaaactactga

SEQ ID NO: 315342 - DNA, 20 bp, Artificial Sequence
  Description of Artificial Sequence: Synthetic oligonucleotide
  Target: LAMA2; (+) strand; PAM type: YTN; PAM sequence: CTG
aataaaacaaactactgatg

SEQ ID NO: 315343 - DNA, 20 bp, Artificial Sequence
  Description of Artificial Sequence: Synthetic oligonucleotide
  Target: LAMA2; (+) strand; PAM type: YTN; PAM sequence: CTA
ctgatgagagataaagataa

SEQ ID NO: 315344 - DNA, 20 bp, Artificial Sequence
  Description of Artificial Sequence: Synthetic oligonucleotide
  Target: LAMA2; (+) strand; PAM type: YTN; PAM sequence: CTG
atgagagataaagataatta

SEQ ID NO: 315345 - DNA, 20 bp, Artificial Sequence
  Description of Artificial Sequence: Synthetic oligonucleotide
  Target: LAMA2; (+) strand; PAM type: YTN; PAM sequence: TTA
tttttagtacctctgttgtc

SEQ ID NO: 315346 - DNA, 20 bp, Artificial Sequence
  Description of Artificial Sequence: Synthetic oligonucleotide
  Target: LAMA2; (+) strand; PAM type: YTN; PAM sequence: TTT
ttagtacctctgttgtcttt

SEQ ID NO: 315347 - DNA, 20 bp, Artificial Sequence
  Description of Artificial Sequence: Synthetic oligonucleotide
  Target: LAMA2; (+) strand; PAM type: YTN; PAM sequence: TTT
tagtacctctgttgtctttt

SEQ ID NO: 315348 - DNA, 20 bp, Artificial Sequence
  Description of Artificial Sequence: Synthetic oligonucleotide
  Target: LAMA2; (+) strand; PAM type: YTN; PAM sequence: TTT
agtacctctgttgtctttta

SEQ ID NO: 315349 - DNA, 20 bp, Artificial Sequence
  Description of Artificial Sequence: Synthetic oligonucleotide
  Target: LAMA2; (+) strand; PAM type: YTN; PAM sequence: TTA
gtacctctgttgtcttttaa

SEQ ID NO: 315350 - DNA, 20 bp, Artificial Sequence
  Description of Artificial Sequence: Synthetic oligonucleotide
  Target: LAMA2; (+) strand; PAM type: YTN; PAM sequence: CTC
tgttgtcttttaaatattcc

SEQ ID NO: 315351 - DNA, 20 bp, Artificial Sequence
  Description of Artificial Sequence: Synthetic oligonucleotide
  Target: LAMA2; (+) strand; PAM type: YTN; PAM sequence: CTG
ttgtcttttaaatattcctt

SEQ ID NO: 315352 - DNA, 20 bp, Artificial Sequence
  Description of Artificial Sequence: Synthetic oligonucleotide
  Target: LAMA2; (+) strand; PAM type: YTN; PAM sequence: TTG
tcttttaaatattccttttt

SEQ ID NO: 315353 - DNA, 20 bp, Artificial Sequence
  Description of Artificial Sequence: Synthetic oligonucleotide
  Target: LAMA2; (+) strand; PAM type: YTN; PAM sequence: CTT
ttaaatattccttttttgga

SEQ ID NO: 315354 - DNA, 20 bp, Artificial Sequence
  Description of Artificial Sequence: Synthetic oligonucleotide
  Target: LAMA2; (+) strand; PAM type: YTN; PAM sequence: TTT
taaatattccttttttggaa

SEQ ID NO: 315355 - DNA, 20 bp, Artificial Sequence
  Description of Artificial Sequence: Synthetic oligonucleotide
  Target: LAMA2; (+) strand; PAM type: YTN; PAM sequence: TTT
aaatattccttttttggaaa

SEQ ID NO: 315356 - DNA, 20 bp, Artificial Sequence
  Description of Artificial Sequence: Synthetic oligonucleotide
  Target: LAMA2; (+) strand; PAM type: YTN; PAM sequence: TTA
aatattccttttttggaaaa

SEQ ID NO: 315357 - DNA, 20 bp, Artificial Sequence
  Description of Artificial Sequence: Synthetic oligonucleotide
  Target: LAMA2; (+) strand; PAM type: YTN; PAM sequence: TTC
cttttttggaaaagcaaaac

SEQ ID NO: 315358 - DNA, 20 bp, Artificial Sequence
  Description of Artificial Sequence: Synthetic oligonucleotide
  Target: LAMA2; (+) strand; PAM type: YTN; PAM sequence: CTT
ttttggaaaagcaaaacaag

SEQ ID NO: 315359 - DNA, 20 bp, Artificial Sequence
  Description of Artificial Sequence: Synthetic oligonucleotide
  Target: LAMA2; (+) strand; PAM type: YTN; PAM sequence: TTT
tttggaaaagcaaaacaaga

SEQ ID NO: 315360 - DNA, 20 bp, Artificial Sequence
  Description of Artificial Sequence: Synthetic oligonucleotide
  Target: LAMA2; (+) strand; PAM type: YTN; PAM sequence: TTT
ttggaaaagcaaaacaagac

SEQ ID NO: 315361 - DNA, 20 bp, Artificial Sequence
  Description of Artificial Sequence: Synthetic oligonucleotide
  Target: LAMA2; (+) strand; PAM type: YTN; PAM sequence: TTT
tggaaaagcaaaacaagaca

SEQ ID NO: 315362 - DNA, 20 bp, Artificial Sequence
  Description of Artificial Sequence: Synthetic oligonucleotide
  Target: LAMA2; (+) strand; PAM type: YTN; PAM sequence: TTT
ggaaaagcaaaacaagacat

SEQ ID NO: 315363 - DNA, 20 bp, Artificial Sequence
  Description of Artificial Sequence: Synthetic oligonucleotide
  Target: LAMA2; (+) strand; PAM type: YTN; PAM sequence: TTG
gaaaagcaaaacaagacatg

SEQ ID NO: 315364 - DNA, 20 bp, Artificial Sequence
  Description of Artificial Sequence: Synthetic oligonucleotide
  Target: LAMA2; (+) strand; PAM type: YTN; PAM sequence: TTA
tattgggagaagaatggtga

SEQ ID NO: 315365 - DNA, 20 bp, Artificial Sequence
  Description of Artificial Sequence: Synthetic oligonucleotide
  Target: LAMA2; (+) strand; PAM type: YTN; PAM sequence: TTG
ggagaagaatggtgacccaa

SEQ ID NO: 315366 - DNA, 20 bp, Artificial Sequence
  Description of Artificial Sequence: Synthetic oligonucleotide
  Target: LAMA2; (+) strand; PAM type: YTN; PAM sequence: CTA
gatggccttcttctggtacg

SEQ ID NO: 315367 - DNA, 20 bp, Artificial Sequence
  Description of Artificial Sequence: Synthetic oligonucleotide
  Target: LAMA2; (+) strand; PAM type: YTN; PAM sequence: CTT
cttctggtacggttctttca

SEQ ID NO: 315368 - DNA, 20 bp, Artificial Sequence
  Description of Artificial Sequence: Synthetic oligonucleotide
  Target: LAMA2; (+) strand; PAM type: YTN; PAM sequence: TTC
ttctggtacggttctttcac

SEQ ID NO: 315369 - DNA, 20 bp, Artificial Sequence
  Description of Artificial Sequence: Synthetic oligonucleotide
  Target: LAMA2; (+) strand; PAM type: YTN; PAM sequence: CTT
ctggtacggttctttcacta

SEQ ID NO: 315370 - DNA, 20 bp, Artificial Sequence
  Description of Artificial Sequence: Synthetic oligonucleotide
  Target: LAMA2; (+) strand; PAM type: YTN; PAM sequence: TTC
tggtacggttctttcactat

SEQ ID NO: 315371 - DNA, 20 bp, Artificial Sequence
  Description of Artificial Sequence: Synthetic oligonucleotide
  Target: LAMA2; (+) strand; PAM type: YTN; PAM sequence: CTG
gtacggttctttcactatct

SEQ ID NO: 315372 - DNA, 20 bp, Artificial Sequence
  Description of Artificial Sequence: Synthetic oligonucleotide
  Target: LAMA2; (+) strand; PAM type: YTN; PAM sequence: TTC
tttcactatctggtgtatct

SEQ ID NO: 315373 - DNA, 20 bp, Artificial Sequence
  Description of Artificial Sequence: Synthetic oligonucleotide
  Target: LAMA2; (+) strand; PAM type: YTN; PAM sequence: CTT
tcactatctggtgtatctct

SEQ ID NO: 315374 - DNA, 20 bp, Artificial Sequence
  Description of Artificial Sequence: Synthetic oligonucleotide
  Target: LAMA2; (+) strand; PAM type: YTN; PAM sequence: TTT
cactatctggtgtatctctg

SEQ ID NO: 315375 - DNA, 20 bp, Artificial Sequence
  Description of Artificial Sequence: Synthetic oligonucleotide
  Target: LAMA2; (+) strand; PAM type: YTN; PAM sequence: TTC
actatctggtgtatctctga

SEQ ID NO: 315376 - DNA, 20 bp, Artificial Sequence
  Description of Artificial Sequence: Synthetic oligonucleotide
  Target: LAMA2; (+) strand; PAM type: YTN; PAM sequence: CTA
tctggtgtatctctgaagtg

SEQ ID NO: 315377 - DNA, 20 bp, Artificial Sequence
  Description of Artificial Sequence: Synthetic oligonucleotide
  Target: LAMA2; (+) strand; PAM type: YTN; PAM sequence: CTG
gtgtatctctgaagtgtgat

SEQ ID NO: 315378 - DNA, 20 bp, Artificial Sequence
  Description of Artificial Sequence: Synthetic oligonucleotide
  Target: LAMA2; (+) strand; PAM type: YTN; PAM sequence: CTC
tgaagtgtgatcaaaggtaa

SEQ ID NO: 315379 - DNA, 20 bp, Artificial Sequence
  Description of Artificial Sequence: Synthetic oligonucleotide
  Target: LAMA2; (+) strand; PAM type: YTN; PAM sequence: CTG
aagtgtgatcaaaggtaact

SEQ ID NO: 315380 - DNA, 20 bp, Artificial Sequence
  Description of Artificial Sequence: Synthetic oligonucleotide
  Target: LAMA2; (+) strand; PAM type: YTN; PAM sequence: CTG
atcataactagataatcgtt

SEQ ID NO: 315381 - DNA, 20 bp, Artificial Sequence
  Description of Artificial Sequence: Synthetic oligonucleotide
  Target: LAMA2; (+) strand; PAM type: YTN; PAM sequence: CTA
gataatcgttaaagccccta

SEQ ID NO: 315382 - DNA, 20 bp, Artificial Sequence
  Description of Artificial Sequence: Synthetic oligonucleotide
  Target: LAMA2; (+) strand; PAM type: YTN; PAM sequence: TTA
aagcccctatcctccctccc

SEQ ID NO: 315383 - DNA, 20 bp, Artificial Sequence
  Description of Artificial Sequence: Synthetic oligonucleotide
  Target: LAMA2; (+) strand; PAM type: YTN; PAM sequence: CTA
tcctccctccctttctgtat

SEQ ID NO: 315384 - DNA, 20 bp, Artificial Sequence
  Description of Artificial Sequence: Synthetic oligonucleotide
  Target: LAMA2; (+) strand; PAM type: YTN; PAM sequence: CTC
cctccctttctgtattttta

SEQ ID NO: 315385 - DNA, 20 bp, Artificial Sequence
  Description of Artificial Sequence: Synthetic oligonucleotide
  Target: LAMA2; (+) strand; PAM type: YTN; PAM sequence: CTC
cctttctgtatttttacctt

SEQ ID NO: 315386 - DNA, 20 bp, Artificial Sequence
  Description of Artificial Sequence: Synthetic oligonucleotide
  Target: LAMA2; (+) strand; PAM type: YTN; PAM sequence: CTT
tctgtatttttacctttctt

SEQ ID NO: 315387 - DNA, 20 bp, Artificial Sequence
  Description of Artificial Sequence: Synthetic oligonucleotide
  Target: LAMA2; (+) strand; PAM type: YTN; PAM sequence: TTT
ctgtatttttacctttcttc

SEQ ID NO: 315388 - DNA, 20 bp, Artificial Sequence
  Description of Artificial Sequence: Synthetic oligonucleotide
  Target: LAMA2; (+) strand; PAM type: YTN; PAM sequence: TTC
tgtatttttacctttcttcc

SEQ ID NO: 315389 - DNA, 20 bp, Artificial Sequence
  Description of Artificial Sequence: Synthetic oligonucleotide
  Target: LAMA2; (+) strand; PAM type: YTN; PAM sequence: CTG
tatttttacctttcttccct

SEQ ID NO: 315390 - DNA, 20 bp, Artificial Sequence
  Description of Artificial Sequence: Synthetic oligonucleotide
  Target: LAMA2; (+) strand; PAM type: YTN; PAM sequence: TTT
ttacctttcttcccttattg

SEQ ID NO: 315391 - DNA, 20 bp, Artificial Sequence
  Description of Artificial Sequence: Synthetic oligonucleotide
  Target: LAMA2; (+) strand; PAM type: YTN; PAM sequence: TTT
tacctttcttcccttattga

SEQ ID NO: 315392 - DNA, 20 bp, Artificial Sequence
  Description of Artificial Sequence: Synthetic oligonucleotide
  Target: LAMA2; (+) strand; PAM type: YTN; PAM sequence: TTT
acctttcttcccttattgat

SEQ ID NO: 315393 - DNA, 20 bp, Artificial Sequence
  Description of Artificial Sequence: Synthetic oligonucleotide
  Target: LAMA2; (+) strand; PAM type: YTN; PAM sequence: TTA
cctttcttcccttattgata

SEQ ID NO: 315394 - DNA, 20 bp, Artificial Sequence
  Description of Artificial Sequence: Synthetic oligonucleotide
  Target: LAMA2; (+) strand; PAM type: YTN; PAM sequence: CTT
tcttcccttattgatactaa

SEQ ID NO: 315395 - DNA, 20 bp, Artificial Sequence
  Description of Artificial Sequence: Synthetic oligonucleotide
  Target: LAMA2; (+) strand; PAM type: YTN; PAM sequence: TTT
cttcccttattgatactaag

SEQ ID NO: 315396 - DNA, 20 bp, Artificial Sequence
  Description of Artificial Sequence: Synthetic oligonucleotide
  Target: LAMA2; (+) strand; PAM type: YTN; PAM sequence: TTC
ttcccttattgatactaaga

SEQ ID NO: 315397 - DNA, 20 bp, Artificial Sequence
  Description of Artificial Sequence: Synthetic oligonucleotide
  Target: LAMA2; (+) strand; PAM type: YTN; PAM sequence: CTT
cccttattgatactaagacc

SEQ ID NO: 315398 - DNA, 20 bp, Artificial Sequence
  Description of Artificial Sequence: Synthetic oligonucleotide
  Target: LAMA2; (+) strand; PAM type: YTN; PAM sequence: TTC
ccttattgatactaagacct

SEQ ID NO: 315399 - DNA, 20 bp, Artificial Sequence
  Description of Artificial Sequence: Synthetic oligonucleotide
  Target: LAMA2; (+) strand; PAM type: YTN; PAM sequence: CTT
attgatactaagaccttgat

SEQ ID NO: 315400 - DNA, 20 bp, Artificial Sequence
  Description of Artificial Sequence: Synthetic oligonucleotide
  Target: LAMA2; (+) strand; PAM type: YTN; PAM sequence: TTA
ttgatactaagaccttgata

SEQ ID NO: 315401 - DNA, 20 bp, Artificial Sequence
  Description of Artificial Sequence: Synthetic oligonucleotide
  Target: LAMA2; (+) strand; PAM type: YTN; PAM sequence: TTG
atactaagaccttgatacta

SEQ ID NO: 315402 - DNA, 20 bp, Artificial Sequence
  Description of Artificial Sequence: Synthetic oligonucleotide
  Target: LAMA2; (+) strand; PAM type: YTN; PAM sequence: CTA
agaccttgatactaagttgt

SEQ ID NO: 315403 - DNA, 20 bp, Artificial Sequence
  Description of Artificial Sequence: Synthetic oligonucleotide
  Target: LAMA2; (+) strand; PAM type: YTN; PAM sequence: CTT
gatactaagttgttcacaac

SEQ ID NO: 315404 - DNA, 20 bp, Artificial Sequence
  Description of Artificial Sequence: Synthetic oligonucleotide
  Target: LAMA2; (+) strand; PAM type: YTN; PAM sequence: TTG
atactaagttgttcacaact

SEQ ID NO: 315405 - DNA, 20 bp, Artificial Sequence
  Description of Artificial Sequence: Synthetic oligonucleotide
  Target: LAMA2; (+) strand; PAM type: YTN; PAM sequence: CTA
agttgttcacaactggccca

SEQ ID NO: 315406 - DNA, 20 bp, Artificial Sequence
  Description of Artificial Sequence: Synthetic oligonucleotide
  Target: LAMA2; (+) strand; PAM type: YTN; PAM sequence: TTG
ttcacaactggcccacattc

SEQ ID NO: 315407 - DNA, 20 bp, Artificial Sequence
  Description of Artificial Sequence: Synthetic oligonucleotide
  Target: LAMA2; (+) strand; PAM type: YTN; PAM sequence: TTC
acaactggcccacattctag

SEQ ID NO: 315408 - DNA, 20 bp, Artificial Sequence
  Description of Artificial Sequence: Synthetic oligonucleotide
  Target: LAMA2; (+) strand; PAM type: YTN; PAM sequence: CTG
gcccacattctaggttgaaa

SEQ ID NO: 315409 - DNA, 20 bp, Artificial Sequence
  Description of Artificial Sequence: Synthetic oligonucleotide
  Target: LAMA2; (+) strand; PAM type: YTN; PAM sequence: TTC
taggttgaaatgatggtgca

SEQ ID NO: 315410 - DNA, 20 bp, Artificial Sequence
  Description of Artificial Sequence: Synthetic oligonucleotide
  Target: LAMA2; (+) strand; PAM type: YTN; PAM sequence: CTA
ggttgaaatgatggtgcatg

SEQ ID NO: 315411 - DNA, 20 bp, Artificial Sequence
  Description of Artificial Sequence: Synthetic oligonucleotide
  Target: LAMA2; (+) strand; PAM type: YTN; PAM sequence: TTG
aaatgatggtgcatgttgga

SEQ ID NO: 315412 - DNA, 20 bp, Artificial Sequence
  Description of Artificial Sequence: Synthetic oligonucleotide
  Target: LAMA2; (+) strand; PAM type: YTN; PAM sequence: TTG
gagacaaatgtacaaataaa

SEQ ID NO: 315413 - DNA, 20 bp, Artificial Sequence
  Description of Artificial Sequence: Synthetic oligonucleotide
  Target: LAMA2; (+) strand; PAM type: YTN; PAM sequence: TTA
tattactactgtgaaaatgt

SEQ ID NO: 315414 - DNA, 20 bp, Artificial Sequence
  Description of Artificial Sequence: Synthetic oligonucleotide
  Target: LAMA2; (+) strand; PAM type: YTN; PAM sequence: TTA
ctactgtgaaaatgtatgta

SEQ ID NO: 315415 - DNA, 20 bp, Artificial Sequence
  Description of Artificial Sequence: Synthetic oligonucleotide
  Target: LAMA2; (+) strand; PAM type: YTN; PAM sequence: CTA
ctgtgaaaatgtatgtagaa

SEQ ID NO: 315416 - DNA, 20 bp, Artificial Sequence
  Description of Artificial Sequence: Synthetic oligonucleotide
  Target: LAMA2; (+) strand; PAM type: YTN; PAM sequence: CTG
tgaaaatgtatgtagaaaat

SEQ ID NO: 315417 - DNA, 20 bp, Artificial Sequence
  Description of Artificial Sequence: Synthetic oligonucleotide
  Target: LAMA2; (+) strand; PAM type: YTN; PAM sequence: CTG
gggtaatatggactattttc

SEQ ID NO: 315418 - DNA, 20 bp, Artificial Sequence
  Description of Artificial Sequence: Synthetic oligonucleotide
  Target: LAMA2; (+) strand; PAM type: YTN; PAM sequence: CTA
ttttcttaataatctaattt

SEQ ID NO: 315419 - DNA, 20 bp, Artificial Sequence
  Description of Artificial Sequence: Synthetic oligonucleotide
  Target: LAMA2; (+) strand; PAM type: YTN; PAM sequence: TTT
tcttaataatctaatttctt

SEQ ID NO: 315420 - DNA, 20 bp, Artificial Sequence
  Description of Artificial Sequence: Synthetic oligonucleotide
  Target: LAMA2; (+) strand; PAM type: YTN; PAM sequence: TTT
cttaataatctaatttctta

SEQ ID NO: 315421 - DNA, 20 bp, Artificial Sequence
  Description of Artificial Sequence: Synthetic oligonucleotide
  Target: LAMA2; (+) strand; PAM type: YTN; PAM sequence: TTC
ttaataatctaatttcttac

SEQ ID NO: 315422 - DNA, 20 bp, Artificial Sequence
  Description of Artificial Sequence: Synthetic oligonucleotide
  Target: LAMA2; (+) strand; PAM type: YTN; PAM sequence: CTT
aataatctaatttcttacct

SEQ ID NO: 315423 - DNA, 20 bp, Artificial Sequence
  Description of Artificial Sequence: Synthetic oligonucleotide
  Target: LAMA2; (+) strand; PAM type: YTN; PAM sequence: TTA
ataatctaatttcttaccta

SEQ ID NO: 315424 - DNA, 20 bp, Artificial Sequence
  Description of Artificial Sequence: Synthetic oligonucleotide
  Target: LAMA2; (+) strand; PAM type: YTN; PAM sequence: CTA
atttcttacctagtagacag

SEQ ID NO: 315425 - DNA, 20 bp, Artificial Sequence
  Description of Artificial Sequence: Synthetic oligonucleotide
  Target: LAMA2; (+) strand; PAM type: YTN; PAM sequence: TTT
cttacctagtagacagtcaa

SEQ ID NO: 315426 - DNA, 20 bp, Artificial Sequence
  Description of Artificial Sequence: Synthetic oligonucleotide
  Target: LAMA2; (+) strand; PAM type: YTN; PAM sequence: TTC
ttacctagtagacagtcaac

SEQ ID NO: 315427 - DNA, 20 bp, Artificial Sequence
  Description of Artificial Sequence: Synthetic oligonucleotide
  Target: LAMA2; (+) strand; PAM type: YTN; PAM sequence: CTT
acctagtagacagtcaacat

SEQ ID NO: 315428 - DNA, 20 bp, Artificial Sequence
  Description of Artificial Sequence: Synthetic oligonucleotide
  Target: LAMA2; (+) strand; PAM type: YTN; PAM sequence: TTA
cctagtagacagtcaacatt

SEQ ID NO: 315429 - DNA, 20 bp, Artificial Sequence
  Description of Artificial Sequence: Synthetic oligonucleotide
  Target: LAMA2; (+) strand; PAM type: YTN; PAM sequence: CTA
gtagacagtcaacatttcca

SEQ ID NO: 315430 - DNA, 20 bp, Artificial Sequence
  Description of Artificial Sequence: Synthetic oligonucleotide
  Target: LAMA2; (+) strand; PAM type: YTN; PAM sequence: TTT
ccaatcatggaaatgaacta

SEQ ID NO: 315431 - DNA, 20 bp, Artificial Sequence
  Description of Artificial Sequence: Synthetic oligonucleotide
  Target: LAMA2; (+) strand; PAM type: YTN; PAM sequence: TTC
caatcatggaaatgaactag

SEQ ID NO: 315432 - DNA, 20 bp, Artificial Sequence
  Description of Artificial Sequence: Synthetic oligonucleotide
  Target: LAMA2; (+) strand; PAM type: YTN; PAM sequence: CTA
gtgtccacataactgaaatc

SEQ ID NO: 315433 - DNA, 20 bp, Artificial Sequence
  Description of Artificial Sequence: Synthetic oligonucleotide
  Target: LAMA2; (+) strand; PAM type: YTN; PAM sequence: CTG
aaatccttcacatctggcta

SEQ ID NO: 315434 - DNA, 20 bp, Artificial Sequence
  Description of Artificial Sequence: Synthetic oligonucleotide
  Target: LAMA2; (+) strand; PAM type: YTN; PAM sequence: CTT
cacatctggctatctttagg

SEQ ID NO: 315435 - DNA, 20 bp, Artificial Sequence
  Description of Artificial Sequence: Synthetic oligonucleotide
  Target: LAMA2; (+) strand; PAM type: YTN; PAM sequence: TTC
acatctggctatctttaggc

SEQ ID NO: 315436 - DNA, 20 bp, Artificial Sequence
  Description of Artificial Sequence: Synthetic oligonucleotide
  Target: LAMA2; (+) strand; PAM type: YTN; PAM sequence: CTG
gctatctttaggccctaaat

SEQ ID NO: 315437 - DNA, 20 bp, Artificial Sequence
  Description of Artificial Sequence: Synthetic oligonucleotide
  Target: LAMA2; (+) strand; PAM type: YTN; PAM sequence: CTA
tctttaggccctaaattatg

SEQ ID NO: 315438 - DNA, 20 bp, Artificial Sequence
  Description of Artificial Sequence: Synthetic oligonucleotide
  Target: LAMA2; (+) strand; PAM type: YTN; PAM sequence: CTT
taggccctaaattatgtgaa

SEQ ID NO: 315439 - DNA, 20 bp, Artificial Sequence
  Description of Artificial Sequence: Synthetic oligonucleotide
  Target: LAMA2; (+) strand; PAM type: YTN; PAM sequence: TTT
aggccctaaattatgtgaaa

SEQ ID NO: 315440 - DNA, 20 bp, Artificial Sequence
  Description of Artificial Sequence: Synthetic oligonucleotide
  Target: LAMA2; (+) strand; PAM type: YTN; PAM sequence: TTA
ggccctaaattatgtgaaat

SEQ ID NO: 315441 - DNA, 20 bp, Artificial Sequence
  Description of Artificial Sequence: Synthetic oligonucleotide
  Target: LAMA2; (+) strand; PAM type: YTN; PAM sequence: CTA
aattatgtgaaattcactga

SEQ ID NO: 315442 - DNA, 20 bp, Artificial Sequence
  Description of Artificial Sequence: Synthetic oligonucleotide
  Target: LAMA2; (+) strand; PAM type: YTN; PAM sequence: TTA
tgtgaaattcactgagtatt

SEQ ID NO: 315443 - DNA, 20 bp, Artificial Sequence
  Description of Artificial Sequence: Synthetic oligonucleotide
  Target: LAMA2; (+) strand; PAM type: YTN; PAM sequence: TTC
actgagtattttccacagag

SEQ ID NO: 315444 - DNA, 20 bp, Artificial Sequence
  Description of Artificial Sequence: Synthetic oligonucleotide
  Target: LAMA2; (+) strand; PAM type: YTN; PAM sequence: CTG
agtattttccacagagttgt

SEQ ID NO: 315445 - DNA, 20 bp, Artificial Sequence
  Description of Artificial Sequence: Synthetic oligonucleotide
  Target: LAMA2; (+) strand; PAM type: YTN; PAM sequence: TTT
tccacagagttgtttactgt

SEQ ID NO: 315446 - DNA, 20 bp, Artificial Sequence
  Description of Artificial Sequence: Synthetic oligonucleotide
  Target: LAMA2; (+) strand; PAM type: YTN; PAM sequence: TTT
ccacagagttgtttactgtt

SEQ ID NO: 315447 - DNA, 20 bp, Artificial Sequence
  Description of Artificial Sequence: Synthetic oligonucleotide
  Target: LAMA2; (+) strand; PAM type: YTN; PAM sequence: TTC
cacagagttgtttactgttg

SEQ ID NO: 315448 - DNA, 20 bp, Artificial Sequence
  Description of Artificial Sequence: Synthetic oligonucleotide
  Target: LAMA2; (+) strand; PAM type: YTN; PAM sequence: TTG
tttactgttgtaaaatctta

SEQ ID NO: 315449 - DNA, 20 bp, Artificial Sequence
  Description of Artificial Sequence: Synthetic oligonucleotide
  Target: LAMA2; (+) strand; PAM type: YTN; PAM sequence: TTT
actgttgtaaaatcttaaat

SEQ ID NO: 315450 - DNA, 20 bp, Artificial Sequence
  Description of Artificial Sequence: Synthetic oligonucleotide
  Target: LAMA2; (+) strand; PAM type: YTN; PAM sequence: TTA
ctgttgtaaaatcttaaatc

SEQ ID NO: 315451 - DNA, 20 bp, Artificial Sequence
  Description of Artificial Sequence: Synthetic oligonucleotide
  Target: LAMA2; (+) strand; PAM type: YTN; PAM sequence: CTG
ttgtaaaatcttaaatcaaa

SEQ ID NO: 315452 - DNA, 20 bp, Artificial Sequence
  Description of Artificial Sequence: Synthetic oligonucleotide
  Target: LAMA2; (+) strand; PAM type: YTN; PAM sequence: TTG
taaaatcttaaatcaaaatg

SEQ ID NO: 315453 - DNA, 20 bp, Artificial Sequence
  Description of Artificial Sequence: Synthetic oligonucleotide
  Target: LAMA2; (+) strand; PAM type: YTN; PAM sequence: CTT
aaatcaaaatgttacatcaa

SEQ ID NO: 315454 - DNA, 20 bp, Artificial Sequence
  Description of Artificial Sequence: Synthetic oligonucleotide
  Target: LAMA2; (+) strand; PAM type: YTN; PAM sequence: TTA
aatcaaaatgttacatcaaa

SEQ ID NO: 315455 - DNA, 20 bp, Artificial Sequence
  Description of Artificial Sequence: Synthetic oligonucleotide
  Target: LAMA2; (+) strand; PAM type: YTN; PAM sequence: TTA
catcaaaggaagagttgcat

SEQ ID NO: 315456 - DNA, 20 bp, Artificial Sequence
  Description of Artificial Sequence: Synthetic oligonucleotide
  Target: LAMA2; (+) strand; PAM type: YTN; PAM sequence: TTG
catcaaaagaacctcagcaa

SEQ ID NO: 315457 - DNA, 20 bp, Artificial Sequence
  Description of Artificial Sequence: Synthetic oligonucleotide
  Target: LAMA2; (+) strand; PAM type: YTN; PAM sequence: CTC
agcaaaacctcaaaacaacc

SEQ ID NO: 315458 - DNA, 20 bp, Artificial Sequence
  Description of Artificial Sequence: Synthetic oligonucleotide
  Target: LAMA2; (+) strand; PAM type: YTN; PAM sequence: CTC
aaaacaaccaaacactccac

SEQ ID NO: 315459 - DNA, 20 bp, Artificial Sequence
  Description of Artificial Sequence: Synthetic oligonucleotide
  Target: LAMA2; (+) strand; PAM type: YTN; PAM sequence: CTC
cacttgtctgtttaaattat

SEQ ID NO: 315460 - DNA, 20 bp, Artificial Sequence
  Description of Artificial Sequence: Synthetic oligonucleotide
  Target: LAMA2; (+) strand; PAM type: YTN; PAM sequence: CTT
gtctgtttaaattattagca

SEQ ID NO: 315461 - DNA, 20 bp, Artificial Sequence
  Description of Artificial Sequence: Synthetic oligonucleotide
  Target: LAMA2; (+) strand; PAM type: YTN; PAM sequence: TTG
tctgtttaaattattagcaa

SEQ ID NO: 315462 - DNA, 20 bp, Artificial Sequence
  Description of Artificial Sequence: Synthetic oligonucleotide
  Target: LAMA2; (+) strand; PAM type: YTN; PAM sequence: CTG
tttaaattattagcaaaagc

SEQ ID NO: 315463 - DNA, 20 bp, Artificial Sequence
  Description of Artificial Sequence: Synthetic oligonucleotide
  Target: LAMA2; (+) strand; PAM type: YTN; PAM sequence: TTT
aaattattagcaaaagcagc

SEQ ID NO: 315464 - DNA, 20 bp, Artificial Sequence
  Description of Artificial Sequence: Synthetic oligonucleotide
  Target: LAMA2; (+) strand; PAM type: YTN; PAM sequence: TTA
aattattagcaaaagcagct

SEQ ID NO: 315465 - DNA, 20 bp, Artificial Sequence
  Description of Artificial Sequence: Synthetic oligonucleotide
  Target: LAMA2; (+) strand; PAM type: YTN; PAM sequence: TTA
ttagcaaaagcagctctgtt

SEQ ID NO: 315466 - DNA, 20 bp, Artificial Sequence
  Description of Artificial Sequence: Synthetic oligonucleotide
  Target: LAMA2; (+) strand; PAM type: YTN; PAM sequence: TTA
gcaaaagcagctctgttatc

SEQ ID NO: 315467 - DNA, 20 bp, Artificial Sequence
  Description of Artificial Sequence: Synthetic oligonucleotide
  Target: LAMA2; (+) strand; PAM type: YTN; PAM sequence: CTC
tgttatcccagcttctaagc

SEQ ID NO: 315468 - DNA, 20 bp, Artificial Sequence
  Description of Artificial Sequence: Synthetic oligonucleotide
  Target: LAMA2; (+) strand; PAM type: YTN; PAM sequence: CTG
ttatcccagcttctaagcta

SEQ ID NO: 315469 - DNA, 20 bp, Artificial Sequence
  Description of Artificial Sequence: Synthetic oligonucleotide
  Target: LAMA2; (+) strand; PAM type: YTN; PAM sequence: TTA
tcccagcttctaagctaacc

SEQ ID NO: 315470 - DNA, 20 bp, Artificial Sequence
  Description of Artificial Sequence: Synthetic oligonucleotide
  Target: LAMA2; (+) strand; PAM type: YTN; PAM sequence: CTT
ctaagctaaccagactcatc

SEQ ID NO: 315471 - DNA, 20 bp, Artificial Sequence
  Description of Artificial Sequence: Synthetic oligonucleotide
  Target: LAMA2; (+) strand; PAM type: YTN; PAM sequence: TTC
taagctaaccagactcatca

SEQ ID NO: 315472 - DNA, 20 bp, Artificial Sequence
  Description of Artificial Sequence: Synthetic oligonucleotide
  Target: LAMA2; (+) strand; PAM type: YTN; PAM sequence: CTA
agctaaccagactcatcatt

SEQ ID NO: 315473 - DNA, 20 bp, Artificial Sequence
  Description of Artificial Sequence: Synthetic oligonucleotide
  Target: LAMA2; (+) strand; PAM type: YTN; PAM sequence: CTA
accagactcatcattttggc

SEQ ID NO: 315474 - DNA, 20 bp, Artificial Sequence
  Description of Artificial Sequence: Synthetic oligonucleotide
  Target: LAMA2; (+) strand; PAM type: YTN; PAM sequence: CTC
atcattttggcctttcatgt

SEQ ID NO: 315475 - DNA, 20 bp, Artificial Sequence
  Description of Artificial Sequence: Synthetic oligonucleotide
  Target: LAMA2; (+) strand; PAM type: YTN; PAM sequence: TTT
tggcctttcatgtatgcttt

SEQ ID NO: 315476 - DNA, 20 bp, Artificial Sequence
  Description of Artificial Sequence: Synthetic oligonucleotide
  Target: LAMA2; (+) strand; PAM type: YTN; PAM sequence: TTT
ggcctttcatgtatgctttt

SEQ ID NO: 315477 - DNA, 20 bp, Artificial Sequence
  Description of Artificial Sequence: Synthetic oligonucleotide
  Target: LAMA2; (+) strand; PAM type: YTN; PAM sequence: TTG
gcctttcatgtatgcttttc

SEQ ID NO: 315478 - DNA, 20 bp, Artificial Sequence
  Description of Artificial Sequence: Synthetic oligonucleotide
  Target: LAMA2; (+) strand; PAM type: YTN; PAM sequence: CTT
tcatgtatgcttttcctatg

SEQ ID NO: 315479 - DNA, 20 bp, Artificial Sequence
  Description of Artificial Sequence: Synthetic oligonucleotide
  Target: LAMA2; (+) strand; PAM type: YTN; PAM sequence: TTT
catgtatgcttttcctatgg

SEQ ID NO: 315480 - DNA, 20 bp, Artificial Sequence
  Description of Artificial Sequence: Synthetic oligonucleotide
  Target: LAMA2; (+) strand; PAM type: YTN; PAM sequence: TTC
atgtatgcttttcctatggc

SEQ ID NO: 315481 - DNA, 20 bp, Artificial Sequence
  Description of Artificial Sequence: Synthetic oligonucleotide
  Target: LAMA2; (+) strand; PAM type: YTN; PAM sequence: CTT
ttcctatggccaaaacgtcc

SEQ ID NO: 315482 - DNA, 20 bp, Artificial Sequence
  Description of Artificial Sequence: Synthetic oligonucleotide
  Target: LAMA2; (+) strand; PAM type: YTN; PAM sequence: TTT
tcctatggccaaaacgtcca

SEQ ID NO: 315483 - DNA, 20 bp, Artificial Sequence
  Description of Artificial Sequence: Synthetic oligonucleotide
  Target: LAMA2; (+) strand; PAM type: YTN; PAM sequence: TTT
cctatggccaaaacgtccac

SEQ ID NO: 315484 - DNA, 20 bp, Artificial Sequence
  Description of Artificial Sequence: Synthetic oligonucleotide
  Target: LAMA2; (+) strand; PAM type: YTN; PAM sequence: TTC
ctatggccaaaacgtccaca

SEQ ID NO: 315485 - DNA, 20 bp, Artificial Sequence
  Description of Artificial Sequence: Synthetic oligonucleotide
  Target: LAMA2; (+) strand; PAM type: YTN; PAM sequence: CTA
tggccaaaacgtccacaaat

SEQ ID NO: 315486 - DNA, 20 bp, Artificial Sequence
  Description of Artificial Sequence: Synthetic oligonucleotide
  Target: LAMA2; (+) strand; PAM type: YTN; PAM sequence: TTA
ctaataaatgctgacaagga

SEQ ID NO: 315487 - DNA, 20 bp, Artificial Sequence
  Description of Artificial Sequence: Synthetic oligonucleotide
  Target: LAMA2; (+) strand; PAM type: YTN; PAM sequence: CTA
ataaatgctgacaaggagag

SEQ ID NO: 315488 - DNA, 20 bp, Artificial Sequence
  Description of Artificial Sequence: Synthetic oligonucleotide
  Target: LAMA2; (+) strand; PAM type: YTN; PAM sequence: CTG
acaaggagagaggttaaaac

SEQ ID NO: 315489 - DNA, 20 bp, Artificial Sequence
  Description of Artificial Sequence: Synthetic oligonucleotide
  Target: LAMA2; (+) strand; PAM type: YTN; PAM sequence: TTA
aaaccaggaagccatgcctt

SEQ ID NO: 315490 - DNA, 20 bp, Artificial Sequence
  Description of Artificial Sequence: Synthetic oligonucleotide
  Target: LAMA2; (+) strand; PAM type: YTN; PAM sequence: CTT
ttagctgacaaaacattcat

SEQ ID NO: 315491 - DNA, 20 bp, Artificial Sequence
  Description of Artificial Sequence: Synthetic oligonucleotide
  Target: LAMA2; (+) strand; PAM type: YTN; PAM sequence: TTT
tagctgacaaaacattcatt

SEQ ID NO: 315492 - DNA, 20 bp, Artificial Sequence
  Description of Artificial Sequence: Synthetic oligonucleotide
  Target: LAMA2; (+) strand; PAM type: YTN; PAM sequence: TTT
agctgacaaaacattcattg

SEQ ID NO: 315493 - DNA, 20 bp, Artificial Sequence
  Description of Artificial Sequence: Synthetic oligonucleotide
  Target: LAMA2; (+) strand; PAM type: YTN; PAM sequence: TTA
gctgacaaaacattcattga

SEQ ID NO: 315494 - DNA, 20 bp, Artificial Sequence
  Description of Artificial Sequence: Synthetic oligonucleotide
  Target: LAMA2; (+) strand; PAM type: YTN; PAM sequence: CTG
acaaaacattcattgaaatg

SEQ ID NO: 315495 - DNA, 20 bp, Artificial Sequence
  Description of Artificial Sequence: Synthetic oligonucleotide
  Target: LAMA2; (+) strand; PAM type: YTN; PAM sequence: TTC
attgaaatgctatctgggtg

SEQ ID NO: 315496 - DNA, 20 bp, Artificial Sequence
  Description of Artificial Sequence: Synthetic oligonucleotide
  Target: LAMA2; (+) strand; PAM type: YTN; PAM sequence: TTG
aaatgctatctgggtgaagc

SEQ ID NO: 315497 - DNA, 20 bp, Artificial Sequence
  Description of Artificial Sequence: Synthetic oligonucleotide
  Target: LAMA2; (+) strand; PAM type: YTN; PAM sequence: CTA
tctgggtgaagcactgagaa

SEQ ID NO: 315498 - DNA, 20 bp, Artificial Sequence
  Description of Artificial Sequence: Synthetic oligonucleotide
  Target: LAMA2; (+) strand; PAM type: YTN; PAM sequence: CTG
ggtgaagcactgagaaatta

SEQ ID NO: 315499 - DNA, 20 bp, Artificial Sequence
  Description of Artificial Sequence: Synthetic oligonucleotide
  Target: LAMA2; (+) strand; PAM type: YTN; PAM sequence: CTG
agaaattaatcatctgaata

SEQ ID NO: 315500 - DNA, 20 bp, Artificial Sequence
  Description of Artificial Sequence: Synthetic oligonucleotide
  Target: LAMA2; (+) strand; PAM type: YTN; PAM sequence: TTA
atcatctgaatagtctaaat

SEQ ID NO: 315501 - DNA, 20 bp, Artificial Sequence
  Description of Artificial Sequence: Synthetic oligonucleotide
  Target: LAMA2; (+) strand; PAM type: YTN; PAM sequence: CTG
aatagtctaaattatagtac

SEQ ID NO: 315502 - DNA, 20 bp, Artificial Sequence
  Description of Artificial Sequence: Synthetic oligonucleotide
  Target: LAMA2; (+) strand; PAM type: YTN; PAM sequence: CTA
aattatagtacatgaagaat

SEQ ID NO: 315503 - DNA, 20 bp, Artificial Sequence
  Description of Artificial Sequence: Synthetic oligonucleotide
  Target: LAMA2; (+) strand; PAM type: YTN; PAM sequence: TTA
tagtacatgaagaatgcaac

SEQ ID NO: 315504 - DNA, 20 bp, Artificial Sequence
  Description of Artificial Sequence: Synthetic oligonucleotide
  Target: LAMA2; (+) strand; PAM type: YTN; PAM sequence: CTT
gctagggagacataccttca

SEQ ID NO: 315505 - DNA, 20 bp, Artificial Sequence
  Description of Artificial Sequence: Synthetic oligonucleotide
  Target: LAMA2; (+) strand; PAM type: YTN; PAM sequence: TTG
ctagggagacataccttcag

SEQ ID NO: 315506 - DNA, 20 bp, Artificial Sequence
  Description of Artificial Sequence: Synthetic oligonucleotide
  Target: LAMA2; (+) strand; PAM type: YTN; PAM sequence: CTA
gggagacataccttcagcat

SEQ ID NO: 315507 - DNA, 20 bp, Artificial Sequence
  Description of Artificial Sequence: Synthetic oligonucleotide
  Target: LAMA2; (+) strand; PAM type: YTN; PAM sequence: CTT
cagcattattcgaggttaat

SEQ ID NO: 315508 - DNA, 20 bp, Artificial Sequence
  Description of Artificial Sequence: Synthetic oligonucleotide
  Target: LAMA2; (+) strand; PAM type: YTN; PAM sequence: TTC
agcattattcgaggttaatt

SEQ ID NO: 315509 - DNA, 20 bp, Artificial Sequence
  Description of Artificial Sequence: Synthetic oligonucleotide
  Target: LAMA2; (+) strand; PAM type: YTN; PAM sequence: TTA
ttcgaggttaatttaaacca

SEQ ID NO: 315510 - DNA, 20 bp, Artificial Sequence
  Description of Artificial Sequence: Synthetic oligonucleotide
  Target: LAMA2; (+) strand; PAM type: YTN; PAM sequence: TTC
gaggttaatttaaaccaaca

SEQ ID NO: 315511 - DNA, 20 bp, Artificial Sequence
  Description of Artificial Sequence: Synthetic oligonucleotide
  Target: LAMA2; (+) strand; PAM type: YTN; PAM sequence: TTA
atttaaaccaacatgtaaat

SEQ ID NO: 315512 - DNA, 20 bp, Artificial Sequence
  Description of Artificial Sequence: Synthetic oligonucleotide
  Target: LAMA2; (+) strand; PAM type: YTN; PAM sequence: TTT
aaaccaacatgtaaatgttt

SEQ ID NO: 315513 - DNA, 20 bp, Artificial Sequence
  Description of Artificial Sequence: Synthetic oligonucleotide
  Target: LAMA2; (+) strand; PAM type: YTN; PAM sequence: TTA
aaccaacatgtaaatgtttg

SEQ ID NO: 315514 - DNA, 20 bp, Artificial Sequence
  Description of Artificial Sequence: Synthetic oligonucleotide
  Target: LAMA2; (+) strand; PAM type: YTN; PAM sequence: TTT
gtatgcttcatgtgtggtat

SEQ ID NO: 315515 - DNA, 20 bp, Artificial Sequence
  Description of Artificial Sequence: Synthetic oligonucleotide
  Target: LAMA2; (+) strand; PAM type: YTN; PAM sequence: TTG
tatgcttcatgtgtggtatc

SEQ ID NO: 315516 - DNA, 20 bp, Artificial Sequence
  Description of Artificial Sequence: Synthetic oligonucleotide
  Target: LAMA2; (+) strand; PAM type: YTN; PAM sequence: CTT
catgtgtggtatcccaaaag

SEQ ID NO: 315517 - DNA, 20 bp, Artificial Sequence
  Description of Artificial Sequence: Synthetic oligonucleotide
  Target: LAMA2; (+) strand; PAM type: YTN; PAM sequence: TTC
atgtgtggtatcccaaaagg

SEQ ID NO: 315518 - DNA, 20 bp, Artificial Sequence
  Description of Artificial Sequence: Synthetic oligonucleotide
  Target: LAMA2; (+) strand; PAM type: YTN; PAM sequence: TTG
tgttttctcttttgatcttt

SEQ ID NO: 315519 - DNA, 20 bp, Artificial Sequence
  Description of Artificial Sequence: Synthetic oligonucleotide
  Target: LAMA2; (+) strand; PAM type: YTN; PAM sequence: TTT
tctcttttgatctttgaata

SEQ ID NO: 315520 - DNA, 20 bp, Artificial Sequence
  Description of Artificial Sequence: Synthetic oligonucleotide
  Target: LAMA2; (+) strand; PAM type: YTN; PAM sequence: TTT
ctcttttgatctttgaatat

SEQ ID NO: 315521 - DNA, 20 bp, Artificial Sequence
  Description of Artificial Sequence: Synthetic oligonucleotide
  Target: LAMA2; (+) strand; PAM type: YTN; PAM sequence: TTC
tcttttgatctttgaatatg

SEQ ID NO: 315522 - DNA, 20 bp, Artificial Sequence
  Description of Artificial Sequence: Synthetic oligonucleotide
  Target: LAMA2; (+) strand; PAM type: YTN; PAM sequence: CTC
ttttgatctttgaatatgct

SEQ ID NO: 315523 - DNA, 20 bp, Artificial Sequence
  Description of Artificial Sequence: Synthetic oligonucleotide
  Target: LAMA2; (+) strand; PAM type: YTN; PAM sequence: CTT
ttgatctttgaatatgctga

SEQ ID NO: 315524 - DNA, 20 bp, Artificial Sequence
  Description of Artificial Sequence: Synthetic oligonucleotide
  Target: LAMA2; (+) strand; PAM type: YTN; PAM sequence: TTT
tgatctttgaatatgctgat

SEQ ID NO: 315525 - DNA, 20 bp, Artificial Sequence
  Description of Artificial Sequence: Synthetic oligonucleotide
  Target: LAMA2; (+) strand; PAM type: YTN; PAM sequence: TTT
gatctttgaatatgctgatc

SEQ ID NO: 315526 - DNA, 20 bp, Artificial Sequence
  Description of Artificial Sequence: Synthetic oligonucleotide
  Target: LAMA2; (+) strand; PAM type: YTN; PAM sequence: TTG
atctttgaatatgctgatcg

SEQ ID NO: 315527 - DNA, 20 bp, Artificial Sequence
  Description of Artificial Sequence: Synthetic oligonucleotide
  Target: LAMA2; (+) strand; PAM type: YTN; PAM sequence: CTT
tgaatatgctgatcgccttt

SEQ ID NO: 315528 - DNA, 20 bp, Artificial Sequence
  Description of Artificial Sequence: Synthetic oligonucleotide
  Target: LAMA2; (+) strand; PAM type: YTN; PAM sequence: TTT
gaatatgctgatcgcctttc

SEQ ID NO: 315529 - DNA, 20 bp, Artificial Sequence
  Description of Artificial Sequence: Synthetic oligonucleotide
  Target: LAMA2; (+) strand; PAM type: YTN; PAM sequence: TTG
aatatgctgatcgcctttca

SEQ ID NO: 315530 - DNA, 20 bp, Artificial Sequence
  Description of Artificial Sequence: Synthetic oligonucleotide
  Target: LAMA2; (+) strand; PAM type: YTN; PAM sequence: CTG
atcgcctttcatgaacagtg

SEQ ID NO: 315531 - DNA, 20 bp, Artificial Sequence
  Description of Artificial Sequence: Synthetic oligonucleotide
  Target: LAMA2; (+) strand; PAM type: YTN; PAM sequence: CTT
tcatgaacagtggcattcaa

SEQ ID NO: 315532 - DNA, 20 bp, Artificial Sequence
  Description of Artificial Sequence: Synthetic oligonucleotide
  Target: LAMA2; (+) strand; PAM type: YTN; PAM sequence: TTT
catgaacagtggcattcaat

SEQ ID NO: 315533 - DNA, 20 bp, Artificial Sequence
  Description of Artificial Sequence: Synthetic oligonucleotide
  Target: LAMA2; (+) strand; PAM type: YTN; PAM sequence: TTC
atgaacagtggcattcaatg

SEQ ID NO: 315534 - DNA, 20 bp, Artificial Sequence
  Description of Artificial Sequence: Synthetic oligonucleotide
  Target: LAMA2; (+) strand; PAM type: YTN; PAM sequence: TTC
aatgcactttgaaaaaaaca

SEQ ID NO: 315535 - DNA, 20 bp, Artificial Sequence
  Description of Artificial Sequence: Synthetic oligonucleotide
  Target: LAMA2; (+) strand; PAM type: YTN; PAM sequence: CTT
tgaaaaaaacacagtctttt

SEQ ID NO: 315536 - DNA, 20 bp, Artificial Sequence
  Description of Artificial Sequence: Synthetic oligonucleotide
  Target: LAMA2; (+) strand; PAM type: YTN; PAM sequence: TTT
gaaaaaaacacagtcttttt

SEQ ID NO: 315537 - DNA, 20 bp, Artificial Sequence
  Description of Artificial Sequence: Synthetic oligonucleotide
  Target: LAMA2; (+) strand; PAM type: YTN; PAM sequence: TTG
aaaaaaacacagtctttttc

SEQ ID NO: 315538 - DNA, 20 bp, Artificial Sequence
  Description of Artificial Sequence: Synthetic oligonucleotide
  Target: LAMA2; (+) strand; PAM type: YTN; PAM sequence: CTT
tttctttgaaggtaagttgt

SEQ ID NO: 315539 - DNA, 20 bp, Artificial Sequence
  Description of Artificial Sequence: Synthetic oligonucleotide
  Target: LAMA2; (+) strand; PAM type: YTN; PAM sequence: TTT
ttctttgaaggtaagttgta

SEQ ID NO: 315540 - DNA, 20 bp, Artificial Sequence
  Description of Artificial Sequence: Synthetic oligonucleotide
  Target: LAMA2; (+) strand; PAM type: YTN; PAM sequence: TTT
tctttgaaggtaagttgtaa

SEQ ID NO: 315541 - DNA, 20 bp, Artificial Sequence
  Description of Artificial Sequence: Synthetic oligonucleotide
  Target: LAMA2; (+) strand; PAM type: YTN; PAM sequence: TTT
ctttgaaggtaagttgtaag

SEQ ID NO: 315542 - DNA, 20 bp, Artificial Sequence
  Description of Artificial Sequence: Synthetic oligonucleotide
  Target: LAMA2; (+) strand; PAM type: YTN; PAM sequence: TTC
tttgaaggtaagttgtaaga

SEQ ID NO: 315543 - DNA, 20 bp, Artificial Sequence
  Description of Artificial Sequence: Synthetic oligonucleotide
  Target: LAMA2; (+) strand; PAM type: YTN; PAM sequence: CTT
tgaaggtaagttgtaagaaa

SEQ ID NO: 315544 - DNA, 20 bp, Artificial Sequence
  Description of Artificial Sequence: Synthetic oligonucleotide
  Target: LAMA2; (+) strand; PAM type: YTN; PAM sequence: TTT
gaaggtaagttgtaagaaag

SEQ ID NO: 315545 - DNA, 20 bp, Artificial Sequence
  Description of Artificial Sequence: Synthetic oligonucleotide
  Target: LAMA2; (+) strand; PAM type: YTN; PAM sequence: TTG
aaggtaagttgtaagaaaga

SEQ ID NO: 315546 - DNA, 20 bp, Artificial Sequence
  Description of Artificial Sequence: Synthetic oligonucleotide
  Target: LAMA2; (+) strand; PAM type: YTN; PAM sequence: TTG
taagaaagagaaatcattaa

SEQ ID NO: 315547 - DNA, 20 bp, Artificial Sequence
  Description of Artificial Sequence: Synthetic oligonucleotide
  Target: LAMA2; (+) strand; PAM type: YTN; PAM sequence: TTA
aagcctggagtgcagaattg

SEQ ID NO: 315548 - DNA, 20 bp, Artificial Sequence
  Description of Artificial Sequence: Synthetic oligonucleotide
  Target: LAMA2; (+) strand; PAM type: YTN; PAM sequence: CTG
gagtgcagaattgttgtcga

SEQ ID NO: 315549 - DNA, 20 bp, Artificial Sequence
  Description of Artificial Sequence: Synthetic oligonucleotide
  Target: LAMA2; (+) strand; PAM type: YTN; PAM sequence: TTG
ttgtcgactgaaatggtatc

SEQ ID NO: 315550 - DNA, 20 bp, Artificial Sequence
  Description of Artificial Sequence: Synthetic oligonucleotide
  Target: LAMA2; (+) strand; PAM type: YTN; PAM sequence: TTG
tcgactgaaatggtatcaag

SEQ ID NO: 315551 - DNA, 20 bp, Artificial Sequence
  Description of Artificial Sequence: Synthetic oligonucleotide
  Target: LAMA2; (+) strand; PAM type: YTN; PAM sequence: CTG
aaatggtatcaagtgagttg

SEQ ID NO: 315552 - DNA, 20 bp, Artificial Sequence
  Description of Artificial Sequence: Synthetic oligonucleotide
  Target: LAMA2; (+) strand; PAM type: YTN; PAM sequence: TTG
aatgcctcatattttaaaaa

SEQ ID NO: 315553 - DNA, 20 bp, Artificial Sequence
  Description of Artificial Sequence: Synthetic oligonucleotide
  Target: LAMA2; (+) strand; PAM type: YTN; PAM sequence: CTC
atattttaaaaatgggcatg

SEQ ID NO: 315554 - DNA, 20 bp, Artificial Sequence
  Description of Artificial Sequence: Synthetic oligonucleotide
  Target: LAMA2; (+) strand; PAM type: YTN; PAM sequence: TTT
taaaaatgggcatgatctct

SEQ ID NO: 315555 - DNA, 20 bp, Artificial Sequence
  Description of Artificial Sequence: Synthetic oligonucleotide
  Target: LAMA2; (+) strand; PAM type: YTN; PAM sequence: TTT
aaaaatgggcatgatctcta

SEQ ID NO: 315556 - DNA, 20 bp, Artificial Sequence
  Description of Artificial Sequence: Synthetic oligonucleotide
  Target: LAMA2; (+) strand; PAM type: YTN; PAM sequence: TTA
aaaatgggcatgatctctat

SEQ ID NO: 315557 - DNA, 20 bp, Artificial Sequence
  Description of Artificial Sequence: Synthetic oligonucleotide
  Target: LAMA2; (+) strand; PAM type: YTN; PAM sequence: CTC
tattattactaacaaaaaaa

SEQ ID NO: 315558 - DNA, 20 bp, Artificial Sequence
  Description of Artificial Sequence: Synthetic oligonucleotide
  Target: LAMA2; (+) strand; PAM type: YTN; PAM sequence: CTA
ttattactaacaaaaaaatc

SEQ ID NO: 315559 - DNA, 20 bp, Artificial Sequence
  Description of Artificial Sequence: Synthetic oligonucleotide
  Target: LAMA2; (+) strand; PAM type: YTN; PAM sequence: TTA
ttactaacaaaaaaatctgc

SEQ ID NO: 315560 - DNA, 20 bp, Artificial Sequence
  Description of Artificial Sequence: Synthetic oligonucleotide
  Target: LAMA2; (+) strand; PAM type: YTN; PAM sequence: TTA
ctaacaaaaaaatctgcatt

SEQ ID NO: 315561 - DNA, 20 bp, Artificial Sequence
  Description of Artificial Sequence: Synthetic oligonucleotide
  Target: LAMA2; (+) strand; PAM type: YTN; PAM sequence: CTA
acaaaaaaatctgcatttta

SEQ ID NO: 315562 - DNA, 20 bp, Artificial Sequence
  Description of Artificial Sequence: Synthetic oligonucleotide
  Target: LAMA2; (+) strand; PAM type: YTN; PAM sequence: CTG
cattttatgtgatatctgac

SEQ ID NO: 315563 - DNA, 20 bp, Artificial Sequence
  Description of Artificial Sequence: Synthetic oligonucleotide
  Target: LAMA2; (+) strand; PAM type: YTN; PAM sequence: TTT
tatgtgatatctgacatggg

SEQ ID NO: 315564 - DNA, 20 bp, Artificial Sequence
  Description of Artificial Sequence: Synthetic oligonucleotide
  Target: LAMA2; (+) strand; PAM type: YTN; PAM sequence: TTT
atgtgatatctgacatggga

SEQ ID NO: 315565 - DNA, 20 bp, Artificial Sequence
  Description of Artificial Sequence: Synthetic oligonucleotide
  Target: LAMA2; (+) strand; PAM type: YTN; PAM sequence: TTA
tgtgatatctgacatgggaa

SEQ ID NO: 315566 - DNA, 20 bp, Artificial Sequence
  Description of Artificial Sequence: Synthetic oligonucleotide
  Target: LAMA2; (+) strand; PAM type: YTN; PAM sequence: CTG
acatgggaaagggatgcttg

SEQ ID NO: 315567 - DNA, 20 bp, Artificial Sequence
  Description of Artificial Sequence: Synthetic oligonucleotide
  Target: LAMA2; (+) strand; PAM type: YTN; PAM sequence: CTT
gatgagtagccaatgatgtt

SEQ ID NO: 315568 - DNA, 20 bp, Artificial Sequence
  Description of Artificial Sequence: Synthetic oligonucleotide
  Target: LAMA2; (+) strand; PAM type: YTN; PAM sequence: TTG
atgagtagccaatgatgttg

SEQ ID NO: 315569 - DNA, 20 bp, Artificial Sequence
  Description of Artificial Sequence: Synthetic oligonucleotide
  Target: LAMA2; (+) strand; PAM type: YTN; PAM sequence: TTG
aactggctgtattttccgac

SEQ ID NO: 315570 - DNA, 20 bp, Artificial Sequence
  Description of Artificial Sequence: Synthetic oligonucleotide
  Target: LAMA2; (+) strand; PAM type: YTN; PAM sequence: CTG
gctgtattttccgactgact

SEQ ID NO: 315571 - DNA, 20 bp, Artificial Sequence
  Description of Artificial Sequence: Synthetic oligonucleotide
  Target: LAMA2; (+) strand; PAM type: YTN; PAM sequence: CTG
tattttccgactgacttgtt

SEQ ID NO: 315572 - DNA, 20 bp, Artificial Sequence
  Description of Artificial Sequence: Synthetic oligonucleotide
  Target: LAMA2; (+) strand; PAM type: YTN; PAM sequence: TTT
tccgactgacttgtttttct

SEQ ID NO: 315573 - DNA, 20 bp, Artificial Sequence
  Description of Artificial Sequence: Synthetic oligonucleotide
  Target: LAMA2; (+) strand; PAM type: YTN; PAM sequence: TTT
ccgactgacttgtttttctt

SEQ ID NO: 315574 - DNA, 20 bp, Artificial Sequence
  Description of Artificial Sequence: Synthetic oligonucleotide
  Target: LAMA2; (+) strand; PAM type: YTN; PAM sequence: TTC
cgactgacttgtttttctta

SEQ ID NO: 315575 - DNA, 20 bp, Artificial Sequence
  Description of Artificial Sequence: Synthetic oligonucleotide
  Target: LAMA2; (+) strand; PAM type: YTN; PAM sequence: CTG
acttgtttttcttatgaagg

SEQ ID NO: 315576 - DNA, 20 bp, Artificial Sequence
  Description of Artificial Sequence: Synthetic oligonucleotide
  Target: LAMA2; (+) strand; PAM type: YTN; PAM sequence: CTT
gtttttcttatgaaggcagc

SEQ ID NO: 315577 - DNA, 20 bp, Artificial Sequence
  Description of Artificial Sequence: Synthetic oligonucleotide
  Target: LAMA2; (+) strand; PAM type: YTN; PAM sequence: TTG
tttttcttatgaaggcagca

SEQ ID NO: 315578 - DNA, 20 bp, Artificial Sequence
  Description of Artificial Sequence: Synthetic oligonucleotide
  Target: LAMA2; (+) strand; PAM type: YTN; PAM sequence: TTT
ttcttatgaaggcagcattt

SEQ ID NO: 315579 - DNA, 20 bp, Artificial Sequence
  Description of Artificial Sequence: Synthetic oligonucleotide
  Target: LAMA2; (+) strand; PAM type: YTN; PAM sequence: TTT
tcttatgaaggcagcatttt

SEQ ID NO: 315580 - DNA, 20 bp, Artificial Sequence
  Description of Artificial Sequence: Synthetic oligonucleotide
  Target: LAMA2; (+) strand; PAM type: YTN; PAM sequence: TTT
cttatgaaggcagcatttta

SEQ ID NO: 315581 - DNA, 20 bp, Artificial Sequence
  Description of Artificial Sequence: Synthetic oligonucleotide
  Target: LAMA2; (+) strand; PAM type: YTN; PAM sequence: TTC
ttatgaaggcagcattttag

SEQ ID NO: 315582 - DNA, 20 bp, Artificial Sequence
  Description of Artificial Sequence: Synthetic oligonucleotide
  Target: LAMA2; (+) strand; PAM type: YTN; PAM sequence: CTT
atgaaggcagcattttagta

SEQ ID NO: 315583 - DNA, 20 bp, Artificial Sequence
  Description of Artificial Sequence: Synthetic oligonucleotide
  Target: LAMA2; (+) strand; PAM type: YTN; PAM sequence: TTA
tgaaggcagcattttagtaa

SEQ ID NO: 315584 - DNA, 20 bp, Artificial Sequence
  Description of Artificial Sequence: Synthetic oligonucleotide
  Target: LAMA2; (+) strand; PAM type: YTN; PAM sequence: TTT
tagtaaaattgtgtttgtct

SEQ ID NO: 315585 - DNA, 20 bp, Artificial Sequence
  Description of Artificial Sequence: Synthetic oligonucleotide
  Target: LAMA2; (+) strand; PAM type: YTN; PAM sequence: TTT
agtaaaattgtgtttgtctt

SEQ ID NO: 315586 - DNA, 20 bp, Artificial Sequence
  Description of Artificial Sequence: Synthetic oligonucleotide
  Target: LAMA2; (+) strand; PAM type: YTN; PAM sequence: TTA
gtaaaattgtgtttgtcttt

SEQ ID NO: 315587 - DNA, 20 bp, Artificial Sequence
  Description of Artificial Sequence: Synthetic oligonucleotide
  Target: LAMA2; (+) strand; PAM type: YTN; PAM sequence: TTG
tgtttgtctttctttctgat

SEQ ID NO: 315588 - DNA, 20 bp, Artificial Sequence
  Description of Artificial Sequence: Synthetic oligonucleotide
  Target: LAMA2; (+) strand; PAM type: YTN; PAM sequence: TTT
gtctttctttctgataggct

SEQ ID NO: 315589 - DNA, 20 bp, Artificial Sequence
  Description of Artificial Sequence: Synthetic oligonucleotide
  Target: LAMA2; (+) strand; PAM type: YTN; PAM sequence: TTG
tctttctttctgataggctc

SEQ ID NO: 315590 - DNA, 20 bp, Artificial Sequence
  Description of Artificial Sequence: Synthetic oligonucleotide
  Target: LAMA2; (+) strand; PAM type: YTN; PAM sequence: CTT
tctttctgataggctctaat

SEQ ID NO: 315591 - DNA, 20 bp, Artificial Sequence
  Description of Artificial Sequence: Synthetic oligonucleotide
  Target: LAMA2; (+) strand; PAM type: YTN; PAM sequence: TTT
ctttctgataggctctaatt

SEQ ID NO: 315592 - DNA, 20 bp, Artificial Sequence
  Description of Artificial Sequence: Synthetic oligonucleotide
  Target: LAMA2; (+) strand; PAM type: YTN; PAM sequence: TTC
tttctgataggctctaattg

SEQ ID NO: 315593 - DNA, 20 bp, Artificial Sequence
  Description of Artificial Sequence: Synthetic oligonucleotide
  Target: LAMA2; (+) strand; PAM type: YTN; PAM sequence: CTT
tctgataggctctaattgaa

SEQ ID NO: 315594 - DNA, 20 bp, Artificial Sequence
  Description of Artificial Sequence: Synthetic oligonucleotide
  Target: LAMA2; (+) strand; PAM type: YTN; PAM sequence: TTT
ctgataggctctaattgaag

SEQ ID NO: 315595 - DNA, 20 bp, Artificial Sequence
  Description of Artificial Sequence: Synthetic oligonucleotide
  Target: LAMA2; (+) strand; PAM type: YTN; PAM sequence: TTC
tgataggctctaattgaagt

SEQ ID NO: 315596 - DNA, 20 bp, Artificial Sequence
  Description of Artificial Sequence: Synthetic oligonucleotide
  Target: LAMA2; (+) strand; PAM type: YTN; PAM sequence: CTG
ataggctctaattgaagttt

SEQ ID NO: 315597 - DNA, 20 bp, Artificial Sequence
  Description of Artificial Sequence: Synthetic oligonucleotide
  Target: LAMA2; (+) strand; PAM type: YTN; PAM sequence: CTC
taattgaagtttgaaggttc

SEQ ID NO: 315598 - DNA, 20 bp, Artificial Sequence
  Description of Artificial Sequence: Synthetic oligonucleotide
  Target: LAMA2; (+) strand; PAM type: YTN; PAM sequence: CTA
attgaagtttgaaggttcat

SEQ ID NO: 315599 - DNA, 20 bp, Artificial Sequence
  Description of Artificial Sequence: Synthetic oligonucleotide
  Target: LAMA2; (+) strand; PAM type: YTN; PAM sequence: TTG
aagtttgaaggttcattaca

SEQ ID NO: 315600 - DNA, 20 bp, Artificial Sequence
  Description of Artificial Sequence: Synthetic oligonucleotide
  Target: LAMA2; (+) strand; PAM type: YTN; PAM sequence: TTT
gaaggttcattacacaatgc

SEQ ID NO: 315601 - DNA, 20 bp, Artificial Sequence
  Description of Artificial Sequence: Synthetic oligonucleotide
  Target: LAMA2; (+) strand; PAM type: YTN; PAM sequence: TTG
aaggttcattacacaatgcc

SEQ ID NO: 315602 - DNA, 20 bp, Artificial Sequence
  Description of Artificial Sequence: Synthetic oligonucleotide
  Target: LAMA2; (+) strand; PAM type: YTN; PAM sequence: TTC
attacacaatgcctgggaat

SEQ ID NO: 315603 - DNA, 20 bp, Artificial Sequence
  Description of Artificial Sequence: Synthetic oligonucleotide
  Target: LAMA2; (+) strand; PAM type: YTN; PAM sequence: TTA
cacaatgcctgggaatatgt

SEQ ID NO: 315604 - DNA, 20 bp, Artificial Sequence
  Description of Artificial Sequence: Synthetic oligonucleotide
  Target: LAMA2; (+) strand; PAM type: YTN; PAM sequence: CTG
ggaatatgttgtcaaataca

SEQ ID NO: 315605 - DNA, 20 bp, Artificial Sequence
  Description of Artificial Sequence: Synthetic oligonucleotide
  Target: LAMA2; (+) strand; PAM type: YTN; PAM sequence: TTG
tcaaatacaattcacctctc

SEQ ID NO: 315606 - DNA, 20 bp, Artificial Sequence
  Description of Artificial Sequence: Synthetic oligonucleotide
  Target: LAMA2; (+) strand; PAM type: YTN; PAM sequence: TTC
acctctcccacagtgaatat

SEQ ID NO: 315607 - DNA, 20 bp, Artificial Sequence
  Description of Artificial Sequence: Synthetic oligonucleotide
  Target: LAMA2; (+) strand; PAM type: YTN; PAM sequence: CTC
tcccacagtgaatattggca

SEQ ID NO: 315608 - DNA, 20 bp, Artificial Sequence
  Description of Artificial Sequence: Synthetic oligonucleotide
  Target: LAMA2; (+) strand; PAM type: YTN; PAM sequence: CTC
ccacagtgaatattggcatg

SEQ ID NO: 315609 - DNA, 20 bp, Artificial Sequence
  Description of Artificial Sequence: Synthetic oligonucleotide
  Target: LAMA2; (+) strand; PAM type: YTN; PAM sequence: TTG
gcatgattttataggacagg

SEQ ID NO: 315610 - DNA, 20 bp, Artificial Sequence
  Description of Artificial Sequence: Synthetic oligonucleotide
  Target: LAMA2; (+) strand; PAM type: YTN; PAM sequence: TTT
tataggacagggtactctag

SEQ ID NO: 315611 - DNA, 20 bp, Artificial Sequence
  Description of Artificial Sequence: Synthetic oligonucleotide
  Target: LAMA2; (+) strand; PAM type: YTN; PAM sequence: TTT
ataggacagggtactctaga

SEQ ID NO: 315612 - DNA, 20 bp, Artificial Sequence
  Description of Artificial Sequence: Synthetic oligonucleotide
  Target: LAMA2; (+) strand; PAM type: YTN; PAM sequence: TTA
taggacagggtactctagag

SEQ ID NO: 315613 - DNA, 20 bp, Artificial Sequence
  Description of Artificial Sequence: Synthetic oligonucleotide
  Target: LAMA2; (+) strand; PAM type: YTN; PAM sequence: CTC
tagagctcagctgtcataat

SEQ ID NO: 315614 - DNA, 20 bp, Artificial Sequence
  Description of Artificial Sequence: Synthetic oligonucleotide
  Target: LAMA2; (+) strand; PAM type: YTN; PAM sequence: CTA
gagctcagctgtcataatat

SEQ ID NO: 315615 - DNA, 20 bp, Artificial Sequence
  Description of Artificial Sequence: Synthetic oligonucleotide
  Target: LAMA2; (+) strand; PAM type: YTN; PAM sequence: CTC
agctgtcataatatttggct

SEQ ID NO: 315616 - DNA, 20 bp, Artificial Sequence
  Description of Artificial Sequence: Synthetic oligonucleotide
  Target: LAMA2; (+) strand; PAM type: YTN; PAM sequence: CTG
tcataatatttggctccaat

SEQ ID NO: 315617 - DNA, 20 bp, Artificial Sequence
  Description of Artificial Sequence: Synthetic oligonucleotide
  Target: LAMA2; (+) strand; PAM type: YTN; PAM sequence: TTT
ggctccaatttcattcataa

SEQ ID NO: 315618 - DNA, 20 bp, Artificial Sequence
  Description of Artificial Sequence: Synthetic oligonucleotide
  Target: LAMA2; (+) strand; PAM type: YTN; PAM sequence: TTG
gctccaatttcattcataat

SEQ ID NO: 315619 - DNA, 20 bp, Artificial Sequence
  Description of Artificial Sequence: Synthetic oligonucleotide
  Target: LAMA2; (+) strand; PAM type: YTN; PAM sequence: CTC
caatttcattcataatggac

SEQ ID NO: 315620 - DNA, 20 bp, Artificial Sequence
  Description of Artificial Sequence: Synthetic oligonucleotide
  Target: LAMA2; (+) strand; PAM type: YTN; PAM sequence: TTT
cattcataatggacagaata

SEQ ID NO: 315621 - DNA, 20 bp, Artificial Sequence
  Description of Artificial Sequence: Synthetic oligonucleotide
  Target: LAMA2; (+) strand; PAM type: YTN; PAM sequence: TTC
attcataatggacagaatat

SEQ ID NO: 315622 - DNA, 20 bp, Artificial Sequence
  Description of Artificial Sequence: Synthetic oligonucleotide
  Target: LAMA2; (+) strand; PAM type: YTN; PAM sequence: TTC
ataatggacagaatatctac

SEQ ID NO: 315623 - DNA, 20 bp, Artificial Sequence
  Description of Artificial Sequence: Synthetic oligonucleotide
  Target: LAMA2; (+) strand; PAM type: YTN; PAM sequence: CTA
caatgttttgaatccctact

SEQ ID NO: 315624 - DNA, 20 bp, Artificial Sequence
  Description of Artificial Sequence: Synthetic oligonucleotide
  Target: LAMA2; (+) strand; PAM type: YTN; PAM sequence: TTT
tgaatccctactttcaaatg

SEQ ID NO: 315625 - DNA, 20 bp, Artificial Sequence
  Description of Artificial Sequence: Synthetic oligonucleotide
  Target: LAMA2; (+) strand; PAM type: YTN; PAM sequence: TTT
gaatccctactttcaaatgt

SEQ ID NO: 315626 - DNA, 20 bp, Artificial Sequence
  Description of Artificial Sequence: Synthetic oligonucleotide
  Target: LAMA2; (+) strand; PAM type: YTN; PAM sequence: TTG
aatccctactttcaaatgtc

SEQ ID NO: 315627 - DNA, 20 bp, Artificial Sequence
  Description of Artificial Sequence: Synthetic oligonucleotide
  Target: LAMA2; (+) strand; PAM type: YTN; PAM sequence: CTA
ctttcaaatgtcagcacact

SEQ ID NO: 315628 - DNA, 20 bp, Artificial Sequence
  Description of Artificial Sequence: Synthetic oligonucleotide
  Target: LAMA2; (+) strand; PAM type: YTN; PAM sequence: CTT
tcaaatgtcagcacactgga

SEQ ID NO: 315629 - DNA, 20 bp, Artificial Sequence
  Description of Artificial Sequence: Synthetic oligonucleotide
  Target: LAMA2; (+) strand; PAM type: YTN; PAM sequence: TTT
caaatgtcagcacactggaa

SEQ ID NO: 315630 - DNA, 20 bp, Artificial Sequence
  Description of Artificial Sequence: Synthetic oligonucleotide
  Target: LAMA2; (+) strand; PAM type: YTN; PAM sequence: TTC
aaatgtcagcacactggaac

SEQ ID NO: 315631 - DNA, 20 bp, Artificial Sequence
  Description of Artificial Sequence: Synthetic oligonucleotide
  Target: LAMA2; (+) strand; PAM type: YTN; PAM sequence: CTG
gaacaaatattaaagaatgg

SEQ ID NO: 315632 - DNA, 20 bp, Artificial Sequence
  Description of Artificial Sequence: Synthetic oligonucleotide
  Target: LAMA2; (+) strand; PAM type: YTN; PAM sequence: TTA
aagaatgggtttgaatctaa

SEQ ID NO: 315633 - DNA, 20 bp, Artificial Sequence
  Description of Artificial Sequence: Synthetic oligonucleotide
  Target: LAMA2; (+) strand; PAM type: YTN; PAM sequence: TTT
gaatctaagtagatgagtat

SEQ ID NO: 315634 - DNA, 20 bp, Artificial Sequence
  Description of Artificial Sequence: Synthetic oligonucleotide
  Target: LAMA2; (+) strand; PAM type: YTN; PAM sequence: TTG
aatctaagtagatgagtatt

SEQ ID NO: 315635 - DNA, 20 bp, Artificial Sequence
  Description of Artificial Sequence: Synthetic oligonucleotide
  Target: LAMA2; (+) strand; PAM type: YTN; PAM sequence: CTA
agtagatgagtatttccttg

SEQ ID NO: 315636 - DNA, 20 bp, Artificial Sequence
  Description of Artificial Sequence: Synthetic oligonucleotide
  Target: LAMA2; (+) strand; PAM type: YTN; PAM sequence: TTT
ccttgaagcaacatgttata

SEQ ID NO: 315637 - DNA, 20 bp, Artificial Sequence
  Description of Artificial Sequence: Synthetic oligonucleotide
  Target: LAMA2; (+) strand; PAM type: YTN; PAM sequence: TTC
cttgaagcaacatgttatag

SEQ ID NO: 315638 - DNA, 20 bp, Artificial Sequence
  Description of Artificial Sequence: Synthetic oligonucleotide
  Target: LAMA2; (+) strand; PAM type: YTN; PAM sequence: CTT
gaagcaacatgttatagcct

SEQ ID NO: 315639 - DNA, 20 bp, Artificial Sequence
  Description of Artificial Sequence: Synthetic oligonucleotide
  Target: LAMA2; (+) strand; PAM type: YTN; PAM sequence: TTG
aagcaacatgttatagccta

SEQ ID NO: 315640 - DNA, 20 bp, Artificial Sequence
  Description of Artificial Sequence: Synthetic oligonucleotide
  Target: LAMA2; (+) strand; PAM type: YTN; PAM sequence: TTA
tagcctaaatgttgtttcct

SEQ ID NO: 315641 - DNA, 20 bp, Artificial Sequence
  Description of Artificial Sequence: Synthetic oligonucleotide
  Target: LAMA2; (+) strand; PAM type: YTN; PAM sequence: CTA
aatgttgtttccttcaatta

SEQ ID NO: 315642 - DNA, 20 bp, Artificial Sequence
  Description of Artificial Sequence: Synthetic oligonucleotide
  Target: LAMA2; (+) strand; PAM type: YTN; PAM sequence: TTG
tttccttcaattatgtttaa

SEQ ID NO: 315643 - DNA, 20 bp, Artificial Sequence
  Description of Artificial Sequence: Synthetic oligonucleotide
  Target: LAMA2; (+) strand; PAM type: YTN; PAM sequence: TTT
ccttcaattatgtttaaaca

SEQ ID NO: 315644 - DNA, 20 bp, Artificial Sequence
  Description of Artificial Sequence: Synthetic oligonucleotide
  Target: LAMA2; (+) strand; PAM type: YTN; PAM sequence: TTC
cttcaattatgtttaaacaa

SEQ ID NO: 315645 - DNA, 20 bp, Artificial Sequence
  Description of Artificial Sequence: Synthetic oligonucleotide
  Target: LAMA2; (+) strand; PAM type: YTN; PAM sequence: CTT
caattatgtttaaacaatgt

SEQ ID NO: 315646 - DNA, 20 bp, Artificial Sequence
  Description of Artificial Sequence: Synthetic oligonucleotide
  Target: LAMA2; (+) strand; PAM type: YTN; PAM sequence: TTC
aattatgtttaaacaatgta

SEQ ID NO: 315647 - DNA, 20 bp, Artificial Sequence
  Description of Artificial Sequence: Synthetic oligonucleotide
  Target: LAMA2; (+) strand; PAM type: YTN; PAM sequence: TTA
tgtttaaacaatgtaacctt

SEQ ID NO: 315648 - DNA, 20 bp, Artificial Sequence
  Description of Artificial Sequence: Synthetic oligonucleotide
  Target: LAMA2; (+) strand; PAM type: YTN; PAM sequence: TTT
aaacaatgtaaccttaaatg

SEQ ID NO: 315649 - DNA, 20 bp, Artificial Sequence
  Description of Artificial Sequence: Synthetic oligonucleotide
  Target: LAMA2; (+) strand; PAM type: YTN; PAM sequence: TTA
aacaatgtaaccttaaatgt

SEQ ID NO: 315650 - DNA, 20 bp, Artificial Sequence
  Description of Artificial Sequence: Synthetic oligonucleotide
  Target: LAMA2; (+) strand; PAM type: YTN; PAM sequence: CTT
aaatgtttcacagatgtatc

SEQ ID NO: 315651 - DNA, 20 bp, Artificial Sequence
  Description of Artificial Sequence: Synthetic oligonucleotide
  Target: LAMA2; (+) strand; PAM type: YTN; PAM sequence: TTA
aatgtttcacagatgtatca

SEQ ID NO: 315652 - DNA, 20 bp, Artificial Sequence
  Description of Artificial Sequence: Synthetic oligonucleotide
  Target: LAMA2; (+) strand; PAM type: YTN; PAM sequence: TTT
cacagatgtatcacttgaaa

SEQ ID NO: 315653 - DNA, 20 bp, Artificial Sequence
  Description of Artificial Sequence: Synthetic oligonucleotide
  Target: LAMA2; (+) strand; PAM type: YTN; PAM sequence: TTC
acagatgtatcacttgaaat

SEQ ID NO: 315654 - DNA, 20 bp, Artificial Sequence
  Description of Artificial Sequence: Synthetic oligonucleotide
  Target: LAMA2; (+) strand; PAM type: YTN; PAM sequence: CTT
gaaatccaaaacacatacta

SEQ ID NO: 315655 - DNA, 20 bp, Artificial Sequence
  Description of Artificial Sequence: Synthetic oligonucleotide
  Target: LAMA2; (+) strand; PAM type: YTN; PAM sequence: TTG
aaatccaaaacacatactac

SEQ ID NO: 315656 - DNA, 20 bp, Artificial Sequence
  Description of Artificial Sequence: Synthetic oligonucleotide
  Target: LAMA2; (+) strand; PAM type: YTN; PAM sequence: CTA
ctcatcaaagtcatctttat

SEQ ID NO: 315657 - DNA, 20 bp, Artificial Sequence
  Description of Artificial Sequence: Synthetic oligonucleotide
  Target: LAMA2; (+) strand; PAM type: YTN; PAM sequence: CTC
atcaaagtcatctttattta

SEQ ID NO: 315658 - DNA, 20 bp, Artificial Sequence
  Description of Artificial Sequence: Synthetic oligonucleotide
  Target: LAMA2; (+) strand; PAM type: YTN; PAM sequence: CTT
tatttaagcttaggaagaaa

SEQ ID NO: 315659 - DNA, 20 bp, Artificial Sequence
  Description of Artificial Sequence: Synthetic oligonucleotide
  Target: LAMA2; (+) strand; PAM type: YTN; PAM sequence: TTT
atttaagcttaggaagaaaa

SEQ ID NO: 315660 - DNA, 20 bp, Artificial Sequence
  Description of Artificial Sequence: Synthetic oligonucleotide
  Target: LAMA2; (+) strand; PAM type: YTN; PAM sequence: TTA
tttaagcttaggaagaaaaa

SEQ ID NO: 315661 - DNA, 20 bp, Artificial Sequence
  Description of Artificial Sequence: Synthetic oligonucleotide
  Target: LAMA2; (+) strand; PAM type: YTN; PAM sequence: TTT
aagcttaggaagaaaaatag

SEQ ID NO: 315662 - DNA, 20 bp, Artificial Sequence
  Description of Artificial Sequence: Synthetic oligonucleotide
  Target: LAMA2; (+) strand; PAM type: YTN; PAM sequence: TTA
agcttaggaagaaaaataga

SEQ ID NO: 315663 - DNA, 20 bp, Artificial Sequence
  Description of Artificial Sequence: Synthetic oligonucleotide
  Target: LAMA2; (+) strand; PAM type: YTN; PAM sequence: CTT
aggaagaaaaatagaaatct

SEQ ID NO: 315664 - DNA, 20 bp, Artificial Sequence
  Description of Artificial Sequence: Synthetic oligonucleotide
  Target: LAMA2; (+) strand; PAM type: YTN; PAM sequence: TTA
ggaagaaaaatagaaatctg

SEQ ID NO: 315665 - DNA, 20 bp, Artificial Sequence
  Description of Artificial Sequence: Synthetic oligonucleotide
  Target: LAMA2; (+) strand; PAM type: YTN; PAM sequence: CTG
aaatgtttgctcttagtcca

SEQ ID NO: 315666 - DNA, 20 bp, Artificial Sequence
  Description of Artificial Sequence: Synthetic oligonucleotide
  Target: LAMA2; (+) strand; PAM type: YTN; PAM sequence: TTT
gctcttagtccacacacact

SEQ ID NO: 315667 - DNA, 20 bp, Artificial Sequence
  Description of Artificial Sequence: Synthetic oligonucleotide
  Target: LAMA2; (+) strand; PAM type: YTN; PAM sequence: TTG
ctcttagtccacacacactt

SEQ ID NO: 315668 - DNA, 20 bp, Artificial Sequence
  Description of Artificial Sequence: Synthetic oligonucleotide
  Target: LAMA2; (+) strand; PAM type: YTN; PAM sequence: CTC
ttagtccacacacacttctc

SEQ ID NO: 315669 - DNA, 20 bp, Artificial Sequence
  Description of Artificial Sequence: Synthetic oligonucleotide
  Target: LAMA2; (+) strand; PAM type: YTN; PAM sequence: CTT
agtccacacacacttctcat

SEQ ID NO: 315670 - DNA, 20 bp, Artificial Sequence
  Description of Artificial Sequence: Synthetic oligonucleotide
  Target: LAMA2; (+) strand; PAM type: YTN; PAM sequence: TTA
gtccacacacacttctcatc

SEQ ID NO: 315671 - DNA, 20 bp, Artificial Sequence
  Description of Artificial Sequence: Synthetic oligonucleotide
  Target: LAMA2; (+) strand; PAM type: YTN; PAM sequence: CTT
ctcatctggcaggacatttc

SEQ ID NO: 315672 - DNA, 20 bp, Artificial Sequence
  Description of Artificial Sequence: Synthetic oligonucleotide
  Target: LAMA2; (+) strand; PAM type: YTN; PAM sequence: TTC
tcatctggcaggacatttct

SEQ ID NO: 315673 - DNA, 20 bp, Artificial Sequence
  Description of Artificial Sequence: Synthetic oligonucleotide
  Target: LAMA2; (+) strand; PAM type: YTN; PAM sequence: CTC
atctggcaggacatttctga

SEQ ID NO: 315674 - DNA, 20 bp, Artificial Sequence
  Description of Artificial Sequence: Synthetic oligonucleotide
  Target: LAMA2; (+) strand; PAM type: YTN; PAM sequence: CTG
gcaggacatttctgaattta

SEQ ID NO: 315675 - DNA, 20 bp, Artificial Sequence
  Description of Artificial Sequence: Synthetic oligonucleotide
  Target: LAMA2; (+) strand; PAM type: YTN; PAM sequence: TTT
ctgaatttatttgggaaatt

SEQ ID NO: 315676 - DNA, 20 bp, Artificial Sequence
  Description of Artificial Sequence: Synthetic oligonucleotide
  Target: LAMA2; (+) strand; PAM type: YTN; PAM sequence: TTC
tgaatttatttgggaaattg

SEQ ID NO: 315677 - DNA, 20 bp, Artificial Sequence
  Description of Artificial Sequence: Synthetic oligonucleotide
  Target: LAMA2; (+) strand; PAM type: YTN; PAM sequence: CTG
aatttatttgggaaattgaa

SEQ ID NO: 315678 - DNA, 20 bp, Artificial Sequence
  Description of Artificial Sequence: Synthetic oligonucleotide
  Target: LAMA2; (+) strand; PAM type: YTN; PAM sequence: TTT
atttgggaaattgaatatat

SEQ ID NO: 315679 - DNA, 20 bp, Artificial Sequence
  Description of Artificial Sequence: Synthetic oligonucleotide
  Target: LAMA2; (+) strand; PAM type: YTN; PAM sequence: TTA
tttgggaaattgaatatatg

SEQ ID NO: 315680 - DNA, 20 bp, Artificial Sequence
  Description of Artificial Sequence: Synthetic oligonucleotide
  Target: LAMA2; (+) strand; PAM type: YTN; PAM sequence: TTT
gggaaattgaatatatgtca

SEQ ID NO: 315681 - DNA, 20 bp, Artificial Sequence
  Description of Artificial Sequence: Synthetic oligonucleotide
  Target: LAMA2; (+) strand; PAM type: YTN; PAM sequence: TTG
ggaaattgaatatatgtcag

SEQ ID NO: 315682 - DNA, 20 bp, Artificial Sequence
  Description of Artificial Sequence: Synthetic oligonucleotide
  Target: LAMA2; (+) strand; PAM type: YTN; PAM sequence: TTG
aatatatgtcaggtaggttt

SEQ ID NO: 315683 - DNA, 20 bp, Artificial Sequence
  Description of Artificial Sequence: Synthetic oligonucleotide
  Target: LAMA2; (+) strand; PAM type: YTN; PAM sequence: TTT
gggttgctgggtaaatgagt

SEQ ID NO: 315684 - DNA, 20 bp, Artificial Sequence
  Description of Artificial Sequence: Synthetic oligonucleotide
  Target: LAMA2; (+) strand; PAM type: YTN; PAM sequence: TTG
ggttgctgggtaaatgagtg

SEQ ID NO: 315685 - DNA, 20 bp, Artificial Sequence
  Description of Artificial Sequence: Synthetic oligonucleotide
  Target: LAMA2; (+) strand; PAM type: YTN; PAM sequence: TTG
ctgggtaaatgagtgtactt

SEQ ID NO: 315686 - DNA, 20 bp, Artificial Sequence
  Description of Artificial Sequence: Synthetic oligonucleotide
  Target: LAMA2; (+) strand; PAM type: YTN; PAM sequence: CTG
ggtaaatgagtgtacttcag

SEQ ID NO: 315687 - DNA, 20 bp, Artificial Sequence
  Description of Artificial Sequence: Synthetic oligonucleotide
  Target: LAMA2; (+) strand; PAM type: YTN; PAM sequence: CTT
cagtgtcaggactgttttta

SEQ ID NO: 315688 - DNA, 20 bp, Artificial Sequence
  Description of Artificial Sequence: Synthetic oligonucleotide
  Target: LAMA2; (+) strand; PAM type: YTN; PAM sequence: TTC
agtgtcaggactgtttttat

SEQ ID NO: 315689 - DNA, 20 bp, Artificial Sequence
  Description of Artificial Sequence: Synthetic oligonucleotide
  Target: LAMA2; (+) strand; PAM type: YTN; PAM sequence: CTG
tttttattaacagattttat

SEQ ID NO: 315690 - DNA, 20 bp, Artificial Sequence
  Description of Artificial Sequence: Synthetic oligonucleotide
  Target: LAMA2; (+) strand; PAM type: YTN; PAM sequence: TTT
ttattaacagattttataaa

SEQ ID NO: 315691 - DNA, 20 bp, Artificial Sequence
  Description of Artificial Sequence: Synthetic oligonucleotide
  Target: LAMA2; (+) strand; PAM type: YTN; PAM sequence: TTT
tattaacagattttataaac

SEQ ID NO: 315692 - DNA, 20 bp, Artificial Sequence
  Description of Artificial Sequence: Synthetic oligonucleotide
  Target: LAMA2; (+) strand; PAM type: YTN; PAM sequence: TTT
attaacagattttataaact

SEQ ID NO: 315693 - DNA, 20 bp, Artificial Sequence
  Description of Artificial Sequence: Synthetic oligonucleotide
  Target: LAMA2; (+) strand; PAM type: YTN; PAM sequence: TTA
ttaacagattttataaactg

SEQ ID NO: 315694 - DNA, 20 bp, Artificial Sequence
  Description of Artificial Sequence: Synthetic oligonucleotide
  Target: LAMA2; (+) strand; PAM type: YTN; PAM sequence: TTA
acagattttataaactggct

SEQ ID NO: 315695 - DNA, 20 bp, Artificial Sequence
  Description of Artificial Sequence: Synthetic oligonucleotide
  Target: LAMA2; (+) strand; PAM type: YTN; PAM sequence: TTT
tataaactggcttggtagtt

SEQ ID NO: 315696 - DNA, 20 bp, Artificial Sequence
  Description of Artificial Sequence: Synthetic oligonucleotide
  Target: LAMA2; (+) strand; PAM type: YTN; PAM sequence: TTT
ataaactggcttggtagttt

SEQ ID NO: 315697 - DNA, 20 bp, Artificial Sequence
  Description of Artificial Sequence: Synthetic oligonucleotide
  Target: LAMA2; (+) strand; PAM type: YTN; PAM sequence: TTA
taaactggcttggtagtttc

SEQ ID NO: 315698 - DNA, 20 bp, Artificial Sequence
  Description of Artificial Sequence: Synthetic oligonucleotide
  Target: LAMA2; (+) strand; PAM type: YTN; PAM sequence: CTG
gcttggtagtttccagttct

SEQ ID NO: 315699 - DNA, 20 bp, Artificial Sequence
  Description of Artificial Sequence: Synthetic oligonucleotide
  Target: LAMA2; (+) strand; PAM type: YTN; PAM sequence: CTT
ggtagtttccagttctgtgg

SEQ ID NO: 315700 - DNA, 20 bp, Artificial Sequence
  Description of Artificial Sequence: Synthetic oligonucleotide
  Target: LAMA2; (+) strand; PAM type: YTN; PAM sequence: TTG
gtagtttccagttctgtggc

SEQ ID NO: 315701 - DNA, 20 bp, Artificial Sequence
  Description of Artificial Sequence: Synthetic oligonucleotide
  Target: LAMA2; (+) strand; PAM type: YTN; PAM sequence: TTT
ccagttctgtggcaagaaca

SEQ ID NO: 315702 - DNA, 20 bp, Artificial Sequence
  Description of Artificial Sequence: Synthetic oligonucleotide
  Target: LAMA2; (+) strand; PAM type: YTN; PAM sequence: TTC
cagttctgtggcaagaacaa

SEQ ID NO: 315703 - DNA, 20 bp, Artificial Sequence
  Description of Artificial Sequence: Synthetic oligonucleotide
  Target: LAMA2; (+) strand; PAM type: YTN; PAM sequence: TTC
tgtggcaagaacaatctatc

SEQ ID NO: 315704 - DNA, 20 bp, Artificial Sequence
  Description of Artificial Sequence: Synthetic oligonucleotide
  Target: LAMA2; (+) strand; PAM type: YTN; PAM sequence: CTG
tggcaagaacaatctatcat

SEQ ID NO: 315705 - DNA, 20 bp, Artificial Sequence
  Description of Artificial Sequence: Synthetic oligonucleotide
  Target: LAMA2; (+) strand; PAM type: YTN; PAM sequence: CTA
tcataataaacctgtaacat

SEQ ID NO: 315706 - DNA, 20 bp, Artificial Sequence
  Description of Artificial Sequence: Synthetic oligonucleotide
  Target: LAMA2; (+) strand; PAM type: YTN; PAM sequence: CTG
taacataaaagtacagaata

SEQ ID NO: 315707 - DNA, 20 bp, Artificial Sequence
  Description of Artificial Sequence: Synthetic oligonucleotide
  Target: LAMA2; (+) strand; PAM type: YTN; PAM sequence: TTC
ctgtttcaagagtctgtaag

SEQ ID NO: 315708 - DNA, 20 bp, Artificial Sequence
  Description of Artificial Sequence: Synthetic oligonucleotide
  Target: LAMA2; (+) strand; PAM type: YTN; PAM sequence: CTG
tttcaagagtctgtaagagg

SEQ ID NO: 315709 - DNA, 20 bp, Artificial Sequence
  Description of Artificial Sequence: Synthetic oligonucleotide
  Target: LAMA2; (+) strand; PAM type: YTN; PAM sequence: TTT
caagagtctgtaagaggagt

SEQ ID NO: 315710 - DNA, 20 bp, Artificial Sequence
  Description of Artificial Sequence: Synthetic oligonucleotide
  Target: LAMA2; (+) strand; PAM type: YTN; PAM sequence: TTC
aagagtctgtaagaggagtc

SEQ ID NO: 315711 - DNA, 20 bp, Artificial Sequence
  Description of Artificial Sequence: Synthetic oligonucleotide
  Target: LAMA2; (+) strand; PAM type: YTN; PAM sequence: CTG
taagaggagtcccctcatga

SEQ ID NO: 315712 - DNA, 20 bp, Artificial Sequence
  Description of Artificial Sequence: Synthetic oligonucleotide
  Target: LAMA2; (+) strand; PAM type: YTN; PAM sequence: CTC
atgaacagtttatatgagag

SEQ ID NO: 315713 - DNA, 20 bp, Artificial Sequence
  Description of Artificial Sequence: Synthetic oligonucleotide
  Target: LAMA2; (+) strand; PAM type: YTN; PAM sequence: TTT
atatgagaggattataaaat

SEQ ID NO: 315714 - DNA, 20 bp, Artificial Sequence
  Description of Artificial Sequence: Synthetic oligonucleotide
  Target: LAMA2; (+) strand; PAM type: YTN; PAM sequence: TTA
tatgagaggattataaaatg

SEQ ID NO: 315715 - DNA, 20 bp, Artificial Sequence
  Description of Artificial Sequence: Synthetic oligonucleotide
  Target: LAMA2; (+) strand; PAM type: YTN; PAM sequence: TTA
taaaatgaagttcagcagta

SEQ ID NO: 315716 - DNA, 20 bp, Artificial Sequence
  Description of Artificial Sequence: Synthetic oligonucleotide
  Target: LAMA2; (+) strand; PAM type: YTN; PAM sequence: TTC
agcagtagcacaagcaactg

SEQ ID NO: 315717 - DNA, 20 bp, Artificial Sequence
  Description of Artificial Sequence: Synthetic oligonucleotide
  Target: LAMA2; (+) strand; PAM type: YTN; PAM sequence: CTG
cagtgaatggtgtgttgtta

SEQ ID NO: 315718 - DNA, 20 bp, Artificial Sequence
  Description of Artificial Sequence: Synthetic oligonucleotide
  Target: LAMA2; (+) strand; PAM type: YTN; PAM sequence: TTG
ttaaggttctttaaatcatg

SEQ ID NO: 315719 - DNA, 20 bp, Artificial Sequence
  Description of Artificial Sequence: Synthetic oligonucleotide
  Target: LAMA2; (+) strand; PAM type: YTN; PAM sequence: TTA
aggttctttaaatcatgaaa

SEQ ID NO: 315720 - DNA, 20 bp, Artificial Sequence
  Description of Artificial Sequence: Synthetic oligonucleotide
  Target: LAMA2; (+) strand; PAM type: YTN; PAM sequence: TTC
tttaaatcatgaaaaaaata

SEQ ID NO: 315721 - DNA, 20 bp, Artificial Sequence
  Description of Artificial Sequence: Synthetic oligonucleotide
  Target: LAMA2; (+) strand; PAM type: YTN; PAM sequence: CTT
taaatcatgaaaaaaatata

SEQ ID NO: 315722 - DNA, 20 bp, Artificial Sequence
  Description of Artificial Sequence: Synthetic oligonucleotide
  Target: LAMA2; (+) strand; PAM type: YTN; PAM sequence: TTT
aaatcatgaaaaaaatatac

SEQ ID NO: 315723 - DNA, 20 bp, Artificial Sequence
  Description of Artificial Sequence: Synthetic oligonucleotide
  Target: LAMA2; (+) strand; PAM type: YTN; PAM sequence: TTA
aatcatgaaaaaaatatact

SEQ ID NO: 315724 - DNA, 20 bp, Artificial Sequence
  Description of Artificial Sequence: Synthetic oligonucleotide
  Target: LAMA2; (+) strand; PAM type: YTN; PAM sequence: CTT
tcaaggatttattaatctta

SEQ ID NO: 315725 - DNA, 20 bp, Artificial Sequence
  Description of Artificial Sequence: Synthetic oligonucleotide
  Target: LAMA2; (+) strand; PAM type: YTN; PAM sequence: TTT
caaggatttattaatcttac

SEQ ID NO: 315726 - DNA, 20 bp, Artificial Sequence
  Description of Artificial Sequence: Synthetic oligonucleotide
  Target: LAMA2; (+) strand; PAM type: YTN; PAM sequence: TTC
aaggatttattaatcttact

SEQ ID NO: 315727 - DNA, 20 bp, Artificial Sequence
  Description of Artificial Sequence: Synthetic oligonucleotide
  Target: LAMA2; (+) strand; PAM type: YTN; PAM sequence: TTT
attaatcttactccaaatat

SEQ ID NO: 315728 - DNA, 20 bp, Artificial Sequence
  Description of Artificial Sequence: Synthetic oligonucleotide
  Target: LAMA2; (+) strand; PAM type: YTN; PAM sequence: TTA
ttaatcttactccaaatata

SEQ ID NO: 315729 - DNA, 20 bp, Artificial Sequence
  Description of Artificial Sequence: Synthetic oligonucleotide
  Target: LAMA2; (+) strand; PAM type: YTN; PAM sequence: TTA
atcttactccaaatatatat

SEQ ID NO: 315730 - DNA, 20 bp, Artificial Sequence
  Description of Artificial Sequence: Synthetic oligonucleotide
  Target: LAMA2; (+) strand; PAM type: YTN; PAM sequence: CTT
actccaaatatatatatttt

SEQ ID NO: 315731 - DNA, 20 bp, Artificial Sequence
  Description of Artificial Sequence: Synthetic oligonucleotide
  Target: LAMA2; (+) strand; PAM type: YTN; PAM sequence: TTA
ctccaaatatatatattttg

SEQ ID NO: 315732 - DNA, 20 bp, Artificial Sequence
  Description of Artificial Sequence: Synthetic oligonucleotide
  Target: LAMA2; (+) strand; PAM type: YTN; PAM sequence: CTC
caaatatatatattttggta

SEQ ID NO: 315733 - DNA, 20 bp, Artificial Sequence
  Description of Artificial Sequence: Synthetic oligonucleotide
  Target: LAMA2; (+) strand; PAM type: YTN; PAM sequence: TTT
tggtaaatagcaattggaaa

SEQ ID NO: 315734 - DNA, 20 bp, Artificial Sequence
  Description of Artificial Sequence: Synthetic oligonucleotide
  Target: LAMA2; (+) strand; PAM type: YTN; PAM sequence: TTT
ggtaaatagcaattggaaag

SEQ ID NO: 315735 - DNA, 20 bp, Artificial Sequence
  Description of Artificial Sequence: Synthetic oligonucleotide
  Target: LAMA2; (+) strand; PAM type: YTN; PAM sequence: TTG
gtaaatagcaattggaaaga

SEQ ID NO: 315736 - DNA, 20 bp, Artificial Sequence
  Description of Artificial Sequence: Synthetic oligonucleotide
  Target: LAMA2; (+) strand; PAM type: YTN; PAM sequence: TTG
gaaagaagggtttgtatttc

SEQ ID NO: 315737 - DNA, 20 bp, Artificial Sequence
  Description of Artificial Sequence: Synthetic oligonucleotide
  Target: LAMA2; (+) strand; PAM type: YTN; PAM sequence: TTT
gtatttcttagaagcactga

SEQ ID NO: 315738 - DNA, 20 bp, Artificial Sequence
  Description of Artificial Sequence: Synthetic oligonucleotide
  Target: LAMA2; (+) strand; PAM type: YTN; PAM sequence: TTG
tatttcttagaagcactgag

SEQ ID NO: 315739 - DNA, 20 bp, Artificial Sequence
  Description of Artificial Sequence: Synthetic oligonucleotide
  Target: LAMA2; (+) strand; PAM type: YTN; PAM sequence: TTT
cttagaagcactgagctgac

SEQ ID NO: 315740 - DNA, 20 bp, Artificial Sequence
  Description of Artificial Sequence: Synthetic oligonucleotide
  Target: LAMA2; (+) strand; PAM type: YTN; PAM sequence: TTC
ttagaagcactgagctgacc

SEQ ID NO: 315741 - DNA, 20 bp, Artificial Sequence
  Description of Artificial Sequence: Synthetic oligonucleotide
  Target: LAMA2; (+) strand; PAM type: YTN; PAM sequence: CTT
agaagcactgagctgaccaa

SEQ ID NO: 315742 - DNA, 20 bp, Artificial Sequence
  Description of Artificial Sequence: Synthetic oligonucleotide
  Target: LAMA2; (+) strand; PAM type: YTN; PAM sequence: TTA
gaagcactgagctgaccaat

SEQ ID NO: 315743 - DNA, 20 bp, Artificial Sequence
  Description of Artificial Sequence: Synthetic oligonucleotide
  Target: LAMA2; (+) strand; PAM type: YTN; PAM sequence: CTG
agctgaccaatatattggaa

SEQ ID NO: 315744 - DNA, 20 bp, Artificial Sequence
  Description of Artificial Sequence: Synthetic oligonucleotide
  Target: LAMA2; (+) strand; PAM type: YTN; PAM sequence: CTG
accaatatattggaaaacta

SEQ ID NO: 315745 - DNA, 20 bp, Artificial Sequence
  Description of Artificial Sequence: Synthetic oligonucleotide
  Target: LAMA2; (+) strand; PAM type: YTN; PAM sequence: TTG
gaaaactaagtaaagcaggc

SEQ ID NO: 315746 - DNA, 20 bp, Artificial Sequence
  Description of Artificial Sequence: Synthetic oligonucleotide
  Target: LAMA2; (+) strand; PAM type: YTN; PAM sequence: CTA
agtaaagcaggccagtgatc

SEQ ID NO: 315747 - DNA, 20 bp, Artificial Sequence
  Description of Artificial Sequence: Synthetic oligonucleotide
  Target: LAMA2; (+) strand; PAM type: YTN; PAM sequence: CTC
tattctgagtgaaatatttt

SEQ ID NO: 315748 - DNA, 20 bp, Artificial Sequence
  Description of Artificial Sequence: Synthetic oligonucleotide
  Target: LAMA2; (+) strand; PAM type: YTN; PAM sequence: CTA
ttctgagtgaaatattttgc

SEQ ID NO: 315749 - DNA, 20 bp, Artificial Sequence
  Description of Artificial Sequence: Synthetic oligonucleotide
  Target: LAMA2; (+) strand; PAM type: YTN; PAM sequence: TTC
tgagtgaaatattttgctct

SEQ ID NO: 315750 - DNA, 20 bp, Artificial Sequence
  Description of Artificial Sequence: Synthetic oligonucleotide
  Target: LAMA2; (+) strand; PAM type: YTN; PAM sequence: CTG
agtgaaatattttgctctgt

SEQ ID NO: 315751 - DNA, 20 bp, Artificial Sequence
  Description of Artificial Sequence: Synthetic oligonucleotide
  Target: LAMA2; (+) strand; PAM type: YTN; PAM sequence: TTT
tgctctgtttgacatctggg

SEQ ID NO: 315752 - DNA, 20 bp, Artificial Sequence
  Description of Artificial Sequence: Synthetic oligonucleotide
  Target: LAMA2; (+) strand; PAM type: YTN; PAM sequence: TTT
gctctgtttgacatctgggt

SEQ ID NO: 315753 - DNA, 20 bp, Artificial Sequence
  Description of Artificial Sequence: Synthetic oligonucleotide
  Target: LAMA2; (+) strand; PAM type: YTN; PAM sequence: TTG
ctctgtttgacatctgggtg

SEQ ID NO: 315754 - DNA, 20 bp, Artificial Sequence
  Description of Artificial Sequence: Synthetic oligonucleotide
  Target: LAMA2; (+) strand; PAM type: YTN; PAM sequence: CTC
tgtttgacatctgggtgcaa

SEQ ID NO: 315755 - DNA, 20 bp, Artificial Sequence
  Description of Artificial Sequence: Synthetic oligonucleotide
  Target: LAMA2; (+) strand; PAM type: YTN; PAM sequence: CTG
tttgacatctgggtgcaatg

SEQ ID NO: 315756 - DNA, 20 bp, Artificial Sequence
  Description of Artificial Sequence: Synthetic oligonucleotide
  Target: LAMA2; (+) strand; PAM type: YTN; PAM sequence: TTT
gacatctgggtgcaatgatg

SEQ ID NO: 315757 - DNA, 20 bp, Artificial Sequence
  Description of Artificial Sequence: Synthetic oligonucleotide
  Target: LAMA2; (+) strand; PAM type: YTN; PAM sequence: TTG
acatctgggtgcaatgatgg

SEQ ID NO: 315758 - DNA, 20 bp, Artificial Sequence
  Description of Artificial Sequence: Synthetic oligonucleotide
  Target: LAMA2; (+) strand; PAM type: YTN; PAM sequence: CTG
ggtgcaatgatggctatgtc

SEQ ID NO: 315759 - DNA, 20 bp, Artificial Sequence
  Description of Artificial Sequence: Synthetic oligonucleotide
  Target: LAMA2; (+) strand; PAM type: YTN; PAM sequence: CTA
tgtcagtgtcactttatttt

SEQ ID NO: 315760 - DNA, 20 bp, Artificial Sequence
  Description of Artificial Sequence: Synthetic oligonucleotide
  Target: LAMA2; (+) strand; PAM type: YTN; PAM sequence: CTT
tatttttctcttgtgcaagt

SEQ ID NO: 315761 - DNA, 20 bp, Artificial Sequence
  Description of Artificial Sequence: Synthetic oligonucleotide
  Target: LAMA2; (+) strand; PAM type: YTN; PAM sequence: TTT
atttttctcttgtgcaagtt

SEQ ID NO: 315762 - DNA, 20 bp, Artificial Sequence
  Description of Artificial Sequence: Synthetic oligonucleotide
  Target: LAMA2; (+) strand; PAM type: YTN; PAM sequence: TTA
tttttctcttgtgcaagttt

SEQ ID NO: 315763 - DNA, 20 bp, Artificial Sequence
  Description of Artificial Sequence: Synthetic oligonucleotide
  Target: LAMA2; (+) strand; PAM type: YTN; PAM sequence: TTT
ttctcttgtgcaagtttgat

SEQ ID NO: 315764 - DNA, 20 bp, Artificial Sequence
  Description of Artificial Sequence: Synthetic oligonucleotide
  Target: LAMA2; (+) strand; PAM type: YTN; PAM sequence: TTT
tctcttgtgcaagtttgata

SEQ ID NO: 315765 - DNA, 20 bp, Artificial Sequence
  Description of Artificial Sequence: Synthetic oligonucleotide
  Target: LAMA2; (+) strand; PAM type: YTN; PAM sequence: TTT
ctcttgtgcaagtttgataa

SEQ ID NO: 315766 - DNA, 20 bp, Artificial Sequence
  Description of Artificial Sequence: Synthetic oligonucleotide
  Target: LAMA2; (+) strand; PAM type: YTN; PAM sequence: TTC
tcttgtgcaagtttgataaa

SEQ ID NO: 315767 - DNA, 20 bp, Artificial Sequence
  Description of Artificial Sequence: Synthetic oligonucleotide
  Target: LAMA2; (+) strand; PAM type: YTN; PAM sequence: CTC
ttgtgcaagtttgataaaac

SEQ ID NO: 315768 - DNA, 20 bp, Artificial Sequence
  Description of Artificial Sequence: Synthetic oligonucleotide
  Target: LAMA2; (+) strand; PAM type: YTN; PAM sequence: CTT
gtgcaagtttgataaaactc

SEQ ID NO: 315769 - DNA, 20 bp, Artificial Sequence
  Description of Artificial Sequence: Synthetic oligonucleotide
  Target: LAMA2; (+) strand; PAM type: YTN; PAM sequence: TTG
tgcaagtttgataaaactct

SEQ ID NO: 315770 - DNA, 20 bp, Artificial Sequence
  Description of Artificial Sequence: Synthetic oligonucleotide
  Target: LAMA2; (+) strand; PAM type: YTN; PAM sequence: TTT
gataaaactctttaaatact

SEQ ID NO: 315771 - DNA, 20 bp, Artificial Sequence
  Description of Artificial Sequence: Synthetic oligonucleotide
  Target: LAMA2; (+) strand; PAM type: YTN; PAM sequence: TTG
ataaaactctttaaatacta

SEQ ID NO: 315772 - DNA, 20 bp, Artificial Sequence
  Description of Artificial Sequence: Synthetic oligonucleotide
  Target: LAMA2; (+) strand; PAM type: YTN; PAM sequence: CTC
tttaaatactaatgtgtatt

SEQ ID NO: 315773 - DNA, 20 bp, Artificial Sequence
  Description of Artificial Sequence: Synthetic oligonucleotide
  Target: LAMA2; (+) strand; PAM type: YTN; PAM sequence: CTT
taaatactaatgtgtatttt

SEQ ID NO: 315774 - DNA, 20 bp, Artificial Sequence
  Description of Artificial Sequence: Synthetic oligonucleotide
  Target: LAMA2; (+) strand; PAM type: YTN; PAM sequence: TTT
aaatactaatgtgtatttta

SEQ ID NO: 315775 - DNA, 20 bp, Artificial Sequence
  Description of Artificial Sequence: Synthetic oligonucleotide
  Target: LAMA2; (+) strand; PAM type: YTN; PAM sequence: TTA
aatactaatgtgtattttag

SEQ ID NO: 315776 - DNA, 20 bp, Artificial Sequence
  Description of Artificial Sequence: Synthetic oligonucleotide
  Target: LAMA2; (+) strand; PAM type: YTN; PAM sequence: CTA
atgtgtattttagaaaacac

SEQ ID NO: 315777 - DNA, 20 bp, Artificial Sequence
  Description of Artificial Sequence: Synthetic oligonucleotide
  Target: LAMA2; (+) strand; PAM type: YTN; PAM sequence: TTT
tagaaaacacaaattctgtt

SEQ ID NO: 315778 - DNA, 20 bp, Artificial Sequence
  Description of Artificial Sequence: Synthetic oligonucleotide
  Target: LAMA2; (+) strand; PAM type: YTN; PAM sequence: TTT
agaaaacacaaattctgtta

SEQ ID NO: 315779 - DNA, 20 bp, Artificial Sequence
  Description of Artificial Sequence: Synthetic oligonucleotide
  Target: LAMA2; (+) strand; PAM type: YTN; PAM sequence: TTA
gaaaacacaaattctgttat

SEQ ID NO: 315780 - DNA, 20 bp, Artificial Sequence
  Description of Artificial Sequence: Synthetic oligonucleotide
  Target: LAMA2; (+) strand; PAM type: YTN; PAM sequence: TTC
tgttatattccaggaggaag

SEQ ID NO: 315781 - DNA, 20 bp, Artificial Sequence
  Description of Artificial Sequence: Synthetic oligonucleotide
  Target: LAMA2; (+) strand; PAM type: YTN; PAM sequence: CTG
ttatattccaggaggaagga

SEQ ID NO: 315782 - DNA, 20 bp, Artificial Sequence
  Description of Artificial Sequence: Synthetic oligonucleotide
  Target: LAMA2; (+) strand; PAM type: YTN; PAM sequence: TTA
tattccaggaggaaggaaat

SEQ ID NO: 315783 - DNA, 20 bp, Artificial Sequence
  Description of Artificial Sequence: Synthetic oligonucleotide
  Target: LAMA2; (+) strand; PAM type: YTN; PAM sequence: TTC
caggaggaaggaaattgcct

SEQ ID NO: 315784 - DNA, 20 bp, Artificial Sequence
  Description of Artificial Sequence: Synthetic oligonucleotide
  Target: LAMA2; (+) strand; PAM type: YTN; PAM sequence: TTG
ccttaggatatgaatcagat

SEQ ID NO: 315785 - DNA, 20 bp, Artificial Sequence
  Description of Artificial Sequence: Synthetic oligonucleotide
  Target: LAMA2; (+) strand; PAM type: YTN; PAM sequence: CTT
aggatatgaatcagatttga

SEQ ID NO: 315786 - DNA, 20 bp, Artificial Sequence
  Description of Artificial Sequence: Synthetic oligonucleotide
  Target: LAMA2; (+) strand; PAM type: YTN; PAM sequence: TTA
ggatatgaatcagatttgat

SEQ ID NO: 315787 - DNA, 20 bp, Artificial Sequence
  Description of Artificial Sequence: Synthetic oligonucleotide
  Target: LAMA2; (+) strand; PAM type: YTN; PAM sequence: TTT
gataacatgaactatcttat

SEQ ID NO: 315788 - DNA, 20 bp, Artificial Sequence
  Description of Artificial Sequence: Synthetic oligonucleotide
  Target: LAMA2; (+) strand; PAM type: YTN; PAM sequence: TTG
ataacatgaactatcttatt

SEQ ID NO: 315789 - DNA, 20 bp, Artificial Sequence
  Description of Artificial Sequence: Synthetic oligonucleotide
  Target: LAMA2; (+) strand; PAM type: YTN; PAM sequence: CTA
tcttatttaattattctaaa

SEQ ID NO: 315790 - DNA, 20 bp, Artificial Sequence
  Description of Artificial Sequence: Synthetic oligonucleotide
  Target: LAMA2; (+) strand; PAM type: YTN; PAM sequence: CTT
atttaattattctaaattga

SEQ ID NO: 315791 - DNA, 20 bp, Artificial Sequence
  Description of Artificial Sequence: Synthetic oligonucleotide
  Target: LAMA2; (+) strand; PAM type: YTN; PAM sequence: TTA
tttaattattctaaattgaa

SEQ ID NO: 315792 - DNA, 20 bp, Artificial Sequence
  Description of Artificial Sequence: Synthetic oligonucleotide
  Target: LAMA2; (+) strand; PAM type: YTN; PAM sequence: TTT
aattattctaaattgaaaac

SEQ ID NO: 315793 - DNA, 20 bp, Artificial Sequence
  Description of Artificial Sequence: Synthetic oligonucleotide
  Target: LAMA2; (+) strand; PAM type: YTN; PAM sequence: TTA
attattctaaattgaaaaca

SEQ ID NO: 315794 - DNA, 20 bp, Artificial Sequence
  Description of Artificial Sequence: Synthetic oligonucleotide
  Target: LAMA2; (+) strand; PAM type: YTN; PAM sequence: TTA
ttctaaattgaaaacatcat

SEQ ID NO: 315795 - DNA, 20 bp, Artificial Sequence
  Description of Artificial Sequence: Synthetic oligonucleotide
  Target: LAMA2; (+) strand; PAM type: YTN; PAM sequence: TTC
taaattgaaaacatcatgaa

SEQ ID NO: 315796 - DNA, 20 bp, Artificial Sequence
  Description of Artificial Sequence: Synthetic oligonucleotide
  Target: LAMA2; (+) strand; PAM type: YTN; PAM sequence: CTA
aattgaaaacatcatgaaag

SEQ ID NO: 315797 - DNA, 20 bp, Artificial Sequence
  Description of Artificial Sequence: Synthetic oligonucleotide
  Target: LAMA2; (+) strand; PAM type: YTN; PAM sequence: TTG
aaaacatcatgaaagataat

SEQ ID NO: 315798 - DNA, 20 bp, Artificial Sequence
  Description of Artificial Sequence: Synthetic oligonucleotide
  Target: LAMA2; (+) strand; PAM type: YTN; PAM sequence: TTG
ggatttttccatttttattt

SEQ ID NO: 315799 - DNA, 20 bp, Artificial Sequence
  Description of Artificial Sequence: Synthetic oligonucleotide
  Target: LAMA2; (+) strand; PAM type: YTN; PAM sequence: TTT
ttccatttttattttcctct

SEQ ID NO: 315800 - DNA, 20 bp, Artificial Sequence
  Description of Artificial Sequence: Synthetic oligonucleotide
  Target: LAMA2; (+) strand; PAM type: YTN; PAM sequence: TTT
tccatttttattttcctctt

SEQ ID NO: 315801 - DNA, 20 bp, Artificial Sequence
  Description of Artificial Sequence: Synthetic oligonucleotide
  Target: LAMA2; (+) strand; PAM type: YTN; PAM sequence: TTT
ccatttttattttcctcttg

SEQ ID NO: 315802 - DNA, 20 bp, Artificial Sequence
  Description of Artificial Sequence: Synthetic oligonucleotide
  Target: LAMA2; (+) strand; PAM type: YTN; PAM sequence: TTC
catttttattttcctcttgt

SEQ ID NO: 315803 - DNA, 20 bp, Artificial Sequence
  Description of Artificial Sequence: Synthetic oligonucleotide
  Target: LAMA2; (+) strand; PAM type: YTN; PAM sequence: TTT
ttattttcctcttgtttctt

SEQ ID NO: 315804 - DNA, 20 bp, Artificial Sequence
  Description of Artificial Sequence: Synthetic oligonucleotide
  Target: LAMA2; (+) strand; PAM type: YTN; PAM sequence: TTT
tattttcctcttgtttcttg

SEQ ID NO: 315805 - DNA, 20 bp, Artificial Sequence
  Description of Artificial Sequence: Synthetic oligonucleotide
  Target: LAMA2; (+) strand; PAM type: YTN; PAM sequence: TTT
attttcctcttgtttcttgc

SEQ ID NO: 315806 - DNA, 20 bp, Artificial Sequence
  Description of Artificial Sequence: Synthetic oligonucleotide
  Target: LAMA2; (+) strand; PAM type: YTN; PAM sequence: TTA
ttttcctcttgtttcttgct

SEQ ID NO: 315807 - DNA, 20 bp, Artificial Sequence
  Description of Artificial Sequence: Synthetic oligonucleotide
  Target: LAMA2; (+) strand; PAM type: YTN; PAM sequence: TTT
tcctcttgtttcttgcttat

SEQ ID NO: 315808 - DNA, 20 bp, Artificial Sequence
  Description of Artificial Sequence: Synthetic oligonucleotide
  Target: LAMA2; (+) strand; PAM type: YTN; PAM sequence: TTT
cctcttgtttcttgcttatt

SEQ ID NO: 315809 - DNA, 20 bp, Artificial Sequence
  Description of Artificial Sequence: Synthetic oligonucleotide
  Target: LAMA2; (+) strand; PAM type: YTN; PAM sequence: TTC
ctcttgtttcttgcttattt

SEQ ID NO: 315810 - DNA, 20 bp, Artificial Sequence
  Description of Artificial Sequence: Synthetic oligonucleotide
  Target: LAMA2; (+) strand; PAM type: YTN; PAM sequence: CTC
ttgtttcttgcttatttgaa

SEQ ID NO: 315811 - DNA, 20 bp, Artificial Sequence
  Description of Artificial Sequence: Synthetic oligonucleotide
  Target: LAMA2; (+) strand; PAM type: YTN; PAM sequence: CTT
gtttcttgcttatttgaatc

SEQ ID NO: 315812 - DNA, 20 bp, Artificial Sequence
  Description of Artificial Sequence: Synthetic oligonucleotide
  Target: LAMA2; (+) strand; PAM type: YTN; PAM sequence: TTG
tttcttgcttatttgaatca

SEQ ID NO: 315813 - DNA, 20 bp, Artificial Sequence
  Description of Artificial Sequence: Synthetic oligonucleotide
  Target: LAMA2; (+) strand; PAM type: YTN; PAM sequence: TTT
cttgcttatttgaatcattc

SEQ ID NO: 315814 - DNA, 20 bp, Artificial Sequence
  Description of Artificial Sequence: Synthetic oligonucleotide
  Target: LAMA2; (+) strand; PAM type: YTN; PAM sequence: TTC
ttgcttatttgaatcattcg

SEQ ID NO: 315815 - DNA, 20 bp, Artificial Sequence
  Description of Artificial Sequence: Synthetic oligonucleotide
  Target: LAMA2; (+) strand; PAM type: YTN; PAM sequence: CTT
gcttatttgaatcattcgtt

SEQ ID NO: 315816 - DNA, 20 bp, Artificial Sequence
  Description of Artificial Sequence: Synthetic oligonucleotide
  Target: LAMA2; (+) strand; PAM type: YTN; PAM sequence: TTG
cttatttgaatcattcgttt

SEQ ID NO: 315817 - DNA, 20 bp, Artificial Sequence
  Description of Artificial Sequence: Synthetic oligonucleotide
  Target: LAMA2; (+) strand; PAM type: YTN; PAM sequence: CTT
atttgaatcattcgttttat

SEQ ID NO: 315818 - DNA, 20 bp, Artificial Sequence
  Description of Artificial Sequence: Synthetic oligonucleotide
  Target: LAMA2; (+) strand; PAM type: YTN; PAM sequence: TTA
tttgaatcattcgttttatt

SEQ ID NO: 315819 - DNA, 20 bp, Artificial Sequence
  Description of Artificial Sequence: Synthetic oligonucleotide
  Target: LAMA2; (+) strand; PAM type: YTN; PAM sequence: TTT
gaatcattcgttttattctt

SEQ ID NO: 315820 - DNA, 20 bp, Artificial Sequence
  Description of Artificial Sequence: Synthetic oligonucleotide
  Target: LAMA2; (+) strand; PAM type: YTN; PAM sequence: TTG
aatcattcgttttattcttc

SEQ ID NO: 315821 - DNA, 20 bp, Artificial Sequence
  Description of Artificial Sequence: Synthetic oligonucleotide
  Target: LAMA2; (+) strand; PAM type: YTN; PAM sequence: TTC
gttttattcttctttctact

SEQ ID NO: 315822 - DNA, 20 bp, Artificial Sequence
  Description of Artificial Sequence: Synthetic oligonucleotide
  Target: LAMA2; (+) strand; PAM type: YTN; PAM sequence: TTT
tattcttctttctacttagg

SEQ ID NO: 315823 - DNA, 20 bp, Artificial Sequence
  Description of Artificial Sequence: Synthetic oligonucleotide
  Target: LAMA2; (+) strand; PAM type: YTN; PAM sequence: TTT
attcttctttctacttaggc

SEQ ID NO: 315824 - DNA, 20 bp, Artificial Sequence
  Description of Artificial Sequence: Synthetic oligonucleotide
  Target: LAMA2; (+) strand; PAM type: YTN; PAM sequence: TTA
ttcttctttctacttaggct

SEQ ID NO: 315825 - DNA, 20 bp, Artificial Sequence
  Description of Artificial Sequence: Synthetic oligonucleotide
  Target: LAMA2; (+) strand; PAM type: YTN; PAM sequence: TTC
ttctttctacttaggctaag

SEQ ID NO: 315826 - DNA, 20 bp, Artificial Sequence
  Description of Artificial Sequence: Synthetic oligonucleotide
  Target: LAMA2; (+) strand; PAM type: YTN; PAM sequence: CTT
ctttctacttaggctaagct

SEQ ID NO: 315827 - DNA, 20 bp, Artificial Sequence
  Description of Artificial Sequence: Synthetic oligonucleotide
  Target: LAMA2; (+) strand; PAM type: YTN; PAM sequence: TTC
tttctacttaggctaagctc

SEQ ID NO: 315828 - DNA, 20 bp, Artificial Sequence
  Description of Artificial Sequence: Synthetic oligonucleotide
  Target: LAMA2; (+) strand; PAM type: YTN; PAM sequence: CTT
tctacttaggctaagctctc

SEQ ID NO: 315829 - DNA, 20 bp, Artificial Sequence
  Description of Artificial Sequence: Synthetic oligonucleotide
  Target: LAMA2; (+) strand; PAM type: YTN; PAM sequence: TTT
ctacttaggctaagctctca

SEQ ID NO: 315830 - DNA, 20 bp, Artificial Sequence
  Description of Artificial Sequence: Synthetic oligonucleotide
  Target: LAMA2; (+) strand; PAM type: YTN; PAM sequence: TTC
tacttaggctaagctctcaa

SEQ ID NO: 315831 - DNA, 20 bp, Artificial Sequence
  Description of Artificial Sequence: Synthetic oligonucleotide
  Target: LAMA2; (+) strand; PAM type: YTN; PAM sequence: CTA
cttaggctaagctctcaaaa

SEQ ID NO: 315832 - DNA, 20 bp, Artificial Sequence
  Description of Artificial Sequence: Synthetic oligonucleotide
  Target: LAMA2; (+) strand; PAM type: YTN; PAM sequence: CTT
aggctaagctctcaaaagga

SEQ ID NO: 315833 - DNA, 20 bp, Artificial Sequence
  Description of Artificial Sequence: Synthetic oligonucleotide
  Target: LAMA2; (+) strand; PAM type: YTN; PAM sequence: TTA
ggctaagctctcaaaaggaa

SEQ ID NO: 315834 - DNA, 20 bp, Artificial Sequence
  Description of Artificial Sequence: Synthetic oligonucleotide
  Target: LAMA2; (+) strand; PAM type: YTN; PAM sequence: CTA
agctctcaaaaggaaaggag

SEQ ID NO: 315835 - DNA, 20 bp, Artificial Sequence
  Description of Artificial Sequence: Synthetic oligonucleotide
  Target: LAMA2; (+) strand; PAM type: YTN; PAM sequence: CTC
tcaaaaggaaaggagatgta

SEQ ID NO: 315836 - DNA, 20 bp, Artificial Sequence
  Description of Artificial Sequence: Synthetic oligonucleotide
  Target: LAMA2; (+) strand; PAM type: YTN; PAM sequence: CTC
aaaaggaaaggagatgtaat

SEQ ID NO: 315837 - DNA, 20 bp, Artificial Sequence
  Description of Artificial Sequence: Synthetic oligonucleotide
  Target: LAMA2; (+) strand; PAM type: YTN; PAM sequence: TTC
aatgtatgtaagtttctaag

SEQ ID NO: 315838 - DNA, 20 bp, Artificial Sequence
  Description of Artificial Sequence: Synthetic oligonucleotide
  Target: LAMA2; (+) strand; PAM type: YTN; PAM sequence: TTT
ctaagtgtaggtatttttca

SEQ ID NO: 315839 - DNA, 20 bp, Artificial Sequence
  Description of Artificial Sequence: Synthetic oligonucleotide
  Target: LAMA2; (+) strand; PAM type: YTN; PAM sequence: TTC
taagtgtaggtatttttcaa

SEQ ID NO: 315840 - DNA, 20 bp, Artificial Sequence
  Description of Artificial Sequence: Synthetic oligonucleotide
  Target: LAMA2; (+) strand; PAM type: YTN; PAM sequence: CTA
agtgtaggtatttttcaaca

SEQ ID NO: 315841 - DNA, 20 bp, Artificial Sequence
  Description of Artificial Sequence: Synthetic oligonucleotide
  Target: LAMA2; (+) strand; PAM type: YTN; PAM sequence: TTT
ttcaacaaacacataaacaa

SEQ ID NO: 315842 - DNA, 20 bp, Artificial Sequence
  Description of Artificial Sequence: Synthetic oligonucleotide
  Target: LAMA2; (+) strand; PAM type: YTN; PAM sequence: TTT
tcaacaaacacataaacaat

SEQ ID NO: 315843 - DNA, 20 bp, Artificial Sequence
  Description of Artificial Sequence: Synthetic oligonucleotide
  Target: LAMA2; (+) strand; PAM type: YTN; PAM sequence: TTT
caacaaacacataaacaatc

SEQ ID NO: 315844 - DNA, 20 bp, Artificial Sequence
  Description of Artificial Sequence: Synthetic oligonucleotide
  Target: LAMA2; (+) strand; PAM type: YTN; PAM sequence: TTC
aacaaacacataaacaatca

SEQ ID NO: 315845 - DNA, 20 bp, Artificial Sequence
  Description of Artificial Sequence: Synthetic oligonucleotide
  Target: LAMA2; (+) strand; PAM type: YTN; PAM sequence: TTA
ttacttatgtcacataaaaa

SEQ ID NO: 315846 - DNA, 20 bp, Artificial Sequence
  Description of Artificial Sequence: Synthetic oligonucleotide
  Target: LAMA2; (+) strand; PAM type: YTN; PAM sequence: TTA
cttatgtcacataaaaactg

SEQ ID NO: 315847 - DNA, 20 bp, Artificial Sequence
  Description of Artificial Sequence: Synthetic oligonucleotide
  Target: LAMA2; (+) strand; PAM type: YTN; PAM sequence: CTT
atgtcacataaaaactgtgt

SEQ ID NO: 315848 - DNA, 20 bp, Artificial Sequence
  Description of Artificial Sequence: Synthetic oligonucleotide
  Target: LAMA2; (+) strand; PAM type: YTN; PAM sequence: TTA
tgtcacataaaaactgtgtt

SEQ ID NO: 315849 - DNA, 20 bp, Artificial Sequence
  Description of Artificial Sequence: Synthetic oligonucleotide
  Target: LAMA2; (+) strand; PAM type: YTN; PAM sequence: CTG
tgtttaaacagattaaaaat

SEQ ID NO: 315850 - DNA, 20 bp, Artificial Sequence
  Description of Artificial Sequence: Synthetic oligonucleotide
  Target: LAMA2; (+) strand; PAM type: YTN; PAM sequence: TTT
aaacagattaaaaatatttt

SEQ ID NO: 315851 - DNA, 20 bp, Artificial Sequence
  Description of Artificial Sequence: Synthetic oligonucleotide
  Target: LAMA2; (+) strand; PAM type: YTN; PAM sequence: TTA
aacagattaaaaatattttc

SEQ ID NO: 315852 - DNA, 20 bp, Artificial Sequence
  Description of Artificial Sequence: Synthetic oligonucleotide
  Target: LAMA2; (+) strand; PAM type: YTN; PAM sequence: TTA
aaaatattttctggagagtt

SEQ ID NO: 315853 - DNA, 20 bp, Artificial Sequence
  Description of Artificial Sequence: Synthetic oligonucleotide
  Target: LAMA2; (+) strand; PAM type: YTN; PAM sequence: TTT
tctggagagttttatttatt

SEQ ID NO: 315854 - DNA, 20 bp, Artificial Sequence
  Description of Artificial Sequence: Synthetic oligonucleotide
  Target: LAMA2; (+) strand; PAM type: YTN; PAM sequence: TTT
ctggagagttttatttattt

SEQ ID NO: 315855 - DNA, 20 bp, Artificial Sequence
  Description of Artificial Sequence: Synthetic oligonucleotide
  Target: LAMA2; (+) strand; PAM type: YTN; PAM sequence: TTC
tggagagttttatttatttt

SEQ ID NO: 315856 - DNA, 20 bp, Artificial Sequence
  Description of Artificial Sequence: Synthetic oligonucleotide
  Target: LAMA2; (+) strand; PAM type: YTN; PAM sequence: CTG
gagagttttatttattttac

SEQ ID NO: 315857 - DNA, 20 bp, Artificial Sequence
  Description of Artificial Sequence: Synthetic oligonucleotide
  Target: LAMA2; (+) strand; PAM type: YTN; PAM sequence: TTT
tatttattttacaatgttta

SEQ ID NO: 315858 - DNA, 20 bp, Artificial Sequence
  Description of Artificial Sequence: Synthetic oligonucleotide
  Target: LAMA2; (+) strand; PAM type: YTN; PAM sequence: TTT
atttattttacaatgtttac

SEQ ID NO: 315859 - DNA, 20 bp, Artificial Sequence
  Description of Artificial Sequence: Synthetic oligonucleotide
  Target: LAMA2; (+) strand; PAM type: YTN; PAM sequence: TTA
tttattttacaatgtttaca

SEQ ID NO: 315860 - DNA, 20 bp, Artificial Sequence
  Description of Artificial Sequence: Synthetic oligonucleotide
  Target: LAMA2; (+) strand; PAM type: YTN; PAM sequence: TTT
attttacaatgtttacaagt

SEQ ID NO: 315861 - DNA, 20 bp, Artificial Sequence
  Description of Artificial Sequence: Synthetic oligonucleotide
  Target: LAMA2; (+) strand; PAM type: YTN; PAM sequence: TTA
ttttacaatgtttacaagtg

SEQ ID NO: 315862 - DNA, 20 bp, Artificial Sequence
  Description of Artificial Sequence: Synthetic oligonucleotide
  Target: LAMA2; (+) strand; PAM type: YTN; PAM sequence: TTT
tacaatgtttacaagtgaat

SEQ ID NO: 315863 - DNA, 20 bp, Artificial Sequence
  Description of Artificial Sequence: Synthetic oligonucleotide
  Target: LAMA2; (+) strand; PAM type: YTN; PAM sequence: TTT
acaatgtttacaagtgaatt

SEQ ID NO: 315864 - DNA, 20 bp, Artificial Sequence
  Description of Artificial Sequence: Synthetic oligonucleotide
  Target: LAMA2; (+) strand; PAM type: YTN; PAM sequence: TTA
caatgtttacaagtgaattg

SEQ ID NO: 315865 - DNA, 20 bp, Artificial Sequence
  Description of Artificial Sequence: Synthetic oligonucleotide
  Target: LAMA2; (+) strand; PAM type: YTN; PAM sequence: TTT
acaagtgaattgtcaagatg

SEQ ID NO: 315866 - DNA, 20 bp, Artificial Sequence
  Description of Artificial Sequence: Synthetic oligonucleotide
  Target: LAMA2; (+) strand; PAM type: YTN; PAM sequence: TTA
caagtgaattgtcaagatgt

SEQ ID NO: 315867 - DNA, 20 bp, Artificial Sequence
  Description of Artificial Sequence: Synthetic oligonucleotide
  Target: LAMA2; (+) strand; PAM type: YTN; PAM sequence: TTG
tcaagatgtctcccaatatt

SEQ ID NO: 315868 - DNA, 20 bp, Artificial Sequence
  Description of Artificial Sequence: Synthetic oligonucleotide
  Target: LAMA2; (+) strand; PAM type: YTN; PAM sequence: CTC
ccaatattatttcctttcca

SEQ ID NO: 315869 - DNA, 20 bp, Artificial Sequence
  Description of Artificial Sequence: Synthetic oligonucleotide
  Target: LAMA2; (+) strand; PAM type: YTN; PAM sequence: TTA
tttcctttccagacagcaat

SEQ ID NO: 315870 - DNA, 20 bp, Artificial Sequence
  Description of Artificial Sequence: Synthetic oligonucleotide
  Target: LAMA2; (+) strand; PAM type: YTN; PAM sequence: TTT
cctttccagacagcaatctt

SEQ ID NO: 315871 - DNA, 20 bp, Artificial Sequence
  Description of Artificial Sequence: Synthetic oligonucleotide
  Target: LAMA2; (+) strand; PAM type: YTN; PAM sequence: TTC
ctttccagacagcaatcttt

SEQ ID NO: 315872 - DNA, 20 bp, Artificial Sequence
  Description of Artificial Sequence: Synthetic oligonucleotide
  Target: LAMA2; (+) strand; PAM type: YTN; PAM sequence: CTT
tccagacagcaatctttaaa

SEQ ID NO: 315873 - DNA, 20 bp, Artificial Sequence
  Description of Artificial Sequence: Synthetic oligonucleotide
  Target: LAMA2; (+) strand; PAM type: YTN; PAM sequence: TTT
ccagacagcaatctttaaat

SEQ ID NO: 315874 - DNA, 20 bp, Artificial Sequence
  Description of Artificial Sequence: Synthetic oligonucleotide
  Target: LAMA2; (+) strand; PAM type: YTN; PAM sequence: TTC
cagacagcaatctttaaatc

SEQ ID NO: 315875 - DNA, 20 bp, Artificial Sequence
  Description of Artificial Sequence: Synthetic oligonucleotide
  Target: LAMA2; (+) strand; PAM type: YTN; PAM sequence: CTT
taaatcctgcttgagtcatc

SEQ ID NO: 315876 - DNA, 20 bp, Artificial Sequence
  Description of Artificial Sequence: Synthetic oligonucleotide
  Target: LAMA2; (+) strand; PAM type: YTN; PAM sequence: TTT
aaatcctgcttgagtcatct

SEQ ID NO: 315877 - DNA, 20 bp, Artificial Sequence
  Description of Artificial Sequence: Synthetic oligonucleotide
  Target: LAMA2; (+) strand; PAM type: YTN; PAM sequence: TTA
aatcctgcttgagtcatctt

SEQ ID NO: 315878 - DNA, 20 bp, Artificial Sequence
  Description of Artificial Sequence: Synthetic oligonucleotide
  Target: LAMA2; (+) strand; PAM type: YTN; PAM sequence: CTG
cttgagtcatcttttattcc

SEQ ID NO: 315879 - DNA, 20 bp, Artificial Sequence
  Description of Artificial Sequence: Synthetic oligonucleotide
  Target: LAMA2; (+) strand; PAM type: YTN; PAM sequence: CTT
gagtcatcttttattccagt

SEQ ID NO: 315880 - DNA, 20 bp, Artificial Sequence
  Description of Artificial Sequence: Synthetic oligonucleotide
  Target: LAMA2; (+) strand; PAM type: YTN; PAM sequence: TTG
agtcatcttttattccagtt

SEQ ID NO: 315881 - DNA, 20 bp, Artificial Sequence
  Description of Artificial Sequence: Synthetic oligonucleotide
  Target: LAMA2; (+) strand; PAM type: YTN; PAM sequence: CTT
ttattccagttttccttttt

SEQ ID NO: 315882 - DNA, 20 bp, Artificial Sequence
  Description of Artificial Sequence: Synthetic oligonucleotide
  Target: LAMA2; (+) strand; PAM type: YTN; PAM sequence: TTT
tattccagttttcctttttt

SEQ ID NO: 315883 - DNA, 20 bp, Artificial Sequence
  Description of Artificial Sequence: Synthetic oligonucleotide
  Target: LAMA2; (+) strand; PAM type: YTN; PAM sequence: TTT
attccagttttccttttttt

SEQ ID NO: 315884 - DNA, 20 bp, Artificial Sequence
  Description of Artificial Sequence: Synthetic oligonucleotide
  Target: LAMA2; (+) strand; PAM type: YTN; PAM sequence: TTA
ttccagttttcctttttttg

SEQ ID NO: 315885 - DNA, 20 bp, Artificial Sequence
  Description of Artificial Sequence: Synthetic oligonucleotide
  Target: LAMA2; (+) strand; PAM type: YTN; PAM sequence: TTC
cagttttcctttttttgagt

SEQ ID NO: 315886 - DNA, 20 bp, Artificial Sequence
  Description of Artificial Sequence: Synthetic oligonucleotide
  Target: LAMA2; (+) strand; PAM type: YTN; PAM sequence: TTT
tcctttttttgagtgtaaag

SEQ ID NO: 315887 - DNA, 20 bp, Artificial Sequence
  Description of Artificial Sequence: Synthetic oligonucleotide
  Target: LAMA2; (+) strand; PAM type: YTN; PAM sequence: TTT
cctttttttgagtgtaaagg

SEQ ID NO: 315888 - DNA, 20 bp, Artificial Sequence
  Description of Artificial Sequence: Synthetic oligonucleotide
  Target: LAMA2; (+) strand; PAM type: YTN; PAM sequence: TTC
ctttttttgagtgtaaaggc

SEQ ID NO: 315889 - DNA, 20 bp, Artificial Sequence
  Description of Artificial Sequence: Synthetic oligonucleotide
  Target: LAMA2; (+) strand; PAM type: YTN; PAM sequence: CTT
tttttgagtgtaaaggcaat

SEQ ID NO: 315890 - DNA, 20 bp, Artificial Sequence
  Description of Artificial Sequence: Synthetic oligonucleotide
  Target: LAMA2; (+) strand; PAM type: YTN; PAM sequence: TTT
ttttgagtgtaaaggcaata

SEQ ID NO: 315891 - DNA, 20 bp, Artificial Sequence
  Description of Artificial Sequence: Synthetic oligonucleotide
  Target: LAMA2; (+) strand; PAM type: YTN; PAM sequence: TTT
tttgagtgtaaaggcaataa

SEQ ID NO: 315892 - DNA, 20 bp, Artificial Sequence
  Description of Artificial Sequence: Synthetic oligonucleotide
  Target: LAMA2; (+) strand; PAM type: YTN; PAM sequence: TTT
ttgagtgtaaaggcaataaa

SEQ ID NO: 315893 - DNA, 20 bp, Artificial Sequence
  Description of Artificial Sequence: Synthetic oligonucleotide
  Target: LAMA2; (+) strand; PAM type: YTN; PAM sequence: TTT
tgagtgtaaaggcaataaat

SEQ ID NO: 315894 - DNA, 20 bp, Artificial Sequence
  Description of Artificial Sequence: Synthetic oligonucleotide
  Target: LAMA2; (+) strand; PAM type: YTN; PAM sequence: TTT
gagtgtaaaggcaataaatt

SEQ ID NO: 315895 - DNA, 20 bp, Artificial Sequence
  Description of Artificial Sequence: Synthetic oligonucleotide
  Target: LAMA2; (+) strand; PAM type: YTN; PAM sequence: TTG
agtgtaaaggcaataaatta

SEQ ID NO: 315896 - DNA, 20 bp, Artificial Sequence
  Description of Artificial Sequence: Synthetic oligonucleotide
  Target: LAMA2; (+) strand; PAM type: YTN; PAM sequence: TTA
taacaataaaagacttatac

SEQ ID NO: 315897 - DNA, 20 bp, Artificial Sequence
  Description of Artificial Sequence: Synthetic oligonucleotide
  Target: LAMA2; (+) strand; PAM type: YTN; PAM sequence: CTT
atactctttgtcccatagtt

SEQ ID NO: 315898 - DNA, 20 bp, Artificial Sequence
  Description of Artificial Sequence: Synthetic oligonucleotide
  Target: LAMA2; (+) strand; PAM type: YTN; PAM sequence: TTA
tactctttgtcccatagttt

SEQ ID NO: 315899 - DNA, 20 bp, Artificial Sequence
  Description of Artificial Sequence: Synthetic oligonucleotide
  Target: LAMA2; (+) strand; PAM type: YTN; PAM sequence: CTC
tttgtcccatagtttctctt

SEQ ID NO: 315900 - DNA, 20 bp, Artificial Sequence
  Description of Artificial Sequence: Synthetic oligonucleotide
  Target: LAMA2; (+) strand; PAM type: YTN; PAM sequence: CTT
tgtcccatagtttctctttt

SEQ ID NO: 315901 - DNA, 20 bp, Artificial Sequence
  Description of Artificial Sequence: Synthetic oligonucleotide
  Target: LAMA2; (+) strand; PAM type: YTN; PAM sequence: TTT
gtcccatagtttctcttttc

SEQ ID NO: 315902 - DNA, 20 bp, Artificial Sequence
  Description of Artificial Sequence: Synthetic oligonucleotide
  Target: LAMA2; (+) strand; PAM type: YTN; PAM sequence: TTG
tcccatagtttctcttttct

SEQ ID NO: 315903 - DNA, 20 bp, Artificial Sequence
  Description of Artificial Sequence: Synthetic oligonucleotide
  Target: LAMA2; (+) strand; PAM type: YTN; PAM sequence: TTT
ctcttttctgttgaaatata

SEQ ID NO: 315904 - DNA, 20 bp, Artificial Sequence
  Description of Artificial Sequence: Synthetic oligonucleotide
  Target: LAMA2; (+) strand; PAM type: YTN; PAM sequence: TTC
tcttttctgttgaaatatag

SEQ ID NO: 315905 - DNA, 20 bp, Artificial Sequence
  Description of Artificial Sequence: Synthetic oligonucleotide
  Target: LAMA2; (+) strand; PAM type: YTN; PAM sequence: CTC
ttttctgttgaaatatagct

SEQ ID NO: 315906 - DNA, 20 bp, Artificial Sequence
  Description of Artificial Sequence: Synthetic oligonucleotide
  Target: LAMA2; (+) strand; PAM type: YTN; PAM sequence: CTT
ttctgttgaaatatagcttg

SEQ ID NO: 315907 - DNA, 20 bp, Artificial Sequence
  Description of Artificial Sequence: Synthetic oligonucleotide
  Target: LAMA2; (+) strand; PAM type: YTN; PAM sequence: TTT
tctgttgaaatatagcttgc

SEQ ID NO: 315908 - DNA, 20 bp, Artificial Sequence
  Description of Artificial Sequence: Synthetic oligonucleotide
  Target: LAMA2; (+) strand; PAM type: YTN; PAM sequence: TTT
ctgttgaaatatagcttgct

SEQ ID NO: 315909 - DNA, 20 bp, Artificial Sequence
  Description of Artificial Sequence: Synthetic oligonucleotide
  Target: LAMA2; (+) strand; PAM type: YTN; PAM sequence: TTC
tgttgaaatatagcttgctc

SEQ ID NO: 315910 - DNA, 20 bp, Artificial Sequence
  Description of Artificial Sequence: Synthetic oligonucleotide
  Target: LAMA2; (+) strand; PAM type: YTN; PAM sequence: CTG
ttgaaatatagcttgctctt

SEQ ID NO: 315911 - DNA, 20 bp, Artificial Sequence
  Description of Artificial Sequence: Synthetic oligonucleotide
  Target: LAMA2; (+) strand; PAM type: YTN; PAM sequence: TTG
aaatatagcttgctctttgg

SEQ ID NO: 315912 - DNA, 20 bp, Artificial Sequence
  Description of Artificial Sequence: Synthetic oligonucleotide
  Target: LAMA2; (+) strand; PAM type: YTN; PAM sequence: CTT
gctctttggaatattaacat

SEQ ID NO: 315913 - DNA, 20 bp, Artificial Sequence
  Description of Artificial Sequence: Synthetic oligonucleotide
  Target: LAMA2; (+) strand; PAM type: YTN; PAM sequence: TTG
ctctttggaatattaacatg

SEQ ID NO: 315914 - DNA, 20 bp, Artificial Sequence
  Description of Artificial Sequence: Synthetic oligonucleotide
  Target: LAMA2; (+) strand; PAM type: YTN; PAM sequence: CTC
tttggaatattaacatgtaa

SEQ ID NO: 315915 - DNA, 20 bp, Artificial Sequence
  Description of Artificial Sequence: Synthetic oligonucleotide
  Target: LAMA2; (+) strand; PAM type: YTN; PAM sequence: CTT
tggaatattaacatgtaaac

SEQ ID NO: 315916 - DNA, 20 bp, Artificial Sequence
  Description of Artificial Sequence: Synthetic oligonucleotide
  Target: LAMA2; (+) strand; PAM type: YTN; PAM sequence: TTT
ggaatattaacatgtaaacc

SEQ ID NO: 315917 - DNA, 20 bp, Artificial Sequence
  Description of Artificial Sequence: Synthetic oligonucleotide
  Target: LAMA2; (+) strand; PAM type: YTN; PAM sequence: TTG
gaatattaacatgtaaacca

SEQ ID NO: 315918 - DNA, 20 bp, Artificial Sequence
  Description of Artificial Sequence: Synthetic oligonucleotide
  Target: LAMA2; (+) strand; PAM type: YTN; PAM sequence: TTA
acatgtaaaccagaggtttt

SEQ ID NO: 315919 - DNA, 20 bp, Artificial Sequence
  Description of Artificial Sequence: Synthetic oligonucleotide
  Target: LAMA2; (+) strand; PAM type: YTN; PAM sequence: TTT
ttttttttttttttttttga

SEQ ID NO: 315920 - DNA, 20 bp, Artificial Sequence
  Description of Artificial Sequence: Synthetic oligonucleotide
  Target: LAMA2; (+) strand; PAM type: YTN; PAM sequence: TTT
tttttttttttttttttgaa

SEQ ID NO: 315921 - DNA, 20 bp, Artificial Sequence
  Description of Artificial Sequence: Synthetic oligonucleotide
  Target: LAMA2; (+) strand; PAM type: YTN; PAM sequence: TTT
ttttttttttttttttgaac

SEQ ID NO: 315922 - DNA, 20 bp, Artificial Sequence
  Description of Artificial Sequence: Synthetic oligonucleotide
  Target: LAMA2; (+) strand; PAM type: YTN; PAM sequence: TTT
tttttttttttttttgaaca

SEQ ID NO: 315923 - DNA, 20 bp, Artificial Sequence
  Description of Artificial Sequence: Synthetic oligonucleotide
  Target: LAMA2; (+) strand; PAM type: YTN; PAM sequence: TTT
ttttttttttttttgaacaa

SEQ ID NO: 315924 - DNA, 20 bp, Artificial Sequence
  Description of Artificial Sequence: Synthetic oligonucleotide
  Target: LAMA2; (+) strand; PAM type: YTN; PAM sequence: TTT
tttttttttttttgaacaat

SEQ ID NO: 315925 - DNA, 20 bp, Artificial Sequence
  Description of Artificial Sequence: Synthetic oligonucleotide
  Target: LAMA2; (+) strand; PAM type: YTN; PAM sequence: TTT
ttttttttttttgaacaatc

SEQ ID NO: 315926 - DNA, 20 bp, Artificial Sequence
  Description of Artificial Sequence: Synthetic oligonucleotide
  Target: LAMA2; (+) strand; PAM type: YTN; PAM sequence: TTT
tttttttttttgaacaatct

SEQ ID NO: 315927 - DNA, 20 bp, Artificial Sequence
  Description of Artificial Sequence: Synthetic oligonucleotide
  Target: LAMA2; (+) strand; PAM type: YTN; PAM sequence: TTT
ttttttttttgaacaatctg

SEQ ID NO: 315928 - DNA, 20 bp, Artificial Sequence
  Description of Artificial Sequence: Synthetic oligonucleotide
  Target: LAMA2; (+) strand; PAM type: YTN; PAM sequence: TTT
tttttttttgaacaatctga

SEQ ID NO: 315929 - DNA, 20 bp, Artificial Sequence
  Description of Artificial Sequence: Synthetic oligonucleotide
  Target: LAMA2; (+) strand; PAM type: YTN; PAM sequence: TTT
ttttttttgaacaatctgac

SEQ ID NO: 315930 - DNA, 20 bp, Artificial Sequence
  Description of Artificial Sequence: Synthetic oligonucleotide
  Target: LAMA2; (+) strand; PAM type: YTN; PAM sequence: TTT
tttttttgaacaatctgact

SEQ ID NO: 315931 - DNA, 20 bp, Artificial Sequence
  Description of Artificial Sequence: Synthetic oligonucleotide
  Target: LAMA2; (+) strand; PAM type: YTN; PAM sequence: TTT
ttttttgaacaatctgacta

SEQ ID NO: 315932 - DNA, 20 bp, Artificial Sequence
  Description of Artificial Sequence: Synthetic oligonucleotide
  Target: LAMA2; (+) strand; PAM type: YTN; PAM sequence: TTT
tttttgaacaatctgactat

SEQ ID NO: 315933 - DNA, 20 bp, Artificial Sequence
  Description of Artificial Sequence: Synthetic oligonucleotide
  Target: LAMA2; (+) strand; PAM type: YTN; PAM sequence: TTT
ttttgaacaatctgactatt

SEQ ID NO: 315934 - DNA, 20 bp, Artificial Sequence
  Description of Artificial Sequence: Synthetic oligonucleotide
  Target: LAMA2; (+) strand; PAM type: YTN; PAM sequence: TTT
tttgaacaatctgactattc

SEQ ID NO: 315935 - DNA, 20 bp, Artificial Sequence
  Description of Artificial Sequence: Synthetic oligonucleotide
  Target: LAMA2; (+) strand; PAM type: YTN; PAM sequence: TTT
ttgaacaatctgactattct

SEQ ID NO: 315936 - DNA, 20 bp, Artificial Sequence
  Description of Artificial Sequence: Synthetic oligonucleotide
  Target: LAMA2; (+) strand; PAM type: YTN; PAM sequence: TTT
tgaacaatctgactattcta

SEQ ID NO: 315937 - DNA, 20 bp, Artificial Sequence
  Description of Artificial Sequence: Synthetic oligonucleotide
  Target: LAMA2; (+) strand; PAM type: YTN; PAM sequence: TTT
gaacaatctgactattctaa

SEQ ID NO: 315938 - DNA, 20 bp, Artificial Sequence
  Description of Artificial Sequence: Synthetic oligonucleotide
  Target: LAMA2; (+) strand; PAM type: YTN; PAM sequence: TTG
aacaatctgactattctaaa

SEQ ID NO: 315939 - DNA, 20 bp, Artificial Sequence
  Description of Artificial Sequence: Synthetic oligonucleotide
  Target: LAMA2; (+) strand; PAM type: YTN; PAM sequence: CTG
actattctaaaacacttttt

SEQ ID NO: 315940 - DNA, 20 bp, Artificial Sequence
  Description of Artificial Sequence: Synthetic oligonucleotide
  Target: LAMA2; (+) strand; PAM type: YTN; PAM sequence: CTA
ttctaaaacactttttagga

SEQ ID NO: 315941 - DNA, 20 bp, Artificial Sequence
  Description of Artificial Sequence: Synthetic oligonucleotide
  Target: LAMA2; (+) strand; PAM type: YTN; PAM sequence: TTC
taaaacactttttaggatat

SEQ ID NO: 315942 - DNA, 20 bp, Artificial Sequence
  Description of Artificial Sequence: Synthetic oligonucleotide
  Target: LAMA2; (+) strand; PAM type: YTN; PAM sequence: CTA
aaacactttttaggatatca

SEQ ID NO: 315943 - DNA, 20 bp, Artificial Sequence
  Description of Artificial Sequence: Synthetic oligonucleotide
  Target: LAMA2; (+) strand; PAM type: YTN; PAM sequence: CTT
tttaggatatcactaattgt

SEQ ID NO: 315944 - DNA, 20 bp, Artificial Sequence
  Description of Artificial Sequence: Synthetic oligonucleotide
  Target: LAMA2; (+) strand; PAM type: YTN; PAM sequence: TTT
ttaggatatcactaattgtc

SEQ ID NO: 315945 - DNA, 20 bp, Artificial Sequence
  Description of Artificial Sequence: Synthetic oligonucleotide
  Target: LAMA2; (+) strand; PAM type: YTN; PAM sequence: TTT
taggatatcactaattgtca

SEQ ID NO: 315946 - DNA, 20 bp, Artificial Sequence
  Description of Artificial Sequence: Synthetic oligonucleotide
  Target: LAMA2; (+) strand; PAM type: YTN; PAM sequence: TTT
aggatatcactaattgtcaa

SEQ ID NO: 315947 - DNA, 20 bp, Artificial Sequence
  Description of Artificial Sequence: Synthetic oligonucleotide
  Target: LAMA2; (+) strand; PAM type: YTN; PAM sequence: TTA
ggatatcactaattgtcaat

SEQ ID NO: 315948 - DNA, 20 bp, Artificial Sequence
  Description of Artificial Sequence: Synthetic oligonucleotide
  Target: LAMA2; (+) strand; PAM type: YTN; PAM sequence: CTA
attgtcaataaggaattgag

SEQ ID NO: 315949 - DNA, 20 bp, Artificial Sequence
  Description of Artificial Sequence: Synthetic oligonucleotide
  Target: LAMA2; (+) strand; PAM type: YTN; PAM sequence: TTG
tcaataaggaattgagatcc

SEQ ID NO: 315950 - DNA, 20 bp, Artificial Sequence
  Description of Artificial Sequence: Synthetic oligonucleotide
  Target: LAMA2; (+) strand; PAM type: YTN; PAM sequence: TTG
agatccacagataaacttat

SEQ ID NO: 315951 - DNA, 20 bp, Artificial Sequence
  Description of Artificial Sequence: Synthetic oligonucleotide
  Target: LAMA2; (+) strand; PAM type: YTN; PAM sequence: CTT
atcaggaacagaaaattgtt

SEQ ID NO: 315952 - DNA, 20 bp, Artificial Sequence
  Description of Artificial Sequence: Synthetic oligonucleotide
  Target: LAMA2; (+) strand; PAM type: YTN; PAM sequence: TTA
tcaggaacagaaaattgttt

SEQ ID NO: 315953 - DNA, 20 bp, Artificial Sequence
  Description of Artificial Sequence: Synthetic oligonucleotide
  Target: LAMA2; (+) strand; PAM type: YTN; PAM sequence: TTG
ttttgaatacatttttaata

SEQ ID NO: 315954 - DNA, 20 bp, Artificial Sequence
  Description of Artificial Sequence: Synthetic oligonucleotide
  Target: LAMA2; (+) strand; PAM type: YTN; PAM sequence: TTT
tgaatacatttttaatattt

SEQ ID NO: 315955 - DNA, 20 bp, Artificial Sequence
  Description of Artificial Sequence: Synthetic oligonucleotide
  Target: LAMA2; (+) strand; PAM type: YTN; PAM sequence: TTT
gaatacatttttaatattta

SEQ ID NO: 315956 - DNA, 20 bp, Artificial Sequence
  Description of Artificial Sequence: Synthetic oligonucleotide
  Target: LAMA2; (+) strand; PAM type: YTN; PAM sequence: TTG
aatacatttttaatatttaa

SEQ ID NO: 315957 - DNA, 20 bp, Artificial Sequence
  Description of Artificial Sequence: Synthetic oligonucleotide
  Target: LAMA2; (+) strand; PAM type: YTN; PAM sequence: TTT
ttaatatttaaatagtcaca

SEQ ID NO: 315958 - DNA, 20 bp, Artificial Sequence
  Description of Artificial Sequence: Synthetic oligonucleotide
  Target: LAMA2; (+) strand; PAM type: YTN; PAM sequence: TTT
taatatttaaatagtcacag

SEQ ID NO: 315959 - DNA, 20 bp, Artificial Sequence
  Description of Artificial Sequence: Synthetic oligonucleotide
  Target: LAMA2; (+) strand; PAM type: YTN; PAM sequence: TTT
aatatttaaatagtcacaga

SEQ ID NO: 315960 - DNA, 20 bp, Artificial Sequence
  Description of Artificial Sequence: Synthetic oligonucleotide
  Target: LAMA2; (+) strand; PAM type: YTN; PAM sequence: TTA
atatttaaatagtcacagat

SEQ ID NO: 315961 - DNA, 20 bp, Artificial Sequence
  Description of Artificial Sequence: Synthetic oligonucleotide
  Target: LAMA2; (+) strand; PAM type: YTN; PAM sequence: TTT
aaatagtcacagatcaaaac

SEQ ID NO: 315962 - DNA, 20 bp, Artificial Sequence
  Description of Artificial Sequence: Synthetic oligonucleotide
  Target: LAMA2; (+) strand; PAM type: YTN; PAM sequence: TTA
aatagtcacagatcaaaact

SEQ ID NO: 315963 - DNA, 20 bp, Artificial Sequence
  Description of Artificial Sequence: Synthetic oligonucleotide
  Target: LAMA2; (+) strand; PAM type: YTN; PAM sequence: CTA
aatttttttttaaagattct

SEQ ID NO: 315964 - DNA, 20 bp, Artificial Sequence
  Description of Artificial Sequence: Synthetic oligonucleotide
  Target: LAMA2; (+) strand; PAM type: YTN; PAM sequence: TTT
ttttttaaagattctgttga

SEQ ID NO: 315965 - DNA, 20 bp, Artificial Sequence
  Description of Artificial Sequence: Synthetic oligonucleotide
  Target: LAMA2; (+) strand; PAM type: YTN; PAM sequence: TTT
tttttaaagattctgttgaa

SEQ ID NO: 315966 - DNA, 20 bp, Artificial Sequence
  Description of Artificial Sequence: Synthetic oligonucleotide
  Target: LAMA2; (+) strand; PAM type: YTN; PAM sequence: TTT
ttttaaagattctgttgaat

SEQ ID NO: 315967 - DNA, 20 bp, Artificial Sequence
  Description of Artificial Sequence: Synthetic oligonucleotide
  Target: LAMA2; (+) strand; PAM type: YTN; PAM sequence: TTT
tttaaagattctgttgaata

SEQ ID NO: 315968 - DNA, 20 bp, Artificial Sequence
  Description of Artificial Sequence: Synthetic oligonucleotide
  Target: LAMA2; (+) strand; PAM type: YTN; PAM sequence: TTT
ttaaagattctgttgaatag

SEQ ID NO: 315969 - DNA, 20 bp, Artificial Sequence
  Description of Artificial Sequence: Synthetic oligonucleotide
  Target: LAMA2; (+) strand; PAM type: YTN; PAM sequence: TTT
taaagattctgttgaatagg

SEQ ID NO: 315970 - DNA, 20 bp, Artificial Sequence
  Description of Artificial Sequence: Synthetic oligonucleotide
  Target: LAMA2; (+) strand; PAM type: YTN; PAM sequence: TTT
aaagattctgttgaataggt

SEQ ID NO: 315971 - DNA, 20 bp, Artificial Sequence
  Description of Artificial Sequence: Synthetic oligonucleotide
  Target: LAMA2; (+) strand; PAM type: YTN; PAM sequence: TTA
aagattctgttgaataggta

SEQ ID NO: 315972 - DNA, 20 bp, Artificial Sequence
  Description of Artificial Sequence: Synthetic oligonucleotide
  Target: LAMA2; (+) strand; PAM type: YTN; PAM sequence: TTC
tgttgaataggtaggacttc

SEQ ID NO: 315973 - DNA, 20 bp, Artificial Sequence
  Description of Artificial Sequence: Synthetic oligonucleotide
  Target: LAMA2; (+) strand; PAM type: YTN; PAM sequence: CTG
ttgaataggtaggacttcac

SEQ ID NO: 315974 - DNA, 20 bp, Artificial Sequence
  Description of Artificial Sequence: Synthetic oligonucleotide
  Target: LAMA2; (+) strand; PAM type: YTN; PAM sequence: TTG
aataggtaggacttcacatt

SEQ ID NO: 315975 - DNA, 20 bp, Artificial Sequence
  Description of Artificial Sequence: Synthetic oligonucleotide
  Target: LAMA2; (+) strand; PAM type: YTN; PAM sequence: CTT
cacattggattcaacctggt

SEQ ID NO: 315976 - DNA, 20 bp, Artificial Sequence
  Description of Artificial Sequence: Synthetic oligonucleotide
  Target: LAMA2; (+) strand; PAM type: YTN; PAM sequence: TTC
acattggattcaacctggta

SEQ ID NO: 315977 - DNA, 20 bp, Artificial Sequence
  Description of Artificial Sequence: Synthetic oligonucleotide
  Target: LAMA2; (+) strand; PAM type: YTN; PAM sequence: TTG
gattcaacctggtatttaaa

SEQ ID NO: 315978 - DNA, 20 bp, Artificial Sequence
  Description of Artificial Sequence: Synthetic oligonucleotide
  Target: LAMA2; (+) strand; PAM type: YTN; PAM sequence: TTC
aacctggtatttaaaatgca

SEQ ID NO: 315979 - DNA, 20 bp, Artificial Sequence
  Description of Artificial Sequence: Synthetic oligonucleotide
  Target: LAMA2; (+) strand; PAM type: YTN; PAM sequence: CTG
gtatttaaaatgcaaatact

SEQ ID NO: 315980 - DNA, 20 bp, Artificial Sequence
  Description of Artificial Sequence: Synthetic oligonucleotide
  Target: LAMA2; (+) strand; PAM type: YTN; PAM sequence: TTT
aaaatgcaaatactttttga

SEQ ID NO: 315981 - DNA, 20 bp, Artificial Sequence
  Description of Artificial Sequence: Synthetic oligonucleotide
  Target: LAMA2; (+) strand; PAM type: YTN; PAM sequence: TTA
aaatgcaaatactttttgat

SEQ ID NO: 315982 - DNA, 20 bp, Artificial Sequence
  Description of Artificial Sequence: Synthetic oligonucleotide
  Target: LAMA2; (+) strand; PAM type: YTN; PAM sequence: CTT
tttgatttctctttttgcta

SEQ ID NO: 315983 - DNA, 20 bp, Artificial Sequence
  Description of Artificial Sequence: Synthetic oligonucleotide
  Target: LAMA2; (+) strand; PAM type: YTN; PAM sequence: TTT
ttgatttctctttttgctaa

SEQ ID NO: 315984 - DNA, 20 bp, Artificial Sequence
  Description of Artificial Sequence: Synthetic oligonucleotide
  Target: LAMA2; (+) strand; PAM type: YTN; PAM sequence: TTT
tgatttctctttttgctaag

SEQ ID NO: 315985 - DNA, 20 bp, Artificial Sequence
  Description of Artificial Sequence: Synthetic oligonucleotide
  Target: LAMA2; (+) strand; PAM type: YTN; PAM sequence: TTT
gatttctctttttgctaagt

SEQ ID NO: 315986 - DNA, 20 bp, Artificial Sequence
  Description of Artificial Sequence: Synthetic oligonucleotide
  Target: LAMA2; (+) strand; PAM type: YTN; PAM sequence: TTG
atttctctttttgctaagta

SEQ ID NO: 315987 - DNA, 20 bp, Artificial Sequence
  Description of Artificial Sequence: Synthetic oligonucleotide
  Target: LAMA2; (+) strand; PAM type: YTN; PAM sequence: TTT
ctctttttgctaagtaatat

SEQ ID NO: 315988 - DNA, 20 bp, Artificial Sequence
  Description of Artificial Sequence: Synthetic oligonucleotide
  Target: LAMA2; (+) strand; PAM type: YTN; PAM sequence: TTC
tctttttgctaagtaatatt

SEQ ID NO: 315989 - DNA, 20 bp, Artificial Sequence
  Description of Artificial Sequence: Synthetic oligonucleotide
  Target: LAMA2; (+) strand; PAM type: YTN; PAM sequence: CTC
tttttgctaagtaatattct

SEQ ID NO: 315990 - DNA, 20 bp, Artificial Sequence
  Description of Artificial Sequence: Synthetic oligonucleotide
  Target: LAMA2; (+) strand; PAM type: YTN; PAM sequence: CTT
tttgctaagtaatattctaa

SEQ ID NO: 315991 - DNA, 20 bp, Artificial Sequence
  Description of Artificial Sequence: Synthetic oligonucleotide
  Target: LAMA2; (+) strand; PAM type: YTN; PAM sequence: TTT
ttgctaagtaatattctaag

SEQ ID NO: 315992 - DNA, 20 bp, Artificial Sequence
  Description of Artificial Sequence: Synthetic oligonucleotide
  Target: LAMA2; (+) strand; PAM type: YTN; PAM sequence: TTT
tgctaagtaatattctaaga

SEQ ID NO: 315993 - DNA, 20 bp, Artificial Sequence
  Description of Artificial Sequence: Synthetic oligonucleotide
  Target: LAMA2; (+) strand; PAM type: YTN; PAM sequence: TTT
gctaagtaatattctaagag

SEQ ID NO: 315994 - DNA, 20 bp, Artificial Sequence
  Description of Artificial Sequence: Synthetic oligonucleotide
  Target: LAMA2; (+) strand; PAM type: YTN; PAM sequence: TTG
ctaagtaatattctaagaga

SEQ ID NO: 315995 - DNA, 20 bp, Artificial Sequence
  Description of Artificial Sequence: Synthetic oligonucleotide
  Target: LAMA2; (+) strand; PAM type: YTN; PAM sequence: CTA
agtaatattctaagagatta

SEQ ID NO: 315996 - DNA, 20 bp, Artificial Sequence
  Description of Artificial Sequence: Synthetic oligonucleotide
  Target: LAMA2; (+) strand; PAM type: YTN; PAM sequence: TTC
taagagattagccatacatt

SEQ ID NO: 315997 - DNA, 20 bp, Artificial Sequence
  Description of Artificial Sequence: Synthetic oligonucleotide
  Target: LAMA2; (+) strand; PAM type: YTN; PAM sequence: CTA
agagattagccatacatttt

SEQ ID NO: 315998 - DNA, 20 bp, Artificial Sequence
  Description of Artificial Sequence: Synthetic oligonucleotide
  Target: LAMA2; (+) strand; PAM type: YTN; PAM sequence: TTA
gccatacattttaaaatgtt

SEQ ID NO: 315999 - DNA, 20 bp, Artificial Sequence
  Description of Artificial Sequence: Synthetic oligonucleotide
  Target: LAMA2; (+) strand; PAM type: YTN; PAM sequence: TTT
taaaatgttgtgactgtttt

SEQ ID NO: 316000 - DNA, 20 bp, Artificial Sequence
  Description of Artificial Sequence: Synthetic oligonucleotide
  Target: LAMA2; (+) strand; PAM type: YTN; PAM sequence: TTT
aaaatgttgtgactgttttt

SEQ ID NO: 316001 - DNA, 20 bp, Artificial Sequence
  Description of Artificial Sequence: Synthetic oligonucleotide
  Target: LAMA2; (+) strand; PAM type: YTN; PAM sequence: TTA
aaatgttgtgactgtttttg

SEQ ID NO: 316002 - DNA, 20 bp, Artificial Sequence
  Description of Artificial Sequence: Synthetic oligonucleotide
  Target: LAMA2; (+) strand; PAM type: YTN; PAM sequence: TTG
tgactgtttttgtgtttcat

SEQ ID NO: 316003 - DNA, 20 bp, Artificial Sequence
  Description of Artificial Sequence: Synthetic oligonucleotide
  Target: LAMA2; (+) strand; PAM type: YTN; PAM sequence: CTG
tttttgtgtttcatgtttgt

SEQ ID NO: 316004 - DNA, 20 bp, Artificial Sequence
  Description of Artificial Sequence: Synthetic oligonucleotide
  Target: LAMA2; (+) strand; PAM type: YTN; PAM sequence: TTT
ttgtgtttcatgtttgtata

SEQ ID NO: 316005 - DNA, 20 bp, Artificial Sequence
  Description of Artificial Sequence: Synthetic oligonucleotide
  Target: LAMA2; (+) strand; PAM type: YTN; PAM sequence: TTT
tgtgtttcatgtttgtataa

SEQ ID NO: 316006 - DNA, 20 bp, Artificial Sequence
  Description of Artificial Sequence: Synthetic oligonucleotide
  Target: LAMA2; (+) strand; PAM type: YTN; PAM sequence: TTT
gtgtttcatgtttgtataaa

SEQ ID NO: 316007 - DNA, 20 bp, Artificial Sequence
  Description of Artificial Sequence: Synthetic oligonucleotide
  Target: LAMA2; (+) strand; PAM type: YTN; PAM sequence: TTG
tgtttcatgtttgtataaat

SEQ ID NO: 316008 - DNA, 20 bp, Artificial Sequence
  Description of Artificial Sequence: Synthetic oligonucleotide
  Target: LAMA2; (+) strand; PAM type: YTN; PAM sequence: TTT
catgtttgtataaatgtaga

SEQ ID NO: 316009 - DNA, 20 bp, Artificial Sequence
  Description of Artificial Sequence: Synthetic oligonucleotide
  Target: LAMA2; (+) strand; PAM type: YTN; PAM sequence: TTC
atgtttgtataaatgtagag

SEQ ID NO: 316010 - DNA, 20 bp, Artificial Sequence
  Description of Artificial Sequence: Synthetic oligonucleotide
  Target: LAMA2; (+) strand; PAM type: YTN; PAM sequence: TTT
gtataaatgtagagattaga

SEQ ID NO: 316011 - DNA, 20 bp, Artificial Sequence
  Description of Artificial Sequence: Synthetic oligonucleotide
  Target: LAMA2; (+) strand; PAM type: YTN; PAM sequence: TTG
tataaatgtagagattagac

SEQ ID NO: 316012 - DNA, 20 bp, Artificial Sequence
  Description of Artificial Sequence: Synthetic oligonucleotide
  Target: LAMA2; (+) strand; PAM type: YTN; PAM sequence: TTA
gacacttgtttaagatcctt

SEQ ID NO: 316013 - DNA, 20 bp, Artificial Sequence
  Description of Artificial Sequence: Synthetic oligonucleotide
  Target: LAMA2; (+) strand; PAM type: YTN; PAM sequence: CTT
gtttaagatccttaaagatc

SEQ ID NO: 316014 - DNA, 20 bp, Artificial Sequence
  Description of Artificial Sequence: Synthetic oligonucleotide
  Target: LAMA2; (+) strand; PAM type: YTN; PAM sequence: TTG
tttaagatccttaaagatct

SEQ ID NO: 316015 - DNA, 20 bp, Artificial Sequence
  Description of Artificial Sequence: Synthetic oligonucleotide
  Target: LAMA2; (+) strand; PAM type: YTN; PAM sequence: TTT
aagatccttaaagatctgag

SEQ ID NO: 316016 - DNA, 20 bp, Artificial Sequence
  Description of Artificial Sequence: Synthetic oligonucleotide
  Target: LAMA2; (+) strand; PAM type: YTN; PAM sequence: TTA
agatccttaaagatctgagg

SEQ ID NO: 316017 - DNA, 20 bp, Artificial Sequence
  Description of Artificial Sequence: Synthetic oligonucleotide
  Target: LAMA2; (+) strand; PAM type: YTN; PAM sequence: CTT
aaagatctgaggtaaattat

SEQ ID NO: 316018 - DNA, 20 bp, Artificial Sequence
  Description of Artificial Sequence: Synthetic oligonucleotide
  Target: LAMA2; (+) strand; PAM type: YTN; PAM sequence: TTA
aagatctgaggtaaattatt

SEQ ID NO: 316019 - DNA, 20 bp, Artificial Sequence
  Description of Artificial Sequence: Synthetic oligonucleotide
  Target: LAMA2; (+) strand; PAM type: YTN; PAM sequence: CTG
aggtaaattatttttgggaa

SEQ ID NO: 316020 - DNA, 20 bp, Artificial Sequence
  Description of Artificial Sequence: Synthetic oligonucleotide
  Target: LAMA2; (+) strand; PAM type: YTN; PAM sequence: TTA
tttttgggaaatacaaattt

SEQ ID NO: 316021 - DNA, 20 bp, Artificial Sequence
  Description of Artificial Sequence: Synthetic oligonucleotide
  Target: LAMA2; (+) strand; PAM type: YTN; PAM sequence: TTT
ttgggaaatacaaatttctt

SEQ ID NO: 316022 - DNA, 20 bp, Artificial Sequence
  Description of Artificial Sequence: Synthetic oligonucleotide
  Target: LAMA2; (+) strand; PAM type: YTN; PAM sequence: TTT
tgggaaatacaaatttcttt

SEQ ID NO: 316023 - DNA, 20 bp, Artificial Sequence
  Description of Artificial Sequence: Synthetic oligonucleotide
  Target: LAMA2; (+) strand; PAM type: YTN; PAM sequence: TTT
gggaaatacaaatttctttc

SEQ ID NO: 316024 - DNA, 20 bp, Artificial Sequence
  Description of Artificial Sequence: Synthetic oligonucleotide
  Target: LAMA2; (+) strand; PAM type: YTN; PAM sequence: TTG
ggaaatacaaatttctttct

SEQ ID NO: 316025 - DNA, 20 bp, Artificial Sequence
  Description of Artificial Sequence: Synthetic oligonucleotide
  Target: LAMA2; (+) strand; PAM type: YTN; PAM sequence: TTT
ctttctgtaatttctacctt

SEQ ID NO: 316026 - DNA, 20 bp, Artificial Sequence
  Description of Artificial Sequence: Synthetic oligonucleotide
  Target: LAMA2; (+) strand; PAM type: YTN; PAM sequence: TTC
tttctgtaatttctaccttc

SEQ ID NO: 316027 - DNA, 20 bp, Artificial Sequence
  Description of Artificial Sequence: Synthetic oligonucleotide
  Target: LAMA2; (+) strand; PAM type: YTN; PAM sequence: CTT
tctgtaatttctaccttctg

SEQ ID NO: 316028 - DNA, 20 bp, Artificial Sequence
  Description of Artificial Sequence: Synthetic oligonucleotide
  Target: LAMA2; (+) strand; PAM type: YTN; PAM sequence: TTT
ctgtaatttctaccttctgt

SEQ ID NO: 316029 - DNA, 20 bp, Artificial Sequence
  Description of Artificial Sequence: Synthetic oligonucleotide
  Target: LAMA2; (+) strand; PAM type: YTN; PAM sequence: TTC
tgtaatttctaccttctgtg

SEQ ID NO: 316030 - DNA, 20 bp, Artificial Sequence
  Description of Artificial Sequence: Synthetic oligonucleotide
  Target: LAMA2; (+) strand; PAM type: YTN; PAM sequence: CTG
taatttctaccttctgtgaa

SEQ ID NO: 316031 - DNA, 20 bp, Artificial Sequence
  Description of Artificial Sequence: Synthetic oligonucleotide
  Target: LAMA2; (+) strand; PAM type: YTN; PAM sequence: TTT
ctaccttctgtgaacaactt

SEQ ID NO: 316032 - DNA, 20 bp, Artificial Sequence
  Description of Artificial Sequence: Synthetic oligonucleotide
  Target: LAMA2; (+) strand; PAM type: YTN; PAM sequence: TTC
taccttctgtgaacaacttc

SEQ ID NO: 316033 - DNA, 20 bp, Artificial Sequence
  Description of Artificial Sequence: Synthetic oligonucleotide
  Target: LAMA2; (+) strand; PAM type: YTN; PAM sequence: CTA
ccttctgtgaacaacttctt

SEQ ID NO: 316034 - DNA, 20 bp, Artificial Sequence
  Description of Artificial Sequence: Synthetic oligonucleotide
  Target: LAMA2; (+) strand; PAM type: YTN; PAM sequence: CTT
ctgtgaacaacttcttgaag

SEQ ID NO: 316035 - DNA, 20 bp, Artificial Sequence
  Description of Artificial Sequence: Synthetic oligonucleotide
  Target: LAMA2; (+) strand; PAM type: YTN; PAM sequence: TTC
tgtgaacaacttcttgaaga

SEQ ID NO: 316036 - DNA, 20 bp, Artificial Sequence
  Description of Artificial Sequence: Synthetic oligonucleotide
  Target: LAMA2; (+) strand; PAM type: YTN; PAM sequence: CTG
tgaacaacttcttgaagact

SEQ ID NO: 316037 - DNA, 20 bp, Artificial Sequence
  Description of Artificial Sequence: Synthetic oligonucleotide
  Target: LAMA2; (+) strand; PAM type: YTN; PAM sequence: CTT
cttgaagactgttctgttgc

SEQ ID NO: 316038 - DNA, 20 bp, Artificial Sequence
  Description of Artificial Sequence: Synthetic oligonucleotide
  Target: LAMA2; (+) strand; PAM type: YTN; PAM sequence: TTC
ttgaagactgttctgttgct

SEQ ID NO: 316039 - DNA, 20 bp, Artificial Sequence
  Description of Artificial Sequence: Synthetic oligonucleotide
  Target: LAMA2; (+) strand; PAM type: YTN; PAM sequence: CTT
gaagactgttctgttgctct

SEQ ID NO: 316040 - DNA, 20 bp, Artificial Sequence
  Description of Artificial Sequence: Synthetic oligonucleotide
  Target: LAMA2; (+) strand; PAM type: YTN; PAM sequence: TTG
aagactgttctgttgctctt

SEQ ID NO: 316041 - DNA, 20 bp, Artificial Sequence
  Description of Artificial Sequence: Synthetic oligonucleotide
  Target: LAMA2; (+) strand; PAM type: YTN; PAM sequence: CTG
ttctgttgctcttggtttat

SEQ ID NO: 316042 - DNA, 20 bp, Artificial Sequence
  Description of Artificial Sequence: Synthetic oligonucleotide
  Target: LAMA2; (+) strand; PAM type: YTN; PAM sequence: TTC
tgttgctcttggtttatacg

SEQ ID NO: 316043 - DNA, 20 bp, Artificial Sequence
  Description of Artificial Sequence: Synthetic oligonucleotide
  Target: LAMA2; (+) strand; PAM type: YTN; PAM sequence: CTG
ttgctcttggtttatacgca

SEQ ID NO: 316044 - DNA, 20 bp, Artificial Sequence
  Description of Artificial Sequence: Synthetic oligonucleotide
  Target: LAMA2; (+) strand; PAM type: YTN; PAM sequence: TTG
ctcttggtttatacgcaggt

SEQ ID NO: 316045 - DNA, 20 bp, Artificial Sequence
  Description of Artificial Sequence: Synthetic oligonucleotide
  Target: LAMA2; (+) strand; PAM type: YTN; PAM sequence: CTC
ttggtttatacgcaggtccc

SEQ ID NO: 316046 - DNA, 20 bp, Artificial Sequence
  Description of Artificial Sequence: Synthetic oligonucleotide
  Target: LAMA2; (+) strand; PAM type: YTN; PAM sequence: CTT
ggtttatacgcaggtccctt

SEQ ID NO: 316047 - DNA, 20 bp, Artificial Sequence
  Description of Artificial Sequence: Synthetic oligonucleotide
  Target: LAMA2; (+) strand; PAM type: YTN; PAM sequence: TTG
gtttatacgcaggtccctta

SEQ ID NO: 316048 - DNA, 20 bp, Artificial Sequence
  Description of Artificial Sequence: Synthetic oligonucleotide
  Target: LAMA2; (+) strand; PAM type: YTN; PAM sequence: TTT
atacgcaggtcccttaaaat

SEQ ID NO: 316049 - DNA, 20 bp, Artificial Sequence
  Description of Artificial Sequence: Synthetic oligonucleotide
  Target: LAMA2; (+) strand; PAM type: YTN; PAM sequence: TTA
tacgcaggtcccttaaaata

SEQ ID NO: 316050 - DNA, 20 bp, Artificial Sequence
  Description of Artificial Sequence: Synthetic oligonucleotide
  Target: LAMA2; (+) strand; PAM type: YTN; PAM sequence: CTT
aaaataacaaaataaaaaat

SEQ ID NO: 316051 - DNA, 20 bp, Artificial Sequence
  Description of Artificial Sequence: Synthetic oligonucleotide
  Target: LAMA2; (+) strand; PAM type: YTN; PAM sequence: TTA
aaataacaaaataaaaaata

SEQ ID NO: 316052 - DNA, 20 bp, Artificial Sequence
  Description of Artificial Sequence: Synthetic oligonucleotide
  Target: LAMA2; (+) strand; PAM type: YTN; PAM sequence: CTG
gaaataaaagaaaaataatt

SEQ ID NO: 316053 - DNA, 20 bp, Artificial Sequence
  Description of Artificial Sequence: Synthetic oligonucleotide
  Target: LAMA2; (+) strand; PAM type: YTN; PAM sequence: TTT
aaactcaagggattttcttg

SEQ ID NO: 316054 - DNA, 20 bp, Artificial Sequence
  Description of Artificial Sequence: Synthetic oligonucleotide
  Target: LAMA2; (+) strand; PAM type: YTN; PAM sequence: TTA
aactcaagggattttcttgg

SEQ ID NO: 316055 - DNA, 20 bp, Artificial Sequence
  Description of Artificial Sequence: Synthetic oligonucleotide
  Target: LAMA2; (+) strand; PAM type: YTN; PAM sequence: CTC
aagggattttcttgggtaag

SEQ ID NO: 316056 - DNA, 20 bp, Artificial Sequence
  Description of Artificial Sequence: Synthetic oligonucleotide
  Target: LAMA2; (+) strand; PAM type: YTN; PAM sequence: TTT
tcttgggtaaggcctcagag

SEQ ID NO: 316057 - DNA, 20 bp, Artificial Sequence
  Description of Artificial Sequence: Synthetic oligonucleotide
  Target: LAMA2; (+) strand; PAM type: YTN; PAM sequence: TTT
cttgggtaaggcctcagaga

SEQ ID NO: 316058 - DNA, 20 bp, Artificial Sequence
  Description of Artificial Sequence: Synthetic oligonucleotide
  Target: LAMA2; (+) strand; PAM type: YTN; PAM sequence: TTC
ttgggtaaggcctcagagaa

SEQ ID NO: 316059 - DNA, 20 bp, Artificial Sequence
  Description of Artificial Sequence: Synthetic oligonucleotide
  Target: LAMA2; (+) strand; PAM type: YTN; PAM sequence: CTT
gggtaaggcctcagagaatg

SEQ ID NO: 316060 - DNA, 20 bp, Artificial Sequence
  Description of Artificial Sequence: Synthetic oligonucleotide
  Target: LAMA2; (+) strand; PAM type: YTN; PAM sequence: TTG
ggtaaggcctcagagaatgt

SEQ ID NO: 316061 - DNA, 20 bp, Artificial Sequence
  Description of Artificial Sequence: Synthetic oligonucleotide
  Target: LAMA2; (+) strand; PAM type: YTN; PAM sequence: CTC
agagaatgttccagctgttc

SEQ ID NO: 316062 - DNA, 20 bp, Artificial Sequence
  Description of Artificial Sequence: Synthetic oligonucleotide
  Target: LAMA2; (+) strand; PAM type: YTN; PAM sequence: TTC
cagctgttcttaagaaagac

SEQ ID NO: 316063 - DNA, 20 bp, Artificial Sequence
  Description of Artificial Sequence: Synthetic oligonucleotide
  Target: LAMA2; (+) strand; PAM type: YTN; PAM sequence: CTG
ttcttaagaaagacattgta

SEQ ID NO: 316064 - DNA, 20 bp, Artificial Sequence
  Description of Artificial Sequence: Synthetic oligonucleotide
  Target: LAMA2; (+) strand; PAM type: YTN; PAM sequence: TTC
ttaagaaagacattgtatat

SEQ ID NO: 316065 - DNA, 20 bp, Artificial Sequence
  Description of Artificial Sequence: Synthetic oligonucleotide
  Target: LAMA2; (+) strand; PAM type: YTN; PAM sequence: CTT
aagaaagacattgtatataa

SEQ ID NO: 316066 - DNA, 20 bp, Artificial Sequence
  Description of Artificial Sequence: Synthetic oligonucleotide
  Target: LAMA2; (+) strand; PAM type: YTN; PAM sequence: TTA
agaaagacattgtatataaa

SEQ ID NO: 316067 - DNA, 20 bp, Artificial Sequence
  Description of Artificial Sequence: Synthetic oligonucleotide
  Target: LAMA2; (+) strand; PAM type: YTN; PAM sequence: TTG
tatataaaggccacatttag

SEQ ID NO: 316068 - DNA, 20 bp, Artificial Sequence
  Description of Artificial Sequence: Synthetic oligonucleotide
  Target: LAMA2; (+) strand; PAM type: YTN; PAM sequence: TTT
agctgaatagactgaaaaat

SEQ ID NO: 316069 - DNA, 20 bp, Artificial Sequence
  Description of Artificial Sequence: Synthetic oligonucleotide
  Target: LAMA2; (+) strand; PAM type: YTN; PAM sequence: TTA
gctgaatagactgaaaaatt

SEQ ID NO: 316070 - DNA, 20 bp, Artificial Sequence
  Description of Artificial Sequence: Synthetic oligonucleotide
  Target: LAMA2; (+) strand; PAM type: YTN; PAM sequence: CTG
aatagactgaaaaattctta

SEQ ID NO: 316071 - DNA, 20 bp, Artificial Sequence
  Description of Artificial Sequence: Synthetic oligonucleotide
  Target: LAMA2; (+) strand; PAM type: YTN; PAM sequence: CTG
aaaaattcttattatttgag

SEQ ID NO: 316072 - DNA, 20 bp, Artificial Sequence
  Description of Artificial Sequence: Synthetic oligonucleotide
  Target: LAMA2; (+) strand; PAM type: YTN; PAM sequence: TTC
ttattatttgagaaatgatt

SEQ ID NO: 316073 - DNA, 20 bp, Artificial Sequence
  Description of Artificial Sequence: Synthetic oligonucleotide
  Target: LAMA2; (+) strand; PAM type: YTN; PAM sequence: CTT
attatttgagaaatgattca

SEQ ID NO: 316074 - DNA, 20 bp, Artificial Sequence
  Description of Artificial Sequence: Synthetic oligonucleotide
  Target: LAMA2; (+) strand; PAM type: YTN; PAM sequence: TTA
ttatttgagaaatgattcaa

SEQ ID NO: 316075 - DNA, 20 bp, Artificial Sequence
  Description of Artificial Sequence: Synthetic oligonucleotide
  Target: LAMA2; (+) strand; PAM type: YTN; PAM sequence: TTA
tttgagaaatgattcaattg

SEQ ID NO: 316076 - DNA, 20 bp, Artificial Sequence
  Description of Artificial Sequence: Synthetic oligonucleotide
  Target: LAMA2; (+) strand; PAM type: YTN; PAM sequence: TTT
gagaaatgattcaattgttg

SEQ ID NO: 316077 - DNA, 20 bp, Artificial Sequence
  Description of Artificial Sequence: Synthetic oligonucleotide
  Target: LAMA2; (+) strand; PAM type: YTN; PAM sequence: TTG
agaaatgattcaattgttgt

SEQ ID NO: 316078 - DNA, 20 bp, Artificial Sequence
  Description of Artificial Sequence: Synthetic oligonucleotide
  Target: LAMA2; (+) strand; PAM type: YTN; PAM sequence: TTC
aattgttgtctcaatgctaa

SEQ ID NO: 316079 - DNA, 20 bp, Artificial Sequence
  Description of Artificial Sequence: Synthetic oligonucleotide
  Target: LAMA2; (+) strand; PAM type: YTN; PAM sequence: TTG
ttgtctcaatgctaaatatt

SEQ ID NO: 316080 - DNA, 20 bp, Artificial Sequence
  Description of Artificial Sequence: Synthetic oligonucleotide
  Target: LAMA2; (+) strand; PAM type: YTN; PAM sequence: TTG
tctcaatgctaaatattcat

SEQ ID NO: 316081 - DNA, 20 bp, Artificial Sequence
  Description of Artificial Sequence: Synthetic oligonucleotide
  Target: LAMA2; (+) strand; PAM type: YTN; PAM sequence: CTC
aatgctaaatattcataaaa

SEQ ID NO: 316082 - DNA, 20 bp, Artificial Sequence
  Description of Artificial Sequence: Synthetic oligonucleotide
  Target: LAMA2; (+) strand; PAM type: YTN; PAM sequence: CTA
aatattcataaaaactatcc

SEQ ID NO: 316083 - DNA, 20 bp, Artificial Sequence
  Description of Artificial Sequence: Synthetic oligonucleotide
  Target: LAMA2; (+) strand; PAM type: YTN; PAM sequence: TTC
ataaaaactatccattcatt

SEQ ID NO: 316084 - DNA, 20 bp, Artificial Sequence
  Description of Artificial Sequence: Synthetic oligonucleotide
  Target: LAMA2; (+) strand; PAM type: YTN; PAM sequence: CTA
tccattcattaatccttttt

SEQ ID NO: 316085 - DNA, 20 bp, Artificial Sequence
  Description of Artificial Sequence: Synthetic oligonucleotide
  Target: LAMA2; (+) strand; PAM type: YTN; PAM sequence: TTC
attaatcctttttaaactga

SEQ ID NO: 316086 - DNA, 20 bp, Artificial Sequence
  Description of Artificial Sequence: Synthetic oligonucleotide
  Target: LAMA2; (+) strand; PAM type: YTN; PAM sequence: TTA
atcctttttaaactgaagta

SEQ ID NO: 316087 - DNA, 20 bp, Artificial Sequence
  Description of Artificial Sequence: Synthetic oligonucleotide
  Target: LAMA2; (+) strand; PAM type: YTN; PAM sequence: CTT
tttaaactgaagtaattaga

SEQ ID NO: 316088 - DNA, 20 bp, Artificial Sequence
  Description of Artificial Sequence: Synthetic oligonucleotide
  Target: LAMA2; (+) strand; PAM type: YTN; PAM sequence: TTT
ttaaactgaagtaattagaa

SEQ ID NO: 316089 - DNA, 20 bp, Artificial Sequence
  Description of Artificial Sequence: Synthetic oligonucleotide
  Target: LAMA2; (+) strand; PAM type: YTN; PAM sequence: TTT
taaactgaagtaattagaaa

SEQ ID NO: 316090 - DNA, 20 bp, Artificial Sequence
  Description of Artificial Sequence: Synthetic oligonucleotide
  Target: LAMA2; (+) strand; PAM type: YTN; PAM sequence: TTT
aaactgaagtaattagaaaa

SEQ ID NO: 316091 - DNA, 20 bp, Artificial Sequence
  Description of Artificial Sequence: Synthetic oligonucleotide
  Target: LAMA2; (+) strand; PAM type: YTN; PAM sequence: TTA
aactgaagtaattagaaaaa

SEQ ID NO: 316092 - DNA, 20 bp, Artificial Sequence
  Description of Artificial Sequence: Synthetic oligonucleotide
  Target: LAMA2; (+) strand; PAM type: YTN; PAM sequence: CTG
aagtaattagaaaaagcagg

SEQ ID NO: 316093 - DNA, 20 bp, Artificial Sequence
  Description of Artificial Sequence: Synthetic oligonucleotide
  Target: LAMA2; (+) strand; PAM type: YTN; PAM sequence: TTA
gaaaaagcaggtcaatgtgc

SEQ ID NO: 316094 - DNA, 20 bp, Artificial Sequence
  Description of Artificial Sequence: Synthetic oligonucleotide
  Target: LAMA2; (+) strand; PAM type: YTN; PAM sequence: CTT
ttcttcatcaaatggttaat

SEQ ID NO: 316095 - DNA, 20 bp, Artificial Sequence
  Description of Artificial Sequence: Synthetic oligonucleotide
  Target: LAMA2; (+) strand; PAM type: YTN; PAM sequence: TTT
tcttcatcaaatggttaatt

SEQ ID NO: 316096 - DNA, 20 bp, Artificial Sequence
  Description of Artificial Sequence: Synthetic oligonucleotide
  Target: LAMA2; (+) strand; PAM type: YTN; PAM sequence: TTT
cttcatcaaatggttaattc

SEQ ID NO: 316097 - DNA, 20 bp, Artificial Sequence
  Description of Artificial Sequence: Synthetic oligonucleotide
  Target: LAMA2; (+) strand; PAM type: YTN; PAM sequence: TTC
ttcatcaaatggttaattct

SEQ ID NO: 316098 - DNA, 20 bp, Artificial Sequence
  Description of Artificial Sequence: Synthetic oligonucleotide
  Target: LAMA2; (+) strand; PAM type: YTN; PAM sequence: CTT
catcaaatggttaattcttt

SEQ ID NO: 316099 - DNA, 20 bp, Artificial Sequence
  Description of Artificial Sequence: Synthetic oligonucleotide
  Target: LAMA2; (+) strand; PAM type: YTN; PAM sequence: TTC
atcaaatggttaattcttta

SEQ ID NO: 316100 - DNA, 20 bp, Artificial Sequence
  Description of Artificial Sequence: Synthetic oligonucleotide
  Target: LAMA2; (+) strand; PAM type: YTN; PAM sequence: TTA
attctttattaaatggttat

SEQ ID NO: 316101 - DNA, 20 bp, Artificial Sequence
  Description of Artificial Sequence: Synthetic oligonucleotide
  Target: LAMA2; (+) strand; PAM type: YTN; PAM sequence: TTC
tttattaaatggttattctt

SEQ ID NO: 316102 - DNA, 20 bp, Artificial Sequence
  Description of Artificial Sequence: Synthetic oligonucleotide
  Target: LAMA2; (+) strand; PAM type: YTN; PAM sequence: CTT
tattaaatggttattcttta

SEQ ID NO: 316103 - DNA, 20 bp, Artificial Sequence
  Description of Artificial Sequence: Synthetic oligonucleotide
  Target: LAMA2; (+) strand; PAM type: YTN; PAM sequence: TTT
attaaatggttattctttaa

SEQ ID NO: 316104 - DNA, 20 bp, Artificial Sequence
  Description of Artificial Sequence: Synthetic oligonucleotide
  Target: LAMA2; (+) strand; PAM type: YTN; PAM sequence: TTA
ttaaatggttattctttaaa

SEQ ID NO: 316105 - DNA, 20 bp, Artificial Sequence
  Description of Artificial Sequence: Synthetic oligonucleotide
  Target: LAMA2; (+) strand; PAM type: YTN; PAM sequence: TTA
aatggttattctttaaaatg

SEQ ID NO: 316106 - DNA, 20 bp, Artificial Sequence
  Description of Artificial Sequence: Synthetic oligonucleotide
  Target: LAMA2; (+) strand; PAM type: YTN; PAM sequence: TTA
ttctttaaaatgagcaaaga

SEQ ID NO: 316107 - DNA, 20 bp, Artificial Sequence
  Description of Artificial Sequence: Synthetic oligonucleotide
  Target: LAMA2; (+) strand; PAM type: YTN; PAM sequence: TTC
tttaaaatgagcaaagatga

SEQ ID NO: 316108 - DNA, 20 bp, Artificial Sequence
  Description of Artificial Sequence: Synthetic oligonucleotide
  Target: LAMA2; (+) strand; PAM type: YTN; PAM sequence: CTT
taaaatgagcaaagatgagc

SEQ ID NO: 316109 - DNA, 20 bp, Artificial Sequence
  Description of Artificial Sequence: Synthetic oligonucleotide
  Target: LAMA2; (+) strand; PAM type: YTN; PAM sequence: TTT
aaaatgagcaaagatgagct

SEQ ID NO: 316110 - DNA, 20 bp, Artificial Sequence
  Description of Artificial Sequence: Synthetic oligonucleotide
  Target: LAMA2; (+) strand; PAM type: YTN; PAM sequence: TTA
aaatgagcaaagatgagctc

SEQ ID NO: 316111 - DNA, 20 bp, Artificial Sequence
  Description of Artificial Sequence: Synthetic oligonucleotide
  Target: LAMA2; (+) strand; PAM type: YTN; PAM sequence: CTC
agcaaataaggtacttgtaa

SEQ ID NO: 316112 - DNA, 20 bp, Artificial Sequence
  Description of Artificial Sequence: Synthetic oligonucleotide
  Target: LAMA2; (+) strand; PAM type: YTN; PAM sequence: CTT
gtaataatgaaagtactata

SEQ ID NO: 316113 - DNA, 20 bp, Artificial Sequence
  Description of Artificial Sequence: Synthetic oligonucleotide
  Target: LAMA2; (+) strand; PAM type: YTN; PAM sequence: TTG
taataatgaaagtactatat

SEQ ID NO: 316114 - DNA, 20 bp, Artificial Sequence
  Description of Artificial Sequence: Synthetic oligonucleotide
  Target: LAMA2; (+) strand; PAM type: YTN; PAM sequence: CTA
tatgcaggaatactggcttt

SEQ ID NO: 316115 - DNA, 20 bp, Artificial Sequence
  Description of Artificial Sequence: Synthetic oligonucleotide
  Target: LAMA2; (+) strand; PAM type: YTN; PAM sequence: CTG
gctttttgtttttaatctgc

SEQ ID NO: 316116 - DNA, 20 bp, Artificial Sequence
  Description of Artificial Sequence: Synthetic oligonucleotide
  Target: LAMA2; (+) strand; PAM type: YTN; PAM sequence: CTT
tttgtttttaatctgcaatt

SEQ ID NO: 316117 - DNA, 20 bp, Artificial Sequence
  Description of Artificial Sequence: Synthetic oligonucleotide
  Target: LAMA2; (+) strand; PAM type: YTN; PAM sequence: TTT
ttgtttttaatctgcaatta

SEQ ID NO: 316118 - DNA, 20 bp, Artificial Sequence
  Description of Artificial Sequence: Synthetic oligonucleotide
  Target: LAMA2; (+) strand; PAM type: YTN; PAM sequence: TTT
tgtttttaatctgcaattag

SEQ ID NO: 316119 - DNA, 20 bp, Artificial Sequence
  Description of Artificial Sequence: Synthetic oligonucleotide
  Target: LAMA2; (+) strand; PAM type: YTN; PAM sequence: TTT
gtttttaatctgcaattagt

SEQ ID NO: 316120 - DNA, 20 bp, Artificial Sequence
  Description of Artificial Sequence: Synthetic oligonucleotide
  Target: LAMA2; (+) strand; PAM type: YTN; PAM sequence: TTG
tttttaatctgcaattagtt

SEQ ID NO: 316121 - DNA, 20 bp, Artificial Sequence
  Description of Artificial Sequence: Synthetic oligonucleotide
  Target: LAMA2; (+) strand; PAM type: YTN; PAM sequence: TTT
ttaatctgcaattagttaat

SEQ ID NO: 316122 - DNA, 20 bp, Artificial Sequence
  Description of Artificial Sequence: Synthetic oligonucleotide
  Target: LAMA2; (+) strand; PAM type: YTN; PAM sequence: TTT
taatctgcaattagttaatt

SEQ ID NO: 316123 - DNA, 20 bp, Artificial Sequence
  Description of Artificial Sequence: Synthetic oligonucleotide
  Target: LAMA2; (+) strand; PAM type: YTN; PAM sequence: TTT
aatctgcaattagttaatta

SEQ ID NO: 316124 - DNA, 20 bp, Artificial Sequence
  Description of Artificial Sequence: Synthetic oligonucleotide
  Target: LAMA2; (+) strand; PAM type: YTN; PAM sequence: TTA
atctgcaattagttaattaa

SEQ ID NO: 316125 - DNA, 20 bp, Artificial Sequence
  Description of Artificial Sequence: Synthetic oligonucleotide
  Target: LAMA2; (+) strand; PAM type: YTN; PAM sequence: CTG
caattagttaattaaatttc

SEQ ID NO: 316126 - DNA, 20 bp, Artificial Sequence
  Description of Artificial Sequence: Synthetic oligonucleotide
  Target: LAMA2; (+) strand; PAM type: YTN; PAM sequence: TTA
gttaattaaatttcattgta

SEQ ID NO: 316127 - DNA, 20 bp, Artificial Sequence
  Description of Artificial Sequence: Synthetic oligonucleotide
  Target: LAMA2; (+) strand; PAM type: YTN; PAM sequence: TTA
attaaatttcattgtagatg

SEQ ID NO: 316128 - DNA, 20 bp, Artificial Sequence
  Description of Artificial Sequence: Synthetic oligonucleotide
  Target: LAMA2; (+) strand; PAM type: YTN; PAM sequence: TTA
aatttcattgtagatgtatt

SEQ ID NO: 316129 - DNA, 20 bp, Artificial Sequence
  Description of Artificial Sequence: Synthetic oligonucleotide
  Target: LAMA2; (+) strand; PAM type: YTN; PAM sequence: TTT
cattgtagatgtattgcata

SEQ ID NO: 316130 - DNA, 20 bp, Artificial Sequence
  Description of Artificial Sequence: Synthetic oligonucleotide
  Target: LAMA2; (+) strand; PAM type: YTN; PAM sequence: TTC
attgtagatgtattgcataa

SEQ ID NO: 316131 - DNA, 20 bp, Artificial Sequence
  Description of Artificial Sequence: Synthetic oligonucleotide
  Target: LAMA2; (+) strand; PAM type: YTN; PAM sequence: TTG
tagatgtattgcataaaata

SEQ ID NO: 316132 - DNA, 20 bp, Artificial Sequence
  Description of Artificial Sequence: Synthetic oligonucleotide
  Target: LAMA2; (+) strand; PAM type: YTN; PAM sequence: TTG
cataaaatacatttgaaagg

SEQ ID NO: 316133 - DNA, 20 bp, Artificial Sequence
  Description of Artificial Sequence: Synthetic oligonucleotide
  Target: LAMA2; (+) strand; PAM type: YTN; PAM sequence: TTT
gaaaggcaccattcttcctc

SEQ ID NO: 316134 - DNA, 20 bp, Artificial Sequence
  Description of Artificial Sequence: Synthetic oligonucleotide
  Target: LAMA2; (+) strand; PAM type: YTN; PAM sequence: TTG
aaaggcaccattcttcctca

SEQ ID NO: 316135 - DNA, 20 bp, Artificial Sequence
  Description of Artificial Sequence: Synthetic oligonucleotide
  Target: LAMA2; (+) strand; PAM type: YTN; PAM sequence: TTC
ttcctcataatacagctagt

SEQ ID NO: 316136 - DNA, 20 bp, Artificial Sequence
  Description of Artificial Sequence: Synthetic oligonucleotide
  Target: LAMA2; (+) strand; PAM type: YTN; PAM sequence: CTT
cctcataatacagctagtga

SEQ ID NO: 316137 - DNA, 20 bp, Artificial Sequence
  Description of Artificial Sequence: Synthetic oligonucleotide
  Target: LAMA2; (+) strand; PAM type: YTN; PAM sequence: TTC
ctcataatacagctagtgaa

SEQ ID NO: 316138 - DNA, 20 bp, Artificial Sequence
  Description of Artificial Sequence: Synthetic oligonucleotide
  Target: LAMA2; (+) strand; PAM type: YTN; PAM sequence: CTC
ataatacagctagtgaaggt

SEQ ID NO: 316139 - DNA, 20 bp, Artificial Sequence
  Description of Artificial Sequence: Synthetic oligonucleotide
  Target: LAMA2; (+) strand; PAM type: YTN; PAM sequence: CTA
gtgaaggtccaaatttcagt

SEQ ID NO: 316140 - DNA, 20 bp, Artificial Sequence
  Description of Artificial Sequence: Synthetic oligonucleotide
  Target: LAMA2; (+) strand; PAM type: YTN; PAM sequence: TTT
cagtgactcaagtgtaggtg

SEQ ID NO: 316141 - DNA, 20 bp, Artificial Sequence
  Description of Artificial Sequence: Synthetic oligonucleotide
  Target: LAMA2; (+) strand; PAM type: YTN; PAM sequence: TTC
agtgactcaagtgtaggtgg

SEQ ID NO: 316142 - DNA, 20 bp, Artificial Sequence
  Description of Artificial Sequence: Synthetic oligonucleotide
  Target: LAMA2; (+) strand; PAM type: YTN; PAM sequence: CTC
aagtgtaggtgggaaaaagt

SEQ ID NO: 316143 - DNA, 20 bp, Artificial Sequence
  Description of Artificial Sequence: Synthetic oligonucleotide
  Target: LAMA2; (+) strand; PAM type: YTN; PAM sequence: CTC
acaaactttacgcaaattgt

SEQ ID NO: 316144 - DNA, 20 bp, Artificial Sequence
  Description of Artificial Sequence: Synthetic oligonucleotide
  Target: LAMA2; (+) strand; PAM type: YTN; PAM sequence: CTT
tacgcaaattgttagaaaag

SEQ ID NO: 316145 - DNA, 20 bp, Artificial Sequence
  Description of Artificial Sequence: Synthetic oligonucleotide
  Target: LAMA2; (+) strand; PAM type: YTN; PAM sequence: TTT
acgcaaattgttagaaaagc

SEQ ID NO: 316146 - DNA, 20 bp, Artificial Sequence
  Description of Artificial Sequence: Synthetic oligonucleotide
  Target: LAMA2; (+) strand; PAM type: YTN; PAM sequence: TTA
cgcaaattgttagaaaagct

SEQ ID NO: 316147 - DNA, 20 bp, Artificial Sequence
  Description of Artificial Sequence: Synthetic oligonucleotide
  Target: LAMA2; (+) strand; PAM type: YTN; PAM sequence: TTG
ttagaaaagcttatgtaaac

SEQ ID NO: 316148 - DNA, 20 bp, Artificial Sequence
  Description of Artificial Sequence: Synthetic oligonucleotide
  Target: LAMA2; (+) strand; PAM type: YTN; PAM sequence: TTA
gaaaagcttatgtaaacatg

SEQ ID NO: 316149 - DNA, 20 bp, Artificial Sequence
  Description of Artificial Sequence: Synthetic oligonucleotide
  Target: LAMA2; (+) strand; PAM type: YTN; PAM sequence: CTT
atgtaaacatgactactatg

SEQ ID NO: 316150 - DNA, 20 bp, Artificial Sequence
  Description of Artificial Sequence: Synthetic oligonucleotide
  Target: LAMA2; (+) strand; PAM type: YTN; PAM sequence: TTA
tgtaaacatgactactatga

SEQ ID NO: 316151 - DNA, 20 bp, Artificial Sequence
  Description of Artificial Sequence: Synthetic oligonucleotide
  Target: LAMA2; (+) strand; PAM type: YTN; PAM sequence: CTA
ctatgaatacagaccaggga

SEQ ID NO: 316152 - DNA, 20 bp, Artificial Sequence
  Description of Artificial Sequence: Synthetic oligonucleotide
  Target: LAMA2; (+) strand; PAM type: YTN; PAM sequence: CTA
tgaatacagaccagggatgt

SEQ ID NO: 316153 - DNA, 20 bp, Artificial Sequence
  Description of Artificial Sequence: Synthetic oligonucleotide
  Target: LAMA2; (+) strand; PAM type: YTN; PAM sequence: TTC
aattcacttgctgccacaat

SEQ ID NO: 316154 - DNA, 20 bp, Artificial Sequence
  Description of Artificial Sequence: Synthetic oligonucleotide
  Target: LAMA2; (+) strand; PAM type: YTN; PAM sequence: TTC
acttgctgccacaatgcttt

SEQ ID NO: 316155 - DNA, 20 bp, Artificial Sequence
  Description of Artificial Sequence: Synthetic oligonucleotide
  Target: LAMA2; (+) strand; PAM type: YTN; PAM sequence: CTT
gctgccacaatgctttcagg

SEQ ID NO: 316156 - DNA, 20 bp, Artificial Sequence
  Description of Artificial Sequence: Synthetic oligonucleotide
  Target: LAMA2; (+) strand; PAM type: YTN; PAM sequence: TTG
ctgccacaatgctttcaggc

SEQ ID NO: 316157 - DNA, 20 bp, Artificial Sequence
  Description of Artificial Sequence: Synthetic oligonucleotide
  Target: LAMA2; (+) strand; PAM type: YTN; PAM sequence: CTG
ccacaatgctttcaggccta

SEQ ID NO: 316158 - DNA, 20 bp, Artificial Sequence
  Description of Artificial Sequence: Synthetic oligonucleotide
  Target: LAMA2; (+) strand; PAM type: YTN; PAM sequence: CTT
tcaggcctaggctctttgca

SEQ ID NO: 316159 - DNA, 20 bp, Artificial Sequence
  Description of Artificial Sequence: Synthetic oligonucleotide
  Target: LAMA2; (+) strand; PAM type: YTN; PAM sequence: TTT
caggcctaggctctttgcag

SEQ ID NO: 316160 - DNA, 20 bp, Artificial Sequence
  Description of Artificial Sequence: Synthetic oligonucleotide
  Target: LAMA2; (+) strand; PAM type: YTN; PAM sequence: TTC
aggcctaggctctttgcaga

SEQ ID NO: 316161 - DNA, 20 bp, Artificial Sequence
  Description of Artificial Sequence: Synthetic oligonucleotide
  Target: LAMA2; (+) strand; PAM type: YTN; PAM sequence: CTA
ggctctttgcagacagagag

SEQ ID NO: 316162 - DNA, 20 bp, Artificial Sequence
  Description of Artificial Sequence: Synthetic oligonucleotide
  Target: LAMA2; (+) strand; PAM type: YTN; PAM sequence: CTC
tttgcagacagagagcagca

SEQ ID NO: 316163 - DNA, 20 bp, Artificial Sequence
  Description of Artificial Sequence: Synthetic oligonucleotide
  Target: LAMA2; (+) strand; PAM type: YTN; PAM sequence: CTT
tgcagacagagagcagcatc

SEQ ID NO: 316164 - DNA, 20 bp, Artificial Sequence
  Description of Artificial Sequence: Synthetic oligonucleotide
  Target: LAMA2; (+) strand; PAM type: YTN; PAM sequence: TTT
gcagacagagagcagcatca

SEQ ID NO: 316165 - DNA, 20 bp, Artificial Sequence
  Description of Artificial Sequence: Synthetic oligonucleotide
  Target: LAMA2; (+) strand; PAM type: YTN; PAM sequence: TTG
cagacagagagcagcatcag

SEQ ID NO: 316166 - DNA, 20 bp, Artificial Sequence
  Description of Artificial Sequence: Synthetic oligonucleotide
  Target: LAMA2; (+) strand; PAM type: YTN; PAM sequence: TTA
ttacctgtgcccagcagggt

SEQ ID NO: 316167 - DNA, 20 bp, Artificial Sequence
  Description of Artificial Sequence: Synthetic oligonucleotide
  Target: LAMA2; (+) strand; PAM type: YTN; PAM sequence: TTA
cctgtgcccagcagggtttg

SEQ ID NO: 316168 - DNA, 20 bp, Artificial Sequence
  Description of Artificial Sequence: Synthetic oligonucleotide
  Target: LAMA2; (+) strand; PAM type: YTN; PAM sequence: CTG
tgcccagcagggtttgttca

SEQ ID NO: 316169 - DNA, 20 bp, Artificial Sequence
  Description of Artificial Sequence: Synthetic oligonucleotide
  Target: LAMA2; (+) strand; PAM type: YTN; PAM sequence: TTT
gttcaactgctaatggtcaa

SEQ ID NO: 316170 - DNA, 20 bp, Artificial Sequence
  Description of Artificial Sequence: Synthetic oligonucleotide
  Target: LAMA2; (+) strand; PAM type: YTN; PAM sequence: TTG
ttcaactgctaatggtcaag

SEQ ID NO: 316171 - DNA, 20 bp, Artificial Sequence
  Description of Artificial Sequence: Synthetic oligonucleotide
  Target: LAMA2; (+) strand; PAM type: YTN; PAM sequence: TTC
aactgctaatggtcaaggta

SEQ ID NO: 316172 - DNA, 20 bp, Artificial Sequence
  Description of Artificial Sequence: Synthetic oligonucleotide
  Target: LAMA2; (+) strand; PAM type: YTN; PAM sequence: CTG
ctaatggtcaaggtagattc

SEQ ID NO: 316173 - DNA, 20 bp, Artificial Sequence
  Description of Artificial Sequence: Synthetic oligonucleotide
  Target: LAMA2; (+) strand; PAM type: YTN; PAM sequence: CTA
atggtcaaggtagattcaag

SEQ ID NO: 316174 - DNA, 20 bp, Artificial Sequence
  Description of Artificial Sequence: Synthetic oligonucleotide
  Target: LAMA2; (+) strand; PAM type: YTN; PAM sequence: TTC
aagccctctatcattcccag

SEQ ID NO: 316175 - DNA, 20 bp, Artificial Sequence
  Description of Artificial Sequence: Synthetic oligonucleotide
  Target: LAMA2; (+) strand; PAM type: YTN; PAM sequence: CTC
tatcattcccagagacatac

SEQ ID NO: 316176 - DNA, 20 bp, Artificial Sequence
  Description of Artificial Sequence: Synthetic oligonucleotide
  Target: LAMA2; (+) strand; PAM type: YTN; PAM sequence: CTA
tcattcccagagacatacaa

SEQ ID NO: 316177 - DNA, 20 bp, Artificial Sequence
  Description of Artificial Sequence: Synthetic oligonucleotide
  Target: LAMA2; (+) strand; PAM type: YTN; PAM sequence: TTC
ccagagacatacaaaatcaa

SEQ ID NO: 316178 - DNA, 20 bp, Artificial Sequence
  Description of Artificial Sequence: Synthetic oligonucleotide
  Target: LAMA2; (+) strand; PAM type: YTN; PAM sequence: CTG
acttaaagagaaatataaat

SEQ ID NO: 316179 - DNA, 20 bp, Artificial Sequence
  Description of Artificial Sequence: Synthetic oligonucleotide
  Target: LAMA2; (+) strand; PAM type: YTN; PAM sequence: CTT
aaagagaaatataaatgaaa

SEQ ID NO: 316180 - DNA, 20 bp, Artificial Sequence
  Description of Artificial Sequence: Synthetic oligonucleotide
  Target: LAMA2; (+) strand; PAM type: YTN; PAM sequence: TTA
aagagaaatataaatgaaat

SEQ ID NO: 316181 - DNA, 20 bp, Artificial Sequence
  Description of Artificial Sequence: Synthetic oligonucleotide
  Target: LAMA2; (+) strand; PAM type: YTN; PAM sequence: TTC
taaaaggaaaagaaaacaaa

SEQ ID NO: 316182 - DNA, 20 bp, Artificial Sequence
  Description of Artificial Sequence: Synthetic oligonucleotide
  Target: LAMA2; (+) strand; PAM type: YTN; PAM sequence: CTA
aaaggaaaagaaaacaaaga

SEQ ID NO: 316183 - DNA, 20 bp, Artificial Sequence
  Description of Artificial Sequence: Synthetic oligonucleotide
  Target: LAMA2; (+) strand; PAM type: YTN; PAM sequence: CTT
ttacaaggcactaaagaaag

SEQ ID NO: 316184 - DNA, 20 bp, Artificial Sequence
  Description of Artificial Sequence: Synthetic oligonucleotide
  Target: LAMA2; (+) strand; PAM type: YTN; PAM sequence: TTT
tacaaggcactaaagaaaga

SEQ ID NO: 316185 - DNA, 20 bp, Artificial Sequence
  Description of Artificial Sequence: Synthetic oligonucleotide
  Target: LAMA2; (+) strand; PAM type: YTN; PAM sequence: TTT
acaaggcactaaagaaagac

SEQ ID NO: 316186 - DNA, 20 bp, Artificial Sequence
  Description of Artificial Sequence: Synthetic oligonucleotide
  Target: LAMA2; (+) strand; PAM type: YTN; PAM sequence: TTA
caaggcactaaagaaagaca

SEQ ID NO: 316187 - DNA, 20 bp, Artificial Sequence
  Description of Artificial Sequence: Synthetic oligonucleotide
  Target: LAMA2; (+) strand; PAM type: YTN; PAM sequence: CTA
aagaaagacacaagggaaca

SEQ ID NO: 316188 - DNA, 20 bp, Artificial Sequence
  Description of Artificial Sequence: Synthetic oligonucleotide
  Target: LAMA2; (+) strand; PAM type: YTN; PAM sequence: TTC
atatagattattttattaaa

SEQ ID NO: 316189 - DNA, 20 bp, Artificial Sequence
  Description of Artificial Sequence: Synthetic oligonucleotide
  Target: LAMA2; (+) strand; PAM type: YTN; PAM sequence: TTA
ttttattaaatatttattga

SEQ ID NO: 316190 - DNA, 20 bp, Artificial Sequence
  Description of Artificial Sequence: Synthetic oligonucleotide
  Target: LAMA2; (+) strand; PAM type: YTN; PAM sequence: TTT
tattaaatatttattgagca

SEQ ID NO: 316191 - DNA, 20 bp, Artificial Sequence
  Description of Artificial Sequence: Synthetic oligonucleotide
  Target: LAMA2; (+) strand; PAM type: YTN; PAM sequence: TTT
attaaatatttattgagcaa

SEQ ID NO: 316192 - DNA, 20 bp, Artificial Sequence
  Description of Artificial Sequence: Synthetic oligonucleotide
  Target: LAMA2; (+) strand; PAM type: YTN; PAM sequence: TTA
ttaaatatttattgagcaaa

SEQ ID NO: 316193 - DNA, 20 bp, Artificial Sequence
  Description of Artificial Sequence: Synthetic oligonucleotide
  Target: LAMA2; (+) strand; PAM type: YTN; PAM sequence: TTA
aatatttattgagcaaaata

SEQ ID NO: 316194 - DNA, 20 bp, Artificial Sequence
  Description of Artificial Sequence: Synthetic oligonucleotide
  Target: LAMA2; (+) strand; PAM type: YTN; PAM sequence: TTT
attgagcaaaatatttgtgc

SEQ ID NO: 316195 - DNA, 20 bp, Artificial Sequence
  Description of Artificial Sequence: Synthetic oligonucleotide
  Target: LAMA2; (+) strand; PAM type: YTN; PAM sequence: TTA
ttgagcaaaatatttgtgcc

SEQ ID NO: 316196 - DNA, 20 bp, Artificial Sequence
  Description of Artificial Sequence: Synthetic oligonucleotide
  Target: LAMA2; (+) strand; PAM type: YTN; PAM sequence: TTG
agcaaaatatttgtgccagg

SEQ ID NO: 316197 - DNA, 20 bp, Artificial Sequence
  Description of Artificial Sequence: Synthetic oligonucleotide
  Target: LAMA2; (+) strand; PAM type: YTN; PAM sequence: TTT
gtgccaggcactgttagatt

SEQ ID NO: 316198 - DNA, 20 bp, Artificial Sequence
  Description of Artificial Sequence: Synthetic oligonucleotide
  Target: LAMA2; (+) strand; PAM type: YTN; PAM sequence: TTG
tgccaggcactgttagattg

SEQ ID NO: 316199 - DNA, 20 bp, Artificial Sequence
  Description of Artificial Sequence: Synthetic oligonucleotide
  Target: LAMA2; (+) strand; PAM type: YTN; PAM sequence: CTG
ttagattggcctcatgagct

SEQ ID NO: 316200 - DNA, 20 bp, Artificial Sequence
  Description of Artificial Sequence: Synthetic oligonucleotide
  Target: LAMA2; (+) strand; PAM type: YTN; PAM sequence: TTA
gattggcctcatgagctttg

SEQ ID NO: 316201 - DNA, 20 bp, Artificial Sequence
  Description of Artificial Sequence: Synthetic oligonucleotide
  Target: LAMA2; (+) strand; PAM type: YTN; PAM sequence: TTG
gcctcatgagctttgcatgg

SEQ ID NO: 316202 - DNA, 20 bp, Artificial Sequence
  Description of Artificial Sequence: Synthetic oligonucleotide
  Target: LAMA2; (+) strand; PAM type: YTN; PAM sequence: CTC
atgagctttgcatgggcacc

SEQ ID NO: 316203 - DNA, 20 bp, Artificial Sequence
  Description of Artificial Sequence: Synthetic oligonucleotide
  Target: LAMA2; (+) strand; PAM type: YTN; PAM sequence: CTT
tgcatgggcacccacttgct

SEQ ID NO: 316204 - DNA, 20 bp, Artificial Sequence
  Description of Artificial Sequence: Synthetic oligonucleotide
  Target: LAMA2; (+) strand; PAM type: YTN; PAM sequence: TTT
gcatgggcacccacttgcta

SEQ ID NO: 316205 - DNA, 20 bp, Artificial Sequence
  Description of Artificial Sequence: Synthetic oligonucleotide
  Target: LAMA2; (+) strand; PAM type: YTN; PAM sequence: TTG
catgggcacccacttgctat

SEQ ID NO: 316206 - DNA, 20 bp, Artificial Sequence
  Description of Artificial Sequence: Synthetic oligonucleotide
  Target: LAMA2; (+) strand; PAM type: YTN; PAM sequence: CTT
gctatacatcaggcttggaa

SEQ ID NO: 316207 - DNA, 20 bp, Artificial Sequence
  Description of Artificial Sequence: Synthetic oligonucleotide
  Target: LAMA2; (+) strand; PAM type: YTN; PAM sequence: TTG
ctatacatcaggcttggaaa

SEQ ID NO: 316208 - DNA, 20 bp, Artificial Sequence
  Description of Artificial Sequence: Synthetic oligonucleotide
  Target: LAMA2; (+) strand; PAM type: YTN; PAM sequence: CTA
tacatcaggcttggaaacat

SEQ ID NO: 316209 - DNA, 20 bp, Artificial Sequence
  Description of Artificial Sequence: Synthetic oligonucleotide
  Target: LAMA2; (+) strand; PAM type: YTN; PAM sequence: CTT
ggaaacatactcctgaccag

SEQ ID NO: 316210 - DNA, 20 bp, Artificial Sequence
  Description of Artificial Sequence: Synthetic oligonucleotide
  Target: LAMA2; (+) strand; PAM type: YTN; PAM sequence: TTG
gaaacatactcctgaccagc

SEQ ID NO: 316211 - DNA, 20 bp, Artificial Sequence
  Description of Artificial Sequence: Synthetic oligonucleotide
  Target: LAMA2; (+) strand; PAM type: YTN; PAM sequence: CTC
ctgaccagcatttatgctag

SEQ ID NO: 316212 - DNA, 20 bp, Artificial Sequence
  Description of Artificial Sequence: Synthetic oligonucleotide
  Target: LAMA2; (+) strand; PAM type: YTN; PAM sequence: CTG
accagcatttatgctagaca

SEQ ID NO: 316213 - DNA, 20 bp, Artificial Sequence
  Description of Artificial Sequence: Synthetic oligonucleotide
  Target: LAMA2; (+) strand; PAM type: YTN; PAM sequence: TTT
atgctagacatgatttatgt

SEQ ID NO: 316214 - DNA, 20 bp, Artificial Sequence
  Description of Artificial Sequence: Synthetic oligonucleotide
  Target: LAMA2; (+) strand; PAM type: YTN; PAM sequence: TTA
tgctagacatgatttatgtc

SEQ ID NO: 316215 - DNA, 20 bp, Artificial Sequence
  Description of Artificial Sequence: Synthetic oligonucleotide
  Target: LAMA2; (+) strand; PAM type: YTN; PAM sequence: CTA
gacatgatttatgtctcata

SEQ ID NO: 316216 - DNA, 20 bp, Artificial Sequence
  Description of Artificial Sequence: Synthetic oligonucleotide
  Target: LAMA2; (+) strand; PAM type: YTN; PAM sequence: TTT
atgtctcatactgtgctaag

SEQ ID NO: 316217 - DNA, 20 bp, Artificial Sequence
  Description of Artificial Sequence: Synthetic oligonucleotide
  Target: LAMA2; (+) strand; PAM type: YTN; PAM sequence: TTA
tgtctcatactgtgctaagg

SEQ ID NO: 316218 - DNA, 20 bp, Artificial Sequence
  Description of Artificial Sequence: Synthetic oligonucleotide
  Target: LAMA2; (+) strand; PAM type: YTN; PAM sequence: CTC
atactgtgctaagggggtga

SEQ ID NO: 316219 - DNA, 20 bp, Artificial Sequence
  Description of Artificial Sequence: Synthetic oligonucleotide
  Target: LAMA2; (+) strand; PAM type: YTN; PAM sequence: CTG
tgctaagggggtgactaaaa

SEQ ID NO: 316220 - DNA, 20 bp, Artificial Sequence
  Description of Artificial Sequence: Synthetic oligonucleotide
  Target: LAMA2; (+) strand; PAM type: YTN; PAM sequence: CTA
agggggtgactaaaatctat

SEQ ID NO: 316221 - DNA, 20 bp, Artificial Sequence
  Description of Artificial Sequence: Synthetic oligonucleotide
  Target: LAMA2; (+) strand; PAM type: YTN; PAM sequence: CTA
aaatctatattgaccaatac

SEQ ID NO: 316222 - DNA, 20 bp, Artificial Sequence
  Description of Artificial Sequence: Synthetic oligonucleotide
  Target: LAMA2; (+) strand; PAM type: YTN; PAM sequence: CTA
tattgaccaatacttgatga

SEQ ID NO: 316223 - DNA, 20 bp, Artificial Sequence
  Description of Artificial Sequence: Synthetic oligonucleotide
  Target: LAMA2; (+) strand; PAM type: YTN; PAM sequence: TTG
accaatacttgatgagtata

SEQ ID NO: 316224 - DNA, 20 bp, Artificial Sequence
  Description of Artificial Sequence: Synthetic oligonucleotide
  Target: LAMA2; (+) strand; PAM type: YTN; PAM sequence: CTT
gatgagtatatttgacagat

SEQ ID NO: 316225 - DNA, 20 bp, Artificial Sequence
  Description of Artificial Sequence: Synthetic oligonucleotide
  Target: LAMA2; (+) strand; PAM type: YTN; PAM sequence: TTG
atgagtatatttgacagatg

SEQ ID NO: 316226 - DNA, 20 bp, Artificial Sequence
  Description of Artificial Sequence: Synthetic oligonucleotide
  Target: LAMA2; (+) strand; PAM type: YTN; PAM sequence: TTT
gacagatgtttaaaagttaa

SEQ ID NO: 316227 - DNA, 20 bp, Artificial Sequence
  Description of Artificial Sequence: Synthetic oligonucleotide
  Target: LAMA2; (+) strand; PAM type: YTN; PAM sequence: TTG
acagatgtttaaaagttaac

SEQ ID NO: 316228 - DNA, 20 bp, Artificial Sequence
  Description of Artificial Sequence: Synthetic oligonucleotide
  Target: LAMA2; (+) strand; PAM type: YTN; PAM sequence: TTT
aaaagttaaccctgctcaaa

SEQ ID NO: 316229 - DNA, 20 bp, Artificial Sequence
  Description of Artificial Sequence: Synthetic oligonucleotide
  Target: LAMA2; (+) strand; PAM type: YTN; PAM sequence: TTA
aaagttaaccctgctcaaaa

SEQ ID NO: 316230 - DNA, 20 bp, Artificial Sequence
  Description of Artificial Sequence: Synthetic oligonucleotide
  Target: LAMA2; (+) strand; PAM type: YTN; PAM sequence: TTA
accctgctcaaaaatgtaac

SEQ ID NO: 316231 - DNA, 20 bp, Artificial Sequence
  Description of Artificial Sequence: Synthetic oligonucleotide
  Target: LAMA2; (+) strand; PAM type: YTN; PAM sequence: CTG
ctcaaaaatgtaacgggatc

SEQ ID NO: 316232 - DNA, 20 bp, Artificial Sequence
  Description of Artificial Sequence: Synthetic oligonucleotide
  Target: LAMA2; (+) strand; PAM type: YTN; PAM sequence: CTC
aaaaatgtaacgggatcttt

SEQ ID NO: 316233 - DNA, 20 bp, Artificial Sequence
  Description of Artificial Sequence: Synthetic oligonucleotide
  Target: LAMA2; (+) strand; PAM type: YTN; PAM sequence: CTT
tactaatcaggatcataggt

SEQ ID NO: 316234 - DNA, 20 bp, Artificial Sequence
  Description of Artificial Sequence: Synthetic oligonucleotide
  Target: LAMA2; (+) strand; PAM type: YTN; PAM sequence: TTT
actaatcaggatcataggtt

SEQ ID NO: 316235 - DNA, 20 bp, Artificial Sequence
  Description of Artificial Sequence: Synthetic oligonucleotide
  Target: LAMA2; (+) strand; PAM type: YTN; PAM sequence: TTA
ctaatcaggatcataggttt

SEQ ID NO: 316236 - DNA, 20 bp, Artificial Sequence
  Description of Artificial Sequence: Synthetic oligonucleotide
  Target: LAMA2; (+) strand; PAM type: YTN; PAM sequence: CTA
atcaggatcataggtttgca

SEQ ID NO: 316237 - DNA, 20 bp, Artificial Sequence
  Description of Artificial Sequence: Synthetic oligonucleotide
  Target: LAMA2; (+) strand; PAM type: YTN; PAM sequence: TTT
gcatgggttcctaggaggaa

SEQ ID NO: 316238 - DNA, 20 bp, Artificial Sequence
  Description of Artificial Sequence: Synthetic oligonucleotide
  Target: LAMA2; (+) strand; PAM type: YTN; PAM sequence: TTG
catgggttcctaggaggaaa

SEQ ID NO: 316239 - DNA, 20 bp, Artificial Sequence
  Description of Artificial Sequence: Synthetic oligonucleotide
  Target: LAMA2; (+) strand; PAM type: YTN; PAM sequence: TTC
ctaggaggaaaagaatgagt

SEQ ID NO: 316240 - DNA, 20 bp, Artificial Sequence
  Description of Artificial Sequence: Synthetic oligonucleotide
  Target: LAMA2; (+) strand; PAM type: YTN; PAM sequence: CTA
ggaggaaaagaatgagtggg

SEQ ID NO: 316241 - DNA, 20 bp, Artificial Sequence
  Description of Artificial Sequence: Synthetic oligonucleotide
  Target: LAMA2; (+) strand; PAM type: YTN; PAM sequence: TTT
atacaccaagcatcaaagga

SEQ ID NO: 316242 - DNA, 20 bp, Artificial Sequence
  Description of Artificial Sequence: Synthetic oligonucleotide
  Target: LAMA2; (+) strand; PAM type: YTN; PAM sequence: TTA
tacaccaagcatcaaaggac

SEQ ID NO: 316243 - DNA, 20 bp, Artificial Sequence
  Description of Artificial Sequence: Synthetic oligonucleotide
  Target: LAMA2; (+) strand; PAM type: YTN; PAM sequence: CTC
cattctcaccctagggaaac

SEQ ID NO: 316244 - DNA, 20 bp, Artificial Sequence
  Description of Artificial Sequence: Synthetic oligonucleotide
  Target: LAMA2; (+) strand; PAM type: YTN; PAM sequence: TTC
tcaccctagggaaacacgga

SEQ ID NO: 316245 - DNA, 20 bp, Artificial Sequence
  Description of Artificial Sequence: Synthetic oligonucleotide
  Target: LAMA2; (+) strand; PAM type: YTN; PAM sequence: CTC
accctagggaaacacggatt

SEQ ID NO: 316246 - DNA, 20 bp, Artificial Sequence
  Description of Artificial Sequence: Synthetic oligonucleotide
  Target: LAMA2; (+) strand; PAM type: YTN; PAM sequence: CTA
gggaaacacggattttactg

SEQ ID NO: 316247 - DNA, 20 bp, Artificial Sequence
  Description of Artificial Sequence: Synthetic oligonucleotide
  Target: LAMA2; (+) strand; PAM type: YTN; PAM sequence: TTT
tactgctcaggggatgatga

SEQ ID NO: 316248 - DNA, 20 bp, Artificial Sequence
  Description of Artificial Sequence: Synthetic oligonucleotide
  Target: LAMA2; (+) strand; PAM type: YTN; PAM sequence: TTT
actgctcaggggatgatgaa

SEQ ID NO: 316249 - DNA, 20 bp, Artificial Sequence
  Description of Artificial Sequence: Synthetic oligonucleotide
  Target: LAMA2; (+) strand; PAM type: YTN; PAM sequence: TTA
ctgctcaggggatgatgaaa

SEQ ID NO: 316250 - DNA, 20 bp, Artificial Sequence
  Description of Artificial Sequence: Synthetic oligonucleotide
  Target: LAMA2; (+) strand; PAM type: YTN; PAM sequence: CTG
ctcaggggatgatgaaaatt

SEQ ID NO: 316251 - DNA, 20 bp, Artificial Sequence
  Description of Artificial Sequence: Synthetic oligonucleotide
  Target: LAMA2; (+) strand; PAM type: YTN; PAM sequence: CTC
aggggatgatgaaaattgga

SEQ ID NO: 316252 - DNA, 20 bp, Artificial Sequence
  Description of Artificial Sequence: Synthetic oligonucleotide
  Target: LAMA2; (+) strand; PAM type: YTN; PAM sequence: TTG
gattccgacttttacacctc

SEQ ID NO: 316253 - DNA, 20 bp, Artificial Sequence
  Description of Artificial Sequence: Synthetic oligonucleotide
  Target: LAMA2; (+) strand; PAM type: YTN; PAM sequence: TTC
cgacttttacacctcagatt

SEQ ID NO: 316254 - DNA, 20 bp, Artificial Sequence
  Description of Artificial Sequence: Synthetic oligonucleotide
  Target: LAMA2; (+) strand; PAM type: YTN; PAM sequence: CTT
ttacacctcagattatttct

SEQ ID NO: 316255 - DNA, 20 bp, Artificial Sequence
  Description of Artificial Sequence: Synthetic oligonucleotide
  Target: LAMA2; (+) strand; PAM type: YTN; PAM sequence: TTT
tacacctcagattatttcta

SEQ ID NO: 316256 - DNA, 20 bp, Artificial Sequence
  Description of Artificial Sequence: Synthetic oligonucleotide
  Target: LAMA2; (+) strand; PAM type: YTN; PAM sequence: TTT
acacctcagattatttctat

SEQ ID NO: 316257 - DNA, 20 bp, Artificial Sequence
  Description of Artificial Sequence: Synthetic oligonucleotide
  Target: LAMA2; (+) strand; PAM type: YTN; PAM sequence: TTA
cacctcagattatttctatt

SEQ ID NO: 316258 - DNA, 20 bp, Artificial Sequence
  Description of Artificial Sequence: Synthetic oligonucleotide
  Target: LAMA2; (+) strand; PAM type: YTN; PAM sequence: CTC
agattatttctattaattac

SEQ ID NO: 316259 - DNA, 20 bp, Artificial Sequence
  Description of Artificial Sequence: Synthetic oligonucleotide
  Target: LAMA2; (+) strand; PAM type: YTN; PAM sequence: TTA
tttctattaattacacctca

SEQ ID NO: 316260 - DNA, 20 bp, Artificial Sequence
  Description of Artificial Sequence: Synthetic oligonucleotide
  Target: LAMA2; (+) strand; PAM type: YTN; PAM sequence: TTT
ctattaattacacctcagat

SEQ ID NO: 316261 - DNA, 20 bp, Artificial Sequence
  Description of Artificial Sequence: Synthetic oligonucleotide
  Target: LAMA2; (+) strand; PAM type: YTN; PAM sequence: TTC
tattaattacacctcagatt

SEQ ID NO: 316262 - DNA, 20 bp, Artificial Sequence
  Description of Artificial Sequence: Synthetic oligonucleotide
  Target: LAMA2; (+) strand; PAM type: YTN; PAM sequence: CTA
ttaattacacctcagattat

SEQ ID NO: 316263 - DNA, 20 bp, Artificial Sequence
  Description of Artificial Sequence: Synthetic oligonucleotide
  Target: LAMA2; (+) strand; PAM type: YTN; PAM sequence: TTA
attacacctcagattatttc

SEQ ID NO: 316264 - DNA, 20 bp, Artificial Sequence
  Description of Artificial Sequence: Synthetic oligonucleotide
  Target: LAMA2; (+) strand; PAM type: YTN; PAM sequence: TTA
cacctcagattatttctatt

SEQ ID NO: 316265 - DNA, 20 bp, Artificial Sequence
  Description of Artificial Sequence: Synthetic oligonucleotide
  Target: LAMA2; (+) strand; PAM type: YTN; PAM sequence: CTC
agattatttctattacacct

SEQ ID NO: 316266 - DNA, 20 bp, Artificial Sequence
  Description of Artificial Sequence: Synthetic oligonucleotide
  Target: LAMA2; (+) strand; PAM type: YTN; PAM sequence: TTA
tttctattacacctcagatt

SEQ ID NO: 316267 - DNA, 20 bp, Artificial Sequence
  Description of Artificial Sequence: Synthetic oligonucleotide
  Target: LAMA2; (+) strand; PAM type: YTN; PAM sequence: TTT
ctattacacctcagattatt

SEQ ID NO: 316268 - DNA, 20 bp, Artificial Sequence
  Description of Artificial Sequence: Synthetic oligonucleotide
  Target: LAMA2; (+) strand; PAM type: YTN; PAM sequence: TTC
tattacacctcagattatta

SEQ ID NO: 316269 - DNA, 20 bp, Artificial Sequence
  Description of Artificial Sequence: Synthetic oligonucleotide
  Target: LAMA2; (+) strand; PAM type: YTN; PAM sequence: CTA
ttacacctcagattattatc

SEQ ID NO: 316270 - DNA, 20 bp, Artificial Sequence
  Description of Artificial Sequence: Synthetic oligonucleotide
  Target: LAMA2; (+) strand; PAM type: YTN; PAM sequence: TTA
cacctcagattattatctca

SEQ ID NO: 316271 - DNA, 20 bp, Artificial Sequence
  Description of Artificial Sequence: Synthetic oligonucleotide
  Target: LAMA2; (+) strand; PAM type: YTN; PAM sequence: CTC
agattattatctcagattat

SEQ ID NO: 316272 - DNA, 20 bp, Artificial Sequence
  Description of Artificial Sequence: Synthetic oligonucleotide
  Target: LAMA2; (+) strand; PAM type: YTN; PAM sequence: TTA
ttatctcagattattatcta

SEQ ID NO: 316273 - DNA, 20 bp, Artificial Sequence
  Description of Artificial Sequence: Synthetic oligonucleotide
  Target: LAMA2; (+) strand; PAM type: YTN; PAM sequence: TTA
tctcagattattatctatta

SEQ ID NO: 316274 - DNA, 20 bp, Artificial Sequence
  Description of Artificial Sequence: Synthetic oligonucleotide
  Target: LAMA2; (+) strand; PAM type: YTN; PAM sequence: CTC
agattattatctattacacc

SEQ ID NO: 316275 - DNA, 20 bp, Artificial Sequence
  Description of Artificial Sequence: Synthetic oligonucleotide
  Target: LAMA2; (+) strand; PAM type: YTN; PAM sequence: TTA
ttatctattacacctcagat

SEQ ID NO: 316276 - DNA, 20 bp, Artificial Sequence
  Description of Artificial Sequence: Synthetic oligonucleotide
  Target: LAMA2; (+) strand; PAM type: YTN; PAM sequence: TTA
tctattacacctcagattat

SEQ ID NO: 316277 - DNA, 20 bp, Artificial Sequence
  Description of Artificial Sequence: Synthetic oligonucleotide
  Target: LAMA2; (+) strand; PAM type: YTN; PAM sequence: CTA
ttacacctcagattatttct

SEQ ID NO: 316278 - DNA, 20 bp, Artificial Sequence
  Description of Artificial Sequence: Synthetic oligonucleotide
  Target: LAMA2; (+) strand; PAM type: YTN; PAM sequence: TTA
cacctcagattatttctatt

SEQ ID NO: 316279 - DNA, 20 bp, Artificial Sequence
  Description of Artificial Sequence: Synthetic oligonucleotide
  Target: LAMA2; (+) strand; PAM type: YTN; PAM sequence: CTC
agattatttctattattcag

SEQ ID NO: 316280 - DNA, 20 bp, Artificial Sequence
  Description of Artificial Sequence: Synthetic oligonucleotide
  Target: LAMA2; (+) strand; PAM type: YTN; PAM sequence: TTA
tttctattattcagtcttag

SEQ ID NO: 316281 - DNA, 20 bp, Artificial Sequence
  Description of Artificial Sequence: Synthetic oligonucleotide
  Target: LAMA2; (+) strand; PAM type: YTN; PAM sequence: TTT
ctattattcagtcttagccg

SEQ ID NO: 316282 - DNA, 20 bp, Artificial Sequence
  Description of Artificial Sequence: Synthetic oligonucleotide
  Target: LAMA2; (+) strand; PAM type: YTN; PAM sequence: TTC
tattattcagtcttagccga

SEQ ID NO: 316283 - DNA, 20 bp, Artificial Sequence
  Description of Artificial Sequence: Synthetic oligonucleotide
  Target: LAMA2; (+) strand; PAM type: YTN; PAM sequence: CTA
ttattcagtcttagccgaag

SEQ ID NO: 316284 - DNA, 20 bp, Artificial Sequence
  Description of Artificial Sequence: Synthetic oligonucleotide
  Target: LAMA2; (+) strand; PAM type: YTN; PAM sequence: TTA
ttcagtcttagccgaagatt

SEQ ID NO: 316285 - DNA, 20 bp, Artificial Sequence
  Description of Artificial Sequence: Synthetic oligonucleotide
  Target: LAMA2; (+) strand; PAM type: YTN; PAM sequence: TTC
agtcttagccgaagattccc

SEQ ID NO: 316286 - DNA, 20 bp, Artificial Sequence
  Description of Artificial Sequence: Synthetic oligonucleotide
  Target: LAMA2; (+) strand; PAM type: YTN; PAM sequence: CTT
agccgaagattcccagcccc

SEQ ID NO: 316287 - DNA, 20 bp, Artificial Sequence
  Description of Artificial Sequence: Synthetic oligonucleotide
  Target: LAMA2; (+) strand; PAM type: YTN; PAM sequence: TTA
gccgaagattcccagcccca

SEQ ID NO: 316288 - DNA, 20 bp, Artificial Sequence
  Description of Artificial Sequence: Synthetic oligonucleotide
  Target: LAMA2; (+) strand; PAM type: YTN; PAM sequence: TTC
ccagccccaggtccatcgtt

SEQ ID NO: 316289 - DNA, 20 bp, Artificial Sequence
  Description of Artificial Sequence: Synthetic oligonucleotide
  Target: LAMA2; (+) strand; PAM type: YTN; PAM sequence: TTG
ctcaagggtaagatcacaga

SEQ ID NO: 316290 - DNA, 20 bp, Artificial Sequence
  Description of Artificial Sequence: Synthetic oligonucleotide
  Target: LAMA2; (+) strand; PAM type: YTN; PAM sequence: CTC
aagggtaagatcacagacct

SEQ ID NO: 316291 - DNA, 20 bp, Artificial Sequence
  Description of Artificial Sequence: Synthetic oligonucleotide
  Target: LAMA2; (+) strand; PAM type: YTN; PAM sequence: CTA
gtgcctgcattatttccctt

SEQ ID NO: 316292 - DNA, 20 bp, Artificial Sequence
  Description of Artificial Sequence: Synthetic oligonucleotide
  Target: LAMA2; (+) strand; PAM type: YTN; PAM sequence: CTG
cattatttcccttctgtgca

SEQ ID NO: 316293 - DNA, 20 bp, Artificial Sequence
  Description of Artificial Sequence: Synthetic oligonucleotide
  Target: LAMA2; (+) strand; PAM type: YTN; PAM sequence: TTA
tttcccttctgtgcaaatcg

SEQ ID NO: 316294 - DNA, 20 bp, Artificial Sequence
  Description of Artificial Sequence: Synthetic oligonucleotide
  Target: LAMA2; (+) strand; PAM type: YTN; PAM sequence: TTT
cccttctgtgcaaatcgtga

SEQ ID NO: 316295 - DNA, 20 bp, Artificial Sequence
  Description of Artificial Sequence: Synthetic oligonucleotide
  Target: LAMA2; (+) strand; PAM type: YTN; PAM sequence: TTC
ccttctgtgcaaatcgtgag

SEQ ID NO: 316296 - DNA, 20 bp, Artificial Sequence
  Description of Artificial Sequence: Synthetic oligonucleotide
  Target: LAMA2; (+) strand; PAM type: YTN; PAM sequence: CTT
ctgtgcaaatcgtgagggcc

SEQ ID NO: 316297 - DNA, 20 bp, Artificial Sequence
  Description of Artificial Sequence: Synthetic oligonucleotide
  Target: LAMA2; (+) strand; PAM type: YTN; PAM sequence: TTC
tgtgcaaatcgtgagggcca

SEQ ID NO: 316298 - DNA, 20 bp, Artificial Sequence
  Description of Artificial Sequence: Synthetic oligonucleotide
  Target: LAMA2; (+) strand; PAM type: YTN; PAM sequence: CTG
tgcaaatcgtgagggccaat

SEQ ID NO: 316299 - DNA, 20 bp, Artificial Sequence
  Description of Artificial Sequence: Synthetic oligonucleotide
  Target: LAMA2; (+) strand; PAM type: YTN; PAM sequence: TTT
tgctctctaaaaatttgcat

SEQ ID NO: 316300 - DNA, 20 bp, Artificial Sequence
  Description of Artificial Sequence: Synthetic oligonucleotide
  Target: LAMA2; (+) strand; PAM type: YTN; PAM sequence: TTT
gctctctaaaaatttgcatt

SEQ ID NO: 316301 - DNA, 20 bp, Artificial Sequence
  Description of Artificial Sequence: Synthetic oligonucleotide
  Target: LAMA2; (+) strand; PAM type: YTN; PAM sequence: TTG
ctctctaaaaatttgcatta

SEQ ID NO: 316302 - DNA, 20 bp, Artificial Sequence
  Description of Artificial Sequence: Synthetic oligonucleotide
  Target: LAMA2; (+) strand; PAM type: YTN; PAM sequence: CTC
tctaaaaatttgcattaaac

SEQ ID NO: 316303 - DNA, 20 bp, Artificial Sequence
  Description of Artificial Sequence: Synthetic oligonucleotide
  Target: LAMA2; (+) strand; PAM type: YTN; PAM sequence: CTC
taaaaatttgcattaaacag

SEQ ID NO: 316304 - DNA, 20 bp, Artificial Sequence
  Description of Artificial Sequence: Synthetic oligonucleotide
  Target: LAMA2; (+) strand; PAM type: YTN; PAM sequence: CTA
aaaatttgcattaaacagac

SEQ ID NO: 316305 - DNA, 20 bp, Artificial Sequence
  Description of Artificial Sequence: Synthetic oligonucleotide
  Target: LAMA2; (+) strand; PAM type: YTN; PAM sequence: TTT
gcattaaacagaccaatcac

SEQ ID NO: 316306 - DNA, 20 bp, Artificial Sequence
  Description of Artificial Sequence: Synthetic oligonucleotide
  Target: LAMA2; (+) strand; PAM type: YTN; PAM sequence: TTG
cattaaacagaccaatcact

SEQ ID NO: 316307 - DNA, 20 bp, Artificial Sequence
  Description of Artificial Sequence: Synthetic oligonucleotide
  Target: LAMA2; (+) strand; PAM type: YTN; PAM sequence: TTA
aacagaccaatcactagatt

SEQ ID NO: 316308 - DNA, 20 bp, Artificial Sequence
  Description of Artificial Sequence: Synthetic oligonucleotide
  Target: LAMA2; (+) strand; PAM type: YTN; PAM sequence: CTA
gattccttctacagatcaaa

SEQ ID NO: 316309 - DNA, 20 bp, Artificial Sequence
  Description of Artificial Sequence: Synthetic oligonucleotide
  Target: LAMA2; (+) strand; PAM type: YTN; PAM sequence: TTC
cttctacagatcaaaatgca

SEQ ID NO: 316310 - DNA, 20 bp, Artificial Sequence
  Description of Artificial Sequence: Synthetic oligonucleotide
  Target: LAMA2; (+) strand; PAM type: YTN; PAM sequence: CTT
ctacagatcaaaatgcattt

SEQ ID NO: 316311 - DNA, 20 bp, Artificial Sequence
  Description of Artificial Sequence: Synthetic oligonucleotide
  Target: LAMA2; (+) strand; PAM type: YTN; PAM sequence: TTC
tacagatcaaaatgcattta

SEQ ID NO: 316312 - DNA, 20 bp, Artificial Sequence
  Description of Artificial Sequence: Synthetic oligonucleotide
  Target: LAMA2; (+) strand; PAM type: YTN; PAM sequence: CTA
cagatcaaaatgcatttatt

SEQ ID NO: 316313 - DNA, 20 bp, Artificial Sequence
  Description of Artificial Sequence: Synthetic oligonucleotide
  Target: LAMA2; (+) strand; PAM type: YTN; PAM sequence: TTT
attcaatcaaacaaaaggga

SEQ ID NO: 316314 - DNA, 20 bp, Artificial Sequence
  Description of Artificial Sequence: Synthetic oligonucleotide
  Target: LAMA2; (+) strand; PAM type: YTN; PAM sequence: TTA
ttcaatcaaacaaaagggaa

SEQ ID NO: 316315 - DNA, 20 bp, Artificial Sequence
  Description of Artificial Sequence: Synthetic oligonucleotide
  Target: LAMA2; (+) strand; PAM type: YTN; PAM sequence: TTC
aatcaaacaaaagggaatcc

SEQ ID NO: 316316 - DNA, 20 bp, Artificial Sequence
  Description of Artificial Sequence: Synthetic oligonucleotide
  Target: LAMA2; (+) strand; PAM type: YTN; PAM sequence: CTA
aggaagggctttccctccag

SEQ ID NO: 316317 - DNA, 20 bp, Artificial Sequence
  Description of Artificial Sequence: Synthetic oligonucleotide
  Target: LAMA2; (+) strand; PAM type: YTN; PAM sequence: CTT
tccctccagtctggtgagca

SEQ ID NO: 316318 - DNA, 20 bp, Artificial Sequence
  Description of Artificial Sequence: Synthetic oligonucleotide
  Target: LAMA2; (+) strand; PAM type: YTN; PAM sequence: TTT
ccctccagtctggtgagcag

SEQ ID NO: 316319 - DNA, 20 bp, Artificial Sequence
  Description of Artificial Sequence: Synthetic oligonucleotide
  Target: LAMA2; (+) strand; PAM type: YTN; PAM sequence: TTC
cctccagtctggtgagcagt

SEQ ID NO: 316320 - DNA, 20 bp, Artificial Sequence
  Description of Artificial Sequence: Synthetic oligonucleotide
  Target: LAMA2; (+) strand; PAM type: YTN; PAM sequence: CTC
cagtctggtgagcagtggct

SEQ ID NO: 316321 - DNA, 20 bp, Artificial Sequence
  Description of Artificial Sequence: Synthetic oligonucleotide
  Target: LAMA2; (+) strand; PAM type: YTN; PAM sequence: CTG
gtgagcagtggctgtggctc

SEQ ID NO: 316322 - DNA, 20 bp, Artificial Sequence
  Description of Artificial Sequence: Synthetic oligonucleotide
  Target: LAMA2; (+) strand; PAM type: YTN; PAM sequence: CTG
tggctctgctggctctattt

SEQ ID NO: 316323 - DNA, 20 bp, Artificial Sequence
  Description of Artificial Sequence: Synthetic oligonucleotide
  Target: LAMA2; (+) strand; PAM type: YTN; PAM sequence: CTC
tgctggctctattttgtgag

SEQ ID NO: 316324 - DNA, 20 bp, Artificial Sequence
  Description of Artificial Sequence: Synthetic oligonucleotide
  Target: LAMA2; (+) strand; PAM type: YTN; PAM sequence: CTG
ctggctctattttgtgaggt

SEQ ID NO: 316325 - DNA, 20 bp, Artificial Sequence
  Description of Artificial Sequence: Synthetic oligonucleotide
  Target: LAMA2; (+) strand; PAM type: YTN; PAM sequence: CTG
gctctattttgtgaggtctt

SEQ ID NO: 316326 - DNA, 20 bp, Artificial Sequence
  Description of Artificial Sequence: Synthetic oligonucleotide
  Target: LAMA2; (+) strand; PAM type: YTN; PAM sequence: CTC
tattttgtgaggtctttata

SEQ ID NO: 316327 - DNA, 20 bp, Artificial Sequence
  Description of Artificial Sequence: Synthetic oligonucleotide
  Target: LAMA2; (+) strand; PAM type: YTN; PAM sequence: CTA
ttttgtgaggtctttataaa

SEQ ID NO: 316328 - DNA, 20 bp, Artificial Sequence
  Description of Artificial Sequence: Synthetic oligonucleotide
  Target: LAMA2; (+) strand; PAM type: YTN; PAM sequence: TTT
tgtgaggtctttataaatga

SEQ ID NO: 316329 - DNA, 20 bp, Artificial Sequence
  Description of Artificial Sequence: Synthetic oligonucleotide
  Target: LAMA2; (+) strand; PAM type: YTN; PAM sequence: TTT
gtgaggtctttataaatgac

SEQ ID NO: 316330 - DNA, 20 bp, Artificial Sequence
  Description of Artificial Sequence: Synthetic oligonucleotide
  Target: LAMA2; (+) strand; PAM type: YTN; PAM sequence: TTG
tgaggtctttataaatgacc

SEQ ID NO: 316331 - DNA, 20 bp, Artificial Sequence
  Description of Artificial Sequence: Synthetic oligonucleotide
  Target: LAMA2; (+) strand; PAM type: YTN; PAM sequence: CTT
tataaatgaccacaattaag

SEQ ID NO: 316332 - DNA, 20 bp, Artificial Sequence
  Description of Artificial Sequence: Synthetic oligonucleotide
  Target: LAMA2; (+) strand; PAM type: YTN; PAM sequence: TTT
ataaatgaccacaattaagc

SEQ ID NO: 316333 - DNA, 20 bp, Artificial Sequence
  Description of Artificial Sequence: Synthetic oligonucleotide
  Target: LAMA2; (+) strand; PAM type: YTN; PAM sequence: TTA
taaatgaccacaattaagct

SEQ ID NO: 316334 - DNA, 20 bp, Artificial Sequence
  Description of Artificial Sequence: Synthetic oligonucleotide
  Target: LAMA2; (+) strand; PAM type: YTN; PAM sequence: TTA
agctgtagatgtactcatgc

SEQ ID NO: 316335 - DNA, 20 bp, Artificial Sequence
  Description of Artificial Sequence: Synthetic oligonucleotide
  Target: LAMA2; (+) strand; PAM type: YTN; PAM sequence: CTG
tagatgtactcatgccctag

SEQ ID NO: 316336 - DNA, 20 bp, Artificial Sequence
  Description of Artificial Sequence: Synthetic oligonucleotide
  Target: LAMA2; (+) strand; PAM type: YTN; PAM sequence: CTC
atgccctagatgtaaccatc

SEQ ID NO: 316337 - DNA, 20 bp, Artificial Sequence
  Description of Artificial Sequence: Synthetic oligonucleotide
  Target: LAMA2; (+) strand; PAM type: YTN; PAM sequence: CTA
gatgtaaccatccgttctgg

SEQ ID NO: 316338 - DNA, 20 bp, Artificial Sequence
  Description of Artificial Sequence: Synthetic oligonucleotide
  Target: LAMA2; (+) strand; PAM type: YTN; PAM sequence: TTC
tggggaatatggcttgataa

SEQ ID NO: 316339 - DNA, 20 bp, Artificial Sequence
  Description of Artificial Sequence: Synthetic oligonucleotide
  Target: LAMA2; (+) strand; PAM type: YTN; PAM sequence: CTG
gggaatatggcttgataaac

SEQ ID NO: 316340 - DNA, 20 bp, Artificial Sequence
  Description of Artificial Sequence: Synthetic oligonucleotide
  Target: LAMA2; (+) strand; PAM type: YTN; PAM sequence: CTT
gataaacccattggtgtcta

SEQ ID NO: 316341 - DNA, 20 bp, Artificial Sequence
  Description of Artificial Sequence: Synthetic oligonucleotide
  Target: LAMA2; (+) strand; PAM type: YTN; PAM sequence: TTG
ataaacccattggtgtctaa

SEQ ID NO: 316342 - DNA, 20 bp, Artificial Sequence
  Description of Artificial Sequence: Synthetic oligonucleotide
  Target: LAMA2; (+) strand; PAM type: YTN; PAM sequence: TTG
gtgtctaacacttattcatg

SEQ ID NO: 316343 - DNA, 20 bp, Artificial Sequence
  Description of Artificial Sequence: Synthetic oligonucleotide
  Target: LAMA2; (+) strand; PAM type: YTN; PAM sequence: CTA
acacttattcatgtcactca

SEQ ID NO: 316344 - DNA, 20 bp, Artificial Sequence
  Description of Artificial Sequence: Synthetic oligonucleotide
  Target: LAMA2; (+) strand; PAM type: YTN; PAM sequence: CTT
attcatgtcactcattcatt

SEQ ID NO: 316345 - DNA, 20 bp, Artificial Sequence
  Description of Artificial Sequence: Synthetic oligonucleotide
  Target: LAMA2; (+) strand; PAM type: YTN; PAM sequence: TTA
ttcatgtcactcattcattc

SEQ ID NO: 316346 - DNA, 20 bp, Artificial Sequence
  Description of Artificial Sequence: Synthetic oligonucleotide
  Target: LAMA2; (+) strand; PAM type: YTN; PAM sequence: TTC
atgtcactcattcattcatt

SEQ ID NO: 316347 - DNA, 20 bp, Artificial Sequence
  Description of Artificial Sequence: Synthetic oligonucleotide
  Target: LAMA2; (+) strand; PAM type: YTN; PAM sequence: CTC
attcattcattcatttattc

SEQ ID NO: 316348 - DNA, 20 bp, Artificial Sequence
  Description of Artificial Sequence: Synthetic oligonucleotide
  Target: LAMA2; (+) strand; PAM type: YTN; PAM sequence: TTC
attcattcatttattcaaac

SEQ ID NO: 316349 - DNA, 20 bp, Artificial Sequence
  Description of Artificial Sequence: Synthetic oligonucleotide
  Target: LAMA2; (+) strand; PAM type: YTN; PAM sequence: TTC
attcatttattcaaacaaat

SEQ ID NO: 316350 - DNA, 20 bp, Artificial Sequence
  Description of Artificial Sequence: Synthetic oligonucleotide
  Target: LAMA2; (+) strand; PAM type: YTN; PAM sequence: TTC
atttattcaaacaaatattt

SEQ ID NO: 316351 - DNA, 20 bp, Artificial Sequence
  Description of Artificial Sequence: Synthetic oligonucleotide
  Target: LAMA2; (+) strand; PAM type: YTN; PAM sequence: TTT
attcaaacaaatatttttga

SEQ ID NO: 316352 - DNA, 20 bp, Artificial Sequence
  Description of Artificial Sequence: Synthetic oligonucleotide
  Target: LAMA2; (+) strand; PAM type: YTN; PAM sequence: TTA
ttcaaacaaatatttttgag

SEQ ID NO: 316353 - DNA, 20 bp, Artificial Sequence
  Description of Artificial Sequence: Synthetic oligonucleotide
  Target: LAMA2; (+) strand; PAM type: YTN; PAM sequence: TTC
aaacaaatatttttgagctc

SEQ ID NO: 316354 - DNA, 20 bp, Artificial Sequence
  Description of Artificial Sequence: Synthetic oligonucleotide
  Target: LAMA2; (+) strand; PAM type: YTN; PAM sequence: TTT
ttgagctcttatgaggtgcc

SEQ ID NO: 316355 - DNA, 20 bp, Artificial Sequence
  Description of Artificial Sequence: Synthetic oligonucleotide
  Target: LAMA2; (+) strand; PAM type: YTN; PAM sequence: TTT
tgagctcttatgaggtgcca

SEQ ID NO: 316356 - DNA, 20 bp, Artificial Sequence
  Description of Artificial Sequence: Synthetic oligonucleotide
  Target: LAMA2; (+) strand; PAM type: YTN; PAM sequence: TTT
gagctcttatgaggtgccag

SEQ ID NO: 316357 - DNA, 20 bp, Artificial Sequence
  Description of Artificial Sequence: Synthetic oligonucleotide
  Target: LAMA2; (+) strand; PAM type: YTN; PAM sequence: TTG
agctcttatgaggtgccagg

SEQ ID NO: 316358 - DNA, 20 bp, Artificial Sequence
  Description of Artificial Sequence: Synthetic oligonucleotide
  Target: LAMA2; (+) strand; PAM type: YTN; PAM sequence: CTC
ttatgaggtgccaggcactg

SEQ ID NO: 316359 - DNA, 20 bp, Artificial Sequence
  Description of Artificial Sequence: Synthetic oligonucleotide
  Target: LAMA2; (+) strand; PAM type: YTN; PAM sequence: CTT
atgaggtgccaggcactgtt

SEQ ID NO: 316360 - DNA, 20 bp, Artificial Sequence
  Description of Artificial Sequence: Synthetic oligonucleotide
  Target: LAMA2; (+) strand; PAM type: YTN; PAM sequence: TTA
tgaggtgccaggcactgttc

SEQ ID NO: 316361 - DNA, 20 bp, Artificial Sequence
  Description of Artificial Sequence: Synthetic oligonucleotide
  Target: LAMA2; (+) strand; PAM type: YTN; PAM sequence: CTG
ttctaagcaatgggaaaaca

SEQ ID NO: 316362 - DNA, 20 bp, Artificial Sequence
  Description of Artificial Sequence: Synthetic oligonucleotide
  Target: LAMA2; (+) strand; PAM type: YTN; PAM sequence: TTC
taagcaatgggaaaacagga

SEQ ID NO: 316363 - DNA, 20 bp, Artificial Sequence
  Description of Artificial Sequence: Synthetic oligonucleotide
  Target: LAMA2; (+) strand; PAM type: YTN; PAM sequence: CTA
agcaatgggaaaacaggagt

SEQ ID NO: 316364 - DNA, 20 bp, Artificial Sequence
  Description of Artificial Sequence: Synthetic oligonucleotide
  Target: LAMA2; (+) strand; PAM type: YTN; PAM sequence: TTC
ttatgatgtttttattttag

SEQ ID NO: 316365 - DNA, 20 bp, Artificial Sequence
  Description of Artificial Sequence: Synthetic oligonucleotide
  Target: LAMA2; (+) strand; PAM type: YTN; PAM sequence: CTT
atgatgtttttattttagag

SEQ ID NO: 316366 - DNA, 20 bp, Artificial Sequence
  Description of Artificial Sequence: Synthetic oligonucleotide
  Target: LAMA2; (+) strand; PAM type: YTN; PAM sequence: TTA
tgatgtttttattttagagg

SEQ ID NO: 316367 - DNA, 20 bp, Artificial Sequence
  Description of Artificial Sequence: Synthetic oligonucleotide
  Target: LAMA2; (+) strand; PAM type: YTN; PAM sequence: TTT
ttattttagaggggatagga

SEQ ID NO: 316368 - DNA, 20 bp, Artificial Sequence
  Description of Artificial Sequence: Synthetic oligonucleotide
  Target: LAMA2; (+) strand; PAM type: YTN; PAM sequence: TTT
tattttagaggggataggaa

SEQ ID NO: 316369 - DNA, 20 bp, Artificial Sequence
  Description of Artificial Sequence: Synthetic oligonucleotide
  Target: LAMA2; (+) strand; PAM type: YTN; PAM sequence: TTT
attttagaggggataggaag

SEQ ID NO: 316370 - DNA, 20 bp, Artificial Sequence
  Description of Artificial Sequence: Synthetic oligonucleotide
  Target: LAMA2; (+) strand; PAM type: YTN; PAM sequence: TTA
ttttagaggggataggaaga

SEQ ID NO: 316371 - DNA, 20 bp, Artificial Sequence
  Description of Artificial Sequence: Synthetic oligonucleotide
  Target: LAMA2; (+) strand; PAM type: YTN; PAM sequence: TTT
tagaggggataggaagaagg

SEQ ID NO: 316372 - DNA, 20 bp, Artificial Sequence
  Description of Artificial Sequence: Synthetic oligonucleotide
  Target: LAMA2; (+) strand; PAM type: YTN; PAM sequence: TTT
agaggggataggaagaagga

SEQ ID NO: 316373 - DNA, 20 bp, Artificial Sequence
  Description of Artificial Sequence: Synthetic oligonucleotide
  Target: LAMA2; (+) strand; PAM type: YTN; PAM sequence: TTA
gaggggataggaagaaggag

SEQ ID NO: 316374 - DNA, 20 bp, Artificial Sequence
  Description of Artificial Sequence: Synthetic oligonucleotide
  Target: LAMA2; (+) strand; PAM type: YTN; PAM sequence: TTT
catataatgctaaggatggg

SEQ ID NO: 316375 - DNA, 20 bp, Artificial Sequence
  Description of Artificial Sequence: Synthetic oligonucleotide
  Target: LAMA2; (+) strand; PAM type: YTN; PAM sequence: TTC
atataatgctaaggatggga

SEQ ID NO: 316376 - DNA, 20 bp, Artificial Sequence
  Description of Artificial Sequence: Synthetic oligonucleotide
  Target: LAMA2; (+) strand; PAM type: YTN; PAM sequence: CTA
aggatgggaagaaatgaaaa

SEQ ID NO: 316377 - DNA, 20 bp, Artificial Sequence
  Description of Artificial Sequence: Synthetic oligonucleotide
  Target: LAMA2; (+) strand; PAM type: YTN; PAM sequence: TTG
gaatagatcatggggtggga

SEQ ID NO: 316378 - DNA, 20 bp, Artificial Sequence
  Description of Artificial Sequence: Synthetic oligonucleotide
  Target: LAMA2; (+) strand; PAM type: YTN; PAM sequence: TTA
attgaaggggtagtcaagaa

SEQ ID NO: 316379 - DNA, 20 bp, Artificial Sequence
  Description of Artificial Sequence: Synthetic oligonucleotide
  Target: LAMA2; (+) strand; PAM type: YTN; PAM sequence: TTG
aaggggtagtcaagaaaggc

SEQ ID NO: 316380 - DNA, 20 bp, Artificial Sequence
  Description of Artificial Sequence: Synthetic oligonucleotide
  Target: LAMA2; (+) strand; PAM type: YTN; PAM sequence: CTG
ctaaagaagtgttgggttgg

SEQ ID NO: 316381 - DNA, 20 bp, Artificial Sequence
  Description of Artificial Sequence: Synthetic oligonucleotide
  Target: LAMA2; (+) strand; PAM type: YTN; PAM sequence: CTA
aagaagtgttgggttggtta

SEQ ID NO: 316382 - DNA, 20 bp, Artificial Sequence
  Description of Artificial Sequence: Synthetic oligonucleotide
  Target: LAMA2; (+) strand; PAM type: YTN; PAM sequence: TTG
ggttggttagagcccagcaa

SEQ ID NO: 316383 - DNA, 20 bp, Artificial Sequence
  Description of Artificial Sequence: Synthetic oligonucleotide
  Target: LAMA2; (+) strand; PAM type: YTN; PAM sequence: TTG
gttagagcccagcaagggac

SEQ ID NO: 316384 - DNA, 20 bp, Artificial Sequence
  Description of Artificial Sequence: Synthetic oligonucleotide
  Target: LAMA2; (+) strand; PAM type: YTN; PAM sequence: TTA
gagcccagcaagggactttt

SEQ ID NO: 316385 - DNA, 20 bp, Artificial Sequence
  Description of Artificial Sequence: Synthetic oligonucleotide
  Target: LAMA2; (+) strand; PAM type: YTN; PAM sequence: CTT
ttcagctctggagatgcttg

SEQ ID NO: 316386 - DNA, 20 bp, Artificial Sequence
  Description of Artificial Sequence: Synthetic oligonucleotide
  Target: LAMA2; (+) strand; PAM type: YTN; PAM sequence: TTT
tcagctctggagatgcttgt

SEQ ID NO: 316387 - DNA, 20 bp, Artificial Sequence
  Description of Artificial Sequence: Synthetic oligonucleotide
  Target: LAMA2; (+) strand; PAM type: YTN; PAM sequence: TTT
cagctctggagatgcttgta

SEQ ID NO: 316388 - DNA, 20 bp, Artificial Sequence
  Description of Artificial Sequence: Synthetic oligonucleotide
  Target: LAMA2; (+) strand; PAM type: YTN; PAM sequence: TTC
agctctggagatgcttgtag

SEQ ID NO: 316389 - DNA, 20 bp, Artificial Sequence
  Description of Artificial Sequence: Synthetic oligonucleotide
  Target: LAMA2; (+) strand; PAM type: YTN; PAM sequence: CTC
tggagatgcttgtagagaaa

SEQ ID NO: 316390 - DNA, 20 bp, Artificial Sequence
  Description of Artificial Sequence: Synthetic oligonucleotide
  Target: LAMA2; (+) strand; PAM type: YTN; PAM sequence: CTG
gagatgcttgtagagaaatg

SEQ ID NO: 316391 - DNA, 20 bp, Artificial Sequence
  Description of Artificial Sequence: Synthetic oligonucleotide
  Target: LAMA2; (+) strand; PAM type: YTN; PAM sequence: CTT
gtagagaaatgcagaggtcc

SEQ ID NO: 316392 - DNA, 20 bp, Artificial Sequence
  Description of Artificial Sequence: Synthetic oligonucleotide
  Target: LAMA2; (+) strand; PAM type: YTN; PAM sequence: TTG
tagagaaatgcagaggtcct

SEQ ID NO: 316393 - DNA, 20 bp, Artificial Sequence
  Description of Artificial Sequence: Synthetic oligonucleotide
  Target: LAMA2; (+) strand; PAM type: YTN; PAM sequence: CTA
atatgggaatgaacatctca

SEQ ID NO: 316394 - DNA, 20 bp, Artificial Sequence
  Description of Artificial Sequence: Synthetic oligonucleotide
  Target: LAMA2; (+) strand; PAM type: YTN; PAM sequence: CTC
atgtagggtatagcttctca

SEQ ID NO: 316395 - DNA, 20 bp, Artificial Sequence
  Description of Artificial Sequence: Synthetic oligonucleotide
  Target: LAMA2; (+) strand; PAM type: YTN; PAM sequence: CTT
ctcatgtttgaggaacagaa

SEQ ID NO: 316396 - DNA, 20 bp, Artificial Sequence
  Description of Artificial Sequence: Synthetic oligonucleotide
  Target: LAMA2; (+) strand; PAM type: YTN; PAM sequence: TTC
tcatgtttgaggaacagaaa

SEQ ID NO: 316397 - DNA, 20 bp, Artificial Sequence
  Description of Artificial Sequence: Synthetic oligonucleotide
  Target: LAMA2; (+) strand; PAM type: YTN; PAM sequence: CTC
atgtttgaggaacagaaaca

SEQ ID NO: 316398 - DNA, 20 bp, Artificial Sequence
  Description of Artificial Sequence: Synthetic oligonucleotide
  Target: LAMA2; (+) strand; PAM type: YTN; PAM sequence: TTT
gaggaacagaaacaaggccc

SEQ ID NO: 316399 - DNA, 20 bp, Artificial Sequence
  Description of Artificial Sequence: Synthetic oligonucleotide
  Target: LAMA2; (+) strand; PAM type: YTN; PAM sequence: TTG
aggaacagaaacaaggccct

SEQ ID NO: 316400 - DNA, 20 bp, Artificial Sequence
  Description of Artificial Sequence: Synthetic oligonucleotide
  Target: LAMA2; (+) strand; PAM type: YTN; PAM sequence: CTA
aaggctctaatattgtgagc

SEQ ID NO: 316401 - DNA, 20 bp, Artificial Sequence
  Description of Artificial Sequence: Synthetic oligonucleotide
  Target: LAMA2; (+) strand; PAM type: YTN; PAM sequence: CTC
taatattgtgagccaggata

SEQ ID NO: 316402 - DNA, 20 bp, Artificial Sequence
  Description of Artificial Sequence: Synthetic oligonucleotide
  Target: LAMA2; (+) strand; PAM type: YTN; PAM sequence: CTA
atattgtgagccaggataag

SEQ ID NO: 316403 - DNA, 20 bp, Artificial Sequence
  Description of Artificial Sequence: Synthetic oligonucleotide
  Target: LAMA2; (+) strand; PAM type: YTN; PAM sequence: TTG
tgagccaggataagggcagc

SEQ ID NO: 316404 - DNA, 20 bp, Artificial Sequence
  Description of Artificial Sequence: Synthetic oligonucleotide
  Target: LAMA2; (+) strand; PAM type: YTN; PAM sequence: CTG
gagacaggtaggggccaggt

SEQ ID NO: 316405 - DNA, 20 bp, Artificial Sequence
  Description of Artificial Sequence: Synthetic oligonucleotide
  Target: LAMA2; (+) strand; PAM type: YTN; PAM sequence: CTT
gtactgtgtacgtaggacct

SEQ ID NO: 316406 - DNA, 20 bp, Artificial Sequence
  Description of Artificial Sequence: Synthetic oligonucleotide
  Target: LAMA2; (+) strand; PAM type: YTN; PAM sequence: TTG
tactgtgtacgtaggacctt

SEQ ID NO: 316407 - DNA, 20 bp, Artificial Sequence
  Description of Artificial Sequence: Synthetic oligonucleotide
  Target: LAMA2; (+) strand; PAM type: YTN; PAM sequence: CTG
tgtacgtaggaccttgtaca

SEQ ID NO: 316408 - DNA, 20 bp, Artificial Sequence
  Description of Artificial Sequence: Synthetic oligonucleotide
  Target: LAMA2; (+) strand; PAM type: YTN; PAM sequence: CTT
gtacatgtaggagtcagatc

SEQ ID NO: 316409 - DNA, 20 bp, Artificial Sequence
  Description of Artificial Sequence: Synthetic oligonucleotide
  Target: LAMA2; (+) strand; PAM type: YTN; PAM sequence: TTG
tacatgtaggagtcagatca

SEQ ID NO: 316410 - DNA, 20 bp, Artificial Sequence
  Description of Artificial Sequence: Synthetic oligonucleotide
  Target: LAMA2; (+) strand; PAM type: YTN; PAM sequence: CTT
gtgcttcgtttgaattttat

SEQ ID NO: 316411 - DNA, 20 bp, Artificial Sequence
  Description of Artificial Sequence: Synthetic oligonucleotide
  Target: LAMA2; (+) strand; PAM type: YTN; PAM sequence: TTG
tgcttcgtttgaattttatt

SEQ ID NO: 316412 - DNA, 20 bp, Artificial Sequence
  Description of Artificial Sequence: Synthetic oligonucleotide
  Target: LAMA2; (+) strand; PAM type: YTN; PAM sequence: CTT
cgtttgaattttattctaaa

SEQ ID NO: 316413 - DNA, 20 bp, Artificial Sequence
  Description of Artificial Sequence: Synthetic oligonucleotide
  Target: LAMA2; (+) strand; PAM type: YTN; PAM sequence: TTC
gtttgaattttattctaaat

SEQ ID NO: 316414 - DNA, 20 bp, Artificial Sequence
  Description of Artificial Sequence: Synthetic oligonucleotide
  Target: LAMA2; (+) strand; PAM type: YTN; PAM sequence: TTT
gaattttattctaaatgttg

SEQ ID NO: 316415 - DNA, 20 bp, Artificial Sequence
  Description of Artificial Sequence: Synthetic oligonucleotide
  Target: LAMA2; (+) strand; PAM type: YTN; PAM sequence: TTG
aattttattctaaatgttgg

SEQ ID NO: 316416 - DNA, 20 bp, Artificial Sequence
  Description of Artificial Sequence: Synthetic oligonucleotide
  Target: LAMA2; (+) strand; PAM type: YTN; PAM sequence: TTT
tattctaaatgttgggaatt

SEQ ID NO: 316417 - DNA, 20 bp, Artificial Sequence
  Description of Artificial Sequence: Synthetic oligonucleotide
  Target: LAMA2; (+) strand; PAM type: YTN; PAM sequence: TTT
attctaaatgttgggaattg

SEQ ID NO: 316418 - DNA, 20 bp, Artificial Sequence
  Description of Artificial Sequence: Synthetic oligonucleotide
  Target: LAMA2; (+) strand; PAM type: YTN; PAM sequence: TTA
ttctaaatgttgggaattga

SEQ ID NO: 316419 - DNA, 20 bp, Artificial Sequence
  Description of Artificial Sequence: Synthetic oligonucleotide
  Target: LAMA2; (+) strand; PAM type: YTN; PAM sequence: TTC
taaatgttgggaattgatta

SEQ ID NO: 316420 - DNA, 20 bp, Artificial Sequence
  Description of Artificial Sequence: Synthetic oligonucleotide
  Target: LAMA2; (+) strand; PAM type: YTN; PAM sequence: CTA
aatgttgggaattgattaga

SEQ ID NO: 316421 - DNA, 20 bp, Artificial Sequence
  Description of Artificial Sequence: Synthetic oligonucleotide
  Target: LAMA2; (+) strand; PAM type: YTN; PAM sequence: TTG
ggaattgattagatgatttt

SEQ ID NO: 316422 - DNA, 20 bp, Artificial Sequence
  Description of Artificial Sequence: Synthetic oligonucleotide
  Target: LAMA2; (+) strand; PAM type: YTN; PAM sequence: TTG
attagatgattttaaaaata

SEQ ID NO: 316423 - DNA, 20 bp, Artificial Sequence
  Description of Artificial Sequence: Synthetic oligonucleotide
  Target: LAMA2; (+) strand; PAM type: YTN; PAM sequence: TTA
gatgattttaaaaataatac

SEQ ID NO: 316424 - DNA, 20 bp, Artificial Sequence
  Description of Artificial Sequence: Synthetic oligonucleotide
  Target: LAMA2; (+) strand; PAM type: YTN; PAM sequence: TTT
taaaaataatactttcttaa

SEQ ID NO: 316425 - DNA, 20 bp, Artificial Sequence
  Description of Artificial Sequence: Synthetic oligonucleotide
  Target: LAMA2; (+) strand; PAM type: YTN; PAM sequence: TTT
aaaaataatactttcttaat

SEQ ID NO: 316426 - DNA, 20 bp, Artificial Sequence
  Description of Artificial Sequence: Synthetic oligonucleotide
  Target: LAMA2; (+) strand; PAM type: YTN; PAM sequence: TTA
aaaataatactttcttaata

SEQ ID NO: 316427 - DNA, 20 bp, Artificial Sequence
  Description of Artificial Sequence: Synthetic oligonucleotide
  Target: LAMA2; (+) strand; PAM type: YTN; PAM sequence: CTT
tcttaatactgtgtcactct

SEQ ID NO: 316428 - DNA, 20 bp, Artificial Sequence
  Description of Artificial Sequence: Synthetic oligonucleotide
  Target: LAMA2; (+) strand; PAM type: YTN; PAM sequence: TTT
cttaatactgtgtcactctg

SEQ ID NO: 316429 - DNA, 20 bp, Artificial Sequence
  Description of Artificial Sequence: Synthetic oligonucleotide
  Target: LAMA2; (+) strand; PAM type: YTN; PAM sequence: TTC
ttaatactgtgtcactctgc

SEQ ID NO: 316430 - DNA, 20 bp, Artificial Sequence
  Description of Artificial Sequence: Synthetic oligonucleotide
  Target: LAMA2; (+) strand; PAM type: YTN; PAM sequence: CTT
aatactgtgtcactctgcct

SEQ ID NO: 316431 - DNA, 20 bp, Artificial Sequence
  Description of Artificial Sequence: Synthetic oligonucleotide
  Target: LAMA2; (+) strand; PAM type: YTN; PAM sequence: TTA
atactgtgtcactctgccta

SEQ ID NO: 316432 - DNA, 20 bp, Artificial Sequence
  Description of Artificial Sequence: Synthetic oligonucleotide
  Target: LAMA2; (+) strand; PAM type: YTN; PAM sequence: CTG
tgtcactctgcctactctct

SEQ ID NO: 316433 - DNA, 20 bp, Artificial Sequence
  Description of Artificial Sequence: Synthetic oligonucleotide
  Target: LAMA2; (+) strand; PAM type: YTN; PAM sequence: CTC
tgcctactctctgagaaaca

SEQ ID NO: 316434 - DNA, 20 bp, Artificial Sequence
  Description of Artificial Sequence: Synthetic oligonucleotide
  Target: LAMA2; (+) strand; PAM type: YTN; PAM sequence: CTG
cctactctctgagaaacaga

SEQ ID NO: 316435 - DNA, 20 bp, Artificial Sequence
  Description of Artificial Sequence: Synthetic oligonucleotide
  Target: LAMA2; (+) strand; PAM type: YTN; PAM sequence: CTA
ctctctgagaaacagatcat

SEQ ID NO: 316436 - DNA, 20 bp, Artificial Sequence
  Description of Artificial Sequence: Synthetic oligonucleotide
  Target: LAMA2; (+) strand; PAM type: YTN; PAM sequence: CTC
tctgagaaacagatcataag

SEQ ID NO: 316437 - DNA, 20 bp, Artificial Sequence
  Description of Artificial Sequence: Synthetic oligonucleotide
  Target: LAMA2; (+) strand; PAM type: YTN; PAM sequence: CTC
tgagaaacagatcataagga

SEQ ID NO: 316438 - DNA, 20 bp, Artificial Sequence
  Description of Artificial Sequence: Synthetic oligonucleotide
  Target: LAMA2; (+) strand; PAM type: YTN; PAM sequence: CTG
agaaacagatcataaggaga

SEQ ID NO: 316439 - DNA, 20 bp, Artificial Sequence
  Description of Artificial Sequence: Synthetic oligonucleotide
  Target: LAMA2; (+) strand; PAM type: YTN; PAM sequence: TTG
gaggcaagcaatgcttctac

SEQ ID NO: 316440 - DNA, 20 bp, Artificial Sequence
  Description of Artificial Sequence: Synthetic oligonucleotide
  Target: LAMA2; (+) strand; PAM type: YTN; PAM sequence: CTT
ctacagaagactttggtagg

SEQ ID NO: 316441 - DNA, 20 bp, Artificial Sequence
  Description of Artificial Sequence: Synthetic oligonucleotide
  Target: LAMA2; (+) strand; PAM type: YTN; PAM sequence: TTC
tacagaagactttggtaggt

SEQ ID NO: 316442 - DNA, 20 bp, Artificial Sequence
  Description of Artificial Sequence: Synthetic oligonucleotide
  Target: LAMA2; (+) strand; PAM type: YTN; PAM sequence: CTA
cagaagactttggtaggttc

SEQ ID NO: 316443 - DNA, 20 bp, Artificial Sequence
  Description of Artificial Sequence: Synthetic oligonucleotide
  Target: LAMA2; (+) strand; PAM type: YTN; PAM sequence: CTT
tggtaggttcggtttctata

SEQ ID NO: 316444 - DNA, 20 bp, Artificial Sequence
  Description of Artificial Sequence: Synthetic oligonucleotide
  Target: LAMA2; (+) strand; PAM type: YTN; PAM sequence: TTT
ggtaggttcggtttctataa

SEQ ID NO: 316445 - DNA, 20 bp, Artificial Sequence
  Description of Artificial Sequence: Synthetic oligonucleotide
  Target: LAMA2; (+) strand; PAM type: YTN; PAM sequence: TTG
gtaggttcggtttctataat

SEQ ID NO: 316446 - DNA, 20 bp, Artificial Sequence
  Description of Artificial Sequence: Synthetic oligonucleotide
  Target: LAMA2; (+) strand; PAM type: YTN; PAM sequence: TTC
ggtttctataatttccaagc

SEQ ID NO: 316447 - DNA, 20 bp, Artificial Sequence
  Description of Artificial Sequence: Synthetic oligonucleotide
  Target: LAMA2; (+) strand; PAM type: YTN; PAM sequence: TTT
ctataatttccaagctctgc

SEQ ID NO: 316448 - DNA, 20 bp, Artificial Sequence
  Description of Artificial Sequence: Synthetic oligonucleotide
  Target: LAMA2; (+) strand; PAM type: YTN; PAM sequence: TTC
tataatttccaagctctgca

SEQ ID NO: 316449 - DNA, 20 bp, Artificial Sequence
  Description of Artificial Sequence: Synthetic oligonucleotide
  Target: LAMA2; (+) strand; PAM type: YTN; PAM sequence: CTA
taatttccaagctctgcagg

SEQ ID NO: 316450 - DNA, 20 bp, Artificial Sequence
  Description of Artificial Sequence: Synthetic oligonucleotide
  Target: LAMA2; (+) strand; PAM type: YTN; PAM sequence: TTT
ccaagctctgcaggagacca

SEQ ID NO: 316451 - DNA, 20 bp, Artificial Sequence
  Description of Artificial Sequence: Synthetic oligonucleotide
  Target: LAMA2; (+) strand; PAM type: YTN; PAM sequence: TTC
caagctctgcaggagaccac

SEQ ID NO: 316452 - DNA, 20 bp, Artificial Sequence
  Description of Artificial Sequence: Synthetic oligonucleotide
  Target: LAMA2; (+) strand; PAM type: YTN; PAM sequence: CTC
tgcaggagaccactacagct

SEQ ID NO: 316453 - DNA, 20 bp, Artificial Sequence
  Description of Artificial Sequence: Synthetic oligonucleotide
  Target: LAMA2; (+) strand; PAM type: YTN; PAM sequence: CTG
caggagaccactacagcttc

SEQ ID NO: 316454 - DNA, 20 bp, Artificial Sequence
  Description of Artificial Sequence: Synthetic oligonucleotide
  Target: LAMA2; (+) strand; PAM type: YTN; PAM sequence: CTA
cagcttcctcctcagttact

SEQ ID NO: 316455 - DNA, 20 bp, Artificial Sequence
  Description of Artificial Sequence: Synthetic oligonucleotide
  Target: LAMA2; (+) strand; PAM type: YTN; PAM sequence: CTT
cctcctcagttactcttatt

SEQ ID NO: 316456 - DNA, 20 bp, Artificial Sequence
  Description of Artificial Sequence: Synthetic oligonucleotide
  Target: LAMA2; (+) strand; PAM type: YTN; PAM sequence: TTC
ctcctcagttactcttattt

SEQ ID NO: 316457 - DNA, 20 bp, Artificial Sequence
  Description of Artificial Sequence: Synthetic oligonucleotide
  Target: LAMA2; (+) strand; PAM type: YTN; PAM sequence: CTC
ctcagttactcttatttact

SEQ ID NO: 316458 - DNA, 20 bp, Artificial Sequence
  Description of Artificial Sequence: Synthetic oligonucleotide
  Target: LAMA2; (+) strand; PAM type: YTN; PAM sequence: CTC
agttactcttatttacttat

SEQ ID NO: 316459 - DNA, 20 bp, Artificial Sequence
  Description of Artificial Sequence: Synthetic oligonucleotide
  Target: LAMA2; (+) strand; PAM type: YTN; PAM sequence: TTA
ctcttatttacttatgggcc

SEQ ID NO: 316460 - DNA, 20 bp, Artificial Sequence
  Description of Artificial Sequence: Synthetic oligonucleotide
  Target: LAMA2; (+) strand; PAM type: YTN; PAM sequence: CTC
ttatttacttatgggcccaa

SEQ ID NO: 316461 - DNA, 20 bp, Artificial Sequence
  Description of Artificial Sequence: Synthetic oligonucleotide
  Target: LAMA2; (+) strand; PAM type: YTN; PAM sequence: CTT
atttacttatgggcccaaac

SEQ ID NO: 316462 - DNA, 20 bp, Artificial Sequence
  Description of Artificial Sequence: Synthetic oligonucleotide
  Target: LAMA2; (+) strand; PAM type: YTN; PAM sequence: TTA
tttacttatgggcccaaacc

SEQ ID NO: 316463 - DNA, 20 bp, Artificial Sequence
  Description of Artificial Sequence: Synthetic oligonucleotide
  Target: LAMA2; (+) strand; PAM type: YTN; PAM sequence: TTT
acttatgggcccaaacccct

SEQ ID NO: 316464 - DNA, 20 bp, Artificial Sequence
  Description of Artificial Sequence: Synthetic oligonucleotide
  Target: LAMA2; (+) strand; PAM type: YTN; PAM sequence: TTA
cttatgggcccaaacccctg

SEQ ID NO: 316465 - DNA, 20 bp, Artificial Sequence
  Description of Artificial Sequence: Synthetic oligonucleotide
  Target: LAMA2; (+) strand; PAM type: YTN; PAM sequence: CTT
atgggcccaaacccctgagc

SEQ ID NO: 316466 - DNA, 20 bp, Artificial Sequence
  Description of Artificial Sequence: Synthetic oligonucleotide
  Target: LAMA2; (+) strand; PAM type: YTN; PAM sequence: TTA
tgggcccaaacccctgagca

SEQ ID NO: 316467 - DNA, 20 bp, Artificial Sequence
  Description of Artificial Sequence: Synthetic oligonucleotide
  Target: LAMA2; (+) strand; PAM type: YTN; PAM sequence: CTG
agcagttaaaatctggcatc

SEQ ID NO: 316468 - DNA, 20 bp, Artificial Sequence
  Description of Artificial Sequence: Synthetic oligonucleotide
  Target: LAMA2; (+) strand; PAM type: YTN; PAM sequence: TTA
aaatctggcatcaataacac

SEQ ID NO: 316469 - DNA, 20 bp, Artificial Sequence
  Description of Artificial Sequence: Synthetic oligonucleotide
  Target: LAMA2; (+) strand; PAM type: YTN; PAM sequence: CTG
gcatcaataacactatcaat

SEQ ID NO: 316470 - DNA, 20 bp, Artificial Sequence
  Description of Artificial Sequence: Synthetic oligonucleotide
  Target: LAMA2; (+) strand; PAM type: YTN; PAM sequence: CTA
tcaattctggctaacacctt

SEQ ID NO: 316471 - DNA, 20 bp, Artificial Sequence
  Description of Artificial Sequence: Synthetic oligonucleotide
  Target: LAMA2; (+) strand; PAM type: YTN; PAM sequence: TTC
tggctaacaccttggccagt

SEQ ID NO: 316472 - DNA, 20 bp, Artificial Sequence
  Description of Artificial Sequence: Synthetic oligonucleotide
  Target: LAMA2; (+) strand; PAM type: YTN; PAM sequence: CTG
gctaacaccttggccagtga

SEQ ID NO: 316473 - DNA, 20 bp, Artificial Sequence
  Description of Artificial Sequence: Synthetic oligonucleotide
  Target: LAMA2; (+) strand; PAM type: YTN; PAM sequence: CTA
acaccttggccagtgagaag

SEQ ID NO: 316474 - DNA, 20 bp, Artificial Sequence
  Description of Artificial Sequence: Synthetic oligonucleotide
  Target: LAMA2; (+) strand; PAM type: YTN; PAM sequence: CTT
ggccagtgagaagggttaat

SEQ ID NO: 316475 - DNA, 20 bp, Artificial Sequence
  Description of Artificial Sequence: Synthetic oligonucleotide
  Target: LAMA2; (+) strand; PAM type: YTN; PAM sequence: TTG
gccagtgagaagggttaata

SEQ ID NO: 316476 - DNA, 20 bp, Artificial Sequence
  Description of Artificial Sequence: Synthetic oligonucleotide
  Target: LAMA2; (+) strand; PAM type: YTN; PAM sequence: TTA
atataacaggagggaagatg

SEQ ID NO: 316477 - DNA, 20 bp, Artificial Sequence
  Description of Artificial Sequence: Synthetic oligonucleotide
  Target: LAMA2; (+) strand; PAM type: YTN; PAM sequence: TTT
cttttacctcttttttggtc

SEQ ID NO: 316478 - DNA, 20 bp, Artificial Sequence
  Description of Artificial Sequence: Synthetic oligonucleotide
  Target: LAMA2; (+) strand; PAM type: YTN; PAM sequence: TTC
ttttacctcttttttggtct

SEQ ID NO: 316479 - DNA, 20 bp, Artificial Sequence
  Description of Artificial Sequence: Synthetic oligonucleotide
  Target: LAMA2; (+) strand; PAM type: YTN; PAM sequence: CTT
ttacctcttttttggtctcc

SEQ ID NO: 316480 - DNA, 20 bp, Artificial Sequence
  Description of Artificial Sequence: Synthetic oligonucleotide
  Target: LAMA2; (+) strand; PAM type: YTN; PAM sequence: TTT
tacctcttttttggtctcca

SEQ ID NO: 316481 - DNA, 20 bp, Artificial Sequence
  Description of Artificial Sequence: Synthetic oligonucleotide
  Target: LAMA2; (+) strand; PAM type: YTN; PAM sequence: TTT
acctcttttttggtctccac

SEQ ID NO: 316482 - DNA, 20 bp, Artificial Sequence
  Description of Artificial Sequence: Synthetic oligonucleotide
  Target: LAMA2; (+) strand; PAM type: YTN; PAM sequence: TTA
cctcttttttggtctccaca

SEQ ID NO: 316483 - DNA, 20 bp, Artificial Sequence
  Description of Artificial Sequence: Synthetic oligonucleotide
  Target: LAMA2; (+) strand; PAM type: YTN; PAM sequence: CTC
ttttttggtctccacaggtt

SEQ ID NO: 316484 - DNA, 20 bp, Artificial Sequence
  Description of Artificial Sequence: Synthetic oligonucleotide
  Target: LAMA2; (+) strand; PAM type: YTN; PAM sequence: CTT
ttttggtctccacaggttga

SEQ ID NO: 316485 - DNA, 20 bp, Artificial Sequence
  Description of Artificial Sequence: Synthetic oligonucleotide
  Target: LAMA2; (+) strand; PAM type: YTN; PAM sequence: TTT
tttggtctccacaggttgac

SEQ ID NO: 316486 - DNA, 20 bp, Artificial Sequence
  Description of Artificial Sequence: Synthetic oligonucleotide
  Target: LAMA2; (+) strand; PAM type: YTN; PAM sequence: TTT
ttggtctccacaggttgaca

SEQ ID NO: 316487 - DNA, 20 bp, Artificial Sequence
  Description of Artificial Sequence: Synthetic oligonucleotide
  Target: LAMA2; (+) strand; PAM type: YTN; PAM sequence: TTT
tggtctccacaggttgacaa

SEQ ID NO: 316488 - DNA, 20 bp, Artificial Sequence
  Description of Artificial Sequence: Synthetic oligonucleotide
  Target: LAMA2; (+) strand; PAM type: YTN; PAM sequence: TTT
ggtctccacaggttgacaat

SEQ ID NO: 316489 - DNA, 20 bp, Artificial Sequence
  Description of Artificial Sequence: Synthetic oligonucleotide
  Target: LAMA2; (+) strand; PAM type: YTN; PAM sequence: TTG
gtctccacaggttgacaata

SEQ ID NO: 316490 - DNA, 20 bp, Artificial Sequence
  Description of Artificial Sequence: Synthetic oligonucleotide
  Target: LAMA2; (+) strand; PAM type: YTN; PAM sequence: CTC
cacaggttgacaataacatg

SEQ ID NO: 316491 - DNA, 20 bp, Artificial Sequence
  Description of Artificial Sequence: Synthetic oligonucleotide
  Target: LAMA2; (+) strand; PAM type: YTN; PAM sequence: TTG
acaataacatgttgtaataa

SEQ ID NO: 316492 - DNA, 20 bp, Artificial Sequence
  Description of Artificial Sequence: Synthetic oligonucleotide
  Target: LAMA2; (+) strand; PAM type: YTN; PAM sequence: TTG
taataatcacatgtatgcaa

SEQ ID NO: 316493 - DNA, 20 bp, Artificial Sequence
  Description of Artificial Sequence: Synthetic oligonucleotide
  Target: LAMA2; (+) strand; PAM type: YTN; PAM sequence: TTT
accagaagttttgaaatctt

SEQ ID NO: 316494 - DNA, 20 bp, Artificial Sequence
  Description of Artificial Sequence: Synthetic oligonucleotide
  Target: LAMA2; (+) strand; PAM type: YTN; PAM sequence: TTA
ccagaagttttgaaatctta

SEQ ID NO: 316495 - DNA, 20 bp, Artificial Sequence
  Description of Artificial Sequence: Synthetic oligonucleotide
  Target: LAMA2; (+) strand; PAM type: YTN; PAM sequence: TTT
tgaaatcttagattaccact

SEQ ID NO: 316496 - DNA, 20 bp, Artificial Sequence
  Description of Artificial Sequence: Synthetic oligonucleotide
  Target: LAMA2; (+) strand; PAM type: YTN; PAM sequence: TTT
gaaatcttagattaccacta

SEQ ID NO: 316497 - DNA, 20 bp, Artificial Sequence
  Description of Artificial Sequence: Synthetic oligonucleotide
  Target: LAMA2; (+) strand; PAM type: YTN; PAM sequence: TTG
aaatcttagattaccactaa

SEQ ID NO: 316498 - DNA, 20 bp, Artificial Sequence
  Description of Artificial Sequence: Synthetic oligonucleotide
  Target: LAMA2; (+) strand; PAM type: YTN; PAM sequence: CTT
agattaccactaacattcca

SEQ ID NO: 316499 - DNA, 20 bp, Artificial Sequence
  Description of Artificial Sequence: Synthetic oligonucleotide
  Target: LAMA2; (+) strand; PAM type: YTN; PAM sequence: TTA
gattaccactaacattccaa

SEQ ID NO: 316500 - DNA, 20 bp, Artificial Sequence
  Description of Artificial Sequence: Synthetic oligonucleotide
  Target: LAMA2; (+) strand; PAM type: YTN; PAM sequence: TTA
ccactaacattccaatttct

SEQ ID NO: 316501 - DNA, 20 bp, Artificial Sequence
  Description of Artificial Sequence: Synthetic oligonucleotide
  Target: LAMA2; (+) strand; PAM type: YTN; PAM sequence: CTA
acattccaatttctaaagac

SEQ ID NO: 316502 - DNA, 20 bp, Artificial Sequence
  Description of Artificial Sequence: Synthetic oligonucleotide
  Target: LAMA2; (+) strand; PAM type: YTN; PAM sequence: TTC
caatttctaaagacagtgga

SEQ ID NO: 316503 - DNA, 20 bp, Artificial Sequence
  Description of Artificial Sequence: Synthetic oligonucleotide
  Target: LAMA2; (+) strand; PAM type: YTN; PAM sequence: TTT
ctaaagacagtggacatgaa

SEQ ID NO: 316504 - DNA, 20 bp, Artificial Sequence
  Description of Artificial Sequence: Synthetic oligonucleotide
  Target: LAMA2; (+) strand; PAM type: YTN; PAM sequence: TTC
taaagacagtggacatgaat

SEQ ID NO: 316505 - DNA, 20 bp, Artificial Sequence
  Description of Artificial Sequence: Synthetic oligonucleotide
  Target: LAMA2; (+) strand; PAM type: YTN; PAM sequence: CTA
aagacagtggacatgaattc

SEQ ID NO: 316506 - DNA, 20 bp, Artificial Sequence
  Description of Artificial Sequence: Synthetic oligonucleotide
  Target: LAMA2; (+) strand; PAM type: YTN; PAM sequence: TTC
ctgcagctctctgagaatag

SEQ ID NO: 316507 - DNA, 20 bp, Artificial Sequence
  Description of Artificial Sequence: Synthetic oligonucleotide
  Target: LAMA2; (+) strand; PAM type: YTN; PAM sequence: CTG
cagctctctgagaatagatt

SEQ ID NO: 316508 - DNA, 20 bp, Artificial Sequence
  Description of Artificial Sequence: Synthetic oligonucleotide
  Target: LAMA2; (+) strand; PAM type: YTN; PAM sequence: CTC
tctgagaatagattttagct

SEQ ID NO: 316509 - DNA, 20 bp, Artificial Sequence
  Description of Artificial Sequence: Synthetic oligonucleotide
  Target: LAMA2; (+) strand; PAM type: YTN; PAM sequence: CTC
tgagaatagattttagctgt

SEQ ID NO: 316510 - DNA, 20 bp, Artificial Sequence
  Description of Artificial Sequence: Synthetic oligonucleotide
  Target: LAMA2; (+) strand; PAM type: YTN; PAM sequence: CTG
agaatagattttagctgtta

SEQ ID NO: 316511 - DNA, 20 bp, Artificial Sequence
  Description of Artificial Sequence: Synthetic oligonucleotide
  Target: LAMA2; (+) strand; PAM type: YTN; PAM sequence: TTT
tagctgttaatattatatta

SEQ ID NO: 316512 - DNA, 20 bp, Artificial Sequence
  Description of Artificial Sequence: Synthetic oligonucleotide
  Target: LAMA2; (+) strand; PAM type: YTN; PAM sequence: TTT
agctgttaatattatattac

SEQ ID NO: 316513 - DNA, 20 bp, Artificial Sequence
  Description of Artificial Sequence: Synthetic oligonucleotide
  Target: LAMA2; (+) strand; PAM type: YTN; PAM sequence: TTA
gctgttaatattatattaca

SEQ ID NO: 316514 - DNA, 20 bp, Artificial Sequence
  Description of Artificial Sequence: Synthetic oligonucleotide
  Target: LAMA2; (+) strand; PAM type: YTN; PAM sequence: CTG
ttaatattatattacaactt

SEQ ID NO: 316515 - DNA, 20 bp, Artificial Sequence
  Description of Artificial Sequence: Synthetic oligonucleotide
  Target: LAMA2; (+) strand; PAM type: YTN; PAM sequence: TTA
atattatattacaacttcct

SEQ ID NO: 316516 - DNA, 20 bp, Artificial Sequence
  Description of Artificial Sequence: Synthetic oligonucleotide
  Target: LAMA2; (+) strand; PAM type: YTN; PAM sequence: TTA
tattacaacttcctacatag

SEQ ID NO: 316517 - DNA, 20 bp, Artificial Sequence
  Description of Artificial Sequence: Synthetic oligonucleotide
  Target: LAMA2; (+) strand; PAM type: YTN; PAM sequence: TTA
caacttcctacatagttgta

SEQ ID NO: 316518 - DNA, 20 bp, Artificial Sequence
  Description of Artificial Sequence: Synthetic oligonucleotide
  Target: LAMA2; (+) strand; PAM type: YTN; PAM sequence: CTT
cctacatagttgtaaaaatt

SEQ ID NO: 316519 - DNA, 20 bp, Artificial Sequence
  Description of Artificial Sequence: Synthetic oligonucleotide
  Target: LAMA2; (+) strand; PAM type: YTN; PAM sequence: TTC
ctacatagttgtaaaaattt

SEQ ID NO: 316520 - DNA, 20 bp, Artificial Sequence
  Description of Artificial Sequence: Synthetic oligonucleotide
  Target: LAMA2; (+) strand; PAM type: YTN; PAM sequence: CTA
catagttgtaaaaatttagg

SEQ ID NO: 316521 - DNA, 20 bp, Artificial Sequence
  Description of Artificial Sequence: Synthetic oligonucleotide
  Target: LAMA2; (+) strand; PAM type: YTN; PAM sequence: TTG
taaaaatttaggttaatgat

SEQ ID NO: 316522 - DNA, 20 bp, Artificial Sequence
  Description of Artificial Sequence: Synthetic oligonucleotide
  Target: LAMA2; (+) strand; PAM type: YTN; PAM sequence: TTT
aggttaatgattcctgtgaa

SEQ ID NO: 316523 - DNA, 20 bp, Artificial Sequence
  Description of Artificial Sequence: Synthetic oligonucleotide
  Target: LAMA2; (+) strand; PAM type: YTN; PAM sequence: TTA
ggttaatgattcctgtgaat

SEQ ID NO: 316524 - DNA, 20 bp, Artificial Sequence
  Description of Artificial Sequence: Synthetic oligonucleotide
  Target: LAMA2; (+) strand; PAM type: YTN; PAM sequence: TTA
atgattcctgtgaatttatt

SEQ ID NO: 316525 - DNA, 20 bp, Artificial Sequence
  Description of Artificial Sequence: Synthetic oligonucleotide
  Target: LAMA2; (+) strand; PAM type: YTN; PAM sequence: TTC
ctgtgaatttatttttattt

SEQ ID NO: 316526 - DNA, 20 bp, Artificial Sequence
  Description of Artificial Sequence: Synthetic oligonucleotide
  Target: LAMA2; (+) strand; PAM type: YTN; PAM sequence: CTG
tgaatttatttttatttttt

SEQ ID NO: 316527 - DNA, 20 bp, Artificial Sequence
  Description of Artificial Sequence: Synthetic oligonucleotide
  Target: LAMA2; (+) strand; PAM type: YTN; PAM sequence: TTT
atttttatttttttgaaatg

SEQ ID NO: 316528 - DNA, 20 bp, Artificial Sequence
  Description of Artificial Sequence: Synthetic oligonucleotide
  Target: LAMA2; (+) strand; PAM type: YTN; PAM sequence: TTA
tttttatttttttgaaatgg

SEQ ID NO: 316529 - DNA, 20 bp, Artificial Sequence
  Description of Artificial Sequence: Synthetic oligonucleotide
  Target: LAMA2; (+) strand; PAM type: YTN; PAM sequence: TTT
ttatttttttgaaatggggt

SEQ ID NO: 316530 - DNA, 20 bp, Artificial Sequence
  Description of Artificial Sequence: Synthetic oligonucleotide
  Target: LAMA2; (+) strand; PAM type: YTN; PAM sequence: TTT
tatttttttgaaatggggtc

SEQ ID NO: 316531 - DNA, 20 bp, Artificial Sequence
  Description of Artificial Sequence: Synthetic oligonucleotide
  Target: LAMA2; (+) strand; PAM type: YTN; PAM sequence: TTT
atttttttgaaatggggtct

SEQ ID NO: 316532 - DNA, 20 bp, Artificial Sequence
  Description of Artificial Sequence: Synthetic oligonucleotide
  Target: LAMA2; (+) strand; PAM type: YTN; PAM sequence: TTA
tttttttgaaatggggtctc

SEQ ID NO: 316533 - DNA, 20 bp, Artificial Sequence
  Description of Artificial Sequence: Synthetic oligonucleotide
  Target: LAMA2; (+) strand; PAM type: YTN; PAM sequence: TTT
ttttgaaatggggtctcact

SEQ ID NO: 316534 - DNA, 20 bp, Artificial Sequence
  Description of Artificial Sequence: Synthetic oligonucleotide
  Target: LAMA2; (+) strand; PAM type: YTN; PAM sequence: TTT
tttgaaatggggtctcactc

SEQ ID NO: 316535 - DNA, 20 bp, Artificial Sequence
  Description of Artificial Sequence: Synthetic oligonucleotide
  Target: LAMA2; (+) strand; PAM type: YTN; PAM sequence: TTT
ttgaaatggggtctcactct

SEQ ID NO: 316536 - DNA, 20 bp, Artificial Sequence
  Description of Artificial Sequence: Synthetic oligonucleotide
  Target: LAMA2; (+) strand; PAM type: YTN; PAM sequence: TTT
tgaaatggggtctcactctg

SEQ ID NO: 316537 - DNA, 20 bp, Artificial Sequence
  Description of Artificial Sequence: Synthetic oligonucleotide
  Target: LAMA2; (+) strand; PAM type: YTN; PAM sequence: TTT
gaaatggggtctcactctgt

SEQ ID NO: 316538 - DNA, 20 bp, Artificial Sequence
  Description of Artificial Sequence: Synthetic oligonucleotide
  Target: LAMA2; (+) strand; PAM type: YTN; PAM sequence: TTG
aaatggggtctcactctgtt

SEQ ID NO: 316539 - DNA, 20 bp, Artificial Sequence
  Description of Artificial Sequence: Synthetic oligonucleotide
  Target: LAMA2; (+) strand; PAM type: YTN; PAM sequence: CTC
actctgttgcccaggctgga

SEQ ID NO: 316540 - DNA, 20 bp, Artificial Sequence
  Description of Artificial Sequence: Synthetic oligonucleotide
  Target: LAMA2; (+) strand; PAM type: YTN; PAM sequence: CTC
tgttgcccaggctggagtgt

SEQ ID NO: 316541 - DNA, 20 bp, Artificial Sequence
  Description of Artificial Sequence: Synthetic oligonucleotide
  Target: LAMA2; (+) strand; PAM type: YTN; PAM sequence: CTG
ttgcccaggctggagtgtag

SEQ ID NO: 316542 - DNA, 20 bp, Artificial Sequence
  Description of Artificial Sequence: Synthetic oligonucleotide
  Target: LAMA2; (+) strand; PAM type: YTN; PAM sequence: TTG
cccaggctggagtgtagtgg

SEQ ID NO: 316543 - DNA, 20 bp, Artificial Sequence
  Description of Artificial Sequence: Synthetic oligonucleotide
  Target: LAMA2; (+) strand; PAM type: YTN; PAM sequence: CTG
gagtgtagtggtgtgatctc

SEQ ID NO: 316544 - DNA, 20 bp, Artificial Sequence
  Description of Artificial Sequence: Synthetic oligonucleotide
  Target: LAMA2; (+) strand; PAM type: YTN; PAM sequence: CTC
agctcattgcaactttgcct

SEQ ID NO: 316545 - DNA, 20 bp, Artificial Sequence
  Description of Artificial Sequence: Synthetic oligonucleotide
  Target: LAMA2; (+) strand; PAM type: YTN; PAM sequence: CTC
attgcaactttgcctcccag

SEQ ID NO: 316546 - DNA, 20 bp, Artificial Sequence
  Description of Artificial Sequence: Synthetic oligonucleotide
  Target: LAMA2; (+) strand; PAM type: YTN; PAM sequence: TTG
caactttgcctcccaggctc

SEQ ID NO: 316547 - DNA, 20 bp, Artificial Sequence
  Description of Artificial Sequence: Synthetic oligonucleotide
  Target: LAMA2; (+) strand; PAM type: YTN; PAM sequence: CTT
tgcctcccaggctcaagcga

SEQ ID NO: 316548 - DNA, 20 bp, Artificial Sequence
  Description of Artificial Sequence: Synthetic oligonucleotide
  Target: LAMA2; (+) strand; PAM type: YTN; PAM sequence: TTT
gcctcccaggctcaagcgat

SEQ ID NO: 316549 - DNA, 20 bp, Artificial Sequence
  Description of Artificial Sequence: Synthetic oligonucleotide
  Target: LAMA2; (+) strand; PAM type: YTN; PAM sequence: TTG
cctcccaggctcaagcgatc

SEQ ID NO: 316550 - DNA, 20 bp, Artificial Sequence
  Description of Artificial Sequence: Synthetic oligonucleotide
  Target: LAMA2; (+) strand; PAM type: YTN; PAM sequence: CTC
ccaggctcaagcgatcctcc

SEQ ID NO: 316551 - DNA, 20 bp, Artificial Sequence
  Description of Artificial Sequence: Synthetic oligonucleotide
  Target: LAMA2; (+) strand; PAM type: YTN; PAM sequence: CTC
aagcgatcctcctgcctcag

SEQ ID NO: 316552 - DNA, 20 bp, Artificial Sequence
  Description of Artificial Sequence: Synthetic oligonucleotide
  Target: LAMA2; (+) strand; PAM type: YTN; PAM sequence: CTC
ctgcctcagccacgagagta

SEQ ID NO: 316553 - DNA, 20 bp, Artificial Sequence
  Description of Artificial Sequence: Synthetic oligonucleotide
  Target: LAMA2; (+) strand; PAM type: YTN; PAM sequence: CTG
cctcagccacgagagtagct

SEQ ID NO: 316554 - DNA, 20 bp, Artificial Sequence
  Description of Artificial Sequence: Synthetic oligonucleotide
  Target: LAMA2; (+) strand; PAM type: YTN; PAM sequence: CTC
agccacgagagtagctggga

SEQ ID NO: 316555 - DNA, 20 bp, Artificial Sequence
  Description of Artificial Sequence: Synthetic oligonucleotide
  Target: LAMA2; (+) strand; PAM type: YTN; PAM sequence: CTG
ggattacagattcacgccac

SEQ ID NO: 316556 - DNA, 20 bp, Artificial Sequence
  Description of Artificial Sequence: Synthetic oligonucleotide
  Target: LAMA2; (+) strand; PAM type: YTN; PAM sequence: TTA
cagattcacgccactacacc

SEQ ID NO: 316557 - DNA, 20 bp, Artificial Sequence
  Description of Artificial Sequence: Synthetic oligonucleotide
  Target: LAMA2; (+) strand; PAM type: YTN; PAM sequence: TTC
acgccactacacccagcaaa

SEQ ID NO: 316558 - DNA, 20 bp, Artificial Sequence
  Description of Artificial Sequence: Synthetic oligonucleotide
  Target: LAMA2; (+) strand; PAM type: YTN; PAM sequence: CTA
cacccagcaaacttttgtat

SEQ ID NO: 316559 - DNA, 20 bp, Artificial Sequence
  Description of Artificial Sequence: Synthetic oligonucleotide
  Target: LAMA2; (+) strand; PAM type: YTN; PAM sequence: CTT
ttgtatttttagtagatatg

SEQ ID NO: 316560 - DNA, 20 bp, Artificial Sequence
  Description of Artificial Sequence: Synthetic oligonucleotide
  Target: LAMA2; (+) strand; PAM type: YTN; PAM sequence: TTT
tgtatttttagtagatatga

SEQ ID NO: 316561 - DNA, 20 bp, Artificial Sequence
  Description of Artificial Sequence: Synthetic oligonucleotide
  Target: LAMA2; (+) strand; PAM type: YTN; PAM sequence: TTT
gtatttttagtagatatgag

SEQ ID NO: 316562 - DNA, 20 bp, Artificial Sequence
  Description of Artificial Sequence: Synthetic oligonucleotide
  Target: LAMA2; (+) strand; PAM type: YTN; PAM sequence: TTG
tatttttagtagatatgagg

SEQ ID NO: 316563 - DNA, 20 bp, Artificial Sequence
  Description of Artificial Sequence: Synthetic oligonucleotide
  Target: LAMA2; (+) strand; PAM type: YTN; PAM sequence: TTT
ttagtagatatgaggtttca

SEQ ID NO: 316564 - DNA, 20 bp, Artificial Sequence
  Description of Artificial Sequence: Synthetic oligonucleotide
  Target: LAMA2; (+) strand; PAM type: YTN; PAM sequence: TTT
tagtagatatgaggtttcac

SEQ ID NO: 316565 - DNA, 20 bp, Artificial Sequence
  Description of Artificial Sequence: Synthetic oligonucleotide
  Target: LAMA2; (+) strand; PAM type: YTN; PAM sequence: TTT
agtagatatgaggtttcacc

SEQ ID NO: 316566 - DNA, 20 bp, Artificial Sequence
  Description of Artificial Sequence: Synthetic oligonucleotide
  Target: LAMA2; (+) strand; PAM type: YTN; PAM sequence: TTA
gtagatatgaggtttcacca

SEQ ID NO: 316567 - DNA, 20 bp, Artificial Sequence
  Description of Artificial Sequence: Synthetic oligonucleotide
  Target: LAMA2; (+) strand; PAM type: YTN; PAM sequence: TTT
caccatgttgtccaggctgt

SEQ ID NO: 316568 - DNA, 20 bp, Artificial Sequence
  Description of Artificial Sequence: Synthetic oligonucleotide
  Target: LAMA2; (+) strand; PAM type: YTN; PAM sequence: TTC
accatgttgtccaggctgtt

SEQ ID NO: 316569 - DNA, 20 bp, Artificial Sequence
  Description of Artificial Sequence: Synthetic oligonucleotide
  Target: LAMA2; (+) strand; PAM type: YTN; PAM sequence: TTG
tccaggctgttctcaaactc

SEQ ID NO: 316570 - DNA, 20 bp, Artificial Sequence
  Description of Artificial Sequence: Synthetic oligonucleotide
  Target: LAMA2; (+) strand; PAM type: YTN; PAM sequence: CTG
ttctcaaactcctgagctca

SEQ ID NO: 316571 - DNA, 20 bp, Artificial Sequence
  Description of Artificial Sequence: Synthetic oligonucleotide
  Target: LAMA2; (+) strand; PAM type: YTN; PAM sequence: TTC
tcaaactcctgagctcaagt

SEQ ID NO: 316572 - DNA, 20 bp, Artificial Sequence
  Description of Artificial Sequence: Synthetic oligonucleotide
  Target: LAMA2; (+) strand; PAM type: YTN; PAM sequence: CTC
aaactcctgagctcaagtga

SEQ ID NO: 316573 - DNA, 20 bp, Artificial Sequence
  Description of Artificial Sequence: Synthetic oligonucleotide
  Target: LAMA2; (+) strand; PAM type: YTN; PAM sequence: CTC
ctgagctcaagtgatccacc

SEQ ID NO: 316574 - DNA, 20 bp, Artificial Sequence
  Description of Artificial Sequence: Synthetic oligonucleotide
  Target: LAMA2; (+) strand; PAM type: YTN; PAM sequence: CTG
agctcaagtgatccacccac

SEQ ID NO: 316575 - DNA, 20 bp, Artificial Sequence
  Description of Artificial Sequence: Synthetic oligonucleotide
  Target: LAMA2; (+) strand; PAM type: YTN; PAM sequence: CTC
aagtgatccacccacctaga

SEQ ID NO: 316576 - DNA, 20 bp, Artificial Sequence
  Description of Artificial Sequence: Synthetic oligonucleotide
  Target: LAMA2; (+) strand; PAM type: YTN; PAM sequence: CTA
gacctcccaaagtgctggga

SEQ ID NO: 316577 - DNA, 20 bp, Artificial Sequence
  Description of Artificial Sequence: Synthetic oligonucleotide
  Target: LAMA2; (+) strand; PAM type: YTN; PAM sequence: CTC
ccaaagtgctgggactacag

SEQ ID NO: 316578 - DNA, 20 bp, Artificial Sequence
  Description of Artificial Sequence: Synthetic oligonucleotide
  Target: LAMA2; (+) strand; PAM type: YTN; PAM sequence: CTG
ggactacaggcatgagccac

SEQ ID NO: 316579 - DNA, 20 bp, Artificial Sequence
  Description of Artificial Sequence: Synthetic oligonucleotide
  Target: LAMA2; (+) strand; PAM type: YTN; PAM sequence: CTA
caggcatgagccacctgtga

SEQ ID NO: 316580 - DNA, 20 bp, Artificial Sequence
  Description of Artificial Sequence: Synthetic oligonucleotide
  Target: LAMA2; (+) strand; PAM type: YTN; PAM sequence: CTG
tgaatttaaagtaaattaat

SEQ ID NO: 316581 - DNA, 20 bp, Artificial Sequence
  Description of Artificial Sequence: Synthetic oligonucleotide
  Target: LAMA2; (+) strand; PAM type: YTN; PAM sequence: TTT
aaagtaaattaatattatgt

SEQ ID NO: 316582 - DNA, 20 bp, Artificial Sequence
  Description of Artificial Sequence: Synthetic oligonucleotide
  Target: LAMA2; (+) strand; PAM type: YTN; PAM sequence: TTA
aagtaaattaatattatgta

SEQ ID NO: 316583 - DNA, 20 bp, Artificial Sequence
  Description of Artificial Sequence: Synthetic oligonucleotide
  Target: LAMA2; (+) strand; PAM type: YTN; PAM sequence: TTA
atattatgtacacagaagtt

SEQ ID NO: 316584 - DNA, 20 bp, Artificial Sequence
  Description of Artificial Sequence: Synthetic oligonucleotide
  Target: LAMA2; (+) strand; PAM type: YTN; PAM sequence: TTA
tgtacacagaagttacaata

SEQ ID NO: 316585 - DNA, 20 bp, Artificial Sequence
  Description of Artificial Sequence: Synthetic oligonucleotide
  Target: LAMA2; (+) strand; PAM type: YTN; PAM sequence: TTA
caataaaaatgcttctattt

SEQ ID NO: 316586 - DNA, 20 bp, Artificial Sequence
  Description of Artificial Sequence: Synthetic oligonucleotide
  Target: LAMA2; (+) strand; PAM type: YTN; PAM sequence: CTT
ctatttggataaaacaaaaa

SEQ ID NO: 316587 - DNA, 20 bp, Artificial Sequence
  Description of Artificial Sequence: Synthetic oligonucleotide
  Target: LAMA2; (+) strand; PAM type: YTN; PAM sequence: TTC
tatttggataaaacaaaaaa

SEQ ID NO: 316588 - DNA, 20 bp, Artificial Sequence
  Description of Artificial Sequence: Synthetic oligonucleotide
  Target: LAMA2; (+) strand; PAM type: YTN; PAM sequence: CTA
tttggataaaacaaaaaaat

SEQ ID NO: 316589 - DNA, 20 bp, Artificial Sequence
  Description of Artificial Sequence: Synthetic oligonucleotide
  Target: LAMA2; (+) strand; PAM type: YTN; PAM sequence: TTT
ggataaaacaaaaaaattaa

SEQ ID NO: 316590 - DNA, 20 bp, Artificial Sequence
  Description of Artificial Sequence: Synthetic oligonucleotide
  Target: LAMA2; (+) strand; PAM type: YTN; PAM sequence: TTG
gataaaacaaaaaaattaaa

SEQ ID NO: 316591 - DNA, 20 bp, Artificial Sequence
  Description of Artificial Sequence: Synthetic oligonucleotide
  Target: LAMA2; (+) strand; PAM type: YTN; PAM sequence: TTA
aaactactgtaaaagtgaaa

SEQ ID NO: 316592 - DNA, 20 bp, Artificial Sequence
  Description of Artificial Sequence: Synthetic oligonucleotide
  Target: LAMA2; (+) strand; PAM type: YTN; PAM sequence: CTA
ctgtaaaagtgaaagatact

SEQ ID NO: 316593 - DNA, 20 bp, Artificial Sequence
  Description of Artificial Sequence: Synthetic oligonucleotide
  Target: LAMA2; (+) strand; PAM type: YTN; PAM sequence: CTG
taaaagtgaaagatactaca

SEQ ID NO: 316594 - DNA, 20 bp, Artificial Sequence
  Description of Artificial Sequence: Synthetic oligonucleotide
  Target: LAMA2; (+) strand; PAM type: YTN; PAM sequence: CTA
catactttaggaacaactgg

SEQ ID NO: 316595 - DNA, 20 bp, Artificial Sequence
  Description of Artificial Sequence: Synthetic oligonucleotide
  Target: LAMA2; (+) strand; PAM type: YTN; PAM sequence: CTT
taggaacaactggtatttgt

SEQ ID NO: 316596 - DNA, 20 bp, Artificial Sequence
  Description of Artificial Sequence: Synthetic oligonucleotide
  Target: LAMA2; (+) strand; PAM type: YTN; PAM sequence: TTT
aggaacaactggtatttgta

SEQ ID NO: 316597 - DNA, 20 bp, Artificial Sequence
  Description of Artificial Sequence: Synthetic oligonucleotide
  Target: LAMA2; (+) strand; PAM type: YTN; PAM sequence: TTA
ggaacaactggtatttgtat

SEQ ID NO: 316598 - DNA, 20 bp, Artificial Sequence
  Description of Artificial Sequence: Synthetic oligonucleotide
  Target: LAMA2; (+) strand; PAM type: YTN; PAM sequence: CTG
gtatttgtatgcaagtgggc

SEQ ID NO: 316599 - DNA, 20 bp, Artificial Sequence
  Description of Artificial Sequence: Synthetic oligonucleotide
  Target: LAMA2; (+) strand; PAM type: YTN; PAM sequence: TTT
gtatgcaagtgggcctaaat

SEQ ID NO: 316600 - DNA, 20 bp, Artificial Sequence
  Description of Artificial Sequence: Synthetic oligonucleotide
  Target: LAMA2; (+) strand; PAM type: YTN; PAM sequence: TTG
tatgcaagtgggcctaaatc

SEQ ID NO: 316601 - DNA, 20 bp, Artificial Sequence
  Description of Artificial Sequence: Synthetic oligonucleotide
  Target: LAMA2; (+) strand; PAM type: YTN; PAM sequence: CTA
aatctaatgttgtgtgaaga

SEQ ID NO: 316602 - DNA, 20 bp, Artificial Sequence
  Description of Artificial Sequence: Synthetic oligonucleotide
  Target: LAMA2; (+) strand; PAM type: YTN; PAM sequence: CTA
atgttgtgtgaagatcaaag

SEQ ID NO: 316603 - DNA, 20 bp, Artificial Sequence
  Description of Artificial Sequence: Synthetic oligonucleotide
  Target: LAMA2; (+) strand; PAM type: YTN; PAM sequence: TTG
tgtgaagatcaaagccaagt

SEQ ID NO: 316604 - DNA, 20 bp, Artificial Sequence
  Description of Artificial Sequence: Synthetic oligonucleotide
  Target: LAMA2; (+) strand; PAM type: YTN; PAM sequence: TTG
tagctcatgttgcagttatt

SEQ ID NO: 316605 - DNA, 20 bp, Artificial Sequence
  Description of Artificial Sequence: Synthetic oligonucleotide
  Target: LAMA2; (+) strand; PAM type: YTN; PAM sequence: CTC
atgttgcagttatttcgagg

SEQ ID NO: 316606 - DNA, 20 bp, Artificial Sequence
  Description of Artificial Sequence: Synthetic oligonucleotide
  Target: LAMA2; (+) strand; PAM type: YTN; PAM sequence: TTG
cagttatttcgaggtctcaa

SEQ ID NO: 316607 - DNA, 20 bp, Artificial Sequence
  Description of Artificial Sequence: Synthetic oligonucleotide
  Target: LAMA2; (+) strand; PAM type: YTN; PAM sequence: TTA
tttcgaggtctcaaaaggga

SEQ ID NO: 316608 - DNA, 20 bp, Artificial Sequence
  Description of Artificial Sequence: Synthetic oligonucleotide
  Target: LAMA2; (+) strand; PAM type: YTN; PAM sequence: TTT
cgaggtctcaaaagggataa

SEQ ID NO: 316609 - DNA, 20 bp, Artificial Sequence
  Description of Artificial Sequence: Synthetic oligonucleotide
  Target: LAMA2; (+) strand; PAM type: YTN; PAM sequence: TTC
gaggtctcaaaagggataac

SEQ ID NO: 316610 - DNA, 20 bp, Artificial Sequence
  Description of Artificial Sequence: Synthetic oligonucleotide
  Target: LAMA2; (+) strand; PAM type: YTN; PAM sequence: CTC
aaaagggataacaacaaaaa

SEQ ID NO: 316611 - DNA, 20 bp, Artificial Sequence
  Description of Artificial Sequence: Synthetic oligonucleotide
  Target: LAMA2; (+) strand; PAM type: YTN; PAM sequence: CTA
taatagaaaacagaatctgg

SEQ ID NO: 316612 - DNA, 20 bp, Artificial Sequence
  Description of Artificial Sequence: Synthetic oligonucleotide
  Target: LAMA2; (+) strand; PAM type: YTN; PAM sequence: CTG
ggttaaaatcagtggaaata

SEQ ID NO: 316613 - DNA, 20 bp, Artificial Sequence
  Description of Artificial Sequence: Synthetic oligonucleotide
  Target: LAMA2; (+) strand; PAM type: YTN; PAM sequence: TTA
aaatcagtggaaataatttt

SEQ ID NO: 316614 - DNA, 20 bp, Artificial Sequence
  Description of Artificial Sequence: Synthetic oligonucleotide
  Target: LAMA2; (+) strand; PAM type: YTN; PAM sequence: TTT
ttatttcagaattaaataaa

SEQ ID NO: 316615 - DNA, 20 bp, Artificial Sequence
  Description of Artificial Sequence: Synthetic oligonucleotide
  Target: LAMA2; (+) strand; PAM type: YTN; PAM sequence: TTT
tatttcagaattaaataaat

SEQ ID NO: 316616 - DNA, 20 bp, Artificial Sequence
  Description of Artificial Sequence: Synthetic oligonucleotide
  Target: LAMA2; (+) strand; PAM type: YTN; PAM sequence: TTT
atttcagaattaaataaatt

SEQ ID NO: 316617 - DNA, 20 bp, Artificial Sequence
  Description of Artificial Sequence: Synthetic oligonucleotide
  Target: LAMA2; (+) strand; PAM type: YTN; PAM sequence: TTA
tttcagaattaaataaattg

SEQ ID NO: 316618 - DNA, 20 bp, Artificial Sequence
  Description of Artificial Sequence: Synthetic oligonucleotide
  Target: LAMA2; (+) strand; PAM type: YTN; PAM sequence: TTT
cagaattaaataaattgagt

SEQ ID NO: 316619 - DNA, 20 bp, Artificial Sequence
  Description of Artificial Sequence: Synthetic oligonucleotide
  Target: LAMA2; (+) strand; PAM type: YTN; PAM sequence: TTC
agaattaaataaattgagtg

SEQ ID NO: 316620 - DNA, 20 bp, Artificial Sequence
  Description of Artificial Sequence: Synthetic oligonucleotide
  Target: LAMA2; (+) strand; PAM type: YTN; PAM sequence: TTA
aataaattgagtgaaatgaa

SEQ ID NO: 316621 - DNA, 20 bp, Artificial Sequence
  Description of Artificial Sequence: Synthetic oligonucleotide
  Target: LAMA2; (+) strand; PAM type: YTN; PAM sequence: TTG
agtgaaatgaagtatctggc

SEQ ID NO: 316622 - DNA, 20 bp, Artificial Sequence
  Description of Artificial Sequence: Synthetic oligonucleotide
  Target: LAMA2; (+) strand; PAM type: YTN; PAM sequence: CTG
gctcttggaggaaaatatgg

SEQ ID NO: 316623 - DNA, 20 bp, Artificial Sequence
  Description of Artificial Sequence: Synthetic oligonucleotide
  Target: LAMA2; (+) strand; PAM type: YTN; PAM sequence: CTC
ttggaggaaaatatggtatc

SEQ ID NO: 316624 - DNA, 20 bp, Artificial Sequence
  Description of Artificial Sequence: Synthetic oligonucleotide
  Target: LAMA2; (+) strand; PAM type: YTN; PAM sequence: CTT
ggaggaaaatatggtatctt

SEQ ID NO: 316625 - DNA, 20 bp, Artificial Sequence
  Description of Artificial Sequence: Synthetic oligonucleotide
  Target: LAMA2; (+) strand; PAM type: YTN; PAM sequence: TTG
gaggaaaatatggtatctta

SEQ ID NO: 316626 - DNA, 20 bp, Artificial Sequence
  Description of Artificial Sequence: Synthetic oligonucleotide
  Target: LAMA2; (+) strand; PAM type: YTN; PAM sequence: CTT
attctttaaatgtctttaaa

SEQ ID NO: 316627 - DNA, 20 bp, Artificial Sequence
  Description of Artificial Sequence: Synthetic oligonucleotide
  Target: LAMA2; (+) strand; PAM type: YTN; PAM sequence: TTA
ttctttaaatgtctttaaat

SEQ ID NO: 316628 - DNA, 20 bp, Artificial Sequence
  Description of Artificial Sequence: Synthetic oligonucleotide
  Target: LAMA2; (+) strand; PAM type: YTN; PAM sequence: TTC
tttaaatgtctttaaattta

SEQ ID NO: 316629 - DNA, 20 bp, Artificial Sequence
  Description of Artificial Sequence: Synthetic oligonucleotide
  Target: LAMA2; (+) strand; PAM type: YTN; PAM sequence: CTT
taaatgtctttaaatttata

SEQ ID NO: 316630 - DNA, 20 bp, Artificial Sequence
  Description of Artificial Sequence: Synthetic oligonucleotide
  Target: LAMA2; (+) strand; PAM type: YTN; PAM sequence: TTT
aaatgtctttaaatttataa

SEQ ID NO: 316631 - DNA, 20 bp, Artificial Sequence
  Description of Artificial Sequence: Synthetic oligonucleotide
  Target: LAMA2; (+) strand; PAM type: YTN; PAM sequence: TTA
aatgtctttaaatttataag

SEQ ID NO: 316632 - DNA, 20 bp, Artificial Sequence
  Description of Artificial Sequence: Synthetic oligonucleotide
  Target: LAMA2; (+) strand; PAM type: YTN; PAM sequence: CTT
taaatttataagtcataagc

SEQ ID NO: 316633 - DNA, 20 bp, Artificial Sequence
  Description of Artificial Sequence: Synthetic oligonucleotide
  Target: LAMA2; (+) strand; PAM type: YTN; PAM sequence: TTT
aaatttataagtcataagct

SEQ ID NO: 316634 - DNA, 20 bp, Artificial Sequence
  Description of Artificial Sequence: Synthetic oligonucleotide
  Target: LAMA2; (+) strand; PAM type: YTN; PAM sequence: TTA
aatttataagtcataagctg

SEQ ID NO: 316635 - DNA, 20 bp, Artificial Sequence
  Description of Artificial Sequence: Synthetic oligonucleotide
  Target: LAMA2; (+) strand; PAM type: YTN; PAM sequence: TTT
ataagtcataagctgcaagt

SEQ ID NO: 316636 - DNA, 20 bp, Artificial Sequence
  Description of Artificial Sequence: Synthetic oligonucleotide
  Target: LAMA2; (+) strand; PAM type: YTN; PAM sequence: TTA
taagtcataagctgcaagtc

SEQ ID NO: 316637 - DNA, 20 bp, Artificial Sequence
  Description of Artificial Sequence: Synthetic oligonucleotide
  Target: LAMA2; (+) strand; PAM type: YTN; PAM sequence: CTG
caagtcagtagcatcattat

SEQ ID NO: 316638 - DNA, 20 bp, Artificial Sequence
  Description of Artificial Sequence: Synthetic oligonucleotide
  Target: LAMA2; (+) strand; PAM type: YTN; PAM sequence: TTA
tgttgatgaattacccagtt

SEQ ID NO: 316639 - DNA, 20 bp, Artificial Sequence
  Description of Artificial Sequence: Synthetic oligonucleotide
  Target: LAMA2; (+) strand; PAM type: YTN; PAM sequence: TTG
atgaattacccagtttaatt

SEQ ID NO: 316640 - DNA, 20 bp, Artificial Sequence
  Description of Artificial Sequence: Synthetic oligonucleotide
  Target: LAMA2; (+) strand; PAM type: YTN; PAM sequence: TTA
cccagtttaattcttataaa

SEQ ID NO: 316641 - DNA, 20 bp, Artificial Sequence
  Description of Artificial Sequence: Synthetic oligonucleotide
  Target: LAMA2; (+) strand; PAM type: YTN; PAM sequence: TTT
aattcttataaaaattgaaa

SEQ ID NO: 316642 - DNA, 20 bp, Artificial Sequence
  Description of Artificial Sequence: Synthetic oligonucleotide
  Target: LAMA2; (+) strand; PAM type: YTN; PAM sequence: TTA
attcttataaaaattgaaat

SEQ ID NO: 316643 - DNA, 20 bp, Artificial Sequence
  Description of Artificial Sequence: Synthetic oligonucleotide
  Target: LAMA2; (+) strand; PAM type: YTN; PAM sequence: TTC
ttataaaaattgaaattatc

SEQ ID NO: 316644 - DNA, 20 bp, Artificial Sequence
  Description of Artificial Sequence: Synthetic oligonucleotide
  Target: LAMA2; (+) strand; PAM type: YTN; PAM sequence: CTT
ataaaaattgaaattatctt

SEQ ID NO: 316645 - DNA, 20 bp, Artificial Sequence
  Description of Artificial Sequence: Synthetic oligonucleotide
  Target: LAMA2; (+) strand; PAM type: YTN; PAM sequence: TTA
taaaaattgaaattatcttc

SEQ ID NO: 316646 - DNA, 20 bp, Artificial Sequence
  Description of Artificial Sequence: Synthetic oligonucleotide
  Target: LAMA2; (+) strand; PAM type: YTN; PAM sequence: TTG
aaattatcttctgaactcta

SEQ ID NO: 316647 - DNA, 20 bp, Artificial Sequence
  Description of Artificial Sequence: Synthetic oligonucleotide
  Target: LAMA2; (+) strand; PAM type: YTN; PAM sequence: TTA
tcttctgaactctaagtcat

SEQ ID NO: 316648 - DNA, 20 bp, Artificial Sequence
  Description of Artificial Sequence: Synthetic oligonucleotide
  Target: LAMA2; (+) strand; PAM type: YTN; PAM sequence: CTT
ctgaactctaagtcatattt

SEQ ID NO: 316649 - DNA, 20 bp, Artificial Sequence
  Description of Artificial Sequence: Synthetic oligonucleotide
  Target: LAMA2; (+) strand; PAM type: YTN; PAM sequence: TTC
tgaactctaagtcatatttt

SEQ ID NO: 316650 - DNA, 20 bp, Artificial Sequence
  Description of Artificial Sequence: Synthetic oligonucleotide
  Target: LAMA2; (+) strand; PAM type: YTN; PAM sequence: CTG
aactctaagtcatattttag

SEQ ID NO: 316651 - DNA, 20 bp, Artificial Sequence
  Description of Artificial Sequence: Synthetic oligonucleotide
  Target: LAMA2; (+) strand; PAM type: YTN; PAM sequence: CTC
taagtcatattttagccaca

SEQ ID NO: 316652 - DNA, 20 bp, Artificial Sequence
  Description of Artificial Sequence: Synthetic oligonucleotide
  Target: LAMA2; (+) strand; PAM type: YTN; PAM sequence: CTA
agtcatattttagccacagg

SEQ ID NO: 316653 - DNA, 20 bp, Artificial Sequence
  Description of Artificial Sequence: Synthetic oligonucleotide
  Target: LAMA2; (+) strand; PAM type: YTN; PAM sequence: TTT
tagccacaggtatttttttg

SEQ ID NO: 316654 - DNA, 20 bp, Artificial Sequence
  Description of Artificial Sequence: Synthetic oligonucleotide
  Target: LAMA2; (+) strand; PAM type: YTN; PAM sequence: TTT
agccacaggtatttttttgt

SEQ ID NO: 316655 - DNA, 20 bp, Artificial Sequence
  Description of Artificial Sequence: Synthetic oligonucleotide
  Target: LAMA2; (+) strand; PAM type: YTN; PAM sequence: TTA
gccacaggtatttttttgtt

SEQ ID NO: 316656 - DNA, 20 bp, Artificial Sequence
  Description of Artificial Sequence: Synthetic oligonucleotide
  Target: LAMA2; (+) strand; PAM type: YTN; PAM sequence: TTT
ttttgttttgtttaatcaat

SEQ ID NO: 316657 - DNA, 20 bp, Artificial Sequence
  Description of Artificial Sequence: Synthetic oligonucleotide
  Target: LAMA2; (+) strand; PAM type: YTN; PAM sequence: TTT
tttgttttgtttaatcaata

SEQ ID NO: 316658 - DNA, 20 bp, Artificial Sequence
  Description of Artificial Sequence: Synthetic oligonucleotide
  Target: LAMA2; (+) strand; PAM type: YTN; PAM sequence: TTT
ttgttttgtttaatcaataa

SEQ ID NO: 316659 - DNA, 20 bp, Artificial Sequence
  Description of Artificial Sequence: Synthetic oligonucleotide
  Target: LAMA2; (+) strand; PAM type: YTN; PAM sequence: TTT
tgttttgtttaatcaataat

SEQ ID NO: 316660 - DNA, 20 bp, Artificial Sequence
  Description of Artificial Sequence: Synthetic oligonucleotide
  Target: LAMA2; (+) strand; PAM type: YTN; PAM sequence: TTT
gttttgtttaatcaataatt

SEQ ID NO: 316661 - DNA, 20 bp, Artificial Sequence
  Description of Artificial Sequence: Synthetic oligonucleotide
  Target: LAMA2; (+) strand; PAM type: YTN; PAM sequence: TTG
ttttgtttaatcaataattc

SEQ ID NO: 316662 - DNA, 20 bp, Artificial Sequence
  Description of Artificial Sequence: Synthetic oligonucleotide
  Target: LAMA2; (+) strand; PAM type: YTN; PAM sequence: TTT
tgtttaatcaataattcctg

SEQ ID NO: 316663 - DNA, 20 bp, Artificial Sequence
  Description of Artificial Sequence: Synthetic oligonucleotide
  Target: LAMA2; (+) strand; PAM type: YTN; PAM sequence: TTT
gtttaatcaataattcctga

SEQ ID NO: 316664 - DNA, 20 bp, Artificial Sequence
  Description of Artificial Sequence: Synthetic oligonucleotide
  Target: LAMA2; (+) strand; PAM type: YTN; PAM sequence: TTG
tttaatcaataattcctgaa

SEQ ID NO: 316665 - DNA, 20 bp, Artificial Sequence
  Description of Artificial Sequence: Synthetic oligonucleotide
  Target: LAMA2; (+) strand; PAM type: YTN; PAM sequence: TTT
aatcaataattcctgaaaga

SEQ ID NO: 316666 - DNA, 20 bp, Artificial Sequence
  Description of Artificial Sequence: Synthetic oligonucleotide
  Target: LAMA2; (+) strand; PAM type: YTN; PAM sequence: TTA
atcaataattcctgaaagaa

SEQ ID NO: 316667 - DNA, 20 bp, Artificial Sequence
  Description of Artificial Sequence: Synthetic oligonucleotide
  Target: LAMA2; (+) strand; PAM type: YTN; PAM sequence: TTC
ctgaaagaatgaaacttatt

SEQ ID NO: 316668 - DNA, 20 bp, Artificial Sequence
  Description of Artificial Sequence: Synthetic oligonucleotide
  Target: LAMA2; (+) strand; PAM type: YTN; PAM sequence: CTG
aaagaatgaaacttattcga

SEQ ID NO: 316669 - DNA, 20 bp, Artificial Sequence
  Description of Artificial Sequence: Synthetic oligonucleotide
  Target: LAMA2; (+) strand; PAM type: YTN; PAM sequence: CTT
attcgacttttattacgtga

SEQ ID NO: 316670 - DNA, 20 bp, Artificial Sequence
  Description of Artificial Sequence: Synthetic oligonucleotide
  Target: LAMA2; (+) strand; PAM type: YTN; PAM sequence: TTA
ttcgacttttattacgtgac

SEQ ID NO: 316671 - DNA, 20 bp, Artificial Sequence
  Description of Artificial Sequence: Synthetic oligonucleotide
  Target: LAMA2; (+) strand; PAM type: YTN; PAM sequence: TTC
gacttttattacgtgacaag

SEQ ID NO: 316672 - DNA, 20 bp, Artificial Sequence
  Description of Artificial Sequence: Synthetic oligonucleotide
  Target: LAMA2; (+) strand; PAM type: YTN; PAM sequence: CTT
ttattacgtgacaaggttta

SEQ ID NO: 316673 - DNA, 20 bp, Artificial Sequence
  Description of Artificial Sequence: Synthetic oligonucleotide
  Target: LAMA2; (+) strand; PAM type: YTN; PAM sequence: TTT
tattacgtgacaaggtttaa

SEQ ID NO: 316674 - DNA, 20 bp, Artificial Sequence
  Description of Artificial Sequence: Synthetic oligonucleotide
  Target: LAMA2; (+) strand; PAM type: YTN; PAM sequence: TTT
attacgtgacaaggtttaaa

SEQ ID NO: 316675 - DNA, 20 bp, Artificial Sequence
  Description of Artificial Sequence: Synthetic oligonucleotide
  Target: LAMA2; (+) strand; PAM type: YTN; PAM sequence: TTA
ttacgtgacaaggtttaaaa

SEQ ID NO: 316676 - DNA, 20 bp, Artificial Sequence
  Description of Artificial Sequence: Synthetic oligonucleotide
  Target: LAMA2; (+) strand; PAM type: YTN; PAM sequence: TTA
cgtgacaaggtttaaaaaaa

SEQ ID NO: 316677 - DNA, 20 bp, Artificial Sequence
  Description of Artificial Sequence: Synthetic oligonucleotide
  Target: LAMA2; (+) strand; PAM type: YTN; PAM sequence: TTT
aaaaaaatttgcttgaataa

SEQ ID NO: 316678 - DNA, 20 bp, Artificial Sequence
  Description of Artificial Sequence: Synthetic oligonucleotide
  Target: LAMA2; (+) strand; PAM type: YTN; PAM sequence: TTA
aaaaaatttgcttgaataaa

SEQ ID NO: 316679 - DNA, 20 bp, Artificial Sequence
  Description of Artificial Sequence: Synthetic oligonucleotide
  Target: LAMA2; (+) strand; PAM type: YTN; PAM sequence: TTT
gcttgaataaaacattatgg

SEQ ID NO: 316680 - DNA, 20 bp, Artificial Sequence
  Description of Artificial Sequence: Synthetic oligonucleotide
  Target: LAMA2; (+) strand; PAM type: YTN; PAM sequence: TTG
cttgaataaaacattatgga

SEQ ID NO: 316681 - DNA, 20 bp, Artificial Sequence
  Description of Artificial Sequence: Synthetic oligonucleotide
  Target: LAMA2; (+) strand; PAM type: YTN; PAM sequence: CTT
gaataaaacattatggagtc

SEQ ID NO: 316682 - DNA, 20 bp, Artificial Sequence
  Description of Artificial Sequence: Synthetic oligonucleotide
  Target: LAMA2; (+) strand; PAM type: YTN; PAM sequence: TTG
aataaaacattatggagtct

SEQ ID NO: 316683 - DNA, 20 bp, Artificial Sequence
  Description of Artificial Sequence: Synthetic oligonucleotide
  Target: LAMA2; (+) strand; PAM type: YTN; PAM sequence: TTA
tggagtctgaattcaaagca

SEQ ID NO: 316684 - DNA, 20 bp, Artificial Sequence
  Description of Artificial Sequence: Synthetic oligonucleotide
  Target: LAMA2; (+) strand; PAM type: YTN; PAM sequence: CTG
aattcaaagcataaaggcag

SEQ ID NO: 316685 - DNA, 20 bp, Artificial Sequence
  Description of Artificial Sequence: Synthetic oligonucleotide
  Target: LAMA2; (+) strand; PAM type: YTN; PAM sequence: TTC
aaagcataaaggcagaaagt

SEQ ID NO: 316686 - DNA, 20 bp, Artificial Sequence
  Description of Artificial Sequence: Synthetic oligonucleotide
  Target: LAMA2; (+) strand; PAM type: YTN; PAM sequence: CTT
tcaaacgtctgtcactttta

SEQ ID NO: 316687 - DNA, 20 bp, Artificial Sequence
  Description of Artificial Sequence: Synthetic oligonucleotide
  Target: LAMA2; (+) strand; PAM type: YTN; PAM sequence: TTT
caaacgtctgtcacttttaa

SEQ ID NO: 316688 - DNA, 20 bp, Artificial Sequence
  Description of Artificial Sequence: Synthetic oligonucleotide
  Target: LAMA2; (+) strand; PAM type: YTN; PAM sequence: TTC
aaacgtctgtcacttttaat

SEQ ID NO: 316689 - DNA, 20 bp, Artificial Sequence
  Description of Artificial Sequence: Synthetic oligonucleotide
  Target: LAMA2; (+) strand; PAM type: YTN; PAM sequence: CTG
tcacttttaataattttgtt

SEQ ID NO: 316690 - DNA, 20 bp, Artificial Sequence
  Description of Artificial Sequence: Synthetic oligonucleotide
  Target: LAMA2; (+) strand; PAM type: YTN; PAM sequence: CTT
ttaataattttgttctatgt

SEQ ID NO: 316691 - DNA, 20 bp, Artificial Sequence
  Description of Artificial Sequence: Synthetic oligonucleotide
  Target: LAMA2; (+) strand; PAM type: YTN; PAM sequence: TTT
taataattttgttctatgtt

SEQ ID NO: 316692 - DNA, 20 bp, Artificial Sequence
  Description of Artificial Sequence: Synthetic oligonucleotide
  Target: LAMA2; (+) strand; PAM type: YTN; PAM sequence: TTT
aataattttgttctatgtta

SEQ ID NO: 316693 - DNA, 20 bp, Artificial Sequence
  Description of Artificial Sequence: Synthetic oligonucleotide
  Target: LAMA2; (+) strand; PAM type: YTN; PAM sequence: TTA
ataattttgttctatgttat

SEQ ID NO: 316694 - DNA, 20 bp, Artificial Sequence
  Description of Artificial Sequence: Synthetic oligonucleotide
  Target: LAMA2; (+) strand; PAM type: YTN; PAM sequence: TTT
tgttctatgttatatgacct

SEQ ID NO: 316695 - DNA, 20 bp, Artificial Sequence
  Description of Artificial Sequence: Synthetic oligonucleotide
  Target: LAMA2; (+) strand; PAM type: YTN; PAM sequence: TTT
gttctatgttatatgaccta

SEQ ID NO: 316696 - DNA, 20 bp, Artificial Sequence
  Description of Artificial Sequence: Synthetic oligonucleotide
  Target: LAMA2; (+) strand; PAM type: YTN; PAM sequence: TTG
ttctatgttatatgacctac

SEQ ID NO: 316697 - DNA, 20 bp, Artificial Sequence
  Description of Artificial Sequence: Synthetic oligonucleotide
  Target: LAMA2; (+) strand; PAM type: YTN; PAM sequence: TTC
tatgttatatgacctacgaa

SEQ ID NO: 316698 - DNA, 20 bp, Artificial Sequence
  Description of Artificial Sequence: Synthetic oligonucleotide
  Target: LAMA2; (+) strand; PAM type: YTN; PAM sequence: CTA
tgttatatgacctacgaatg

SEQ ID NO: 316699 - DNA, 20 bp, Artificial Sequence
  Description of Artificial Sequence: Synthetic oligonucleotide
  Target: LAMA2; (+) strand; PAM type: YTN; PAM sequence: TTA
tatgacctacgaatgttaag

SEQ ID NO: 316700 - DNA, 20 bp, Artificial Sequence
  Description of Artificial Sequence: Synthetic oligonucleotide
  Target: LAMA2; (+) strand; PAM type: YTN; PAM sequence: CTA
cgaatgttaagagtctgtaa

SEQ ID NO: 316701 - DNA, 20 bp, Artificial Sequence
  Description of Artificial Sequence: Synthetic oligonucleotide
  Target: LAMA2; (+) strand; PAM type: YTN; PAM sequence: TTA
agagtctgtaagagtttctt

SEQ ID NO: 316702 - DNA, 20 bp, Artificial Sequence
  Description of Artificial Sequence: Synthetic oligonucleotide
  Target: LAMA2; (+) strand; PAM type: YTN; PAM sequence: CTG
taagagtttcttcagctgca

SEQ ID NO: 316703 - DNA, 20 bp, Artificial Sequence
  Description of Artificial Sequence: Synthetic oligonucleotide
  Target: LAMA2; (+) strand; PAM type: YTN; PAM sequence: TTT
cttcagctgcatttgatttt

SEQ ID NO: 316704 - DNA, 20 bp, Artificial Sequence
  Description of Artificial Sequence: Synthetic oligonucleotide
  Target: LAMA2; (+) strand; PAM type: YTN; PAM sequence: TTC
ttcagctgcatttgatttta

SEQ ID NO: 316705 - DNA, 20 bp, Artificial Sequence
  Description of Artificial Sequence: Synthetic oligonucleotide
  Target: LAMA2; (+) strand; PAM type: YTN; PAM sequence: CTT
cagctgcatttgattttacc

SEQ ID NO: 316706 - DNA, 20 bp, Artificial Sequence
  Description of Artificial Sequence: Synthetic oligonucleotide
  Target: LAMA2; (+) strand; PAM type: YTN; PAM sequence: TTC
agctgcatttgattttacca

SEQ ID NO: 316707 - DNA, 20 bp, Artificial Sequence
  Description of Artificial Sequence: Synthetic oligonucleotide
  Target: LAMA2; (+) strand; PAM type: YTN; PAM sequence: CTG
catttgattttaccaacacc

SEQ ID NO: 316708 - DNA, 20 bp, Artificial Sequence
  Description of Artificial Sequence: Synthetic oligonucleotide
  Target: LAMA2; (+) strand; PAM type: YTN; PAM sequence: TTT
gattttaccaacaccttgtg

SEQ ID NO: 316709 - DNA, 20 bp, Artificial Sequence
  Description of Artificial Sequence: Synthetic oligonucleotide
  Target: LAMA2; (+) strand; PAM type: YTN; PAM sequence: TTG
attttaccaacaccttgtgg

SEQ ID NO: 316710 - DNA, 20 bp, Artificial Sequence
  Description of Artificial Sequence: Synthetic oligonucleotide
  Target: LAMA2; (+) strand; PAM type: YTN; PAM sequence: TTT
taccaacaccttgtgggtac

SEQ ID NO: 316711 - DNA, 20 bp, Artificial Sequence
  Description of Artificial Sequence: Synthetic oligonucleotide
  Target: LAMA2; (+) strand; PAM type: YTN; PAM sequence: TTT
accaacaccttgtgggtaca

SEQ ID NO: 316712 - DNA, 20 bp, Artificial Sequence
  Description of Artificial Sequence: Synthetic oligonucleotide
  Target: LAMA2; (+) strand; PAM type: YTN; PAM sequence: TTA
ccaacaccttgtgggtacag

SEQ ID NO: 316713 - DNA, 20 bp, Artificial Sequence
  Description of Artificial Sequence: Synthetic oligonucleotide
  Target: LAMA2; (+) strand; PAM type: YTN; PAM sequence: CTT
gtgggtacagttaagaagat

SEQ ID NO: 316714 - DNA, 20 bp, Artificial Sequence
  Description of Artificial Sequence: Synthetic oligonucleotide
  Target: LAMA2; (+) strand; PAM type: YTN; PAM sequence: TTG
tgggtacagttaagaagatg

SEQ ID NO: 316715 - DNA, 20 bp, Artificial Sequence
  Description of Artificial Sequence: Synthetic oligonucleotide
  Target: LAMA2; (+) strand; PAM type: YTN; PAM sequence: TTA
agaagatgacttatttgagg

SEQ ID NO: 316716 - DNA, 20 bp, Artificial Sequence
  Description of Artificial Sequence: Synthetic oligonucleotide
  Target: LAMA2; (+) strand; PAM type: YTN; PAM sequence: CTT
atttgaggctttataactga

SEQ ID NO: 316717 - DNA, 20 bp, Artificial Sequence
  Description of Artificial Sequence: Synthetic oligonucleotide
  Target: LAMA2; (+) strand; PAM type: YTN; PAM sequence: TTA
tttgaggctttataactgaa

SEQ ID NO: 316718 - DNA, 20 bp, Artificial Sequence
  Description of Artificial Sequence: Synthetic oligonucleotide
  Target: LAMA2; (+) strand; PAM type: YTN; PAM sequence: TTT
gaggctttataactgaaatt

SEQ ID NO: 316719 - DNA, 20 bp, Artificial Sequence
  Description of Artificial Sequence: Synthetic oligonucleotide
  Target: LAMA2; (+) strand; PAM type: YTN; PAM sequence: TTG
aggctttataactgaaattg

SEQ ID NO: 316720 - DNA, 20 bp, Artificial Sequence
  Description of Artificial Sequence: Synthetic oligonucleotide
  Target: LAMA2; (+) strand; PAM type: YTN; PAM sequence: CTT
tataactgaaattggatatg

SEQ ID NO: 316721 - DNA, 20 bp, Artificial Sequence
  Description of Artificial Sequence: Synthetic oligonucleotide
  Target: LAMA2; (+) strand; PAM type: YTN; PAM sequence: TTT
ataactgaaattggatatgg

SEQ ID NO: 316722 - DNA, 20 bp, Artificial Sequence
  Description of Artificial Sequence: Synthetic oligonucleotide
  Target: LAMA2; (+) strand; PAM type: YTN; PAM sequence: TTA
taactgaaattggatatggt

SEQ ID NO: 316723 - DNA, 20 bp, Artificial Sequence
  Description of Artificial Sequence: Synthetic oligonucleotide
  Target: LAMA2; (+) strand; PAM type: YTN; PAM sequence: CTG
aaattggatatggttcaaac

SEQ ID NO: 316724 - DNA, 20 bp, Artificial Sequence
  Description of Artificial Sequence: Synthetic oligonucleotide
  Target: LAMA2; (+) strand; PAM type: YTN; PAM sequence: TTG
gatatggttcaaacgttcaa

SEQ ID NO: 316725 - DNA, 20 bp, Artificial Sequence
  Description of Artificial Sequence: Synthetic oligonucleotide
  Target: LAMA2; (+) strand; PAM type: YTN; PAM sequence: TTC
aaacgttcaacagatataaa

SEQ ID NO: 316726 - DNA, 20 bp, Artificial Sequence
  Description of Artificial Sequence: Synthetic oligonucleotide
  Target: LAMA2; (+) strand; PAM type: YTN; PAM sequence: TTC
aacagatataaacatatttt

SEQ ID NO: 316727 - DNA, 20 bp, Artificial Sequence
  Description of Artificial Sequence: Synthetic oligonucleotide
  Target: LAMA2; (+) strand; PAM type: YTN; PAM sequence: TTT
taattaagaataaatatttt

SEQ ID NO: 316728 - DNA, 20 bp, Artificial Sequence
  Description of Artificial Sequence: Synthetic oligonucleotide
  Target: LAMA2; (+) strand; PAM type: YTN; PAM sequence: TTT
aattaagaataaatattttt

SEQ ID NO: 316729 - DNA, 20 bp, Artificial Sequence
  Description of Artificial Sequence: Synthetic oligonucleotide
  Target: LAMA2; (+) strand; PAM type: YTN; PAM sequence: TTA
attaagaataaatattttta

SEQ ID NO: 316730 - DNA, 20 bp, Artificial Sequence
  Description of Artificial Sequence: Synthetic oligonucleotide
  Target: LAMA2; (+) strand; PAM type: YTN; PAM sequence: TTA
agaataaatatttttataag

SEQ ID NO: 316731 - DNA, 20 bp, Artificial Sequence
  Description of Artificial Sequence: Synthetic oligonucleotide
  Target: LAMA2; (+) strand; PAM type: YTN; PAM sequence: TTT
ttataagattgctgaaatga

SEQ ID NO: 316732 - DNA, 20 bp, Artificial Sequence
  Description of Artificial Sequence: Synthetic oligonucleotide
  Target: LAMA2; (+) strand; PAM type: YTN; PAM sequence: TTT
tataagattgctgaaatgac

SEQ ID NO: 316733 - DNA, 20 bp, Artificial Sequence
  Description of Artificial Sequence: Synthetic oligonucleotide
  Target: LAMA2; (+) strand; PAM type: YTN; PAM sequence: TTT
ataagattgctgaaatgact

SEQ ID NO: 316734 - DNA, 20 bp, Artificial Sequence
  Description of Artificial Sequence: Synthetic oligonucleotide
  Target: LAMA2; (+) strand; PAM type: YTN; PAM sequence: TTA
taagattgctgaaatgactt

SEQ ID NO: 316735 - DNA, 20 bp, Artificial Sequence
  Description of Artificial Sequence: Synthetic oligonucleotide
  Target: LAMA2; (+) strand; PAM type: YTN; PAM sequence: TTG
ctgaaatgacttctctcaaa

SEQ ID NO: 316736 - DNA, 20 bp, Artificial Sequence
  Description of Artificial Sequence: Synthetic oligonucleotide
  Target: LAMA2; (+) strand; PAM type: YTN; PAM sequence: CTG
aaatgacttctctcaaaaat

SEQ ID NO: 316737 - DNA, 20 bp, Artificial Sequence
  Description of Artificial Sequence: Synthetic oligonucleotide
  Target: LAMA2; (+) strand; PAM type: YTN; PAM sequence: CTT
ctctcaaaaatttatgccgg

SEQ ID NO: 316738 - DNA, 20 bp, Artificial Sequence
  Description of Artificial Sequence: Synthetic oligonucleotide
  Target: LAMA2; (+) strand; PAM type: YTN; PAM sequence: TTC
tctcaaaaatttatgccgga

SEQ ID NO: 316739 - DNA, 20 bp, Artificial Sequence
  Description of Artificial Sequence: Synthetic oligonucleotide
  Target: LAMA2; (+) strand; PAM type: YTN; PAM sequence: CTC
tcaaaaatttatgccggaac

SEQ ID NO: 316740 - DNA, 20 bp, Artificial Sequence
  Description of Artificial Sequence: Synthetic oligonucleotide
  Target: LAMA2; (+) strand; PAM type: YTN; PAM sequence: CTC
aaaaatttatgccggaacat

SEQ ID NO: 316741 - DNA, 20 bp, Artificial Sequence
  Description of Artificial Sequence: Synthetic oligonucleotide
  Target: LAMA2; (+) strand; PAM type: YTN; PAM sequence: TTT
atgccggaacatcaacaaat

SEQ ID NO: 316742 - DNA, 20 bp, Artificial Sequence
  Description of Artificial Sequence: Synthetic oligonucleotide
  Target: LAMA2; (+) strand; PAM type: YTN; PAM sequence: TTA
tgccggaacatcaacaaata

SEQ ID NO: 316743 - DNA, 20 bp, Artificial Sequence
  Description of Artificial Sequence: Synthetic oligonucleotide
  Target: LAMA2; (+) strand; PAM type: YTN; PAM sequence: TTT
gcattacaaaatagaaaatt

SEQ ID NO: 316744 - DNA, 20 bp, Artificial Sequence
  Description of Artificial Sequence: Synthetic oligonucleotide
  Target: LAMA2; (+) strand; PAM type: YTN; PAM sequence: TTG
cattacaaaatagaaaattc

SEQ ID NO: 316745 - DNA, 20 bp, Artificial Sequence
  Description of Artificial Sequence: Synthetic oligonucleotide
  Target: LAMA2; (+) strand; PAM type: YTN; PAM sequence: TTA
caaaatagaaaattcaattg

SEQ ID NO: 316746 - DNA, 20 bp, Artificial Sequence
  Description of Artificial Sequence: Synthetic oligonucleotide
  Target: LAMA2; (+) strand; PAM type: YTN; PAM sequence: TTC
aattgtggaaaatcatattc

SEQ ID NO: 316747 - DNA, 20 bp, Artificial Sequence
  Description of Artificial Sequence: Synthetic oligonucleotide
  Target: LAMA2; (+) strand; PAM type: YTN; PAM sequence: TTG
tggaaaatcatattctaact

SEQ ID NO: 316748 - DNA, 20 bp, Artificial Sequence
  Description of Artificial Sequence: Synthetic oligonucleotide
  Target: LAMA2; (+) strand; PAM type: YTN; PAM sequence: TTC
taacttattctgatgaagta

SEQ ID NO: 316749 - DNA, 20 bp, Artificial Sequence
  Description of Artificial Sequence: Synthetic oligonucleotide
  Target: LAMA2; (+) strand; PAM type: YTN; PAM sequence: CTA
acttattctgatgaagtagt

SEQ ID NO: 316750 - DNA, 20 bp, Artificial Sequence
  Description of Artificial Sequence: Synthetic oligonucleotide
  Target: LAMA2; (+) strand; PAM type: YTN; PAM sequence: CTT
attctgatgaagtagttccc

SEQ ID NO: 316751 - DNA, 20 bp, Artificial Sequence
  Description of Artificial Sequence: Synthetic oligonucleotide
  Target: LAMA2; (+) strand; PAM type: YTN; PAM sequence: TTA
ttctgatgaagtagttccct

SEQ ID NO: 316752 - DNA, 20 bp, Artificial Sequence
  Description of Artificial Sequence: Synthetic oligonucleotide
  Target: LAMA2; (+) strand; PAM type: YTN; PAM sequence: TTC
tgatgaagtagttcccttgt

SEQ ID NO: 316753 - DNA, 20 bp, Artificial Sequence
  Description of Artificial Sequence: Synthetic oligonucleotide
  Target: LAMA2; (+) strand; PAM type: YTN; PAM sequence: CTG
atgaagtagttcccttgtca

SEQ ID NO: 316754 - DNA, 20 bp, Artificial Sequence
  Description of Artificial Sequence: Synthetic oligonucleotide
  Target: LAMA2; (+) strand; PAM type: YTN; PAM sequence: TTC
ccttgtcaggaagctttttc

SEQ ID NO: 316755 - DNA, 20 bp, Artificial Sequence
  Description of Artificial Sequence: Synthetic oligonucleotide
  Target: LAMA2; (+) strand; PAM type: YTN; PAM sequence: CTT
gtcaggaagctttttcttaa

SEQ ID NO: 316756 - DNA, 20 bp, Artificial Sequence
  Description of Artificial Sequence: Synthetic oligonucleotide
  Target: LAMA2; (+) strand; PAM type: YTN; PAM sequence: TTG
tcaggaagctttttcttaaa

SEQ ID NO: 316757 - DNA, 20 bp, Artificial Sequence
  Description of Artificial Sequence: Synthetic oligonucleotide
  Target: LAMA2; (+) strand; PAM type: YTN; PAM sequence: CTT
tttcttaaagtgtgttttat

SEQ ID NO: 316758 - DNA, 20 bp, Artificial Sequence
  Description of Artificial Sequence: Synthetic oligonucleotide
  Target: LAMA2; (+) strand; PAM type: YTN; PAM sequence: TTT
ttcttaaagtgtgttttatg

SEQ ID NO: 316759 - DNA, 20 bp, Artificial Sequence
  Description of Artificial Sequence: Synthetic oligonucleotide
  Target: LAMA2; (+) strand; PAM type: YTN; PAM sequence: TTT
tcttaaagtgtgttttatga

SEQ ID NO: 316760 - DNA, 20 bp, Artificial Sequence
  Description of Artificial Sequence: Synthetic oligonucleotide
  Target: LAMA2; (+) strand; PAM type: YTN; PAM sequence: TTT
cttaaagtgtgttttatgat

SEQ ID NO: 316761 - DNA, 20 bp, Artificial Sequence
  Description of Artificial Sequence: Synthetic oligonucleotide
  Target: LAMA2; (+) strand; PAM type: YTN; PAM sequence: TTC
ttaaagtgtgttttatgatt

SEQ ID NO: 316762 - DNA, 20 bp, Artificial Sequence
  Description of Artificial Sequence: Synthetic oligonucleotide
  Target: LAMA2; (+) strand; PAM type: YTN; PAM sequence: CTT
aaagtgtgttttatgatttg

SEQ ID NO: 316763 - DNA, 20 bp, Artificial Sequence
  Description of Artificial Sequence: Synthetic oligonucleotide
  Target: LAMA2; (+) strand; PAM type: YTN; PAM sequence: TTA
aagtgtgttttatgatttgt

SEQ ID NO: 316764 - DNA, 20 bp, Artificial Sequence
  Description of Artificial Sequence: Synthetic oligonucleotide
  Target: LAMA2; (+) strand; PAM type: YTN; PAM sequence: TTT
tatgatttgtgatagaatta

SEQ ID NO: 316765 - DNA, 20 bp, Artificial Sequence
  Description of Artificial Sequence: Synthetic oligonucleotide
  Target: LAMA2; (+) strand; PAM type: YTN; PAM sequence: TTT
atgatttgtgatagaattac

SEQ ID NO: 316766 - DNA, 20 bp, Artificial Sequence
  Description of Artificial Sequence: Synthetic oligonucleotide
  Target: LAMA2; (+) strand; PAM type: YTN; PAM sequence: TTA
tgatttgtgatagaattacc

SEQ ID NO: 316767 - DNA, 20 bp, Artificial Sequence
  Description of Artificial Sequence: Synthetic oligonucleotide
  Target: LAMA2; (+) strand; PAM type: YTN; PAM sequence: TTT
gtgatagaattaccatcact

SEQ ID NO: 316768 - DNA, 20 bp, Artificial Sequence
  Description of Artificial Sequence: Synthetic oligonucleotide
  Target: LAMA2; (+) strand; PAM type: YTN; PAM sequence: TTG
tgatagaattaccatcacta

SEQ ID NO: 316769 - DNA, 20 bp, Artificial Sequence
  Description of Artificial Sequence: Synthetic oligonucleotide
  Target: LAMA2; (+) strand; PAM type: YTN; PAM sequence: TTA
ccatcactaagtcgatcatt

SEQ ID NO: 316770 - DNA, 20 bp, Artificial Sequence
  Description of Artificial Sequence: Synthetic oligonucleotide
  Target: LAMA2; (+) strand; PAM type: YTN; PAM sequence: CTA
agtcgatcattgcccattgg

SEQ ID NO: 316771 - DNA, 20 bp, Artificial Sequence
  Description of Artificial Sequence: Synthetic oligonucleotide
  Target: LAMA2; (+) strand; PAM type: YTN; PAM sequence: TTG
cccattggttagtctacatg

SEQ ID NO: 316772 - DNA, 20 bp, Artificial Sequence
  Description of Artificial Sequence: Synthetic oligonucleotide
  Target: LAMA2; (+) strand; PAM type: YTN; PAM sequence: TTG
gttagtctacatgtactgcc

SEQ ID NO: 316773 - DNA, 20 bp, Artificial Sequence
  Description of Artificial Sequence: Synthetic oligonucleotide
  Target: LAMA2; (+) strand; PAM type: YTN; PAM sequence: TTA
gtctacatgtactgcctttt

SEQ ID NO: 316774 - DNA, 20 bp, Artificial Sequence
  Description of Artificial Sequence: Synthetic oligonucleotide
  Target: LAMA2; (+) strand; PAM type: YTN; PAM sequence: CTA
catgtactgccttttagtga

SEQ ID NO: 316775 - DNA, 20 bp, Artificial Sequence
  Description of Artificial Sequence: Synthetic oligonucleotide
  Target: LAMA2; (+) strand; PAM type: YTN; PAM sequence: CTG
ccttttagtgacatgagttc

SEQ ID NO: 316776 - DNA, 20 bp, Artificial Sequence
  Description of Artificial Sequence: Synthetic oligonucleotide
  Target: LAMA2; (+) strand; PAM type: YTN; PAM sequence: CTT
ttagtgacatgagttcaatt

SEQ ID NO: 316777 - DNA, 20 bp, Artificial Sequence
  Description of Artificial Sequence: Synthetic oligonucleotide
  Target: LAMA2; (+) strand; PAM type: YTN; PAM sequence: TTT
tagtgacatgagttcaattc

SEQ ID NO: 316778 - DNA, 20 bp, Artificial Sequence
  Description of Artificial Sequence: Synthetic oligonucleotide
  Target: LAMA2; (+) strand; PAM type: YTN; PAM sequence: TTT
agtgacatgagttcaattct

SEQ ID NO: 316779 - DNA, 20 bp, Artificial Sequence
  Description of Artificial Sequence: Synthetic oligonucleotide
  Target: LAMA2; (+) strand; PAM type: YTN; PAM sequence: TTA
gtgacatgagttcaattcta

SEQ ID NO: 316780 - DNA, 20 bp, Artificial Sequence
  Description of Artificial Sequence: Synthetic oligonucleotide
  Target: LAMA2; (+) strand; PAM type: YTN; PAM sequence: TTC
aattctaattaagaatgaga

SEQ ID NO: 316781 - DNA, 20 bp, Artificial Sequence
  Description of Artificial Sequence: Synthetic oligonucleotide
  Target: LAMA2; (+) strand; PAM type: YTN; PAM sequence: TTC
taattaagaatgagaatagc

SEQ ID NO: 316782 - DNA, 20 bp, Artificial Sequence
  Description of Artificial Sequence: Synthetic oligonucleotide
  Target: LAMA2; (+) strand; PAM type: YTN; PAM sequence: CTA
attaagaatgagaatagcct

SEQ ID NO: 316783 - DNA, 20 bp, Artificial Sequence
  Description of Artificial Sequence: Synthetic oligonucleotide
  Target: LAMA2; (+) strand; PAM type: YTN; PAM sequence: TTA
agaatgagaatagcctataa

SEQ ID NO: 316784 - DNA, 20 bp, Artificial Sequence
  Description of Artificial Sequence: Synthetic oligonucleotide
  Target: LAMA2; (+) strand; PAM type: YTN; PAM sequence: CTA
taactatgaacacagatagc

SEQ ID NO: 316785 - DNA, 20 bp, Artificial Sequence
  Description of Artificial Sequence: Synthetic oligonucleotide
  Target: LAMA2; (+) strand; PAM type: YTN; PAM sequence: CTA
tgaacacagatagctacatg

SEQ ID NO: 316786 - DNA, 20 bp, Artificial Sequence
  Description of Artificial Sequence: Synthetic oligonucleotide
  Target: LAMA2; (+) strand; PAM type: YTN; PAM sequence: CTA
catgtgtctctagtgagagg

SEQ ID NO: 316787 - DNA, 20 bp, Artificial Sequence
  Description of Artificial Sequence: Synthetic oligonucleotide
  Target: LAMA2; (+) strand; PAM type: YTN; PAM sequence: CTC
tagtgagaggtactagtcct

SEQ ID NO: 316788 - DNA, 20 bp, Artificial Sequence
  Description of Artificial Sequence: Synthetic oligonucleotide
  Target: LAMA2; (+) strand; PAM type: YTN; PAM sequence: CTA
gtgagaggtactagtcctct

SEQ ID NO: 316789 - DNA, 20 bp, Artificial Sequence
  Description of Artificial Sequence: Synthetic oligonucleotide
  Target: LAMA2; (+) strand; PAM type: YTN; PAM sequence: CTA
gtcctctttgacatttctct

SEQ ID NO: 316790 - DNA, 20 bp, Artificial Sequence
  Description of Artificial Sequence: Synthetic oligonucleotide
  Target: LAMA2; (+) strand; PAM type: YTN; PAM sequence: CTC
tttgacatttctcttaaagc

SEQ ID NO: 316791 - DNA, 20 bp, Artificial Sequence
  Description of Artificial Sequence: Synthetic oligonucleotide
  Target: LAMA2; (+) strand; PAM type: YTN; PAM sequence: CTT
tgacatttctcttaaagcgg

SEQ ID NO: 316792 - DNA, 20 bp, Artificial Sequence
  Description of Artificial Sequence: Synthetic oligonucleotide
  Target: LAMA2; (+) strand; PAM type: YTN; PAM sequence: TTT
gacatttctcttaaagcgga

SEQ ID NO: 316793 - DNA, 20 bp, Artificial Sequence
  Description of Artificial Sequence: Synthetic oligonucleotide
  Target: LAMA2; (+) strand; PAM type: YTN; PAM sequence: TTG
acatttctcttaaagcggaa

SEQ ID NO: 316794 - DNA, 20 bp, Artificial Sequence
  Description of Artificial Sequence: Synthetic oligonucleotide
  Target: LAMA2; (+) strand; PAM type: YTN; PAM sequence: TTT
ctcttaaagcggaatttatt

SEQ ID NO: 316795 - DNA, 20 bp, Artificial Sequence
  Description of Artificial Sequence: Synthetic oligonucleotide
  Target: LAMA2; (+) strand; PAM type: YTN; PAM sequence: TTC
tcttaaagcggaatttattt

SEQ ID NO: 316796 - DNA, 20 bp, Artificial Sequence
  Description of Artificial Sequence: Synthetic oligonucleotide
  Target: LAMA2; (+) strand; PAM type: YTN; PAM sequence: CTC
ttaaagcggaatttatttgg

SEQ ID NO: 316797 - DNA, 20 bp, Artificial Sequence
  Description of Artificial Sequence: Synthetic oligonucleotide
  Target: LAMA2; (+) strand; PAM type: YTN; PAM sequence: CTT
aaagcggaatttatttgggg

SEQ ID NO: 316798 - DNA, 20 bp, Artificial Sequence
  Description of Artificial Sequence: Synthetic oligonucleotide
  Target: LAMA2; (+) strand; PAM type: YTN; PAM sequence: TTA
aagcggaatttatttggggt

SEQ ID NO: 316799 - DNA, 20 bp, Artificial Sequence
  Description of Artificial Sequence: Synthetic oligonucleotide
  Target: LAMA2; (+) strand; PAM type: YTN; PAM sequence: TTT
atttggggtagtgatggttt

SEQ ID NO: 316800 - DNA, 20 bp, Artificial Sequence
  Description of Artificial Sequence: Synthetic oligonucleotide
  Target: LAMA2; (+) strand; PAM type: YTN; PAM sequence: TTA
tttggggtagtgatggtttt

SEQ ID NO: 316801 - DNA, 20 bp, Artificial Sequence
  Description of Artificial Sequence: Synthetic oligonucleotide
  Target: LAMA2; (+) strand; PAM type: YTN; PAM sequence: TTT
ggggtagtgatggttttact

SEQ ID NO: 316802 - DNA, 20 bp, Artificial Sequence
  Description of Artificial Sequence: Synthetic oligonucleotide
  Target: LAMA2; (+) strand; PAM type: YTN; PAM sequence: TTG
gggtagtgatggttttactg

SEQ ID NO: 316803 - DNA, 20 bp, Artificial Sequence
  Description of Artificial Sequence: Synthetic oligonucleotide
  Target: LAMA2; (+) strand; PAM type: YTN; PAM sequence: TTT
tactggtagccataggggaa

SEQ ID NO: 316804 - DNA, 20 bp, Artificial Sequence
  Description of Artificial Sequence: Synthetic oligonucleotide
  Target: LAMA2; (+) strand; PAM type: YTN; PAM sequence: TTT
actggtagccataggggaag

SEQ ID NO: 316805 - DNA, 20 bp, Artificial Sequence
  Description of Artificial Sequence: Synthetic oligonucleotide
  Target: LAMA2; (+) strand; PAM type: YTN; PAM sequence: TTA
ctggtagccataggggaaga

SEQ ID NO: 316806 - DNA, 20 bp, Artificial Sequence
  Description of Artificial Sequence: Synthetic oligonucleotide
  Target: LAMA2; (+) strand; PAM type: YTN; PAM sequence: CTG
gtagccataggggaagataa

SEQ ID NO: 316807 - DNA, 20 bp, Artificial Sequence
  Description of Artificial Sequence: Synthetic oligonucleotide
  Target: LAMA2; (+) strand; PAM type: YTN; PAM sequence: TTC
atttctactgctggcatgtg

SEQ ID NO: 316808 - DNA, 20 bp, Artificial Sequence
  Description of Artificial Sequence: Synthetic oligonucleotide
  Target: LAMA2; (+) strand; PAM type: YTN; PAM sequence: TTT
ctactgctggcatgtggaat

SEQ ID NO: 316809 - DNA, 20 bp, Artificial Sequence
  Description of Artificial Sequence: Synthetic oligonucleotide
  Target: LAMA2; (+) strand; PAM type: YTN; PAM sequence: TTC
tactgctggcatgtggaatg

SEQ ID NO: 316810 - DNA, 20 bp, Artificial Sequence
  Description of Artificial Sequence: Synthetic oligonucleotide
  Target: LAMA2; (+) strand; PAM type: YTN; PAM sequence: CTA
ctgctggcatgtggaatgct

SEQ ID NO: 316811 - DNA, 20 bp, Artificial Sequence
  Description of Artificial Sequence: Synthetic oligonucleotide
  Target: LAMA2; (+) strand; PAM type: YTN; PAM sequence: CTG
ctggcatgtggaatgctctt

SEQ ID NO: 316812 - DNA, 20 bp, Artificial Sequence
  Description of Artificial Sequence: Synthetic oligonucleotide
  Target: LAMA2; (+) strand; PAM type: YTN; PAM sequence: CTG
gcatgtggaatgctcttttc

SEQ ID NO: 316813 - DNA, 20 bp, Artificial Sequence
  Description of Artificial Sequence: Synthetic oligonucleotide
  Target: LAMA2; (+) strand; PAM type: YTN; PAM sequence: CTC
ttttcctgctccatgccagt

SEQ ID NO: 316814 - DNA, 20 bp, Artificial Sequence
  Description of Artificial Sequence: Synthetic oligonucleotide
  Target: LAMA2; (+) strand; PAM type: YTN; PAM sequence: CTT
ttcctgctccatgccagtct

SEQ ID NO: 316815 - DNA, 20 bp, Artificial Sequence
  Description of Artificial Sequence: Synthetic oligonucleotide
  Target: LAMA2; (+) strand; PAM type: YTN; PAM sequence: TTT
tcctgctccatgccagtctc

SEQ ID NO: 316816 - DNA, 20 bp, Artificial Sequence
  Description of Artificial Sequence: Synthetic oligonucleotide
  Target: LAMA2; (+) strand; PAM type: YTN; PAM sequence: TTT
cctgctccatgccagtctct

SEQ ID NO: 316817 - DNA, 20 bp, Artificial Sequence
  Description of Artificial Sequence: Synthetic oligonucleotide
  Target: LAMA2; (+) strand; PAM type: YTN; PAM sequence: TTC
ctgctccatgccagtctctc

SEQ ID NO: 316818 - DNA, 20 bp, Artificial Sequence
  Description of Artificial Sequence: Synthetic oligonucleotide
  Target: LAMA2; (+) strand; PAM type: YTN; PAM sequence: CTG
ctccatgccagtctctcact

SEQ ID NO: 316819 - DNA, 20 bp, Artificial Sequence
  Description of Artificial Sequence: Synthetic oligonucleotide
  Target: LAMA2; (+) strand; PAM type: YTN; PAM sequence: CTC
catgccagtctctcacttga

SEQ ID NO: 316820 - DNA, 20 bp, Artificial Sequence
  Description of Artificial Sequence: Synthetic oligonucleotide
  Target: LAMA2; (+) strand; PAM type: YTN; PAM sequence: CTC
tcacttgatttagaaagatt

SEQ ID NO: 316821 - DNA, 20 bp, Artificial Sequence
  Description of Artificial Sequence: Synthetic oligonucleotide
  Target: LAMA2; (+) strand; PAM type: YTN; PAM sequence: CTC
acttgatttagaaagatttg

SEQ ID NO: 316822 - DNA, 20 bp, Artificial Sequence
  Description of Artificial Sequence: Synthetic oligonucleotide
  Target: LAMA2; (+) strand; PAM type: YTN; PAM sequence: CTT
gatttagaaagatttgtgcg

SEQ ID NO: 316823 - DNA, 20 bp, Artificial Sequence
  Description of Artificial Sequence: Synthetic oligonucleotide
  Target: LAMA2; (+) strand; PAM type: YTN; PAM sequence: TTG
atttagaaagatttgtgcgt

SEQ ID NO: 316824 - DNA, 20 bp, Artificial Sequence
  Description of Artificial Sequence: Synthetic oligonucleotide
  Target: LAMA2; (+) strand; PAM type: YTN; PAM sequence: TTT
agaaagatttgtgcgtcctt

SEQ ID NO: 316825 - DNA, 20 bp, Artificial Sequence
  Description of Artificial Sequence: Synthetic oligonucleotide
  Target: LAMA2; (+) strand; PAM type: YTN; PAM sequence: TTA
gaaagatttgtgcgtcctta

SEQ ID NO: 316826 - DNA, 20 bp, Artificial Sequence
  Description of Artificial Sequence: Synthetic oligonucleotide
  Target: LAMA2; (+) strand; PAM type: YTN; PAM sequence: TTT
gtgcgtccttagctttgacc

SEQ ID NO: 316827 - DNA, 20 bp, Artificial Sequence
  Description of Artificial Sequence: Synthetic oligonucleotide
  Target: LAMA2; (+) strand; PAM type: YTN; PAM sequence: TTG
tgcgtccttagctttgacca

SEQ ID NO: 316828 - DNA, 20 bp, Artificial Sequence
  Description of Artificial Sequence: Synthetic oligonucleotide
  Target: LAMA2; (+) strand; PAM type: YTN; PAM sequence: CTT
agctttgaccatcaagaaga

SEQ ID NO: 316829 - DNA, 20 bp, Artificial Sequence
  Description of Artificial Sequence: Synthetic oligonucleotide
  Target: LAMA2; (+) strand; PAM type: YTN; PAM sequence: TTA
gctttgaccatcaagaagag

SEQ ID NO: 316830 - DNA, 20 bp, Artificial Sequence
  Description of Artificial Sequence: Synthetic oligonucleotide
  Target: LAMA2; (+) strand; PAM type: YTN; PAM sequence: CTT
tgaccatcaagaagagtcca

SEQ ID NO: 316831 - DNA, 20 bp, Artificial Sequence
  Description of Artificial Sequence: Synthetic oligonucleotide
  Target: LAMA2; (+) strand; PAM type: YTN; PAM sequence: TTT
gaccatcaagaagagtccat

SEQ ID NO: 316832 - DNA, 20 bp, Artificial Sequence
  Description of Artificial Sequence: Synthetic oligonucleotide
  Target: LAMA2; (+) strand; PAM type: YTN; PAM sequence: TTG
accatcaagaagagtccatc

SEQ ID NO: 316833 - DNA, 20 bp, Artificial Sequence
  Description of Artificial Sequence: Synthetic oligonucleotide
  Target: LAMA2; (+) strand; PAM type: YTN; PAM sequence: CTC
ctttgccttcctgtgcctgg

SEQ ID NO: 316834 - DNA, 20 bp, Artificial Sequence
  Description of Artificial Sequence: Synthetic oligonucleotide
  Target: LAMA2; (+) strand; PAM type: YTN; PAM sequence: CTT
tgccttcctgtgcctggtac

SEQ ID NO: 316835 - DNA, 20 bp, Artificial Sequence
  Description of Artificial Sequence: Synthetic oligonucleotide
  Target: LAMA2; (+) strand; PAM type: YTN; PAM sequence: TTT
gccttcctgtgcctggtacc

SEQ ID NO: 316836 - DNA, 20 bp, Artificial Sequence
  Description of Artificial Sequence: Synthetic oligonucleotide
  Target: LAMA2; (+) strand; PAM type: YTN; PAM sequence: TTG
ccttcctgtgcctggtacct

SEQ ID NO: 316837 - DNA, 20 bp, Artificial Sequence
  Description of Artificial Sequence: Synthetic oligonucleotide
  Target: LAMA2; (+) strand; PAM type: YTN; PAM sequence: CTT
cctgtgcctggtacctgaaa

SEQ ID NO: 316838 - DNA, 20 bp, Artificial Sequence
  Description of Artificial Sequence: Synthetic oligonucleotide
  Target: LAMA2; (+) strand; PAM type: YTN; PAM sequence: TTC
ctgtgcctggtacctgaaag

SEQ ID NO: 316839 - DNA, 20 bp, Artificial Sequence
  Description of Artificial Sequence: Synthetic oligonucleotide
  Target: LAMA2; (+) strand; PAM type: YTN; PAM sequence: CTG
tgcctggtacctgaaagacc

SEQ ID NO: 316840 - DNA, 20 bp, Artificial Sequence
  Description of Artificial Sequence: Synthetic oligonucleotide
  Target: LAMA2; (+) strand; PAM type: YTN; PAM sequence: CTG
gtacctgaaagacctagtga

SEQ ID NO: 316841 - DNA, 20 bp, Artificial Sequence
  Description of Artificial Sequence: Synthetic oligonucleotide
  Target: LAMA2; (+) strand; PAM type: YTN; PAM sequence: CTG
aaagacctagtgaagactga

SEQ ID NO: 316842 - DNA, 20 bp, Artificial Sequence
  Description of Artificial Sequence: Synthetic oligonucleotide
  Target: LAMA2; (+) strand; PAM type: YTN; PAM sequence: CTA
gtgaagactgaaagaaaagt

SEQ ID NO: 316843 - DNA, 20 bp, Artificial Sequence
  Description of Artificial Sequence: Synthetic oligonucleotide
  Target: LAMA2; (+) strand; PAM type: YTN; PAM sequence: CTG
aaagaaaagtttttattttc

SEQ ID NO: 316844 - DNA, 20 bp, Artificial Sequence
  Description of Artificial Sequence: Synthetic oligonucleotide
  Target: LAMA2; (+) strand; PAM type: YTN; PAM sequence: TTT
ttattttcttacatagtgaa

SEQ ID NO: 316845 - DNA, 20 bp, Artificial Sequence
  Description of Artificial Sequence: Synthetic oligonucleotide
  Target: LAMA2; (+) strand; PAM type: YTN; PAM sequence: TTT
tattttcttacatagtgaaa

SEQ ID NO: 316846 - DNA, 20 bp, Artificial Sequence
  Description of Artificial Sequence: Synthetic oligonucleotide
  Target: LAMA2; (+) strand; PAM type: YTN; PAM sequence: TTT
attttcttacatagtgaaag

SEQ ID NO: 316847 - DNA, 20 bp, Artificial Sequence
  Description of Artificial Sequence: Synthetic oligonucleotide
  Target: LAMA2; (+) strand; PAM type: YTN; PAM sequence: TTA
ttttcttacatagtgaaagc

SEQ ID NO: 316848 - DNA, 20 bp, Artificial Sequence
  Description of Artificial Sequence: Synthetic oligonucleotide
  Target: LAMA2; (+) strand; PAM type: YTN; PAM sequence: TTT
tcttacatagtgaaagcact

SEQ ID NO: 316849 - DNA, 20 bp, Artificial Sequence
  Description of Artificial Sequence: Synthetic oligonucleotide
  Target: LAMA2; (+) strand; PAM type: YTN; PAM sequence: TTT
cttacatagtgaaagcactt

SEQ ID NO: 316850 - DNA, 20 bp, Artificial Sequence
  Description of Artificial Sequence: Synthetic oligonucleotide
  Target: LAMA2; (+) strand; PAM type: YTN; PAM sequence: TTC
ttacatagtgaaagcacttt

SEQ ID NO: 316851 - DNA, 20 bp, Artificial Sequence
  Description of Artificial Sequence: Synthetic oligonucleotide
  Target: LAMA2; (+) strand; PAM type: YTN; PAM sequence: CTT
acatagtgaaagcactttga

SEQ ID NO: 316852 - DNA, 20 bp, Artificial Sequence
  Description of Artificial Sequence: Synthetic oligonucleotide
  Target: LAMA2; (+) strand; PAM type: YTN; PAM sequence: TTA
catagtgaaagcactttgaa

SEQ ID NO: 316853 - DNA, 20 bp, Artificial Sequence
  Description of Artificial Sequence: Synthetic oligonucleotide
  Target: LAMA2; (+) strand; PAM type: YTN; PAM sequence: CTT
tgaagcattttgttacacat

SEQ ID NO: 316854 - DNA, 20 bp, Artificial Sequence
  Description of Artificial Sequence: Synthetic oligonucleotide
  Target: LAMA2; (+) strand; PAM type: YTN; PAM sequence: TTT
gaagcattttgttacacata

SEQ ID NO: 316855 - DNA, 20 bp, Artificial Sequence
  Description of Artificial Sequence: Synthetic oligonucleotide
  Target: LAMA2; (+) strand; PAM type: YTN; PAM sequence: TTG
aagcattttgttacacatat

SEQ ID NO: 316856 - DNA, 20 bp, Artificial Sequence
  Description of Artificial Sequence: Synthetic oligonucleotide
  Target: LAMA2; (+) strand; PAM type: YTN; PAM sequence: TTT
tgttacacatatctataatt

SEQ ID NO: 316857 - DNA, 20 bp, Artificial Sequence
  Description of Artificial Sequence: Synthetic oligonucleotide
  Target: LAMA2; (+) strand; PAM type: YTN; PAM sequence: TTT
gttacacatatctataattt

SEQ ID NO: 316858 - DNA, 20 bp, Artificial Sequence
  Description of Artificial Sequence: Synthetic oligonucleotide
  Target: LAMA2; (+) strand; PAM type: YTN; PAM sequence: TTG
ttacacatatctataattta

SEQ ID NO: 316859 - DNA, 20 bp, Artificial Sequence
  Description of Artificial Sequence: Synthetic oligonucleotide
  Target: LAMA2; (+) strand; PAM type: YTN; PAM sequence: TTA
cacatatctataatttaaca

SEQ ID NO: 316860 - DNA, 20 bp, Artificial Sequence
  Description of Artificial Sequence: Synthetic oligonucleotide
  Target: LAMA2; (+) strand; PAM type: YTN; PAM sequence: CTA
taatttaacatgataattat

SEQ ID NO: 316861 - DNA, 20 bp, Artificial Sequence
  Description of Artificial Sequence: Synthetic oligonucleotide
  Target: LAMA2; (+) strand; PAM type: YTN; PAM sequence: TTT
aacatgataattatattgat

SEQ ID NO: 316862 - DNA, 20 bp, Artificial Sequence
  Description of Artificial Sequence: Synthetic oligonucleotide
  Target: LAMA2; (+) strand; PAM type: YTN; PAM sequence: TTA
acatgataattatattgatc

SEQ ID NO: 316863 - DNA, 20 bp, Artificial Sequence
  Description of Artificial Sequence: Synthetic oligonucleotide
  Target: LAMA2; (+) strand; PAM type: YTN; PAM sequence: TTA
tattgatcatttacaattct

SEQ ID NO: 316864 - DNA, 20 bp, Artificial Sequence
  Description of Artificial Sequence: Synthetic oligonucleotide
  Target: LAMA2; (+) strand; PAM type: YTN; PAM sequence: TTG
atcatttacaattctacaca

SEQ ID NO: 316865 - DNA, 20 bp, Artificial Sequence
  Description of Artificial Sequence: Synthetic oligonucleotide
  Target: LAMA2; (+) strand; PAM type: YTN; PAM sequence: TTT
acaattctacacattatttt

SEQ ID NO: 316866 - DNA, 20 bp, Artificial Sequence
  Description of Artificial Sequence: Synthetic oligonucleotide
  Target: LAMA2; (+) strand; PAM type: YTN; PAM sequence: TTA
caattctacacattatttta

SEQ ID NO: 316867 - DNA, 20 bp, Artificial Sequence
  Description of Artificial Sequence: Synthetic oligonucleotide
  Target: LAMA2; (+) strand; PAM type: YTN; PAM sequence: TTC
tacacattattttagcaagt

SEQ ID NO: 316868 - DNA, 20 bp, Artificial Sequence
  Description of Artificial Sequence: Synthetic oligonucleotide
  Target: LAMA2; (+) strand; PAM type: YTN; PAM sequence: CTA
cacattattttagcaagtaa

SEQ ID NO: 316869 - DNA, 20 bp, Artificial Sequence
  Description of Artificial Sequence: Synthetic oligonucleotide
  Target: LAMA2; (+) strand; PAM type: YTN; PAM sequence: TTA
ttttagcaagtaatgaacgt

SEQ ID NO: 316870 - DNA, 20 bp, Artificial Sequence
  Description of Artificial Sequence: Synthetic oligonucleotide
  Target: LAMA2; (+) strand; PAM type: YTN; PAM sequence: TTT
tagcaagtaatgaacgttct

SEQ ID NO: 316871 - DNA, 20 bp, Artificial Sequence
  Description of Artificial Sequence: Synthetic oligonucleotide
  Target: LAMA2; (+) strand; PAM type: YTN; PAM sequence: TTT
agcaagtaatgaacgttctt

SEQ ID NO: 316872 - DNA, 20 bp, Artificial Sequence
  Description of Artificial Sequence: Synthetic oligonucleotide
  Target: LAMA2; (+) strand; PAM type: YTN; PAM sequence: TTA
gcaagtaatgaacgttctta

SEQ ID NO: 316873 - DNA, 20 bp, Artificial Sequence
  Description of Artificial Sequence: Synthetic oligonucleotide
  Target: LAMA2; (+) strand; PAM type: YTN; PAM sequence: TTC
ttaagtgcctagtgttgtca

SEQ ID NO: 316874 - DNA, 20 bp, Artificial Sequence
  Description of Artificial Sequence: Synthetic oligonucleotide
  Target: LAMA2; (+) strand; PAM type: YTN; PAM sequence: CTT
aagtgcctagtgttgtcata

SEQ ID NO: 316875 - DNA, 20 bp, Artificial Sequence
  Description of Artificial Sequence: Synthetic oligonucleotide
  Target: LAMA2; (+) strand; PAM type: YTN; PAM sequence: TTA
agtgcctagtgttgtcatag

SEQ ID NO: 316876 - DNA, 20 bp, Artificial Sequence
  Description of Artificial Sequence: Synthetic oligonucleotide
  Target: LAMA2; (+) strand; PAM type: YTN; PAM sequence: CTA
gtgttgtcataggtataaat

SEQ ID NO: 316877 - DNA, 20 bp, Artificial Sequence
  Description of Artificial Sequence: Synthetic oligonucleotide
  Target: LAMA2; (+) strand; PAM type: YTN; PAM sequence: TTG
tcataggtataaatcaagta

SEQ ID NO: 316878 - DNA, 20 bp, Artificial Sequence
  Description of Artificial Sequence: Synthetic oligonucleotide
  Target: LAMA2; (+) strand; PAM type: YTN; PAM sequence: CTG
ccctcaagaaagtgtataat

SEQ ID NO: 316879 - DNA, 20 bp, Artificial Sequence
  Description of Artificial Sequence: Synthetic oligonucleotide
  Target: LAMA2; (+) strand; PAM type: YTN; PAM sequence: CTC
aagaaagtgtataattttat

SEQ ID NO: 316880 - DNA, 20 bp, Artificial Sequence
  Description of Artificial Sequence: Synthetic oligonucleotide
  Target: LAMA2; (+) strand; PAM type: YTN; PAM sequence: TTT
tatgcgtagagataagagat

SEQ ID NO: 316881 - DNA, 20 bp, Artificial Sequence
  Description of Artificial Sequence: Synthetic oligonucleotide
  Target: LAMA2; (+) strand; PAM type: YTN; PAM sequence: TTT
atgcgtagagataagagatg

SEQ ID NO: 316882 - DNA, 20 bp, Artificial Sequence
  Description of Artificial Sequence: Synthetic oligonucleotide
  Target: LAMA2; (+) strand; PAM type: YTN; PAM sequence: TTA
tgcgtagagataagagatga

SEQ ID NO: 316883 - DNA, 20 bp, Artificial Sequence
  Description of Artificial Sequence: Synthetic oligonucleotide
  Target: LAMA2; (+) strand; PAM type: YTN; PAM sequence: CTT
tcgcagaaacaaatgaataa

SEQ ID NO: 316884 - DNA, 20 bp, Artificial Sequence
  Description of Artificial Sequence: Synthetic oligonucleotide
  Target: LAMA2; (+) strand; PAM type: YTN; PAM sequence: TTT
cgcagaaacaaatgaataat

SEQ ID NO: 316885 - DNA, 20 bp, Artificial Sequence
  Description of Artificial Sequence: Synthetic oligonucleotide
  Target: LAMA2; (+) strand; PAM type: YTN; PAM sequence: TTC
gcagaaacaaatgaataatt

SEQ ID NO: 316886 - DNA, 20 bp, Artificial Sequence
  Description of Artificial Sequence: Synthetic oligonucleotide
  Target: LAMA2; (+) strand; PAM type: YTN; PAM sequence: TTA
tataccaacatggagaactt

SEQ ID NO: 316887 - DNA, 20 bp, Artificial Sequence
  Description of Artificial Sequence: Synthetic oligonucleotide
  Target: LAMA2; (+) strand; PAM type: YTN; PAM sequence: CTT
aagctcataggtgaatgtgg

SEQ ID NO: 316888 - DNA, 20 bp, Artificial Sequence
  Description of Artificial Sequence: Synthetic oligonucleotide
  Target: LAMA2; (+) strand; PAM type: YTN; PAM sequence: TTA
agctcataggtgaatgtggg

SEQ ID NO: 316889 - DNA, 20 bp, Artificial Sequence
  Description of Artificial Sequence: Synthetic oligonucleotide
  Target: LAMA2; (+) strand; PAM type: YTN; PAM sequence: CTC
ataggtgaatgtgggaatat

SEQ ID NO: 316890 - DNA, 20 bp, Artificial Sequence
  Description of Artificial Sequence: Synthetic oligonucleotide
  Target: LAMA2; (+) strand; PAM type: YTN; PAM sequence: TTG
ccaggtgagtgatcaaagag

SEQ ID NO: 316891 - DNA, 20 bp, Artificial Sequence
  Description of Artificial Sequence: Synthetic oligonucleotide
  Target: LAMA2; (+) strand; PAM type: YTN; PAM sequence: TTC
tagaaaaggtggtacctgta

SEQ ID NO: 316892 - DNA, 20 bp, Artificial Sequence
  Description of Artificial Sequence: Synthetic oligonucleotide
  Target: LAMA2; (+) strand; PAM type: YTN; PAM sequence: CTA
gaaaaggtggtacctgtaca

SEQ ID NO: 316893 - DNA, 20 bp, Artificial Sequence
  Description of Artificial Sequence: Synthetic oligonucleotide
  Target: LAMA2; (+) strand; PAM type: YTN; PAM sequence: CTG
tacaggggtttggaggatgc

SEQ ID NO: 316894 - DNA, 20 bp, Artificial Sequence
  Description of Artificial Sequence: Synthetic oligonucleotide
  Target: LAMA2; (+) strand; PAM type: YTN; PAM sequence: TTT
ggaggatgcattggtattaa

SEQ ID NO: 316895 - DNA, 20 bp, Artificial Sequence
  Description of Artificial Sequence: Synthetic oligonucleotide
  Target: LAMA2; (+) strand; PAM type: YTN; PAM sequence: TTG
gaggatgcattggtattaaa

SEQ ID NO: 316896 - DNA, 20 bp, Artificial Sequence
  Description of Artificial Sequence: Synthetic oligonucleotide
  Target: LAMA2; (+) strand; PAM type: YTN; PAM sequence: TTG
gtattaaataagagagaaat

SEQ ID NO: 316897 - DNA, 20 bp, Artificial Sequence
  Description of Artificial Sequence: Synthetic oligonucleotide
  Target: LAMA2; (+) strand; PAM type: YTN; PAM sequence: TTA
aataagagagaaattagagg

SEQ ID NO: 316898 - DNA, 20 bp, Artificial Sequence
  Description of Artificial Sequence: Synthetic oligonucleotide
  Target: LAMA2; (+) strand; PAM type: YTN; PAM sequence: TTA
gagggaagacacatcttcca

SEQ ID NO: 316899 - DNA, 20 bp, Artificial Sequence
  Description of Artificial Sequence: Synthetic oligonucleotide
  Target: LAMA2; (+) strand; PAM type: YTN; PAM sequence: CTT
ccaggcagagtgtctagaag

SEQ ID NO: 316900 - DNA, 20 bp, Artificial Sequence
  Description of Artificial Sequence: Synthetic oligonucleotide
  Target: LAMA2; (+) strand; PAM type: YTN; PAM sequence: TTC
caggcagagtgtctagaagc

SEQ ID NO: 316901 - DNA, 20 bp, Artificial Sequence
  Description of Artificial Sequence: Synthetic oligonucleotide
  Target: LAMA2; (+) strand; PAM type: YTN; PAM sequence: CTA
gaagcagagccagcagcaga

SEQ ID NO: 316902 - DNA, 20 bp, Artificial Sequence
  Description of Artificial Sequence: Synthetic oligonucleotide
  Target: LAMA2; (+) strand; PAM type: YTN; PAM sequence: TTT
tagtgtaagcaatttattga

SEQ ID NO: 316903 - DNA, 20 bp, Artificial Sequence
  Description of Artificial Sequence: Synthetic oligonucleotide
  Target: LAMA2; (+) strand; PAM type: YTN; PAM sequence: TTT
agtgtaagcaatttattgaa

SEQ ID NO: 316904 - DNA, 20 bp, Artificial Sequence
  Description of Artificial Sequence: Synthetic oligonucleotide
  Target: LAMA2; (+) strand; PAM type: YTN; PAM sequence: TTA
gtgtaagcaatttattgaaa

SEQ ID NO: 316905 - DNA, 20 bp, Artificial Sequence
  Description of Artificial Sequence: Synthetic oligonucleotide
  Target: LAMA2; (+) strand; PAM type: YTN; PAM sequence: TTT
attgaaaaagtcctctcaga

SEQ ID NO: 316906 - DNA, 20 bp, Artificial Sequence
  Description of Artificial Sequence: Synthetic oligonucleotide
  Target: LAMA2; (+) strand; PAM type: YTN; PAM sequence: TTA
ttgaaaaagtcctctcagaa

SEQ ID NO: 316907 - DNA, 20 bp, Artificial Sequence
  Description of Artificial Sequence: Synthetic oligonucleotide
  Target: LAMA2; (+) strand; PAM type: YTN; PAM sequence: TTG
aaaaagtcctctcagaagat

SEQ ID NO: 316908 - DNA, 20 bp, Artificial Sequence
  Description of Artificial Sequence: Synthetic oligonucleotide
  Target: LAMA2; (+) strand; PAM type: YTN; PAM sequence: CTC
tcagaagatatctatgagat

SEQ ID NO: 316909 - DNA, 20 bp, Artificial Sequence
  Description of Artificial Sequence: Synthetic oligonucleotide
  Target: LAMA2; (+) strand; PAM type: YTN; PAM sequence: CTC
agaagatatctatgagatgg

SEQ ID NO: 316910 - DNA, 20 bp, Artificial Sequence
  Description of Artificial Sequence: Synthetic oligonucleotide
  Target: LAMA2; (+) strand; PAM type: YTN; PAM sequence: CTA
tgagatggtaagaaaagctg

SEQ ID NO: 316911 - DNA, 20 bp, Artificial Sequence
  Description of Artificial Sequence: Synthetic oligonucleotide
  Target: LAMA2; (+) strand; PAM type: YTN; PAM sequence: CTG
aaaaaggtaggggagaaagt

SEQ ID NO: 316912 - DNA, 20 bp, Artificial Sequence
  Description of Artificial Sequence: Synthetic oligonucleotide
  Target: LAMA2; (+) strand; PAM type: YTN; PAM sequence: CTC
taaagttgagcctcagactg

SEQ ID NO: 316913 - DNA, 20 bp, Artificial Sequence
  Description of Artificial Sequence: Synthetic oligonucleotide
  Target: LAMA2; (+) strand; PAM type: YTN; PAM sequence: CTA
aagttgagcctcagactgat

SEQ ID NO: 316914 - DNA, 20 bp, Artificial Sequence
  Description of Artificial Sequence: Synthetic oligonucleotide
  Target: LAMA2; (+) strand; PAM type: YTN; PAM sequence: TTG
agcctcagactgatacatgg

SEQ ID NO: 316915 - DNA, 20 bp, Artificial Sequence
  Description of Artificial Sequence: Synthetic oligonucleotide
  Target: LAMA2; (+) strand; PAM type: YTN; PAM sequence: CTC
agactgatacatggcatggt

SEQ ID NO: 316916 - DNA, 20 bp, Artificial Sequence
  Description of Artificial Sequence: Synthetic oligonucleotide
  Target: LAMA2; (+) strand; PAM type: YTN; PAM sequence: CTG
atacatggcatggtctggag

SEQ ID NO: 316917 - DNA, 20 bp, Artificial Sequence
  Description of Artificial Sequence: Synthetic oligonucleotide
  Target: LAMA2; (+) strand; PAM type: YTN; PAM sequence: CTG
gagggaaaattgcaccacag

SEQ ID NO: 316918 - DNA, 20 bp, Artificial Sequence
  Description of Artificial Sequence: Synthetic oligonucleotide
  Target: LAMA2; (+) strand; PAM type: YTN; PAM sequence: TTG
caccacagaaagaggtaccc

SEQ ID NO: 316919 - DNA, 20 bp, Artificial Sequence
  Description of Artificial Sequence: Synthetic oligonucleotide
  Target: LAMA2; (+) strand; PAM type: YTN; PAM sequence: CTT
aaggaacaggatgccaggat

SEQ ID NO: 316920 - DNA, 20 bp, Artificial Sequence
  Description of Artificial Sequence: Synthetic oligonucleotide
  Target: LAMA2; (+) strand; PAM type: YTN; PAM sequence: TTA
aggaacaggatgccaggatt

SEQ ID NO: 316921 - DNA, 20 bp, Artificial Sequence
  Description of Artificial Sequence: Synthetic oligonucleotide
  Target: LAMA2; (+) strand; PAM type: YTN; PAM sequence: TTT
tacccctcatatctgtcagt

SEQ ID NO: 316922 - DNA, 20 bp, Artificial Sequence
  Description of Artificial Sequence: Synthetic oligonucleotide
  Target: LAMA2; (+) strand; PAM type: YTN; PAM sequence: TTT
acccctcatatctgtcagtt

SEQ ID NO: 316923 - DNA, 20 bp, Artificial Sequence
  Description of Artificial Sequence: Synthetic oligonucleotide
  Target: LAMA2; (+) strand; PAM type: YTN; PAM sequence: TTA
cccctcatatctgtcagtta

SEQ ID NO: 316924 - DNA, 20 bp, Artificial Sequence
  Description of Artificial Sequence: Synthetic oligonucleotide
  Target: LAMA2; (+) strand; PAM type: YTN; PAM sequence: CTC
atatctgtcagttatcggct

SEQ ID NO: 316925 - DNA, 20 bp, Artificial Sequence
  Description of Artificial Sequence: Synthetic oligonucleotide
  Target: LAMA2; (+) strand; PAM type: YTN; PAM sequence: CTG
tcagttatcggctacaagtc

SEQ ID NO: 316926 - DNA, 20 bp, Artificial Sequence
  Description of Artificial Sequence: Synthetic oligonucleotide
  Target: LAMA2; (+) strand; PAM type: YTN; PAM sequence: TTA
tcggctacaagtccaagggg

SEQ ID NO: 316927 - DNA, 20 bp, Artificial Sequence
  Description of Artificial Sequence: Synthetic oligonucleotide
  Target: LAMA2; (+) strand; PAM type: YTN; PAM sequence: CTA
caagtccaaggggcaggggg

SEQ ID NO: 316928 - DNA, 20 bp, Artificial Sequence
  Description of Artificial Sequence: Synthetic oligonucleotide
  Target: LAMA2; (+) strand; PAM type: YTN; PAM sequence: CTT
gctggaagtctcagggtcag

SEQ ID NO: 316929 - DNA, 20 bp, Artificial Sequence
  Description of Artificial Sequence: Synthetic oligonucleotide
  Target: LAMA2; (+) strand; PAM type: YTN; PAM sequence: TTG
ctggaagtctcagggtcagg

SEQ ID NO: 316930 - DNA, 20 bp, Artificial Sequence
  Description of Artificial Sequence: Synthetic oligonucleotide
  Target: LAMA2; (+) strand; PAM type: YTN; PAM sequence: CTG
gaagtctcagggtcaggagg

SEQ ID NO: 316931 - DNA, 20 bp, Artificial Sequence
  Description of Artificial Sequence: Synthetic oligonucleotide
  Target: LAMA2; (+) strand; PAM type: YTN; PAM sequence: CTC
agggtcaggaggctctcatt

SEQ ID NO: 316932 - DNA, 20 bp, Artificial Sequence
  Description of Artificial Sequence: Synthetic oligonucleotide
  Target: LAMA2; (+) strand; PAM type: YTN; PAM sequence: CTC
tcattcaaagaggcaggtct

SEQ ID NO: 316933 - DNA, 20 bp, Artificial Sequence
  Description of Artificial Sequence: Synthetic oligonucleotide
  Target: LAMA2; (+) strand; PAM type: YTN; PAM sequence: CTC
attcaaagaggcaggtctct

SEQ ID NO: 316934 - DNA, 20 bp, Artificial Sequence
  Description of Artificial Sequence: Synthetic oligonucleotide
  Target: LAMA2; (+) strand; PAM type: YTN; PAM sequence: TTC
aaagaggcaggtctctggaa

SEQ ID NO: 316935 - DNA, 20 bp, Artificial Sequence
  Description of Artificial Sequence: Synthetic oligonucleotide
  Target: LAMA2; (+) strand; PAM type: YTN; PAM sequence: CTC
tggaatgatgcagctgcaag

SEQ ID NO: 316936 - DNA, 20 bp, Artificial Sequence
  Description of Artificial Sequence: Synthetic oligonucleotide
  Target: LAMA2; (+) strand; PAM type: YTN; PAM sequence: CTG
gaatgatgcagctgcaagcc

SEQ ID NO: 316937 - DNA, 20 bp, Artificial Sequence
  Description of Artificial Sequence: Synthetic oligonucleotide
  Target: LAMA2; (+) strand; PAM type: YTN; PAM sequence: CTG
caagccattagcagccaacc

SEQ ID NO: 316938 - DNA, 20 bp, Artificial Sequence
  Description of Artificial Sequence: Synthetic oligonucleotide
  Target: LAMA2; (+) strand; PAM type: YTN; PAM sequence: TTA
gcagccaacccttgcctcag

SEQ ID NO: 316939 - DNA, 20 bp, Artificial Sequence
  Description of Artificial Sequence: Synthetic oligonucleotide
  Target: LAMA2; (+) strand; PAM type: YTN; PAM sequence: CTT
gcctcagctgagagatgggt

SEQ ID NO: 316940 - DNA, 20 bp, Artificial Sequence
  Description of Artificial Sequence: Synthetic oligonucleotide
  Target: LAMA2; (+) strand; PAM type: YTN; PAM sequence: TTG
cctcagctgagagatgggta

SEQ ID NO: 316941 - DNA, 20 bp, Artificial Sequence
  Description of Artificial Sequence: Synthetic oligonucleotide
  Target: LAMA2; (+) strand; PAM type: YTN; PAM sequence: CTC
agctgagagatgggtaccag

SEQ ID NO: 316942 - DNA, 20 bp, Artificial Sequence
  Description of Artificial Sequence: Synthetic oligonucleotide
  Target: LAMA2; (+) strand; PAM type: YTN; PAM sequence: CTG
agagatgggtaccaggatga

SEQ ID NO: 316943 - DNA, 20 bp, Artificial Sequence
  Description of Artificial Sequence: Synthetic oligonucleotide
  Target: LAMA2; (+) strand; PAM type: YTN; PAM sequence: CTG
gtaaagggttatggctgtgc

SEQ ID NO: 316944 - DNA, 20 bp, Artificial Sequence
  Description of Artificial Sequence: Synthetic oligonucleotide
  Target: LAMA2; (+) strand; PAM type: YTN; PAM sequence: TTA
tggctgtgccaccagtggaa

SEQ ID NO: 316945 - DNA, 20 bp, Artificial Sequence
  Description of Artificial Sequence: Synthetic oligonucleotide
  Target: LAMA2; (+) strand; PAM type: YTN; PAM sequence: CTG
tgccaccagtggaatttcct

SEQ ID NO: 316946 - DNA, 20 bp, Artificial Sequence
  Description of Artificial Sequence: Synthetic oligonucleotide
  Target: LAMA2; (+) strand; PAM type: YTN; PAM sequence: TTT
cctacactgggaatatacat

SEQ ID NO: 316947 - DNA, 20 bp, Artificial Sequence
  Description of Artificial Sequence: Synthetic oligonucleotide
  Target: LAMA2; (+) strand; PAM type: YTN; PAM sequence: TTC
ctacactgggaatatacatg

SEQ ID NO: 316948 - DNA, 20 bp, Artificial Sequence
  Description of Artificial Sequence: Synthetic oligonucleotide
  Target: LAMA2; (+) strand; PAM type: YTN; PAM sequence: CTA
cactgggaatatacatgcta

SEQ ID NO: 316949 - DNA, 20 bp, Artificial Sequence
  Description of Artificial Sequence: Synthetic oligonucleotide
  Target: LAMA2; (+) strand; PAM type: YTN; PAM sequence: CTG
ggaatatacatgctaggtgc

SEQ ID NO: 316950 - DNA, 20 bp, Artificial Sequence
  Description of Artificial Sequence: Synthetic oligonucleotide
  Target: LAMA2; (+) strand; PAM type: YTN; PAM sequence: CTA
ggtgcatagaatgttaggtg

SEQ ID NO: 316951 - DNA, 20 bp, Artificial Sequence
  Description of Artificial Sequence: Synthetic oligonucleotide
  Target: LAMA2; (+) strand; PAM type: YTN; PAM sequence: TTA
ggtgtgagaggggagaccag

SEQ ID NO: 316952 - DNA, 20 bp, Artificial Sequence
  Description of Artificial Sequence: Synthetic oligonucleotide
  Target: LAMA2; (+) strand; PAM type: YTN; PAM sequence: CTG
ttggaaagtattcattaatg

SEQ ID NO: 316953 - DNA, 20 bp, Artificial Sequence
  Description of Artificial Sequence: Synthetic oligonucleotide
  Target: LAMA2; (+) strand; PAM type: YTN; PAM sequence: TTG
gaaagtattcattaatgcat

SEQ ID NO: 316954 - DNA, 20 bp, Artificial Sequence
  Description of Artificial Sequence: Synthetic oligonucleotide
  Target: LAMA2; (+) strand; PAM type: YTN; PAM sequence: TTC
attaatgcatatttgtcaag

SEQ ID NO: 316955 - DNA, 20 bp, Artificial Sequence
  Description of Artificial Sequence: Synthetic oligonucleotide
  Target: LAMA2; (+) strand; PAM type: YTN; PAM sequence: TTA
atgcatatttgtcaagaatt

SEQ ID NO: 316956 - DNA, 20 bp, Artificial Sequence
  Description of Artificial Sequence: Synthetic oligonucleotide
  Target: LAMA2; (+) strand; PAM type: YTN; PAM sequence: TTT
gtcaagaattctagctggta

SEQ ID NO: 316957 - DNA, 20 bp, Artificial Sequence
  Description of Artificial Sequence: Synthetic oligonucleotide
  Target: LAMA2; (+) strand; PAM type: YTN; PAM sequence: TTG
tcaagaattctagctggtaa

SEQ ID NO: 316958 - DNA, 20 bp, Artificial Sequence
  Description of Artificial Sequence: Synthetic oligonucleotide
  Target: LAMA2; (+) strand; PAM type: YTN; PAM sequence: TTC
tagctggtaacactttatta

SEQ ID NO: 316959 - DNA, 20 bp, Artificial Sequence
  Description of Artificial Sequence: Synthetic oligonucleotide
  Target: LAMA2; (+) strand; PAM type: YTN; PAM sequence: CTA
gctggtaacactttattaaa

SEQ ID NO: 316960 - DNA, 20 bp, Artificial Sequence
  Description of Artificial Sequence: Synthetic oligonucleotide
  Target: LAMA2; (+) strand; PAM type: YTN; PAM sequence: CTG
gtaacactttattaaacatt

SEQ ID NO: 316961 - DNA, 20 bp, Artificial Sequence
  Description of Artificial Sequence: Synthetic oligonucleotide
  Target: LAMA2; (+) strand; PAM type: YTN; PAM sequence: CTT
tattaaacattagatattgc

SEQ ID NO: 316962 - DNA, 20 bp, Artificial Sequence
  Description of Artificial Sequence: Synthetic oligonucleotide
  Target: LAMA2; (+) strand; PAM type: YTN; PAM sequence: TTT
attaaacattagatattgct

SEQ ID NO: 316963 - DNA, 20 bp, Artificial Sequence
  Description of Artificial Sequence: Synthetic oligonucleotide
  Target: LAMA2; (+) strand; PAM type: YTN; PAM sequence: TTA
ttaaacattagatattgcta

SEQ ID NO: 316964 - DNA, 20 bp, Artificial Sequence
  Description of Artificial Sequence: Synthetic oligonucleotide
  Target: LAMA2; (+) strand; PAM type: YTN; PAM sequence: TTA
aacattagatattgctattt

SEQ ID NO: 316965 - DNA, 20 bp, Artificial Sequence
  Description of Artificial Sequence: Synthetic oligonucleotide
  Target: LAMA2; (+) strand; PAM type: YTN; PAM sequence: TTA
gatattgctattttatgtgc

SEQ ID NO: 316966 - DNA, 20 bp, Artificial Sequence
  Description of Artificial Sequence: Synthetic oligonucleotide
  Target: LAMA2; (+) strand; PAM type: YTN; PAM sequence: TTG
ctattttatgtgctttgaag

SEQ ID NO: 316967 - DNA, 20 bp, Artificial Sequence
  Description of Artificial Sequence: Synthetic oligonucleotide
  Target: LAMA2; (+) strand; PAM type: YTN; PAM sequence: CTA
ttttatgtgctttgaagcaa

SEQ ID NO: 316968 - DNA, 20 bp, Artificial Sequence
  Description of Artificial Sequence: Synthetic oligonucleotide
  Target: LAMA2; (+) strand; PAM type: YTN; PAM sequence: TTT
tatgtgctttgaagcaatta

SEQ ID NO: 316969 - DNA, 20 bp, Artificial Sequence
  Description of Artificial Sequence: Synthetic oligonucleotide
  Target: LAMA2; (+) strand; PAM type: YTN; PAM sequence: TTT
atgtgctttgaagcaattac

SEQ ID NO: 316970 - DNA, 20 bp, Artificial Sequence
  Description of Artificial Sequence: Synthetic oligonucleotide
  Target: LAMA2; (+) strand; PAM type: YTN; PAM sequence: TTA
tgtgctttgaagcaattaca

SEQ ID NO: 316971 - DNA, 20 bp, Artificial Sequence
  Description of Artificial Sequence: Synthetic oligonucleotide
  Target: LAMA2; (+) strand; PAM type: YTN; PAM sequence: CTT
tgaagcaattacactgtttg

SEQ ID NO: 316972 - DNA, 20 bp, Artificial Sequence
  Description of Artificial Sequence: Synthetic oligonucleotide
  Target: LAMA2; (+) strand; PAM type: YTN; PAM sequence: TTT
gaagcaattacactgtttga

SEQ ID NO: 316973 - DNA, 20 bp, Artificial Sequence
  Description of Artificial Sequence: Synthetic oligonucleotide
  Target: LAMA2; (+) strand; PAM type: YTN; PAM sequence: TTG
aagcaattacactgtttgaa

SEQ ID NO: 316974 - DNA, 20 bp, Artificial Sequence
  Description of Artificial Sequence: Synthetic oligonucleotide
  Target: LAMA2; (+) strand; PAM type: YTN; PAM sequence: TTA
cactgtttgaaaaaccttat

SEQ ID NO: 316975 - DNA, 20 bp, Artificial Sequence
  Description of Artificial Sequence: Synthetic oligonucleotide
  Target: LAMA2; (+) strand; PAM type: YTN; PAM sequence: CTG
tttgaaaaaccttattttgt

SEQ ID NO: 316976 - DNA, 20 bp, Artificial Sequence
  Description of Artificial Sequence: Synthetic oligonucleotide
  Target: LAMA2; (+) strand; PAM type: YTN; PAM sequence: TTT
gaaaaaccttattttgtaaa

SEQ ID NO: 316977 - DNA, 20 bp, Artificial Sequence
  Description of Artificial Sequence: Synthetic oligonucleotide
  Target: LAMA2; (+) strand; PAM type: YTN; PAM sequence: TTG
aaaaaccttattttgtaaaa

SEQ ID NO: 316978 - DNA, 20 bp, Artificial Sequence
  Description of Artificial Sequence: Synthetic oligonucleotide
  Target: LAMA2; (+) strand; PAM type: YTN; PAM sequence: CTT
attttgtaaaaaaaaatctg

SEQ ID NO: 316979 - DNA, 20 bp, Artificial Sequence
  Description of Artificial Sequence: Synthetic oligonucleotide
  Target: LAMA2; (+) strand; PAM type: YTN; PAM sequence: TTA
ttttgtaaaaaaaaatctgt

SEQ ID NO: 316980 - DNA, 20 bp, Artificial Sequence
  Description of Artificial Sequence: Synthetic oligonucleotide
  Target: LAMA2; (+) strand; PAM type: YTN; PAM sequence: TTT
tgtaaaaaaaaatctgttct

SEQ ID NO: 316981 - DNA, 20 bp, Artificial Sequence
  Description of Artificial Sequence: Synthetic oligonucleotide
  Target: LAMA2; (+) strand; PAM type: YTN; PAM sequence: TTT
gtaaaaaaaaatctgttcta

SEQ ID NO: 316982 - DNA, 20 bp, Artificial Sequence
  Description of Artificial Sequence: Synthetic oligonucleotide
  Target: LAMA2; (+) strand; PAM type: YTN; PAM sequence: TTG
taaaaaaaaatctgttctat

SEQ ID NO: 316983 - DNA, 20 bp, Artificial Sequence
  Description of Artificial Sequence: Synthetic oligonucleotide
  Target: LAMA2; (+) strand; PAM type: YTN; PAM sequence: CTG
ttctattcactgtctcacag

SEQ ID NO: 316984 - DNA, 20 bp, Artificial Sequence
  Description of Artificial Sequence: Synthetic oligonucleotide
  Target: LAMA2; (+) strand; PAM type: YTN; PAM sequence: TTC
tattcactgtctcacagatt

SEQ ID NO: 316985 - DNA, 20 bp, Artificial Sequence
  Description of Artificial Sequence: Synthetic oligonucleotide
  Target: LAMA2; (+) strand; PAM type: YTN; PAM sequence: CTA
ttcactgtctcacagattta

SEQ ID NO: 316986 - DNA, 20 bp, Artificial Sequence
  Description of Artificial Sequence: Synthetic oligonucleotide
  Target: LAMA2; (+) strand; PAM type: YTN; PAM sequence: TTC
actgtctcacagatttagga

SEQ ID NO: 316987 - DNA, 20 bp, Artificial Sequence
  Description of Artificial Sequence: Synthetic oligonucleotide
  Target: LAMA2; (+) strand; PAM type: YTN; PAM sequence: CTG
tctcacagatttaggacagt

SEQ ID NO: 316988 - DNA, 20 bp, Artificial Sequence
  Description of Artificial Sequence: Synthetic oligonucleotide
  Target: LAMA2; (+) strand; PAM type: YTN; PAM sequence: CTC
acagatttaggacagtttat

SEQ ID NO: 316989 - DNA, 20 bp, Artificial Sequence
  Description of Artificial Sequence: Synthetic oligonucleotide
  Target: LAMA2; (+) strand; PAM type: YTN; PAM sequence: TTT
aggacagtttattaattaag

SEQ ID NO: 316990 - DNA, 20 bp, Artificial Sequence
  Description of Artificial Sequence: Synthetic oligonucleotide
  Target: LAMA2; (+) strand; PAM type: YTN; PAM sequence: TTA
ggacagtttattaattaaga

SEQ ID NO: 316991 - DNA, 20 bp, Artificial Sequence
  Description of Artificial Sequence: Synthetic oligonucleotide
  Target: LAMA2; (+) strand; PAM type: YTN; PAM sequence: TTT
attaattaagaacactagat

SEQ ID NO: 316992 - DNA, 20 bp, Artificial Sequence
  Description of Artificial Sequence: Synthetic oligonucleotide
  Target: LAMA2; (+) strand; PAM type: YTN; PAM sequence: TTA
ttaattaagaacactagatt

SEQ ID NO: 316993 - DNA, 20 bp, Artificial Sequence
  Description of Artificial Sequence: Synthetic oligonucleotide
  Target: LAMA2; (+) strand; PAM type: YTN; PAM sequence: TTA
attaagaacactagatttca

SEQ ID NO: 316994 - DNA, 20 bp, Artificial Sequence
  Description of Artificial Sequence: Synthetic oligonucleotide
  Target: LAMA2; (+) strand; PAM type: YTN; PAM sequence: TTA
agaacactagatttcaagtc

SEQ ID NO: 316995 - DNA, 20 bp, Artificial Sequence
  Description of Artificial Sequence: Synthetic oligonucleotide
  Target: LAMA2; (+) strand; PAM type: YTN; PAM sequence: CTA
gatttcaagtcaaacagacc

SEQ ID NO: 316996 - DNA, 20 bp, Artificial Sequence
  Description of Artificial Sequence: Synthetic oligonucleotide
  Target: LAMA2; (+) strand; PAM type: YTN; PAM sequence: TTT
caagtcaaacagacctgacc

SEQ ID NO: 316997 - DNA, 20 bp, Artificial Sequence
  Description of Artificial Sequence: Synthetic oligonucleotide
  Target: LAMA2; (+) strand; PAM type: YTN; PAM sequence: TTC
aagtcaaacagacctgacct

SEQ ID NO: 316998 - DNA, 20 bp, Artificial Sequence
  Description of Artificial Sequence: Synthetic oligonucleotide
  Target: LAMA2; (+) strand; PAM type: YTN; PAM sequence: CTG
accttaaaccttgaccttgt

SEQ ID NO: 316999 - DNA, 20 bp, Artificial Sequence
  Description of Artificial Sequence: Synthetic oligonucleotide
  Target: LAMA2; (+) strand; PAM type: YTN; PAM sequence: CTT
aaaccttgaccttgttcttt

SEQ ID NO: 317000 - DNA, 20 bp, Artificial Sequence
  Description of Artificial Sequence: Synthetic oligonucleotide
  Target: LAMA2; (+) strand; PAM type: YTN; PAM sequence: TTA
aaccttgaccttgttctttg

SEQ ID NO: 317001 - DNA, 20 bp, Artificial Sequence
  Description of Artificial Sequence: Synthetic oligonucleotide
  Target: LAMA2; (+) strand; PAM type: YTN; PAM sequence: CTT
gaccttgttctttgctgtat

SEQ ID NO: 317002 - DNA, 20 bp, Artificial Sequence
  Description of Artificial Sequence: Synthetic oligonucleotide
  Target: LAMA2; (+) strand; PAM type: YTN; PAM sequence: TTG
accttgttctttgctgtata

SEQ ID NO: 317003 - DNA, 20 bp, Artificial Sequence
  Description of Artificial Sequence: Synthetic oligonucleotide
  Target: LAMA2; (+) strand; PAM type: YTN; PAM sequence: CTT
gttctttgctgtataaatgg

SEQ ID NO: 317004 - DNA, 20 bp, Artificial Sequence
  Description of Artificial Sequence: Synthetic oligonucleotide
  Target: LAMA2; (+) strand; PAM type: YTN; PAM sequence: TTG
ttctttgctgtataaatggt

SEQ ID NO: 317005 - DNA, 20 bp, Artificial Sequence
  Description of Artificial Sequence: Synthetic oligonucleotide
  Target: LAMA2; (+) strand; PAM type: YTN; PAM sequence: TTC
tttgctgtataaatggtttt

SEQ ID NO: 317006 - DNA, 20 bp, Artificial Sequence
  Description of Artificial Sequence: Synthetic oligonucleotide
  Target: LAMA2; (+) strand; PAM type: YTN; PAM sequence: CTT
tgctgtataaatggttttgt

SEQ ID NO: 317007 - DNA, 20 bp, Artificial Sequence
  Description of Artificial Sequence: Synthetic oligonucleotide
  Target: LAMA2; (+) strand; PAM type: YTN; PAM sequence: TTT
gctgtataaatggttttgta

SEQ ID NO: 317008 - DNA, 20 bp, Artificial Sequence
  Description of Artificial Sequence: Synthetic oligonucleotide
  Target: LAMA2; (+) strand; PAM type: YTN; PAM sequence: TTG
ctgtataaatggttttgtat

SEQ ID NO: 317009 - DNA, 20 bp, Artificial Sequence
  Description of Artificial Sequence: Synthetic oligonucleotide
  Target: LAMA2; (+) strand; PAM type: YTN; PAM sequence: CTG
tataaatggttttgtatgag

SEQ ID NO: 317010 - DNA, 20 bp, Artificial Sequence
  Description of Artificial Sequence: Synthetic oligonucleotide
  Target: LAMA2; (+) strand; PAM type: YTN; PAM sequence: TTT
tgtatgagttacttaaccac

SEQ ID NO: 317011 - DNA, 20 bp, Artificial Sequence
  Description of Artificial Sequence: Synthetic oligonucleotide
  Target: LAMA2; (+) strand; PAM type: YTN; PAM sequence: TTT
gtatgagttacttaaccaca

SEQ ID NO: 317012 - DNA, 20 bp, Artificial Sequence
  Description of Artificial Sequence: Synthetic oligonucleotide
  Target: LAMA2; (+) strand; PAM type: YTN; PAM sequence: TTG
tatgagttacttaaccacac

SEQ ID NO: 317013 - DNA, 20 bp, Artificial Sequence
  Description of Artificial Sequence: Synthetic oligonucleotide
  Target: LAMA2; (+) strand; PAM type: YTN; PAM sequence: TTA
cttaaccacactgagcctca

SEQ ID NO: 317014 - DNA, 20 bp, Artificial Sequence
  Description of Artificial Sequence: Synthetic oligonucleotide
  Target: LAMA2; (+) strand; PAM type: YTN; PAM sequence: CTT
aaccacactgagcctcaaat

SEQ ID NO: 317015 - DNA, 20 bp, Artificial Sequence
  Description of Artificial Sequence: Synthetic oligonucleotide
  Target: LAMA2; (+) strand; PAM type: YTN; PAM sequence: TTA
accacactgagcctcaaatt

SEQ ID NO: 317016 - DNA, 20 bp, Artificial Sequence
  Description of Artificial Sequence: Synthetic oligonucleotide
  Target: LAMA2; (+) strand; PAM type: YTN; PAM sequence: CTG
agcctcaaattcccatcagt

SEQ ID NO: 317017 - DNA, 20 bp, Artificial Sequence
  Description of Artificial Sequence: Synthetic oligonucleotide
  Target: LAMA2; (+) strand; PAM type: YTN; PAM sequence: CTC
aaattcccatcagttatatg

SEQ ID NO: 317018 - DNA, 20 bp, Artificial Sequence
  Description of Artificial Sequence: Synthetic oligonucleotide
  Target: LAMA2; (+) strand; PAM type: YTN; PAM sequence: TTC
ccatcagttatatgtggatt

SEQ ID NO: 317019 - DNA, 20 bp, Artificial Sequence
  Description of Artificial Sequence: Synthetic oligonucleotide
  Target: LAMA2; (+) strand; PAM type: YTN; PAM sequence: TTA
tatgtggattataatgtctg

SEQ ID NO: 317020 - DNA, 20 bp, Artificial Sequence
  Description of Artificial Sequence: Synthetic oligonucleotide
  Target: LAMA2; (+) strand; PAM type: YTN; PAM sequence: TTA
taatgtctgcctcatgcttg

SEQ ID NO: 317021 - DNA, 20 bp, Artificial Sequence
  Description of Artificial Sequence: Synthetic oligonucleotide
  Target: LAMA2; (+) strand; PAM type: YTN; PAM sequence: CTG
cctcatgcttgttgtgaaca

SEQ ID NO: 317022 - DNA, 20 bp, Artificial Sequence
  Description of Artificial Sequence: Synthetic oligonucleotide
  Target: LAMA2; (+) strand; PAM type: YTN; PAM sequence: CTC
atgcttgttgtgaacattca

SEQ ID NO: 317023 - DNA, 20 bp, Artificial Sequence
  Description of Artificial Sequence: Synthetic oligonucleotide
  Target: LAMA2; (+) strand; PAM type: YTN; PAM sequence: CTT
gttgtgaacattcaatgtaa

SEQ ID NO: 317024 - DNA, 20 bp, Artificial Sequence
  Description of Artificial Sequence: Synthetic oligonucleotide
  Target: LAMA2; (+) strand; PAM type: YTN; PAM sequence: TTG
ttgtgaacattcaatgtaat

SEQ ID NO: 317025 - DNA, 20 bp, Artificial Sequence
  Description of Artificial Sequence: Synthetic oligonucleotide
  Target: LAMA2; (+) strand; PAM type: YTN; PAM sequence: TTG
tgaacattcaatgtaatcat

SEQ ID NO: 317026 - DNA, 20 bp, Artificial Sequence
  Description of Artificial Sequence: Synthetic oligonucleotide
  Target: LAMA2; (+) strand; PAM type: YTN; PAM sequence: TTC
aatgtaatcattcatatgaa

SEQ ID NO: 317027 - DNA, 20 bp, Artificial Sequence
  Description of Artificial Sequence: Synthetic oligonucleotide
  Target: LAMA2; (+) strand; PAM type: YTN; PAM sequence: TTC
atatgaagaagcaatgaaca

SEQ ID NO: 317028 - DNA, 20 bp, Artificial Sequence
  Description of Artificial Sequence: Synthetic oligonucleotide
  Target: LAMA2; (+) strand; PAM type: YTN; PAM sequence: CTG
gtgcacataaatgttcaaca

SEQ ID NO: 317029 - DNA, 20 bp, Artificial Sequence
  Description of Artificial Sequence: Synthetic oligonucleotide
  Target: LAMA2; (+) strand; PAM type: YTN; PAM sequence: TTC
aacaaatgatagacattact

SEQ ID NO: 317030 - DNA, 20 bp, Artificial Sequence
  Description of Artificial Sequence: Synthetic oligonucleotide
  Target: LAMA2; (+) strand; PAM type: YTN; PAM sequence: TTA
cttccttctggatgagcaaa

SEQ ID NO: 317031 - DNA, 20 bp, Artificial Sequence
  Description of Artificial Sequence: Synthetic oligonucleotide
  Target: LAMA2; (+) strand; PAM type: YTN; PAM sequence: CTT
ccttctggatgagcaaaacc

SEQ ID NO: 317032 - DNA, 20 bp, Artificial Sequence
  Description of Artificial Sequence: Synthetic oligonucleotide
  Target: LAMA2; (+) strand; PAM type: YTN; PAM sequence: TTC
cttctggatgagcaaaacct

SEQ ID NO: 317033 - DNA, 20 bp, Artificial Sequence
  Description of Artificial Sequence: Synthetic oligonucleotide
  Target: LAMA2; (+) strand; PAM type: YTN; PAM sequence: CTT
ctggatgagcaaaaccttga

SEQ ID NO: 317034 - DNA, 20 bp, Artificial Sequence
  Description of Artificial Sequence: Synthetic oligonucleotide
  Target: LAMA2; (+) strand; PAM type: YTN; PAM sequence: TTC
tggatgagcaaaaccttgat

SEQ ID NO: 317035 - DNA, 20 bp, Artificial Sequence
  Description of Artificial Sequence: Synthetic oligonucleotide
  Target: LAMA2; (+) strand; PAM type: YTN; PAM sequence: CTG
gatgagcaaaaccttgatgc

SEQ ID NO: 317036 - DNA, 20 bp, Artificial Sequence
  Description of Artificial Sequence: Synthetic oligonucleotide
  Target: LAMA2; (+) strand; PAM type: YTN; PAM sequence: CTT
gatgctttcagtagaaggta

SEQ ID NO: 317037 - DNA, 20 bp, Artificial Sequence
  Description of Artificial Sequence: Synthetic oligonucleotide
  Target: LAMA2; (+) strand; PAM type: YTN; PAM sequence: TTG
atgctttcagtagaaggtat

SEQ ID NO: 317038 - DNA, 20 bp, Artificial Sequence
  Description of Artificial Sequence: Synthetic oligonucleotide
  Target: LAMA2; (+) strand; PAM type: YTN; PAM sequence: CTT
tcagtagaaggtatttggaa

SEQ ID NO: 317039 - DNA, 20 bp, Artificial Sequence
  Description of Artificial Sequence: Synthetic oligonucleotide
  Target: LAMA2; (+) strand; PAM type: YTN; PAM sequence: TTT
cagtagaaggtatttggaac

SEQ ID NO: 317040 - DNA, 20 bp, Artificial Sequence
  Description of Artificial Sequence: Synthetic oligonucleotide
  Target: LAMA2; (+) strand; PAM type: YTN; PAM sequence: TTC
agtagaaggtatttggaact

SEQ ID NO: 317041 - DNA, 20 bp, Artificial Sequence
  Description of Artificial Sequence: Synthetic oligonucleotide
  Target: LAMA2; (+) strand; PAM type: YTN; PAM sequence: TTT
ggaactatggttgaatcttt

SEQ ID NO: 317042 - DNA, 20 bp, Artificial Sequence
  Description of Artificial Sequence: Synthetic oligonucleotide
  Target: LAMA2; (+) strand; PAM type: YTN; PAM sequence: TTG
gaactatggttgaatctttt

SEQ ID NO: 317043 - DNA, 20 bp, Artificial Sequence
  Description of Artificial Sequence: Synthetic oligonucleotide
  Target: LAMA2; (+) strand; PAM type: YTN; PAM sequence: CTA
tggttgaatcttttctgggg

SEQ ID NO: 317044 - DNA, 20 bp, Artificial Sequence
  Description of Artificial Sequence: Synthetic oligonucleotide
  Target: LAMA2; (+) strand; PAM type: YTN; PAM sequence: TTG
aatcttttctgggggtattg

SEQ ID NO: 317045 - DNA, 20 bp, Artificial Sequence
  Description of Artificial Sequence: Synthetic oligonucleotide
  Target: LAMA2; (+) strand; PAM type: YTN; PAM sequence: CTT
ttctgggggtattgatggga

SEQ ID NO: 317046 - DNA, 20 bp, Artificial Sequence
  Description of Artificial Sequence: Synthetic oligonucleotide
  Target: LAMA2; (+) strand; PAM type: YTN; PAM sequence: TTT
tctgggggtattgatgggac

SEQ ID NO: 317047 - DNA, 20 bp, Artificial Sequence
  Description of Artificial Sequence: Synthetic oligonucleotide
  Target: LAMA2; (+) strand; PAM type: YTN; PAM sequence: TTT
ctgggggtattgatgggact

SEQ ID NO: 317048 - DNA, 20 bp, Artificial Sequence
  Description of Artificial Sequence: Synthetic oligonucleotide
  Target: LAMA2; (+) strand; PAM type: YTN; PAM sequence: TTC
tgggggtattgatgggacta

SEQ ID NO: 317049 - DNA, 20 bp, Artificial Sequence
  Description of Artificial Sequence: Synthetic oligonucleotide
  Target: LAMA2; (+) strand; PAM type: YTN; PAM sequence: CTG
ggggtattgatgggactaga

SEQ ID NO: 317050 - DNA, 20 bp, Artificial Sequence
  Description of Artificial Sequence: Synthetic oligonucleotide
  Target: LAMA2; (+) strand; PAM type: YTN; PAM sequence: TTG
atgggactagagtcaggatg

SEQ ID NO: 317051 - DNA, 20 bp, Artificial Sequence
  Description of Artificial Sequence: Synthetic oligonucleotide
  Target: LAMA2; (+) strand; PAM type: YTN; PAM sequence: CTA
gagtcaggatgaggtggatg

SEQ ID NO: 317052 - DNA, 20 bp, Artificial Sequence
  Description of Artificial Sequence: Synthetic oligonucleotide
  Target: LAMA2; (+) strand; PAM type: YTN; PAM sequence: CTT
tcatctgtatgacttgagag

SEQ ID NO: 317053 - DNA, 20 bp, Artificial Sequence
  Description of Artificial Sequence: Synthetic oligonucleotide
  Target: LAMA2; (+) strand; PAM type: YTN; PAM sequence: TTT
catctgtatgacttgagagt

SEQ ID NO: 317054 - DNA, 20 bp, Artificial Sequence
  Description of Artificial Sequence: Synthetic oligonucleotide
  Target: LAMA2; (+) strand; PAM type: YTN; PAM sequence: TTC
atctgtatgacttgagagtg

SEQ ID NO: 317055 - DNA, 20 bp, Artificial Sequence
  Description of Artificial Sequence: Synthetic oligonucleotide
  Target: LAMA2; (+) strand; PAM type: YTN; PAM sequence: CTG
tatgacttgagagtgtatgc

SEQ ID NO: 317056 - DNA, 20 bp, Artificial Sequence
  Description of Artificial Sequence: Synthetic oligonucleotide
  Target: LAMA2; (+) strand; PAM type: YTN; PAM sequence: CTT
gagagtgtatgcatcaaatt

SEQ ID NO: 317057 - DNA, 20 bp, Artificial Sequence
  Description of Artificial Sequence: Synthetic oligonucleotide
  Target: LAMA2; (+) strand; PAM type: YTN; PAM sequence: TTG
agagtgtatgcatcaaattt

SEQ ID NO: 317058 - DNA, 20 bp, Artificial Sequence
  Description of Artificial Sequence: Synthetic oligonucleotide
  Target: LAMA2; (+) strand; PAM type: YTN; PAM sequence: TTT
tgcaccctcgagcacctctc

SEQ ID NO: 317059 - DNA, 20 bp, Artificial Sequence
  Description of Artificial Sequence: Synthetic oligonucleotide
  Target: LAMA2; (+) strand; PAM type: YTN; PAM sequence: TTT
gcaccctcgagcacctctct

SEQ ID NO: 317060 - DNA, 20 bp, Artificial Sequence
  Description of Artificial Sequence: Synthetic oligonucleotide
  Target: LAMA2; (+) strand; PAM type: YTN; PAM sequence: TTG
caccctcgagcacctctctc

SEQ ID NO: 317061 - DNA, 20 bp, Artificial Sequence
  Description of Artificial Sequence: Synthetic oligonucleotide
  Target: LAMA2; (+) strand; PAM type: YTN; PAM sequence: CTC
gagcacctctctcacctcca

SEQ ID NO: 317062 - DNA, 20 bp, Artificial Sequence
  Description of Artificial Sequence: Synthetic oligonucleotide
  Target: LAMA2; (+) strand; PAM type: YTN; PAM sequence: CTC
tctcacctccacattgaaaa

SEQ ID NO: 317063 - DNA, 20 bp, Artificial Sequence
  Description of Artificial Sequence: Synthetic oligonucleotide
  Target: LAMA2; (+) strand; PAM type: YTN; PAM sequence: CTC
tcacctccacattgaaaaaa

SEQ ID NO: 317064 - DNA, 20 bp, Artificial Sequence
  Description of Artificial Sequence: Synthetic oligonucleotide
  Target: LAMA2; (+) strand; PAM type: YTN; PAM sequence: CTC
acctccacattgaaaaaaat

SEQ ID NO: 317065 - DNA, 20 bp, Artificial Sequence
  Description of Artificial Sequence: Synthetic oligonucleotide
  Target: LAMA2; (+) strand; PAM type: YTN; PAM sequence: CTC
cacattgaaaaaaatacatg

SEQ ID NO: 317066 - DNA, 20 bp, Artificial Sequence
  Description of Artificial Sequence: Synthetic oligonucleotide
  Target: LAMA2; (+) strand; PAM type: YTN; PAM sequence: TTG
aaaaaaatacatgccagatt

SEQ ID NO: 317067 - DNA, 20 bp, Artificial Sequence
  Description of Artificial Sequence: Synthetic oligonucleotide
  Target: LAMA2; (+) strand; PAM type: YTN; PAM sequence: TTA
aaaaaaatgaaattggaaag

SEQ ID NO: 317068 - DNA, 20 bp, Artificial Sequence
  Description of Artificial Sequence: Synthetic oligonucleotide
  Target: LAMA2; (+) strand; PAM type: YTN; PAM sequence: TTG
gaaaggatggtttgtagaac

SEQ ID NO: 317069 - DNA, 20 bp, Artificial Sequence
  Description of Artificial Sequence: Synthetic oligonucleotide
  Target: LAMA2; (+) strand; PAM type: YTN; PAM sequence: TTT
gtagaactgttagagcatcc

SEQ ID NO: 317070 - DNA, 20 bp, Artificial Sequence
  Description of Artificial Sequence: Synthetic oligonucleotide
  Target: LAMA2; (+) strand; PAM type: YTN; PAM sequence: TTG
tagaactgttagagcatcca

SEQ ID NO: 317071 - DNA, 20 bp, Artificial Sequence
  Description of Artificial Sequence: Synthetic oligonucleotide
  Target: LAMA2; (+) strand; PAM type: YTN; PAM sequence: CTG
ttagagcatccataaaactc

SEQ ID NO: 317072 - DNA, 20 bp, Artificial Sequence
  Description of Artificial Sequence: Synthetic oligonucleotide
  Target: LAMA2; (+) strand; PAM type: YTN; PAM sequence: TTA
gagcatccataaaactcatt

SEQ ID NO: 317073 - DNA, 20 bp, Artificial Sequence
  Description of Artificial Sequence: Synthetic oligonucleotide
  Target: LAMA2; (+) strand; PAM type: YTN; PAM sequence: CTC
attacaaagtaaaatatatt

SEQ ID NO: 317074 - DNA, 20 bp, Artificial Sequence
  Description of Artificial Sequence: Synthetic oligonucleotide
  Target: LAMA2; (+) strand; PAM type: YTN; PAM sequence: TTA
caaagtaaaatatattagta

SEQ ID NO: 317075 - DNA, 20 bp, Artificial Sequence
  Description of Artificial Sequence: Synthetic oligonucleotide
  Target: LAMA2; (+) strand; PAM type: YTN; PAM sequence: TTA
gtaataaaatgattttagta

SEQ ID NO: 317076 - DNA, 20 bp, Artificial Sequence
  Description of Artificial Sequence: Synthetic oligonucleotide
  Target: LAMA2; (+) strand; PAM type: YTN; PAM sequence: TTT
tagtaatacctcgggaacca

SEQ ID NO: 317077 - DNA, 20 bp, Artificial Sequence
  Description of Artificial Sequence: Synthetic oligonucleotide
  Target: LAMA2; (+) strand; PAM type: YTN; PAM sequence: TTT
agtaatacctcgggaaccac

SEQ ID NO: 317078 - DNA, 20 bp, Artificial Sequence
  Description of Artificial Sequence: Synthetic oligonucleotide
  Target: LAMA2; (+) strand; PAM type: YTN; PAM sequence: TTA
gtaatacctcgggaaccact

SEQ ID NO: 317079 - DNA, 20 bp, Artificial Sequence
  Description of Artificial Sequence: Synthetic oligonucleotide
  Target: LAMA2; (+) strand; PAM type: YTN; PAM sequence: CTC
gggaaccactctaattccaa

SEQ ID NO: 317080 - DNA, 20 bp, Artificial Sequence
  Description of Artificial Sequence: Synthetic oligonucleotide
  Target: LAMA2; (+) strand; PAM type: YTN; PAM sequence: CTC
taattccaaatcatctctct

SEQ ID NO: 317081 - DNA, 20 bp, Artificial Sequence
  Description of Artificial Sequence: Synthetic oligonucleotide
  Target: LAMA2; (+) strand; PAM type: YTN; PAM sequence: CTA
attccaaatcatctctctgt

SEQ ID NO: 317082 - DNA, 20 bp, Artificial Sequence
  Description of Artificial Sequence: Synthetic oligonucleotide
  Target: LAMA2; (+) strand; PAM type: YTN; PAM sequence: TTC
caaatcatctctctgtctct

SEQ ID NO: 317083 - DNA, 20 bp, Artificial Sequence
  Description of Artificial Sequence: Synthetic oligonucleotide
  Target: LAMA2; (+) strand; PAM type: YTN; PAM sequence: CTC
tctgtctcttgtaatggctt

SEQ ID NO: 317084 - DNA, 20 bp, Artificial Sequence
  Description of Artificial Sequence: Synthetic oligonucleotide
  Target: LAMA2; (+) strand; PAM type: YTN; PAM sequence: CTC
tgtctcttgtaatggctttc

SEQ ID NO: 317085 - DNA, 20 bp, Artificial Sequence
  Description of Artificial Sequence: Synthetic oligonucleotide
  Target: LAMA2; (+) strand; PAM type: YTN; PAM sequence: CTG
tctcttgtaatggctttcca

SEQ ID NO: 317086 - DNA, 20 bp, Artificial Sequence
  Description of Artificial Sequence: Synthetic oligonucleotide
  Target: LAMA2; (+) strand; PAM type: YTN; PAM sequence: CTC
ttgtaatggctttccaatat

SEQ ID NO: 317087 - DNA, 20 bp, Artificial Sequence
  Description of Artificial Sequence: Synthetic oligonucleotide
  Target: LAMA2; (+) strand; PAM type: YTN; PAM sequence: CTT
gtaatggctttccaatattc

SEQ ID NO: 317088 - DNA, 20 bp, Artificial Sequence
  Description of Artificial Sequence: Synthetic oligonucleotide
  Target: LAMA2; (+) strand; PAM type: YTN; PAM sequence: TTG
taatggctttccaatattct

SEQ ID NO: 317089 - DNA, 20 bp, Artificial Sequence
  Description of Artificial Sequence: Synthetic oligonucleotide
  Target: LAMA2; (+) strand; PAM type: YTN; PAM sequence: CTT
tccaatattctttgaaaaat

SEQ ID NO: 317090 - DNA, 20 bp, Artificial Sequence
  Description of Artificial Sequence: Synthetic oligonucleotide
  Target: LAMA2; (+) strand; PAM type: YTN; PAM sequence: TTT
ccaatattctttgaaaaata

SEQ ID NO: 317091 - DNA, 20 bp, Artificial Sequence
  Description of Artificial Sequence: Synthetic oligonucleotide
  Target: LAMA2; (+) strand; PAM type: YTN; PAM sequence: TTC
caatattctttgaaaaatat

SEQ ID NO: 317092 - DNA, 20 bp, Artificial Sequence
  Description of Artificial Sequence: Synthetic oligonucleotide
  Target: LAMA2; (+) strand; PAM type: YTN; PAM sequence: TTC
tttgaaaaatattgaggtta

SEQ ID NO: 317093 - DNA, 20 bp, Artificial Sequence
  Description of Artificial Sequence: Synthetic oligonucleotide
  Target: LAMA2; (+) strand; PAM type: YTN; PAM sequence: CTT
tgaaaaatattgaggttatt

SEQ ID NO: 317094 - DNA, 20 bp, Artificial Sequence
  Description of Artificial Sequence: Synthetic oligonucleotide
  Target: LAMA2; (+) strand; PAM type: YTN; PAM sequence: TTT
gaaaaatattgaggttattt

SEQ ID NO: 317095 - DNA, 20 bp, Artificial Sequence
  Description of Artificial Sequence: Synthetic oligonucleotide
  Target: LAMA2; (+) strand; PAM type: YTN; PAM sequence: TTG
aaaaatattgaggttatttt

SEQ ID NO: 317096 - DNA, 20 bp, Artificial Sequence
  Description of Artificial Sequence: Synthetic oligonucleotide
  Target: LAMA2; (+) strand; PAM type: YTN; PAM sequence: TTG
aggttattttagttatgata

SEQ ID NO: 317097 - DNA, 20 bp, Artificial Sequence
  Description of Artificial Sequence: Synthetic oligonucleotide
  Target: LAMA2; (+) strand; PAM type: YTN; PAM sequence: TTA
ttttagttatgatattggta

SEQ ID NO: 317098 - DNA, 20 bp, Artificial Sequence
  Description of Artificial Sequence: Synthetic oligonucleotide
  Target: LAMA2; (+) strand; PAM type: YTN; PAM sequence: TTT
tagttatgatattggtactt

SEQ ID NO: 317099 - DNA, 20 bp, Artificial Sequence
  Description of Artificial Sequence: Synthetic oligonucleotide
  Target: LAMA2; (+) strand; PAM type: YTN; PAM sequence: TTT
agttatgatattggtacttt

SEQ ID NO: 317100 - DNA, 20 bp, Artificial Sequence
  Description of Artificial Sequence: Synthetic oligonucleotide
  Target: LAMA2; (+) strand; PAM type: YTN; PAM sequence: TTA
gttatgatattggtactttg

SEQ ID NO: 317101 - DNA, 20 bp, Artificial Sequence
  Description of Artificial Sequence: Synthetic oligonucleotide
  Target: LAMA2; (+) strand; PAM type: YTN; PAM sequence: TTA
tgatattggtactttgattt

SEQ ID NO: 317102 - DNA, 20 bp, Artificial Sequence
  Description of Artificial Sequence: Synthetic oligonucleotide
  Target: LAMA2; (+) strand; PAM type: YTN; PAM sequence: TTG
gtactttgatttggtttaaa

SEQ ID NO: 317103 - DNA, 20 bp, Artificial Sequence
  Description of Artificial Sequence: Synthetic oligonucleotide
  Target: LAMA2; (+) strand; PAM type: YTN; PAM sequence: CTT
tgatttggtttaaatatcct

SEQ ID NO: 317104 - DNA, 20 bp, Artificial Sequence
  Description of Artificial Sequence: Synthetic oligonucleotide
  Target: LAMA2; (+) strand; PAM type: YTN; PAM sequence: TTT
gatttggtttaaatatcctt

SEQ ID NO: 317105 - DNA, 20 bp, Artificial Sequence
  Description of Artificial Sequence: Synthetic oligonucleotide
  Target: LAMA2; (+) strand; PAM type: YTN; PAM sequence: TTG
atttggtttaaatatccttt

SEQ ID NO: 317106 - DNA, 20 bp, Artificial Sequence
  Description of Artificial Sequence: Synthetic oligonucleotide
  Target: LAMA2; (+) strand; PAM type: YTN; PAM sequence: TTT
ggtttaaatatccttttatt

SEQ ID NO: 317107 - DNA, 20 bp, Artificial Sequence
  Description of Artificial Sequence: Synthetic oligonucleotide
  Target: LAMA2; (+) strand; PAM type: YTN; PAM sequence: TTG
gtttaaatatccttttattc

SEQ ID NO: 317108 - DNA, 20 bp, Artificial Sequence
  Description of Artificial Sequence: Synthetic oligonucleotide
  Target: LAMA2; (+) strand; PAM type: YTN; PAM sequence: TTT
aaatatccttttattcttga

SEQ ID NO: 317109 - DNA, 20 bp, Artificial Sequence
  Description of Artificial Sequence: Synthetic oligonucleotide
  Target: LAMA2; (+) strand; PAM type: YTN; PAM sequence: TTA
aatatccttttattcttgag

SEQ ID NO: 317110 - DNA, 20 bp, Artificial Sequence
  Description of Artificial Sequence: Synthetic oligonucleotide
  Target: LAMA2; (+) strand; PAM type: YTN; PAM sequence: CTT
ttattcttgagatatacaat

SEQ ID NO: 317111 - DNA, 20 bp, Artificial Sequence
  Description of Artificial Sequence: Synthetic oligonucleotide
  Target: LAMA2; (+) strand; PAM type: YTN; PAM sequence: TTT
tattcttgagatatacaatt

SEQ ID NO: 317112 - DNA, 20 bp, Artificial Sequence
  Description of Artificial Sequence: Synthetic oligonucleotide
  Target: LAMA2; (+) strand; PAM type: YTN; PAM sequence: TTT
attcttgagatatacaattt

SEQ ID NO: 317113 - DNA, 20 bp, Artificial Sequence
  Description of Artificial Sequence: Synthetic oligonucleotide
  Target: LAMA2; (+) strand; PAM type: YTN; PAM sequence: TTA
ttcttgagatatacaatttc

SEQ ID NO: 317114 - DNA, 20 bp, Artificial Sequence
  Description of Artificial Sequence: Synthetic oligonucleotide
  Target: LAMA2; (+) strand; PAM type: YTN; PAM sequence: TTC
ttgagatatacaatttcaac

SEQ ID NO: 317115 - DNA, 20 bp, Artificial Sequence
  Description of Artificial Sequence: Synthetic oligonucleotide
  Target: LAMA2; (+) strand; PAM type: YTN; PAM sequence: CTT
gagatatacaatttcaactg

SEQ ID NO: 317116 - DNA, 20 bp, Artificial Sequence
  Description of Artificial Sequence: Synthetic oligonucleotide
  Target: LAMA2; (+) strand; PAM type: YTN; PAM sequence: TTG
agatatacaatttcaactga

SEQ ID NO: 317117 - DNA, 20 bp, Artificial Sequence
  Description of Artificial Sequence: Synthetic oligonucleotide
  Target: LAMA2; (+) strand; PAM type: YTN; PAM sequence: TTT
caactgaatggcaactatga

SEQ ID NO: 317118 - DNA, 20 bp, Artificial Sequence
  Description of Artificial Sequence: Synthetic oligonucleotide
  Target: LAMA2; (+) strand; PAM type: YTN; PAM sequence: TTC
aactgaatggcaactatgac

SEQ ID NO: 317119 - DNA, 20 bp, Artificial Sequence
  Description of Artificial Sequence: Synthetic oligonucleotide
  Target: LAMA2; (+) strand; PAM type: YTN; PAM sequence: CTG
aatggcaactatgacagagt

SEQ ID NO: 317120 - DNA, 20 bp, Artificial Sequence
  Description of Artificial Sequence: Synthetic oligonucleotide
  Target: LAMA2; (+) strand; PAM type: YTN; PAM sequence: CTA
tgacagagttgaaaatgtac

SEQ ID NO: 317121 - DNA, 20 bp, Artificial Sequence
  Description of Artificial Sequence: Synthetic oligonucleotide
  Target: LAMA2; (+) strand; PAM type: YTN; PAM sequence: TTG
aaaatgtacagaaaaataaa

SEQ ID NO: 317122 - DNA, 20 bp, Artificial Sequence
  Description of Artificial Sequence: Synthetic oligonucleotide
  Target: LAMA2; (+) strand; PAM type: YTN; PAM sequence: TTA
tagattagacaacgtattaa

SEQ ID NO: 317123 - DNA, 20 bp, Artificial Sequence
  Description of Artificial Sequence: Synthetic oligonucleotide
  Target: LAMA2; (+) strand; PAM type: YTN; PAM sequence: TTA
gacaacgtattaatttaaaa

SEQ ID NO: 317124 - DNA, 20 bp, Artificial Sequence
  Description of Artificial Sequence: Synthetic oligonucleotide
  Target: LAMA2; (+) strand; PAM type: YTN; PAM sequence: TTA
atttaaaagcagttgcaagc

SEQ ID NO: 317125 - DNA, 20 bp, Artificial Sequence
  Description of Artificial Sequence: Synthetic oligonucleotide
  Target: LAMA2; (+) strand; PAM type: YTN; PAM sequence: TTT
aaaagcagttgcaagcaagt

SEQ ID NO: 317126 - DNA, 20 bp, Artificial Sequence
  Description of Artificial Sequence: Synthetic oligonucleotide
  Target: LAMA2; (+) strand; PAM type: YTN; PAM sequence: TTA
aaagcagttgcaagcaagtt

SEQ ID NO: 317127 - DNA, 20 bp, Artificial Sequence
  Description of Artificial Sequence: Synthetic oligonucleotide
  Target: LAMA2; (+) strand; PAM type: YTN; PAM sequence: TTG
caagcaagttactatattgc

SEQ ID NO: 317128 - DNA, 20 bp, Artificial Sequence
  Description of Artificial Sequence: Synthetic oligonucleotide
  Target: LAMA2; (+) strand; PAM type: YTN; PAM sequence: TTA
ctatattgcaatgaaaaaaa

SEQ ID NO: 317129 - DNA, 20 bp, Artificial Sequence
  Description of Artificial Sequence: Synthetic oligonucleotide
  Target: LAMA2; (+) strand; PAM type: YTN; PAM sequence: CTA
tattgcaatgaaaaaaaagt

SEQ ID NO: 317130 - DNA, 20 bp, Artificial Sequence
  Description of Artificial Sequence: Synthetic oligonucleotide
  Target: LAMA2; (+) strand; PAM type: YTN; PAM sequence: TTG
caatgaaaaaaaagttccta

SEQ ID NO: 317131 - DNA, 20 bp, Artificial Sequence
  Description of Artificial Sequence: Synthetic oligonucleotide
  Target: LAMA2; (+) strand; PAM type: YTN; PAM sequence: TTC
ctaaaattggtaattcaact

SEQ ID NO: 317132 - DNA, 20 bp, Artificial Sequence
  Description of Artificial Sequence: Synthetic oligonucleotide
  Target: LAMA2; (+) strand; PAM type: YTN; PAM sequence: CTA
aaattggtaattcaactatt

SEQ ID NO: 317133 - DNA, 20 bp, Artificial Sequence
  Description of Artificial Sequence: Synthetic oligonucleotide
  Target: LAMA2; (+) strand; PAM type: YTN; PAM sequence: TTG
gtaattcaactattgctgtc

SEQ ID NO: 317134 - DNA, 20 bp, Artificial Sequence
  Description of Artificial Sequence: Synthetic oligonucleotide
  Target: LAMA2; (+) strand; PAM type: YTN; PAM sequence: TTC
aactattgctgtcctaatag

SEQ ID NO: 317135 - DNA, 20 bp, Artificial Sequence
  Description of Artificial Sequence: Synthetic oligonucleotide
  Target: LAMA2; (+) strand; PAM type: YTN; PAM sequence: CTA
ttgctgtcctaatagctgaa

SEQ ID NO: 317136 - DNA, 20 bp, Artificial Sequence
  Description of Artificial Sequence: Synthetic oligonucleotide
  Target: LAMA2; (+) strand; PAM type: YTN; PAM sequence: TTG
ctgtcctaatagctgaagtc

SEQ ID NO: 317137 - DNA, 20 bp, Artificial Sequence
  Description of Artificial Sequence: Synthetic oligonucleotide
  Target: LAMA2; (+) strand; PAM type: YTN; PAM sequence: CTG
tcctaatagctgaagtcatt

SEQ ID NO: 317138 - DNA, 20 bp, Artificial Sequence
  Description of Artificial Sequence: Synthetic oligonucleotide
  Target: LAMA2; (+) strand; PAM type: YTN; PAM sequence: CTA
atagctgaagtcatttttat

SEQ ID NO: 317139 - DNA, 20 bp, Artificial Sequence
  Description of Artificial Sequence: Synthetic oligonucleotide
  Target: LAMA2; (+) strand; PAM type: YTN; PAM sequence: CTG
aagtcatttttatgtatggc

SEQ ID NO: 317140 - DNA, 20 bp, Artificial Sequence
  Description of Artificial Sequence: Synthetic oligonucleotide
  Target: LAMA2; (+) strand; PAM type: YTN; PAM sequence: TTT
ttatgtatggcaatcctaaa

SEQ ID NO: 317141 - DNA, 20 bp, Artificial Sequence
  Description of Artificial Sequence: Synthetic oligonucleotide
  Target: LAMA2; (+) strand; PAM type: YTN; PAM sequence: TTT
tatgtatggcaatcctaaat

SEQ ID NO: 317142 - DNA, 20 bp, Artificial Sequence
  Description of Artificial Sequence: Synthetic oligonucleotide
  Target: LAMA2; (+) strand; PAM type: YTN; PAM sequence: TTT
atgtatggcaatcctaaatc

SEQ ID NO: 317143 - DNA, 20 bp, Artificial Sequence
  Description of Artificial Sequence: Synthetic oligonucleotide
  Target: LAMA2; (+) strand; PAM type: YTN; PAM sequence: TTA
tgtatggcaatcctaaatca

SEQ ID NO: 317144 - DNA, 20 bp, Artificial Sequence
  Description of Artificial Sequence: Synthetic oligonucleotide
  Target: LAMA2; (+) strand; PAM type: YTN; PAM sequence: CTA
aatcaaagccatcataagat

SEQ ID NO: 317145 - DNA, 20 bp, Artificial Sequence
  Description of Artificial Sequence: Synthetic oligonucleotide
  Target: LAMA2; (+) strand; PAM type: YTN; PAM sequence: CTG
cagacctcttaatagcttgg

SEQ ID NO: 317146 - DNA, 20 bp, Artificial Sequence
  Description of Artificial Sequence: Synthetic oligonucleotide
  Target: LAMA2; (+) strand; PAM type: YTN; PAM sequence: CTC
ttaatagcttggctccagtg

SEQ ID NO: 317147 - DNA, 20 bp, Artificial Sequence
  Description of Artificial Sequence: Synthetic oligonucleotide
  Target: LAMA2; (+) strand; PAM type: YTN; PAM sequence: CTT
aatagcttggctccagtgat

SEQ ID NO: 317148 - DNA, 20 bp, Artificial Sequence
  Description of Artificial Sequence: Synthetic oligonucleotide
  Target: LAMA2; (+) strand; PAM type: YTN; PAM sequence: TTA
atagcttggctccagtgata

SEQ ID NO: 317149 - DNA, 20 bp, Artificial Sequence
  Description of Artificial Sequence: Synthetic oligonucleotide
  Target: LAMA2; (+) strand; PAM type: YTN; PAM sequence: CTT
ggctccagtgataatgagcc

SEQ ID NO: 317150 - DNA, 20 bp, Artificial Sequence
  Description of Artificial Sequence: Synthetic oligonucleotide
  Target: LAMA2; (+) strand; PAM type: YTN; PAM sequence: TTG
gctccagtgataatgagccc

SEQ ID NO: 317151 - DNA, 20 bp, Artificial Sequence
  Description of Artificial Sequence: Synthetic oligonucleotide
  Target: LAMA2; (+) strand; PAM type: YTN; PAM sequence: CTC
cagtgataatgagcccagga

SEQ ID NO: 317152 - DNA, 20 bp, Artificial Sequence
  Description of Artificial Sequence: Synthetic oligonucleotide
  Target: LAMA2; (+) strand; PAM type: YTN; PAM sequence: TTA
gagctcatttgagagcagga

SEQ ID NO: 317153 - DNA, 20 bp, Artificial Sequence
  Description of Artificial Sequence: Synthetic oligonucleotide
  Target: LAMA2; (+) strand; PAM type: YTN; PAM sequence: CTC
atttgagagcaggattcata

SEQ ID NO: 317154 - DNA, 20 bp, Artificial Sequence
  Description of Artificial Sequence: Synthetic oligonucleotide
  Target: LAMA2; (+) strand; PAM type: YTN; PAM sequence: TTT
gagagcaggattcataattt

SEQ ID NO: 317155 - DNA, 20 bp, Artificial Sequence
  Description of Artificial Sequence: Synthetic oligonucleotide
  Target: LAMA2; (+) strand; PAM type: YTN; PAM sequence: TTG
agagcaggattcataatttt

SEQ ID NO: 317156 - DNA, 20 bp, Artificial Sequence
  Description of Artificial Sequence: Synthetic oligonucleotide
  Target: LAMA2; (+) strand; PAM type: YTN; PAM sequence: TTC
ataattttttttactgtgca

SEQ ID NO: 317157 - DNA, 20 bp, Artificial Sequence
  Description of Artificial Sequence: Synthetic oligonucleotide
  Target: LAMA2; (+) strand; PAM type: YTN; PAM sequence: TTT
tttttactgtgcaattttcc

SEQ ID NO: 317158 - DNA, 20 bp, Artificial Sequence
  Description of Artificial Sequence: Synthetic oligonucleotide
  Target: LAMA2; (+) strand; PAM type: YTN; PAM sequence: TTT
ttttactgtgcaattttcct

SEQ ID NO: 317159 - DNA, 20 bp, Artificial Sequence
  Description of Artificial Sequence: Synthetic oligonucleotide
  Target: LAMA2; (+) strand; PAM type: YTN; PAM sequence: TTT
tttactgtgcaattttccta

SEQ ID NO: 317160 - DNA, 20 bp, Artificial Sequence
  Description of Artificial Sequence: Synthetic oligonucleotide
  Target: LAMA2; (+) strand; PAM type: YTN; PAM sequence: TTT
ttactgtgcaattttcctac

SEQ ID NO: 317161 - DNA, 20 bp, Artificial Sequence
  Description of Artificial Sequence: Synthetic oligonucleotide
  Target: LAMA2; (+) strand; PAM type: YTN; PAM sequence: TTT
tactgtgcaattttcctacc

SEQ ID NO: 317162 - DNA, 20 bp, Artificial Sequence
  Description of Artificial Sequence: Synthetic oligonucleotide
  Target: LAMA2; (+) strand; PAM type: YTN; PAM sequence: TTT
actgtgcaattttcctacct

SEQ ID NO: 317163 - DNA, 20 bp, Artificial Sequence
  Description of Artificial Sequence: Synthetic oligonucleotide
  Target: LAMA2; (+) strand; PAM type: YTN; PAM sequence: TTA
ctgtgcaattttcctacctc

SEQ ID NO: 317164 - DNA, 20 bp, Artificial Sequence
  Description of Artificial Sequence: Synthetic oligonucleotide
  Target: LAMA2; (+) strand; PAM type: YTN; PAM sequence: CTG
tgcaattttcctacctctgg

SEQ ID NO: 317165 - DNA, 20 bp, Artificial Sequence
  Description of Artificial Sequence: Synthetic oligonucleotide
  Target: LAMA2; (+) strand; PAM type: YTN; PAM sequence: TTT
tcctacctctggctttgtct

SEQ ID NO: 317166 - DNA, 20 bp, Artificial Sequence
  Description of Artificial Sequence: Synthetic oligonucleotide
  Target: LAMA2; (+) strand; PAM type: YTN; PAM sequence: TTT
cctacctctggctttgtctc

SEQ ID NO: 317167 - DNA, 20 bp, Artificial Sequence
  Description of Artificial Sequence: Synthetic oligonucleotide
  Target: LAMA2; (+) strand; PAM type: YTN; PAM sequence: TTC
ctacctctggctttgtctca

SEQ ID NO: 317168 - DNA, 20 bp, Artificial Sequence
  Description of Artificial Sequence: Synthetic oligonucleotide
  Target: LAMA2; (+) strand; PAM type: YTN; PAM sequence: CTA
cctctggctttgtctcaaag

SEQ ID NO: 317169 - DNA, 20 bp, Artificial Sequence
  Description of Artificial Sequence: Synthetic oligonucleotide
  Target: LAMA2; (+) strand; PAM type: YTN; PAM sequence: CTC
tggctttgtctcaaagacat

SEQ ID NO: 317170 - DNA, 20 bp, Artificial Sequence
  Description of Artificial Sequence: Synthetic oligonucleotide
  Target: LAMA2; (+) strand; PAM type: YTN; PAM sequence: CTG
gctttgtctcaaagacatag

SEQ ID NO: 317171 - DNA, 20 bp, Artificial Sequence
  Description of Artificial Sequence: Synthetic oligonucleotide
  Target: LAMA2; (+) strand; PAM type: YTN; PAM sequence: CTT
tgtctcaaagacatagccac

SEQ ID NO: 317172 - DNA, 20 bp, Artificial Sequence
  Description of Artificial Sequence: Synthetic oligonucleotide
  Target: LAMA2; (+) strand; PAM type: YTN; PAM sequence: TTT
gtctcaaagacatagccaca

SEQ ID NO: 317173 - DNA, 20 bp, Artificial Sequence
  Description of Artificial Sequence: Synthetic oligonucleotide
  Target: LAMA2; (+) strand; PAM type: YTN; PAM sequence: TTG
tctcaaagacatagccacac

SEQ ID NO: 317174 - DNA, 20 bp, Artificial Sequence
  Description of Artificial Sequence: Synthetic oligonucleotide
  Target: LAMA2; (+) strand; PAM type: YTN; PAM sequence: CTC
aaagacatagccacacatgg

SEQ ID NO: 317175 - DNA, 20 bp, Artificial Sequence
  Description of Artificial Sequence: Synthetic oligonucleotide
  Target: LAMA2; (+) strand; PAM type: YTN; PAM sequence: CTG
ataataagagagtttgacat

SEQ ID NO: 317176 - DNA, 20 bp, Artificial Sequence
  Description of Artificial Sequence: Synthetic oligonucleotide
  Target: LAMA2; (+) strand; PAM type: YTN; PAM sequence: TTT
gacattctttataatttttc

SEQ ID NO: 317177 - DNA, 20 bp, Artificial Sequence
  Description of Artificial Sequence: Synthetic oligonucleotide
  Target: LAMA2; (+) strand; PAM type: YTN; PAM sequence: TTG
acattctttataatttttct

SEQ ID NO: 317178 - DNA, 20 bp, Artificial Sequence
  Description of Artificial Sequence: Synthetic oligonucleotide
  Target: LAMA2; (+) strand; PAM type: YTN; PAM sequence: TTC
tttataatttttcttttgcc

SEQ ID NO: 317179 - DNA, 20 bp, Artificial Sequence
  Description of Artificial Sequence: Synthetic oligonucleotide
  Target: LAMA2; (+) strand; PAM type: YTN; PAM sequence: CTT
tataatttttcttttgccag

SEQ ID NO: 317180 - DNA, 20 bp, Artificial Sequence
  Description of Artificial Sequence: Synthetic oligonucleotide
  Target: LAMA2; (+) strand; PAM type: YTN; PAM sequence: TTT
ataatttttcttttgccagg

SEQ ID NO: 317181 - DNA, 20 bp, Artificial Sequence
  Description of Artificial Sequence: Synthetic oligonucleotide
  Target: LAMA2; (+) strand; PAM type: YTN; PAM sequence: TTA
taatttttcttttgccagga

SEQ ID NO: 317182 - DNA, 20 bp, Artificial Sequence
  Description of Artificial Sequence: Synthetic oligonucleotide
  Target: LAMA2; (+) strand; PAM type: YTN; PAM sequence: TTT
ttcttttgccaggatcctta

SEQ ID NO: 317183 - DNA, 20 bp, Artificial Sequence
  Description of Artificial Sequence: Synthetic oligonucleotide
  Target: LAMA2; (+) strand; PAM type: YTN; PAM sequence: TTT
tcttttgccaggatccttat

SEQ ID NO: 317184 - DNA, 20 bp, Artificial Sequence
  Description of Artificial Sequence: Synthetic oligonucleotide
  Target: LAMA2; (+) strand; PAM type: YTN; PAM sequence: TTT
cttttgccaggatccttata

SEQ ID NO: 317185 - DNA, 20 bp, Artificial Sequence
  Description of Artificial Sequence: Synthetic oligonucleotide
  Target: LAMA2; (+) strand; PAM type: YTN; PAM sequence: TTC
ttttgccaggatccttataa

SEQ ID NO: 317186 - DNA, 20 bp, Artificial Sequence
  Description of Artificial Sequence: Synthetic oligonucleotide
  Target: LAMA2; (+) strand; PAM type: YTN; PAM sequence: CTT
ttgccaggatccttataatc

SEQ ID NO: 317187 - DNA, 20 bp, Artificial Sequence
  Description of Artificial Sequence: Synthetic oligonucleotide
  Target: LAMA2; (+) strand; PAM type: YTN; PAM sequence: TTT
tgccaggatccttataatcc

SEQ ID NO: 317188 - DNA, 20 bp, Artificial Sequence
  Description of Artificial Sequence: Synthetic oligonucleotide
  Target: LAMA2; (+) strand; PAM type: YTN; PAM sequence: TTT
gccaggatccttataatcct

SEQ ID NO: 317189 - DNA, 20 bp, Artificial Sequence
  Description of Artificial Sequence: Synthetic oligonucleotide
  Target: LAMA2; (+) strand; PAM type: YTN; PAM sequence: TTG
ccaggatccttataatcctt

SEQ ID NO: 317190 - DNA, 20 bp, Artificial Sequence
  Description of Artificial Sequence: Synthetic oligonucleotide
  Target: LAMA2; (+) strand; PAM type: YTN; PAM sequence: CTT
ataatccttgaatcaaaatg

SEQ ID NO: 317191 - DNA, 20 bp, Artificial Sequence
  Description of Artificial Sequence: Synthetic oligonucleotide
  Target: LAMA2; (+) strand; PAM type: YTN; PAM sequence: TTA
taatccttgaatcaaaatga

SEQ ID NO: 317192 - DNA, 20 bp, Artificial Sequence
  Description of Artificial Sequence: Synthetic oligonucleotide
  Target: LAMA2; (+) strand; PAM type: YTN; PAM sequence: CTT
gaatcaaaatgattgaagca

SEQ ID NO: 317193 - DNA, 20 bp, Artificial Sequence
  Description of Artificial Sequence: Synthetic oligonucleotide
  Target: LAMA2; (+) strand; PAM type: YTN; PAM sequence: TTG
aatcaaaatgattgaagcag

SEQ ID NO: 317194 - DNA, 20 bp, Artificial Sequence
  Description of Artificial Sequence: Synthetic oligonucleotide
  Target: LAMA2; (+) strand; PAM type: YTN; PAM sequence: TTG
aagcagttatttttaaaaat

SEQ ID NO: 317195 - DNA, 20 bp, Artificial Sequence
  Description of Artificial Sequence: Synthetic oligonucleotide
  Target: LAMA2; (+) strand; PAM type: YTN; PAM sequence: TTA
tttttaaaaatagaagctag

SEQ ID NO: 317196 - DNA, 20 bp, Artificial Sequence
  Description of Artificial Sequence: Synthetic oligonucleotide
  Target: LAMA2; (+) strand; PAM type: YTN; PAM sequence: TTT
ttaaaaatagaagctagatt

SEQ ID NO: 317197 - DNA, 20 bp, Artificial Sequence
  Description of Artificial Sequence: Synthetic oligonucleotide
  Target: LAMA2; (+) strand; PAM type: YTN; PAM sequence: TTT
taaaaatagaagctagattt

SEQ ID NO: 317198 - DNA, 20 bp, Artificial Sequence
  Description of Artificial Sequence: Synthetic oligonucleotide
  Target: LAMA2; (+) strand; PAM type: YTN; PAM sequence: TTT
aaaaatagaagctagattta

SEQ ID NO: 317199 - DNA, 20 bp, Artificial Sequence
  Description of Artificial Sequence: Synthetic oligonucleotide
  Target: LAMA2; (+) strand; PAM type: YTN; PAM sequence: TTA
aaaatagaagctagatttaa

SEQ ID NO: 317200 - DNA, 20 bp, Artificial Sequence
  Description of Artificial Sequence: Synthetic oligonucleotide
  Target: LAMA2; (+) strand; PAM type: YTN; PAM sequence: CTA
gatttaaaatgtattatttt

SEQ ID NO: 317201 - DNA, 20 bp, Artificial Sequence
  Description of Artificial Sequence: Synthetic oligonucleotide
  Target: LAMA2; (+) strand; PAM type: YTN; PAM sequence: TTT
aaaatgtattattttgtgcc

SEQ ID NO: 317202 - DNA, 20 bp, Artificial Sequence
  Description of Artificial Sequence: Synthetic oligonucleotide
  Target: LAMA2; (+) strand; PAM type: YTN; PAM sequence: TTA
aaatgtattattttgtgcct

SEQ ID NO: 317203 - DNA, 20 bp, Artificial Sequence
  Description of Artificial Sequence: Synthetic oligonucleotide
  Target: LAMA2; (+) strand; PAM type: YTN; PAM sequence: TTA
ttttgtgcctcttttgacat

SEQ ID NO: 317204 - DNA, 20 bp, Artificial Sequence
  Description of Artificial Sequence: Synthetic oligonucleotide
  Target: LAMA2; (+) strand; PAM type: YTN; PAM sequence: TTT
tgtgcctcttttgacattat

SEQ ID NO: 317205 - DNA, 20 bp, Artificial Sequence
  Description of Artificial Sequence: Synthetic oligonucleotide
  Target: LAMA2; (+) strand; PAM type: YTN; PAM sequence: TTT
gtgcctcttttgacattatt

SEQ ID NO: 317206 - DNA, 20 bp, Artificial Sequence
  Description of Artificial Sequence: Synthetic oligonucleotide
  Target: LAMA2; (+) strand; PAM type: YTN; PAM sequence: TTG
tgcctcttttgacattattt

SEQ ID NO: 317207 - DNA, 20 bp, Artificial Sequence
  Description of Artificial Sequence: Synthetic oligonucleotide
  Target: LAMA2; (+) strand; PAM type: YTN; PAM sequence: CTC
ttttgacattattttgttta

SEQ ID NO: 317208 - DNA, 20 bp, Artificial Sequence
  Description of Artificial Sequence: Synthetic oligonucleotide
  Target: LAMA2; (+) strand; PAM type: YTN; PAM sequence: CTT
ttgacattattttgtttaga

SEQ ID NO: 317209 - DNA, 20 bp, Artificial Sequence
  Description of Artificial Sequence: Synthetic oligonucleotide
  Target: LAMA2; (+) strand; PAM type: YTN; PAM sequence: TTT
tgacattattttgtttagag

SEQ ID NO: 317210 - DNA, 20 bp, Artificial Sequence
  Description of Artificial Sequence: Synthetic oligonucleotide
  Target: LAMA2; (+) strand; PAM type: YTN; PAM sequence: TTT
gacattattttgtttagagc

SEQ ID NO: 317211 - DNA, 20 bp, Artificial Sequence
  Description of Artificial Sequence: Synthetic oligonucleotide
  Target: LAMA2; (+) strand; PAM type: YTN; PAM sequence: TTG
acattattttgtttagagca

SEQ ID NO: 317212 - DNA, 20 bp, Artificial Sequence
  Description of Artificial Sequence: Synthetic oligonucleotide
  Target: LAMA2; (+) strand; PAM type: YTN; PAM sequence: TTA
ttttgtttagagcaccttta

SEQ ID NO: 317213 - DNA, 20 bp, Artificial Sequence
  Description of Artificial Sequence: Synthetic oligonucleotide
  Target: LAMA2; (+) strand; PAM type: YTN; PAM sequence: TTT
tgtttagagcacctttaaaa

SEQ ID NO: 317214 - DNA, 20 bp, Artificial Sequence
  Description of Artificial Sequence: Synthetic oligonucleotide
  Target: LAMA2; (+) strand; PAM type: YTN; PAM sequence: TTT
gtttagagcacctttaaaaa

SEQ ID NO: 317215 - DNA, 20 bp, Artificial Sequence
  Description of Artificial Sequence: Synthetic oligonucleotide
  Target: LAMA2; (+) strand; PAM type: YTN; PAM sequence: TTG
tttagagcacctttaaaaac

SEQ ID NO: 317216 - DNA, 20 bp, Artificial Sequence
  Description of Artificial Sequence: Synthetic oligonucleotide
  Target: LAMA2; (+) strand; PAM type: YTN; PAM sequence: TTT
agagcacctttaaaaactct

SEQ ID NO: 317217 - DNA, 20 bp, Artificial Sequence
  Description of Artificial Sequence: Synthetic oligonucleotide
  Target: LAMA2; (+) strand; PAM type: YTN; PAM sequence: TTA
gagcacctttaaaaactcta

SEQ ID NO: 317218 - DNA, 20 bp, Artificial Sequence
  Description of Artificial Sequence: Synthetic oligonucleotide
  Target: LAMA2; (+) strand; PAM type: YTN; PAM sequence: CTT
taaaaactctactggtgatt

SEQ ID NO: 317219 - DNA, 20 bp, Artificial Sequence
  Description of Artificial Sequence: Synthetic oligonucleotide
  Target: LAMA2; (+) strand; PAM type: YTN; PAM sequence: TTT
aaaaactctactggtgatta

SEQ ID NO: 317220 - DNA, 20 bp, Artificial Sequence
  Description of Artificial Sequence: Synthetic oligonucleotide
  Target: LAMA2; (+) strand; PAM type: YTN; PAM sequence: TTA
aaaactctactggtgattaa

SEQ ID NO: 317221 - DNA, 20 bp, Artificial Sequence
  Description of Artificial Sequence: Synthetic oligonucleotide
  Target: LAMA2; (+) strand; PAM type: YTN; PAM sequence: CTC
tactggtgattaaaatattg

SEQ ID NO: 317222 - DNA, 20 bp, Artificial Sequence
  Description of Artificial Sequence: Synthetic oligonucleotide
  Target: LAMA2; (+) strand; PAM type: YTN; PAM sequence: CTA
ctggtgattaaaatattgaa

SEQ ID NO: 317223 - DNA, 20 bp, Artificial Sequence
  Description of Artificial Sequence: Synthetic oligonucleotide
  Target: LAMA2; (+) strand; PAM type: YTN; PAM sequence: CTG
gtgattaaaatattgaaact

SEQ ID NO: 317224 - DNA, 20 bp, Artificial Sequence
  Description of Artificial Sequence: Synthetic oligonucleotide
  Target: LAMA2; (+) strand; PAM type: YTN; PAM sequence: TTA
aaatattgaaactataacag

SEQ ID NO: 317225 - DNA, 20 bp, Artificial Sequence
  Description of Artificial Sequence: Synthetic oligonucleotide
  Target: LAMA2; (+) strand; PAM type: YTN; PAM sequence: TTG
aaactataacagtatttttg

SEQ ID NO: 317226 - DNA, 20 bp, Artificial Sequence
  Description of Artificial Sequence: Synthetic oligonucleotide
  Target: LAMA2; (+) strand; PAM type: YTN; PAM sequence: CTA
taacagtatttttggcatga

SEQ ID NO: 317227 - DNA, 20 bp, Artificial Sequence
  Description of Artificial Sequence: Synthetic oligonucleotide
  Target: LAMA2; (+) strand; PAM type: YTN; PAM sequence: TTT
ttggcatgatttttaaatac

SEQ ID NO: 317228 - DNA, 20 bp, Artificial Sequence
  Description of Artificial Sequence: Synthetic oligonucleotide
  Target: LAMA2; (+) strand; PAM type: YTN; PAM sequence: TTT
tggcatgatttttaaatact

SEQ ID NO: 317229 - DNA, 20 bp, Artificial Sequence
  Description of Artificial Sequence: Synthetic oligonucleotide
  Target: LAMA2; (+) strand; PAM type: YTN; PAM sequence: TTT
ggcatgatttttaaatactt

SEQ ID NO: 317230 - DNA, 20 bp, Artificial Sequence
  Description of Artificial Sequence: Synthetic oligonucleotide
  Target: LAMA2; (+) strand; PAM type: YTN; PAM sequence: TTG
gcatgatttttaaatacttc

SEQ ID NO: 317231 - DNA, 20 bp, Artificial Sequence
  Description of Artificial Sequence: Synthetic oligonucleotide
  Target: LAMA2; (+) strand; PAM type: YTN; PAM sequence: TTT
ttaaatacttctttcagcta

SEQ ID NO: 317232 - DNA, 20 bp, Artificial Sequence
  Description of Artificial Sequence: Synthetic oligonucleotide
  Target: LAMA2; (+) strand; PAM type: YTN; PAM sequence: TTT
taaatacttctttcagctat

SEQ ID NO: 317233 - DNA, 20 bp, Artificial Sequence
  Description of Artificial Sequence: Synthetic oligonucleotide
  Target: LAMA2; (+) strand; PAM type: YTN; PAM sequence: TTT
aaatacttctttcagctata

SEQ ID NO: 317234 - DNA, 20 bp, Artificial Sequence
  Description of Artificial Sequence: Synthetic oligonucleotide
  Target: LAMA2; (+) strand; PAM type: YTN; PAM sequence: TTA
aatacttctttcagctatat

SEQ ID NO: 317235 - DNA, 20 bp, Artificial Sequence
  Description of Artificial Sequence: Synthetic oligonucleotide
  Target: LAMA2; (+) strand; PAM type: YTN; PAM sequence: CTT
ctttcagctatatacttctc

SEQ ID NO: 317236 - DNA, 20 bp, Artificial Sequence
  Description of Artificial Sequence: Synthetic oligonucleotide
  Target: LAMA2; (+) strand; PAM type: YTN; PAM sequence: TTC
tttcagctatatacttctct

SEQ ID NO: 317237 - DNA, 20 bp, Artificial Sequence
  Description of Artificial Sequence: Synthetic oligonucleotide
  Target: LAMA2; (+) strand; PAM type: YTN; PAM sequence: CTT
tcagctatatacttctctaa

SEQ ID NO: 317238 - DNA, 20 bp, Artificial Sequence
  Description of Artificial Sequence: Synthetic oligonucleotide
  Target: LAMA2; (+) strand; PAM type: YTN; PAM sequence: TTT
cagctatatacttctctaac

SEQ ID NO: 317239 - DNA, 20 bp, Artificial Sequence
  Description of Artificial Sequence: Synthetic oligonucleotide
  Target: LAMA2; (+) strand; PAM type: YTN; PAM sequence: TTC
agctatatacttctctaact

SEQ ID NO: 317240 - DNA, 20 bp, Artificial Sequence
  Description of Artificial Sequence: Synthetic oligonucleotide
  Target: LAMA2; (+) strand; PAM type: YTN; PAM sequence: CTA
tatacttctctaacttattg

SEQ ID NO: 317241 - DNA, 20 bp, Artificial Sequence
  Description of Artificial Sequence: Synthetic oligonucleotide
  Target: LAMA2; (+) strand; PAM type: YTN; PAM sequence: CTT
ctctaacttattggcttatt

SEQ ID NO: 317242 - DNA, 20 bp, Artificial Sequence
  Description of Artificial Sequence: Synthetic oligonucleotide
  Target: LAMA2; (+) strand; PAM type: YTN; PAM sequence: TTC
tctaacttattggcttatta

SEQ ID NO: 317243 - DNA, 20 bp, Artificial Sequence
  Description of Artificial Sequence: Synthetic oligonucleotide
  Target: LAMA2; (+) strand; PAM type: YTN; PAM sequence: CTC
taacttattggcttattatt

SEQ ID NO: 317244 - DNA, 20 bp, Artificial Sequence
  Description of Artificial Sequence: Synthetic oligonucleotide
  Target: LAMA2; (+) strand; PAM type: YTN; PAM sequence: CTA
acttattggcttattatttg

SEQ ID NO: 317245 - DNA, 20 bp, Artificial Sequence
  Description of Artificial Sequence: Synthetic oligonucleotide
  Target: LAMA2; (+) strand; PAM type: YTN; PAM sequence: CTT
attggcttattatttgattt

SEQ ID NO: 317246 - DNA, 20 bp, Artificial Sequence
  Description of Artificial Sequence: Synthetic oligonucleotide
  Target: LAMA2; (+) strand; PAM type: YTN; PAM sequence: TTA
ttggcttattatttgattta

SEQ ID NO: 317247 - DNA, 20 bp, Artificial Sequence
  Description of Artificial Sequence: Synthetic oligonucleotide
  Target: LAMA2; (+) strand; PAM type: YTN; PAM sequence: TTG
gcttattatttgatttaatt

SEQ ID NO: 317248 - DNA, 20 bp, Artificial Sequence
  Description of Artificial Sequence: Synthetic oligonucleotide
  Target: LAMA2; (+) strand; PAM type: YTN; PAM sequence: CTT
attatttgatttaattgtcc

SEQ ID NO: 317249 - DNA, 20 bp, Artificial Sequence
  Description of Artificial Sequence: Synthetic oligonucleotide
  Target: LAMA2; (+) strand; PAM type: YTN; PAM sequence: TTA
ttatttgatttaattgtcct

SEQ ID NO: 317250 - DNA, 20 bp, Artificial Sequence
  Description of Artificial Sequence: Synthetic oligonucleotide
  Target: LAMA2; (+) strand; PAM type: YTN; PAM sequence: TTA
tttgatttaattgtccttag

SEQ ID NO: 317251 - DNA, 20 bp, Artificial Sequence
  Description of Artificial Sequence: Synthetic oligonucleotide
  Target: LAMA2; (+) strand; PAM type: YTN; PAM sequence: TTT
gatttaattgtccttaggca

SEQ ID NO: 317252 - DNA, 20 bp, Artificial Sequence
  Description of Artificial Sequence: Synthetic oligonucleotide
  Target: LAMA2; (+) strand; PAM type: YTN; PAM sequence: TTG
atttaattgtccttaggcag

SEQ ID NO: 317253 - DNA, 20 bp, Artificial Sequence
  Description of Artificial Sequence: Synthetic oligonucleotide
  Target: LAMA2; (+) strand; PAM type: YTN; PAM sequence: TTT
aattgtccttaggcagtgtt

SEQ ID NO: 317254 - DNA, 20 bp, Artificial Sequence
  Description of Artificial Sequence: Synthetic oligonucleotide
  Target: LAMA2; (+) strand; PAM type: YTN; PAM sequence: TTA
attgtccttaggcagtgtta

SEQ ID NO: 317255 - DNA, 20 bp, Artificial Sequence
  Description of Artificial Sequence: Synthetic oligonucleotide
  Target: LAMA2; (+) strand; PAM type: YTN; PAM sequence: TTG
tccttaggcagtgttaatta

SEQ ID NO: 317256 - DNA, 20 bp, Artificial Sequence
  Description of Artificial Sequence: Synthetic oligonucleotide
  Target: LAMA2; (+) strand; PAM type: YTN; PAM sequence: CTT
aggcagtgttaattatgaga

SEQ ID NO: 317257 - DNA, 20 bp, Artificial Sequence
  Description of Artificial Sequence: Synthetic oligonucleotide
  Target: LAMA2; (+) strand; PAM type: YTN; PAM sequence: TTA
ggcagtgttaattatgagag

SEQ ID NO: 317258 - DNA, 20 bp, Artificial Sequence
  Description of Artificial Sequence: Synthetic oligonucleotide
  Target: LAMA2; (+) strand; PAM type: YTN; PAM sequence: TTA
attatgagagtttgccgagt

SEQ ID NO: 317259 - DNA, 20 bp, Artificial Sequence
  Description of Artificial Sequence: Synthetic oligonucleotide
  Target: LAMA2; (+) strand; PAM type: YTN; PAM sequence: TTA
tgagagtttgccgagtttct

SEQ ID NO: 317260 - DNA, 20 bp, Artificial Sequence
  Description of Artificial Sequence: Synthetic oligonucleotide
  Target: LAMA2; (+) strand; PAM type: YTN; PAM sequence: TTT
gccgagtttcttcttgggaa

SEQ ID NO: 317261 - DNA, 20 bp, Artificial Sequence
  Description of Artificial Sequence: Synthetic oligonucleotide
  Target: LAMA2; (+) strand; PAM type: YTN; PAM sequence: TTG
ccgagtttcttcttgggaat

SEQ ID NO: 317262 - DNA, 20 bp, Artificial Sequence
  Description of Artificial Sequence: Synthetic oligonucleotide
  Target: LAMA2; (+) strand; PAM type: YTN; PAM sequence: TTT
cttcttgggaatttgagaat

SEQ ID NO: 317263 - DNA, 20 bp, Artificial Sequence
  Description of Artificial Sequence: Synthetic oligonucleotide
  Target: LAMA2; (+) strand; PAM type: YTN; PAM sequence: TTC
ttcttgggaatttgagaata

SEQ ID NO: 317264 - DNA, 20 bp, Artificial Sequence
  Description of Artificial Sequence: Synthetic oligonucleotide
  Target: LAMA2; (+) strand; PAM type: YTN; PAM sequence: CTT
cttgggaatttgagaataaa

SEQ ID NO: 317265 - DNA, 20 bp, Artificial Sequence
  Description of Artificial Sequence: Synthetic oligonucleotide
  Target: LAMA2; (+) strand; PAM type: YTN; PAM sequence: TTC
ttgggaatttgagaataaag

SEQ ID NO: 317266 - DNA, 20 bp, Artificial Sequence
  Description of Artificial Sequence: Synthetic oligonucleotide
  Target: LAMA2; (+) strand; PAM type: YTN; PAM sequence: CTT
gggaatttgagaataaagga

SEQ ID NO: 317267 - DNA, 20 bp, Artificial Sequence
  Description of Artificial Sequence: Synthetic oligonucleotide
  Target: LAMA2; (+) strand; PAM type: YTN; PAM sequence: TTG
ggaatttgagaataaaggat

SEQ ID NO: 317268 - DNA, 20 bp, Artificial Sequence
  Description of Artificial Sequence: Synthetic oligonucleotide
  Target: LAMA2; (+) strand; PAM type: YTN; PAM sequence: TTT
gagaataaaggatgcgggaa

SEQ ID NO: 317269 - DNA, 20 bp, Artificial Sequence
  Description of Artificial Sequence: Synthetic oligonucleotide
  Target: LAMA2; (+) strand; PAM type: YTN; PAM sequence: TTG
agaataaaggatgcgggaaa

SEQ ID NO: 317270 - DNA, 20 bp, Artificial Sequence
  Description of Artificial Sequence: Synthetic oligonucleotide
  Target: LAMA2; (+) strand; PAM type: YTN; PAM sequence: CTG
ttttttcaatgtactgaagg

SEQ ID NO: 317271 - DNA, 20 bp, Artificial Sequence
  Description of Artificial Sequence: Synthetic oligonucleotide
  Target: LAMA2; (+) strand; PAM type: YTN; PAM sequence: TTT
tttcaatgtactgaaggcat

SEQ ID NO: 317272 - DNA, 20 bp, Artificial Sequence
  Description of Artificial Sequence: Synthetic oligonucleotide
  Target: LAMA2; (+) strand; PAM type: YTN; PAM sequence: TTT
ttcaatgtactgaaggcatt

SEQ ID NO: 317273 - DNA, 20 bp, Artificial Sequence
  Description of Artificial Sequence: Synthetic oligonucleotide
  Target: LAMA2; (+) strand; PAM type: YTN; PAM sequence: TTT
tcaatgtactgaaggcattt

SEQ ID NO: 317274 - DNA, 20 bp, Artificial Sequence
  Description of Artificial Sequence: Synthetic oligonucleotide
  Target: LAMA2; (+) strand; PAM type: YTN; PAM sequence: TTT
caatgtactgaaggcatttc

SEQ ID NO: 317275 - DNA, 20 bp, Artificial Sequence
  Description of Artificial Sequence: Synthetic oligonucleotide
  Target: LAMA2; (+) strand; PAM type: YTN; PAM sequence: TTC
aatgtactgaaggcatttca

SEQ ID NO: 317276 - DNA, 20 bp, Artificial Sequence
  Description of Artificial Sequence: Synthetic oligonucleotide
  Target: LAMA2; (+) strand; PAM type: YTN; PAM sequence: CTG
aaggcatttcagattaccag

SEQ ID NO: 317277 - DNA, 20 bp, Artificial Sequence
  Description of Artificial Sequence: Synthetic oligonucleotide
  Target: LAMA2; (+) strand; PAM type: YTN; PAM sequence: TTT
cagattaccagaagaatcac

SEQ ID NO: 317278 - DNA, 20 bp, Artificial Sequence
  Description of Artificial Sequence: Synthetic oligonucleotide
  Target: LAMA2; (+) strand; PAM type: YTN; PAM sequence: TTC
agattaccagaagaatcaca

SEQ ID NO: 317279 - DNA, 20 bp, Artificial Sequence
  Description of Artificial Sequence: Synthetic oligonucleotide
  Target: LAMA2; (+) strand; PAM type: YTN; PAM sequence: TTA
ccagaagaatcacagagaca

SEQ ID NO: 317280 - DNA, 20 bp, Artificial Sequence
  Description of Artificial Sequence: Synthetic oligonucleotide
  Target: LAMA2; (+) strand; PAM type: YTN; PAM sequence: TTT
agccatagggttaaacctgt

SEQ ID NO: 317281 - DNA, 20 bp, Artificial Sequence
  Description of Artificial Sequence: Synthetic oligonucleotide
  Target: LAMA2; (+) strand; PAM type: YTN; PAM sequence: TTA
gccatagggttaaacctgtc

SEQ ID NO: 317282 - DNA, 20 bp, Artificial Sequence
  Description of Artificial Sequence: Synthetic oligonucleotide
  Target: LAMA2; (+) strand; PAM type: YTN; PAM sequence: TTA
aacctgtcactttacctacc

SEQ ID NO: 317283 - DNA, 20 bp, Artificial Sequence
  Description of Artificial Sequence: Synthetic oligonucleotide
  Target: LAMA2; (+) strand; PAM type: YTN; PAM sequence: CTG
tcactttacctaccccacaa

SEQ ID NO: 317284 - DNA, 20 bp, Artificial Sequence
  Description of Artificial Sequence: Synthetic oligonucleotide
  Target: LAMA2; (+) strand; PAM type: YTN; PAM sequence: CTT
tacctaccccacaaataagt

SEQ ID NO: 317285 - DNA, 20 bp, Artificial Sequence
  Description of Artificial Sequence: Synthetic oligonucleotide
  Target: LAMA2; (+) strand; PAM type: YTN; PAM sequence: TTT
acctaccccacaaataagta

SEQ ID NO: 317286 - DNA, 20 bp, Artificial Sequence
  Description of Artificial Sequence: Synthetic oligonucleotide
  Target: LAMA2; (+) strand; PAM type: YTN; PAM sequence: TTA
cctaccccacaaataagtaa

SEQ ID NO: 317287 - DNA, 20 bp, Artificial Sequence
  Description of Artificial Sequence: Synthetic oligonucleotide
  Target: LAMA2; (+) strand; PAM type: YTN; PAM sequence: CTA
ccccacaaataagtaactat

SEQ ID NO: 317288 - DNA, 20 bp, Artificial Sequence
  Description of Artificial Sequence: Synthetic oligonucleotide
  Target: LAMA2; (+) strand; PAM type: YTN; PAM sequence: CTA
tggcaactcactgaaagtgc

SEQ ID NO: 317289 - DNA, 20 bp, Artificial Sequence
  Description of Artificial Sequence: Synthetic oligonucleotide
  Target: LAMA2; (+) strand; PAM type: YTN; PAM sequence: CTC
actgaaagtgcttagctacc

SEQ ID NO: 317290 - DNA, 20 bp, Artificial Sequence
  Description of Artificial Sequence: Synthetic oligonucleotide
  Target: LAMA2; (+) strand; PAM type: YTN; PAM sequence: CTG
aaagtgcttagctaccatgg

SEQ ID NO: 317291 - DNA, 20 bp, Artificial Sequence
  Description of Artificial Sequence: Synthetic oligonucleotide
  Target: LAMA2; (+) strand; PAM type: YTN; PAM sequence: CTT
agctaccatgggagtggatg

SEQ ID NO: 317292 - DNA, 20 bp, Artificial Sequence
  Description of Artificial Sequence: Synthetic oligonucleotide
  Target: LAMA2; (+) strand; PAM type: YTN; PAM sequence: TTA
gctaccatgggagtggatgg

SEQ ID NO: 317293 - DNA, 20 bp, Artificial Sequence
  Description of Artificial Sequence: Synthetic oligonucleotide
  Target: LAMA2; (+) strand; PAM type: YTN; PAM sequence: CTA
ccatgggagtggatggagtt

SEQ ID NO: 317294 - DNA, 20 bp, Artificial Sequence
  Description of Artificial Sequence: Synthetic oligonucleotide
  Target: LAMA2; (+) strand; PAM type: YTN; PAM sequence: TTC
gtgctttgtggggacaatgc

SEQ ID NO: 317295 - DNA, 20 bp, Artificial Sequence
  Description of Artificial Sequence: Synthetic oligonucleotide
  Target: LAMA2; (+) strand; PAM type: YTN; PAM sequence: CTT
tgtggggacaatgctgtggg

SEQ ID NO: 317296 - DNA, 20 bp, Artificial Sequence
  Description of Artificial Sequence: Synthetic oligonucleotide
  Target: LAMA2; (+) strand; PAM type: YTN; PAM sequence: TTT
gtggggacaatgctgtggga

SEQ ID NO: 317297 - DNA, 20 bp, Artificial Sequence
  Description of Artificial Sequence: Synthetic oligonucleotide
  Target: LAMA2; (+) strand; PAM type: YTN; PAM sequence: TTG
tggggacaatgctgtgggac

SEQ ID NO: 317298 - DNA, 20 bp, Artificial Sequence
  Description of Artificial Sequence: Synthetic oligonucleotide
  Target: LAMA2; (+) strand; PAM type: YTN; PAM sequence: CTG
tgggacctctatgcccccat

SEQ ID NO: 317299 - DNA, 20 bp, Artificial Sequence
  Description of Artificial Sequence: Synthetic oligonucleotide
  Target: LAMA2; (+) strand; PAM type: YTN; PAM sequence: CTC
tatgcccccatccataaggg

SEQ ID NO: 317300 - DNA, 20 bp, Artificial Sequence
  Description of Artificial Sequence: Synthetic oligonucleotide
  Target: LAMA2; (+) strand; PAM type: YTN; PAM sequence: CTA
tgcccccatccataagggac

SEQ ID NO: 317301 - DNA, 20 bp, Artificial Sequence
  Description of Artificial Sequence: Synthetic oligonucleotide
  Target: LAMA2; (+) strand; PAM type: YTN; PAM sequence: CTG
ggaattgccttctagcagag

SEQ ID NO: 317302 - DNA, 20 bp, Artificial Sequence
  Description of Artificial Sequence: Synthetic oligonucleotide
  Target: LAMA2; (+) strand; PAM type: YTN; PAM sequence: TTG
ccttctagcagagaggccaa

SEQ ID NO: 317303 - DNA, 20 bp, Artificial Sequence
  Description of Artificial Sequence: Synthetic oligonucleotide
  Target: LAMA2; (+) strand; PAM type: YTN; PAM sequence: CTT
ctagcagagaggccaactca

SEQ ID NO: 317304 - DNA, 20 bp, Artificial Sequence
  Description of Artificial Sequence: Synthetic oligonucleotide
  Target: LAMA2; (+) strand; PAM type: YTN; PAM sequence: TTC
tagcagagaggccaactcac

SEQ ID NO: 317305 - DNA, 20 bp, Artificial Sequence
  Description of Artificial Sequence: Synthetic oligonucleotide
  Target: LAMA2; (+) strand; PAM type: YTN; PAM sequence: CTA
gcagagaggccaactcacat

SEQ ID NO: 317306 - DNA, 20 bp, Artificial Sequence
  Description of Artificial Sequence: Synthetic oligonucleotide
  Target: LAMA2; (+) strand; PAM type: YTN; PAM sequence: CTC
acatttcaaataagtatttt

SEQ ID NO: 317307 - DNA, 20 bp, Artificial Sequence
  Description of Artificial Sequence: Synthetic oligonucleotide
  Target: LAMA2; (+) strand; PAM type: YTN; PAM sequence: TTT
caaataagtatttttccctc

SEQ ID NO: 317308 - DNA, 20 bp, Artificial Sequence
  Description of Artificial Sequence: Synthetic oligonucleotide
  Target: LAMA2; (+) strand; PAM type: YTN; PAM sequence: TTC
aaataagtatttttccctcc

SEQ ID NO: 317309 - DNA, 20 bp, Artificial Sequence
  Description of Artificial Sequence: Synthetic oligonucleotide
  Target: LAMA2; (+) strand; PAM type: YTN; PAM sequence: TTT
ttccctcctcaactgctttt

SEQ ID NO: 317310 - DNA, 20 bp, Artificial Sequence
  Description of Artificial Sequence: Synthetic oligonucleotide
  Target: LAMA2; (+) strand; PAM type: YTN; PAM sequence: TTT
tccctcctcaactgcttttc

SEQ ID NO: 317311 - DNA, 20 bp, Artificial Sequence
  Description of Artificial Sequence: Synthetic oligonucleotide
  Target: LAMA2; (+) strand; PAM type: YTN; PAM sequence: TTT
ccctcctcaactgcttttct

SEQ ID NO: 317312 - DNA, 20 bp, Artificial Sequence
  Description of Artificial Sequence: Synthetic oligonucleotide
  Target: LAMA2; (+) strand; PAM type: YTN; PAM sequence: TTC
cctcctcaactgcttttcta

SEQ ID NO: 317313 - DNA, 20 bp, Artificial Sequence
  Description of Artificial Sequence: Synthetic oligonucleotide
  Target: LAMA2; (+) strand; PAM type: YTN; PAM sequence: CTC
ctcaactgcttttctaagct

SEQ ID NO: 317314 - DNA, 20 bp, Artificial Sequence
  Description of Artificial Sequence: Synthetic oligonucleotide
  Target: LAMA2; (+) strand; PAM type: YTN; PAM sequence: CTC
aactgcttttctaagctttg

SEQ ID NO: 317315 - DNA, 20 bp, Artificial Sequence
  Description of Artificial Sequence: Synthetic oligonucleotide
  Target: LAMA2; (+) strand; PAM type: YTN; PAM sequence: CTG
cttttctaagctttgcacat

SEQ ID NO: 317316 - DNA, 20 bp, Artificial Sequence
  Description of Artificial Sequence: Synthetic oligonucleotide
  Target: LAMA2; (+) strand; PAM type: YTN; PAM sequence: CTT
ttctaagctttgcacattaa

SEQ ID NO: 317317 - DNA, 20 bp, Artificial Sequence
  Description of Artificial Sequence: Synthetic oligonucleotide
  Target: LAMA2; (+) strand; PAM type: YTN; PAM sequence: TTT
tctaagctttgcacattaac

SEQ ID NO: 317318 - DNA, 20 bp, Artificial Sequence
  Description of Artificial Sequence: Synthetic oligonucleotide
  Target: LAMA2; (+) strand; PAM type: YTN; PAM sequence: TTT
ctaagctttgcacattaaca

SEQ ID NO: 317319 - DNA, 20 bp, Artificial Sequence
  Description of Artificial Sequence: Synthetic oligonucleotide
  Target: LAMA2; (+) strand; PAM type: YTN; PAM sequence: TTC
taagctttgcacattaacac

SEQ ID NO: 317320 - DNA, 20 bp, Artificial Sequence
  Description of Artificial Sequence: Synthetic oligonucleotide
  Target: LAMA2; (+) strand; PAM type: YTN; PAM sequence: CTA
agctttgcacattaacactg

SEQ ID NO: 317321 - DNA, 20 bp, Artificial Sequence
  Description of Artificial Sequence: Synthetic oligonucleotide
  Target: LAMA2; (+) strand; PAM type: YTN; PAM sequence: CTT
tgcacattaacactgaccta

SEQ ID NO: 317322 - DNA, 20 bp, Artificial Sequence
  Description of Artificial Sequence: Synthetic oligonucleotide
  Target: LAMA2; (+) strand; PAM type: YTN; PAM sequence: TTT
gcacattaacactgacctag

SEQ ID NO: 317323 - DNA, 20 bp, Artificial Sequence
  Description of Artificial Sequence: Synthetic oligonucleotide
  Target: LAMA2; (+) strand; PAM type: YTN; PAM sequence: TTG
cacattaacactgacctagt

SEQ ID NO: 317324 - DNA, 20 bp, Artificial Sequence
  Description of Artificial Sequence: Synthetic oligonucleotide
  Target: LAMA2; (+) strand; PAM type: YTN; PAM sequence: TTA
acactgacctagtgcaccat

SEQ ID NO: 317325 - DNA, 20 bp, Artificial Sequence
  Description of Artificial Sequence: Synthetic oligonucleotide
  Target: LAMA2; (+) strand; PAM type: YTN; PAM sequence: CTG
acctagtgcaccatttaaaa

SEQ ID NO: 317326 - DNA, 20 bp, Artificial Sequence
  Description of Artificial Sequence: Synthetic oligonucleotide
  Target: LAMA2; (+) strand; PAM type: YTN; PAM sequence: CTA
gtgcaccatttaaaagtcct

SEQ ID NO: 317327 - DNA, 20 bp, Artificial Sequence
  Description of Artificial Sequence: Synthetic oligonucleotide
  Target: LAMA2; (+) strand; PAM type: YTN; PAM sequence: TTT
aaaagtcctaaatatatcac

SEQ ID NO: 317328 - DNA, 20 bp, Artificial Sequence
  Description of Artificial Sequence: Synthetic oligonucleotide
  Target: LAMA2; (+) strand; PAM type: YTN; PAM sequence: TTA
aaagtcctaaatatatcaca

SEQ ID NO: 317329 - DNA, 20 bp, Artificial Sequence
  Description of Artificial Sequence: Synthetic oligonucleotide
  Target: LAMA2; (+) strand; PAM type: YTN; PAM sequence: CTA
aatatatcacacagtcgcca

SEQ ID NO: 317330 - DNA, 20 bp, Artificial Sequence
  Description of Artificial Sequence: Synthetic oligonucleotide
  Target: LAMA2; (+) strand; PAM type: YTN; PAM sequence: CTG
tgcacagtatgctagttggc

SEQ ID NO: 317331 - DNA, 20 bp, Artificial Sequence
  Description of Artificial Sequence: Synthetic oligonucleotide
  Target: LAMA2; (+) strand; PAM type: YTN; PAM sequence: CTA
gttggccttagagtaataca

SEQ ID NO: 317332 - DNA, 20 bp, Artificial Sequence
  Description of Artificial Sequence: Synthetic oligonucleotide
  Target: LAMA2; (+) strand; PAM type: YTN; PAM sequence: TTG
gccttagagtaatacagggt

SEQ ID NO: 317333 - DNA, 20 bp, Artificial Sequence
  Description of Artificial Sequence: Synthetic oligonucleotide
  Target: LAMA2; (+) strand; PAM type: YTN; PAM sequence: CTT
agagtaatacagggtacacc

SEQ ID NO: 317334 - DNA, 20 bp, Artificial Sequence
  Description of Artificial Sequence: Synthetic oligonucleotide
  Target: LAMA2; (+) strand; PAM type: YTN; PAM sequence: TTA
gagtaatacagggtacacca

SEQ ID NO: 317335 - DNA, 20 bp, Artificial Sequence
  Description of Artificial Sequence: Synthetic oligonucleotide
  Target: LAMA2; (+) strand; PAM type: YTN; PAM sequence: TTT
atgtccagttaaccaggtga

SEQ ID NO: 317336 - DNA, 20 bp, Artificial Sequence
  Description of Artificial Sequence: Synthetic oligonucleotide
  Target: LAMA2; (+) strand; PAM type: YTN; PAM sequence: TTA
tgtccagttaaccaggtgac

SEQ ID NO: 317337 - DNA, 20 bp, Artificial Sequence
  Description of Artificial Sequence: Synthetic oligonucleotide
  Target: LAMA2; (+) strand; PAM type: YTN; PAM sequence: TTA
accaggtgaccctctagttg

SEQ ID NO: 317338 - DNA, 20 bp, Artificial Sequence
  Description of Artificial Sequence: Synthetic oligonucleotide
  Target: LAMA2; (+) strand; PAM type: YTN; PAM sequence: CTC
tagttgctttattaagcaca

SEQ ID NO: 317339 - DNA, 20 bp, Artificial Sequence
  Description of Artificial Sequence: Synthetic oligonucleotide
  Target: LAMA2; (+) strand; PAM type: YTN; PAM sequence: CTA
gttgctttattaagcacagg

SEQ ID NO: 317340 - DNA, 20 bp, Artificial Sequence
  Description of Artificial Sequence: Synthetic oligonucleotide
  Target: LAMA2; (+) strand; PAM type: YTN; PAM sequence: TTG
ctttattaagcacaggcttg

SEQ ID NO: 317341 - DNA, 20 bp, Artificial Sequence
  Description of Artificial Sequence: Synthetic oligonucleotide
  Target: LAMA2; (+) strand; PAM type: YTN; PAM sequence: CTT
tattaagcacaggcttgact

SEQ ID NO: 317342 - DNA, 20 bp, Artificial Sequence
  Description of Artificial Sequence: Synthetic oligonucleotide
  Target: LAMA2; (+) strand; PAM type: YTN; PAM sequence: TTT
attaagcacaggcttgactg

SEQ ID NO: 317343 - DNA, 20 bp, Artificial Sequence
  Description of Artificial Sequence: Synthetic oligonucleotide
  Target: LAMA2; (+) strand; PAM type: YTN; PAM sequence: TTA
ttaagcacaggcttgactgt

SEQ ID NO: 317344 - DNA, 20 bp, Artificial Sequence
  Description of Artificial Sequence: Synthetic oligonucleotide
  Target: LAMA2; (+) strand; PAM type: YTN; PAM sequence: TTA
agcacaggcttgactgtcaa

SEQ ID NO: 317345 - DNA, 20 bp, Artificial Sequence
  Description of Artificial Sequence: Synthetic oligonucleotide
  Target: LAMA2; (+) strand; PAM type: YTN; PAM sequence: CTT
gactgtcaaacaggtcacaa

SEQ ID NO: 317346 - DNA, 20 bp, Artificial Sequence
  Description of Artificial Sequence: Synthetic oligonucleotide
  Target: LAMA2; (+) strand; PAM type: YTN; PAM sequence: TTG
actgtcaaacaggtcacaag

SEQ ID NO: 317347 - DNA, 20 bp, Artificial Sequence
  Description of Artificial Sequence: Synthetic oligonucleotide
  Target: LAMA2; (+) strand; PAM type: YTN; PAM sequence: CTG
tcaaacaggtcacaaggagg

SEQ ID NO: 317348 - DNA, 20 bp, Artificial Sequence
  Description of Artificial Sequence: Synthetic oligonucleotide
  Target: LAMA2; (+) strand; PAM type: YTN; PAM sequence: CTT
gcatcgtatgaaaagagttg

SEQ ID NO: 317349 - DNA, 20 bp, Artificial Sequence
  Description of Artificial Sequence: Synthetic oligonucleotide
  Target: LAMA2; (+) strand; PAM type: YTN; PAM sequence: TTG
catcgtatgaaaagagttgc

SEQ ID NO: 317350 - DNA, 20 bp, Artificial Sequence
  Description of Artificial Sequence: Synthetic oligonucleotide
  Target: LAMA2; (+) strand; PAM type: YTN; PAM sequence: TTG
cttgaaatcacagaataccc

SEQ ID NO: 317351 - DNA, 20 bp, Artificial Sequence
  Description of Artificial Sequence: Synthetic oligonucleotide
  Target: LAMA2; (+) strand; PAM type: YTN; PAM sequence: CTT
gaaatcacagaataccctct

SEQ ID NO: 317352 - DNA, 20 bp, Artificial Sequence
  Description of Artificial Sequence: Synthetic oligonucleotide
  Target: LAMA2; (+) strand; PAM type: YTN; PAM sequence: TTG
aaatcacagaataccctcta

SEQ ID NO: 317353 - DNA, 20 bp, Artificial Sequence
  Description of Artificial Sequence: Synthetic oligonucleotide
  Target: LAMA2; (+) strand; PAM type: YTN; PAM sequence: CTC
tattaattgctaaaatccaa

SEQ ID NO: 317354 - DNA, 20 bp, Artificial Sequence
  Description of Artificial Sequence: Synthetic oligonucleotide
  Target: LAMA2; (+) strand; PAM type: YTN; PAM sequence: CTA
ttaattgctaaaatccaatt

SEQ ID NO: 317355 - DNA, 20 bp, Artificial Sequence
  Description of Artificial Sequence: Synthetic oligonucleotide
  Target: LAMA2; (+) strand; PAM type: YTN; PAM sequence: TTA
attgctaaaatccaatttcc

SEQ ID NO: 317356 - DNA, 20 bp, Artificial Sequence
  Description of Artificial Sequence: Synthetic oligonucleotide
  Target: LAMA2; (+) strand; PAM type: YTN; PAM sequence: TTG
ctaaaatccaatttccacct

SEQ ID NO: 317357 - DNA, 20 bp, Artificial Sequence
  Description of Artificial Sequence: Synthetic oligonucleotide
  Target: LAMA2; (+) strand; PAM type: YTN; PAM sequence: CTA
aaatccaatttccacctgaa

SEQ ID NO: 317358 - DNA, 20 bp, Artificial Sequence
  Description of Artificial Sequence: Synthetic oligonucleotide
  Target: LAMA2; (+) strand; PAM type: YTN; PAM sequence: TTT
ccacctgaagacatgcctcc

SEQ ID NO: 317359 - DNA, 20 bp, Artificial Sequence
  Description of Artificial Sequence: Synthetic oligonucleotide
  Target: LAMA2; (+) strand; PAM type: YTN; PAM sequence: TTC
cacctgaagacatgcctcca

SEQ ID NO: 317360 - DNA, 20 bp, Artificial Sequence
  Description of Artificial Sequence: Synthetic oligonucleotide
  Target: LAMA2; (+) strand; PAM type: YTN; PAM sequence: CTG
aagacatgcctccatgactc

SEQ ID NO: 317361 - DNA, 20 bp, Artificial Sequence
  Description of Artificial Sequence: Synthetic oligonucleotide
  Target: LAMA2; (+) strand; PAM type: YTN; PAM sequence: CTC
catgactcgtgagaaaaatc

SEQ ID NO: 317362 - DNA, 20 bp, Artificial Sequence
  Description of Artificial Sequence: Synthetic oligonucleotide
  Target: LAMA2; (+) strand; PAM type: YTN; PAM sequence: CTC
gtgagaaaaatcaattattt

SEQ ID NO: 317363 - DNA, 20 bp, Artificial Sequence
  Description of Artificial Sequence: Synthetic oligonucleotide
  Target: LAMA2; (+) strand; PAM type: YTN; PAM sequence: TTA
tttaggtaaataggatctgc

SEQ ID NO: 317364 - DNA, 20 bp, Artificial Sequence
  Description of Artificial Sequence: Synthetic oligonucleotide
  Target: LAMA2; (+) strand; PAM type: YTN; PAM sequence: TTT
aggtaaataggatctgcaac

SEQ ID NO: 317365 - DNA, 20 bp, Artificial Sequence
  Description of Artificial Sequence: Synthetic oligonucleotide
  Target: LAMA2; (+) strand; PAM type: YTN; PAM sequence: TTA
ggtaaataggatctgcaact

SEQ ID NO: 317366 - DNA, 20 bp, Artificial Sequence
  Description of Artificial Sequence: Synthetic oligonucleotide
  Target: LAMA2; (+) strand; PAM type: YTN; PAM sequence: CTG
caactcaaacactcagacct

SEQ ID NO: 317367 - DNA, 20 bp, Artificial Sequence
  Description of Artificial Sequence: Synthetic oligonucleotide
  Target: LAMA2; (+) strand; PAM type: YTN; PAM sequence: CTC
aaacactcagacctattaga

SEQ ID NO: 317368 - DNA, 20 bp, Artificial Sequence
  Description of Artificial Sequence: Synthetic oligonucleotide
  Target: LAMA2; (+) strand; PAM type: YTN; PAM sequence: CTC
agacctattagagtatctag

SEQ ID NO: 317369 - DNA, 20 bp, Artificial Sequence
  Description of Artificial Sequence: Synthetic oligonucleotide
  Target: LAMA2; (+) strand; PAM type: YTN; PAM sequence: CTA
ttagagtatctagcagcatg

SEQ ID NO: 317370 - DNA, 20 bp, Artificial Sequence
  Description of Artificial Sequence: Synthetic oligonucleotide
  Target: LAMA2; (+) strand; PAM type: YTN; PAM sequence: TTA
gagtatctagcagcatgcca

SEQ ID NO: 317371 - DNA, 20 bp, Artificial Sequence
  Description of Artificial Sequence: Synthetic oligonucleotide
  Target: LAMA2; (+) strand; PAM type: YTN; PAM sequence: CTA
gcagcatgccaggagataga

SEQ ID NO: 317372 - DNA, 20 bp, Artificial Sequence
  Description of Artificial Sequence: Synthetic oligonucleotide
  Target: LAMA2; (+) strand; PAM type: YTN; PAM sequence: CTG
agctgcaagataaatatgga

SEQ ID NO: 317373 - DNA, 20 bp, Artificial Sequence
  Description of Artificial Sequence: Synthetic oligonucleotide
  Target: LAMA2; (+) strand; PAM type: YTN; PAM sequence: CTG
caagataaatatggaaccat

SEQ ID NO: 317374 - DNA, 20 bp, Artificial Sequence
  Description of Artificial Sequence: Synthetic oligonucleotide
  Target: LAMA2; (+) strand; PAM type: YTN; PAM sequence: CTT
gtggaatataaatttcagtt

SEQ ID NO: 317375 - DNA, 20 bp, Artificial Sequence
  Description of Artificial Sequence: Synthetic oligonucleotide
  Target: LAMA2; (+) strand; PAM type: YTN; PAM sequence: TTG
tggaatataaatttcagtta

SEQ ID NO: 317376 - DNA, 20 bp, Artificial Sequence
  Description of Artificial Sequence: Synthetic oligonucleotide
  Target: LAMA2; (+) strand; PAM type: YTN; PAM sequence: TTT
cagttaaaggttttaaggag

SEQ ID NO: 317377 - DNA, 20 bp, Artificial Sequence
  Description of Artificial Sequence: Synthetic oligonucleotide
  Target: LAMA2; (+) strand; PAM type: YTN; PAM sequence: TTC
agttaaaggttttaaggagt

SEQ ID NO: 317378 - DNA, 20 bp, Artificial Sequence
  Description of Artificial Sequence: Synthetic oligonucleotide
  Target: LAMA2; (+) strand; PAM type: YTN; PAM sequence: TTA
aaggttttaaggagtatata

SEQ ID NO: 317379 - DNA, 20 bp, Artificial Sequence
  Description of Artificial Sequence: Synthetic oligonucleotide
  Target: LAMA2; (+) strand; PAM type: YTN; PAM sequence: TTT
taaggagtatataataagga

SEQ ID NO: 317380 - DNA, 20 bp, Artificial Sequence
  Description of Artificial Sequence: Synthetic oligonucleotide
  Target: LAMA2; (+) strand; PAM type: YTN; PAM sequence: TTT
aaggagtatataataaggaa

SEQ ID NO: 317381 - DNA, 20 bp, Artificial Sequence
  Description of Artificial Sequence: Synthetic oligonucleotide
  Target: LAMA2; (+) strand; PAM type: YTN; PAM sequence: TTA
aggagtatataataaggaaa

SEQ ID NO: 317382 - DNA, 20 bp, Artificial Sequence
  Description of Artificial Sequence: Synthetic oligonucleotide
  Target: LAMA2; (+) strand; PAM type: YTN; PAM sequence: TTG
ttttatattaaaatgtattc

SEQ ID NO: 317383 - DNA, 20 bp, Artificial Sequence
  Description of Artificial Sequence: Synthetic oligonucleotide
  Target: LAMA2; (+) strand; PAM type: YTN; PAM sequence: TTT
tatattaaaatgtattcaat

SEQ ID NO: 317384 - DNA, 20 bp, Artificial Sequence
  Description of Artificial Sequence: Synthetic oligonucleotide
  Target: LAMA2; (+) strand; PAM type: YTN; PAM sequence: TTT
atattaaaatgtattcaatt

SEQ ID NO: 317385 - DNA, 20 bp, Artificial Sequence
  Description of Artificial Sequence: Synthetic oligonucleotide
  Target: LAMA2; (+) strand; PAM type: YTN; PAM sequence: TTA
tattaaaatgtattcaatta

SEQ ID NO: 317386 - DNA, 20 bp, Artificial Sequence
  Description of Artificial Sequence: Synthetic oligonucleotide
  Target: LAMA2; (+) strand; PAM type: YTN; PAM sequence: TTA
aaatgtattcaattatatta

SEQ ID NO: 317387 - DNA, 20 bp, Artificial Sequence
  Description of Artificial Sequence: Synthetic oligonucleotide
  Target: LAMA2; (+) strand; PAM type: YTN; PAM sequence: TTC
aattatattatgggatggaa

SEQ ID NO: 317388 - DNA, 20 bp, Artificial Sequence
  Description of Artificial Sequence: Synthetic oligonucleotide
  Target: LAMA2; (+) strand; PAM type: YTN; PAM sequence: TTA
tattatgggatggaactgaa

SEQ ID NO: 317389 - DNA, 20 bp, Artificial Sequence
  Description of Artificial Sequence: Synthetic oligonucleotide
  Target: LAMA2; (+) strand; PAM type: YTN; PAM sequence: TTA
tgggatggaactgaaagttc

SEQ ID NO: 317390 - DNA, 20 bp, Artificial Sequence
  Description of Artificial Sequence: Synthetic oligonucleotide
  Target: LAMA2; (+) strand; PAM type: YTN; PAM sequence: CTG
aaagttcacatgcagttttc

SEQ ID NO: 317391 - DNA, 20 bp, Artificial Sequence
  Description of Artificial Sequence: Synthetic oligonucleotide
  Target: LAMA2; (+) strand; PAM type: YTN; PAM sequence: TTC
acatgcagttttcagatgtg

SEQ ID NO: 317392 - DNA, 20 bp, Artificial Sequence
  Description of Artificial Sequence: Synthetic oligonucleotide
  Target: LAMA2; (+) strand; PAM type: YTN; PAM sequence: TTT
tcagatgtgtcccccaaagt

SEQ ID NO: 317393 - DNA, 20 bp, Artificial Sequence
  Description of Artificial Sequence: Synthetic oligonucleotide
  Target: LAMA2; (+) strand; PAM type: YTN; PAM sequence: TTT
cagatgtgtcccccaaagtt

SEQ ID NO: 317394 - DNA, 20 bp, Artificial Sequence
  Description of Artificial Sequence: Synthetic oligonucleotide
  Target: LAMA2; (+) strand; PAM type: YTN; PAM sequence: TTC
agatgtgtcccccaaagtta

SEQ ID NO: 317395 - DNA, 20 bp, Artificial Sequence
  Description of Artificial Sequence: Synthetic oligonucleotide
  Target: LAMA2; (+) strand; PAM type: YTN; PAM sequence: TTA
atatatttcctgggtactca

SEQ ID NO: 317396 - DNA, 20 bp, Artificial Sequence
  Description of Artificial Sequence: Synthetic oligonucleotide
  Target: LAMA2; (+) strand; PAM type: YTN; PAM sequence: TTT
cctgggtactcattcacact

SEQ ID NO: 317397 - DNA, 20 bp, Artificial Sequence
  Description of Artificial Sequence: Synthetic oligonucleotide
  Target: LAMA2; (+) strand; PAM type: YTN; PAM sequence: TTC
ctgggtactcattcacactc

SEQ ID NO: 317398 - DNA, 20 bp, Artificial Sequence
  Description of Artificial Sequence: Synthetic oligonucleotide
  Target: LAMA2; (+) strand; PAM type: YTN; PAM sequence: CTG
ggtactcattcacactcttc

SEQ ID NO: 317399 - DNA, 20 bp, Artificial Sequence
  Description of Artificial Sequence: Synthetic oligonucleotide
  Target: LAMA2; (+) strand; PAM type: YTN; PAM sequence: CTC
attcacactcttctgccaat

SEQ ID NO: 317400 - DNA, 20 bp, Artificial Sequence
  Description of Artificial Sequence: Synthetic oligonucleotide
  Target: LAMA2; (+) strand; PAM type: YTN; PAM sequence: TTC
acactcttctgccaatagta

SEQ ID NO: 317401 - DNA, 20 bp, Artificial Sequence
  Description of Artificial Sequence: Synthetic oligonucleotide
  Target: LAMA2; (+) strand; PAM type: YTN; PAM sequence: CTC
ttctgccaatagtattaatg

SEQ ID NO: 317402 - DNA, 20 bp, Artificial Sequence
  Description of Artificial Sequence: Synthetic oligonucleotide
  Target: LAMA2; (+) strand; PAM type: YTN; PAM sequence: CTT
ctgccaatagtattaatgct

SEQ ID NO: 317403 - DNA, 20 bp, Artificial Sequence
  Description of Artificial Sequence: Synthetic oligonucleotide
  Target: LAMA2; (+) strand; PAM type: YTN; PAM sequence: TTC
tgccaatagtattaatgctt

SEQ ID NO: 317404 - DNA, 20 bp, Artificial Sequence
  Description of Artificial Sequence: Synthetic oligonucleotide
  Target: LAMA2; (+) strand; PAM type: YTN; PAM sequence: CTG
ccaatagtattaatgctttg

SEQ ID NO: 317405 - DNA, 20 bp, Artificial Sequence
  Description of Artificial Sequence: Synthetic oligonucleotide
  Target: LAMA2; (+) strand; PAM type: YTN; PAM sequence: TTA
atgctttgggaaatgtttga

SEQ ID NO: 317406 - DNA, 20 bp, Artificial Sequence
  Description of Artificial Sequence: Synthetic oligonucleotide
  Target: LAMA2; (+) strand; PAM type: YTN; PAM sequence: CTT
tgggaaatgtttgagaagtg

SEQ ID NO: 317407 - DNA, 20 bp, Artificial Sequence
  Description of Artificial Sequence: Synthetic oligonucleotide
  Target: LAMA2; (+) strand; PAM type: YTN; PAM sequence: TTT
gggaaatgtttgagaagtgt

SEQ ID NO: 317408 - DNA, 20 bp, Artificial Sequence
  Description of Artificial Sequence: Synthetic oligonucleotide
  Target: LAMA2; (+) strand; PAM type: YTN; PAM sequence: TTG
ggaaatgtttgagaagtgtt

SEQ ID NO: 317409 - DNA, 20 bp, Artificial Sequence
  Description of Artificial Sequence: Synthetic oligonucleotide
  Target: LAMA2; (+) strand; PAM type: YTN; PAM sequence: TTT
gagaagtgttgttccagtgg

SEQ ID NO: 317410 - DNA, 20 bp, Artificial Sequence
  Description of Artificial Sequence: Synthetic oligonucleotide
  Target: LAMA2; (+) strand; PAM type: YTN; PAM sequence: TTG
agaagtgttgttccagtgga

SEQ ID NO: 317411 - DNA, 20 bp, Artificial Sequence
  Description of Artificial Sequence: Synthetic oligonucleotide
  Target: LAMA2; (+) strand; PAM type: YTN; PAM sequence: TTG
ttccagtggaaatgagcctg

SEQ ID NO: 317412 - DNA, 20 bp, Artificial Sequence
  Description of Artificial Sequence: Synthetic oligonucleotide
  Target: LAMA2; (+) strand; PAM type: YTN; PAM sequence: TTC
cagtggaaatgagcctgtgg

SEQ ID NO: 317413 - DNA, 20 bp, Artificial Sequence
  Description of Artificial Sequence: Synthetic oligonucleotide
  Target: LAMA2; (+) strand; PAM type: YTN; PAM sequence: CTG
tgggttcactgattcattta

SEQ ID NO: 317414 - DNA, 20 bp, Artificial Sequence
  Description of Artificial Sequence: Synthetic oligonucleotide
  Target: LAMA2; (+) strand; PAM type: YTN; PAM sequence: TTC
actgattcatttatccattc

SEQ ID NO: 317415 - DNA, 20 bp, Artificial Sequence
  Description of Artificial Sequence: Synthetic oligonucleotide
  Target: LAMA2; (+) strand; PAM type: YTN; PAM sequence: CTG
attcatttatccattcattc

SEQ ID NO: 317416 - DNA, 20 bp, Artificial Sequence
  Description of Artificial Sequence: Synthetic oligonucleotide
  Target: LAMA2; (+) strand; PAM type: YTN; PAM sequence: TTC
atttatccattcattcattt

SEQ ID NO: 317417 - DNA, 20 bp, Artificial Sequence
  Description of Artificial Sequence: Synthetic oligonucleotide
  Target: LAMA2; (+) strand; PAM type: YTN; PAM sequence: TTT
atccattcattcatttattc

SEQ ID NO: 317418 - DNA, 20 bp, Artificial Sequence
  Description of Artificial Sequence: Synthetic oligonucleotide
  Target: LAMA2; (+) strand; PAM type: YTN; PAM sequence: TTA
tccattcattcatttattcc

SEQ ID NO: 317419 - DNA, 20 bp, Artificial Sequence
  Description of Artificial Sequence: Synthetic oligonucleotide
  Target: LAMA2; (+) strand; PAM type: YTN; PAM sequence: TTC
attcatttattccttcatac

SEQ ID NO: 317420 - DNA, 20 bp, Artificial Sequence
  Description of Artificial Sequence: Synthetic oligonucleotide
  Target: LAMA2; (+) strand; PAM type: YTN; PAM sequence: TTC
atttattccttcatacagta

SEQ ID NO: 317421 - DNA, 20 bp, Artificial Sequence
  Description of Artificial Sequence: Synthetic oligonucleotide
  Target: LAMA2; (+) strand; PAM type: YTN; PAM sequence: TTT
attccttcatacagtatata

SEQ ID NO: 317422 - DNA, 20 bp, Artificial Sequence
  Description of Artificial Sequence: Synthetic oligonucleotide
  Target: LAMA2; (+) strand; PAM type: YTN; PAM sequence: TTA
ttccttcatacagtatatag

SEQ ID NO: 317423 - DNA, 20 bp, Artificial Sequence
  Description of Artificial Sequence: Synthetic oligonucleotide
  Target: LAMA2; (+) strand; PAM type: YTN; PAM sequence: TTC
cttcatacagtatatagctt

SEQ ID NO: 317424 - DNA, 20 bp, Artificial Sequence
  Description of Artificial Sequence: Synthetic oligonucleotide
  Target: LAMA2; (+) strand; PAM type: YTN; PAM sequence: CTT
catacagtatatagctttca

SEQ ID NO: 317425 - DNA, 20 bp, Artificial Sequence
  Description of Artificial Sequence: Synthetic oligonucleotide
  Target: LAMA2; (+) strand; PAM type: YTN; PAM sequence: TTC
atacagtatatagctttcaa

SEQ ID NO: 317426 - DNA, 20 bp, Artificial Sequence
  Description of Artificial Sequence: Synthetic oligonucleotide
  Target: LAMA2; (+) strand; PAM type: YTN; PAM sequence: CTT
tcaagccacttttatggact

SEQ ID NO: 317427 - DNA, 20 bp, Artificial Sequence
  Description of Artificial Sequence: Synthetic oligonucleotide
  Target: LAMA2; (+) strand; PAM type: YTN; PAM sequence: TTT
caagccacttttatggacta

SEQ ID NO: 317428 - DNA, 20 bp, Artificial Sequence
  Description of Artificial Sequence: Synthetic oligonucleotide
  Target: LAMA2; (+) strand; PAM type: YTN; PAM sequence: TTC
aagccacttttatggactat

SEQ ID NO: 317429 - DNA, 20 bp, Artificial Sequence
  Description of Artificial Sequence: Synthetic oligonucleotide
  Target: LAMA2; (+) strand; PAM type: YTN; PAM sequence: CTT
ttatggactattttattaac

SEQ ID NO: 317430 - DNA, 20 bp, Artificial Sequence
  Description of Artificial Sequence: Synthetic oligonucleotide
  Target: LAMA2; (+) strand; PAM type: YTN; PAM sequence: TTT
tatggactattttattaact

SEQ ID NO: 317431 - DNA, 20 bp, Artificial Sequence
  Description of Artificial Sequence: Synthetic oligonucleotide
  Target: LAMA2; (+) strand; PAM type: YTN; PAM sequence: TTT
atggactattttattaactt

SEQ ID NO: 317432 - DNA, 20 bp, Artificial Sequence
  Description of Artificial Sequence: Synthetic oligonucleotide
  Target: LAMA2; (+) strand; PAM type: YTN; PAM sequence: TTA
tggactattttattaacttt

SEQ ID NO: 317433 - DNA, 20 bp, Artificial Sequence
  Description of Artificial Sequence: Synthetic oligonucleotide
  Target: LAMA2; (+) strand; PAM type: YTN; PAM sequence: CTA
ttttattaactttgaatatc

SEQ ID NO: 317434 - DNA, 20 bp, Artificial Sequence
  Description of Artificial Sequence: Synthetic oligonucleotide
  Target: LAMA2; (+) strand; PAM type: YTN; PAM sequence: TTT
tattaactttgaatatcaaa

SEQ ID NO: 317435 - DNA, 20 bp, Artificial Sequence
  Description of Artificial Sequence: Synthetic oligonucleotide
  Target: LAMA2; (+) strand; PAM type: YTN; PAM sequence: TTT
attaactttgaatatcaaaa

SEQ ID NO: 317436 - DNA, 20 bp, Artificial Sequence
  Description of Artificial Sequence: Synthetic oligonucleotide
  Target: LAMA2; (+) strand; PAM type: YTN; PAM sequence: TTA
ttaactttgaatatcaaaac

SEQ ID NO: 317437 - DNA, 20 bp, Artificial Sequence
  Description of Artificial Sequence: Synthetic oligonucleotide
  Target: LAMA2; (+) strand; PAM type: YTN; PAM sequence: TTA
actttgaatatcaaaaccaa

SEQ ID NO: 317438 - DNA, 20 bp, Artificial Sequence
  Description of Artificial Sequence: Synthetic oligonucleotide
  Target: LAMA2; (+) strand; PAM type: YTN; PAM sequence: CTT
tgaatatcaaaaccaataaa

SEQ ID NO: 317439 - DNA, 20 bp, Artificial Sequence
  Description of Artificial Sequence: Synthetic oligonucleotide
  Target: LAMA2; (+) strand; PAM type: YTN; PAM sequence: TTT
gaatatcaaaaccaataaaa

SEQ ID NO: 317440 - DNA, 20 bp, Artificial Sequence
  Description of Artificial Sequence: Synthetic oligonucleotide
  Target: LAMA2; (+) strand; PAM type: YTN; PAM sequence: TTG
aatatcaaaaccaataaaat

SEQ ID NO: 317441 - DNA, 20 bp, Artificial Sequence
  Description of Artificial Sequence: Synthetic oligonucleotide
  Target: LAMA2; (+) strand; PAM type: YTN; PAM sequence: CTT
tgtgtctgctttgtgacaca

SEQ ID NO: 317442 - DNA, 20 bp, Artificial Sequence
  Description of Artificial Sequence: Synthetic oligonucleotide
  Target: LAMA2; (+) strand; PAM type: YTN; PAM sequence: TTT
gtgtctgctttgtgacacaa

SEQ ID NO: 317443 - DNA, 20 bp, Artificial Sequence
  Description of Artificial Sequence: Synthetic oligonucleotide
  Target: LAMA2; (+) strand; PAM type: YTN; PAM sequence: TTG
tgtctgctttgtgacacaat

SEQ ID NO: 317444 - DNA, 20 bp, Artificial Sequence
  Description of Artificial Sequence: Synthetic oligonucleotide
  Target: LAMA2; (+) strand; PAM type: YTN; PAM sequence: CTG
ctttgtgacacaatttaatg

SEQ ID NO: 317445 - DNA, 20 bp, Artificial Sequence
  Description of Artificial Sequence: Synthetic oligonucleotide
  Target: LAMA2; (+) strand; PAM type: YTN; PAM sequence: CTT
tgtgacacaatttaatgagt

SEQ ID NO: 317446 - DNA, 20 bp, Artificial Sequence
  Description of Artificial Sequence: Synthetic oligonucleotide
  Target: LAMA2; (+) strand; PAM type: YTN; PAM sequence: TTT
gtgacacaatttaatgagta

SEQ ID NO: 317447 - DNA, 20 bp, Artificial Sequence
  Description of Artificial Sequence: Synthetic oligonucleotide
  Target: LAMA2; (+) strand; PAM type: YTN; PAM sequence: TTG
tgacacaatttaatgagtaa

SEQ ID NO: 317448 - DNA, 20 bp, Artificial Sequence
  Description of Artificial Sequence: Synthetic oligonucleotide
  Target: LAMA2; (+) strand; PAM type: YTN; PAM sequence: TTT
aatgagtaacaatttttttt

SEQ ID NO: 317449 - DNA, 20 bp, Artificial Sequence
  Description of Artificial Sequence: Synthetic oligonucleotide
  Target: LAMA2; (+) strand; PAM type: YTN; PAM sequence: TTA
atgagtaacaattttttttt

SEQ ID NO: 317450 - DNA, 20 bp, Artificial Sequence
  Description of Artificial Sequence: Synthetic oligonucleotide
  Target: LAMA2; (+) strand; PAM type: YTN; PAM sequence: TTT
tttttttttttttgagaagg

SEQ ID NO: 317451 - DNA, 20 bp, Artificial Sequence
  Description of Artificial Sequence: Synthetic oligonucleotide
  Target: LAMA2; (+) strand; PAM type: YTN; PAM sequence: TTT
ttttttttttttgagaagga

SEQ ID NO: 317452 - DNA, 20 bp, Artificial Sequence
  Description of Artificial Sequence: Synthetic oligonucleotide
  Target: LAMA2; (+) strand; PAM type: YTN; PAM sequence: TTT
tttttttttttgagaaggag

SEQ ID NO: 317453 - DNA, 20 bp, Artificial Sequence
  Description of Artificial Sequence: Synthetic oligonucleotide
  Target: LAMA2; (+) strand; PAM type: YTN; PAM sequence: TTT
ttttttttttgagaaggagt

SEQ ID NO: 317454 - DNA, 20 bp, Artificial Sequence
  Description of Artificial Sequence: Synthetic oligonucleotide
  Target: LAMA2; (+) strand; PAM type: YTN; PAM sequence: TTT
tttttttttgagaaggagtc

SEQ ID NO: 317455 - DNA, 20 bp, Artificial Sequence
  Description of Artificial Sequence: Synthetic oligonucleotide
  Target: LAMA2; (+) strand; PAM type: YTN; PAM sequence: TTT
ttttttttgagaaggagtct

SEQ ID NO: 317456 - DNA, 20 bp, Artificial Sequence
  Description of Artificial Sequence: Synthetic oligonucleotide
  Target: LAMA2; (+) strand; PAM type: YTN; PAM sequence: TTT
tttttttgagaaggagtctc

SEQ ID NO: 317457 - DNA, 20 bp, Artificial Sequence
  Description of Artificial Sequence: Synthetic oligonucleotide
  Target: LAMA2; (+) strand; PAM type: YTN; PAM sequence: TTT
ttttttgagaaggagtctca

SEQ ID NO: 317458 - DNA, 20 bp, Artificial Sequence
  Description of Artificial Sequence: Synthetic oligonucleotide
  Target: LAMA2; (+) strand; PAM type: YTN; PAM sequence: TTT
tttttgagaaggagtctcac

SEQ ID NO: 317459 - DNA, 20 bp, Artificial Sequence
  Description of Artificial Sequence: Synthetic oligonucleotide
  Target: LAMA2; (+) strand; PAM type: YTN; PAM sequence: TTT
ttttgagaaggagtctcact

SEQ ID NO: 317460 - DNA, 20 bp, Artificial Sequence
  Description of Artificial Sequence: Synthetic oligonucleotide
  Target: LAMA2; (+) strand; PAM type: YTN; PAM sequence: TTT
tttgagaaggagtctcactc

SEQ ID NO: 317461 - DNA, 20 bp, Artificial Sequence
  Description of Artificial Sequence: Synthetic oligonucleotide
  Target: LAMA2; (+) strand; PAM type: YTN; PAM sequence: TTT
ttgagaaggagtctcactct

SEQ ID NO: 317462 - DNA, 20 bp, Artificial Sequence
  Description of Artificial Sequence: Synthetic oligonucleotide
  Target: LAMA2; (+) strand; PAM type: YTN; PAM sequence: TTT
tgagaaggagtctcactctg

SEQ ID NO: 317463 - DNA, 20 bp, Artificial Sequence
  Description of Artificial Sequence: Synthetic oligonucleotide
  Target: LAMA2; (+) strand; PAM type: YTN; PAM sequence: TTT
gagaaggagtctcactctgt

SEQ ID NO: 317464 - DNA, 20 bp, Artificial Sequence
  Description of Artificial Sequence: Synthetic oligonucleotide
  Target: LAMA2; (+) strand; PAM type: YTN; PAM sequence: TTG
agaaggagtctcactctgtt

SEQ ID NO: 317465 - DNA, 20 bp, Artificial Sequence
  Description of Artificial Sequence: Synthetic oligonucleotide
  Target: LAMA2; (+) strand; PAM type: YTN; PAM sequence: CTC
actctgttgcccaggctgga

SEQ ID NO: 317466 - DNA, 20 bp, Artificial Sequence
  Description of Artificial Sequence: Synthetic oligonucleotide
  Target: LAMA2; (+) strand; PAM type: YTN; PAM sequence: CTC
tgttgcccaggctggagtgc

SEQ ID NO: 317467 - DNA, 20 bp, Artificial Sequence
  Description of Artificial Sequence: Synthetic oligonucleotide
  Target: LAMA2; (+) strand; PAM type: YTN; PAM sequence: CTG
ttgcccaggctggagtgcag

SEQ ID NO: 317468 - DNA, 20 bp, Artificial Sequence
  Description of Artificial Sequence: Synthetic oligonucleotide
  Target: LAMA2; (+) strand; PAM type: YTN; PAM sequence: TTG
cccaggctggagtgcagtgg

SEQ ID NO: 317469 - DNA, 20 bp, Artificial Sequence
  Description of Artificial Sequence: Synthetic oligonucleotide
  Target: LAMA2; (+) strand; PAM type: YTN; PAM sequence: CTG
gagtgcagtggcacgatctt

SEQ ID NO: 317470 - DNA, 20 bp, Artificial Sequence
  Description of Artificial Sequence: Synthetic oligonucleotide
  Target: LAMA2; (+) strand; PAM type: YTN; PAM sequence: CTT
ggttcactgcaagctccgcc

SEQ ID NO: 317471 - DNA, 20 bp, Artificial Sequence
  Description of Artificial Sequence: Synthetic oligonucleotide
  Target: LAMA2; (+) strand; PAM type: YTN; PAM sequence: TTG
gttcactgcaagctccgcct

SEQ ID NO: 317472 - DNA, 20 bp, Artificial Sequence
  Description of Artificial Sequence: Synthetic oligonucleotide
  Target: LAMA2; (+) strand; PAM type: YTN; PAM sequence: TTC
actgcaagctccgcctcacg

SEQ ID NO: 317473 - DNA, 20 bp, Artificial Sequence
  Description of Artificial Sequence: Synthetic oligonucleotide
  Target: LAMA2; (+) strand; PAM type: YTN; PAM sequence: CTG
caagctccgcctcacgggtt

SEQ ID NO: 317474 - DNA, 20 bp, Artificial Sequence
  Description of Artificial Sequence: Synthetic oligonucleotide
  Target: LAMA2; (+) strand; PAM type: YTN; PAM sequence: CTC
cgcctcacgggttcacgcca

SEQ ID NO: 317475 - DNA, 20 bp, Artificial Sequence
  Description of Artificial Sequence: Synthetic oligonucleotide
  Target: LAMA2; (+) strand; PAM type: YTN; PAM sequence: CTC
acgggttcacgccattctcc

SEQ ID NO: 317476 - DNA, 20 bp, Artificial Sequence
  Description of Artificial Sequence: Synthetic oligonucleotide
  Target: LAMA2; (+) strand; PAM type: YTN; PAM sequence: TTC
acgccattctcctgcctcgg

SEQ ID NO: 317477 - DNA, 20 bp, Artificial Sequence
  Description of Artificial Sequence: Synthetic oligonucleotide
  Target: LAMA2; (+) strand; PAM type: YTN; PAM sequence: TTC
tcctgcctcggcctccggag

SEQ ID NO: 317478 - DNA, 20 bp, Artificial Sequence
  Description of Artificial Sequence: Synthetic oligonucleotide
  Target: LAMA2; (+) strand; PAM type: YTN; PAM sequence: CTC
ctgcctcggcctccggagta

SEQ ID NO: 317479 - DNA, 20 bp, Artificial Sequence
  Description of Artificial Sequence: Synthetic oligonucleotide
  Target: LAMA2; (+) strand; PAM type: YTN; PAM sequence: CTG
cctcggcctccggagtagct

SEQ ID NO: 317480 - DNA, 20 bp, Artificial Sequence
  Description of Artificial Sequence: Synthetic oligonucleotide
  Target: LAMA2; (+) strand; PAM type: YTN; PAM sequence: CTC
ggcctccggagtagctggga

SEQ ID NO: 317481 - DNA, 20 bp, Artificial Sequence
  Description of Artificial Sequence: Synthetic oligonucleotide
  Target: LAMA2; (+) strand; PAM type: YTN; PAM sequence: CTC
cggagtagctgggactacag

SEQ ID NO: 317482 - DNA, 20 bp, Artificial Sequence
  Description of Artificial Sequence: Synthetic oligonucleotide
  Target: LAMA2; (+) strand; PAM type: YTN; PAM sequence: CTG
ggactacaggcgcccaccac

SEQ ID NO: 317483 - DNA, 20 bp, Artificial Sequence
  Description of Artificial Sequence: Synthetic oligonucleotide
  Target: LAMA2; (+) strand; PAM type: YTN; PAM sequence: CTA
caggcgcccaccaccatgcc

SEQ ID NO: 317484 - DNA, 20 bp, Artificial Sequence
  Description of Artificial Sequence: Synthetic oligonucleotide
  Target: LAMA2; (+) strand; PAM type: YTN; PAM sequence: CTA
atttttttgtatttttagta

SEQ ID NO: 317485 - DNA, 20 bp, Artificial Sequence
  Description of Artificial Sequence: Synthetic oligonucleotide
  Target: LAMA2; (+) strand; PAM type: YTN; PAM sequence: TTT
ttttgtatttttagtagaga

SEQ ID NO: 317486 - DNA, 20 bp, Artificial Sequence
  Description of Artificial Sequence: Synthetic oligonucleotide
  Target: LAMA2; (+) strand; PAM type: YTN; PAM sequence: TTT
tttgtatttttagtagagac

SEQ ID NO: 317487 - DNA, 20 bp, Artificial Sequence
  Description of Artificial Sequence: Synthetic oligonucleotide
  Target: LAMA2; (+) strand; PAM type: YTN; PAM sequence: TTT
ttgtatttttagtagagacg

SEQ ID NO: 317488 - DNA, 20 bp, Artificial Sequence
  Description of Artificial Sequence: Synthetic oligonucleotide
  Target: LAMA2; (+) strand; PAM type: YTN; PAM sequence: TTT
tgtatttttagtagagacga

SEQ ID NO: 317489 - DNA, 20 bp, Artificial Sequence
  Description of Artificial Sequence: Synthetic oligonucleotide
  Target: LAMA2; (+) strand; PAM type: YTN; PAM sequence: TTT
gtatttttagtagagacgag

SEQ ID NO: 317490 - DNA, 20 bp, Artificial Sequence
  Description of Artificial Sequence: Synthetic oligonucleotide
  Target: LAMA2; (+) strand; PAM type: YTN; PAM sequence: TTG
tatttttagtagagacgagg

SEQ ID NO: 317491 - DNA, 20 bp, Artificial Sequence
  Description of Artificial Sequence: Synthetic oligonucleotide
  Target: LAMA2; (+) strand; PAM type: YTN; PAM sequence: TTT
ttagtagagacgaggtttca

SEQ ID NO: 317492 - DNA, 20 bp, Artificial Sequence
  Description of Artificial Sequence: Synthetic oligonucleotide
  Target: LAMA2; (+) strand; PAM type: YTN; PAM sequence: TTT
tagtagagacgaggtttcac

SEQ ID NO: 317493 - DNA, 20 bp, Artificial Sequence
  Description of Artificial Sequence: Synthetic oligonucleotide
  Target: LAMA2; (+) strand; PAM type: YTN; PAM sequence: TTT
agtagagacgaggtttcact

SEQ ID NO: 317494 - DNA, 20 bp, Artificial Sequence
  Description of Artificial Sequence: Synthetic oligonucleotide
  Target: LAMA2; (+) strand; PAM type: YTN; PAM sequence: TTA
gtagagacgaggtttcactg

SEQ ID NO: 317495 - DNA, 20 bp, Artificial Sequence
  Description of Artificial Sequence: Synthetic oligonucleotide
  Target: LAMA2; (+) strand; PAM type: YTN; PAM sequence: TTT
cactgtgttagccaggatgg

SEQ ID NO: 317496 - DNA, 20 bp, Artificial Sequence
  Description of Artificial Sequence: Synthetic oligonucleotide
  Target: LAMA2; (+) strand; PAM type: YTN; PAM sequence: TTC
actgtgttagccaggatggt

SEQ ID NO: 317497 - DNA, 20 bp, Artificial Sequence
  Description of Artificial Sequence: Synthetic oligonucleotide
  Target: LAMA2; (+) strand; PAM type: YTN; PAM sequence: CTG
tgttagccaggatggtcttg

SEQ ID NO: 317498 - DNA, 20 bp, Artificial Sequence
  Description of Artificial Sequence: Synthetic oligonucleotide
  Target: LAMA2; (+) strand; PAM type: YTN; PAM sequence: TTA
gccaggatggtcttgatctc

SEQ ID NO: 317499 - DNA, 20 bp, Artificial Sequence
  Description of Artificial Sequence: Synthetic oligonucleotide
  Target: LAMA2; (+) strand; PAM type: YTN; PAM sequence: CTT
gatctcctgacctcgtgatc

SEQ ID NO: 317500 - DNA, 20 bp, Artificial Sequence
  Description of Artificial Sequence: Synthetic oligonucleotide
  Target: LAMA2; (+) strand; PAM type: YTN; PAM sequence: TTG
atctcctgacctcgtgatcc

SEQ ID NO: 317501 - DNA, 20 bp, Artificial Sequence
  Description of Artificial Sequence: Synthetic oligonucleotide
  Target: LAMA2; (+) strand; PAM type: YTN; PAM sequence: CTC
ctgacctcgtgatccgcctg

SEQ ID NO: 317502 - DNA, 20 bp, Artificial Sequence
  Description of Artificial Sequence: Synthetic oligonucleotide
  Target: LAMA2; (+) strand; PAM type: YTN; PAM sequence: CTG
acctcgtgatccgcctgcct

SEQ ID NO: 317503 - DNA, 20 bp, Artificial Sequence
  Description of Artificial Sequence: Synthetic oligonucleotide
  Target: LAMA2; (+) strand; PAM type: YTN; PAM sequence: CTC
gtgatccgcctgcctctgcc

SEQ ID NO: 317504 - DNA, 20 bp, Artificial Sequence
  Description of Artificial Sequence: Synthetic oligonucleotide
  Target: LAMA2; (+) strand; PAM type: YTN; PAM sequence: CTG
cctctgcctcccaaagtgct

SEQ ID NO: 317505 - DNA, 20 bp, Artificial Sequence
  Description of Artificial Sequence: Synthetic oligonucleotide
  Target: LAMA2; (+) strand; PAM type: YTN; PAM sequence: CTC
tgcctcccaaagtgctggga

SEQ ID NO: 317506 - DNA, 20 bp, Artificial Sequence
  Description of Artificial Sequence: Synthetic oligonucleotide
  Target: LAMA2; (+) strand; PAM type: YTN; PAM sequence: CTG
cctcccaaagtgctgggatt

SEQ ID NO: 317507 - DNA, 20 bp, Artificial Sequence
  Description of Artificial Sequence: Synthetic oligonucleotide
  Target: LAMA2; (+) strand; PAM type: YTN; PAM sequence: CTC
ccaaagtgctgggattacag

SEQ ID NO: 317508 - DNA, 20 bp, Artificial Sequence
  Description of Artificial Sequence: Synthetic oligonucleotide
  Target: LAMA2; (+) strand; PAM type: YTN; PAM sequence: CTG
ggattacaggcctgagccat

SEQ ID NO: 317509 - DNA, 20 bp, Artificial Sequence
  Description of Artificial Sequence: Synthetic oligonucleotide
  Target: LAMA2; (+) strand; PAM type: YTN; PAM sequence: TTA
caggcctgagccatcgcgcc

SEQ ID NO: 317510 - DNA, 20 bp, Artificial Sequence
  Description of Artificial Sequence: Synthetic oligonucleotide
  Target: LAMA2; (+) strand; PAM type: YTN; PAM sequence: CTG
agccatcgcgcctggccatg

SEQ ID NO: 317511 - DNA, 20 bp, Artificial Sequence
  Description of Artificial Sequence: Synthetic oligonucleotide
  Target: LAMA2; (+) strand; PAM type: YTN; PAM sequence: CTG
gccatgagtaacaattttta

SEQ ID NO: 317512 - DNA, 20 bp, Artificial Sequence
  Description of Artificial Sequence: Synthetic oligonucleotide
  Target: LAMA2; (+) strand; PAM type: YTN; PAM sequence: TTT
ttaaaataaaaataaatagc

SEQ ID NO: 317513 - DNA, 20 bp, Artificial Sequence
  Description of Artificial Sequence: Synthetic oligonucleotide
  Target: LAMA2; (+) strand; PAM type: YTN; PAM sequence: TTT
taaaataaaaataaatagca

SEQ ID NO: 317514 - DNA, 20 bp, Artificial Sequence
  Description of Artificial Sequence: Synthetic oligonucleotide
  Target: LAMA2; (+) strand; PAM type: YTN; PAM sequence: TTT
aaaataaaaataaatagcaa

SEQ ID NO: 317515 - DNA, 20 bp, Artificial Sequence
  Description of Artificial Sequence: Synthetic oligonucleotide
  Target: LAMA2; (+) strand; PAM type: YTN; PAM sequence: TTA
aaataaaaataaatagcaaa

SEQ ID NO: 317516 - DNA, 20 bp, Artificial Sequence
  Description of Artificial Sequence: Synthetic oligonucleotide
  Target: LAMA2; (+) strand; PAM type: YTN; PAM sequence: CTA
ttaggaccatatggcagaaa

SEQ ID NO: 317517 - DNA, 20 bp, Artificial Sequence
  Description of Artificial Sequence: Synthetic oligonucleotide
  Target: LAMA2; (+) strand; PAM type: YTN; PAM sequence: TTA
ggaccatatggcagaaaaac

SEQ ID NO: 317518 - DNA, 20 bp, Artificial Sequence
  Description of Artificial Sequence: Synthetic oligonucleotide
  Target: LAMA2; (+) strand; PAM type: YTN; PAM sequence: CTT
agaagagttagggaagactt

SEQ ID NO: 317519 - DNA, 20 bp, Artificial Sequence
  Description of Artificial Sequence: Synthetic oligonucleotide
  Target: LAMA2; (+) strand; PAM type: YTN; PAM sequence: TTA
gaagagttagggaagacttc

SEQ ID NO: 317520 - DNA, 20 bp, Artificial Sequence
  Description of Artificial Sequence: Synthetic oligonucleotide
  Target: LAMA2; (+) strand; PAM type: YTN; PAM sequence: TTA
gggaagacttcccaaaggaa

SEQ ID NO: 317521 - DNA, 20 bp, Artificial Sequence
  Description of Artificial Sequence: Synthetic oligonucleotide
  Target: LAMA2; (+) strand; PAM type: YTN; PAM sequence: CTT
cccaaaggaagtggcaatta

SEQ ID NO: 317522 - DNA, 20 bp, Artificial Sequence
  Description of Artificial Sequence: Synthetic oligonucleotide
  Target: LAMA2; (+) strand; PAM type: YTN; PAM sequence: TTC
ccaaaggaagtggcaattaa

SEQ ID NO: 317523 - DNA, 20 bp, Artificial Sequence
  Description of Artificial Sequence: Synthetic oligonucleotide
  Target: LAMA2; (+) strand; PAM type: YTN; PAM sequence: TTA
acctgagatttttaaagatg

SEQ ID NO: 317524 - DNA, 20 bp, Artificial Sequence
  Description of Artificial Sequence: Synthetic oligonucleotide
  Target: LAMA2; (+) strand; PAM type: YTN; PAM sequence: CTG
agatttttaaagatgagcag

SEQ ID NO: 317525 - DNA, 20 bp, Artificial Sequence
  Description of Artificial Sequence: Synthetic oligonucleotide
  Target: LAMA2; (+) strand; PAM type: YTN; PAM sequence: TTT
ttaaagatgagcaggagaat

SEQ ID NO: 317526 - DNA, 20 bp, Artificial Sequence
  Description of Artificial Sequence: Synthetic oligonucleotide
  Target: LAMA2; (+) strand; PAM type: YTN; PAM sequence: TTT
taaagatgagcaggagaatt

SEQ ID NO: 317527 - DNA, 20 bp, Artificial Sequence
  Description of Artificial Sequence: Synthetic oligonucleotide
  Target: LAMA2; (+) strand; PAM type: YTN; PAM sequence: TTT
aaagatgagcaggagaattt

SEQ ID NO: 317528 - DNA, 20 bp, Artificial Sequence
  Description of Artificial Sequence: Synthetic oligonucleotide
  Target: LAMA2; (+) strand; PAM type: YTN; PAM sequence: TTA
aagatgagcaggagaatttc

SEQ ID NO: 317529 - DNA, 20 bp, Artificial Sequence
  Description of Artificial Sequence: Synthetic oligonucleotide
  Target: LAMA2; (+) strand; PAM type: YTN; PAM sequence: TTT
caggcaaataaaacttgcag

SEQ ID NO: 317530 - DNA, 20 bp, Artificial Sequence
  Description of Artificial Sequence: Synthetic oligonucleotide
  Target: LAMA2; (+) strand; PAM type: YTN; PAM sequence: TTC
aggcaaataaaacttgcagt

SEQ ID NO: 317531 - DNA, 20 bp, Artificial Sequence
  Description of Artificial Sequence: Synthetic oligonucleotide
  Target: LAMA2; (+) strand; PAM type: YTN; PAM sequence: CTT
gcagtggggttgggagtagg

SEQ ID NO: 317532 - DNA, 20 bp, Artificial Sequence
  Description of Artificial Sequence: Synthetic oligonucleotide
  Target: LAMA2; (+) strand; PAM type: YTN; PAM sequence: TTG
cagtggggttgggagtaggt

SEQ ID NO: 317533 - DNA, 20 bp, Artificial Sequence
  Description of Artificial Sequence: Synthetic oligonucleotide
  Target: LAMA2; (+) strand; PAM type: YTN; PAM sequence: TTG
ggagtaggtggatggaccat

SEQ ID NO: 317534 - DNA, 20 bp, Artificial Sequence
  Description of Artificial Sequence: Synthetic oligonucleotide
  Target: LAMA2; (+) strand; PAM type: YTN; PAM sequence: TTC
caggtgaataattgagcact

SEQ ID NO: 317535 - DNA, 20 bp, Artificial Sequence
  Description of Artificial Sequence: Synthetic oligonucleotide
  Target: LAMA2; (+) strand; PAM type: YTN; PAM sequence: TTG
agcactttagcttgggagga

SEQ ID NO: 317536 - DNA, 20 bp, Artificial Sequence
  Description of Artificial Sequence: Synthetic oligonucleotide
  Target: LAMA2; (+) strand; PAM type: YTN; PAM sequence: CTT
tagcttgggaggagggccct

SEQ ID NO: 317537 - DNA, 20 bp, Artificial Sequence
  Description of Artificial Sequence: Synthetic oligonucleotide
  Target: LAMA2; (+) strand; PAM type: YTN; PAM sequence: TTT
agcttgggaggagggcccta

SEQ ID NO: 317538 - DNA, 20 bp, Artificial Sequence
  Description of Artificial Sequence: Synthetic oligonucleotide
  Target: LAMA2; (+) strand; PAM type: YTN; PAM sequence: TTA
gcttgggaggagggccctaa

SEQ ID NO: 317539 - DNA, 20 bp, Artificial Sequence
  Description of Artificial Sequence: Synthetic oligonucleotide
  Target: LAMA2; (+) strand; PAM type: YTN; PAM sequence: CTT
gggaggagggccctaaatga

SEQ ID NO: 317540 - DNA, 20 bp, Artificial Sequence
  Description of Artificial Sequence: Synthetic oligonucleotide
  Target: LAMA2; (+) strand; PAM type: YTN; PAM sequence: TTG
ggaggagggccctaaatgag

SEQ ID NO: 317541 - DNA, 20 bp, Artificial Sequence
  Description of Artificial Sequence: Synthetic oligonucleotide
  Target: LAMA2; (+) strand; PAM type: YTN; PAM sequence: CTA
aatgagaaagtatatgacct

SEQ ID NO: 317542 - DNA, 20 bp, Artificial Sequence
  Description of Artificial Sequence: Synthetic oligonucleotide
  Target: LAMA2; (+) strand; PAM type: YTN; PAM sequence: CTA
tttcaggaactgaaagaaat

SEQ ID NO: 317543 - DNA, 20 bp, Artificial Sequence
  Description of Artificial Sequence: Synthetic oligonucleotide
  Target: LAMA2; (+) strand; PAM type: YTN; PAM sequence: TTT
caggaactgaaagaaatttg

SEQ ID NO: 317544 - DNA, 20 bp, Artificial Sequence
  Description of Artificial Sequence: Synthetic oligonucleotide
  Target: LAMA2; (+) strand; PAM type: YTN; PAM sequence: TTC
aggaactgaaagaaatttgg

SEQ ID NO: 317545 - DNA, 20 bp, Artificial Sequence
  Description of Artificial Sequence: Synthetic oligonucleotide
  Target: LAMA2; (+) strand; PAM type: YTN; PAM sequence: CTG
aaagaaatttggaatgcttg

SEQ ID NO: 317546 - DNA, 20 bp, Artificial Sequence
  Description of Artificial Sequence: Synthetic oligonucleotide
  Target: LAMA2; (+) strand; PAM type: YTN; PAM sequence: TTT
ggaatgcttggaatataaag

SEQ ID NO: 317547 - DNA, 20 bp, Artificial Sequence
  Description of Artificial Sequence: Synthetic oligonucleotide
  Target: LAMA2; (+) strand; PAM type: YTN; PAM sequence: TTG
gaatgcttggaatataaagt

SEQ ID NO: 317548 - DNA, 20 bp, Artificial Sequence
  Description of Artificial Sequence: Synthetic oligonucleotide
  Target: LAMA2; (+) strand; PAM type: YTN; PAM sequence: CTT
ggaatataaagtgtggggca

SEQ ID NO: 317549 - DNA, 20 bp, Artificial Sequence
  Description of Artificial Sequence: Synthetic oligonucleotide
  Target: LAMA2; (+) strand; PAM type: YTN; PAM sequence: TTG
gaatataaagtgtggggcaa

SEQ ID NO: 317550 - DNA, 20 bp, Artificial Sequence
  Description of Artificial Sequence: Synthetic oligonucleotide
  Target: LAMA2; (+) strand; PAM type: YTN; PAM sequence: TTT
ggctgtgtctccacccagat

SEQ ID NO: 317551 - DNA, 20 bp, Artificial Sequence
  Description of Artificial Sequence: Synthetic oligonucleotide
  Target: LAMA2; (+) strand; PAM type: YTN; PAM sequence: TTG
gctgtgtctccacccagatc

SEQ ID NO: 317552 - DNA, 20 bp, Artificial Sequence
  Description of Artificial Sequence: Synthetic oligonucleotide
  Target: LAMA2; (+) strand; PAM type: YTN; PAM sequence: CTG
tgtctccacccagatctcat

SEQ ID NO: 317553 - DNA, 20 bp, Artificial Sequence
  Description of Artificial Sequence: Synthetic oligonucleotide
  Target: LAMA2; (+) strand; PAM type: YTN; PAM sequence: CTC
cacccagatctcatcttgaa

SEQ ID NO: 317554 - DNA, 20 bp, Artificial Sequence
  Description of Artificial Sequence: Synthetic oligonucleotide
  Target: LAMA2; (+) strand; PAM type: YTN; PAM sequence: CTC
atcttgaattgcagttccca

SEQ ID NO: 317555 - DNA, 20 bp, Artificial Sequence
  Description of Artificial Sequence: Synthetic oligonucleotide
  Target: LAMA2; (+) strand; PAM type: YTN; PAM sequence: CTT
gaattgcagttcccacaatt

SEQ ID NO: 317556 - DNA, 20 bp, Artificial Sequence
  Description of Artificial Sequence: Synthetic oligonucleotide
  Target: LAMA2; (+) strand; PAM type: YTN; PAM sequence: TTG
aattgcagttcccacaattc

SEQ ID NO: 317557 - DNA, 20 bp, Artificial Sequence
  Description of Artificial Sequence: Synthetic oligonucleotide
  Target: LAMA2; (+) strand; PAM type: YTN; PAM sequence: TTG
cagttcccacaattcccaag

SEQ ID NO: 317558 - DNA, 20 bp, Artificial Sequence
  Description of Artificial Sequence: Synthetic oligonucleotide
  Target: LAMA2; (+) strand; PAM type: YTN; PAM sequence: TTC
ccacaattcccaagggtcat

SEQ ID NO: 317559 - DNA, 20 bp, Artificial Sequence
  Description of Artificial Sequence: Synthetic oligonucleotide
  Target: LAMA2; (+) strand; PAM type: YTN; PAM sequence: TTC
ccaagggtcatgggagggac

SEQ ID NO: 317560 - DNA, 20 bp, Artificial Sequence
  Description of Artificial Sequence: Synthetic oligonucleotide
  Target: LAMA2; (+) strand; PAM type: YTN; PAM sequence: CTG
gagggaggcaattcaatcat

SEQ ID NO: 317561 - DNA, 20 bp, Artificial Sequence
  Description of Artificial Sequence: Synthetic oligonucleotide
  Target: LAMA2; (+) strand; PAM type: YTN; PAM sequence: TTC
aatcataggggcaggtcttt

SEQ ID NO: 317562 - DNA, 20 bp, Artificial Sequence
  Description of Artificial Sequence: Synthetic oligonucleotide
  Target: LAMA2; (+) strand; PAM type: YTN; PAM sequence: CTT
tcccatgcttttctcatgat

SEQ ID NO: 317563 - DNA, 20 bp, Artificial Sequence
  Description of Artificial Sequence: Synthetic oligonucleotide
  Target: LAMA2; (+) strand; PAM type: YTN; PAM sequence: TTT
cccatgcttttctcatgata

SEQ ID NO: 317564 - DNA, 20 bp, Artificial Sequence
  Description of Artificial Sequence: Synthetic oligonucleotide
  Target: LAMA2; (+) strand; PAM type: YTN; PAM sequence: TTC
ccatgcttttctcatgatag

SEQ ID NO: 317565 - DNA, 20 bp, Artificial Sequence
  Description of Artificial Sequence: Synthetic oligonucleotide
  Target: LAMA2; (+) strand; PAM type: YTN; PAM sequence: CTT
ttctcatgatagtgaataag

SEQ ID NO: 317566 - DNA, 20 bp, Artificial Sequence
  Description of Artificial Sequence: Synthetic oligonucleotide
  Target: LAMA2; (+) strand; PAM type: YTN; PAM sequence: TTT
tctcatgatagtgaataagt

SEQ ID NO: 317567 - DNA, 20 bp, Artificial Sequence
  Description of Artificial Sequence: Synthetic oligonucleotide
  Target: LAMA2; (+) strand; PAM type: YTN; PAM sequence: TTT
ctcatgatagtgaataagtc

SEQ ID NO: 317568 - DNA, 20 bp, Artificial Sequence
  Description of Artificial Sequence: Synthetic oligonucleotide
  Target: LAMA2; (+) strand; PAM type: YTN; PAM sequence: TTC
tcatgatagtgaataagtct

SEQ ID NO: 317569 - DNA, 20 bp, Artificial Sequence
  Description of Artificial Sequence: Synthetic oligonucleotide
  Target: LAMA2; (+) strand; PAM type: YTN; PAM sequence: CTC
atgatagtgaataagtctca

SEQ ID NO: 317570 - DNA, 20 bp, Artificial Sequence
  Description of Artificial Sequence: Synthetic oligonucleotide
  Target: LAMA2; (+) strand; PAM type: YTN; PAM sequence: CTC
acgagatctgatgattttat

SEQ ID NO: 317571 - DNA, 20 bp, Artificial Sequence
  Description of Artificial Sequence: Synthetic oligonucleotide
  Target: LAMA2; (+) strand; PAM type: YTN; PAM sequence: CTG
atgattttataaaggagagt

SEQ ID NO: 317572 - DNA, 20 bp, Artificial Sequence
  Description of Artificial Sequence: Synthetic oligonucleotide
  Target: LAMA2; (+) strand; PAM type: YTN; PAM sequence: TTT
tataaaggagagttcccctg

SEQ ID NO: 317573 - DNA, 20 bp, Artificial Sequence
  Description of Artificial Sequence: Synthetic oligonucleotide
  Target: LAMA2; (+) strand; PAM type: YTN; PAM sequence: TTT
ataaaggagagttcccctgc

SEQ ID NO: 317574 - DNA, 20 bp, Artificial Sequence
  Description of Artificial Sequence: Synthetic oligonucleotide
  Target: LAMA2; (+) strand; PAM type: YTN; PAM sequence: TTA
taaaggagagttcccctgca

SEQ ID NO: 317575 - DNA, 20 bp, Artificial Sequence
  Description of Artificial Sequence: Synthetic oligonucleotide
  Target: LAMA2; (+) strand; PAM type: YTN; PAM sequence: TTC
ccctgcacatgccctcttgc

SEQ ID NO: 317576 - DNA, 20 bp, Artificial Sequence
  Description of Artificial Sequence: Synthetic oligonucleotide
  Target: LAMA2; (+) strand; PAM type: YTN; PAM sequence: CTG
cacatgccctcttgcctgcc

SEQ ID NO: 317577 - DNA, 20 bp, Artificial Sequence
  Description of Artificial Sequence: Synthetic oligonucleotide
  Target: LAMA2; (+) strand; PAM type: YTN; PAM sequence: CTC
ttgcctgccaccatgtaaga

SEQ ID NO: 317578 - DNA, 20 bp, Artificial Sequence
  Description of Artificial Sequence: Synthetic oligonucleotide
  Target: LAMA2; (+) strand; PAM type: YTN; PAM sequence: CTT
gcctgccaccatgtaagacg

SEQ ID NO: 317579 - DNA, 20 bp, Artificial Sequence
  Description of Artificial Sequence: Synthetic oligonucleotide
  Target: LAMA2; (+) strand; PAM type: YTN; PAM sequence: TTG
cctgccaccatgtaagacgt

SEQ ID NO: 317580 - DNA, 20 bp, Artificial Sequence
  Description of Artificial Sequence: Synthetic oligonucleotide
  Target: LAMA2; (+) strand; PAM type: YTN; PAM sequence: CTG
ccaccatgtaagacgtgact

SEQ ID NO: 317581 - DNA, 20 bp, Artificial Sequence
  Description of Artificial Sequence: Synthetic oligonucleotide
  Target: LAMA2; (+) strand; PAM type: YTN; PAM sequence: CTT
tgctcttcaagtactttctg

SEQ ID NO: 317582 - DNA, 20 bp, Artificial Sequence
  Description of Artificial Sequence: Synthetic oligonucleotide
  Target: LAMA2; (+) strand; PAM type: YTN; PAM sequence: TTT
gctcttcaagtactttctgc

SEQ ID NO: 317583 - DNA, 20 bp, Artificial Sequence
  Description of Artificial Sequence: Synthetic oligonucleotide
  Target: LAMA2; (+) strand; PAM type: YTN; PAM sequence: TTG
ctcttcaagtactttctgcc

SEQ ID NO: 317584 - DNA, 20 bp, Artificial Sequence
  Description of Artificial Sequence: Synthetic oligonucleotide
  Target: LAMA2; (+) strand; PAM type: YTN; PAM sequence: CTC
ttcaagtactttctgccatg

SEQ ID NO: 317585 - DNA, 20 bp, Artificial Sequence
  Description of Artificial Sequence: Synthetic oligonucleotide
  Target: LAMA2; (+) strand; PAM type: YTN; PAM sequence: CTT
caagtactttctgccatgat

SEQ ID NO: 317586 - DNA, 20 bp, Artificial Sequence
  Description of Artificial Sequence: Synthetic oligonucleotide
  Target: LAMA2; (+) strand; PAM type: YTN; PAM sequence: TTC
aagtactttctgccatgatt

SEQ ID NO: 317587 - DNA, 20 bp, Artificial Sequence
  Description of Artificial Sequence: Synthetic oligonucleotide
  Target: LAMA2; (+) strand; PAM type: YTN; PAM sequence: CTT
tctgccatgattgtgaggcc

SEQ ID NO: 317588 - DNA, 20 bp, Artificial Sequence
  Description of Artificial Sequence: Synthetic oligonucleotide
  Target: LAMA2; (+) strand; PAM type: YTN; PAM sequence: TTT
ctgccatgattgtgaggcct

SEQ ID NO: 317589 - DNA, 20 bp, Artificial Sequence
  Description of Artificial Sequence: Synthetic oligonucleotide
  Target: LAMA2; (+) strand; PAM type: YTN; PAM sequence: TTC
tgccatgattgtgaggcctc

SEQ ID NO: 317590 - DNA, 20 bp, Artificial Sequence
  Description of Artificial Sequence: Synthetic oligonucleotide
  Target: LAMA2; (+) strand; PAM type: YTN; PAM sequence: CTG
ccatgattgtgaggcctccc

SEQ ID NO: 317591 - DNA, 20 bp, Artificial Sequence
  Description of Artificial Sequence: Synthetic oligonucleotide
  Target: LAMA2; (+) strand; PAM type: YTN; PAM sequence: TTG
tgaggcctccccagccatgt

SEQ ID NO: 317592 - DNA, 20 bp, Artificial Sequence
  Description of Artificial Sequence: Synthetic oligonucleotide
  Target: LAMA2; (+) strand; PAM type: YTN; PAM sequence: CTC
cccagccatgtggaattgtg

SEQ ID NO: 317593 - DNA, 20 bp, Artificial Sequence
  Description of Artificial Sequence: Synthetic oligonucleotide
  Target: LAMA2; (+) strand; PAM type: YTN; PAM sequence: TTG
tgagtcaattaaacctcttt

SEQ ID NO: 317594 - DNA, 20 bp, Artificial Sequence
  Description of Artificial Sequence: Synthetic oligonucleotide
  Target: LAMA2; (+) strand; PAM type: YTN; PAM sequence: TTA
aacctctttcctttataaat

SEQ ID NO: 317595 - DNA, 20 bp, Artificial Sequence
  Description of Artificial Sequence: Synthetic oligonucleotide
  Target: LAMA2; (+) strand; PAM type: YTN; PAM sequence: CTC
tttcctttataaattaccct

SEQ ID NO: 317596 - DNA, 20 bp, Artificial Sequence
  Description of Artificial Sequence: Synthetic oligonucleotide
  Target: LAMA2; (+) strand; PAM type: YTN; PAM sequence: CTT
tcctttataaattaccctgt

SEQ ID NO: 317597 - DNA, 20 bp, Artificial Sequence
  Description of Artificial Sequence: Synthetic oligonucleotide
  Target: LAMA2; (+) strand; PAM type: YTN; PAM sequence: TTT
cctttataaattaccctgtc

SEQ ID NO: 317598 - DNA, 20 bp, Artificial Sequence
  Description of Artificial Sequence: Synthetic oligonucleotide
  Target: LAMA2; (+) strand; PAM type: YTN; PAM sequence: TTC
ctttataaattaccctgtct

SEQ ID NO: 317599 - DNA, 20 bp, Artificial Sequence
  Description of Artificial Sequence: Synthetic oligonucleotide
  Target: LAMA2; (+) strand; PAM type: YTN; PAM sequence: CTT
tataaattaccctgtcttgg

SEQ ID NO: 317600 - DNA, 20 bp, Artificial Sequence
  Description of Artificial Sequence: Synthetic oligonucleotide
  Target: LAMA2; (+) strand; PAM type: YTN; PAM sequence: TTT
ataaattaccctgtcttggg

SEQ ID NO: 317601 - DNA, 20 bp, Artificial Sequence
  Description of Artificial Sequence: Synthetic oligonucleotide
  Target: LAMA2; (+) strand; PAM type: YTN; PAM sequence: TTA
taaattaccctgtcttgggt

SEQ ID NO: 317602 - DNA, 20 bp, Artificial Sequence
  Description of Artificial Sequence: Synthetic oligonucleotide
  Target: LAMA2; (+) strand; PAM type: YTN; PAM sequence: TTA
ccctgtcttgggtatttctt

SEQ ID NO: 317603 - DNA, 20 bp, Artificial Sequence
  Description of Artificial Sequence: Synthetic oligonucleotide
  Target: LAMA2; (+) strand; PAM type: YTN; PAM sequence: CTG
tcttgggtatttctttatta

SEQ ID NO: 317604 - DNA, 20 bp, Artificial Sequence
  Description of Artificial Sequence: Synthetic oligonucleotide
  Target: LAMA2; (+) strand; PAM type: YTN; PAM sequence: CTT
gggtatttctttattagcag

SEQ ID NO: 317605 - DNA, 20 bp, Artificial Sequence
  Description of Artificial Sequence: Synthetic oligonucleotide
  Target: LAMA2; (+) strand; PAM type: YTN; PAM sequence: TTG
ggtatttctttattagcagc

SEQ ID NO: 317606 - DNA, 20 bp, Artificial Sequence
  Description of Artificial Sequence: Synthetic oligonucleotide
  Target: LAMA2; (+) strand; PAM type: YTN; PAM sequence: TTT
ctttattagcagcatgagaa

SEQ ID NO: 317607 - DNA, 20 bp, Artificial Sequence
  Description of Artificial Sequence: Synthetic oligonucleotide
  Target: LAMA2; (+) strand; PAM type: YTN; PAM sequence: TTC
tttattagcagcatgagaat

SEQ ID NO: 317608 - DNA, 20 bp, Artificial Sequence
  Description of Artificial Sequence: Synthetic oligonucleotide
  Target: LAMA2; (+) strand; PAM type: YTN; PAM sequence: CTT
tattagcagcatgagaatgg

SEQ ID NO: 317609 - DNA, 20 bp, Artificial Sequence
  Description of Artificial Sequence: Synthetic oligonucleotide
  Target: LAMA2; (+) strand; PAM type: YTN; PAM sequence: TTT
attagcagcatgagaatgga

SEQ ID NO: 317610 - DNA, 20 bp, Artificial Sequence
  Description of Artificial Sequence: Synthetic oligonucleotide
  Target: LAMA2; (+) strand; PAM type: YTN; PAM sequence: TTA
ttagcagcatgagaatggat

SEQ ID NO: 317611 - DNA, 20 bp, Artificial Sequence
  Description of Artificial Sequence: Synthetic oligonucleotide
  Target: LAMA2; (+) strand; PAM type: YTN; PAM sequence: TTA
gcagcatgagaatggattaa

SEQ ID NO: 317612 - DNA, 20 bp, Artificial Sequence
  Description of Artificial Sequence: Synthetic oligonucleotide
  Target: LAMA2; (+) strand; PAM type: YTN; PAM sequence: TTA
atacaaggcattagagggaa

SEQ ID NO: 317613 - DNA, 20 bp, Artificial Sequence
  Description of Artificial Sequence: Synthetic oligonucleotide
  Target: LAMA2; (+) strand; PAM type: YTN; PAM sequence: TTA
gagggaaagagtggggagag

SEQ ID NO: 317614 - DNA, 20 bp, Artificial Sequence
  Description of Artificial Sequence: Synthetic oligonucleotide
  Target: LAMA2; (+) strand; PAM type: YTN; PAM sequence: TTG
aaagacaagcaagaagcaga

SEQ ID NO: 317615 - DNA, 20 bp, Artificial Sequence
  Description of Artificial Sequence: Synthetic oligonucleotide
  Target: LAMA2; (+) strand; PAM type: YTN; PAM sequence: CTT
tgtgagccttgttagtgagt

SEQ ID NO: 317616 - DNA, 20 bp, Artificial Sequence
  Description of Artificial Sequence: Synthetic oligonucleotide
  Target: LAMA2; (+) strand; PAM type: YTN; PAM sequence: TTT
gtgagccttgttagtgagtt

SEQ ID NO: 317617 - DNA, 20 bp, Artificial Sequence
  Description of Artificial Sequence: Synthetic oligonucleotide
  Target: LAMA2; (+) strand; PAM type: YTN; PAM sequence: TTG
tgagccttgttagtgagttt

SEQ ID NO: 317618 - DNA, 20 bp, Artificial Sequence
  Description of Artificial Sequence: Synthetic oligonucleotide
  Target: LAMA2; (+) strand; PAM type: YTN; PAM sequence: CTT
gttagtgagtttcagggaaa

SEQ ID NO: 317619 - DNA, 20 bp, Artificial Sequence
  Description of Artificial Sequence: Synthetic oligonucleotide
  Target: LAMA2; (+) strand; PAM type: YTN; PAM sequence: TTG
ttagtgagtttcagggaaat

SEQ ID NO: 317620 - DNA, 20 bp, Artificial Sequence
  Description of Artificial Sequence: Synthetic oligonucleotide
  Target: LAMA2; (+) strand; PAM type: YTN; PAM sequence: TTA
gtgagtttcagggaaatccc

SEQ ID NO: 317621 - DNA, 20 bp, Artificial Sequence
  Description of Artificial Sequence: Synthetic oligonucleotide
  Target: LAMA2; (+) strand; PAM type: YTN; PAM sequence: TTT
cagggaaatccctctaactg

SEQ ID NO: 317622 - DNA, 20 bp, Artificial Sequence
  Description of Artificial Sequence: Synthetic oligonucleotide
  Target: LAMA2; (+) strand; PAM type: YTN; PAM sequence: TTC
agggaaatccctctaactgc

SEQ ID NO: 317623 - DNA, 20 bp, Artificial Sequence
  Description of Artificial Sequence: Synthetic oligonucleotide
  Target: LAMA2; (+) strand; PAM type: YTN; PAM sequence: CTC
taactgcaatgtggaaaatg

SEQ ID NO: 317624 - DNA, 20 bp, Artificial Sequence
  Description of Artificial Sequence: Synthetic oligonucleotide
  Target: LAMA2; (+) strand; PAM type: YTN; PAM sequence: CTA
actgcaatgtggaaaatgaa

SEQ ID NO: 317625 - DNA, 20 bp, Artificial Sequence
  Description of Artificial Sequence: Synthetic oligonucleotide
  Target: LAMA2; (+) strand; PAM type: YTN; PAM sequence: CTG
caatgtggaaaatgaattgg

SEQ ID NO: 317626 - DNA, 20 bp, Artificial Sequence
  Description of Artificial Sequence: Synthetic oligonucleotide
  Target: LAMA2; (+) strand; PAM type: YTN; PAM sequence: TTG
gaaaagtcagaagaggaaaa

SEQ ID NO: 317627 - DNA, 20 bp, Artificial Sequence
  Description of Artificial Sequence: Synthetic oligonucleotide
  Target: LAMA2; (+) strand; PAM type: YTN; PAM sequence: TTC
attaaaaggatgtgaagtaa

SEQ ID NO: 317628 - DNA, 20 bp, Artificial Sequence
  Description of Artificial Sequence: Synthetic oligonucleotide
  Target: LAMA2; (+) strand; PAM type: YTN; PAM sequence: TTA
aaaggatgtgaagtaattaa

SEQ ID NO: 317629 - DNA, 20 bp, Artificial Sequence
  Description of Artificial Sequence: Synthetic oligonucleotide
  Target: LAMA2; (+) strand; PAM type: YTN; PAM sequence: TTA
aagggatttaggataatggc

SEQ ID NO: 317630 - DNA, 20 bp, Artificial Sequence
  Description of Artificial Sequence: Synthetic oligonucleotide
  Target: LAMA2; (+) strand; PAM type: YTN; PAM sequence: TTT
aggataatggcctgaactaa

SEQ ID NO: 317631 - DNA, 20 bp, Artificial Sequence
  Description of Artificial Sequence: Synthetic oligonucleotide
  Target: LAMA2; (+) strand; PAM type: YTN; PAM sequence: TTA
ggataatggcctgaactaag

SEQ ID NO: 317632 - DNA, 20 bp, Artificial Sequence
  Description of Artificial Sequence: Synthetic oligonucleotide
  Target: LAMA2; (+) strand; PAM type: YTN; PAM sequence: CTG
aactaagatggtggcagtgg

SEQ ID NO: 317633 - DNA, 20 bp, Artificial Sequence
  Description of Artificial Sequence: Synthetic oligonucleotide
  Target: LAMA2; (+) strand; PAM type: YTN; PAM sequence: CTA
agatggtggcagtgggaatg

SEQ ID NO: 317634 - DNA, 20 bp, Artificial Sequence
  Description of Artificial Sequence: Synthetic oligonucleotide
  Target: LAMA2; (+) strand; PAM type: YTN; PAM sequence: CTG
acaggattttttttgtattt

SEQ ID NO: 317635 - DNA, 20 bp, Artificial Sequence
  Description of Artificial Sequence: Synthetic oligonucleotide
  Target: LAMA2; (+) strand; PAM type: YTN; PAM sequence: TTT
tttttgtattttgactcagc

SEQ ID NO: 317636 - DNA, 20 bp, Artificial Sequence
  Description of Artificial Sequence: Synthetic oligonucleotide
  Target: LAMA2; (+) strand; PAM type: YTN; PAM sequence: TTT
ttttgtattttgactcagca

SEQ ID NO: 317637 - DNA, 20 bp, Artificial Sequence
  Description of Artificial Sequence: Synthetic oligonucleotide
  Target: LAMA2; (+) strand; PAM type: YTN; PAM sequence: TTT
tttgtattttgactcagcag

SEQ ID NO: 317638 - DNA, 20 bp, Artificial Sequence
  Description of Artificial Sequence: Synthetic oligonucleotide
  Target: LAMA2; (+) strand; PAM type: YTN; PAM sequence: TTT
ttgtattttgactcagcagg

SEQ ID NO: 317639 - DNA, 20 bp, Artificial Sequence
  Description of Artificial Sequence: Synthetic oligonucleotide
  Target: LAMA2; (+) strand; PAM type: YTN; PAM sequence: TTT
tgtattttgactcagcaggt

SEQ ID NO: 317640 - DNA, 20 bp, Artificial Sequence
  Description of Artificial Sequence: Synthetic oligonucleotide
  Target: LAMA2; (+) strand; PAM type: YTN; PAM sequence: TTT
gtattttgactcagcaggtg

SEQ ID NO: 317641 - DNA, 20 bp, Artificial Sequence
  Description of Artificial Sequence: Synthetic oligonucleotide
  Target: LAMA2; (+) strand; PAM type: YTN; PAM sequence: TTG
tattttgactcagcaggtgt

SEQ ID NO: 317642 - DNA, 20 bp, Artificial Sequence
  Description of Artificial Sequence: Synthetic oligonucleotide
  Target: LAMA2; (+) strand; PAM type: YTN; PAM sequence: TTT
tgactcagcaggtgttggta

SEQ ID NO: 317643 - DNA, 20 bp, Artificial Sequence
  Description of Artificial Sequence: Synthetic oligonucleotide
  Target: LAMA2; (+) strand; PAM type: YTN; PAM sequence: TTT
gactcagcaggtgttggtag

SEQ ID NO: 317644 - DNA, 20 bp, Artificial Sequence
  Description of Artificial Sequence: Synthetic oligonucleotide
  Target: LAMA2; (+) strand; PAM type: YTN; PAM sequence: TTG
actcagcaggtgttggtagc

SEQ ID NO: 317645 - DNA, 20 bp, Artificial Sequence
  Description of Artificial Sequence: Synthetic oligonucleotide
  Target: LAMA2; (+) strand; PAM type: YTN; PAM sequence: CTC
agcaggtgttggtagcatta

SEQ ID NO: 317646 - DNA, 20 bp, Artificial Sequence
  Description of Artificial Sequence: Synthetic oligonucleotide
  Target: LAMA2; (+) strand; PAM type: YTN; PAM sequence: TTG
gtagcattagatatagagag

SEQ ID NO: 317647 - DNA, 20 bp, Artificial Sequence
  Description of Artificial Sequence: Synthetic oligonucleotide
  Target: LAMA2; (+) strand; PAM type: YTN; PAM sequence: TTA
gatatagagagtggggagga

SEQ ID NO: 317648 - DNA, 20 bp, Artificial Sequence
  Description of Artificial Sequence: Synthetic oligonucleotide
  Target: LAMA2; (+) strand; PAM type: YTN; PAM sequence: CTC
taggcatgatgctcagattg

SEQ ID NO: 317649 - DNA, 20 bp, Artificial Sequence
  Description of Artificial Sequence: Synthetic oligonucleotide
  Target: LAMA2; (+) strand; PAM type: YTN; PAM sequence: CTA
ggcatgatgctcagattgct

SEQ ID NO: 317650 - DNA, 20 bp, Artificial Sequence
  Description of Artificial Sequence: Synthetic oligonucleotide
  Target: LAMA2; (+) strand; PAM type: YTN; PAM sequence: CTC
agattgctgatttggttaaa

SEQ ID NO: 317651 - DNA, 20 bp, Artificial Sequence
  Description of Artificial Sequence: Synthetic oligonucleotide
  Target: LAMA2; (+) strand; PAM type: YTN; PAM sequence: TTG
ctgatttggttaaaggaagc

SEQ ID NO: 317652 - DNA, 20 bp, Artificial Sequence
  Description of Artificial Sequence: Synthetic oligonucleotide
  Target: LAMA2; (+) strand; PAM type: YTN; PAM sequence: CTG
atttggttaaaggaagcaga

SEQ ID NO: 317653 - DNA, 20 bp, Artificial Sequence
  Description of Artificial Sequence: Synthetic oligonucleotide
  Target: LAMA2; (+) strand; PAM type: YTN; PAM sequence: TTT
ggttaaaggaagcagagaaa

SEQ ID NO: 317654 - DNA, 20 bp, Artificial Sequence
  Description of Artificial Sequence: Synthetic oligonucleotide
  Target: LAMA2; (+) strand; PAM type: YTN; PAM sequence: TTG
gttaaaggaagcagagaaag

SEQ ID NO: 317655 - DNA, 20 bp, Artificial Sequence
  Description of Artificial Sequence: Synthetic oligonucleotide
  Target: LAMA2; (+) strand; PAM type: YTN; PAM sequence: TTA
aaggaagcagagaaagatac

SEQ ID NO: 317656 - DNA, 20 bp, Artificial Sequence
  Description of Artificial Sequence: Synthetic oligonucleotide
  Target: LAMA2; (+) strand; PAM type: YTN; PAM sequence: CTG
gagaggaaacaagaatcccc

SEQ ID NO: 317657 - DNA, 20 bp, Artificial Sequence
  Description of Artificial Sequence: Synthetic oligonucleotide
  Target: LAMA2; (+) strand; PAM type: YTN; PAM sequence: CTT
tttgttttgttttttccagt

SEQ ID NO: 317658 - DNA, 20 bp, Artificial Sequence
  Description of Artificial Sequence: Synthetic oligonucleotide
  Target: LAMA2; (+) strand; PAM type: YTN; PAM sequence: TTT
ttgttttgttttttccagtt

SEQ ID NO: 317659 - DNA, 20 bp, Artificial Sequence
  Description of Artificial Sequence: Synthetic oligonucleotide
  Target: LAMA2; (+) strand; PAM type: YTN; PAM sequence: TTT
tgttttgttttttccagttc

SEQ ID NO: 317660 - DNA, 20 bp, Artificial Sequence
  Description of Artificial Sequence: Synthetic oligonucleotide
  Target: LAMA2; (+) strand; PAM type: YTN; PAM sequence: TTT
gttttgttttttccagttcc

SEQ ID NO: 317661 - DNA, 20 bp, Artificial Sequence
  Description of Artificial Sequence: Synthetic oligonucleotide
  Target: LAMA2; (+) strand; PAM type: YTN; PAM sequence: TTG
ttttgttttttccagttcct

SEQ ID NO: 317662 - DNA, 20 bp, Artificial Sequence
  Description of Artificial Sequence: Synthetic oligonucleotide
  Target: LAMA2; (+) strand; PAM type: YTN; PAM sequence: TTT
tgttttttccagttcctgat

SEQ ID NO: 317663 - DNA, 20 bp, Artificial Sequence
  Description of Artificial Sequence: Synthetic oligonucleotide
  Target: LAMA2; (+) strand; PAM type: YTN; PAM sequence: TTT
gttttttccagttcctgata

SEQ ID NO: 317664 - DNA, 20 bp, Artificial Sequence
  Description of Artificial Sequence: Synthetic oligonucleotide
  Target: LAMA2; (+) strand; PAM type: YTN; PAM sequence: TTG
ttttttccagttcctgatag

SEQ ID NO: 317665 - DNA, 20 bp, Artificial Sequence
  Description of Artificial Sequence: Synthetic oligonucleotide
  Target: LAMA2; (+) strand; PAM type: YTN; PAM sequence: TTT
tttccagttcctgatagata

SEQ ID NO: 317666 - DNA, 20 bp, Artificial Sequence
  Description of Artificial Sequence: Synthetic oligonucleotide
  Target: LAMA2; (+) strand; PAM type: YTN; PAM sequence: TTT
ttccagttcctgatagatag

SEQ ID NO: 317667 - DNA, 20 bp, Artificial Sequence
  Description of Artificial Sequence: Synthetic oligonucleotide
  Target: LAMA2; (+) strand; PAM type: YTN; PAM sequence: TTT
tccagttcctgatagatagc

SEQ ID NO: 317668 - DNA, 20 bp, Artificial Sequence
  Description of Artificial Sequence: Synthetic oligonucleotide
  Target: LAMA2; (+) strand; PAM type: YTN; PAM sequence: TTT
ccagttcctgatagatagcc

SEQ ID NO: 317669 - DNA, 20 bp, Artificial Sequence
  Description of Artificial Sequence: Synthetic oligonucleotide
  Target: LAMA2; (+) strand; PAM type: YTN; PAM sequence: TTC
cagttcctgatagatagcca

SEQ ID NO: 317670 - DNA, 20 bp, Artificial Sequence
  Description of Artificial Sequence: Synthetic oligonucleotide
  Target: LAMA2; (+) strand; PAM type: YTN; PAM sequence: TTC
ctgatagatagccatgctca

SEQ ID NO: 317671 - DNA, 20 bp, Artificial Sequence
  Description of Artificial Sequence: Synthetic oligonucleotide
  Target: LAMA2; (+) strand; PAM type: YTN; PAM sequence: CTG
atagatagccatgctcaagt

SEQ ID NO: 317672 - DNA, 20 bp, Artificial Sequence
  Description of Artificial Sequence: Synthetic oligonucleotide
  Target: LAMA2; (+) strand; PAM type: YTN; PAM sequence: CTC
aagtgtcccagtggcagttg

SEQ ID NO: 317673 - DNA, 20 bp, Artificial Sequence
  Description of Artificial Sequence: Synthetic oligonucleotide
  Target: LAMA2; (+) strand; PAM type: YTN; PAM sequence: TTG
agtatttagagtcaaagctc

SEQ ID NO: 317674 - DNA, 20 bp, Artificial Sequence
  Description of Artificial Sequence: Synthetic oligonucleotide
  Target: LAMA2; (+) strand; PAM type: YTN; PAM sequence: TTT
agagtcaaagctcaggggag

SEQ ID NO: 317675 - DNA, 20 bp, Artificial Sequence
  Description of Artificial Sequence: Synthetic oligonucleotide
  Target: LAMA2; (+) strand; PAM type: YTN; PAM sequence: TTA
gagtcaaagctcaggggaga

SEQ ID NO: 317676 - DNA, 20 bp, Artificial Sequence
  Description of Artificial Sequence: Synthetic oligonucleotide
  Target: LAMA2; (+) strand; PAM type: YTN; PAM sequence: CTC
aggggagaactctagctggt

SEQ ID NO: 317677 - DNA, 20 bp, Artificial Sequence
  Description of Artificial Sequence: Synthetic oligonucleotide
  Target: LAMA2; (+) strand; PAM type: YTN; PAM sequence: CTC
tagctggtgataatgatttg

SEQ ID NO: 317678 - DNA, 20 bp, Artificial Sequence
  Description of Artificial Sequence: Synthetic oligonucleotide
  Target: LAMA2; (+) strand; PAM type: YTN; PAM sequence: CTA
gctggtgataatgatttggg

SEQ ID NO: 317679 - DNA, 20 bp, Artificial Sequence
  Description of Artificial Sequence: Synthetic oligonucleotide
  Target: LAMA2; (+) strand; PAM type: YTN; PAM sequence: CTG
gtgataatgatttgggaatt

SEQ ID NO: 317680 - DNA, 20 bp, Artificial Sequence
  Description of Artificial Sequence: Synthetic oligonucleotide
  Target: LAMA2; (+) strand; PAM type: YTN; PAM sequence: TTT
gggaattttggcataaaaat

SEQ ID NO: 317681 - DNA, 20 bp, Artificial Sequence
  Description of Artificial Sequence: Synthetic oligonucleotide
  Target: LAMA2; (+) strand; PAM type: YTN; PAM sequence: TTG
ggaattttggcataaaaata

SEQ ID NO: 317682 - DNA, 20 bp, Artificial Sequence
  Description of Artificial Sequence: Synthetic oligonucleotide
  Target: LAMA2; (+) strand; PAM type: YTN; PAM sequence: TTT
tggcataaaaatactcattt

SEQ ID NO: 317683 - DNA, 20 bp, Artificial Sequence
  Description of Artificial Sequence: Synthetic oligonucleotide
  Target: LAMA2; (+) strand; PAM type: YTN; PAM sequence: TTT
ggcataaaaatactcatttg

SEQ ID NO: 317684 - DNA, 20 bp, Artificial Sequence
  Description of Artificial Sequence: Synthetic oligonucleotide
  Target: LAMA2; (+) strand; PAM type: YTN; PAM sequence: TTG
gcataaaaatactcatttga

SEQ ID NO: 317685 - DNA, 20 bp, Artificial Sequence
  Description of Artificial Sequence: Synthetic oligonucleotide
  Target: LAMA2; (+) strand; PAM type: YTN; PAM sequence: CTC
atttgaacccagggaaatgg

SEQ ID NO: 317686 - DNA, 20 bp, Artificial Sequence
  Description of Artificial Sequence: Synthetic oligonucleotide
  Target: LAMA2; (+) strand; PAM type: YTN; PAM sequence: TTT
gaacccagggaaatgggagg

SEQ ID NO: 317687 - DNA, 20 bp, Artificial Sequence
  Description of Artificial Sequence: Synthetic oligonucleotide
  Target: LAMA2; (+) strand; PAM type: YTN; PAM sequence: TTG
aacccagggaaatgggaggt

SEQ ID NO: 317688 - DNA, 20 bp, Artificial Sequence
  Description of Artificial Sequence: Synthetic oligonucleotide
  Target: LAMA2; (+) strand; PAM type: YTN; PAM sequence: CTT
gtagaaggaagagactgtgt

SEQ ID NO: 317689 - DNA, 20 bp, Artificial Sequence
  Description of Artificial Sequence: Synthetic oligonucleotide
  Target: LAMA2; (+) strand; PAM type: YTN; PAM sequence: TTG
tagaaggaagagactgtgta

SEQ ID NO: 317690 - DNA, 20 bp, Artificial Sequence
  Description of Artificial Sequence: Synthetic oligonucleotide
  Target: LAMA2; (+) strand; PAM type: YTN; PAM sequence: CTG
tgtagtaggaacacagggaa

SEQ ID NO: 317691 - DNA, 20 bp, Artificial Sequence
  Description of Artificial Sequence: Synthetic oligonucleotide
  Target: LAMA2; (+) strand; PAM type: YTN; PAM sequence: CTT
tgcttgagggtgtactctac

SEQ ID NO: 317692 - DNA, 20 bp, Artificial Sequence
  Description of Artificial Sequence: Synthetic oligonucleotide
  Target: LAMA2; (+) strand; PAM type: YTN; PAM sequence: TTT
gcttgagggtgtactctaca

SEQ ID NO: 317693 - DNA, 20 bp, Artificial Sequence
  Description of Artificial Sequence: Synthetic oligonucleotide
  Target: LAMA2; (+) strand; PAM type: YTN; PAM sequence: TTG
cttgagggtgtactctacat

SEQ ID NO: 317694 - DNA, 20 bp, Artificial Sequence
  Description of Artificial Sequence: Synthetic oligonucleotide
  Target: LAMA2; (+) strand; PAM type: YTN; PAM sequence: CTT
gagggtgtactctacattta

SEQ ID NO: 317695 - DNA, 20 bp, Artificial Sequence
  Description of Artificial Sequence: Synthetic oligonucleotide
  Target: LAMA2; (+) strand; PAM type: YTN; PAM sequence: TTG
agggtgtactctacatttaa

SEQ ID NO: 317696 - DNA, 20 bp, Artificial Sequence
  Description of Artificial Sequence: Synthetic oligonucleotide
  Target: LAMA2; (+) strand; PAM type: YTN; PAM sequence: CTC
tacatttaaatttttctctt

SEQ ID NO: 317697 - DNA, 20 bp, Artificial Sequence
  Description of Artificial Sequence: Synthetic oligonucleotide
  Target: LAMA2; (+) strand; PAM type: YTN; PAM sequence: CTA
catttaaatttttctctttg

SEQ ID NO: 317698 - DNA, 20 bp, Artificial Sequence
  Description of Artificial Sequence: Synthetic oligonucleotide
  Target: LAMA2; (+) strand; PAM type: YTN; PAM sequence: TTT
aaatttttctctttgagaga

SEQ ID NO: 317699 - DNA, 20 bp, Artificial Sequence
  Description of Artificial Sequence: Synthetic oligonucleotide
  Target: LAMA2; (+) strand; PAM type: YTN; PAM sequence: TTA
aatttttctctttgagagaa

SEQ ID NO: 317700 - DNA, 20 bp, Artificial Sequence
  Description of Artificial Sequence: Synthetic oligonucleotide
  Target: LAMA2; (+) strand; PAM type: YTN; PAM sequence: TTT
ttctctttgagagaagaatc

SEQ ID NO: 317701 - DNA, 20 bp, Artificial Sequence
  Description of Artificial Sequence: Synthetic oligonucleotide
  Target: LAMA2; (+) strand; PAM type: YTN; PAM sequence: TTT
tctctttgagagaagaatca

SEQ ID NO: 317702 - DNA, 20 bp, Artificial Sequence
  Description of Artificial Sequence: Synthetic oligonucleotide
  Target: LAMA2; (+) strand; PAM type: YTN; PAM sequence: TTT
ctctttgagagaagaatcat

SEQ ID NO: 317703 - DNA, 20 bp, Artificial Sequence
  Description of Artificial Sequence: Synthetic oligonucleotide
  Target: LAMA2; (+) strand; PAM type: YTN; PAM sequence: TTC
tctttgagagaagaatcatg

SEQ ID NO: 317704 - DNA, 20 bp, Artificial Sequence
  Description of Artificial Sequence: Synthetic oligonucleotide
  Target: LAMA2; (+) strand; PAM type: YTN; PAM sequence: CTC
tttgagagaagaatcatgac

SEQ ID NO: 317705 - DNA, 20 bp, Artificial Sequence
  Description of Artificial Sequence: Synthetic oligonucleotide
  Target: LAMA2; (+) strand; PAM type: YTN; PAM sequence: CTT
tgagagaagaatcatgacaa

SEQ ID NO: 317706 - DNA, 20 bp, Artificial Sequence
  Description of Artificial Sequence: Synthetic oligonucleotide
  Target: LAMA2; (+) strand; PAM type: YTN; PAM sequence: TTT
gagagaagaatcatgacaat

SEQ ID NO: 317707 - DNA, 20 bp, Artificial Sequence
  Description of Artificial Sequence: Synthetic oligonucleotide
  Target: LAMA2; (+) strand; PAM type: YTN; PAM sequence: TTG
agagaagaatcatgacaata

SEQ ID NO: 317708 - DNA, 20 bp, Artificial Sequence
  Description of Artificial Sequence: Synthetic oligonucleotide
  Target: LAMA2; (+) strand; PAM type: YTN; PAM sequence: TTT
gatttattccatatttcaga

SEQ ID NO: 317709 - DNA, 20 bp, Artificial Sequence
  Description of Artificial Sequence: Synthetic oligonucleotide
  Target: LAMA2; (+) strand; PAM type: YTN; PAM sequence: TTG
atttattccatatttcagat

SEQ ID NO: 317710 - DNA, 20 bp, Artificial Sequence
  Description of Artificial Sequence: Synthetic oligonucleotide
  Target: LAMA2; (+) strand; PAM type: YTN; PAM sequence: TTT
attccatatttcagattgtt

SEQ ID NO: 317711 - DNA, 20 bp, Artificial Sequence
  Description of Artificial Sequence: Synthetic oligonucleotide
  Target: LAMA2; (+) strand; PAM type: YTN; PAM sequence: TTA
ttccatatttcagattgttt

SEQ ID NO: 317712 - DNA, 20 bp, Artificial Sequence
  Description of Artificial Sequence: Synthetic oligonucleotide
  Target: LAMA2; (+) strand; PAM type: YTN; PAM sequence: TTC
catatttcagattgttttga

SEQ ID NO: 317713 - DNA, 20 bp, Artificial Sequence
  Description of Artificial Sequence: Synthetic oligonucleotide
  Target: LAMA2; (+) strand; PAM type: YTN; PAM sequence: TTT
cagattgttttgaaagtggt

SEQ ID NO: 317714 - DNA, 20 bp, Artificial Sequence
  Description of Artificial Sequence: Synthetic oligonucleotide
  Target: LAMA2; (+) strand; PAM type: YTN; PAM sequence: TTC
agattgttttgaaagtggta

SEQ ID NO: 317715 - DNA, 20 bp, Artificial Sequence
  Description of Artificial Sequence: Synthetic oligonucleotide
  Target: LAMA2; (+) strand; PAM type: YTN; PAM sequence: TTG
ttttgaaagtggtatgtcac

SEQ ID NO: 317716 - DNA, 20 bp, Artificial Sequence
  Description of Artificial Sequence: Synthetic oligonucleotide
  Target: LAMA2; (+) strand; PAM type: YTN; PAM sequence: TTT
tgaaagtggtatgtcactaa

SEQ ID NO: 317717 - DNA, 20 bp, Artificial Sequence
  Description of Artificial Sequence: Synthetic oligonucleotide
  Target: LAMA2; (+) strand; PAM type: YTN; PAM sequence: TTT
gaaagtggtatgtcactaat

SEQ ID NO: 317718 - DNA, 20 bp, Artificial Sequence
  Description of Artificial Sequence: Synthetic oligonucleotide
  Target: LAMA2; (+) strand; PAM type: YTN; PAM sequence: TTG
aaagtggtatgtcactaatg

SEQ ID NO: 317719 - DNA, 20 bp, Artificial Sequence
  Description of Artificial Sequence: Synthetic oligonucleotide
  Target: LAMA2; (+) strand; PAM type: YTN; PAM sequence: CTA
atgaaaggagtgtgaagtga

SEQ ID NO: 317720 - DNA, 20 bp, Artificial Sequence
  Description of Artificial Sequence: Synthetic oligonucleotide
  Target: LAMA2; (+) strand; PAM type: YTN; PAM sequence: CTG
ttgacattcctgagaaatgt

SEQ ID NO: 317721 - DNA, 20 bp, Artificial Sequence
  Description of Artificial Sequence: Synthetic oligonucleotide
  Target: LAMA2; (+) strand; PAM type: YTN; PAM sequence: TTG
acattcctgagaaatgtatc

SEQ ID NO: 317722 - DNA, 20 bp, Artificial Sequence
  Description of Artificial Sequence: Synthetic oligonucleotide
  Target: LAMA2; (+) strand; PAM type: YTN; PAM sequence: TTC
ctgagaaatgtatctggggg

SEQ ID NO: 317723 - DNA, 20 bp, Artificial Sequence
  Description of Artificial Sequence: Synthetic oligonucleotide
  Target: LAMA2; (+) strand; PAM type: YTN; PAM sequence: CTG
agaaatgtatctggggggcc

SEQ ID NO: 317724 - DNA, 20 bp, Artificial Sequence
  Description of Artificial Sequence: Synthetic oligonucleotide
  Target: LAMA2; (+) strand; PAM type: YTN; PAM sequence: CTG
gggggccttaaaatctgtaa

SEQ ID NO: 317725 - DNA, 20 bp, Artificial Sequence
  Description of Artificial Sequence: Synthetic oligonucleotide
  Target: LAMA2; (+) strand; PAM type: YTN; PAM sequence: CTT
aaaatctgtaaatatcataa

SEQ ID NO: 317726 - DNA, 20 bp, Artificial Sequence
  Description of Artificial Sequence: Synthetic oligonucleotide
  Target: LAMA2; (+) strand; PAM type: YTN; PAM sequence: TTA
aaatctgtaaatatcataaa

SEQ ID NO: 317727 - DNA, 20 bp, Artificial Sequence
  Description of Artificial Sequence: Synthetic oligonucleotide
  Target: LAMA2; (+) strand; PAM type: YTN; PAM sequence: CTG
taaatatcataaatatcata

SEQ ID NO: 317728 - DNA, 20 bp, Artificial Sequence
  Description of Artificial Sequence: Synthetic oligonucleotide
  Target: LAMA2; (+) strand; PAM type: YTN; PAM sequence: CTA
agaaattctgggatttaagg

SEQ ID NO: 317729 - DNA, 20 bp, Artificial Sequence
  Description of Artificial Sequence: Synthetic oligonucleotide
  Target: LAMA2; (+) strand; PAM type: YTN; PAM sequence: TTC
tgggatttaaggatgagtgg

SEQ ID NO: 317730 - DNA, 20 bp, Artificial Sequence
  Description of Artificial Sequence: Synthetic oligonucleotide
  Target: LAMA2; (+) strand; PAM type: YTN; PAM sequence: CTG
ggatttaaggatgagtggga

SEQ ID NO: 317731 - DNA, 20 bp, Artificial Sequence
  Description of Artificial Sequence: Synthetic oligonucleotide
  Target: LAMA2; (+) strand; PAM type: YTN; PAM sequence: TTT
aaggatgagtgggagactta

SEQ ID NO: 317732 - DNA, 20 bp, Artificial Sequence
  Description of Artificial Sequence: Synthetic oligonucleotide
  Target: LAMA2; (+) strand; PAM type: YTN; PAM sequence: TTA
aggatgagtgggagacttag

SEQ ID NO: 317733 - DNA, 20 bp, Artificial Sequence
  Description of Artificial Sequence: Synthetic oligonucleotide
  Target: LAMA2; (+) strand; PAM type: YTN; PAM sequence: CTT
aggttcttggttctgtgttg

SEQ ID NO: 317734 - DNA, 20 bp, Artificial Sequence
  Description of Artificial Sequence: Synthetic oligonucleotide
  Target: LAMA2; (+) strand; PAM type: YTN; PAM sequence: TTA
ggttcttggttctgtgttgt

SEQ ID NO: 317735 - DNA, 20 bp, Artificial Sequence
  Description of Artificial Sequence: Synthetic oligonucleotide
  Target: LAMA2; (+) strand; PAM type: YTN; PAM sequence: TTC
ttggttctgtgttgtaagtc

SEQ ID NO: 317736 - DNA, 20 bp, Artificial Sequence
  Description of Artificial Sequence: Synthetic oligonucleotide
  Target: LAMA2; (+) strand; PAM type: YTN; PAM sequence: CTT
ggttctgtgttgtaagtcat

SEQ ID NO: 317737 - DNA, 20 bp, Artificial Sequence
  Description of Artificial Sequence: Synthetic oligonucleotide
  Target: LAMA2; (+) strand; PAM type: YTN; PAM sequence: TTG
gttctgtgttgtaagtcatt

SEQ ID NO: 317738 - DNA, 20 bp, Artificial Sequence
  Description of Artificial Sequence: Synthetic oligonucleotide
  Target: LAMA2; (+) strand; PAM type: YTN; PAM sequence: TTC
tgtgttgtaagtcattctcc

SEQ ID NO: 317739 - DNA, 20 bp, Artificial Sequence
  Description of Artificial Sequence: Synthetic oligonucleotide
  Target: LAMA2; (+) strand; PAM type: YTN; PAM sequence: CTG
tgttgtaagtcattctccaa

SEQ ID NO: 317740 - DNA, 20 bp, Artificial Sequence
  Description of Artificial Sequence: Synthetic oligonucleotide
  Target: LAMA2; (+) strand; PAM type: YTN; PAM sequence: TTG
taagtcattctccaagtgta

SEQ ID NO: 317741 - DNA, 20 bp, Artificial Sequence
  Description of Artificial Sequence: Synthetic oligonucleotide
  Target: LAMA2; (+) strand; PAM type: YTN; PAM sequence: TTC
tccaagtgtagcaggaccat

SEQ ID NO: 317742 - DNA, 20 bp, Artificial Sequence
  Description of Artificial Sequence: Synthetic oligonucleotide
  Target: LAMA2; (+) strand; PAM type: YTN; PAM sequence: CTC
caagtgtagcaggaccatag

SEQ ID NO: 317743 - DNA, 20 bp, Artificial Sequence
  Description of Artificial Sequence: Synthetic oligonucleotide
  Target: LAMA2; (+) strand; PAM type: YTN; PAM sequence: CTG
atgaaaatgatttatacagt

SEQ ID NO: 317744 - DNA, 20 bp, Artificial Sequence
  Description of Artificial Sequence: Synthetic oligonucleotide
  Target: LAMA2; (+) strand; PAM type: YTN; PAM sequence: TTT
atacagtagtcttatgatcc

SEQ ID NO: 317745 - DNA, 20 bp, Artificial Sequence
  Description of Artificial Sequence: Synthetic oligonucleotide
  Target: LAMA2; (+) strand; PAM type: YTN; PAM sequence: TTA
tacagtagtcttatgatcca

SEQ ID NO: 317746 - DNA, 20 bp, Artificial Sequence
  Description of Artificial Sequence: Synthetic oligonucleotide
  Target: LAMA2; (+) strand; PAM type: YTN; PAM sequence: CTT
atgatccaatgcccatgtat

SEQ ID NO: 317747 - DNA, 20 bp, Artificial Sequence
  Description of Artificial Sequence: Synthetic oligonucleotide
  Target: LAMA2; (+) strand; PAM type: YTN; PAM sequence: TTA
tgatccaatgcccatgtatg

SEQ ID NO: 317748 - DNA, 20 bp, Artificial Sequence
  Description of Artificial Sequence: Synthetic oligonucleotide
  Target: LAMA2; (+) strand; PAM type: YTN; PAM sequence: TTA
ctgttcctgtcttctaaatt

SEQ ID NO: 317749 - DNA, 20 bp, Artificial Sequence
  Description of Artificial Sequence: Synthetic oligonucleotide
  Target: LAMA2; (+) strand; PAM type: YTN; PAM sequence: CTG
ttcctgtcttctaaattggg

SEQ ID NO: 317750 - DNA, 20 bp, Artificial Sequence
  Description of Artificial Sequence: Synthetic oligonucleotide
  Target: LAMA2; (+) strand; PAM type: YTN; PAM sequence: TTC
ctgtcttctaaattggggtt

SEQ ID NO: 317751 - DNA, 20 bp, Artificial Sequence
  Description of Artificial Sequence: Synthetic oligonucleotide
  Target: LAMA2; (+) strand; PAM type: YTN; PAM sequence: CTG
tcttctaaattggggttccc

SEQ ID NO: 317752 - DNA, 20 bp, Artificial Sequence
  Description of Artificial Sequence: Synthetic oligonucleotide
  Target: LAMA2; (+) strand; PAM type: YTN; PAM sequence: CTT
ctaaattggggttcccagtg

SEQ ID NO: 317753 - DNA, 20 bp, Artificial Sequence
  Description of Artificial Sequence: Synthetic oligonucleotide
  Target: LAMA2; (+) strand; PAM type: YTN; PAM sequence: TTC
taaattggggttcccagtgt

SEQ ID NO: 317754 - DNA, 20 bp, Artificial Sequence
  Description of Artificial Sequence: Synthetic oligonucleotide
  Target: LAMA2; (+) strand; PAM type: YTN; PAM sequence: CTA
aattggggttcccagtgtaa

SEQ ID NO: 317755 - DNA, 20 bp, Artificial Sequence
  Description of Artificial Sequence: Synthetic oligonucleotide
  Target: LAMA2; (+) strand; PAM type: YTN; PAM sequence: TTG
gggttcccagtgtaatacag

SEQ ID NO: 317756 - DNA, 20 bp, Artificial Sequence
  Description of Artificial Sequence: Synthetic oligonucleotide
  Target: LAMA2; (+) strand; PAM type: YTN; PAM sequence: TTC
ccagtgtaatacaggaagac

SEQ ID NO: 317757 - DNA, 20 bp, Artificial Sequence
  Description of Artificial Sequence: Synthetic oligonucleotide
  Target: LAMA2; (+) strand; PAM type: YTN; PAM sequence: CTA
ctgtgtgctagtaaacagaa

SEQ ID NO: 317758 - DNA, 20 bp, Artificial Sequence
  Description of Artificial Sequence: Synthetic oligonucleotide
  Target: LAMA2; (+) strand; PAM type: YTN; PAM sequence: CTG
tgtgctagtaaacagaaagc

SEQ ID NO: 317759 - DNA, 20 bp, Artificial Sequence
  Description of Artificial Sequence: Synthetic oligonucleotide
  Target: LAMA2; (+) strand; PAM type: YTN; PAM sequence: CTA
gtaaacagaaagcacaatcc

SEQ ID NO: 317760 - DNA, 20 bp, Artificial Sequence
  Description of Artificial Sequence: Synthetic oligonucleotide
  Target: LAMA2; (+) strand; PAM type: YTN; PAM sequence: TTT
gaccatattttcctcgttgg

SEQ ID NO: 317761 - DNA, 20 bp, Artificial Sequence
  Description of Artificial Sequence: Synthetic oligonucleotide
  Target: LAMA2; (+) strand; PAM type: YTN; PAM sequence: TTG
accatattttcctcgttgga

SEQ ID NO: 317762 - DNA, 20 bp, Artificial Sequence
  Description of Artificial Sequence: Synthetic oligonucleotide
  Target: LAMA2; (+) strand; PAM type: YTN; PAM sequence: TTT
tcctcgttggatgtgtttat

SEQ ID NO: 317763 - DNA, 20 bp, Artificial Sequence
  Description of Artificial Sequence: Synthetic oligonucleotide
  Target: LAMA2; (+) strand; PAM type: YTN; PAM sequence: TTT
cctcgttggatgtgtttatg

SEQ ID NO: 317764 - DNA, 20 bp, Artificial Sequence
  Description of Artificial Sequence: Synthetic oligonucleotide
  Target: LAMA2; (+) strand; PAM type: YTN; PAM sequence: TTC
ctcgttggatgtgtttatgg

SEQ ID NO: 317765 - DNA, 20 bp, Artificial Sequence
  Description of Artificial Sequence: Synthetic oligonucleotide
  Target: LAMA2; (+) strand; PAM type: YTN; PAM sequence: CTC
gttggatgtgtttatggata

SEQ ID NO: 317766 - DNA, 20 bp, Artificial Sequence
  Description of Artificial Sequence: Synthetic oligonucleotide
  Target: LAMA2; (+) strand; PAM type: YTN; PAM sequence: TTG
gatgtgtttatggatatatt

SEQ ID NO: 317767 - DNA, 20 bp, Artificial Sequence
  Description of Artificial Sequence: Synthetic oligonucleotide
  Target: LAMA2; (+) strand; PAM type: YTN; PAM sequence: TTT
atggatatattttattctgc

SEQ ID NO: 317768 - DNA, 20 bp, Artificial Sequence
  Description of Artificial Sequence: Synthetic oligonucleotide
  Target: LAMA2; (+) strand; PAM type: YTN; PAM sequence: TTA
tggatatattttattctgct

SEQ ID NO: 317769 - DNA, 20 bp, Artificial Sequence
  Description of Artificial Sequence: Synthetic oligonucleotide
  Target: LAMA2; (+) strand; PAM type: YTN; PAM sequence: TTT
tattctgcttttatctttct

SEQ ID NO: 317770 - DNA, 20 bp, Artificial Sequence
  Description of Artificial Sequence: Synthetic oligonucleotide
  Target: LAMA2; (+) strand; PAM type: YTN; PAM sequence: TTT
attctgcttttatctttctg

SEQ ID NO: 317771 - DNA, 20 bp, Artificial Sequence
  Description of Artificial Sequence: Synthetic oligonucleotide
  Target: LAMA2; (+) strand; PAM type: YTN; PAM sequence: TTA
ttctgcttttatctttctga

SEQ ID NO: 317772 - DNA, 20 bp, Artificial Sequence
  Description of Artificial Sequence: Synthetic oligonucleotide
  Target: LAMA2; (+) strand; PAM type: YTN; PAM sequence: TTC
tgcttttatctttctgagat

SEQ ID NO: 317773 - DNA, 20 bp, Artificial Sequence
  Description of Artificial Sequence: Synthetic oligonucleotide
  Target: LAMA2; (+) strand; PAM type: YTN; PAM sequence: CTG
cttttatctttctgagatta

SEQ ID NO: 317774 - DNA, 20 bp, Artificial Sequence
  Description of Artificial Sequence: Synthetic oligonucleotide
  Target: LAMA2; (+) strand; PAM type: YTN; PAM sequence: CTT
ttatctttctgagattaatg

SEQ ID NO: 317775 - DNA, 20 bp, Artificial Sequence
  Description of Artificial Sequence: Synthetic oligonucleotide
  Target: LAMA2; (+) strand; PAM type: YTN; PAM sequence: TTT
tatctttctgagattaatgc

SEQ ID NO: 317776 - DNA, 20 bp, Artificial Sequence
  Description of Artificial Sequence: Synthetic oligonucleotide
  Target: LAMA2; (+) strand; PAM type: YTN; PAM sequence: TTT
atctttctgagattaatgcc

SEQ ID NO: 317777 - DNA, 20 bp, Artificial Sequence
  Description of Artificial Sequence: Synthetic oligonucleotide
  Target: LAMA2; (+) strand; PAM type: YTN; PAM sequence: TTA
tctttctgagattaatgcct

SEQ ID NO: 317778 - DNA, 20 bp, Artificial Sequence
  Description of Artificial Sequence: Synthetic oligonucleotide
  Target: LAMA2; (+) strand; PAM type: YTN; PAM sequence: CTT
tctgagattaatgccttatc

SEQ ID NO: 317779 - DNA, 20 bp, Artificial Sequence
  Description of Artificial Sequence: Synthetic oligonucleotide
  Target: LAMA2; (+) strand; PAM type: YTN; PAM sequence: TTT
ctgagattaatgccttatct

SEQ ID NO: 317780 - DNA, 20 bp, Artificial Sequence
  Description of Artificial Sequence: Synthetic oligonucleotide
  Target: LAMA2; (+) strand; PAM type: YTN; PAM sequence: TTC
tgagattaatgccttatctg

SEQ ID NO: 317781 - DNA, 20 bp, Artificial Sequence
  Description of Artificial Sequence: Synthetic oligonucleotide
  Target: LAMA2; (+) strand; PAM type: YTN; PAM sequence: CTG
agattaatgccttatctggc

SEQ ID NO: 317782 - DNA, 20 bp, Artificial Sequence
  Description of Artificial Sequence: Synthetic oligonucleotide
  Target: LAMA2; (+) strand; PAM type: YTN; PAM sequence: TTA
atgccttatctggccttttt

SEQ ID NO: 317783 - DNA, 20 bp, Artificial Sequence
  Description of Artificial Sequence: Synthetic oligonucleotide
  Target: LAMA2; (+) strand; PAM type: YTN; PAM sequence: CTT
atctggccttttttcctatg

SEQ ID NO: 317784 - DNA, 20 bp, Artificial Sequence
  Description of Artificial Sequence: Synthetic oligonucleotide
  Target: LAMA2; (+) strand; PAM type: YTN; PAM sequence: TTA
tctggccttttttcctatga

SEQ ID NO: 317785 - DNA, 20 bp, Artificial Sequence
  Description of Artificial Sequence: Synthetic oligonucleotide
  Target: LAMA2; (+) strand; PAM type: YTN; PAM sequence: CTG
gccttttttcctatgagtac

SEQ ID NO: 317786 - DNA, 20 bp, Artificial Sequence
  Description of Artificial Sequence: Synthetic oligonucleotide
  Target: LAMA2; (+) strand; PAM type: YTN; PAM sequence: CTT
ttttcctatgagtacctttg

SEQ ID NO: 317787 - DNA, 20 bp, Artificial Sequence
  Description of Artificial Sequence: Synthetic oligonucleotide
  Target: LAMA2; (+) strand; PAM type: YTN; PAM sequence: TTT
tttcctatgagtacctttgg

SEQ ID NO: 317788 - DNA, 20 bp, Artificial Sequence
  Description of Artificial Sequence: Synthetic oligonucleotide
  Target: LAMA2; (+) strand; PAM type: YTN; PAM sequence: TTT
ttcctatgagtacctttggt

SEQ ID NO: 317789 - DNA, 20 bp, Artificial Sequence
  Description of Artificial Sequence: Synthetic oligonucleotide
  Target: LAMA2; (+) strand; PAM type: YTN; PAM sequence: TTT
tcctatgagtacctttggtt

SEQ ID NO: 317790 - DNA, 20 bp, Artificial Sequence
  Description of Artificial Sequence: Synthetic oligonucleotide
  Target: LAMA2; (+) strand; PAM type: YTN; PAM sequence: TTT
cctatgagtacctttggtta

SEQ ID NO: 317791 - DNA, 20 bp, Artificial Sequence
  Description of Artificial Sequence: Synthetic oligonucleotide
  Target: LAMA2; (+) strand; PAM type: YTN; PAM sequence: TTC
ctatgagtacctttggttat

SEQ ID NO: 317792 - DNA, 20 bp, Artificial Sequence
  Description of Artificial Sequence: Synthetic oligonucleotide
  Target: LAMA2; (+) strand; PAM type: YTN; PAM sequence: CTA
tgagtacctttggttataaa

SEQ ID NO: 317793 - DNA, 20 bp, Artificial Sequence
  Description of Artificial Sequence: Synthetic oligonucleotide
  Target: LAMA2; (+) strand; PAM type: YTN; PAM sequence: CTT
tggttataaagaacttcgca

SEQ ID NO: 317794 - DNA, 20 bp, Artificial Sequence
  Description of Artificial Sequence: Synthetic oligonucleotide
  Target: LAMA2; (+) strand; PAM type: YTN; PAM sequence: TTT
ggttataaagaacttcgcat

SEQ ID NO: 317795 - DNA, 20 bp, Artificial Sequence
  Description of Artificial Sequence: Synthetic oligonucleotide
  Target: LAMA2; (+) strand; PAM type: YTN; PAM sequence: TTG
gttataaagaacttcgcatt

SEQ ID NO: 317796 - DNA, 20 bp, Artificial Sequence
  Description of Artificial Sequence: Synthetic oligonucleotide
  Target: LAMA2; (+) strand; PAM type: YTN; PAM sequence: TTA
taaagaacttcgcattgcta

SEQ ID NO: 317797 - DNA, 20 bp, Artificial Sequence
  Description of Artificial Sequence: Synthetic oligonucleotide
  Target: LAMA2; (+) strand; PAM type: YTN; PAM sequence: CTT
cgcattgctacattatcaat

SEQ ID NO: 317798 - DNA, 20 bp, Artificial Sequence
  Description of Artificial Sequence: Synthetic oligonucleotide
  Target: LAMA2; (+) strand; PAM type: YTN; PAM sequence: TTC
gcattgctacattatcaatt

SEQ ID NO: 317799 - DNA, 20 bp, Artificial Sequence
  Description of Artificial Sequence: Synthetic oligonucleotide
  Target: LAMA2; (+) strand; PAM type: YTN; PAM sequence: TTG
ctacattatcaattttcagc

SEQ ID NO: 317800 - DNA, 20 bp, Artificial Sequence
  Description of Artificial Sequence: Synthetic oligonucleotide
  Target: LAMA2; (+) strand; PAM type: YTN; PAM sequence: CTA
cattatcaattttcagcctc

SEQ ID NO: 317801 - DNA, 20 bp, Artificial Sequence
  Description of Artificial Sequence: Synthetic oligonucleotide
  Target: LAMA2; (+) strand; PAM type: YTN; PAM sequence: TTA
tcaattttcagcctctcttt

SEQ ID NO: 317802 - DNA, 20 bp, Artificial Sequence
  Description of Artificial Sequence: Synthetic oligonucleotide
  Target: LAMA2; (+) strand; PAM type: YTN; PAM sequence: TTT
tcagcctctcttttttattt

SEQ ID NO: 317803 - DNA, 20 bp, Artificial Sequence
  Description of Artificial Sequence: Synthetic oligonucleotide
  Target: LAMA2; (+) strand; PAM type: YTN; PAM sequence: TTT
cagcctctcttttttatttt

SEQ ID NO: 317804 - DNA, 20 bp, Artificial Sequence
  Description of Artificial Sequence: Synthetic oligonucleotide
  Target: LAMA2; (+) strand; PAM type: YTN; PAM sequence: TTC
agcctctcttttttattttt

SEQ ID NO: 317805 - DNA, 20 bp, Artificial Sequence
  Description of Artificial Sequence: Synthetic oligonucleotide
  Target: LAMA2; (+) strand; PAM type: YTN; PAM sequence: CTC
tcttttttatttttaatttc

SEQ ID NO: 317806 - DNA, 20 bp, Artificial Sequence
  Description of Artificial Sequence: Synthetic oligonucleotide
  Target: LAMA2; (+) strand; PAM type: YTN; PAM sequence: CTC
ttttttatttttaatttctt

SEQ ID NO: 317807 - DNA, 20 bp, Artificial Sequence
  Description of Artificial Sequence: Synthetic oligonucleotide
  Target: LAMA2; (+) strand; PAM type: YTN; PAM sequence: CTT
ttttatttttaatttctttg

SEQ ID NO: 317808 - DNA, 20 bp, Artificial Sequence
  Description of Artificial Sequence: Synthetic oligonucleotide
  Target: LAMA2; (+) strand; PAM type: YTN; PAM sequence: TTT
tttatttttaatttctttgc

SEQ ID NO: 317809 - DNA, 20 bp, Artificial Sequence
  Description of Artificial Sequence: Synthetic oligonucleotide
  Target: LAMA2; (+) strand; PAM type: YTN; PAM sequence: TTT
ttatttttaatttctttgcc

SEQ ID NO: 317810 - DNA, 20 bp, Artificial Sequence
  Description of Artificial Sequence: Synthetic oligonucleotide
  Target: LAMA2; (+) strand; PAM type: YTN; PAM sequence: TTT
tatttttaatttctttgcca

SEQ ID NO: 317811 - DNA, 20 bp, Artificial Sequence
  Description of Artificial Sequence: Synthetic oligonucleotide
  Target: LAMA2; (+) strand; PAM type: YTN; PAM sequence: TTT
atttttaatttctttgccac

SEQ ID NO: 317812 - DNA, 20 bp, Artificial Sequence
  Description of Artificial Sequence: Synthetic oligonucleotide
  Target: LAMA2; (+) strand; PAM type: YTN; PAM sequence: TTA
tttttaatttctttgccacc

SEQ ID NO: 317813 - DNA, 20 bp, Artificial Sequence
  Description of Artificial Sequence: Synthetic oligonucleotide
  Target: LAMA2; (+) strand; PAM type: YTN; PAM sequence: TTT
ttaatttctttgccacctct

SEQ ID NO: 317814 - DNA, 20 bp, Artificial Sequence
  Description of Artificial Sequence: Synthetic oligonucleotide
  Target: LAMA2; (+) strand; PAM type: YTN; PAM sequence: TTT
taatttctttgccacctctt

SEQ ID NO: 317815 - DNA, 20 bp, Artificial Sequence
  Description of Artificial Sequence: Synthetic oligonucleotide
  Target: LAMA2; (+) strand; PAM type: YTN; PAM sequence: TTT
aatttctttgccacctcttc

SEQ ID NO: 317816 - DNA, 20 bp, Artificial Sequence
  Description of Artificial Sequence: Synthetic oligonucleotide
  Target: LAMA2; (+) strand; PAM type: YTN; PAM sequence: TTA
atttctttgccacctcttct

SEQ ID NO: 317817 - DNA, 20 bp, Artificial Sequence
  Description of Artificial Sequence: Synthetic oligonucleotide
  Target: LAMA2; (+) strand; PAM type: YTN; PAM sequence: TTT
ctttgccacctcttcttaat

SEQ ID NO: 317818 - DNA, 20 bp, Artificial Sequence
  Description of Artificial Sequence: Synthetic oligonucleotide
  Target: LAMA2; (+) strand; PAM type: YTN; PAM sequence: TTC
tttgccacctcttcttaata

SEQ ID NO: 317819 - DNA, 20 bp, Artificial Sequence
  Description of Artificial Sequence: Synthetic oligonucleotide
  Target: LAMA2; (+) strand; PAM type: YTN; PAM sequence: CTT
tgccacctcttcttaataca

SEQ ID NO: 317820 - DNA, 20 bp, Artificial Sequence
  Description of Artificial Sequence: Synthetic oligonucleotide
  Target: LAMA2; (+) strand; PAM type: YTN; PAM sequence: TTT
gccacctcttcttaatacat

SEQ ID NO: 317821 - DNA, 20 bp, Artificial Sequence
  Description of Artificial Sequence: Synthetic oligonucleotide
  Target: LAMA2; (+) strand; PAM type: YTN; PAM sequence: TTG
ccacctcttcttaatacata

SEQ ID NO: 317822 - DNA, 20 bp, Artificial Sequence
  Description of Artificial Sequence: Synthetic oligonucleotide
  Target: LAMA2; (+) strand; PAM type: YTN; PAM sequence: CTC
ttcttaatacataatgctct

SEQ ID NO: 317823 - DNA, 20 bp, Artificial Sequence
  Description of Artificial Sequence: Synthetic oligonucleotide
  Target: LAMA2; (+) strand; PAM type: YTN; PAM sequence: CTT
cttaatacataatgctcttt

SEQ ID NO: 317824 - DNA, 20 bp, Artificial Sequence
  Description of Artificial Sequence: Synthetic oligonucleotide
  Target: LAMA2; (+) strand; PAM type: YTN; PAM sequence: TTC
ttaatacataatgctctttc

SEQ ID NO: 317825 - DNA, 20 bp, Artificial Sequence
  Description of Artificial Sequence: Synthetic oligonucleotide
  Target: LAMA2; (+) strand; PAM type: YTN; PAM sequence: CTT
aatacataatgctctttctt

SEQ ID NO: 317826 - DNA, 20 bp, Artificial Sequence
  Description of Artificial Sequence: Synthetic oligonucleotide
  Target: LAMA2; (+) strand; PAM type: YTN; PAM sequence: TTA
atacataatgctctttcttc

SEQ ID NO: 317827 - DNA, 20 bp, Artificial Sequence
  Description of Artificial Sequence: Synthetic oligonucleotide
  Target: LAMA2; (+) strand; PAM type: YTN; PAM sequence: CTC
tttcttccttcgttcctccc

SEQ ID NO: 317828 - DNA, 20 bp, Artificial Sequence
  Description of Artificial Sequence: Synthetic oligonucleotide
  Target: LAMA2; (+) strand; PAM type: YTN; PAM sequence: CTT
tcttccttcgttcctccccc

SEQ ID NO: 317829 - DNA, 20 bp, Artificial Sequence
  Description of Artificial Sequence: Synthetic oligonucleotide
  Target: LAMA2; (+) strand; PAM type: YTN; PAM sequence: TTT
cttccttcgttcctccccct

SEQ ID NO: 317830 - DNA, 20 bp, Artificial Sequence
  Description of Artificial Sequence: Synthetic oligonucleotide
  Target: LAMA2; (+) strand; PAM type: YTN; PAM sequence: TTC
ttccttcgttcctccccctc

SEQ ID NO: 317831 - DNA, 20 bp, Artificial Sequence
  Description of Artificial Sequence: Synthetic oligonucleotide
  Target: LAMA2; (+) strand; PAM type: YTN; PAM sequence: CTT
ccttcgttcctccccctctc

SEQ ID NO: 317832 - DNA, 20 bp, Artificial Sequence
  Description of Artificial Sequence: Synthetic oligonucleotide
  Target: LAMA2; (+) strand; PAM type: YTN; PAM sequence: TTC
cttcgttcctccccctctct

SEQ ID NO: 317833 - DNA, 20 bp, Artificial Sequence
  Description of Artificial Sequence: Synthetic oligonucleotide
  Target: LAMA2; (+) strand; PAM type: YTN; PAM sequence: CTT
cgttcctccccctctctgtt

SEQ ID NO: 317834 - DNA, 20 bp, Artificial Sequence
  Description of Artificial Sequence: Synthetic oligonucleotide
  Target: LAMA2; (+) strand; PAM type: YTN; PAM sequence: TTC
gttcctccccctctctgttt

SEQ ID NO: 317835 - DNA, 20 bp, Artificial Sequence
  Description of Artificial Sequence: Synthetic oligonucleotide
  Target: LAMA2; (+) strand; PAM type: YTN; PAM sequence: TTC
ctccccctctctgtttcttc

SEQ ID NO: 317836 - DNA, 20 bp, Artificial Sequence
  Description of Artificial Sequence: Synthetic oligonucleotide
  Target: LAMA2; (+) strand; PAM type: YTN; PAM sequence: CTC
cccctctctgtttcttcctt

SEQ ID NO: 317837 - DNA, 20 bp, Artificial Sequence
  Description of Artificial Sequence: Synthetic oligonucleotide
  Target: LAMA2; (+) strand; PAM type: YTN; PAM sequence: CTC
tctgtttcttccttcctcct

SEQ ID NO: 317838 - DNA, 20 bp, Artificial Sequence
  Description of Artificial Sequence: Synthetic oligonucleotide
  Target: LAMA2; (+) strand; PAM type: YTN; PAM sequence: CTC
tgtttcttccttcctccttt

SEQ ID NO: 317839 - DNA, 20 bp, Artificial Sequence
  Description of Artificial Sequence: Synthetic oligonucleotide
  Target: LAMA2; (+) strand; PAM type: YTN; PAM sequence: CTG
tttcttccttcctcctttct

SEQ ID NO: 317840 - DNA, 20 bp, Artificial Sequence
  Description of Artificial Sequence: Synthetic oligonucleotide
  Target: LAMA2; (+) strand; PAM type: YTN; PAM sequence: TTT
cttccttcctcctttctttc

SEQ ID NO: 317841 - DNA, 20 bp, Artificial Sequence
  Description of Artificial Sequence: Synthetic oligonucleotide
  Target: LAMA2; (+) strand; PAM type: YTN; PAM sequence: TTC
ttccttcctcctttctttct

SEQ ID NO: 317842 - DNA, 20 bp, Artificial Sequence
  Description of Artificial Sequence: Synthetic oligonucleotide
  Target: LAMA2; (+) strand; PAM type: YTN; PAM sequence: CTT
ccttcctcctttctttcttg

SEQ ID NO: 317843 - DNA, 20 bp, Artificial Sequence
  Description of Artificial Sequence: Synthetic oligonucleotide
  Target: LAMA2; (+) strand; PAM type: YTN; PAM sequence: TTC
cttcctcctttctttcttgc

SEQ ID NO: 317844 - DNA, 20 bp, Artificial Sequence
  Description of Artificial Sequence: Synthetic oligonucleotide
  Target: LAMA2; (+) strand; PAM type: YTN; PAM sequence: CTT
cctcctttctttcttgcttt

SEQ ID NO: 317845 - DNA, 20 bp, Artificial Sequence
  Description of Artificial Sequence: Synthetic oligonucleotide
  Target: LAMA2; (+) strand; PAM type: YTN; PAM sequence: TTC
ctcctttctttcttgctttc

SEQ ID NO: 317846 - DNA, 20 bp, Artificial Sequence
  Description of Artificial Sequence: Synthetic oligonucleotide
  Target: LAMA2; (+) strand; PAM type: YTN; PAM sequence: CTC
ctttctttcttgctttcttc

SEQ ID NO: 317847 - DNA, 20 bp, Artificial Sequence
  Description of Artificial Sequence: Synthetic oligonucleotide
  Target: LAMA2; (+) strand; PAM type: YTN; PAM sequence: CTT
tctttcttgctttcttcttt

SEQ ID NO: 317848 - DNA, 20 bp, Artificial Sequence
  Description of Artificial Sequence: Synthetic oligonucleotide
  Target: LAMA2; (+) strand; PAM type: YTN; PAM sequence: TTT
ctttcttgctttcttctttc

SEQ ID NO: 317849 - DNA, 20 bp, Artificial Sequence
  Description of Artificial Sequence: Synthetic oligonucleotide
  Target: LAMA2; (+) strand; PAM type: YTN; PAM sequence: TTC
tttcttgctttcttctttct

SEQ ID NO: 317850 - DNA, 20 bp, Artificial Sequence
  Description of Artificial Sequence: Synthetic oligonucleotide
  Target: LAMA2; (+) strand; PAM type: YTN; PAM sequence: CTT
tcttgctttcttctttcttt

SEQ ID NO: 317851 - DNA, 20 bp, Artificial Sequence
  Description of Artificial Sequence: Synthetic oligonucleotide
  Target: LAMA2; (+) strand; PAM type: YTN; PAM sequence: TTT
cttgctttcttctttctttt

SEQ ID NO: 317852 - DNA, 20 bp, Artificial Sequence
  Description of Artificial Sequence: Synthetic oligonucleotide
  Target: LAMA2; (+) strand; PAM type: YTN; PAM sequence: TTC
ttgctttcttctttcttttc

SEQ ID NO: 317853 - DNA, 20 bp, Artificial Sequence
  Description of Artificial Sequence: Synthetic oligonucleotide
  Target: LAMA2; (+) strand; PAM type: YTN; PAM sequence: CTT
gctttcttctttcttttctt

SEQ ID NO: 317854 - DNA, 20 bp, Artificial Sequence
  Description of Artificial Sequence: Synthetic oligonucleotide
  Target: LAMA2; (+) strand; PAM type: YTN; PAM sequence: TTG
ctttcttctttcttttcttt

SEQ ID NO: 317855 - DNA, 20 bp, Artificial Sequence
  Description of Artificial Sequence: Synthetic oligonucleotide
  Target: LAMA2; (+) strand; PAM type: YTN; PAM sequence: CTT
tcttctttcttttctttatt

SEQ ID NO: 317856 - DNA, 20 bp, Artificial Sequence
  Description of Artificial Sequence: Synthetic oligonucleotide
  Target: LAMA2; (+) strand; PAM type: YTN; PAM sequence: TTT
cttctttcttttctttattc

SEQ ID NO: 317857 - DNA, 20 bp, Artificial Sequence
  Description of Artificial Sequence: Synthetic oligonucleotide
  Target: LAMA2; (+) strand; PAM type: YTN; PAM sequence: TTC
ttctttcttttctttattct

SEQ ID NO: 317858 - DNA, 20 bp, Artificial Sequence
  Description of Artificial Sequence: Synthetic oligonucleotide
  Target: LAMA2; (+) strand; PAM type: YTN; PAM sequence: CTT
ctttcttttctttattcttt

SEQ ID NO: 317859 - DNA, 20 bp, Artificial Sequence
  Description of Artificial Sequence: Synthetic oligonucleotide
  Target: LAMA2; (+) strand; PAM type: YTN; PAM sequence: TTC
tttcttttctttattctttc

SEQ ID NO: 317860 - DNA, 20 bp, Artificial Sequence
  Description of Artificial Sequence: Synthetic oligonucleotide
  Target: LAMA2; (+) strand; PAM type: YTN; PAM sequence: CTT
tcttttctttattctttctt

SEQ ID NO: 317861 - DNA, 20 bp, Artificial Sequence
  Description of Artificial Sequence: Synthetic oligonucleotide
  Target: LAMA2; (+) strand; PAM type: YTN; PAM sequence: TTT
cttttctttattctttcttt

SEQ ID NO: 317862 - DNA, 20 bp, Artificial Sequence
  Description of Artificial Sequence: Synthetic oligonucleotide
  Target: LAMA2; (+) strand; PAM type: YTN; PAM sequence: TTC
ttttctttattctttctttt

SEQ ID NO: 317863 - DNA, 20 bp, Artificial Sequence
  Description of Artificial Sequence: Synthetic oligonucleotide
  Target: LAMA2; (+) strand; PAM type: YTN; PAM sequence: CTT
ttctttattctttctttttt

SEQ ID NO: 317864 - DNA, 20 bp, Artificial Sequence
  Description of Artificial Sequence: Synthetic oligonucleotide
  Target: LAMA2; (+) strand; PAM type: YTN; PAM sequence: TTT
tctttattctttcttttttt

SEQ ID NO: 317865 - DNA, 20 bp, Artificial Sequence
  Description of Artificial Sequence: Synthetic oligonucleotide
  Target: LAMA2; (+) strand; PAM type: YTN; PAM sequence: TTT
ctttattctttctttttttt

SEQ ID NO: 317866 - DNA, 20 bp, Artificial Sequence
  Description of Artificial Sequence: Synthetic oligonucleotide
  Target: LAMA2; (+) strand; PAM type: YTN; PAM sequence: TTC
tttattctttcttttttttt

SEQ ID NO: 317867 - DNA, 20 bp, Artificial Sequence
  Description of Artificial Sequence: Synthetic oligonucleotide
  Target: LAMA2; (+) strand; PAM type: YTN; PAM sequence: CTT
tattctttcttttttttttt

SEQ ID NO: 317868 - DNA, 20 bp, Artificial Sequence
  Description of Artificial Sequence: Synthetic oligonucleotide
  Target: LAMA2; (+) strand; PAM type: YTN; PAM sequence: TTT
attctttctttttttttttt

SEQ ID NO: 317869 - DNA, 20 bp, Artificial Sequence
  Description of Artificial Sequence: Synthetic oligonucleotide
  Target: LAMA2; (+) strand; PAM type: YTN; PAM sequence: TTA
ttctttcttttttttttttt

SEQ ID NO: 317870 - DNA, 20 bp, Artificial Sequence
  Description of Artificial Sequence: Synthetic oligonucleotide
  Target: LAMA2; (+) strand; PAM type: YTN; PAM sequence: TTC
tttctttttttttttttttc

SEQ ID NO: 317871 - DNA, 20 bp, Artificial Sequence
  Description of Artificial Sequence: Synthetic oligonucleotide
  Target: LAMA2; (+) strand; PAM type: YTN; PAM sequence: CTT
tctttttttttttttttcaa

SEQ ID NO: 317872 - DNA, 20 bp, Artificial Sequence
  Description of Artificial Sequence: Synthetic oligonucleotide
  Target: LAMA2; (+) strand; PAM type: YTN; PAM sequence: TTT
ctttttttttttttttcaag

SEQ ID NO: 317873 - DNA, 20 bp, Artificial Sequence
  Description of Artificial Sequence: Synthetic oligonucleotide
  Target: LAMA2; (+) strand; PAM type: YTN; PAM sequence: TTC
tttttttttttttttcaagg

SEQ ID NO: 317874 - DNA, 20 bp, Artificial Sequence
  Description of Artificial Sequence: Synthetic oligonucleotide
  Target: LAMA2; (+) strand; PAM type: YTN; PAM sequence: CTT
tttttttttttttcaaggtc

SEQ ID NO: 317875 - DNA, 20 bp, Artificial Sequence
  Description of Artificial Sequence: Synthetic oligonucleotide
  Target: LAMA2; (+) strand; PAM type: YTN; PAM sequence: TTT
ttttttttttttcaaggtct

SEQ ID NO: 317876 - DNA, 20 bp, Artificial Sequence
  Description of Artificial Sequence: Synthetic oligonucleotide
  Target: LAMA2; (+) strand; PAM type: YTN; PAM sequence: TTT
tttttttttttcaaggtctt

SEQ ID NO: 317877 - DNA, 20 bp, Artificial Sequence
  Description of Artificial Sequence: Synthetic oligonucleotide
  Target: LAMA2; (+) strand; PAM type: YTN; PAM sequence: TTT
ttttttttttcaaggtcttg

SEQ ID NO: 317878 - DNA, 20 bp, Artificial Sequence
  Description of Artificial Sequence: Synthetic oligonucleotide
  Target: LAMA2; (+) strand; PAM type: YTN; PAM sequence: TTT
tttttttttcaaggtcttga

SEQ ID NO: 317879 - DNA, 20 bp, Artificial Sequence
  Description of Artificial Sequence: Synthetic oligonucleotide
  Target: LAMA2; (+) strand; PAM type: YTN; PAM sequence: TTT
ttttttttcaaggtcttgac

SEQ ID NO: 317880 - DNA, 20 bp, Artificial Sequence
  Description of Artificial Sequence: Synthetic oligonucleotide
  Target: LAMA2; (+) strand; PAM type: YTN; PAM sequence: TTT
tttttttcaaggtcttgacg

SEQ ID NO: 317881 - DNA, 20 bp, Artificial Sequence
  Description of Artificial Sequence: Synthetic oligonucleotide
  Target: LAMA2; (+) strand; PAM type: YTN; PAM sequence: TTT
ttttttcaaggtcttgacgt

SEQ ID NO: 317882 - DNA, 20 bp, Artificial Sequence
  Description of Artificial Sequence: Synthetic oligonucleotide
  Target: LAMA2; (+) strand; PAM type: YTN; PAM sequence: TTT
tttttcaaggtcttgacgtg

SEQ ID NO: 317883 - DNA, 20 bp, Artificial Sequence
  Description of Artificial Sequence: Synthetic oligonucleotide
  Target: LAMA2; (+) strand; PAM type: YTN; PAM sequence: TTT
ttttcaaggtcttgacgtgt

SEQ ID NO: 317884 - DNA, 20 bp, Artificial Sequence
  Description of Artificial Sequence: Synthetic oligonucleotide
  Target: LAMA2; (+) strand; PAM type: YTN; PAM sequence: TTT
tttcaaggtcttgacgtgtt

SEQ ID NO: 317885 - DNA, 20 bp, Artificial Sequence
  Description of Artificial Sequence: Synthetic oligonucleotide
  Target: LAMA2; (+) strand; PAM type: YTN; PAM sequence: TTT
ttcaaggtcttgacgtgttg

SEQ ID NO: 317886 - DNA, 20 bp, Artificial Sequence
  Description of Artificial Sequence: Synthetic oligonucleotide
  Target: LAMA2; (+) strand; PAM type: YTN; PAM sequence: TTT
tcaaggtcttgacgtgttgc

SEQ ID NO: 317887 - DNA, 20 bp, Artificial Sequence
  Description of Artificial Sequence: Synthetic oligonucleotide
  Target: LAMA2; (+) strand; PAM type: YTN; PAM sequence: TTT
caaggtcttgacgtgttgcc

SEQ ID NO: 317888 - DNA, 20 bp, Artificial Sequence
  Description of Artificial Sequence: Synthetic oligonucleotide
  Target: LAMA2; (+) strand; PAM type: YTN; PAM sequence: TTC
aaggtcttgacgtgttgccc

SEQ ID NO: 317889 - DNA, 20 bp, Artificial Sequence
  Description of Artificial Sequence: Synthetic oligonucleotide
  Target: LAMA2; (+) strand; PAM type: YTN; PAM sequence: CTT
gacgtgttgcccaggctgga

SEQ ID NO: 317890 - DNA, 20 bp, Artificial Sequence
  Description of Artificial Sequence: Synthetic oligonucleotide
  Target: LAMA2; (+) strand; PAM type: YTN; PAM sequence: TTG
acgtgttgcccaggctggag

SEQ ID NO: 317891 - DNA, 20 bp, Artificial Sequence
  Description of Artificial Sequence: Synthetic oligonucleotide
  Target: LAMA2; (+) strand; PAM type: YTN; PAM sequence: TTG
cccaggctggagtgcagtag

SEQ ID NO: 317892 - DNA, 20 bp, Artificial Sequence
  Description of Artificial Sequence: Synthetic oligonucleotide
  Target: LAMA2; (+) strand; PAM type: YTN; PAM sequence: CTG
gagtgcagtagtgaaatcat

SEQ ID NO: 317893 - DNA, 20 bp, Artificial Sequence
  Description of Artificial Sequence: Synthetic oligonucleotide
  Target: LAMA2; (+) strand; PAM type: YTN; PAM sequence: CTC
actgcagcctcaacctcctg

SEQ ID NO: 317894 - DNA, 20 bp, Artificial Sequence
  Description of Artificial Sequence: Synthetic oligonucleotide
  Target: LAMA2; (+) strand; PAM type: YTN; PAM sequence: CTG
cagcctcaacctcctgggct

SEQ ID NO: 317895 - DNA, 20 bp, Artificial Sequence
  Description of Artificial Sequence: Synthetic oligonucleotide
  Target: LAMA2; (+) strand; PAM type: YTN; PAM sequence: CTC
aacctcctgggctcaagcaa

SEQ ID NO: 317896 - DNA, 20 bp, Artificial Sequence
  Description of Artificial Sequence: Synthetic oligonucleotide
  Target: LAMA2; (+) strand; PAM type: YTN; PAM sequence: CTC
ctgggctcaagcaatccttc

SEQ ID NO: 317897 - DNA, 20 bp, Artificial Sequence
  Description of Artificial Sequence: Synthetic oligonucleotide
  Target: LAMA2; (+) strand; PAM type: YTN; PAM sequence: CTG
ggctcaagcaatccttccac

SEQ ID NO: 317898 - DNA, 20 bp, Artificial Sequence
  Description of Artificial Sequence: Synthetic oligonucleotide
  Target: LAMA2; (+) strand; PAM type: YTN; PAM sequence: CTC
aagcaatccttccacctccg

SEQ ID NO: 317899 - DNA, 20 bp, Artificial Sequence
  Description of Artificial Sequence: Synthetic oligonucleotide
  Target: LAMA2; (+) strand; PAM type: YTN; PAM sequence: CTT
ccacctccgcacccccaagc

SEQ ID NO: 317900 - DNA, 20 bp, Artificial Sequence
  Description of Artificial Sequence: Synthetic oligonucleotide
  Target: LAMA2; (+) strand; PAM type: YTN; PAM sequence: TTC
cacctccgcacccccaagca

SEQ ID NO: 317901 - DNA, 20 bp, Artificial Sequence
  Description of Artificial Sequence: Synthetic oligonucleotide
  Target: LAMA2; (+) strand; PAM type: YTN; PAM sequence: CTC
cgcacccccaagcagctggg

SEQ ID NO: 317902 - DNA, 20 bp, Artificial Sequence
  Description of Artificial Sequence: Synthetic oligonucleotide
  Target: LAMA2; (+) strand; PAM type: YTN; PAM sequence: CTG
ggactacaggcaagggccac

SEQ ID NO: 317903 - DNA, 20 bp, Artificial Sequence
  Description of Artificial Sequence: Synthetic oligonucleotide
  Target: LAMA2; (+) strand; PAM type: YTN; PAM sequence: CTA
caggcaagggccaccatgcc

SEQ ID NO: 317904 - DNA, 20 bp, Artificial Sequence
  Description of Artificial Sequence: Synthetic oligonucleotide
  Target: LAMA2; (+) strand; PAM type: YTN; PAM sequence: CTA
atttatttttgtttttcata

SEQ ID NO: 317905 - DNA, 20 bp, Artificial Sequence
  Description of Artificial Sequence: Synthetic oligonucleotide
  Target: LAMA2; (+) strand; PAM type: YTN; PAM sequence: TTT
atttttgtttttcatagaga

SEQ ID NO: 317906 - DNA, 20 bp, Artificial Sequence
  Description of Artificial Sequence: Synthetic oligonucleotide
  Target: LAMA2; (+) strand; PAM type: YTN; PAM sequence: TTA
tttttgtttttcatagagat

SEQ ID NO: 317907 - DNA, 20 bp, Artificial Sequence
  Description of Artificial Sequence: Synthetic oligonucleotide
  Target: LAMA2; (+) strand; PAM type: YTN; PAM sequence: TTT
ttgtttttcatagagatgag

SEQ ID NO: 317908 - DNA, 20 bp, Artificial Sequence
  Description of Artificial Sequence: Synthetic oligonucleotide
  Target: LAMA2; (+) strand; PAM type: YTN; PAM sequence: TTT
tgtttttcatagagatgagg

SEQ ID NO: 317909 - DNA, 20 bp, Artificial Sequence
  Description of Artificial Sequence: Synthetic oligonucleotide
  Target: LAMA2; (+) strand; PAM type: YTN; PAM sequence: TTT
gtttttcatagagatgaggt

SEQ ID NO: 317910 - DNA, 20 bp, Artificial Sequence
  Description of Artificial Sequence: Synthetic oligonucleotide
  Target: LAMA2; (+) strand; PAM type: YTN; PAM sequence: TTG
tttttcatagagatgaggtc

SEQ ID NO: 317911 - DNA, 20 bp, Artificial Sequence
  Description of Artificial Sequence: Synthetic oligonucleotide
  Target: LAMA2; (+) strand; PAM type: YTN; PAM sequence: TTT
ttcatagagatgaggtctca

SEQ ID NO: 317912 - DNA, 20 bp, Artificial Sequence
  Description of Artificial Sequence: Synthetic oligonucleotide
  Target: LAMA2; (+) strand; PAM type: YTN; PAM sequence: TTT
tcatagagatgaggtctcac

SEQ ID NO: 317913 - DNA, 20 bp, Artificial Sequence
  Description of Artificial Sequence: Synthetic oligonucleotide
  Target: LAMA2; (+) strand; PAM type: YTN; PAM sequence: TTT
catagagatgaggtctcact

SEQ ID NO: 317914 - DNA, 20 bp, Artificial Sequence
  Description of Artificial Sequence: Synthetic oligonucleotide
  Target: LAMA2; (+) strand; PAM type: YTN; PAM sequence: TTC
atagagatgaggtctcacta

SEQ ID NO: 317915 - DNA, 20 bp, Artificial Sequence
  Description of Artificial Sequence: Synthetic oligonucleotide
  Target: LAMA2; (+) strand; PAM type: YTN; PAM sequence: CTC
actatgttgcccaggctgct

SEQ ID NO: 317916 - DNA, 20 bp, Artificial Sequence
  Description of Artificial Sequence: Synthetic oligonucleotide
  Target: LAMA2; (+) strand; PAM type: YTN; PAM sequence: CTA
tgttgcccaggctgctctca

SEQ ID NO: 317917 - DNA, 20 bp, Artificial Sequence
  Description of Artificial Sequence: Synthetic oligonucleotide
  Target: LAMA2; (+) strand; PAM type: YTN; PAM sequence: TTG
cccaggctgctctcaaactc

SEQ ID NO: 317918 - DNA, 20 bp, Artificial Sequence
  Description of Artificial Sequence: Synthetic oligonucleotide
  Target: LAMA2; (+) strand; PAM type: YTN; PAM sequence: CTG
ctctcaaactcctgggccaa

SEQ ID NO: 317919 - DNA, 20 bp, Artificial Sequence
  Description of Artificial Sequence: Synthetic oligonucleotide
  Target: LAMA2; (+) strand; PAM type: YTN; PAM sequence: CTC
tcaaactcctgggccaagtg

SEQ ID NO: 317920 - DNA, 20 bp, Artificial Sequence
  Description of Artificial Sequence: Synthetic oligonucleotide
  Target: LAMA2; (+) strand; PAM type: YTN; PAM sequence: CTC
aaactcctgggccaagtgat

SEQ ID NO: 317921 - DNA, 20 bp, Artificial Sequence
  Description of Artificial Sequence: Synthetic oligonucleotide
  Target: LAMA2; (+) strand; PAM type: YTN; PAM sequence: CTC
ctgggccaagtgatccttct

SEQ ID NO: 317922 - DNA, 20 bp, Artificial Sequence
  Description of Artificial Sequence: Synthetic oligonucleotide
  Target: LAMA2; (+) strand; PAM type: YTN; PAM sequence: CTG
ggccaagtgatccttctgcc

SEQ ID NO: 317923 - DNA, 20 bp, Artificial Sequence
  Description of Artificial Sequence: Synthetic oligonucleotide
  Target: LAMA2; (+) strand; PAM type: YTN; PAM sequence: CTT
ctgcctcagcctttcaaagt

SEQ ID NO: 317924 - DNA, 20 bp, Artificial Sequence
  Description of Artificial Sequence: Synthetic oligonucleotide
  Target: LAMA2; (+) strand; PAM type: YTN; PAM sequence: TTC
tgcctcagcctttcaaagtg

SEQ ID NO: 317925 - DNA, 20 bp, Artificial Sequence
  Description of Artificial Sequence: Synthetic oligonucleotide
  Target: LAMA2; (+) strand; PAM type: YTN; PAM sequence: CTG
cctcagcctttcaaagtgct

SEQ ID NO: 317926 - DNA, 20 bp, Artificial Sequence
  Description of Artificial Sequence: Synthetic oligonucleotide
  Target: LAMA2; (+) strand; PAM type: YTN; PAM sequence: CTC
agcctttcaaagtgctggga

SEQ ID NO: 317927 - DNA, 20 bp, Artificial Sequence
  Description of Artificial Sequence: Synthetic oligonucleotide
  Target: LAMA2; (+) strand; PAM type: YTN; PAM sequence: CTT
tcaaagtgctgggattacag

SEQ ID NO: 317928 - DNA, 20 bp, Artificial Sequence
  Description of Artificial Sequence: Synthetic oligonucleotide
  Target: LAMA2; (+) strand; PAM type: YTN; PAM sequence: TTT
caaagtgctgggattacaga

SEQ ID NO: 317929 - DNA, 20 bp, Artificial Sequence
  Description of Artificial Sequence: Synthetic oligonucleotide
  Target: LAMA2; (+) strand; PAM type: YTN; PAM sequence: TTC
aaagtgctgggattacagac

SEQ ID NO: 317930 - DNA, 20 bp, Artificial Sequence
  Description of Artificial Sequence: Synthetic oligonucleotide
  Target: LAMA2; (+) strand; PAM type: YTN; PAM sequence: CTG
ggattacagacatgagccac

SEQ ID NO: 317931 - DNA, 20 bp, Artificial Sequence
  Description of Artificial Sequence: Synthetic oligonucleotide
  Target: LAMA2; (+) strand; PAM type: YTN; PAM sequence: TTA
cagacatgagccacctcacc

SEQ ID NO: 317932 - DNA, 20 bp, Artificial Sequence
  Description of Artificial Sequence: Synthetic oligonucleotide
  Target: LAMA2; (+) strand; PAM type: YTN; PAM sequence: CTC
acccaaacttttcttttttt

SEQ ID NO: 317933 - DNA, 20 bp, Artificial Sequence
  Description of Artificial Sequence: Synthetic oligonucleotide
  Target: LAMA2; (+) strand; PAM type: YTN; PAM sequence: CTT
ttctttttttttgagagatt

SEQ ID NO: 317934 - DNA, 20 bp, Artificial Sequence
  Description of Artificial Sequence: Synthetic oligonucleotide
  Target: LAMA2; (+) strand; PAM type: YTN; PAM sequence: TTT
tctttttttttgagagattc

SEQ ID NO: 317935 - DNA, 20 bp, Artificial Sequence
  Description of Artificial Sequence: Synthetic oligonucleotide
  Target: LAMA2; (+) strand; PAM type: YTN; PAM sequence: TTT
ctttttttttgagagattct

SEQ ID NO: 317936 - DNA, 20 bp, Artificial Sequence
  Description of Artificial Sequence: Synthetic oligonucleotide
  Target: LAMA2; (+) strand; PAM type: YTN; PAM sequence: TTC
tttttttttgagagattctt

SEQ ID NO: 317937 - DNA, 20 bp, Artificial Sequence
  Description of Artificial Sequence: Synthetic oligonucleotide
  Target: LAMA2; (+) strand; PAM type: YTN; PAM sequence: CTT
tttttttgagagattcttaa

SEQ ID NO: 317938 - DNA, 20 bp, Artificial Sequence
  Description of Artificial Sequence: Synthetic oligonucleotide
  Target: LAMA2; (+) strand; PAM type: YTN; PAM sequence: TTT
ttttttgagagattcttaaa

SEQ ID NO: 317939 - DNA, 20 bp, Artificial Sequence
  Description of Artificial Sequence: Synthetic oligonucleotide
  Target: LAMA2; (+) strand; PAM type: YTN; PAM sequence: TTT
tttttgagagattcttaaac

SEQ ID NO: 317940 - DNA, 20 bp, Artificial Sequence
  Description of Artificial Sequence: Synthetic oligonucleotide
  Target: LAMA2; (+) strand; PAM type: YTN; PAM sequence: TTT
ttttgagagattcttaaact

SEQ ID NO: 317941 - DNA, 20 bp, Artificial Sequence
  Description of Artificial Sequence: Synthetic oligonucleotide
  Target: LAMA2; (+) strand; PAM type: YTN; PAM sequence: TTT
tttgagagattcttaaacta

SEQ ID NO: 317942 - DNA, 20 bp, Artificial Sequence
  Description of Artificial Sequence: Synthetic oligonucleotide
  Target: LAMA2; (+) strand; PAM type: YTN; PAM sequence: TTT
ttgagagattcttaaactag

SEQ ID NO: 317943 - DNA, 20 bp, Artificial Sequence
  Description of Artificial Sequence: Synthetic oligonucleotide
  Target: LAMA2; (+) strand; PAM type: YTN; PAM sequence: TTT
tgagagattcttaaactaga

SEQ ID NO: 317944 - DNA, 20 bp, Artificial Sequence
  Description of Artificial Sequence: Synthetic oligonucleotide
  Target: LAMA2; (+) strand; PAM type: YTN; PAM sequence: TTT
gagagattcttaaactagat

SEQ ID NO: 317945 - DNA, 20 bp, Artificial Sequence
  Description of Artificial Sequence: Synthetic oligonucleotide
  Target: LAMA2; (+) strand; PAM type: YTN; PAM sequence: TTG
agagattcttaaactagatt

SEQ ID NO: 317946 - DNA, 20 bp, Artificial Sequence
  Description of Artificial Sequence: Synthetic oligonucleotide
  Target: LAMA2; (+) strand; PAM type: YTN; PAM sequence: TTC
ttaaactagattgtacttac

SEQ ID NO: 317947 - DNA, 20 bp, Artificial Sequence
  Description of Artificial Sequence: Synthetic oligonucleotide
  Target: LAMA2; (+) strand; PAM type: YTN; PAM sequence: CTT
aaactagattgtacttacga

SEQ ID NO: 317948 - DNA, 20 bp, Artificial Sequence
  Description of Artificial Sequence: Synthetic oligonucleotide
  Target: LAMA2; (+) strand; PAM type: YTN; PAM sequence: TTA
aactagattgtacttacgat

SEQ ID NO: 317949 - DNA, 20 bp, Artificial Sequence
  Description of Artificial Sequence: Synthetic oligonucleotide
  Target: LAMA2; (+) strand; PAM type: YTN; PAM sequence: CTA
gattgtacttacgataaatg

SEQ ID NO: 317950 - DNA, 20 bp, Artificial Sequence
  Description of Artificial Sequence: Synthetic oligonucleotide
  Target: LAMA2; (+) strand; PAM type: YTN; PAM sequence: TTG
tacttacgataaatgttgac

SEQ ID NO: 317951 - DNA, 20 bp, Artificial Sequence
  Description of Artificial Sequence: Synthetic oligonucleotide
  Target: LAMA2; (+) strand; PAM type: YTN; PAM sequence: CTT
acgataaatgttgactgatt

SEQ ID NO: 317952 - DNA, 20 bp, Artificial Sequence
  Description of Artificial Sequence: Synthetic oligonucleotide
  Target: LAMA2; (+) strand; PAM type: YTN; PAM sequence: TTA
cgataaatgttgactgattc

SEQ ID NO: 317953 - DNA, 20 bp, Artificial Sequence
  Description of Artificial Sequence: Synthetic oligonucleotide
  Target: LAMA2; (+) strand; PAM type: YTN; PAM sequence: TTG
actgattcattaccttcaac

SEQ ID NO: 317954 - DNA, 20 bp, Artificial Sequence
  Description of Artificial Sequence: Synthetic oligonucleotide
  Target: LAMA2; (+) strand; PAM type: YTN; PAM sequence: CTG
attcattaccttcaacagtg

SEQ ID NO: 317955 - DNA, 20 bp, Artificial Sequence
  Description of Artificial Sequence: Synthetic oligonucleotide
  Target: LAMA2; (+) strand; PAM type: YTN; PAM sequence: TTC
attaccttcaacagtgcttt

SEQ ID NO: 317956 - DNA, 20 bp, Artificial Sequence
  Description of Artificial Sequence: Synthetic oligonucleotide
  Target: LAMA2; (+) strand; PAM type: YTN; PAM sequence: TTA
ccttcaacagtgctttcagc

SEQ ID NO: 317957 - DNA, 20 bp, Artificial Sequence
  Description of Artificial Sequence: Synthetic oligonucleotide
  Target: LAMA2; (+) strand; PAM type: YTN; PAM sequence: CTT
caacagtgctttcagcctct

SEQ ID NO: 317958 - DNA, 20 bp, Artificial Sequence
  Description of Artificial Sequence: Synthetic oligonucleotide
  Target: LAMA2; (+) strand; PAM type: YTN; PAM sequence: TTC
aacagtgctttcagcctctg

SEQ ID NO: 317959 - DNA, 20 bp, Artificial Sequence
  Description of Artificial Sequence: Synthetic oligonucleotide
  Target: LAMA2; (+) strand; PAM type: YTN; PAM sequence: CTT
tcagcctctgatggttcaga

SEQ ID NO: 317960 - DNA, 20 bp, Artificial Sequence
  Description of Artificial Sequence: Synthetic oligonucleotide
  Target: LAMA2; (+) strand; PAM type: YTN; PAM sequence: TTT
cagcctctgatggttcagag

SEQ ID NO: 317961 - DNA, 20 bp, Artificial Sequence
  Description of Artificial Sequence: Synthetic oligonucleotide
  Target: LAMA2; (+) strand; PAM type: YTN; PAM sequence: TTC
agcctctgatggttcagaga

SEQ ID NO: 317962 - DNA, 20 bp, Artificial Sequence
  Description of Artificial Sequence: Synthetic oligonucleotide
  Target: LAMA2; (+) strand; PAM type: YTN; PAM sequence: CTC
tgatggttcagagaaatgat

SEQ ID NO: 317963 - DNA, 20 bp, Artificial Sequence
  Description of Artificial Sequence: Synthetic oligonucleotide
  Target: LAMA2; (+) strand; PAM type: YTN; PAM sequence: CTG
atggttcagagaaatgattg

SEQ ID NO: 317964 - DNA, 20 bp, Artificial Sequence
  Description of Artificial Sequence: Synthetic oligonucleotide
  Target: LAMA2; (+) strand; PAM type: YTN; PAM sequence: TTC
agagaaatgattgtgtatac

SEQ ID NO: 317965 - DNA, 20 bp, Artificial Sequence
  Description of Artificial Sequence: Synthetic oligonucleotide
  Target: LAMA2; (+) strand; PAM type: YTN; PAM sequence: TTG
tgtatactttatatttcacc

SEQ ID NO: 317966 - DNA, 20 bp, Artificial Sequence
  Description of Artificial Sequence: Synthetic oligonucleotide
  Target: LAMA2; (+) strand; PAM type: YTN; PAM sequence: CTT
tatatttcacctgaatcagg

SEQ ID NO: 317967 - DNA, 20 bp, Artificial Sequence
  Description of Artificial Sequence: Synthetic oligonucleotide
  Target: LAMA2; (+) strand; PAM type: YTN; PAM sequence: TTT
atatttcacctgaatcaggt

SEQ ID NO: 317968 - DNA, 20 bp, Artificial Sequence
  Description of Artificial Sequence: Synthetic oligonucleotide
  Target: LAMA2; (+) strand; PAM type: YTN; PAM sequence: TTA
tatttcacctgaatcaggtt

SEQ ID NO: 317969 - DNA, 20 bp, Artificial Sequence
  Description of Artificial Sequence: Synthetic oligonucleotide
  Target: LAMA2; (+) strand; PAM type: YTN; PAM sequence: TTT
cacctgaatcaggtttcggt

SEQ ID NO: 317970 - DNA, 20 bp, Artificial Sequence
  Description of Artificial Sequence: Synthetic oligonucleotide
  Target: LAMA2; (+) strand; PAM type: YTN; PAM sequence: TTC
acctgaatcaggtttcggtt

SEQ ID NO: 317971 - DNA, 20 bp, Artificial Sequence
  Description of Artificial Sequence: Synthetic oligonucleotide
  Target: LAMA2; (+) strand; PAM type: YTN; PAM sequence: CTG
aatcaggtttcggttgagac

SEQ ID NO: 317972 - DNA, 20 bp, Artificial Sequence
  Description of Artificial Sequence: Synthetic oligonucleotide
  Target: LAMA2; (+) strand; PAM type: YTN; PAM sequence: TTT
cggttgagacaataattttc

SEQ ID NO: 317973 - DNA, 20 bp, Artificial Sequence
  Description of Artificial Sequence: Synthetic oligonucleotide
  Target: LAMA2; (+) strand; PAM type: YTN; PAM sequence: TTC
ggttgagacaataattttct

SEQ ID NO: 317974 - DNA, 20 bp, Artificial Sequence
  Description of Artificial Sequence: Synthetic oligonucleotide
  Target: LAMA2; (+) strand; PAM type: YTN; PAM sequence: TTG
agacaataattttctgagta

SEQ ID NO: 317975 - DNA, 20 bp, Artificial Sequence
  Description of Artificial Sequence: Synthetic oligonucleotide
  Target: LAMA2; (+) strand; PAM type: YTN; PAM sequence: TTT
tctgagtatgtctccacttc

SEQ ID NO: 317976 - DNA, 20 bp, Artificial Sequence
  Description of Artificial Sequence: Synthetic oligonucleotide
  Target: LAMA2; (+) strand; PAM type: YTN; PAM sequence: TTT
ctgagtatgtctccacttca

SEQ ID NO: 317977 - DNA, 20 bp, Artificial Sequence
  Description of Artificial Sequence: Synthetic oligonucleotide
  Target: LAMA2; (+) strand; PAM type: YTN; PAM sequence: TTC
tgagtatgtctccacttcac

SEQ ID NO: 317978 - DNA, 20 bp, Artificial Sequence
  Description of Artificial Sequence: Synthetic oligonucleotide
  Target: LAMA2; (+) strand; PAM type: YTN; PAM sequence: CTG
agtatgtctccacttcacaa

SEQ ID NO: 317979 - DNA, 20 bp, Artificial Sequence
  Description of Artificial Sequence: Synthetic oligonucleotide
  Target: LAMA2; (+) strand; PAM type: YTN; PAM sequence: CTC
cacttcacaaaattaattta

SEQ ID NO: 317980 - DNA, 20 bp, Artificial Sequence
  Description of Artificial Sequence: Synthetic oligonucleotide
  Target: LAMA2; (+) strand; PAM type: YTN; PAM sequence: CTT
cacaaaattaatttattttc

SEQ ID NO: 317981 - DNA, 20 bp, Artificial Sequence
  Description of Artificial Sequence: Synthetic oligonucleotide
  Target: LAMA2; (+) strand; PAM type: YTN; PAM sequence: TTC
acaaaattaatttattttca

SEQ ID NO: 317982 - DNA, 20 bp, Artificial Sequence
  Description of Artificial Sequence: Synthetic oligonucleotide
  Target: LAMA2; (+) strand; PAM type: YTN; PAM sequence: TTA
atttattttcaacttttctc

SEQ ID NO: 317983 - DNA, 20 bp, Artificial Sequence
  Description of Artificial Sequence: Synthetic oligonucleotide
  Target: LAMA2; (+) strand; PAM type: YTN; PAM sequence: TTT
attttcaacttttctctagt

SEQ ID NO: 317984 - DNA, 20 bp, Artificial Sequence
  Description of Artificial Sequence: Synthetic oligonucleotide
  Target: LAMA2; (+) strand; PAM type: YTN; PAM sequence: TTA
ttttcaacttttctctagtt

SEQ ID NO: 317985 - DNA, 20 bp, Artificial Sequence
  Description of Artificial Sequence: Synthetic oligonucleotide
  Target: LAMA2; (+) strand; PAM type: YTN; PAM sequence: TTT
tcaacttttctctagtttta

SEQ ID NO: 317986 - DNA, 20 bp, Artificial Sequence
  Description of Artificial Sequence: Synthetic oligonucleotide
  Target: LAMA2; (+) strand; PAM type: YTN; PAM sequence: TTT
caacttttctctagttttac

SEQ ID NO: 317987 - DNA, 20 bp, Artificial Sequence
  Description of Artificial Sequence: Synthetic oligonucleotide
  Target: LAMA2; (+) strand; PAM type: YTN; PAM sequence: TTC
aacttttctctagttttacc

SEQ ID NO: 317988 - DNA, 20 bp, Artificial Sequence
  Description of Artificial Sequence: Synthetic oligonucleotide
  Target: LAMA2; (+) strand; PAM type: YTN; PAM sequence: CTT
ttctctagttttaccactgt

SEQ ID NO: 317989 - DNA, 20 bp, Artificial Sequence
  Description of Artificial Sequence: Synthetic oligonucleotide
  Target: LAMA2; (+) strand; PAM type: YTN; PAM sequence: TTT
tctctagttttaccactgtt

SEQ ID NO: 317990 - DNA, 20 bp, Artificial Sequence
  Description of Artificial Sequence: Synthetic oligonucleotide
  Target: LAMA2; (+) strand; PAM type: YTN; PAM sequence: TTT
ctctagttttaccactgttt

SEQ ID NO: 317991 - DNA, 20 bp, Artificial Sequence
  Description of Artificial Sequence: Synthetic oligonucleotide
  Target: LAMA2; (+) strand; PAM type: YTN; PAM sequence: TTC
tctagttttaccactgtttt

SEQ ID NO: 317992 - DNA, 20 bp, Artificial Sequence
  Description of Artificial Sequence: Synthetic oligonucleotide
  Target: LAMA2; (+) strand; PAM type: YTN; PAM sequence: CTC
tagttttaccactgttttga

SEQ ID NO: 317993 - DNA, 20 bp, Artificial Sequence
  Description of Artificial Sequence: Synthetic oligonucleotide
  Target: LAMA2; (+) strand; PAM type: YTN; PAM sequence: CTA
gttttaccactgttttgata

SEQ ID NO: 317994 - DNA, 20 bp, Artificial Sequence
  Description of Artificial Sequence: Synthetic oligonucleotide
  Target: LAMA2; (+) strand; PAM type: YTN; PAM sequence: TTT
taccactgttttgataaata

SEQ ID NO: 317995 - DNA, 20 bp, Artificial Sequence
  Description of Artificial Sequence: Synthetic oligonucleotide
  Target: LAMA2; (+) strand; PAM type: YTN; PAM sequence: TTT
accactgttttgataaataa

SEQ ID NO: 317996 - DNA, 20 bp, Artificial Sequence
  Description of Artificial Sequence: Synthetic oligonucleotide
  Target: LAMA2; (+) strand; PAM type: YTN; PAM sequence: TTA
ccactgttttgataaataat

SEQ ID NO: 317997 - DNA, 20 bp, Artificial Sequence
  Description of Artificial Sequence: Synthetic oligonucleotide
  Target: LAMA2; (+) strand; PAM type: YTN; PAM sequence: CTG
ttttgataaataatcttaca

SEQ ID NO: 317998 - DNA, 20 bp, Artificial Sequence
  Description of Artificial Sequence: Synthetic oligonucleotide
  Target: LAMA2; (+) strand; PAM type: YTN; PAM sequence: TTT
tgataaataatcttacagtg

SEQ ID NO: 317999 - DNA, 20 bp, Artificial Sequence
  Description of Artificial Sequence: Synthetic oligonucleotide
  Target: LAMA2; (+) strand; PAM type: YTN; PAM sequence: TTT
gataaataatcttacagtgg

SEQ ID NO: 318000 - DNA, 20 bp, Artificial Sequence
  Description of Artificial Sequence: Synthetic oligonucleotide
  Target: LAMA2; (+) strand; PAM type: YTN; PAM sequence: TTG
ataaataatcttacagtgga

SEQ ID NO: 318001 - DNA, 20 bp, Artificial Sequence
  Description of Artificial Sequence: Synthetic oligonucleotide
  Target: LAMA2; (+) strand; PAM type: YTN; PAM sequence: CTT
acagtggaggaagacttatt

SEQ ID NO: 318002 - DNA, 20 bp, Artificial Sequence
  Description of Artificial Sequence: Synthetic oligonucleotide
  Target: LAMA2; (+) strand; PAM type: YTN; PAM sequence: TTA
cagtggaggaagacttattg

SEQ ID NO: 318003 - DNA, 20 bp, Artificial Sequence
  Description of Artificial Sequence: Synthetic oligonucleotide
  Target: LAMA2; (+) strand; PAM type: YTN; PAM sequence: CTT
attgaaacaatttcatcact

SEQ ID NO: 318004 - DNA, 20 bp, Artificial Sequence
  Description of Artificial Sequence: Synthetic oligonucleotide
  Target: LAMA2; (+) strand; PAM type: YTN; PAM sequence: TTA
ttgaaacaatttcatcactt

SEQ ID NO: 318005 - DNA, 20 bp, Artificial Sequence
  Description of Artificial Sequence: Synthetic oligonucleotide
  Target: LAMA2; (+) strand; PAM type: YTN; PAM sequence: TTG
aaacaatttcatcacttttt

SEQ ID NO: 318006 - DNA, 20 bp, Artificial Sequence
  Description of Artificial Sequence: Synthetic oligonucleotide
  Target: LAMA2; (+) strand; PAM type: YTN; PAM sequence: TTT
catcacttttttttctcttg

SEQ ID NO: 318007 - DNA, 20 bp, Artificial Sequence
  Description of Artificial Sequence: Synthetic oligonucleotide
  Target: LAMA2; (+) strand; PAM type: YTN; PAM sequence: TTC
atcacttttttttctcttgt

SEQ ID NO: 318008 - DNA, 20 bp, Artificial Sequence
  Description of Artificial Sequence: Synthetic oligonucleotide
  Target: LAMA2; (+) strand; PAM type: YTN; PAM sequence: CTT
ttttttctcttgtttgcctc

SEQ ID NO: 318009 - DNA, 20 bp, Artificial Sequence
  Description of Artificial Sequence: Synthetic oligonucleotide
  Target: LAMA2; (+) strand; PAM type: YTN; PAM sequence: TTT
tttttctcttgtttgcctca

SEQ ID NO: 318010 - DNA, 20 bp, Artificial Sequence
  Description of Artificial Sequence: Synthetic oligonucleotide
  Target: LAMA2; (+) strand; PAM type: YTN; PAM sequence: TTT
ttttctcttgtttgcctcag

SEQ ID NO: 318011 - DNA, 20 bp, Artificial Sequence
  Description of Artificial Sequence: Synthetic oligonucleotide
  Target: LAMA2; (+) strand; PAM type: YTN; PAM sequence: TTT
tttctcttgtttgcctcaga

SEQ ID NO: 318012 - DNA, 20 bp, Artificial Sequence
  Description of Artificial Sequence: Synthetic oligonucleotide
  Target: LAMA2; (+) strand; PAM type: YTN; PAM sequence: TTT
ttctcttgtttgcctcagag

SEQ ID NO: 318013 - DNA, 20 bp, Artificial Sequence
  Description of Artificial Sequence: Synthetic oligonucleotide
  Target: LAMA2; (+) strand; PAM type: YTN; PAM sequence: TTT
tctcttgtttgcctcagagt

SEQ ID NO: 318014 - DNA, 20 bp, Artificial Sequence
  Description of Artificial Sequence: Synthetic oligonucleotide
  Target: LAMA2; (+) strand; PAM type: YTN; PAM sequence: TTT
ctcttgtttgcctcagagta

SEQ ID NO: 318015 - DNA, 20 bp, Artificial Sequence
  Description of Artificial Sequence: Synthetic oligonucleotide
  Target: LAMA2; (+) strand; PAM type: YTN; PAM sequence: TTC
tcttgtttgcctcagagtat

SEQ ID NO: 318016 - DNA, 20 bp, Artificial Sequence
  Description of Artificial Sequence: Synthetic oligonucleotide
  Target: LAMA2; (+) strand; PAM type: YTN; PAM sequence: CTC
ttgtttgcctcagagtatgg

SEQ ID NO: 318017 - DNA, 20 bp, Artificial Sequence
  Description of Artificial Sequence: Synthetic oligonucleotide
  Target: LAMA2; (+) strand; PAM type: YTN; PAM sequence: CTT
gtttgcctcagagtatggtt

SEQ ID NO: 318018 - DNA, 20 bp, Artificial Sequence
  Description of Artificial Sequence: Synthetic oligonucleotide
  Target: LAMA2; (+) strand; PAM type: YTN; PAM sequence: TTG
tttgcctcagagtatggttg

SEQ ID NO: 318019 - DNA, 20 bp, Artificial Sequence
  Description of Artificial Sequence: Synthetic oligonucleotide
  Target: LAMA2; (+) strand; PAM type: YTN; PAM sequence: TTT
gcctcagagtatggttgatt

SEQ ID NO: 318020 - DNA, 20 bp, Artificial Sequence
  Description of Artificial Sequence: Synthetic oligonucleotide
  Target: LAMA2; (+) strand; PAM type: YTN; PAM sequence: TTG
cctcagagtatggttgattc

SEQ ID NO: 318021 - DNA, 20 bp, Artificial Sequence
  Description of Artificial Sequence: Synthetic oligonucleotide
  Target: LAMA2; (+) strand; PAM type: YTN; PAM sequence: CTC
agagtatggttgattcattc

SEQ ID NO: 318022 - DNA, 20 bp, Artificial Sequence
  Description of Artificial Sequence: Synthetic oligonucleotide
  Target: LAMA2; (+) strand; PAM type: YTN; PAM sequence: TTG
attcattctctccctaggtt

SEQ ID NO: 318023 - DNA, 20 bp, Artificial Sequence
  Description of Artificial Sequence: Synthetic oligonucleotide
  Target: LAMA2; (+) strand; PAM type: YTN; PAM sequence: TTC
attctctccctaggttggag

SEQ ID NO: 318024 - DNA, 20 bp, Artificial Sequence
  Description of Artificial Sequence: Synthetic oligonucleotide
  Target: LAMA2; (+) strand; PAM type: YTN; PAM sequence: TTC
tctccctaggttggagccat

SEQ ID NO: 318025 - DNA, 20 bp, Artificial Sequence
  Description of Artificial Sequence: Synthetic oligonucleotide
  Target: LAMA2; (+) strand; PAM type: YTN; PAM sequence: CTC
tccctaggttggagccattg

SEQ ID NO: 318026 - DNA, 20 bp, Artificial Sequence
  Description of Artificial Sequence: Synthetic oligonucleotide
  Target: LAMA2; (+) strand; PAM type: YTN; PAM sequence: CTC
cctaggttggagccattgca

SEQ ID NO: 318027 - DNA, 20 bp, Artificial Sequence
  Description of Artificial Sequence: Synthetic oligonucleotide
  Target: LAMA2; (+) strand; PAM type: YTN; PAM sequence: CTA
ggttggagccattgcagaat

SEQ ID NO: 318028 - DNA, 20 bp, Artificial Sequence
  Description of Artificial Sequence: Synthetic oligonucleotide
  Target: LAMA2; (+) strand; PAM type: YTN; PAM sequence: TTG
gagccattgcagaatcaata

SEQ ID NO: 318029 - DNA, 20 bp, Artificial Sequence
  Description of Artificial Sequence: Synthetic oligonucleotide
  Target: LAMA2; (+) strand; PAM type: YTN; PAM sequence: TTG
cagaatcaatattttacttt

SEQ ID NO: 318030 - DNA, 20 bp, Artificial Sequence
  Description of Artificial Sequence: Synthetic oligonucleotide
  Target: LAMA2; (+) strand; PAM type: YTN; PAM sequence: TTT
tacttttaactgactccaaa

SEQ ID NO: 318031 - DNA, 20 bp, Artificial Sequence
  Description of Artificial Sequence: Synthetic oligonucleotide
  Target: LAMA2; (+) strand; PAM type: YTN; PAM sequence: TTT
acttttaactgactccaaaa

SEQ ID NO: 318032 - DNA, 20 bp, Artificial Sequence
  Description of Artificial Sequence: Synthetic oligonucleotide
  Target: LAMA2; (+) strand; PAM type: YTN; PAM sequence: TTA
cttttaactgactccaaaat

SEQ ID NO: 318033 - DNA, 20 bp, Artificial Sequence
  Description of Artificial Sequence: Synthetic oligonucleotide
  Target: LAMA2; (+) strand; PAM type: YTN; PAM sequence: CTT
ttaactgactccaaaatata

SEQ ID NO: 318034 - DNA, 20 bp, Artificial Sequence
  Description of Artificial Sequence: Synthetic oligonucleotide
  Target: LAMA2; (+) strand; PAM type: YTN; PAM sequence: TTT
taactgactccaaaatatat

SEQ ID NO: 318035 - DNA, 20 bp, Artificial Sequence
  Description of Artificial Sequence: Synthetic oligonucleotide
  Target: LAMA2; (+) strand; PAM type: YTN; PAM sequence: TTT
aactgactccaaaatatata

SEQ ID NO: 318036 - DNA, 20 bp, Artificial Sequence
  Description of Artificial Sequence: Synthetic oligonucleotide
  Target: LAMA2; (+) strand; PAM type: YTN; PAM sequence: TTA
actgactccaaaatatatac

SEQ ID NO: 318037 - DNA, 20 bp, Artificial Sequence
  Description of Artificial Sequence: Synthetic oligonucleotide
  Target: LAMA2; (+) strand; PAM type: YTN; PAM sequence: CTG
actccaaaatatatacattc

SEQ ID NO: 318038 - DNA, 20 bp, Artificial Sequence
  Description of Artificial Sequence: Synthetic oligonucleotide
  Target: LAMA2; (+) strand; PAM type: YTN; PAM sequence: CTC
caaaatatatacattctagc

SEQ ID NO: 318039 - DNA, 20 bp, Artificial Sequence
  Description of Artificial Sequence: Synthetic oligonucleotide
  Target: LAMA2; (+) strand; PAM type: YTN; PAM sequence: TTC
tagctaagtactttcagcac

SEQ ID NO: 318040 - DNA, 20 bp, Artificial Sequence
  Description of Artificial Sequence: Synthetic oligonucleotide
  Target: LAMA2; (+) strand; PAM type: YTN; PAM sequence: CTA
gctaagtactttcagcacta

SEQ ID NO: 318041 - DNA, 20 bp, Artificial Sequence
  Description of Artificial Sequence: Synthetic oligonucleotide
  Target: LAMA2; (+) strand; PAM type: YTN; PAM sequence: CTA
agtactttcagcactatgag

SEQ ID NO: 318042 - DNA, 20 bp, Artificial Sequence
  Description of Artificial Sequence: Synthetic oligonucleotide
  Target: LAMA2; (+) strand; PAM type: YTN; PAM sequence: CTT
tcagcactatgagttgtcct

SEQ ID NO: 318043 - DNA, 20 bp, Artificial Sequence
  Description of Artificial Sequence: Synthetic oligonucleotide
  Target: LAMA2; (+) strand; PAM type: YTN; PAM sequence: TTT
cagcactatgagttgtcctt

SEQ ID NO: 318044 - DNA, 20 bp, Artificial Sequence
  Description of Artificial Sequence: Synthetic oligonucleotide
  Target: LAMA2; (+) strand; PAM type: YTN; PAM sequence: TTC
agcactatgagttgtccttc

SEQ ID NO: 318045 - DNA, 20 bp, Artificial Sequence
  Description of Artificial Sequence: Synthetic oligonucleotide
  Target: LAMA2; (+) strand; PAM type: YTN; PAM sequence: CTA
tgagttgtccttcttttaaa

SEQ ID NO: 318046 - DNA, 20 bp, Artificial Sequence
  Description of Artificial Sequence: Synthetic oligonucleotide
  Target: LAMA2; (+) strand; PAM type: YTN; PAM sequence: TTG
tccttcttttaaagagaaat

SEQ ID NO: 318047 - DNA, 20 bp, Artificial Sequence
  Description of Artificial Sequence: Synthetic oligonucleotide
  Target: LAMA2; (+) strand; PAM type: YTN; PAM sequence: CTT
cttttaaagagaaatttttt

SEQ ID NO: 318048 - DNA, 20 bp, Artificial Sequence
  Description of Artificial Sequence: Synthetic oligonucleotide
  Target: LAMA2; (+) strand; PAM type: YTN; PAM sequence: TTC
ttttaaagagaaattttttt

SEQ ID NO: 318049 - DNA, 20 bp, Artificial Sequence
  Description of Artificial Sequence: Synthetic oligonucleotide
  Target: LAMA2; (+) strand; PAM type: YTN; PAM sequence: CTT
ttaaagagaaatttttttaa

SEQ ID NO: 318050 - DNA, 20 bp, Artificial Sequence
  Description of Artificial Sequence: Synthetic oligonucleotide
  Target: LAMA2; (+) strand; PAM type: YTN; PAM sequence: TTT
taaagagaaatttttttaaa

SEQ ID NO: 318051 - DNA, 20 bp, Artificial Sequence
  Description of Artificial Sequence: Synthetic oligonucleotide
  Target: LAMA2; (+) strand; PAM type: YTN; PAM sequence: TTT
aaagagaaatttttttaaaa

SEQ ID NO: 318052 - DNA, 20 bp, Artificial Sequence
  Description of Artificial Sequence: Synthetic oligonucleotide
  Target: LAMA2; (+) strand; PAM type: YTN; PAM sequence: TTA
aagagaaatttttttaaaat

SEQ ID NO: 318053 - DNA, 20 bp, Artificial Sequence
  Description of Artificial Sequence: Synthetic oligonucleotide
  Target: LAMA2; (+) strand; PAM type: YTN; PAM sequence: TTT
ttttaaaatgatatcattaa

SEQ ID NO: 318054 - DNA, 20 bp, Artificial Sequence
  Description of Artificial Sequence: Synthetic oligonucleotide
  Target: LAMA2; (+) strand; PAM type: YTN; PAM sequence: TTT
tttaaaatgatatcattaaa

SEQ ID NO: 318055 - DNA, 20 bp, Artificial Sequence
  Description of Artificial Sequence: Synthetic oligonucleotide
  Target: LAMA2; (+) strand; PAM type: YTN; PAM sequence: TTT
ttaaaatgatatcattaaaa

SEQ ID NO: 318056 - DNA, 20 bp, Artificial Sequence
  Description of Artificial Sequence: Synthetic oligonucleotide
  Target: LAMA2; (+) strand; PAM type: YTN; PAM sequence: TTT
taaaatgatatcattaaaaa

SEQ ID NO: 318057 - DNA, 20 bp, Artificial Sequence
  Description of Artificial Sequence: Synthetic oligonucleotide
  Target: LAMA2; (+) strand; PAM type: YTN; PAM sequence: TTT
aaaatgatatcattaaaaac

SEQ ID NO: 318058 - DNA, 20 bp, Artificial Sequence
  Description of Artificial Sequence: Synthetic oligonucleotide
  Target: LAMA2; (+) strand; PAM type: YTN; PAM sequence: TTA
aaatgatatcattaaaaaca

SEQ ID NO: 318059 - DNA, 20 bp, Artificial Sequence
  Description of Artificial Sequence: Synthetic oligonucleotide
  Target: LAMA2; (+) strand; PAM type: YTN; PAM sequence: TTA
aaaacaagccattccatgat

SEQ ID NO: 318060 - DNA, 20 bp, Artificial Sequence
  Description of Artificial Sequence: Synthetic oligonucleotide
  Target: LAMA2; (+) strand; PAM type: YTN; PAM sequence: TTC
catgatttattgtataagag

SEQ ID NO: 318061 - DNA, 20 bp, Artificial Sequence
  Description of Artificial Sequence: Synthetic oligonucleotide
  Target: LAMA2; (+) strand; PAM type: YTN; PAM sequence: TTT
attgtataagagaagataag

SEQ ID NO: 318062 - DNA, 20 bp, Artificial Sequence
  Description of Artificial Sequence: Synthetic oligonucleotide
  Target: LAMA2; (+) strand; PAM type: YTN; PAM sequence: TTA
ttgtataagagaagataagt

SEQ ID NO: 318063 - DNA, 20 bp, Artificial Sequence
  Description of Artificial Sequence: Synthetic oligonucleotide
  Target: LAMA2; (+) strand; PAM type: YTN; PAM sequence: TTG
tataagagaagataagtacg

SEQ ID NO: 318064 - DNA, 20 bp, Artificial Sequence
  Description of Artificial Sequence: Synthetic oligonucleotide
  Target: LAMA2; (+) strand; PAM type: YTN; PAM sequence: TTG
taaacctgcaatagaataat

SEQ ID NO: 318065 - DNA, 20 bp, Artificial Sequence
  Description of Artificial Sequence: Synthetic oligonucleotide
  Target: LAMA2; (+) strand; PAM type: YTN; PAM sequence: CTG
caatagaataataccctgga

SEQ ID NO: 318066 - DNA, 20 bp, Artificial Sequence
  Description of Artificial Sequence: Synthetic oligonucleotide
  Target: LAMA2; (+) strand; PAM type: YTN; PAM sequence: CTG
gatatccaccttcactgatg

SEQ ID NO: 318067 - DNA, 20 bp, Artificial Sequence
  Description of Artificial Sequence: Synthetic oligonucleotide
  Target: LAMA2; (+) strand; PAM type: YTN; PAM sequence: CTT
cactgatgagtttaactgac

SEQ ID NO: 318068 - DNA, 20 bp, Artificial Sequence
  Description of Artificial Sequence: Synthetic oligonucleotide
  Target: LAMA2; (+) strand; PAM type: YTN; PAM sequence: TTC
actgatgagtttaactgact

SEQ ID NO: 318069 - DNA, 20 bp, Artificial Sequence
  Description of Artificial Sequence: Synthetic oligonucleotide
  Target: LAMA2; (+) strand; PAM type: YTN; PAM sequence: CTG
atgagtttaactgactcatt

SEQ ID NO: 318070 - DNA, 20 bp, Artificial Sequence
  Description of Artificial Sequence: Synthetic oligonucleotide
  Target: LAMA2; (+) strand; PAM type: YTN; PAM sequence: TTT
aactgactcattcttacctg

SEQ ID NO: 318071 - DNA, 20 bp, Artificial Sequence
  Description of Artificial Sequence: Synthetic oligonucleotide
  Target: LAMA2; (+) strand; PAM type: YTN; PAM sequence: TTA
actgactcattcttacctgt

SEQ ID NO: 318072 - DNA, 20 bp, Artificial Sequence
  Description of Artificial Sequence: Synthetic oligonucleotide
  Target: LAMA2; (+) strand; PAM type: YTN; PAM sequence: CTG
actcattcttacctgttaac

SEQ ID NO: 318073 - DNA, 20 bp, Artificial Sequence
  Description of Artificial Sequence: Synthetic oligonucleotide
  Target: LAMA2; (+) strand; PAM type: YTN; PAM sequence: CTC
attcttacctgttaaccaaa

SEQ ID NO: 318074 - DNA, 20 bp, Artificial Sequence
  Description of Artificial Sequence: Synthetic oligonucleotide
  Target: LAMA2; (+) strand; PAM type: YTN; PAM sequence: TTC
ttacctgttaaccaaatgct

SEQ ID NO: 318075 - DNA, 20 bp, Artificial Sequence
  Description of Artificial Sequence: Synthetic oligonucleotide
  Target: LAMA2; (+) strand; PAM type: YTN; PAM sequence: CTT
acctgttaaccaaatgcttt

SEQ ID NO: 318076 - DNA, 20 bp, Artificial Sequence
  Description of Artificial Sequence: Synthetic oligonucleotide
  Target: LAMA2; (+) strand; PAM type: YTN; PAM sequence: TTA
cctgttaaccaaatgctttt

SEQ ID NO: 318077 - DNA, 20 bp, Artificial Sequence
  Description of Artificial Sequence: Synthetic oligonucleotide
  Target: LAMA2; (+) strand; PAM type: YTN; PAM sequence: CTG
ttaaccaaatgcttttgaga

SEQ ID NO: 318078 - DNA, 20 bp, Artificial Sequence
  Description of Artificial Sequence: Synthetic oligonucleotide
  Target: LAMA2; (+) strand; PAM type: YTN; PAM sequence: TTA
accaaatgcttttgagagtc

SEQ ID NO: 318079 - DNA, 20 bp, Artificial Sequence
  Description of Artificial Sequence: Synthetic oligonucleotide
  Target: LAMA2; (+) strand; PAM type: YTN; PAM sequence: CTT
ttgagagtcaaaggcagggt

SEQ ID NO: 318080 - DNA, 20 bp, Artificial Sequence
  Description of Artificial Sequence: Synthetic oligonucleotide
  Target: LAMA2; (+) strand; PAM type: YTN; PAM sequence: TTT
tgagagtcaaaggcagggtc

SEQ ID NO: 318081 - DNA, 20 bp, Artificial Sequence
  Description of Artificial Sequence: Synthetic oligonucleotide
  Target: LAMA2; (+) strand; PAM type: YTN; PAM sequence: TTT
gagagtcaaaggcagggtct

SEQ ID NO: 318082 - DNA, 20 bp, Artificial Sequence
  Description of Artificial Sequence: Synthetic oligonucleotide
  Target: LAMA2; (+) strand; PAM type: YTN; PAM sequence: TTG
agagtcaaaggcagggtctg

SEQ ID NO: 318083 - DNA, 20 bp, Artificial Sequence
  Description of Artificial Sequence: Synthetic oligonucleotide
  Target: LAMA2; (+) strand; PAM type: YTN; PAM sequence: CTG
agaggaattatcaatgaata

SEQ ID NO: 318084 - DNA, 20 bp, Artificial Sequence
  Description of Artificial Sequence: Synthetic oligonucleotide
  Target: LAMA2; (+) strand; PAM type: YTN; PAM sequence: TTA
tcaatgaatatttgtaatga

SEQ ID NO: 318085 - DNA, 20 bp, Artificial Sequence
  Description of Artificial Sequence: Synthetic oligonucleotide
  Target: LAMA2; (+) strand; PAM type: YTN; PAM sequence: TTT
gtaatgaatcattgaggtcg

SEQ ID NO: 318086 - DNA, 20 bp, Artificial Sequence
  Description of Artificial Sequence: Synthetic oligonucleotide
  Target: LAMA2; (+) strand; PAM type: YTN; PAM sequence: TTG
taatgaatcattgaggtcgc

SEQ ID NO: 318087 - DNA, 20 bp, Artificial Sequence
  Description of Artificial Sequence: Synthetic oligonucleotide
  Target: LAMA2; (+) strand; PAM type: YTN; PAM sequence: TTG
aggtcgcttgtgaatagttg

SEQ ID NO: 318088 - DNA, 20 bp, Artificial Sequence
  Description of Artificial Sequence: Synthetic oligonucleotide
  Target: LAMA2; (+) strand; PAM type: YTN; PAM sequence: CTT
gtgaatagttgaaacttcca

SEQ ID NO: 318089 - DNA, 20 bp, Artificial Sequence
  Description of Artificial Sequence: Synthetic oligonucleotide
  Target: LAMA2; (+) strand; PAM type: YTN; PAM sequence: TTG
tgaatagttgaaacttccaa

SEQ ID NO: 318090 - DNA, 20 bp, Artificial Sequence
  Description of Artificial Sequence: Synthetic oligonucleotide
  Target: LAMA2; (+) strand; PAM type: YTN; PAM sequence: TTG
aaacttccaatattaaggct

SEQ ID NO: 318091 - DNA, 20 bp, Artificial Sequence
  Description of Artificial Sequence: Synthetic oligonucleotide
  Target: LAMA2; (+) strand; PAM type: YTN; PAM sequence: CTT
ccaatattaaggctgtgtag

SEQ ID NO: 318092 - DNA, 20 bp, Artificial Sequence
  Description of Artificial Sequence: Synthetic oligonucleotide
  Target: LAMA2; (+) strand; PAM type: YTN; PAM sequence: TTC
caatattaaggctgtgtagg

SEQ ID NO: 318093 - DNA, 20 bp, Artificial Sequence
  Description of Artificial Sequence: Synthetic oligonucleotide
  Target: LAMA2; (+) strand; PAM type: YTN; PAM sequence: TTA
aggctgtgtaggccaagaat

SEQ ID NO: 318094 - DNA, 20 bp, Artificial Sequence
  Description of Artificial Sequence: Synthetic oligonucleotide
  Target: LAMA2; (+) strand; PAM type: YTN; PAM sequence: CTG
tgtaggccaagaatctagtt

SEQ ID NO: 318095 - DNA, 20 bp, Artificial Sequence
  Description of Artificial Sequence: Synthetic oligonucleotide
  Target: LAMA2; (+) strand; PAM type: YTN; PAM sequence: CTA
gttatcctttcagaaatttt

SEQ ID NO: 318096 - DNA, 20 bp, Artificial Sequence
  Description of Artificial Sequence: Synthetic oligonucleotide
  Target: LAMA2; (+) strand; PAM type: YTN; PAM sequence: TTA
tcctttcagaaatttttttt

SEQ ID NO: 318097 - DNA, 20 bp, Artificial Sequence
  Description of Artificial Sequence: Synthetic oligonucleotide
  Target: LAMA2; (+) strand; PAM type: YTN; PAM sequence: CTT
tcagaaatttttttttctga

SEQ ID NO: 318098 - DNA, 20 bp, Artificial Sequence
  Description of Artificial Sequence: Synthetic oligonucleotide
  Target: LAMA2; (+) strand; PAM type: YTN; PAM sequence: TTT
cagaaatttttttttctgac

SEQ ID NO: 318099 - DNA, 20 bp, Artificial Sequence
  Description of Artificial Sequence: Synthetic oligonucleotide
  Target: LAMA2; (+) strand; PAM type: YTN; PAM sequence: TTC
agaaatttttttttctgacc

SEQ ID NO: 318100 - DNA, 20 bp, Artificial Sequence
  Description of Artificial Sequence: Synthetic oligonucleotide
  Target: LAMA2; (+) strand; PAM type: YTN; PAM sequence: TTT
ttttttctgaccacctactc

SEQ ID NO: 318101 - DNA, 20 bp, Artificial Sequence
  Description of Artificial Sequence: Synthetic oligonucleotide
  Target: LAMA2; (+) strand; PAM type: YTN; PAM sequence: TTT
tttttctgaccacctactct

SEQ ID NO: 318102 - DNA, 20 bp, Artificial Sequence
  Description of Artificial Sequence: Synthetic oligonucleotide
  Target: LAMA2; (+) strand; PAM type: YTN; PAM sequence: TTT
ttttctgaccacctactctg

SEQ ID NO: 318103 - DNA, 20 bp, Artificial Sequence
  Description of Artificial Sequence: Synthetic oligonucleotide
  Target: LAMA2; (+) strand; PAM type: YTN; PAM sequence: TTT
tttctgaccacctactctgt

SEQ ID NO: 318104 - DNA, 20 bp, Artificial Sequence
  Description of Artificial Sequence: Synthetic oligonucleotide
  Target: LAMA2; (+) strand; PAM type: YTN; PAM sequence: TTT
ttctgaccacctactctgtg

SEQ ID NO: 318105 - DNA, 20 bp, Artificial Sequence
  Description of Artificial Sequence: Synthetic oligonucleotide
  Target: LAMA2; (+) strand; PAM type: YTN; PAM sequence: TTT
tctgaccacctactctgtgc

SEQ ID NO: 318106 - DNA, 20 bp, Artificial Sequence
  Description of Artificial Sequence: Synthetic oligonucleotide
  Target: LAMA2; (+) strand; PAM type: YTN; PAM sequence: TTT
ctgaccacctactctgtgcc

SEQ ID NO: 318107 - DNA, 20 bp, Artificial Sequence
  Description of Artificial Sequence: Synthetic oligonucleotide
  Target: LAMA2; (+) strand; PAM type: YTN; PAM sequence: TTC
tgaccacctactctgtgcct

SEQ ID NO: 318108 - DNA, 20 bp, Artificial Sequence
  Description of Artificial Sequence: Synthetic oligonucleotide
  Target: LAMA2; (+) strand; PAM type: YTN; PAM sequence: CTG
accacctactctgtgcctta

SEQ ID NO: 318109 - DNA, 20 bp, Artificial Sequence
  Description of Artificial Sequence: Synthetic oligonucleotide
  Target: LAMA2; (+) strand; PAM type: YTN; PAM sequence: CTA
ctctgtgccttaagcaaaag

SEQ ID NO: 318110 - DNA, 20 bp, Artificial Sequence
  Description of Artificial Sequence: Synthetic oligonucleotide
  Target: LAMA2; (+) strand; PAM type: YTN; PAM sequence: CTC
tgtgccttaagcaaaagtac

SEQ ID NO: 318111 - DNA, 20 bp, Artificial Sequence
  Description of Artificial Sequence: Synthetic oligonucleotide
  Target: LAMA2; (+) strand; PAM type: YTN; PAM sequence: CTG
tgccttaagcaaaagtacct

SEQ ID NO: 318112 - DNA, 20 bp, Artificial Sequence
  Description of Artificial Sequence: Synthetic oligonucleotide
  Target: LAMA2; (+) strand; PAM type: YTN; PAM sequence: CTT
aagcaaaagtacctgccctt

SEQ ID NO: 318113 - DNA, 20 bp, Artificial Sequence
  Description of Artificial Sequence: Synthetic oligonucleotide
  Target: LAMA2; (+) strand; PAM type: YTN; PAM sequence: TTA
agcaaaagtacctgcccttc

SEQ ID NO: 318114 - DNA, 20 bp, Artificial Sequence
  Description of Artificial Sequence: Synthetic oligonucleotide
  Target: LAMA2; (+) strand; PAM type: YTN; PAM sequence: CTG
cccttctttctttctttttt

SEQ ID NO: 318115 - DNA, 20 bp, Artificial Sequence
  Description of Artificial Sequence: Synthetic oligonucleotide
  Target: LAMA2; (+) strand; PAM type: YTN; PAM sequence: CTT
ctttctttcttttttttttt

SEQ ID NO: 318116 - DNA, 20 bp, Artificial Sequence
  Description of Artificial Sequence: Synthetic oligonucleotide
  Target: LAMA2; (+) strand; PAM type: YTN; PAM sequence: TTC
tttctttctttttttttttt

SEQ ID NO: 318117 - DNA, 20 bp, Artificial Sequence
  Description of Artificial Sequence: Synthetic oligonucleotide
  Target: LAMA2; (+) strand; PAM type: YTN; PAM sequence: CTT
tctttctttttttttttttt

SEQ ID NO: 318118 - DNA, 20 bp, Artificial Sequence
  Description of Artificial Sequence: Synthetic oligonucleotide
  Target: LAMA2; (+) strand; PAM type: YTN; PAM sequence: TTT
ctttcttttttttttttttt

SEQ ID NO: 318119 - DNA, 20 bp, Artificial Sequence
  Description of Artificial Sequence: Synthetic oligonucleotide
  Target: LAMA2; (+) strand; PAM type: YTN; PAM sequence: TTC
tttctttttttttttttttt

SEQ ID NO: 318120 - DNA, 20 bp, Artificial Sequence
  Description of Artificial Sequence: Synthetic oligonucleotide
  Target: LAMA2; (+) strand; PAM type: YTN; PAM sequence: CTT
tctttttttttttttttttt

SEQ ID NO: 318121 - DNA, 20 bp, Artificial Sequence
  Description of Artificial Sequence: Synthetic oligonucleotide
  Target: LAMA2; (+) strand; PAM type: YTN; PAM sequence: TTT
cttttttttttttttttttg

SEQ ID NO: 318122 - DNA, 20 bp, Artificial Sequence
  Description of Artificial Sequence: Synthetic oligonucleotide
  Target: LAMA2; (+) strand; PAM type: YTN; PAM sequence: TTC
ttttttttttttttttttga

SEQ ID NO: 318123 - DNA, 20 bp, Artificial Sequence
  Description of Artificial Sequence: Synthetic oligonucleotide
  Target: LAMA2; (+) strand; PAM type: YTN; PAM sequence: CTT
ttttttttttttttttgaga

SEQ ID NO: 318124 - DNA, 20 bp, Artificial Sequence
  Description of Artificial Sequence: Synthetic oligonucleotide
  Target: LAMA2; (+) strand; PAM type: YTN; PAM sequence: TTT
tttttttttttttttgagag

SEQ ID NO: 318125 - DNA, 20 bp, Artificial Sequence
  Description of Artificial Sequence: Synthetic oligonucleotide
  Target: LAMA2; (+) strand; PAM type: YTN; PAM sequence: TTT
ttttttttttttttgagagc

SEQ ID NO: 318126 - DNA, 20 bp, Artificial Sequence
  Description of Artificial Sequence: Synthetic oligonucleotide
  Target: LAMA2; (+) strand; PAM type: YTN; PAM sequence: TTT
tttttttttttttgagagca

SEQ ID NO: 318127 - DNA, 20 bp, Artificial Sequence
  Description of Artificial Sequence: Synthetic oligonucleotide
  Target: LAMA2; (+) strand; PAM type: YTN; PAM sequence: TTT
ttttttttttttgagagcat

SEQ ID NO: 318128 - DNA, 20 bp, Artificial Sequence
  Description of Artificial Sequence: Synthetic oligonucleotide
  Target: LAMA2; (+) strand; PAM type: YTN; PAM sequence: TTT
tttttttttttgagagcatg

SEQ ID NO: 318129 - DNA, 20 bp, Artificial Sequence
  Description of Artificial Sequence: Synthetic oligonucleotide
  Target: LAMA2; (+) strand; PAM type: YTN; PAM sequence: TTT
ttttttttttgagagcatgg

SEQ ID NO: 318130 - DNA, 20 bp, Artificial Sequence
  Description of Artificial Sequence: Synthetic oligonucleotide
  Target: LAMA2; (+) strand; PAM type: YTN; PAM sequence: TTT
tttttttttgagagcatggt

SEQ ID NO: 318131 - DNA, 20 bp, Artificial Sequence
  Description of Artificial Sequence: Synthetic oligonucleotide
  Target: LAMA2; (+) strand; PAM type: YTN; PAM sequence: TTT
ttttttttgagagcatggtg

SEQ ID NO: 318132 - DNA, 20 bp, Artificial Sequence
  Description of Artificial Sequence: Synthetic oligonucleotide
  Target: LAMA2; (+) strand; PAM type: YTN; PAM sequence: TTT
tttttttgagagcatggtgt

SEQ ID NO: 318133 - DNA, 20 bp, Artificial Sequence
  Description of Artificial Sequence: Synthetic oligonucleotide
  Target: LAMA2; (+) strand; PAM type: YTN; PAM sequence: TTT
ttttttgagagcatggtgtg

SEQ ID NO: 318134 - DNA, 20 bp, Artificial Sequence
  Description of Artificial Sequence: Synthetic oligonucleotide
  Target: LAMA2; (+) strand; PAM type: YTN; PAM sequence: TTT
tttttgagagcatggtgtgg

SEQ ID NO: 318135 - DNA, 20 bp, Artificial Sequence
  Description of Artificial Sequence: Synthetic oligonucleotide
  Target: LAMA2; (+) strand; PAM type: YTN; PAM sequence: TTT
ttttgagagcatggtgtggt

SEQ ID NO: 318136 - DNA, 20 bp, Artificial Sequence
  Description of Artificial Sequence: Synthetic oligonucleotide
  Target: LAMA2; (+) strand; PAM type: YTN; PAM sequence: TTT
tttgagagcatggtgtggtc

SEQ ID NO: 318137 - DNA, 20 bp, Artificial Sequence
  Description of Artificial Sequence: Synthetic oligonucleotide
  Target: LAMA2; (+) strand; PAM type: YTN; PAM sequence: TTT
ttgagagcatggtgtggtct

SEQ ID NO: 318138 - DNA, 20 bp, Artificial Sequence
  Description of Artificial Sequence: Synthetic oligonucleotide
  Target: LAMA2; (+) strand; PAM type: YTN; PAM sequence: TTT
tgagagcatggtgtggtctc

SEQ ID NO: 318139 - DNA, 20 bp, Artificial Sequence
  Description of Artificial Sequence: Synthetic oligonucleotide
  Target: LAMA2; (+) strand; PAM type: YTN; PAM sequence: TTT
gagagcatggtgtggtctcg

SEQ ID NO: 318140 - DNA, 20 bp, Artificial Sequence
  Description of Artificial Sequence: Synthetic oligonucleotide
  Target: LAMA2; (+) strand; PAM type: YTN; PAM sequence: TTG
agagcatggtgtggtctcgg

SEQ ID NO: 318141 - DNA, 20 bp, Artificial Sequence
  Description of Artificial Sequence: Synthetic oligonucleotide
  Target: LAMA2; (+) strand; PAM type: YTN; PAM sequence: CTC
ggctcactgcaacattcgcc

SEQ ID NO: 318142 - DNA, 20 bp, Artificial Sequence
  Description of Artificial Sequence: Synthetic oligonucleotide
  Target: LAMA2; (+) strand; PAM type: YTN; PAM sequence: CTC
actgcaacattcgcctcccg

SEQ ID NO: 318143 - DNA, 20 bp, Artificial Sequence
  Description of Artificial Sequence: Synthetic oligonucleotide
  Target: LAMA2; (+) strand; PAM type: YTN; PAM sequence: CTG
caacattcgcctcccgggtt

SEQ ID NO: 318144 - DNA, 20 bp, Artificial Sequence
  Description of Artificial Sequence: Synthetic oligonucleotide
  Target: LAMA2; (+) strand; PAM type: YTN; PAM sequence: TTC
gcctcccgggttcaagcgat

SEQ ID NO: 318145 - DNA, 20 bp, Artificial Sequence
  Description of Artificial Sequence: Synthetic oligonucleotide
  Target: LAMA2; (+) strand; PAM type: YTN; PAM sequence: CTC
ccgggttcaagcgattcact

SEQ ID NO: 318146 - DNA, 20 bp, Artificial Sequence
  Description of Artificial Sequence: Synthetic oligonucleotide
  Target: LAMA2; (+) strand; PAM type: YTN; PAM sequence: TTC
aagcgattcacttgcctcag

SEQ ID NO: 318147 - DNA, 20 bp, Artificial Sequence
  Description of Artificial Sequence: Synthetic oligonucleotide
  Target: LAMA2; (+) strand; PAM type: YTN; PAM sequence: TTC
acttgcctcagcctcctgag

SEQ ID NO: 318148 - DNA, 20 bp, Artificial Sequence
  Description of Artificial Sequence: Synthetic oligonucleotide
  Target: LAMA2; (+) strand; PAM type: YTN; PAM sequence: CTT
gcctcagcctcctgagtagc

SEQ ID NO: 318149 - DNA, 20 bp, Artificial Sequence
  Description of Artificial Sequence: Synthetic oligonucleotide
  Target: LAMA2; (+) strand; PAM type: YTN; PAM sequence: TTG
cctcagcctcctgagtagct

SEQ ID NO: 318150 - DNA, 20 bp, Artificial Sequence
  Description of Artificial Sequence: Synthetic oligonucleotide
  Target: LAMA2; (+) strand; PAM type: YTN; PAM sequence: CTC
agcctcctgagtagctggga

SEQ ID NO: 318151 - DNA, 20 bp, Artificial Sequence
  Description of Artificial Sequence: Synthetic oligonucleotide
  Target: LAMA2; (+) strand; PAM type: YTN; PAM sequence: CTC
ctgagtagctgggattacag

SEQ ID NO: 318152 - DNA, 20 bp, Artificial Sequence
  Description of Artificial Sequence: Synthetic oligonucleotide
  Target: LAMA2; (+) strand; PAM type: YTN; PAM sequence: CTG
agtagctgggattacaggcg

SEQ ID NO: 318153 - DNA, 20 bp, Artificial Sequence
  Description of Artificial Sequence: Synthetic oligonucleotide
  Target: LAMA2; (+) strand; PAM type: YTN; PAM sequence: CTG
ggattacaggcgcctgccac

SEQ ID NO: 318154 - DNA, 20 bp, Artificial Sequence
  Description of Artificial Sequence: Synthetic oligonucleotide
  Target: LAMA2; (+) strand; PAM type: YTN; PAM sequence: TTA
caggcgcctgccaccaagct

SEQ ID NO: 318155 - DNA, 20 bp, Artificial Sequence
  Description of Artificial Sequence: Synthetic oligonucleotide
  Target: LAMA2; (+) strand; PAM type: YTN; PAM sequence: CTG
ccaccaagctgggctaattt

SEQ ID NO: 318156 - DNA, 20 bp, Artificial Sequence
  Description of Artificial Sequence: Synthetic oligonucleotide
  Target: LAMA2; (+) strand; PAM type: YTN; PAM sequence: CTG
ggctaatttttgtattttta

SEQ ID NO: 318157 - DNA, 20 bp, Artificial Sequence
  Description of Artificial Sequence: Synthetic oligonucleotide
  Target: LAMA2; (+) strand; PAM type: YTN; PAM sequence: CTA
atttttgtatttttagtaga

SEQ ID NO: 318158 - DNA, 20 bp, Artificial Sequence
  Description of Artificial Sequence: Synthetic oligonucleotide
  Target: LAMA2; (+) strand; PAM type: YTN; PAM sequence: TTT
ttgtatttttagtagagaca

SEQ ID NO: 318159 - DNA, 20 bp, Artificial Sequence
  Description of Artificial Sequence: Synthetic oligonucleotide
  Target: LAMA2; (+) strand; PAM type: YTN; PAM sequence: TTT
tgtatttttagtagagacaa

SEQ ID NO: 318160 - DNA, 20 bp, Artificial Sequence
  Description of Artificial Sequence: Synthetic oligonucleotide
  Target: LAMA2; (+) strand; PAM type: YTN; PAM sequence: TTT
gtatttttagtagagacaag

SEQ ID NO: 318161 - DNA, 20 bp, Artificial Sequence
  Description of Artificial Sequence: Synthetic oligonucleotide
  Target: LAMA2; (+) strand; PAM type: YTN; PAM sequence: TTG
tatttttagtagagacaagg

SEQ ID NO: 318162 - DNA, 20 bp, Artificial Sequence
  Description of Artificial Sequence: Synthetic oligonucleotide
  Target: LAMA2; (+) strand; PAM type: YTN; PAM sequence: TTT
ttagtagagacaaggtttca

SEQ ID NO: 318163 - DNA, 20 bp, Artificial Sequence
  Description of Artificial Sequence: Synthetic oligonucleotide
  Target: LAMA2; (+) strand; PAM type: YTN; PAM sequence: TTT
tagtagagacaaggtttcac

SEQ ID NO: 318164 - DNA, 20 bp, Artificial Sequence
  Description of Artificial Sequence: Synthetic oligonucleotide
  Target: LAMA2; (+) strand; PAM type: YTN; PAM sequence: TTT
agtagagacaaggtttcacc

SEQ ID NO: 318165 - DNA, 20 bp, Artificial Sequence
  Description of Artificial Sequence: Synthetic oligonucleotide
  Target: LAMA2; (+) strand; PAM type: YTN; PAM sequence: TTA
gtagagacaaggtttcacca

SEQ ID NO: 318166 - DNA, 20 bp, Artificial Sequence
  Description of Artificial Sequence: Synthetic oligonucleotide
  Target: LAMA2; (+) strand; PAM type: YTN; PAM sequence: TTT
caccatgttggccagactgg

SEQ ID NO: 318167 - DNA, 20 bp, Artificial Sequence
  Description of Artificial Sequence: Synthetic oligonucleotide
  Target: LAMA2; (+) strand; PAM type: YTN; PAM sequence: TTC
accatgttggccagactggt

SEQ ID NO: 318168 - DNA, 20 bp, Artificial Sequence
  Description of Artificial Sequence: Synthetic oligonucleotide
  Target: LAMA2; (+) strand; PAM type: YTN; PAM sequence: TTG
gccagactggtcttgaactc

SEQ ID NO: 318169 - DNA, 20 bp, Artificial Sequence
  Description of Artificial Sequence: Synthetic oligonucleotide
  Target: LAMA2; (+) strand; PAM type: YTN; PAM sequence: CTG
gtcttgaactcttgacctca

SEQ ID NO: 318170 - DNA, 20 bp, Artificial Sequence
  Description of Artificial Sequence: Synthetic oligonucleotide
  Target: LAMA2; (+) strand; PAM type: YTN; PAM sequence: CTT
gaactcttgacctcatgatc

SEQ ID NO: 318171 - DNA, 20 bp, Artificial Sequence
  Description of Artificial Sequence: Synthetic oligonucleotide
  Target: LAMA2; (+) strand; PAM type: YTN; PAM sequence: TTG
aactcttgacctcatgatct

SEQ ID NO: 318172 - DNA, 20 bp, Artificial Sequence
  Description of Artificial Sequence: Synthetic oligonucleotide
  Target: LAMA2; (+) strand; PAM type: YTN; PAM sequence: CTC
ttgacctcatgatctgcatg

SEQ ID NO: 318173 - DNA, 20 bp, Artificial Sequence
  Description of Artificial Sequence: Synthetic oligonucleotide
  Target: LAMA2; (+) strand; PAM type: YTN; PAM sequence: CTT
gacctcatgatctgcatgcc

SEQ ID NO: 318174 - DNA, 20 bp, Artificial Sequence
  Description of Artificial Sequence: Synthetic oligonucleotide
  Target: LAMA2; (+) strand; PAM type: YTN; PAM sequence: TTG
acctcatgatctgcatgcct

SEQ ID NO: 318175 - DNA, 20 bp, Artificial Sequence
  Description of Artificial Sequence: Synthetic oligonucleotide
  Target: LAMA2; (+) strand; PAM type: YTN; PAM sequence: CTC
atgatctgcatgcctgagcc

SEQ ID NO: 318176 - DNA, 20 bp, Artificial Sequence
  Description of Artificial Sequence: Synthetic oligonucleotide
  Target: LAMA2; (+) strand; PAM type: YTN; PAM sequence: CTG
catgcctgagcctcccaaag

SEQ ID NO: 318177 - DNA, 20 bp, Artificial Sequence
  Description of Artificial Sequence: Synthetic oligonucleotide
  Target: LAMA2; (+) strand; PAM type: YTN; PAM sequence: CTG
agcctcccaaagtgctggga

SEQ ID NO: 318178 - DNA, 20 bp, Artificial Sequence
  Description of Artificial Sequence: Synthetic oligonucleotide
  Target: LAMA2; (+) strand; PAM type: YTN; PAM sequence: CTC
ccaaagtgctgggattacaa

SEQ ID NO: 318179 - DNA, 20 bp, Artificial Sequence
  Description of Artificial Sequence: Synthetic oligonucleotide
  Target: LAMA2; (+) strand; PAM type: YTN; PAM sequence: CTG
ggattacaagcgtgagccac

SEQ ID NO: 318180 - DNA, 20 bp, Artificial Sequence
  Description of Artificial Sequence: Synthetic oligonucleotide
  Target: LAMA2; (+) strand; PAM type: YTN; PAM sequence: TTA
caagcgtgagccaccatgcc

SEQ ID NO: 318181 - DNA, 20 bp, Artificial Sequence
  Description of Artificial Sequence: Synthetic oligonucleotide
  Target: LAMA2; (+) strand; PAM type: YTN; PAM sequence: CTG
cccttctctaaaggcacttg

SEQ ID NO: 318182 - DNA, 20 bp, Artificial Sequence
  Description of Artificial Sequence: Synthetic oligonucleotide
  Target: LAMA2; (+) strand; PAM type: YTN; PAM sequence: CTT
ctctaaaggcacttgcttgc

SEQ ID NO: 318183 - DNA, 20 bp, Artificial Sequence
  Description of Artificial Sequence: Synthetic oligonucleotide
  Target: LAMA2; (+) strand; PAM type: YTN; PAM sequence: TTC
tctaaaggcacttgcttgca

SEQ ID NO: 318184 - DNA, 20 bp, Artificial Sequence
  Description of Artificial Sequence: Synthetic oligonucleotide
  Target: LAMA2; (+) strand; PAM type: YTN; PAM sequence: CTC
taaaggcacttgcttgcagt

SEQ ID NO: 318185 - DNA, 20 bp, Artificial Sequence
  Description of Artificial Sequence: Synthetic oligonucleotide
  Target: LAMA2; (+) strand; PAM type: YTN; PAM sequence: CTA
aaggcacttgcttgcagtct

SEQ ID NO: 318186 - DNA, 20 bp, Artificial Sequence
  Description of Artificial Sequence: Synthetic oligonucleotide
  Target: LAMA2; (+) strand; PAM type: YTN; PAM sequence: CTT
gcttgcagtctttggaggag

SEQ ID NO: 318187 - DNA, 20 bp, Artificial Sequence
  Description of Artificial Sequence: Synthetic oligonucleotide
  Target: LAMA2; (+) strand; PAM type: YTN; PAM sequence: TTG
cttgcagtctttggaggaga

SEQ ID NO: 318188 - DNA, 20 bp, Artificial Sequence
  Description of Artificial Sequence: Synthetic oligonucleotide
  Target: LAMA2; (+) strand; PAM type: YTN; PAM sequence: CTT
gcagtctttggaggagataa

SEQ ID NO: 318189 - DNA, 20 bp, Artificial Sequence
  Description of Artificial Sequence: Synthetic oligonucleotide
  Target: LAMA2; (+) strand; PAM type: YTN; PAM sequence: TTG
cagtctttggaggagataag

SEQ ID NO: 318190 - DNA, 20 bp, Artificial Sequence
  Description of Artificial Sequence: Synthetic oligonucleotide
  Target: LAMA2; (+) strand; PAM type: YTN; PAM sequence: CTT
tggaggagataagctttgat

SEQ ID NO: 318191 - DNA, 20 bp, Artificial Sequence
  Description of Artificial Sequence: Synthetic oligonucleotide
  Target: LAMA2; (+) strand; PAM type: YTN; PAM sequence: TTT
ggaggagataagctttgatc

SEQ ID NO: 318192 - DNA, 20 bp, Artificial Sequence
  Description of Artificial Sequence: Synthetic oligonucleotide
  Target: LAMA2; (+) strand; PAM type: YTN; PAM sequence: TTG
gaggagataagctttgatca

SEQ ID NO: 318193 - DNA, 20 bp, Artificial Sequence
  Description of Artificial Sequence: Synthetic oligonucleotide
  Target: LAMA2; (+) strand; PAM type: YTN; PAM sequence: CTT
tgatcaactcatcaacctaa

SEQ ID NO: 318194 - DNA, 20 bp, Artificial Sequence
  Description of Artificial Sequence: Synthetic oligonucleotide
  Target: LAMA2; (+) strand; PAM type: YTN; PAM sequence: TTT
gatcaactcatcaacctaat

SEQ ID NO: 318195 - DNA, 20 bp, Artificial Sequence
  Description of Artificial Sequence: Synthetic oligonucleotide
  Target: LAMA2; (+) strand; PAM type: YTN; PAM sequence: TTG
atcaactcatcaacctaatg

SEQ ID NO: 318196 - DNA, 20 bp, Artificial Sequence
  Description of Artificial Sequence: Synthetic oligonucleotide
  Target: LAMA2; (+) strand; PAM type: YTN; PAM sequence: CTC
atcaacctaatggcaagtat

SEQ ID NO: 318197 - DNA, 20 bp, Artificial Sequence
  Description of Artificial Sequence: Synthetic oligonucleotide
  Target: LAMA2; (+) strand; PAM type: YTN; PAM sequence: CTA
atggcaagtatcatttgact

SEQ ID NO: 318198 - DNA, 20 bp, Artificial Sequence
  Description of Artificial Sequence: Synthetic oligonucleotide
  Target: LAMA2; (+) strand; PAM type: YTN; PAM sequence: TTT
gacttgagaaaagataagaa

SEQ ID NO: 318199 - DNA, 20 bp, Artificial Sequence
  Description of Artificial Sequence: Synthetic oligonucleotide
  Target: LAMA2; (+) strand; PAM type: YTN; PAM sequence: TTG
acttgagaaaagataagaaa

SEQ ID NO: 318200 - DNA, 20 bp, Artificial Sequence
  Description of Artificial Sequence: Synthetic oligonucleotide
  Target: LAMA2; (+) strand; PAM type: YTN; PAM sequence: CTT
gagaaaagataagaaacagg

SEQ ID NO: 318201 - DNA, 20 bp, Artificial Sequence
  Description of Artificial Sequence: Synthetic oligonucleotide
  Target: LAMA2; (+) strand; PAM type: YTN; PAM sequence: TTG
agaaaagataagaaacaggg

SEQ ID NO: 318202 - DNA, 20 bp, Artificial Sequence
  Description of Artificial Sequence: Synthetic oligonucleotide
  Target: LAMA2; (+) strand; PAM type: YTN; PAM sequence: TTC
tcaatagtgtgatctacaag

SEQ ID NO: 318203 - DNA, 20 bp, Artificial Sequence
  Description of Artificial Sequence: Synthetic oligonucleotide
  Target: LAMA2; (+) strand; PAM type: YTN; PAM sequence: CTC
aatagtgtgatctacaagat

SEQ ID NO: 318204 - DNA, 20 bp, Artificial Sequence
  Description of Artificial Sequence: Synthetic oligonucleotide
  Target: LAMA2; (+) strand; PAM type: YTN; PAM sequence: CTA
caagatagacagcagtcagt

SEQ ID NO: 318205 - DNA, 20 bp, Artificial Sequence
  Description of Artificial Sequence: Synthetic oligonucleotide
  Target: LAMA2; (+) strand; PAM type: YTN; PAM sequence: CTT
gcttctctgaggaagtgact

SEQ ID NO: 318206 - DNA, 20 bp, Artificial Sequence
  Description of Artificial Sequence: Synthetic oligonucleotide
  Target: LAMA2; (+) strand; PAM type: YTN; PAM sequence: TTG
cttctctgaggaagtgactc

SEQ ID NO: 318207 - DNA, 20 bp, Artificial Sequence
  Description of Artificial Sequence: Synthetic oligonucleotide
  Target: LAMA2; (+) strand; PAM type: YTN; PAM sequence: CTT
ctctgaggaagtgactcttg

SEQ ID NO: 318208 - DNA, 20 bp, Artificial Sequence
  Description of Artificial Sequence: Synthetic oligonucleotide
  Target: LAMA2; (+) strand; PAM type: YTN; PAM sequence: TTC
tctgaggaagtgactcttgg

SEQ ID NO: 318209 - DNA, 20 bp, Artificial Sequence
  Description of Artificial Sequence: Synthetic oligonucleotide
  Target: LAMA2; (+) strand; PAM type: YTN; PAM sequence: CTC
tgaggaagtgactcttggaa

SEQ ID NO: 318210 - DNA, 20 bp, Artificial Sequence
  Description of Artificial Sequence: Synthetic oligonucleotide
  Target: LAMA2; (+) strand; PAM type: YTN; PAM sequence: CTG
aggaagtgactcttggaaga

SEQ ID NO: 318211 - DNA, 20 bp, Artificial Sequence
  Description of Artificial Sequence: Synthetic oligonucleotide
  Target: LAMA2; (+) strand; PAM type: YTN; PAM sequence: CTC
ttggaagaattagtaagagc

SEQ ID NO: 318212 - DNA, 20 bp, Artificial Sequence
  Description of Artificial Sequence: Synthetic oligonucleotide
  Target: LAMA2; (+) strand; PAM type: YTN; PAM sequence: CTT
ggaagaattagtaagagcta

SEQ ID NO: 318213 - DNA, 20 bp, Artificial Sequence
  Description of Artificial Sequence: Synthetic oligonucleotide
  Target: LAMA2; (+) strand; PAM type: YTN; PAM sequence: TTG
gaagaattagtaagagctag

SEQ ID NO: 318214 - DNA, 20 bp, Artificial Sequence
  Description of Artificial Sequence: Synthetic oligonucleotide
  Target: LAMA2; (+) strand; PAM type: YTN; PAM sequence: TTA
gtaagagctaggtgggcaaa

SEQ ID NO: 318215 - DNA, 20 bp, Artificial Sequence
  Description of Artificial Sequence: Synthetic oligonucleotide
  Target: LAMA2; (+) strand; PAM type: YTN; PAM sequence: CTA
ggtgggcaaattcgggtaag

SEQ ID NO: 318216 - DNA, 20 bp, Artificial Sequence
  Description of Artificial Sequence: Synthetic oligonucleotide
  Target: LAMA2; (+) strand; PAM type: YTN; PAM sequence: TTC
gggtaagacagaaggttgag

SEQ ID NO: 318217 - DNA, 20 bp, Artificial Sequence
  Description of Artificial Sequence: Synthetic oligonucleotide
  Target: LAMA2; (+) strand; PAM type: YTN; PAM sequence: TTG
agaaagatgttttcagagaa

SEQ ID NO: 318218 - DNA, 20 bp, Artificial Sequence
  Description of Artificial Sequence: Synthetic oligonucleotide
  Target: LAMA2; (+) strand; PAM type: YTN; PAM sequence: TTT
tcagagaaggctccacagga

SEQ ID NO: 318219 - DNA, 20 bp, Artificial Sequence
  Description of Artificial Sequence: Synthetic oligonucleotide
  Target: LAMA2; (+) strand; PAM type: YTN; PAM sequence: TTT
cagagaaggctccacaggaa

SEQ ID NO: 318220 - DNA, 20 bp, Artificial Sequence
  Description of Artificial Sequence: Synthetic oligonucleotide
  Target: LAMA2; (+) strand; PAM type: YTN; PAM sequence: TTC
agagaaggctccacaggaac

SEQ ID NO: 318221 - DNA, 20 bp, Artificial Sequence
  Description of Artificial Sequence: Synthetic oligonucleotide
  Target: LAMA2; (+) strand; PAM type: YTN; PAM sequence: CTC
cacaggaacatagttcctct

SEQ ID NO: 318222 - DNA, 20 bp, Artificial Sequence
  Description of Artificial Sequence: Synthetic oligonucleotide
  Target: LAMA2; (+) strand; PAM type: YTN; PAM sequence: TTC
ctctcctgctgtattatgga

SEQ ID NO: 318223 - DNA, 20 bp, Artificial Sequence
  Description of Artificial Sequence: Synthetic oligonucleotide
  Target: LAMA2; (+) strand; PAM type: YTN; PAM sequence: CTC
tcctgctgtattatggagag

SEQ ID NO: 318224 - DNA, 20 bp, Artificial Sequence
  Description of Artificial Sequence: Synthetic oligonucleotide
  Target: LAMA2; (+) strand; PAM type: YTN; PAM sequence: CTC
ctgctgtattatggagagaa

SEQ ID NO: 318225 - DNA, 20 bp, Artificial Sequence
  Description of Artificial Sequence: Synthetic oligonucleotide
  Target: LAMA2; (+) strand; PAM type: YTN; PAM sequence: CTG
ctgtattatggagagaacat

SEQ ID NO: 318226 - DNA, 20 bp, Artificial Sequence
  Description of Artificial Sequence: Synthetic oligonucleotide
  Target: LAMA2; (+) strand; PAM type: YTN; PAM sequence: CTG
tattatggagagaacatgga

SEQ ID NO: 318227 - DNA, 20 bp, Artificial Sequence
  Description of Artificial Sequence: Synthetic oligonucleotide
  Target: LAMA2; (+) strand; PAM type: YTN; PAM sequence: TTA
tggagagaacatggagcctt

SEQ ID NO: 318228 - DNA, 20 bp, Artificial Sequence
  Description of Artificial Sequence: Synthetic oligonucleotide
  Target: LAMA2; (+) strand; PAM type: YTN; PAM sequence: CTT
cagagatataaaaatgtcat

SEQ ID NO: 318229 - DNA, 20 bp, Artificial Sequence
  Description of Artificial Sequence: Synthetic oligonucleotide
  Target: LAMA2; (+) strand; PAM type: YTN; PAM sequence: TTC
agagatataaaaatgtcatt

SEQ ID NO: 318230 - DNA, 20 bp, Artificial Sequence
  Description of Artificial Sequence: Synthetic oligonucleotide
  Target: LAMA2; (+) strand; PAM type: YTN; PAM sequence: TTG
tggctggaatgcaaagatga

SEQ ID NO: 318231 - DNA, 20 bp, Artificial Sequence
  Description of Artificial Sequence: Synthetic oligonucleotide
  Target: LAMA2; (+) strand; PAM type: YTN; PAM sequence: CTG
gaatgcaaagatgaagggaa

SEQ ID NO: 318232 - DNA, 20 bp, Artificial Sequence
  Description of Artificial Sequence: Synthetic oligonucleotide
  Target: LAMA2; (+) strand; PAM type: YTN; PAM sequence: TTT
gaattgaggaagggatcaga

SEQ ID NO: 318233 - DNA, 20 bp, Artificial Sequence
  Description of Artificial Sequence: Synthetic oligonucleotide
  Target: LAMA2; (+) strand; PAM type: YTN; PAM sequence: TTG
aattgaggaagggatcagag

SEQ ID NO: 318234 - DNA, 20 bp, Artificial Sequence
  Description of Artificial Sequence: Synthetic oligonucleotide
  Target: LAMA2; (+) strand; PAM type: YTN; PAM sequence: TTG
aggaagggatcagagcatgc

SEQ ID NO: 318235 - DNA, 20 bp, Artificial Sequence
  Description of Artificial Sequence: Synthetic oligonucleotide
  Target: LAMA2; (+) strand; PAM type: YTN; PAM sequence: TTT
aaagattactttaagaattt

SEQ ID NO: 318236 - DNA, 20 bp, Artificial Sequence
  Description of Artificial Sequence: Synthetic oligonucleotide
  Target: LAMA2; (+) strand; PAM type: YTN; PAM sequence: TTA
aagattactttaagaatttg

SEQ ID NO: 318237 - DNA, 20 bp, Artificial Sequence
  Description of Artificial Sequence: Synthetic oligonucleotide
  Target: LAMA2; (+) strand; PAM type: YTN; PAM sequence: TTA
ctttaagaatttggtgcatt

SEQ ID NO: 318238 - DNA, 20 bp, Artificial Sequence
  Description of Artificial Sequence: Synthetic oligonucleotide
  Target: LAMA2; (+) strand; PAM type: YTN; PAM sequence: CTT
taagaatttggtgcattata

SEQ ID NO: 318239 - DNA, 20 bp, Artificial Sequence
  Description of Artificial Sequence: Synthetic oligonucleotide
  Target: LAMA2; (+) strand; PAM type: YTN; PAM sequence: TTT
aagaatttggtgcattatac

SEQ ID NO: 318240 - DNA, 20 bp, Artificial Sequence
  Description of Artificial Sequence: Synthetic oligonucleotide
  Target: LAMA2; (+) strand; PAM type: YTN; PAM sequence: TTA
agaatttggtgcattatact

SEQ ID NO: 318241 - DNA, 20 bp, Artificial Sequence
  Description of Artificial Sequence: Synthetic oligonucleotide
  Target: LAMA2; (+) strand; PAM type: YTN; PAM sequence: TTT
ggtgcattatactcattaaa

SEQ ID NO: 318242 - DNA, 20 bp, Artificial Sequence
  Description of Artificial Sequence: Synthetic oligonucleotide
  Target: LAMA2; (+) strand; PAM type: YTN; PAM sequence: TTG
gtgcattatactcattaaat

SEQ ID NO: 318243 - DNA, 20 bp, Artificial Sequence
  Description of Artificial Sequence: Synthetic oligonucleotide
  Target: LAMA2; (+) strand; PAM type: YTN; PAM sequence: TTA
tactcattaaatgatgtttg

SEQ ID NO: 318244 - DNA, 20 bp, Artificial Sequence
  Description of Artificial Sequence: Synthetic oligonucleotide
  Target: LAMA2; (+) strand; PAM type: YTN; PAM sequence: CTC
attaaatgatgtttgccact

SEQ ID NO: 318245 - DNA, 20 bp, Artificial Sequence
  Description of Artificial Sequence: Synthetic oligonucleotide
  Target: LAMA2; (+) strand; PAM type: YTN; PAM sequence: TTA
aatgatgtttgccacttggg

SEQ ID NO: 318246 - DNA, 20 bp, Artificial Sequence
  Description of Artificial Sequence: Synthetic oligonucleotide
  Target: LAMA2; (+) strand; PAM type: YTN; PAM sequence: TTT
gccacttgggtcaacaaaca

SEQ ID NO: 318247 - DNA, 20 bp, Artificial Sequence
  Description of Artificial Sequence: Synthetic oligonucleotide
  Target: LAMA2; (+) strand; PAM type: YTN; PAM sequence: TTG
ccacttgggtcaacaaacat

SEQ ID NO: 318248 - DNA, 20 bp, Artificial Sequence
  Description of Artificial Sequence: Synthetic oligonucleotide
  Target: LAMA2; (+) strand; PAM type: YTN; PAM sequence: CTT
gggtcaacaaacattctgta

SEQ ID NO: 318249 - DNA, 20 bp, Artificial Sequence
  Description of Artificial Sequence: Synthetic oligonucleotide
  Target: LAMA2; (+) strand; PAM type: YTN; PAM sequence: TTG
ggtcaacaaacattctgtaa

SEQ ID NO: 318250 - DNA, 20 bp, Artificial Sequence
  Description of Artificial Sequence: Synthetic oligonucleotide
  Target: LAMA2; (+) strand; PAM type: YTN; PAM sequence: TTC
tgtaaaggcttagatagtaa

SEQ ID NO: 318251 - DNA, 20 bp, Artificial Sequence
  Description of Artificial Sequence: Synthetic oligonucleotide
  Target: LAMA2; (+) strand; PAM type: YTN; PAM sequence: CTG
taaaggcttagatagtaagt

SEQ ID NO: 318252 - DNA, 20 bp, Artificial Sequence
  Description of Artificial Sequence: Synthetic oligonucleotide
  Target: LAMA2; (+) strand; PAM type: YTN; PAM sequence: CTT
agatagtaagtattataaat

SEQ ID NO: 318253 - DNA, 20 bp, Artificial Sequence
  Description of Artificial Sequence: Synthetic oligonucleotide
  Target: LAMA2; (+) strand; PAM type: YTN; PAM sequence: TTA
gatagtaagtattataaata

SEQ ID NO: 318254 - DNA, 20 bp, Artificial Sequence
  Description of Artificial Sequence: Synthetic oligonucleotide
  Target: LAMA2; (+) strand; PAM type: YTN; PAM sequence: TTA
taaatattgcaggtgatatg

SEQ ID NO: 318255 - DNA, 20 bp, Artificial Sequence
  Description of Artificial Sequence: Synthetic oligonucleotide
  Target: LAMA2; (+) strand; PAM type: YTN; PAM sequence: TTG
caggtgatatggtctctgtt

SEQ ID NO: 318256 - DNA, 20 bp, Artificial Sequence
  Description of Artificial Sequence: Synthetic oligonucleotide
  Target: LAMA2; (+) strand; PAM type: YTN; PAM sequence: CTC
tgttgcaattactcaactct

SEQ ID NO: 318257 - DNA, 20 bp, Artificial Sequence
  Description of Artificial Sequence: Synthetic oligonucleotide
  Target: LAMA2; (+) strand; PAM type: YTN; PAM sequence: CTG
ttgcaattactcaactctgc

SEQ ID NO: 318258 - DNA, 20 bp, Artificial Sequence
  Description of Artificial Sequence: Synthetic oligonucleotide
  Target: LAMA2; (+) strand; PAM type: YTN; PAM sequence: TTG
caattactcaactctgctgt

SEQ ID NO: 318259 - DNA, 20 bp, Artificial Sequence
  Description of Artificial Sequence: Synthetic oligonucleotide
  Target: LAMA2; (+) strand; PAM type: YTN; PAM sequence: TTA
ctcaactctgctgttgtaag

SEQ ID NO: 318260 - DNA, 20 bp, Artificial Sequence
  Description of Artificial Sequence: Synthetic oligonucleotide
  Target: LAMA2; (+) strand; PAM type: YTN; PAM sequence: CTC
aactctgctgttgtaaggga

SEQ ID NO: 318261 - DNA, 20 bp, Artificial Sequence
  Description of Artificial Sequence: Synthetic oligonucleotide
  Target: LAMA2; (+) strand; PAM type: YTN; PAM sequence: CTC
tgctgttgtaagggagaagc

SEQ ID NO: 318262 - DNA, 20 bp, Artificial Sequence
  Description of Artificial Sequence: Synthetic oligonucleotide
  Target: LAMA2; (+) strand; PAM type: YTN; PAM sequence: CTG
ctgttgtaagggagaagcag

SEQ ID NO: 318263 - DNA, 20 bp, Artificial Sequence
  Description of Artificial Sequence: Synthetic oligonucleotide
  Target: LAMA2; (+) strand; PAM type: YTN; PAM sequence: CTG
ttgtaagggagaagcagata

SEQ ID NO: 318264 - DNA, 20 bp, Artificial Sequence
  Description of Artificial Sequence: Synthetic oligonucleotide
  Target: LAMA2; (+) strand; PAM type: YTN; PAM sequence: TTG
taagggagaagcagatataa

SEQ ID NO: 318265 - DNA, 20 bp, Artificial Sequence
  Description of Artificial Sequence: Synthetic oligonucleotide
  Target: LAMA2; (+) strand; PAM type: YTN; PAM sequence: TTT
ccataaagctttatttacag

SEQ ID NO: 318266 - DNA, 20 bp, Artificial Sequence
  Description of Artificial Sequence: Synthetic oligonucleotide
  Target: LAMA2; (+) strand; PAM type: YTN; PAM sequence: TTC
cataaagctttatttacaga

SEQ ID NO: 318267 - DNA, 20 bp, Artificial Sequence
  Description of Artificial Sequence: Synthetic oligonucleotide
  Target: LAMA2; (+) strand; PAM type: YTN; PAM sequence: CTT
tatttacagaaacaagccat

SEQ ID NO: 318268 - DNA, 20 bp, Artificial Sequence
  Description of Artificial Sequence: Synthetic oligonucleotide
  Target: LAMA2; (+) strand; PAM type: YTN; PAM sequence: TTT
atttacagaaacaagccatg

SEQ ID NO: 318269 - DNA, 20 bp, Artificial Sequence
  Description of Artificial Sequence: Synthetic oligonucleotide
  Target: LAMA2; (+) strand; PAM type: YTN; PAM sequence: TTA
tttacagaaacaagccatga

SEQ ID NO: 318270 - DNA, 20 bp, Artificial Sequence
  Description of Artificial Sequence: Synthetic oligonucleotide
  Target: LAMA2; (+) strand; PAM type: YTN; PAM sequence: TTT
acagaaacaagccatgacag

SEQ ID NO: 318271 - DNA, 20 bp, Artificial Sequence
  Description of Artificial Sequence: Synthetic oligonucleotide
  Target: LAMA2; (+) strand; PAM type: YTN; PAM sequence: TTA
cagaaacaagccatgacagt

SEQ ID NO: 318272 - DNA, 20 bp, Artificial Sequence
  Description of Artificial Sequence: Synthetic oligonucleotide
  Target: LAMA2; (+) strand; PAM type: YTN; PAM sequence: CTG
gcatatctcctgatcagata

SEQ ID NO: 318273 - DNA, 20 bp, Artificial Sequence
  Description of Artificial Sequence: Synthetic oligonucleotide
  Target: LAMA2; (+) strand; PAM type: YTN; PAM sequence: CTC
ctgatcagataaatcctcat

SEQ ID NO: 318274 - DNA, 20 bp, Artificial Sequence
  Description of Artificial Sequence: Synthetic oligonucleotide
  Target: LAMA2; (+) strand; PAM type: YTN; PAM sequence: CTG
atcagataaatcctcatgtt

SEQ ID NO: 318275 - DNA, 20 bp, Artificial Sequence
  Description of Artificial Sequence: Synthetic oligonucleotide
  Target: LAMA2; (+) strand; PAM type: YTN; PAM sequence: CTC
atgttgctgccttatttccc

SEQ ID NO: 318276 - DNA, 20 bp, Artificial Sequence
  Description of Artificial Sequence: Synthetic oligonucleotide
  Target: LAMA2; (+) strand; PAM type: YTN; PAM sequence: TTG
ctgccttatttcccaatgtc

SEQ ID NO: 318277 - DNA, 20 bp, Artificial Sequence
  Description of Artificial Sequence: Synthetic oligonucleotide
  Target: LAMA2; (+) strand; PAM type: YTN; PAM sequence: CTG
ccttatttcccaatgtctcc

SEQ ID NO: 318278 - DNA, 20 bp, Artificial Sequence
  Description of Artificial Sequence: Synthetic oligonucleotide
  Target: LAMA2; (+) strand; PAM type: YTN; PAM sequence: CTT
atttcccaatgtctccgttt

SEQ ID NO: 318279 - DNA, 20 bp, Artificial Sequence
  Description of Artificial Sequence: Synthetic oligonucleotide
  Target: LAMA2; (+) strand; PAM type: YTN; PAM sequence: TTA
tttcccaatgtctccgtttg

SEQ ID NO: 318280 - DNA, 20 bp, Artificial Sequence
  Description of Artificial Sequence: Synthetic oligonucleotide
  Target: LAMA2; (+) strand; PAM type: YTN; PAM sequence: TTT
cccaatgtctccgtttgaac

SEQ ID NO: 318281 - DNA, 20 bp, Artificial Sequence
  Description of Artificial Sequence: Synthetic oligonucleotide
  Target: LAMA2; (+) strand; PAM type: YTN; PAM sequence: TTC
ccaatgtctccgtttgaact

SEQ ID NO: 318282 - DNA, 20 bp, Artificial Sequence
  Description of Artificial Sequence: Synthetic oligonucleotide
  Target: LAMA2; (+) strand; PAM type: YTN; PAM sequence: CTC
cgtttgaactagtgcaggga

SEQ ID NO: 318283 - DNA, 20 bp, Artificial Sequence
  Description of Artificial Sequence: Synthetic oligonucleotide
  Target: LAMA2; (+) strand; PAM type: YTN; PAM sequence: TTT
gaactagtgcagggatattt

SEQ ID NO: 318284 - DNA, 20 bp, Artificial Sequence
  Description of Artificial Sequence: Synthetic oligonucleotide
  Target: LAMA2; (+) strand; PAM type: YTN; PAM sequence: TTG
aactagtgcagggatatttt

SEQ ID NO: 318285 - DNA, 20 bp, Artificial Sequence
  Description of Artificial Sequence: Synthetic oligonucleotide
  Target: LAMA2; (+) strand; PAM type: YTN; PAM sequence: CTA
gtgcagggatattttggaga

SEQ ID NO: 318286 - DNA, 20 bp, Artificial Sequence
  Description of Artificial Sequence: Synthetic oligonucleotide
  Target: LAMA2; (+) strand; PAM type: YTN; PAM sequence: TTT
tggagactttagcaatgcct

SEQ ID NO: 318287 - DNA, 20 bp, Artificial Sequence
  Description of Artificial Sequence: Synthetic oligonucleotide
  Target: LAMA2; (+) strand; PAM type: YTN; PAM sequence: TTT
ggagactttagcaatgccta

SEQ ID NO: 318288 - DNA, 20 bp, Artificial Sequence
  Description of Artificial Sequence: Synthetic oligonucleotide
  Target: LAMA2; (+) strand; PAM type: YTN; PAM sequence: TTG
gagactttagcaatgcctag

SEQ ID NO: 318289 - DNA, 20 bp, Artificial Sequence
  Description of Artificial Sequence: Synthetic oligonucleotide
  Target: LAMA2; (+) strand; PAM type: YTN; PAM sequence: CTT
tagcaatgcctagtcagcaa

SEQ ID NO: 318290 - DNA, 20 bp, Artificial Sequence
  Description of Artificial Sequence: Synthetic oligonucleotide
  Target: LAMA2; (+) strand; PAM type: YTN; PAM sequence: TTT
agcaatgcctagtcagcaag

SEQ ID NO: 318291 - DNA, 20 bp, Artificial Sequence
  Description of Artificial Sequence: Synthetic oligonucleotide
  Target: LAMA2; (+) strand; PAM type: YTN; PAM sequence: TTA
gcaatgcctagtcagcaagc

SEQ ID NO: 318292 - DNA, 20 bp, Artificial Sequence
  Description of Artificial Sequence: Synthetic oligonucleotide
  Target: LAMA2; (+) strand; PAM type: YTN; PAM sequence: CTA
gtcagcaagcatcagtgtac

SEQ ID NO: 318293 - DNA, 20 bp, Artificial Sequence
  Description of Artificial Sequence: Synthetic oligonucleotide
  Target: LAMA2; (+) strand; PAM type: YTN; PAM sequence: CTT
tagacattgaaaatcgggtt

SEQ ID NO: 318294 - DNA, 20 bp, Artificial Sequence
  Description of Artificial Sequence: Synthetic oligonucleotide
  Target: LAMA2; (+) strand; PAM type: YTN; PAM sequence: TTT
agacattgaaaatcgggtta

SEQ ID NO: 318295 - DNA, 20 bp, Artificial Sequence
  Description of Artificial Sequence: Synthetic oligonucleotide
  Target: LAMA2; (+) strand; PAM type: YTN; PAM sequence: TTA
gacattgaaaatcgggttag

SEQ ID NO: 318296 - DNA, 20 bp, Artificial Sequence
  Description of Artificial Sequence: Synthetic oligonucleotide
  Target: LAMA2; (+) strand; PAM type: YTN; PAM sequence: TTG
aaaatcgggttaggaaaaaa

SEQ ID NO: 318297 - DNA, 20 bp, Artificial Sequence
  Description of Artificial Sequence: Synthetic oligonucleotide
  Target: LAMA2; (+) strand; PAM type: YTN; PAM sequence: TTA
ggaaaaaaaaaatatggact

SEQ ID NO: 318298 - DNA, 20 bp, Artificial Sequence
  Description of Artificial Sequence: Synthetic oligonucleotide
  Target: LAMA2; (+) strand; PAM type: YTN; PAM sequence: CTG
ctttgattttcctttgaagt

SEQ ID NO: 318299 - DNA, 20 bp, Artificial Sequence
  Description of Artificial Sequence: Synthetic oligonucleotide
  Target: LAMA2; (+) strand; PAM type: YTN; PAM sequence: CTT
tgattttcctttgaagtaat

SEQ ID NO: 318300 - DNA, 20 bp, Artificial Sequence
  Description of Artificial Sequence: Synthetic oligonucleotide
  Target: LAMA2; (+) strand; PAM type: YTN; PAM sequence: TTT
gattttcctttgaagtaatg

SEQ ID NO: 318301 - DNA, 20 bp, Artificial Sequence
  Description of Artificial Sequence: Synthetic oligonucleotide
  Target: LAMA2; (+) strand; PAM type: YTN; PAM sequence: TTG
attttcctttgaagtaatgt

SEQ ID NO: 318302 - DNA, 20 bp, Artificial Sequence
  Description of Artificial Sequence: Synthetic oligonucleotide
  Target: LAMA2; (+) strand; PAM type: YTN; PAM sequence: TTT
tcctttgaagtaatgtcaca

SEQ ID NO: 318303 - DNA, 20 bp, Artificial Sequence
  Description of Artificial Sequence: Synthetic oligonucleotide
  Target: LAMA2; (+) strand; PAM type: YTN; PAM sequence: TTT
cctttgaagtaatgtcacaa

SEQ ID NO: 318304 - DNA, 20 bp, Artificial Sequence
  Description of Artificial Sequence: Synthetic oligonucleotide
  Target: LAMA2; (+) strand; PAM type: YTN; PAM sequence: TTC
ctttgaagtaatgtcacaag

SEQ ID NO: 318305 - DNA, 20 bp, Artificial Sequence
  Description of Artificial Sequence: Synthetic oligonucleotide
  Target: LAMA2; (+) strand; PAM type: YTN; PAM sequence: CTT
tgaagtaatgtcacaagaag

SEQ ID NO: 318306 - DNA, 20 bp, Artificial Sequence
  Description of Artificial Sequence: Synthetic oligonucleotide
  Target: LAMA2; (+) strand; PAM type: YTN; PAM sequence: TTT
gaagtaatgtcacaagaaga

SEQ ID NO: 318307 - DNA, 20 bp, Artificial Sequence
  Description of Artificial Sequence: Synthetic oligonucleotide
  Target: LAMA2; (+) strand; PAM type: YTN; PAM sequence: TTG
aagtaatgtcacaagaagaa

SEQ ID NO: 318308 - DNA, 20 bp, Artificial Sequence
  Description of Artificial Sequence: Synthetic oligonucleotide
  Target: LAMA2; (+) strand; PAM type: YTN; PAM sequence: CTG
gttcatttgccaaggaagga

SEQ ID NO: 318309 - DNA, 20 bp, Artificial Sequence
  Description of Artificial Sequence: Synthetic oligonucleotide
  Target: LAMA2; (+) strand; PAM type: YTN; PAM sequence: TTC
atttgccaaggaaggaagag

SEQ ID NO: 318310 - DNA, 20 bp, Artificial Sequence
  Description of Artificial Sequence: Synthetic oligonucleotide
  Target: LAMA2; (+) strand; PAM type: YTN; PAM sequence: TTT
gccaaggaaggaagagcatg

SEQ ID NO: 318311 - DNA, 20 bp, Artificial Sequence
  Description of Artificial Sequence: Synthetic oligonucleotide
  Target: LAMA2; (+) strand; PAM type: YTN; PAM sequence: TTG
ccaaggaaggaagagcatga

SEQ ID NO: 318312 - DNA, 20 bp, Artificial Sequence
  Description of Artificial Sequence: Synthetic oligonucleotide
  Target: LAMA2; (+) strand; PAM type: YTN; PAM sequence: CTA
ggtactagaggaaaggagtg

SEQ ID NO: 318313 - DNA, 20 bp, Artificial Sequence
  Description of Artificial Sequence: Synthetic oligonucleotide
  Target: LAMA2; (+) strand; PAM type: YTN; PAM sequence: CTA
gaggaaaggagtgctaagaa

SEQ ID NO: 318314 - DNA, 20 bp, Artificial Sequence
  Description of Artificial Sequence: Synthetic oligonucleotide
  Target: LAMA2; (+) strand; PAM type: YTN; PAM sequence: CTA
agaaaatgttcaaaagggat

SEQ ID NO: 318315 - DNA, 20 bp, Artificial Sequence
  Description of Artificial Sequence: Synthetic oligonucleotide
  Target: LAMA2; (+) strand; PAM type: YTN; PAM sequence: TTC
aaaagggatcttgaaaagca

SEQ ID NO: 318316 - DNA, 20 bp, Artificial Sequence
  Description of Artificial Sequence: Synthetic oligonucleotide
  Target: LAMA2; (+) strand; PAM type: YTN; PAM sequence: CTT
gaaaagcaaagatcacttgg

SEQ ID NO: 318317 - DNA, 20 bp, Artificial Sequence
  Description of Artificial Sequence: Synthetic oligonucleotide
  Target: LAMA2; (+) strand; PAM type: YTN; PAM sequence: TTG
aaaagcaaagatcacttggt

SEQ ID NO: 318318 - DNA, 20 bp, Artificial Sequence
  Description of Artificial Sequence: Synthetic oligonucleotide
  Target: LAMA2; (+) strand; PAM type: YTN; PAM sequence: CTT
ggtagatgaacttgttcaaa

SEQ ID NO: 318319 - DNA, 20 bp, Artificial Sequence
  Description of Artificial Sequence: Synthetic oligonucleotide
  Target: LAMA2; (+) strand; PAM type: YTN; PAM sequence: TTG
gtagatgaacttgttcaaag

SEQ ID NO: 318320 - DNA, 20 bp, Artificial Sequence
  Description of Artificial Sequence: Synthetic oligonucleotide
  Target: LAMA2; (+) strand; PAM type: YTN; PAM sequence: CTT
gttcaaagtgttcgctaact

SEQ ID NO: 318321 - DNA, 20 bp, Artificial Sequence
  Description of Artificial Sequence: Synthetic oligonucleotide
  Target: LAMA2; (+) strand; PAM type: YTN; PAM sequence: TTG
ttcaaagtgttcgctaactc

SEQ ID NO: 318322 - DNA, 20 bp, Artificial Sequence
  Description of Artificial Sequence: Synthetic oligonucleotide
  Target: LAMA2; (+) strand; PAM type: YTN; PAM sequence: TTC
aaagtgttcgctaactcacc

SEQ ID NO: 318323 - DNA, 20 bp, Artificial Sequence
  Description of Artificial Sequence: Synthetic oligonucleotide
  Target: LAMA2; (+) strand; PAM type: YTN; PAM sequence: TTC
gctaactcacctcttgcaag

SEQ ID NO: 318324 - DNA, 20 bp, Artificial Sequence
  Description of Artificial Sequence: Synthetic oligonucleotide
  Target: LAMA2; (+) strand; PAM type: YTN; PAM sequence: CTA
actcacctcttgcaagaaca

SEQ ID NO: 318325 - DNA, 20 bp, Artificial Sequence
  Description of Artificial Sequence: Synthetic oligonucleotide
  Target: LAMA2; (+) strand; PAM type: YTN; PAM sequence: CTC
acctcttgcaagaacaaact

SEQ ID NO: 318326 - DNA, 20 bp, Artificial Sequence
  Description of Artificial Sequence: Synthetic oligonucleotide
  Target: LAMA2; (+) strand; PAM type: YTN; PAM sequence: CTC
ttgcaagaacaaactatctt

SEQ ID NO: 318327 - DNA, 20 bp, Artificial Sequence
  Description of Artificial Sequence: Synthetic oligonucleotide
  Target: LAMA2; (+) strand; PAM type: YTN; PAM sequence: CTT
gcaagaacaaactatcttgc

SEQ ID NO: 318328 - DNA, 20 bp, Artificial Sequence
  Description of Artificial Sequence: Synthetic oligonucleotide
  Target: LAMA2; (+) strand; PAM type: YTN; PAM sequence: TTG
caagaacaaactatcttgca

SEQ ID NO: 318329 - DNA, 20 bp, Artificial Sequence
  Description of Artificial Sequence: Synthetic oligonucleotide
  Target: LAMA2; (+) strand; PAM type: YTN; PAM sequence: CTA
tcttgcaaggctctactgca

SEQ ID NO: 318330 - DNA, 20 bp, Artificial Sequence
  Description of Artificial Sequence: Synthetic oligonucleotide
  Target: LAMA2; (+) strand; PAM type: YTN; PAM sequence: CTT
gcaaggctctactgcaacat

SEQ ID NO: 318331 - DNA, 20 bp, Artificial Sequence
  Description of Artificial Sequence: Synthetic oligonucleotide
  Target: LAMA2; (+) strand; PAM type: YTN; PAM sequence: TTG
caaggctctactgcaacatg

SEQ ID NO: 318332 - DNA, 20 bp, Artificial Sequence
  Description of Artificial Sequence: Synthetic oligonucleotide
  Target: LAMA2; (+) strand; PAM type: YTN; PAM sequence: CTC
tactgcaacatgtctgatac

SEQ ID NO: 318333 - DNA, 20 bp, Artificial Sequence
  Description of Artificial Sequence: Synthetic oligonucleotide
  Target: LAMA2; (+) strand; PAM type: YTN; PAM sequence: CTA
ctgcaacatgtctgatacac

SEQ ID NO: 318334 - DNA, 20 bp, Artificial Sequence
  Description of Artificial Sequence: Synthetic oligonucleotide
  Target: LAMA2; (+) strand; PAM type: YTN; PAM sequence: CTG
caacatgtctgatacacagc

SEQ ID NO: 318335 - DNA, 20 bp, Artificial Sequence
  Description of Artificial Sequence: Synthetic oligonucleotide
  Target: LAMA2; (+) strand; PAM type: YTN; PAM sequence: CTG
atacacagcacctgcagtca

SEQ ID NO: 318336 - DNA, 20 bp, Artificial Sequence
  Description of Artificial Sequence: Synthetic oligonucleotide
  Target: LAMA2; (+) strand; PAM type: YTN; PAM sequence: CTG
cagtcaacagactctgtagt

SEQ ID NO: 318337 - DNA, 20 bp, Artificial Sequence
  Description of Artificial Sequence: Synthetic oligonucleotide
  Target: LAMA2; (+) strand; PAM type: YTN; PAM sequence: CTC
tgtagttgcaaagtattgag

SEQ ID NO: 318338 - DNA, 20 bp, Artificial Sequence
  Description of Artificial Sequence: Synthetic oligonucleotide
  Target: LAMA2; (+) strand; PAM type: YTN; PAM sequence: CTG
tagttgcaaagtattgagtt

SEQ ID NO: 318339 - DNA, 20 bp, Artificial Sequence
  Description of Artificial Sequence: Synthetic oligonucleotide
  Target: LAMA2; (+) strand; PAM type: YTN; PAM sequence: TTG
caaagtattgagttttgtgc

SEQ ID NO: 318340 - DNA, 20 bp, Artificial Sequence
  Description of Artificial Sequence: Synthetic oligonucleotide
  Target: LAMA2; (+) strand; PAM type: YTN; PAM sequence: TTG
agttttgtgctcaagctata

SEQ ID NO: 318341 - DNA, 20 bp, Artificial Sequence
  Description of Artificial Sequence: Synthetic oligonucleotide
  Target: LAMA2; (+) strand; PAM type: YTN; PAM sequence: TTT
tgtgctcaagctatagaagt

SEQ ID NO: 318342 - DNA, 20 bp, Artificial Sequence
  Description of Artificial Sequence: Synthetic oligonucleotide
  Target: LAMA2; (+) strand; PAM type: YTN; PAM sequence: TTT
gtgctcaagctatagaagtt

SEQ ID NO: 318343 - DNA, 20 bp, Artificial Sequence
  Description of Artificial Sequence: Synthetic oligonucleotide
  Target: LAMA2; (+) strand; PAM type: YTN; PAM sequence: TTG
tgctcaagctatagaagtta

SEQ ID NO: 318344 - DNA, 20 bp, Artificial Sequence
  Description of Artificial Sequence: Synthetic oligonucleotide
  Target: LAMA2; (+) strand; PAM type: YTN; PAM sequence: CTC
aagctatagaagttaatgga

SEQ ID NO: 318345 - DNA, 20 bp, Artificial Sequence
  Description of Artificial Sequence: Synthetic oligonucleotide
  Target: LAMA2; (+) strand; PAM type: YTN; PAM sequence: CTA
tagaagttaatggactgtca

SEQ ID NO: 318346 - DNA, 20 bp, Artificial Sequence
  Description of Artificial Sequence: Synthetic oligonucleotide
  Target: LAMA2; (+) strand; PAM type: YTN; PAM sequence: TTA
atggactgtcataacattgt

SEQ ID NO: 318347 - DNA, 20 bp, Artificial Sequence
  Description of Artificial Sequence: Synthetic oligonucleotide
  Target: LAMA2; (+) strand; PAM type: YTN; PAM sequence: CTG
tcataacattgttcagatga

SEQ ID NO: 318348 - DNA, 20 bp, Artificial Sequence
  Description of Artificial Sequence: Synthetic oligonucleotide
  Target: LAMA2; (+) strand; PAM type: YTN; PAM sequence: TTG
ttcagatgaaacccagcaaa

SEQ ID NO: 318349 - DNA, 20 bp, Artificial Sequence
  Description of Artificial Sequence: Synthetic oligonucleotide
  Target: LAMA2; (+) strand; PAM type: YTN; PAM sequence: TTC
agatgaaacccagcaaagct

SEQ ID NO: 318350 - DNA, 20 bp, Artificial Sequence
  Description of Artificial Sequence: Synthetic oligonucleotide
  Target: LAMA2; (+) strand; PAM type: YTN; PAM sequence: CTT
aacagactaaggtggatttt

SEQ ID NO: 318351 - DNA, 20 bp, Artificial Sequence
  Description of Artificial Sequence: Synthetic oligonucleotide
  Target: LAMA2; (+) strand; PAM type: YTN; PAM sequence: TTA
acagactaaggtggattttg

SEQ ID NO: 318352 - DNA, 20 bp, Artificial Sequence
  Description of Artificial Sequence: Synthetic oligonucleotide
  Target: LAMA2; (+) strand; PAM type: YTN; PAM sequence: CTA
aggtggattttgcctcccct

SEQ ID NO: 318353 - DNA, 20 bp, Artificial Sequence
  Description of Artificial Sequence: Synthetic oligonucleotide
  Target: LAMA2; (+) strand; PAM type: YTN; PAM sequence: TTT
tgcctccccttttaatccag

SEQ ID NO: 318354 - DNA, 20 bp, Artificial Sequence
  Description of Artificial Sequence: Synthetic oligonucleotide
  Target: LAMA2; (+) strand; PAM type: YTN; PAM sequence: TTT
gcctccccttttaatccagt

SEQ ID NO: 318355 - DNA, 20 bp, Artificial Sequence
  Description of Artificial Sequence: Synthetic oligonucleotide
  Target: LAMA2; (+) strand; PAM type: YTN; PAM sequence: TTG
cctccccttttaatccagtg

SEQ ID NO: 318356 - DNA, 20 bp, Artificial Sequence
  Description of Artificial Sequence: Synthetic oligonucleotide
  Target: LAMA2; (+) strand; PAM type: YTN; PAM sequence: CTC
cccttttaatccagtgctaa

SEQ ID NO: 318357 - DNA, 20 bp, Artificial Sequence
  Description of Artificial Sequence: Synthetic oligonucleotide
  Target: LAMA2; (+) strand; PAM type: YTN; PAM sequence: CTT
ttaatccagtgctaatttct

SEQ ID NO: 318358 - DNA, 20 bp, Artificial Sequence
  Description of Artificial Sequence: Synthetic oligonucleotide
  Target: LAMA2; (+) strand; PAM type: YTN; PAM sequence: TTT
taatccagtgctaatttctt

SEQ ID NO: 318359 - DNA, 20 bp, Artificial Sequence
  Description of Artificial Sequence: Synthetic oligonucleotide
  Target: LAMA2; (+) strand; PAM type: YTN; PAM sequence: TTT
aatccagtgctaatttcttt

SEQ ID NO: 318360 - DNA, 20 bp, Artificial Sequence
  Description of Artificial Sequence: Synthetic oligonucleotide
  Target: LAMA2; (+) strand; PAM type: YTN; PAM sequence: TTA
atccagtgctaatttctttg

SEQ ID NO: 318361 - DNA, 20 bp, Artificial Sequence
  Description of Artificial Sequence: Synthetic oligonucleotide
  Target: LAMA2; (+) strand; PAM type: YTN; PAM sequence: CTA
atttctttgagtaatctcag

SEQ ID NO: 318362 - DNA, 20 bp, Artificial Sequence
  Description of Artificial Sequence: Synthetic oligonucleotide
  Target: LAMA2; (+) strand; PAM type: YTN; PAM sequence: TTT
ctttgagtaatctcagaaaa

SEQ ID NO: 318363 - DNA, 20 bp, Artificial Sequence
  Description of Artificial Sequence: Synthetic oligonucleotide
  Target: LAMA2; (+) strand; PAM type: YTN; PAM sequence: TTC
tttgagtaatctcagaaaac

SEQ ID NO: 318364 - DNA, 20 bp, Artificial Sequence
  Description of Artificial Sequence: Synthetic oligonucleotide
  Target: LAMA2; (+) strand; PAM type: YTN; PAM sequence: CTT
tgagtaatctcagaaaactt

SEQ ID NO: 318365 - DNA, 20 bp, Artificial Sequence
  Description of Artificial Sequence: Synthetic oligonucleotide
  Target: LAMA2; (+) strand; PAM type: YTN; PAM sequence: TTT
gagtaatctcagaaaacttt

SEQ ID NO: 318366 - DNA, 20 bp, Artificial Sequence
  Description of Artificial Sequence: Synthetic oligonucleotide
  Target: LAMA2; (+) strand; PAM type: YTN; PAM sequence: TTG
agtaatctcagaaaactttt

SEQ ID NO: 318367 - DNA, 20 bp, Artificial Sequence
  Description of Artificial Sequence: Synthetic oligonucleotide
  Target: LAMA2; (+) strand; PAM type: YTN; PAM sequence: CTC
agaaaacttttttatgctaa

SEQ ID NO: 318368 - DNA, 20 bp, Artificial Sequence
  Description of Artificial Sequence: Synthetic oligonucleotide
  Target: LAMA2; (+) strand; PAM type: YTN; PAM sequence: CTT
ttttatgctaaagtgattca

SEQ ID NO: 318369 - DNA, 20 bp, Artificial Sequence
  Description of Artificial Sequence: Synthetic oligonucleotide
  Target: LAMA2; (+) strand; PAM type: YTN; PAM sequence: TTT
tttatgctaaagtgattcat

SEQ ID NO: 318370 - DNA, 20 bp, Artificial Sequence
  Description of Artificial Sequence: Synthetic oligonucleotide
  Target: LAMA2; (+) strand; PAM type: YTN; PAM sequence: TTT
ttatgctaaagtgattcatt

SEQ ID NO: 318371 - DNA, 20 bp, Artificial Sequence
  Description of Artificial Sequence: Synthetic oligonucleotide
  Target: LAMA2; (+) strand; PAM type: YTN; PAM sequence: TTT
tatgctaaagtgattcattt

SEQ ID NO: 318372 - DNA, 20 bp, Artificial Sequence
  Description of Artificial Sequence: Synthetic oligonucleotide
  Target: LAMA2; (+) strand; PAM type: YTN; PAM sequence: TTT
atgctaaagtgattcattta

SEQ ID NO: 318373 - DNA, 20 bp, Artificial Sequence
  Description of Artificial Sequence: Synthetic oligonucleotide
  Target: LAMA2; (+) strand; PAM type: YTN; PAM sequence: TTA
tgctaaagtgattcatttat

SEQ ID NO: 318374 - DNA, 20 bp, Artificial Sequence
  Description of Artificial Sequence: Synthetic oligonucleotide
  Target: LAMA2; (+) strand; PAM type: YTN; PAM sequence: CTA
aagtgattcatttataaagt

SEQ ID NO: 318375 - DNA, 20 bp, Artificial Sequence
  Description of Artificial Sequence: Synthetic oligonucleotide
  Target: LAMA2; (+) strand; PAM type: YTN; PAM sequence: TTC
atttataaagttcttgtcaa

SEQ ID NO: 318376 - DNA, 20 bp, Artificial Sequence
  Description of Artificial Sequence: Synthetic oligonucleotide
  Target: LAMA2; (+) strand; PAM type: YTN; PAM sequence: TTT
ataaagttcttgtcaaaaca

SEQ ID NO: 318377 - DNA, 20 bp, Artificial Sequence
  Description of Artificial Sequence: Synthetic oligonucleotide
  Target: LAMA2; (+) strand; PAM type: YTN; PAM sequence: TTA
taaagttcttgtcaaaacaa

SEQ ID NO: 318378 - DNA, 20 bp, Artificial Sequence
  Description of Artificial Sequence: Synthetic oligonucleotide
  Target: LAMA2; (+) strand; PAM type: YTN; PAM sequence: TTC
ttgtcaaaacaaccagtgta

SEQ ID NO: 318379 - DNA, 20 bp, Artificial Sequence
  Description of Artificial Sequence: Synthetic oligonucleotide
  Target: LAMA2; (+) strand; PAM type: YTN; PAM sequence: CTT
gtcaaaacaaccagtgtatt

SEQ ID NO: 318380 - DNA, 20 bp, Artificial Sequence
  Description of Artificial Sequence: Synthetic oligonucleotide
  Target: LAMA2; (+) strand; PAM type: YTN; PAM sequence: TTG
tcaaaacaaccagtgtattt

SEQ ID NO: 318381 - DNA, 20 bp, Artificial Sequence
  Description of Artificial Sequence: Synthetic oligonucleotide
  Target: LAMA2; (+) strand; PAM type: YTN; PAM sequence: TTT
aaaatattttggaattataa

SEQ ID NO: 318382 - DNA, 20 bp, Artificial Sequence
  Description of Artificial Sequence: Synthetic oligonucleotide
  Target: LAMA2; (+) strand; PAM type: YTN; PAM sequence: TTA
aaatattttggaattataat

SEQ ID NO: 318383 - DNA, 20 bp, Artificial Sequence
  Description of Artificial Sequence: Synthetic oligonucleotide
  Target: LAMA2; (+) strand; PAM type: YTN; PAM sequence: TTT
tggaattataatacaggaca

SEQ ID NO: 318384 - DNA, 20 bp, Artificial Sequence
  Description of Artificial Sequence: Synthetic oligonucleotide
  Target: LAMA2; (+) strand; PAM type: YTN; PAM sequence: TTT
ggaattataatacaggacac

SEQ ID NO: 318385 - DNA, 20 bp, Artificial Sequence
  Description of Artificial Sequence: Synthetic oligonucleotide
  Target: LAMA2; (+) strand; PAM type: YTN; PAM sequence: TTG
gaattataatacaggacaca

SEQ ID NO: 318386 - DNA, 20 bp, Artificial Sequence
  Description of Artificial Sequence: Synthetic oligonucleotide
  Target: LAMA2; (+) strand; PAM type: YTN; PAM sequence: TTA
taatacaggacacaaatgaa

SEQ ID NO: 318387 - DNA, 20 bp, Artificial Sequence
  Description of Artificial Sequence: Synthetic oligonucleotide
  Target: LAMA2; (+) strand; PAM type: YTN; PAM sequence: TTT
atactaggcagatgggctag

SEQ ID NO: 318388 - DNA, 20 bp, Artificial Sequence
  Description of Artificial Sequence: Synthetic oligonucleotide
  Target: LAMA2; (+) strand; PAM type: YTN; PAM sequence: TTA
tactaggcagatgggctagg

SEQ ID NO: 318389 - DNA, 20 bp, Artificial Sequence
  Description of Artificial Sequence: Synthetic oligonucleotide
  Target: LAMA2; (+) strand; PAM type: YTN; PAM sequence: CTA
ggcagatgggctaggttatg

SEQ ID NO: 318390 - DNA, 20 bp, Artificial Sequence
  Description of Artificial Sequence: Synthetic oligonucleotide
  Target: LAMA2; (+) strand; PAM type: YTN; PAM sequence: CTA
ggttatgctgcaataatgaa

SEQ ID NO: 318391 - DNA, 20 bp, Artificial Sequence
  Description of Artificial Sequence: Synthetic oligonucleotide
  Target: LAMA2; (+) strand; PAM type: YTN; PAM sequence: TTA
tgctgcaataatgaacaacc

SEQ ID NO: 318392 - DNA, 20 bp, Artificial Sequence
  Description of Artificial Sequence: Synthetic oligonucleotide
  Target: LAMA2; (+) strand; PAM type: YTN; PAM sequence: CTG
caataatgaacaaccccaaa

SEQ ID NO: 318393 - DNA, 20 bp, Artificial Sequence
  Description of Artificial Sequence: Synthetic oligonucleotide
  Target: LAMA2; (+) strand; PAM type: YTN; PAM sequence: CTT
agtggttgcaaacaacaaac

SEQ ID NO: 318394 - DNA, 20 bp, Artificial Sequence
  Description of Artificial Sequence: Synthetic oligonucleotide
  Target: LAMA2; (+) strand; PAM type: YTN; PAM sequence: TTA
gtggttgcaaacaacaaact

SEQ ID NO: 318395 - DNA, 20 bp, Artificial Sequence
  Description of Artificial Sequence: Synthetic oligonucleotide
  Target: LAMA2; (+) strand; PAM type: YTN; PAM sequence: TTG
caaacaacaaacttttttct

SEQ ID NO: 318396 - DNA, 20 bp, Artificial Sequence
  Description of Artificial Sequence: Synthetic oligonucleotide
  Target: LAMA2; (+) strand; PAM type: YTN; PAM sequence: CTT
ttttctcccactcacaatac

SEQ ID NO: 318397 - DNA, 20 bp, Artificial Sequence
  Description of Artificial Sequence: Synthetic oligonucleotide
  Target: LAMA2; (+) strand; PAM type: YTN; PAM sequence: TTT
tttctcccactcacaataca

SEQ ID NO: 318398 - DNA, 20 bp, Artificial Sequence
  Description of Artificial Sequence: Synthetic oligonucleotide
  Target: LAMA2; (+) strand; PAM type: YTN; PAM sequence: TTT
ttctcccactcacaatacag

SEQ ID NO: 318399 - DNA, 20 bp, Artificial Sequence
  Description of Artificial Sequence: Synthetic oligonucleotide
  Target: LAMA2; (+) strand; PAM type: YTN; PAM sequence: TTT
tctcccactcacaatacagg

SEQ ID NO: 318400 - DNA, 20 bp, Artificial Sequence
  Description of Artificial Sequence: Synthetic oligonucleotide
  Target: LAMA2; (+) strand; PAM type: YTN; PAM sequence: TTT
ctcccactcacaatacaggt

SEQ ID NO: 318401 - DNA, 20 bp, Artificial Sequence
  Description of Artificial Sequence: Synthetic oligonucleotide
  Target: LAMA2; (+) strand; PAM type: YTN; PAM sequence: TTC
tcccactcacaatacaggtt

SEQ ID NO: 318402 - DNA, 20 bp, Artificial Sequence
  Description of Artificial Sequence: Synthetic oligonucleotide
  Target: LAMA2; (+) strand; PAM type: YTN; PAM sequence: CTC
ccactcacaatacaggttca

SEQ ID NO: 318403 - DNA, 20 bp, Artificial Sequence
  Description of Artificial Sequence: Synthetic oligonucleotide
  Target: LAMA2; (+) strand; PAM type: YTN; PAM sequence: CTC
acaatacaggttcatcatag

SEQ ID NO: 318404 - DNA, 20 bp, Artificial Sequence
  Description of Artificial Sequence: Synthetic oligonucleotide
  Target: LAMA2; (+) strand; PAM type: YTN; PAM sequence: TTC
atcatagtcagcagggggct

SEQ ID NO: 318405 - DNA, 20 bp, Artificial Sequence
  Description of Artificial Sequence: Synthetic oligonucleotide
  Target: LAMA2; (+) strand; PAM type: YTN; PAM sequence: CTC
caggaatcataattgctgat

SEQ ID NO: 318406 - DNA, 20 bp, Artificial Sequence
  Description of Artificial Sequence: Synthetic oligonucleotide
  Target: LAMA2; (+) strand; PAM type: YTN; PAM sequence: TTG
ctgatatagccacctgacag

SEQ ID NO: 318407 - DNA, 20 bp, Artificial Sequence
  Description of Artificial Sequence: Synthetic oligonucleotide
  Target: LAMA2; (+) strand; PAM type: YTN; PAM sequence: CTG
atatagccacctgacagatc

SEQ ID NO: 318408 - DNA, 20 bp, Artificial Sequence
  Description of Artificial Sequence: Synthetic oligonucleotide
  Target: LAMA2; (+) strand; PAM type: YTN; PAM sequence: CTG
acagatcagtaacctcagtg

SEQ ID NO: 318409 - DNA, 20 bp, Artificial Sequence
  Description of Artificial Sequence: Synthetic oligonucleotide
  Target: LAMA2; (+) strand; PAM type: YTN; PAM sequence: CTC
agtgtagctggtggccatga

SEQ ID NO: 318410 - DNA, 20 bp, Artificial Sequence
  Description of Artificial Sequence: Synthetic oligonucleotide
  Target: LAMA2; (+) strand; PAM type: YTN; PAM sequence: CTG
gtggccatgagaaaaggcga

SEQ ID NO: 318411 - DNA, 20 bp, Artificial Sequence
  Description of Artificial Sequence: Synthetic oligonucleotide
  Target: LAMA2; (+) strand; PAM type: YTN; PAM sequence: CTT
tcatatcaaatattagaaca

SEQ ID NO: 318412 - DNA, 20 bp, Artificial Sequence
  Description of Artificial Sequence: Synthetic oligonucleotide
  Target: LAMA2; (+) strand; PAM type: YTN; PAM sequence: TTT
catatcaaatattagaacaa

SEQ ID NO: 318413 - DNA, 20 bp, Artificial Sequence
  Description of Artificial Sequence: Synthetic oligonucleotide
  Target: LAMA2; (+) strand; PAM type: YTN; PAM sequence: TTC
atatcaaatattagaacaat

SEQ ID NO: 318414 - DNA, 20 bp, Artificial Sequence
  Description of Artificial Sequence: Synthetic oligonucleotide
  Target: LAMA2; (+) strand; PAM type: YTN; PAM sequence: TTA
gaacaatgcaagagaaatat

SEQ ID NO: 318415 - DNA, 20 bp, Artificial Sequence
  Description of Artificial Sequence: Synthetic oligonucleotide
  Target: LAMA2; (+) strand; PAM type: YTN; PAM sequence: TTT
tactctctatatcaatatca

SEQ ID NO: 318416 - DNA, 20 bp, Artificial Sequence
  Description of Artificial Sequence: Synthetic oligonucleotide
  Target: LAMA2; (+) strand; PAM type: YTN; PAM sequence: TTT
actctctatatcaatatcac

SEQ ID NO: 318417 - DNA, 20 bp, Artificial Sequence
  Description of Artificial Sequence: Synthetic oligonucleotide
  Target: LAMA2; (+) strand; PAM type: YTN; PAM sequence: TTA
ctctctatatcaatatcaca

SEQ ID NO: 318418 - DNA, 20 bp, Artificial Sequence
  Description of Artificial Sequence: Synthetic oligonucleotide
  Target: LAMA2; (+) strand; PAM type: YTN; PAM sequence: CTC
tctatatcaatatcacacac

SEQ ID NO: 318419 - DNA, 20 bp, Artificial Sequence
  Description of Artificial Sequence: Synthetic oligonucleotide
  Target: LAMA2; (+) strand; PAM type: YTN; PAM sequence: CTC
tatatcaatatcacacacac

SEQ ID NO: 318420 - DNA, 20 bp, Artificial Sequence
  Description of Artificial Sequence: Synthetic oligonucleotide
  Target: LAMA2; (+) strand; PAM type: YTN; PAM sequence: CTA
tatcaatatcacacacacta

SEQ ID NO: 318421 - DNA, 20 bp, Artificial Sequence
  Description of Artificial Sequence: Synthetic oligonucleotide
  Target: LAMA2; (+) strand; PAM type: YTN; PAM sequence: CTA
acacttggtgtgcattttag

SEQ ID NO: 318422 - DNA, 20 bp, Artificial Sequence
  Description of Artificial Sequence: Synthetic oligonucleotide
  Target: LAMA2; (+) strand; PAM type: YTN; PAM sequence: CTT
ggtgtgcattttagaatatc

SEQ ID NO: 318423 - DNA, 20 bp, Artificial Sequence
  Description of Artificial Sequence: Synthetic oligonucleotide
  Target: LAMA2; (+) strand; PAM type: YTN; PAM sequence: TTG
gtgtgcattttagaatatct

SEQ ID NO: 318424 - DNA, 20 bp, Artificial Sequence
  Description of Artificial Sequence: Synthetic oligonucleotide
  Target: LAMA2; (+) strand; PAM type: YTN; PAM sequence: TTT
tagaatatcttgctggttcc

SEQ ID NO: 318425 - DNA, 20 bp, Artificial Sequence
  Description of Artificial Sequence: Synthetic oligonucleotide
  Target: LAMA2; (+) strand; PAM type: YTN; PAM sequence: TTT
agaatatcttgctggttccc

SEQ ID NO: 318426 - DNA, 20 bp, Artificial Sequence
  Description of Artificial Sequence: Synthetic oligonucleotide
  Target: LAMA2; (+) strand; PAM type: YTN; PAM sequence: TTA
gaatatcttgctggttccca

SEQ ID NO: 318427 - DNA, 20 bp, Artificial Sequence
  Description of Artificial Sequence: Synthetic oligonucleotide
  Target: LAMA2; (+) strand; PAM type: YTN; PAM sequence: CTT
gctggttcccagtaaatatg

SEQ ID NO: 318428 - DNA, 20 bp, Artificial Sequence
  Description of Artificial Sequence: Synthetic oligonucleotide
  Target: LAMA2; (+) strand; PAM type: YTN; PAM sequence: TTG
ctggttcccagtaaatatgt

SEQ ID NO: 318429 - DNA, 20 bp, Artificial Sequence
  Description of Artificial Sequence: Synthetic oligonucleotide
  Target: LAMA2; (+) strand; PAM type: YTN; PAM sequence: CTG
gttcccagtaaatatgtcaa

SEQ ID NO: 318430 - DNA, 20 bp, Artificial Sequence
  Description of Artificial Sequence: Synthetic oligonucleotide
  Target: LAMA2; (+) strand; PAM type: YTN; PAM sequence: TTC
ccagtaaatatgtcaacttt

SEQ ID NO: 318431 - DNA, 20 bp, Artificial Sequence
  Description of Artificial Sequence: Synthetic oligonucleotide
  Target: LAMA2; (+) strand; PAM type: YTN; PAM sequence: CTT
tttgcactatataccgcttg

SEQ ID NO: 318432 - DNA, 20 bp, Artificial Sequence
  Description of Artificial Sequence: Synthetic oligonucleotide
  Target: LAMA2; (+) strand; PAM type: YTN; PAM sequence: TTT
ttgcactatataccgcttga

SEQ ID NO: 318433 - DNA, 20 bp, Artificial Sequence
  Description of Artificial Sequence: Synthetic oligonucleotide
  Target: LAMA2; (+) strand; PAM type: YTN; PAM sequence: TTT
tgcactatataccgcttgaa

SEQ ID NO: 318434 - DNA, 20 bp, Artificial Sequence
  Description of Artificial Sequence: Synthetic oligonucleotide
  Target: LAMA2; (+) strand; PAM type: YTN; PAM sequence: TTT
gcactatataccgcttgaaa

SEQ ID NO: 318435 - DNA, 20 bp, Artificial Sequence
  Description of Artificial Sequence: Synthetic oligonucleotide
  Target: LAMA2; (+) strand; PAM type: YTN; PAM sequence: TTG
cactatataccgcttgaaat

SEQ ID NO: 318436 - DNA, 20 bp, Artificial Sequence
  Description of Artificial Sequence: Synthetic oligonucleotide
  Target: LAMA2; (+) strand; PAM type: YTN; PAM sequence: CTA
tataccgcttgaaatgtcaa

SEQ ID NO: 318437 - DNA, 20 bp, Artificial Sequence
  Description of Artificial Sequence: Synthetic oligonucleotide
  Target: LAMA2; (+) strand; PAM type: YTN; PAM sequence: CTT
gaaatgtcaatactgcacaa

SEQ ID NO: 318438 - DNA, 20 bp, Artificial Sequence
  Description of Artificial Sequence: Synthetic oligonucleotide
  Target: LAMA2; (+) strand; PAM type: YTN; PAM sequence: TTG
aaatgtcaatactgcacaaa

SEQ ID NO: 318439 - DNA, 20 bp, Artificial Sequence
  Description of Artificial Sequence: Synthetic oligonucleotide
  Target: LAMA2; (+) strand; PAM type: YTN; PAM sequence: CTG
cacaaatacgcgtagtctgc

SEQ ID NO: 318440 - DNA, 20 bp, Artificial Sequence
  Description of Artificial Sequence: Synthetic oligonucleotide
  Target: LAMA2; (+) strand; PAM type: YTN; PAM sequence: CTG
ctgacagtaacctgccaggt

SEQ ID NO: 318441 - DNA, 20 bp, Artificial Sequence
  Description of Artificial Sequence: Synthetic oligonucleotide
  Target: LAMA2; (+) strand; PAM type: YTN; PAM sequence: CTG
acagtaacctgccaggttct

SEQ ID NO: 318442 - DNA, 20 bp, Artificial Sequence
  Description of Artificial Sequence: Synthetic oligonucleotide
  Target: LAMA2; (+) strand; PAM type: YTN; PAM sequence: CTG
ccaggttctagacttccata

SEQ ID NO: 318443 - DNA, 20 bp, Artificial Sequence
  Description of Artificial Sequence: Synthetic oligonucleotide
  Target: LAMA2; (+) strand; PAM type: YTN; PAM sequence: TTC
tagacttccatattgattac

SEQ ID NO: 318444 - DNA, 20 bp, Artificial Sequence
  Description of Artificial Sequence: Synthetic oligonucleotide
  Target: LAMA2; (+) strand; PAM type: YTN; PAM sequence: CTA
gacttccatattgattactg

SEQ ID NO: 318445 - DNA, 20 bp, Artificial Sequence
  Description of Artificial Sequence: Synthetic oligonucleotide
  Target: LAMA2; (+) strand; PAM type: YTN; PAM sequence: CTT
ccatattgattactgttagc

SEQ ID NO: 318446 - DNA, 20 bp, Artificial Sequence
  Description of Artificial Sequence: Synthetic oligonucleotide
  Target: LAMA2; (+) strand; PAM type: YTN; PAM sequence: TTC
catattgattactgttagca

SEQ ID NO: 318447 - DNA, 20 bp, Artificial Sequence
  Description of Artificial Sequence: Synthetic oligonucleotide
  Target: LAMA2; (+) strand; PAM type: YTN; PAM sequence: TTG
attactgttagcaaaatgtg

SEQ ID NO: 318448 - DNA, 20 bp, Artificial Sequence
  Description of Artificial Sequence: Synthetic oligonucleotide
  Target: LAMA2; (+) strand; PAM type: YTN; PAM sequence: TTA
ctgttagcaaaatgtgtagg

SEQ ID NO: 318449 - DNA, 20 bp, Artificial Sequence
  Description of Artificial Sequence: Synthetic oligonucleotide
  Target: LAMA2; (+) strand; PAM type: YTN; PAM sequence: CTG
ttagcaaaatgtgtaggtga

SEQ ID NO: 318450 - DNA, 20 bp, Artificial Sequence
  Description of Artificial Sequence: Synthetic oligonucleotide
  Target: LAMA2; (+) strand; PAM type: YTN; PAM sequence: TTA
gcaaaatgtgtaggtgaaat

SEQ ID NO: 318451 - DNA, 20 bp, Artificial Sequence
  Description of Artificial Sequence: Synthetic oligonucleotide
  Target: LAMA2; (+) strand; PAM type: YTN; PAM sequence: TTT
ttgtagggtacgcacgtgac

SEQ ID NO: 318452 - DNA, 20 bp, Artificial Sequence
  Description of Artificial Sequence: Synthetic oligonucleotide
  Target: LAMA2; (+) strand; PAM type: YTN; PAM sequence: TTT
tgtagggtacgcacgtgacc

SEQ ID NO: 318453 - DNA, 20 bp, Artificial Sequence
  Description of Artificial Sequence: Synthetic oligonucleotide
  Target: LAMA2; (+) strand; PAM type: YTN; PAM sequence: TTT
gtagggtacgcacgtgacca

SEQ ID NO: 318454 - DNA, 20 bp, Artificial Sequence
  Description of Artificial Sequence: Synthetic oligonucleotide
  Target: LAMA2; (+) strand; PAM type: YTN; PAM sequence: TTG
tagggtacgcacgtgaccat

SEQ ID NO: 318455 - DNA, 20 bp, Artificial Sequence
  Description of Artificial Sequence: Synthetic oligonucleotide
  Target: LAMA2; (+) strand; PAM type: YTN; PAM sequence: TTC
acagaaggcaagaggttctc

SEQ ID NO: 318456 - DNA, 20 bp, Artificial Sequence
  Description of Artificial Sequence: Synthetic oligonucleotide
  Target: LAMA2; (+) strand; PAM type: YTN; PAM sequence: TTC
tctttggaatttaattttct

SEQ ID NO: 318457 - DNA, 20 bp, Artificial Sequence
  Description of Artificial Sequence: Synthetic oligonucleotide
  Target: LAMA2; (+) strand; PAM type: YTN; PAM sequence: CTC
tttggaatttaattttctgt

SEQ ID NO: 318458 - DNA, 20 bp, Artificial Sequence
  Description of Artificial Sequence: Synthetic oligonucleotide
  Target: LAMA2; (+) strand; PAM type: YTN; PAM sequence: CTT
tggaatttaattttctgtgt

SEQ ID NO: 318459 - DNA, 20 bp, Artificial Sequence
  Description of Artificial Sequence: Synthetic oligonucleotide
  Target: LAMA2; (+) strand; PAM type: YTN; PAM sequence: TTT
ggaatttaattttctgtgtg

SEQ ID NO: 318460 - DNA, 20 bp, Artificial Sequence
  Description of Artificial Sequence: Synthetic oligonucleotide
  Target: LAMA2; (+) strand; PAM type: YTN; PAM sequence: TTG
gaatttaattttctgtgtga

SEQ ID NO: 318461 - DNA, 20 bp, Artificial Sequence
  Description of Artificial Sequence: Synthetic oligonucleotide
  Target: LAMA2; (+) strand; PAM type: YTN; PAM sequence: TTT
aattttctgtgtgaaaaata

SEQ ID NO: 318462 - DNA, 20 bp, Artificial Sequence
  Description of Artificial Sequence: Synthetic oligonucleotide
  Target: LAMA2; (+) strand; PAM type: YTN; PAM sequence: TTA
attttctgtgtgaaaaataa

SEQ ID NO: 318463 - DNA, 20 bp, Artificial Sequence
  Description of Artificial Sequence: Synthetic oligonucleotide
  Target: LAMA2; (+) strand; PAM type: YTN; PAM sequence: TTT
tctgtgtgaaaaataaatca

SEQ ID NO: 318464 - DNA, 20 bp, Artificial Sequence
  Description of Artificial Sequence: Synthetic oligonucleotide
  Target: LAMA2; (+) strand; PAM type: YTN; PAM sequence: TTT
ctgtgtgaaaaataaatcac

SEQ ID NO: 318465 - DNA, 20 bp, Artificial Sequence
  Description of Artificial Sequence: Synthetic oligonucleotide
  Target: LAMA2; (+) strand; PAM type: YTN; PAM sequence: TTC
tgtgtgaaaaataaatcact

SEQ ID NO: 318466 - DNA, 20 bp, Artificial Sequence
  Description of Artificial Sequence: Synthetic oligonucleotide
  Target: LAMA2; (+) strand; PAM type: YTN; PAM sequence: CTG
tgtgaaaaataaatcacttt

SEQ ID NO: 318467 - DNA, 20 bp, Artificial Sequence
  Description of Artificial Sequence: Synthetic oligonucleotide
  Target: LAMA2; (+) strand; PAM type: YTN; PAM sequence: CTT
ttttgtgtgtgtggaacatt

SEQ ID NO: 318468 - DNA, 20 bp, Artificial Sequence
  Description of Artificial Sequence: Synthetic oligonucleotide
  Target: LAMA2; (+) strand; PAM type: YTN; PAM sequence: TTT
tttgtgtgtgtggaacattt

SEQ ID NO: 318469 - DNA, 20 bp, Artificial Sequence
  Description of Artificial Sequence: Synthetic oligonucleotide
  Target: LAMA2; (+) strand; PAM type: YTN; PAM sequence: TTT
ttgtgtgtgtggaacatttc

SEQ ID NO: 318470 - DNA, 20 bp, Artificial Sequence
  Description of Artificial Sequence: Synthetic oligonucleotide
  Target: LAMA2; (+) strand; PAM type: YTN; PAM sequence: TTT
tgtgtgtgtggaacatttct

SEQ ID NO: 318471 - DNA, 20 bp, Artificial Sequence
  Description of Artificial Sequence: Synthetic oligonucleotide
  Target: LAMA2; (+) strand; PAM type: YTN; PAM sequence: TTT
gtgtgtgtggaacatttctc

SEQ ID NO: 318472 - DNA, 20 bp, Artificial Sequence
  Description of Artificial Sequence: Synthetic oligonucleotide
  Target: LAMA2; (+) strand; PAM type: YTN; PAM sequence: TTG
tgtgtgtggaacatttctca

SEQ ID NO: 318473 - DNA, 20 bp, Artificial Sequence
  Description of Artificial Sequence: Synthetic oligonucleotide
  Target: LAMA2; (+) strand; PAM type: YTN; PAM sequence: TTT
ctcatggaataatgggtcat

SEQ ID NO: 318474 - DNA, 20 bp, Artificial Sequence
  Description of Artificial Sequence: Synthetic oligonucleotide
  Target: LAMA2; (+) strand; PAM type: YTN; PAM sequence: TTC
tcatggaataatgggtcata

SEQ ID NO: 318475 - DNA, 20 bp, Artificial Sequence
  Description of Artificial Sequence: Synthetic oligonucleotide
  Target: LAMA2; (+) strand; PAM type: YTN; PAM sequence: CTC
atggaataatgggtcatatt

SEQ ID NO: 318476 - DNA, 20 bp, Artificial Sequence
  Description of Artificial Sequence: Synthetic oligonucleotide
  Target: LAMA2; (+) strand; PAM type: YTN; PAM sequence: TTA
ggttaagtttaggaaactga

SEQ ID NO: 318477 - DNA, 20 bp, Artificial Sequence
  Description of Artificial Sequence: Synthetic oligonucleotide
  Target: LAMA2; (+) strand; PAM type: YTN; PAM sequence: TTA
agtttaggaaactgatgttt

SEQ ID NO: 318478 - DNA, 20 bp, Artificial Sequence
  Description of Artificial Sequence: Synthetic oligonucleotide
  Target: LAMA2; (+) strand; PAM type: YTN; PAM sequence: TTT
aggaaactgatgtttattga

SEQ ID NO: 318479 - DNA, 20 bp, Artificial Sequence
  Description of Artificial Sequence: Synthetic oligonucleotide
  Target: LAMA2; (+) strand; PAM type: YTN; PAM sequence: TTA
ggaaactgatgtttattgag

SEQ ID NO: 318480 - DNA, 20 bp, Artificial Sequence
  Description of Artificial Sequence: Synthetic oligonucleotide
  Target: LAMA2; (+) strand; PAM type: YTN; PAM sequence: CTG
atgtttattgagctgtgcac

SEQ ID NO: 318481 - DNA, 20 bp, Artificial Sequence
  Description of Artificial Sequence: Synthetic oligonucleotide
  Target: LAMA2; (+) strand; PAM type: YTN; PAM sequence: TTT
attgagctgtgcacatatct

SEQ ID NO: 318482 - DNA, 20 bp, Artificial Sequence
  Description of Artificial Sequence: Synthetic oligonucleotide
  Target: LAMA2; (+) strand; PAM type: YTN; PAM sequence: TTA
ttgagctgtgcacatatctg

SEQ ID NO: 318483 - DNA, 20 bp, Artificial Sequence
  Description of Artificial Sequence: Synthetic oligonucleotide
  Target: LAMA2; (+) strand; PAM type: YTN; PAM sequence: TTG
agctgtgcacatatctgcta

SEQ ID NO: 318484 - DNA, 20 bp, Artificial Sequence
  Description of Artificial Sequence: Synthetic oligonucleotide
  Target: LAMA2; (+) strand; PAM type: YTN; PAM sequence: CTG
tgcacatatctgctaaagga

SEQ ID NO: 318485 - DNA, 20 bp, Artificial Sequence
  Description of Artificial Sequence: Synthetic oligonucleotide
  Target: LAMA2; (+) strand; PAM type: YTN; PAM sequence: CTG
ctaaaggaatttcacatcta

SEQ ID NO: 318486 - DNA, 20 bp, Artificial Sequence
  Description of Artificial Sequence: Synthetic oligonucleotide
  Target: LAMA2; (+) strand; PAM type: YTN; PAM sequence: CTA
aaggaatttcacatctataa

SEQ ID NO: 318487 - DNA, 20 bp, Artificial Sequence
  Description of Artificial Sequence: Synthetic oligonucleotide
  Target: LAMA2; (+) strand; PAM type: YTN; PAM sequence: TTT
cacatctataaataaataag

SEQ ID NO: 318488 - DNA, 20 bp, Artificial Sequence
  Description of Artificial Sequence: Synthetic oligonucleotide
  Target: LAMA2; (+) strand; PAM type: YTN; PAM sequence: TTC
acatctataaataaataagc

SEQ ID NO: 318489 - DNA, 20 bp, Artificial Sequence
  Description of Artificial Sequence: Synthetic oligonucleotide
  Target: LAMA2; (+) strand; PAM type: YTN; PAM sequence: CTA
taaataaataagcttatttt

SEQ ID NO: 318490 - DNA, 20 bp, Artificial Sequence
  Description of Artificial Sequence: Synthetic oligonucleotide
  Target: LAMA2; (+) strand; PAM type: YTN; PAM sequence: CTT
atttttccatggtgtcagag

SEQ ID NO: 318491 - DNA, 20 bp, Artificial Sequence
  Description of Artificial Sequence: Synthetic oligonucleotide
  Target: LAMA2; (+) strand; PAM type: YTN; PAM sequence: TTA
tttttccatggtgtcagaga

SEQ ID NO: 318492 - DNA, 20 bp, Artificial Sequence
  Description of Artificial Sequence: Synthetic oligonucleotide
  Target: LAMA2; (+) strand; PAM type: YTN; PAM sequence: TTT
ttccatggtgtcagagagat

SEQ ID NO: 318493 - DNA, 20 bp, Artificial Sequence
  Description of Artificial Sequence: Synthetic oligonucleotide
  Target: LAMA2; (+) strand; PAM type: YTN; PAM sequence: TTT
tccatggtgtcagagagata

SEQ ID NO: 318494 - DNA, 20 bp, Artificial Sequence
  Description of Artificial Sequence: Synthetic oligonucleotide
  Target: LAMA2; (+) strand; PAM type: YTN; PAM sequence: TTT
ccatggtgtcagagagataa

SEQ ID NO: 318495 - DNA, 20 bp, Artificial Sequence
  Description of Artificial Sequence: Synthetic oligonucleotide
  Target: LAMA2; (+) strand; PAM type: YTN; PAM sequence: TTC
catggtgtcagagagataat

SEQ ID NO: 318496 - DNA, 20 bp, Artificial Sequence
  Description of Artificial Sequence: Synthetic oligonucleotide
  Target: LAMA2; (+) strand; PAM type: YTN; PAM sequence: CTT
tcatataaaactatttttgc

SEQ ID NO: 318497 - DNA, 20 bp, Artificial Sequence
  Description of Artificial Sequence: Synthetic oligonucleotide
  Target: LAMA2; (+) strand; PAM type: YTN; PAM sequence: TTT
catataaaactatttttgcc

SEQ ID NO: 318498 - DNA, 20 bp, Artificial Sequence
  Description of Artificial Sequence: Synthetic oligonucleotide
  Target: LAMA2; (+) strand; PAM type: YTN; PAM sequence: TTC
atataaaactatttttgcca

SEQ ID NO: 318499 - DNA, 20 bp, Artificial Sequence
  Description of Artificial Sequence: Synthetic oligonucleotide
  Target: LAMA2; (+) strand; PAM type: YTN; PAM sequence: CTA
tttttgccagctgaaatatc

SEQ ID NO: 318500 - DNA, 20 bp, Artificial Sequence
  Description of Artificial Sequence: Synthetic oligonucleotide
  Target: LAMA2; (+) strand; PAM type: YTN; PAM sequence: TTT
ttgccagctgaaatatcatg

SEQ ID NO: 318501 - DNA, 20 bp, Artificial Sequence
  Description of Artificial Sequence: Synthetic oligonucleotide
  Target: LAMA2; (+) strand; PAM type: YTN; PAM sequence: TTT
tgccagctgaaatatcatga

SEQ ID NO: 318502 - DNA, 20 bp, Artificial Sequence
  Description of Artificial Sequence: Synthetic oligonucleotide
  Target: LAMA2; (+) strand; PAM type: YTN; PAM sequence: TTT
gccagctgaaatatcatgat

SEQ ID NO: 318503 - DNA, 20 bp, Artificial Sequence
  Description of Artificial Sequence: Synthetic oligonucleotide
  Target: LAMA2; (+) strand; PAM type: YTN; PAM sequence: TTG
ccagctgaaatatcatgatt

SEQ ID NO: 318504 - DNA, 20 bp, Artificial Sequence
  Description of Artificial Sequence: Synthetic oligonucleotide
  Target: LAMA2; (+) strand; PAM type: YTN; PAM sequence: CTG
aaatatcatgattgttattc

SEQ ID NO: 318505 - DNA, 20 bp, Artificial Sequence
  Description of Artificial Sequence: Synthetic oligonucleotide
  Target: LAMA2; (+) strand; PAM type: YTN; PAM sequence: TTG
ttattctaatatttcctcca

SEQ ID NO: 318506 - DNA, 20 bp, Artificial Sequence
  Description of Artificial Sequence: Synthetic oligonucleotide
  Target: LAMA2; (+) strand; PAM type: YTN; PAM sequence: TTA
ttctaatatttcctccacaa

SEQ ID NO: 318507 - DNA, 20 bp, Artificial Sequence
  Description of Artificial Sequence: Synthetic oligonucleotide
  Target: LAMA2; (+) strand; PAM type: YTN; PAM sequence: TTC
taatatttcctccacaaaga

SEQ ID NO: 318508 - DNA, 20 bp, Artificial Sequence
  Description of Artificial Sequence: Synthetic oligonucleotide
  Target: LAMA2; (+) strand; PAM type: YTN; PAM sequence: CTA
atatttcctccacaaagact

SEQ ID NO: 318509 - DNA, 20 bp, Artificial Sequence
  Description of Artificial Sequence: Synthetic oligonucleotide
  Target: LAMA2; (+) strand; PAM type: YTN; PAM sequence: TTT
cctccacaaagacttagtga

SEQ ID NO: 318510 - DNA, 20 bp, Artificial Sequence
  Description of Artificial Sequence: Synthetic oligonucleotide
  Target: LAMA2; (+) strand; PAM type: YTN; PAM sequence: TTC
ctccacaaagacttagtgaa

SEQ ID NO: 318511 - DNA, 20 bp, Artificial Sequence
  Description of Artificial Sequence: Synthetic oligonucleotide
  Target: LAMA2; (+) strand; PAM type: YTN; PAM sequence: CTC
cacaaagacttagtgaactg

SEQ ID NO: 318512 - DNA, 20 bp, Artificial Sequence
  Description of Artificial Sequence: Synthetic oligonucleotide
  Target: LAMA2; (+) strand; PAM type: YTN; PAM sequence: CTT
agtgaactgcatgtccattt

SEQ ID NO: 318513 - DNA, 20 bp, Artificial Sequence
  Description of Artificial Sequence: Synthetic oligonucleotide
  Target: LAMA2; (+) strand; PAM type: YTN; PAM sequence: TTA
gtgaactgcatgtccatttt

SEQ ID NO: 318514 - DNA, 20 bp, Artificial Sequence
  Description of Artificial Sequence: Synthetic oligonucleotide
  Target: LAMA2; (+) strand; PAM type: YTN; PAM sequence: CTG
catgtccattttagaaagta

SEQ ID NO: 318515 - DNA, 20 bp, Artificial Sequence
  Description of Artificial Sequence: Synthetic oligonucleotide
  Target: LAMA2; (+) strand; PAM type: YTN; PAM sequence: TTT
tagaaagtaggagtagatat

SEQ ID NO: 318516 - DNA, 20 bp, Artificial Sequence
  Description of Artificial Sequence: Synthetic oligonucleotide
  Target: LAMA2; (+) strand; PAM type: YTN; PAM sequence: TTT
agaaagtaggagtagatatt

SEQ ID NO: 318517 - DNA, 20 bp, Artificial Sequence
  Description of Artificial Sequence: Synthetic oligonucleotide
  Target: LAMA2; (+) strand; PAM type: YTN; PAM sequence: TTA
gaaagtaggagtagatattt

SEQ ID NO: 318518 - DNA, 20 bp, Artificial Sequence
  Description of Artificial Sequence: Synthetic oligonucleotide
  Target: LAMA2; (+) strand; PAM type: YTN; PAM sequence: TTT
taattttttcttgcttcttg

SEQ ID NO: 318519 - DNA, 20 bp, Artificial Sequence
  Description of Artificial Sequence: Synthetic oligonucleotide
  Target: LAMA2; (+) strand; PAM type: YTN; PAM sequence: TTT
aattttttcttgcttcttga

SEQ ID NO: 318520 - DNA, 20 bp, Artificial Sequence
  Description of Artificial Sequence: Synthetic oligonucleotide
  Target: LAMA2; (+) strand; PAM type: YTN; PAM sequence: TTA
attttttcttgcttcttgag

SEQ ID NO: 318521 - DNA, 20 bp, Artificial Sequence
  Description of Artificial Sequence: Synthetic oligonucleotide
  Target: LAMA2; (+) strand; PAM type: YTN; PAM sequence: TTT
tttcttgcttcttgagaact

SEQ ID NO: 318522 - DNA, 20 bp, Artificial Sequence
  Description of Artificial Sequence: Synthetic oligonucleotide
  Target: LAMA2; (+) strand; PAM type: YTN; PAM sequence: TTT
ttcttgcttcttgagaacta

SEQ ID NO: 318523 - DNA, 20 bp, Artificial Sequence
  Description of Artificial Sequence: Synthetic oligonucleotide
  Target: LAMA2; (+) strand; PAM type: YTN; PAM sequence: TTT
tcttgcttcttgagaactac

SEQ ID NO: 318524 - DNA, 20 bp, Artificial Sequence
  Description of Artificial Sequence: Synthetic oligonucleotide
  Target: LAMA2; (+) strand; PAM type: YTN; PAM sequence: TTT
cttgcttcttgagaactact

SEQ ID NO: 318525 - DNA, 20 bp, Artificial Sequence
  Description of Artificial Sequence: Synthetic oligonucleotide
  Target: LAMA2; (+) strand; PAM type: YTN; PAM sequence: TTC
ttgcttcttgagaactacta

SEQ ID NO: 318526 - DNA, 20 bp, Artificial Sequence
  Description of Artificial Sequence: Synthetic oligonucleotide
  Target: LAMA2; (+) strand; PAM type: YTN; PAM sequence: CTT
gcttcttgagaactactatc

SEQ ID NO: 318527 - DNA, 20 bp, Artificial Sequence
  Description of Artificial Sequence: Synthetic oligonucleotide
  Target: LAMA2; (+) strand; PAM type: YTN; PAM sequence: TTG
cttcttgagaactactatca

SEQ ID NO: 318528 - DNA, 20 bp, Artificial Sequence
  Description of Artificial Sequence: Synthetic oligonucleotide
  Target: LAMA2; (+) strand; PAM type: YTN; PAM sequence: CTT
cttgagaactactatcaaca

SEQ ID NO: 318529 - DNA, 20 bp, Artificial Sequence
  Description of Artificial Sequence: Synthetic oligonucleotide
  Target: LAMA2; (+) strand; PAM type: YTN; PAM sequence: TTC
ttgagaactactatcaacaa

SEQ ID NO: 318530 - DNA, 20 bp, Artificial Sequence
  Description of Artificial Sequence: Synthetic oligonucleotide
  Target: LAMA2; (+) strand; PAM type: YTN; PAM sequence: CTT
gagaactactatcaacaata

SEQ ID NO: 318531 - DNA, 20 bp, Artificial Sequence
  Description of Artificial Sequence: Synthetic oligonucleotide
  Target: LAMA2; (+) strand; PAM type: YTN; PAM sequence: TTG
agaactactatcaacaataa

SEQ ID NO: 318532 - DNA, 20 bp, Artificial Sequence
  Description of Artificial Sequence: Synthetic oligonucleotide
  Target: LAMA2; (+) strand; PAM type: YTN; PAM sequence: CTA
ctatcaacaataaaaaaagc

SEQ ID NO: 318533 - DNA, 20 bp, Artificial Sequence
  Description of Artificial Sequence: Synthetic oligonucleotide
  Target: LAMA2; (+) strand; PAM type: YTN; PAM sequence: CTA
tcaacaataaaaaaagcttt

SEQ ID NO: 318534 - DNA, 20 bp, Artificial Sequence
  Description of Artificial Sequence: Synthetic oligonucleotide
  Target: LAMA2; (+) strand; PAM type: YTN; PAM sequence: CTT
tgattttaacgtgtatatct

SEQ ID NO: 318535 - DNA, 20 bp, Artificial Sequence
  Description of Artificial Sequence: Synthetic oligonucleotide
  Target: LAMA2; (+) strand; PAM type: YTN; PAM sequence: TTT
gattttaacgtgtatatctt

SEQ ID NO: 318536 - DNA, 20 bp, Artificial Sequence
  Description of Artificial Sequence: Synthetic oligonucleotide
  Target: LAMA2; (+) strand; PAM type: YTN; PAM sequence: TTG
attttaacgtgtatatctta

SEQ ID NO: 318537 - DNA, 20 bp, Artificial Sequence
  Description of Artificial Sequence: Synthetic oligonucleotide
  Target: LAMA2; (+) strand; PAM type: YTN; PAM sequence: TTT
taacgtgtatatcttaagat

SEQ ID NO: 318538 - DNA, 20 bp, Artificial Sequence
  Description of Artificial Sequence: Synthetic oligonucleotide
  Target: LAMA2; (+) strand; PAM type: YTN; PAM sequence: TTT
aacgtgtatatcttaagatt

SEQ ID NO: 318539 - DNA, 20 bp, Artificial Sequence
  Description of Artificial Sequence: Synthetic oligonucleotide
  Target: LAMA2; (+) strand; PAM type: YTN; PAM sequence: TTA
acgtgtatatcttaagattt

SEQ ID NO: 318540 - DNA, 20 bp, Artificial Sequence
  Description of Artificial Sequence: Synthetic oligonucleotide
  Target: LAMA2; (+) strand; PAM type: YTN; PAM sequence: CTT
aagatttcttttgatcaata

SEQ ID NO: 318541 - DNA, 20 bp, Artificial Sequence
  Description of Artificial Sequence: Synthetic oligonucleotide
  Target: LAMA2; (+) strand; PAM type: YTN; PAM sequence: TTA
agatttcttttgatcaatac

SEQ ID NO: 318542 - DNA, 20 bp, Artificial Sequence
  Description of Artificial Sequence: Synthetic oligonucleotide
  Target: LAMA2; (+) strand; PAM type: YTN; PAM sequence: TTT
cttttgatcaatactaatga

SEQ ID NO: 318543 - DNA, 20 bp, Artificial Sequence
  Description of Artificial Sequence: Synthetic oligonucleotide
  Target: LAMA2; (+) strand; PAM type: YTN; PAM sequence: TTC
ttttgatcaatactaatgaa

SEQ ID NO: 318544 - DNA, 20 bp, Artificial Sequence
  Description of Artificial Sequence: Synthetic oligonucleotide
  Target: LAMA2; (+) strand; PAM type: YTN; PAM sequence: CTT
ttgatcaatactaatgaaaa

SEQ ID NO: 318545 - DNA, 20 bp, Artificial Sequence
  Description of Artificial Sequence: Synthetic oligonucleotide
  Target: LAMA2; (+) strand; PAM type: YTN; PAM sequence: TTT
tgatcaatactaatgaaaat

SEQ ID NO: 318546 - DNA, 20 bp, Artificial Sequence
  Description of Artificial Sequence: Synthetic oligonucleotide
  Target: LAMA2; (+) strand; PAM type: YTN; PAM sequence: TTT
gatcaatactaatgaaaata

SEQ ID NO: 318547 - DNA, 20 bp, Artificial Sequence
  Description of Artificial Sequence: Synthetic oligonucleotide
  Target: LAMA2; (+) strand; PAM type: YTN; PAM sequence: TTG
atcaatactaatgaaaataa

SEQ ID NO: 318548 - DNA, 20 bp, Artificial Sequence
  Description of Artificial Sequence: Synthetic oligonucleotide
  Target: LAMA2; (+) strand; PAM type: YTN; PAM sequence: CTA
atgaaaataaacctgaaacg

SEQ ID NO: 318549 - DNA, 20 bp, Artificial Sequence
  Description of Artificial Sequence: Synthetic oligonucleotide
  Target: LAMA2; (+) strand; PAM type: YTN; PAM sequence: CTG
aaacgcgaatcattggacaa

SEQ ID NO: 318550 - DNA, 20 bp, Artificial Sequence
  Description of Artificial Sequence: Synthetic oligonucleotide
  Target: LAMA2; (+) strand; PAM type: YTN; PAM sequence: TTG
gacaaatgtgagatttttcc

SEQ ID NO: 318551 - DNA, 20 bp, Artificial Sequence
  Description of Artificial Sequence: Synthetic oligonucleotide
  Target: LAMA2; (+) strand; PAM type: YTN; PAM sequence: TTT
ttcctttaatttatacatta

SEQ ID NO: 318552 - DNA, 20 bp, Artificial Sequence
  Description of Artificial Sequence: Synthetic oligonucleotide
  Target: LAMA2; (+) strand; PAM type: YTN; PAM sequence: TTT
tcctttaatttatacattaa

SEQ ID NO: 318553 - DNA, 20 bp, Artificial Sequence
  Description of Artificial Sequence: Synthetic oligonucleotide
  Target: LAMA2; (+) strand; PAM type: YTN; PAM sequence: TTT
cctttaatttatacattaat

SEQ ID NO: 318554 - DNA, 20 bp, Artificial Sequence
  Description of Artificial Sequence: Synthetic oligonucleotide
  Target: LAMA2; (+) strand; PAM type: YTN; PAM sequence: TTC
ctttaatttatacattaatt

SEQ ID NO: 318555 - DNA, 20 bp, Artificial Sequence
  Description of Artificial Sequence: Synthetic oligonucleotide
  Target: LAMA2; (+) strand; PAM type: YTN; PAM sequence: CTT
taatttatacattaattgat

SEQ ID NO: 318556 - DNA, 20 bp, Artificial Sequence
  Description of Artificial Sequence: Synthetic oligonucleotide
  Target: LAMA2; (+) strand; PAM type: YTN; PAM sequence: TTT
aatttatacattaattgatg

SEQ ID NO: 318557 - DNA, 20 bp, Artificial Sequence
  Description of Artificial Sequence: Synthetic oligonucleotide
  Target: LAMA2; (+) strand; PAM type: YTN; PAM sequence: TTA
atttatacattaattgatgt

SEQ ID NO: 318558 - DNA, 20 bp, Artificial Sequence
  Description of Artificial Sequence: Synthetic oligonucleotide
  Target: LAMA2; (+) strand; PAM type: YTN; PAM sequence: TTT
atacattaattgatgtaaga

SEQ ID NO: 318559 - DNA, 20 bp, Artificial Sequence
  Description of Artificial Sequence: Synthetic oligonucleotide
  Target: LAMA2; (+) strand; PAM type: YTN; PAM sequence: TTA
tacattaattgatgtaagat

SEQ ID NO: 318560 - DNA, 20 bp, Artificial Sequence
  Description of Artificial Sequence: Synthetic oligonucleotide
  Target: LAMA2; (+) strand; PAM type: YTN; PAM sequence: TTA
attgatgtaagatagtattt

SEQ ID NO: 318561 - DNA, 20 bp, Artificial Sequence
  Description of Artificial Sequence: Synthetic oligonucleotide
  Target: LAMA2; (+) strand; PAM type: YTN; PAM sequence: TTG
atgtaagatagtatttagaa

SEQ ID NO: 318562 - DNA, 20 bp, Artificial Sequence
  Description of Artificial Sequence: Synthetic oligonucleotide
  Target: LAMA2; (+) strand; PAM type: YTN; PAM sequence: TTT
agaaagtttcaatcctttcc

SEQ ID NO: 318563 - DNA, 20 bp, Artificial Sequence
  Description of Artificial Sequence: Synthetic oligonucleotide
  Target: LAMA2; (+) strand; PAM type: YTN; PAM sequence: TTA
gaaagtttcaatcctttcca

SEQ ID NO: 318564 - DNA, 20 bp, Artificial Sequence
  Description of Artificial Sequence: Synthetic oligonucleotide
  Target: LAMA2; (+) strand; PAM type: YTN; PAM sequence: TTT
caatcctttccagttacaat

SEQ ID NO: 318565 - DNA, 20 bp, Artificial Sequence
  Description of Artificial Sequence: Synthetic oligonucleotide
  Target: LAMA2; (+) strand; PAM type: YTN; PAM sequence: TTC
aatcctttccagttacaatt

SEQ ID NO: 318566 - DNA, 20 bp, Artificial Sequence
  Description of Artificial Sequence: Synthetic oligonucleotide
  Target: LAMA2; (+) strand; PAM type: YTN; PAM sequence: CTT
tccagttacaattgtaattg

SEQ ID NO: 318567 - DNA, 20 bp, Artificial Sequence
  Description of Artificial Sequence: Synthetic oligonucleotide
  Target: LAMA2; (+) strand; PAM type: YTN; PAM sequence: TTT
ccagttacaattgtaattgt

SEQ ID NO: 318568 - DNA, 20 bp, Artificial Sequence
  Description of Artificial Sequence: Synthetic oligonucleotide
  Target: LAMA2; (+) strand; PAM type: YTN; PAM sequence: TTC
cagttacaattgtaattgtc

SEQ ID NO: 318569 - DNA, 20 bp, Artificial Sequence
  Description of Artificial Sequence: Synthetic oligonucleotide
  Target: LAMA2; (+) strand; PAM type: YTN; PAM sequence: TTA
caattgtaattgtcacttac

SEQ ID NO: 318570 - DNA, 20 bp, Artificial Sequence
  Description of Artificial Sequence: Synthetic oligonucleotide
  Target: LAMA2; (+) strand; PAM type: YTN; PAM sequence: TTG
taattgtcacttacctcaaa

SEQ ID NO: 318571 - DNA, 20 bp, Artificial Sequence
  Description of Artificial Sequence: Synthetic oligonucleotide
  Target: LAMA2; (+) strand; PAM type: YTN; PAM sequence: TTG
tcacttacctcaaactaaac

SEQ ID NO: 318572 - DNA, 20 bp, Artificial Sequence
  Description of Artificial Sequence: Synthetic oligonucleotide
  Target: LAMA2; (+) strand; PAM type: YTN; PAM sequence: CTT
acctcaaactaaacaaacgg

SEQ ID NO: 318573 - DNA, 20 bp, Artificial Sequence
  Description of Artificial Sequence: Synthetic oligonucleotide
  Target: LAMA2; (+) strand; PAM type: YTN; PAM sequence: TTA
cctcaaactaaacaaacgga

SEQ ID NO: 318574 - DNA, 20 bp, Artificial Sequence
  Description of Artificial Sequence: Synthetic oligonucleotide
  Target: LAMA2; (+) strand; PAM type: YTN; PAM sequence: CTC
aaactaaacaaacggactct

SEQ ID NO: 318575 - DNA, 20 bp, Artificial Sequence
  Description of Artificial Sequence: Synthetic oligonucleotide
  Target: LAMA2; (+) strand; PAM type: YTN; PAM sequence: CTA
aacaaacggactctttccca

SEQ ID NO: 318576 - DNA, 20 bp, Artificial Sequence
  Description of Artificial Sequence: Synthetic oligonucleotide
  Target: LAMA2; (+) strand; PAM type: YTN; PAM sequence: CTC
tttcccatatttttctactt

SEQ ID NO: 318577 - DNA, 20 bp, Artificial Sequence
  Description of Artificial Sequence: Synthetic oligonucleotide
  Target: LAMA2; (+) strand; PAM type: YTN; PAM sequence: CTT
tcccatatttttctacttgg

SEQ ID NO: 318578 - DNA, 20 bp, Artificial Sequence
  Description of Artificial Sequence: Synthetic oligonucleotide
  Target: LAMA2; (+) strand; PAM type: YTN; PAM sequence: TTT
cccatatttttctacttggt

SEQ ID NO: 318579 - DNA, 20 bp, Artificial Sequence
  Description of Artificial Sequence: Synthetic oligonucleotide
  Target: LAMA2; (+) strand; PAM type: YTN; PAM sequence: TTC
ccatatttttctacttggtg

SEQ ID NO: 318580 - DNA, 20 bp, Artificial Sequence
  Description of Artificial Sequence: Synthetic oligonucleotide
  Target: LAMA2; (+) strand; PAM type: YTN; PAM sequence: TTT
ttctacttggtgaaggacat

SEQ ID NO: 318581 - DNA, 20 bp, Artificial Sequence
  Description of Artificial Sequence: Synthetic oligonucleotide
  Target: LAMA2; (+) strand; PAM type: YTN; PAM sequence: TTT
tctacttggtgaaggacatt

SEQ ID NO: 318582 - DNA, 20 bp, Artificial Sequence
  Description of Artificial Sequence: Synthetic oligonucleotide
  Target: LAMA2; (+) strand; PAM type: YTN; PAM sequence: TTT
ctacttggtgaaggacattc

SEQ ID NO: 318583 - DNA, 20 bp, Artificial Sequence
  Description of Artificial Sequence: Synthetic oligonucleotide
  Target: LAMA2; (+) strand; PAM type: YTN; PAM sequence: TTC
tacttggtgaaggacattct

SEQ ID NO: 318584 - DNA, 20 bp, Artificial Sequence
  Description of Artificial Sequence: Synthetic oligonucleotide
  Target: LAMA2; (+) strand; PAM type: YTN; PAM sequence: CTA
cttggtgaaggacattctaa

SEQ ID NO: 318585 - DNA, 20 bp, Artificial Sequence
  Description of Artificial Sequence: Synthetic oligonucleotide
  Target: LAMA2; (+) strand; PAM type: YTN; PAM sequence: CTT
ggtgaaggacattctaatca

SEQ ID NO: 318586 - DNA, 20 bp, Artificial Sequence
  Description of Artificial Sequence: Synthetic oligonucleotide
  Target: LAMA2; (+) strand; PAM type: YTN; PAM sequence: TTG
gtgaaggacattctaatcat

SEQ ID NO: 318587 - DNA, 20 bp, Artificial Sequence
  Description of Artificial Sequence: Synthetic oligonucleotide
  Target: LAMA2; (+) strand; PAM type: YTN; PAM sequence: TTC
taatcatctagatgcctaag

SEQ ID NO: 318588 - DNA, 20 bp, Artificial Sequence
  Description of Artificial Sequence: Synthetic oligonucleotide
  Target: LAMA2; (+) strand; PAM type: YTN; PAM sequence: CTA
atcatctagatgcctaagtc

SEQ ID NO: 318589 - DNA, 20 bp, Artificial Sequence
  Description of Artificial Sequence: Synthetic oligonucleotide
  Target: LAMA2; (+) strand; PAM type: YTN; PAM sequence: CTA
gatgcctaagtcagaaacct

SEQ ID NO: 318590 - DNA, 20 bp, Artificial Sequence
  Description of Artificial Sequence: Synthetic oligonucleotide
  Target: LAMA2; (+) strand; PAM type: YTN; PAM sequence: CTA
agtcagaaacctaggcatca

SEQ ID NO: 318591 - DNA, 20 bp, Artificial Sequence
  Description of Artificial Sequence: Synthetic oligonucleotide
  Target: LAMA2; (+) strand; PAM type: YTN; PAM sequence: CTA
ggcatcatcccttcattctt

SEQ ID NO: 318592 - DNA, 20 bp, Artificial Sequence
  Description of Artificial Sequence: Synthetic oligonucleotide
  Target: LAMA2; (+) strand; PAM type: YTN; PAM sequence: CTT
cattctttctgttcctcaca

SEQ ID NO: 318593 - DNA, 20 bp, Artificial Sequence
  Description of Artificial Sequence: Synthetic oligonucleotide
  Target: LAMA2; (+) strand; PAM type: YTN; PAM sequence: TTC
attctttctgttcctcacag

SEQ ID NO: 318594 - DNA, 20 bp, Artificial Sequence
  Description of Artificial Sequence: Synthetic oligonucleotide
  Target: LAMA2; (+) strand; PAM type: YTN; PAM sequence: TTC
tttctgttcctcacagtcac

SEQ ID NO: 318595 - DNA, 20 bp, Artificial Sequence
  Description of Artificial Sequence: Synthetic oligonucleotide
  Target: LAMA2; (+) strand; PAM type: YTN; PAM sequence: CTT
tctgttcctcacagtcacac

SEQ ID NO: 318596 - DNA, 20 bp, Artificial Sequence
  Description of Artificial Sequence: Synthetic oligonucleotide
  Target: LAMA2; (+) strand; PAM type: YTN; PAM sequence: TTT
ctgttcctcacagtcacact

SEQ ID NO: 318597 - DNA, 20 bp, Artificial Sequence
  Description of Artificial Sequence: Synthetic oligonucleotide
  Target: LAMA2; (+) strand; PAM type: YTN; PAM sequence: TTC
tgttcctcacagtcacactt

SEQ ID NO: 318598 - DNA, 20 bp, Artificial Sequence
  Description of Artificial Sequence: Synthetic oligonucleotide
  Target: LAMA2; (+) strand; PAM type: YTN; PAM sequence: CTG
ttcctcacagtcacacttaa

SEQ ID NO: 318599 - DNA, 20 bp, Artificial Sequence
  Description of Artificial Sequence: Synthetic oligonucleotide
  Target: LAMA2; (+) strand; PAM type: YTN; PAM sequence: TTC
ctcacagtcacacttaatta

SEQ ID NO: 318600 - DNA, 20 bp, Artificial Sequence
  Description of Artificial Sequence: Synthetic oligonucleotide
  Target: LAMA2; (+) strand; PAM type: YTN; PAM sequence: CTC
acagtcacacttaattaatt

SEQ ID NO: 318601 - DNA, 20 bp, Artificial Sequence
  Description of Artificial Sequence: Synthetic oligonucleotide
  Target: LAMA2; (+) strand; PAM type: YTN; PAM sequence: CTT
aattaattgaacgattttcg

SEQ ID NO: 318602 - DNA, 20 bp, Artificial Sequence
  Description of Artificial Sequence: Synthetic oligonucleotide
  Target: LAMA2; (+) strand; PAM type: YTN; PAM sequence: TTA
attaattgaacgattttcgg

SEQ ID NO: 318603 - DNA, 20 bp, Artificial Sequence
  Description of Artificial Sequence: Synthetic oligonucleotide
  Target: LAMA2; (+) strand; PAM type: YTN; PAM sequence: TTA
attgaacgattttcggtccc

SEQ ID NO: 318604 - DNA, 20 bp, Artificial Sequence
  Description of Artificial Sequence: Synthetic oligonucleotide
  Target: LAMA2; (+) strand; PAM type: YTN; PAM sequence: TTG
aacgattttcggtccctaca

SEQ ID NO: 318605 - DNA, 20 bp, Artificial Sequence
  Description of Artificial Sequence: Synthetic oligonucleotide
  Target: LAMA2; (+) strand; PAM type: YTN; PAM sequence: TTT
tcggtccctacatacttcct

SEQ ID NO: 318606 - DNA, 20 bp, Artificial Sequence
  Description of Artificial Sequence: Synthetic oligonucleotide
  Target: LAMA2; (+) strand; PAM type: YTN; PAM sequence: TTT
cggtccctacatacttcctg

SEQ ID NO: 318607 - DNA, 20 bp, Artificial Sequence
  Description of Artificial Sequence: Synthetic oligonucleotide
  Target: LAMA2; (+) strand; PAM type: YTN; PAM sequence: TTC
ggtccctacatacttcctga

SEQ ID NO: 318608 - DNA, 20 bp, Artificial Sequence
  Description of Artificial Sequence: Synthetic oligonucleotide
  Target: LAMA2; (+) strand; PAM type: YTN; PAM sequence: CTA
catacttcctgatttcctcc

SEQ ID NO: 318609 - DNA, 20 bp, Artificial Sequence
  Description of Artificial Sequence: Synthetic oligonucleotide
  Target: LAMA2; (+) strand; PAM type: YTN; PAM sequence: CTT
cctgatttcctcccctgtgc

SEQ ID NO: 318610 - DNA, 20 bp, Artificial Sequence
  Description of Artificial Sequence: Synthetic oligonucleotide
  Target: LAMA2; (+) strand; PAM type: YTN; PAM sequence: TTC
ctgatttcctcccctgtgcc

SEQ ID NO: 318611 - DNA, 20 bp, Artificial Sequence
  Description of Artificial Sequence: Synthetic oligonucleotide
  Target: LAMA2; (+) strand; PAM type: YTN; PAM sequence: CTG
atttcctcccctgtgcccta

SEQ ID NO: 318612 - DNA, 20 bp, Artificial Sequence
  Description of Artificial Sequence: Synthetic oligonucleotide
  Target: LAMA2; (+) strand; PAM type: YTN; PAM sequence: TTT
cctcccctgtgccctactgc

SEQ ID NO: 318613 - DNA, 20 bp, Artificial Sequence
  Description of Artificial Sequence: Synthetic oligonucleotide
  Target: LAMA2; (+) strand; PAM type: YTN; PAM sequence: TTC
ctcccctgtgccctactgct

SEQ ID NO: 318614 - DNA, 20 bp, Artificial Sequence
  Description of Artificial Sequence: Synthetic oligonucleotide
  Target: LAMA2; (+) strand; PAM type: YTN; PAM sequence: CTC
ccctgtgccctactgcttct

SEQ ID NO: 318615 - DNA, 20 bp, Artificial Sequence
  Description of Artificial Sequence: Synthetic oligonucleotide
  Target: LAMA2; (+) strand; PAM type: YTN; PAM sequence: CTG
tgccctactgcttctctccc

SEQ ID NO: 318616 - DNA, 20 bp, Artificial Sequence
  Description of Artificial Sequence: Synthetic oligonucleotide
  Target: LAMA2; (+) strand; PAM type: YTN; PAM sequence: CTA
ctgcttctctccctaactca

SEQ ID NO: 318617 - DNA, 20 bp, Artificial Sequence
  Description of Artificial Sequence: Synthetic oligonucleotide
  Target: LAMA2; (+) strand; PAM type: YTN; PAM sequence: CTG
cttctctccctaactcagat

SEQ ID NO: 318618 - DNA, 20 bp, Artificial Sequence
  Description of Artificial Sequence: Synthetic oligonucleotide
  Target: LAMA2; (+) strand; PAM type: YTN; PAM sequence: CTT
ctctccctaactcagataat

SEQ ID NO: 318619 - DNA, 20 bp, Artificial Sequence
  Description of Artificial Sequence: Synthetic oligonucleotide
  Target: LAMA2; (+) strand; PAM type: YTN; PAM sequence: TTC
tctccctaactcagataatg

SEQ ID NO: 318620 - DNA, 20 bp, Artificial Sequence
  Description of Artificial Sequence: Synthetic oligonucleotide
  Target: LAMA2; (+) strand; PAM type: YTN; PAM sequence: CTC
tccctaactcagataatgat

SEQ ID NO: 318621 - DNA, 20 bp, Artificial Sequence
  Description of Artificial Sequence: Synthetic oligonucleotide
  Target: LAMA2; (+) strand; PAM type: YTN; PAM sequence: CTC
cctaactcagataatgattt

SEQ ID NO: 318622 - DNA, 20 bp, Artificial Sequence
  Description of Artificial Sequence: Synthetic oligonucleotide
  Target: LAMA2; (+) strand; PAM type: YTN; PAM sequence: CTA
actcagataatgatttctcg

SEQ ID NO: 318623 - DNA, 20 bp, Artificial Sequence
  Description of Artificial Sequence: Synthetic oligonucleotide
  Target: LAMA2; (+) strand; PAM type: YTN; PAM sequence: CTC
agataatgatttctcgacta

SEQ ID NO: 318624 - DNA, 20 bp, Artificial Sequence
  Description of Artificial Sequence: Synthetic oligonucleotide
  Target: LAMA2; (+) strand; PAM type: YTN; PAM sequence: TTT
ctcgactatcctattttaag

SEQ ID NO: 318625 - DNA, 20 bp, Artificial Sequence
  Description of Artificial Sequence: Synthetic oligonucleotide
  Target: LAMA2; (+) strand; PAM type: YTN; PAM sequence: TTC
tcgactatcctattttaaga

SEQ ID NO: 318626 - DNA, 20 bp, Artificial Sequence
  Description of Artificial Sequence: Synthetic oligonucleotide
  Target: LAMA2; (+) strand; PAM type: YTN; PAM sequence: CTC
gactatcctattttaagatc

SEQ ID NO: 318627 - DNA, 20 bp, Artificial Sequence
  Description of Artificial Sequence: Synthetic oligonucleotide
  Target: LAMA2; (+) strand; PAM type: YTN; PAM sequence: CTA
tcctattttaagatcaggct

SEQ ID NO: 318628 - DNA, 20 bp, Artificial Sequence
  Description of Artificial Sequence: Synthetic oligonucleotide
  Target: LAMA2; (+) strand; PAM type: YTN; PAM sequence: CTA
ttttaagatcaggctatttt

SEQ ID NO: 318629 - DNA, 20 bp, Artificial Sequence
  Description of Artificial Sequence: Synthetic oligonucleotide
  Target: LAMA2; (+) strand; PAM type: YTN; PAM sequence: TTT
taagatcaggctattttgtc

SEQ ID NO: 318630 - DNA, 20 bp, Artificial Sequence
  Description of Artificial Sequence: Synthetic oligonucleotide
  Target: LAMA2; (+) strand; PAM type: YTN; PAM sequence: TTT
aagatcaggctattttgtct

SEQ ID NO: 318631 - DNA, 20 bp, Artificial Sequence
  Description of Artificial Sequence: Synthetic oligonucleotide
  Target: LAMA2; (+) strand; PAM type: YTN; PAM sequence: TTA
agatcaggctattttgtctc

SEQ ID NO: 318632 - DNA, 20 bp, Artificial Sequence
  Description of Artificial Sequence: Synthetic oligonucleotide
  Target: LAMA2; (+) strand; PAM type: YTN; PAM sequence: CTA
ttttgtctccttgcaatgat

SEQ ID NO: 318633 - DNA, 20 bp, Artificial Sequence
  Description of Artificial Sequence: Synthetic oligonucleotide
  Target: LAMA2; (+) strand; PAM type: YTN; PAM sequence: TTT
tgtctccttgcaatgatctc

SEQ ID NO: 318634 - DNA, 20 bp, Artificial Sequence
  Description of Artificial Sequence: Synthetic oligonucleotide
  Target: LAMA2; (+) strand; PAM type: YTN; PAM sequence: TTT
gtctccttgcaatgatctct

SEQ ID NO: 318635 - DNA, 20 bp, Artificial Sequence
  Description of Artificial Sequence: Synthetic oligonucleotide
  Target: LAMA2; (+) strand; PAM type: YTN; PAM sequence: TTG
tctccttgcaatgatctctc

SEQ ID NO: 318636 - DNA, 20 bp, Artificial Sequence
  Description of Artificial Sequence: Synthetic oligonucleotide
  Target: LAMA2; (+) strand; PAM type: YTN; PAM sequence: CTC
cttgcaatgatctctctata

SEQ ID NO: 318637 - DNA, 20 bp, Artificial Sequence
  Description of Artificial Sequence: Synthetic oligonucleotide
  Target: LAMA2; (+) strand; PAM type: YTN; PAM sequence: CTT
gcaatgatctctctataacc

SEQ ID NO: 318638 - DNA, 20 bp, Artificial Sequence
  Description of Artificial Sequence: Synthetic oligonucleotide
  Target: LAMA2; (+) strand; PAM type: YTN; PAM sequence: TTG
caatgatctctctataacct

SEQ ID NO: 318639 - DNA, 20 bp, Artificial Sequence
  Description of Artificial Sequence: Synthetic oligonucleotide
  Target: LAMA2; (+) strand; PAM type: YTN; PAM sequence: CTC
tctataacctagtaatatca

SEQ ID NO: 318640 - DNA, 20 bp, Artificial Sequence
  Description of Artificial Sequence: Synthetic oligonucleotide
  Target: LAMA2; (+) strand; PAM type: YTN; PAM sequence: CTC
tataacctagtaatatcaag

SEQ ID NO: 318641 - DNA, 20 bp, Artificial Sequence
  Description of Artificial Sequence: Synthetic oligonucleotide
  Target: LAMA2; (+) strand; PAM type: YTN; PAM sequence: CTA
taacctagtaatatcaagcc

SEQ ID NO: 318642 - DNA, 20 bp, Artificial Sequence
  Description of Artificial Sequence: Synthetic oligonucleotide
  Target: LAMA2; (+) strand; PAM type: YTN; PAM sequence: CTA
gtaatatcaagccctaatga

SEQ ID NO: 318643 - DNA, 20 bp, Artificial Sequence
  Description of Artificial Sequence: Synthetic oligonucleotide
  Target: LAMA2; (+) strand; PAM type: YTN; PAM sequence: CTA
atgaaaagtctttggtcggc

SEQ ID NO: 318644 - DNA, 20 bp, Artificial Sequence
  Description of Artificial Sequence: Synthetic oligonucleotide
  Target: LAMA2; (+) strand; PAM type: YTN; PAM sequence: CTT
tggtcggcttctgtcaccca

SEQ ID NO: 318645 - DNA, 20 bp, Artificial Sequence
  Description of Artificial Sequence: Synthetic oligonucleotide
  Target: LAMA2; (+) strand; PAM type: YTN; PAM sequence: TTT
ggtcggcttctgtcacccag

SEQ ID NO: 318646 - DNA, 20 bp, Artificial Sequence
  Description of Artificial Sequence: Synthetic oligonucleotide
  Target: LAMA2; (+) strand; PAM type: YTN; PAM sequence: TTG
gtcggcttctgtcacccagg

SEQ ID NO: 318647 - DNA, 20 bp, Artificial Sequence
  Description of Artificial Sequence: Synthetic oligonucleotide
  Target: LAMA2; (+) strand; PAM type: YTN; PAM sequence: CTT
ctgtcacccaggataaacgt

SEQ ID NO: 318648 - DNA, 20 bp, Artificial Sequence
  Description of Artificial Sequence: Synthetic oligonucleotide
  Target: LAMA2; (+) strand; PAM type: YTN; PAM sequence: TTC
tgtcacccaggataaacgtg

SEQ ID NO: 318649 - DNA, 20 bp, Artificial Sequence
  Description of Artificial Sequence: Synthetic oligonucleotide
  Target: LAMA2; (+) strand; PAM type: YTN; PAM sequence: CTG
tcacccaggataaacgtgaa

SEQ ID NO: 318650 - DNA, 20 bp, Artificial Sequence
  Description of Artificial Sequence: Synthetic oligonucleotide
  Target: LAMA2; (+) strand; PAM type: YTN; PAM sequence: CTC
ctgagagttggatctacttc

SEQ ID NO: 318651 - DNA, 20 bp, Artificial Sequence
  Description of Artificial Sequence: Synthetic oligonucleotide
  Target: LAMA2; (+) strand; PAM type: YTN; PAM sequence: CTG
agagttggatctacttcctt

SEQ ID NO: 318652 - DNA, 20 bp, Artificial Sequence
  Description of Artificial Sequence: Synthetic oligonucleotide
  Target: LAMA2; (+) strand; PAM type: YTN; PAM sequence: TTG
gatctacttcctttcagcat

SEQ ID NO: 318653 - DNA, 20 bp, Artificial Sequence
  Description of Artificial Sequence: Synthetic oligonucleotide
  Target: LAMA2; (+) strand; PAM type: YTN; PAM sequence: CTA
cttcctttcagcatctcacc

SEQ ID NO: 318654 - DNA, 20 bp, Artificial Sequence
  Description of Artificial Sequence: Synthetic oligonucleotide
  Target: LAMA2; (+) strand; PAM type: YTN; PAM sequence: CTT
cctttcagcatctcaccctt

SEQ ID NO: 318655 - DNA, 20 bp, Artificial Sequence
  Description of Artificial Sequence: Synthetic oligonucleotide
  Target: LAMA2; (+) strand; PAM type: YTN; PAM sequence: TTC
ctttcagcatctcacccttg

SEQ ID NO: 318656 - DNA, 20 bp, Artificial Sequence
  Description of Artificial Sequence: Synthetic oligonucleotide
  Target: LAMA2; (+) strand; PAM type: YTN; PAM sequence: CTT
tcagcatctcacccttgcct

SEQ ID NO: 318657 - DNA, 20 bp, Artificial Sequence
  Description of Artificial Sequence: Synthetic oligonucleotide
  Target: LAMA2; (+) strand; PAM type: YTN; PAM sequence: TTT
cagcatctcacccttgcctg

SEQ ID NO: 318658 - DNA, 20 bp, Artificial Sequence
  Description of Artificial Sequence: Synthetic oligonucleotide
  Target: LAMA2; (+) strand; PAM type: YTN; PAM sequence: TTC
agcatctcacccttgcctgc

SEQ ID NO: 318659 - DNA, 20 bp, Artificial Sequence
  Description of Artificial Sequence: Synthetic oligonucleotide
  Target: LAMA2; (+) strand; PAM type: YTN; PAM sequence: CTC
acccttgcctgcacttctag

SEQ ID NO: 318660 - DNA, 20 bp, Artificial Sequence
  Description of Artificial Sequence: Synthetic oligonucleotide
  Target: LAMA2; (+) strand; PAM type: YTN; PAM sequence: CTT
gcctgcacttctagcctcca

SEQ ID NO: 318661 - DNA, 20 bp, Artificial Sequence
  Description of Artificial Sequence: Synthetic oligonucleotide
  Target: LAMA2; (+) strand; PAM type: YTN; PAM sequence: TTG
cctgcacttctagcctccac

SEQ ID NO: 318662 - DNA, 20 bp, Artificial Sequence
  Description of Artificial Sequence: Synthetic oligonucleotide
  Target: LAMA2; (+) strand; PAM type: YTN; PAM sequence: CTG
cacttctagcctccactctc

SEQ ID NO: 318663 - DNA, 20 bp, Artificial Sequence
  Description of Artificial Sequence: Synthetic oligonucleotide
  Target: LAMA2; (+) strand; PAM type: YTN; PAM sequence: CTT
ctagcctccactctcaaaac

SEQ ID NO: 318664 - DNA, 20 bp, Artificial Sequence
  Description of Artificial Sequence: Synthetic oligonucleotide
  Target: LAMA2; (+) strand; PAM type: YTN; PAM sequence: TTC
tagcctccactctcaaaact

SEQ ID NO: 318665 - DNA, 20 bp, Artificial Sequence
  Description of Artificial Sequence: Synthetic oligonucleotide
  Target: LAMA2; (+) strand; PAM type: YTN; PAM sequence: CTA
gcctccactctcaaaactct

SEQ ID NO: 318666 - DNA, 20 bp, Artificial Sequence
  Description of Artificial Sequence: Synthetic oligonucleotide
  Target: LAMA2; (+) strand; PAM type: YTN; PAM sequence: CTC
cactctcaaaactctttcac

SEQ ID NO: 318667 - DNA, 20 bp, Artificial Sequence
  Description of Artificial Sequence: Synthetic oligonucleotide
  Target: LAMA2; (+) strand; PAM type: YTN; PAM sequence: CTC
tcaaaactctttcacacatc

SEQ ID NO: 318668 - DNA, 20 bp, Artificial Sequence
  Description of Artificial Sequence: Synthetic oligonucleotide
  Target: LAMA2; (+) strand; PAM type: YTN; PAM sequence: CTC
aaaactctttcacacatcat

SEQ ID NO: 318669 - DNA, 20 bp, Artificial Sequence
  Description of Artificial Sequence: Synthetic oligonucleotide
  Target: LAMA2; (+) strand; PAM type: YTN; PAM sequence: CTC
tttcacacatcatttgaacc

SEQ ID NO: 318670 - DNA, 20 bp, Artificial Sequence
  Description of Artificial Sequence: Synthetic oligonucleotide
  Target: LAMA2; (+) strand; PAM type: YTN; PAM sequence: CTT
tcacacatcatttgaacctg

SEQ ID NO: 318671 - DNA, 20 bp, Artificial Sequence
  Description of Artificial Sequence: Synthetic oligonucleotide
  Target: LAMA2; (+) strand; PAM type: YTN; PAM sequence: TTT
cacacatcatttgaacctga

SEQ ID NO: 318672 - DNA, 20 bp, Artificial Sequence
  Description of Artificial Sequence: Synthetic oligonucleotide
  Target: LAMA2; (+) strand; PAM type: YTN; PAM sequence: TTC
acacatcatttgaacctgag

SEQ ID NO: 318673 - DNA, 20 bp, Artificial Sequence
  Description of Artificial Sequence: Synthetic oligonucleotide
  Target: LAMA2; (+) strand; PAM type: YTN; PAM sequence: TTT
gaacctgagacattaaaaat

SEQ ID NO: 318674 - DNA, 20 bp, Artificial Sequence
  Description of Artificial Sequence: Synthetic oligonucleotide
  Target: LAMA2; (+) strand; PAM type: YTN; PAM sequence: TTG
aacctgagacattaaaaatg

SEQ ID NO: 318675 - DNA, 20 bp, Artificial Sequence
  Description of Artificial Sequence: Synthetic oligonucleotide
  Target: LAMA2; (+) strand; PAM type: YTN; PAM sequence: CTG
agacattaaaaatgccttcc

SEQ ID NO: 318676 - DNA, 20 bp, Artificial Sequence
  Description of Artificial Sequence: Synthetic oligonucleotide
  Target: LAMA2; (+) strand; PAM type: YTN; PAM sequence: TTA
aaaatgccttccagggcttg

SEQ ID NO: 318677 - DNA, 20 bp, Artificial Sequence
  Description of Artificial Sequence: Synthetic oligonucleotide
  Target: LAMA2; (+) strand; PAM type: YTN; PAM sequence: CTT
ccagggcttggtgcagtggc

SEQ ID NO: 318678 - DNA, 20 bp, Artificial Sequence
  Description of Artificial Sequence: Synthetic oligonucleotide
  Target: LAMA2; (+) strand; PAM type: YTN; PAM sequence: TTC
cagggcttggtgcagtggca

SEQ ID NO: 318679 - DNA, 20 bp, Artificial Sequence
  Description of Artificial Sequence: Synthetic oligonucleotide
  Target: LAMA2; (+) strand; PAM type: YTN; PAM sequence: CTT
ggtgcagtggcacacacctg

SEQ ID NO: 318680 - DNA, 20 bp, Artificial Sequence
  Description of Artificial Sequence: Synthetic oligonucleotide
  Target: LAMA2; (+) strand; PAM type: YTN; PAM sequence: TTG
gtgcagtggcacacacctgt

SEQ ID NO: 318681 - DNA, 20 bp, Artificial Sequence
  Description of Artificial Sequence: Synthetic oligonucleotide
  Target: LAMA2; (+) strand; PAM type: YTN; PAM sequence: CTG
taatcccagcactttgggag

SEQ ID NO: 318682 - DNA, 20 bp, Artificial Sequence
  Description of Artificial Sequence: Synthetic oligonucleotide
  Target: LAMA2; (+) strand; PAM type: YTN; PAM sequence: CTT
tgggaggccaaggccagcag

SEQ ID NO: 318683 - DNA, 20 bp, Artificial Sequence
  Description of Artificial Sequence: Synthetic oligonucleotide
  Target: LAMA2; (+) strand; PAM type: YTN; PAM sequence: TTT
gggaggccaaggccagcaga

SEQ ID NO: 318684 - DNA, 20 bp, Artificial Sequence
  Description of Artificial Sequence: Synthetic oligonucleotide
  Target: LAMA2; (+) strand; PAM type: YTN; PAM sequence: TTG
ggaggccaaggccagcagat

SEQ ID NO: 318685 - DNA, 20 bp, Artificial Sequence
  Description of Artificial Sequence: Synthetic oligonucleotide
  Target: LAMA2; (+) strand; PAM type: YTN; PAM sequence: CTT
gagctcaggagttcgagacc

SEQ ID NO: 318686 - DNA, 20 bp, Artificial Sequence
  Description of Artificial Sequence: Synthetic oligonucleotide
  Target: LAMA2; (+) strand; PAM type: YTN; PAM sequence: TTG
agctcaggagttcgagacca

SEQ ID NO: 318687 - DNA, 20 bp, Artificial Sequence
  Description of Artificial Sequence: Synthetic oligonucleotide
  Target: LAMA2; (+) strand; PAM type: YTN; PAM sequence: CTC
aggagttcgagaccagcctg

SEQ ID NO: 318688 - DNA, 20 bp, Artificial Sequence
  Description of Artificial Sequence: Synthetic oligonucleotide
  Target: LAMA2; (+) strand; PAM type: YTN; PAM sequence: TTC
gagaccagcctgggcaatat

SEQ ID NO: 318689 - DNA, 20 bp, Artificial Sequence
  Description of Artificial Sequence: Synthetic oligonucleotide
  Target: LAMA2; (+) strand; PAM type: YTN; PAM sequence: CTG
ggcaatatgcgaaaccccat

SEQ ID NO: 318690 - DNA, 20 bp, Artificial Sequence
  Description of Artificial Sequence: Synthetic oligonucleotide
  Target: LAMA2; (+) strand; PAM type: YTN; PAM sequence: CTC
taccaaaaaaaaaaaaaaaa

SEQ ID NO: 318691 - DNA, 20 bp, Artificial Sequence
  Description of Artificial Sequence: Synthetic oligonucleotide
  Target: LAMA2; (+) strand; PAM type: YTN; PAM sequence: CTA
ccaaaaaaaaaaaaaaaaaa

SEQ ID NO: 318692 - DNA, 20 bp, Artificial Sequence
  Description of Artificial Sequence: Synthetic oligonucleotide
  Target: LAMA2; (+) strand; PAM type: YTN; PAM sequence: TTG
ctgggcttggtggttgagcc

SEQ ID NO: 318693 - DNA, 20 bp, Artificial Sequence
  Description of Artificial Sequence: Synthetic oligonucleotide
  Target: LAMA2; (+) strand; PAM type: YTN; PAM sequence: CTG
ggcttggtggttgagcctgt

SEQ ID NO: 318694 - DNA, 20 bp, Artificial Sequence
  Description of Artificial Sequence: Synthetic oligonucleotide
  Target: LAMA2; (+) strand; PAM type: YTN; PAM sequence: CTT
ggtggttgagcctgtcgtcc

SEQ ID NO: 318695 - DNA, 20 bp, Artificial Sequence
  Description of Artificial Sequence: Synthetic oligonucleotide
  Target: LAMA2; (+) strand; PAM type: YTN; PAM sequence: TTG
gtggttgagcctgtcgtccc

SEQ ID NO: 318696 - DNA, 20 bp, Artificial Sequence
  Description of Artificial Sequence: Synthetic oligonucleotide
  Target: LAMA2; (+) strand; PAM type: YTN; PAM sequence: TTG
agcctgtcgtcccagctact

SEQ ID NO: 318697 - DNA, 20 bp, Artificial Sequence
  Description of Artificial Sequence: Synthetic oligonucleotide
  Target: LAMA2; (+) strand; PAM type: YTN; PAM sequence: CTG
tcgtcccagctactcaggag

SEQ ID NO: 318698 - DNA, 20 bp, Artificial Sequence
  Description of Artificial Sequence: Synthetic oligonucleotide
  Target: LAMA2; (+) strand; PAM type: YTN; PAM sequence: CTA
ctcaggaggctgaggtggga

SEQ ID NO: 318699 - DNA, 20 bp, Artificial Sequence
  Description of Artificial Sequence: Synthetic oligonucleotide
  Target: LAMA2; (+) strand; PAM type: YTN; PAM sequence: CTC
aggaggctgaggtgggagga

SEQ ID NO: 318700 - DNA, 20 bp, Artificial Sequence
  Description of Artificial Sequence: Synthetic oligonucleotide
  Target: LAMA2; (+) strand; PAM type: YTN; PAM sequence: CTG
aggtgggaggatcccttgag

SEQ ID NO: 318701 - DNA, 20 bp, Artificial Sequence
  Description of Artificial Sequence: Synthetic oligonucleotide
  Target: LAMA2; (+) strand; PAM type: YTN; PAM sequence: CTT
gagttcagaagttcaaggct

SEQ ID NO: 318702 - DNA, 20 bp, Artificial Sequence
  Description of Artificial Sequence: Synthetic oligonucleotide
  Target: LAMA2; (+) strand; PAM type: YTN; PAM sequence: TTG
agttcagaagttcaaggctg

SEQ ID NO: 318703 - DNA, 20 bp, Artificial Sequence
  Description of Artificial Sequence: Synthetic oligonucleotide
  Target: LAMA2; (+) strand; PAM type: YTN; PAM sequence: TTC
agaagttcaaggctgcagtg

SEQ ID NO: 318704 - DNA, 20 bp, Artificial Sequence
  Description of Artificial Sequence: Synthetic oligonucleotide
  Target: LAMA2; (+) strand; PAM type: YTN; PAM sequence: TTC
aaggctgcagtgagcagaga

SEQ ID NO: 318705 - DNA, 20 bp, Artificial Sequence
  Description of Artificial Sequence: Synthetic oligonucleotide
  Target: LAMA2; (+) strand; PAM type: YTN; PAM sequence: CTG
cagtgagcagagattgagcc

SEQ ID NO: 318706 - DNA, 20 bp, Artificial Sequence
  Description of Artificial Sequence: Synthetic oligonucleotide
  Target: LAMA2; (+) strand; PAM type: YTN; PAM sequence: TTG
agccactgcactccagcata

SEQ ID NO: 318707 - DNA, 20 bp, Artificial Sequence
  Description of Artificial Sequence: Synthetic oligonucleotide
  Target: LAMA2; (+) strand; PAM type: YTN; PAM sequence: CTG
cactccagcataggtgacag

SEQ ID NO: 318708 - DNA, 20 bp, Artificial Sequence
  Description of Artificial Sequence: Synthetic oligonucleotide
  Target: LAMA2; (+) strand; PAM type: YTN; PAM sequence: CTC
cagcataggtgacagagcca

SEQ ID NO: 318709 - DNA, 20 bp, Artificial Sequence
  Description of Artificial Sequence: Synthetic oligonucleotide
  Target: LAMA2; (+) strand; PAM type: YTN; PAM sequence: CTG
tctcaaaaagaaaataataa

SEQ ID NO: 318710 - DNA, 20 bp, Artificial Sequence
  Description of Artificial Sequence: Synthetic oligonucleotide
  Target: LAMA2; (+) strand; PAM type: YTN; PAM sequence: CTC
aaaaagaaaataataataat

SEQ ID NO: 318711 - DNA, 20 bp, Artificial Sequence
  Description of Artificial Sequence: Synthetic oligonucleotide
  Target: LAMA2; (+) strand; PAM type: YTN; PAM sequence: CTG
ccttccagttcctccaaaat

SEQ ID NO: 318712 - DNA, 20 bp, Artificial Sequence
  Description of Artificial Sequence: Synthetic oligonucleotide
  Target: LAMA2; (+) strand; PAM type: YTN; PAM sequence: CTT
ccagttcctccaaaataaca

SEQ ID NO: 318713 - DNA, 20 bp, Artificial Sequence
  Description of Artificial Sequence: Synthetic oligonucleotide
  Target: LAMA2; (+) strand; PAM type: YTN; PAM sequence: TTC
cagttcctccaaaataacat

SEQ ID NO: 318714 - DNA, 20 bp, Artificial Sequence
  Description of Artificial Sequence: Synthetic oligonucleotide
  Target: LAMA2; (+) strand; PAM type: YTN; PAM sequence: TTC
ctccaaaataacatgtcttt

SEQ ID NO: 318715 - DNA, 20 bp, Artificial Sequence
  Description of Artificial Sequence: Synthetic oligonucleotide
  Target: LAMA2; (+) strand; PAM type: YTN; PAM sequence: CTC
caaaataacatgtctttcct

SEQ ID NO: 318716 - DNA, 20 bp, Artificial Sequence
  Description of Artificial Sequence: Synthetic oligonucleotide
  Target: LAMA2; (+) strand; PAM type: YTN; PAM sequence: CTT
tccttggtaaatactcttct

SEQ ID NO: 318717 - DNA, 20 bp, Artificial Sequence
  Description of Artificial Sequence: Synthetic oligonucleotide
  Target: LAMA2; (+) strand; PAM type: YTN; PAM sequence: TTT
ccttggtaaatactcttctt

SEQ ID NO: 318718 - DNA, 20 bp, Artificial Sequence
  Description of Artificial Sequence: Synthetic oligonucleotide
  Target: LAMA2; (+) strand; PAM type: YTN; PAM sequence: TTC
cttggtaaatactcttctta

SEQ ID NO: 318719 - DNA, 20 bp, Artificial Sequence
  Description of Artificial Sequence: Synthetic oligonucleotide
  Target: LAMA2; (+) strand; PAM type: YTN; PAM sequence: CTT
ggtaaatactcttcttactg

SEQ ID NO: 318720 - DNA, 20 bp, Artificial Sequence
  Description of Artificial Sequence: Synthetic oligonucleotide
  Target: LAMA2; (+) strand; PAM type: YTN; PAM sequence: TTG
gtaaatactcttcttactgc

SEQ ID NO: 318721 - DNA, 20 bp, Artificial Sequence
  Description of Artificial Sequence: Synthetic oligonucleotide
  Target: LAMA2; (+) strand; PAM type: YTN; PAM sequence: CTC
ttcttactgctttcagcaga

SEQ ID NO: 318722 - DNA, 20 bp, Artificial Sequence
  Description of Artificial Sequence: Synthetic oligonucleotide
  Target: LAMA2; (+) strand; PAM type: YTN; PAM sequence: CTT
cttactgctttcagcagaca

SEQ ID NO: 318723 - DNA, 20 bp, Artificial Sequence
  Description of Artificial Sequence: Synthetic oligonucleotide
  Target: LAMA2; (+) strand; PAM type: YTN; PAM sequence: TTC
ttactgctttcagcagacat

SEQ ID NO: 318724 - DNA, 20 bp, Artificial Sequence
  Description of Artificial Sequence: Synthetic oligonucleotide
  Target: LAMA2; (+) strand; PAM type: YTN; PAM sequence: CTT
actgctttcagcagacattc

SEQ ID NO: 318725 - DNA, 20 bp, Artificial Sequence
  Description of Artificial Sequence: Synthetic oligonucleotide
  Target: LAMA2; (+) strand; PAM type: YTN; PAM sequence: TTA
ctgctttcagcagacattca

SEQ ID NO: 318726 - DNA, 20 bp, Artificial Sequence
  Description of Artificial Sequence: Synthetic oligonucleotide
  Target: LAMA2; (+) strand; PAM type: YTN; PAM sequence: CTG
ctttcagcagacattcaacc

SEQ ID NO: 318727 - DNA, 20 bp, Artificial Sequence
  Description of Artificial Sequence: Synthetic oligonucleotide
  Target: LAMA2; (+) strand; PAM type: YTN; PAM sequence: CTT
tcagcagacattcaacccac

SEQ ID NO: 318728 - DNA, 20 bp, Artificial Sequence
  Description of Artificial Sequence: Synthetic oligonucleotide
  Target: LAMA2; (+) strand; PAM type: YTN; PAM sequence: TTT
cagcagacattcaacccaca

SEQ ID NO: 318729 - DNA, 20 bp, Artificial Sequence
  Description of Artificial Sequence: Synthetic oligonucleotide
  Target: LAMA2; (+) strand; PAM type: YTN; PAM sequence: TTC
agcagacattcaacccacag

SEQ ID NO: 318730 - DNA, 20 bp, Artificial Sequence
  Description of Artificial Sequence: Synthetic oligonucleotide
  Target: LAMA2; (+) strand; PAM type: YTN; PAM sequence: TTC
aacccacaggtcccaggtcg

SEQ ID NO: 318731 - DNA, 20 bp, Artificial Sequence
  Description of Artificial Sequence: Synthetic oligonucleotide
  Target: LAMA2; (+) strand; PAM type: YTN; PAM sequence: TTG
actcattctcatctcttaat

SEQ ID NO: 318732 - DNA, 20 bp, Artificial Sequence
  Description of Artificial Sequence: Synthetic oligonucleotide
  Target: LAMA2; (+) strand; PAM type: YTN; PAM sequence: CTC
attctcatctcttaattgct

SEQ ID NO: 318733 - DNA, 20 bp, Artificial Sequence
  Description of Artificial Sequence: Synthetic oligonucleotide
  Target: LAMA2; (+) strand; PAM type: YTN; PAM sequence: TTC
tcatctcttaattgctagcc

SEQ ID NO: 318734 - DNA, 20 bp, Artificial Sequence
  Description of Artificial Sequence: Synthetic oligonucleotide
  Target: LAMA2; (+) strand; PAM type: YTN; PAM sequence: CTC
atctcttaattgctagccag

SEQ ID NO: 318735 - DNA, 20 bp, Artificial Sequence
  Description of Artificial Sequence: Synthetic oligonucleotide
  Target: LAMA2; (+) strand; PAM type: YTN; PAM sequence: CTC
ttaattgctagccaggcctt

SEQ ID NO: 318736 - DNA, 20 bp, Artificial Sequence
  Description of Artificial Sequence: Synthetic oligonucleotide
  Target: LAMA2; (+) strand; PAM type: YTN; PAM sequence: CTT
aattgctagccaggcctttg

SEQ ID NO: 318737 - DNA, 20 bp, Artificial Sequence
  Description of Artificial Sequence: Synthetic oligonucleotide
  Target: LAMA2; (+) strand; PAM type: YTN; PAM sequence: TTA
attgctagccaggcctttgg

SEQ ID NO: 318738 - DNA, 20 bp, Artificial Sequence
  Description of Artificial Sequence: Synthetic oligonucleotide
  Target: LAMA2; (+) strand; PAM type: YTN; PAM sequence: TTG
ctagccaggcctttgggaag

SEQ ID NO: 318739 - DNA, 20 bp, Artificial Sequence
  Description of Artificial Sequence: Synthetic oligonucleotide
  Target: LAMA2; (+) strand; PAM type: YTN; PAM sequence: CTA
gccaggcctttgggaagccg

SEQ ID NO: 318740 - DNA, 20 bp, Artificial Sequence
  Description of Artificial Sequence: Synthetic oligonucleotide
  Target: LAMA2; (+) strand; PAM type: YTN; PAM sequence: CTT
tgggaagccgttctctagtt

SEQ ID NO: 318741 - DNA, 20 bp, Artificial Sequence
  Description of Artificial Sequence: Synthetic oligonucleotide
  Target: LAMA2; (+) strand; PAM type: YTN; PAM sequence: TTT
gggaagccgttctctagttc

SEQ ID NO: 318742 - DNA, 20 bp, Artificial Sequence
  Description of Artificial Sequence: Synthetic oligonucleotide
  Target: LAMA2; (+) strand; PAM type: YTN; PAM sequence: TTG
ggaagccgttctctagttcc

SEQ ID NO: 318743 - DNA, 20 bp, Artificial Sequence
  Description of Artificial Sequence: Synthetic oligonucleotide
  Target: LAMA2; (+) strand; PAM type: YTN; PAM sequence: TTC
tctagttcctactcagttag

SEQ ID NO: 318744 - DNA, 20 bp, Artificial Sequence
  Description of Artificial Sequence: Synthetic oligonucleotide
  Target: LAMA2; (+) strand; PAM type: YTN; PAM sequence: CTC
tagttcctactcagttaggc

SEQ ID NO: 318745 - DNA, 20 bp, Artificial Sequence
  Description of Artificial Sequence: Synthetic oligonucleotide
  Target: LAMA2; (+) strand; PAM type: YTN; PAM sequence: CTA
gttcctactcagttaggcac

SEQ ID NO: 318746 - DNA, 20 bp, Artificial Sequence
  Description of Artificial Sequence: Synthetic oligonucleotide
  Target: LAMA2; (+) strand; PAM type: YTN; PAM sequence: TTC
ctactcagttaggcacccaa

SEQ ID NO: 318747 - DNA, 20 bp, Artificial Sequence
  Description of Artificial Sequence: Synthetic oligonucleotide
  Target: LAMA2; (+) strand; PAM type: YTN; PAM sequence: CTA
ctcagttaggcacccaacct

SEQ ID NO: 318748 - DNA, 20 bp, Artificial Sequence
  Description of Artificial Sequence: Synthetic oligonucleotide
  Target: LAMA2; (+) strand; PAM type: YTN; PAM sequence: CTC
agttaggcacccaacctctc

SEQ ID NO: 318749 - DNA, 20 bp, Artificial Sequence
  Description of Artificial Sequence: Synthetic oligonucleotide
  Target: LAMA2; (+) strand; PAM type: YTN; PAM sequence: TTA
ggcacccaacctctctgctc

SEQ ID NO: 318750 - DNA, 20 bp, Artificial Sequence
  Description of Artificial Sequence: Synthetic oligonucleotide
  Target: LAMA2; (+) strand; PAM type: YTN; PAM sequence: CTC
tctgctctcatagcacatag

SEQ ID NO: 318751 - DNA, 20 bp, Artificial Sequence
  Description of Artificial Sequence: Synthetic oligonucleotide
  Target: LAMA2; (+) strand; PAM type: YTN; PAM sequence: CTC
tgctctcatagcacataggc

SEQ ID NO: 318752 - DNA, 20 bp, Artificial Sequence
  Description of Artificial Sequence: Synthetic oligonucleotide
  Target: LAMA2; (+) strand; PAM type: YTN; PAM sequence: CTG
ctctcatagcacataggctg

SEQ ID NO: 318753 - DNA, 20 bp, Artificial Sequence
  Description of Artificial Sequence: Synthetic oligonucleotide
  Target: LAMA2; (+) strand; PAM type: YTN; PAM sequence: CTC
tcatagcacataggctgtcc

SEQ ID NO: 318754 - DNA, 20 bp, Artificial Sequence
  Description of Artificial Sequence: Synthetic oligonucleotide
  Target: LAMA2; (+) strand; PAM type: YTN; PAM sequence: CTC
atagcacataggctgtccct

SEQ ID NO: 318755 - DNA, 20 bp, Artificial Sequence
  Description of Artificial Sequence: Synthetic oligonucleotide
  Target: LAMA2; (+) strand; PAM type: YTN; PAM sequence: CTG
tccctctaacatagcatgag

SEQ ID NO: 318756 - DNA, 20 bp, Artificial Sequence
  Description of Artificial Sequence: Synthetic oligonucleotide
  Target: LAMA2; (+) strand; PAM type: YTN; PAM sequence: CTC
taacatagcatgagtcacac

SEQ ID NO: 318757 - DNA, 20 bp, Artificial Sequence
  Description of Artificial Sequence: Synthetic oligonucleotide
  Target: LAMA2; (+) strand; PAM type: YTN; PAM sequence: CTA
acatagcatgagtcacacgc

SEQ ID NO: 318758 - DNA, 20 bp, Artificial Sequence
  Description of Artificial Sequence: Synthetic oligonucleotide
  Target: LAMA2; (+) strand; PAM type: YTN; PAM sequence: CTT
tccaaactggtgtttacctg

SEQ ID NO: 318759 - DNA, 20 bp, Artificial Sequence
  Description of Artificial Sequence: Synthetic oligonucleotide
  Target: LAMA2; (+) strand; PAM type: YTN; PAM sequence: TTT
ccaaactggtgtttacctgc

SEQ ID NO: 318760 - DNA, 20 bp, Artificial Sequence
  Description of Artificial Sequence: Synthetic oligonucleotide
  Target: LAMA2; (+) strand; PAM type: YTN; PAM sequence: TTC
caaactggtgtttacctgct

SEQ ID NO: 318761 - DNA, 20 bp, Artificial Sequence
  Description of Artificial Sequence: Synthetic oligonucleotide
  Target: LAMA2; (+) strand; PAM type: YTN; PAM sequence: CTG
gtgtttacctgcttgtcttc

SEQ ID NO: 318762 - DNA, 20 bp, Artificial Sequence
  Description of Artificial Sequence: Synthetic oligonucleotide
  Target: LAMA2; (+) strand; PAM type: YTN; PAM sequence: TTT
acctgcttgtcttctttact

SEQ ID NO: 318763 - DNA, 20 bp, Artificial Sequence
  Description of Artificial Sequence: Synthetic oligonucleotide
  Target: LAMA2; (+) strand; PAM type: YTN; PAM sequence: TTA
cctgcttgtcttctttactg

SEQ ID NO: 318764 - DNA, 20 bp, Artificial Sequence
  Description of Artificial Sequence: Synthetic oligonucleotide
  Target: LAMA2; (+) strand; PAM type: YTN; PAM sequence: CTG
cttgtcttctttactgcatt

SEQ ID NO: 318765 - DNA, 20 bp, Artificial Sequence
  Description of Artificial Sequence: Synthetic oligonucleotide
  Target: LAMA2; (+) strand; PAM type: YTN; PAM sequence: CTT
gtcttctttactgcattgct

SEQ ID NO: 318766 - DNA, 20 bp, Artificial Sequence
  Description of Artificial Sequence: Synthetic oligonucleotide
  Target: LAMA2; (+) strand; PAM type: YTN; PAM sequence: TTG
tcttctttactgcattgctc

SEQ ID NO: 318767 - DNA, 20 bp, Artificial Sequence
  Description of Artificial Sequence: Synthetic oligonucleotide
  Target: LAMA2; (+) strand; PAM type: YTN; PAM sequence: CTT
ctttactgcattgctccttg

SEQ ID NO: 318768 - DNA, 20 bp, Artificial Sequence
  Description of Artificial Sequence: Synthetic oligonucleotide
  Target: LAMA2; (+) strand; PAM type: YTN; PAM sequence: TTC
tttactgcattgctccttga

SEQ ID NO: 318769 - DNA, 20 bp, Artificial Sequence
  Description of Artificial Sequence: Synthetic oligonucleotide
  Target: LAMA2; (+) strand; PAM type: YTN; PAM sequence: CTT
tactgcattgctccttgagg

SEQ ID NO: 318770 - DNA, 20 bp, Artificial Sequence
  Description of Artificial Sequence: Synthetic oligonucleotide
  Target: LAMA2; (+) strand; PAM type: YTN; PAM sequence: TTT
actgcattgctccttgaggt

SEQ ID NO: 318771 - DNA, 20 bp, Artificial Sequence
  Description of Artificial Sequence: Synthetic oligonucleotide
  Target: LAMA2; (+) strand; PAM type: YTN; PAM sequence: TTA
ctgcattgctccttgaggta

SEQ ID NO: 318772 - DNA, 20 bp, Artificial Sequence
  Description of Artificial Sequence: Synthetic oligonucleotide
  Target: LAMA2; (+) strand; PAM type: YTN; PAM sequence: CTG
cattgctccttgaggtagca

SEQ ID NO: 318773 - DNA, 20 bp, Artificial Sequence
  Description of Artificial Sequence: Synthetic oligonucleotide
  Target: LAMA2; (+) strand; PAM type: YTN; PAM sequence: TTG
ctccttgaggtagcaaggat

SEQ ID NO: 318774 - DNA, 20 bp, Artificial Sequence
  Description of Artificial Sequence: Synthetic oligonucleotide
  Target: LAMA2; (+) strand; PAM type: YTN; PAM sequence: CTC
cttgaggtagcaaggatgtc

SEQ ID NO: 318775 - DNA, 20 bp, Artificial Sequence
  Description of Artificial Sequence: Synthetic oligonucleotide
  Target: LAMA2; (+) strand; PAM type: YTN; PAM sequence: CTT
gaggtagcaaggatgtcttc

SEQ ID NO: 318776 - DNA, 20 bp, Artificial Sequence
  Description of Artificial Sequence: Synthetic oligonucleotide
  Target: LAMA2; (+) strand; PAM type: YTN; PAM sequence: TTG
aggtagcaaggatgtcttct

SEQ ID NO: 318777 - DNA, 20 bp, Artificial Sequence
  Description of Artificial Sequence: Synthetic oligonucleotide
  Target: LAMA2; (+) strand; PAM type: YTN; PAM sequence: CTT
ctttattagcttttttatac

SEQ ID NO: 318778 - DNA, 20 bp, Artificial Sequence
  Description of Artificial Sequence: Synthetic oligonucleotide
  Target: LAMA2; (+) strand; PAM type: YTN; PAM sequence: TTC
tttattagcttttttatact

SEQ ID NO: 318779 - DNA, 20 bp, Artificial Sequence
  Description of Artificial Sequence: Synthetic oligonucleotide
  Target: LAMA2; (+) strand; PAM type: YTN; PAM sequence: CTT
tattagcttttttatactga

SEQ ID NO: 318780 - DNA, 20 bp, Artificial Sequence
  Description of Artificial Sequence: Synthetic oligonucleotide
  Target: LAMA2; (+) strand; PAM type: YTN; PAM sequence: TTT
attagcttttttatactgag

SEQ ID NO: 318781 - DNA, 20 bp, Artificial Sequence
  Description of Artificial Sequence: Synthetic oligonucleotide
  Target: LAMA2; (+) strand; PAM type: YTN; PAM sequence: TTA
ttagcttttttatactgaga

SEQ ID NO: 318782 - DNA, 20 bp, Artificial Sequence
  Description of Artificial Sequence: Synthetic oligonucleotide
  Target: LAMA2; (+) strand; PAM type: YTN; PAM sequence: TTA
gcttttttatactgagaaaa

SEQ ID NO: 318783 - DNA, 20 bp, Artificial Sequence
  Description of Artificial Sequence: Synthetic oligonucleotide
  Target: LAMA2; (+) strand; PAM type: YTN; PAM sequence: CTT
ttttatactgagaaaatttt

SEQ ID NO: 318784 - DNA, 20 bp, Artificial Sequence
  Description of Artificial Sequence: Synthetic oligonucleotide
  Target: LAMA2; (+) strand; PAM type: YTN; PAM sequence: TTT
tttatactgagaaaatttta

SEQ ID NO: 318785 - DNA, 20 bp, Artificial Sequence
  Description of Artificial Sequence: Synthetic oligonucleotide
  Target: LAMA2; (+) strand; PAM type: YTN; PAM sequence: TTT
ttatactgagaaaattttaa

SEQ ID NO: 318786 - DNA, 20 bp, Artificial Sequence
  Description of Artificial Sequence: Synthetic oligonucleotide
  Target: LAMA2; (+) strand; PAM type: YTN; PAM sequence: TTT
tatactgagaaaattttaaa

SEQ ID NO: 318787 - DNA, 20 bp, Artificial Sequence
  Description of Artificial Sequence: Synthetic oligonucleotide
  Target: LAMA2; (+) strand; PAM type: YTN; PAM sequence: TTT
atactgagaaaattttaaaa

SEQ ID NO: 318788 - DNA, 20 bp, Artificial Sequence
  Description of Artificial Sequence: Synthetic oligonucleotide
  Target: LAMA2; (+) strand; PAM type: YTN; PAM sequence: TTA
tactgagaaaattttaaaat

SEQ ID NO: 318789 - DNA, 20 bp, Artificial Sequence
  Description of Artificial Sequence: Synthetic oligonucleotide
  Target: LAMA2; (+) strand; PAM type: YTN; PAM sequence: CTG
agaaaattttaaaatacagg

SEQ ID NO: 318790 - DNA, 20 bp, Artificial Sequence
  Description of Artificial Sequence: Synthetic oligonucleotide
  Target: LAMA2; (+) strand; PAM type: YTN; PAM sequence: TTT
taaaatacaggaaaagaaac

SEQ ID NO: 318791 - DNA, 20 bp, Artificial Sequence
  Description of Artificial Sequence: Synthetic oligonucleotide
  Target: LAMA2; (+) strand; PAM type: YTN; PAM sequence: TTT
aaaatacaggaaaagaaaca

SEQ ID NO: 318792 - DNA, 20 bp, Artificial Sequence
  Description of Artificial Sequence: Synthetic oligonucleotide
  Target: LAMA2; (+) strand; PAM type: YTN; PAM sequence: TTA
aaatacaggaaaagaaacat

SEQ ID NO: 318793 - DNA, 20 bp, Artificial Sequence
  Description of Artificial Sequence: Synthetic oligonucleotide
  Target: LAMA2; (+) strand; PAM type: YTN; PAM sequence: TTC
ctaactcatagaaataactg

SEQ ID NO: 318794 - DNA, 20 bp, Artificial Sequence
  Description of Artificial Sequence: Synthetic oligonucleotide
  Target: LAMA2; (+) strand; PAM type: YTN; PAM sequence: CTA
actcatagaaataactgttg

SEQ ID NO: 318795 - DNA, 20 bp, Artificial Sequence
  Description of Artificial Sequence: Synthetic oligonucleotide
  Target: LAMA2; (+) strand; PAM type: YTN; PAM sequence: CTC
atagaaataactgttgacat

SEQ ID NO: 318796 - DNA, 20 bp, Artificial Sequence
  Description of Artificial Sequence: Synthetic oligonucleotide
  Target: LAMA2; (+) strand; PAM type: YTN; PAM sequence: CTG
ttgacattttgtcatgtttt

SEQ ID NO: 318797 - DNA, 20 bp, Artificial Sequence
  Description of Artificial Sequence: Synthetic oligonucleotide
  Target: LAMA2; (+) strand; PAM type: YTN; PAM sequence: TTG
acattttgtcatgttttctt

SEQ ID NO: 318798 - DNA, 20 bp, Artificial Sequence
  Description of Artificial Sequence: Synthetic oligonucleotide
  Target: LAMA2; (+) strand; PAM type: YTN; PAM sequence: TTT
tgtcatgttttcttttctta

SEQ ID NO: 318799 - DNA, 20 bp, Artificial Sequence
  Description of Artificial Sequence: Synthetic oligonucleotide
  Target: LAMA2; (+) strand; PAM type: YTN; PAM sequence: TTT
gtcatgttttcttttcttac

SEQ ID NO: 318800 - DNA, 20 bp, Artificial Sequence
  Description of Artificial Sequence: Synthetic oligonucleotide
  Target: LAMA2; (+) strand; PAM type: YTN; PAM sequence: TTG
tcatgttttcttttcttact

SEQ ID NO: 318801 - DNA, 20 bp, Artificial Sequence
  Description of Artificial Sequence: Synthetic oligonucleotide
  Target: LAMA2; (+) strand; PAM type: YTN; PAM sequence: TTT
tcttttcttactagagaaag

SEQ ID NO: 318802 - DNA, 20 bp, Artificial Sequence
  Description of Artificial Sequence: Synthetic oligonucleotide
  Target: LAMA2; (+) strand; PAM type: YTN; PAM sequence: TTT
cttttcttactagagaaaga

SEQ ID NO: 318803 - DNA, 20 bp, Artificial Sequence
  Description of Artificial Sequence: Synthetic oligonucleotide
  Target: LAMA2; (+) strand; PAM type: YTN; PAM sequence: TTC
ttttcttactagagaaagaa

SEQ ID NO: 318804 - DNA, 20 bp, Artificial Sequence
  Description of Artificial Sequence: Synthetic oligonucleotide
  Target: LAMA2; (+) strand; PAM type: YTN; PAM sequence: CTT
ttcttactagagaaagaaaa

SEQ ID NO: 318805 - DNA, 20 bp, Artificial Sequence
  Description of Artificial Sequence: Synthetic oligonucleotide
  Target: LAMA2; (+) strand; PAM type: YTN; PAM sequence: TTT
tcttactagagaaagaaaat

SEQ ID NO: 318806 - DNA, 20 bp, Artificial Sequence
  Description of Artificial Sequence: Synthetic oligonucleotide
  Target: LAMA2; (+) strand; PAM type: YTN; PAM sequence: TTT
cttactagagaaagaaaatg

SEQ ID NO: 318807 - DNA, 20 bp, Artificial Sequence
  Description of Artificial Sequence: Synthetic oligonucleotide
  Target: LAMA2; (+) strand; PAM type: YTN; PAM sequence: TTC
ttactagagaaagaaaatga

SEQ ID NO: 318808 - DNA, 20 bp, Artificial Sequence
  Description of Artificial Sequence: Synthetic oligonucleotide
  Target: LAMA2; (+) strand; PAM type: YTN; PAM sequence: CTT
actagagaaagaaaatgaga

SEQ ID NO: 318809 - DNA, 20 bp, Artificial Sequence
  Description of Artificial Sequence: Synthetic oligonucleotide
  Target: LAMA2; (+) strand; PAM type: YTN; PAM sequence: TTA
ctagagaaagaaaatgagat

SEQ ID NO: 318810 - DNA, 20 bp, Artificial Sequence
  Description of Artificial Sequence: Synthetic oligonucleotide
  Target: LAMA2; (+) strand; PAM type: YTN; PAM sequence: CTA
gagaaagaaaatgagataaa

SEQ ID NO: 318811 - DNA, 20 bp, Artificial Sequence
  Description of Artificial Sequence: Synthetic oligonucleotide
  Target: LAMA2; (+) strand; PAM type: YTN; PAM sequence: CTA
acctgcatttctatcctact

SEQ ID NO: 318812 - DNA, 20 bp, Artificial Sequence
  Description of Artificial Sequence: Synthetic oligonucleotide
  Target: LAMA2; (+) strand; PAM type: YTN; PAM sequence: CTG
catttctatcctacttttct

SEQ ID NO: 318813 - DNA, 20 bp, Artificial Sequence
  Description of Artificial Sequence: Synthetic oligonucleotide
  Target: LAMA2; (+) strand; PAM type: YTN; PAM sequence: TTT
ctatcctacttttctgcctg

SEQ ID NO: 318814 - DNA, 20 bp, Artificial Sequence
  Description of Artificial Sequence: Synthetic oligonucleotide
  Target: LAMA2; (+) strand; PAM type: YTN; PAM sequence: TTC
tatcctacttttctgcctgt

SEQ ID NO: 318815 - DNA, 20 bp, Artificial Sequence
  Description of Artificial Sequence: Synthetic oligonucleotide
  Target: LAMA2; (+) strand; PAM type: YTN; PAM sequence: CTA
tcctacttttctgcctgtct

SEQ ID NO: 318816 - DNA, 20 bp, Artificial Sequence
  Description of Artificial Sequence: Synthetic oligonucleotide
  Target: LAMA2; (+) strand; PAM type: YTN; PAM sequence: CTA
cttttctgcctgtcttagag

SEQ ID NO: 318817 - DNA, 20 bp, Artificial Sequence
  Description of Artificial Sequence: Synthetic oligonucleotide
  Target: LAMA2; (+) strand; PAM type: YTN; PAM sequence: CTT
ttctgcctgtcttagaggca

SEQ ID NO: 318818 - DNA, 20 bp, Artificial Sequence
  Description of Artificial Sequence: Synthetic oligonucleotide
  Target: LAMA2; (+) strand; PAM type: YTN; PAM sequence: TTT
tctgcctgtcttagaggcaa

SEQ ID NO: 318819 - DNA, 20 bp, Artificial Sequence
  Description of Artificial Sequence: Synthetic oligonucleotide
  Target: LAMA2; (+) strand; PAM type: YTN; PAM sequence: TTT
ctgcctgtcttagaggcaaa

SEQ ID NO: 318820 - DNA, 20 bp, Artificial Sequence
  Description of Artificial Sequence: Synthetic oligonucleotide
  Target: LAMA2; (+) strand; PAM type: YTN; PAM sequence: TTC
tgcctgtcttagaggcaaac

SEQ ID NO: 318821 - DNA, 20 bp, Artificial Sequence
  Description of Artificial Sequence: Synthetic oligonucleotide
  Target: LAMA2; (+) strand; PAM type: YTN; PAM sequence: CTG
cctgtcttagaggcaaacac

SEQ ID NO: 318822 - DNA, 20 bp, Artificial Sequence
  Description of Artificial Sequence: Synthetic oligonucleotide
  Target: LAMA2; (+) strand; PAM type: YTN; PAM sequence: CTG
tcttagaggcaaacaccaac

SEQ ID NO: 318823 - DNA, 20 bp, Artificial Sequence
  Description of Artificial Sequence: Synthetic oligonucleotide
  Target: LAMA2; (+) strand; PAM type: YTN; PAM sequence: CTT
agaggcaaacaccaacacag

SEQ ID NO: 318824 - DNA, 20 bp, Artificial Sequence
  Description of Artificial Sequence: Synthetic oligonucleotide
  Target: LAMA2; (+) strand; PAM type: YTN; PAM sequence: TTA
gaggcaaacaccaacacagg

SEQ ID NO: 318825 - DNA, 20 bp, Artificial Sequence
  Description of Artificial Sequence: Synthetic oligonucleotide
  Target: LAMA2; (+) strand; PAM type: YTN; PAM sequence: TTT
gttgtcaatttccttcccat

SEQ ID NO: 318826 - DNA, 20 bp, Artificial Sequence
  Description of Artificial Sequence: Synthetic oligonucleotide
  Target: LAMA2; (+) strand; PAM type: YTN; PAM sequence: TTG
ttgtcaatttccttcccatt

SEQ ID NO: 318827 - DNA, 20 bp, Artificial Sequence
  Description of Artificial Sequence: Synthetic oligonucleotide
  Target: LAMA2; (+) strand; PAM type: YTN; PAM sequence: TTG
tcaatttccttcccattaaa

SEQ ID NO: 318828 - DNA, 20 bp, Artificial Sequence
  Description of Artificial Sequence: Synthetic oligonucleotide
  Target: LAMA2; (+) strand; PAM type: YTN; PAM sequence: TTT
ccttcccattaaaaatactt

SEQ ID NO: 318829 - DNA, 20 bp, Artificial Sequence
  Description of Artificial Sequence: Synthetic oligonucleotide
  Target: LAMA2; (+) strand; PAM type: YTN; PAM sequence: TTC
cttcccattaaaaatacttt

SEQ ID NO: 318830 - DNA, 20 bp, Artificial Sequence
  Description of Artificial Sequence: Synthetic oligonucleotide
  Target: LAMA2; (+) strand; PAM type: YTN; PAM sequence: CTT
cccattaaaaatacttttac

SEQ ID NO: 318831 - DNA, 20 bp, Artificial Sequence
  Description of Artificial Sequence: Synthetic oligonucleotide
  Target: LAMA2; (+) strand; PAM type: YTN; PAM sequence: TTC
ccattaaaaatacttttaca

SEQ ID NO: 318832 - DNA, 20 bp, Artificial Sequence
  Description of Artificial Sequence: Synthetic oligonucleotide
  Target: LAMA2; (+) strand; PAM type: YTN; PAM sequence: TTA
aaaatacttttacataccta

SEQ ID NO: 318833 - DNA, 20 bp, Artificial Sequence
  Description of Artificial Sequence: Synthetic oligonucleotide
  Target: LAMA2; (+) strand; PAM type: YTN; PAM sequence: CTT
ttacatacctactgtgtatc

SEQ ID NO: 318834 - DNA, 20 bp, Artificial Sequence
  Description of Artificial Sequence: Synthetic oligonucleotide
  Target: LAMA2; (+) strand; PAM type: YTN; PAM sequence: TTT
tacatacctactgtgtatct

SEQ ID NO: 318835 - DNA, 20 bp, Artificial Sequence
  Description of Artificial Sequence: Synthetic oligonucleotide
  Target: LAMA2; (+) strand; PAM type: YTN; PAM sequence: TTT
acatacctactgtgtatcta

SEQ ID NO: 318836 - DNA, 20 bp, Artificial Sequence
  Description of Artificial Sequence: Synthetic oligonucleotide
  Target: LAMA2; (+) strand; PAM type: YTN; PAM sequence: TTA
catacctactgtgtatctat

SEQ ID NO: 318837 - DNA, 20 bp, Artificial Sequence
  Description of Artificial Sequence: Synthetic oligonucleotide
  Target: LAMA2; (+) strand; PAM type: YTN; PAM sequence: CTA
ctgtgtatctatagccaaca

SEQ ID NO: 318838 - DNA, 20 bp, Artificial Sequence
  Description of Artificial Sequence: Synthetic oligonucleotide
  Target: LAMA2; (+) strand; PAM type: YTN; PAM sequence: CTG
tgtatctatagccaacagat

SEQ ID NO: 318839 - DNA, 20 bp, Artificial Sequence
  Description of Artificial Sequence: Synthetic oligonucleotide
  Target: LAMA2; (+) strand; PAM type: YTN; PAM sequence: CTA
tagccaacagatcttatatt

SEQ ID NO: 318840 - DNA, 20 bp, Artificial Sequence
  Description of Artificial Sequence: Synthetic oligonucleotide
  Target: LAMA2; (+) strand; PAM type: YTN; PAM sequence: CTT
atatttatgtggtgtttgcg

SEQ ID NO: 318841 - DNA, 20 bp, Artificial Sequence
  Description of Artificial Sequence: Synthetic oligonucleotide
  Target: LAMA2; (+) strand; PAM type: YTN; PAM sequence: TTA
tatttatgtggtgtttgcgt

SEQ ID NO: 318842 - DNA, 20 bp, Artificial Sequence
  Description of Artificial Sequence: Synthetic oligonucleotide
  Target: LAMA2; (+) strand; PAM type: YTN; PAM sequence: TTT
atgtggtgtttgcgtttttc

SEQ ID NO: 318843 - DNA, 20 bp, Artificial Sequence
  Description of Artificial Sequence: Synthetic oligonucleotide
  Target: LAMA2; (+) strand; PAM type: YTN; PAM sequence: TTA
tgtggtgtttgcgtttttcc

SEQ ID NO: 318844 - DNA, 20 bp, Artificial Sequence
  Description of Artificial Sequence: Synthetic oligonucleotide
  Target: LAMA2; (+) strand; PAM type: YTN; PAM sequence: TTT
gcgtttttccaattttagaa

SEQ ID NO: 318845 - DNA, 20 bp, Artificial Sequence
  Description of Artificial Sequence: Synthetic oligonucleotide
  Target: LAMA2; (+) strand; PAM type: YTN; PAM sequence: TTG
cgtttttccaattttagaaa

SEQ ID NO: 318846 - DNA, 20 bp, Artificial Sequence
  Description of Artificial Sequence: Synthetic oligonucleotide
  Target: LAMA2; (+) strand; PAM type: YTN; PAM sequence: TTT
ttccaattttagaaatggtt

SEQ ID NO: 318847 - DNA, 20 bp, Artificial Sequence
  Description of Artificial Sequence: Synthetic oligonucleotide
  Target: LAMA2; (+) strand; PAM type: YTN; PAM sequence: TTT
tccaattttagaaatggttt

SEQ ID NO: 318848 - DNA, 20 bp, Artificial Sequence
  Description of Artificial Sequence: Synthetic oligonucleotide
  Target: LAMA2; (+) strand; PAM type: YTN; PAM sequence: TTT
ccaattttagaaatggtttc

SEQ ID NO: 318849 - DNA, 20 bp, Artificial Sequence
  Description of Artificial Sequence: Synthetic oligonucleotide
  Target: LAMA2; (+) strand; PAM type: YTN; PAM sequence: TTC
caattttagaaatggtttcc

SEQ ID NO: 318850 - DNA, 20 bp, Artificial Sequence
  Description of Artificial Sequence: Synthetic oligonucleotide
  Target: LAMA2; (+) strand; PAM type: YTN; PAM sequence: TTT
tagaaatggtttcctacctt

SEQ ID NO: 318851 - DNA, 20 bp, Artificial Sequence
  Description of Artificial Sequence: Synthetic oligonucleotide
  Target: LAMA2; (+) strand; PAM type: YTN; PAM sequence: TTT
agaaatggtttcctaccttt

SEQ ID NO: 318852 - DNA, 20 bp, Artificial Sequence
  Description of Artificial Sequence: Synthetic oligonucleotide
  Target: LAMA2; (+) strand; PAM type: YTN; PAM sequence: TTA
gaaatggtttcctacctttc

SEQ ID NO: 318853 - DNA, 20 bp, Artificial Sequence
  Description of Artificial Sequence: Synthetic oligonucleotide
  Target: LAMA2; (+) strand; PAM type: YTN; PAM sequence: TTT
cctacctttcttaacctacg

SEQ ID NO: 318854 - DNA, 20 bp, Artificial Sequence
  Description of Artificial Sequence: Synthetic oligonucleotide
  Target: LAMA2; (+) strand; PAM type: YTN; PAM sequence: TTC
ctacctttcttaacctacga

SEQ ID NO: 318855 - DNA, 20 bp, Artificial Sequence
  Description of Artificial Sequence: Synthetic oligonucleotide
  Target: LAMA2; (+) strand; PAM type: YTN; PAM sequence: CTA
cctttcttaacctacgactt

SEQ ID NO: 318856 - DNA, 20 bp, Artificial Sequence
  Description of Artificial Sequence: Synthetic oligonucleotide
  Target: LAMA2; (+) strand; PAM type: YTN; PAM sequence: CTT
tcttaacctacgacttctga

SEQ ID NO: 318857 - DNA, 20 bp, Artificial Sequence
  Description of Artificial Sequence: Synthetic oligonucleotide
  Target: LAMA2; (+) strand; PAM type: YTN; PAM sequence: TTT
cttaacctacgacttctgac

SEQ ID NO: 318858 - DNA, 20 bp, Artificial Sequence
  Description of Artificial Sequence: Synthetic oligonucleotide
  Target: LAMA2; (+) strand; PAM type: YTN; PAM sequence: TTC
ttaacctacgacttctgaca

SEQ ID NO: 318859 - DNA, 20 bp, Artificial Sequence
  Description of Artificial Sequence: Synthetic oligonucleotide
  Target: LAMA2; (+) strand; PAM type: YTN; PAM sequence: CTT
aacctacgacttctgacaat

SEQ ID NO: 318860 - DNA, 20 bp, Artificial Sequence
  Description of Artificial Sequence: Synthetic oligonucleotide
  Target: LAMA2; (+) strand; PAM type: YTN; PAM sequence: TTA
acctacgacttctgacaatt

SEQ ID NO: 318861 - DNA, 20 bp, Artificial Sequence
  Description of Artificial Sequence: Synthetic oligonucleotide
  Target: LAMA2; (+) strand; PAM type: YTN; PAM sequence: CTA
cgacttctgacaattttatt

SEQ ID NO: 318862 - DNA, 20 bp, Artificial Sequence
  Description of Artificial Sequence: Synthetic oligonucleotide
  Target: LAMA2; (+) strand; PAM type: YTN; PAM sequence: CTT
ctgacaattttatttcaaaa

SEQ ID NO: 318863 - DNA, 20 bp, Artificial Sequence
  Description of Artificial Sequence: Synthetic oligonucleotide
  Target: LAMA2; (+) strand; PAM type: YTN; PAM sequence: TTC
tgacaattttatttcaaaat

SEQ ID NO: 318864 - DNA, 20 bp, Artificial Sequence
  Description of Artificial Sequence: Synthetic oligonucleotide
  Target: LAMA2; (+) strand; PAM type: YTN; PAM sequence: CTG
acaattttatttcaaaatta

SEQ ID NO: 318865 - DNA, 20 bp, Artificial Sequence
  Description of Artificial Sequence: Synthetic oligonucleotide
  Target: LAMA2; (+) strand; PAM type: YTN; PAM sequence: TTT
tatttcaaaattatgccaat

SEQ ID NO: 318866 - DNA, 20 bp, Artificial Sequence
  Description of Artificial Sequence: Synthetic oligonucleotide
  Target: LAMA2; (+) strand; PAM type: YTN; PAM sequence: TTT
atttcaaaattatgccaata

SEQ ID NO: 318867 - DNA, 20 bp, Artificial Sequence
  Description of Artificial Sequence: Synthetic oligonucleotide
  Target: LAMA2; (+) strand; PAM type: YTN; PAM sequence: TTA
tttcaaaattatgccaatat

SEQ ID NO: 318868 - DNA, 20 bp, Artificial Sequence
  Description of Artificial Sequence: Synthetic oligonucleotide
  Target: LAMA2; (+) strand; PAM type: YTN; PAM sequence: TTT
caaaattatgccaatatgta

SEQ ID NO: 318869 - DNA, 20 bp, Artificial Sequence
  Description of Artificial Sequence: Synthetic oligonucleotide
  Target: LAMA2; (+) strand; PAM type: YTN; PAM sequence: TTC
aaaattatgccaatatgtat

SEQ ID NO: 318870 - DNA, 20 bp, Artificial Sequence
  Description of Artificial Sequence: Synthetic oligonucleotide
  Target: LAMA2; (+) strand; PAM type: YTN; PAM sequence: TTA
tgccaatatgtatagatctc

SEQ ID NO: 318871 - DNA, 20 bp, Artificial Sequence
  Description of Artificial Sequence: Synthetic oligonucleotide
  Target: LAMA2; (+) strand; PAM type: YTN; PAM sequence: CTC
aaaaacataacattgagtga

SEQ ID NO: 318872 - DNA, 20 bp, Artificial Sequence
  Description of Artificial Sequence: Synthetic oligonucleotide
  Target: LAMA2; (+) strand; PAM type: YTN; PAM sequence: TTG
agtgaatatgccaataggta

SEQ ID NO: 318873 - DNA, 20 bp, Artificial Sequence
  Description of Artificial Sequence: Synthetic oligonucleotide
  Target: LAMA2; (+) strand; PAM type: YTN; PAM sequence: TTT
aatttttgtcaattttatga

SEQ ID NO: 318874 - DNA, 20 bp, Artificial Sequence
  Description of Artificial Sequence: Synthetic oligonucleotide
  Target: LAMA2; (+) strand; PAM type: YTN; PAM sequence: TTA
atttttgtcaattttatgag

SEQ ID NO: 318875 - DNA, 20 bp, Artificial Sequence
  Description of Artificial Sequence: Synthetic oligonucleotide
  Target: LAMA2; (+) strand; PAM type: YTN; PAM sequence: TTT
ttgtcaattttatgagtgaa

SEQ ID NO: 318876 - DNA, 20 bp, Artificial Sequence
  Description of Artificial Sequence: Synthetic oligonucleotide
  Target: LAMA2; (+) strand; PAM type: YTN; PAM sequence: TTT
tgtcaattttatgagtgaaa

SEQ ID NO: 318877 - DNA, 20 bp, Artificial Sequence
  Description of Artificial Sequence: Synthetic oligonucleotide
  Target: LAMA2; (+) strand; PAM type: YTN; PAM sequence: TTT
gtcaattttatgagtgaaaa

SEQ ID NO: 318878 - DNA, 20 bp, Artificial Sequence
  Description of Artificial Sequence: Synthetic oligonucleotide
  Target: LAMA2; (+) strand; PAM type: YTN; PAM sequence: TTG
tcaattttatgagtgaaaat

SEQ ID NO: 318879 - DNA, 20 bp, Artificial Sequence
  Description of Artificial Sequence: Synthetic oligonucleotide
  Target: LAMA2; (+) strand; PAM type: YTN; PAM sequence: TTT
tatgagtgaaaattgtatat

SEQ ID NO: 318880 - DNA, 20 bp, Artificial Sequence
  Description of Artificial Sequence: Synthetic oligonucleotide
  Target: LAMA2; (+) strand; PAM type: YTN; PAM sequence: TTT
atgagtgaaaattgtatatc

SEQ ID NO: 318881 - DNA, 20 bp, Artificial Sequence
  Description of Artificial Sequence: Synthetic oligonucleotide
  Target: LAMA2; (+) strand; PAM type: YTN; PAM sequence: TTA
tgagtgaaaattgtatatca

SEQ ID NO: 318882 - DNA, 20 bp, Artificial Sequence
  Description of Artificial Sequence: Synthetic oligonucleotide
  Target: LAMA2; (+) strand; PAM type: YTN; PAM sequence: TTG
tatatcactgttgtttttat

SEQ ID NO: 318883 - DNA, 20 bp, Artificial Sequence
  Description of Artificial Sequence: Synthetic oligonucleotide
  Target: LAMA2; (+) strand; PAM type: YTN; PAM sequence: CTG
ttgtttttatttaccttttt

SEQ ID NO: 318884 - DNA, 20 bp, Artificial Sequence
  Description of Artificial Sequence: Synthetic oligonucleotide
  Target: LAMA2; (+) strand; PAM type: YTN; PAM sequence: TTG
tttttatttaccttttttta

SEQ ID NO: 318885 - DNA, 20 bp, Artificial Sequence
  Description of Artificial Sequence: Synthetic oligonucleotide
  Target: LAMA2; (+) strand; PAM type: YTN; PAM sequence: TTT
ttatttacctttttttacca

SEQ ID NO: 318886 - DNA, 20 bp, Artificial Sequence
  Description of Artificial Sequence: Synthetic oligonucleotide
  Target: LAMA2; (+) strand; PAM type: YTN; PAM sequence: TTT
tatttacctttttttaccag

SEQ ID NO: 318887 - DNA, 20 bp, Artificial Sequence
  Description of Artificial Sequence: Synthetic oligonucleotide
  Target: LAMA2; (+) strand; PAM type: YTN; PAM sequence: TTT
atttacctttttttaccagt

SEQ ID NO: 318888 - DNA, 20 bp, Artificial Sequence
  Description of Artificial Sequence: Synthetic oligonucleotide
  Target: LAMA2; (+) strand; PAM type: YTN; PAM sequence: TTA
tttacctttttttaccagtt

SEQ ID NO: 318889 - DNA, 20 bp, Artificial Sequence
  Description of Artificial Sequence: Synthetic oligonucleotide
  Target: LAMA2; (+) strand; PAM type: YTN; PAM sequence: TTT
acctttttttaccagttttt

SEQ ID NO: 318890 - DNA, 20 bp, Artificial Sequence
  Description of Artificial Sequence: Synthetic oligonucleotide
  Target: LAMA2; (+) strand; PAM type: YTN; PAM sequence: TTA
cctttttttaccagtttttt

SEQ ID NO: 318891 - DNA, 20 bp, Artificial Sequence
  Description of Artificial Sequence: Synthetic oligonucleotide
  Target: LAMA2; (+) strand; PAM type: YTN; PAM sequence: CTT
tttttaccagtttttttcca

SEQ ID NO: 318892 - DNA, 20 bp, Artificial Sequence
  Description of Artificial Sequence: Synthetic oligonucleotide
  Target: LAMA2; (+) strand; PAM type: YTN; PAM sequence: TTT
ttttaccagtttttttccag

SEQ ID NO: 318893 - DNA, 20 bp, Artificial Sequence
  Description of Artificial Sequence: Synthetic oligonucleotide
  Target: LAMA2; (+) strand; PAM type: YTN; PAM sequence: TTT
tttaccagtttttttccagt

SEQ ID NO: 318894 - DNA, 20 bp, Artificial Sequence
  Description of Artificial Sequence: Synthetic oligonucleotide
  Target: LAMA2; (+) strand; PAM type: YTN; PAM sequence: TTT
ttaccagtttttttccagtt

SEQ ID NO: 318895 - DNA, 20 bp, Artificial Sequence
  Description of Artificial Sequence: Synthetic oligonucleotide
  Target: LAMA2; (+) strand; PAM type: YTN; PAM sequence: TTT
taccagtttttttccagttt

SEQ ID NO: 318896 - DNA, 20 bp, Artificial Sequence
  Description of Artificial Sequence: Synthetic oligonucleotide
  Target: LAMA2; (+) strand; PAM type: YTN; PAM sequence: TTT
accagtttttttccagtttt

SEQ ID NO: 318897 - DNA, 20 bp, Artificial Sequence
  Description of Artificial Sequence: Synthetic oligonucleotide
  Target: LAMA2; (+) strand; PAM type: YTN; PAM sequence: TTA
ccagtttttttccagttttg

SEQ ID NO: 318898 - DNA, 20 bp, Artificial Sequence
  Description of Artificial Sequence: Synthetic oligonucleotide
  Target: LAMA2; (+) strand; PAM type: YTN; PAM sequence: TTT
ttttccagttttgttttatt

SEQ ID NO: 318899 - DNA, 20 bp, Artificial Sequence
  Description of Artificial Sequence: Synthetic oligonucleotide
  Target: LAMA2; (+) strand; PAM type: YTN; PAM sequence: TTT
tttccagttttgttttatta

SEQ ID NO: 318900 - DNA, 20 bp, Artificial Sequence
  Description of Artificial Sequence: Synthetic oligonucleotide
  Target: LAMA2; (+) strand; PAM type: YTN; PAM sequence: TTT
ttccagttttgttttattat

SEQ ID NO: 318901 - DNA, 20 bp, Artificial Sequence
  Description of Artificial Sequence: Synthetic oligonucleotide
  Target: LAMA2; (+) strand; PAM type: YTN; PAM sequence: TTT
tccagttttgttttattatt

SEQ ID NO: 318902 - DNA, 20 bp, Artificial Sequence
  Description of Artificial Sequence: Synthetic oligonucleotide
  Target: LAMA2; (+) strand; PAM type: YTN; PAM sequence: TTT
ccagttttgttttattatta

SEQ ID NO: 318903 - DNA, 20 bp, Artificial Sequence
  Description of Artificial Sequence: Synthetic oligonucleotide
  Target: LAMA2; (+) strand; PAM type: YTN; PAM sequence: TTC
cagttttgttttattattat

SEQ ID NO: 318904 - DNA, 20 bp, Artificial Sequence
  Description of Artificial Sequence: Synthetic oligonucleotide
  Target: LAMA2; (+) strand; PAM type: YTN; PAM sequence: TTT
tgttttattattattttatt

SEQ ID NO: 318905 - DNA, 20 bp, Artificial Sequence
  Description of Artificial Sequence: Synthetic oligonucleotide
  Target: LAMA2; (+) strand; PAM type: YTN; PAM sequence: TTT
gttttattattattttattt

SEQ ID NO: 318906 - DNA, 20 bp, Artificial Sequence
  Description of Artificial Sequence: Synthetic oligonucleotide
  Target: LAMA2; (+) strand; PAM type: YTN; PAM sequence: TTG
ttttattattattttatttt

SEQ ID NO: 318907 - DNA, 20 bp, Artificial Sequence
  Description of Artificial Sequence: Synthetic oligonucleotide
  Target: LAMA2; (+) strand; PAM type: YTN; PAM sequence: TTT
tattattattttattttatt

SEQ ID NO: 318908 - DNA, 20 bp, Artificial Sequence
  Description of Artificial Sequence: Synthetic oligonucleotide
  Target: LAMA2; (+) strand; PAM type: YTN; PAM sequence: TTT
attattattttattttattt

SEQ ID NO: 318909 - DNA, 20 bp, Artificial Sequence
  Description of Artificial Sequence: Synthetic oligonucleotide
  Target: LAMA2; (+) strand; PAM type: YTN; PAM sequence: TTA
ttattattttattttatttt

SEQ ID NO: 318910 - DNA, 20 bp, Artificial Sequence
  Description of Artificial Sequence: Synthetic oligonucleotide
  Target: LAMA2; (+) strand; PAM type: YTN; PAM sequence: TTA
ttattttattttattttatt

SEQ ID NO: 318911 - DNA, 20 bp, Artificial Sequence
  Description of Artificial Sequence: Synthetic oligonucleotide
  Target: LAMA2; (+) strand; PAM type: YTN; PAM sequence: TTA
ttttattttattttattata

SEQ ID NO: 318912 - DNA, 20 bp, Artificial Sequence
  Description of Artificial Sequence: Synthetic oligonucleotide
  Target: LAMA2; (+) strand; PAM type: YTN; PAM sequence: TTT
tattttattttattatactt

SEQ ID NO: 318913 - DNA, 20 bp, Artificial Sequence
  Description of Artificial Sequence: Synthetic oligonucleotide
  Target: LAMA2; (+) strand; PAM type: YTN; PAM sequence: TTT
attttattttattatacttt

SEQ ID NO: 318914 - DNA, 20 bp, Artificial Sequence
  Description of Artificial Sequence: Synthetic oligonucleotide
  Target: LAMA2; (+) strand; PAM type: YTN; PAM sequence: TTA
ttttattttattatacttta

SEQ ID NO: 318915 - DNA, 20 bp, Artificial Sequence
  Description of Artificial Sequence: Synthetic oligonucleotide
  Target: LAMA2; (+) strand; PAM type: YTN; PAM sequence: TTT
tattttattatactttaagt

SEQ ID NO: 318916 - DNA, 20 bp, Artificial Sequence
  Description of Artificial Sequence: Synthetic oligonucleotide
  Target: LAMA2; (+) strand; PAM type: YTN; PAM sequence: TTT
attttattatactttaagtt

SEQ ID NO: 318917 - DNA, 20 bp, Artificial Sequence
  Description of Artificial Sequence: Synthetic oligonucleotide
  Target: LAMA2; (+) strand; PAM type: YTN; PAM sequence: TTA
ttttattatactttaagttt

SEQ ID NO: 318918 - DNA, 20 bp, Artificial Sequence
  Description of Artificial Sequence: Synthetic oligonucleotide
  Target: LAMA2; (+) strand; PAM type: YTN; PAM sequence: TTT
tattatactttaagttttag

SEQ ID NO: 318919 - DNA, 20 bp, Artificial Sequence
  Description of Artificial Sequence: Synthetic oligonucleotide
  Target: LAMA2; (+) strand; PAM type: YTN; PAM sequence: TTT
attatactttaagttttagg

SEQ ID NO: 318920 - DNA, 20 bp, Artificial Sequence
  Description of Artificial Sequence: Synthetic oligonucleotide
  Target: LAMA2; (+) strand; PAM type: YTN; PAM sequence: TTA
ttatactttaagttttaggg

SEQ ID NO: 318921 - DNA, 20 bp, Artificial Sequence
  Description of Artificial Sequence: Synthetic oligonucleotide
  Target: LAMA2; (+) strand; PAM type: YTN; PAM sequence: TTA
tactttaagttttagggtac

SEQ ID NO: 318922 - DNA, 20 bp, Artificial Sequence
  Description of Artificial Sequence: Synthetic oligonucleotide
  Target: LAMA2; (+) strand; PAM type: YTN; PAM sequence: CTT
taagttttagggtacatgtg

SEQ ID NO: 318923 - DNA, 20 bp, Artificial Sequence
  Description of Artificial Sequence: Synthetic oligonucleotide
  Target: LAMA2; (+) strand; PAM type: YTN; PAM sequence: TTT
aagttttagggtacatgtgc

SEQ ID NO: 318924 - DNA, 20 bp, Artificial Sequence
  Description of Artificial Sequence: Synthetic oligonucleotide
  Target: LAMA2; (+) strand; PAM type: YTN; PAM sequence: TTA
agttttagggtacatgtgca

SEQ ID NO: 318925 - DNA, 20 bp, Artificial Sequence
  Description of Artificial Sequence: Synthetic oligonucleotide
  Target: LAMA2; (+) strand; PAM type: YTN; PAM sequence: TTT
tagggtacatgtgcacaatg

SEQ ID NO: 318926 - DNA, 20 bp, Artificial Sequence
  Description of Artificial Sequence: Synthetic oligonucleotide
  Target: LAMA2; (+) strand; PAM type: YTN; PAM sequence: TTT
agggtacatgtgcacaatgt

SEQ ID NO: 318927 - DNA, 20 bp, Artificial Sequence
  Description of Artificial Sequence: Synthetic oligonucleotide
  Target: LAMA2; (+) strand; PAM type: YTN; PAM sequence: TTA
gggtacatgtgcacaatgtg

SEQ ID NO: 318928 - DNA, 20 bp, Artificial Sequence
  Description of Artificial Sequence: Synthetic oligonucleotide
  Target: LAMA2; (+) strand; PAM type: YTN; PAM sequence: TTA
gttacatatgtatacatgtg

SEQ ID NO: 318929 - DNA, 20 bp, Artificial Sequence
  Description of Artificial Sequence: Synthetic oligonucleotide
  Target: LAMA2; (+) strand; PAM type: YTN; PAM sequence: TTA
catatgtatacatgtgcctg

SEQ ID NO: 318930 - DNA, 20 bp, Artificial Sequence
  Description of Artificial Sequence: Synthetic oligonucleotide
  Target: LAMA2; (+) strand; PAM type: YTN; PAM sequence: CTG
ctggtgtgctgcacccatta

SEQ ID NO: 318931 - DNA, 20 bp, Artificial Sequence
  Description of Artificial Sequence: Synthetic oligonucleotide
  Target: LAMA2; (+) strand; PAM type: YTN; PAM sequence: CTG
gtgtgctgcacccattaact

SEQ ID NO: 318932 - DNA, 20 bp, Artificial Sequence
  Description of Artificial Sequence: Synthetic oligonucleotide
  Target: LAMA2; (+) strand; PAM type: YTN; PAM sequence: CTG
cacccattaactcgtcattt

SEQ ID NO: 318933 - DNA, 20 bp, Artificial Sequence
  Description of Artificial Sequence: Synthetic oligonucleotide
  Target: LAMA2; (+) strand; PAM type: YTN; PAM sequence: TTA
actcgtcatttagcattagg

SEQ ID NO: 318934 - DNA, 20 bp, Artificial Sequence
  Description of Artificial Sequence: Synthetic oligonucleotide
  Target: LAMA2; (+) strand; PAM type: YTN; PAM sequence: CTC
gtcatttagcattaggtata

SEQ ID NO: 318935 - DNA, 20 bp, Artificial Sequence
  Description of Artificial Sequence: Synthetic oligonucleotide
  Target: LAMA2; (+) strand; PAM type: YTN; PAM sequence: TTT
agcattaggtatatctccta

SEQ ID NO: 318936 - DNA, 20 bp, Artificial Sequence
  Description of Artificial Sequence: Synthetic oligonucleotide
  Target: LAMA2; (+) strand; PAM type: YTN; PAM sequence: TTA
gcattaggtatatctcctaa

SEQ ID NO: 318937 - DNA, 20 bp, Artificial Sequence
  Description of Artificial Sequence: Synthetic oligonucleotide
  Target: LAMA2; (+) strand; PAM type: YTN; PAM sequence: TTA
ggtatatctcctaatgctat

SEQ ID NO: 318938 - DNA, 20 bp, Artificial Sequence
  Description of Artificial Sequence: Synthetic oligonucleotide
  Target: LAMA2; (+) strand; PAM type: YTN; PAM sequence: CTC
ctaatgctatccctcccccc

SEQ ID NO: 318939 - DNA, 20 bp, Artificial Sequence
  Description of Artificial Sequence: Synthetic oligonucleotide
  Target: LAMA2; (+) strand; PAM type: YTN; PAM sequence: CTA
atgctatccctcccccctcc

SEQ ID NO: 318940 - DNA, 20 bp, Artificial Sequence
  Description of Artificial Sequence: Synthetic oligonucleotide
  Target: LAMA2; (+) strand; PAM type: YTN; PAM sequence: CTA
tccctcccccctccccccac

SEQ ID NO: 318941 - DNA, 20 bp, Artificial Sequence
  Description of Artificial Sequence: Synthetic oligonucleotide
  Target: LAMA2; (+) strand; PAM type: YTN; PAM sequence: CTC
ccccctccccccaccccacc

SEQ ID NO: 318942 - DNA, 20 bp, Artificial Sequence
  Description of Artificial Sequence: Synthetic oligonucleotide
  Target: LAMA2; (+) strand; PAM type: YTN; PAM sequence: CTC
cccccaccccaccccacaac

SEQ ID NO: 318943 - DNA, 20 bp, Artificial Sequence
  Description of Artificial Sequence: Synthetic oligonucleotide
  Target: LAMA2; (+) strand; PAM type: YTN; PAM sequence: TTC
cccttcttgtgtccatgtgt

SEQ ID NO: 318944 - DNA, 20 bp, Artificial Sequence
  Description of Artificial Sequence: Synthetic oligonucleotide
  Target: LAMA2; (+) strand; PAM type: YTN; PAM sequence: CTT
cttgtgtccatgtgttctca

SEQ ID NO: 318945 - DNA, 20 bp, Artificial Sequence
  Description of Artificial Sequence: Synthetic oligonucleotide
  Target: LAMA2; (+) strand; PAM type: YTN; PAM sequence: TTC
ttgtgtccatgtgttctcat

SEQ ID NO: 318946 - DNA, 20 bp, Artificial Sequence
  Description of Artificial Sequence: Synthetic oligonucleotide
  Target: LAMA2; (+) strand; PAM type: YTN; PAM sequence: CTT
gtgtccatgtgttctcattg

SEQ ID NO: 318947 - DNA, 20 bp, Artificial Sequence
  Description of Artificial Sequence: Synthetic oligonucleotide
  Target: LAMA2; (+) strand; PAM type: YTN; PAM sequence: TTG
tgtccatgtgttctcattgt

SEQ ID NO: 318948 - DNA, 20 bp, Artificial Sequence
  Description of Artificial Sequence: Synthetic oligonucleotide
  Target: LAMA2; (+) strand; PAM type: YTN; PAM sequence: TTC
tcattgttcaattcccacct

SEQ ID NO: 318949 - DNA, 20 bp, Artificial Sequence
  Description of Artificial Sequence: Synthetic oligonucleotide
  Target: LAMA2; (+) strand; PAM type: YTN; PAM sequence: CTC
attgttcaattcccacctat

SEQ ID NO: 318950 - DNA, 20 bp, Artificial Sequence
  Description of Artificial Sequence: Synthetic oligonucleotide
  Target: LAMA2; (+) strand; PAM type: YTN; PAM sequence: TTG
ttcaattcccacctatgagt

SEQ ID NO: 318951 - DNA, 20 bp, Artificial Sequence
  Description of Artificial Sequence: Synthetic oligonucleotide
  Target: LAMA2; (+) strand; PAM type: YTN; PAM sequence: TTC
aattcccacctatgagtgag

SEQ ID NO: 318952 - DNA, 20 bp, Artificial Sequence
  Description of Artificial Sequence: Synthetic oligonucleotide
  Target: LAMA2; (+) strand; PAM type: YTN; PAM sequence: TTC
ccacctatgagtgagaacat

SEQ ID NO: 318953 - DNA, 20 bp, Artificial Sequence
  Description of Artificial Sequence: Synthetic oligonucleotide
  Target: LAMA2; (+) strand; PAM type: YTN; PAM sequence: CTA
tgagtgagaacatgcggtgt

SEQ ID NO: 318954 - DNA, 20 bp, Artificial Sequence
  Description of Artificial Sequence: Synthetic oligonucleotide
  Target: LAMA2; (+) strand; PAM type: YTN; PAM sequence: TTT
ggttttttgtccttgtgata

SEQ ID NO: 318955 - DNA, 20 bp, Artificial Sequence
  Description of Artificial Sequence: Synthetic oligonucleotide
  Target: LAMA2; (+) strand; PAM type: YTN; PAM sequence: TTG
gttttttgtccttgtgatag

SEQ ID NO: 318956 - DNA, 20 bp, Artificial Sequence
  Description of Artificial Sequence: Synthetic oligonucleotide
  Target: LAMA2; (+) strand; PAM type: YTN; PAM sequence: TTT
tttgtccttgtgatagttta

SEQ ID NO: 318957 - DNA, 20 bp, Artificial Sequence
  Description of Artificial Sequence: Synthetic oligonucleotide
  Target: LAMA2; (+) strand; PAM type: YTN; PAM sequence: TTT
ttgtccttgtgatagtttac

SEQ ID NO: 318958 - DNA, 20 bp, Artificial Sequence
  Description of Artificial Sequence: Synthetic oligonucleotide
  Target: LAMA2; (+) strand; PAM type: YTN; PAM sequence: TTT
tgtccttgtgatagtttact

SEQ ID NO: 318959 - DNA, 20 bp, Artificial Sequence
  Description of Artificial Sequence: Synthetic oligonucleotide
  Target: LAMA2; (+) strand; PAM type: YTN; PAM sequence: TTT
gtccttgtgatagtttactg

SEQ ID NO: 318960 - DNA, 20 bp, Artificial Sequence
  Description of Artificial Sequence: Synthetic oligonucleotide
  Target: LAMA2; (+) strand; PAM type: YTN; PAM sequence: TTG
tccttgtgatagtttactga

SEQ ID NO: 318961 - DNA, 20 bp, Artificial Sequence
  Description of Artificial Sequence: Synthetic oligonucleotide
  Target: LAMA2; (+) strand; PAM type: YTN; PAM sequence: CTT
gtgatagtttactgagaatg

SEQ ID NO: 318962 - DNA, 20 bp, Artificial Sequence
  Description of Artificial Sequence: Synthetic oligonucleotide
  Target: LAMA2; (+) strand; PAM type: YTN; PAM sequence: TTG
tgatagtttactgagaatga

SEQ ID NO: 318963 - DNA, 20 bp, Artificial Sequence
  Description of Artificial Sequence: Synthetic oligonucleotide
  Target: LAMA2; (+) strand; PAM type: YTN; PAM sequence: TTT
actgagaatgatgatttcca

SEQ ID NO: 318964 - DNA, 20 bp, Artificial Sequence
  Description of Artificial Sequence: Synthetic oligonucleotide
  Target: LAMA2; (+) strand; PAM type: YTN; PAM sequence: TTA
ctgagaatgatgatttccag

SEQ ID NO: 318965 - DNA, 20 bp, Artificial Sequence
  Description of Artificial Sequence: Synthetic oligonucleotide
  Target: LAMA2; (+) strand; PAM type: YTN; PAM sequence: CTG
agaatgatgatttccagtat

SEQ ID NO: 318966 - DNA, 20 bp, Artificial Sequence
  Description of Artificial Sequence: Synthetic oligonucleotide
  Target: LAMA2; (+) strand; PAM type: YTN; PAM sequence: TTT
ccagtatcgtccatgtccct

SEQ ID NO: 318967 - DNA, 20 bp, Artificial Sequence
  Description of Artificial Sequence: Synthetic oligonucleotide
  Target: LAMA2; (+) strand; PAM type: YTN; PAM sequence: TTC
cagtatcgtccatgtcccta

SEQ ID NO: 318968 - DNA, 20 bp, Artificial Sequence
  Description of Artificial Sequence: Synthetic oligonucleotide
  Target: LAMA2; (+) strand; PAM type: YTN; PAM sequence: CTA
caaaggacaggaactcatca

SEQ ID NO: 318969 - DNA, 20 bp, Artificial Sequence
  Description of Artificial Sequence: Synthetic oligonucleotide
  Target: LAMA2; (+) strand; PAM type: YTN; PAM sequence: CTC
atcatttttttatggctgca

SEQ ID NO: 318970 - DNA, 20 bp, Artificial Sequence
  Description of Artificial Sequence: Synthetic oligonucleotide
  Target: LAMA2; (+) strand; PAM type: YTN; PAM sequence: TTT
ttttatggctgcatagtatt

SEQ ID NO: 318971 - DNA, 20 bp, Artificial Sequence
  Description of Artificial Sequence: Synthetic oligonucleotide
  Target: LAMA2; (+) strand; PAM type: YTN; PAM sequence: TTT
tttatggctgcatagtattc

SEQ ID NO: 318972 - DNA, 20 bp, Artificial Sequence
  Description of Artificial Sequence: Synthetic oligonucleotide
  Target: LAMA2; (+) strand; PAM type: YTN; PAM sequence: TTT
ttatggctgcatagtattcc

SEQ ID NO: 318973 - DNA, 20 bp, Artificial Sequence
  Description of Artificial Sequence: Synthetic oligonucleotide
  Target: LAMA2; (+) strand; PAM type: YTN; PAM sequence: TTT
tatggctgcatagtattcca

SEQ ID NO: 318974 - DNA, 20 bp, Artificial Sequence
  Description of Artificial Sequence: Synthetic oligonucleotide
  Target: LAMA2; (+) strand; PAM type: YTN; PAM sequence: TTT
atggctgcatagtattccat

SEQ ID NO: 318975 - DNA, 20 bp, Artificial Sequence
  Description of Artificial Sequence: Synthetic oligonucleotide
  Target: LAMA2; (+) strand; PAM type: YTN; PAM sequence: TTA
tggctgcatagtattccatg

SEQ ID NO: 318976 - DNA, 20 bp, Artificial Sequence
  Description of Artificial Sequence: Synthetic oligonucleotide
  Target: LAMA2; (+) strand; PAM type: YTN; PAM sequence: CTG
catagtattccatggtgtat

SEQ ID NO: 318977 - DNA, 20 bp, Artificial Sequence
  Description of Artificial Sequence: Synthetic oligonucleotide
  Target: LAMA2; (+) strand; PAM type: YTN; PAM sequence: TTC
catggtgtatatgtgccaca

SEQ ID NO: 318978 - DNA, 20 bp, Artificial Sequence
  Description of Artificial Sequence: Synthetic oligonucleotide
  Target: LAMA2; (+) strand; PAM type: YTN; PAM sequence: TTT
tcttaatccagtctatcatt

SEQ ID NO: 318979 - DNA, 20 bp, Artificial Sequence
  Description of Artificial Sequence: Synthetic oligonucleotide
  Target: LAMA2; (+) strand; PAM type: YTN; PAM sequence: TTT
cttaatccagtctatcattg

SEQ ID NO: 318980 - DNA, 20 bp, Artificial Sequence
  Description of Artificial Sequence: Synthetic oligonucleotide
  Target: LAMA2; (+) strand; PAM type: YTN; PAM sequence: TTC
ttaatccagtctatcattgt

SEQ ID NO: 318981 - DNA, 20 bp, Artificial Sequence
  Description of Artificial Sequence: Synthetic oligonucleotide
  Target: LAMA2; (+) strand; PAM type: YTN; PAM sequence: CTT
aatccagtctatcattgttg

SEQ ID NO: 318982 - DNA, 20 bp, Artificial Sequence
  Description of Artificial Sequence: Synthetic oligonucleotide
  Target: LAMA2; (+) strand; PAM type: YTN; PAM sequence: TTA
atccagtctatcattgttgt

SEQ ID NO: 318983 - DNA, 20 bp, Artificial Sequence
  Description of Artificial Sequence: Synthetic oligonucleotide
  Target: LAMA2; (+) strand; PAM type: YTN; PAM sequence: CTA
tcattgttgtacatttgggt

SEQ ID NO: 318984 - DNA, 20 bp, Artificial Sequence
  Description of Artificial Sequence: Synthetic oligonucleotide
  Target: LAMA2; (+) strand; PAM type: YTN; PAM sequence: TTG
ttgtacatttgggttggttc

SEQ ID NO: 318985 - DNA, 20 bp, Artificial Sequence
  Description of Artificial Sequence: Synthetic oligonucleotide
  Target: LAMA2; (+) strand; PAM type: YTN; PAM sequence: TTG
tacatttgggttggttccaa

SEQ ID NO: 318986 - DNA, 20 bp, Artificial Sequence
  Description of Artificial Sequence: Synthetic oligonucleotide
  Target: LAMA2; (+) strand; PAM type: YTN; PAM sequence: TTT
gggttggttccaagtctttg

SEQ ID NO: 318987 - DNA, 20 bp, Artificial Sequence
  Description of Artificial Sequence: Synthetic oligonucleotide
  Target: LAMA2; (+) strand; PAM type: YTN; PAM sequence: TTG
ggttggttccaagtctttgc

SEQ ID NO: 318988 - DNA, 20 bp, Artificial Sequence
  Description of Artificial Sequence: Synthetic oligonucleotide
  Target: LAMA2; (+) strand; PAM type: YTN; PAM sequence: TTG
gttccaagtctttgctattg

SEQ ID NO: 318989 - DNA, 20 bp, Artificial Sequence
  Description of Artificial Sequence: Synthetic oligonucleotide
  Target: LAMA2; (+) strand; PAM type: YTN; PAM sequence: TTC
caagtctttgctattgtgaa

SEQ ID NO: 318990 - DNA, 20 bp, Artificial Sequence
  Description of Artificial Sequence: Synthetic oligonucleotide
  Target: LAMA2; (+) strand; PAM type: YTN; PAM sequence: CTT
tgctattgtgaatagtgccg

SEQ ID NO: 318991 - DNA, 20 bp, Artificial Sequence
  Description of Artificial Sequence: Synthetic oligonucleotide
  Target: LAMA2; (+) strand; PAM type: YTN; PAM sequence: TTT
gctattgtgaatagtgccgc

SEQ ID NO: 318992 - DNA, 20 bp, Artificial Sequence
  Description of Artificial Sequence: Synthetic oligonucleotide
  Target: LAMA2; (+) strand; PAM type: YTN; PAM sequence: TTG
ctattgtgaatagtgccgca

SEQ ID NO: 318993 - DNA, 20 bp, Artificial Sequence
  Description of Artificial Sequence: Synthetic oligonucleotide
  Target: LAMA2; (+) strand; PAM type: YTN; PAM sequence: CTA
ttgtgaatagtgccgcaata

SEQ ID NO: 318994 - DNA, 20 bp, Artificial Sequence
  Description of Artificial Sequence: Synthetic oligonucleotide
  Target: LAMA2; (+) strand; PAM type: YTN; PAM sequence: TTG
tgaatagtgccgcaataaac

SEQ ID NO: 318995 - DNA, 20 bp, Artificial Sequence
  Description of Artificial Sequence: Synthetic oligonucleotide
  Target: LAMA2; (+) strand; PAM type: YTN; PAM sequence: CTT
tatagcagcatgatttatag

SEQ ID NO: 318996 - DNA, 20 bp, Artificial Sequence
  Description of Artificial Sequence: Synthetic oligonucleotide
  Target: LAMA2; (+) strand; PAM type: YTN; PAM sequence: TTT
atagcagcatgatttatagt

SEQ ID NO: 318997 - DNA, 20 bp, Artificial Sequence
  Description of Artificial Sequence: Synthetic oligonucleotide
  Target: LAMA2; (+) strand; PAM type: YTN; PAM sequence: TTA
tagcagcatgatttatagtc

SEQ ID NO: 318998 - DNA, 20 bp, Artificial Sequence
  Description of Artificial Sequence: Synthetic oligonucleotide
  Target: LAMA2; (+) strand; PAM type: YTN; PAM sequence: TTT
atagtcctttgggtacatac

SEQ ID NO: 318999 - DNA, 20 bp, Artificial Sequence
  Description of Artificial Sequence: Synthetic oligonucleotide
  Target: LAMA2; (+) strand; PAM type: YTN; PAM sequence: TTA
tagtcctttgggtacatacc

SEQ ID NO: 319000 - DNA, 20 bp, Artificial Sequence
  Description of Artificial Sequence: Synthetic oligonucleotide
  Target: LAMA2; (+) strand; PAM type: YTN; PAM sequence: CTT
tgggtacatacccagtaatg

SEQ ID NO: 319001 - DNA, 20 bp, Artificial Sequence
  Description of Artificial Sequence: Synthetic oligonucleotide
  Target: LAMA2; (+) strand; PAM type: YTN; PAM sequence: TTT
gggtacatacccagtaatgg

SEQ ID NO: 319002 - DNA, 20 bp, Artificial Sequence
  Description of Artificial Sequence: Synthetic oligonucleotide
  Target: LAMA2; (+) strand; PAM type: YTN; PAM sequence: TTG
ggtacatacccagtaatggg

SEQ ID NO: 319003 - DNA, 20 bp, Artificial Sequence
  Description of Artificial Sequence: Synthetic oligonucleotide
  Target: LAMA2; (+) strand; PAM type: YTN; PAM sequence: CTG
ggtcaaagggtatttctagt

SEQ ID NO: 319004 - DNA, 20 bp, Artificial Sequence
  Description of Artificial Sequence: Synthetic oligonucleotide
  Target: LAMA2; (+) strand; PAM type: YTN; PAM sequence: TTT
ctagttctagatccctgagg

SEQ ID NO: 319005 - DNA, 20 bp, Artificial Sequence
  Description of Artificial Sequence: Synthetic oligonucleotide
  Target: LAMA2; (+) strand; PAM type: YTN; PAM sequence: TTC
tagttctagatccctgagga

SEQ ID NO: 319006 - DNA, 20 bp, Artificial Sequence
  Description of Artificial Sequence: Synthetic oligonucleotide
  Target: LAMA2; (+) strand; PAM type: YTN; PAM sequence: CTA
gttctagatccctgaggaat

SEQ ID NO: 319007 - DNA, 20 bp, Artificial Sequence
  Description of Artificial Sequence: Synthetic oligonucleotide
  Target: LAMA2; (+) strand; PAM type: YTN; PAM sequence: TTC
tagatccctgaggaatcgcc

SEQ ID NO: 319008 - DNA, 20 bp, Artificial Sequence
  Description of Artificial Sequence: Synthetic oligonucleotide
  Target: LAMA2; (+) strand; PAM type: YTN; PAM sequence: CTA
gatccctgaggaatcgccac

SEQ ID NO: 319009 - DNA, 20 bp, Artificial Sequence
  Description of Artificial Sequence: Synthetic oligonucleotide
  Target: LAMA2; (+) strand; PAM type: YTN; PAM sequence: CTG
aggaatcgccacactgactt

SEQ ID NO: 319010 - DNA, 20 bp, Artificial Sequence
  Description of Artificial Sequence: Synthetic oligonucleotide
  Target: LAMA2; (+) strand; PAM type: YTN; PAM sequence: CTG
acttccacaatggttgaact

SEQ ID NO: 319011 - DNA, 20 bp, Artificial Sequence
  Description of Artificial Sequence: Synthetic oligonucleotide
  Target: LAMA2; (+) strand; PAM type: YTN; PAM sequence: CTT
ccacaatggttgaactagtt

SEQ ID NO: 319012 - DNA, 20 bp, Artificial Sequence
  Description of Artificial Sequence: Synthetic oligonucleotide
  Target: LAMA2; (+) strand; PAM type: YTN; PAM sequence: TTC
cacaatggttgaactagttt

SEQ ID NO: 319013 - DNA, 20 bp, Artificial Sequence
  Description of Artificial Sequence: Synthetic oligonucleotide
  Target: LAMA2; (+) strand; PAM type: YTN; PAM sequence: TTG
aactagtttacagtcccacc

SEQ ID NO: 319014 - DNA, 20 bp, Artificial Sequence
  Description of Artificial Sequence: Synthetic oligonucleotide
  Target: LAMA2; (+) strand; PAM type: YTN; PAM sequence: CTA
gtttacagtcccaccaacag

SEQ ID NO: 319015 - DNA, 20 bp, Artificial Sequence
  Description of Artificial Sequence: Synthetic oligonucleotide
  Target: LAMA2; (+) strand; PAM type: YTN; PAM sequence: TTT
acagtcccaccaacagtgta

SEQ ID NO: 319016 - DNA, 20 bp, Artificial Sequence
  Description of Artificial Sequence: Synthetic oligonucleotide
  Target: LAMA2; (+) strand; PAM type: YTN; PAM sequence: TTA
cagtcccaccaacagtgtaa

SEQ ID NO: 319017 - DNA, 20 bp, Artificial Sequence
  Description of Artificial Sequence: Synthetic oligonucleotide
  Target: LAMA2; (+) strand; PAM type: YTN; PAM sequence: TTC
ctatttctccatatcctctc

SEQ ID NO: 319018 - DNA, 20 bp, Artificial Sequence
  Description of Artificial Sequence: Synthetic oligonucleotide
  Target: LAMA2; (+) strand; PAM type: YTN; PAM sequence: CTA
tttctccatatcctctccag

SEQ ID NO: 319019 - DNA, 20 bp, Artificial Sequence
  Description of Artificial Sequence: Synthetic oligonucleotide
  Target: LAMA2; (+) strand; PAM type: YTN; PAM sequence: TTT
ctccatatcctctccagccc

SEQ ID NO: 319020 - DNA, 20 bp, Artificial Sequence
  Description of Artificial Sequence: Synthetic oligonucleotide
  Target: LAMA2; (+) strand; PAM type: YTN; PAM sequence: TTC
tccatatcctctccagcccc

SEQ ID NO: 319021 - DNA, 20 bp, Artificial Sequence
  Description of Artificial Sequence: Synthetic oligonucleotide
  Target: LAMA2; (+) strand; PAM type: YTN; PAM sequence: CTC
catatcctctccagcccctg

SEQ ID NO: 319022 - DNA, 20 bp, Artificial Sequence
  Description of Artificial Sequence: Synthetic oligonucleotide
  Target: LAMA2; (+) strand; PAM type: YTN; PAM sequence: CTC
tccagcccctgttgtttcct

SEQ ID NO: 319023 - DNA, 20 bp, Artificial Sequence
  Description of Artificial Sequence: Synthetic oligonucleotide
  Target: LAMA2; (+) strand; PAM type: YTN; PAM sequence: CTC
cagcccctgttgtttcctga

SEQ ID NO: 319024 - DNA, 20 bp, Artificial Sequence
  Description of Artificial Sequence: Synthetic oligonucleotide
  Target: LAMA2; (+) strand; PAM type: YTN; PAM sequence: CTG
ttgtttcctgactttttaat

SEQ ID NO: 319025 - DNA, 20 bp, Artificial Sequence
  Description of Artificial Sequence: Synthetic oligonucleotide
  Target: LAMA2; (+) strand; PAM type: YTN; PAM sequence: TTG
tttcctgactttttaatgat

SEQ ID NO: 319026 - DNA, 20 bp, Artificial Sequence
  Description of Artificial Sequence: Synthetic oligonucleotide
  Target: LAMA2; (+) strand; PAM type: YTN; PAM sequence: TTT
cctgactttttaatgattgc

SEQ ID NO: 319027 - DNA, 20 bp, Artificial Sequence
  Description of Artificial Sequence: Synthetic oligonucleotide
  Target: LAMA2; (+) strand; PAM type: YTN; PAM sequence: TTC
ctgactttttaatgattgcc

SEQ ID NO: 319028 - DNA, 20 bp, Artificial Sequence
  Description of Artificial Sequence: Synthetic oligonucleotide
  Target: LAMA2; (+) strand; PAM type: YTN; PAM sequence: CTG
actttttaatgattgccatt

SEQ ID NO: 319029 - DNA, 20 bp, Artificial Sequence
  Description of Artificial Sequence: Synthetic oligonucleotide
  Target: LAMA2; (+) strand; PAM type: YTN; PAM sequence: CTT
tttaatgattgccattctaa

SEQ ID NO: 319030 - DNA, 20 bp, Artificial Sequence
  Description of Artificial Sequence: Synthetic oligonucleotide
  Target: LAMA2; (+) strand; PAM type: YTN; PAM sequence: TTT
ttaatgattgccattctaac

SEQ ID NO: 319031 - DNA, 20 bp, Artificial Sequence
  Description of Artificial Sequence: Synthetic oligonucleotide
  Target: LAMA2; (+) strand; PAM type: YTN; PAM sequence: TTT
taatgattgccattctaact

SEQ ID NO: 319032 - DNA, 20 bp, Artificial Sequence
  Description of Artificial Sequence: Synthetic oligonucleotide
  Target: LAMA2; (+) strand; PAM type: YTN; PAM sequence: TTT
aatgattgccattctaactg

SEQ ID NO: 319033 - DNA, 20 bp, Artificial Sequence
  Description of Artificial Sequence: Synthetic oligonucleotide
  Target: LAMA2; (+) strand; PAM type: YTN; PAM sequence: TTA
atgattgccattctaactgg

SEQ ID NO: 319034 - DNA, 20 bp, Artificial Sequence
  Description of Artificial Sequence: Synthetic oligonucleotide
  Target: LAMA2; (+) strand; PAM type: YTN; PAM sequence: TTG
ccattctaactggtgtgaga

SEQ ID NO: 319035 - DNA, 20 bp, Artificial Sequence
  Description of Artificial Sequence: Synthetic oligonucleotide
  Target: LAMA2; (+) strand; PAM type: YTN; PAM sequence: TTC
taactggtgtgagatggtat

SEQ ID NO: 319036 - DNA, 20 bp, Artificial Sequence
  Description of Artificial Sequence: Synthetic oligonucleotide
  Target: LAMA2; (+) strand; PAM type: YTN; PAM sequence: CTA
actggtgtgagatggtatct

SEQ ID NO: 319037 - DNA, 20 bp, Artificial Sequence
  Description of Artificial Sequence: Synthetic oligonucleotide
  Target: LAMA2; (+) strand; PAM type: YTN; PAM sequence: CTG
gtgtgagatggtatctcatt

SEQ ID NO: 319038 - DNA, 20 bp, Artificial Sequence
  Description of Artificial Sequence: Synthetic oligonucleotide
  Target: LAMA2; (+) strand; PAM type: YTN; PAM sequence: CTC
attgtggttttggtttgcat

SEQ ID NO: 319039 - DNA, 20 bp, Artificial Sequence
  Description of Artificial Sequence: Synthetic oligonucleotide
  Target: LAMA2; (+) strand; PAM type: YTN; PAM sequence: TTG
tggttttggtttgcatttct

SEQ ID NO: 319040 - DNA, 20 bp, Artificial Sequence
  Description of Artificial Sequence: Synthetic oligonucleotide
  Target: LAMA2; (+) strand; PAM type: YTN; PAM sequence: TTT
tggtttgcatttctctgatg

SEQ ID NO: 319041 - DNA, 20 bp, Artificial Sequence
  Description of Artificial Sequence: Synthetic oligonucleotide
  Target: LAMA2; (+) strand; PAM type: YTN; PAM sequence: TTT
ggtttgcatttctctgatgg

SEQ ID NO: 319042 - DNA, 20 bp, Artificial Sequence
  Description of Artificial Sequence: Synthetic oligonucleotide
  Target: LAMA2; (+) strand; PAM type: YTN; PAM sequence: TTG
gtttgcatttctctgatggc

SEQ ID NO: 319043 - DNA, 20 bp, Artificial Sequence
  Description of Artificial Sequence: Synthetic oligonucleotide
  Target: LAMA2; (+) strand; PAM type: YTN; PAM sequence: TTT
gcatttctctgatggccagt

SEQ ID NO: 319044 - DNA, 20 bp, Artificial Sequence
  Description of Artificial Sequence: Synthetic oligonucleotide
  Target: LAMA2; (+) strand; PAM type: YTN; PAM sequence: TTG
catttctctgatggccagtg

SEQ ID NO: 319045 - DNA, 20 bp, Artificial Sequence
  Description of Artificial Sequence: Synthetic oligonucleotide
  Target: LAMA2; (+) strand; PAM type: YTN; PAM sequence: TTT
ctctgatggccagtgatggt

SEQ ID NO: 319046 - DNA, 20 bp, Artificial Sequence
  Description of Artificial Sequence: Synthetic oligonucleotide
  Target: LAMA2; (+) strand; PAM type: YTN; PAM sequence: TTC
tctgatggccagtgatggtg

SEQ ID NO: 319047 - DNA, 20 bp, Artificial Sequence
  Description of Artificial Sequence: Synthetic oligonucleotide
  Target: LAMA2; (+) strand; PAM type: YTN; PAM sequence: CTC
tgatggccagtgatggtgag

SEQ ID NO: 319048 - DNA, 20 bp, Artificial Sequence
  Description of Artificial Sequence: Synthetic oligonucleotide
  Target: LAMA2; (+) strand; PAM type: YTN; PAM sequence: CTG
atggccagtgatggtgagca

SEQ ID NO: 319049 - DNA, 20 bp, Artificial Sequence
  Description of Artificial Sequence: Synthetic oligonucleotide
  Target: LAMA2; (+) strand; PAM type: YTN; PAM sequence: TTT
tttcatgtgttttttggctg

SEQ ID NO: 319050 - DNA, 20 bp, Artificial Sequence
  Description of Artificial Sequence: Synthetic oligonucleotide
  Target: LAMA2; (+) strand; PAM type: YTN; PAM sequence: TTT
ttcatgtgttttttggctgc

SEQ ID NO: 319051 - DNA, 20 bp, Artificial Sequence
  Description of Artificial Sequence: Synthetic oligonucleotide
  Target: LAMA2; (+) strand; PAM type: YTN; PAM sequence: TTT
tcatgtgttttttggctgca

SEQ ID NO: 319052 - DNA, 20 bp, Artificial Sequence
  Description of Artificial Sequence: Synthetic oligonucleotide
  Target: LAMA2; (+) strand; PAM type: YTN; PAM sequence: TTT
catgtgttttttggctgcat

SEQ ID NO: 319053 - DNA, 20 bp, Artificial Sequence
  Description of Artificial Sequence: Synthetic oligonucleotide
  Target: LAMA2; (+) strand; PAM type: YTN; PAM sequence: TTC
atgtgttttttggctgcata

SEQ ID NO: 319054 - DNA, 20 bp, Artificial Sequence
  Description of Artificial Sequence: Synthetic oligonucleotide
  Target: LAMA2; (+) strand; PAM type: YTN; PAM sequence: TTT
tttggctgcataaatgtctt

SEQ ID NO: 319055 - DNA, 20 bp, Artificial Sequence
  Description of Artificial Sequence: Synthetic oligonucleotide
  Target: LAMA2; (+) strand; PAM type: YTN; PAM sequence: TTT
ttggctgcataaatgtcttc

SEQ ID NO: 319056 - DNA, 20 bp, Artificial Sequence
  Description of Artificial Sequence: Synthetic oligonucleotide
  Target: LAMA2; (+) strand; PAM type: YTN; PAM sequence: TTT
tggctgcataaatgtcttct

SEQ ID NO: 319057 - DNA, 20 bp, Artificial Sequence
  Description of Artificial Sequence: Synthetic oligonucleotide
  Target: LAMA2; (+) strand; PAM type: YTN; PAM sequence: TTT
ggctgcataaatgtcttctt

SEQ ID NO: 319058 - DNA, 20 bp, Artificial Sequence
  Description of Artificial Sequence: Synthetic oligonucleotide
  Target: LAMA2; (+) strand; PAM type: YTN; PAM sequence: TTG
gctgcataaatgtcttcttt

SEQ ID NO: 319059 - DNA, 20 bp, Artificial Sequence
  Description of Artificial Sequence: Synthetic oligonucleotide
  Target: LAMA2; (+) strand; PAM type: YTN; PAM sequence: CTG
cataaatgtcttctttgatg

SEQ ID NO: 319060 - DNA, 20 bp, Artificial Sequence
  Description of Artificial Sequence: Synthetic oligonucleotide
  Target: LAMA2; (+) strand; PAM type: YTN; PAM sequence: CTT
ctttgatgaataatgagatt

SEQ ID NO: 319061 - DNA, 20 bp, Artificial Sequence
  Description of Artificial Sequence: Synthetic oligonucleotide
  Target: LAMA2; (+) strand; PAM type: YTN; PAM sequence: TTC
tttgatgaataatgagattt

SEQ ID NO: 319062 - DNA, 20 bp, Artificial Sequence
  Description of Artificial Sequence: Synthetic oligonucleotide
  Target: LAMA2; (+) strand; PAM type: YTN; PAM sequence: CTT
tgatgaataatgagatttaa

SEQ ID NO: 319063 - DNA, 20 bp, Artificial Sequence
  Description of Artificial Sequence: Synthetic oligonucleotide
  Target: LAMA2; (+) strand; PAM type: YTN; PAM sequence: TTT
gatgaataatgagatttaac

SEQ ID NO: 319064 - DNA, 20 bp, Artificial Sequence
  Description of Artificial Sequence: Synthetic oligonucleotide
  Target: LAMA2; (+) strand; PAM type: YTN; PAM sequence: TTG
atgaataatgagatttaact

SEQ ID NO: 319065 - DNA, 20 bp, Artificial Sequence
  Description of Artificial Sequence: Synthetic oligonucleotide
  Target: LAMA2; (+) strand; PAM type: YTN; PAM sequence: TTT
aactttttcccattgaccat

SEQ ID NO: 319066 - DNA, 20 bp, Artificial Sequence
  Description of Artificial Sequence: Synthetic oligonucleotide
  Target: LAMA2; (+) strand; PAM type: YTN; PAM sequence: TTA
actttttcccattgaccatt

SEQ ID NO: 319067 - DNA, 20 bp, Artificial Sequence
  Description of Artificial Sequence: Synthetic oligonucleotide
  Target: LAMA2; (+) strand; PAM type: YTN; PAM sequence: CTT
tttcccattgaccattcaca

SEQ ID NO: 319068 - DNA, 20 bp, Artificial Sequence
  Description of Artificial Sequence: Synthetic oligonucleotide
  Target: LAMA2; (+) strand; PAM type: YTN; PAM sequence: TTT
ttcccattgaccattcacat

SEQ ID NO: 319069 - DNA, 20 bp, Artificial Sequence
  Description of Artificial Sequence: Synthetic oligonucleotide
  Target: LAMA2; (+) strand; PAM type: YTN; PAM sequence: TTT
tcccattgaccattcacatg

SEQ ID NO: 319070 - DNA, 20 bp, Artificial Sequence
  Description of Artificial Sequence: Synthetic oligonucleotide
  Target: LAMA2; (+) strand; PAM type: YTN; PAM sequence: TTT
cccattgaccattcacatgt

SEQ ID NO: 319071 - DNA, 20 bp, Artificial Sequence
  Description of Artificial Sequence: Synthetic oligonucleotide
  Target: LAMA2; (+) strand; PAM type: YTN; PAM sequence: TTC
ccattgaccattcacatgtt

SEQ ID NO: 319072 - DNA, 20 bp, Artificial Sequence
  Description of Artificial Sequence: Synthetic oligonucleotide
  Target: LAMA2; (+) strand; PAM type: YTN; PAM sequence: TTG
accattcacatgttcccaac

SEQ ID NO: 319073 - DNA, 20 bp, Artificial Sequence
  Description of Artificial Sequence: Synthetic oligonucleotide
  Target: LAMA2; (+) strand; PAM type: YTN; PAM sequence: TTC
acatgttcccaactctgaat

SEQ ID NO: 319074 - DNA, 20 bp, Artificial Sequence
  Description of Artificial Sequence: Synthetic oligonucleotide
  Target: LAMA2; (+) strand; PAM type: YTN; PAM sequence: TTC
ccaactctgaatttctagta

SEQ ID NO: 319075 - DNA, 20 bp, Artificial Sequence
  Description of Artificial Sequence: Synthetic oligonucleotide
  Target: LAMA2; (+) strand; PAM type: YTN; PAM sequence: CTC
tgaatttctagtaaattcat

SEQ ID NO: 319076 - DNA, 20 bp, Artificial Sequence
  Description of Artificial Sequence: Synthetic oligonucleotide
  Target: LAMA2; (+) strand; PAM type: YTN; PAM sequence: CTG
aatttctagtaaattcatgt

SEQ ID NO: 319077 - DNA, 20 bp, Artificial Sequence
  Description of Artificial Sequence: Synthetic oligonucleotide
  Target: LAMA2; (+) strand; PAM type: YTN; PAM sequence: TTT
ctagtaaattcatgtttttc

SEQ ID NO: 319078 - DNA, 20 bp, Artificial Sequence
  Description of Artificial Sequence: Synthetic oligonucleotide
  Target: LAMA2; (+) strand; PAM type: YTN; PAM sequence: TTC
tagtaaattcatgtttttcc

SEQ ID NO: 319079 - DNA, 20 bp, Artificial Sequence
  Description of Artificial Sequence: Synthetic oligonucleotide
  Target: LAMA2; (+) strand; PAM type: YTN; PAM sequence: CTA
gtaaattcatgtttttccag

SEQ ID NO: 319080 - DNA, 20 bp, Artificial Sequence
  Description of Artificial Sequence: Synthetic oligonucleotide
  Target: LAMA2; (+) strand; PAM type: YTN; PAM sequence: TTC
atgtttttccagagaatgaa

SEQ ID NO: 319081 - DNA, 20 bp, Artificial Sequence
  Description of Artificial Sequence: Synthetic oligonucleotide
  Target: LAMA2; (+) strand; PAM type: YTN; PAM sequence: TTT
ttccagagaatgaaagagtg

SEQ ID NO: 319082 - DNA, 20 bp, Artificial Sequence
  Description of Artificial Sequence: Synthetic oligonucleotide
  Target: LAMA2; (+) strand; PAM type: YTN; PAM sequence: TTT
tccagagaatgaaagagtga

SEQ ID NO: 319083 - DNA, 20 bp, Artificial Sequence
  Description of Artificial Sequence: Synthetic oligonucleotide
  Target: LAMA2; (+) strand; PAM type: YTN; PAM sequence: TTT
ccagagaatgaaagagtgaa

SEQ ID NO: 319084 - DNA, 20 bp, Artificial Sequence
  Description of Artificial Sequence: Synthetic oligonucleotide
  Target: LAMA2; (+) strand; PAM type: YTN; PAM sequence: TTC
cagagaatgaaagagtgaat

SEQ ID NO: 319085 - DNA, 20 bp, Artificial Sequence
  Description of Artificial Sequence: Synthetic oligonucleotide
  Target: LAMA2; (+) strand; PAM type: YTN; PAM sequence: CTG
tcttgaggaaatgggagtat

SEQ ID NO: 319086 - DNA, 20 bp, Artificial Sequence
  Description of Artificial Sequence: Synthetic oligonucleotide
  Target: LAMA2; (+) strand; PAM type: YTN; PAM sequence: CTT
gaggaaatgggagtattcta

SEQ ID NO: 319087 - DNA, 20 bp, Artificial Sequence
  Description of Artificial Sequence: Synthetic oligonucleotide
  Target: LAMA2; (+) strand; PAM type: YTN; PAM sequence: TTG
aggaaatgggagtattctag

SEQ ID NO: 319088 - DNA, 20 bp, Artificial Sequence
  Description of Artificial Sequence: Synthetic oligonucleotide
  Target: LAMA2; (+) strand; PAM type: YTN; PAM sequence: TTC
tagatgcatagtcaggcagt

SEQ ID NO: 319089 - DNA, 20 bp, Artificial Sequence
  Description of Artificial Sequence: Synthetic oligonucleotide
  Target: LAMA2; (+) strand; PAM type: YTN; PAM sequence: CTA
gatgcatagtcaggcagtgt

SEQ ID NO: 319090 - DNA, 20 bp, Artificial Sequence
  Description of Artificial Sequence: Synthetic oligonucleotide
  Target: LAMA2; (+) strand; PAM type: YTN; PAM sequence: TTA
gtatagtgcaagaatggtag

SEQ ID NO: 319091 - DNA, 20 bp, Artificial Sequence
  Description of Artificial Sequence: Synthetic oligonucleotide
  Target: LAMA2; (+) strand; PAM type: YTN; PAM sequence: CTT
gctaaaaagtttggattttg

SEQ ID NO: 319092 - DNA, 20 bp, Artificial Sequence
  Description of Artificial Sequence: Synthetic oligonucleotide
  Target: LAMA2; (+) strand; PAM type: YTN; PAM sequence: TTG
ctaaaaagtttggattttgt

SEQ ID NO: 319093 - DNA, 20 bp, Artificial Sequence
  Description of Artificial Sequence: Synthetic oligonucleotide
  Target: LAMA2; (+) strand; PAM type: YTN; PAM sequence: CTA
aaaagtttggattttgtctt

SEQ ID NO: 319094 - DNA, 20 bp, Artificial Sequence
  Description of Artificial Sequence: Synthetic oligonucleotide
  Target: LAMA2; (+) strand; PAM type: YTN; PAM sequence: TTT
ggattttgtcttctagtgat

SEQ ID NO: 319095 - DNA, 20 bp, Artificial Sequence
  Description of Artificial Sequence: Synthetic oligonucleotide
  Target: LAMA2; (+) strand; PAM type: YTN; PAM sequence: TTG
gattttgtcttctagtgata

SEQ ID NO: 319096 - DNA, 20 bp, Artificial Sequence
  Description of Artificial Sequence: Synthetic oligonucleotide
  Target: LAMA2; (+) strand; PAM type: YTN; PAM sequence: TTT
tgtcttctagtgatagaaat

SEQ ID NO: 319097 - DNA, 20 bp, Artificial Sequence
  Description of Artificial Sequence: Synthetic oligonucleotide
  Target: LAMA2; (+) strand; PAM type: YTN; PAM sequence: TTT
gtcttctagtgatagaaatg

SEQ ID NO: 319098 - DNA, 20 bp, Artificial Sequence
  Description of Artificial Sequence: Synthetic oligonucleotide
  Target: LAMA2; (+) strand; PAM type: YTN; PAM sequence: TTG
tcttctagtgatagaaatgt

SEQ ID NO: 319099 - DNA, 20 bp, Artificial Sequence
  Description of Artificial Sequence: Synthetic oligonucleotide
  Target: LAMA2; (+) strand; PAM type: YTN; PAM sequence: CTT
ctagtgatagaaatgtactg

SEQ ID NO: 319100 - DNA, 20 bp, Artificial Sequence
  Description of Artificial Sequence: Synthetic oligonucleotide
  Target: LAMA2; (+) strand; PAM type: YTN; PAM sequence: TTC
tagtgatagaaatgtactga

SEQ ID NO: 319101 - DNA, 20 bp, Artificial Sequence
  Description of Artificial Sequence: Synthetic oligonucleotide
  Target: LAMA2; (+) strand; PAM type: YTN; PAM sequence: CTA
gtgatagaaatgtactgatg

SEQ ID NO: 319102 - DNA, 20 bp, Artificial Sequence
  Description of Artificial Sequence: Synthetic oligonucleotide
  Target: LAMA2; (+) strand; PAM type: YTN; PAM sequence: CTG
atggtccctgacatgggtaa

SEQ ID NO: 319103 - DNA, 20 bp, Artificial Sequence
  Description of Artificial Sequence: Synthetic oligonucleotide
  Target: LAMA2; (+) strand; PAM type: YTN; PAM sequence: CTG
acatgggtaacagctgcttt

SEQ ID NO: 319104 - DNA, 20 bp, Artificial Sequence
  Description of Artificial Sequence: Synthetic oligonucleotide
  Target: LAMA2; (+) strand; PAM type: YTN; PAM sequence: CTG
ctttagagctgaatttcaag

SEQ ID NO: 319105 - DNA, 20 bp, Artificial Sequence
  Description of Artificial Sequence: Synthetic oligonucleotide
  Target: LAMA2; (+) strand; PAM type: YTN; PAM sequence: CTT
tagagctgaatttcaagaat

SEQ ID NO: 319106 - DNA, 20 bp, Artificial Sequence
  Description of Artificial Sequence: Synthetic oligonucleotide
  Target: LAMA2; (+) strand; PAM type: YTN; PAM sequence: TTT
agagctgaatttcaagaatc

SEQ ID NO: 319107 - DNA, 20 bp, Artificial Sequence
  Description of Artificial Sequence: Synthetic oligonucleotide
  Target: LAMA2; (+) strand; PAM type: YTN; PAM sequence: TTA
gagctgaatttcaagaatca

SEQ ID NO: 319108 - DNA, 20 bp, Artificial Sequence
  Description of Artificial Sequence: Synthetic oligonucleotide
  Target: LAMA2; (+) strand; PAM type: YTN; PAM sequence: CTG
aatttcaagaatcagcttgt

SEQ ID NO: 319109 - DNA, 20 bp, Artificial Sequence
  Description of Artificial Sequence: Synthetic oligonucleotide
  Target: LAMA2; (+) strand; PAM type: YTN; PAM sequence: TTT
caagaatcagcttgtgaaca

SEQ ID NO: 319110 - DNA, 20 bp, Artificial Sequence
  Description of Artificial Sequence: Synthetic oligonucleotide
  Target: LAMA2; (+) strand; PAM type: YTN; PAM sequence: TTC
aagaatcagcttgtgaacaa

SEQ ID NO: 319111 - DNA, 20 bp, Artificial Sequence
  Description of Artificial Sequence: Synthetic oligonucleotide
  Target: LAMA2; (+) strand; PAM type: YTN; PAM sequence: CTT
gtgaacaatgctttggagat

SEQ ID NO: 319112 - DNA, 20 bp, Artificial Sequence
  Description of Artificial Sequence: Synthetic oligonucleotide
  Target: LAMA2; (+) strand; PAM type: YTN; PAM sequence: TTG
tgaacaatgctttggagatt

SEQ ID NO: 319113 - DNA, 20 bp, Artificial Sequence
  Description of Artificial Sequence: Synthetic oligonucleotide
  Target: LAMA2; (+) strand; PAM type: YTN; PAM sequence: CTT
tggagattaagacagtagga

SEQ ID NO: 319114 - DNA, 20 bp, Artificial Sequence
  Description of Artificial Sequence: Synthetic oligonucleotide
  Target: LAMA2; (+) strand; PAM type: YTN; PAM sequence: TTT
ggagattaagacagtaggaa

SEQ ID NO: 319115 - DNA, 20 bp, Artificial Sequence
  Description of Artificial Sequence: Synthetic oligonucleotide
  Target: LAMA2; (+) strand; PAM type: YTN; PAM sequence: TTG
gagattaagacagtaggaag

SEQ ID NO: 319116 - DNA, 20 bp, Artificial Sequence
  Description of Artificial Sequence: Synthetic oligonucleotide
  Target: LAMA2; (+) strand; PAM type: YTN; PAM sequence: TTA
agacagtaggaaggagaaga

SEQ ID NO: 319117 - DNA, 20 bp, Artificial Sequence
  Description of Artificial Sequence: Synthetic oligonucleotide
  Target: LAMA2; (+) strand; PAM type: YTN; PAM sequence: TTT
gaagcagtaaagtgatttag

SEQ ID NO: 319118 - DNA, 20 bp, Artificial Sequence
  Description of Artificial Sequence: Synthetic oligonucleotide
  Target: LAMA2; (+) strand; PAM type: YTN; PAM sequence: TTG
aagcagtaaagtgatttaga

SEQ ID NO: 319119 - DNA, 20 bp, Artificial Sequence
  Description of Artificial Sequence: Synthetic oligonucleotide
  Target: LAMA2; (+) strand; PAM type: YTN; PAM sequence: TTT
agaaaactatttcaatggac

SEQ ID NO: 319120 - DNA, 20 bp, Artificial Sequence
  Description of Artificial Sequence: Synthetic oligonucleotide
  Target: LAMA2; (+) strand; PAM type: YTN; PAM sequence: TTA
gaaaactatttcaatggacc

SEQ ID NO: 319121 - DNA, 20 bp, Artificial Sequence
  Description of Artificial Sequence: Synthetic oligonucleotide
  Target: LAMA2; (+) strand; PAM type: YTN; PAM sequence: CTA
tttcaatggaccagacaaga

SEQ ID NO: 319122 - DNA, 20 bp, Artificial Sequence
  Description of Artificial Sequence: Synthetic oligonucleotide
  Target: LAMA2; (+) strand; PAM type: YTN; PAM sequence: TTT
caatggaccagacaagaaat

SEQ ID NO: 319123 - DNA, 20 bp, Artificial Sequence
  Description of Artificial Sequence: Synthetic oligonucleotide
  Target: LAMA2; (+) strand; PAM type: YTN; PAM sequence: TTC
aatggaccagacaagaaatg

SEQ ID NO: 319124 - DNA, 20 bp, Artificial Sequence
  Description of Artificial Sequence: Synthetic oligonucleotide
  Target: LAMA2; (+) strand; PAM type: YTN; PAM sequence: CTG
aaatgagtggagggagtgga

SEQ ID NO: 319125 - DNA, 20 bp, Artificial Sequence
  Description of Artificial Sequence: Synthetic oligonucleotide
  Target: LAMA2; (+) strand; PAM type: YTN; PAM sequence: CTG
cagttgccatttattggaga

SEQ ID NO: 319126 - DNA, 20 bp, Artificial Sequence
  Description of Artificial Sequence: Synthetic oligonucleotide
  Target: LAMA2; (+) strand; PAM type: YTN; PAM sequence: TTG
ccatttattggagaaactga

SEQ ID NO: 319127 - DNA, 20 bp, Artificial Sequence
  Description of Artificial Sequence: Synthetic oligonucleotide
  Target: LAMA2; (+) strand; PAM type: YTN; PAM sequence: TTT
attggagaaactgaatttca

SEQ ID NO: 319128 - DNA, 20 bp, Artificial Sequence
  Description of Artificial Sequence: Synthetic oligonucleotide
  Target: LAMA2; (+) strand; PAM type: YTN; PAM sequence: TTA
ttggagaaactgaatttcag

SEQ ID NO: 319129 - DNA, 20 bp, Artificial Sequence
  Description of Artificial Sequence: Synthetic oligonucleotide
  Target: LAMA2; (+) strand; PAM type: YTN; PAM sequence: TTG
gagaaactgaatttcaggga

SEQ ID NO: 319130 - DNA, 20 bp, Artificial Sequence
  Description of Artificial Sequence: Synthetic oligonucleotide
  Target: LAMA2; (+) strand; PAM type: YTN; PAM sequence: CTG
aatttcagggatttggatca

SEQ ID NO: 319131 - DNA, 20 bp, Artificial Sequence
  Description of Artificial Sequence: Synthetic oligonucleotide
  Target: LAMA2; (+) strand; PAM type: YTN; PAM sequence: TTT
cagggatttggatcaggtca

SEQ ID NO: 319132 - DNA, 20 bp, Artificial Sequence
  Description of Artificial Sequence: Synthetic oligonucleotide
  Target: LAMA2; (+) strand; PAM type: YTN; PAM sequence: TTC
agggatttggatcaggtcaa

SEQ ID NO: 319133 - DNA, 20 bp, Artificial Sequence
  Description of Artificial Sequence: Synthetic oligonucleotide
  Target: LAMA2; (+) strand; PAM type: YTN; PAM sequence: TTT
ggatcaggtcaaggtatgtt

SEQ ID NO: 319134 - DNA, 20 bp, Artificial Sequence
  Description of Artificial Sequence: Synthetic oligonucleotide
  Target: LAMA2; (+) strand; PAM type: YTN; PAM sequence: TTG
gatcaggtcaaggtatgtta

SEQ ID NO: 319135 - DNA, 20 bp, Artificial Sequence
  Description of Artificial Sequence: Synthetic oligonucleotide
  Target: LAMA2; (+) strand; PAM type: YTN; PAM sequence: TTA
tgcacataaaccaaatatta

SEQ ID NO: 319136 - DNA, 20 bp, Artificial Sequence
  Description of Artificial Sequence: Synthetic oligonucleotide
  Target: LAMA2; (+) strand; PAM type: YTN; PAM sequence: TTA
atgatatttatttagtgtgc

SEQ ID NO: 319137 - DNA, 20 bp, Artificial Sequence
  Description of Artificial Sequence: Synthetic oligonucleotide
  Target: LAMA2; (+) strand; PAM type: YTN; PAM sequence: TTT
atttagtgtgcaccagtgat

SEQ ID NO: 319138 - DNA, 20 bp, Artificial Sequence
  Description of Artificial Sequence: Synthetic oligonucleotide
  Target: LAMA2; (+) strand; PAM type: YTN; PAM sequence: TTA
tttagtgtgcaccagtgata

SEQ ID NO: 319139 - DNA, 20 bp, Artificial Sequence
  Description of Artificial Sequence: Synthetic oligonucleotide
  Target: LAMA2; (+) strand; PAM type: YTN; PAM sequence: TTT
agtgtgcaccagtgatattt

SEQ ID NO: 319140 - DNA, 20 bp, Artificial Sequence
  Description of Artificial Sequence: Synthetic oligonucleotide
  Target: LAMA2; (+) strand; PAM type: YTN; PAM sequence: TTA
gtgtgcaccagtgatatttg

SEQ ID NO: 319141 - DNA, 20 bp, Artificial Sequence
  Description of Artificial Sequence: Synthetic oligonucleotide
  Target: LAMA2; (+) strand; PAM type: YTN; PAM sequence: TTT
gttttttccttcgctaaact

SEQ ID NO: 319142 - DNA, 20 bp, Artificial Sequence
  Description of Artificial Sequence: Synthetic oligonucleotide
  Target: LAMA2; (+) strand; PAM type: YTN; PAM sequence: TTG
ttttttccttcgctaaactg

SEQ ID NO: 319143 - DNA, 20 bp, Artificial Sequence
  Description of Artificial Sequence: Synthetic oligonucleotide
  Target: LAMA2; (+) strand; PAM type: YTN; PAM sequence: TTT
tttccttcgctaaactgaag

SEQ ID NO: 319144 - DNA, 20 bp, Artificial Sequence
  Description of Artificial Sequence: Synthetic oligonucleotide
  Target: LAMA2; (+) strand; PAM type: YTN; PAM sequence: TTT
ttccttcgctaaactgaaga

SEQ ID NO: 319145 - DNA, 20 bp, Artificial Sequence
  Description of Artificial Sequence: Synthetic oligonucleotide
  Target: LAMA2; (+) strand; PAM type: YTN; PAM sequence: TTT
tccttcgctaaactgaagat

SEQ ID NO: 319146 - DNA, 20 bp, Artificial Sequence
  Description of Artificial Sequence: Synthetic oligonucleotide
  Target: LAMA2; (+) strand; PAM type: YTN; PAM sequence: TTT
ccttcgctaaactgaagatt

SEQ ID NO: 319147 - DNA, 20 bp, Artificial Sequence
  Description of Artificial Sequence: Synthetic oligonucleotide
  Target: LAMA2; (+) strand; PAM type: YTN; PAM sequence: TTC
cttcgctaaactgaagatta

SEQ ID NO: 319148 - DNA, 20 bp, Artificial Sequence
  Description of Artificial Sequence: Synthetic oligonucleotide
  Target: LAMA2; (+) strand; PAM type: YTN; PAM sequence: CTT
cgctaaactgaagattaagg

SEQ ID NO: 319149 - DNA, 20 bp, Artificial Sequence
  Description of Artificial Sequence: Synthetic oligonucleotide
  Target: LAMA2; (+) strand; PAM type: YTN; PAM sequence: TTC
gctaaactgaagattaaggc

SEQ ID NO: 319150 - DNA, 20 bp, Artificial Sequence
  Description of Artificial Sequence: Synthetic oligonucleotide
  Target: LAMA2; (+) strand; PAM type: YTN; PAM sequence: CTA
aactgaagattaaggcaatc

SEQ ID NO: 319151 - DNA, 20 bp, Artificial Sequence
  Description of Artificial Sequence: Synthetic oligonucleotide
  Target: LAMA2; (+) strand; PAM type: YTN; PAM sequence: CTG
aagattaaggcaatcagaac

SEQ ID NO: 319152 - DNA, 20 bp, Artificial Sequence
  Description of Artificial Sequence: Synthetic oligonucleotide
  Target: LAMA2; (+) strand; PAM type: YTN; PAM sequence: TTA
aggcaatcagaacctagtaa

SEQ ID NO: 319153 - DNA, 20 bp, Artificial Sequence
  Description of Artificial Sequence: Synthetic oligonucleotide
  Target: LAMA2; (+) strand; PAM type: YTN; PAM sequence: CTA
gtaaacattgctgaattcac

SEQ ID NO: 319154 - DNA, 20 bp, Artificial Sequence
  Description of Artificial Sequence: Synthetic oligonucleotide
  Target: LAMA2; (+) strand; PAM type: YTN; PAM sequence: TTG
ctgaattcaccattgtatcc

SEQ ID NO: 319155 - DNA, 20 bp, Artificial Sequence
  Description of Artificial Sequence: Synthetic oligonucleotide
  Target: LAMA2; (+) strand; PAM type: YTN; PAM sequence: CTG
aattcaccattgtatccccc

SEQ ID NO: 319156 - DNA, 20 bp, Artificial Sequence
  Description of Artificial Sequence: Synthetic oligonucleotide
  Target: LAMA2; (+) strand; PAM type: YTN; PAM sequence: TTC
accattgtatcccccagtgc

SEQ ID NO: 319157 - DNA, 20 bp, Artificial Sequence
  Description of Artificial Sequence: Synthetic oligonucleotide
  Target: LAMA2; (+) strand; PAM type: YTN; PAM sequence: TTG
tatcccccagtgctaataca

SEQ ID NO: 319158 - DNA, 20 bp, Artificial Sequence
  Description of Artificial Sequence: Synthetic oligonucleotide
  Target: LAMA2; (+) strand; PAM type: YTN; PAM sequence: CTA
atacacaaaaagtatacaat

SEQ ID NO: 319159 - DNA, 20 bp, Artificial Sequence
  Description of Artificial Sequence: Synthetic oligonucleotide
  Target: LAMA2; (+) strand; PAM type: YTN; PAM sequence: TTC
tactacctacctttcgcagt

SEQ ID NO: 319160 - DNA, 20 bp, Artificial Sequence
  Description of Artificial Sequence: Synthetic oligonucleotide
  Target: LAMA2; (+) strand; PAM type: YTN; PAM sequence: CTA
ctacctacctttcgcagtgt

SEQ ID NO: 319161 - DNA, 20 bp, Artificial Sequence
  Description of Artificial Sequence: Synthetic oligonucleotide
  Target: LAMA2; (+) strand; PAM type: YTN; PAM sequence: CTA
cctacctttcgcagtgtggc

SEQ ID NO: 319162 - DNA, 20 bp, Artificial Sequence
  Description of Artificial Sequence: Synthetic oligonucleotide
  Target: LAMA2; (+) strand; PAM type: YTN; PAM sequence: CTA
cctttcgcagtgtggctatc

SEQ ID NO: 319163 - DNA, 20 bp, Artificial Sequence
  Description of Artificial Sequence: Synthetic oligonucleotide
  Target: LAMA2; (+) strand; PAM type: YTN; PAM sequence: CTT
tcgcagtgtggctatccttg

SEQ ID NO: 319164 - DNA, 20 bp, Artificial Sequence
  Description of Artificial Sequence: Synthetic oligonucleotide
  Target: LAMA2; (+) strand; PAM type: YTN; PAM sequence: TTT
cgcagtgtggctatccttgc

SEQ ID NO: 319165 - DNA, 20 bp, Artificial Sequence
  Description of Artificial Sequence: Synthetic oligonucleotide
  Target: LAMA2; (+) strand; PAM type: YTN; PAM sequence: TTC
gcagtgtggctatccttgca

SEQ ID NO: 319166 - DNA, 20 bp, Artificial Sequence
  Description of Artificial Sequence: Synthetic oligonucleotide
  Target: LAMA2; (+) strand; PAM type: YTN; PAM sequence: CTA
tccttgcaaatttcaccctt

SEQ ID NO: 319167 - DNA, 20 bp, Artificial Sequence
  Description of Artificial Sequence: Synthetic oligonucleotide
  Target: LAMA2; (+) strand; PAM type: YTN; PAM sequence: CTT
gcaaatttcaccctttccct

SEQ ID NO: 319168 - DNA, 20 bp, Artificial Sequence
  Description of Artificial Sequence: Synthetic oligonucleotide
  Target: LAMA2; (+) strand; PAM type: YTN; PAM sequence: TTG
caaatttcaccctttccctt

SEQ ID NO: 319169 - DNA, 20 bp, Artificial Sequence
  Description of Artificial Sequence: Synthetic oligonucleotide
  Target: LAMA2; (+) strand; PAM type: YTN; PAM sequence: TTT
caccctttcccttcctttca

SEQ ID NO: 319170 - DNA, 20 bp, Artificial Sequence
  Description of Artificial Sequence: Synthetic oligonucleotide
  Target: LAMA2; (+) strand; PAM type: YTN; PAM sequence: TTC
accctttcccttcctttcag

SEQ ID NO: 319171 - DNA, 20 bp, Artificial Sequence
  Description of Artificial Sequence: Synthetic oligonucleotide
  Target: LAMA2; (+) strand; PAM type: YTN; PAM sequence: CTT
tcccttcctttcagtcattc

SEQ ID NO: 319172 - DNA, 20 bp, Artificial Sequence
  Description of Artificial Sequence: Synthetic oligonucleotide
  Target: LAMA2; (+) strand; PAM type: YTN; PAM sequence: TTT
cccttcctttcagtcattct

SEQ ID NO: 319173 - DNA, 20 bp, Artificial Sequence
  Description of Artificial Sequence: Synthetic oligonucleotide
  Target: LAMA2; (+) strand; PAM type: YTN; PAM sequence: TTC
ccttcctttcagtcattctt

SEQ ID NO: 319174 - DNA, 20 bp, Artificial Sequence
  Description of Artificial Sequence: Synthetic oligonucleotide
  Target: LAMA2; (+) strand; PAM type: YTN; PAM sequence: CTT
cctttcagtcattcttgttt

SEQ ID NO: 319175 - DNA, 20 bp, Artificial Sequence
  Description of Artificial Sequence: Synthetic oligonucleotide
  Target: LAMA2; (+) strand; PAM type: YTN; PAM sequence: TTC
ctttcagtcattcttgtttc

SEQ ID NO: 319176 - DNA, 20 bp, Artificial Sequence
  Description of Artificial Sequence: Synthetic oligonucleotide
  Target: LAMA2; (+) strand; PAM type: YTN; PAM sequence: CTT
tcagtcattcttgtttcccc

SEQ ID NO: 319177 - DNA, 20 bp, Artificial Sequence
  Description of Artificial Sequence: Synthetic oligonucleotide
  Target: LAMA2; (+) strand; PAM type: YTN; PAM sequence: TTT
cagtcattcttgtttcccca

SEQ ID NO: 319178 - DNA, 20 bp, Artificial Sequence
  Description of Artificial Sequence: Synthetic oligonucleotide
  Target: LAMA2; (+) strand; PAM type: YTN; PAM sequence: TTC
agtcattcttgtttccccat

SEQ ID NO: 319179 - DNA, 20 bp, Artificial Sequence
  Description of Artificial Sequence: Synthetic oligonucleotide
  Target: LAMA2; (+) strand; PAM type: YTN; PAM sequence: TTC
ttgtttccccatgctccata

SEQ ID NO: 319180 - DNA, 20 bp, Artificial Sequence
  Description of Artificial Sequence: Synthetic oligonucleotide
  Target: LAMA2; (+) strand; PAM type: YTN; PAM sequence: CTT
gtttccccatgctccataga

SEQ ID NO: 319181 - DNA, 20 bp, Artificial Sequence
  Description of Artificial Sequence: Synthetic oligonucleotide
  Target: LAMA2; (+) strand; PAM type: YTN; PAM sequence: TTG
tttccccatgctccatagat

SEQ ID NO: 319182 - DNA, 20 bp, Artificial Sequence
  Description of Artificial Sequence: Synthetic oligonucleotide
  Target: LAMA2; (+) strand; PAM type: YTN; PAM sequence: TTT
ccccatgctccatagatcat

SEQ ID NO: 319183 - DNA, 20 bp, Artificial Sequence
  Description of Artificial Sequence: Synthetic oligonucleotide
  Target: LAMA2; (+) strand; PAM type: YTN; PAM sequence: TTC
cccatgctccatagatcatt

SEQ ID NO: 319184 - DNA, 20 bp, Artificial Sequence
  Description of Artificial Sequence: Synthetic oligonucleotide
  Target: LAMA2; (+) strand; PAM type: YTN; PAM sequence: CTC
catagatcatttagccacca

SEQ ID NO: 319185 - DNA, 20 bp, Artificial Sequence
  Description of Artificial Sequence: Synthetic oligonucleotide
  Target: LAMA2; (+) strand; PAM type: YTN; PAM sequence: TTT
agccaccacatctttttgtg

SEQ ID NO: 319186 - DNA, 20 bp, Artificial Sequence
  Description of Artificial Sequence: Synthetic oligonucleotide
  Target: LAMA2; (+) strand; PAM type: YTN; PAM sequence: TTA
gccaccacatctttttgtgt

SEQ ID NO: 319187 - DNA, 20 bp, Artificial Sequence
  Description of Artificial Sequence: Synthetic oligonucleotide
  Target: LAMA2; (+) strand; PAM type: YTN; PAM sequence: CTT
tttgtgttattttgttttct

SEQ ID NO: 319188 - DNA, 20 bp, Artificial Sequence
  Description of Artificial Sequence: Synthetic oligonucleotide
  Target: LAMA2; (+) strand; PAM type: YTN; PAM sequence: TTT
ttgtgttattttgttttctg

SEQ ID NO: 319189 - DNA, 20 bp, Artificial Sequence
  Description of Artificial Sequence: Synthetic oligonucleotide
  Target: LAMA2; (+) strand; PAM type: YTN; PAM sequence: TTT
tgtgttattttgttttctgc

SEQ ID NO: 319190 - DNA, 20 bp, Artificial Sequence
  Description of Artificial Sequence: Synthetic oligonucleotide
  Target: LAMA2; (+) strand; PAM type: YTN; PAM sequence: TTT
gtgttattttgttttctgca

SEQ ID NO: 319191 - DNA, 20 bp, Artificial Sequence
  Description of Artificial Sequence: Synthetic oligonucleotide
  Target: LAMA2; (+) strand; PAM type: YTN; PAM sequence: TTG
tgttattttgttttctgcaa

SEQ ID NO: 319192 - DNA, 20 bp, Artificial Sequence
  Description of Artificial Sequence: Synthetic oligonucleotide
  Target: LAMA2; (+) strand; PAM type: YTN; PAM sequence: TTA
ttttgttttctgcaatgatg

SEQ ID NO: 319193 - DNA, 20 bp, Artificial Sequence
  Description of Artificial Sequence: Synthetic oligonucleotide
  Target: LAMA2; (+) strand; PAM type: YTN; PAM sequence: TTT
tgttttctgcaatgatgctg

SEQ ID NO: 319194 - DNA, 20 bp, Artificial Sequence
  Description of Artificial Sequence: Synthetic oligonucleotide
  Target: LAMA2; (+) strand; PAM type: YTN; PAM sequence: TTT
gttttctgcaatgatgctgg

SEQ ID NO: 319195 - DNA, 20 bp, Artificial Sequence
  Description of Artificial Sequence: Synthetic oligonucleotide
  Target: LAMA2; (+) strand; PAM type: YTN; PAM sequence: TTG
ttttctgcaatgatgctggt

SEQ ID NO: 319196 - DNA, 20 bp, Artificial Sequence
  Description of Artificial Sequence: Synthetic oligonucleotide
  Target: LAMA2; (+) strand; PAM type: YTN; PAM sequence: TTT
tctgcaatgatgctggtata

SEQ ID NO: 319197 - DNA, 20 bp, Artificial Sequence
  Description of Artificial Sequence: Synthetic oligonucleotide
  Target: LAMA2; (+) strand; PAM type: YTN; PAM sequence: TTT
ctgcaatgatgctggtataa

SEQ ID NO: 319198 - DNA, 20 bp, Artificial Sequence
  Description of Artificial Sequence: Synthetic oligonucleotide
  Target: LAMA2; (+) strand; PAM type: YTN; PAM sequence: TTC
tgcaatgatgctggtataat

SEQ ID NO: 319199 - DNA, 20 bp, Artificial Sequence
  Description of Artificial Sequence: Synthetic oligonucleotide
  Target: LAMA2; (+) strand; PAM type: YTN; PAM sequence: CTG
caatgatgctggtataattc

SEQ ID NO: 319200 - DNA, 20 bp, Artificial Sequence
  Description of Artificial Sequence: Synthetic oligonucleotide
  Target: LAMA2; (+) strand; PAM type: YTN; PAM sequence: CTG
gtataattcagaactactag

SEQ ID NO: 319201 - DNA, 20 bp, Artificial Sequence
  Description of Artificial Sequence: Synthetic oligonucleotide
  Target: LAMA2; (+) strand; PAM type: YTN; PAM sequence: TTC
agaactactagcaaaatctc

SEQ ID NO: 319202 - DNA, 20 bp, Artificial Sequence
  Description of Artificial Sequence: Synthetic oligonucleotide
  Target: LAMA2; (+) strand; PAM type: YTN; PAM sequence: CTA
ctagcaaaatctcatctcta

SEQ ID NO: 319203 - DNA, 20 bp, Artificial Sequence
  Description of Artificial Sequence: Synthetic oligonucleotide
  Target: LAMA2; (+) strand; PAM type: YTN; PAM sequence: CTA
gcaaaatctcatctctagct

SEQ ID NO: 319204 - DNA, 20 bp, Artificial Sequence
  Description of Artificial Sequence: Synthetic oligonucleotide
  Target: LAMA2; (+) strand; PAM type: YTN; PAM sequence: CTC
atctctagcttcatgtgata

SEQ ID NO: 319205 - DNA, 20 bp, Artificial Sequence
  Description of Artificial Sequence: Synthetic oligonucleotide
  Target: LAMA2; (+) strand; PAM type: YTN; PAM sequence: CTC
tagcttcatgtgatattttc

SEQ ID NO: 319206 - DNA, 20 bp, Artificial Sequence
  Description of Artificial Sequence: Synthetic oligonucleotide
  Target: LAMA2; (+) strand; PAM type: YTN; PAM sequence: CTA
gcttcatgtgatattttcct

SEQ ID NO: 319207 - DNA, 20 bp, Artificial Sequence
  Description of Artificial Sequence: Synthetic oligonucleotide
  Target: LAMA2; (+) strand; PAM type: YTN; PAM sequence: CTT
catgtgatattttcctgctt

SEQ ID NO: 319208 - DNA, 20 bp, Artificial Sequence
  Description of Artificial Sequence: Synthetic oligonucleotide
  Target: LAMA2; (+) strand; PAM type: YTN; PAM sequence: TTC
atgtgatattttcctgctta

SEQ ID NO: 319209 - DNA, 20 bp, Artificial Sequence
  Description of Artificial Sequence: Synthetic oligonucleotide
  Target: LAMA2; (+) strand; PAM type: YTN; PAM sequence: TTT
tcctgcttataaactaccca

SEQ ID NO: 319210 - DNA, 20 bp, Artificial Sequence
  Description of Artificial Sequence: Synthetic oligonucleotide
  Target: LAMA2; (+) strand; PAM type: YTN; PAM sequence: TTT
cctgcttataaactacccat

SEQ ID NO: 319211 - DNA, 20 bp, Artificial Sequence
  Description of Artificial Sequence: Synthetic oligonucleotide
  Target: LAMA2; (+) strand; PAM type: YTN; PAM sequence: TTC
ctgcttataaactacccata

SEQ ID NO: 319212 - DNA, 20 bp, Artificial Sequence
  Description of Artificial Sequence: Synthetic oligonucleotide
  Target: LAMA2; (+) strand; PAM type: YTN; PAM sequence: CTG
cttataaactacccatattc

SEQ ID NO: 319213 - DNA, 20 bp, Artificial Sequence
  Description of Artificial Sequence: Synthetic oligonucleotide
  Target: LAMA2; (+) strand; PAM type: YTN; PAM sequence: CTT
ataaactacccatattcttg

SEQ ID NO: 319214 - DNA, 20 bp, Artificial Sequence
  Description of Artificial Sequence: Synthetic oligonucleotide
  Target: LAMA2; (+) strand; PAM type: YTN; PAM sequence: TTA
taaactacccatattcttgc

SEQ ID NO: 319215 - DNA, 20 bp, Artificial Sequence
  Description of Artificial Sequence: Synthetic oligonucleotide
  Target: LAMA2; (+) strand; PAM type: YTN; PAM sequence: CTA
cccatattcttgctgtgcta

SEQ ID NO: 319216 - DNA, 20 bp, Artificial Sequence
  Description of Artificial Sequence: Synthetic oligonucleotide
  Target: LAMA2; (+) strand; PAM type: YTN; PAM sequence: TTC
ttgctgtgctatagtcaata

SEQ ID NO: 319217 - DNA, 20 bp, Artificial Sequence
  Description of Artificial Sequence: Synthetic oligonucleotide
  Target: LAMA2; (+) strand; PAM type: YTN; PAM sequence: CTT
gctgtgctatagtcaatatg

SEQ ID NO: 319218 - DNA, 20 bp, Artificial Sequence
  Description of Artificial Sequence: Synthetic oligonucleotide
  Target: LAMA2; (+) strand; PAM type: YTN; PAM sequence: TTG
ctgtgctatagtcaatatgt

SEQ ID NO: 319219 - DNA, 20 bp, Artificial Sequence
  Description of Artificial Sequence: Synthetic oligonucleotide
  Target: LAMA2; (+) strand; PAM type: YTN; PAM sequence: CTG
tgctatagtcaatatgtgta

SEQ ID NO: 319220 - DNA, 20 bp, Artificial Sequence
  Description of Artificial Sequence: Synthetic oligonucleotide
  Target: LAMA2; (+) strand; PAM type: YTN; PAM sequence: CTA
tagtcaatatgtgtaactct

SEQ ID NO: 319221 - DNA, 20 bp, Artificial Sequence
  Description of Artificial Sequence: Synthetic oligonucleotide
  Target: LAMA2; (+) strand; PAM type: YTN; PAM sequence: CTC
ttctgaggcctcctcattca

SEQ ID NO: 319222 - DNA, 20 bp, Artificial Sequence
  Description of Artificial Sequence: Synthetic oligonucleotide
  Target: LAMA2; (+) strand; PAM type: YTN; PAM sequence: CTT
ctgaggcctcctcattcatt

SEQ ID NO: 319223 - DNA, 20 bp, Artificial Sequence
  Description of Artificial Sequence: Synthetic oligonucleotide
  Target: LAMA2; (+) strand; PAM type: YTN; PAM sequence: TTC
tgaggcctcctcattcattg

SEQ ID NO: 319224 - DNA, 20 bp, Artificial Sequence
  Description of Artificial Sequence: Synthetic oligonucleotide
  Target: LAMA2; (+) strand; PAM type: YTN; PAM sequence: CTG
aggcctcctcattcattgca

SEQ ID NO: 319225 - DNA, 20 bp, Artificial Sequence
  Description of Artificial Sequence: Synthetic oligonucleotide
  Target: LAMA2; (+) strand; PAM type: YTN; PAM sequence: CTC
ctcattcattgcagatgttt

SEQ ID NO: 319226 - DNA, 20 bp, Artificial Sequence
  Description of Artificial Sequence: Synthetic oligonucleotide
  Target: LAMA2; (+) strand; PAM type: YTN; PAM sequence: CTC
attcattgcagatgtttgca

SEQ ID NO: 319227 - DNA, 20 bp, Artificial Sequence
  Description of Artificial Sequence: Synthetic oligonucleotide
  Target: LAMA2; (+) strand; PAM type: YTN; PAM sequence: TTC
attgcagatgtttgcaaact

SEQ ID NO: 319228 - DNA, 20 bp, Artificial Sequence
  Description of Artificial Sequence: Synthetic oligonucleotide
  Target: LAMA2; (+) strand; PAM type: YTN; PAM sequence: TTG
cagatgtttgcaaacttacc

SEQ ID NO: 319229 - DNA, 20 bp, Artificial Sequence
  Description of Artificial Sequence: Synthetic oligonucleotide
  Target: LAMA2; (+) strand; PAM type: YTN; PAM sequence: TTT
gcaaacttacctctcttctt

SEQ ID NO: 319230 - DNA, 20 bp, Artificial Sequence
  Description of Artificial Sequence: Synthetic oligonucleotide
  Target: LAMA2; (+) strand; PAM type: YTN; PAM sequence: TTG
caaacttacctctcttctta

SEQ ID NO: 319231 - DNA, 20 bp, Artificial Sequence
  Description of Artificial Sequence: Synthetic oligonucleotide
  Target: LAMA2; (+) strand; PAM type: YTN; PAM sequence: CTT
acctctcttcttaagggccc

SEQ ID NO: 319232 - DNA, 20 bp, Artificial Sequence
  Description of Artificial Sequence: Synthetic oligonucleotide
  Target: LAMA2; (+) strand; PAM type: YTN; PAM sequence: TTA
cctctcttcttaagggccca

SEQ ID NO: 319233 - DNA, 20 bp, Artificial Sequence
  Description of Artificial Sequence: Synthetic oligonucleotide
  Target: LAMA2; (+) strand; PAM type: YTN; PAM sequence: CTC
tcttcttaagggcccattcg

SEQ ID NO: 319234 - DNA, 20 bp, Artificial Sequence
  Description of Artificial Sequence: Synthetic oligonucleotide
  Target: LAMA2; (+) strand; PAM type: YTN; PAM sequence: CTC
ttcttaagggcccattcgta

SEQ ID NO: 319235 - DNA, 20 bp, Artificial Sequence
  Description of Artificial Sequence: Synthetic oligonucleotide
  Target: LAMA2; (+) strand; PAM type: YTN; PAM sequence: CTT
cttaagggcccattcgtatg

SEQ ID NO: 319236 - DNA, 20 bp, Artificial Sequence
  Description of Artificial Sequence: Synthetic oligonucleotide
  Target: LAMA2; (+) strand; PAM type: YTN; PAM sequence: TTC
ttaagggcccattcgtatgt

SEQ ID NO: 319237 - DNA, 20 bp, Artificial Sequence
  Description of Artificial Sequence: Synthetic oligonucleotide
  Target: LAMA2; (+) strand; PAM type: YTN; PAM sequence: CTT
aagggcccattcgtatgtac

SEQ ID NO: 319238 - DNA, 20 bp, Artificial Sequence
  Description of Artificial Sequence: Synthetic oligonucleotide
  Target: LAMA2; (+) strand; PAM type: YTN; PAM sequence: TTA
agggcccattcgtatgtact

SEQ ID NO: 319239 - DNA, 20 bp, Artificial Sequence
  Description of Artificial Sequence: Synthetic oligonucleotide
  Target: LAMA2; (+) strand; PAM type: YTN; PAM sequence: TTC
gtatgtacttaaataggaag

SEQ ID NO: 319240 - DNA, 20 bp, Artificial Sequence
  Description of Artificial Sequence: Synthetic oligonucleotide
  Target: LAMA2; (+) strand; PAM type: YTN; PAM sequence: CTT
aaataggaagatcatcagag

SEQ ID NO: 319241 - DNA, 20 bp, Artificial Sequence
  Description of Artificial Sequence: Synthetic oligonucleotide
  Target: LAMA2; (+) strand; PAM type: YTN; PAM sequence: TTA
aataggaagatcatcagaga

SEQ ID NO: 319242 - DNA, 20 bp, Artificial Sequence
  Description of Artificial Sequence: Synthetic oligonucleotide
  Target: LAMA2; (+) strand; PAM type: YTN; PAM sequence: CTC
ccttagctactgttcttttc

SEQ ID NO: 319243 - DNA, 20 bp, Artificial Sequence
  Description of Artificial Sequence: Synthetic oligonucleotide
  Target: LAMA2; (+) strand; PAM type: YTN; PAM sequence: CTT
agctactgttcttttctcta

SEQ ID NO: 319244 - DNA, 20 bp, Artificial Sequence
  Description of Artificial Sequence: Synthetic oligonucleotide
  Target: LAMA2; (+) strand; PAM type: YTN; PAM sequence: TTA
gctactgttcttttctctaa

SEQ ID NO: 319245 - DNA, 20 bp, Artificial Sequence
  Description of Artificial Sequence: Synthetic oligonucleotide
  Target: LAMA2; (+) strand; PAM type: YTN; PAM sequence: CTA
ctgttcttttctctaaattt

SEQ ID NO: 319246 - DNA, 20 bp, Artificial Sequence
  Description of Artificial Sequence: Synthetic oligonucleotide
  Target: LAMA2; (+) strand; PAM type: YTN; PAM sequence: CTG
ttcttttctctaaatttctc

SEQ ID NO: 319247 - DNA, 20 bp, Artificial Sequence
  Description of Artificial Sequence: Synthetic oligonucleotide
  Target: LAMA2; (+) strand; PAM type: YTN; PAM sequence: TTC
ttttctctaaatttctcttt

SEQ ID NO: 319248 - DNA, 20 bp, Artificial Sequence
  Description of Artificial Sequence: Synthetic oligonucleotide
  Target: LAMA2; (+) strand; PAM type: YTN; PAM sequence: CTT
ttctctaaatttctcttttt

SEQ ID NO: 319249 - DNA, 20 bp, Artificial Sequence
  Description of Artificial Sequence: Synthetic oligonucleotide
  Target: LAMA2; (+) strand; PAM type: YTN; PAM sequence: TTT
tctctaaatttctctttttc

SEQ ID NO: 319250 - DNA, 20 bp, Artificial Sequence
  Description of Artificial Sequence: Synthetic oligonucleotide
  Target: LAMA2; (+) strand; PAM type: YTN; PAM sequence: TTT
ctctaaatttctctttttct

SEQ ID NO: 319251 - DNA, 20 bp, Artificial Sequence
  Description of Artificial Sequence: Synthetic oligonucleotide
  Target: LAMA2; (+) strand; PAM type: YTN; PAM sequence: TTC
tctaaatttctctttttctc

SEQ ID NO: 319252 - DNA, 20 bp, Artificial Sequence
  Description of Artificial Sequence: Synthetic oligonucleotide
  Target: LAMA2; (+) strand; PAM type: YTN; PAM sequence: CTC
taaatttctctttttctctg

SEQ ID NO: 319253 - DNA, 20 bp, Artificial Sequence
  Description of Artificial Sequence: Synthetic oligonucleotide
  Target: LAMA2; (+) strand; PAM type: YTN; PAM sequence: CTA
aatttctctttttctctgtt

SEQ ID NO: 319254 - DNA, 20 bp, Artificial Sequence
  Description of Artificial Sequence: Synthetic oligonucleotide
  Target: LAMA2; (+) strand; PAM type: YTN; PAM sequence: TTT
ctctttttctctgttcaaaa

SEQ ID NO: 319255 - DNA, 20 bp, Artificial Sequence
  Description of Artificial Sequence: Synthetic oligonucleotide
  Target: LAMA2; (+) strand; PAM type: YTN; PAM sequence: TTC
tctttttctctgttcaaaaa

SEQ ID NO: 319256 - DNA, 20 bp, Artificial Sequence
  Description of Artificial Sequence: Synthetic oligonucleotide
  Target: LAMA2; (+) strand; PAM type: YTN; PAM sequence: CTC
tttttctctgttcaaaaaat

SEQ ID NO: 319257 - DNA, 20 bp, Artificial Sequence
  Description of Artificial Sequence: Synthetic oligonucleotide
  Target: LAMA2; (+) strand; PAM type: YTN; PAM sequence: CTT
tttctctgttcaaaaaattt

SEQ ID NO: 319258 - DNA, 20 bp, Artificial Sequence
  Description of Artificial Sequence: Synthetic oligonucleotide
  Target: LAMA2; (+) strand; PAM type: YTN; PAM sequence: TTT
ttctctgttcaaaaaatttc

SEQ ID NO: 319259 - DNA, 20 bp, Artificial Sequence
  Description of Artificial Sequence: Synthetic oligonucleotide
  Target: LAMA2; (+) strand; PAM type: YTN; PAM sequence: TTT
tctctgttcaaaaaatttcc

SEQ ID NO: 319260 - DNA, 20 bp, Artificial Sequence
  Description of Artificial Sequence: Synthetic oligonucleotide
  Target: LAMA2; (+) strand; PAM type: YTN; PAM sequence: TTT
ctctgttcaaaaaatttcca

SEQ ID NO: 319261 - DNA, 20 bp, Artificial Sequence
  Description of Artificial Sequence: Synthetic oligonucleotide
  Target: LAMA2; (+) strand; PAM type: YTN; PAM sequence: TTC
tctgttcaaaaaatttccaa

SEQ ID NO: 319262 - DNA, 20 bp, Artificial Sequence
  Description of Artificial Sequence: Synthetic oligonucleotide
  Target: LAMA2; (+) strand; PAM type: YTN; PAM sequence: CTC
tgttcaaaaaatttccaact

SEQ ID NO: 319263 - DNA, 20 bp, Artificial Sequence
  Description of Artificial Sequence: Synthetic oligonucleotide
  Target: LAMA2; (+) strand; PAM type: YTN; PAM sequence: CTG
ttcaaaaaatttccaacttt

SEQ ID NO: 319264 - DNA, 20 bp, Artificial Sequence
  Description of Artificial Sequence: Synthetic oligonucleotide
  Target: LAMA2; (+) strand; PAM type: YTN; PAM sequence: TTC
aaaaaatttccaactttcaa

SEQ ID NO: 319265 - DNA, 20 bp, Artificial Sequence
  Description of Artificial Sequence: Synthetic oligonucleotide
  Target: LAMA2; (+) strand; PAM type: YTN; PAM sequence: TTT
ccaactttcaactttgtgga

SEQ ID NO: 319266 - DNA, 20 bp, Artificial Sequence
  Description of Artificial Sequence: Synthetic oligonucleotide
  Target: LAMA2; (+) strand; PAM type: YTN; PAM sequence: TTC
caactttcaactttgtggac

SEQ ID NO: 319267 - DNA, 20 bp, Artificial Sequence
  Description of Artificial Sequence: Synthetic oligonucleotide
  Target: LAMA2; (+) strand; PAM type: YTN; PAM sequence: CTT
tcaactttgtggacacttct

SEQ ID NO: 319268 - DNA, 20 bp, Artificial Sequence
  Description of Artificial Sequence: Synthetic oligonucleotide
  Target: LAMA2; (+) strand; PAM type: YTN; PAM sequence: TTT
caactttgtggacacttctg

SEQ ID NO: 319269 - DNA, 20 bp, Artificial Sequence
  Description of Artificial Sequence: Synthetic oligonucleotide
  Target: LAMA2; (+) strand; PAM type: YTN; PAM sequence: TTC
aactttgtggacacttctgg

SEQ ID NO: 319270 - DNA, 20 bp, Artificial Sequence
  Description of Artificial Sequence: Synthetic oligonucleotide
  Target: LAMA2; (+) strand; PAM type: YTN; PAM sequence: CTT
tgtggacacttctggaaaaa

SEQ ID NO: 319271 - DNA, 20 bp, Artificial Sequence
  Description of Artificial Sequence: Synthetic oligonucleotide
  Target: LAMA2; (+) strand; PAM type: YTN; PAM sequence: TTT
gtggacacttctggaaaaaa

SEQ ID NO: 319272 - DNA, 20 bp, Artificial Sequence
  Description of Artificial Sequence: Synthetic oligonucleotide
  Target: LAMA2; (+) strand; PAM type: YTN; PAM sequence: TTG
tggacacttctggaaaaaaa

SEQ ID NO: 319273 - DNA, 20 bp, Artificial Sequence
  Description of Artificial Sequence: Synthetic oligonucleotide
  Target: LAMA2; (+) strand; PAM type: YTN; PAM sequence: CTT
ctggaaaaaaagaaagtcgt

SEQ ID NO: 319274 - DNA, 20 bp, Artificial Sequence
  Description of Artificial Sequence: Synthetic oligonucleotide
  Target: LAMA2; (+) strand; PAM type: YTN; PAM sequence: TTC
tggaaaaaaagaaagtcgtg

SEQ ID NO: 319275 - DNA, 20 bp, Artificial Sequence
  Description of Artificial Sequence: Synthetic oligonucleotide
  Target: LAMA2; (+) strand; PAM type: YTN; PAM sequence: CTG
gaaaaaaagaaagtcgtgtc

SEQ ID NO: 319276 - DNA, 20 bp, Artificial Sequence
  Description of Artificial Sequence: Synthetic oligonucleotide
  Target: LAMA2; (+) strand; PAM type: YTN; PAM sequence: CTT
accaattttgcagaattgaa

SEQ ID NO: 319277 - DNA, 20 bp, Artificial Sequence
  Description of Artificial Sequence: Synthetic oligonucleotide
  Target: LAMA2; (+) strand; PAM type: YTN; PAM sequence: TTA
ccaattttgcagaattgaat

SEQ ID NO: 319278 - DNA, 20 bp, Artificial Sequence
  Description of Artificial Sequence: Synthetic oligonucleotide
  Target: LAMA2; (+) strand; PAM type: YTN; PAM sequence: TTT
tgcagaattgaattacaagt

SEQ ID NO: 319279 - DNA, 20 bp, Artificial Sequence
  Description of Artificial Sequence: Synthetic oligonucleotide
  Target: LAMA2; (+) strand; PAM type: YTN; PAM sequence: TTT
gcagaattgaattacaagtt

SEQ ID NO: 319280 - DNA, 20 bp, Artificial Sequence
  Description of Artificial Sequence: Synthetic oligonucleotide
  Target: LAMA2; (+) strand; PAM type: YTN; PAM sequence: TTG
cagaattgaattacaagttt

SEQ ID NO: 319281 - DNA, 20 bp, Artificial Sequence
  Description of Artificial Sequence: Synthetic oligonucleotide
  Target: LAMA2; (+) strand; PAM type: YTN; PAM sequence: TTG
aattacaagtttctcatact

SEQ ID NO: 319282 - DNA, 20 bp, Artificial Sequence
  Description of Artificial Sequence: Synthetic oligonucleotide
  Target: LAMA2; (+) strand; PAM type: YTN; PAM sequence: TTA
caagtttctcatactaagac

SEQ ID NO: 319283 - DNA, 20 bp, Artificial Sequence
  Description of Artificial Sequence: Synthetic oligonucleotide
  Target: LAMA2; (+) strand; PAM type: YTN; PAM sequence: TTT
ctcatactaagacatttttc

SEQ ID NO: 319284 - DNA, 20 bp, Artificial Sequence
  Description of Artificial Sequence: Synthetic oligonucleotide
  Target: LAMA2; (+) strand; PAM type: YTN; PAM sequence: TTC
tcatactaagacatttttct

SEQ ID NO: 319285 - DNA, 20 bp, Artificial Sequence
  Description of Artificial Sequence: Synthetic oligonucleotide
  Target: LAMA2; (+) strand; PAM type: YTN; PAM sequence: CTC
atactaagacatttttctat

SEQ ID NO: 319286 - DNA, 20 bp, Artificial Sequence
  Description of Artificial Sequence: Synthetic oligonucleotide
  Target: LAMA2; (+) strand; PAM type: YTN; PAM sequence: CTA
agacatttttctatggaaga

SEQ ID NO: 319287 - DNA, 20 bp, Artificial Sequence
  Description of Artificial Sequence: Synthetic oligonucleotide
  Target: LAMA2; (+) strand; PAM type: YTN; PAM sequence: TTT
ttctatggaagaaacaaggt

SEQ ID NO: 319288 - DNA, 20 bp, Artificial Sequence
  Description of Artificial Sequence: Synthetic oligonucleotide
  Target: LAMA2; (+) strand; PAM type: YTN; PAM sequence: TTT
tctatggaagaaacaaggtt

SEQ ID NO: 319289 - DNA, 20 bp, Artificial Sequence
  Description of Artificial Sequence: Synthetic oligonucleotide
  Target: LAMA2; (+) strand; PAM type: YTN; PAM sequence: TTT
ctatggaagaaacaaggttc

SEQ ID NO: 319290 - DNA, 20 bp, Artificial Sequence
  Description of Artificial Sequence: Synthetic oligonucleotide
  Target: LAMA2; (+) strand; PAM type: YTN; PAM sequence: TTC
tatggaagaaacaaggttct

SEQ ID NO: 319291 - DNA, 20 bp, Artificial Sequence
  Description of Artificial Sequence: Synthetic oligonucleotide
  Target: LAMA2; (+) strand; PAM type: YTN; PAM sequence: CTA
tggaagaaacaaggttcttt

SEQ ID NO: 319292 - DNA, 20 bp, Artificial Sequence
  Description of Artificial Sequence: Synthetic oligonucleotide
  Target: LAMA2; (+) strand; PAM type: YTN; PAM sequence: TTC
ttttgtagagatgagaattt

SEQ ID NO: 319293 - DNA, 20 bp, Artificial Sequence
  Description of Artificial Sequence: Synthetic oligonucleotide
  Target: LAMA2; (+) strand; PAM type: YTN; PAM sequence: CTT
ttgtagagatgagaatttaa

SEQ ID NO: 319294 - DNA, 20 bp, Artificial Sequence
  Description of Artificial Sequence: Synthetic oligonucleotide
  Target: LAMA2; (+) strand; PAM type: YTN; PAM sequence: TTT
tgtagagatgagaatttaaa

SEQ ID NO: 319295 - DNA, 20 bp, Artificial Sequence
  Description of Artificial Sequence: Synthetic oligonucleotide
  Target: LAMA2; (+) strand; PAM type: YTN; PAM sequence: TTT
gtagagatgagaatttaaat

SEQ ID NO: 319296 - DNA, 20 bp, Artificial Sequence
  Description of Artificial Sequence: Synthetic oligonucleotide
  Target: LAMA2; (+) strand; PAM type: YTN; PAM sequence: TTG
tagagatgagaatttaaatg

SEQ ID NO: 319297 - DNA, 20 bp, Artificial Sequence
  Description of Artificial Sequence: Synthetic oligonucleotide
  Target: LAMA2; (+) strand; PAM type: YTN; PAM sequence: TTT
aaatgatttttttttttttt

SEQ ID NO: 319298 - DNA, 20 bp, Artificial Sequence
  Description of Artificial Sequence: Synthetic oligonucleotide
  Target: LAMA2; (+) strand; PAM type: YTN; PAM sequence: TTA
aatgattttttttttttttt

SEQ ID NO: 319299 - DNA, 20 bp, Artificial Sequence
  Description of Artificial Sequence: Synthetic oligonucleotide
  Target: LAMA2; (+) strand; PAM type: YTN; PAM sequence: TTT
ttttttttttttgcaatggg

SEQ ID NO: 319300 - DNA, 20 bp, Artificial Sequence
  Description of Artificial Sequence: Synthetic oligonucleotide
  Target: LAMA2; (+) strand; PAM type: YTN; PAM sequence: TTT
tttttttttttgcaatggga

SEQ ID NO: 319301 - DNA, 20 bp, Artificial Sequence
  Description of Artificial Sequence: Synthetic oligonucleotide
  Target: LAMA2; (+) strand; PAM type: YTN; PAM sequence: TTT
ttttttttttgcaatgggaa

SEQ ID NO: 319302 - DNA, 20 bp, Artificial Sequence
  Description of Artificial Sequence: Synthetic oligonucleotide
  Target: LAMA2; (+) strand; PAM type: YTN; PAM sequence: TTT
tttttttttgcaatgggaag

SEQ ID NO: 319303 - DNA, 20 bp, Artificial Sequence
  Description of Artificial Sequence: Synthetic oligonucleotide
  Target: LAMA2; (+) strand; PAM type: YTN; PAM sequence: TTT
ttttttttgcaatgggaaga

SEQ ID NO: 319304 - DNA, 20 bp, Artificial Sequence
  Description of Artificial Sequence: Synthetic oligonucleotide
  Target: LAMA2; (+) strand; PAM type: YTN; PAM sequence: TTT
tttttttgcaatgggaagag

SEQ ID NO: 319305 - DNA, 20 bp, Artificial Sequence
  Description of Artificial Sequence: Synthetic oligonucleotide
  Target: LAMA2; (+) strand; PAM type: YTN; PAM sequence: TTT
ttttttgcaatgggaagaga

SEQ ID NO: 319306 - DNA, 20 bp, Artificial Sequence
  Description of Artificial Sequence: Synthetic oligonucleotide
  Target: LAMA2; (+) strand; PAM type: YTN; PAM sequence: TTT
tttttgcaatgggaagagag

SEQ ID NO: 319307 - DNA, 20 bp, Artificial Sequence
  Description of Artificial Sequence: Synthetic oligonucleotide
  Target: LAMA2; (+) strand; PAM type: YTN; PAM sequence: TTT
ttttgcaatgggaagagaga

SEQ ID NO: 319308 - DNA, 20 bp, Artificial Sequence
  Description of Artificial Sequence: Synthetic oligonucleotide
  Target: LAMA2; (+) strand; PAM type: YTN; PAM sequence: TTT
tttgcaatgggaagagagat

SEQ ID NO: 319309 - DNA, 20 bp, Artificial Sequence
  Description of Artificial Sequence: Synthetic oligonucleotide
  Target: LAMA2; (+) strand; PAM type: YTN; PAM sequence: TTT
ttgcaatgggaagagagatt

SEQ ID NO: 319310 - DNA, 20 bp, Artificial Sequence
  Description of Artificial Sequence: Synthetic oligonucleotide
  Target: LAMA2; (+) strand; PAM type: YTN; PAM sequence: TTT
tgcaatgggaagagagattt

SEQ ID NO: 319311 - DNA, 20 bp, Artificial Sequence
  Description of Artificial Sequence: Synthetic oligonucleotide
  Target: LAMA2; (+) strand; PAM type: YTN; PAM sequence: TTT
gcaatgggaagagagatttc

SEQ ID NO: 319312 - DNA, 20 bp, Artificial Sequence
  Description of Artificial Sequence: Synthetic oligonucleotide
  Target: LAMA2; (+) strand; PAM type: YTN; PAM sequence: TTG
caatgggaagagagatttct

SEQ ID NO: 319313 - DNA, 20 bp, Artificial Sequence
  Description of Artificial Sequence: Synthetic oligonucleotide
  Target: LAMA2; (+) strand; PAM type: YTN; PAM sequence: TTT
ctcactagtcttactggttt

SEQ ID NO: 319314 - DNA, 20 bp, Artificial Sequence
  Description of Artificial Sequence: Synthetic oligonucleotide
  Target: LAMA2; (+) strand; PAM type: YTN; PAM sequence: TTC
tcactagtcttactggtttt

SEQ ID NO: 319315 - DNA, 20 bp, Artificial Sequence
  Description of Artificial Sequence: Synthetic oligonucleotide
  Target: LAMA2; (+) strand; PAM type: YTN; PAM sequence: CTC
actagtcttactggttttca

SEQ ID NO: 319316 - DNA, 20 bp, Artificial Sequence
  Description of Artificial Sequence: Synthetic oligonucleotide
  Target: LAMA2; (+) strand; PAM type: YTN; PAM sequence: CTA
gtcttactggttttcatctg

SEQ ID NO: 319317 - DNA, 20 bp, Artificial Sequence
  Description of Artificial Sequence: Synthetic oligonucleotide
  Target: LAMA2; (+) strand; PAM type: YTN; PAM sequence: CTT
actggttttcatctgacttt

SEQ ID NO: 319318 - DNA, 20 bp, Artificial Sequence
  Description of Artificial Sequence: Synthetic oligonucleotide
  Target: LAMA2; (+) strand; PAM type: YTN; PAM sequence: TTA
ctggttttcatctgacttta

SEQ ID NO: 319319 - DNA, 20 bp, Artificial Sequence
  Description of Artificial Sequence: Synthetic oligonucleotide
  Target: LAMA2; (+) strand; PAM type: YTN; PAM sequence: CTG
gttttcatctgactttatag

SEQ ID NO: 319320 - DNA, 20 bp, Artificial Sequence
  Description of Artificial Sequence: Synthetic oligonucleotide
  Target: LAMA2; (+) strand; PAM type: YTN; PAM sequence: TTT
tcatctgactttatagttta

SEQ ID NO: 319321 - DNA, 20 bp, Artificial Sequence
  Description of Artificial Sequence: Synthetic oligonucleotide
  Target: LAMA2; (+) strand; PAM type: YTN; PAM sequence: TTT
catctgactttatagtttaa

SEQ ID NO: 319322 - DNA, 20 bp, Artificial Sequence
  Description of Artificial Sequence: Synthetic oligonucleotide
  Target: LAMA2; (+) strand; PAM type: YTN; PAM sequence: TTC
atctgactttatagtttaaa

SEQ ID NO: 319323 - DNA, 20 bp, Artificial Sequence
  Description of Artificial Sequence: Synthetic oligonucleotide
  Target: LAMA2; (+) strand; PAM type: YTN; PAM sequence: CTG
actttatagtttaaaattga

SEQ ID NO: 319324 - DNA, 20 bp, Artificial Sequence
  Description of Artificial Sequence: Synthetic oligonucleotide
  Target: LAMA2; (+) strand; PAM type: YTN; PAM sequence: CTT
tatagtttaaaattgatagc

SEQ ID NO: 319325 - DNA, 20 bp, Artificial Sequence
  Description of Artificial Sequence: Synthetic oligonucleotide
  Target: LAMA2; (+) strand; PAM type: YTN; PAM sequence: TTT
atagtttaaaattgatagcc

SEQ ID NO: 319326 - DNA, 20 bp, Artificial Sequence
  Description of Artificial Sequence: Synthetic oligonucleotide
  Target: LAMA2; (+) strand; PAM type: YTN; PAM sequence: TTA
tagtttaaaattgatagcca

SEQ ID NO: 319327 - DNA, 20 bp, Artificial Sequence
  Description of Artificial Sequence: Synthetic oligonucleotide
  Target: LAMA2; (+) strand; PAM type: YTN; PAM sequence: TTT
aaaattgatagccattttga

SEQ ID NO: 319328 - DNA, 20 bp, Artificial Sequence
  Description of Artificial Sequence: Synthetic oligonucleotide
  Target: LAMA2; (+) strand; PAM type: YTN; PAM sequence: TTA
aaattgatagccattttgat

SEQ ID NO: 319329 - DNA, 20 bp, Artificial Sequence
  Description of Artificial Sequence: Synthetic oligonucleotide
  Target: LAMA2; (+) strand; PAM type: YTN; PAM sequence: TTG
atagccattttgatggcaac

SEQ ID NO: 319330 - DNA, 20 bp, Artificial Sequence
  Description of Artificial Sequence: Synthetic oligonucleotide
  Target: LAMA2; (+) strand; PAM type: YTN; PAM sequence: TTT
tgatggcaacacacatggtt

SEQ ID NO: 319331 - DNA, 20 bp, Artificial Sequence
  Description of Artificial Sequence: Synthetic oligonucleotide
  Target: LAMA2; (+) strand; PAM type: YTN; PAM sequence: TTT
gatggcaacacacatggttt

SEQ ID NO: 319332 - DNA, 20 bp, Artificial Sequence
  Description of Artificial Sequence: Synthetic oligonucleotide
  Target: LAMA2; (+) strand; PAM type: YTN; PAM sequence: TTG
atggcaacacacatggttta

SEQ ID NO: 319333 - DNA, 20 bp, Artificial Sequence
  Description of Artificial Sequence: Synthetic oligonucleotide
  Target: LAMA2; (+) strand; PAM type: YTN; PAM sequence: TTT
agttaaattttactccgtcc

SEQ ID NO: 319334 - DNA, 20 bp, Artificial Sequence
  Description of Artificial Sequence: Synthetic oligonucleotide
  Target: LAMA2; (+) strand; PAM type: YTN; PAM sequence: TTA
gttaaattttactccgtcct

SEQ ID NO: 319335 - DNA, 20 bp, Artificial Sequence
  Description of Artificial Sequence: Synthetic oligonucleotide
  Target: LAMA2; (+) strand; PAM type: YTN; PAM sequence: TTA
aattttactccgtcctcagt

SEQ ID NO: 319336 - DNA, 20 bp, Artificial Sequence
  Description of Artificial Sequence: Synthetic oligonucleotide
  Target: LAMA2; (+) strand; PAM type: YTN; PAM sequence: TTT
tactccgtcctcagttttcc

SEQ ID NO: 319337 - DNA, 20 bp, Artificial Sequence
  Description of Artificial Sequence: Synthetic oligonucleotide
  Target: LAMA2; (+) strand; PAM type: YTN; PAM sequence: TTT
actccgtcctcagttttcct

SEQ ID NO: 319338 - DNA, 20 bp, Artificial Sequence
  Description of Artificial Sequence: Synthetic oligonucleotide
  Target: LAMA2; (+) strand; PAM type: YTN; PAM sequence: TTA
ctccgtcctcagttttcctg

SEQ ID NO: 319339 - DNA, 20 bp, Artificial Sequence
  Description of Artificial Sequence: Synthetic oligonucleotide
  Target: LAMA2; (+) strand; PAM type: YTN; PAM sequence: CTC
cgtcctcagttttcctgagg

SEQ ID NO: 319340 - DNA, 20 bp, Artificial Sequence
  Description of Artificial Sequence: Synthetic oligonucleotide
  Target: LAMA2; (+) strand; PAM type: YTN; PAM sequence: CTC
agttttcctgagggagtgtc

SEQ ID NO: 319341 - DNA, 20 bp, Artificial Sequence
  Description of Artificial Sequence: Synthetic oligonucleotide
  Target: LAMA2; (+) strand; PAM type: YTN; PAM sequence: TTT
tcctgagggagtgtcagcta

SEQ ID NO: 319342 - DNA, 20 bp, Artificial Sequence
  Description of Artificial Sequence: Synthetic oligonucleotide
  Target: LAMA2; (+) strand; PAM type: YTN; PAM sequence: TTT
cctgagggagtgtcagctac

SEQ ID NO: 319343 - DNA, 20 bp, Artificial Sequence
  Description of Artificial Sequence: Synthetic oligonucleotide
  Target: LAMA2; (+) strand; PAM type: YTN; PAM sequence: TTC
ctgagggagtgtcagctact

SEQ ID NO: 319344 - DNA, 20 bp, Artificial Sequence
  Description of Artificial Sequence: Synthetic oligonucleotide
  Target: LAMA2; (+) strand; PAM type: YTN; PAM sequence: CTG
agggagtgtcagctactgtg

SEQ ID NO: 319345 - DNA, 20 bp, Artificial Sequence
  Description of Artificial Sequence: Synthetic oligonucleotide
  Target: LAMA2; (+) strand; PAM type: YTN; PAM sequence: CTA
ctgtgttttctttacaaaac

SEQ ID NO: 319346 - DNA, 20 bp, Artificial Sequence
  Description of Artificial Sequence: Synthetic oligonucleotide
  Target: LAMA2; (+) strand; PAM type: YTN; PAM sequence: CTG
tgttttctttacaaaacaac

SEQ ID NO: 319347 - DNA, 20 bp, Artificial Sequence
  Description of Artificial Sequence: Synthetic oligonucleotide
  Target: LAMA2; (+) strand; PAM type: YTN; PAM sequence: TTT
tctttacaaaacaacataaa

SEQ ID NO: 319348 - DNA, 20 bp, Artificial Sequence
  Description of Artificial Sequence: Synthetic oligonucleotide
  Target: LAMA2; (+) strand; PAM type: YTN; PAM sequence: TTT
ctttacaaaacaacataaat

SEQ ID NO: 319349 - DNA, 20 bp, Artificial Sequence
  Description of Artificial Sequence: Synthetic oligonucleotide
  Target: LAMA2; (+) strand; PAM type: YTN; PAM sequence: TTC
tttacaaaacaacataaatt

SEQ ID NO: 319350 - DNA, 20 bp, Artificial Sequence
  Description of Artificial Sequence: Synthetic oligonucleotide
  Target: LAMA2; (+) strand; PAM type: YTN; PAM sequence: CTT
tacaaaacaacataaattcc

SEQ ID NO: 319351 - DNA, 20 bp, Artificial Sequence
  Description of Artificial Sequence: Synthetic oligonucleotide
  Target: LAMA2; (+) strand; PAM type: YTN; PAM sequence: TTT
acaaaacaacataaattcca

SEQ ID NO: 319352 - DNA, 20 bp, Artificial Sequence
  Description of Artificial Sequence: Synthetic oligonucleotide
  Target: LAMA2; (+) strand; PAM type: YTN; PAM sequence: TTA
caaaacaacataaattccat

SEQ ID NO: 319353 - DNA, 20 bp, Artificial Sequence
  Description of Artificial Sequence: Synthetic oligonucleotide
  Target: LAMA2; (+) strand; PAM type: YTN; PAM sequence: TTC
catgtatccaccctgggaat

SEQ ID NO: 319354 - DNA, 20 bp, Artificial Sequence
  Description of Artificial Sequence: Synthetic oligonucleotide
  Target: LAMA2; (+) strand; PAM type: YTN; PAM sequence: CTG
ggaatcacttcactgcgttg

SEQ ID NO: 319355 - DNA, 20 bp, Artificial Sequence
  Description of Artificial Sequence: Synthetic oligonucleotide
  Target: LAMA2; (+) strand; PAM type: YTN; PAM sequence: CTT
cactgcgttgaatctggata

SEQ ID NO: 319356 - DNA, 20 bp, Artificial Sequence
  Description of Artificial Sequence: Synthetic oligonucleotide
  Target: LAMA2; (+) strand; PAM type: YTN; PAM sequence: TTC
actgcgttgaatctggatag

SEQ ID NO: 319357 - DNA, 20 bp, Artificial Sequence
  Description of Artificial Sequence: Synthetic oligonucleotide
  Target: LAMA2; (+) strand; PAM type: YTN; PAM sequence: CTG
cgttgaatctggataggaaa

SEQ ID NO: 319358 - DNA, 20 bp, Artificial Sequence
  Description of Artificial Sequence: Synthetic oligonucleotide
  Target: LAMA2; (+) strand; PAM type: YTN; PAM sequence: TTG
aatctggataggaaataaag

SEQ ID NO: 319359 - DNA, 20 bp, Artificial Sequence
  Description of Artificial Sequence: Synthetic oligonucleotide
  Target: LAMA2; (+) strand; PAM type: YTN; PAM sequence: CTG
gataggaaataaagattcat

SEQ ID NO: 319360 - DNA, 20 bp, Artificial Sequence
  Description of Artificial Sequence: Synthetic oligonucleotide
  Target: LAMA2; (+) strand; PAM type: YTN; PAM sequence: TTC
atgaatatttcacaatttac

SEQ ID NO: 319361 - DNA, 20 bp, Artificial Sequence
  Description of Artificial Sequence: Synthetic oligonucleotide
  Target: LAMA2; (+) strand; PAM type: YTN; PAM sequence: TTT
cacaatttactaggaaccat

SEQ ID NO: 319362 - DNA, 20 bp, Artificial Sequence
  Description of Artificial Sequence: Synthetic oligonucleotide
  Target: LAMA2; (+) strand; PAM type: YTN; PAM sequence: TTC
acaatttactaggaaccatc

SEQ ID NO: 319363 - DNA, 20 bp, Artificial Sequence
  Description of Artificial Sequence: Synthetic oligonucleotide
  Target: LAMA2; (+) strand; PAM type: YTN; PAM sequence: TTT
actaggaaccatcactttct

SEQ ID NO: 319364 - DNA, 20 bp, Artificial Sequence
  Description of Artificial Sequence: Synthetic oligonucleotide
  Target: LAMA2; (+) strand; PAM type: YTN; PAM sequence: TTA
ctaggaaccatcactttctt

SEQ ID NO: 319365 - DNA, 20 bp, Artificial Sequence
  Description of Artificial Sequence: Synthetic oligonucleotide
  Target: LAMA2; (+) strand; PAM type: YTN; PAM sequence: CTA
ggaaccatcactttcttgct

SEQ ID NO: 319366 - DNA, 20 bp, Artificial Sequence
  Description of Artificial Sequence: Synthetic oligonucleotide
  Target: LAMA2; (+) strand; PAM type: YTN; PAM sequence: CTT
tcttgctcttccgtgtggat

SEQ ID NO: 319367 - DNA, 20 bp, Artificial Sequence
  Description of Artificial Sequence: Synthetic oligonucleotide
  Target: LAMA2; (+) strand; PAM type: YTN; PAM sequence: TTT
cttgctcttccgtgtggatt

SEQ ID NO: 319368 - DNA, 20 bp, Artificial Sequence
  Description of Artificial Sequence: Synthetic oligonucleotide
  Target: LAMA2; (+) strand; PAM type: YTN; PAM sequence: TTC
ttgctcttccgtgtggattt

SEQ ID NO: 319369 - DNA, 20 bp, Artificial Sequence
  Description of Artificial Sequence: Synthetic oligonucleotide
  Target: LAMA2; (+) strand; PAM type: YTN; PAM sequence: CTT
gctcttccgtgtggattttc

SEQ ID NO: 319370 - DNA, 20 bp, Artificial Sequence
  Description of Artificial Sequence: Synthetic oligonucleotide
  Target: LAMA2; (+) strand; PAM type: YTN; PAM sequence: TTG
ctcttccgtgtggattttct

SEQ ID NO: 319371 - DNA, 20 bp, Artificial Sequence
  Description of Artificial Sequence: Synthetic oligonucleotide
  Target: LAMA2; (+) strand; PAM type: YTN; PAM sequence: CTC
ttccgtgtggattttctact

SEQ ID NO: 319372 - DNA, 20 bp, Artificial Sequence
  Description of Artificial Sequence: Synthetic oligonucleotide
  Target: LAMA2; (+) strand; PAM type: YTN; PAM sequence: CTT
ccgtgtggattttctactaa

SEQ ID NO: 319373 - DNA, 20 bp, Artificial Sequence
  Description of Artificial Sequence: Synthetic oligonucleotide
  Target: LAMA2; (+) strand; PAM type: YTN; PAM sequence: TTC
cgtgtggattttctactaat

SEQ ID NO: 319374 - DNA, 20 bp, Artificial Sequence
  Description of Artificial Sequence: Synthetic oligonucleotide
  Target: LAMA2; (+) strand; PAM type: YTN; PAM sequence: TTT
tctactaattagttacttgg

SEQ ID NO: 319375 - DNA, 20 bp, Artificial Sequence
  Description of Artificial Sequence: Synthetic oligonucleotide
  Target: LAMA2; (+) strand; PAM type: YTN; PAM sequence: TTT
ctactaattagttacttggt

SEQ ID NO: 319376 - DNA, 20 bp, Artificial Sequence
  Description of Artificial Sequence: Synthetic oligonucleotide
  Target: LAMA2; (+) strand; PAM type: YTN; PAM sequence: TTC
tactaattagttacttggta

SEQ ID NO: 319377 - DNA, 20 bp, Artificial Sequence
  Description of Artificial Sequence: Synthetic oligonucleotide
  Target: LAMA2; (+) strand; PAM type: YTN; PAM sequence: CTA
ctaattagttacttggtatg

SEQ ID NO: 319378 - DNA, 20 bp, Artificial Sequence
  Description of Artificial Sequence: Synthetic oligonucleotide
  Target: LAMA2; (+) strand; PAM type: YTN; PAM sequence: CTA
attagttacttggtatgtct

SEQ ID NO: 319379 - DNA, 20 bp, Artificial Sequence
  Description of Artificial Sequence: Synthetic oligonucleotide
  Target: LAMA2; (+) strand; PAM type: YTN; PAM sequence: TTA
gttacttggtatgtctaaga

SEQ ID NO: 319380 - DNA, 20 bp, Artificial Sequence
  Description of Artificial Sequence: Synthetic oligonucleotide
  Target: LAMA2; (+) strand; PAM type: YTN; PAM sequence: TTA
cttggtatgtctaagatacg

SEQ ID NO: 319381 - DNA, 20 bp, Artificial Sequence
  Description of Artificial Sequence: Synthetic oligonucleotide
  Target: LAMA2; (+) strand; PAM type: YTN; PAM sequence: CTT
ggtatgtctaagatacgtta

SEQ ID NO: 319382 - DNA, 20 bp, Artificial Sequence
  Description of Artificial Sequence: Synthetic oligonucleotide
  Target: LAMA2; (+) strand; PAM type: YTN; PAM sequence: TTG
gtatgtctaagatacgttat

SEQ ID NO: 319383 - DNA, 20 bp, Artificial Sequence
  Description of Artificial Sequence: Synthetic oligonucleotide
  Target: LAMA2; (+) strand; PAM type: YTN; PAM sequence: CTA
agatacgttatttttattat

SEQ ID NO: 319384 - DNA, 20 bp, Artificial Sequence
  Description of Artificial Sequence: Synthetic oligonucleotide
  Target: LAMA2; (+) strand; PAM type: YTN; PAM sequence: TTA
tttttattatacaaagactg

SEQ ID NO: 319385 - DNA, 20 bp, Artificial Sequence
  Description of Artificial Sequence: Synthetic oligonucleotide
  Target: LAMA2; (+) strand; PAM type: YTN; PAM sequence: TTT
ttattatacaaagactgtat

SEQ ID NO: 319386 - DNA, 20 bp, Artificial Sequence
  Description of Artificial Sequence: Synthetic oligonucleotide
  Target: LAMA2; (+) strand; PAM type: YTN; PAM sequence: TTT
tattatacaaagactgtatc

SEQ ID NO: 319387 - DNA, 20 bp, Artificial Sequence
  Description of Artificial Sequence: Synthetic oligonucleotide
  Target: LAMA2; (+) strand; PAM type: YTN; PAM sequence: TTT
attatacaaagactgtatca

SEQ ID NO: 319388 - DNA, 20 bp, Artificial Sequence
  Description of Artificial Sequence: Synthetic oligonucleotide
  Target: LAMA2; (+) strand; PAM type: YTN; PAM sequence: TTA
ttatacaaagactgtatcac

SEQ ID NO: 319389 - DNA, 20 bp, Artificial Sequence
  Description of Artificial Sequence: Synthetic oligonucleotide
  Target: LAMA2; (+) strand; PAM type: YTN; PAM sequence: TTA
tacaaagactgtatcacttt

SEQ ID NO: 319390 - DNA, 20 bp, Artificial Sequence
  Description of Artificial Sequence: Synthetic oligonucleotide
  Target: LAMA2; (+) strand; PAM type: YTN; PAM sequence: CTG
tatcactttttattcctttg

SEQ ID NO: 319391 - DNA, 20 bp, Artificial Sequence
  Description of Artificial Sequence: Synthetic oligonucleotide
  Target: LAMA2; (+) strand; PAM type: YTN; PAM sequence: CTT
tttattcctttgatataaat

SEQ ID NO: 319392 - DNA, 20 bp, Artificial Sequence
  Description of Artificial Sequence: Synthetic oligonucleotide
  Target: LAMA2; (+) strand; PAM type: YTN; PAM sequence: TTT
ttattcctttgatataaatc

SEQ ID NO: 319393 - DNA, 20 bp, Artificial Sequence
  Description of Artificial Sequence: Synthetic oligonucleotide
  Target: LAMA2; (+) strand; PAM type: YTN; PAM sequence: TTT
tattcctttgatataaatca

SEQ ID NO: 319394 - DNA, 20 bp, Artificial Sequence
  Description of Artificial Sequence: Synthetic oligonucleotide
  Target: LAMA2; (+) strand; PAM type: YTN; PAM sequence: TTT
attcctttgatataaatcat

SEQ ID NO: 319395 - DNA, 20 bp, Artificial Sequence
  Description of Artificial Sequence: Synthetic oligonucleotide
  Target: LAMA2; (+) strand; PAM type: YTN; PAM sequence: TTA
ttcctttgatataaatcata

SEQ ID NO: 319396 - DNA, 20 bp, Artificial Sequence
  Description of Artificial Sequence: Synthetic oligonucleotide
  Target: LAMA2; (+) strand; PAM type: YTN; PAM sequence: TTC
ctttgatataaatcataata

SEQ ID NO: 319397 - DNA, 20 bp, Artificial Sequence
  Description of Artificial Sequence: Synthetic oligonucleotide
  Target: LAMA2; (+) strand; PAM type: YTN; PAM sequence: CTT
tgatataaatcataatacag

SEQ ID NO: 319398 - DNA, 20 bp, Artificial Sequence
  Description of Artificial Sequence: Synthetic oligonucleotide
  Target: LAMA2; (+) strand; PAM type: YTN; PAM sequence: TTT
gatataaatcataatacagt

SEQ ID NO: 319399 - DNA, 20 bp, Artificial Sequence
  Description of Artificial Sequence: Synthetic oligonucleotide
  Target: LAMA2; (+) strand; PAM type: YTN; PAM sequence: TTG
atataaatcataatacagtg

SEQ ID NO: 319400 - DNA, 20 bp, Artificial Sequence
  Description of Artificial Sequence: Synthetic oligonucleotide
  Target: LAMA2; (+) strand; PAM type: YTN; PAM sequence: CTG
ataagtacagctttttaaaa

SEQ ID NO: 319401 - DNA, 20 bp, Artificial Sequence
  Description of Artificial Sequence: Synthetic oligonucleotide
  Target: LAMA2; (+) strand; PAM type: YTN; PAM sequence: CTT
tttaaaaactcttttcatag

SEQ ID NO: 319402 - DNA, 20 bp, Artificial Sequence
  Description of Artificial Sequence: Synthetic oligonucleotide
  Target: LAMA2; (+) strand; PAM type: YTN; PAM sequence: TTT
ttaaaaactcttttcataga

SEQ ID NO: 319403 - DNA, 20 bp, Artificial Sequence
  Description of Artificial Sequence: Synthetic oligonucleotide
  Target: LAMA2; (+) strand; PAM type: YTN; PAM sequence: TTT
taaaaactcttttcatagac

SEQ ID NO: 319404 - DNA, 20 bp, Artificial Sequence
  Description of Artificial Sequence: Synthetic oligonucleotide
  Target: LAMA2; (+) strand; PAM type: YTN; PAM sequence: TTT
aaaaactcttttcatagact

SEQ ID NO: 319405 - DNA, 20 bp, Artificial Sequence
  Description of Artificial Sequence: Synthetic oligonucleotide
  Target: LAMA2; (+) strand; PAM type: YTN; PAM sequence: TTA
aaaactcttttcatagactg

SEQ ID NO: 319406 - DNA, 20 bp, Artificial Sequence
  Description of Artificial Sequence: Synthetic oligonucleotide
  Target: LAMA2; (+) strand; PAM type: YTN; PAM sequence: CTC
ttttcatagactgtcttatt

SEQ ID NO: 319407 - DNA, 20 bp, Artificial Sequence
  Description of Artificial Sequence: Synthetic oligonucleotide
  Target: LAMA2; (+) strand; PAM type: YTN; PAM sequence: CTT
ttcatagactgtcttattct

SEQ ID NO: 319408 - DNA, 20 bp, Artificial Sequence
  Description of Artificial Sequence: Synthetic oligonucleotide
  Target: LAMA2; (+) strand; PAM type: YTN; PAM sequence: TTT
tcatagactgtcttattctt

SEQ ID NO: 319409 - DNA, 20 bp, Artificial Sequence
  Description of Artificial Sequence: Synthetic oligonucleotide
  Target: LAMA2; (+) strand; PAM type: YTN; PAM sequence: TTT
catagactgtcttattcttt

SEQ ID NO: 319410 - DNA, 20 bp, Artificial Sequence
  Description of Artificial Sequence: Synthetic oligonucleotide
  Target: LAMA2; (+) strand; PAM type: YTN; PAM sequence: TTC
atagactgtcttattctttt

SEQ ID NO: 319411 - DNA, 20 bp, Artificial Sequence
  Description of Artificial Sequence: Synthetic oligonucleotide
  Target: LAMA2; (+) strand; PAM type: YTN; PAM sequence: CTG
tcttattctttttagattta

SEQ ID NO: 319412 - DNA, 20 bp, Artificial Sequence
  Description of Artificial Sequence: Synthetic oligonucleotide
  Target: LAMA2; (+) strand; PAM type: YTN; PAM sequence: CTT
attctttttagatttatgcc

SEQ ID NO: 319413 - DNA, 20 bp, Artificial Sequence
  Description of Artificial Sequence: Synthetic oligonucleotide
  Target: LAMA2; (+) strand; PAM type: YTN; PAM sequence: TTA
ttctttttagatttatgccc

SEQ ID NO: 319414 - DNA, 20 bp, Artificial Sequence
  Description of Artificial Sequence: Synthetic oligonucleotide
  Target: LAMA2; (+) strand; PAM type: YTN; PAM sequence: TTC
tttttagatttatgcccatg

SEQ ID NO: 319415 - DNA, 20 bp, Artificial Sequence
  Description of Artificial Sequence: Synthetic oligonucleotide
  Target: LAMA2; (+) strand; PAM type: YTN; PAM sequence: CTT
tttagatttatgcccatgat

SEQ ID NO: 319416 - DNA, 20 bp, Artificial Sequence
  Description of Artificial Sequence: Synthetic oligonucleotide
  Target: LAMA2; (+) strand; PAM type: YTN; PAM sequence: TTT
ttagatttatgcccatgatg

SEQ ID NO: 319417 - DNA, 20 bp, Artificial Sequence
  Description of Artificial Sequence: Synthetic oligonucleotide
  Target: LAMA2; (+) strand; PAM type: YTN; PAM sequence: TTT
tagatttatgcccatgatgt

SEQ ID NO: 319418 - DNA, 20 bp, Artificial Sequence
  Description of Artificial Sequence: Synthetic oligonucleotide
  Target: LAMA2; (+) strand; PAM type: YTN; PAM sequence: TTT
agatttatgcccatgatgtg

SEQ ID NO: 319419 - DNA, 20 bp, Artificial Sequence
  Description of Artificial Sequence: Synthetic oligonucleotide
  Target: LAMA2; (+) strand; PAM type: YTN; PAM sequence: TTA
gatttatgcccatgatgtgc

SEQ ID NO: 319420 - DNA, 20 bp, Artificial Sequence
  Description of Artificial Sequence: Synthetic oligonucleotide
  Target: LAMA2; (+) strand; PAM type: YTN; PAM sequence: TTT
atgcccatgatgtgcatggt

SEQ ID NO: 319421 - DNA, 20 bp, Artificial Sequence
  Description of Artificial Sequence: Synthetic oligonucleotide
  Target: LAMA2; (+) strand; PAM type: YTN; PAM sequence: TTA
tgcccatgatgtgcatggtc

SEQ ID NO: 319422 - DNA, 20 bp, Artificial Sequence
  Description of Artificial Sequence: Synthetic oligonucleotide
  Target: LAMA2; (+) strand; PAM type: YTN; PAM sequence: CTG
aatgtggaatgggtctctct

SEQ ID NO: 319423 - DNA, 20 bp, Artificial Sequence
  Description of Artificial Sequence: Synthetic oligonucleotide
  Target: LAMA2; (+) strand; PAM type: YTN; PAM sequence: CTC
tctgaagaaaagtgggtcag

SEQ ID NO: 319424 - DNA, 20 bp, Artificial Sequence
  Description of Artificial Sequence: Synthetic oligonucleotide
  Target: LAMA2; (+) strand; PAM type: YTN; PAM sequence: CTC
tgaagaaaagtgggtcagat

SEQ ID NO: 319425 - DNA, 20 bp, Artificial Sequence
  Description of Artificial Sequence: Synthetic oligonucleotide
  Target: LAMA2; (+) strand; PAM type: YTN; PAM sequence: CTG
aagaaaagtgggtcagatgg

SEQ ID NO: 319426 - DNA, 20 bp, Artificial Sequence
  Description of Artificial Sequence: Synthetic oligonucleotide
  Target: LAMA2; (+) strand; PAM type: YTN; PAM sequence: TTG
cttgtgcatattggaaagaa

SEQ ID NO: 319427 - DNA, 20 bp, Artificial Sequence
  Description of Artificial Sequence: Synthetic oligonucleotide
  Target: LAMA2; (+) strand; PAM type: YTN; PAM sequence: CTT
gtgcatattggaaagaaact

SEQ ID NO: 319428 - DNA, 20 bp, Artificial Sequence
  Description of Artificial Sequence: Synthetic oligonucleotide
  Target: LAMA2; (+) strand; PAM type: YTN; PAM sequence: TTG
tgcatattggaaagaaactg

SEQ ID NO: 319429 - DNA, 20 bp, Artificial Sequence
  Description of Artificial Sequence: Synthetic oligonucleotide
  Target: LAMA2; (+) strand; PAM type: YTN; PAM sequence: TTG
gaaagaaactgatagcttcc

SEQ ID NO: 319430 - DNA, 20 bp, Artificial Sequence
  Description of Artificial Sequence: Synthetic oligonucleotide
  Target: LAMA2; (+) strand; PAM type: YTN; PAM sequence: CTG
atagcttcctggtctctttt

SEQ ID NO: 319431 - DNA, 20 bp, Artificial Sequence
  Description of Artificial Sequence: Synthetic oligonucleotide
  Target: LAMA2; (+) strand; PAM type: YTN; PAM sequence: CTT
cctggtctcttttgaagggt

SEQ ID NO: 319432 - DNA, 20 bp, Artificial Sequence
  Description of Artificial Sequence: Synthetic oligonucleotide
  Target: LAMA2; (+) strand; PAM type: YTN; PAM sequence: TTC
ctggtctcttttgaagggtg

SEQ ID NO: 319433 - DNA, 20 bp, Artificial Sequence
  Description of Artificial Sequence: Synthetic oligonucleotide
  Target: LAMA2; (+) strand; PAM type: YTN; PAM sequence: CTG
gtctcttttgaagggtgctg

SEQ ID NO: 319434 - DNA, 20 bp, Artificial Sequence
  Description of Artificial Sequence: Synthetic oligonucleotide
  Target: LAMA2; (+) strand; PAM type: YTN; PAM sequence: CTC
ttttgaagggtgctgttgta

SEQ ID NO: 319435 - DNA, 20 bp, Artificial Sequence
  Description of Artificial Sequence: Synthetic oligonucleotide
  Target: LAMA2; (+) strand; PAM type: YTN; PAM sequence: CTT
ttgaagggtgctgttgtaaa

SEQ ID NO: 319436 - DNA, 20 bp, Artificial Sequence
  Description of Artificial Sequence: Synthetic oligonucleotide
  Target: LAMA2; (+) strand; PAM type: YTN; PAM sequence: TTT
tgaagggtgctgttgtaaaa

SEQ ID NO: 319437 - DNA, 20 bp, Artificial Sequence
  Description of Artificial Sequence: Synthetic oligonucleotide
  Target: LAMA2; (+) strand; PAM type: YTN; PAM sequence: TTT
gaagggtgctgttgtaaaat

SEQ ID NO: 319438 - DNA, 20 bp, Artificial Sequence
  Description of Artificial Sequence: Synthetic oligonucleotide
  Target: LAMA2; (+) strand; PAM type: YTN; PAM sequence: TTG
aagggtgctgttgtaaaata

SEQ ID NO: 319439 - DNA, 20 bp, Artificial Sequence
  Description of Artificial Sequence: Synthetic oligonucleotide
  Target: LAMA2; (+) strand; PAM type: YTN; PAM sequence: CTG
ttgtaaaatacagattagtc

SEQ ID NO: 319440 - DNA, 20 bp, Artificial Sequence
  Description of Artificial Sequence: Synthetic oligonucleotide
  Target: LAMA2; (+) strand; PAM type: YTN; PAM sequence: TTG
taaaatacagattagtcaag

SEQ ID NO: 319441 - DNA, 20 bp, Artificial Sequence
  Description of Artificial Sequence: Synthetic oligonucleotide
  Target: LAMA2; (+) strand; PAM type: YTN; PAM sequence: TTA
gtcaaggtttacagtgctgt

SEQ ID NO: 319442 - DNA, 20 bp, Artificial Sequence
  Description of Artificial Sequence: Synthetic oligonucleotide
  Target: LAMA2; (+) strand; PAM type: YTN; PAM sequence: TTT
acagtgctgttactagcctg

SEQ ID NO: 319443 - DNA, 20 bp, Artificial Sequence
  Description of Artificial Sequence: Synthetic oligonucleotide
  Target: LAMA2; (+) strand; PAM type: YTN; PAM sequence: TTA
cagtgctgttactagcctga

SEQ ID NO: 319444 - DNA, 20 bp, Artificial Sequence
  Description of Artificial Sequence: Synthetic oligonucleotide
  Target: LAMA2; (+) strand; PAM type: YTN; PAM sequence: CTG
ttactagcctgaacacttca

SEQ ID NO: 319445 - DNA, 20 bp, Artificial Sequence
  Description of Artificial Sequence: Synthetic oligonucleotide
  Target: LAMA2; (+) strand; PAM type: YTN; PAM sequence: TTA
ctagcctgaacacttcaaac

SEQ ID NO: 319446 - DNA, 20 bp, Artificial Sequence
  Description of Artificial Sequence: Synthetic oligonucleotide
  Target: LAMA2; (+) strand; PAM type: YTN; PAM sequence: CTA
gcctgaacacttcaaaccac

SEQ ID NO: 319447 - DNA, 20 bp, Artificial Sequence
  Description of Artificial Sequence: Synthetic oligonucleotide
  Target: LAMA2; (+) strand; PAM type: YTN; PAM sequence: CTG
aacacttcaaaccaccatgc

SEQ ID NO: 319448 - DNA, 20 bp, Artificial Sequence
  Description of Artificial Sequence: Synthetic oligonucleotide
  Target: LAMA2; (+) strand; PAM type: YTN; PAM sequence: CTT
caaaccaccatgcagtttaa

SEQ ID NO: 319449 - DNA, 20 bp, Artificial Sequence
  Description of Artificial Sequence: Synthetic oligonucleotide
  Target: LAMA2; (+) strand; PAM type: YTN; PAM sequence: TTC
aaaccaccatgcagtttaaa

SEQ ID NO: 319450 - DNA, 20 bp, Artificial Sequence
  Description of Artificial Sequence: Synthetic oligonucleotide
  Target: LAMA2; (+) strand; PAM type: YTN; PAM sequence: TTT
aaaactattcagtgcttatg

SEQ ID NO: 319451 - DNA, 20 bp, Artificial Sequence
  Description of Artificial Sequence: Synthetic oligonucleotide
  Target: LAMA2; (+) strand; PAM type: YTN; PAM sequence: TTA
aaactattcagtgcttatgg

SEQ ID NO: 319452 - DNA, 20 bp, Artificial Sequence
  Description of Artificial Sequence: Synthetic oligonucleotide
  Target: LAMA2; (+) strand; PAM type: YTN; PAM sequence: CTA
ttcagtgcttatggcaaaat

SEQ ID NO: 319453 - DNA, 20 bp, Artificial Sequence
  Description of Artificial Sequence: Synthetic oligonucleotide
  Target: LAMA2; (+) strand; PAM type: YTN; PAM sequence: TTC
agtgcttatggcaaaattca

SEQ ID NO: 319454 - DNA, 20 bp, Artificial Sequence
  Description of Artificial Sequence: Synthetic oligonucleotide
  Target: LAMA2; (+) strand; PAM type: YTN; PAM sequence: CTT
atggcaaaattcaggtcttt

SEQ ID NO: 319455 - DNA, 20 bp, Artificial Sequence
  Description of Artificial Sequence: Synthetic oligonucleotide
  Target: LAMA2; (+) strand; PAM type: YTN; PAM sequence: TTA
tggcaaaattcaggtctttt

SEQ ID NO: 319456 - DNA, 20 bp, Artificial Sequence
  Description of Artificial Sequence: Synthetic oligonucleotide
  Target: LAMA2; (+) strand; PAM type: YTN; PAM sequence: TTC
aggtcttttgatgttggggc

SEQ ID NO: 319457 - DNA, 20 bp, Artificial Sequence
  Description of Artificial Sequence: Synthetic oligonucleotide
  Target: LAMA2; (+) strand; PAM type: YTN; PAM sequence: CTT
ttgatgttggggcaggagta

SEQ ID NO: 319458 - DNA, 20 bp, Artificial Sequence
  Description of Artificial Sequence: Synthetic oligonucleotide
  Target: LAMA2; (+) strand; PAM type: YTN; PAM sequence: TTT
tgatgttggggcaggagtag

SEQ ID NO: 319459 - DNA, 20 bp, Artificial Sequence
  Description of Artificial Sequence: Synthetic oligonucleotide
  Target: LAMA2; (+) strand; PAM type: YTN; PAM sequence: TTT
gatgttggggcaggagtaga

SEQ ID NO: 319460 - DNA, 20 bp, Artificial Sequence
  Description of Artificial Sequence: Synthetic oligonucleotide
  Target: LAMA2; (+) strand; PAM type: YTN; PAM sequence: TTG
atgttggggcaggagtagac

SEQ ID NO: 319461 - DNA, 20 bp, Artificial Sequence
  Description of Artificial Sequence: Synthetic oligonucleotide
  Target: LAMA2; (+) strand; PAM type: YTN; PAM sequence: TTG
gggcaggagtagacatttta

SEQ ID NO: 319462 - DNA, 20 bp, Artificial Sequence
  Description of Artificial Sequence: Synthetic oligonucleotide
  Target: LAMA2; (+) strand; PAM type: YTN; PAM sequence: TTT
tattggaatgtaaggcaaaa

SEQ ID NO: 319463 - DNA, 20 bp, Artificial Sequence
  Description of Artificial Sequence: Synthetic oligonucleotide
  Target: LAMA2; (+) strand; PAM type: YTN; PAM sequence: TTT
attggaatgtaaggcaaaaa

SEQ ID NO: 319464 - DNA, 20 bp, Artificial Sequence
  Description of Artificial Sequence: Synthetic oligonucleotide
  Target: LAMA2; (+) strand; PAM type: YTN; PAM sequence: TTA
ttggaatgtaaggcaaaaat

SEQ ID NO: 319465 - DNA, 20 bp, Artificial Sequence
  Description of Artificial Sequence: Synthetic oligonucleotide
  Target: LAMA2; (+) strand; PAM type: YTN; PAM sequence: TTG
gaatgtaaggcaaaaataga

SEQ ID NO: 319466 - DNA, 20 bp, Artificial Sequence
  Description of Artificial Sequence: Synthetic oligonucleotide
  Target: LAMA2; (+) strand; PAM type: YTN; PAM sequence: TTG
aatcatttttggtgggggga

SEQ ID NO: 319467 - DNA, 20 bp, Artificial Sequence
  Description of Artificial Sequence: Synthetic oligonucleotide
  Target: LAMA2; (+) strand; PAM type: YTN; PAM sequence: TTT
ttggtggggggattgactta

SEQ ID NO: 319468 - DNA, 20 bp, Artificial Sequence
  Description of Artificial Sequence: Synthetic oligonucleotide
  Target: LAMA2; (+) strand; PAM type: YTN; PAM sequence: TTT
tggtggggggattgacttac

SEQ ID NO: 319469 - DNA, 20 bp, Artificial Sequence
  Description of Artificial Sequence: Synthetic oligonucleotide
  Target: LAMA2; (+) strand; PAM type: YTN; PAM sequence: TTT
ggtggggggattgacttacc

SEQ ID NO: 319470 - DNA, 20 bp, Artificial Sequence
  Description of Artificial Sequence: Synthetic oligonucleotide
  Target: LAMA2; (+) strand; PAM type: YTN; PAM sequence: TTG
gtggggggattgacttacct

SEQ ID NO: 319471 - DNA, 20 bp, Artificial Sequence
  Description of Artificial Sequence: Synthetic oligonucleotide
  Target: LAMA2; (+) strand; PAM type: YTN; PAM sequence: TTG
acttaccttaataataattt

SEQ ID NO: 319472 - DNA, 20 bp, Artificial Sequence
  Description of Artificial Sequence: Synthetic oligonucleotide
  Target: LAMA2; (+) strand; PAM type: YTN; PAM sequence: CTT
accttaataataatttttta

SEQ ID NO: 319473 - DNA, 20 bp, Artificial Sequence
  Description of Artificial Sequence: Synthetic oligonucleotide
  Target: LAMA2; (+) strand; PAM type: YTN; PAM sequence: TTA
ccttaataataattttttat

SEQ ID NO: 319474 - DNA, 20 bp, Artificial Sequence
  Description of Artificial Sequence: Synthetic oligonucleotide
  Target: LAMA2; (+) strand; PAM type: YTN; PAM sequence: CTT
aataataattttttatacct

SEQ ID NO: 319475 - DNA, 20 bp, Artificial Sequence
  Description of Artificial Sequence: Synthetic oligonucleotide
  Target: LAMA2; (+) strand; PAM type: YTN; PAM sequence: TTA
ataataattttttatacctt

SEQ ID NO: 319476 - DNA, 20 bp, Artificial Sequence
  Description of Artificial Sequence: Synthetic oligonucleotide
  Target: LAMA2; (+) strand; PAM type: YTN; PAM sequence: TTT
tttatacctttaaatccaga

SEQ ID NO: 319477 - DNA, 20 bp, Artificial Sequence
  Description of Artificial Sequence: Synthetic oligonucleotide
  Target: LAMA2; (+) strand; PAM type: YTN; PAM sequence: TTT
ttatacctttaaatccagaa

SEQ ID NO: 319478 - DNA, 20 bp, Artificial Sequence
  Description of Artificial Sequence: Synthetic oligonucleotide
  Target: LAMA2; (+) strand; PAM type: YTN; PAM sequence: TTT
tatacctttaaatccagaaa

SEQ ID NO: 319479 - DNA, 20 bp, Artificial Sequence
  Description of Artificial Sequence: Synthetic oligonucleotide
  Target: LAMA2; (+) strand; PAM type: YTN; PAM sequence: TTT
atacctttaaatccagaaat

SEQ ID NO: 319480 - DNA, 20 bp, Artificial Sequence
  Description of Artificial Sequence: Synthetic oligonucleotide
  Target: LAMA2; (+) strand; PAM type: YTN; PAM sequence: TTA
tacctttaaatccagaaatg

SEQ ID NO: 319481 - DNA, 20 bp, Artificial Sequence
  Description of Artificial Sequence: Synthetic oligonucleotide
  Target: LAMA2; (+) strand; PAM type: YTN; PAM sequence: CTT
taaatccagaaatgtcaaga

SEQ ID NO: 319482 - DNA, 20 bp, Artificial Sequence
  Description of Artificial Sequence: Synthetic oligonucleotide
  Target: LAMA2; (+) strand; PAM type: YTN; PAM sequence: TTT
aaatccagaaatgtcaagaa

SEQ ID NO: 319483 - DNA, 20 bp, Artificial Sequence
  Description of Artificial Sequence: Synthetic oligonucleotide
  Target: LAMA2; (+) strand; PAM type: YTN; PAM sequence: TTA
aatccagaaatgtcaagaaa

SEQ ID NO: 319484 - DNA, 20 bp, Artificial Sequence
  Description of Artificial Sequence: Synthetic oligonucleotide
  Target: LAMA2; (+) strand; PAM type: YTN; PAM sequence: TTC
agtttagagcctgcttaaaa

SEQ ID NO: 319485 - DNA, 20 bp, Artificial Sequence
  Description of Artificial Sequence: Synthetic oligonucleotide
  Target: LAMA2; (+) strand; PAM type: YTN; PAM sequence: TTT
agagcctgcttaaaaatctg

SEQ ID NO: 319486 - DNA, 20 bp, Artificial Sequence
  Description of Artificial Sequence: Synthetic oligonucleotide
  Target: LAMA2; (+) strand; PAM type: YTN; PAM sequence: TTA
gagcctgcttaaaaatctga

SEQ ID NO: 319487 - DNA, 20 bp, Artificial Sequence
  Description of Artificial Sequence: Synthetic oligonucleotide
  Target: LAMA2; (+) strand; PAM type: YTN; PAM sequence: CTG
cttaaaaatctgacattgat

SEQ ID NO: 319488 - DNA, 20 bp, Artificial Sequence
  Description of Artificial Sequence: Synthetic oligonucleotide
  Target: LAMA2; (+) strand; PAM type: YTN; PAM sequence: CTT
aaaaatctgacattgatctt

SEQ ID NO: 319489 - DNA, 20 bp, Artificial Sequence
  Description of Artificial Sequence: Synthetic oligonucleotide
  Target: LAMA2; (+) strand; PAM type: YTN; PAM sequence: TTA
aaaatctgacattgatcttc

SEQ ID NO: 319490 - DNA, 20 bp, Artificial Sequence
  Description of Artificial Sequence: Synthetic oligonucleotide
  Target: LAMA2; (+) strand; PAM type: YTN; PAM sequence: CTG
acattgatcttccaatgcct

SEQ ID NO: 319491 - DNA, 20 bp, Artificial Sequence
  Description of Artificial Sequence: Synthetic oligonucleotide
  Target: LAMA2; (+) strand; PAM type: YTN; PAM sequence: TTG
atcttccaatgccttaaaaa

SEQ ID NO: 319492 - DNA, 20 bp, Artificial Sequence
  Description of Artificial Sequence: Synthetic oligonucleotide
  Target: LAMA2; (+) strand; PAM type: YTN; PAM sequence: CTT
ccaatgccttaaaaatgttt

SEQ ID NO: 319493 - DNA, 20 bp, Artificial Sequence
  Description of Artificial Sequence: Synthetic oligonucleotide
  Target: LAMA2; (+) strand; PAM type: YTN; PAM sequence: TTC
caatgccttaaaaatgtttt

SEQ ID NO: 319494 - DNA, 20 bp, Artificial Sequence
  Description of Artificial Sequence: Synthetic oligonucleotide
  Target: LAMA2; (+) strand; PAM type: YTN; PAM sequence: CTT
aaaaatgtttttattatgaa

SEQ ID NO: 319495 - DNA, 20 bp, Artificial Sequence
  Description of Artificial Sequence: Synthetic oligonucleotide
  Target: LAMA2; (+) strand; PAM type: YTN; PAM sequence: TTA
aaaatgtttttattatgaaa

SEQ ID NO: 319496 - DNA, 20 bp, Artificial Sequence
  Description of Artificial Sequence: Synthetic oligonucleotide
  Target: LAMA2; (+) strand; PAM type: YTN; PAM sequence: TTT
ttattatgaaaaaatttgaa

SEQ ID NO: 319497 - DNA, 20 bp, Artificial Sequence
  Description of Artificial Sequence: Synthetic oligonucleotide
  Target: LAMA2; (+) strand; PAM type: YTN; PAM sequence: TTT
tattatgaaaaaatttgaac

SEQ ID NO: 319498 - DNA, 20 bp, Artificial Sequence
  Description of Artificial Sequence: Synthetic oligonucleotide
  Target: LAMA2; (+) strand; PAM type: YTN; PAM sequence: TTT
attatgaaaaaatttgaaca

SEQ ID NO: 319499 - DNA, 20 bp, Artificial Sequence
  Description of Artificial Sequence: Synthetic oligonucleotide
  Target: LAMA2; (+) strand; PAM type: YTN; PAM sequence: TTA
ttatgaaaaaatttgaacat

SEQ ID NO: 319500 - DNA, 20 bp, Artificial Sequence
  Description of Artificial Sequence: Synthetic oligonucleotide
  Target: LAMA2; (+) strand; PAM type: YTN; PAM sequence: TTA
tgaaaaaatttgaacatata

SEQ ID NO: 319501 - DNA, 20 bp, Artificial Sequence
  Description of Artificial Sequence: Synthetic oligonucleotide
  Target: LAMA2; (+) strand; PAM type: YTN; PAM sequence: TTT
gaacatataaaaaatggaag

SEQ ID NO: 319502 - DNA, 20 bp, Artificial Sequence
  Description of Artificial Sequence: Synthetic oligonucleotide
  Target: LAMA2; (+) strand; PAM type: YTN; PAM sequence: TTG
aacatataaaaaatggaaga

SEQ ID NO: 319503 - DNA, 20 bp, Artificial Sequence
  Description of Artificial Sequence: Synthetic oligonucleotide
  Target: LAMA2; (+) strand; PAM type: YTN; PAM sequence: CTC
aagtacacattacttgcttc

SEQ ID NO: 319504 - DNA, 20 bp, Artificial Sequence
  Description of Artificial Sequence: Synthetic oligonucleotide
  Target: LAMA2; (+) strand; PAM type: YTN; PAM sequence: TTA
cttgcttcaataattatcac

SEQ ID NO: 319505 - DNA, 20 bp, Artificial Sequence
  Description of Artificial Sequence: Synthetic oligonucleotide
  Target: LAMA2; (+) strand; PAM type: YTN; PAM sequence: CTT
gcttcaataattatcaccca

SEQ ID NO: 319506 - DNA, 20 bp, Artificial Sequence
  Description of Artificial Sequence: Synthetic oligonucleotide
  Target: LAMA2; (+) strand; PAM type: YTN; PAM sequence: TTG
cttcaataattatcacccat

SEQ ID NO: 319507 - DNA, 20 bp, Artificial Sequence
  Description of Artificial Sequence: Synthetic oligonucleotide
  Target: LAMA2; (+) strand; PAM type: YTN; PAM sequence: CTT
caataattatcacccatcaa

SEQ ID NO: 319508 - DNA, 20 bp, Artificial Sequence
  Description of Artificial Sequence: Synthetic oligonucleotide
  Target: LAMA2; (+) strand; PAM type: YTN; PAM sequence: TTC
aataattatcacccatcaac

SEQ ID NO: 319509 - DNA, 20 bp, Artificial Sequence
  Description of Artificial Sequence: Synthetic oligonucleotide
  Target: LAMA2; (+) strand; PAM type: YTN; PAM sequence: TTA
tcacccatcaactaattttt

SEQ ID NO: 319510 - DNA, 20 bp, Artificial Sequence
  Description of Artificial Sequence: Synthetic oligonucleotide
  Target: LAMA2; (+) strand; PAM type: YTN; PAM sequence: CTA
attttttttttcatctgtaa

SEQ ID NO: 319511 - DNA, 20 bp, Artificial Sequence
  Description of Artificial Sequence: Synthetic oligonucleotide
  Target: LAMA2; (+) strand; PAM type: YTN; PAM sequence: TTT
tttttttcatctgtaaccct

SEQ ID NO: 319512 - DNA, 20 bp, Artificial Sequence
  Description of Artificial Sequence: Synthetic oligonucleotide
  Target: LAMA2; (+) strand; PAM type: YTN; PAM sequence: TTT
ttttttcatctgtaacccta

SEQ ID NO: 319513 - DNA, 20 bp, Artificial Sequence
  Description of Artificial Sequence: Synthetic oligonucleotide
  Target: LAMA2; (+) strand; PAM type: YTN; PAM sequence: TTT
tttttcatctgtaaccctac

SEQ ID NO: 319514 - DNA, 20 bp, Artificial Sequence
  Description of Artificial Sequence: Synthetic oligonucleotide
  Target: LAMA2; (+) strand; PAM type: YTN; PAM sequence: TTT
ttttcatctgtaaccctacc

SEQ ID NO: 319515 - DNA, 20 bp, Artificial Sequence
  Description of Artificial Sequence: Synthetic oligonucleotide
  Target: LAMA2; (+) strand; PAM type: YTN; PAM sequence: TTT
tttcatctgtaaccctacca

SEQ ID NO: 319516 - DNA, 20 bp, Artificial Sequence
  Description of Artificial Sequence: Synthetic oligonucleotide
  Target: LAMA2; (+) strand; PAM type: YTN; PAM sequence: TTT
ttcatctgtaaccctaccaa

SEQ ID NO: 319517 - DNA, 20 bp, Artificial Sequence
  Description of Artificial Sequence: Synthetic oligonucleotide
  Target: LAMA2; (+) strand; PAM type: YTN; PAM sequence: TTT
tcatctgtaaccctaccaac

SEQ ID NO: 319518 - DNA, 20 bp, Artificial Sequence
  Description of Artificial Sequence: Synthetic oligonucleotide
  Target: LAMA2; (+) strand; PAM type: YTN; PAM sequence: TTT
catctgtaaccctaccaact

SEQ ID NO: 319519 - DNA, 20 bp, Artificial Sequence
  Description of Artificial Sequence: Synthetic oligonucleotide
  Target: LAMA2; (+) strand; PAM type: YTN; PAM sequence: TTC
atctgtaaccctaccaactg

SEQ ID NO: 319520 - DNA, 20 bp, Artificial Sequence
  Description of Artificial Sequence: Synthetic oligonucleotide
  Target: LAMA2; (+) strand; PAM type: YTN; PAM sequence: CTG
taaccctaccaactgttctc

SEQ ID NO: 319521 - DNA, 20 bp, Artificial Sequence
  Description of Artificial Sequence: Synthetic oligonucleotide
  Target: LAMA2; (+) strand; PAM type: YTN; PAM sequence: CTA
ccaactgttctcctttccca

SEQ ID NO: 319522 - DNA, 20 bp, Artificial Sequence
  Description of Artificial Sequence: Synthetic oligonucleotide
  Target: LAMA2; (+) strand; PAM type: YTN; PAM sequence: CTG
ttctcctttcccactggaat

SEQ ID NO: 319523 - DNA, 20 bp, Artificial Sequence
  Description of Artificial Sequence: Synthetic oligonucleotide
  Target: LAMA2; (+) strand; PAM type: YTN; PAM sequence: TTC
tcctttcccactggaatatt

SEQ ID NO: 319524 - DNA, 20 bp, Artificial Sequence
  Description of Artificial Sequence: Synthetic oligonucleotide
  Target: LAMA2; (+) strand; PAM type: YTN; PAM sequence: CTC
ctttcccactggaatatttt

SEQ ID NO: 319525 - DNA, 20 bp, Artificial Sequence
  Description of Artificial Sequence: Synthetic oligonucleotide
  Target: LAMA2; (+) strand; PAM type: YTN; PAM sequence: CTT
tcccactggaatattttgaa

SEQ ID NO: 319526 - DNA, 20 bp, Artificial Sequence
  Description of Artificial Sequence: Synthetic oligonucleotide
  Target: LAMA2; (+) strand; PAM type: YTN; PAM sequence: TTT
cccactggaatattttgaag

SEQ ID NO: 319527 - DNA, 20 bp, Artificial Sequence
  Description of Artificial Sequence: Synthetic oligonucleotide
  Target: LAMA2; (+) strand; PAM type: YTN; PAM sequence: TTC
ccactggaatattttgaagc

SEQ ID NO: 319528 - DNA, 20 bp, Artificial Sequence
  Description of Artificial Sequence: Synthetic oligonucleotide
  Target: LAMA2; (+) strand; PAM type: YTN; PAM sequence: CTG
gaatattttgaagcaaatca

SEQ ID NO: 319529 - DNA, 20 bp, Artificial Sequence
  Description of Artificial Sequence: Synthetic oligonucleotide
  Target: LAMA2; (+) strand; PAM type: YTN; PAM sequence: TTT
tgaagcaaatcatcatatca

SEQ ID NO: 319530 - DNA, 20 bp, Artificial Sequence
  Description of Artificial Sequence: Synthetic oligonucleotide
  Target: LAMA2; (+) strand; PAM type: YTN; PAM sequence: TTT
gaagcaaatcatcatatcat

SEQ ID NO: 319531 - DNA, 20 bp, Artificial Sequence
  Description of Artificial Sequence: Synthetic oligonucleotide
  Target: LAMA2; (+) strand; PAM type: YTN; PAM sequence: TTG
aagcaaatcatcatatcata

SEQ ID NO: 319532 - DNA, 20 bp, Artificial Sequence
  Description of Artificial Sequence: Synthetic oligonucleotide
  Target: LAMA2; (+) strand; PAM type: YTN; PAM sequence: CTG
taatctgcaaatatttaagt

SEQ ID NO: 319533 - DNA, 20 bp, Artificial Sequence
  Description of Artificial Sequence: Synthetic oligonucleotide
  Target: LAMA2; (+) strand; PAM type: YTN; PAM sequence: CTG
caaatatttaagtatgcata

SEQ ID NO: 319534 - DNA, 20 bp, Artificial Sequence
  Description of Artificial Sequence: Synthetic oligonucleotide
  Target: LAMA2; (+) strand; PAM type: YTN; PAM sequence: TTT
aagtatgcatatctaaaagt

SEQ ID NO: 319535 - DNA, 20 bp, Artificial Sequence
  Description of Artificial Sequence: Synthetic oligonucleotide
  Target: LAMA2; (+) strand; PAM type: YTN; PAM sequence: TTA
agtatgcatatctaaaagtt

SEQ ID NO: 319536 - DNA, 20 bp, Artificial Sequence
  Description of Artificial Sequence: Synthetic oligonucleotide
  Target: LAMA2; (+) strand; PAM type: YTN; PAM sequence: CTA
aaagttagaattctttttaa

SEQ ID NO: 319537 - DNA, 20 bp, Artificial Sequence
  Description of Artificial Sequence: Synthetic oligonucleotide
  Target: LAMA2; (+) strand; PAM type: YTN; PAM sequence: TTA
gaattctttttaaaatcata

SEQ ID NO: 319538 - DNA, 20 bp, Artificial Sequence
  Description of Artificial Sequence: Synthetic oligonucleotide
  Target: LAMA2; (+) strand; PAM type: YTN; PAM sequence: TTC
tttttaaaatcataatctca

SEQ ID NO: 319539 - DNA, 20 bp, Artificial Sequence
  Description of Artificial Sequence: Synthetic oligonucleotide
  Target: LAMA2; (+) strand; PAM type: YTN; PAM sequence: CTT
tttaaaatcataatctcagt

SEQ ID NO: 319540 - DNA, 20 bp, Artificial Sequence
  Description of Artificial Sequence: Synthetic oligonucleotide
  Target: LAMA2; (+) strand; PAM type: YTN; PAM sequence: TTT
ttaaaatcataatctcagta

SEQ ID NO: 319541 - DNA, 20 bp, Artificial Sequence
  Description of Artificial Sequence: Synthetic oligonucleotide
  Target: LAMA2; (+) strand; PAM type: YTN; PAM sequence: TTT
taaaatcataatctcagtat

SEQ ID NO: 319542 - DNA, 20 bp, Artificial Sequence
  Description of Artificial Sequence: Synthetic oligonucleotide
  Target: LAMA2; (+) strand; PAM type: YTN; PAM sequence: TTT
aaaatcataatctcagtata

SEQ ID NO: 319543 - DNA, 20 bp, Artificial Sequence
  Description of Artificial Sequence: Synthetic oligonucleotide
  Target: LAMA2; (+) strand; PAM type: YTN; PAM sequence: TTA
aaatcataatctcagtataa

SEQ ID NO: 319544 - DNA, 20 bp, Artificial Sequence
  Description of Artificial Sequence: Synthetic oligonucleotide
  Target: LAMA2; (+) strand; PAM type: YTN; PAM sequence: CTC
agtataatgacacactaaaa

SEQ ID NO: 319545 - DNA, 20 bp, Artificial Sequence
  Description of Artificial Sequence: Synthetic oligonucleotide
  Target: LAMA2; (+) strand; PAM type: YTN; PAM sequence: CTA
aaaaatgaacaataattatt

SEQ ID NO: 319546 - DNA, 20 bp, Artificial Sequence
  Description of Artificial Sequence: Synthetic oligonucleotide
  Target: LAMA2; (+) strand; PAM type: YTN; PAM sequence: TTA
tttcatcccatcaaatattg

SEQ ID NO: 319547 - DNA, 20 bp, Artificial Sequence
  Description of Artificial Sequence: Synthetic oligonucleotide
  Target: LAMA2; (+) strand; PAM type: YTN; PAM sequence: TTT
catcccatcaaatattgaca

SEQ ID NO: 319548 - DNA, 20 bp, Artificial Sequence
  Description of Artificial Sequence: Synthetic oligonucleotide
  Target: LAMA2; (+) strand; PAM type: YTN; PAM sequence: TTC
atcccatcaaatattgacaa

SEQ ID NO: 319549 - DNA, 20 bp, Artificial Sequence
  Description of Artificial Sequence: Synthetic oligonucleotide
  Target: LAMA2; (+) strand; PAM type: YTN; PAM sequence: TTG
acaagctattattcttttac

SEQ ID NO: 319550 - DNA, 20 bp, Artificial Sequence
  Description of Artificial Sequence: Synthetic oligonucleotide
  Target: LAMA2; (+) strand; PAM type: YTN; PAM sequence: CTA
ttattcttttactatatatt

SEQ ID NO: 319551 - DNA, 20 bp, Artificial Sequence
  Description of Artificial Sequence: Synthetic oligonucleotide
  Target: LAMA2; (+) strand; PAM type: YTN; PAM sequence: TTA
ttcttttactatatattggc

SEQ ID NO: 319552 - DNA, 20 bp, Artificial Sequence
  Description of Artificial Sequence: Synthetic oligonucleotide
  Target: LAMA2; (+) strand; PAM type: YTN; PAM sequence: TTC
ttttactatatattggctag

SEQ ID NO: 319553 - DNA, 20 bp, Artificial Sequence
  Description of Artificial Sequence: Synthetic oligonucleotide
  Target: LAMA2; (+) strand; PAM type: YTN; PAM sequence: CTT
ttactatatattggctagaa

SEQ ID NO: 319554 - DNA, 20 bp, Artificial Sequence
  Description of Artificial Sequence: Synthetic oligonucleotide
  Target: LAMA2; (+) strand; PAM type: YTN; PAM sequence: TTT
tactatatattggctagaat

SEQ ID NO: 319555 - DNA, 20 bp, Artificial Sequence
  Description of Artificial Sequence: Synthetic oligonucleotide
  Target: LAMA2; (+) strand; PAM type: YTN; PAM sequence: TTT
actatatattggctagaatt

SEQ ID NO: 319556 - DNA, 20 bp, Artificial Sequence
  Description of Artificial Sequence: Synthetic oligonucleotide
  Target: LAMA2; (+) strand; PAM type: YTN; PAM sequence: TTA
ctatatattggctagaattt

SEQ ID NO: 319557 - DNA, 20 bp, Artificial Sequence
  Description of Artificial Sequence: Synthetic oligonucleotide
  Target: LAMA2; (+) strand; PAM type: YTN; PAM sequence: CTA
tatattggctagaattttat

SEQ ID NO: 319558 - DNA, 20 bp, Artificial Sequence
  Description of Artificial Sequence: Synthetic oligonucleotide
  Target: LAMA2; (+) strand; PAM type: YTN; PAM sequence: TTG
gctagaattttatgtaaaga

SEQ ID NO: 319559 - DNA, 20 bp, Artificial Sequence
  Description of Artificial Sequence: Synthetic oligonucleotide
  Target: LAMA2; (+) strand; PAM type: YTN; PAM sequence: CTA
gaattttatgtaaagaaaag

SEQ ID NO: 319560 - DNA, 20 bp, Artificial Sequence
  Description of Artificial Sequence: Synthetic oligonucleotide
  Target: LAMA2; (+) strand; PAM type: YTN; PAM sequence: TTT
tatgtaaagaaaagcttttc

SEQ ID NO: 319561 - DNA, 20 bp, Artificial Sequence
  Description of Artificial Sequence: Synthetic oligonucleotide
  Target: LAMA2; (+) strand; PAM type: YTN; PAM sequence: TTT
atgtaaagaaaagcttttca

SEQ ID NO: 319562 - DNA, 20 bp, Artificial Sequence
  Description of Artificial Sequence: Synthetic oligonucleotide
  Target: LAMA2; (+) strand; PAM type: YTN; PAM sequence: TTA
tgtaaagaaaagcttttcac

SEQ ID NO: 319563 - DNA, 20 bp, Artificial Sequence
  Description of Artificial Sequence: Synthetic oligonucleotide
  Target: LAMA2; (+) strand; PAM type: YTN; PAM sequence: CTT
ttcaccattgactcttattt

SEQ ID NO: 319564 - DNA, 20 bp, Artificial Sequence
  Description of Artificial Sequence: Synthetic oligonucleotide
  Target: LAMA2; (+) strand; PAM type: YTN; PAM sequence: TTT
tcaccattgactcttattta

SEQ ID NO: 319565 - DNA, 20 bp, Artificial Sequence
  Description of Artificial Sequence: Synthetic oligonucleotide
  Target: LAMA2; (+) strand; PAM type: YTN; PAM sequence: TTT
caccattgactcttatttac

SEQ ID NO: 319566 - DNA, 20 bp, Artificial Sequence
  Description of Artificial Sequence: Synthetic oligonucleotide
  Target: LAMA2; (+) strand; PAM type: YTN; PAM sequence: TTC
accattgactcttatttacc

SEQ ID NO: 319567 - DNA, 20 bp, Artificial Sequence
  Description of Artificial Sequence: Synthetic oligonucleotide
  Target: LAMA2; (+) strand; PAM type: YTN; PAM sequence: TTG
actcttatttacctacaggt

SEQ ID NO: 319568 - DNA, 20 bp, Artificial Sequence
  Description of Artificial Sequence: Synthetic oligonucleotide
  Target: LAMA2; (+) strand; PAM type: YTN; PAM sequence: CTC
ttatttacctacaggtagaa

SEQ ID NO: 319569 - DNA, 20 bp, Artificial Sequence
  Description of Artificial Sequence: Synthetic oligonucleotide
  Target: LAMA2; (+) strand; PAM type: YTN; PAM sequence: CTT
atttacctacaggtagaatt

SEQ ID NO: 319570 - DNA, 20 bp, Artificial Sequence
  Description of Artificial Sequence: Synthetic oligonucleotide
  Target: LAMA2; (+) strand; PAM type: YTN; PAM sequence: TTA
tttacctacaggtagaattc

SEQ ID NO: 319571 - DNA, 20 bp, Artificial Sequence
  Description of Artificial Sequence: Synthetic oligonucleotide
  Target: LAMA2; (+) strand; PAM type: YTN; PAM sequence: TTT
acctacaggtagaattcaaa

SEQ ID NO: 319572 - DNA, 20 bp, Artificial Sequence
  Description of Artificial Sequence: Synthetic oligonucleotide
  Target: LAMA2; (+) strand; PAM type: YTN; PAM sequence: TTA
cctacaggtagaattcaaac

SEQ ID NO: 319573 - DNA, 20 bp, Artificial Sequence
  Description of Artificial Sequence: Synthetic oligonucleotide
  Target: LAMA2; (+) strand; PAM type: YTN; PAM sequence: CTA
caggtagaattcaaacagga

SEQ ID NO: 319574 - DNA, 20 bp, Artificial Sequence
  Description of Artificial Sequence: Synthetic oligonucleotide
  Target: LAMA2; (+) strand; PAM type: YTN; PAM sequence: TTC
aaacaggaaagcagatcaaa

SEQ ID NO: 319575 - DNA, 20 bp, Artificial Sequence
  Description of Artificial Sequence: Synthetic oligonucleotide
  Target: LAMA2; (+) strand; PAM type: YTN; PAM sequence: CTT
gattctttctttttatttcc

SEQ ID NO: 319576 - DNA, 20 bp, Artificial Sequence
  Description of Artificial Sequence: Synthetic oligonucleotide
  Target: LAMA2; (+) strand; PAM type: YTN; PAM sequence: TTG
attctttctttttatttccc

SEQ ID NO: 319577 - DNA, 20 bp, Artificial Sequence
  Description of Artificial Sequence: Synthetic oligonucleotide
  Target: LAMA2; (+) strand; PAM type: YTN; PAM sequence: TTC
tttctttttatttcccagtt

SEQ ID NO: 319578 - DNA, 20 bp, Artificial Sequence
  Description of Artificial Sequence: Synthetic oligonucleotide
  Target: LAMA2; (+) strand; PAM type: YTN; PAM sequence: CTT
tctttttatttcccagtttt

SEQ ID NO: 319579 - DNA, 20 bp, Artificial Sequence
  Description of Artificial Sequence: Synthetic oligonucleotide
  Target: LAMA2; (+) strand; PAM type: YTN; PAM sequence: TTT
ctttttatttcccagttttt

SEQ ID NO: 319580 - DNA, 20 bp, Artificial Sequence
  Description of Artificial Sequence: Synthetic oligonucleotide
  Target: LAMA2; (+) strand; PAM type: YTN; PAM sequence: TTC
tttttatttcccagttttta

SEQ ID NO: 319581 - DNA, 20 bp, Artificial Sequence
  Description of Artificial Sequence: Synthetic oligonucleotide
  Target: LAMA2; (+) strand; PAM type: YTN; PAM sequence: CTT
tttatttcccagtttttaga

SEQ ID NO: 319582 - DNA, 20 bp, Artificial Sequence
  Description of Artificial Sequence: Synthetic oligonucleotide
  Target: LAMA2; (+) strand; PAM type: YTN; PAM sequence: TTT
ttatttcccagtttttagaa

SEQ ID NO: 319583 - DNA, 20 bp, Artificial Sequence
  Description of Artificial Sequence: Synthetic oligonucleotide
  Target: LAMA2; (+) strand; PAM type: YTN; PAM sequence: TTT
tatttcccagtttttagaaa

SEQ ID NO: 319584 - DNA, 20 bp, Artificial Sequence
  Description of Artificial Sequence: Synthetic oligonucleotide
  Target: LAMA2; (+) strand; PAM type: YTN; PAM sequence: TTT
atttcccagtttttagaaaa

SEQ ID NO: 319585 - DNA, 20 bp, Artificial Sequence
  Description of Artificial Sequence: Synthetic oligonucleotide
  Target: LAMA2; (+) strand; PAM type: YTN; PAM sequence: TTA
tttcccagtttttagaaaaa

SEQ ID NO: 319586 - DNA, 20 bp, Artificial Sequence
  Description of Artificial Sequence: Synthetic oligonucleotide
  Target: LAMA2; (+) strand; PAM type: YTN; PAM sequence: TTT
cccagtttttagaaaaaatg

SEQ ID NO: 319587 - DNA, 20 bp, Artificial Sequence
  Description of Artificial Sequence: Synthetic oligonucleotide
  Target: LAMA2; (+) strand; PAM type: YTN; PAM sequence: TTC
ccagtttttagaaaaaatga

SEQ ID NO: 319588 - DNA, 20 bp, Artificial Sequence
  Description of Artificial Sequence: Synthetic oligonucleotide
  Target: LAMA2; (+) strand; PAM type: YTN; PAM sequence: TTT
ttagaaaaaatgagttggtt

SEQ ID NO: 319589 - DNA, 20 bp, Artificial Sequence
  Description of Artificial Sequence: Synthetic oligonucleotide
  Target: LAMA2; (+) strand; PAM type: YTN; PAM sequence: TTT
tagaaaaaatgagttggttt

SEQ ID NO: 319590 - DNA, 20 bp, Artificial Sequence
  Description of Artificial Sequence: Synthetic oligonucleotide
  Target: LAMA2; (+) strand; PAM type: YTN; PAM sequence: TTT
agaaaaaatgagttggttta

SEQ ID NO: 319591 - DNA, 20 bp, Artificial Sequence
  Description of Artificial Sequence: Synthetic oligonucleotide
  Target: LAMA2; (+) strand; PAM type: YTN; PAM sequence: TTA
gaaaaaatgagttggtttac

SEQ ID NO: 319592 - DNA, 20 bp, Artificial Sequence
  Description of Artificial Sequence: Synthetic oligonucleotide
  Target: LAMA2; (+) strand; PAM type: YTN; PAM sequence: TTG
gtttactagtatcctttaat

SEQ ID NO: 319593 - DNA, 20 bp, Artificial Sequence
  Description of Artificial Sequence: Synthetic oligonucleotide
  Target: LAMA2; (+) strand; PAM type: YTN; PAM sequence: TTT
actagtatcctttaatgata

SEQ ID NO: 319594 - DNA, 20 bp, Artificial Sequence
  Description of Artificial Sequence: Synthetic oligonucleotide
  Target: LAMA2; (+) strand; PAM type: YTN; PAM sequence: TTA
ctagtatcctttaatgataa

SEQ ID NO: 319595 - DNA, 20 bp, Artificial Sequence
  Description of Artificial Sequence: Synthetic oligonucleotide
  Target: LAMA2; (+) strand; PAM type: YTN; PAM sequence: CTA
gtatcctttaatgataacca

SEQ ID NO: 319596 - DNA, 20 bp, Artificial Sequence
  Description of Artificial Sequence: Synthetic oligonucleotide
  Target: LAMA2; (+) strand; PAM type: YTN; PAM sequence: CTT
taatgataaccagtttgctt

SEQ ID NO: 319597 - DNA, 20 bp, Artificial Sequence
  Description of Artificial Sequence: Synthetic oligonucleotide
  Target: LAMA2; (+) strand; PAM type: YTN; PAM sequence: TTT
aatgataaccagtttgcttt

SEQ ID NO: 319598 - DNA, 20 bp, Artificial Sequence
  Description of Artificial Sequence: Synthetic oligonucleotide
  Target: LAMA2; (+) strand; PAM type: YTN; PAM sequence: TTA
atgataaccagtttgctttt

SEQ ID NO: 319599 - DNA, 20 bp, Artificial Sequence
  Description of Artificial Sequence: Synthetic oligonucleotide
  Target: LAMA2; (+) strand; PAM type: YTN; PAM sequence: TTT
gctttttgtatctctatgaa

SEQ ID NO: 319600 - DNA, 20 bp, Artificial Sequence
  Description of Artificial Sequence: Synthetic oligonucleotide
  Target: LAMA2; (+) strand; PAM type: YTN; PAM sequence: TTG
ctttttgtatctctatgaac

SEQ ID NO: 319601 - DNA, 20 bp, Artificial Sequence
  Description of Artificial Sequence: Synthetic oligonucleotide
  Target: LAMA2; (+) strand; PAM type: YTN; PAM sequence: CTT
tttgtatctctatgaactca

SEQ ID NO: 319602 - DNA, 20 bp, Artificial Sequence
  Description of Artificial Sequence: Synthetic oligonucleotide
  Target: LAMA2; (+) strand; PAM type: YTN; PAM sequence: TTT
ttgtatctctatgaactcat

SEQ ID NO: 319603 - DNA, 20 bp, Artificial Sequence
  Description of Artificial Sequence: Synthetic oligonucleotide
  Target: LAMA2; (+) strand; PAM type: YTN; PAM sequence: TTT
tgtatctctatgaactcata

SEQ ID NO: 319604 - DNA, 20 bp, Artificial Sequence
  Description of Artificial Sequence: Synthetic oligonucleotide
  Target: LAMA2; (+) strand; PAM type: YTN; PAM sequence: TTT
gtatctctatgaactcatag

SEQ ID NO: 319605 - DNA, 20 bp, Artificial Sequence
  Description of Artificial Sequence: Synthetic oligonucleotide
  Target: LAMA2; (+) strand; PAM type: YTN; PAM sequence: TTG
tatctctatgaactcataga

SEQ ID NO: 319606 - DNA, 20 bp, Artificial Sequence
  Description of Artificial Sequence: Synthetic oligonucleotide
  Target: LAMA2; (+) strand; PAM type: YTN; PAM sequence: CTC
tatgaactcatagattttaa

SEQ ID NO: 319607 - DNA, 20 bp, Artificial Sequence
  Description of Artificial Sequence: Synthetic oligonucleotide
  Target: LAMA2; (+) strand; PAM type: YTN; PAM sequence: CTA
tgaactcatagattttaaat

SEQ ID NO: 319608 - DNA, 20 bp, Artificial Sequence
  Description of Artificial Sequence: Synthetic oligonucleotide
  Target: LAMA2; (+) strand; PAM type: YTN; PAM sequence: CTC
atagattttaaatatatttg

SEQ ID NO: 319609 - DNA, 20 bp, Artificial Sequence
  Description of Artificial Sequence: Synthetic oligonucleotide
  Target: LAMA2; (+) strand; PAM type: YTN; PAM sequence: TTT
taaatatatttgatatgttt

SEQ ID NO: 319610 - DNA, 20 bp, Artificial Sequence
  Description of Artificial Sequence: Synthetic oligonucleotide
  Target: LAMA2; (+) strand; PAM type: YTN; PAM sequence: TTT
aaatatatttgatatgtttc

SEQ ID NO: 319611 - DNA, 20 bp, Artificial Sequence
  Description of Artificial Sequence: Synthetic oligonucleotide
  Target: LAMA2; (+) strand; PAM type: YTN; PAM sequence: TTA
aatatatttgatatgtttcg

SEQ ID NO: 319612 - DNA, 20 bp, Artificial Sequence
  Description of Artificial Sequence: Synthetic oligonucleotide
  Target: LAMA2; (+) strand; PAM type: YTN; PAM sequence: TTT
gatatgtttcgattcattgc

SEQ ID NO: 319613 - DNA, 20 bp, Artificial Sequence
  Description of Artificial Sequence: Synthetic oligonucleotide
  Target: LAMA2; (+) strand; PAM type: YTN; PAM sequence: TTG
atatgtttcgattcattgca

SEQ ID NO: 319614 - DNA, 20 bp, Artificial Sequence
  Description of Artificial Sequence: Synthetic oligonucleotide
  Target: LAMA2; (+) strand; PAM type: YTN; PAM sequence: TTT
cgattcattgcagttatgat

SEQ ID NO: 319615 - DNA, 20 bp, Artificial Sequence
  Description of Artificial Sequence: Synthetic oligonucleotide
  Target: LAMA2; (+) strand; PAM type: YTN; PAM sequence: TTC
gattcattgcagttatgatt

SEQ ID NO: 319616 - DNA, 20 bp, Artificial Sequence
  Description of Artificial Sequence: Synthetic oligonucleotide
  Target: LAMA2; (+) strand; PAM type: YTN; PAM sequence: TTC
attgcagttatgattctttt

SEQ ID NO: 319617 - DNA, 20 bp, Artificial Sequence
  Description of Artificial Sequence: Synthetic oligonucleotide
  Target: LAMA2; (+) strand; PAM type: YTN; PAM sequence: TTG
cagttatgattcttttcaat

SEQ ID NO: 319618 - DNA, 20 bp, Artificial Sequence
  Description of Artificial Sequence: Synthetic oligonucleotide
  Target: LAMA2; (+) strand; PAM type: YTN; PAM sequence: TTA
tgattcttttcaataatcaa

SEQ ID NO: 319619 - DNA, 20 bp, Artificial Sequence
  Description of Artificial Sequence: Synthetic oligonucleotide
  Target: LAMA2; (+) strand; PAM type: YTN; PAM sequence: TTC
ttttcaataatcaaattgtc

SEQ ID NO: 319620 - DNA, 20 bp, Artificial Sequence
  Description of Artificial Sequence: Synthetic oligonucleotide
  Target: LAMA2; (+) strand; PAM type: YTN; PAM sequence: CTT
ttcaataatcaaattgtctc

SEQ ID NO: 319621 - DNA, 20 bp, Artificial Sequence
  Description of Artificial Sequence: Synthetic oligonucleotide
  Target: LAMA2; (+) strand; PAM type: YTN; PAM sequence: TTT
tcaataatcaaattgtctca

SEQ ID NO: 319622 - DNA, 20 bp, Artificial Sequence
  Description of Artificial Sequence: Synthetic oligonucleotide
  Target: LAMA2; (+) strand; PAM type: YTN; PAM sequence: TTT
caataatcaaattgtctcat

SEQ ID NO: 319623 - DNA, 20 bp, Artificial Sequence
  Description of Artificial Sequence: Synthetic oligonucleotide
  Target: LAMA2; (+) strand; PAM type: YTN; PAM sequence: TTC
aataatcaaattgtctcatc

SEQ ID NO: 319624 - DNA, 20 bp, Artificial Sequence
  Description of Artificial Sequence: Synthetic oligonucleotide
  Target: LAMA2; (+) strand; PAM type: YTN; PAM sequence: TTG
tctcatctttggttggtaag

SEQ ID NO: 319625 - DNA, 20 bp, Artificial Sequence
  Description of Artificial Sequence: Synthetic oligonucleotide
  Target: LAMA2; (+) strand; PAM type: YTN; PAM sequence: CTC
atctttggttggtaagagtg

SEQ ID NO: 319626 - DNA, 20 bp, Artificial Sequence
  Description of Artificial Sequence: Synthetic oligonucleotide
  Target: LAMA2; (+) strand; PAM type: YTN; PAM sequence: CTT
tggttggtaagagtgtcttc

SEQ ID NO: 319627 - DNA, 20 bp, Artificial Sequence
  Description of Artificial Sequence: Synthetic oligonucleotide
  Target: LAMA2; (+) strand; PAM type: YTN; PAM sequence: TTT
ggttggtaagagtgtcttca

SEQ ID NO: 319628 - DNA, 20 bp, Artificial Sequence
  Description of Artificial Sequence: Synthetic oligonucleotide
  Target: LAMA2; (+) strand; PAM type: YTN; PAM sequence: TTG
gttggtaagagtgtcttcaa

SEQ ID NO: 319629 - DNA, 20 bp, Artificial Sequence
  Description of Artificial Sequence: Synthetic oligonucleotide
  Target: LAMA2; (+) strand; PAM type: YTN; PAM sequence: TTG
gtaagagtgtcttcaacttg

SEQ ID NO: 319630 - DNA, 20 bp, Artificial Sequence
  Description of Artificial Sequence: Synthetic oligonucleotide
  Target: LAMA2; (+) strand; PAM type: YTN; PAM sequence: CTT
caacttggctttctagtcct

SEQ ID NO: 319631 - DNA, 20 bp, Artificial Sequence
  Description of Artificial Sequence: Synthetic oligonucleotide
  Target: LAMA2; (+) strand; PAM type: YTN; PAM sequence: TTC
aacttggctttctagtcctt

SEQ ID NO: 319632 - DNA, 20 bp, Artificial Sequence
  Description of Artificial Sequence: Synthetic oligonucleotide
  Target: LAMA2; (+) strand; PAM type: YTN; PAM sequence: CTT
ggctttctagtcctttaaac

SEQ ID NO: 319633 - DNA, 20 bp, Artificial Sequence
  Description of Artificial Sequence: Synthetic oligonucleotide
  Target: LAMA2; (+) strand; PAM type: YTN; PAM sequence: TTG
gctttctagtcctttaaact

SEQ ID NO: 319634 - DNA, 20 bp, Artificial Sequence
  Description of Artificial Sequence: Synthetic oligonucleotide
  Target: LAMA2; (+) strand; PAM type: YTN; PAM sequence: CTT
tctagtcctttaaactcagt

SEQ ID NO: 319635 - DNA, 20 bp, Artificial Sequence
  Description of Artificial Sequence: Synthetic oligonucleotide
  Target: LAMA2; (+) strand; PAM type: YTN; PAM sequence: TTT
ctagtcctttaaactcagtt

SEQ ID NO: 319636 - DNA, 20 bp, Artificial Sequence
  Description of Artificial Sequence: Synthetic oligonucleotide
  Target: LAMA2; (+) strand; PAM type: YTN; PAM sequence: TTC
tagtcctttaaactcagttt

SEQ ID NO: 319637 - DNA, 20 bp, Artificial Sequence
  Description of Artificial Sequence: Synthetic oligonucleotide
  Target: LAMA2; (+) strand; PAM type: YTN; PAM sequence: CTA
gtcctttaaactcagttttc

SEQ ID NO: 319638 - DNA, 20 bp, Artificial Sequence
  Description of Artificial Sequence: Synthetic oligonucleotide
  Target: LAMA2; (+) strand; PAM type: YTN; PAM sequence: CTT
taaactcagttttccttaat

SEQ ID NO: 319639 - DNA, 20 bp, Artificial Sequence
  Description of Artificial Sequence: Synthetic oligonucleotide
  Target: LAMA2; (+) strand; PAM type: YTN; PAM sequence: TTT
aaactcagttttccttaatg

SEQ ID NO: 319640 - DNA, 20 bp, Artificial Sequence
  Description of Artificial Sequence: Synthetic oligonucleotide
  Target: LAMA2; (+) strand; PAM type: YTN; PAM sequence: TTA
aactcagttttccttaatga

SEQ ID NO: 319641 - DNA, 20 bp, Artificial Sequence
  Description of Artificial Sequence: Synthetic oligonucleotide
  Target: LAMA2; (+) strand; PAM type: YTN; PAM sequence: CTC
agttttccttaatgattctc

SEQ ID NO: 319642 - DNA, 20 bp, Artificial Sequence
  Description of Artificial Sequence: Synthetic oligonucleotide
  Target: LAMA2; (+) strand; PAM type: YTN; PAM sequence: TTT
tccttaatgattctcatgct

SEQ ID NO: 319643 - DNA, 20 bp, Artificial Sequence
  Description of Artificial Sequence: Synthetic oligonucleotide
  Target: LAMA2; (+) strand; PAM type: YTN; PAM sequence: TTT
ccttaatgattctcatgctt

SEQ ID NO: 319644 - DNA, 20 bp, Artificial Sequence
  Description of Artificial Sequence: Synthetic oligonucleotide
  Target: LAMA2; (+) strand; PAM type: YTN; PAM sequence: TTC
cttaatgattctcatgcttt

SEQ ID NO: 319645 - DNA, 20 bp, Artificial Sequence
  Description of Artificial Sequence: Synthetic oligonucleotide
  Target: LAMA2; (+) strand; PAM type: YTN; PAM sequence: CTT
aatgattctcatgcttttca

SEQ ID NO: 319646 - DNA, 20 bp, Artificial Sequence
  Description of Artificial Sequence: Synthetic oligonucleotide
  Target: LAMA2; (+) strand; PAM type: YTN; PAM sequence: TTA
atgattctcatgcttttcag

SEQ ID NO: 319647 - DNA, 20 bp, Artificial Sequence
  Description of Artificial Sequence: Synthetic oligonucleotide
  Target: LAMA2; (+) strand; PAM type: YTN; PAM sequence: TTC
tcatgcttttcagtgttaag

SEQ ID NO: 319648 - DNA, 20 bp, Artificial Sequence
  Description of Artificial Sequence: Synthetic oligonucleotide
  Target: LAMA2; (+) strand; PAM type: YTN; PAM sequence: CTC
atgcttttcagtgttaagat

SEQ ID NO: 319649 - DNA, 20 bp, Artificial Sequence
  Description of Artificial Sequence: Synthetic oligonucleotide
  Target: LAMA2; (+) strand; PAM type: YTN; PAM sequence: CTT
ttcagtgttaagatgtggta

SEQ ID NO: 319650 - DNA, 20 bp, Artificial Sequence
  Description of Artificial Sequence: Synthetic oligonucleotide
  Target: LAMA2; (+) strand; PAM type: YTN; PAM sequence: TTT
tcagtgttaagatgtggtag

SEQ ID NO: 319651 - DNA, 20 bp, Artificial Sequence
  Description of Artificial Sequence: Synthetic oligonucleotide
  Target: LAMA2; (+) strand; PAM type: YTN; PAM sequence: TTT
cagtgttaagatgtggtagg

SEQ ID NO: 319652 - DNA, 20 bp, Artificial Sequence
  Description of Artificial Sequence: Synthetic oligonucleotide
  Target: LAMA2; (+) strand; PAM type: YTN; PAM sequence: TTC
agtgttaagatgtggtagga

SEQ ID NO: 319653 - DNA, 20 bp, Artificial Sequence
  Description of Artificial Sequence: Synthetic oligonucleotide
  Target: LAMA2; (+) strand; PAM type: YTN; PAM sequence: TTA
agatgtggtaggattgtttt

SEQ ID NO: 319654 - DNA, 20 bp, Artificial Sequence
  Description of Artificial Sequence: Synthetic oligonucleotide
  Target: LAMA2; (+) strand; PAM type: YTN; PAM sequence: TTG
ttttgcatatttcctgtcct

SEQ ID NO: 319655 - DNA, 20 bp, Artificial Sequence
  Description of Artificial Sequence: Synthetic oligonucleotide
  Target: LAMA2; (+) strand; PAM type: YTN; PAM sequence: TTT
tgcatatttcctgtcctggt

SEQ ID NO: 319656 - DNA, 20 bp, Artificial Sequence
  Description of Artificial Sequence: Synthetic oligonucleotide
  Target: LAMA2; (+) strand; PAM type: YTN; PAM sequence: TTT
gcatatttcctgtcctggtt

SEQ ID NO: 319657 - DNA, 20 bp, Artificial Sequence
  Description of Artificial Sequence: Synthetic oligonucleotide
  Target: LAMA2; (+) strand; PAM type: YTN; PAM sequence: TTG
catatttcctgtcctggttt

SEQ ID NO: 319658 - DNA, 20 bp, Artificial Sequence
  Description of Artificial Sequence: Synthetic oligonucleotide
  Target: LAMA2; (+) strand; PAM type: YTN; PAM sequence: TTT
cctgtcctggttttagaaac

SEQ ID NO: 319659 - DNA, 20 bp, Artificial Sequence
  Description of Artificial Sequence: Synthetic oligonucleotide
  Target: LAMA2; (+) strand; PAM type: YTN; PAM sequence: TTC
ctgtcctggttttagaaaca

SEQ ID NO: 319660 - DNA, 20 bp, Artificial Sequence
  Description of Artificial Sequence: Synthetic oligonucleotide
  Target: LAMA2; (+) strand; PAM type: YTN; PAM sequence: CTG
tcctggttttagaaacagtc

SEQ ID NO: 319661 - DNA, 20 bp, Artificial Sequence
  Description of Artificial Sequence: Synthetic oligonucleotide
  Target: LAMA2; (+) strand; PAM type: YTN; PAM sequence: CTG
gttttagaaacagtcatttc

SEQ ID NO: 319662 - DNA, 20 bp, Artificial Sequence
  Description of Artificial Sequence: Synthetic oligonucleotide
  Target: LAMA2; (+) strand; PAM type: YTN; PAM sequence: TTT
tagaaacagtcatttcttgg

SEQ ID NO: 319663 - DNA, 20 bp, Artificial Sequence
  Description of Artificial Sequence: Synthetic oligonucleotide
  Target: LAMA2; (+) strand; PAM type: YTN; PAM sequence: TTT
agaaacagtcatttcttgga

SEQ ID NO: 319664 - DNA, 20 bp, Artificial Sequence
  Description of Artificial Sequence: Synthetic oligonucleotide
  Target: LAMA2; (+) strand; PAM type: YTN; PAM sequence: TTA
gaaacagtcatttcttggag

SEQ ID NO: 319665 - DNA, 20 bp, Artificial Sequence
  Description of Artificial Sequence: Synthetic oligonucleotide
  Target: LAMA2; (+) strand; PAM type: YTN; PAM sequence: TTT
cttggaggagccctggttcc

SEQ ID NO: 319666 - DNA, 20 bp, Artificial Sequence
  Description of Artificial Sequence: Synthetic oligonucleotide
  Target: LAMA2; (+) strand; PAM type: YTN; PAM sequence: TTC
ttggaggagccctggttcct

SEQ ID NO: 319667 - DNA, 20 bp, Artificial Sequence
  Description of Artificial Sequence: Synthetic oligonucleotide
  Target: LAMA2; (+) strand; PAM type: YTN; PAM sequence: CTT
ggaggagccctggttcctta

SEQ ID NO: 319668 - DNA, 20 bp, Artificial Sequence
  Description of Artificial Sequence: Synthetic oligonucleotide
  Target: LAMA2; (+) strand; PAM type: YTN; PAM sequence: TTG
gaggagccctggttccttat

SEQ ID NO: 319669 - DNA, 20 bp, Artificial Sequence
  Description of Artificial Sequence: Synthetic oligonucleotide
  Target: LAMA2; (+) strand; PAM type: YTN; PAM sequence: CTG
gttccttatagtgaaaaagg

SEQ ID NO: 319670 - DNA, 20 bp, Artificial Sequence
  Description of Artificial Sequence: Synthetic oligonucleotide
  Target: LAMA2; (+) strand; PAM type: YTN; PAM sequence: TTC
cttatagtgaaaaagggtat

SEQ ID NO: 319671 - DNA, 20 bp, Artificial Sequence
  Description of Artificial Sequence: Synthetic oligonucleotide
  Target: LAMA2; (+) strand; PAM type: YTN; PAM sequence: CTT
atagtgaaaaagggtatttc

SEQ ID NO: 319672 - DNA, 20 bp, Artificial Sequence
  Description of Artificial Sequence: Synthetic oligonucleotide
  Target: LAMA2; (+) strand; PAM type: YTN; PAM sequence: TTA
tagtgaaaaagggtatttca

SEQ ID NO: 319673 - DNA, 20 bp, Artificial Sequence
  Description of Artificial Sequence: Synthetic oligonucleotide
  Target: LAMA2; (+) strand; PAM type: YTN; PAM sequence: TTT
caagaccacaggtcggtagg

SEQ ID NO: 319674 - DNA, 20 bp, Artificial Sequence
  Description of Artificial Sequence: Synthetic oligonucleotide
  Target: LAMA2; (+) strand; PAM type: YTN; PAM sequence: TTC
aagaccacaggtcggtaggg

SEQ ID NO: 319675 - DNA, 20 bp, Artificial Sequence
  Description of Artificial Sequence: Synthetic oligonucleotide
  Target: LAMA2; (+) strand; PAM type: YTN; PAM sequence: CTG
ttcactgttaatatgtaggt

SEQ ID NO: 319676 - DNA, 20 bp, Artificial Sequence
  Description of Artificial Sequence: Synthetic oligonucleotide
  Target: LAMA2; (+) strand; PAM type: YTN; PAM sequence: TTC
actgttaatatgtaggttgt

SEQ ID NO: 319677 - DNA, 20 bp, Artificial Sequence
  Description of Artificial Sequence: Synthetic oligonucleotide
  Target: LAMA2; (+) strand; PAM type: YTN; PAM sequence: CTG
ttaatatgtaggttgtttct

SEQ ID NO: 319678 - DNA, 20 bp, Artificial Sequence
  Description of Artificial Sequence: Synthetic oligonucleotide
  Target: LAMA2; (+) strand; PAM type: YTN; PAM sequence: TTA
atatgtaggttgtttctagg

SEQ ID NO: 319679 - DNA, 20 bp, Artificial Sequence
  Description of Artificial Sequence: Synthetic oligonucleotide
  Target: LAMA2; (+) strand; PAM type: YTN; PAM sequence: TTG
tttctaggtcttttcagtgg

SEQ ID NO: 319680 - DNA, 20 bp, Artificial Sequence
  Description of Artificial Sequence: Synthetic oligonucleotide
  Target: LAMA2; (+) strand; PAM type: YTN; PAM sequence: TTT
ctaggtcttttcagtggatc

SEQ ID NO: 319681 - DNA, 20 bp, Artificial Sequence
  Description of Artificial Sequence: Synthetic oligonucleotide
  Target: LAMA2; (+) strand; PAM type: YTN; PAM sequence: TTC
taggtcttttcagtggatca

SEQ ID NO: 319682 - DNA, 20 bp, Artificial Sequence
  Description of Artificial Sequence: Synthetic oligonucleotide
  Target: LAMA2; (+) strand; PAM type: YTN; PAM sequence: CTA
ggtcttttcagtggatcagg

SEQ ID NO: 319683 - DNA, 20 bp, Artificial Sequence
  Description of Artificial Sequence: Synthetic oligonucleotide
  Target: LAMA2; (+) strand; PAM type: YTN; PAM sequence: CTT
ttcagtggatcaggtgggaa

SEQ ID NO: 319684 - DNA, 20 bp, Artificial Sequence
  Description of Artificial Sequence: Synthetic oligonucleotide
  Target: LAMA2; (+) strand; PAM type: YTN; PAM sequence: TTT
tcagtggatcaggtgggaaa

SEQ ID NO: 319685 - DNA, 20 bp, Artificial Sequence
  Description of Artificial Sequence: Synthetic oligonucleotide
  Target: LAMA2; (+) strand; PAM type: YTN; PAM sequence: TTT
cagtggatcaggtgggaaat

SEQ ID NO: 319686 - DNA, 20 bp, Artificial Sequence
  Description of Artificial Sequence: Synthetic oligonucleotide
  Target: LAMA2; (+) strand; PAM type: YTN; PAM sequence: TTC
agtggatcaggtgggaaata

SEQ ID NO: 319687 - DNA, 20 bp, Artificial Sequence
  Description of Artificial Sequence: Synthetic oligonucleotide
  Target: LAMA2; (+) strand; PAM type: YTN; PAM sequence: TTT
caaatagagaaaatacatta

SEQ ID NO: 319688 - DNA, 20 bp, Artificial Sequence
  Description of Artificial Sequence: Synthetic oligonucleotide
  Target: LAMA2; (+) strand; PAM type: YTN; PAM sequence: TTC
aaatagagaaaatacattat

SEQ ID NO: 319689 - DNA, 20 bp, Artificial Sequence
  Description of Artificial Sequence: Synthetic oligonucleotide
  Target: LAMA2; (+) strand; PAM type: YTN; PAM sequence: TTA
tagtttattctgacatgccc

SEQ ID NO: 319690 - DNA, 20 bp, Artificial Sequence
  Description of Artificial Sequence: Synthetic oligonucleotide
  Target: LAMA2; (+) strand; PAM type: YTN; PAM sequence: TTT
attctgacatgcccatttag

SEQ ID NO: 319691 - DNA, 20 bp, Artificial Sequence
  Description of Artificial Sequence: Synthetic oligonucleotide
  Target: LAMA2; (+) strand; PAM type: YTN; PAM sequence: TTA
ttctgacatgcccatttagg

SEQ ID NO: 319692 - DNA, 20 bp, Artificial Sequence
  Description of Artificial Sequence: Synthetic oligonucleotide
  Target: LAMA2; (+) strand; PAM type: YTN; PAM sequence: TTC
tgacatgcccatttaggaat

SEQ ID NO: 319693 - DNA, 20 bp, Artificial Sequence
  Description of Artificial Sequence: Synthetic oligonucleotide
  Target: LAMA2; (+) strand; PAM type: YTN; PAM sequence: CTG
acatgcccatttaggaatat

SEQ ID NO: 319694 - DNA, 20 bp, Artificial Sequence
  Description of Artificial Sequence: Synthetic oligonucleotide
  Target: LAMA2; (+) strand; PAM type: YTN; PAM sequence: TTT
aggaatatgaggcttatagt

SEQ ID NO: 319695 - DNA, 20 bp, Artificial Sequence
  Description of Artificial Sequence: Synthetic oligonucleotide
  Target: LAMA2; (+) strand; PAM type: YTN; PAM sequence: TTA
ggaatatgaggcttatagtt

SEQ ID NO: 319696 - DNA, 20 bp, Artificial Sequence
  Description of Artificial Sequence: Synthetic oligonucleotide
  Target: LAMA2; (+) strand; PAM type: YTN; PAM sequence: CTT
atagttaaattcattaattt

SEQ ID NO: 319697 - DNA, 20 bp, Artificial Sequence
  Description of Artificial Sequence: Synthetic oligonucleotide
  Target: LAMA2; (+) strand; PAM type: YTN; PAM sequence: TTA
tagttaaattcattaatttc

SEQ ID NO: 319698 - DNA, 20 bp, Artificial Sequence
  Description of Artificial Sequence: Synthetic oligonucleotide
  Target: LAMA2; (+) strand; PAM type: YTN; PAM sequence: TTA
aattcattaatttcatattt

SEQ ID NO: 319699 - DNA, 20 bp, Artificial Sequence
  Description of Artificial Sequence: Synthetic oligonucleotide
  Target: LAMA2; (+) strand; PAM type: YTN; PAM sequence: TTC
attaatttcatatttgtatc

SEQ ID NO: 319700 - DNA, 20 bp, Artificial Sequence
  Description of Artificial Sequence: Synthetic oligonucleotide
  Target: LAMA2; (+) strand; PAM type: YTN; PAM sequence: TTA
atttcatatttgtatctttt

SEQ ID NO: 319701 - DNA, 20 bp, Artificial Sequence
  Description of Artificial Sequence: Synthetic oligonucleotide
  Target: LAMA2; (+) strand; PAM type: YTN; PAM sequence: TTT
catatttgtatcttttttct

SEQ ID NO: 319702 - DNA, 20 bp, Artificial Sequence
  Description of Artificial Sequence: Synthetic oligonucleotide
  Target: LAMA2; (+) strand; PAM type: YTN; PAM sequence: TTC
atatttgtatcttttttctc

SEQ ID NO: 319703 - DNA, 20 bp, Artificial Sequence
  Description of Artificial Sequence: Synthetic oligonucleotide
  Target: LAMA2; (+) strand; PAM type: YTN; PAM sequence: TTT
gtatcttttttctcatccac

SEQ ID NO: 319704 - DNA, 20 bp, Artificial Sequence
  Description of Artificial Sequence: Synthetic oligonucleotide
  Target: LAMA2; (+) strand; PAM type: YTN; PAM sequence: TTG
tatcttttttctcatccact

SEQ ID NO: 319705 - DNA, 20 bp, Artificial Sequence
  Description of Artificial Sequence: Synthetic oligonucleotide
  Target: LAMA2; (+) strand; PAM type: YTN; PAM sequence: CTT
ttttctcatccactgaaagt

SEQ ID NO: 319706 - DNA, 20 bp, Artificial Sequence
  Description of Artificial Sequence: Synthetic oligonucleotide
  Target: LAMA2; (+) strand; PAM type: YTN; PAM sequence: TTT
tttctcatccactgaaagtt

SEQ ID NO: 319707 - DNA, 20 bp, Artificial Sequence
  Description of Artificial Sequence: Synthetic oligonucleotide
  Target: LAMA2; (+) strand; PAM type: YTN; PAM sequence: TTT
ttctcatccactgaaagttt

SEQ ID NO: 319708 - DNA, 20 bp, Artificial Sequence
  Description of Artificial Sequence: Synthetic oligonucleotide
  Target: LAMA2; (+) strand; PAM type: YTN; PAM sequence: TTT
tctcatccactgaaagtttt

SEQ ID NO: 319709 - DNA, 20 bp, Artificial Sequence
  Description of Artificial Sequence: Synthetic oligonucleotide
  Target: LAMA2; (+) strand; PAM type: YTN; PAM sequence: TTT
ctcatccactgaaagttttg

SEQ ID NO: 319710 - DNA, 20 bp, Artificial Sequence
  Description of Artificial Sequence: Synthetic oligonucleotide
  Target: LAMA2; (+) strand; PAM type: YTN; PAM sequence: TTC
tcatccactgaaagttttga

SEQ ID NO: 319711 - DNA, 20 bp, Artificial Sequence
  Description of Artificial Sequence: Synthetic oligonucleotide
  Target: LAMA2; (+) strand; PAM type: YTN; PAM sequence: CTC
atccactgaaagttttgatt

SEQ ID NO: 319712 - DNA, 20 bp, Artificial Sequence
  Description of Artificial Sequence: Synthetic oligonucleotide
  Target: LAMA2; (+) strand; PAM type: YTN; PAM sequence: CTG
aaagttttgattcctaataa

SEQ ID NO: 319713 - DNA, 20 bp, Artificial Sequence
  Description of Artificial Sequence: Synthetic oligonucleotide
  Target: LAMA2; (+) strand; PAM type: YTN; PAM sequence: TTT
tgattcctaataacttattt

SEQ ID NO: 319714 - DNA, 20 bp, Artificial Sequence
  Description of Artificial Sequence: Synthetic oligonucleotide
  Target: LAMA2; (+) strand; PAM type: YTN; PAM sequence: TTT
gattcctaataacttatttg

SEQ ID NO: 319715 - DNA, 20 bp, Artificial Sequence
  Description of Artificial Sequence: Synthetic oligonucleotide
  Target: LAMA2; (+) strand; PAM type: YTN; PAM sequence: TTG
attcctaataacttatttgc

SEQ ID NO: 319716 - DNA, 20 bp, Artificial Sequence
  Description of Artificial Sequence: Synthetic oligonucleotide
  Target: LAMA2; (+) strand; PAM type: YTN; PAM sequence: TTC
ctaataacttatttgctcta

SEQ ID NO: 319717 - DNA, 20 bp, Artificial Sequence
  Description of Artificial Sequence: Synthetic oligonucleotide
  Target: LAMA2; (+) strand; PAM type: YTN; PAM sequence: CTA
ataacttatttgctctatca

SEQ ID NO: 319718 - DNA, 20 bp, Artificial Sequence
  Description of Artificial Sequence: Synthetic oligonucleotide
  Target: LAMA2; (+) strand; PAM type: YTN; PAM sequence: CTT
atttgctctatcatagctct

SEQ ID NO: 319719 - DNA, 20 bp, Artificial Sequence
  Description of Artificial Sequence: Synthetic oligonucleotide
  Target: LAMA2; (+) strand; PAM type: YTN; PAM sequence: TTA
tttgctctatcatagctctc

SEQ ID NO: 319720 - DNA, 20 bp, Artificial Sequence
  Description of Artificial Sequence: Synthetic oligonucleotide
  Target: LAMA2; (+) strand; PAM type: YTN; PAM sequence: TTT
gctctatcatagctctctat

SEQ ID NO: 319721 - DNA, 20 bp, Artificial Sequence
  Description of Artificial Sequence: Synthetic oligonucleotide
  Target: LAMA2; (+) strand; PAM type: YTN; PAM sequence: TTG
ctctatcatagctctctata

SEQ ID NO: 319722 - DNA, 20 bp, Artificial Sequence
  Description of Artificial Sequence: Synthetic oligonucleotide
  Target: LAMA2; (+) strand; PAM type: YTN; PAM sequence: CTC
tatcatagctctctatatat

SEQ ID NO: 319723 - DNA, 20 bp, Artificial Sequence
  Description of Artificial Sequence: Synthetic oligonucleotide
  Target: LAMA2; (+) strand; PAM type: YTN; PAM sequence: CTA
tcatagctctctatatatca

SEQ ID NO: 319724 - DNA, 20 bp, Artificial Sequence
  Description of Artificial Sequence: Synthetic oligonucleotide
  Target: LAMA2; (+) strand; PAM type: YTN; PAM sequence: CTC
tctatatatcatttcataat

SEQ ID NO: 319725 - DNA, 20 bp, Artificial Sequence
  Description of Artificial Sequence: Synthetic oligonucleotide
  Target: LAMA2; (+) strand; PAM type: YTN; PAM sequence: CTC
tatatatcatttcataataa

SEQ ID NO: 319726 - DNA, 20 bp, Artificial Sequence
  Description of Artificial Sequence: Synthetic oligonucleotide
  Target: LAMA2; (+) strand; PAM type: YTN; PAM sequence: CTA
tatatcatttcataataata

SEQ ID NO: 319727 - DNA, 20 bp, Artificial Sequence
  Description of Artificial Sequence: Synthetic oligonucleotide
  Target: LAMA2; (+) strand; PAM type: YTN; PAM sequence: TTT
cataataataatagaaatat

SEQ ID NO: 319728 - DNA, 20 bp, Artificial Sequence
  Description of Artificial Sequence: Synthetic oligonucleotide
  Target: LAMA2; (+) strand; PAM type: YTN; PAM sequence: TTC
ataataataatagaaatatt

SEQ ID NO: 319729 - DNA, 20 bp, Artificial Sequence
  Description of Artificial Sequence: Synthetic oligonucleotide
  Target: LAMA2; (+) strand; PAM type: YTN; PAM sequence: TTA
tcatatacaacatagtggct

SEQ ID NO: 319730 - DNA, 20 bp, Artificial Sequence
  Description of Artificial Sequence: Synthetic oligonucleotide
  Target: LAMA2; (+) strand; PAM type: YTN; PAM sequence: CTG
aaatgactttgaaagatttc

SEQ ID NO: 319731 - DNA, 20 bp, Artificial Sequence
  Description of Artificial Sequence: Synthetic oligonucleotide
  Target: LAMA2; (+) strand; PAM type: YTN; PAM sequence: CTT
tgaaagatttcttagccacg

SEQ ID NO: 319732 - DNA, 20 bp, Artificial Sequence
  Description of Artificial Sequence: Synthetic oligonucleotide
  Target: LAMA2; (+) strand; PAM type: YTN; PAM sequence: TTT
gaaagatttcttagccacga

SEQ ID NO: 319733 - DNA, 20 bp, Artificial Sequence
  Description of Artificial Sequence: Synthetic oligonucleotide
  Target: LAMA2; (+) strand; PAM type: YTN; PAM sequence: TTG
aaagatttcttagccacgat

SEQ ID NO: 319734 - DNA, 20 bp, Artificial Sequence
  Description of Artificial Sequence: Synthetic oligonucleotide
  Target: LAMA2; (+) strand; PAM type: YTN; PAM sequence: TTT
cttagccacgattttatatt

SEQ ID NO: 319735 - DNA, 20 bp, Artificial Sequence
  Description of Artificial Sequence: Synthetic oligonucleotide
  Target: LAMA2; (+) strand; PAM type: YTN; PAM sequence: TTC
ttagccacgattttatattt

SEQ ID NO: 319736 - DNA, 20 bp, Artificial Sequence
  Description of Artificial Sequence: Synthetic oligonucleotide
  Target: LAMA2; (+) strand; PAM type: YTN; PAM sequence: CTT
agccacgattttatatttat

SEQ ID NO: 319737 - DNA, 20 bp, Artificial Sequence
  Description of Artificial Sequence: Synthetic oligonucleotide
  Target: LAMA2; (+) strand; PAM type: YTN; PAM sequence: TTA
gccacgattttatatttata

SEQ ID NO: 319738 - DNA, 20 bp, Artificial Sequence
  Description of Artificial Sequence: Synthetic oligonucleotide
  Target: LAMA2; (+) strand; PAM type: YTN; PAM sequence: TTT
tatatttataaagcatccca

SEQ ID NO: 319739 - DNA, 20 bp, Artificial Sequence
  Description of Artificial Sequence: Synthetic oligonucleotide
  Target: LAMA2; (+) strand; PAM type: YTN; PAM sequence: TTT
atatttataaagcatcccac

SEQ ID NO: 319740 - DNA, 20 bp, Artificial Sequence
  Description of Artificial Sequence: Synthetic oligonucleotide
  Target: LAMA2; (+) strand; PAM type: YTN; PAM sequence: TTA
tatttataaagcatcccact

SEQ ID NO: 319741 - DNA, 20 bp, Artificial Sequence
  Description of Artificial Sequence: Synthetic oligonucleotide
  Target: LAMA2; (+) strand; PAM type: YTN; PAM sequence: TTT
ataaagcatcccactaggca

SEQ ID NO: 319742 - DNA, 20 bp, Artificial Sequence
  Description of Artificial Sequence: Synthetic oligonucleotide
  Target: LAMA2; (+) strand; PAM type: YTN; PAM sequence: TTA
taaagcatcccactaggcat

SEQ ID NO: 319743 - DNA, 20 bp, Artificial Sequence
  Description of Artificial Sequence: Synthetic oligonucleotide
  Target: LAMA2; (+) strand; PAM type: YTN; PAM sequence: CTA
ggcatctacaatcaaattac

SEQ ID NO: 319744 - DNA, 20 bp, Artificial Sequence
  Description of Artificial Sequence: Synthetic oligonucleotide
  Target: LAMA2; (+) strand; PAM type: YTN; PAM sequence: CTA
caatcaaattaccttttttt

SEQ ID NO: 319745 - DNA, 20 bp, Artificial Sequence
  Description of Artificial Sequence: Synthetic oligonucleotide
  Target: LAMA2; (+) strand; PAM type: YTN; PAM sequence: TTA
cctttttttaaaaaaaaatc

SEQ ID NO: 319746 - DNA, 20 bp, Artificial Sequence
  Description of Artificial Sequence: Synthetic oligonucleotide
  Target: LAMA2; (+) strand; PAM type: YTN; PAM sequence: CTT
tttttaaaaaaaaatcactt

SEQ ID NO: 319747 - DNA, 20 bp, Artificial Sequence
  Description of Artificial Sequence: Synthetic oligonucleotide
  Target: LAMA2; (+) strand; PAM type: YTN; PAM sequence: TTT
ttttaaaaaaaaatcacttg

SEQ ID NO: 319748 - DNA, 20 bp, Artificial Sequence
  Description of Artificial Sequence: Synthetic oligonucleotide
  Target: LAMA2; (+) strand; PAM type: YTN; PAM sequence: TTT
tttaaaaaaaaatcacttga

SEQ ID NO: 319749 - DNA, 20 bp, Artificial Sequence
  Description of Artificial Sequence: Synthetic oligonucleotide
  Target: LAMA2; (+) strand; PAM type: YTN; PAM sequence: TTT
ttaaaaaaaaatcacttgaa

SEQ ID NO: 319750 - DNA, 20 bp, Artificial Sequence
  Description of Artificial Sequence: Synthetic oligonucleotide
  Target: LAMA2; (+) strand; PAM type: YTN; PAM sequence: TTT
taaaaaaaaatcacttgaaa

SEQ ID NO: 319751 - DNA, 20 bp, Artificial Sequence
  Description of Artificial Sequence: Synthetic oligonucleotide
  Target: LAMA2; (+) strand; PAM type: YTN; PAM sequence: TTT
aaaaaaaaatcacttgaaaa

SEQ ID NO: 319752 - DNA, 20 bp, Artificial Sequence
  Description of Artificial Sequence: Synthetic oligonucleotide
  Target: LAMA2; (+) strand; PAM type: YTN; PAM sequence: TTA
aaaaaaaatcacttgaaaaa

SEQ ID NO: 319753 - DNA, 20 bp, Artificial Sequence
  Description of Artificial Sequence: Synthetic oligonucleotide
  Target: LAMA2; (+) strand; PAM type: YTN; PAM sequence: CTT
gaaaaaattattttatggtt

SEQ ID NO: 319754 - DNA, 20 bp, Artificial Sequence
  Description of Artificial Sequence: Synthetic oligonucleotide
  Target: LAMA2; (+) strand; PAM type: YTN; PAM sequence: TTG
aaaaaattattttatggtta

SEQ ID NO: 319755 - DNA, 20 bp, Artificial Sequence
  Description of Artificial Sequence: Synthetic oligonucleotide
  Target: LAMA2; (+) strand; PAM type: YTN; PAM sequence: TTA
ttttatggttaagccaccaa

SEQ ID NO: 319756 - DNA, 20 bp, Artificial Sequence
  Description of Artificial Sequence: Synthetic oligonucleotide
  Target: LAMA2; (+) strand; PAM type: YTN; PAM sequence: TTT
tatggttaagccaccaaaca

SEQ ID NO: 319757 - DNA, 20 bp, Artificial Sequence
  Description of Artificial Sequence: Synthetic oligonucleotide
  Target: LAMA2; (+) strand; PAM type: YTN; PAM sequence: TTT
atggttaagccaccaaacaa

SEQ ID NO: 319758 - DNA, 20 bp, Artificial Sequence
  Description of Artificial Sequence: Synthetic oligonucleotide
  Target: LAMA2; (+) strand; PAM type: YTN; PAM sequence: TTA
tggttaagccaccaaacaac

SEQ ID NO: 319759 - DNA, 20 bp, Artificial Sequence
  Description of Artificial Sequence: Synthetic oligonucleotide
  Target: LAMA2; (+) strand; PAM type: YTN; PAM sequence: TTA
agccaccaaacaacttcatt

SEQ ID NO: 319760 - DNA, 20 bp, Artificial Sequence
  Description of Artificial Sequence: Synthetic oligonucleotide
  Target: LAMA2; (+) strand; PAM type: YTN; PAM sequence: CTT
catttgcttcatttgacttt

SEQ ID NO: 319761 - DNA, 20 bp, Artificial Sequence
  Description of Artificial Sequence: Synthetic oligonucleotide
  Target: LAMA2; (+) strand; PAM type: YTN; PAM sequence: TTC
atttgcttcatttgactttt

SEQ ID NO: 319762 - DNA, 20 bp, Artificial Sequence
  Description of Artificial Sequence: Synthetic oligonucleotide
  Target: LAMA2; (+) strand; PAM type: YTN; PAM sequence: TTT
gcttcatttgactttttgcc

SEQ ID NO: 319763 - DNA, 20 bp, Artificial Sequence
  Description of Artificial Sequence: Synthetic oligonucleotide
  Target: LAMA2; (+) strand; PAM type: YTN; PAM sequence: TTG
cttcatttgactttttgcct

SEQ ID NO: 319764 - DNA, 20 bp, Artificial Sequence
  Description of Artificial Sequence: Synthetic oligonucleotide
  Target: LAMA2; (+) strand; PAM type: YTN; PAM sequence: CTT
catttgactttttgcctgaa

SEQ ID NO: 319765 - DNA, 20 bp, Artificial Sequence
  Description of Artificial Sequence: Synthetic oligonucleotide
  Target: LAMA2; (+) strand; PAM type: YTN; PAM sequence: TTC
atttgactttttgcctgaaa

SEQ ID NO: 319766 - DNA, 20 bp, Artificial Sequence
  Description of Artificial Sequence: Synthetic oligonucleotide
  Target: LAMA2; (+) strand; PAM type: YTN; PAM sequence: TTT
gactttttgcctgaaagtat

SEQ ID NO: 319767 - DNA, 20 bp, Artificial Sequence
  Description of Artificial Sequence: Synthetic oligonucleotide
  Target: LAMA2; (+) strand; PAM type: YTN; PAM sequence: TTG
actttttgcctgaaagtatt

SEQ ID NO: 319768 - DNA, 20 bp, Artificial Sequence
  Description of Artificial Sequence: Synthetic oligonucleotide
  Target: LAMA2; (+) strand; PAM type: YTN; PAM sequence: CTT
tttgcctgaaagtattttaa

SEQ ID NO: 319769 - DNA, 20 bp, Artificial Sequence
  Description of Artificial Sequence: Synthetic oligonucleotide
  Target: LAMA2; (+) strand; PAM type: YTN; PAM sequence: TTT
ttgcctgaaagtattttaaa

SEQ ID NO: 319770 - DNA, 20 bp, Artificial Sequence
  Description of Artificial Sequence: Synthetic oligonucleotide
  Target: LAMA2; (+) strand; PAM type: YTN; PAM sequence: TTT
tgcctgaaagtattttaaat

SEQ ID NO: 319771 - DNA, 20 bp, Artificial Sequence
  Description of Artificial Sequence: Synthetic oligonucleotide
  Target: LAMA2; (+) strand; PAM type: YTN; PAM sequence: TTT
gcctgaaagtattttaaata

SEQ ID NO: 319772 - DNA, 20 bp, Artificial Sequence
  Description of Artificial Sequence: Synthetic oligonucleotide
  Target: LAMA2; (+) strand; PAM type: YTN; PAM sequence: TTG
cctgaaagtattttaaatat

SEQ ID NO: 319773 - DNA, 20 bp, Artificial Sequence
  Description of Artificial Sequence: Synthetic oligonucleotide
  Target: LAMA2; (+) strand; PAM type: YTN; PAM sequence: CTG
aaagtattttaaatatttgt

SEQ ID NO: 319774 - DNA, 20 bp, Artificial Sequence
  Description of Artificial Sequence: Synthetic oligonucleotide
  Target: LAMA2; (+) strand; PAM type: YTN; PAM sequence: TTT
taaatatttgttttataatg

SEQ ID NO: 319775 - DNA, 20 bp, Artificial Sequence
  Description of Artificial Sequence: Synthetic oligonucleotide
  Target: LAMA2; (+) strand; PAM type: YTN; PAM sequence: TTT
aaatatttgttttataatga

SEQ ID NO: 319776 - DNA, 20 bp, Artificial Sequence
  Description of Artificial Sequence: Synthetic oligonucleotide
  Target: LAMA2; (+) strand; PAM type: YTN; PAM sequence: TTA
aatatttgttttataatgat

SEQ ID NO: 319777 - DNA, 20 bp, Artificial Sequence
  Description of Artificial Sequence: Synthetic oligonucleotide
  Target: LAMA2; (+) strand; PAM type: YTN; PAM sequence: TTT
gttttataatgatgtaaaaa

SEQ ID NO: 319778 - DNA, 20 bp, Artificial Sequence
  Description of Artificial Sequence: Synthetic oligonucleotide
  Target: LAMA2; (+) strand; PAM type: YTN; PAM sequence: TTG
ttttataatgatgtaaaaac

SEQ ID NO: 319779 - DNA, 20 bp, Artificial Sequence
  Description of Artificial Sequence: Synthetic oligonucleotide
  Target: LAMA2; (+) strand; PAM type: YTN; PAM sequence: TTT
tataatgatgtaaaaacttt

SEQ ID NO: 319780 - DNA, 20 bp, Artificial Sequence
  Description of Artificial Sequence: Synthetic oligonucleotide
  Target: LAMA2; (+) strand; PAM type: YTN; PAM sequence: TTT
ataatgatgtaaaaactttt

SEQ ID NO: 319781 - DNA, 20 bp, Artificial Sequence
  Description of Artificial Sequence: Synthetic oligonucleotide
  Target: LAMA2; (+) strand; PAM type: YTN; PAM sequence: TTA
taatgatgtaaaaactttta

SEQ ID NO: 319782 - DNA, 20 bp, Artificial Sequence
  Description of Artificial Sequence: Synthetic oligonucleotide
  Target: LAMA2; (+) strand; PAM type: YTN; PAM sequence: CTT
ttacatagtttcaaggtcaa

SEQ ID NO: 319783 - DNA, 20 bp, Artificial Sequence
  Description of Artificial Sequence: Synthetic oligonucleotide
  Target: LAMA2; (+) strand; PAM type: YTN; PAM sequence: TTT
tacatagtttcaaggtcaaa

SEQ ID NO: 319784 - DNA, 20 bp, Artificial Sequence
  Description of Artificial Sequence: Synthetic oligonucleotide
  Target: LAMA2; (+) strand; PAM type: YTN; PAM sequence: TTT
acatagtttcaaggtcaaat

SEQ ID NO: 319785 - DNA, 20 bp, Artificial Sequence
  Description of Artificial Sequence: Synthetic oligonucleotide
  Target: LAMA2; (+) strand; PAM type: YTN; PAM sequence: TTA
catagtttcaaggtcaaatt

SEQ ID NO: 319786 - DNA, 20 bp, Artificial Sequence
  Description of Artificial Sequence: Synthetic oligonucleotide
  Target: LAMA2; (+) strand; PAM type: YTN; PAM sequence: TTT
caaggtcaaatttgcaaaat

SEQ ID NO: 319787 - DNA, 20 bp, Artificial Sequence
  Description of Artificial Sequence: Synthetic oligonucleotide
  Target: LAMA2; (+) strand; PAM type: YTN; PAM sequence: TTC
aaggtcaaatttgcaaaata

SEQ ID NO: 319788 - DNA, 20 bp, Artificial Sequence
  Description of Artificial Sequence: Synthetic oligonucleotide
  Target: LAMA2; (+) strand; PAM type: YTN; PAM sequence: TTT
gcaaaataagttatattcag

SEQ ID NO: 319789 - DNA, 20 bp, Artificial Sequence
  Description of Artificial Sequence: Synthetic oligonucleotide
  Target: LAMA2; (+) strand; PAM type: YTN; PAM sequence: TTG
caaaataagttatattcaga

SEQ ID NO: 319790 - DNA, 20 bp, Artificial Sequence
  Description of Artificial Sequence: Synthetic oligonucleotide
  Target: LAMA2; (+) strand; PAM type: YTN; PAM sequence: TTA
tattcagagactagactctc

SEQ ID NO: 319791 - DNA, 20 bp, Artificial Sequence
  Description of Artificial Sequence: Synthetic oligonucleotide
  Target: LAMA2; (+) strand; PAM type: YTN; PAM sequence: TTC
agagactagactctctagat

SEQ ID NO: 319792 - DNA, 20 bp, Artificial Sequence
  Description of Artificial Sequence: Synthetic oligonucleotide
  Target: LAMA2; (+) strand; PAM type: YTN; PAM sequence: CTA
gactctctagatccattcat

SEQ ID NO: 319793 - DNA, 20 bp, Artificial Sequence
  Description of Artificial Sequence: Synthetic oligonucleotide
  Target: LAMA2; (+) strand; PAM type: YTN; PAM sequence: CTC
tctagatccattcatcctgt

SEQ ID NO: 319794 - DNA, 20 bp, Artificial Sequence
  Description of Artificial Sequence: Synthetic oligonucleotide
  Target: LAMA2; (+) strand; PAM type: YTN; PAM sequence: CTC
tagatccattcatcctgttt

SEQ ID NO: 319795 - DNA, 20 bp, Artificial Sequence
  Description of Artificial Sequence: Synthetic oligonucleotide
  Target: LAMA2; (+) strand; PAM type: YTN; PAM sequence: CTA
gatccattcatcctgttttc

SEQ ID NO: 319796 - DNA, 20 bp, Artificial Sequence
  Description of Artificial Sequence: Synthetic oligonucleotide
  Target: LAMA2; (+) strand; PAM type: YTN; PAM sequence: TTC
atcctgttttcttcctcact

SEQ ID NO: 319797 - DNA, 20 bp, Artificial Sequence
  Description of Artificial Sequence: Synthetic oligonucleotide
  Target: LAMA2; (+) strand; PAM type: YTN; PAM sequence: CTG
ttttcttcctcactaatgtg

SEQ ID NO: 319798 - DNA, 20 bp, Artificial Sequence
  Description of Artificial Sequence: Synthetic oligonucleotide
  Target: LAMA2; (+) strand; PAM type: YTN; PAM sequence: TTT
tcttcctcactaatgtgtaa

SEQ ID NO: 319799 - DNA, 20 bp, Artificial Sequence
  Description of Artificial Sequence: Synthetic oligonucleotide
  Target: LAMA2; (+) strand; PAM type: YTN; PAM sequence: TTT
cttcctcactaatgtgtaac

SEQ ID NO: 319800 - DNA, 20 bp, Artificial Sequence
  Description of Artificial Sequence: Synthetic oligonucleotide
  Target: LAMA2; (+) strand; PAM type: YTN; PAM sequence: TTC
ttcctcactaatgtgtaacc

SEQ ID NO: 319801 - DNA, 20 bp, Artificial Sequence
  Description of Artificial Sequence: Synthetic oligonucleotide
  Target: LAMA2; (+) strand; PAM type: YTN; PAM sequence: CTT
cctcactaatgtgtaaccat

SEQ ID NO: 319802 - DNA, 20 bp, Artificial Sequence
  Description of Artificial Sequence: Synthetic oligonucleotide
  Target: LAMA2; (+) strand; PAM type: YTN; PAM sequence: TTC
ctcactaatgtgtaaccatt

SEQ ID NO: 319803 - DNA, 20 bp, Artificial Sequence
  Description of Artificial Sequence: Synthetic oligonucleotide
  Target: LAMA2; (+) strand; PAM type: YTN; PAM sequence: CTC
actaatgtgtaaccatttta

SEQ ID NO: 319804 - DNA, 20 bp, Artificial Sequence
  Description of Artificial Sequence: Synthetic oligonucleotide
  Target: LAMA2; (+) strand; PAM type: YTN; PAM sequence: CTA
atgtgtaaccattttattta

SEQ ID NO: 319805 - DNA, 20 bp, Artificial Sequence
  Description of Artificial Sequence: Synthetic oligonucleotide
  Target: LAMA2; (+) strand; PAM type: YTN; PAM sequence: TTT
tatttagggttatctttcca

SEQ ID NO: 319806 - DNA, 20 bp, Artificial Sequence
  Description of Artificial Sequence: Synthetic oligonucleotide
  Target: LAMA2; (+) strand; PAM type: YTN; PAM sequence: TTT
atttagggttatctttccat

SEQ ID NO: 319807 - DNA, 20 bp, Artificial Sequence
  Description of Artificial Sequence: Synthetic oligonucleotide
  Target: LAMA2; (+) strand; PAM type: YTN; PAM sequence: TTA
tttagggttatctttccatt

SEQ ID NO: 319808 - DNA, 20 bp, Artificial Sequence
  Description of Artificial Sequence: Synthetic oligonucleotide
  Target: LAMA2; (+) strand; PAM type: YTN; PAM sequence: TTT
agggttatctttccatttgt

SEQ ID NO: 319809 - DNA, 20 bp, Artificial Sequence
  Description of Artificial Sequence: Synthetic oligonucleotide
  Target: LAMA2; (+) strand; PAM type: YTN; PAM sequence: TTA
gggttatctttccatttgtt

SEQ ID NO: 319810 - DNA, 20 bp, Artificial Sequence
  Description of Artificial Sequence: Synthetic oligonucleotide
  Target: LAMA2; (+) strand; PAM type: YTN; PAM sequence: TTA
tctttccatttgttagaaat

SEQ ID NO: 319811 - DNA, 20 bp, Artificial Sequence
  Description of Artificial Sequence: Synthetic oligonucleotide
  Target: LAMA2; (+) strand; PAM type: YTN; PAM sequence: CTT
tccatttgttagaaatatta

SEQ ID NO: 319812 - DNA, 20 bp, Artificial Sequence
  Description of Artificial Sequence: Synthetic oligonucleotide
  Target: LAMA2; (+) strand; PAM type: YTN; PAM sequence: TTT
ccatttgttagaaatattat

SEQ ID NO: 319813 - DNA, 20 bp, Artificial Sequence
  Description of Artificial Sequence: Synthetic oligonucleotide
  Target: LAMA2; (+) strand; PAM type: YTN; PAM sequence: TTC
catttgttagaaatattata

SEQ ID NO: 319814 - DNA, 20 bp, Artificial Sequence
  Description of Artificial Sequence: Synthetic oligonucleotide
  Target: LAMA2; (+) strand; PAM type: YTN; PAM sequence: TTT
gttagaaatattatatatat

SEQ ID NO: 319815 - DNA, 20 bp, Artificial Sequence
  Description of Artificial Sequence: Synthetic oligonucleotide
  Target: LAMA2; (+) strand; PAM type: YTN; PAM sequence: TTG
ttagaaatattatatatata

SEQ ID NO: 319816 - DNA, 20 bp, Artificial Sequence
  Description of Artificial Sequence: Synthetic oligonucleotide
  Target: LAMA2; (+) strand; PAM type: YTN; PAM sequence: TTA
gaaatattatatatataaat

SEQ ID NO: 319817 - DNA, 20 bp, Artificial Sequence
  Description of Artificial Sequence: Synthetic oligonucleotide
  Target: LAMA2; (+) strand; PAM type: YTN; PAM sequence: TTA
tatatataaatagtttgttt

SEQ ID NO: 319818 - DNA, 20 bp, Artificial Sequence
  Description of Artificial Sequence: Synthetic oligonucleotide
  Target: LAMA2; (+) strand; PAM type: YTN; PAM sequence: TTT
gtttaaacagtccgcttaag

SEQ ID NO: 319819 - DNA, 20 bp, Artificial Sequence
  Description of Artificial Sequence: Synthetic oligonucleotide
  Target: LAMA2; (+) strand; PAM type: YTN; PAM sequence: TTG
tttaaacagtccgcttaaga

SEQ ID NO: 319820 - DNA, 20 bp, Artificial Sequence
  Description of Artificial Sequence: Synthetic oligonucleotide
  Target: LAMA2; (+) strand; PAM type: YTN; PAM sequence: TTT
aaacagtccgcttaagaata

SEQ ID NO: 319821 - DNA, 20 bp, Artificial Sequence
  Description of Artificial Sequence: Synthetic oligonucleotide
  Target: LAMA2; (+) strand; PAM type: YTN; PAM sequence: TTA
aacagtccgcttaagaatat

SEQ ID NO: 319822 - DNA, 20 bp, Artificial Sequence
  Description of Artificial Sequence: Synthetic oligonucleotide
  Target: LAMA2; (+) strand; PAM type: YTN; PAM sequence: CTT
aagaatatttttctagtctt

SEQ ID NO: 319823 - DNA, 20 bp, Artificial Sequence
  Description of Artificial Sequence: Synthetic oligonucleotide
  Target: LAMA2; (+) strand; PAM type: YTN; PAM sequence: TTA
agaatatttttctagtcttt

SEQ ID NO: 319824 - DNA, 20 bp, Artificial Sequence
  Description of Artificial Sequence: Synthetic oligonucleotide
  Target: LAMA2; (+) strand; PAM type: YTN; PAM sequence: TTT
ttctagtcttttgctgctac

SEQ ID NO: 319825 - DNA, 20 bp, Artificial Sequence
  Description of Artificial Sequence: Synthetic oligonucleotide
  Target: LAMA2; (+) strand; PAM type: YTN; PAM sequence: TTT
tctagtcttttgctgctaca

SEQ ID NO: 319826 - DNA, 20 bp, Artificial Sequence
  Description of Artificial Sequence: Synthetic oligonucleotide
  Target: LAMA2; (+) strand; PAM type: YTN; PAM sequence: TTT
ctagtcttttgctgctacaa

SEQ ID NO: 319827 - DNA, 20 bp, Artificial Sequence
  Description of Artificial Sequence: Synthetic oligonucleotide
  Target: LAMA2; (+) strand; PAM type: YTN; PAM sequence: TTC
tagtcttttgctgctacaaa

SEQ ID NO: 319828 - DNA, 20 bp, Artificial Sequence
  Description of Artificial Sequence: Synthetic oligonucleotide
  Target: LAMA2; (+) strand; PAM type: YTN; PAM sequence: CTA
gtcttttgctgctacaaata

SEQ ID NO: 319829 - DNA, 20 bp, Artificial Sequence
  Description of Artificial Sequence: Synthetic oligonucleotide
  Target: LAMA2; (+) strand; PAM type: YTN; PAM sequence: CTT
ttgctgctacaaataatctt

SEQ ID NO: 319830 - DNA, 20 bp, Artificial Sequence
  Description of Artificial Sequence: Synthetic oligonucleotide
  Target: LAMA2; (+) strand; PAM type: YTN; PAM sequence: TTT
tgctgctacaaataatcttg

SEQ ID NO: 319831 - DNA, 20 bp, Artificial Sequence
  Description of Artificial Sequence: Synthetic oligonucleotide
  Target: LAMA2; (+) strand; PAM type: YTN; PAM sequence: TTT
gctgctacaaataatcttgc

SEQ ID NO: 319832 - DNA, 20 bp, Artificial Sequence
  Description of Artificial Sequence: Synthetic oligonucleotide
  Target: LAMA2; (+) strand; PAM type: YTN; PAM sequence: TTG
ctgctacaaataatcttgca

SEQ ID NO: 319833 - DNA, 20 bp, Artificial Sequence
  Description of Artificial Sequence: Synthetic oligonucleotide
  Target: LAMA2; (+) strand; PAM type: YTN; PAM sequence: CTG
ctacaaataatcttgcaatc

SEQ ID NO: 319834 - DNA, 20 bp, Artificial Sequence
  Description of Artificial Sequence: Synthetic oligonucleotide
  Target: LAMA2; (+) strand; PAM type: YTN; PAM sequence: CTA
caaataatcttgcaatcagt

SEQ ID NO: 319835 - DNA, 20 bp, Artificial Sequence
  Description of Artificial Sequence: Synthetic oligonucleotide
  Target: LAMA2; (+) strand; PAM type: YTN; PAM sequence: CTT
gcaatcagttgttttgtgca

SEQ ID NO: 319836 - DNA, 20 bp, Artificial Sequence
  Description of Artificial Sequence: Synthetic oligonucleotide
  Target: LAMA2; (+) strand; PAM type: YTN; PAM sequence: TTG
caatcagttgttttgtgcac

SEQ ID NO: 319837 - DNA, 20 bp, Artificial Sequence
  Description of Artificial Sequence: Synthetic oligonucleotide
  Target: LAMA2; (+) strand; PAM type: YTN; PAM sequence: TTG
ttttgtgcacgtgtcttttg

SEQ ID NO: 319838 - DNA, 20 bp, Artificial Sequence
  Description of Artificial Sequence: Synthetic oligonucleotide
  Target: LAMA2; (+) strand; PAM type: YTN; PAM sequence: TTT
tgtgcacgtgtcttttgctt

SEQ ID NO: 319839 - DNA, 20 bp, Artificial Sequence
  Description of Artificial Sequence: Synthetic oligonucleotide
  Target: LAMA2; (+) strand; PAM type: YTN; PAM sequence: TTT
gtgcacgtgtcttttgcttt

SEQ ID NO: 319840 - DNA, 20 bp, Artificial Sequence
  Description of Artificial Sequence: Synthetic oligonucleotide
  Target: LAMA2; (+) strand; PAM type: YTN; PAM sequence: TTG
tgcacgtgtcttttgctttt

SEQ ID NO: 319841 - DNA, 20 bp, Artificial Sequence
  Description of Artificial Sequence: Synthetic oligonucleotide
  Target: LAMA2; (+) strand; PAM type: YTN; PAM sequence: CTT
ttgctttttgtcattgcatc

SEQ ID NO: 319842 - DNA, 20 bp, Artificial Sequence
  Description of Artificial Sequence: Synthetic oligonucleotide
  Target: LAMA2; (+) strand; PAM type: YTN; PAM sequence: TTT
tgctttttgtcattgcatct

SEQ ID NO: 319843 - DNA, 20 bp, Artificial Sequence
  Description of Artificial Sequence: Synthetic oligonucleotide
  Target: LAMA2; (+) strand; PAM type: YTN; PAM sequence: TTT
gctttttgtcattgcatctt

SEQ ID NO: 319844 - DNA, 20 bp, Artificial Sequence
  Description of Artificial Sequence: Synthetic oligonucleotide
  Target: LAMA2; (+) strand; PAM type: YTN; PAM sequence: TTG
ctttttgtcattgcatcttt

SEQ ID NO: 319845 - DNA, 20 bp, Artificial Sequence
  Description of Artificial Sequence: Synthetic oligonucleotide
  Target: LAMA2; (+) strand; PAM type: YTN; PAM sequence: CTT
tttgtcattgcatctttagg

SEQ ID NO: 319846 - DNA, 20 bp, Artificial Sequence
  Description of Artificial Sequence: Synthetic oligonucleotide
  Target: LAMA2; (+) strand; PAM type: YTN; PAM sequence: TTT
ttgtcattgcatctttagga

SEQ ID NO: 319847 - DNA, 20 bp, Artificial Sequence
  Description of Artificial Sequence: Synthetic oligonucleotide
  Target: LAMA2; (+) strand; PAM type: YTN; PAM sequence: TTT
tgtcattgcatctttaggat

SEQ ID NO: 319848 - DNA, 20 bp, Artificial Sequence
  Description of Artificial Sequence: Synthetic oligonucleotide
  Target: LAMA2; (+) strand; PAM type: YTN; PAM sequence: TTT
gtcattgcatctttaggata

SEQ ID NO: 319849 - DNA, 20 bp, Artificial Sequence
  Description of Artificial Sequence: Synthetic oligonucleotide
  Target: LAMA2; (+) strand; PAM type: YTN; PAM sequence: TTG
tcattgcatctttaggatag

SEQ ID NO: 319850 - DNA, 20 bp, Artificial Sequence
  Description of Artificial Sequence: Synthetic oligonucleotide
  Target: LAMA2; (+) strand; PAM type: YTN; PAM sequence: TTG
catctttaggatagtttgtt

SEQ ID NO: 319851 - DNA, 20 bp, Artificial Sequence
  Description of Artificial Sequence: Synthetic oligonucleotide
  Target: LAMA2; (+) strand; PAM type: YTN; PAM sequence: CTT
taggatagtttgtttttttt

SEQ ID NO: 319852 - DNA, 20 bp, Artificial Sequence
  Description of Artificial Sequence: Synthetic oligonucleotide
  Target: LAMA2; (+) strand; PAM type: YTN; PAM sequence: TTT
aggatagtttgttttttttt

SEQ ID NO: 319853 - DNA, 20 bp, Artificial Sequence
  Description of Artificial Sequence: Synthetic oligonucleotide
  Target: LAMA2; (+) strand; PAM type: YTN; PAM sequence: TTA
ggatagtttgtttttttttt

SEQ ID NO: 319854 - DNA, 20 bp, Artificial Sequence
  Description of Artificial Sequence: Synthetic oligonucleotide
  Target: LAMA2; (+) strand; PAM type: YTN; PAM sequence: TTT
gtttttttttttttgttttt

SEQ ID NO: 319855 - DNA, 20 bp, Artificial Sequence
  Description of Artificial Sequence: Synthetic oligonucleotide
  Target: LAMA2; (+) strand; PAM type: YTN; PAM sequence: TTG
tttttttttttttgtttttt

SEQ ID NO: 319856 - DNA, 20 bp, Artificial Sequence
  Description of Artificial Sequence: Synthetic oligonucleotide
  Target: LAMA2; (+) strand; PAM type: YTN; PAM sequence: TTT
ttttttttttgttttttttt

SEQ ID NO: 319857 - DNA, 20 bp, Artificial Sequence
  Description of Artificial Sequence: Synthetic oligonucleotide
  Target: LAMA2; (+) strand; PAM type: YTN; PAM sequence: TTT
tttttttttgtttttttttt

SEQ ID NO: 319858 - DNA, 20 bp, Artificial Sequence
  Description of Artificial Sequence: Synthetic oligonucleotide
  Target: LAMA2; (+) strand; PAM type: YTN; PAM sequence: TTT
ttttttttgttttttttttt

SEQ ID NO: 319859 - DNA, 20 bp, Artificial Sequence
  Description of Artificial Sequence: Synthetic oligonucleotide
  Target: LAMA2; (+) strand; PAM type: YTN; PAM sequence: TTT
tttttttgtttttttttttt

SEQ ID NO: 319860 - DNA, 20 bp, Artificial Sequence
  Description of Artificial Sequence: Synthetic oligonucleotide
  Target: LAMA2; (+) strand; PAM type: YTN; PAM sequence: TTT
ttttttgttttttttttttt

SEQ ID NO: 319861 - DNA, 20 bp, Artificial Sequence
  Description of Artificial Sequence: Synthetic oligonucleotide
  Target: LAMA2; (+) strand; PAM type: YTN; PAM sequence: TTT
tttttgtttttttttttttt

SEQ ID NO: 319862 - DNA, 20 bp, Artificial Sequence
  Description of Artificial Sequence: Synthetic oligonucleotide
  Target: LAMA2; (+) strand; PAM type: YTN; PAM sequence: TTT
ttttgttttttttttttttt

SEQ ID NO: 319863 - DNA, 20 bp, Artificial Sequence
  Description of Artificial Sequence: Synthetic oligonucleotide
  Target: LAMA2; (+) strand; PAM type: YTN; PAM sequence: TTT
tttgtttttttttttttttt

SEQ ID NO: 319864 - DNA, 20 bp, Artificial Sequence
  Description of Artificial Sequence: Synthetic oligonucleotide
  Target: LAMA2; (+) strand; PAM type: YTN; PAM sequence: TTT
ttgttttttttttttttttg

SEQ ID NO: 319865 - DNA, 20 bp, Artificial Sequence
  Description of Artificial Sequence: Synthetic oligonucleotide
  Target: LAMA2; (+) strand; PAM type: YTN; PAM sequence: TTT
tgttttttttttttttttga

SEQ ID NO: 319866 - DNA, 20 bp, Artificial Sequence
  Description of Artificial Sequence: Synthetic oligonucleotide
  Target: LAMA2; (+) strand; PAM type: YTN; PAM sequence: TTT
gttttttttttttttttgag

SEQ ID NO: 319867 - DNA, 20 bp, Artificial Sequence
  Description of Artificial Sequence: Synthetic oligonucleotide
  Target: LAMA2; (+) strand; PAM type: YTN; PAM sequence: TTG
ttttttttttttttttgagg

SEQ ID NO: 319868 - DNA, 20 bp, Artificial Sequence
  Description of Artificial Sequence: Synthetic oligonucleotide
  Target: LAMA2; (+) strand; PAM type: YTN; PAM sequence: TTT
tttttttttttttgaggcag

SEQ ID NO: 319869 - DNA, 20 bp, Artificial Sequence
  Description of Artificial Sequence: Synthetic oligonucleotide
  Target: LAMA2; (+) strand; PAM type: YTN; PAM sequence: TTT
ttttttttttttgaggcaga

SEQ ID NO: 319870 - DNA, 20 bp, Artificial Sequence
  Description of Artificial Sequence: Synthetic oligonucleotide
  Target: LAMA2; (+) strand; PAM type: YTN; PAM sequence: TTT
tttttttttttgaggcagag

SEQ ID NO: 319871 - DNA, 20 bp, Artificial Sequence
  Description of Artificial Sequence: Synthetic oligonucleotide
  Target: LAMA2; (+) strand; PAM type: YTN; PAM sequence: TTT
ttttttttttgaggcagagt

SEQ ID NO: 319872 - DNA, 20 bp, Artificial Sequence
  Description of Artificial Sequence: Synthetic oligonucleotide
  Target: LAMA2; (+) strand; PAM type: YTN; PAM sequence: TTT
tttttttttgaggcagagtc

SEQ ID NO: 319873 - DNA, 20 bp, Artificial Sequence
  Description of Artificial Sequence: Synthetic oligonucleotide
  Target: LAMA2; (+) strand; PAM type: YTN; PAM sequence: TTT
ttttttttgaggcagagtct

SEQ ID NO: 319874 - DNA, 20 bp, Artificial Sequence
  Description of Artificial Sequence: Synthetic oligonucleotide
  Target: LAMA2; (+) strand; PAM type: YTN; PAM sequence: TTT
tttttttgaggcagagtctc

SEQ ID NO: 319875 - DNA, 20 bp, Artificial Sequence
  Description of Artificial Sequence: Synthetic oligonucleotide
  Target: LAMA2; (+) strand; PAM type: YTN; PAM sequence: TTT
ttttttgaggcagagtctct

SEQ ID NO: 319876 - DNA, 20 bp, Artificial Sequence
  Description of Artificial Sequence: Synthetic oligonucleotide
  Target: LAMA2; (+) strand; PAM type: YTN; PAM sequence: TTT
tttttgaggcagagtctctc

SEQ ID NO: 319877 - DNA, 20 bp, Artificial Sequence
  Description of Artificial Sequence: Synthetic oligonucleotide
  Target: LAMA2; (+) strand; PAM type: YTN; PAM sequence: TTT
ttttgaggcagagtctctct

SEQ ID NO: 319878 - DNA, 20 bp, Artificial Sequence
  Description of Artificial Sequence: Synthetic oligonucleotide
  Target: LAMA2; (+) strand; PAM type: YTN; PAM sequence: TTT
tttgaggcagagtctctctc

SEQ ID NO: 319879 - DNA, 20 bp, Artificial Sequence
  Description of Artificial Sequence: Synthetic oligonucleotide
  Target: LAMA2; (+) strand; PAM type: YTN; PAM sequence: TTT
ttgaggcagagtctctctct

SEQ ID NO: 319880 - DNA, 20 bp, Artificial Sequence
  Description of Artificial Sequence: Synthetic oligonucleotide
  Target: LAMA2; (+) strand; PAM type: YTN; PAM sequence: TTT
tgaggcagagtctctctctg

SEQ ID NO: 319881 - DNA, 20 bp, Artificial Sequence
  Description of Artificial Sequence: Synthetic oligonucleotide
  Target: LAMA2; (+) strand; PAM type: YTN; PAM sequence: TTT
gaggcagagtctctctctgt

SEQ ID NO: 319882 - DNA, 20 bp, Artificial Sequence
  Description of Artificial Sequence: Synthetic oligonucleotide
  Target: LAMA2; (+) strand; PAM type: YTN; PAM sequence: TTG
aggcagagtctctctctgtc

SEQ ID NO: 319883 - DNA, 20 bp, Artificial Sequence
  Description of Artificial Sequence: Synthetic oligonucleotide
  Target: LAMA2; (+) strand; PAM type: YTN; PAM sequence: CTC
tctctgtcacccaggctgga

SEQ ID NO: 319884 - DNA, 20 bp, Artificial Sequence
  Description of Artificial Sequence: Synthetic oligonucleotide
  Target: LAMA2; (+) strand; PAM type: YTN; PAM sequence: CTC
tctgtcacccaggctggagt

SEQ ID NO: 319885 - DNA, 20 bp, Artificial Sequence
  Description of Artificial Sequence: Synthetic oligonucleotide
  Target: LAMA2; (+) strand; PAM type: YTN; PAM sequence: CTC
tgtcacccaggctggagtgc

SEQ ID NO: 319886 - DNA, 20 bp, Artificial Sequence
  Description of Artificial Sequence: Synthetic oligonucleotide
  Target: LAMA2; (+) strand; PAM type: YTN; PAM sequence: CTG
tcacccaggctggagtgcag

SEQ ID NO: 319887 - DNA, 20 bp, Artificial Sequence
  Description of Artificial Sequence: Synthetic oligonucleotide
  Target: LAMA2; (+) strand; PAM type: YTN; PAM sequence: CTG
gagtgcagtggcaggatctc

SEQ ID NO: 319888 - DNA, 20 bp, Artificial Sequence
  Description of Artificial Sequence: Synthetic oligonucleotide
  Target: LAMA2; (+) strand; PAM type: YTN; PAM sequence: CTC
agctcactgtaaactcttgc

SEQ ID NO: 319889 - DNA, 20 bp, Artificial Sequence
  Description of Artificial Sequence: Synthetic oligonucleotide
  Target: LAMA2; (+) strand; PAM type: YTN; PAM sequence: CTC
actgtaaactcttgcttccc

SEQ ID NO: 319890 - DNA, 20 bp, Artificial Sequence
  Description of Artificial Sequence: Synthetic oligonucleotide
  Target: LAMA2; (+) strand; PAM type: YTN; PAM sequence: CTG
taaactcttgcttcccaggt

SEQ ID NO: 319891 - DNA, 20 bp, Artificial Sequence
  Description of Artificial Sequence: Synthetic oligonucleotide
  Target: LAMA2; (+) strand; PAM type: YTN; PAM sequence: CTC
ttgcttcccaggttcaagtg

SEQ ID NO: 319892 - DNA, 20 bp, Artificial Sequence
  Description of Artificial Sequence: Synthetic oligonucleotide
  Target: LAMA2; (+) strand; PAM type: YTN; PAM sequence: CTT
gcttcccaggttcaagtgag

SEQ ID NO: 319893 - DNA, 20 bp, Artificial Sequence
  Description of Artificial Sequence: Synthetic oligonucleotide
  Target: LAMA2; (+) strand; PAM type: YTN; PAM sequence: TTG
cttcccaggttcaagtgagt

SEQ ID NO: 319894 - DNA, 20 bp, Artificial Sequence
  Description of Artificial Sequence: Synthetic oligonucleotide
  Target: LAMA2; (+) strand; PAM type: YTN; PAM sequence: CTT
cccaggttcaagtgagtctt

SEQ ID NO: 319895 - DNA, 20 bp, Artificial Sequence
  Description of Artificial Sequence: Synthetic oligonucleotide
  Target: LAMA2; (+) strand; PAM type: YTN; PAM sequence: TTC
ccaggttcaagtgagtcttc

SEQ ID NO: 319896 - DNA, 20 bp, Artificial Sequence
  Description of Artificial Sequence: Synthetic oligonucleotide
  Target: LAMA2; (+) strand; PAM type: YTN; PAM sequence: TTC
aagtgagtcttctgcttcag

SEQ ID NO: 319897 - DNA, 20 bp, Artificial Sequence
  Description of Artificial Sequence: Synthetic oligonucleotide
  Target: LAMA2; (+) strand; PAM type: YTN; PAM sequence: CTT
ctgcttcagcctccctagta

SEQ ID NO: 319898 - DNA, 20 bp, Artificial Sequence
  Description of Artificial Sequence: Synthetic oligonucleotide
  Target: LAMA2; (+) strand; PAM type: YTN; PAM sequence: TTC
tgcttcagcctccctagtag

SEQ ID NO: 319899 - DNA, 20 bp, Artificial Sequence
  Description of Artificial Sequence: Synthetic oligonucleotide
  Target: LAMA2; (+) strand; PAM type: YTN; PAM sequence: CTG
cttcagcctccctagtagct

SEQ ID NO: 319900 - DNA, 20 bp, Artificial Sequence
  Description of Artificial Sequence: Synthetic oligonucleotide
  Target: LAMA2; (+) strand; PAM type: YTN; PAM sequence: CTT
cagcctccctagtagctaag

SEQ ID NO: 319901 - DNA, 20 bp, Artificial Sequence
  Description of Artificial Sequence: Synthetic oligonucleotide
  Target: LAMA2; (+) strand; PAM type: YTN; PAM sequence: TTC
agcctccctagtagctaaga

SEQ ID NO: 319902 - DNA, 20 bp, Artificial Sequence
  Description of Artificial Sequence: Synthetic oligonucleotide
  Target: LAMA2; (+) strand; PAM type: YTN; PAM sequence: CTC
cctagtagctaagactacag

SEQ ID NO: 319903 - DNA, 20 bp, Artificial Sequence
  Description of Artificial Sequence: Synthetic oligonucleotide
  Target: LAMA2; (+) strand; PAM type: YTN; PAM sequence: CTA
gtagctaagactacaggcgt

SEQ ID NO: 319904 - DNA, 20 bp, Artificial Sequence
  Description of Artificial Sequence: Synthetic oligonucleotide
  Target: LAMA2; (+) strand; PAM type: YTN; PAM sequence: CTA
agactacaggcgtgtgcccc

SEQ ID NO: 319905 - DNA, 20 bp, Artificial Sequence
  Description of Artificial Sequence: Synthetic oligonucleotide
  Target: LAMA2; (+) strand; PAM type: YTN; PAM sequence: CTA
caggcgtgtgccccacacct

SEQ ID NO: 319906 - DNA, 20 bp, Artificial Sequence
  Description of Artificial Sequence: Synthetic oligonucleotide
  Target: LAMA2; (+) strand; PAM type: YTN; PAM sequence: CTG
gcttttctttttttcgcatt

SEQ ID NO: 319907 - DNA, 20 bp, Artificial Sequence
  Description of Artificial Sequence: Synthetic oligonucleotide
  Target: LAMA2; (+) strand; PAM type: YTN; PAM sequence: CTT
ttctttttttcgcatttttg

SEQ ID NO: 319908 - DNA, 20 bp, Artificial Sequence
  Description of Artificial Sequence: Synthetic oligonucleotide
  Target: LAMA2; (+) strand; PAM type: YTN; PAM sequence: TTT
tctttttttcgcatttttgg

SEQ ID NO: 319909 - DNA, 20 bp, Artificial Sequence
  Description of Artificial Sequence: Synthetic oligonucleotide
  Target: LAMA2; (+) strand; PAM type: YTN; PAM sequence: TTT
ctttttttcgcatttttggt

SEQ ID NO: 319910 - DNA, 20 bp, Artificial Sequence
  Description of Artificial Sequence: Synthetic oligonucleotide
  Target: LAMA2; (+) strand; PAM type: YTN; PAM sequence: TTC
tttttttcgcatttttggta

SEQ ID NO: 319911 - DNA, 20 bp, Artificial Sequence
  Description of Artificial Sequence: Synthetic oligonucleotide
  Target: LAMA2; (+) strand; PAM type: YTN; PAM sequence: CTT
tttttcgcatttttggtaga

SEQ ID NO: 319912 - DNA, 20 bp, Artificial Sequence
  Description of Artificial Sequence: Synthetic oligonucleotide
  Target: LAMA2; (+) strand; PAM type: YTN; PAM sequence: TTT
ttttcgcatttttggtagag

SEQ ID NO: 319913 - DNA, 20 bp, Artificial Sequence
  Description of Artificial Sequence: Synthetic oligonucleotide
  Target: LAMA2; (+) strand; PAM type: YTN; PAM sequence: TTT
tttcgcatttttggtagaga

SEQ ID NO: 319914 - DNA, 20 bp, Artificial Sequence
  Description of Artificial Sequence: Synthetic oligonucleotide
  Target: LAMA2; (+) strand; PAM type: YTN; PAM sequence: TTT
ttcgcatttttggtagagac

SEQ ID NO: 319915 - DNA, 20 bp, Artificial Sequence
  Description of Artificial Sequence: Synthetic oligonucleotide
  Target: LAMA2; (+) strand; PAM type: YTN; PAM sequence: TTT
tcgcatttttggtagagacg

SEQ ID NO: 319916 - DNA, 20 bp, Artificial Sequence
  Description of Artificial Sequence: Synthetic oligonucleotide
  Target: LAMA2; (+) strand; PAM type: YTN; PAM sequence: TTT
cgcatttttggtagagacgg

SEQ ID NO: 319917 - DNA, 20 bp, Artificial Sequence
  Description of Artificial Sequence: Synthetic oligonucleotide
  Target: LAMA2; (+) strand; PAM type: YTN; PAM sequence: TTC
gcatttttggtagagacggg

SEQ ID NO: 319918 - DNA, 20 bp, Artificial Sequence
  Description of Artificial Sequence: Synthetic oligonucleotide
  Target: LAMA2; (+) strand; PAM type: YTN; PAM sequence: TTT
ttggtagagacgggtttcac

SEQ ID NO: 319919 - DNA, 20 bp, Artificial Sequence
  Description of Artificial Sequence: Synthetic oligonucleotide
  Target: LAMA2; (+) strand; PAM type: YTN; PAM sequence: TTT
tggtagagacgggtttcacc

SEQ ID NO: 319920 - DNA, 20 bp, Artificial Sequence
  Description of Artificial Sequence: Synthetic oligonucleotide
  Target: LAMA2; (+) strand; PAM type: YTN; PAM sequence: TTT
ggtagagacgggtttcacca

SEQ ID NO: 319921 - DNA, 20 bp, Artificial Sequence
  Description of Artificial Sequence: Synthetic oligonucleotide
  Target: LAMA2; (+) strand; PAM type: YTN; PAM sequence: TTG
gtagagacgggtttcaccat

SEQ ID NO: 319922 - DNA, 20 bp, Artificial Sequence
  Description of Artificial Sequence: Synthetic oligonucleotide
  Target: LAMA2; (+) strand; PAM type: YTN; PAM sequence: TTT
caccattttggcgaggctgg

SEQ ID NO: 319923 - DNA, 20 bp, Artificial Sequence
  Description of Artificial Sequence: Synthetic oligonucleotide
  Target: LAMA2; (+) strand; PAM type: YTN; PAM sequence: TTC
accattttggcgaggctggt

SEQ ID NO: 319924 - DNA, 20 bp, Artificial Sequence
  Description of Artificial Sequence: Synthetic oligonucleotide
  Target: LAMA2; (+) strand; PAM type: YTN; PAM sequence: TTT
tggcgaggctggtctcaaag

SEQ ID NO: 319925 - DNA, 20 bp, Artificial Sequence
  Description of Artificial Sequence: Synthetic oligonucleotide
  Target: LAMA2; (+) strand; PAM type: YTN; PAM sequence: TTT
ggcgaggctggtctcaaagt

SEQ ID NO: 319926 - DNA, 20 bp, Artificial Sequence
  Description of Artificial Sequence: Synthetic oligonucleotide
  Target: LAMA2; (+) strand; PAM type: YTN; PAM sequence: TTG
gcgaggctggtctcaaagtc

SEQ ID NO: 319927 - DNA, 20 bp, Artificial Sequence
  Description of Artificial Sequence: Synthetic oligonucleotide
  Target: LAMA2; (+) strand; PAM type: YTN; PAM sequence: CTG
gtctcaaagtcctgaccttg

SEQ ID NO: 319928 - DNA, 20 bp, Artificial Sequence
  Description of Artificial Sequence: Synthetic oligonucleotide
  Target: LAMA2; (+) strand; PAM type: YTN; PAM sequence: CTC
aaagtcctgaccttgggatc

SEQ ID NO: 319929 - DNA, 20 bp, Artificial Sequence
  Description of Artificial Sequence: Synthetic oligonucleotide
  Target: LAMA2; (+) strand; PAM type: YTN; PAM sequence: CTG
accttgggatccaaccgcct

SEQ ID NO: 319930 - DNA, 20 bp, Artificial Sequence
  Description of Artificial Sequence: Synthetic oligonucleotide
  Target: LAMA2; (+) strand; PAM type: YTN; PAM sequence: CTT
gggatccaaccgcctcggcc

SEQ ID NO: 319931 - DNA, 20 bp, Artificial Sequence
  Description of Artificial Sequence: Synthetic oligonucleotide
  Target: LAMA2; (+) strand; PAM type: YTN; PAM sequence: TTG
ggatccaaccgcctcggcct

SEQ ID NO: 319932 - DNA, 20 bp, Artificial Sequence
  Description of Artificial Sequence: Synthetic oligonucleotide
  Target: LAMA2; (+) strand; PAM type: YTN; PAM sequence: CTC
ggcctcccaaactgctggga

SEQ ID NO: 319933 - DNA, 20 bp, Artificial Sequence
  Description of Artificial Sequence: Synthetic oligonucleotide
  Target: LAMA2; (+) strand; PAM type: YTN; PAM sequence: CTC
ccaaactgctgggattacag

SEQ ID NO: 319934 - DNA, 20 bp, Artificial Sequence
  Description of Artificial Sequence: Synthetic oligonucleotide
  Target: LAMA2; (+) strand; PAM type: YTN; PAM sequence: CTG
ctgggattacagttgtgagc

SEQ ID NO: 319935 - DNA, 20 bp, Artificial Sequence
  Description of Artificial Sequence: Synthetic oligonucleotide
  Target: LAMA2; (+) strand; PAM type: YTN; PAM sequence: CTG
ggattacagttgtgagctac

SEQ ID NO: 319936 - DNA, 20 bp, Artificial Sequence
  Description of Artificial Sequence: Synthetic oligonucleotide
  Target: LAMA2; (+) strand; PAM type: YTN; PAM sequence: TTA
cagttgtgagctaccgtgcc

SEQ ID NO: 319937 - DNA, 20 bp, Artificial Sequence
  Description of Artificial Sequence: Synthetic oligonucleotide
  Target: LAMA2; (+) strand; PAM type: YTN; PAM sequence: TTG
tgagctaccgtgccctgcca

SEQ ID NO: 319938 - DNA, 20 bp, Artificial Sequence
  Description of Artificial Sequence: Synthetic oligonucleotide
  Target: LAMA2; (+) strand; PAM type: YTN; PAM sequence: CTA
ccgtgccctgccaggataga

SEQ ID NO: 319939 - DNA, 20 bp, Artificial Sequence
  Description of Artificial Sequence: Synthetic oligonucleotide
  Target: LAMA2; (+) strand; PAM type: YTN; PAM sequence: CTG
ccaggatagatttctaaaag

SEQ ID NO: 319940 - DNA, 20 bp, Artificial Sequence
  Description of Artificial Sequence: Synthetic oligonucleotide
  Target: LAMA2; (+) strand; PAM type: YTN; PAM sequence: TTT
ctaaaagtgtgattactcag

SEQ ID NO: 319941 - DNA, 20 bp, Artificial Sequence
  Description of Artificial Sequence: Synthetic oligonucleotide
  Target: LAMA2; (+) strand; PAM type: YTN; PAM sequence: TTC
taaaagtgtgattactcagt

SEQ ID NO: 319942 - DNA, 20 bp, Artificial Sequence
  Description of Artificial Sequence: Synthetic oligonucleotide
  Target: LAMA2; (+) strand; PAM type: YTN; PAM sequence: CTA
aaagtgtgattactcagtca

SEQ ID NO: 319943 - DNA, 20 bp, Artificial Sequence
  Description of Artificial Sequence: Synthetic oligonucleotide
  Target: LAMA2; (+) strand; PAM type: YTN; PAM sequence: TTA
ctcagtcaaaaggtaaaagt

SEQ ID NO: 319944 - DNA, 20 bp, Artificial Sequence
  Description of Artificial Sequence: Synthetic oligonucleotide
  Target: LAMA2; (+) strand; PAM type: YTN; PAM sequence: CTC
agtcaaaaggtaaaagtaga

SEQ ID NO: 319945 - DNA, 20 bp, Artificial Sequence
  Description of Artificial Sequence: Synthetic oligonucleotide
  Target: LAMA2; (+) strand; PAM type: YTN; PAM sequence: TTT
attagatgttgtcaaattct

SEQ ID NO: 319946 - DNA, 20 bp, Artificial Sequence
  Description of Artificial Sequence: Synthetic oligonucleotide
  Target: LAMA2; (+) strand; PAM type: YTN; PAM sequence: TTA
ttagatgttgtcaaattctt

SEQ ID NO: 319947 - DNA, 20 bp, Artificial Sequence
  Description of Artificial Sequence: Synthetic oligonucleotide
  Target: LAMA2; (+) strand; PAM type: YTN; PAM sequence: TTA
gatgttgtcaaattcttctt

SEQ ID NO: 319948 - DNA, 20 bp, Artificial Sequence
  Description of Artificial Sequence: Synthetic oligonucleotide
  Target: LAMA2; (+) strand; PAM type: YTN; PAM sequence: TTG
tcaaattcttctttgggagt

SEQ ID NO: 319949 - DNA, 20 bp, Artificial Sequence
  Description of Artificial Sequence: Synthetic oligonucleotide
  Target: LAMA2; (+) strand; PAM type: YTN; PAM sequence: TTC
ttctttgggagtaatgccat

SEQ ID NO: 319950 - DNA, 20 bp, Artificial Sequence
  Description of Artificial Sequence: Synthetic oligonucleotide
  Target: LAMA2; (+) strand; PAM type: YTN; PAM sequence: CTT
ctttgggagtaatgccattt

SEQ ID NO: 319951 - DNA, 20 bp, Artificial Sequence
  Description of Artificial Sequence: Synthetic oligonucleotide
  Target: LAMA2; (+) strand; PAM type: YTN; PAM sequence: TTC
tttgggagtaatgccatttt

SEQ ID NO: 319952 - DNA, 20 bp, Artificial Sequence
  Description of Artificial Sequence: Synthetic oligonucleotide
  Target: LAMA2; (+) strand; PAM type: YTN; PAM sequence: CTT
tgggagtaatgccattttcc

SEQ ID NO: 319953 - DNA, 20 bp, Artificial Sequence
  Description of Artificial Sequence: Synthetic oligonucleotide
  Target: LAMA2; (+) strand; PAM type: YTN; PAM sequence: TTT
gggagtaatgccattttcca

SEQ ID NO: 319954 - DNA, 20 bp, Artificial Sequence
  Description of Artificial Sequence: Synthetic oligonucleotide
  Target: LAMA2; (+) strand; PAM type: YTN; PAM sequence: TTG
ggagtaatgccattttccaa

SEQ ID NO: 319955 - DNA, 20 bp, Artificial Sequence
  Description of Artificial Sequence: Synthetic oligonucleotide
  Target: LAMA2; (+) strand; PAM type: YTN; PAM sequence: TTT
tccaatcctaagatcagcat

SEQ ID NO: 319956 - DNA, 20 bp, Artificial Sequence
  Description of Artificial Sequence: Synthetic oligonucleotide
  Target: LAMA2; (+) strand; PAM type: YTN; PAM sequence: TTT
ccaatcctaagatcagcatg

SEQ ID NO: 319957 - DNA, 20 bp, Artificial Sequence
  Description of Artificial Sequence: Synthetic oligonucleotide
  Target: LAMA2; (+) strand; PAM type: YTN; PAM sequence: TTC
caatcctaagatcagcatgt

SEQ ID NO: 319958 - DNA, 20 bp, Artificial Sequence
  Description of Artificial Sequence: Synthetic oligonucleotide
  Target: LAMA2; (+) strand; PAM type: YTN; PAM sequence: CTA
agatcagcatgtgagaatgt

SEQ ID NO: 319959 - DNA, 20 bp, Artificial Sequence
  Description of Artificial Sequence: Synthetic oligonucleotide
  Target: LAMA2; (+) strand; PAM type: YTN; PAM sequence: TTC
tgtttccataggttctccaa

SEQ ID NO: 319960 - DNA, 20 bp, Artificial Sequence
  Description of Artificial Sequence: Synthetic oligonucleotide
  Target: LAMA2; (+) strand; PAM type: YTN; PAM sequence: CTG
tttccataggttctccaaca

SEQ ID NO: 319961 - DNA, 20 bp, Artificial Sequence
  Description of Artificial Sequence: Synthetic oligonucleotide
  Target: LAMA2; (+) strand; PAM type: YTN; PAM sequence: TTT
ccataggttctccaacaaat

SEQ ID NO: 319962 - DNA, 20 bp, Artificial Sequence
  Description of Artificial Sequence: Synthetic oligonucleotide
  Target: LAMA2; (+) strand; PAM type: YTN; PAM sequence: TTC
cataggttctccaacaaatt

SEQ ID NO: 319963 - DNA, 20 bp, Artificial Sequence
  Description of Artificial Sequence: Synthetic oligonucleotide
  Target: LAMA2; (+) strand; PAM type: YTN; PAM sequence: TTC
tccaacaaattatattgcca

SEQ ID NO: 319964 - DNA, 20 bp, Artificial Sequence
  Description of Artificial Sequence: Synthetic oligonucleotide
  Target: LAMA2; (+) strand; PAM type: YTN; PAM sequence: CTC
caacaaattatattgccaaa

SEQ ID NO: 319965 - DNA, 20 bp, Artificial Sequence
  Description of Artificial Sequence: Synthetic oligonucleotide
  Target: LAMA2; (+) strand; PAM type: YTN; PAM sequence: TTA
tattgccaaactttatgttc

SEQ ID NO: 319966 - DNA, 20 bp, Artificial Sequence
  Description of Artificial Sequence: Synthetic oligonucleotide
  Target: LAMA2; (+) strand; PAM type: YTN; PAM sequence: TTG
ccaaactttatgttccaaag

SEQ ID NO: 319967 - DNA, 20 bp, Artificial Sequence
  Description of Artificial Sequence: Synthetic oligonucleotide
  Target: LAMA2; (+) strand; PAM type: YTN; PAM sequence: CTT
tatgttccaaagctttgtgg

SEQ ID NO: 319968 - DNA, 20 bp, Artificial Sequence
  Description of Artificial Sequence: Synthetic oligonucleotide
  Target: LAMA2; (+) strand; PAM type: YTN; PAM sequence: TTT
atgttccaaagctttgtggg

SEQ ID NO: 319969 - DNA, 20 bp, Artificial Sequence
  Description of Artificial Sequence: Synthetic oligonucleotide
  Target: LAMA2; (+) strand; PAM type: YTN; PAM sequence: TTA
tgttccaaagctttgtgggg

SEQ ID NO: 319970 - DNA, 20 bp, Artificial Sequence
  Description of Artificial Sequence: Synthetic oligonucleotide
  Target: LAMA2; (+) strand; PAM type: YTN; PAM sequence: TTC
caaagctttgtggggatatg

SEQ ID NO: 319971 - DNA, 20 bp, Artificial Sequence
  Description of Artificial Sequence: Synthetic oligonucleotide
  Target: LAMA2; (+) strand; PAM type: YTN; PAM sequence: CTT
tgtggggatatgtctggtag

SEQ ID NO: 319972 - DNA, 20 bp, Artificial Sequence
  Description of Artificial Sequence: Synthetic oligonucleotide
  Target: LAMA2; (+) strand; PAM type: YTN; PAM sequence: TTT
gtggggatatgtctggtagt

SEQ ID NO: 319973 - DNA, 20 bp, Artificial Sequence
  Description of Artificial Sequence: Synthetic oligonucleotide
  Target: LAMA2; (+) strand; PAM type: YTN; PAM sequence: TTG
tggggatatgtctggtagtt

SEQ ID NO: 319974 - DNA, 20 bp, Artificial Sequence
  Description of Artificial Sequence: Synthetic oligonucleotide
  Target: LAMA2; (+) strand; PAM type: YTN; PAM sequence: CTG
gtagttgattggggcagaga

SEQ ID NO: 319975 - DNA, 20 bp, Artificial Sequence
  Description of Artificial Sequence: Synthetic oligonucleotide
  Target: LAMA2; (+) strand; PAM type: YTN; PAM sequence: TTG
attggggcagagaaaatgag

SEQ ID NO: 319976 - DNA, 20 bp, Artificial Sequence
  Description of Artificial Sequence: Synthetic oligonucleotide
  Target: LAMA2; (+) strand; PAM type: YTN; PAM sequence: TTG
gggcagagaaaatgagaaaa

SEQ ID NO: 319977 - DNA, 20 bp, Artificial Sequence
  Description of Artificial Sequence: Synthetic oligonucleotide
  Target: LAMA2; (+) strand; PAM type: YTN; PAM sequence: CTT
agtatgaagaaaagagtctt

SEQ ID NO: 319978 - DNA, 20 bp, Artificial Sequence
  Description of Artificial Sequence: Synthetic oligonucleotide
  Target: LAMA2; (+) strand; PAM type: YTN; PAM sequence: TTA
gtatgaagaaaagagtctta

SEQ ID NO: 319979 - DNA, 20 bp, Artificial Sequence
  Description of Artificial Sequence: Synthetic oligonucleotide
  Target: LAMA2; (+) strand; PAM type: YTN; PAM sequence: CTT
aggcttgaaattaagacaca

SEQ ID NO: 319980 - DNA, 20 bp, Artificial Sequence
  Description of Artificial Sequence: Synthetic oligonucleotide
  Target: LAMA2; (+) strand; PAM type: YTN; PAM sequence: TTA
ggcttgaaattaagacacag

SEQ ID NO: 319981 - DNA, 20 bp, Artificial Sequence
  Description of Artificial Sequence: Synthetic oligonucleotide
  Target: LAMA2; (+) strand; PAM type: YTN; PAM sequence: CTT
gaaattaagacacaggttta

SEQ ID NO: 319982 - DNA, 20 bp, Artificial Sequence
  Description of Artificial Sequence: Synthetic oligonucleotide
  Target: LAMA2; (+) strand; PAM type: YTN; PAM sequence: TTG
aaattaagacacaggtttaa

SEQ ID NO: 319983 - DNA, 20 bp, Artificial Sequence
  Description of Artificial Sequence: Synthetic oligonucleotide
  Target: LAMA2; (+) strand; PAM type: YTN; PAM sequence: TTA
agacacaggtttaattcttg

SEQ ID NO: 319984 - DNA, 20 bp, Artificial Sequence
  Description of Artificial Sequence: Synthetic oligonucleotide
  Target: LAMA2; (+) strand; PAM type: YTN; PAM sequence: TTT
aattcttgaccattgctgat

SEQ ID NO: 319985 - DNA, 20 bp, Artificial Sequence
  Description of Artificial Sequence: Synthetic oligonucleotide
  Target: LAMA2; (+) strand; PAM type: YTN; PAM sequence: TTA
attcttgaccattgctgatc

SEQ ID NO: 319986 - DNA, 20 bp, Artificial Sequence
  Description of Artificial Sequence: Synthetic oligonucleotide
  Target: LAMA2; (+) strand; PAM type: YTN; PAM sequence: TTC
ttgaccattgctgatcactt

SEQ ID NO: 319987 - DNA, 20 bp, Artificial Sequence
  Description of Artificial Sequence: Synthetic oligonucleotide
  Target: LAMA2; (+) strand; PAM type: YTN; PAM sequence: CTT
gaccattgctgatcacttgt

SEQ ID NO: 319988 - DNA, 20 bp, Artificial Sequence
  Description of Artificial Sequence: Synthetic oligonucleotide
  Target: LAMA2; (+) strand; PAM type: YTN; PAM sequence: TTG
accattgctgatcacttgtt

SEQ ID NO: 319989 - DNA, 20 bp, Artificial Sequence
  Description of Artificial Sequence: Synthetic oligonucleotide
  Target: LAMA2; (+) strand; PAM type: YTN; PAM sequence: TTG
ctgatcacttgtttcacctt

SEQ ID NO: 319990 - DNA, 20 bp, Artificial Sequence
  Description of Artificial Sequence: Synthetic oligonucleotide
  Target: LAMA2; (+) strand; PAM type: YTN; PAM sequence: CTG
atcacttgtttcaccttaga

SEQ ID NO: 319991 - DNA, 20 bp, Artificial Sequence
  Description of Artificial Sequence: Synthetic oligonucleotide
  Target: LAMA2; (+) strand; PAM type: YTN; PAM sequence: CTT
gtttcaccttagacaagtca

SEQ ID NO: 319992 - DNA, 20 bp, Artificial Sequence
  Description of Artificial Sequence: Synthetic oligonucleotide
  Target: LAMA2; (+) strand; PAM type: YTN; PAM sequence: TTG
tttcaccttagacaagtcag

SEQ ID NO: 319993 - DNA, 20 bp, Artificial Sequence
  Description of Artificial Sequence: Synthetic oligonucleotide
  Target: LAMA2; (+) strand; PAM type: YTN; PAM sequence: TTT
caccttagacaagtcagcca

SEQ ID NO: 319994 - DNA, 20 bp, Artificial Sequence
  Description of Artificial Sequence: Synthetic oligonucleotide
  Target: LAMA2; (+) strand; PAM type: YTN; PAM sequence: TTC
accttagacaagtcagccaa

SEQ ID NO: 319995 - DNA, 20 bp, Artificial Sequence
  Description of Artificial Sequence: Synthetic oligonucleotide
  Target: LAMA2; (+) strand; PAM type: YTN; PAM sequence: CTT
agacaagtcagccaactttt

SEQ ID NO: 319996 - DNA, 20 bp, Artificial Sequence
  Description of Artificial Sequence: Synthetic oligonucleotide
  Target: LAMA2; (+) strand; PAM type: YTN; PAM sequence: TTA
gacaagtcagccaacttttt

SEQ ID NO: 319997 - DNA, 20 bp, Artificial Sequence
  Description of Artificial Sequence: Synthetic oligonucleotide
  Target: LAMA2; (+) strand; PAM type: YTN; PAM sequence: CTT
ttttcatctgctccacagat

SEQ ID NO: 319998 - DNA, 20 bp, Artificial Sequence
  Description of Artificial Sequence: Synthetic oligonucleotide
  Target: LAMA2; (+) strand; PAM type: YTN; PAM sequence: TTT
tttcatctgctccacagatc

SEQ ID NO: 319999 - DNA, 20 bp, Artificial Sequence
  Description of Artificial Sequence: Synthetic oligonucleotide
  Target: LAMA2; (+) strand; PAM type: YTN; PAM sequence: TTT
ttcatctgctccacagatct

SEQ ID NO: 320000 - DNA, 20 bp, Artificial Sequence
  Description of Artificial Sequence: Synthetic oligonucleotide
  Target: LAMA2; (+) strand; PAM type: YTN; PAM sequence: TTT
tcatctgctccacagatctg

SEQ ID NO: 320001 - DNA, 20 bp, Artificial Sequence
  Description of Artificial Sequence: Synthetic oligonucleotide
  Target: LAMA2; (+) strand; PAM type: YTN; PAM sequence: TTT
catctgctccacagatctgt

SEQ ID NO: 320002 - DNA, 20 bp, Artificial Sequence
  Description of Artificial Sequence: Synthetic oligonucleotide
  Target: LAMA2; (+) strand; PAM type: YTN; PAM sequence: TTC
atctgctccacagatctgtg

SEQ ID NO: 320003 - DNA, 20 bp, Artificial Sequence
  Description of Artificial Sequence: Synthetic oligonucleotide
  Target: LAMA2; (+) strand; PAM type: YTN; PAM sequence: CTG
ctccacagatctgtggtaag

SEQ ID NO: 320004 - DNA, 20 bp, Artificial Sequence
  Description of Artificial Sequence: Synthetic oligonucleotide
  Target: LAMA2; (+) strand; PAM type: YTN; PAM sequence: CTC
cacagatctgtggtaaggat

SEQ ID NO: 320005 - DNA, 20 bp, Artificial Sequence
  Description of Artificial Sequence: Synthetic oligonucleotide
  Target: LAMA2; (+) strand; PAM type: YTN; PAM sequence: CTG
tggtaaggattaaatgagat

SEQ ID NO: 320006 - DNA, 20 bp, Artificial Sequence
  Description of Artificial Sequence: Synthetic oligonucleotide
  Target: LAMA2; (+) strand; PAM type: YTN; PAM sequence: TTA
aatgagatgacatccatgaa

SEQ ID NO: 320007 - DNA, 20 bp, Artificial Sequence
  Description of Artificial Sequence: Synthetic oligonucleotide
  Target: LAMA2; (+) strand; PAM type: YTN; PAM sequence: CTT
gccatagtggctactcagca

SEQ ID NO: 320008 - DNA, 20 bp, Artificial Sequence
  Description of Artificial Sequence: Synthetic oligonucleotide
  Target: LAMA2; (+) strand; PAM type: YTN; PAM sequence: TTG
ccatagtggctactcagcat

SEQ ID NO: 320009 - DNA, 20 bp, Artificial Sequence
  Description of Artificial Sequence: Synthetic oligonucleotide
  Target: LAMA2; (+) strand; PAM type: YTN; PAM sequence: CTA
ctcagcatgtaagttttttg

SEQ ID NO: 320010 - DNA, 20 bp, Artificial Sequence
  Description of Artificial Sequence: Synthetic oligonucleotide
  Target: LAMA2; (+) strand; PAM type: YTN; PAM sequence: CTC
agcatgtaagttttttgttt

SEQ ID NO: 320011 - DNA, 20 bp, Artificial Sequence
  Description of Artificial Sequence: Synthetic oligonucleotide
  Target: LAMA2; (+) strand; PAM type: YTN; PAM sequence: TTT
tttgtttgtttctttgagac

SEQ ID NO: 320012 - DNA, 20 bp, Artificial Sequence
  Description of Artificial Sequence: Synthetic oligonucleotide
  Target: LAMA2; (+) strand; PAM type: YTN; PAM sequence: TTT
ttgtttgtttctttgagaca

SEQ ID NO: 320013 - DNA, 20 bp, Artificial Sequence
  Description of Artificial Sequence: Synthetic oligonucleotide
  Target: LAMA2; (+) strand; PAM type: YTN; PAM sequence: TTT
tgtttgtttctttgagacag

SEQ ID NO: 320014 - DNA, 20 bp, Artificial Sequence
  Description of Artificial Sequence: Synthetic oligonucleotide
  Target: LAMA2; (+) strand; PAM type: YTN; PAM sequence: TTT
gtttgtttctttgagacaga

SEQ ID NO: 320015 - DNA, 20 bp, Artificial Sequence
  Description of Artificial Sequence: Synthetic oligonucleotide
  Target: LAMA2; (+) strand; PAM type: YTN; PAM sequence: TTG
tttgtttctttgagacagag

SEQ ID NO: 320016 - DNA, 20 bp, Artificial Sequence
  Description of Artificial Sequence: Synthetic oligonucleotide
  Target: LAMA2; (+) strand; PAM type: YTN; PAM sequence: TTT
gtttctttgagacagagtct

SEQ ID NO: 320017 - DNA, 20 bp, Artificial Sequence
  Description of Artificial Sequence: Synthetic oligonucleotide
  Target: LAMA2; (+) strand; PAM type: YTN; PAM sequence: TTG
tttctttgagacagagtctc

SEQ ID NO: 320018 - DNA, 20 bp, Artificial Sequence
  Description of Artificial Sequence: Synthetic oligonucleotide
  Target: LAMA2; (+) strand; PAM type: YTN; PAM sequence: TTT
ctttgagacagagtctccct

SEQ ID NO: 320019 - DNA, 20 bp, Artificial Sequence
  Description of Artificial Sequence: Synthetic oligonucleotide
  Target: LAMA2; (+) strand; PAM type: YTN; PAM sequence: TTC
tttgagacagagtctccctc

SEQ ID NO: 320020 - DNA, 20 bp, Artificial Sequence
  Description of Artificial Sequence: Synthetic oligonucleotide
  Target: LAMA2; (+) strand; PAM type: YTN; PAM sequence: CTT
tgagacagagtctccctctg

SEQ ID NO: 320021 - DNA, 20 bp, Artificial Sequence
  Description of Artificial Sequence: Synthetic oligonucleotide
  Target: LAMA2; (+) strand; PAM type: YTN; PAM sequence: TTT
gagacagagtctccctctgt

SEQ ID NO: 320022 - DNA, 20 bp, Artificial Sequence
  Description of Artificial Sequence: Synthetic oligonucleotide
  Target: LAMA2; (+) strand; PAM type: YTN; PAM sequence: TTG
agacagagtctccctctgtc

SEQ ID NO: 320023 - DNA, 20 bp, Artificial Sequence
  Description of Artificial Sequence: Synthetic oligonucleotide
  Target: LAMA2; (+) strand; PAM type: YTN; PAM sequence: CTC
cctctgtcaccaggctggag

SEQ ID NO: 320024 - DNA, 20 bp, Artificial Sequence
  Description of Artificial Sequence: Synthetic oligonucleotide
  Target: LAMA2; (+) strand; PAM type: YTN; PAM sequence: CTC
tgtcaccaggctggagtgca

SEQ ID NO: 320025 - DNA, 20 bp, Artificial Sequence
  Description of Artificial Sequence: Synthetic oligonucleotide
  Target: LAMA2; (+) strand; PAM type: YTN; PAM sequence: CTG
tcaccaggctggagtgcagt

SEQ ID NO: 320026 - DNA, 20 bp, Artificial Sequence
  Description of Artificial Sequence: Synthetic oligonucleotide
  Target: LAMA2; (+) strand; PAM type: YTN; PAM sequence: CTG
gagtgcagtggcgagatctc

SEQ ID NO: 320027 - DNA, 20 bp, Artificial Sequence
  Description of Artificial Sequence: Synthetic oligonucleotide
  Target: LAMA2; (+) strand; PAM type: YTN; PAM sequence: CTC
tgctcactgcaacctctgcc

SEQ ID NO: 320028 - DNA, 20 bp, Artificial Sequence
  Description of Artificial Sequence: Synthetic oligonucleotide
  Target: LAMA2; (+) strand; PAM type: YTN; PAM sequence: CTG
ctcactgcaacctctgcctg

SEQ ID NO: 320029 - DNA, 20 bp, Artificial Sequence
  Description of Artificial Sequence: Synthetic oligonucleotide
  Target: LAMA2; (+) strand; PAM type: YTN; PAM sequence: CTC
actgcaacctctgcctgctg

SEQ ID NO: 320030 - DNA, 20 bp, Artificial Sequence
  Description of Artificial Sequence: Synthetic oligonucleotide
  Target: LAMA2; (+) strand; PAM type: YTN; PAM sequence: CTG
caacctctgcctgctggatt

SEQ ID NO: 320031 - DNA, 20 bp, Artificial Sequence
  Description of Artificial Sequence: Synthetic oligonucleotide
  Target: LAMA2; (+) strand; PAM type: YTN; PAM sequence: CTC
tgcctgctggattcaagtga

SEQ ID NO: 320032 - DNA, 20 bp, Artificial Sequence
  Description of Artificial Sequence: Synthetic oligonucleotide
  Target: LAMA2; (+) strand; PAM type: YTN; PAM sequence: CTG
cctgctggattcaagtgatt

SEQ ID NO: 320033 - DNA, 20 bp, Artificial Sequence
  Description of Artificial Sequence: Synthetic oligonucleotide
  Target: LAMA2; (+) strand; PAM type: YTN; PAM sequence: CTG
ctggattcaagtgattctcc

SEQ ID NO: 320034 - DNA, 20 bp, Artificial Sequence
  Description of Artificial Sequence: Synthetic oligonucleotide
  Target: LAMA2; (+) strand; PAM type: YTN; PAM sequence: CTG
gattcaagtgattctcctcc

SEQ ID NO: 320035 - DNA, 20 bp, Artificial Sequence
  Description of Artificial Sequence: Synthetic oligonucleotide
  Target: LAMA2; (+) strand; PAM type: YTN; PAM sequence: TTC
aagtgattctcctcccaaat

SEQ ID NO: 320036 - DNA, 20 bp, Artificial Sequence
  Description of Artificial Sequence: Synthetic oligonucleotide
  Target: LAMA2; (+) strand; PAM type: YTN; PAM sequence: TTC
tcctcccaaatagctgggat

SEQ ID NO: 320037 - DNA, 20 bp, Artificial Sequence
  Description of Artificial Sequence: Synthetic oligonucleotide
  Target: LAMA2; (+) strand; PAM type: YTN; PAM sequence: CTC
ctcccaaatagctgggatta

SEQ ID NO: 320038 - DNA, 20 bp, Artificial Sequence
  Description of Artificial Sequence: Synthetic oligonucleotide
  Target: LAMA2; (+) strand; PAM type: YTN; PAM sequence: CTC
ccaaatagctgggattacag

SEQ ID NO: 320039 - DNA, 20 bp, Artificial Sequence
  Description of Artificial Sequence: Synthetic oligonucleotide
  Target: LAMA2; (+) strand; PAM type: YTN; PAM sequence: CTG
ggattacaggcatccggcac

SEQ ID NO: 320040 - DNA, 20 bp, Artificial Sequence
  Description of Artificial Sequence: Synthetic oligonucleotide
  Target: LAMA2; (+) strand; PAM type: YTN; PAM sequence: TTA
caggcatccggcaccaggcc

SEQ ID NO: 320041 - DNA, 20 bp, Artificial Sequence
  Description of Artificial Sequence: Synthetic oligonucleotide
  Target: LAMA2; (+) strand; PAM type: YTN; PAM sequence: CTA
attttttgtatttttagtag

SEQ ID NO: 320042 - DNA, 20 bp, Artificial Sequence
  Description of Artificial Sequence: Synthetic oligonucleotide
  Target: LAMA2; (+) strand; PAM type: YTN; PAM sequence: TTT
tttgtatttttagtagagac

SEQ ID NO: 320043 - DNA, 20 bp, Artificial Sequence
  Description of Artificial Sequence: Synthetic oligonucleotide
  Target: LAMA2; (+) strand; PAM type: YTN; PAM sequence: TTT
ttgtatttttagtagagacg

SEQ ID NO: 320044 - DNA, 20 bp, Artificial Sequence
  Description of Artificial Sequence: Synthetic oligonucleotide
  Target: LAMA2; (+) strand; PAM type: YTN; PAM sequence: TTT
tgtatttttagtagagacgg

SEQ ID NO: 320045 - DNA, 20 bp, Artificial Sequence
  Description of Artificial Sequence: Synthetic oligonucleotide
  Target: LAMA2; (+) strand; PAM type: YTN; PAM sequence: TTT
gtatttttagtagagacggg

SEQ ID NO: 320046 - DNA, 20 bp, Artificial Sequence
  Description of Artificial Sequence: Synthetic oligonucleotide
  Target: LAMA2; (+) strand; PAM type: YTN; PAM sequence: TTG
tatttttagtagagacgggg

SEQ ID NO: 320047 - DNA, 20 bp, Artificial Sequence
  Description of Artificial Sequence: Synthetic oligonucleotide
  Target: LAMA2; (+) strand; PAM type: YTN; PAM sequence: TTT
ttagtagagacggggtttca

SEQ ID NO: 320048 - DNA, 20 bp, Artificial Sequence
  Description of Artificial Sequence: Synthetic oligonucleotide
  Target: LAMA2; (+) strand; PAM type: YTN; PAM sequence: TTT
tagtagagacggggtttcac

SEQ ID NO: 320049 - DNA, 20 bp, Artificial Sequence
  Description of Artificial Sequence: Synthetic oligonucleotide
  Target: LAMA2; (+) strand; PAM type: YTN; PAM sequence: TTT
agtagagacggggtttcacc

SEQ ID NO: 320050 - DNA, 20 bp, Artificial Sequence
  Description of Artificial Sequence: Synthetic oligonucleotide
  Target: LAMA2; (+) strand; PAM type: YTN; PAM sequence: TTA
gtagagacggggtttcacca

SEQ ID NO: 320051 - DNA, 20 bp, Artificial Sequence
  Description of Artificial Sequence: Synthetic oligonucleotide
  Target: LAMA2; (+) strand; PAM type: YTN; PAM sequence: TTT
caccatgttggccaggctgg

SEQ ID NO: 320052 - DNA, 20 bp, Artificial Sequence
  Description of Artificial Sequence: Synthetic oligonucleotide
  Target: LAMA2; (+) strand; PAM type: YTN; PAM sequence: TTC
accatgttggccaggctggt

SEQ ID NO: 320053 - DNA, 20 bp, Artificial Sequence
  Description of Artificial Sequence: Synthetic oligonucleotide
  Target: LAMA2; (+) strand; PAM type: YTN; PAM sequence: TTG
gccaggctggtctcgaactc

SEQ ID NO: 320054 - DNA, 20 bp, Artificial Sequence
  Description of Artificial Sequence: Synthetic oligonucleotide
  Target: LAMA2; (+) strand; PAM type: YTN; PAM sequence: CTG
gtctcgaactcctgacctcg

SEQ ID NO: 320055 - DNA, 20 bp, Artificial Sequence
  Description of Artificial Sequence: Synthetic oligonucleotide
  Target: LAMA2; (+) strand; PAM type: YTN; PAM sequence: CTC
gaactcctgacctcgggtaa

SEQ ID NO: 320056 - DNA, 20 bp, Artificial Sequence
  Description of Artificial Sequence: Synthetic oligonucleotide
  Target: LAMA2; (+) strand; PAM type: YTN; PAM sequence: CTC
ctgacctcgggtaatctgct

SEQ ID NO: 320057 - DNA, 20 bp, Artificial Sequence
  Description of Artificial Sequence: Synthetic oligonucleotide
  Target: LAMA2; (+) strand; PAM type: YTN; PAM sequence: CTG
acctcgggtaatctgctcgt

SEQ ID NO: 320058 - DNA, 20 bp, Artificial Sequence
  Description of Artificial Sequence: Synthetic oligonucleotide
  Target: LAMA2; (+) strand; PAM type: YTN; PAM sequence: CTC
gggtaatctgctcgtcttgg

SEQ ID NO: 320059 - DNA, 20 bp, Artificial Sequence
  Description of Artificial Sequence: Synthetic oligonucleotide
  Target: LAMA2; (+) strand; PAM type: YTN; PAM sequence: CTG
ctcgtcttggcctcccaaag

SEQ ID NO: 320060 - DNA, 20 bp, Artificial Sequence
  Description of Artificial Sequence: Synthetic oligonucleotide
  Target: LAMA2; (+) strand; PAM type: YTN; PAM sequence: CTC
gtcttggcctcccaaagtgc

SEQ ID NO: 320061 - DNA, 20 bp, Artificial Sequence
  Description of Artificial Sequence: Synthetic oligonucleotide
  Target: LAMA2; (+) strand; PAM type: YTN; PAM sequence: CTT
ggcctcccaaagtgctggga

SEQ ID NO: 320062 - DNA, 20 bp, Artificial Sequence
  Description of Artificial Sequence: Synthetic oligonucleotide
  Target: LAMA2; (+) strand; PAM type: YTN; PAM sequence: TTG
gcctcccaaagtgctgggat

SEQ ID NO: 320063 - DNA, 20 bp, Artificial Sequence
  Description of Artificial Sequence: Synthetic oligonucleotide
  Target: LAMA2; (+) strand; PAM type: YTN; PAM sequence: CTC
ccaaagtgctgggattatag

SEQ ID NO: 320064 - DNA, 20 bp, Artificial Sequence
  Description of Artificial Sequence: Synthetic oligonucleotide
  Target: LAMA2; (+) strand; PAM type: YTN; PAM sequence: CTG
ggattataggcatgaaccac

SEQ ID NO: 320065 - DNA, 20 bp, Artificial Sequence
  Description of Artificial Sequence: Synthetic oligonucleotide
  Target: LAMA2; (+) strand; PAM type: YTN; PAM sequence: TTA
taggcatgaaccactgtgcc

SEQ ID NO: 320066 - DNA, 20 bp, Artificial Sequence
  Description of Artificial Sequence: Synthetic oligonucleotide
  Target: LAMA2; (+) strand; PAM type: YTN; PAM sequence: CTG
tgcccggcctagcatgtagt

SEQ ID NO: 320067 - DNA, 20 bp, Artificial Sequence
  Description of Artificial Sequence: Synthetic oligonucleotide
  Target: LAMA2; (+) strand; PAM type: YTN; PAM sequence: CTA
gcatgtagtttttaaaaggc

SEQ ID NO: 320068 - DNA, 20 bp, Artificial Sequence
  Description of Artificial Sequence: Synthetic oligonucleotide
  Target: LAMA2; (+) strand; PAM type: YTN; PAM sequence: TTT
ttaaaaggcaaagcaattga

SEQ ID NO: 320069 - DNA, 20 bp, Artificial Sequence
  Description of Artificial Sequence: Synthetic oligonucleotide
  Target: LAMA2; (+) strand; PAM type: YTN; PAM sequence: TTT
taaaaggcaaagcaattgaa

SEQ ID NO: 320070 - DNA, 20 bp, Artificial Sequence
  Description of Artificial Sequence: Synthetic oligonucleotide
  Target: LAMA2; (+) strand; PAM type: YTN; PAM sequence: TTT
aaaaggcaaagcaattgaaa

SEQ ID NO: 320071 - DNA, 20 bp, Artificial Sequence
  Description of Artificial Sequence: Synthetic oligonucleotide
  Target: LAMA2; (+) strand; PAM type: YTN; PAM sequence: TTA
aaaggcaaagcaattgaaat

SEQ ID NO: 320072 - DNA, 20 bp, Artificial Sequence
  Description of Artificial Sequence: Synthetic oligonucleotide
  Target: LAMA2; (+) strand; PAM type: YTN; PAM sequence: TTG
aaatttgtaaagcatttgga

SEQ ID NO: 320073 - DNA, 20 bp, Artificial Sequence
  Description of Artificial Sequence: Synthetic oligonucleotide
  Target: LAMA2; (+) strand; PAM type: YTN; PAM sequence: TTT
gtaaagcatttggatatcta

SEQ ID NO: 320074 - DNA, 20 bp, Artificial Sequence
  Description of Artificial Sequence: Synthetic oligonucleotide
  Target: LAMA2; (+) strand; PAM type: YTN; PAM sequence: TTG
taaagcatttggatatctac

SEQ ID NO: 320075 - DNA, 20 bp, Artificial Sequence
  Description of Artificial Sequence: Synthetic oligonucleotide
  Target: LAMA2; (+) strand; PAM type: YTN; PAM sequence: TTT
ggatatctacaaaagttatt

SEQ ID NO: 320076 - DNA, 20 bp, Artificial Sequence
  Description of Artificial Sequence: Synthetic oligonucleotide
  Target: LAMA2; (+) strand; PAM type: YTN; PAM sequence: TTG
gatatctacaaaagttattt

SEQ ID NO: 320077 - DNA, 20 bp, Artificial Sequence
  Description of Artificial Sequence: Synthetic oligonucleotide
  Target: LAMA2; (+) strand; PAM type: YTN; PAM sequence: CTA
caaaagttatttgacgagaa

SEQ ID NO: 320078 - DNA, 20 bp, Artificial Sequence
  Description of Artificial Sequence: Synthetic oligonucleotide
  Target: LAMA2; (+) strand; PAM type: YTN; PAM sequence: TTA
tttgacgagaacatacaagg

SEQ ID NO: 320079 - DNA, 20 bp, Artificial Sequence
  Description of Artificial Sequence: Synthetic oligonucleotide
  Target: LAMA2; (+) strand; PAM type: YTN; PAM sequence: TTT
gacgagaacatacaagggga

SEQ ID NO: 320080 - DNA, 20 bp, Artificial Sequence
  Description of Artificial Sequence: Synthetic oligonucleotide
  Target: LAMA2; (+) strand; PAM type: YTN; PAM sequence: TTG
acgagaacatacaaggggac

SEQ ID NO: 320081 - DNA, 20 bp, Artificial Sequence
  Description of Artificial Sequence: Synthetic oligonucleotide
  Target: LAMA2; (+) strand; PAM type: YTN; PAM sequence: CTC
ttatggactggtaattttag

SEQ ID NO: 320082 - DNA, 20 bp, Artificial Sequence
  Description of Artificial Sequence: Synthetic oligonucleotide
  Target: LAMA2; (+) strand; PAM type: YTN; PAM sequence: CTT
atggactggtaattttagga

SEQ ID NO: 320083 - DNA, 20 bp, Artificial Sequence
  Description of Artificial Sequence: Synthetic oligonucleotide
  Target: LAMA2; (+) strand; PAM type: YTN; PAM sequence: TTA
tggactggtaattttaggat

SEQ ID NO: 320084 - DNA, 20 bp, Artificial Sequence
  Description of Artificial Sequence: Synthetic oligonucleotide
  Target: LAMA2; (+) strand; PAM type: YTN; PAM sequence: CTG
gtaattttaggattgtctac

SEQ ID NO: 320085 - DNA, 20 bp, Artificial Sequence
  Description of Artificial Sequence: Synthetic oligonucleotide
  Target: LAMA2; (+) strand; PAM type: YTN; PAM sequence: TTT
taggattgtctacttgatgt

SEQ ID NO: 320086 - DNA, 20 bp, Artificial Sequence
  Description of Artificial Sequence: Synthetic oligonucleotide
  Target: LAMA2; (+) strand; PAM type: YTN; PAM sequence: TTT
aggattgtctacttgatgtt

SEQ ID NO: 320087 - DNA, 20 bp, Artificial Sequence
  Description of Artificial Sequence: Synthetic oligonucleotide
  Target: LAMA2; (+) strand; PAM type: YTN; PAM sequence: TTA
ggattgtctacttgatgtta

SEQ ID NO: 320088 - DNA, 20 bp, Artificial Sequence
  Description of Artificial Sequence: Synthetic oligonucleotide
  Target: LAMA2; (+) strand; PAM type: YTN; PAM sequence: TTG
tctacttgatgttaactaaa

SEQ ID NO: 320089 - DNA, 20 bp, Artificial Sequence
  Description of Artificial Sequence: Synthetic oligonucleotide
  Target: LAMA2; (+) strand; PAM type: YTN; PAM sequence: CTA
cttgatgttaactaaatatc

SEQ ID NO: 320090 - DNA, 20 bp, Artificial Sequence
  Description of Artificial Sequence: Synthetic oligonucleotide
  Target: LAMA2; (+) strand; PAM type: YTN; PAM sequence: CTT
gatgttaactaaatatcctt

SEQ ID NO: 320091 - DNA, 20 bp, Artificial Sequence
  Description of Artificial Sequence: Synthetic oligonucleotide
  Target: LAMA2; (+) strand; PAM type: YTN; PAM sequence: TTG
atgttaactaaatatccttc

SEQ ID NO: 320092 - DNA, 20 bp, Artificial Sequence
  Description of Artificial Sequence: Synthetic oligonucleotide
  Target: LAMA2; (+) strand; PAM type: YTN; PAM sequence: TTA
actaaatatccttcctaatg

SEQ ID NO: 320093 - DNA, 20 bp, Artificial Sequence
  Description of Artificial Sequence: Synthetic oligonucleotide
  Target: LAMA2; (+) strand; PAM type: YTN; PAM sequence: CTA
aatatccttcctaatgccaa

SEQ ID NO: 320094 - DNA, 20 bp, Artificial Sequence
  Description of Artificial Sequence: Synthetic oligonucleotide
  Target: LAMA2; (+) strand; PAM type: YTN; PAM sequence: CTT
cctaatgccaaaccaacaca

SEQ ID NO: 320095 - DNA, 20 bp, Artificial Sequence
  Description of Artificial Sequence: Synthetic oligonucleotide
  Target: LAMA2; (+) strand; PAM type: YTN; PAM sequence: TTC
ctaatgccaaaccaacacat

SEQ ID NO: 320096 - DNA, 20 bp, Artificial Sequence
  Description of Artificial Sequence: Synthetic oligonucleotide
  Target: LAMA2; (+) strand; PAM type: YTN; PAM sequence: CTA
atgccaaaccaacacatggg

SEQ ID NO: 320097 - DNA, 20 bp, Artificial Sequence
  Description of Artificial Sequence: Synthetic oligonucleotide
  Target: LAMA2; (+) strand; PAM type: YTN; PAM sequence: CTG
gactaaaaaaaaaatttgat

SEQ ID NO: 320098 - DNA, 20 bp, Artificial Sequence
  Description of Artificial Sequence: Synthetic oligonucleotide
  Target: LAMA2; (+) strand; PAM type: YTN; PAM sequence: CTA
aaaaaaaaatttgatttctc

SEQ ID NO: 320099 - DNA, 20 bp, Artificial Sequence
  Description of Artificial Sequence: Synthetic oligonucleotide
  Target: LAMA2; (+) strand; PAM type: YTN; PAM sequence: TTT
gatttctctatcaaatgtac

SEQ ID NO: 320100 - DNA, 20 bp, Artificial Sequence
  Description of Artificial Sequence: Synthetic oligonucleotide
  Target: LAMA2; (+) strand; PAM type: YTN; PAM sequence: TTG
atttctctatcaaatgtact

SEQ ID NO: 320101 - DNA, 20 bp, Artificial Sequence
  Description of Artificial Sequence: Synthetic oligonucleotide
  Target: LAMA2; (+) strand; PAM type: YTN; PAM sequence: TTT
ctctatcaaatgtactttta

SEQ ID NO: 320102 - DNA, 20 bp, Artificial Sequence
  Description of Artificial Sequence: Synthetic oligonucleotide
  Target: LAMA2; (+) strand; PAM type: YTN; PAM sequence: TTC
tctatcaaatgtacttttag

SEQ ID NO: 320103 - DNA, 20 bp, Artificial Sequence
  Description of Artificial Sequence: Synthetic oligonucleotide
  Target: LAMA2; (+) strand; PAM type: YTN; PAM sequence: CTC
tatcaaatgtacttttaggt

SEQ ID NO: 320104 - DNA, 20 bp, Artificial Sequence
  Description of Artificial Sequence: Synthetic oligonucleotide
  Target: LAMA2; (+) strand; PAM type: YTN; PAM sequence: CTA
tcaaatgtacttttaggtaa

SEQ ID NO: 320105 - DNA, 20 bp, Artificial Sequence
  Description of Artificial Sequence: Synthetic oligonucleotide
  Target: LAMA2; (+) strand; PAM type: YTN; PAM sequence: CTT
ttaggtaaaaaaaaatatgc

SEQ ID NO: 320106 - DNA, 20 bp, Artificial Sequence
  Description of Artificial Sequence: Synthetic oligonucleotide
  Target: LAMA2; (+) strand; PAM type: YTN; PAM sequence: TTT
taggtaaaaaaaaatatgca

SEQ ID NO: 320107 - DNA, 20 bp, Artificial Sequence
  Description of Artificial Sequence: Synthetic oligonucleotide
  Target: LAMA2; (+) strand; PAM type: YTN; PAM sequence: TTT
aggtaaaaaaaaatatgcaa

SEQ ID NO: 320108 - DNA, 20 bp, Artificial Sequence
  Description of Artificial Sequence: Synthetic oligonucleotide
  Target: LAMA2; (+) strand; PAM type: YTN; PAM sequence: TTA
ggtaaaaaaaaatatgcaaa

SEQ ID NO: 320109 - DNA, 20 bp, Artificial Sequence
  Description of Artificial Sequence: Synthetic oligonucleotide
  Target: LAMA2; (+) strand; PAM type: YTN; PAM sequence: TTT
gtatgggcaaatgttttact

SEQ ID NO: 320110 - DNA, 20 bp, Artificial Sequence
  Description of Artificial Sequence: Synthetic oligonucleotide
  Target: LAMA2; (+) strand; PAM type: YTN; PAM sequence: TTG
tatgggcaaatgttttacta

SEQ ID NO: 320111 - DNA, 20 bp, Artificial Sequence
  Description of Artificial Sequence: Synthetic oligonucleotide
  Target: LAMA2; (+) strand; PAM type: YTN; PAM sequence: TTT
tactaagggtgtttgggtta

SEQ ID NO: 320112 - DNA, 20 bp, Artificial Sequence
  Description of Artificial Sequence: Synthetic oligonucleotide
  Target: LAMA2; (+) strand; PAM type: YTN; PAM sequence: TTT
actaagggtgtttgggttat

SEQ ID NO: 320113 - DNA, 20 bp, Artificial Sequence
  Description of Artificial Sequence: Synthetic oligonucleotide
  Target: LAMA2; (+) strand; PAM type: YTN; PAM sequence: TTA
ctaagggtgtttgggttatt

SEQ ID NO: 320114 - DNA, 20 bp, Artificial Sequence
  Description of Artificial Sequence: Synthetic oligonucleotide
  Target: LAMA2; (+) strand; PAM type: YTN; PAM sequence: CTA
agggtgtttgggttattttc

SEQ ID NO: 320115 - DNA, 20 bp, Artificial Sequence
  Description of Artificial Sequence: Synthetic oligonucleotide
  Target: LAMA2; (+) strand; PAM type: YTN; PAM sequence: TTT
gggttattttctattgaaca

SEQ ID NO: 320116 - DNA, 20 bp, Artificial Sequence
  Description of Artificial Sequence: Synthetic oligonucleotide
  Target: LAMA2; (+) strand; PAM type: YTN; PAM sequence: TTG
ggttattttctattgaacaa

SEQ ID NO: 320117 - DNA, 20 bp, Artificial Sequence
  Description of Artificial Sequence: Synthetic oligonucleotide
  Target: LAMA2; (+) strand; PAM type: YTN; PAM sequence: TTA
ttttctattgaacaaaacct

SEQ ID NO: 320118 - DNA, 20 bp, Artificial Sequence
  Description of Artificial Sequence: Synthetic oligonucleotide
  Target: LAMA2; (+) strand; PAM type: YTN; PAM sequence: TTT
tctattgaacaaaacctgct

SEQ ID NO: 320119 - DNA, 20 bp, Artificial Sequence
  Description of Artificial Sequence: Synthetic oligonucleotide
  Target: LAMA2; (+) strand; PAM type: YTN; PAM sequence: TTT
ctattgaacaaaacctgcta

SEQ ID NO: 320120 - DNA, 20 bp, Artificial Sequence
  Description of Artificial Sequence: Synthetic oligonucleotide
  Target: LAMA2; (+) strand; PAM type: YTN; PAM sequence: TTC
tattgaacaaaacctgctaa

SEQ ID NO: 320121 - DNA, 20 bp, Artificial Sequence
  Description of Artificial Sequence: Synthetic oligonucleotide
  Target: LAMA2; (+) strand; PAM type: YTN; PAM sequence: CTA
ttgaacaaaacctgctaaac

SEQ ID NO: 320122 - DNA, 20 bp, Artificial Sequence
  Description of Artificial Sequence: Synthetic oligonucleotide
  Target: LAMA2; (+) strand; PAM type: YTN; PAM sequence: TTG
aacaaaacctgctaaaccag

SEQ ID NO: 320123 - DNA, 20 bp, Artificial Sequence
  Description of Artificial Sequence: Synthetic oligonucleotide
  Target: LAMA2; (+) strand; PAM type: YTN; PAM sequence: CTG
ctaaaccagcataagatgca

SEQ ID NO: 320124 - DNA, 20 bp, Artificial Sequence
  Description of Artificial Sequence: Synthetic oligonucleotide
  Target: LAMA2; (+) strand; PAM type: YTN; PAM sequence: CTA
aaccagcataagatgcactg

SEQ ID NO: 320125 - DNA, 20 bp, Artificial Sequence
  Description of Artificial Sequence: Synthetic oligonucleotide
  Target: LAMA2; (+) strand; PAM type: YTN; PAM sequence: CTG
aactaaagtgcagcagagat

SEQ ID NO: 320126 - DNA, 20 bp, Artificial Sequence
  Description of Artificial Sequence: Synthetic oligonucleotide
  Target: LAMA2; (+) strand; PAM type: YTN; PAM sequence: CTA
aagtgcagcagagatgctac

SEQ ID NO: 320127 - DNA, 20 bp, Artificial Sequence
  Description of Artificial Sequence: Synthetic oligonucleotide
  Target: LAMA2; (+) strand; PAM type: YTN; PAM sequence: CTA
ctgtcagcaagagaaggatt

SEQ ID NO: 320128 - DNA, 20 bp, Artificial Sequence
  Description of Artificial Sequence: Synthetic oligonucleotide
  Target: LAMA2; (+) strand; PAM type: YTN; PAM sequence: CTG
tcagcaagagaaggattcaa

SEQ ID NO: 320129 - DNA, 20 bp, Artificial Sequence
  Description of Artificial Sequence: Synthetic oligonucleotide
  Target: LAMA2; (+) strand; PAM type: YTN; PAM sequence: TTC
aaagagaggaagcccaatcc

SEQ ID NO: 320130 - DNA, 20 bp, Artificial Sequence
  Description of Artificial Sequence: Synthetic oligonucleotide
  Target: LAMA2; (+) strand; PAM type: YTN; PAM sequence: TTA
cctggacaattaaacagtca

SEQ ID NO: 320131 - DNA, 20 bp, Artificial Sequence
  Description of Artificial Sequence: Synthetic oligonucleotide
  Target: LAMA2; (+) strand; PAM type: YTN; PAM sequence: CTG
gacaattaaacagtcagtta

SEQ ID NO: 320132 - DNA, 20 bp, Artificial Sequence
  Description of Artificial Sequence: Synthetic oligonucleotide
  Target: LAMA2; (+) strand; PAM type: YTN; PAM sequence: TTA
aacagtcagttattgggatt

SEQ ID NO: 320133 - DNA, 20 bp, Artificial Sequence
  Description of Artificial Sequence: Synthetic oligonucleotide
  Target: LAMA2; (+) strand; PAM type: YTN; PAM sequence: TTA
ttgggattttcacaattctt

SEQ ID NO: 320134 - DNA, 20 bp, Artificial Sequence
  Description of Artificial Sequence: Synthetic oligonucleotide
  Target: LAMA2; (+) strand; PAM type: YTN; PAM sequence: TTG
ggattttcacaattcttagc

SEQ ID NO: 320135 - DNA, 20 bp, Artificial Sequence
  Description of Artificial Sequence: Synthetic oligonucleotide
  Target: LAMA2; (+) strand; PAM type: YTN; PAM sequence: TTT
tcacaattcttagctttttt

SEQ ID NO: 320136 - DNA, 20 bp, Artificial Sequence
  Description of Artificial Sequence: Synthetic oligonucleotide
  Target: LAMA2; (+) strand; PAM type: YTN; PAM sequence: TTT
cacaattcttagctttttta

SEQ ID NO: 320137 - DNA, 20 bp, Artificial Sequence
  Description of Artificial Sequence: Synthetic oligonucleotide
  Target: LAMA2; (+) strand; PAM type: YTN; PAM sequence: TTC
acaattcttagcttttttaa

SEQ ID NO: 320138 - DNA, 20 bp, Artificial Sequence
  Description of Artificial Sequence: Synthetic oligonucleotide
  Target: LAMA2; (+) strand; PAM type: YTN; PAM sequence: TTC
ttagcttttttaactttcac

SEQ ID NO: 320139 - DNA, 20 bp, Artificial Sequence
  Description of Artificial Sequence: Synthetic oligonucleotide
  Target: LAMA2; (+) strand; PAM type: YTN; PAM sequence: CTT
agcttttttaactttcacaa

SEQ ID NO: 320140 - DNA, 20 bp, Artificial Sequence
  Description of Artificial Sequence: Synthetic oligonucleotide
  Target: LAMA2; (+) strand; PAM type: YTN; PAM sequence: TTA
gcttttttaactttcacaat

SEQ ID NO: 320141 - DNA, 20 bp, Artificial Sequence
  Description of Artificial Sequence: Synthetic oligonucleotide
  Target: LAMA2; (+) strand; PAM type: YTN; PAM sequence: CTT
ttttaactttcacaattctt

SEQ ID NO: 320142 - DNA, 20 bp, Artificial Sequence
  Description of Artificial Sequence: Synthetic oligonucleotide
  Target: LAMA2; (+) strand; PAM type: YTN; PAM sequence: TTT
tttaactttcacaattctta

SEQ ID NO: 320143 - DNA, 20 bp, Artificial Sequence
  Description of Artificial Sequence: Synthetic oligonucleotide
  Target: LAMA2; (+) strand; PAM type: YTN; PAM sequence: TTT
ttaactttcacaattcttag

SEQ ID NO: 320144 - DNA, 20 bp, Artificial Sequence
  Description of Artificial Sequence: Synthetic oligonucleotide
  Target: LAMA2; (+) strand; PAM type: YTN; PAM sequence: TTT
taactttcacaattcttagc

SEQ ID NO: 320145 - DNA, 20 bp, Artificial Sequence
  Description of Artificial Sequence: Synthetic oligonucleotide
  Target: LAMA2; (+) strand; PAM type: YTN; PAM sequence: TTT
aactttcacaattcttagct

SEQ ID NO: 320146 - DNA, 20 bp, Artificial Sequence
  Description of Artificial Sequence: Synthetic oligonucleotide
  Target: LAMA2; (+) strand; PAM type: YTN; PAM sequence: TTA
actttcacaattcttagctt

SEQ ID NO: 320147 - DNA, 20 bp, Artificial Sequence
  Description of Artificial Sequence: Synthetic oligonucleotide
  Target: LAMA2; (+) strand; PAM type: YTN; PAM sequence: CTT
tcacaattcttagctttttt

SEQ ID NO: 320148 - DNA, 20 bp, Artificial Sequence
  Description of Artificial Sequence: Synthetic oligonucleotide
  Target: LAMA2; (+) strand; PAM type: YTN; PAM sequence: TTT
cacaattcttagctttttta

SEQ ID NO: 320149 - DNA, 20 bp, Artificial Sequence
  Description of Artificial Sequence: Synthetic oligonucleotide
  Target: LAMA2; (+) strand; PAM type: YTN; PAM sequence: TTC
acaattcttagcttttttaa

SEQ ID NO: 320150 - DNA, 20 bp, Artificial Sequence
  Description of Artificial Sequence: Synthetic oligonucleotide
  Target: LAMA2; (+) strand; PAM type: YTN; PAM sequence: TTC
ttagcttttttaactttgag

SEQ ID NO: 320151 - DNA, 20 bp, Artificial Sequence
  Description of Artificial Sequence: Synthetic oligonucleotide
  Target: LAMA2; (+) strand; PAM type: YTN; PAM sequence: CTT
agcttttttaactttgagtt

SEQ ID NO: 320152 - DNA, 20 bp, Artificial Sequence
  Description of Artificial Sequence: Synthetic oligonucleotide
  Target: LAMA2; (+) strand; PAM type: YTN; PAM sequence: TTA
gcttttttaactttgagttt

SEQ ID NO: 320153 - DNA, 20 bp, Artificial Sequence
  Description of Artificial Sequence: Synthetic oligonucleotide
  Target: LAMA2; (+) strand; PAM type: YTN; PAM sequence: CTT
ttttaactttgagttttaaa

SEQ ID NO: 320154 - DNA, 20 bp, Artificial Sequence
  Description of Artificial Sequence: Synthetic oligonucleotide
  Target: LAMA2; (+) strand; PAM type: YTN; PAM sequence: TTT
tttaactttgagttttaaaa

SEQ ID NO: 320155 - DNA, 20 bp, Artificial Sequence
  Description of Artificial Sequence: Synthetic oligonucleotide
  Target: LAMA2; (+) strand; PAM type: YTN; PAM sequence: TTT
ttaactttgagttttaaaaa

SEQ ID NO: 320156 - DNA, 20 bp, Artificial Sequence
  Description of Artificial Sequence: Synthetic oligonucleotide
  Target: LAMA2; (+) strand; PAM type: YTN; PAM sequence: TTT
taactttgagttttaaaaat

SEQ ID NO: 320157 - DNA, 20 bp, Artificial Sequence
  Description of Artificial Sequence: Synthetic oligonucleotide
  Target: LAMA2; (+) strand; PAM type: YTN; PAM sequence: TTT
aactttgagttttaaaaatc

SEQ ID NO: 320158 - DNA, 20 bp, Artificial Sequence
  Description of Artificial Sequence: Synthetic oligonucleotide
  Target: LAMA2; (+) strand; PAM type: YTN; PAM sequence: TTA
actttgagttttaaaaatca

SEQ ID NO: 320159 - DNA, 20 bp, Artificial Sequence
  Description of Artificial Sequence: Synthetic oligonucleotide
  Target: LAMA2; (+) strand; PAM type: YTN; PAM sequence: CTT
tgagttttaaaaatcatgat

SEQ ID NO: 320160 - DNA, 20 bp, Artificial Sequence
  Description of Artificial Sequence: Synthetic oligonucleotide
  Target: LAMA2; (+) strand; PAM type: YTN; PAM sequence: TTT
gagttttaaaaatcatgatg

SEQ ID NO: 320161 - DNA, 20 bp, Artificial Sequence
  Description of Artificial Sequence: Synthetic oligonucleotide
  Target: LAMA2; (+) strand; PAM type: YTN; PAM sequence: TTG
agttttaaaaatcatgatgg

SEQ ID NO: 320162 - DNA, 20 bp, Artificial Sequence
  Description of Artificial Sequence: Synthetic oligonucleotide
  Target: LAMA2; (+) strand; PAM type: YTN; PAM sequence: TTT
taaaaatcatgatggagaga

SEQ ID NO: 320163 - DNA, 20 bp, Artificial Sequence
  Description of Artificial Sequence: Synthetic oligonucleotide
  Target: LAMA2; (+) strand; PAM type: YTN; PAM sequence: TTT
aaaaatcatgatggagagaa

SEQ ID NO: 320164 - DNA, 20 bp, Artificial Sequence
  Description of Artificial Sequence: Synthetic oligonucleotide
  Target: LAMA2; (+) strand; PAM type: YTN; PAM sequence: TTA
aaaatcatgatggagagaaa

SEQ ID NO: 320165 - DNA, 20 bp, Artificial Sequence
  Description of Artificial Sequence: Synthetic oligonucleotide
  Target: LAMA2; (+) strand; PAM type: YTN; PAM sequence: TTT
agttcttaacttttattttc

SEQ ID NO: 320166 - DNA, 20 bp, Artificial Sequence
  Description of Artificial Sequence: Synthetic oligonucleotide
  Target: LAMA2; (+) strand; PAM type: YTN; PAM sequence: TTA
gttcttaacttttattttct

SEQ ID NO: 320167 - DNA, 20 bp, Artificial Sequence
  Description of Artificial Sequence: Synthetic oligonucleotide
  Target: LAMA2; (+) strand; PAM type: YTN; PAM sequence: TTC
ttaacttttattttctgggc

SEQ ID NO: 320168 - DNA, 20 bp, Artificial Sequence
  Description of Artificial Sequence: Synthetic oligonucleotide
  Target: LAMA2; (+) strand; PAM type: YTN; PAM sequence: CTT
aacttttattttctgggctt

SEQ ID NO: 320169 - DNA, 20 bp, Artificial Sequence
  Description of Artificial Sequence: Synthetic oligonucleotide
  Target: LAMA2; (+) strand; PAM type: YTN; PAM sequence: TTA
acttttattttctgggcttg

SEQ ID NO: 320170 - DNA, 20 bp, Artificial Sequence
  Description of Artificial Sequence: Synthetic oligonucleotide
  Target: LAMA2; (+) strand; PAM type: YTN; PAM sequence: CTT
ttattttctgggcttgatga

SEQ ID NO: 320171 - DNA, 20 bp, Artificial Sequence
  Description of Artificial Sequence: Synthetic oligonucleotide
  Target: LAMA2; (+) strand; PAM type: YTN; PAM sequence: TTT
tattttctgggcttgatgaa

SEQ ID NO: 320172 - DNA, 20 bp, Artificial Sequence
  Description of Artificial Sequence: Synthetic oligonucleotide
  Target: LAMA2; (+) strand; PAM type: YTN; PAM sequence: TTT
attttctgggcttgatgaag

SEQ ID NO: 320173 - DNA, 20 bp, Artificial Sequence
  Description of Artificial Sequence: Synthetic oligonucleotide
  Target: LAMA2; (+) strand; PAM type: YTN; PAM sequence: TTA
ttttctgggcttgatgaaga

SEQ ID NO: 320174 - DNA, 20 bp, Artificial Sequence
  Description of Artificial Sequence: Synthetic oligonucleotide
  Target: LAMA2; (+) strand; PAM type: YTN; PAM sequence: TTT
tctgggcttgatgaagattg

SEQ ID NO: 320175 - DNA, 20 bp, Artificial Sequence
  Description of Artificial Sequence: Synthetic oligonucleotide
  Target: LAMA2; (+) strand; PAM type: YTN; PAM sequence: TTT
ctgggcttgatgaagattga

SEQ ID NO: 320176 - DNA, 20 bp, Artificial Sequence
  Description of Artificial Sequence: Synthetic oligonucleotide
  Target: LAMA2; (+) strand; PAM type: YTN; PAM sequence: TTC
tgggcttgatgaagattgaa

SEQ ID NO: 320177 - DNA, 20 bp, Artificial Sequence
  Description of Artificial Sequence: Synthetic oligonucleotide
  Target: LAMA2; (+) strand; PAM type: YTN; PAM sequence: CTG
ggcttgatgaagattgaatt

SEQ ID NO: 320178 - DNA, 20 bp, Artificial Sequence
  Description of Artificial Sequence: Synthetic oligonucleotide
  Target: LAMA2; (+) strand; PAM type: YTN; PAM sequence: CTT
gatgaagattgaatttcatc

SEQ ID NO: 320179 - DNA, 20 bp, Artificial Sequence
  Description of Artificial Sequence: Synthetic oligonucleotide
  Target: LAMA2; (+) strand; PAM type: YTN; PAM sequence: TTG
atgaagattgaatttcatca

SEQ ID NO: 320180 - DNA, 20 bp, Artificial Sequence
  Description of Artificial Sequence: Synthetic oligonucleotide
  Target: LAMA2; (+) strand; PAM type: YTN; PAM sequence: TTG
aatttcatcagagatgagct

SEQ ID NO: 320181 - DNA, 20 bp, Artificial Sequence
  Description of Artificial Sequence: Synthetic oligonucleotide
  Target: LAMA2; (+) strand; PAM type: YTN; PAM sequence: TTT
catcagagatgagctaaaca

SEQ ID NO: 320182 - DNA, 20 bp, Artificial Sequence
  Description of Artificial Sequence: Synthetic oligonucleotide
  Target: LAMA2; (+) strand; PAM type: YTN; PAM sequence: TTC
atcagagatgagctaaacaa

SEQ ID NO: 320183 - DNA, 20 bp, Artificial Sequence
  Description of Artificial Sequence: Synthetic oligonucleotide
  Target: LAMA2; (+) strand; PAM type: YTN; PAM sequence: CTA
aacaaattaaaactgaagca

SEQ ID NO: 320184 - DNA, 20 bp, Artificial Sequence
  Description of Artificial Sequence: Synthetic oligonucleotide
  Target: LAMA2; (+) strand; PAM type: YTN; PAM sequence: TTA
aaactgaagcatttaattta

SEQ ID NO: 320185 - DNA, 20 bp, Artificial Sequence
  Description of Artificial Sequence: Synthetic oligonucleotide
  Target: LAMA2; (+) strand; PAM type: YTN; PAM sequence: CTG
aagcatttaatttagaaaac

SEQ ID NO: 320186 - DNA, 20 bp, Artificial Sequence
  Description of Artificial Sequence: Synthetic oligonucleotide
  Target: LAMA2; (+) strand; PAM type: YTN; PAM sequence: TTT
aatttagaaaactcaaattt

SEQ ID NO: 320187 - DNA, 20 bp, Artificial Sequence
  Description of Artificial Sequence: Synthetic oligonucleotide
  Target: LAMA2; (+) strand; PAM type: YTN; PAM sequence: TTA
atttagaaaactcaaatttc

SEQ ID NO: 320188 - DNA, 20 bp, Artificial Sequence
  Description of Artificial Sequence: Synthetic oligonucleotide
  Target: LAMA2; (+) strand; PAM type: YTN; PAM sequence: TTT
agaaaactcaaatttcttca

SEQ ID NO: 320189 - DNA, 20 bp, Artificial Sequence
  Description of Artificial Sequence: Synthetic oligonucleotide
  Target: LAMA2; (+) strand; PAM type: YTN; PAM sequence: TTA
gaaaactcaaatttcttcag

SEQ ID NO: 320190 - DNA, 20 bp, Artificial Sequence
  Description of Artificial Sequence: Synthetic oligonucleotide
  Target: LAMA2; (+) strand; PAM type: YTN; PAM sequence: CTC
aaatttcttcagcctaaaat

SEQ ID NO: 320191 - DNA, 20 bp, Artificial Sequence
  Description of Artificial Sequence: Synthetic oligonucleotide
  Target: LAMA2; (+) strand; PAM type: YTN; PAM sequence: TTT
cttcagcctaaaattgttca

SEQ ID NO: 320192 - DNA, 20 bp, Artificial Sequence
  Description of Artificial Sequence: Synthetic oligonucleotide
  Target: LAMA2; (+) strand; PAM type: YTN; PAM sequence: TTC
ttcagcctaaaattgttcat

SEQ ID NO: 320193 - DNA, 20 bp, Artificial Sequence
  Description of Artificial Sequence: Synthetic oligonucleotide
  Target: LAMA2; (+) strand; PAM type: YTN; PAM sequence: CTT
cagcctaaaattgttcattt

SEQ ID NO: 320194 - DNA, 20 bp, Artificial Sequence
  Description of Artificial Sequence: Synthetic oligonucleotide
  Target: LAMA2; (+) strand; PAM type: YTN; PAM sequence: TTC
agcctaaaattgttcattta

SEQ ID NO: 320195 - DNA, 20 bp, Artificial Sequence
  Description of Artificial Sequence: Synthetic oligonucleotide
  Target: LAMA2; (+) strand; PAM type: YTN; PAM sequence: CTA
aaattgttcatttaaacaag

SEQ ID NO: 320196 - DNA, 20 bp, Artificial Sequence
  Description of Artificial Sequence: Synthetic oligonucleotide
  Target: LAMA2; (+) strand; PAM type: YTN; PAM sequence: TTG
ttcatttaaacaagtttgtt

SEQ ID NO: 320197 - DNA, 20 bp, Artificial Sequence
  Description of Artificial Sequence: Synthetic oligonucleotide
  Target: LAMA2; (+) strand; PAM type: YTN; PAM sequence: TTC
atttaaacaagtttgttaga

SEQ ID NO: 320198 - DNA, 20 bp, Artificial Sequence
  Description of Artificial Sequence: Synthetic oligonucleotide
  Target: LAMA2; (+) strand; PAM type: YTN; PAM sequence: TTT
aaacaagtttgttagattct

SEQ ID NO: 320199 - DNA, 20 bp, Artificial Sequence
  Description of Artificial Sequence: Synthetic oligonucleotide
  Target: LAMA2; (+) strand; PAM type: YTN; PAM sequence: TTA
aacaagtttgttagattctc

SEQ ID NO: 320200 - DNA, 20 bp, Artificial Sequence
  Description of Artificial Sequence: Synthetic oligonucleotide
  Target: LAMA2; (+) strand; PAM type: YTN; PAM sequence: TTT
gttagattctcaaattaata

SEQ ID NO: 320201 - DNA, 20 bp, Artificial Sequence
  Description of Artificial Sequence: Synthetic oligonucleotide
  Target: LAMA2; (+) strand; PAM type: YTN; PAM sequence: TTG
ttagattctcaaattaatag

SEQ ID NO: 320202 - DNA, 20 bp, Artificial Sequence
  Description of Artificial Sequence: Synthetic oligonucleotide
  Target: LAMA2; (+) strand; PAM type: YTN; PAM sequence: TTA
gattctcaaattaataggat

SEQ ID NO: 320203 - DNA, 20 bp, Artificial Sequence
  Description of Artificial Sequence: Synthetic oligonucleotide
  Target: LAMA2; (+) strand; PAM type: YTN; PAM sequence: TTC
tcaaattaataggatactga

SEQ ID NO: 320204 - DNA, 20 bp, Artificial Sequence
  Description of Artificial Sequence: Synthetic oligonucleotide
  Target: LAMA2; (+) strand; PAM type: YTN; PAM sequence: CTC
aaattaataggatactgaat

SEQ ID NO: 320205 - DNA, 20 bp, Artificial Sequence
  Description of Artificial Sequence: Synthetic oligonucleotide
  Target: LAMA2; (+) strand; PAM type: YTN; PAM sequence: TTA
ataggatactgaataaatat

SEQ ID NO: 320206 - DNA, 20 bp, Artificial Sequence
  Description of Artificial Sequence: Synthetic oligonucleotide
  Target: LAMA2; (+) strand; PAM type: YTN; PAM sequence: CTG
aataaatatgaaattattct

SEQ ID NO: 320207 - DNA, 20 bp, Artificial Sequence
  Description of Artificial Sequence: Synthetic oligonucleotide
  Target: LAMA2; (+) strand; PAM type: YTN; PAM sequence: TTA
ttctttcctggaaagttaaa

SEQ ID NO: 320208 - DNA, 20 bp, Artificial Sequence
  Description of Artificial Sequence: Synthetic oligonucleotide
  Target: LAMA2; (+) strand; PAM type: YTN; PAM sequence: TTC
tttcctggaaagttaaatgg

SEQ ID NO: 320209 - DNA, 20 bp, Artificial Sequence
  Description of Artificial Sequence: Synthetic oligonucleotide
  Target: LAMA2; (+) strand; PAM type: YTN; PAM sequence: CTT
tcctggaaagttaaatggaa

SEQ ID NO: 320210 - DNA, 20 bp, Artificial Sequence
  Description of Artificial Sequence: Synthetic oligonucleotide
  Target: LAMA2; (+) strand; PAM type: YTN; PAM sequence: TTT
cctggaaagttaaatggaaa

SEQ ID NO: 320211 - DNA, 20 bp, Artificial Sequence
  Description of Artificial Sequence: Synthetic oligonucleotide
  Target: LAMA2; (+) strand; PAM type: YTN; PAM sequence: TTC
ctggaaagttaaatggaaaa

SEQ ID NO: 320212 - DNA, 20 bp, Artificial Sequence
  Description of Artificial Sequence: Synthetic oligonucleotide
  Target: LAMA2; (+) strand; PAM type: YTN; PAM sequence: CTG
gaaagttaaatggaaaaaca

SEQ ID NO: 320213 - DNA, 20 bp, Artificial Sequence
  Description of Artificial Sequence: Synthetic oligonucleotide
  Target: LAMA2; (+) strand; PAM type: YTN; PAM sequence: TTA
aatggaaaaacaggacagaa

SEQ ID NO: 320214 - DNA, 20 bp, Artificial Sequence
  Description of Artificial Sequence: Synthetic oligonucleotide
  Target: LAMA2; (+) strand; PAM type: YTN; PAM sequence: CTA
ttttataactaatacatatt

SEQ ID NO: 320215 - DNA, 20 bp, Artificial Sequence
  Description of Artificial Sequence: Synthetic oligonucleotide
  Target: LAMA2; (+) strand; PAM type: YTN; PAM sequence: TTT
tataactaatacatattaag

SEQ ID NO: 320216 - DNA, 20 bp, Artificial Sequence
  Description of Artificial Sequence: Synthetic oligonucleotide
  Target: LAMA2; (+) strand; PAM type: YTN; PAM sequence: TTT
ataactaatacatattaagt

SEQ ID NO: 320217 - DNA, 20 bp, Artificial Sequence
  Description of Artificial Sequence: Synthetic oligonucleotide
  Target: LAMA2; (+) strand; PAM type: YTN; PAM sequence: TTA
taactaatacatattaagtc

SEQ ID NO: 320218 - DNA, 20 bp, Artificial Sequence
  Description of Artificial Sequence: Synthetic oligonucleotide
  Target: LAMA2; (+) strand; PAM type: YTN; PAM sequence: CTA
atacatattaagtcaagaaa

SEQ ID NO: 320219 - DNA, 20 bp, Artificial Sequence
  Description of Artificial Sequence: Synthetic oligonucleotide
  Target: LAMA2; (+) strand; PAM type: YTN; PAM sequence: TTA
agtcaagaaatagtaaagga

SEQ ID NO: 320220 - DNA, 20 bp, Artificial Sequence
  Description of Artificial Sequence: Synthetic oligonucleotide
  Target: LAMA2; (+) strand; PAM type: YTN; PAM sequence: TTA
tttgtcttcaagaaaacatc

SEQ ID NO: 320221 - DNA, 20 bp, Artificial Sequence
  Description of Artificial Sequence: Synthetic oligonucleotide
  Target: LAMA2; (+) strand; PAM type: YTN; PAM sequence: TTT
gtcttcaagaaaacatcctg

SEQ ID NO: 320222 - DNA, 20 bp, Artificial Sequence
  Description of Artificial Sequence: Synthetic oligonucleotide
  Target: LAMA2; (+) strand; PAM type: YTN; PAM sequence: TTG
tcttcaagaaaacatcctgt

SEQ ID NO: 320223 - DNA, 20 bp, Artificial Sequence
  Description of Artificial Sequence: Synthetic oligonucleotide
  Target: LAMA2; (+) strand; PAM type: YTN; PAM sequence: CTT
caagaaaacatcctgtaaag

SEQ ID NO: 320224 - DNA, 20 bp, Artificial Sequence
  Description of Artificial Sequence: Synthetic oligonucleotide
  Target: LAMA2; (+) strand; PAM type: YTN; PAM sequence: TTC
aagaaaacatcctgtaaaga

SEQ ID NO: 320225 - DNA, 20 bp, Artificial Sequence
  Description of Artificial Sequence: Synthetic oligonucleotide
  Target: LAMA2; (+) strand; PAM type: YTN; PAM sequence: CTG
taaagaatggcaatgttggt

SEQ ID NO: 320226 - DNA, 20 bp, Artificial Sequence
  Description of Artificial Sequence: Synthetic oligonucleotide
  Target: LAMA2; (+) strand; PAM type: YTN; PAM sequence: TTG
gtggtatatagatgtaaaat

SEQ ID NO: 320227 - DNA, 20 bp, Artificial Sequence
  Description of Artificial Sequence: Synthetic oligonucleotide
  Target: LAMA2; (+) strand; PAM type: YTN; PAM sequence: CTT
aaaaagaatgattatctaga

SEQ ID NO: 320228 - DNA, 20 bp, Artificial Sequence
  Description of Artificial Sequence: Synthetic oligonucleotide
  Target: LAMA2; (+) strand; PAM type: YTN; PAM sequence: TTA
aaaagaatgattatctagaa

SEQ ID NO: 320229 - DNA, 20 bp, Artificial Sequence
  Description of Artificial Sequence: Synthetic oligonucleotide
  Target: LAMA2; (+) strand; PAM type: YTN; PAM sequence: TTA
tctagaagatgttatacatg

SEQ ID NO: 320230 - DNA, 20 bp, Artificial Sequence
  Description of Artificial Sequence: Synthetic oligonucleotide
  Target: LAMA2; (+) strand; PAM type: YTN; PAM sequence: CTA
gaagatgttatacatgttat

SEQ ID NO: 320231 - DNA, 20 bp, Artificial Sequence
  Description of Artificial Sequence: Synthetic oligonucleotide
  Target: LAMA2; (+) strand; PAM type: YTN; PAM sequence: TTA
tacatgttataattatcttt

SEQ ID NO: 320232 - DNA, 20 bp, Artificial Sequence
  Description of Artificial Sequence: Synthetic oligonucleotide
  Target: LAMA2; (+) strand; PAM type: YTN; PAM sequence: TTA
taattatctttaagtctgcc

SEQ ID NO: 320233 - DNA, 20 bp, Artificial Sequence
  Description of Artificial Sequence: Synthetic oligonucleotide
  Target: LAMA2; (+) strand; PAM type: YTN; PAM sequence: TTA
tctttaagtctgccttctct

SEQ ID NO: 320234 - DNA, 20 bp, Artificial Sequence
  Description of Artificial Sequence: Synthetic oligonucleotide
  Target: LAMA2; (+) strand; PAM type: YTN; PAM sequence: CTT
taagtctgccttctctaatt

SEQ ID NO: 320235 - DNA, 20 bp, Artificial Sequence
  Description of Artificial Sequence: Synthetic oligonucleotide
  Target: LAMA2; (+) strand; PAM type: YTN; PAM sequence: TTT
aagtctgccttctctaattc

SEQ ID NO: 320236 - DNA, 20 bp, Artificial Sequence
  Description of Artificial Sequence: Synthetic oligonucleotide
  Target: LAMA2; (+) strand; PAM type: YTN; PAM sequence: TTA
agtctgccttctctaattct

SEQ ID NO: 320237 - DNA, 20 bp, Artificial Sequence
  Description of Artificial Sequence: Synthetic oligonucleotide
  Target: LAMA2; (+) strand; PAM type: YTN; PAM sequence: CTG
ccttctctaattctgtaagt

SEQ ID NO: 320238 - DNA, 20 bp, Artificial Sequence
  Description of Artificial Sequence: Synthetic oligonucleotide
  Target: LAMA2; (+) strand; PAM type: YTN; PAM sequence: CTT
ctctaattctgtaagttaaa

SEQ ID NO: 320239 - DNA, 20 bp, Artificial Sequence
  Description of Artificial Sequence: Synthetic oligonucleotide
  Target: LAMA2; (+) strand; PAM type: YTN; PAM sequence: TTC
tctaattctgtaagttaaac

SEQ ID NO: 320240 - DNA, 20 bp, Artificial Sequence
  Description of Artificial Sequence: Synthetic oligonucleotide
  Target: LAMA2; (+) strand; PAM type: YTN; PAM sequence: CTC
taattctgtaagttaaacac

SEQ ID NO: 320241 - DNA, 20 bp, Artificial Sequence
  Description of Artificial Sequence: Synthetic oligonucleotide
  Target: LAMA2; (+) strand; PAM type: YTN; PAM sequence: CTA
attctgtaagttaaacacaa

SEQ ID NO: 320242 - DNA, 20 bp, Artificial Sequence
  Description of Artificial Sequence: Synthetic oligonucleotide
  Target: LAMA2; (+) strand; PAM type: YTN; PAM sequence: TTC
tgtaagttaaacacaaatat

SEQ ID NO: 320243 - DNA, 20 bp, Artificial Sequence
  Description of Artificial Sequence: Synthetic oligonucleotide
  Target: LAMA2; (+) strand; PAM type: YTN; PAM sequence: CTG
taagttaaacacaaatattg

SEQ ID NO: 320244 - DNA, 20 bp, Artificial Sequence
  Description of Artificial Sequence: Synthetic oligonucleotide
  Target: LAMA2; (+) strand; PAM type: YTN; PAM sequence: TTA
aacacaaatattgatacttt

SEQ ID NO: 320245 - DNA, 20 bp, Artificial Sequence
  Description of Artificial Sequence: Synthetic oligonucleotide
  Target: LAMA2; (+) strand; PAM type: YTN; PAM sequence: TTG
atactttaatttttaaaata

SEQ ID NO: 320246 - DNA, 20 bp, Artificial Sequence
  Description of Artificial Sequence: Synthetic oligonucleotide
  Target: LAMA2; (+) strand; PAM type: YTN; PAM sequence: CTT
taatttttaaaatattttta

SEQ ID NO: 320247 - DNA, 20 bp, Artificial Sequence
  Description of Artificial Sequence: Synthetic oligonucleotide
  Target: LAMA2; (+) strand; PAM type: YTN; PAM sequence: TTT
aatttttaaaatatttttaa

SEQ ID NO: 320248 - DNA, 20 bp, Artificial Sequence
  Description of Artificial Sequence: Synthetic oligonucleotide
  Target: LAMA2; (+) strand; PAM type: YTN; PAM sequence: TTA
atttttaaaatatttttaaa

SEQ ID NO: 320249 - DNA, 20 bp, Artificial Sequence
  Description of Artificial Sequence: Synthetic oligonucleotide
  Target: LAMA2; (+) strand; PAM type: YTN; PAM sequence: TTT
ttaaaatatttttaaaagta

SEQ ID NO: 320250 - DNA, 20 bp, Artificial Sequence
  Description of Artificial Sequence: Synthetic oligonucleotide
  Target: LAMA2; (+) strand; PAM type: YTN; PAM sequence: TTT
taaaatatttttaaaagtag

SEQ ID NO: 320251 - DNA, 20 bp, Artificial Sequence
  Description of Artificial Sequence: Synthetic oligonucleotide
  Target: LAMA2; (+) strand; PAM type: YTN; PAM sequence: TTT
aaaatatttttaaaagtagc

SEQ ID NO: 320252 - DNA, 20 bp, Artificial Sequence
  Description of Artificial Sequence: Synthetic oligonucleotide
  Target: LAMA2; (+) strand; PAM type: YTN; PAM sequence: TTA
aaatatttttaaaagtagct

SEQ ID NO: 320253 - DNA, 20 bp, Artificial Sequence
  Description of Artificial Sequence: Synthetic oligonucleotide
  Target: LAMA2; (+) strand; PAM type: YTN; PAM sequence: TTT
ttaaaagtagctgaaaatgg

SEQ ID NO: 320254 - DNA, 20 bp, Artificial Sequence
  Description of Artificial Sequence: Synthetic oligonucleotide
  Target: LAMA2; (+) strand; PAM type: YTN; PAM sequence: TTT
taaaagtagctgaaaatggg

SEQ ID NO: 320255 - DNA, 20 bp, Artificial Sequence
  Description of Artificial Sequence: Synthetic oligonucleotide
  Target: LAMA2; (+) strand; PAM type: YTN; PAM sequence: TTT
aaaagtagctgaaaatgggg

SEQ ID NO: 320256 - DNA, 20 bp, Artificial Sequence
  Description of Artificial Sequence: Synthetic oligonucleotide
  Target: LAMA2; (+) strand; PAM type: YTN; PAM sequence: TTA
aaagtagctgaaaatggggc

SEQ ID NO: 320257 - DNA, 20 bp, Artificial Sequence
  Description of Artificial Sequence: Synthetic oligonucleotide
  Target: LAMA2; (+) strand; PAM type: YTN; PAM sequence: CTG
aaaatggggctccatccttc

SEQ ID NO: 320258 - DNA, 20 bp, Artificial Sequence
  Description of Artificial Sequence: Synthetic oligonucleotide
  Target: LAMA2; (+) strand; PAM type: YTN; PAM sequence: CTC
catccttcaaagttctaaca

SEQ ID NO: 320259 - DNA, 20 bp, Artificial Sequence
  Description of Artificial Sequence: Synthetic oligonucleotide
  Target: LAMA2; (+) strand; PAM type: YTN; PAM sequence: CTT
caaagttctaacaatacaat

SEQ ID NO: 320260 - DNA, 20 bp, Artificial Sequence
  Description of Artificial Sequence: Synthetic oligonucleotide
  Target: LAMA2; (+) strand; PAM type: YTN; PAM sequence: TTC
aaagttctaacaatacaatt

SEQ ID NO: 320261 - DNA, 20 bp, Artificial Sequence
  Description of Artificial Sequence: Synthetic oligonucleotide
  Target: LAMA2; (+) strand; PAM type: YTN; PAM sequence: TTC
taacaatacaatttatagta

SEQ ID NO: 320262 - DNA, 20 bp, Artificial Sequence
  Description of Artificial Sequence: Synthetic oligonucleotide
  Target: LAMA2; (+) strand; PAM type: YTN; PAM sequence: CTA
acaatacaatttatagtaaa

SEQ ID NO: 320263 - DNA, 20 bp, Artificial Sequence
  Description of Artificial Sequence: Synthetic oligonucleotide
  Target: LAMA2; (+) strand; PAM type: YTN; PAM sequence: TTT
atagtaaagaatatgtatga

SEQ ID NO: 320264 - DNA, 20 bp, Artificial Sequence
  Description of Artificial Sequence: Synthetic oligonucleotide
  Target: LAMA2; (+) strand; PAM type: YTN; PAM sequence: TTA
tagtaaagaatatgtatgag

SEQ ID NO: 320265 - DNA, 20 bp, Artificial Sequence
  Description of Artificial Sequence: Synthetic oligonucleotide
  Target: LAMA2; (+) strand; PAM type: YTN; PAM sequence: TTT
gttcttagaagttcagaaaa

SEQ ID NO: 320266 - DNA, 20 bp, Artificial Sequence
  Description of Artificial Sequence: Synthetic oligonucleotide
  Target: LAMA2; (+) strand; PAM type: YTN; PAM sequence: TTG
ttcttagaagttcagaaaaa

SEQ ID NO: 320267 - DNA, 20 bp, Artificial Sequence
  Description of Artificial Sequence: Synthetic oligonucleotide
  Target: LAMA2; (+) strand; PAM type: YTN; PAM sequence: TTC
ttagaagttcagaaaaatca

SEQ ID NO: 320268 - DNA, 20 bp, Artificial Sequence
  Description of Artificial Sequence: Synthetic oligonucleotide
  Target: LAMA2; (+) strand; PAM type: YTN; PAM sequence: CTT
agaagttcagaaaaatcaaa

SEQ ID NO: 320269 - DNA, 20 bp, Artificial Sequence
  Description of Artificial Sequence: Synthetic oligonucleotide
  Target: LAMA2; (+) strand; PAM type: YTN; PAM sequence: TTA
gaagttcagaaaaatcaaat

SEQ ID NO: 320270 - DNA, 20 bp, Artificial Sequence
  Description of Artificial Sequence: Synthetic oligonucleotide
  Target: LAMA2; (+) strand; PAM type: YTN; PAM sequence: TTC
agaaaaatcaaatatataat

SEQ ID NO: 320271 - DNA, 20 bp, Artificial Sequence
  Description of Artificial Sequence: Synthetic oligonucleotide
  Target: LAMA2; (+) strand; PAM type: YTN; PAM sequence: TTA
aagaggagaaaggggtgact

SEQ ID NO: 320272 - DNA, 20 bp, Artificial Sequence
  Description of Artificial Sequence: Synthetic oligonucleotide
  Target: LAMA2; (+) strand; PAM type: YTN; PAM sequence: CTG
attctgaatcaagtgagttt

SEQ ID NO: 320273 - DNA, 20 bp, Artificial Sequence
  Description of Artificial Sequence: Synthetic oligonucleotide
  Target: LAMA2; (+) strand; PAM type: YTN; PAM sequence: TTC
tgaatcaagtgagttttagc

SEQ ID NO: 320274 - DNA, 20 bp, Artificial Sequence
  Description of Artificial Sequence: Synthetic oligonucleotide
  Target: LAMA2; (+) strand; PAM type: YTN; PAM sequence: CTG
aatcaagtgagttttagctt

SEQ ID NO: 320275 - DNA, 20 bp, Artificial Sequence
  Description of Artificial Sequence: Synthetic oligonucleotide
  Target: LAMA2; (+) strand; PAM type: YTN; PAM sequence: TTT
tagcttcttttaagtgaaat

SEQ ID NO: 320276 - DNA, 20 bp, Artificial Sequence
  Description of Artificial Sequence: Synthetic oligonucleotide
  Target: LAMA2; (+) strand; PAM type: YTN; PAM sequence: TTT
agcttcttttaagtgaaatc

SEQ ID NO: 320277 - DNA, 20 bp, Artificial Sequence
  Description of Artificial Sequence: Synthetic oligonucleotide
  Target: LAMA2; (+) strand; PAM type: YTN; PAM sequence: TTA
gcttcttttaagtgaaatca

SEQ ID NO: 320278 - DNA, 20 bp, Artificial Sequence
  Description of Artificial Sequence: Synthetic oligonucleotide
  Target: LAMA2; (+) strand; PAM type: YTN; PAM sequence: CTT
cttttaagtgaaatcatgca

SEQ ID NO: 320279 - DNA, 20 bp, Artificial Sequence
  Description of Artificial Sequence: Synthetic oligonucleotide
  Target: LAMA2; (+) strand; PAM type: YTN; PAM sequence: TTC
ttttaagtgaaatcatgcat

SEQ ID NO: 320280 - DNA, 20 bp, Artificial Sequence
  Description of Artificial Sequence: Synthetic oligonucleotide
  Target: LAMA2; (+) strand; PAM type: YTN; PAM sequence: CTT
ttaagtgaaatcatgcatgc

SEQ ID NO: 320281 - DNA, 20 bp, Artificial Sequence
  Description of Artificial Sequence: Synthetic oligonucleotide
  Target: LAMA2; (+) strand; PAM type: YTN; PAM sequence: TTT
taagtgaaatcatgcatgct

SEQ ID NO: 320282 - DNA, 20 bp, Artificial Sequence
  Description of Artificial Sequence: Synthetic oligonucleotide
  Target: LAMA2; (+) strand; PAM type: YTN; PAM sequence: TTT
aagtgaaatcatgcatgctc

SEQ ID NO: 320283 - DNA, 20 bp, Artificial Sequence
  Description of Artificial Sequence: Synthetic oligonucleotide
  Target: LAMA2; (+) strand; PAM type: YTN; PAM sequence: TTA
agtgaaatcatgcatgctcc

SEQ ID NO: 320284 - DNA, 20 bp, Artificial Sequence
  Description of Artificial Sequence: Synthetic oligonucleotide
  Target: LAMA2; (+) strand; PAM type: YTN; PAM sequence: CTC
ctcacatatgctaatgtata

SEQ ID NO: 320285 - DNA, 20 bp, Artificial Sequence
  Description of Artificial Sequence: Synthetic oligonucleotide
  Target: LAMA2; (+) strand; PAM type: YTN; PAM sequence: CTC
acatatgctaatgtataaaa

SEQ ID NO: 320286 - DNA, 20 bp, Artificial Sequence
  Description of Artificial Sequence: Synthetic oligonucleotide
  Target: LAMA2; (+) strand; PAM type: YTN; PAM sequence: CTA
atgtataaaacatcaattta

SEQ ID NO: 320287 - DNA, 20 bp, Artificial Sequence
  Description of Artificial Sequence: Synthetic oligonucleotide
  Target: LAMA2; (+) strand; PAM type: YTN; PAM sequence: TTT
atagaatagtatttgaatta

SEQ ID NO: 320288 - DNA, 20 bp, Artificial Sequence
  Description of Artificial Sequence: Synthetic oligonucleotide
  Target: LAMA2; (+) strand; PAM type: YTN; PAM sequence: TTA
tagaatagtatttgaattac

SEQ ID NO: 320289 - DNA, 20 bp, Artificial Sequence
  Description of Artificial Sequence: Synthetic oligonucleotide
  Target: LAMA2; (+) strand; PAM type: YTN; PAM sequence: TTT
gaattacctgcctaggcttt

SEQ ID NO: 320290 - DNA, 20 bp, Artificial Sequence
  Description of Artificial Sequence: Synthetic oligonucleotide
  Target: LAMA2; (+) strand; PAM type: YTN; PAM sequence: TTG
aattacctgcctaggctttg

SEQ ID NO: 320291 - DNA, 20 bp, Artificial Sequence
  Description of Artificial Sequence: Synthetic oligonucleotide
  Target: LAMA2; (+) strand; PAM type: YTN; PAM sequence: TTA
cctgcctaggctttgcaagc

SEQ ID NO: 320292 - DNA, 20 bp, Artificial Sequence
  Description of Artificial Sequence: Synthetic oligonucleotide
  Target: LAMA2; (+) strand; PAM type: YTN; PAM sequence: CTG
cctaggctttgcaagcctag

SEQ ID NO: 320293 - DNA, 20 bp, Artificial Sequence
  Description of Artificial Sequence: Synthetic oligonucleotide
  Target: LAMA2; (+) strand; PAM type: YTN; PAM sequence: CTA
ggctttgcaagcctagacct

SEQ ID NO: 320294 - DNA, 20 bp, Artificial Sequence
  Description of Artificial Sequence: Synthetic oligonucleotide
  Target: LAMA2; (+) strand; PAM type: YTN; PAM sequence: CTT
tgcaagcctagacctttgaa

SEQ ID NO: 320295 - DNA, 20 bp, Artificial Sequence
  Description of Artificial Sequence: Synthetic oligonucleotide
  Target: LAMA2; (+) strand; PAM type: YTN; PAM sequence: TTT
gcaagcctagacctttgaat

SEQ ID NO: 320296 - DNA, 20 bp, Artificial Sequence
  Description of Artificial Sequence: Synthetic oligonucleotide
  Target: LAMA2; (+) strand; PAM type: YTN; PAM sequence: TTG
caagcctagacctttgaatt

SEQ ID NO: 320297 - DNA, 20 bp, Artificial Sequence
  Description of Artificial Sequence: Synthetic oligonucleotide
  Target: LAMA2; (+) strand; PAM type: YTN; PAM sequence: CTA
gacctttgaatttgcattca

SEQ ID NO: 320298 - DNA, 20 bp, Artificial Sequence
  Description of Artificial Sequence: Synthetic oligonucleotide
  Target: LAMA2; (+) strand; PAM type: YTN; PAM sequence: CTT
tgaatttgcattcaaattct

SEQ ID NO: 320299 - DNA, 20 bp, Artificial Sequence
  Description of Artificial Sequence: Synthetic oligonucleotide
  Target: LAMA2; (+) strand; PAM type: YTN; PAM sequence: TTT
gaatttgcattcaaattctt

SEQ ID NO: 320300 - DNA, 20 bp, Artificial Sequence
  Description of Artificial Sequence: Synthetic oligonucleotide
  Target: LAMA2; (+) strand; PAM type: YTN; PAM sequence: TTG
aatttgcattcaaattcttg

SEQ ID NO: 320301 - DNA, 20 bp, Artificial Sequence
  Description of Artificial Sequence: Synthetic oligonucleotide
  Target: LAMA2; (+) strand; PAM type: YTN; PAM sequence: TTT
gcattcaaattcttgatgta

SEQ ID NO: 320302 - DNA, 20 bp, Artificial Sequence
  Description of Artificial Sequence: Synthetic oligonucleotide
  Target: LAMA2; (+) strand; PAM type: YTN; PAM sequence: TTG
cattcaaattcttgatgtac

SEQ ID NO: 320303 - DNA, 20 bp, Artificial Sequence
  Description of Artificial Sequence: Synthetic oligonucleotide
  Target: LAMA2; (+) strand; PAM type: YTN; PAM sequence: TTC
aaattcttgatgtacatttt

SEQ ID NO: 320304 - DNA, 20 bp, Artificial Sequence
  Description of Artificial Sequence: Synthetic oligonucleotide
  Target: LAMA2; (+) strand; PAM type: YTN; PAM sequence: TTC
ttgatgtacattttctagct

SEQ ID NO: 320305 - DNA, 20 bp, Artificial Sequence
  Description of Artificial Sequence: Synthetic oligonucleotide
  Target: LAMA2; (+) strand; PAM type: YTN; PAM sequence: CTT
gatgtacattttctagctgg

SEQ ID NO: 320306 - DNA, 20 bp, Artificial Sequence
  Description of Artificial Sequence: Synthetic oligonucleotide
  Target: LAMA2; (+) strand; PAM type: YTN; PAM sequence: TTG
atgtacattttctagctggg

SEQ ID NO: 320307 - DNA, 20 bp, Artificial Sequence
  Description of Artificial Sequence: Synthetic oligonucleotide
  Target: LAMA2; (+) strand; PAM type: YTN; PAM sequence: TTT
tctagctgggggactagaaa

SEQ ID NO: 320308 - DNA, 20 bp, Artificial Sequence
  Description of Artificial Sequence: Synthetic oligonucleotide
  Target: LAMA2; (+) strand; PAM type: YTN; PAM sequence: TTT
ctagctgggggactagaaag

SEQ ID NO: 320309 - DNA, 20 bp, Artificial Sequence
  Description of Artificial Sequence: Synthetic oligonucleotide
  Target: LAMA2; (+) strand; PAM type: YTN; PAM sequence: TTC
tagctgggggactagaaagc

SEQ ID NO: 320310 - DNA, 20 bp, Artificial Sequence
  Description of Artificial Sequence: Synthetic oligonucleotide
  Target: LAMA2; (+) strand; PAM type: YTN; PAM sequence: CTA
gctgggggactagaaagcaa

SEQ ID NO: 320311 - DNA, 20 bp, Artificial Sequence
  Description of Artificial Sequence: Synthetic oligonucleotide
  Target: LAMA2; (+) strand; PAM type: YTN; PAM sequence: CTG
ggggactagaaagcaagaca

SEQ ID NO: 320312 - DNA, 20 bp, Artificial Sequence
  Description of Artificial Sequence: Synthetic oligonucleotide
  Target: LAMA2; (+) strand; PAM type: YTN; PAM sequence: CTA
gaaagcaagacactttcctt

SEQ ID NO: 320313 - DNA, 20 bp, Artificial Sequence
  Description of Artificial Sequence: Synthetic oligonucleotide
  Target: LAMA2; (+) strand; PAM type: YTN; PAM sequence: CTT
tcctttcagtaccttgggct

SEQ ID NO: 320314 - DNA, 20 bp, Artificial Sequence
  Description of Artificial Sequence: Synthetic oligonucleotide
  Target: LAMA2; (+) strand; PAM type: YTN; PAM sequence: TTT
cctttcagtaccttgggctc

SEQ ID NO: 320315 - DNA, 20 bp, Artificial Sequence
  Description of Artificial Sequence: Synthetic oligonucleotide
  Target: LAMA2; (+) strand; PAM type: YTN; PAM sequence: TTC
ctttcagtaccttgggctcc

SEQ ID NO: 320316 - DNA, 20 bp, Artificial Sequence
  Description of Artificial Sequence: Synthetic oligonucleotide
  Target: LAMA2; (+) strand; PAM type: YTN; PAM sequence: CTT
tcagtaccttgggctcccca

SEQ ID NO: 320317 - DNA, 20 bp, Artificial Sequence
  Description of Artificial Sequence: Synthetic oligonucleotide
  Target: LAMA2; (+) strand; PAM type: YTN; PAM sequence: TTT
cagtaccttgggctccccat

SEQ ID NO: 320318 - DNA, 20 bp, Artificial Sequence
  Description of Artificial Sequence: Synthetic oligonucleotide
  Target: LAMA2; (+) strand; PAM type: YTN; PAM sequence: TTC
agtaccttgggctccccatc

SEQ ID NO: 320319 - DNA, 20 bp, Artificial Sequence
  Description of Artificial Sequence: Synthetic oligonucleotide
  Target: LAMA2; (+) strand; PAM type: YTN; PAM sequence: CTT
gggctccccatctattaagt

SEQ ID NO: 320320 - DNA, 20 bp, Artificial Sequence
  Description of Artificial Sequence: Synthetic oligonucleotide
  Target: LAMA2; (+) strand; PAM type: YTN; PAM sequence: TTG
ggctccccatctattaagtg

SEQ ID NO: 320321 - DNA, 20 bp, Artificial Sequence
  Description of Artificial Sequence: Synthetic oligonucleotide
  Target: LAMA2; (+) strand; PAM type: YTN; PAM sequence: CTC
cccatctattaagtggagat

SEQ ID NO: 320322 - DNA, 20 bp, Artificial Sequence
  Description of Artificial Sequence: Synthetic oligonucleotide
  Target: LAMA2; (+) strand; PAM type: YTN; PAM sequence: CTA
ttaagtggagatcattaaaa

SEQ ID NO: 320323 - DNA, 20 bp, Artificial Sequence
  Description of Artificial Sequence: Synthetic oligonucleotide
  Target: LAMA2; (+) strand; PAM type: YTN; PAM sequence: TTA
agtggagatcattaaaatct

SEQ ID NO: 320324 - DNA, 20 bp, Artificial Sequence
  Description of Artificial Sequence: Synthetic oligonucleotide
  Target: LAMA2; (+) strand; PAM type: YTN; PAM sequence: TTA
aaatctgccttgcaccgctg

SEQ ID NO: 320325 - DNA, 20 bp, Artificial Sequence
  Description of Artificial Sequence: Synthetic oligonucleotide
  Target: LAMA2; (+) strand; PAM type: YTN; PAM sequence: CTG
ccttgcaccgctgtcctaag

SEQ ID NO: 320326 - DNA, 20 bp, Artificial Sequence
  Description of Artificial Sequence: Synthetic oligonucleotide
  Target: LAMA2; (+) strand; PAM type: YTN; PAM sequence: CTT
gcaccgctgtcctaaggatt

SEQ ID NO: 320327 - DNA, 20 bp, Artificial Sequence
  Description of Artificial Sequence: Synthetic oligonucleotide
  Target: LAMA2; (+) strand; PAM type: YTN; PAM sequence: TTG
caccgctgtcctaaggattt

SEQ ID NO: 320328 - DNA, 20 bp, Artificial Sequence
  Description of Artificial Sequence: Synthetic oligonucleotide
  Target: LAMA2; (+) strand; PAM type: YTN; PAM sequence: CTG
tcctaaggatttgagataaa

SEQ ID NO: 320329 - DNA, 20 bp, Artificial Sequence
  Description of Artificial Sequence: Synthetic oligonucleotide
  Target: LAMA2; (+) strand; PAM type: YTN; PAM sequence: CTA
aggatttgagataaagcata

SEQ ID NO: 320330 - DNA, 20 bp, Artificial Sequence
  Description of Artificial Sequence: Synthetic oligonucleotide
  Target: LAMA2; (+) strand; PAM type: YTN; PAM sequence: TTT
gagataaagcatacaaaggg

SEQ ID NO: 320331 - DNA, 20 bp, Artificial Sequence
  Description of Artificial Sequence: Synthetic oligonucleotide
  Target: LAMA2; (+) strand; PAM type: YTN; PAM sequence: TTG
agataaagcatacaaagggc

SEQ ID NO: 320332 - DNA, 20 bp, Artificial Sequence
  Description of Artificial Sequence: Synthetic oligonucleotide
  Target: LAMA2; (+) strand; PAM type: YTN; PAM sequence: CTT
ggcacatagtaggtgctcct

SEQ ID NO: 320333 - DNA, 20 bp, Artificial Sequence
  Description of Artificial Sequence: Synthetic oligonucleotide
  Target: LAMA2; (+) strand; PAM type: YTN; PAM sequence: TTG
gcacatagtaggtgctccta

SEQ ID NO: 320334 - DNA, 20 bp, Artificial Sequence
  Description of Artificial Sequence: Synthetic oligonucleotide
  Target: LAMA2; (+) strand; PAM type: YTN; PAM sequence: CTC
ctaaatggtaactttattct

SEQ ID NO: 320335 - DNA, 20 bp, Artificial Sequence
  Description of Artificial Sequence: Synthetic oligonucleotide
  Target: LAMA2; (+) strand; PAM type: YTN; PAM sequence: CTA
aatggtaactttattcttca

SEQ ID NO: 320336 - DNA, 20 bp, Artificial Sequence
  Description of Artificial Sequence: Synthetic oligonucleotide
  Target: LAMA2; (+) strand; PAM type: YTN; PAM sequence: CTT
tattcttcacatcaggcttt

SEQ ID NO: 320337 - DNA, 20 bp, Artificial Sequence
  Description of Artificial Sequence: Synthetic oligonucleotide
  Target: LAMA2; (+) strand; PAM type: YTN; PAM sequence: TTT
attcttcacatcaggctttg

SEQ ID NO: 320338 - DNA, 20 bp, Artificial Sequence
  Description of Artificial Sequence: Synthetic oligonucleotide
  Target: LAMA2; (+) strand; PAM type: YTN; PAM sequence: TTA
ttcttcacatcaggctttgc

SEQ ID NO: 320339 - DNA, 20 bp, Artificial Sequence
  Description of Artificial Sequence: Synthetic oligonucleotide
  Target: LAMA2; (+) strand; PAM type: YTN; PAM sequence: TTC
ttcacatcaggctttgctta

SEQ ID NO: 320340 - DNA, 20 bp, Artificial Sequence
  Description of Artificial Sequence: Synthetic oligonucleotide
  Target: LAMA2; (+) strand; PAM type: YTN; PAM sequence: CTT
cacatcaggctttgcttata

SEQ ID NO: 320341 - DNA, 20 bp, Artificial Sequence
  Description of Artificial Sequence: Synthetic oligonucleotide
  Target: LAMA2; (+) strand; PAM type: YTN; PAM sequence: TTC
acatcaggctttgcttatac

SEQ ID NO: 320342 - DNA, 20 bp, Artificial Sequence
  Description of Artificial Sequence: Synthetic oligonucleotide
  Target: LAMA2; (+) strand; PAM type: YTN; PAM sequence: CTT
tgcttatacttataaaagcc

SEQ ID NO: 320343 - DNA, 20 bp, Artificial Sequence
  Description of Artificial Sequence: Synthetic oligonucleotide
  Target: LAMA2; (+) strand; PAM type: YTN; PAM sequence: TTT
gcttatacttataaaagcca

SEQ ID NO: 320344 - DNA, 20 bp, Artificial Sequence
  Description of Artificial Sequence: Synthetic oligonucleotide
  Target: LAMA2; (+) strand; PAM type: YTN; PAM sequence: TTG
cttatacttataaaagccag

SEQ ID NO: 320345 - DNA, 20 bp, Artificial Sequence
  Description of Artificial Sequence: Synthetic oligonucleotide
  Target: LAMA2; (+) strand; PAM type: YTN; PAM sequence: CTT
atacttataaaagccagttt

SEQ ID NO: 320346 - DNA, 20 bp, Artificial Sequence
  Description of Artificial Sequence: Synthetic oligonucleotide
  Target: LAMA2; (+) strand; PAM type: YTN; PAM sequence: TTA
tacttataaaagccagtttt

SEQ ID NO: 320347 - DNA, 20 bp, Artificial Sequence
  Description of Artificial Sequence: Synthetic oligonucleotide
  Target: LAMA2; (+) strand; PAM type: YTN; PAM sequence: CTT
ataaaagccagttttgtaga

SEQ ID NO: 320348 - DNA, 20 bp, Artificial Sequence
  Description of Artificial Sequence: Synthetic oligonucleotide
  Target: LAMA2; (+) strand; PAM type: YTN; PAM sequence: TTA
taaaagccagttttgtagat

SEQ ID NO: 320349 - DNA, 20 bp, Artificial Sequence
  Description of Artificial Sequence: Synthetic oligonucleotide
  Target: LAMA2; (+) strand; PAM type: YTN; PAM sequence: TTT
tgtagataatttgctgaata

SEQ ID NO: 320350 - DNA, 20 bp, Artificial Sequence
  Description of Artificial Sequence: Synthetic oligonucleotide
  Target: LAMA2; (+) strand; PAM type: YTN; PAM sequence: TTT
gtagataatttgctgaatag

SEQ ID NO: 320351 - DNA, 20 bp, Artificial Sequence
  Description of Artificial Sequence: Synthetic oligonucleotide
  Target: LAMA2; (+) strand; PAM type: YTN; PAM sequence: TTG
tagataatttgctgaataga

SEQ ID NO: 320352 - DNA, 20 bp, Artificial Sequence
  Description of Artificial Sequence: Synthetic oligonucleotide
  Target: LAMA2; (+) strand; PAM type: YTN; PAM sequence: TTT
gctgaatagaactaagaata

SEQ ID NO: 320353 - DNA, 20 bp, Artificial Sequence
  Description of Artificial Sequence: Synthetic oligonucleotide
  Target: LAMA2; (+) strand; PAM type: YTN; PAM sequence: TTG
ctgaatagaactaagaatag

SEQ ID NO: 320354 - DNA, 20 bp, Artificial Sequence
  Description of Artificial Sequence: Synthetic oligonucleotide
  Target: LAMA2; (+) strand; PAM type: YTN; PAM sequence: CTG
aatagaactaagaatagtta

SEQ ID NO: 320355 - DNA, 20 bp, Artificial Sequence
  Description of Artificial Sequence: Synthetic oligonucleotide
  Target: LAMA2; (+) strand; PAM type: YTN; PAM sequence: CTA
agaatagttataaatattgg

SEQ ID NO: 320356 - DNA, 20 bp, Artificial Sequence
  Description of Artificial Sequence: Synthetic oligonucleotide
  Target: LAMA2; (+) strand; PAM type: YTN; PAM sequence: TTA
taaatattgggttagtttat

SEQ ID NO: 320357 - DNA, 20 bp, Artificial Sequence
  Description of Artificial Sequence: Synthetic oligonucleotide
  Target: LAMA2; (+) strand; PAM type: YTN; PAM sequence: TTG
ggttagtttatttgagctgc

SEQ ID NO: 320358 - DNA, 20 bp, Artificial Sequence
  Description of Artificial Sequence: Synthetic oligonucleotide
  Target: LAMA2; (+) strand; PAM type: YTN; PAM sequence: TTA
gtttatttgagctgctatga

SEQ ID NO: 320359 - DNA, 20 bp, Artificial Sequence
  Description of Artificial Sequence: Synthetic oligonucleotide
  Target: LAMA2; (+) strand; PAM type: YTN; PAM sequence: TTT
atttgagctgctatgataac

SEQ ID NO: 320360 - DNA, 20 bp, Artificial Sequence
  Description of Artificial Sequence: Synthetic oligonucleotide
  Target: LAMA2; (+) strand; PAM type: YTN; PAM sequence: TTA
tttgagctgctatgataaca

SEQ ID NO: 320361 - DNA, 20 bp, Artificial Sequence
  Description of Artificial Sequence: Synthetic oligonucleotide
  Target: LAMA2; (+) strand; PAM type: YTN; PAM sequence: TTT
gagctgctatgataacatac

SEQ ID NO: 320362 - DNA, 20 bp, Artificial Sequence
  Description of Artificial Sequence: Synthetic oligonucleotide
  Target: LAMA2; (+) strand; PAM type: YTN; PAM sequence: TTG
agctgctatgataacatacc

SEQ ID NO: 320363 - DNA, 20 bp, Artificial Sequence
  Description of Artificial Sequence: Synthetic oligonucleotide
  Target: LAMA2; (+) strand; PAM type: YTN; PAM sequence: CTG
ctatgataacataccataaa

SEQ ID NO: 320364 - DNA, 20 bp, Artificial Sequence
  Description of Artificial Sequence: Synthetic oligonucleotide
  Target: LAMA2; (+) strand; PAM type: YTN; PAM sequence: CTA
tgataacataccataaactg

SEQ ID NO: 320365 - DNA, 20 bp, Artificial Sequence
  Description of Artificial Sequence: Synthetic oligonucleotide
  Target: LAMA2; (+) strand; PAM type: YTN; PAM sequence: CTG
gatggattataagcaaagat

SEQ ID NO: 320366 - DNA, 20 bp, Artificial Sequence
  Description of Artificial Sequence: Synthetic oligonucleotide
  Target: LAMA2; (+) strand; PAM type: YTN; PAM sequence: TTA
taagcaaagataatttattt

SEQ ID NO: 320367 - DNA, 20 bp, Artificial Sequence
  Description of Artificial Sequence: Synthetic oligonucleotide
  Target: LAMA2; (+) strand; PAM type: YTN; PAM sequence: TTT
atttctcacagtctggaggc

SEQ ID NO: 320368 - DNA, 20 bp, Artificial Sequence
  Description of Artificial Sequence: Synthetic oligonucleotide
  Target: LAMA2; (+) strand; PAM type: YTN; PAM sequence: TTA
tttctcacagtctggaggct

SEQ ID NO: 320369 - DNA, 20 bp, Artificial Sequence
  Description of Artificial Sequence: Synthetic oligonucleotide
  Target: LAMA2; (+) strand; PAM type: YTN; PAM sequence: TTT
ctcacagtctggaggctggg

SEQ ID NO: 320370 - DNA, 20 bp, Artificial Sequence
  Description of Artificial Sequence: Synthetic oligonucleotide
  Target: LAMA2; (+) strand; PAM type: YTN; PAM sequence: TTC
tcacagtctggaggctggga

SEQ ID NO: 320371 - DNA, 20 bp, Artificial Sequence
  Description of Artificial Sequence: Synthetic oligonucleotide
  Target: LAMA2; (+) strand; PAM type: YTN; PAM sequence: CTC
acagtctggaggctgggaag

SEQ ID NO: 320372 - DNA, 20 bp, Artificial Sequence
  Description of Artificial Sequence: Synthetic oligonucleotide
  Target: LAMA2; (+) strand; PAM type: YTN; PAM sequence: CTG
gaggctgggaagtccaagac

SEQ ID NO: 320373 - DNA, 20 bp, Artificial Sequence
  Description of Artificial Sequence: Synthetic oligonucleotide
  Target: LAMA2; (+) strand; PAM type: YTN; PAM sequence: CTG
ggaagtccaagaccacagca

SEQ ID NO: 320374 - DNA, 20 bp, Artificial Sequence
  Description of Artificial Sequence: Synthetic oligonucleotide
  Target: LAMA2; (+) strand; PAM type: YTN; PAM sequence: TTC
agtgtccagtgagtacctgc

SEQ ID NO: 320375 - DNA, 20 bp, Artificial Sequence
  Description of Artificial Sequence: Synthetic oligonucleotide
  Target: LAMA2; (+) strand; PAM type: YTN; PAM sequence: CTG
ctttcctgtttatagacagc

SEQ ID NO: 320376 - DNA, 20 bp, Artificial Sequence
  Description of Artificial Sequence: Synthetic oligonucleotide
  Target: LAMA2; (+) strand; PAM type: YTN; PAM sequence: CTT
tcctgtttatagacagcacg

SEQ ID NO: 320377 - DNA, 20 bp, Artificial Sequence
  Description of Artificial Sequence: Synthetic oligonucleotide
  Target: LAMA2; (+) strand; PAM type: YTN; PAM sequence: TTT
cctgtttatagacagcacgt

SEQ ID NO: 320378 - DNA, 20 bp, Artificial Sequence
  Description of Artificial Sequence: Synthetic oligonucleotide
  Target: LAMA2; (+) strand; PAM type: YTN; PAM sequence: TTC
ctgtttatagacagcacgtt

SEQ ID NO: 320379 - DNA, 20 bp, Artificial Sequence
  Description of Artificial Sequence: Synthetic oligonucleotide
  Target: LAMA2; (+) strand; PAM type: YTN; PAM sequence: CTG
tttatagacagcacgttttt

SEQ ID NO: 320380 - DNA, 20 bp, Artificial Sequence
  Description of Artificial Sequence: Synthetic oligonucleotide
  Target: LAMA2; (+) strand; PAM type: YTN; PAM sequence: TTT
atagacagcacgtttttttt

SEQ ID NO: 320381 - DNA, 20 bp, Artificial Sequence
  Description of Artificial Sequence: Synthetic oligonucleotide
  Target: LAMA2; (+) strand; PAM type: YTN; PAM sequence: TTA
tagacagcacgttttttttc

SEQ ID NO: 320382 - DNA, 20 bp, Artificial Sequence
  Description of Artificial Sequence: Synthetic oligonucleotide
  Target: LAMA2; (+) strand; PAM type: YTN; PAM sequence: TTT
tttttctgtagcctcgcatg

SEQ ID NO: 320383 - DNA, 20 bp, Artificial Sequence
  Description of Artificial Sequence: Synthetic oligonucleotide
  Target: LAMA2; (+) strand; PAM type: YTN; PAM sequence: TTT
ttttctgtagcctcgcatga

SEQ ID NO: 320384 - DNA, 20 bp, Artificial Sequence
  Description of Artificial Sequence: Synthetic oligonucleotide
  Target: LAMA2; (+) strand; PAM type: YTN; PAM sequence: TTT
tttctgtagcctcgcatgat

SEQ ID NO: 320385 - DNA, 20 bp, Artificial Sequence
  Description of Artificial Sequence: Synthetic oligonucleotide
  Target: LAMA2; (+) strand; PAM type: YTN; PAM sequence: TTT
ttctgtagcctcgcatgatg

SEQ ID NO: 320386 - DNA, 20 bp, Artificial Sequence
  Description of Artificial Sequence: Synthetic oligonucleotide
  Target: LAMA2; (+) strand; PAM type: YTN; PAM sequence: TTT
tctgtagcctcgcatgatga

SEQ ID NO: 320387 - DNA, 20 bp, Artificial Sequence
  Description of Artificial Sequence: Synthetic oligonucleotide
  Target: LAMA2; (+) strand; PAM type: YTN; PAM sequence: TTT
ctgtagcctcgcatgatgaa

SEQ ID NO: 320388 - DNA, 20 bp, Artificial Sequence
  Description of Artificial Sequence: Synthetic oligonucleotide
  Target: LAMA2; (+) strand; PAM type: YTN; PAM sequence: TTC
tgtagcctcgcatgatgaaa

SEQ ID NO: 320389 - DNA, 20 bp, Artificial Sequence
  Description of Artificial Sequence: Synthetic oligonucleotide
  Target: LAMA2; (+) strand; PAM type: YTN; PAM sequence: CTG
tagcctcgcatgatgaaagg

SEQ ID NO: 320390 - DNA, 20 bp, Artificial Sequence
  Description of Artificial Sequence: Synthetic oligonucleotide
  Target: LAMA2; (+) strand; PAM type: YTN; PAM sequence: CTC
gcatgatgaaagggagcaag

SEQ ID NO: 320391 - DNA, 20 bp, Artificial Sequence
  Description of Artificial Sequence: Synthetic oligonucleotide
  Target: LAMA2; (+) strand; PAM type: YTN; PAM sequence: CTC
tttcagacgctggtcacctc

SEQ ID NO: 320392 - DNA, 20 bp, Artificial Sequence
  Description of Artificial Sequence: Synthetic oligonucleotide
  Target: LAMA2; (+) strand; PAM type: YTN; PAM sequence: CTT
tcagacgctggtcacctccc

SEQ ID NO: 320393 - DNA, 20 bp, Artificial Sequence
  Description of Artificial Sequence: Synthetic oligonucleotide
  Target: LAMA2; (+) strand; PAM type: YTN; PAM sequence: TTT
cagacgctggtcacctccct

SEQ ID NO: 320394 - DNA, 20 bp, Artificial Sequence
  Description of Artificial Sequence: Synthetic oligonucleotide
  Target: LAMA2; (+) strand; PAM type: YTN; PAM sequence: TTC
agacgctggtcacctcccta

SEQ ID NO: 320395 - DNA, 20 bp, Artificial Sequence
  Description of Artificial Sequence: Synthetic oligonucleotide
  Target: LAMA2; (+) strand; PAM type: YTN; PAM sequence: CTG
gtcacctccctaaagcccca

SEQ ID NO: 320396 - DNA, 20 bp, Artificial Sequence
  Description of Artificial Sequence: Synthetic oligonucleotide
  Target: LAMA2; (+) strand; PAM type: YTN; PAM sequence: CTC
cctaaagccccacctcctga

SEQ ID NO: 320397 - DNA, 20 bp, Artificial Sequence
  Description of Artificial Sequence: Synthetic oligonucleotide
  Target: LAMA2; (+) strand; PAM type: YTN; PAM sequence: CTA
aagccccacctcctgatatc

SEQ ID NO: 320398 - DNA, 20 bp, Artificial Sequence
  Description of Artificial Sequence: Synthetic oligonucleotide
  Target: LAMA2; (+) strand; PAM type: YTN; PAM sequence: CTC
ctgatatcctcacattggag

SEQ ID NO: 320399 - DNA, 20 bp, Artificial Sequence
  Description of Artificial Sequence: Synthetic oligonucleotide
  Target: LAMA2; (+) strand; PAM type: YTN; PAM sequence: CTG
atatcctcacattggagatt

SEQ ID NO: 320400 - DNA, 20 bp, Artificial Sequence
  Description of Artificial Sequence: Synthetic oligonucleotide
  Target: LAMA2; (+) strand; PAM type: YTN; PAM sequence: CTC
acattggagattaggtttca

SEQ ID NO: 320401 - DNA, 20 bp, Artificial Sequence
  Description of Artificial Sequence: Synthetic oligonucleotide
  Target: LAMA2; (+) strand; PAM type: YTN; PAM sequence: TTG
gagattaggtttcaacatat

SEQ ID NO: 320402 - DNA, 20 bp, Artificial Sequence
  Description of Artificial Sequence: Synthetic oligonucleotide
  Target: LAMA2; (+) strand; PAM type: YTN; PAM sequence: TTA
ggtttcaacatatgaatttt

SEQ ID NO: 320403 - DNA, 20 bp, Artificial Sequence
  Description of Artificial Sequence: Synthetic oligonucleotide
  Target: LAMA2; (+) strand; PAM type: YTN; PAM sequence: TTT
caacatatgaattttagggg

SEQ ID NO: 320404 - DNA, 20 bp, Artificial Sequence
  Description of Artificial Sequence: Synthetic oligonucleotide
  Target: LAMA2; (+) strand; PAM type: YTN; PAM sequence: TTC
aacatatgaattttaggggg

SEQ ID NO: 320405 - DNA, 20 bp, Artificial Sequence
  Description of Artificial Sequence: Synthetic oligonucleotide
  Target: LAMA2; (+) strand; PAM type: YTN; PAM sequence: TTT
tagggggacacaaacattca

SEQ ID NO: 320406 - DNA, 20 bp, Artificial Sequence
  Description of Artificial Sequence: Synthetic oligonucleotide
  Target: LAMA2; (+) strand; PAM type: YTN; PAM sequence: TTT
agggggacacaaacattcat

SEQ ID NO: 320407 - DNA, 20 bp, Artificial Sequence
  Description of Artificial Sequence: Synthetic oligonucleotide
  Target: LAMA2; (+) strand; PAM type: YTN; PAM sequence: TTA
gggggacacaaacattcata

SEQ ID NO: 320408 - DNA, 20 bp, Artificial Sequence
  Description of Artificial Sequence: Synthetic oligonucleotide
  Target: LAMA2; (+) strand; PAM type: YTN; PAM sequence: TTC
ataacatagaaaatacatat

SEQ ID NO: 320409 - DNA, 20 bp, Artificial Sequence
  Description of Artificial Sequence: Synthetic oligonucleotide
  Target: LAMA2; (+) strand; PAM type: YTN; PAM sequence: TTA
ttttaaaatgctttcttatt

SEQ ID NO: 320410 - DNA, 20 bp, Artificial Sequence
  Description of Artificial Sequence: Synthetic oligonucleotide
  Target: LAMA2; (+) strand; PAM type: YTN; PAM sequence: TTT
taaaatgctttcttattctt

SEQ ID NO: 320411 - DNA, 20 bp, Artificial Sequence
  Description of Artificial Sequence: Synthetic oligonucleotide
  Target: LAMA2; (+) strand; PAM type: YTN; PAM sequence: TTT
aaaatgctttcttattcttt

SEQ ID NO: 320412 - DNA, 20 bp, Artificial Sequence
  Description of Artificial Sequence: Synthetic oligonucleotide
  Target: LAMA2; (+) strand; PAM type: YTN; PAM sequence: TTA
aaatgctttcttattcttta

SEQ ID NO: 320413 - DNA, 20 bp, Artificial Sequence
  Description of Artificial Sequence: Synthetic oligonucleotide
  Target: LAMA2; (+) strand; PAM type: YTN; PAM sequence: CTT
tcttattctttattatgacc

SEQ ID NO: 320414 - DNA, 20 bp, Artificial Sequence
  Description of Artificial Sequence: Synthetic oligonucleotide
  Target: LAMA2; (+) strand; PAM type: YTN; PAM sequence: TTT
cttattctttattatgacca

SEQ ID NO: 320415 - DNA, 20 bp, Artificial Sequence
  Description of Artificial Sequence: Synthetic oligonucleotide
  Target: LAMA2; (+) strand; PAM type: YTN; PAM sequence: TTC
ttattctttattatgaccac

SEQ ID NO: 320416 - DNA, 20 bp, Artificial Sequence
  Description of Artificial Sequence: Synthetic oligonucleotide
  Target: LAMA2; (+) strand; PAM type: YTN; PAM sequence: CTT
attctttattatgaccacta

SEQ ID NO: 320417 - DNA, 20 bp, Artificial Sequence
  Description of Artificial Sequence: Synthetic oligonucleotide
  Target: LAMA2; (+) strand; PAM type: YTN; PAM sequence: TTA
ttctttattatgaccactat

SEQ ID NO: 320418 - DNA, 20 bp, Artificial Sequence
  Description of Artificial Sequence: Synthetic oligonucleotide
  Target: LAMA2; (+) strand; PAM type: YTN; PAM sequence: TTC
tttattatgaccactattaa

SEQ ID NO: 320419 - DNA, 20 bp, Artificial Sequence
  Description of Artificial Sequence: Synthetic oligonucleotide
  Target: LAMA2; (+) strand; PAM type: YTN; PAM sequence: CTT
tattatgaccactattaaaa

SEQ ID NO: 320420 - DNA, 20 bp, Artificial Sequence
  Description of Artificial Sequence: Synthetic oligonucleotide
  Target: LAMA2; (+) strand; PAM type: YTN; PAM sequence: TTT
attatgaccactattaaaac

SEQ ID NO: 320421 - DNA, 20 bp, Artificial Sequence
  Description of Artificial Sequence: Synthetic oligonucleotide
  Target: LAMA2; (+) strand; PAM type: YTN; PAM sequence: TTA
ttatgaccactattaaaacc

SEQ ID NO: 320422 - DNA, 20 bp, Artificial Sequence
  Description of Artificial Sequence: Synthetic oligonucleotide
  Target: LAMA2; (+) strand; PAM type: YTN; PAM sequence: TTA
tgaccactattaaaaccaaa

SEQ ID NO: 320423 - DNA, 20 bp, Artificial Sequence
  Description of Artificial Sequence: Synthetic oligonucleotide
  Target: LAMA2; (+) strand; PAM type: YTN; PAM sequence: CTA
ttaaaaccaaacagaaaact

SEQ ID NO: 320424 - DNA, 20 bp, Artificial Sequence
  Description of Artificial Sequence: Synthetic oligonucleotide
  Target: LAMA2; (+) strand; PAM type: YTN; PAM sequence: TTA
aaaccaaacagaaaactgta

SEQ ID NO: 320425 - DNA, 20 bp, Artificial Sequence
  Description of Artificial Sequence: Synthetic oligonucleotide
  Target: LAMA2; (+) strand; PAM type: YTN; PAM sequence: CTG
tagaactagccaaggtatct

SEQ ID NO: 320426 - DNA, 20 bp, Artificial Sequence
  Description of Artificial Sequence: Synthetic oligonucleotide
  Target: LAMA2; (+) strand; PAM type: YTN; PAM sequence: CTA
gccaaggtatcttacagaga

SEQ ID NO: 320427 - DNA, 20 bp, Artificial Sequence
  Description of Artificial Sequence: Synthetic oligonucleotide
  Target: LAMA2; (+) strand; PAM type: YTN; PAM sequence: CTT
acagagatatgtttcagagg

SEQ ID NO: 320428 - DNA, 20 bp, Artificial Sequence
  Description of Artificial Sequence: Synthetic oligonucleotide
  Target: LAMA2; (+) strand; PAM type: YTN; PAM sequence: TTA
cagagatatgtttcagagga

SEQ ID NO: 320429 - DNA, 20 bp, Artificial Sequence
  Description of Artificial Sequence: Synthetic oligonucleotide
  Target: LAMA2; (+) strand; PAM type: YTN; PAM sequence: TTT
cagaggagtgtttattagat

SEQ ID NO: 320430 - DNA, 20 bp, Artificial Sequence
  Description of Artificial Sequence: Synthetic oligonucleotide
  Target: LAMA2; (+) strand; PAM type: YTN; PAM sequence: TTC
agaggagtgtttattagatt

SEQ ID NO: 320431 - DNA, 20 bp, Artificial Sequence
  Description of Artificial Sequence: Synthetic oligonucleotide
  Target: LAMA2; (+) strand; PAM type: YTN; PAM sequence: TTT
attagattctgttgtataca

SEQ ID NO: 320432 - DNA, 20 bp, Artificial Sequence
  Description of Artificial Sequence: Synthetic oligonucleotide
  Target: LAMA2; (+) strand; PAM type: YTN; PAM sequence: TTA
ttagattctgttgtatacac

SEQ ID NO: 320433 - DNA, 20 bp, Artificial Sequence
  Description of Artificial Sequence: Synthetic oligonucleotide
  Target: LAMA2; (+) strand; PAM type: YTN; PAM sequence: TTA
gattctgttgtatacactat

SEQ ID NO: 320434 - DNA, 20 bp, Artificial Sequence
  Description of Artificial Sequence: Synthetic oligonucleotide
  Target: LAMA2; (+) strand; PAM type: YTN; PAM sequence: TTC
tgttgtatacactatttgtt

SEQ ID NO: 320435 - DNA, 20 bp, Artificial Sequence
  Description of Artificial Sequence: Synthetic oligonucleotide
  Target: LAMA2; (+) strand; PAM type: YTN; PAM sequence: CTG
ttgtatacactatttgttta

SEQ ID NO: 320436 - DNA, 20 bp, Artificial Sequence
  Description of Artificial Sequence: Synthetic oligonucleotide
  Target: LAMA2; (+) strand; PAM type: YTN; PAM sequence: TTG
tatacactatttgtttagct

SEQ ID NO: 320437 - DNA, 20 bp, Artificial Sequence
  Description of Artificial Sequence: Synthetic oligonucleotide
  Target: LAMA2; (+) strand; PAM type: YTN; PAM sequence: CTA
tttgtttagctttttctgtt

SEQ ID NO: 320438 - DNA, 20 bp, Artificial Sequence
  Description of Artificial Sequence: Synthetic oligonucleotide
  Target: LAMA2; (+) strand; PAM type: YTN; PAM sequence: TTT
gtttagctttttctgttttt

SEQ ID NO: 320439 - DNA, 20 bp, Artificial Sequence
  Description of Artificial Sequence: Synthetic oligonucleotide
  Target: LAMA2; (+) strand; PAM type: YTN; PAM sequence: TTG
tttagctttttctgtttttt

SEQ ID NO: 320440 - DNA, 20 bp, Artificial Sequence
  Description of Artificial Sequence: Synthetic oligonucleotide
  Target: LAMA2; (+) strand; PAM type: YTN; PAM sequence: TTT
agctttttctgttttttagg

SEQ ID NO: 320441 - DNA, 20 bp, Artificial Sequence
  Description of Artificial Sequence: Synthetic oligonucleotide
  Target: LAMA2; (+) strand; PAM type: YTN; PAM sequence: TTA
gctttttctgttttttaggt

SEQ ID NO: 320442 - DNA, 20 bp, Artificial Sequence
  Description of Artificial Sequence: Synthetic oligonucleotide
  Target: LAMA2; (+) strand; PAM type: YTN; PAM sequence: CTT
tttctgttttttaggtcctc

SEQ ID NO: 320443 - DNA, 20 bp, Artificial Sequence
  Description of Artificial Sequence: Synthetic oligonucleotide
  Target: LAMA2; (+) strand; PAM type: YTN; PAM sequence: TTT
ttctgttttttaggtcctcg

SEQ ID NO: 320444 - DNA, 20 bp, Artificial Sequence
  Description of Artificial Sequence: Synthetic oligonucleotide
  Target: LAMA2; (+) strand; PAM type: YTN; PAM sequence: TTT
tctgttttttaggtcctcgg

SEQ ID NO: 320445 - DNA, 20 bp, Artificial Sequence
  Description of Artificial Sequence: Synthetic oligonucleotide
  Target: LAMA2; (+) strand; PAM type: YTN; PAM sequence: TTT
ctgttttttaggtcctcggc

SEQ ID NO: 320446 - DNA, 20 bp, Artificial Sequence
  Description of Artificial Sequence: Synthetic oligonucleotide
  Target: LAMA2; (+) strand; PAM type: YTN; PAM sequence: TTC
tgttttttaggtcctcggcc

SEQ ID NO: 320447 - DNA, 20 bp, Artificial Sequence
  Description of Artificial Sequence: Synthetic oligonucleotide
  Target: LAMA2; (+) strand; PAM type: YTN; PAM sequence: CTG
ttttttaggtcctcggccta

SEQ ID NO: 320448 - DNA, 20 bp, Artificial Sequence
  Description of Artificial Sequence: Synthetic oligonucleotide
  Target: LAMA2; (+) strand; PAM type: YTN; PAM sequence: TTT
tttaggtcctcggcctatgc

SEQ ID NO: 320449 - DNA, 20 bp, Artificial Sequence
  Description of Artificial Sequence: Synthetic oligonucleotide
  Target: LAMA2; (+) strand; PAM type: YTN; PAM sequence: TTT
ttaggtcctcggcctatgct

SEQ ID NO: 320450 - DNA, 20 bp, Artificial Sequence
  Description of Artificial Sequence: Synthetic oligonucleotide
  Target: LAMA2; (+) strand; PAM type: YTN; PAM sequence: TTT
taggtcctcggcctatgcta

SEQ ID NO: 320451 - DNA, 20 bp, Artificial Sequence
  Description of Artificial Sequence: Synthetic oligonucleotide
  Target: LAMA2; (+) strand; PAM type: YTN; PAM sequence: TTT
aggtcctcggcctatgctat

SEQ ID NO: 320452 - DNA, 20 bp, Artificial Sequence
  Description of Artificial Sequence: Synthetic oligonucleotide
  Target: LAMA2; (+) strand; PAM type: YTN; PAM sequence: TTA
ggtcctcggcctatgctatt

SEQ ID NO: 320453 - DNA, 20 bp, Artificial Sequence
  Description of Artificial Sequence: Synthetic oligonucleotide
  Target: LAMA2; (+) strand; PAM type: YTN; PAM sequence: CTC
ggcctatgctattacagaaa

SEQ ID NO: 320454 - DNA, 20 bp, Artificial Sequence
  Description of Artificial Sequence: Synthetic oligonucleotide
  Target: LAMA2; (+) strand; PAM type: YTN; PAM sequence: CTA
tgctattacagaaagaatat

SEQ ID NO: 320455 - DNA, 20 bp, Artificial Sequence
  Description of Artificial Sequence: Synthetic oligonucleotide
  Target: LAMA2; (+) strand; PAM type: YTN; PAM sequence: CTA
ttacagaaagaatattactc

SEQ ID NO: 320456 - DNA, 20 bp, Artificial Sequence
  Description of Artificial Sequence: Synthetic oligonucleotide
  Target: LAMA2; (+) strand; PAM type: YTN; PAM sequence: TTA
cagaaagaatattactctct

SEQ ID NO: 320457 - DNA, 20 bp, Artificial Sequence
  Description of Artificial Sequence: Synthetic oligonucleotide
  Target: LAMA2; (+) strand; PAM type: YTN; PAM sequence: TTA
ctctcttttgtatttactat

SEQ ID NO: 320458 - DNA, 20 bp, Artificial Sequence
  Description of Artificial Sequence: Synthetic oligonucleotide
  Target: LAMA2; (+) strand; PAM type: YTN; PAM sequence: CTC
tcttttgtatttactattgg

SEQ ID NO: 320459 - DNA, 20 bp, Artificial Sequence
  Description of Artificial Sequence: Synthetic oligonucleotide
  Target: LAMA2; (+) strand; PAM type: YTN; PAM sequence: CTC
ttttgtatttactattggtt

SEQ ID NO: 320460 - DNA, 20 bp, Artificial Sequence
  Description of Artificial Sequence: Synthetic oligonucleotide
  Target: LAMA2; (+) strand; PAM type: YTN; PAM sequence: CTT
ttgtatttactattggtttc

SEQ ID NO: 320461 - DNA, 20 bp, Artificial Sequence
  Description of Artificial Sequence: Synthetic oligonucleotide
  Target: LAMA2; (+) strand; PAM type: YTN; PAM sequence: TTT
tgtatttactattggtttcc

SEQ ID NO: 320462 - DNA, 20 bp, Artificial Sequence
  Description of Artificial Sequence: Synthetic oligonucleotide
  Target: LAMA2; (+) strand; PAM type: YTN; PAM sequence: TTT
gtatttactattggtttcct

SEQ ID NO: 320463 - DNA, 20 bp, Artificial Sequence
  Description of Artificial Sequence: Synthetic oligonucleotide
  Target: LAMA2; (+) strand; PAM type: YTN; PAM sequence: TTG
tatttactattggtttcctg

SEQ ID NO: 320464 - DNA, 20 bp, Artificial Sequence
  Description of Artificial Sequence: Synthetic oligonucleotide
  Target: LAMA2; (+) strand; PAM type: YTN; PAM sequence: TTT
actattggtttcctgaggga

SEQ ID NO: 320465 - DNA, 20 bp, Artificial Sequence
  Description of Artificial Sequence: Synthetic oligonucleotide
  Target: LAMA2; (+) strand; PAM type: YTN; PAM sequence: TTA
ctattggtttcctgagggaa

SEQ ID NO: 320466 - DNA, 20 bp, Artificial Sequence
  Description of Artificial Sequence: Synthetic oligonucleotide
  Target: LAMA2; (+) strand; PAM type: YTN; PAM sequence: CTA
ttggtttcctgagggaagca

SEQ ID NO: 320467 - DNA, 20 bp, Artificial Sequence
  Description of Artificial Sequence: Synthetic oligonucleotide
  Target: LAMA2; (+) strand; PAM type: YTN; PAM sequence: TTG
gtttcctgagggaagcaatt

SEQ ID NO: 320468 - DNA, 20 bp, Artificial Sequence
  Description of Artificial Sequence: Synthetic oligonucleotide
  Target: LAMA2; (+) strand; PAM type: YTN; PAM sequence: TTT
cctgagggaagcaattattt

SEQ ID NO: 320469 - DNA, 20 bp, Artificial Sequence
  Description of Artificial Sequence: Synthetic oligonucleotide
  Target: LAMA2; (+) strand; PAM type: YTN; PAM sequence: TTC
ctgagggaagcaattatttt

SEQ ID NO: 320470 - DNA, 20 bp, Artificial Sequence
  Description of Artificial Sequence: Synthetic oligonucleotide
  Target: LAMA2; (+) strand; PAM type: YTN; PAM sequence: CTG
agggaagcaattattttaat

SEQ ID NO: 320471 - DNA, 20 bp, Artificial Sequence
  Description of Artificial Sequence: Synthetic oligonucleotide
  Target: LAMA2; (+) strand; PAM type: YTN; PAM sequence: TTA
ttttaattattgattattta

SEQ ID NO: 320472 - DNA, 20 bp, Artificial Sequence
  Description of Artificial Sequence: Synthetic oligonucleotide
  Target: LAMA2; (+) strand; PAM type: YTN; PAM sequence: TTT
taattattgattatttatgg

SEQ ID NO: 320473 - DNA, 20 bp, Artificial Sequence
  Description of Artificial Sequence: Synthetic oligonucleotide
  Target: LAMA2; (+) strand; PAM type: YTN; PAM sequence: TTT
aattattgattatttatggt

SEQ ID NO: 320474 - DNA, 20 bp, Artificial Sequence
  Description of Artificial Sequence: Synthetic oligonucleotide
  Target: LAMA2; (+) strand; PAM type: YTN; PAM sequence: TTA
attattgattatttatggtt

SEQ ID NO: 320475 - DNA, 20 bp, Artificial Sequence
  Description of Artificial Sequence: Synthetic oligonucleotide
  Target: LAMA2; (+) strand; PAM type: YTN; PAM sequence: TTA
ttgattatttatggtttaat

SEQ ID NO: 320476 - DNA, 20 bp, Artificial Sequence
  Description of Artificial Sequence: Synthetic oligonucleotide
  Target: LAMA2; (+) strand; PAM type: YTN; PAM sequence: TTG
attatttatggtttaatggg

SEQ ID NO: 320477 - DNA, 20 bp, Artificial Sequence
  Description of Artificial Sequence: Synthetic oligonucleotide
  Target: LAMA2; (+) strand; PAM type: YTN; PAM sequence: TTA
tttatggtttaatggggaac

SEQ ID NO: 320478 - DNA, 20 bp, Artificial Sequence
  Description of Artificial Sequence: Synthetic oligonucleotide
  Target: LAMA2; (+) strand; PAM type: YTN; PAM sequence: TTT
atggtttaatggggaaccat

SEQ ID NO: 320479 - DNA, 20 bp, Artificial Sequence
  Description of Artificial Sequence: Synthetic oligonucleotide
  Target: LAMA2; (+) strand; PAM type: YTN; PAM sequence: TTA
tggtttaatggggaaccatt

SEQ ID NO: 320480 - DNA, 20 bp, Artificial Sequence
  Description of Artificial Sequence: Synthetic oligonucleotide
  Target: LAMA2; (+) strand; PAM type: YTN; PAM sequence: TTT
aatggggaaccattgtattc

SEQ ID NO: 320481 - DNA, 20 bp, Artificial Sequence
  Description of Artificial Sequence: Synthetic oligonucleotide
  Target: LAMA2; (+) strand; PAM type: YTN; PAM sequence: TTA
atggggaaccattgtattct

SEQ ID NO: 320482 - DNA, 20 bp, Artificial Sequence
  Description of Artificial Sequence: Synthetic oligonucleotide
  Target: LAMA2; (+) strand; PAM type: YTN; PAM sequence: TTG
tattctaactcacaggaata

SEQ ID NO: 320483 - DNA, 20 bp, Artificial Sequence
  Description of Artificial Sequence: Synthetic oligonucleotide
  Target: LAMA2; (+) strand; PAM type: YTN; PAM sequence: TTC
taactcacaggaataaaaca

SEQ ID NO: 320484 - DNA, 20 bp, Artificial Sequence
  Description of Artificial Sequence: Synthetic oligonucleotide
  Target: LAMA2; (+) strand; PAM type: YTN; PAM sequence: CTA
actcacaggaataaaacaat

SEQ ID NO: 320485 - DNA, 20 bp, Artificial Sequence
  Description of Artificial Sequence: Synthetic oligonucleotide
  Target: LAMA2; (+) strand; PAM type: YTN; PAM sequence: CTC
acaggaataaaacaataaca

SEQ ID NO: 320486 - DNA, 20 bp, Artificial Sequence
  Description of Artificial Sequence: Synthetic oligonucleotide
  Target: LAMA2; (+) strand; PAM type: YTN; PAM sequence: CTC
ataaatgtgtacctaacaaa

SEQ ID NO: 320487 - DNA, 20 bp, Artificial Sequence
  Description of Artificial Sequence: Synthetic oligonucleotide
  Target: LAMA2; (+) strand; PAM type: YTN; PAM sequence: CTA
acaaataaaacatacatctt

SEQ ID NO: 320488 - DNA, 20 bp, Artificial Sequence
  Description of Artificial Sequence: Synthetic oligonucleotide
  Target: LAMA2; (+) strand; PAM type: YTN; PAM sequence: CTT
caaatacgaatatgcattta

SEQ ID NO: 320489 - DNA, 20 bp, Artificial Sequence
  Description of Artificial Sequence: Synthetic oligonucleotide
  Target: LAMA2; (+) strand; PAM type: YTN; PAM sequence: TTC
aaatacgaatatgcatttag

SEQ ID NO: 320490 - DNA, 20 bp, Artificial Sequence
  Description of Artificial Sequence: Synthetic oligonucleotide
  Target: LAMA2; (+) strand; PAM type: YTN; PAM sequence: TTT
agagcctggcttgctgtctg

SEQ ID NO: 320491 - DNA, 20 bp, Artificial Sequence
  Description of Artificial Sequence: Synthetic oligonucleotide
  Target: LAMA2; (+) strand; PAM type: YTN; PAM sequence: TTA
gagcctggcttgctgtctga

SEQ ID NO: 320492 - DNA, 20 bp, Artificial Sequence
  Description of Artificial Sequence: Synthetic oligonucleotide
  Target: LAMA2; (+) strand; PAM type: YTN; PAM sequence: CTG
gcttgctgtctgaggtctta

SEQ ID NO: 320493 - DNA, 20 bp, Artificial Sequence
  Description of Artificial Sequence: Synthetic oligonucleotide
  Target: LAMA2; (+) strand; PAM type: YTN; PAM sequence: CTT
gctgtctgaggtcttaactt

SEQ ID NO: 320494 - DNA, 20 bp, Artificial Sequence
  Description of Artificial Sequence: Synthetic oligonucleotide
  Target: LAMA2; (+) strand; PAM type: YTN; PAM sequence: TTG
ctgtctgaggtcttaacttg

SEQ ID NO: 320495 - DNA, 20 bp, Artificial Sequence
  Description of Artificial Sequence: Synthetic oligonucleotide
  Target: LAMA2; (+) strand; PAM type: YTN; PAM sequence: CTG
tctgaggtcttaacttgttc

SEQ ID NO: 320496 - DNA, 20 bp, Artificial Sequence
  Description of Artificial Sequence: Synthetic oligonucleotide
  Target: LAMA2; (+) strand; PAM type: YTN; PAM sequence: CTG
aggtcttaacttgttctgtg

SEQ ID NO: 320497 - DNA, 20 bp, Artificial Sequence
  Description of Artificial Sequence: Synthetic oligonucleotide
  Target: LAMA2; (+) strand; PAM type: YTN; PAM sequence: CTT
aacttgttctgtgcttcaac

SEQ ID NO: 320498 - DNA, 20 bp, Artificial Sequence
  Description of Artificial Sequence: Synthetic oligonucleotide
  Target: LAMA2; (+) strand; PAM type: YTN; PAM sequence: TTA
acttgttctgtgcttcaact

SEQ ID NO: 320499 - DNA, 20 bp, Artificial Sequence
  Description of Artificial Sequence: Synthetic oligonucleotide
  Target: LAMA2; (+) strand; PAM type: YTN; PAM sequence: CTT
gttctgtgcttcaactccct

SEQ ID NO: 320500 - DNA, 20 bp, Artificial Sequence
  Description of Artificial Sequence: Synthetic oligonucleotide
  Target: LAMA2; (+) strand; PAM type: YTN; PAM sequence: TTG
ttctgtgcttcaactcccta

SEQ ID NO: 320501 - DNA, 20 bp, Artificial Sequence
  Description of Artificial Sequence: Synthetic oligonucleotide
  Target: LAMA2; (+) strand; PAM type: YTN; PAM sequence: TTC
tgtgcttcaactccctatta

SEQ ID NO: 320502 - DNA, 20 bp, Artificial Sequence
  Description of Artificial Sequence: Synthetic oligonucleotide
  Target: LAMA2; (+) strand; PAM type: YTN; PAM sequence: CTG
tgcttcaactccctattata

SEQ ID NO: 320503 - DNA, 20 bp, Artificial Sequence
  Description of Artificial Sequence: Synthetic oligonucleotide
  Target: LAMA2; (+) strand; PAM type: YTN; PAM sequence: CTT
caactccctattataatgga

SEQ ID NO: 320504 - DNA, 20 bp, Artificial Sequence
  Description of Artificial Sequence: Synthetic oligonucleotide
  Target: LAMA2; (+) strand; PAM type: YTN; PAM sequence: TTC
aactccctattataatggat

SEQ ID NO: 320505 - DNA, 20 bp, Artificial Sequence
  Description of Artificial Sequence: Synthetic oligonucleotide
  Target: LAMA2; (+) strand; PAM type: YTN; PAM sequence: CTC
cctattataatggatgctac

SEQ ID NO: 320506 - DNA, 20 bp, Artificial Sequence
  Description of Artificial Sequence: Synthetic oligonucleotide
  Target: LAMA2; (+) strand; PAM type: YTN; PAM sequence: CTA
ttataatggatgctacacat

SEQ ID NO: 320507 - DNA, 20 bp, Artificial Sequence
  Description of Artificial Sequence: Synthetic oligonucleotide
  Target: LAMA2; (+) strand; PAM type: YTN; PAM sequence: TTA
taatggatgctacacatgga

SEQ ID NO: 320508 - DNA, 20 bp, Artificial Sequence
  Description of Artificial Sequence: Synthetic oligonucleotide
  Target: LAMA2; (+) strand; PAM type: YTN; PAM sequence: CTA
cacatggaagctcttgggtc

SEQ ID NO: 320509 - DNA, 20 bp, Artificial Sequence
  Description of Artificial Sequence: Synthetic oligonucleotide
  Target: LAMA2; (+) strand; PAM type: YTN; PAM sequence: CTC
ttgggtcaccattggaggta

SEQ ID NO: 320510 - DNA, 20 bp, Artificial Sequence
  Description of Artificial Sequence: Synthetic oligonucleotide
  Target: LAMA2; (+) strand; PAM type: YTN; PAM sequence: CTT
gggtcaccattggaggtaat

SEQ ID NO: 320511 - DNA, 20 bp, Artificial Sequence
  Description of Artificial Sequence: Synthetic oligonucleotide
  Target: LAMA2; (+) strand; PAM type: YTN; PAM sequence: TTG
ggtcaccattggaggtaata

SEQ ID NO: 320512 - DNA, 20 bp, Artificial Sequence
  Description of Artificial Sequence: Synthetic oligonucleotide
  Target: LAMA2; (+) strand; PAM type: YTN; PAM sequence: TTG
gaggtaatagcgccctatag

SEQ ID NO: 320513 - DNA, 20 bp, Artificial Sequence
  Description of Artificial Sequence: Synthetic oligonucleotide
  Target: LAMA2; (+) strand; PAM type: YTN; PAM sequence: CTA
tagagttttgtgtctgggaa

SEQ ID NO: 320514 - DNA, 20 bp, Artificial Sequence
  Description of Artificial Sequence: Synthetic oligonucleotide
  Target: LAMA2; (+) strand; PAM type: YTN; PAM sequence: TTT
tgtgtctgggaagaagtgga

SEQ ID NO: 320515 - DNA, 20 bp, Artificial Sequence
  Description of Artificial Sequence: Synthetic oligonucleotide
  Target: LAMA2; (+) strand; PAM type: YTN; PAM sequence: TTT
gtgtctgggaagaagtggac

SEQ ID NO: 320516 - DNA, 20 bp, Artificial Sequence
  Description of Artificial Sequence: Synthetic oligonucleotide
  Target: LAMA2; (+) strand; PAM type: YTN; PAM sequence: TTG
tgtctgggaagaagtggact

SEQ ID NO: 320517 - DNA, 20 bp, Artificial Sequence
  Description of Artificial Sequence: Synthetic oligonucleotide
  Target: LAMA2; (+) strand; PAM type: YTN; PAM sequence: CTG
ggaagaagtggactttgtag

SEQ ID NO: 320518 - DNA, 20 bp, Artificial Sequence
  Description of Artificial Sequence: Synthetic oligonucleotide
  Target: LAMA2; (+) strand; PAM type: YTN; PAM sequence: CTT
tgtagttaggcgattaaata

SEQ ID NO: 320519 - DNA, 20 bp, Artificial Sequence
  Description of Artificial Sequence: Synthetic oligonucleotide
  Target: LAMA2; (+) strand; PAM type: YTN; PAM sequence: TTT
gtagttaggcgattaaatat

SEQ ID NO: 320520 - DNA, 20 bp, Artificial Sequence
  Description of Artificial Sequence: Synthetic oligonucleotide
  Target: LAMA2; (+) strand; PAM type: YTN; PAM sequence: TTG
tagttaggcgattaaatatt

SEQ ID NO: 320521 - DNA, 20 bp, Artificial Sequence
  Description of Artificial Sequence: Synthetic oligonucleotide
  Target: LAMA2; (+) strand; PAM type: YTN; PAM sequence: TTA
ggcgattaaatatttaccag

SEQ ID NO: 320522 - DNA, 20 bp, Artificial Sequence
  Description of Artificial Sequence: Synthetic oligonucleotide
  Target: LAMA2; (+) strand; PAM type: YTN; PAM sequence: TTA
aatatttaccagcttgcctt

SEQ ID NO: 320523 - DNA, 20 bp, Artificial Sequence
  Description of Artificial Sequence: Synthetic oligonucleotide
  Target: LAMA2; (+) strand; PAM type: YTN; PAM sequence: TTT
accagcttgccttaagccaa

SEQ ID NO: 320524 - DNA, 20 bp, Artificial Sequence
  Description of Artificial Sequence: Synthetic oligonucleotide
  Target: LAMA2; (+) strand; PAM type: YTN; PAM sequence: TTA
ccagcttgccttaagccaag

SEQ ID NO: 320525 - DNA, 20 bp, Artificial Sequence
  Description of Artificial Sequence: Synthetic oligonucleotide
  Target: LAMA2; (+) strand; PAM type: YTN; PAM sequence: CTT
gccttaagccaagtacatgt

SEQ ID NO: 320526 - DNA, 20 bp, Artificial Sequence
  Description of Artificial Sequence: Synthetic oligonucleotide
  Target: LAMA2; (+) strand; PAM type: YTN; PAM sequence: TTG
ccttaagccaagtacatgtt

SEQ ID NO: 320527 - DNA, 20 bp, Artificial Sequence
  Description of Artificial Sequence: Synthetic oligonucleotide
  Target: LAMA2; (+) strand; PAM type: YTN; PAM sequence: CTT
aagccaagtacatgttaaag

SEQ ID NO: 320528 - DNA, 20 bp, Artificial Sequence
  Description of Artificial Sequence: Synthetic oligonucleotide
  Target: LAMA2; (+) strand; PAM type: YTN; PAM sequence: TTA
agccaagtacatgttaaagg

SEQ ID NO: 320529 - DNA, 20 bp, Artificial Sequence
  Description of Artificial Sequence: Synthetic oligonucleotide
  Target: LAMA2; (+) strand; PAM type: YTN; PAM sequence: TTA
aaggactattttgtattatt

SEQ ID NO: 320530 - DNA, 20 bp, Artificial Sequence
  Description of Artificial Sequence: Synthetic oligonucleotide
  Target: LAMA2; (+) strand; PAM type: YTN; PAM sequence: CTA
ttttgtattattattttgtt

SEQ ID NO: 320531 - DNA, 20 bp, Artificial Sequence
  Description of Artificial Sequence: Synthetic oligonucleotide
  Target: LAMA2; (+) strand; PAM type: YTN; PAM sequence: TTT
tgtattattattttgttttt

SEQ ID NO: 320532 - DNA, 20 bp, Artificial Sequence
  Description of Artificial Sequence: Synthetic oligonucleotide
  Target: LAMA2; (+) strand; PAM type: YTN; PAM sequence: TTT
gtattattattttgttttta

SEQ ID NO: 320533 - DNA, 20 bp, Artificial Sequence
  Description of Artificial Sequence: Synthetic oligonucleotide
  Target: LAMA2; (+) strand; PAM type: YTN; PAM sequence: TTG
tattattattttgtttttaa

SEQ ID NO: 320534 - DNA, 20 bp, Artificial Sequence
  Description of Artificial Sequence: Synthetic oligonucleotide
  Target: LAMA2; (+) strand; PAM type: YTN; PAM sequence: TTA
ttattttgtttttaaatagg

SEQ ID NO: 320535 - DNA, 20 bp, Artificial Sequence
  Description of Artificial Sequence: Synthetic oligonucleotide
  Target: LAMA2; (+) strand; PAM type: YTN; PAM sequence: TTA
ttttgtttttaaataggccc

SEQ ID NO: 320536 - DNA, 20 bp, Artificial Sequence
  Description of Artificial Sequence: Synthetic oligonucleotide
  Target: LAMA2; (+) strand; PAM type: YTN; PAM sequence: TTT
tgtttttaaataggcccctt

SEQ ID NO: 320537 - DNA, 20 bp, Artificial Sequence
  Description of Artificial Sequence: Synthetic oligonucleotide
  Target: LAMA2; (+) strand; PAM type: YTN; PAM sequence: TTT
gtttttaaataggccccttt

SEQ ID NO: 320538 - DNA, 20 bp, Artificial Sequence
  Description of Artificial Sequence: Synthetic oligonucleotide
  Target: LAMA2; (+) strand; PAM type: YTN; PAM sequence: TTG
tttttaaataggcccctttc

SEQ ID NO: 320539 - DNA, 20 bp, Artificial Sequence
  Description of Artificial Sequence: Synthetic oligonucleotide
  Target: LAMA2; (+) strand; PAM type: YTN; PAM sequence: TTT
ttaaataggcccctttctct

SEQ ID NO: 320540 - DNA, 20 bp, Artificial Sequence
  Description of Artificial Sequence: Synthetic oligonucleotide
  Target: LAMA2; (+) strand; PAM type: YTN; PAM sequence: TTT
taaataggcccctttctctc

SEQ ID NO: 320541 - DNA, 20 bp, Artificial Sequence
  Description of Artificial Sequence: Synthetic oligonucleotide
  Target: LAMA2; (+) strand; PAM type: YTN; PAM sequence: TTT
aaataggcccctttctctca

SEQ ID NO: 320542 - DNA, 20 bp, Artificial Sequence
  Description of Artificial Sequence: Synthetic oligonucleotide
  Target: LAMA2; (+) strand; PAM type: YTN; PAM sequence: TTA
aataggcccctttctctcat

SEQ ID NO: 320543 - DNA, 20 bp, Artificial Sequence
  Description of Artificial Sequence: Synthetic oligonucleotide
  Target: LAMA2; (+) strand; PAM type: YTN; PAM sequence: CTT
tctctcatatttatcttgcc

SEQ ID NO: 320544 - DNA, 20 bp, Artificial Sequence
  Description of Artificial Sequence: Synthetic oligonucleotide
  Target: LAMA2; (+) strand; PAM type: YTN; PAM sequence: TTT
ctctcatatttatcttgcct

SEQ ID NO: 320545 - DNA, 20 bp, Artificial Sequence
  Description of Artificial Sequence: Synthetic oligonucleotide
  Target: LAMA2; (+) strand; PAM type: YTN; PAM sequence: TTC
tctcatatttatcttgcctt

SEQ ID NO: 320546 - DNA, 20 bp, Artificial Sequence
  Description of Artificial Sequence: Synthetic oligonucleotide
  Target: LAMA2; (+) strand; PAM type: YTN; PAM sequence: CTC
tcatatttatcttgccttaa

SEQ ID NO: 320547 - DNA, 20 bp, Artificial Sequence
  Description of Artificial Sequence: Synthetic oligonucleotide
  Target: LAMA2; (+) strand; PAM type: YTN; PAM sequence: CTC
atatttatcttgccttaatt

SEQ ID NO: 320548 - DNA, 20 bp, Artificial Sequence
  Description of Artificial Sequence: Synthetic oligonucleotide
  Target: LAMA2; (+) strand; PAM type: YTN; PAM sequence: TTT
atcttgccttaattagggag

SEQ ID NO: 320549 - DNA, 20 bp, Artificial Sequence
  Description of Artificial Sequence: Synthetic oligonucleotide
  Target: LAMA2; (+) strand; PAM type: YTN; PAM sequence: TTA
tcttgccttaattagggagt

SEQ ID NO: 320550 - DNA, 20 bp, Artificial Sequence
  Description of Artificial Sequence: Synthetic oligonucleotide
  Target: LAMA2; (+) strand; PAM type: YTN; PAM sequence: CTT
gccttaattagggagtttat

SEQ ID NO: 320551 - DNA, 20 bp, Artificial Sequence
  Description of Artificial Sequence: Synthetic oligonucleotide
  Target: LAMA2; (+) strand; PAM type: YTN; PAM sequence: TTG
ccttaattagggagtttatt

SEQ ID NO: 320552 - DNA, 20 bp, Artificial Sequence
  Description of Artificial Sequence: Synthetic oligonucleotide
  Target: LAMA2; (+) strand; PAM type: YTN; PAM sequence: CTT
aattagggagtttattgttt

SEQ ID NO: 320553 - DNA, 20 bp, Artificial Sequence
  Description of Artificial Sequence: Synthetic oligonucleotide
  Target: LAMA2; (+) strand; PAM type: YTN; PAM sequence: TTA
attagggagtttattgttta

SEQ ID NO: 320554 - DNA, 20 bp, Artificial Sequence
  Description of Artificial Sequence: Synthetic oligonucleotide
  Target: LAMA2; (+) strand; PAM type: YTN; PAM sequence: TTA
gggagtttattgtttattaa

SEQ ID NO: 320555 - DNA, 20 bp, Artificial Sequence
  Description of Artificial Sequence: Synthetic oligonucleotide
  Target: LAMA2; (+) strand; PAM type: YTN; PAM sequence: TTT
attgtttattaaaaagcttt

SEQ ID NO: 320556 - DNA, 20 bp, Artificial Sequence
  Description of Artificial Sequence: Synthetic oligonucleotide
  Target: LAMA2; (+) strand; PAM type: YTN; PAM sequence: TTA
ttgtttattaaaaagcttta

SEQ ID NO: 320557 - DNA, 20 bp, Artificial Sequence
  Description of Artificial Sequence: Synthetic oligonucleotide
  Target: LAMA2; (+) strand; PAM type: YTN; PAM sequence: TTG
tttattaaaaagctttaatc

SEQ ID NO: 320558 - DNA, 20 bp, Artificial Sequence
  Description of Artificial Sequence: Synthetic oligonucleotide
  Target: LAMA2; (+) strand; PAM type: YTN; PAM sequence: TTT
attaaaaagctttaatctga

SEQ ID NO: 320559 - DNA, 20 bp, Artificial Sequence
  Description of Artificial Sequence: Synthetic oligonucleotide
  Target: LAMA2; (+) strand; PAM type: YTN; PAM sequence: TTA
ttaaaaagctttaatctgaa

SEQ ID NO: 320560 - DNA, 20 bp, Artificial Sequence
  Description of Artificial Sequence: Synthetic oligonucleotide
  Target: LAMA2; (+) strand; PAM type: YTN; PAM sequence: TTA
aaaagctttaatctgaacta

SEQ ID NO: 320561 - DNA, 20 bp, Artificial Sequence
  Description of Artificial Sequence: Synthetic oligonucleotide
  Target: LAMA2; (+) strand; PAM type: YTN; PAM sequence: CTT
taatctgaactactttcatt

SEQ ID NO: 320562 - DNA, 20 bp, Artificial Sequence
  Description of Artificial Sequence: Synthetic oligonucleotide
  Target: LAMA2; (+) strand; PAM type: YTN; PAM sequence: TTT
aatctgaactactttcattg

SEQ ID NO: 320563 - DNA, 20 bp, Artificial Sequence
  Description of Artificial Sequence: Synthetic oligonucleotide
  Target: LAMA2; (+) strand; PAM type: YTN; PAM sequence: TTA
atctgaactactttcattgt

SEQ ID NO: 320564 - DNA, 20 bp, Artificial Sequence
  Description of Artificial Sequence: Synthetic oligonucleotide
  Target: LAMA2; (+) strand; PAM type: YTN; PAM sequence: CTG
aactactttcattgtgtggg

SEQ ID NO: 320565 - DNA, 20 bp, Artificial Sequence
  Description of Artificial Sequence: Synthetic oligonucleotide
  Target: LAMA2; (+) strand; PAM type: YTN; PAM sequence: CTA
ctttcattgtgtgggtgtgt

SEQ ID NO: 320566 - DNA, 20 bp, Artificial Sequence
  Description of Artificial Sequence: Synthetic oligonucleotide
  Target: LAMA2; (+) strand; PAM type: YTN; PAM sequence: CTT
tcattgtgtgggtgtgtgtg

SEQ ID NO: 320567 - DNA, 20 bp, Artificial Sequence
  Description of Artificial Sequence: Synthetic oligonucleotide
  Target: LAMA2; (+) strand; PAM type: YTN; PAM sequence: TTT
cattgtgtgggtgtgtgtgt

SEQ ID NO: 320568 - DNA, 20 bp, Artificial Sequence
  Description of Artificial Sequence: Synthetic oligonucleotide
  Target: LAMA2; (+) strand; PAM type: YTN; PAM sequence: TTC
attgtgtgggtgtgtgtgtg

SEQ ID NO: 320569 - DNA, 20 bp, Artificial Sequence
  Description of Artificial Sequence: Synthetic oligonucleotide
  Target: LAMA2; (+) strand; PAM type: YTN; PAM sequence: TTG
tgtgggtgtgtgtgtgtgct

SEQ ID NO: 320570 - DNA, 20 bp, Artificial Sequence
  Description of Artificial Sequence: Synthetic oligonucleotide
  Target: LAMA2; (+) strand; PAM type: YTN; PAM sequence: CTG
tttgaaacaaatgaactaaa

SEQ ID NO: 320571 - DNA, 20 bp, Artificial Sequence
  Description of Artificial Sequence: Synthetic oligonucleotide
  Target: LAMA2; (+) strand; PAM type: YTN; PAM sequence: TTT
gaaacaaatgaactaaaaat

SEQ ID NO: 320572 - DNA, 20 bp, Artificial Sequence
  Description of Artificial Sequence: Synthetic oligonucleotide
  Target: LAMA2; (+) strand; PAM type: YTN; PAM sequence: TTG
aaacaaatgaactaaaaatg

SEQ ID NO: 320573 - DNA, 20 bp, Artificial Sequence
  Description of Artificial Sequence: Synthetic oligonucleotide
  Target: LAMA2; (+) strand; PAM type: YTN; PAM sequence: CTA
aaaatgtttttaattgagct

SEQ ID NO: 320574 - DNA, 20 bp, Artificial Sequence
  Description of Artificial Sequence: Synthetic oligonucleotide
  Target: LAMA2; (+) strand; PAM type: YTN; PAM sequence: TTT
ttaattgagctgcaagtgaa

SEQ ID NO: 320575 - DNA, 20 bp, Artificial Sequence
  Description of Artificial Sequence: Synthetic oligonucleotide
  Target: LAMA2; (+) strand; PAM type: YTN; PAM sequence: TTT
taattgagctgcaagtgaag

SEQ ID NO: 320576 - DNA, 20 bp, Artificial Sequence
  Description of Artificial Sequence: Synthetic oligonucleotide
  Target: LAMA2; (+) strand; PAM type: YTN; PAM sequence: TTT
aattgagctgcaagtgaaga

SEQ ID NO: 320577 - DNA, 20 bp, Artificial Sequence
  Description of Artificial Sequence: Synthetic oligonucleotide
  Target: LAMA2; (+) strand; PAM type: YTN; PAM sequence: TTA
attgagctgcaagtgaagac

SEQ ID NO: 320578 - DNA, 20 bp, Artificial Sequence
  Description of Artificial Sequence: Synthetic oligonucleotide
  Target: LAMA2; (+) strand; PAM type: YTN; PAM sequence: TTG
agctgcaagtgaagacttgt

SEQ ID NO: 320579 - DNA, 20 bp, Artificial Sequence
  Description of Artificial Sequence: Synthetic oligonucleotide
  Target: LAMA2; (+) strand; PAM type: YTN; PAM sequence: CTG
caagtgaagacttgtcaata

SEQ ID NO: 320580 - DNA, 20 bp, Artificial Sequence
  Description of Artificial Sequence: Synthetic oligonucleotide
  Target: LAMA2; (+) strand; PAM type: YTN; PAM sequence: CTT
gtcaatacataaattataca

SEQ ID NO: 320581 - DNA, 20 bp, Artificial Sequence
  Description of Artificial Sequence: Synthetic oligonucleotide
  Target: LAMA2; (+) strand; PAM type: YTN; PAM sequence: TTG
tcaatacataaattatacag

SEQ ID NO: 320582 - DNA, 20 bp, Artificial Sequence
  Description of Artificial Sequence: Synthetic oligonucleotide
  Target: LAMA2; (+) strand; PAM type: YTN; PAM sequence: TTA
tacagtattatatatctcta

SEQ ID NO: 320583 - DNA, 20 bp, Artificial Sequence
  Description of Artificial Sequence: Synthetic oligonucleotide
  Target: LAMA2; (+) strand; PAM type: YTN; PAM sequence: TTA
tatatctctatatatgcata

SEQ ID NO: 320584 - DNA, 20 bp, Artificial Sequence
  Description of Artificial Sequence: Synthetic oligonucleotide
  Target: LAMA2; (+) strand; PAM type: YTN; PAM sequence: CTC
tatatatgcataaagaggat

SEQ ID NO: 320585 - DNA, 20 bp, Artificial Sequence
  Description of Artificial Sequence: Synthetic oligonucleotide
  Target: LAMA2; (+) strand; PAM type: YTN; PAM sequence: CTA
tatatgcataaagaggatat

SEQ ID NO: 320586 - DNA, 20 bp, Artificial Sequence
  Description of Artificial Sequence: Synthetic oligonucleotide
  Target: LAMA2; (+) strand; PAM type: YTN; PAM sequence: TTT
taatcagcacatgtccctgt

SEQ ID NO: 320587 - DNA, 20 bp, Artificial Sequence
  Description of Artificial Sequence: Synthetic oligonucleotide
  Target: LAMA2; (+) strand; PAM type: YTN; PAM sequence: TTT
aatcagcacatgtccctgta

SEQ ID NO: 320588 - DNA, 20 bp, Artificial Sequence
  Description of Artificial Sequence: Synthetic oligonucleotide
  Target: LAMA2; (+) strand; PAM type: YTN; PAM sequence: TTA
atcagcacatgtccctgtat

SEQ ID NO: 320589 - DNA, 20 bp, Artificial Sequence
  Description of Artificial Sequence: Synthetic oligonucleotide
  Target: LAMA2; (+) strand; PAM type: YTN; PAM sequence: CTG
tatttaaaagttaaaagaac

SEQ ID NO: 320590 - DNA, 20 bp, Artificial Sequence
  Description of Artificial Sequence: Synthetic oligonucleotide
  Target: LAMA2; (+) strand; PAM type: YTN; PAM sequence: TTT
aaaagttaaaagaaccgctc

SEQ ID NO: 320591 - DNA, 20 bp, Artificial Sequence
  Description of Artificial Sequence: Synthetic oligonucleotide
  Target: LAMA2; (+) strand; PAM type: YTN; PAM sequence: TTA
aaagttaaaagaaccgctct

SEQ ID NO: 320592 - DNA, 20 bp, Artificial Sequence
  Description of Artificial Sequence: Synthetic oligonucleotide
  Target: LAMA2; (+) strand; PAM type: YTN; PAM sequence: TTA
aaagaaccgctctacagagc

SEQ ID NO: 320593 - DNA, 20 bp, Artificial Sequence
  Description of Artificial Sequence: Synthetic oligonucleotide
  Target: LAMA2; (+) strand; PAM type: YTN; PAM sequence: CTC
tacagagctaagaatacagg

SEQ ID NO: 320594 - DNA, 20 bp, Artificial Sequence
  Description of Artificial Sequence: Synthetic oligonucleotide
  Target: LAMA2; (+) strand; PAM type: YTN; PAM sequence: CTA
cagagctaagaatacaggta

SEQ ID NO: 320595 - DNA, 20 bp, Artificial Sequence
  Description of Artificial Sequence: Synthetic oligonucleotide
  Target: LAMA2; (+) strand; PAM type: YTN; PAM sequence: CTA
agaatacaggtattttaatt

SEQ ID NO: 320596 - DNA, 20 bp, Artificial Sequence
  Description of Artificial Sequence: Synthetic oligonucleotide
  Target: LAMA2; (+) strand; PAM type: YTN; PAM sequence: TTT
taattttttaaatgattata

SEQ ID NO: 320597 - DNA, 20 bp, Artificial Sequence
  Description of Artificial Sequence: Synthetic oligonucleotide
  Target: LAMA2; (+) strand; PAM type: YTN; PAM sequence: TTT
aattttttaaatgattataa

SEQ ID NO: 320598 - DNA, 20 bp, Artificial Sequence
  Description of Artificial Sequence: Synthetic oligonucleotide
  Target: LAMA2; (+) strand; PAM type: YTN; PAM sequence: TTA
attttttaaatgattataac

SEQ ID NO: 320599 - DNA, 20 bp, Artificial Sequence
  Description of Artificial Sequence: Synthetic oligonucleotide
  Target: LAMA2; (+) strand; PAM type: YTN; PAM sequence: TTT
tttaaatgattataacgggg

SEQ ID NO: 320600 - DNA, 20 bp, Artificial Sequence
  Description of Artificial Sequence: Synthetic oligonucleotide
  Target: LAMA2; (+) strand; PAM type: YTN; PAM sequence: TTT
ttaaatgattataacggggg

SEQ ID NO: 320601 - DNA, 20 bp, Artificial Sequence
  Description of Artificial Sequence: Synthetic oligonucleotide
  Target: LAMA2; (+) strand; PAM type: YTN; PAM sequence: TTT
taaatgattataacggggga

SEQ ID NO: 320602 - DNA, 20 bp, Artificial Sequence
  Description of Artificial Sequence: Synthetic oligonucleotide
  Target: LAMA2; (+) strand; PAM type: YTN; PAM sequence: TTT
aaatgattataacgggggaa

SEQ ID NO: 320603 - DNA, 20 bp, Artificial Sequence
  Description of Artificial Sequence: Synthetic oligonucleotide
  Target: LAMA2; (+) strand; PAM type: YTN; PAM sequence: TTA
aatgattataacgggggaaa

SEQ ID NO: 320604 - DNA, 20 bp, Artificial Sequence
  Description of Artificial Sequence: Synthetic oligonucleotide
  Target: LAMA2; (+) strand; PAM type: YTN; PAM sequence: TTA
taacgggggaaattccactg

SEQ ID NO: 320605 - DNA, 20 bp, Artificial Sequence
  Description of Artificial Sequence: Synthetic oligonucleotide
  Target: LAMA2; (+) strand; PAM type: YTN; PAM sequence: TTC
cactgttgtttctttagtgt

SEQ ID NO: 320606 - DNA, 20 bp, Artificial Sequence
  Description of Artificial Sequence: Synthetic oligonucleotide
  Target: LAMA2; (+) strand; PAM type: YTN; PAM sequence: CTG
ttgtttctttagtgtttgat

SEQ ID NO: 320607 - DNA, 20 bp, Artificial Sequence
  Description of Artificial Sequence: Synthetic oligonucleotide
  Target: LAMA2; (+) strand; PAM type: YTN; PAM sequence: TTG
tttctttagtgtttgatgag

SEQ ID NO: 320608 - DNA, 20 bp, Artificial Sequence
  Description of Artificial Sequence: Synthetic oligonucleotide
  Target: LAMA2; (+) strand; PAM type: YTN; PAM sequence: TTT
ctttagtgtttgatgaggga

SEQ ID NO: 320609 - DNA, 20 bp, Artificial Sequence
  Description of Artificial Sequence: Synthetic oligonucleotide
  Target: LAMA2; (+) strand; PAM type: YTN; PAM sequence: TTC
tttagtgtttgatgagggat

SEQ ID NO: 320610 - DNA, 20 bp, Artificial Sequence
  Description of Artificial Sequence: Synthetic oligonucleotide
  Target: LAMA2; (+) strand; PAM type: YTN; PAM sequence: CTT
tagtgtttgatgagggattg

SEQ ID NO: 320611 - DNA, 20 bp, Artificial Sequence
  Description of Artificial Sequence: Synthetic oligonucleotide
  Target: LAMA2; (+) strand; PAM type: YTN; PAM sequence: TTT
agtgtttgatgagggattgt

SEQ ID NO: 320612 - DNA, 20 bp, Artificial Sequence
  Description of Artificial Sequence: Synthetic oligonucleotide
  Target: LAMA2; (+) strand; PAM type: YTN; PAM sequence: TTA
gtgtttgatgagggattgta

SEQ ID NO: 320613 - DNA, 20 bp, Artificial Sequence
  Description of Artificial Sequence: Synthetic oligonucleotide
  Target: LAMA2; (+) strand; PAM type: YTN; PAM sequence: TTT
gatgagggattgtaatctaa

SEQ ID NO: 320614 - DNA, 20 bp, Artificial Sequence
  Description of Artificial Sequence: Synthetic oligonucleotide
  Target: LAMA2; (+) strand; PAM type: YTN; PAM sequence: TTG
atgagggattgtaatctaat

SEQ ID NO: 320615 - DNA, 20 bp, Artificial Sequence
  Description of Artificial Sequence: Synthetic oligonucleotide
  Target: LAMA2; (+) strand; PAM type: YTN; PAM sequence: TTG
taatctaatcagtttaaacg

SEQ ID NO: 320616 - DNA, 20 bp, Artificial Sequence
  Description of Artificial Sequence: Synthetic oligonucleotide
  Target: LAMA2; (+) strand; PAM type: YTN; PAM sequence: CTA
atcagtttaaacgactataa

SEQ ID NO: 320617 - DNA, 20 bp, Artificial Sequence
  Description of Artificial Sequence: Synthetic oligonucleotide
  Target: LAMA2; (+) strand; PAM type: YTN; PAM sequence: TTT
aaacgactataaacacagcg

SEQ ID NO: 320618 - DNA, 20 bp, Artificial Sequence
  Description of Artificial Sequence: Synthetic oligonucleotide
  Target: LAMA2; (+) strand; PAM type: YTN; PAM sequence: TTA
aacgactataaacacagcga

SEQ ID NO: 320619 - DNA, 20 bp, Artificial Sequence
  Description of Artificial Sequence: Synthetic oligonucleotide
  Target: LAMA2; (+) strand; PAM type: YTN; PAM sequence: CTA
taaacacagcgatgatcatt

SEQ ID NO: 320620 - DNA, 20 bp, Artificial Sequence
  Description of Artificial Sequence: Synthetic oligonucleotide
  Target: LAMA2; (+) strand; PAM type: YTN; PAM sequence: TTT
aagttggattttgattcgaa

SEQ ID NO: 320621 - DNA, 20 bp, Artificial Sequence
  Description of Artificial Sequence: Synthetic oligonucleotide
  Target: LAMA2; (+) strand; PAM type: YTN; PAM sequence: TTA
agttggattttgattcgaaa

SEQ ID NO: 320622 - DNA, 20 bp, Artificial Sequence
  Description of Artificial Sequence: Synthetic oligonucleotide
  Target: LAMA2; (+) strand; PAM type: YTN; PAM sequence: TTG
gattttgattcgaaaagtaa

SEQ ID NO: 320623 - DNA, 20 bp, Artificial Sequence
  Description of Artificial Sequence: Synthetic oligonucleotide
  Target: LAMA2; (+) strand; PAM type: YTN; PAM sequence: TTT
tgattcgaaaagtaagttct

SEQ ID NO: 320624 - DNA, 20 bp, Artificial Sequence
  Description of Artificial Sequence: Synthetic oligonucleotide
  Target: LAMA2; (+) strand; PAM type: YTN; PAM sequence: TTT
gattcgaaaagtaagttctt

SEQ ID NO: 320625 - DNA, 20 bp, Artificial Sequence
  Description of Artificial Sequence: Synthetic oligonucleotide
  Target: LAMA2; (+) strand; PAM type: YTN; PAM sequence: TTG
attcgaaaagtaagttcttg

SEQ ID NO: 320626 - DNA, 20 bp, Artificial Sequence
  Description of Artificial Sequence: Synthetic oligonucleotide
  Target: LAMA2; (+) strand; PAM type: YTN; PAM sequence: TTC
gaaaagtaagttcttggaat

SEQ ID NO: 320627 - DNA, 20 bp, Artificial Sequence
  Description of Artificial Sequence: Synthetic oligonucleotide
  Target: LAMA2; (+) strand; PAM type: YTN; PAM sequence: TTC
ttggaatttagggtattgca

SEQ ID NO: 320628 - DNA, 20 bp, Artificial Sequence
  Description of Artificial Sequence: Synthetic oligonucleotide
  Target: LAMA2; (+) strand; PAM type: YTN; PAM sequence: CTT
ggaatttagggtattgcaca

SEQ ID NO: 320629 - DNA, 20 bp, Artificial Sequence
  Description of Artificial Sequence: Synthetic oligonucleotide
  Target: LAMA2; (+) strand; PAM type: YTN; PAM sequence: TTG
gaatttagggtattgcacaa

SEQ ID NO: 320630 - DNA, 20 bp, Artificial Sequence
  Description of Artificial Sequence: Synthetic oligonucleotide
  Target: LAMA2; (+) strand; PAM type: YTN; PAM sequence: TTT
agggtattgcacaatctgtc

SEQ ID NO: 320631 - DNA, 20 bp, Artificial Sequence
  Description of Artificial Sequence: Synthetic oligonucleotide
  Target: LAMA2; (+) strand; PAM type: YTN; PAM sequence: TTA
gggtattgcacaatctgtcc

SEQ ID NO: 320632 - DNA, 20 bp, Artificial Sequence
  Description of Artificial Sequence: Synthetic oligonucleotide
  Target: LAMA2; (+) strand; PAM type: YTN; PAM sequence: TTG
cacaatctgtcccatacagg

SEQ ID NO: 320633 - DNA, 20 bp, Artificial Sequence
  Description of Artificial Sequence: Synthetic oligonucleotide
  Target: LAMA2; (+) strand; PAM type: YTN; PAM sequence: CTG
tcccatacaggggaaaaaaa

SEQ ID NO: 320634 - DNA, 20 bp, Artificial Sequence
  Description of Artificial Sequence: Synthetic oligonucleotide
  Target: LAMA2; (+) strand; PAM type: YTN; PAM sequence: CTA
cttgtgatttttactaattt

SEQ ID NO: 320635 - DNA, 20 bp, Artificial Sequence
  Description of Artificial Sequence: Synthetic oligonucleotide
  Target: LAMA2; (+) strand; PAM type: YTN; PAM sequence: CTT
gtgatttttactaatttttt

SEQ ID NO: 320636 - DNA, 20 bp, Artificial Sequence
  Description of Artificial Sequence: Synthetic oligonucleotide
  Target: LAMA2; (+) strand; PAM type: YTN; PAM sequence: TTG
tgatttttactaattttttt

SEQ ID NO: 320637 - DNA, 20 bp, Artificial Sequence
  Description of Artificial Sequence: Synthetic oligonucleotide
  Target: LAMA2; (+) strand; PAM type: YTN; PAM sequence: TTT
ttactaatttttttccgtga

SEQ ID NO: 320638 - DNA, 20 bp, Artificial Sequence
  Description of Artificial Sequence: Synthetic oligonucleotide
  Target: LAMA2; (+) strand; PAM type: YTN; PAM sequence: TTT
tactaatttttttccgtgag

SEQ ID NO: 320639 - DNA, 20 bp, Artificial Sequence
  Description of Artificial Sequence: Synthetic oligonucleotide
  Target: LAMA2; (+) strand; PAM type: YTN; PAM sequence: TTT
actaatttttttccgtgaga

SEQ ID NO: 320640 - DNA, 20 bp, Artificial Sequence
  Description of Artificial Sequence: Synthetic oligonucleotide
  Target: LAMA2; (+) strand; PAM type: YTN; PAM sequence: TTA
ctaatttttttccgtgagaa

SEQ ID NO: 320641 - DNA, 20 bp, Artificial Sequence
  Description of Artificial Sequence: Synthetic oligonucleotide
  Target: LAMA2; (+) strand; PAM type: YTN; PAM sequence: CTA
atttttttccgtgagaatag

SEQ ID NO: 320642 - DNA, 20 bp, Artificial Sequence
  Description of Artificial Sequence: Synthetic oligonucleotide
  Target: LAMA2; (+) strand; PAM type: YTN; PAM sequence: TTT
ttttccgtgagaatagaatc

SEQ ID NO: 320643 - DNA, 20 bp, Artificial Sequence
  Description of Artificial Sequence: Synthetic oligonucleotide
  Target: LAMA2; (+) strand; PAM type: YTN; PAM sequence: TTT
tttccgtgagaatagaatcc

SEQ ID NO: 320644 - DNA, 20 bp, Artificial Sequence
  Description of Artificial Sequence: Synthetic oligonucleotide
  Target: LAMA2; (+) strand; PAM type: YTN; PAM sequence: TTT
ttccgtgagaatagaatcct

SEQ ID NO: 320645 - DNA, 20 bp, Artificial Sequence
  Description of Artificial Sequence: Synthetic oligonucleotide
  Target: LAMA2; (+) strand; PAM type: YTN; PAM sequence: TTT
tccgtgagaatagaatcctg

SEQ ID NO: 320646 - DNA, 20 bp, Artificial Sequence
  Description of Artificial Sequence: Synthetic oligonucleotide
  Target: LAMA2; (+) strand; PAM type: YTN; PAM sequence: TTT
ccgtgagaatagaatcctgc

SEQ ID NO: 320647 - DNA, 20 bp, Artificial Sequence
  Description of Artificial Sequence: Synthetic oligonucleotide
  Target: LAMA2; (+) strand; PAM type: YTN; PAM sequence: TTC
cgtgagaatagaatcctgct

SEQ ID NO: 320648 - DNA, 20 bp, Artificial Sequence
  Description of Artificial Sequence: Synthetic oligonucleotide
  Target: LAMA2; (+) strand; PAM type: YTN; PAM sequence: CTG
ctgggaagcttattttattc

SEQ ID NO: 320649 - DNA, 20 bp, Artificial Sequence
  Description of Artificial Sequence: Synthetic oligonucleotide
  Target: LAMA2; (+) strand; PAM type: YTN; PAM sequence: CTG
ggaagcttattttattctct

SEQ ID NO: 320650 - DNA, 20 bp, Artificial Sequence
  Description of Artificial Sequence: Synthetic oligonucleotide
  Target: LAMA2; (+) strand; PAM type: YTN; PAM sequence: CTT
attttattctcttagatttg

SEQ ID NO: 320651 - DNA, 20 bp, Artificial Sequence
  Description of Artificial Sequence: Synthetic oligonucleotide
  Target: LAMA2; (+) strand; PAM type: YTN; PAM sequence: TTA
ttttattctcttagatttgc

SEQ ID NO: 320652 - DNA, 20 bp, Artificial Sequence
  Description of Artificial Sequence: Synthetic oligonucleotide
  Target: LAMA2; (+) strand; PAM type: YTN; PAM sequence: TTT
tattctcttagatttgcttc

SEQ ID NO: 320653 - DNA, 20 bp, Artificial Sequence
  Description of Artificial Sequence: Synthetic oligonucleotide
  Target: LAMA2; (+) strand; PAM type: YTN; PAM sequence: TTT
attctcttagatttgcttcc

SEQ ID NO: 320654 - DNA, 20 bp, Artificial Sequence
  Description of Artificial Sequence: Synthetic oligonucleotide
  Target: LAMA2; (+) strand; PAM type: YTN; PAM sequence: TTA
ttctcttagatttgcttcct

SEQ ID NO: 320655 - DNA, 20 bp, Artificial Sequence
  Description of Artificial Sequence: Synthetic oligonucleotide
  Target: LAMA2; (+) strand; PAM type: YTN; PAM sequence: TTC
tcttagatttgcttcctcct

SEQ ID NO: 320656 - DNA, 20 bp, Artificial Sequence
  Description of Artificial Sequence: Synthetic oligonucleotide
  Target: LAMA2; (+) strand; PAM type: YTN; PAM sequence: CTC
ttagatttgcttcctccttt

SEQ ID NO: 320657 - DNA, 20 bp, Artificial Sequence
  Description of Artificial Sequence: Synthetic oligonucleotide
  Target: LAMA2; (+) strand; PAM type: YTN; PAM sequence: CTT
agatttgcttcctccttttt

SEQ ID NO: 320658 - DNA, 20 bp, Artificial Sequence
  Description of Artificial Sequence: Synthetic oligonucleotide
  Target: LAMA2; (+) strand; PAM type: YTN; PAM sequence: TTA
gatttgcttcctcctttttt

SEQ ID NO: 320659 - DNA, 20 bp, Artificial Sequence
  Description of Artificial Sequence: Synthetic oligonucleotide
  Target: LAMA2; (+) strand; PAM type: YTN; PAM sequence: TTT
gcttcctcctttttttcccc

SEQ ID NO: 320660 - DNA, 20 bp, Artificial Sequence
  Description of Artificial Sequence: Synthetic oligonucleotide
  Target: LAMA2; (+) strand; PAM type: YTN; PAM sequence: TTG
cttcctcctttttttccccc

SEQ ID NO: 320661 - DNA, 20 bp, Artificial Sequence
  Description of Artificial Sequence: Synthetic oligonucleotide
  Target: LAMA2; (+) strand; PAM type: YTN; PAM sequence: CTT
cctcctttttttccccctcc

SEQ ID NO: 320662 - DNA, 20 bp, Artificial Sequence
  Description of Artificial Sequence: Synthetic oligonucleotide
  Target: LAMA2; (+) strand; PAM type: YTN; PAM sequence: TTC
ctcctttttttccccctccg

SEQ ID NO: 320663 - DNA, 20 bp, Artificial Sequence
  Description of Artificial Sequence: Synthetic oligonucleotide
  Target: LAMA2; (+) strand; PAM type: YTN; PAM sequence: CTC
ctttttttccccctccggag

SEQ ID NO: 320664 - DNA, 20 bp, Artificial Sequence
  Description of Artificial Sequence: Synthetic oligonucleotide
  Target: LAMA2; (+) strand; PAM type: YTN; PAM sequence: CTT
tttttccccctccggagaac

SEQ ID NO: 320665 - DNA, 20 bp, Artificial Sequence
  Description of Artificial Sequence: Synthetic oligonucleotide
  Target: LAMA2; (+) strand; PAM type: YTN; PAM sequence: TTT
ttttccccctccggagaacg

SEQ ID NO: 320666 - DNA, 20 bp, Artificial Sequence
  Description of Artificial Sequence: Synthetic oligonucleotide
  Target: LAMA2; (+) strand; PAM type: YTN; PAM sequence: TTT
tttccccctccggagaacga

SEQ ID NO: 320667 - DNA, 20 bp, Artificial Sequence
  Description of Artificial Sequence: Synthetic oligonucleotide
  Target: LAMA2; (+) strand; PAM type: YTN; PAM sequence: TTT
ttccccctccggagaacgat

SEQ ID NO: 320668 - DNA, 20 bp, Artificial Sequence
  Description of Artificial Sequence: Synthetic oligonucleotide
  Target: LAMA2; (+) strand; PAM type: YTN; PAM sequence: TTT
tccccctccggagaacgatg

SEQ ID NO: 320669 - DNA, 20 bp, Artificial Sequence
  Description of Artificial Sequence: Synthetic oligonucleotide
  Target: LAMA2; (+) strand; PAM type: YTN; PAM sequence: TTT
ccccctccggagaacgatga

SEQ ID NO: 320670 - DNA, 20 bp, Artificial Sequence
  Description of Artificial Sequence: Synthetic oligonucleotide
  Target: LAMA2; (+) strand; PAM type: YTN; PAM sequence: TTC
cccctccggagaacgatgac

SEQ ID NO: 320671 - DNA, 20 bp, Artificial Sequence
  Description of Artificial Sequence: Synthetic oligonucleotide
  Target: LAMA2; (+) strand; PAM type: YTN; PAM sequence: CTC
cggagaacgatgactggttt

SEQ ID NO: 320672 - DNA, 20 bp, Artificial Sequence
  Description of Artificial Sequence: Synthetic oligonucleotide
  Target: LAMA2; (+) strand; PAM type: YTN; PAM sequence: CTG
gtttacaaatagcaatttat

SEQ ID NO: 320673 - DNA, 20 bp, Artificial Sequence
  Description of Artificial Sequence: Synthetic oligonucleotide
  Target: LAMA2; (+) strand; PAM type: YTN; PAM sequence: TTT
acaaatagcaatttatatca

SEQ ID NO: 320674 - DNA, 20 bp, Artificial Sequence
  Description of Artificial Sequence: Synthetic oligonucleotide
  Target: LAMA2; (+) strand; PAM type: YTN; PAM sequence: TTA
caaatagcaatttatatcaa

SEQ ID NO: 320675 - DNA, 20 bp, Artificial Sequence
  Description of Artificial Sequence: Synthetic oligonucleotide
  Target: LAMA2; (+) strand; PAM type: YTN; PAM sequence: TTT
atatcaactgacacagtcct

SEQ ID NO: 320676 - DNA, 20 bp, Artificial Sequence
  Description of Artificial Sequence: Synthetic oligonucleotide
  Target: LAMA2; (+) strand; PAM type: YTN; PAM sequence: TTA
tatcaactgacacagtcctt

SEQ ID NO: 320677 - DNA, 20 bp, Artificial Sequence
  Description of Artificial Sequence: Synthetic oligonucleotide
  Target: LAMA2; (+) strand; PAM type: YTN; PAM sequence: CTG
acacagtcctttttccttat

SEQ ID NO: 320678 - DNA, 20 bp, Artificial Sequence
  Description of Artificial Sequence: Synthetic oligonucleotide
  Target: LAMA2; (+) strand; PAM type: YTN; PAM sequence: CTT
tttccttatactgttgatct

SEQ ID NO: 320679 - DNA, 20 bp, Artificial Sequence
  Description of Artificial Sequence: Synthetic oligonucleotide
  Target: LAMA2; (+) strand; PAM type: YTN; PAM sequence: TTT
ttccttatactgttgatctc

SEQ ID NO: 320680 - DNA, 20 bp, Artificial Sequence
  Description of Artificial Sequence: Synthetic oligonucleotide
  Target: LAMA2; (+) strand; PAM type: YTN; PAM sequence: TTT
tccttatactgttgatctca

SEQ ID NO: 320681 - DNA, 20 bp, Artificial Sequence
  Description of Artificial Sequence: Synthetic oligonucleotide
  Target: LAMA2; (+) strand; PAM type: YTN; PAM sequence: TTT
ccttatactgttgatctcag

SEQ ID NO: 320682 - DNA, 20 bp, Artificial Sequence
  Description of Artificial Sequence: Synthetic oligonucleotide
  Target: LAMA2; (+) strand; PAM type: YTN; PAM sequence: TTC
cttatactgttgatctcaga

SEQ ID NO: 320683 - DNA, 20 bp, Artificial Sequence
  Description of Artificial Sequence: Synthetic oligonucleotide
  Target: LAMA2; (+) strand; PAM type: YTN; PAM sequence: CTT
atactgttgatctcagaact

SEQ ID NO: 320684 - DNA, 20 bp, Artificial Sequence
  Description of Artificial Sequence: Synthetic oligonucleotide
  Target: LAMA2; (+) strand; PAM type: YTN; PAM sequence: TTA
tactgttgatctcagaactg

SEQ ID NO: 320685 - DNA, 20 bp, Artificial Sequence
  Description of Artificial Sequence: Synthetic oligonucleotide
  Target: LAMA2; (+) strand; PAM type: YTN; PAM sequence: CTG
ttgatctcagaactgttctg

SEQ ID NO: 320686 - DNA, 20 bp, Artificial Sequence
  Description of Artificial Sequence: Synthetic oligonucleotide
  Target: LAMA2; (+) strand; PAM type: YTN; PAM sequence: TTG
atctcagaactgttctgcag

SEQ ID NO: 320687 - DNA, 20 bp, Artificial Sequence
  Description of Artificial Sequence: Synthetic oligonucleotide
  Target: LAMA2; (+) strand; PAM type: YTN; PAM sequence: CTC
agaactgttctgcagtcctg

SEQ ID NO: 320688 - DNA, 20 bp, Artificial Sequence
  Description of Artificial Sequence: Synthetic oligonucleotide
  Target: LAMA2; (+) strand; PAM type: YTN; PAM sequence: CTG
ttctgcagtcctgaagtatg

SEQ ID NO: 320689 - DNA, 20 bp, Artificial Sequence
  Description of Artificial Sequence: Synthetic oligonucleotide
  Target: LAMA2; (+) strand; PAM type: YTN; PAM sequence: TTC
tgcagtcctgaagtatgaaa

SEQ ID NO: 320690 - DNA, 20 bp, Artificial Sequence
  Description of Artificial Sequence: Synthetic oligonucleotide
  Target: LAMA2; (+) strand; PAM type: YTN; PAM sequence: CTG
cagtcctgaagtatgaaaca

SEQ ID NO: 320691 - DNA, 20 bp, Artificial Sequence
  Description of Artificial Sequence: Synthetic oligonucleotide
  Target: LAMA2; (+) strand; PAM type: YTN; PAM sequence: CTG
aagtatgaaacactattgcc

SEQ ID NO: 320692 - DNA, 20 bp, Artificial Sequence
  Description of Artificial Sequence: Synthetic oligonucleotide
  Target: LAMA2; (+) strand; PAM type: YTN; PAM sequence: CTA
ttgccattttttggtacagc

SEQ ID NO: 320693 - DNA, 20 bp, Artificial Sequence
  Description of Artificial Sequence: Synthetic oligonucleotide
  Target: LAMA2; (+) strand; PAM type: YTN; PAM sequence: TTG
ccattttttggtacagccag

SEQ ID NO: 320694 - DNA, 20 bp, Artificial Sequence
  Description of Artificial Sequence: Synthetic oligonucleotide
  Target: LAMA2; (+) strand; PAM type: YTN; PAM sequence: TTT
tttggtacagccagtgctct

SEQ ID NO: 320695 - DNA, 20 bp, Artificial Sequence
  Description of Artificial Sequence: Synthetic oligonucleotide
  Target: LAMA2; (+) strand; PAM type: YTN; PAM sequence: TTT
ttggtacagccagtgctcta

SEQ ID NO: 320696 - DNA, 20 bp, Artificial Sequence
  Description of Artificial Sequence: Synthetic oligonucleotide
  Target: LAMA2; (+) strand; PAM type: YTN; PAM sequence: TTT
tggtacagccagtgctctaa

SEQ ID NO: 320697 - DNA, 20 bp, Artificial Sequence
  Description of Artificial Sequence: Synthetic oligonucleotide
  Target: LAMA2; (+) strand; PAM type: YTN; PAM sequence: TTT
ggtacagccagtgctctaaa

SEQ ID NO: 320698 - DNA, 20 bp, Artificial Sequence
  Description of Artificial Sequence: Synthetic oligonucleotide
  Target: LAMA2; (+) strand; PAM type: YTN; PAM sequence: TTG
gtacagccagtgctctaaaa

SEQ ID NO: 320699 - DNA, 20 bp, Artificial Sequence
  Description of Artificial Sequence: Synthetic oligonucleotide
  Target: LAMA2; (+) strand; PAM type: YTN; PAM sequence: CTC
taaaaaatgtaaatggatga

SEQ ID NO: 320700 - DNA, 20 bp, Artificial Sequence
  Description of Artificial Sequence: Synthetic oligonucleotide
  Target: LAMA2; (+) strand; PAM type: YTN; PAM sequence: CTA
aaaaatgtaaatggatgaaa

SEQ ID NO: 320701 - DNA, 20 bp, Artificial Sequence
  Description of Artificial Sequence: Synthetic oligonucleotide
  Target: LAMA2; (+) strand; PAM type: YTN; PAM sequence: TTC
aatctattatggaagcagaa

SEQ ID NO: 320702 - DNA, 20 bp, Artificial Sequence
  Description of Artificial Sequence: Synthetic oligonucleotide
  Target: LAMA2; (+) strand; PAM type: YTN; PAM sequence: CTA
ttatggaagcagaaacatct

SEQ ID NO: 320703 - DNA, 20 bp, Artificial Sequence
  Description of Artificial Sequence: Synthetic oligonucleotide
  Target: LAMA2; (+) strand; PAM type: YTN; PAM sequence: TTA
tggaagcagaaacatcttcc

SEQ ID NO: 320704 - DNA, 20 bp, Artificial Sequence
  Description of Artificial Sequence: Synthetic oligonucleotide
  Target: LAMA2; (+) strand; PAM type: YTN; PAM sequence: CTT
cctatttgctttacaaattt

SEQ ID NO: 320705 - DNA, 20 bp, Artificial Sequence
  Description of Artificial Sequence: Synthetic oligonucleotide
  Target: LAMA2; (+) strand; PAM type: YTN; PAM sequence: TTC
ctatttgctttacaaatttt

SEQ ID NO: 320706 - DNA, 20 bp, Artificial Sequence
  Description of Artificial Sequence: Synthetic oligonucleotide
  Target: LAMA2; (+) strand; PAM type: YTN; PAM sequence: CTA
tttgctttacaaatttttcc

SEQ ID NO: 320707 - DNA, 20 bp, Artificial Sequence
  Description of Artificial Sequence: Synthetic oligonucleotide
  Target: LAMA2; (+) strand; PAM type: YTN; PAM sequence: TTT
gctttacaaatttttccgag

SEQ ID NO: 320708 - DNA, 20 bp, Artificial Sequence
  Description of Artificial Sequence: Synthetic oligonucleotide
  Target: LAMA2; (+) strand; PAM type: YTN; PAM sequence: TTG
ctttacaaatttttccgagt

SEQ ID NO: 320709 - DNA, 20 bp, Artificial Sequence
  Description of Artificial Sequence: Synthetic oligonucleotide
  Target: LAMA2; (+) strand; PAM type: YTN; PAM sequence: CTT
tacaaatttttccgagtaaa

SEQ ID NO: 320710 - DNA, 20 bp, Artificial Sequence
  Description of Artificial Sequence: Synthetic oligonucleotide
  Target: LAMA2; (+) strand; PAM type: YTN; PAM sequence: TTT
acaaatttttccgagtaaaa

SEQ ID NO: 320711 - DNA, 20 bp, Artificial Sequence
  Description of Artificial Sequence: Synthetic oligonucleotide
  Target: LAMA2; (+) strand; PAM type: YTN; PAM sequence: TTA
caaatttttccgagtaaaat

SEQ ID NO: 320712 - DNA, 20 bp, Artificial Sequence
  Description of Artificial Sequence: Synthetic oligonucleotide
  Target: LAMA2; (+) strand; PAM type: YTN; PAM sequence: TTT
ttccgagtaaaatgcagtca

SEQ ID NO: 320713 - DNA, 20 bp, Artificial Sequence
  Description of Artificial Sequence: Synthetic oligonucleotide
  Target: LAMA2; (+) strand; PAM type: YTN; PAM sequence: TTT
tccgagtaaaatgcagtcag

SEQ ID NO: 320714 - DNA, 20 bp, Artificial Sequence
  Description of Artificial Sequence: Synthetic oligonucleotide
  Target: LAMA2; (+) strand; PAM type: YTN; PAM sequence: TTT
ccgagtaaaatgcagtcagg

SEQ ID NO: 320715 - DNA, 20 bp, Artificial Sequence
  Description of Artificial Sequence: Synthetic oligonucleotide
  Target: LAMA2; (+) strand; PAM type: YTN; PAM sequence: TTC
cgagtaaaatgcagtcaggt

SEQ ID NO: 320716 - DNA, 20 bp, Artificial Sequence
  Description of Artificial Sequence: Synthetic oligonucleotide
  Target: LAMA2; (+) strand; PAM type: YTN; PAM sequence: TTT
gtaacattgcataaaaactt

SEQ ID NO: 320717 - DNA, 20 bp, Artificial Sequence
  Description of Artificial Sequence: Synthetic oligonucleotide
  Target: LAMA2; (+) strand; PAM type: YTN; PAM sequence: TTG
taacattgcataaaaacttg

SEQ ID NO: 320718 - DNA, 20 bp, Artificial Sequence
  Description of Artificial Sequence: Synthetic oligonucleotide
  Target: LAMA2; (+) strand; PAM type: YTN; PAM sequence: TTG
cataaaaacttgttttagaa

SEQ ID NO: 320719 - DNA, 20 bp, Artificial Sequence
  Description of Artificial Sequence: Synthetic oligonucleotide
  Target: LAMA2; (+) strand; PAM type: YTN; PAM sequence: CTT
gttttagaattctttacact

SEQ ID NO: 320720 - DNA, 20 bp, Artificial Sequence
  Description of Artificial Sequence: Synthetic oligonucleotide
  Target: LAMA2; (+) strand; PAM type: YTN; PAM sequence: TTG
ttttagaattctttacacta

SEQ ID NO: 320721 - DNA, 20 bp, Artificial Sequence
  Description of Artificial Sequence: Synthetic oligonucleotide
  Target: LAMA2; (+) strand; PAM type: YTN; PAM sequence: TTT
tagaattctttacactaaat

SEQ ID NO: 320722 - DNA, 20 bp, Artificial Sequence
  Description of Artificial Sequence: Synthetic oligonucleotide
  Target: LAMA2; (+) strand; PAM type: YTN; PAM sequence: TTT
agaattctttacactaaatt

SEQ ID NO: 320723 - DNA, 20 bp, Artificial Sequence
  Description of Artificial Sequence: Synthetic oligonucleotide
  Target: LAMA2; (+) strand; PAM type: YTN; PAM sequence: TTA
gaattctttacactaaatta

SEQ ID NO: 320724 - DNA, 20 bp, Artificial Sequence
  Description of Artificial Sequence: Synthetic oligonucleotide
  Target: LAMA2; (+) strand; PAM type: YTN; PAM sequence: TTC
tttacactaaattaaagatg

SEQ ID NO: 320725 - DNA, 20 bp, Artificial Sequence
  Description of Artificial Sequence: Synthetic oligonucleotide
  Target: LAMA2; (+) strand; PAM type: YTN; PAM sequence: CTT
tacactaaattaaagatgat

SEQ ID NO: 320726 - DNA, 20 bp, Artificial Sequence
  Description of Artificial Sequence: Synthetic oligonucleotide
  Target: LAMA2; (+) strand; PAM type: YTN; PAM sequence: TTT
acactaaattaaagatgata

SEQ ID NO: 320727 - DNA, 20 bp, Artificial Sequence
  Description of Artificial Sequence: Synthetic oligonucleotide
  Target: LAMA2; (+) strand; PAM type: YTN; PAM sequence: TTA
cactaaattaaagatgataa

SEQ ID NO: 320728 - DNA, 20 bp, Artificial Sequence
  Description of Artificial Sequence: Synthetic oligonucleotide
  Target: LAMA2; (+) strand; PAM type: YTN; PAM sequence: CTA
aattaaagatgataaagcaa

SEQ ID NO: 320729 - DNA, 20 bp, Artificial Sequence
  Description of Artificial Sequence: Synthetic oligonucleotide
  Target: LAMA2; (+) strand; PAM type: YTN; PAM sequence: TTA
aagatgataaagcaatctgc

SEQ ID NO: 320730 - DNA, 20 bp, Artificial Sequence
  Description of Artificial Sequence: Synthetic oligonucleotide
  Target: LAMA2; (+) strand; PAM type: YTN; PAM sequence: CTG
cttttcatactaaacagtga

SEQ ID NO: 320731 - DNA, 20 bp, Artificial Sequence
  Description of Artificial Sequence: Synthetic oligonucleotide
  Target: LAMA2; (+) strand; PAM type: YTN; PAM sequence: CTT
ttcatactaaacagtgaagt

SEQ ID NO: 320732 - DNA, 20 bp, Artificial Sequence
  Description of Artificial Sequence: Synthetic oligonucleotide
  Target: LAMA2; (+) strand; PAM type: YTN; PAM sequence: TTT
tcatactaaacagtgaagtg

SEQ ID NO: 320733 - DNA, 20 bp, Artificial Sequence
  Description of Artificial Sequence: Synthetic oligonucleotide
  Target: LAMA2; (+) strand; PAM type: YTN; PAM sequence: TTT
catactaaacagtgaagtga

SEQ ID NO: 320734 - DNA, 20 bp, Artificial Sequence
  Description of Artificial Sequence: Synthetic oligonucleotide
  Target: LAMA2; (+) strand; PAM type: YTN; PAM sequence: TTC
atactaaacagtgaagtgaa

SEQ ID NO: 320735 - DNA, 20 bp, Artificial Sequence
  Description of Artificial Sequence: Synthetic oligonucleotide
  Target: LAMA2; (+) strand; PAM type: YTN; PAM sequence: CTA
aacagtgaagtgaaaagcat

SEQ ID NO: 320736 - DNA, 20 bp, Artificial Sequence
  Description of Artificial Sequence: Synthetic oligonucleotide
  Target: LAMA2; (+) strand; PAM type: YTN; PAM sequence: TTA
ttttaaagaaatatttctgt

SEQ ID NO: 320737 - DNA, 20 bp, Artificial Sequence
  Description of Artificial Sequence: Synthetic oligonucleotide
  Target: LAMA2; (+) strand; PAM type: YTN; PAM sequence: TTT
taaagaaatatttctgtttt

SEQ ID NO: 320738 - DNA, 20 bp, Artificial Sequence
  Description of Artificial Sequence: Synthetic oligonucleotide
  Target: LAMA2; (+) strand; PAM type: YTN; PAM sequence: TTT
aaagaaatatttctgttttg

SEQ ID NO: 320739 - DNA, 20 bp, Artificial Sequence
  Description of Artificial Sequence: Synthetic oligonucleotide
  Target: LAMA2; (+) strand; PAM type: YTN; PAM sequence: TTA
aagaaatatttctgttttgt

SEQ ID NO: 320740 - DNA, 20 bp, Artificial Sequence
  Description of Artificial Sequence: Synthetic oligonucleotide
  Target: LAMA2; (+) strand; PAM type: YTN; PAM sequence: TTT
ctgttttgttagtgtacgaa

SEQ ID NO: 320741 - DNA, 20 bp, Artificial Sequence
  Description of Artificial Sequence: Synthetic oligonucleotide
  Target: LAMA2; (+) strand; PAM type: YTN; PAM sequence: TTC
tgttttgttagtgtacgaaa

SEQ ID NO: 320742 - DNA, 20 bp, Artificial Sequence
  Description of Artificial Sequence: Synthetic oligonucleotide
  Target: LAMA2; (+) strand; PAM type: YTN; PAM sequence: CTG
ttttgttagtgtacgaaatt

SEQ ID NO: 320743 - DNA, 20 bp, Artificial Sequence
  Description of Artificial Sequence: Synthetic oligonucleotide
  Target: LAMA2; (+) strand; PAM type: YTN; PAM sequence: TTT
tgttagtgtacgaaattctg

SEQ ID NO: 320744 - DNA, 20 bp, Artificial Sequence
  Description of Artificial Sequence: Synthetic oligonucleotide
  Target: LAMA2; (+) strand; PAM type: YTN; PAM sequence: TTT
gttagtgtacgaaattctgt

SEQ ID NO: 320745 - DNA, 20 bp, Artificial Sequence
  Description of Artificial Sequence: Synthetic oligonucleotide
  Target: LAMA2; (+) strand; PAM type: YTN; PAM sequence: TTG
ttagtgtacgaaattctgta

SEQ ID NO: 320746 - DNA, 20 bp, Artificial Sequence
  Description of Artificial Sequence: Synthetic oligonucleotide
  Target: LAMA2; (+) strand; PAM type: YTN; PAM sequence: TTA
gtgtacgaaattctgtaata

SEQ ID NO: 320747 - DNA, 20 bp, Artificial Sequence
  Description of Artificial Sequence: Synthetic oligonucleotide
  Target: LAMA2; (+) strand; PAM type: YTN; PAM sequence: TTC
tgtaatagtggctaacttct

SEQ ID NO: 320748 - DNA, 20 bp, Artificial Sequence
  Description of Artificial Sequence: Synthetic oligonucleotide
  Target: LAMA2; (+) strand; PAM type: YTN; PAM sequence: CTG
taatagtggctaacttcttt

SEQ ID NO: 320749 - DNA, 20 bp, Artificial Sequence
  Description of Artificial Sequence: Synthetic oligonucleotide
  Target: LAMA2; (+) strand; PAM type: YTN; PAM sequence: CTA
acttctttaggaaccttttt

SEQ ID NO: 320750 - DNA, 20 bp, Artificial Sequence
  Description of Artificial Sequence: Synthetic oligonucleotide
  Target: LAMA2; (+) strand; PAM type: YTN; PAM sequence: CTT
ctttaggaacctttttaggt

SEQ ID NO: 320751 - DNA, 20 bp, Artificial Sequence
  Description of Artificial Sequence: Synthetic oligonucleotide
  Target: LAMA2; (+) strand; PAM type: YTN; PAM sequence: TTC
tttaggaacctttttaggtg

SEQ ID NO: 320752 - DNA, 20 bp, Artificial Sequence
  Description of Artificial Sequence: Synthetic oligonucleotide
  Target: LAMA2; (+) strand; PAM type: YTN; PAM sequence: CTT
taggaacctttttaggtgaa

SEQ ID NO: 320753 - DNA, 20 bp, Artificial Sequence
  Description of Artificial Sequence: Synthetic oligonucleotide
  Target: LAMA2; (+) strand; PAM type: YTN; PAM sequence: TTT
aggaacctttttaggtgaaa

SEQ ID NO: 320754 - DNA, 20 bp, Artificial Sequence
  Description of Artificial Sequence: Synthetic oligonucleotide
  Target: LAMA2; (+) strand; PAM type: YTN; PAM sequence: TTA
ggaacctttttaggtgaaac

SEQ ID NO: 320755 - DNA, 20 bp, Artificial Sequence
  Description of Artificial Sequence: Synthetic oligonucleotide
  Target: LAMA2; (+) strand; PAM type: YTN; PAM sequence: CTT
tttaggtgaaacttatgatt

SEQ ID NO: 320756 - DNA, 20 bp, Artificial Sequence
  Description of Artificial Sequence: Synthetic oligonucleotide
  Target: LAMA2; (+) strand; PAM type: YTN; PAM sequence: TTT
ttaggtgaaacttatgattg

SEQ ID NO: 320757 - DNA, 20 bp, Artificial Sequence
  Description of Artificial Sequence: Synthetic oligonucleotide
  Target: LAMA2; (+) strand; PAM type: YTN; PAM sequence: TTT
taggtgaaacttatgattga

SEQ ID NO: 320758 - DNA, 20 bp, Artificial Sequence
  Description of Artificial Sequence: Synthetic oligonucleotide
  Target: LAMA2; (+) strand; PAM type: YTN; PAM sequence: TTT
aggtgaaacttatgattgac

SEQ ID NO: 320759 - DNA, 20 bp, Artificial Sequence
  Description of Artificial Sequence: Synthetic oligonucleotide
  Target: LAMA2; (+) strand; PAM type: YTN; PAM sequence: TTA
ggtgaaacttatgattgact

SEQ ID NO: 320760 - DNA, 20 bp, Artificial Sequence
  Description of Artificial Sequence: Synthetic oligonucleotide
  Target: LAMA2; (+) strand; PAM type: YTN; PAM sequence: CTT
atgattgactatgaaatcta

SEQ ID NO: 320761 - DNA, 20 bp, Artificial Sequence
  Description of Artificial Sequence: Synthetic oligonucleotide
  Target: LAMA2; (+) strand; PAM type: YTN; PAM sequence: TTA
tgattgactatgaaatctat

SEQ ID NO: 320762 - DNA, 20 bp, Artificial Sequence
  Description of Artificial Sequence: Synthetic oligonucleotide
  Target: LAMA2; (+) strand; PAM type: YTN; PAM sequence: TTG
actatgaaatctattctagg

SEQ ID NO: 320763 - DNA, 20 bp, Artificial Sequence
  Description of Artificial Sequence: Synthetic oligonucleotide
  Target: LAMA2; (+) strand; PAM type: YTN; PAM sequence: CTA
tgaaatctattctaggacaa

SEQ ID NO: 320764 - DNA, 20 bp, Artificial Sequence
  Description of Artificial Sequence: Synthetic oligonucleotide
  Target: LAMA2; (+) strand; PAM type: YTN; PAM sequence: CTA
ttctaggacaaaataaaatg

SEQ ID NO: 320765 - DNA, 20 bp, Artificial Sequence
  Description of Artificial Sequence: Synthetic oligonucleotide
  Target: LAMA2; (+) strand; PAM type: YTN; PAM sequence: TTC
taggacaaaataaaatgaga

SEQ ID NO: 320766 - DNA, 20 bp, Artificial Sequence
  Description of Artificial Sequence: Synthetic oligonucleotide
  Target: LAMA2; (+) strand; PAM type: YTN; PAM sequence: CTA
ggacaaaataaaatgagaat

SEQ ID NO: 320767 - DNA, 20 bp, Artificial Sequence
  Description of Artificial Sequence: Synthetic oligonucleotide
  Target: LAMA2; (+) strand; PAM type: YTN; PAM sequence: TTA
tatgtctaattaaatgatat

SEQ ID NO: 320768 - DNA, 20 bp, Artificial Sequence
  Description of Artificial Sequence: Synthetic oligonucleotide
  Target: LAMA2; (+) strand; PAM type: YTN; PAM sequence: CTA
attaaatgatatatctaggc

SEQ ID NO: 320769 - DNA, 20 bp, Artificial Sequence
  Description of Artificial Sequence: Synthetic oligonucleotide
  Target: LAMA2; (+) strand; PAM type: YTN; PAM sequence: TTA
aatgatatatctaggcaaac

SEQ ID NO: 320770 - DNA, 20 bp, Artificial Sequence
  Description of Artificial Sequence: Synthetic oligonucleotide
  Target: LAMA2; (+) strand; PAM type: YTN; PAM sequence: CTA
ggcaaactaaccattcaagt

SEQ ID NO: 320771 - DNA, 20 bp, Artificial Sequence
  Description of Artificial Sequence: Synthetic oligonucleotide
  Target: LAMA2; (+) strand; PAM type: YTN; PAM sequence: CTA
accattcaagttttaatttt

SEQ ID NO: 320772 - DNA, 20 bp, Artificial Sequence
  Description of Artificial Sequence: Synthetic oligonucleotide
  Target: LAMA2; (+) strand; PAM type: YTN; PAM sequence: TTC
aagttttaatttttatgaaa

SEQ ID NO: 320773 - DNA, 20 bp, Artificial Sequence
  Description of Artificial Sequence: Synthetic oligonucleotide
  Target: LAMA2; (+) strand; PAM type: YTN; PAM sequence: TTT
taatttttatgaaaactttc

SEQ ID NO: 320774 - DNA, 20 bp, Artificial Sequence
  Description of Artificial Sequence: Synthetic oligonucleotide
  Target: LAMA2; (+) strand; PAM type: YTN; PAM sequence: TTT
aatttttatgaaaactttct

SEQ ID NO: 320775 - DNA, 20 bp, Artificial Sequence
  Description of Artificial Sequence: Synthetic oligonucleotide
  Target: LAMA2; (+) strand; PAM type: YTN; PAM sequence: TTA
atttttatgaaaactttcta

SEQ ID NO: 320776 - DNA, 20 bp, Artificial Sequence
  Description of Artificial Sequence: Synthetic oligonucleotide
  Target: LAMA2; (+) strand; PAM type: YTN; PAM sequence: TTT
ttatgaaaactttctatgtg

SEQ ID NO: 320777 - DNA, 20 bp, Artificial Sequence
  Description of Artificial Sequence: Synthetic oligonucleotide
  Target: LAMA2; (+) strand; PAM type: YTN; PAM sequence: TTT
tatgaaaactttctatgtgc

SEQ ID NO: 320778 - DNA, 20 bp, Artificial Sequence
  Description of Artificial Sequence: Synthetic oligonucleotide
  Target: LAMA2; (+) strand; PAM type: YTN; PAM sequence: TTT
atgaaaactttctatgtgcc

SEQ ID NO: 320779 - DNA, 20 bp, Artificial Sequence
  Description of Artificial Sequence: Synthetic oligonucleotide
  Target: LAMA2; (+) strand; PAM type: YTN; PAM sequence: TTA
tgaaaactttctatgtgccc

SEQ ID NO: 320780 - DNA, 20 bp, Artificial Sequence
  Description of Artificial Sequence: Synthetic oligonucleotide
  Target: LAMA2; (+) strand; PAM type: YTN; PAM sequence: CTT
tctatgtgcccctgacatct

SEQ ID NO: 320781 - DNA, 20 bp, Artificial Sequence
  Description of Artificial Sequence: Synthetic oligonucleotide
  Target: LAMA2; (+) strand; PAM type: YTN; PAM sequence: TTT
ctatgtgcccctgacatctg

SEQ ID NO: 320782 - DNA, 20 bp, Artificial Sequence
  Description of Artificial Sequence: Synthetic oligonucleotide
  Target: LAMA2; (+) strand; PAM type: YTN; PAM sequence: TTC
tatgtgcccctgacatctgt

SEQ ID NO: 320783 - DNA, 20 bp, Artificial Sequence
  Description of Artificial Sequence: Synthetic oligonucleotide
  Target: LAMA2; (+) strand; PAM type: YTN; PAM sequence: CTA
tgtgcccctgacatctgtac

SEQ ID NO: 320784 - DNA, 20 bp, Artificial Sequence
  Description of Artificial Sequence: Synthetic oligonucleotide
  Target: LAMA2; (+) strand; PAM type: YTN; PAM sequence: CTG
acatctgtacatgtgtttaa

SEQ ID NO: 320785 - DNA, 20 bp, Artificial Sequence
  Description of Artificial Sequence: Synthetic oligonucleotide
  Target: LAMA2; (+) strand; PAM type: YTN; PAM sequence: CTG
tacatgtgtttaatttccag

SEQ ID NO: 320786 - DNA, 20 bp, Artificial Sequence
  Description of Artificial Sequence: Synthetic oligonucleotide
  Target: LAMA2; (+) strand; PAM type: YTN; PAM sequence: TTT
aatttccagtgagctcaaaa

SEQ ID NO: 320787 - DNA, 20 bp, Artificial Sequence
  Description of Artificial Sequence: Synthetic oligonucleotide
  Target: LAMA2; (+) strand; PAM type: YTN; PAM sequence: TTA
atttccagtgagctcaaaat

SEQ ID NO: 320788 - DNA, 20 bp, Artificial Sequence
  Description of Artificial Sequence: Synthetic oligonucleotide
  Target: LAMA2; (+) strand; PAM type: YTN; PAM sequence: TTT
ccagtgagctcaaaatactt

SEQ ID NO: 320789 - DNA, 20 bp, Artificial Sequence
  Description of Artificial Sequence: Synthetic oligonucleotide
  Target: LAMA2; (+) strand; PAM type: YTN; PAM sequence: TTC
cagtgagctcaaaatacttc

SEQ ID NO: 320790 - DNA, 20 bp, Artificial Sequence
  Description of Artificial Sequence: Synthetic oligonucleotide
  Target: LAMA2; (+) strand; PAM type: YTN; PAM sequence: CTC
aaaatacttcaagtgatctc

SEQ ID NO: 320791 - DNA, 20 bp, Artificial Sequence
  Description of Artificial Sequence: Synthetic oligonucleotide
  Target: LAMA2; (+) strand; PAM type: YTN; PAM sequence: CTT
caagtgatctcatttgagta

SEQ ID NO: 320792 - DNA, 20 bp, Artificial Sequence
  Description of Artificial Sequence: Synthetic oligonucleotide
  Target: LAMA2; (+) strand; PAM type: YTN; PAM sequence: TTC
aagtgatctcatttgagtat

SEQ ID NO: 320793 - DNA, 20 bp, Artificial Sequence
  Description of Artificial Sequence: Synthetic oligonucleotide
  Target: LAMA2; (+) strand; PAM type: YTN; PAM sequence: CTC
atttgagtattaactaggga

SEQ ID NO: 320794 - DNA, 20 bp, Artificial Sequence
  Description of Artificial Sequence: Synthetic oligonucleotide
  Target: LAMA2; (+) strand; PAM type: YTN; PAM sequence: TTT
gagtattaactagggaaata

SEQ ID NO: 320795 - DNA, 20 bp, Artificial Sequence
  Description of Artificial Sequence: Synthetic oligonucleotide
  Target: LAMA2; (+) strand; PAM type: YTN; PAM sequence: TTG
agtattaactagggaaatac

SEQ ID NO: 320796 - DNA, 20 bp, Artificial Sequence
  Description of Artificial Sequence: Synthetic oligonucleotide
  Target: LAMA2; (+) strand; PAM type: YTN; PAM sequence: TTA
actagggaaatacattcaca

SEQ ID NO: 320797 - DNA, 20 bp, Artificial Sequence
  Description of Artificial Sequence: Synthetic oligonucleotide
  Target: LAMA2; (+) strand; PAM type: YTN; PAM sequence: CTA
gggaaatacattcacagtcc

SEQ ID NO: 320798 - DNA, 20 bp, Artificial Sequence
  Description of Artificial Sequence: Synthetic oligonucleotide
  Target: LAMA2; (+) strand; PAM type: YTN; PAM sequence: TTC
acagtccagcaattttcttt

SEQ ID NO: 320799 - DNA, 20 bp, Artificial Sequence
  Description of Artificial Sequence: Synthetic oligonucleotide
  Target: LAMA2; (+) strand; PAM type: YTN; PAM sequence: TTT
tcttttatgtctacattatt

SEQ ID NO: 320800 - DNA, 20 bp, Artificial Sequence
  Description of Artificial Sequence: Synthetic oligonucleotide
  Target: LAMA2; (+) strand; PAM type: YTN; PAM sequence: TTT
cttttatgtctacattattt

SEQ ID NO: 320801 - DNA, 20 bp, Artificial Sequence
  Description of Artificial Sequence: Synthetic oligonucleotide
  Target: LAMA2; (+) strand; PAM type: YTN; PAM sequence: TTC
ttttatgtctacattatttt

SEQ ID NO: 320802 - DNA, 20 bp, Artificial Sequence
  Description of Artificial Sequence: Synthetic oligonucleotide
  Target: LAMA2; (+) strand; PAM type: YTN; PAM sequence: CTT
ttatgtctacattattttaa

SEQ ID NO: 320803 - DNA, 20 bp, Artificial Sequence
  Description of Artificial Sequence: Synthetic oligonucleotide
  Target: LAMA2; (+) strand; PAM type: YTN; PAM sequence: TTT
tatgtctacattattttaaa

SEQ ID NO: 320804 - DNA, 20 bp, Artificial Sequence
  Description of Artificial Sequence: Synthetic oligonucleotide
  Target: LAMA2; (+) strand; PAM type: YTN; PAM sequence: TTT
atgtctacattattttaaat

SEQ ID NO: 320805 - DNA, 20 bp, Artificial Sequence
  Description of Artificial Sequence: Synthetic oligonucleotide
  Target: LAMA2; (+) strand; PAM type: YTN; PAM sequence: TTA
tgtctacattattttaaatc

SEQ ID NO: 320806 - DNA, 20 bp, Artificial Sequence
  Description of Artificial Sequence: Synthetic oligonucleotide
  Target: LAMA2; (+) strand; PAM type: YTN; PAM sequence: CTA
cattattttaaatcatagca

SEQ ID NO: 320807 - DNA, 20 bp, Artificial Sequence
  Description of Artificial Sequence: Synthetic oligonucleotide
  Target: LAMA2; (+) strand; PAM type: YTN; PAM sequence: TTA
ttttaaatcatagcatagat

SEQ ID NO: 320808 - DNA, 20 bp, Artificial Sequence
  Description of Artificial Sequence: Synthetic oligonucleotide
  Target: LAMA2; (+) strand; PAM type: YTN; PAM sequence: TTT
taaatcatagcatagatttt

SEQ ID NO: 320809 - DNA, 20 bp, Artificial Sequence
  Description of Artificial Sequence: Synthetic oligonucleotide
  Target: LAMA2; (+) strand; PAM type: YTN; PAM sequence: TTT
aaatcatagcatagattttc

SEQ ID NO: 320810 - DNA, 20 bp, Artificial Sequence
  Description of Artificial Sequence: Synthetic oligonucleotide
  Target: LAMA2; (+) strand; PAM type: YTN; PAM sequence: TTA
aatcatagcatagattttcc

SEQ ID NO: 320811 - DNA, 20 bp, Artificial Sequence
  Description of Artificial Sequence: Synthetic oligonucleotide
  Target: LAMA2; (+) strand; PAM type: YTN; PAM sequence: TTT
tccactgtgctttatgacca

SEQ ID NO: 320812 - DNA, 20 bp, Artificial Sequence
  Description of Artificial Sequence: Synthetic oligonucleotide
  Target: LAMA2; (+) strand; PAM type: YTN; PAM sequence: TTT
ccactgtgctttatgaccag

SEQ ID NO: 320813 - DNA, 20 bp, Artificial Sequence
  Description of Artificial Sequence: Synthetic oligonucleotide
  Target: LAMA2; (+) strand; PAM type: YTN; PAM sequence: TTC
cactgtgctttatgaccaga

SEQ ID NO: 320814 - DNA, 20 bp, Artificial Sequence
  Description of Artificial Sequence: Synthetic oligonucleotide
  Target: LAMA2; (+) strand; PAM type: YTN; PAM sequence: CTG
tgctttatgaccagaacaca

SEQ ID NO: 320815 - DNA, 20 bp, Artificial Sequence
  Description of Artificial Sequence: Synthetic oligonucleotide
  Target: LAMA2; (+) strand; PAM type: YTN; PAM sequence: CTT
tatgaccagaacacatttat

SEQ ID NO: 320816 - DNA, 20 bp, Artificial Sequence
  Description of Artificial Sequence: Synthetic oligonucleotide
  Target: LAMA2; (+) strand; PAM type: YTN; PAM sequence: TTT
atgaccagaacacatttatt

SEQ ID NO: 320817 - DNA, 20 bp, Artificial Sequence
  Description of Artificial Sequence: Synthetic oligonucleotide
  Target: LAMA2; (+) strand; PAM type: YTN; PAM sequence: TTA
tgaccagaacacatttattt

SEQ ID NO: 320818 - DNA, 20 bp, Artificial Sequence
  Description of Artificial Sequence: Synthetic oligonucleotide
  Target: LAMA2; (+) strand; PAM type: YTN; PAM sequence: TTT
atttgcaaagtattttcact

SEQ ID NO: 320819 - DNA, 20 bp, Artificial Sequence
  Description of Artificial Sequence: Synthetic oligonucleotide
  Target: LAMA2; (+) strand; PAM type: YTN; PAM sequence: TTA
tttgcaaagtattttcactt

SEQ ID NO: 320820 - DNA, 20 bp, Artificial Sequence
  Description of Artificial Sequence: Synthetic oligonucleotide
  Target: LAMA2; (+) strand; PAM type: YTN; PAM sequence: TTT
gcaaagtattttcacttacc

SEQ ID NO: 320821 - DNA, 20 bp, Artificial Sequence
  Description of Artificial Sequence: Synthetic oligonucleotide
  Target: LAMA2; (+) strand; PAM type: YTN; PAM sequence: TTG
caaagtattttcacttacct

SEQ ID NO: 320822 - DNA, 20 bp, Artificial Sequence
  Description of Artificial Sequence: Synthetic oligonucleotide
  Target: LAMA2; (+) strand; PAM type: YTN; PAM sequence: TTT
tcacttaccttatattgtag

SEQ ID NO: 320823 - DNA, 20 bp, Artificial Sequence
  Description of Artificial Sequence: Synthetic oligonucleotide
  Target: LAMA2; (+) strand; PAM type: YTN; PAM sequence: TTT
cacttaccttatattgtagt

SEQ ID NO: 320824 - DNA, 20 bp, Artificial Sequence
  Description of Artificial Sequence: Synthetic oligonucleotide
  Target: LAMA2; (+) strand; PAM type: YTN; PAM sequence: TTC
acttaccttatattgtagta

SEQ ID NO: 320825 - DNA, 20 bp, Artificial Sequence
  Description of Artificial Sequence: Synthetic oligonucleotide
  Target: LAMA2; (+) strand; PAM type: YTN; PAM sequence: CTT
accttatattgtagtatgta

SEQ ID NO: 320826 - DNA, 20 bp, Artificial Sequence
  Description of Artificial Sequence: Synthetic oligonucleotide
  Target: LAMA2; (+) strand; PAM type: YTN; PAM sequence: TTA
ccttatattgtagtatgtag

SEQ ID NO: 320827 - DNA, 20 bp, Artificial Sequence
  Description of Artificial Sequence: Synthetic oligonucleotide
  Target: LAMA2; (+) strand; PAM type: YTN; PAM sequence: CTT
atattgtagtatgtagtata

SEQ ID NO: 320828 - DNA, 20 bp, Artificial Sequence
  Description of Artificial Sequence: Synthetic oligonucleotide
  Target: LAMA2; (+) strand; PAM type: YTN; PAM sequence: TTA
tattgtagtatgtagtatag

SEQ ID NO: 320829 - DNA, 20 bp, Artificial Sequence
  Description of Artificial Sequence: Synthetic oligonucleotide
  Target: LAMA2; (+) strand; PAM type: YTN; PAM sequence: TTG
tagtatgtagtataggacaa

SEQ ID NO: 320830 - DNA, 20 bp, Artificial Sequence
  Description of Artificial Sequence: Synthetic oligonucleotide
  Target: LAMA2; (+) strand; PAM type: YTN; PAM sequence: TTG
atacggtcaactgtttaaaa

SEQ ID NO: 320831 - DNA, 20 bp, Artificial Sequence
  Description of Artificial Sequence: Synthetic oligonucleotide
  Target: LAMA2; (+) strand; PAM type: YTN; PAM sequence: CTG
tttaaaacgtcagatgcaat

SEQ ID NO: 320832 - DNA, 20 bp, Artificial Sequence
  Description of Artificial Sequence: Synthetic oligonucleotide
  Target: LAMA2; (+) strand; PAM type: YTN; PAM sequence: TTT
aaaacgtcagatgcaatgat

SEQ ID NO: 320833 - DNA, 20 bp, Artificial Sequence
  Description of Artificial Sequence: Synthetic oligonucleotide
  Target: LAMA2; (+) strand; PAM type: YTN; PAM sequence: TTA
aaacgtcagatgcaatgata

SEQ ID NO: 320834 - DNA, 20 bp, Artificial Sequence
  Description of Artificial Sequence: Synthetic oligonucleotide
  Target: LAMA2; (+) strand; PAM type: YTN; PAM sequence: CTT
agcatttatagatgtagcat

SEQ ID NO: 320835 - DNA, 20 bp, Artificial Sequence
  Description of Artificial Sequence: Synthetic oligonucleotide
  Target: LAMA2; (+) strand; PAM type: YTN; PAM sequence: TTA
gcatttatagatgtagcatt

SEQ ID NO: 320836 - DNA, 20 bp, Artificial Sequence
  Description of Artificial Sequence: Synthetic oligonucleotide
  Target: LAMA2; (+) strand; PAM type: YTN; PAM sequence: TTT
atagatgtagcattcacagt

SEQ ID NO: 320837 - DNA, 20 bp, Artificial Sequence
  Description of Artificial Sequence: Synthetic oligonucleotide
  Target: LAMA2; (+) strand; PAM type: YTN; PAM sequence: TTA
tagatgtagcattcacagtt

SEQ ID NO: 320838 - DNA, 20 bp, Artificial Sequence
  Description of Artificial Sequence: Synthetic oligonucleotide
  Target: LAMA2; (+) strand; PAM type: YTN; PAM sequence: TTC
acagttgcaactctttcagt

SEQ ID NO: 320839 - DNA, 20 bp, Artificial Sequence
  Description of Artificial Sequence: Synthetic oligonucleotide
  Target: LAMA2; (+) strand; PAM type: YTN; PAM sequence: TTG
caactctttcagtttcagac

SEQ ID NO: 320840 - DNA, 20 bp, Artificial Sequence
  Description of Artificial Sequence: Synthetic oligonucleotide
  Target: LAMA2; (+) strand; PAM type: YTN; PAM sequence: CTC
tttcagtttcagacatttgt

SEQ ID NO: 320841 - DNA, 20 bp, Artificial Sequence
  Description of Artificial Sequence: Synthetic oligonucleotide
  Target: LAMA2; (+) strand; PAM type: YTN; PAM sequence: CTT
tcagtttcagacatttgtga

SEQ ID NO: 320842 - DNA, 20 bp, Artificial Sequence
  Description of Artificial Sequence: Synthetic oligonucleotide
  Target: LAMA2; (+) strand; PAM type: YTN; PAM sequence: TTT
cagtttcagacatttgtgag

SEQ ID NO: 320843 - DNA, 20 bp, Artificial Sequence
  Description of Artificial Sequence: Synthetic oligonucleotide
  Target: LAMA2; (+) strand; PAM type: YTN; PAM sequence: TTC
agtttcagacatttgtgagg

SEQ ID NO: 320844 - DNA, 20 bp, Artificial Sequence
  Description of Artificial Sequence: Synthetic oligonucleotide
  Target: LAMA2; (+) strand; PAM type: YTN; PAM sequence: TTT
cagacatttgtgaggaatct

SEQ ID NO: 320845 - DNA, 20 bp, Artificial Sequence
  Description of Artificial Sequence: Synthetic oligonucleotide
  Target: LAMA2; (+) strand; PAM type: YTN; PAM sequence: TTC
agacatttgtgaggaatctc

SEQ ID NO: 320846 - DNA, 20 bp, Artificial Sequence
  Description of Artificial Sequence: Synthetic oligonucleotide
  Target: LAMA2; (+) strand; PAM type: YTN; PAM sequence: TTT
gtgaggaatctcataggtgt

SEQ ID NO: 320847 - DNA, 20 bp, Artificial Sequence
  Description of Artificial Sequence: Synthetic oligonucleotide
  Target: LAMA2; (+) strand; PAM type: YTN; PAM sequence: TTG
tgaggaatctcataggtgtg

SEQ ID NO: 320848 - DNA, 20 bp, Artificial Sequence
  Description of Artificial Sequence: Synthetic oligonucleotide
  Target: LAMA2; (+) strand; PAM type: YTN; PAM sequence: CTC
ataggtgtgtaatatggttt

SEQ ID NO: 320849 - DNA, 20 bp, Artificial Sequence
  Description of Artificial Sequence: Synthetic oligonucleotide
  Target: LAMA2; (+) strand; PAM type: YTN; PAM sequence: TTT
gaaatttgtgaggacagcaa

SEQ ID NO: 320850 - DNA, 20 bp, Artificial Sequence
  Description of Artificial Sequence: Synthetic oligonucleotide
  Target: LAMA2; (+) strand; PAM type: YTN; PAM sequence: TTG
aaatttgtgaggacagcaat

SEQ ID NO: 320851 - DNA, 20 bp, Artificial Sequence
  Description of Artificial Sequence: Synthetic oligonucleotide
  Target: LAMA2; (+) strand; PAM type: YTN; PAM sequence: TTT
gtgaggacagcaattcgtgc

SEQ ID NO: 320852 - DNA, 20 bp, Artificial Sequence
  Description of Artificial Sequence: Synthetic oligonucleotide
  Target: LAMA2; (+) strand; PAM type: YTN; PAM sequence: TTG
tgaggacagcaattcgtgct

SEQ ID NO: 320853 - DNA, 20 bp, Artificial Sequence
  Description of Artificial Sequence: Synthetic oligonucleotide
  Target: LAMA2; (+) strand; PAM type: YTN; PAM sequence: TTC
gtgctctgactctagtcatt

SEQ ID NO: 320854 - DNA, 20 bp, Artificial Sequence
  Description of Artificial Sequence: Synthetic oligonucleotide
  Target: LAMA2; (+) strand; PAM type: YTN; PAM sequence: CTC
tgactctagtcattggcggc

SEQ ID NO: 320855 - DNA, 20 bp, Artificial Sequence
  Description of Artificial Sequence: Synthetic oligonucleotide
  Target: LAMA2; (+) strand; PAM type: YTN; PAM sequence: CTG
actctagtcattggcggcca

SEQ ID NO: 320856 - DNA, 20 bp, Artificial Sequence
  Description of Artificial Sequence: Synthetic oligonucleotide
  Target: LAMA2; (+) strand; PAM type: YTN; PAM sequence: CTC
tagtcattggcggccagtga

SEQ ID NO: 320857 - DNA, 20 bp, Artificial Sequence
  Description of Artificial Sequence: Synthetic oligonucleotide
  Target: LAMA2; (+) strand; PAM type: YTN; PAM sequence: CTA
gtcattggcggccagtgagc

SEQ ID NO: 320858 - DNA, 20 bp, Artificial Sequence
  Description of Artificial Sequence: Synthetic oligonucleotide
  Target: LAMA2; (+) strand; PAM type: YTN; PAM sequence: TTG
gcggccagtgagcaagcgca

SEQ ID NO: 320859 - DNA, 20 bp, Artificial Sequence
  Description of Artificial Sequence: Synthetic oligonucleotide
  Target: LAMA2; (+) strand; PAM type: YTN; PAM sequence: CTG
atcacccagtatcaacttca

SEQ ID NO: 320860 - DNA, 20 bp, Artificial Sequence
  Description of Artificial Sequence: Synthetic oligonucleotide
  Target: LAMA2; (+) strand; PAM type: YTN; PAM sequence: CTT
cacaatgtggtttccactaa

SEQ ID NO: 320861 - DNA, 20 bp, Artificial Sequence
  Description of Artificial Sequence: Synthetic oligonucleotide
  Target: LAMA2; (+) strand; PAM type: YTN; PAM sequence: TTC
acaatgtggtttccactaat

SEQ ID NO: 320862 - DNA, 20 bp, Artificial Sequence
  Description of Artificial Sequence: Synthetic oligonucleotide
  Target: LAMA2; (+) strand; PAM type: YTN; PAM sequence: TTT
ccactaatcggcaccttata

SEQ ID NO: 320863 - DNA, 20 bp, Artificial Sequence
  Description of Artificial Sequence: Synthetic oligonucleotide
  Target: LAMA2; (+) strand; PAM type: YTN; PAM sequence: TTC
cactaatcggcaccttatat

SEQ ID NO: 320864 - DNA, 20 bp, Artificial Sequence
  Description of Artificial Sequence: Synthetic oligonucleotide
  Target: LAMA2; (+) strand; PAM type: YTN; PAM sequence: CTA
atcggcaccttatattaatt

SEQ ID NO: 320865 - DNA, 20 bp, Artificial Sequence
  Description of Artificial Sequence: Synthetic oligonucleotide
  Target: LAMA2; (+) strand; PAM type: YTN; PAM sequence: CTT
atattaatttttatgaaata

SEQ ID NO: 320866 - DNA, 20 bp, Artificial Sequence
  Description of Artificial Sequence: Synthetic oligonucleotide
  Target: LAMA2; (+) strand; PAM type: YTN; PAM sequence: TTA
tattaatttttatgaaataa

SEQ ID NO: 320867 - DNA, 20 bp, Artificial Sequence
  Description of Artificial Sequence: Synthetic oligonucleotide
  Target: LAMA2; (+) strand; PAM type: YTN; PAM sequence: TTA
atttttatgaaataataaaa

SEQ ID NO: 320868 - DNA, 20 bp, Artificial Sequence
  Description of Artificial Sequence: Synthetic oligonucleotide
  Target: LAMA2; (+) strand; PAM type: YTN; PAM sequence: TTT
ttatgaaataataaaaacct

SEQ ID NO: 320869 - DNA, 20 bp, Artificial Sequence
  Description of Artificial Sequence: Synthetic oligonucleotide
  Target: LAMA2; (+) strand; PAM type: YTN; PAM sequence: TTT
tatgaaataataaaaacctt

SEQ ID NO: 320870 - DNA, 20 bp, Artificial Sequence
  Description of Artificial Sequence: Synthetic oligonucleotide
  Target: LAMA2; (+) strand; PAM type: YTN; PAM sequence: TTT
atgaaataataaaaacctta

SEQ ID NO: 320871 - DNA, 20 bp, Artificial Sequence
  Description of Artificial Sequence: Synthetic oligonucleotide
  Target: LAMA2; (+) strand; PAM type: YTN; PAM sequence: TTA
tgaaataataaaaaccttat

SEQ ID NO: 320872 - DNA, 20 bp, Artificial Sequence
  Description of Artificial Sequence: Synthetic oligonucleotide
  Target: LAMA2; (+) strand; PAM type: YTN; PAM sequence: CTT
atttcatagcaggagcgggt

SEQ ID NO: 320873 - DNA, 20 bp, Artificial Sequence
  Description of Artificial Sequence: Synthetic oligonucleotide
  Target: LAMA2; (+) strand; PAM type: YTN; PAM sequence: TTA
tttcatagcaggagcgggta

SEQ ID NO: 320874 - DNA, 20 bp, Artificial Sequence
  Description of Artificial Sequence: Synthetic oligonucleotide
  Target: LAMA2; (+) strand; PAM type: YTN; PAM sequence: TTT
catagcaggagcgggtaccc

SEQ ID NO: 320875 - DNA, 20 bp, Artificial Sequence
  Description of Artificial Sequence: Synthetic oligonucleotide
  Target: LAMA2; (+) strand; PAM type: YTN; PAM sequence: TTC
atagcaggagcgggtaccca

SEQ ID NO: 320876 - DNA, 20 bp, Artificial Sequence
  Description of Artificial Sequence: Synthetic oligonucleotide
  Target: LAMA2; (+) strand; PAM type: YTN; PAM sequence: TTA
aatggctaatcctttacagt

SEQ ID NO: 320877 - DNA, 20 bp, Artificial Sequence
  Description of Artificial Sequence: Synthetic oligonucleotide
  Target: LAMA2; (+) strand; PAM type: YTN; PAM sequence: CTA
atcctttacagtttttatgt

SEQ ID NO: 320878 - DNA, 20 bp, Artificial Sequence
  Description of Artificial Sequence: Synthetic oligonucleotide
  Target: LAMA2; (+) strand; PAM type: YTN; PAM sequence: CTT
tacagtttttatgtttttgg

SEQ ID NO: 320879 - DNA, 20 bp, Artificial Sequence
  Description of Artificial Sequence: Synthetic oligonucleotide
  Target: LAMA2; (+) strand; PAM type: YTN; PAM sequence: TTT
acagtttttatgtttttgga

SEQ ID NO: 320880 - DNA, 20 bp, Artificial Sequence
  Description of Artificial Sequence: Synthetic oligonucleotide
  Target: LAMA2; (+) strand; PAM type: YTN; PAM sequence: TTA
cagtttttatgtttttggaa

SEQ ID NO: 320881 - DNA, 20 bp, Artificial Sequence
  Description of Artificial Sequence: Synthetic oligonucleotide
  Target: LAMA2; (+) strand; PAM type: YTN; PAM sequence: TTT
ttatgtttttggaaatttgt

SEQ ID NO: 320882 - DNA, 20 bp, Artificial Sequence
  Description of Artificial Sequence: Synthetic oligonucleotide
  Target: LAMA2; (+) strand; PAM type: YTN; PAM sequence: TTT
tatgtttttggaaatttgtg

SEQ ID NO: 320883 - DNA, 20 bp, Artificial Sequence
  Description of Artificial Sequence: Synthetic oligonucleotide
  Target: LAMA2; (+) strand; PAM type: YTN; PAM sequence: TTT
atgtttttggaaatttgtga

SEQ ID NO: 320884 - DNA, 20 bp, Artificial Sequence
  Description of Artificial Sequence: Synthetic oligonucleotide
  Target: LAMA2; (+) strand; PAM type: YTN; PAM sequence: TTA
tgtttttggaaatttgtgat

SEQ ID NO: 320885 - DNA, 20 bp, Artificial Sequence
  Description of Artificial Sequence: Synthetic oligonucleotide
  Target: LAMA2; (+) strand; PAM type: YTN; PAM sequence: TTT
ttggaaatttgtgatctcaa

SEQ ID NO: 320886 - DNA, 20 bp, Artificial Sequence
  Description of Artificial Sequence: Synthetic oligonucleotide
  Target: LAMA2; (+) strand; PAM type: YTN; PAM sequence: TTT
tggaaatttgtgatctcaag

SEQ ID NO: 320887 - DNA, 20 bp, Artificial Sequence
  Description of Artificial Sequence: Synthetic oligonucleotide
  Target: LAMA2; (+) strand; PAM type: YTN; PAM sequence: TTT
ggaaatttgtgatctcaaga

SEQ ID NO: 320888 - DNA, 20 bp, Artificial Sequence
  Description of Artificial Sequence: Synthetic oligonucleotide
  Target: LAMA2; (+) strand; PAM type: YTN; PAM sequence: TTG
gaaatttgtgatctcaagac

SEQ ID NO: 320889 - DNA, 20 bp, Artificial Sequence
  Description of Artificial Sequence: Synthetic oligonucleotide
  Target: LAMA2; (+) strand; PAM type: YTN; PAM sequence: TTT
gtgatctcaagactatccct

SEQ ID NO: 320890 - DNA, 20 bp, Artificial Sequence
  Description of Artificial Sequence: Synthetic oligonucleotide
  Target: LAMA2; (+) strand; PAM type: YTN; PAM sequence: TTG
tgatctcaagactatccctc

SEQ ID NO: 320891 - DNA, 20 bp, Artificial Sequence
  Description of Artificial Sequence: Synthetic oligonucleotide
  Target: LAMA2; (+) strand; PAM type: YTN; PAM sequence: CTC
aagactatccctcaagaatg

SEQ ID NO: 320892 - DNA, 20 bp, Artificial Sequence
  Description of Artificial Sequence: Synthetic oligonucleotide
  Target: LAMA2; (+) strand; PAM type: YTN; PAM sequence: CTA
tccctcaagaatgtcaaggt

SEQ ID NO: 320893 - DNA, 20 bp, Artificial Sequence
  Description of Artificial Sequence: Synthetic oligonucleotide
  Target: LAMA2; (+) strand; PAM type: YTN; PAM sequence: CTC
aagaatgtcaaggttttgct

SEQ ID NO: 320894 - DNA, 20 bp, Artificial Sequence
  Description of Artificial Sequence: Synthetic oligonucleotide
  Target: LAMA2; (+) strand; PAM type: YTN; PAM sequence: TTT
tgctgaagttaaagacattt

SEQ ID NO: 320895 - DNA, 20 bp, Artificial Sequence
  Description of Artificial Sequence: Synthetic oligonucleotide
  Target: LAMA2; (+) strand; PAM type: YTN; PAM sequence: TTT
gctgaagttaaagacatttg

SEQ ID NO: 320896 - DNA, 20 bp, Artificial Sequence
  Description of Artificial Sequence: Synthetic oligonucleotide
  Target: LAMA2; (+) strand; PAM type: YTN; PAM sequence: TTG
ctgaagttaaagacatttgt

SEQ ID NO: 320897 - DNA, 20 bp, Artificial Sequence
  Description of Artificial Sequence: Synthetic oligonucleotide
  Target: LAMA2; (+) strand; PAM type: YTN; PAM sequence: CTG
aagttaaagacatttgttat

SEQ ID NO: 320898 - DNA, 20 bp, Artificial Sequence
  Description of Artificial Sequence: Synthetic oligonucleotide
  Target: LAMA2; (+) strand; PAM type: YTN; PAM sequence: TTA
aagacatttgttattctgtg

SEQ ID NO: 320899 - DNA, 20 bp, Artificial Sequence
  Description of Artificial Sequence: Synthetic oligonucleotide
  Target: LAMA2; (+) strand; PAM type: YTN; PAM sequence: TTT
gttattctgtggtcagatta

SEQ ID NO: 320900 - DNA, 20 bp, Artificial Sequence
  Description of Artificial Sequence: Synthetic oligonucleotide
  Target: LAMA2; (+) strand; PAM type: YTN; PAM sequence: TTG
ttattctgtggtcagattat

SEQ ID NO: 320901 - DNA, 20 bp, Artificial Sequence
  Description of Artificial Sequence: Synthetic oligonucleotide
  Target: LAMA2; (+) strand; PAM type: YTN; PAM sequence: TTA
ttctgtggtcagattatttc

SEQ ID NO: 320902 - DNA, 20 bp, Artificial Sequence
  Description of Artificial Sequence: Synthetic oligonucleotide
  Target: LAMA2; (+) strand; PAM type: YTN; PAM sequence: TTC
tgtggtcagattatttcagt

SEQ ID NO: 320903 - DNA, 20 bp, Artificial Sequence
  Description of Artificial Sequence: Synthetic oligonucleotide
  Target: LAMA2; (+) strand; PAM type: YTN; PAM sequence: CTG
tggtcagattatttcagtag

SEQ ID NO: 320904 - DNA, 20 bp, Artificial Sequence
  Description of Artificial Sequence: Synthetic oligonucleotide
  Target: LAMA2; (+) strand; PAM type: YTN; PAM sequence: TTA
tttcagtagttgagatgtag

SEQ ID NO: 320905 - DNA, 20 bp, Artificial Sequence
  Description of Artificial Sequence: Synthetic oligonucleotide
  Target: LAMA2; (+) strand; PAM type: YTN; PAM sequence: TTT
cagtagttgagatgtagtct

SEQ ID NO: 320906 - DNA, 20 bp, Artificial Sequence
  Description of Artificial Sequence: Synthetic oligonucleotide
  Target: LAMA2; (+) strand; PAM type: YTN; PAM sequence: TTC
agtagttgagatgtagtctc

SEQ ID NO: 320907 - DNA, 20 bp, Artificial Sequence
  Description of Artificial Sequence: Synthetic oligonucleotide
  Target: LAMA2; (+) strand; PAM type: YTN; PAM sequence: TTG
agatgtagtctcacattaag

SEQ ID NO: 320908 - DNA, 20 bp, Artificial Sequence
  Description of Artificial Sequence: Synthetic oligonucleotide
  Target: LAMA2; (+) strand; PAM type: YTN; PAM sequence: CTC
acattaagggagaaatctgc

SEQ ID NO: 320909 - DNA, 20 bp, Artificial Sequence
  Description of Artificial Sequence: Synthetic oligonucleotide
  Target: LAMA2; (+) strand; PAM type: YTN; PAM sequence: TTA
agggagaaatctgcaaacta

SEQ ID NO: 320910 - DNA, 20 bp, Artificial Sequence
  Description of Artificial Sequence: Synthetic oligonucleotide
  Target: LAMA2; (+) strand; PAM type: YTN; PAM sequence: CTG
caaactagaaatggtttgca

SEQ ID NO: 320911 - DNA, 20 bp, Artificial Sequence
  Description of Artificial Sequence: Synthetic oligonucleotide
  Target: LAMA2; (+) strand; PAM type: YTN; PAM sequence: CTA
gaaatggtttgcaaatggca

SEQ ID NO: 320912 - DNA, 20 bp, Artificial Sequence
  Description of Artificial Sequence: Synthetic oligonucleotide
  Target: LAMA2; (+) strand; PAM type: YTN; PAM sequence: TTT
gcaaatggcaaggcaaagca

SEQ ID NO: 320913 - DNA, 20 bp, Artificial Sequence
  Description of Artificial Sequence: Synthetic oligonucleotide
  Target: LAMA2; (+) strand; PAM type: YTN; PAM sequence: TTG
caaatggcaaggcaaagcat

SEQ ID NO: 320914 - DNA, 20 bp, Artificial Sequence
  Description of Artificial Sequence: Synthetic oligonucleotide
  Target: LAMA2; (+) strand; PAM type: YTN; PAM sequence: TTC
aaataactgttacatgtgat

SEQ ID NO: 320915 - DNA, 20 bp, Artificial Sequence
  Description of Artificial Sequence: Synthetic oligonucleotide
  Target: LAMA2; (+) strand; PAM type: YTN; PAM sequence: CTG
ttacatgtgataaaaatctc

SEQ ID NO: 320916 - DNA, 20 bp, Artificial Sequence
  Description of Artificial Sequence: Synthetic oligonucleotide
  Target: LAMA2; (+) strand; PAM type: YTN; PAM sequence: TTA
catgtgataaaaatctcttt

SEQ ID NO: 320917 - DNA, 20 bp, Artificial Sequence
  Description of Artificial Sequence: Synthetic oligonucleotide
  Target: LAMA2; (+) strand; PAM type: YTN; PAM sequence: CTC
ttttgggtttcaggatgaca

SEQ ID NO: 320918 - DNA, 20 bp, Artificial Sequence
  Description of Artificial Sequence: Synthetic oligonucleotide
  Target: LAMA2; (+) strand; PAM type: YTN; PAM sequence: CTT
ttgggtttcaggatgacaag

SEQ ID NO: 320919 - DNA, 20 bp, Artificial Sequence
  Description of Artificial Sequence: Synthetic oligonucleotide
  Target: LAMA2; (+) strand; PAM type: YTN; PAM sequence: TTT
tgggtttcaggatgacaagg

SEQ ID NO: 320920 - DNA, 20 bp, Artificial Sequence
  Description of Artificial Sequence: Synthetic oligonucleotide
  Target: LAMA2; (+) strand; PAM type: YTN; PAM sequence: TTT
gggtttcaggatgacaaggt

SEQ ID NO: 320921 - DNA, 20 bp, Artificial Sequence
  Description of Artificial Sequence: Synthetic oligonucleotide
  Target: LAMA2; (+) strand; PAM type: YTN; PAM sequence: TTG
ggtttcaggatgacaaggta

SEQ ID NO: 320922 - DNA, 20 bp, Artificial Sequence
  Description of Artificial Sequence: Synthetic oligonucleotide
  Target: LAMA2; (+) strand; PAM type: YTN; PAM sequence: TTT
caggatgacaaggtacaggg

SEQ ID NO: 320923 - DNA, 20 bp, Artificial Sequence
  Description of Artificial Sequence: Synthetic oligonucleotide
  Target: LAMA2; (+) strand; PAM type: YTN; PAM sequence: TTC
aggatgacaaggtacagggc

SEQ ID NO: 320924 - DNA, 20 bp, Artificial Sequence
  Description of Artificial Sequence: Synthetic oligonucleotide
  Target: LAMA2; (+) strand; PAM type: YTN; PAM sequence: CTG
gcatttaaagagaactccta

SEQ ID NO: 320925 - DNA, 20 bp, Artificial Sequence
  Description of Artificial Sequence: Synthetic oligonucleotide
  Target: LAMA2; (+) strand; PAM type: YTN; PAM sequence: TTT
aaagagaactcctatacaca

SEQ ID NO: 320926 - DNA, 20 bp, Artificial Sequence
  Description of Artificial Sequence: Synthetic oligonucleotide
  Target: LAMA2; (+) strand; PAM type: YTN; PAM sequence: TTA
aagagaactcctatacacac

SEQ ID NO: 320927 - DNA, 20 bp, Artificial Sequence
  Description of Artificial Sequence: Synthetic oligonucleotide
  Target: LAMA2; (+) strand; PAM type: YTN; PAM sequence: CTC
ctatacacacacttaaattc

SEQ ID NO: 320928 - DNA, 20 bp, Artificial Sequence
  Description of Artificial Sequence: Synthetic oligonucleotide
  Target: LAMA2; (+) strand; PAM type: YTN; PAM sequence: CTA
tacacacacttaaattcaac

SEQ ID NO: 320929 - DNA, 20 bp, Artificial Sequence
  Description of Artificial Sequence: Synthetic oligonucleotide
  Target: LAMA2; (+) strand; PAM type: YTN; PAM sequence: CTT
aaattcaacaaaaaagtctg

SEQ ID NO: 320930 - DNA, 20 bp, Artificial Sequence
  Description of Artificial Sequence: Synthetic oligonucleotide
  Target: LAMA2; (+) strand; PAM type: YTN; PAM sequence: TTA
aattcaacaaaaaagtctgt

SEQ ID NO: 320931 - DNA, 20 bp, Artificial Sequence
  Description of Artificial Sequence: Synthetic oligonucleotide
  Target: LAMA2; (+) strand; PAM type: YTN; PAM sequence: TTC
aacaaaaaagtctgtattct

SEQ ID NO: 320932 - DNA, 20 bp, Artificial Sequence
  Description of Artificial Sequence: Synthetic oligonucleotide
  Target: LAMA2; (+) strand; PAM type: YTN; PAM sequence: CTG
tattctataatatccaatta

SEQ ID NO: 320933 - DNA, 20 bp, Artificial Sequence
  Description of Artificial Sequence: Synthetic oligonucleotide
  Target: LAMA2; (+) strand; PAM type: YTN; PAM sequence: TTC
tataatatccaattacctta

SEQ ID NO: 320934 - DNA, 20 bp, Artificial Sequence
  Description of Artificial Sequence: Synthetic oligonucleotide
  Target: LAMA2; (+) strand; PAM type: YTN; PAM sequence: CTA
taatatccaattaccttaat

SEQ ID NO: 320935 - DNA, 20 bp, Artificial Sequence
  Description of Artificial Sequence: Synthetic oligonucleotide
  Target: LAMA2; (+) strand; PAM type: YTN; PAM sequence: TTA
ccttaattgtgtagtgggga

SEQ ID NO: 320936 - DNA, 20 bp, Artificial Sequence
  Description of Artificial Sequence: Synthetic oligonucleotide
  Target: LAMA2; (+) strand; PAM type: YTN; PAM sequence: CTT
aattgtgtagtggggaaaat

SEQ ID NO: 320937 - DNA, 20 bp, Artificial Sequence
  Description of Artificial Sequence: Synthetic oligonucleotide
  Target: LAMA2; (+) strand; PAM type: YTN; PAM sequence: TTA
attgtgtagtggggaaaatg

SEQ ID NO: 320938 - DNA, 20 bp, Artificial Sequence
  Description of Artificial Sequence: Synthetic oligonucleotide
  Target: LAMA2; (+) strand; PAM type: YTN; PAM sequence: TTG
tgtagtggggaaaatgaaga

SEQ ID NO: 320939 - DNA, 20 bp, Artificial Sequence
  Description of Artificial Sequence: Synthetic oligonucleotide
  Target: LAMA2; (+) strand; PAM type: YTN; PAM sequence: TTG
aatttctggttagctagact

SEQ ID NO: 320940 - DNA, 20 bp, Artificial Sequence
  Description of Artificial Sequence: Synthetic oligonucleotide
  Target: LAMA2; (+) strand; PAM type: YTN; PAM sequence: TTT
ctggttagctagactagggt

SEQ ID NO: 320941 - DNA, 20 bp, Artificial Sequence
  Description of Artificial Sequence: Synthetic oligonucleotide
  Target: LAMA2; (+) strand; PAM type: YTN; PAM sequence: TTC
tggttagctagactagggta

SEQ ID NO: 320942 - DNA, 20 bp, Artificial Sequence
  Description of Artificial Sequence: Synthetic oligonucleotide
  Target: LAMA2; (+) strand; PAM type: YTN; PAM sequence: CTG
gttagctagactagggtagg

SEQ ID NO: 320943 - DNA, 20 bp, Artificial Sequence
  Description of Artificial Sequence: Synthetic oligonucleotide
  Target: LAMA2; (+) strand; PAM type: YTN; PAM sequence: TTA
gctagactagggtaggaaga

SEQ ID NO: 320944 - DNA, 20 bp, Artificial Sequence
  Description of Artificial Sequence: Synthetic oligonucleotide
  Target: LAMA2; (+) strand; PAM type: YTN; PAM sequence: CTA
gactagggtaggaagacacc

SEQ ID NO: 320945 - DNA, 20 bp, Artificial Sequence
  Description of Artificial Sequence: Synthetic oligonucleotide
  Target: LAMA2; (+) strand; PAM type: YTN; PAM sequence: CTA
gggtaggaagacaccagctc

SEQ ID NO: 320946 - DNA, 20 bp, Artificial Sequence
  Description of Artificial Sequence: Synthetic oligonucleotide
  Target: LAMA2; (+) strand; PAM type: YTN; PAM sequence: CTC
tttgtttgttttgtgctttg

SEQ ID NO: 320947 - DNA, 20 bp, Artificial Sequence
  Description of Artificial Sequence: Synthetic oligonucleotide
  Target: LAMA2; (+) strand; PAM type: YTN; PAM sequence: CTT
tgtttgttttgtgctttgac

SEQ ID NO: 320948 - DNA, 20 bp, Artificial Sequence
  Description of Artificial Sequence: Synthetic oligonucleotide
  Target: LAMA2; (+) strand; PAM type: YTN; PAM sequence: TTT
gtttgttttgtgctttgaca

SEQ ID NO: 320949 - DNA, 20 bp, Artificial Sequence
  Description of Artificial Sequence: Synthetic oligonucleotide
  Target: LAMA2; (+) strand; PAM type: YTN; PAM sequence: TTG
tttgttttgtgctttgacat

SEQ ID NO: 320950 - DNA, 20 bp, Artificial Sequence
  Description of Artificial Sequence: Synthetic oligonucleotide
  Target: LAMA2; (+) strand; PAM type: YTN; PAM sequence: TTT
gttttgtgctttgacatttc

SEQ ID NO: 320951 - DNA, 20 bp, Artificial Sequence
  Description of Artificial Sequence: Synthetic oligonucleotide
  Target: LAMA2; (+) strand; PAM type: YTN; PAM sequence: TTG
ttttgtgctttgacatttca

SEQ ID NO: 320952 - DNA, 20 bp, Artificial Sequence
  Description of Artificial Sequence: Synthetic oligonucleotide
  Target: LAMA2; (+) strand; PAM type: YTN; PAM sequence: TTT
tgtgctttgacatttcaatt

SEQ ID NO: 320953 - DNA, 20 bp, Artificial Sequence
  Description of Artificial Sequence: Synthetic oligonucleotide
  Target: LAMA2; (+) strand; PAM type: YTN; PAM sequence: TTT
gtgctttgacatttcaattt

SEQ ID NO: 320954 - DNA, 20 bp, Artificial Sequence
  Description of Artificial Sequence: Synthetic oligonucleotide
  Target: LAMA2; (+) strand; PAM type: YTN; PAM sequence: TTG
tgctttgacatttcaatttt

SEQ ID NO: 320955 - DNA, 20 bp, Artificial Sequence
  Description of Artificial Sequence: Synthetic oligonucleotide
  Target: LAMA2; (+) strand; PAM type: YTN; PAM sequence: CTT
tgacatttcaattttcccgc

SEQ ID NO: 320956 - DNA, 20 bp, Artificial Sequence
  Description of Artificial Sequence: Synthetic oligonucleotide
  Target: LAMA2; (+) strand; PAM type: YTN; PAM sequence: TTT
gacatttcaattttcccgct

SEQ ID NO: 320957 - DNA, 20 bp, Artificial Sequence
  Description of Artificial Sequence: Synthetic oligonucleotide
  Target: LAMA2; (+) strand; PAM type: YTN; PAM sequence: TTG
acatttcaattttcccgctt

SEQ ID NO: 320958 - DNA, 20 bp, Artificial Sequence
  Description of Artificial Sequence: Synthetic oligonucleotide
  Target: LAMA2; (+) strand; PAM type: YTN; PAM sequence: TTT
caattttcccgcttggcttt

SEQ ID NO: 320959 - DNA, 20 bp, Artificial Sequence
  Description of Artificial Sequence: Synthetic oligonucleotide
  Target: LAMA2; (+) strand; PAM type: YTN; PAM sequence: TTC
aattttcccgcttggctttg

SEQ ID NO: 320960 - DNA, 20 bp, Artificial Sequence
  Description of Artificial Sequence: Synthetic oligonucleotide
  Target: LAMA2; (+) strand; PAM type: YTN; PAM sequence: TTT
tcccgcttggctttgtcctt

SEQ ID NO: 320961 - DNA, 20 bp, Artificial Sequence
  Description of Artificial Sequence: Synthetic oligonucleotide
  Target: LAMA2; (+) strand; PAM type: YTN; PAM sequence: TTT
cccgcttggctttgtccttc

SEQ ID NO: 320962 - DNA, 20 bp, Artificial Sequence
  Description of Artificial Sequence: Synthetic oligonucleotide
  Target: LAMA2; (+) strand; PAM type: YTN; PAM sequence: TTC
ccgcttggctttgtccttct

SEQ ID NO: 320963 - DNA, 20 bp, Artificial Sequence
  Description of Artificial Sequence: Synthetic oligonucleotide
  Target: LAMA2; (+) strand; PAM type: YTN; PAM sequence: CTT
ggctttgtccttctgtcttc

SEQ ID NO: 320964 - DNA, 20 bp, Artificial Sequence
  Description of Artificial Sequence: Synthetic oligonucleotide
  Target: LAMA2; (+) strand; PAM type: YTN; PAM sequence: TTG
gctttgtccttctgtcttcc

SEQ ID NO: 320965 - DNA, 20 bp, Artificial Sequence
  Description of Artificial Sequence: Synthetic oligonucleotide
  Target: LAMA2; (+) strand; PAM type: YTN; PAM sequence: CTT
tgtccttctgtcttcccttg

SEQ ID NO: 320966 - DNA, 20 bp, Artificial Sequence
  Description of Artificial Sequence: Synthetic oligonucleotide
  Target: LAMA2; (+) strand; PAM type: YTN; PAM sequence: TTT
gtccttctgtcttcccttga

SEQ ID NO: 320967 - DNA, 20 bp, Artificial Sequence
  Description of Artificial Sequence: Synthetic oligonucleotide
  Target: LAMA2; (+) strand; PAM type: YTN; PAM sequence: TTG
tccttctgtcttcccttgac

SEQ ID NO: 320968 - DNA, 20 bp, Artificial Sequence
  Description of Artificial Sequence: Synthetic oligonucleotide
  Target: LAMA2; (+) strand; PAM type: YTN; PAM sequence: CTT
ctgtcttcccttgacattga

SEQ ID NO: 320969 - DNA, 20 bp, Artificial Sequence
  Description of Artificial Sequence: Synthetic oligonucleotide
  Target: LAMA2; (+) strand; PAM type: YTN; PAM sequence: TTC
tgtcttcccttgacattgat

SEQ ID NO: 320970 - DNA, 20 bp, Artificial Sequence
  Description of Artificial Sequence: Synthetic oligonucleotide
  Target: LAMA2; (+) strand; PAM type: YTN; PAM sequence: CTG
tcttcccttgacattgatga

SEQ ID NO: 320971 - DNA, 20 bp, Artificial Sequence
  Description of Artificial Sequence: Synthetic oligonucleotide
  Target: LAMA2; (+) strand; PAM type: YTN; PAM sequence: CTT
cccttgacattgatgatttt

SEQ ID NO: 320972 - DNA, 20 bp, Artificial Sequence
  Description of Artificial Sequence: Synthetic oligonucleotide
  Target: LAMA2; (+) strand; PAM type: YTN; PAM sequence: TTC
ccttgacattgatgattttg

SEQ ID NO: 320973 - DNA, 20 bp, Artificial Sequence
  Description of Artificial Sequence: Synthetic oligonucleotide
  Target: LAMA2; (+) strand; PAM type: YTN; PAM sequence: CTT
gacattgatgattttgttgt

SEQ ID NO: 320974 - DNA, 20 bp, Artificial Sequence
  Description of Artificial Sequence: Synthetic oligonucleotide
  Target: LAMA2; (+) strand; PAM type: YTN; PAM sequence: TTG
acattgatgattttgttgta

SEQ ID NO: 320975 - DNA, 20 bp, Artificial Sequence
  Description of Artificial Sequence: Synthetic oligonucleotide
  Target: LAMA2; (+) strand; PAM type: YTN; PAM sequence: TTG
atgattttgttgtaggtacg

SEQ ID NO: 320976 - DNA, 20 bp, Artificial Sequence
  Description of Artificial Sequence: Synthetic oligonucleotide
  Target: LAMA2; (+) strand; PAM type: YTN; PAM sequence: TTT
tgttgtaggtacgtcacctc

SEQ ID NO: 320977 - DNA, 20 bp, Artificial Sequence
  Description of Artificial Sequence: Synthetic oligonucleotide
  Target: LAMA2; (+) strand; PAM type: YTN; PAM sequence: TTT
gttgtaggtacgtcacctcc

SEQ ID NO: 320978 - DNA, 20 bp, Artificial Sequence
  Description of Artificial Sequence: Synthetic oligonucleotide
  Target: LAMA2; (+) strand; PAM type: YTN; PAM sequence: TTG
ttgtaggtacgtcacctcct

SEQ ID NO: 320979 - DNA, 20 bp, Artificial Sequence
  Description of Artificial Sequence: Synthetic oligonucleotide
  Target: LAMA2; (+) strand; PAM type: YTN; PAM sequence: TTG
taggtacgtcacctccttga

SEQ ID NO: 320980 - DNA, 20 bp, Artificial Sequence
  Description of Artificial Sequence: Synthetic oligonucleotide
  Target: LAMA2; (+) strand; PAM type: YTN; PAM sequence: CTC
cttgaatctactgatatgaa

SEQ ID NO: 320981 - DNA, 20 bp, Artificial Sequence
  Description of Artificial Sequence: Synthetic oligonucleotide
  Target: LAMA2; (+) strand; PAM type: YTN; PAM sequence: CTT
gaatctactgatatgaagag

SEQ ID NO: 320982 - DNA, 20 bp, Artificial Sequence
  Description of Artificial Sequence: Synthetic oligonucleotide
  Target: LAMA2; (+) strand; PAM type: YTN; PAM sequence: TTG
aatctactgatatgaagaga

SEQ ID NO: 320983 - DNA, 20 bp, Artificial Sequence
  Description of Artificial Sequence: Synthetic oligonucleotide
  Target: LAMA2; (+) strand; PAM type: YTN; PAM sequence: CTA
ctgatatgaagagaaagcta

SEQ ID NO: 320984 - DNA, 20 bp, Artificial Sequence
  Description of Artificial Sequence: Synthetic oligonucleotide
  Target: LAMA2; (+) strand; PAM type: YTN; PAM sequence: CTG
atatgaagagaaagctataa

SEQ ID NO: 320985 - DNA, 20 bp, Artificial Sequence
  Description of Artificial Sequence: Synthetic oligonucleotide
  Target: LAMA2; (+) strand; PAM type: YTN; PAM sequence: CTA
taactaaagttaagacaatg

SEQ ID NO: 320986 - DNA, 20 bp, Artificial Sequence
  Description of Artificial Sequence: Synthetic oligonucleotide
  Target: LAMA2; (+) strand; PAM type: YTN; PAM sequence: CTA
aagttaagacaatgttaaag

SEQ ID NO: 320987 - DNA, 20 bp, Artificial Sequence
  Description of Artificial Sequence: Synthetic oligonucleotide
  Target: LAMA2; (+) strand; PAM type: YTN; PAM sequence: TTA
agacaatgttaaagtaaggt

SEQ ID NO: 320988 - DNA, 20 bp, Artificial Sequence
  Description of Artificial Sequence: Synthetic oligonucleotide
  Target: LAMA2; (+) strand; PAM type: YTN; PAM sequence: TTA
aagtaaggtccaattctcag

SEQ ID NO: 320989 - DNA, 20 bp, Artificial Sequence
  Description of Artificial Sequence: Synthetic oligonucleotide
  Target: LAMA2; (+) strand; PAM type: YTN; PAM sequence: TTC
tcagttatctacagggctat

SEQ ID NO: 320990 - DNA, 20 bp, Artificial Sequence
  Description of Artificial Sequence: Synthetic oligonucleotide
  Target: LAMA2; (+) strand; PAM type: YTN; PAM sequence: CTC
agttatctacagggctatcc

SEQ ID NO: 320991 - DNA, 20 bp, Artificial Sequence
  Description of Artificial Sequence: Synthetic oligonucleotide
  Target: LAMA2; (+) strand; PAM type: YTN; PAM sequence: TTA
tctacagggctatccaaaag

SEQ ID NO: 320992 - DNA, 20 bp, Artificial Sequence
  Description of Artificial Sequence: Synthetic oligonucleotide
  Target: LAMA2; (+) strand; PAM type: YTN; PAM sequence: CTA
cagggctatccaaaagaaaa

SEQ ID NO: 320993 - DNA, 20 bp, Artificial Sequence
  Description of Artificial Sequence: Synthetic oligonucleotide
  Target: LAMA2; (+) strand; PAM type: YTN; PAM sequence: CTA
tccaaaagaaaaatggaaat

SEQ ID NO: 320994 - DNA, 20 bp, Artificial Sequence
  Description of Artificial Sequence: Synthetic oligonucleotide
  Target: LAMA2; (+) strand; PAM type: YTN; PAM sequence: TTT
catttaaaatagctgcatct

SEQ ID NO: 320995 - DNA, 20 bp, Artificial Sequence
  Description of Artificial Sequence: Synthetic oligonucleotide
  Target: LAMA2; (+) strand; PAM type: YTN; PAM sequence: TTC
atttaaaatagctgcatctt

SEQ ID NO: 320996 - DNA, 20 bp, Artificial Sequence
  Description of Artificial Sequence: Synthetic oligonucleotide
  Target: LAMA2; (+) strand; PAM type: YTN; PAM sequence: TTT
aaaatagctgcatcttttaa

SEQ ID NO: 320997 - DNA, 20 bp, Artificial Sequence
  Description of Artificial Sequence: Synthetic oligonucleotide
  Target: LAMA2; (+) strand; PAM type: YTN; PAM sequence: TTA
aaatagctgcatcttttaag

SEQ ID NO: 320998 - DNA, 20 bp, Artificial Sequence
  Description of Artificial Sequence: Synthetic oligonucleotide
  Target: LAMA2; (+) strand; PAM type: YTN; PAM sequence: CTG
catcttttaagtaggaatat

SEQ ID NO: 320999 - DNA, 20 bp, Artificial Sequence
  Description of Artificial Sequence: Synthetic oligonucleotide
  Target: LAMA2; (+) strand; PAM type: YTN; PAM sequence: CTT
ttaagtaggaatattttggg

SEQ ID NO: 321000 - DNA, 20 bp, Artificial Sequence
  Description of Artificial Sequence: Synthetic oligonucleotide
  Target: LAMA2; (+) strand; PAM type: YTN; PAM sequence: TTT
taagtaggaatattttgggc

SEQ ID NO: 321001 - DNA, 20 bp, Artificial Sequence
  Description of Artificial Sequence: Synthetic oligonucleotide
  Target: LAMA2; (+) strand; PAM type: YTN; PAM sequence: TTT
aagtaggaatattttgggct

SEQ ID NO: 321002 - DNA, 20 bp, Artificial Sequence
  Description of Artificial Sequence: Synthetic oligonucleotide
  Target: LAMA2; (+) strand; PAM type: YTN; PAM sequence: TTA
agtaggaatattttgggcta

SEQ ID NO: 321003 - DNA, 20 bp, Artificial Sequence
  Description of Artificial Sequence: Synthetic oligonucleotide
  Target: LAMA2; (+) strand; PAM type: YTN; PAM sequence: TTT
tgggctattatatgccagac

SEQ ID NO: 321004 - DNA, 20 bp, Artificial Sequence
  Description of Artificial Sequence: Synthetic oligonucleotide
  Target: LAMA2; (+) strand; PAM type: YTN; PAM sequence: TTT
gggctattatatgccagact

SEQ ID NO: 321005 - DNA, 20 bp, Artificial Sequence
  Description of Artificial Sequence: Synthetic oligonucleotide
  Target: LAMA2; (+) strand; PAM type: YTN; PAM sequence: TTG
ggctattatatgccagactc

SEQ ID NO: 321006 - DNA, 20 bp, Artificial Sequence
  Description of Artificial Sequence: Synthetic oligonucleotide
  Target: LAMA2; (+) strand; PAM type: YTN; PAM sequence: CTA
ttatatgccagactcatcac

SEQ ID NO: 321007 - DNA, 20 bp, Artificial Sequence
  Description of Artificial Sequence: Synthetic oligonucleotide
  Target: LAMA2; (+) strand; PAM type: YTN; PAM sequence: TTA
tatgccagactcatcactgg

SEQ ID NO: 321008 - DNA, 20 bp, Artificial Sequence
  Description of Artificial Sequence: Synthetic oligonucleotide
  Target: LAMA2; (+) strand; PAM type: YTN; PAM sequence: CTC
atcactggtgctatttaatt

SEQ ID NO: 321009 - DNA, 20 bp, Artificial Sequence
  Description of Artificial Sequence: Synthetic oligonucleotide
  Target: LAMA2; (+) strand; PAM type: YTN; PAM sequence: CTG
gtgctatttaatttctcctc

SEQ ID NO: 321010 - DNA, 20 bp, Artificial Sequence
  Description of Artificial Sequence: Synthetic oligonucleotide
  Target: LAMA2; (+) strand; PAM type: YTN; PAM sequence: CTA
tttaatttctcctcccatca

SEQ ID NO: 321011 - DNA, 20 bp, Artificial Sequence
  Description of Artificial Sequence: Synthetic oligonucleotide
  Target: LAMA2; (+) strand; PAM type: YTN; PAM sequence: TTT
aatttctcctcccatcaatg

SEQ ID NO: 321012 - DNA, 20 bp, Artificial Sequence
  Description of Artificial Sequence: Synthetic oligonucleotide
  Target: LAMA2; (+) strand; PAM type: YTN; PAM sequence: TTA
atttctcctcccatcaatga

SEQ ID NO: 321013 - DNA, 20 bp, Artificial Sequence
  Description of Artificial Sequence: Synthetic oligonucleotide
  Target: LAMA2; (+) strand; PAM type: YTN; PAM sequence: TTT
ctcctcccatcaatgagagc

SEQ ID NO: 321014 - DNA, 20 bp, Artificial Sequence
  Description of Artificial Sequence: Synthetic oligonucleotide
  Target: LAMA2; (+) strand; PAM type: YTN; PAM sequence: TTC
tcctcccatcaatgagagct

SEQ ID NO: 321015 - DNA, 20 bp, Artificial Sequence
  Description of Artificial Sequence: Synthetic oligonucleotide
  Target: LAMA2; (+) strand; PAM type: YTN; PAM sequence: CTC
ctcccatcaatgagagctct

SEQ ID NO: 321016 - DNA, 20 bp, Artificial Sequence
  Description of Artificial Sequence: Synthetic oligonucleotide
  Target: LAMA2; (+) strand; PAM type: YTN; PAM sequence: CTC
ccatcaatgagagctctccc

SEQ ID NO: 321017 - DNA, 20 bp, Artificial Sequence
  Description of Artificial Sequence: Synthetic oligonucleotide
  Target: LAMA2; (+) strand; PAM type: YTN; PAM sequence: CTC
tccctgagacacattgtgag

SEQ ID NO: 321018 - DNA, 20 bp, Artificial Sequence
  Description of Artificial Sequence: Synthetic oligonucleotide
  Target: LAMA2; (+) strand; PAM type: YTN; PAM sequence: CTC
cctgagacacattgtgagat

SEQ ID NO: 321019 - DNA, 20 bp, Artificial Sequence
  Description of Artificial Sequence: Synthetic oligonucleotide
  Target: LAMA2; (+) strand; PAM type: YTN; PAM sequence: CTG
agacacattgtgagatcttt

SEQ ID NO: 321020 - DNA, 20 bp, Artificial Sequence
  Description of Artificial Sequence: Synthetic oligonucleotide
  Target: LAMA2; (+) strand; PAM type: YTN; PAM sequence: TTG
tgagatctttctgaggatga

SEQ ID NO: 321021 - DNA, 20 bp, Artificial Sequence
  Description of Artificial Sequence: Synthetic oligonucleotide
  Target: LAMA2; (+) strand; PAM type: YTN; PAM sequence: CTT
tctgaggatgaaatcactta

SEQ ID NO: 321022 - DNA, 20 bp, Artificial Sequence
  Description of Artificial Sequence: Synthetic oligonucleotide
  Target: LAMA2; (+) strand; PAM type: YTN; PAM sequence: TTT
ctgaggatgaaatcacttaa

SEQ ID NO: 321023 - DNA, 20 bp, Artificial Sequence
  Description of Artificial Sequence: Synthetic oligonucleotide
  Target: LAMA2; (+) strand; PAM type: YTN; PAM sequence: TTC
tgaggatgaaatcacttaac

SEQ ID NO: 321024 - DNA, 20 bp, Artificial Sequence
  Description of Artificial Sequence: Synthetic oligonucleotide
  Target: LAMA2; (+) strand; PAM type: YTN; PAM sequence: CTG
aggatgaaatcacttaaccc

SEQ ID NO: 321025 - DNA, 20 bp, Artificial Sequence
  Description of Artificial Sequence: Synthetic oligonucleotide
  Target: LAMA2; (+) strand; PAM type: YTN; PAM sequence: CTT
aaccccagcaacgccactga

SEQ ID NO: 321026 - DNA, 20 bp, Artificial Sequence
  Description of Artificial Sequence: Synthetic oligonucleotide
  Target: LAMA2; (+) strand; PAM type: YTN; PAM sequence: TTA
accccagcaacgccactgat

SEQ ID NO: 321027 - DNA, 20 bp, Artificial Sequence
  Description of Artificial Sequence: Synthetic oligonucleotide
  Target: LAMA2; (+) strand; PAM type: YTN; PAM sequence: CTG
attattttcagctacaacaa

SEQ ID NO: 321028 - DNA, 20 bp, Artificial Sequence
  Description of Artificial Sequence: Synthetic oligonucleotide
  Target: LAMA2; (+) strand; PAM type: YTN; PAM sequence: TTA
ttttcagctacaacaaccac

SEQ ID NO: 321029 - DNA, 20 bp, Artificial Sequence
  Description of Artificial Sequence: Synthetic oligonucleotide
  Target: LAMA2; (+) strand; PAM type: YTN; PAM sequence: TTT
tcagctacaacaaccacact

SEQ ID NO: 321030 - DNA, 20 bp, Artificial Sequence
  Description of Artificial Sequence: Synthetic oligonucleotide
  Target: LAMA2; (+) strand; PAM type: YTN; PAM sequence: TTT
cagctacaacaaccacactt

SEQ ID NO: 321031 - DNA, 20 bp, Artificial Sequence
  Description of Artificial Sequence: Synthetic oligonucleotide
  Target: LAMA2; (+) strand; PAM type: YTN; PAM sequence: TTC
agctacaacaaccacacttc

SEQ ID NO: 321032 - DNA, 20 bp, Artificial Sequence
  Description of Artificial Sequence: Synthetic oligonucleotide
  Target: LAMA2; (+) strand; PAM type: YTN; PAM sequence: CTA
caacaaccacacttctatgc

SEQ ID NO: 321033 - DNA, 20 bp, Artificial Sequence
  Description of Artificial Sequence: Synthetic oligonucleotide
  Target: LAMA2; (+) strand; PAM type: YTN; PAM sequence: CTT
ctatgcacacacatcaatca

SEQ ID NO: 321034 - DNA, 20 bp, Artificial Sequence
  Description of Artificial Sequence: Synthetic oligonucleotide
  Target: LAMA2; (+) strand; PAM type: YTN; PAM sequence: TTC
tatgcacacacatcaatcac

SEQ ID NO: 321035 - DNA, 20 bp, Artificial Sequence
  Description of Artificial Sequence: Synthetic oligonucleotide
  Target: LAMA2; (+) strand; PAM type: YTN; PAM sequence: CTA
tgcacacacatcaatcacgc

SEQ ID NO: 321036 - DNA, 20 bp, Artificial Sequence
  Description of Artificial Sequence: Synthetic oligonucleotide
  Target: LAMA2; (+) strand; PAM type: YTN; PAM sequence: TTC
tgactaaaaagctcaaaaga

SEQ ID NO: 321037 - DNA, 20 bp, Artificial Sequence
  Description of Artificial Sequence: Synthetic oligonucleotide
  Target: LAMA2; (+) strand; PAM type: YTN; PAM sequence: CTG
actaaaaagctcaaaagaaa

SEQ ID NO: 321038 - DNA, 20 bp, Artificial Sequence
  Description of Artificial Sequence: Synthetic oligonucleotide
  Target: LAMA2; (+) strand; PAM type: YTN; PAM sequence: CTA
aaaagctcaaaagaaaataa

SEQ ID NO: 321039 - DNA, 20 bp, Artificial Sequence
  Description of Artificial Sequence: Synthetic oligonucleotide
  Target: LAMA2; (+) strand; PAM type: YTN; PAM sequence: CTC
aaaagaaaataattaagcat

SEQ ID NO: 321040 - DNA, 20 bp, Artificial Sequence
  Description of Artificial Sequence: Synthetic oligonucleotide
  Target: LAMA2; (+) strand; PAM type: YTN; PAM sequence: TTA
agcattctcttttccatatg

SEQ ID NO: 321041 - DNA, 20 bp, Artificial Sequence
  Description of Artificial Sequence: Synthetic oligonucleotide
  Target: LAMA2; (+) strand; PAM type: YTN; PAM sequence: TTC
tcttttccatatgaagatat

SEQ ID NO: 321042 - DNA, 20 bp, Artificial Sequence
  Description of Artificial Sequence: Synthetic oligonucleotide
  Target: LAMA2; (+) strand; PAM type: YTN; PAM sequence: CTC
ttttccatatgaagatatta

SEQ ID NO: 321043 - DNA, 20 bp, Artificial Sequence
  Description of Artificial Sequence: Synthetic oligonucleotide
  Target: LAMA2; (+) strand; PAM type: YTN; PAM sequence: CTT
ttccatatgaagatattact

SEQ ID NO: 321044 - DNA, 20 bp, Artificial Sequence
  Description of Artificial Sequence: Synthetic oligonucleotide
  Target: LAMA2; (+) strand; PAM type: YTN; PAM sequence: TTT
tccatatgaagatattactg

SEQ ID NO: 321045 - DNA, 20 bp, Artificial Sequence
  Description of Artificial Sequence: Synthetic oligonucleotide
  Target: LAMA2; (+) strand; PAM type: YTN; PAM sequence: TTT
ccatatgaagatattactga

SEQ ID NO: 321046 - DNA, 20 bp, Artificial Sequence
  Description of Artificial Sequence: Synthetic oligonucleotide
  Target: LAMA2; (+) strand; PAM type: YTN; PAM sequence: TTC
catatgaagatattactgac

SEQ ID NO: 321047 - DNA, 20 bp, Artificial Sequence
  Description of Artificial Sequence: Synthetic oligonucleotide
  Target: LAMA2; (+) strand; PAM type: YTN; PAM sequence: TTA
ctgaccagcagaaagtggaa

SEQ ID NO: 321048 - DNA, 20 bp, Artificial Sequence
  Description of Artificial Sequence: Synthetic oligonucleotide
  Target: LAMA2; (+) strand; PAM type: YTN; PAM sequence: CTG
accagcagaaagtggaaaaa

SEQ ID NO: 321049 - DNA, 20 bp, Artificial Sequence
  Description of Artificial Sequence: Synthetic oligonucleotide
  Target: LAMA2; (+) strand; PAM type: YTN; PAM sequence: TTT
atagatactgacttaacaat

SEQ ID NO: 321050 - DNA, 20 bp, Artificial Sequence
  Description of Artificial Sequence: Synthetic oligonucleotide
  Target: LAMA2; (+) strand; PAM type: YTN; PAM sequence: TTA
tagatactgacttaacaatg

SEQ ID NO: 321051 - DNA, 20 bp, Artificial Sequence
  Description of Artificial Sequence: Synthetic oligonucleotide
  Target: LAMA2; (+) strand; PAM type: YTN; PAM sequence: CTG
acttaacaatgagtgaacag

SEQ ID NO: 321052 - DNA, 20 bp, Artificial Sequence
  Description of Artificial Sequence: Synthetic oligonucleotide
  Target: LAMA2; (+) strand; PAM type: YTN; PAM sequence: CTT
aacaatgagtgaacagttgc

SEQ ID NO: 321053 - DNA, 20 bp, Artificial Sequence
  Description of Artificial Sequence: Synthetic oligonucleotide
  Target: LAMA2; (+) strand; PAM type: YTN; PAM sequence: TTA
acaatgagtgaacagttgcg

SEQ ID NO: 321054 - DNA, 20 bp, Artificial Sequence
  Description of Artificial Sequence: Synthetic oligonucleotide
  Target: LAMA2; (+) strand; PAM type: YTN; PAM sequence: TTG
cgtctcacaaatttcagcag

SEQ ID NO: 321055 - DNA, 20 bp, Artificial Sequence
  Description of Artificial Sequence: Synthetic oligonucleotide
  Target: LAMA2; (+) strand; PAM type: YTN; PAM sequence: CTC
acaaatttcagcagcgttgt

SEQ ID NO: 321056 - DNA, 20 bp, Artificial Sequence
  Description of Artificial Sequence: Synthetic oligonucleotide
  Target: LAMA2; (+) strand; PAM type: YTN; PAM sequence: TTT
cagcagcgttgtcttgacag

SEQ ID NO: 321057 - DNA, 20 bp, Artificial Sequence
  Description of Artificial Sequence: Synthetic oligonucleotide
  Target: LAMA2; (+) strand; PAM type: YTN; PAM sequence: TTC
agcagcgttgtcttgacagt

SEQ ID NO: 321058 - DNA, 20 bp, Artificial Sequence
  Description of Artificial Sequence: Synthetic oligonucleotide
  Target: LAMA2; (+) strand; PAM type: YTN; PAM sequence: TTG
tcttgacagtggatcatggt

SEQ ID NO: 321059 - DNA, 20 bp, Artificial Sequence
  Description of Artificial Sequence: Synthetic oligonucleotide
  Target: LAMA2; (+) strand; PAM type: YTN; PAM sequence: CTT
gacagtggatcatggtgctt

SEQ ID NO: 321060 - DNA, 20 bp, Artificial Sequence
  Description of Artificial Sequence: Synthetic oligonucleotide
  Target: LAMA2; (+) strand; PAM type: YTN; PAM sequence: TTG
acagtggatcatggtgcttc

SEQ ID NO: 321061 - DNA, 20 bp, Artificial Sequence
  Description of Artificial Sequence: Synthetic oligonucleotide
  Target: LAMA2; (+) strand; PAM type: YTN; PAM sequence: CTT
ctgtgttgctaggcaacccg

SEQ ID NO: 321062 - DNA, 20 bp, Artificial Sequence
  Description of Artificial Sequence: Synthetic oligonucleotide
  Target: LAMA2; (+) strand; PAM type: YTN; PAM sequence: TTC
tgtgttgctaggcaacccga

SEQ ID NO: 321063 - DNA, 20 bp, Artificial Sequence
  Description of Artificial Sequence: Synthetic oligonucleotide
  Target: LAMA2; (+) strand; PAM type: YTN; PAM sequence: CTG
tgttgctaggcaacccgagg

SEQ ID NO: 321064 - DNA, 20 bp, Artificial Sequence
  Description of Artificial Sequence: Synthetic oligonucleotide
  Target: LAMA2; (+) strand; PAM type: YTN; PAM sequence: TTG
ctaggcaacccgaggggatg

SEQ ID NO: 321065 - DNA, 20 bp, Artificial Sequence
  Description of Artificial Sequence: Synthetic oligonucleotide
  Target: LAMA2; (+) strand; PAM type: YTN; PAM sequence: CTA
ggcaacccgaggggatggaa

SEQ ID NO: 321066 - DNA, 20 bp, Artificial Sequence
  Description of Artificial Sequence: Synthetic oligonucleotide
  Target: LAMA2; (+) strand; PAM type: YTN; PAM sequence: TTT
aaactcaaatttacttatgt

SEQ ID NO: 321067 - DNA, 20 bp, Artificial Sequence
  Description of Artificial Sequence: Synthetic oligonucleotide
  Target: LAMA2; (+) strand; PAM type: YTN; PAM sequence: TTA
aactcaaatttacttatgta

SEQ ID NO: 321068 - DNA, 20 bp, Artificial Sequence
  Description of Artificial Sequence: Synthetic oligonucleotide
  Target: LAMA2; (+) strand; PAM type: YTN; PAM sequence: CTC
aaatttacttatgtatgtta

SEQ ID NO: 321069 - DNA, 20 bp, Artificial Sequence
  Description of Artificial Sequence: Synthetic oligonucleotide
  Target: LAMA2; (+) strand; PAM type: YTN; PAM sequence: TTT
acttatgtatgttagatttt

SEQ ID NO: 321070 - DNA, 20 bp, Artificial Sequence
  Description of Artificial Sequence: Synthetic oligonucleotide
  Target: LAMA2; (+) strand; PAM type: YTN; PAM sequence: TTA
cttatgtatgttagatttta

SEQ ID NO: 321071 - DNA, 20 bp, Artificial Sequence
  Description of Artificial Sequence: Synthetic oligonucleotide
  Target: LAMA2; (+) strand; PAM type: YTN; PAM sequence: CTT
atgtatgttagattttagac

SEQ ID NO: 321072 - DNA, 20 bp, Artificial Sequence
  Description of Artificial Sequence: Synthetic oligonucleotide
  Target: LAMA2; (+) strand; PAM type: YTN; PAM sequence: TTA
tgtatgttagattttagaca

SEQ ID NO: 321073 - DNA, 20 bp, Artificial Sequence
  Description of Artificial Sequence: Synthetic oligonucleotide
  Target: LAMA2; (+) strand; PAM type: YTN; PAM sequence: TTA
gattttagacatattatatt

SEQ ID NO: 321074 - DNA, 20 bp, Artificial Sequence
  Description of Artificial Sequence: Synthetic oligonucleotide
  Target: LAMA2; (+) strand; PAM type: YTN; PAM sequence: TTT
tagacatattatattgagag

SEQ ID NO: 321075 - DNA, 20 bp, Artificial Sequence
  Description of Artificial Sequence: Synthetic oligonucleotide
  Target: LAMA2; (+) strand; PAM type: YTN; PAM sequence: TTT
agacatattatattgagagt

SEQ ID NO: 321076 - DNA, 20 bp, Artificial Sequence
  Description of Artificial Sequence: Synthetic oligonucleotide
  Target: LAMA2; (+) strand; PAM type: YTN; PAM sequence: TTA
gacatattatattgagagtg

SEQ ID NO: 321077 - DNA, 20 bp, Artificial Sequence
  Description of Artificial Sequence: Synthetic oligonucleotide
  Target: LAMA2; (+) strand; PAM type: YTN; PAM sequence: TTA
tattgagagtgtattacaca

SEQ ID NO: 321078 - DNA, 20 bp, Artificial Sequence
  Description of Artificial Sequence: Synthetic oligonucleotide
  Target: LAMA2; (+) strand; PAM type: YTN; PAM sequence: TTG
agagtgtattacacatgtca

SEQ ID NO: 321079 - DNA, 20 bp, Artificial Sequence
  Description of Artificial Sequence: Synthetic oligonucleotide
  Target: LAMA2; (+) strand; PAM type: YTN; PAM sequence: TTA
cacatgtcattacaggctag

SEQ ID NO: 321080 - DNA, 20 bp, Artificial Sequence
  Description of Artificial Sequence: Synthetic oligonucleotide
  Target: LAMA2; (+) strand; PAM type: YTN; PAM sequence: TTA
caggctagttgtacatttct

SEQ ID NO: 321081 - DNA, 20 bp, Artificial Sequence
  Description of Artificial Sequence: Synthetic oligonucleotide
  Target: LAMA2; (+) strand; PAM type: YTN; PAM sequence: CTA
gttgtacatttctattctgt

SEQ ID NO: 321082 - DNA, 20 bp, Artificial Sequence
  Description of Artificial Sequence: Synthetic oligonucleotide
  Target: LAMA2; (+) strand; PAM type: YTN; PAM sequence: TTG
tacatttctattctgtcttt

SEQ ID NO: 321083 - DNA, 20 bp, Artificial Sequence
  Description of Artificial Sequence: Synthetic oligonucleotide
  Target: LAMA2; (+) strand; PAM type: YTN; PAM sequence: TTT
ctattctgtcttttatgtga

SEQ ID NO: 321084 - DNA, 20 bp, Artificial Sequence
  Description of Artificial Sequence: Synthetic oligonucleotide
  Target: LAMA2; (+) strand; PAM type: YTN; PAM sequence: TTC
tattctgtcttttatgtgag

SEQ ID NO: 321085 - DNA, 20 bp, Artificial Sequence
  Description of Artificial Sequence: Synthetic oligonucleotide
  Target: LAMA2; (+) strand; PAM type: YTN; PAM sequence: CTA
ttctgtcttttatgtgagtt

SEQ ID NO: 321086 - DNA, 20 bp, Artificial Sequence
  Description of Artificial Sequence: Synthetic oligonucleotide
  Target: LAMA2; (+) strand; PAM type: YTN; PAM sequence: TTC
tgtcttttatgtgagtttct

SEQ ID NO: 321087 - DNA, 20 bp, Artificial Sequence
  Description of Artificial Sequence: Synthetic oligonucleotide
  Target: LAMA2; (+) strand; PAM type: YTN; PAM sequence: CTG
tcttttatgtgagtttctca

SEQ ID NO: 321088 - DNA, 20 bp, Artificial Sequence
  Description of Artificial Sequence: Synthetic oligonucleotide
  Target: LAMA2; (+) strand; PAM type: YTN; PAM sequence: CTT
ttatgtgagtttctcagtat

SEQ ID NO: 321089 - DNA, 20 bp, Artificial Sequence
  Description of Artificial Sequence: Synthetic oligonucleotide
  Target: LAMA2; (+) strand; PAM type: YTN; PAM sequence: TTT
tatgtgagtttctcagtata

SEQ ID NO: 321090 - DNA, 20 bp, Artificial Sequence
  Description of Artificial Sequence: Synthetic oligonucleotide
  Target: LAMA2; (+) strand; PAM type: YTN; PAM sequence: TTT
atgtgagtttctcagtatat

SEQ ID NO: 321091 - DNA, 20 bp, Artificial Sequence
  Description of Artificial Sequence: Synthetic oligonucleotide
  Target: LAMA2; (+) strand; PAM type: YTN; PAM sequence: TTA
tgtgagtttctcagtatata

SEQ ID NO: 321092 - DNA, 20 bp, Artificial Sequence
  Description of Artificial Sequence: Synthetic oligonucleotide
  Target: LAMA2; (+) strand; PAM type: YTN; PAM sequence: TTT
ctcagtatatacatgaaaga

SEQ ID NO: 321093 - DNA, 20 bp, Artificial Sequence
  Description of Artificial Sequence: Synthetic oligonucleotide
  Target: LAMA2; (+) strand; PAM type: YTN; PAM sequence: TTC
tcagtatatacatgaaagac

SEQ ID NO: 321094 - DNA, 20 bp, Artificial Sequence
  Description of Artificial Sequence: Synthetic oligonucleotide
  Target: LAMA2; (+) strand; PAM type: YTN; PAM sequence: CTC
agtatatacatgaaagacac

SEQ ID NO: 321095 - DNA, 20 bp, Artificial Sequence
  Description of Artificial Sequence: Synthetic oligonucleotide
  Target: LAMA2; (+) strand; PAM type: YTN; PAM sequence: CTC
tgcctgtatccttgctcctc

SEQ ID NO: 321096 - DNA, 20 bp, Artificial Sequence
  Description of Artificial Sequence: Synthetic oligonucleotide
  Target: LAMA2; (+) strand; PAM type: YTN; PAM sequence: CTG
cctgtatccttgctcctcta

SEQ ID NO: 321097 - DNA, 20 bp, Artificial Sequence
  Description of Artificial Sequence: Synthetic oligonucleotide
  Target: LAMA2; (+) strand; PAM type: YTN; PAM sequence: CTG
tatccttgctcctctatttt

SEQ ID NO: 321098 - DNA, 20 bp, Artificial Sequence
  Description of Artificial Sequence: Synthetic oligonucleotide
  Target: LAMA2; (+) strand; PAM type: YTN; PAM sequence: CTT
gctcctctatttttgaaaat

SEQ ID NO: 321099 - DNA, 20 bp, Artificial Sequence
  Description of Artificial Sequence: Synthetic oligonucleotide
  Target: LAMA2; (+) strand; PAM type: YTN; PAM sequence: TTG
ctcctctatttttgaaaatt

SEQ ID NO: 321100 - DNA, 20 bp, Artificial Sequence
  Description of Artificial Sequence: Synthetic oligonucleotide
  Target: LAMA2; (+) strand; PAM type: YTN; PAM sequence: CTC
ctctatttttgaaaattaac

SEQ ID NO: 321101 - DNA, 20 bp, Artificial Sequence
  Description of Artificial Sequence: Synthetic oligonucleotide
  Target: LAMA2; (+) strand; PAM type: YTN; PAM sequence: CTC
tatttttgaaaattaacata

SEQ ID NO: 321102 - DNA, 20 bp, Artificial Sequence
  Description of Artificial Sequence: Synthetic oligonucleotide
  Target: LAMA2; (+) strand; PAM type: YTN; PAM sequence: CTA
tttttgaaaattaacatagt

SEQ ID NO: 321103 - DNA, 20 bp, Artificial Sequence
  Description of Artificial Sequence: Synthetic oligonucleotide
  Target: LAMA2; (+) strand; PAM type: YTN; PAM sequence: TTT
ttgaaaattaacatagtcct

SEQ ID NO: 321104 - DNA, 20 bp, Artificial Sequence
  Description of Artificial Sequence: Synthetic oligonucleotide
  Target: LAMA2; (+) strand; PAM type: YTN; PAM sequence: TTT
tgaaaattaacatagtccta

SEQ ID NO: 321105 - DNA, 20 bp, Artificial Sequence
  Description of Artificial Sequence: Synthetic oligonucleotide
  Target: LAMA2; (+) strand; PAM type: YTN; PAM sequence: TTT
gaaaattaacatagtcctaa

SEQ ID NO: 321106 - DNA, 20 bp, Artificial Sequence
  Description of Artificial Sequence: Synthetic oligonucleotide
  Target: LAMA2; (+) strand; PAM type: YTN; PAM sequence: TTG
aaaattaacatagtcctaat

SEQ ID NO: 321107 - DNA, 20 bp, Artificial Sequence
  Description of Artificial Sequence: Synthetic oligonucleotide
  Target: LAMA2; (+) strand; PAM type: YTN; PAM sequence: TTA
acatagtcctaatatgcatt

SEQ ID NO: 321108 - DNA, 20 bp, Artificial Sequence
  Description of Artificial Sequence: Synthetic oligonucleotide
  Target: LAMA2; (+) strand; PAM type: YTN; PAM sequence: CTA
atatgcatttttatggttga

SEQ ID NO: 321109 - DNA, 20 bp, Artificial Sequence
  Description of Artificial Sequence: Synthetic oligonucleotide
  Target: LAMA2; (+) strand; PAM type: YTN; PAM sequence: TTT
ttatggttgacagtcgtggt

SEQ ID NO: 321110 - DNA, 20 bp, Artificial Sequence
  Description of Artificial Sequence: Synthetic oligonucleotide
  Target: LAMA2; (+) strand; PAM type: YTN; PAM sequence: TTT
tatggttgacagtcgtggta

SEQ ID NO: 321111 - DNA, 20 bp, Artificial Sequence
  Description of Artificial Sequence: Synthetic oligonucleotide
  Target: LAMA2; (+) strand; PAM type: YTN; PAM sequence: TTT
atggttgacagtcgtggtat

SEQ ID NO: 321112 - DNA, 20 bp, Artificial Sequence
  Description of Artificial Sequence: Synthetic oligonucleotide
  Target: LAMA2; (+) strand; PAM type: YTN; PAM sequence: TTA
tggttgacagtcgtggtata

SEQ ID NO: 321113 - DNA, 20 bp, Artificial Sequence
  Description of Artificial Sequence: Synthetic oligonucleotide
  Target: LAMA2; (+) strand; PAM type: YTN; PAM sequence: TTG
acagtcgtggtatatgagag

SEQ ID NO: 321114 - DNA, 20 bp, Artificial Sequence
  Description of Artificial Sequence: Synthetic oligonucleotide
  Target: LAMA2; (+) strand; PAM type: YTN; PAM sequence: CTT
tgatgtaaaaagattgtttt

SEQ ID NO: 321115 - DNA, 20 bp, Artificial Sequence
  Description of Artificial Sequence: Synthetic oligonucleotide
  Target: LAMA2; (+) strand; PAM type: YTN; PAM sequence: TTT
gatgtaaaaagattgttttt

SEQ ID NO: 321116 - DNA, 20 bp, Artificial Sequence
  Description of Artificial Sequence: Synthetic oligonucleotide
  Target: LAMA2; (+) strand; PAM type: YTN; PAM sequence: TTG
atgtaaaaagattgttttta

SEQ ID NO: 321117 - DNA, 20 bp, Artificial Sequence
  Description of Artificial Sequence: Synthetic oligonucleotide
  Target: LAMA2; (+) strand; PAM type: YTN; PAM sequence: TTG
tttttaaaaaaacataaact

SEQ ID NO: 321118 - DNA, 20 bp, Artificial Sequence
  Description of Artificial Sequence: Synthetic oligonucleotide
  Target: LAMA2; (+) strand; PAM type: YTN; PAM sequence: TTT
ttaaaaaaacataaacttta

SEQ ID NO: 321119 - DNA, 20 bp, Artificial Sequence
  Description of Artificial Sequence: Synthetic oligonucleotide
  Target: LAMA2; (+) strand; PAM type: YTN; PAM sequence: TTT
taaaaaaacataaactttac

SEQ ID NO: 321120 - DNA, 20 bp, Artificial Sequence
  Description of Artificial Sequence: Synthetic oligonucleotide
  Target: LAMA2; (+) strand; PAM type: YTN; PAM sequence: TTT
aaaaaaacataaactttaca

SEQ ID NO: 321121 - DNA, 20 bp, Artificial Sequence
  Description of Artificial Sequence: Synthetic oligonucleotide
  Target: LAMA2; (+) strand; PAM type: YTN; PAM sequence: TTA
aaaaaacataaactttacaa

SEQ ID NO: 321122 - DNA, 20 bp, Artificial Sequence
  Description of Artificial Sequence: Synthetic oligonucleotide
  Target: LAMA2; (+) strand; PAM type: YTN; PAM sequence: CTT
tacaatatatgcttgtgtgt

SEQ ID NO: 321123 - DNA, 20 bp, Artificial Sequence
  Description of Artificial Sequence: Synthetic oligonucleotide
  Target: LAMA2; (+) strand; PAM type: YTN; PAM sequence: TTT
acaatatatgcttgtgtgtg

SEQ ID NO: 321124 - DNA, 20 bp, Artificial Sequence
  Description of Artificial Sequence: Synthetic oligonucleotide
  Target: LAMA2; (+) strand; PAM type: YTN; PAM sequence: TTA
caatatatgcttgtgtgtgt

SEQ ID NO: 321125 - DNA, 20 bp, Artificial Sequence
  Description of Artificial Sequence: Synthetic oligonucleotide
  Target: LAMA2; (+) strand; PAM type: YTN; PAM sequence: CTT
gtgtgtgtcagtcagagggg

SEQ ID NO: 321126 - DNA, 20 bp, Artificial Sequence
  Description of Artificial Sequence: Synthetic oligonucleotide
  Target: LAMA2; (+) strand; PAM type: YTN; PAM sequence: TTG
tgtgtgtcagtcagaggggg

SEQ ID NO: 321127 - DNA, 20 bp, Artificial Sequence
  Description of Artificial Sequence: Synthetic oligonucleotide
  Target: LAMA2; (+) strand; PAM type: YTN; PAM sequence: TTT
ctgaaacaagagatctatga

SEQ ID NO: 321128 - DNA, 20 bp, Artificial Sequence
  Description of Artificial Sequence: Synthetic oligonucleotide
  Target: LAMA2; (+) strand; PAM type: YTN; PAM sequence: TTC
tgaaacaagagatctatgaa

SEQ ID NO: 321129 - DNA, 20 bp, Artificial Sequence
  Description of Artificial Sequence: Synthetic oligonucleotide
  Target: LAMA2; (+) strand; PAM type: YTN; PAM sequence: CTG
aaacaagagatctatgaaag

SEQ ID NO: 321130 - DNA, 20 bp, Artificial Sequence
  Description of Artificial Sequence: Synthetic oligonucleotide
  Target: LAMA2; (+) strand; PAM type: YTN; PAM sequence: CTA
tgaaagaagggaacagtctg

SEQ ID NO: 321131 - DNA, 20 bp, Artificial Sequence
  Description of Artificial Sequence: Synthetic oligonucleotide
  Target: LAMA2; (+) strand; PAM type: YTN; PAM sequence: CTG
ttagttccacctggttcttc

SEQ ID NO: 321132 - DNA, 20 bp, Artificial Sequence
  Description of Artificial Sequence: Synthetic oligonucleotide
  Target: LAMA2; (+) strand; PAM type: YTN; PAM sequence: TTA
gttccacctggttcttctca

SEQ ID NO: 321133 - DNA, 20 bp, Artificial Sequence
  Description of Artificial Sequence: Synthetic oligonucleotide
  Target: LAMA2; (+) strand; PAM type: YTN; PAM sequence: TTC
cacctggttcttctcattta

SEQ ID NO: 321134 - DNA, 20 bp, Artificial Sequence
  Description of Artificial Sequence: Synthetic oligonucleotide
  Target: LAMA2; (+) strand; PAM type: YTN; PAM sequence: CTG
gttcttctcatttaattact

SEQ ID NO: 321135 - DNA, 20 bp, Artificial Sequence
  Description of Artificial Sequence: Synthetic oligonucleotide
  Target: LAMA2; (+) strand; PAM type: YTN; PAM sequence: TTC
ttctcatttaattactataa

SEQ ID NO: 321136 - DNA, 20 bp, Artificial Sequence
  Description of Artificial Sequence: Synthetic oligonucleotide
  Target: LAMA2; (+) strand; PAM type: YTN; PAM sequence: CTT
ctcatttaattactataatt

SEQ ID NO: 321137 - DNA, 20 bp, Artificial Sequence
  Description of Artificial Sequence: Synthetic oligonucleotide
  Target: LAMA2; (+) strand; PAM type: YTN; PAM sequence: TTC
tcatttaattactataatta

SEQ ID NO: 321138 - DNA, 20 bp, Artificial Sequence
  Description of Artificial Sequence: Synthetic oligonucleotide
  Target: LAMA2; (+) strand; PAM type: YTN; PAM sequence: CTC
atttaattactataattaat

SEQ ID NO: 321139 - DNA, 20 bp, Artificial Sequence
  Description of Artificial Sequence: Synthetic oligonucleotide
  Target: LAMA2; (+) strand; PAM type: YTN; PAM sequence: TTT
aattactataattaatatat

SEQ ID NO: 321140 - DNA, 20 bp, Artificial Sequence
  Description of Artificial Sequence: Synthetic oligonucleotide
  Target: LAMA2; (+) strand; PAM type: YTN; PAM sequence: TTA
attactataattaatatatg

SEQ ID NO: 321141 - DNA, 20 bp, Artificial Sequence
  Description of Artificial Sequence: Synthetic oligonucleotide
  Target: LAMA2; (+) strand; PAM type: YTN; PAM sequence: TTA
ctataattaatatatgcaga

SEQ ID NO: 321142 - DNA, 20 bp, Artificial Sequence
  Description of Artificial Sequence: Synthetic oligonucleotide
  Target: LAMA2; (+) strand; PAM type: YTN; PAM sequence: CTA
taattaatatatgcagaaga

SEQ ID NO: 321143 - DNA, 20 bp, Artificial Sequence
  Description of Artificial Sequence: Synthetic oligonucleotide
  Target: LAMA2; (+) strand; PAM type: YTN; PAM sequence: TTA
atatatgcagaagaaaaatt

SEQ ID NO: 321144 - DNA, 20 bp, Artificial Sequence
  Description of Artificial Sequence: Synthetic oligonucleotide
  Target: LAMA2; (+) strand; PAM type: YTN; PAM sequence: TTA
atagggttcttaaatccagg

SEQ ID NO: 321145 - DNA, 20 bp, Artificial Sequence
  Description of Artificial Sequence: Synthetic oligonucleotide
  Target: LAMA2; (+) strand; PAM type: YTN; PAM sequence: TTC
ttaaatccagggagatatta

SEQ ID NO: 321146 - DNA, 20 bp, Artificial Sequence
  Description of Artificial Sequence: Synthetic oligonucleotide
  Target: LAMA2; (+) strand; PAM type: YTN; PAM sequence: CTT
aaatccagggagatattaaa

SEQ ID NO: 321147 - DNA, 20 bp, Artificial Sequence
  Description of Artificial Sequence: Synthetic oligonucleotide
  Target: LAMA2; (+) strand; PAM type: YTN; PAM sequence: TTA
aatccagggagatattaaat

SEQ ID NO: 321148 - DNA, 20 bp, Artificial Sequence
  Description of Artificial Sequence: Synthetic oligonucleotide
  Target: LAMA2; (+) strand; PAM type: YTN; PAM sequence: TTA
aatgtcaaaaatgtggatat

SEQ ID NO: 321149 - DNA, 20 bp, Artificial Sequence
  Description of Artificial Sequence: Synthetic oligonucleotide
  Target: LAMA2; (+) strand; PAM type: YTN; PAM sequence: TTT
gaattaaagactaatcaact

SEQ ID NO: 321150 - DNA, 20 bp, Artificial Sequence
  Description of Artificial Sequence: Synthetic oligonucleotide
  Target: LAMA2; (+) strand; PAM type: YTN; PAM sequence: TTG
aattaaagactaatcaactt

SEQ ID NO: 321151 - DNA, 20 bp, Artificial Sequence
  Description of Artificial Sequence: Synthetic oligonucleotide
  Target: LAMA2; (+) strand; PAM type: YTN; PAM sequence: TTA
aagactaatcaacttgaaca

SEQ ID NO: 321152 - DNA, 20 bp, Artificial Sequence
  Description of Artificial Sequence: Synthetic oligonucleotide
  Target: LAMA2; (+) strand; PAM type: YTN; PAM sequence: CTA
atcaacttgaacaatacatt

SEQ ID NO: 321153 - DNA, 20 bp, Artificial Sequence
  Description of Artificial Sequence: Synthetic oligonucleotide
  Target: LAMA2; (+) strand; PAM type: YTN; PAM sequence: CTT
gaacaatacattataatgtt

SEQ ID NO: 321154 - DNA, 20 bp, Artificial Sequence
  Description of Artificial Sequence: Synthetic oligonucleotide
  Target: LAMA2; (+) strand; PAM type: YTN; PAM sequence: TTG
aacaatacattataatgtta

SEQ ID NO: 321155 - DNA, 20 bp, Artificial Sequence
  Description of Artificial Sequence: Synthetic oligonucleotide
  Target: LAMA2; (+) strand; PAM type: YTN; PAM sequence: TTA
taatgttaaagaactggtag

SEQ ID NO: 321156 - DNA, 20 bp, Artificial Sequence
  Description of Artificial Sequence: Synthetic oligonucleotide
  Target: LAMA2; (+) strand; PAM type: YTN; PAM sequence: TTA
aagaactggtagcatattaa

SEQ ID NO: 321157 - DNA, 20 bp, Artificial Sequence
  Description of Artificial Sequence: Synthetic oligonucleotide
  Target: LAMA2; (+) strand; PAM type: YTN; PAM sequence: CTG
gtagcatattaatttcaagt

SEQ ID NO: 321158 - DNA, 20 bp, Artificial Sequence
  Description of Artificial Sequence: Synthetic oligonucleotide
  Target: LAMA2; (+) strand; PAM type: YTN; PAM sequence: TTA
atttcaagtgagagttttaa

SEQ ID NO: 321159 - DNA, 20 bp, Artificial Sequence
  Description of Artificial Sequence: Synthetic oligonucleotide
  Target: LAMA2; (+) strand; PAM type: YTN; PAM sequence: TTT
caagtgagagttttaaactt

SEQ ID NO: 321160 - DNA, 20 bp, Artificial Sequence
  Description of Artificial Sequence: Synthetic oligonucleotide
  Target: LAMA2; (+) strand; PAM type: YTN; PAM sequence: TTC
aagtgagagttttaaacttg

SEQ ID NO: 321161 - DNA, 20 bp, Artificial Sequence
  Description of Artificial Sequence: Synthetic oligonucleotide
  Target: LAMA2; (+) strand; PAM type: YTN; PAM sequence: TTT
taaacttgataactgcagtg

SEQ ID NO: 321162 - DNA, 20 bp, Artificial Sequence
  Description of Artificial Sequence: Synthetic oligonucleotide
  Target: LAMA2; (+) strand; PAM type: YTN; PAM sequence: TTT
aaacttgataactgcagtgg

SEQ ID NO: 321163 - DNA, 20 bp, Artificial Sequence
  Description of Artificial Sequence: Synthetic oligonucleotide
  Target: LAMA2; (+) strand; PAM type: YTN; PAM sequence: TTA
aacttgataactgcagtggt

SEQ ID NO: 321164 - DNA, 20 bp, Artificial Sequence
  Description of Artificial Sequence: Synthetic oligonucleotide
  Target: LAMA2; (+) strand; PAM type: YTN; PAM sequence: CTT
gataactgcagtggttttgt

SEQ ID NO: 321165 - DNA, 20 bp, Artificial Sequence
  Description of Artificial Sequence: Synthetic oligonucleotide
  Target: LAMA2; (+) strand; PAM type: YTN; PAM sequence: TTG
ataactgcagtggttttgtg

SEQ ID NO: 321166 - DNA, 20 bp, Artificial Sequence
  Description of Artificial Sequence: Synthetic oligonucleotide
  Target: LAMA2; (+) strand; PAM type: YTN; PAM sequence: CTG
cagtggttttgtgaatccaa

SEQ ID NO: 321167 - DNA, 20 bp, Artificial Sequence
  Description of Artificial Sequence: Synthetic oligonucleotide
  Target: LAMA2; (+) strand; PAM type: YTN; PAM sequence: TTT
tgtgaatccaattttaagag

SEQ ID NO: 321168 - DNA, 20 bp, Artificial Sequence
  Description of Artificial Sequence: Synthetic oligonucleotide
  Target: LAMA2; (+) strand; PAM type: YTN; PAM sequence: TTT
gtgaatccaattttaagagt

SEQ ID NO: 321169 - DNA, 20 bp, Artificial Sequence
  Description of Artificial Sequence: Synthetic oligonucleotide
  Target: LAMA2; (+) strand; PAM type: YTN; PAM sequence: TTG
tgaatccaattttaagagtt

SEQ ID NO: 321170 - DNA, 20 bp, Artificial Sequence
  Description of Artificial Sequence: Synthetic oligonucleotide
  Target: LAMA2; (+) strand; PAM type: YTN; PAM sequence: TTT
taagagttaaatgttgtgtc

SEQ ID NO: 321171 - DNA, 20 bp, Artificial Sequence
  Description of Artificial Sequence: Synthetic oligonucleotide
  Target: LAMA2; (+) strand; PAM type: YTN; PAM sequence: TTT
aagagttaaatgttgtgtca

SEQ ID NO: 321172 - DNA, 20 bp, Artificial Sequence
  Description of Artificial Sequence: Synthetic oligonucleotide
  Target: LAMA2; (+) strand; PAM type: YTN; PAM sequence: TTA
agagttaaatgttgtgtcaa

SEQ ID NO: 321173 - DNA, 20 bp, Artificial Sequence
  Description of Artificial Sequence: Synthetic oligonucleotide
  Target: LAMA2; (+) strand; PAM type: YTN; PAM sequence: TTA
aatgttgtgtcaatgccatg

SEQ ID NO: 321174 - DNA, 20 bp, Artificial Sequence
  Description of Artificial Sequence: Synthetic oligonucleotide
  Target: LAMA2; (+) strand; PAM type: YTN; PAM sequence: TTG
tgtcaatgccatgaatcaga

SEQ ID NO: 321175 - DNA, 20 bp, Artificial Sequence
  Description of Artificial Sequence: Synthetic oligonucleotide
  Target: LAMA2; (+) strand; PAM type: YTN; PAM sequence: TTT
ataacaaaagatctgtatga

SEQ ID NO: 321176 - DNA, 20 bp, Artificial Sequence
  Description of Artificial Sequence: Synthetic oligonucleotide
  Target: LAMA2; (+) strand; PAM type: YTN; PAM sequence: TTA
taacaaaagatctgtatgaa

SEQ ID NO: 321177 - DNA, 20 bp, Artificial Sequence
  Description of Artificial Sequence: Synthetic oligonucleotide
  Target: LAMA2; (+) strand; PAM type: YTN; PAM sequence: CTG
tatgaaatgatgcataatag

SEQ ID NO: 321178 - DNA, 20 bp, Artificial Sequence
  Description of Artificial Sequence: Synthetic oligonucleotide
  Target: LAMA2; (+) strand; PAM type: YTN; PAM sequence: CTG
aagctgctgaaaattgatgg

SEQ ID NO: 321179 - DNA, 20 bp, Artificial Sequence
  Description of Artificial Sequence: Synthetic oligonucleotide
  Target: LAMA2; (+) strand; PAM type: YTN; PAM sequence: CTG
ctgaaaattgatggtctaaa

SEQ ID NO: 321180 - DNA, 20 bp, Artificial Sequence
  Description of Artificial Sequence: Synthetic oligonucleotide
  Target: LAMA2; (+) strand; PAM type: YTN; PAM sequence: CTG
aaaattgatggtctaaatca

SEQ ID NO: 321181 - DNA, 20 bp, Artificial Sequence
  Description of Artificial Sequence: Synthetic oligonucleotide
  Target: LAMA2; (+) strand; PAM type: YTN; PAM sequence: TTG
atggtctaaatcaaaaggat

SEQ ID NO: 321182 - DNA, 20 bp, Artificial Sequence
  Description of Artificial Sequence: Synthetic oligonucleotide
  Target: LAMA2; (+) strand; PAM type: YTN; PAM sequence: CTA
aatcaaaaggatggattagg

SEQ ID NO: 321183 - DNA, 20 bp, Artificial Sequence
  Description of Artificial Sequence: Synthetic oligonucleotide
  Target: LAMA2; (+) strand; PAM type: YTN; PAM sequence: TTA
ggaatctttgcggaattatt

SEQ ID NO: 321184 - DNA, 20 bp, Artificial Sequence
  Description of Artificial Sequence: Synthetic oligonucleotide
  Target: LAMA2; (+) strand; PAM type: YTN; PAM sequence: CTT
tgcggaattattacagacct

SEQ ID NO: 321185 - DNA, 20 bp, Artificial Sequence
  Description of Artificial Sequence: Synthetic oligonucleotide
  Target: LAMA2; (+) strand; PAM type: YTN; PAM sequence: TTT
gcggaattattacagacctg

SEQ ID NO: 321186 - DNA, 20 bp, Artificial Sequence
  Description of Artificial Sequence: Synthetic oligonucleotide
  Target: LAMA2; (+) strand; PAM type: YTN; PAM sequence: TTG
cggaattattacagacctgt

SEQ ID NO: 321187 - DNA, 20 bp, Artificial Sequence
  Description of Artificial Sequence: Synthetic oligonucleotide
  Target: LAMA2; (+) strand; PAM type: YTN; PAM sequence: TTA
ttacagacctgtagttttgt

SEQ ID NO: 321188 - DNA, 20 bp, Artificial Sequence
  Description of Artificial Sequence: Synthetic oligonucleotide
  Target: LAMA2; (+) strand; PAM type: YTN; PAM sequence: TTA
cagacctgtagttttgtgag

SEQ ID NO: 321189 - DNA, 20 bp, Artificial Sequence
  Description of Artificial Sequence: Synthetic oligonucleotide
  Target: LAMA2; (+) strand; PAM type: YTN; PAM sequence: CTG
tagttttgtgagaaaagcag

SEQ ID NO: 321190 - DNA, 20 bp, Artificial Sequence
  Description of Artificial Sequence: Synthetic oligonucleotide
  Target: LAMA2; (+) strand; PAM type: YTN; PAM sequence: TTT
tgtgagaaaagcagagaatg

SEQ ID NO: 321191 - DNA, 20 bp, Artificial Sequence
  Description of Artificial Sequence: Synthetic oligonucleotide
  Target: LAMA2; (+) strand; PAM type: YTN; PAM sequence: TTT
gtgagaaaagcagagaatgt

SEQ ID NO: 321192 - DNA, 20 bp, Artificial Sequence
  Description of Artificial Sequence: Synthetic oligonucleotide
  Target: LAMA2; (+) strand; PAM type: YTN; PAM sequence: TTG
tgagaaaagcagagaatgtc

SEQ ID NO: 321193 - DNA, 20 bp, Artificial Sequence
  Description of Artificial Sequence: Synthetic oligonucleotide
  Target: LAMA2; (+) strand; PAM type: YTN; PAM sequence: CTT
ttacttcaaggaggatttga

SEQ ID NO: 321194 - DNA, 20 bp, Artificial Sequence
  Description of Artificial Sequence: Synthetic oligonucleotide
  Target: LAMA2; (+) strand; PAM type: YTN; PAM sequence: TTT
tacttcaaggaggatttgaa

SEQ ID NO: 321195 - DNA, 20 bp, Artificial Sequence
  Description of Artificial Sequence: Synthetic oligonucleotide
  Target: LAMA2; (+) strand; PAM type: YTN; PAM sequence: TTT
acttcaaggaggatttgaag

SEQ ID NO: 321196 - DNA, 20 bp, Artificial Sequence
  Description of Artificial Sequence: Synthetic oligonucleotide
  Target: LAMA2; (+) strand; PAM type: YTN; PAM sequence: TTA
cttcaaggaggatttgaagt

SEQ ID NO: 321197 - DNA, 20 bp, Artificial Sequence
  Description of Artificial Sequence: Synthetic oligonucleotide
  Target: LAMA2; (+) strand; PAM type: YTN; PAM sequence: CTT
caaggaggatttgaagtatt

SEQ ID NO: 321198 - DNA, 20 bp, Artificial Sequence
  Description of Artificial Sequence: Synthetic oligonucleotide
  Target: LAMA2; (+) strand; PAM type: YTN; PAM sequence: TTC
aaggaggatttgaagtattt

SEQ ID NO: 321199 - DNA, 20 bp, Artificial Sequence
  Description of Artificial Sequence: Synthetic oligonucleotide
  Target: LAMA2; (+) strand; PAM type: YTN; PAM sequence: TTT
gaagtatttgggggtataca

SEQ ID NO: 321200 - DNA, 20 bp, Artificial Sequence
  Description of Artificial Sequence: Synthetic oligonucleotide
  Target: LAMA2; (+) strand; PAM type: YTN; PAM sequence: TTG
aagtatttgggggtatacat

SEQ ID NO: 321201 - DNA, 20 bp, Artificial Sequence
  Description of Artificial Sequence: Synthetic oligonucleotide
  Target: LAMA2; (+) strand; PAM type: YTN; PAM sequence: TTT
gggggtatacattattgcat

SEQ ID NO: 321202 - DNA, 20 bp, Artificial Sequence
  Description of Artificial Sequence: Synthetic oligonucleotide
  Target: LAMA2; (+) strand; PAM type: YTN; PAM sequence: TTG
ggggtatacattattgcatt

SEQ ID NO: 321203 - DNA, 20 bp, Artificial Sequence
  Description of Artificial Sequence: Synthetic oligonucleotide
  Target: LAMA2; (+) strand; PAM type: YTN; PAM sequence: TTA
ttgcattagcttagtcagtt

SEQ ID NO: 321204 - DNA, 20 bp, Artificial Sequence
  Description of Artificial Sequence: Synthetic oligonucleotide
  Target: LAMA2; (+) strand; PAM type: YTN; PAM sequence: TTG
cattagcttagtcagtttac

SEQ ID NO: 321205 - DNA, 20 bp, Artificial Sequence
  Description of Artificial Sequence: Synthetic oligonucleotide
  Target: LAMA2; (+) strand; PAM type: YTN; PAM sequence: TTA
gcttagtcagtttacagcta

SEQ ID NO: 321206 - DNA, 20 bp, Artificial Sequence
  Description of Artificial Sequence: Synthetic oligonucleotide
  Target: LAMA2; (+) strand; PAM type: YTN; PAM sequence: CTT
agtcagtttacagctagcta

SEQ ID NO: 321207 - DNA, 20 bp, Artificial Sequence
  Description of Artificial Sequence: Synthetic oligonucleotide
  Target: LAMA2; (+) strand; PAM type: YTN; PAM sequence: TTA
gtcagtttacagctagctag

SEQ ID NO: 321208 - DNA, 20 bp, Artificial Sequence
  Description of Artificial Sequence: Synthetic oligonucleotide
  Target: LAMA2; (+) strand; PAM type: YTN; PAM sequence: TTT
acagctagctagacagtgca

SEQ ID NO: 321209 - DNA, 20 bp, Artificial Sequence
  Description of Artificial Sequence: Synthetic oligonucleotide
  Target: LAMA2; (+) strand; PAM type: YTN; PAM sequence: TTA
cagctagctagacagtgcaa

SEQ ID NO: 321210 - DNA, 20 bp, Artificial Sequence
  Description of Artificial Sequence: Synthetic oligonucleotide
  Target: LAMA2; (+) strand; PAM type: YTN; PAM sequence: CTA
gctagacagtgcaaacttgt

SEQ ID NO: 321211 - DNA, 20 bp, Artificial Sequence
  Description of Artificial Sequence: Synthetic oligonucleotide
  Target: LAMA2; (+) strand; PAM type: YTN; PAM sequence: CTA
gacagtgcaaacttgtgaag

SEQ ID NO: 321212 - DNA, 20 bp, Artificial Sequence
  Description of Artificial Sequence: Synthetic oligonucleotide
  Target: LAMA2; (+) strand; PAM type: YTN; PAM sequence: CTT
gtgaaggaggatgttttcag

SEQ ID NO: 321213 - DNA, 20 bp, Artificial Sequence
  Description of Artificial Sequence: Synthetic oligonucleotide
  Target: LAMA2; (+) strand; PAM type: YTN; PAM sequence: TTG
tgaaggaggatgttttcagt

SEQ ID NO: 321214 - DNA, 20 bp, Artificial Sequence
  Description of Artificial Sequence: Synthetic oligonucleotide
  Target: LAMA2; (+) strand; PAM type: YTN; PAM sequence: TTT
tcagtatatcacactaggat

SEQ ID NO: 321215 - DNA, 20 bp, Artificial Sequence
  Description of Artificial Sequence: Synthetic oligonucleotide
  Target: LAMA2; (+) strand; PAM type: YTN; PAM sequence: TTT
cagtatatcacactaggatc

SEQ ID NO: 321216 - DNA, 20 bp, Artificial Sequence
  Description of Artificial Sequence: Synthetic oligonucleotide
  Target: LAMA2; (+) strand; PAM type: YTN; PAM sequence: TTC
agtatatcacactaggatca

SEQ ID NO: 321217 - DNA, 20 bp, Artificial Sequence
  Description of Artificial Sequence: Synthetic oligonucleotide
  Target: LAMA2; (+) strand; PAM type: YTN; PAM sequence: CTA
ggatcatggcaccagtcctg

SEQ ID NO: 321218 - DNA, 20 bp, Artificial Sequence
  Description of Artificial Sequence: Synthetic oligonucleotide
  Target: LAMA2; (+) strand; PAM type: YTN; PAM sequence: CTG
aagaaatagggggaactttt

SEQ ID NO: 321219 - DNA, 20 bp, Artificial Sequence
  Description of Artificial Sequence: Synthetic oligonucleotide
  Target: LAMA2; (+) strand; PAM type: YTN; PAM sequence: CTT
ttgatctccatcataccata

SEQ ID NO: 321220 - DNA, 20 bp, Artificial Sequence
  Description of Artificial Sequence: Synthetic oligonucleotide
  Target: LAMA2; (+) strand; PAM type: YTN; PAM sequence: TTT
tgatctccatcataccatat

SEQ ID NO: 321221 - DNA, 20 bp, Artificial Sequence
  Description of Artificial Sequence: Synthetic oligonucleotide
  Target: LAMA2; (+) strand; PAM type: YTN; PAM sequence: TTT
gatctccatcataccatata

SEQ ID NO: 321222 - DNA, 20 bp, Artificial Sequence
  Description of Artificial Sequence: Synthetic oligonucleotide
  Target: LAMA2; (+) strand; PAM type: YTN; PAM sequence: TTG
atctccatcataccatatac

SEQ ID NO: 321223 - DNA, 20 bp, Artificial Sequence
  Description of Artificial Sequence: Synthetic oligonucleotide
  Target: LAMA2; (+) strand; PAM type: YTN; PAM sequence: CTC
catcataccatatacacacc

SEQ ID NO: 321224 - DNA, 20 bp, Artificial Sequence
  Description of Artificial Sequence: Synthetic oligonucleotide
  Target: LAMA2; (+) strand; PAM type: YTN; PAM sequence: CTA
tgtgtgggaatgctaatggg

SEQ ID NO: 321225 - DNA, 20 bp, Artificial Sequence
  Description of Artificial Sequence: Synthetic oligonucleotide
  Target: LAMA2; (+) strand; PAM type: YTN; PAM sequence: CTA
atgggatagaatctgataca

SEQ ID NO: 321226 - DNA, 20 bp, Artificial Sequence
  Description of Artificial Sequence: Synthetic oligonucleotide
  Target: LAMA2; (+) strand; PAM type: YTN; PAM sequence: CTG
atacagttagggtctgaaac

SEQ ID NO: 321227 - DNA, 20 bp, Artificial Sequence
  Description of Artificial Sequence: Synthetic oligonucleotide
  Target: LAMA2; (+) strand; PAM type: YTN; PAM sequence: TTA
gggtctgaaacactacgagt

SEQ ID NO: 321228 - DNA, 20 bp, Artificial Sequence
  Description of Artificial Sequence: Synthetic oligonucleotide
  Target: LAMA2; (+) strand; PAM type: YTN; PAM sequence: CTG
aaacactacgagttcttatg

SEQ ID NO: 321229 - DNA, 20 bp, Artificial Sequence
  Description of Artificial Sequence: Synthetic oligonucleotide
  Target: LAMA2; (+) strand; PAM type: YTN; PAM sequence: CTA
cgagttcttatggtactttg

SEQ ID NO: 321230 - DNA, 20 bp, Artificial Sequence
  Description of Artificial Sequence: Synthetic oligonucleotide
  Target: LAMA2; (+) strand; PAM type: YTN; PAM sequence: TTC
ttatggtactttgattcaat

SEQ ID NO: 321231 - DNA, 20 bp, Artificial Sequence
  Description of Artificial Sequence: Synthetic oligonucleotide
  Target: LAMA2; (+) strand; PAM type: YTN; PAM sequence: CTT
atggtactttgattcaatat

SEQ ID NO: 321232 - DNA, 20 bp, Artificial Sequence
  Description of Artificial Sequence: Synthetic oligonucleotide
  Target: LAMA2; (+) strand; PAM type: YTN; PAM sequence: TTA
tggtactttgattcaatatt

SEQ ID NO: 321233 - DNA, 20 bp, Artificial Sequence
  Description of Artificial Sequence: Synthetic oligonucleotide
  Target: LAMA2; (+) strand; PAM type: YTN; PAM sequence: CTT
tgattcaatatttagttgag

SEQ ID NO: 321234 - DNA, 20 bp, Artificial Sequence
  Description of Artificial Sequence: Synthetic oligonucleotide
  Target: LAMA2; (+) strand; PAM type: YTN; PAM sequence: TTT
gattcaatatttagttgagt

SEQ ID NO: 321235 - DNA, 20 bp, Artificial Sequence
  Description of Artificial Sequence: Synthetic oligonucleotide
  Target: LAMA2; (+) strand; PAM type: YTN; PAM sequence: TTG
attcaatatttagttgagta

SEQ ID NO: 321236 - DNA, 20 bp, Artificial Sequence
  Description of Artificial Sequence: Synthetic oligonucleotide
  Target: LAMA2; (+) strand; PAM type: YTN; PAM sequence: TTC
aatatttagttgagtaattc

SEQ ID NO: 321237 - DNA, 20 bp, Artificial Sequence
  Description of Artificial Sequence: Synthetic oligonucleotide
  Target: LAMA2; (+) strand; PAM type: YTN; PAM sequence: TTT
agttgagtaattcttgttca

SEQ ID NO: 321238 - DNA, 20 bp, Artificial Sequence
  Description of Artificial Sequence: Synthetic oligonucleotide
  Target: LAMA2; (+) strand; PAM type: YTN; PAM sequence: TTA
gttgagtaattcttgttcac

SEQ ID NO: 321239 - DNA, 20 bp, Artificial Sequence
  Description of Artificial Sequence: Synthetic oligonucleotide
  Target: LAMA2; (+) strand; PAM type: YTN; PAM sequence: TTG
agtaattcttgttcacttat

SEQ ID NO: 321240 - DNA, 20 bp, Artificial Sequence
  Description of Artificial Sequence: Synthetic oligonucleotide
  Target: LAMA2; (+) strand; PAM type: YTN; PAM sequence: TTC
ttgttcacttatttgtatta

SEQ ID NO: 321241 - DNA, 20 bp, Artificial Sequence
  Description of Artificial Sequence: Synthetic oligonucleotide
  Target: LAMA2; (+) strand; PAM type: YTN; PAM sequence: CTT
gttcacttatttgtattatc

SEQ ID NO: 321242 - DNA, 20 bp, Artificial Sequence
  Description of Artificial Sequence: Synthetic oligonucleotide
  Target: LAMA2; (+) strand; PAM type: YTN; PAM sequence: TTG
ttcacttatttgtattatcc

SEQ ID NO: 321243 - DNA, 20 bp, Artificial Sequence
  Description of Artificial Sequence: Synthetic oligonucleotide
  Target: LAMA2; (+) strand; PAM type: YTN; PAM sequence: TTC
acttatttgtattatcctca

SEQ ID NO: 321244 - DNA, 20 bp, Artificial Sequence
  Description of Artificial Sequence: Synthetic oligonucleotide
  Target: LAMA2; (+) strand; PAM type: YTN; PAM sequence: CTT
atttgtattatcctcattag

SEQ ID NO: 321245 - DNA, 20 bp, Artificial Sequence
  Description of Artificial Sequence: Synthetic oligonucleotide
  Target: LAMA2; (+) strand; PAM type: YTN; PAM sequence: TTA
tttgtattatcctcattaga

SEQ ID NO: 321246 - DNA, 20 bp, Artificial Sequence
  Description of Artificial Sequence: Synthetic oligonucleotide
  Target: LAMA2; (+) strand; PAM type: YTN; PAM sequence: TTT
gtattatcctcattagattg

SEQ ID NO: 321247 - DNA, 20 bp, Artificial Sequence
  Description of Artificial Sequence: Synthetic oligonucleotide
  Target: LAMA2; (+) strand; PAM type: YTN; PAM sequence: TTG
tattatcctcattagattga

SEQ ID NO: 321248 - DNA, 20 bp, Artificial Sequence
  Description of Artificial Sequence: Synthetic oligonucleotide
  Target: LAMA2; (+) strand; PAM type: YTN; PAM sequence: TTA
tcctcattagattgaacctg

SEQ ID NO: 321249 - DNA, 20 bp, Artificial Sequence
  Description of Artificial Sequence: Synthetic oligonucleotide
  Target: LAMA2; (+) strand; PAM type: YTN; PAM sequence: CTC
attagattgaacctgtatag

SEQ ID NO: 321250 - DNA, 20 bp, Artificial Sequence
  Description of Artificial Sequence: Synthetic oligonucleotide
  Target: LAMA2; (+) strand; PAM type: YTN; PAM sequence: TTA
gattgaacctgtataggttt

SEQ ID NO: 321251 - DNA, 20 bp, Artificial Sequence
  Description of Artificial Sequence: Synthetic oligonucleotide
  Target: LAMA2; (+) strand; PAM type: YTN; PAM sequence: TTG
aacctgtataggtttatctt

SEQ ID NO: 321252 - DNA, 20 bp, Artificial Sequence
  Description of Artificial Sequence: Synthetic oligonucleotide
  Target: LAMA2; (+) strand; PAM type: YTN; PAM sequence: CTG
tataggtttatctttgaaac

SEQ ID NO: 321253 - DNA, 20 bp, Artificial Sequence
  Description of Artificial Sequence: Synthetic oligonucleotide
  Target: LAMA2; (+) strand; PAM type: YTN; PAM sequence: TTT
atctttgaaactaaagatta

SEQ ID NO: 321254 - DNA, 20 bp, Artificial Sequence
  Description of Artificial Sequence: Synthetic oligonucleotide
  Target: LAMA2; (+) strand; PAM type: YTN; PAM sequence: TTA
tctttgaaactaaagattaa

SEQ ID NO: 321255 - DNA, 20 bp, Artificial Sequence
  Description of Artificial Sequence: Synthetic oligonucleotide
  Target: LAMA2; (+) strand; PAM type: YTN; PAM sequence: CTT
tgaaactaaagattaaattg

SEQ ID NO: 321256 - DNA, 20 bp, Artificial Sequence
  Description of Artificial Sequence: Synthetic oligonucleotide
  Target: LAMA2; (+) strand; PAM type: YTN; PAM sequence: TTT
gaaactaaagattaaattga

SEQ ID NO: 321257 - DNA, 20 bp, Artificial Sequence
  Description of Artificial Sequence: Synthetic oligonucleotide
  Target: LAMA2; (+) strand; PAM type: YTN; PAM sequence: TTG
aaactaaagattaaattgaa

SEQ ID NO: 321258 - DNA, 20 bp, Artificial Sequence
  Description of Artificial Sequence: Synthetic oligonucleotide
  Target: LAMA2; (+) strand; PAM type: YTN; PAM sequence: CTA
aagattaaattgaatttaag

SEQ ID NO: 321259 - DNA, 20 bp, Artificial Sequence
  Description of Artificial Sequence: Synthetic oligonucleotide
  Target: LAMA2; (+) strand; PAM type: YTN; PAM sequence: TTA
aattgaatttaagttctact

SEQ ID NO: 321260 - DNA, 20 bp, Artificial Sequence
  Description of Artificial Sequence: Synthetic oligonucleotide
  Target: LAMA2; (+) strand; PAM type: YTN; PAM sequence: TTG
aatttaagttctactgtatt

SEQ ID NO: 321261 - DNA, 20 bp, Artificial Sequence
  Description of Artificial Sequence: Synthetic oligonucleotide
  Target: LAMA2; (+) strand; PAM type: YTN; PAM sequence: TTT
aagttctactgtatttttta

SEQ ID NO: 321262 - DNA, 20 bp, Artificial Sequence
  Description of Artificial Sequence: Synthetic oligonucleotide
  Target: LAMA2; (+) strand; PAM type: YTN; PAM sequence: TTA
agttctactgtattttttat

SEQ ID NO: 321263 - DNA, 20 bp, Artificial Sequence
  Description of Artificial Sequence: Synthetic oligonucleotide
  Target: LAMA2; (+) strand; PAM type: YTN; PAM sequence: TTC
tactgtattttttatcaaga

SEQ ID NO: 321264 - DNA, 20 bp, Artificial Sequence
  Description of Artificial Sequence: Synthetic oligonucleotide
  Target: LAMA2; (+) strand; PAM type: YTN; PAM sequence: CTA
ctgtattttttatcaagatt

SEQ ID NO: 321265 - DNA, 20 bp, Artificial Sequence
  Description of Artificial Sequence: Synthetic oligonucleotide
  Target: LAMA2; (+) strand; PAM type: YTN; PAM sequence: CTG
tattttttatcaagattatt

SEQ ID NO: 321266 - DNA, 20 bp, Artificial Sequence
  Description of Artificial Sequence: Synthetic oligonucleotide
  Target: LAMA2; (+) strand; PAM type: YTN; PAM sequence: TTT
tttatcaagattatttttaa

SEQ ID NO: 321267 - DNA, 20 bp, Artificial Sequence
  Description of Artificial Sequence: Synthetic oligonucleotide
  Target: LAMA2; (+) strand; PAM type: YTN; PAM sequence: TTT
ttatcaagattatttttaaa

SEQ ID NO: 321268 - DNA, 20 bp, Artificial Sequence
  Description of Artificial Sequence: Synthetic oligonucleotide
  Target: LAMA2; (+) strand; PAM type: YTN; PAM sequence: TTT
tatcaagattatttttaaaa

SEQ ID NO: 321269 - DNA, 20 bp, Artificial Sequence
  Description of Artificial Sequence: Synthetic oligonucleotide
  Target: LAMA2; (+) strand; PAM type: YTN; PAM sequence: TTT
atcaagattatttttaaaat

SEQ ID NO: 321270 - DNA, 20 bp, Artificial Sequence
  Description of Artificial Sequence: Synthetic oligonucleotide
  Target: LAMA2; (+) strand; PAM type: YTN; PAM sequence: TTA
tcaagattatttttaaaata

SEQ ID NO: 321271 - DNA, 20 bp, Artificial Sequence
  Description of Artificial Sequence: Synthetic oligonucleotide
  Target: LAMA2; (+) strand; PAM type: YTN; PAM sequence: TTA
tttttaaaatagcttgtatc

SEQ ID NO: 321272 - DNA, 20 bp, Artificial Sequence
  Description of Artificial Sequence: Synthetic oligonucleotide
  Target: LAMA2; (+) strand; PAM type: YTN; PAM sequence: TTT
ttaaaatagcttgtatcaca

SEQ ID NO: 321273 - DNA, 20 bp, Artificial Sequence
  Description of Artificial Sequence: Synthetic oligonucleotide
  Target: LAMA2; (+) strand; PAM type: YTN; PAM sequence: TTT
taaaatagcttgtatcacag

SEQ ID NO: 321274 - DNA, 20 bp, Artificial Sequence
  Description of Artificial Sequence: Synthetic oligonucleotide
  Target: LAMA2; (+) strand; PAM type: YTN; PAM sequence: TTT
aaaatagcttgtatcacagg

SEQ ID NO: 321275 - DNA, 20 bp, Artificial Sequence
  Description of Artificial Sequence: Synthetic oligonucleotide
  Target: LAMA2; (+) strand; PAM type: YTN; PAM sequence: TTA
aaatagcttgtatcacagga

SEQ ID NO: 321276 - DNA, 20 bp, Artificial Sequence
  Description of Artificial Sequence: Synthetic oligonucleotide
  Target: LAMA2; (+) strand; PAM type: YTN; PAM sequence: CTT
gtatcacaggaatcctgagt

SEQ ID NO: 321277 - DNA, 20 bp, Artificial Sequence
  Description of Artificial Sequence: Synthetic oligonucleotide
  Target: LAMA2; (+) strand; PAM type: YTN; PAM sequence: TTG
tatcacaggaatcctgagta

SEQ ID NO: 321278 - DNA, 20 bp, Artificial Sequence
  Description of Artificial Sequence: Synthetic oligonucleotide
  Target: LAMA2; (+) strand; PAM type: YTN; PAM sequence: CTG
agtacatacctaatactatc

SEQ ID NO: 321279 - DNA, 20 bp, Artificial Sequence
  Description of Artificial Sequence: Synthetic oligonucleotide
  Target: LAMA2; (+) strand; PAM type: YTN; PAM sequence: CTA
atactatcctctactgtata

SEQ ID NO: 321280 - DNA, 20 bp, Artificial Sequence
  Description of Artificial Sequence: Synthetic oligonucleotide
  Target: LAMA2; (+) strand; PAM type: YTN; PAM sequence: CTA
tcctctactgtatagaaatt

SEQ ID NO: 321281 - DNA, 20 bp, Artificial Sequence
  Description of Artificial Sequence: Synthetic oligonucleotide
  Target: LAMA2; (+) strand; PAM type: YTN; PAM sequence: CTC
tactgtatagaaatttagta

SEQ ID NO: 321282 - DNA, 20 bp, Artificial Sequence
  Description of Artificial Sequence: Synthetic oligonucleotide
  Target: LAMA2; (+) strand; PAM type: YTN; PAM sequence: CTA
ctgtatagaaatttagtaat

SEQ ID NO: 321283 - DNA, 20 bp, Artificial Sequence
  Description of Artificial Sequence: Synthetic oligonucleotide
  Target: LAMA2; (+) strand; PAM type: YTN; PAM sequence: CTG
tatagaaatttagtaataat

SEQ ID NO: 321284 - DNA, 20 bp, Artificial Sequence
  Description of Artificial Sequence: Synthetic oligonucleotide
  Target: LAMA2; (+) strand; PAM type: YTN; PAM sequence: TTT
agtaataatgaaaaagtata

SEQ ID NO: 321285 - DNA, 20 bp, Artificial Sequence
  Description of Artificial Sequence: Synthetic oligonucleotide
  Target: LAMA2; (+) strand; PAM type: YTN; PAM sequence: TTA
gtaataatgaaaaagtatac

SEQ ID NO: 321286 - DNA, 20 bp, Artificial Sequence
  Description of Artificial Sequence: Synthetic oligonucleotide
  Target: LAMA2; (+) strand; PAM type: YTN; PAM sequence: CTC
ctggatttggttttctgggc

SEQ ID NO: 321287 - DNA, 20 bp, Artificial Sequence
  Description of Artificial Sequence: Synthetic oligonucleotide
  Target: LAMA2; (+) strand; PAM type: YTN; PAM sequence: CTG
gatttggttttctgggcaga

SEQ ID NO: 321288 - DNA, 20 bp, Artificial Sequence
  Description of Artificial Sequence: Synthetic oligonucleotide
  Target: LAMA2; (+) strand; PAM type: YTN; PAM sequence: TTT
ggttttctgggcagagaaaa

SEQ ID NO: 321289 - DNA, 20 bp, Artificial Sequence
  Description of Artificial Sequence: Synthetic oligonucleotide
  Target: LAMA2; (+) strand; PAM type: YTN; PAM sequence: TTG
gttttctgggcagagaaaat

SEQ ID NO: 321290 - DNA, 20 bp, Artificial Sequence
  Description of Artificial Sequence: Synthetic oligonucleotide
  Target: LAMA2; (+) strand; PAM type: YTN; PAM sequence: TTT
tctgggcagagaaaattaaa

SEQ ID NO: 321291 - DNA, 20 bp, Artificial Sequence
  Description of Artificial Sequence: Synthetic oligonucleotide
  Target: LAMA2; (+) strand; PAM type: YTN; PAM sequence: TTT
ctgggcagagaaaattaaaa

SEQ ID NO: 321292 - DNA, 20 bp, Artificial Sequence
  Description of Artificial Sequence: Synthetic oligonucleotide
  Target: LAMA2; (+) strand; PAM type: YTN; PAM sequence: TTC
tgggcagagaaaattaaaaa

SEQ ID NO: 321293 - DNA, 20 bp, Artificial Sequence
  Description of Artificial Sequence: Synthetic oligonucleotide
  Target: LAMA2; (+) strand; PAM type: YTN; PAM sequence: CTG
ggcagagaaaattaaaaact

SEQ ID NO: 321294 - DNA, 20 bp, Artificial Sequence
  Description of Artificial Sequence: Synthetic oligonucleotide
  Target: LAMA2; (+) strand; PAM type: YTN; PAM sequence: TTA
aaaactttaagcaggtatca

SEQ ID NO: 321295 - DNA, 20 bp, Artificial Sequence
  Description of Artificial Sequence: Synthetic oligonucleotide
  Target: LAMA2; (+) strand; PAM type: YTN; PAM sequence: CTT
taagcaggtatcatgtagaa

SEQ ID NO: 321296 - DNA, 20 bp, Artificial Sequence
  Description of Artificial Sequence: Synthetic oligonucleotide
  Target: LAMA2; (+) strand; PAM type: YTN; PAM sequence: TTT
aagcaggtatcatgtagaat

SEQ ID NO: 321297 - DNA, 20 bp, Artificial Sequence
  Description of Artificial Sequence: Synthetic oligonucleotide
  Target: LAMA2; (+) strand; PAM type: YTN; PAM sequence: TTA
agcaggtatcatgtagaata

SEQ ID NO: 321298 - DNA, 20 bp, Artificial Sequence
  Description of Artificial Sequence: Synthetic oligonucleotide
  Target: LAMA2; (+) strand; PAM type: YTN; PAM sequence: CTC
aacagatattattttgtggg

SEQ ID NO: 321299 - DNA, 20 bp, Artificial Sequence
  Description of Artificial Sequence: Synthetic oligonucleotide
  Target: LAMA2; (+) strand; PAM type: YTN; PAM sequence: TTA
ttttgtgggtgacaattttt

SEQ ID NO: 321300 - DNA, 20 bp, Artificial Sequence
  Description of Artificial Sequence: Synthetic oligonucleotide
  Target: LAMA2; (+) strand; PAM type: YTN; PAM sequence: TTT
tgtgggtgacaatttttata

SEQ ID NO: 321301 - DNA, 20 bp, Artificial Sequence
  Description of Artificial Sequence: Synthetic oligonucleotide
  Target: LAMA2; (+) strand; PAM type: YTN; PAM sequence: TTT
gtgggtgacaatttttatag

SEQ ID NO: 321302 - DNA, 20 bp, Artificial Sequence
  Description of Artificial Sequence: Synthetic oligonucleotide
  Target: LAMA2; (+) strand; PAM type: YTN; PAM sequence: TTG
tgggtgacaatttttataga

SEQ ID NO: 321303 - DNA, 20 bp, Artificial Sequence
  Description of Artificial Sequence: Synthetic oligonucleotide
  Target: LAMA2; (+) strand; PAM type: YTN; PAM sequence: TTT
ttatagacattatatgtcag

SEQ ID NO: 321304 - DNA, 20 bp, Artificial Sequence
  Description of Artificial Sequence: Synthetic oligonucleotide
  Target: LAMA2; (+) strand; PAM type: YTN; PAM sequence: TTT
tatagacattatatgtcaga

SEQ ID NO: 321305 - DNA, 20 bp, Artificial Sequence
  Description of Artificial Sequence: Synthetic oligonucleotide
  Target: LAMA2; (+) strand; PAM type: YTN; PAM sequence: TTT
atagacattatatgtcagat

SEQ ID NO: 321306 - DNA, 20 bp, Artificial Sequence
  Description of Artificial Sequence: Synthetic oligonucleotide
  Target: LAMA2; (+) strand; PAM type: YTN; PAM sequence: TTA
tagacattatatgtcagatg

SEQ ID NO: 321307 - DNA, 20 bp, Artificial Sequence
  Description of Artificial Sequence: Synthetic oligonucleotide
  Target: LAMA2; (+) strand; PAM type: YTN; PAM sequence: TTA
tatgtcagatgaaatagcta

SEQ ID NO: 321308 - DNA, 20 bp, Artificial Sequence
  Description of Artificial Sequence: Synthetic oligonucleotide
  Target: LAMA2; (+) strand; PAM type: YTN; PAM sequence: CTA
attaacattaattctattat

SEQ ID NO: 321309 - DNA, 20 bp, Artificial Sequence
  Description of Artificial Sequence: Synthetic oligonucleotide
  Target: LAMA2; (+) strand; PAM type: YTN; PAM sequence: TTA
acattaattctattatattt

SEQ ID NO: 321310 - DNA, 20 bp, Artificial Sequence
  Description of Artificial Sequence: Synthetic oligonucleotide
  Target: LAMA2; (+) strand; PAM type: YTN; PAM sequence: TTA
attctattatatttaacata

SEQ ID NO: 321311 - DNA, 20 bp, Artificial Sequence
  Description of Artificial Sequence: Synthetic oligonucleotide
  Target: LAMA2; (+) strand; PAM type: YTN; PAM sequence: TTC
tattatatttaacataacac

SEQ ID NO: 321312 - DNA, 20 bp, Artificial Sequence
  Description of Artificial Sequence: Synthetic oligonucleotide
  Target: LAMA2; (+) strand; PAM type: YTN; PAM sequence: CTA
ttatatttaacataacaccc

SEQ ID NO: 321313 - DNA, 20 bp, Artificial Sequence
  Description of Artificial Sequence: Synthetic oligonucleotide
  Target: LAMA2; (+) strand; PAM type: YTN; PAM sequence: TTA
tatttaacataacaccctat

SEQ ID NO: 321314 - DNA, 20 bp, Artificial Sequence
  Description of Artificial Sequence: Synthetic oligonucleotide
  Target: LAMA2; (+) strand; PAM type: YTN; PAM sequence: TTT
aacataacaccctatatacc

SEQ ID NO: 321315 - DNA, 20 bp, Artificial Sequence
  Description of Artificial Sequence: Synthetic oligonucleotide
  Target: LAMA2; (+) strand; PAM type: YTN; PAM sequence: TTA
acataacaccctatatacct

SEQ ID NO: 321316 - DNA, 20 bp, Artificial Sequence
  Description of Artificial Sequence: Synthetic oligonucleotide
  Target: LAMA2; (+) strand; PAM type: YTN; PAM sequence: CTA
tatacctcggtgaataaaga

SEQ ID NO: 321317 - DNA, 20 bp, Artificial Sequence
  Description of Artificial Sequence: Synthetic oligonucleotide
  Target: LAMA2; (+) strand; PAM type: YTN; PAM sequence: CTC
ggtgaataaagaagatttct

SEQ ID NO: 321318 - DNA, 20 bp, Artificial Sequence
  Description of Artificial Sequence: Synthetic oligonucleotide
  Target: LAMA2; (+) strand; PAM type: YTN; PAM sequence: TTT
ctaaaggatgagtttaagag

SEQ ID NO: 321319 - DNA, 20 bp, Artificial Sequence
  Description of Artificial Sequence: Synthetic oligonucleotide
  Target: LAMA2; (+) strand; PAM type: YTN; PAM sequence: TTC
taaaggatgagtttaagagg

SEQ ID NO: 321320 - DNA, 20 bp, Artificial Sequence
  Description of Artificial Sequence: Synthetic oligonucleotide
  Target: LAMA2; (+) strand; PAM type: YTN; PAM sequence: CTA
aaggatgagtttaagaggta

SEQ ID NO: 321321 - DNA, 20 bp, Artificial Sequence
  Description of Artificial Sequence: Synthetic oligonucleotide
  Target: LAMA2; (+) strand; PAM type: YTN; PAM sequence: TTT
aagaggtattgataaggacc

SEQ ID NO: 321322 - DNA, 20 bp, Artificial Sequence
  Description of Artificial Sequence: Synthetic oligonucleotide
  Target: LAMA2; (+) strand; PAM type: YTN; PAM sequence: TTA
agaggtattgataaggacca

SEQ ID NO: 321323 - DNA, 20 bp, Artificial Sequence
  Description of Artificial Sequence: Synthetic oligonucleotide
  Target: LAMA2; (+) strand; PAM type: YTN; PAM sequence: TTG
ataaggaccagatatttagt

SEQ ID NO: 321324 - DNA, 20 bp, Artificial Sequence
  Description of Artificial Sequence: Synthetic oligonucleotide
  Target: LAMA2; (+) strand; PAM type: YTN; PAM sequence: TTT
agtaaagaaatcccatgatt

SEQ ID NO: 321325 - DNA, 20 bp, Artificial Sequence
  Description of Artificial Sequence: Synthetic oligonucleotide
  Target: LAMA2; (+) strand; PAM type: YTN; PAM sequence: TTA
gtaaagaaatcccatgattc

SEQ ID NO: 321326 - DNA, 20 bp, Artificial Sequence
  Description of Artificial Sequence: Synthetic oligonucleotide
  Target: LAMA2; (+) strand; PAM type: YTN; PAM sequence: TTC
cctagatttgtgactcttca

SEQ ID NO: 321327 - DNA, 20 bp, Artificial Sequence
  Description of Artificial Sequence: Synthetic oligonucleotide
  Target: LAMA2; (+) strand; PAM type: YTN; PAM sequence: CTA
gatttgtgactcttcagtga

SEQ ID NO: 321328 - DNA, 20 bp, Artificial Sequence
  Description of Artificial Sequence: Synthetic oligonucleotide
  Target: LAMA2; (+) strand; PAM type: YTN; PAM sequence: TTT
gtgactcttcagtgacacat

SEQ ID NO: 321329 - DNA, 20 bp, Artificial Sequence
  Description of Artificial Sequence: Synthetic oligonucleotide
  Target: LAMA2; (+) strand; PAM type: YTN; PAM sequence: TTG
tgactcttcagtgacacatt

SEQ ID NO: 321330 - DNA, 20 bp, Artificial Sequence
  Description of Artificial Sequence: Synthetic oligonucleotide
  Target: LAMA2; (+) strand; PAM type: YTN; PAM sequence: CTC
ttcagtgacacatttaatta

SEQ ID NO: 321331 - DNA, 20 bp, Artificial Sequence
  Description of Artificial Sequence: Synthetic oligonucleotide
  Target: LAMA2; (+) strand; PAM type: YTN; PAM sequence: CTT
cagtgacacatttaattagt

SEQ ID NO: 321332 - DNA, 20 bp, Artificial Sequence
  Description of Artificial Sequence: Synthetic oligonucleotide
  Target: LAMA2; (+) strand; PAM type: YTN; PAM sequence: TTC
agtgacacatttaattagtt

SEQ ID NO: 321333 - DNA, 20 bp, Artificial Sequence
  Description of Artificial Sequence: Synthetic oligonucleotide
  Target: LAMA2; (+) strand; PAM type: YTN; PAM sequence: TTT
aattagttaatgctttgtga

SEQ ID NO: 321334 - DNA, 20 bp, Artificial Sequence
  Description of Artificial Sequence: Synthetic oligonucleotide
  Target: LAMA2; (+) strand; PAM type: YTN; PAM sequence: TTA
attagttaatgctttgtgaa

SEQ ID NO: 321335 - DNA, 20 bp, Artificial Sequence
  Description of Artificial Sequence: Synthetic oligonucleotide
  Target: LAMA2; (+) strand; PAM type: YTN; PAM sequence: TTA
gttaatgctttgtgaatccc

SEQ ID NO: 321336 - DNA, 20 bp, Artificial Sequence
  Description of Artificial Sequence: Synthetic oligonucleotide
  Target: LAMA2; (+) strand; PAM type: YTN; PAM sequence: TTA
atgctttgtgaatcccagaa

SEQ ID NO: 321337 - DNA, 20 bp, Artificial Sequence
  Description of Artificial Sequence: Synthetic oligonucleotide
  Target: LAMA2; (+) strand; PAM type: YTN; PAM sequence: CTT
tgtgaatcccagaattcttt

SEQ ID NO: 321338 - DNA, 20 bp, Artificial Sequence
  Description of Artificial Sequence: Synthetic oligonucleotide
  Target: LAMA2; (+) strand; PAM type: YTN; PAM sequence: TTT
gtgaatcccagaattctttg

SEQ ID NO: 321339 - DNA, 20 bp, Artificial Sequence
  Description of Artificial Sequence: Synthetic oligonucleotide
  Target: LAMA2; (+) strand; PAM type: YTN; PAM sequence: TTG
tgaatcccagaattctttgt

SEQ ID NO: 321340 - DNA, 20 bp, Artificial Sequence
  Description of Artificial Sequence: Synthetic oligonucleotide
  Target: LAMA2; (+) strand; PAM type: YTN; PAM sequence: TTC
tttgtatatactgtgatata

SEQ ID NO: 321341 - DNA, 20 bp, Artificial Sequence
  Description of Artificial Sequence: Synthetic oligonucleotide
  Target: LAMA2; (+) strand; PAM type: YTN; PAM sequence: CTT
tgtatatactgtgatatacc

SEQ ID NO: 321342 - DNA, 20 bp, Artificial Sequence
  Description of Artificial Sequence: Synthetic oligonucleotide
  Target: LAMA2; (+) strand; PAM type: YTN; PAM sequence: TTT
gtatatactgtgatatacca

SEQ ID NO: 321343 - DNA, 20 bp, Artificial Sequence
  Description of Artificial Sequence: Synthetic oligonucleotide
  Target: LAMA2; (+) strand; PAM type: YTN; PAM sequence: TTG
tatatactgtgatataccat

SEQ ID NO: 321344 - DNA, 20 bp, Artificial Sequence
  Description of Artificial Sequence: Synthetic oligonucleotide
  Target: LAMA2; (+) strand; PAM type: YTN; PAM sequence: CTG
tgatataccatatttttgtc

SEQ ID NO: 321345 - DNA, 20 bp, Artificial Sequence
  Description of Artificial Sequence: Synthetic oligonucleotide
  Target: LAMA2; (+) strand; PAM type: YTN; PAM sequence: TTT
ttgtcatagtaacaacaatt

SEQ ID NO: 321346 - DNA, 20 bp, Artificial Sequence
  Description of Artificial Sequence: Synthetic oligonucleotide
  Target: LAMA2; (+) strand; PAM type: YTN; PAM sequence: TTT
tgtcatagtaacaacaattt

SEQ ID NO: 321347 - DNA, 20 bp, Artificial Sequence
  Description of Artificial Sequence: Synthetic oligonucleotide
  Target: LAMA2; (+) strand; PAM type: YTN; PAM sequence: TTT
gtcatagtaacaacaattta

SEQ ID NO: 321348 - DNA, 20 bp, Artificial Sequence
  Description of Artificial Sequence: Synthetic oligonucleotide
  Target: LAMA2; (+) strand; PAM type: YTN; PAM sequence: TTG
tcatagtaacaacaatttaa

SEQ ID NO: 321349 - DNA, 20 bp, Artificial Sequence
  Description of Artificial Sequence: Synthetic oligonucleotide
  Target: LAMA2; (+) strand; PAM type: YTN; PAM sequence: TTT
aattctgattctcctataga

SEQ ID NO: 321350 - DNA, 20 bp, Artificial Sequence
  Description of Artificial Sequence: Synthetic oligonucleotide
  Target: LAMA2; (+) strand; PAM type: YTN; PAM sequence: TTA
attctgattctcctatagat

SEQ ID NO: 321351 - DNA, 20 bp, Artificial Sequence
  Description of Artificial Sequence: Synthetic oligonucleotide
  Target: LAMA2; (+) strand; PAM type: YTN; PAM sequence: TTC
tgattctcctatagatgaat

SEQ ID NO: 321352 - DNA, 20 bp, Artificial Sequence
  Description of Artificial Sequence: Synthetic oligonucleotide
  Target: LAMA2; (+) strand; PAM type: YTN; PAM sequence: CTG
attctcctatagatgaatct

SEQ ID NO: 321353 - DNA, 20 bp, Artificial Sequence
  Description of Artificial Sequence: Synthetic oligonucleotide
  Target: LAMA2; (+) strand; PAM type: YTN; PAM sequence: TTC
tcctatagatgaatctctgc

SEQ ID NO: 321354 - DNA, 20 bp, Artificial Sequence
  Description of Artificial Sequence: Synthetic oligonucleotide
  Target: LAMA2; (+) strand; PAM type: YTN; PAM sequence: CTC
ctatagatgaatctctgcgt

SEQ ID NO: 321355 - DNA, 20 bp, Artificial Sequence
  Description of Artificial Sequence: Synthetic oligonucleotide
  Target: LAMA2; (+) strand; PAM type: YTN; PAM sequence: CTA
tagatgaatctctgcgttct

SEQ ID NO: 321356 - DNA, 20 bp, Artificial Sequence
  Description of Artificial Sequence: Synthetic oligonucleotide
  Target: LAMA2; (+) strand; PAM type: YTN; PAM sequence: CTC
tgcgttctatctttcatgct

SEQ ID NO: 321357 - DNA, 20 bp, Artificial Sequence
  Description of Artificial Sequence: Synthetic oligonucleotide
  Target: LAMA2; (+) strand; PAM type: YTN; PAM sequence: CTG
cgttctatctttcatgctac

SEQ ID NO: 321358 - DNA, 20 bp, Artificial Sequence
  Description of Artificial Sequence: Synthetic oligonucleotide
  Target: LAMA2; (+) strand; PAM type: YTN; PAM sequence: TTC
tatctttcatgctactttga

SEQ ID NO: 321359 - DNA, 20 bp, Artificial Sequence
  Description of Artificial Sequence: Synthetic oligonucleotide
  Target: LAMA2; (+) strand; PAM type: YTN; PAM sequence: CTA
tctttcatgctactttgaat

SEQ ID NO: 321360 - DNA, 20 bp, Artificial Sequence
  Description of Artificial Sequence: Synthetic oligonucleotide
  Target: LAMA2; (+) strand; PAM type: YTN; PAM sequence: CTT
tcatgctactttgaattcgg

SEQ ID NO: 321361 - DNA, 20 bp, Artificial Sequence
  Description of Artificial Sequence: Synthetic oligonucleotide
  Target: LAMA2; (+) strand; PAM type: YTN; PAM sequence: TTT
catgctactttgaattcggt

SEQ ID NO: 321362 - DNA, 20 bp, Artificial Sequence
  Description of Artificial Sequence: Synthetic oligonucleotide
  Target: LAMA2; (+) strand; PAM type: YTN; PAM sequence: TTC
atgctactttgaattcggtt

SEQ ID NO: 321363 - DNA, 20 bp, Artificial Sequence
  Description of Artificial Sequence: Synthetic oligonucleotide
  Target: LAMA2; (+) strand; PAM type: YTN; PAM sequence: CTA
ctttgaattcggtttttaaa

SEQ ID NO: 321364 - DNA, 20 bp, Artificial Sequence
  Description of Artificial Sequence: Synthetic oligonucleotide
  Target: LAMA2; (+) strand; PAM type: YTN; PAM sequence: CTT
tgaattcggtttttaaaact

SEQ ID NO: 321365 - DNA, 20 bp, Artificial Sequence
  Description of Artificial Sequence: Synthetic oligonucleotide
  Target: LAMA2; (+) strand; PAM type: YTN; PAM sequence: TTT
gaattcggtttttaaaactg

SEQ ID NO: 321366 - DNA, 20 bp, Artificial Sequence
  Description of Artificial Sequence: Synthetic oligonucleotide
  Target: LAMA2; (+) strand; PAM type: YTN; PAM sequence: TTG
aattcggtttttaaaactga

SEQ ID NO: 321367 - DNA, 20 bp, Artificial Sequence
  Description of Artificial Sequence: Synthetic oligonucleotide
  Target: LAMA2; (+) strand; PAM type: YTN; PAM sequence: TTC
ggtttttaaaactgaattta

SEQ ID NO: 321368 - DNA, 20 bp, Artificial Sequence
  Description of Artificial Sequence: Synthetic oligonucleotide
  Target: LAMA2; (+) strand; PAM type: YTN; PAM sequence: TTT
ttaaaactgaatttaaatat

SEQ ID NO: 321369 - DNA, 20 bp, Artificial Sequence
  Description of Artificial Sequence: Synthetic oligonucleotide
  Target: LAMA2; (+) strand; PAM type: YTN; PAM sequence: TTT
taaaactgaatttaaatatc

SEQ ID NO: 321370 - DNA, 20 bp, Artificial Sequence
  Description of Artificial Sequence: Synthetic oligonucleotide
  Target: LAMA2; (+) strand; PAM type: YTN; PAM sequence: TTT
aaaactgaatttaaatatca

SEQ ID NO: 321371 - DNA, 20 bp, Artificial Sequence
  Description of Artificial Sequence: Synthetic oligonucleotide
  Target: LAMA2; (+) strand; PAM type: YTN; PAM sequence: TTA
aaactgaatttaaatatcac

SEQ ID NO: 321372 - DNA, 20 bp, Artificial Sequence
  Description of Artificial Sequence: Synthetic oligonucleotide
  Target: LAMA2; (+) strand; PAM type: YTN; PAM sequence: CTG
aatttaaatatcacagtact

SEQ ID NO: 321373 - DNA, 20 bp, Artificial Sequence
  Description of Artificial Sequence: Synthetic oligonucleotide
  Target: LAMA2; (+) strand; PAM type: YTN; PAM sequence: TTT
aaatatcacagtacttatca

SEQ ID NO: 321374 - DNA, 20 bp, Artificial Sequence
  Description of Artificial Sequence: Synthetic oligonucleotide
  Target: LAMA2; (+) strand; PAM type: YTN; PAM sequence: TTA
aatatcacagtacttatcat

SEQ ID NO: 321375 - DNA, 20 bp, Artificial Sequence
  Description of Artificial Sequence: Synthetic oligonucleotide
  Target: LAMA2; (+) strand; PAM type: YTN; PAM sequence: CTT
atcatatgatattcaacaac

SEQ ID NO: 321376 - DNA, 20 bp, Artificial Sequence
  Description of Artificial Sequence: Synthetic oligonucleotide
  Target: LAMA2; (+) strand; PAM type: YTN; PAM sequence: TTA
tcatatgatattcaacaacc

SEQ ID NO: 321377 - DNA, 20 bp, Artificial Sequence
  Description of Artificial Sequence: Synthetic oligonucleotide
  Target: LAMA2; (+) strand; PAM type: YTN; PAM sequence: TTC
aacaacctgactgttttcca

SEQ ID NO: 321378 - DNA, 20 bp, Artificial Sequence
  Description of Artificial Sequence: Synthetic oligonucleotide
  Target: LAMA2; (+) strand; PAM type: YTN; PAM sequence: CTG
actgttttccattttatttt

SEQ ID NO: 321379 - DNA, 20 bp, Artificial Sequence
  Description of Artificial Sequence: Synthetic oligonucleotide
  Target: LAMA2; (+) strand; PAM type: YTN; PAM sequence: CTG
ttttccattttattttattt

SEQ ID NO: 321380 - DNA, 20 bp, Artificial Sequence
  Description of Artificial Sequence: Synthetic oligonucleotide
  Target: LAMA2; (+) strand; PAM type: YTN; PAM sequence: TTT
tccattttattttattttat

SEQ ID NO: 321381 - DNA, 20 bp, Artificial Sequence
  Description of Artificial Sequence: Synthetic oligonucleotide
  Target: LAMA2; (+) strand; PAM type: YTN; PAM sequence: TTT
ccattttattttattttatc

SEQ ID NO: 321382 - DNA, 20 bp, Artificial Sequence
  Description of Artificial Sequence: Synthetic oligonucleotide
  Target: LAMA2; (+) strand; PAM type: YTN; PAM sequence: TTC
cattttattttattttatca

SEQ ID NO: 321383 - DNA, 20 bp, Artificial Sequence
  Description of Artificial Sequence: Synthetic oligonucleotide
  Target: LAMA2; (+) strand; PAM type: YTN; PAM sequence: TTT
tattttattttatcaacttt

SEQ ID NO: 321384 - DNA, 20 bp, Artificial Sequence
  Description of Artificial Sequence: Synthetic oligonucleotide
  Target: LAMA2; (+) strand; PAM type: YTN; PAM sequence: TTT
attttattttatcaactttt

SEQ ID NO: 321385 - DNA, 20 bp, Artificial Sequence
  Description of Artificial Sequence: Synthetic oligonucleotide
  Target: LAMA2; (+) strand; PAM type: YTN; PAM sequence: TTA
ttttattttatcaactttta

SEQ ID NO: 321386 - DNA, 20 bp, Artificial Sequence
  Description of Artificial Sequence: Synthetic oligonucleotide
  Target: LAMA2; (+) strand; PAM type: YTN; PAM sequence: TTT
tattttatcaacttttattt

SEQ ID NO: 321387 - DNA, 20 bp, Artificial Sequence
  Description of Artificial Sequence: Synthetic oligonucleotide
  Target: LAMA2; (+) strand; PAM type: YTN; PAM sequence: TTT
attttatcaacttttatttt

SEQ ID NO: 321388 - DNA, 20 bp, Artificial Sequence
  Description of Artificial Sequence: Synthetic oligonucleotide
  Target: LAMA2; (+) strand; PAM type: YTN; PAM sequence: TTA
ttttatcaacttttatttta

SEQ ID NO: 321389 - DNA, 20 bp, Artificial Sequence
  Description of Artificial Sequence: Synthetic oligonucleotide
  Target: LAMA2; (+) strand; PAM type: YTN; PAM sequence: TTT
tatcaacttttattttagaa

SEQ ID NO: 321390 - DNA, 20 bp, Artificial Sequence
  Description of Artificial Sequence: Synthetic oligonucleotide
  Target: LAMA2; (+) strand; PAM type: YTN; PAM sequence: TTT
atcaacttttattttagaat

SEQ ID NO: 321391 - DNA, 20 bp, Artificial Sequence
  Description of Artificial Sequence: Synthetic oligonucleotide
  Target: LAMA2; (+) strand; PAM type: YTN; PAM sequence: TTA
tcaacttttattttagaatc

SEQ ID NO: 321392 - DNA, 20 bp, Artificial Sequence
  Description of Artificial Sequence: Synthetic oligonucleotide
  Target: LAMA2; (+) strand; PAM type: YTN; PAM sequence: CTT
ttattttagaatcagggagt

SEQ ID NO: 321393 - DNA, 20 bp, Artificial Sequence
  Description of Artificial Sequence: Synthetic oligonucleotide
  Target: LAMA2; (+) strand; PAM type: YTN; PAM sequence: TTT
tattttagaatcagggagta

SEQ ID NO: 321394 - DNA, 20 bp, Artificial Sequence
  Description of Artificial Sequence: Synthetic oligonucleotide
  Target: LAMA2; (+) strand; PAM type: YTN; PAM sequence: TTT
attttagaatcagggagtac

SEQ ID NO: 321395 - DNA, 20 bp, Artificial Sequence
  Description of Artificial Sequence: Synthetic oligonucleotide
  Target: LAMA2; (+) strand; PAM type: YTN; PAM sequence: TTA
ttttagaatcagggagtaca

SEQ ID NO: 321396 - DNA, 20 bp, Artificial Sequence
  Description of Artificial Sequence: Synthetic oligonucleotide
  Target: LAMA2; (+) strand; PAM type: YTN; PAM sequence: TTT
tagaatcagggagtacatgt

SEQ ID NO: 321397 - DNA, 20 bp, Artificial Sequence
  Description of Artificial Sequence: Synthetic oligonucleotide
  Target: LAMA2; (+) strand; PAM type: YTN; PAM sequence: TTT
agaatcagggagtacatgtg

SEQ ID NO: 321398 - DNA, 20 bp, Artificial Sequence
  Description of Artificial Sequence: Synthetic oligonucleotide
  Target: LAMA2; (+) strand; PAM type: YTN; PAM sequence: TTA
gaatcagggagtacatgtgc

SEQ ID NO: 321399 - DNA, 20 bp, Artificial Sequence
  Description of Artificial Sequence: Synthetic oligonucleotide
  Target: LAMA2; (+) strand; PAM type: YTN; PAM sequence: TTG
tgtgatgctgaggtttggag

SEQ ID NO: 321400 - DNA, 20 bp, Artificial Sequence
  Description of Artificial Sequence: Synthetic oligonucleotide
  Target: LAMA2; (+) strand; PAM type: YTN; PAM sequence: CTG
aggtttggagtacaaatgaa

SEQ ID NO: 321401 - DNA, 20 bp, Artificial Sequence
  Description of Artificial Sequence: Synthetic oligonucleotide
  Target: LAMA2; (+) strand; PAM type: YTN; PAM sequence: TTT
ggagtacaaatgaatctgtc

SEQ ID NO: 321402 - DNA, 20 bp, Artificial Sequence
  Description of Artificial Sequence: Synthetic oligonucleotide
  Target: LAMA2; (+) strand; PAM type: YTN; PAM sequence: TTG
gagtacaaatgaatctgtca

SEQ ID NO: 321403 - DNA, 20 bp, Artificial Sequence
  Description of Artificial Sequence: Synthetic oligonucleotide
  Target: LAMA2; (+) strand; PAM type: YTN; PAM sequence: CTG
tcattcaggtagtgggtata

SEQ ID NO: 321404 - DNA, 20 bp, Artificial Sequence
  Description of Artificial Sequence: Synthetic oligonucleotide
  Target: LAMA2; (+) strand; PAM type: YTN; PAM sequence: TTC
aggtagtgggtatagtacct

SEQ ID NO: 321405 - DNA, 20 bp, Artificial Sequence
  Description of Artificial Sequence: Synthetic oligonucleotide
  Target: LAMA2; (+) strand; PAM type: YTN; PAM sequence: CTG
ataggcagttttgttttgag

SEQ ID NO: 321406 - DNA, 20 bp, Artificial Sequence
  Description of Artificial Sequence: Synthetic oligonucleotide
  Target: LAMA2; (+) strand; PAM type: YTN; PAM sequence: TTT
tgttttgagacaaagtctca

SEQ ID NO: 321407 - DNA, 20 bp, Artificial Sequence
  Description of Artificial Sequence: Synthetic oligonucleotide
  Target: LAMA2; (+) strand; PAM type: YTN; PAM sequence: TTT
gttttgagacaaagtctcac

SEQ ID NO: 321408 - DNA, 20 bp, Artificial Sequence
  Description of Artificial Sequence: Synthetic oligonucleotide
  Target: LAMA2; (+) strand; PAM type: YTN; PAM sequence: TTG
ttttgagacaaagtctcact

SEQ ID NO: 321409 - DNA, 20 bp, Artificial Sequence
  Description of Artificial Sequence: Synthetic oligonucleotide
  Target: LAMA2; (+) strand; PAM type: YTN; PAM sequence: TTT
tgagacaaagtctcactctg

SEQ ID NO: 321410 - DNA, 20 bp, Artificial Sequence
  Description of Artificial Sequence: Synthetic oligonucleotide
  Target: LAMA2; (+) strand; PAM type: YTN; PAM sequence: TTT
gagacaaagtctcactctgt

SEQ ID NO: 321411 - DNA, 20 bp, Artificial Sequence
  Description of Artificial Sequence: Synthetic oligonucleotide
  Target: LAMA2; (+) strand; PAM type: YTN; PAM sequence: TTG
agacaaagtctcactctgta

SEQ ID NO: 321412 - DNA, 20 bp, Artificial Sequence
  Description of Artificial Sequence: Synthetic oligonucleotide
  Target: LAMA2; (+) strand; PAM type: YTN; PAM sequence: CTC
actctgtaacccaggctgga

SEQ ID NO: 321413 - DNA, 20 bp, Artificial Sequence
  Description of Artificial Sequence: Synthetic oligonucleotide
  Target: LAMA2; (+) strand; PAM type: YTN; PAM sequence: CTC
tgtaacccaggctggagtgc

SEQ ID NO: 321414 - DNA, 20 bp, Artificial Sequence
  Description of Artificial Sequence: Synthetic oligonucleotide
  Target: LAMA2; (+) strand; PAM type: YTN; PAM sequence: CTG
taacccaggctggagtgcag

SEQ ID NO: 321415 - DNA, 20 bp, Artificial Sequence
  Description of Artificial Sequence: Synthetic oligonucleotide
  Target: LAMA2; (+) strand; PAM type: YTN; PAM sequence: CTG
gagtgcagtggcacgatctc

SEQ ID NO: 321416 - DNA, 20 bp, Artificial Sequence
  Description of Artificial Sequence: Synthetic oligonucleotide
  Target: LAMA2; (+) strand; PAM type: YTN; PAM sequence: CTC
ggctcactgcaacctccacc

SEQ ID NO: 321417 - DNA, 20 bp, Artificial Sequence
  Description of Artificial Sequence: Synthetic oligonucleotide
  Target: LAMA2; (+) strand; PAM type: YTN; PAM sequence: CTC
actgcaacctccacctcctg

SEQ ID NO: 321418 - DNA, 20 bp, Artificial Sequence
  Description of Artificial Sequence: Synthetic oligonucleotide
  Target: LAMA2; (+) strand; PAM type: YTN; PAM sequence: CTG
caacctccacctcctgggtt

SEQ ID NO: 321419 - DNA, 20 bp, Artificial Sequence
  Description of Artificial Sequence: Synthetic oligonucleotide
  Target: LAMA2; (+) strand; PAM type: YTN; PAM sequence: CTC
cacctcctgggttcaagcac

SEQ ID NO: 321420 - DNA, 20 bp, Artificial Sequence
  Description of Artificial Sequence: Synthetic oligonucleotide
  Target: LAMA2; (+) strand; PAM type: YTN; PAM sequence: CTC
ctgggttcaagcacttctcc

SEQ ID NO: 321421 - DNA, 20 bp, Artificial Sequence
  Description of Artificial Sequence: Synthetic oligonucleotide
  Target: LAMA2; (+) strand; PAM type: YTN; PAM sequence: CTG
ggttcaagcacttctcctgc

SEQ ID NO: 321422 - DNA, 20 bp, Artificial Sequence
  Description of Artificial Sequence: Synthetic oligonucleotide
  Target: LAMA2; (+) strand; PAM type: YTN; PAM sequence: TTC
aagcacttctcctgcttcag

SEQ ID NO: 321423 - DNA, 20 bp, Artificial Sequence
  Description of Artificial Sequence: Synthetic oligonucleotide
  Target: LAMA2; (+) strand; PAM type: YTN; PAM sequence: CTT
ctcctgcttcagcctccata

SEQ ID NO: 321424 - DNA, 20 bp, Artificial Sequence
  Description of Artificial Sequence: Synthetic oligonucleotide
  Target: LAMA2; (+) strand; PAM type: YTN; PAM sequence: TTC
tcctgcttcagcctccatag

SEQ ID NO: 321425 - DNA, 20 bp, Artificial Sequence
  Description of Artificial Sequence: Synthetic oligonucleotide
  Target: LAMA2; (+) strand; PAM type: YTN; PAM sequence: CTC
ctgcttcagcctccatagta

SEQ ID NO: 321426 - DNA, 20 bp, Artificial Sequence
  Description of Artificial Sequence: Synthetic oligonucleotide
  Target: LAMA2; (+) strand; PAM type: YTN; PAM sequence: CTG
cttcagcctccatagtagct

SEQ ID NO: 321427 - DNA, 20 bp, Artificial Sequence
  Description of Artificial Sequence: Synthetic oligonucleotide
  Target: LAMA2; (+) strand; PAM type: YTN; PAM sequence: CTT
cagcctccatagtagctggg

SEQ ID NO: 321428 - DNA, 20 bp, Artificial Sequence
  Description of Artificial Sequence: Synthetic oligonucleotide
  Target: LAMA2; (+) strand; PAM type: YTN; PAM sequence: TTC
agcctccatagtagctggga

SEQ ID NO: 321429 - DNA, 20 bp, Artificial Sequence
  Description of Artificial Sequence: Synthetic oligonucleotide
  Target: LAMA2; (+) strand; PAM type: YTN; PAM sequence: CTC
catagtagctgggattacag

SEQ ID NO: 321430 - DNA, 20 bp, Artificial Sequence
  Description of Artificial Sequence: Synthetic oligonucleotide
  Target: LAMA2; (+) strand; PAM type: YTN; PAM sequence: CTG
ggattacaggtgcctgccac

SEQ ID NO: 321431 - DNA, 20 bp, Artificial Sequence
  Description of Artificial Sequence: Synthetic oligonucleotide
  Target: LAMA2; (+) strand; PAM type: YTN; PAM sequence: TTA
caggtgcctgccaccacgcc

SEQ ID NO: 321432 - DNA, 20 bp, Artificial Sequence
  Description of Artificial Sequence: Synthetic oligonucleotide
  Target: LAMA2; (+) strand; PAM type: YTN; PAM sequence: CTG
ccaccacgcctggataactt

SEQ ID NO: 321433 - DNA, 20 bp, Artificial Sequence
  Description of Artificial Sequence: Synthetic oligonucleotide
  Target: LAMA2; (+) strand; PAM type: YTN; PAM sequence: CTG
gataacttttttgtattttt

SEQ ID NO: 321434 - DNA, 20 bp, Artificial Sequence
  Description of Artificial Sequence: Synthetic oligonucleotide
  Target: LAMA2; (+) strand; PAM type: YTN; PAM sequence: CTT
ttttgtatttttagtagaga

SEQ ID NO: 321435 - DNA, 20 bp, Artificial Sequence
  Description of Artificial Sequence: Synthetic oligonucleotide
  Target: LAMA2; (+) strand; PAM type: YTN; PAM sequence: TTT
tttgtatttttagtagagac

SEQ ID NO: 321436 - DNA, 20 bp, Artificial Sequence
  Description of Artificial Sequence: Synthetic oligonucleotide
  Target: LAMA2; (+) strand; PAM type: YTN; PAM sequence: TTT
ttgtatttttagtagagaca

SEQ ID NO: 321437 - DNA, 20 bp, Artificial Sequence
  Description of Artificial Sequence: Synthetic oligonucleotide
  Target: LAMA2; (+) strand; PAM type: YTN; PAM sequence: TTT
tgtatttttagtagagacag

SEQ ID NO: 321438 - DNA, 20 bp, Artificial Sequence
  Description of Artificial Sequence: Synthetic oligonucleotide
  Target: LAMA2; (+) strand; PAM type: YTN; PAM sequence: TTT
gtatttttagtagagacagg

SEQ ID NO: 321439 - DNA, 20 bp, Artificial Sequence
  Description of Artificial Sequence: Synthetic oligonucleotide
  Target: LAMA2; (+) strand; PAM type: YTN; PAM sequence: TTG
tatttttagtagagacaggg

SEQ ID NO: 321440 - DNA, 20 bp, Artificial Sequence
  Description of Artificial Sequence: Synthetic oligonucleotide
  Target: LAMA2; (+) strand; PAM type: YTN; PAM sequence: TTT
ttagtagagacagggtttcg

SEQ ID NO: 321441 - DNA, 20 bp, Artificial Sequence
  Description of Artificial Sequence: Synthetic oligonucleotide
  Target: LAMA2; (+) strand; PAM type: YTN; PAM sequence: TTT
tagtagagacagggtttcgc

SEQ ID NO: 321442 - DNA, 20 bp, Artificial Sequence
  Description of Artificial Sequence: Synthetic oligonucleotide
  Target: LAMA2; (+) strand; PAM type: YTN; PAM sequence: TTT
agtagagacagggtttcgcc

SEQ ID NO: 321443 - DNA, 20 bp, Artificial Sequence
  Description of Artificial Sequence: Synthetic oligonucleotide
  Target: LAMA2; (+) strand; PAM type: YTN; PAM sequence: TTA
gtagagacagggtttcgccg

SEQ ID NO: 321444 - DNA, 20 bp, Artificial Sequence
  Description of Artificial Sequence: Synthetic oligonucleotide
  Target: LAMA2; (+) strand; PAM type: YTN; PAM sequence: TTT
cgccgtgttggccgggctgg

SEQ ID NO: 321445 - DNA, 20 bp, Artificial Sequence
  Description of Artificial Sequence: Synthetic oligonucleotide
  Target: LAMA2; (+) strand; PAM type: YTN; PAM sequence: TTC
gccgtgttggccgggctggt

SEQ ID NO: 321446 - DNA, 20 bp, Artificial Sequence
  Description of Artificial Sequence: Synthetic oligonucleotide
  Target: LAMA2; (+) strand; PAM type: YTN; PAM sequence: TTG
gccgggctggtcttgaactc

SEQ ID NO: 321447 - DNA, 20 bp, Artificial Sequence
  Description of Artificial Sequence: Synthetic oligonucleotide
  Target: LAMA2; (+) strand; PAM type: YTN; PAM sequence: CTG
gtcttgaactcctgacctca

SEQ ID NO: 321448 - DNA, 20 bp, Artificial Sequence
  Description of Artificial Sequence: Synthetic oligonucleotide
  Target: LAMA2; (+) strand; PAM type: YTN; PAM sequence: CTT
gaactcctgacctcaggtga

SEQ ID NO: 321449 - DNA, 20 bp, Artificial Sequence
  Description of Artificial Sequence: Synthetic oligonucleotide
  Target: LAMA2; (+) strand; PAM type: YTN; PAM sequence: TTG
aactcctgacctcaggtgat

SEQ ID NO: 321450 - DNA, 20 bp, Artificial Sequence
  Description of Artificial Sequence: Synthetic oligonucleotide
  Target: LAMA2; (+) strand; PAM type: YTN; PAM sequence: CTC
ctgacctcaggtgatccgcc

SEQ ID NO: 321451 - DNA, 20 bp, Artificial Sequence
  Description of Artificial Sequence: Synthetic oligonucleotide
  Target: LAMA2; (+) strand; PAM type: YTN; PAM sequence: CTG
acctcaggtgatccgcctgc

SEQ ID NO: 321452 - DNA, 20 bp, Artificial Sequence
  Description of Artificial Sequence: Synthetic oligonucleotide
  Target: LAMA2; (+) strand; PAM type: YTN; PAM sequence: CTC
aggtgatccgcctgccttgg

SEQ ID NO: 321453 - DNA, 20 bp, Artificial Sequence
  Description of Artificial Sequence: Synthetic oligonucleotide
  Target: LAMA2; (+) strand; PAM type: YTN; PAM sequence: CTG
ccttggccttccaaagtgct

SEQ ID NO: 321454 - DNA, 20 bp, Artificial Sequence
  Description of Artificial Sequence: Synthetic oligonucleotide
  Target: LAMA2; (+) strand; PAM type: YTN; PAM sequence: CTT
ggccttccaaagtgctggga

SEQ ID NO: 321455 - DNA, 20 bp, Artificial Sequence
  Description of Artificial Sequence: Synthetic oligonucleotide
  Target: LAMA2; (+) strand; PAM type: YTN; PAM sequence: TTG
gccttccaaagtgctgggat

SEQ ID NO: 321456 - DNA, 20 bp, Artificial Sequence
  Description of Artificial Sequence: Synthetic oligonucleotide
  Target: LAMA2; (+) strand; PAM type: YTN; PAM sequence: CTT
ccaaagtgctgggattacag

SEQ ID NO: 321457 - DNA, 20 bp, Artificial Sequence
  Description of Artificial Sequence: Synthetic oligonucleotide
  Target: LAMA2; (+) strand; PAM type: YTN; PAM sequence: TTC
caaagtgctgggattacagg

SEQ ID NO: 321458 - DNA, 20 bp, Artificial Sequence
  Description of Artificial Sequence: Synthetic oligonucleotide
  Target: LAMA2; (+) strand; PAM type: YTN; PAM sequence: CTG
ggattacaggcatgaaccac

SEQ ID NO: 321459 - DNA, 20 bp, Artificial Sequence
  Description of Artificial Sequence: Synthetic oligonucleotide
  Target: LAMA2; (+) strand; PAM type: YTN; PAM sequence: TTA
caggcatgaaccaccgcacc

SEQ ID NO: 321460 - DNA, 20 bp, Artificial Sequence
  Description of Artificial Sequence: Synthetic oligonucleotide
  Target: LAMA2; (+) strand; PAM type: YTN; PAM sequence: CTG
gccccagtaggtggtttaaa

SEQ ID NO: 321461 - DNA, 20 bp, Artificial Sequence
  Description of Artificial Sequence: Synthetic oligonucleotide
  Target: LAMA2; (+) strand; PAM type: YTN; PAM sequence: TTT
aaaccctttctccttctctc

SEQ ID NO: 321462 - DNA, 20 bp, Artificial Sequence
  Description of Artificial Sequence: Synthetic oligonucleotide
  Target: LAMA2; (+) strand; PAM type: YTN; PAM sequence: TTA
aaccctttctccttctctct

SEQ ID NO: 321463 - DNA, 20 bp, Artificial Sequence
  Description of Artificial Sequence: Synthetic oligonucleotide
  Target: LAMA2; (+) strand; PAM type: YTN; PAM sequence: CTT
tctccttctctctctcccct

SEQ ID NO: 321464 - DNA, 20 bp, Artificial Sequence
  Description of Artificial Sequence: Synthetic oligonucleotide
  Target: LAMA2; (+) strand; PAM type: YTN; PAM sequence: TTT
ctccttctctctctcccctc

SEQ ID NO: 321465 - DNA, 20 bp, Artificial Sequence
  Description of Artificial Sequence: Synthetic oligonucleotide
  Target: LAMA2; (+) strand; PAM type: YTN; PAM sequence: TTC
tccttctctctctcccctct

SEQ ID NO: 321466 - DNA, 20 bp, Artificial Sequence
  Description of Artificial Sequence: Synthetic oligonucleotide
  Target: LAMA2; (+) strand; PAM type: YTN; PAM sequence: CTC
cttctctctctcccctctgt

SEQ ID NO: 321467 - DNA, 20 bp, Artificial Sequence
  Description of Artificial Sequence: Synthetic oligonucleotide
  Target: LAMA2; (+) strand; PAM type: YTN; PAM sequence: CTT
ctctctctcccctctgttgt

SEQ ID NO: 321468 - DNA, 20 bp, Artificial Sequence
  Description of Artificial Sequence: Synthetic oligonucleotide
  Target: LAMA2; (+) strand; PAM type: YTN; PAM sequence: TTC
tctctctcccctctgttgta

SEQ ID NO: 321469 - DNA, 20 bp, Artificial Sequence
  Description of Artificial Sequence: Synthetic oligonucleotide
  Target: LAMA2; (+) strand; PAM type: YTN; PAM sequence: CTC
tctctcccctctgttgtatt

SEQ ID NO: 321470 - DNA, 20 bp, Artificial Sequence
  Description of Artificial Sequence: Synthetic oligonucleotide
  Target: LAMA2; (+) strand; PAM type: YTN; PAM sequence: CTC
tctcccctctgttgtattgc

SEQ ID NO: 321471 - DNA, 20 bp, Artificial Sequence
  Description of Artificial Sequence: Synthetic oligonucleotide
  Target: LAMA2; (+) strand; PAM type: YTN; PAM sequence: CTC
tcccctctgttgtattgccc

SEQ ID NO: 321472 - DNA, 20 bp, Artificial Sequence
  Description of Artificial Sequence: Synthetic oligonucleotide
  Target: LAMA2; (+) strand; PAM type: YTN; PAM sequence: CTC
ccctctgttgtattgcccag

SEQ ID NO: 321473 - DNA, 20 bp, Artificial Sequence
  Description of Artificial Sequence: Synthetic oligonucleotide
  Target: LAMA2; (+) strand; PAM type: YTN; PAM sequence: CTC
tgttgtattgcccagtgtct

SEQ ID NO: 321474 - DNA, 20 bp, Artificial Sequence
  Description of Artificial Sequence: Synthetic oligonucleotide
  Target: LAMA2; (+) strand; PAM type: YTN; PAM sequence: CTG
ttgtattgcccagtgtctgt

SEQ ID NO: 321475 - DNA, 20 bp, Artificial Sequence
  Description of Artificial Sequence: Synthetic oligonucleotide
  Target: LAMA2; (+) strand; PAM type: YTN; PAM sequence: TTG
tattgcccagtgtctgttgt

SEQ ID NO: 321476 - DNA, 20 bp, Artificial Sequence
  Description of Artificial Sequence: Synthetic oligonucleotide
  Target: LAMA2; (+) strand; PAM type: YTN; PAM sequence: TTG
cccagtgtctgttgttccca

SEQ ID NO: 321477 - DNA, 20 bp, Artificial Sequence
  Description of Artificial Sequence: Synthetic oligonucleotide
  Target: LAMA2; (+) strand; PAM type: YTN; PAM sequence: CTG
ttgttcccacttttatgacc

SEQ ID NO: 321478 - DNA, 20 bp, Artificial Sequence
  Description of Artificial Sequence: Synthetic oligonucleotide
  Target: LAMA2; (+) strand; PAM type: YTN; PAM sequence: TTG
ttcccacttttatgacctta

SEQ ID NO: 321479 - DNA, 20 bp, Artificial Sequence
  Description of Artificial Sequence: Synthetic oligonucleotide
  Target: LAMA2; (+) strand; PAM type: YTN; PAM sequence: TTC
ccacttttatgaccttatat

SEQ ID NO: 321480 - DNA, 20 bp, Artificial Sequence
  Description of Artificial Sequence: Synthetic oligonucleotide
  Target: LAMA2; (+) strand; PAM type: YTN; PAM sequence: CTT
ttatgaccttatatttttct

SEQ ID NO: 321481 - DNA, 20 bp, Artificial Sequence
  Description of Artificial Sequence: Synthetic oligonucleotide
  Target: LAMA2; (+) strand; PAM type: YTN; PAM sequence: TTT
tatgaccttatatttttctt

SEQ ID NO: 321482 - DNA, 20 bp, Artificial Sequence
  Description of Artificial Sequence: Synthetic oligonucleotide
  Target: LAMA2; (+) strand; PAM type: YTN; PAM sequence: TTT
atgaccttatatttttcttc

SEQ ID NO: 321483 - DNA, 20 bp, Artificial Sequence
  Description of Artificial Sequence: Synthetic oligonucleotide
  Target: LAMA2; (+) strand; PAM type: YTN; PAM sequence: TTA
tgaccttatatttttcttct

SEQ ID NO: 321484 - DNA, 20 bp, Artificial Sequence
  Description of Artificial Sequence: Synthetic oligonucleotide
  Target: LAMA2; (+) strand; PAM type: YTN; PAM sequence: CTT
atatttttcttctttaaatc

SEQ ID NO: 321485 - DNA, 20 bp, Artificial Sequence
  Description of Artificial Sequence: Synthetic oligonucleotide
  Target: LAMA2; (+) strand; PAM type: YTN; PAM sequence: TTA
tatttttcttctttaaatca

SEQ ID NO: 321486 - DNA, 20 bp, Artificial Sequence
  Description of Artificial Sequence: Synthetic oligonucleotide
  Target: LAMA2; (+) strand; PAM type: YTN; PAM sequence: TTT
ttcttctttaaatcagtaat

SEQ ID NO: 321487 - DNA, 20 bp, Artificial Sequence
  Description of Artificial Sequence: Synthetic oligonucleotide
  Target: LAMA2; (+) strand; PAM type: YTN; PAM sequence: TTT
tcttctttaaatcagtaatt

SEQ ID NO: 321488 - DNA, 20 bp, Artificial Sequence
  Description of Artificial Sequence: Synthetic oligonucleotide
  Target: LAMA2; (+) strand; PAM type: YTN; PAM sequence: TTT
cttctttaaatcagtaattt

SEQ ID NO: 321489 - DNA, 20 bp, Artificial Sequence
  Description of Artificial Sequence: Synthetic oligonucleotide
  Target: LAMA2; (+) strand; PAM type: YTN; PAM sequence: TTC
ttctttaaatcagtaatttt

SEQ ID NO: 321490 - DNA, 20 bp, Artificial Sequence
  Description of Artificial Sequence: Synthetic oligonucleotide
  Target: LAMA2; (+) strand; PAM type: YTN; PAM sequence: CTT
ctttaaatcagtaatttttt

SEQ ID NO: 321491 - DNA, 20 bp, Artificial Sequence
  Description of Artificial Sequence: Synthetic oligonucleotide
  Target: LAMA2; (+) strand; PAM type: YTN; PAM sequence: TTC
tttaaatcagtaatttttta

SEQ ID NO: 321492 - DNA, 20 bp, Artificial Sequence
  Description of Artificial Sequence: Synthetic oligonucleotide
  Target: LAMA2; (+) strand; PAM type: YTN; PAM sequence: CTT
taaatcagtaattttttatg

SEQ ID NO: 321493 - DNA, 20 bp, Artificial Sequence
  Description of Artificial Sequence: Synthetic oligonucleotide
  Target: LAMA2; (+) strand; PAM type: YTN; PAM sequence: TTT
aaatcagtaattttttatgt

SEQ ID NO: 321494 - DNA, 20 bp, Artificial Sequence
  Description of Artificial Sequence: Synthetic oligonucleotide
  Target: LAMA2; (+) strand; PAM type: YTN; PAM sequence: TTA
aatcagtaattttttatgtt

SEQ ID NO: 321495 - DNA, 20 bp, Artificial Sequence
  Description of Artificial Sequence: Synthetic oligonucleotide
  Target: LAMA2; (+) strand; PAM type: YTN; PAM sequence: TTT
tttatgttgttaaaatcaat

SEQ ID NO: 321496 - DNA, 20 bp, Artificial Sequence
  Description of Artificial Sequence: Synthetic oligonucleotide
  Target: LAMA2; (+) strand; PAM type: YTN; PAM sequence: TTT
ttatgttgttaaaatcaatt

SEQ ID NO: 321497 - DNA, 20 bp, Artificial Sequence
  Description of Artificial Sequence: Synthetic oligonucleotide
  Target: LAMA2; (+) strand; PAM type: YTN; PAM sequence: TTT
tatgttgttaaaatcaattt

SEQ ID NO: 321498 - DNA, 20 bp, Artificial Sequence
  Description of Artificial Sequence: Synthetic oligonucleotide
  Target: LAMA2; (+) strand; PAM type: YTN; PAM sequence: TTT
atgttgttaaaatcaatttt

SEQ ID NO: 321499 - DNA, 20 bp, Artificial Sequence
  Description of Artificial Sequence: Synthetic oligonucleotide
  Target: LAMA2; (+) strand; PAM type: YTN; PAM sequence: TTA
tgttgttaaaatcaattttt

SEQ ID NO: 321500 - DNA, 20 bp, Artificial Sequence
  Description of Artificial Sequence: Synthetic oligonucleotide
  Target: LAMA2; (+) strand; PAM type: YTN; PAM sequence: TTG
ttaaaatcaatttttgcaga

SEQ ID NO: 321501 - DNA, 20 bp, Artificial Sequence
  Description of Artificial Sequence: Synthetic oligonucleotide
  Target: LAMA2; (+) strand; PAM type: YTN; PAM sequence: TTA
aaatcaatttttgcagagat

SEQ ID NO: 321502 - DNA, 20 bp, Artificial Sequence
  Description of Artificial Sequence: Synthetic oligonucleotide
  Target: LAMA2; (+) strand; PAM type: YTN; PAM sequence: TTT
ttgcagagattagaatgtat

SEQ ID NO: 321503 - DNA, 20 bp, Artificial Sequence
  Description of Artificial Sequence: Synthetic oligonucleotide
  Target: LAMA2; (+) strand; PAM type: YTN; PAM sequence: TTT
tgcagagattagaatgtatt

SEQ ID NO: 321504 - DNA, 20 bp, Artificial Sequence
  Description of Artificial Sequence: Synthetic oligonucleotide
  Target: LAMA2; (+) strand; PAM type: YTN; PAM sequence: TTT
gcagagattagaatgtattt

SEQ ID NO: 321505 - DNA, 20 bp, Artificial Sequence
  Description of Artificial Sequence: Synthetic oligonucleotide
  Target: LAMA2; (+) strand; PAM type: YTN; PAM sequence: TTG
cagagattagaatgtatttg

SEQ ID NO: 321506 - DNA, 20 bp, Artificial Sequence
  Description of Artificial Sequence: Synthetic oligonucleotide
  Target: LAMA2; (+) strand; PAM type: YTN; PAM sequence: TTA
gaatgtatttggcctaattt

SEQ ID NO: 321507 - DNA, 20 bp, Artificial Sequence
  Description of Artificial Sequence: Synthetic oligonucleotide
  Target: LAMA2; (+) strand; PAM type: YTN; PAM sequence: TTT
ggcctaatttctcattctta

SEQ ID NO: 321508 - DNA, 20 bp, Artificial Sequence
  Description of Artificial Sequence: Synthetic oligonucleotide
  Target: LAMA2; (+) strand; PAM type: YTN; PAM sequence: TTG
gcctaatttctcattcttaa

SEQ ID NO: 321509 - DNA, 20 bp, Artificial Sequence
  Description of Artificial Sequence: Synthetic oligonucleotide
  Target: LAMA2; (+) strand; PAM type: YTN; PAM sequence: CTA
atttctcattcttaagtaaa

SEQ ID NO: 321510 - DNA, 20 bp, Artificial Sequence
  Description of Artificial Sequence: Synthetic oligonucleotide
  Target: LAMA2; (+) strand; PAM type: YTN; PAM sequence: TTT
ctcattcttaagtaaaacaa

SEQ ID NO: 321511 - DNA, 20 bp, Artificial Sequence
  Description of Artificial Sequence: Synthetic oligonucleotide
  Target: LAMA2; (+) strand; PAM type: YTN; PAM sequence: TTC
tcattcttaagtaaaacaaa

SEQ ID NO: 321512 - DNA, 20 bp, Artificial Sequence
  Description of Artificial Sequence: Synthetic oligonucleotide
  Target: LAMA2; (+) strand; PAM type: YTN; PAM sequence: CTC
attcttaagtaaaacaaaat

SEQ ID NO: 321513 - DNA, 20 bp, Artificial Sequence
  Description of Artificial Sequence: Synthetic oligonucleotide
  Target: LAMA2; (+) strand; PAM type: YTN; PAM sequence: TTC
ttaagtaaaacaaaataagg

SEQ ID NO: 321514 - DNA, 20 bp, Artificial Sequence
  Description of Artificial Sequence: Synthetic oligonucleotide
  Target: LAMA2; (+) strand; PAM type: YTN; PAM sequence: CTT
aagtaaaacaaaataaggac

SEQ ID NO: 321515 - DNA, 20 bp, Artificial Sequence
  Description of Artificial Sequence: Synthetic oligonucleotide
  Target: LAMA2; (+) strand; PAM type: YTN; PAM sequence: TTA
agtaaaacaaaataaggaca

SEQ ID NO: 321516 - DNA, 20 bp, Artificial Sequence
  Description of Artificial Sequence: Synthetic oligonucleotide
  Target: LAMA2; (+) strand; PAM type: YTN; PAM sequence: TTT
atagacttgacatatactga

SEQ ID NO: 321517 - DNA, 20 bp, Artificial Sequence
  Description of Artificial Sequence: Synthetic oligonucleotide
  Target: LAMA2; (+) strand; PAM type: YTN; PAM sequence: TTA
tagacttgacatatactgat

SEQ ID NO: 321518 - DNA, 20 bp, Artificial Sequence
  Description of Artificial Sequence: Synthetic oligonucleotide
  Target: LAMA2; (+) strand; PAM type: YTN; PAM sequence: CTT
gacatatactgattttttgg

SEQ ID NO: 321519 - DNA, 20 bp, Artificial Sequence
  Description of Artificial Sequence: Synthetic oligonucleotide
  Target: LAMA2; (+) strand; PAM type: YTN; PAM sequence: TTG
acatatactgattttttggt

SEQ ID NO: 321520 - DNA, 20 bp, Artificial Sequence
  Description of Artificial Sequence: Synthetic oligonucleotide
  Target: LAMA2; (+) strand; PAM type: YTN; PAM sequence: CTG
attttttggtatagatcact

SEQ ID NO: 321521 - DNA, 20 bp, Artificial Sequence
  Description of Artificial Sequence: Synthetic oligonucleotide
  Target: LAMA2; (+) strand; PAM type: YTN; PAM sequence: TTT
tttggtatagatcactaaat

SEQ ID NO: 321522 - DNA, 20 bp, Artificial Sequence
  Description of Artificial Sequence: Synthetic oligonucleotide
  Target: LAMA2; (+) strand; PAM type: YTN; PAM sequence: TTT
ttggtatagatcactaaata

SEQ ID NO: 321523 - DNA, 20 bp, Artificial Sequence
  Description of Artificial Sequence: Synthetic oligonucleotide
  Target: LAMA2; (+) strand; PAM type: YTN; PAM sequence: TTT
tggtatagatcactaaataa

SEQ ID NO: 321524 - DNA, 20 bp, Artificial Sequence
  Description of Artificial Sequence: Synthetic oligonucleotide
  Target: LAMA2; (+) strand; PAM type: YTN; PAM sequence: TTT
ggtatagatcactaaataag

SEQ ID NO: 321525 - DNA, 20 bp, Artificial Sequence
  Description of Artificial Sequence: Synthetic oligonucleotide
  Target: LAMA2; (+) strand; PAM type: YTN; PAM sequence: TTG
gtatagatcactaaataagt

SEQ ID NO: 321526 - DNA, 20 bp, Artificial Sequence
  Description of Artificial Sequence: Synthetic oligonucleotide
  Target: LAMA2; (+) strand; PAM type: YTN; PAM sequence: CTA
aataagtactgaactttttt

SEQ ID NO: 321527 - DNA, 20 bp, Artificial Sequence
  Description of Artificial Sequence: Synthetic oligonucleotide
  Target: LAMA2; (+) strand; PAM type: YTN; PAM sequence: CTG
aacttttttctttaggacgt

SEQ ID NO: 321528 - DNA, 20 bp, Artificial Sequence
  Description of Artificial Sequence: Synthetic oligonucleotide
  Target: LAMA2; (+) strand; PAM type: YTN; PAM sequence: CTT
ttttctttaggacgtttaga

SEQ ID NO: 321529 - DNA, 20 bp, Artificial Sequence
  Description of Artificial Sequence: Synthetic oligonucleotide
  Target: LAMA2; (+) strand; PAM type: YTN; PAM sequence: TTT
tttctttaggacgtttagag

SEQ ID NO: 321530 - DNA, 20 bp, Artificial Sequence
  Description of Artificial Sequence: Synthetic oligonucleotide
  Target: LAMA2; (+) strand; PAM type: YTN; PAM sequence: TTT
ttctttaggacgtttagagt

SEQ ID NO: 321531 - DNA, 20 bp, Artificial Sequence
  Description of Artificial Sequence: Synthetic oligonucleotide
  Target: LAMA2; (+) strand; PAM type: YTN; PAM sequence: TTT
tctttaggacgtttagagtt

SEQ ID NO: 321532 - DNA, 20 bp, Artificial Sequence
  Description of Artificial Sequence: Synthetic oligonucleotide
  Target: LAMA2; (+) strand; PAM type: YTN; PAM sequence: TTT
ctttaggacgtttagagttt

SEQ ID NO: 321533 - DNA, 20 bp, Artificial Sequence
  Description of Artificial Sequence: Synthetic oligonucleotide
  Target: LAMA2; (+) strand; PAM type: YTN; PAM sequence: TTC
tttaggacgtttagagtttt

SEQ ID NO: 321534 - DNA, 20 bp, Artificial Sequence
  Description of Artificial Sequence: Synthetic oligonucleotide
  Target: LAMA2; (+) strand; PAM type: YTN; PAM sequence: CTT
taggacgtttagagtttttg

SEQ ID NO: 321535 - DNA, 20 bp, Artificial Sequence
  Description of Artificial Sequence: Synthetic oligonucleotide
  Target: LAMA2; (+) strand; PAM type: YTN; PAM sequence: TTT
aggacgtttagagtttttga

SEQ ID NO: 321536 - DNA, 20 bp, Artificial Sequence
  Description of Artificial Sequence: Synthetic oligonucleotide
  Target: LAMA2; (+) strand; PAM type: YTN; PAM sequence: TTA
ggacgtttagagtttttgac

SEQ ID NO: 321537 - DNA, 20 bp, Artificial Sequence
  Description of Artificial Sequence: Synthetic oligonucleotide
  Target: LAMA2; (+) strand; PAM type: YTN; PAM sequence: TTT
agagtttttgacaggtatat

SEQ ID NO: 321538 - DNA, 20 bp, Artificial Sequence
  Description of Artificial Sequence: Synthetic oligonucleotide
  Target: LAMA2; (+) strand; PAM type: YTN; PAM sequence: TTA
gagtttttgacaggtatata

SEQ ID NO: 321539 - DNA, 20 bp, Artificial Sequence
  Description of Artificial Sequence: Synthetic oligonucleotide
  Target: LAMA2; (+) strand; PAM type: YTN; PAM sequence: TTT
ttgacaggtatatagtcaag

SEQ ID NO: 321540 - DNA, 20 bp, Artificial Sequence
  Description of Artificial Sequence: Synthetic oligonucleotide
  Target: LAMA2; (+) strand; PAM type: YTN; PAM sequence: TTT
tgacaggtatatagtcaagc

SEQ ID NO: 321541 - DNA, 20 bp, Artificial Sequence
  Description of Artificial Sequence: Synthetic oligonucleotide
  Target: LAMA2; (+) strand; PAM type: YTN; PAM sequence: TTT
gacaggtatatagtcaagcc

SEQ ID NO: 321542 - DNA, 20 bp, Artificial Sequence
  Description of Artificial Sequence: Synthetic oligonucleotide
  Target: LAMA2; (+) strand; PAM type: YTN; PAM sequence: TTG
acaggtatatagtcaagccc

SEQ ID NO: 321543 - DNA, 20 bp, Artificial Sequence
  Description of Artificial Sequence: Synthetic oligonucleotide
  Target: LAMA2; (+) strand; PAM type: YTN; PAM sequence: CTG
ctctcttttacttccttttt

SEQ ID NO: 321544 - DNA, 20 bp, Artificial Sequence
  Description of Artificial Sequence: Synthetic oligonucleotide
  Target: LAMA2; (+) strand; PAM type: YTN; PAM sequence: CTC
tcttttacttcctttttatt

SEQ ID NO: 321545 - DNA, 20 bp, Artificial Sequence
  Description of Artificial Sequence: Synthetic oligonucleotide
  Target: LAMA2; (+) strand; PAM type: YTN; PAM sequence: CTC
ttttacttcctttttattct

SEQ ID NO: 321546 - DNA, 20 bp, Artificial Sequence
  Description of Artificial Sequence: Synthetic oligonucleotide
  Target: LAMA2; (+) strand; PAM type: YTN; PAM sequence: CTT
ttacttcctttttattctct

SEQ ID NO: 321547 - DNA, 20 bp, Artificial Sequence
  Description of Artificial Sequence: Synthetic oligonucleotide
  Target: LAMA2; (+) strand; PAM type: YTN; PAM sequence: TTT
tacttcctttttattctctc

SEQ ID NO: 321548 - DNA, 20 bp, Artificial Sequence
  Description of Artificial Sequence: Synthetic oligonucleotide
  Target: LAMA2; (+) strand; PAM type: YTN; PAM sequence: TTT
acttcctttttattctctct

SEQ ID NO: 321549 - DNA, 20 bp, Artificial Sequence
  Description of Artificial Sequence: Synthetic oligonucleotide
  Target: LAMA2; (+) strand; PAM type: YTN; PAM sequence: TTA
cttcctttttattctctctg

SEQ ID NO: 321550 - DNA, 20 bp, Artificial Sequence
  Description of Artificial Sequence: Synthetic oligonucleotide
  Target: LAMA2; (+) strand; PAM type: YTN; PAM sequence: CTT
cctttttattctctctgatg

SEQ ID NO: 321551 - DNA, 20 bp, Artificial Sequence
  Description of Artificial Sequence: Synthetic oligonucleotide
  Target: LAMA2; (+) strand; PAM type: YTN; PAM sequence: TTC
ctttttattctctctgatga

SEQ ID NO: 321552 - DNA, 20 bp, Artificial Sequence
  Description of Artificial Sequence: Synthetic oligonucleotide
  Target: LAMA2; (+) strand; PAM type: YTN; PAM sequence: CTT
tttattctctctgatgattt

SEQ ID NO: 321553 - DNA, 20 bp, Artificial Sequence
  Description of Artificial Sequence: Synthetic oligonucleotide
  Target: LAMA2; (+) strand; PAM type: YTN; PAM sequence: TTT
ttattctctctgatgatttg

SEQ ID NO: 321554 - DNA, 20 bp, Artificial Sequence
  Description of Artificial Sequence: Synthetic oligonucleotide
  Target: LAMA2; (+) strand; PAM type: YTN; PAM sequence: TTT
tattctctctgatgatttgt

SEQ ID NO: 321555 - DNA, 20 bp, Artificial Sequence
  Description of Artificial Sequence: Synthetic oligonucleotide
  Target: LAMA2; (+) strand; PAM type: YTN; PAM sequence: TTT
attctctctgatgatttgta

SEQ ID NO: 321556 - DNA, 20 bp, Artificial Sequence
  Description of Artificial Sequence: Synthetic oligonucleotide
  Target: LAMA2; (+) strand; PAM type: YTN; PAM sequence: TTA
ttctctctgatgatttgtat

SEQ ID NO: 321557 - DNA, 20 bp, Artificial Sequence
  Description of Artificial Sequence: Synthetic oligonucleotide
  Target: LAMA2; (+) strand; PAM type: YTN; PAM sequence: TTC
tctctgatgatttgtatatg

SEQ ID NO: 321558 - DNA, 20 bp, Artificial Sequence
  Description of Artificial Sequence: Synthetic oligonucleotide
  Target: LAMA2; (+) strand; PAM type: YTN; PAM sequence: CTC
tctgatgatttgtatatgaa

SEQ ID NO: 321559 - DNA, 20 bp, Artificial Sequence
  Description of Artificial Sequence: Synthetic oligonucleotide
  Target: LAMA2; (+) strand; PAM type: YTN; PAM sequence: CTC
tgatgatttgtatatgaatt

SEQ ID NO: 321560 - DNA, 20 bp, Artificial Sequence
  Description of Artificial Sequence: Synthetic oligonucleotide
  Target: LAMA2; (+) strand; PAM type: YTN; PAM sequence: CTG
atgatttgtatatgaattca

SEQ ID NO: 321561 - DNA, 20 bp, Artificial Sequence
  Description of Artificial Sequence: Synthetic oligonucleotide
  Target: LAMA2; (+) strand; PAM type: YTN; PAM sequence: TTT
gtatatgaattcattcttta

SEQ ID NO: 321562 - DNA, 20 bp, Artificial Sequence
  Description of Artificial Sequence: Synthetic oligonucleotide
  Target: LAMA2; (+) strand; PAM type: YTN; PAM sequence: TTG
tatatgaattcattctttat

SEQ ID NO: 321563 - DNA, 20 bp, Artificial Sequence
  Description of Artificial Sequence: Synthetic oligonucleotide
  Target: LAMA2; (+) strand; PAM type: YTN; PAM sequence: TTC
attctttattgatagtatca

SEQ ID NO: 321564 - DNA, 20 bp, Artificial Sequence
  Description of Artificial Sequence: Synthetic oligonucleotide
  Target: LAMA2; (+) strand; PAM type: YTN; PAM sequence: TTC
tttattgatagtatcaacat

SEQ ID NO: 321565 - DNA, 20 bp, Artificial Sequence
  Description of Artificial Sequence: Synthetic oligonucleotide
  Target: LAMA2; (+) strand; PAM type: YTN; PAM sequence: CTT
tattgatagtatcaacatga

SEQ ID NO: 321566 - DNA, 20 bp, Artificial Sequence
  Description of Artificial Sequence: Synthetic oligonucleotide
  Target: LAMA2; (+) strand; PAM type: YTN; PAM sequence: TTT
attgatagtatcaacatgac

SEQ ID NO: 321567 - DNA, 20 bp, Artificial Sequence
  Description of Artificial Sequence: Synthetic oligonucleotide
  Target: LAMA2; (+) strand; PAM type: YTN; PAM sequence: TTA
ttgatagtatcaacatgaca

SEQ ID NO: 321568 - DNA, 20 bp, Artificial Sequence
  Description of Artificial Sequence: Synthetic oligonucleotide
  Target: LAMA2; (+) strand; PAM type: YTN; PAM sequence: TTG
atagtatcaacatgacaaaa

SEQ ID NO: 321569 - DNA, 20 bp, Artificial Sequence
  Description of Artificial Sequence: Synthetic oligonucleotide
  Target: LAMA2; (+) strand; PAM type: YTN; PAM sequence: CTT
tgtcctaatggatcttataa

SEQ ID NO: 321570 - DNA, 20 bp, Artificial Sequence
  Description of Artificial Sequence: Synthetic oligonucleotide
  Target: LAMA2; (+) strand; PAM type: YTN; PAM sequence: TTT
gtcctaatggatcttataaa

SEQ ID NO: 321571 - DNA, 20 bp, Artificial Sequence
  Description of Artificial Sequence: Synthetic oligonucleotide
  Target: LAMA2; (+) strand; PAM type: YTN; PAM sequence: TTG
tcctaatggatcttataaat

SEQ ID NO: 321572 - DNA, 20 bp, Artificial Sequence
  Description of Artificial Sequence: Synthetic oligonucleotide
  Target: LAMA2; (+) strand; PAM type: YTN; PAM sequence: CTA
atggatcttataaatctaat

SEQ ID NO: 321573 - DNA, 20 bp, Artificial Sequence
  Description of Artificial Sequence: Synthetic oligonucleotide
  Target: LAMA2; (+) strand; PAM type: YTN; PAM sequence: CTT
ataaatctaatgcaggaggc

SEQ ID NO: 321574 - DNA, 20 bp, Artificial Sequence
  Description of Artificial Sequence: Synthetic oligonucleotide
  Target: LAMA2; (+) strand; PAM type: YTN; PAM sequence: TTA
taaatctaatgcaggaggca

SEQ ID NO: 321575 - DNA, 20 bp, Artificial Sequence
  Description of Artificial Sequence: Synthetic oligonucleotide
  Target: LAMA2; (+) strand; PAM type: YTN; PAM sequence: CTA
atgcaggaggcagacagtaa

SEQ ID NO: 321576 - DNA, 20 bp, Artificial Sequence
  Description of Artificial Sequence: Synthetic oligonucleotide
  Target: LAMA2; (+) strand; PAM type: YTN; PAM sequence: CTA
aacaatataattgtatatgc

SEQ ID NO: 321577 - DNA, 20 bp, Artificial Sequence
  Description of Artificial Sequence: Synthetic oligonucleotide
  Target: LAMA2; (+) strand; PAM type: YTN; PAM sequence: TTG
tatatgcggtaagtgctatg

SEQ ID NO: 321578 - DNA, 20 bp, Artificial Sequence
  Description of Artificial Sequence: Synthetic oligonucleotide
  Target: LAMA2; (+) strand; PAM type: YTN; PAM sequence: CTA
tgaaggaattaaacaaggtg

SEQ ID NO: 321579 - DNA, 20 bp, Artificial Sequence
  Description of Artificial Sequence: Synthetic oligonucleotide
  Target: LAMA2; (+) strand; PAM type: YTN; PAM sequence: TTA
aacaaggtgacacaacagaa

SEQ ID NO: 321580 - DNA, 20 bp, Artificial Sequence
  Description of Artificial Sequence: Synthetic oligonucleotide
  Target: LAMA2; (+) strand; PAM type: YTN; PAM sequence: TTG
tgtcgggcaattttagataa

SEQ ID NO: 321581 - DNA, 20 bp, Artificial Sequence
  Description of Artificial Sequence: Synthetic oligonucleotide
  Target: LAMA2; (+) strand; PAM type: YTN; PAM sequence: TTT
tagataaaatggcgagtgaa

SEQ ID NO: 321582 - DNA, 20 bp, Artificial Sequence
  Description of Artificial Sequence: Synthetic oligonucleotide
  Target: LAMA2; (+) strand; PAM type: YTN; PAM sequence: TTT
agataaaatggcgagtgaat

SEQ ID NO: 321583 - DNA, 20 bp, Artificial Sequence
  Description of Artificial Sequence: Synthetic oligonucleotide
  Target: LAMA2; (+) strand; PAM type: YTN; PAM sequence: TTA
gataaaatggcgagtgaatg

SEQ ID NO: 321584 - DNA, 20 bp, Artificial Sequence
  Description of Artificial Sequence: Synthetic oligonucleotide
  Target: LAMA2; (+) strand; PAM type: YTN; PAM sequence: CTG
tgcatggaggtgacatcttg

SEQ ID NO: 321585 - DNA, 20 bp, Artificial Sequence
  Description of Artificial Sequence: Synthetic oligonucleotide
  Target: LAMA2; (+) strand; PAM type: YTN; PAM sequence: CTT
gccagagacaggagaatgag

SEQ ID NO: 321586 - DNA, 20 bp, Artificial Sequence
  Description of Artificial Sequence: Synthetic oligonucleotide
  Target: LAMA2; (+) strand; PAM type: YTN; PAM sequence: TTG
ccagagacaggagaatgaga

SEQ ID NO: 321587 - DNA, 20 bp, Artificial Sequence
  Description of Artificial Sequence: Synthetic oligonucleotide
  Target: LAMA2; (+) strand; PAM type: YTN; PAM sequence: TTT
ggcatgtgaagatcggggaa

SEQ ID NO: 321588 - DNA, 20 bp, Artificial Sequence
  Description of Artificial Sequence: Synthetic oligonucleotide
  Target: LAMA2; (+) strand; PAM type: YTN; PAM sequence: TTG
gcatgtgaagatcggggaaa

SEQ ID NO: 321589 - DNA, 20 bp, Artificial Sequence
  Description of Artificial Sequence: Synthetic oligonucleotide
  Target: LAMA2; (+) strand; PAM type: YTN; PAM sequence: TTT
gaggggtgagagaaactatc

SEQ ID NO: 321590 - DNA, 20 bp, Artificial Sequence
  Description of Artificial Sequence: Synthetic oligonucleotide
  Target: LAMA2; (+) strand; PAM type: YTN; PAM sequence: TTG
aggggtgagagaaactatca

SEQ ID NO: 321591 - DNA, 20 bp, Artificial Sequence
  Description of Artificial Sequence: Synthetic oligonucleotide
  Target: LAMA2; (+) strand; PAM type: YTN; PAM sequence: CTA
tcatcagagtaacaggcaac

SEQ ID NO: 321592 - DNA, 20 bp, Artificial Sequence
  Description of Artificial Sequence: Synthetic oligonucleotide
  Target: LAMA2; (+) strand; PAM type: YTN; PAM sequence: CTA
cagaatgggagaaaattttt

SEQ ID NO: 321593 - DNA, 20 bp, Artificial Sequence
  Description of Artificial Sequence: Synthetic oligonucleotide
  Target: LAMA2; (+) strand; PAM type: YTN; PAM sequence: TTT
ttgcaatctatccatctgac

SEQ ID NO: 321594 - DNA, 20 bp, Artificial Sequence
  Description of Artificial Sequence: Synthetic oligonucleotide
  Target: LAMA2; (+) strand; PAM type: YTN; PAM sequence: TTT
tgcaatctatccatctgaca

SEQ ID NO: 321595 - DNA, 20 bp, Artificial Sequence
  Description of Artificial Sequence: Synthetic oligonucleotide
  Target: LAMA2; (+) strand; PAM type: YTN; PAM sequence: TTT
gcaatctatccatctgacaa

SEQ ID NO: 321596 - DNA, 20 bp, Artificial Sequence
  Description of Artificial Sequence: Synthetic oligonucleotide
  Target: LAMA2; (+) strand; PAM type: YTN; PAM sequence: TTG
caatctatccatctgacaaa

SEQ ID NO: 321597 - DNA, 20 bp, Artificial Sequence
  Description of Artificial Sequence: Synthetic oligonucleotide
  Target: LAMA2; (+) strand; PAM type: YTN; PAM sequence: CTA
tccatctgacaaagggctaa

SEQ ID NO: 321598 - DNA, 20 bp, Artificial Sequence
  Description of Artificial Sequence: Synthetic oligonucleotide
  Target: LAMA2; (+) strand; PAM type: YTN; PAM sequence: CTG
acaaagggctaatacccaga

SEQ ID NO: 321599 - DNA, 20 bp, Artificial Sequence
  Description of Artificial Sequence: Synthetic oligonucleotide
  Target: LAMA2; (+) strand; PAM type: YTN; PAM sequence: CTA
atacccagaatctacaagga

SEQ ID NO: 321600 - DNA, 20 bp, Artificial Sequence
  Description of Artificial Sequence: Synthetic oligonucleotide
  Target: LAMA2; (+) strand; PAM type: YTN; PAM sequence: CTA
caaggaacataaacaaattc

SEQ ID NO: 321601 - DNA, 20 bp, Artificial Sequence
  Description of Artificial Sequence: Synthetic oligonucleotide
  Target: LAMA2; (+) strand; PAM type: YTN; PAM sequence: TTC
acaagaaaaagcaaccccat

SEQ ID NO: 321602 - DNA, 20 bp, Artificial Sequence
  Description of Artificial Sequence: Synthetic oligonucleotide
  Target: LAMA2; (+) strand; PAM type: YTN; PAM sequence: CTT
ctcaaaagaagacatttatg

SEQ ID NO: 321603 - DNA, 20 bp, Artificial Sequence
  Description of Artificial Sequence: Synthetic oligonucleotide
  Target: LAMA2; (+) strand; PAM type: YTN; PAM sequence: TTC
tcaaaagaagacatttatgt

SEQ ID NO: 321604 - DNA, 20 bp, Artificial Sequence
  Description of Artificial Sequence: Synthetic oligonucleotide
  Target: LAMA2; (+) strand; PAM type: YTN; PAM sequence: CTC
aaaagaagacatttatgtgg

SEQ ID NO: 321605 - DNA, 20 bp, Artificial Sequence
  Description of Artificial Sequence: Synthetic oligonucleotide
  Target: LAMA2; (+) strand; PAM type: YTN; PAM sequence: TTT
atgtggccaacaaacatatg

SEQ ID NO: 321606 - DNA, 20 bp, Artificial Sequence
  Description of Artificial Sequence: Synthetic oligonucleotide
  Target: LAMA2; (+) strand; PAM type: YTN; PAM sequence: TTA
tgtggccaacaaacatatga

SEQ ID NO: 321607 - DNA, 20 bp, Artificial Sequence
  Description of Artificial Sequence: Synthetic oligonucleotide
  Target: LAMA2; (+) strand; PAM type: YTN; PAM sequence: CTC
accatcactggtaattagag

SEQ ID NO: 321608 - DNA, 20 bp, Artificial Sequence
  Description of Artificial Sequence: Synthetic oligonucleotide
  Target: LAMA2; (+) strand; PAM type: YTN; PAM sequence: CTG
gtaattagagaaatgcaaat

SEQ ID NO: 321609 - DNA, 20 bp, Artificial Sequence
  Description of Artificial Sequence: Synthetic oligonucleotide
  Target: LAMA2; (+) strand; PAM type: YTN; PAM sequence: TTA
gagaaatgcaaatcaaaacg

SEQ ID NO: 321610 - DNA, 20 bp, Artificial Sequence
  Description of Artificial Sequence: Synthetic oligonucleotide
  Target: LAMA2; (+) strand; PAM type: YTN; PAM sequence: CTC
atgccagttagaatggcgat

SEQ ID NO: 321611 - DNA, 20 bp, Artificial Sequence
  Description of Artificial Sequence: Synthetic oligonucleotide
  Target: LAMA2; (+) strand; PAM type: YTN; PAM sequence: TTA
gaatggcgatcattaaaatg

SEQ ID NO: 321612 - DNA, 20 bp, Artificial Sequence
  Description of Artificial Sequence: Synthetic oligonucleotide
  Target: LAMA2; (+) strand; PAM type: YTN; PAM sequence: TTA
aaatgtcaggaaacaacaga

SEQ ID NO: 321613 - DNA, 20 bp, Artificial Sequence
  Description of Artificial Sequence: Synthetic oligonucleotide
  Target: LAMA2; (+) strand; PAM type: YTN; PAM sequence: CTG
gagaggatgtggagaaatag

SEQ ID NO: 321614 - DNA, 20 bp, Artificial Sequence
  Description of Artificial Sequence: Synthetic oligonucleotide
  Target: LAMA2; (+) strand; PAM type: YTN; PAM sequence: CTT
ttacactgttagtgtgaatg

SEQ ID NO: 321615 - DNA, 20 bp, Artificial Sequence
  Description of Artificial Sequence: Synthetic oligonucleotide
  Target: LAMA2; (+) strand; PAM type: YTN; PAM sequence: TTT
tacactgttagtgtgaatgt

SEQ ID NO: 321616 - DNA, 20 bp, Artificial Sequence
  Description of Artificial Sequence: Synthetic oligonucleotide
  Target: LAMA2; (+) strand; PAM type: YTN; PAM sequence: TTT
acactgttagtgtgaatgta

SEQ ID NO: 321617 - DNA, 20 bp, Artificial Sequence
  Description of Artificial Sequence: Synthetic oligonucleotide
  Target: LAMA2; (+) strand; PAM type: YTN; PAM sequence: TTA
cactgttagtgtgaatgtaa

SEQ ID NO: 321618 - DNA, 20 bp, Artificial Sequence
  Description of Artificial Sequence: Synthetic oligonucleotide
  Target: LAMA2; (+) strand; PAM type: YTN; PAM sequence: CTG
ttagtgtgaatgtaaattag

SEQ ID NO: 321619 - DNA, 20 bp, Artificial Sequence
  Description of Artificial Sequence: Synthetic oligonucleotide
  Target: LAMA2; (+) strand; PAM type: YTN; PAM sequence: TTA
gtgtgaatgtaaattagttc

SEQ ID NO: 321620 - DNA, 20 bp, Artificial Sequence
  Description of Artificial Sequence: Synthetic oligonucleotide
  Target: LAMA2; (+) strand; PAM type: YTN; PAM sequence: TTA
gttcagacattctggaagac

SEQ ID NO: 321621 - DNA, 20 bp, Artificial Sequence
  Description of Artificial Sequence: Synthetic oligonucleotide
  Target: LAMA2; (+) strand; PAM type: YTN; PAM sequence: TTC
agacattctggaagacagtg

SEQ ID NO: 321622 - DNA, 20 bp, Artificial Sequence
  Description of Artificial Sequence: Synthetic oligonucleotide
  Target: LAMA2; (+) strand; PAM type: YTN; PAM sequence: TTC
tggaagacagtgtggtgatt

SEQ ID NO: 321623 - DNA, 20 bp, Artificial Sequence
  Description of Artificial Sequence: Synthetic oligonucleotide
  Target: LAMA2; (+) strand; PAM type: YTN; PAM sequence: CTG
gaagacagtgtggtgattcc

SEQ ID NO: 321624 - DNA, 20 bp, Artificial Sequence
  Description of Artificial Sequence: Synthetic oligonucleotide
  Target: LAMA2; (+) strand; PAM type: YTN; PAM sequence: TTC
ctcaaggatctagaaccgga

SEQ ID NO: 321625 - DNA, 20 bp, Artificial Sequence
  Description of Artificial Sequence: Synthetic oligonucleotide
  Target: LAMA2; (+) strand; PAM type: YTN; PAM sequence: CTC
aaggatctagaaccggaaat

SEQ ID NO: 321626 - DNA, 20 bp, Artificial Sequence
  Description of Artificial Sequence: Synthetic oligonucleotide
  Target: LAMA2; (+) strand; PAM type: YTN; PAM sequence: CTA
gaaccggaaataccatttga

SEQ ID NO: 321627 - DNA, 20 bp, Artificial Sequence
  Description of Artificial Sequence: Synthetic oligonucleotide
  Target: LAMA2; (+) strand; PAM type: YTN; PAM sequence: TTT
gacccagccatcccattact

SEQ ID NO: 321628 - DNA, 20 bp, Artificial Sequence
  Description of Artificial Sequence: Synthetic oligonucleotide
  Target: LAMA2; (+) strand; PAM type: YTN; PAM sequence: TTG
acccagccatcccattactg

SEQ ID NO: 321629 - DNA, 20 bp, Artificial Sequence
  Description of Artificial Sequence: Synthetic oligonucleotide
  Target: LAMA2; (+) strand; PAM type: YTN; PAM sequence: TTA
ctgggtatttatccaaagga

SEQ ID NO: 321630 - DNA, 20 bp, Artificial Sequence
  Description of Artificial Sequence: Synthetic oligonucleotide
  Target: LAMA2; (+) strand; PAM type: YTN; PAM sequence: CTG
ggtatttatccaaaggatta

SEQ ID NO: 321631 - DNA, 20 bp, Artificial Sequence
  Description of Artificial Sequence: Synthetic oligonucleotide
  Target: LAMA2; (+) strand; PAM type: YTN; PAM sequence: TTT
atccaaaggattataaatca

SEQ ID NO: 321632 - DNA, 20 bp, Artificial Sequence
  Description of Artificial Sequence: Synthetic oligonucleotide
  Target: LAMA2; (+) strand; PAM type: YTN; PAM sequence: TTA
tccaaaggattataaatcat

SEQ ID NO: 321633 - DNA, 20 bp, Artificial Sequence
  Description of Artificial Sequence: Synthetic oligonucleotide
  Target: LAMA2; (+) strand; PAM type: YTN; PAM sequence: TTA
taaatcattctactataaag

SEQ ID NO: 321634 - DNA, 20 bp, Artificial Sequence
  Description of Artificial Sequence: Synthetic oligonucleotide
  Target: LAMA2; (+) strand; PAM type: YTN; PAM sequence: TTC
tactataaagacacatgcac

SEQ ID NO: 321635 - DNA, 20 bp, Artificial Sequence
  Description of Artificial Sequence: Synthetic oligonucleotide
  Target: LAMA2; (+) strand; PAM type: YTN; PAM sequence: CTA
ctataaagacacatgcacac

SEQ ID NO: 321636 - DNA, 20 bp, Artificial Sequence
  Description of Artificial Sequence: Synthetic oligonucleotide
  Target: LAMA2; (+) strand; PAM type: YTN; PAM sequence: CTA
taaagacacatgcacacgta

SEQ ID NO: 321637 - DNA, 20 bp, Artificial Sequence
  Description of Artificial Sequence: Synthetic oligonucleotide
  Target: LAMA2; (+) strand; PAM type: YTN; PAM sequence: TTT
actgcagcactattcacaat

SEQ ID NO: 321638 - DNA, 20 bp, Artificial Sequence
  Description of Artificial Sequence: Synthetic oligonucleotide
  Target: LAMA2; (+) strand; PAM type: YTN; PAM sequence: TTA
ctgcagcactattcacaata

SEQ ID NO: 321639 - DNA, 20 bp, Artificial Sequence
  Description of Artificial Sequence: Synthetic oligonucleotide
  Target: LAMA2; (+) strand; PAM type: YTN; PAM sequence: CTG
cagcactattcacaatagca

SEQ ID NO: 321640 - DNA, 20 bp, Artificial Sequence
  Description of Artificial Sequence: Synthetic oligonucleotide
  Target: LAMA2; (+) strand; PAM type: YTN; PAM sequence: CTA
ttcacaatagcaaagacttg

SEQ ID NO: 321641 - DNA, 20 bp, Artificial Sequence
  Description of Artificial Sequence: Synthetic oligonucleotide
  Target: LAMA2; (+) strand; PAM type: YTN; PAM sequence: TTC
acaatagcaaagacttggaa

SEQ ID NO: 321642 - DNA, 20 bp, Artificial Sequence
  Description of Artificial Sequence: Synthetic oligonucleotide
  Target: LAMA2; (+) strand; PAM type: YTN; PAM sequence: CTT
ggaaccaacccaaatgccta

SEQ ID NO: 321643 - DNA, 20 bp, Artificial Sequence
  Description of Artificial Sequence: Synthetic oligonucleotide
  Target: LAMA2; (+) strand; PAM type: YTN; PAM sequence: TTG
gaaccaacccaaatgcctat

SEQ ID NO: 321644 - DNA, 20 bp, Artificial Sequence
  Description of Artificial Sequence: Synthetic oligonucleotide
  Target: LAMA2; (+) strand; PAM type: YTN; PAM sequence: CTA
tcaatgatagactggataaa

SEQ ID NO: 321645 - DNA, 20 bp, Artificial Sequence
  Description of Artificial Sequence: Synthetic oligonucleotide
  Target: LAMA2; (+) strand; PAM type: YTN; PAM sequence: CTG
gataaagaaaatgtggcaca

SEQ ID NO: 321646 - DNA, 20 bp, Artificial Sequence
  Description of Artificial Sequence: Synthetic oligonucleotide
  Target: LAMA2; (+) strand; PAM type: YTN; PAM sequence: CTA
ggcagccgtgaaaaaggatg

SEQ ID NO: 321647 - DNA, 20 bp, Artificial Sequence
  Description of Artificial Sequence: Synthetic oligonucleotide
  Target: LAMA2; (+) strand; PAM type: YTN; PAM sequence: TTC
atgtcctttgcagggacatg

SEQ ID NO: 321648 - DNA, 20 bp, Artificial Sequence
  Description of Artificial Sequence: Synthetic oligonucleotide
  Target: LAMA2; (+) strand; PAM type: YTN; PAM sequence: CTT
tgcagggacatggatgaagc

SEQ ID NO: 321649 - DNA, 20 bp, Artificial Sequence
  Description of Artificial Sequence: Synthetic oligonucleotide
  Target: LAMA2; (+) strand; PAM type: YTN; PAM sequence: TTT
gcagggacatggatgaagct

SEQ ID NO: 321650 - DNA, 20 bp, Artificial Sequence
  Description of Artificial Sequence: Synthetic oligonucleotide
  Target: LAMA2; (+) strand; PAM type: YTN; PAM sequence: TTG
cagggacatggatgaagctg

SEQ ID NO: 321651 - DNA, 20 bp, Artificial Sequence
  Description of Artificial Sequence: Synthetic oligonucleotide
  Target: LAMA2; (+) strand; PAM type: YTN; PAM sequence: CTG
gaaaccatcattctcagcaa

SEQ ID NO: 321652 - DNA, 20 bp, Artificial Sequence
  Description of Artificial Sequence: Synthetic oligonucleotide
  Target: LAMA2; (+) strand; PAM type: YTN; PAM sequence: TTC
tcagcaaactaacagaggaa

SEQ ID NO: 321653 - DNA, 20 bp, Artificial Sequence
  Description of Artificial Sequence: Synthetic oligonucleotide
  Target: LAMA2; (+) strand; PAM type: YTN; PAM sequence: CTC
agcaaactaacagaggaaca

SEQ ID NO: 321654 - DNA, 20 bp, Artificial Sequence
  Description of Artificial Sequence: Synthetic oligonucleotide
  Target: LAMA2; (+) strand; PAM type: YTN; PAM sequence: CTA
acagaggaacagaaaaccaa

SEQ ID NO: 321655 - DNA, 20 bp, Artificial Sequence
  Description of Artificial Sequence: Synthetic oligonucleotide
  Target: LAMA2; (+) strand; PAM type: YTN; PAM sequence: CTG
catgttctcactcataagtg

SEQ ID NO: 321656 - DNA, 20 bp, Artificial Sequence
  Description of Artificial Sequence: Synthetic oligonucleotide
  Target: LAMA2; (+) strand; PAM type: YTN; PAM sequence: TTC
tcactcataagtgggtgttg

SEQ ID NO: 321657 - DNA, 20 bp, Artificial Sequence
  Description of Artificial Sequence: Synthetic oligonucleotide
  Target: LAMA2; (+) strand; PAM type: YTN; PAM sequence: CTC
actcataagtgggtgttgaa

SEQ ID NO: 321658 - DNA, 20 bp, Artificial Sequence
  Description of Artificial Sequence: Synthetic oligonucleotide
  Target: LAMA2; (+) strand; PAM type: YTN; PAM sequence: CTC
ataagtgggtgttgaacagt

SEQ ID NO: 321659 - DNA, 20 bp, Artificial Sequence
  Description of Artificial Sequence: Synthetic oligonucleotide
  Target: LAMA2; (+) strand; PAM type: YTN; PAM sequence: TTG
aacagtgagaacatatggac

SEQ ID NO: 321660 - DNA, 20 bp, Artificial Sequence
  Description of Artificial Sequence: Synthetic oligonucleotide
  Target: LAMA2; (+) strand; PAM type: YTN; PAM sequence: CTG
gggcctgttgggggaggggt

SEQ ID NO: 321661 - DNA, 20 bp, Artificial Sequence
  Description of Artificial Sequence: Synthetic oligonucleotide
  Target: LAMA2; (+) strand; PAM type: YTN; PAM sequence: CTG
ttgggggaggggtgggaggc

SEQ ID NO: 321662 - DNA, 20 bp, Artificial Sequence
  Description of Artificial Sequence: Synthetic oligonucleotide
  Target: LAMA2; (+) strand; PAM type: YTN; PAM sequence: TTG
ggggaggggtgggaggcaag

SEQ ID NO: 321663 - DNA, 20 bp, Artificial Sequence
  Description of Artificial Sequence: Synthetic oligonucleotide
  Target: LAMA2; (+) strand; PAM type: YTN; PAM sequence: TTA
ggagaaatacctaatgtaga

SEQ ID NO: 321664 - DNA, 20 bp, Artificial Sequence
  Description of Artificial Sequence: Synthetic oligonucleotide
  Target: LAMA2; (+) strand; PAM type: YTN; PAM sequence: CTA
atgtagatgatgggttgatg

SEQ ID NO: 321665 - DNA, 20 bp, Artificial Sequence
  Description of Artificial Sequence: Synthetic oligonucleotide
  Target: LAMA2; (+) strand; PAM type: YTN; PAM sequence: TTG
atggctgcagcaaaccacca

SEQ ID NO: 321666 - DNA, 20 bp, Artificial Sequence
  Description of Artificial Sequence: Synthetic oligonucleotide
  Target: LAMA2; (+) strand; PAM type: YTN; PAM sequence: CTG
cagcaaaccaccatggcaca

SEQ ID NO: 321667 - DNA, 20 bp, Artificial Sequence
  Description of Artificial Sequence: Synthetic oligonucleotide
  Target: LAMA2; (+) strand; PAM type: YTN; PAM sequence: TTC
ctatgtaacaaacctgcaca

SEQ ID NO: 321668 - DNA, 20 bp, Artificial Sequence
  Description of Artificial Sequence: Synthetic oligonucleotide
  Target: LAMA2; (+) strand; PAM type: YTN; PAM sequence: CTA
tgtaacaaacctgcacattt

SEQ ID NO: 321669 - DNA, 20 bp, Artificial Sequence
  Description of Artificial Sequence: Synthetic oligonucleotide
  Target: LAMA2; (+) strand; PAM type: YTN; PAM sequence: CTG
cacattttgcacatgtatcc

SEQ ID NO: 321670 - DNA, 20 bp, Artificial Sequence
  Description of Artificial Sequence: Synthetic oligonucleotide
  Target: LAMA2; (+) strand; PAM type: YTN; PAM sequence: TTT
tgcacatgtatcccagaact

SEQ ID NO: 321671 - DNA, 20 bp, Artificial Sequence
  Description of Artificial Sequence: Synthetic oligonucleotide
  Target: LAMA2; (+) strand; PAM type: YTN; PAM sequence: TTT
gcacatgtatcccagaactt

SEQ ID NO: 321672 - DNA, 20 bp, Artificial Sequence
  Description of Artificial Sequence: Synthetic oligonucleotide
  Target: LAMA2; (+) strand; PAM type: YTN; PAM sequence: TTG
cacatgtatcccagaactta

SEQ ID NO: 321673 - DNA, 20 bp, Artificial Sequence
  Description of Artificial Sequence: Synthetic oligonucleotide
  Target: LAMA2; (+) strand; PAM type: YTN; PAM sequence: CTT
aaagtagaaagaaagaaaga

SEQ ID NO: 321674 - DNA, 20 bp, Artificial Sequence
  Description of Artificial Sequence: Synthetic oligonucleotide
  Target: LAMA2; (+) strand; PAM type: YTN; PAM sequence: TTA
aagtagaaagaaagaaagag

SEQ ID NO: 321675 - DNA, 20 bp, Artificial Sequence
  Description of Artificial Sequence: Synthetic oligonucleotide
  Target: LAMA2; (+) strand; PAM type: YTN; PAM sequence: CTA
gagtgaagtaagagagggga

SEQ ID NO: 321676 - DNA, 20 bp, Artificial Sequence
  Description of Artificial Sequence: Synthetic oligonucleotide
  Target: LAMA2; (+) strand; PAM type: YTN; PAM sequence: TTA
gtcaaagttgaaattgaaga

SEQ ID NO: 321677 - DNA, 20 bp, Artificial Sequence
  Description of Artificial Sequence: Synthetic oligonucleotide
  Target: LAMA2; (+) strand; PAM type: YTN; PAM sequence: TTG
aaattgaagacacaaactgg

SEQ ID NO: 321678 - DNA, 20 bp, Artificial Sequence
  Description of Artificial Sequence: Synthetic oligonucleotide
  Target: LAMA2; (+) strand; PAM type: YTN; PAM sequence: TTG
aagacacaaactggctattc

SEQ ID NO: 321679 - DNA, 20 bp, Artificial Sequence
  Description of Artificial Sequence: Synthetic oligonucleotide
  Target: LAMA2; (+) strand; PAM type: YTN; PAM sequence: CTG
gctattcaagactttatgcc

SEQ ID NO: 321680 - DNA, 20 bp, Artificial Sequence
  Description of Artificial Sequence: Synthetic oligonucleotide
  Target: LAMA2; (+) strand; PAM type: YTN; PAM sequence: CTA
ttcaagactttatgcctgtg

SEQ ID NO: 321681 - DNA, 20 bp, Artificial Sequence
  Description of Artificial Sequence: Synthetic oligonucleotide
  Target: LAMA2; (+) strand; PAM type: YTN; PAM sequence: TTC
aagactttatgcctgtgatg

SEQ ID NO: 321682 - DNA, 20 bp, Artificial Sequence
  Description of Artificial Sequence: Synthetic oligonucleotide
  Target: LAMA2; (+) strand; PAM type: YTN; PAM sequence: CTT
tatgcctgtgatgtggccag

SEQ ID NO: 321683 - DNA, 20 bp, Artificial Sequence
  Description of Artificial Sequence: Synthetic oligonucleotide
  Target: LAMA2; (+) strand; PAM type: YTN; PAM sequence: TTT
atgcctgtgatgtggccagg

SEQ ID NO: 321684 - DNA, 20 bp, Artificial Sequence
  Description of Artificial Sequence: Synthetic oligonucleotide
  Target: LAMA2; (+) strand; PAM type: YTN; PAM sequence: TTA
tgcctgtgatgtggccaggc

SEQ ID NO: 321685 - DNA, 20 bp, Artificial Sequence
  Description of Artificial Sequence: Synthetic oligonucleotide
  Target: LAMA2; (+) strand; PAM type: YTN; PAM sequence: CTG
tgatgtggccaggcatggtg

SEQ ID NO: 321686 - DNA, 20 bp, Artificial Sequence
  Description of Artificial Sequence: Synthetic oligonucleotide
  Target: LAMA2; (+) strand; PAM type: YTN; PAM sequence: CTC
acacctgtaattccagcact

SEQ ID NO: 321687 - DNA, 20 bp, Artificial Sequence
  Description of Artificial Sequence: Synthetic oligonucleotide
  Target: LAMA2; (+) strand; PAM type: YTN; PAM sequence: CTG
taattccagcactttcggag

SEQ ID NO: 321688 - DNA, 20 bp, Artificial Sequence
  Description of Artificial Sequence: Synthetic oligonucleotide
  Target: LAMA2; (+) strand; PAM type: YTN; PAM sequence: TTC
cagcactttcggaggctgag

SEQ ID NO: 321689 - DNA, 20 bp, Artificial Sequence
  Description of Artificial Sequence: Synthetic oligonucleotide
  Target: LAMA2; (+) strand; PAM type: YTN; PAM sequence: CTT
tcggaggctgaggcaggtgg

SEQ ID NO: 321690 - DNA, 20 bp, Artificial Sequence
  Description of Artificial Sequence: Synthetic oligonucleotide
  Target: LAMA2; (+) strand; PAM type: YTN; PAM sequence: TTT
cggaggctgaggcaggtgga

SEQ ID NO: 321691 - DNA, 20 bp, Artificial Sequence
  Description of Artificial Sequence: Synthetic oligonucleotide
  Target: LAMA2; (+) strand; PAM type: YTN; PAM sequence: TTC
ggaggctgaggcaggtggat

SEQ ID NO: 321692 - DNA, 20 bp, Artificial Sequence
  Description of Artificial Sequence: Synthetic oligonucleotide
  Target: LAMA2; (+) strand; PAM type: YTN; PAM sequence: CTG
aggcaggtggatcacttgag

SEQ ID NO: 321693 - DNA, 20 bp, Artificial Sequence
  Description of Artificial Sequence: Synthetic oligonucleotide
  Target: LAMA2; (+) strand; PAM type: YTN; PAM sequence: CTT
gaggtcaggggttccagacc

SEQ ID NO: 321694 - DNA, 20 bp, Artificial Sequence
  Description of Artificial Sequence: Synthetic oligonucleotide
  Target: LAMA2; (+) strand; PAM type: YTN; PAM sequence: TTG
aggtcaggggttccagacca

SEQ ID NO: 321695 - DNA, 20 bp, Artificial Sequence
  Description of Artificial Sequence: Synthetic oligonucleotide
  Target: LAMA2; (+) strand; PAM type: YTN; PAM sequence: TTC
cagaccagcctggcaaacat

SEQ ID NO: 321696 - DNA, 20 bp, Artificial Sequence
  Description of Artificial Sequence: Synthetic oligonucleotide
  Target: LAMA2; (+) strand; PAM type: YTN; PAM sequence: CTG
gcaaacatggtgaaaccctg

SEQ ID NO: 321697 - DNA, 20 bp, Artificial Sequence
  Description of Artificial Sequence: Synthetic oligonucleotide
  Target: LAMA2; (+) strand; PAM type: YTN; PAM sequence: CTG
tctctaccaaaaatgcaaaa

SEQ ID NO: 321698 - DNA, 20 bp, Artificial Sequence
  Description of Artificial Sequence: Synthetic oligonucleotide
  Target: LAMA2; (+) strand; PAM type: YTN; PAM sequence: CTC
taccaaaaatgcaaaaattg

SEQ ID NO: 321699 - DNA, 20 bp, Artificial Sequence
  Description of Artificial Sequence: Synthetic oligonucleotide
  Target: LAMA2; (+) strand; PAM type: YTN; PAM sequence: CTA
ccaaaaatgcaaaaattggc

SEQ ID NO: 321700 - DNA, 20 bp, Artificial Sequence
  Description of Artificial Sequence: Synthetic oligonucleotide
  Target: LAMA2; (+) strand; PAM type: YTN; PAM sequence: TTG
gccaggcatggtggcacatg

SEQ ID NO: 321701 - DNA, 20 bp, Artificial Sequence
  Description of Artificial Sequence: Synthetic oligonucleotide
  Target: LAMA2; (+) strand; PAM type: YTN; PAM sequence: CTA
tactcccagctactcgggag

SEQ ID NO: 321702 - DNA, 20 bp, Artificial Sequence
  Description of Artificial Sequence: Synthetic oligonucleotide
  Target: LAMA2; (+) strand; PAM type: YTN; PAM sequence: CTC
ccagctactcgggaggctga

SEQ ID NO: 321703 - DNA, 20 bp, Artificial Sequence
  Description of Artificial Sequence: Synthetic oligonucleotide
  Target: LAMA2; (+) strand; PAM type: YTN; PAM sequence: CTA
ctcgggaggctgaggtagga

SEQ ID NO: 321704 - DNA, 20 bp, Artificial Sequence
  Description of Artificial Sequence: Synthetic oligonucleotide
  Target: LAMA2; (+) strand; PAM type: YTN; PAM sequence: CTC
gggaggctgaggtaggagaa

SEQ ID NO: 321705 - DNA, 20 bp, Artificial Sequence
  Description of Artificial Sequence: Synthetic oligonucleotide
  Target: LAMA2; (+) strand; PAM type: YTN; PAM sequence: CTG
aggtaggagaatcacttgaa

SEQ ID NO: 321706 - DNA, 20 bp, Artificial Sequence
  Description of Artificial Sequence: Synthetic oligonucleotide
  Target: LAMA2; (+) strand; PAM type: YTN; PAM sequence: CTT
gaacctggaaggcagaggct

SEQ ID NO: 321707 - DNA, 20 bp, Artificial Sequence
  Description of Artificial Sequence: Synthetic oligonucleotide
  Target: LAMA2; (+) strand; PAM type: YTN; PAM sequence: TTG
aacctggaaggcagaggctg

SEQ ID NO: 321708 - DNA, 20 bp, Artificial Sequence
  Description of Artificial Sequence: Synthetic oligonucleotide
  Target: LAMA2; (+) strand; PAM type: YTN; PAM sequence: CTG
gaaggcagaggctgcagtga

SEQ ID NO: 321709 - DNA, 20 bp, Artificial Sequence
  Description of Artificial Sequence: Synthetic oligonucleotide
  Target: LAMA2; (+) strand; PAM type: YTN; PAM sequence: CTG
cagtgagccaagattgcacc

SEQ ID NO: 321710 - DNA, 20 bp, Artificial Sequence
  Description of Artificial Sequence: Synthetic oligonucleotide
  Target: LAMA2; (+) strand; PAM type: YTN; PAM sequence: TTG
caccattgcactccagcctg

SEQ ID NO: 321711 - DNA, 20 bp, Artificial Sequence
  Description of Artificial Sequence: Synthetic oligonucleotide
  Target: LAMA2; (+) strand; PAM type: YTN; PAM sequence: TTG
cactccagcctggccaacag

SEQ ID NO: 321712 - DNA, 20 bp, Artificial Sequence
  Description of Artificial Sequence: Synthetic oligonucleotide
  Target: LAMA2; (+) strand; PAM type: YTN; PAM sequence: CTC
cagcctggccaacagagcga

SEQ ID NO: 321713 - DNA, 20 bp, Artificial Sequence
  Description of Artificial Sequence: Synthetic oligonucleotide
  Target: LAMA2; (+) strand; PAM type: YTN; PAM sequence: CTG
gccaacagagcgagactctg

SEQ ID NO: 321714 - DNA, 20 bp, Artificial Sequence
  Description of Artificial Sequence: Synthetic oligonucleotide
  Target: LAMA2; (+) strand; PAM type: YTN; PAM sequence: CTC
tgtctcaaaagaaaaaaaaa

SEQ ID NO: 321715 - DNA, 20 bp, Artificial Sequence
  Description of Artificial Sequence: Synthetic oligonucleotide
  Target: LAMA2; (+) strand; PAM type: YTN; PAM sequence: CTG
tctcaaaagaaaaaaaaagt

SEQ ID NO: 321716 - DNA, 20 bp, Artificial Sequence
  Description of Artificial Sequence: Synthetic oligonucleotide
  Target: LAMA2; (+) strand; PAM type: YTN; PAM sequence: CTC
aaaagaaaaaaaaagtttat

SEQ ID NO: 321717 - DNA, 20 bp, Artificial Sequence
  Description of Artificial Sequence: Synthetic oligonucleotide
  Target: LAMA2; (+) strand; PAM type: YTN; PAM sequence: TTT
atacctgtaatgagatgaga

SEQ ID NO: 321718 - DNA, 20 bp, Artificial Sequence
  Description of Artificial Sequence: Synthetic oligonucleotide
  Target: LAMA2; (+) strand; PAM type: YTN; PAM sequence: TTA
tacctgtaatgagatgagaa

SEQ ID NO: 321719 - DNA, 20 bp, Artificial Sequence
  Description of Artificial Sequence: Synthetic oligonucleotide
  Target: LAMA2; (+) strand; PAM type: YTN; PAM sequence: CTG
taatgagatgagaagttcag

SEQ ID NO: 321720 - DNA, 20 bp, Artificial Sequence
  Description of Artificial Sequence: Synthetic oligonucleotide
  Target: LAMA2; (+) strand; PAM type: YTN; PAM sequence: TTC
agattttccagtgtgtgttg

SEQ ID NO: 321721 - DNA, 20 bp, Artificial Sequence
  Description of Artificial Sequence: Synthetic oligonucleotide
  Target: LAMA2; (+) strand; PAM type: YTN; PAM sequence: TTT
tccagtgtgtgttgtataaa

SEQ ID NO: 321722 - DNA, 20 bp, Artificial Sequence
  Description of Artificial Sequence: Synthetic oligonucleotide
  Target: LAMA2; (+) strand; PAM type: YTN; PAM sequence: TTT
ccagtgtgtgttgtataaat

SEQ ID NO: 321723 - DNA, 20 bp, Artificial Sequence
  Description of Artificial Sequence: Synthetic oligonucleotide
  Target: LAMA2; (+) strand; PAM type: YTN; PAM sequence: TTC
cagtgtgtgttgtataaatg

SEQ ID NO: 321724 - DNA, 20 bp, Artificial Sequence
  Description of Artificial Sequence: Synthetic oligonucleotide
  Target: LAMA2; (+) strand; PAM type: YTN; PAM sequence: TTG
tataaatgaaggacccaatt

SEQ ID NO: 321725 - DNA, 20 bp, Artificial Sequence
  Description of Artificial Sequence: Synthetic oligonucleotide
  Target: LAMA2; (+) strand; PAM type: YTN; PAM sequence: TTT
tctcagacagaagataaaag

SEQ ID NO: 321726 - DNA, 20 bp, Artificial Sequence
  Description of Artificial Sequence: Synthetic oligonucleotide
  Target: LAMA2; (+) strand; PAM type: YTN; PAM sequence: TTT
ctcagacagaagataaaagg

SEQ ID NO: 321727 - DNA, 20 bp, Artificial Sequence
  Description of Artificial Sequence: Synthetic oligonucleotide
  Target: LAMA2; (+) strand; PAM type: YTN; PAM sequence: TTC
tcagacagaagataaaagga

SEQ ID NO: 321728 - DNA, 20 bp, Artificial Sequence
  Description of Artificial Sequence: Synthetic oligonucleotide
  Target: LAMA2; (+) strand; PAM type: YTN; PAM sequence: CTC
agacagaagataaaaggagt

SEQ ID NO: 321729 - DNA, 20 bp, Artificial Sequence
  Description of Artificial Sequence: Synthetic oligonucleotide
  Target: LAMA2; (+) strand; PAM type: YTN; PAM sequence: TTG
aggttcgtaacgaggtgatt

SEQ ID NO: 321730 - DNA, 20 bp, Artificial Sequence
  Description of Artificial Sequence: Synthetic oligonucleotide
  Target: LAMA2; (+) strand; PAM type: YTN; PAM sequence: TTC
gtaacgaggtgattttaagg

SEQ ID NO: 321731 - DNA, 20 bp, Artificial Sequence
  Description of Artificial Sequence: Synthetic oligonucleotide
  Target: LAMA2; (+) strand; PAM type: YTN; PAM sequence: TTT
taaggatggatcatagaatc

SEQ ID NO: 321732 - DNA, 20 bp, Artificial Sequence
  Description of Artificial Sequence: Synthetic oligonucleotide
  Target: LAMA2; (+) strand; PAM type: YTN; PAM sequence: TTT
aaggatggatcatagaatca

SEQ ID NO: 321733 - DNA, 20 bp, Artificial Sequence
  Description of Artificial Sequence: Synthetic oligonucleotide
  Target: LAMA2; (+) strand; PAM type: YTN; PAM sequence: TTA
aggatggatcatagaatcat

SEQ ID NO: 321734 - DNA, 20 bp, Artificial Sequence
  Description of Artificial Sequence: Synthetic oligonucleotide
  Target: LAMA2; (+) strand; PAM type: YTN; PAM sequence: CTG
agttattataacagagtcca

SEQ ID NO: 321735 - DNA, 20 bp, Artificial Sequence
  Description of Artificial Sequence: Synthetic oligonucleotide
  Target: LAMA2; (+) strand; PAM type: YTN; PAM sequence: TTA
ttataacagagtccaagagt

SEQ ID NO: 321736 - DNA, 20 bp, Artificial Sequence
  Description of Artificial Sequence: Synthetic oligonucleotide
  Target: LAMA2; (+) strand; PAM type: YTN; PAM sequence: TTA
taacagagtccaagagtcag

SEQ ID NO: 321737 - DNA, 20 bp, Artificial Sequence
  Description of Artificial Sequence: Synthetic oligonucleotide
  Target: LAMA2; (+) strand; PAM type: YTN; PAM sequence: CTG
cacagatggggtgggatatg

SEQ ID NO: 321738 - DNA, 20 bp, Artificial Sequence
  Description of Artificial Sequence: Synthetic oligonucleotide
  Target: LAMA2; (+) strand; PAM type: YTN; PAM sequence: CTG
atgcggagaggaggaaaaga

SEQ ID NO: 321739 - DNA, 20 bp, Artificial Sequence
  Description of Artificial Sequence: Synthetic oligonucleotide
  Target: LAMA2; (+) strand; PAM type: YTN; PAM sequence: CTG
ggcacagtcatgttggtaga

SEQ ID NO: 321740 - DNA, 20 bp, Artificial Sequence
  Description of Artificial Sequence: Synthetic oligonucleotide
  Target: LAMA2; (+) strand; PAM type: YTN; PAM sequence: TTG
gtagattttacagttacata

SEQ ID NO: 321741 - DNA, 20 bp, Artificial Sequence
  Description of Artificial Sequence: Synthetic oligonucleotide
  Target: LAMA2; (+) strand; PAM type: YTN; PAM sequence: TTT
tacagttacataaggagagg

SEQ ID NO: 321742 - DNA, 20 bp, Artificial Sequence
  Description of Artificial Sequence: Synthetic oligonucleotide
  Target: LAMA2; (+) strand; PAM type: YTN; PAM sequence: TTT
acagttacataaggagaggt

SEQ ID NO: 321743 - DNA, 20 bp, Artificial Sequence
  Description of Artificial Sequence: Synthetic oligonucleotide
  Target: LAMA2; (+) strand; PAM type: YTN; PAM sequence: TTA
cagttacataaggagaggta

SEQ ID NO: 321744 - DNA, 20 bp, Artificial Sequence
  Description of Artificial Sequence: Synthetic oligonucleotide
  Target: LAMA2; (+) strand; PAM type: YTN; PAM sequence: TTA
cataaggagaggtaggaagg

SEQ ID NO: 321745 - DNA, 20 bp, Artificial Sequence
  Description of Artificial Sequence: Synthetic oligonucleotide
  Target: LAMA2; (+) strand; PAM type: YTN; PAM sequence: TTA
ataatggctggaaggtggtt

SEQ ID NO: 321746 - DNA, 20 bp, Artificial Sequence
  Description of Artificial Sequence: Synthetic oligonucleotide
  Target: LAMA2; (+) strand; PAM type: YTN; PAM sequence: CTG
gaaggtggttttatgaggga

SEQ ID NO: 321747 - DNA, 20 bp, Artificial Sequence
  Description of Artificial Sequence: Synthetic oligonucleotide
  Target: LAMA2; (+) strand; PAM type: YTN; PAM sequence: TTT
tatgagggatgtggattttc

SEQ ID NO: 321748 - DNA, 20 bp, Artificial Sequence
  Description of Artificial Sequence: Synthetic oligonucleotide
  Target: LAMA2; (+) strand; PAM type: YTN; PAM sequence: TTT
atgagggatgtggattttca

SEQ ID NO: 321749 - DNA, 20 bp, Artificial Sequence
  Description of Artificial Sequence: Synthetic oligonucleotide
  Target: LAMA2; (+) strand; PAM type: YTN; PAM sequence: TTA
tgagggatgtggattttcag

SEQ ID NO: 321750 - DNA, 20 bp, Artificial Sequence
  Description of Artificial Sequence: Synthetic oligonucleotide
  Target: LAMA2; (+) strand; PAM type: YTN; PAM sequence: TTT
tcagagagaaagagaaaact

SEQ ID NO: 321751 - DNA, 20 bp, Artificial Sequence
  Description of Artificial Sequence: Synthetic oligonucleotide
  Target: LAMA2; (+) strand; PAM type: YTN; PAM sequence: TTT
cagagagaaagagaaaactg

SEQ ID NO: 321752 - DNA, 20 bp, Artificial Sequence
  Description of Artificial Sequence: Synthetic oligonucleotide
  Target: LAMA2; (+) strand; PAM type: YTN; PAM sequence: TTC
agagagaaagagaaaactga

SEQ ID NO: 321753 - DNA, 20 bp, Artificial Sequence
  Description of Artificial Sequence: Synthetic oligonucleotide
  Target: LAMA2; (+) strand; PAM type: YTN; PAM sequence: CTG
attaagaagtagcatcaaag

SEQ ID NO: 321754 - DNA, 20 bp, Artificial Sequence
  Description of Artificial Sequence: Synthetic oligonucleotide
  Target: LAMA2; (+) strand; PAM type: YTN; PAM sequence: TTA
agaagtagcatcaaagagga

SEQ ID NO: 321755 - DNA, 20 bp, Artificial Sequence
  Description of Artificial Sequence: Synthetic oligonucleotide
  Target: LAMA2; (+) strand; PAM type: YTN; PAM sequence: TTG
atgcacaacctatctctaga

SEQ ID NO: 321756 - DNA, 20 bp, Artificial Sequence
  Description of Artificial Sequence: Synthetic oligonucleotide
  Target: LAMA2; (+) strand; PAM type: YTN; PAM sequence: CTA
tctctagatcttgaaggtct

SEQ ID NO: 321757 - DNA, 20 bp, Artificial Sequence
  Description of Artificial Sequence: Synthetic oligonucleotide
  Target: LAMA2; (+) strand; PAM type: YTN; PAM sequence: CTC
tagatcttgaaggtcttata

SEQ ID NO: 321758 - DNA, 20 bp, Artificial Sequence
  Description of Artificial Sequence: Synthetic oligonucleotide
  Target: LAMA2; (+) strand; PAM type: YTN; PAM sequence: CTA
gatcttgaaggtcttataga

SEQ ID NO: 321759 - DNA, 20 bp, Artificial Sequence
  Description of Artificial Sequence: Synthetic oligonucleotide
  Target: LAMA2; (+) strand; PAM type: YTN; PAM sequence: CTT
gaaggtcttatagaatattg

SEQ ID NO: 321760 - DNA, 20 bp, Artificial Sequence
  Description of Artificial Sequence: Synthetic oligonucleotide
  Target: LAMA2; (+) strand; PAM type: YTN; PAM sequence: TTG
aaggtcttatagaatattgt

SEQ ID NO: 321761 - DNA, 20 bp, Artificial Sequence
  Description of Artificial Sequence: Synthetic oligonucleotide
  Target: LAMA2; (+) strand; PAM type: YTN; PAM sequence: CTT
atagaatattgtttctaagt

SEQ ID NO: 321762 - DNA, 20 bp, Artificial Sequence
  Description of Artificial Sequence: Synthetic oligonucleotide
  Target: LAMA2; (+) strand; PAM type: YTN; PAM sequence: TTA
tagaatattgtttctaagtc

SEQ ID NO: 321763 - DNA, 20 bp, Artificial Sequence
  Description of Artificial Sequence: Synthetic oligonucleotide
  Target: LAMA2; (+) strand; PAM type: YTN; PAM sequence: TTG
tttctaagtcagaagtatga

SEQ ID NO: 321764 - DNA, 20 bp, Artificial Sequence
  Description of Artificial Sequence: Synthetic oligonucleotide
  Target: LAMA2; (+) strand; PAM type: YTN; PAM sequence: TTT
ctaagtcagaagtatgatga

SEQ ID NO: 321765 - DNA, 20 bp, Artificial Sequence
  Description of Artificial Sequence: Synthetic oligonucleotide
  Target: LAMA2; (+) strand; PAM type: YTN; PAM sequence: TTC
taagtcagaagtatgatgac

SEQ ID NO: 321766 - DNA, 20 bp, Artificial Sequence
  Description of Artificial Sequence: Synthetic oligonucleotide
  Target: LAMA2; (+) strand; PAM type: YTN; PAM sequence: CTA
agtcagaagtatgatgacag

SEQ ID NO: 321767 - DNA, 20 bp, Artificial Sequence
  Description of Artificial Sequence: Synthetic oligonucleotide
  Target: LAMA2; (+) strand; PAM type: YTN; PAM sequence: CTC
cgctctacagctcccagtgt

SEQ ID NO: 321768 - DNA, 20 bp, Artificial Sequence
  Description of Artificial Sequence: Synthetic oligonucleotide
  Target: LAMA2; (+) strand; PAM type: YTN; PAM sequence: CTC
tacagctcccagtgtgagcg

SEQ ID NO: 321769 - DNA, 20 bp, Artificial Sequence
  Description of Artificial Sequence: Synthetic oligonucleotide
  Target: LAMA2; (+) strand; PAM type: YTN; PAM sequence: CTA
cagctcccagtgtgagcgac

SEQ ID NO: 321770 - DNA, 20 bp, Artificial Sequence
  Description of Artificial Sequence: Synthetic oligonucleotide
  Target: LAMA2; (+) strand; PAM type: YTN; PAM sequence: CTC
ccagtgtgagcgacgcagaa

SEQ ID NO: 321771 - DNA, 20 bp, Artificial Sequence
  Description of Artificial Sequence: Synthetic oligonucleotide
  Target: LAMA2; (+) strand; PAM type: YTN; PAM sequence: TTT
ctgcatttccatctgaggta

SEQ ID NO: 321772 - DNA, 20 bp, Artificial Sequence
  Description of Artificial Sequence: Synthetic oligonucleotide
  Target: LAMA2; (+) strand; PAM type: YTN; PAM sequence: TTC
tgcatttccatctgaggtac

SEQ ID NO: 321773 - DNA, 20 bp, Artificial Sequence
  Description of Artificial Sequence: Synthetic oligonucleotide
  Target: LAMA2; (+) strand; PAM type: YTN; PAM sequence: CTG
catttccatctgaggtaccg

SEQ ID NO: 321774 - DNA, 20 bp, Artificial Sequence
  Description of Artificial Sequence: Synthetic oligonucleotide
  Target: LAMA2; (+) strand; PAM type: YTN; PAM sequence: TTT
ccatctgaggtaccgggttc

SEQ ID NO: 321775 - DNA, 20 bp, Artificial Sequence
  Description of Artificial Sequence: Synthetic oligonucleotide
  Target: LAMA2; (+) strand; PAM type: YTN; PAM sequence: TTC
catctgaggtaccgggttca

SEQ ID NO: 321776 - DNA, 20 bp, Artificial Sequence
  Description of Artificial Sequence: Synthetic oligonucleotide
  Target: LAMA2; (+) strand; PAM type: YTN; PAM sequence: CTG
aggtaccgggttcatctcac

SEQ ID NO: 321777 - DNA, 20 bp, Artificial Sequence
  Description of Artificial Sequence: Synthetic oligonucleotide
  Target: LAMA2; (+) strand; PAM type: YTN; PAM sequence: TTC
atctcactagggagtgccag

SEQ ID NO: 321778 - DNA, 20 bp, Artificial Sequence
  Description of Artificial Sequence: Synthetic oligonucleotide
  Target: LAMA2; (+) strand; PAM type: YTN; PAM sequence: CTC
actagggagtgccagacagt

SEQ ID NO: 321779 - DNA, 20 bp, Artificial Sequence
  Description of Artificial Sequence: Synthetic oligonucleotide
  Target: LAMA2; (+) strand; PAM type: YTN; PAM sequence: CTA
gggagtgccagacagtgggc

SEQ ID NO: 321780 - DNA, 20 bp, Artificial Sequence
  Description of Artificial Sequence: Synthetic oligonucleotide
  Target: LAMA2; (+) strand; PAM type: YTN; PAM sequence: TTG
cctcacctgggaagcgcaag

SEQ ID NO: 321781 - DNA, 20 bp, Artificial Sequence
  Description of Artificial Sequence: Synthetic oligonucleotide
  Target: LAMA2; (+) strand; PAM type: YTN; PAM sequence: CTC
acctgggaagcgcaaggggt

SEQ ID NO: 321782 - DNA, 20 bp, Artificial Sequence
  Description of Artificial Sequence: Synthetic oligonucleotide
  Target: LAMA2; (+) strand; PAM type: YTN; PAM sequence: CTG
ggaagcgcaaggggtcaggg

SEQ ID NO: 321783 - DNA, 20 bp, Artificial Sequence
  Description of Artificial Sequence: Synthetic oligonucleotide
  Target: LAMA2; (+) strand; PAM type: YTN; PAM sequence: TTC
cctttccgagtcaaagaaag

SEQ ID NO: 321784 - DNA, 20 bp, Artificial Sequence
  Description of Artificial Sequence: Synthetic oligonucleotide
  Target: LAMA2; (+) strand; PAM type: YTN; PAM sequence: CTT
tccgagtcaaagaaaggggt

SEQ ID NO: 321785 - DNA, 20 bp, Artificial Sequence
  Description of Artificial Sequence: Synthetic oligonucleotide
  Target: LAMA2; (+) strand; PAM type: YTN; PAM sequence: TTT
ccgagtcaaagaaaggggtg

SEQ ID NO: 321786 - DNA, 20 bp, Artificial Sequence
  Description of Artificial Sequence: Synthetic oligonucleotide
  Target: LAMA2; (+) strand; PAM type: YTN; PAM sequence: TTC
cgagtcaaagaaaggggtga

SEQ ID NO: 321787 - DNA, 20 bp, Artificial Sequence
  Description of Artificial Sequence: Synthetic oligonucleotide
  Target: LAMA2; (+) strand; PAM type: YTN; PAM sequence: CTG
gaaaatcgggtcactcccac

SEQ ID NO: 321788 - DNA, 20 bp, Artificial Sequence
  Description of Artificial Sequence: Synthetic oligonucleotide
  Target: LAMA2; (+) strand; PAM type: YTN; PAM sequence: CTC
ccacccgaatattgcgcttt

SEQ ID NO: 321789 - DNA, 20 bp, Artificial Sequence
  Description of Artificial Sequence: Synthetic oligonucleotide
  Target: LAMA2; (+) strand; PAM type: YTN; PAM sequence: TTG
cgcttttcagaccggcttaa

SEQ ID NO: 321790 - DNA, 20 bp, Artificial Sequence
  Description of Artificial Sequence: Synthetic oligonucleotide
  Target: LAMA2; (+) strand; PAM type: YTN; PAM sequence: CTT
ttcagaccggcttaagaaac

SEQ ID NO: 321791 - DNA, 20 bp, Artificial Sequence
  Description of Artificial Sequence: Synthetic oligonucleotide
  Target: LAMA2; (+) strand; PAM type: YTN; PAM sequence: TTT
tcagaccggcttaagaaacg

SEQ ID NO: 321792 - DNA, 20 bp, Artificial Sequence
  Description of Artificial Sequence: Synthetic oligonucleotide
  Target: LAMA2; (+) strand; PAM type: YTN; PAM sequence: TTT
cagaccggcttaagaaacgg

SEQ ID NO: 321793 - DNA, 20 bp, Artificial Sequence
  Description of Artificial Sequence: Synthetic oligonucleotide
  Target: LAMA2; (+) strand; PAM type: YTN; PAM sequence: TTC
agaccggcttaagaaacggc

SEQ ID NO: 321794 - DNA, 20 bp, Artificial Sequence
  Description of Artificial Sequence: Synthetic oligonucleotide
  Target: LAMA2; (+) strand; PAM type: YTN; PAM sequence: CTT
aagaaacggcgcaccacgag

SEQ ID NO: 321795 - DNA, 20 bp, Artificial Sequence
  Description of Artificial Sequence: Synthetic oligonucleotide
  Target: LAMA2; (+) strand; PAM type: YTN; PAM sequence: TTA
agaaacggcgcaccacgaga

SEQ ID NO: 321796 - DNA, 20 bp, Artificial Sequence
  Description of Artificial Sequence: Synthetic oligonucleotide
  Target: LAMA2; (+) strand; PAM type: YTN; PAM sequence: CTA
tatcccacacctggctcgga

SEQ ID NO: 321797 - DNA, 20 bp, Artificial Sequence
  Description of Artificial Sequence: Synthetic oligonucleotide
  Target: LAMA2; (+) strand; PAM type: YTN; PAM sequence: CTG
gctcggagggtcctacgccc

SEQ ID NO: 321798 - DNA, 20 bp, Artificial Sequence
  Description of Artificial Sequence: Synthetic oligonucleotide
  Target: LAMA2; (+) strand; PAM type: YTN; PAM sequence: CTC
ggagggtcctacgcccacgg

SEQ ID NO: 321799 - DNA, 20 bp, Artificial Sequence
  Description of Artificial Sequence: Synthetic oligonucleotide
  Target: LAMA2; (+) strand; PAM type: YTN; PAM sequence: CTA
cgcccacggaatctcgctga

SEQ ID NO: 321800 - DNA, 20 bp, Artificial Sequence
  Description of Artificial Sequence: Synthetic oligonucleotide
  Target: LAMA2; (+) strand; PAM type: YTN; PAM sequence: CTC
gctgattgctagcacagcag

SEQ ID NO: 321801 - DNA, 20 bp, Artificial Sequence
  Description of Artificial Sequence: Synthetic oligonucleotide
  Target: LAMA2; (+) strand; PAM type: YTN; PAM sequence: CTG
attgctagcacagcagtctg

SEQ ID NO: 321802 - DNA, 20 bp, Artificial Sequence
  Description of Artificial Sequence: Synthetic oligonucleotide
  Target: LAMA2; (+) strand; PAM type: YTN; PAM sequence: TTG
ctagcacagcagtctgagat

SEQ ID NO: 321803 - DNA, 20 bp, Artificial Sequence
  Description of Artificial Sequence: Synthetic oligonucleotide
  Target: LAMA2; (+) strand; PAM type: YTN; PAM sequence: CTA
gcacagcagtctgagatcaa

SEQ ID NO: 321804 - DNA, 20 bp, Artificial Sequence
  Description of Artificial Sequence: Synthetic oligonucleotide
  Target: LAMA2; (+) strand; PAM type: YTN; PAM sequence: CTG
agatcaaactgcaaggcggc

SEQ ID NO: 321805 - DNA, 20 bp, Artificial Sequence
  Description of Artificial Sequence: Synthetic oligonucleotide
  Target: LAMA2; (+) strand; PAM type: YTN; PAM sequence: CTG
caaggcggcaacgaggctgg

SEQ ID NO: 321806 - DNA, 20 bp, Artificial Sequence
  Description of Artificial Sequence: Synthetic oligonucleotide
  Target: LAMA2; (+) strand; PAM type: YTN; PAM sequence: CTG
ggggaggggcgcccgccatt

SEQ ID NO: 321807 - DNA, 20 bp, Artificial Sequence
  Description of Artificial Sequence: Synthetic oligonucleotide
  Target: LAMA2; (+) strand; PAM type: YTN; PAM sequence: TTG
cccaggcttgcttaggtaaa

SEQ ID NO: 321808 - DNA, 20 bp, Artificial Sequence
  Description of Artificial Sequence: Synthetic oligonucleotide
  Target: LAMA2; (+) strand; PAM type: YTN; PAM sequence: CTT
gcttaggtaaacaaagcagc

SEQ ID NO: 321809 - DNA, 20 bp, Artificial Sequence
  Description of Artificial Sequence: Synthetic oligonucleotide
  Target: LAMA2; (+) strand; PAM type: YTN; PAM sequence: TTG
cttaggtaaacaaagcagcc

SEQ ID NO: 321810 - DNA, 20 bp, Artificial Sequence
  Description of Artificial Sequence: Synthetic oligonucleotide
  Target: LAMA2; (+) strand; PAM type: YTN; PAM sequence: CTT
aggtaaacaaagcagccggg

SEQ ID NO: 321811 - DNA, 20 bp, Artificial Sequence
  Description of Artificial Sequence: Synthetic oligonucleotide
  Target: LAMA2; (+) strand; PAM type: YTN; PAM sequence: TTA
ggtaaacaaagcagccggga

SEQ ID NO: 321812 - DNA, 20 bp, Artificial Sequence
  Description of Artificial Sequence: Synthetic oligonucleotide
  Target: LAMA2; (+) strand; PAM type: YTN; PAM sequence: CTC
gaactgggtggagcccacca

SEQ ID NO: 321813 - DNA, 20 bp, Artificial Sequence
  Description of Artificial Sequence: Synthetic oligonucleotide
  Target: LAMA2; (+) strand; PAM type: YTN; PAM sequence: CTG
ggtggagcccaccacagctc

SEQ ID NO: 321814 - DNA, 20 bp, Artificial Sequence
  Description of Artificial Sequence: Synthetic oligonucleotide
  Target: LAMA2; (+) strand; PAM type: YTN; PAM sequence: CTC
aaggaggcctgcctgcctct

SEQ ID NO: 321815 - DNA, 20 bp, Artificial Sequence
  Description of Artificial Sequence: Synthetic oligonucleotide
  Target: LAMA2; (+) strand; PAM type: YTN; PAM sequence: CTG
cctgcctctgtaggctccac

SEQ ID NO: 321816 - DNA, 20 bp, Artificial Sequence
  Description of Artificial Sequence: Synthetic oligonucleotide
  Target: LAMA2; (+) strand; PAM type: YTN; PAM sequence: CTG
cctctgtaggctccacctct

SEQ ID NO: 321817 - DNA, 20 bp, Artificial Sequence
  Description of Artificial Sequence: Synthetic oligonucleotide
  Target: LAMA2; (+) strand; PAM type: YTN; PAM sequence: CTC
tgtaggctccacctctgggg

SEQ ID NO: 321818 - DNA, 20 bp, Artificial Sequence
  Description of Artificial Sequence: Synthetic oligonucleotide
  Target: LAMA2; (+) strand; PAM type: YTN; PAM sequence: CTG
taggctccacctctgggggc

SEQ ID NO: 321819 - DNA, 20 bp, Artificial Sequence
  Description of Artificial Sequence: Synthetic oligonucleotide
  Target: LAMA2; (+) strand; PAM type: YTN; PAM sequence: CTC
cacctctgggggcagggcac

SEQ ID NO: 321820 - DNA, 20 bp, Artificial Sequence
  Description of Artificial Sequence: Synthetic oligonucleotide
  Target: LAMA2; (+) strand; PAM type: YTN; PAM sequence: CTC
tgggggcagggcacagacaa

SEQ ID NO: 321821 - DNA, 20 bp, Artificial Sequence
  Description of Artificial Sequence: Synthetic oligonucleotide
  Target: LAMA2; (+) strand; PAM type: YTN; PAM sequence: CTG
ggggcagggcacagacaaac

SEQ ID NO: 321822 - DNA, 20 bp, Artificial Sequence
  Description of Artificial Sequence: Synthetic oligonucleotide
  Target: LAMA2; (+) strand; PAM type: YTN; PAM sequence: CTC
tgcagacttaagtgtccctg

SEQ ID NO: 321823 - DNA, 20 bp, Artificial Sequence
  Description of Artificial Sequence: Synthetic oligonucleotide
  Target: LAMA2; (+) strand; PAM type: YTN; PAM sequence: CTG
cagacttaagtgtccctgtc

SEQ ID NO: 321824 - DNA, 20 bp, Artificial Sequence
  Description of Artificial Sequence: Synthetic oligonucleotide
  Target: LAMA2; (+) strand; PAM type: YTN; PAM sequence: CTT
aagtgtccctgtctgacagc

SEQ ID NO: 321825 - DNA, 20 bp, Artificial Sequence
  Description of Artificial Sequence: Synthetic oligonucleotide
  Target: LAMA2; (+) strand; PAM type: YTN; PAM sequence: TTA
agtgtccctgtctgacagct

SEQ ID NO: 321826 - DNA, 20 bp, Artificial Sequence
  Description of Artificial Sequence: Synthetic oligonucleotide
  Target: LAMA2; (+) strand; PAM type: YTN; PAM sequence: CTG
tctgacagctttgaagagag

SEQ ID NO: 321827 - DNA, 20 bp, Artificial Sequence
  Description of Artificial Sequence: Synthetic oligonucleotide
  Target: LAMA2; (+) strand; PAM type: YTN; PAM sequence: CTG
acagctttgaagagagcagt

SEQ ID NO: 321828 - DNA, 20 bp, Artificial Sequence
  Description of Artificial Sequence: Synthetic oligonucleotide
  Target: LAMA2; (+) strand; PAM type: YTN; PAM sequence: CTT
tgaagagagcagtggttctc

SEQ ID NO: 321829 - DNA, 20 bp, Artificial Sequence
  Description of Artificial Sequence: Synthetic oligonucleotide
  Target: LAMA2; (+) strand; PAM type: YTN; PAM sequence: TTT
gaagagagcagtggttctcc

SEQ ID NO: 321830 - DNA, 20 bp, Artificial Sequence
  Description of Artificial Sequence: Synthetic oligonucleotide
  Target: LAMA2; (+) strand; PAM type: YTN; PAM sequence: TTG
aagagagcagtggttctccc

SEQ ID NO: 321831 - DNA, 20 bp, Artificial Sequence
  Description of Artificial Sequence: Synthetic oligonucleotide
  Target: LAMA2; (+) strand; PAM type: YTN; PAM sequence: TTC
tcccagtacgcagctggaga

SEQ ID NO: 321832 - DNA, 20 bp, Artificial Sequence
  Description of Artificial Sequence: Synthetic oligonucleotide
  Target: LAMA2; (+) strand; PAM type: YTN; PAM sequence: CTC
ccagtacgcagctggagatc

SEQ ID NO: 321833 - DNA, 20 bp, Artificial Sequence
  Description of Artificial Sequence: Synthetic oligonucleotide
  Target: LAMA2; (+) strand; PAM type: YTN; PAM sequence: CTG
gagatctgagaatgggcaga

SEQ ID NO: 321834 - DNA, 20 bp, Artificial Sequence
  Description of Artificial Sequence: Synthetic oligonucleotide
  Target: LAMA2; (+) strand; PAM type: YTN; PAM sequence: CTG
agaatgggcagactgcctcc

SEQ ID NO: 321835 - DNA, 20 bp, Artificial Sequence
  Description of Artificial Sequence: Synthetic oligonucleotide
  Target: LAMA2; (+) strand; PAM type: YTN; PAM sequence: CTG
cctcctcaagtgggtccctg

SEQ ID NO: 321836 - DNA, 20 bp, Artificial Sequence
  Description of Artificial Sequence: Synthetic oligonucleotide
  Target: LAMA2; (+) strand; PAM type: YTN; PAM sequence: CTC
ctcaagtgggtccctgactc

SEQ ID NO: 321837 - DNA, 20 bp, Artificial Sequence
  Description of Artificial Sequence: Synthetic oligonucleotide
  Target: LAMA2; (+) strand; PAM type: YTN; PAM sequence: CTC
aagtgggtccctgactcctg

SEQ ID NO: 321838 - DNA, 20 bp, Artificial Sequence
  Description of Artificial Sequence: Synthetic oligonucleotide
  Target: LAMA2; (+) strand; PAM type: YTN; PAM sequence: CTG
actcctgacccccgagcagc

SEQ ID NO: 321839 - DNA, 20 bp, Artificial Sequence
  Description of Artificial Sequence: Synthetic oligonucleotide
  Target: LAMA2; (+) strand; PAM type: YTN; PAM sequence: CTC
ctgacccccgagcagcctaa

SEQ ID NO: 321840 - DNA, 20 bp, Artificial Sequence
  Description of Artificial Sequence: Synthetic oligonucleotide
  Target: LAMA2; (+) strand; PAM type: YTN; PAM sequence: CTG
acccccgagcagcctaactg

SEQ ID NO: 321841 - DNA, 20 bp, Artificial Sequence
  Description of Artificial Sequence: Synthetic oligonucleotide
  Target: LAMA2; (+) strand; PAM type: YTN; PAM sequence: CTA
actgggaggcaccccccagc

SEQ ID NO: 321842 - DNA, 20 bp, Artificial Sequence
  Description of Artificial Sequence: Synthetic oligonucleotide
  Target: LAMA2; (+) strand; PAM type: YTN; PAM sequence: CTG
ggaggcaccccccagcaggg

SEQ ID NO: 321843 - DNA, 20 bp, Artificial Sequence
  Description of Artificial Sequence: Synthetic oligonucleotide
  Target: LAMA2; (+) strand; PAM type: YTN; PAM sequence: CTG
acacctcacacggcagggta

SEQ ID NO: 321844 - DNA, 20 bp, Artificial Sequence
  Description of Artificial Sequence: Synthetic oligonucleotide
  Target: LAMA2; (+) strand; PAM type: YTN; PAM sequence: CTC
acacggcagggtattccaac

SEQ ID NO: 321845 - DNA, 20 bp, Artificial Sequence
  Description of Artificial Sequence: Synthetic oligonucleotide
  Target: LAMA2; (+) strand; PAM type: YTN; PAM sequence: TTC
caacagacctgcagctgagg

SEQ ID NO: 321846 - DNA, 20 bp, Artificial Sequence
  Description of Artificial Sequence: Synthetic oligonucleotide
  Target: LAMA2; (+) strand; PAM type: YTN; PAM sequence: CTG
cagctgagggtcctgtctgt

SEQ ID NO: 321847 - DNA, 20 bp, Artificial Sequence
  Description of Artificial Sequence: Synthetic oligonucleotide
  Target: LAMA2; (+) strand; PAM type: YTN; PAM sequence: CTG
agggtcctgtctgttagaag

SEQ ID NO: 321848 - DNA, 20 bp, Artificial Sequence
  Description of Artificial Sequence: Synthetic oligonucleotide
  Target: LAMA2; (+) strand; PAM type: YTN; PAM sequence: CTG
tctgttagaaggaaaactaa

SEQ ID NO: 321849 - DNA, 20 bp, Artificial Sequence
  Description of Artificial Sequence: Synthetic oligonucleotide
  Target: LAMA2; (+) strand; PAM type: YTN; PAM sequence: CTG
ttagaaggaaaactaacaac

SEQ ID NO: 321850 - DNA, 20 bp, Artificial Sequence
  Description of Artificial Sequence: Synthetic oligonucleotide
  Target: LAMA2; (+) strand; PAM type: YTN; PAM sequence: TTA
gaaggaaaactaacaaccag

SEQ ID NO: 321851 - DNA, 20 bp, Artificial Sequence
  Description of Artificial Sequence: Synthetic oligonucleotide
  Target: LAMA2; (+) strand; PAM type: YTN; PAM sequence: CTA
acaaccagaaaggacatcta

SEQ ID NO: 321852 - DNA, 20 bp, Artificial Sequence
  Description of Artificial Sequence: Synthetic oligonucleotide
  Target: LAMA2; (+) strand; PAM type: YTN; PAM sequence: CTA
caccgaaaacccatctgtac

SEQ ID NO: 321853 - DNA, 20 bp, Artificial Sequence
  Description of Artificial Sequence: Synthetic oligonucleotide
  Target: LAMA2; (+) strand; PAM type: YTN; PAM sequence: CTG
tacatcaccatcatcaaaga

SEQ ID NO: 321854 - DNA, 20 bp, Artificial Sequence
  Description of Artificial Sequence: Synthetic oligonucleotide
  Target: LAMA2; (+) strand; PAM type: YTN; PAM sequence: CTG
gaaactctaaaacgcagagc

SEQ ID NO: 321855 - DNA, 20 bp, Artificial Sequence
  Description of Artificial Sequence: Synthetic oligonucleotide
  Target: LAMA2; (+) strand; PAM type: YTN; PAM sequence: CTC
taaaacgcagagcgcctctc

SEQ ID NO: 321856 - DNA, 20 bp, Artificial Sequence
  Description of Artificial Sequence: Synthetic oligonucleotide
  Target: LAMA2; (+) strand; PAM type: YTN; PAM sequence: CTA
aaacgcagagcgcctctcct

SEQ ID NO: 321857 - DNA, 20 bp, Artificial Sequence
  Description of Artificial Sequence: Synthetic oligonucleotide
  Target: LAMA2; (+) strand; PAM type: YTN; PAM sequence: CTC
tcctcctccaaaggaacgca

SEQ ID NO: 321858 - DNA, 20 bp, Artificial Sequence
  Description of Artificial Sequence: Synthetic oligonucleotide
  Target: LAMA2; (+) strand; PAM type: YTN; PAM sequence: CTC
ctcctccaaaggaacgcagt

SEQ ID NO: 321859 - DNA, 20 bp, Artificial Sequence
  Description of Artificial Sequence: Synthetic oligonucleotide
  Target: LAMA2; (+) strand; PAM type: YTN; PAM sequence: CTC
ctccaaaggaacgcagttcc

SEQ ID NO: 321860 - DNA, 20 bp, Artificial Sequence
  Description of Artificial Sequence: Synthetic oligonucleotide
  Target: LAMA2; (+) strand; PAM type: YTN; PAM sequence: CTC
caaaggaacgcagttcctca

SEQ ID NO: 321861 - DNA, 20 bp, Artificial Sequence
  Description of Artificial Sequence: Synthetic oligonucleotide
  Target: LAMA2; (+) strand; PAM type: YTN; PAM sequence: TTC
ctcaccagcaacagaacaaa

SEQ ID NO: 321862 - DNA, 20 bp, Artificial Sequence
  Description of Artificial Sequence: Synthetic oligonucleotide
  Target: LAMA2; (+) strand; PAM type: YTN; PAM sequence: CTC
accagcaacagaacaaagct

SEQ ID NO: 321863 - DNA, 20 bp, Artificial Sequence
  Description of Artificial Sequence: Synthetic oligonucleotide
  Target: LAMA2; (+) strand; PAM type: YTN; PAM sequence: CTG
gatggagaatgattttgacg

SEQ ID NO: 321864 - DNA, 20 bp, Artificial Sequence
  Description of Artificial Sequence: Synthetic oligonucleotide
  Target: LAMA2; (+) strand; PAM type: YTN; PAM sequence: TTT
tgacgagctgagagaagaag

SEQ ID NO: 321865 - DNA, 20 bp, Artificial Sequence
  Description of Artificial Sequence: Synthetic oligonucleotide
  Target: LAMA2; (+) strand; PAM type: YTN; PAM sequence: TTT
gacgagctgagagaagaagg

SEQ ID NO: 321866 - DNA, 20 bp, Artificial Sequence
  Description of Artificial Sequence: Synthetic oligonucleotide
  Target: LAMA2; (+) strand; PAM type: YTN; PAM sequence: TTG
acgagctgagagaagaaggc

SEQ ID NO: 321867 - DNA, 20 bp, Artificial Sequence
  Description of Artificial Sequence: Synthetic oligonucleotide
  Target: LAMA2; (+) strand; PAM type: YTN; PAM sequence: CTG
agagaagaaggcttcagacg

SEQ ID NO: 321868 - DNA, 20 bp, Artificial Sequence
  Description of Artificial Sequence: Synthetic oligonucleotide
  Target: LAMA2; (+) strand; PAM type: YTN; PAM sequence: CTT
cagacgatcaaattactctg

SEQ ID NO: 321869 - DNA, 20 bp, Artificial Sequence
  Description of Artificial Sequence: Synthetic oligonucleotide
  Target: LAMA2; (+) strand; PAM type: YTN; PAM sequence: TTC
agacgatcaaattactctga

SEQ ID NO: 321870 - DNA, 20 bp, Artificial Sequence
  Description of Artificial Sequence: Synthetic oligonucleotide
  Target: LAMA2; (+) strand; PAM type: YTN; PAM sequence: TTA
ctctgagctacgggaggaca

SEQ ID NO: 321871 - DNA, 20 bp, Artificial Sequence
  Description of Artificial Sequence: Synthetic oligonucleotide
  Target: LAMA2; (+) strand; PAM type: YTN; PAM sequence: CTC
tgagctacgggaggacattc

SEQ ID NO: 321872 - DNA, 20 bp, Artificial Sequence
  Description of Artificial Sequence: Synthetic oligonucleotide
  Target: LAMA2; (+) strand; PAM type: YTN; PAM sequence: CTG
agctacgggaggacattcaa

SEQ ID NO: 321873 - DNA, 20 bp, Artificial Sequence
  Description of Artificial Sequence: Synthetic oligonucleotide
  Target: LAMA2; (+) strand; PAM type: YTN; PAM sequence: CTA
cgggaggacattcaaaccaa

SEQ ID NO: 321874 - DNA, 20 bp, Artificial Sequence
  Description of Artificial Sequence: Synthetic oligonucleotide
  Target: LAMA2; (+) strand; PAM type: YTN; PAM sequence: TTC
aaaccaaaggcaaagaagtt

SEQ ID NO: 321875 - DNA, 20 bp, Artificial Sequence
  Description of Artificial Sequence: Synthetic oligonucleotide
  Target: LAMA2; (+) strand; PAM type: YTN; PAM sequence: TTG
aaaactttgaaaaaaattta

SEQ ID NO: 321876 - DNA, 20 bp, Artificial Sequence
  Description of Artificial Sequence: Synthetic oligonucleotide
  Target: LAMA2; (+) strand; PAM type: YTN; PAM sequence: CTT
tgaaaaaaatttagaagaat

SEQ ID NO: 321877 - DNA, 20 bp, Artificial Sequence
  Description of Artificial Sequence: Synthetic oligonucleotide
  Target: LAMA2; (+) strand; PAM type: YTN; PAM sequence: TTT
gaaaaaaatttagaagaatg

SEQ ID NO: 321878 - DNA, 20 bp, Artificial Sequence
  Description of Artificial Sequence: Synthetic oligonucleotide
  Target: LAMA2; (+) strand; PAM type: YTN; PAM sequence: TTG
aaaaaaatttagaagaatgt

SEQ ID NO: 321879 - DNA, 20 bp, Artificial Sequence
  Description of Artificial Sequence: Synthetic oligonucleotide
  Target: LAMA2; (+) strand; PAM type: YTN; PAM sequence: TTT
agaagaatgtataactagaa

SEQ ID NO: 321880 - DNA, 20 bp, Artificial Sequence
  Description of Artificial Sequence: Synthetic oligonucleotide
  Target: LAMA2; (+) strand; PAM type: YTN; PAM sequence: TTA
gaagaatgtataactagaat

SEQ ID NO: 321881 - DNA, 20 bp, Artificial Sequence
  Description of Artificial Sequence: Synthetic oligonucleotide
  Target: LAMA2; (+) strand; PAM type: YTN; PAM sequence: CTA
gaataaccaatacagagaag

SEQ ID NO: 321882 - DNA, 20 bp, Artificial Sequence
  Description of Artificial Sequence: Synthetic oligonucleotide
  Target: LAMA2; (+) strand; PAM type: YTN; PAM sequence: CTT
aaaggagctgatggagctga

SEQ ID NO: 321883 - DNA, 20 bp, Artificial Sequence
  Description of Artificial Sequence: Synthetic oligonucleotide
  Target: LAMA2; (+) strand; PAM type: YTN; PAM sequence: TTA
aaggagctgatggagctgaa

SEQ ID NO: 321884 - DNA, 20 bp, Artificial Sequence
  Description of Artificial Sequence: Synthetic oligonucleotide
  Target: LAMA2; (+) strand; PAM type: YTN; PAM sequence: CTG
atggagctgaaaaccaaggc

SEQ ID NO: 321885 - DNA, 20 bp, Artificial Sequence
  Description of Artificial Sequence: Synthetic oligonucleotide
  Target: LAMA2; (+) strand; PAM type: YTN; PAM sequence: CTG
aaaaccaaggctcgagaact

SEQ ID NO: 321886 - DNA, 20 bp, Artificial Sequence
  Description of Artificial Sequence: Synthetic oligonucleotide
  Target: LAMA2; (+) strand; PAM type: YTN; PAM sequence: CTC
gagaactacgtgaagaatgc

SEQ ID NO: 321887 - DNA, 20 bp, Artificial Sequence
  Description of Artificial Sequence: Synthetic oligonucleotide
  Target: LAMA2; (+) strand; PAM type: YTN; PAM sequence: CTA
cgtgaagaatgcagaagcct

SEQ ID NO: 321888 - DNA, 20 bp, Artificial Sequence
  Description of Artificial Sequence: Synthetic oligonucleotide
  Target: LAMA2; (+) strand; PAM type: YTN; PAM sequence: CTC
aggagccgatgcgatcaact

SEQ ID NO: 321889 - DNA, 20 bp, Artificial Sequence
  Description of Artificial Sequence: Synthetic oligonucleotide
  Target: LAMA2; (+) strand; PAM type: YTN; PAM sequence: CTG
gaagaaagggtatcagcaat

SEQ ID NO: 321890 - DNA, 20 bp, Artificial Sequence
  Description of Artificial Sequence: Synthetic oligonucleotide
  Target: LAMA2; (+) strand; PAM type: YTN; PAM sequence: TTT
agagaaaaaagaataaaaag

SEQ ID NO: 321891 - DNA, 20 bp, Artificial Sequence
  Description of Artificial Sequence: Synthetic oligonucleotide
  Target: LAMA2; (+) strand; PAM type: YTN; PAM sequence: TTA
gagaaaaaagaataaaaaga

SEQ ID NO: 321892 - DNA, 20 bp, Artificial Sequence
  Description of Artificial Sequence: Synthetic oligonucleotide
  Target: LAMA2; (+) strand; PAM type: YTN; PAM sequence: CTC
caagaaatatgggactatgt

SEQ ID NO: 321893 - DNA, 20 bp, Artificial Sequence
  Description of Artificial Sequence: Synthetic oligonucleotide
  Target: LAMA2; (+) strand; PAM type: YTN; PAM sequence: CTA
tgtgaaaagaccaaatctac

SEQ ID NO: 321894 - DNA, 20 bp, Artificial Sequence
  Description of Artificial Sequence: Synthetic oligonucleotide
  Target: LAMA2; (+) strand; PAM type: YTN; PAM sequence: CTA
cgtctgattggtgtacctga

SEQ ID NO: 321895 - DNA, 20 bp, Artificial Sequence
  Description of Artificial Sequence: Synthetic oligonucleotide
  Target: LAMA2; (+) strand; PAM type: YTN; PAM sequence: CTG
attggtgtacctgaaagtga

SEQ ID NO: 321896 - DNA, 20 bp, Artificial Sequence
  Description of Artificial Sequence: Synthetic oligonucleotide
  Target: LAMA2; (+) strand; PAM type: YTN; PAM sequence: TTG
gtgtacctgaaagtgatgtg

SEQ ID NO: 321897 - DNA, 20 bp, Artificial Sequence
  Description of Artificial Sequence: Synthetic oligonucleotide
  Target: LAMA2; (+) strand; PAM type: YTN; PAM sequence: CTG
aaagtgatgtggagaatgaa

SEQ ID NO: 321898 - DNA, 20 bp, Artificial Sequence
  Description of Artificial Sequence: Synthetic oligonucleotide
  Target: LAMA2; (+) strand; PAM type: YTN; PAM sequence: TTG
gaaaacactctgcaggatat

SEQ ID NO: 321899 - DNA, 20 bp, Artificial Sequence
  Description of Artificial Sequence: Synthetic oligonucleotide
  Target: LAMA2; (+) strand; PAM type: YTN; PAM sequence: CTC
tgcaggatattatccaggag

SEQ ID NO: 321900 - DNA, 20 bp, Artificial Sequence
  Description of Artificial Sequence: Synthetic oligonucleotide
  Target: LAMA2; (+) strand; PAM type: YTN; PAM sequence: CTG
caggatattatccaggagaa

SEQ ID NO: 321901 - DNA, 20 bp, Artificial Sequence
  Description of Artificial Sequence: Synthetic oligonucleotide
  Target: LAMA2; (+) strand; PAM type: YTN; PAM sequence: TTA
tccaggagaacttccccaat

SEQ ID NO: 321902 - DNA, 20 bp, Artificial Sequence
  Description of Artificial Sequence: Synthetic oligonucleotide
  Target: LAMA2; (+) strand; PAM type: YTN; PAM sequence: CTT
ccccaatctagcaaggcagg

SEQ ID NO: 321903 - DNA, 20 bp, Artificial Sequence
  Description of Artificial Sequence: Synthetic oligonucleotide
  Target: LAMA2; (+) strand; PAM type: YTN; PAM sequence: TTC
cccaatctagcaaggcaggc

SEQ ID NO: 321904 - DNA, 20 bp, Artificial Sequence
  Description of Artificial Sequence: Synthetic oligonucleotide
  Target: LAMA2; (+) strand; PAM type: YTN; PAM sequence: CTA
gcaaggcaggccaacgttca

SEQ ID NO: 321905 - DNA, 20 bp, Artificial Sequence
  Description of Artificial Sequence: Synthetic oligonucleotide
  Target: LAMA2; (+) strand; PAM type: YTN; PAM sequence: TTC
agattcaggaaatacagaga

SEQ ID NO: 321906 - DNA, 20 bp, Artificial Sequence
  Description of Artificial Sequence: Synthetic oligonucleotide
  Target: LAMA2; (+) strand; PAM type: YTN; PAM sequence: TTC
aggaaatacagagaacgcca

SEQ ID NO: 321907 - DNA, 20 bp, Artificial Sequence
  Description of Artificial Sequence: Synthetic oligonucleotide
  Target: LAMA2; (+) strand; PAM type: YTN; PAM sequence: CTC
ctcgagaagagcaactccaa

SEQ ID NO: 321908 - DNA, 20 bp, Artificial Sequence
  Description of Artificial Sequence: Synthetic oligonucleotide
  Target: LAMA2; (+) strand; PAM type: YTN; PAM sequence: CTC
gagaagagcaactccaagac

SEQ ID NO: 321909 - DNA, 20 bp, Artificial Sequence
  Description of Artificial Sequence: Synthetic oligonucleotide
  Target: LAMA2; (+) strand; PAM type: YTN; PAM sequence: CTC
caagacacataattgtcaga

SEQ ID NO: 321910 - DNA, 20 bp, Artificial Sequence
  Description of Artificial Sequence: Synthetic oligonucleotide
  Target: LAMA2; (+) strand; PAM type: YTN; PAM sequence: TTG
tcagattcaccaaagttgaa

SEQ ID NO: 321911 - DNA, 20 bp, Artificial Sequence
  Description of Artificial Sequence: Synthetic oligonucleotide
  Target: LAMA2; (+) strand; PAM type: YTN; PAM sequence: TTC
accaaagttgaaatgaagga

SEQ ID NO: 321912 - DNA, 20 bp, Artificial Sequence
  Description of Artificial Sequence: Synthetic oligonucleotide
  Target: LAMA2; (+) strand; PAM type: YTN; PAM sequence: TTG
aaatgaaggaaaaaatgtta

SEQ ID NO: 321913 - DNA, 20 bp, Artificial Sequence
  Description of Artificial Sequence: Synthetic oligonucleotide
  Target: LAMA2; (+) strand; PAM type: YTN; PAM sequence: TTA
agggcagccagagagaaagg

SEQ ID NO: 321914 - DNA, 20 bp, Artificial Sequence
  Description of Artificial Sequence: Synthetic oligonucleotide
  Target: LAMA2; (+) strand; PAM type: YTN; PAM sequence: TTA
ccctcaaaggaaagcccatc

SEQ ID NO: 321915 - DNA, 20 bp, Artificial Sequence
  Description of Artificial Sequence: Synthetic oligonucleotide
  Target: LAMA2; (+) strand; PAM type: YTN; PAM sequence: CTC
aaaggaaagcccatcagact

SEQ ID NO: 321916 - DNA, 20 bp, Artificial Sequence
  Description of Artificial Sequence: Synthetic oligonucleotide
  Target: LAMA2; (+) strand; PAM type: YTN; PAM sequence: CTA
acagcggatctctcggcaga

SEQ ID NO: 321917 - DNA, 20 bp, Artificial Sequence
  Description of Artificial Sequence: Synthetic oligonucleotide
  Target: LAMA2; (+) strand; PAM type: YTN; PAM sequence: CTC
tcggcagaaaccctacaagc

SEQ ID NO: 321918 - DNA, 20 bp, Artificial Sequence
  Description of Artificial Sequence: Synthetic oligonucleotide
  Target: LAMA2; (+) strand; PAM type: YTN; PAM sequence: CTC
ggcagaaaccctacaagcca

SEQ ID NO: 321919 - DNA, 20 bp, Artificial Sequence
  Description of Artificial Sequence: Synthetic oligonucleotide
  Target: LAMA2; (+) strand; PAM type: YTN; PAM sequence: CTA
caagccagaagagagtgggg

SEQ ID NO: 321920 - DNA, 20 bp, Artificial Sequence
  Description of Artificial Sequence: Synthetic oligonucleotide
  Target: LAMA2; (+) strand; PAM type: YTN; PAM sequence: TTC
aacattcttaaagaaaagaa

SEQ ID NO: 321921 - DNA, 20 bp, Artificial Sequence
  Description of Artificial Sequence: Synthetic oligonucleotide
  Target: LAMA2; (+) strand; PAM type: YTN; PAM sequence: TTC
ttaaagaaaagaattttcaa

SEQ ID NO: 321922 - DNA, 20 bp, Artificial Sequence
  Description of Artificial Sequence: Synthetic oligonucleotide
  Target: LAMA2; (+) strand; PAM type: YTN; PAM sequence: CTT
aaagaaaagaattttcaacc

SEQ ID NO: 321923 - DNA, 20 bp, Artificial Sequence
  Description of Artificial Sequence: Synthetic oligonucleotide
  Target: LAMA2; (+) strand; PAM type: YTN; PAM sequence: TTA
aagaaaagaattttcaaccc

SEQ ID NO: 321924 - DNA, 20 bp, Artificial Sequence
  Description of Artificial Sequence: Synthetic oligonucleotide
  Target: LAMA2; (+) strand; PAM type: YTN; PAM sequence: TTT
tcaacccagaatttcatatc

SEQ ID NO: 321925 - DNA, 20 bp, Artificial Sequence
  Description of Artificial Sequence: Synthetic oligonucleotide
  Target: LAMA2; (+) strand; PAM type: YTN; PAM sequence: TTT
caacccagaatttcatatcc

SEQ ID NO: 321926 - DNA, 20 bp, Artificial Sequence
  Description of Artificial Sequence: Synthetic oligonucleotide
  Target: LAMA2; (+) strand; PAM type: YTN; PAM sequence: TTC
aacccagaatttcatatcca

SEQ ID NO: 321927 - DNA, 20 bp, Artificial Sequence
  Description of Artificial Sequence: Synthetic oligonucleotide
  Target: LAMA2; (+) strand; PAM type: YTN; PAM sequence: TTT
catatccagccaaactaagc

SEQ ID NO: 321928 - DNA, 20 bp, Artificial Sequence
  Description of Artificial Sequence: Synthetic oligonucleotide
  Target: LAMA2; (+) strand; PAM type: YTN; PAM sequence: TTC
atatccagccaaactaagct

SEQ ID NO: 321929 - DNA, 20 bp, Artificial Sequence
  Description of Artificial Sequence: Synthetic oligonucleotide
  Target: LAMA2; (+) strand; PAM type: YTN; PAM sequence: CTA
agcttcataagtgaaggaga

SEQ ID NO: 321930 - DNA, 20 bp, Artificial Sequence
  Description of Artificial Sequence: Synthetic oligonucleotide
  Target: LAMA2; (+) strand; PAM type: YTN; PAM sequence: CTT
cataagtgaaggagaaataa

SEQ ID NO: 321931 - DNA, 20 bp, Artificial Sequence
  Description of Artificial Sequence: Synthetic oligonucleotide
  Target: LAMA2; (+) strand; PAM type: YTN; PAM sequence: TTC
ataagtgaaggagaaataaa

SEQ ID NO: 321932 - DNA, 20 bp, Artificial Sequence
  Description of Artificial Sequence: Synthetic oligonucleotide
  Target: LAMA2; (+) strand; PAM type: YTN; PAM sequence: CTT
tatagacaagcaaatgttga

SEQ ID NO: 321933 - DNA, 20 bp, Artificial Sequence
  Description of Artificial Sequence: Synthetic oligonucleotide
  Target: LAMA2; (+) strand; PAM type: YTN; PAM sequence: TTT
atagacaagcaaatgttgag

SEQ ID NO: 321934 - DNA, 20 bp, Artificial Sequence
  Description of Artificial Sequence: Synthetic oligonucleotide
  Target: LAMA2; (+) strand; PAM type: YTN; PAM sequence: TTA
tagacaagcaaatgttgaga

SEQ ID NO: 321935 - DNA, 20 bp, Artificial Sequence
  Description of Artificial Sequence: Synthetic oligonucleotide
  Target: LAMA2; (+) strand; PAM type: YTN; PAM sequence: TTG
agagattttgtcaccaccag

SEQ ID NO: 321936 - DNA, 20 bp, Artificial Sequence
  Description of Artificial Sequence: Synthetic oligonucleotide
  Target: LAMA2; (+) strand; PAM type: YTN; PAM sequence: TTT
tgtcaccaccaggcctgccc

SEQ ID NO: 321937 - DNA, 20 bp, Artificial Sequence
  Description of Artificial Sequence: Synthetic oligonucleotide
  Target: LAMA2; (+) strand; PAM type: YTN; PAM sequence: TTT
gtcaccaccaggcctgccct

SEQ ID NO: 321938 - DNA, 20 bp, Artificial Sequence
  Description of Artificial Sequence: Synthetic oligonucleotide
  Target: LAMA2; (+) strand; PAM type: YTN; PAM sequence: TTG
tcaccaccaggcctgcccta

SEQ ID NO: 321939 - DNA, 20 bp, Artificial Sequence
  Description of Artificial Sequence: Synthetic oligonucleotide
  Target: LAMA2; (+) strand; PAM type: YTN; PAM sequence: CTG
ccctaaaagagctcctgaag

SEQ ID NO: 321940 - DNA, 20 bp, Artificial Sequence
  Description of Artificial Sequence: Synthetic oligonucleotide
  Target: LAMA2; (+) strand; PAM type: YTN; PAM sequence: CTA
aaagagctcctgaaggaagc

SEQ ID NO: 321941 - DNA, 20 bp, Artificial Sequence
  Description of Artificial Sequence: Synthetic oligonucleotide
  Target: LAMA2; (+) strand; PAM type: YTN; PAM sequence: CTC
ctgaaggaagcgctaaacat

SEQ ID NO: 321942 - DNA, 20 bp, Artificial Sequence
  Description of Artificial Sequence: Synthetic oligonucleotide
  Target: LAMA2; (+) strand; PAM type: YTN; PAM sequence: CTG
aaggaagcgctaaacatgga

SEQ ID NO: 321943 - DNA, 20 bp, Artificial Sequence
  Description of Artificial Sequence: Synthetic oligonucleotide
  Target: LAMA2; (+) strand; PAM type: YTN; PAM sequence: CTA
aacatggaaaggaacaaccg

SEQ ID NO: 321944 - DNA, 20 bp, Artificial Sequence
  Description of Artificial Sequence: Synthetic oligonucleotide
  Target: LAMA2; (+) strand; PAM type: YTN; PAM sequence: CTG
caaaatcatgccaaaatgta

SEQ ID NO: 321945 - DNA, 20 bp, Artificial Sequence
  Description of Artificial Sequence: Synthetic oligonucleotide
  Target: LAMA2; (+) strand; PAM type: YTN; PAM sequence: CTA
ggaagaaactgcatcaacta

SEQ ID NO: 321946 - DNA, 20 bp, Artificial Sequence
  Description of Artificial Sequence: Synthetic oligonucleotide
  Target: LAMA2; (+) strand; PAM type: YTN; PAM sequence: CTG
catcaactaatgagcaaaat

SEQ ID NO: 321947 - DNA, 20 bp, Artificial Sequence
  Description of Artificial Sequence: Synthetic oligonucleotide
  Target: LAMA2; (+) strand; PAM type: YTN; PAM sequence: CTA
atgagcaaaatcaccagcta

SEQ ID NO: 321948 - DNA, 20 bp, Artificial Sequence
  Description of Artificial Sequence: Synthetic oligonucleotide
  Target: LAMA2; (+) strand; PAM type: YTN; PAM sequence: CTA
acatcatcatgacaggatca

SEQ ID NO: 321949 - DNA, 20 bp, Artificial Sequence
  Description of Artificial Sequence: Synthetic oligonucleotide
  Target: LAMA2; (+) strand; PAM type: YTN; PAM sequence: TTC
acacataacaatattaactt

SEQ ID NO: 321950 - DNA, 20 bp, Artificial Sequence
  Description of Artificial Sequence: Synthetic oligonucleotide
  Target: LAMA2; (+) strand; PAM type: YTN; PAM sequence: TTA
actttaaatataaatggact

SEQ ID NO: 321951 - DNA, 20 bp, Artificial Sequence
  Description of Artificial Sequence: Synthetic oligonucleotide
  Target: LAMA2; (+) strand; PAM type: YTN; PAM sequence: CTT
taaatataaatggactaaat

SEQ ID NO: 321952 - DNA, 20 bp, Artificial Sequence
  Description of Artificial Sequence: Synthetic oligonucleotide
  Target: LAMA2; (+) strand; PAM type: YTN; PAM sequence: TTT
aaatataaatggactaaatt

SEQ ID NO: 321953 - DNA, 20 bp, Artificial Sequence
  Description of Artificial Sequence: Synthetic oligonucleotide
  Target: LAMA2; (+) strand; PAM type: YTN; PAM sequence: TTA
aatataaatggactaaattc

SEQ ID NO: 321954 - DNA, 20 bp, Artificial Sequence
  Description of Artificial Sequence: Synthetic oligonucleotide
  Target: LAMA2; (+) strand; PAM type: YTN; PAM sequence: CTA
aattctgcaattaaaagaca

SEQ ID NO: 321955 - DNA, 20 bp, Artificial Sequence
  Description of Artificial Sequence: Synthetic oligonucleotide
  Target: LAMA2; (+) strand; PAM type: YTN; PAM sequence: TTC
tgcaattaaaagacacaaac

SEQ ID NO: 321956 - DNA, 20 bp, Artificial Sequence
  Description of Artificial Sequence: Synthetic oligonucleotide
  Target: LAMA2; (+) strand; PAM type: YTN; PAM sequence: CTG
caattaaaagacacaaactg

SEQ ID NO: 321957 - DNA, 20 bp, Artificial Sequence
  Description of Artificial Sequence: Synthetic oligonucleotide
  Target: LAMA2; (+) strand; PAM type: YTN; PAM sequence: TTA
aaagacacaaactggcaagt

SEQ ID NO: 321958 - DNA, 20 bp, Artificial Sequence
  Description of Artificial Sequence: Synthetic oligonucleotide
  Target: LAMA2; (+) strand; PAM type: YTN; PAM sequence: CTG
gcaagttggataaagagtca

SEQ ID NO: 321959 - DNA, 20 bp, Artificial Sequence
  Description of Artificial Sequence: Synthetic oligonucleotide
  Target: LAMA2; (+) strand; PAM type: YTN; PAM sequence: TTG
gataaagagtcaagacccat

SEQ ID NO: 321960 - DNA, 20 bp, Artificial Sequence
  Description of Artificial Sequence: Synthetic oligonucleotide
  Target: LAMA2; (+) strand; PAM type: YTN; PAM sequence: CTG
tattcaggaaacccatctca

SEQ ID NO: 321961 - DNA, 20 bp, Artificial Sequence
  Description of Artificial Sequence: Synthetic oligonucleotide
  Target: LAMA2; (+) strand; PAM type: YTN; PAM sequence: TTC
aggaaacccatctcacgtgc

SEQ ID NO: 321962 - DNA, 20 bp, Artificial Sequence
  Description of Artificial Sequence: Synthetic oligonucleotide
  Target: LAMA2; (+) strand; PAM type: YTN; PAM sequence: CTC
acgtgcagagacacacatag

SEQ ID NO: 321963 - DNA, 20 bp, Artificial Sequence
  Description of Artificial Sequence: Synthetic oligonucleotide
  Target: LAMA2; (+) strand; PAM type: YTN; PAM sequence: CTC
aaaataaaaggatggaggaa

SEQ ID NO: 321964 - DNA, 20 bp, Artificial Sequence
  Description of Artificial Sequence: Synthetic oligonucleotide
  Target: LAMA2; (+) strand; PAM type: YTN; PAM sequence: CTA
ccaagccaatggaaaacaaa

SEQ ID NO: 321965 - DNA, 20 bp, Artificial Sequence
  Description of Artificial Sequence: Synthetic oligonucleotide
  Target: LAMA2; (+) strand; PAM type: YTN; PAM sequence: TTG
caatcctagtctctgacaaa

SEQ ID NO: 321966 - DNA, 20 bp, Artificial Sequence
  Description of Artificial Sequence: Synthetic oligonucleotide
  Target: LAMA2; (+) strand; PAM type: YTN; PAM sequence: CTA
gtctctgacaaaacagactt

SEQ ID NO: 321967 - DNA, 20 bp, Artificial Sequence
  Description of Artificial Sequence: Synthetic oligonucleotide
  Target: LAMA2; (+) strand; PAM type: YTN; PAM sequence: CTC
tgacaaaacagactttaaac

SEQ ID NO: 321968 - DNA, 20 bp, Artificial Sequence
  Description of Artificial Sequence: Synthetic oligonucleotide
  Target: LAMA2; (+) strand; PAM type: YTN; PAM sequence: CTG
acaaaacagactttaaacca

SEQ ID NO: 321969 - DNA, 20 bp, Artificial Sequence
  Description of Artificial Sequence: Synthetic oligonucleotide
  Target: LAMA2; (+) strand; PAM type: YTN; PAM sequence: CTT
taaaccaacaaagatcaaaa

SEQ ID NO: 321970 - DNA, 20 bp, Artificial Sequence
  Description of Artificial Sequence: Synthetic oligonucleotide
  Target: LAMA2; (+) strand; PAM type: YTN; PAM sequence: TTT
aaaccaacaaagatcaaaag

SEQ ID NO: 321971 - DNA, 20 bp, Artificial Sequence
  Description of Artificial Sequence: Synthetic oligonucleotide
  Target: LAMA2; (+) strand; PAM type: YTN; PAM sequence: TTA
aaccaacaaagatcaaaaga

SEQ ID NO: 321972 - DNA, 20 bp, Artificial Sequence
  Description of Artificial Sequence: Synthetic oligonucleotide
  Target: LAMA2; (+) strand; PAM type: YTN; PAM sequence: TTA
cataatggtaaagggatcaa

SEQ ID NO: 321973 - DNA, 20 bp, Artificial Sequence
  Description of Artificial Sequence: Synthetic oligonucleotide
  Target: LAMA2; (+) strand; PAM type: YTN; PAM sequence: TTC
aacaagaggagctaactatc

SEQ ID NO: 321974 - DNA, 20 bp, Artificial Sequence
  Description of Artificial Sequence: Synthetic oligonucleotide
  Target: LAMA2; (+) strand; PAM type: YTN; PAM sequence: CTA
actatcctaaatatttatgc

SEQ ID NO: 321975 - DNA, 20 bp, Artificial Sequence
  Description of Artificial Sequence: Synthetic oligonucleotide
  Target: LAMA2; (+) strand; PAM type: YTN; PAM sequence: CTA
tcctaaatatttatgcaccc

SEQ ID NO: 321976 - DNA, 20 bp, Artificial Sequence
  Description of Artificial Sequence: Synthetic oligonucleotide
  Target: LAMA2; (+) strand; PAM type: YTN; PAM sequence: CTA
aatatttatgcacccaatac

SEQ ID NO: 321977 - DNA, 20 bp, Artificial Sequence
  Description of Artificial Sequence: Synthetic oligonucleotide
  Target: LAMA2; (+) strand; PAM type: YTN; PAM sequence: TTT
atgcacccaatacaggagca

SEQ ID NO: 321978 - DNA, 20 bp, Artificial Sequence
  Description of Artificial Sequence: Synthetic oligonucleotide
  Target: LAMA2; (+) strand; PAM type: YTN; PAM sequence: TTA
tgcacccaatacaggagcac

SEQ ID NO: 321979 - DNA, 20 bp, Artificial Sequence
  Description of Artificial Sequence: Synthetic oligonucleotide
  Target: LAMA2; (+) strand; PAM type: YTN; PAM sequence: TTC
ataaagcaagtcctcagtga

SEQ ID NO: 321980 - DNA, 20 bp, Artificial Sequence
  Description of Artificial Sequence: Synthetic oligonucleotide
  Target: LAMA2; (+) strand; PAM type: YTN; PAM sequence: CTC
agtgacctacaaagagactt

SEQ ID NO: 321981 - DNA, 20 bp, Artificial Sequence
  Description of Artificial Sequence: Synthetic oligonucleotide
  Target: LAMA2; (+) strand; PAM type: YTN; PAM sequence: CTA
caaagagacttagactccca

SEQ ID NO: 321982 - DNA, 20 bp, Artificial Sequence
  Description of Artificial Sequence: Synthetic oligonucleotide
  Target: LAMA2; (+) strand; PAM type: YTN; PAM sequence: CTT
agactcccacacattaataa

SEQ ID NO: 321983 - DNA, 20 bp, Artificial Sequence
  Description of Artificial Sequence: Synthetic oligonucleotide
  Target: LAMA2; (+) strand; PAM type: YTN; PAM sequence: TTA
gactcccacacattaataat

SEQ ID NO: 321984 - DNA, 20 bp, Artificial Sequence
  Description of Artificial Sequence: Synthetic oligonucleotide
  Target: LAMA2; (+) strand; PAM type: YTN; PAM sequence: CTC
ccacacattaataatgggag

SEQ ID NO: 321985 - DNA, 20 bp, Artificial Sequence
  Description of Artificial Sequence: Synthetic oligonucleotide
  Target: LAMA2; (+) strand; PAM type: YTN; PAM sequence: TTA
ataatgggagactttaacac

SEQ ID NO: 321986 - DNA, 20 bp, Artificial Sequence
  Description of Artificial Sequence: Synthetic oligonucleotide
  Target: LAMA2; (+) strand; PAM type: YTN; PAM sequence: CTT
taacaccccactgtcaacat

SEQ ID NO: 321987 - DNA, 20 bp, Artificial Sequence
  Description of Artificial Sequence: Synthetic oligonucleotide
  Target: LAMA2; (+) strand; PAM type: YTN; PAM sequence: TTT
aacaccccactgtcaacatt

SEQ ID NO: 321988 - DNA, 20 bp, Artificial Sequence
  Description of Artificial Sequence: Synthetic oligonucleotide
  Target: LAMA2; (+) strand; PAM type: YTN; PAM sequence: TTA
acaccccactgtcaacatta

SEQ ID NO: 321989 - DNA, 20 bp, Artificial Sequence
  Description of Artificial Sequence: Synthetic oligonucleotide
  Target: LAMA2; (+) strand; PAM type: YTN; PAM sequence: CTG
tcaacattagacagatcaac

SEQ ID NO: 321990 - DNA, 20 bp, Artificial Sequence
  Description of Artificial Sequence: Synthetic oligonucleotide
  Target: LAMA2; (+) strand; PAM type: YTN; PAM sequence: TTA
gacagatcaacgagacagaa

SEQ ID NO: 321991 - DNA, 20 bp, Artificial Sequence
  Description of Artificial Sequence: Synthetic oligonucleotide
  Target: LAMA2; (+) strand; PAM type: YTN; PAM sequence: TTG
aactcagctctgcaccaagc

SEQ ID NO: 321992 - DNA, 20 bp, Artificial Sequence
  Description of Artificial Sequence: Synthetic oligonucleotide
  Target: LAMA2; (+) strand; PAM type: YTN; PAM sequence: CTC
agctctgcaccaagcagacc

SEQ ID NO: 321993 - DNA, 20 bp, Artificial Sequence
  Description of Artificial Sequence: Synthetic oligonucleotide
  Target: LAMA2; (+) strand; PAM type: YTN; PAM sequence: CTC
tgcaccaagcagacctaata

SEQ ID NO: 321994 - DNA, 20 bp, Artificial Sequence
  Description of Artificial Sequence: Synthetic oligonucleotide
  Target: LAMA2; (+) strand; PAM type: YTN; PAM sequence: CTG
caccaagcagacctaataga

SEQ ID NO: 321995 - DNA, 20 bp, Artificial Sequence
  Description of Artificial Sequence: Synthetic oligonucleotide
  Target: LAMA2; (+) strand; PAM type: YTN; PAM sequence: CTA
atagacatctacagaactct

SEQ ID NO: 321996 - DNA, 20 bp, Artificial Sequence
  Description of Artificial Sequence: Synthetic oligonucleotide
  Target: LAMA2; (+) strand; PAM type: YTN; PAM sequence: CTA
cagaactctccaccccaaat

SEQ ID NO: 321997 - DNA, 20 bp, Artificial Sequence
  Description of Artificial Sequence: Synthetic oligonucleotide
  Target: LAMA2; (+) strand; PAM type: YTN; PAM sequence: CTC
tccaccccaaatcaacagaa

SEQ ID NO: 321998 - DNA, 20 bp, Artificial Sequence
  Description of Artificial Sequence: Synthetic oligonucleotide
  Target: LAMA2; (+) strand; PAM type: YTN; PAM sequence: CTC
caccccaaatcaacagaata

SEQ ID NO: 321999 - DNA, 20 bp, Artificial Sequence
  Description of Artificial Sequence: Synthetic oligonucleotide
  Target: LAMA2; (+) strand; PAM type: YTN; PAM sequence: TTT
ttttcagcaccacaccacac

SEQ ID NO: 322000 - DNA, 20 bp, Artificial Sequence
  Description of Artificial Sequence: Synthetic oligonucleotide
  Target: LAMA2; (+) strand; PAM type: YTN; PAM sequence: TTT
tttcagcaccacaccacacc

SEQ ID NO: 322001 - DNA, 20 bp, Artificial Sequence
  Description of Artificial Sequence: Synthetic oligonucleotide
  Target: LAMA2; (+) strand; PAM type: YTN; PAM sequence: TTT
ttcagcaccacaccacacct

SEQ ID NO: 322002 - DNA, 20 bp, Artificial Sequence
  Description of Artificial Sequence: Synthetic oligonucleotide
  Target: LAMA2; (+) strand; PAM type: YTN; PAM sequence: TTT
tcagcaccacaccacaccta

SEQ ID NO: 322003 - DNA, 20 bp, Artificial Sequence
  Description of Artificial Sequence: Synthetic oligonucleotide
  Target: LAMA2; (+) strand; PAM type: YTN; PAM sequence: TTT
cagcaccacaccacacctat

SEQ ID NO: 322004 - DNA, 20 bp, Artificial Sequence
  Description of Artificial Sequence: Synthetic oligonucleotide
  Target: LAMA2; (+) strand; PAM type: YTN; PAM sequence: TTC
agcaccacaccacacctatt

SEQ ID NO: 322005 - DNA, 20 bp, Artificial Sequence
  Description of Artificial Sequence: Synthetic oligonucleotide
  Target: LAMA2; (+) strand; PAM type: YTN; PAM sequence: CTA
ttccaaaattgaccacatag

SEQ ID NO: 322006 - DNA, 20 bp, Artificial Sequence
  Description of Artificial Sequence: Synthetic oligonucleotide
  Target: LAMA2; (+) strand; PAM type: YTN; PAM sequence: TTC
caaaattgaccacatagttg

SEQ ID NO: 322007 - DNA, 20 bp, Artificial Sequence
  Description of Artificial Sequence: Synthetic oligonucleotide
  Target: LAMA2; (+) strand; PAM type: YTN; PAM sequence: TTG
accacatagttggaagtaaa

SEQ ID NO: 322008 - DNA, 20 bp, Artificial Sequence
  Description of Artificial Sequence: Synthetic oligonucleotide
  Target: LAMA2; (+) strand; PAM type: YTN; PAM sequence: TTG
gaagtaaagctctcctcagc

SEQ ID NO: 322009 - DNA, 20 bp, Artificial Sequence
  Description of Artificial Sequence: Synthetic oligonucleotide
  Target: LAMA2; (+) strand; PAM type: YTN; PAM sequence: CTC
tcctcagcaaatgtaaaaga

SEQ ID NO: 322010 - DNA, 20 bp, Artificial Sequence
  Description of Artificial Sequence: Synthetic oligonucleotide
  Target: LAMA2; (+) strand; PAM type: YTN; PAM sequence: CTC
ctcagcaaatgtaaaagaac

SEQ ID NO: 322011 - DNA, 20 bp, Artificial Sequence
  Description of Artificial Sequence: Synthetic oligonucleotide
  Target: LAMA2; (+) strand; PAM type: YTN; PAM sequence: CTC
agcaaatgtaaaagaacaga

SEQ ID NO: 322012 - DNA, 20 bp, Artificial Sequence
  Description of Artificial Sequence: Synthetic oligonucleotide
  Target: LAMA2; (+) strand; PAM type: YTN; PAM sequence: TTA
taacaaactatctctcagac

SEQ ID NO: 322013 - DNA, 20 bp, Artificial Sequence
  Description of Artificial Sequence: Synthetic oligonucleotide
  Target: LAMA2; (+) strand; PAM type: YTN; PAM sequence: CTA
tctctcagaccacagtgcaa

SEQ ID NO: 322014 - DNA, 20 bp, Artificial Sequence
  Description of Artificial Sequence: Synthetic oligonucleotide
  Target: LAMA2; (+) strand; PAM type: YTN; PAM sequence: CTC
tcagaccacagtgcaatcaa

SEQ ID NO: 322015 - DNA, 20 bp, Artificial Sequence
  Description of Artificial Sequence: Synthetic oligonucleotide
  Target: LAMA2; (+) strand; PAM type: YTN; PAM sequence: CTC
agaccacagtgcaatcaaac

SEQ ID NO: 322016 - DNA, 20 bp, Artificial Sequence
  Description of Artificial Sequence: Synthetic oligonucleotide
  Target: LAMA2; (+) strand; PAM type: YTN; PAM sequence: CTA
gaactcaggattaagaatct

SEQ ID NO: 322017 - DNA, 20 bp, Artificial Sequence
  Description of Artificial Sequence: Synthetic oligonucleotide
  Target: LAMA2; (+) strand; PAM type: YTN; PAM sequence: CTC
aggattaagaatctcactca

SEQ ID NO: 322018 - DNA, 20 bp, Artificial Sequence
  Description of Artificial Sequence: Synthetic oligonucleotide
  Target: LAMA2; (+) strand; PAM type: YTN; PAM sequence: TTA
agaatctcactcaaagccgc

SEQ ID NO: 322019 - DNA, 20 bp, Artificial Sequence
  Description of Artificial Sequence: Synthetic oligonucleotide
  Target: LAMA2; (+) strand; PAM type: YTN; PAM sequence: CTC
actcaaagccgctcaactac

SEQ ID NO: 322020 - DNA, 20 bp, Artificial Sequence
  Description of Artificial Sequence: Synthetic oligonucleotide
  Target: LAMA2; (+) strand; PAM type: YTN; PAM sequence: CTC
aaagccgctcaactacatgg

SEQ ID NO: 322021 - DNA, 20 bp, Artificial Sequence
  Description of Artificial Sequence: Synthetic oligonucleotide
  Target: LAMA2; (+) strand; PAM type: YTN; PAM sequence: CTC
aactacatggaaactgaaca

SEQ ID NO: 322022 - DNA, 20 bp, Artificial Sequence
  Description of Artificial Sequence: Synthetic oligonucleotide
  Target: LAMA2; (+) strand; PAM type: YTN; PAM sequence: CTA
catggaaactgaacaacctg

SEQ ID NO: 322023 - DNA, 20 bp, Artificial Sequence
  Description of Artificial Sequence: Synthetic oligonucleotide
  Target: LAMA2; (+) strand; PAM type: YTN; PAM sequence: CTG
aacaacctgctcctgaatga

SEQ ID NO: 322024 - DNA, 20 bp, Artificial Sequence
  Description of Artificial Sequence: Synthetic oligonucleotide
  Target: LAMA2; (+) strand; PAM type: YTN; PAM sequence: CTG
ctcctgaatgactactgggt

SEQ ID NO: 322025 - DNA, 20 bp, Artificial Sequence
  Description of Artificial Sequence: Synthetic oligonucleotide
  Target: LAMA2; (+) strand; PAM type: YTN; PAM sequence: CTC
ctgaatgactactgggtaca

SEQ ID NO: 322026 - DNA, 20 bp, Artificial Sequence
  Description of Artificial Sequence: Synthetic oligonucleotide
  Target: LAMA2; (+) strand; PAM type: YTN; PAM sequence: CTG
aatgactactgggtacataa

SEQ ID NO: 322027 - DNA, 20 bp, Artificial Sequence
  Description of Artificial Sequence: Synthetic oligonucleotide
  Target: LAMA2; (+) strand; PAM type: YTN; PAM sequence: CTA
ctgggtacataacgaaatga

SEQ ID NO: 322028 - DNA, 20 bp, Artificial Sequence
  Description of Artificial Sequence: Synthetic oligonucleotide
  Target: LAMA2; (+) strand; PAM type: YTN; PAM sequence: CTG
ggtacataacgaaatgaagg

SEQ ID NO: 322029 - DNA, 20 bp, Artificial Sequence
  Description of Artificial Sequence: Synthetic oligonucleotide
  Target: LAMA2; (+) strand; PAM type: YTN; PAM sequence: TTC
tttgaaaccaacgagaacaa

SEQ ID NO: 322030 - DNA, 20 bp, Artificial Sequence
  Description of Artificial Sequence: Synthetic oligonucleotide
  Target: LAMA2; (+) strand; PAM type: YTN; PAM sequence: CTT
tgaaaccaacgagaacaaag

SEQ ID NO: 322031 - DNA, 20 bp, Artificial Sequence
  Description of Artificial Sequence: Synthetic oligonucleotide
  Target: LAMA2; (+) strand; PAM type: YTN; PAM sequence: TTT
gaaaccaacgagaacaaaga

SEQ ID NO: 322032 - DNA, 20 bp, Artificial Sequence
  Description of Artificial Sequence: Synthetic oligonucleotide
  Target: LAMA2; (+) strand; PAM type: YTN; PAM sequence: TTG
aaaccaacgagaacaaagac

SEQ ID NO: 322033 - DNA, 20 bp, Artificial Sequence
  Description of Artificial Sequence: Synthetic oligonucleotide
  Target: LAMA2; (+) strand; PAM type: YTN; PAM sequence: CTC
tgggacgcattcaaagcagt

SEQ ID NO: 322034 - DNA, 20 bp, Artificial Sequence
  Description of Artificial Sequence: Synthetic oligonucleotide
  Target: LAMA2; (+) strand; PAM type: YTN; PAM sequence: CTG
ggacgcattcaaagcagtgt

SEQ ID NO: 322035 - DNA, 20 bp, Artificial Sequence
  Description of Artificial Sequence: Synthetic oligonucleotide
  Target: LAMA2; (+) strand; PAM type: YTN; PAM sequence: TTC
aaagcagtgtgtagagggaa

SEQ ID NO: 322036 - DNA, 20 bp, Artificial Sequence
  Description of Artificial Sequence: Synthetic oligonucleotide
  Target: LAMA2; (+) strand; PAM type: YTN; PAM sequence: TTT
atagcactaaatgcctacaa

SEQ ID NO: 322037 - DNA, 20 bp, Artificial Sequence
  Description of Artificial Sequence: Synthetic oligonucleotide
  Target: LAMA2; (+) strand; PAM type: YTN; PAM sequence: TTA
tagcactaaatgcctacaag

SEQ ID NO: 322038 - DNA, 20 bp, Artificial Sequence
  Description of Artificial Sequence: Synthetic oligonucleotide
  Target: LAMA2; (+) strand; PAM type: YTN; PAM sequence: CTA
aatgcctacaagagaaagca

SEQ ID NO: 322039 - DNA, 20 bp, Artificial Sequence
  Description of Artificial Sequence: Synthetic oligonucleotide
  Target: LAMA2; (+) strand; PAM type: YTN; PAM sequence: CTA
caagagaaagcaggaaagat

SEQ ID NO: 322040 - DNA, 20 bp, Artificial Sequence
  Description of Artificial Sequence: Synthetic oligonucleotide
  Target: LAMA2; (+) strand; PAM type: YTN; PAM sequence: TTG
acaccctaacatcacaatta

SEQ ID NO: 322041 - DNA, 20 bp, Artificial Sequence
  Description of Artificial Sequence: Synthetic oligonucleotide
  Target: LAMA2; (+) strand; PAM type: YTN; PAM sequence: CTA
acatcacaattaaaagaact

SEQ ID NO: 322042 - DNA, 20 bp, Artificial Sequence
  Description of Artificial Sequence: Synthetic oligonucleotide
  Target: LAMA2; (+) strand; PAM type: YTN; PAM sequence: TTA
aaagaactagaaaagcaaga

SEQ ID NO: 322043 - DNA, 20 bp, Artificial Sequence
  Description of Artificial Sequence: Synthetic oligonucleotide
  Target: LAMA2; (+) strand; PAM type: YTN; PAM sequence: CTA
gaaaagcaagagcaaacaca

SEQ ID NO: 322044 - DNA, 20 bp, Artificial Sequence
  Description of Artificial Sequence: Synthetic oligonucleotide
  Target: LAMA2; (+) strand; PAM type: YTN; PAM sequence: TTC
aaaagctagcagaaggcaag

SEQ ID NO: 322045 - DNA, 20 bp, Artificial Sequence
  Description of Artificial Sequence: Synthetic oligonucleotide
  Target: LAMA2; (+) strand; PAM type: YTN; PAM sequence: CTA
gcagaaggcaagaaataact

SEQ ID NO: 322046 - DNA, 20 bp, Artificial Sequence
  Description of Artificial Sequence: Synthetic oligonucleotide
  Target: LAMA2; (+) strand; PAM type: YTN; PAM sequence: CTA
aaatcagagcagaactgaag

SEQ ID NO: 322047 - DNA, 20 bp, Artificial Sequence
  Description of Artificial Sequence: Synthetic oligonucleotide
  Target: LAMA2; (+) strand; PAM type: YTN; PAM sequence: CTG
aaggaaatagagacacaaaa

SEQ ID NO: 322048 - DNA, 20 bp, Artificial Sequence
  Description of Artificial Sequence: Synthetic oligonucleotide
  Target: LAMA2; (+) strand; PAM type: YTN; PAM sequence: CTT
caaaaaatcaatgaatccag

SEQ ID NO: 322049 - DNA, 20 bp, Artificial Sequence
  Description of Artificial Sequence: Synthetic oligonucleotide
  Target: LAMA2; (+) strand; PAM type: YTN; PAM sequence: TTC
aaaaaatcaatgaatccagg

SEQ ID NO: 322050 - DNA, 20 bp, Artificial Sequence
  Description of Artificial Sequence: Synthetic oligonucleotide
  Target: LAMA2; (+) strand; PAM type: YTN; PAM sequence: CTG
gttttttgaaaggatcaaca

SEQ ID NO: 322051 - DNA, 20 bp, Artificial Sequence
  Description of Artificial Sequence: Synthetic oligonucleotide
  Target: LAMA2; (+) strand; PAM type: YTN; PAM sequence: TTT
tttgaaaggatcaacaaaat

SEQ ID NO: 322052 - DNA, 20 bp, Artificial Sequence
  Description of Artificial Sequence: Synthetic oligonucleotide
  Target: LAMA2; (+) strand; PAM type: YTN; PAM sequence: TTT
ttgaaaggatcaacaaaatt

SEQ ID NO: 322053 - DNA, 20 bp, Artificial Sequence
  Description of Artificial Sequence: Synthetic oligonucleotide
  Target: LAMA2; (+) strand; PAM type: YTN; PAM sequence: TTT
tgaaaggatcaacaaaattg

SEQ ID NO: 322054 - DNA, 20 bp, Artificial Sequence
  Description of Artificial Sequence: Synthetic oligonucleotide
  Target: LAMA2; (+) strand; PAM type: YTN; PAM sequence: TTT
gaaaggatcaacaaaattga

SEQ ID NO: 322055 - DNA, 20 bp, Artificial Sequence
  Description of Artificial Sequence: Synthetic oligonucleotide
  Target: LAMA2; (+) strand; PAM type: YTN; PAM sequence: TTG
aaaggatcaacaaaattgat

SEQ ID NO: 322056 - DNA, 20 bp, Artificial Sequence
  Description of Artificial Sequence: Synthetic oligonucleotide
  Target: LAMA2; (+) strand; PAM type: YTN; PAM sequence: TTG
atagaccgctagcaagacta

SEQ ID NO: 322057 - DNA, 20 bp, Artificial Sequence
  Description of Artificial Sequence: Synthetic oligonucleotide
  Target: LAMA2; (+) strand; PAM type: YTN; PAM sequence: CTA
gcaagactaataaagaaaaa

SEQ ID NO: 322058 - DNA, 20 bp, Artificial Sequence
  Description of Artificial Sequence: Synthetic oligonucleotide
  Target: LAMA2; (+) strand; PAM type: YTN; PAM sequence: CTA
ataaagaaaaaaagagagaa

SEQ ID NO: 322059 - DNA, 20 bp, Artificial Sequence
  Description of Artificial Sequence: Synthetic oligonucleotide
  Target: LAMA2; (+) strand; PAM type: YTN; PAM sequence: CTA
ccatcagagaatactacaaa

SEQ ID NO: 322060 - DNA, 20 bp, Artificial Sequence
  Description of Artificial Sequence: Synthetic oligonucleotide
  Target: LAMA2; (+) strand; PAM type: YTN; PAM sequence: CTA
caaacacctctacgcaaata

SEQ ID NO: 322061 - DNA, 20 bp, Artificial Sequence
  Description of Artificial Sequence: Synthetic oligonucleotide
  Target: LAMA2; (+) strand; PAM type: YTN; PAM sequence: CTC
tacgcaaataaactagaaaa

SEQ ID NO: 322062 - DNA, 20 bp, Artificial Sequence
  Description of Artificial Sequence: Synthetic oligonucleotide
  Target: LAMA2; (+) strand; PAM type: YTN; PAM sequence: CTA
cgcaaataaactagaaaatc

SEQ ID NO: 322063 - DNA, 20 bp, Artificial Sequence
  Description of Artificial Sequence: Synthetic oligonucleotide
  Target: LAMA2; (+) strand; PAM type: YTN; PAM sequence: CTA
gaaaatctagaagaaatgga

SEQ ID NO: 322064 - DNA, 20 bp, Artificial Sequence
  Description of Artificial Sequence: Synthetic oligonucleotide
  Target: LAMA2; (+) strand; PAM type: YTN; PAM sequence: CTA
gaagaaatggatacattcct

SEQ ID NO: 322065 - DNA, 20 bp, Artificial Sequence
  Description of Artificial Sequence: Synthetic oligonucleotide
  Target: LAMA2; (+) strand; PAM type: YTN; PAM sequence: TTC
ctcgacacatacactctccc

SEQ ID NO: 322066 - DNA, 20 bp, Artificial Sequence
  Description of Artificial Sequence: Synthetic oligonucleotide
  Target: LAMA2; (+) strand; PAM type: YTN; PAM sequence: CTC
gacacatacactctcccaag

SEQ ID NO: 322067 - DNA, 20 bp, Artificial Sequence
  Description of Artificial Sequence: Synthetic oligonucleotide
  Target: LAMA2; (+) strand; PAM type: YTN; PAM sequence: CTC
tcccaagactaaaccaggaa

SEQ ID NO: 322068 - DNA, 20 bp, Artificial Sequence
  Description of Artificial Sequence: Synthetic oligonucleotide
  Target: LAMA2; (+) strand; PAM type: YTN; PAM sequence: CTC
ccaagactaaaccaggaaga

SEQ ID NO: 322069 - DNA, 20 bp, Artificial Sequence
  Description of Artificial Sequence: Synthetic oligonucleotide
  Target: LAMA2; (+) strand; PAM type: YTN; PAM sequence: CTA
aaccaggaagaagttgaatc

SEQ ID NO: 322070 - DNA, 20 bp, Artificial Sequence
  Description of Artificial Sequence: Synthetic oligonucleotide
  Target: LAMA2; (+) strand; PAM type: YTN; PAM sequence: TTG
aatctctgaatcgaccaata

SEQ ID NO: 322071 - DNA, 20 bp, Artificial Sequence
  Description of Artificial Sequence: Synthetic oligonucleotide
  Target: LAMA2; (+) strand; PAM type: YTN; PAM sequence: CTC
tgaatcgaccaataacaggc

SEQ ID NO: 322072 - DNA, 20 bp, Artificial Sequence
  Description of Artificial Sequence: Synthetic oligonucleotide
  Target: LAMA2; (+) strand; PAM type: YTN; PAM sequence: CTG
aatcgaccaataacaggctc

SEQ ID NO: 322073 - DNA, 20 bp, Artificial Sequence
  Description of Artificial Sequence: Synthetic oligonucleotide
  Target: LAMA2; (+) strand; PAM type: YTN; PAM sequence: CTC
tgaaattgtggcaataatca

SEQ ID NO: 322074 - DNA, 20 bp, Artificial Sequence
  Description of Artificial Sequence: Synthetic oligonucleotide
  Target: LAMA2; (+) strand; PAM type: YTN; PAM sequence: CTG
aaattgtggcaataatcaat

SEQ ID NO: 322075 - DNA, 20 bp, Artificial Sequence
  Description of Artificial Sequence: Synthetic oligonucleotide
  Target: LAMA2; (+) strand; PAM type: YTN; PAM sequence: TTG
tggcaataatcaatagttta

SEQ ID NO: 322076 - DNA, 20 bp, Artificial Sequence
  Description of Artificial Sequence: Synthetic oligonucleotide
  Target: LAMA2; (+) strand; PAM type: YTN; PAM sequence: TTT
accaaccaaaaagagtccag

SEQ ID NO: 322077 - DNA, 20 bp, Artificial Sequence
  Description of Artificial Sequence: Synthetic oligonucleotide
  Target: LAMA2; (+) strand; PAM type: YTN; PAM sequence: TTA
ccaaccaaaaagagtccagg

SEQ ID NO: 322078 - DNA, 20 bp, Artificial Sequence
  Description of Artificial Sequence: Synthetic oligonucleotide
  Target: LAMA2; (+) strand; PAM type: YTN; PAM sequence: TTC
acagccgaattctaccagag

SEQ ID NO: 322079 - DNA, 20 bp, Artificial Sequence
  Description of Artificial Sequence: Synthetic oligonucleotide
  Target: LAMA2; (+) strand; PAM type: YTN; PAM sequence: TTC
taccagaggtacaaggagga

SEQ ID NO: 322080 - DNA, 20 bp, Artificial Sequence
  Description of Artificial Sequence: Synthetic oligonucleotide
  Target: LAMA2; (+) strand; PAM type: YTN; PAM sequence: CTA
ccagaggtacaaggaggaac

SEQ ID NO: 322081 - DNA, 20 bp, Artificial Sequence
  Description of Artificial Sequence: Synthetic oligonucleotide
  Target: LAMA2; (+) strand; PAM type: YTN; PAM sequence: CTG
gtaccattccttctgaaact

SEQ ID NO: 322082 - DNA, 20 bp, Artificial Sequence
  Description of Artificial Sequence: Synthetic oligonucleotide
  Target: LAMA2; (+) strand; PAM type: YTN; PAM sequence: TTC
cttctgaaactattccaatc

SEQ ID NO: 322083 - DNA, 20 bp, Artificial Sequence
  Description of Artificial Sequence: Synthetic oligonucleotide
  Target: LAMA2; (+) strand; PAM type: YTN; PAM sequence: CTT
ctgaaactattccaatcaat

SEQ ID NO: 322084 - DNA, 20 bp, Artificial Sequence
  Description of Artificial Sequence: Synthetic oligonucleotide
  Target: LAMA2; (+) strand; PAM type: YTN; PAM sequence: TTC
tgaaactattccaatcaata

SEQ ID NO: 322085 - DNA, 20 bp, Artificial Sequence
  Description of Artificial Sequence: Synthetic oligonucleotide
  Target: LAMA2; (+) strand; PAM type: YTN; PAM sequence: CTG
aaactattccaatcaataga

SEQ ID NO: 322086 - DNA, 20 bp, Artificial Sequence
  Description of Artificial Sequence: Synthetic oligonucleotide
  Target: LAMA2; (+) strand; PAM type: YTN; PAM sequence: CTA
ttccaatcaatagaaaaaga

SEQ ID NO: 322087 - DNA, 20 bp, Artificial Sequence
  Description of Artificial Sequence: Synthetic oligonucleotide
  Target: LAMA2; (+) strand; PAM type: YTN; PAM sequence: TTC
caatcaatagaaaaagaggg

SEQ ID NO: 322088 - DNA, 20 bp, Artificial Sequence
  Description of Artificial Sequence: Synthetic oligonucleotide
  Target: LAMA2; (+) strand; PAM type: YTN; PAM sequence: CTC
cctaactcattttatgaggc

SEQ ID NO: 322089 - DNA, 20 bp, Artificial Sequence
  Description of Artificial Sequence: Synthetic oligonucleotide
  Target: LAMA2; (+) strand; PAM type: YTN; PAM sequence: CTA
actcattttatgaggccagc

SEQ ID NO: 322090 - DNA, 20 bp, Artificial Sequence
  Description of Artificial Sequence: Synthetic oligonucleotide
  Target: LAMA2; (+) strand; PAM type: YTN; PAM sequence: CTC
attttatgaggccagcatca

SEQ ID NO: 322091 - DNA, 20 bp, Artificial Sequence
  Description of Artificial Sequence: Synthetic oligonucleotide
  Target: LAMA2; (+) strand; PAM type: YTN; PAM sequence: TTT
tatgaggccagcatcattct

SEQ ID NO: 322092 - DNA, 20 bp, Artificial Sequence
  Description of Artificial Sequence: Synthetic oligonucleotide
  Target: LAMA2; (+) strand; PAM type: YTN; PAM sequence: TTT
atgaggccagcatcattctg

SEQ ID NO: 322093 - DNA, 20 bp, Artificial Sequence
  Description of Artificial Sequence: Synthetic oligonucleotide
  Target: LAMA2; (+) strand; PAM type: YTN; PAM sequence: TTA
tgaggccagcatcattctga

SEQ ID NO: 322094 - DNA, 20 bp, Artificial Sequence
  Description of Artificial Sequence: Synthetic oligonucleotide
  Target: LAMA2; (+) strand; PAM type: YTN; PAM sequence: TTC
tgataccaaagccgggcaga

SEQ ID NO: 322095 - DNA, 20 bp, Artificial Sequence
  Description of Artificial Sequence: Synthetic oligonucleotide
  Target: LAMA2; (+) strand; PAM type: YTN; PAM sequence: CTG
ataccaaagccgggcagaga

SEQ ID NO: 322096 - DNA, 20 bp, Artificial Sequence
  Description of Artificial Sequence: Synthetic oligonucleotide
  Target: LAMA2; (+) strand; PAM type: YTN; PAM sequence: TTT
tagaccaatatccttgatga

SEQ ID NO: 322097 - DNA, 20 bp, Artificial Sequence
  Description of Artificial Sequence: Synthetic oligonucleotide
  Target: LAMA2; (+) strand; PAM type: YTN; PAM sequence: TTT
agaccaatatccttgatgaa

SEQ ID NO: 322098 - DNA, 20 bp, Artificial Sequence
  Description of Artificial Sequence: Synthetic oligonucleotide
  Target: LAMA2; (+) strand; PAM type: YTN; PAM sequence: TTA
gaccaatatccttgatgaac

SEQ ID NO: 322099 - DNA, 20 bp, Artificial Sequence
  Description of Artificial Sequence: Synthetic oligonucleotide
  Target: LAMA2; (+) strand; PAM type: YTN; PAM sequence: CTT
gatgaacattgatgcaaaaa

SEQ ID NO: 322100 - DNA, 20 bp, Artificial Sequence
  Description of Artificial Sequence: Synthetic oligonucleotide
  Target: LAMA2; (+) strand; PAM type: YTN; PAM sequence: TTG
atgaacattgatgcaaaaat

SEQ ID NO: 322101 - DNA, 20 bp, Artificial Sequence
  Description of Artificial Sequence: Synthetic oligonucleotide
  Target: LAMA2; (+) strand; PAM type: YTN; PAM sequence: TTG
atgcaaaaatcctcaataaa

SEQ ID NO: 322102 - DNA, 20 bp, Artificial Sequence
  Description of Artificial Sequence: Synthetic oligonucleotide
  Target: LAMA2; (+) strand; PAM type: YTN; PAM sequence: CTC
aataaaatactggcaaaccg

SEQ ID NO: 322103 - DNA, 20 bp, Artificial Sequence
  Description of Artificial Sequence: Synthetic oligonucleotide
  Target: LAMA2; (+) strand; PAM type: YTN; PAM sequence: CTG
gcaaaccgaatccagcagca

SEQ ID NO: 322104 - DNA, 20 bp, Artificial Sequence
  Description of Artificial Sequence: Synthetic oligonucleotide
  Target: LAMA2; (+) strand; PAM type: YTN; PAM sequence: CTT
atccaccatgatcaagtggg

SEQ ID NO: 322105 - DNA, 20 bp, Artificial Sequence
  Description of Artificial Sequence: Synthetic oligonucleotide
  Target: LAMA2; (+) strand; PAM type: YTN; PAM sequence: TTA
tccaccatgatcaagtgggc

SEQ ID NO: 322106 - DNA, 20 bp, Artificial Sequence
  Description of Artificial Sequence: Synthetic oligonucleotide
  Target: LAMA2; (+) strand; PAM type: YTN; PAM sequence: CTT
catccctgggatgcaaggct

SEQ ID NO: 322107 - DNA, 20 bp, Artificial Sequence
  Description of Artificial Sequence: Synthetic oligonucleotide
  Target: LAMA2; (+) strand; PAM type: YTN; PAM sequence: TTC
atccctgggatgcaaggctg

SEQ ID NO: 322108 - DNA, 20 bp, Artificial Sequence
  Description of Artificial Sequence: Synthetic oligonucleotide
  Target: LAMA2; (+) strand; PAM type: YTN; PAM sequence: CTG
ggatgcaaggctggttcaat

SEQ ID NO: 322109 - DNA, 20 bp, Artificial Sequence
  Description of Artificial Sequence: Synthetic oligonucleotide
  Target: LAMA2; (+) strand; PAM type: YTN; PAM sequence: CTG
gttcaatatacgcaaatcaa

SEQ ID NO: 322110 - DNA, 20 bp, Artificial Sequence
  Description of Artificial Sequence: Synthetic oligonucleotide
  Target: LAMA2; (+) strand; PAM type: YTN; PAM sequence: TTC
aatatacgcaaatcaataaa

SEQ ID NO: 322111 - DNA, 20 bp, Artificial Sequence
  Description of Artificial Sequence: Synthetic oligonucleotide
  Target: LAMA2; (+) strand; PAM type: YTN; PAM sequence: TTA
tctcaatagatgcagaaaaa

SEQ ID NO: 322112 - DNA, 20 bp, Artificial Sequence
  Description of Artificial Sequence: Synthetic oligonucleotide
  Target: LAMA2; (+) strand; PAM type: YTN; PAM sequence: CTC
aatagatgcagaaaaagcct

SEQ ID NO: 322113 - DNA, 20 bp, Artificial Sequence
  Description of Artificial Sequence: Synthetic oligonucleotide
  Target: LAMA2; (+) strand; PAM type: YTN; PAM sequence: CTT
tgacaaaattcaacaaccct

SEQ ID NO: 322114 - DNA, 20 bp, Artificial Sequence
  Description of Artificial Sequence: Synthetic oligonucleotide
  Target: LAMA2; (+) strand; PAM type: YTN; PAM sequence: TTT
gacaaaattcaacaaccctt

SEQ ID NO: 322115 - DNA, 20 bp, Artificial Sequence
  Description of Artificial Sequence: Synthetic oligonucleotide
  Target: LAMA2; (+) strand; PAM type: YTN; PAM sequence: TTG
acaaaattcaacaacccttc

SEQ ID NO: 322116 - DNA, 20 bp, Artificial Sequence
  Description of Artificial Sequence: Synthetic oligonucleotide
  Target: LAMA2; (+) strand; PAM type: YTN; PAM sequence: TTC
aacaacccttcatgctaaaa

SEQ ID NO: 322117 - DNA, 20 bp, Artificial Sequence
  Description of Artificial Sequence: Synthetic oligonucleotide
  Target: LAMA2; (+) strand; PAM type: YTN; PAM sequence: CTT
catgctaaaaactctcaata

SEQ ID NO: 322118 - DNA, 20 bp, Artificial Sequence
  Description of Artificial Sequence: Synthetic oligonucleotide
  Target: LAMA2; (+) strand; PAM type: YTN; PAM sequence: TTC
atgctaaaaactctcaataa

SEQ ID NO: 322119 - DNA, 20 bp, Artificial Sequence
  Description of Artificial Sequence: Synthetic oligonucleotide
  Target: LAMA2; (+) strand; PAM type: YTN; PAM sequence: CTA
aaaactctcaataaattagg

SEQ ID NO: 322120 - DNA, 20 bp, Artificial Sequence
  Description of Artificial Sequence: Synthetic oligonucleotide
  Target: LAMA2; (+) strand; PAM type: YTN; PAM sequence: CTC
tcaataaattaggtattgat

SEQ ID NO: 322121 - DNA, 20 bp, Artificial Sequence
  Description of Artificial Sequence: Synthetic oligonucleotide
  Target: LAMA2; (+) strand; PAM type: YTN; PAM sequence: CTC
aataaattaggtattgatgg

SEQ ID NO: 322122 - DNA, 20 bp, Artificial Sequence
  Description of Artificial Sequence: Synthetic oligonucleotide
  Target: LAMA2; (+) strand; PAM type: YTN; PAM sequence: TTA
ggtattgatgggatgtattt

SEQ ID NO: 322123 - DNA, 20 bp, Artificial Sequence
  Description of Artificial Sequence: Synthetic oligonucleotide
  Target: LAMA2; (+) strand; PAM type: YTN; PAM sequence: TTG
atgggatgtatttcaaaata

SEQ ID NO: 322124 - DNA, 20 bp, Artificial Sequence
  Description of Artificial Sequence: Synthetic oligonucleotide
  Target: LAMA2; (+) strand; PAM type: YTN; PAM sequence: TTT
caaaataataagagctatct

SEQ ID NO: 322125 - DNA, 20 bp, Artificial Sequence
  Description of Artificial Sequence: Synthetic oligonucleotide
  Target: LAMA2; (+) strand; PAM type: YTN; PAM sequence: TTC
aaaataataagagctatcta

SEQ ID NO: 322126 - DNA, 20 bp, Artificial Sequence
  Description of Artificial Sequence: Synthetic oligonucleotide
  Target: LAMA2; (+) strand; PAM type: YTN; PAM sequence: CTA
tctatgacaaacccacagcc

SEQ ID NO: 322127 - DNA, 20 bp, Artificial Sequence
  Description of Artificial Sequence: Synthetic oligonucleotide
  Target: LAMA2; (+) strand; PAM type: YTN; PAM sequence: CTA
tgacaaacccacagccaata

SEQ ID NO: 322128 - DNA, 20 bp, Artificial Sequence
  Description of Artificial Sequence: Synthetic oligonucleotide
  Target: LAMA2; (+) strand; PAM type: YTN; PAM sequence: CTG
aatgggcaaaaactggaagc

SEQ ID NO: 322129 - DNA, 20 bp, Artificial Sequence
  Description of Artificial Sequence: Synthetic oligonucleotide
  Target: LAMA2; (+) strand; PAM type: YTN; PAM sequence: CTG
gaagcattccctttgaaaac

SEQ ID NO: 322130 - DNA, 20 bp, Artificial Sequence
  Description of Artificial Sequence: Synthetic oligonucleotide
  Target: LAMA2; (+) strand; PAM type: YTN; PAM sequence: TTC
cctttgaaaactggcacaag

SEQ ID NO: 322131 - DNA, 20 bp, Artificial Sequence
  Description of Artificial Sequence: Synthetic oligonucleotide
  Target: LAMA2; (+) strand; PAM type: YTN; PAM sequence: CTT
tgaaaactggcacaagacag

SEQ ID NO: 322132 - DNA, 20 bp, Artificial Sequence
  Description of Artificial Sequence: Synthetic oligonucleotide
  Target: LAMA2; (+) strand; PAM type: YTN; PAM sequence: TTT
gaaaactggcacaagacagg

SEQ ID NO: 322133 - DNA, 20 bp, Artificial Sequence
  Description of Artificial Sequence: Synthetic oligonucleotide
  Target: LAMA2; (+) strand; PAM type: YTN; PAM sequence: TTG
aaaactggcacaagacaggg

SEQ ID NO: 322134 - DNA, 20 bp, Artificial Sequence
  Description of Artificial Sequence: Synthetic oligonucleotide
  Target: LAMA2; (+) strand; PAM type: YTN; PAM sequence: CTG
gcacaagacagggatgccct

SEQ ID NO: 322135 - DNA, 20 bp, Artificial Sequence
  Description of Artificial Sequence: Synthetic oligonucleotide
  Target: LAMA2; (+) strand; PAM type: YTN; PAM sequence: CTC
tctcaccgctcctattcaac

SEQ ID NO: 322136 - DNA, 20 bp, Artificial Sequence
  Description of Artificial Sequence: Synthetic oligonucleotide
  Target: LAMA2; (+) strand; PAM type: YTN; PAM sequence: CTC
tcaccgctcctattcaacat

SEQ ID NO: 322137 - DNA, 20 bp, Artificial Sequence
  Description of Artificial Sequence: Synthetic oligonucleotide
  Target: LAMA2; (+) strand; PAM type: YTN; PAM sequence: CTC
accgctcctattcaacatag

SEQ ID NO: 322138 - DNA, 20 bp, Artificial Sequence
  Description of Artificial Sequence: Synthetic oligonucleotide
  Target: LAMA2; (+) strand; PAM type: YTN; PAM sequence: CTC
ctattcaacatagtgttgga

SEQ ID NO: 322139 - DNA, 20 bp, Artificial Sequence
  Description of Artificial Sequence: Synthetic oligonucleotide
  Target: LAMA2; (+) strand; PAM type: YTN; PAM sequence: CTA
ttcaacatagtgttggaagt

SEQ ID NO: 322140 - DNA, 20 bp, Artificial Sequence
  Description of Artificial Sequence: Synthetic oligonucleotide
  Target: LAMA2; (+) strand; PAM type: YTN; PAM sequence: TTC
aacatagtgttggaagttct

SEQ ID NO: 322141 - DNA, 20 bp, Artificial Sequence
  Description of Artificial Sequence: Synthetic oligonucleotide
  Target: LAMA2; (+) strand; PAM type: YTN; PAM sequence: TTG
gaagttctggccagggcaat

SEQ ID NO: 322142 - DNA, 20 bp, Artificial Sequence
  Description of Artificial Sequence: Synthetic oligonucleotide
  Target: LAMA2; (+) strand; PAM type: YTN; PAM sequence: TTC
tggccagggcaatcaggcag

SEQ ID NO: 322143 - DNA, 20 bp, Artificial Sequence
  Description of Artificial Sequence: Synthetic oligonucleotide
  Target: LAMA2; (+) strand; PAM type: YTN; PAM sequence: CTG
gccagggcaatcaggcagga

SEQ ID NO: 322144 - DNA, 20 bp, Artificial Sequence
  Description of Artificial Sequence: Synthetic oligonucleotide
  Target: LAMA2; (+) strand; PAM type: YTN; PAM sequence: TTC
aattaggaaaagaggaagtc

SEQ ID NO: 322145 - DNA, 20 bp, Artificial Sequence
  Description of Artificial Sequence: Synthetic oligonucleotide
  Target: LAMA2; (+) strand; PAM type: YTN; PAM sequence: TTA
ggaaaagaggaagtcaaatt

SEQ ID NO: 322146 - DNA, 20 bp, Artificial Sequence
  Description of Artificial Sequence: Synthetic oligonucleotide
  Target: LAMA2; (+) strand; PAM type: YTN; PAM sequence: TTG
tccctgtttgcagacgacat

SEQ ID NO: 322147 - DNA, 20 bp, Artificial Sequence
  Description of Artificial Sequence: Synthetic oligonucleotide
  Target: LAMA2; (+) strand; PAM type: YTN; PAM sequence: CTG
tttgcagacgacatgattgt

SEQ ID NO: 322148 - DNA, 20 bp, Artificial Sequence
  Description of Artificial Sequence: Synthetic oligonucleotide
  Target: LAMA2; (+) strand; PAM type: YTN; PAM sequence: TTT
gcagacgacatgattgttta

SEQ ID NO: 322149 - DNA, 20 bp, Artificial Sequence
  Description of Artificial Sequence: Synthetic oligonucleotide
  Target: LAMA2; (+) strand; PAM type: YTN; PAM sequence: TTG
cagacgacatgattgtttat

SEQ ID NO: 322150 - DNA, 20 bp, Artificial Sequence
  Description of Artificial Sequence: Synthetic oligonucleotide
  Target: LAMA2; (+) strand; PAM type: YTN; PAM sequence: TTG
tttatctagaaaaccccatc

SEQ ID NO: 322151 - DNA, 20 bp, Artificial Sequence
  Description of Artificial Sequence: Synthetic oligonucleotide
  Target: LAMA2; (+) strand; PAM type: YTN; PAM sequence: TTT
atctagaaaaccccatcgtc

SEQ ID NO: 322152 - DNA, 20 bp, Artificial Sequence
  Description of Artificial Sequence: Synthetic oligonucleotide
  Target: LAMA2; (+) strand; PAM type: YTN; PAM sequence: TTA
tctagaaaaccccatcgtct

SEQ ID NO: 322153 - DNA, 20 bp, Artificial Sequence
  Description of Artificial Sequence: Synthetic oligonucleotide
  Target: LAMA2; (+) strand; PAM type: YTN; PAM sequence: CTA
gaaaaccccatcgtctcagc

SEQ ID NO: 322154 - DNA, 20 bp, Artificial Sequence
  Description of Artificial Sequence: Synthetic oligonucleotide
  Target: LAMA2; (+) strand; PAM type: YTN; PAM sequence: CTC
agcccaaaatctccttaagc

SEQ ID NO: 322155 - DNA, 20 bp, Artificial Sequence
  Description of Artificial Sequence: Synthetic oligonucleotide
  Target: LAMA2; (+) strand; PAM type: YTN; PAM sequence: CTC
cttaagctgataagcaactt

SEQ ID NO: 322156 - DNA, 20 bp, Artificial Sequence
  Description of Artificial Sequence: Synthetic oligonucleotide
  Target: LAMA2; (+) strand; PAM type: YTN; PAM sequence: CTT
aagctgataagcaacttcag

SEQ ID NO: 322157 - DNA, 20 bp, Artificial Sequence
  Description of Artificial Sequence: Synthetic oligonucleotide
  Target: LAMA2; (+) strand; PAM type: YTN; PAM sequence: TTA
agctgataagcaacttcagc

SEQ ID NO: 322158 - DNA, 20 bp, Artificial Sequence
  Description of Artificial Sequence: Synthetic oligonucleotide
  Target: LAMA2; (+) strand; PAM type: YTN; PAM sequence: CTG
ataagcaacttcagcaaagt

SEQ ID NO: 322159 - DNA, 20 bp, Artificial Sequence
  Description of Artificial Sequence: Synthetic oligonucleotide
  Target: LAMA2; (+) strand; PAM type: YTN; PAM sequence: CTT
cagcaaagtctcaggataca

SEQ ID NO: 322160 - DNA, 20 bp, Artificial Sequence
  Description of Artificial Sequence: Synthetic oligonucleotide
  Target: LAMA2; (+) strand; PAM type: YTN; PAM sequence: TTC
agcaaagtctcaggatacaa

SEQ ID NO: 322161 - DNA, 20 bp, Artificial Sequence
  Description of Artificial Sequence: Synthetic oligonucleotide
  Target: LAMA2; (+) strand; PAM type: YTN; PAM sequence: CTC
aggatacaaaatcaatgtac

SEQ ID NO: 322162 - DNA, 20 bp, Artificial Sequence
  Description of Artificial Sequence: Synthetic oligonucleotide
  Target: LAMA2; (+) strand; PAM type: YTN; PAM sequence: TTC
ttatacaccaacaacagaca

SEQ ID NO: 322163 - DNA, 20 bp, Artificial Sequence
  Description of Artificial Sequence: Synthetic oligonucleotide
  Target: LAMA2; (+) strand; PAM type: YTN; PAM sequence: CTT
atacaccaacaacagacaaa

SEQ ID NO: 322164 - DNA, 20 bp, Artificial Sequence
  Description of Artificial Sequence: Synthetic oligonucleotide
  Target: LAMA2; (+) strand; PAM type: YTN; PAM sequence: TTA
tacaccaacaacagacaaac

SEQ ID NO: 322165 - DNA, 20 bp, Artificial Sequence
  Description of Artificial Sequence: Synthetic oligonucleotide
  Target: LAMA2; (+) strand; PAM type: YTN; PAM sequence: CTC
ccattcacaattgcttcaaa

SEQ ID NO: 322166 - DNA, 20 bp, Artificial Sequence
  Description of Artificial Sequence: Synthetic oligonucleotide
  Target: LAMA2; (+) strand; PAM type: YTN; PAM sequence: TTC
acaattgcttcaaagagaat

SEQ ID NO: 322167 - DNA, 20 bp, Artificial Sequence
  Description of Artificial Sequence: Synthetic oligonucleotide
  Target: LAMA2; (+) strand; PAM type: YTN; PAM sequence: TTG
cttcaaagagaataaaatac

SEQ ID NO: 322168 - DNA, 20 bp, Artificial Sequence
  Description of Artificial Sequence: Synthetic oligonucleotide
  Target: LAMA2; (+) strand; PAM type: YTN; PAM sequence: CTT
caaagagaataaaataccta

SEQ ID NO: 322169 - DNA, 20 bp, Artificial Sequence
  Description of Artificial Sequence: Synthetic oligonucleotide
  Target: LAMA2; (+) strand; PAM type: YTN; PAM sequence: TTC
aaagagaataaaatacctag

SEQ ID NO: 322170 - DNA, 20 bp, Artificial Sequence
  Description of Artificial Sequence: Synthetic oligonucleotide
  Target: LAMA2; (+) strand; PAM type: YTN; PAM sequence: CTA
ggaatccaacttacaaggga

SEQ ID NO: 322171 - DNA, 20 bp, Artificial Sequence
  Description of Artificial Sequence: Synthetic oligonucleotide
  Target: LAMA2; (+) strand; PAM type: YTN; PAM sequence: CTT
acaagggatgtgaaggacct

SEQ ID NO: 322172 - DNA, 20 bp, Artificial Sequence
  Description of Artificial Sequence: Synthetic oligonucleotide
  Target: LAMA2; (+) strand; PAM type: YTN; PAM sequence: TTA
caagggatgtgaaggacctc

SEQ ID NO: 322173 - DNA, 20 bp, Artificial Sequence
  Description of Artificial Sequence: Synthetic oligonucleotide
  Target: LAMA2; (+) strand; PAM type: YTN; PAM sequence: CTC
ttcaaggagaactacaaacc

SEQ ID NO: 322174 - DNA, 20 bp, Artificial Sequence
  Description of Artificial Sequence: Synthetic oligonucleotide
  Target: LAMA2; (+) strand; PAM type: YTN; PAM sequence: CTT
caaggagaactacaaaccac

SEQ ID NO: 322175 - DNA, 20 bp, Artificial Sequence
  Description of Artificial Sequence: Synthetic oligonucleotide
  Target: LAMA2; (+) strand; PAM type: YTN; PAM sequence: TTC
aaggagaactacaaaccact

SEQ ID NO: 322176 - DNA, 20 bp, Artificial Sequence
  Description of Artificial Sequence: Synthetic oligonucleotide
  Target: LAMA2; (+) strand; PAM type: YTN; PAM sequence: CTA
caaaccactgctcaaggaaa

SEQ ID NO: 322177 - DNA, 20 bp, Artificial Sequence
  Description of Artificial Sequence: Synthetic oligonucleotide
  Target: LAMA2; (+) strand; PAM type: YTN; PAM sequence: CTG
ctcaaggaaataaaagagga

SEQ ID NO: 322178 - DNA, 20 bp, Artificial Sequence
  Description of Artificial Sequence: Synthetic oligonucleotide
  Target: LAMA2; (+) strand; PAM type: YTN; PAM sequence: CTC
aaggaaataaaagaggagac

SEQ ID NO: 322179 - DNA, 20 bp, Artificial Sequence
  Description of Artificial Sequence: Synthetic oligonucleotide
  Target: LAMA2; (+) strand; PAM type: YTN; PAM sequence: TTC
catgctcatgggtaggaaga

SEQ ID NO: 322180 - DNA, 20 bp, Artificial Sequence
  Description of Artificial Sequence: Synthetic oligonucleotide
  Target: LAMA2; (+) strand; PAM type: YTN; PAM sequence: CTC
atgggtaggaagaatcaata

SEQ ID NO: 322181 - DNA, 20 bp, Artificial Sequence
  Description of Artificial Sequence: Synthetic oligonucleotide
  Target: LAMA2; (+) strand; PAM type: YTN; PAM sequence: CTG
cccaaggtaatttacagatt

SEQ ID NO: 322182 - DNA, 20 bp, Artificial Sequence
  Description of Artificial Sequence: Synthetic oligonucleotide
  Target: LAMA2; (+) strand; PAM type: YTN; PAM sequence: TTT
acagattcaatgccatcccc

SEQ ID NO: 322183 - DNA, 20 bp, Artificial Sequence
  Description of Artificial Sequence: Synthetic oligonucleotide
  Target: LAMA2; (+) strand; PAM type: YTN; PAM sequence: TTA
cagattcaatgccatcccca

SEQ ID NO: 322184 - DNA, 20 bp, Artificial Sequence
  Description of Artificial Sequence: Synthetic oligonucleotide
  Target: LAMA2; (+) strand; PAM type: YTN; PAM sequence: TTC
aatgccatccccatcaagct

SEQ ID NO: 322185 - DNA, 20 bp, Artificial Sequence
  Description of Artificial Sequence: Synthetic oligonucleotide
  Target: LAMA2; (+) strand; PAM type: YTN; PAM sequence: CTA
ccaatgactttcttcacaga

SEQ ID NO: 322186 - DNA, 20 bp, Artificial Sequence
  Description of Artificial Sequence: Synthetic oligonucleotide
  Target: LAMA2; (+) strand; PAM type: YTN; PAM sequence: CTT
tcttcacagaattggaaaaa

SEQ ID NO: 322187 - DNA, 20 bp, Artificial Sequence
  Description of Artificial Sequence: Synthetic oligonucleotide
  Target: LAMA2; (+) strand; PAM type: YTN; PAM sequence: TTT
cttcacagaattggaaaaaa

SEQ ID NO: 322188 - DNA, 20 bp, Artificial Sequence
  Description of Artificial Sequence: Synthetic oligonucleotide
  Target: LAMA2; (+) strand; PAM type: YTN; PAM sequence: TTC
ttcacagaattggaaaaaac

SEQ ID NO: 322189 - DNA, 20 bp, Artificial Sequence
  Description of Artificial Sequence: Synthetic oligonucleotide
  Target: LAMA2; (+) strand; PAM type: YTN; PAM sequence: CTT
cacagaattggaaaaaacta

SEQ ID NO: 322190 - DNA, 20 bp, Artificial Sequence
  Description of Artificial Sequence: Synthetic oligonucleotide
  Target: LAMA2; (+) strand; PAM type: YTN; PAM sequence: TTC
acagaattggaaaaaactac

SEQ ID NO: 322191 - DNA, 20 bp, Artificial Sequence
  Description of Artificial Sequence: Synthetic oligonucleotide
  Target: LAMA2; (+) strand; PAM type: YTN; PAM sequence: TTG
gaaaaaactactttaaagtt

SEQ ID NO: 322192 - DNA, 20 bp, Artificial Sequence
  Description of Artificial Sequence: Synthetic oligonucleotide
  Target: LAMA2; (+) strand; PAM type: YTN; PAM sequence: CTA
ctttaaagttcatatggaac

SEQ ID NO: 322193 - DNA, 20 bp, Artificial Sequence
  Description of Artificial Sequence: Synthetic oligonucleotide
  Target: LAMA2; (+) strand; PAM type: YTN; PAM sequence: CTT
taaagttcatatggaaccaa

SEQ ID NO: 322194 - DNA, 20 bp, Artificial Sequence
  Description of Artificial Sequence: Synthetic oligonucleotide
  Target: LAMA2; (+) strand; PAM type: YTN; PAM sequence: TTT
aaagttcatatggaaccaaa

SEQ ID NO: 322195 - DNA, 20 bp, Artificial Sequence
  Description of Artificial Sequence: Synthetic oligonucleotide
  Target: LAMA2; (+) strand; PAM type: YTN; PAM sequence: TTA
aagttcatatggaaccaaaa

SEQ ID NO: 322196 - DNA, 20 bp, Artificial Sequence
  Description of Artificial Sequence: Synthetic oligonucleotide
  Target: LAMA2; (+) strand; PAM type: YTN; PAM sequence: TTC
atatggaaccaaaaaagagc

SEQ ID NO: 322197 - DNA, 20 bp, Artificial Sequence
  Description of Artificial Sequence: Synthetic oligonucleotide
  Target: LAMA2; (+) strand; PAM type: YTN; PAM sequence: CTG
cattgccaagtcaatcctaa

SEQ ID NO: 322198 - DNA, 20 bp, Artificial Sequence
  Description of Artificial Sequence: Synthetic oligonucleotide
  Target: LAMA2; (+) strand; PAM type: YTN; PAM sequence: TTG
ccaagtcaatcctaagccaa

SEQ ID NO: 322199 - DNA, 20 bp, Artificial Sequence
  Description of Artificial Sequence: Synthetic oligonucleotide
  Target: LAMA2; (+) strand; PAM type: YTN; PAM sequence: CTA
agccaaaagaacaaagctgg

SEQ ID NO: 322200 - DNA, 20 bp, Artificial Sequence
  Description of Artificial Sequence: Synthetic oligonucleotide
  Target: LAMA2; (+) strand; PAM type: YTN; PAM sequence: CTG
gaggcatcacactacctgac

SEQ ID NO: 322201 - DNA, 20 bp, Artificial Sequence
  Description of Artificial Sequence: Synthetic oligonucleotide
  Target: LAMA2; (+) strand; PAM type: YTN; PAM sequence: CTA
cctgacttcaaactatacta

SEQ ID NO: 322202 - DNA, 20 bp, Artificial Sequence
  Description of Artificial Sequence: Synthetic oligonucleotide
  Target: LAMA2; (+) strand; PAM type: YTN; PAM sequence: CTG
acttcaaactatactacaag

SEQ ID NO: 322203 - DNA, 20 bp, Artificial Sequence
  Description of Artificial Sequence: Synthetic oligonucleotide
  Target: LAMA2; (+) strand; PAM type: YTN; PAM sequence: CTT
caaactatactacaaggcta

SEQ ID NO: 322204 - DNA, 20 bp, Artificial Sequence
  Description of Artificial Sequence: Synthetic oligonucleotide
  Target: LAMA2; (+) strand; PAM type: YTN; PAM sequence: TTC
aaactatactacaaggctac

SEQ ID NO: 322205 - DNA, 20 bp, Artificial Sequence
  Description of Artificial Sequence: Synthetic oligonucleotide
  Target: LAMA2; (+) strand; PAM type: YTN; PAM sequence: CTA
tactacaaggctacagtaac

SEQ ID NO: 322206 - DNA, 20 bp, Artificial Sequence
  Description of Artificial Sequence: Synthetic oligonucleotide
  Target: LAMA2; (+) strand; PAM type: YTN; PAM sequence: CTA
caaggctacagtaaccaaaa

SEQ ID NO: 322207 - DNA, 20 bp, Artificial Sequence
  Description of Artificial Sequence: Synthetic oligonucleotide
  Target: LAMA2; (+) strand; PAM type: YTN; PAM sequence: CTA
cagtaaccaaaacagcatgg

SEQ ID NO: 322208 - DNA, 20 bp, Artificial Sequence
  Description of Artificial Sequence: Synthetic oligonucleotide
  Target: LAMA2; (+) strand; PAM type: YTN; PAM sequence: CTG
gtacaaaaacagagatatag

SEQ ID NO: 322209 - DNA, 20 bp, Artificial Sequence
  Description of Artificial Sequence: Synthetic oligonucleotide
  Target: LAMA2; (+) strand; PAM type: YTN; PAM sequence: CTC
agaaataatgccgcatatct

SEQ ID NO: 322210 - DNA, 20 bp, Artificial Sequence
  Description of Artificial Sequence: Synthetic oligonucleotide
  Target: LAMA2; (+) strand; PAM type: YTN; PAM sequence: CTA
caactatctgatctttgaca

SEQ ID NO: 322211 - DNA, 20 bp, Artificial Sequence
  Description of Artificial Sequence: Synthetic oligonucleotide
  Target: LAMA2; (+) strand; PAM type: YTN; PAM sequence: CTA
tctgatctttgacaaacctg

SEQ ID NO: 322212 - DNA, 20 bp, Artificial Sequence
  Description of Artificial Sequence: Synthetic oligonucleotide
  Target: LAMA2; (+) strand; PAM type: YTN; PAM sequence: CTG
atctttgacaaacctgagaa

SEQ ID NO: 322213 - DNA, 20 bp, Artificial Sequence
  Description of Artificial Sequence: Synthetic oligonucleotide
  Target: LAMA2; (+) strand; PAM type: YTN; PAM sequence: CTT
tgacaaacctgagaaaaaca

SEQ ID NO: 322214 - DNA, 20 bp, Artificial Sequence
  Description of Artificial Sequence: Synthetic oligonucleotide
  Target: LAMA2; (+) strand; PAM type: YTN; PAM sequence: TTT
gacaaacctgagaaaaacaa

SEQ ID NO: 322215 - DNA, 20 bp, Artificial Sequence
  Description of Artificial Sequence: Synthetic oligonucleotide
  Target: LAMA2; (+) strand; PAM type: YTN; PAM sequence: TTG
acaaacctgagaaaaacaag

SEQ ID NO: 322216 - DNA, 20 bp, Artificial Sequence
  Description of Artificial Sequence: Synthetic oligonucleotide
  Target: LAMA2; (+) strand; PAM type: YTN; PAM sequence: CTG
agaaaaacaagcaatgggga

SEQ ID NO: 322217 - DNA, 20 bp, Artificial Sequence
  Description of Artificial Sequence: Synthetic oligonucleotide
  Target: LAMA2; (+) strand; PAM type: YTN; PAM sequence: TTC
cctatttaataaatggtgct

SEQ ID NO: 322218 - DNA, 20 bp, Artificial Sequence
  Description of Artificial Sequence: Synthetic oligonucleotide
  Target: LAMA2; (+) strand; PAM type: YTN; PAM sequence: CTA
tttaataaatggtgctggga

SEQ ID NO: 322219 - DNA, 20 bp, Artificial Sequence
  Description of Artificial Sequence: Synthetic oligonucleotide
  Target: LAMA2; (+) strand; PAM type: YTN; PAM sequence: TTT
aataaatggtgctgggaaaa

SEQ ID NO: 322220 - DNA, 20 bp, Artificial Sequence
  Description of Artificial Sequence: Synthetic oligonucleotide
  Target: LAMA2; (+) strand; PAM type: YTN; PAM sequence: TTA
ataaatggtgctgggaaaac

SEQ ID NO: 322221 - DNA, 20 bp, Artificial Sequence
  Description of Artificial Sequence: Synthetic oligonucleotide
  Target: LAMA2; (+) strand; PAM type: YTN; PAM sequence: CTG
ggaaaactggctagccatat

SEQ ID NO: 322222 - DNA, 20 bp, Artificial Sequence
  Description of Artificial Sequence: Synthetic oligonucleotide
  Target: LAMA2; (+) strand; PAM type: YTN; PAM sequence: CTG
gctagccatatgtagaaagc

SEQ ID NO: 322223 - DNA, 20 bp, Artificial Sequence
  Description of Artificial Sequence: Synthetic oligonucleotide
  Target: LAMA2; (+) strand; PAM type: YTN; PAM sequence: CTA
gccatatgtagaaagctgaa

SEQ ID NO: 322224 - DNA, 20 bp, Artificial Sequence
  Description of Artificial Sequence: Synthetic oligonucleotide
  Target: LAMA2; (+) strand; PAM type: YTN; PAM sequence: CTG
aaactggatcccttccttac

SEQ ID NO: 322225 - DNA, 20 bp, Artificial Sequence
  Description of Artificial Sequence: Synthetic oligonucleotide
  Target: LAMA2; (+) strand; PAM type: YTN; PAM sequence: CTG
gatcccttccttacacctta

SEQ ID NO: 322226 - DNA, 20 bp, Artificial Sequence
  Description of Artificial Sequence: Synthetic oligonucleotide
  Target: LAMA2; (+) strand; PAM type: YTN; PAM sequence: CTT
ccttacaccttatacaaaaa

SEQ ID NO: 322227 - DNA, 20 bp, Artificial Sequence
  Description of Artificial Sequence: Synthetic oligonucleotide
  Target: LAMA2; (+) strand; PAM type: YTN; PAM sequence: TTC
cttacaccttatacaaaaat

SEQ ID NO: 322228 - DNA, 20 bp, Artificial Sequence
  Description of Artificial Sequence: Synthetic oligonucleotide
  Target: LAMA2; (+) strand; PAM type: YTN; PAM sequence: CTT
acaccttatacaaaaatcaa

SEQ ID NO: 322229 - DNA, 20 bp, Artificial Sequence
  Description of Artificial Sequence: Synthetic oligonucleotide
  Target: LAMA2; (+) strand; PAM type: YTN; PAM sequence: TTA
caccttatacaaaaatcaat

SEQ ID NO: 322230 - DNA, 20 bp, Artificial Sequence
  Description of Artificial Sequence: Synthetic oligonucleotide
  Target: LAMA2; (+) strand; PAM type: YTN; PAM sequence: CTT
atacaaaaatcaattcaaga

SEQ ID NO: 322231 - DNA, 20 bp, Artificial Sequence
  Description of Artificial Sequence: Synthetic oligonucleotide
  Target: LAMA2; (+) strand; PAM type: YTN; PAM sequence: TTA
tacaaaaatcaattcaagat

SEQ ID NO: 322232 - DNA, 20 bp, Artificial Sequence
  Description of Artificial Sequence: Synthetic oligonucleotide
  Target: LAMA2; (+) strand; PAM type: YTN; PAM sequence: TTC
aagatggattaaagatttaa

SEQ ID NO: 322233 - DNA, 20 bp, Artificial Sequence
  Description of Artificial Sequence: Synthetic oligonucleotide
  Target: LAMA2; (+) strand; PAM type: YTN; PAM sequence: TTA
aagatttaaacgttaaacct

SEQ ID NO: 322234 - DNA, 20 bp, Artificial Sequence
  Description of Artificial Sequence: Synthetic oligonucleotide
  Target: LAMA2; (+) strand; PAM type: YTN; PAM sequence: TTT
aaacgttaaacctaaaacca

SEQ ID NO: 322235 - DNA, 20 bp, Artificial Sequence
  Description of Artificial Sequence: Synthetic oligonucleotide
  Target: LAMA2; (+) strand; PAM type: YTN; PAM sequence: TTA
aacgttaaacctaaaaccat

SEQ ID NO: 322236 - DNA, 20 bp, Artificial Sequence
  Description of Artificial Sequence: Synthetic oligonucleotide
  Target: LAMA2; (+) strand; PAM type: YTN; PAM sequence: TTA
aacctaaaaccataaaaacc

SEQ ID NO: 322237 - DNA, 20 bp, Artificial Sequence
  Description of Artificial Sequence: Synthetic oligonucleotide
  Target: LAMA2; (+) strand; PAM type: YTN; PAM sequence: CTA
aaaccataaaaaccctagaa

SEQ ID NO: 322238 - DNA, 20 bp, Artificial Sequence
  Description of Artificial Sequence: Synthetic oligonucleotide
  Target: LAMA2; (+) strand; PAM type: YTN; PAM sequence: CTA
gaagaaaacctaggcattac

SEQ ID NO: 322239 - DNA, 20 bp, Artificial Sequence
  Description of Artificial Sequence: Synthetic oligonucleotide
  Target: LAMA2; (+) strand; PAM type: YTN; PAM sequence: CTA
ggcattaccattcaggacat

SEQ ID NO: 322240 - DNA, 20 bp, Artificial Sequence
  Description of Artificial Sequence: Synthetic oligonucleotide
  Target: LAMA2; (+) strand; PAM type: YTN; PAM sequence: TTA
ccattcaggacataggcgtg

SEQ ID NO: 322241 - DNA, 20 bp, Artificial Sequence
  Description of Artificial Sequence: Synthetic oligonucleotide
  Target: LAMA2; (+) strand; PAM type: YTN; PAM sequence: TTC
aggacataggcgtgggcaag

SEQ ID NO: 322242 - DNA, 20 bp, Artificial Sequence
  Description of Artificial Sequence: Synthetic oligonucleotide
  Target: LAMA2; (+) strand; PAM type: YTN; PAM sequence: CTT
catgtccaaaacaccaaaag

SEQ ID NO: 322243 - DNA, 20 bp, Artificial Sequence
  Description of Artificial Sequence: Synthetic oligonucleotide
  Target: LAMA2; (+) strand; PAM type: YTN; PAM sequence: TTC
atgtccaaaacaccaaaagc

SEQ ID NO: 322244 - DNA, 20 bp, Artificial Sequence
  Description of Artificial Sequence: Synthetic oligonucleotide
  Target: LAMA2; (+) strand; PAM type: YTN; PAM sequence: TTG
acaaatgggatctaattaaa

SEQ ID NO: 322245 - DNA, 20 bp, Artificial Sequence
  Description of Artificial Sequence: Synthetic oligonucleotide
  Target: LAMA2; (+) strand; PAM type: YTN; PAM sequence: CTA
attaaactaaagagcttctg

SEQ ID NO: 322246 - DNA, 20 bp, Artificial Sequence
  Description of Artificial Sequence: Synthetic oligonucleotide
  Target: LAMA2; (+) strand; PAM type: YTN; PAM sequence: TTA
aactaaagagcttctgcaca

SEQ ID NO: 322247 - DNA, 20 bp, Artificial Sequence
  Description of Artificial Sequence: Synthetic oligonucleotide
  Target: LAMA2; (+) strand; PAM type: YTN; PAM sequence: CTA
aagagcttctgcacagcaaa

SEQ ID NO: 322248 - DNA, 20 bp, Artificial Sequence
  Description of Artificial Sequence: Synthetic oligonucleotide
  Target: LAMA2; (+) strand; PAM type: YTN; PAM sequence: CTT
ctgcacagcaaaagaaacta

SEQ ID NO: 322249 - DNA, 20 bp, Artificial Sequence
  Description of Artificial Sequence: Synthetic oligonucleotide
  Target: LAMA2; (+) strand; PAM type: YTN; PAM sequence: TTC
tgcacagcaaaagaaactac

SEQ ID NO: 322250 - DNA, 20 bp, Artificial Sequence
  Description of Artificial Sequence: Synthetic oligonucleotide
  Target: LAMA2; (+) strand; PAM type: YTN; PAM sequence: CTG
cacagcaaaagaaactacca

SEQ ID NO: 322251 - DNA, 20 bp, Artificial Sequence
  Description of Artificial Sequence: Synthetic oligonucleotide
  Target: LAMA2; (+) strand; PAM type: YTN; PAM sequence: CTA
ccatcagagtgaacaggcaa

SEQ ID NO: 322252 - DNA, 20 bp, Artificial Sequence
  Description of Artificial Sequence: Synthetic oligonucleotide
  Target: LAMA2; (+) strand; PAM type: YTN; PAM sequence: CTA
caacatgggagaaaattttt

SEQ ID NO: 322253 - DNA, 20 bp, Artificial Sequence
  Description of Artificial Sequence: Synthetic oligonucleotide
  Target: LAMA2; (+) strand; PAM type: YTN; PAM sequence: TTT
ttgcaacctactcatctgac

SEQ ID NO: 322254 - DNA, 20 bp, Artificial Sequence
  Description of Artificial Sequence: Synthetic oligonucleotide
  Target: LAMA2; (+) strand; PAM type: YTN; PAM sequence: TTT
tgcaacctactcatctgaca

SEQ ID NO: 322255 - DNA, 20 bp, Artificial Sequence
  Description of Artificial Sequence: Synthetic oligonucleotide
  Target: LAMA2; (+) strand; PAM type: YTN; PAM sequence: TTT
gcaacctactcatctgacaa

SEQ ID NO: 322256 - DNA, 20 bp, Artificial Sequence
  Description of Artificial Sequence: Synthetic oligonucleotide
  Target: LAMA2; (+) strand; PAM type: YTN; PAM sequence: TTG
caacctactcatctgacaaa

SEQ ID NO: 322257 - DNA, 20 bp, Artificial Sequence
  Description of Artificial Sequence: Synthetic oligonucleotide
  Target: LAMA2; (+) strand; PAM type: YTN; PAM sequence: CTA
ctcatctgacaaagggctaa

SEQ ID NO: 322258 - DNA, 20 bp, Artificial Sequence
  Description of Artificial Sequence: Synthetic oligonucleotide
  Target: LAMA2; (+) strand; PAM type: YTN; PAM sequence: CTC
atctgacaaagggctaatat

SEQ ID NO: 322259 - DNA, 20 bp, Artificial Sequence
  Description of Artificial Sequence: Synthetic oligonucleotide
  Target: LAMA2; (+) strand; PAM type: YTN; PAM sequence: CTG
acaaagggctaatatccaga

SEQ ID NO: 322260 - DNA, 20 bp, Artificial Sequence
  Description of Artificial Sequence: Synthetic oligonucleotide
  Target: LAMA2; (+) strand; PAM type: YTN; PAM sequence: CTA
atatccagaatctacaatga

SEQ ID NO: 322261 - DNA, 20 bp, Artificial Sequence
  Description of Artificial Sequence: Synthetic oligonucleotide
  Target: LAMA2; (+) strand; PAM type: YTN; PAM sequence: CTA
caatgaactcaaacaaattt

SEQ ID NO: 322262 - DNA, 20 bp, Artificial Sequence
  Description of Artificial Sequence: Synthetic oligonucleotide
  Target: LAMA2; (+) strand; PAM type: YTN; PAM sequence: CTC
aaacaaatttacaagaaaaa

SEQ ID NO: 322263 - DNA, 20 bp, Artificial Sequence
  Description of Artificial Sequence: Synthetic oligonucleotide
  Target: LAMA2; (+) strand; PAM type: YTN; PAM sequence: TTT
acaagaaaaaaacaaacaac

SEQ ID NO: 322264 - DNA, 20 bp, Artificial Sequence
  Description of Artificial Sequence: Synthetic oligonucleotide
  Target: LAMA2; (+) strand; PAM type: YTN; PAM sequence: TTA
caagaaaaaaacaaacaacc

SEQ ID NO: 322265 - DNA, 20 bp, Artificial Sequence
  Description of Artificial Sequence: Synthetic oligonucleotide
  Target: LAMA2; (+) strand; PAM type: YTN; PAM sequence: CTT
ctcaaaagaagacatttatg

SEQ ID NO: 322266 - DNA, 20 bp, Artificial Sequence
  Description of Artificial Sequence: Synthetic oligonucleotide
  Target: LAMA2; (+) strand; PAM type: YTN; PAM sequence: TTC
tcaaaagaagacatttatgc

SEQ ID NO: 322267 - DNA, 20 bp, Artificial Sequence
  Description of Artificial Sequence: Synthetic oligonucleotide
  Target: LAMA2; (+) strand; PAM type: YTN; PAM sequence: CTC
aaaagaagacatttatgcag

SEQ ID NO: 322268 - DNA, 20 bp, Artificial Sequence
  Description of Artificial Sequence: Synthetic oligonucleotide
  Target: LAMA2; (+) strand; PAM type: YTN; PAM sequence: TTT
atgcagccaaaaaacacatg

SEQ ID NO: 322269 - DNA, 20 bp, Artificial Sequence
  Description of Artificial Sequence: Synthetic oligonucleotide
  Target: LAMA2; (+) strand; PAM type: YTN; PAM sequence: TTA
tgcagccaaaaaacacatga

SEQ ID NO: 322270 - DNA, 20 bp, Artificial Sequence
  Description of Artificial Sequence: Synthetic oligonucleotide
  Target: LAMA2; (+) strand; PAM type: YTN; PAM sequence: CTC
atcatcactggccatcagag

SEQ ID NO: 322271 - DNA, 20 bp, Artificial Sequence
  Description of Artificial Sequence: Synthetic oligonucleotide
  Target: LAMA2; (+) strand; PAM type: YTN; PAM sequence: CTG
gccatcagagaaatgcaaat

SEQ ID NO: 322272 - DNA, 20 bp, Artificial Sequence
  Description of Artificial Sequence: Synthetic oligonucleotide
  Target: LAMA2; (+) strand; PAM type: YTN; PAM sequence: CTA
tgagatatcatctcacacca

SEQ ID NO: 322273 - DNA, 20 bp, Artificial Sequence
  Description of Artificial Sequence: Synthetic oligonucleotide
  Target: LAMA2; (+) strand; PAM type: YTN; PAM sequence: CTC
acaccagttagaatggcaat

SEQ ID NO: 322274 - DNA, 20 bp, Artificial Sequence
  Description of Artificial Sequence: Synthetic oligonucleotide
  Target: LAMA2; (+) strand; PAM type: YTN; PAM sequence: TTA
gaatggcaatcattaaaaag

SEQ ID NO: 322275 - DNA, 20 bp, Artificial Sequence
  Description of Artificial Sequence: Synthetic oligonucleotide
  Target: LAMA2; (+) strand; PAM type: YTN; PAM sequence: TTA
aaaagtcaggaaacaacagg

SEQ ID NO: 322276 - DNA, 20 bp, Artificial Sequence
  Description of Artificial Sequence: Synthetic oligonucleotide
  Target: LAMA2; (+) strand; PAM type: YTN; PAM sequence: CTG
gagaggatgtggagaaatag

SEQ ID NO: 322277 - DNA, 20 bp, Artificial Sequence
  Description of Artificial Sequence: Synthetic oligonucleotide
  Target: LAMA2; (+) strand; PAM type: YTN; PAM sequence: CTT
ttacactgttggtgggactg

SEQ ID NO: 322278 - DNA, 20 bp, Artificial Sequence
  Description of Artificial Sequence: Synthetic oligonucleotide
  Target: LAMA2; (+) strand; PAM type: YTN; PAM sequence: TTT
tacactgttggtgggactgt

SEQ ID NO: 322279 - DNA, 20 bp, Artificial Sequence
  Description of Artificial Sequence: Synthetic oligonucleotide
  Target: LAMA2; (+) strand; PAM type: YTN; PAM sequence: TTT
acactgttggtgggactgta

SEQ ID NO: 322280 - DNA, 20 bp, Artificial Sequence
  Description of Artificial Sequence: Synthetic oligonucleotide
  Target: LAMA2; (+) strand; PAM type: YTN; PAM sequence: TTA
cactgttggtgggactgtaa

SEQ ID NO: 322281 - DNA, 20 bp, Artificial Sequence
  Description of Artificial Sequence: Synthetic oligonucleotide
  Target: LAMA2; (+) strand; PAM type: YTN; PAM sequence: CTG
ttggtgggactgtaaactag

SEQ ID NO: 322282 - DNA, 20 bp, Artificial Sequence
  Description of Artificial Sequence: Synthetic oligonucleotide
  Target: LAMA2; (+) strand; PAM type: YTN; PAM sequence: TTG
gtgggactgtaaactagttc

SEQ ID NO: 322283 - DNA, 20 bp, Artificial Sequence
  Description of Artificial Sequence: Synthetic oligonucleotide
  Target: LAMA2; (+) strand; PAM type: YTN; PAM sequence: CTG
taaactagttcaaccattgt

SEQ ID NO: 322284 - DNA, 20 bp, Artificial Sequence
  Description of Artificial Sequence: Synthetic oligonucleotide
  Target: LAMA2; (+) strand; PAM type: YTN; PAM sequence: CTA
gttcaaccattgtggaagtc

SEQ ID NO: 322285 - DNA, 20 bp, Artificial Sequence
  Description of Artificial Sequence: Synthetic oligonucleotide
  Target: LAMA2; (+) strand; PAM type: YTN; PAM sequence: TTC
aaccattgtggaagtcagtg

SEQ ID NO: 322286 - DNA, 20 bp, Artificial Sequence
  Description of Artificial Sequence: Synthetic oligonucleotide
  Target: LAMA2; (+) strand; PAM type: YTN; PAM sequence: TTG
tggaagtcagtgtggcgatt

SEQ ID NO: 322287 - DNA, 20 bp, Artificial Sequence
  Description of Artificial Sequence: Synthetic oligonucleotide
  Target: LAMA2; (+) strand; PAM type: YTN; PAM sequence: TTC
ctcagggatctagaactaga

SEQ ID NO: 322288 - DNA, 20 bp, Artificial Sequence
  Description of Artificial Sequence: Synthetic oligonucleotide
  Target: LAMA2; (+) strand; PAM type: YTN; PAM sequence: CTC
agggatctagaactagaaat

SEQ ID NO: 322289 - DNA, 20 bp, Artificial Sequence
  Description of Artificial Sequence: Synthetic oligonucleotide
  Target: LAMA2; (+) strand; PAM type: YTN; PAM sequence: CTA
gaactagaaataccatttga

SEQ ID NO: 322290 - DNA, 20 bp, Artificial Sequence
  Description of Artificial Sequence: Synthetic oligonucleotide
  Target: LAMA2; (+) strand; PAM type: YTN; PAM sequence: CTA
gaaataccatttgacccagc

SEQ ID NO: 322291 - DNA, 20 bp, Artificial Sequence
  Description of Artificial Sequence: Synthetic oligonucleotide
  Target: LAMA2; (+) strand; PAM type: YTN; PAM sequence: TTT
gacccagccatcccattact

SEQ ID NO: 322292 - DNA, 20 bp, Artificial Sequence
  Description of Artificial Sequence: Synthetic oligonucleotide
  Target: LAMA2; (+) strand; PAM type: YTN; PAM sequence: TTG
acccagccatcccattactg

SEQ ID NO: 322293 - DNA, 20 bp, Artificial Sequence
  Description of Artificial Sequence: Synthetic oligonucleotide
  Target: LAMA2; (+) strand; PAM type: YTN; PAM sequence: TTA
ctgggtatatacccaaatga

SEQ ID NO: 322294 - DNA, 20 bp, Artificial Sequence
  Description of Artificial Sequence: Synthetic oligonucleotide
  Target: LAMA2; (+) strand; PAM type: YTN; PAM sequence: CTG
ggtatatacccaaatgagta

SEQ ID NO: 322295 - DNA, 20 bp, Artificial Sequence
  Description of Artificial Sequence: Synthetic oligonucleotide
  Target: LAMA2; (+) strand; PAM type: YTN; PAM sequence: CTG
ctataaagacacatgcacac

SEQ ID NO: 322296 - DNA, 20 bp, Artificial Sequence
  Description of Artificial Sequence: Synthetic oligonucleotide
  Target: LAMA2; (+) strand; PAM type: YTN; PAM sequence: CTA
taaagacacatgcacacgta

SEQ ID NO: 322297 - DNA, 20 bp, Artificial Sequence
  Description of Artificial Sequence: Synthetic oligonucleotide
  Target: LAMA2; (+) strand; PAM type: YTN; PAM sequence: TTT
attgcggcactattcacaat

SEQ ID NO: 322298 - DNA, 20 bp, Artificial Sequence
  Description of Artificial Sequence: Synthetic oligonucleotide
  Target: LAMA2; (+) strand; PAM type: YTN; PAM sequence: TTA
ttgcggcactattcacaata

SEQ ID NO: 322299 - DNA, 20 bp, Artificial Sequence
  Description of Artificial Sequence: Synthetic oligonucleotide
  Target: LAMA2; (+) strand; PAM type: YTN; PAM sequence: TTG
cggcactattcacaatagca

SEQ ID NO: 322300 - DNA, 20 bp, Artificial Sequence
  Description of Artificial Sequence: Synthetic oligonucleotide
  Target: LAMA2; (+) strand; PAM type: YTN; PAM sequence: CTA
ttcacaatagcaaagacttg

SEQ ID NO: 322301 - DNA, 20 bp, Artificial Sequence
  Description of Artificial Sequence: Synthetic oligonucleotide
  Target: LAMA2; (+) strand; PAM type: YTN; PAM sequence: TTC
acaatagcaaagacttggaa

SEQ ID NO: 322302 - DNA, 20 bp, Artificial Sequence
  Description of Artificial Sequence: Synthetic oligonucleotide
  Target: LAMA2; (+) strand; PAM type: YTN; PAM sequence: CTT
ggaaccaacccaaatgtcca

SEQ ID NO: 322303 - DNA, 20 bp, Artificial Sequence
  Description of Artificial Sequence: Synthetic oligonucleotide
  Target: LAMA2; (+) strand; PAM type: YTN; PAM sequence: TTG
gaaccaacccaaatgtccaa

SEQ ID NO: 322304 - DNA, 20 bp, Artificial Sequence
  Description of Artificial Sequence: Synthetic oligonucleotide
  Target: LAMA2; (+) strand; PAM type: YTN; PAM sequence: CTG
gattaagaaaatgtggcaca

SEQ ID NO: 322305 - DNA, 20 bp, Artificial Sequence
  Description of Artificial Sequence: Synthetic oligonucleotide
  Target: LAMA2; (+) strand; PAM type: YTN; PAM sequence: TTA
agaaaatgtggcacatatac

SEQ ID NO: 322306 - DNA, 20 bp, Artificial Sequence
  Description of Artificial Sequence: Synthetic oligonucleotide
  Target: LAMA2; (+) strand; PAM type: YTN; PAM sequence: CTA
tgcagccataaaaaatgatg

SEQ ID NO: 322307 - DNA, 20 bp, Artificial Sequence
  Description of Artificial Sequence: Synthetic oligonucleotide
  Target: LAMA2; (+) strand; PAM type: YTN; PAM sequence: TTC
atatcctttgtagggacatg

SEQ ID NO: 322308 - DNA, 20 bp, Artificial Sequence
  Description of Artificial Sequence: Synthetic oligonucleotide
  Target: LAMA2; (+) strand; PAM type: YTN; PAM sequence: CTT
tgtagggacatggatgaaat

SEQ ID NO: 322309 - DNA, 20 bp, Artificial Sequence
  Description of Artificial Sequence: Synthetic oligonucleotide
  Target: LAMA2; (+) strand; PAM type: YTN; PAM sequence: TTT
gtagggacatggatgaaatt

SEQ ID NO: 322310 - DNA, 20 bp, Artificial Sequence
  Description of Artificial Sequence: Synthetic oligonucleotide
  Target: LAMA2; (+) strand; PAM type: YTN; PAM sequence: TTG
tagggacatggatgaaattg

SEQ ID NO: 322311 - DNA, 20 bp, Artificial Sequence
  Description of Artificial Sequence: Synthetic oligonucleotide
  Target: LAMA2; (+) strand; PAM type: YTN; PAM sequence: TTG
gaaaccatcattctcagtaa

SEQ ID NO: 322312 - DNA, 20 bp, Artificial Sequence
  Description of Artificial Sequence: Synthetic oligonucleotide
  Target: LAMA2; (+) strand; PAM type: YTN; PAM sequence: TTC
tcagtaaactatcgcaagaa

SEQ ID NO: 322313 - DNA, 20 bp, Artificial Sequence
  Description of Artificial Sequence: Synthetic oligonucleotide
  Target: LAMA2; (+) strand; PAM type: YTN; PAM sequence: CTC
agtaaactatcgcaagaaca

SEQ ID NO: 322314 - DNA, 20 bp, Artificial Sequence
  Description of Artificial Sequence: Synthetic oligonucleotide
  Target: LAMA2; (+) strand; PAM type: YTN; PAM sequence: CTA
tcgcaagaacaaaaaaccaa

SEQ ID NO: 322315 - DNA, 20 bp, Artificial Sequence
  Description of Artificial Sequence: Synthetic oligonucleotide
  Target: LAMA2; (+) strand; PAM type: YTN; PAM sequence: TTC
tcactcataggtgggaattg

SEQ ID NO: 322316 - DNA, 20 bp, Artificial Sequence
  Description of Artificial Sequence: Synthetic oligonucleotide
  Target: LAMA2; (+) strand; PAM type: YTN; PAM sequence: CTC
actcataggtgggaattgaa

SEQ ID NO: 322317 - DNA, 20 bp, Artificial Sequence
  Description of Artificial Sequence: Synthetic oligonucleotide
  Target: LAMA2; (+) strand; PAM type: YTN; PAM sequence: CTC
ataggtgggaattgaacaat

SEQ ID NO: 322318 - DNA, 20 bp, Artificial Sequence
  Description of Artificial Sequence: Synthetic oligonucleotide
  Target: LAMA2; (+) strand; PAM type: YTN; PAM sequence: TTG
aacaatgagatcacatggac

SEQ ID NO: 322319 - DNA, 20 bp, Artificial Sequence
  Description of Artificial Sequence: Synthetic oligonucleotide
  Target: LAMA2; (+) strand; PAM type: YTN; PAM sequence: CTC
tggggactgtggtggggtcg

SEQ ID NO: 322320 - DNA, 20 bp, Artificial Sequence
  Description of Artificial Sequence: Synthetic oligonucleotide
  Target: LAMA2; (+) strand; PAM type: YTN; PAM sequence: CTG
gggactgtggtggggtcggg

SEQ ID NO: 322321 - DNA, 20 bp, Artificial Sequence
  Description of Artificial Sequence: Synthetic oligonucleotide
  Target: LAMA2; (+) strand; PAM type: YTN; PAM sequence: CTG
tggtggggtcgggggagggg

SEQ ID NO: 322322 - DNA, 20 bp, Artificial Sequence
  Description of Artificial Sequence: Synthetic oligonucleotide
  Target: LAMA2; (+) strand; PAM type: YTN; PAM sequence: TTG
ggagatatacctaatgctag

SEQ ID NO: 322323 - DNA, 20 bp, Artificial Sequence
  Description of Artificial Sequence: Synthetic oligonucleotide
  Target: LAMA2; (+) strand; PAM type: YTN; PAM sequence: CTA
atgctagatgacacattagt

SEQ ID NO: 322324 - DNA, 20 bp, Artificial Sequence
  Description of Artificial Sequence: Synthetic oligonucleotide
  Target: LAMA2; (+) strand; PAM type: YTN; PAM sequence: CTA
gatgacacattagtgggtgc

SEQ ID NO: 322325 - DNA, 20 bp, Artificial Sequence
  Description of Artificial Sequence: Synthetic oligonucleotide
  Target: LAMA2; (+) strand; PAM type: YTN; PAM sequence: TTA
gtgggtgcagcgcaccagca

SEQ ID NO: 322326 - DNA, 20 bp, Artificial Sequence
  Description of Artificial Sequence: Synthetic oligonucleotide
  Target: LAMA2; (+) strand; PAM type: YTN; PAM sequence: CTA
acctgcacaatgtgcacatg

SEQ ID NO: 322327 - DNA, 20 bp, Artificial Sequence
  Description of Artificial Sequence: Synthetic oligonucleotide
  Target: LAMA2; (+) strand; PAM type: YTN; PAM sequence: CTG
cacaatgtgcacatgtaccc

SEQ ID NO: 322328 - DNA, 20 bp, Artificial Sequence
  Description of Artificial Sequence: Synthetic oligonucleotide
  Target: LAMA2; (+) strand; PAM type: YTN; PAM sequence: CTA
aaacttagagtataataata

SEQ ID NO: 322329 - DNA, 20 bp, Artificial Sequence
  Description of Artificial Sequence: Synthetic oligonucleotide
  Target: LAMA2; (+) strand; PAM type: YTN; PAM sequence: CTT
agagtataataataaaaaaa

SEQ ID NO: 322330 - DNA, 20 bp, Artificial Sequence
  Description of Artificial Sequence: Synthetic oligonucleotide
  Target: LAMA2; (+) strand; PAM type: YTN; PAM sequence: TTA
gagtataataataaaaaaaa

SEQ ID NO: 322331 - DNA, 20 bp, Artificial Sequence
  Description of Artificial Sequence: Synthetic oligonucleotide
  Target: LAMA2; (+) strand; PAM type: YTN; PAM sequence: TTT
tccttaaaataaaatcatat

SEQ ID NO: 322332 - DNA, 20 bp, Artificial Sequence
  Description of Artificial Sequence: Synthetic oligonucleotide
  Target: LAMA2; (+) strand; PAM type: YTN; PAM sequence: TTT
ccttaaaataaaatcatata

SEQ ID NO: 322333 - DNA, 20 bp, Artificial Sequence
  Description of Artificial Sequence: Synthetic oligonucleotide
  Target: LAMA2; (+) strand; PAM type: YTN; PAM sequence: TTC
cttaaaataaaatcatatat

SEQ ID NO: 322334 - DNA, 20 bp, Artificial Sequence
  Description of Artificial Sequence: Synthetic oligonucleotide
  Target: LAMA2; (+) strand; PAM type: YTN; PAM sequence: CTT
aaaataaaatcatatatcac

SEQ ID NO: 322335 - DNA, 20 bp, Artificial Sequence
  Description of Artificial Sequence: Synthetic oligonucleotide
  Target: LAMA2; (+) strand; PAM type: YTN; PAM sequence: TTA
aaataaaatcatatatcact

SEQ ID NO: 322336 - DNA, 20 bp, Artificial Sequence
  Description of Artificial Sequence: Synthetic oligonucleotide
  Target: LAMA2; (+) strand; PAM type: YTN; PAM sequence: CTA
cttactgacttgcacctata

SEQ ID NO: 322337 - DNA, 20 bp, Artificial Sequence
  Description of Artificial Sequence: Synthetic oligonucleotide
  Target: LAMA2; (+) strand; PAM type: YTN; PAM sequence: CTT
actgacttgcacctatatgt

SEQ ID NO: 322338 - DNA, 20 bp, Artificial Sequence
  Description of Artificial Sequence: Synthetic oligonucleotide
  Target: LAMA2; (+) strand; PAM type: YTN; PAM sequence: TTA
ctgacttgcacctatatgta

SEQ ID NO: 322339 - DNA, 20 bp, Artificial Sequence
  Description of Artificial Sequence: Synthetic oligonucleotide
  Target: LAMA2; (+) strand; PAM type: YTN; PAM sequence: CTG
acttgcacctatatgtactt

SEQ ID NO: 322340 - DNA, 20 bp, Artificial Sequence
  Description of Artificial Sequence: Synthetic oligonucleotide
  Target: LAMA2; (+) strand; PAM type: YTN; PAM sequence: CTT
gcacctatatgtacttctgg

SEQ ID NO: 322341 - DNA, 20 bp, Artificial Sequence
  Description of Artificial Sequence: Synthetic oligonucleotide
  Target: LAMA2; (+) strand; PAM type: YTN; PAM sequence: TTG
cacctatatgtacttctggg

SEQ ID NO: 322342 - DNA, 20 bp, Artificial Sequence
  Description of Artificial Sequence: Synthetic oligonucleotide
  Target: LAMA2; (+) strand; PAM type: YTN; PAM sequence: CTA
tatgtacttctgggaaattt

SEQ ID NO: 322343 - DNA, 20 bp, Artificial Sequence
  Description of Artificial Sequence: Synthetic oligonucleotide
  Target: LAMA2; (+) strand; PAM type: YTN; PAM sequence: CTT
ctgggaaatttagccagcat

SEQ ID NO: 322344 - DNA, 20 bp, Artificial Sequence
  Description of Artificial Sequence: Synthetic oligonucleotide
  Target: LAMA2; (+) strand; PAM type: YTN; PAM sequence: TTC
tgggaaatttagccagcatg

SEQ ID NO: 322345 - DNA, 20 bp, Artificial Sequence
  Description of Artificial Sequence: Synthetic oligonucleotide
  Target: LAMA2; (+) strand; PAM type: YTN; PAM sequence: CTG
ggaaatttagccagcatgta

SEQ ID NO: 322346 - DNA, 20 bp, Artificial Sequence
  Description of Artificial Sequence: Synthetic oligonucleotide
  Target: LAMA2; (+) strand; PAM type: YTN; PAM sequence: TTT
agccagcatgtatttccaca

SEQ ID NO: 322347 - DNA, 20 bp, Artificial Sequence
  Description of Artificial Sequence: Synthetic oligonucleotide
  Target: LAMA2; (+) strand; PAM type: YTN; PAM sequence: TTA
gccagcatgtatttccacaa

SEQ ID NO: 322348 - DNA, 20 bp, Artificial Sequence
  Description of Artificial Sequence: Synthetic oligonucleotide
  Target: LAMA2; (+) strand; PAM type: YTN; PAM sequence: TTT
ccacaatacagggatagttt

SEQ ID NO: 322349 - DNA, 20 bp, Artificial Sequence
  Description of Artificial Sequence: Synthetic oligonucleotide
  Target: LAMA2; (+) strand; PAM type: YTN; PAM sequence: TTC
cacaatacagggatagtttt

SEQ ID NO: 322350 - DNA, 20 bp, Artificial Sequence
  Description of Artificial Sequence: Synthetic oligonucleotide
  Target: LAMA2; (+) strand; PAM type: YTN; PAM sequence: TTT
ttgttctgtggactgctaaa

SEQ ID NO: 322351 - DNA, 20 bp, Artificial Sequence
  Description of Artificial Sequence: Synthetic oligonucleotide
  Target: LAMA2; (+) strand; PAM type: YTN; PAM sequence: TTT
tgttctgtggactgctaaat

SEQ ID NO: 322352 - DNA, 20 bp, Artificial Sequence
  Description of Artificial Sequence: Synthetic oligonucleotide
  Target: LAMA2; (+) strand; PAM type: YTN; PAM sequence: TTT
gttctgtggactgctaaatg

SEQ ID NO: 322353 - DNA, 20 bp, Artificial Sequence
  Description of Artificial Sequence: Synthetic oligonucleotide
  Target: LAMA2; (+) strand; PAM type: YTN; PAM sequence: TTG
ttctgtggactgctaaatga

SEQ ID NO: 322354 - DNA, 20 bp, Artificial Sequence
  Description of Artificial Sequence: Synthetic oligonucleotide
  Target: LAMA2; (+) strand; PAM type: YTN; PAM sequence: TTC
tgtggactgctaaatgatca

SEQ ID NO: 322355 - DNA, 20 bp, Artificial Sequence
  Description of Artificial Sequence: Synthetic oligonucleotide
  Target: LAMA2; (+) strand; PAM type: YTN; PAM sequence: CTG
tggactgctaaatgatcaca

SEQ ID NO: 322356 - DNA, 20 bp, Artificial Sequence
  Description of Artificial Sequence: Synthetic oligonucleotide
  Target: LAMA2; (+) strand; PAM type: YTN; PAM sequence: CTG
ctaaatgatcacagcctaat

SEQ ID NO: 322357 - DNA, 20 bp, Artificial Sequence
  Description of Artificial Sequence: Synthetic oligonucleotide
  Target: LAMA2; (+) strand; PAM type: YTN; PAM sequence: CTA
aatgatcacagcctaatgta

SEQ ID NO: 322358 - DNA, 20 bp, Artificial Sequence
  Description of Artificial Sequence: Synthetic oligonucleotide
  Target: LAMA2; (+) strand; PAM type: YTN; PAM sequence: CTA
atgtattgccttctcagtaa

SEQ ID NO: 322359 - DNA, 20 bp, Artificial Sequence
  Description of Artificial Sequence: Synthetic oligonucleotide
  Target: LAMA2; (+) strand; PAM type: YTN; PAM sequence: TTG
ccttctcagtaaacacacgt

SEQ ID NO: 322360 - DNA, 20 bp, Artificial Sequence
  Description of Artificial Sequence: Synthetic oligonucleotide
  Target: LAMA2; (+) strand; PAM type: YTN; PAM sequence: CTT
ctcagtaaacacacgttgac

SEQ ID NO: 322361 - DNA, 20 bp, Artificial Sequence
  Description of Artificial Sequence: Synthetic oligonucleotide
  Target: LAMA2; (+) strand; PAM type: YTN; PAM sequence: TTC
tcagtaaacacacgttgact

SEQ ID NO: 322362 - DNA, 20 bp, Artificial Sequence
  Description of Artificial Sequence: Synthetic oligonucleotide
  Target: LAMA2; (+) strand; PAM type: YTN; PAM sequence: CTC
agtaaacacacgttgactta

SEQ ID NO: 322363 - DNA, 20 bp, Artificial Sequence
  Description of Artificial Sequence: Synthetic oligonucleotide
  Target: LAMA2; (+) strand; PAM type: YTN; PAM sequence: TTG
acttaaatcagttgggtaaa

SEQ ID NO: 322364 - DNA, 20 bp, Artificial Sequence
  Description of Artificial Sequence: Synthetic oligonucleotide
  Target: LAMA2; (+) strand; PAM type: YTN; PAM sequence: CTT
aaatcagttgggtaaattgt

SEQ ID NO: 322365 - DNA, 20 bp, Artificial Sequence
  Description of Artificial Sequence: Synthetic oligonucleotide
  Target: LAMA2; (+) strand; PAM type: YTN; PAM sequence: TTA
aatcagttgggtaaattgta

SEQ ID NO: 322366 - DNA, 20 bp, Artificial Sequence
  Description of Artificial Sequence: Synthetic oligonucleotide
  Target: LAMA2; (+) strand; PAM type: YTN; PAM sequence: TTG
ggtaaattgtaaactcaatt

SEQ ID NO: 322367 - DNA, 20 bp, Artificial Sequence
  Description of Artificial Sequence: Synthetic oligonucleotide
  Target: LAMA2; (+) strand; PAM type: YTN; PAM sequence: TTG
taaactcaattccttacttt

SEQ ID NO: 322368 - DNA, 20 bp, Artificial Sequence
  Description of Artificial Sequence: Synthetic oligonucleotide
  Target: LAMA2; (+) strand; PAM type: YTN; PAM sequence: CTC
aattccttactttgacttta

SEQ ID NO: 322369 - DNA, 20 bp, Artificial Sequence
  Description of Artificial Sequence: Synthetic oligonucleotide
  Target: LAMA2; (+) strand; PAM type: YTN; PAM sequence: TTC
cttactttgactttagtttg

SEQ ID NO: 322370 - DNA, 20 bp, Artificial Sequence
  Description of Artificial Sequence: Synthetic oligonucleotide
  Target: LAMA2; (+) strand; PAM type: YTN; PAM sequence: CTT
actttgactttagtttgcaa

SEQ ID NO: 322371 - DNA, 20 bp, Artificial Sequence
  Description of Artificial Sequence: Synthetic oligonucleotide
  Target: LAMA2; (+) strand; PAM type: YTN; PAM sequence: TTA
ctttgactttagtttgcaaa

SEQ ID NO: 322372 - DNA, 20 bp, Artificial Sequence
  Description of Artificial Sequence: Synthetic oligonucleotide
  Target: LAMA2; (+) strand; PAM type: YTN; PAM sequence: CTT
tgactttagtttgcaaatta

SEQ ID NO: 322373 - DNA, 20 bp, Artificial Sequence
  Description of Artificial Sequence: Synthetic oligonucleotide
  Target: LAMA2; (+) strand; PAM type: YTN; PAM sequence: TTT
gactttagtttgcaaattaa

SEQ ID NO: 322374 - DNA, 20 bp, Artificial Sequence
  Description of Artificial Sequence: Synthetic oligonucleotide
  Target: LAMA2; (+) strand; PAM type: YTN; PAM sequence: TTG
actttagtttgcaaattaag

SEQ ID NO: 322375 - DNA, 20 bp, Artificial Sequence
  Description of Artificial Sequence: Synthetic oligonucleotide
  Target: LAMA2; (+) strand; PAM type: YTN; PAM sequence: CTT
tagtttgcaaattaagaata

SEQ ID NO: 322376 - DNA, 20 bp, Artificial Sequence
  Description of Artificial Sequence: Synthetic oligonucleotide
  Target: LAMA2; (+) strand; PAM type: YTN; PAM sequence: TTT
agtttgcaaattaagaatag

SEQ ID NO: 322377 - DNA, 20 bp, Artificial Sequence
  Description of Artificial Sequence: Synthetic oligonucleotide
  Target: LAMA2; (+) strand; PAM type: YTN; PAM sequence: TTA
gtttgcaaattaagaatagt

SEQ ID NO: 322378 - DNA, 20 bp, Artificial Sequence
  Description of Artificial Sequence: Synthetic oligonucleotide
  Target: LAMA2; (+) strand; PAM type: YTN; PAM sequence: TTT
gcaaattaagaatagtgtac

SEQ ID NO: 322379 - DNA, 20 bp, Artificial Sequence
  Description of Artificial Sequence: Synthetic oligonucleotide
  Target: LAMA2; (+) strand; PAM type: YTN; PAM sequence: TTG
caaattaagaatagtgtact

SEQ ID NO: 322380 - DNA, 20 bp, Artificial Sequence
  Description of Artificial Sequence: Synthetic oligonucleotide
  Target: LAMA2; (+) strand; PAM type: YTN; PAM sequence: TTA
agaatagtgtacttttctta

SEQ ID NO: 322381 - DNA, 20 bp, Artificial Sequence
  Description of Artificial Sequence: Synthetic oligonucleotide
  Target: LAMA2; (+) strand; PAM type: YTN; PAM sequence: CTT
ttcttattttcaggccttat

SEQ ID NO: 322382 - DNA, 20 bp, Artificial Sequence
  Description of Artificial Sequence: Synthetic oligonucleotide
  Target: LAMA2; (+) strand; PAM type: YTN; PAM sequence: TTT
tcttattttcaggccttatt

SEQ ID NO: 322383 - DNA, 20 bp, Artificial Sequence
  Description of Artificial Sequence: Synthetic oligonucleotide
  Target: LAMA2; (+) strand; PAM type: YTN; PAM sequence: TTT
cttattttcaggccttattt

SEQ ID NO: 322384 - DNA, 20 bp, Artificial Sequence
  Description of Artificial Sequence: Synthetic oligonucleotide
  Target: LAMA2; (+) strand; PAM type: YTN; PAM sequence: TTC
ttattttcaggccttattta

SEQ ID NO: 322385 - DNA, 20 bp, Artificial Sequence
  Description of Artificial Sequence: Synthetic oligonucleotide
  Target: LAMA2; (+) strand; PAM type: YTN; PAM sequence: CTT
attttcaggccttatttata

SEQ ID NO: 322386 - DNA, 20 bp, Artificial Sequence
  Description of Artificial Sequence: Synthetic oligonucleotide
  Target: LAMA2; (+) strand; PAM type: YTN; PAM sequence: TTA
ttttcaggccttatttataa

SEQ ID NO: 322387 - DNA, 20 bp, Artificial Sequence
  Description of Artificial Sequence: Synthetic oligonucleotide
  Target: LAMA2; (+) strand; PAM type: YTN; PAM sequence: TTT
tcaggccttatttataattc

SEQ ID NO: 322388 - DNA, 20 bp, Artificial Sequence
  Description of Artificial Sequence: Synthetic oligonucleotide
  Target: LAMA2; (+) strand; PAM type: YTN; PAM sequence: TTT
caggccttatttataattcc

SEQ ID NO: 322389 - DNA, 20 bp, Artificial Sequence
  Description of Artificial Sequence: Synthetic oligonucleotide
  Target: LAMA2; (+) strand; PAM type: YTN; PAM sequence: TTC
aggccttatttataattcct

SEQ ID NO: 322390 - DNA, 20 bp, Artificial Sequence
  Description of Artificial Sequence: Synthetic oligonucleotide
  Target: LAMA2; (+) strand; PAM type: YTN; PAM sequence: CTT
atttataattcctaatgcta

SEQ ID NO: 322391 - DNA, 20 bp, Artificial Sequence
  Description of Artificial Sequence: Synthetic oligonucleotide
  Target: LAMA2; (+) strand; PAM type: YTN; PAM sequence: TTA
tttataattcctaatgctat

SEQ ID NO: 322392 - DNA, 20 bp, Artificial Sequence
  Description of Artificial Sequence: Synthetic oligonucleotide
  Target: LAMA2; (+) strand; PAM type: YTN; PAM sequence: TTT
ataattcctaatgctataca

SEQ ID NO: 322393 - DNA, 20 bp, Artificial Sequence
  Description of Artificial Sequence: Synthetic oligonucleotide
  Target: LAMA2; (+) strand; PAM type: YTN; PAM sequence: TTA
taattcctaatgctatacac

SEQ ID NO: 322394 - DNA, 20 bp, Artificial Sequence
  Description of Artificial Sequence: Synthetic oligonucleotide
  Target: LAMA2; (+) strand; PAM type: YTN; PAM sequence: TTC
ctaatgctatacactattat

SEQ ID NO: 322395 - DNA, 20 bp, Artificial Sequence
  Description of Artificial Sequence: Synthetic oligonucleotide
  Target: LAMA2; (+) strand; PAM type: YTN; PAM sequence: CTA
atgctatacactattatgtt

SEQ ID NO: 322396 - DNA, 20 bp, Artificial Sequence
  Description of Artificial Sequence: Synthetic oligonucleotide
  Target: LAMA2; (+) strand; PAM type: YTN; PAM sequence: CTA
tacactattatgttacagct

SEQ ID NO: 322397 - DNA, 20 bp, Artificial Sequence
  Description of Artificial Sequence: Synthetic oligonucleotide
  Target: LAMA2; (+) strand; PAM type: YTN; PAM sequence: CTA
ttatgttacagcttgcactt

SEQ ID NO: 322398 - DNA, 20 bp, Artificial Sequence
  Description of Artificial Sequence: Synthetic oligonucleotide
  Target: LAMA2; (+) strand; PAM type: YTN; PAM sequence: TTA
tgttacagcttgcacttgta

SEQ ID NO: 322399 - DNA, 20 bp, Artificial Sequence
  Description of Artificial Sequence: Synthetic oligonucleotide
  Target: LAMA2; (+) strand; PAM type: YTN; PAM sequence: TTA
cagcttgcacttgtattttg

SEQ ID NO: 322400 - DNA, 20 bp, Artificial Sequence
  Description of Artificial Sequence: Synthetic oligonucleotide
  Target: LAMA2; (+) strand; PAM type: YTN; PAM sequence: CTT
gcacttgtattttgacactt

SEQ ID NO: 322401 - DNA, 20 bp, Artificial Sequence
  Description of Artificial Sequence: Synthetic oligonucleotide
  Target: LAMA2; (+) strand; PAM type: YTN; PAM sequence: TTG
cacttgtattttgacacttt

SEQ ID NO: 322402 - DNA, 20 bp, Artificial Sequence
  Description of Artificial Sequence: Synthetic oligonucleotide
  Target: LAMA2; (+) strand; PAM type: YTN; PAM sequence: CTT
gtattttgacactttctaat

SEQ ID NO: 322403 - DNA, 20 bp, Artificial Sequence
  Description of Artificial Sequence: Synthetic oligonucleotide
  Target: LAMA2; (+) strand; PAM type: YTN; PAM sequence: TTG
tattttgacactttctaatt

SEQ ID NO: 322404 - DNA, 20 bp, Artificial Sequence
  Description of Artificial Sequence: Synthetic oligonucleotide
  Target: LAMA2; (+) strand; PAM type: YTN; PAM sequence: TTT
tgacactttctaattattgt

SEQ ID NO: 322405 - DNA, 20 bp, Artificial Sequence
  Description of Artificial Sequence: Synthetic oligonucleotide
  Target: LAMA2; (+) strand; PAM type: YTN; PAM sequence: TTT
gacactttctaattattgtc

SEQ ID NO: 322406 - DNA, 20 bp, Artificial Sequence
  Description of Artificial Sequence: Synthetic oligonucleotide
  Target: LAMA2; (+) strand; PAM type: YTN; PAM sequence: TTG
acactttctaattattgtca

SEQ ID NO: 322407 - DNA, 20 bp, Artificial Sequence
  Description of Artificial Sequence: Synthetic oligonucleotide
  Target: LAMA2; (+) strand; PAM type: YTN; PAM sequence: CTT
tctaattattgtcaaattat

SEQ ID NO: 322408 - DNA, 20 bp, Artificial Sequence
  Description of Artificial Sequence: Synthetic oligonucleotide
  Target: LAMA2; (+) strand; PAM type: YTN; PAM sequence: TTT
ctaattattgtcaaattata

SEQ ID NO: 322409 - DNA, 20 bp, Artificial Sequence
  Description of Artificial Sequence: Synthetic oligonucleotide
  Target: LAMA2; (+) strand; PAM type: YTN; PAM sequence: TTC
taattattgtcaaattataa

SEQ ID NO: 322410 - DNA, 20 bp, Artificial Sequence
  Description of Artificial Sequence: Synthetic oligonucleotide
  Target: LAMA2; (+) strand; PAM type: YTN; PAM sequence: CTA
attattgtcaaattataaat

SEQ ID NO: 322411 - DNA, 20 bp, Artificial Sequence
  Description of Artificial Sequence: Synthetic oligonucleotide
  Target: LAMA2; (+) strand; PAM type: YTN; PAM sequence: TTA
ttgtcaaattataaatacta

SEQ ID NO: 322412 - DNA, 20 bp, Artificial Sequence
  Description of Artificial Sequence: Synthetic oligonucleotide
  Target: LAMA2; (+) strand; PAM type: YTN; PAM sequence: TTG
tcaaattataaatactacta

SEQ ID NO: 322413 - DNA, 20 bp, Artificial Sequence
  Description of Artificial Sequence: Synthetic oligonucleotide
  Target: LAMA2; (+) strand; PAM type: YTN; PAM sequence: TTA
taaatactactaattaatat

SEQ ID NO: 322414 - DNA, 20 bp, Artificial Sequence
  Description of Artificial Sequence: Synthetic oligonucleotide
  Target: LAMA2; (+) strand; PAM type: YTN; PAM sequence: CTA
ctaattaatatatccttgat

SEQ ID NO: 322415 - DNA, 20 bp, Artificial Sequence
  Description of Artificial Sequence: Synthetic oligonucleotide
  Target: LAMA2; (+) strand; PAM type: YTN; PAM sequence: CTA
attaatatatccttgattct

SEQ ID NO: 322416 - DNA, 20 bp, Artificial Sequence
  Description of Artificial Sequence: Synthetic oligonucleotide
  Target: LAMA2; (+) strand; PAM type: YTN; PAM sequence: TTA
atatatccttgattcttcat

SEQ ID NO: 322417 - DNA, 20 bp, Artificial Sequence
  Description of Artificial Sequence: Synthetic oligonucleotide
  Target: LAMA2; (+) strand; PAM type: YTN; PAM sequence: CTT
gattcttcataatattctat

SEQ ID NO: 322418 - DNA, 20 bp, Artificial Sequence
  Description of Artificial Sequence: Synthetic oligonucleotide
  Target: LAMA2; (+) strand; PAM type: YTN; PAM sequence: TTG
attcttcataatattctatt

SEQ ID NO: 322419 - DNA, 20 bp, Artificial Sequence
  Description of Artificial Sequence: Synthetic oligonucleotide
  Target: LAMA2; (+) strand; PAM type: YTN; PAM sequence: TTC
ttcataatattctattaacc

SEQ ID NO: 322420 - DNA, 20 bp, Artificial Sequence
  Description of Artificial Sequence: Synthetic oligonucleotide
  Target: LAMA2; (+) strand; PAM type: YTN; PAM sequence: CTT
cataatattctattaaccag

SEQ ID NO: 322421 - DNA, 20 bp, Artificial Sequence
  Description of Artificial Sequence: Synthetic oligonucleotide
  Target: LAMA2; (+) strand; PAM type: YTN; PAM sequence: TTC
ataatattctattaaccagc

SEQ ID NO: 322422 - DNA, 20 bp, Artificial Sequence
  Description of Artificial Sequence: Synthetic oligonucleotide
  Target: LAMA2; (+) strand; PAM type: YTN; PAM sequence: TTC
tattaaccagcacttaacac

SEQ ID NO: 322423 - DNA, 20 bp, Artificial Sequence
  Description of Artificial Sequence: Synthetic oligonucleotide
  Target: LAMA2; (+) strand; PAM type: YTN; PAM sequence: CTA
ttaaccagcacttaacacct

SEQ ID NO: 322424 - DNA, 20 bp, Artificial Sequence
  Description of Artificial Sequence: Synthetic oligonucleotide
  Target: LAMA2; (+) strand; PAM type: YTN; PAM sequence: TTA
accagcacttaacacctttt

SEQ ID NO: 322425 - DNA, 20 bp, Artificial Sequence
  Description of Artificial Sequence: Synthetic oligonucleotide
  Target: LAMA2; (+) strand; PAM type: YTN; PAM sequence: CTT
aacacctttttcataaaaca

SEQ ID NO: 322426 - DNA, 20 bp, Artificial Sequence
  Description of Artificial Sequence: Synthetic oligonucleotide
  Target: LAMA2; (+) strand; PAM type: YTN; PAM sequence: TTA
acacctttttcataaaacac

SEQ ID NO: 322427 - DNA, 20 bp, Artificial Sequence
  Description of Artificial Sequence: Synthetic oligonucleotide
  Target: LAMA2; (+) strand; PAM type: YTN; PAM sequence: CTT
tttcataaaacacttttcag

SEQ ID NO: 322428 - DNA, 20 bp, Artificial Sequence
  Description of Artificial Sequence: Synthetic oligonucleotide
  Target: LAMA2; (+) strand; PAM type: YTN; PAM sequence: TTT
ttcataaaacacttttcagg

SEQ ID NO: 322429 - DNA, 20 bp, Artificial Sequence
  Description of Artificial Sequence: Synthetic oligonucleotide
  Target: LAMA2; (+) strand; PAM type: YTN; PAM sequence: TTT
tcataaaacacttttcagga

SEQ ID NO: 322430 - DNA, 20 bp, Artificial Sequence
  Description of Artificial Sequence: Synthetic oligonucleotide
  Target: LAMA2; (+) strand; PAM type: YTN; PAM sequence: TTT
cataaaacacttttcaggat

SEQ ID NO: 322431 - DNA, 20 bp, Artificial Sequence
  Description of Artificial Sequence: Synthetic oligonucleotide
  Target: LAMA2; (+) strand; PAM type: YTN; PAM sequence: TTC
ataaaacacttttcaggata

SEQ ID NO: 322432 - DNA, 20 bp, Artificial Sequence
  Description of Artificial Sequence: Synthetic oligonucleotide
  Target: LAMA2; (+) strand; PAM type: YTN; PAM sequence: CTT
ttcaggatatatatatagtt

SEQ ID NO: 322433 - DNA, 20 bp, Artificial Sequence
  Description of Artificial Sequence: Synthetic oligonucleotide
  Target: LAMA2; (+) strand; PAM type: YTN; PAM sequence: TTT
tcaggatatatatatagtta

SEQ ID NO: 322434 - DNA, 20 bp, Artificial Sequence
  Description of Artificial Sequence: Synthetic oligonucleotide
  Target: LAMA2; (+) strand; PAM type: YTN; PAM sequence: TTT
caggatatatatatagttag

SEQ ID NO: 322435 - DNA, 20 bp, Artificial Sequence
  Description of Artificial Sequence: Synthetic oligonucleotide
  Target: LAMA2; (+) strand; PAM type: YTN; PAM sequence: TTC
aggatatatatatagttagg

SEQ ID NO: 322436 - DNA, 20 bp, Artificial Sequence
  Description of Artificial Sequence: Synthetic oligonucleotide
  Target: LAMA2; (+) strand; PAM type: YTN; PAM sequence: TTA
gggcttgttgacactatttc

SEQ ID NO: 322437 - DNA, 20 bp, Artificial Sequence
  Description of Artificial Sequence: Synthetic oligonucleotide
  Target: LAMA2; (+) strand; PAM type: YTN; PAM sequence: CTT
gttgacactatttcatcttg

SEQ ID NO: 322438 - DNA, 20 bp, Artificial Sequence
  Description of Artificial Sequence: Synthetic oligonucleotide
  Target: LAMA2; (+) strand; PAM type: YTN; PAM sequence: TTG
ttgacactatttcatcttga

SEQ ID NO: 322439 - DNA, 20 bp, Artificial Sequence
  Description of Artificial Sequence: Synthetic oligonucleotide
  Target: LAMA2; (+) strand; PAM type: YTN; PAM sequence: TTG
acactatttcatcttgattt

SEQ ID NO: 322440 - DNA, 20 bp, Artificial Sequence
  Description of Artificial Sequence: Synthetic oligonucleotide
  Target: LAMA2; (+) strand; PAM type: YTN; PAM sequence: CTA
tttcatcttgatttcaattt

SEQ ID NO: 322441 - DNA, 20 bp, Artificial Sequence
  Description of Artificial Sequence: Synthetic oligonucleotide
  Target: LAMA2; (+) strand; PAM type: YTN; PAM sequence: TTT
catcttgatttcaatttatg

SEQ ID NO: 322442 - DNA, 20 bp, Artificial Sequence
  Description of Artificial Sequence: Synthetic oligonucleotide
  Target: LAMA2; (+) strand; PAM type: YTN; PAM sequence: TTC
atcttgatttcaatttatgc

SEQ ID NO: 322443 - DNA, 20 bp, Artificial Sequence
  Description of Artificial Sequence: Synthetic oligonucleotide
  Target: LAMA2; (+) strand; PAM type: YTN; PAM sequence: CTT
gatttcaatttatgcaatcc

SEQ ID NO: 322444 - DNA, 20 bp, Artificial Sequence
  Description of Artificial Sequence: Synthetic oligonucleotide
  Target: LAMA2; (+) strand; PAM type: YTN; PAM sequence: TTG
atttcaatttatgcaatccg

SEQ ID NO: 322445 - DNA, 20 bp, Artificial Sequence
  Description of Artificial Sequence: Synthetic oligonucleotide
  Target: LAMA2; (+) strand; PAM type: YTN; PAM sequence: TTT
caatttatgcaatccgaatt

SEQ ID NO: 322446 - DNA, 20 bp, Artificial Sequence
  Description of Artificial Sequence: Synthetic oligonucleotide
  Target: LAMA2; (+) strand; PAM type: YTN; PAM sequence: TTC
aatttatgcaatccgaattt

SEQ ID NO: 322447 - DNA, 20 bp, Artificial Sequence
  Description of Artificial Sequence: Synthetic oligonucleotide
  Target: LAMA2; (+) strand; PAM type: YTN; PAM sequence: TTT
atgcaatccgaattttcaag

SEQ ID NO: 322448 - DNA, 20 bp, Artificial Sequence
  Description of Artificial Sequence: Synthetic oligonucleotide
  Target: LAMA2; (+) strand; PAM type: YTN; PAM sequence: TTA
tgcaatccgaattttcaagt

SEQ ID NO: 322449 - DNA, 20 bp, Artificial Sequence
  Description of Artificial Sequence: Synthetic oligonucleotide
  Target: LAMA2; (+) strand; PAM type: YTN; PAM sequence: TTT
tcaagtaaaacctcatggaa

SEQ ID NO: 322450 - DNA, 20 bp, Artificial Sequence
  Description of Artificial Sequence: Synthetic oligonucleotide
  Target: LAMA2; (+) strand; PAM type: YTN; PAM sequence: TTT
caagtaaaacctcatggaat

SEQ ID NO: 322451 - DNA, 20 bp, Artificial Sequence
  Description of Artificial Sequence: Synthetic oligonucleotide
  Target: LAMA2; (+) strand; PAM type: YTN; PAM sequence: TTC
aagtaaaacctcatggaatt

SEQ ID NO: 322452 - DNA, 20 bp, Artificial Sequence
  Description of Artificial Sequence: Synthetic oligonucleotide
  Target: LAMA2; (+) strand; PAM type: YTN; PAM sequence: CTC
atggaattatcagattcatc

SEQ ID NO: 322453 - DNA, 20 bp, Artificial Sequence
  Description of Artificial Sequence: Synthetic oligonucleotide
  Target: LAMA2; (+) strand; PAM type: YTN; PAM sequence: TTA
tcagattcatcactaacttt

SEQ ID NO: 322454 - DNA, 20 bp, Artificial Sequence
  Description of Artificial Sequence: Synthetic oligonucleotide
  Target: LAMA2; (+) strand; PAM type: YTN; PAM sequence: TTC
atcactaactttcaaaactt

SEQ ID NO: 322455 - DNA, 20 bp, Artificial Sequence
  Description of Artificial Sequence: Synthetic oligonucleotide
  Target: LAMA2; (+) strand; PAM type: YTN; PAM sequence: CTA
actttcaaaacttttataac

SEQ ID NO: 322456 - DNA, 20 bp, Artificial Sequence
  Description of Artificial Sequence: Synthetic oligonucleotide
  Target: LAMA2; (+) strand; PAM type: YTN; PAM sequence: CTT
tcaaaacttttataacacat

SEQ ID NO: 322457 - DNA, 20 bp, Artificial Sequence
  Description of Artificial Sequence: Synthetic oligonucleotide
  Target: LAMA2; (+) strand; PAM type: YTN; PAM sequence: TTT
caaaacttttataacacatc

SEQ ID NO: 322458 - DNA, 20 bp, Artificial Sequence
  Description of Artificial Sequence: Synthetic oligonucleotide
  Target: LAMA2; (+) strand; PAM type: YTN; PAM sequence: TTC
aaaacttttataacacatct

SEQ ID NO: 322459 - DNA, 20 bp, Artificial Sequence
  Description of Artificial Sequence: Synthetic oligonucleotide
  Target: LAMA2; (+) strand; PAM type: YTN; PAM sequence: CTT
ttataacacatctgctgagt

SEQ ID NO: 322460 - DNA, 20 bp, Artificial Sequence
  Description of Artificial Sequence: Synthetic oligonucleotide
  Target: LAMA2; (+) strand; PAM type: YTN; PAM sequence: TTT
tataacacatctgctgagtt

SEQ ID NO: 322461 - DNA, 20 bp, Artificial Sequence
  Description of Artificial Sequence: Synthetic oligonucleotide
  Target: LAMA2; (+) strand; PAM type: YTN; PAM sequence: TTT
ataacacatctgctgagttt

SEQ ID NO: 322462 - DNA, 20 bp, Artificial Sequence
  Description of Artificial Sequence: Synthetic oligonucleotide
  Target: LAMA2; (+) strand; PAM type: YTN; PAM sequence: TTA
taacacatctgctgagtttt

SEQ ID NO: 322463 - DNA, 20 bp, Artificial Sequence
  Description of Artificial Sequence: Synthetic oligonucleotide
  Target: LAMA2; (+) strand; PAM type: YTN; PAM sequence: CTG
ctgagttttcagacattcat

SEQ ID NO: 322464 - DNA, 20 bp, Artificial Sequence
  Description of Artificial Sequence: Synthetic oligonucleotide
  Target: LAMA2; (+) strand; PAM type: YTN; PAM sequence: CTG
agttttcagacattcattct

SEQ ID NO: 322465 - DNA, 20 bp, Artificial Sequence
  Description of Artificial Sequence: Synthetic oligonucleotide
  Target: LAMA2; (+) strand; PAM type: YTN; PAM sequence: TTT
tcagacattcattctggaaa

SEQ ID NO: 322466 - DNA, 20 bp, Artificial Sequence
  Description of Artificial Sequence: Synthetic oligonucleotide
  Target: LAMA2; (+) strand; PAM type: YTN; PAM sequence: TTT
cagacattcattctggaaag

SEQ ID NO: 322467 - DNA, 20 bp, Artificial Sequence
  Description of Artificial Sequence: Synthetic oligonucleotide
  Target: LAMA2; (+) strand; PAM type: YTN; PAM sequence: TTC
agacattcattctggaaaga

SEQ ID NO: 322468 - DNA, 20 bp, Artificial Sequence
  Description of Artificial Sequence: Synthetic oligonucleotide
  Target: LAMA2; (+) strand; PAM type: YTN; PAM sequence: TTC
attctggaaagaaaaaacat

SEQ ID NO: 322469 - DNA, 20 bp, Artificial Sequence
  Description of Artificial Sequence: Synthetic oligonucleotide
  Target: LAMA2; (+) strand; PAM type: YTN; PAM sequence: TTC
tggaaagaaaaaacatgctg

SEQ ID NO: 322470 - DNA, 20 bp, Artificial Sequence
  Description of Artificial Sequence: Synthetic oligonucleotide
  Target: LAMA2; (+) strand; PAM type: YTN; PAM sequence: CTG
gaaagaaaaaacatgctgga

SEQ ID NO: 322471 - DNA, 20 bp, Artificial Sequence
  Description of Artificial Sequence: Synthetic oligonucleotide
  Target: LAMA2; (+) strand; PAM type: YTN; PAM sequence: CTG
gaaagaaaaattttacttac

SEQ ID NO: 322472 - DNA, 20 bp, Artificial Sequence
  Description of Artificial Sequence: Synthetic oligonucleotide
  Target: LAMA2; (+) strand; PAM type: YTN; PAM sequence: TTT
tacttactctaatgtgtttt

SEQ ID NO: 322473 - DNA, 20 bp, Artificial Sequence
  Description of Artificial Sequence: Synthetic oligonucleotide
  Target: LAMA2; (+) strand; PAM type: YTN; PAM sequence: TTT
acttactctaatgtgtttta

SEQ ID NO: 322474 - DNA, 20 bp, Artificial Sequence
  Description of Artificial Sequence: Synthetic oligonucleotide
  Target: LAMA2; (+) strand; PAM type: YTN; PAM sequence: TTA
cttactctaatgtgttttat

SEQ ID NO: 322475 - DNA, 20 bp, Artificial Sequence
  Description of Artificial Sequence: Synthetic oligonucleotide
  Target: LAMA2; (+) strand; PAM type: YTN; PAM sequence: CTT
actctaatgtgttttatttt

SEQ ID NO: 322476 - DNA, 20 bp, Artificial Sequence
  Description of Artificial Sequence: Synthetic oligonucleotide
  Target: LAMA2; (+) strand; PAM type: YTN; PAM sequence: TTA
ctctaatgtgttttatttta

SEQ ID NO: 322477 - DNA, 20 bp, Artificial Sequence
  Description of Artificial Sequence: Synthetic oligonucleotide
  Target: LAMA2; (+) strand; PAM type: YTN; PAM sequence: CTC
taatgtgttttattttaaat

SEQ ID NO: 322478 - DNA, 20 bp, Artificial Sequence
  Description of Artificial Sequence: Synthetic oligonucleotide
  Target: LAMA2; (+) strand; PAM type: YTN; PAM sequence: CTA
atgtgttttattttaaataa

SEQ ID NO: 322479 - DNA, 20 bp, Artificial Sequence
  Description of Artificial Sequence: Synthetic oligonucleotide
  Target: LAMA2; (+) strand; PAM type: YTN; PAM sequence: TTT
tattttaaataaaaagtcct

SEQ ID NO: 322480 - DNA, 20 bp, Artificial Sequence
  Description of Artificial Sequence: Synthetic oligonucleotide
  Target: LAMA2; (+) strand; PAM type: YTN; PAM sequence: TTT
attttaaataaaaagtccta

SEQ ID NO: 322481 - DNA, 20 bp, Artificial Sequence
  Description of Artificial Sequence: Synthetic oligonucleotide
  Target: LAMA2; (+) strand; PAM type: YTN; PAM sequence: TTA
ttttaaataaaaagtcctat

SEQ ID NO: 322482 - DNA, 20 bp, Artificial Sequence
  Description of Artificial Sequence: Synthetic oligonucleotide
  Target: LAMA2; (+) strand; PAM type: YTN; PAM sequence: TTT
taaataaaaagtcctatagg

SEQ ID NO: 322483 - DNA, 20 bp, Artificial Sequence
  Description of Artificial Sequence: Synthetic oligonucleotide
  Target: LAMA2; (+) strand; PAM type: YTN; PAM sequence: TTT
aaataaaaagtcctataggt

SEQ ID NO: 322484 - DNA, 20 bp, Artificial Sequence
  Description of Artificial Sequence: Synthetic oligonucleotide
  Target: LAMA2; (+) strand; PAM type: YTN; PAM sequence: TTA
aataaaaagtcctataggtt

SEQ ID NO: 322485 - DNA, 20 bp, Artificial Sequence
  Description of Artificial Sequence: Synthetic oligonucleotide
  Target: LAMA2; (+) strand; PAM type: YTN; PAM sequence: CTA
taggttatgattttactgtc

SEQ ID NO: 322486 - DNA, 20 bp, Artificial Sequence
  Description of Artificial Sequence: Synthetic oligonucleotide
  Target: LAMA2; (+) strand; PAM type: YTN; PAM sequence: TTA
tgattttactgtcctctttt

SEQ ID NO: 322487 - DNA, 20 bp, Artificial Sequence
  Description of Artificial Sequence: Synthetic oligonucleotide
  Target: LAMA2; (+) strand; PAM type: YTN; PAM sequence: TTT
tactgtcctctttttttttc

SEQ ID NO: 322488 - DNA, 20 bp, Artificial Sequence
  Description of Artificial Sequence: Synthetic oligonucleotide
  Target: LAMA2; (+) strand; PAM type: YTN; PAM sequence: TTT
actgtcctctttttttttct

SEQ ID NO: 322489 - DNA, 20 bp, Artificial Sequence
  Description of Artificial Sequence: Synthetic oligonucleotide
  Target: LAMA2; (+) strand; PAM type: YTN; PAM sequence: TTA
ctgtcctctttttttttctg

SEQ ID NO: 322490 - DNA, 20 bp, Artificial Sequence
  Description of Artificial Sequence: Synthetic oligonucleotide
  Target: LAMA2; (+) strand; PAM type: YTN; PAM sequence: CTG
tcctctttttttttctgaaa

SEQ ID NO: 322491 - DNA, 20 bp, Artificial Sequence
  Description of Artificial Sequence: Synthetic oligonucleotide
  Target: LAMA2; (+) strand; PAM type: YTN; PAM sequence: CTC
tttttttttctgaaaaacat

SEQ ID NO: 322492 - DNA, 20 bp, Artificial Sequence
  Description of Artificial Sequence: Synthetic oligonucleotide
  Target: LAMA2; (+) strand; PAM type: YTN; PAM sequence: CTT
tttttttctgaaaaacatta

SEQ ID NO: 322493 - DNA, 20 bp, Artificial Sequence
  Description of Artificial Sequence: Synthetic oligonucleotide
  Target: LAMA2; (+) strand; PAM type: YTN; PAM sequence: TTT
ttttttctgaaaaacattaa

SEQ ID NO: 322494 - DNA, 20 bp, Artificial Sequence
  Description of Artificial Sequence: Synthetic oligonucleotide
  Target: LAMA2; (+) strand; PAM type: YTN; PAM sequence: TTT
tttttctgaaaaacattaag

SEQ ID NO: 322495 - DNA, 20 bp, Artificial Sequence
  Description of Artificial Sequence: Synthetic oligonucleotide
  Target: LAMA2; (+) strand; PAM type: YTN; PAM sequence: TTT
ttttctgaaaaacattaagg

SEQ ID NO: 322496 - DNA, 20 bp, Artificial Sequence
  Description of Artificial Sequence: Synthetic oligonucleotide
  Target: LAMA2; (+) strand; PAM type: YTN; PAM sequence: TTT
tttctgaaaaacattaaggt

SEQ ID NO: 322497 - DNA, 20 bp, Artificial Sequence
  Description of Artificial Sequence: Synthetic oligonucleotide
  Target: LAMA2; (+) strand; PAM type: YTN; PAM sequence: TTT
ttctgaaaaacattaaggtt

SEQ ID NO: 322498 - DNA, 20 bp, Artificial Sequence
  Description of Artificial Sequence: Synthetic oligonucleotide
  Target: LAMA2; (+) strand; PAM type: YTN; PAM sequence: TTT
tctgaaaaacattaaggttt

SEQ ID NO: 322499 - DNA, 20 bp, Artificial Sequence
  Description of Artificial Sequence: Synthetic oligonucleotide
  Target: LAMA2; (+) strand; PAM type: YTN; PAM sequence: TTT
ctgaaaaacattaaggtttc

SEQ ID NO: 322500 - DNA, 20 bp, Artificial Sequence
  Description of Artificial Sequence: Synthetic oligonucleotide
  Target: LAMA2; (+) strand; PAM type: YTN; PAM sequence: TTC
tgaaaaacattaaggtttct

SEQ ID NO: 322501 - DNA, 20 bp, Artificial Sequence
  Description of Artificial Sequence: Synthetic oligonucleotide
  Target: LAMA2; (+) strand; PAM type: YTN; PAM sequence: CTG
aaaaacattaaggtttcttt

SEQ ID NO: 322502 - DNA, 20 bp, Artificial Sequence
  Description of Artificial Sequence: Synthetic oligonucleotide
  Target: LAMA2; (+) strand; PAM type: YTN; PAM sequence: TTA
aggtttctttcccaaagctt

SEQ ID NO: 322503 - DNA, 20 bp, Artificial Sequence
  Description of Artificial Sequence: Synthetic oligonucleotide
  Target: LAMA2; (+) strand; PAM type: YTN; PAM sequence: TTT
ctttcccaaagcttattagt

SEQ ID NO: 322504 - DNA, 20 bp, Artificial Sequence
  Description of Artificial Sequence: Synthetic oligonucleotide
  Target: LAMA2; (+) strand; PAM type: YTN; PAM sequence: TTC
tttcccaaagcttattagtt

SEQ ID NO: 322505 - DNA, 20 bp, Artificial Sequence
  Description of Artificial Sequence: Synthetic oligonucleotide
  Target: LAMA2; (+) strand; PAM type: YTN; PAM sequence: CTT
tcccaaagcttattagttaa

SEQ ID NO: 322506 - DNA, 20 bp, Artificial Sequence
  Description of Artificial Sequence: Synthetic oligonucleotide
  Target: LAMA2; (+) strand; PAM type: YTN; PAM sequence: TTT
cccaaagcttattagttaat

SEQ ID NO: 322507 - DNA, 20 bp, Artificial Sequence
  Description of Artificial Sequence: Synthetic oligonucleotide
  Target: LAMA2; (+) strand; PAM type: YTN; PAM sequence: TTC
ccaaagcttattagttaatt

SEQ ID NO: 322508 - DNA, 20 bp, Artificial Sequence
  Description of Artificial Sequence: Synthetic oligonucleotide
  Target: LAMA2; (+) strand; PAM type: YTN; PAM sequence: CTT
attagttaattgtcagtttt

SEQ ID NO: 322509 - DNA, 20 bp, Artificial Sequence
  Description of Artificial Sequence: Synthetic oligonucleotide
  Target: LAMA2; (+) strand; PAM type: YTN; PAM sequence: TTA
ttagttaattgtcagttttt

SEQ ID NO: 322510 - DNA, 20 bp, Artificial Sequence
  Description of Artificial Sequence: Synthetic oligonucleotide
  Target: LAMA2; (+) strand; PAM type: YTN; PAM sequence: TTA
gttaattgtcagtttttatg

SEQ ID NO: 322511 - DNA, 20 bp, Artificial Sequence
  Description of Artificial Sequence: Synthetic oligonucleotide
  Target: LAMA2; (+) strand; PAM type: YTN; PAM sequence: TTA
attgtcagtttttatgtaag

SEQ ID NO: 322512 - DNA, 20 bp, Artificial Sequence
  Description of Artificial Sequence: Synthetic oligonucleotide
  Target: LAMA2; (+) strand; PAM type: YTN; PAM sequence: TTG
tcagtttttatgtaagccca

SEQ ID NO: 322513 - DNA, 20 bp, Artificial Sequence
  Description of Artificial Sequence: Synthetic oligonucleotide
  Target: LAMA2; (+) strand; PAM type: YTN; PAM sequence: TTT
ttatgtaagcccatgaggtt

SEQ ID NO: 322514 - DNA, 20 bp, Artificial Sequence
  Description of Artificial Sequence: Synthetic oligonucleotide
  Target: LAMA2; (+) strand; PAM type: YTN; PAM sequence: TTT
tatgtaagcccatgaggtta

SEQ ID NO: 322515 - DNA, 20 bp, Artificial Sequence
  Description of Artificial Sequence: Synthetic oligonucleotide
  Target: LAMA2; (+) strand; PAM type: YTN; PAM sequence: TTT
atgtaagcccatgaggttag

SEQ ID NO: 322516 - DNA, 20 bp, Artificial Sequence
  Description of Artificial Sequence: Synthetic oligonucleotide
  Target: LAMA2; (+) strand; PAM type: YTN; PAM sequence: TTA
tgtaagcccatgaggttaga

SEQ ID NO: 322517 - DNA, 20 bp, Artificial Sequence
  Description of Artificial Sequence: Synthetic oligonucleotide
  Target: LAMA2; (+) strand; PAM type: YTN; PAM sequence: TTA
gacctatataaggcagtaat

SEQ ID NO: 322518 - DNA, 20 bp, Artificial Sequence
  Description of Artificial Sequence: Synthetic oligonucleotide
  Target: LAMA2; (+) strand; PAM type: YTN; PAM sequence: CTA
tataaggcagtaatttttaa

SEQ ID NO: 322519 - DNA, 20 bp, Artificial Sequence
  Description of Artificial Sequence: Synthetic oligonucleotide
  Target: LAMA2; (+) strand; PAM type: YTN; PAM sequence: TTT
ttaattctccctctcttccc

SEQ ID NO: 322520 - DNA, 20 bp, Artificial Sequence
  Description of Artificial Sequence: Synthetic oligonucleotide
  Target: LAMA2; (+) strand; PAM type: YTN; PAM sequence: TTT
taattctccctctcttccca

SEQ ID NO: 322521 - DNA, 20 bp, Artificial Sequence
  Description of Artificial Sequence: Synthetic oligonucleotide
  Target: LAMA2; (+) strand; PAM type: YTN; PAM sequence: TTT
aattctccctctcttcccac

SEQ ID NO: 322522 - DNA, 20 bp, Artificial Sequence
  Description of Artificial Sequence: Synthetic oligonucleotide
  Target: LAMA2; (+) strand; PAM type: YTN; PAM sequence: TTA
attctccctctcttcccacc

SEQ ID NO: 322523 - DNA, 20 bp, Artificial Sequence
  Description of Artificial Sequence: Synthetic oligonucleotide
  Target: LAMA2; (+) strand; PAM type: YTN; PAM sequence: TTC
tccctctcttcccacccttc

SEQ ID NO: 322524 - DNA, 20 bp, Artificial Sequence
  Description of Artificial Sequence: Synthetic oligonucleotide
  Target: LAMA2; (+) strand; PAM type: YTN; PAM sequence: CTC
cctctcttcccacccttcct

SEQ ID NO: 322525 - DNA, 20 bp, Artificial Sequence
  Description of Artificial Sequence: Synthetic oligonucleotide
  Target: LAMA2; (+) strand; PAM type: YTN; PAM sequence: CTC
tcttcccacccttccttttc

SEQ ID NO: 322526 - DNA, 20 bp, Artificial Sequence
  Description of Artificial Sequence: Synthetic oligonucleotide
  Target: LAMA2; (+) strand; PAM type: YTN; PAM sequence: CTC
ttcccacccttccttttctt

SEQ ID NO: 322527 - DNA, 20 bp, Artificial Sequence
  Description of Artificial Sequence: Synthetic oligonucleotide
  Target: LAMA2; (+) strand; PAM type: YTN; PAM sequence: CTT
cccacccttccttttcttcc

SEQ ID NO: 322528 - DNA, 20 bp, Artificial Sequence
  Description of Artificial Sequence: Synthetic oligonucleotide
  Target: LAMA2; (+) strand; PAM type: YTN; PAM sequence: TTC
ccacccttccttttcttccc

SEQ ID NO: 322529 - DNA, 20 bp, Artificial Sequence
  Description of Artificial Sequence: Synthetic oligonucleotide
  Target: LAMA2; (+) strand; PAM type: YTN; PAM sequence: CTT
ccttttcttccctatctcct

SEQ ID NO: 322530 - DNA, 20 bp, Artificial Sequence
  Description of Artificial Sequence: Synthetic oligonucleotide
  Target: LAMA2; (+) strand; PAM type: YTN; PAM sequence: TTC
cttttcttccctatctcctt

SEQ ID NO: 322531 - DNA, 20 bp, Artificial Sequence
  Description of Artificial Sequence: Synthetic oligonucleotide
  Target: LAMA2; (+) strand; PAM type: YTN; PAM sequence: CTT
ttcttccctatctcctttat

SEQ ID NO: 322532 - DNA, 20 bp, Artificial Sequence
  Description of Artificial Sequence: Synthetic oligonucleotide
  Target: LAMA2; (+) strand; PAM type: YTN; PAM sequence: TTT
tcttccctatctcctttatt

SEQ ID NO: 322533 - DNA, 20 bp, Artificial Sequence
  Description of Artificial Sequence: Synthetic oligonucleotide
  Target: LAMA2; (+) strand; PAM type: YTN; PAM sequence: TTT
cttccctatctcctttattt

SEQ ID NO: 322534 - DNA, 20 bp, Artificial Sequence
  Description of Artificial Sequence: Synthetic oligonucleotide
  Target: LAMA2; (+) strand; PAM type: YTN; PAM sequence: TTC
ttccctatctcctttatttt

SEQ ID NO: 322535 - DNA, 20 bp, Artificial Sequence
  Description of Artificial Sequence: Synthetic oligonucleotide
  Target: LAMA2; (+) strand; PAM type: YTN; PAM sequence: CTT
ccctatctcctttattttct

SEQ ID NO: 322536 - DNA, 20 bp, Artificial Sequence
  Description of Artificial Sequence: Synthetic oligonucleotide
  Target: LAMA2; (+) strand; PAM type: YTN; PAM sequence: TTC
cctatctcctttattttctt

SEQ ID NO: 322537 - DNA, 20 bp, Artificial Sequence
  Description of Artificial Sequence: Synthetic oligonucleotide
  Target: LAMA2; (+) strand; PAM type: YTN; PAM sequence: CTA
tctcctttattttcttcctt

SEQ ID NO: 322538 - DNA, 20 bp, Artificial Sequence
  Description of Artificial Sequence: Synthetic oligonucleotide
  Target: LAMA2; (+) strand; PAM type: YTN; PAM sequence: CTC
ctttattttcttccttcttc

SEQ ID NO: 322539 - DNA, 20 bp, Artificial Sequence
  Description of Artificial Sequence: Synthetic oligonucleotide
  Target: LAMA2; (+) strand; PAM type: YTN; PAM sequence: CTT
tattttcttccttcttcttt

SEQ ID NO: 322540 - DNA, 20 bp, Artificial Sequence
  Description of Artificial Sequence: Synthetic oligonucleotide
  Target: LAMA2; (+) strand; PAM type: YTN; PAM sequence: TTT
attttcttccttcttcttta

SEQ ID NO: 322541 - DNA, 20 bp, Artificial Sequence
  Description of Artificial Sequence: Synthetic oligonucleotide
  Target: LAMA2; (+) strand; PAM type: YTN; PAM sequence: TTA
ttttcttccttcttctttat

SEQ ID NO: 322542 - DNA, 20 bp, Artificial Sequence
  Description of Artificial Sequence: Synthetic oligonucleotide
  Target: LAMA2; (+) strand; PAM type: YTN; PAM sequence: TTT
tcttccttcttctttattag

SEQ ID NO: 322543 - DNA, 20 bp, Artificial Sequence
  Description of Artificial Sequence: Synthetic oligonucleotide
  Target: LAMA2; (+) strand; PAM type: YTN; PAM sequence: TTT
cttccttcttctttattagt

SEQ ID NO: 322544 - DNA, 20 bp, Artificial Sequence
  Description of Artificial Sequence: Synthetic oligonucleotide
  Target: LAMA2; (+) strand; PAM type: YTN; PAM sequence: TTC
ttccttcttctttattagtt

SEQ ID NO: 322545 - DNA, 20 bp, Artificial Sequence
  Description of Artificial Sequence: Synthetic oligonucleotide
  Target: LAMA2; (+) strand; PAM type: YTN; PAM sequence: CTT
ccttcttctttattagtttt

SEQ ID NO: 322546 - DNA, 20 bp, Artificial Sequence
  Description of Artificial Sequence: Synthetic oligonucleotide
  Target: LAMA2; (+) strand; PAM type: YTN; PAM sequence: TTC
cttcttctttattagttttt

SEQ ID NO: 322547 - DNA, 20 bp, Artificial Sequence
  Description of Artificial Sequence: Synthetic oligonucleotide
  Target: LAMA2; (+) strand; PAM type: YTN; PAM sequence: CTT
cttctttattagtttttaaa

SEQ ID NO: 322548 - DNA, 20 bp, Artificial Sequence
  Description of Artificial Sequence: Synthetic oligonucleotide
  Target: LAMA2; (+) strand; PAM type: YTN; PAM sequence: TTC
ttctttattagtttttaaat

SEQ ID NO: 322549 - DNA, 20 bp, Artificial Sequence
  Description of Artificial Sequence: Synthetic oligonucleotide
  Target: LAMA2; (+) strand; PAM type: YTN; PAM sequence: CTT
ctttattagtttttaaatat

SEQ ID NO: 322550 - DNA, 20 bp, Artificial Sequence
  Description of Artificial Sequence: Synthetic oligonucleotide
  Target: LAMA2; (+) strand; PAM type: YTN; PAM sequence: TTC
tttattagtttttaaatatg

SEQ ID NO: 322551 - DNA, 20 bp, Artificial Sequence
  Description of Artificial Sequence: Synthetic oligonucleotide
  Target: LAMA2; (+) strand; PAM type: YTN; PAM sequence: CTT
tattagtttttaaatatgca

SEQ ID NO: 322552 - DNA, 20 bp, Artificial Sequence
  Description of Artificial Sequence: Synthetic oligonucleotide
  Target: LAMA2; (+) strand; PAM type: YTN; PAM sequence: TTT
attagtttttaaatatgcat

SEQ ID NO: 322553 - DNA, 20 bp, Artificial Sequence
  Description of Artificial Sequence: Synthetic oligonucleotide
  Target: LAMA2; (+) strand; PAM type: YTN; PAM sequence: TTA
ttagtttttaaatatgcata

SEQ ID NO: 322554 - DNA, 20 bp, Artificial Sequence
  Description of Artificial Sequence: Synthetic oligonucleotide
  Target: LAMA2; (+) strand; PAM type: YTN; PAM sequence: TTA
gtttttaaatatgcatatct

SEQ ID NO: 322555 - DNA, 20 bp, Artificial Sequence
  Description of Artificial Sequence: Synthetic oligonucleotide
  Target: LAMA2; (+) strand; PAM type: YTN; PAM sequence: TTT
ttaaatatgcatatctcttt

SEQ ID NO: 322556 - DNA, 20 bp, Artificial Sequence
  Description of Artificial Sequence: Synthetic oligonucleotide
  Target: LAMA2; (+) strand; PAM type: YTN; PAM sequence: TTT
taaatatgcatatctctttt

SEQ ID NO: 322557 - DNA, 20 bp, Artificial Sequence
  Description of Artificial Sequence: Synthetic oligonucleotide
  Target: LAMA2; (+) strand; PAM type: YTN; PAM sequence: TTT
aaatatgcatatctcttttt

SEQ ID NO: 322558 - DNA, 20 bp, Artificial Sequence
  Description of Artificial Sequence: Synthetic oligonucleotide
  Target: LAMA2; (+) strand; PAM type: YTN; PAM sequence: TTA
aatatgcatatctcttttta

SEQ ID NO: 322559 - DNA, 20 bp, Artificial Sequence
  Description of Artificial Sequence: Synthetic oligonucleotide
  Target: LAMA2; (+) strand; PAM type: YTN; PAM sequence: CTC
tttttataggagaaaggatg

SEQ ID NO: 322560 - DNA, 20 bp, Artificial Sequence
  Description of Artificial Sequence: Synthetic oligonucleotide
  Target: LAMA2; (+) strand; PAM type: YTN; PAM sequence: CTT
tttataggagaaaggatgga

SEQ ID NO: 322561 - DNA, 20 bp, Artificial Sequence
  Description of Artificial Sequence: Synthetic oligonucleotide
  Target: LAMA2; (+) strand; PAM type: YTN; PAM sequence: TTT
ttataggagaaaggatggat

SEQ ID NO: 322562 - DNA, 20 bp, Artificial Sequence
  Description of Artificial Sequence: Synthetic oligonucleotide
  Target: LAMA2; (+) strand; PAM type: YTN; PAM sequence: TTT
tataggagaaaggatggata

SEQ ID NO: 322563 - DNA, 20 bp, Artificial Sequence
  Description of Artificial Sequence: Synthetic oligonucleotide
  Target: LAMA2; (+) strand; PAM type: YTN; PAM sequence: TTT
ataggagaaaggatggataa

SEQ ID NO: 322564 - DNA, 20 bp, Artificial Sequence
  Description of Artificial Sequence: Synthetic oligonucleotide
  Target: LAMA2; (+) strand; PAM type: YTN; PAM sequence: TTA
taggagaaaggatggataat

SEQ ID NO: 322565 - DNA, 20 bp, Artificial Sequence
  Description of Artificial Sequence: Synthetic oligonucleotide
  Target: LAMA2; (+) strand; PAM type: YTN; PAM sequence: TTG
cagcattctctgaccactct

SEQ ID NO: 322566 - DNA, 20 bp, Artificial Sequence
  Description of Artificial Sequence: Synthetic oligonucleotide
  Target: LAMA2; (+) strand; PAM type: YTN; PAM sequence: TTC
tctgaccactctaatatctc

SEQ ID NO: 322567 - DNA, 20 bp, Artificial Sequence
  Description of Artificial Sequence: Synthetic oligonucleotide
  Target: LAMA2; (+) strand; PAM type: YTN; PAM sequence: CTC
tgaccactctaatatctcac

SEQ ID NO: 322568 - DNA, 20 bp, Artificial Sequence
  Description of Artificial Sequence: Synthetic oligonucleotide
  Target: LAMA2; (+) strand; PAM type: YTN; PAM sequence: CTG
accactctaatatctcaccc

SEQ ID NO: 322569 - DNA, 20 bp, Artificial Sequence
  Description of Artificial Sequence: Synthetic oligonucleotide
  Target: LAMA2; (+) strand; PAM type: YTN; PAM sequence: CTC
taatatctcaccctagaaat

SEQ ID NO: 322570 - DNA, 20 bp, Artificial Sequence
  Description of Artificial Sequence: Synthetic oligonucleotide
  Target: LAMA2; (+) strand; PAM type: YTN; PAM sequence: CTA
atatctcaccctagaaattt

SEQ ID NO: 322571 - DNA, 20 bp, Artificial Sequence
  Description of Artificial Sequence: Synthetic oligonucleotide
  Target: LAMA2; (+) strand; PAM type: YTN; PAM sequence: CTC
accctagaaattttaataaa

SEQ ID NO: 322572 - DNA, 20 bp, Artificial Sequence
  Description of Artificial Sequence: Synthetic oligonucleotide
  Target: LAMA2; (+) strand; PAM type: YTN; PAM sequence: CTA
gaaattttaataaatgattt

SEQ ID NO: 322573 - DNA, 20 bp, Artificial Sequence
  Description of Artificial Sequence: Synthetic oligonucleotide
  Target: LAMA2; (+) strand; PAM type: YTN; PAM sequence: TTT
taataaatgatttactaaca

SEQ ID NO: 322574 - DNA, 20 bp, Artificial Sequence
  Description of Artificial Sequence: Synthetic oligonucleotide
  Target: LAMA2; (+) strand; PAM type: YTN; PAM sequence: TTT
aataaatgatttactaacat

SEQ ID NO: 322575 - DNA, 20 bp, Artificial Sequence
  Description of Artificial Sequence: Synthetic oligonucleotide
  Target: LAMA2; (+) strand; PAM type: YTN; PAM sequence: TTA
ataaatgatttactaacatt

SEQ ID NO: 322576 - DNA, 20 bp, Artificial Sequence
  Description of Artificial Sequence: Synthetic oligonucleotide
  Target: LAMA2; (+) strand; PAM type: YTN; PAM sequence: TTT
actaacattctcatcaggct

SEQ ID NO: 322577 - DNA, 20 bp, Artificial Sequence
  Description of Artificial Sequence: Synthetic oligonucleotide
  Target: LAMA2; (+) strand; PAM type: YTN; PAM sequence: TTA
ctaacattctcatcaggctt

SEQ ID NO: 322578 - DNA, 20 bp, Artificial Sequence
  Description of Artificial Sequence: Synthetic oligonucleotide
  Target: LAMA2; (+) strand; PAM type: YTN; PAM sequence: CTA
acattctcatcaggcttttt

SEQ ID NO: 322579 - DNA, 20 bp, Artificial Sequence
  Description of Artificial Sequence: Synthetic oligonucleotide
  Target: LAMA2; (+) strand; PAM type: YTN; PAM sequence: TTC
tcatcaggctttttattata

SEQ ID NO: 322580 - DNA, 20 bp, Artificial Sequence
  Description of Artificial Sequence: Synthetic oligonucleotide
  Target: LAMA2; (+) strand; PAM type: YTN; PAM sequence: CTC
atcaggctttttattataaa

SEQ ID NO: 322581 - DNA, 20 bp, Artificial Sequence
  Description of Artificial Sequence: Synthetic oligonucleotide
  Target: LAMA2; (+) strand; PAM type: YTN; PAM sequence: CTT
tttattataaaataatatca

SEQ ID NO: 322582 - DNA, 20 bp, Artificial Sequence
  Description of Artificial Sequence: Synthetic oligonucleotide
  Target: LAMA2; (+) strand; PAM type: YTN; PAM sequence: TTT
ttattataaaataatatcaa

SEQ ID NO: 322583 - DNA, 20 bp, Artificial Sequence
  Description of Artificial Sequence: Synthetic oligonucleotide
  Target: LAMA2; (+) strand; PAM type: YTN; PAM sequence: TTT
tattataaaataatatcaaa

SEQ ID NO: 322584 - DNA, 20 bp, Artificial Sequence
  Description of Artificial Sequence: Synthetic oligonucleotide
  Target: LAMA2; (+) strand; PAM type: YTN; PAM sequence: TTT
attataaaataatatcaaag

SEQ ID NO: 322585 - DNA, 20 bp, Artificial Sequence
  Description of Artificial Sequence: Synthetic oligonucleotide
  Target: LAMA2; (+) strand; PAM type: YTN; PAM sequence: TTA
ttataaaataatatcaaaga

SEQ ID NO: 322586 - DNA, 20 bp, Artificial Sequence
  Description of Artificial Sequence: Synthetic oligonucleotide
  Target: LAMA2; (+) strand; PAM type: YTN; PAM sequence: TTA
taaaataatatcaaagaaaa

SEQ ID NO: 322587 - DNA, 20 bp, Artificial Sequence
  Description of Artificial Sequence: Synthetic oligonucleotide
  Target: LAMA2; (+) strand; PAM type: YTN; PAM sequence: CTG
ctttttaaaaaaatatcttg

SEQ ID NO: 322588 - DNA, 20 bp, Artificial Sequence
  Description of Artificial Sequence: Synthetic oligonucleotide
  Target: LAMA2; (+) strand; PAM type: YTN; PAM sequence: CTT
tttaaaaaaatatcttgata

SEQ ID NO: 322589 - DNA, 20 bp, Artificial Sequence
  Description of Artificial Sequence: Synthetic oligonucleotide
  Target: LAMA2; (+) strand; PAM type: YTN; PAM sequence: TTT
ttaaaaaaatatcttgatac

SEQ ID NO: 322590 - DNA, 20 bp, Artificial Sequence
  Description of Artificial Sequence: Synthetic oligonucleotide
  Target: LAMA2; (+) strand; PAM type: YTN; PAM sequence: TTT
taaaaaaatatcttgatact

SEQ ID NO: 322591 - DNA, 20 bp, Artificial Sequence
  Description of Artificial Sequence: Synthetic oligonucleotide
  Target: LAMA2; (+) strand; PAM type: YTN; PAM sequence: TTT
aaaaaaatatcttgatactt

SEQ ID NO: 322592 - DNA, 20 bp, Artificial Sequence
  Description of Artificial Sequence: Synthetic oligonucleotide
  Target: LAMA2; (+) strand; PAM type: YTN; PAM sequence: TTA
aaaaaatatcttgatacttg

SEQ ID NO: 322593 - DNA, 20 bp, Artificial Sequence
  Description of Artificial Sequence: Synthetic oligonucleotide
  Target: LAMA2; (+) strand; PAM type: YTN; PAM sequence: CTT
gatacttgtattttaccaaa

SEQ ID NO: 322594 - DNA, 20 bp, Artificial Sequence
  Description of Artificial Sequence: Synthetic oligonucleotide
  Target: LAMA2; (+) strand; PAM type: YTN; PAM sequence: TTG
atacttgtattttaccaaat

SEQ ID NO: 322595 - DNA, 20 bp, Artificial Sequence
  Description of Artificial Sequence: Synthetic oligonucleotide
  Target: LAMA2; (+) strand; PAM type: YTN; PAM sequence: CTT
gtattttaccaaattcatgg

SEQ ID NO: 322596 - DNA, 20 bp, Artificial Sequence
  Description of Artificial Sequence: Synthetic oligonucleotide
  Target: LAMA2; (+) strand; PAM type: YTN; PAM sequence: TTG
tattttaccaaattcatggg

SEQ ID NO: 322597 - DNA, 20 bp, Artificial Sequence
  Description of Artificial Sequence: Synthetic oligonucleotide
  Target: LAMA2; (+) strand; PAM type: YTN; PAM sequence: TTT
taccaaattcatgggtatag

SEQ ID NO: 322598 - DNA, 20 bp, Artificial Sequence
  Description of Artificial Sequence: Synthetic oligonucleotide
  Target: LAMA2; (+) strand; PAM type: YTN; PAM sequence: TTT
accaaattcatgggtataga

SEQ ID NO: 322599 - DNA, 20 bp, Artificial Sequence
  Description of Artificial Sequence: Synthetic oligonucleotide
  Target: LAMA2; (+) strand; PAM type: YTN; PAM sequence: TTA
ccaaattcatgggtatagat

SEQ ID NO: 322600 - DNA, 20 bp, Artificial Sequence
  Description of Artificial Sequence: Synthetic oligonucleotide
  Target: LAMA2; (+) strand; PAM type: YTN; PAM sequence: TTC
atgggtatagataacttttt

SEQ ID NO: 322601 - DNA, 20 bp, Artificial Sequence
  Description of Artificial Sequence: Synthetic oligonucleotide
  Target: LAMA2; (+) strand; PAM type: YTN; PAM sequence: CTT
tttgatttctcattactttc

SEQ ID NO: 322602 - DNA, 20 bp, Artificial Sequence
  Description of Artificial Sequence: Synthetic oligonucleotide
  Target: LAMA2; (+) strand; PAM type: YTN; PAM sequence: TTT
ttgatttctcattactttca

SEQ ID NO: 322603 - DNA, 20 bp, Artificial Sequence
  Description of Artificial Sequence: Synthetic oligonucleotide
  Target: LAMA2; (+) strand; PAM type: YTN; PAM sequence: TTT
tgatttctcattactttcaa

SEQ ID NO: 322604 - DNA, 20 bp, Artificial Sequence
  Description of Artificial Sequence: Synthetic oligonucleotide
  Target: LAMA2; (+) strand; PAM type: YTN; PAM sequence: TTT
gatttctcattactttcaag

SEQ ID NO: 322605 - DNA, 20 bp, Artificial Sequence
  Description of Artificial Sequence: Synthetic oligonucleotide
  Target: LAMA2; (+) strand; PAM type: YTN; PAM sequence: TTG
atttctcattactttcaagt

SEQ ID NO: 322606 - DNA, 20 bp, Artificial Sequence
  Description of Artificial Sequence: Synthetic oligonucleotide
  Target: LAMA2; (+) strand; PAM type: YTN; PAM sequence: TTT
ctcattactttcaagtatct

SEQ ID NO: 322607 - DNA, 20 bp, Artificial Sequence
  Description of Artificial Sequence: Synthetic oligonucleotide
  Target: LAMA2; (+) strand; PAM type: YTN; PAM sequence: TTC
tcattactttcaagtatctt

SEQ ID NO: 322608 - DNA, 20 bp, Artificial Sequence
  Description of Artificial Sequence: Synthetic oligonucleotide
  Target: LAMA2; (+) strand; PAM type: YTN; PAM sequence: CTC
attactttcaagtatcttct

SEQ ID NO: 322609 - DNA, 20 bp, Artificial Sequence
  Description of Artificial Sequence: Synthetic oligonucleotide
  Target: LAMA2; (+) strand; PAM type: YTN; PAM sequence: TTA
ctttcaagtatcttcttcat

SEQ ID NO: 322610 - DNA, 20 bp, Artificial Sequence
  Description of Artificial Sequence: Synthetic oligonucleotide
  Target: LAMA2; (+) strand; PAM type: YTN; PAM sequence: CTT
tcaagtatcttcttcatgta

SEQ ID NO: 322611 - DNA, 20 bp, Artificial Sequence
  Description of Artificial Sequence: Synthetic oligonucleotide
  Target: LAMA2; (+) strand; PAM type: YTN; PAM sequence: TTT
caagtatcttcttcatgtaa

SEQ ID NO: 322612 - DNA, 20 bp, Artificial Sequence
  Description of Artificial Sequence: Synthetic oligonucleotide
  Target: LAMA2; (+) strand; PAM type: YTN; PAM sequence: TTC
aagtatcttcttcatgtaaa

SEQ ID NO: 322613 - DNA, 20 bp, Artificial Sequence
  Description of Artificial Sequence: Synthetic oligonucleotide
  Target: LAMA2; (+) strand; PAM type: YTN; PAM sequence: CTT
cttcatgtaaaattttaatc

SEQ ID NO: 322614 - DNA, 20 bp, Artificial Sequence
  Description of Artificial Sequence: Synthetic oligonucleotide
  Target: LAMA2; (+) strand; PAM type: YTN; PAM sequence: TTC
ttcatgtaaaattttaatca

SEQ ID NO: 322615 - DNA, 20 bp, Artificial Sequence
  Description of Artificial Sequence: Synthetic oligonucleotide
  Target: LAMA2; (+) strand; PAM type: YTN; PAM sequence: CTT
catgtaaaattttaatcaaa

SEQ ID NO: 322616 - DNA, 20 bp, Artificial Sequence
  Description of Artificial Sequence: Synthetic oligonucleotide
  Target: LAMA2; (+) strand; PAM type: YTN; PAM sequence: TTC
atgtaaaattttaatcaaat

SEQ ID NO: 322617 - DNA, 20 bp, Artificial Sequence
  Description of Artificial Sequence: Synthetic oligonucleotide
  Target: LAMA2; (+) strand; PAM type: YTN; PAM sequence: TTT
taatcaaatttcagatccca

SEQ ID NO: 322618 - DNA, 20 bp, Artificial Sequence
  Description of Artificial Sequence: Synthetic oligonucleotide
  Target: LAMA2; (+) strand; PAM type: YTN; PAM sequence: TTT
aatcaaatttcagatcccat

SEQ ID NO: 322619 - DNA, 20 bp, Artificial Sequence
  Description of Artificial Sequence: Synthetic oligonucleotide
  Target: LAMA2; (+) strand; PAM type: YTN; PAM sequence: TTA
atcaaatttcagatcccatg

SEQ ID NO: 322620 - DNA, 20 bp, Artificial Sequence
  Description of Artificial Sequence: Synthetic oligonucleotide
  Target: LAMA2; (+) strand; PAM type: YTN; PAM sequence: TTT
cagatcccatgcttaacaca

SEQ ID NO: 322621 - DNA, 20 bp, Artificial Sequence
  Description of Artificial Sequence: Synthetic oligonucleotide
  Target: LAMA2; (+) strand; PAM type: YTN; PAM sequence: TTC
agatcccatgcttaacacat

SEQ ID NO: 322622 - DNA, 20 bp, Artificial Sequence
  Description of Artificial Sequence: Synthetic oligonucleotide
  Target: LAMA2; (+) strand; PAM type: YTN; PAM sequence: CTT
aacacataaaaattaataaa

SEQ ID NO: 322623 - DNA, 20 bp, Artificial Sequence
  Description of Artificial Sequence: Synthetic oligonucleotide
  Target: LAMA2; (+) strand; PAM type: YTN; PAM sequence: TTA
acacataaaaattaataaat

SEQ ID NO: 322624 - DNA, 20 bp, Artificial Sequence
  Description of Artificial Sequence: Synthetic oligonucleotide
  Target: LAMA2; (+) strand; PAM type: YTN; PAM sequence: TTA
ataaattgatgttgagggac

SEQ ID NO: 322625 - DNA, 20 bp, Artificial Sequence
  Description of Artificial Sequence: Synthetic oligonucleotide
  Target: LAMA2; (+) strand; PAM type: YTN; PAM sequence: TTG
atgttgagggactatcacat

SEQ ID NO: 322626 - DNA, 20 bp, Artificial Sequence
  Description of Artificial Sequence: Synthetic oligonucleotide
  Target: LAMA2; (+) strand; PAM type: YTN; PAM sequence: TTG
agggactatcacattatttt

SEQ ID NO: 322627 - DNA, 20 bp, Artificial Sequence
  Description of Artificial Sequence: Synthetic oligonucleotide
  Target: LAMA2; (+) strand; PAM type: YTN; PAM sequence: CTA
tcacattattttatactgaa

SEQ ID NO: 322628 - DNA, 20 bp, Artificial Sequence
  Description of Artificial Sequence: Synthetic oligonucleotide
  Target: LAMA2; (+) strand; PAM type: YTN; PAM sequence: TTA
ttttatactgaaaagttgtt

SEQ ID NO: 322629 - DNA, 20 bp, Artificial Sequence
  Description of Artificial Sequence: Synthetic oligonucleotide
  Target: LAMA2; (+) strand; PAM type: YTN; PAM sequence: TTT
tatactgaaaagttgttcaa

SEQ ID NO: 322630 - DNA, 20 bp, Artificial Sequence
  Description of Artificial Sequence: Synthetic oligonucleotide
  Target: LAMA2; (+) strand; PAM type: YTN; PAM sequence: TTT
atactgaaaagttgttcaat

SEQ ID NO: 322631 - DNA, 20 bp, Artificial Sequence
  Description of Artificial Sequence: Synthetic oligonucleotide
  Target: LAMA2; (+) strand; PAM type: YTN; PAM sequence: TTA
tactgaaaagttgttcaatt

SEQ ID NO: 322632 - DNA, 20 bp, Artificial Sequence
  Description of Artificial Sequence: Synthetic oligonucleotide
  Target: LAMA2; (+) strand; PAM type: YTN; PAM sequence: CTG
aaaagttgttcaattattct

SEQ ID NO: 322633 - DNA, 20 bp, Artificial Sequence
  Description of Artificial Sequence: Synthetic oligonucleotide
  Target: LAMA2; (+) strand; PAM type: YTN; PAM sequence: TTG
ttcaattattctaaagttct

SEQ ID NO: 322634 - DNA, 20 bp, Artificial Sequence
  Description of Artificial Sequence: Synthetic oligonucleotide
  Target: LAMA2; (+) strand; PAM type: YTN; PAM sequence: TTC
aattattctaaagttctata

SEQ ID NO: 322635 - DNA, 20 bp, Artificial Sequence
  Description of Artificial Sequence: Synthetic oligonucleotide
  Target: LAMA2; (+) strand; PAM type: YTN; PAM sequence: TTA
ttctaaagttctatatatta

SEQ ID NO: 322636 - DNA, 20 bp, Artificial Sequence
  Description of Artificial Sequence: Synthetic oligonucleotide
  Target: LAMA2; (+) strand; PAM type: YTN; PAM sequence: TTC
taaagttctatatattaatc

SEQ ID NO: 322637 - DNA, 20 bp, Artificial Sequence
  Description of Artificial Sequence: Synthetic oligonucleotide
  Target: LAMA2; (+) strand; PAM type: YTN; PAM sequence: CTA
aagttctatatattaatcca

SEQ ID NO: 322638 - DNA, 20 bp, Artificial Sequence
  Description of Artificial Sequence: Synthetic oligonucleotide
  Target: LAMA2; (+) strand; PAM type: YTN; PAM sequence: TTC
tatatattaatccaaagccg

SEQ ID NO: 322639 - DNA, 20 bp, Artificial Sequence
  Description of Artificial Sequence: Synthetic oligonucleotide
  Target: LAMA2; (+) strand; PAM type: YTN; PAM sequence: CTA
tatattaatccaaagccgtc

SEQ ID NO: 322640 - DNA, 20 bp, Artificial Sequence
  Description of Artificial Sequence: Synthetic oligonucleotide
  Target: LAMA2; (+) strand; PAM type: YTN; PAM sequence: TTA
atccaaagccgtctctactt

SEQ ID NO: 322641 - DNA, 20 bp, Artificial Sequence
  Description of Artificial Sequence: Synthetic oligonucleotide
  Target: LAMA2; (+) strand; PAM type: YTN; PAM sequence: CTC
tacttgggggaaaaatgtgt

SEQ ID NO: 322642 - DNA, 20 bp, Artificial Sequence
  Description of Artificial Sequence: Synthetic oligonucleotide
  Target: LAMA2; (+) strand; PAM type: YTN; PAM sequence: CTA
cttgggggaaaaatgtgtgt

SEQ ID NO: 322643 - DNA, 20 bp, Artificial Sequence
  Description of Artificial Sequence: Synthetic oligonucleotide
  Target: LAMA2; (+) strand; PAM type: YTN; PAM sequence: CTT
gggggaaaaatgtgtgtgtg

SEQ ID NO: 322644 - DNA, 20 bp, Artificial Sequence
  Description of Artificial Sequence: Synthetic oligonucleotide
  Target: LAMA2; (+) strand; PAM type: YTN; PAM sequence: TTG
ggggaaaaatgtgtgtgtgt

SEQ ID NO: 322645 - DNA, 20 bp, Artificial Sequence
  Description of Artificial Sequence: Synthetic oligonucleotide
  Target: LAMA2; (+) strand; PAM type: YTN; PAM sequence: TTT
tttggatctatctatctatg

SEQ ID NO: 322646 - DNA, 20 bp, Artificial Sequence
  Description of Artificial Sequence: Synthetic oligonucleotide
  Target: LAMA2; (+) strand; PAM type: YTN; PAM sequence: TTT
ttggatctatctatctatga

SEQ ID NO: 322647 - DNA, 20 bp, Artificial Sequence
  Description of Artificial Sequence: Synthetic oligonucleotide
  Target: LAMA2; (+) strand; PAM type: YTN; PAM sequence: TTT
tggatctatctatctatgag

SEQ ID NO: 322648 - DNA, 20 bp, Artificial Sequence
  Description of Artificial Sequence: Synthetic oligonucleotide
  Target: LAMA2; (+) strand; PAM type: YTN; PAM sequence: TTT
ggatctatctatctatgagg

SEQ ID NO: 322649 - DNA, 20 bp, Artificial Sequence
  Description of Artificial Sequence: Synthetic oligonucleotide
  Target: LAMA2; (+) strand; PAM type: YTN; PAM sequence: TTG
gatctatctatctatgagga

SEQ ID NO: 322650 - DNA, 20 bp, Artificial Sequence
  Description of Artificial Sequence: Synthetic oligonucleotide
  Target: LAMA2; (+) strand; PAM type: YTN; PAM sequence: CTA
tctatctatgaggatgactg

SEQ ID NO: 322651 - DNA, 20 bp, Artificial Sequence
  Description of Artificial Sequence: Synthetic oligonucleotide
  Target: LAMA2; (+) strand; PAM type: YTN; PAM sequence: CTA
tctatgaggatgactgcctt

SEQ ID NO: 322652 - DNA, 20 bp, Artificial Sequence
  Description of Artificial Sequence: Synthetic oligonucleotide
  Target: LAMA2; (+) strand; PAM type: YTN; PAM sequence: CTA
tgaggatgactgccttatta

SEQ ID NO: 322653 - DNA, 20 bp, Artificial Sequence
  Description of Artificial Sequence: Synthetic oligonucleotide
  Target: LAMA2; (+) strand; PAM type: YTN; PAM sequence: CTG
ccttattacaagtttcagta

SEQ ID NO: 322654 - DNA, 20 bp, Artificial Sequence
  Description of Artificial Sequence: Synthetic oligonucleotide
  Target: LAMA2; (+) strand; PAM type: YTN; PAM sequence: CTT
attacaagtttcagtacaat

SEQ ID NO: 322655 - DNA, 20 bp, Artificial Sequence
  Description of Artificial Sequence: Synthetic oligonucleotide
  Target: LAMA2; (+) strand; PAM type: YTN; PAM sequence: TTA
ttacaagtttcagtacaatt

SEQ ID NO: 322656 - DNA, 20 bp, Artificial Sequence
  Description of Artificial Sequence: Synthetic oligonucleotide
  Target: LAMA2; (+) strand; PAM type: YTN; PAM sequence: TTA
caagtttcagtacaatttat

SEQ ID NO: 322657 - DNA, 20 bp, Artificial Sequence
  Description of Artificial Sequence: Synthetic oligonucleotide
  Target: LAMA2; (+) strand; PAM type: YTN; PAM sequence: TTT
cagtacaatttatatatatg

SEQ ID NO: 322658 - DNA, 20 bp, Artificial Sequence
  Description of Artificial Sequence: Synthetic oligonucleotide
  Target: LAMA2; (+) strand; PAM type: YTN; PAM sequence: TTC
agtacaatttatatatatgg

SEQ ID NO: 322659 - DNA, 20 bp, Artificial Sequence
  Description of Artificial Sequence: Synthetic oligonucleotide
  Target: LAMA2; (+) strand; PAM type: YTN; PAM sequence: TTT
atatatatggattatatcta

SEQ ID NO: 322660 - DNA, 20 bp, Artificial Sequence
  Description of Artificial Sequence: Synthetic oligonucleotide
  Target: LAMA2; (+) strand; PAM type: YTN; PAM sequence: TTA
tatatatggattatatctac

SEQ ID NO: 322661 - DNA, 20 bp, Artificial Sequence
  Description of Artificial Sequence: Synthetic oligonucleotide
  Target: LAMA2; (+) strand; PAM type: YTN; PAM sequence: TTA
tatctacatatatatttttt

SEQ ID NO: 322662 - DNA, 20 bp, Artificial Sequence
  Description of Artificial Sequence: Synthetic oligonucleotide
  Target: LAMA2; (+) strand; PAM type: YTN; PAM sequence: CTA
catatatattttttggttat

SEQ ID NO: 322663 - DNA, 20 bp, Artificial Sequence
  Description of Artificial Sequence: Synthetic oligonucleotide
  Target: LAMA2; (+) strand; PAM type: YTN; PAM sequence: TTT
tttggttatatatattttta

SEQ ID NO: 322664 - DNA, 20 bp, Artificial Sequence
  Description of Artificial Sequence: Synthetic oligonucleotide
  Target: LAMA2; (+) strand; PAM type: YTN; PAM sequence: TTT
ttggttatatatatttttat

SEQ ID NO: 322665 - DNA, 20 bp, Artificial Sequence
  Description of Artificial Sequence: Synthetic oligonucleotide
  Target: LAMA2; (+) strand; PAM type: YTN; PAM sequence: TTT
tggttatatatatttttata

SEQ ID NO: 322666 - DNA, 20 bp, Artificial Sequence
  Description of Artificial Sequence: Synthetic oligonucleotide
  Target: LAMA2; (+) strand; PAM type: YTN; PAM sequence: TTT
ggttatatatatttttatat

SEQ ID NO: 322667 - DNA, 20 bp, Artificial Sequence
  Description of Artificial Sequence: Synthetic oligonucleotide
  Target: LAMA2; (+) strand; PAM type: YTN; PAM sequence: TTG
gttatatatatttttatata

SEQ ID NO: 322668 - DNA, 20 bp, Artificial Sequence
  Description of Artificial Sequence: Synthetic oligonucleotide
  Target: LAMA2; (+) strand; PAM type: YTN; PAM sequence: TTA
tatatatttttatatatata

SEQ ID NO: 322669 - DNA, 20 bp, Artificial Sequence
  Description of Artificial Sequence: Synthetic oligonucleotide
  Target: LAMA2; (+) strand; PAM type: YTN; PAM sequence: TTT
ttatatatataaacgcttgg

SEQ ID NO: 322670 - DNA, 20 bp, Artificial Sequence
  Description of Artificial Sequence: Synthetic oligonucleotide
  Target: LAMA2; (+) strand; PAM type: YTN; PAM sequence: TTT
tatatatataaacgcttggc

SEQ ID NO: 322671 - DNA, 20 bp, Artificial Sequence
  Description of Artificial Sequence: Synthetic oligonucleotide
  Target: LAMA2; (+) strand; PAM type: YTN; PAM sequence: TTT
atatatataaacgcttggcc

SEQ ID NO: 322672 - DNA, 20 bp, Artificial Sequence
  Description of Artificial Sequence: Synthetic oligonucleotide
  Target: LAMA2; (+) strand; PAM type: YTN; PAM sequence: TTA
tatatataaacgcttggcca

SEQ ID NO: 322673 - DNA, 20 bp, Artificial Sequence
  Description of Artificial Sequence: Synthetic oligonucleotide
  Target: LAMA2; (+) strand; PAM type: YTN; PAM sequence: CTT
ggccattttgtctatttacc

SEQ ID NO: 322674 - DNA, 20 bp, Artificial Sequence
  Description of Artificial Sequence: Synthetic oligonucleotide
  Target: LAMA2; (+) strand; PAM type: YTN; PAM sequence: TTG
gccattttgtctatttacct

SEQ ID NO: 322675 - DNA, 20 bp, Artificial Sequence
  Description of Artificial Sequence: Synthetic oligonucleotide
  Target: LAMA2; (+) strand; PAM type: YTN; PAM sequence: TTT
tgtctatttacctatctacc

SEQ ID NO: 322676 - DNA, 20 bp, Artificial Sequence
  Description of Artificial Sequence: Synthetic oligonucleotide
  Target: LAMA2; (+) strand; PAM type: YTN; PAM sequence: TTT
gtctatttacctatctacct

SEQ ID NO: 322677 - DNA, 20 bp, Artificial Sequence
  Description of Artificial Sequence: Synthetic oligonucleotide
  Target: LAMA2; (+) strand; PAM type: YTN; PAM sequence: TTG
tctatttacctatctaccta

SEQ ID NO: 322678 - DNA, 20 bp, Artificial Sequence
  Description of Artificial Sequence: Synthetic oligonucleotide
  Target: LAMA2; (+) strand; PAM type: YTN; PAM sequence: CTA
tttacctatctacctataaa

SEQ ID NO: 322679 - DNA, 20 bp, Artificial Sequence
  Description of Artificial Sequence: Synthetic oligonucleotide
  Target: LAMA2; (+) strand; PAM type: YTN; PAM sequence: TTT
acctatctacctataaactt

SEQ ID NO: 322680 - DNA, 20 bp, Artificial Sequence
  Description of Artificial Sequence: Synthetic oligonucleotide
  Target: LAMA2; (+) strand; PAM type: YTN; PAM sequence: TTA
cctatctacctataaacttc

SEQ ID NO: 322681 - DNA, 20 bp, Artificial Sequence
  Description of Artificial Sequence: Synthetic oligonucleotide
  Target: LAMA2; (+) strand; PAM type: YTN; PAM sequence: CTA
tctacctataaacttcagca

SEQ ID NO: 322682 - DNA, 20 bp, Artificial Sequence
  Description of Artificial Sequence: Synthetic oligonucleotide
  Target: LAMA2; (+) strand; PAM type: YTN; PAM sequence: CTA
cctataaacttcagcatttt

SEQ ID NO: 322683 - DNA, 20 bp, Artificial Sequence
  Description of Artificial Sequence: Synthetic oligonucleotide
  Target: LAMA2; (+) strand; PAM type: YTN; PAM sequence: CTA
taaacttcagcattttttgt

SEQ ID NO: 322684 - DNA, 20 bp, Artificial Sequence
  Description of Artificial Sequence: Synthetic oligonucleotide
  Target: LAMA2; (+) strand; PAM type: YTN; PAM sequence: CTT
cagcattttttgtttgggta

SEQ ID NO: 322685 - DNA, 20 bp, Artificial Sequence
  Description of Artificial Sequence: Synthetic oligonucleotide
  Target: LAMA2; (+) strand; PAM type: YTN; PAM sequence: TTC
agcattttttgtttgggtaa

SEQ ID NO: 322686 - DNA, 20 bp, Artificial Sequence
  Description of Artificial Sequence: Synthetic oligonucleotide
  Target: LAMA2; (+) strand; PAM type: YTN; PAM sequence: TTT
tttgtttgggtaattaatat

SEQ ID NO: 322687 - DNA, 20 bp, Artificial Sequence
  Description of Artificial Sequence: Synthetic oligonucleotide
  Target: LAMA2; (+) strand; PAM type: YTN; PAM sequence: TTT
ttgtttgggtaattaatatt

SEQ ID NO: 322688 - DNA, 20 bp, Artificial Sequence
  Description of Artificial Sequence: Synthetic oligonucleotide
  Target: LAMA2; (+) strand; PAM type: YTN; PAM sequence: TTT
tgtttgggtaattaatattt

SEQ ID NO: 322689 - DNA, 20 bp, Artificial Sequence
  Description of Artificial Sequence: Synthetic oligonucleotide
  Target: LAMA2; (+) strand; PAM type: YTN; PAM sequence: TTT
gtttgggtaattaatatttt

SEQ ID NO: 322690 - DNA, 20 bp, Artificial Sequence
  Description of Artificial Sequence: Synthetic oligonucleotide
  Target: LAMA2; (+) strand; PAM type: YTN; PAM sequence: TTG
tttgggtaattaatattttg

SEQ ID NO: 322691 - DNA, 20 bp, Artificial Sequence
  Description of Artificial Sequence: Synthetic oligonucleotide
  Target: LAMA2; (+) strand; PAM type: YTN; PAM sequence: TTT
gggtaattaatattttgaag

SEQ ID NO: 322692 - DNA, 20 bp, Artificial Sequence
  Description of Artificial Sequence: Synthetic oligonucleotide
  Target: LAMA2; (+) strand; PAM type: YTN; PAM sequence: TTG
ggtaattaatattttgaagt

SEQ ID NO: 322693 - DNA, 20 bp, Artificial Sequence
  Description of Artificial Sequence: Synthetic oligonucleotide
  Target: LAMA2; (+) strand; PAM type: YTN; PAM sequence: TTA
atattttgaagttttctctc

SEQ ID NO: 322694 - DNA, 20 bp, Artificial Sequence
  Description of Artificial Sequence: Synthetic oligonucleotide
  Target: LAMA2; (+) strand; PAM type: YTN; PAM sequence: TTT
tgaagttttctctcttgttt

SEQ ID NO: 322695 - DNA, 20 bp, Artificial Sequence
  Description of Artificial Sequence: Synthetic oligonucleotide
  Target: LAMA2; (+) strand; PAM type: YTN; PAM sequence: TTT
gaagttttctctcttgtttt

SEQ ID NO: 322696 - DNA, 20 bp, Artificial Sequence
  Description of Artificial Sequence: Synthetic oligonucleotide
  Target: LAMA2; (+) strand; PAM type: YTN; PAM sequence: TTG
aagttttctctcttgttttc

SEQ ID NO: 322697 - DNA, 20 bp, Artificial Sequence
  Description of Artificial Sequence: Synthetic oligonucleotide
  Target: LAMA2; (+) strand; PAM type: YTN; PAM sequence: TTT
tctctcttgttttccttctt

SEQ ID NO: 322698 - DNA, 20 bp, Artificial Sequence
  Description of Artificial Sequence: Synthetic oligonucleotide
  Target: LAMA2; (+) strand; PAM type: YTN; PAM sequence: TTT
ctctcttgttttccttcttg

SEQ ID NO: 322699 - DNA, 20 bp, Artificial Sequence
  Description of Artificial Sequence: Synthetic oligonucleotide
  Target: LAMA2; (+) strand; PAM type: YTN; PAM sequence: TTC
tctcttgttttccttcttgt

SEQ ID NO: 322700 - DNA, 20 bp, Artificial Sequence
  Description of Artificial Sequence: Synthetic oligonucleotide
  Target: LAMA2; (+) strand; PAM type: YTN; PAM sequence: CTC
tcttgttttccttcttgttt

SEQ ID NO: 322701 - DNA, 20 bp, Artificial Sequence
  Description of Artificial Sequence: Synthetic oligonucleotide
  Target: LAMA2; (+) strand; PAM type: YTN; PAM sequence: CTC
ttgttttccttcttgtttgg

SEQ ID NO: 322702 - DNA, 20 bp, Artificial Sequence
  Description of Artificial Sequence: Synthetic oligonucleotide
  Target: LAMA2; (+) strand; PAM type: YTN; PAM sequence: CTT
gttttccttcttgtttggaa

SEQ ID NO: 322703 - DNA, 20 bp, Artificial Sequence
  Description of Artificial Sequence: Synthetic oligonucleotide
  Target: LAMA2; (+) strand; PAM type: YTN; PAM sequence: TTG
ttttccttcttgtttggaat

SEQ ID NO: 322704 - DNA, 20 bp, Artificial Sequence
  Description of Artificial Sequence: Synthetic oligonucleotide
  Target: LAMA2; (+) strand; PAM type: YTN; PAM sequence: TTT
tccttcttgtttggaatgat

SEQ ID NO: 322705 - DNA, 20 bp, Artificial Sequence
  Description of Artificial Sequence: Synthetic oligonucleotide
  Target: LAMA2; (+) strand; PAM type: YTN; PAM sequence: TTT
ccttcttgtttggaatgatc

SEQ ID NO: 322706 - DNA, 20 bp, Artificial Sequence
  Description of Artificial Sequence: Synthetic oligonucleotide
  Target: LAMA2; (+) strand; PAM type: YTN; PAM sequence: TTC
cttcttgtttggaatgatct

SEQ ID NO: 322707 - DNA, 20 bp, Artificial Sequence
  Description of Artificial Sequence: Synthetic oligonucleotide
  Target: LAMA2; (+) strand; PAM type: YTN; PAM sequence: CTT
cttgtttggaatgatctgtt

SEQ ID NO: 322708 - DNA, 20 bp, Artificial Sequence
  Description of Artificial Sequence: Synthetic oligonucleotide
  Target: LAMA2; (+) strand; PAM type: YTN; PAM sequence: TTC
ttgtttggaatgatctgttt

SEQ ID NO: 322709 - DNA, 20 bp, Artificial Sequence
  Description of Artificial Sequence: Synthetic oligonucleotide
  Target: LAMA2; (+) strand; PAM type: YTN; PAM sequence: CTT
gtttggaatgatctgtttga

SEQ ID NO: 322710 - DNA, 20 bp, Artificial Sequence
  Description of Artificial Sequence: Synthetic oligonucleotide
  Target: LAMA2; (+) strand; PAM type: YTN; PAM sequence: TTG
tttggaatgatctgtttgag

SEQ ID NO: 322711 - DNA, 20 bp, Artificial Sequence
  Description of Artificial Sequence: Synthetic oligonucleotide
  Target: LAMA2; (+) strand; PAM type: YTN; PAM sequence: TTT
ggaatgatctgtttgagact

SEQ ID NO: 322712 - DNA, 20 bp, Artificial Sequence
  Description of Artificial Sequence: Synthetic oligonucleotide
  Target: LAMA2; (+) strand; PAM type: YTN; PAM sequence: TTG
gaatgatctgtttgagactg

SEQ ID NO: 322713 - DNA, 20 bp, Artificial Sequence
  Description of Artificial Sequence: Synthetic oligonucleotide
  Target: LAMA2; (+) strand; PAM type: YTN; PAM sequence: CTG
tttgagactgtgtttttaac

SEQ ID NO: 322714 - DNA, 20 bp, Artificial Sequence
  Description of Artificial Sequence: Synthetic oligonucleotide
  Target: LAMA2; (+) strand; PAM type: YTN; PAM sequence: TTT
gagactgtgtttttaacaaa

SEQ ID NO: 322715 - DNA, 20 bp, Artificial Sequence
  Description of Artificial Sequence: Synthetic oligonucleotide
  Target: LAMA2; (+) strand; PAM type: YTN; PAM sequence: TTG
agactgtgtttttaacaaaa

SEQ ID NO: 322716 - DNA, 20 bp, Artificial Sequence
  Description of Artificial Sequence: Synthetic oligonucleotide
  Target: LAMA2; (+) strand; PAM type: YTN; PAM sequence: CTG
tgtttttaacaaaagtatat

SEQ ID NO: 322717 - DNA, 20 bp, Artificial Sequence
  Description of Artificial Sequence: Synthetic oligonucleotide
  Target: LAMA2; (+) strand; PAM type: YTN; PAM sequence: TTT
ttaacaaaagtatatgtaag

SEQ ID NO: 322718 - DNA, 20 bp, Artificial Sequence
  Description of Artificial Sequence: Synthetic oligonucleotide
  Target: LAMA2; (+) strand; PAM type: YTN; PAM sequence: TTT
taacaaaagtatatgtaagt

SEQ ID NO: 322719 - DNA, 20 bp, Artificial Sequence
  Description of Artificial Sequence: Synthetic oligonucleotide
  Target: LAMA2; (+) strand; PAM type: YTN; PAM sequence: TTT
aacaaaagtatatgtaagtt

SEQ ID NO: 322720 - DNA, 20 bp, Artificial Sequence
  Description of Artificial Sequence: Synthetic oligonucleotide
  Target: LAMA2; (+) strand; PAM type: YTN; PAM sequence: TTA
acaaaagtatatgtaagttt

SEQ ID NO: 322721 - DNA, 20 bp, Artificial Sequence
  Description of Artificial Sequence: Synthetic oligonucleotide
  Target: LAMA2; (+) strand; PAM type: YTN; PAM sequence: TTT
gatatacttaaccttatttt

SEQ ID NO: 322722 - DNA, 20 bp, Artificial Sequence
  Description of Artificial Sequence: Synthetic oligonucleotide
  Target: LAMA2; (+) strand; PAM type: YTN; PAM sequence: TTG
atatacttaaccttattttt

SEQ ID NO: 322723 - DNA, 20 bp, Artificial Sequence
  Description of Artificial Sequence: Synthetic oligonucleotide
  Target: LAMA2; (+) strand; PAM type: YTN; PAM sequence: CTT
aaccttatttttcgctaaac

SEQ ID NO: 322724 - DNA, 20 bp, Artificial Sequence
  Description of Artificial Sequence: Synthetic oligonucleotide
  Target: LAMA2; (+) strand; PAM type: YTN; PAM sequence: TTA
accttatttttcgctaaaca

SEQ ID NO: 322725 - DNA, 20 bp, Artificial Sequence
  Description of Artificial Sequence: Synthetic oligonucleotide
  Target: LAMA2; (+) strand; PAM type: YTN; PAM sequence: CTT
atttttcgctaaacaacaac

SEQ ID NO: 322726 - DNA, 20 bp, Artificial Sequence
  Description of Artificial Sequence: Synthetic oligonucleotide
  Target: LAMA2; (+) strand; PAM type: YTN; PAM sequence: TTA
tttttcgctaaacaacaaca

SEQ ID NO: 322727 - DNA, 20 bp, Artificial Sequence
  Description of Artificial Sequence: Synthetic oligonucleotide
  Target: LAMA2; (+) strand; PAM type: YTN; PAM sequence: TTT
ttcgctaaacaacaacaaga

SEQ ID NO: 322728 - DNA, 20 bp, Artificial Sequence
  Description of Artificial Sequence: Synthetic oligonucleotide
  Target: LAMA2; (+) strand; PAM type: YTN; PAM sequence: TTT
tcgctaaacaacaacaagaa

SEQ ID NO: 322729 - DNA, 20 bp, Artificial Sequence
  Description of Artificial Sequence: Synthetic oligonucleotide
  Target: LAMA2; (+) strand; PAM type: YTN; PAM sequence: TTT
cgctaaacaacaacaagaaa

SEQ ID NO: 322730 - DNA, 20 bp, Artificial Sequence
  Description of Artificial Sequence: Synthetic oligonucleotide
  Target: LAMA2; (+) strand; PAM type: YTN; PAM sequence: TTC
gctaaacaacaacaagaaag

SEQ ID NO: 322731 - DNA, 20 bp, Artificial Sequence
  Description of Artificial Sequence: Synthetic oligonucleotide
  Target: LAMA2; (+) strand; PAM type: YTN; PAM sequence: CTA
aacaacaacaagaaagaccc

SEQ ID NO: 322732 - DNA, 20 bp, Artificial Sequence
  Description of Artificial Sequence: Synthetic oligonucleotide
  Target: LAMA2; (+) strand; PAM type: YTN; PAM sequence: CTA
attttgaaaagtgtccatca

SEQ ID NO: 322733 - DNA, 20 bp, Artificial Sequence
  Description of Artificial Sequence: Synthetic oligonucleotide
  Target: LAMA2; (+) strand; PAM type: YTN; PAM sequence: TTT
tgaaaagtgtccatcaatat

SEQ ID NO: 322734 - DNA, 20 bp, Artificial Sequence
  Description of Artificial Sequence: Synthetic oligonucleotide
  Target: LAMA2; (+) strand; PAM type: YTN; PAM sequence: TTT
gaaaagtgtccatcaatatc

SEQ ID NO: 322735 - DNA, 20 bp, Artificial Sequence
  Description of Artificial Sequence: Synthetic oligonucleotide
  Target: LAMA2; (+) strand; PAM type: YTN; PAM sequence: TTG
aaaagtgtccatcaatatca

SEQ ID NO: 322736 - DNA, 20 bp, Artificial Sequence
  Description of Artificial Sequence: Synthetic oligonucleotide
  Target: LAMA2; (+) strand; PAM type: YTN; PAM sequence: CTG
tttggcagtttatcataaag

SEQ ID NO: 322737 - DNA, 20 bp, Artificial Sequence
  Description of Artificial Sequence: Synthetic oligonucleotide
  Target: LAMA2; (+) strand; PAM type: YTN; PAM sequence: TTT
ggcagtttatcataaagatt

SEQ ID NO: 322738 - DNA, 20 bp, Artificial Sequence
  Description of Artificial Sequence: Synthetic oligonucleotide
  Target: LAMA2; (+) strand; PAM type: YTN; PAM sequence: TTG
gcagtttatcataaagattc

SEQ ID NO: 322739 - DNA, 20 bp, Artificial Sequence
  Description of Artificial Sequence: Synthetic oligonucleotide
  Target: LAMA2; (+) strand; PAM type: YTN; PAM sequence: TTT
atcataaagattcaatcagt

SEQ ID NO: 322740 - DNA, 20 bp, Artificial Sequence
  Description of Artificial Sequence: Synthetic oligonucleotide
  Target: LAMA2; (+) strand; PAM type: YTN; PAM sequence: TTA
tcataaagattcaatcagta

SEQ ID NO: 322741 - DNA, 20 bp, Artificial Sequence
  Description of Artificial Sequence: Synthetic oligonucleotide
  Target: LAMA2; (+) strand; PAM type: YTN; PAM sequence: TTC
aatcagtatacagtaaatct

SEQ ID NO: 322742 - DNA, 20 bp, Artificial Sequence
  Description of Artificial Sequence: Synthetic oligonucleotide
  Target: LAMA2; (+) strand; PAM type: YTN; PAM sequence: CTA
taattgaataaataatgtta

SEQ ID NO: 322743 - DNA, 20 bp, Artificial Sequence
  Description of Artificial Sequence: Synthetic oligonucleotide
  Target: LAMA2; (+) strand; PAM type: YTN; PAM sequence: TTG
aataaataatgttagaagca

SEQ ID NO: 322744 - DNA, 20 bp, Artificial Sequence
  Description of Artificial Sequence: Synthetic oligonucleotide
  Target: LAMA2; (+) strand; PAM type: YTN; PAM sequence: TTA
gaagcaaatatcacaggcta

SEQ ID NO: 322745 - DNA, 20 bp, Artificial Sequence
  Description of Artificial Sequence: Synthetic oligonucleotide
  Target: LAMA2; (+) strand; PAM type: YTN; PAM sequence: CTA
ggatcagcttaagaaatctc

SEQ ID NO: 322746 - DNA, 20 bp, Artificial Sequence
  Description of Artificial Sequence: Synthetic oligonucleotide
  Target: LAMA2; (+) strand; PAM type: YTN; PAM sequence: CTT
aagaaatctccaaaatgtga

SEQ ID NO: 322747 - DNA, 20 bp, Artificial Sequence
  Description of Artificial Sequence: Synthetic oligonucleotide
  Target: LAMA2; (+) strand; PAM type: YTN; PAM sequence: TTA
agaaatctccaaaatgtgag

SEQ ID NO: 322748 - DNA, 20 bp, Artificial Sequence
  Description of Artificial Sequence: Synthetic oligonucleotide
  Target: LAMA2; (+) strand; PAM type: YTN; PAM sequence: CTC
caaaatgtgagcctacataa

SEQ ID NO: 322749 - DNA, 20 bp, Artificial Sequence
  Description of Artificial Sequence: Synthetic oligonucleotide
  Target: LAMA2; (+) strand; PAM type: YTN; PAM sequence: CTA
cataattgagaccaagtgac

SEQ ID NO: 322750 - DNA, 20 bp, Artificial Sequence
  Description of Artificial Sequence: Synthetic oligonucleotide
  Target: LAMA2; (+) strand; PAM type: YTN; PAM sequence: TTG
agaccaagtgacatttcatt

SEQ ID NO: 322751 - DNA, 20 bp, Artificial Sequence
  Description of Artificial Sequence: Synthetic oligonucleotide
  Target: LAMA2; (+) strand; PAM type: YTN; PAM sequence: TTT
catttggtgttaacatatac

SEQ ID NO: 322752 - DNA, 20 bp, Artificial Sequence
  Description of Artificial Sequence: Synthetic oligonucleotide
  Target: LAMA2; (+) strand; PAM type: YTN; PAM sequence: TTC
atttggtgttaacatatact

SEQ ID NO: 322753 - DNA, 20 bp, Artificial Sequence
  Description of Artificial Sequence: Synthetic oligonucleotide
  Target: LAMA2; (+) strand; PAM type: YTN; PAM sequence: TTT
ggtgttaacatatactatgt

SEQ ID NO: 322754 - DNA, 20 bp, Artificial Sequence
  Description of Artificial Sequence: Synthetic oligonucleotide
  Target: LAMA2; (+) strand; PAM type: YTN; PAM sequence: TTG
gtgttaacatatactatgta

SEQ ID NO: 322755 - DNA, 20 bp, Artificial Sequence
  Description of Artificial Sequence: Synthetic oligonucleotide
  Target: LAMA2; (+) strand; PAM type: YTN; PAM sequence: TTA
acatatactatgtaaaaatg

SEQ ID NO: 322756 - DNA, 20 bp, Artificial Sequence
  Description of Artificial Sequence: Synthetic oligonucleotide
  Target: LAMA2; (+) strand; PAM type: YTN; PAM sequence: CTA
tgtaaaaatggtattatatt

SEQ ID NO: 322757 - DNA, 20 bp, Artificial Sequence
  Description of Artificial Sequence: Synthetic oligonucleotide
  Target: LAMA2; (+) strand; PAM type: YTN; PAM sequence: TTA
tattttcagtgttttaatgg

SEQ ID NO: 322758 - DNA, 20 bp, Artificial Sequence
  Description of Artificial Sequence: Synthetic oligonucleotide
  Target: LAMA2; (+) strand; PAM type: YTN; PAM sequence: TTT
tcagtgttttaatggaaatt

SEQ ID NO: 322759 - DNA, 20 bp, Artificial Sequence
  Description of Artificial Sequence: Synthetic oligonucleotide
  Target: LAMA2; (+) strand; PAM type: YTN; PAM sequence: TTT
cagtgttttaatggaaattt

SEQ ID NO: 322760 - DNA, 20 bp, Artificial Sequence
  Description of Artificial Sequence: Synthetic oligonucleotide
  Target: LAMA2; (+) strand; PAM type: YTN; PAM sequence: TTC
agtgttttaatggaaatttt

SEQ ID NO: 322761 - DNA, 20 bp, Artificial Sequence
  Description of Artificial Sequence: Synthetic oligonucleotide
  Target: LAMA2; (+) strand; PAM type: YTN; PAM sequence: TTT
taatggaaattttaacatgc

SEQ ID NO: 322762 - DNA, 20 bp, Artificial Sequence
  Description of Artificial Sequence: Synthetic oligonucleotide
  Target: LAMA2; (+) strand; PAM type: YTN; PAM sequence: TTT
aatggaaattttaacatgct

SEQ ID NO: 322763 - DNA, 20 bp, Artificial Sequence
  Description of Artificial Sequence: Synthetic oligonucleotide
  Target: LAMA2; (+) strand; PAM type: YTN; PAM sequence: TTA
atggaaattttaacatgctt

SEQ ID NO: 322764 - DNA, 20 bp, Artificial Sequence
  Description of Artificial Sequence: Synthetic oligonucleotide
  Target: LAMA2; (+) strand; PAM type: YTN; PAM sequence: TTT
taacatgctttctgatagtt

SEQ ID NO: 322765 - DNA, 20 bp, Artificial Sequence
  Description of Artificial Sequence: Synthetic oligonucleotide
  Target: LAMA2; (+) strand; PAM type: YTN; PAM sequence: TTT
aacatgctttctgatagttt

SEQ ID NO: 322766 - DNA, 20 bp, Artificial Sequence
  Description of Artificial Sequence: Synthetic oligonucleotide
  Target: LAMA2; (+) strand; PAM type: YTN; PAM sequence: TTA
acatgctttctgatagttta

SEQ ID NO: 322767 - DNA, 20 bp, Artificial Sequence
  Description of Artificial Sequence: Synthetic oligonucleotide
  Target: LAMA2; (+) strand; PAM type: YTN; PAM sequence: CTT
tctgatagtttaatatcttt

SEQ ID NO: 322768 - DNA, 20 bp, Artificial Sequence
  Description of Artificial Sequence: Synthetic oligonucleotide
  Target: LAMA2; (+) strand; PAM type: YTN; PAM sequence: TTT
ctgatagtttaatatctttt

SEQ ID NO: 322769 - DNA, 20 bp, Artificial Sequence
  Description of Artificial Sequence: Synthetic oligonucleotide
  Target: LAMA2; (+) strand; PAM type: YTN; PAM sequence: TTC
tgatagtttaatatctttta

SEQ ID NO: 322770 - DNA, 20 bp, Artificial Sequence
  Description of Artificial Sequence: Synthetic oligonucleotide
  Target: LAMA2; (+) strand; PAM type: YTN; PAM sequence: CTG
atagtttaatatcttttaac

SEQ ID NO: 322771 - DNA, 20 bp, Artificial Sequence
  Description of Artificial Sequence: Synthetic oligonucleotide
  Target: LAMA2; (+) strand; PAM type: YTN; PAM sequence: TTT
aatatcttttaacttgtgcc

SEQ ID NO: 322772 - DNA, 20 bp, Artificial Sequence
  Description of Artificial Sequence: Synthetic oligonucleotide
  Target: LAMA2; (+) strand; PAM type: YTN; PAM sequence: TTA
atatcttttaacttgtgcca

SEQ ID NO: 322773 - DNA, 20 bp, Artificial Sequence
  Description of Artificial Sequence: Synthetic oligonucleotide
  Target: LAMA2; (+) strand; PAM type: YTN; PAM sequence: CTT
ttaacttgtgccaatagatt

SEQ ID NO: 322774 - DNA, 20 bp, Artificial Sequence
  Description of Artificial Sequence: Synthetic oligonucleotide
  Target: LAMA2; (+) strand; PAM type: YTN; PAM sequence: TTT
taacttgtgccaatagattg

SEQ ID NO: 322775 - DNA, 20 bp, Artificial Sequence
  Description of Artificial Sequence: Synthetic oligonucleotide
  Target: LAMA2; (+) strand; PAM type: YTN; PAM sequence: TTT
aacttgtgccaatagattgt

SEQ ID NO: 322776 - DNA, 20 bp, Artificial Sequence
  Description of Artificial Sequence: Synthetic oligonucleotide
  Target: LAMA2; (+) strand; PAM type: YTN; PAM sequence: TTA
acttgtgccaatagattgtt

SEQ ID NO: 322777 - DNA, 20 bp, Artificial Sequence
  Description of Artificial Sequence: Synthetic oligonucleotide
  Target: LAMA2; (+) strand; PAM type: YTN; PAM sequence: CTT
gtgccaatagattgttttag

SEQ ID NO: 322778 - DNA, 20 bp, Artificial Sequence
  Description of Artificial Sequence: Synthetic oligonucleotide
  Target: LAMA2; (+) strand; PAM type: YTN; PAM sequence: TTG
tgccaatagattgttttagc

SEQ ID NO: 322779 - DNA, 20 bp, Artificial Sequence
  Description of Artificial Sequence: Synthetic oligonucleotide
  Target: LAMA2; (+) strand; PAM type: YTN; PAM sequence: TTG
ttttagcaagaaatgagtga

SEQ ID NO: 322780 - DNA, 20 bp, Artificial Sequence
  Description of Artificial Sequence: Synthetic oligonucleotide
  Target: LAMA2; (+) strand; PAM type: YTN; PAM sequence: TTT
tagcaagaaatgagtgataa

SEQ ID NO: 322781 - DNA, 20 bp, Artificial Sequence
  Description of Artificial Sequence: Synthetic oligonucleotide
  Target: LAMA2; (+) strand; PAM type: YTN; PAM sequence: TTT
agcaagaaatgagtgataat

SEQ ID NO: 322782 - DNA, 20 bp, Artificial Sequence
  Description of Artificial Sequence: Synthetic oligonucleotide
  Target: LAMA2; (+) strand; PAM type: YTN; PAM sequence: TTA
gcaagaaatgagtgataatc

SEQ ID NO: 322783 - DNA, 20 bp, Artificial Sequence
  Description of Artificial Sequence: Synthetic oligonucleotide
  Target: LAMA2; (+) strand; PAM type: YTN; PAM sequence: CTT
aattttattttcttttaccc

SEQ ID NO: 322784 - DNA, 20 bp, Artificial Sequence
  Description of Artificial Sequence: Synthetic oligonucleotide
  Target: LAMA2; (+) strand; PAM type: YTN; PAM sequence: TTA
attttattttcttttacccg

SEQ ID NO: 322785 - DNA, 20 bp, Artificial Sequence
  Description of Artificial Sequence: Synthetic oligonucleotide
  Target: LAMA2; (+) strand; PAM type: YTN; PAM sequence: TTT
tattttcttttacccgattc

SEQ ID NO: 322786 - DNA, 20 bp, Artificial Sequence
  Description of Artificial Sequence: Synthetic oligonucleotide
  Target: LAMA2; (+) strand; PAM type: YTN; PAM sequence: TTT
attttcttttacccgattca

SEQ ID NO: 322787 - DNA, 20 bp, Artificial Sequence
  Description of Artificial Sequence: Synthetic oligonucleotide
  Target: LAMA2; (+) strand; PAM type: YTN; PAM sequence: TTA
ttttcttttacccgattcaa

SEQ ID NO: 322788 - DNA, 20 bp, Artificial Sequence
  Description of Artificial Sequence: Synthetic oligonucleotide
  Target: LAMA2; (+) strand; PAM type: YTN; PAM sequence: TTT
tcttttacccgattcaaaca

SEQ ID NO: 322789 - DNA, 20 bp, Artificial Sequence
  Description of Artificial Sequence: Synthetic oligonucleotide
  Target: LAMA2; (+) strand; PAM type: YTN; PAM sequence: TTT
cttttacccgattcaaacat

SEQ ID NO: 322790 - DNA, 20 bp, Artificial Sequence
  Description of Artificial Sequence: Synthetic oligonucleotide
  Target: LAMA2; (+) strand; PAM type: YTN; PAM sequence: TTC
ttttacccgattcaaacatt

SEQ ID NO: 322791 - DNA, 20 bp, Artificial Sequence
  Description of Artificial Sequence: Synthetic oligonucleotide
  Target: LAMA2; (+) strand; PAM type: YTN; PAM sequence: CTT
ttacccgattcaaacattct

SEQ ID NO: 322792 - DNA, 20 bp, Artificial Sequence
  Description of Artificial Sequence: Synthetic oligonucleotide
  Target: LAMA2; (+) strand; PAM type: YTN; PAM sequence: TTT
tacccgattcaaacattctt

SEQ ID NO: 322793 - DNA, 20 bp, Artificial Sequence
  Description of Artificial Sequence: Synthetic oligonucleotide
  Target: LAMA2; (+) strand; PAM type: YTN; PAM sequence: TTT
acccgattcaaacattcttg

SEQ ID NO: 322794 - DNA, 20 bp, Artificial Sequence
  Description of Artificial Sequence: Synthetic oligonucleotide
  Target: LAMA2; (+) strand; PAM type: YTN; PAM sequence: TTA
cccgattcaaacattcttgc

SEQ ID NO: 322795 - DNA, 20 bp, Artificial Sequence
  Description of Artificial Sequence: Synthetic oligonucleotide
  Target: LAMA2; (+) strand; PAM type: YTN; PAM sequence: TTC
aaacattcttgccttgatct

SEQ ID NO: 322796 - DNA, 20 bp, Artificial Sequence
  Description of Artificial Sequence: Synthetic oligonucleotide
  Target: LAMA2; (+) strand; PAM type: YTN; PAM sequence: TTC
ttgccttgatcttagaggct

SEQ ID NO: 322797 - DNA, 20 bp, Artificial Sequence
  Description of Artificial Sequence: Synthetic oligonucleotide
  Target: LAMA2; (+) strand; PAM type: YTN; PAM sequence: CTT
gccttgatcttagaggctgg

SEQ ID NO: 322798 - DNA, 20 bp, Artificial Sequence
  Description of Artificial Sequence: Synthetic oligonucleotide
  Target: LAMA2; (+) strand; PAM type: YTN; PAM sequence: TTG
ccttgatcttagaggctgga

SEQ ID NO: 322799 - DNA, 20 bp, Artificial Sequence
  Description of Artificial Sequence: Synthetic oligonucleotide
  Target: LAMA2; (+) strand; PAM type: YTN; PAM sequence: CTT
gatcttagaggctggagaat

SEQ ID NO: 322800 - DNA, 20 bp, Artificial Sequence
  Description of Artificial Sequence: Synthetic oligonucleotide
  Target: LAMA2; (+) strand; PAM type: YTN; PAM sequence: TTG
atcttagaggctggagaata

SEQ ID NO: 322801 - DNA, 20 bp, Artificial Sequence
  Description of Artificial Sequence: Synthetic oligonucleotide
  Target: LAMA2; (+) strand; PAM type: YTN; PAM sequence: CTT
agaggctggagaataggcag

SEQ ID NO: 322802 - DNA, 20 bp, Artificial Sequence
  Description of Artificial Sequence: Synthetic oligonucleotide
  Target: LAMA2; (+) strand; PAM type: YTN; PAM sequence: TTA
gaggctggagaataggcagc

SEQ ID NO: 322803 - DNA, 20 bp, Artificial Sequence
  Description of Artificial Sequence: Synthetic oligonucleotide
  Target: LAMA2; (+) strand; PAM type: YTN; PAM sequence: CTG
gagaataggcagcatgacct

SEQ ID NO: 322804 - DNA, 20 bp, Artificial Sequence
  Description of Artificial Sequence: Synthetic oligonucleotide
  Target: LAMA2; (+) strand; PAM type: YTN; PAM sequence: CTC
tcatctcttccgttctttcc

SEQ ID NO: 322805 - DNA, 20 bp, Artificial Sequence
  Description of Artificial Sequence: Synthetic oligonucleotide
  Target: LAMA2; (+) strand; PAM type: YTN; PAM sequence: CTC
atctcttccgttctttcctc

SEQ ID NO: 322806 - DNA, 20 bp, Artificial Sequence
  Description of Artificial Sequence: Synthetic oligonucleotide
  Target: LAMA2; (+) strand; PAM type: YTN; PAM sequence: CTC
ttccgttctttcctcagcct

SEQ ID NO: 322807 - DNA, 20 bp, Artificial Sequence
  Description of Artificial Sequence: Synthetic oligonucleotide
  Target: LAMA2; (+) strand; PAM type: YTN; PAM sequence: CTT
ccgttctttcctcagcctta

SEQ ID NO: 322808 - DNA, 20 bp, Artificial Sequence
  Description of Artificial Sequence: Synthetic oligonucleotide
  Target: LAMA2; (+) strand; PAM type: YTN; PAM sequence: TTC
cgttctttcctcagccttag

SEQ ID NO: 322809 - DNA, 20 bp, Artificial Sequence
  Description of Artificial Sequence: Synthetic oligonucleotide
  Target: LAMA2; (+) strand; PAM type: YTN; PAM sequence: TTC
tttcctcagccttagtgaag

SEQ ID NO: 322810 - DNA, 20 bp, Artificial Sequence
  Description of Artificial Sequence: Synthetic oligonucleotide
  Target: LAMA2; (+) strand; PAM type: YTN; PAM sequence: CTT
tcctcagccttagtgaaggg

SEQ ID NO: 322811 - DNA, 20 bp, Artificial Sequence
  Description of Artificial Sequence: Synthetic oligonucleotide
  Target: LAMA2; (+) strand; PAM type: YTN; PAM sequence: TTT
cctcagccttagtgaagggt

SEQ ID NO: 322812 - DNA, 20 bp, Artificial Sequence
  Description of Artificial Sequence: Synthetic oligonucleotide
  Target: LAMA2; (+) strand; PAM type: YTN; PAM sequence: TTC
ctcagccttagtgaagggtg

SEQ ID NO: 322813 - DNA, 20 bp, Artificial Sequence
  Description of Artificial Sequence: Synthetic oligonucleotide
  Target: LAMA2; (+) strand; PAM type: YTN; PAM sequence: CTC
agccttagtgaagggtgtcc

SEQ ID NO: 322814 - DNA, 20 bp, Artificial Sequence
  Description of Artificial Sequence: Synthetic oligonucleotide
  Target: LAMA2; (+) strand; PAM type: YTN; PAM sequence: CTT
agtgaagggtgtcccattca

SEQ ID NO: 322815 - DNA, 20 bp, Artificial Sequence
  Description of Artificial Sequence: Synthetic oligonucleotide
  Target: LAMA2; (+) strand; PAM type: YTN; PAM sequence: TTA
gtgaagggtgtcccattcac

SEQ ID NO: 322816 - DNA, 20 bp, Artificial Sequence
  Description of Artificial Sequence: Synthetic oligonucleotide
  Target: LAMA2; (+) strand; PAM type: YTN; PAM sequence: TTC
acccatttatccacaccatg

SEQ ID NO: 322817 - DNA, 20 bp, Artificial Sequence
  Description of Artificial Sequence: Synthetic oligonucleotide
  Target: LAMA2; (+) strand; PAM type: YTN; PAM sequence: TTT
atccacaccatgagccatac

SEQ ID NO: 322818 - DNA, 20 bp, Artificial Sequence
  Description of Artificial Sequence: Synthetic oligonucleotide
  Target: LAMA2; (+) strand; PAM type: YTN; PAM sequence: TTA
tccacaccatgagccatact

SEQ ID NO: 322819 - DNA, 20 bp, Artificial Sequence
  Description of Artificial Sequence: Synthetic oligonucleotide
  Target: LAMA2; (+) strand; PAM type: YTN; PAM sequence: CTG
tggatcatccactcagccac

SEQ ID NO: 322820 - DNA, 20 bp, Artificial Sequence
  Description of Artificial Sequence: Synthetic oligonucleotide
  Target: LAMA2; (+) strand; PAM type: YTN; PAM sequence: CTC
agccaccaactcctgcaggt

SEQ ID NO: 322821 - DNA, 20 bp, Artificial Sequence
  Description of Artificial Sequence: Synthetic oligonucleotide
  Target: LAMA2; (+) strand; PAM type: YTN; PAM sequence: CTC
ctgcaggtgctgcctctttc

SEQ ID NO: 322822 - DNA, 20 bp, Artificial Sequence
  Description of Artificial Sequence: Synthetic oligonucleotide
  Target: LAMA2; (+) strand; PAM type: YTN; PAM sequence: CTG
caggtgctgcctctttccaa

SEQ ID NO: 322823 - DNA, 20 bp, Artificial Sequence
  Description of Artificial Sequence: Synthetic oligonucleotide
  Target: LAMA2; (+) strand; PAM type: YTN; PAM sequence: CTG
cctctttccaattttacagc

SEQ ID NO: 322824 - DNA, 20 bp, Artificial Sequence
  Description of Artificial Sequence: Synthetic oligonucleotide
  Target: LAMA2; (+) strand; PAM type: YTN; PAM sequence: CTC
tttccaattttacagccact

SEQ ID NO: 322825 - DNA, 20 bp, Artificial Sequence
  Description of Artificial Sequence: Synthetic oligonucleotide
  Target: LAMA2; (+) strand; PAM type: YTN; PAM sequence: CTT
tccaattttacagccactgc

SEQ ID NO: 322826 - DNA, 20 bp, Artificial Sequence
  Description of Artificial Sequence: Synthetic oligonucleotide
  Target: LAMA2; (+) strand; PAM type: YTN; PAM sequence: TTT
ccaattttacagccactgcc

SEQ ID NO: 322827 - DNA, 20 bp, Artificial Sequence
  Description of Artificial Sequence: Synthetic oligonucleotide
  Target: LAMA2; (+) strand; PAM type: YTN; PAM sequence: TTC
caattttacagccactgcct

SEQ ID NO: 322828 - DNA, 20 bp, Artificial Sequence
  Description of Artificial Sequence: Synthetic oligonucleotide
  Target: LAMA2; (+) strand; PAM type: YTN; PAM sequence: TTT
tacagccactgccttcattc

SEQ ID NO: 322829 - DNA, 20 bp, Artificial Sequence
  Description of Artificial Sequence: Synthetic oligonucleotide
  Target: LAMA2; (+) strand; PAM type: YTN; PAM sequence: TTT
acagccactgccttcattca

SEQ ID NO: 322830 - DNA, 20 bp, Artificial Sequence
  Description of Artificial Sequence: Synthetic oligonucleotide
  Target: LAMA2; (+) strand; PAM type: YTN; PAM sequence: TTA
cagccactgccttcattcag

SEQ ID NO: 322831 - DNA, 20 bp, Artificial Sequence
  Description of Artificial Sequence: Synthetic oligonucleotide
  Target: LAMA2; (+) strand; PAM type: YTN; PAM sequence: CTG
ccttcattcagaatctaaat

SEQ ID NO: 322832 - DNA, 20 bp, Artificial Sequence
  Description of Artificial Sequence: Synthetic oligonucleotide
  Target: LAMA2; (+) strand; PAM type: YTN; PAM sequence: CTT
cattcagaatctaaatattt

SEQ ID NO: 322833 - DNA, 20 bp, Artificial Sequence
  Description of Artificial Sequence: Synthetic oligonucleotide
  Target: LAMA2; (+) strand; PAM type: YTN; PAM sequence: TTC
attcagaatctaaatatttc

SEQ ID NO: 322834 - DNA, 20 bp, Artificial Sequence
  Description of Artificial Sequence: Synthetic oligonucleotide
  Target: LAMA2; (+) strand; PAM type: YTN; PAM sequence: TTC
agaatctaaatatttctgcc

SEQ ID NO: 322835 - DNA, 20 bp, Artificial Sequence
  Description of Artificial Sequence: Synthetic oligonucleotide
  Target: LAMA2; (+) strand; PAM type: YTN; PAM sequence: CTA
aatatttctgcccttgattt

SEQ ID NO: 322836 - DNA, 20 bp, Artificial Sequence
  Description of Artificial Sequence: Synthetic oligonucleotide
  Target: LAMA2; (+) strand; PAM type: YTN; PAM sequence: TTT
ctgcccttgatttctgaact

SEQ ID NO: 322837 - DNA, 20 bp, Artificial Sequence
  Description of Artificial Sequence: Synthetic oligonucleotide
  Target: LAMA2; (+) strand; PAM type: YTN; PAM sequence: TTC
tgcccttgatttctgaactg

SEQ ID NO: 322838 - DNA, 20 bp, Artificial Sequence
  Description of Artificial Sequence: Synthetic oligonucleotide
  Target: LAMA2; (+) strand; PAM type: YTN; PAM sequence: CTG
cccttgatttctgaactgcc

SEQ ID NO: 322839 - DNA, 20 bp, Artificial Sequence
  Description of Artificial Sequence: Synthetic oligonucleotide
  Target: LAMA2; (+) strand; PAM type: YTN; PAM sequence: CTT
gatttctgaactgcctctgc

SEQ ID NO: 322840 - DNA, 20 bp, Artificial Sequence
  Description of Artificial Sequence: Synthetic oligonucleotide
  Target: LAMA2; (+) strand; PAM type: YTN; PAM sequence: TTG
atttctgaactgcctctgca

SEQ ID NO: 322841 - DNA, 20 bp, Artificial Sequence
  Description of Artificial Sequence: Synthetic oligonucleotide
  Target: LAMA2; (+) strand; PAM type: YTN; PAM sequence: TTT
ctgaactgcctctgcagtta

SEQ ID NO: 322842 - DNA, 20 bp, Artificial Sequence
  Description of Artificial Sequence: Synthetic oligonucleotide
  Target: LAMA2; (+) strand; PAM type: YTN; PAM sequence: TTC
tgaactgcctctgcagttag

SEQ ID NO: 322843 - DNA, 20 bp, Artificial Sequence
  Description of Artificial Sequence: Synthetic oligonucleotide
  Target: LAMA2; (+) strand; PAM type: YTN; PAM sequence: CTG
aactgcctctgcagttagtc

SEQ ID NO: 322844 - DNA, 20 bp, Artificial Sequence
  Description of Artificial Sequence: Synthetic oligonucleotide
  Target: LAMA2; (+) strand; PAM type: YTN; PAM sequence: CTG
cctctgcagttagtcttctg

SEQ ID NO: 322845 - DNA, 20 bp, Artificial Sequence
  Description of Artificial Sequence: Synthetic oligonucleotide
  Target: LAMA2; (+) strand; PAM type: YTN; PAM sequence: CTC
tgcagttagtcttctgctgc

SEQ ID NO: 322846 - DNA, 20 bp, Artificial Sequence
  Description of Artificial Sequence: Synthetic oligonucleotide
  Target: LAMA2; (+) strand; PAM type: YTN; PAM sequence: CTG
cagttagtcttctgctgccc

SEQ ID NO: 322847 - DNA, 20 bp, Artificial Sequence
  Description of Artificial Sequence: Synthetic oligonucleotide
  Target: LAMA2; (+) strand; PAM type: YTN; PAM sequence: TTA
gtcttctgctgccctctcct

SEQ ID NO: 322848 - DNA, 20 bp, Artificial Sequence
  Description of Artificial Sequence: Synthetic oligonucleotide
  Target: LAMA2; (+) strand; PAM type: YTN; PAM sequence: CTT
ctgctgccctctcctcattc

SEQ ID NO: 322849 - DNA, 20 bp, Artificial Sequence
  Description of Artificial Sequence: Synthetic oligonucleotide
  Target: LAMA2; (+) strand; PAM type: YTN; PAM sequence: TTC
tgctgccctctcctcattcc

SEQ ID NO: 322850 - DNA, 20 bp, Artificial Sequence
  Description of Artificial Sequence: Synthetic oligonucleotide
  Target: LAMA2; (+) strand; PAM type: YTN; PAM sequence: CTG
ctgccctctcctcattcctt

SEQ ID NO: 322851 - DNA, 20 bp, Artificial Sequence
  Description of Artificial Sequence: Synthetic oligonucleotide
  Target: LAMA2; (+) strand; PAM type: YTN; PAM sequence: CTG
ccctctcctcattcctttca

SEQ ID NO: 322852 - DNA, 20 bp, Artificial Sequence
  Description of Artificial Sequence: Synthetic oligonucleotide
  Target: LAMA2; (+) strand; PAM type: YTN; PAM sequence: CTC
tcctcattcctttcatctgt

SEQ ID NO: 322853 - DNA, 20 bp, Artificial Sequence
  Description of Artificial Sequence: Synthetic oligonucleotide
  Target: LAMA2; (+) strand; PAM type: YTN; PAM sequence: CTC
ctcattcctttcatctgtca

SEQ ID NO: 322854 - DNA, 20 bp, Artificial Sequence
  Description of Artificial Sequence: Synthetic oligonucleotide
  Target: LAMA2; (+) strand; PAM type: YTN; PAM sequence: CTC
attcctttcatctgtcattc

SEQ ID NO: 322855 - DNA, 20 bp, Artificial Sequence
  Description of Artificial Sequence: Synthetic oligonucleotide
  Target: LAMA2; (+) strand; PAM type: YTN; PAM sequence: TTC
ctttcatctgtcattcctgc

SEQ ID NO: 322856 - DNA, 20 bp, Artificial Sequence
  Description of Artificial Sequence: Synthetic oligonucleotide
  Target: LAMA2; (+) strand; PAM type: YTN; PAM sequence: CTT
tcatctgtcattcctgctta

SEQ ID NO: 322857 - DNA, 20 bp, Artificial Sequence
  Description of Artificial Sequence: Synthetic oligonucleotide
  Target: LAMA2; (+) strand; PAM type: YTN; PAM sequence: TTT
catctgtcattcctgcttaa

SEQ ID NO: 322858 - DNA, 20 bp, Artificial Sequence
  Description of Artificial Sequence: Synthetic oligonucleotide
  Target: LAMA2; (+) strand; PAM type: YTN; PAM sequence: TTC
atctgtcattcctgcttaat

SEQ ID NO: 322859 - DNA, 20 bp, Artificial Sequence
  Description of Artificial Sequence: Synthetic oligonucleotide
  Target: LAMA2; (+) strand; PAM type: YTN; PAM sequence: CTG
tcattcctgcttaatactct

SEQ ID NO: 322860 - DNA, 20 bp, Artificial Sequence
  Description of Artificial Sequence: Synthetic oligonucleotide
  Target: LAMA2; (+) strand; PAM type: YTN; PAM sequence: TTC
ctgcttaatactctcctagg

SEQ ID NO: 322861 - DNA, 20 bp, Artificial Sequence
  Description of Artificial Sequence: Synthetic oligonucleotide
  Target: LAMA2; (+) strand; PAM type: YTN; PAM sequence: CTG
cttaatactctcctagggct

SEQ ID NO: 322862 - DNA, 20 bp, Artificial Sequence
  Description of Artificial Sequence: Synthetic oligonucleotide
  Target: LAMA2; (+) strand; PAM type: YTN; PAM sequence: CTT
aatactctcctagggctctc

SEQ ID NO: 322863 - DNA, 20 bp, Artificial Sequence
  Description of Artificial Sequence: Synthetic oligonucleotide
  Target: LAMA2; (+) strand; PAM type: YTN; PAM sequence: TTA
atactctcctagggctctcc

SEQ ID NO: 322864 - DNA, 20 bp, Artificial Sequence
  Description of Artificial Sequence: Synthetic oligonucleotide
  Target: LAMA2; (+) strand; PAM type: YTN; PAM sequence: CTC
tcctagggctctccatcgtg

SEQ ID NO: 322865 - DNA, 20 bp, Artificial Sequence
  Description of Artificial Sequence: Synthetic oligonucleotide
  Target: LAMA2; (+) strand; PAM type: YTN; PAM sequence: CTC
ctagggctctccatcgtgtc

SEQ ID NO: 322866 - DNA, 20 bp, Artificial Sequence
  Description of Artificial Sequence: Synthetic oligonucleotide
  Target: LAMA2; (+) strand; PAM type: YTN; PAM sequence: CTA
gggctctccatcgtgtccag

SEQ ID NO: 322867 - DNA, 20 bp, Artificial Sequence
  Description of Artificial Sequence: Synthetic oligonucleotide
  Target: LAMA2; (+) strand; PAM type: YTN; PAM sequence: CTC
tccatcgtgtccagtataaa

SEQ ID NO: 322868 - DNA, 20 bp, Artificial Sequence
  Description of Artificial Sequence: Synthetic oligonucleotide
  Target: LAMA2; (+) strand; PAM type: YTN; PAM sequence: CTC
catcgtgtccagtataaaat

SEQ ID NO: 322869 - DNA, 20 bp, Artificial Sequence
  Description of Artificial Sequence: Synthetic oligonucleotide
  Target: LAMA2; (+) strand; PAM type: YTN; PAM sequence: CTG
aaacttgtaatcaggaagac

SEQ ID NO: 322870 - DNA, 20 bp, Artificial Sequence
  Description of Artificial Sequence: Synthetic oligonucleotide
  Target: LAMA2; (+) strand; PAM type: YTN; PAM sequence: CTT
gtaatcaggaagacatcccc

SEQ ID NO: 322871 - DNA, 20 bp, Artificial Sequence
  Description of Artificial Sequence: Synthetic oligonucleotide
  Target: LAMA2; (+) strand; PAM type: YTN; PAM sequence: TTG
taatcaggaagacatcccct

SEQ ID NO: 322872 - DNA, 20 bp, Artificial Sequence
  Description of Artificial Sequence: Synthetic oligonucleotide
  Target: LAMA2; (+) strand; PAM type: YTN; PAM sequence: CTT
tgtaatcagatctccatcac

SEQ ID NO: 322873 - DNA, 20 bp, Artificial Sequence
  Description of Artificial Sequence: Synthetic oligonucleotide
  Target: LAMA2; (+) strand; PAM type: YTN; PAM sequence: TTT
gtaatcagatctccatcacc

SEQ ID NO: 322874 - DNA, 20 bp, Artificial Sequence
  Description of Artificial Sequence: Synthetic oligonucleotide
  Target: LAMA2; (+) strand; PAM type: YTN; PAM sequence: TTG
taatcagatctccatcacca

SEQ ID NO: 322875 - DNA, 20 bp, Artificial Sequence
  Description of Artificial Sequence: Synthetic oligonucleotide
  Target: LAMA2; (+) strand; PAM type: YTN; PAM sequence: CTC
catcaccagtccaacttggt

SEQ ID NO: 322876 - DNA, 20 bp, Artificial Sequence
  Description of Artificial Sequence: Synthetic oligonucleotide
  Target: LAMA2; (+) strand; PAM type: YTN; PAM sequence: CTT
ggtctttgacctcttctcac

SEQ ID NO: 322877 - DNA, 20 bp, Artificial Sequence
  Description of Artificial Sequence: Synthetic oligonucleotide
  Target: LAMA2; (+) strand; PAM type: YTN; PAM sequence: TTG
gtctttgacctcttctcact

SEQ ID NO: 322878 - DNA, 20 bp, Artificial Sequence
  Description of Artificial Sequence: Synthetic oligonucleotide
  Target: LAMA2; (+) strand; PAM type: YTN; PAM sequence: CTT
tgacctcttctcactgacat

SEQ ID NO: 322879 - DNA, 20 bp, Artificial Sequence
  Description of Artificial Sequence: Synthetic oligonucleotide
  Target: LAMA2; (+) strand; PAM type: YTN; PAM sequence: TTT
gacctcttctcactgacatt

SEQ ID NO: 322880 - DNA, 20 bp, Artificial Sequence
  Description of Artificial Sequence: Synthetic oligonucleotide
  Target: LAMA2; (+) strand; PAM type: YTN; PAM sequence: TTG
acctcttctcactgacattt

SEQ ID NO: 322881 - DNA, 20 bp, Artificial Sequence
  Description of Artificial Sequence: Synthetic oligonucleotide
  Target: LAMA2; (+) strand; PAM type: YTN; PAM sequence: CTC
ttctcactgacattttatgc

SEQ ID NO: 322882 - DNA, 20 bp, Artificial Sequence
  Description of Artificial Sequence: Synthetic oligonucleotide
  Target: LAMA2; (+) strand; PAM type: YTN; PAM sequence: CTT
ctcactgacattttatgctc

SEQ ID NO: 322883 - DNA, 20 bp, Artificial Sequence
  Description of Artificial Sequence: Synthetic oligonucleotide
  Target: LAMA2; (+) strand; PAM type: YTN; PAM sequence: TTC
tcactgacattttatgctcc

SEQ ID NO: 322884 - DNA, 20 bp, Artificial Sequence
  Description of Artificial Sequence: Synthetic oligonucleotide
  Target: LAMA2; (+) strand; PAM type: YTN; PAM sequence: CTC
actgacattttatgctcctg

SEQ ID NO: 322885 - DNA, 20 bp, Artificial Sequence
  Description of Artificial Sequence: Synthetic oligonucleotide
  Target: LAMA2; (+) strand; PAM type: YTN; PAM sequence: CTG
acattttatgctcctgtcat

SEQ ID NO: 322886 - DNA, 20 bp, Artificial Sequence
  Description of Artificial Sequence: Synthetic oligonucleotide
  Target: LAMA2; (+) strand; PAM type: YTN; PAM sequence: TTT
tatgctcctgtcatgctgga

SEQ ID NO: 322887 - DNA, 20 bp, Artificial Sequence
  Description of Artificial Sequence: Synthetic oligonucleotide
  Target: LAMA2; (+) strand; PAM type: YTN; PAM sequence: TTT
atgctcctgtcatgctggac

SEQ ID NO: 322888 - DNA, 20 bp, Artificial Sequence
  Description of Artificial Sequence: Synthetic oligonucleotide
  Target: LAMA2; (+) strand; PAM type: YTN; PAM sequence: TTA
tgctcctgtcatgctggact

SEQ ID NO: 322889 - DNA, 20 bp, Artificial Sequence
  Description of Artificial Sequence: Synthetic oligonucleotide
  Target: LAMA2; (+) strand; PAM type: YTN; PAM sequence: CTC
ctgtcatgctggactctgca

SEQ ID NO: 322890 - DNA, 20 bp, Artificial Sequence
  Description of Artificial Sequence: Synthetic oligonucleotide
  Target: LAMA2; (+) strand; PAM type: YTN; PAM sequence: CTG
tcatgctggactctgcagtt

SEQ ID NO: 322891 - DNA, 20 bp, Artificial Sequence
  Description of Artificial Sequence: Synthetic oligonucleotide
  Target: LAMA2; (+) strand; PAM type: YTN; PAM sequence: CTG
gactctgcagttgctgggca

SEQ ID NO: 322892 - DNA, 20 bp, Artificial Sequence
  Description of Artificial Sequence: Synthetic oligonucleotide
  Target: LAMA2; (+) strand; PAM type: YTN; PAM sequence: CTC
tgcagttgctgggcagtgta

SEQ ID NO: 322893 - DNA, 20 bp, Artificial Sequence
  Description of Artificial Sequence: Synthetic oligonucleotide
  Target: LAMA2; (+) strand; PAM type: YTN; PAM sequence: CTG
cagttgctgggcagtgtacc

SEQ ID NO: 322894 - DNA, 20 bp, Artificial Sequence
  Description of Artificial Sequence: Synthetic oligonucleotide
  Target: LAMA2; (+) strand; PAM type: YTN; PAM sequence: TTG
ctgggcagtgtacccgcatg

SEQ ID NO: 322895 - DNA, 20 bp, Artificial Sequence
  Description of Artificial Sequence: Synthetic oligonucleotide
  Target: LAMA2; (+) strand; PAM type: YTN; PAM sequence: CTG
ggcagtgtacccgcatgctt

SEQ ID NO: 322896 - DNA, 20 bp, Artificial Sequence
  Description of Artificial Sequence: Synthetic oligonucleotide
  Target: LAMA2; (+) strand; PAM type: YTN; PAM sequence: CTT
tcctgcaggctatcccatct

SEQ ID NO: 322897 - DNA, 20 bp, Artificial Sequence
  Description of Artificial Sequence: Synthetic oligonucleotide
  Target: LAMA2; (+) strand; PAM type: YTN; PAM sequence: TTT
cctgcaggctatcccatctg

SEQ ID NO: 322898 - DNA, 20 bp, Artificial Sequence
  Description of Artificial Sequence: Synthetic oligonucleotide
  Target: LAMA2; (+) strand; PAM type: YTN; PAM sequence: TTC
ctgcaggctatcccatctga

SEQ ID NO: 322899 - DNA, 20 bp, Artificial Sequence
  Description of Artificial Sequence: Synthetic oligonucleotide
  Target: LAMA2; (+) strand; PAM type: YTN; PAM sequence: CTG
caggctatcccatctgactc

SEQ ID NO: 322900 - DNA, 20 bp, Artificial Sequence
  Description of Artificial Sequence: Synthetic oligonucleotide
  Target: LAMA2; (+) strand; PAM type: YTN; PAM sequence: CTA
tcccatctgactctcttctc

SEQ ID NO: 322901 - DNA, 20 bp, Artificial Sequence
  Description of Artificial Sequence: Synthetic oligonucleotide
  Target: LAMA2; (+) strand; PAM type: YTN; PAM sequence: CTG
actctcttctcctaaacctc

SEQ ID NO: 322902 - DNA, 20 bp, Artificial Sequence
  Description of Artificial Sequence: Synthetic oligonucleotide
  Target: LAMA2; (+) strand; PAM type: YTN; PAM sequence: CTC
tcttctcctaaacctcacca

SEQ ID NO: 322903 - DNA, 20 bp, Artificial Sequence
  Description of Artificial Sequence: Synthetic oligonucleotide
  Target: LAMA2; (+) strand; PAM type: YTN; PAM sequence: CTC
ttctcctaaacctcaccata

SEQ ID NO: 322904 - DNA, 20 bp, Artificial Sequence
  Description of Artificial Sequence: Synthetic oligonucleotide
  Target: LAMA2; (+) strand; PAM type: YTN; PAM sequence: CTT
ctcctaaacctcaccatatt

SEQ ID NO: 322905 - DNA, 20 bp, Artificial Sequence
  Description of Artificial Sequence: Synthetic oligonucleotide
  Target: LAMA2; (+) strand; PAM type: YTN; PAM sequence: TTC
tcctaaacctcaccatattt

SEQ ID NO: 322906 - DNA, 20 bp, Artificial Sequence
  Description of Artificial Sequence: Synthetic oligonucleotide
  Target: LAMA2; (+) strand; PAM type: YTN; PAM sequence: CTC
ctaaacctcaccatatttgc

SEQ ID NO: 322907 - DNA, 20 bp, Artificial Sequence
  Description of Artificial Sequence: Synthetic oligonucleotide
  Target: LAMA2; (+) strand; PAM type: YTN; PAM sequence: CTA
aacctcaccatatttgcatg

SEQ ID NO: 322908 - DNA, 20 bp, Artificial Sequence
  Description of Artificial Sequence: Synthetic oligonucleotide
  Target: LAMA2; (+) strand; PAM type: YTN; PAM sequence: CTC
accatatttgcatgggtaac

SEQ ID NO: 322909 - DNA, 20 bp, Artificial Sequence
  Description of Artificial Sequence: Synthetic oligonucleotide
  Target: LAMA2; (+) strand; PAM type: YTN; PAM sequence: TTT
gcatgggtaacatgtcctca

SEQ ID NO: 322910 - DNA, 20 bp, Artificial Sequence
  Description of Artificial Sequence: Synthetic oligonucleotide
  Target: LAMA2; (+) strand; PAM type: YTN; PAM sequence: TTG
catgggtaacatgtcctcac

SEQ ID NO: 322911 - DNA, 20 bp, Artificial Sequence
  Description of Artificial Sequence: Synthetic oligonucleotide
  Target: LAMA2; (+) strand; PAM type: YTN; PAM sequence: CTC
accttttaagaatttcctga

SEQ ID NO: 322912 - DNA, 20 bp, Artificial Sequence
  Description of Artificial Sequence: Synthetic oligonucleotide
  Target: LAMA2; (+) strand; PAM type: YTN; PAM sequence: CTT
ttaagaatttcctgaagctc

SEQ ID NO: 322913 - DNA, 20 bp, Artificial Sequence
  Description of Artificial Sequence: Synthetic oligonucleotide
  Target: LAMA2; (+) strand; PAM type: YTN; PAM sequence: TTT
taagaatttcctgaagctct

SEQ ID NO: 322914 - DNA, 20 bp, Artificial Sequence
  Description of Artificial Sequence: Synthetic oligonucleotide
  Target: LAMA2; (+) strand; PAM type: YTN; PAM sequence: TTT
aagaatttcctgaagctctc

SEQ ID NO: 322915 - DNA, 20 bp, Artificial Sequence
  Description of Artificial Sequence: Synthetic oligonucleotide
  Target: LAMA2; (+) strand; PAM type: YTN; PAM sequence: TTA
agaatttcctgaagctctcc

SEQ ID NO: 322916 - DNA, 20 bp, Artificial Sequence
  Description of Artificial Sequence: Synthetic oligonucleotide
  Target: LAMA2; (+) strand; PAM type: YTN; PAM sequence: TTT
cctgaagctctccctgacat

SEQ ID NO: 322917 - DNA, 20 bp, Artificial Sequence
  Description of Artificial Sequence: Synthetic oligonucleotide
  Target: LAMA2; (+) strand; PAM type: YTN; PAM sequence: TTC
ctgaagctctccctgacatc

SEQ ID NO: 322918 - DNA, 20 bp, Artificial Sequence
  Description of Artificial Sequence: Synthetic oligonucleotide
  Target: LAMA2; (+) strand; PAM type: YTN; PAM sequence: CTG
aagctctccctgacatcctg

SEQ ID NO: 322919 - DNA, 20 bp, Artificial Sequence
  Description of Artificial Sequence: Synthetic oligonucleotide
  Target: LAMA2; (+) strand; PAM type: YTN; PAM sequence: CTC
tccctgacatcctgattcct

SEQ ID NO: 322920 - DNA, 20 bp, Artificial Sequence
  Description of Artificial Sequence: Synthetic oligonucleotide
  Target: LAMA2; (+) strand; PAM type: YTN; PAM sequence: CTC
cctgacatcctgattcctga

SEQ ID NO: 322921 - DNA, 20 bp, Artificial Sequence
  Description of Artificial Sequence: Synthetic oligonucleotide
  Target: LAMA2; (+) strand; PAM type: YTN; PAM sequence: CTG
acatcctgattcctgaacaa

SEQ ID NO: 322922 - DNA, 20 bp, Artificial Sequence
  Description of Artificial Sequence: Synthetic oligonucleotide
  Target: LAMA2; (+) strand; PAM type: YTN; PAM sequence: CTG
attcctgaacaaccacccct

SEQ ID NO: 322923 - DNA, 20 bp, Artificial Sequence
  Description of Artificial Sequence: Synthetic oligonucleotide
  Target: LAMA2; (+) strand; PAM type: YTN; PAM sequence: TTC
ctgaacaaccacccctttgt

SEQ ID NO: 322924 - DNA, 20 bp, Artificial Sequence
  Description of Artificial Sequence: Synthetic oligonucleotide
  Target: LAMA2; (+) strand; PAM type: YTN; PAM sequence: CTG
aacaaccacccctttgtgct

SEQ ID NO: 322925 - DNA, 20 bp, Artificial Sequence
  Description of Artificial Sequence: Synthetic oligonucleotide
  Target: LAMA2; (+) strand; PAM type: YTN; PAM sequence: CTT
tgtgctcacaaaggtctttg

SEQ ID NO: 322926 - DNA, 20 bp, Artificial Sequence
  Description of Artificial Sequence: Synthetic oligonucleotide
  Target: LAMA2; (+) strand; PAM type: YTN; PAM sequence: TTT
gtgctcacaaaggtctttgt

SEQ ID NO: 322927 - DNA, 20 bp, Artificial Sequence
  Description of Artificial Sequence: Synthetic oligonucleotide
  Target: LAMA2; (+) strand; PAM type: YTN; PAM sequence: TTG
tgctcacaaaggtctttgta

SEQ ID NO: 322928 - DNA, 20 bp, Artificial Sequence
  Description of Artificial Sequence: Synthetic oligonucleotide
  Target: LAMA2; (+) strand; PAM type: YTN; PAM sequence: CTC
acaaaggtctttgtagttac

SEQ ID NO: 322929 - DNA, 20 bp, Artificial Sequence
  Description of Artificial Sequence: Synthetic oligonucleotide
  Target: LAMA2; (+) strand; PAM type: YTN; PAM sequence: CTT
tgtagttacattatttatca

SEQ ID NO: 322930 - DNA, 20 bp, Artificial Sequence
  Description of Artificial Sequence: Synthetic oligonucleotide
  Target: LAMA2; (+) strand; PAM type: YTN; PAM sequence: TTT
gtagttacattatttatcat

SEQ ID NO: 322931 - DNA, 20 bp, Artificial Sequence
  Description of Artificial Sequence: Synthetic oligonucleotide
  Target: LAMA2; (+) strand; PAM type: YTN; PAM sequence: TTG
tagttacattatttatcata

SEQ ID NO: 322932 - DNA, 20 bp, Artificial Sequence
  Description of Artificial Sequence: Synthetic oligonucleotide
  Target: LAMA2; (+) strand; PAM type: YTN; PAM sequence: TTA
cattatttatcatacagtgt

SEQ ID NO: 322933 - DNA, 20 bp, Artificial Sequence
  Description of Artificial Sequence: Synthetic oligonucleotide
  Target: LAMA2; (+) strand; PAM type: YTN; PAM sequence: TTA
tttatcatacagtgtttcca

SEQ ID NO: 322934 - DNA, 20 bp, Artificial Sequence
  Description of Artificial Sequence: Synthetic oligonucleotide
  Target: LAMA2; (+) strand; PAM type: YTN; PAM sequence: TTT
atcatacagtgtttccactg

SEQ ID NO: 322935 - DNA, 20 bp, Artificial Sequence
  Description of Artificial Sequence: Synthetic oligonucleotide
  Target: LAMA2; (+) strand; PAM type: YTN; PAM sequence: TTA
tcatacagtgtttccactga

SEQ ID NO: 322936 - DNA, 20 bp, Artificial Sequence
  Description of Artificial Sequence: Synthetic oligonucleotide
  Target: LAMA2; (+) strand; PAM type: YTN; PAM sequence: TTT
ccactgaaagtttaagtgcc

SEQ ID NO: 322937 - DNA, 20 bp, Artificial Sequence
  Description of Artificial Sequence: Synthetic oligonucleotide
  Target: LAMA2; (+) strand; PAM type: YTN; PAM sequence: TTC
cactgaaagtttaagtgcct

SEQ ID NO: 322938 - DNA, 20 bp, Artificial Sequence
  Description of Artificial Sequence: Synthetic oligonucleotide
  Target: LAMA2; (+) strand; PAM type: YTN; PAM sequence: CTG
aaagtttaagtgcctgttcc

SEQ ID NO: 322939 - DNA, 20 bp, Artificial Sequence
  Description of Artificial Sequence: Synthetic oligonucleotide
  Target: LAMA2; (+) strand; PAM type: YTN; PAM sequence: TTT
aagtgcctgttccccatcgt

SEQ ID NO: 322940 - DNA, 20 bp, Artificial Sequence
  Description of Artificial Sequence: Synthetic oligonucleotide
  Target: LAMA2; (+) strand; PAM type: YTN; PAM sequence: TTA
agtgcctgttccccatcgtg

SEQ ID NO: 322941 - DNA, 20 bp, Artificial Sequence
  Description of Artificial Sequence: Synthetic oligonucleotide
  Target: LAMA2; (+) strand; PAM type: YTN; PAM sequence: CTG
ttccccatcgtggctcctga

SEQ ID NO: 322942 - DNA, 20 bp, Artificial Sequence
  Description of Artificial Sequence: Synthetic oligonucleotide
  Target: LAMA2; (+) strand; PAM type: YTN; PAM sequence: TTC
cccatcgtggctcctgagta

SEQ ID NO: 322943 - DNA, 20 bp, Artificial Sequence
  Description of Artificial Sequence: Synthetic oligonucleotide
  Target: LAMA2; (+) strand; PAM type: YTN; PAM sequence: CTC
ctgagtagctatgcagaggg

SEQ ID NO: 322944 - DNA, 20 bp, Artificial Sequence
  Description of Artificial Sequence: Synthetic oligonucleotide
  Target: LAMA2; (+) strand; PAM type: YTN; PAM sequence: CTG
agtagctatgcagagggcgt

SEQ ID NO: 322945 - DNA, 20 bp, Artificial Sequence
  Description of Artificial Sequence: Synthetic oligonucleotide
  Target: LAMA2; (+) strand; PAM type: YTN; PAM sequence: CTA
tgcagagggcgtaggggaag

SEQ ID NO: 322946 - DNA, 20 bp, Artificial Sequence
  Description of Artificial Sequence: Synthetic oligonucleotide
  Target: LAMA2; (+) strand; PAM type: YTN; PAM sequence: CTG
gtgaaactgggccaaggaga

SEQ ID NO: 322947 - DNA, 20 bp, Artificial Sequence
  Description of Artificial Sequence: Synthetic oligonucleotide
  Target: LAMA2; (+) strand; PAM type: YTN; PAM sequence: CTG
ggccaaggagacttgtctct

SEQ ID NO: 322948 - DNA, 20 bp, Artificial Sequence
  Description of Artificial Sequence: Synthetic oligonucleotide
  Target: LAMA2; (+) strand; PAM type: YTN; PAM sequence: CTT
gtctctaagctacattggca

SEQ ID NO: 322949 - DNA, 20 bp, Artificial Sequence
  Description of Artificial Sequence: Synthetic oligonucleotide
  Target: LAMA2; (+) strand; PAM type: YTN; PAM sequence: TTG
tctctaagctacattggcag

SEQ ID NO: 322950 - DNA, 20 bp, Artificial Sequence
  Description of Artificial Sequence: Synthetic oligonucleotide
  Target: LAMA2; (+) strand; PAM type: YTN; PAM sequence: CTC
taagctacattggcagagca

SEQ ID NO: 322951 - DNA, 20 bp, Artificial Sequence
  Description of Artificial Sequence: Synthetic oligonucleotide
  Target: LAMA2; (+) strand; PAM type: YTN; PAM sequence: CTA
agctacattggcagagcaat

SEQ ID NO: 322952 - DNA, 20 bp, Artificial Sequence
  Description of Artificial Sequence: Synthetic oligonucleotide
  Target: LAMA2; (+) strand; PAM type: YTN; PAM sequence: CTA
cattggcagagcaatgtttt

SEQ ID NO: 322953 - DNA, 20 bp, Artificial Sequence
  Description of Artificial Sequence: Synthetic oligonucleotide
  Target: LAMA2; (+) strand; PAM type: YTN; PAM sequence: TTG
gcagagcaatgttttactta

SEQ ID NO: 322954 - DNA, 20 bp, Artificial Sequence
  Description of Artificial Sequence: Synthetic oligonucleotide
  Target: LAMA2; (+) strand; PAM type: YTN; PAM sequence: TTT
tacttagattatatctattt

SEQ ID NO: 322955 - DNA, 20 bp, Artificial Sequence
  Description of Artificial Sequence: Synthetic oligonucleotide
  Target: LAMA2; (+) strand; PAM type: YTN; PAM sequence: TTT
acttagattatatctattta

SEQ ID NO: 322956 - DNA, 20 bp, Artificial Sequence
  Description of Artificial Sequence: Synthetic oligonucleotide
  Target: LAMA2; (+) strand; PAM type: YTN; PAM sequence: TTA
cttagattatatctatttaa

SEQ ID NO: 322957 - DNA, 20 bp, Artificial Sequence
  Description of Artificial Sequence: Synthetic oligonucleotide
  Target: LAMA2; (+) strand; PAM type: YTN; PAM sequence: CTT
agattatatctatttaagat

SEQ ID NO: 322958 - DNA, 20 bp, Artificial Sequence
  Description of Artificial Sequence: Synthetic oligonucleotide
  Target: LAMA2; (+) strand; PAM type: YTN; PAM sequence: TTA
gattatatctatttaagatg

SEQ ID NO: 322959 - DNA, 20 bp, Artificial Sequence
  Description of Artificial Sequence: Synthetic oligonucleotide
  Target: LAMA2; (+) strand; PAM type: YTN; PAM sequence: TTA
tatctatttaagatggattt

SEQ ID NO: 322960 - DNA, 20 bp, Artificial Sequence
  Description of Artificial Sequence: Synthetic oligonucleotide
  Target: LAMA2; (+) strand; PAM type: YTN; PAM sequence: CTA
tttaagatggatttagggag

SEQ ID NO: 322961 - DNA, 20 bp, Artificial Sequence
  Description of Artificial Sequence: Synthetic oligonucleotide
  Target: LAMA2; (+) strand; PAM type: YTN; PAM sequence: TTT
aagatggatttagggaggct

SEQ ID NO: 322962 - DNA, 20 bp, Artificial Sequence
  Description of Artificial Sequence: Synthetic oligonucleotide
  Target: LAMA2; (+) strand; PAM type: YTN; PAM sequence: TTA
agatggatttagggaggctc

SEQ ID NO: 322963 - DNA, 20 bp, Artificial Sequence
  Description of Artificial Sequence: Synthetic oligonucleotide
  Target: LAMA2; (+) strand; PAM type: YTN; PAM sequence: TTT
agggaggctcagggagatta

SEQ ID NO: 322964 - DNA, 20 bp, Artificial Sequence
  Description of Artificial Sequence: Synthetic oligonucleotide
  Target: LAMA2; (+) strand; PAM type: YTN; PAM sequence: TTA
gggaggctcagggagattat

SEQ ID NO: 322965 - DNA, 20 bp, Artificial Sequence
  Description of Artificial Sequence: Synthetic oligonucleotide
  Target: LAMA2; (+) strand; PAM type: YTN; PAM sequence: CTC
agggagattattggagagag

SEQ ID NO: 322966 - DNA, 20 bp, Artificial Sequence
  Description of Artificial Sequence: Synthetic oligonucleotide
  Target: LAMA2; (+) strand; PAM type: YTN; PAM sequence: TTA
ttggagagaggggaaatatg

SEQ ID NO: 322967 - DNA, 20 bp, Artificial Sequence
  Description of Artificial Sequence: Synthetic oligonucleotide
  Target: LAMA2; (+) strand; PAM type: YTN; PAM sequence: TTG
gagagaggggaaatatgaga

SEQ ID NO: 322968 - DNA, 20 bp, Artificial Sequence
  Description of Artificial Sequence: Synthetic oligonucleotide
  Target: LAMA2; (+) strand; PAM type: YTN; PAM sequence: CTA
agcacctcttggcagcactg

SEQ ID NO: 322969 - DNA, 20 bp, Artificial Sequence
  Description of Artificial Sequence: Synthetic oligonucleotide
  Target: LAMA2; (+) strand; PAM type: YTN; PAM sequence: CTC
ttggcagcactgctgtgttt

SEQ ID NO: 322970 - DNA, 20 bp, Artificial Sequence
  Description of Artificial Sequence: Synthetic oligonucleotide
  Target: LAMA2; (+) strand; PAM type: YTN; PAM sequence: CTT
ggcagcactgctgtgtttcc

SEQ ID NO: 322971 - DNA, 20 bp, Artificial Sequence
  Description of Artificial Sequence: Synthetic oligonucleotide
  Target: LAMA2; (+) strand; PAM type: YTN; PAM sequence: TTG
gcagcactgctgtgtttcct

SEQ ID NO: 322972 - DNA, 20 bp, Artificial Sequence
  Description of Artificial Sequence: Synthetic oligonucleotide
  Target: LAMA2; (+) strand; PAM type: YTN; PAM sequence: CTG
ctgtgtttcctctactgtgg

SEQ ID NO: 322973 - DNA, 20 bp, Artificial Sequence
  Description of Artificial Sequence: Synthetic oligonucleotide
  Target: LAMA2; (+) strand; PAM type: YTN; PAM sequence: CTG
tgtttcctctactgtggagt

SEQ ID NO: 322974 - DNA, 20 bp, Artificial Sequence
  Description of Artificial Sequence: Synthetic oligonucleotide
  Target: LAMA2; (+) strand; PAM type: YTN; PAM sequence: TTT
cctctactgtggagtgagct

SEQ ID NO: 322975 - DNA, 20 bp, Artificial Sequence
  Description of Artificial Sequence: Synthetic oligonucleotide
  Target: LAMA2; (+) strand; PAM type: YTN; PAM sequence: TTC
ctctactgtggagtgagctc

SEQ ID NO: 322976 - DNA, 20 bp, Artificial Sequence
  Description of Artificial Sequence: Synthetic oligonucleotide
  Target: LAMA2; (+) strand; PAM type: YTN; PAM sequence: CTC
tactgtggagtgagctcctg

SEQ ID NO: 322977 - DNA, 20 bp, Artificial Sequence
  Description of Artificial Sequence: Synthetic oligonucleotide
  Target: LAMA2; (+) strand; PAM type: YTN; PAM sequence: CTA
ctgtggagtgagctcctgga

SEQ ID NO: 322978 - DNA, 20 bp, Artificial Sequence
  Description of Artificial Sequence: Synthetic oligonucleotide
  Target: LAMA2; (+) strand; PAM type: YTN; PAM sequence: CTG
tggagtgagctcctggaaaa

SEQ ID NO: 322979 - DNA, 20 bp, Artificial Sequence
  Description of Artificial Sequence: Synthetic oligonucleotide
  Target: LAMA2; (+) strand; PAM type: YTN; PAM sequence: CTC
ctggaaaacagggactctgt

SEQ ID NO: 322980 - DNA, 20 bp, Artificial Sequence
  Description of Artificial Sequence: Synthetic oligonucleotide
  Target: LAMA2; (+) strand; PAM type: YTN; PAM sequence: CTG
gaaaacagggactctgtctg

SEQ ID NO: 322981 - DNA, 20 bp, Artificial Sequence
  Description of Artificial Sequence: Synthetic oligonucleotide
  Target: LAMA2; (+) strand; PAM type: YTN; PAM sequence: CTC
tgtctgtcatctgtgtgttt

SEQ ID NO: 322982 - DNA, 20 bp, Artificial Sequence
  Description of Artificial Sequence: Synthetic oligonucleotide
  Target: LAMA2; (+) strand; PAM type: YTN; PAM sequence: CTG
tctgtcatctgtgtgtttcc

SEQ ID NO: 322983 - DNA, 20 bp, Artificial Sequence
  Description of Artificial Sequence: Synthetic oligonucleotide
  Target: LAMA2; (+) strand; PAM type: YTN; PAM sequence: CTG
tcatctgtgtgtttcctgag

SEQ ID NO: 322984 - DNA, 20 bp, Artificial Sequence
  Description of Artificial Sequence: Synthetic oligonucleotide
  Target: LAMA2; (+) strand; PAM type: YTN; PAM sequence: CTG
tgtgtttcctgagcaccaca

SEQ ID NO: 322985 - DNA, 20 bp, Artificial Sequence
  Description of Artificial Sequence: Synthetic oligonucleotide
  Target: LAMA2; (+) strand; PAM type: YTN; PAM sequence: TTT
cctgagcaccacatagtgtg

SEQ ID NO: 322986 - DNA, 20 bp, Artificial Sequence
  Description of Artificial Sequence: Synthetic oligonucleotide
  Target: LAMA2; (+) strand; PAM type: YTN; PAM sequence: TTC
ctgagcaccacatagtgtgt

SEQ ID NO: 322987 - DNA, 20 bp, Artificial Sequence
  Description of Artificial Sequence: Synthetic oligonucleotide
  Target: LAMA2; (+) strand; PAM type: YTN; PAM sequence: CTG
agcaccacatagtgtgtgcc

SEQ ID NO: 322988 - DNA, 20 bp, Artificial Sequence
  Description of Artificial Sequence: Synthetic oligonucleotide
  Target: LAMA2; (+) strand; PAM type: YTN; PAM sequence: TTG
tatgcctgctacatagtagg

SEQ ID NO: 322989 - DNA, 20 bp, Artificial Sequence
  Description of Artificial Sequence: Synthetic oligonucleotide
  Target: LAMA2; (+) strand; PAM type: YTN; PAM sequence: CTG
ctacatagtaggctcttaat

SEQ ID NO: 322990 - DNA, 20 bp, Artificial Sequence
  Description of Artificial Sequence: Synthetic oligonucleotide
  Target: LAMA2; (+) strand; PAM type: YTN; PAM sequence: CTA
catagtaggctcttaataaa

SEQ ID NO: 322991 - DNA, 20 bp, Artificial Sequence
  Description of Artificial Sequence: Synthetic oligonucleotide
  Target: LAMA2; (+) strand; PAM type: YTN; PAM sequence: CTC
ttaataaataagaagtgaat

SEQ ID NO: 322992 - DNA, 20 bp, Artificial Sequence
  Description of Artificial Sequence: Synthetic oligonucleotide
  Target: LAMA2; (+) strand; PAM type: YTN; PAM sequence: CTT
aataaataagaagtgaattg

SEQ ID NO: 322993 - DNA, 20 bp, Artificial Sequence
  Description of Artificial Sequence: Synthetic oligonucleotide
  Target: LAMA2; (+) strand; PAM type: YTN; PAM sequence: TTA
ataaataagaagtgaattga

SEQ ID NO: 322994 - DNA, 20 bp, Artificial Sequence
  Description of Artificial Sequence: Synthetic oligonucleotide
  Target: LAMA2; (+) strand; PAM type: YTN; PAM sequence: TTG
aggattctagatgctattca

SEQ ID NO: 322995 - DNA, 20 bp, Artificial Sequence
  Description of Artificial Sequence: Synthetic oligonucleotide
  Target: LAMA2; (+) strand; PAM type: YTN; PAM sequence: TTC
tagatgctattcatcttccc

SEQ ID NO: 322996 - DNA, 20 bp, Artificial Sequence
  Description of Artificial Sequence: Synthetic oligonucleotide
  Target: LAMA2; (+) strand; PAM type: YTN; PAM sequence: CTA
gatgctattcatcttcccat

SEQ ID NO: 322997 - DNA, 20 bp, Artificial Sequence
  Description of Artificial Sequence: Synthetic oligonucleotide
  Target: LAMA2; (+) strand; PAM type: YTN; PAM sequence: CTA
ttcatcttcccatattaaat

SEQ ID NO: 322998 - DNA, 20 bp, Artificial Sequence
  Description of Artificial Sequence: Synthetic oligonucleotide
  Target: LAMA2; (+) strand; PAM type: YTN; PAM sequence: TTC
atcttcccatattaaattgc

SEQ ID NO: 322999 - DNA, 20 bp, Artificial Sequence
  Description of Artificial Sequence: Synthetic oligonucleotide
  Target: LAMA2; (+) strand; PAM type: YTN; PAM sequence: CTT
cccatattaaattgctttca

SEQ ID NO: 323000 - DNA, 20 bp, Artificial Sequence
  Description of Artificial Sequence: Synthetic oligonucleotide
  Target: LAMA2; (+) strand; PAM type: YTN; PAM sequence: TTC
ccatattaaattgctttcaa

SEQ ID NO: 323001 - DNA, 20 bp, Artificial Sequence
  Description of Artificial Sequence: Synthetic oligonucleotide
  Target: LAMA2; (+) strand; PAM type: YTN; PAM sequence: TTA
aattgctttcaaaatgtaaa

SEQ ID NO: 323002 - DNA, 20 bp, Artificial Sequence
  Description of Artificial Sequence: Synthetic oligonucleotide
  Target: LAMA2; (+) strand; PAM type: YTN; PAM sequence: TTG
ctttcaaaatgtaaatcctc

SEQ ID NO: 323003 - DNA, 20 bp, Artificial Sequence
  Description of Artificial Sequence: Synthetic oligonucleotide
  Target: LAMA2; (+) strand; PAM type: YTN; PAM sequence: CTT
tcaaaatgtaaatcctctgt

SEQ ID NO: 323004 - DNA, 20 bp, Artificial Sequence
  Description of Artificial Sequence: Synthetic oligonucleotide
  Target: LAMA2; (+) strand; PAM type: YTN; PAM sequence: TTT
caaaatgtaaatcctctgtg

SEQ ID NO: 323005 - DNA, 20 bp, Artificial Sequence
  Description of Artificial Sequence: Synthetic oligonucleotide
  Target: LAMA2; (+) strand; PAM type: YTN; PAM sequence: TTC
aaaatgtaaatcctctgtgg

SEQ ID NO: 323006 - DNA, 20 bp, Artificial Sequence
  Description of Artificial Sequence: Synthetic oligonucleotide
  Target: LAMA2; (+) strand; PAM type: YTN; PAM sequence: CTC
tgtggcactgaagtctattt

SEQ ID NO: 323007 - DNA, 20 bp, Artificial Sequence
  Description of Artificial Sequence: Synthetic oligonucleotide
  Target: LAMA2; (+) strand; PAM type: YTN; PAM sequence: CTG
tggcactgaagtctatttaa

SEQ ID NO: 323008 - DNA, 20 bp, Artificial Sequence
  Description of Artificial Sequence: Synthetic oligonucleotide
  Target: LAMA2; (+) strand; PAM type: YTN; PAM sequence: CTG
aagtctatttaaaatatgct

SEQ ID NO: 323009 - DNA, 20 bp, Artificial Sequence
  Description of Artificial Sequence: Synthetic oligonucleotide
  Target: LAMA2; (+) strand; PAM type: YTN; PAM sequence: CTA
tttaaaatatgctcttctgc

SEQ ID NO: 323010 - DNA, 20 bp, Artificial Sequence
  Description of Artificial Sequence: Synthetic oligonucleotide
  Target: LAMA2; (+) strand; PAM type: YTN; PAM sequence: TTT
aaaatatgctcttctgccaa

SEQ ID NO: 323011 - DNA, 20 bp, Artificial Sequence
  Description of Artificial Sequence: Synthetic oligonucleotide
  Target: LAMA2; (+) strand; PAM type: YTN; PAM sequence: TTA
aaatatgctcttctgccaaa

SEQ ID NO: 323012 - DNA, 20 bp, Artificial Sequence
  Description of Artificial Sequence: Synthetic oligonucleotide
  Target: LAMA2; (+) strand; PAM type: YTN; PAM sequence: CTC
ttctgccaaataaaatgtct

SEQ ID NO: 323013 - DNA, 20 bp, Artificial Sequence
  Description of Artificial Sequence: Synthetic oligonucleotide
  Target: LAMA2; (+) strand; PAM type: YTN; PAM sequence: CTT
ctgccaaataaaatgtctcc

SEQ ID NO: 323014 - DNA, 20 bp, Artificial Sequence
  Description of Artificial Sequence: Synthetic oligonucleotide
  Target: LAMA2; (+) strand; PAM type: YTN; PAM sequence: TTC
tgccaaataaaatgtctcct

SEQ ID NO: 323015 - DNA, 20 bp, Artificial Sequence
  Description of Artificial Sequence: Synthetic oligonucleotide
  Target: LAMA2; (+) strand; PAM type: YTN; PAM sequence: CTG
ccaaataaaatgtctcctcc

SEQ ID NO: 323016 - DNA, 20 bp, Artificial Sequence
  Description of Artificial Sequence: Synthetic oligonucleotide
  Target: LAMA2; (+) strand; PAM type: YTN; PAM sequence: CTC
ctccaggtgatttgaggaag

SEQ ID NO: 323017 - DNA, 20 bp, Artificial Sequence
  Description of Artificial Sequence: Synthetic oligonucleotide
  Target: LAMA2; (+) strand; PAM type: YTN; PAM sequence: CTC
caggtgatttgaggaagaca

SEQ ID NO: 323018 - DNA, 20 bp, Artificial Sequence
  Description of Artificial Sequence: Synthetic oligonucleotide
  Target: LAMA2; (+) strand; PAM type: YTN; PAM sequence: TTT
gaggaagacatgtgggctca

SEQ ID NO: 323019 - DNA, 20 bp, Artificial Sequence
  Description of Artificial Sequence: Synthetic oligonucleotide
  Target: LAMA2; (+) strand; PAM type: YTN; PAM sequence: TTG
aggaagacatgtgggctcaa

SEQ ID NO: 323020 - DNA, 20 bp, Artificial Sequence
  Description of Artificial Sequence: Synthetic oligonucleotide
  Target: LAMA2; (+) strand; PAM type: YTN; PAM sequence: CTC
aaataagattaaaccaaacc

SEQ ID NO: 323021 - DNA, 20 bp, Artificial Sequence
  Description of Artificial Sequence: Synthetic oligonucleotide
  Target: LAMA2; (+) strand; PAM type: YTN; PAM sequence: TTA
aaccaaaccattgtcatgta

SEQ ID NO: 323022 - DNA, 20 bp, Artificial Sequence
  Description of Artificial Sequence: Synthetic oligonucleotide
  Target: LAMA2; (+) strand; PAM type: YTN; PAM sequence: TTG
tcatgtacatgtaaatattg

SEQ ID NO: 323023 - DNA, 20 bp, Artificial Sequence
  Description of Artificial Sequence: Synthetic oligonucleotide
  Target: LAMA2; (+) strand; PAM type: YTN; PAM sequence: TTG
catgagtaactagtcttaca

SEQ ID NO: 323024 - DNA, 20 bp, Artificial Sequence
  Description of Artificial Sequence: Synthetic oligonucleotide
  Target: LAMA2; (+) strand; PAM type: YTN; PAM sequence: CTA
gtcttacattttcttcacta

SEQ ID NO: 323025 - DNA, 20 bp, Artificial Sequence
  Description of Artificial Sequence: Synthetic oligonucleotide
  Target: LAMA2; (+) strand; PAM type: YTN; PAM sequence: CTT
acattttcttcactaatggg

SEQ ID NO: 323026 - DNA, 20 bp, Artificial Sequence
  Description of Artificial Sequence: Synthetic oligonucleotide
  Target: LAMA2; (+) strand; PAM type: YTN; PAM sequence: TTA
cattttcttcactaatgggg

SEQ ID NO: 323027 - DNA, 20 bp, Artificial Sequence
  Description of Artificial Sequence: Synthetic oligonucleotide
  Target: LAMA2; (+) strand; PAM type: YTN; PAM sequence: TTT
tcttcactaatggggattta

SEQ ID NO: 323028 - DNA, 20 bp, Artificial Sequence
  Description of Artificial Sequence: Synthetic oligonucleotide
  Target: LAMA2; (+) strand; PAM type: YTN; PAM sequence: TTT
cttcactaatggggatttat

SEQ ID NO: 323029 - DNA, 20 bp, Artificial Sequence
  Description of Artificial Sequence: Synthetic oligonucleotide
  Target: LAMA2; (+) strand; PAM type: YTN; PAM sequence: TTC
ttcactaatggggatttatt

SEQ ID NO: 323030 - DNA, 20 bp, Artificial Sequence
  Description of Artificial Sequence: Synthetic oligonucleotide
  Target: LAMA2; (+) strand; PAM type: YTN; PAM sequence: CTT
cactaatggggatttattct

SEQ ID NO: 323031 - DNA, 20 bp, Artificial Sequence
  Description of Artificial Sequence: Synthetic oligonucleotide
  Target: LAMA2; (+) strand; PAM type: YTN; PAM sequence: TTC
actaatggggatttattcta

SEQ ID NO: 323032 - DNA, 20 bp, Artificial Sequence
  Description of Artificial Sequence: Synthetic oligonucleotide
  Target: LAMA2; (+) strand; PAM type: YTN; PAM sequence: CTA
atggggatttattctaagga

SEQ ID NO: 323033 - DNA, 20 bp, Artificial Sequence
  Description of Artificial Sequence: Synthetic oligonucleotide
  Target: LAMA2; (+) strand; PAM type: YTN; PAM sequence: TTT
attctaaggaacttttttgt

SEQ ID NO: 323034 - DNA, 20 bp, Artificial Sequence
  Description of Artificial Sequence: Synthetic oligonucleotide
  Target: LAMA2; (+) strand; PAM type: YTN; PAM sequence: TTA
ttctaaggaacttttttgtt

SEQ ID NO: 323035 - DNA, 20 bp, Artificial Sequence
  Description of Artificial Sequence: Synthetic oligonucleotide
  Target: LAMA2; (+) strand; PAM type: YTN; PAM sequence: TTC
taaggaacttttttgttcag

SEQ ID NO: 323036 - DNA, 20 bp, Artificial Sequence
  Description of Artificial Sequence: Synthetic oligonucleotide
  Target: LAMA2; (+) strand; PAM type: YTN; PAM sequence: CTA
aggaacttttttgttcagta

SEQ ID NO: 323037 - DNA, 20 bp, Artificial Sequence
  Description of Artificial Sequence: Synthetic oligonucleotide
  Target: LAMA2; (+) strand; PAM type: YTN; PAM sequence: CTT
ttttgttcagtattttctga

SEQ ID NO: 323038 - DNA, 20 bp, Artificial Sequence
  Description of Artificial Sequence: Synthetic oligonucleotide
  Target: LAMA2; (+) strand; PAM type: YTN; PAM sequence: TTT
tttgttcagtattttctgat

SEQ ID NO: 323039 - DNA, 20 bp, Artificial Sequence
  Description of Artificial Sequence: Synthetic oligonucleotide
  Target: LAMA2; (+) strand; PAM type: YTN; PAM sequence: TTT
ttgttcagtattttctgatg

SEQ ID NO: 323040 - DNA, 20 bp, Artificial Sequence
  Description of Artificial Sequence: Synthetic oligonucleotide
  Target: LAMA2; (+) strand; PAM type: YTN; PAM sequence: TTT
tgttcagtattttctgatga

SEQ ID NO: 323041 - DNA, 20 bp, Artificial Sequence
  Description of Artificial Sequence: Synthetic oligonucleotide
  Target: LAMA2; (+) strand; PAM type: YTN; PAM sequence: TTT
gttcagtattttctgatgaa

SEQ ID NO: 323042 - DNA, 20 bp, Artificial Sequence
  Description of Artificial Sequence: Synthetic oligonucleotide
  Target: LAMA2; (+) strand; PAM type: YTN; PAM sequence: TTG
ttcagtattttctgatgaag

SEQ ID NO: 323043 - DNA, 20 bp, Artificial Sequence
  Description of Artificial Sequence: Synthetic oligonucleotide
  Target: LAMA2; (+) strand; PAM type: YTN; PAM sequence: TTC
agtattttctgatgaaggaa

SEQ ID NO: 323044 - DNA, 20 bp, Artificial Sequence
  Description of Artificial Sequence: Synthetic oligonucleotide
  Target: LAMA2; (+) strand; PAM type: YTN; PAM sequence: TTT
tctgatgaaggaatagtcag

SEQ ID NO: 323045 - DNA, 20 bp, Artificial Sequence
  Description of Artificial Sequence: Synthetic oligonucleotide
  Target: LAMA2; (+) strand; PAM type: YTN; PAM sequence: TTT
ctgatgaaggaatagtcaga

SEQ ID NO: 323046 - DNA, 20 bp, Artificial Sequence
  Description of Artificial Sequence: Synthetic oligonucleotide
  Target: LAMA2; (+) strand; PAM type: YTN; PAM sequence: TTC
tgatgaaggaatagtcagaa

SEQ ID NO: 323047 - DNA, 20 bp, Artificial Sequence
  Description of Artificial Sequence: Synthetic oligonucleotide
  Target: LAMA2; (+) strand; PAM type: YTN; PAM sequence: CTG
atgaaggaatagtcagaaat

SEQ ID NO: 323048 - DNA, 20 bp, Artificial Sequence
  Description of Artificial Sequence: Synthetic oligonucleotide
  Target: LAMA2; (+) strand; PAM type: YTN; PAM sequence: CTT
cttactccattttaggctgc

SEQ ID NO: 323049 - DNA, 20 bp, Artificial Sequence
  Description of Artificial Sequence: Synthetic oligonucleotide
  Target: LAMA2; (+) strand; PAM type: YTN; PAM sequence: TTC
ttactccattttaggctgcc

SEQ ID NO: 323050 - DNA, 20 bp, Artificial Sequence
  Description of Artificial Sequence: Synthetic oligonucleotide
  Target: LAMA2; (+) strand; PAM type: YTN; PAM sequence: CTT
actccattttaggctgccat

SEQ ID NO: 323051 - DNA, 20 bp, Artificial Sequence
  Description of Artificial Sequence: Synthetic oligonucleotide
  Target: LAMA2; (+) strand; PAM type: YTN; PAM sequence: TTA
ctccattttaggctgccatt

SEQ ID NO: 323052 - DNA, 20 bp, Artificial Sequence
  Description of Artificial Sequence: Synthetic oligonucleotide
  Target: LAMA2; (+) strand; PAM type: YTN; PAM sequence: CTC
cattttaggctgccattttt

SEQ ID NO: 323053 - DNA, 20 bp, Artificial Sequence
  Description of Artificial Sequence: Synthetic oligonucleotide
  Target: LAMA2; (+) strand; PAM type: YTN; PAM sequence: TTT
taggctgccatttttttcct

SEQ ID NO: 323054 - DNA, 20 bp, Artificial Sequence
  Description of Artificial Sequence: Synthetic oligonucleotide
  Target: LAMA2; (+) strand; PAM type: YTN; PAM sequence: TTT
aggctgccatttttttccta

SEQ ID NO: 323055 - DNA, 20 bp, Artificial Sequence
  Description of Artificial Sequence: Synthetic oligonucleotide
  Target: LAMA2; (+) strand; PAM type: YTN; PAM sequence: TTA
ggctgccatttttttcctaa

SEQ ID NO: 323056 - DNA, 20 bp, Artificial Sequence
  Description of Artificial Sequence: Synthetic oligonucleotide
  Target: LAMA2; (+) strand; PAM type: YTN; PAM sequence: CTG
ccatttttttcctaagagct

SEQ ID NO: 323057 - DNA, 20 bp, Artificial Sequence
  Description of Artificial Sequence: Synthetic oligonucleotide
  Target: LAMA2; (+) strand; PAM type: YTN; PAM sequence: TTT
ttttcctaagagctgttata

SEQ ID NO: 323058 - DNA, 20 bp, Artificial Sequence
  Description of Artificial Sequence: Synthetic oligonucleotide
  Target: LAMA2; (+) strand; PAM type: YTN; PAM sequence: TTT
tttcctaagagctgttatac

SEQ ID NO: 323059 - DNA, 20 bp, Artificial Sequence
  Description of Artificial Sequence: Synthetic oligonucleotide
  Target: LAMA2; (+) strand; PAM type: YTN; PAM sequence: TTT
ttcctaagagctgttataca

SEQ ID NO: 323060 - DNA, 20 bp, Artificial Sequence
  Description of Artificial Sequence: Synthetic oligonucleotide
  Target: LAMA2; (+) strand; PAM type: YTN; PAM sequence: TTT
tcctaagagctgttatacat

SEQ ID NO: 323061 - DNA, 20 bp, Artificial Sequence
  Description of Artificial Sequence: Synthetic oligonucleotide
  Target: LAMA2; (+) strand; PAM type: YTN; PAM sequence: TTT
cctaagagctgttatacatt

SEQ ID NO: 323062 - DNA, 20 bp, Artificial Sequence
  Description of Artificial Sequence: Synthetic oligonucleotide
  Target: LAMA2; (+) strand; PAM type: YTN; PAM sequence: TTC
ctaagagctgttatacattg

SEQ ID NO: 323063 - DNA, 20 bp, Artificial Sequence
  Description of Artificial Sequence: Synthetic oligonucleotide
  Target: LAMA2; (+) strand; PAM type: YTN; PAM sequence: CTA
agagctgttatacattgagc

SEQ ID NO: 323064 - DNA, 20 bp, Artificial Sequence
  Description of Artificial Sequence: Synthetic oligonucleotide
  Target: LAMA2; (+) strand; PAM type: YTN; PAM sequence: CTG
ttatacattgagcataccta

SEQ ID NO: 323065 - DNA, 20 bp, Artificial Sequence
  Description of Artificial Sequence: Synthetic oligonucleotide
  Target: LAMA2; (+) strand; PAM type: YTN; PAM sequence: TTA
tacattgagcatacctaaat

SEQ ID NO: 323066 - DNA, 20 bp, Artificial Sequence
  Description of Artificial Sequence: Synthetic oligonucleotide
  Target: LAMA2; (+) strand; PAM type: YTN; PAM sequence: TTG
agcatacctaaattgccttt

SEQ ID NO: 323067 - DNA, 20 bp, Artificial Sequence
  Description of Artificial Sequence: Synthetic oligonucleotide
  Target: LAMA2; (+) strand; PAM type: YTN; PAM sequence: CTA
aattgcctttctgaaataca

SEQ ID NO: 323068 - DNA, 20 bp, Artificial Sequence
  Description of Artificial Sequence: Synthetic oligonucleotide
  Target: LAMA2; (+) strand; PAM type: YTN; PAM sequence: TTG
cctttctgaaatacaggaac

SEQ ID NO: 323069 - DNA, 20 bp, Artificial Sequence
  Description of Artificial Sequence: Synthetic oligonucleotide
  Target: LAMA2; (+) strand; PAM type: YTN; PAM sequence: CTT
tctgaaatacaggaacacac

SEQ ID NO: 323070 - DNA, 20 bp, Artificial Sequence
  Description of Artificial Sequence: Synthetic oligonucleotide
  Target: LAMA2; (+) strand; PAM type: YTN; PAM sequence: TTT
ctgaaatacaggaacacact

SEQ ID NO: 323071 - DNA, 20 bp, Artificial Sequence
  Description of Artificial Sequence: Synthetic oligonucleotide
  Target: LAMA2; (+) strand; PAM type: YTN; PAM sequence: TTC
tgaaatacaggaacacactg

SEQ ID NO: 323072 - DNA, 20 bp, Artificial Sequence
  Description of Artificial Sequence: Synthetic oligonucleotide
  Target: LAMA2; (+) strand; PAM type: YTN; PAM sequence: CTG
aaatacaggaacacactgta

SEQ ID NO: 323073 - DNA, 20 bp, Artificial Sequence
  Description of Artificial Sequence: Synthetic oligonucleotide
  Target: LAMA2; (+) strand; PAM type: YTN; PAM sequence: CTG
tattgtcagtaaaatggtct

SEQ ID NO: 323074 - DNA, 20 bp, Artificial Sequence
  Description of Artificial Sequence: Synthetic oligonucleotide
  Target: LAMA2; (+) strand; PAM type: YTN; PAM sequence: TTG
tcagtaaaatggtctgtgtt

SEQ ID NO: 323075 - DNA, 20 bp, Artificial Sequence
  Description of Artificial Sequence: Synthetic oligonucleotide
  Target: LAMA2; (+) strand; PAM type: YTN; PAM sequence: CTG
tgttgattagtttgtctttg

SEQ ID NO: 323076 - DNA, 20 bp, Artificial Sequence
  Description of Artificial Sequence: Synthetic oligonucleotide
  Target: LAMA2; (+) strand; PAM type: YTN; PAM sequence: TTG
attagtttgtctttggggtg

SEQ ID NO: 323077 - DNA, 20 bp, Artificial Sequence
  Description of Artificial Sequence: Synthetic oligonucleotide
  Target: LAMA2; (+) strand; PAM type: YTN; PAM sequence: TTA
gtttgtctttggggtgtact

SEQ ID NO: 323078 - DNA, 20 bp, Artificial Sequence
  Description of Artificial Sequence: Synthetic oligonucleotide
  Target: LAMA2; (+) strand; PAM type: YTN; PAM sequence: TTT
gtctttggggtgtacttgat

SEQ ID NO: 323079 - DNA, 20 bp, Artificial Sequence
  Description of Artificial Sequence: Synthetic oligonucleotide
  Target: LAMA2; (+) strand; PAM type: YTN; PAM sequence: TTG
tctttggggtgtacttgatt

SEQ ID NO: 323080 - DNA, 20 bp, Artificial Sequence
  Description of Artificial Sequence: Synthetic oligonucleotide
  Target: LAMA2; (+) strand; PAM type: YTN; PAM sequence: CTT
tggggtgtacttgattcatc

SEQ ID NO: 323081 - DNA, 20 bp, Artificial Sequence
  Description of Artificial Sequence: Synthetic oligonucleotide
  Target: LAMA2; (+) strand; PAM type: YTN; PAM sequence: TTT
ggggtgtacttgattcatca

SEQ ID NO: 323082 - DNA, 20 bp, Artificial Sequence
  Description of Artificial Sequence: Synthetic oligonucleotide
  Target: LAMA2; (+) strand; PAM type: YTN; PAM sequence: TTG
gggtgtacttgattcatcag

SEQ ID NO: 323083 - DNA, 20 bp, Artificial Sequence
  Description of Artificial Sequence: Synthetic oligonucleotide
  Target: LAMA2; (+) strand; PAM type: YTN; PAM sequence: CTT
gattcatcagatgatggaga

SEQ ID NO: 323084 - DNA, 20 bp, Artificial Sequence
  Description of Artificial Sequence: Synthetic oligonucleotide
  Target: LAMA2; (+) strand; PAM type: YTN; PAM sequence: TTG
attcatcagatgatggagat

SEQ ID NO: 323085 - DNA, 20 bp, Artificial Sequence
  Description of Artificial Sequence: Synthetic oligonucleotide
  Target: LAMA2; (+) strand; PAM type: YTN; PAM sequence: TTC
atcagatgatggagatcctg

SEQ ID NO: 323086 - DNA, 20 bp, Artificial Sequence
  Description of Artificial Sequence: Synthetic oligonucleotide
  Target: LAMA2; (+) strand; PAM type: YTN; PAM sequence: CTG
ctggcgtttcatgcaacctg

SEQ ID NO: 323087 - DNA, 20 bp, Artificial Sequence
  Description of Artificial Sequence: Synthetic oligonucleotide
  Target: LAMA2; (+) strand; PAM type: YTN; PAM sequence: CTG
gcgtttcatgcaacctgcta

SEQ ID NO: 323088 - DNA, 20 bp, Artificial Sequence
  Description of Artificial Sequence: Synthetic oligonucleotide
  Target: LAMA2; (+) strand; PAM type: YTN; PAM sequence: TTT
catgcaacctgctatggtat

SEQ ID NO: 323089 - DNA, 20 bp, Artificial Sequence
  Description of Artificial Sequence: Synthetic oligonucleotide
  Target: LAMA2; (+) strand; PAM type: YTN; PAM sequence: TTC
atgcaacctgctatggtatg

SEQ ID NO: 323090 - DNA, 20 bp, Artificial Sequence
  Description of Artificial Sequence: Synthetic oligonucleotide
  Target: LAMA2; (+) strand; PAM type: YTN; PAM sequence: CTG
ctatggtatgtgggctttat

SEQ ID NO: 323091 - DNA, 20 bp, Artificial Sequence
  Description of Artificial Sequence: Synthetic oligonucleotide
  Target: LAMA2; (+) strand; PAM type: YTN; PAM sequence: CTA
tggtatgtgggctttattgg

SEQ ID NO: 323092 - DNA, 20 bp, Artificial Sequence
  Description of Artificial Sequence: Synthetic oligonucleotide
  Target: LAMA2; (+) strand; PAM type: YTN; PAM sequence: CTT
tattggcttcccagcagcga

SEQ ID NO: 323093 - DNA, 20 bp, Artificial Sequence
  Description of Artificial Sequence: Synthetic oligonucleotide
  Target: LAMA2; (+) strand; PAM type: YTN; PAM sequence: TTT
attggcttcccagcagcgac

SEQ ID NO: 323094 - DNA, 20 bp, Artificial Sequence
  Description of Artificial Sequence: Synthetic oligonucleotide
  Target: LAMA2; (+) strand; PAM type: YTN; PAM sequence: TTA
ttggcttcccagcagcgaca

SEQ ID NO: 323095 - DNA, 20 bp, Artificial Sequence
  Description of Artificial Sequence: Synthetic oligonucleotide
  Target: LAMA2; (+) strand; PAM type: YTN; PAM sequence: TTG
gcttcccagcagcgacactg

SEQ ID NO: 323096 - DNA, 20 bp, Artificial Sequence
  Description of Artificial Sequence: Synthetic oligonucleotide
  Target: LAMA2; (+) strand; PAM type: YTN; PAM sequence: CTT
cccagcagcgacactgacac

SEQ ID NO: 323097 - DNA, 20 bp, Artificial Sequence
  Description of Artificial Sequence: Synthetic oligonucleotide
  Target: LAMA2; (+) strand; PAM type: YTN; PAM sequence: TTC
ccagcagcgacactgacaca

SEQ ID NO: 323098 - DNA, 20 bp, Artificial Sequence
  Description of Artificial Sequence: Synthetic oligonucleotide
  Target: LAMA2; (+) strand; PAM type: YTN; PAM sequence: CTG
acacaaattgtcagatttta

SEQ ID NO: 323099 - DNA, 20 bp, Artificial Sequence
  Description of Artificial Sequence: Synthetic oligonucleotide
  Target: LAMA2; (+) strand; PAM type: YTN; PAM sequence: TTG
tcagattttatgggcagttt

SEQ ID NO: 323100 - DNA, 20 bp, Artificial Sequence
  Description of Artificial Sequence: Synthetic oligonucleotide
  Target: LAMA2; (+) strand; PAM type: YTN; PAM sequence: TTT
tatgggcagttttaaaccta

SEQ ID NO: 323101 - DNA, 20 bp, Artificial Sequence
  Description of Artificial Sequence: Synthetic oligonucleotide
  Target: LAMA2; (+) strand; PAM type: YTN; PAM sequence: TTT
atgggcagttttaaacctaa

SEQ ID NO: 323102 - DNA, 20 bp, Artificial Sequence
  Description of Artificial Sequence: Synthetic oligonucleotide
  Target: LAMA2; (+) strand; PAM type: YTN; PAM sequence: TTA
tgggcagttttaaacctaat

SEQ ID NO: 323103 - DNA, 20 bp, Artificial Sequence
  Description of Artificial Sequence: Synthetic oligonucleotide
  Target: LAMA2; (+) strand; PAM type: YTN; PAM sequence: TTT
taaacctaatgaaatacatc

SEQ ID NO: 323104 - DNA, 20 bp, Artificial Sequence
  Description of Artificial Sequence: Synthetic oligonucleotide
  Target: LAMA2; (+) strand; PAM type: YTN; PAM sequence: TTT
aaacctaatgaaatacatcc

SEQ ID NO: 323105 - DNA, 20 bp, Artificial Sequence
  Description of Artificial Sequence: Synthetic oligonucleotide
  Target: LAMA2; (+) strand; PAM type: YTN; PAM sequence: TTA
aacctaatgaaatacatcct

SEQ ID NO: 323106 - DNA, 20 bp, Artificial Sequence
  Description of Artificial Sequence: Synthetic oligonucleotide
  Target: LAMA2; (+) strand; PAM type: YTN; PAM sequence: CTA
atgaaatacatccttgagaa

SEQ ID NO: 323107 - DNA, 20 bp, Artificial Sequence
  Description of Artificial Sequence: Synthetic oligonucleotide
  Target: LAMA2; (+) strand; PAM type: YTN; PAM sequence: CTT
gagaagcttccttcaccatt

SEQ ID NO: 323108 - DNA, 20 bp, Artificial Sequence
  Description of Artificial Sequence: Synthetic oligonucleotide
  Target: LAMA2; (+) strand; PAM type: YTN; PAM sequence: TTG
agaagcttccttcaccattt

SEQ ID NO: 323109 - DNA, 20 bp, Artificial Sequence
  Description of Artificial Sequence: Synthetic oligonucleotide
  Target: LAMA2; (+) strand; PAM type: YTN; PAM sequence: CTT
ccttcaccattttagtagct

SEQ ID NO: 323110 - DNA, 20 bp, Artificial Sequence
  Description of Artificial Sequence: Synthetic oligonucleotide
  Target: LAMA2; (+) strand; PAM type: YTN; PAM sequence: TTC
cttcaccattttagtagctg

SEQ ID NO: 323111 - DNA, 20 bp, Artificial Sequence
  Description of Artificial Sequence: Synthetic oligonucleotide
  Target: LAMA2; (+) strand; PAM type: YTN; PAM sequence: CTT
caccattttagtagctgtac

SEQ ID NO: 323112 - DNA, 20 bp, Artificial Sequence
  Description of Artificial Sequence: Synthetic oligonucleotide
  Target: LAMA2; (+) strand; PAM type: YTN; PAM sequence: TTC
accattttagtagctgtaca

SEQ ID NO: 323113 - DNA, 20 bp, Artificial Sequence
  Description of Artificial Sequence: Synthetic oligonucleotide
  Target: LAMA2; (+) strand; PAM type: YTN; PAM sequence: TTT
tagtagctgtacaatttgaa

SEQ ID NO: 323114 - DNA, 20 bp, Artificial Sequence
  Description of Artificial Sequence: Synthetic oligonucleotide
  Target: LAMA2; (+) strand; PAM type: YTN; PAM sequence: TTT
agtagctgtacaatttgaaa

SEQ ID NO: 323115 - DNA, 20 bp, Artificial Sequence
  Description of Artificial Sequence: Synthetic oligonucleotide
  Target: LAMA2; (+) strand; PAM type: YTN; PAM sequence: TTA
gtagctgtacaatttgaaag

SEQ ID NO: 323116 - DNA, 20 bp, Artificial Sequence
  Description of Artificial Sequence: Synthetic oligonucleotide
  Target: LAMA2; (+) strand; PAM type: YTN; PAM sequence: CTG
tacaatttgaaagaaaaaag

SEQ ID NO: 323117 - DNA, 20 bp, Artificial Sequence
  Description of Artificial Sequence: Synthetic oligonucleotide
  Target: LAMA2; (+) strand; PAM type: YTN; PAM sequence: TTT
gaaagaaaaaagtcaatgta

SEQ ID NO: 323118 - DNA, 20 bp, Artificial Sequence
  Description of Artificial Sequence: Synthetic oligonucleotide
  Target: LAMA2; (+) strand; PAM type: YTN; PAM sequence: TTG
aaagaaaaaagtcaatgtac

SEQ ID NO: 323119 - DNA, 20 bp, Artificial Sequence
  Description of Artificial Sequence: Synthetic oligonucleotide
  Target: LAMA2; (+) strand; PAM type: YTN; PAM sequence: TTC
actattgaaatcatggagga

SEQ ID NO: 323120 - DNA, 20 bp, Artificial Sequence
  Description of Artificial Sequence: Synthetic oligonucleotide
  Target: LAMA2; (+) strand; PAM type: YTN; PAM sequence: CTA
ttgaaatcatggaggacaat

SEQ ID NO: 323121 - DNA, 20 bp, Artificial Sequence
  Description of Artificial Sequence: Synthetic oligonucleotide
  Target: LAMA2; (+) strand; PAM type: YTN; PAM sequence: TTG
aaatcatggaggacaatgac

SEQ ID NO: 323122 - DNA, 20 bp, Artificial Sequence
  Description of Artificial Sequence: Synthetic oligonucleotide
  Target: LAMA2; (+) strand; PAM type: YTN; PAM sequence: CTT
attttgctcttgaacatgct

SEQ ID NO: 323123 - DNA, 20 bp, Artificial Sequence
  Description of Artificial Sequence: Synthetic oligonucleotide
  Target: LAMA2; (+) strand; PAM type: YTN; PAM sequence: TTA
ttttgctcttgaacatgctg

SEQ ID NO: 323124 - DNA, 20 bp, Artificial Sequence
  Description of Artificial Sequence: Synthetic oligonucleotide
  Target: LAMA2; (+) strand; PAM type: YTN; PAM sequence: TTT
tgctcttgaacatgctgtca

SEQ ID NO: 323125 - DNA, 20 bp, Artificial Sequence
  Description of Artificial Sequence: Synthetic oligonucleotide
  Target: LAMA2; (+) strand; PAM type: YTN; PAM sequence: TTT
gctcttgaacatgctgtcat

SEQ ID NO: 323126 - DNA, 20 bp, Artificial Sequence
  Description of Artificial Sequence: Synthetic oligonucleotide
  Target: LAMA2; (+) strand; PAM type: YTN; PAM sequence: TTG
ctcttgaacatgctgtcatt

SEQ ID NO: 323127 - DNA, 20 bp, Artificial Sequence
  Description of Artificial Sequence: Synthetic oligonucleotide
  Target: LAMA2; (+) strand; PAM type: YTN; PAM sequence: CTC
ttgaacatgctgtcattaac

SEQ ID NO: 323128 - DNA, 20 bp, Artificial Sequence
  Description of Artificial Sequence: Synthetic oligonucleotide
  Target: LAMA2; (+) strand; PAM type: YTN; PAM sequence: CTT
gaacatgctgtcattaactg

SEQ ID NO: 323129 - DNA, 20 bp, Artificial Sequence
  Description of Artificial Sequence: Synthetic oligonucleotide
  Target: LAMA2; (+) strand; PAM type: YTN; PAM sequence: TTG
aacatgctgtcattaactgc

SEQ ID NO: 323130 - DNA, 20 bp, Artificial Sequence
  Description of Artificial Sequence: Synthetic oligonucleotide
  Target: LAMA2; (+) strand; PAM type: YTN; PAM sequence: CTG
tcattaactgcacaatggga

SEQ ID NO: 323131 - DNA, 20 bp, Artificial Sequence
  Description of Artificial Sequence: Synthetic oligonucleotide
  Target: LAMA2; (+) strand; PAM type: YTN; PAM sequence: TTA
actgcacaatgggatactga

SEQ ID NO: 323132 - DNA, 20 bp, Artificial Sequence
  Description of Artificial Sequence: Synthetic oligonucleotide
  Target: LAMA2; (+) strand; PAM type: YTN; PAM sequence: CTG
cacaatgggatactgatgct

SEQ ID NO: 323133 - DNA, 20 bp, Artificial Sequence
  Description of Artificial Sequence: Synthetic oligonucleotide
  Target: LAMA2; (+) strand; PAM type: YTN; PAM sequence: CTG
atgctgcctcagaggctggt

SEQ ID NO: 323134 - DNA, 20 bp, Artificial Sequence
  Description of Artificial Sequence: Synthetic oligonucleotide
  Target: LAMA2; (+) strand; PAM type: YTN; PAM sequence: CTG
cctcagaggctggtattaat

SEQ ID NO: 323135 - DNA, 20 bp, Artificial Sequence
  Description of Artificial Sequence: Synthetic oligonucleotide
  Target: LAMA2; (+) strand; PAM type: YTN; PAM sequence: CTC
agaggctggtattaatcttt

SEQ ID NO: 323136 - DNA, 20 bp, Artificial Sequence
  Description of Artificial Sequence: Synthetic oligonucleotide
  Target: LAMA2; (+) strand; PAM type: YTN; PAM sequence: CTG
gtattaatctttgtgccaaa

SEQ ID NO: 323137 - DNA, 20 bp, Artificial Sequence
  Description of Artificial Sequence: Synthetic oligonucleotide
  Target: LAMA2; (+) strand; PAM type: YTN; PAM sequence: TTA
atctttgtgccaaaccttgc

SEQ ID NO: 323138 - DNA, 20 bp, Artificial Sequence
  Description of Artificial Sequence: Synthetic oligonucleotide
  Target: LAMA2; (+) strand; PAM type: YTN; PAM sequence: CTT
tgtgccaaaccttgcagaaa

SEQ ID NO: 323139 - DNA, 20 bp, Artificial Sequence
  Description of Artificial Sequence: Synthetic oligonucleotide
  Target: LAMA2; (+) strand; PAM type: YTN; PAM sequence: TTT
gtgccaaaccttgcagaaac

SEQ ID NO: 323140 - DNA, 20 bp, Artificial Sequence
  Description of Artificial Sequence: Synthetic oligonucleotide
  Target: LAMA2; (+) strand; PAM type: YTN; PAM sequence: TTG
tgccaaaccttgcagaaact

SEQ ID NO: 323141 - DNA, 20 bp, Artificial Sequence
  Description of Artificial Sequence: Synthetic oligonucleotide
  Target: LAMA2; (+) strand; PAM type: YTN; PAM sequence: CTT
gcagaaactctgtgtgcatt

SEQ ID NO: 323142 - DNA, 20 bp, Artificial Sequence
  Description of Artificial Sequence: Synthetic oligonucleotide
  Target: LAMA2; (+) strand; PAM type: YTN; PAM sequence: TTG
cagaaactctgtgtgcattt

SEQ ID NO: 323143 - DNA, 20 bp, Artificial Sequence
  Description of Artificial Sequence: Synthetic oligonucleotide
  Target: LAMA2; (+) strand; PAM type: YTN; PAM sequence: CTC
tgtgtgcatttactgacgta

SEQ ID NO: 323144 - DNA, 20 bp, Artificial Sequence
  Description of Artificial Sequence: Synthetic oligonucleotide
  Target: LAMA2; (+) strand; PAM type: YTN; PAM sequence: CTG
tgtgcatttactgacgtaag

SEQ ID NO: 323145 - DNA, 20 bp, Artificial Sequence
  Description of Artificial Sequence: Synthetic oligonucleotide
  Target: LAMA2; (+) strand; PAM type: YTN; PAM sequence: TTT
actgacgtaagcattgctct

SEQ ID NO: 323146 - DNA, 20 bp, Artificial Sequence
  Description of Artificial Sequence: Synthetic oligonucleotide
  Target: LAMA2; (+) strand; PAM type: YTN; PAM sequence: TTA
ctgacgtaagcattgctctc

SEQ ID NO: 323147 - DNA, 20 bp, Artificial Sequence
  Description of Artificial Sequence: Synthetic oligonucleotide
  Target: LAMA2; (+) strand; PAM type: YTN; PAM sequence: CTG
acgtaagcattgctctccat

SEQ ID NO: 323148 - DNA, 20 bp, Artificial Sequence
  Description of Artificial Sequence: Synthetic oligonucleotide
  Target: LAMA2; (+) strand; PAM type: YTN; PAM sequence: TTG
ctctccatctctttgatctt

SEQ ID NO: 323149 - DNA, 20 bp, Artificial Sequence
  Description of Artificial Sequence: Synthetic oligonucleotide
  Target: LAMA2; (+) strand; PAM type: YTN; PAM sequence: CTC
tccatctctttgatcttaag

SEQ ID NO: 323150 - DNA, 20 bp, Artificial Sequence
  Description of Artificial Sequence: Synthetic oligonucleotide
  Target: LAMA2; (+) strand; PAM type: YTN; PAM sequence: CTC
catctctttgatcttaagat

SEQ ID NO: 323151 - DNA, 20 bp, Artificial Sequence
  Description of Artificial Sequence: Synthetic oligonucleotide
  Target: LAMA2; (+) strand; PAM type: YTN; PAM sequence: CTC
tttgatcttaagattactcc

SEQ ID NO: 323152 - DNA, 20 bp, Artificial Sequence
  Description of Artificial Sequence: Synthetic oligonucleotide
  Target: LAMA2; (+) strand; PAM type: YTN; PAM sequence: CTT
tgatcttaagattactcctt

SEQ ID NO: 323153 - DNA, 20 bp, Artificial Sequence
  Description of Artificial Sequence: Synthetic oligonucleotide
  Target: LAMA2; (+) strand; PAM type: YTN; PAM sequence: TTT
gatcttaagattactccttt

SEQ ID NO: 323154 - DNA, 20 bp, Artificial Sequence
  Description of Artificial Sequence: Synthetic oligonucleotide
  Target: LAMA2; (+) strand; PAM type: YTN; PAM sequence: TTG
atcttaagattactcctttg

SEQ ID NO: 323155 - DNA, 20 bp, Artificial Sequence
  Description of Artificial Sequence: Synthetic oligonucleotide
  Target: LAMA2; (+) strand; PAM type: YTN; PAM sequence: CTT
aagattactcctttggggat

SEQ ID NO: 323156 - DNA, 20 bp, Artificial Sequence
  Description of Artificial Sequence: Synthetic oligonucleotide
  Target: LAMA2; (+) strand; PAM type: YTN; PAM sequence: TTA
agattactcctttggggata

SEQ ID NO: 323157 - DNA, 20 bp, Artificial Sequence
  Description of Artificial Sequence: Synthetic oligonucleotide
  Target: LAMA2; (+) strand; PAM type: YTN; PAM sequence: TTA
ctcctttggggatagaaggt

SEQ ID NO: 323158 - DNA, 20 bp, Artificial Sequence
  Description of Artificial Sequence: Synthetic oligonucleotide
  Target: LAMA2; (+) strand; PAM type: YTN; PAM sequence: CTC
ctttggggatagaaggtaat

SEQ ID NO: 323159 - DNA, 20 bp, Artificial Sequence
  Description of Artificial Sequence: Synthetic oligonucleotide
  Target: LAMA2; (+) strand; PAM type: YTN; PAM sequence: CTT
tggggatagaaggtaatata

SEQ ID NO: 323160 - DNA, 20 bp, Artificial Sequence
  Description of Artificial Sequence: Synthetic oligonucleotide
  Target: LAMA2; (+) strand; PAM type: YTN; PAM sequence: TTT
ggggatagaaggtaatataa

SEQ ID NO: 323161 - DNA, 20 bp, Artificial Sequence
  Description of Artificial Sequence: Synthetic oligonucleotide
  Target: LAMA2; (+) strand; PAM type: YTN; PAM sequence: TTG
gggatagaaggtaatataag

SEQ ID NO: 323162 - DNA, 20 bp, Artificial Sequence
  Description of Artificial Sequence: Synthetic oligonucleotide
  Target: LAMA2; (+) strand; PAM type: YTN; PAM sequence: CTG
ctgaacttaaaaaaaaaatg

SEQ ID NO: 323163 - DNA, 20 bp, Artificial Sequence
  Description of Artificial Sequence: Synthetic oligonucleotide
  Target: LAMA2; (+) strand; PAM type: YTN; PAM sequence: CTG
aacttaaaaaaaaaatgctc

SEQ ID NO: 323164 - DNA, 20 bp, Artificial Sequence
  Description of Artificial Sequence: Synthetic oligonucleotide
  Target: LAMA2; (+) strand; PAM type: YTN; PAM sequence: CTT
aaaaaaaaaatgctcaaagt

SEQ ID NO: 323165 - DNA, 20 bp, Artificial Sequence
  Description of Artificial Sequence: Synthetic oligonucleotide
  Target: LAMA2; (+) strand; PAM type: YTN; PAM sequence: TTA
aaaaaaaaatgctcaaagtg

SEQ ID NO: 323166 - DNA, 20 bp, Artificial Sequence
  Description of Artificial Sequence: Synthetic oligonucleotide
  Target: LAMA2; (+) strand; PAM type: YTN; PAM sequence: CTC
aaagtgagtgaaggtaagag

SEQ ID NO: 323167 - DNA, 20 bp, Artificial Sequence
  Description of Artificial Sequence: Synthetic oligonucleotide
  Target: LAMA2; (+) strand; PAM type: YTN; PAM sequence: TTC
attttcttccagtactgaaa

SEQ ID NO: 323168 - DNA, 20 bp, Artificial Sequence
  Description of Artificial Sequence: Synthetic oligonucleotide
  Target: LAMA2; (+) strand; PAM type: YTN; PAM sequence: TTT
tcttccagtactgaaaatta

SEQ ID NO: 323169 - DNA, 20 bp, Artificial Sequence
  Description of Artificial Sequence: Synthetic oligonucleotide
  Target: LAMA2; (+) strand; PAM type: YTN; PAM sequence: TTT
cttccagtactgaaaattaa

SEQ ID NO: 323170 - DNA, 20 bp, Artificial Sequence
  Description of Artificial Sequence: Synthetic oligonucleotide
  Target: LAMA2; (+) strand; PAM type: YTN; PAM sequence: TTC
ttccagtactgaaaattaag

SEQ ID NO: 323171 - DNA, 20 bp, Artificial Sequence
  Description of Artificial Sequence: Synthetic oligonucleotide
  Target: LAMA2; (+) strand; PAM type: YTN; PAM sequence: CTT
ccagtactgaaaattaagag

SEQ ID NO: 323172 - DNA, 20 bp, Artificial Sequence
  Description of Artificial Sequence: Synthetic oligonucleotide
  Target: LAMA2; (+) strand; PAM type: YTN; PAM sequence: TTC
cagtactgaaaattaagagt

SEQ ID NO: 323173 - DNA, 20 bp, Artificial Sequence
  Description of Artificial Sequence: Synthetic oligonucleotide
  Target: LAMA2; (+) strand; PAM type: YTN; PAM sequence: CTG
aaaattaagagtacagaccc

SEQ ID NO: 323174 - DNA, 20 bp, Artificial Sequence
  Description of Artificial Sequence: Synthetic oligonucleotide
  Target: LAMA2; (+) strand; PAM type: YTN; PAM sequence: TTA
agagtacagacccacatgct

SEQ ID NO: 323175 - DNA, 20 bp, Artificial Sequence
  Description of Artificial Sequence: Synthetic oligonucleotide
  Target: LAMA2; (+) strand; PAM type: YTN; PAM sequence: CTA
ttatacaagagaaagtagtc

SEQ ID NO: 323176 - DNA, 20 bp, Artificial Sequence
  Description of Artificial Sequence: Synthetic oligonucleotide
  Target: LAMA2; (+) strand; PAM type: YTN; PAM sequence: TTA
tacaagagaaagtagtccta

SEQ ID NO: 323177 - DNA, 20 bp, Artificial Sequence
  Description of Artificial Sequence: Synthetic oligonucleotide
  Target: LAMA2; (+) strand; PAM type: YTN; PAM sequence: CTA
tgactgctggataatttaca

SEQ ID NO: 323178 - DNA, 20 bp, Artificial Sequence
  Description of Artificial Sequence: Synthetic oligonucleotide
  Target: LAMA2; (+) strand; PAM type: YTN; PAM sequence: CTG
ctggataatttacatacatt

SEQ ID NO: 323179 - DNA, 20 bp, Artificial Sequence
  Description of Artificial Sequence: Synthetic oligonucleotide
  Target: LAMA2; (+) strand; PAM type: YTN; PAM sequence: CTG
gataatttacatacattatc

SEQ ID NO: 323180 - DNA, 20 bp, Artificial Sequence
  Description of Artificial Sequence: Synthetic oligonucleotide
  Target: LAMA2; (+) strand; PAM type: YTN; PAM sequence: TTT
acatacattatctaatttat

SEQ ID NO: 323181 - DNA, 20 bp, Artificial Sequence
  Description of Artificial Sequence: Synthetic oligonucleotide
  Target: LAMA2; (+) strand; PAM type: YTN; PAM sequence: TTA
catacattatctaatttatc

SEQ ID NO: 323182 - DNA, 20 bp, Artificial Sequence
  Description of Artificial Sequence: Synthetic oligonucleotide
  Target: LAMA2; (+) strand; PAM type: YTN; PAM sequence: TTA
tctaatttatcataaccctg

SEQ ID NO: 323183 - DNA, 20 bp, Artificial Sequence
  Description of Artificial Sequence: Synthetic oligonucleotide
  Target: LAMA2; (+) strand; PAM type: YTN; PAM sequence: CTA
atttatcataaccctgggag

SEQ ID NO: 323184 - DNA, 20 bp, Artificial Sequence
  Description of Artificial Sequence: Synthetic oligonucleotide
  Target: LAMA2; (+) strand; PAM type: YTN; PAM sequence: TTT
atcataaccctgggagagtg

SEQ ID NO: 323185 - DNA, 20 bp, Artificial Sequence
  Description of Artificial Sequence: Synthetic oligonucleotide
  Target: LAMA2; (+) strand; PAM type: YTN; PAM sequence: TTA
tcataaccctgggagagtgg

SEQ ID NO: 323186 - DNA, 20 bp, Artificial Sequence
  Description of Artificial Sequence: Synthetic oligonucleotide
  Target: LAMA2; (+) strand; PAM type: YTN; PAM sequence: CTG
ggagagtggaaatattgcta

SEQ ID NO: 323187 - DNA, 20 bp, Artificial Sequence
  Description of Artificial Sequence: Synthetic oligonucleotide
  Target: LAMA2; (+) strand; PAM type: YTN; PAM sequence: TTG
ctattcttattttactagtg

SEQ ID NO: 323188 - DNA, 20 bp, Artificial Sequence
  Description of Artificial Sequence: Synthetic oligonucleotide
  Target: LAMA2; (+) strand; PAM type: YTN; PAM sequence: CTA
ttcttattttactagtgaga

SEQ ID NO: 323189 - DNA, 20 bp, Artificial Sequence
  Description of Artificial Sequence: Synthetic oligonucleotide
  Target: LAMA2; (+) strand; PAM type: YTN; PAM sequence: TTC
ttattttactagtgagagac

SEQ ID NO: 323190 - DNA, 20 bp, Artificial Sequence
  Description of Artificial Sequence: Synthetic oligonucleotide
  Target: LAMA2; (+) strand; PAM type: YTN; PAM sequence: CTT
attttactagtgagagacta

SEQ ID NO: 323191 - DNA, 20 bp, Artificial Sequence
  Description of Artificial Sequence: Synthetic oligonucleotide
  Target: LAMA2; (+) strand; PAM type: YTN; PAM sequence: TTA
ttttactagtgagagactaa

SEQ ID NO: 323192 - DNA, 20 bp, Artificial Sequence
  Description of Artificial Sequence: Synthetic oligonucleotide
  Target: LAMA2; (+) strand; PAM type: YTN; PAM sequence: TTT
tactagtgagagactaagtg

SEQ ID NO: 323193 - DNA, 20 bp, Artificial Sequence
  Description of Artificial Sequence: Synthetic oligonucleotide
  Target: LAMA2; (+) strand; PAM type: YTN; PAM sequence: TTT
actagtgagagactaagtga

SEQ ID NO: 323194 - DNA, 20 bp, Artificial Sequence
  Description of Artificial Sequence: Synthetic oligonucleotide
  Target: LAMA2; (+) strand; PAM type: YTN; PAM sequence: TTA
ctagtgagagactaagtgat

SEQ ID NO: 323195 - DNA, 20 bp, Artificial Sequence
  Description of Artificial Sequence: Synthetic oligonucleotide
  Target: LAMA2; (+) strand; PAM type: YTN; PAM sequence: CTA
gtgagagactaagtgatttg

SEQ ID NO: 323196 - DNA, 20 bp, Artificial Sequence
  Description of Artificial Sequence: Synthetic oligonucleotide
  Target: LAMA2; (+) strand; PAM type: YTN; PAM sequence: CTA
agtgatttgctggtttttga

SEQ ID NO: 323197 - DNA, 20 bp, Artificial Sequence
  Description of Artificial Sequence: Synthetic oligonucleotide
  Target: LAMA2; (+) strand; PAM type: YTN; PAM sequence: TTT
gctggtttttgatcccgggt

SEQ ID NO: 323198 - DNA, 20 bp, Artificial Sequence
  Description of Artificial Sequence: Synthetic oligonucleotide
  Target: LAMA2; (+) strand; PAM type: YTN; PAM sequence: TTG
ctggtttttgatcccgggtc

SEQ ID NO: 323199 - DNA, 20 bp, Artificial Sequence
  Description of Artificial Sequence: Synthetic oligonucleotide
  Target: LAMA2; (+) strand; PAM type: YTN; PAM sequence: CTG
gtttttgatcccgggtctac

SEQ ID NO: 323200 - DNA, 20 bp, Artificial Sequence
  Description of Artificial Sequence: Synthetic oligonucleotide
  Target: LAMA2; (+) strand; PAM type: YTN; PAM sequence: TTT
ttgatcccgggtctacatga

SEQ ID NO: 323201 - DNA, 20 bp, Artificial Sequence
  Description of Artificial Sequence: Synthetic oligonucleotide
  Target: LAMA2; (+) strand; PAM type: YTN; PAM sequence: TTT
tgatcccgggtctacatgaa

SEQ ID NO: 323202 - DNA, 20 bp, Artificial Sequence
  Description of Artificial Sequence: Synthetic oligonucleotide
  Target: LAMA2; (+) strand; PAM type: YTN; PAM sequence: TTT
gatcccgggtctacatgaat

SEQ ID NO: 323203 - DNA, 20 bp, Artificial Sequence
  Description of Artificial Sequence: Synthetic oligonucleotide
  Target: LAMA2; (+) strand; PAM type: YTN; PAM sequence: TTG
atcccgggtctacatgaata

SEQ ID NO: 323204 - DNA, 20 bp, Artificial Sequence
  Description of Artificial Sequence: Synthetic oligonucleotide
  Target: LAMA2; (+) strand; PAM type: YTN; PAM sequence: CTA
catgaatacaaagctacatc

SEQ ID NO: 323205 - DNA, 20 bp, Artificial Sequence
  Description of Artificial Sequence: Synthetic oligonucleotide
  Target: LAMA2; (+) strand; PAM type: YTN; PAM sequence: CTA
catctttaattagttctcta

SEQ ID NO: 323206 - DNA, 20 bp, Artificial Sequence
  Description of Artificial Sequence: Synthetic oligonucleotide
  Target: LAMA2; (+) strand; PAM type: YTN; PAM sequence: CTT
taattagttctctatagggt

SEQ ID NO: 323207 - DNA, 20 bp, Artificial Sequence
  Description of Artificial Sequence: Synthetic oligonucleotide
  Target: LAMA2; (+) strand; PAM type: YTN; PAM sequence: TTT
aattagttctctatagggtc

SEQ ID NO: 323208 - DNA, 20 bp, Artificial Sequence
  Description of Artificial Sequence: Synthetic oligonucleotide
  Target: LAMA2; (+) strand; PAM type: YTN; PAM sequence: TTA
attagttctctatagggtct

SEQ ID NO: 323209 - DNA, 20 bp, Artificial Sequence
  Description of Artificial Sequence: Synthetic oligonucleotide
  Target: LAMA2; (+) strand; PAM type: YTN; PAM sequence: TTA
gttctctatagggtctcaaa

SEQ ID NO: 323210 - DNA, 20 bp, Artificial Sequence
  Description of Artificial Sequence: Synthetic oligonucleotide
  Target: LAMA2; (+) strand; PAM type: YTN; PAM sequence: TTC
tctatagggtctcaaagcag

SEQ ID NO: 323211 - DNA, 20 bp, Artificial Sequence
  Description of Artificial Sequence: Synthetic oligonucleotide
  Target: LAMA2; (+) strand; PAM type: YTN; PAM sequence: CTC
tatagggtctcaaagcagtc

SEQ ID NO: 323212 - DNA, 20 bp, Artificial Sequence
  Description of Artificial Sequence: Synthetic oligonucleotide
  Target: LAMA2; (+) strand; PAM type: YTN; PAM sequence: CTA
tagggtctcaaagcagtcat

SEQ ID NO: 323213 - DNA, 20 bp, Artificial Sequence
  Description of Artificial Sequence: Synthetic oligonucleotide
  Target: LAMA2; (+) strand; PAM type: YTN; PAM sequence: CTC
aaagcagtcattttactaaa

SEQ ID NO: 323214 - DNA, 20 bp, Artificial Sequence
  Description of Artificial Sequence: Synthetic oligonucleotide
  Target: LAMA2; (+) strand; PAM type: YTN; PAM sequence: TTT
tactaaatttttgatcttta

SEQ ID NO: 323215 - DNA, 20 bp, Artificial Sequence
  Description of Artificial Sequence: Synthetic oligonucleotide
  Target: LAMA2; (+) strand; PAM type: YTN; PAM sequence: TTT
actaaatttttgatctttat

SEQ ID NO: 323216 - DNA, 20 bp, Artificial Sequence
  Description of Artificial Sequence: Synthetic oligonucleotide
  Target: LAMA2; (+) strand; PAM type: YTN; PAM sequence: TTA
ctaaatttttgatctttatt

SEQ ID NO: 323217 - DNA, 20 bp, Artificial Sequence
  Description of Artificial Sequence: Synthetic oligonucleotide
  Target: LAMA2; (+) strand; PAM type: YTN; PAM sequence: CTA
aatttttgatctttattaaa

SEQ ID NO: 323218 - DNA, 20 bp, Artificial Sequence
  Description of Artificial Sequence: Synthetic oligonucleotide
  Target: LAMA2; (+) strand; PAM type: YTN; PAM sequence: TTT
ttgatctttattaaacatag

SEQ ID NO: 323219 - DNA, 20 bp, Artificial Sequence
  Description of Artificial Sequence: Synthetic oligonucleotide
  Target: LAMA2; (+) strand; PAM type: YTN; PAM sequence: TTT
tgatctttattaaacataga

SEQ ID NO: 323220 - DNA, 20 bp, Artificial Sequence
  Description of Artificial Sequence: Synthetic oligonucleotide
  Target: LAMA2; (+) strand; PAM type: YTN; PAM sequence: TTT
gatctttattaaacatagat

SEQ ID NO: 323221 - DNA, 20 bp, Artificial Sequence
  Description of Artificial Sequence: Synthetic oligonucleotide
  Target: LAMA2; (+) strand; PAM type: YTN; PAM sequence: TTG
atctttattaaacatagatg

SEQ ID NO: 323222 - DNA, 20 bp, Artificial Sequence
  Description of Artificial Sequence: Synthetic oligonucleotide
  Target: LAMA2; (+) strand; PAM type: YTN; PAM sequence: CTT
tattaaacatagatgcaaaa

SEQ ID NO: 323223 - DNA, 20 bp, Artificial Sequence
  Description of Artificial Sequence: Synthetic oligonucleotide
  Target: LAMA2; (+) strand; PAM type: YTN; PAM sequence: TTT
attaaacatagatgcaaaag

SEQ ID NO: 323224 - DNA, 20 bp, Artificial Sequence
  Description of Artificial Sequence: Synthetic oligonucleotide
  Target: LAMA2; (+) strand; PAM type: YTN; PAM sequence: TTA
ttaaacatagatgcaaaagt

SEQ ID NO: 323225 - DNA, 20 bp, Artificial Sequence
  Description of Artificial Sequence: Synthetic oligonucleotide
  Target: LAMA2; (+) strand; PAM type: YTN; PAM sequence: TTA
aacatagatgcaaaagtaat

SEQ ID NO: 323226 - DNA, 20 bp, Artificial Sequence
  Description of Artificial Sequence: Synthetic oligonucleotide
  Target: LAMA2; (+) strand; PAM type: YTN; PAM sequence: TTT
ccacaaataaagggatgtta

SEQ ID NO: 323227 - DNA, 20 bp, Artificial Sequence
  Description of Artificial Sequence: Synthetic oligonucleotide
  Target: LAMA2; (+) strand; PAM type: YTN; PAM sequence: TTC
cacaaataaagggatgttaa

SEQ ID NO: 323228 - DNA, 20 bp, Artificial Sequence
  Description of Artificial Sequence: Synthetic oligonucleotide
  Target: LAMA2; (+) strand; PAM type: YTN; PAM sequence: TTA
accaaaattaatgttcaaga

SEQ ID NO: 323229 - DNA, 20 bp, Artificial Sequence
  Description of Artificial Sequence: Synthetic oligonucleotide
  Target: LAMA2; (+) strand; PAM type: YTN; PAM sequence: TTA
atgttcaagaatcctttcag

SEQ ID NO: 323230 - DNA, 20 bp, Artificial Sequence
  Description of Artificial Sequence: Synthetic oligonucleotide
  Target: LAMA2; (+) strand; PAM type: YTN; PAM sequence: TTC
aagaatcctttcagtgtttc

SEQ ID NO: 323231 - DNA, 20 bp, Artificial Sequence
  Description of Artificial Sequence: Synthetic oligonucleotide
  Target: LAMA2; (+) strand; PAM type: YTN; PAM sequence: CTT
tcagtgtttctctacctctt

SEQ ID NO: 323232 - DNA, 20 bp, Artificial Sequence
  Description of Artificial Sequence: Synthetic oligonucleotide
  Target: LAMA2; (+) strand; PAM type: YTN; PAM sequence: TTT
cagtgtttctctacctcttt

SEQ ID NO: 323233 - DNA, 20 bp, Artificial Sequence
  Description of Artificial Sequence: Synthetic oligonucleotide
  Target: LAMA2; (+) strand; PAM type: YTN; PAM sequence: TTC
agtgtttctctacctcttta

SEQ ID NO: 323234 - DNA, 20 bp, Artificial Sequence
  Description of Artificial Sequence: Synthetic oligonucleotide
  Target: LAMA2; (+) strand; PAM type: YTN; PAM sequence: TTT
ctctacctctttaaatattc

SEQ ID NO: 323235 - DNA, 20 bp, Artificial Sequence
  Description of Artificial Sequence: Synthetic oligonucleotide
  Target: LAMA2; (+) strand; PAM type: YTN; PAM sequence: TTC
tctacctctttaaatattcc

SEQ ID NO: 323236 - DNA, 20 bp, Artificial Sequence
  Description of Artificial Sequence: Synthetic oligonucleotide
  Target: LAMA2; (+) strand; PAM type: YTN; PAM sequence: CTC
tacctctttaaatattccag

SEQ ID NO: 323237 - DNA, 20 bp, Artificial Sequence
  Description of Artificial Sequence: Synthetic oligonucleotide
  Target: LAMA2; (+) strand; PAM type: YTN; PAM sequence: CTA
cctctttaaatattccagaa

SEQ ID NO: 323238 - DNA, 20 bp, Artificial Sequence
  Description of Artificial Sequence: Synthetic oligonucleotide
  Target: LAMA2; (+) strand; PAM type: YTN; PAM sequence: CTC
tttaaatattccagaaatgg

SEQ ID NO: 323239 - DNA, 20 bp, Artificial Sequence
  Description of Artificial Sequence: Synthetic oligonucleotide
  Target: LAMA2; (+) strand; PAM type: YTN; PAM sequence: CTT
taaatattccagaaatggtg

SEQ ID NO: 323240 - DNA, 20 bp, Artificial Sequence
  Description of Artificial Sequence: Synthetic oligonucleotide
  Target: LAMA2; (+) strand; PAM type: YTN; PAM sequence: TTT
aaatattccagaaatggtga

SEQ ID NO: 323241 - DNA, 20 bp, Artificial Sequence
  Description of Artificial Sequence: Synthetic oligonucleotide
  Target: LAMA2; (+) strand; PAM type: YTN; PAM sequence: TTA
aatattccagaaatggtgat

SEQ ID NO: 323242 - DNA, 20 bp, Artificial Sequence
  Description of Artificial Sequence: Synthetic oligonucleotide
  Target: LAMA2; (+) strand; PAM type: YTN; PAM sequence: TTC
cagaaatggtgatacagtca

SEQ ID NO: 323243 - DNA, 20 bp, Artificial Sequence
  Description of Artificial Sequence: Synthetic oligonucleotide
  Target: LAMA2; (+) strand; PAM type: YTN; PAM sequence: TTG
ccaggaactttggcaggacg

SEQ ID NO: 323244 - DNA, 20 bp, Artificial Sequence
  Description of Artificial Sequence: Synthetic oligonucleotide
  Target: LAMA2; (+) strand; PAM type: YTN; PAM sequence: CTT
tggcaggacgagagattact

SEQ ID NO: 323245 - DNA, 20 bp, Artificial Sequence
  Description of Artificial Sequence: Synthetic oligonucleotide
  Target: LAMA2; (+) strand; PAM type: YTN; PAM sequence: TTT
ggcaggacgagagattactt

SEQ ID NO: 323246 - DNA, 20 bp, Artificial Sequence
  Description of Artificial Sequence: Synthetic oligonucleotide
  Target: LAMA2; (+) strand; PAM type: YTN; PAM sequence: TTG
gcaggacgagagattacttt

SEQ ID NO: 323247 - DNA, 20 bp, Artificial Sequence
  Description of Artificial Sequence: Synthetic oligonucleotide
  Target: LAMA2; (+) strand; PAM type: YTN; PAM sequence: TTA
ctttttggatagaatcagtt

SEQ ID NO: 323248 - DNA, 20 bp, Artificial Sequence
  Description of Artificial Sequence: Synthetic oligonucleotide
  Target: LAMA2; (+) strand; PAM type: YTN; PAM sequence: CTT
tttggatagaatcagttgca

SEQ ID NO: 323249 - DNA, 20 bp, Artificial Sequence
  Description of Artificial Sequence: Synthetic oligonucleotide
  Target: LAMA2; (+) strand; PAM type: YTN; PAM sequence: TTT
ttggatagaatcagttgcag

SEQ ID NO: 323250 - DNA, 20 bp, Artificial Sequence
  Description of Artificial Sequence: Synthetic oligonucleotide
  Target: LAMA2; (+) strand; PAM type: YTN; PAM sequence: TTT
tggatagaatcagttgcagg

SEQ ID NO: 323251 - DNA, 20 bp, Artificial Sequence
  Description of Artificial Sequence: Synthetic oligonucleotide
  Target: LAMA2; (+) strand; PAM type: YTN; PAM sequence: TTT
ggatagaatcagttgcagga

SEQ ID NO: 323252 - DNA, 20 bp, Artificial Sequence
  Description of Artificial Sequence: Synthetic oligonucleotide
  Target: LAMA2; (+) strand; PAM type: YTN; PAM sequence: TTG
gatagaatcagttgcaggaa

SEQ ID NO: 323253 - DNA, 20 bp, Artificial Sequence
  Description of Artificial Sequence: Synthetic oligonucleotide
  Target: LAMA2; (+) strand; PAM type: YTN; PAM sequence: TTG
caggaattttccaaacgatt

SEQ ID NO: 323254 - DNA, 20 bp, Artificial Sequence
  Description of Artificial Sequence: Synthetic oligonucleotide
  Target: LAMA2; (+) strand; PAM type: YTN; PAM sequence: TTT
tccaaacgattcacacagca

SEQ ID NO: 323255 - DNA, 20 bp, Artificial Sequence
  Description of Artificial Sequence: Synthetic oligonucleotide
  Target: LAMA2; (+) strand; PAM type: YTN; PAM sequence: TTT
ccaaacgattcacacagcat

SEQ ID NO: 323256 - DNA, 20 bp, Artificial Sequence
  Description of Artificial Sequence: Synthetic oligonucleotide
  Target: LAMA2; (+) strand; PAM type: YTN; PAM sequence: TTC
caaacgattcacacagcatc

SEQ ID NO: 323257 - DNA, 20 bp, Artificial Sequence
  Description of Artificial Sequence: Synthetic oligonucleotide
  Target: LAMA2; (+) strand; PAM type: YTN; PAM sequence: TTC
acacagcatcaacttaatct

SEQ ID NO: 323258 - DNA, 20 bp, Artificial Sequence
  Description of Artificial Sequence: Synthetic oligonucleotide
  Target: LAMA2; (+) strand; PAM type: YTN; PAM sequence: CTT
aatcttctggaaaacatttt

SEQ ID NO: 323259 - DNA, 20 bp, Artificial Sequence
  Description of Artificial Sequence: Synthetic oligonucleotide
  Target: LAMA2; (+) strand; PAM type: YTN; PAM sequence: TTA
atcttctggaaaacatttta

SEQ ID NO: 323260 - DNA, 20 bp, Artificial Sequence
  Description of Artificial Sequence: Synthetic oligonucleotide
  Target: LAMA2; (+) strand; PAM type: YTN; PAM sequence: CTT
ctggaaaacattttagggac

SEQ ID NO: 323261 - DNA, 20 bp, Artificial Sequence
  Description of Artificial Sequence: Synthetic oligonucleotide
  Target: LAMA2; (+) strand; PAM type: YTN; PAM sequence: TTC
tggaaaacattttagggacc

SEQ ID NO: 323262 - DNA, 20 bp, Artificial Sequence
  Description of Artificial Sequence: Synthetic oligonucleotide
  Target: LAMA2; (+) strand; PAM type: YTN; PAM sequence: CTG
gaaaacattttagggaccac

SEQ ID NO: 323263 - DNA, 20 bp, Artificial Sequence
  Description of Artificial Sequence: Synthetic oligonucleotide
  Target: LAMA2; (+) strand; PAM type: YTN; PAM sequence: TTT
tagggaccacaaatacatat

SEQ ID NO: 323264 - DNA, 20 bp, Artificial Sequence
  Description of Artificial Sequence: Synthetic oligonucleotide
  Target: LAMA2; (+) strand; PAM type: YTN; PAM sequence: TTT
agggaccacaaatacatatt

SEQ ID NO: 323265 - DNA, 20 bp, Artificial Sequence
  Description of Artificial Sequence: Synthetic oligonucleotide
  Target: LAMA2; (+) strand; PAM type: YTN; PAM sequence: TTA
gggaccacaaatacatattg

SEQ ID NO: 323266 - DNA, 20 bp, Artificial Sequence
  Description of Artificial Sequence: Synthetic oligonucleotide
  Target: LAMA2; (+) strand; PAM type: YTN; PAM sequence: TTG
tacccaggatgtagtgtact

SEQ ID NO: 323267 - DNA, 20 bp, Artificial Sequence
  Description of Artificial Sequence: Synthetic oligonucleotide
  Target: LAMA2; (+) strand; PAM type: YTN; PAM sequence: CTT
actgcagtgtggtctatgat

SEQ ID NO: 323268 - DNA, 20 bp, Artificial Sequence
  Description of Artificial Sequence: Synthetic oligonucleotide
  Target: LAMA2; (+) strand; PAM type: YTN; PAM sequence: TTA
ctgcagtgtggtctatgatt

SEQ ID NO: 323269 - DNA, 20 bp, Artificial Sequence
  Description of Artificial Sequence: Synthetic oligonucleotide
  Target: LAMA2; (+) strand; PAM type: YTN; PAM sequence: CTG
cagtgtggtctatgattttt

SEQ ID NO: 323270 - DNA, 20 bp, Artificial Sequence
  Description of Artificial Sequence: Synthetic oligonucleotide
  Target: LAMA2; (+) strand; PAM type: YTN; PAM sequence: CTA
tgatttttcttggcatgcat

SEQ ID NO: 323271 - DNA, 20 bp, Artificial Sequence
  Description of Artificial Sequence: Synthetic oligonucleotide
  Target: LAMA2; (+) strand; PAM type: YTN; PAM sequence: TTT
ttcttggcatgcataattca

SEQ ID NO: 323272 - DNA, 20 bp, Artificial Sequence
  Description of Artificial Sequence: Synthetic oligonucleotide
  Target: LAMA2; (+) strand; PAM type: YTN; PAM sequence: TTT
tcttggcatgcataattcaa

SEQ ID NO: 323273 - DNA, 20 bp, Artificial Sequence
  Description of Artificial Sequence: Synthetic oligonucleotide
  Target: LAMA2; (+) strand; PAM type: YTN; PAM sequence: TTT
cttggcatgcataattcaaa

SEQ ID NO: 323274 - DNA, 20 bp, Artificial Sequence
  Description of Artificial Sequence: Synthetic oligonucleotide
  Target: LAMA2; (+) strand; PAM type: YTN; PAM sequence: TTC
ttggcatgcataattcaaag

SEQ ID NO: 323275 - DNA, 20 bp, Artificial Sequence
  Description of Artificial Sequence: Synthetic oligonucleotide
  Target: LAMA2; (+) strand; PAM type: YTN; PAM sequence: CTT
ggcatgcataattcaaagac

SEQ ID NO: 323276 - DNA, 20 bp, Artificial Sequence
  Description of Artificial Sequence: Synthetic oligonucleotide
  Target: LAMA2; (+) strand; PAM type: YTN; PAM sequence: TTG
gcatgcataattcaaagacc

SEQ ID NO: 323277 - DNA, 20 bp, Artificial Sequence
  Description of Artificial Sequence: Synthetic oligonucleotide
  Target: LAMA2; (+) strand; PAM type: YTN; PAM sequence: TTC
aaagacccagatagaaatga

SEQ ID NO: 323278 - DNA, 20 bp, Artificial Sequence
  Description of Artificial Sequence: Synthetic oligonucleotide
  Target: LAMA2; (+) strand; PAM type: YTN; PAM sequence: CTG
attttagcacttctaacaat

SEQ ID NO: 323279 - DNA, 20 bp, Artificial Sequence
  Description of Artificial Sequence: Synthetic oligonucleotide
  Target: LAMA2; (+) strand; PAM type: YTN; PAM sequence: TTT
tagcacttctaacaataaaa

SEQ ID NO: 323280 - DNA, 20 bp, Artificial Sequence
  Description of Artificial Sequence: Synthetic oligonucleotide
  Target: LAMA2; (+) strand; PAM type: YTN; PAM sequence: TTT
agcacttctaacaataaaac

SEQ ID NO: 323281 - DNA, 20 bp, Artificial Sequence
  Description of Artificial Sequence: Synthetic oligonucleotide
  Target: LAMA2; (+) strand; PAM type: YTN; PAM sequence: TTA
gcacttctaacaataaaaca

SEQ ID NO: 323282 - DNA, 20 bp, Artificial Sequence
  Description of Artificial Sequence: Synthetic oligonucleotide
  Target: LAMA2; (+) strand; PAM type: YTN; PAM sequence: CTT
ctaacaataaaacaaaagct

SEQ ID NO: 323283 - DNA, 20 bp, Artificial Sequence
  Description of Artificial Sequence: Synthetic oligonucleotide
  Target: LAMA2; (+) strand; PAM type: YTN; PAM sequence: TTC
taacaataaaacaaaagctc

SEQ ID NO: 323284 - DNA, 20 bp, Artificial Sequence
  Description of Artificial Sequence: Synthetic oligonucleotide
  Target: LAMA2; (+) strand; PAM type: YTN; PAM sequence: CTA
acaataaaacaaaagctctt

SEQ ID NO: 323285 - DNA, 20 bp, Artificial Sequence
  Description of Artificial Sequence: Synthetic oligonucleotide
  Target: LAMA2; (+) strand; PAM type: YTN; PAM sequence: CTC
ttctacaagagaatatcttc

SEQ ID NO: 323286 - DNA, 20 bp, Artificial Sequence
  Description of Artificial Sequence: Synthetic oligonucleotide
  Target: LAMA2; (+) strand; PAM type: YTN; PAM sequence: CTT
ctacaagagaatatcttcat

SEQ ID NO: 323287 - DNA, 20 bp, Artificial Sequence
  Description of Artificial Sequence: Synthetic oligonucleotide
  Target: LAMA2; (+) strand; PAM type: YTN; PAM sequence: TTC
tacaagagaatatcttcatt

SEQ ID NO: 323288 - DNA, 20 bp, Artificial Sequence
  Description of Artificial Sequence: Synthetic oligonucleotide
  Target: LAMA2; (+) strand; PAM type: YTN; PAM sequence: CTA
caagagaatatcttcattca

SEQ ID NO: 323289 - DNA, 20 bp, Artificial Sequence
  Description of Artificial Sequence: Synthetic oligonucleotide
  Target: LAMA2; (+) strand; PAM type: YTN; PAM sequence: CTT
cattcatgttaaacatatca

SEQ ID NO: 323290 - DNA, 20 bp, Artificial Sequence
  Description of Artificial Sequence: Synthetic oligonucleotide
  Target: LAMA2; (+) strand; PAM type: YTN; PAM sequence: TTC
attcatgttaaacatatcaa

SEQ ID NO: 323291 - DNA, 20 bp, Artificial Sequence
  Description of Artificial Sequence: Synthetic oligonucleotide
  Target: LAMA2; (+) strand; PAM type: YTN; PAM sequence: TTC
atgttaaacatatcaatatc

SEQ ID NO: 323292 - DNA, 20 bp, Artificial Sequence
  Description of Artificial Sequence: Synthetic oligonucleotide
  Target: LAMA2; (+) strand; PAM type: YTN; PAM sequence: TTA
aacatatcaatatctcaagt

SEQ ID NO: 323293 - DNA, 20 bp, Artificial Sequence
  Description of Artificial Sequence: Synthetic oligonucleotide
  Target: LAMA2; (+) strand; PAM type: YTN; PAM sequence: CTC
aagtaagtatgatgaatttt

SEQ ID NO: 323294 - DNA, 20 bp, Artificial Sequence
  Description of Artificial Sequence: Synthetic oligonucleotide
  Target: LAMA2; (+) strand; PAM type: YTN; PAM sequence: TTT
tgagatagggatcatgccat

SEQ ID NO: 323295 - DNA, 20 bp, Artificial Sequence
  Description of Artificial Sequence: Synthetic oligonucleotide
  Target: LAMA2; (+) strand; PAM type: YTN; PAM sequence: TTT
gagatagggatcatgccatt

SEQ ID NO: 323296 - DNA, 20 bp, Artificial Sequence
  Description of Artificial Sequence: Synthetic oligonucleotide
  Target: LAMA2; (+) strand; PAM type: YTN; PAM sequence: TTG
agatagggatcatgccattg

SEQ ID NO: 323297 - DNA, 20 bp, Artificial Sequence
  Description of Artificial Sequence: Synthetic oligonucleotide
  Target: LAMA2; (+) strand; PAM type: YTN; PAM sequence: TTG
gggtctcatctggtggtcat

SEQ ID NO: 323298 - DNA, 20 bp, Artificial Sequence
  Description of Artificial Sequence: Synthetic oligonucleotide
  Target: LAMA2; (+) strand; PAM type: YTN; PAM sequence: CTC
atctggtggtcatggggaaa

SEQ ID NO: 323299 - DNA, 20 bp, Artificial Sequence
  Description of Artificial Sequence: Synthetic oligonucleotide
  Target: LAMA2; (+) strand; PAM type: YTN; PAM sequence: CTG
gtggtcatggggaaatggtc

SEQ ID NO: 323300 - DNA, 20 bp, Artificial Sequence
  Description of Artificial Sequence: Synthetic oligonucleotide
  Target: LAMA2; (+) strand; PAM type: YTN; PAM sequence: CTC
tttcttggatatctttggag

SEQ ID NO: 323301 - DNA, 20 bp, Artificial Sequence
  Description of Artificial Sequence: Synthetic oligonucleotide
  Target: LAMA2; (+) strand; PAM type: YTN; PAM sequence: CTT
tcttggatatctttggagag

SEQ ID NO: 323302 - DNA, 20 bp, Artificial Sequence
  Description of Artificial Sequence: Synthetic oligonucleotide
  Target: LAMA2; (+) strand; PAM type: YTN; PAM sequence: TTT
cttggatatctttggagagt

SEQ ID NO: 323303 - DNA, 20 bp, Artificial Sequence
  Description of Artificial Sequence: Synthetic oligonucleotide
  Target: LAMA2; (+) strand; PAM type: YTN; PAM sequence: TTC
ttggatatctttggagagta

SEQ ID NO: 323304 - DNA, 20 bp, Artificial Sequence
  Description of Artificial Sequence: Synthetic oligonucleotide
  Target: LAMA2; (+) strand; PAM type: YTN; PAM sequence: CTT
ggatatctttggagagtata

SEQ ID NO: 323305 - DNA, 20 bp, Artificial Sequence
  Description of Artificial Sequence: Synthetic oligonucleotide
  Target: LAMA2; (+) strand; PAM type: YTN; PAM sequence: TTG
gatatctttggagagtatac

SEQ ID NO: 323306 - DNA, 20 bp, Artificial Sequence
  Description of Artificial Sequence: Synthetic oligonucleotide
  Target: LAMA2; (+) strand; PAM type: YTN; PAM sequence: CTT
tggagagtatactatttgac

SEQ ID NO: 323307 - DNA, 20 bp, Artificial Sequence
  Description of Artificial Sequence: Synthetic oligonucleotide
  Target: LAMA2; (+) strand; PAM type: YTN; PAM sequence: TTT
ggagagtatactatttgact

SEQ ID NO: 323308 - DNA, 20 bp, Artificial Sequence
  Description of Artificial Sequence: Synthetic oligonucleotide
  Target: LAMA2; (+) strand; PAM type: YTN; PAM sequence: TTG
gagagtatactatttgactc

SEQ ID NO: 323309 - DNA, 20 bp, Artificial Sequence
  Description of Artificial Sequence: Synthetic oligonucleotide
  Target: LAMA2; (+) strand; PAM type: YTN; PAM sequence: CTA
tttgactctttagtcaaact

SEQ ID NO: 323310 - DNA, 20 bp, Artificial Sequence
  Description of Artificial Sequence: Synthetic oligonucleotide
  Target: LAMA2; (+) strand; PAM type: YTN; PAM sequence: TTT
gactctttagtcaaactgag

SEQ ID NO: 323311 - DNA, 20 bp, Artificial Sequence
  Description of Artificial Sequence: Synthetic oligonucleotide
  Target: LAMA2; (+) strand; PAM type: YTN; PAM sequence: TTG
actctttagtcaaactgagg

SEQ ID NO: 323312 - DNA, 20 bp, Artificial Sequence
  Description of Artificial Sequence: Synthetic oligonucleotide
  Target: LAMA2; (+) strand; PAM type: YTN; PAM sequence: CTC
tttagtcaaactgaggatca

SEQ ID NO: 323313 - DNA, 20 bp, Artificial Sequence
  Description of Artificial Sequence: Synthetic oligonucleotide
  Target: LAMA2; (+) strand; PAM type: YTN; PAM sequence: CTT
tagtcaaactgaggatcagt

SEQ ID NO: 323314 - DNA, 20 bp, Artificial Sequence
  Description of Artificial Sequence: Synthetic oligonucleotide
  Target: LAMA2; (+) strand; PAM type: YTN; PAM sequence: TTT
agtcaaactgaggatcagta

SEQ ID NO: 323315 - DNA, 20 bp, Artificial Sequence
  Description of Artificial Sequence: Synthetic oligonucleotide
  Target: LAMA2; (+) strand; PAM type: YTN; PAM sequence: TTA
gtcaaactgaggatcagtat

SEQ ID NO: 323316 - DNA, 20 bp, Artificial Sequence
  Description of Artificial Sequence: Synthetic oligonucleotide
  Target: LAMA2; (+) strand; PAM type: YTN; PAM sequence: CTG
aggatcagtattttaaaagt

SEQ ID NO: 323317 - DNA, 20 bp, Artificial Sequence
  Description of Artificial Sequence: Synthetic oligonucleotide
  Target: LAMA2; (+) strand; PAM type: YTN; PAM sequence: TTT
taaaagtctataaaatactt

SEQ ID NO: 323318 - DNA, 20 bp, Artificial Sequence
  Description of Artificial Sequence: Synthetic oligonucleotide
  Target: LAMA2; (+) strand; PAM type: YTN; PAM sequence: TTT
aaaagtctataaaatactta

SEQ ID NO: 323319 - DNA, 20 bp, Artificial Sequence
  Description of Artificial Sequence: Synthetic oligonucleotide
  Target: LAMA2; (+) strand; PAM type: YTN; PAM sequence: TTA
aaagtctataaaatacttaa

SEQ ID NO: 323320 - DNA, 20 bp, Artificial Sequence
  Description of Artificial Sequence: Synthetic oligonucleotide
  Target: LAMA2; (+) strand; PAM type: YTN; PAM sequence: CTA
taaaatacttaagccatctt

SEQ ID NO: 323321 - DNA, 20 bp, Artificial Sequence
  Description of Artificial Sequence: Synthetic oligonucleotide
  Target: LAMA2; (+) strand; PAM type: YTN; PAM sequence: CTT
aagccatcttgtagaaataa

SEQ ID NO: 323322 - DNA, 20 bp, Artificial Sequence
  Description of Artificial Sequence: Synthetic oligonucleotide
  Target: LAMA2; (+) strand; PAM type: YTN; PAM sequence: TTA
agccatcttgtagaaataaa

SEQ ID NO: 323323 - DNA, 20 bp, Artificial Sequence
  Description of Artificial Sequence: Synthetic oligonucleotide
  Target: LAMA2; (+) strand; PAM type: YTN; PAM sequence: CTT
gtagaaataaatagtcttcc

SEQ ID NO: 323324 - DNA, 20 bp, Artificial Sequence
  Description of Artificial Sequence: Synthetic oligonucleotide
  Target: LAMA2; (+) strand; PAM type: YTN; PAM sequence: TTG
tagaaataaatagtcttccc

SEQ ID NO: 323325 - DNA, 20 bp, Artificial Sequence
  Description of Artificial Sequence: Synthetic oligonucleotide
  Target: LAMA2; (+) strand; PAM type: YTN; PAM sequence: CTT
cccacccagaccataatctc

SEQ ID NO: 323326 - DNA, 20 bp, Artificial Sequence
  Description of Artificial Sequence: Synthetic oligonucleotide
  Target: LAMA2; (+) strand; PAM type: YTN; PAM sequence: TTC
ccacccagaccataatctct

SEQ ID NO: 323327 - DNA, 20 bp, Artificial Sequence
  Description of Artificial Sequence: Synthetic oligonucleotide
  Target: LAMA2; (+) strand; PAM type: YTN; PAM sequence: CTC
tgaaataattattaggaatt

SEQ ID NO: 323328 - DNA, 20 bp, Artificial Sequence
  Description of Artificial Sequence: Synthetic oligonucleotide
  Target: LAMA2; (+) strand; PAM type: YTN; PAM sequence: CTG
aaataattattaggaatttt

SEQ ID NO: 323329 - DNA, 20 bp, Artificial Sequence
  Description of Artificial Sequence: Synthetic oligonucleotide
  Target: LAMA2; (+) strand; PAM type: YTN; PAM sequence: TTA
ttaggaattttctttttctt

SEQ ID NO: 323330 - DNA, 20 bp, Artificial Sequence
  Description of Artificial Sequence: Synthetic oligonucleotide
  Target: LAMA2; (+) strand; PAM type: YTN; PAM sequence: TTA
ggaattttctttttctttca

SEQ ID NO: 323331 - DNA, 20 bp, Artificial Sequence
  Description of Artificial Sequence: Synthetic oligonucleotide
  Target: LAMA2; (+) strand; PAM type: YTN; PAM sequence: TTT
tctttttctttcaaacactt

SEQ ID NO: 323332 - DNA, 20 bp, Artificial Sequence
  Description of Artificial Sequence: Synthetic oligonucleotide
  Target: LAMA2; (+) strand; PAM type: YTN; PAM sequence: TTT
ctttttctttcaaacacttt

SEQ ID NO: 323333 - DNA, 20 bp, Artificial Sequence
  Description of Artificial Sequence: Synthetic oligonucleotide
  Target: LAMA2; (+) strand; PAM type: YTN; PAM sequence: TTC
tttttctttcaaacactttg

SEQ ID NO: 323334 - DNA, 20 bp, Artificial Sequence
  Description of Artificial Sequence: Synthetic oligonucleotide
  Target: LAMA2; (+) strand; PAM type: YTN; PAM sequence: CTT
tttctttcaaacactttgga

SEQ ID NO: 323335 - DNA, 20 bp, Artificial Sequence
  Description of Artificial Sequence: Synthetic oligonucleotide
  Target: LAMA2; (+) strand; PAM type: YTN; PAM sequence: TTT
ttctttcaaacactttggaa

SEQ ID NO: 323336 - DNA, 20 bp, Artificial Sequence
  Description of Artificial Sequence: Synthetic oligonucleotide
  Target: LAMA2; (+) strand; PAM type: YTN; PAM sequence: TTT
tctttcaaacactttggaat

SEQ ID NO: 323337 - DNA, 20 bp, Artificial Sequence
  Description of Artificial Sequence: Synthetic oligonucleotide
  Target: LAMA2; (+) strand; PAM type: YTN; PAM sequence: TTT
ctttcaaacactttggaatt

SEQ ID NO: 323338 - DNA, 20 bp, Artificial Sequence
  Description of Artificial Sequence: Synthetic oligonucleotide
  Target: LAMA2; (+) strand; PAM type: YTN; PAM sequence: TTC
tttcaaacactttggaatta

SEQ ID NO: 323339 - DNA, 20 bp, Artificial Sequence
  Description of Artificial Sequence: Synthetic oligonucleotide
  Target: LAMA2; (+) strand; PAM type: YTN; PAM sequence: CTT
tcaaacactttggaattata

SEQ ID NO: 323340 - DNA, 20 bp, Artificial Sequence
  Description of Artificial Sequence: Synthetic oligonucleotide
  Target: LAMA2; (+) strand; PAM type: YTN; PAM sequence: TTT
caaacactttggaattataa

SEQ ID NO: 323341 - DNA, 20 bp, Artificial Sequence
  Description of Artificial Sequence: Synthetic oligonucleotide
  Target: LAMA2; (+) strand; PAM type: YTN; PAM sequence: TTC
aaacactttggaattataat

SEQ ID NO: 323342 - DNA, 20 bp, Artificial Sequence
  Description of Artificial Sequence: Synthetic oligonucleotide
  Target: LAMA2; (+) strand; PAM type: YTN; PAM sequence: CTT
tggaattataatttagattc

SEQ ID NO: 323343 - DNA, 20 bp, Artificial Sequence
  Description of Artificial Sequence: Synthetic oligonucleotide
  Target: LAMA2; (+) strand; PAM type: YTN; PAM sequence: TTT
ggaattataatttagattct

SEQ ID NO: 323344 - DNA, 20 bp, Artificial Sequence
  Description of Artificial Sequence: Synthetic oligonucleotide
  Target: LAMA2; (+) strand; PAM type: YTN; PAM sequence: TTG
gaattataatttagattctt

SEQ ID NO: 323345 - DNA, 20 bp, Artificial Sequence
  Description of Artificial Sequence: Synthetic oligonucleotide
  Target: LAMA2; (+) strand; PAM type: YTN; PAM sequence: TTA
taatttagattctttaaaaa

SEQ ID NO: 323346 - DNA, 20 bp, Artificial Sequence
  Description of Artificial Sequence: Synthetic oligonucleotide
  Target: LAMA2; (+) strand; PAM type: YTN; PAM sequence: TTT
agattctttaaaaactgagt

SEQ ID NO: 323347 - DNA, 20 bp, Artificial Sequence
  Description of Artificial Sequence: Synthetic oligonucleotide
  Target: LAMA2; (+) strand; PAM type: YTN; PAM sequence: TTA
gattctttaaaaactgagtt

SEQ ID NO: 323348 - DNA, 20 bp, Artificial Sequence
  Description of Artificial Sequence: Synthetic oligonucleotide
  Target: LAMA2; (+) strand; PAM type: YTN; PAM sequence: TTC
tttaaaaactgagttttatg

SEQ ID NO: 323349 - DNA, 20 bp, Artificial Sequence
  Description of Artificial Sequence: Synthetic oligonucleotide
  Target: LAMA2; (+) strand; PAM type: YTN; PAM sequence: CTT
taaaaactgagttttatgac

SEQ ID NO: 323350 - DNA, 20 bp, Artificial Sequence
  Description of Artificial Sequence: Synthetic oligonucleotide
  Target: LAMA2; (+) strand; PAM type: YTN; PAM sequence: TTT
aaaaactgagttttatgact

SEQ ID NO: 323351 - DNA, 20 bp, Artificial Sequence
  Description of Artificial Sequence: Synthetic oligonucleotide
  Target: LAMA2; (+) strand; PAM type: YTN; PAM sequence: TTA
aaaactgagttttatgactg

SEQ ID NO: 323352 - DNA, 20 bp, Artificial Sequence
  Description of Artificial Sequence: Synthetic oligonucleotide
  Target: LAMA2; (+) strand; PAM type: YTN; PAM sequence: CTG
agttttatgactgttttttc

SEQ ID NO: 323353 - DNA, 20 bp, Artificial Sequence
  Description of Artificial Sequence: Synthetic oligonucleotide
  Target: LAMA2; (+) strand; PAM type: YTN; PAM sequence: TTT
tatgactgttttttcaaaaa

SEQ ID NO: 323354 - DNA, 20 bp, Artificial Sequence
  Description of Artificial Sequence: Synthetic oligonucleotide
  Target: LAMA2; (+) strand; PAM type: YTN; PAM sequence: TTT
atgactgttttttcaaaaaa

SEQ ID NO: 323355 - DNA, 20 bp, Artificial Sequence
  Description of Artificial Sequence: Synthetic oligonucleotide
  Target: LAMA2; (+) strand; PAM type: YTN; PAM sequence: TTA
tgactgttttttcaaaaaag

SEQ ID NO: 323356 - DNA, 20 bp, Artificial Sequence
  Description of Artificial Sequence: Synthetic oligonucleotide
  Target: LAMA2; (+) strand; PAM type: YTN; PAM sequence: CTG
ttttttcaaaaaagcttcaa

SEQ ID NO: 323357 - DNA, 20 bp, Artificial Sequence
  Description of Artificial Sequence: Synthetic oligonucleotide
  Target: LAMA2; (+) strand; PAM type: YTN; PAM sequence: TTT
tttcaaaaaagcttcaaaat

SEQ ID NO: 323358 - DNA, 20 bp, Artificial Sequence
  Description of Artificial Sequence: Synthetic oligonucleotide
  Target: LAMA2; (+) strand; PAM type: YTN; PAM sequence: TTT
ttcaaaaaagcttcaaaatt

SEQ ID NO: 323359 - DNA, 20 bp, Artificial Sequence
  Description of Artificial Sequence: Synthetic oligonucleotide
  Target: LAMA2; (+) strand; PAM type: YTN; PAM sequence: TTT
tcaaaaaagcttcaaaattt

SEQ ID NO: 323360 - DNA, 20 bp, Artificial Sequence
  Description of Artificial Sequence: Synthetic oligonucleotide
  Target: LAMA2; (+) strand; PAM type: YTN; PAM sequence: TTT
caaaaaagcttcaaaatttt

SEQ ID NO: 323361 - DNA, 20 bp, Artificial Sequence
  Description of Artificial Sequence: Synthetic oligonucleotide
  Target: LAMA2; (+) strand; PAM type: YTN; PAM sequence: TTC
aaaaaagcttcaaaattttg

SEQ ID NO: 323362 - DNA, 20 bp, Artificial Sequence
  Description of Artificial Sequence: Synthetic oligonucleotide
  Target: LAMA2; (+) strand; PAM type: YTN; PAM sequence: CTT
caaaattttggcaaatgttg

SEQ ID NO: 323363 - DNA, 20 bp, Artificial Sequence
  Description of Artificial Sequence: Synthetic oligonucleotide
  Target: LAMA2; (+) strand; PAM type: YTN; PAM sequence: TTC
aaaattttggcaaatgttgc

SEQ ID NO: 323364 - DNA, 20 bp, Artificial Sequence
  Description of Artificial Sequence: Synthetic oligonucleotide
  Target: LAMA2; (+) strand; PAM type: YTN; PAM sequence: TTT
tggcaaatgttgcatttttt

SEQ ID NO: 323365 - DNA, 20 bp, Artificial Sequence
  Description of Artificial Sequence: Synthetic oligonucleotide
  Target: LAMA2; (+) strand; PAM type: YTN; PAM sequence: TTT
ggcaaatgttgcattttttt

SEQ ID NO: 323366 - DNA, 20 bp, Artificial Sequence
  Description of Artificial Sequence: Synthetic oligonucleotide
  Target: LAMA2; (+) strand; PAM type: YTN; PAM sequence: TTG
gcaaatgttgcatttttttt

SEQ ID NO: 323367 - DNA, 20 bp, Artificial Sequence
  Description of Artificial Sequence: Synthetic oligonucleotide
  Target: LAMA2; (+) strand; PAM type: YTN; PAM sequence: TTG
catttttttttccaattagg

SEQ ID NO: 323368 - DNA, 20 bp, Artificial Sequence
  Description of Artificial Sequence: Synthetic oligonucleotide
  Target: LAMA2; (+) strand; PAM type: YTN; PAM sequence: TTT
ttttttccaattaggataag

SEQ ID NO: 323369 - DNA, 20 bp, Artificial Sequence
  Description of Artificial Sequence: Synthetic oligonucleotide
  Target: LAMA2; (+) strand; PAM type: YTN; PAM sequence: TTT
tttttccaattaggataagt

SEQ ID NO: 323370 - DNA, 20 bp, Artificial Sequence
  Description of Artificial Sequence: Synthetic oligonucleotide
  Target: LAMA2; (+) strand; PAM type: YTN; PAM sequence: TTT
ttttccaattaggataagta

SEQ ID NO: 323371 - DNA, 20 bp, Artificial Sequence
  Description of Artificial Sequence: Synthetic oligonucleotide
  Target: LAMA2; (+) strand; PAM type: YTN; PAM sequence: TTT
tttccaattaggataagtaa

SEQ ID NO: 323372 - DNA, 20 bp, Artificial Sequence
  Description of Artificial Sequence: Synthetic oligonucleotide
  Target: LAMA2; (+) strand; PAM type: YTN; PAM sequence: TTT
ttccaattaggataagtaat

SEQ ID NO: 323373 - DNA, 20 bp, Artificial Sequence
  Description of Artificial Sequence: Synthetic oligonucleotide
  Target: LAMA2; (+) strand; PAM type: YTN; PAM sequence: TTT
tccaattaggataagtaatt

SEQ ID NO: 323374 - DNA, 20 bp, Artificial Sequence
  Description of Artificial Sequence: Synthetic oligonucleotide
  Target: LAMA2; (+) strand; PAM type: YTN; PAM sequence: TTT
ccaattaggataagtaattc

SEQ ID NO: 323375 - DNA, 20 bp, Artificial Sequence
  Description of Artificial Sequence: Synthetic oligonucleotide
  Target: LAMA2; (+) strand; PAM type: YTN; PAM sequence: TTC
caattaggataagtaattca

SEQ ID NO: 323376 - DNA, 20 bp, Artificial Sequence
  Description of Artificial Sequence: Synthetic oligonucleotide
  Target: LAMA2; (+) strand; PAM type: YTN; PAM sequence: TTA
ggataagtaattcaaaaagt

SEQ ID NO: 323377 - DNA, 20 bp, Artificial Sequence
  Description of Artificial Sequence: Synthetic oligonucleotide
  Target: LAMA2; (+) strand; PAM type: YTN; PAM sequence: TTC
aaaaagtcacaacatgcttc

SEQ ID NO: 323378 - DNA, 20 bp, Artificial Sequence
  Description of Artificial Sequence: Synthetic oligonucleotide
  Target: LAMA2; (+) strand; PAM type: YTN; PAM sequence: CTT
cagccaaaaatccattgtga

SEQ ID NO: 323379 - DNA, 20 bp, Artificial Sequence
  Description of Artificial Sequence: Synthetic oligonucleotide
  Target: LAMA2; (+) strand; PAM type: YTN; PAM sequence: TTC
agccaaaaatccattgtgaa

SEQ ID NO: 323380 - DNA, 20 bp, Artificial Sequence
  Description of Artificial Sequence: Synthetic oligonucleotide
  Target: LAMA2; (+) strand; PAM type: YTN; PAM sequence: TTG
tgaaaatagaaattagaaat

SEQ ID NO: 323381 - DNA, 20 bp, Artificial Sequence
  Description of Artificial Sequence: Synthetic oligonucleotide
  Target: LAMA2; (+) strand; PAM type: YTN; PAM sequence: TTA
gaaatgatctttcaaaaaat

SEQ ID NO: 323382 - DNA, 20 bp, Artificial Sequence
  Description of Artificial Sequence: Synthetic oligonucleotide
  Target: LAMA2; (+) strand; PAM type: YTN; PAM sequence: CTT
tcaaaaaattaagaaatcat

SEQ ID NO: 323383 - DNA, 20 bp, Artificial Sequence
  Description of Artificial Sequence: Synthetic oligonucleotide
  Target: LAMA2; (+) strand; PAM type: YTN; PAM sequence: TTT
caaaaaattaagaaatcatt

SEQ ID NO: 323384 - DNA, 20 bp, Artificial Sequence
  Description of Artificial Sequence: Synthetic oligonucleotide
  Target: LAMA2; (+) strand; PAM type: YTN; PAM sequence: TTC
aaaaaattaagaaatcattt

SEQ ID NO: 323385 - DNA, 20 bp, Artificial Sequence
  Description of Artificial Sequence: Synthetic oligonucleotide
  Target: LAMA2; (+) strand; PAM type: YTN; PAM sequence: TTA
agaaatcattttttgaaaaa

SEQ ID NO: 323386 - DNA, 20 bp, Artificial Sequence
  Description of Artificial Sequence: Synthetic oligonucleotide
  Target: LAMA2; (+) strand; PAM type: YTN; PAM sequence: TTT
tttgaaaaagtgtggagtca

SEQ ID NO: 323387 - DNA, 20 bp, Artificial Sequence
  Description of Artificial Sequence: Synthetic oligonucleotide
  Target: LAMA2; (+) strand; PAM type: YTN; PAM sequence: TTT
ttgaaaaagtgtggagtcat

SEQ ID NO: 323388 - DNA, 20 bp, Artificial Sequence
  Description of Artificial Sequence: Synthetic oligonucleotide
  Target: LAMA2; (+) strand; PAM type: YTN; PAM sequence: TTT
tgaaaaagtgtggagtcatt

SEQ ID NO: 323389 - DNA, 20 bp, Artificial Sequence
  Description of Artificial Sequence: Synthetic oligonucleotide
  Target: LAMA2; (+) strand; PAM type: YTN; PAM sequence: TTT
gaaaaagtgtggagtcatta

SEQ ID NO: 323390 - DNA, 20 bp, Artificial Sequence
  Description of Artificial Sequence: Synthetic oligonucleotide
  Target: LAMA2; (+) strand; PAM type: YTN; PAM sequence: TTG
aaaaagtgtggagtcattaa

SEQ ID NO: 323391 - DNA, 20 bp, Artificial Sequence
  Description of Artificial Sequence: Synthetic oligonucleotide
  Target: LAMA2; (+) strand; PAM type: YTN; PAM sequence: TTA
attaagtgtttgaccttttg

SEQ ID NO: 323392 - DNA, 20 bp, Artificial Sequence
  Description of Artificial Sequence: Synthetic oligonucleotide
  Target: LAMA2; (+) strand; PAM type: YTN; PAM sequence: TTA
agtgtttgaccttttgtgcc

SEQ ID NO: 323393 - DNA, 20 bp, Artificial Sequence
  Description of Artificial Sequence: Synthetic oligonucleotide
  Target: LAMA2; (+) strand; PAM type: YTN; PAM sequence: TTT
gaccttttgtgccttctcaa

SEQ ID NO: 323394 - DNA, 20 bp, Artificial Sequence
  Description of Artificial Sequence: Synthetic oligonucleotide
  Target: LAMA2; (+) strand; PAM type: YTN; PAM sequence: TTG
accttttgtgccttctcaaa

SEQ ID NO: 323395 - DNA, 20 bp, Artificial Sequence
  Description of Artificial Sequence: Synthetic oligonucleotide
  Target: LAMA2; (+) strand; PAM type: YTN; PAM sequence: CTT
ttgtgccttctcaaatgtcc

SEQ ID NO: 323396 - DNA, 20 bp, Artificial Sequence
  Description of Artificial Sequence: Synthetic oligonucleotide
  Target: LAMA2; (+) strand; PAM type: YTN; PAM sequence: TTT
tgtgccttctcaaatgtcca

SEQ ID NO: 323397 - DNA, 20 bp, Artificial Sequence
  Description of Artificial Sequence: Synthetic oligonucleotide
  Target: LAMA2; (+) strand; PAM type: YTN; PAM sequence: TTT
gtgccttctcaaatgtccat

SEQ ID NO: 323398 - DNA, 20 bp, Artificial Sequence
  Description of Artificial Sequence: Synthetic oligonucleotide
  Target: LAMA2; (+) strand; PAM type: YTN; PAM sequence: TTG
tgccttctcaaatgtccatt

SEQ ID NO: 323399 - DNA, 20 bp, Artificial Sequence
  Description of Artificial Sequence: Synthetic oligonucleotide
  Target: LAMA2; (+) strand; PAM type: YTN; PAM sequence: CTT
ctcaaatgtccattttcaaa

SEQ ID NO: 323400 - DNA, 20 bp, Artificial Sequence
  Description of Artificial Sequence: Synthetic oligonucleotide
  Target: LAMA2; (+) strand; PAM type: YTN; PAM sequence: TTC
tcaaatgtccattttcaaaa

SEQ ID NO: 323401 - DNA, 20 bp, Artificial Sequence
  Description of Artificial Sequence: Synthetic oligonucleotide
  Target: LAMA2; (+) strand; PAM type: YTN; PAM sequence: CTC
aaatgtccattttcaaaaag

SEQ ID NO: 323402 - DNA, 20 bp, Artificial Sequence
  Description of Artificial Sequence: Synthetic oligonucleotide
  Target: LAMA2; (+) strand; PAM type: YTN; PAM sequence: TTT
tcaaaaagacagatgcagtt

SEQ ID NO: 323403 - DNA, 20 bp, Artificial Sequence
  Description of Artificial Sequence: Synthetic oligonucleotide
  Target: LAMA2; (+) strand; PAM type: YTN; PAM sequence: TTT
caaaaagacagatgcagtta

SEQ ID NO: 323404 - DNA, 20 bp, Artificial Sequence
  Description of Artificial Sequence: Synthetic oligonucleotide
  Target: LAMA2; (+) strand; PAM type: YTN; PAM sequence: TTC
aaaaagacagatgcagttag

SEQ ID NO: 323405 - DNA, 20 bp, Artificial Sequence
  Description of Artificial Sequence: Synthetic oligonucleotide
  Target: LAMA2; (+) strand; PAM type: YTN; PAM sequence: TTA
gaaggaaaagactatgaatg

SEQ ID NO: 323406 - DNA, 20 bp, Artificial Sequence
  Description of Artificial Sequence: Synthetic oligonucleotide
  Target: LAMA2; (+) strand; PAM type: YTN; PAM sequence: CTA
tgaatgtaggttcagggcca

SEQ ID NO: 323407 - DNA, 20 bp, Artificial Sequence
  Description of Artificial Sequence: Synthetic oligonucleotide
  Target: LAMA2; (+) strand; PAM type: YTN; PAM sequence: TTC
agggccagaggacaaaaact

SEQ ID NO: 323408 - DNA, 20 bp, Artificial Sequence
  Description of Artificial Sequence: Synthetic oligonucleotide
  Target: LAMA2; (+) strand; PAM type: YTN; PAM sequence: CTG
ttgaaattgccttgatatag

SEQ ID NO: 323409 - DNA, 20 bp, Artificial Sequence
  Description of Artificial Sequence: Synthetic oligonucleotide
  Target: LAMA2; (+) strand; PAM type: YTN; PAM sequence: TTG
aaattgccttgatatagatt

SEQ ID NO: 323410 - DNA, 20 bp, Artificial Sequence
  Description of Artificial Sequence: Synthetic oligonucleotide
  Target: LAMA2; (+) strand; PAM type: YTN; PAM sequence: TTG
ccttgatatagattcataga

SEQ ID NO: 323411 - DNA, 20 bp, Artificial Sequence
  Description of Artificial Sequence: Synthetic oligonucleotide
  Target: LAMA2; (+) strand; PAM type: YTN; PAM sequence: CTT
gatatagattcatagattgc

SEQ ID NO: 323412 - DNA, 20 bp, Artificial Sequence
  Description of Artificial Sequence: Synthetic oligonucleotide
  Target: LAMA2; (+) strand; PAM type: YTN; PAM sequence: TTG
atatagattcatagattgca

SEQ ID NO: 323413 - DNA, 20 bp, Artificial Sequence
  Description of Artificial Sequence: Synthetic oligonucleotide
  Target: LAMA2; (+) strand; PAM type: YTN; PAM sequence: TTC
atagattgcaaatgagcact

SEQ ID NO: 323414 - DNA, 20 bp, Artificial Sequence
  Description of Artificial Sequence: Synthetic oligonucleotide
  Target: LAMA2; (+) strand; PAM type: YTN; PAM sequence: TTG
caaatgagcactttttaaaa

SEQ ID NO: 323415 - DNA, 20 bp, Artificial Sequence
  Description of Artificial Sequence: Synthetic oligonucleotide
  Target: LAMA2; (+) strand; PAM type: YTN; PAM sequence: CTT
tttaaaatttaaacccttga

SEQ ID NO: 323416 - DNA, 20 bp, Artificial Sequence
  Description of Artificial Sequence: Synthetic oligonucleotide
  Target: LAMA2; (+) strand; PAM type: YTN; PAM sequence: TTT
ttaaaatttaaacccttgaa

SEQ ID NO: 323417 - DNA, 20 bp, Artificial Sequence
  Description of Artificial Sequence: Synthetic oligonucleotide
  Target: LAMA2; (+) strand; PAM type: YTN; PAM sequence: TTT
taaaatttaaacccttgaat

SEQ ID NO: 323418 - DNA, 20 bp, Artificial Sequence
  Description of Artificial Sequence: Synthetic oligonucleotide
  Target: LAMA2; (+) strand; PAM type: YTN; PAM sequence: TTT
aaaatttaaacccttgaata

SEQ ID NO: 323419 - DNA, 20 bp, Artificial Sequence
  Description of Artificial Sequence: Synthetic oligonucleotide
  Target: LAMA2; (+) strand; PAM type: YTN; PAM sequence: TTA
aaatttaaacccttgaatat

SEQ ID NO: 323420 - DNA, 20 bp, Artificial Sequence
  Description of Artificial Sequence: Synthetic oligonucleotide
  Target: LAMA2; (+) strand; PAM type: YTN; PAM sequence: TTT
aaacccttgaatatggtatc

SEQ ID NO: 323421 - DNA, 20 bp, Artificial Sequence
  Description of Artificial Sequence: Synthetic oligonucleotide
  Target: LAMA2; (+) strand; PAM type: YTN; PAM sequence: TTA
aacccttgaatatggtatct

SEQ ID NO: 323422 - DNA, 20 bp, Artificial Sequence
  Description of Artificial Sequence: Synthetic oligonucleotide
  Target: LAMA2; (+) strand; PAM type: YTN; PAM sequence: CTT
gaatatggtatctcaggcac

SEQ ID NO: 323423 - DNA, 20 bp, Artificial Sequence
  Description of Artificial Sequence: Synthetic oligonucleotide
  Target: LAMA2; (+) strand; PAM type: YTN; PAM sequence: TTG
aatatggtatctcaggcaca

SEQ ID NO: 323424 - DNA, 20 bp, Artificial Sequence
  Description of Artificial Sequence: Synthetic oligonucleotide
  Target: LAMA2; (+) strand; PAM type: YTN; PAM sequence: CTC
aggcacagagtgagttcttt

SEQ ID NO: 323425 - DNA, 20 bp, Artificial Sequence
  Description of Artificial Sequence: Synthetic oligonucleotide
  Target: LAMA2; (+) strand; PAM type: YTN; PAM sequence: TTC
tttatatatacaaaatgtga

SEQ ID NO: 323426 - DNA, 20 bp, Artificial Sequence
  Description of Artificial Sequence: Synthetic oligonucleotide
  Target: LAMA2; (+) strand; PAM type: YTN; PAM sequence: CTT
tatatatacaaaatgtgatt

SEQ ID NO: 323427 - DNA, 20 bp, Artificial Sequence
  Description of Artificial Sequence: Synthetic oligonucleotide
  Target: LAMA2; (+) strand; PAM type: YTN; PAM sequence: TTT
atatatacaaaatgtgattc

SEQ ID NO: 323428 - DNA, 20 bp, Artificial Sequence
  Description of Artificial Sequence: Synthetic oligonucleotide
  Target: LAMA2; (+) strand; PAM type: YTN; PAM sequence: TTA
tatatacaaaatgtgattct

SEQ ID NO: 323429 - DNA, 20 bp, Artificial Sequence
  Description of Artificial Sequence: Synthetic oligonucleotide
  Target: LAMA2; (+) strand; PAM type: YTN; PAM sequence: TTC
ttaccgcctaccagctgtct

SEQ ID NO: 323430 - DNA, 20 bp, Artificial Sequence
  Description of Artificial Sequence: Synthetic oligonucleotide
  Target: LAMA2; (+) strand; PAM type: YTN; PAM sequence: CTT
accgcctaccagctgtcttc

SEQ ID NO: 323431 - DNA, 20 bp, Artificial Sequence
  Description of Artificial Sequence: Synthetic oligonucleotide
  Target: LAMA2; (+) strand; PAM type: YTN; PAM sequence: TTA
ccgcctaccagctgtcttcc

SEQ ID NO: 323432 - DNA, 20 bp, Artificial Sequence
  Description of Artificial Sequence: Synthetic oligonucleotide
  Target: LAMA2; (+) strand; PAM type: YTN; PAM sequence: CTA
ccagctgtcttccgatttca

SEQ ID NO: 323433 - DNA, 20 bp, Artificial Sequence
  Description of Artificial Sequence: Synthetic oligonucleotide
  Target: LAMA2; (+) strand; PAM type: YTN; PAM sequence: CTG
tcttccgatttcaccagatg

SEQ ID NO: 323434 - DNA, 20 bp, Artificial Sequence
  Description of Artificial Sequence: Synthetic oligonucleotide
  Target: LAMA2; (+) strand; PAM type: YTN; PAM sequence: CTT
ccgatttcaccagatgacct

SEQ ID NO: 323435 - DNA, 20 bp, Artificial Sequence
  Description of Artificial Sequence: Synthetic oligonucleotide
  Target: LAMA2; (+) strand; PAM type: YTN; PAM sequence: TTC
cgatttcaccagatgacctt

SEQ ID NO: 323436 - DNA, 20 bp, Artificial Sequence
  Description of Artificial Sequence: Synthetic oligonucleotide
  Target: LAMA2; (+) strand; PAM type: YTN; PAM sequence: TTT
caccagatgaccttccctat

SEQ ID NO: 323437 - DNA, 20 bp, Artificial Sequence
  Description of Artificial Sequence: Synthetic oligonucleotide
  Target: LAMA2; (+) strand; PAM type: YTN; PAM sequence: TTC
accagatgaccttccctata

SEQ ID NO: 323438 - DNA, 20 bp, Artificial Sequence
  Description of Artificial Sequence: Synthetic oligonucleotide
  Target: LAMA2; (+) strand; PAM type: YTN; PAM sequence: CTT
ccctataagtttgacacgta

SEQ ID NO: 323439 - DNA, 20 bp, Artificial Sequence
  Description of Artificial Sequence: Synthetic oligonucleotide
  Target: LAMA2; (+) strand; PAM type: YTN; PAM sequence: TTC
cctataagtttgacacgtaa

SEQ ID NO: 323440 - DNA, 20 bp, Artificial Sequence
  Description of Artificial Sequence: Synthetic oligonucleotide
  Target: LAMA2; (+) strand; PAM type: YTN; PAM sequence: CTA
taagtttgacacgtaactca

SEQ ID NO: 323441 - DNA, 20 bp, Artificial Sequence
  Description of Artificial Sequence: Synthetic oligonucleotide
  Target: LAMA2; (+) strand; PAM type: YTN; PAM sequence: TTT
gacacgtaactcataaaatg

SEQ ID NO: 323442 - DNA, 20 bp, Artificial Sequence
  Description of Artificial Sequence: Synthetic oligonucleotide
  Target: LAMA2; (+) strand; PAM type: YTN; PAM sequence: TTG
acacgtaactcataaaatgc

SEQ ID NO: 323443 - DNA, 20 bp, Artificial Sequence
  Description of Artificial Sequence: Synthetic oligonucleotide
  Target: LAMA2; (+) strand; PAM type: YTN; PAM sequence: CTC
ataaaatgcatggctctgga

SEQ ID NO: 323444 - DNA, 20 bp, Artificial Sequence
  Description of Artificial Sequence: Synthetic oligonucleotide
  Target: LAMA2; (+) strand; PAM type: YTN; PAM sequence: CTC
tggagaacaattatcatgac

SEQ ID NO: 323445 - DNA, 20 bp, Artificial Sequence
  Description of Artificial Sequence: Synthetic oligonucleotide
  Target: LAMA2; (+) strand; PAM type: YTN; PAM sequence: CTG
gagaacaattatcatgacgg

SEQ ID NO: 323446 - DNA, 20 bp, Artificial Sequence
  Description of Artificial Sequence: Synthetic oligonucleotide
  Target: LAMA2; (+) strand; PAM type: YTN; PAM sequence: TTA
tcatgacgggagtatgcttt

SEQ ID NO: 323447 - DNA, 20 bp, Artificial Sequence
  Description of Artificial Sequence: Synthetic oligonucleotide
  Target: LAMA2; (+) strand; PAM type: YTN; PAM sequence: CTT
tcttgattatatggcaggat

SEQ ID NO: 323448 - DNA, 20 bp, Artificial Sequence
  Description of Artificial Sequence: Synthetic oligonucleotide
  Target: LAMA2; (+) strand; PAM type: YTN; PAM sequence: TTT
cttgattatatggcaggatc

SEQ ID NO: 323449 - DNA, 20 bp, Artificial Sequence
  Description of Artificial Sequence: Synthetic oligonucleotide
  Target: LAMA2; (+) strand; PAM type: YTN; PAM sequence: TTC
ttgattatatggcaggatcc

SEQ ID NO: 323450 - DNA, 20 bp, Artificial Sequence
  Description of Artificial Sequence: Synthetic oligonucleotide
  Target: LAMA2; (+) strand; PAM type: YTN; PAM sequence: CTT
gattatatggcaggatcctc

SEQ ID NO: 323451 - DNA, 20 bp, Artificial Sequence
  Description of Artificial Sequence: Synthetic oligonucleotide
  Target: LAMA2; (+) strand; PAM type: YTN; PAM sequence: TTG
attatatggcaggatcctct

SEQ ID NO: 323452 - DNA, 20 bp, Artificial Sequence
  Description of Artificial Sequence: Synthetic oligonucleotide
  Target: LAMA2; (+) strand; PAM type: YTN; PAM sequence: TTA
tatggcaggatcctctttcc

SEQ ID NO: 323453 - DNA, 20 bp, Artificial Sequence
  Description of Artificial Sequence: Synthetic oligonucleotide
  Target: LAMA2; (+) strand; PAM type: YTN; PAM sequence: CTC
tttcccacctctgcttttga

SEQ ID NO: 323454 - DNA, 20 bp, Artificial Sequence
  Description of Artificial Sequence: Synthetic oligonucleotide
  Target: LAMA2; (+) strand; PAM type: YTN; PAM sequence: CTT
tcccacctctgcttttgaag

SEQ ID NO: 323455 - DNA, 20 bp, Artificial Sequence
  Description of Artificial Sequence: Synthetic oligonucleotide
  Target: LAMA2; (+) strand; PAM type: YTN; PAM sequence: TTT
cccacctctgcttttgaagg

SEQ ID NO: 323456 - DNA, 20 bp, Artificial Sequence
  Description of Artificial Sequence: Synthetic oligonucleotide
  Target: LAMA2; (+) strand; PAM type: YTN; PAM sequence: TTC
ccacctctgcttttgaagga

SEQ ID NO: 323457 - DNA, 20 bp, Artificial Sequence
  Description of Artificial Sequence: Synthetic oligonucleotide
  Target: LAMA2; (+) strand; PAM type: YTN; PAM sequence: CTC
tgcttttgaaggatattaaa

SEQ ID NO: 323458 - DNA, 20 bp, Artificial Sequence
  Description of Artificial Sequence: Synthetic oligonucleotide
  Target: LAMA2; (+) strand; PAM type: YTN; PAM sequence: CTG
cttttgaaggatattaaagg

SEQ ID NO: 323459 - DNA, 20 bp, Artificial Sequence
  Description of Artificial Sequence: Synthetic oligonucleotide
  Target: LAMA2; (+) strand; PAM type: YTN; PAM sequence: CTT
ttgaaggatattaaaggtga

SEQ ID NO: 323460 - DNA, 20 bp, Artificial Sequence
  Description of Artificial Sequence: Synthetic oligonucleotide
  Target: LAMA2; (+) strand; PAM type: YTN; PAM sequence: TTT
tgaaggatattaaaggtgag

SEQ ID NO: 323461 - DNA, 20 bp, Artificial Sequence
  Description of Artificial Sequence: Synthetic oligonucleotide
  Target: LAMA2; (+) strand; PAM type: YTN; PAM sequence: TTT
gaaggatattaaaggtgaga

SEQ ID NO: 323462 - DNA, 20 bp, Artificial Sequence
  Description of Artificial Sequence: Synthetic oligonucleotide
  Target: LAMA2; (+) strand; PAM type: YTN; PAM sequence: TTG
aaggatattaaaggtgagat

SEQ ID NO: 323463 - DNA, 20 bp, Artificial Sequence
  Description of Artificial Sequence: Synthetic oligonucleotide
  Target: LAMA2; (+) strand; PAM type: YTN; PAM sequence: TTA
aaggtgagattaaaaatgct

SEQ ID NO: 323464 - DNA, 20 bp, Artificial Sequence
  Description of Artificial Sequence: Synthetic oligonucleotide
  Target: LAMA2; (+) strand; PAM type: YTN; PAM sequence: TTA
aaaatgctccagttgttctg

SEQ ID NO: 323465 - DNA, 20 bp, Artificial Sequence
  Description of Artificial Sequence: Synthetic oligonucleotide
  Target: LAMA2; (+) strand; PAM type: YTN; PAM sequence: CTC
cagttgttctgcttgtctga

SEQ ID NO: 323466 - DNA, 20 bp, Artificial Sequence
  Description of Artificial Sequence: Synthetic oligonucleotide
  Target: LAMA2; (+) strand; PAM type: YTN; PAM sequence: TTG
ttctgcttgtctgattgtaa

SEQ ID NO: 323467 - DNA, 20 bp, Artificial Sequence
  Description of Artificial Sequence: Synthetic oligonucleotide
  Target: LAMA2; (+) strand; PAM type: YTN; PAM sequence: TTC
tgcttgtctgattgtaacag

SEQ ID NO: 323468 - DNA, 20 bp, Artificial Sequence
  Description of Artificial Sequence: Synthetic oligonucleotide
  Target: LAMA2; (+) strand; PAM type: YTN; PAM sequence: CTG
cttgtctgattgtaacagtg

SEQ ID NO: 323469 - DNA, 20 bp, Artificial Sequence
  Description of Artificial Sequence: Synthetic oligonucleotide
  Target: LAMA2; (+) strand; PAM type: YTN; PAM sequence: CTT
gtctgattgtaacagtgaag

SEQ ID NO: 323470 - DNA, 20 bp, Artificial Sequence
  Description of Artificial Sequence: Synthetic oligonucleotide
  Target: LAMA2; (+) strand; PAM type: YTN; PAM sequence: TTG
tctgattgtaacagtgaagg

SEQ ID NO: 323471 - DNA, 20 bp, Artificial Sequence
  Description of Artificial Sequence: Synthetic oligonucleotide
  Target: LAMA2; (+) strand; PAM type: YTN; PAM sequence: CTG
attgtaacagtgaaggagac

SEQ ID NO: 323472 - DNA, 20 bp, Artificial Sequence
  Description of Artificial Sequence: Synthetic oligonucleotide
  Target: LAMA2; (+) strand; PAM type: YTN; PAM sequence: TTG
taacagtgaaggagacaaaa

SEQ ID NO: 323473 - DNA, 20 bp, Artificial Sequence
  Description of Artificial Sequence: Synthetic oligonucleotide
  Target: LAMA2; (+) strand; PAM type: YTN; PAM sequence: TTG
attctagcttatggctcagt

SEQ ID NO: 323474 - DNA, 20 bp, Artificial Sequence
  Description of Artificial Sequence: Synthetic oligonucleotide
  Target: LAMA2; (+) strand; PAM type: YTN; PAM sequence: TTC
tagcttatggctcagtgttt

SEQ ID NO: 323475 - DNA, 20 bp, Artificial Sequence
  Description of Artificial Sequence: Synthetic oligonucleotide
  Target: LAMA2; (+) strand; PAM type: YTN; PAM sequence: CTA
gcttatggctcagtgtttca

SEQ ID NO: 323476 - DNA, 20 bp, Artificial Sequence
  Description of Artificial Sequence: Synthetic oligonucleotide
  Target: LAMA2; (+) strand; PAM type: YTN; PAM sequence: CTT
atggctcagtgtttcaatgt

SEQ ID NO: 323477 - DNA, 20 bp, Artificial Sequence
  Description of Artificial Sequence: Synthetic oligonucleotide
  Target: LAMA2; (+) strand; PAM type: YTN; PAM sequence: TTA
tggctcagtgtttcaatgtt

SEQ ID NO: 323478 - DNA, 20 bp, Artificial Sequence
  Description of Artificial Sequence: Synthetic oligonucleotide
  Target: LAMA2; (+) strand; PAM type: YTN; PAM sequence: CTC
agtgtttcaatgttattctg

SEQ ID NO: 323479 - DNA, 20 bp, Artificial Sequence
  Description of Artificial Sequence: Synthetic oligonucleotide
  Target: LAMA2; (+) strand; PAM type: YTN; PAM sequence: TTT
caatgttattctgcagcact

SEQ ID NO: 323480 - DNA, 20 bp, Artificial Sequence
  Description of Artificial Sequence: Synthetic oligonucleotide
  Target: LAMA2; (+) strand; PAM type: YTN; PAM sequence: TTC
aatgttattctgcagcactt

SEQ ID NO: 323481 - DNA, 20 bp, Artificial Sequence
  Description of Artificial Sequence: Synthetic oligonucleotide
  Target: LAMA2; (+) strand; PAM type: YTN; PAM sequence: TTA
ttctgcagcacttgtttgcc

SEQ ID NO: 323482 - DNA, 20 bp, Artificial Sequence
  Description of Artificial Sequence: Synthetic oligonucleotide
  Target: LAMA2; (+) strand; PAM type: YTN; PAM sequence: TTC
tgcagcacttgtttgccagc

SEQ ID NO: 323483 - DNA, 20 bp, Artificial Sequence
  Description of Artificial Sequence: Synthetic oligonucleotide
  Target: LAMA2; (+) strand; PAM type: YTN; PAM sequence: CTG
cagcacttgtttgccagcag

SEQ ID NO: 323484 - DNA, 20 bp, Artificial Sequence
  Description of Artificial Sequence: Synthetic oligonucleotide
  Target: LAMA2; (+) strand; PAM type: YTN; PAM sequence: CTT
gtttgccagcagctgttagg

SEQ ID NO: 323485 - DNA, 20 bp, Artificial Sequence
  Description of Artificial Sequence: Synthetic oligonucleotide
  Target: LAMA2; (+) strand; PAM type: YTN; PAM sequence: TTG
tttgccagcagctgttaggg

SEQ ID NO: 323486 - DNA, 20 bp, Artificial Sequence
  Description of Artificial Sequence: Synthetic oligonucleotide
  Target: LAMA2; (+) strand; PAM type: YTN; PAM sequence: TTT
gccagcagctgttagggatt

SEQ ID NO: 323487 - DNA, 20 bp, Artificial Sequence
  Description of Artificial Sequence: Synthetic oligonucleotide
  Target: LAMA2; (+) strand; PAM type: YTN; PAM sequence: TTG
ccagcagctgttagggatta

SEQ ID NO: 323488 - DNA, 20 bp, Artificial Sequence
  Description of Artificial Sequence: Synthetic oligonucleotide
  Target: LAMA2; (+) strand; PAM type: YTN; PAM sequence: CTG
ttagggattattgcaggttt

SEQ ID NO: 323489 - DNA, 20 bp, Artificial Sequence
  Description of Artificial Sequence: Synthetic oligonucleotide
  Target: LAMA2; (+) strand; PAM type: YTN; PAM sequence: TTA
gggattattgcaggtttctt

SEQ ID NO: 323490 - DNA, 20 bp, Artificial Sequence
  Description of Artificial Sequence: Synthetic oligonucleotide
  Target: LAMA2; (+) strand; PAM type: YTN; PAM sequence: TTA
ttgcaggtttctttgtcagg

SEQ ID NO: 323491 - DNA, 20 bp, Artificial Sequence
  Description of Artificial Sequence: Synthetic oligonucleotide
  Target: LAMA2; (+) strand; PAM type: YTN; PAM sequence: TTG
caggtttctttgtcaggaac

SEQ ID NO: 323492 - DNA, 20 bp, Artificial Sequence
  Description of Artificial Sequence: Synthetic oligonucleotide
  Target: LAMA2; (+) strand; PAM type: YTN; PAM sequence: TTT
ctttgtcaggaacagtgtgg

SEQ ID NO: 323493 - DNA, 20 bp, Artificial Sequence
  Description of Artificial Sequence: Synthetic oligonucleotide
  Target: LAMA2; (+) strand; PAM type: YTN; PAM sequence: TTC
tttgtcaggaacagtgtggc

SEQ ID NO: 323494 - DNA, 20 bp, Artificial Sequence
  Description of Artificial Sequence: Synthetic oligonucleotide
  Target: LAMA2; (+) strand; PAM type: YTN; PAM sequence: CTT
tgtcaggaacagtgtggcaa

SEQ ID NO: 323495 - DNA, 20 bp, Artificial Sequence
  Description of Artificial Sequence: Synthetic oligonucleotide
  Target: LAMA2; (+) strand; PAM type: YTN; PAM sequence: TTT
gtcaggaacagtgtggcaac

SEQ ID NO: 323496 - DNA, 20 bp, Artificial Sequence
  Description of Artificial Sequence: Synthetic oligonucleotide
  Target: LAMA2; (+) strand; PAM type: YTN; PAM sequence: TTG
tcaggaacagtgtggcaaca

SEQ ID NO: 323497 - DNA, 20 bp, Artificial Sequence
  Description of Artificial Sequence: Synthetic oligonucleotide
  Target: LAMA2; (+) strand; PAM type: YTN; PAM sequence: TTT
agactggctactgaaggggt

SEQ ID NO: 323498 - DNA, 20 bp, Artificial Sequence
  Description of Artificial Sequence: Synthetic oligonucleotide
  Target: LAMA2; (+) strand; PAM type: YTN; PAM sequence: TTA
gactggctactgaaggggtt

SEQ ID NO: 323499 - DNA, 20 bp, Artificial Sequence
  Description of Artificial Sequence: Synthetic oligonucleotide
  Target: LAMA2; (+) strand; PAM type: YTN; PAM sequence: CTG
gctactgaaggggtttgttt

SEQ ID NO: 323500 - DNA, 20 bp, Artificial Sequence
  Description of Artificial Sequence: Synthetic oligonucleotide
  Target: LAMA2; (+) strand; PAM type: YTN; PAM sequence: CTA
ctgaaggggtttgtttaaaa

SEQ ID NO: 323501 - DNA, 20 bp, Artificial Sequence
  Description of Artificial Sequence: Synthetic oligonucleotide
  Target: LAMA2; (+) strand; PAM type: YTN; PAM sequence: CTG
aaggggtttgtttaaaagat

SEQ ID NO: 323502 - DNA, 20 bp, Artificial Sequence
  Description of Artificial Sequence: Synthetic oligonucleotide
  Target: LAMA2; (+) strand; PAM type: YTN; PAM sequence: TTT
gtttaaaagatttaaaaatc

SEQ ID NO: 323503 - DNA, 20 bp, Artificial Sequence
  Description of Artificial Sequence: Synthetic oligonucleotide
  Target: LAMA2; (+) strand; PAM type: YTN; PAM sequence: TTG
tttaaaagatttaaaaatct

SEQ ID NO: 323504 - DNA, 20 bp, Artificial Sequence
  Description of Artificial Sequence: Synthetic oligonucleotide
  Target: LAMA2; (+) strand; PAM type: YTN; PAM sequence: TTT
aaaagatttaaaaatctctt

SEQ ID NO: 323505 - DNA, 20 bp, Artificial Sequence
  Description of Artificial Sequence: Synthetic oligonucleotide
  Target: LAMA2; (+) strand; PAM type: YTN; PAM sequence: TTA
aaagatttaaaaatctcttc

SEQ ID NO: 323506 - DNA, 20 bp, Artificial Sequence
  Description of Artificial Sequence: Synthetic oligonucleotide
  Target: LAMA2; (+) strand; PAM type: YTN; PAM sequence: TTT
aaaaatctcttcagagtcaa

SEQ ID NO: 323507 - DNA, 20 bp, Artificial Sequence
  Description of Artificial Sequence: Synthetic oligonucleotide
  Target: LAMA2; (+) strand; PAM type: YTN; PAM sequence: TTA
aaaatctcttcagagtcaaa

SEQ ID NO: 323508 - DNA, 20 bp, Artificial Sequence
  Description of Artificial Sequence: Synthetic oligonucleotide
  Target: LAMA2; (+) strand; PAM type: YTN; PAM sequence: CTC
ttcagagtcaaagatgttaa

SEQ ID NO: 323509 - DNA, 20 bp, Artificial Sequence
  Description of Artificial Sequence: Synthetic oligonucleotide
  Target: LAMA2; (+) strand; PAM type: YTN; PAM sequence: CTT
cagagtcaaagatgttaatt

SEQ ID NO: 323510 - DNA, 20 bp, Artificial Sequence
  Description of Artificial Sequence: Synthetic oligonucleotide
  Target: LAMA2; (+) strand; PAM type: YTN; PAM sequence: TTC
agagtcaaagatgttaattc

SEQ ID NO: 323511 - DNA, 20 bp, Artificial Sequence
  Description of Artificial Sequence: Synthetic oligonucleotide
  Target: LAMA2; (+) strand; PAM type: YTN; PAM sequence: TTA
attctacctggtgaaccaga

SEQ ID NO: 323512 - DNA, 20 bp, Artificial Sequence
  Description of Artificial Sequence: Synthetic oligonucleotide
  Target: LAMA2; (+) strand; PAM type: YTN; PAM sequence: TTC
tacctggtgaaccagaatga

SEQ ID NO: 323513 - DNA, 20 bp, Artificial Sequence
  Description of Artificial Sequence: Synthetic oligonucleotide
  Target: LAMA2; (+) strand; PAM type: YTN; PAM sequence: CTA
cctggtgaaccagaatgatc

SEQ ID NO: 323514 - DNA, 20 bp, Artificial Sequence
  Description of Artificial Sequence: Synthetic oligonucleotide
  Target: LAMA2; (+) strand; PAM type: YTN; PAM sequence: CTG
gtgaaccagaatgatcctgc

SEQ ID NO: 323515 - DNA, 20 bp, Artificial Sequence
  Description of Artificial Sequence: Synthetic oligonucleotide
  Target: LAMA2; (+) strand; PAM type: YTN; PAM sequence: CTG
catatatcttgggacagact

SEQ ID NO: 323516 - DNA, 20 bp, Artificial Sequence
  Description of Artificial Sequence: Synthetic oligonucleotide
  Target: LAMA2; (+) strand; PAM type: YTN; PAM sequence: CTT
gggacagacttatattttct

SEQ ID NO: 323517 - DNA, 20 bp, Artificial Sequence
  Description of Artificial Sequence: Synthetic oligonucleotide
  Target: LAMA2; (+) strand; PAM type: YTN; PAM sequence: TTG
ggacagacttatattttcta

SEQ ID NO: 323518 - DNA, 20 bp, Artificial Sequence
  Description of Artificial Sequence: Synthetic oligonucleotide
  Target: LAMA2; (+) strand; PAM type: YTN; PAM sequence: CTT
atattttctaaatctgggta

SEQ ID NO: 323519 - DNA, 20 bp, Artificial Sequence
  Description of Artificial Sequence: Synthetic oligonucleotide
  Target: LAMA2; (+) strand; PAM type: YTN; PAM sequence: TTA
tattttctaaatctgggtaa

SEQ ID NO: 323520 - DNA, 20 bp, Artificial Sequence
  Description of Artificial Sequence: Synthetic oligonucleotide
  Target: LAMA2; (+) strand; PAM type: YTN; PAM sequence: TTT
tctaaatctgggtaatgatc

SEQ ID NO: 323521 - DNA, 20 bp, Artificial Sequence
  Description of Artificial Sequence: Synthetic oligonucleotide
  Target: LAMA2; (+) strand; PAM type: YTN; PAM sequence: TTT
ctaaatctgggtaatgatca

SEQ ID NO: 323522 - DNA, 20 bp, Artificial Sequence
  Description of Artificial Sequence: Synthetic oligonucleotide
  Target: LAMA2; (+) strand; PAM type: YTN; PAM sequence: TTC
taaatctgggtaatgatcat

SEQ ID NO: 323523 - DNA, 20 bp, Artificial Sequence
  Description of Artificial Sequence: Synthetic oligonucleotide
  Target: LAMA2; (+) strand; PAM type: YTN; PAM sequence: CTA
aatctgggtaatgatcatac

SEQ ID NO: 323524 - DNA, 20 bp, Artificial Sequence
  Description of Artificial Sequence: Synthetic oligonucleotide
  Target: LAMA2; (+) strand; PAM type: YTN; PAM sequence: CTG
ggtaatgatcatacatgcac

SEQ ID NO: 323525 - DNA, 20 bp, Artificial Sequence
  Description of Artificial Sequence: Synthetic oligonucleotide
  Target: LAMA2; (+) strand; PAM type: YTN; PAM sequence: CTG
aaaagaagaccatcttctcc

SEQ ID NO: 323526 - DNA, 20 bp, Artificial Sequence
  Description of Artificial Sequence: Synthetic oligonucleotide
  Target: LAMA2; (+) strand; PAM type: YTN; PAM sequence: CTT
ctcccagaaatatacaacac

SEQ ID NO: 323527 - DNA, 20 bp, Artificial Sequence
  Description of Artificial Sequence: Synthetic oligonucleotide
  Target: LAMA2; (+) strand; PAM type: YTN; PAM sequence: TTC
tcccagaaatatacaacact

SEQ ID NO: 323528 - DNA, 20 bp, Artificial Sequence
  Description of Artificial Sequence: Synthetic oligonucleotide
  Target: LAMA2; (+) strand; PAM type: YTN; PAM sequence: CTC
ccagaaatatacaacactga

SEQ ID NO: 323529 - DNA, 20 bp, Artificial Sequence
  Description of Artificial Sequence: Synthetic oligonucleotide
  Target: LAMA2; (+) strand; PAM type: YTN; PAM sequence: CTG
aaagattctctaccaaacat

SEQ ID NO: 323530 - DNA, 20 bp, Artificial Sequence
  Description of Artificial Sequence: Synthetic oligonucleotide
  Target: LAMA2; (+) strand; PAM type: YTN; PAM sequence: TTC
tctaccaaacatgcatgaaa

SEQ ID NO: 323531 - DNA, 20 bp, Artificial Sequence
  Description of Artificial Sequence: Synthetic oligonucleotide
  Target: LAMA2; (+) strand; PAM type: YTN; PAM sequence: CTC
taccaaacatgcatgaaaag

SEQ ID NO: 323532 - DNA, 20 bp, Artificial Sequence
  Description of Artificial Sequence: Synthetic oligonucleotide
  Target: LAMA2; (+) strand; PAM type: YTN; PAM sequence: CTA
ccaaacatgcatgaaaagat

SEQ ID NO: 323533 - DNA, 20 bp, Artificial Sequence
  Description of Artificial Sequence: Synthetic oligonucleotide
  Target: LAMA2; (+) strand; PAM type: YTN; PAM sequence: TTT
ctttaatttgtttctttcct

SEQ ID NO: 323534 - DNA, 20 bp, Artificial Sequence
  Description of Artificial Sequence: Synthetic oligonucleotide
  Target: LAMA2; (+) strand; PAM type: YTN; PAM sequence: TTC
tttaatttgtttctttcctc

SEQ ID NO: 323535 - DNA, 20 bp, Artificial Sequence
  Description of Artificial Sequence: Synthetic oligonucleotide
  Target: LAMA2; (+) strand; PAM type: YTN; PAM sequence: CTT
taatttgtttctttcctctt

SEQ ID NO: 323536 - DNA, 20 bp, Artificial Sequence
  Description of Artificial Sequence: Synthetic oligonucleotide
  Target: LAMA2; (+) strand; PAM type: YTN; PAM sequence: TTT
aatttgtttctttcctcttt

SEQ ID NO: 323537 - DNA, 20 bp, Artificial Sequence
  Description of Artificial Sequence: Synthetic oligonucleotide
  Target: LAMA2; (+) strand; PAM type: YTN; PAM sequence: TTA
atttgtttctttcctctttc

SEQ ID NO: 323538 - DNA, 20 bp, Artificial Sequence
  Description of Artificial Sequence: Synthetic oligonucleotide
  Target: LAMA2; (+) strand; PAM type: YTN; PAM sequence: TTT
gtttctttcctctttcgttt

SEQ ID NO: 323539 - DNA, 20 bp, Artificial Sequence
  Description of Artificial Sequence: Synthetic oligonucleotide
  Target: LAMA2; (+) strand; PAM type: YTN; PAM sequence: TTG
tttctttcctctttcgttta

SEQ ID NO: 323540 - DNA, 20 bp, Artificial Sequence
  Description of Artificial Sequence: Synthetic oligonucleotide
  Target: LAMA2; (+) strand; PAM type: YTN; PAM sequence: TTT
ctttcctctttcgtttaggt

SEQ ID NO: 323541 - DNA, 20 bp, Artificial Sequence
  Description of Artificial Sequence: Synthetic oligonucleotide
  Target: LAMA2; (+) strand; PAM type: YTN; PAM sequence: TTC
tttcctctttcgtttaggtg

SEQ ID NO: 323542 - DNA, 20 bp, Artificial Sequence
  Description of Artificial Sequence: Synthetic oligonucleotide
  Target: LAMA2; (+) strand; PAM type: YTN; PAM sequence: CTT
tcctctttcgtttaggtgaa

SEQ ID NO: 323543 - DNA, 20 bp, Artificial Sequence
  Description of Artificial Sequence: Synthetic oligonucleotide
  Target: LAMA2; (+) strand; PAM type: YTN; PAM sequence: TTT
cctctttcgtttaggtgaaa

SEQ ID NO: 323544 - DNA, 20 bp, Artificial Sequence
  Description of Artificial Sequence: Synthetic oligonucleotide
  Target: LAMA2; (+) strand; PAM type: YTN; PAM sequence: TTC
ctctttcgtttaggtgaaat

SEQ ID NO: 323545 - DNA, 20 bp, Artificial Sequence
  Description of Artificial Sequence: Synthetic oligonucleotide
  Target: LAMA2; (+) strand; PAM type: YTN; PAM sequence: CTC
tttcgtttaggtgaaataga

SEQ ID NO: 323546 - DNA, 20 bp, Artificial Sequence
  Description of Artificial Sequence: Synthetic oligonucleotide
  Target: LAMA2; (+) strand; PAM type: YTN; PAM sequence: CTT
tcgtttaggtgaaatagagg

SEQ ID NO: 323547 - DNA, 20 bp, Artificial Sequence
  Description of Artificial Sequence: Synthetic oligonucleotide
  Target: LAMA2; (+) strand; PAM type: YTN; PAM sequence: TTT
cgtttaggtgaaatagagga

SEQ ID NO: 323548 - DNA, 20 bp, Artificial Sequence
  Description of Artificial Sequence: Synthetic oligonucleotide
  Target: LAMA2; (+) strand; PAM type: YTN; PAM sequence: TTC
gtttaggtgaaatagaggat

SEQ ID NO: 323549 - DNA, 20 bp, Artificial Sequence
  Description of Artificial Sequence: Synthetic oligonucleotide
  Target: LAMA2; (+) strand; PAM type: YTN; PAM sequence: TTT
aggtgaaatagaggatacag

SEQ ID NO: 323550 - DNA, 20 bp, Artificial Sequence
  Description of Artificial Sequence: Synthetic oligonucleotide
  Target: LAMA2; (+) strand; PAM type: YTN; PAM sequence: TTA
ggtgaaatagaggatacagc

SEQ ID NO: 323551 - DNA, 20 bp, Artificial Sequence
  Description of Artificial Sequence: Synthetic oligonucleotide
  Target: LAMA2; (+) strand; PAM type: YTN; PAM sequence: CTC
tgatcattagaatttcatat

SEQ ID NO: 323552 - DNA, 20 bp, Artificial Sequence
  Description of Artificial Sequence: Synthetic oligonucleotide
  Target: LAMA2; (+) strand; PAM type: YTN; PAM sequence: CTG
atcattagaatttcatatgg

SEQ ID NO: 323553 - DNA, 20 bp, Artificial Sequence
  Description of Artificial Sequence: Synthetic oligonucleotide
  Target: LAMA2; (+) strand; PAM type: YTN; PAM sequence: TTA
gaatttcatatggcaaacgc

SEQ ID NO: 323554 - DNA, 20 bp, Artificial Sequence
  Description of Artificial Sequence: Synthetic oligonucleotide
  Target: LAMA2; (+) strand; PAM type: YTN; PAM sequence: TTT
catatggcaaacgctcacac

SEQ ID NO: 323555 - DNA, 20 bp, Artificial Sequence
  Description of Artificial Sequence: Synthetic oligonucleotide
  Target: LAMA2; (+) strand; PAM type: YTN; PAM sequence: TTC
atatggcaaacgctcacaca

SEQ ID NO: 323556 - DNA, 20 bp, Artificial Sequence
  Description of Artificial Sequence: Synthetic oligonucleotide
  Target: LAMA2; (+) strand; PAM type: YTN; PAM sequence: CTC
acacacatagtggatttgag

SEQ ID NO: 323557 - DNA, 20 bp, Artificial Sequence
  Description of Artificial Sequence: Synthetic oligonucleotide
  Target: LAMA2; (+) strand; PAM type: YTN; PAM sequence: TTT
gaggaaatcaattttcacta

SEQ ID NO: 323558 - DNA, 20 bp, Artificial Sequence
  Description of Artificial Sequence: Synthetic oligonucleotide
  Target: LAMA2; (+) strand; PAM type: YTN; PAM sequence: TTG
aggaaatcaattttcactaa

SEQ ID NO: 323559 - DNA, 20 bp, Artificial Sequence
  Description of Artificial Sequence: Synthetic oligonucleotide
  Target: LAMA2; (+) strand; PAM type: YTN; PAM sequence: TTT
tcactaatctagaaaattct

SEQ ID NO: 323560 - DNA, 20 bp, Artificial Sequence
  Description of Artificial Sequence: Synthetic oligonucleotide
  Target: LAMA2; (+) strand; PAM type: YTN; PAM sequence: TTT
cactaatctagaaaattctc

SEQ ID NO: 323561 - DNA, 20 bp, Artificial Sequence
  Description of Artificial Sequence: Synthetic oligonucleotide
  Target: LAMA2; (+) strand; PAM type: YTN; PAM sequence: TTC
actaatctagaaaattctct

SEQ ID NO: 323562 - DNA, 20 bp, Artificial Sequence
  Description of Artificial Sequence: Synthetic oligonucleotide
  Target: LAMA2; (+) strand; PAM type: YTN; PAM sequence: CTA
atctagaaaattctctcctc

SEQ ID NO: 323563 - DNA, 20 bp, Artificial Sequence
  Description of Artificial Sequence: Synthetic oligonucleotide
  Target: LAMA2; (+) strand; PAM type: YTN; PAM sequence: CTA
gaaaattctctcctcaagag

SEQ ID NO: 323564 - DNA, 20 bp, Artificial Sequence
  Description of Artificial Sequence: Synthetic oligonucleotide
  Target: LAMA2; (+) strand; PAM type: YTN; PAM sequence: TTC
tctcctcaagagaaaaggga

SEQ ID NO: 323565 - DNA, 20 bp, Artificial Sequence
  Description of Artificial Sequence: Synthetic oligonucleotide
  Target: LAMA2; (+) strand; PAM type: YTN; PAM sequence: CTC
tcctcaagagaaaagggatt

SEQ ID NO: 323566 - DNA, 20 bp, Artificial Sequence
  Description of Artificial Sequence: Synthetic oligonucleotide
  Target: LAMA2; (+) strand; PAM type: YTN; PAM sequence: CTC
ctcaagagaaaagggattta

SEQ ID NO: 323567 - DNA, 20 bp, Artificial Sequence
  Description of Artificial Sequence: Synthetic oligonucleotide
  Target: LAMA2; (+) strand; PAM type: YTN; PAM sequence: CTC
aagagaaaagggatttaaaa

SEQ ID NO: 323568 - DNA, 20 bp, Artificial Sequence
  Description of Artificial Sequence: Synthetic oligonucleotide
  Target: LAMA2; (+) strand; PAM type: YTN; PAM sequence: TTT
aaaaactttcatgatgtatt

SEQ ID NO: 323569 - DNA, 20 bp, Artificial Sequence
  Description of Artificial Sequence: Synthetic oligonucleotide
  Target: LAMA2; (+) strand; PAM type: YTN; PAM sequence: TTA
aaaactttcatgatgtattt

SEQ ID NO: 323570 - DNA, 20 bp, Artificial Sequence
  Description of Artificial Sequence: Synthetic oligonucleotide
  Target: LAMA2; (+) strand; PAM type: YTN; PAM sequence: CTT
tcatgatgtatttaaattca

SEQ ID NO: 323571 - DNA, 20 bp, Artificial Sequence
  Description of Artificial Sequence: Synthetic oligonucleotide
  Target: LAMA2; (+) strand; PAM type: YTN; PAM sequence: TTT
catgatgtatttaaattcaa

SEQ ID NO: 323572 - DNA, 20 bp, Artificial Sequence
  Description of Artificial Sequence: Synthetic oligonucleotide
  Target: LAMA2; (+) strand; PAM type: YTN; PAM sequence: TTC
atgatgtatttaaattcaac

SEQ ID NO: 323573 - DNA, 20 bp, Artificial Sequence
  Description of Artificial Sequence: Synthetic oligonucleotide
  Target: LAMA2; (+) strand; PAM type: YTN; PAM sequence: TTT
aaattcaacatatcttttgc

SEQ ID NO: 323574 - DNA, 20 bp, Artificial Sequence
  Description of Artificial Sequence: Synthetic oligonucleotide
  Target: LAMA2; (+) strand; PAM type: YTN; PAM sequence: TTA
aattcaacatatcttttgcc

SEQ ID NO: 323575 - DNA, 20 bp, Artificial Sequence
  Description of Artificial Sequence: Synthetic oligonucleotide
  Target: LAMA2; (+) strand; PAM type: YTN; PAM sequence: TTC
aacatatcttttgcctactt

SEQ ID NO: 323576 - DNA, 20 bp, Artificial Sequence
  Description of Artificial Sequence: Synthetic oligonucleotide
  Target: LAMA2; (+) strand; PAM type: YTN; PAM sequence: CTT
ttgcctactttaaataggga

SEQ ID NO: 323577 - DNA, 20 bp, Artificial Sequence
  Description of Artificial Sequence: Synthetic oligonucleotide
  Target: LAMA2; (+) strand; PAM type: YTN; PAM sequence: TTT
tgcctactttaaatagggaa

SEQ ID NO: 323578 - DNA, 20 bp, Artificial Sequence
  Description of Artificial Sequence: Synthetic oligonucleotide
  Target: LAMA2; (+) strand; PAM type: YTN; PAM sequence: TTT
gcctactttaaatagggaaa

SEQ ID NO: 323579 - DNA, 20 bp, Artificial Sequence
  Description of Artificial Sequence: Synthetic oligonucleotide
  Target: LAMA2; (+) strand; PAM type: YTN; PAM sequence: TTG
cctactttaaatagggaaaa

SEQ ID NO: 323580 - DNA, 20 bp, Artificial Sequence
  Description of Artificial Sequence: Synthetic oligonucleotide
  Target: LAMA2; (+) strand; PAM type: YTN; PAM sequence: CTA
ctttaaatagggaaaaggtg

SEQ ID NO: 323581 - DNA, 20 bp, Artificial Sequence
  Description of Artificial Sequence: Synthetic oligonucleotide
  Target: LAMA2; (+) strand; PAM type: YTN; PAM sequence: CTT
taaatagggaaaaggtgact

SEQ ID NO: 323582 - DNA, 20 bp, Artificial Sequence
  Description of Artificial Sequence: Synthetic oligonucleotide
  Target: LAMA2; (+) strand; PAM type: YTN; PAM sequence: TTT
aaatagggaaaaggtgactc

SEQ ID NO: 323583 - DNA, 20 bp, Artificial Sequence
  Description of Artificial Sequence: Synthetic oligonucleotide
  Target: LAMA2; (+) strand; PAM type: YTN; PAM sequence: TTA
aatagggaaaaggtgactct

SEQ ID NO: 323584 - DNA, 20 bp, Artificial Sequence
  Description of Artificial Sequence: Synthetic oligonucleotide
  Target: LAMA2; (+) strand; PAM type: YTN; PAM sequence: CTC
taaggtcataacgtgaaatt

SEQ ID NO: 323585 - DNA, 20 bp, Artificial Sequence
  Description of Artificial Sequence: Synthetic oligonucleotide
  Target: LAMA2; (+) strand; PAM type: YTN; PAM sequence: CTA
aggtcataacgtgaaattga

SEQ ID NO: 323586 - DNA, 20 bp, Artificial Sequence
  Description of Artificial Sequence: Synthetic oligonucleotide
  Target: LAMA2; (+) strand; PAM type: YTN; PAM sequence: TTG
actttacccttcctggtata

SEQ ID NO: 323587 - DNA, 20 bp, Artificial Sequence
  Description of Artificial Sequence: Synthetic oligonucleotide
  Target: LAMA2; (+) strand; PAM type: YTN; PAM sequence: CTT
tacccttcctggtatagaat

SEQ ID NO: 323588 - DNA, 20 bp, Artificial Sequence
  Description of Artificial Sequence: Synthetic oligonucleotide
  Target: LAMA2; (+) strand; PAM type: YTN; PAM sequence: TTT
acccttcctggtatagaatg

SEQ ID NO: 323589 - DNA, 20 bp, Artificial Sequence
  Description of Artificial Sequence: Synthetic oligonucleotide
  Target: LAMA2; (+) strand; PAM type: YTN; PAM sequence: TTA
cccttcctggtatagaatgg

SEQ ID NO: 323590 - DNA, 20 bp, Artificial Sequence
  Description of Artificial Sequence: Synthetic oligonucleotide
  Target: LAMA2; (+) strand; PAM type: YTN; PAM sequence: CTT
cctggtatagaatggcattt

SEQ ID NO: 323591 - DNA, 20 bp, Artificial Sequence
  Description of Artificial Sequence: Synthetic oligonucleotide
  Target: LAMA2; (+) strand; PAM type: YTN; PAM sequence: TTC
ctggtatagaatggcatttc

SEQ ID NO: 323592 - DNA, 20 bp, Artificial Sequence
  Description of Artificial Sequence: Synthetic oligonucleotide
  Target: LAMA2; (+) strand; PAM type: YTN; PAM sequence: CTG
gtatagaatggcatttcaca

SEQ ID NO: 323593 - DNA, 20 bp, Artificial Sequence
  Description of Artificial Sequence: Synthetic oligonucleotide
  Target: LAMA2; (+) strand; PAM type: YTN; PAM sequence: TTT
cacattgagaaaaactaggg

SEQ ID NO: 323594 - DNA, 20 bp, Artificial Sequence
  Description of Artificial Sequence: Synthetic oligonucleotide
  Target: LAMA2; (+) strand; PAM type: YTN; PAM sequence: TTC
acattgagaaaaactaggga

SEQ ID NO: 323595 - DNA, 20 bp, Artificial Sequence
  Description of Artificial Sequence: Synthetic oligonucleotide
  Target: LAMA2; (+) strand; PAM type: YTN; PAM sequence: TTG
agaaaaactagggagaagca

SEQ ID NO: 323596 - DNA, 20 bp, Artificial Sequence
  Description of Artificial Sequence: Synthetic oligonucleotide
  Target: LAMA2; (+) strand; PAM type: YTN; PAM sequence: CTA
gggagaagcactgaagaatt

SEQ ID NO: 323597 - DNA, 20 bp, Artificial Sequence
  Description of Artificial Sequence: Synthetic oligonucleotide
  Target: LAMA2; (+) strand; PAM type: YTN; PAM sequence: CTG
aagaattaatgggcagtggg

SEQ ID NO: 323598 - DNA, 20 bp, Artificial Sequence
  Description of Artificial Sequence: Synthetic oligonucleotide
  Target: LAMA2; (+) strand; PAM type: YTN; PAM sequence: TTA
atgggcagtggggagagaaa

SEQ ID NO: 323599 - DNA, 20 bp, Artificial Sequence
  Description of Artificial Sequence: Synthetic oligonucleotide
  Target: LAMA2; (+) strand; PAM type: YTN; PAM sequence: TTC
attactttattatttgtcgt

SEQ ID NO: 323600 - DNA, 20 bp, Artificial Sequence
  Description of Artificial Sequence: Synthetic oligonucleotide
  Target: LAMA2; (+) strand; PAM type: YTN; PAM sequence: TTA
ctttattatttgtcgtggta

SEQ ID NO: 323601 - DNA, 20 bp, Artificial Sequence
  Description of Artificial Sequence: Synthetic oligonucleotide
  Target: LAMA2; (+) strand; PAM type: YTN; PAM sequence: CTT
tattatttgtcgtggtaaca

SEQ ID NO: 323602 - DNA, 20 bp, Artificial Sequence
  Description of Artificial Sequence: Synthetic oligonucleotide
  Target: LAMA2; (+) strand; PAM type: YTN; PAM sequence: TTT
attatttgtcgtggtaacac

SEQ ID NO: 323603 - DNA, 20 bp, Artificial Sequence
  Description of Artificial Sequence: Synthetic oligonucleotide
  Target: LAMA2; (+) strand; PAM type: YTN; PAM sequence: TTA
ttatttgtcgtggtaacaca

SEQ ID NO: 323604 - DNA, 20 bp, Artificial Sequence
  Description of Artificial Sequence: Synthetic oligonucleotide
  Target: LAMA2; (+) strand; PAM type: YTN; PAM sequence: TTA
tttgtcgtggtaacacatac

SEQ ID NO: 323605 - DNA, 20 bp, Artificial Sequence
  Description of Artificial Sequence: Synthetic oligonucleotide
  Target: LAMA2; (+) strand; PAM type: YTN; PAM sequence: TTT
gtcgtggtaacacatacttt

SEQ ID NO: 323606 - DNA, 20 bp, Artificial Sequence
  Description of Artificial Sequence: Synthetic oligonucleotide
  Target: LAMA2; (+) strand; PAM type: YTN; PAM sequence: TTG
tcgtggtaacacatacttta

SEQ ID NO: 323607 - DNA, 20 bp, Artificial Sequence
  Description of Artificial Sequence: Synthetic oligonucleotide
  Target: LAMA2; (+) strand; PAM type: YTN; PAM sequence: CTT
tatacaatctatcactccta

SEQ ID NO: 323608 - DNA, 20 bp, Artificial Sequence
  Description of Artificial Sequence: Synthetic oligonucleotide
  Target: LAMA2; (+) strand; PAM type: YTN; PAM sequence: TTT
atacaatctatcactcctac

SEQ ID NO: 323609 - DNA, 20 bp, Artificial Sequence
  Description of Artificial Sequence: Synthetic oligonucleotide
  Target: LAMA2; (+) strand; PAM type: YTN; PAM sequence: TTA
tacaatctatcactcctact

SEQ ID NO: 323610 - DNA, 20 bp, Artificial Sequence
  Description of Artificial Sequence: Synthetic oligonucleotide
  Target: LAMA2; (+) strand; PAM type: YTN; PAM sequence: CTA
tcactcctacttgtccaaat

SEQ ID NO: 323611 - DNA, 20 bp, Artificial Sequence
  Description of Artificial Sequence: Synthetic oligonucleotide
  Target: LAMA2; (+) strand; PAM type: YTN; PAM sequence: CTC
ctacttgtccaaatatgtgt

SEQ ID NO: 323612 - DNA, 20 bp, Artificial Sequence
  Description of Artificial Sequence: Synthetic oligonucleotide
  Target: LAMA2; (+) strand; PAM type: YTN; PAM sequence: CTA
cttgtccaaatatgtgtttc

SEQ ID NO: 323613 - DNA, 20 bp, Artificial Sequence
  Description of Artificial Sequence: Synthetic oligonucleotide
  Target: LAMA2; (+) strand; PAM type: YTN; PAM sequence: CTT
gtccaaatatgtgtttctcc

SEQ ID NO: 323614 - DNA, 20 bp, Artificial Sequence
  Description of Artificial Sequence: Synthetic oligonucleotide
  Target: LAMA2; (+) strand; PAM type: YTN; PAM sequence: TTG
tccaaatatgtgtttctcct

SEQ ID NO: 323615 - DNA, 20 bp, Artificial Sequence
  Description of Artificial Sequence: Synthetic oligonucleotide
  Target: LAMA2; (+) strand; PAM type: YTN; PAM sequence: TTT
ctcctgaggtaaaatttcaa

SEQ ID NO: 323616 - DNA, 20 bp, Artificial Sequence
  Description of Artificial Sequence: Synthetic oligonucleotide
  Target: LAMA2; (+) strand; PAM type: YTN; PAM sequence: TTC
tcctgaggtaaaatttcaaa

SEQ ID NO: 323617 - DNA, 20 bp, Artificial Sequence
  Description of Artificial Sequence: Synthetic oligonucleotide
  Target: LAMA2; (+) strand; PAM type: YTN; PAM sequence: CTC
ctgaggtaaaatttcaaaaa

SEQ ID NO: 323618 - DNA, 20 bp, Artificial Sequence
  Description of Artificial Sequence: Synthetic oligonucleotide
  Target: LAMA2; (+) strand; PAM type: YTN; PAM sequence: CTG
aggtaaaatttcaaaaattc

SEQ ID NO: 323619 - DNA, 20 bp, Artificial Sequence
  Description of Artificial Sequence: Synthetic oligonucleotide
  Target: LAMA2; (+) strand; PAM type: YTN; PAM sequence: TTT
caaaaattctagatgatgtt

SEQ ID NO: 323620 - DNA, 20 bp, Artificial Sequence
  Description of Artificial Sequence: Synthetic oligonucleotide
  Target: LAMA2; (+) strand; PAM type: YTN; PAM sequence: TTC
aaaaattctagatgatgttt

SEQ ID NO: 323621 - DNA, 20 bp, Artificial Sequence
  Description of Artificial Sequence: Synthetic oligonucleotide
  Target: LAMA2; (+) strand; PAM type: YTN; PAM sequence: TTC
tagatgatgttttggaggtt

SEQ ID NO: 323622 - DNA, 20 bp, Artificial Sequence
  Description of Artificial Sequence: Synthetic oligonucleotide
  Target: LAMA2; (+) strand; PAM type: YTN; PAM sequence: CTA
gatgatgttttggaggttct

SEQ ID NO: 323623 - DNA, 20 bp, Artificial Sequence
  Description of Artificial Sequence: Synthetic oligonucleotide
  Target: LAMA2; (+) strand; PAM type: YTN; PAM sequence: TTT
tggaggttctgtagagaagg

SEQ ID NO: 323624 - DNA, 20 bp, Artificial Sequence
  Description of Artificial Sequence: Synthetic oligonucleotide
  Target: LAMA2; (+) strand; PAM type: YTN; PAM sequence: TTT
ggaggttctgtagagaaggt

SEQ ID NO: 323625 - DNA, 20 bp, Artificial Sequence
  Description of Artificial Sequence: Synthetic oligonucleotide
  Target: LAMA2; (+) strand; PAM type: YTN; PAM sequence: TTG
gaggttctgtagagaaggtg

SEQ ID NO: 323626 - DNA, 20 bp, Artificial Sequence
  Description of Artificial Sequence: Synthetic oligonucleotide
  Target: LAMA2; (+) strand; PAM type: YTN; PAM sequence: TTC
tgtagagaaggtgaatggta

SEQ ID NO: 323627 - DNA, 20 bp, Artificial Sequence
  Description of Artificial Sequence: Synthetic oligonucleotide
  Target: LAMA2; (+) strand; PAM type: YTN; PAM sequence: CTG
tagagaaggtgaatggtata

SEQ ID NO: 323628 - DNA, 20 bp, Artificial Sequence
  Description of Artificial Sequence: Synthetic oligonucleotide
  Target: LAMA2; (+) strand; PAM type: YTN; PAM sequence: CTA
aagcaaatcttgtatgattt

SEQ ID NO: 323629 - DNA, 20 bp, Artificial Sequence
  Description of Artificial Sequence: Synthetic oligonucleotide
  Target: LAMA2; (+) strand; PAM type: YTN; PAM sequence: CTT
gtatgatttttttatttaat

SEQ ID NO: 323630 - DNA, 20 bp, Artificial Sequence
  Description of Artificial Sequence: Synthetic oligonucleotide
  Target: LAMA2; (+) strand; PAM type: YTN; PAM sequence: TTG
tatgatttttttatttaata

SEQ ID NO: 323631 - DNA, 20 bp, Artificial Sequence
  Description of Artificial Sequence: Synthetic oligonucleotide
  Target: LAMA2; (+) strand; PAM type: YTN; PAM sequence: TTT
ttttatttaatatgtttact

SEQ ID NO: 323632 - DNA, 20 bp, Artificial Sequence
  Description of Artificial Sequence: Synthetic oligonucleotide
  Target: LAMA2; (+) strand; PAM type: YTN; PAM sequence: TTT
tttatttaatatgtttactt

SEQ ID NO: 323633 - DNA, 20 bp, Artificial Sequence
  Description of Artificial Sequence: Synthetic oligonucleotide
  Target: LAMA2; (+) strand; PAM type: YTN; PAM sequence: TTT
ttatttaatatgtttacttc

SEQ ID NO: 323634 - DNA, 20 bp, Artificial Sequence
  Description of Artificial Sequence: Synthetic oligonucleotide
  Target: LAMA2; (+) strand; PAM type: YTN; PAM sequence: TTT
tatttaatatgtttacttcc

SEQ ID NO: 323635 - DNA, 20 bp, Artificial Sequence
  Description of Artificial Sequence: Synthetic oligonucleotide
  Target: LAMA2; (+) strand; PAM type: YTN; PAM sequence: TTT
atttaatatgtttacttcct

SEQ ID NO: 323636 - DNA, 20 bp, Artificial Sequence
  Description of Artificial Sequence: Synthetic oligonucleotide
  Target: LAMA2; (+) strand; PAM type: YTN; PAM sequence: TTA
tttaatatgtttacttccta

SEQ ID NO: 323637 - DNA, 20 bp, Artificial Sequence
  Description of Artificial Sequence: Synthetic oligonucleotide
  Target: LAMA2; (+) strand; PAM type: YTN; PAM sequence: TTT
aatatgtttacttcctatac

SEQ ID NO: 323638 - DNA, 20 bp, Artificial Sequence
  Description of Artificial Sequence: Synthetic oligonucleotide
  Target: LAMA2; (+) strand; PAM type: YTN; PAM sequence: TTA
atatgtttacttcctatacc

SEQ ID NO: 323639 - DNA, 20 bp, Artificial Sequence
  Description of Artificial Sequence: Synthetic oligonucleotide
  Target: LAMA2; (+) strand; PAM type: YTN; PAM sequence: TTT
acttcctatacctatgtctt

SEQ ID NO: 323640 - DNA, 20 bp, Artificial Sequence
  Description of Artificial Sequence: Synthetic oligonucleotide
  Target: LAMA2; (+) strand; PAM type: YTN; PAM sequence: TTA
cttcctatacctatgtcttt

SEQ ID NO: 323641 - DNA, 20 bp, Artificial Sequence
  Description of Artificial Sequence: Synthetic oligonucleotide
  Target: LAMA2; (+) strand; PAM type: YTN; PAM sequence: CTT
cctatacctatgtctttact

SEQ ID NO: 323642 - DNA, 20 bp, Artificial Sequence
  Description of Artificial Sequence: Synthetic oligonucleotide
  Target: LAMA2; (+) strand; PAM type: YTN; PAM sequence: TTC
ctatacctatgtctttactg

SEQ ID NO: 323643 - DNA, 20 bp, Artificial Sequence
  Description of Artificial Sequence: Synthetic oligonucleotide
  Target: LAMA2; (+) strand; PAM type: YTN; PAM sequence: CTA
tacctatgtctttactgtgt

SEQ ID NO: 323644 - DNA, 20 bp, Artificial Sequence
  Description of Artificial Sequence: Synthetic oligonucleotide
  Target: LAMA2; (+) strand; PAM type: YTN; PAM sequence: CTA
tgtctttactgtgtatacat

SEQ ID NO: 323645 - DNA, 20 bp, Artificial Sequence
  Description of Artificial Sequence: Synthetic oligonucleotide
  Target: LAMA2; (+) strand; PAM type: YTN; PAM sequence: CTT
tactgtgtatacatatacac

SEQ ID NO: 323646 - DNA, 20 bp, Artificial Sequence
  Description of Artificial Sequence: Synthetic oligonucleotide
  Target: LAMA2; (+) strand; PAM type: YTN; PAM sequence: TTT
actgtgtatacatatacacc

SEQ ID NO: 323647 - DNA, 20 bp, Artificial Sequence
  Description of Artificial Sequence: Synthetic oligonucleotide
  Target: LAMA2; (+) strand; PAM type: YTN; PAM sequence: TTA
ctgtgtatacatatacaccc

SEQ ID NO: 323648 - DNA, 20 bp, Artificial Sequence
  Description of Artificial Sequence: Synthetic oligonucleotide
  Target: LAMA2; (+) strand; PAM type: YTN; PAM sequence: CTG
tgtatacatatacacccata

SEQ ID NO: 323649 - DNA, 20 bp, Artificial Sequence
  Description of Artificial Sequence: Synthetic oligonucleotide
  Target: LAMA2; (+) strand; PAM type: YTN; PAM sequence: CTA
tatattcgcgtgttcacttt

SEQ ID NO: 323650 - DNA, 20 bp, Artificial Sequence
  Description of Artificial Sequence: Synthetic oligonucleotide
  Target: LAMA2; (+) strand; PAM type: YTN; PAM sequence: TTC
gcgtgttcacttttgatttc

SEQ ID NO: 323651 - DNA, 20 bp, Artificial Sequence
  Description of Artificial Sequence: Synthetic oligonucleotide
  Target: LAMA2; (+) strand; PAM type: YTN; PAM sequence: TTC
acttttgatttcaaatttta

SEQ ID NO: 323652 - DNA, 20 bp, Artificial Sequence
  Description of Artificial Sequence: Synthetic oligonucleotide
  Target: LAMA2; (+) strand; PAM type: YTN; PAM sequence: CTT
ttgatttcaaattttatttg

SEQ ID NO: 323653 - DNA, 20 bp, Artificial Sequence
  Description of Artificial Sequence: Synthetic oligonucleotide
  Target: LAMA2; (+) strand; PAM type: YTN; PAM sequence: TTT
tgatttcaaattttatttgt

SEQ ID NO: 323654 - DNA, 20 bp, Artificial Sequence
  Description of Artificial Sequence: Synthetic oligonucleotide
  Target: LAMA2; (+) strand; PAM type: YTN; PAM sequence: TTT
gatttcaaattttatttgtg

SEQ ID NO: 323655 - DNA, 20 bp, Artificial Sequence
  Description of Artificial Sequence: Synthetic oligonucleotide
  Target: LAMA2; (+) strand; PAM type: YTN; PAM sequence: TTG
atttcaaattttatttgtga

SEQ ID NO: 323656 - DNA, 20 bp, Artificial Sequence
  Description of Artificial Sequence: Synthetic oligonucleotide
  Target: LAMA2; (+) strand; PAM type: YTN; PAM sequence: TTT
caaattttatttgtgaaaaa

SEQ ID NO: 323657 - DNA, 20 bp, Artificial Sequence
  Description of Artificial Sequence: Synthetic oligonucleotide
  Target: LAMA2; (+) strand; PAM type: YTN; PAM sequence: TTC
aaattttatttgtgaaaaaa

SEQ ID NO: 323658 - DNA, 20 bp, Artificial Sequence
  Description of Artificial Sequence: Synthetic oligonucleotide
  Target: LAMA2; (+) strand; PAM type: YTN; PAM sequence: TTT
tatttgtgaaaaaagcagat

SEQ ID NO: 323659 - DNA, 20 bp, Artificial Sequence
  Description of Artificial Sequence: Synthetic oligonucleotide
  Target: LAMA2; (+) strand; PAM type: YTN; PAM sequence: TTT
atttgtgaaaaaagcagatt

SEQ ID NO: 323660 - DNA, 20 bp, Artificial Sequence
  Description of Artificial Sequence: Synthetic oligonucleotide
  Target: LAMA2; (+) strand; PAM type: YTN; PAM sequence: TTA
tttgtgaaaaaagcagattt

SEQ ID NO: 323661 - DNA, 20 bp, Artificial Sequence
  Description of Artificial Sequence: Synthetic oligonucleotide
  Target: LAMA2; (+) strand; PAM type: YTN; PAM sequence: TTT
gtgaaaaaagcagatttatt

SEQ ID NO: 323662 - DNA, 20 bp, Artificial Sequence
  Description of Artificial Sequence: Synthetic oligonucleotide
  Target: LAMA2; (+) strand; PAM type: YTN; PAM sequence: TTG
tgaaaaaagcagatttattc

SEQ ID NO: 323663 - DNA, 20 bp, Artificial Sequence
  Description of Artificial Sequence: Synthetic oligonucleotide
  Target: LAMA2; (+) strand; PAM type: YTN; PAM sequence: TTT
attcttttttttctttgaga

SEQ ID NO: 323664 - DNA, 20 bp, Artificial Sequence
  Description of Artificial Sequence: Synthetic oligonucleotide
  Target: LAMA2; (+) strand; PAM type: YTN; PAM sequence: TTA
ttcttttttttctttgagat

SEQ ID NO: 323665 - DNA, 20 bp, Artificial Sequence
  Description of Artificial Sequence: Synthetic oligonucleotide
  Target: LAMA2; (+) strand; PAM type: YTN; PAM sequence: TTC
ttttttttctttgagatgga

SEQ ID NO: 323666 - DNA, 20 bp, Artificial Sequence
  Description of Artificial Sequence: Synthetic oligonucleotide
  Target: LAMA2; (+) strand; PAM type: YTN; PAM sequence: CTT
ttttttctttgagatggagt

SEQ ID NO: 323667 - DNA, 20 bp, Artificial Sequence
  Description of Artificial Sequence: Synthetic oligonucleotide
  Target: LAMA2; (+) strand; PAM type: YTN; PAM sequence: TTT
tttttctttgagatggagtc

SEQ ID NO: 323668 - DNA, 20 bp, Artificial Sequence
  Description of Artificial Sequence: Synthetic oligonucleotide
  Target: LAMA2; (+) strand; PAM type: YTN; PAM sequence: TTT
ttttctttgagatggagtct

SEQ ID NO: 323669 - DNA, 20 bp, Artificial Sequence
  Description of Artificial Sequence: Synthetic oligonucleotide
  Target: LAMA2; (+) strand; PAM type: YTN; PAM sequence: TTT
tttctttgagatggagtctc

SEQ ID NO: 323670 - DNA, 20 bp, Artificial Sequence
  Description of Artificial Sequence: Synthetic oligonucleotide
  Target: LAMA2; (+) strand; PAM type: YTN; PAM sequence: TTT
ttctttgagatggagtctcg

SEQ ID NO: 323671 - DNA, 20 bp, Artificial Sequence
  Description of Artificial Sequence: Synthetic oligonucleotide
  Target: LAMA2; (+) strand; PAM type: YTN; PAM sequence: TTT
tctttgagatggagtctcgc

SEQ ID NO: 323672 - DNA, 20 bp, Artificial Sequence
  Description of Artificial Sequence: Synthetic oligonucleotide
  Target: LAMA2; (+) strand; PAM type: YTN; PAM sequence: TTT
ctttgagatggagtctcgct

SEQ ID NO: 323673 - DNA, 20 bp, Artificial Sequence
  Description of Artificial Sequence: Synthetic oligonucleotide
  Target: LAMA2; (+) strand; PAM type: YTN; PAM sequence: TTC
tttgagatggagtctcgctc

SEQ ID NO: 323674 - DNA, 20 bp, Artificial Sequence
  Description of Artificial Sequence: Synthetic oligonucleotide
  Target: LAMA2; (+) strand; PAM type: YTN; PAM sequence: CTT
tgagatggagtctcgctctg

SEQ ID NO: 323675 - DNA, 20 bp, Artificial Sequence
  Description of Artificial Sequence: Synthetic oligonucleotide
  Target: LAMA2; (+) strand; PAM type: YTN; PAM sequence: TTT
gagatggagtctcgctctgt

SEQ ID NO: 323676 - DNA, 20 bp, Artificial Sequence
  Description of Artificial Sequence: Synthetic oligonucleotide
  Target: LAMA2; (+) strand; PAM type: YTN; PAM sequence: TTG
agatggagtctcgctctgtc

SEQ ID NO: 323677 - DNA, 20 bp, Artificial Sequence
  Description of Artificial Sequence: Synthetic oligonucleotide
  Target: LAMA2; (+) strand; PAM type: YTN; PAM sequence: CTC
gctctgtcaccccctggctg

SEQ ID NO: 323678 - DNA, 20 bp, Artificial Sequence
  Description of Artificial Sequence: Synthetic oligonucleotide
  Target: LAMA2; (+) strand; PAM type: YTN; PAM sequence: CTC
tgtcaccccctggctggagt

SEQ ID NO: 323679 - DNA, 20 bp, Artificial Sequence
  Description of Artificial Sequence: Synthetic oligonucleotide
  Target: LAMA2; (+) strand; PAM type: YTN; PAM sequence: CTG
tcaccccctggctggagtgc

SEQ ID NO: 323680 - DNA, 20 bp, Artificial Sequence
  Description of Artificial Sequence: Synthetic oligonucleotide
  Target: LAMA2; (+) strand; PAM type: YTN; PAM sequence: CTG
gctggagtgcagtggcttga

SEQ ID NO: 323681 - DNA, 20 bp, Artificial Sequence
  Description of Artificial Sequence: Synthetic oligonucleotide
  Target: LAMA2; (+) strand; PAM type: YTN; PAM sequence: CTG
gagtgcagtggcttgatctt

SEQ ID NO: 323682 - DNA, 20 bp, Artificial Sequence
  Description of Artificial Sequence: Synthetic oligonucleotide
  Target: LAMA2; (+) strand; PAM type: YTN; PAM sequence: CTT
gatcttggctcactgcaacc

SEQ ID NO: 323683 - DNA, 20 bp, Artificial Sequence
  Description of Artificial Sequence: Synthetic oligonucleotide
  Target: LAMA2; (+) strand; PAM type: YTN; PAM sequence: TTG
atcttggctcactgcaacct

SEQ ID NO: 323684 - DNA, 20 bp, Artificial Sequence
  Description of Artificial Sequence: Synthetic oligonucleotide
  Target: LAMA2; (+) strand; PAM type: YTN; PAM sequence: CTT
ggctcactgcaacctcagcc

SEQ ID NO: 323685 - DNA, 20 bp, Artificial Sequence
  Description of Artificial Sequence: Synthetic oligonucleotide
  Target: LAMA2; (+) strand; PAM type: YTN; PAM sequence: TTG
gctcactgcaacctcagcct

SEQ ID NO: 323686 - DNA, 20 bp, Artificial Sequence
  Description of Artificial Sequence: Synthetic oligonucleotide
  Target: LAMA2; (+) strand; PAM type: YTN; PAM sequence: CTC
actgcaacctcagcctccca

SEQ ID NO: 323687 - DNA, 20 bp, Artificial Sequence
  Description of Artificial Sequence: Synthetic oligonucleotide
  Target: LAMA2; (+) strand; PAM type: YTN; PAM sequence: CTG
caacctcagcctcccaggtt

SEQ ID NO: 323688 - DNA, 20 bp, Artificial Sequence
  Description of Artificial Sequence: Synthetic oligonucleotide
  Target: LAMA2; (+) strand; PAM type: YTN; PAM sequence: CTC
agcctcccaggttcaagtaa

SEQ ID NO: 323689 - DNA, 20 bp, Artificial Sequence
  Description of Artificial Sequence: Synthetic oligonucleotide
  Target: LAMA2; (+) strand; PAM type: YTN; PAM sequence: CTC
ccaggttcaagtaattctcc

SEQ ID NO: 323690 - DNA, 20 bp, Artificial Sequence
  Description of Artificial Sequence: Synthetic oligonucleotide
  Target: LAMA2; (+) strand; PAM type: YTN; PAM sequence: TTC
aagtaattctcctgcctcag

SEQ ID NO: 323691 - DNA, 20 bp, Artificial Sequence
  Description of Artificial Sequence: Synthetic oligonucleotide
  Target: LAMA2; (+) strand; PAM type: YTN; PAM sequence: TTC
tcctgcctcagcctcccgag

SEQ ID NO: 323692 - DNA, 20 bp, Artificial Sequence
  Description of Artificial Sequence: Synthetic oligonucleotide
  Target: LAMA2; (+) strand; PAM type: YTN; PAM sequence: CTC
ctgcctcagcctcccgagta

SEQ ID NO: 323693 - DNA, 20 bp, Artificial Sequence
  Description of Artificial Sequence: Synthetic oligonucleotide
  Target: LAMA2; (+) strand; PAM type: YTN; PAM sequence: CTG
cctcagcctcccgagtagct

SEQ ID NO: 323694 - DNA, 20 bp, Artificial Sequence
  Description of Artificial Sequence: Synthetic oligonucleotide
  Target: LAMA2; (+) strand; PAM type: YTN; PAM sequence: CTC
agcctcccgagtagctggga

SEQ ID NO: 323695 - DNA, 20 bp, Artificial Sequence
  Description of Artificial Sequence: Synthetic oligonucleotide
  Target: LAMA2; (+) strand; PAM type: YTN; PAM sequence: CTC
ccgagtagctgggactagat

SEQ ID NO: 323696 - DNA, 20 bp, Artificial Sequence
  Description of Artificial Sequence: Synthetic oligonucleotide
  Target: LAMA2; (+) strand; PAM type: YTN; PAM sequence: CTG
ggactagatttattcttaat

SEQ ID NO: 323697 - DNA, 20 bp, Artificial Sequence
  Description of Artificial Sequence: Synthetic oligonucleotide
  Target: LAMA2; (+) strand; PAM type: YTN; PAM sequence: CTA
gatttattcttaatcccatt

SEQ ID NO: 323698 - DNA, 20 bp, Artificial Sequence
  Description of Artificial Sequence: Synthetic oligonucleotide
  Target: LAMA2; (+) strand; PAM type: YTN; PAM sequence: TTT
attcttaatcccatttatcc

SEQ ID NO: 323699 - DNA, 20 bp, Artificial Sequence
  Description of Artificial Sequence: Synthetic oligonucleotide
  Target: LAMA2; (+) strand; PAM type: YTN; PAM sequence: TTA
ttcttaatcccatttatcca

SEQ ID NO: 323700 - DNA, 20 bp, Artificial Sequence
  Description of Artificial Sequence: Synthetic oligonucleotide
  Target: LAMA2; (+) strand; PAM type: YTN; PAM sequence: TTC
ttaatcccatttatccatgt

SEQ ID NO: 323701 - DNA, 20 bp, Artificial Sequence
  Description of Artificial Sequence: Synthetic oligonucleotide
  Target: LAMA2; (+) strand; PAM type: YTN; PAM sequence: CTT
aatcccatttatccatgtgg

SEQ ID NO: 323702 - DNA, 20 bp, Artificial Sequence
  Description of Artificial Sequence: Synthetic oligonucleotide
  Target: LAMA2; (+) strand; PAM type: YTN; PAM sequence: TTA
atcccatttatccatgtgga

SEQ ID NO: 323703 - DNA, 20 bp, Artificial Sequence
  Description of Artificial Sequence: Synthetic oligonucleotide
  Target: LAMA2; (+) strand; PAM type: YTN; PAM sequence: TTT
atccatgtggagaatatgtc

SEQ ID NO: 323704 - DNA, 20 bp, Artificial Sequence
  Description of Artificial Sequence: Synthetic oligonucleotide
  Target: LAMA2; (+) strand; PAM type: YTN; PAM sequence: TTA
tccatgtggagaatatgtca

SEQ ID NO: 323705 - DNA, 20 bp, Artificial Sequence
  Description of Artificial Sequence: Synthetic oligonucleotide
  Target: LAMA2; (+) strand; PAM type: YTN; PAM sequence: CTG
ctcatttcactttgcaaacc

SEQ ID NO: 323706 - DNA, 20 bp, Artificial Sequence
  Description of Artificial Sequence: Synthetic oligonucleotide
  Target: LAMA2; (+) strand; PAM type: YTN; PAM sequence: CTC
atttcactttgcaaaccgac

SEQ ID NO: 323707 - DNA, 20 bp, Artificial Sequence
  Description of Artificial Sequence: Synthetic oligonucleotide
  Target: LAMA2; (+) strand; PAM type: YTN; PAM sequence: TTT
cactttgcaaaccgacttac

SEQ ID NO: 323708 - DNA, 20 bp, Artificial Sequence
  Description of Artificial Sequence: Synthetic oligonucleotide
  Target: LAMA2; (+) strand; PAM type: YTN; PAM sequence: TTC
actttgcaaaccgacttact

SEQ ID NO: 323709 - DNA, 20 bp, Artificial Sequence
  Description of Artificial Sequence: Synthetic oligonucleotide
  Target: LAMA2; (+) strand; PAM type: YTN; PAM sequence: CTT
tgcaaaccgacttactattc

SEQ ID NO: 323710 - DNA, 20 bp, Artificial Sequence
  Description of Artificial Sequence: Synthetic oligonucleotide
  Target: LAMA2; (+) strand; PAM type: YTN; PAM sequence: TTT
gcaaaccgacttactattct

SEQ ID NO: 323711 - DNA, 20 bp, Artificial Sequence
  Description of Artificial Sequence: Synthetic oligonucleotide
  Target: LAMA2; (+) strand; PAM type: YTN; PAM sequence: TTG
caaaccgacttactattctt

SEQ ID NO: 323712 - DNA, 20 bp, Artificial Sequence
  Description of Artificial Sequence: Synthetic oligonucleotide
  Target: LAMA2; (+) strand; PAM type: YTN; PAM sequence: CTT
actattctttgtacctctct

SEQ ID NO: 323713 - DNA, 20 bp, Artificial Sequence
  Description of Artificial Sequence: Synthetic oligonucleotide
  Target: LAMA2; (+) strand; PAM type: YTN; PAM sequence: TTA
ctattctttgtacctctctc

SEQ ID NO: 323714 - DNA, 20 bp, Artificial Sequence
  Description of Artificial Sequence: Synthetic oligonucleotide
  Target: LAMA2; (+) strand; PAM type: YTN; PAM sequence: CTA
ttctttgtacctctctcctt

SEQ ID NO: 323715 - DNA, 20 bp, Artificial Sequence
  Description of Artificial Sequence: Synthetic oligonucleotide
  Target: LAMA2; (+) strand; PAM type: YTN; PAM sequence: TTC
tttgtacctctctccttctc

SEQ ID NO: 323716 - DNA, 20 bp, Artificial Sequence
  Description of Artificial Sequence: Synthetic oligonucleotide
  Target: LAMA2; (+) strand; PAM type: YTN; PAM sequence: CTT
tgtacctctctccttctctt

SEQ ID NO: 323717 - DNA, 20 bp, Artificial Sequence
  Description of Artificial Sequence: Synthetic oligonucleotide
  Target: LAMA2; (+) strand; PAM type: YTN; PAM sequence: TTT
gtacctctctccttctcttt

SEQ ID NO: 323718 - DNA, 20 bp, Artificial Sequence
  Description of Artificial Sequence: Synthetic oligonucleotide
  Target: LAMA2; (+) strand; PAM type: YTN; PAM sequence: TTG
tacctctctccttctctttt

SEQ ID NO: 323719 - DNA, 20 bp, Artificial Sequence
  Description of Artificial Sequence: Synthetic oligonucleotide
  Target: LAMA2; (+) strand; PAM type: YTN; PAM sequence: CTC
tctccttctctttttgctct

SEQ ID NO: 323720 - DNA, 20 bp, Artificial Sequence
  Description of Artificial Sequence: Synthetic oligonucleotide
  Target: LAMA2; (+) strand; PAM type: YTN; PAM sequence: CTC
tccttctctttttgctctgt

SEQ ID NO: 323721 - DNA, 20 bp, Artificial Sequence
  Description of Artificial Sequence: Synthetic oligonucleotide
  Target: LAMA2; (+) strand; PAM type: YTN; PAM sequence: CTC
cttctctttttgctctgtca

SEQ ID NO: 323722 - DNA, 20 bp, Artificial Sequence
  Description of Artificial Sequence: Synthetic oligonucleotide
  Target: LAMA2; (+) strand; PAM type: YTN; PAM sequence: CTT
ctctttttgctctgtcacta

SEQ ID NO: 323723 - DNA, 20 bp, Artificial Sequence
  Description of Artificial Sequence: Synthetic oligonucleotide
  Target: LAMA2; (+) strand; PAM type: YTN; PAM sequence: TTC
tctttttgctctgtcactaa

SEQ ID NO: 323724 - DNA, 20 bp, Artificial Sequence
  Description of Artificial Sequence: Synthetic oligonucleotide
  Target: LAMA2; (+) strand; PAM type: YTN; PAM sequence: CTC
tttttgctctgtcactaata

SEQ ID NO: 323725 - DNA, 20 bp, Artificial Sequence
  Description of Artificial Sequence: Synthetic oligonucleotide
  Target: LAMA2; (+) strand; PAM type: YTN; PAM sequence: CTT
tttgctctgtcactaataga

SEQ ID NO: 323726 - DNA, 20 bp, Artificial Sequence
  Description of Artificial Sequence: Synthetic oligonucleotide
  Target: LAMA2; (+) strand; PAM type: YTN; PAM sequence: TTT
ttgctctgtcactaatagag

SEQ ID NO: 323727 - DNA, 20 bp, Artificial Sequence
  Description of Artificial Sequence: Synthetic oligonucleotide
  Target: LAMA2; (+) strand; PAM type: YTN; PAM sequence: TTT
tgctctgtcactaatagagc

SEQ ID NO: 323728 - DNA, 20 bp, Artificial Sequence
  Description of Artificial Sequence: Synthetic oligonucleotide
  Target: LAMA2; (+) strand; PAM type: YTN; PAM sequence: TTT
gctctgtcactaatagagct

SEQ ID NO: 323729 - DNA, 20 bp, Artificial Sequence
  Description of Artificial Sequence: Synthetic oligonucleotide
  Target: LAMA2; (+) strand; PAM type: YTN; PAM sequence: TTG
ctctgtcactaatagagctt

SEQ ID NO: 323730 - DNA, 20 bp, Artificial Sequence
  Description of Artificial Sequence: Synthetic oligonucleotide
  Target: LAMA2; (+) strand; PAM type: YTN; PAM sequence: CTC
tgtcactaatagagctttca

SEQ ID NO: 323731 - DNA, 20 bp, Artificial Sequence
  Description of Artificial Sequence: Synthetic oligonucleotide
  Target: LAMA2; (+) strand; PAM type: YTN; PAM sequence: CTG
tcactaatagagctttcagc

SEQ ID NO: 323732 - DNA, 20 bp, Artificial Sequence
  Description of Artificial Sequence: Synthetic oligonucleotide
  Target: LAMA2; (+) strand; PAM type: YTN; PAM sequence: CTA
atagagctttcagctactaa

SEQ ID NO: 323733 - DNA, 20 bp, Artificial Sequence
  Description of Artificial Sequence: Synthetic oligonucleotide
  Target: LAMA2; (+) strand; PAM type: YTN; PAM sequence: CTT
tcagctactaagacacacag

SEQ ID NO: 323734 - DNA, 20 bp, Artificial Sequence
  Description of Artificial Sequence: Synthetic oligonucleotide
  Target: LAMA2; (+) strand; PAM type: YTN; PAM sequence: TTT
cagctactaagacacacagg

SEQ ID NO: 323735 - DNA, 20 bp, Artificial Sequence
  Description of Artificial Sequence: Synthetic oligonucleotide
  Target: LAMA2; (+) strand; PAM type: YTN; PAM sequence: TTC
agctactaagacacacagga

SEQ ID NO: 323736 - DNA, 20 bp, Artificial Sequence
  Description of Artificial Sequence: Synthetic oligonucleotide
  Target: LAMA2; (+) strand; PAM type: YTN; PAM sequence: CTA
ctaagacacacaggagtcct

SEQ ID NO: 323737 - DNA, 20 bp, Artificial Sequence
  Description of Artificial Sequence: Synthetic oligonucleotide
  Target: LAMA2; (+) strand; PAM type: YTN; PAM sequence: CTA
agacacacaggagtcctttc

SEQ ID NO: 323738 - DNA, 20 bp, Artificial Sequence
  Description of Artificial Sequence: Synthetic oligonucleotide
  Target: LAMA2; (+) strand; PAM type: YTN; PAM sequence: CTT
tctagagagtaactgaaatt

SEQ ID NO: 323739 - DNA, 20 bp, Artificial Sequence
  Description of Artificial Sequence: Synthetic oligonucleotide
  Target: LAMA2; (+) strand; PAM type: YTN; PAM sequence: TTT
ctagagagtaactgaaatta

SEQ ID NO: 323740 - DNA, 20 bp, Artificial Sequence
  Description of Artificial Sequence: Synthetic oligonucleotide
  Target: LAMA2; (+) strand; PAM type: YTN; PAM sequence: TTC
tagagagtaactgaaattaa

SEQ ID NO: 323741 - DNA, 20 bp, Artificial Sequence
  Description of Artificial Sequence: Synthetic oligonucleotide
  Target: LAMA2; (+) strand; PAM type: YTN; PAM sequence: CTA
gagagtaactgaaattaacc

SEQ ID NO: 323742 - DNA, 20 bp, Artificial Sequence
  Description of Artificial Sequence: Synthetic oligonucleotide
  Target: LAMA2; (+) strand; PAM type: YTN; PAM sequence: CTG
aaattaaccacatacatcat

SEQ ID NO: 323743 - DNA, 20 bp, Artificial Sequence
  Description of Artificial Sequence: Synthetic oligonucleotide
  Target: LAMA2; (+) strand; PAM type: YTN; PAM sequence: TTA
accacatacatcattttggt

SEQ ID NO: 323744 - DNA, 20 bp, Artificial Sequence
  Description of Artificial Sequence: Synthetic oligonucleotide
  Target: LAMA2; (+) strand; PAM type: YTN; PAM sequence: TTT
tggtggcaaacctcacagcc

SEQ ID NO: 323745 - DNA, 20 bp, Artificial Sequence
  Description of Artificial Sequence: Synthetic oligonucleotide
  Target: LAMA2; (+) strand; PAM type: YTN; PAM sequence: TTT
ggtggcaaacctcacagcca

SEQ ID NO: 323746 - DNA, 20 bp, Artificial Sequence
  Description of Artificial Sequence: Synthetic oligonucleotide
  Target: LAMA2; (+) strand; PAM type: YTN; PAM sequence: TTG
gtggcaaacctcacagccac

SEQ ID NO: 323747 - DNA, 20 bp, Artificial Sequence
  Description of Artificial Sequence: Synthetic oligonucleotide
  Target: LAMA2; (+) strand; PAM type: YTN; PAM sequence: CTC
acagccaccagtcatttata

SEQ ID NO: 323748 - DNA, 20 bp, Artificial Sequence
  Description of Artificial Sequence: Synthetic oligonucleotide
  Target: LAMA2; (+) strand; PAM type: YTN; PAM sequence: TTT
atagtaccaagtccctgctc

SEQ ID NO: 323749 - DNA, 20 bp, Artificial Sequence
  Description of Artificial Sequence: Synthetic oligonucleotide
  Target: LAMA2; (+) strand; PAM type: YTN; PAM sequence: TTA
tagtaccaagtccctgctct

SEQ ID NO: 323750 - DNA, 20 bp, Artificial Sequence
  Description of Artificial Sequence: Synthetic oligonucleotide
  Target: LAMA2; (+) strand; PAM type: YTN; PAM sequence: CTG
ctctttgggtaacagtggat

SEQ ID NO: 323751 - DNA, 20 bp, Artificial Sequence
  Description of Artificial Sequence: Synthetic oligonucleotide
  Target: LAMA2; (+) strand; PAM type: YTN; PAM sequence: CTC
tttgggtaacagtggataag

SEQ ID NO: 323752 - DNA, 20 bp, Artificial Sequence
  Description of Artificial Sequence: Synthetic oligonucleotide
  Target: LAMA2; (+) strand; PAM type: YTN; PAM sequence: CTT
tgggtaacagtggataagaa

SEQ ID NO: 323753 - DNA, 20 bp, Artificial Sequence
  Description of Artificial Sequence: Synthetic oligonucleotide
  Target: LAMA2; (+) strand; PAM type: YTN; PAM sequence: TTT
gggtaacagtggataagaaa

SEQ ID NO: 323754 - DNA, 20 bp, Artificial Sequence
  Description of Artificial Sequence: Synthetic oligonucleotide
  Target: LAMA2; (+) strand; PAM type: YTN; PAM sequence: TTG
ggtaacagtggataagaaat

SEQ ID NO: 323755 - DNA, 20 bp, Artificial Sequence
  Description of Artificial Sequence: Synthetic oligonucleotide
  Target: LAMA2; (+) strand; PAM type: YTN; PAM sequence: CTA
cacaagctccttatgtggag

SEQ ID NO: 323756 - DNA, 20 bp, Artificial Sequence
  Description of Artificial Sequence: Synthetic oligonucleotide
  Target: LAMA2; (+) strand; PAM type: YTN; PAM sequence: CTC
cttatgtggagaaaagactg

SEQ ID NO: 323757 - DNA, 20 bp, Artificial Sequence
  Description of Artificial Sequence: Synthetic oligonucleotide
  Target: LAMA2; (+) strand; PAM type: YTN; PAM sequence: CTT
atgtggagaaaagactgttc

SEQ ID NO: 323758 - DNA, 20 bp, Artificial Sequence
  Description of Artificial Sequence: Synthetic oligonucleotide
  Target: LAMA2; (+) strand; PAM type: YTN; PAM sequence: TTA
tgtggagaaaagactgttct

SEQ ID NO: 323759 - DNA, 20 bp, Artificial Sequence
  Description of Artificial Sequence: Synthetic oligonucleotide
  Target: LAMA2; (+) strand; PAM type: YTN; PAM sequence: CTG
ttctcctatttggaagcctt

SEQ ID NO: 323760 - DNA, 20 bp, Artificial Sequence
  Description of Artificial Sequence: Synthetic oligonucleotide
  Target: LAMA2; (+) strand; PAM type: YTN; PAM sequence: TTC
tcctatttggaagccttgtg

SEQ ID NO: 323761 - DNA, 20 bp, Artificial Sequence
  Description of Artificial Sequence: Synthetic oligonucleotide
  Target: LAMA2; (+) strand; PAM type: YTN; PAM sequence: CTC
ctatttggaagccttgtgcc

SEQ ID NO: 323762 - DNA, 20 bp, Artificial Sequence
  Description of Artificial Sequence: Synthetic oligonucleotide
  Target: LAMA2; (+) strand; PAM type: YTN; PAM sequence: CTA
tttggaagccttgtgcccat

SEQ ID NO: 323763 - DNA, 20 bp, Artificial Sequence
  Description of Artificial Sequence: Synthetic oligonucleotide
  Target: LAMA2; (+) strand; PAM type: YTN; PAM sequence: TTT
ggaagccttgtgcccatatc

SEQ ID NO: 323764 - DNA, 20 bp, Artificial Sequence
  Description of Artificial Sequence: Synthetic oligonucleotide
  Target: LAMA2; (+) strand; PAM type: YTN; PAM sequence: TTG
gaagccttgtgcccatatcc

SEQ ID NO: 323765 - DNA, 20 bp, Artificial Sequence
  Description of Artificial Sequence: Synthetic oligonucleotide
  Target: LAMA2; (+) strand; PAM type: YTN; PAM sequence: CTT
gtgcccatatccatgccctt

SEQ ID NO: 323766 - DNA, 20 bp, Artificial Sequence
  Description of Artificial Sequence: Synthetic oligonucleotide
  Target: LAMA2; (+) strand; PAM type: YTN; PAM sequence: TTG
tgcccatatccatgcccttt

SEQ ID NO: 323767 - DNA, 20 bp, Artificial Sequence
  Description of Artificial Sequence: Synthetic oligonucleotide
  Target: LAMA2; (+) strand; PAM type: YTN; PAM sequence: CTT
tgcacatttatcaaataacc

SEQ ID NO: 323768 - DNA, 20 bp, Artificial Sequence
  Description of Artificial Sequence: Synthetic oligonucleotide
  Target: LAMA2; (+) strand; PAM type: YTN; PAM sequence: TTT
gcacatttatcaaataaccg

SEQ ID NO: 323769 - DNA, 20 bp, Artificial Sequence
  Description of Artificial Sequence: Synthetic oligonucleotide
  Target: LAMA2; (+) strand; PAM type: YTN; PAM sequence: TTG
cacatttatcaaataaccgt

SEQ ID NO: 323770 - DNA, 20 bp, Artificial Sequence
  Description of Artificial Sequence: Synthetic oligonucleotide
  Target: LAMA2; (+) strand; PAM type: YTN; PAM sequence: TTT
atcaaataaccgtgacttgt

SEQ ID NO: 323771 - DNA, 20 bp, Artificial Sequence
  Description of Artificial Sequence: Synthetic oligonucleotide
  Target: LAMA2; (+) strand; PAM type: YTN; PAM sequence: TTA
tcaaataaccgtgacttgtc

SEQ ID NO: 323772 - DNA, 20 bp, Artificial Sequence
  Description of Artificial Sequence: Synthetic oligonucleotide
  Target: LAMA2; (+) strand; PAM type: YTN; PAM sequence: CTT
gtcctttatgttttttcaag

SEQ ID NO: 323773 - DNA, 20 bp, Artificial Sequence
  Description of Artificial Sequence: Synthetic oligonucleotide
  Target: LAMA2; (+) strand; PAM type: YTN; PAM sequence: TTG
tcctttatgttttttcaagc

SEQ ID NO: 323774 - DNA, 20 bp, Artificial Sequence
  Description of Artificial Sequence: Synthetic oligonucleotide
  Target: LAMA2; (+) strand; PAM type: YTN; PAM sequence: CTT
tatgttttttcaagcatttg

SEQ ID NO: 323775 - DNA, 20 bp, Artificial Sequence
  Description of Artificial Sequence: Synthetic oligonucleotide
  Target: LAMA2; (+) strand; PAM type: YTN; PAM sequence: TTT
atgttttttcaagcatttgt

SEQ ID NO: 323776 - DNA, 20 bp, Artificial Sequence
  Description of Artificial Sequence: Synthetic oligonucleotide
  Target: LAMA2; (+) strand; PAM type: YTN; PAM sequence: TTA
tgttttttcaagcatttgta

SEQ ID NO: 323777 - DNA, 20 bp, Artificial Sequence
  Description of Artificial Sequence: Synthetic oligonucleotide
  Target: LAMA2; (+) strand; PAM type: YTN; PAM sequence: TTT
tttcaagcatttgtatcatt

SEQ ID NO: 323778 - DNA, 20 bp, Artificial Sequence
  Description of Artificial Sequence: Synthetic oligonucleotide
  Target: LAMA2; (+) strand; PAM type: YTN; PAM sequence: TTT
ttcaagcatttgtatcatta

SEQ ID NO: 323779 - DNA, 20 bp, Artificial Sequence
  Description of Artificial Sequence: Synthetic oligonucleotide
  Target: LAMA2; (+) strand; PAM type: YTN; PAM sequence: TTT
tcaagcatttgtatcattag

SEQ ID NO: 323780 - DNA, 20 bp, Artificial Sequence
  Description of Artificial Sequence: Synthetic oligonucleotide
  Target: LAMA2; (+) strand; PAM type: YTN; PAM sequence: TTT
caagcatttgtatcattagg

SEQ ID NO: 323781 - DNA, 20 bp, Artificial Sequence
  Description of Artificial Sequence: Synthetic oligonucleotide
  Target: LAMA2; (+) strand; PAM type: YTN; PAM sequence: TTC
aagcatttgtatcattaggc

SEQ ID NO: 323782 - DNA, 20 bp, Artificial Sequence
  Description of Artificial Sequence: Synthetic oligonucleotide
  Target: LAMA2; (+) strand; PAM type: YTN; PAM sequence: TTT
gtatcattaggcaaggctct

SEQ ID NO: 323783 - DNA, 20 bp, Artificial Sequence
  Description of Artificial Sequence: Synthetic oligonucleotide
  Target: LAMA2; (+) strand; PAM type: YTN; PAM sequence: TTG
tatcattaggcaaggctctg

SEQ ID NO: 323784 - DNA, 20 bp, Artificial Sequence
  Description of Artificial Sequence: Synthetic oligonucleotide
  Target: LAMA2; (+) strand; PAM type: YTN; PAM sequence: TTA
ggcaaggctctgcctaatgg

SEQ ID NO: 323785 - DNA, 20 bp, Artificial Sequence
  Description of Artificial Sequence: Synthetic oligonucleotide
  Target: LAMA2; (+) strand; PAM type: YTN; PAM sequence: CTC
tgcctaatggaagagattta

SEQ ID NO: 323786 - DNA, 20 bp, Artificial Sequence
  Description of Artificial Sequence: Synthetic oligonucleotide
  Target: LAMA2; (+) strand; PAM type: YTN; PAM sequence: CTG
cctaatggaagagatttact

SEQ ID NO: 323787 - DNA, 20 bp, Artificial Sequence
  Description of Artificial Sequence: Synthetic oligonucleotide
  Target: LAMA2; (+) strand; PAM type: YTN; PAM sequence: CTA
atggaagagatttactctta

SEQ ID NO: 323788 - DNA, 20 bp, Artificial Sequence
  Description of Artificial Sequence: Synthetic oligonucleotide
  Target: LAMA2; (+) strand; PAM type: YTN; PAM sequence: TTT
actcttactctgtgcccagg

SEQ ID NO: 323789 - DNA, 20 bp, Artificial Sequence
  Description of Artificial Sequence: Synthetic oligonucleotide
  Target: LAMA2; (+) strand; PAM type: YTN; PAM sequence: TTA
ctcttactctgtgcccaggt

SEQ ID NO: 323790 - DNA, 20 bp, Artificial Sequence
  Description of Artificial Sequence: Synthetic oligonucleotide
  Target: LAMA2; (+) strand; PAM type: YTN; PAM sequence: CTC
ttactctgtgcccaggtggc

SEQ ID NO: 323791 - DNA, 20 bp, Artificial Sequence
  Description of Artificial Sequence: Synthetic oligonucleotide
  Target: LAMA2; (+) strand; PAM type: YTN; PAM sequence: CTT
actctgtgcccaggtggctc

SEQ ID NO: 323792 - DNA, 20 bp, Artificial Sequence
  Description of Artificial Sequence: Synthetic oligonucleotide
  Target: LAMA2; (+) strand; PAM type: YTN; PAM sequence: TTA
ctctgtgcccaggtggctcg

SEQ ID NO: 323793 - DNA, 20 bp, Artificial Sequence
  Description of Artificial Sequence: Synthetic oligonucleotide
  Target: LAMA2; (+) strand; PAM type: YTN; PAM sequence: CTC
tgtgcccaggtggctcgtcc

SEQ ID NO: 323794 - DNA, 20 bp, Artificial Sequence
  Description of Artificial Sequence: Synthetic oligonucleotide
  Target: LAMA2; (+) strand; PAM type: YTN; PAM sequence: CTG
tgcccaggtggctcgtccat

SEQ ID NO: 323795 - DNA, 20 bp, Artificial Sequence
  Description of Artificial Sequence: Synthetic oligonucleotide
  Target: LAMA2; (+) strand; PAM type: YTN; PAM sequence: CTC
gtccatctctgggtattttc

SEQ ID NO: 323796 - DNA, 20 bp, Artificial Sequence
  Description of Artificial Sequence: Synthetic oligonucleotide
  Target: LAMA2; (+) strand; PAM type: YTN; PAM sequence: CTC
tgggtattttcaagcattgg

SEQ ID NO: 323797 - DNA, 20 bp, Artificial Sequence
  Description of Artificial Sequence: Synthetic oligonucleotide
  Target: LAMA2; (+) strand; PAM type: YTN; PAM sequence: CTG
ggtattttcaagcattggag

SEQ ID NO: 323798 - DNA, 20 bp, Artificial Sequence
  Description of Artificial Sequence: Synthetic oligonucleotide
  Target: LAMA2; (+) strand; PAM type: YTN; PAM sequence: TTT
tcaagcattggaggtggcaa

SEQ ID NO: 323799 - DNA, 20 bp, Artificial Sequence
  Description of Artificial Sequence: Synthetic oligonucleotide
  Target: LAMA2; (+) strand; PAM type: YTN; PAM sequence: TTT
caagcattggaggtggcaat

SEQ ID NO: 323800 - DNA, 20 bp, Artificial Sequence
  Description of Artificial Sequence: Synthetic oligonucleotide
  Target: LAMA2; (+) strand; PAM type: YTN; PAM sequence: TTC
aagcattggaggtggcaata

SEQ ID NO: 323801 - DNA, 20 bp, Artificial Sequence
  Description of Artificial Sequence: Synthetic oligonucleotide
  Target: LAMA2; (+) strand; PAM type: YTN; PAM sequence: TTG
gaggtggcaatagtgtgctt

SEQ ID NO: 323802 - DNA, 20 bp, Artificial Sequence
  Description of Artificial Sequence: Synthetic oligonucleotide
  Target: LAMA2; (+) strand; PAM type: YTN; PAM sequence: CTT
agcctcaagactgagcaaag

SEQ ID NO: 323803 - DNA, 20 bp, Artificial Sequence
  Description of Artificial Sequence: Synthetic oligonucleotide
  Target: LAMA2; (+) strand; PAM type: YTN; PAM sequence: TTA
gcctcaagactgagcaaaga

SEQ ID NO: 323804 - DNA, 20 bp, Artificial Sequence
  Description of Artificial Sequence: Synthetic oligonucleotide
  Target: LAMA2; (+) strand; PAM type: YTN; PAM sequence: CTC
aagactgagcaaagaaatga

SEQ ID NO: 323805 - DNA, 20 bp, Artificial Sequence
  Description of Artificial Sequence: Synthetic oligonucleotide
  Target: LAMA2; (+) strand; PAM type: YTN; PAM sequence: CTG
agcaaagaaatgaactttcc

SEQ ID NO: 323806 - DNA, 20 bp, Artificial Sequence
  Description of Artificial Sequence: Synthetic oligonucleotide
  Target: LAMA2; (+) strand; PAM type: YTN; PAM sequence: CTT
tccagagattactcttaaaa

SEQ ID NO: 323807 - DNA, 20 bp, Artificial Sequence
  Description of Artificial Sequence: Synthetic oligonucleotide
  Target: LAMA2; (+) strand; PAM type: YTN; PAM sequence: TTT
ccagagattactcttaaaat

SEQ ID NO: 323808 - DNA, 20 bp, Artificial Sequence
  Description of Artificial Sequence: Synthetic oligonucleotide
  Target: LAMA2; (+) strand; PAM type: YTN; PAM sequence: TTC
cagagattactcttaaaata

SEQ ID NO: 323809 - DNA, 20 bp, Artificial Sequence
  Description of Artificial Sequence: Synthetic oligonucleotide
  Target: LAMA2; (+) strand; PAM type: YTN; PAM sequence: TTA
ctcttaaaatatcccattct

SEQ ID NO: 323810 - DNA, 20 bp, Artificial Sequence
  Description of Artificial Sequence: Synthetic oligonucleotide
  Target: LAMA2; (+) strand; PAM type: YTN; PAM sequence: CTC
ttaaaatatcccattctgag

SEQ ID NO: 323811 - DNA, 20 bp, Artificial Sequence
  Description of Artificial Sequence: Synthetic oligonucleotide
  Target: LAMA2; (+) strand; PAM type: YTN; PAM sequence: CTT
aaaatatcccattctgagag

SEQ ID NO: 323812 - DNA, 20 bp, Artificial Sequence
  Description of Artificial Sequence: Synthetic oligonucleotide
  Target: LAMA2; (+) strand; PAM type: YTN; PAM sequence: TTA
aaatatcccattctgagagc

SEQ ID NO: 323813 - DNA, 20 bp, Artificial Sequence
  Description of Artificial Sequence: Synthetic oligonucleotide
  Target: LAMA2; (+) strand; PAM type: YTN; PAM sequence: TTC
tgagagcacatgtttctctt

SEQ ID NO: 323814 - DNA, 20 bp, Artificial Sequence
  Description of Artificial Sequence: Synthetic oligonucleotide
  Target: LAMA2; (+) strand; PAM type: YTN; PAM sequence: CTG
agagcacatgtttctcttag

SEQ ID NO: 323815 - DNA, 20 bp, Artificial Sequence
  Description of Artificial Sequence: Synthetic oligonucleotide
  Target: LAMA2; (+) strand; PAM type: YTN; PAM sequence: TTT
ctcttagtactgtttactcc

SEQ ID NO: 323816 - DNA, 20 bp, Artificial Sequence
  Description of Artificial Sequence: Synthetic oligonucleotide
  Target: LAMA2; (+) strand; PAM type: YTN; PAM sequence: TTC
tcttagtactgtttactccg

SEQ ID NO: 323817 - DNA, 20 bp, Artificial Sequence
  Description of Artificial Sequence: Synthetic oligonucleotide
  Target: LAMA2; (+) strand; PAM type: YTN; PAM sequence: CTC
ttagtactgtttactccgga

SEQ ID NO: 323818 - DNA, 20 bp, Artificial Sequence
  Description of Artificial Sequence: Synthetic oligonucleotide
  Target: LAMA2; (+) strand; PAM type: YTN; PAM sequence: CTT
agtactgtttactccggact

SEQ ID NO: 323819 - DNA, 20 bp, Artificial Sequence
  Description of Artificial Sequence: Synthetic oligonucleotide
  Target: LAMA2; (+) strand; PAM type: YTN; PAM sequence: TTA
gtactgtttactccggactt

SEQ ID NO: 323820 - DNA, 20 bp, Artificial Sequence
  Description of Artificial Sequence: Synthetic oligonucleotide
  Target: LAMA2; (+) strand; PAM type: YTN; PAM sequence: CTG
tttactccggactttcaggg

SEQ ID NO: 323821 - DNA, 20 bp, Artificial Sequence
  Description of Artificial Sequence: Synthetic oligonucleotide
  Target: LAMA2; (+) strand; PAM type: YTN; PAM sequence: TTT
actccggactttcagggtca

SEQ ID NO: 323822 - DNA, 20 bp, Artificial Sequence
  Description of Artificial Sequence: Synthetic oligonucleotide
  Target: LAMA2; (+) strand; PAM type: YTN; PAM sequence: TTA
ctccggactttcagggtcag

SEQ ID NO: 323823 - DNA, 20 bp, Artificial Sequence
  Description of Artificial Sequence: Synthetic oligonucleotide
  Target: LAMA2; (+) strand; PAM type: YTN; PAM sequence: CTC
cggactttcagggtcagtag

SEQ ID NO: 323824 - DNA, 20 bp, Artificial Sequence
  Description of Artificial Sequence: Synthetic oligonucleotide
  Target: LAMA2; (+) strand; PAM type: YTN; PAM sequence: CTT
tcagggtcagtaggcaagct

SEQ ID NO: 323825 - DNA, 20 bp, Artificial Sequence
  Description of Artificial Sequence: Synthetic oligonucleotide
  Target: LAMA2; (+) strand; PAM type: YTN; PAM sequence: TTT
cagggtcagtaggcaagctt

SEQ ID NO: 323826 - DNA, 20 bp, Artificial Sequence
  Description of Artificial Sequence: Synthetic oligonucleotide
  Target: LAMA2; (+) strand; PAM type: YTN; PAM sequence: TTC
agggtcagtaggcaagcttt

SEQ ID NO: 323827 - DNA, 20 bp, Artificial Sequence
  Description of Artificial Sequence: Synthetic oligonucleotide
  Target: LAMA2; (+) strand; PAM type: YTN; PAM sequence: CTT
ttcaacaaatttggtttctt

SEQ ID NO: 323828 - DNA, 20 bp, Artificial Sequence
  Description of Artificial Sequence: Synthetic oligonucleotide
  Target: LAMA2; (+) strand; PAM type: YTN; PAM sequence: TTT
tcaacaaatttggtttcttt

SEQ ID NO: 323829 - DNA, 20 bp, Artificial Sequence
  Description of Artificial Sequence: Synthetic oligonucleotide
  Target: LAMA2; (+) strand; PAM type: YTN; PAM sequence: TTT
caacaaatttggtttctttt

SEQ ID NO: 323830 - DNA, 20 bp, Artificial Sequence
  Description of Artificial Sequence: Synthetic oligonucleotide
  Target: LAMA2; (+) strand; PAM type: YTN; PAM sequence: TTC
aacaaatttggtttctttta

SEQ ID NO: 323831 - DNA, 20 bp, Artificial Sequence
  Description of Artificial Sequence: Synthetic oligonucleotide
  Target: LAMA2; (+) strand; PAM type: YTN; PAM sequence: TTT
ggtttcttttaaaaactatt

SEQ ID NO: 323832 - DNA, 20 bp, Artificial Sequence
  Description of Artificial Sequence: Synthetic oligonucleotide
  Target: LAMA2; (+) strand; PAM type: YTN; PAM sequence: TTG
gtttcttttaaaaactattt

SEQ ID NO: 323833 - DNA, 20 bp, Artificial Sequence
  Description of Artificial Sequence: Synthetic oligonucleotide
  Target: LAMA2; (+) strand; PAM type: YTN; PAM sequence: TTT
cttttaaaaactatttttgg

SEQ ID NO: 323834 - DNA, 20 bp, Artificial Sequence
  Description of Artificial Sequence: Synthetic oligonucleotide
  Target: LAMA2; (+) strand; PAM type: YTN; PAM sequence: TTC
ttttaaaaactatttttggt

SEQ ID NO: 323835 - DNA, 20 bp, Artificial Sequence
  Description of Artificial Sequence: Synthetic oligonucleotide
  Target: LAMA2; (+) strand; PAM type: YTN; PAM sequence: CTT
ttaaaaactatttttggtag

SEQ ID NO: 323836 - DNA, 20 bp, Artificial Sequence
  Description of Artificial Sequence: Synthetic oligonucleotide
  Target: LAMA2; (+) strand; PAM type: YTN; PAM sequence: TTT
taaaaactatttttggtagt

SEQ ID NO: 323837 - DNA, 20 bp, Artificial Sequence
  Description of Artificial Sequence: Synthetic oligonucleotide
  Target: LAMA2; (+) strand; PAM type: YTN; PAM sequence: TTT
aaaaactatttttggtagtt

SEQ ID NO: 323838 - DNA, 20 bp, Artificial Sequence
  Description of Artificial Sequence: Synthetic oligonucleotide
  Target: LAMA2; (+) strand; PAM type: YTN; PAM sequence: TTA
aaaactatttttggtagttt

SEQ ID NO: 323839 - DNA, 20 bp, Artificial Sequence
  Description of Artificial Sequence: Synthetic oligonucleotide
  Target: LAMA2; (+) strand; PAM type: YTN; PAM sequence: CTA
tttttggtagttttgttaaa

SEQ ID NO: 323840 - DNA, 20 bp, Artificial Sequence
  Description of Artificial Sequence: Synthetic oligonucleotide
  Target: LAMA2; (+) strand; PAM type: YTN; PAM sequence: TTT
ttggtagttttgttaaatgt

SEQ ID NO: 323841 - DNA, 20 bp, Artificial Sequence
  Description of Artificial Sequence: Synthetic oligonucleotide
  Target: LAMA2; (+) strand; PAM type: YTN; PAM sequence: TTT
tggtagttttgttaaatgtg

SEQ ID NO: 323842 - DNA, 20 bp, Artificial Sequence
  Description of Artificial Sequence: Synthetic oligonucleotide
  Target: LAMA2; (+) strand; PAM type: YTN; PAM sequence: TTT
ggtagttttgttaaatgtgt

SEQ ID NO: 323843 - DNA, 20 bp, Artificial Sequence
  Description of Artificial Sequence: Synthetic oligonucleotide
  Target: LAMA2; (+) strand; PAM type: YTN; PAM sequence: TTG
gtagttttgttaaatgtgtc

SEQ ID NO: 323844 - DNA, 20 bp, Artificial Sequence
  Description of Artificial Sequence: Synthetic oligonucleotide
  Target: LAMA2; (+) strand; PAM type: YTN; PAM sequence: TTT
tgttaaatgtgtctggtaat

SEQ ID NO: 323845 - DNA, 20 bp, Artificial Sequence
  Description of Artificial Sequence: Synthetic oligonucleotide
  Target: LAMA2; (+) strand; PAM type: YTN; PAM sequence: TTT
gttaaatgtgtctggtaatt

SEQ ID NO: 323846 - DNA, 20 bp, Artificial Sequence
  Description of Artificial Sequence: Synthetic oligonucleotide
  Target: LAMA2; (+) strand; PAM type: YTN; PAM sequence: TTG
ttaaatgtgtctggtaattc

SEQ ID NO: 323847 - DNA, 20 bp, Artificial Sequence
  Description of Artificial Sequence: Synthetic oligonucleotide
  Target: LAMA2; (+) strand; PAM type: YTN; PAM sequence: TTA
aatgtgtctggtaattcatt

SEQ ID NO: 323848 - DNA, 20 bp, Artificial Sequence
  Description of Artificial Sequence: Synthetic oligonucleotide
  Target: LAMA2; (+) strand; PAM type: YTN; PAM sequence: CTG
gtaattcattttaagtggaa

SEQ ID NO: 323849 - DNA, 20 bp, Artificial Sequence
  Description of Artificial Sequence: Synthetic oligonucleotide
  Target: LAMA2; (+) strand; PAM type: YTN; PAM sequence: TTC
attttaagtggaaaagggat

SEQ ID NO: 323850 - DNA, 20 bp, Artificial Sequence
  Description of Artificial Sequence: Synthetic oligonucleotide
  Target: LAMA2; (+) strand; PAM type: YTN; PAM sequence: TTT
taagtggaaaagggatggag

SEQ ID NO: 323851 - DNA, 20 bp, Artificial Sequence
  Description of Artificial Sequence: Synthetic oligonucleotide
  Target: LAMA2; (+) strand; PAM type: YTN; PAM sequence: TTT
aagtggaaaagggatggaga

SEQ ID NO: 323852 - DNA, 20 bp, Artificial Sequence
  Description of Artificial Sequence: Synthetic oligonucleotide
  Target: LAMA2; (+) strand; PAM type: YTN; PAM sequence: TTA
agtggaaaagggatggagat

SEQ ID NO: 323853 - DNA, 20 bp, Artificial Sequence
  Description of Artificial Sequence: Synthetic oligonucleotide
  Target: LAMA2; (+) strand; PAM type: YTN; PAM sequence: TTG
taaatgtcctaagcctcttt

SEQ ID NO: 323854 - DNA, 20 bp, Artificial Sequence
  Description of Artificial Sequence: Synthetic oligonucleotide
  Target: LAMA2; (+) strand; PAM type: YTN; PAM sequence: CTA
agcctcttttatcatcctat

SEQ ID NO: 323855 - DNA, 20 bp, Artificial Sequence
  Description of Artificial Sequence: Synthetic oligonucleotide
  Target: LAMA2; (+) strand; PAM type: YTN; PAM sequence: CTC
ttttatcatcctatgttttt

SEQ ID NO: 323856 - DNA, 20 bp, Artificial Sequence
  Description of Artificial Sequence: Synthetic oligonucleotide
  Target: LAMA2; (+) strand; PAM type: YTN; PAM sequence: CTT
ttatcatcctatgtttttga

SEQ ID NO: 323857 - DNA, 20 bp, Artificial Sequence
  Description of Artificial Sequence: Synthetic oligonucleotide
  Target: LAMA2; (+) strand; PAM type: YTN; PAM sequence: TTT
tatcatcctatgtttttgat

SEQ ID NO: 323858 - DNA, 20 bp, Artificial Sequence
  Description of Artificial Sequence: Synthetic oligonucleotide
  Target: LAMA2; (+) strand; PAM type: YTN; PAM sequence: TTT
atcatcctatgtttttgata

SEQ ID NO: 323859 - DNA, 20 bp, Artificial Sequence
  Description of Artificial Sequence: Synthetic oligonucleotide
  Target: LAMA2; (+) strand; PAM type: YTN; PAM sequence: TTA
tcatcctatgtttttgataa

SEQ ID NO: 323860 - DNA, 20 bp, Artificial Sequence
  Description of Artificial Sequence: Synthetic oligonucleotide
  Target: LAMA2; (+) strand; PAM type: YTN; PAM sequence: CTA
tgtttttgataagttttatc

SEQ ID NO: 323861 - DNA, 20 bp, Artificial Sequence
  Description of Artificial Sequence: Synthetic oligonucleotide
  Target: LAMA2; (+) strand; PAM type: YTN; PAM sequence: TTT
ttgataagttttatctggta

SEQ ID NO: 323862 - DNA, 20 bp, Artificial Sequence
  Description of Artificial Sequence: Synthetic oligonucleotide
  Target: LAMA2; (+) strand; PAM type: YTN; PAM sequence: TTT
tgataagttttatctggtaa

SEQ ID NO: 323863 - DNA, 20 bp, Artificial Sequence
  Description of Artificial Sequence: Synthetic oligonucleotide
  Target: LAMA2; (+) strand; PAM type: YTN; PAM sequence: TTT
gataagttttatctggtaac

SEQ ID NO: 323864 - DNA, 20 bp, Artificial Sequence
  Description of Artificial Sequence: Synthetic oligonucleotide
  Target: LAMA2; (+) strand; PAM type: YTN; PAM sequence: TTG
ataagttttatctggtaaca

SEQ ID NO: 323865 - DNA, 20 bp, Artificial Sequence
  Description of Artificial Sequence: Synthetic oligonucleotide
  Target: LAMA2; (+) strand; PAM type: YTN; PAM sequence: TTT
tatctggtaacagacaaaca

SEQ ID NO: 323866 - DNA, 20 bp, Artificial Sequence
  Description of Artificial Sequence: Synthetic oligonucleotide
  Target: LAMA2; (+) strand; PAM type: YTN; PAM sequence: TTT
atctggtaacagacaaacat

SEQ ID NO: 323867 - DNA, 20 bp, Artificial Sequence
  Description of Artificial Sequence: Synthetic oligonucleotide
  Target: LAMA2; (+) strand; PAM type: YTN; PAM sequence: TTA
tctggtaacagacaaacatt

SEQ ID NO: 323868 - DNA, 20 bp, Artificial Sequence
  Description of Artificial Sequence: Synthetic oligonucleotide
  Target: LAMA2; (+) strand; PAM type: YTN; PAM sequence: CTG
gtaacagacaaacattgtag

SEQ ID NO: 323869 - DNA, 20 bp, Artificial Sequence
  Description of Artificial Sequence: Synthetic oligonucleotide
  Target: LAMA2; (+) strand; PAM type: YTN; PAM sequence: TTG
tagaagcaagaaggggttta

SEQ ID NO: 323870 - DNA, 20 bp, Artificial Sequence
  Description of Artificial Sequence: Synthetic oligonucleotide
  Target: LAMA2; (+) strand; PAM type: YTN; PAM sequence: TTT
aatgttgttaaataaagaaa

SEQ ID NO: 323871 - DNA, 20 bp, Artificial Sequence
  Description of Artificial Sequence: Synthetic oligonucleotide
  Target: LAMA2; (+) strand; PAM type: YTN; PAM sequence: TTA
atgttgttaaataaagaaaa

SEQ ID NO: 323872 - DNA, 20 bp, Artificial Sequence
  Description of Artificial Sequence: Synthetic oligonucleotide
  Target: LAMA2; (+) strand; PAM type: YTN; PAM sequence: TTG
ttaaataaagaaaatgtatt

SEQ ID NO: 323873 - DNA, 20 bp, Artificial Sequence
  Description of Artificial Sequence: Synthetic oligonucleotide
  Target: LAMA2; (+) strand; PAM type: YTN; PAM sequence: TTA
aataaagaaaatgtattaaa

SEQ ID NO: 323874 - DNA, 20 bp, Artificial Sequence
  Description of Artificial Sequence: Synthetic oligonucleotide
  Target: LAMA2; (+) strand; PAM type: YTN; PAM sequence: TTA
aaagagaaaaacgaggcact

SEQ ID NO: 323875 - DNA, 20 bp, Artificial Sequence
  Description of Artificial Sequence: Synthetic oligonucleotide
  Target: LAMA2; (+) strand; PAM type: YTN; PAM sequence: CTG
ggctcttctactcttgttta

SEQ ID NO: 323876 - DNA, 20 bp, Artificial Sequence
  Description of Artificial Sequence: Synthetic oligonucleotide
  Target: LAMA2; (+) strand; PAM type: YTN; PAM sequence: CTC
ttctactcttgtttatattc

SEQ ID NO: 323877 - DNA, 20 bp, Artificial Sequence
  Description of Artificial Sequence: Synthetic oligonucleotide
  Target: LAMA2; (+) strand; PAM type: YTN; PAM sequence: CTT
ctactcttgtttatattctt

SEQ ID NO: 323878 - DNA, 20 bp, Artificial Sequence
  Description of Artificial Sequence: Synthetic oligonucleotide
  Target: LAMA2; (+) strand; PAM type: YTN; PAM sequence: TTC
tactcttgtttatattcttc

SEQ ID NO: 323879 - DNA, 20 bp, Artificial Sequence
  Description of Artificial Sequence: Synthetic oligonucleotide
  Target: LAMA2; (+) strand; PAM type: YTN; PAM sequence: CTA
ctcttgtttatattcttcac

SEQ ID NO: 323880 - DNA, 20 bp, Artificial Sequence
  Description of Artificial Sequence: Synthetic oligonucleotide
  Target: LAMA2; (+) strand; PAM type: YTN; PAM sequence: CTC
ttgtttatattcttcaccct

SEQ ID NO: 323881 - DNA, 20 bp, Artificial Sequence
  Description of Artificial Sequence: Synthetic oligonucleotide
  Target: LAMA2; (+) strand; PAM type: YTN; PAM sequence: CTT
gtttatattcttcacccttg

SEQ ID NO: 323882 - DNA, 20 bp, Artificial Sequence
  Description of Artificial Sequence: Synthetic oligonucleotide
  Target: LAMA2; (+) strand; PAM type: YTN; PAM sequence: TTG
tttatattcttcacccttgt

SEQ ID NO: 323883 - DNA, 20 bp, Artificial Sequence
  Description of Artificial Sequence: Synthetic oligonucleotide
  Target: LAMA2; (+) strand; PAM type: YTN; PAM sequence: TTT
atattcttcacccttgtgtt

SEQ ID NO: 323884 - DNA, 20 bp, Artificial Sequence
  Description of Artificial Sequence: Synthetic oligonucleotide
  Target: LAMA2; (+) strand; PAM type: YTN; PAM sequence: TTA
tattcttcacccttgtgttc

SEQ ID NO: 323885 - DNA, 20 bp, Artificial Sequence
  Description of Artificial Sequence: Synthetic oligonucleotide
  Target: LAMA2; (+) strand; PAM type: YTN; PAM sequence: TTC
ttcacccttgtgttccttct

SEQ ID NO: 323886 - DNA, 20 bp, Artificial Sequence
  Description of Artificial Sequence: Synthetic oligonucleotide
  Target: LAMA2; (+) strand; PAM type: YTN; PAM sequence: CTT
cacccttgtgttccttctac

SEQ ID NO: 323887 - DNA, 20 bp, Artificial Sequence
  Description of Artificial Sequence: Synthetic oligonucleotide
  Target: LAMA2; (+) strand; PAM type: YTN; PAM sequence: TTC
acccttgtgttccttctact

SEQ ID NO: 323888 - DNA, 20 bp, Artificial Sequence
  Description of Artificial Sequence: Synthetic oligonucleotide
  Target: LAMA2; (+) strand; PAM type: YTN; PAM sequence: CTT
gtgttccttctactcaggac

SEQ ID NO: 323889 - DNA, 20 bp, Artificial Sequence
  Description of Artificial Sequence: Synthetic oligonucleotide
  Target: LAMA2; (+) strand; PAM type: YTN; PAM sequence: TTG
tgttccttctactcaggact

SEQ ID NO: 323890 - DNA, 20 bp, Artificial Sequence
  Description of Artificial Sequence: Synthetic oligonucleotide
  Target: LAMA2; (+) strand; PAM type: YTN; PAM sequence: TTC
cttctactcaggactccatt

SEQ ID NO: 323891 - DNA, 20 bp, Artificial Sequence
  Description of Artificial Sequence: Synthetic oligonucleotide
  Target: LAMA2; (+) strand; PAM type: YTN; PAM sequence: CTT
ctactcaggactccattgta

SEQ ID NO: 323892 - DNA, 20 bp, Artificial Sequence
  Description of Artificial Sequence: Synthetic oligonucleotide
  Target: LAMA2; (+) strand; PAM type: YTN; PAM sequence: TTC
tactcaggactccattgtaa

SEQ ID NO: 323893 - DNA, 20 bp, Artificial Sequence
  Description of Artificial Sequence: Synthetic oligonucleotide
  Target: LAMA2; (+) strand; PAM type: YTN; PAM sequence: CTA
ctcaggactccattgtaaat

SEQ ID NO: 323894 - DNA, 20 bp, Artificial Sequence
  Description of Artificial Sequence: Synthetic oligonucleotide
  Target: LAMA2; (+) strand; PAM type: YTN; PAM sequence: CTC
aggactccattgtaaatgct

SEQ ID NO: 323895 - DNA, 20 bp, Artificial Sequence
  Description of Artificial Sequence: Synthetic oligonucleotide
  Target: LAMA2; (+) strand; PAM type: YTN; PAM sequence: CTC
cattgtaaatgctcaggatt

SEQ ID NO: 323896 - DNA, 20 bp, Artificial Sequence
  Description of Artificial Sequence: Synthetic oligonucleotide
  Target: LAMA2; (+) strand; PAM type: YTN; PAM sequence: TTG
taaatgctcaggattaattt

SEQ ID NO: 323897 - DNA, 20 bp, Artificial Sequence
  Description of Artificial Sequence: Synthetic oligonucleotide
  Target: LAMA2; (+) strand; PAM type: YTN; PAM sequence: CTC
aggattaatttttttgtcat

SEQ ID NO: 323898 - DNA, 20 bp, Artificial Sequence
  Description of Artificial Sequence: Synthetic oligonucleotide
  Target: LAMA2; (+) strand; PAM type: YTN; PAM sequence: TTA
atttttttgtcatttgatgc

SEQ ID NO: 323899 - DNA, 20 bp, Artificial Sequence
  Description of Artificial Sequence: Synthetic oligonucleotide
  Target: LAMA2; (+) strand; PAM type: YTN; PAM sequence: TTT
ttttgtcatttgatgcagtt

SEQ ID NO: 323900 - DNA, 20 bp, Artificial Sequence
  Description of Artificial Sequence: Synthetic oligonucleotide
  Target: LAMA2; (+) strand; PAM type: YTN; PAM sequence: TTT
tttgtcatttgatgcagttc

SEQ ID NO: 323901 - DNA, 20 bp, Artificial Sequence
  Description of Artificial Sequence: Synthetic oligonucleotide
  Target: LAMA2; (+) strand; PAM type: YTN; PAM sequence: TTT
ttgtcatttgatgcagttct

SEQ ID NO: 323902 - DNA, 20 bp, Artificial Sequence
  Description of Artificial Sequence: Synthetic oligonucleotide
  Target: LAMA2; (+) strand; PAM type: YTN; PAM sequence: TTT
tgtcatttgatgcagttcta

SEQ ID NO: 323903 - DNA, 20 bp, Artificial Sequence
  Description of Artificial Sequence: Synthetic oligonucleotide
  Target: LAMA2; (+) strand; PAM type: YTN; PAM sequence: TTT
gtcatttgatgcagttctat

SEQ ID NO: 323904 - DNA, 20 bp, Artificial Sequence
  Description of Artificial Sequence: Synthetic oligonucleotide
  Target: LAMA2; (+) strand; PAM type: YTN; PAM sequence: TTG
tcatttgatgcagttctata

SEQ ID NO: 323905 - DNA, 20 bp, Artificial Sequence
  Description of Artificial Sequence: Synthetic oligonucleotide
  Target: LAMA2; (+) strand; PAM type: YTN; PAM sequence: TTT
gatgcagttctatactgtac

SEQ ID NO: 323906 - DNA, 20 bp, Artificial Sequence
  Description of Artificial Sequence: Synthetic oligonucleotide
  Target: LAMA2; (+) strand; PAM type: YTN; PAM sequence: TTG
atgcagttctatactgtacc

SEQ ID NO: 323907 - DNA, 20 bp, Artificial Sequence
  Description of Artificial Sequence: Synthetic oligonucleotide
  Target: LAMA2; (+) strand; PAM type: YTN; PAM sequence: TTC
tatactgtaccttgtctttc

SEQ ID NO: 323908 - DNA, 20 bp, Artificial Sequence
  Description of Artificial Sequence: Synthetic oligonucleotide
  Target: LAMA2; (+) strand; PAM type: YTN; PAM sequence: CTA
tactgtaccttgtctttctg

SEQ ID NO: 323909 - DNA, 20 bp, Artificial Sequence
  Description of Artificial Sequence: Synthetic oligonucleotide
  Target: LAMA2; (+) strand; PAM type: YTN; PAM sequence: CTG
taccttgtctttctgcaaag

SEQ ID NO: 323910 - DNA, 20 bp, Artificial Sequence
  Description of Artificial Sequence: Synthetic oligonucleotide
  Target: LAMA2; (+) strand; PAM type: YTN; PAM sequence: CTT
gtctttctgcaaagcaaaga

SEQ ID NO: 323911 - DNA, 20 bp, Artificial Sequence
  Description of Artificial Sequence: Synthetic oligonucleotide
  Target: LAMA2; (+) strand; PAM type: YTN; PAM sequence: TTG
tctttctgcaaagcaaagat

SEQ ID NO: 323912 - DNA, 20 bp, Artificial Sequence
  Description of Artificial Sequence: Synthetic oligonucleotide
  Target: LAMA2; (+) strand; PAM type: YTN; PAM sequence: CTT
tctgcaaagcaaagataata

SEQ ID NO: 323913 - DNA, 20 bp, Artificial Sequence
  Description of Artificial Sequence: Synthetic oligonucleotide
  Target: LAMA2; (+) strand; PAM type: YTN; PAM sequence: TTT
ctgcaaagcaaagataatat

SEQ ID NO: 323914 - DNA, 20 bp, Artificial Sequence
  Description of Artificial Sequence: Synthetic oligonucleotide
  Target: LAMA2; (+) strand; PAM type: YTN; PAM sequence: TTC
tgcaaagcaaagataatatt

SEQ ID NO: 323915 - DNA, 20 bp, Artificial Sequence
  Description of Artificial Sequence: Synthetic oligonucleotide
  Target: LAMA2; (+) strand; PAM type: YTN; PAM sequence: CTG
caaagcaaagataatattgt

SEQ ID NO: 323916 - DNA, 20 bp, Artificial Sequence
  Description of Artificial Sequence: Synthetic oligonucleotide
  Target: LAMA2; (+) strand; PAM type: YTN; PAM sequence: TTG
tagtttaaaacttggctatc

SEQ ID NO: 323917 - DNA, 20 bp, Artificial Sequence
  Description of Artificial Sequence: Synthetic oligonucleotide
  Target: LAMA2; (+) strand; PAM type: YTN; PAM sequence: TTT
aaaacttggctatccaccac

SEQ ID NO: 323918 - DNA, 20 bp, Artificial Sequence
  Description of Artificial Sequence: Synthetic oligonucleotide
  Target: LAMA2; (+) strand; PAM type: YTN; PAM sequence: TTA
aaacttggctatccaccacc

SEQ ID NO: 323919 - DNA, 20 bp, Artificial Sequence
  Description of Artificial Sequence: Synthetic oligonucleotide
  Target: LAMA2; (+) strand; PAM type: YTN; PAM sequence: CTT
ggctatccaccaccatgagg

SEQ ID NO: 323920 - DNA, 20 bp, Artificial Sequence
  Description of Artificial Sequence: Synthetic oligonucleotide
  Target: LAMA2; (+) strand; PAM type: YTN; PAM sequence: TTG
gctatccaccaccatgaggg

SEQ ID NO: 323921 - DNA, 20 bp, Artificial Sequence
  Description of Artificial Sequence: Synthetic oligonucleotide
  Target: LAMA2; (+) strand; PAM type: YTN; PAM sequence: CTA
tccaccaccatgagggaata

SEQ ID NO: 323922 - DNA, 20 bp, Artificial Sequence
  Description of Artificial Sequence: Synthetic oligonucleotide
  Target: LAMA2; (+) strand; PAM type: YTN; PAM sequence: CTT
ctcttatttttctgcagaaa

SEQ ID NO: 323923 - DNA, 20 bp, Artificial Sequence
  Description of Artificial Sequence: Synthetic oligonucleotide
  Target: LAMA2; (+) strand; PAM type: YTN; PAM sequence: TTC
tcttatttttctgcagaaac

SEQ ID NO: 323924 - DNA, 20 bp, Artificial Sequence
  Description of Artificial Sequence: Synthetic oligonucleotide
  Target: LAMA2; (+) strand; PAM type: YTN; PAM sequence: CTC
ttatttttctgcagaaacat

SEQ ID NO: 323925 - DNA, 20 bp, Artificial Sequence
  Description of Artificial Sequence: Synthetic oligonucleotide
  Target: LAMA2; (+) strand; PAM type: YTN; PAM sequence: CTT
atttttctgcagaaacattt

SEQ ID NO: 323926 - DNA, 20 bp, Artificial Sequence
  Description of Artificial Sequence: Synthetic oligonucleotide
  Target: LAMA2; (+) strand; PAM type: YTN; PAM sequence: TTA
tttttctgcagaaacattta

SEQ ID NO: 323927 - DNA, 20 bp, Artificial Sequence
  Description of Artificial Sequence: Synthetic oligonucleotide
  Target: LAMA2; (+) strand; PAM type: YTN; PAM sequence: TTT
ttctgcagaaacatttaaaa

SEQ ID NO: 323928 - DNA, 20 bp, Artificial Sequence
  Description of Artificial Sequence: Synthetic oligonucleotide
  Target: LAMA2; (+) strand; PAM type: YTN; PAM sequence: TTT
tctgcagaaacatttaaaat

SEQ ID NO: 323929 - DNA, 20 bp, Artificial Sequence
  Description of Artificial Sequence: Synthetic oligonucleotide
  Target: LAMA2; (+) strand; PAM type: YTN; PAM sequence: TTT
ctgcagaaacatttaaaatt

SEQ ID NO: 323930 - DNA, 20 bp, Artificial Sequence
  Description of Artificial Sequence: Synthetic oligonucleotide
  Target: LAMA2; (+) strand; PAM type: YTN; PAM sequence: TTC
tgcagaaacatttaaaattt

SEQ ID NO: 323931 - DNA, 20 bp, Artificial Sequence
  Description of Artificial Sequence: Synthetic oligonucleotide
  Target: LAMA2; (+) strand; PAM type: YTN; PAM sequence: CTG
cagaaacatttaaaatttct

SEQ ID NO: 323932 - DNA, 20 bp, Artificial Sequence
  Description of Artificial Sequence: Synthetic oligonucleotide
  Target: LAMA2; (+) strand; PAM type: YTN; PAM sequence: TTT
aaaatttcttcagctatatt

SEQ ID NO: 323933 - DNA, 20 bp, Artificial Sequence
  Description of Artificial Sequence: Synthetic oligonucleotide
  Target: LAMA2; (+) strand; PAM type: YTN; PAM sequence: TTA
aaatttcttcagctatattt

SEQ ID NO: 323934 - DNA, 20 bp, Artificial Sequence
  Description of Artificial Sequence: Synthetic oligonucleotide
  Target: LAMA2; (+) strand; PAM type: YTN; PAM sequence: TTT
cttcagctatattttgtact

SEQ ID NO: 323935 - DNA, 20 bp, Artificial Sequence
  Description of Artificial Sequence: Synthetic oligonucleotide
  Target: LAMA2; (+) strand; PAM type: YTN; PAM sequence: TTC
ttcagctatattttgtactt

SEQ ID NO: 323936 - DNA, 20 bp, Artificial Sequence
  Description of Artificial Sequence: Synthetic oligonucleotide
  Target: LAMA2; (+) strand; PAM type: YTN; PAM sequence: CTT
cagctatattttgtacttac

SEQ ID NO: 323937 - DNA, 20 bp, Artificial Sequence
  Description of Artificial Sequence: Synthetic oligonucleotide
  Target: LAMA2; (+) strand; PAM type: YTN; PAM sequence: TTC
agctatattttgtacttacc

SEQ ID NO: 323938 - DNA, 20 bp, Artificial Sequence
  Description of Artificial Sequence: Synthetic oligonucleotide
  Target: LAMA2; (+) strand; PAM type: YTN; PAM sequence: CTA
tattttgtacttacctgaat

SEQ ID NO: 323939 - DNA, 20 bp, Artificial Sequence
  Description of Artificial Sequence: Synthetic oligonucleotide
  Target: LAMA2; (+) strand; PAM type: YTN; PAM sequence: TTT
tgtacttacctgaattttaa

SEQ ID NO: 323940 - DNA, 20 bp, Artificial Sequence
  Description of Artificial Sequence: Synthetic oligonucleotide
  Target: LAMA2; (+) strand; PAM type: YTN; PAM sequence: TTT
gtacttacctgaattttaaa

SEQ ID NO: 323941 - DNA, 20 bp, Artificial Sequence
  Description of Artificial Sequence: Synthetic oligonucleotide
  Target: LAMA2; (+) strand; PAM type: YTN; PAM sequence: TTG
tacttacctgaattttaaaa

SEQ ID NO: 323942 - DNA, 20 bp, Artificial Sequence
  Description of Artificial Sequence: Synthetic oligonucleotide
  Target: LAMA2; (+) strand; PAM type: YTN; PAM sequence: CTT
acctgaattttaaaaataga

SEQ ID NO: 323943 - DNA, 20 bp, Artificial Sequence
  Description of Artificial Sequence: Synthetic oligonucleotide
  Target: LAMA2; (+) strand; PAM type: YTN; PAM sequence: TTA
cctgaattttaaaaatagaa

SEQ ID NO: 323944 - DNA, 20 bp, Artificial Sequence
  Description of Artificial Sequence: Synthetic oligonucleotide
  Target: LAMA2; (+) strand; PAM type: YTN; PAM sequence: CTG
aattttaaaaatagaatata

SEQ ID NO: 323945 - DNA, 20 bp, Artificial Sequence
  Description of Artificial Sequence: Synthetic oligonucleotide
  Target: LAMA2; (+) strand; PAM type: YTN; PAM sequence: TTT
taaaaatagaatatagataa

SEQ ID NO: 323946 - DNA, 20 bp, Artificial Sequence
  Description of Artificial Sequence: Synthetic oligonucleotide
  Target: LAMA2; (+) strand; PAM type: YTN; PAM sequence: TTT
aaaaatagaatatagataat

SEQ ID NO: 323947 - DNA, 20 bp, Artificial Sequence
  Description of Artificial Sequence: Synthetic oligonucleotide
  Target: LAMA2; (+) strand; PAM type: YTN; PAM sequence: TTA
aaaatagaatatagataata

SEQ ID NO: 323948 - DNA, 20 bp, Artificial Sequence
  Description of Artificial Sequence: Synthetic oligonucleotide
  Target: LAMA2; (+) strand; PAM type: YTN; PAM sequence: TTT
ccctatttttgtgactcact

SEQ ID NO: 323949 - DNA, 20 bp, Artificial Sequence
  Description of Artificial Sequence: Synthetic oligonucleotide
  Target: LAMA2; (+) strand; PAM type: YTN; PAM sequence: TTC
cctatttttgtgactcactc

SEQ ID NO: 323950 - DNA, 20 bp, Artificial Sequence
  Description of Artificial Sequence: Synthetic oligonucleotide
  Target: LAMA2; (+) strand; PAM type: YTN; PAM sequence: CTA
tttttgtgactcactcactg

SEQ ID NO: 323951 - DNA, 20 bp, Artificial Sequence
  Description of Artificial Sequence: Synthetic oligonucleotide
  Target: LAMA2; (+) strand; PAM type: YTN; PAM sequence: TTT
ttgtgactcactcactgtta

SEQ ID NO: 323952 - DNA, 20 bp, Artificial Sequence
  Description of Artificial Sequence: Synthetic oligonucleotide
  Target: LAMA2; (+) strand; PAM type: YTN; PAM sequence: TTT
tgtgactcactcactgttat

SEQ ID NO: 323953 - DNA, 20 bp, Artificial Sequence
  Description of Artificial Sequence: Synthetic oligonucleotide
  Target: LAMA2; (+) strand; PAM type: YTN; PAM sequence: TTT
gtgactcactcactgttatt

SEQ ID NO: 323954 - DNA, 20 bp, Artificial Sequence
  Description of Artificial Sequence: Synthetic oligonucleotide
  Target: LAMA2; (+) strand; PAM type: YTN; PAM sequence: TTG
tgactcactcactgttatta

SEQ ID NO: 323955 - DNA, 20 bp, Artificial Sequence
  Description of Artificial Sequence: Synthetic oligonucleotide
  Target: LAMA2; (+) strand; PAM type: YTN; PAM sequence: CTC
actcactgttattaatagtt

SEQ ID NO: 323956 - DNA, 20 bp, Artificial Sequence
  Description of Artificial Sequence: Synthetic oligonucleotide
  Target: LAMA2; (+) strand; PAM type: YTN; PAM sequence: CTC
actgttattaatagttattt

SEQ ID NO: 323957 - DNA, 20 bp, Artificial Sequence
  Description of Artificial Sequence: Synthetic oligonucleotide
  Target: LAMA2; (+) strand; PAM type: YTN; PAM sequence: CTG
ttattaatagttatttttct

SEQ ID NO: 323958 - DNA, 20 bp, Artificial Sequence
  Description of Artificial Sequence: Synthetic oligonucleotide
  Target: LAMA2; (+) strand; PAM type: YTN; PAM sequence: TTA
ttaatagttatttttctaat

SEQ ID NO: 323959 - DNA, 20 bp, Artificial Sequence
  Description of Artificial Sequence: Synthetic oligonucleotide
  Target: LAMA2; (+) strand; PAM type: YTN; PAM sequence: TTA
atagttatttttctaatttg

SEQ ID NO: 323960 - DNA, 20 bp, Artificial Sequence
  Description of Artificial Sequence: Synthetic oligonucleotide
  Target: LAMA2; (+) strand; PAM type: YTN; PAM sequence: TTA
tttttctaatttgaatatta

SEQ ID NO: 323961 - DNA, 20 bp, Artificial Sequence
  Description of Artificial Sequence: Synthetic oligonucleotide
  Target: LAMA2; (+) strand; PAM type: YTN; PAM sequence: TTT
ttctaatttgaatattatgc

SEQ ID NO: 323962 - DNA, 20 bp, Artificial Sequence
  Description of Artificial Sequence: Synthetic oligonucleotide
  Target: LAMA2; (+) strand; PAM type: YTN; PAM sequence: TTT
tctaatttgaatattatgct

SEQ ID NO: 323963 - DNA, 20 bp, Artificial Sequence
  Description of Artificial Sequence: Synthetic oligonucleotide
  Target: LAMA2; (+) strand; PAM type: YTN; PAM sequence: TTT
ctaatttgaatattatgctt

SEQ ID NO: 323964 - DNA, 20 bp, Artificial Sequence
  Description of Artificial Sequence: Synthetic oligonucleotide
  Target: LAMA2; (+) strand; PAM type: YTN; PAM sequence: TTC
taatttgaatattatgcttt

SEQ ID NO: 323965 - DNA, 20 bp, Artificial Sequence
  Description of Artificial Sequence: Synthetic oligonucleotide
  Target: LAMA2; (+) strand; PAM type: YTN; PAM sequence: CTA
atttgaatattatgctttgt

SEQ ID NO: 323966 - DNA, 20 bp, Artificial Sequence
  Description of Artificial Sequence: Synthetic oligonucleotide
  Target: LAMA2; (+) strand; PAM type: YTN; PAM sequence: TTT
gaatattatgctttgttaag

SEQ ID NO: 323967 - DNA, 20 bp, Artificial Sequence
  Description of Artificial Sequence: Synthetic oligonucleotide
  Target: LAMA2; (+) strand; PAM type: YTN; PAM sequence: TTG
aatattatgctttgttaagt

SEQ ID NO: 323968 - DNA, 20 bp, Artificial Sequence
  Description of Artificial Sequence: Synthetic oligonucleotide
  Target: LAMA2; (+) strand; PAM type: YTN; PAM sequence: TTA
tgctttgttaagttatttag

SEQ ID NO: 323969 - DNA, 20 bp, Artificial Sequence
  Description of Artificial Sequence: Synthetic oligonucleotide
  Target: LAMA2; (+) strand; PAM type: YTN; PAM sequence: CTT
tgttaagttatttagaacca

SEQ ID NO: 323970 - DNA, 20 bp, Artificial Sequence
  Description of Artificial Sequence: Synthetic oligonucleotide
  Target: LAMA2; (+) strand; PAM type: YTN; PAM sequence: TTT
gttaagttatttagaaccac

SEQ ID NO: 323971 - DNA, 20 bp, Artificial Sequence
  Description of Artificial Sequence: Synthetic oligonucleotide
  Target: LAMA2; (+) strand; PAM type: YTN; PAM sequence: TTG
ttaagttatttagaaccact

SEQ ID NO: 323972 - DNA, 20 bp, Artificial Sequence
  Description of Artificial Sequence: Synthetic oligonucleotide
  Target: LAMA2; (+) strand; PAM type: YTN; PAM sequence: TTA
agttatttagaaccacttac

SEQ ID NO: 323973 - DNA, 20 bp, Artificial Sequence
  Description of Artificial Sequence: Synthetic oligonucleotide
  Target: LAMA2; (+) strand; PAM type: YTN; PAM sequence: TTA
tttagaaccacttaccccat

SEQ ID NO: 323974 - DNA, 20 bp, Artificial Sequence
  Description of Artificial Sequence: Synthetic oligonucleotide
  Target: LAMA2; (+) strand; PAM type: YTN; PAM sequence: TTT
agaaccacttaccccatctg

SEQ ID NO: 323975 - DNA, 20 bp, Artificial Sequence
  Description of Artificial Sequence: Synthetic oligonucleotide
  Target: LAMA2; (+) strand; PAM type: YTN; PAM sequence: TTA
gaaccacttaccccatctgt

SEQ ID NO: 323976 - DNA, 20 bp, Artificial Sequence
  Description of Artificial Sequence: Synthetic oligonucleotide
  Target: LAMA2; (+) strand; PAM type: YTN; PAM sequence: CTT
accccatctgtaaataaccc

SEQ ID NO: 323977 - DNA, 20 bp, Artificial Sequence
  Description of Artificial Sequence: Synthetic oligonucleotide
  Target: LAMA2; (+) strand; PAM type: YTN; PAM sequence: TTA
ccccatctgtaaataacccc

SEQ ID NO: 323978 - DNA, 20 bp, Artificial Sequence
  Description of Artificial Sequence: Synthetic oligonucleotide
  Target: LAMA2; (+) strand; PAM type: YTN; PAM sequence: CTG
taaataaccccgaactccta

SEQ ID NO: 323979 - DNA, 20 bp, Artificial Sequence
  Description of Artificial Sequence: Synthetic oligonucleotide
  Target: LAMA2; (+) strand; PAM type: YTN; PAM sequence: CTC
ctatactgtcatcacctttg

SEQ ID NO: 323980 - DNA, 20 bp, Artificial Sequence
  Description of Artificial Sequence: Synthetic oligonucleotide
  Target: LAMA2; (+) strand; PAM type: YTN; PAM sequence: CTA
tactgtcatcacctttgttt

SEQ ID NO: 323981 - DNA, 20 bp, Artificial Sequence
  Description of Artificial Sequence: Synthetic oligonucleotide
  Target: LAMA2; (+) strand; PAM type: YTN; PAM sequence: CTG
tcatcacctttgtttcttct

SEQ ID NO: 323982 - DNA, 20 bp, Artificial Sequence
  Description of Artificial Sequence: Synthetic oligonucleotide
  Target: LAMA2; (+) strand; PAM type: YTN; PAM sequence: CTT
tgtttcttctaacatgttgt

SEQ ID NO: 323983 - DNA, 20 bp, Artificial Sequence
  Description of Artificial Sequence: Synthetic oligonucleotide
  Target: LAMA2; (+) strand; PAM type: YTN; PAM sequence: TTT
gtttcttctaacatgttgta

SEQ ID NO: 323984 - DNA, 20 bp, Artificial Sequence
  Description of Artificial Sequence: Synthetic oligonucleotide
  Target: LAMA2; (+) strand; PAM type: YTN; PAM sequence: TTG
tttcttctaacatgttgtaa

SEQ ID NO: 323985 - DNA, 20 bp, Artificial Sequence
  Description of Artificial Sequence: Synthetic oligonucleotide
  Target: LAMA2; (+) strand; PAM type: YTN; PAM sequence: TTT
cttctaacatgttgtaatgt

SEQ ID NO: 323986 - DNA, 20 bp, Artificial Sequence
  Description of Artificial Sequence: Synthetic oligonucleotide
  Target: LAMA2; (+) strand; PAM type: YTN; PAM sequence: TTC
ttctaacatgttgtaatgta

SEQ ID NO: 323987 - DNA, 20 bp, Artificial Sequence
  Description of Artificial Sequence: Synthetic oligonucleotide
  Target: LAMA2; (+) strand; PAM type: YTN; PAM sequence: CTT
ctaacatgttgtaatgtaaa

SEQ ID NO: 323988 - DNA, 20 bp, Artificial Sequence
  Description of Artificial Sequence: Synthetic oligonucleotide
  Target: LAMA2; (+) strand; PAM type: YTN; PAM sequence: TTC
taacatgttgtaatgtaaaa

SEQ ID NO: 323989 - DNA, 20 bp, Artificial Sequence
  Description of Artificial Sequence: Synthetic oligonucleotide
  Target: LAMA2; (+) strand; PAM type: YTN; PAM sequence: CTA
acatgttgtaatgtaaaatc

SEQ ID NO: 323990 - DNA, 20 bp, Artificial Sequence
  Description of Artificial Sequence: Synthetic oligonucleotide
  Target: LAMA2; (+) strand; PAM type: YTN; PAM sequence: TTG
taatgtaaaatcaaaattat

SEQ ID NO: 323991 - DNA, 20 bp, Artificial Sequence
  Description of Artificial Sequence: Synthetic oligonucleotide
  Target: LAMA2; (+) strand; PAM type: YTN; PAM sequence: TTA
ttaagttataattatttatg

SEQ ID NO: 323992 - DNA, 20 bp, Artificial Sequence
  Description of Artificial Sequence: Synthetic oligonucleotide
  Target: LAMA2; (+) strand; PAM type: YTN; PAM sequence: TTA
agttataattatttatgata

SEQ ID NO: 323993 - DNA, 20 bp, Artificial Sequence
  Description of Artificial Sequence: Synthetic oligonucleotide
  Target: LAMA2; (+) strand; PAM type: YTN; PAM sequence: TTA
taattatttatgatataaga

SEQ ID NO: 323994 - DNA, 20 bp, Artificial Sequence
  Description of Artificial Sequence: Synthetic oligonucleotide
  Target: LAMA2; (+) strand; PAM type: YTN; PAM sequence: TTA
tttatgatataagaagtatt

SEQ ID NO: 323995 - DNA, 20 bp, Artificial Sequence
  Description of Artificial Sequence: Synthetic oligonucleotide
  Target: LAMA2; (+) strand; PAM type: YTN; PAM sequence: TTT
atgatataagaagtattctg

SEQ ID NO: 323996 - DNA, 20 bp, Artificial Sequence
  Description of Artificial Sequence: Synthetic oligonucleotide
  Target: LAMA2; (+) strand; PAM type: YTN; PAM sequence: TTA
tgatataagaagtattctgt

SEQ ID NO: 323997 - DNA, 20 bp, Artificial Sequence
  Description of Artificial Sequence: Synthetic oligonucleotide
  Target: LAMA2; (+) strand; PAM type: YTN; PAM sequence: TTC
tgtggataaagtatacattt

SEQ ID NO: 323998 - DNA, 20 bp, Artificial Sequence
  Description of Artificial Sequence: Synthetic oligonucleotide
  Target: LAMA2; (+) strand; PAM type: YTN; PAM sequence: CTG
tggataaagtatacatttat

SEQ ID NO: 323999 - DNA, 20 bp, Artificial Sequence
  Description of Artificial Sequence: Synthetic oligonucleotide
  Target: LAMA2; (+) strand; PAM type: YTN; PAM sequence: TTT
attttggatatttagaataa

SEQ ID NO: 324000 - DNA, 20 bp, Artificial Sequence
  Description of Artificial Sequence: Synthetic oligonucleotide
  Target: LAMA2; (+) strand; PAM type: YTN; PAM sequence: TTA
ttttggatatttagaataat

SEQ ID NO: 324001 - DNA, 20 bp, Artificial Sequence
  Description of Artificial Sequence: Synthetic oligonucleotide
  Target: LAMA2; (+) strand; PAM type: YTN; PAM sequence: TTT
tggatatttagaataatttt

SEQ ID NO: 324002 - DNA, 20 bp, Artificial Sequence
  Description of Artificial Sequence: Synthetic oligonucleotide
  Target: LAMA2; (+) strand; PAM type: YTN; PAM sequence: TTT
ggatatttagaataattttt

SEQ ID NO: 324003 - DNA, 20 bp, Artificial Sequence
  Description of Artificial Sequence: Synthetic oligonucleotide
  Target: LAMA2; (+) strand; PAM type: YTN; PAM sequence: TTG
gatatttagaataatttttg

SEQ ID NO: 324004 - DNA, 20 bp, Artificial Sequence
  Description of Artificial Sequence: Synthetic oligonucleotide
  Target: LAMA2; (+) strand; PAM type: YTN; PAM sequence: TTT
agaataatttttgtttgttt

SEQ ID NO: 324005 - DNA, 20 bp, Artificial Sequence
  Description of Artificial Sequence: Synthetic oligonucleotide
  Target: LAMA2; (+) strand; PAM type: YTN; PAM sequence: TTA
gaataatttttgtttgtttt

SEQ ID NO: 324006 - DNA, 20 bp, Artificial Sequence
  Description of Artificial Sequence: Synthetic oligonucleotide
  Target: LAMA2; (+) strand; PAM type: YTN; PAM sequence: TTT
ttgtttgtttttggcataat

SEQ ID NO: 324007 - DNA, 20 bp, Artificial Sequence
  Description of Artificial Sequence: Synthetic oligonucleotide
  Target: LAMA2; (+) strand; PAM type: YTN; PAM sequence: TTT
tgtttgtttttggcataatt

SEQ ID NO: 324008 - DNA, 20 bp, Artificial Sequence
  Description of Artificial Sequence: Synthetic oligonucleotide
  Target: LAMA2; (+) strand; PAM type: YTN; PAM sequence: TTT
gtttgtttttggcataattc

SEQ ID NO: 324009 - DNA, 20 bp, Artificial Sequence
  Description of Artificial Sequence: Synthetic oligonucleotide
  Target: LAMA2; (+) strand; PAM type: YTN; PAM sequence: TTG
tttgtttttggcataattcc

SEQ ID NO: 324010 - DNA, 20 bp, Artificial Sequence
  Description of Artificial Sequence: Synthetic oligonucleotide
  Target: LAMA2; (+) strand; PAM type: YTN; PAM sequence: TTT
gtttttggcataattccttt

SEQ ID NO: 324011 - DNA, 20 bp, Artificial Sequence
  Description of Artificial Sequence: Synthetic oligonucleotide
  Target: LAMA2; (+) strand; PAM type: YTN; PAM sequence: TTG
tttttggcataattcctttt

SEQ ID NO: 324012 - DNA, 20 bp, Artificial Sequence
  Description of Artificial Sequence: Synthetic oligonucleotide
  Target: LAMA2; (+) strand; PAM type: YTN; PAM sequence: TTT
ttggcataattcctttttct

SEQ ID NO: 324013 - DNA, 20 bp, Artificial Sequence
  Description of Artificial Sequence: Synthetic oligonucleotide
  Target: LAMA2; (+) strand; PAM type: YTN; PAM sequence: TTT
tggcataattcctttttctt

SEQ ID NO: 324014 - DNA, 20 bp, Artificial Sequence
  Description of Artificial Sequence: Synthetic oligonucleotide
  Target: LAMA2; (+) strand; PAM type: YTN; PAM sequence: TTT
ggcataattcctttttcttg

SEQ ID NO: 324015 - DNA, 20 bp, Artificial Sequence
  Description of Artificial Sequence: Synthetic oligonucleotide
  Target: LAMA2; (+) strand; PAM type: YTN; PAM sequence: TTG
gcataattcctttttcttga

SEQ ID NO: 324016 - DNA, 20 bp, Artificial Sequence
  Description of Artificial Sequence: Synthetic oligonucleotide
  Target: LAMA2; (+) strand; PAM type: YTN; PAM sequence: TTC
ctttttcttgactatttaca

SEQ ID NO: 324017 - DNA, 20 bp, Artificial Sequence
  Description of Artificial Sequence: Synthetic oligonucleotide
  Target: LAMA2; (+) strand; PAM type: YTN; PAM sequence: CTT
tttcttgactatttacagga

SEQ ID NO: 324018 - DNA, 20 bp, Artificial Sequence
  Description of Artificial Sequence: Synthetic oligonucleotide
  Target: LAMA2; (+) strand; PAM type: YTN; PAM sequence: TTT
ttcttgactatttacaggaa

SEQ ID NO: 324019 - DNA, 20 bp, Artificial Sequence
  Description of Artificial Sequence: Synthetic oligonucleotide
  Target: LAMA2; (+) strand; PAM type: YTN; PAM sequence: TTT
tcttgactatttacaggaaa

SEQ ID NO: 324020 - DNA, 20 bp, Artificial Sequence
  Description of Artificial Sequence: Synthetic oligonucleotide
  Target: LAMA2; (+) strand; PAM type: YTN; PAM sequence: TTT
cttgactatttacaggaaat

SEQ ID NO: 324021 - DNA, 20 bp, Artificial Sequence
  Description of Artificial Sequence: Synthetic oligonucleotide
  Target: LAMA2; (+) strand; PAM type: YTN; PAM sequence: TTC
ttgactatttacaggaaata

SEQ ID NO: 324022 - DNA, 20 bp, Artificial Sequence
  Description of Artificial Sequence: Synthetic oligonucleotide
  Target: LAMA2; (+) strand; PAM type: YTN; PAM sequence: CTT
gactatttacaggaaatagc

SEQ ID NO: 324023 - DNA, 20 bp, Artificial Sequence
  Description of Artificial Sequence: Synthetic oligonucleotide
  Target: LAMA2; (+) strand; PAM type: YTN; PAM sequence: TTG
actatttacaggaaatagct

SEQ ID NO: 324024 - DNA, 20 bp, Artificial Sequence
  Description of Artificial Sequence: Synthetic oligonucleotide
  Target: LAMA2; (+) strand; PAM type: YTN; PAM sequence: CTA
tttacaggaaatagctagtt

SEQ ID NO: 324025 - DNA, 20 bp, Artificial Sequence
  Description of Artificial Sequence: Synthetic oligonucleotide
  Target: LAMA2; (+) strand; PAM type: YTN; PAM sequence: TTT
acaggaaatagctagttata

SEQ ID NO: 324026 - DNA, 20 bp, Artificial Sequence
  Description of Artificial Sequence: Synthetic oligonucleotide
  Target: LAMA2; (+) strand; PAM type: YTN; PAM sequence: TTA
caggaaatagctagttatag

SEQ ID NO: 324027 - DNA, 20 bp, Artificial Sequence
  Description of Artificial Sequence: Synthetic oligonucleotide
  Target: LAMA2; (+) strand; PAM type: YTN; PAM sequence: CTA
gttataggttttacctaagt

SEQ ID NO: 324028 - DNA, 20 bp, Artificial Sequence
  Description of Artificial Sequence: Synthetic oligonucleotide
  Target: LAMA2; (+) strand; PAM type: YTN; PAM sequence: TTA
taggttttacctaagtctca

SEQ ID NO: 324029 - DNA, 20 bp, Artificial Sequence
  Description of Artificial Sequence: Synthetic oligonucleotide
  Target: LAMA2; (+) strand; PAM type: YTN; PAM sequence: TTT
tacctaagtctcattcaagc

SEQ ID NO: 324030 - DNA, 20 bp, Artificial Sequence
  Description of Artificial Sequence: Synthetic oligonucleotide
  Target: LAMA2; (+) strand; PAM type: YTN; PAM sequence: TTT
acctaagtctcattcaagct

SEQ ID NO: 324031 - DNA, 20 bp, Artificial Sequence
  Description of Artificial Sequence: Synthetic oligonucleotide
  Target: LAMA2; (+) strand; PAM type: YTN; PAM sequence: TTA
cctaagtctcattcaagcta

SEQ ID NO: 324032 - DNA, 20 bp, Artificial Sequence
  Description of Artificial Sequence: Synthetic oligonucleotide
  Target: LAMA2; (+) strand; PAM type: YTN; PAM sequence: CTA
agtctcattcaagctaatgg

SEQ ID NO: 324033 - DNA, 20 bp, Artificial Sequence
  Description of Artificial Sequence: Synthetic oligonucleotide
  Target: LAMA2; (+) strand; PAM type: YTN; PAM sequence: CTC
attcaagctaatggattatg

SEQ ID NO: 324034 - DNA, 20 bp, Artificial Sequence
  Description of Artificial Sequence: Synthetic oligonucleotide
  Target: LAMA2; (+) strand; PAM type: YTN; PAM sequence: TTC
aagctaatggattatgcaaa

SEQ ID NO: 324035 - DNA, 20 bp, Artificial Sequence
  Description of Artificial Sequence: Synthetic oligonucleotide
  Target: LAMA2; (+) strand; PAM type: YTN; PAM sequence: CTA
atggattatgcaaataaagt

SEQ ID NO: 324036 - DNA, 20 bp, Artificial Sequence
  Description of Artificial Sequence: Synthetic oligonucleotide
  Target: LAMA2; (+) strand; PAM type: YTN; PAM sequence: TTA
tgcaaataaagtttgctcac

SEQ ID NO: 324037 - DNA, 20 bp, Artificial Sequence
  Description of Artificial Sequence: Synthetic oligonucleotide
  Target: LAMA2; (+) strand; PAM type: YTN; PAM sequence: TTT
gctcactgaaggacaagaat

SEQ ID NO: 324038 - DNA, 20 bp, Artificial Sequence
  Description of Artificial Sequence: Synthetic oligonucleotide
  Target: LAMA2; (+) strand; PAM type: YTN; PAM sequence: TTG
ctcactgaaggacaagaata

SEQ ID NO: 324039 - DNA, 20 bp, Artificial Sequence
  Description of Artificial Sequence: Synthetic oligonucleotide
  Target: LAMA2; (+) strand; PAM type: YTN; PAM sequence: CTC
actgaaggacaagaatattc

SEQ ID NO: 324040 - DNA, 20 bp, Artificial Sequence
  Description of Artificial Sequence: Synthetic oligonucleotide
  Target: LAMA2; (+) strand; PAM type: YTN; PAM sequence: CTG
aaggacaagaatattctgta

SEQ ID NO: 324041 - DNA, 20 bp, Artificial Sequence
  Description of Artificial Sequence: Synthetic oligonucleotide
  Target: LAMA2; (+) strand; PAM type: YTN; PAM sequence: TTC
tgtatcttttttctggttct

SEQ ID NO: 324042 - DNA, 20 bp, Artificial Sequence
  Description of Artificial Sequence: Synthetic oligonucleotide
  Target: LAMA2; (+) strand; PAM type: YTN; PAM sequence: CTG
tatcttttttctggttcttc

SEQ ID NO: 324043 - DNA, 20 bp, Artificial Sequence
  Description of Artificial Sequence: Synthetic oligonucleotide
  Target: LAMA2; (+) strand; PAM type: YTN; PAM sequence: CTT
ttttctggttcttcaaggtg

SEQ ID NO: 324044 - DNA, 20 bp, Artificial Sequence
  Description of Artificial Sequence: Synthetic oligonucleotide
  Target: LAMA2; (+) strand; PAM type: YTN; PAM sequence: TTT
tttctggttcttcaaggtga

SEQ ID NO: 324045 - DNA, 20 bp, Artificial Sequence
  Description of Artificial Sequence: Synthetic oligonucleotide
  Target: LAMA2; (+) strand; PAM type: YTN; PAM sequence: TTT
ttctggttcttcaaggtgat

SEQ ID NO: 324046 - DNA, 20 bp, Artificial Sequence
  Description of Artificial Sequence: Synthetic oligonucleotide
  Target: LAMA2; (+) strand; PAM type: YTN; PAM sequence: TTT
tctggttcttcaaggtgata

SEQ ID NO: 324047 - DNA, 20 bp, Artificial Sequence
  Description of Artificial Sequence: Synthetic oligonucleotide
  Target: LAMA2; (+) strand; PAM type: YTN; PAM sequence: TTT
ctggttcttcaaggtgatag

SEQ ID NO: 324048 - DNA, 20 bp, Artificial Sequence
  Description of Artificial Sequence: Synthetic oligonucleotide
  Target: LAMA2; (+) strand; PAM type: YTN; PAM sequence: TTC
tggttcttcaaggtgatagt

SEQ ID NO: 324049 - DNA, 20 bp, Artificial Sequence
  Description of Artificial Sequence: Synthetic oligonucleotide
  Target: LAMA2; (+) strand; PAM type: YTN; PAM sequence: CTG
gttcttcaaggtgatagttc

SEQ ID NO: 324050 - DNA, 20 bp, Artificial Sequence
  Description of Artificial Sequence: Synthetic oligonucleotide
  Target: LAMA2; (+) strand; PAM type: YTN; PAM sequence: TTC
ttcaaggtgatagttcataa

SEQ ID NO: 324051 - DNA, 20 bp, Artificial Sequence
  Description of Artificial Sequence: Synthetic oligonucleotide
  Target: LAMA2; (+) strand; PAM type: YTN; PAM sequence: CTT
caaggtgatagttcataaag

SEQ ID NO: 324052 - DNA, 20 bp, Artificial Sequence
  Description of Artificial Sequence: Synthetic oligonucleotide
  Target: LAMA2; (+) strand; PAM type: YTN; PAM sequence: TTC
aaggtgatagttcataaaga

SEQ ID NO: 324053 - DNA, 20 bp, Artificial Sequence
  Description of Artificial Sequence: Synthetic oligonucleotide
  Target: LAMA2; (+) strand; PAM type: YTN; PAM sequence: TTC
ataaagaatatgttccattg

SEQ ID NO: 324054 - DNA, 20 bp, Artificial Sequence
  Description of Artificial Sequence: Synthetic oligonucleotide
  Target: LAMA2; (+) strand; PAM type: YTN; PAM sequence: TTC
cattgacaaagttagttatg

SEQ ID NO: 324055 - DNA, 20 bp, Artificial Sequence
  Description of Artificial Sequence: Synthetic oligonucleotide
  Target: LAMA2; (+) strand; PAM type: YTN; PAM sequence: TTG
acaaagttagttatgttttt

SEQ ID NO: 324056 - DNA, 20 bp, Artificial Sequence
  Description of Artificial Sequence: Synthetic oligonucleotide
  Target: LAMA2; (+) strand; PAM type: YTN; PAM sequence: TTA
gttatgttttttagcttatt

SEQ ID NO: 324057 - DNA, 20 bp, Artificial Sequence
  Description of Artificial Sequence: Synthetic oligonucleotide
  Target: LAMA2; (+) strand; PAM type: YTN; PAM sequence: TTA
tgttttttagcttattaaac

SEQ ID NO: 324058 - DNA, 20 bp, Artificial Sequence
  Description of Artificial Sequence: Synthetic oligonucleotide
  Target: LAMA2; (+) strand; PAM type: YTN; PAM sequence: TTT
tttagcttattaaactaatt

SEQ ID NO: 324059 - DNA, 20 bp, Artificial Sequence
  Description of Artificial Sequence: Synthetic oligonucleotide
  Target: LAMA2; (+) strand; PAM type: YTN; PAM sequence: TTT
ttagcttattaaactaattt

SEQ ID NO: 324060 - DNA, 20 bp, Artificial Sequence
  Description of Artificial Sequence: Synthetic oligonucleotide
  Target: LAMA2; (+) strand; PAM type: YTN; PAM sequence: TTT
tagcttattaaactaattta

SEQ ID NO: 324061 - DNA, 20 bp, Artificial Sequence
  Description of Artificial Sequence: Synthetic oligonucleotide
  Target: LAMA2; (+) strand; PAM type: YTN; PAM sequence: TTT
agcttattaaactaatttaa

SEQ ID NO: 324062 - DNA, 20 bp, Artificial Sequence
  Description of Artificial Sequence: Synthetic oligonucleotide
  Target: LAMA2; (+) strand; PAM type: YTN; PAM sequence: TTA
gcttattaaactaatttaag

SEQ ID NO: 324063 - DNA, 20 bp, Artificial Sequence
  Description of Artificial Sequence: Synthetic oligonucleotide
  Target: LAMA2; (+) strand; PAM type: YTN; PAM sequence: CTT
attaaactaatttaaggaca

SEQ ID NO: 324064 - DNA, 20 bp, Artificial Sequence
  Description of Artificial Sequence: Synthetic oligonucleotide
  Target: LAMA2; (+) strand; PAM type: YTN; PAM sequence: TTA
ttaaactaatttaaggacaa

SEQ ID NO: 324065 - DNA, 20 bp, Artificial Sequence
  Description of Artificial Sequence: Synthetic oligonucleotide
  Target: LAMA2; (+) strand; PAM type: YTN; PAM sequence: TTA
aactaatttaaggacaaaga

SEQ ID NO: 324066 - DNA, 20 bp, Artificial Sequence
  Description of Artificial Sequence: Synthetic oligonucleotide
  Target: LAMA2; (+) strand; PAM type: YTN; PAM sequence: CTA
atttaaggacaaagaagaga

SEQ ID NO: 324067 - DNA, 20 bp, Artificial Sequence
  Description of Artificial Sequence: Synthetic oligonucleotide
  Target: LAMA2; (+) strand; PAM type: YTN; PAM sequence: TTT
aaggacaaagaagagaaaat

SEQ ID NO: 324068 - DNA, 20 bp, Artificial Sequence
  Description of Artificial Sequence: Synthetic oligonucleotide
  Target: LAMA2; (+) strand; PAM type: YTN; PAM sequence: TTA
aggacaaagaagagaaaata

SEQ ID NO: 324069 - DNA, 20 bp, Artificial Sequence
  Description of Artificial Sequence: Synthetic oligonucleotide
  Target: LAMA2; (+) strand; PAM type: YTN; PAM sequence: TTT
tcaaacccactgtgcttggc

SEQ ID NO: 324070 - DNA, 20 bp, Artificial Sequence
  Description of Artificial Sequence: Synthetic oligonucleotide
  Target: LAMA2; (+) strand; PAM type: YTN; PAM sequence: TTT
caaacccactgtgcttggcc

SEQ ID NO: 324071 - DNA, 20 bp, Artificial Sequence
  Description of Artificial Sequence: Synthetic oligonucleotide
  Target: LAMA2; (+) strand; PAM type: YTN; PAM sequence: TTC
aaacccactgtgcttggccc

SEQ ID NO: 324072 - DNA, 20 bp, Artificial Sequence
  Description of Artificial Sequence: Synthetic oligonucleotide
  Target: LAMA2; (+) strand; PAM type: YTN; PAM sequence: CTG
tgcttggccctcactaatta

SEQ ID NO: 324073 - DNA, 20 bp, Artificial Sequence
  Description of Artificial Sequence: Synthetic oligonucleotide
  Target: LAMA2; (+) strand; PAM type: YTN; PAM sequence: CTT
ggccctcactaattatgttt

SEQ ID NO: 324074 - DNA, 20 bp, Artificial Sequence
  Description of Artificial Sequence: Synthetic oligonucleotide
  Target: LAMA2; (+) strand; PAM type: YTN; PAM sequence: TTG
gccctcactaattatgtttt

SEQ ID NO: 324075 - DNA, 20 bp, Artificial Sequence
  Description of Artificial Sequence: Synthetic oligonucleotide
  Target: LAMA2; (+) strand; PAM type: YTN; PAM sequence: CTC
actaattatgtttttgcctg

SEQ ID NO: 324076 - DNA, 20 bp, Artificial Sequence
  Description of Artificial Sequence: Synthetic oligonucleotide
  Target: LAMA2; (+) strand; PAM type: YTN; PAM sequence: CTA
attatgtttttgcctgtgag

SEQ ID NO: 324077 - DNA, 20 bp, Artificial Sequence
  Description of Artificial Sequence: Synthetic oligonucleotide
  Target: LAMA2; (+) strand; PAM type: YTN; PAM sequence: TTA
tgtttttgcctgtgagatac

SEQ ID NO: 324078 - DNA, 20 bp, Artificial Sequence
  Description of Artificial Sequence: Synthetic oligonucleotide
  Target: LAMA2; (+) strand; PAM type: YTN; PAM sequence: TTT
ttgcctgtgagatacggatt

SEQ ID NO: 324079 - DNA, 20 bp, Artificial Sequence
  Description of Artificial Sequence: Synthetic oligonucleotide
  Target: LAMA2; (+) strand; PAM type: YTN; PAM sequence: TTT
tgcctgtgagatacggattt

SEQ ID NO: 324080 - DNA, 20 bp, Artificial Sequence
  Description of Artificial Sequence: Synthetic oligonucleotide
  Target: LAMA2; (+) strand; PAM type: YTN; PAM sequence: TTT
gcctgtgagatacggatttt

SEQ ID NO: 324081 - DNA, 20 bp, Artificial Sequence
  Description of Artificial Sequence: Synthetic oligonucleotide
  Target: LAMA2; (+) strand; PAM type: YTN; PAM sequence: TTG
cctgtgagatacggattttg

SEQ ID NO: 324082 - DNA, 20 bp, Artificial Sequence
  Description of Artificial Sequence: Synthetic oligonucleotide
  Target: LAMA2; (+) strand; PAM type: YTN; PAM sequence: CTG
tgagatacggattttggagg

SEQ ID NO: 324083 - DNA, 20 bp, Artificial Sequence
  Description of Artificial Sequence: Synthetic oligonucleotide
  Target: LAMA2; (+) strand; PAM type: YTN; PAM sequence: TTT
tggaggctgtatttgcaata

SEQ ID NO: 324084 - DNA, 20 bp, Artificial Sequence
  Description of Artificial Sequence: Synthetic oligonucleotide
  Target: LAMA2; (+) strand; PAM type: YTN; PAM sequence: TTT
ggaggctgtatttgcaataa

SEQ ID NO: 324085 - DNA, 20 bp, Artificial Sequence
  Description of Artificial Sequence: Synthetic oligonucleotide
  Target: LAMA2; (+) strand; PAM type: YTN; PAM sequence: TTG
gaggctgtatttgcaataag

SEQ ID NO: 324086 - DNA, 20 bp, Artificial Sequence
  Description of Artificial Sequence: Synthetic oligonucleotide
  Target: LAMA2; (+) strand; PAM type: YTN; PAM sequence: CTG
tatttgcaataagtgacaca

SEQ ID NO: 324087 - DNA, 20 bp, Artificial Sequence
  Description of Artificial Sequence: Synthetic oligonucleotide
  Target: LAMA2; (+) strand; PAM type: YTN; PAM sequence: TTT
gcaataagtgacacatacac

SEQ ID NO: 324088 - DNA, 20 bp, Artificial Sequence
  Description of Artificial Sequence: Synthetic oligonucleotide
  Target: LAMA2; (+) strand; PAM type: YTN; PAM sequence: TTG
caataagtgacacatacaca

SEQ ID NO: 324089 - DNA, 20 bp, Artificial Sequence
  Description of Artificial Sequence: Synthetic oligonucleotide
  Target: LAMA2; (+) strand; PAM type: YTN; PAM sequence: TTT
ataaatgataaaatataaaa

SEQ ID NO: 324090 - DNA, 20 bp, Artificial Sequence
  Description of Artificial Sequence: Synthetic oligonucleotide
  Target: LAMA2; (+) strand; PAM type: YTN; PAM sequence: TTA
taaatgataaaatataaaat

SEQ ID NO: 324091 - DNA, 20 bp, Artificial Sequence
  Description of Artificial Sequence: Synthetic oligonucleotide
  Target: LAMA2; (+) strand; PAM type: YTN; PAM sequence: TTT
gtcttaaatagggagatgct

SEQ ID NO: 324092 - DNA, 20 bp, Artificial Sequence
  Description of Artificial Sequence: Synthetic oligonucleotide
  Target: LAMA2; (+) strand; PAM type: YTN; PAM sequence: TTG
tcttaaatagggagatgctg

SEQ ID NO: 324093 - DNA, 20 bp, Artificial Sequence
  Description of Artificial Sequence: Synthetic oligonucleotide
  Target: LAMA2; (+) strand; PAM type: YTN; PAM sequence: CTT
aaatagggagatgctgtaat

SEQ ID NO: 324094 - DNA, 20 bp, Artificial Sequence
  Description of Artificial Sequence: Synthetic oligonucleotide
  Target: LAMA2; (+) strand; PAM type: YTN; PAM sequence: TTA
aatagggagatgctgtaatg

SEQ ID NO: 324095 - DNA, 20 bp, Artificial Sequence
  Description of Artificial Sequence: Synthetic oligonucleotide
  Target: LAMA2; (+) strand; PAM type: YTN; PAM sequence: CTG
taatgtctctttcccctctt

SEQ ID NO: 324096 - DNA, 20 bp, Artificial Sequence
  Description of Artificial Sequence: Synthetic oligonucleotide
  Target: LAMA2; (+) strand; PAM type: YTN; PAM sequence: CTC
tttcccctcttcaacgtatc

SEQ ID NO: 324097 - DNA, 20 bp, Artificial Sequence
  Description of Artificial Sequence: Synthetic oligonucleotide
  Target: LAMA2; (+) strand; PAM type: YTN; PAM sequence: CTT
tcccctcttcaacgtatcat

SEQ ID NO: 324098 - DNA, 20 bp, Artificial Sequence
  Description of Artificial Sequence: Synthetic oligonucleotide
  Target: LAMA2; (+) strand; PAM type: YTN; PAM sequence: TTT
cccctcttcaacgtatcata

SEQ ID NO: 324099 - DNA, 20 bp, Artificial Sequence
  Description of Artificial Sequence: Synthetic oligonucleotide
  Target: LAMA2; (+) strand; PAM type: YTN; PAM sequence: TTC
ccctcttcaacgtatcatat

SEQ ID NO: 324100 - DNA, 20 bp, Artificial Sequence
  Description of Artificial Sequence: Synthetic oligonucleotide
  Target: LAMA2; (+) strand; PAM type: YTN; PAM sequence: CTC
ttcaacgtatcatattacag

SEQ ID NO: 324101 - DNA, 20 bp, Artificial Sequence
  Description of Artificial Sequence: Synthetic oligonucleotide
  Target: LAMA2; (+) strand; PAM type: YTN; PAM sequence: CTT
caacgtatcatattacagtg

SEQ ID NO: 324102 - DNA, 20 bp, Artificial Sequence
  Description of Artificial Sequence: Synthetic oligonucleotide
  Target: LAMA2; (+) strand; PAM type: YTN; PAM sequence: TTC
aacgtatcatattacagtga

SEQ ID NO: 324103 - DNA, 20 bp, Artificial Sequence
  Description of Artificial Sequence: Synthetic oligonucleotide
  Target: LAMA2; (+) strand; PAM type: YTN; PAM sequence: TTA
cagtgattcctcaatgagca

SEQ ID NO: 324104 - DNA, 20 bp, Artificial Sequence
  Description of Artificial Sequence: Synthetic oligonucleotide
  Target: LAMA2; (+) strand; PAM type: YTN; PAM sequence: TTC
ctcaatgagcagctgaattt

SEQ ID NO: 324105 - DNA, 20 bp, Artificial Sequence
  Description of Artificial Sequence: Synthetic oligonucleotide
  Target: LAMA2; (+) strand; PAM type: YTN; PAM sequence: CTC
aatgagcagctgaatttcca

SEQ ID NO: 324106 - DNA, 20 bp, Artificial Sequence
  Description of Artificial Sequence: Synthetic oligonucleotide
  Target: LAMA2; (+) strand; PAM type: YTN; PAM sequence: CTG
aatttccacctgttcttgac

SEQ ID NO: 324107 - DNA, 20 bp, Artificial Sequence
  Description of Artificial Sequence: Synthetic oligonucleotide
  Target: LAMA2; (+) strand; PAM type: YTN; PAM sequence: TTT
ccacctgttcttgacgtatt

SEQ ID NO: 324108 - DNA, 20 bp, Artificial Sequence
  Description of Artificial Sequence: Synthetic oligonucleotide
  Target: LAMA2; (+) strand; PAM type: YTN; PAM sequence: TTC
cacctgttcttgacgtatta

SEQ ID NO: 324109 - DNA, 20 bp, Artificial Sequence
  Description of Artificial Sequence: Synthetic oligonucleotide
  Target: LAMA2; (+) strand; PAM type: YTN; PAM sequence: CTG
ttcttgacgtattacctatc

SEQ ID NO: 324110 - DNA, 20 bp, Artificial Sequence
  Description of Artificial Sequence: Synthetic oligonucleotide
  Target: LAMA2; (+) strand; PAM type: YTN; PAM sequence: TTC
ttgacgtattacctatcacc

SEQ ID NO: 324111 - DNA, 20 bp, Artificial Sequence
  Description of Artificial Sequence: Synthetic oligonucleotide
  Target: LAMA2; (+) strand; PAM type: YTN; PAM sequence: CTT
gacgtattacctatcaccat

SEQ ID NO: 324112 - DNA, 20 bp, Artificial Sequence
  Description of Artificial Sequence: Synthetic oligonucleotide
  Target: LAMA2; (+) strand; PAM type: YTN; PAM sequence: TTG
acgtattacctatcaccatc

SEQ ID NO: 324113 - DNA, 20 bp, Artificial Sequence
  Description of Artificial Sequence: Synthetic oligonucleotide
  Target: LAMA2; (+) strand; PAM type: YTN; PAM sequence: TTA
cctatcaccatcaggctatg

SEQ ID NO: 324114 - DNA, 20 bp, Artificial Sequence
  Description of Artificial Sequence: Synthetic oligonucleotide
  Target: LAMA2; (+) strand; PAM type: YTN; PAM sequence: CTA
tcaccatcaggctatgttat

SEQ ID NO: 324115 - DNA, 20 bp, Artificial Sequence
  Description of Artificial Sequence: Synthetic oligonucleotide
  Target: LAMA2; (+) strand; PAM type: YTN; PAM sequence: CTA
tgttatgaaactcactttta

SEQ ID NO: 324116 - DNA, 20 bp, Artificial Sequence
  Description of Artificial Sequence: Synthetic oligonucleotide
  Target: LAMA2; (+) strand; PAM type: YTN; PAM sequence: TTA
tgaaactcacttttagagat

SEQ ID NO: 324117 - DNA, 20 bp, Artificial Sequence
  Description of Artificial Sequence: Synthetic oligonucleotide
  Target: LAMA2; (+) strand; PAM type: YTN; PAM sequence: CTC
acttttagagataaagcaaa

SEQ ID NO: 324118 - DNA, 20 bp, Artificial Sequence
  Description of Artificial Sequence: Synthetic oligonucleotide
  Target: LAMA2; (+) strand; PAM type: YTN; PAM sequence: CTT
ttagagataaagcaaattgt

SEQ ID NO: 324119 - DNA, 20 bp, Artificial Sequence
  Description of Artificial Sequence: Synthetic oligonucleotide
  Target: LAMA2; (+) strand; PAM type: YTN; PAM sequence: TTT
tagagataaagcaaattgtc

SEQ ID NO: 324120 - DNA, 20 bp, Artificial Sequence
  Description of Artificial Sequence: Synthetic oligonucleotide
  Target: LAMA2; (+) strand; PAM type: YTN; PAM sequence: TTT
agagataaagcaaattgtcc

SEQ ID NO: 324121 - DNA, 20 bp, Artificial Sequence
  Description of Artificial Sequence: Synthetic oligonucleotide
  Target: LAMA2; (+) strand; PAM type: YTN; PAM sequence: TTA
gagataaagcaaattgtcca

SEQ ID NO: 324122 - DNA, 20 bp, Artificial Sequence
  Description of Artificial Sequence: Synthetic oligonucleotide
  Target: LAMA2; (+) strand; PAM type: YTN; PAM sequence: TTG
tccaaatgtcaccaattatt

SEQ ID NO: 324123 - DNA, 20 bp, Artificial Sequence
  Description of Artificial Sequence: Synthetic oligonucleotide
  Target: LAMA2; (+) strand; PAM type: YTN; PAM sequence: TTA
ttgaatctaaatgtgggcat

SEQ ID NO: 324124 - DNA, 20 bp, Artificial Sequence
  Description of Artificial Sequence: Synthetic oligonucleotide
  Target: LAMA2; (+) strand; PAM type: YTN; PAM sequence: TTG
aatctaaatgtgggcataca

SEQ ID NO: 324125 - DNA, 20 bp, Artificial Sequence
  Description of Artificial Sequence: Synthetic oligonucleotide
  Target: LAMA2; (+) strand; PAM type: YTN; PAM sequence: CTA
aatgtgggcatacaggtttt

SEQ ID NO: 324126 - DNA, 20 bp, Artificial Sequence
  Description of Artificial Sequence: Synthetic oligonucleotide
  Target: LAMA2; (+) strand; PAM type: YTN; PAM sequence: TTT
tatttgaagcagtctttcag

SEQ ID NO: 324127 - DNA, 20 bp, Artificial Sequence
  Description of Artificial Sequence: Synthetic oligonucleotide
  Target: LAMA2; (+) strand; PAM type: YTN; PAM sequence: TTT
atttgaagcagtctttcagc

SEQ ID NO: 324128 - DNA, 20 bp, Artificial Sequence
  Description of Artificial Sequence: Synthetic oligonucleotide
  Target: LAMA2; (+) strand; PAM type: YTN; PAM sequence: TTA
tttgaagcagtctttcagct

SEQ ID NO: 324129 - DNA, 20 bp, Artificial Sequence
  Description of Artificial Sequence: Synthetic oligonucleotide
  Target: LAMA2; (+) strand; PAM type: YTN; PAM sequence: TTT
gaagcagtctttcagctttt

SEQ ID NO: 324130 - DNA, 20 bp, Artificial Sequence
  Description of Artificial Sequence: Synthetic oligonucleotide
  Target: LAMA2; (+) strand; PAM type: YTN; PAM sequence: TTG
aagcagtctttcagcttttc

SEQ ID NO: 324131 - DNA, 20 bp, Artificial Sequence
  Description of Artificial Sequence: Synthetic oligonucleotide
  Target: LAMA2; (+) strand; PAM type: YTN; PAM sequence: CTT
tcagcttttctatatgatta

SEQ ID NO: 324132 - DNA, 20 bp, Artificial Sequence
  Description of Artificial Sequence: Synthetic oligonucleotide
  Target: LAMA2; (+) strand; PAM type: YTN; PAM sequence: TTT
cagcttttctatatgattac

SEQ ID NO: 324133 - DNA, 20 bp, Artificial Sequence
  Description of Artificial Sequence: Synthetic oligonucleotide
  Target: LAMA2; (+) strand; PAM type: YTN; PAM sequence: TTC
agcttttctatatgattaca

SEQ ID NO: 324134 - DNA, 20 bp, Artificial Sequence
  Description of Artificial Sequence: Synthetic oligonucleotide
  Target: LAMA2; (+) strand; PAM type: YTN; PAM sequence: CTT
ttctatatgattacattttt

SEQ ID NO: 324135 - DNA, 20 bp, Artificial Sequence
  Description of Artificial Sequence: Synthetic oligonucleotide
  Target: LAMA2; (+) strand; PAM type: YTN; PAM sequence: TTT
tctatatgattacattttta

SEQ ID NO: 324136 - DNA, 20 bp, Artificial Sequence
  Description of Artificial Sequence: Synthetic oligonucleotide
  Target: LAMA2; (+) strand; PAM type: YTN; PAM sequence: TTT
ctatatgattacatttttat

SEQ ID NO: 324137 - DNA, 20 bp, Artificial Sequence
  Description of Artificial Sequence: Synthetic oligonucleotide
  Target: LAMA2; (+) strand; PAM type: YTN; PAM sequence: TTC
tatatgattacatttttatt

SEQ ID NO: 324138 - DNA, 20 bp, Artificial Sequence
  Description of Artificial Sequence: Synthetic oligonucleotide
  Target: LAMA2; (+) strand; PAM type: YTN; PAM sequence: CTA
tatgattacatttttattta

SEQ ID NO: 324139 - DNA, 20 bp, Artificial Sequence
  Description of Artificial Sequence: Synthetic oligonucleotide
  Target: LAMA2; (+) strand; PAM type: YTN; PAM sequence: TTA
catttttatttaaaaatttt

SEQ ID NO: 324140 - DNA, 20 bp, Artificial Sequence
  Description of Artificial Sequence: Synthetic oligonucleotide
  Target: LAMA2; (+) strand; PAM type: YTN; PAM sequence: TTT
ttatttaaaaattttgaata

SEQ ID NO: 324141 - DNA, 20 bp, Artificial Sequence
  Description of Artificial Sequence: Synthetic oligonucleotide
  Target: LAMA2; (+) strand; PAM type: YTN; PAM sequence: TTT
tatttaaaaattttgaatag

SEQ ID NO: 324142 - DNA, 20 bp, Artificial Sequence
  Description of Artificial Sequence: Synthetic oligonucleotide
  Target: LAMA2; (+) strand; PAM type: YTN; PAM sequence: TTT
atttaaaaattttgaatagg

SEQ ID NO: 324143 - DNA, 20 bp, Artificial Sequence
  Description of Artificial Sequence: Synthetic oligonucleotide
  Target: LAMA2; (+) strand; PAM type: YTN; PAM sequence: TTA
tttaaaaattttgaataggc

SEQ ID NO: 324144 - DNA, 20 bp, Artificial Sequence
  Description of Artificial Sequence: Synthetic oligonucleotide
  Target: LAMA2; (+) strand; PAM type: YTN; PAM sequence: TTT
aaaaattttgaataggctgg

SEQ ID NO: 324145 - DNA, 20 bp, Artificial Sequence
  Description of Artificial Sequence: Synthetic oligonucleotide
  Target: LAMA2; (+) strand; PAM type: YTN; PAM sequence: TTA
aaaattttgaataggctggg

SEQ ID NO: 324146 - DNA, 20 bp, Artificial Sequence
  Description of Artificial Sequence: Synthetic oligonucleotide
  Target: LAMA2; (+) strand; PAM type: YTN; PAM sequence: TTT
tgaataggctgggtgtggtg

SEQ ID NO: 324147 - DNA, 20 bp, Artificial Sequence
  Description of Artificial Sequence: Synthetic oligonucleotide
  Target: LAMA2; (+) strand; PAM type: YTN; PAM sequence: TTT
gaataggctgggtgtggtgg

SEQ ID NO: 324148 - DNA, 20 bp, Artificial Sequence
  Description of Artificial Sequence: Synthetic oligonucleotide
  Target: LAMA2; (+) strand; PAM type: YTN; PAM sequence: TTG
aataggctgggtgtggtggc

SEQ ID NO: 324149 - DNA, 20 bp, Artificial Sequence
  Description of Artificial Sequence: Synthetic oligonucleotide
  Target: LAMA2; (+) strand; PAM type: YTN; PAM sequence: CTG
ggtgtggtggctcacgcctg

SEQ ID NO: 324150 - DNA, 20 bp, Artificial Sequence
  Description of Artificial Sequence: Synthetic oligonucleotide
  Target: LAMA2; (+) strand; PAM type: YTN; PAM sequence: CTC
acgcctgtaatcccagcact

SEQ ID NO: 324151 - DNA, 20 bp, Artificial Sequence
  Description of Artificial Sequence: Synthetic oligonucleotide
  Target: LAMA2; (+) strand; PAM type: YTN; PAM sequence: CTG
taatcccagcactttgggag

SEQ ID NO: 324152 - DNA, 20 bp, Artificial Sequence
  Description of Artificial Sequence: Synthetic oligonucleotide
  Target: LAMA2; (+) strand; PAM type: YTN; PAM sequence: CTT
tgggaggctgaggcgggcgg

SEQ ID NO: 324153 - DNA, 20 bp, Artificial Sequence
  Description of Artificial Sequence: Synthetic oligonucleotide
  Target: LAMA2; (+) strand; PAM type: YTN; PAM sequence: TTT
gggaggctgaggcgggcgga

SEQ ID NO: 324154 - DNA, 20 bp, Artificial Sequence
  Description of Artificial Sequence: Synthetic oligonucleotide
  Target: LAMA2; (+) strand; PAM type: YTN; PAM sequence: TTG
ggaggctgaggcgggcggat

SEQ ID NO: 324155 - DNA, 20 bp, Artificial Sequence
  Description of Artificial Sequence: Synthetic oligonucleotide
  Target: LAMA2; (+) strand; PAM type: YTN; PAM sequence: CTG
aggcgggcggatcacgaggt

SEQ ID NO: 324156 - DNA, 20 bp, Artificial Sequence
  Description of Artificial Sequence: Synthetic oligonucleotide
  Target: LAMA2; (+) strand; PAM type: YTN; PAM sequence: CTG
gctaccacggtgaaaccccg

SEQ ID NO: 324157 - DNA, 20 bp, Artificial Sequence
  Description of Artificial Sequence: Synthetic oligonucleotide
  Target: LAMA2; (+) strand; PAM type: YTN; PAM sequence: CTA
ccacggtgaaaccccgtctc

SEQ ID NO: 324158 - DNA, 20 bp, Artificial Sequence
  Description of Artificial Sequence: Synthetic oligonucleotide
  Target: LAMA2; (+) strand; PAM type: YTN; PAM sequence: CTC
tactaaaaatccaaaaaaaa

SEQ ID NO: 324159 - DNA, 20 bp, Artificial Sequence
  Description of Artificial Sequence: Synthetic oligonucleotide
  Target: LAMA2; (+) strand; PAM type: YTN; PAM sequence: CTA
ctaaaaatccaaaaaaaatt

SEQ ID NO: 324160 - DNA, 20 bp, Artificial Sequence
  Description of Artificial Sequence: Synthetic oligonucleotide
  Target: LAMA2; (+) strand; PAM type: YTN; PAM sequence: CTA
aaaatccaaaaaaaattagc

SEQ ID NO: 324161 - DNA, 20 bp, Artificial Sequence
  Description of Artificial Sequence: Synthetic oligonucleotide
  Target: LAMA2; (+) strand; PAM type: YTN; PAM sequence: TTA
gcccggcgtggtggcgggcg

SEQ ID NO: 324162 - DNA, 20 bp, Artificial Sequence
  Description of Artificial Sequence: Synthetic oligonucleotide
  Target: LAMA2; (+) strand; PAM type: YTN; PAM sequence: CTG
tagtcccagctactcgggag

SEQ ID NO: 324163 - DNA, 20 bp, Artificial Sequence
  Description of Artificial Sequence: Synthetic oligonucleotide
  Target: LAMA2; (+) strand; PAM type: YTN; PAM sequence: CTA
ctcgggaggctgaggcagga

SEQ ID NO: 324164 - DNA, 20 bp, Artificial Sequence
  Description of Artificial Sequence: Synthetic oligonucleotide
  Target: LAMA2; (+) strand; PAM type: YTN; PAM sequence: CTC
gggaggctgaggcaggagaa

SEQ ID NO: 324165 - DNA, 20 bp, Artificial Sequence
  Description of Artificial Sequence: Synthetic oligonucleotide
  Target: LAMA2; (+) strand; PAM type: YTN; PAM sequence: CTG
aggcaggagaatggcgggaa

SEQ ID NO: 324166 - DNA, 20 bp, Artificial Sequence
  Description of Artificial Sequence: Synthetic oligonucleotide
  Target: LAMA2; (+) strand; PAM type: YTN; PAM sequence: CTG
cagggagccgagatcgcgcc

SEQ ID NO: 324167 - DNA, 20 bp, Artificial Sequence
  Description of Artificial Sequence: Synthetic oligonucleotide
  Target: LAMA2; (+) strand; PAM type: YTN; PAM sequence: CTG
cagtccggcctgggcgaaag

SEQ ID NO: 324168 - DNA, 20 bp, Artificial Sequence
  Description of Artificial Sequence: Synthetic oligonucleotide
  Target: LAMA2; (+) strand; PAM type: YTN; PAM sequence: CTG
ggcgaaagagagagactcca

SEQ ID NO: 324169 - DNA, 20 bp, Artificial Sequence
  Description of Artificial Sequence: Synthetic oligonucleotide
  Target: LAMA2; (+) strand; PAM type: YTN; PAM sequence: CTC
catctcaaaaaaaaaaaaat

SEQ ID NO: 324170 - DNA, 20 bp, Artificial Sequence
  Description of Artificial Sequence: Synthetic oligonucleotide
  Target: LAMA2; (+) strand; PAM type: YTN; PAM sequence: CTC
aaaaaaaaaaaaattttttt

SEQ ID NO: 324171 - DNA, 20 bp, Artificial Sequence
  Description of Artificial Sequence: Synthetic oligonucleotide
  Target: LAMA2; (+) strand; PAM type: YTN; PAM sequence: TTT
tttttgaataaatagaataa

SEQ ID NO: 324172 - DNA, 20 bp, Artificial Sequence
  Description of Artificial Sequence: Synthetic oligonucleotide
  Target: LAMA2; (+) strand; PAM type: YTN; PAM sequence: TTT
ttttgaataaatagaataat

SEQ ID NO: 324173 - DNA, 20 bp, Artificial Sequence
  Description of Artificial Sequence: Synthetic oligonucleotide
  Target: LAMA2; (+) strand; PAM type: YTN; PAM sequence: TTT
tttgaataaatagaataatg

SEQ ID NO: 324174 - DNA, 20 bp, Artificial Sequence
  Description of Artificial Sequence: Synthetic oligonucleotide
  Target: LAMA2; (+) strand; PAM type: YTN; PAM sequence: TTT
ttgaataaatagaataatgt

SEQ ID NO: 324175 - DNA, 20 bp, Artificial Sequence
  Description of Artificial Sequence: Synthetic oligonucleotide
  Target: LAMA2; (+) strand; PAM type: YTN; PAM sequence: TTT
tgaataaatagaataatgtg

SEQ ID NO: 324176 - DNA, 20 bp, Artificial Sequence
  Description of Artificial Sequence: Synthetic oligonucleotide
  Target: LAMA2; (+) strand; PAM type: YTN; PAM sequence: TTT
gaataaatagaataatgtga

SEQ ID NO: 324177 - DNA, 20 bp, Artificial Sequence
  Description of Artificial Sequence: Synthetic oligonucleotide
  Target: LAMA2; (+) strand; PAM type: YTN; PAM sequence: TTG
aataaatagaataatgtgat

SEQ ID NO: 324178 - DNA, 20 bp, Artificial Sequence
  Description of Artificial Sequence: Synthetic oligonucleotide
  Target: LAMA2; (+) strand; PAM type: YTN; PAM sequence: CTA
gacagctattaaggtggtca

SEQ ID NO: 324179 - DNA, 20 bp, Artificial Sequence
  Description of Artificial Sequence: Synthetic oligonucleotide
  Target: LAMA2; (+) strand; PAM type: YTN; PAM sequence: CTA
ttaaggtggtcaaggaaaac

SEQ ID NO: 324180 - DNA, 20 bp, Artificial Sequence
  Description of Artificial Sequence: Synthetic oligonucleotide
  Target: LAMA2; (+) strand; PAM type: YTN; PAM sequence: TTA
aggtggtcaaggaaaaccca

SEQ ID NO: 324181 - DNA, 20 bp, Artificial Sequence
  Description of Artificial Sequence: Synthetic oligonucleotide
  Target: LAMA2; (+) strand; PAM type: YTN; PAM sequence: CTA
aaagaaaccagcatagtatt

SEQ ID NO: 324182 - DNA, 20 bp, Artificial Sequence
  Description of Artificial Sequence: Synthetic oligonucleotide
  Target: LAMA2; (+) strand; PAM type: YTN; PAM sequence: TTT
tgtatgagcatagaaggtgt

SEQ ID NO: 324183 - DNA, 20 bp, Artificial Sequence
  Description of Artificial Sequence: Synthetic oligonucleotide
  Target: LAMA2; (+) strand; PAM type: YTN; PAM sequence: TTT
gtatgagcatagaaggtgtg

SEQ ID NO: 324184 - DNA, 20 bp, Artificial Sequence
  Description of Artificial Sequence: Synthetic oligonucleotide
  Target: LAMA2; (+) strand; PAM type: YTN; PAM sequence: TTG
tatgagcatagaaggtgtgg

SEQ ID NO: 324185 - DNA, 20 bp, Artificial Sequence
  Description of Artificial Sequence: Synthetic oligonucleotide
  Target: LAMA2; (+) strand; PAM type: YTN; PAM sequence: TTA
gagaaatccaatgtctctat

SEQ ID NO: 324186 - DNA, 20 bp, Artificial Sequence
  Description of Artificial Sequence: Synthetic oligonucleotide
  Target: LAMA2; (+) strand; PAM type: YTN; PAM sequence: CTC
tattttagaaagaaatgtca

SEQ ID NO: 324187 - DNA, 20 bp, Artificial Sequence
  Description of Artificial Sequence: Synthetic oligonucleotide
  Target: LAMA2; (+) strand; PAM type: YTN; PAM sequence: CTA
ttttagaaagaaatgtcatc

SEQ ID NO: 324188 - DNA, 20 bp, Artificial Sequence
  Description of Artificial Sequence: Synthetic oligonucleotide
  Target: LAMA2; (+) strand; PAM type: YTN; PAM sequence: TTT
tagaaagaaatgtcatcaag

SEQ ID NO: 324189 - DNA, 20 bp, Artificial Sequence
  Description of Artificial Sequence: Synthetic oligonucleotide
  Target: LAMA2; (+) strand; PAM type: YTN; PAM sequence: TTT
agaaagaaatgtcatcaagg

SEQ ID NO: 324190 - DNA, 20 bp, Artificial Sequence
  Description of Artificial Sequence: Synthetic oligonucleotide
  Target: LAMA2; (+) strand; PAM type: YTN; PAM sequence: TTA
gaaagaaatgtcatcaaggt

SEQ ID NO: 324191 - DNA, 20 bp, Artificial Sequence
  Description of Artificial Sequence: Synthetic oligonucleotide
  Target: LAMA2; (+) strand; PAM type: YTN; PAM sequence: CTT
tgtaagccacgaaaggcatt

SEQ ID NO: 324192 - DNA, 20 bp, Artificial Sequence
  Description of Artificial Sequence: Synthetic oligonucleotide
  Target: LAMA2; (+) strand; PAM type: YTN; PAM sequence: TTT
gtaagccacgaaaggcattt

SEQ ID NO: 324193 - DNA, 20 bp, Artificial Sequence
  Description of Artificial Sequence: Synthetic oligonucleotide
  Target: LAMA2; (+) strand; PAM type: YTN; PAM sequence: TTG
taagccacgaaaggcatttt

SEQ ID NO: 324194 - DNA, 20 bp, Artificial Sequence
  Description of Artificial Sequence: Synthetic oligonucleotide
  Target: LAMA2; (+) strand; PAM type: YTN; PAM sequence: TTT
tcattttattcttgtagatt

SEQ ID NO: 324195 - DNA, 20 bp, Artificial Sequence
  Description of Artificial Sequence: Synthetic oligonucleotide
  Target: LAMA2; (+) strand; PAM type: YTN; PAM sequence: TTT
cattttattcttgtagattt

SEQ ID NO: 324196 - DNA, 20 bp, Artificial Sequence
  Description of Artificial Sequence: Synthetic oligonucleotide
  Target: LAMA2; (+) strand; PAM type: YTN; PAM sequence: TTC
attttattcttgtagatttt

SEQ ID NO: 324197 - DNA, 20 bp, Artificial Sequence
  Description of Artificial Sequence: Synthetic oligonucleotide
  Target: LAMA2; (+) strand; PAM type: YTN; PAM sequence: TTT
tattcttgtagattttaagt

SEQ ID NO: 324198 - DNA, 20 bp, Artificial Sequence
  Description of Artificial Sequence: Synthetic oligonucleotide
  Target: LAMA2; (+) strand; PAM type: YTN; PAM sequence: TTT
attcttgtagattttaagta

SEQ ID NO: 324199 - DNA, 20 bp, Artificial Sequence
  Description of Artificial Sequence: Synthetic oligonucleotide
  Target: LAMA2; (+) strand; PAM type: YTN; PAM sequence: TTA
ttcttgtagattttaagtag

SEQ ID NO: 324200 - DNA, 20 bp, Artificial Sequence
  Description of Artificial Sequence: Synthetic oligonucleotide
  Target: LAMA2; (+) strand; PAM type: YTN; PAM sequence: TTC
ttgtagattttaagtagaga

SEQ ID NO: 324201 - DNA, 20 bp, Artificial Sequence
  Description of Artificial Sequence: Synthetic oligonucleotide
  Target: LAMA2; (+) strand; PAM type: YTN; PAM sequence: CTT
gtagattttaagtagagatg

SEQ ID NO: 324202 - DNA, 20 bp, Artificial Sequence
  Description of Artificial Sequence: Synthetic oligonucleotide
  Target: LAMA2; (+) strand; PAM type: YTN; PAM sequence: TTG
tagattttaagtagagatgc

SEQ ID NO: 324203 - DNA, 20 bp, Artificial Sequence
  Description of Artificial Sequence: Synthetic oligonucleotide
  Target: LAMA2; (+) strand; PAM type: YTN; PAM sequence: TTT
taagtagagatgcagctttc

SEQ ID NO: 324204 - DNA, 20 bp, Artificial Sequence
  Description of Artificial Sequence: Synthetic oligonucleotide
  Target: LAMA2; (+) strand; PAM type: YTN; PAM sequence: TTT
aagtagagatgcagctttct

SEQ ID NO: 324205 - DNA, 20 bp, Artificial Sequence
  Description of Artificial Sequence: Synthetic oligonucleotide
  Target: LAMA2; (+) strand; PAM type: YTN; PAM sequence: TTA
agtagagatgcagctttctt

SEQ ID NO: 324206 - DNA, 20 bp, Artificial Sequence
  Description of Artificial Sequence: Synthetic oligonucleotide
  Target: LAMA2; (+) strand; PAM type: YTN; PAM sequence: CTT
tcttctcacatattttagaa

SEQ ID NO: 324207 - DNA, 20 bp, Artificial Sequence
  Description of Artificial Sequence: Synthetic oligonucleotide
  Target: LAMA2; (+) strand; PAM type: YTN; PAM sequence: TTT
cttctcacatattttagaaa

SEQ ID NO: 324208 - DNA, 20 bp, Artificial Sequence
  Description of Artificial Sequence: Synthetic oligonucleotide
  Target: LAMA2; (+) strand; PAM type: YTN; PAM sequence: TTC
ttctcacatattttagaaat

SEQ ID NO: 324209 - DNA, 20 bp, Artificial Sequence
  Description of Artificial Sequence: Synthetic oligonucleotide
  Target: LAMA2; (+) strand; PAM type: YTN; PAM sequence: CTT
ctcacatattttagaaatat

SEQ ID NO: 324210 - DNA, 20 bp, Artificial Sequence
  Description of Artificial Sequence: Synthetic oligonucleotide
  Target: LAMA2; (+) strand; PAM type: YTN; PAM sequence: TTC
tcacatattttagaaatatt

SEQ ID NO: 324211 - DNA, 20 bp, Artificial Sequence
  Description of Artificial Sequence: Synthetic oligonucleotide
  Target: LAMA2; (+) strand; PAM type: YTN; PAM sequence: CTC
acatattttagaaatattta

SEQ ID NO: 324212 - DNA, 20 bp, Artificial Sequence
  Description of Artificial Sequence: Synthetic oligonucleotide
  Target: LAMA2; (+) strand; PAM type: YTN; PAM sequence: TTT
tagaaatatttatttggtta

SEQ ID NO: 324213 - DNA, 20 bp, Artificial Sequence
  Description of Artificial Sequence: Synthetic oligonucleotide
  Target: LAMA2; (+) strand; PAM type: YTN; PAM sequence: TTT
agaaatatttatttggttac

SEQ ID NO: 324214 - DNA, 20 bp, Artificial Sequence
  Description of Artificial Sequence: Synthetic oligonucleotide
  Target: LAMA2; (+) strand; PAM type: YTN; PAM sequence: TTA
gaaatatttatttggttacc

SEQ ID NO: 324215 - DNA, 20 bp, Artificial Sequence
  Description of Artificial Sequence: Synthetic oligonucleotide
  Target: LAMA2; (+) strand; PAM type: YTN; PAM sequence: TTT
atttggttaccatatagagc

SEQ ID NO: 324216 - DNA, 20 bp, Artificial Sequence
  Description of Artificial Sequence: Synthetic oligonucleotide
  Target: LAMA2; (+) strand; PAM type: YTN; PAM sequence: TTA
tttggttaccatatagagcc

SEQ ID NO: 324217 - DNA, 20 bp, Artificial Sequence
  Description of Artificial Sequence: Synthetic oligonucleotide
  Target: LAMA2; (+) strand; PAM type: YTN; PAM sequence: TTT
ggttaccatatagagccagt

SEQ ID NO: 324218 - DNA, 20 bp, Artificial Sequence
  Description of Artificial Sequence: Synthetic oligonucleotide
  Target: LAMA2; (+) strand; PAM type: YTN; PAM sequence: TTG
gttaccatatagagccagtt

SEQ ID NO: 324219 - DNA, 20 bp, Artificial Sequence
  Description of Artificial Sequence: Synthetic oligonucleotide
  Target: LAMA2; (+) strand; PAM type: YTN; PAM sequence: TTA
ccatatagagccagttctca

SEQ ID NO: 324220 - DNA, 20 bp, Artificial Sequence
  Description of Artificial Sequence: Synthetic oligonucleotide
  Target: LAMA2; (+) strand; PAM type: YTN; PAM sequence: TTC
tcatatagagaatttattct

SEQ ID NO: 324221 - DNA, 20 bp, Artificial Sequence
  Description of Artificial Sequence: Synthetic oligonucleotide
  Target: LAMA2; (+) strand; PAM type: YTN; PAM sequence: CTC
atatagagaatttattctct

SEQ ID NO: 324222 - DNA, 20 bp, Artificial Sequence
  Description of Artificial Sequence: Synthetic oligonucleotide
  Target: LAMA2; (+) strand; PAM type: YTN; PAM sequence: TTT
attctctatatgagaataga

SEQ ID NO: 324223 - DNA, 20 bp, Artificial Sequence
  Description of Artificial Sequence: Synthetic oligonucleotide
  Target: LAMA2; (+) strand; PAM type: YTN; PAM sequence: TTA
ttctctatatgagaatagag

SEQ ID NO: 324224 - DNA, 20 bp, Artificial Sequence
  Description of Artificial Sequence: Synthetic oligonucleotide
  Target: LAMA2; (+) strand; PAM type: YTN; PAM sequence: TTC
tctatatgagaatagagaat

SEQ ID NO: 324225 - DNA, 20 bp, Artificial Sequence
  Description of Artificial Sequence: Synthetic oligonucleotide
  Target: LAMA2; (+) strand; PAM type: YTN; PAM sequence: CTC
tatatgagaatagagaataa

SEQ ID NO: 324226 - DNA, 20 bp, Artificial Sequence
  Description of Artificial Sequence: Synthetic oligonucleotide
  Target: LAMA2; (+) strand; PAM type: YTN; PAM sequence: CTA
tatgagaatagagaataaat

SEQ ID NO: 324227 - DNA, 20 bp, Artificial Sequence
  Description of Artificial Sequence: Synthetic oligonucleotide
  Target: LAMA2; (+) strand; PAM type: YTN; PAM sequence: TTT
ggtgcaagaaataaatatcg

SEQ ID NO: 324228 - DNA, 20 bp, Artificial Sequence
  Description of Artificial Sequence: Synthetic oligonucleotide
  Target: LAMA2; (+) strand; PAM type: YTN; PAM sequence: TTG
gtgcaagaaataaatatcgg

SEQ ID NO: 324229 - DNA, 20 bp, Artificial Sequence
  Description of Artificial Sequence: Synthetic oligonucleotide
  Target: LAMA2; (+) strand; PAM type: YTN; PAM sequence: CTA
aaataggaagacaggttatg

SEQ ID NO: 324230 - DNA, 20 bp, Artificial Sequence
  Description of Artificial Sequence: Synthetic oligonucleotide
  Target: LAMA2; (+) strand; PAM type: YTN; PAM sequence: TTA
tgaggctgttggatccccat

SEQ ID NO: 324231 - DNA, 20 bp, Artificial Sequence
  Description of Artificial Sequence: Synthetic oligonucleotide
  Target: LAMA2; (+) strand; PAM type: YTN; PAM sequence: CTG
ttggatccccattataatgg

SEQ ID NO: 324232 - DNA, 20 bp, Artificial Sequence
  Description of Artificial Sequence: Synthetic oligonucleotide
  Target: LAMA2; (+) strand; PAM type: YTN; PAM sequence: TTG
gatccccattataatggcag

SEQ ID NO: 324233 - DNA, 20 bp, Artificial Sequence
  Description of Artificial Sequence: Synthetic oligonucleotide
  Target: LAMA2; (+) strand; PAM type: YTN; PAM sequence: TTA
taatggcagcttggatgaga

SEQ ID NO: 324234 - DNA, 20 bp, Artificial Sequence
  Description of Artificial Sequence: Synthetic oligonucleotide
  Target: LAMA2; (+) strand; PAM type: YTN; PAM sequence: CTT
ggatgagataggtttcatga

SEQ ID NO: 324235 - DNA, 20 bp, Artificial Sequence
  Description of Artificial Sequence: Synthetic oligonucleotide
  Target: LAMA2; (+) strand; PAM type: YTN; PAM sequence: TTG
gatgagataggtttcatgaa

SEQ ID NO: 324236 - DNA, 20 bp, Artificial Sequence
  Description of Artificial Sequence: Synthetic oligonucleotide
  Target: LAMA2; (+) strand; PAM type: YTN; PAM sequence: TTT
catgaaaatgggaaaaagca

SEQ ID NO: 324237 - DNA, 20 bp, Artificial Sequence
  Description of Artificial Sequence: Synthetic oligonucleotide
  Target: LAMA2; (+) strand; PAM type: YTN; PAM sequence: TTC
atgaaaatgggaaaaagcag

SEQ ID NO: 324238 - DNA, 20 bp, Artificial Sequence
  Description of Artificial Sequence: Synthetic oligonucleotide
  Target: LAMA2; (+) strand; PAM type: YTN; PAM sequence: TTT
taggcagctggaatcaatag

SEQ ID NO: 324239 - DNA, 20 bp, Artificial Sequence
  Description of Artificial Sequence: Synthetic oligonucleotide
  Target: LAMA2; (+) strand; PAM type: YTN; PAM sequence: TTT
aggcagctggaatcaatagt

SEQ ID NO: 324240 - DNA, 20 bp, Artificial Sequence
  Description of Artificial Sequence: Synthetic oligonucleotide
  Target: LAMA2; (+) strand; PAM type: YTN; PAM sequence: TTA
ggcagctggaatcaatagta

SEQ ID NO: 324241 - DNA, 20 bp, Artificial Sequence
  Description of Artificial Sequence: Synthetic oligonucleotide
  Target: LAMA2; (+) strand; PAM type: YTN; PAM sequence: CTG
gaatcaatagtacttattaa

SEQ ID NO: 324242 - DNA, 20 bp, Artificial Sequence
  Description of Artificial Sequence: Synthetic oligonucleotide
  Target: LAMA2; (+) strand; PAM type: YTN; PAM sequence: CTT
attaatggcccagaggtctg

SEQ ID NO: 324243 - DNA, 20 bp, Artificial Sequence
  Description of Artificial Sequence: Synthetic oligonucleotide
  Target: LAMA2; (+) strand; PAM type: YTN; PAM sequence: TTA
ttaatggcccagaggtctgg

SEQ ID NO: 324244 - DNA, 20 bp, Artificial Sequence
  Description of Artificial Sequence: Synthetic oligonucleotide
  Target: LAMA2; (+) strand; PAM type: YTN; PAM sequence: TTA
atggcccagaggtctgggta

SEQ ID NO: 324245 - DNA, 20 bp, Artificial Sequence
  Description of Artificial Sequence: Synthetic oligonucleotide
  Target: LAMA2; (+) strand; PAM type: YTN; PAM sequence: CTG
ggtagtaaaggaaagaggag

SEQ ID NO: 324246 - DNA, 20 bp, Artificial Sequence
  Description of Artificial Sequence: Synthetic oligonucleotide
  Target: LAMA2; (+) strand; PAM type: YTN; PAM sequence: CTT
tagataaggcagttagagaa

SEQ ID NO: 324247 - DNA, 20 bp, Artificial Sequence
  Description of Artificial Sequence: Synthetic oligonucleotide
  Target: LAMA2; (+) strand; PAM type: YTN; PAM sequence: TTT
agataaggcagttagagaag

SEQ ID NO: 324248 - DNA, 20 bp, Artificial Sequence
  Description of Artificial Sequence: Synthetic oligonucleotide
  Target: LAMA2; (+) strand; PAM type: YTN; PAM sequence: TTA
gataaggcagttagagaagg

SEQ ID NO: 324249 - DNA, 20 bp, Artificial Sequence
  Description of Artificial Sequence: Synthetic oligonucleotide
  Target: LAMA2; (+) strand; PAM type: YTN; PAM sequence: TTA
gagaaggaaaatcaaggata

SEQ ID NO: 324250 - DNA, 20 bp, Artificial Sequence
  Description of Artificial Sequence: Synthetic oligonucleotide
  Target: LAMA2; (+) strand; PAM type: YTN; PAM sequence: TTC
tagatttttgtcttgagcaa

SEQ ID NO: 324251 - DNA, 20 bp, Artificial Sequence
  Description of Artificial Sequence: Synthetic oligonucleotide
  Target: LAMA2; (+) strand; PAM type: YTN; PAM sequence: CTA
gatttttgtcttgagcaact

SEQ ID NO: 324252 - DNA, 20 bp, Artificial Sequence
  Description of Artificial Sequence: Synthetic oligonucleotide
  Target: LAMA2; (+) strand; PAM type: YTN; PAM sequence: TTT
ttgtcttgagcaactgcatg

SEQ ID NO: 324253 - DNA, 20 bp, Artificial Sequence
  Description of Artificial Sequence: Synthetic oligonucleotide
  Target: LAMA2; (+) strand; PAM type: YTN; PAM sequence: TTT
tgtcttgagcaactgcatgg

SEQ ID NO: 324254 - DNA, 20 bp, Artificial Sequence
  Description of Artificial Sequence: Synthetic oligonucleotide
  Target: LAMA2; (+) strand; PAM type: YTN; PAM sequence: TTT
gtcttgagcaactgcatgga

SEQ ID NO: 324255 - DNA, 20 bp, Artificial Sequence
  Description of Artificial Sequence: Synthetic oligonucleotide
  Target: LAMA2; (+) strand; PAM type: YTN; PAM sequence: TTG
tcttgagcaactgcatggat

SEQ ID NO: 324256 - DNA, 20 bp, Artificial Sequence
  Description of Artificial Sequence: Synthetic oligonucleotide
  Target: LAMA2; (+) strand; PAM type: YTN; PAM sequence: CTT
gagcaactgcatggatggtg

SEQ ID NO: 324257 - DNA, 20 bp, Artificial Sequence
  Description of Artificial Sequence: Synthetic oligonucleotide
  Target: LAMA2; (+) strand; PAM type: YTN; PAM sequence: TTG
agcaactgcatggatggtga

SEQ ID NO: 324258 - DNA, 20 bp, Artificial Sequence
  Description of Artificial Sequence: Synthetic oligonucleotide
  Target: LAMA2; (+) strand; PAM type: YTN; PAM sequence: CTG
catggatggtgatgtcattg

SEQ ID NO: 324259 - DNA, 20 bp, Artificial Sequence
  Description of Artificial Sequence: Synthetic oligonucleotide
  Target: LAMA2; (+) strand; PAM type: YTN; PAM sequence: TTG
aatgtgatggaatagatcgg

SEQ ID NO: 324260 - DNA, 20 bp, Artificial Sequence
  Description of Artificial Sequence: Synthetic oligonucleotide
  Target: LAMA2; (+) strand; PAM type: YTN; PAM sequence: TTT
ttcatggagggaaggccaga

SEQ ID NO: 324261 - DNA, 20 bp, Artificial Sequence
  Description of Artificial Sequence: Synthetic oligonucleotide
  Target: LAMA2; (+) strand; PAM type: YTN; PAM sequence: TTT
tcatggagggaaggccagag

SEQ ID NO: 324262 - DNA, 20 bp, Artificial Sequence
  Description of Artificial Sequence: Synthetic oligonucleotide
  Target: LAMA2; (+) strand; PAM type: YTN; PAM sequence: TTT
catggagggaaggccagaga

SEQ ID NO: 324263 - DNA, 20 bp, Artificial Sequence
  Description of Artificial Sequence: Synthetic oligonucleotide
  Target: LAMA2; (+) strand; PAM type: YTN; PAM sequence: TTC
atggagggaaggccagagaa

SEQ ID NO: 324264 - DNA, 20 bp, Artificial Sequence
  Description of Artificial Sequence: Synthetic oligonucleotide
  Target: LAMA2; (+) strand; PAM type: YTN; PAM sequence: TTC
tgctatagccatactgaatt

SEQ ID NO: 324265 - DNA, 20 bp, Artificial Sequence
  Description of Artificial Sequence: Synthetic oligonucleotide
  Target: LAMA2; (+) strand; PAM type: YTN; PAM sequence: CTG
ctatagccatactgaatttt

SEQ ID NO: 324266 - DNA, 20 bp, Artificial Sequence
  Description of Artificial Sequence: Synthetic oligonucleotide
  Target: LAMA2; (+) strand; PAM type: YTN; PAM sequence: CTA
tagccatactgaattttagg

SEQ ID NO: 324267 - DNA, 20 bp, Artificial Sequence
  Description of Artificial Sequence: Synthetic oligonucleotide
  Target: LAMA2; (+) strand; PAM type: YTN; PAM sequence: CTG
aattttaggcaccttttaga

SEQ ID NO: 324268 - DNA, 20 bp, Artificial Sequence
  Description of Artificial Sequence: Synthetic oligonucleotide
  Target: LAMA2; (+) strand; PAM type: YTN; PAM sequence: TTT
taggcaccttttagacatct

SEQ ID NO: 324269 - DNA, 20 bp, Artificial Sequence
  Description of Artificial Sequence: Synthetic oligonucleotide
  Target: LAMA2; (+) strand; PAM type: YTN; PAM sequence: TTT
aggcaccttttagacatcta

SEQ ID NO: 324270 - DNA, 20 bp, Artificial Sequence
  Description of Artificial Sequence: Synthetic oligonucleotide
  Target: LAMA2; (+) strand; PAM type: YTN; PAM sequence: TTA
ggcaccttttagacatctaa

SEQ ID NO: 324271 - DNA, 20 bp, Artificial Sequence
  Description of Artificial Sequence: Synthetic oligonucleotide
  Target: LAMA2; (+) strand; PAM type: YTN; PAM sequence: CTT
ttagacatctaaatagaact

SEQ ID NO: 324272 - DNA, 20 bp, Artificial Sequence
  Description of Artificial Sequence: Synthetic oligonucleotide
  Target: LAMA2; (+) strand; PAM type: YTN; PAM sequence: TTT
tagacatctaaatagaacta

SEQ ID NO: 324273 - DNA, 20 bp, Artificial Sequence
  Description of Artificial Sequence: Synthetic oligonucleotide
  Target: LAMA2; (+) strand; PAM type: YTN; PAM sequence: TTT
agacatctaaatagaactat

SEQ ID NO: 324274 - DNA, 20 bp, Artificial Sequence
  Description of Artificial Sequence: Synthetic oligonucleotide
  Target: LAMA2; (+) strand; PAM type: YTN; PAM sequence: TTA
gacatctaaatagaactatt

SEQ ID NO: 324275 - DNA, 20 bp, Artificial Sequence
  Description of Artificial Sequence: Synthetic oligonucleotide
  Target: LAMA2; (+) strand; PAM type: YTN; PAM sequence: CTA
aatagaactattgatttaat

SEQ ID NO: 324276 - DNA, 20 bp, Artificial Sequence
  Description of Artificial Sequence: Synthetic oligonucleotide
  Target: LAMA2; (+) strand; PAM type: YTN; PAM sequence: CTA
ttgatttaatatttggatat

SEQ ID NO: 324277 - DNA, 20 bp, Artificial Sequence
  Description of Artificial Sequence: Synthetic oligonucleotide
  Target: LAMA2; (+) strand; PAM type: YTN; PAM sequence: TTG
atttaatatttggatatgta

SEQ ID NO: 324278 - DNA, 20 bp, Artificial Sequence
  Description of Artificial Sequence: Synthetic oligonucleotide
  Target: LAMA2; (+) strand; PAM type: YTN; PAM sequence: TTT
aatatttggatatgtaagtc

SEQ ID NO: 324279 - DNA, 20 bp, Artificial Sequence
  Description of Artificial Sequence: Synthetic oligonucleotide
  Target: LAMA2; (+) strand; PAM type: YTN; PAM sequence: TTA
atatttggatatgtaagtct

SEQ ID NO: 324280 - DNA, 20 bp, Artificial Sequence
  Description of Artificial Sequence: Synthetic oligonucleotide
  Target: LAMA2; (+) strand; PAM type: YTN; PAM sequence: TTT
ggatatgtaagtctcatctg

SEQ ID NO: 324281 - DNA, 20 bp, Artificial Sequence
  Description of Artificial Sequence: Synthetic oligonucleotide
  Target: LAMA2; (+) strand; PAM type: YTN; PAM sequence: TTG
gatatgtaagtctcatctgt

SEQ ID NO: 324282 - DNA, 20 bp, Artificial Sequence
  Description of Artificial Sequence: Synthetic oligonucleotide
  Target: LAMA2; (+) strand; PAM type: YTN; PAM sequence: CTC
atctgtatgccatctgttct

SEQ ID NO: 324283 - DNA, 20 bp, Artificial Sequence
  Description of Artificial Sequence: Synthetic oligonucleotide
  Target: LAMA2; (+) strand; PAM type: YTN; PAM sequence: CTG
tatgccatctgttctggcta

SEQ ID NO: 324284 - DNA, 20 bp, Artificial Sequence
  Description of Artificial Sequence: Synthetic oligonucleotide
  Target: LAMA2; (+) strand; PAM type: YTN; PAM sequence: CTG
ttctggctatcttacattcg

SEQ ID NO: 324285 - DNA, 20 bp, Artificial Sequence
  Description of Artificial Sequence: Synthetic oligonucleotide
  Target: LAMA2; (+) strand; PAM type: YTN; PAM sequence: TTC
tggctatcttacattcggat

SEQ ID NO: 324286 - DNA, 20 bp, Artificial Sequence
  Description of Artificial Sequence: Synthetic oligonucleotide
  Target: LAMA2; (+) strand; PAM type: YTN; PAM sequence: CTG
gctatcttacattcggatcc

SEQ ID NO: 324287 - DNA, 20 bp, Artificial Sequence
  Description of Artificial Sequence: Synthetic oligonucleotide
  Target: LAMA2; (+) strand; PAM type: YTN; PAM sequence: CTA
tcttacattcggatcctgtg

SEQ ID NO: 324288 - DNA, 20 bp, Artificial Sequence
  Description of Artificial Sequence: Synthetic oligonucleotide
  Target: LAMA2; (+) strand; PAM type: YTN; PAM sequence: CTT
acattcggatcctgtgtatt

SEQ ID NO: 324289 - DNA, 20 bp, Artificial Sequence
  Description of Artificial Sequence: Synthetic oligonucleotide
  Target: LAMA2; (+) strand; PAM type: YTN; PAM sequence: TTA
cattcggatcctgtgtattt

SEQ ID NO: 324290 - DNA, 20 bp, Artificial Sequence
  Description of Artificial Sequence: Synthetic oligonucleotide
  Target: LAMA2; (+) strand; PAM type: YTN; PAM sequence: TTC
ggatcctgtgtattttttac

SEQ ID NO: 324291 - DNA, 20 bp, Artificial Sequence
  Description of Artificial Sequence: Synthetic oligonucleotide
  Target: LAMA2; (+) strand; PAM type: YTN; PAM sequence: CTG
tgtattttttacactggcct

SEQ ID NO: 324292 - DNA, 20 bp, Artificial Sequence
  Description of Artificial Sequence: Synthetic oligonucleotide
  Target: LAMA2; (+) strand; PAM type: YTN; PAM sequence: TTT
tttacactggcctggaaaag

SEQ ID NO: 324293 - DNA, 20 bp, Artificial Sequence
  Description of Artificial Sequence: Synthetic oligonucleotide
  Target: LAMA2; (+) strand; PAM type: YTN; PAM sequence: TTT
ttacactggcctggaaaagc

SEQ ID NO: 324294 - DNA, 20 bp, Artificial Sequence
  Description of Artificial Sequence: Synthetic oligonucleotide
  Target: LAMA2; (+) strand; PAM type: YTN; PAM sequence: TTT
tacactggcctggaaaagct

SEQ ID NO: 324295 - DNA, 20 bp, Artificial Sequence
  Description of Artificial Sequence: Synthetic oligonucleotide
  Target: LAMA2; (+) strand; PAM type: YTN; PAM sequence: TTT
acactggcctggaaaagctg

SEQ ID NO: 324296 - DNA, 20 bp, Artificial Sequence
  Description of Artificial Sequence: Synthetic oligonucleotide
  Target: LAMA2; (+) strand; PAM type: YTN; PAM sequence: TTA
cactggcctggaaaagctgg

SEQ ID NO: 324297 - DNA, 20 bp, Artificial Sequence
  Description of Artificial Sequence: Synthetic oligonucleotide
  Target: LAMA2; (+) strand; PAM type: YTN; PAM sequence: CTG
gcctggaaaagctggcaaaa

SEQ ID NO: 324298 - DNA, 20 bp, Artificial Sequence
  Description of Artificial Sequence: Synthetic oligonucleotide
  Target: LAMA2; (+) strand; PAM type: YTN; PAM sequence: CTG
gaaaagctggcaaaacctag

SEQ ID NO: 324299 - DNA, 20 bp, Artificial Sequence
  Description of Artificial Sequence: Synthetic oligonucleotide
  Target: LAMA2; (+) strand; PAM type: YTN; PAM sequence: CTG
gcaaaacctagaactgcatt

SEQ ID NO: 324300 - DNA, 20 bp, Artificial Sequence
  Description of Artificial Sequence: Synthetic oligonucleotide
  Target: LAMA2; (+) strand; PAM type: YTN; PAM sequence: CTA
gaactgcatttgtcccctct

SEQ ID NO: 324301 - DNA, 20 bp, Artificial Sequence
  Description of Artificial Sequence: Synthetic oligonucleotide
  Target: LAMA2; (+) strand; PAM type: YTN; PAM sequence: CTG
catttgtcccctctgcgttt

SEQ ID NO: 324302 - DNA, 20 bp, Artificial Sequence
  Description of Artificial Sequence: Synthetic oligonucleotide
  Target: LAMA2; (+) strand; PAM type: YTN; PAM sequence: TTT
gtcccctctgcgtttatacc

SEQ ID NO: 324303 - DNA, 20 bp, Artificial Sequence
  Description of Artificial Sequence: Synthetic oligonucleotide
  Target: LAMA2; (+) strand; PAM type: YTN; PAM sequence: TTG
tcccctctgcgtttatacca

SEQ ID NO: 324304 - DNA, 20 bp, Artificial Sequence
  Description of Artificial Sequence: Synthetic oligonucleotide
  Target: LAMA2; (+) strand; PAM type: YTN; PAM sequence: CTC
tgcgtttataccatttcagt

SEQ ID NO: 324305 - DNA, 20 bp, Artificial Sequence
  Description of Artificial Sequence: Synthetic oligonucleotide
  Target: LAMA2; (+) strand; PAM type: YTN; PAM sequence: CTG
cgtttataccatttcagttg

SEQ ID NO: 324306 - DNA, 20 bp, Artificial Sequence
  Description of Artificial Sequence: Synthetic oligonucleotide
  Target: LAMA2; (+) strand; PAM type: YTN; PAM sequence: TTT
ataccatttcagttgacagg

SEQ ID NO: 324307 - DNA, 20 bp, Artificial Sequence
  Description of Artificial Sequence: Synthetic oligonucleotide
  Target: LAMA2; (+) strand; PAM type: YTN; PAM sequence: TTA
taccatttcagttgacaggt

SEQ ID NO: 324308 - DNA, 20 bp, Artificial Sequence
  Description of Artificial Sequence: Synthetic oligonucleotide
  Target: LAMA2; (+) strand; PAM type: YTN; PAM sequence: TTT
cagttgacaggtctaatttt

SEQ ID NO: 324309 - DNA, 20 bp, Artificial Sequence
  Description of Artificial Sequence: Synthetic oligonucleotide
  Target: LAMA2; (+) strand; PAM type: YTN; PAM sequence: TTC
agttgacaggtctaatttta

SEQ ID NO: 324310 - DNA, 20 bp, Artificial Sequence
  Description of Artificial Sequence: Synthetic oligonucleotide
  Target: LAMA2; (+) strand; PAM type: YTN; PAM sequence: TTG
acaggtctaattttaagttc

SEQ ID NO: 324311 - DNA, 20 bp, Artificial Sequence
  Description of Artificial Sequence: Synthetic oligonucleotide
  Target: LAMA2; (+) strand; PAM type: YTN; PAM sequence: CTA
attttaagttccaccttttc

SEQ ID NO: 324312 - DNA, 20 bp, Artificial Sequence
  Description of Artificial Sequence: Synthetic oligonucleotide
  Target: LAMA2; (+) strand; PAM type: YTN; PAM sequence: TTT
taagttccaccttttcataa

SEQ ID NO: 324313 - DNA, 20 bp, Artificial Sequence
  Description of Artificial Sequence: Synthetic oligonucleotide
  Target: LAMA2; (+) strand; PAM type: YTN; PAM sequence: TTT
aagttccaccttttcataat

SEQ ID NO: 324314 - DNA, 20 bp, Artificial Sequence
  Description of Artificial Sequence: Synthetic oligonucleotide
  Target: LAMA2; (+) strand; PAM type: YTN; PAM sequence: TTA
agttccaccttttcataatt

SEQ ID NO: 324315 - DNA, 20 bp, Artificial Sequence
  Description of Artificial Sequence: Synthetic oligonucleotide
  Target: LAMA2; (+) strand; PAM type: YTN; PAM sequence: TTC
caccttttcataattgatta

SEQ ID NO: 324316 - DNA, 20 bp, Artificial Sequence
  Description of Artificial Sequence: Synthetic oligonucleotide
  Target: LAMA2; (+) strand; PAM type: YTN; PAM sequence: CTT
ttcataattgattattcatt

SEQ ID NO: 324317 - DNA, 20 bp, Artificial Sequence
  Description of Artificial Sequence: Synthetic oligonucleotide
  Target: LAMA2; (+) strand; PAM type: YTN; PAM sequence: TTT
tcataattgattattcattt

SEQ ID NO: 324318 - DNA, 20 bp, Artificial Sequence
  Description of Artificial Sequence: Synthetic oligonucleotide
  Target: LAMA2; (+) strand; PAM type: YTN; PAM sequence: TTT
cataattgattattcatttg

SEQ ID NO: 324319 - DNA, 20 bp, Artificial Sequence
  Description of Artificial Sequence: Synthetic oligonucleotide
  Target: LAMA2; (+) strand; PAM type: YTN; PAM sequence: TTC
ataattgattattcatttgt

SEQ ID NO: 324320 - DNA, 20 bp, Artificial Sequence
  Description of Artificial Sequence: Synthetic oligonucleotide
  Target: LAMA2; (+) strand; PAM type: YTN; PAM sequence: TTG
attattcatttgtacacaag

SEQ ID NO: 324321 - DNA, 20 bp, Artificial Sequence
  Description of Artificial Sequence: Synthetic oligonucleotide
  Target: LAMA2; (+) strand; PAM type: YTN; PAM sequence: TTA
ttcatttgtacacaagtatt

SEQ ID NO: 324322 - DNA, 20 bp, Artificial Sequence
  Description of Artificial Sequence: Synthetic oligonucleotide
  Target: LAMA2; (+) strand; PAM type: YTN; PAM sequence: TTC
atttgtacacaagtatttgt

SEQ ID NO: 324323 - DNA, 20 bp, Artificial Sequence
  Description of Artificial Sequence: Synthetic oligonucleotide
  Target: LAMA2; (+) strand; PAM type: YTN; PAM sequence: TTT
gtacacaagtatttgttgag

SEQ ID NO: 324324 - DNA, 20 bp, Artificial Sequence
  Description of Artificial Sequence: Synthetic oligonucleotide
  Target: LAMA2; (+) strand; PAM type: YTN; PAM sequence: TTG
tacacaagtatttgttgagt

SEQ ID NO: 324325 - DNA, 20 bp, Artificial Sequence
  Description of Artificial Sequence: Synthetic oligonucleotide
  Target: LAMA2; (+) strand; PAM type: YTN; PAM sequence: TTT
gttgagtaccagaaatagca

SEQ ID NO: 324326 - DNA, 20 bp, Artificial Sequence
  Description of Artificial Sequence: Synthetic oligonucleotide
  Target: LAMA2; (+) strand; PAM type: YTN; PAM sequence: TTG
ttgagtaccagaaatagcat

SEQ ID NO: 324327 - DNA, 20 bp, Artificial Sequence
  Description of Artificial Sequence: Synthetic oligonucleotide
  Target: LAMA2; (+) strand; PAM type: YTN; PAM sequence: TTG
agtaccagaaatagcattta

SEQ ID NO: 324328 - DNA, 20 bp, Artificial Sequence
  Description of Artificial Sequence: Synthetic oligonucleotide
  Target: LAMA2; (+) strand; PAM type: YTN; PAM sequence: TTT
agtcatttcaagctttagtt

SEQ ID NO: 324329 - DNA, 20 bp, Artificial Sequence
  Description of Artificial Sequence: Synthetic oligonucleotide
  Target: LAMA2; (+) strand; PAM type: YTN; PAM sequence: TTA
gtcatttcaagctttagttt

SEQ ID NO: 324330 - DNA, 20 bp, Artificial Sequence
  Description of Artificial Sequence: Synthetic oligonucleotide
  Target: LAMA2; (+) strand; PAM type: YTN; PAM sequence: TTT
caagctttagtttttcatca

SEQ ID NO: 324331 - DNA, 20 bp, Artificial Sequence
  Description of Artificial Sequence: Synthetic oligonucleotide
  Target: LAMA2; (+) strand; PAM type: YTN; PAM sequence: TTC
aagctttagtttttcatcat

SEQ ID NO: 324332 - DNA, 20 bp, Artificial Sequence
  Description of Artificial Sequence: Synthetic oligonucleotide
  Target: LAMA2; (+) strand; PAM type: YTN; PAM sequence: CTT
tagtttttcatcatcctatt

SEQ ID NO: 324333 - DNA, 20 bp, Artificial Sequence
  Description of Artificial Sequence: Synthetic oligonucleotide
  Target: LAMA2; (+) strand; PAM type: YTN; PAM sequence: TTT
agtttttcatcatcctattc

SEQ ID NO: 324334 - DNA, 20 bp, Artificial Sequence
  Description of Artificial Sequence: Synthetic oligonucleotide
  Target: LAMA2; (+) strand; PAM type: YTN; PAM sequence: TTA
gtttttcatcatcctattct

SEQ ID NO: 324335 - DNA, 20 bp, Artificial Sequence
  Description of Artificial Sequence: Synthetic oligonucleotide
  Target: LAMA2; (+) strand; PAM type: YTN; PAM sequence: TTT
ttcatcatcctattctccag

SEQ ID NO: 324336 - DNA, 20 bp, Artificial Sequence
  Description of Artificial Sequence: Synthetic oligonucleotide
  Target: LAMA2; (+) strand; PAM type: YTN; PAM sequence: TTT
tcatcatcctattctccaga

SEQ ID NO: 324337 - DNA, 20 bp, Artificial Sequence
  Description of Artificial Sequence: Synthetic oligonucleotide
  Target: LAMA2; (+) strand; PAM type: YTN; PAM sequence: TTT
catcatcctattctccagat

SEQ ID NO: 324338 - DNA, 20 bp, Artificial Sequence
  Description of Artificial Sequence: Synthetic oligonucleotide
  Target: LAMA2; (+) strand; PAM type: YTN; PAM sequence: TTC
atcatcctattctccagatt

SEQ ID NO: 324339 - DNA, 20 bp, Artificial Sequence
  Description of Artificial Sequence: Synthetic oligonucleotide
  Target: LAMA2; (+) strand; PAM type: YTN; PAM sequence: CTA
ttctccagatttcagcagca

SEQ ID NO: 324340 - DNA, 20 bp, Artificial Sequence
  Description of Artificial Sequence: Synthetic oligonucleotide
  Target: LAMA2; (+) strand; PAM type: YTN; PAM sequence: TTC
tccagatttcagcagcatca

SEQ ID NO: 324341 - DNA, 20 bp, Artificial Sequence
  Description of Artificial Sequence: Synthetic oligonucleotide
  Target: LAMA2; (+) strand; PAM type: YTN; PAM sequence: CTC
cagatttcagcagcatcaga

SEQ ID NO: 324342 - DNA, 20 bp, Artificial Sequence
  Description of Artificial Sequence: Synthetic oligonucleotide
  Target: LAMA2; (+) strand; PAM type: YTN; PAM sequence: TTT
cagcagcatcagaagccata

SEQ ID NO: 324343 - DNA, 20 bp, Artificial Sequence
  Description of Artificial Sequence: Synthetic oligonucleotide
  Target: LAMA2; (+) strand; PAM type: YTN; PAM sequence: TTC
agcagcatcagaagccatat

SEQ ID NO: 324344 - DNA, 20 bp, Artificial Sequence
  Description of Artificial Sequence: Synthetic oligonucleotide
  Target: LAMA2; (+) strand; PAM type: YTN; PAM sequence: CTG
ccttcggatggcccttagat

SEQ ID NO: 324345 - DNA, 20 bp, Artificial Sequence
  Description of Artificial Sequence: Synthetic oligonucleotide
  Target: LAMA2; (+) strand; PAM type: YTN; PAM sequence: CTT
cggatggcccttagatggcc

SEQ ID NO: 324346 - DNA, 20 bp, Artificial Sequence
  Description of Artificial Sequence: Synthetic oligonucleotide
  Target: LAMA2; (+) strand; PAM type: YTN; PAM sequence: TTC
ggatggcccttagatggcca

SEQ ID NO: 324347 - DNA, 20 bp, Artificial Sequence
  Description of Artificial Sequence: Synthetic oligonucleotide
  Target: LAMA2; (+) strand; PAM type: YTN; PAM sequence: CTT
agatggccaccaagatcccc

SEQ ID NO: 324348 - DNA, 20 bp, Artificial Sequence
  Description of Artificial Sequence: Synthetic oligonucleotide
  Target: LAMA2; (+) strand; PAM type: YTN; PAM sequence: TTA
gatggccaccaagatcccct

SEQ ID NO: 324349 - DNA, 20 bp, Artificial Sequence
  Description of Artificial Sequence: Synthetic oligonucleotide
  Target: LAMA2; (+) strand; PAM type: YTN; PAM sequence: CTA
gttacattttctgtgtacaa

SEQ ID NO: 324350 - DNA, 20 bp, Artificial Sequence
  Description of Artificial Sequence: Synthetic oligonucleotide
  Target: LAMA2; (+) strand; PAM type: YTN; PAM sequence: TTA
cattttctgtgtacaaagca

SEQ ID NO: 324351 - DNA, 20 bp, Artificial Sequence
  Description of Artificial Sequence: Synthetic oligonucleotide
  Target: LAMA2; (+) strand; PAM type: YTN; PAM sequence: TTT
tctgtgtacaaagcagaaga

SEQ ID NO: 324352 - DNA, 20 bp, Artificial Sequence
  Description of Artificial Sequence: Synthetic oligonucleotide
  Target: LAMA2; (+) strand; PAM type: YTN; PAM sequence: TTT
ctgtgtacaaagcagaagaa

SEQ ID NO: 324353 - DNA, 20 bp, Artificial Sequence
  Description of Artificial Sequence: Synthetic oligonucleotide
  Target: LAMA2; (+) strand; PAM type: YTN; PAM sequence: TTC
tgtgtacaaagcagaagaaa

SEQ ID NO: 324354 - DNA, 20 bp, Artificial Sequence
  Description of Artificial Sequence: Synthetic oligonucleotide
  Target: LAMA2; (+) strand; PAM type: YTN; PAM sequence: CTG
tgtacaaagcagaagaaaga

SEQ ID NO: 324355 - DNA, 20 bp, Artificial Sequence
  Description of Artificial Sequence: Synthetic oligonucleotide
  Target: LAMA2; (+) strand; PAM type: YTN; PAM sequence: CTT
cattctgtacacagtgtgct

SEQ ID NO: 324356 - DNA, 20 bp, Artificial Sequence
  Description of Artificial Sequence: Synthetic oligonucleotide
  Target: LAMA2; (+) strand; PAM type: YTN; PAM sequence: TTC
attctgtacacagtgtgcta

SEQ ID NO: 324357 - DNA, 20 bp, Artificial Sequence
  Description of Artificial Sequence: Synthetic oligonucleotide
  Target: LAMA2; (+) strand; PAM type: YTN; PAM sequence: TTC
tgtacacagtgtgctacact

SEQ ID NO: 324358 - DNA, 20 bp, Artificial Sequence
  Description of Artificial Sequence: Synthetic oligonucleotide
  Target: LAMA2; (+) strand; PAM type: YTN; PAM sequence: CTG
tacacagtgtgctacactgt

SEQ ID NO: 324359 - DNA, 20 bp, Artificial Sequence
  Description of Artificial Sequence: Synthetic oligonucleotide
  Target: LAMA2; (+) strand; PAM type: YTN; PAM sequence: CTA
cactgtggtttagtttatta

SEQ ID NO: 324360 - DNA, 20 bp, Artificial Sequence
  Description of Artificial Sequence: Synthetic oligonucleotide
  Target: LAMA2; (+) strand; PAM type: YTN; PAM sequence: CTG
tggtttagtttattattaaa

SEQ ID NO: 324361 - DNA, 20 bp, Artificial Sequence
  Description of Artificial Sequence: Synthetic oligonucleotide
  Target: LAMA2; (+) strand; PAM type: YTN; PAM sequence: TTT
agtttattattaaagagcat

SEQ ID NO: 324362 - DNA, 20 bp, Artificial Sequence
  Description of Artificial Sequence: Synthetic oligonucleotide
  Target: LAMA2; (+) strand; PAM type: YTN; PAM sequence: TTA
gtttattattaaagagcata

SEQ ID NO: 324363 - DNA, 20 bp, Artificial Sequence
  Description of Artificial Sequence: Synthetic oligonucleotide
  Target: LAMA2; (+) strand; PAM type: YTN; PAM sequence: TTT
attattaaagagcataatta

SEQ ID NO: 324364 - DNA, 20 bp, Artificial Sequence
  Description of Artificial Sequence: Synthetic oligonucleotide
  Target: LAMA2; (+) strand; PAM type: YTN; PAM sequence: TTA
ttattaaagagcataattaa

SEQ ID NO: 324365 - DNA, 20 bp, Artificial Sequence
  Description of Artificial Sequence: Synthetic oligonucleotide
  Target: LAMA2; (+) strand; PAM type: YTN; PAM sequence: TTA
ttaaagagcataattaaaag

SEQ ID NO: 324366 - DNA, 20 bp, Artificial Sequence
  Description of Artificial Sequence: Synthetic oligonucleotide
  Target: LAMA2; (+) strand; PAM type: YTN; PAM sequence: TTA
aagagcataattaaaagaaa

SEQ ID NO: 324367 - DNA, 20 bp, Artificial Sequence
  Description of Artificial Sequence: Synthetic oligonucleotide
  Target: LAMA2; (+) strand; PAM type: YTN; PAM sequence: TTA
aaagaaaaaatatgctattt

SEQ ID NO: 324368 - DNA, 20 bp, Artificial Sequence
  Description of Artificial Sequence: Synthetic oligonucleotide
  Target: LAMA2; (+) strand; PAM type: YTN; PAM sequence: CTA
tttaggtttggattactaat

SEQ ID NO: 324369 - DNA, 20 bp, Artificial Sequence
  Description of Artificial Sequence: Synthetic oligonucleotide
  Target: LAMA2; (+) strand; PAM type: YTN; PAM sequence: TTT
aggtttggattactaatttt

SEQ ID NO: 324370 - DNA, 20 bp, Artificial Sequence
  Description of Artificial Sequence: Synthetic oligonucleotide
  Target: LAMA2; (+) strand; PAM type: YTN; PAM sequence: TTA
ggtttggattactaatttta

SEQ ID NO: 324371 - DNA, 20 bp, Artificial Sequence
  Description of Artificial Sequence: Synthetic oligonucleotide
  Target: LAMA2; (+) strand; PAM type: YTN; PAM sequence: TTT
ggattactaattttaagttt

SEQ ID NO: 324372 - DNA, 20 bp, Artificial Sequence
  Description of Artificial Sequence: Synthetic oligonucleotide
  Target: LAMA2; (+) strand; PAM type: YTN; PAM sequence: TTG
gattactaattttaagttta

SEQ ID NO: 324373 - DNA, 20 bp, Artificial Sequence
  Description of Artificial Sequence: Synthetic oligonucleotide
  Target: LAMA2; (+) strand; PAM type: YTN; PAM sequence: TTA
ctaattttaagtttaaatgc

SEQ ID NO: 324374 - DNA, 20 bp, Artificial Sequence
  Description of Artificial Sequence: Synthetic oligonucleotide
  Target: LAMA2; (+) strand; PAM type: YTN; PAM sequence: CTA
attttaagtttaaatgcctt

SEQ ID NO: 324375 - DNA, 20 bp, Artificial Sequence
  Description of Artificial Sequence: Synthetic oligonucleotide
  Target: LAMA2; (+) strand; PAM type: YTN; PAM sequence: TTT
taagtttaaatgcctttata

SEQ ID NO: 324376 - DNA, 20 bp, Artificial Sequence
  Description of Artificial Sequence: Synthetic oligonucleotide
  Target: LAMA2; (+) strand; PAM type: YTN; PAM sequence: TTT
aagtttaaatgcctttatat

SEQ ID NO: 324377 - DNA, 20 bp, Artificial Sequence
  Description of Artificial Sequence: Synthetic oligonucleotide
  Target: LAMA2; (+) strand; PAM type: YTN; PAM sequence: TTA
agtttaaatgcctttatatc

SEQ ID NO: 324378 - DNA, 20 bp, Artificial Sequence
  Description of Artificial Sequence: Synthetic oligonucleotide
  Target: LAMA2; (+) strand; PAM type: YTN; PAM sequence: TTT
aaatgcctttatatcatatt

SEQ ID NO: 324379 - DNA, 20 bp, Artificial Sequence
  Description of Artificial Sequence: Synthetic oligonucleotide
  Target: LAMA2; (+) strand; PAM type: YTN; PAM sequence: TTA
aatgcctttatatcatattt

SEQ ID NO: 324380 - DNA, 20 bp, Artificial Sequence
  Description of Artificial Sequence: Synthetic oligonucleotide
  Target: LAMA2; (+) strand; PAM type: YTN; PAM sequence: CTT
tatatcatatttctttgaag

SEQ ID NO: 324381 - DNA, 20 bp, Artificial Sequence
  Description of Artificial Sequence: Synthetic oligonucleotide
  Target: LAMA2; (+) strand; PAM type: YTN; PAM sequence: TTT
atatcatatttctttgaagc

SEQ ID NO: 324382 - DNA, 20 bp, Artificial Sequence
  Description of Artificial Sequence: Synthetic oligonucleotide
  Target: LAMA2; (+) strand; PAM type: YTN; PAM sequence: TTA
tatcatatttctttgaagct

SEQ ID NO: 324383 - DNA, 20 bp, Artificial Sequence
  Description of Artificial Sequence: Synthetic oligonucleotide
  Target: LAMA2; (+) strand; PAM type: YTN; PAM sequence: TTT
ctttgaagctagacatgtat

SEQ ID NO: 324384 - DNA, 20 bp, Artificial Sequence
  Description of Artificial Sequence: Synthetic oligonucleotide
  Target: LAMA2; (+) strand; PAM type: YTN; PAM sequence: TTC
tttgaagctagacatgtatt

SEQ ID NO: 324385 - DNA, 20 bp, Artificial Sequence
  Description of Artificial Sequence: Synthetic oligonucleotide
  Target: LAMA2; (+) strand; PAM type: YTN; PAM sequence: CTT
tgaagctagacatgtattca

SEQ ID NO: 324386 - DNA, 20 bp, Artificial Sequence
  Description of Artificial Sequence: Synthetic oligonucleotide
  Target: LAMA2; (+) strand; PAM type: YTN; PAM sequence: TTT
gaagctagacatgtattcaa

SEQ ID NO: 324387 - DNA, 20 bp, Artificial Sequence
  Description of Artificial Sequence: Synthetic oligonucleotide
  Target: LAMA2; (+) strand; PAM type: YTN; PAM sequence: TTG
aagctagacatgtattcaaa

SEQ ID NO: 324388 - DNA, 20 bp, Artificial Sequence
  Description of Artificial Sequence: Synthetic oligonucleotide
  Target: LAMA2; (+) strand; PAM type: YTN; PAM sequence: CTA
gacatgtattcaaacctcag

SEQ ID NO: 324389 - DNA, 20 bp, Artificial Sequence
  Description of Artificial Sequence: Synthetic oligonucleotide
  Target: LAMA2; (+) strand; PAM type: YTN; PAM sequence: TTC
aaacctcagctcccccaata

SEQ ID NO: 324390 - DNA, 20 bp, Artificial Sequence
  Description of Artificial Sequence: Synthetic oligonucleotide
  Target: LAMA2; (+) strand; PAM type: YTN; PAM sequence: CTC
agctcccccaataattagat

SEQ ID NO: 324391 - DNA, 20 bp, Artificial Sequence
  Description of Artificial Sequence: Synthetic oligonucleotide
  Target: LAMA2; (+) strand; PAM type: YTN; PAM sequence: CTC
ccccaataattagatatttg

SEQ ID NO: 324392 - DNA, 20 bp, Artificial Sequence
  Description of Artificial Sequence: Synthetic oligonucleotide
  Target: LAMA2; (+) strand; PAM type: YTN; PAM sequence: TTA
gatatttgaacatggtggaa

SEQ ID NO: 324393 - DNA, 20 bp, Artificial Sequence
  Description of Artificial Sequence: Synthetic oligonucleotide
  Target: LAMA2; (+) strand; PAM type: YTN; PAM sequence: TTT
gaacatggtggaaatagtga

SEQ ID NO: 324394 - DNA, 20 bp, Artificial Sequence
  Description of Artificial Sequence: Synthetic oligonucleotide
  Target: LAMA2; (+) strand; PAM type: YTN; PAM sequence: TTG
aacatggtggaaatagtgaa

SEQ ID NO: 324395 - DNA, 20 bp, Artificial Sequence
  Description of Artificial Sequence: Synthetic oligonucleotide
  Target: LAMA2; (+) strand; PAM type: YTN; PAM sequence: CTA
tcatctttaaaacaaaggat

SEQ ID NO: 324396 - DNA, 20 bp, Artificial Sequence
  Description of Artificial Sequence: Synthetic oligonucleotide
  Target: LAMA2; (+) strand; PAM type: YTN; PAM sequence: CTT
taaaacaaaggatataaaat

SEQ ID NO: 324397 - DNA, 20 bp, Artificial Sequence
  Description of Artificial Sequence: Synthetic oligonucleotide
  Target: LAMA2; (+) strand; PAM type: YTN; PAM sequence: TTT
aaaacaaaggatataaaatc

SEQ ID NO: 324398 - DNA, 20 bp, Artificial Sequence
  Description of Artificial Sequence: Synthetic oligonucleotide
  Target: LAMA2; (+) strand; PAM type: YTN; PAM sequence: TTA
aaacaaaggatataaaatct

SEQ ID NO: 324399 - DNA, 20 bp, Artificial Sequence
  Description of Artificial Sequence: Synthetic oligonucleotide
  Target: LAMA2; (+) strand; PAM type: YTN; PAM sequence: CTA
atagagtggataacatgatt

SEQ ID NO: 324400 - DNA, 20 bp, Artificial Sequence
  Description of Artificial Sequence: Synthetic oligonucleotide
  Target: LAMA2; (+) strand; PAM type: YTN; PAM sequence: TTA
taataaagatataaagatta

SEQ ID NO: 324401 - DNA, 20 bp, Artificial Sequence
  Description of Artificial Sequence: Synthetic oligonucleotide
  Target: LAMA2; (+) strand; PAM type: YTN; PAM sequence: TTA
taaaatattaaaagttcaat

SEQ ID NO: 324402 - DNA, 20 bp, Artificial Sequence
  Description of Artificial Sequence: Synthetic oligonucleotide
  Target: LAMA2; (+) strand; PAM type: YTN; PAM sequence: TTA
aaagttcaatattgtcatta

SEQ ID NO: 324403 - DNA, 20 bp, Artificial Sequence
  Description of Artificial Sequence: Synthetic oligonucleotide
  Target: LAMA2; (+) strand; PAM type: YTN; PAM sequence: TTC
aatattgtcattagactcta

SEQ ID NO: 324404 - DNA, 20 bp, Artificial Sequence
  Description of Artificial Sequence: Synthetic oligonucleotide
  Target: LAMA2; (+) strand; PAM type: YTN; PAM sequence: TTG
tcattagactctaatcaata

SEQ ID NO: 324405 - DNA, 20 bp, Artificial Sequence
  Description of Artificial Sequence: Synthetic oligonucleotide
  Target: LAMA2; (+) strand; PAM type: YTN; PAM sequence: TTA
gactctaatcaataatgagt

SEQ ID NO: 324406 - DNA, 20 bp, Artificial Sequence
  Description of Artificial Sequence: Synthetic oligonucleotide
  Target: LAMA2; (+) strand; PAM type: YTN; PAM sequence: CTC
taatcaataatgagtatatc

SEQ ID NO: 324407 - DNA, 20 bp, Artificial Sequence
  Description of Artificial Sequence: Synthetic oligonucleotide
  Target: LAMA2; (+) strand; PAM type: YTN; PAM sequence: CTA
atcaataatgagtatatcac

SEQ ID NO: 324408 - DNA, 20 bp, Artificial Sequence
  Description of Artificial Sequence: Synthetic oligonucleotide
  Target: LAMA2; (+) strand; PAM type: YTN; PAM sequence: TTA
tattttgacatgaagaacta

SEQ ID NO: 324409 - DNA, 20 bp, Artificial Sequence
  Description of Artificial Sequence: Synthetic oligonucleotide
  Target: LAMA2; (+) strand; PAM type: YTN; PAM sequence: TTT
tgacatgaagaactatttag

SEQ ID NO: 324410 - DNA, 20 bp, Artificial Sequence
  Description of Artificial Sequence: Synthetic oligonucleotide
  Target: LAMA2; (+) strand; PAM type: YTN; PAM sequence: TTT
gacatgaagaactatttagc

SEQ ID NO: 324411 - DNA, 20 bp, Artificial Sequence
  Description of Artificial Sequence: Synthetic oligonucleotide
  Target: LAMA2; (+) strand; PAM type: YTN; PAM sequence: TTG
acatgaagaactatttagcc

SEQ ID NO: 324412 - DNA, 20 bp, Artificial Sequence
  Description of Artificial Sequence: Synthetic oligonucleotide
  Target: LAMA2; (+) strand; PAM type: YTN; PAM sequence: CTA
tttagccttagagctttgaa

SEQ ID NO: 324413 - DNA, 20 bp, Artificial Sequence
  Description of Artificial Sequence: Synthetic oligonucleotide
  Target: LAMA2; (+) strand; PAM type: YTN; PAM sequence: TTT
agccttagagctttgaaata

SEQ ID NO: 324414 - DNA, 20 bp, Artificial Sequence
  Description of Artificial Sequence: Synthetic oligonucleotide
  Target: LAMA2; (+) strand; PAM type: YTN; PAM sequence: TTA
gccttagagctttgaaatat

SEQ ID NO: 324415 - DNA, 20 bp, Artificial Sequence
  Description of Artificial Sequence: Synthetic oligonucleotide
  Target: LAMA2; (+) strand; PAM type: YTN; PAM sequence: CTT
agagctttgaaatataacta

SEQ ID NO: 324416 - DNA, 20 bp, Artificial Sequence
  Description of Artificial Sequence: Synthetic oligonucleotide
  Target: LAMA2; (+) strand; PAM type: YTN; PAM sequence: TTA
gagctttgaaatataactaa

SEQ ID NO: 324417 - DNA, 20 bp, Artificial Sequence
  Description of Artificial Sequence: Synthetic oligonucleotide
  Target: LAMA2; (+) strand; PAM type: YTN; PAM sequence: CTT
tgaaatataactaagaaatc

SEQ ID NO: 324418 - DNA, 20 bp, Artificial Sequence
  Description of Artificial Sequence: Synthetic oligonucleotide
  Target: LAMA2; (+) strand; PAM type: YTN; PAM sequence: TTT
gaaatataactaagaaatct

SEQ ID NO: 324419 - DNA, 20 bp, Artificial Sequence
  Description of Artificial Sequence: Synthetic oligonucleotide
  Target: LAMA2; (+) strand; PAM type: YTN; PAM sequence: TTG
aaatataactaagaaatcta

SEQ ID NO: 324420 - DNA, 20 bp, Artificial Sequence
  Description of Artificial Sequence: Synthetic oligonucleotide
  Target: LAMA2; (+) strand; PAM type: YTN; PAM sequence: CTA
agaaatctattaaaataaat

SEQ ID NO: 324421 - DNA, 20 bp, Artificial Sequence
  Description of Artificial Sequence: Synthetic oligonucleotide
  Target: LAMA2; (+) strand; PAM type: YTN; PAM sequence: CTA
ttaaaataaattaaatagaa

SEQ ID NO: 324422 - DNA, 20 bp, Artificial Sequence
  Description of Artificial Sequence: Synthetic oligonucleotide
  Target: LAMA2; (+) strand; PAM type: YTN; PAM sequence: TTA
aaataaattaaatagaatat

SEQ ID NO: 324423 - DNA, 20 bp, Artificial Sequence
  Description of Artificial Sequence: Synthetic oligonucleotide
  Target: LAMA2; (+) strand; PAM type: YTN; PAM sequence: TTA
aatagaatatattccaaagt

SEQ ID NO: 324424 - DNA, 20 bp, Artificial Sequence
  Description of Artificial Sequence: Synthetic oligonucleotide
  Target: LAMA2; (+) strand; PAM type: YTN; PAM sequence: TTC
caaagtaactaatgttttcc

SEQ ID NO: 324425 - DNA, 20 bp, Artificial Sequence
  Description of Artificial Sequence: Synthetic oligonucleotide
  Target: LAMA2; (+) strand; PAM type: YTN; PAM sequence: CTA
atgttttcccatattaactc

SEQ ID NO: 324426 - DNA, 20 bp, Artificial Sequence
  Description of Artificial Sequence: Synthetic oligonucleotide
  Target: LAMA2; (+) strand; PAM type: YTN; PAM sequence: TTT
tcccatattaactcagaata

SEQ ID NO: 324427 - DNA, 20 bp, Artificial Sequence
  Description of Artificial Sequence: Synthetic oligonucleotide
  Target: LAMA2; (+) strand; PAM type: YTN; PAM sequence: TTT
cccatattaactcagaataa

SEQ ID NO: 324428 - DNA, 20 bp, Artificial Sequence
  Description of Artificial Sequence: Synthetic oligonucleotide
  Target: LAMA2; (+) strand; PAM type: YTN; PAM sequence: TTC
ccatattaactcagaataac

SEQ ID NO: 324429 - DNA, 20 bp, Artificial Sequence
  Description of Artificial Sequence: Synthetic oligonucleotide
  Target: LAMA2; (+) strand; PAM type: YTN; PAM sequence: TTA
actcagaataactttgtctg

SEQ ID NO: 324430 - DNA, 20 bp, Artificial Sequence
  Description of Artificial Sequence: Synthetic oligonucleotide
  Target: LAMA2; (+) strand; PAM type: YTN; PAM sequence: CTC
agaataactttgtctgaaat

SEQ ID NO: 324431 - DNA, 20 bp, Artificial Sequence
  Description of Artificial Sequence: Synthetic oligonucleotide
  Target: LAMA2; (+) strand; PAM type: YTN; PAM sequence: CTT
tgtctgaaattaaactgaat

SEQ ID NO: 324432 - DNA, 20 bp, Artificial Sequence
  Description of Artificial Sequence: Synthetic oligonucleotide
  Target: LAMA2; (+) strand; PAM type: YTN; PAM sequence: TTT
gtctgaaattaaactgaata

SEQ ID NO: 324433 - DNA, 20 bp, Artificial Sequence
  Description of Artificial Sequence: Synthetic oligonucleotide
  Target: LAMA2; (+) strand; PAM type: YTN; PAM sequence: TTG
tctgaaattaaactgaatat

SEQ ID NO: 324434 - DNA, 20 bp, Artificial Sequence
  Description of Artificial Sequence: Synthetic oligonucleotide
  Target: LAMA2; (+) strand; PAM type: YTN; PAM sequence: CTG
aaattaaactgaatatatat

SEQ ID NO: 324435 - DNA, 20 bp, Artificial Sequence
  Description of Artificial Sequence: Synthetic oligonucleotide
  Target: LAMA2; (+) strand; PAM type: YTN; PAM sequence: TTA
aactgaatatatatcattta

SEQ ID NO: 324436 - DNA, 20 bp, Artificial Sequence
  Description of Artificial Sequence: Synthetic oligonucleotide
  Target: LAMA2; (+) strand; PAM type: YTN; PAM sequence: CTG
aatatatatcatttatagat

SEQ ID NO: 324437 - DNA, 20 bp, Artificial Sequence
  Description of Artificial Sequence: Synthetic oligonucleotide
  Target: LAMA2; (+) strand; PAM type: YTN; PAM sequence: TTT
atagatacaagcatagagtt

SEQ ID NO: 324438 - DNA, 20 bp, Artificial Sequence
  Description of Artificial Sequence: Synthetic oligonucleotide
  Target: LAMA2; (+) strand; PAM type: YTN; PAM sequence: TTA
tagatacaagcatagagttt

SEQ ID NO: 324439 - DNA, 20 bp, Artificial Sequence
  Description of Artificial Sequence: Synthetic oligonucleotide
  Target: LAMA2; (+) strand; PAM type: YTN; PAM sequence: TTT
aaattcaggtaatcttattt

SEQ ID NO: 324440 - DNA, 20 bp, Artificial Sequence
  Description of Artificial Sequence: Synthetic oligonucleotide
  Target: LAMA2; (+) strand; PAM type: YTN; PAM sequence: TTA
aattcaggtaatcttatttg

SEQ ID NO: 324441 - DNA, 20 bp, Artificial Sequence
  Description of Artificial Sequence: Synthetic oligonucleotide
  Target: LAMA2; (+) strand; PAM type: YTN; PAM sequence: TTC
aggtaatcttatttggatgt

SEQ ID NO: 324442 - DNA, 20 bp, Artificial Sequence
  Description of Artificial Sequence: Synthetic oligonucleotide
  Target: LAMA2; (+) strand; PAM type: YTN; PAM sequence: CTT
atttggatgtacaaaccgtg

SEQ ID NO: 324443 - DNA, 20 bp, Artificial Sequence
  Description of Artificial Sequence: Synthetic oligonucleotide
  Target: LAMA2; (+) strand; PAM type: YTN; PAM sequence: TTA
tttggatgtacaaaccgtga

SEQ ID NO: 324444 - DNA, 20 bp, Artificial Sequence
  Description of Artificial Sequence: Synthetic oligonucleotide
  Target: LAMA2; (+) strand; PAM type: YTN; PAM sequence: TTT
ggatgtacaaaccgtgaata

SEQ ID NO: 324445 - DNA, 20 bp, Artificial Sequence
  Description of Artificial Sequence: Synthetic oligonucleotide
  Target: LAMA2; (+) strand; PAM type: YTN; PAM sequence: TTG
gatgtacaaaccgtgaatag

SEQ ID NO: 324446 - DNA, 20 bp, Artificial Sequence
  Description of Artificial Sequence: Synthetic oligonucleotide
  Target: LAMA2; (+) strand; PAM type: YTN; PAM sequence: TTA
aggaaaagtagtcataatta

SEQ ID NO: 324447 - DNA, 20 bp, Artificial Sequence
  Description of Artificial Sequence: Synthetic oligonucleotide
  Target: LAMA2; (+) strand; PAM type: YTN; PAM sequence: TTA
attatatcgaatcttcagag

SEQ ID NO: 324448 - DNA, 20 bp, Artificial Sequence
  Description of Artificial Sequence: Synthetic oligonucleotide
  Target: LAMA2; (+) strand; PAM type: YTN; PAM sequence: TTA
tatcgaatcttcagagttca

SEQ ID NO: 324449 - DNA, 20 bp, Artificial Sequence
  Description of Artificial Sequence: Synthetic oligonucleotide
  Target: LAMA2; (+) strand; PAM type: YTN; PAM sequence: CTT
cagagttcacaccattcctc

SEQ ID NO: 324450 - DNA, 20 bp, Artificial Sequence
  Description of Artificial Sequence: Synthetic oligonucleotide
  Target: LAMA2; (+) strand; PAM type: YTN; PAM sequence: TTC
agagttcacaccattcctct

SEQ ID NO: 324451 - DNA, 20 bp, Artificial Sequence
  Description of Artificial Sequence: Synthetic oligonucleotide
  Target: LAMA2; (+) strand; PAM type: YTN; PAM sequence: TTC
acaccattcctcttcctaaa

SEQ ID NO: 324452 - DNA, 20 bp, Artificial Sequence
  Description of Artificial Sequence: Synthetic oligonucleotide
  Target: LAMA2; (+) strand; PAM type: YTN; PAM sequence: TTC
ctcttcctaaaaacacatac

SEQ ID NO: 324453 - DNA, 20 bp, Artificial Sequence
  Description of Artificial Sequence: Synthetic oligonucleotide
  Target: LAMA2; (+) strand; PAM type: YTN; PAM sequence: CTC
ttcctaaaaacacatacagg

SEQ ID NO: 324454 - DNA, 20 bp, Artificial Sequence
  Description of Artificial Sequence: Synthetic oligonucleotide
  Target: LAMA2; (+) strand; PAM type: YTN; PAM sequence: CTT
cctaaaaacacatacaggtt

SEQ ID NO: 324455 - DNA, 20 bp, Artificial Sequence
  Description of Artificial Sequence: Synthetic oligonucleotide
  Target: LAMA2; (+) strand; PAM type: YTN; PAM sequence: TTC
ctaaaaacacatacaggttt

SEQ ID NO: 324456 - DNA, 20 bp, Artificial Sequence
  Description of Artificial Sequence: Synthetic oligonucleotide
  Target: LAMA2; (+) strand; PAM type: YTN; PAM sequence: CTA
aaaacacatacaggtttagg

SEQ ID NO: 324457 - DNA, 20 bp, Artificial Sequence
  Description of Artificial Sequence: Synthetic oligonucleotide
  Target: LAMA2; (+) strand; PAM type: YTN; PAM sequence: TTT
aggctgatcaagatatcaat

SEQ ID NO: 324458 - DNA, 20 bp, Artificial Sequence
  Description of Artificial Sequence: Synthetic oligonucleotide
  Target: LAMA2; (+) strand; PAM type: YTN; PAM sequence: TTA
ggctgatcaagatatcaatg

SEQ ID NO: 324459 - DNA, 20 bp, Artificial Sequence
  Description of Artificial Sequence: Synthetic oligonucleotide
  Target: LAMA2; (+) strand; PAM type: YTN; PAM sequence: CTG
atcaagatatcaatgtctgc

SEQ ID NO: 324460 - DNA, 20 bp, Artificial Sequence
  Description of Artificial Sequence: Synthetic oligonucleotide
  Target: LAMA2; (+) strand; PAM type: YTN; PAM sequence: CTG
ctctgagatcatcaaagtaa

SEQ ID NO: 324461 - DNA, 20 bp, Artificial Sequence
  Description of Artificial Sequence: Synthetic oligonucleotide
  Target: LAMA2; (+) strand; PAM type: YTN; PAM sequence: CTC
tgagatcatcaaagtaatgc

SEQ ID NO: 324462 - DNA, 20 bp, Artificial Sequence
  Description of Artificial Sequence: Synthetic oligonucleotide
  Target: LAMA2; (+) strand; PAM type: YTN; PAM sequence: CTG
agatcatcaaagtaatgcgt

SEQ ID NO: 324463 - DNA, 20 bp, Artificial Sequence
  Description of Artificial Sequence: Synthetic oligonucleotide
  Target: LAMA2; (+) strand; PAM type: YTN; PAM sequence: TTC
taagaagcactagtggcata

SEQ ID NO: 324464 - DNA, 20 bp, Artificial Sequence
  Description of Artificial Sequence: Synthetic oligonucleotide
  Target: LAMA2; (+) strand; PAM type: YTN; PAM sequence: CTA
agaagcactagtggcatata

SEQ ID NO: 324465 - DNA, 20 bp, Artificial Sequence
  Description of Artificial Sequence: Synthetic oligonucleotide
  Target: LAMA2; (+) strand; PAM type: YTN; PAM sequence: CTA
gtggcatatatgatcacggt

SEQ ID NO: 324466 - DNA, 20 bp, Artificial Sequence
  Description of Artificial Sequence: Synthetic oligonucleotide
  Target: LAMA2; (+) strand; PAM type: YTN; PAM sequence: CTC
acttagaaccccataagaca

SEQ ID NO: 324467 - DNA, 20 bp, Artificial Sequence
  Description of Artificial Sequence: Synthetic oligonucleotide
  Target: LAMA2; (+) strand; PAM type: YTN; PAM sequence: CTT
agaaccccataagacaggaa

SEQ ID NO: 324468 - DNA, 20 bp, Artificial Sequence
  Description of Artificial Sequence: Synthetic oligonucleotide
  Target: LAMA2; (+) strand; PAM type: YTN; PAM sequence: TTA
gaaccccataagacaggaaa

SEQ ID NO: 324469 - DNA, 20 bp, Artificial Sequence
  Description of Artificial Sequence: Synthetic oligonucleotide
  Target: LAMA2; (+) strand; PAM type: YTN; PAM sequence: CTC
tcctctccagtttatctgtg

SEQ ID NO: 324470 - DNA, 20 bp, Artificial Sequence
  Description of Artificial Sequence: Synthetic oligonucleotide
  Target: LAMA2; (+) strand; PAM type: YTN; PAM sequence: CTC
ctctccagtttatctgtgtt

SEQ ID NO: 324471 - DNA, 20 bp, Artificial Sequence
  Description of Artificial Sequence: Synthetic oligonucleotide
  Target: LAMA2; (+) strand; PAM type: YTN; PAM sequence: CTC
tccagtttatctgtgttatg

SEQ ID NO: 324472 - DNA, 20 bp, Artificial Sequence
  Description of Artificial Sequence: Synthetic oligonucleotide
  Target: LAMA2; (+) strand; PAM type: YTN; PAM sequence: CTC
cagtttatctgtgttatgga

SEQ ID NO: 324473 - DNA, 20 bp, Artificial Sequence
  Description of Artificial Sequence: Synthetic oligonucleotide
  Target: LAMA2; (+) strand; PAM type: YTN; PAM sequence: TTT
atctgtgttatggattgtaa

SEQ ID NO: 324474 - DNA, 20 bp, Artificial Sequence
  Description of Artificial Sequence: Synthetic oligonucleotide
  Target: LAMA2; (+) strand; PAM type: YTN; PAM sequence: TTA
tctgtgttatggattgtaag

SEQ ID NO: 324475 - DNA, 20 bp, Artificial Sequence
  Description of Artificial Sequence: Synthetic oligonucleotide
  Target: LAMA2; (+) strand; PAM type: YTN; PAM sequence: CTG
tgttatggattgtaagagtg

SEQ ID NO: 324476 - DNA, 20 bp, Artificial Sequence
  Description of Artificial Sequence: Synthetic oligonucleotide
  Target: LAMA2; (+) strand; PAM type: YTN; PAM sequence: TTA
tggattgtaagagtgttttg

SEQ ID NO: 324477 - DNA, 20 bp, Artificial Sequence
  Description of Artificial Sequence: Synthetic oligonucleotide
  Target: LAMA2; (+) strand; PAM type: YTN; PAM sequence: TTG
taagagtgttttgaaataat

SEQ ID NO: 324478 - DNA, 20 bp, Artificial Sequence
  Description of Artificial Sequence: Synthetic oligonucleotide
  Target: LAMA2; (+) strand; PAM type: YTN; PAM sequence: TTT
tgaaataatattttacttag

SEQ ID NO: 324479 - DNA, 20 bp, Artificial Sequence
  Description of Artificial Sequence: Synthetic oligonucleotide
  Target: LAMA2; (+) strand; PAM type: YTN; PAM sequence: TTT
gaaataatattttacttagt

SEQ ID NO: 324480 - DNA, 20 bp, Artificial Sequence
  Description of Artificial Sequence: Synthetic oligonucleotide
  Target: LAMA2; (+) strand; PAM type: YTN; PAM sequence: TTG
aaataatattttacttagta

SEQ ID NO: 324481 - DNA, 20 bp, Artificial Sequence
  Description of Artificial Sequence: Synthetic oligonucleotide
  Target: LAMA2; (+) strand; PAM type: YTN; PAM sequence: TTT
tacttagtaaagtaatatcc

SEQ ID NO: 324482 - DNA, 20 bp, Artificial Sequence
  Description of Artificial Sequence: Synthetic oligonucleotide
  Target: LAMA2; (+) strand; PAM type: YTN; PAM sequence: TTT
acttagtaaagtaatatcca

SEQ ID NO: 324483 - DNA, 20 bp, Artificial Sequence
  Description of Artificial Sequence: Synthetic oligonucleotide
  Target: LAMA2; (+) strand; PAM type: YTN; PAM sequence: TTA
cttagtaaagtaatatccac

SEQ ID NO: 324484 - DNA, 20 bp, Artificial Sequence
  Description of Artificial Sequence: Synthetic oligonucleotide
  Target: LAMA2; (+) strand; PAM type: YTN; PAM sequence: CTT
agtaaagtaatatccacaag

SEQ ID NO: 324485 - DNA, 20 bp, Artificial Sequence
  Description of Artificial Sequence: Synthetic oligonucleotide
  Target: LAMA2; (+) strand; PAM type: YTN; PAM sequence: TTA
gtaaagtaatatccacaagc

SEQ ID NO: 324486 - DNA, 20 bp, Artificial Sequence
  Description of Artificial Sequence: Synthetic oligonucleotide
  Target: LAMA2; (+) strand; PAM type: YTN; PAM sequence: TTT
caccatgaaaaacattaaac

SEQ ID NO: 324487 - DNA, 20 bp, Artificial Sequence
  Description of Artificial Sequence: Synthetic oligonucleotide
  Target: LAMA2; (+) strand; PAM type: YTN; PAM sequence: TTC
accatgaaaaacattaaaca

SEQ ID NO: 324488 - DNA, 20 bp, Artificial Sequence
  Description of Artificial Sequence: Synthetic oligonucleotide
  Target: LAMA2; (+) strand; PAM type: YTN; PAM sequence: TTA
aacattttaagtatataata

SEQ ID NO: 324489 - DNA, 20 bp, Artificial Sequence
  Description of Artificial Sequence: Synthetic oligonucleotide
  Target: LAMA2; (+) strand; PAM type: YTN; PAM sequence: TTT
taagtatataatatgaaata

SEQ ID NO: 324490 - DNA, 20 bp, Artificial Sequence
  Description of Artificial Sequence: Synthetic oligonucleotide
  Target: LAMA2; (+) strand; PAM type: YTN; PAM sequence: TTT
aagtatataatatgaaatat

SEQ ID NO: 324491 - DNA, 20 bp, Artificial Sequence
  Description of Artificial Sequence: Synthetic oligonucleotide
  Target: LAMA2; (+) strand; PAM type: YTN; PAM sequence: TTA
agtatataatatgaaatata

SEQ ID NO: 324492 - DNA, 20 bp, Artificial Sequence
  Description of Artificial Sequence: Synthetic oligonucleotide
  Target: LAMA2; (+) strand; PAM type: YTN; PAM sequence: CTC
tgatgattatttttattgac

SEQ ID NO: 324493 - DNA, 20 bp, Artificial Sequence
  Description of Artificial Sequence: Synthetic oligonucleotide
  Target: LAMA2; (+) strand; PAM type: YTN; PAM sequence: CTG
atgattatttttattgacca

SEQ ID NO: 324494 - DNA, 20 bp, Artificial Sequence
  Description of Artificial Sequence: Synthetic oligonucleotide
  Target: LAMA2; (+) strand; PAM type: YTN; PAM sequence: TTA
tttttattgaccatattctt

SEQ ID NO: 324495 - DNA, 20 bp, Artificial Sequence
  Description of Artificial Sequence: Synthetic oligonucleotide
  Target: LAMA2; (+) strand; PAM type: YTN; PAM sequence: TTT
ttattgaccatattcttgcc

SEQ ID NO: 324496 - DNA, 20 bp, Artificial Sequence
  Description of Artificial Sequence: Synthetic oligonucleotide
  Target: LAMA2; (+) strand; PAM type: YTN; PAM sequence: TTT
tattgaccatattcttgcca

SEQ ID NO: 324497 - DNA, 20 bp, Artificial Sequence
  Description of Artificial Sequence: Synthetic oligonucleotide
  Target: LAMA2; (+) strand; PAM type: YTN; PAM sequence: TTT
attgaccatattcttgccaa

SEQ ID NO: 324498 - DNA, 20 bp, Artificial Sequence
  Description of Artificial Sequence: Synthetic oligonucleotide
  Target: LAMA2; (+) strand; PAM type: YTN; PAM sequence: TTA
ttgaccatattcttgccaac

SEQ ID NO: 324499 - DNA, 20 bp, Artificial Sequence
  Description of Artificial Sequence: Synthetic oligonucleotide
  Target: LAMA2; (+) strand; PAM type: YTN; PAM sequence: TTG
accatattcttgccaactct

SEQ ID NO: 324500 - DNA, 20 bp, Artificial Sequence
  Description of Artificial Sequence: Synthetic oligonucleotide
  Target: LAMA2; (+) strand; PAM type: YTN; PAM sequence: TTC
ttgccaactctaaggtactc

SEQ ID NO: 324501 - DNA, 20 bp, Artificial Sequence
  Description of Artificial Sequence: Synthetic oligonucleotide
  Target: LAMA2; (+) strand; PAM type: YTN; PAM sequence: CTT
gccaactctaaggtactcta

SEQ ID NO: 324502 - DNA, 20 bp, Artificial Sequence
  Description of Artificial Sequence: Synthetic oligonucleotide
  Target: LAMA2; (+) strand; PAM type: YTN; PAM sequence: TTG
ccaactctaaggtactctaa

SEQ ID NO: 324503 - DNA, 20 bp, Artificial Sequence
  Description of Artificial Sequence: Synthetic oligonucleotide
  Target: LAMA2; (+) strand; PAM type: YTN; PAM sequence: CTC
taaggtactctaacactaga

SEQ ID NO: 324504 - DNA, 20 bp, Artificial Sequence
  Description of Artificial Sequence: Synthetic oligonucleotide
  Target: LAMA2; (+) strand; PAM type: YTN; PAM sequence: CTA
aggtactctaacactagaat

SEQ ID NO: 324505 - DNA, 20 bp, Artificial Sequence
  Description of Artificial Sequence: Synthetic oligonucleotide
  Target: LAMA2; (+) strand; PAM type: YTN; PAM sequence: CTC
taacactagaattttaaact

SEQ ID NO: 324506 - DNA, 20 bp, Artificial Sequence
  Description of Artificial Sequence: Synthetic oligonucleotide
  Target: LAMA2; (+) strand; PAM type: YTN; PAM sequence: CTA
acactagaattttaaacttg

SEQ ID NO: 324507 - DNA, 20 bp, Artificial Sequence
  Description of Artificial Sequence: Synthetic oligonucleotide
  Target: LAMA2; (+) strand; PAM type: YTN; PAM sequence: CTA
gaattttaaacttgttatat

SEQ ID NO: 324508 - DNA, 20 bp, Artificial Sequence
  Description of Artificial Sequence: Synthetic oligonucleotide
  Target: LAMA2; (+) strand; PAM type: YTN; PAM sequence: TTT
taaacttgttatatttgtta

SEQ ID NO: 324509 - DNA, 20 bp, Artificial Sequence
  Description of Artificial Sequence: Synthetic oligonucleotide
  Target: LAMA2; (+) strand; PAM type: YTN; PAM sequence: TTT
aaacttgttatatttgttac

SEQ ID NO: 324510 - DNA, 20 bp, Artificial Sequence
  Description of Artificial Sequence: Synthetic oligonucleotide
  Target: LAMA2; (+) strand; PAM type: YTN; PAM sequence: TTA
aacttgttatatttgttact

SEQ ID NO: 324511 - DNA, 20 bp, Artificial Sequence
  Description of Artificial Sequence: Synthetic oligonucleotide
  Target: LAMA2; (+) strand; PAM type: YTN; PAM sequence: CTT
gttatatttgttactttggt

SEQ ID NO: 324512 - DNA, 20 bp, Artificial Sequence
  Description of Artificial Sequence: Synthetic oligonucleotide
  Target: LAMA2; (+) strand; PAM type: YTN; PAM sequence: TTG
ttatatttgttactttggta

SEQ ID NO: 324513 - DNA, 20 bp, Artificial Sequence
  Description of Artificial Sequence: Synthetic oligonucleotide
  Target: LAMA2; (+) strand; PAM type: YTN; PAM sequence: TTA
tatttgttactttggtacga

SEQ ID NO: 324514 - DNA, 20 bp, Artificial Sequence
  Description of Artificial Sequence: Synthetic oligonucleotide
  Target: LAMA2; (+) strand; PAM type: YTN; PAM sequence: TTT
gttactttggtacgaatgtc

SEQ ID NO: 324515 - DNA, 20 bp, Artificial Sequence
  Description of Artificial Sequence: Synthetic oligonucleotide
  Target: LAMA2; (+) strand; PAM type: YTN; PAM sequence: TTG
ttactttggtacgaatgtca

SEQ ID NO: 324516 - DNA, 20 bp, Artificial Sequence
  Description of Artificial Sequence: Synthetic oligonucleotide
  Target: LAMA2; (+) strand; PAM type: YTN; PAM sequence: TTA
ctttggtacgaatgtcaaag

SEQ ID NO: 324517 - DNA, 20 bp, Artificial Sequence
  Description of Artificial Sequence: Synthetic oligonucleotide
  Target: LAMA2; (+) strand; PAM type: YTN; PAM sequence: CTT
tggtacgaatgtcaaagaaa

SEQ ID NO: 324518 - DNA, 20 bp, Artificial Sequence
  Description of Artificial Sequence: Synthetic oligonucleotide
  Target: LAMA2; (+) strand; PAM type: YTN; PAM sequence: TTT
ggtacgaatgtcaaagaaag

SEQ ID NO: 324519 - DNA, 20 bp, Artificial Sequence
  Description of Artificial Sequence: Synthetic oligonucleotide
  Target: LAMA2; (+) strand; PAM type: YTN; PAM sequence: TTG
gtacgaatgtcaaagaaagg

SEQ ID NO: 324520 - DNA, 20 bp, Artificial Sequence
  Description of Artificial Sequence: Synthetic oligonucleotide
  Target: LAMA2; (+) strand; PAM type: YTN; PAM sequence: TTA
cctgtaagtattagagcatt

SEQ ID NO: 324521 - DNA, 20 bp, Artificial Sequence
  Description of Artificial Sequence: Synthetic oligonucleotide
  Target: LAMA2; (+) strand; PAM type: YTN; PAM sequence: CTG
taagtattagagcattcctc

SEQ ID NO: 324522 - DNA, 20 bp, Artificial Sequence
  Description of Artificial Sequence: Synthetic oligonucleotide
  Target: LAMA2; (+) strand; PAM type: YTN; PAM sequence: TTA
gagcattcctcattgttcct

SEQ ID NO: 324523 - DNA, 20 bp, Artificial Sequence
  Description of Artificial Sequence: Synthetic oligonucleotide
  Target: LAMA2; (+) strand; PAM type: YTN; PAM sequence: TTC
ctcattgttcctaaacaaag

SEQ ID NO: 324524 - DNA, 20 bp, Artificial Sequence
  Description of Artificial Sequence: Synthetic oligonucleotide
  Target: LAMA2; (+) strand; PAM type: YTN; PAM sequence: CTC
attgttcctaaacaaagaat

SEQ ID NO: 324525 - DNA, 20 bp, Artificial Sequence
  Description of Artificial Sequence: Synthetic oligonucleotide
  Target: LAMA2; (+) strand; PAM type: YTN; PAM sequence: TTG
ttcctaaacaaagaatttct

SEQ ID NO: 324526 - DNA, 20 bp, Artificial Sequence
  Description of Artificial Sequence: Synthetic oligonucleotide
  Target: LAMA2; (+) strand; PAM type: YTN; PAM sequence: TTC
ctaaacaaagaatttctttt

SEQ ID NO: 324527 - DNA, 20 bp, Artificial Sequence
  Description of Artificial Sequence: Synthetic oligonucleotide
  Target: LAMA2; (+) strand; PAM type: YTN; PAM sequence: CTA
aacaaagaatttctttttat

SEQ ID NO: 324528 - DNA, 20 bp, Artificial Sequence
  Description of Artificial Sequence: Synthetic oligonucleotide
  Target: LAMA2; (+) strand; PAM type: YTN; PAM sequence: TTT
ctttttatgtagtctgcact

SEQ ID NO: 324529 - DNA, 20 bp, Artificial Sequence
  Description of Artificial Sequence: Synthetic oligonucleotide
  Target: LAMA2; (+) strand; PAM type: YTN; PAM sequence: TTC
tttttatgtagtctgcacta

SEQ ID NO: 324530 - DNA, 20 bp, Artificial Sequence
  Description of Artificial Sequence: Synthetic oligonucleotide
  Target: LAMA2; (+) strand; PAM type: YTN; PAM sequence: CTT
tttatgtagtctgcactagg

SEQ ID NO: 324531 - DNA, 20 bp, Artificial Sequence
  Description of Artificial Sequence: Synthetic oligonucleotide
  Target: LAMA2; (+) strand; PAM type: YTN; PAM sequence: TTT
ttatgtagtctgcactagga

SEQ ID NO: 324532 - DNA, 20 bp, Artificial Sequence
  Description of Artificial Sequence: Synthetic oligonucleotide
  Target: LAMA2; (+) strand; PAM type: YTN; PAM sequence: TTT
tatgtagtctgcactaggaa

SEQ ID NO: 324533 - DNA, 20 bp, Artificial Sequence
  Description of Artificial Sequence: Synthetic oligonucleotide
  Target: LAMA2; (+) strand; PAM type: YTN; PAM sequence: TTT
atgtagtctgcactaggaat

SEQ ID NO: 324534 - DNA, 20 bp, Artificial Sequence
  Description of Artificial Sequence: Synthetic oligonucleotide
  Target: LAMA2; (+) strand; PAM type: YTN; PAM sequence: TTA
tgtagtctgcactaggaatt

SEQ ID NO: 324535 - DNA, 20 bp, Artificial Sequence
  Description of Artificial Sequence: Synthetic oligonucleotide
  Target: LAMA2; (+) strand; PAM type: YTN; PAM sequence: CTG
cactaggaattggaaatgat

SEQ ID NO: 324536 - DNA, 20 bp, Artificial Sequence
  Description of Artificial Sequence: Synthetic oligonucleotide
  Target: LAMA2; (+) strand; PAM type: YTN; PAM sequence: CTA
ggaattggaaatgatgcaca

SEQ ID NO: 324537 - DNA, 20 bp, Artificial Sequence
  Description of Artificial Sequence: Synthetic oligonucleotide
  Target: LAMA2; (+) strand; PAM type: YTN; PAM sequence: TTG
gaaatgatgcacataaaata

SEQ ID NO: 324538 - DNA, 20 bp, Artificial Sequence
  Description of Artificial Sequence: Synthetic oligonucleotide
  Target: LAMA2; (+) strand; PAM type: YTN; PAM sequence: CTT
tttaatctgtgagattgttt

SEQ ID NO: 324539 - DNA, 20 bp, Artificial Sequence
  Description of Artificial Sequence: Synthetic oligonucleotide
  Target: LAMA2; (+) strand; PAM type: YTN; PAM sequence: TTT
ttaatctgtgagattgttta

SEQ ID NO: 324540 - DNA, 20 bp, Artificial Sequence
  Description of Artificial Sequence: Synthetic oligonucleotide
  Target: LAMA2; (+) strand; PAM type: YTN; PAM sequence: TTT
taatctgtgagattgtttat

SEQ ID NO: 324541 - DNA, 20 bp, Artificial Sequence
  Description of Artificial Sequence: Synthetic oligonucleotide
  Target: LAMA2; (+) strand; PAM type: YTN; PAM sequence: TTT
aatctgtgagattgtttatg

SEQ ID NO: 324542 - DNA, 20 bp, Artificial Sequence
  Description of Artificial Sequence: Synthetic oligonucleotide
  Target: LAMA2; (+) strand; PAM type: YTN; PAM sequence: TTA
atctgtgagattgtttatgc

SEQ ID NO: 324543 - DNA, 20 bp, Artificial Sequence
  Description of Artificial Sequence: Synthetic oligonucleotide
  Target: LAMA2; (+) strand; PAM type: YTN; PAM sequence: CTG
tgagattgtttatgcatctt

SEQ ID NO: 324544 - DNA, 20 bp, Artificial Sequence
  Description of Artificial Sequence: Synthetic oligonucleotide
  Target: LAMA2; (+) strand; PAM type: YTN; PAM sequence: TTG
tttatgcatcttaggtttgc

SEQ ID NO: 324545 - DNA, 20 bp, Artificial Sequence
  Description of Artificial Sequence: Synthetic oligonucleotide
  Target: LAMA2; (+) strand; PAM type: YTN; PAM sequence: TTT
atgcatcttaggtttgctta

SEQ ID NO: 324546 - DNA, 20 bp, Artificial Sequence
  Description of Artificial Sequence: Synthetic oligonucleotide
  Target: LAMA2; (+) strand; PAM type: YTN; PAM sequence: TTA
tgcatcttaggtttgcttag

SEQ ID NO: 324547 - DNA, 20 bp, Artificial Sequence
  Description of Artificial Sequence: Synthetic oligonucleotide
  Target: LAMA2; (+) strand; PAM type: YTN; PAM sequence: CTT
aggtttgcttagttttgcaa

SEQ ID NO: 324548 - DNA, 20 bp, Artificial Sequence
  Description of Artificial Sequence: Synthetic oligonucleotide
  Target: LAMA2; (+) strand; PAM type: YTN; PAM sequence: TTA
ggtttgcttagttttgcaaa

SEQ ID NO: 324549 - DNA, 20 bp, Artificial Sequence
  Description of Artificial Sequence: Synthetic oligonucleotide
  Target: LAMA2; (+) strand; PAM type: YTN; PAM sequence: TTT
gcttagttttgcaaatgcgt

SEQ ID NO: 324550 - DNA, 20 bp, Artificial Sequence
  Description of Artificial Sequence: Synthetic oligonucleotide
  Target: LAMA2; (+) strand; PAM type: YTN; PAM sequence: TTG
cttagttttgcaaatgcgtg

SEQ ID NO: 324551 - DNA, 20 bp, Artificial Sequence
  Description of Artificial Sequence: Synthetic oligonucleotide
  Target: LAMA2; (+) strand; PAM type: YTN; PAM sequence: CTT
agttttgcaaatgcgtgcat

SEQ ID NO: 324552 - DNA, 20 bp, Artificial Sequence
  Description of Artificial Sequence: Synthetic oligonucleotide
  Target: LAMA2; (+) strand; PAM type: YTN; PAM sequence: TTA
gttttgcaaatgcgtgcatt

SEQ ID NO: 324553 - DNA, 20 bp, Artificial Sequence
  Description of Artificial Sequence: Synthetic oligonucleotide
  Target: LAMA2; (+) strand; PAM type: YTN; PAM sequence: TTT
tgcaaatgcgtgcatttaaa

SEQ ID NO: 324554 - DNA, 20 bp, Artificial Sequence
  Description of Artificial Sequence: Synthetic oligonucleotide
  Target: LAMA2; (+) strand; PAM type: YTN; PAM sequence: TTT
gcaaatgcgtgcatttaaaa

SEQ ID NO: 324555 - DNA, 20 bp, Artificial Sequence
  Description of Artificial Sequence: Synthetic oligonucleotide
  Target: LAMA2; (+) strand; PAM type: YTN; PAM sequence: TTG
caaatgcgtgcatttaaaat

SEQ ID NO: 324556 - DNA, 20 bp, Artificial Sequence
  Description of Artificial Sequence: Synthetic oligonucleotide
  Target: LAMA2; (+) strand; PAM type: YTN; PAM sequence: TTT
aaaatcaccatttgtatttt

SEQ ID NO: 324557 - DNA, 20 bp, Artificial Sequence
  Description of Artificial Sequence: Synthetic oligonucleotide
  Target: LAMA2; (+) strand; PAM type: YTN; PAM sequence: TTA
aaatcaccatttgtattttg

SEQ ID NO: 324558 - DNA, 20 bp, Artificial Sequence
  Description of Artificial Sequence: Synthetic oligonucleotide
  Target: LAMA2; (+) strand; PAM type: YTN; PAM sequence: TTT
gtattttgaactcttctggc

SEQ ID NO: 324559 - DNA, 20 bp, Artificial Sequence
  Description of Artificial Sequence: Synthetic oligonucleotide
  Target: LAMA2; (+) strand; PAM type: YTN; PAM sequence: TTG
tattttgaactcttctggct

SEQ ID NO: 324560 - DNA, 20 bp, Artificial Sequence
  Description of Artificial Sequence: Synthetic oligonucleotide
  Target: LAMA2; (+) strand; PAM type: YTN; PAM sequence: TTT
tgaactcttctggcttttaa

SEQ ID NO: 324561 - DNA, 20 bp, Artificial Sequence
  Description of Artificial Sequence: Synthetic oligonucleotide
  Target: LAMA2; (+) strand; PAM type: YTN; PAM sequence: TTT
gaactcttctggcttttaac

SEQ ID NO: 324562 - DNA, 20 bp, Artificial Sequence
  Description of Artificial Sequence: Synthetic oligonucleotide
  Target: LAMA2; (+) strand; PAM type: YTN; PAM sequence: TTG
aactcttctggcttttaact

SEQ ID NO: 324563 - DNA, 20 bp, Artificial Sequence
  Description of Artificial Sequence: Synthetic oligonucleotide
  Target: LAMA2; (+) strand; PAM type: YTN; PAM sequence: CTC
ttctggcttttaactgtagt

SEQ ID NO: 324564 - DNA, 20 bp, Artificial Sequence
  Description of Artificial Sequence: Synthetic oligonucleotide
  Target: LAMA2; (+) strand; PAM type: YTN; PAM sequence: CTT
ctggcttttaactgtagtgg

SEQ ID NO: 324565 - DNA, 20 bp, Artificial Sequence
  Description of Artificial Sequence: Synthetic oligonucleotide
  Target: LAMA2; (+) strand; PAM type: YTN; PAM sequence: TTC
tggcttttaactgtagtgga

SEQ ID NO: 324566 - DNA, 20 bp, Artificial Sequence
  Description of Artificial Sequence: Synthetic oligonucleotide
  Target: LAMA2; (+) strand; PAM type: YTN; PAM sequence: CTG
gcttttaactgtagtggaaa

SEQ ID NO: 324567 - DNA, 20 bp, Artificial Sequence
  Description of Artificial Sequence: Synthetic oligonucleotide
  Target: LAMA2; (+) strand; PAM type: YTN; PAM sequence: CTT
ttaactgtagtggaaatttg

SEQ ID NO: 324568 - DNA, 20 bp, Artificial Sequence
  Description of Artificial Sequence: Synthetic oligonucleotide
  Target: LAMA2; (+) strand; PAM type: YTN; PAM sequence: TTT
taactgtagtggaaatttgg

SEQ ID NO: 324569 - DNA, 20 bp, Artificial Sequence
  Description of Artificial Sequence: Synthetic oligonucleotide
  Target: LAMA2; (+) strand; PAM type: YTN; PAM sequence: TTT
aactgtagtggaaatttgga

SEQ ID NO: 324570 - DNA, 20 bp, Artificial Sequence
  Description of Artificial Sequence: Synthetic oligonucleotide
  Target: LAMA2; (+) strand; PAM type: YTN; PAM sequence: TTA
actgtagtggaaatttggat

SEQ ID NO: 324571 - DNA, 20 bp, Artificial Sequence
  Description of Artificial Sequence: Synthetic oligonucleotide
  Target: LAMA2; (+) strand; PAM type: YTN; PAM sequence: CTG
tagtggaaatttggattgaa

SEQ ID NO: 324572 - DNA, 20 bp, Artificial Sequence
  Description of Artificial Sequence: Synthetic oligonucleotide
  Target: LAMA2; (+) strand; PAM type: YTN; PAM sequence: TTT
ggattgaagacaatggaaac

SEQ ID NO: 324573 - DNA, 20 bp, Artificial Sequence
  Description of Artificial Sequence: Synthetic oligonucleotide
  Target: LAMA2; (+) strand; PAM type: YTN; PAM sequence: TTG
gattgaagacaatggaaacc

SEQ ID NO: 324574 - DNA, 20 bp, Artificial Sequence
  Description of Artificial Sequence: Synthetic oligonucleotide
  Target: LAMA2; (+) strand; PAM type: YTN; PAM sequence: TTG
aagacaatggaaaccgtgag

SEQ ID NO: 324575 - DNA, 20 bp, Artificial Sequence
  Description of Artificial Sequence: Synthetic oligonucleotide
  Target: LAMA2; (+) strand; PAM type: YTN; PAM sequence: CTT
gcatccaaccgagaaaaacc

SEQ ID NO: 324576 - DNA, 20 bp, Artificial Sequence
  Description of Artificial Sequence: Synthetic oligonucleotide
  Target: LAMA2; (+) strand; PAM type: YTN; PAM sequence: TTG
catccaaccgagaaaaacca

SEQ ID NO: 324577 - DNA, 20 bp, Artificial Sequence
  Description of Artificial Sequence: Synthetic oligonucleotide
  Target: LAMA2; (+) strand; PAM type: YTN; PAM sequence: CTA
ctcttatctgcacttcaatc

SEQ ID NO: 324578 - DNA, 20 bp, Artificial Sequence
  Description of Artificial Sequence: Synthetic oligonucleotide
  Target: LAMA2; (+) strand; PAM type: YTN; PAM sequence: CTC
ttatctgcacttcaatcagc

SEQ ID NO: 324579 - DNA, 20 bp, Artificial Sequence
  Description of Artificial Sequence: Synthetic oligonucleotide
  Target: LAMA2; (+) strand; PAM type: YTN; PAM sequence: CTT
atctgcacttcaatcagcag

SEQ ID NO: 324580 - DNA, 20 bp, Artificial Sequence
  Description of Artificial Sequence: Synthetic oligonucleotide
  Target: LAMA2; (+) strand; PAM type: YTN; PAM sequence: TTA
tctgcacttcaatcagcagg

SEQ ID NO: 324581 - DNA, 20 bp, Artificial Sequence
  Description of Artificial Sequence: Synthetic oligonucleotide
  Target: LAMA2; (+) strand; PAM type: YTN; PAM sequence: CTG
cacttcaatcagcaggaggt

SEQ ID NO: 324582 - DNA, 20 bp, Artificial Sequence
  Description of Artificial Sequence: Synthetic oligonucleotide
  Target: LAMA2; (+) strand; PAM type: YTN; PAM sequence: CTT
caatcagcaggaggttcttt

SEQ ID NO: 324583 - DNA, 20 bp, Artificial Sequence
  Description of Artificial Sequence: Synthetic oligonucleotide
  Target: LAMA2; (+) strand; PAM type: YTN; PAM sequence: TTC
aatcagcaggaggttctttt

SEQ ID NO: 324584 - DNA, 20 bp, Artificial Sequence
  Description of Artificial Sequence: Synthetic oligonucleotide
  Target: LAMA2; (+) strand; PAM type: YTN; PAM sequence: TTC
tttttcagtttgtttagaaa

SEQ ID NO: 324585 - DNA, 20 bp, Artificial Sequence
  Description of Artificial Sequence: Synthetic oligonucleotide
  Target: LAMA2; (+) strand; PAM type: YTN; PAM sequence: CTT
tttcagtttgtttagaaaaa

SEQ ID NO: 324586 - DNA, 20 bp, Artificial Sequence
  Description of Artificial Sequence: Synthetic oligonucleotide
  Target: LAMA2; (+) strand; PAM type: YTN; PAM sequence: TTT
ttcagtttgtttagaaaaag

SEQ ID NO: 324587 - DNA, 20 bp, Artificial Sequence
  Description of Artificial Sequence: Synthetic oligonucleotide
  Target: LAMA2; (+) strand; PAM type: YTN; PAM sequence: TTT
tcagtttgtttagaaaaagt

SEQ ID NO: 324588 - DNA, 20 bp, Artificial Sequence
  Description of Artificial Sequence: Synthetic oligonucleotide
  Target: LAMA2; (+) strand; PAM type: YTN; PAM sequence: TTT
cagtttgtttagaaaaagta

SEQ ID NO: 324589 - DNA, 20 bp, Artificial Sequence
  Description of Artificial Sequence: Synthetic oligonucleotide
  Target: LAMA2; (+) strand; PAM type: YTN; PAM sequence: TTC
agtttgtttagaaaaagtag

SEQ ID NO: 324590 - DNA, 20 bp, Artificial Sequence
  Description of Artificial Sequence: Synthetic oligonucleotide
  Target: LAMA2; (+) strand; PAM type: YTN; PAM sequence: TTT
gtttagaaaaagtagggcct

SEQ ID NO: 324591 - DNA, 20 bp, Artificial Sequence
  Description of Artificial Sequence: Synthetic oligonucleotide
  Target: LAMA2; (+) strand; PAM type: YTN; PAM sequence: TTG
tttagaaaaagtagggcctg

SEQ ID NO: 324592 - DNA, 20 bp, Artificial Sequence
  Description of Artificial Sequence: Synthetic oligonucleotide
  Target: LAMA2; (+) strand; PAM type: YTN; PAM sequence: TTT
agaaaaagtagggcctgtca

SEQ ID NO: 324593 - DNA, 20 bp, Artificial Sequence
  Description of Artificial Sequence: Synthetic oligonucleotide
  Target: LAMA2; (+) strand; PAM type: YTN; PAM sequence: TTA
gaaaaagtagggcctgtcat

SEQ ID NO: 324594 - DNA, 20 bp, Artificial Sequence
  Description of Artificial Sequence: Synthetic oligonucleotide
  Target: LAMA2; (+) strand; PAM type: YTN; PAM sequence: CTG
tcatctgcatggcatacaat

SEQ ID NO: 324595 - DNA, 20 bp, Artificial Sequence
  Description of Artificial Sequence: Synthetic oligonucleotide
  Target: LAMA2; (+) strand; PAM type: YTN; PAM sequence: CTG
catggcatacaatctttaca

SEQ ID NO: 324596 - DNA, 20 bp, Artificial Sequence
  Description of Artificial Sequence: Synthetic oligonucleotide
  Target: LAMA2; (+) strand; PAM type: YTN; PAM sequence: CTT
tacaaagaaattttcttttg

SEQ ID NO: 324597 - DNA, 20 bp, Artificial Sequence
  Description of Artificial Sequence: Synthetic oligonucleotide
  Target: LAMA2; (+) strand; PAM type: YTN; PAM sequence: TTT
acaaagaaattttcttttgc

SEQ ID NO: 324598 - DNA, 20 bp, Artificial Sequence
  Description of Artificial Sequence: Synthetic oligonucleotide
  Target: LAMA2; (+) strand; PAM type: YTN; PAM sequence: TTA
caaagaaattttcttttgcc

SEQ ID NO: 324599 - DNA, 20 bp, Artificial Sequence
  Description of Artificial Sequence: Synthetic oligonucleotide
  Target: LAMA2; (+) strand; PAM type: YTN; PAM sequence: TTT
tcttttgccctttgtgtttt

SEQ ID NO: 324600 - DNA, 20 bp, Artificial Sequence
  Description of Artificial Sequence: Synthetic oligonucleotide
  Target: LAMA2; (+) strand; PAM type: YTN; PAM sequence: TTT
cttttgccctttgtgtttta

SEQ ID NO: 324601 - DNA, 20 bp, Artificial Sequence
  Description of Artificial Sequence: Synthetic oligonucleotide
  Target: LAMA2; (+) strand; PAM type: YTN; PAM sequence: TTC
ttttgccctttgtgttttaa

SEQ ID NO: 324602 - DNA, 20 bp, Artificial Sequence
  Description of Artificial Sequence: Synthetic oligonucleotide
  Target: LAMA2; (+) strand; PAM type: YTN; PAM sequence: CTT
ttgccctttgtgttttaact

SEQ ID NO: 324603 - DNA, 20 bp, Artificial Sequence
  Description of Artificial Sequence: Synthetic oligonucleotide
  Target: LAMA2; (+) strand; PAM type: YTN; PAM sequence: TTT
tgccctttgtgttttaacta

SEQ ID NO: 324604 - DNA, 20 bp, Artificial Sequence
  Description of Artificial Sequence: Synthetic oligonucleotide
  Target: LAMA2; (+) strand; PAM type: YTN; PAM sequence: TTT
gccctttgtgttttaactac

SEQ ID NO: 324605 - DNA, 20 bp, Artificial Sequence
  Description of Artificial Sequence: Synthetic oligonucleotide
  Target: LAMA2; (+) strand; PAM type: YTN; PAM sequence: TTG
ccctttgtgttttaactact

SEQ ID NO: 324606 - DNA, 20 bp, Artificial Sequence
  Description of Artificial Sequence: Synthetic oligonucleotide
  Target: LAMA2; (+) strand; PAM type: YTN; PAM sequence: CTT
tgtgttttaactactgagtg

SEQ ID NO: 324607 - DNA, 20 bp, Artificial Sequence
  Description of Artificial Sequence: Synthetic oligonucleotide
  Target: LAMA2; (+) strand; PAM type: YTN; PAM sequence: TTT
gtgttttaactactgagtgc

SEQ ID NO: 324608 - DNA, 20 bp, Artificial Sequence
  Description of Artificial Sequence: Synthetic oligonucleotide
  Target: LAMA2; (+) strand; PAM type: YTN; PAM sequence: TTG
tgttttaactactgagtgct

SEQ ID NO: 324609 - DNA, 20 bp, Artificial Sequence
  Description of Artificial Sequence: Synthetic oligonucleotide
  Target: LAMA2; (+) strand; PAM type: YTN; PAM sequence: TTT
taactactgagtgctgcaga

SEQ ID NO: 324610 - DNA, 20 bp, Artificial Sequence
  Description of Artificial Sequence: Synthetic oligonucleotide
  Target: LAMA2; (+) strand; PAM type: YTN; PAM sequence: TTT
aactactgagtgctgcagaa

SEQ ID NO: 324611 - DNA, 20 bp, Artificial Sequence
  Description of Artificial Sequence: Synthetic oligonucleotide
  Target: LAMA2; (+) strand; PAM type: YTN; PAM sequence: TTA
actactgagtgctgcagaaa

SEQ ID NO: 324612 - DNA, 20 bp, Artificial Sequence
  Description of Artificial Sequence: Synthetic oligonucleotide
  Target: LAMA2; (+) strand; PAM type: YTN; PAM sequence: CTA
ctgagtgctgcagaaacttc

SEQ ID NO: 324613 - DNA, 20 bp, Artificial Sequence
  Description of Artificial Sequence: Synthetic oligonucleotide
  Target: LAMA2; (+) strand; PAM type: YTN; PAM sequence: CTG
agtgctgcagaaacttctgt

SEQ ID NO: 324614 - DNA, 20 bp, Artificial Sequence
  Description of Artificial Sequence: Synthetic oligonucleotide
  Target: LAMA2; (+) strand; PAM type: YTN; PAM sequence: CTG
cagaaacttctgtctaactg

SEQ ID NO: 324615 - DNA, 20 bp, Artificial Sequence
  Description of Artificial Sequence: Synthetic oligonucleotide
  Target: LAMA2; (+) strand; PAM type: YTN; PAM sequence: CTT
ctgtctaactgcaaaacagt

SEQ ID NO: 324616 - DNA, 20 bp, Artificial Sequence
  Description of Artificial Sequence: Synthetic oligonucleotide
  Target: LAMA2; (+) strand; PAM type: YTN; PAM sequence: TTC
tgtctaactgcaaaacagtt

SEQ ID NO: 324617 - DNA, 20 bp, Artificial Sequence
  Description of Artificial Sequence: Synthetic oligonucleotide
  Target: LAMA2; (+) strand; PAM type: YTN; PAM sequence: CTG
tctaactgcaaaacagttta

SEQ ID NO: 324618 - DNA, 20 bp, Artificial Sequence
  Description of Artificial Sequence: Synthetic oligonucleotide
  Target: LAMA2; (+) strand; PAM type: YTN; PAM sequence: CTA
actgcaaaacagtttaaggt

SEQ ID NO: 324619 - DNA, 20 bp, Artificial Sequence
  Description of Artificial Sequence: Synthetic oligonucleotide
  Target: LAMA2; (+) strand; PAM type: YTN; PAM sequence: CTG
caaaacagtttaaggtatca

SEQ ID NO: 324620 - DNA, 20 bp, Artificial Sequence
  Description of Artificial Sequence: Synthetic oligonucleotide
  Target: LAMA2; (+) strand; PAM type: YTN; PAM sequence: TTT
aaggtatcatctatgacaat

SEQ ID NO: 324621 - DNA, 20 bp, Artificial Sequence
  Description of Artificial Sequence: Synthetic oligonucleotide
  Target: LAMA2; (+) strand; PAM type: YTN; PAM sequence: TTA
aggtatcatctatgacaatg

SEQ ID NO: 324622 - DNA, 20 bp, Artificial Sequence
  Description of Artificial Sequence: Synthetic oligonucleotide
  Target: LAMA2; (+) strand; PAM type: YTN; PAM sequence: CTA
tgacaatgttaaaagtaaaa

SEQ ID NO: 324623 - DNA, 20 bp, Artificial Sequence
  Description of Artificial Sequence: Synthetic oligonucleotide
  Target: LAMA2; (+) strand; PAM type: YTN; PAM sequence: TTA
aaagtaaaacccaatcaaag

SEQ ID NO: 324624 - DNA, 20 bp, Artificial Sequence
  Description of Artificial Sequence: Synthetic oligonucleotide
  Target: LAMA2; (+) strand; PAM type: YTN; PAM sequence: TTT
atattatcatgcataataga

SEQ ID NO: 324625 - DNA, 20 bp, Artificial Sequence
  Description of Artificial Sequence: Synthetic oligonucleotide
  Target: LAMA2; (+) strand; PAM type: YTN; PAM sequence: TTA
tattatcatgcataatagac

SEQ ID NO: 324626 - DNA, 20 bp, Artificial Sequence
  Description of Artificial Sequence: Synthetic oligonucleotide
  Target: LAMA2; (+) strand; PAM type: YTN; PAM sequence: TTA
tcatgcataatagaccaagc

SEQ ID NO: 324627 - DNA, 20 bp, Artificial Sequence
  Description of Artificial Sequence: Synthetic oligonucleotide
  Target: LAMA2; (+) strand; PAM type: YTN; PAM sequence: TTA
tctgaataccaaacggggcc

SEQ ID NO: 324628 - DNA, 20 bp, Artificial Sequence
  Description of Artificial Sequence: Synthetic oligonucleotide
  Target: LAMA2; (+) strand; PAM type: YTN; PAM sequence: CTG
aataccaaacggggccaaat

SEQ ID NO: 324629 - DNA, 20 bp, Artificial Sequence
  Description of Artificial Sequence: Synthetic oligonucleotide
  Target: LAMA2; (+) strand; PAM type: YTN; PAM sequence: TTC
tctatgattcagatgagaca

SEQ ID NO: 324630 - DNA, 20 bp, Artificial Sequence
  Description of Artificial Sequence: Synthetic oligonucleotide
  Target: LAMA2; (+) strand; PAM type: YTN; PAM sequence: CTC
tatgattcagatgagacata

SEQ ID NO: 324631 - DNA, 20 bp, Artificial Sequence
  Description of Artificial Sequence: Synthetic oligonucleotide
  Target: LAMA2; (+) strand; PAM type: YTN; PAM sequence: CTA
tgattcagatgagacataaa

SEQ ID NO: 324632 - DNA, 20 bp, Artificial Sequence
  Description of Artificial Sequence: Synthetic oligonucleotide
  Target: LAMA2; (+) strand; PAM type: YTN; PAM sequence: TTC
agatgagacataaaagtgct

SEQ ID NO: 324633 - DNA, 20 bp, Artificial Sequence
  Description of Artificial Sequence: Synthetic oligonucleotide
  Target: LAMA2; (+) strand; PAM type: YTN; PAM sequence: CTT
taaaaacaagtatgtggtaa

SEQ ID NO: 324634 - DNA, 20 bp, Artificial Sequence
  Description of Artificial Sequence: Synthetic oligonucleotide
  Target: LAMA2; (+) strand; PAM type: YTN; PAM sequence: TTT
aaaaacaagtatgtggtaaa

SEQ ID NO: 324635 - DNA, 20 bp, Artificial Sequence
  Description of Artificial Sequence: Synthetic oligonucleotide
  Target: LAMA2; (+) strand; PAM type: YTN; PAM sequence: TTA
aaaacaagtatgtggtaaaa

SEQ ID NO: 324636 - DNA, 20 bp, Artificial Sequence
  Description of Artificial Sequence: Synthetic oligonucleotide
  Target: LAMA2; (+) strand; PAM type: YTN; PAM sequence: CTT
tggaaaacctttggcattat

SEQ ID NO: 324637 - DNA, 20 bp, Artificial Sequence
  Description of Artificial Sequence: Synthetic oligonucleotide
  Target: LAMA2; (+) strand; PAM type: YTN; PAM sequence: TTT
ggaaaacctttggcattatc

SEQ ID NO: 324638 - DNA, 20 bp, Artificial Sequence
  Description of Artificial Sequence: Synthetic oligonucleotide
  Target: LAMA2; (+) strand; PAM type: YTN; PAM sequence: TTG
gaaaacctttggcattatct

SEQ ID NO: 324639 - DNA, 20 bp, Artificial Sequence
  Description of Artificial Sequence: Synthetic oligonucleotide
  Target: LAMA2; (+) strand; PAM type: YTN; PAM sequence: CTT
tggcattatctaatgaaatt

SEQ ID NO: 324640 - DNA, 20 bp, Artificial Sequence
  Description of Artificial Sequence: Synthetic oligonucleotide
  Target: LAMA2; (+) strand; PAM type: YTN; PAM sequence: TTT
ggcattatctaatgaaatta

SEQ ID NO: 324641 - DNA, 20 bp, Artificial Sequence
  Description of Artificial Sequence: Synthetic oligonucleotide
  Target: LAMA2; (+) strand; PAM type: YTN; PAM sequence: TTG
gcattatctaatgaaattaa

SEQ ID NO: 324642 - DNA, 20 bp, Artificial Sequence
  Description of Artificial Sequence: Synthetic oligonucleotide
  Target: LAMA2; (+) strand; PAM type: YTN; PAM sequence: TTA
tctaatgaaattaatatgtg

SEQ ID NO: 324643 - DNA, 20 bp, Artificial Sequence
  Description of Artificial Sequence: Synthetic oligonucleotide
  Target: LAMA2; (+) strand; PAM type: YTN; PAM sequence: CTA
atgaaattaatatgtgccta

SEQ ID NO: 324644 - DNA, 20 bp, Artificial Sequence
  Description of Artificial Sequence: Synthetic oligonucleotide
  Target: LAMA2; (+) strand; PAM type: YTN; PAM sequence: TTA
atatgtgcctactctatgat

SEQ ID NO: 324645 - DNA, 20 bp, Artificial Sequence
  Description of Artificial Sequence: Synthetic oligonucleotide
  Target: LAMA2; (+) strand; PAM type: YTN; PAM sequence: CTA
ctctatgatgttgcaattca

SEQ ID NO: 324646 - DNA, 20 bp, Artificial Sequence
  Description of Artificial Sequence: Synthetic oligonucleotide
  Target: LAMA2; (+) strand; PAM type: YTN; PAM sequence: CTC
tatgatgttgcaattcaact

SEQ ID NO: 324647 - DNA, 20 bp, Artificial Sequence
  Description of Artificial Sequence: Synthetic oligonucleotide
  Target: LAMA2; (+) strand; PAM type: YTN; PAM sequence: CTA
tgatgttgcaattcaacttg

SEQ ID NO: 324648 - DNA, 20 bp, Artificial Sequence
  Description of Artificial Sequence: Synthetic oligonucleotide
  Target: LAMA2; (+) strand; PAM type: YTN; PAM sequence: TTG
caattcaacttgtaagcata

SEQ ID NO: 324649 - DNA, 20 bp, Artificial Sequence
  Description of Artificial Sequence: Synthetic oligonucleotide
  Target: LAMA2; (+) strand; PAM type: YTN; PAM sequence: TTC
aacttgtaagcatatactca

SEQ ID NO: 324650 - DNA, 20 bp, Artificial Sequence
  Description of Artificial Sequence: Synthetic oligonucleotide
  Target: LAMA2; (+) strand; PAM type: YTN; PAM sequence: CTT
gtaagcatatactcaagaga

SEQ ID NO: 324651 - DNA, 20 bp, Artificial Sequence
  Description of Artificial Sequence: Synthetic oligonucleotide
  Target: LAMA2; (+) strand; PAM type: YTN; PAM sequence: TTG
taagcatatactcaagagaa

SEQ ID NO: 324652 - DNA, 20 bp, Artificial Sequence
  Description of Artificial Sequence: Synthetic oligonucleotide
  Target: LAMA2; (+) strand; PAM type: YTN; PAM sequence: CTC
aagagaaataggtgcacatg

SEQ ID NO: 324653 - DNA, 20 bp, Artificial Sequence
  Description of Artificial Sequence: Synthetic oligonucleotide
  Target: LAMA2; (+) strand; PAM type: YTN; PAM sequence: TTC
aagaatgctcataacagcac

SEQ ID NO: 324654 - DNA, 20 bp, Artificial Sequence
  Description of Artificial Sequence: Synthetic oligonucleotide
  Target: LAMA2; (+) strand; PAM type: YTN; PAM sequence: CTC
ataacagcactattaataat

SEQ ID NO: 324655 - DNA, 20 bp, Artificial Sequence
  Description of Artificial Sequence: Synthetic oligonucleotide
  Target: LAMA2; (+) strand; PAM type: YTN; PAM sequence: CTA
ttaataatatctaaagctgg

SEQ ID NO: 324656 - DNA, 20 bp, Artificial Sequence
  Description of Artificial Sequence: Synthetic oligonucleotide
  Target: LAMA2; (+) strand; PAM type: YTN; PAM sequence: TTA
ataatatctaaagctggaaa

SEQ ID NO: 324657 - DNA, 20 bp, Artificial Sequence
  Description of Artificial Sequence: Synthetic oligonucleotide
  Target: LAMA2; (+) strand; PAM type: YTN; PAM sequence: CTA
aagctggaaataaccaaatg

SEQ ID NO: 324658 - DNA, 20 bp, Artificial Sequence
  Description of Artificial Sequence: Synthetic oligonucleotide
  Target: LAMA2; (+) strand; PAM type: YTN; PAM sequence: CTG
gaaataaccaaatgacatcg

SEQ ID NO: 324659 - DNA, 20 bp, Artificial Sequence
  Description of Artificial Sequence: Synthetic oligonucleotide
  Target: LAMA2; (+) strand; PAM type: YTN; PAM sequence: CTA
ttggcatgaataaatatttc

SEQ ID NO: 324660 - DNA, 20 bp, Artificial Sequence
  Description of Artificial Sequence: Synthetic oligonucleotide
  Target: LAMA2; (+) strand; PAM type: YTN; PAM sequence: TTG
gcatgaataaatatttcata

SEQ ID NO: 324661 - DNA, 20 bp, Artificial Sequence
  Description of Artificial Sequence: Synthetic oligonucleotide
  Target: LAMA2; (+) strand; PAM type: YTN; PAM sequence: TTT
catagtatcataatattagg

SEQ ID NO: 324662 - DNA, 20 bp, Artificial Sequence
  Description of Artificial Sequence: Synthetic oligonucleotide
  Target: LAMA2; (+) strand; PAM type: YTN; PAM sequence: TTC
atagtatcataatattagga

SEQ ID NO: 324663 - DNA, 20 bp, Artificial Sequence
  Description of Artificial Sequence: Synthetic oligonucleotide
  Target: LAMA2; (+) strand; PAM type: YTN; PAM sequence: TTA
ggaatactataaagcagtaa

SEQ ID NO: 324664 - DNA, 20 bp, Artificial Sequence
  Description of Artificial Sequence: Synthetic oligonucleotide
  Target: LAMA2; (+) strand; PAM type: YTN; PAM sequence: CTA
taaagcagtaaaaatgaaca

SEQ ID NO: 324665 - DNA, 20 bp, Artificial Sequence
  Description of Artificial Sequence: Synthetic oligonucleotide
  Target: LAMA2; (+) strand; PAM type: YTN; PAM sequence: CTG
ttatacccaacagcacgggt

SEQ ID NO: 324666 - DNA, 20 bp, Artificial Sequence
  Description of Artificial Sequence: Synthetic oligonucleotide
  Target: LAMA2; (+) strand; PAM type: YTN; PAM sequence: TTA
tacccaacagcacgggtgaa

SEQ ID NO: 324667 - DNA, 20 bp, Artificial Sequence
  Description of Artificial Sequence: Synthetic oligonucleotide
  Target: LAMA2; (+) strand; PAM type: YTN; PAM sequence: CTT
aaacataatcttaaggaaaa

SEQ ID NO: 324668 - DNA, 20 bp, Artificial Sequence
  Description of Artificial Sequence: Synthetic oligonucleotide
  Target: LAMA2; (+) strand; PAM type: YTN; PAM sequence: TTA
aacataatcttaaggaaaag

SEQ ID NO: 324669 - DNA, 20 bp, Artificial Sequence
  Description of Artificial Sequence: Synthetic oligonucleotide
  Target: LAMA2; (+) strand; PAM type: YTN; PAM sequence: CTT
aaggaaaagaaattagacat

SEQ ID NO: 324670 - DNA, 20 bp, Artificial Sequence
  Description of Artificial Sequence: Synthetic oligonucleotide
  Target: LAMA2; (+) strand; PAM type: YTN; PAM sequence: TTA
aggaaaagaaattagacata

SEQ ID NO: 324671 - DNA, 20 bp, Artificial Sequence
  Description of Artificial Sequence: Synthetic oligonucleotide
  Target: LAMA2; (+) strand; PAM type: YTN; PAM sequence: TTA
gacataaaagagtatacagt

SEQ ID NO: 324672 - DNA, 20 bp, Artificial Sequence
  Description of Artificial Sequence: Synthetic oligonucleotide
  Target: LAMA2; (+) strand; PAM type: YTN; PAM sequence: CTG
attccattcatataacattc

SEQ ID NO: 324673 - DNA, 20 bp, Artificial Sequence
  Description of Artificial Sequence: Synthetic oligonucleotide
  Target: LAMA2; (+) strand; PAM type: YTN; PAM sequence: TTC
cattcatataacattcaaaa

SEQ ID NO: 324674 - DNA, 20 bp, Artificial Sequence
  Description of Artificial Sequence: Synthetic oligonucleotide
  Target: LAMA2; (+) strand; PAM type: YTN; PAM sequence: TTC
atataacattcaaaaataga

SEQ ID NO: 324675 - DNA, 20 bp, Artificial Sequence
  Description of Artificial Sequence: Synthetic oligonucleotide
  Target: LAMA2; (+) strand; PAM type: YTN; PAM sequence: TTC
aaaaatagatgcaattcaac

SEQ ID NO: 324676 - DNA, 20 bp, Artificial Sequence
  Description of Artificial Sequence: Synthetic oligonucleotide
  Target: LAMA2; (+) strand; PAM type: YTN; PAM sequence: TTC
aactttcatgctagatagaa

SEQ ID NO: 324677 - DNA, 20 bp, Artificial Sequence
  Description of Artificial Sequence: Synthetic oligonucleotide
  Target: LAMA2; (+) strand; PAM type: YTN; PAM sequence: CTT
tcatgctagatagaagtcag

SEQ ID NO: 324678 - DNA, 20 bp, Artificial Sequence
  Description of Artificial Sequence: Synthetic oligonucleotide
  Target: LAMA2; (+) strand; PAM type: YTN; PAM sequence: TTT
catgctagatagaagtcagg

SEQ ID NO: 324679 - DNA, 20 bp, Artificial Sequence
  Description of Artificial Sequence: Synthetic oligonucleotide
  Target: LAMA2; (+) strand; PAM type: YTN; PAM sequence: TTC
atgctagatagaagtcagga

SEQ ID NO: 324680 - DNA, 20 bp, Artificial Sequence
  Description of Artificial Sequence: Synthetic oligonucleotide
  Target: LAMA2; (+) strand; PAM type: YTN; PAM sequence: CTA
gatagaagtcaggatactag

SEQ ID NO: 324681 - DNA, 20 bp, Artificial Sequence
  Description of Artificial Sequence: Synthetic oligonucleotide
  Target: LAMA2; (+) strand; PAM type: YTN; PAM sequence: CTA
gttatctttggaaagggtag

SEQ ID NO: 324682 - DNA, 20 bp, Artificial Sequence
  Description of Artificial Sequence: Synthetic oligonucleotide
  Target: LAMA2; (+) strand; PAM type: YTN; PAM sequence: TTA
tctttggaaagggtagagat

SEQ ID NO: 324683 - DNA, 20 bp, Artificial Sequence
  Description of Artificial Sequence: Synthetic oligonucleotide
  Target: LAMA2; (+) strand; PAM type: YTN; PAM sequence: CTT
tggaaagggtagagataggg

SEQ ID NO: 324684 - DNA, 20 bp, Artificial Sequence
  Description of Artificial Sequence: Synthetic oligonucleotide
  Target: LAMA2; (+) strand; PAM type: YTN; PAM sequence: TTT
ggaaagggtagagataggga

SEQ ID NO: 324685 - DNA, 20 bp, Artificial Sequence
  Description of Artificial Sequence: Synthetic oligonucleotide
  Target: LAMA2; (+) strand; PAM type: YTN; PAM sequence: TTG
gaaagggtagagatagggag

SEQ ID NO: 324686 - DNA, 20 bp, Artificial Sequence
  Description of Artificial Sequence: Synthetic oligonucleotide
  Target: LAMA2; (+) strand; PAM type: YTN; PAM sequence: TTC
ttagtatgggcaatattctc

SEQ ID NO: 324687 - DNA, 20 bp, Artificial Sequence
  Description of Artificial Sequence: Synthetic oligonucleotide
  Target: LAMA2; (+) strand; PAM type: YTN; PAM sequence: CTT
agtatgggcaatattctctt

SEQ ID NO: 324688 - DNA, 20 bp, Artificial Sequence
  Description of Artificial Sequence: Synthetic oligonucleotide
  Target: LAMA2; (+) strand; PAM type: YTN; PAM sequence: TTA
gtatgggcaatattctcttt

SEQ ID NO: 324689 - DNA, 20 bp, Artificial Sequence
  Description of Artificial Sequence: Synthetic oligonucleotide
  Target: LAMA2; (+) strand; PAM type: YTN; PAM sequence: TTC
tcttttgatctatatgatgg

SEQ ID NO: 324690 - DNA, 20 bp, Artificial Sequence
  Description of Artificial Sequence: Synthetic oligonucleotide
  Target: LAMA2; (+) strand; PAM type: YTN; PAM sequence: CTC
ttttgatctatatgatggtt

SEQ ID NO: 324691 - DNA, 20 bp, Artificial Sequence
  Description of Artificial Sequence: Synthetic oligonucleotide
  Target: LAMA2; (+) strand; PAM type: YTN; PAM sequence: CTT
ttgatctatatgatggttac

SEQ ID NO: 324692 - DNA, 20 bp, Artificial Sequence
  Description of Artificial Sequence: Synthetic oligonucleotide
  Target: LAMA2; (+) strand; PAM type: YTN; PAM sequence: TTT
tgatctatatgatggttaca

SEQ ID NO: 324693 - DNA, 20 bp, Artificial Sequence
  Description of Artificial Sequence: Synthetic oligonucleotide
  Target: LAMA2; (+) strand; PAM type: YTN; PAM sequence: TTT
gatctatatgatggttacat

SEQ ID NO: 324694 - DNA, 20 bp, Artificial Sequence
  Description of Artificial Sequence: Synthetic oligonucleotide
  Target: LAMA2; (+) strand; PAM type: YTN; PAM sequence: TTG
atctatatgatggttacata

SEQ ID NO: 324695 - DNA, 20 bp, Artificial Sequence
  Description of Artificial Sequence: Synthetic oligonucleotide
  Target: LAMA2; (+) strand; PAM type: YTN; PAM sequence: CTA
tatgatggttacataggttt

SEQ ID NO: 324696 - DNA, 20 bp, Artificial Sequence
  Description of Artificial Sequence: Synthetic oligonucleotide
  Target: LAMA2; (+) strand; PAM type: YTN; PAM sequence: TTA
cataggtttttatatgtagg

SEQ ID NO: 324697 - DNA, 20 bp, Artificial Sequence
  Description of Artificial Sequence: Synthetic oligonucleotide
  Target: LAMA2; (+) strand; PAM type: YTN; PAM sequence: TTT
ttatatgtaggttattaaaa

SEQ ID NO: 324698 - DNA, 20 bp, Artificial Sequence
  Description of Artificial Sequence: Synthetic oligonucleotide
  Target: LAMA2; (+) strand; PAM type: YTN; PAM sequence: TTT
tatatgtaggttattaaaat

SEQ ID NO: 324699 - DNA, 20 bp, Artificial Sequence
  Description of Artificial Sequence: Synthetic oligonucleotide
  Target: LAMA2; (+) strand; PAM type: YTN; PAM sequence: TTT
atatgtaggttattaaaata

SEQ ID NO: 324700 - DNA, 20 bp, Artificial Sequence
  Description of Artificial Sequence: Synthetic oligonucleotide
  Target: LAMA2; (+) strand; PAM type: YTN; PAM sequence: TTA
tatgtaggttattaaaataa

SEQ ID NO: 324701 - DNA, 20 bp, Artificial Sequence
  Description of Artificial Sequence: Synthetic oligonucleotide
  Target: LAMA2; (+) strand; PAM type: YTN; PAM sequence: TTA
ttaaaataatatactgataa

SEQ ID NO: 324702 - DNA, 20 bp, Artificial Sequence
  Description of Artificial Sequence: Synthetic oligonucleotide
  Target: LAMA2; (+) strand; PAM type: YTN; PAM sequence: TTA
aaataatatactgataatat

SEQ ID NO: 324703 - DNA, 20 bp, Artificial Sequence
  Description of Artificial Sequence: Synthetic oligonucleotide
  Target: LAMA2; (+) strand; PAM type: YTN; PAM sequence: CTG
ataatatgatcatacattga

SEQ ID NO: 324704 - DNA, 20 bp, Artificial Sequence
  Description of Artificial Sequence: Synthetic oligonucleotide
  Target: LAMA2; (+) strand; PAM type: YTN; PAM sequence: TTG
aggtttttatttattacaat

SEQ ID NO: 324705 - DNA, 20 bp, Artificial Sequence
  Description of Artificial Sequence: Synthetic oligonucleotide
  Target: LAMA2; (+) strand; PAM type: YTN; PAM sequence: TTT
ttatttattacaataagttg

SEQ ID NO: 324706 - DNA, 20 bp, Artificial Sequence
  Description of Artificial Sequence: Synthetic oligonucleotide
  Target: LAMA2; (+) strand; PAM type: YTN; PAM sequence: TTT
tatttattacaataagttga

SEQ ID NO: 324707 - DNA, 20 bp, Artificial Sequence
  Description of Artificial Sequence: Synthetic oligonucleotide
  Target: LAMA2; (+) strand; PAM type: YTN; PAM sequence: TTT
atttattacaataagttgag

SEQ ID NO: 324708 - DNA, 20 bp, Artificial Sequence
  Description of Artificial Sequence: Synthetic oligonucleotide
  Target: LAMA2; (+) strand; PAM type: YTN; PAM sequence: TTA
tttattacaataagttgaga

SEQ ID NO: 324709 - DNA, 20 bp, Artificial Sequence
  Description of Artificial Sequence: Synthetic oligonucleotide
  Target: LAMA2; (+) strand; PAM type: YTN; PAM sequence: TTT
attacaataagttgagatta

SEQ ID NO: 324710 - DNA, 20 bp, Artificial Sequence
  Description of Artificial Sequence: Synthetic oligonucleotide
  Target: LAMA2; (+) strand; PAM type: YTN; PAM sequence: TTA
ttacaataagttgagattat

SEQ ID NO: 324711 - DNA, 20 bp, Artificial Sequence
  Description of Artificial Sequence: Synthetic oligonucleotide
  Target: LAMA2; (+) strand; PAM type: YTN; PAM sequence: TTA
caataagttgagattattca

SEQ ID NO: 324712 - DNA, 20 bp, Artificial Sequence
  Description of Artificial Sequence: Synthetic oligonucleotide
  Target: LAMA2; (+) strand; PAM type: YTN; PAM sequence: TTG
agattattcaaaggtacatt

SEQ ID NO: 324713 - DNA, 20 bp, Artificial Sequence
  Description of Artificial Sequence: Synthetic oligonucleotide
  Target: LAMA2; (+) strand; PAM type: YTN; PAM sequence: TTA
ttcaaaggtacatttgttca

SEQ ID NO: 324714 - DNA, 20 bp, Artificial Sequence
  Description of Artificial Sequence: Synthetic oligonucleotide
  Target: LAMA2; (+) strand; PAM type: YTN; PAM sequence: TTC
aaaggtacatttgttcattt

SEQ ID NO: 324715 - DNA, 20 bp, Artificial Sequence
  Description of Artificial Sequence: Synthetic oligonucleotide
  Target: LAMA2; (+) strand; PAM type: YTN; PAM sequence: TTT
gttcatttttctatacatat

SEQ ID NO: 324716 - DNA, 20 bp, Artificial Sequence
  Description of Artificial Sequence: Synthetic oligonucleotide
  Target: LAMA2; (+) strand; PAM type: YTN; PAM sequence: TTG
ttcatttttctatacatata

SEQ ID NO: 324717 - DNA, 20 bp, Artificial Sequence
  Description of Artificial Sequence: Synthetic oligonucleotide
  Target: LAMA2; (+) strand; PAM type: YTN; PAM sequence: TTC
atttttctatacatatatac

SEQ ID NO: 324718 - DNA, 20 bp, Artificial Sequence
  Description of Artificial Sequence: Synthetic oligonucleotide
  Target: LAMA2; (+) strand; PAM type: YTN; PAM sequence: TTT
ttctatacatatatacatta

SEQ ID NO: 324719 - DNA, 20 bp, Artificial Sequence
  Description of Artificial Sequence: Synthetic oligonucleotide
  Target: LAMA2; (+) strand; PAM type: YTN; PAM sequence: TTT
tctatacatatatacattat

SEQ ID NO: 324720 - DNA, 20 bp, Artificial Sequence
  Description of Artificial Sequence: Synthetic oligonucleotide
  Target: LAMA2; (+) strand; PAM type: YTN; PAM sequence: TTT
ctatacatatatacattata

SEQ ID NO: 324721 - DNA, 20 bp, Artificial Sequence
  Description of Artificial Sequence: Synthetic oligonucleotide
  Target: LAMA2; (+) strand; PAM type: YTN; PAM sequence: TTC
tatacatatatacattatat

SEQ ID NO: 324722 - DNA, 20 bp, Artificial Sequence
  Description of Artificial Sequence: Synthetic oligonucleotide
  Target: LAMA2; (+) strand; PAM type: YTN; PAM sequence: CTA
tacatatatacattatatat

SEQ ID NO: 324723 - DNA, 20 bp, Artificial Sequence
  Description of Artificial Sequence: Synthetic oligonucleotide
  Target: LAMA2; (+) strand; PAM type: YTN; PAM sequence: TTA
tatattacatatacatatat

SEQ ID NO: 324724 - DNA, 20 bp, Artificial Sequence
  Description of Artificial Sequence: Synthetic oligonucleotide
  Target: LAMA2; (+) strand; PAM type: YTN; PAM sequence: TTA
catatacatatatataccaa

SEQ ID NO: 324725 - DNA, 20 bp, Artificial Sequence
  Description of Artificial Sequence: Synthetic oligonucleotide
  Target: LAMA2; (+) strand; PAM type: YTN; PAM sequence: TTT
ttaaaatgttctaagagaaa

SEQ ID NO: 324726 - DNA, 20 bp, Artificial Sequence
  Description of Artificial Sequence: Synthetic oligonucleotide
  Target: LAMA2; (+) strand; PAM type: YTN; PAM sequence: TTT
taaaatgttctaagagaaag

SEQ ID NO: 324727 - DNA, 20 bp, Artificial Sequence
  Description of Artificial Sequence: Synthetic oligonucleotide
  Target: LAMA2; (+) strand; PAM type: YTN; PAM sequence: TTT
aaaatgttctaagagaaaga

SEQ ID NO: 324728 - DNA, 20 bp, Artificial Sequence
  Description of Artificial Sequence: Synthetic oligonucleotide
  Target: LAMA2; (+) strand; PAM type: YTN; PAM sequence: TTA
aaatgttctaagagaaagaa

SEQ ID NO: 324729 - DNA, 20 bp, Artificial Sequence
  Description of Artificial Sequence: Synthetic oligonucleotide
  Target: LAMA2; (+) strand; PAM type: YTN; PAM sequence: TTC
taagagaaagaaaagctcaa

SEQ ID NO: 324730 - DNA, 20 bp, Artificial Sequence
  Description of Artificial Sequence: Synthetic oligonucleotide
  Target: LAMA2; (+) strand; PAM type: YTN; PAM sequence: CTA
agagaaagaaaagctcaata

SEQ ID NO: 324731 - DNA, 20 bp, Artificial Sequence
  Description of Artificial Sequence: Synthetic oligonucleotide
  Target: LAMA2; (+) strand; PAM type: YTN; PAM sequence: CTC
aataaataaaaacaccccat

SEQ ID NO: 324732 - DNA, 20 bp, Artificial Sequence
  Description of Artificial Sequence: Synthetic oligonucleotide
  Target: LAMA2; (+) strand; PAM type: YTN; PAM sequence: TTT
ccttgtcactagagatgaat

SEQ ID NO: 324733 - DNA, 20 bp, Artificial Sequence
  Description of Artificial Sequence: Synthetic oligonucleotide
  Target: LAMA2; (+) strand; PAM type: YTN; PAM sequence: TTC
cttgtcactagagatgaatt

SEQ ID NO: 324734 - DNA, 20 bp, Artificial Sequence
  Description of Artificial Sequence: Synthetic oligonucleotide
  Target: LAMA2; (+) strand; PAM type: YTN; PAM sequence: CTT
gtcactagagatgaattact

SEQ ID NO: 324735 - DNA, 20 bp, Artificial Sequence
  Description of Artificial Sequence: Synthetic oligonucleotide
  Target: LAMA2; (+) strand; PAM type: YTN; PAM sequence: TTG
tcactagagatgaattacta

SEQ ID NO: 324736 - DNA, 20 bp, Artificial Sequence
  Description of Artificial Sequence: Synthetic oligonucleotide
  Target: LAMA2; (+) strand; PAM type: YTN; PAM sequence: CTA
gagatgaattactattatgt

SEQ ID NO: 324737 - DNA, 20 bp, Artificial Sequence
  Description of Artificial Sequence: Synthetic oligonucleotide
  Target: LAMA2; (+) strand; PAM type: YTN; PAM sequence: TTA
ctattatgttcaaatcgtat

SEQ ID NO: 324738 - DNA, 20 bp, Artificial Sequence
  Description of Artificial Sequence: Synthetic oligonucleotide
  Target: LAMA2; (+) strand; PAM type: YTN; PAM sequence: CTA
ttatgttcaaatcgtatata

SEQ ID NO: 324739 - DNA, 20 bp, Artificial Sequence
  Description of Artificial Sequence: Synthetic oligonucleotide
  Target: LAMA2; (+) strand; PAM type: YTN; PAM sequence: TTA
tgttcaaatcgtatatacag

SEQ ID NO: 324740 - DNA, 20 bp, Artificial Sequence
  Description of Artificial Sequence: Synthetic oligonucleotide
  Target: LAMA2; (+) strand; PAM type: YTN; PAM sequence: TTC
aaatcgtatatacagcatat

SEQ ID NO: 324741 - DNA, 20 bp, Artificial Sequence
  Description of Artificial Sequence: Synthetic oligonucleotide
  Target: LAMA2; (+) strand; PAM type: YTN; PAM sequence: TTT
tttatatatgtatctaaaat

SEQ ID NO: 324742 - DNA, 20 bp, Artificial Sequence
  Description of Artificial Sequence: Synthetic oligonucleotide
  Target: LAMA2; (+) strand; PAM type: YTN; PAM sequence: TTT
ttatatatgtatctaaaata

SEQ ID NO: 324743 - DNA, 20 bp, Artificial Sequence
  Description of Artificial Sequence: Synthetic oligonucleotide
  Target: LAMA2; (+) strand; PAM type: YTN; PAM sequence: TTT
tatatatgtatctaaaatat

SEQ ID NO: 324744 - DNA, 20 bp, Artificial Sequence
  Description of Artificial Sequence: Synthetic oligonucleotide
  Target: LAMA2; (+) strand; PAM type: YTN; PAM sequence: TTT
atatatgtatctaaaatatg

SEQ ID NO: 324745 - DNA, 20 bp, Artificial Sequence
  Description of Artificial Sequence: Synthetic oligonucleotide
  Target: LAMA2; (+) strand; PAM type: YTN; PAM sequence: TTA
tatatgtatctaaaatatgc

SEQ ID NO: 324746 - DNA, 20 bp, Artificial Sequence
  Description of Artificial Sequence: Synthetic oligonucleotide
  Target: LAMA2; (+) strand; PAM type: YTN; PAM sequence: CTA
aaatatgctgaataagcaaa

SEQ ID NO: 324747 - DNA, 20 bp, Artificial Sequence
  Description of Artificial Sequence: Synthetic oligonucleotide
  Target: LAMA2; (+) strand; PAM type: YTN; PAM sequence: CTG
aataagcaaatcaacaacta

SEQ ID NO: 324748 - DNA, 20 bp, Artificial Sequence
  Description of Artificial Sequence: Synthetic oligonucleotide
  Target: LAMA2; (+) strand; PAM type: YTN; PAM sequence: CTA
catctagacttctgcatcgc

SEQ ID NO: 324749 - DNA, 20 bp, Artificial Sequence
  Description of Artificial Sequence: Synthetic oligonucleotide
  Target: LAMA2; (+) strand; PAM type: YTN; PAM sequence: CTA
gacttctgcatcgcaaacca

SEQ ID NO: 324750 - DNA, 20 bp, Artificial Sequence
  Description of Artificial Sequence: Synthetic oligonucleotide
  Target: LAMA2; (+) strand; PAM type: YTN; PAM sequence: CTT
ctgcatcgcaaaccagaact

SEQ ID NO: 324751 - DNA, 20 bp, Artificial Sequence
  Description of Artificial Sequence: Synthetic oligonucleotide
  Target: LAMA2; (+) strand; PAM type: YTN; PAM sequence: TTC
tgcatcgcaaaccagaacta

SEQ ID NO: 324752 - DNA, 20 bp, Artificial Sequence
  Description of Artificial Sequence: Synthetic oligonucleotide
  Target: LAMA2; (+) strand; PAM type: YTN; PAM sequence: CTG
catcgcaaaccagaactaca

SEQ ID NO: 324753 - DNA, 20 bp, Artificial Sequence
  Description of Artificial Sequence: Synthetic oligonucleotide
  Target: LAMA2; (+) strand; PAM type: YTN; PAM sequence: CTA
catttaaatgcattttatct

SEQ ID NO: 324754 - DNA, 20 bp, Artificial Sequence
  Description of Artificial Sequence: Synthetic oligonucleotide
  Target: LAMA2; (+) strand; PAM type: YTN; PAM sequence: TTT
aaatgcattttatctcacac

SEQ ID NO: 324755 - DNA, 20 bp, Artificial Sequence
  Description of Artificial Sequence: Synthetic oligonucleotide
  Target: LAMA2; (+) strand; PAM type: YTN; PAM sequence: TTA
aatgcattttatctcacact

SEQ ID NO: 324756 - DNA, 20 bp, Artificial Sequence
  Description of Artificial Sequence: Synthetic oligonucleotide
  Target: LAMA2; (+) strand; PAM type: YTN; PAM sequence: TTT
tatctcacacttaaagaatt

SEQ ID NO: 324757 - DNA, 20 bp, Artificial Sequence
  Description of Artificial Sequence: Synthetic oligonucleotide
  Target: LAMA2; (+) strand; PAM type: YTN; PAM sequence: TTT
atctcacacttaaagaatta

SEQ ID NO: 324758 - DNA, 20 bp, Artificial Sequence
  Description of Artificial Sequence: Synthetic oligonucleotide
  Target: LAMA2; (+) strand; PAM type: YTN; PAM sequence: TTA
tctcacacttaaagaattaa

SEQ ID NO: 324759 - DNA, 20 bp, Artificial Sequence
  Description of Artificial Sequence: Synthetic oligonucleotide
  Target: LAMA2; (+) strand; PAM type: YTN; PAM sequence: CTC
acacttaaagaattaaaata

SEQ ID NO: 324760 - DNA, 20 bp, Artificial Sequence
  Description of Artificial Sequence: Synthetic oligonucleotide
  Target: LAMA2; (+) strand; PAM type: YTN; PAM sequence: CTT
aaagaattaaaataaaactc

SEQ ID NO: 324761 - DNA, 20 bp, Artificial Sequence
  Description of Artificial Sequence: Synthetic oligonucleotide
  Target: LAMA2; (+) strand; PAM type: YTN; PAM sequence: TTA
aagaattaaaataaaactct

SEQ ID NO: 324762 - DNA, 20 bp, Artificial Sequence
  Description of Artificial Sequence: Synthetic oligonucleotide
  Target: LAMA2; (+) strand; PAM type: YTN; PAM sequence: TTA
aaataaaactcttttctgaa

SEQ ID NO: 324763 - DNA, 20 bp, Artificial Sequence
  Description of Artificial Sequence: Synthetic oligonucleotide
  Target: LAMA2; (+) strand; PAM type: YTN; PAM sequence: CTC
ttttctgaacaatcttccaa

SEQ ID NO: 324764 - DNA, 20 bp, Artificial Sequence
  Description of Artificial Sequence: Synthetic oligonucleotide
  Target: LAMA2; (+) strand; PAM type: YTN; PAM sequence: CTT
ttctgaacaatcttccaata

SEQ ID NO: 324765 - DNA, 20 bp, Artificial Sequence
  Description of Artificial Sequence: Synthetic oligonucleotide
  Target: LAMA2; (+) strand; PAM type: YTN; PAM sequence: TTT
tctgaacaatcttccaatat

SEQ ID NO: 324766 - DNA, 20 bp, Artificial Sequence
  Description of Artificial Sequence: Synthetic oligonucleotide
  Target: LAMA2; (+) strand; PAM type: YTN; PAM sequence: TTT
ctgaacaatcttccaatata

SEQ ID NO: 324767 - DNA, 20 bp, Artificial Sequence
  Description of Artificial Sequence: Synthetic oligonucleotide
  Target: LAMA2; (+) strand; PAM type: YTN; PAM sequence: TTC
tgaacaatcttccaatatat

SEQ ID NO: 324768 - DNA, 20 bp, Artificial Sequence
  Description of Artificial Sequence: Synthetic oligonucleotide
  Target: LAMA2; (+) strand; PAM type: YTN; PAM sequence: CTG
aacaatcttccaatatattg

SEQ ID NO: 324769 - DNA, 20 bp, Artificial Sequence
  Description of Artificial Sequence: Synthetic oligonucleotide
  Target: LAMA2; (+) strand; PAM type: YTN; PAM sequence: CTT
ccaatatattgaccataagt

SEQ ID NO: 324770 - DNA, 20 bp, Artificial Sequence
  Description of Artificial Sequence: Synthetic oligonucleotide
  Target: LAMA2; (+) strand; PAM type: YTN; PAM sequence: TTC
caatatattgaccataagta

SEQ ID NO: 324771 - DNA, 20 bp, Artificial Sequence
  Description of Artificial Sequence: Synthetic oligonucleotide
  Target: LAMA2; (+) strand; PAM type: YTN; PAM sequence: TTG
accataagtaaatgtaatat

SEQ ID NO: 324772 - DNA, 20 bp, Artificial Sequence
  Description of Artificial Sequence: Synthetic oligonucleotide
  Target: LAMA2; (+) strand; PAM type: YTN; PAM sequence: TTA
ttttaaccgttttgtaactc

SEQ ID NO: 324773 - DNA, 20 bp, Artificial Sequence
  Description of Artificial Sequence: Synthetic oligonucleotide
  Target: LAMA2; (+) strand; PAM type: YTN; PAM sequence: TTT
taaccgttttgtaactcaat

SEQ ID NO: 324774 - DNA, 20 bp, Artificial Sequence
  Description of Artificial Sequence: Synthetic oligonucleotide
  Target: LAMA2; (+) strand; PAM type: YTN; PAM sequence: TTT
aaccgttttgtaactcaatg

SEQ ID NO: 324775 - DNA, 20 bp, Artificial Sequence
  Description of Artificial Sequence: Synthetic oligonucleotide
  Target: LAMA2; (+) strand; PAM type: YTN; PAM sequence: TTA
accgttttgtaactcaatgt

SEQ ID NO: 324776 - DNA, 20 bp, Artificial Sequence
  Description of Artificial Sequence: Synthetic oligonucleotide
  Target: LAMA2; (+) strand; PAM type: YTN; PAM sequence: TTT
tgtaactcaatgtctgttgg

SEQ ID NO: 324777 - DNA, 20 bp, Artificial Sequence
  Description of Artificial Sequence: Synthetic oligonucleotide
  Target: LAMA2; (+) strand; PAM type: YTN; PAM sequence: TTT
gtaactcaatgtctgttgga

SEQ ID NO: 324778 - DNA, 20 bp, Artificial Sequence
  Description of Artificial Sequence: Synthetic oligonucleotide
  Target: LAMA2; (+) strand; PAM type: YTN; PAM sequence: TTG
taactcaatgtctgttggat

SEQ ID NO: 324779 - DNA, 20 bp, Artificial Sequence
  Description of Artificial Sequence: Synthetic oligonucleotide
  Target: LAMA2; (+) strand; PAM type: YTN; PAM sequence: CTC
aatgtctgttggatttatct

SEQ ID NO: 324780 - DNA, 20 bp, Artificial Sequence
  Description of Artificial Sequence: Synthetic oligonucleotide
  Target: LAMA2; (+) strand; PAM type: YTN; PAM sequence: CTG
ttggatttatcttgattttt

SEQ ID NO: 324781 - DNA, 20 bp, Artificial Sequence
  Description of Artificial Sequence: Synthetic oligonucleotide
  Target: LAMA2; (+) strand; PAM type: YTN; PAM sequence: TTG
gatttatcttgatttttata

SEQ ID NO: 324782 - DNA, 20 bp, Artificial Sequence
  Description of Artificial Sequence: Synthetic oligonucleotide
  Target: LAMA2; (+) strand; PAM type: YTN; PAM sequence: TTT
atcttgatttttataaagtt

SEQ ID NO: 324783 - DNA, 20 bp, Artificial Sequence
  Description of Artificial Sequence: Synthetic oligonucleotide
  Target: LAMA2; (+) strand; PAM type: YTN; PAM sequence: TTA
tcttgatttttataaagttc

SEQ ID NO: 324784 - DNA, 20 bp, Artificial Sequence
  Description of Artificial Sequence: Synthetic oligonucleotide
  Target: LAMA2; (+) strand; PAM type: YTN; PAM sequence: CTT
gatttttataaagttcagca

SEQ ID NO: 324785 - DNA, 20 bp, Artificial Sequence
  Description of Artificial Sequence: Synthetic oligonucleotide
  Target: LAMA2; (+) strand; PAM type: YTN; PAM sequence: TTG
atttttataaagttcagcaa

SEQ ID NO: 324786 - DNA, 20 bp, Artificial Sequence
  Description of Artificial Sequence: Synthetic oligonucleotide
  Target: LAMA2; (+) strand; PAM type: YTN; PAM sequence: TTT
ttataaagttcagcaattca

SEQ ID NO: 324787 - DNA, 20 bp, Artificial Sequence
  Description of Artificial Sequence: Synthetic oligonucleotide
  Target: LAMA2; (+) strand; PAM type: YTN; PAM sequence: TTT
tataaagttcagcaattcaa

SEQ ID NO: 324788 - DNA, 20 bp, Artificial Sequence
  Description of Artificial Sequence: Synthetic oligonucleotide
  Target: LAMA2; (+) strand; PAM type: YTN; PAM sequence: TTT
ataaagttcagcaattcaat

SEQ ID NO: 324789 - DNA, 20 bp, Artificial Sequence
  Description of Artificial Sequence: Synthetic oligonucleotide
  Target: LAMA2; (+) strand; PAM type: YTN; PAM sequence: TTA
taaagttcagcaattcaatt

SEQ ID NO: 324790 - DNA, 20 bp, Artificial Sequence
  Description of Artificial Sequence: Synthetic oligonucleotide
  Target: LAMA2; (+) strand; PAM type: YTN; PAM sequence: TTC
agcaattcaatttccacatt

SEQ ID NO: 324791 - DNA, 20 bp, Artificial Sequence
  Description of Artificial Sequence: Synthetic oligonucleotide
  Target: LAMA2; (+) strand; PAM type: YTN; PAM sequence: TTC
aatttccacattttcttttg

SEQ ID NO: 324792 - DNA, 20 bp, Artificial Sequence
  Description of Artificial Sequence: Synthetic oligonucleotide
  Target: LAMA2; (+) strand; PAM type: YTN; PAM sequence: TTT
ccacattttcttttgtttct

SEQ ID NO: 324793 - DNA, 20 bp, Artificial Sequence
  Description of Artificial Sequence: Synthetic oligonucleotide
  Target: LAMA2; (+) strand; PAM type: YTN; PAM sequence: TTC
cacattttcttttgtttcta

SEQ ID NO: 324794 - DNA, 20 bp, Artificial Sequence
  Description of Artificial Sequence: Synthetic oligonucleotide
  Target: LAMA2; (+) strand; PAM type: YTN; PAM sequence: TTT
tcttttgtttctatttttgt

SEQ ID NO: 324795 - DNA, 20 bp, Artificial Sequence
  Description of Artificial Sequence: Synthetic oligonucleotide
  Target: LAMA2; (+) strand; PAM type: YTN; PAM sequence: TTT
cttttgtttctatttttgtg

SEQ ID NO: 324796 - DNA, 20 bp, Artificial Sequence
  Description of Artificial Sequence: Synthetic oligonucleotide
  Target: LAMA2; (+) strand; PAM type: YTN; PAM sequence: TTC
ttttgtttctatttttgtga

SEQ ID NO: 324797 - DNA, 20 bp, Artificial Sequence
  Description of Artificial Sequence: Synthetic oligonucleotide
  Target: LAMA2; (+) strand; PAM type: YTN; PAM sequence: CTT
ttgtttctatttttgtgagg

SEQ ID NO: 324798 - DNA, 20 bp, Artificial Sequence
  Description of Artificial Sequence: Synthetic oligonucleotide
  Target: LAMA2; (+) strand; PAM type: YTN; PAM sequence: TTT
tgtttctatttttgtgaggc

SEQ ID NO: 324799 - DNA, 20 bp, Artificial Sequence
  Description of Artificial Sequence: Synthetic oligonucleotide
  Target: LAMA2; (+) strand; PAM type: YTN; PAM sequence: TTT
gtttctatttttgtgaggca

SEQ ID NO: 324800 - DNA, 20 bp, Artificial Sequence
  Description of Artificial Sequence: Synthetic oligonucleotide
  Target: LAMA2; (+) strand; PAM type: YTN; PAM sequence: TTG
tttctatttttgtgaggcac

SEQ ID NO: 324801 - DNA, 20 bp, Artificial Sequence
  Description of Artificial Sequence: Synthetic oligonucleotide
  Target: LAMA2; (+) strand; PAM type: YTN; PAM sequence: TTT
ctatttttgtgaggcactat

SEQ ID NO: 324802 - DNA, 20 bp, Artificial Sequence
  Description of Artificial Sequence: Synthetic oligonucleotide
  Target: LAMA2; (+) strand; PAM type: YTN; PAM sequence: TTC
tatttttgtgaggcactata

SEQ ID NO: 324803 - DNA, 20 bp, Artificial Sequence
  Description of Artificial Sequence: Synthetic oligonucleotide
  Target: LAMA2; (+) strand; PAM type: YTN; PAM sequence: CTA
tttttgtgaggcactatagt

SEQ ID NO: 324804 - DNA, 20 bp, Artificial Sequence
  Description of Artificial Sequence: Synthetic oligonucleotide
  Target: LAMA2; (+) strand; PAM type: YTN; PAM sequence: TTT
ttgtgaggcactatagtttt

SEQ ID NO: 324805 - DNA, 20 bp, Artificial Sequence
  Description of Artificial Sequence: Synthetic oligonucleotide
  Target: LAMA2; (+) strand; PAM type: YTN; PAM sequence: TTT
tgtgaggcactatagttttt

SEQ ID NO: 324806 - DNA, 20 bp, Artificial Sequence
  Description of Artificial Sequence: Synthetic oligonucleotide
  Target: LAMA2; (+) strand; PAM type: YTN; PAM sequence: TTT
gtgaggcactatagttttta

SEQ ID NO: 324807 - DNA, 20 bp, Artificial Sequence
  Description of Artificial Sequence: Synthetic oligonucleotide
  Target: LAMA2; (+) strand; PAM type: YTN; PAM sequence: TTG
tgaggcactatagtttttat

SEQ ID NO: 324808 - DNA, 20 bp, Artificial Sequence
  Description of Artificial Sequence: Synthetic oligonucleotide
  Target: LAMA2; (+) strand; PAM type: YTN; PAM sequence: CTA
tagtttttatgtaataaatg

SEQ ID NO: 324809 - DNA, 20 bp, Artificial Sequence
  Description of Artificial Sequence: Synthetic oligonucleotide
  Target: LAMA2; (+) strand; PAM type: YTN; PAM sequence: TTT
ttatgtaataaatgttactg

SEQ ID NO: 324810 - DNA, 20 bp, Artificial Sequence
  Description of Artificial Sequence: Synthetic oligonucleotide
  Target: LAMA2; (+) strand; PAM type: YTN; PAM sequence: TTT
tatgtaataaatgttactga

SEQ ID NO: 324811 - DNA, 20 bp, Artificial Sequence
  Description of Artificial Sequence: Synthetic oligonucleotide
  Target: LAMA2; (+) strand; PAM type: YTN; PAM sequence: TTT
atgtaataaatgttactgat

SEQ ID NO: 324812 - DNA, 20 bp, Artificial Sequence
  Description of Artificial Sequence: Synthetic oligonucleotide
  Target: LAMA2; (+) strand; PAM type: YTN; PAM sequence: TTA
tgtaataaatgttactgata

SEQ ID NO: 324813 - DNA, 20 bp, Artificial Sequence
  Description of Artificial Sequence: Synthetic oligonucleotide
  Target: LAMA2; (+) strand; PAM type: YTN; PAM sequence: TTA
ctgatatggcctcctactta

SEQ ID NO: 324814 - DNA, 20 bp, Artificial Sequence
  Description of Artificial Sequence: Synthetic oligonucleotide
  Target: LAMA2; (+) strand; PAM type: YTN; PAM sequence: CTG
atatggcctcctacttagaa

SEQ ID NO: 324815 - DNA, 20 bp, Artificial Sequence
  Description of Artificial Sequence: Synthetic oligonucleotide
  Target: LAMA2; (+) strand; PAM type: YTN; PAM sequence: CTC
ctacttagaaaatgttattc

SEQ ID NO: 324816 - DNA, 20 bp, Artificial Sequence
  Description of Artificial Sequence: Synthetic oligonucleotide
  Target: LAMA2; (+) strand; PAM type: YTN; PAM sequence: CTA
cttagaaaatgttattcatg

SEQ ID NO: 324817 - DNA, 20 bp, Artificial Sequence
  Description of Artificial Sequence: Synthetic oligonucleotide
  Target: LAMA2; (+) strand; PAM type: YTN; PAM sequence: CTT
agaaaatgttattcatgaga

SEQ ID NO: 324818 - DNA, 20 bp, Artificial Sequence
  Description of Artificial Sequence: Synthetic oligonucleotide
  Target: LAMA2; (+) strand; PAM type: YTN; PAM sequence: TTA
gaaaatgttattcatgagag

SEQ ID NO: 324819 - DNA, 20 bp, Artificial Sequence
  Description of Artificial Sequence: Synthetic oligonucleotide
  Target: LAMA2; (+) strand; PAM type: YTN; PAM sequence: TTA
ttcatgagagtatattgatt

SEQ ID NO: 324820 - DNA, 20 bp, Artificial Sequence
  Description of Artificial Sequence: Synthetic oligonucleotide
  Target: LAMA2; (+) strand; PAM type: YTN; PAM sequence: TTC
atgagagtatattgatttta

SEQ ID NO: 324821 - DNA, 20 bp, Artificial Sequence
  Description of Artificial Sequence: Synthetic oligonucleotide
  Target: LAMA2; (+) strand; PAM type: YTN; PAM sequence: TTG
attttagcaaaatttacata

SEQ ID NO: 324822 - DNA, 20 bp, Artificial Sequence
  Description of Artificial Sequence: Synthetic oligonucleotide
  Target: LAMA2; (+) strand; PAM type: YTN; PAM sequence: TTT
tagcaaaatttacatattta

SEQ ID NO: 324823 - DNA, 20 bp, Artificial Sequence
  Description of Artificial Sequence: Synthetic oligonucleotide
  Target: LAMA2; (+) strand; PAM type: YTN; PAM sequence: TTT
agcaaaatttacatatttac

SEQ ID NO: 324824 - DNA, 20 bp, Artificial Sequence
  Description of Artificial Sequence: Synthetic oligonucleotide
  Target: LAMA2; (+) strand; PAM type: YTN; PAM sequence: TTA
gcaaaatttacatatttaca

SEQ ID NO: 324825 - DNA, 20 bp, Artificial Sequence
  Description of Artificial Sequence: Synthetic oligonucleotide
  Target: LAMA2; (+) strand; PAM type: YTN; PAM sequence: TTT
acatatttacatatgtacat

SEQ ID NO: 324826 - DNA, 20 bp, Artificial Sequence
  Description of Artificial Sequence: Synthetic oligonucleotide
  Target: LAMA2; (+) strand; PAM type: YTN; PAM sequence: TTA
catatttacatatgtacatc

SEQ ID NO: 324827 - DNA, 20 bp, Artificial Sequence
  Description of Artificial Sequence: Synthetic oligonucleotide
  Target: LAMA2; (+) strand; PAM type: YTN; PAM sequence: TTT
acatatgtacatccacaggt

SEQ ID NO: 324828 - DNA, 20 bp, Artificial Sequence
  Description of Artificial Sequence: Synthetic oligonucleotide
  Target: LAMA2; (+) strand; PAM type: YTN; PAM sequence: TTA
catatgtacatccacaggtt

SEQ ID NO: 324829 - DNA, 20 bp, Artificial Sequence
  Description of Artificial Sequence: Synthetic oligonucleotide
  Target: LAMA2; (+) strand; PAM type: YTN; PAM sequence: TTT
gcatatgtaaaaatatagat

SEQ ID NO: 324830 - DNA, 20 bp, Artificial Sequence
  Description of Artificial Sequence: Synthetic oligonucleotide
  Target: LAMA2; (+) strand; PAM type: YTN; PAM sequence: TTG
catatgtaaaaatatagatt

SEQ ID NO: 324831 - DNA, 20 bp, Artificial Sequence
  Description of Artificial Sequence: Synthetic oligonucleotide
  Target: LAMA2; (+) strand; PAM type: YTN; PAM sequence: TTA
tttacttactattgaaaaag

SEQ ID NO: 324832 - DNA, 20 bp, Artificial Sequence
  Description of Artificial Sequence: Synthetic oligonucleotide
  Target: LAMA2; (+) strand; PAM type: YTN; PAM sequence: TTT
acttactattgaaaaagtgt

SEQ ID NO: 324833 - DNA, 20 bp, Artificial Sequence
  Description of Artificial Sequence: Synthetic oligonucleotide
  Target: LAMA2; (+) strand; PAM type: YTN; PAM sequence: TTA
cttactattgaaaaagtgta

SEQ ID NO: 324834 - DNA, 20 bp, Artificial Sequence
  Description of Artificial Sequence: Synthetic oligonucleotide
  Target: LAMA2; (+) strand; PAM type: YTN; PAM sequence: CTT
actattgaaaaagtgtatta

SEQ ID NO: 324835 - DNA, 20 bp, Artificial Sequence
  Description of Artificial Sequence: Synthetic oligonucleotide
  Target: LAMA2; (+) strand; PAM type: YTN; PAM sequence: TTA
ctattgaaaaagtgtattat

SEQ ID NO: 324836 - DNA, 20 bp, Artificial Sequence
  Description of Artificial Sequence: Synthetic oligonucleotide
  Target: LAMA2; (+) strand; PAM type: YTN; PAM sequence: CTA
ttgaaaaagtgtattatgga

SEQ ID NO: 324837 - DNA, 20 bp, Artificial Sequence
  Description of Artificial Sequence: Synthetic oligonucleotide
  Target: LAMA2; (+) strand; PAM type: YTN; PAM sequence: TTG
aaaaagtgtattatggaaga

SEQ ID NO: 324838 - DNA, 20 bp, Artificial Sequence
  Description of Artificial Sequence: Synthetic oligonucleotide
  Target: LAMA2; (+) strand; PAM type: YTN; PAM sequence: TTA
tggaagataaaaggttttca

SEQ ID NO: 324839 - DNA, 20 bp, Artificial Sequence
  Description of Artificial Sequence: Synthetic oligonucleotide
  Target: LAMA2; (+) strand; PAM type: YTN; PAM sequence: TTT
tcatctctgtcagatacgac

SEQ ID NO: 324840 - DNA, 20 bp, Artificial Sequence
  Description of Artificial Sequence: Synthetic oligonucleotide
  Target: LAMA2; (+) strand; PAM type: YTN; PAM sequence: TTT
catctctgtcagatacgaca

SEQ ID NO: 324841 - DNA, 20 bp, Artificial Sequence
  Description of Artificial Sequence: Synthetic oligonucleotide
  Target: LAMA2; (+) strand; PAM type: YTN; PAM sequence: TTC
atctctgtcagatacgacag

SEQ ID NO: 324842 - DNA, 20 bp, Artificial Sequence
  Description of Artificial Sequence: Synthetic oligonucleotide
  Target: LAMA2; (+) strand; PAM type: YTN; PAM sequence: CTC
tgtcagatacgacaggtgaa

SEQ ID NO: 324843 - DNA, 20 bp, Artificial Sequence
  Description of Artificial Sequence: Synthetic oligonucleotide
  Target: LAMA2; (+) strand; PAM type: YTN; PAM sequence: CTG
tcagatacgacaggtgaact

SEQ ID NO: 324844 - DNA, 20 bp, Artificial Sequence
  Description of Artificial Sequence: Synthetic oligonucleotide
  Target: LAMA2; (+) strand; PAM type: YTN; PAM sequence: CTT
tggtaacataaggcctagca

SEQ ID NO: 324845 - DNA, 20 bp, Artificial Sequence
  Description of Artificial Sequence: Synthetic oligonucleotide
  Target: LAMA2; (+) strand; PAM type: YTN; PAM sequence: TTT
ggtaacataaggcctagcaa

SEQ ID NO: 324846 - DNA, 20 bp, Artificial Sequence
  Description of Artificial Sequence: Synthetic oligonucleotide
  Target: LAMA2; (+) strand; PAM type: YTN; PAM sequence: TTG
gtaacataaggcctagcaaa

SEQ ID NO: 324847 - DNA, 20 bp, Artificial Sequence
  Description of Artificial Sequence: Synthetic oligonucleotide
  Target: LAMA2; (+) strand; PAM type: YTN; PAM sequence: CTA
gcaaagttttattgatctta

SEQ ID NO: 324848 - DNA, 20 bp, Artificial Sequence
  Description of Artificial Sequence: Synthetic oligonucleotide
  Target: LAMA2; (+) strand; PAM type: YTN; PAM sequence: TTT
tattgatcttacatatatat

SEQ ID NO: 324849 - DNA, 20 bp, Artificial Sequence
  Description of Artificial Sequence: Synthetic oligonucleotide
  Target: LAMA2; (+) strand; PAM type: YTN; PAM sequence: TTT
attgatcttacatatatata

SEQ ID NO: 324850 - DNA, 20 bp, Artificial Sequence
  Description of Artificial Sequence: Synthetic oligonucleotide
  Target: LAMA2; (+) strand; PAM type: YTN; PAM sequence: TTA
ttgatcttacatatatatat

SEQ ID NO: 324851 - DNA, 20 bp, Artificial Sequence
  Description of Artificial Sequence: Synthetic oligonucleotide
  Target: LAMA2; (+) strand; PAM type: YTN; PAM sequence: TTG
atcttacatatatatatata

SEQ ID NO: 324852 - DNA, 20 bp, Artificial Sequence
  Description of Artificial Sequence: Synthetic oligonucleotide
  Target: LAMA2; (+) strand; PAM type: YTN; PAM sequence: CTT
acatatatatatatataaaa

SEQ ID NO: 324853 - DNA, 20 bp, Artificial Sequence
  Description of Artificial Sequence: Synthetic oligonucleotide
  Target: LAMA2; (+) strand; PAM type: YTN; PAM sequence: TTA
catatatatatatataaaat

SEQ ID NO: 324854 - DNA, 20 bp, Artificial Sequence
  Description of Artificial Sequence: Synthetic oligonucleotide
  Target: LAMA2; (+) strand; PAM type: YTN; PAM sequence: TTT
ttcataatttcatgggatgc

SEQ ID NO: 324855 - DNA, 20 bp, Artificial Sequence
  Description of Artificial Sequence: Synthetic oligonucleotide
  Target: LAMA2; (+) strand; PAM type: YTN; PAM sequence: TTT
tcataatttcatgggatgca

SEQ ID NO: 324856 - DNA, 20 bp, Artificial Sequence
  Description of Artificial Sequence: Synthetic oligonucleotide
  Target: LAMA2; (+) strand; PAM type: YTN; PAM sequence: TTT
cataatttcatgggatgcat

SEQ ID NO: 324857 - DNA, 20 bp, Artificial Sequence
  Description of Artificial Sequence: Synthetic oligonucleotide
  Target: LAMA2; (+) strand; PAM type: YTN; PAM sequence: TTC
ataatttcatgggatgcatc

SEQ ID NO: 324858 - DNA, 20 bp, Artificial Sequence
  Description of Artificial Sequence: Synthetic oligonucleotide
  Target: LAMA2; (+) strand; PAM type: YTN; PAM sequence: TTT
catgggatgcatcatccaag

SEQ ID NO: 324859 - DNA, 20 bp, Artificial Sequence
  Description of Artificial Sequence: Synthetic oligonucleotide
  Target: LAMA2; (+) strand; PAM type: YTN; PAM sequence: TTC
atgggatgcatcatccaaga

SEQ ID NO: 324860 - DNA, 20 bp, Artificial Sequence
  Description of Artificial Sequence: Synthetic oligonucleotide
  Target: LAMA2; (+) strand; PAM type: YTN; PAM sequence: CTA
attactgccattgactagcc

SEQ ID NO: 324861 - DNA, 20 bp, Artificial Sequence
  Description of Artificial Sequence: Synthetic oligonucleotide
  Target: LAMA2; (+) strand; PAM type: YTN; PAM sequence: TTA
ctgccattgactagccacct

SEQ ID NO: 324862 - DNA, 20 bp, Artificial Sequence
  Description of Artificial Sequence: Synthetic oligonucleotide
  Target: LAMA2; (+) strand; PAM type: YTN; PAM sequence: CTG
ccattgactagccacctgcc

SEQ ID NO: 324863 - DNA, 20 bp, Artificial Sequence
  Description of Artificial Sequence: Synthetic oligonucleotide
  Target: LAMA2; (+) strand; PAM type: YTN; PAM sequence: TTG
actagccacctgccacatgc

SEQ ID NO: 324864 - DNA, 20 bp, Artificial Sequence
  Description of Artificial Sequence: Synthetic oligonucleotide
  Target: LAMA2; (+) strand; PAM type: YTN; PAM sequence: CTA
gccacctgccacatgccaga

SEQ ID NO: 324865 - DNA, 20 bp, Artificial Sequence
  Description of Artificial Sequence: Synthetic oligonucleotide
  Target: LAMA2; (+) strand; PAM type: YTN; PAM sequence: CTG
ccacatgccagacacatggt

SEQ ID NO: 324866 - DNA, 20 bp, Artificial Sequence
  Description of Artificial Sequence: Synthetic oligonucleotide
  Target: LAMA2; (+) strand; PAM type: YTN; PAM sequence: CTG
atgataacatgtgataggtg

SEQ ID NO: 324867 - DNA, 20 bp, Artificial Sequence
  Description of Artificial Sequence: Synthetic oligonucleotide
  Target: LAMA2; (+) strand; PAM type: YTN; PAM sequence: TTT
cccaagagagtccctttaaa

SEQ ID NO: 324868 - DNA, 20 bp, Artificial Sequence
  Description of Artificial Sequence: Synthetic oligonucleotide
  Target: LAMA2; (+) strand; PAM type: YTN; PAM sequence: TTC
ccaagagagtccctttaaac

SEQ ID NO: 324869 - DNA, 20 bp, Artificial Sequence
  Description of Artificial Sequence: Synthetic oligonucleotide
  Target: LAMA2; (+) strand; PAM type: YTN; PAM sequence: CTT
taaacaaggtttttttcctg

SEQ ID NO: 324870 - DNA, 20 bp, Artificial Sequence
  Description of Artificial Sequence: Synthetic oligonucleotide
  Target: LAMA2; (+) strand; PAM type: YTN; PAM sequence: TTT
aaacaaggtttttttcctgt

SEQ ID NO: 324871 - DNA, 20 bp, Artificial Sequence
  Description of Artificial Sequence: Synthetic oligonucleotide
  Target: LAMA2; (+) strand; PAM type: YTN; PAM sequence: TTA
aacaaggtttttttcctgtc

SEQ ID NO: 324872 - DNA, 20 bp, Artificial Sequence
  Description of Artificial Sequence: Synthetic oligonucleotide
  Target: LAMA2; (+) strand; PAM type: YTN; PAM sequence: TTT
ttttcctgtcttcatattga

SEQ ID NO: 324873 - DNA, 20 bp, Artificial Sequence
  Description of Artificial Sequence: Synthetic oligonucleotide
  Target: LAMA2; (+) strand; PAM type: YTN; PAM sequence: TTT
tttcctgtcttcatattgat

SEQ ID NO: 324874 - DNA, 20 bp, Artificial Sequence
  Description of Artificial Sequence: Synthetic oligonucleotide
  Target: LAMA2; (+) strand; PAM type: YTN; PAM sequence: TTT
ttcctgtcttcatattgatg

SEQ ID NO: 324875 - DNA, 20 bp, Artificial Sequence
  Description of Artificial Sequence: Synthetic oligonucleotide
  Target: LAMA2; (+) strand; PAM type: YTN; PAM sequence: TTT
tcctgtcttcatattgatga

SEQ ID NO: 324876 - DNA, 20 bp, Artificial Sequence
  Description of Artificial Sequence: Synthetic oligonucleotide
  Target: LAMA2; (+) strand; PAM type: YTN; PAM sequence: TTT
cctgtcttcatattgatgaa

SEQ ID NO: 324877 - DNA, 20 bp, Artificial Sequence
  Description of Artificial Sequence: Synthetic oligonucleotide
  Target: LAMA2; (+) strand; PAM type: YTN; PAM sequence: TTC
ctgtcttcatattgatgaag

SEQ ID NO: 324878 - DNA, 20 bp, Artificial Sequence
  Description of Artificial Sequence: Synthetic oligonucleotide
  Target: LAMA2; (+) strand; PAM type: YTN; PAM sequence: CTG
tcttcatattgatgaagtgt

SEQ ID NO: 324879 - DNA, 20 bp, Artificial Sequence
  Description of Artificial Sequence: Synthetic oligonucleotide
  Target: LAMA2; (+) strand; PAM type: YTN; PAM sequence: CTT
catattgatgaagtgttttt

SEQ ID NO: 324880 - DNA, 20 bp, Artificial Sequence
  Description of Artificial Sequence: Synthetic oligonucleotide
  Target: LAMA2; (+) strand; PAM type: YTN; PAM sequence: TTC
atattgatgaagtgtttttt

SEQ ID NO: 324881 - DNA, 20 bp, Artificial Sequence
  Description of Artificial Sequence: Synthetic oligonucleotide
  Target: LAMA2; (+) strand; PAM type: YTN; PAM sequence: TTG
atgaagtgttttttctaacg

SEQ ID NO: 324882 - DNA, 20 bp, Artificial Sequence
  Description of Artificial Sequence: Synthetic oligonucleotide
  Target: LAMA2; (+) strand; PAM type: YTN; PAM sequence: TTT
tttctaacgccattatttca

SEQ ID NO: 324883 - DNA, 20 bp, Artificial Sequence
  Description of Artificial Sequence: Synthetic oligonucleotide
  Target: LAMA2; (+) strand; PAM type: YTN; PAM sequence: TTT
ttctaacgccattatttcat

SEQ ID NO: 324884 - DNA, 20 bp, Artificial Sequence
  Description of Artificial Sequence: Synthetic oligonucleotide
  Target: LAMA2; (+) strand; PAM type: YTN; PAM sequence: TTT
tctaacgccattatttcatt

SEQ ID NO: 324885 - DNA, 20 bp, Artificial Sequence
  Description of Artificial Sequence: Synthetic oligonucleotide
  Target: LAMA2; (+) strand; PAM type: YTN; PAM sequence: TTT
ctaacgccattatttcattt

SEQ ID NO: 324886 - DNA, 20 bp, Artificial Sequence
  Description of Artificial Sequence: Synthetic oligonucleotide
  Target: LAMA2; (+) strand; PAM type: YTN; PAM sequence: TTC
taacgccattatttcattta

SEQ ID NO: 324887 - DNA, 20 bp, Artificial Sequence
  Description of Artificial Sequence: Synthetic oligonucleotide
  Target: LAMA2; (+) strand; PAM type: YTN; PAM sequence: CTA
acgccattatttcatttatt

SEQ ID NO: 324888 - DNA, 20 bp, Artificial Sequence
  Description of Artificial Sequence: Synthetic oligonucleotide
  Target: LAMA2; (+) strand; PAM type: YTN; PAM sequence: TTA
tttcatttattctatgaaag

SEQ ID NO: 324889 - DNA, 20 bp, Artificial Sequence
  Description of Artificial Sequence: Synthetic oligonucleotide
  Target: LAMA2; (+) strand; PAM type: YTN; PAM sequence: TTT
catttattctatgaaagaca

SEQ ID NO: 324890 - DNA, 20 bp, Artificial Sequence
  Description of Artificial Sequence: Synthetic oligonucleotide
  Target: LAMA2; (+) strand; PAM type: YTN; PAM sequence: TTC
atttattctatgaaagacaa

SEQ ID NO: 324891 - DNA, 20 bp, Artificial Sequence
  Description of Artificial Sequence: Synthetic oligonucleotide
  Target: LAMA2; (+) strand; PAM type: YTN; PAM sequence: TTT
attctatgaaagacaaaatt

SEQ ID NO: 324892 - DNA, 20 bp, Artificial Sequence
  Description of Artificial Sequence: Synthetic oligonucleotide
  Target: LAMA2; (+) strand; PAM type: YTN; PAM sequence: TTA
ttctatgaaagacaaaattg

SEQ ID NO: 324893 - DNA, 20 bp, Artificial Sequence
  Description of Artificial Sequence: Synthetic oligonucleotide
  Target: LAMA2; (+) strand; PAM type: YTN; PAM sequence: TTC
tatgaaagacaaaattggca

SEQ ID NO: 324894 - DNA, 20 bp, Artificial Sequence
  Description of Artificial Sequence: Synthetic oligonucleotide
  Target: LAMA2; (+) strand; PAM type: YTN; PAM sequence: CTA
tgaaagacaaaattggcatt

SEQ ID NO: 324895 - DNA, 20 bp, Artificial Sequence
  Description of Artificial Sequence: Synthetic oligonucleotide
  Target: LAMA2; (+) strand; PAM type: YTN; PAM sequence: TTG
gcattttaaaagtagaacac

SEQ ID NO: 324896 - DNA, 20 bp, Artificial Sequence
  Description of Artificial Sequence: Synthetic oligonucleotide
  Target: LAMA2; (+) strand; PAM type: YTN; PAM sequence: TTT
taaaagtagaacacggtctt

SEQ ID NO: 324897 - DNA, 20 bp, Artificial Sequence
  Description of Artificial Sequence: Synthetic oligonucleotide
  Target: LAMA2; (+) strand; PAM type: YTN; PAM sequence: TTT
aaaagtagaacacggtcttt

SEQ ID NO: 324898 - DNA, 20 bp, Artificial Sequence
  Description of Artificial Sequence: Synthetic oligonucleotide
  Target: LAMA2; (+) strand; PAM type: YTN; PAM sequence: TTA
aaagtagaacacggtctttt

SEQ ID NO: 324899 - DNA, 20 bp, Artificial Sequence
  Description of Artificial Sequence: Synthetic oligonucleotide
  Target: LAMA2; (+) strand; PAM type: YTN; PAM sequence: CTT
ttgatacctgtcatctgaga

SEQ ID NO: 324900 - DNA, 20 bp, Artificial Sequence
  Description of Artificial Sequence: Synthetic oligonucleotide
  Target: LAMA2; (+) strand; PAM type: YTN; PAM sequence: TTT
tgatacctgtcatctgagat

SEQ ID NO: 324901 - DNA, 20 bp, Artificial Sequence
  Description of Artificial Sequence: Synthetic oligonucleotide
  Target: LAMA2; (+) strand; PAM type: YTN; PAM sequence: TTT
gatacctgtcatctgagata

SEQ ID NO: 324902 - DNA, 20 bp, Artificial Sequence
  Description of Artificial Sequence: Synthetic oligonucleotide
  Target: LAMA2; (+) strand; PAM type: YTN; PAM sequence: TTG
atacctgtcatctgagatac

SEQ ID NO: 324903 - DNA, 20 bp, Artificial Sequence
  Description of Artificial Sequence: Synthetic oligonucleotide
  Target: LAMA2; (+) strand; PAM type: YTN; PAM sequence: CTG
tcatctgagatacccaaagg

SEQ ID NO: 324904 - DNA, 20 bp, Artificial Sequence
  Description of Artificial Sequence: Synthetic oligonucleotide
  Target: LAMA2; (+) strand; PAM type: YTN; PAM sequence: CTG
agatacccaaaggatttttt

SEQ ID NO: 324905 - DNA, 20 bp, Artificial Sequence
  Description of Artificial Sequence: Synthetic oligonucleotide
  Target: LAMA2; (+) strand; PAM type: YTN; PAM sequence: TTT
tttttttaagttagcatcaa

SEQ ID NO: 324906 - DNA, 20 bp, Artificial Sequence
  Description of Artificial Sequence: Synthetic oligonucleotide
  Target: LAMA2; (+) strand; PAM type: YTN; PAM sequence: TTT
ttttttaagttagcatcaag

SEQ ID NO: 324907 - DNA, 20 bp, Artificial Sequence
  Description of Artificial Sequence: Synthetic oligonucleotide
  Target: LAMA2; (+) strand; PAM type: YTN; PAM sequence: TTT
tttttaagttagcatcaagg

SEQ ID NO: 324908 - DNA, 20 bp, Artificial Sequence
  Description of Artificial Sequence: Synthetic oligonucleotide
  Target: LAMA2; (+) strand; PAM type: YTN; PAM sequence: TTT
ttttaagttagcatcaaggg

SEQ ID NO: 324909 - DNA, 20 bp, Artificial Sequence
  Description of Artificial Sequence: Synthetic oligonucleotide
  Target: LAMA2; (+) strand; PAM type: YTN; PAM sequence: TTT
tttaagttagcatcaagggt

SEQ ID NO: 324910 - DNA, 20 bp, Artificial Sequence
  Description of Artificial Sequence: Synthetic oligonucleotide
  Target: LAMA2; (+) strand; PAM type: YTN; PAM sequence: TTT
ttaagttagcatcaagggta

SEQ ID NO: 324911 - DNA, 20 bp, Artificial Sequence
  Description of Artificial Sequence: Synthetic oligonucleotide
  Target: LAMA2; (+) strand; PAM type: YTN; PAM sequence: TTT
taagttagcatcaagggtaa

SEQ ID NO: 324912 - DNA, 20 bp, Artificial Sequence
  Description of Artificial Sequence: Synthetic oligonucleotide
  Target: LAMA2; (+) strand; PAM type: YTN; PAM sequence: TTT
aagttagcatcaagggtaaa

SEQ ID NO: 324913 - DNA, 20 bp, Artificial Sequence
  Description of Artificial Sequence: Synthetic oligonucleotide
  Target: LAMA2; (+) strand; PAM type: YTN; PAM sequence: TTA
agttagcatcaagggtaaat

SEQ ID NO: 324914 - DNA, 20 bp, Artificial Sequence
  Description of Artificial Sequence: Synthetic oligonucleotide
  Target: LAMA2; (+) strand; PAM type: YTN; PAM sequence: TTA
gcatcaagggtaaataataa

SEQ ID NO: 324915 - DNA, 20 bp, Artificial Sequence
  Description of Artificial Sequence: Synthetic oligonucleotide
  Target: LAMA2; (+) strand; PAM type: YTN; PAM sequence: TTA
ttttatgttagatcttgtag

SEQ ID NO: 324916 - DNA, 20 bp, Artificial Sequence
  Description of Artificial Sequence: Synthetic oligonucleotide
  Target: LAMA2; (+) strand; PAM type: YTN; PAM sequence: TTT
tatgttagatcttgtaggtc

SEQ ID NO: 324917 - DNA, 20 bp, Artificial Sequence
  Description of Artificial Sequence: Synthetic oligonucleotide
  Target: LAMA2; (+) strand; PAM type: YTN; PAM sequence: TTT
atgttagatcttgtaggtct

SEQ ID NO: 324918 - DNA, 20 bp, Artificial Sequence
  Description of Artificial Sequence: Synthetic oligonucleotide
  Target: LAMA2; (+) strand; PAM type: YTN; PAM sequence: TTA
tgttagatcttgtaggtcta

SEQ ID NO: 324919 - DNA, 20 bp, Artificial Sequence
  Description of Artificial Sequence: Synthetic oligonucleotide
  Target: LAMA2; (+) strand; PAM type: YTN; PAM sequence: TTA
gatcttgtaggtctaaatat

SEQ ID NO: 324920 - DNA, 20 bp, Artificial Sequence
  Description of Artificial Sequence: Synthetic oligonucleotide
  Target: LAMA2; (+) strand; PAM type: YTN; PAM sequence: CTT
gtaggtctaaatatatgcac

SEQ ID NO: 324921 - DNA, 20 bp, Artificial Sequence
  Description of Artificial Sequence: Synthetic oligonucleotide
  Target: LAMA2; (+) strand; PAM type: YTN; PAM sequence: TTG
taggtctaaatatatgcaca

SEQ ID NO: 324922 - DNA, 20 bp, Artificial Sequence
  Description of Artificial Sequence: Synthetic oligonucleotide
  Target: LAMA2; (+) strand; PAM type: YTN; PAM sequence: CTA
aatatatgcacagcaatatt

SEQ ID NO: 324923 - DNA, 20 bp, Artificial Sequence
  Description of Artificial Sequence: Synthetic oligonucleotide
  Target: LAMA2; (+) strand; PAM type: YTN; PAM sequence: TTT
aacatcctgaaatcagaaat

SEQ ID NO: 324924 - DNA, 20 bp, Artificial Sequence
  Description of Artificial Sequence: Synthetic oligonucleotide
  Target: LAMA2; (+) strand; PAM type: YTN; PAM sequence: TTA
acatcctgaaatcagaaatt

SEQ ID NO: 324925 - DNA, 20 bp, Artificial Sequence
  Description of Artificial Sequence: Synthetic oligonucleotide
  Target: LAMA2; (+) strand; PAM type: YTN; PAM sequence: CTG
aaatcagaaattttgtttct

SEQ ID NO: 324926 - DNA, 20 bp, Artificial Sequence
  Description of Artificial Sequence: Synthetic oligonucleotide
  Target: LAMA2; (+) strand; PAM type: YTN; PAM sequence: TTT
tgtttctgatggcatctctt

SEQ ID NO: 324927 - DNA, 20 bp, Artificial Sequence
  Description of Artificial Sequence: Synthetic oligonucleotide
  Target: LAMA2; (+) strand; PAM type: YTN; PAM sequence: TTT
gtttctgatggcatctcttt

SEQ ID NO: 324928 - DNA, 20 bp, Artificial Sequence
  Description of Artificial Sequence: Synthetic oligonucleotide
  Target: LAMA2; (+) strand; PAM type: YTN; PAM sequence: TTG
tttctgatggcatctctttc

SEQ ID NO: 324929 - DNA, 20 bp, Artificial Sequence
  Description of Artificial Sequence: Synthetic oligonucleotide
  Target: LAMA2; (+) strand; PAM type: YTN; PAM sequence: TTT
ctgatggcatctctttccat

SEQ ID NO: 324930 - DNA, 20 bp, Artificial Sequence
  Description of Artificial Sequence: Synthetic oligonucleotide
  Target: LAMA2; (+) strand; PAM type: YTN; PAM sequence: TTC
tgatggcatctctttccatt

SEQ ID NO: 324931 - DNA, 20 bp, Artificial Sequence
  Description of Artificial Sequence: Synthetic oligonucleotide
  Target: LAMA2; (+) strand; PAM type: YTN; PAM sequence: CTG
atggcatctctttccattat

SEQ ID NO: 324932 - DNA, 20 bp, Artificial Sequence
  Description of Artificial Sequence: Synthetic oligonucleotide
  Target: LAMA2; (+) strand; PAM type: YTN; PAM sequence: CTC
tttccattatgtgatttgaa

SEQ ID NO: 324933 - DNA, 20 bp, Artificial Sequence
  Description of Artificial Sequence: Synthetic oligonucleotide
  Target: LAMA2; (+) strand; PAM type: YTN; PAM sequence: CTT
tccattatgtgatttgaaac

SEQ ID NO: 324934 - DNA, 20 bp, Artificial Sequence
  Description of Artificial Sequence: Synthetic oligonucleotide
  Target: LAMA2; (+) strand; PAM type: YTN; PAM sequence: TTT
ccattatgtgatttgaaaca

SEQ ID NO: 324935 - DNA, 20 bp, Artificial Sequence
  Description of Artificial Sequence: Synthetic oligonucleotide
  Target: LAMA2; (+) strand; PAM type: YTN; PAM sequence: TTC
cattatgtgatttgaaacat

SEQ ID NO: 324936 - DNA, 20 bp, Artificial Sequence
  Description of Artificial Sequence: Synthetic oligonucleotide
  Target: LAMA2; (+) strand; PAM type: YTN; PAM sequence: TTA
tgtgatttgaaacattttag

SEQ ID NO: 324937 - DNA, 20 bp, Artificial Sequence
  Description of Artificial Sequence: Synthetic oligonucleotide
  Target: LAMA2; (+) strand; PAM type: YTN; PAM sequence: TTT
gaaacattttagggatattt

SEQ ID NO: 324938 - DNA, 20 bp, Artificial Sequence
  Description of Artificial Sequence: Synthetic oligonucleotide
  Target: LAMA2; (+) strand; PAM type: YTN; PAM sequence: TTG
aaacattttagggatatttt

SEQ ID NO: 324939 - DNA, 20 bp, Artificial Sequence
  Description of Artificial Sequence: Synthetic oligonucleotide
  Target: LAMA2; (+) strand; PAM type: YTN; PAM sequence: TTT
tagggatattttcctgtcta

SEQ ID NO: 324940 - DNA, 20 bp, Artificial Sequence
  Description of Artificial Sequence: Synthetic oligonucleotide
  Target: LAMA2; (+) strand; PAM type: YTN; PAM sequence: TTT
agggatattttcctgtctac

SEQ ID NO: 324941 - DNA, 20 bp, Artificial Sequence
  Description of Artificial Sequence: Synthetic oligonucleotide
  Target: LAMA2; (+) strand; PAM type: YTN; PAM sequence: TTA
gggatattttcctgtctact

SEQ ID NO: 324942 - DNA, 20 bp, Artificial Sequence
  Description of Artificial Sequence: Synthetic oligonucleotide
  Target: LAMA2; (+) strand; PAM type: YTN; PAM sequence: TTT
tcctgtctactttgcatgga

SEQ ID NO: 324943 - DNA, 20 bp, Artificial Sequence
  Description of Artificial Sequence: Synthetic oligonucleotide
  Target: LAMA2; (+) strand; PAM type: YTN; PAM sequence: TTT
cctgtctactttgcatggaa

SEQ ID NO: 324944 - DNA, 20 bp, Artificial Sequence
  Description of Artificial Sequence: Synthetic oligonucleotide
  Target: LAMA2; (+) strand; PAM type: YTN; PAM sequence: TTC
ctgtctactttgcatggaaa

SEQ ID NO: 324945 - DNA, 20 bp, Artificial Sequence
  Description of Artificial Sequence: Synthetic oligonucleotide
  Target: LAMA2; (+) strand; PAM type: YTN; PAM sequence: CTG
tctactttgcatggaaaaaa

SEQ ID NO: 324946 - DNA, 20 bp, Artificial Sequence
  Description of Artificial Sequence: Synthetic oligonucleotide
  Target: LAMA2; (+) strand; PAM type: YTN; PAM sequence: CTA
ctttgcatggaaaaaactac

SEQ ID NO: 324947 - DNA, 20 bp, Artificial Sequence
  Description of Artificial Sequence: Synthetic oligonucleotide
  Target: LAMA2; (+) strand; PAM type: YTN; PAM sequence: CTT
tgcatggaaaaaactacaga

SEQ ID NO: 324948 - DNA, 20 bp, Artificial Sequence
  Description of Artificial Sequence: Synthetic oligonucleotide
  Target: LAMA2; (+) strand; PAM type: YTN; PAM sequence: TTT
gcatggaaaaaactacagac

SEQ ID NO: 324949 - DNA, 20 bp, Artificial Sequence
  Description of Artificial Sequence: Synthetic oligonucleotide
  Target: LAMA2; (+) strand; PAM type: YTN; PAM sequence: TTG
catggaaaaaactacagact

SEQ ID NO: 324950 - DNA, 20 bp, Artificial Sequence
  Description of Artificial Sequence: Synthetic oligonucleotide
  Target: LAMA2; (+) strand; PAM type: YTN; PAM sequence: CTA
cagactttgtcaaatctagt

SEQ ID NO: 324951 - DNA, 20 bp, Artificial Sequence
  Description of Artificial Sequence: Synthetic oligonucleotide
  Target: LAMA2; (+) strand; PAM type: YTN; PAM sequence: CTT
tgtcaaatctagttgccttg

SEQ ID NO: 324952 - DNA, 20 bp, Artificial Sequence
  Description of Artificial Sequence: Synthetic oligonucleotide
  Target: LAMA2; (+) strand; PAM type: YTN; PAM sequence: TTT
gtcaaatctagttgccttgg

SEQ ID NO: 324953 - DNA, 20 bp, Artificial Sequence
  Description of Artificial Sequence: Synthetic oligonucleotide
  Target: LAMA2; (+) strand; PAM type: YTN; PAM sequence: TTG
tcaaatctagttgccttgga

SEQ ID NO: 324954 - DNA, 20 bp, Artificial Sequence
  Description of Artificial Sequence: Synthetic oligonucleotide
  Target: LAMA2; (+) strand; PAM type: YTN; PAM sequence: CTA
gttgccttggaagaagaatg

SEQ ID NO: 324955 - DNA, 20 bp, Artificial Sequence
  Description of Artificial Sequence: Synthetic oligonucleotide
  Target: LAMA2; (+) strand; PAM type: YTN; PAM sequence: TTG
ccttggaagaagaatgaata

SEQ ID NO: 324956 - DNA, 20 bp, Artificial Sequence
  Description of Artificial Sequence: Synthetic oligonucleotide
  Target: LAMA2; (+) strand; PAM type: YTN; PAM sequence: CTT
ggaagaagaatgaataagag

SEQ ID NO: 324957 - DNA, 20 bp, Artificial Sequence
  Description of Artificial Sequence: Synthetic oligonucleotide
  Target: LAMA2; (+) strand; PAM type: YTN; PAM sequence: TTG
gaagaagaatgaataagagg

SEQ ID NO: 324958 - DNA, 20 bp, Artificial Sequence
  Description of Artificial Sequence: Synthetic oligonucleotide
  Target: LAMA2; (+) strand; PAM type: YTN; PAM sequence: TTA
aacaatacaaaatatttttg

SEQ ID NO: 324959 - DNA, 20 bp, Artificial Sequence
  Description of Artificial Sequence: Synthetic oligonucleotide
  Target: LAMA2; (+) strand; PAM type: YTN; PAM sequence: TTT
ttgctatttcaagtttgaat

SEQ ID NO: 324960 - DNA, 20 bp, Artificial Sequence
  Description of Artificial Sequence: Synthetic oligonucleotide
  Target: LAMA2; (+) strand; PAM type: YTN; PAM sequence: TTT
tgctatttcaagtttgaatt

SEQ ID NO: 324961 - DNA, 20 bp, Artificial Sequence
  Description of Artificial Sequence: Synthetic oligonucleotide
  Target: LAMA2; (+) strand; PAM type: YTN; PAM sequence: TTT
gctatttcaagtttgaattg

SEQ ID NO: 324962 - DNA, 20 bp, Artificial Sequence
  Description of Artificial Sequence: Synthetic oligonucleotide
  Target: LAMA2; (+) strand; PAM type: YTN; PAM sequence: TTG
ctatttcaagtttgaattga

SEQ ID NO: 324963 - DNA, 20 bp, Artificial Sequence
  Description of Artificial Sequence: Synthetic oligonucleotide
  Target: LAMA2; (+) strand; PAM type: YTN; PAM sequence: CTA
tttcaagtttgaattgattt

SEQ ID NO: 324964 - DNA, 20 bp, Artificial Sequence
  Description of Artificial Sequence: Synthetic oligonucleotide
  Target: LAMA2; (+) strand; PAM type: YTN; PAM sequence: TTT
caagtttgaattgattttga

SEQ ID NO: 324965 - DNA, 20 bp, Artificial Sequence
  Description of Artificial Sequence: Synthetic oligonucleotide
  Target: LAMA2; (+) strand; PAM type: YTN; PAM sequence: TTC
aagtttgaattgattttgaa

SEQ ID NO: 324966 - DNA, 20 bp, Artificial Sequence
  Description of Artificial Sequence: Synthetic oligonucleotide
  Target: LAMA2; (+) strand; PAM type: YTN; PAM sequence: TTT
gaattgattttgaaataata

SEQ ID NO: 324967 - DNA, 20 bp, Artificial Sequence
  Description of Artificial Sequence: Synthetic oligonucleotide
  Target: LAMA2; (+) strand; PAM type: YTN; PAM sequence: TTG
aattgattttgaaataatag

SEQ ID NO: 324968 - DNA, 20 bp, Artificial Sequence
  Description of Artificial Sequence: Synthetic oligonucleotide
  Target: LAMA2; (+) strand; PAM type: YTN; PAM sequence: TTG
attttgaaataatagtttca

SEQ ID NO: 324969 - DNA, 20 bp, Artificial Sequence
  Description of Artificial Sequence: Synthetic oligonucleotide
  Target: LAMA2; (+) strand; PAM type: YTN; PAM sequence: TTT
tgaaataatagtttcaggct

SEQ ID NO: 324970 - DNA, 20 bp, Artificial Sequence
  Description of Artificial Sequence: Synthetic oligonucleotide
  Target: LAMA2; (+) strand; PAM type: YTN; PAM sequence: TTT
gaaataatagtttcaggcta

SEQ ID NO: 324971 - DNA, 20 bp, Artificial Sequence
  Description of Artificial Sequence: Synthetic oligonucleotide
  Target: LAMA2; (+) strand; PAM type: YTN; PAM sequence: TTG
aaataatagtttcaggctaa

SEQ ID NO: 324972 - DNA, 20 bp, Artificial Sequence
  Description of Artificial Sequence: Synthetic oligonucleotide
  Target: LAMA2; (+) strand; PAM type: YTN; PAM sequence: TTT
caggctaaataataaactgt

SEQ ID NO: 324973 - DNA, 20 bp, Artificial Sequence
  Description of Artificial Sequence: Synthetic oligonucleotide
  Target: LAMA2; (+) strand; PAM type: YTN; PAM sequence: TTC
aggctaaataataaactgtc

SEQ ID NO: 324974 - DNA, 20 bp, Artificial Sequence
  Description of Artificial Sequence: Synthetic oligonucleotide
  Target: LAMA2; (+) strand; PAM type: YTN; PAM sequence: CTA
aataataaactgtcttttta

SEQ ID NO: 324975 - DNA, 20 bp, Artificial Sequence
  Description of Artificial Sequence: Synthetic oligonucleotide
  Target: LAMA2; (+) strand; PAM type: YTN; PAM sequence: CTG
tctttttaggaaacaaaaga

SEQ ID NO: 324976 - DNA, 20 bp, Artificial Sequence
  Description of Artificial Sequence: Synthetic oligonucleotide
  Target: LAMA2; (+) strand; PAM type: YTN; PAM sequence: CTT
tttaggaaacaaaagaagta

SEQ ID NO: 324977 - DNA, 20 bp, Artificial Sequence
  Description of Artificial Sequence: Synthetic oligonucleotide
  Target: LAMA2; (+) strand; PAM type: YTN; PAM sequence: TTT
ttaggaaacaaaagaagtat

SEQ ID NO: 324978 - DNA, 20 bp, Artificial Sequence
  Description of Artificial Sequence: Synthetic oligonucleotide
  Target: LAMA2; (+) strand; PAM type: YTN; PAM sequence: TTT
taggaaacaaaagaagtatt

SEQ ID NO: 324979 - DNA, 20 bp, Artificial Sequence
  Description of Artificial Sequence: Synthetic oligonucleotide
  Target: LAMA2; (+) strand; PAM type: YTN; PAM sequence: TTT
aggaaacaaaagaagtattt

SEQ ID NO: 324980 - DNA, 20 bp, Artificial Sequence
  Description of Artificial Sequence: Synthetic oligonucleotide
  Target: LAMA2; (+) strand; PAM type: YTN; PAM sequence: TTA
ggaaacaaaagaagtatttt

SEQ ID NO: 324981 - DNA, 20 bp, Artificial Sequence
  Description of Artificial Sequence: Synthetic oligonucleotide
  Target: LAMA2; (+) strand; PAM type: YTN; PAM sequence: TTT
tagaaaaagacattaaaaag

SEQ ID NO: 324982 - DNA, 20 bp, Artificial Sequence
  Description of Artificial Sequence: Synthetic oligonucleotide
  Target: LAMA2; (+) strand; PAM type: YTN; PAM sequence: TTT
agaaaaagacattaaaaaga

SEQ ID NO: 324983 - DNA, 20 bp, Artificial Sequence
  Description of Artificial Sequence: Synthetic oligonucleotide
  Target: LAMA2; (+) strand; PAM type: YTN; PAM sequence: TTA
gaaaaagacattaaaaagac

SEQ ID NO: 324984 - DNA, 20 bp, Artificial Sequence
  Description of Artificial Sequence: Synthetic oligonucleotide
  Target: LAMA2; (+) strand; PAM type: YTN; PAM sequence: TTA
aaaagactttattaaaatag

SEQ ID NO: 324985 - DNA, 20 bp, Artificial Sequence
  Description of Artificial Sequence: Synthetic oligonucleotide
  Target: LAMA2; (+) strand; PAM type: YTN; PAM sequence: CTT
tattaaaatagaggacatga

SEQ ID NO: 324986 - DNA, 20 bp, Artificial Sequence
  Description of Artificial Sequence: Synthetic oligonucleotide
  Target: LAMA2; (+) strand; PAM type: YTN; PAM sequence: TTT
attaaaatagaggacatgat

SEQ ID NO: 324987 - DNA, 20 bp, Artificial Sequence
  Description of Artificial Sequence: Synthetic oligonucleotide
  Target: LAMA2; (+) strand; PAM type: YTN; PAM sequence: TTA
ttaaaatagaggacatgatg

SEQ ID NO: 324988 - DNA, 20 bp, Artificial Sequence
  Description of Artificial Sequence: Synthetic oligonucleotide
  Target: LAMA2; (+) strand; PAM type: YTN; PAM sequence: TTA
aaatagaggacatgatgatc

SEQ ID NO: 324989 - DNA, 20 bp, Artificial Sequence
  Description of Artificial Sequence: Synthetic oligonucleotide
  Target: LAMA2; (+) strand; PAM type: YTN; PAM sequence: CTT
gtttgttgctttaagcagtt

SEQ ID NO: 324990 - DNA, 20 bp, Artificial Sequence
  Description of Artificial Sequence: Synthetic oligonucleotide
  Target: LAMA2; (+) strand; PAM type: YTN; PAM sequence: TTG
tttgttgctttaagcagttt

SEQ ID NO: 324991 - DNA, 20 bp, Artificial Sequence
  Description of Artificial Sequence: Synthetic oligonucleotide
  Target: LAMA2; (+) strand; PAM type: YTN; PAM sequence: TTT
gttgctttaagcagtttatg

SEQ ID NO: 324992 - DNA, 20 bp, Artificial Sequence
  Description of Artificial Sequence: Synthetic oligonucleotide
  Target: LAMA2; (+) strand; PAM type: YTN; PAM sequence: TTG
ttgctttaagcagtttatgt

SEQ ID NO: 324993 - DNA, 20 bp, Artificial Sequence
  Description of Artificial Sequence: Synthetic oligonucleotide
  Target: LAMA2; (+) strand; PAM type: YTN; PAM sequence: TTG
ctttaagcagtttatgtagt

SEQ ID NO: 324994 - DNA, 20 bp, Artificial Sequence
  Description of Artificial Sequence: Synthetic oligonucleotide
  Target: LAMA2; (+) strand; PAM type: YTN; PAM sequence: CTT
taagcagtttatgtagtaac

SEQ ID NO: 324995 - DNA, 20 bp, Artificial Sequence
  Description of Artificial Sequence: Synthetic oligonucleotide
  Target: LAMA2; (+) strand; PAM type: YTN; PAM sequence: TTT
aagcagtttatgtagtaact

SEQ ID NO: 324996 - DNA, 20 bp, Artificial Sequence
  Description of Artificial Sequence: Synthetic oligonucleotide
  Target: LAMA2; (+) strand; PAM type: YTN; PAM sequence: TTA
agcagtttatgtagtaactt

SEQ ID NO: 324997 - DNA, 20 bp, Artificial Sequence
  Description of Artificial Sequence: Synthetic oligonucleotide
  Target: LAMA2; (+) strand; PAM type: YTN; PAM sequence: TTT
atgtagtaactttaaggtgg

SEQ ID NO: 324998 - DNA, 20 bp, Artificial Sequence
  Description of Artificial Sequence: Synthetic oligonucleotide
  Target: LAMA2; (+) strand; PAM type: YTN; PAM sequence: TTA
tgtagtaactttaaggtggt

SEQ ID NO: 324999 - DNA, 20 bp, Artificial Sequence
  Description of Artificial Sequence: Synthetic oligonucleotide
  Target: LAMA2; (+) strand; PAM type: YTN; PAM sequence: CTT
taaggtggtagaaagtgtca

SEQ ID NO: 325000 - DNA, 20 bp, Artificial Sequence
  Description of Artificial Sequence: Synthetic oligonucleotide
  Target: LAMA2; (+) strand; PAM type: YTN; PAM sequence: TTT
aaggtggtagaaagtgtcag

SEQ ID NO: 325001 - DNA, 20 bp, Artificial Sequence
  Description of Artificial Sequence: Synthetic oligonucleotide
  Target: LAMA2; (+) strand; PAM type: YTN; PAM sequence: TTA
aggtggtagaaagtgtcagg

SEQ ID NO: 325002 - DNA, 20 bp, Artificial Sequence
  Description of Artificial Sequence: Synthetic oligonucleotide
  Target: LAMA2; (+) strand; PAM type: YTN; PAM sequence: TTT
gaaggcaaatcttcacatat

SEQ ID NO: 325003 - DNA, 20 bp, Artificial Sequence
  Description of Artificial Sequence: Synthetic oligonucleotide
  Target: LAMA2; (+) strand; PAM type: YTN; PAM sequence: TTG
aaggcaaatcttcacatatg

SEQ ID NO: 325004 - DNA, 20 bp, Artificial Sequence
  Description of Artificial Sequence: Synthetic oligonucleotide
  Target: LAMA2; (+) strand; PAM type: YTN; PAM sequence: CTT
cacatatgaaaagaatcaga

SEQ ID NO: 325005 - DNA, 20 bp, Artificial Sequence
  Description of Artificial Sequence: Synthetic oligonucleotide
  Target: LAMA2; (+) strand; PAM type: YTN; PAM sequence: TTC
acatatgaaaagaatcagaa

SEQ ID NO: 325006 - DNA, 20 bp, Artificial Sequence
  Description of Artificial Sequence: Synthetic oligonucleotide
  Target: LAMA2; (+) strand; PAM type: YTN; PAM sequence: TTA
actcaggtcttaaataaaaa

SEQ ID NO: 325007 - DNA, 20 bp, Artificial Sequence
  Description of Artificial Sequence: Synthetic oligonucleotide
  Target: LAMA2; (+) strand; PAM type: YTN; PAM sequence: CTC
aggtcttaaataaaaaggaa

SEQ ID NO: 325008 - DNA, 20 bp, Artificial Sequence
  Description of Artificial Sequence: Synthetic oligonucleotide
  Target: LAMA2; (+) strand; PAM type: YTN; PAM sequence: CTT
aaataaaaaggaagaattaa

SEQ ID NO: 325009 - DNA, 20 bp, Artificial Sequence
  Description of Artificial Sequence: Synthetic oligonucleotide
  Target: LAMA2; (+) strand; PAM type: YTN; PAM sequence: TTA
aataaaaaggaagaattaat

SEQ ID NO: 325010 - DNA, 20 bp, Artificial Sequence
  Description of Artificial Sequence: Synthetic oligonucleotide
  Target: LAMA2; (+) strand; PAM type: YTN; PAM sequence: TTA
atatgatatattaaaagtga

SEQ ID NO: 325011 - DNA, 20 bp, Artificial Sequence
  Description of Artificial Sequence: Synthetic oligonucleotide
  Target: LAMA2; (+) strand; PAM type: YTN; PAM sequence: TTA
aaagtgatacgaaagtcaaa

SEQ ID NO: 325012 - DNA, 20 bp, Artificial Sequence
  Description of Artificial Sequence: Synthetic oligonucleotide
  Target: LAMA2; (+) strand; PAM type: YTN; PAM sequence: TTG
atgagacttattaatatgaa

SEQ ID NO: 325013 - DNA, 20 bp, Artificial Sequence
  Description of Artificial Sequence: Synthetic oligonucleotide
  Target: LAMA2; (+) strand; PAM type: YTN; PAM sequence: CTT
attaatatgaaatgaggttt

SEQ ID NO: 325014 - DNA, 20 bp, Artificial Sequence
  Description of Artificial Sequence: Synthetic oligonucleotide
  Target: LAMA2; (+) strand; PAM type: YTN; PAM sequence: TTA
ttaatatgaaatgaggtttc

SEQ ID NO: 325015 - DNA, 20 bp, Artificial Sequence
  Description of Artificial Sequence: Synthetic oligonucleotide
  Target: LAMA2; (+) strand; PAM type: YTN; PAM sequence: TTA
atatgaaatgaggtttcttc

SEQ ID NO: 325016 - DNA, 20 bp, Artificial Sequence
  Description of Artificial Sequence: Synthetic oligonucleotide
  Target: LAMA2; (+) strand; PAM type: YTN; PAM sequence: TTT
cttcaataaatatgtaagta

SEQ ID NO: 325017 - DNA, 20 bp, Artificial Sequence
  Description of Artificial Sequence: Synthetic oligonucleotide
  Target: LAMA2; (+) strand; PAM type: YTN; PAM sequence: TTC
ttcaataaatatgtaagtac

SEQ ID NO: 325018 - DNA, 20 bp, Artificial Sequence
  Description of Artificial Sequence: Synthetic oligonucleotide
  Target: LAMA2; (+) strand; PAM type: YTN; PAM sequence: CTT
caataaatatgtaagtacaa

SEQ ID NO: 325019 - DNA, 20 bp, Artificial Sequence
  Description of Artificial Sequence: Synthetic oligonucleotide
  Target: LAMA2; (+) strand; PAM type: YTN; PAM sequence: TTC
aataaatatgtaagtacaaa

SEQ ID NO: 325020 - DNA, 20 bp, Artificial Sequence
  Description of Artificial Sequence: Synthetic oligonucleotide
  Target: LAMA2; (+) strand; PAM type: YTN; PAM sequence: TTA
aattgtattaagaaacttga

SEQ ID NO: 325021 - DNA, 20 bp, Artificial Sequence
  Description of Artificial Sequence: Synthetic oligonucleotide
  Target: LAMA2; (+) strand; PAM type: YTN; PAM sequence: TTG
tattaagaaacttgagattt

SEQ ID NO: 325022 - DNA, 20 bp, Artificial Sequence
  Description of Artificial Sequence: Synthetic oligonucleotide
  Target: LAMA2; (+) strand; PAM type: YTN; PAM sequence: TTA
agaaacttgagatttaaaaa

SEQ ID NO: 325023 - DNA, 20 bp, Artificial Sequence
  Description of Artificial Sequence: Synthetic oligonucleotide
  Target: LAMA2; (+) strand; PAM type: YTN; PAM sequence: CTT
gagatttaaaaaaaaaaaaa

SEQ ID NO: 325024 - DNA, 20 bp, Artificial Sequence
  Description of Artificial Sequence: Synthetic oligonucleotide
  Target: LAMA2; (+) strand; PAM type: YTN; PAM sequence: TTG
agatttaaaaaaaaaaaaaa

SEQ ID NO: 325025 - DNA, 20 bp, Artificial Sequence
  Description of Artificial Sequence: Synthetic oligonucleotide
  Target: LAMA2; (+) strand; PAM type: YTN; PAM sequence: TTT
aaaaaaaaaaaaaagcgaag

SEQ ID NO: 325026 - DNA, 20 bp, Artificial Sequence
  Description of Artificial Sequence: Synthetic oligonucleotide
  Target: LAMA2; (+) strand; PAM type: YTN; PAM sequence: TTA
aaaaaaaaaaaaagcgaagt

SEQ ID NO: 325027 - DNA, 20 bp, Artificial Sequence
  Description of Artificial Sequence: Synthetic oligonucleotide
  Target: LAMA2; (+) strand; PAM type: YTN; PAM sequence: TTT
aaactacccctcttgagctc

SEQ ID NO: 325028 - DNA, 20 bp, Artificial Sequence
  Description of Artificial Sequence: Synthetic oligonucleotide
  Target: LAMA2; (+) strand; PAM type: YTN; PAM sequence: TTA
aactacccctcttgagctcc

SEQ ID NO: 325029 - DNA, 20 bp, Artificial Sequence
  Description of Artificial Sequence: Synthetic oligonucleotide
  Target: LAMA2; (+) strand; PAM type: YTN; PAM sequence: CTA
cccctcttgagctcccagcc

SEQ ID NO: 325030 - DNA, 20 bp, Artificial Sequence
  Description of Artificial Sequence: Synthetic oligonucleotide
  Target: LAMA2; (+) strand; PAM type: YTN; PAM sequence: CTC
ttgagctcccagccacattc

SEQ ID NO: 325031 - DNA, 20 bp, Artificial Sequence
  Description of Artificial Sequence: Synthetic oligonucleotide
  Target: LAMA2; (+) strand; PAM type: YTN; PAM sequence: CTT
gagctcccagccacattcct

SEQ ID NO: 325032 - DNA, 20 bp, Artificial Sequence
  Description of Artificial Sequence: Synthetic oligonucleotide
  Target: LAMA2; (+) strand; PAM type: YTN; PAM sequence: TTG
agctcccagccacattcctc

SEQ ID NO: 325033 - DNA, 20 bp, Artificial Sequence
  Description of Artificial Sequence: Synthetic oligonucleotide
  Target: LAMA2; (+) strand; PAM type: YTN; PAM sequence: CTC
ccagccacattcctcttagt

SEQ ID NO: 325034 - DNA, 20 bp, Artificial Sequence
  Description of Artificial Sequence: Synthetic oligonucleotide
  Target: LAMA2; (+) strand; PAM type: YTN; PAM sequence: TTC
ctcttagttgtctaataata

SEQ ID NO: 325035 - DNA, 20 bp, Artificial Sequence
  Description of Artificial Sequence: Synthetic oligonucleotide
  Target: LAMA2; (+) strand; PAM type: YTN; PAM sequence: CTC
ttagttgtctaataataaca

SEQ ID NO: 325036 - DNA, 20 bp, Artificial Sequence
  Description of Artificial Sequence: Synthetic oligonucleotide
  Target: LAMA2; (+) strand; PAM type: YTN; PAM sequence: CTT
agttgtctaataataacact

SEQ ID NO: 325037 - DNA, 20 bp, Artificial Sequence
  Description of Artificial Sequence: Synthetic oligonucleotide
  Target: LAMA2; (+) strand; PAM type: YTN; PAM sequence: TTA
gttgtctaataataacactt

SEQ ID NO: 325038 - DNA, 20 bp, Artificial Sequence
  Description of Artificial Sequence: Synthetic oligonucleotide
  Target: LAMA2; (+) strand; PAM type: YTN; PAM sequence: TTG
tctaataataacacttcttg

SEQ ID NO: 325039 - DNA, 20 bp, Artificial Sequence
  Description of Artificial Sequence: Synthetic oligonucleotide
  Target: LAMA2; (+) strand; PAM type: YTN; PAM sequence: CTA
ataataacacttcttggcta

SEQ ID NO: 325040 - DNA, 20 bp, Artificial Sequence
  Description of Artificial Sequence: Synthetic oligonucleotide
  Target: LAMA2; (+) strand; PAM type: YTN; PAM sequence: CTT
cttggctatttcactggata

SEQ ID NO: 325041 - DNA, 20 bp, Artificial Sequence
  Description of Artificial Sequence: Synthetic oligonucleotide
  Target: LAMA2; (+) strand; PAM type: YTN; PAM sequence: TTC
ttggctatttcactggatat

SEQ ID NO: 325042 - DNA, 20 bp, Artificial Sequence
  Description of Artificial Sequence: Synthetic oligonucleotide
  Target: LAMA2; (+) strand; PAM type: YTN; PAM sequence: CTT
ggctatttcactggatattt

SEQ ID NO: 325043 - DNA, 20 bp, Artificial Sequence
  Description of Artificial Sequence: Synthetic oligonucleotide
  Target: LAMA2; (+) strand; PAM type: YTN; PAM sequence: TTG
gctatttcactggatatttc

SEQ ID NO: 325044 - DNA, 20 bp, Artificial Sequence
  Description of Artificial Sequence: Synthetic oligonucleotide
  Target: LAMA2; (+) strand; PAM type: YTN; PAM sequence: CTA
tttcactggatatttctaaa

SEQ ID NO: 325045 - DNA, 20 bp, Artificial Sequence
  Description of Artificial Sequence: Synthetic oligonucleotide
  Target: LAMA2; (+) strand; PAM type: YTN; PAM sequence: TTT
cactggatatttctaaatga

SEQ ID NO: 325046 - DNA, 20 bp, Artificial Sequence
  Description of Artificial Sequence: Synthetic oligonucleotide
  Target: LAMA2; (+) strand; PAM type: YTN; PAM sequence: TTC
actggatatttctaaatgat

SEQ ID NO: 325047 - DNA, 20 bp, Artificial Sequence
  Description of Artificial Sequence: Synthetic oligonucleotide
  Target: LAMA2; (+) strand; PAM type: YTN; PAM sequence: CTG
gatatttctaaatgataggg

SEQ ID NO: 325048 - DNA, 20 bp, Artificial Sequence
  Description of Artificial Sequence: Synthetic oligonucleotide
  Target: LAMA2; (+) strand; PAM type: YTN; PAM sequence: TTT
ctaaatgatagggtcctatt

SEQ ID NO: 325049 - DNA, 20 bp, Artificial Sequence
  Description of Artificial Sequence: Synthetic oligonucleotide
  Target: LAMA2; (+) strand; PAM type: YTN; PAM sequence: TTC
taaatgatagggtcctattc

SEQ ID NO: 325050 - DNA, 20 bp, Artificial Sequence
  Description of Artificial Sequence: Synthetic oligonucleotide
  Target: LAMA2; (+) strand; PAM type: YTN; PAM sequence: CTA
aatgatagggtcctattcat

SEQ ID NO: 325051 - DNA, 20 bp, Artificial Sequence
  Description of Artificial Sequence: Synthetic oligonucleotide
  Target: LAMA2; (+) strand; PAM type: YTN; PAM sequence: CTA
ttcatatatctcaacttgtc

SEQ ID NO: 325052 - DNA, 20 bp, Artificial Sequence
  Description of Artificial Sequence: Synthetic oligonucleotide
  Target: LAMA2; (+) strand; PAM type: YTN; PAM sequence: TTC
atatatctcaacttgtcaat

SEQ ID NO: 325053 - DNA, 20 bp, Artificial Sequence
  Description of Artificial Sequence: Synthetic oligonucleotide
  Target: LAMA2; (+) strand; PAM type: YTN; PAM sequence: CTC
aacttgtcaatttttaatat

SEQ ID NO: 325054 - DNA, 20 bp, Artificial Sequence
  Description of Artificial Sequence: Synthetic oligonucleotide
  Target: LAMA2; (+) strand; PAM type: YTN; PAM sequence: CTT
gtcaatttttaatatcatca

SEQ ID NO: 325055 - DNA, 20 bp, Artificial Sequence
  Description of Artificial Sequence: Synthetic oligonucleotide
  Target: LAMA2; (+) strand; PAM type: YTN; PAM sequence: TTG
tcaatttttaatatcatcaa

SEQ ID NO: 325056 - DNA, 20 bp, Artificial Sequence
  Description of Artificial Sequence: Synthetic oligonucleotide
  Target: LAMA2; (+) strand; PAM type: YTN; PAM sequence: TTT
ttaatatcatcaattgacat

SEQ ID NO: 325057 - DNA, 20 bp, Artificial Sequence
  Description of Artificial Sequence: Synthetic oligonucleotide
  Target: LAMA2; (+) strand; PAM type: YTN; PAM sequence: TTT
taatatcatcaattgacatt

SEQ ID NO: 325058 - DNA, 20 bp, Artificial Sequence
  Description of Artificial Sequence: Synthetic oligonucleotide
  Target: LAMA2; (+) strand; PAM type: YTN; PAM sequence: TTT
aatatcatcaattgacattc

SEQ ID NO: 325059 - DNA, 20 bp, Artificial Sequence
  Description of Artificial Sequence: Synthetic oligonucleotide
  Target: LAMA2; (+) strand; PAM type: YTN; PAM sequence: TTA
atatcatcaattgacattcc

SEQ ID NO: 325060 - DNA, 20 bp, Artificial Sequence
  Description of Artificial Sequence: Synthetic oligonucleotide
  Target: LAMA2; (+) strand; PAM type: YTN; PAM sequence: TTG
acattccttttttagaaatc

SEQ ID NO: 325061 - DNA, 20 bp, Artificial Sequence
  Description of Artificial Sequence: Synthetic oligonucleotide
  Target: LAMA2; (+) strand; PAM type: YTN; PAM sequence: TTC
cttttttagaaatcatgact

SEQ ID NO: 325062 - DNA, 20 bp, Artificial Sequence
  Description of Artificial Sequence: Synthetic oligonucleotide
  Target: LAMA2; (+) strand; PAM type: YTN; PAM sequence: CTT
ttttagaaatcatgacttag

SEQ ID NO: 325063 - DNA, 20 bp, Artificial Sequence
  Description of Artificial Sequence: Synthetic oligonucleotide
  Target: LAMA2; (+) strand; PAM type: YTN; PAM sequence: TTT
tttagaaatcatgacttagc

SEQ ID NO: 325064 - DNA, 20 bp, Artificial Sequence
  Description of Artificial Sequence: Synthetic oligonucleotide
  Target: LAMA2; (+) strand; PAM type: YTN; PAM sequence: TTT
ttagaaatcatgacttagct

SEQ ID NO: 325065 - DNA, 20 bp, Artificial Sequence
  Description of Artificial Sequence: Synthetic oligonucleotide
  Target: LAMA2; (+) strand; PAM type: YTN; PAM sequence: TTT
tagaaatcatgacttagcta

SEQ ID NO: 325066 - DNA, 20 bp, Artificial Sequence
  Description of Artificial Sequence: Synthetic oligonucleotide
  Target: LAMA2; (+) strand; PAM type: YTN; PAM sequence: TTT
agaaatcatgacttagctac

SEQ ID NO: 325067 - DNA, 20 bp, Artificial Sequence
  Description of Artificial Sequence: Synthetic oligonucleotide
  Target: LAMA2; (+) strand; PAM type: YTN; PAM sequence: TTA
gaaatcatgacttagctact

SEQ ID NO: 325068 - DNA, 20 bp, Artificial Sequence
  Description of Artificial Sequence: Synthetic oligonucleotide
  Target: LAMA2; (+) strand; PAM type: YTN; PAM sequence: CTT
agctacttatactccatctt

SEQ ID NO: 325069 - DNA, 20 bp, Artificial Sequence
  Description of Artificial Sequence: Synthetic oligonucleotide
  Target: LAMA2; (+) strand; PAM type: YTN; PAM sequence: TTA
gctacttatactccatcttc

SEQ ID NO: 325070 - DNA, 20 bp, Artificial Sequence
  Description of Artificial Sequence: Synthetic oligonucleotide
  Target: LAMA2; (+) strand; PAM type: YTN; PAM sequence: CTA
cttatactccatcttcagtg

SEQ ID NO: 325071 - DNA, 20 bp, Artificial Sequence
  Description of Artificial Sequence: Synthetic oligonucleotide
  Target: LAMA2; (+) strand; PAM type: YTN; PAM sequence: CTT
atactccatcttcagtgctt

SEQ ID NO: 325072 - DNA, 20 bp, Artificial Sequence
  Description of Artificial Sequence: Synthetic oligonucleotide
  Target: LAMA2; (+) strand; PAM type: YTN; PAM sequence: TTA
tactccatcttcagtgctta

SEQ ID NO: 325073 - DNA, 20 bp, Artificial Sequence
  Description of Artificial Sequence: Synthetic oligonucleotide
  Target: LAMA2; (+) strand; PAM type: YTN; PAM sequence: CTC
catcttcagtgcttatcctt

SEQ ID NO: 325074 - DNA, 20 bp, Artificial Sequence
  Description of Artificial Sequence: Synthetic oligonucleotide
  Target: LAMA2; (+) strand; PAM type: YTN; PAM sequence: CTT
cagtgcttatccttctaatg

SEQ ID NO: 325075 - DNA, 20 bp, Artificial Sequence
  Description of Artificial Sequence: Synthetic oligonucleotide
  Target: LAMA2; (+) strand; PAM type: YTN; PAM sequence: TTC
agtgcttatccttctaatgt

SEQ ID NO: 325076 - DNA, 20 bp, Artificial Sequence
  Description of Artificial Sequence: Synthetic oligonucleotide
  Target: LAMA2; (+) strand; PAM type: YTN; PAM sequence: CTT
atccttctaatgtaatacta

SEQ ID NO: 325077 - DNA, 20 bp, Artificial Sequence
  Description of Artificial Sequence: Synthetic oligonucleotide
  Target: LAMA2; (+) strand; PAM type: YTN; PAM sequence: TTA
tccttctaatgtaatactat

SEQ ID NO: 325078 - DNA, 20 bp, Artificial Sequence
  Description of Artificial Sequence: Synthetic oligonucleotide
  Target: LAMA2; (+) strand; PAM type: YTN; PAM sequence: CTT
ctaatgtaatactatcataa

SEQ ID NO: 325079 - DNA, 20 bp, Artificial Sequence
  Description of Artificial Sequence: Synthetic oligonucleotide
  Target: LAMA2; (+) strand; PAM type: YTN; PAM sequence: TTC
taatgtaatactatcataat

SEQ ID NO: 325080 - DNA, 20 bp, Artificial Sequence
  Description of Artificial Sequence: Synthetic oligonucleotide
  Target: LAMA2; (+) strand; PAM type: YTN; PAM sequence: CTA
atgtaatactatcataattt

SEQ ID NO: 325081 - DNA, 20 bp, Artificial Sequence
  Description of Artificial Sequence: Synthetic oligonucleotide
  Target: LAMA2; (+) strand; PAM type: YTN; PAM sequence: CTA
tcataattttatttaaatac

SEQ ID NO: 325082 - DNA, 20 bp, Artificial Sequence
  Description of Artificial Sequence: Synthetic oligonucleotide
  Target: LAMA2; (+) strand; PAM type: YTN; PAM sequence: TTT
tatttaaatactatatgtct

SEQ ID NO: 325083 - DNA, 20 bp, Artificial Sequence
  Description of Artificial Sequence: Synthetic oligonucleotide
  Target: LAMA2; (+) strand; PAM type: YTN; PAM sequence: TTT
atttaaatactatatgtctt

SEQ ID NO: 325084 - DNA, 20 bp, Artificial Sequence
  Description of Artificial Sequence: Synthetic oligonucleotide
  Target: LAMA2; (+) strand; PAM type: YTN; PAM sequence: TTA
tttaaatactatatgtcttt

SEQ ID NO: 325085 - DNA, 20 bp, Artificial Sequence
  Description of Artificial Sequence: Synthetic oligonucleotide
  Target: LAMA2; (+) strand; PAM type: YTN; PAM sequence: TTT
aaatactatatgtcttttat

SEQ ID NO: 325086 - DNA, 20 bp, Artificial Sequence
  Description of Artificial Sequence: Synthetic oligonucleotide
  Target: LAMA2; (+) strand; PAM type: YTN; PAM sequence: TTA
aatactatatgtcttttatg

SEQ ID NO: 325087 - DNA, 20 bp, Artificial Sequence
  Description of Artificial Sequence: Synthetic oligonucleotide
  Target: LAMA2; (+) strand; PAM type: YTN; PAM sequence: CTA
tatgtcttttatgacgtaaa

SEQ ID NO: 325088 - DNA, 20 bp, Artificial Sequence
  Description of Artificial Sequence: Synthetic oligonucleotide
  Target: LAMA2; (+) strand; PAM type: YTN; PAM sequence: CTT
ttatgacgtaaatattgtct

SEQ ID NO: 325089 - DNA, 20 bp, Artificial Sequence
  Description of Artificial Sequence: Synthetic oligonucleotide
  Target: LAMA2; (+) strand; PAM type: YTN; PAM sequence: TTT
tatgacgtaaatattgtcta

SEQ ID NO: 325090 - DNA, 20 bp, Artificial Sequence
  Description of Artificial Sequence: Synthetic oligonucleotide
  Target: LAMA2; (+) strand; PAM type: YTN; PAM sequence: TTT
atgacgtaaatattgtctaa

SEQ ID NO: 325091 - DNA, 20 bp, Artificial Sequence
  Description of Artificial Sequence: Synthetic oligonucleotide
  Target: LAMA2; (+) strand; PAM type: YTN; PAM sequence: TTA
tgacgtaaatattgtctaat

SEQ ID NO: 325092 - DNA, 20 bp, Artificial Sequence
  Description of Artificial Sequence: Synthetic oligonucleotide
  Target: LAMA2; (+) strand; PAM type: YTN; PAM sequence: TTG
tctaatactaaaacatctac

SEQ ID NO: 325093 - DNA, 20 bp, Artificial Sequence
  Description of Artificial Sequence: Synthetic oligonucleotide
  Target: LAMA2; (+) strand; PAM type: YTN; PAM sequence: CTA
atactaaaacatctactatt

SEQ ID NO: 325094 - DNA, 20 bp, Artificial Sequence
  Description of Artificial Sequence: Synthetic oligonucleotide
  Target: LAMA2; (+) strand; PAM type: YTN; PAM sequence: CTA
aaacatctactattccatgt

SEQ ID NO: 325095 - DNA, 20 bp, Artificial Sequence
  Description of Artificial Sequence: Synthetic oligonucleotide
  Target: LAMA2; (+) strand; PAM type: YTN; PAM sequence: CTA
ctattccatgtttctgtgtt

SEQ ID NO: 325096 - DNA, 20 bp, Artificial Sequence
  Description of Artificial Sequence: Synthetic oligonucleotide
  Target: LAMA2; (+) strand; PAM type: YTN; PAM sequence: CTA
ttccatgtttctgtgtttta

SEQ ID NO: 325097 - DNA, 20 bp, Artificial Sequence
  Description of Artificial Sequence: Synthetic oligonucleotide
  Target: LAMA2; (+) strand; PAM type: YTN; PAM sequence: TTC
catgtttctgtgttttatct

SEQ ID NO: 325098 - DNA, 20 bp, Artificial Sequence
  Description of Artificial Sequence: Synthetic oligonucleotide
  Target: LAMA2; (+) strand; PAM type: YTN; PAM sequence: TTT
ctgtgttttatcttaagagg

SEQ ID NO: 325099 - DNA, 20 bp, Artificial Sequence
  Description of Artificial Sequence: Synthetic oligonucleotide
  Target: LAMA2; (+) strand; PAM type: YTN; PAM sequence: TTC
tgtgttttatcttaagaggt

SEQ ID NO: 325100 - DNA, 20 bp, Artificial Sequence
  Description of Artificial Sequence: Synthetic oligonucleotide
  Target: LAMA2; (+) strand; PAM type: YTN; PAM sequence: CTG
tgttttatcttaagaggtta

SEQ ID NO: 325101 - DNA, 20 bp, Artificial Sequence
  Description of Artificial Sequence: Synthetic oligonucleotide
  Target: LAMA2; (+) strand; PAM type: YTN; PAM sequence: TTT
tatcttaagaggttaatttt

SEQ ID NO: 325102 - DNA, 20 bp, Artificial Sequence
  Description of Artificial Sequence: Synthetic oligonucleotide
  Target: LAMA2; (+) strand; PAM type: YTN; PAM sequence: TTT
atcttaagaggttaatttta

SEQ ID NO: 325103 - DNA, 20 bp, Artificial Sequence
  Description of Artificial Sequence: Synthetic oligonucleotide
  Target: LAMA2; (+) strand; PAM type: YTN; PAM sequence: TTA
tcttaagaggttaattttat

SEQ ID NO: 325104 - DNA, 20 bp, Artificial Sequence
  Description of Artificial Sequence: Synthetic oligonucleotide
  Target: LAMA2; (+) strand; PAM type: YTN; PAM sequence: CTT
aagaggttaattttatttgt

SEQ ID NO: 325105 - DNA, 20 bp, Artificial Sequence
  Description of Artificial Sequence: Synthetic oligonucleotide
  Target: LAMA2; (+) strand; PAM type: YTN; PAM sequence: TTA
agaggttaattttatttgtt

SEQ ID NO: 325106 - DNA, 20 bp, Artificial Sequence
  Description of Artificial Sequence: Synthetic oligonucleotide
  Target: LAMA2; (+) strand; PAM type: YTN; PAM sequence: TTA
attttatttgtttatttttc

SEQ ID NO: 325107 - DNA, 20 bp, Artificial Sequence
  Description of Artificial Sequence: Synthetic oligonucleotide
  Target: LAMA2; (+) strand; PAM type: YTN; PAM sequence: TTT
tatttgtttatttttcctgg

SEQ ID NO: 325108 - DNA, 20 bp, Artificial Sequence
  Description of Artificial Sequence: Synthetic oligonucleotide
  Target: LAMA2; (+) strand; PAM type: YTN; PAM sequence: TTT
atttgtttatttttcctggg

SEQ ID NO: 325109 - DNA, 20 bp, Artificial Sequence
  Description of Artificial Sequence: Synthetic oligonucleotide
  Target: LAMA2; (+) strand; PAM type: YTN; PAM sequence: TTA
tttgtttatttttcctgggt

SEQ ID NO: 325110 - DNA, 20 bp, Artificial Sequence
  Description of Artificial Sequence: Synthetic oligonucleotide
  Target: LAMA2; (+) strand; PAM type: YTN; PAM sequence: TTT
gtttatttttcctgggtctt

SEQ ID NO: 325111 - DNA, 20 bp, Artificial Sequence
  Description of Artificial Sequence: Synthetic oligonucleotide
  Target: LAMA2; (+) strand; PAM type: YTN; PAM sequence: TTG
tttatttttcctgggtcttt

SEQ ID NO: 325112 - DNA, 20 bp, Artificial Sequence
  Description of Artificial Sequence: Synthetic oligonucleotide
  Target: LAMA2; (+) strand; PAM type: YTN; PAM sequence: TTT
atttttcctgggtctttagc

SEQ ID NO: 325113 - DNA, 20 bp, Artificial Sequence
  Description of Artificial Sequence: Synthetic oligonucleotide
  Target: LAMA2; (+) strand; PAM type: YTN; PAM sequence: TTA
tttttcctgggtctttagct

SEQ ID NO: 325114 - DNA, 20 bp, Artificial Sequence
  Description of Artificial Sequence: Synthetic oligonucleotide
  Target: LAMA2; (+) strand; PAM type: YTN; PAM sequence: TTT
ttcctgggtctttagctttt

SEQ ID NO: 325115 - DNA, 20 bp, Artificial Sequence
  Description of Artificial Sequence: Synthetic oligonucleotide
  Target: LAMA2; (+) strand; PAM type: YTN; PAM sequence: TTT
tcctgggtctttagcttttc

SEQ ID NO: 325116 - DNA, 20 bp, Artificial Sequence
  Description of Artificial Sequence: Synthetic oligonucleotide
  Target: LAMA2; (+) strand; PAM type: YTN; PAM sequence: TTT
cctgggtctttagcttttct

SEQ ID NO: 325117 - DNA, 20 bp, Artificial Sequence
  Description of Artificial Sequence: Synthetic oligonucleotide
  Target: LAMA2; (+) strand; PAM type: YTN; PAM sequence: TTC
ctgggtctttagcttttctt

SEQ ID NO: 325118 - DNA, 20 bp, Artificial Sequence
  Description of Artificial Sequence: Synthetic oligonucleotide
  Target: LAMA2; (+) strand; PAM type: YTN; PAM sequence: CTG
ggtctttagcttttcttgta

SEQ ID NO: 325119 - DNA, 20 bp, Artificial Sequence
  Description of Artificial Sequence: Synthetic oligonucleotide
  Target: LAMA2; (+) strand; PAM type: YTN; PAM sequence: CTT
tagcttttcttgtattcttg

SEQ ID NO: 325120 - DNA, 20 bp, Artificial Sequence
  Description of Artificial Sequence: Synthetic oligonucleotide
  Target: LAMA2; (+) strand; PAM type: YTN; PAM sequence: TTT
agcttttcttgtattcttgt

SEQ ID NO: 325121 - DNA, 20 bp, Artificial Sequence
  Description of Artificial Sequence: Synthetic oligonucleotide
  Target: LAMA2; (+) strand; PAM type: YTN; PAM sequence: TTA
gcttttcttgtattcttgtc

SEQ ID NO: 325122 - DNA, 20 bp, Artificial Sequence
  Description of Artificial Sequence: Synthetic oligonucleotide
  Target: LAMA2; (+) strand; PAM type: YTN; PAM sequence: CTT
ttcttgtattcttgtcctat

SEQ ID NO: 325123 - DNA, 20 bp, Artificial Sequence
  Description of Artificial Sequence: Synthetic oligonucleotide
  Target: LAMA2; (+) strand; PAM type: YTN; PAM sequence: TTT
tcttgtattcttgtcctatt

SEQ ID NO: 325124 - DNA, 20 bp, Artificial Sequence
  Description of Artificial Sequence: Synthetic oligonucleotide
  Target: LAMA2; (+) strand; PAM type: YTN; PAM sequence: TTT
cttgtattcttgtcctattt

SEQ ID NO: 325125 - DNA, 20 bp, Artificial Sequence
  Description of Artificial Sequence: Synthetic oligonucleotide
  Target: LAMA2; (+) strand; PAM type: YTN; PAM sequence: TTC
ttgtattcttgtcctatttg

SEQ ID NO: 325126 - DNA, 20 bp, Artificial Sequence
  Description of Artificial Sequence: Synthetic oligonucleotide
  Target: LAMA2; (+) strand; PAM type: YTN; PAM sequence: CTT
gtattcttgtcctatttgcc

SEQ ID NO: 325127 - DNA, 20 bp, Artificial Sequence
  Description of Artificial Sequence: Synthetic oligonucleotide
  Target: LAMA2; (+) strand; PAM type: YTN; PAM sequence: TTG
tattcttgtcctatttgcca

SEQ ID NO: 325128 - DNA, 20 bp, Artificial Sequence
  Description of Artificial Sequence: Synthetic oligonucleotide
  Target: LAMA2; (+) strand; PAM type: YTN; PAM sequence: TTC
ttgtcctatttgccattatt

SEQ ID NO: 325129 - DNA, 20 bp, Artificial Sequence
  Description of Artificial Sequence: Synthetic oligonucleotide
  Target: LAMA2; (+) strand; PAM type: YTN; PAM sequence: CTT
gtcctatttgccattattat

SEQ ID NO: 325130 - DNA, 20 bp, Artificial Sequence
  Description of Artificial Sequence: Synthetic oligonucleotide
  Target: LAMA2; (+) strand; PAM type: YTN; PAM sequence: TTG
tcctatttgccattattata

SEQ ID NO: 325131 - DNA, 20 bp, Artificial Sequence
  Description of Artificial Sequence: Synthetic oligonucleotide
  Target: LAMA2; (+) strand; PAM type: YTN; PAM sequence: CTA
tttgccattattatattatt

SEQ ID NO: 325132 - DNA, 20 bp, Artificial Sequence
  Description of Artificial Sequence: Synthetic oligonucleotide
  Target: LAMA2; (+) strand; PAM type: YTN; PAM sequence: TTT
gccattattatattattttc

SEQ ID NO: 325133 - DNA, 20 bp, Artificial Sequence
  Description of Artificial Sequence: Synthetic oligonucleotide
  Target: LAMA2; (+) strand; PAM type: YTN; PAM sequence: TTG
ccattattatattattttcc

SEQ ID NO: 325134 - DNA, 20 bp, Artificial Sequence
  Description of Artificial Sequence: Synthetic oligonucleotide
  Target: LAMA2; (+) strand; PAM type: YTN; PAM sequence: TTA
ttatattattttcccactaa

SEQ ID NO: 325135 - DNA, 20 bp, Artificial Sequence
  Description of Artificial Sequence: Synthetic oligonucleotide
  Target: LAMA2; (+) strand; PAM type: YTN; PAM sequence: TTA
tattattttcccactaacat

SEQ ID NO: 325136 - DNA, 20 bp, Artificial Sequence
  Description of Artificial Sequence: Synthetic oligonucleotide
  Target: LAMA2; (+) strand; PAM type: YTN; PAM sequence: TTA
ttttcccactaacatttcaa

SEQ ID NO: 325137 - DNA, 20 bp, Artificial Sequence
  Description of Artificial Sequence: Synthetic oligonucleotide
  Target: LAMA2; (+) strand; PAM type: YTN; PAM sequence: TTT
tcccactaacatttcaaaat

SEQ ID NO: 325138 - DNA, 20 bp, Artificial Sequence
  Description of Artificial Sequence: Synthetic oligonucleotide
  Target: LAMA2; (+) strand; PAM type: YTN; PAM sequence: TTT
cccactaacatttcaaaata

SEQ ID NO: 325139 - DNA, 20 bp, Artificial Sequence
  Description of Artificial Sequence: Synthetic oligonucleotide
  Target: LAMA2; (+) strand; PAM type: YTN; PAM sequence: TTC
ccactaacatttcaaaatat

SEQ ID NO: 325140 - DNA, 20 bp, Artificial Sequence
  Description of Artificial Sequence: Synthetic oligonucleotide
  Target: LAMA2; (+) strand; PAM type: YTN; PAM sequence: CTA
acatttcaaaatattagtta

SEQ ID NO: 325141 - DNA, 20 bp, Artificial Sequence
  Description of Artificial Sequence: Synthetic oligonucleotide
  Target: LAMA2; (+) strand; PAM type: YTN; PAM sequence: TTT
caaaatattagttattctaa

SEQ ID NO: 325142 - DNA, 20 bp, Artificial Sequence
  Description of Artificial Sequence: Synthetic oligonucleotide
  Target: LAMA2; (+) strand; PAM type: YTN; PAM sequence: TTC
aaaatattagttattctaaa

SEQ ID NO: 325143 - DNA, 20 bp, Artificial Sequence
  Description of Artificial Sequence: Synthetic oligonucleotide
  Target: LAMA2; (+) strand; PAM type: YTN; PAM sequence: TTA
gttattctaaatagtctgac

SEQ ID NO: 325144 - DNA, 20 bp, Artificial Sequence
  Description of Artificial Sequence: Synthetic oligonucleotide
  Target: LAMA2; (+) strand; PAM type: YTN; PAM sequence: TTA
ttctaaatagtctgactttt

SEQ ID NO: 325145 - DNA, 20 bp, Artificial Sequence
  Description of Artificial Sequence: Synthetic oligonucleotide
  Target: LAMA2; (+) strand; PAM type: YTN; PAM sequence: TTC
taaatagtctgacttttctt

SEQ ID NO: 325146 - DNA, 20 bp, Artificial Sequence
  Description of Artificial Sequence: Synthetic oligonucleotide
  Target: LAMA2; (+) strand; PAM type: YTN; PAM sequence: CTA
aatagtctgacttttcttta

SEQ ID NO: 325147 - DNA, 20 bp, Artificial Sequence
  Description of Artificial Sequence: Synthetic oligonucleotide
  Target: LAMA2; (+) strand; PAM type: YTN; PAM sequence: CTG
acttttctttagagttcttc

SEQ ID NO: 325148 - DNA, 20 bp, Artificial Sequence
  Description of Artificial Sequence: Synthetic oligonucleotide
  Target: LAMA2; (+) strand; PAM type: YTN; PAM sequence: CTT
ttctttagagttcttcactc

SEQ ID NO: 325149 - DNA, 20 bp, Artificial Sequence
  Description of Artificial Sequence: Synthetic oligonucleotide
  Target: LAMA2; (+) strand; PAM type: YTN; PAM sequence: TTT
tctttagagttcttcactca

SEQ ID NO: 325150 - DNA, 20 bp, Artificial Sequence
  Description of Artificial Sequence: Synthetic oligonucleotide
  Target: LAMA2; (+) strand; PAM type: YTN; PAM sequence: TTT
ctttagagttcttcactcaa

SEQ ID NO: 325151 - DNA, 20 bp, Artificial Sequence
  Description of Artificial Sequence: Synthetic oligonucleotide
  Target: LAMA2; (+) strand; PAM type: YTN; PAM sequence: TTC
tttagagttcttcactcaaa

SEQ ID NO: 325152 - DNA, 20 bp, Artificial Sequence
  Description of Artificial Sequence: Synthetic oligonucleotide
  Target: LAMA2; (+) strand; PAM type: YTN; PAM sequence: CTT
tagagttcttcactcaaagt

SEQ ID NO: 325153 - DNA, 20 bp, Artificial Sequence
  Description of Artificial Sequence: Synthetic oligonucleotide
  Target: LAMA2; (+) strand; PAM type: YTN; PAM sequence: TTT
agagttcttcactcaaagtc

SEQ ID NO: 325154 - DNA, 20 bp, Artificial Sequence
  Description of Artificial Sequence: Synthetic oligonucleotide
  Target: LAMA2; (+) strand; PAM type: YTN; PAM sequence: TTA
gagttcttcactcaaagtcc

SEQ ID NO: 325155 - DNA, 20 bp, Artificial Sequence
  Description of Artificial Sequence: Synthetic oligonucleotide
  Target: LAMA2; (+) strand; PAM type: YTN; PAM sequence: TTC
ttcactcaaagtcctctatg

SEQ ID NO: 325156 - DNA, 20 bp, Artificial Sequence
  Description of Artificial Sequence: Synthetic oligonucleotide
  Target: LAMA2; (+) strand; PAM type: YTN; PAM sequence: CTT
cactcaaagtcctctatgtt

SEQ ID NO: 325157 - DNA, 20 bp, Artificial Sequence
  Description of Artificial Sequence: Synthetic oligonucleotide
  Target: LAMA2; (+) strand; PAM type: YTN; PAM sequence: TTC
actcaaagtcctctatgttc

SEQ ID NO: 325158 - DNA, 20 bp, Artificial Sequence
  Description of Artificial Sequence: Synthetic oligonucleotide
  Target: LAMA2; (+) strand; PAM type: YTN; PAM sequence: CTC
aaagtcctctatgttctgcc

SEQ ID NO: 325159 - DNA, 20 bp, Artificial Sequence
  Description of Artificial Sequence: Synthetic oligonucleotide
  Target: LAMA2; (+) strand; PAM type: YTN; PAM sequence: CTC
tatgttctgcctgaattagg

SEQ ID NO: 325160 - DNA, 20 bp, Artificial Sequence
  Description of Artificial Sequence: Synthetic oligonucleotide
  Target: LAMA2; (+) strand; PAM type: YTN; PAM sequence: CTA
tgttctgcctgaattaggat

SEQ ID NO: 325161 - DNA, 20 bp, Artificial Sequence
  Description of Artificial Sequence: Synthetic oligonucleotide
  Target: LAMA2; (+) strand; PAM type: YTN; PAM sequence: TTC
tgcctgaattaggattgatt

SEQ ID NO: 325162 - DNA, 20 bp, Artificial Sequence
  Description of Artificial Sequence: Synthetic oligonucleotide
  Target: LAMA2; (+) strand; PAM type: YTN; PAM sequence: CTG
cctgaattaggattgattat

SEQ ID NO: 325163 - DNA, 20 bp, Artificial Sequence
  Description of Artificial Sequence: Synthetic oligonucleotide
  Target: LAMA2; (+) strand; PAM type: YTN; PAM sequence: CTG
aattaggattgattattccc

SEQ ID NO: 325164 - DNA, 20 bp, Artificial Sequence
  Description of Artificial Sequence: Synthetic oligonucleotide
  Target: LAMA2; (+) strand; PAM type: YTN; PAM sequence: TTA
ggattgattattccctatgc

SEQ ID NO: 325165 - DNA, 20 bp, Artificial Sequence
  Description of Artificial Sequence: Synthetic oligonucleotide
  Target: LAMA2; (+) strand; PAM type: YTN; PAM sequence: TTG
attattccctatgcccactg

SEQ ID NO: 325166 - DNA, 20 bp, Artificial Sequence
  Description of Artificial Sequence: Synthetic oligonucleotide
  Target: LAMA2; (+) strand; PAM type: YTN; PAM sequence: TTA
ttccctatgcccactgtact

SEQ ID NO: 325167 - DNA, 20 bp, Artificial Sequence
  Description of Artificial Sequence: Synthetic oligonucleotide
  Target: LAMA2; (+) strand; PAM type: YTN; PAM sequence: TTC
cctatgcccactgtactgtt

SEQ ID NO: 325168 - DNA, 20 bp, Artificial Sequence
  Description of Artificial Sequence: Synthetic oligonucleotide
  Target: LAMA2; (+) strand; PAM type: YTN; PAM sequence: CTA
tgcccactgtactgtttttc

SEQ ID NO: 325169 - DNA, 20 bp, Artificial Sequence
  Description of Artificial Sequence: Synthetic oligonucleotide
  Target: LAMA2; (+) strand; PAM type: YTN; PAM sequence: CTG
tactgtttttctacattgga

SEQ ID NO: 325170 - DNA, 20 bp, Artificial Sequence
  Description of Artificial Sequence: Synthetic oligonucleotide
  Target: LAMA2; (+) strand; PAM type: YTN; PAM sequence: CTG
tttttctacattggatctac

SEQ ID NO: 325171 - DNA, 20 bp, Artificial Sequence
  Description of Artificial Sequence: Synthetic oligonucleotide
  Target: LAMA2; (+) strand; PAM type: YTN; PAM sequence: TTT
ttctacattggatctacctt

SEQ ID NO: 325172 - DNA, 20 bp, Artificial Sequence
  Description of Artificial Sequence: Synthetic oligonucleotide
  Target: LAMA2; (+) strand; PAM type: YTN; PAM sequence: TTT
tctacattggatctaccttg

SEQ ID NO: 325173 - DNA, 20 bp, Artificial Sequence
  Description of Artificial Sequence: Synthetic oligonucleotide
  Target: LAMA2; (+) strand; PAM type: YTN; PAM sequence: TTT
ctacattggatctaccttgt

SEQ ID NO: 325174 - DNA, 20 bp, Artificial Sequence
  Description of Artificial Sequence: Synthetic oligonucleotide
  Target: LAMA2; (+) strand; PAM type: YTN; PAM sequence: TTC
tacattggatctaccttgtc

SEQ ID NO: 325175 - DNA, 20 bp, Artificial Sequence
  Description of Artificial Sequence: Synthetic oligonucleotide
  Target: LAMA2; (+) strand; PAM type: YTN; PAM sequence: CTA
cattggatctaccttgtcag

SEQ ID NO: 325176 - DNA, 20 bp, Artificial Sequence
  Description of Artificial Sequence: Synthetic oligonucleotide
  Target: LAMA2; (+) strand; PAM type: YTN; PAM sequence: TTG
gatctaccttgtcagggatc

SEQ ID NO: 325177 - DNA, 20 bp, Artificial Sequence
  Description of Artificial Sequence: Synthetic oligonucleotide
  Target: LAMA2; (+) strand; PAM type: YTN; PAM sequence: CTA
ccttgtcagggatccacacc

SEQ ID NO: 325178 - DNA, 20 bp, Artificial Sequence
  Description of Artificial Sequence: Synthetic oligonucleotide
  Target: LAMA2; (+) strand; PAM type: YTN; PAM sequence: CTT
gtcagggatccacaccttcc

SEQ ID NO: 325179 - DNA, 20 bp, Artificial Sequence
  Description of Artificial Sequence: Synthetic oligonucleotide
  Target: LAMA2; (+) strand; PAM type: YTN; PAM sequence: TTG
tcagggatccacaccttcct

SEQ ID NO: 325180 - DNA, 20 bp, Artificial Sequence
  Description of Artificial Sequence: Synthetic oligonucleotide
  Target: LAMA2; (+) strand; PAM type: YTN; PAM sequence: CTT
cctctttcttggtttacttt

SEQ ID NO: 325181 - DNA, 20 bp, Artificial Sequence
  Description of Artificial Sequence: Synthetic oligonucleotide
  Target: LAMA2; (+) strand; PAM type: YTN; PAM sequence: TTC
ctctttcttggtttactttc

SEQ ID NO: 325182 - DNA, 20 bp, Artificial Sequence
  Description of Artificial Sequence: Synthetic oligonucleotide
  Target: LAMA2; (+) strand; PAM type: YTN; PAM sequence: CTC
tttcttggtttactttctca

SEQ ID NO: 325183 - DNA, 20 bp, Artificial Sequence
  Description of Artificial Sequence: Synthetic oligonucleotide
  Target: LAMA2; (+) strand; PAM type: YTN; PAM sequence: CTT
tcttggtttactttctcatt

SEQ ID NO: 325184 - DNA, 20 bp, Artificial Sequence
  Description of Artificial Sequence: Synthetic oligonucleotide
  Target: LAMA2; (+) strand; PAM type: YTN; PAM sequence: TTT
cttggtttactttctcattt

SEQ ID NO: 325185 - DNA, 20 bp, Artificial Sequence
  Description of Artificial Sequence: Synthetic oligonucleotide
  Target: LAMA2; (+) strand; PAM type: YTN; PAM sequence: TTC
ttggtttactttctcatttt

SEQ ID NO: 325186 - DNA, 20 bp, Artificial Sequence
  Description of Artificial Sequence: Synthetic oligonucleotide
  Target: LAMA2; (+) strand; PAM type: YTN; PAM sequence: CTT
ggtttactttctcattttgc

SEQ ID NO: 325187 - DNA, 20 bp, Artificial Sequence
  Description of Artificial Sequence: Synthetic oligonucleotide
  Target: LAMA2; (+) strand; PAM type: YTN; PAM sequence: TTG
gtttactttctcattttgct

SEQ ID NO: 325188 - DNA, 20 bp, Artificial Sequence
  Description of Artificial Sequence: Synthetic oligonucleotide
  Target: LAMA2; (+) strand; PAM type: YTN; PAM sequence: TTT
actttctcattttgctggag

SEQ ID NO: 325189 - DNA, 20 bp, Artificial Sequence
  Description of Artificial Sequence: Synthetic oligonucleotide
  Target: LAMA2; (+) strand; PAM type: YTN; PAM sequence: TTA
ctttctcattttgctggagc

SEQ ID NO: 325190 - DNA, 20 bp, Artificial Sequence
  Description of Artificial Sequence: Synthetic oligonucleotide
  Target: LAMA2; (+) strand; PAM type: YTN; PAM sequence: CTT
tctcattttgctggagcaca

SEQ ID NO: 325191 - DNA, 20 bp, Artificial Sequence
  Description of Artificial Sequence: Synthetic oligonucleotide
  Target: LAMA2; (+) strand; PAM type: YTN; PAM sequence: TTT
ctcattttgctggagcacat

SEQ ID NO: 325192 - DNA, 20 bp, Artificial Sequence
  Description of Artificial Sequence: Synthetic oligonucleotide
  Target: LAMA2; (+) strand; PAM type: YTN; PAM sequence: TTC
tcattttgctggagcacatc

SEQ ID NO: 325193 - DNA, 20 bp, Artificial Sequence
  Description of Artificial Sequence: Synthetic oligonucleotide
  Target: LAMA2; (+) strand; PAM type: YTN; PAM sequence: CTC
attttgctggagcacatcct

SEQ ID NO: 325194 - DNA, 20 bp, Artificial Sequence
  Description of Artificial Sequence: Synthetic oligonucleotide
  Target: LAMA2; (+) strand; PAM type: YTN; PAM sequence: TTT
tgctggagcacatcctcaaa

SEQ ID NO: 325195 - DNA, 20 bp, Artificial Sequence
  Description of Artificial Sequence: Synthetic oligonucleotide
  Target: LAMA2; (+) strand; PAM type: YTN; PAM sequence: TTT
gctggagcacatcctcaaat

SEQ ID NO: 325196 - DNA, 20 bp, Artificial Sequence
  Description of Artificial Sequence: Synthetic oligonucleotide
  Target: LAMA2; (+) strand; PAM type: YTN; PAM sequence: TTG
ctggagcacatcctcaaatg

SEQ ID NO: 325197 - DNA, 20 bp, Artificial Sequence
  Description of Artificial Sequence: Synthetic oligonucleotide
  Target: LAMA2; (+) strand; PAM type: YTN; PAM sequence: CTG
gagcacatcctcaaatggct

SEQ ID NO: 325198 - DNA, 20 bp, Artificial Sequence
  Description of Artificial Sequence: Synthetic oligonucleotide
  Target: LAMA2; (+) strand; PAM type: YTN; PAM sequence: CTC
aaatggcttcttaagaaata

SEQ ID NO: 325199 - DNA, 20 bp, Artificial Sequence
  Description of Artificial Sequence: Synthetic oligonucleotide
  Target: LAMA2; (+) strand; PAM type: YTN; PAM sequence: CTT
cttaagaaatattacatggg

SEQ ID NO: 325200 - DNA, 20 bp, Artificial Sequence
  Description of Artificial Sequence: Synthetic oligonucleotide
  Target: LAMA2; (+) strand; PAM type: YTN; PAM sequence: TTC
ttaagaaatattacatgggc

SEQ ID NO: 325201 - DNA, 20 bp, Artificial Sequence
  Description of Artificial Sequence: Synthetic oligonucleotide
  Target: LAMA2; (+) strand; PAM type: YTN; PAM sequence: CTT
aagaaatattacatgggcag

SEQ ID NO: 325202 - DNA, 20 bp, Artificial Sequence
  Description of Artificial Sequence: Synthetic oligonucleotide
  Target: LAMA2; (+) strand; PAM type: YTN; PAM sequence: TTA
agaaatattacatgggcagt

SEQ ID NO: 325203 - DNA, 20 bp, Artificial Sequence
  Description of Artificial Sequence: Synthetic oligonucleotide
  Target: LAMA2; (+) strand; PAM type: YTN; PAM sequence: TTA
catgggcagtgaattttctg

SEQ ID NO: 325204 - DNA, 20 bp, Artificial Sequence
  Description of Artificial Sequence: Synthetic oligonucleotide
  Target: LAMA2; (+) strand; PAM type: YTN; PAM sequence: TTT
tctgagtccttccagtttaa

SEQ ID NO: 325205 - DNA, 20 bp, Artificial Sequence
  Description of Artificial Sequence: Synthetic oligonucleotide
  Target: LAMA2; (+) strand; PAM type: YTN; PAM sequence: TTT
ctgagtccttccagtttaac

SEQ ID NO: 325206 - DNA, 20 bp, Artificial Sequence
  Description of Artificial Sequence: Synthetic oligonucleotide
  Target: LAMA2; (+) strand; PAM type: YTN; PAM sequence: TTC
tgagtccttccagtttaact

SEQ ID NO: 325207 - DNA, 20 bp, Artificial Sequence
  Description of Artificial Sequence: Synthetic oligonucleotide
  Target: LAMA2; (+) strand; PAM type: YTN; PAM sequence: CTG
agtccttccagtttaactca

SEQ ID NO: 325208 - DNA, 20 bp, Artificial Sequence
  Description of Artificial Sequence: Synthetic oligonucleotide
  Target: LAMA2; (+) strand; PAM type: YTN; PAM sequence: CTT
ccagtttaactcattgcaat

SEQ ID NO: 325209 - DNA, 20 bp, Artificial Sequence
  Description of Artificial Sequence: Synthetic oligonucleotide
  Target: LAMA2; (+) strand; PAM type: YTN; PAM sequence: TTC
cagtttaactcattgcaata

SEQ ID NO: 325210 - DNA, 20 bp, Artificial Sequence
  Description of Artificial Sequence: Synthetic oligonucleotide
  Target: LAMA2; (+) strand; PAM type: YTN; PAM sequence: TTT
aactcattgcaatatacaaa

SEQ ID NO: 325211 - DNA, 20 bp, Artificial Sequence
  Description of Artificial Sequence: Synthetic oligonucleotide
  Target: LAMA2; (+) strand; PAM type: YTN; PAM sequence: TTA
actcattgcaatatacaaaa

SEQ ID NO: 325212 - DNA, 20 bp, Artificial Sequence
  Description of Artificial Sequence: Synthetic oligonucleotide
  Target: LAMA2; (+) strand; PAM type: YTN; PAM sequence: CTC
attgcaatatacaaaatggc

SEQ ID NO: 325213 - DNA, 20 bp, Artificial Sequence
  Description of Artificial Sequence: Synthetic oligonucleotide
  Target: LAMA2; (+) strand; PAM type: YTN; PAM sequence: TTG
caatatacaaaatggcaggc

SEQ ID NO: 325214 - DNA, 20 bp, Artificial Sequence
  Description of Artificial Sequence: Synthetic oligonucleotide
  Target: LAMA2; (+) strand; PAM type: YTN; PAM sequence: TTC
aatttatatacttattcctt

SEQ ID NO: 325215 - DNA, 20 bp, Artificial Sequence
  Description of Artificial Sequence: Synthetic oligonucleotide
  Target: LAMA2; (+) strand; PAM type: YTN; PAM sequence: TTT
atatacttattccttcaagt

SEQ ID NO: 325216 - DNA, 20 bp, Artificial Sequence
  Description of Artificial Sequence: Synthetic oligonucleotide
  Target: LAMA2; (+) strand; PAM type: YTN; PAM sequence: TTA
tatacttattccttcaagtt

SEQ ID NO: 325217 - DNA, 20 bp, Artificial Sequence
  Description of Artificial Sequence: Synthetic oligonucleotide
  Target: LAMA2; (+) strand; PAM type: YTN; PAM sequence: CTT
attccttcaagttttggtaa

SEQ ID NO: 325218 - DNA, 20 bp, Artificial Sequence
  Description of Artificial Sequence: Synthetic oligonucleotide
  Target: LAMA2; (+) strand; PAM type: YTN; PAM sequence: TTA
ttccttcaagttttggtaat

SEQ ID NO: 325219 - DNA, 20 bp, Artificial Sequence
  Description of Artificial Sequence: Synthetic oligonucleotide
  Target: LAMA2; (+) strand; PAM type: YTN; PAM sequence: TTC
cttcaagttttggtaattta

SEQ ID NO: 325220 - DNA, 20 bp, Artificial Sequence
  Description of Artificial Sequence: Synthetic oligonucleotide
  Target: LAMA2; (+) strand; PAM type: YTN; PAM sequence: CTT
caagttttggtaatttatct

SEQ ID NO: 325221 - DNA, 20 bp, Artificial Sequence
  Description of Artificial Sequence: Synthetic oligonucleotide
  Target: LAMA2; (+) strand; PAM type: YTN; PAM sequence: TTC
aagttttggtaatttatctg

SEQ ID NO: 325222 - DNA, 20 bp, Artificial Sequence
  Description of Artificial Sequence: Synthetic oligonucleotide
  Target: LAMA2; (+) strand; PAM type: YTN; PAM sequence: TTT
tggtaatttatctgcattat

SEQ ID NO: 325223 - DNA, 20 bp, Artificial Sequence
  Description of Artificial Sequence: Synthetic oligonucleotide
  Target: LAMA2; (+) strand; PAM type: YTN; PAM sequence: TTT
ggtaatttatctgcattatt

SEQ ID NO: 325224 - DNA, 20 bp, Artificial Sequence
  Description of Artificial Sequence: Synthetic oligonucleotide
  Target: LAMA2; (+) strand; PAM type: YTN; PAM sequence: TTG
gtaatttatctgcattatta

SEQ ID NO: 325225 - DNA, 20 bp, Artificial Sequence
  Description of Artificial Sequence: Synthetic oligonucleotide
  Target: LAMA2; (+) strand; PAM type: YTN; PAM sequence: TTT
atctgcattattattaaata

SEQ ID NO: 325226 - DNA, 20 bp, Artificial Sequence
  Description of Artificial Sequence: Synthetic oligonucleotide
  Target: LAMA2; (+) strand; PAM type: YTN; PAM sequence: TTA
tctgcattattattaaataa

SEQ ID NO: 325227 - DNA, 20 bp, Artificial Sequence
  Description of Artificial Sequence: Synthetic oligonucleotide
  Target: LAMA2; (+) strand; PAM type: YTN; PAM sequence: CTG
cattattattaaataatata

SEQ ID NO: 325228 - DNA, 20 bp, Artificial Sequence
  Description of Artificial Sequence: Synthetic oligonucleotide
  Target: LAMA2; (+) strand; PAM type: YTN; PAM sequence: TTA
ttattaaataatatattaat

SEQ ID NO: 325229 - DNA, 20 bp, Artificial Sequence
  Description of Artificial Sequence: Synthetic oligonucleotide
  Target: LAMA2; (+) strand; PAM type: YTN; PAM sequence: TTA
ttaaataatatattaatata

SEQ ID NO: 325230 - DNA, 20 bp, Artificial Sequence
  Description of Artificial Sequence: Synthetic oligonucleotide
  Target: LAMA2; (+) strand; PAM type: YTN; PAM sequence: TTA
aataatatattaatatatta

SEQ ID NO: 325231 - DNA, 20 bp, Artificial Sequence
  Description of Artificial Sequence: Synthetic oligonucleotide
  Target: LAMA2; (+) strand; PAM type: YTN; PAM sequence: TTA
atatattacttaaaatataa

SEQ ID NO: 325232 - DNA, 20 bp, Artificial Sequence
  Description of Artificial Sequence: Synthetic oligonucleotide
  Target: LAMA2; (+) strand; PAM type: YTN; PAM sequence: TTA
cttaaaatataaattaaaac

SEQ ID NO: 325233 - DNA, 20 bp, Artificial Sequence
  Description of Artificial Sequence: Synthetic oligonucleotide
  Target: LAMA2; (+) strand; PAM type: YTN; PAM sequence: CTT
aaaatataaattaaaacata

SEQ ID NO: 325234 - DNA, 20 bp, Artificial Sequence
  Description of Artificial Sequence: Synthetic oligonucleotide
  Target: LAMA2; (+) strand; PAM type: YTN; PAM sequence: TTA
aaatataaattaaaacataa

SEQ ID NO: 325235 - DNA, 20 bp, Artificial Sequence
  Description of Artificial Sequence: Synthetic oligonucleotide
  Target: LAMA2; (+) strand; PAM type: YTN; PAM sequence: TTA
aaacataaattccttctaat

SEQ ID NO: 325236 - DNA, 20 bp, Artificial Sequence
  Description of Artificial Sequence: Synthetic oligonucleotide
  Target: LAMA2; (+) strand; PAM type: YTN; PAM sequence: TTC
cttctaatttctccagtcta

SEQ ID NO: 325237 - DNA, 20 bp, Artificial Sequence
  Description of Artificial Sequence: Synthetic oligonucleotide
  Target: LAMA2; (+) strand; PAM type: YTN; PAM sequence: CTT
ctaatttctccagtctactt

SEQ ID NO: 325238 - DNA, 20 bp, Artificial Sequence
  Description of Artificial Sequence: Synthetic oligonucleotide
  Target: LAMA2; (+) strand; PAM type: YTN; PAM sequence: TTC
taatttctccagtctacttt

SEQ ID NO: 325239 - DNA, 20 bp, Artificial Sequence
  Description of Artificial Sequence: Synthetic oligonucleotide
  Target: LAMA2; (+) strand; PAM type: YTN; PAM sequence: CTA
atttctccagtctacttttt

SEQ ID NO: 325240 - DNA, 20 bp, Artificial Sequence
  Description of Artificial Sequence: Synthetic oligonucleotide
  Target: LAMA2; (+) strand; PAM type: YTN; PAM sequence: TTT
ctccagtctacttttttgaa

SEQ ID NO: 325241 - DNA, 20 bp, Artificial Sequence
  Description of Artificial Sequence: Synthetic oligonucleotide
  Target: LAMA2; (+) strand; PAM type: YTN; PAM sequence: TTC
tccagtctacttttttgaaa

SEQ ID NO: 325242 - DNA, 20 bp, Artificial Sequence
  Description of Artificial Sequence: Synthetic oligonucleotide
  Target: LAMA2; (+) strand; PAM type: YTN; PAM sequence: CTC
cagtctacttttttgaaact

SEQ ID NO: 325243 - DNA, 20 bp, Artificial Sequence
  Description of Artificial Sequence: Synthetic oligonucleotide
  Target: LAMA2; (+) strand; PAM type: YTN; PAM sequence: CTA
cttttttgaaactcccatga

SEQ ID NO: 325244 - DNA, 20 bp, Artificial Sequence
  Description of Artificial Sequence: Synthetic oligonucleotide
  Target: LAMA2; (+) strand; PAM type: YTN; PAM sequence: CTT
ttttgaaactcccatgagtc

SEQ ID NO: 325245 - DNA, 20 bp, Artificial Sequence
  Description of Artificial Sequence: Synthetic oligonucleotide
  Target: LAMA2; (+) strand; PAM type: YTN; PAM sequence: TTT
tttgaaactcccatgagtca

SEQ ID NO: 325246 - DNA, 20 bp, Artificial Sequence
  Description of Artificial Sequence: Synthetic oligonucleotide
  Target: LAMA2; (+) strand; PAM type: YTN; PAM sequence: TTT
ttgaaactcccatgagtcaa

SEQ ID NO: 325247 - DNA, 20 bp, Artificial Sequence
  Description of Artificial Sequence: Synthetic oligonucleotide
  Target: LAMA2; (+) strand; PAM type: YTN; PAM sequence: TTT
tgaaactcccatgagtcaaa

SEQ ID NO: 325248 - DNA, 20 bp, Artificial Sequence
  Description of Artificial Sequence: Synthetic oligonucleotide
  Target: LAMA2; (+) strand; PAM type: YTN; PAM sequence: TTT
gaaactcccatgagtcaaat

SEQ ID NO: 325249 - DNA, 20 bp, Artificial Sequence
  Description of Artificial Sequence: Synthetic oligonucleotide
  Target: LAMA2; (+) strand; PAM type: YTN; PAM sequence: TTG
aaactcccatgagtcaaatt

SEQ ID NO: 325250 - DNA, 20 bp, Artificial Sequence
  Description of Artificial Sequence: Synthetic oligonucleotide
  Target: LAMA2; (+) strand; PAM type: YTN; PAM sequence: CTC
ccatgagtcaaatttttacc

SEQ ID NO: 325251 - DNA, 20 bp, Artificial Sequence
  Description of Artificial Sequence: Synthetic oligonucleotide
  Target: LAMA2; (+) strand; PAM type: YTN; PAM sequence: TTT
ttaccttgttgtattggtga

SEQ ID NO: 325252 - DNA, 20 bp, Artificial Sequence
  Description of Artificial Sequence: Synthetic oligonucleotide
  Target: LAMA2; (+) strand; PAM type: YTN; PAM sequence: TTT
taccttgttgtattggtgat

SEQ ID NO: 325253 - DNA, 20 bp, Artificial Sequence
  Description of Artificial Sequence: Synthetic oligonucleotide
  Target: LAMA2; (+) strand; PAM type: YTN; PAM sequence: TTT
accttgttgtattggtgatt

SEQ ID NO: 325254 - DNA, 20 bp, Artificial Sequence
  Description of Artificial Sequence: Synthetic oligonucleotide
  Target: LAMA2; (+) strand; PAM type: YTN; PAM sequence: TTA
ccttgttgtattggtgattg

SEQ ID NO: 325255 - DNA, 20 bp, Artificial Sequence
  Description of Artificial Sequence: Synthetic oligonucleotide
  Target: LAMA2; (+) strand; PAM type: YTN; PAM sequence: CTT
gttgtattggtgattgatat

SEQ ID NO: 325256 - DNA, 20 bp, Artificial Sequence
  Description of Artificial Sequence: Synthetic oligonucleotide
  Target: LAMA2; (+) strand; PAM type: YTN; PAM sequence: TTG
ttgtattggtgattgatatt

SEQ ID NO: 325257 - DNA, 20 bp, Artificial Sequence
  Description of Artificial Sequence: Synthetic oligonucleotide
  Target: LAMA2; (+) strand; PAM type: YTN; PAM sequence: TTG
tattggtgattgatattatc

SEQ ID NO: 325258 - DNA, 20 bp, Artificial Sequence
  Description of Artificial Sequence: Synthetic oligonucleotide
  Target: LAMA2; (+) strand; PAM type: YTN; PAM sequence: TTG
gtgattgatattatcatttc

SEQ ID NO: 325259 - DNA, 20 bp, Artificial Sequence
  Description of Artificial Sequence: Synthetic oligonucleotide
  Target: LAMA2; (+) strand; PAM type: YTN; PAM sequence: TTG
atattatcatttctctcata

SEQ ID NO: 325260 - DNA, 20 bp, Artificial Sequence
  Description of Artificial Sequence: Synthetic oligonucleotide
  Target: LAMA2; (+) strand; PAM type: YTN; PAM sequence: TTA
tcatttctctcatattttca

SEQ ID NO: 325261 - DNA, 20 bp, Artificial Sequence
  Description of Artificial Sequence: Synthetic oligonucleotide
  Target: LAMA2; (+) strand; PAM type: YTN; PAM sequence: TTT
ctctcatattttcagtattt

SEQ ID NO: 325262 - DNA, 20 bp, Artificial Sequence
  Description of Artificial Sequence: Synthetic oligonucleotide
  Target: LAMA2; (+) strand; PAM type: YTN; PAM sequence: TTC
tctcatattttcagtatttt

SEQ ID NO: 325263 - DNA, 20 bp, Artificial Sequence
  Description of Artificial Sequence: Synthetic oligonucleotide
  Target: LAMA2; (+) strand; PAM type: YTN; PAM sequence: CTC
tcatattttcagtatttttt

SEQ ID NO: 325264 - DNA, 20 bp, Artificial Sequence
  Description of Artificial Sequence: Synthetic oligonucleotide
  Target: LAMA2; (+) strand; PAM type: YTN; PAM sequence: CTC
atattttcagtatttttttg

SEQ ID NO: 325265 - DNA, 20 bp, Artificial Sequence
  Description of Artificial Sequence: Synthetic oligonucleotide
  Target: LAMA2; (+) strand; PAM type: YTN; PAM sequence: TTT
tcagtatttttttgtttctc

SEQ ID NO: 325266 - DNA, 20 bp, Artificial Sequence
  Description of Artificial Sequence: Synthetic oligonucleotide
  Target: LAMA2; (+) strand; PAM type: YTN; PAM sequence: TTT
cagtatttttttgtttctct

SEQ ID NO: 325267 - DNA, 20 bp, Artificial Sequence
  Description of Artificial Sequence: Synthetic oligonucleotide
  Target: LAMA2; (+) strand; PAM type: YTN; PAM sequence: TTC
agtatttttttgtttctctt

SEQ ID NO: 325268 - DNA, 20 bp, Artificial Sequence
  Description of Artificial Sequence: Synthetic oligonucleotide
  Target: LAMA2; (+) strand; PAM type: YTN; PAM sequence: TTT
ttttgtttctcttttgtggg

SEQ ID NO: 325269 - DNA, 20 bp, Artificial Sequence
  Description of Artificial Sequence: Synthetic oligonucleotide
  Target: LAMA2; (+) strand; PAM type: YTN; PAM sequence: TTT
tttgtttctcttttgtgggt

SEQ ID NO: 325270 - DNA, 20 bp, Artificial Sequence
  Description of Artificial Sequence: Synthetic oligonucleotide
  Target: LAMA2; (+) strand; PAM type: YTN; PAM sequence: TTT
ttgtttctcttttgtgggtg

SEQ ID NO: 325271 - DNA, 20 bp, Artificial Sequence
  Description of Artificial Sequence: Synthetic oligonucleotide
  Target: LAMA2; (+) strand; PAM type: YTN; PAM sequence: TTT
tgtttctcttttgtgggtga

SEQ ID NO: 325272 - DNA, 20 bp, Artificial Sequence
  Description of Artificial Sequence: Synthetic oligonucleotide
  Target: LAMA2; (+) strand; PAM type: YTN; PAM sequence: TTT
gtttctcttttgtgggtgat

SEQ ID NO: 325273 - DNA, 20 bp, Artificial Sequence
  Description of Artificial Sequence: Synthetic oligonucleotide
  Target: LAMA2; (+) strand; PAM type: YTN; PAM sequence: TTG
tttctcttttgtgggtgatg

SEQ ID NO: 325274 - DNA, 20 bp, Artificial Sequence
  Description of Artificial Sequence: Synthetic oligonucleotide
  Target: LAMA2; (+) strand; PAM type: YTN; PAM sequence: TTT
ctcttttgtgggtgatgcct

SEQ ID NO: 325275 - DNA, 20 bp, Artificial Sequence
  Description of Artificial Sequence: Synthetic oligonucleotide
  Target: LAMA2; (+) strand; PAM type: YTN; PAM sequence: TTC
tcttttgtgggtgatgcctt

SEQ ID NO: 325276 - DNA, 20 bp, Artificial Sequence
  Description of Artificial Sequence: Synthetic oligonucleotide
  Target: LAMA2; (+) strand; PAM type: YTN; PAM sequence: CTC
ttttgtgggtgatgccttca

SEQ ID NO: 325277 - DNA, 20 bp, Artificial Sequence
  Description of Artificial Sequence: Synthetic oligonucleotide
  Target: LAMA2; (+) strand; PAM type: YTN; PAM sequence: CTT
ttgtgggtgatgccttcaac

SEQ ID NO: 325278 - DNA, 20 bp, Artificial Sequence
  Description of Artificial Sequence: Synthetic oligonucleotide
  Target: LAMA2; (+) strand; PAM type: YTN; PAM sequence: TTT
tgtgggtgatgccttcaact

SEQ ID NO: 325279 - DNA, 20 bp, Artificial Sequence
  Description of Artificial Sequence: Synthetic oligonucleotide
  Target: LAMA2; (+) strand; PAM type: YTN; PAM sequence: TTT
gtgggtgatgccttcaactt

SEQ ID NO: 325280 - DNA, 20 bp, Artificial Sequence
  Description of Artificial Sequence: Synthetic oligonucleotide
  Target: LAMA2; (+) strand; PAM type: YTN; PAM sequence: TTG
tgggtgatgccttcaacttt

SEQ ID NO: 325281 - DNA, 20 bp, Artificial Sequence
  Description of Artificial Sequence: Synthetic oligonucleotide
  Target: LAMA2; (+) strand; PAM type: YTN; PAM sequence: CTT
caacttttttgtccaagagt

SEQ ID NO: 325282 - DNA, 20 bp, Artificial Sequence
  Description of Artificial Sequence: Synthetic oligonucleotide
  Target: LAMA2; (+) strand; PAM type: YTN; PAM sequence: TTC
aacttttttgtccaagagtc

SEQ ID NO: 325283 - DNA, 20 bp, Artificial Sequence
  Description of Artificial Sequence: Synthetic oligonucleotide
  Target: LAMA2; (+) strand; PAM type: YTN; PAM sequence: CTT
ttttgtccaagagtcatatt

SEQ ID NO: 325284 - DNA, 20 bp, Artificial Sequence
  Description of Artificial Sequence: Synthetic oligonucleotide
  Target: LAMA2; (+) strand; PAM type: YTN; PAM sequence: TTT
tttgtccaagagtcatatta

SEQ ID NO: 325285 - DNA, 20 bp, Artificial Sequence
  Description of Artificial Sequence: Synthetic oligonucleotide
  Target: LAMA2; (+) strand; PAM type: YTN; PAM sequence: TTT
ttgtccaagagtcatattaa

SEQ ID NO: 325286 - DNA, 20 bp, Artificial Sequence
  Description of Artificial Sequence: Synthetic oligonucleotide
  Target: LAMA2; (+) strand; PAM type: YTN; PAM sequence: TTT
tgtccaagagtcatattaaa

SEQ ID NO: 325287 - DNA, 20 bp, Artificial Sequence
  Description of Artificial Sequence: Synthetic oligonucleotide
  Target: LAMA2; (+) strand; PAM type: YTN; PAM sequence: TTT
gtccaagagtcatattaaaa

SEQ ID NO: 325288 - DNA, 20 bp, Artificial Sequence
  Description of Artificial Sequence: Synthetic oligonucleotide
  Target: LAMA2; (+) strand; PAM type: YTN; PAM sequence: TTG
tccaagagtcatattaaaac

SEQ ID NO: 325289 - DNA, 20 bp, Artificial Sequence
  Description of Artificial Sequence: Synthetic oligonucleotide
  Target: LAMA2; (+) strand; PAM type: YTN; PAM sequence: TTA
aaactttattttaaaagatt

SEQ ID NO: 325290 - DNA, 20 bp, Artificial Sequence
  Description of Artificial Sequence: Synthetic oligonucleotide
  Target: LAMA2; (+) strand; PAM type: YTN; PAM sequence: CTT
tattttaaaagatttgtatt

SEQ ID NO: 325291 - DNA, 20 bp, Artificial Sequence
  Description of Artificial Sequence: Synthetic oligonucleotide
  Target: LAMA2; (+) strand; PAM type: YTN; PAM sequence: TTT
attttaaaagatttgtattt

SEQ ID NO: 325292 - DNA, 20 bp, Artificial Sequence
  Description of Artificial Sequence: Synthetic oligonucleotide
  Target: LAMA2; (+) strand; PAM type: YTN; PAM sequence: TTA
ttttaaaagatttgtatttt

SEQ ID NO: 325293 - DNA, 20 bp, Artificial Sequence
  Description of Artificial Sequence: Synthetic oligonucleotide
  Target: LAMA2; (+) strand; PAM type: YTN; PAM sequence: TTT
taaaagatttgtatttttcc

SEQ ID NO: 325294 - DNA, 20 bp, Artificial Sequence
  Description of Artificial Sequence: Synthetic oligonucleotide
  Target: LAMA2; (+) strand; PAM type: YTN; PAM sequence: TTT
aaaagatttgtatttttccc

SEQ ID NO: 325295 - DNA, 20 bp, Artificial Sequence
  Description of Artificial Sequence: Synthetic oligonucleotide
  Target: LAMA2; (+) strand; PAM type: YTN; PAM sequence: TTA
aaagatttgtatttttccct

SEQ ID NO: 325296 - DNA, 20 bp, Artificial Sequence
  Description of Artificial Sequence: Synthetic oligonucleotide
  Target: LAMA2; (+) strand; PAM type: YTN; PAM sequence: TTT
gtatttttccctttttaata

SEQ ID NO: 325297 - DNA, 20 bp, Artificial Sequence
  Description of Artificial Sequence: Synthetic oligonucleotide
  Target: LAMA2; (+) strand; PAM type: YTN; PAM sequence: TTG
tatttttccctttttaatat

SEQ ID NO: 325298 - DNA, 20 bp, Artificial Sequence
  Description of Artificial Sequence: Synthetic oligonucleotide
  Target: LAMA2; (+) strand; PAM type: YTN; PAM sequence: TTT
ttccctttttaatattattc

SEQ ID NO: 325299 - DNA, 20 bp, Artificial Sequence
  Description of Artificial Sequence: Synthetic oligonucleotide
  Target: LAMA2; (+) strand; PAM type: YTN; PAM sequence: TTT
tccctttttaatattattct

SEQ ID NO: 325300 - DNA, 20 bp, Artificial Sequence
  Description of Artificial Sequence: Synthetic oligonucleotide
  Target: LAMA2; (+) strand; PAM type: YTN; PAM sequence: TTT
ccctttttaatattattcta

SEQ ID NO: 325301 - DNA, 20 bp, Artificial Sequence
  Description of Artificial Sequence: Synthetic oligonucleotide
  Target: LAMA2; (+) strand; PAM type: YTN; PAM sequence: TTC
cctttttaatattattctat

SEQ ID NO: 325302 - DNA, 20 bp, Artificial Sequence
  Description of Artificial Sequence: Synthetic oligonucleotide
  Target: LAMA2; (+) strand; PAM type: YTN; PAM sequence: CTT
tttaatattattctattttt

SEQ ID NO: 325303 - DNA, 20 bp, Artificial Sequence
  Description of Artificial Sequence: Synthetic oligonucleotide
  Target: LAMA2; (+) strand; PAM type: YTN; PAM sequence: TTT
ttaatattattctatttttc

SEQ ID NO: 325304 - DNA, 20 bp, Artificial Sequence
  Description of Artificial Sequence: Synthetic oligonucleotide
  Target: LAMA2; (+) strand; PAM type: YTN; PAM sequence: TTT
taatattattctatttttct

SEQ ID NO: 325305 - DNA, 20 bp, Artificial Sequence
  Description of Artificial Sequence: Synthetic oligonucleotide
  Target: LAMA2; (+) strand; PAM type: YTN; PAM sequence: TTT
aatattattctatttttctt

SEQ ID NO: 325306 - DNA, 20 bp, Artificial Sequence
  Description of Artificial Sequence: Synthetic oligonucleotide
  Target: LAMA2; (+) strand; PAM type: YTN; PAM sequence: TTA
atattattctatttttcttc

SEQ ID NO: 325307 - DNA, 20 bp, Artificial Sequence
  Description of Artificial Sequence: Synthetic oligonucleotide
  Target: LAMA2; (+) strand; PAM type: YTN; PAM sequence: TTA
ttctatttttcttcttgaat

SEQ ID NO: 325308 - DNA, 20 bp, Artificial Sequence
  Description of Artificial Sequence: Synthetic oligonucleotide
  Target: LAMA2; (+) strand; PAM type: YTN; PAM sequence: TTC
tatttttcttcttgaatctc

SEQ ID NO: 325309 - DNA, 20 bp, Artificial Sequence
  Description of Artificial Sequence: Synthetic oligonucleotide
  Target: LAMA2; (+) strand; PAM type: YTN; PAM sequence: CTA
tttttcttcttgaatctctt

SEQ ID NO: 325310 - DNA, 20 bp, Artificial Sequence
  Description of Artificial Sequence: Synthetic oligonucleotide
  Target: LAMA2; (+) strand; PAM type: YTN; PAM sequence: TTT
ttcttcttgaatctcttcaa

SEQ ID NO: 325311 - DNA, 20 bp, Artificial Sequence
  Description of Artificial Sequence: Synthetic oligonucleotide
  Target: LAMA2; (+) strand; PAM type: YTN; PAM sequence: TTT
tcttcttgaatctcttcaaa

SEQ ID NO: 325312 - DNA, 20 bp, Artificial Sequence
  Description of Artificial Sequence: Synthetic oligonucleotide
  Target: LAMA2; (+) strand; PAM type: YTN; PAM sequence: TTT
cttcttgaatctcttcaaaa

SEQ ID NO: 325313 - DNA, 20 bp, Artificial Sequence
  Description of Artificial Sequence: Synthetic oligonucleotide
  Target: LAMA2; (+) strand; PAM type: YTN; PAM sequence: TTC
ttcttgaatctcttcaaaaa

SEQ ID NO: 325314 - DNA, 20 bp, Artificial Sequence
  Description of Artificial Sequence: Synthetic oligonucleotide
  Target: LAMA2; (+) strand; PAM type: YTN; PAM sequence: CTT
cttgaatctcttcaaaaata

SEQ ID NO: 325315 - DNA, 20 bp, Artificial Sequence
  Description of Artificial Sequence: Synthetic oligonucleotide
  Target: LAMA2; (+) strand; PAM type: YTN; PAM sequence: TTC
ttgaatctcttcaaaaatat

SEQ ID NO: 325316 - DNA, 20 bp, Artificial Sequence
  Description of Artificial Sequence: Synthetic oligonucleotide
  Target: LAMA2; (+) strand; PAM type: YTN; PAM sequence: CTT
gaatctcttcaaaaatatta

SEQ ID NO: 325317 - DNA, 20 bp, Artificial Sequence
  Description of Artificial Sequence: Synthetic oligonucleotide
  Target: LAMA2; (+) strand; PAM type: YTN; PAM sequence: TTG
aatctcttcaaaaatattaa

SEQ ID NO: 325318 - DNA, 20 bp, Artificial Sequence
  Description of Artificial Sequence: Synthetic oligonucleotide
  Target: LAMA2; (+) strand; PAM type: YTN; PAM sequence: CTC
ttcaaaaatattaattagca

SEQ ID NO: 325319 - DNA, 20 bp, Artificial Sequence
  Description of Artificial Sequence: Synthetic oligonucleotide
  Target: LAMA2; (+) strand; PAM type: YTN; PAM sequence: CTT
caaaaatattaattagcagt

SEQ ID NO: 325320 - DNA, 20 bp, Artificial Sequence
  Description of Artificial Sequence: Synthetic oligonucleotide
  Target: LAMA2; (+) strand; PAM type: YTN; PAM sequence: TTC
aaaaatattaattagcagtt

SEQ ID NO: 325321 - DNA, 20 bp, Artificial Sequence
  Description of Artificial Sequence: Synthetic oligonucleotide
  Target: LAMA2; (+) strand; PAM type: YTN; PAM sequence: TTA
attagcagtttgcttttaaa

SEQ ID NO: 325322 - DNA, 20 bp, Artificial Sequence
  Description of Artificial Sequence: Synthetic oligonucleotide
  Target: LAMA2; (+) strand; PAM type: YTN; PAM sequence: TTA
gcagtttgcttttaaaaata

SEQ ID NO: 325323 - DNA, 20 bp, Artificial Sequence
  Description of Artificial Sequence: Synthetic oligonucleotide
  Target: LAMA2; (+) strand; PAM type: YTN; PAM sequence: TTT
gcttttaaaaatattatcag

SEQ ID NO: 325324 - DNA, 20 bp, Artificial Sequence
  Description of Artificial Sequence: Synthetic oligonucleotide
  Target: LAMA2; (+) strand; PAM type: YTN; PAM sequence: TTG
cttttaaaaatattatcagt

SEQ ID NO: 325325 - DNA, 20 bp, Artificial Sequence
  Description of Artificial Sequence: Synthetic oligonucleotide
  Target: LAMA2; (+) strand; PAM type: YTN; PAM sequence: CTT
ttaaaaatattatcagtttt

SEQ ID NO: 325326 - DNA, 20 bp, Artificial Sequence
  Description of Artificial Sequence: Synthetic oligonucleotide
  Target: LAMA2; (+) strand; PAM type: YTN; PAM sequence: TTT
taaaaatattatcagttttt

SEQ ID NO: 325327 - DNA, 20 bp, Artificial Sequence
  Description of Artificial Sequence: Synthetic oligonucleotide
  Target: LAMA2; (+) strand; PAM type: YTN; PAM sequence: TTT
aaaaatattatcagtttttt

SEQ ID NO: 325328 - DNA, 20 bp, Artificial Sequence
  Description of Artificial Sequence: Synthetic oligonucleotide
  Target: LAMA2; (+) strand; PAM type: YTN; PAM sequence: TTA
aaaatattatcagtttttta

SEQ ID NO: 325329 - DNA, 20 bp, Artificial Sequence
  Description of Artificial Sequence: Synthetic oligonucleotide
  Target: LAMA2; (+) strand; PAM type: YTN; PAM sequence: TTA
tcagttttttaaataagcat

SEQ ID NO: 325330 - DNA, 20 bp, Artificial Sequence
  Description of Artificial Sequence: Synthetic oligonucleotide
  Target: LAMA2; (+) strand; PAM type: YTN; PAM sequence: TTT
tttaaataagcatttgtcct

SEQ ID NO: 325331 - DNA, 20 bp, Artificial Sequence
  Description of Artificial Sequence: Synthetic oligonucleotide
  Target: LAMA2; (+) strand; PAM type: YTN; PAM sequence: TTT
ttaaataagcatttgtcctc

SEQ ID NO: 325332 - DNA, 20 bp, Artificial Sequence
  Description of Artificial Sequence: Synthetic oligonucleotide
  Target: LAMA2; (+) strand; PAM type: YTN; PAM sequence: TTT
taaataagcatttgtcctcc

SEQ ID NO: 325333 - DNA, 20 bp, Artificial Sequence
  Description of Artificial Sequence: Synthetic oligonucleotide
  Target: LAMA2; (+) strand; PAM type: YTN; PAM sequence: TTT
aaataagcatttgtcctcca

SEQ ID NO: 325334 - DNA, 20 bp, Artificial Sequence
  Description of Artificial Sequence: Synthetic oligonucleotide
  Target: LAMA2; (+) strand; PAM type: YTN; PAM sequence: TTA
aataagcatttgtcctccag

SEQ ID NO: 325335 - DNA, 20 bp, Artificial Sequence
  Description of Artificial Sequence: Synthetic oligonucleotide
  Target: LAMA2; (+) strand; PAM type: YTN; PAM sequence: TTT
gtcctccagattttttcccc

SEQ ID NO: 325336 - DNA, 20 bp, Artificial Sequence
  Description of Artificial Sequence: Synthetic oligonucleotide
  Target: LAMA2; (+) strand; PAM type: YTN; PAM sequence: TTG
tcctccagattttttcccct

SEQ ID NO: 325337 - DNA, 20 bp, Artificial Sequence
  Description of Artificial Sequence: Synthetic oligonucleotide
  Target: LAMA2; (+) strand; PAM type: YTN; PAM sequence: CTC
cagattttttcccctgttta

SEQ ID NO: 325338 - DNA, 20 bp, Artificial Sequence
  Description of Artificial Sequence: Synthetic oligonucleotide
  Target: LAMA2; (+) strand; PAM type: YTN; PAM sequence: TTT
tttcccctgtttaatgttga

SEQ ID NO: 325339 - DNA, 20 bp, Artificial Sequence
  Description of Artificial Sequence: Synthetic oligonucleotide
  Target: LAMA2; (+) strand; PAM type: YTN; PAM sequence: TTT
ttcccctgtttaatgttgat

SEQ ID NO: 325340 - DNA, 20 bp, Artificial Sequence
  Description of Artificial Sequence: Synthetic oligonucleotide
  Target: LAMA2; (+) strand; PAM type: YTN; PAM sequence: TTT
tcccctgtttaatgttgatt

SEQ ID NO: 325341 - DNA, 20 bp, Artificial Sequence
  Description of Artificial Sequence: Synthetic oligonucleotide
  Target: LAMA2; (+) strand; PAM type: YTN; PAM sequence: TTT
cccctgtttaatgttgattc

SEQ ID NO: 325342 - DNA, 20 bp, Artificial Sequence
  Description of Artificial Sequence: Synthetic oligonucleotide
  Target: LAMA2; (+) strand; PAM type: YTN; PAM sequence: TTC
ccctgtttaatgttgattct

SEQ ID NO: 325343 - DNA, 20 bp, Artificial Sequence
  Description of Artificial Sequence: Synthetic oligonucleotide
  Target: LAMA2; (+) strand; PAM type: YTN; PAM sequence: CTG
tttaatgttgattcttcttt

SEQ ID NO: 325344 - DNA, 20 bp, Artificial Sequence
  Description of Artificial Sequence: Synthetic oligonucleotide
  Target: LAMA2; (+) strand; PAM type: YTN; PAM sequence: TTT
aatgttgattcttcttttcc

SEQ ID NO: 325345 - DNA, 20 bp, Artificial Sequence
  Description of Artificial Sequence: Synthetic oligonucleotide
  Target: LAMA2; (+) strand; PAM type: YTN; PAM sequence: TTA
atgttgattcttcttttcca

SEQ ID NO: 325346 - DNA, 20 bp, Artificial Sequence
  Description of Artificial Sequence: Synthetic oligonucleotide
  Target: LAMA2; (+) strand; PAM type: YTN; PAM sequence: TTG
attcttcttttccatgaggg

SEQ ID NO: 325347 - DNA, 20 bp, Artificial Sequence
  Description of Artificial Sequence: Synthetic oligonucleotide
  Target: LAMA2; (+) strand; PAM type: YTN; PAM sequence: TTC
ttcttttccatgagggacta

SEQ ID NO: 325348 - DNA, 20 bp, Artificial Sequence
  Description of Artificial Sequence: Synthetic oligonucleotide
  Target: LAMA2; (+) strand; PAM type: YTN; PAM sequence: CTT
cttttccatgagggactatt

SEQ ID NO: 325349 - DNA, 20 bp, Artificial Sequence
  Description of Artificial Sequence: Synthetic oligonucleotide
  Target: LAMA2; (+) strand; PAM type: YTN; PAM sequence: TTC
ttttccatgagggactattt

SEQ ID NO: 325350 - DNA, 20 bp, Artificial Sequence
  Description of Artificial Sequence: Synthetic oligonucleotide
  Target: LAMA2; (+) strand; PAM type: YTN; PAM sequence: CTT
ttccatgagggactatttac

SEQ ID NO: 325351 - DNA, 20 bp, Artificial Sequence
  Description of Artificial Sequence: Synthetic oligonucleotide
  Target: LAMA2; (+) strand; PAM type: YTN; PAM sequence: TTT
tccatgagggactatttacg

SEQ ID NO: 325352 - DNA, 20 bp, Artificial Sequence
  Description of Artificial Sequence: Synthetic oligonucleotide
  Target: LAMA2; (+) strand; PAM type: YTN; PAM sequence: TTT
ccatgagggactatttacgc

SEQ ID NO: 325353 - DNA, 20 bp, Artificial Sequence
  Description of Artificial Sequence: Synthetic oligonucleotide
  Target: LAMA2; (+) strand; PAM type: YTN; PAM sequence: TTC
catgagggactatttacgca

SEQ ID NO: 325354 - DNA, 20 bp, Artificial Sequence
  Description of Artificial Sequence: Synthetic oligonucleotide
  Target: LAMA2; (+) strand; PAM type: YTN; PAM sequence: CTA
tttacgcaacaatctacata

SEQ ID NO: 325355 - DNA, 20 bp, Artificial Sequence
  Description of Artificial Sequence: Synthetic oligonucleotide
  Target: LAMA2; (+) strand; PAM type: YTN; PAM sequence: TTT
acgcaacaatctacataatc

SEQ ID NO: 325356 - DNA, 20 bp, Artificial Sequence
  Description of Artificial Sequence: Synthetic oligonucleotide
  Target: LAMA2; (+) strand; PAM type: YTN; PAM sequence: TTA
cgcaacaatctacataatct

SEQ ID NO: 325357 - DNA, 20 bp, Artificial Sequence
  Description of Artificial Sequence: Synthetic oligonucleotide
  Target: LAMA2; (+) strand; PAM type: YTN; PAM sequence: CTA
cataatctttattccctact

SEQ ID NO: 325358 - DNA, 20 bp, Artificial Sequence
  Description of Artificial Sequence: Synthetic oligonucleotide
  Target: LAMA2; (+) strand; PAM type: YTN; PAM sequence: CTT
tattccctactaacatttaa

SEQ ID NO: 325359 - DNA, 20 bp, Artificial Sequence
  Description of Artificial Sequence: Synthetic oligonucleotide
  Target: LAMA2; (+) strand; PAM type: YTN; PAM sequence: TTT
attccctactaacatttaac

SEQ ID NO: 325360 - DNA, 20 bp, Artificial Sequence
  Description of Artificial Sequence: Synthetic oligonucleotide
  Target: LAMA2; (+) strand; PAM type: YTN; PAM sequence: TTA
ttccctactaacatttaact

SEQ ID NO: 325361 - DNA, 20 bp, Artificial Sequence
  Description of Artificial Sequence: Synthetic oligonucleotide
  Target: LAMA2; (+) strand; PAM type: YTN; PAM sequence: TTC
cctactaacatttaactgtg

SEQ ID NO: 325362 - DNA, 20 bp, Artificial Sequence
  Description of Artificial Sequence: Synthetic oligonucleotide
  Target: LAMA2; (+) strand; PAM type: YTN; PAM sequence: CTA
ctaacatttaactgtgatat

SEQ ID NO: 325363 - DNA, 20 bp, Artificial Sequence
  Description of Artificial Sequence: Synthetic oligonucleotide
  Target: LAMA2; (+) strand; PAM type: YTN; PAM sequence: CTA
acatttaactgtgatatcct

SEQ ID NO: 325364 - DNA, 20 bp, Artificial Sequence
  Description of Artificial Sequence: Synthetic oligonucleotide
  Target: LAMA2; (+) strand; PAM type: YTN; PAM sequence: TTT
aactgtgatatcctaaaatg

SEQ ID NO: 325365 - DNA, 20 bp, Artificial Sequence
  Description of Artificial Sequence: Synthetic oligonucleotide
  Target: LAMA2; (+) strand; PAM type: YTN; PAM sequence: TTA
actgtgatatcctaaaatgg

SEQ ID NO: 325366 - DNA, 20 bp, Artificial Sequence
  Description of Artificial Sequence: Synthetic oligonucleotide
  Target: LAMA2; (+) strand; PAM type: YTN; PAM sequence: CTG
tgatatcctaaaatggcctg

SEQ ID NO: 325367 - DNA, 20 bp, Artificial Sequence
  Description of Artificial Sequence: Synthetic oligonucleotide
  Target: LAMA2; (+) strand; PAM type: YTN; PAM sequence: CTA
aaatggcctgattgaggaac

SEQ ID NO: 325368 - DNA, 20 bp, Artificial Sequence
  Description of Artificial Sequence: Synthetic oligonucleotide
  Target: LAMA2; (+) strand; PAM type: YTN; PAM sequence: CTG
attgaggaactgattgagat

SEQ ID NO: 325369 - DNA, 20 bp, Artificial Sequence
  Description of Artificial Sequence: Synthetic oligonucleotide
  Target: LAMA2; (+) strand; PAM type: YTN; PAM sequence: TTG
aggaactgattgagatgatt

SEQ ID NO: 325370 - DNA, 20 bp, Artificial Sequence
  Description of Artificial Sequence: Synthetic oligonucleotide
  Target: LAMA2; (+) strand; PAM type: YTN; PAM sequence: CTG
attgagatgattaagagctc

SEQ ID NO: 325371 - DNA, 20 bp, Artificial Sequence
  Description of Artificial Sequence: Synthetic oligonucleotide
  Target: LAMA2; (+) strand; PAM type: YTN; PAM sequence: TTG
agatgattaagagctctgta

SEQ ID NO: 325372 - DNA, 20 bp, Artificial Sequence
  Description of Artificial Sequence: Synthetic oligonucleotide
  Target: LAMA2; (+) strand; PAM type: YTN; PAM sequence: TTA
agagctctgtagcagggcgc

SEQ ID NO: 325373 - DNA, 20 bp, Artificial Sequence
  Description of Artificial Sequence: Synthetic oligonucleotide
  Target: LAMA2; (+) strand; PAM type: YTN; PAM sequence: CTC
tgtagcagggcgcagtggct

SEQ ID NO: 325374 - DNA, 20 bp, Artificial Sequence
  Description of Artificial Sequence: Synthetic oligonucleotide
  Target: LAMA2; (+) strand; PAM type: YTN; PAM sequence: CTG
tagcagggcgcagtggctca

SEQ ID NO: 325375 - DNA, 20 bp, Artificial Sequence
  Description of Artificial Sequence: Synthetic oligonucleotide
  Target: LAMA2; (+) strand; PAM type: YTN; PAM sequence: CTC
acgcctgtaatcctagcact

SEQ ID NO: 325376 - DNA, 20 bp, Artificial Sequence
  Description of Artificial Sequence: Synthetic oligonucleotide
  Target: LAMA2; (+) strand; PAM type: YTN; PAM sequence: CTG
taatcctagcacttctgtga

SEQ ID NO: 325377 - DNA, 20 bp, Artificial Sequence
  Description of Artificial Sequence: Synthetic oligonucleotide
  Target: LAMA2; (+) strand; PAM type: YTN; PAM sequence: CTA
gcacttctgtgaggctgagg

SEQ ID NO: 325378 - DNA, 20 bp, Artificial Sequence
  Description of Artificial Sequence: Synthetic oligonucleotide
  Target: LAMA2; (+) strand; PAM type: YTN; PAM sequence: CTT
ctgtgaggctgaggcaggca

SEQ ID NO: 325379 - DNA, 20 bp, Artificial Sequence
  Description of Artificial Sequence: Synthetic oligonucleotide
  Target: LAMA2; (+) strand; PAM type: YTN; PAM sequence: TTC
tgtgaggctgaggcaggcag

SEQ ID NO: 325380 - DNA, 20 bp, Artificial Sequence
  Description of Artificial Sequence: Synthetic oligonucleotide
  Target: LAMA2; (+) strand; PAM type: YTN; PAM sequence: CTG
tgaggctgaggcaggcagat

SEQ ID NO: 325381 - DNA, 20 bp, Artificial Sequence
  Description of Artificial Sequence: Synthetic oligonucleotide
  Target: LAMA2; (+) strand; PAM type: YTN; PAM sequence: CTG
aggcaggcagatcacctgag

SEQ ID NO: 325382 - DNA, 20 bp, Artificial Sequence
  Description of Artificial Sequence: Synthetic oligonucleotide
  Target: LAMA2; (+) strand; PAM type: YTN; PAM sequence: CTG
aggtcaggagttcgagacca

SEQ ID NO: 325383 - DNA, 20 bp, Artificial Sequence
  Description of Artificial Sequence: Synthetic oligonucleotide
  Target: LAMA2; (+) strand; PAM type: YTN; PAM sequence: TTC
gagaccagcctggccaacat

SEQ ID NO: 325384 - DNA, 20 bp, Artificial Sequence
  Description of Artificial Sequence: Synthetic oligonucleotide
  Target: LAMA2; (+) strand; PAM type: YTN; PAM sequence: CTG
gccaacatggcgaaaccctg

SEQ ID NO: 325385 - DNA, 20 bp, Artificial Sequence
  Description of Artificial Sequence: Synthetic oligonucleotide
  Target: LAMA2; (+) strand; PAM type: YTN; PAM sequence: CTG
gtctctactaaaagtaccaa

SEQ ID NO: 325386 - DNA, 20 bp, Artificial Sequence
  Description of Artificial Sequence: Synthetic oligonucleotide
  Target: LAMA2; (+) strand; PAM type: YTN; PAM sequence: CTC
tactaaaagtaccaaaatca

SEQ ID NO: 325387 - DNA, 20 bp, Artificial Sequence
  Description of Artificial Sequence: Synthetic oligonucleotide
  Target: LAMA2; (+) strand; PAM type: YTN; PAM sequence: CTA
ctaaaagtaccaaaatcagc

SEQ ID NO: 325388 - DNA, 20 bp, Artificial Sequence
  Description of Artificial Sequence: Synthetic oligonucleotide
  Target: LAMA2; (+) strand; PAM type: YTN; PAM sequence: CTA
aaagtaccaaaatcagccag

SEQ ID NO: 325389 - DNA, 20 bp, Artificial Sequence
  Description of Artificial Sequence: Synthetic oligonucleotide
  Target: LAMA2; (+) strand; PAM type: YTN; PAM sequence: CTG
taatcccagctactcaggag

SEQ ID NO: 325390 - DNA, 20 bp, Artificial Sequence
  Description of Artificial Sequence: Synthetic oligonucleotide
  Target: LAMA2; (+) strand; PAM type: YTN; PAM sequence: CTA
ctcaggaggctgaggcagga

SEQ ID NO: 325391 - DNA, 20 bp, Artificial Sequence
  Description of Artificial Sequence: Synthetic oligonucleotide
  Target: LAMA2; (+) strand; PAM type: YTN; PAM sequence: CTC
aggaggctgaggcaggagaa

SEQ ID NO: 325392 - DNA, 20 bp, Artificial Sequence
  Description of Artificial Sequence: Synthetic oligonucleotide
  Target: LAMA2; (+) strand; PAM type: YTN; PAM sequence: CTG
aggcaggagaattgctaaaa

SEQ ID NO: 325393 - DNA, 20 bp, Artificial Sequence
  Description of Artificial Sequence: Synthetic oligonucleotide
  Target: LAMA2; (+) strand; PAM type: YTN; PAM sequence: TTG
ctaaaaacttgggaggcaag

SEQ ID NO: 325394 - DNA, 20 bp, Artificial Sequence
  Description of Artificial Sequence: Synthetic oligonucleotide
  Target: LAMA2; (+) strand; PAM type: YTN; PAM sequence: CTA
aaaacttgggaggcaagagt

SEQ ID NO: 325395 - DNA, 20 bp, Artificial Sequence
  Description of Artificial Sequence: Synthetic oligonucleotide
  Target: LAMA2; (+) strand; PAM type: YTN; PAM sequence: CTT
gggaggcaagagttgcagtg

SEQ ID NO: 325396 - DNA, 20 bp, Artificial Sequence
  Description of Artificial Sequence: Synthetic oligonucleotide
  Target: LAMA2; (+) strand; PAM type: YTN; PAM sequence: TTG
ggaggcaagagttgcagtga

SEQ ID NO: 325397 - DNA, 20 bp, Artificial Sequence
  Description of Artificial Sequence: Synthetic oligonucleotide
  Target: LAMA2; (+) strand; PAM type: YTN; PAM sequence: TTG
cagtgagctgagatcgcacc

SEQ ID NO: 325398 - DNA, 20 bp, Artificial Sequence
  Description of Artificial Sequence: Synthetic oligonucleotide
  Target: LAMA2; (+) strand; PAM type: YTN; PAM sequence: CTG
agatcgcaccactgcactcc

SEQ ID NO: 325399 - DNA, 20 bp, Artificial Sequence
  Description of Artificial Sequence: Synthetic oligonucleotide
  Target: LAMA2; (+) strand; PAM type: YTN; PAM sequence: CTG
cactccagcctgggcgacaa

SEQ ID NO: 325400 - DNA, 20 bp, Artificial Sequence
  Description of Artificial Sequence: Synthetic oligonucleotide
  Target: LAMA2; (+) strand; PAM type: YTN; PAM sequence: CTC
cagcctgggcgacaagagca

SEQ ID NO: 325401 - DNA, 20 bp, Artificial Sequence
  Description of Artificial Sequence: Synthetic oligonucleotide
  Target: LAMA2; (+) strand; PAM type: YTN; PAM sequence: CTG
ggcgacaagagcaagactcc

SEQ ID NO: 325402 - DNA, 20 bp, Artificial Sequence
  Description of Artificial Sequence: Synthetic oligonucleotide
  Target: LAMA2; (+) strand; PAM type: YTN; PAM sequence: CTC
catctcaaaaagaaaaaaaa

SEQ ID NO: 325403 - DNA, 20 bp, Artificial Sequence
  Description of Artificial Sequence: Synthetic oligonucleotide
  Target: LAMA2; (+) strand; PAM type: YTN; PAM sequence: CTC
aaaaagaaaaaaaaagaaaa

SEQ ID NO: 325404 - DNA, 20 bp, Artificial Sequence
  Description of Artificial Sequence: Synthetic oligonucleotide
  Target: LAMA2; (+) strand; PAM type: YTN; PAM sequence: CTG
tgtatagggcaggacgaaag

SEQ ID NO: 325405 - DNA, 20 bp, Artificial Sequence
  Description of Artificial Sequence: Synthetic oligonucleotide
  Target: LAMA2; (+) strand; PAM type: YTN; PAM sequence: TTT
ggtagaaagctagctgtttt

SEQ ID NO: 325406 - DNA, 20 bp, Artificial Sequence
  Description of Artificial Sequence: Synthetic oligonucleotide
  Target: LAMA2; (+) strand; PAM type: YTN; PAM sequence: TTG
gtagaaagctagctgttttg

SEQ ID NO: 325407 - DNA, 20 bp, Artificial Sequence
  Description of Artificial Sequence: Synthetic oligonucleotide
  Target: LAMA2; (+) strand; PAM type: YTN; PAM sequence: CTA
gctgttttgccaggcagcat

SEQ ID NO: 325408 - DNA, 20 bp, Artificial Sequence
  Description of Artificial Sequence: Synthetic oligonucleotide
  Target: LAMA2; (+) strand; PAM type: YTN; PAM sequence: CTG
ttttgccaggcagcattaaa

SEQ ID NO: 325409 - DNA, 20 bp, Artificial Sequence
  Description of Artificial Sequence: Synthetic oligonucleotide
  Target: LAMA2; (+) strand; PAM type: YTN; PAM sequence: TTT
tgccaggcagcattaaatgt

SEQ ID NO: 325410 - DNA, 20 bp, Artificial Sequence
  Description of Artificial Sequence: Synthetic oligonucleotide
  Target: LAMA2; (+) strand; PAM type: YTN; PAM sequence: TTT
gccaggcagcattaaatgta

SEQ ID NO: 325411 - DNA, 20 bp, Artificial Sequence
  Description of Artificial Sequence: Synthetic oligonucleotide
  Target: LAMA2; (+) strand; PAM type: YTN; PAM sequence: TTG
ccaggcagcattaaatgtaa

SEQ ID NO: 325412 - DNA, 20 bp, Artificial Sequence
  Description of Artificial Sequence: Synthetic oligonucleotide
  Target: LAMA2; (+) strand; PAM type: YTN; PAM sequence: TTA
aatgtaagaatgtgcagatt

SEQ ID NO: 325413 - DNA, 20 bp, Artificial Sequence
  Description of Artificial Sequence: Synthetic oligonucleotide
  Target: LAMA2; (+) strand; PAM type: YTN; PAM sequence: TTT
tttcctctgggatcctgtca

SEQ ID NO: 325414 - DNA, 20 bp, Artificial Sequence
  Description of Artificial Sequence: Synthetic oligonucleotide
  Target: LAMA2; (+) strand; PAM type: YTN; PAM sequence: TTT
ttcctctgggatcctgtcat

SEQ ID NO: 325415 - DNA, 20 bp, Artificial Sequence
  Description of Artificial Sequence: Synthetic oligonucleotide
  Target: LAMA2; (+) strand; PAM type: YTN; PAM sequence: TTT
tcctctgggatcctgtcatt

SEQ ID NO: 325416 - DNA, 20 bp, Artificial Sequence
  Description of Artificial Sequence: Synthetic oligonucleotide
  Target: LAMA2; (+) strand; PAM type: YTN; PAM sequence: TTT
cctctgggatcctgtcattt

SEQ ID NO: 325417 - DNA, 20 bp, Artificial Sequence
  Description of Artificial Sequence: Synthetic oligonucleotide
  Target: LAMA2; (+) strand; PAM type: YTN; PAM sequence: TTC
ctctgggatcctgtcatttc

SEQ ID NO: 325418 - DNA, 20 bp, Artificial Sequence
  Description of Artificial Sequence: Synthetic oligonucleotide
  Target: LAMA2; (+) strand; PAM type: YTN; PAM sequence: CTC
tgggatcctgtcatttctcc

SEQ ID NO: 325419 - DNA, 20 bp, Artificial Sequence
  Description of Artificial Sequence: Synthetic oligonucleotide
  Target: LAMA2; (+) strand; PAM type: YTN; PAM sequence: CTG
ggatcctgtcatttctccag

SEQ ID NO: 325420 - DNA, 20 bp, Artificial Sequence
  Description of Artificial Sequence: Synthetic oligonucleotide
  Target: LAMA2; (+) strand; PAM type: YTN; PAM sequence: CTG
tcatttctccagaatggtaa

SEQ ID NO: 325421 - DNA, 20 bp, Artificial Sequence
  Description of Artificial Sequence: Synthetic oligonucleotide
  Target: LAMA2; (+) strand; PAM type: YTN; PAM sequence: TTT
ctccagaatggtaatctcca

SEQ ID NO: 325422 - DNA, 20 bp, Artificial Sequence
  Description of Artificial Sequence: Synthetic oligonucleotide
  Target: LAMA2; (+) strand; PAM type: YTN; PAM sequence: TTC
tccagaatggtaatctccat

SEQ ID NO: 325423 - DNA, 20 bp, Artificial Sequence
  Description of Artificial Sequence: Synthetic oligonucleotide
  Target: LAMA2; (+) strand; PAM type: YTN; PAM sequence: CTC
cagaatggtaatctccatac

SEQ ID NO: 325424 - DNA, 20 bp, Artificial Sequence
  Description of Artificial Sequence: Synthetic oligonucleotide
  Target: LAMA2; (+) strand; PAM type: YTN; PAM sequence: CTC
catacttattcctggaggag

SEQ ID NO: 325425 - DNA, 20 bp, Artificial Sequence
  Description of Artificial Sequence: Synthetic oligonucleotide
  Target: LAMA2; (+) strand; PAM type: YTN; PAM sequence: CTT
attcctggaggagaggtggt

SEQ ID NO: 325426 - DNA, 20 bp, Artificial Sequence
  Description of Artificial Sequence: Synthetic oligonucleotide
  Target: LAMA2; (+) strand; PAM type: YTN; PAM sequence: TTA
ttcctggaggagaggtggtt

SEQ ID NO: 325427 - DNA, 20 bp, Artificial Sequence
  Description of Artificial Sequence: Synthetic oligonucleotide
  Target: LAMA2; (+) strand; PAM type: YTN; PAM sequence: TTC
ctggaggagaggtggttaca

SEQ ID NO: 325428 - DNA, 20 bp, Artificial Sequence
  Description of Artificial Sequence: Synthetic oligonucleotide
  Target: LAMA2; (+) strand; PAM type: YTN; PAM sequence: CTG
gaggagaggtggttacaagt

SEQ ID NO: 325429 - DNA, 20 bp, Artificial Sequence
  Description of Artificial Sequence: Synthetic oligonucleotide
  Target: LAMA2; (+) strand; PAM type: YTN; PAM sequence: TTA
caagtattctggggccacaa

SEQ ID NO: 325430 - DNA, 20 bp, Artificial Sequence
  Description of Artificial Sequence: Synthetic oligonucleotide
  Target: LAMA2; (+) strand; PAM type: YTN; PAM sequence: TTC
tggggccacaactattcttg

SEQ ID NO: 325431 - DNA, 20 bp, Artificial Sequence
  Description of Artificial Sequence: Synthetic oligonucleotide
  Target: LAMA2; (+) strand; PAM type: YTN; PAM sequence: CTG
gggccacaactattcttggc

SEQ ID NO: 325432 - DNA, 20 bp, Artificial Sequence
  Description of Artificial Sequence: Synthetic oligonucleotide
  Target: LAMA2; (+) strand; PAM type: YTN; PAM sequence: CTA
ttcttggccttttgtctacc

SEQ ID NO: 325433 - DNA, 20 bp, Artificial Sequence
  Description of Artificial Sequence: Synthetic oligonucleotide
  Target: LAMA2; (+) strand; PAM type: YTN; PAM sequence: TTC
ttggccttttgtctacccct

SEQ ID NO: 325434 - DNA, 20 bp, Artificial Sequence
  Description of Artificial Sequence: Synthetic oligonucleotide
  Target: LAMA2; (+) strand; PAM type: YTN; PAM sequence: CTT
ggccttttgtctacccctga

SEQ ID NO: 325435 - DNA, 20 bp, Artificial Sequence
  Description of Artificial Sequence: Synthetic oligonucleotide
  Target: LAMA2; (+) strand; PAM type: YTN; PAM sequence: TTG
gccttttgtctacccctgaa

SEQ ID NO: 325436 - DNA, 20 bp, Artificial Sequence
  Description of Artificial Sequence: Synthetic oligonucleotide
  Target: LAMA2; (+) strand; PAM type: YTN; PAM sequence: CTT
ttgtctacccctgaagtttc

SEQ ID NO: 325437 - DNA, 20 bp, Artificial Sequence
  Description of Artificial Sequence: Synthetic oligonucleotide
  Target: LAMA2; (+) strand; PAM type: YTN; PAM sequence: TTT
tgtctacccctgaagtttcc

SEQ ID NO: 325438 - DNA, 20 bp, Artificial Sequence
  Description of Artificial Sequence: Synthetic oligonucleotide
  Target: LAMA2; (+) strand; PAM type: YTN; PAM sequence: TTT
gtctacccctgaagtttcca

SEQ ID NO: 325439 - DNA, 20 bp, Artificial Sequence
  Description of Artificial Sequence: Synthetic oligonucleotide
  Target: LAMA2; (+) strand; PAM type: YTN; PAM sequence: TTG
tctacccctgaagtttccat

SEQ ID NO: 325440 - DNA, 20 bp, Artificial Sequence
  Description of Artificial Sequence: Synthetic oligonucleotide
  Target: LAMA2; (+) strand; PAM type: YTN; PAM sequence: CTA
cccctgaagtttccatcact

SEQ ID NO: 325441 - DNA, 20 bp, Artificial Sequence
  Description of Artificial Sequence: Synthetic oligonucleotide
  Target: LAMA2; (+) strand; PAM type: YTN; PAM sequence: CTG
aagtttccatcactggaata

SEQ ID NO: 325442 - DNA, 20 bp, Artificial Sequence
  Description of Artificial Sequence: Synthetic oligonucleotide
  Target: LAMA2; (+) strand; PAM type: YTN; PAM sequence: TTT
ccatcactggaataaactgg

SEQ ID NO: 325443 - DNA, 20 bp, Artificial Sequence
  Description of Artificial Sequence: Synthetic oligonucleotide
  Target: LAMA2; (+) strand; PAM type: YTN; PAM sequence: TTC
catcactggaataaactgga

SEQ ID NO: 325444 - DNA, 20 bp, Artificial Sequence
  Description of Artificial Sequence: Synthetic oligonucleotide
  Target: LAMA2; (+) strand; PAM type: YTN; PAM sequence: CTG
gaataaactggacagttaga

SEQ ID NO: 325445 - DNA, 20 bp, Artificial Sequence
  Description of Artificial Sequence: Synthetic oligonucleotide
  Target: LAMA2; (+) strand; PAM type: YTN; PAM sequence: CTG
gacagttagacagattaaca

SEQ ID NO: 325446 - DNA, 20 bp, Artificial Sequence
  Description of Artificial Sequence: Synthetic oligonucleotide
  Target: LAMA2; (+) strand; PAM type: YTN; PAM sequence: TTA
gacagattaacatgagaaaa

SEQ ID NO: 325447 - DNA, 20 bp, Artificial Sequence
  Description of Artificial Sequence: Synthetic oligonucleotide
  Target: LAMA2; (+) strand; PAM type: YTN; PAM sequence: TTA
acatgagaaaaggcatacac

SEQ ID NO: 325448 - DNA, 20 bp, Artificial Sequence
  Description of Artificial Sequence: Synthetic oligonucleotide
  Target: LAMA2; (+) strand; PAM type: YTN; PAM sequence: TTC
attacacgcacatgtacctg

SEQ ID NO: 325449 - DNA, 20 bp, Artificial Sequence
  Description of Artificial Sequence: Synthetic oligonucleotide
  Target: LAMA2; (+) strand; PAM type: YTN; PAM sequence: TTA
cacgcacatgtacctggaag

SEQ ID NO: 325450 - DNA, 20 bp, Artificial Sequence
  Description of Artificial Sequence: Synthetic oligonucleotide
  Target: LAMA2; (+) strand; PAM type: YTN; PAM sequence: CTG
gaaggcaacaaagtatgaga

SEQ ID NO: 325451 - DNA, 20 bp, Artificial Sequence
  Description of Artificial Sequence: Synthetic oligonucleotide
  Target: LAMA2; (+) strand; PAM type: YTN; PAM sequence: CTT
aaagaggggccagatggttg

SEQ ID NO: 325452 - DNA, 20 bp, Artificial Sequence
  Description of Artificial Sequence: Synthetic oligonucleotide
  Target: LAMA2; (+) strand; PAM type: YTN; PAM sequence: TTA
aagaggggccagatggttga

SEQ ID NO: 325453 - DNA, 20 bp, Artificial Sequence
  Description of Artificial Sequence: Synthetic oligonucleotide
  Target: LAMA2; (+) strand; PAM type: YTN; PAM sequence: TTG
aaatttagatagcatctgga

SEQ ID NO: 325454 - DNA, 20 bp, Artificial Sequence
  Description of Artificial Sequence: Synthetic oligonucleotide
  Target: LAMA2; (+) strand; PAM type: YTN; PAM sequence: TTT
agatagcatctggagatacg

SEQ ID NO: 325455 - DNA, 20 bp, Artificial Sequence
  Description of Artificial Sequence: Synthetic oligonucleotide
  Target: LAMA2; (+) strand; PAM type: YTN; PAM sequence: TTA
gatagcatctggagatacgg

SEQ ID NO: 325456 - DNA, 20 bp, Artificial Sequence
  Description of Artificial Sequence: Synthetic oligonucleotide
  Target: LAMA2; (+) strand; PAM type: YTN; PAM sequence: CTG
gagatacggaaggaaggaaa

SEQ ID NO: 325457 - DNA, 20 bp, Artificial Sequence
  Description of Artificial Sequence: Synthetic oligonucleotide
  Target: LAMA2; (+) strand; PAM type: YTN; PAM sequence: CTT
aaagtctcttagtaggtggt

SEQ ID NO: 325458 - DNA, 20 bp, Artificial Sequence
  Description of Artificial Sequence: Synthetic oligonucleotide
  Target: LAMA2; (+) strand; PAM type: YTN; PAM sequence: TTA
aagtctcttagtaggtggtg

SEQ ID NO: 325459 - DNA, 20 bp, Artificial Sequence
  Description of Artificial Sequence: Synthetic oligonucleotide
  Target: LAMA2; (+) strand; PAM type: YTN; PAM sequence: CTC
ttagtaggtggtggcaacaa

SEQ ID NO: 325460 - DNA, 20 bp, Artificial Sequence
  Description of Artificial Sequence: Synthetic oligonucleotide
  Target: LAMA2; (+) strand; PAM type: YTN; PAM sequence: CTT
agtaggtggtggcaacaagc

SEQ ID NO: 325461 - DNA, 20 bp, Artificial Sequence
  Description of Artificial Sequence: Synthetic oligonucleotide
  Target: LAMA2; (+) strand; PAM type: YTN; PAM sequence: TTA
gtaggtggtggcaacaagct

SEQ ID NO: 325462 - DNA, 20 bp, Artificial Sequence
  Description of Artificial Sequence: Synthetic oligonucleotide
  Target: LAMA2; (+) strand; PAM type: YTN; PAM sequence: CTG
tgggagtgtgaggagaggaa

SEQ ID NO: 325463 - DNA, 20 bp, Artificial Sequence
  Description of Artificial Sequence: Synthetic oligonucleotide
  Target: LAMA2; (+) strand; PAM type: YTN; PAM sequence: CTG
catggcaagcaaaggttgtc

SEQ ID NO: 325464 - DNA, 20 bp, Artificial Sequence
  Description of Artificial Sequence: Synthetic oligonucleotide
  Target: LAMA2; (+) strand; PAM type: YTN; PAM sequence: TTG
tcatatcatgaagataaagt

SEQ ID NO: 325465 - DNA, 20 bp, Artificial Sequence
  Description of Artificial Sequence: Synthetic oligonucleotide
  Target: LAMA2; (+) strand; PAM type: YTN; PAM sequence: CTC
taaggtagcaatcctcagaa

SEQ ID NO: 325466 - DNA, 20 bp, Artificial Sequence
  Description of Artificial Sequence: Synthetic oligonucleotide
  Target: LAMA2; (+) strand; PAM type: YTN; PAM sequence: CTA
aggtagcaatcctcagaaga

SEQ ID NO: 325467 - DNA, 20 bp, Artificial Sequence
  Description of Artificial Sequence: Synthetic oligonucleotide
  Target: LAMA2; (+) strand; PAM type: YTN; PAM sequence: CTC
agaagaacacgtgaaaaggt

SEQ ID NO: 325468 - DNA, 20 bp, Artificial Sequence
  Description of Artificial Sequence: Synthetic oligonucleotide
  Target: LAMA2; (+) strand; PAM type: YTN; PAM sequence: TTT
cctctcctgagataggattt

SEQ ID NO: 325469 - DNA, 20 bp, Artificial Sequence
  Description of Artificial Sequence: Synthetic oligonucleotide
  Target: LAMA2; (+) strand; PAM type: YTN; PAM sequence: TTC
ctctcctgagataggattta

SEQ ID NO: 325470 - DNA, 20 bp, Artificial Sequence
  Description of Artificial Sequence: Synthetic oligonucleotide
  Target: LAMA2; (+) strand; PAM type: YTN; PAM sequence: CTC
tcctgagataggatttaatc

SEQ ID NO: 325471 - DNA, 20 bp, Artificial Sequence
  Description of Artificial Sequence: Synthetic oligonucleotide
  Target: LAMA2; (+) strand; PAM type: YTN; PAM sequence: CTC
ctgagataggatttaatctt

SEQ ID NO: 325472 - DNA, 20 bp, Artificial Sequence
  Description of Artificial Sequence: Synthetic oligonucleotide
  Target: LAMA2; (+) strand; PAM type: YTN; PAM sequence: CTG
agataggatttaatcttctc

SEQ ID NO: 325473 - DNA, 20 bp, Artificial Sequence
  Description of Artificial Sequence: Synthetic oligonucleotide
  Target: LAMA2; (+) strand; PAM type: YTN; PAM sequence: TTT
aatcttctctagttcatgta

SEQ ID NO: 325474 - DNA, 20 bp, Artificial Sequence
  Description of Artificial Sequence: Synthetic oligonucleotide
  Target: LAMA2; (+) strand; PAM type: YTN; PAM sequence: TTA
atcttctctagttcatgtag

SEQ ID NO: 325475 - DNA, 20 bp, Artificial Sequence
  Description of Artificial Sequence: Synthetic oligonucleotide
  Target: LAMA2; (+) strand; PAM type: YTN; PAM sequence: CTT
ctctagttcatgtagattcc

SEQ ID NO: 325476 - DNA, 20 bp, Artificial Sequence
  Description of Artificial Sequence: Synthetic oligonucleotide
  Target: LAMA2; (+) strand; PAM type: YTN; PAM sequence: TTC
tctagttcatgtagattcca

SEQ ID NO: 325477 - DNA, 20 bp, Artificial Sequence
  Description of Artificial Sequence: Synthetic oligonucleotide
  Target: LAMA2; (+) strand; PAM type: YTN; PAM sequence: CTC
tagttcatgtagattccagg

SEQ ID NO: 325478 - DNA, 20 bp, Artificial Sequence
  Description of Artificial Sequence: Synthetic oligonucleotide
  Target: LAMA2; (+) strand; PAM type: YTN; PAM sequence: CTA
gttcatgtagattccaggga

SEQ ID NO: 325479 - DNA, 20 bp, Artificial Sequence
  Description of Artificial Sequence: Synthetic oligonucleotide
  Target: LAMA2; (+) strand; PAM type: YTN; PAM sequence: TTC
atgtagattccagggaaggg

SEQ ID NO: 325480 - DNA, 20 bp, Artificial Sequence
  Description of Artificial Sequence: Synthetic oligonucleotide
  Target: LAMA2; (+) strand; PAM type: YTN; PAM sequence: TTC
cagggaaggggttcatgaca

SEQ ID NO: 325481 - DNA, 20 bp, Artificial Sequence
  Description of Artificial Sequence: Synthetic oligonucleotide
  Target: LAMA2; (+) strand; PAM type: YTN; PAM sequence: TTC
atgacaattacattccttct

SEQ ID NO: 325482 - DNA, 20 bp, Artificial Sequence
  Description of Artificial Sequence: Synthetic oligonucleotide
  Target: LAMA2; (+) strand; PAM type: YTN; PAM sequence: TTA
cattccttctggaggaactt

SEQ ID NO: 325483 - DNA, 20 bp, Artificial Sequence
  Description of Artificial Sequence: Synthetic oligonucleotide
  Target: LAMA2; (+) strand; PAM type: YTN; PAM sequence: TTC
cttctggaggaacttccctt

SEQ ID NO: 325484 - DNA, 20 bp, Artificial Sequence
  Description of Artificial Sequence: Synthetic oligonucleotide
  Target: LAMA2; (+) strand; PAM type: YTN; PAM sequence: CTT
ctggaggaacttcccttaga

SEQ ID NO: 325485 - DNA, 20 bp, Artificial Sequence
  Description of Artificial Sequence: Synthetic oligonucleotide
  Target: LAMA2; (+) strand; PAM type: YTN; PAM sequence: TTC
tggaggaacttcccttagat

SEQ ID NO: 325486 - DNA, 20 bp, Artificial Sequence
  Description of Artificial Sequence: Synthetic oligonucleotide
  Target: LAMA2; (+) strand; PAM type: YTN; PAM sequence: CTG
gaggaacttcccttagataa

SEQ ID NO: 325487 - DNA, 20 bp, Artificial Sequence
  Description of Artificial Sequence: Synthetic oligonucleotide
  Target: LAMA2; (+) strand; PAM type: YTN; PAM sequence: CTT
cccttagataagggggaact

SEQ ID NO: 325488 - DNA, 20 bp, Artificial Sequence
  Description of Artificial Sequence: Synthetic oligonucleotide
  Target: LAMA2; (+) strand; PAM type: YTN; PAM sequence: TTC
ccttagataagggggaactt

SEQ ID NO: 325489 - DNA, 20 bp, Artificial Sequence
  Description of Artificial Sequence: Synthetic oligonucleotide
  Target: LAMA2; (+) strand; PAM type: YTN; PAM sequence: CTT
agataagggggaacttcaga

SEQ ID NO: 325490 - DNA, 20 bp, Artificial Sequence
  Description of Artificial Sequence: Synthetic oligonucleotide
  Target: LAMA2; (+) strand; PAM type: YTN; PAM sequence: TTA
gataagggggaacttcagag

SEQ ID NO: 325491 - DNA, 20 bp, Artificial Sequence
  Description of Artificial Sequence: Synthetic oligonucleotide
  Target: LAMA2; (+) strand; PAM type: YTN; PAM sequence: CTT
cagagaaagcctctccctgt

SEQ ID NO: 325492 - DNA, 20 bp, Artificial Sequence
  Description of Artificial Sequence: Synthetic oligonucleotide
  Target: LAMA2; (+) strand; PAM type: YTN; PAM sequence: TTC
agagaaagcctctccctgtg

SEQ ID NO: 325493 - DNA, 20 bp, Artificial Sequence
  Description of Artificial Sequence: Synthetic oligonucleotide
  Target: LAMA2; (+) strand; PAM type: YTN; PAM sequence: CTC
tccctgtgcttgaggagagg

SEQ ID NO: 325494 - DNA, 20 bp, Artificial Sequence
  Description of Artificial Sequence: Synthetic oligonucleotide
  Target: LAMA2; (+) strand; PAM type: YTN; PAM sequence: CTC
cctgtgcttgaggagaggca

SEQ ID NO: 325495 - DNA, 20 bp, Artificial Sequence
  Description of Artificial Sequence: Synthetic oligonucleotide
  Target: LAMA2; (+) strand; PAM type: YTN; PAM sequence: CTG
tgcttgaggagaggcagagg

SEQ ID NO: 325496 - DNA, 20 bp, Artificial Sequence
  Description of Artificial Sequence: Synthetic oligonucleotide
  Target: LAMA2; (+) strand; PAM type: YTN; PAM sequence: CTT
gaggagaggcagaggggcga

SEQ ID NO: 325497 - DNA, 20 bp, Artificial Sequence
  Description of Artificial Sequence: Synthetic oligonucleotide
  Target: LAMA2; (+) strand; PAM type: YTN; PAM sequence: TTG
aggagaggcagaggggcgag

SEQ ID NO: 325498 - DNA, 20 bp, Artificial Sequence
  Description of Artificial Sequence: Synthetic oligonucleotide
  Target: LAMA2; (+) strand; PAM type: YTN; PAM sequence: CTT
ggttctaaggtggcttcttt

SEQ ID NO: 325499 - DNA, 20 bp, Artificial Sequence
  Description of Artificial Sequence: Synthetic oligonucleotide
  Target: LAMA2; (+) strand; PAM type: YTN; PAM sequence: TTG
gttctaaggtggcttcttta

SEQ ID NO: 325500 - DNA, 20 bp, Artificial Sequence
  Description of Artificial Sequence: Synthetic oligonucleotide
  Target: LAMA2; (+) strand; PAM type: YTN; PAM sequence: TTC
taaggtggcttctttagtcc

SEQ ID NO: 325501 - DNA, 20 bp, Artificial Sequence
  Description of Artificial Sequence: Synthetic oligonucleotide
  Target: LAMA2; (+) strand; PAM type: YTN; PAM sequence: CTA
aggtggcttctttagtccaa

SEQ ID NO: 325502 - DNA, 20 bp, Artificial Sequence
  Description of Artificial Sequence: Synthetic oligonucleotide
  Target: LAMA2; (+) strand; PAM type: YTN; PAM sequence: CTT
ctttagtccaaagtgctcag

SEQ ID NO: 325503 - DNA, 20 bp, Artificial Sequence
  Description of Artificial Sequence: Synthetic oligonucleotide
  Target: LAMA2; (+) strand; PAM type: YTN; PAM sequence: TTC
tttagtccaaagtgctcagc

SEQ ID NO: 325504 - DNA, 20 bp, Artificial Sequence
  Description of Artificial Sequence: Synthetic oligonucleotide
  Target: LAMA2; (+) strand; PAM type: YTN; PAM sequence: CTT
tagtccaaagtgctcagctc

SEQ ID NO: 325505 - DNA, 20 bp, Artificial Sequence
  Description of Artificial Sequence: Synthetic oligonucleotide
  Target: LAMA2; (+) strand; PAM type: YTN; PAM sequence: TTT
agtccaaagtgctcagctcc

SEQ ID NO: 325506 - DNA, 20 bp, Artificial Sequence
  Description of Artificial Sequence: Synthetic oligonucleotide
  Target: LAMA2; (+) strand; PAM type: YTN; PAM sequence: TTA
gtccaaagtgctcagctcct

SEQ ID NO: 325507 - DNA, 20 bp, Artificial Sequence
  Description of Artificial Sequence: Synthetic oligonucleotide
  Target: LAMA2; (+) strand; PAM type: YTN; PAM sequence: CTC
agctcctcaaagcgccatac

SEQ ID NO: 325508 - DNA, 20 bp, Artificial Sequence
  Description of Artificial Sequence: Synthetic oligonucleotide
  Target: LAMA2; (+) strand; PAM type: YTN; PAM sequence: CTC
ctcaaagcgccatactttgg

SEQ ID NO: 325509 - DNA, 20 bp, Artificial Sequence
  Description of Artificial Sequence: Synthetic oligonucleotide
  Target: LAMA2; (+) strand; PAM type: YTN; PAM sequence: CTC
aaagcgccatactttggagt

SEQ ID NO: 325510 - DNA, 20 bp, Artificial Sequence
  Description of Artificial Sequence: Synthetic oligonucleotide
  Target: LAMA2; (+) strand; PAM type: YTN; PAM sequence: CTT
tggagtactattttctgagc

SEQ ID NO: 325511 - DNA, 20 bp, Artificial Sequence
  Description of Artificial Sequence: Synthetic oligonucleotide
  Target: LAMA2; (+) strand; PAM type: YTN; PAM sequence: TTT
ggagtactattttctgagcc

SEQ ID NO: 325512 - DNA, 20 bp, Artificial Sequence
  Description of Artificial Sequence: Synthetic oligonucleotide
  Target: LAMA2; (+) strand; PAM type: YTN; PAM sequence: TTG
gagtactattttctgagccc

SEQ ID NO: 325513 - DNA, 20 bp, Artificial Sequence
  Description of Artificial Sequence: Synthetic oligonucleotide
  Target: LAMA2; (+) strand; PAM type: YTN; PAM sequence: CTA
ttttctgagccctaacagcc

SEQ ID NO: 325514 - DNA, 20 bp, Artificial Sequence
  Description of Artificial Sequence: Synthetic oligonucleotide
  Target: LAMA2; (+) strand; PAM type: YTN; PAM sequence: TTT
tctgagccctaacagccaca

SEQ ID NO: 325515 - DNA, 20 bp, Artificial Sequence
  Description of Artificial Sequence: Synthetic oligonucleotide
  Target: LAMA2; (+) strand; PAM type: YTN; PAM sequence: TTT
ctgagccctaacagccacaa

SEQ ID NO: 325516 - DNA, 20 bp, Artificial Sequence
  Description of Artificial Sequence: Synthetic oligonucleotide
  Target: LAMA2; (+) strand; PAM type: YTN; PAM sequence: TTC
tgagccctaacagccacaaa

SEQ ID NO: 325517 - DNA, 20 bp, Artificial Sequence
  Description of Artificial Sequence: Synthetic oligonucleotide
  Target: LAMA2; (+) strand; PAM type: YTN; PAM sequence: CTG
agccctaacagccacaaatg

SEQ ID NO: 325518 - DNA, 20 bp, Artificial Sequence
  Description of Artificial Sequence: Synthetic oligonucleotide
  Target: LAMA2; (+) strand; PAM type: YTN; PAM sequence: CTA
acagccacaaatggaagaag

SEQ ID NO: 325519 - DNA, 20 bp, Artificial Sequence
  Description of Artificial Sequence: Synthetic oligonucleotide
  Target: LAMA2; (+) strand; PAM type: YTN; PAM sequence: TTC
ccctgtacagaaaagtttgc

SEQ ID NO: 325520 - DNA, 20 bp, Artificial Sequence
  Description of Artificial Sequence: Synthetic oligonucleotide
  Target: LAMA2; (+) strand; PAM type: YTN; PAM sequence: CTG
tacagaaaagtttgcattac

SEQ ID NO: 325521 - DNA, 20 bp, Artificial Sequence
  Description of Artificial Sequence: Synthetic oligonucleotide
  Target: LAMA2; (+) strand; PAM type: YTN; PAM sequence: TTT
gcattacttttgtcagatta

SEQ ID NO: 325522 - DNA, 20 bp, Artificial Sequence
  Description of Artificial Sequence: Synthetic oligonucleotide
  Target: LAMA2; (+) strand; PAM type: YTN; PAM sequence: TTG
cattacttttgtcagattat

SEQ ID NO: 325523 - DNA, 20 bp, Artificial Sequence
  Description of Artificial Sequence: Synthetic oligonucleotide
  Target: LAMA2; (+) strand; PAM type: YTN; PAM sequence: TTA
cttttgtcagattatgtctc

SEQ ID NO: 325524 - DNA, 20 bp, Artificial Sequence
  Description of Artificial Sequence: Synthetic oligonucleotide
  Target: LAMA2; (+) strand; PAM type: YTN; PAM sequence: CTT
ttgtcagattatgtctctta

SEQ ID NO: 325525 - DNA, 20 bp, Artificial Sequence
  Description of Artificial Sequence: Synthetic oligonucleotide
  Target: LAMA2; (+) strand; PAM type: YTN; PAM sequence: TTT
tgtcagattatgtctcttaa

SEQ ID NO: 325526 - DNA, 20 bp, Artificial Sequence
  Description of Artificial Sequence: Synthetic oligonucleotide
  Target: LAMA2; (+) strand; PAM type: YTN; PAM sequence: TTT
gtcagattatgtctcttaat

SEQ ID NO: 325527 - DNA, 20 bp, Artificial Sequence
  Description of Artificial Sequence: Synthetic oligonucleotide
  Target: LAMA2; (+) strand; PAM type: YTN; PAM sequence: TTG
tcagattatgtctcttaata

SEQ ID NO: 325528 - DNA, 20 bp, Artificial Sequence
  Description of Artificial Sequence: Synthetic oligonucleotide
  Target: LAMA2; (+) strand; PAM type: YTN; PAM sequence: TTA
tgtctcttaatataatcaca

SEQ ID NO: 325529 - DNA, 20 bp, Artificial Sequence
  Description of Artificial Sequence: Synthetic oligonucleotide
  Target: LAMA2; (+) strand; PAM type: YTN; PAM sequence: CTC
ttaatataatcacattttat

SEQ ID NO: 325530 - DNA, 20 bp, Artificial Sequence
  Description of Artificial Sequence: Synthetic oligonucleotide
  Target: LAMA2; (+) strand; PAM type: YTN; PAM sequence: CTT
aatataatcacattttatga

SEQ ID NO: 325531 - DNA, 20 bp, Artificial Sequence
  Description of Artificial Sequence: Synthetic oligonucleotide
  Target: LAMA2; (+) strand; PAM type: YTN; PAM sequence: TTA
atataatcacattttatgaa

SEQ ID NO: 325532 - DNA, 20 bp, Artificial Sequence
  Description of Artificial Sequence: Synthetic oligonucleotide
  Target: LAMA2; (+) strand; PAM type: YTN; PAM sequence: TTT
tatgaataagttttatttca

SEQ ID NO: 325533 - DNA, 20 bp, Artificial Sequence
  Description of Artificial Sequence: Synthetic oligonucleotide
  Target: LAMA2; (+) strand; PAM type: YTN; PAM sequence: TTT
atgaataagttttatttcac

SEQ ID NO: 325534 - DNA, 20 bp, Artificial Sequence
  Description of Artificial Sequence: Synthetic oligonucleotide
  Target: LAMA2; (+) strand; PAM type: YTN; PAM sequence: TTA
tgaataagttttatttcact

SEQ ID NO: 325535 - DNA, 20 bp, Artificial Sequence
  Description of Artificial Sequence: Synthetic oligonucleotide
  Target: LAMA2; (+) strand; PAM type: YTN; PAM sequence: TTT
tatttcacttaacagattta

SEQ ID NO: 325536 - DNA, 20 bp, Artificial Sequence
  Description of Artificial Sequence: Synthetic oligonucleotide
  Target: LAMA2; (+) strand; PAM type: YTN; PAM sequence: TTT
atttcacttaacagatttat

SEQ ID NO: 325537 - DNA, 20 bp, Artificial Sequence
  Description of Artificial Sequence: Synthetic oligonucleotide
  Target: LAMA2; (+) strand; PAM type: YTN; PAM sequence: TTA
tttcacttaacagatttatt

SEQ ID NO: 325538 - DNA, 20 bp, Artificial Sequence
  Description of Artificial Sequence: Synthetic oligonucleotide
  Target: LAMA2; (+) strand; PAM type: YTN; PAM sequence: TTT
cacttaacagatttatttat

SEQ ID NO: 325539 - DNA, 20 bp, Artificial Sequence
  Description of Artificial Sequence: Synthetic oligonucleotide
  Target: LAMA2; (+) strand; PAM type: YTN; PAM sequence: TTC
acttaacagatttatttatt

SEQ ID NO: 325540 - DNA, 20 bp, Artificial Sequence
  Description of Artificial Sequence: Synthetic oligonucleotide
  Target: LAMA2; (+) strand; PAM type: YTN; PAM sequence: CTT
aacagatttatttatttttt

SEQ ID NO: 325541 - DNA, 20 bp, Artificial Sequence
  Description of Artificial Sequence: Synthetic oligonucleotide
  Target: LAMA2; (+) strand; PAM type: YTN; PAM sequence: TTA
acagatttatttatttttta

SEQ ID NO: 325542 - DNA, 20 bp, Artificial Sequence
  Description of Artificial Sequence: Synthetic oligonucleotide
  Target: LAMA2; (+) strand; PAM type: YTN; PAM sequence: TTT
atttattttttaaaaccaca

SEQ ID NO: 325543 - DNA, 20 bp, Artificial Sequence
  Description of Artificial Sequence: Synthetic oligonucleotide
  Target: LAMA2; (+) strand; PAM type: YTN; PAM sequence: TTA
tttattttttaaaaccacaa

SEQ ID NO: 325544 - DNA, 20 bp, Artificial Sequence
  Description of Artificial Sequence: Synthetic oligonucleotide
  Target: LAMA2; (+) strand; PAM type: YTN; PAM sequence: TTT
attttttaaaaccacaactt

SEQ ID NO: 325545 - DNA, 20 bp, Artificial Sequence
  Description of Artificial Sequence: Synthetic oligonucleotide
  Target: LAMA2; (+) strand; PAM type: YTN; PAM sequence: TTA
ttttttaaaaccacaacttt

SEQ ID NO: 325546 - DNA, 20 bp, Artificial Sequence
  Description of Artificial Sequence: Synthetic oligonucleotide
  Target: LAMA2; (+) strand; PAM type: YTN; PAM sequence: TTT
tttaaaaccacaactttaat

SEQ ID NO: 325547 - DNA, 20 bp, Artificial Sequence
  Description of Artificial Sequence: Synthetic oligonucleotide
  Target: LAMA2; (+) strand; PAM type: YTN; PAM sequence: TTT
ttaaaaccacaactttaatt

SEQ ID NO: 325548 - DNA, 20 bp, Artificial Sequence
  Description of Artificial Sequence: Synthetic oligonucleotide
  Target: LAMA2; (+) strand; PAM type: YTN; PAM sequence: TTT
taaaaccacaactttaattc

SEQ ID NO: 325549 - DNA, 20 bp, Artificial Sequence
  Description of Artificial Sequence: Synthetic oligonucleotide
  Target: LAMA2; (+) strand; PAM type: YTN; PAM sequence: TTT
aaaaccacaactttaattcc

SEQ ID NO: 325550 - DNA, 20 bp, Artificial Sequence
  Description of Artificial Sequence: Synthetic oligonucleotide
  Target: LAMA2; (+) strand; PAM type: YTN; PAM sequence: TTA
aaaccacaactttaattccc

SEQ ID NO: 325551 - DNA, 20 bp, Artificial Sequence
  Description of Artificial Sequence: Synthetic oligonucleotide
  Target: LAMA2; (+) strand; PAM type: YTN; PAM sequence: CTT
taattcccaagtaactctta

SEQ ID NO: 325552 - DNA, 20 bp, Artificial Sequence
  Description of Artificial Sequence: Synthetic oligonucleotide
  Target: LAMA2; (+) strand; PAM type: YTN; PAM sequence: TTT
aattcccaagtaactcttag

SEQ ID NO: 325553 - DNA, 20 bp, Artificial Sequence
  Description of Artificial Sequence: Synthetic oligonucleotide
  Target: LAMA2; (+) strand; PAM type: YTN; PAM sequence: TTA
attcccaagtaactcttaga

SEQ ID NO: 325554 - DNA, 20 bp, Artificial Sequence
  Description of Artificial Sequence: Synthetic oligonucleotide
  Target: LAMA2; (+) strand; PAM type: YTN; PAM sequence: TTC
ccaagtaactcttagaagtt

SEQ ID NO: 325555 - DNA, 20 bp, Artificial Sequence
  Description of Artificial Sequence: Synthetic oligonucleotide
  Target: LAMA2; (+) strand; PAM type: YTN; PAM sequence: CTC
ttagaagtttctcctttttg

SEQ ID NO: 325556 - DNA, 20 bp, Artificial Sequence
  Description of Artificial Sequence: Synthetic oligonucleotide
  Target: LAMA2; (+) strand; PAM type: YTN; PAM sequence: CTT
agaagtttctcctttttgga

SEQ ID NO: 325557 - DNA, 20 bp, Artificial Sequence
  Description of Artificial Sequence: Synthetic oligonucleotide
  Target: LAMA2; (+) strand; PAM type: YTN; PAM sequence: TTA
gaagtttctcctttttggat

SEQ ID NO: 325558 - DNA, 20 bp, Artificial Sequence
  Description of Artificial Sequence: Synthetic oligonucleotide
  Target: LAMA2; (+) strand; PAM type: YTN; PAM sequence: TTT
ctcctttttggattttcatt

SEQ ID NO: 325559 - DNA, 20 bp, Artificial Sequence
  Description of Artificial Sequence: Synthetic oligonucleotide
  Target: LAMA2; (+) strand; PAM type: YTN; PAM sequence: TTC
tcctttttggattttcattt

SEQ ID NO: 325560 - DNA, 20 bp, Artificial Sequence
  Description of Artificial Sequence: Synthetic oligonucleotide
  Target: LAMA2; (+) strand; PAM type: YTN; PAM sequence: CTC
ctttttggattttcattttg

SEQ ID NO: 325561 - DNA, 20 bp, Artificial Sequence
  Description of Artificial Sequence: Synthetic oligonucleotide
  Target: LAMA2; (+) strand; PAM type: YTN; PAM sequence: CTT
tttggattttcattttgatg

SEQ ID NO: 325562 - DNA, 20 bp, Artificial Sequence
  Description of Artificial Sequence: Synthetic oligonucleotide
  Target: LAMA2; (+) strand; PAM type: YTN; PAM sequence: TTT
ttggattttcattttgatgt

SEQ ID NO: 325563 - DNA, 20 bp, Artificial Sequence
  Description of Artificial Sequence: Synthetic oligonucleotide
  Target: LAMA2; (+) strand; PAM type: YTN; PAM sequence: TTT
tggattttcattttgatgtt

SEQ ID NO: 325564 - DNA, 20 bp, Artificial Sequence
  Description of Artificial Sequence: Synthetic oligonucleotide
  Target: LAMA2; (+) strand; PAM type: YTN; PAM sequence: TTT
ggattttcattttgatgttt

SEQ ID NO: 325565 - DNA, 20 bp, Artificial Sequence
  Description of Artificial Sequence: Synthetic oligonucleotide
  Target: LAMA2; (+) strand; PAM type: YTN; PAM sequence: TTG
gattttcattttgatgttta

SEQ ID NO: 325566 - DNA, 20 bp, Artificial Sequence
  Description of Artificial Sequence: Synthetic oligonucleotide
  Target: LAMA2; (+) strand; PAM type: YTN; PAM sequence: TTT
tcattttgatgtttagtagg

SEQ ID NO: 325567 - DNA, 20 bp, Artificial Sequence
  Description of Artificial Sequence: Synthetic oligonucleotide
  Target: LAMA2; (+) strand; PAM type: YTN; PAM sequence: TTT
cattttgatgtttagtaggc

SEQ ID NO: 325568 - DNA, 20 bp, Artificial Sequence
  Description of Artificial Sequence: Synthetic oligonucleotide
  Target: LAMA2; (+) strand; PAM type: YTN; PAM sequence: TTC
attttgatgtttagtaggct

SEQ ID NO: 325569 - DNA, 20 bp, Artificial Sequence
  Description of Artificial Sequence: Synthetic oligonucleotide
  Target: LAMA2; (+) strand; PAM type: YTN; PAM sequence: TTT
tgatgtttagtaggcttaaa

SEQ ID NO: 325570 - DNA, 20 bp, Artificial Sequence
  Description of Artificial Sequence: Synthetic oligonucleotide
  Target: LAMA2; (+) strand; PAM type: YTN; PAM sequence: TTT
gatgtttagtaggcttaaat

SEQ ID NO: 325571 - DNA, 20 bp, Artificial Sequence
  Description of Artificial Sequence: Synthetic oligonucleotide
  Target: LAMA2; (+) strand; PAM type: YTN; PAM sequence: TTG
atgtttagtaggcttaaatt

SEQ ID NO: 325572 - DNA, 20 bp, Artificial Sequence
  Description of Artificial Sequence: Synthetic oligonucleotide
  Target: LAMA2; (+) strand; PAM type: YTN; PAM sequence: TTT
agtaggcttaaattccagtg

SEQ ID NO: 325573 - DNA, 20 bp, Artificial Sequence
  Description of Artificial Sequence: Synthetic oligonucleotide
  Target: LAMA2; (+) strand; PAM type: YTN; PAM sequence: TTA
gtaggcttaaattccagtgt

SEQ ID NO: 325574 - DNA, 20 bp, Artificial Sequence
  Description of Artificial Sequence: Synthetic oligonucleotide
  Target: LAMA2; (+) strand; PAM type: YTN; PAM sequence: CTT
aaattccagtgtttaacaca

SEQ ID NO: 325575 - DNA, 20 bp, Artificial Sequence
  Description of Artificial Sequence: Synthetic oligonucleotide
  Target: LAMA2; (+) strand; PAM type: YTN; PAM sequence: TTA
aattccagtgtttaacacaa

SEQ ID NO: 325576 - DNA, 20 bp, Artificial Sequence
  Description of Artificial Sequence: Synthetic oligonucleotide
  Target: LAMA2; (+) strand; PAM type: YTN; PAM sequence: TTC
cagtgtttaacacaaccccc

SEQ ID NO: 325577 - DNA, 20 bp, Artificial Sequence
  Description of Artificial Sequence: Synthetic oligonucleotide
  Target: LAMA2; (+) strand; PAM type: YTN; PAM sequence: TTT
aacacaacccccagcttttg

SEQ ID NO: 325578 - DNA, 20 bp, Artificial Sequence
  Description of Artificial Sequence: Synthetic oligonucleotide
  Target: LAMA2; (+) strand; PAM type: YTN; PAM sequence: TTA
acacaacccccagcttttga

SEQ ID NO: 325579 - DNA, 20 bp, Artificial Sequence
  Description of Artificial Sequence: Synthetic oligonucleotide
  Target: LAMA2; (+) strand; PAM type: YTN; PAM sequence: CTT
ttgagtcacagtttatttca

SEQ ID NO: 325580 - DNA, 20 bp, Artificial Sequence
  Description of Artificial Sequence: Synthetic oligonucleotide
  Target: LAMA2; (+) strand; PAM type: YTN; PAM sequence: TTT
tgagtcacagtttatttcat

SEQ ID NO: 325581 - DNA, 20 bp, Artificial Sequence
  Description of Artificial Sequence: Synthetic oligonucleotide
  Target: LAMA2; (+) strand; PAM type: YTN; PAM sequence: TTT
gagtcacagtttatttcatt

SEQ ID NO: 325582 - DNA, 20 bp, Artificial Sequence
  Description of Artificial Sequence: Synthetic oligonucleotide
  Target: LAMA2; (+) strand; PAM type: YTN; PAM sequence: TTG
agtcacagtttatttcatta

SEQ ID NO: 325583 - DNA, 20 bp, Artificial Sequence
  Description of Artificial Sequence: Synthetic oligonucleotide
  Target: LAMA2; (+) strand; PAM type: YTN; PAM sequence: TTT
atttcattatagtagacccc

SEQ ID NO: 325584 - DNA, 20 bp, Artificial Sequence
  Description of Artificial Sequence: Synthetic oligonucleotide
  Target: LAMA2; (+) strand; PAM type: YTN; PAM sequence: TTA
tttcattatagtagacccct

SEQ ID NO: 325585 - DNA, 20 bp, Artificial Sequence
  Description of Artificial Sequence: Synthetic oligonucleotide
  Target: LAMA2; (+) strand; PAM type: YTN; PAM sequence: TTT
cattatagtagacccctgat

SEQ ID NO: 325586 - DNA, 20 bp, Artificial Sequence
  Description of Artificial Sequence: Synthetic oligonucleotide
  Target: LAMA2; (+) strand; PAM type: YTN; PAM sequence: TTC
attatagtagacccctgatt

SEQ ID NO: 325587 - DNA, 20 bp, Artificial Sequence
  Description of Artificial Sequence: Synthetic oligonucleotide
  Target: LAMA2; (+) strand; PAM type: YTN; PAM sequence: TTA
tagtagacccctgattgcca

SEQ ID NO: 325588 - DNA, 20 bp, Artificial Sequence
  Description of Artificial Sequence: Synthetic oligonucleotide
  Target: LAMA2; (+) strand; PAM type: YTN; PAM sequence: CTG
attgccaaattacaatatct

SEQ ID NO: 325589 - DNA, 20 bp, Artificial Sequence
  Description of Artificial Sequence: Synthetic oligonucleotide
  Target: LAMA2; (+) strand; PAM type: YTN; PAM sequence: TTG
ccaaattacaatatcttatg

SEQ ID NO: 325590 - DNA, 20 bp, Artificial Sequence
  Description of Artificial Sequence: Synthetic oligonucleotide
  Target: LAMA2; (+) strand; PAM type: YTN; PAM sequence: TTA
caatatcttatgaaccgggc

SEQ ID NO: 325591 - DNA, 20 bp, Artificial Sequence
  Description of Artificial Sequence: Synthetic oligonucleotide
  Target: LAMA2; (+) strand; PAM type: YTN; PAM sequence: CTT
atgaaccgggcaaaatgttg

SEQ ID NO: 325592 - DNA, 20 bp, Artificial Sequence
  Description of Artificial Sequence: Synthetic oligonucleotide
  Target: LAMA2; (+) strand; PAM type: YTN; PAM sequence: TTA
tgaaccgggcaaaatgttga

SEQ ID NO: 325593 - DNA, 20 bp, Artificial Sequence
  Description of Artificial Sequence: Synthetic oligonucleotide
  Target: LAMA2; (+) strand; PAM type: YTN; PAM sequence: TTG
acttatttaggacattatgt

SEQ ID NO: 325594 - DNA, 20 bp, Artificial Sequence
  Description of Artificial Sequence: Synthetic oligonucleotide
  Target: LAMA2; (+) strand; PAM type: YTN; PAM sequence: CTT
atttaggacattatgttacc

SEQ ID NO: 325595 - DNA, 20 bp, Artificial Sequence
  Description of Artificial Sequence: Synthetic oligonucleotide
  Target: LAMA2; (+) strand; PAM type: YTN; PAM sequence: TTA
tttaggacattatgttacct

SEQ ID NO: 325596 - DNA, 20 bp, Artificial Sequence
  Description of Artificial Sequence: Synthetic oligonucleotide
  Target: LAMA2; (+) strand; PAM type: YTN; PAM sequence: TTT
aggacattatgttacctatt

SEQ ID NO: 325597 - DNA, 20 bp, Artificial Sequence
  Description of Artificial Sequence: Synthetic oligonucleotide
  Target: LAMA2; (+) strand; PAM type: YTN; PAM sequence: TTA
ggacattatgttacctattt

SEQ ID NO: 325598 - DNA, 20 bp, Artificial Sequence
  Description of Artificial Sequence: Synthetic oligonucleotide
  Target: LAMA2; (+) strand; PAM type: YTN; PAM sequence: TTA
tgttacctatttattccaaa

SEQ ID NO: 325599 - DNA, 20 bp, Artificial Sequence
  Description of Artificial Sequence: Synthetic oligonucleotide
  Target: LAMA2; (+) strand; PAM type: YTN; PAM sequence: TTA
cctatttattccaaaatatt

SEQ ID NO: 325600 - DNA, 20 bp, Artificial Sequence
  Description of Artificial Sequence: Synthetic oligonucleotide
  Target: LAMA2; (+) strand; PAM type: YTN; PAM sequence: CTA
tttattccaaaatatttcat

SEQ ID NO: 325601 - DNA, 20 bp, Artificial Sequence
  Description of Artificial Sequence: Synthetic oligonucleotide
  Target: LAMA2; (+) strand; PAM type: YTN; PAM sequence: TTT
attccaaaatatttcatttg

SEQ ID NO: 325602 - DNA, 20 bp, Artificial Sequence
  Description of Artificial Sequence: Synthetic oligonucleotide
  Target: LAMA2; (+) strand; PAM type: YTN; PAM sequence: TTA
ttccaaaatatttcatttga

SEQ ID NO: 325603 - DNA, 20 bp, Artificial Sequence
  Description of Artificial Sequence: Synthetic oligonucleotide
  Target: LAMA2; (+) strand; PAM type: YTN; PAM sequence: TTC
caaaatatttcatttgaaaa

SEQ ID NO: 325604 - DNA, 20 bp, Artificial Sequence
  Description of Artificial Sequence: Synthetic oligonucleotide
  Target: LAMA2; (+) strand; PAM type: YTN; PAM sequence: TTT
catttgaaaatcagctacat

SEQ ID NO: 325605 - DNA, 20 bp, Artificial Sequence
  Description of Artificial Sequence: Synthetic oligonucleotide
  Target: LAMA2; (+) strand; PAM type: YTN; PAM sequence: TTC
atttgaaaatcagctacatt

SEQ ID NO: 325606 - DNA, 20 bp, Artificial Sequence
  Description of Artificial Sequence: Synthetic oligonucleotide
  Target: LAMA2; (+) strand; PAM type: YTN; PAM sequence: TTT
gaaaatcagctacattccca

SEQ ID NO: 325607 - DNA, 20 bp, Artificial Sequence
  Description of Artificial Sequence: Synthetic oligonucleotide
  Target: LAMA2; (+) strand; PAM type: YTN; PAM sequence: TTG
aaaatcagctacattcccat

SEQ ID NO: 325608 - DNA, 20 bp, Artificial Sequence
  Description of Artificial Sequence: Synthetic oligonucleotide
  Target: LAMA2; (+) strand; PAM type: YTN; PAM sequence: CTA
cattcccatgtagacttttc

SEQ ID NO: 325609 - DNA, 20 bp, Artificial Sequence
  Description of Artificial Sequence: Synthetic oligonucleotide
  Target: LAMA2; (+) strand; PAM type: YTN; PAM sequence: TTC
ccatgtagacttttctttat

SEQ ID NO: 325610 - DNA, 20 bp, Artificial Sequence
  Description of Artificial Sequence: Synthetic oligonucleotide
  Target: LAMA2; (+) strand; PAM type: YTN; PAM sequence: CTT
ttctttatacaaaagttaaa

SEQ ID NO: 325611 - DNA, 20 bp, Artificial Sequence
  Description of Artificial Sequence: Synthetic oligonucleotide
  Target: LAMA2; (+) strand; PAM type: YTN; PAM sequence: TTT
tctttatacaaaagttaaaa

SEQ ID NO: 325612 - DNA, 20 bp, Artificial Sequence
  Description of Artificial Sequence: Synthetic oligonucleotide
  Target: LAMA2; (+) strand; PAM type: YTN; PAM sequence: TTT
ctttatacaaaagttaaaat

SEQ ID NO: 325613 - DNA, 20 bp, Artificial Sequence
  Description of Artificial Sequence: Synthetic oligonucleotide
  Target: LAMA2; (+) strand; PAM type: YTN; PAM sequence: TTC
tttatacaaaagttaaaata

SEQ ID NO: 325614 - DNA, 20 bp, Artificial Sequence
  Description of Artificial Sequence: Synthetic oligonucleotide
  Target: LAMA2; (+) strand; PAM type: YTN; PAM sequence: CTT
tatacaaaagttaaaataat

SEQ ID NO: 325615 - DNA, 20 bp, Artificial Sequence
  Description of Artificial Sequence: Synthetic oligonucleotide
  Target: LAMA2; (+) strand; PAM type: YTN; PAM sequence: TTT
atacaaaagttaaaataatt

SEQ ID NO: 325616 - DNA, 20 bp, Artificial Sequence
  Description of Artificial Sequence: Synthetic oligonucleotide
  Target: LAMA2; (+) strand; PAM type: YTN; PAM sequence: TTA
tacaaaagttaaaataatta

SEQ ID NO: 325617 - DNA, 20 bp, Artificial Sequence
  Description of Artificial Sequence: Synthetic oligonucleotide
  Target: LAMA2; (+) strand; PAM type: YTN; PAM sequence: TTA
aaataattacagaaaggtaa

SEQ ID NO: 325618 - DNA, 20 bp, Artificial Sequence
  Description of Artificial Sequence: Synthetic oligonucleotide
  Target: LAMA2; (+) strand; PAM type: YTN; PAM sequence: TTA
cagaaaggtaaattattctg

SEQ ID NO: 325619 - DNA, 20 bp, Artificial Sequence
  Description of Artificial Sequence: Synthetic oligonucleotide
  Target: LAMA2; (+) strand; PAM type: YTN; PAM sequence: TTA
ttctgatgctaaaattagcc

SEQ ID NO: 325620 - DNA, 20 bp, Artificial Sequence
  Description of Artificial Sequence: Synthetic oligonucleotide
  Target: LAMA2; (+) strand; PAM type: YTN; PAM sequence: TTC
tgatgctaaaattagccttt

SEQ ID NO: 325621 - DNA, 20 bp, Artificial Sequence
  Description of Artificial Sequence: Synthetic oligonucleotide
  Target: LAMA2; (+) strand; PAM type: YTN; PAM sequence: CTG
atgctaaaattagcctttca

SEQ ID NO: 325622 - DNA, 20 bp, Artificial Sequence
  Description of Artificial Sequence: Synthetic oligonucleotide
  Target: LAMA2; (+) strand; PAM type: YTN; PAM sequence: CTA
aaattagcctttcattgatt

SEQ ID NO: 325623 - DNA, 20 bp, Artificial Sequence
  Description of Artificial Sequence: Synthetic oligonucleotide
  Target: LAMA2; (+) strand; PAM type: YTN; PAM sequence: TTA
gcctttcattgatttcaagt

SEQ ID NO: 325624 - DNA, 20 bp, Artificial Sequence
  Description of Artificial Sequence: Synthetic oligonucleotide
  Target: LAMA2; (+) strand; PAM type: YTN; PAM sequence: CTT
tcattgatttcaagtagatt

SEQ ID NO: 325625 - DNA, 20 bp, Artificial Sequence
  Description of Artificial Sequence: Synthetic oligonucleotide
  Target: LAMA2; (+) strand; PAM type: YTN; PAM sequence: TTT
cattgatttcaagtagattg

SEQ ID NO: 325626 - DNA, 20 bp, Artificial Sequence
  Description of Artificial Sequence: Synthetic oligonucleotide
  Target: LAMA2; (+) strand; PAM type: YTN; PAM sequence: TTC
attgatttcaagtagattgt

SEQ ID NO: 325627 - DNA, 20 bp, Artificial Sequence
  Description of Artificial Sequence: Synthetic oligonucleotide
  Target: LAMA2; (+) strand; PAM type: YTN; PAM sequence: TTG
atttcaagtagattgtaatt

SEQ ID NO: 325628 - DNA, 20 bp, Artificial Sequence
  Description of Artificial Sequence: Synthetic oligonucleotide
  Target: LAMA2; (+) strand; PAM type: YTN; PAM sequence: TTT
caagtagattgtaattggct

SEQ ID NO: 325629 - DNA, 20 bp, Artificial Sequence
  Description of Artificial Sequence: Synthetic oligonucleotide
  Target: LAMA2; (+) strand; PAM type: YTN; PAM sequence: TTC
aagtagattgtaattggcta

SEQ ID NO: 325630 - DNA, 20 bp, Artificial Sequence
  Description of Artificial Sequence: Synthetic oligonucleotide
  Target: LAMA2; (+) strand; PAM type: YTN; PAM sequence: TTG
taattggctaggatcaaata

SEQ ID NO: 325631 - DNA, 20 bp, Artificial Sequence
  Description of Artificial Sequence: Synthetic oligonucleotide
  Target: LAMA2; (+) strand; PAM type: YTN; PAM sequence: TTG
gctaggatcaaatacatgct

SEQ ID NO: 325632 - DNA, 20 bp, Artificial Sequence
  Description of Artificial Sequence: Synthetic oligonucleotide
  Target: LAMA2; (+) strand; PAM type: YTN; PAM sequence: CTA
ggatcaaatacatgctttat

SEQ ID NO: 325633 - DNA, 20 bp, Artificial Sequence
  Description of Artificial Sequence: Synthetic oligonucleotide
  Target: LAMA2; (+) strand; PAM type: YTN; PAM sequence: CTT
tatgtaatacagtttatttc

SEQ ID NO: 325634 - DNA, 20 bp, Artificial Sequence
  Description of Artificial Sequence: Synthetic oligonucleotide
  Target: LAMA2; (+) strand; PAM type: YTN; PAM sequence: TTT
atgtaatacagtttatttct

SEQ ID NO: 325635 - DNA, 20 bp, Artificial Sequence
  Description of Artificial Sequence: Synthetic oligonucleotide
  Target: LAMA2; (+) strand; PAM type: YTN; PAM sequence: TTA
tgtaatacagtttatttctt

SEQ ID NO: 325636 - DNA, 20 bp, Artificial Sequence
  Description of Artificial Sequence: Synthetic oligonucleotide
  Target: LAMA2; (+) strand; PAM type: YTN; PAM sequence: TTT
atttcttaaactgatacaga

SEQ ID NO: 325637 - DNA, 20 bp, Artificial Sequence
  Description of Artificial Sequence: Synthetic oligonucleotide
  Target: LAMA2; (+) strand; PAM type: YTN; PAM sequence: TTA
tttcttaaactgatacagaa

SEQ ID NO: 325638 - DNA, 20 bp, Artificial Sequence
  Description of Artificial Sequence: Synthetic oligonucleotide
  Target: LAMA2; (+) strand; PAM type: YTN; PAM sequence: TTT
cttaaactgatacagaaagt

SEQ ID NO: 325639 - DNA, 20 bp, Artificial Sequence
  Description of Artificial Sequence: Synthetic oligonucleotide
  Target: LAMA2; (+) strand; PAM type: YTN; PAM sequence: TTC
ttaaactgatacagaaagtg

SEQ ID NO: 325640 - DNA, 20 bp, Artificial Sequence
  Description of Artificial Sequence: Synthetic oligonucleotide
  Target: LAMA2; (+) strand; PAM type: YTN; PAM sequence: CTT
aaactgatacagaaagtgca

SEQ ID NO: 325641 - DNA, 20 bp, Artificial Sequence
  Description of Artificial Sequence: Synthetic oligonucleotide
  Target: LAMA2; (+) strand; PAM type: YTN; PAM sequence: TTA
aactgatacagaaagtgcac

SEQ ID NO: 325642 - DNA, 20 bp, Artificial Sequence
  Description of Artificial Sequence: Synthetic oligonucleotide
  Target: LAMA2; (+) strand; PAM type: YTN; PAM sequence: CTG
atacagaaagtgcacataat

SEQ ID NO: 325643 - DNA, 20 bp, Artificial Sequence
  Description of Artificial Sequence: Synthetic oligonucleotide
  Target: LAMA2; (+) strand; PAM type: YTN; PAM sequence: TTC
tggaagtaaaaatgttcaaa

SEQ ID NO: 325644 - DNA, 20 bp, Artificial Sequence
  Description of Artificial Sequence: Synthetic oligonucleotide
  Target: LAMA2; (+) strand; PAM type: YTN; PAM sequence: CTG
gaagtaaaaatgttcaaaag

SEQ ID NO: 325645 - DNA, 20 bp, Artificial Sequence
  Description of Artificial Sequence: Synthetic oligonucleotide
  Target: LAMA2; (+) strand; PAM type: YTN; PAM sequence: TTC
aaaagctaagaagctctcat

SEQ ID NO: 325646 - DNA, 20 bp, Artificial Sequence
  Description of Artificial Sequence: Synthetic oligonucleotide
  Target: LAMA2; (+) strand; PAM type: YTN; PAM sequence: CTA
agaagctctcatgttatttt

SEQ ID NO: 325647 - DNA, 20 bp, Artificial Sequence
  Description of Artificial Sequence: Synthetic oligonucleotide
  Target: LAMA2; (+) strand; PAM type: YTN; PAM sequence: CTC
tcatgttatttttcttcaat

SEQ ID NO: 325648 - DNA, 20 bp, Artificial Sequence
  Description of Artificial Sequence: Synthetic oligonucleotide
  Target: LAMA2; (+) strand; PAM type: YTN; PAM sequence: CTC
atgttatttttcttcaattt

SEQ ID NO: 325649 - DNA, 20 bp, Artificial Sequence
  Description of Artificial Sequence: Synthetic oligonucleotide
  Target: LAMA2; (+) strand; PAM type: YTN; PAM sequence: TTA
tttttcttcaatttgctaca

SEQ ID NO: 325650 - DNA, 20 bp, Artificial Sequence
  Description of Artificial Sequence: Synthetic oligonucleotide
  Target: LAMA2; (+) strand; PAM type: YTN; PAM sequence: TTT
ttcttcaatttgctacaaac

SEQ ID NO: 325651 - DNA, 20 bp, Artificial Sequence
  Description of Artificial Sequence: Synthetic oligonucleotide
  Target: LAMA2; (+) strand; PAM type: YTN; PAM sequence: TTT
tcttcaatttgctacaaaca

SEQ ID NO: 325652 - DNA, 20 bp, Artificial Sequence
  Description of Artificial Sequence: Synthetic oligonucleotide
  Target: LAMA2; (+) strand; PAM type: YTN; PAM sequence: TTT
cttcaatttgctacaaacat

SEQ ID NO: 325653 - DNA, 20 bp, Artificial Sequence
  Description of Artificial Sequence: Synthetic oligonucleotide
  Target: LAMA2; (+) strand; PAM type: YTN; PAM sequence: TTC
ttcaatttgctacaaacata

SEQ ID NO: 325654 - DNA, 20 bp, Artificial Sequence
  Description of Artificial Sequence: Synthetic oligonucleotide
  Target: LAMA2; (+) strand; PAM type: YTN; PAM sequence: CTT
caatttgctacaaacatata

SEQ ID NO: 325655 - DNA, 20 bp, Artificial Sequence
  Description of Artificial Sequence: Synthetic oligonucleotide
  Target: LAMA2; (+) strand; PAM type: YTN; PAM sequence: TTC
aatttgctacaaacatatat

SEQ ID NO: 325656 - DNA, 20 bp, Artificial Sequence
  Description of Artificial Sequence: Synthetic oligonucleotide
  Target: LAMA2; (+) strand; PAM type: YTN; PAM sequence: TTT
gctacaaacatatatagagt

SEQ ID NO: 325657 - DNA, 20 bp, Artificial Sequence
  Description of Artificial Sequence: Synthetic oligonucleotide
  Target: LAMA2; (+) strand; PAM type: YTN; PAM sequence: TTG
ctacaaacatatatagagtg

SEQ ID NO: 325658 - DNA, 20 bp, Artificial Sequence
  Description of Artificial Sequence: Synthetic oligonucleotide
  Target: LAMA2; (+) strand; PAM type: YTN; PAM sequence: CTA
caaacatatatagagtgtag

SEQ ID NO: 325659 - DNA, 20 bp, Artificial Sequence
  Description of Artificial Sequence: Synthetic oligonucleotide
  Target: LAMA2; (+) strand; PAM type: YTN; PAM sequence: TTA
ttttctagccataagaatta

SEQ ID NO: 325660 - DNA, 20 bp, Artificial Sequence
  Description of Artificial Sequence: Synthetic oligonucleotide
  Target: LAMA2; (+) strand; PAM type: YTN; PAM sequence: TTT
tctagccataagaattagca

SEQ ID NO: 325661 - DNA, 20 bp, Artificial Sequence
  Description of Artificial Sequence: Synthetic oligonucleotide
  Target: LAMA2; (+) strand; PAM type: YTN; PAM sequence: TTT
ctagccataagaattagcag

SEQ ID NO: 325662 - DNA, 20 bp, Artificial Sequence
  Description of Artificial Sequence: Synthetic oligonucleotide
  Target: LAMA2; (+) strand; PAM type: YTN; PAM sequence: TTC
tagccataagaattagcaga

SEQ ID NO: 325663 - DNA, 20 bp, Artificial Sequence
  Description of Artificial Sequence: Synthetic oligonucleotide
  Target: LAMA2; (+) strand; PAM type: YTN; PAM sequence: CTA
gccataagaattagcagaag

SEQ ID NO: 325664 - DNA, 20 bp, Artificial Sequence
  Description of Artificial Sequence: Synthetic oligonucleotide
  Target: LAMA2; (+) strand; PAM type: YTN; PAM sequence: TTA
gcagaagctttggagagaaa

SEQ ID NO: 325665 - DNA, 20 bp, Artificial Sequence
  Description of Artificial Sequence: Synthetic oligonucleotide
  Target: LAMA2; (+) strand; PAM type: YTN; PAM sequence: CTT
tggagagaaaaggtaggaga

SEQ ID NO: 325666 - DNA, 20 bp, Artificial Sequence
  Description of Artificial Sequence: Synthetic oligonucleotide
  Target: LAMA2; (+) strand; PAM type: YTN; PAM sequence: TTT
ggagagaaaaggtaggagac

SEQ ID NO: 325667 - DNA, 20 bp, Artificial Sequence
  Description of Artificial Sequence: Synthetic oligonucleotide
  Target: LAMA2; (+) strand; PAM type: YTN; PAM sequence: TTG
gagagaaaaggtaggagact

SEQ ID NO: 325668 - DNA, 20 bp, Artificial Sequence
  Description of Artificial Sequence: Synthetic oligonucleotide
  Target: LAMA2; (+) strand; PAM type: YTN; PAM sequence: CTG
aatgccctgagcatcccttt

SEQ ID NO: 325669 - DNA, 20 bp, Artificial Sequence
  Description of Artificial Sequence: Synthetic oligonucleotide
  Target: LAMA2; (+) strand; PAM type: YTN; PAM sequence: CTG
agcatccctttgaatagctc

SEQ ID NO: 325670 - DNA, 20 bp, Artificial Sequence
  Description of Artificial Sequence: Synthetic oligonucleotide
  Target: LAMA2; (+) strand; PAM type: YTN; PAM sequence: CTT
tgaatagctcaggcaagaag

SEQ ID NO: 325671 - DNA, 20 bp, Artificial Sequence
  Description of Artificial Sequence: Synthetic oligonucleotide
  Target: LAMA2; (+) strand; PAM type: YTN; PAM sequence: TTT
gaatagctcaggcaagaaga

SEQ ID NO: 325672 - DNA, 20 bp, Artificial Sequence
  Description of Artificial Sequence: Synthetic oligonucleotide
  Target: LAMA2; (+) strand; PAM type: YTN; PAM sequence: TTG
aatagctcaggcaagaagag

SEQ ID NO: 325673 - DNA, 20 bp, Artificial Sequence
  Description of Artificial Sequence: Synthetic oligonucleotide
  Target: LAMA2; (+) strand; PAM type: YTN; PAM sequence: CTC
aggcaagaagaggtgctatt

SEQ ID NO: 325674 - DNA, 20 bp, Artificial Sequence
  Description of Artificial Sequence: Synthetic oligonucleotide
  Target: LAMA2; (+) strand; PAM type: YTN; PAM sequence: CTA
ttatcccaggaggagactgt

SEQ ID NO: 325675 - DNA, 20 bp, Artificial Sequence
  Description of Artificial Sequence: Synthetic oligonucleotide
  Target: LAMA2; (+) strand; PAM type: YTN; PAM sequence: TTA
tcccaggaggagactgtaag

SEQ ID NO: 325676 - DNA, 20 bp, Artificial Sequence
  Description of Artificial Sequence: Synthetic oligonucleotide
  Target: LAMA2; (+) strand; PAM type: YTN; PAM sequence: CTG
taagtgacgtttgtgtaatt

SEQ ID NO: 325677 - DNA, 20 bp, Artificial Sequence
  Description of Artificial Sequence: Synthetic oligonucleotide
  Target: LAMA2; (+) strand; PAM type: YTN; PAM sequence: TTT
gtgtaattcaagtatgtcct

SEQ ID NO: 325678 - DNA, 20 bp, Artificial Sequence
  Description of Artificial Sequence: Synthetic oligonucleotide
  Target: LAMA2; (+) strand; PAM type: YTN; PAM sequence: TTG
tgtaattcaagtatgtcctg

SEQ ID NO: 325679 - DNA, 20 bp, Artificial Sequence
  Description of Artificial Sequence: Synthetic oligonucleotide
  Target: LAMA2; (+) strand; PAM type: YTN; PAM sequence: TTC
aagtatgtcctgcctggata

SEQ ID NO: 325680 - DNA, 20 bp, Artificial Sequence
  Description of Artificial Sequence: Synthetic oligonucleotide
  Target: LAMA2; (+) strand; PAM type: YTN; PAM sequence: CTG
cctggataaggacttgtggg

SEQ ID NO: 325681 - DNA, 20 bp, Artificial Sequence
  Description of Artificial Sequence: Synthetic oligonucleotide
  Target: LAMA2; (+) strand; PAM type: YTN; PAM sequence: CTG
gataaggacttgtgggtaag

SEQ ID NO: 325682 - DNA, 20 bp, Artificial Sequence
  Description of Artificial Sequence: Synthetic oligonucleotide
  Target: LAMA2; (+) strand; PAM type: YTN; PAM sequence: CTT
gtgggtaaggaaacagagta

SEQ ID NO: 325683 - DNA, 20 bp, Artificial Sequence
  Description of Artificial Sequence: Synthetic oligonucleotide
  Target: LAMA2; (+) strand; PAM type: YTN; PAM sequence: TTG
tgggtaaggaaacagagtag

SEQ ID NO: 325684 - DNA, 20 bp, Artificial Sequence
  Description of Artificial Sequence: Synthetic oligonucleotide
  Target: LAMA2; (+) strand; PAM type: YTN; PAM sequence: CTT
gctgtgttcctccacttaaa

SEQ ID NO: 325685 - DNA, 20 bp, Artificial Sequence
  Description of Artificial Sequence: Synthetic oligonucleotide
  Target: LAMA2; (+) strand; PAM type: YTN; PAM sequence: TTG
ctgtgttcctccacttaaat

SEQ ID NO: 325686 - DNA, 20 bp, Artificial Sequence
  Description of Artificial Sequence: Synthetic oligonucleotide
  Target: LAMA2; (+) strand; PAM type: YTN; PAM sequence: CTG
tgttcctccacttaaatata

SEQ ID NO: 325687 - DNA, 20 bp, Artificial Sequence
  Description of Artificial Sequence: Synthetic oligonucleotide
  Target: LAMA2; (+) strand; PAM type: YTN; PAM sequence: TTC
ctccacttaaatatatgtta

SEQ ID NO: 325688 - DNA, 20 bp, Artificial Sequence
  Description of Artificial Sequence: Synthetic oligonucleotide
  Target: LAMA2; (+) strand; PAM type: YTN; PAM sequence: CTC
cacttaaatatatgttattt

SEQ ID NO: 325689 - DNA, 20 bp, Artificial Sequence
  Description of Artificial Sequence: Synthetic oligonucleotide
  Target: LAMA2; (+) strand; PAM type: YTN; PAM sequence: CTT
aaatatatgttatttcttta

SEQ ID NO: 325690 - DNA, 20 bp, Artificial Sequence
  Description of Artificial Sequence: Synthetic oligonucleotide
  Target: LAMA2; (+) strand; PAM type: YTN; PAM sequence: TTA
aatatatgttatttctttag

SEQ ID NO: 325691 - DNA, 20 bp, Artificial Sequence
  Description of Artificial Sequence: Synthetic oligonucleotide
  Target: LAMA2; (+) strand; PAM type: YTN; PAM sequence: TTA
tttctttagggactgcaggt

SEQ ID NO: 325692 - DNA, 20 bp, Artificial Sequence
  Description of Artificial Sequence: Synthetic oligonucleotide
  Target: LAMA2; (+) strand; PAM type: YTN; PAM sequence: TTT
ctttagggactgcaggtttt

SEQ ID NO: 325693 - DNA, 20 bp, Artificial Sequence
  Description of Artificial Sequence: Synthetic oligonucleotide
  Target: LAMA2; (+) strand; PAM type: YTN; PAM sequence: TTC
tttagggactgcaggtttta

SEQ ID NO: 325694 - DNA, 20 bp, Artificial Sequence
  Description of Artificial Sequence: Synthetic oligonucleotide
  Target: LAMA2; (+) strand; PAM type: YTN; PAM sequence: CTT
tagggactgcaggttttaca

SEQ ID NO: 325695 - DNA, 20 bp, Artificial Sequence
  Description of Artificial Sequence: Synthetic oligonucleotide
  Target: LAMA2; (+) strand; PAM type: YTN; PAM sequence: TTT
agggactgcaggttttacaa

SEQ ID NO: 325696 - DNA, 20 bp, Artificial Sequence
  Description of Artificial Sequence: Synthetic oligonucleotide
  Target: LAMA2; (+) strand; PAM type: YTN; PAM sequence: TTA
gggactgcaggttttacaaa

SEQ ID NO: 325697 - DNA, 20 bp, Artificial Sequence
  Description of Artificial Sequence: Synthetic oligonucleotide
  Target: LAMA2; (+) strand; PAM type: YTN; PAM sequence: CTG
caggttttacaaagagatga

SEQ ID NO: 325698 - DNA, 20 bp, Artificial Sequence
  Description of Artificial Sequence: Synthetic oligonucleotide
  Target: LAMA2; (+) strand; PAM type: YTN; PAM sequence: TTT
tacaaagagatgaagactaa

SEQ ID NO: 325699 - DNA, 20 bp, Artificial Sequence
  Description of Artificial Sequence: Synthetic oligonucleotide
  Target: LAMA2; (+) strand; PAM type: YTN; PAM sequence: TTT
acaaagagatgaagactaat

SEQ ID NO: 325700 - DNA, 20 bp, Artificial Sequence
  Description of Artificial Sequence: Synthetic oligonucleotide
  Target: LAMA2; (+) strand; PAM type: YTN; PAM sequence: TTA
caaagagatgaagactaatt

SEQ ID NO: 325701 - DNA, 20 bp, Artificial Sequence
  Description of Artificial Sequence: Synthetic oligonucleotide
  Target: LAMA2; (+) strand; PAM type: YTN; PAM sequence: CTA
attcggaatgctacttacct

SEQ ID NO: 325702 - DNA, 20 bp, Artificial Sequence
  Description of Artificial Sequence: Synthetic oligonucleotide
  Target: LAMA2; (+) strand; PAM type: YTN; PAM sequence: TTC
ggaatgctacttacctctgt

SEQ ID NO: 325703 - DNA, 20 bp, Artificial Sequence
  Description of Artificial Sequence: Synthetic oligonucleotide
  Target: LAMA2; (+) strand; PAM type: YTN; PAM sequence: CTA
cttacctctgtttccaaaag

SEQ ID NO: 325704 - DNA, 20 bp, Artificial Sequence
  Description of Artificial Sequence: Synthetic oligonucleotide
  Target: LAMA2; (+) strand; PAM type: YTN; PAM sequence: CTT
acctctgtttccaaaagaaa

SEQ ID NO: 325705 - DNA, 20 bp, Artificial Sequence
  Description of Artificial Sequence: Synthetic oligonucleotide
  Target: LAMA2; (+) strand; PAM type: YTN; PAM sequence: TTA
cctctgtttccaaaagaaaa

SEQ ID NO: 325706 - DNA, 20 bp, Artificial Sequence
  Description of Artificial Sequence: Synthetic oligonucleotide
  Target: LAMA2; (+) strand; PAM type: YTN; PAM sequence: CTC
tgtttccaaaagaaaaagac

SEQ ID NO: 325707 - DNA, 20 bp, Artificial Sequence
  Description of Artificial Sequence: Synthetic oligonucleotide
  Target: LAMA2; (+) strand; PAM type: YTN; PAM sequence: CTG
tttccaaaagaaaaagactc

SEQ ID NO: 325708 - DNA, 20 bp, Artificial Sequence
  Description of Artificial Sequence: Synthetic oligonucleotide
  Target: LAMA2; (+) strand; PAM type: YTN; PAM sequence: TTT
ccaaaagaaaaagactcctc

SEQ ID NO: 325709 - DNA, 20 bp, Artificial Sequence
  Description of Artificial Sequence: Synthetic oligonucleotide
  Target: LAMA2; (+) strand; PAM type: YTN; PAM sequence: TTC
caaaagaaaaagactcctcc

SEQ ID NO: 325710 - DNA, 20 bp, Artificial Sequence
  Description of Artificial Sequence: Synthetic oligonucleotide
  Target: LAMA2; (+) strand; PAM type: YTN; PAM sequence: CTC
ctccagaatgtggttttaag

SEQ ID NO: 325711 - DNA, 20 bp, Artificial Sequence
  Description of Artificial Sequence: Synthetic oligonucleotide
  Target: LAMA2; (+) strand; PAM type: YTN; PAM sequence: CTC
cagaatgtggttttaagtag

SEQ ID NO: 325712 - DNA, 20 bp, Artificial Sequence
  Description of Artificial Sequence: Synthetic oligonucleotide
  Target: LAMA2; (+) strand; PAM type: YTN; PAM sequence: TTT
taagtaggccatggaccaaa

SEQ ID NO: 325713 - DNA, 20 bp, Artificial Sequence
  Description of Artificial Sequence: Synthetic oligonucleotide
  Target: LAMA2; (+) strand; PAM type: YTN; PAM sequence: TTT
aagtaggccatggaccaaaa

SEQ ID NO: 325714 - DNA, 20 bp, Artificial Sequence
  Description of Artificial Sequence: Synthetic oligonucleotide
  Target: LAMA2; (+) strand; PAM type: YTN; PAM sequence: TTA
agtaggccatggaccaaaag

SEQ ID NO: 325715 - DNA, 20 bp, Artificial Sequence
  Description of Artificial Sequence: Synthetic oligonucleotide
  Target: LAMA2; (+) strand; PAM type: YTN; PAM sequence: CTT
tatgaacttcaaggttctag

SEQ ID NO: 325716 - DNA, 20 bp, Artificial Sequence
  Description of Artificial Sequence: Synthetic oligonucleotide
  Target: LAMA2; (+) strand; PAM type: YTN; PAM sequence: TTT
atgaacttcaaggttctagg

SEQ ID NO: 325717 - DNA, 20 bp, Artificial Sequence
  Description of Artificial Sequence: Synthetic oligonucleotide
  Target: LAMA2; (+) strand; PAM type: YTN; PAM sequence: TTA
tgaacttcaaggttctagga

SEQ ID NO: 325718 - DNA, 20 bp, Artificial Sequence
  Description of Artificial Sequence: Synthetic oligonucleotide
  Target: LAMA2; (+) strand; PAM type: YTN; PAM sequence: CTT
caaggttctaggaaatttca

SEQ ID NO: 325719 - DNA, 20 bp, Artificial Sequence
  Description of Artificial Sequence: Synthetic oligonucleotide
  Target: LAMA2; (+) strand; PAM type: YTN; PAM sequence: TTC
aaggttctaggaaatttcat

SEQ ID NO: 325720 - DNA, 20 bp, Artificial Sequence
  Description of Artificial Sequence: Synthetic oligonucleotide
  Target: LAMA2; (+) strand; PAM type: YTN; PAM sequence: TTC
taggaaatttcatccattgg

SEQ ID NO: 325721 - DNA, 20 bp, Artificial Sequence
  Description of Artificial Sequence: Synthetic oligonucleotide
  Target: LAMA2; (+) strand; PAM type: YTN; PAM sequence: CTA
ggaaatttcatccattggag

SEQ ID NO: 325722 - DNA, 20 bp, Artificial Sequence
  Description of Artificial Sequence: Synthetic oligonucleotide
  Target: LAMA2; (+) strand; PAM type: YTN; PAM sequence: TTT
catccattggagagttctcc

SEQ ID NO: 325723 - DNA, 20 bp, Artificial Sequence
  Description of Artificial Sequence: Synthetic oligonucleotide
  Target: LAMA2; (+) strand; PAM type: YTN; PAM sequence: TTC
atccattggagagttctcca

SEQ ID NO: 325724 - DNA, 20 bp, Artificial Sequence
  Description of Artificial Sequence: Synthetic oligonucleotide
  Target: LAMA2; (+) strand; PAM type: YTN; PAM sequence: TTG
gagagttctccagtgcttta

SEQ ID NO: 325725 - DNA, 20 bp, Artificial Sequence
  Description of Artificial Sequence: Synthetic oligonucleotide
  Target: LAMA2; (+) strand; PAM type: YTN; PAM sequence: TTC
tccagtgctttaaacaatat

SEQ ID NO: 325726 - DNA, 20 bp, Artificial Sequence
  Description of Artificial Sequence: Synthetic oligonucleotide
  Target: LAMA2; (+) strand; PAM type: YTN; PAM sequence: CTC
cagtgctttaaacaatatta

SEQ ID NO: 325727 - DNA, 20 bp, Artificial Sequence
  Description of Artificial Sequence: Synthetic oligonucleotide
  Target: LAMA2; (+) strand; PAM type: YTN; PAM sequence: CTT
taaacaatattagaaagaaa

SEQ ID NO: 325728 - DNA, 20 bp, Artificial Sequence
  Description of Artificial Sequence: Synthetic oligonucleotide
  Target: LAMA2; (+) strand; PAM type: YTN; PAM sequence: TTT
aaacaatattagaaagaaaa

SEQ ID NO: 325729 - DNA, 20 bp, Artificial Sequence
  Description of Artificial Sequence: Synthetic oligonucleotide
  Target: LAMA2; (+) strand; PAM type: YTN; PAM sequence: TTA
aacaatattagaaagaaaac

SEQ ID NO: 325730 - DNA, 20 bp, Artificial Sequence
  Description of Artificial Sequence: Synthetic oligonucleotide
  Target: LAMA2; (+) strand; PAM type: YTN; PAM sequence: TTA
gaaagaaaacagcggtacaa

SEQ ID NO: 325731 - DNA, 20 bp, Artificial Sequence
  Description of Artificial Sequence: Synthetic oligonucleotide
  Target: LAMA2; (+) strand; PAM type: YTN; PAM sequence: CTA
gtaaaaatctctcctgcaag

SEQ ID NO: 325732 - DNA, 20 bp, Artificial Sequence
  Description of Artificial Sequence: Synthetic oligonucleotide
  Target: LAMA2; (+) strand; PAM type: YTN; PAM sequence: CTC
tcctgcaagacattactgag

SEQ ID NO: 325733 - DNA, 20 bp, Artificial Sequence
  Description of Artificial Sequence: Synthetic oligonucleotide
  Target: LAMA2; (+) strand; PAM type: YTN; PAM sequence: CTC
ctgcaagacattactgagtg

SEQ ID NO: 325734 - DNA, 20 bp, Artificial Sequence
  Description of Artificial Sequence: Synthetic oligonucleotide
  Target: LAMA2; (+) strand; PAM type: YTN; PAM sequence: CTG
caagacattactgagtggtg

SEQ ID NO: 325735 - DNA, 20 bp, Artificial Sequence
  Description of Artificial Sequence: Synthetic oligonucleotide
  Target: LAMA2; (+) strand; PAM type: YTN; PAM sequence: TTA
ctgagtggtgaagactaagt

SEQ ID NO: 325736 - DNA, 20 bp, Artificial Sequence
  Description of Artificial Sequence: Synthetic oligonucleotide
  Target: LAMA2; (+) strand; PAM type: YTN; PAM sequence: CTG
agtggtgaagactaagtggt

SEQ ID NO: 325737 - DNA, 20 bp, Artificial Sequence
  Description of Artificial Sequence: Synthetic oligonucleotide
  Target: LAMA2; (+) strand; PAM type: YTN; PAM sequence: CTA
agtggttttgccattgttgt

SEQ ID NO: 325738 - DNA, 20 bp, Artificial Sequence
  Description of Artificial Sequence: Synthetic oligonucleotide
  Target: LAMA2; (+) strand; PAM type: YTN; PAM sequence: TTT
tgccattgttgttgtattgt

SEQ ID NO: 325739 - DNA, 20 bp, Artificial Sequence
  Description of Artificial Sequence: Synthetic oligonucleotide
  Target: LAMA2; (+) strand; PAM type: YTN; PAM sequence: TTT
gccattgttgttgtattgtt

SEQ ID NO: 325740 - DNA, 20 bp, Artificial Sequence
  Description of Artificial Sequence: Synthetic oligonucleotide
  Target: LAMA2; (+) strand; PAM type: YTN; PAM sequence: TTG
ccattgttgttgtattgttg

SEQ ID NO: 325741 - DNA, 20 bp, Artificial Sequence
  Description of Artificial Sequence: Synthetic oligonucleotide
  Target: LAMA2; (+) strand; PAM type: YTN; PAM sequence: TTG
ttgttgtattgttggttgga

SEQ ID NO: 325742 - DNA, 20 bp, Artificial Sequence
  Description of Artificial Sequence: Synthetic oligonucleotide
  Target: LAMA2; (+) strand; PAM type: YTN; PAM sequence: TTG
ttgtattgttggttggatgg

SEQ ID NO: 325743 - DNA, 20 bp, Artificial Sequence
  Description of Artificial Sequence: Synthetic oligonucleotide
  Target: LAMA2; (+) strand; PAM type: YTN; PAM sequence: TTG
tattgttggttggatggttt

SEQ ID NO: 325744 - DNA, 20 bp, Artificial Sequence
  Description of Artificial Sequence: Synthetic oligonucleotide
  Target: LAMA2; (+) strand; PAM type: YTN; PAM sequence: TTG
ttggttggatggtttgcctt

SEQ ID NO: 325745 - DNA, 20 bp, Artificial Sequence
  Description of Artificial Sequence: Synthetic oligonucleotide
  Target: LAMA2; (+) strand; PAM type: YTN; PAM sequence: TTG
gttggatggtttgccttgga

SEQ ID NO: 325746 - DNA, 20 bp, Artificial Sequence
  Description of Artificial Sequence: Synthetic oligonucleotide
  Target: LAMA2; (+) strand; PAM type: YTN; PAM sequence: TTG
gatggtttgccttggatatt

SEQ ID NO: 325747 - DNA, 20 bp, Artificial Sequence
  Description of Artificial Sequence: Synthetic oligonucleotide
  Target: LAMA2; (+) strand; PAM type: YTN; PAM sequence: TTT
gccttggatatttgcttgct

SEQ ID NO: 325748 - DNA, 20 bp, Artificial Sequence
  Description of Artificial Sequence: Synthetic oligonucleotide
  Target: LAMA2; (+) strand; PAM type: YTN; PAM sequence: TTG
ccttggatatttgcttgctt

SEQ ID NO: 325749 - DNA, 20 bp, Artificial Sequence
  Description of Artificial Sequence: Synthetic oligonucleotide
  Target: LAMA2; (+) strand; PAM type: YTN; PAM sequence: CTT
ggatatttgcttgcttcttt

SEQ ID NO: 325750 - DNA, 20 bp, Artificial Sequence
  Description of Artificial Sequence: Synthetic oligonucleotide
  Target: LAMA2; (+) strand; PAM type: YTN; PAM sequence: TTG
gatatttgcttgcttctttt

SEQ ID NO: 325751 - DNA, 20 bp, Artificial Sequence
  Description of Artificial Sequence: Synthetic oligonucleotide
  Target: LAMA2; (+) strand; PAM type: YTN; PAM sequence: TTT
gcttgcttcttttttgttga

SEQ ID NO: 325752 - DNA, 20 bp, Artificial Sequence
  Description of Artificial Sequence: Synthetic oligonucleotide
  Target: LAMA2; (+) strand; PAM type: YTN; PAM sequence: TTG
cttgcttcttttttgttgat

SEQ ID NO: 325753 - DNA, 20 bp, Artificial Sequence
  Description of Artificial Sequence: Synthetic oligonucleotide
  Target: LAMA2; (+) strand; PAM type: YTN; PAM sequence: CTT
gcttcttttttgttgatttt

SEQ ID NO: 325754 - DNA, 20 bp, Artificial Sequence
  Description of Artificial Sequence: Synthetic oligonucleotide
  Target: LAMA2; (+) strand; PAM type: YTN; PAM sequence: TTG
cttcttttttgttgattttt

SEQ ID NO: 325755 - DNA, 20 bp, Artificial Sequence
  Description of Artificial Sequence: Synthetic oligonucleotide
  Target: LAMA2; (+) strand; PAM type: YTN; PAM sequence: CTT
cttttttgttgatttttagc

SEQ ID NO: 325756 - DNA, 20 bp, Artificial Sequence
  Description of Artificial Sequence: Synthetic oligonucleotide
  Target: LAMA2; (+) strand; PAM type: YTN; PAM sequence: TTC
ttttttgttgatttttagca

SEQ ID NO: 325757 - DNA, 20 bp, Artificial Sequence
  Description of Artificial Sequence: Synthetic oligonucleotide
  Target: LAMA2; (+) strand; PAM type: YTN; PAM sequence: CTT
ttttgttgatttttagcata

SEQ ID NO: 325758 - DNA, 20 bp, Artificial Sequence
  Description of Artificial Sequence: Synthetic oligonucleotide
  Target: LAMA2; (+) strand; PAM type: YTN; PAM sequence: TTT
tttgttgatttttagcatat

SEQ ID NO: 325759 - DNA, 20 bp, Artificial Sequence
  Description of Artificial Sequence: Synthetic oligonucleotide
  Target: LAMA2; (+) strand; PAM type: YTN; PAM sequence: TTT
ttgttgatttttagcatata

SEQ ID NO: 325760 - DNA, 20 bp, Artificial Sequence
  Description of Artificial Sequence: Synthetic oligonucleotide
  Target: LAMA2; (+) strand; PAM type: YTN; PAM sequence: TTT
tgttgatttttagcatataa

SEQ ID NO: 325761 - DNA, 20 bp, Artificial Sequence
  Description of Artificial Sequence: Synthetic oligonucleotide
  Target: LAMA2; (+) strand; PAM type: YTN; PAM sequence: TTT
gttgatttttagcatataaa

SEQ ID NO: 325762 - DNA, 20 bp, Artificial Sequence
  Description of Artificial Sequence: Synthetic oligonucleotide
  Target: LAMA2; (+) strand; PAM type: YTN; PAM sequence: TTG
ttgatttttagcatataaat

SEQ ID NO: 325763 - DNA, 20 bp, Artificial Sequence
  Description of Artificial Sequence: Synthetic oligonucleotide
  Target: LAMA2; (+) strand; PAM type: YTN; PAM sequence: TTG
atttttagcatataaataaa

SEQ ID NO: 325764 - DNA, 20 bp, Artificial Sequence
  Description of Artificial Sequence: Synthetic oligonucleotide
  Target: LAMA2; (+) strand; PAM type: YTN; PAM sequence: TTT
ttagcatataaataaaattt

SEQ ID NO: 325765 - DNA, 20 bp, Artificial Sequence
  Description of Artificial Sequence: Synthetic oligonucleotide
  Target: LAMA2; (+) strand; PAM type: YTN; PAM sequence: TTT
tagcatataaataaaattta

SEQ ID NO: 325766 - DNA, 20 bp, Artificial Sequence
  Description of Artificial Sequence: Synthetic oligonucleotide
  Target: LAMA2; (+) strand; PAM type: YTN; PAM sequence: TTT
agcatataaataaaatttat

SEQ ID NO: 325767 - DNA, 20 bp, Artificial Sequence
  Description of Artificial Sequence: Synthetic oligonucleotide
  Target: LAMA2; (+) strand; PAM type: YTN; PAM sequence: TTA
gcatataaataaaatttata

SEQ ID NO: 325768 - DNA, 20 bp, Artificial Sequence
  Description of Artificial Sequence: Synthetic oligonucleotide
  Target: LAMA2; (+) strand; PAM type: YTN; PAM sequence: TTT
ataagcccaacaaaagaaaa

SEQ ID NO: 325769 - DNA, 20 bp, Artificial Sequence
  Description of Artificial Sequence: Synthetic oligonucleotide
  Target: LAMA2; (+) strand; PAM type: YTN; PAM sequence: TTA
taagcccaacaaaagaaaag

SEQ ID NO: 325770 - DNA, 20 bp, Artificial Sequence
  Description of Artificial Sequence: Synthetic oligonucleotide
  Target: LAMA2; (+) strand; PAM type: YTN; PAM sequence: CTT
tcaagaggctttaagataac

SEQ ID NO: 325771 - DNA, 20 bp, Artificial Sequence
  Description of Artificial Sequence: Synthetic oligonucleotide
  Target: LAMA2; (+) strand; PAM type: YTN; PAM sequence: TTT
caagaggctttaagataaca

SEQ ID NO: 325772 - DNA, 20 bp, Artificial Sequence
  Description of Artificial Sequence: Synthetic oligonucleotide
  Target: LAMA2; (+) strand; PAM type: YTN; PAM sequence: TTC
aagaggctttaagataacat

SEQ ID NO: 325773 - DNA, 20 bp, Artificial Sequence
  Description of Artificial Sequence: Synthetic oligonucleotide
  Target: LAMA2; (+) strand; PAM type: YTN; PAM sequence: CTT
taagataacatcatacattt

SEQ ID NO: 325774 - DNA, 20 bp, Artificial Sequence
  Description of Artificial Sequence: Synthetic oligonucleotide
  Target: LAMA2; (+) strand; PAM type: YTN; PAM sequence: TTT
aagataacatcatacatttt

SEQ ID NO: 325775 - DNA, 20 bp, Artificial Sequence
  Description of Artificial Sequence: Synthetic oligonucleotide
  Target: LAMA2; (+) strand; PAM type: YTN; PAM sequence: TTA
agataacatcatacattttc

SEQ ID NO: 325776 - DNA, 20 bp, Artificial Sequence
  Description of Artificial Sequence: Synthetic oligonucleotide
  Target: LAMA2; (+) strand; PAM type: YTN; PAM sequence: TTT
tcgaggtttttaaggctgag

SEQ ID NO: 325777 - DNA, 20 bp, Artificial Sequence
  Description of Artificial Sequence: Synthetic oligonucleotide
  Target: LAMA2; (+) strand; PAM type: YTN; PAM sequence: TTT
cgaggtttttaaggctgaga

SEQ ID NO: 325778 - DNA, 20 bp, Artificial Sequence
  Description of Artificial Sequence: Synthetic oligonucleotide
  Target: LAMA2; (+) strand; PAM type: YTN; PAM sequence: TTC
gaggtttttaaggctgagat

SEQ ID NO: 325779 - DNA, 20 bp, Artificial Sequence
  Description of Artificial Sequence: Synthetic oligonucleotide
  Target: LAMA2; (+) strand; PAM type: YTN; PAM sequence: TTT
ttaaggctgagattctattt

SEQ ID NO: 325780 - DNA, 20 bp, Artificial Sequence
  Description of Artificial Sequence: Synthetic oligonucleotide
  Target: LAMA2; (+) strand; PAM type: YTN; PAM sequence: TTT
taaggctgagattctatttt

SEQ ID NO: 325781 - DNA, 20 bp, Artificial Sequence
  Description of Artificial Sequence: Synthetic oligonucleotide
  Target: LAMA2; (+) strand; PAM type: YTN; PAM sequence: TTT
aaggctgagattctattttg

SEQ ID NO: 325782 - DNA, 20 bp, Artificial Sequence
  Description of Artificial Sequence: Synthetic oligonucleotide
  Target: LAMA2; (+) strand; PAM type: YTN; PAM sequence: TTA
aggctgagattctattttgt

SEQ ID NO: 325783 - DNA, 20 bp, Artificial Sequence
  Description of Artificial Sequence: Synthetic oligonucleotide
  Target: LAMA2; (+) strand; PAM type: YTN; PAM sequence: CTG
agattctattttgttttact

SEQ ID NO: 325784 - DNA, 20 bp, Artificial Sequence
  Description of Artificial Sequence: Synthetic oligonucleotide
  Target: LAMA2; (+) strand; PAM type: YTN; PAM sequence: TTC
tattttgttttacttaaaag

SEQ ID NO: 325785 - DNA, 20 bp, Artificial Sequence
  Description of Artificial Sequence: Synthetic oligonucleotide
  Target: LAMA2; (+) strand; PAM type: YTN; PAM sequence: CTA
ttttgttttacttaaaagga

SEQ ID NO: 325786 - DNA, 20 bp, Artificial Sequence
  Description of Artificial Sequence: Synthetic oligonucleotide
  Target: LAMA2; (+) strand; PAM type: YTN; PAM sequence: TTT
tgttttacttaaaaggaatg

SEQ ID NO: 325787 - DNA, 20 bp, Artificial Sequence
  Description of Artificial Sequence: Synthetic oligonucleotide
  Target: LAMA2; (+) strand; PAM type: YTN; PAM sequence: TTT
gttttacttaaaaggaatgt

SEQ ID NO: 325788 - DNA, 20 bp, Artificial Sequence
  Description of Artificial Sequence: Synthetic oligonucleotide
  Target: LAMA2; (+) strand; PAM type: YTN; PAM sequence: TTG
ttttacttaaaaggaatgtt

SEQ ID NO: 325789 - DNA, 20 bp, Artificial Sequence
  Description of Artificial Sequence: Synthetic oligonucleotide
  Target: LAMA2; (+) strand; PAM type: YTN; PAM sequence: TTT
tacttaaaaggaatgttaca

SEQ ID NO: 325790 - DNA, 20 bp, Artificial Sequence
  Description of Artificial Sequence: Synthetic oligonucleotide
  Target: LAMA2; (+) strand; PAM type: YTN; PAM sequence: TTT
acttaaaaggaatgttacaa

SEQ ID NO: 325791 - DNA, 20 bp, Artificial Sequence
  Description of Artificial Sequence: Synthetic oligonucleotide
  Target: LAMA2; (+) strand; PAM type: YTN; PAM sequence: TTA
cttaaaaggaatgttacaat

SEQ ID NO: 325792 - DNA, 20 bp, Artificial Sequence
  Description of Artificial Sequence: Synthetic oligonucleotide
  Target: LAMA2; (+) strand; PAM type: YTN; PAM sequence: CTT
aaaaggaatgttacaatgct

SEQ ID NO: 325793 - DNA, 20 bp, Artificial Sequence
  Description of Artificial Sequence: Synthetic oligonucleotide
  Target: LAMA2; (+) strand; PAM type: YTN; PAM sequence: TTA
aaaggaatgttacaatgctg

SEQ ID NO: 325794 - DNA, 20 bp, Artificial Sequence
  Description of Artificial Sequence: Synthetic oligonucleotide
  Target: LAMA2; (+) strand; PAM type: YTN; PAM sequence: TTA
caatgctgttaacgtttttg

SEQ ID NO: 325795 - DNA, 20 bp, Artificial Sequence
  Description of Artificial Sequence: Synthetic oligonucleotide
  Target: LAMA2; (+) strand; PAM type: YTN; PAM sequence: CTG
ttaacgtttttgcttattct

SEQ ID NO: 325796 - DNA, 20 bp, Artificial Sequence
  Description of Artificial Sequence: Synthetic oligonucleotide
  Target: LAMA2; (+) strand; PAM type: YTN; PAM sequence: TTA
acgtttttgcttattctaca

SEQ ID NO: 325797 - DNA, 20 bp, Artificial Sequence
  Description of Artificial Sequence: Synthetic oligonucleotide
  Target: LAMA2; (+) strand; PAM type: YTN; PAM sequence: TTT
ttgcttattctacatttttg

SEQ ID NO: 325798 - DNA, 20 bp, Artificial Sequence
  Description of Artificial Sequence: Synthetic oligonucleotide
  Target: LAMA2; (+) strand; PAM type: YTN; PAM sequence: TTT
tgcttattctacatttttgc

SEQ ID NO: 325799 - DNA, 20 bp, Artificial Sequence
  Description of Artificial Sequence: Synthetic oligonucleotide
  Target: LAMA2; (+) strand; PAM type: YTN; PAM sequence: TTT
gcttattctacatttttgct

SEQ ID NO: 325800 - DNA, 20 bp, Artificial Sequence
  Description of Artificial Sequence: Synthetic oligonucleotide
  Target: LAMA2; (+) strand; PAM type: YTN; PAM sequence: TTG
cttattctacatttttgctt

SEQ ID NO: 325801 - DNA, 20 bp, Artificial Sequence
  Description of Artificial Sequence: Synthetic oligonucleotide
  Target: LAMA2; (+) strand; PAM type: YTN; PAM sequence: CTT
attctacatttttgcttatt

SEQ ID NO: 325802 - DNA, 20 bp, Artificial Sequence
  Description of Artificial Sequence: Synthetic oligonucleotide
  Target: LAMA2; (+) strand; PAM type: YTN; PAM sequence: TTA
ttctacatttttgcttattc

SEQ ID NO: 325803 - DNA, 20 bp, Artificial Sequence
  Description of Artificial Sequence: Synthetic oligonucleotide
  Target: LAMA2; (+) strand; PAM type: YTN; PAM sequence: TTC
tacatttttgcttattcatg

SEQ ID NO: 325804 - DNA, 20 bp, Artificial Sequence
  Description of Artificial Sequence: Synthetic oligonucleotide
  Target: LAMA2; (+) strand; PAM type: YTN; PAM sequence: CTA
catttttgcttattcatgaa

SEQ ID NO: 325805 - DNA, 20 bp, Artificial Sequence
  Description of Artificial Sequence: Synthetic oligonucleotide
  Target: LAMA2; (+) strand; PAM type: YTN; PAM sequence: TTT
ttgcttattcatgaaactcg

SEQ ID NO: 325806 - DNA, 20 bp, Artificial Sequence
  Description of Artificial Sequence: Synthetic oligonucleotide
  Target: LAMA2; (+) strand; PAM type: YTN; PAM sequence: TTT
tgcttattcatgaaactcgg

SEQ ID NO: 325807 - DNA, 20 bp, Artificial Sequence
  Description of Artificial Sequence: Synthetic oligonucleotide
  Target: LAMA2; (+) strand; PAM type: YTN; PAM sequence: TTT
gcttattcatgaaactcggg

SEQ ID NO: 325808 - DNA, 20 bp, Artificial Sequence
  Description of Artificial Sequence: Synthetic oligonucleotide
  Target: LAMA2; (+) strand; PAM type: YTN; PAM sequence: TTG
cttattcatgaaactcggga

SEQ ID NO: 325809 - DNA, 20 bp, Artificial Sequence
  Description of Artificial Sequence: Synthetic oligonucleotide
  Target: LAMA2; (+) strand; PAM type: YTN; PAM sequence: CTT
attcatgaaactcgggagaa

SEQ ID NO: 325810 - DNA, 20 bp, Artificial Sequence
  Description of Artificial Sequence: Synthetic oligonucleotide
  Target: LAMA2; (+) strand; PAM type: YTN; PAM sequence: TTA
ttcatgaaactcgggagaaa

SEQ ID NO: 325811 - DNA, 20 bp, Artificial Sequence
  Description of Artificial Sequence: Synthetic oligonucleotide
  Target: LAMA2; (+) strand; PAM type: YTN; PAM sequence: TTC
atgaaactcgggagaaattc

SEQ ID NO: 325812 - DNA, 20 bp, Artificial Sequence
  Description of Artificial Sequence: Synthetic oligonucleotide
  Target: LAMA2; (+) strand; PAM type: YTN; PAM sequence: CTC
gggagaaattctgtctattg

SEQ ID NO: 325813 - DNA, 20 bp, Artificial Sequence
  Description of Artificial Sequence: Synthetic oligonucleotide
  Target: LAMA2; (+) strand; PAM type: YTN; PAM sequence: TTC
tgtctattggcaggctctca

SEQ ID NO: 325814 - DNA, 20 bp, Artificial Sequence
  Description of Artificial Sequence: Synthetic oligonucleotide
  Target: LAMA2; (+) strand; PAM type: YTN; PAM sequence: CTG
tctattggcaggctctcatt

SEQ ID NO: 325815 - DNA, 20 bp, Artificial Sequence
  Description of Artificial Sequence: Synthetic oligonucleotide
  Target: LAMA2; (+) strand; PAM type: YTN; PAM sequence: CTA
ttggcaggctctcattgtgt

SEQ ID NO: 325816 - DNA, 20 bp, Artificial Sequence
  Description of Artificial Sequence: Synthetic oligonucleotide
  Target: LAMA2; (+) strand; PAM type: YTN; PAM sequence: TTG
gcaggctctcattgtgtatt

SEQ ID NO: 325817 - DNA, 20 bp, Artificial Sequence
  Description of Artificial Sequence: Synthetic oligonucleotide
  Target: LAMA2; (+) strand; PAM type: YTN; PAM sequence: CTC
tcattgtgtattcatcacca

SEQ ID NO: 325818 - DNA, 20 bp, Artificial Sequence
  Description of Artificial Sequence: Synthetic oligonucleotide
  Target: LAMA2; (+) strand; PAM type: YTN; PAM sequence: CTC
attgtgtattcatcaccaca

SEQ ID NO: 325819 - DNA, 20 bp, Artificial Sequence
  Description of Artificial Sequence: Synthetic oligonucleotide
  Target: LAMA2; (+) strand; PAM type: YTN; PAM sequence: TTG
tgtattcatcaccacactaa

SEQ ID NO: 325820 - DNA, 20 bp, Artificial Sequence
  Description of Artificial Sequence: Synthetic oligonucleotide
  Target: LAMA2; (+) strand; PAM type: YTN; PAM sequence: TTC
atcaccacactaaccactca

SEQ ID NO: 325821 - DNA, 20 bp, Artificial Sequence
  Description of Artificial Sequence: Synthetic oligonucleotide
  Target: LAMA2; (+) strand; PAM type: YTN; PAM sequence: CTA
accactcatttactccgaaa

SEQ ID NO: 325822 - DNA, 20 bp, Artificial Sequence
  Description of Artificial Sequence: Synthetic oligonucleotide
  Target: LAMA2; (+) strand; PAM type: YTN; PAM sequence: CTC
atttactccgaaattaagtg

SEQ ID NO: 325823 - DNA, 20 bp, Artificial Sequence
  Description of Artificial Sequence: Synthetic oligonucleotide
  Target: LAMA2; (+) strand; PAM type: YTN; PAM sequence: TTT
actccgaaattaagtgctca

SEQ ID NO: 325824 - DNA, 20 bp, Artificial Sequence
  Description of Artificial Sequence: Synthetic oligonucleotide
  Target: LAMA2; (+) strand; PAM type: YTN; PAM sequence: TTA
ctccgaaattaagtgctcag

SEQ ID NO: 325825 - DNA, 20 bp, Artificial Sequence
  Description of Artificial Sequence: Synthetic oligonucleotide
  Target: LAMA2; (+) strand; PAM type: YTN; PAM sequence: CTC
cgaaattaagtgctcagtga

SEQ ID NO: 325826 - DNA, 20 bp, Artificial Sequence
  Description of Artificial Sequence: Synthetic oligonucleotide
  Target: LAMA2; (+) strand; PAM type: YTN; PAM sequence: TTA
agtgctcagtgatatgcatg

SEQ ID NO: 325827 - DNA, 20 bp, Artificial Sequence
  Description of Artificial Sequence: Synthetic oligonucleotide
  Target: LAMA2; (+) strand; PAM type: YTN; PAM sequence: CTC
agtgatatgcatgttataaa

SEQ ID NO: 325828 - DNA, 20 bp, Artificial Sequence
  Description of Artificial Sequence: Synthetic oligonucleotide
  Target: LAMA2; (+) strand; PAM type: YTN; PAM sequence: TTA
taaattcattctcagttgca

SEQ ID NO: 325829 - DNA, 20 bp, Artificial Sequence
  Description of Artificial Sequence: Synthetic oligonucleotide
  Target: LAMA2; (+) strand; PAM type: YTN; PAM sequence: TTC
attctcagttgcaaaatttt

SEQ ID NO: 325830 - DNA, 20 bp, Artificial Sequence
  Description of Artificial Sequence: Synthetic oligonucleotide
  Target: LAMA2; (+) strand; PAM type: YTN; PAM sequence: TTC
tcagttgcaaaattttcttg

SEQ ID NO: 325831 - DNA, 20 bp, Artificial Sequence
  Description of Artificial Sequence: Synthetic oligonucleotide
  Target: LAMA2; (+) strand; PAM type: YTN; PAM sequence: CTC
agttgcaaaattttcttggt

SEQ ID NO: 325832 - DNA, 20 bp, Artificial Sequence
  Description of Artificial Sequence: Synthetic oligonucleotide
  Target: LAMA2; (+) strand; PAM type: YTN; PAM sequence: TTG
caaaattttcttggtgctta

SEQ ID NO: 325833 - DNA, 20 bp, Artificial Sequence
  Description of Artificial Sequence: Synthetic oligonucleotide
  Target: LAMA2; (+) strand; PAM type: YTN; PAM sequence: TTT
tcttggtgcttaagaaattg

SEQ ID NO: 325834 - DNA, 20 bp, Artificial Sequence
  Description of Artificial Sequence: Synthetic oligonucleotide
  Target: LAMA2; (+) strand; PAM type: YTN; PAM sequence: TTT
cttggtgcttaagaaattgt

SEQ ID NO: 325835 - DNA, 20 bp, Artificial Sequence
  Description of Artificial Sequence: Synthetic oligonucleotide
  Target: LAMA2; (+) strand; PAM type: YTN; PAM sequence: TTC
ttggtgcttaagaaattgta

SEQ ID NO: 325836 - DNA, 20 bp, Artificial Sequence
  Description of Artificial Sequence: Synthetic oligonucleotide
  Target: LAMA2; (+) strand; PAM type: YTN; PAM sequence: CTT
ggtgcttaagaaattgtact

SEQ ID NO: 325837 - DNA, 20 bp, Artificial Sequence
  Description of Artificial Sequence: Synthetic oligonucleotide
  Target: LAMA2; (+) strand; PAM type: YTN; PAM sequence: TTG
gtgcttaagaaattgtactt

SEQ ID NO: 325838 - DNA, 20 bp, Artificial Sequence
  Description of Artificial Sequence: Synthetic oligonucleotide
  Target: LAMA2; (+) strand; PAM type: YTN; PAM sequence: CTT
aagaaattgtactttaatcg

SEQ ID NO: 325839 - DNA, 20 bp, Artificial Sequence
  Description of Artificial Sequence: Synthetic oligonucleotide
  Target: LAMA2; (+) strand; PAM type: YTN; PAM sequence: TTA
agaaattgtactttaatcgc

SEQ ID NO: 325840 - DNA, 20 bp, Artificial Sequence
  Description of Artificial Sequence: Synthetic oligonucleotide
  Target: LAMA2; (+) strand; PAM type: YTN; PAM sequence: TTG
tactttaatcgcttttagcc

SEQ ID NO: 325841 - DNA, 20 bp, Artificial Sequence
  Description of Artificial Sequence: Synthetic oligonucleotide
  Target: LAMA2; (+) strand; PAM type: YTN; PAM sequence: CTT
taatcgcttttagccaaaaa

SEQ ID NO: 325842 - DNA, 20 bp, Artificial Sequence
  Description of Artificial Sequence: Synthetic oligonucleotide
  Target: LAMA2; (+) strand; PAM type: YTN; PAM sequence: TTT
aatcgcttttagccaaaaag

SEQ ID NO: 325843 - DNA, 20 bp, Artificial Sequence
  Description of Artificial Sequence: Synthetic oligonucleotide
  Target: LAMA2; (+) strand; PAM type: YTN; PAM sequence: TTA
atcgcttttagccaaaaagt

SEQ ID NO: 325844 - DNA, 20 bp, Artificial Sequence
  Description of Artificial Sequence: Synthetic oligonucleotide
  Target: LAMA2; (+) strand; PAM type: YTN; PAM sequence: CTT
ttagccaaaaagtttagcaa

SEQ ID NO: 325845 - DNA, 20 bp, Artificial Sequence
  Description of Artificial Sequence: Synthetic oligonucleotide
  Target: LAMA2; (+) strand; PAM type: YTN; PAM sequence: TTT
tagccaaaaagtttagcaaa

SEQ ID NO: 325846 - DNA, 20 bp, Artificial Sequence
  Description of Artificial Sequence: Synthetic oligonucleotide
  Target: LAMA2; (+) strand; PAM type: YTN; PAM sequence: TTT
agccaaaaagtttagcaaaa

SEQ ID NO: 325847 - DNA, 20 bp, Artificial Sequence
  Description of Artificial Sequence: Synthetic oligonucleotide
  Target: LAMA2; (+) strand; PAM type: YTN; PAM sequence: TTA
gccaaaaagtttagcaaaaa

SEQ ID NO: 325848 - DNA, 20 bp, Artificial Sequence
  Description of Artificial Sequence: Synthetic oligonucleotide
  Target: LAMA2; (+) strand; PAM type: YTN; PAM sequence: TTT
agcaaaaatagtactttgac

SEQ ID NO: 325849 - DNA, 20 bp, Artificial Sequence
  Description of Artificial Sequence: Synthetic oligonucleotide
  Target: LAMA2; (+) strand; PAM type: YTN; PAM sequence: TTA
gcaaaaatagtactttgaca

SEQ ID NO: 325850 - DNA, 20 bp, Artificial Sequence
  Description of Artificial Sequence: Synthetic oligonucleotide
  Target: LAMA2; (+) strand; PAM type: YTN; PAM sequence: CTT
tgacatagtactgacagcct

SEQ ID NO: 325851 - DNA, 20 bp, Artificial Sequence
  Description of Artificial Sequence: Synthetic oligonucleotide
  Target: LAMA2; (+) strand; PAM type: YTN; PAM sequence: TTT
gacatagtactgacagcctg

SEQ ID NO: 325852 - DNA, 20 bp, Artificial Sequence
  Description of Artificial Sequence: Synthetic oligonucleotide
  Target: LAMA2; (+) strand; PAM type: YTN; PAM sequence: TTG
acatagtactgacagcctgt

SEQ ID NO: 325853 - DNA, 20 bp, Artificial Sequence
  Description of Artificial Sequence: Synthetic oligonucleotide
  Target: LAMA2; (+) strand; PAM type: YTN; PAM sequence: CTG
acagcctgtgcttagatttt

SEQ ID NO: 325854 - DNA, 20 bp, Artificial Sequence
  Description of Artificial Sequence: Synthetic oligonucleotide
  Target: LAMA2; (+) strand; PAM type: YTN; PAM sequence: CTG
tgcttagattttgataaatg

SEQ ID NO: 325855 - DNA, 20 bp, Artificial Sequence
  Description of Artificial Sequence: Synthetic oligonucleotide
  Target: LAMA2; (+) strand; PAM type: YTN; PAM sequence: CTT
agattttgataaatgtggac

SEQ ID NO: 325856 - DNA, 20 bp, Artificial Sequence
  Description of Artificial Sequence: Synthetic oligonucleotide
  Target: LAMA2; (+) strand; PAM type: YTN; PAM sequence: TTA
gattttgataaatgtggaca

SEQ ID NO: 325857 - DNA, 20 bp, Artificial Sequence
  Description of Artificial Sequence: Synthetic oligonucleotide
  Target: LAMA2; (+) strand; PAM type: YTN; PAM sequence: TTT
tgataaatgtggacaaaatc

SEQ ID NO: 325858 - DNA, 20 bp, Artificial Sequence
  Description of Artificial Sequence: Synthetic oligonucleotide
  Target: LAMA2; (+) strand; PAM type: YTN; PAM sequence: TTT
gataaatgtggacaaaatca

SEQ ID NO: 325859 - DNA, 20 bp, Artificial Sequence
  Description of Artificial Sequence: Synthetic oligonucleotide
  Target: LAMA2; (+) strand; PAM type: YTN; PAM sequence: TTG
ataaatgtggacaaaatcaa

SEQ ID NO: 325860 - DNA, 20 bp, Artificial Sequence
  Description of Artificial Sequence: Synthetic oligonucleotide
  Target: LAMA2; (+) strand; PAM type: YTN; PAM sequence: CTT
caaaagctttttctaacata

SEQ ID NO: 325861 - DNA, 20 bp, Artificial Sequence
  Description of Artificial Sequence: Synthetic oligonucleotide
  Target: LAMA2; (+) strand; PAM type: YTN; PAM sequence: TTC
aaaagctttttctaacataa

SEQ ID NO: 325862 - DNA, 20 bp, Artificial Sequence
  Description of Artificial Sequence: Synthetic oligonucleotide
  Target: LAMA2; (+) strand; PAM type: YTN; PAM sequence: CTT
tttctaacataactcacagc

SEQ ID NO: 325863 - DNA, 20 bp, Artificial Sequence
  Description of Artificial Sequence: Synthetic oligonucleotide
  Target: LAMA2; (+) strand; PAM type: YTN; PAM sequence: TTT
ttctaacataactcacagct

SEQ ID NO: 325864 - DNA, 20 bp, Artificial Sequence
  Description of Artificial Sequence: Synthetic oligonucleotide
  Target: LAMA2; (+) strand; PAM type: YTN; PAM sequence: TTT
tctaacataactcacagctg

SEQ ID NO: 325865 - DNA, 20 bp, Artificial Sequence
  Description of Artificial Sequence: Synthetic oligonucleotide
  Target: LAMA2; (+) strand; PAM type: YTN; PAM sequence: TTT
ctaacataactcacagctgt

SEQ ID NO: 325866 - DNA, 20 bp, Artificial Sequence
  Description of Artificial Sequence: Synthetic oligonucleotide
  Target: LAMA2; (+) strand; PAM type: YTN; PAM sequence: TTC
taacataactcacagctgta

SEQ ID NO: 325867 - DNA, 20 bp, Artificial Sequence
  Description of Artificial Sequence: Synthetic oligonucleotide
  Target: LAMA2; (+) strand; PAM type: YTN; PAM sequence: CTA
acataactcacagctgtaga

SEQ ID NO: 325868 - DNA, 20 bp, Artificial Sequence
  Description of Artificial Sequence: Synthetic oligonucleotide
  Target: LAMA2; (+) strand; PAM type: YTN; PAM sequence: CTC
acagctgtagacttttcctt

SEQ ID NO: 325869 - DNA, 20 bp, Artificial Sequence
  Description of Artificial Sequence: Synthetic oligonucleotide
  Target: LAMA2; (+) strand; PAM type: YTN; PAM sequence: CTG
tagacttttcctttcaataa

SEQ ID NO: 325870 - DNA, 20 bp, Artificial Sequence
  Description of Artificial Sequence: Synthetic oligonucleotide
  Target: LAMA2; (+) strand; PAM type: YTN; PAM sequence: CTT
ttcctttcaataataagcaa

SEQ ID NO: 325871 - DNA, 20 bp, Artificial Sequence
  Description of Artificial Sequence: Synthetic oligonucleotide
  Target: LAMA2; (+) strand; PAM type: YTN; PAM sequence: TTT
tcctttcaataataagcaaa

SEQ ID NO: 325872 - DNA, 20 bp, Artificial Sequence
  Description of Artificial Sequence: Synthetic oligonucleotide
  Target: LAMA2; (+) strand; PAM type: YTN; PAM sequence: TTT
cctttcaataataagcaaaa

SEQ ID NO: 325873 - DNA, 20 bp, Artificial Sequence
  Description of Artificial Sequence: Synthetic oligonucleotide
  Target: LAMA2; (+) strand; PAM type: YTN; PAM sequence: TTC
ctttcaataataagcaaaaa

SEQ ID NO: 325874 - DNA, 20 bp, Artificial Sequence
  Description of Artificial Sequence: Synthetic oligonucleotide
  Target: LAMA2; (+) strand; PAM type: YTN; PAM sequence: CTT
tcaataataagcaaaaacaa

SEQ ID NO: 325875 - DNA, 20 bp, Artificial Sequence
  Description of Artificial Sequence: Synthetic oligonucleotide
  Target: LAMA2; (+) strand; PAM type: YTN; PAM sequence: TTT
caataataagcaaaaacaat

SEQ ID NO: 325876 - DNA, 20 bp, Artificial Sequence
  Description of Artificial Sequence: Synthetic oligonucleotide
  Target: LAMA2; (+) strand; PAM type: YTN; PAM sequence: TTC
aataataagcaaaaacaatt

SEQ ID NO: 325877 - DNA, 20 bp, Artificial Sequence
  Description of Artificial Sequence: Synthetic oligonucleotide
  Target: LAMA2; (+) strand; PAM type: YTN; PAM sequence: TTT
tcatagctacaaaccgccga

SEQ ID NO: 325878 - DNA, 20 bp, Artificial Sequence
  Description of Artificial Sequence: Synthetic oligonucleotide
  Target: LAMA2; (+) strand; PAM type: YTN; PAM sequence: TTT
catagctacaaaccgccgac

SEQ ID NO: 325879 - DNA, 20 bp, Artificial Sequence
  Description of Artificial Sequence: Synthetic oligonucleotide
  Target: LAMA2; (+) strand; PAM type: YTN; PAM sequence: TTC
atagctacaaaccgccgaca

SEQ ID NO: 325880 - DNA, 20 bp, Artificial Sequence
  Description of Artificial Sequence: Synthetic oligonucleotide
  Target: LAMA2; (+) strand; PAM type: YTN; PAM sequence: CTA
caaaccgccgacacaacttt

SEQ ID NO: 325881 - DNA, 20 bp, Artificial Sequence
  Description of Artificial Sequence: Synthetic oligonucleotide
  Target: LAMA2; (+) strand; PAM type: YTN; PAM sequence: CTT
tctatttaaagaggacttct

SEQ ID NO: 325882 - DNA, 20 bp, Artificial Sequence
  Description of Artificial Sequence: Synthetic oligonucleotide
  Target: LAMA2; (+) strand; PAM type: YTN; PAM sequence: TTT
ctatttaaagaggacttctt

SEQ ID NO: 325883 - DNA, 20 bp, Artificial Sequence
  Description of Artificial Sequence: Synthetic oligonucleotide
  Target: LAMA2; (+) strand; PAM type: YTN; PAM sequence: TTC
tatttaaagaggacttcttt

SEQ ID NO: 325884 - DNA, 20 bp, Artificial Sequence
  Description of Artificial Sequence: Synthetic oligonucleotide
  Target: LAMA2; (+) strand; PAM type: YTN; PAM sequence: CTA
tttaaagaggacttctttgc

SEQ ID NO: 325885 - DNA, 20 bp, Artificial Sequence
  Description of Artificial Sequence: Synthetic oligonucleotide
  Target: LAMA2; (+) strand; PAM type: YTN; PAM sequence: TTT
aaagaggacttctttgcagg

SEQ ID NO: 325886 - DNA, 20 bp, Artificial Sequence
  Description of Artificial Sequence: Synthetic oligonucleotide
  Target: LAMA2; (+) strand; PAM type: YTN; PAM sequence: TTA
aagaggacttctttgcagga

SEQ ID NO: 325887 - DNA, 20 bp, Artificial Sequence
  Description of Artificial Sequence: Synthetic oligonucleotide
  Target: LAMA2; (+) strand; PAM type: YTN; PAM sequence: CTT
ctttgcaggaggcagaataa

SEQ ID NO: 325888 - DNA, 20 bp, Artificial Sequence
  Description of Artificial Sequence: Synthetic oligonucleotide
  Target: LAMA2; (+) strand; PAM type: YTN; PAM sequence: TTC
tttgcaggaggcagaataat

SEQ ID NO: 325889 - DNA, 20 bp, Artificial Sequence
  Description of Artificial Sequence: Synthetic oligonucleotide
  Target: LAMA2; (+) strand; PAM type: YTN; PAM sequence: CTT
tgcaggaggcagaataataa

SEQ ID NO: 325890 - DNA, 20 bp, Artificial Sequence
  Description of Artificial Sequence: Synthetic oligonucleotide
  Target: LAMA2; (+) strand; PAM type: YTN; PAM sequence: TTT
gcaggaggcagaataataac

SEQ ID NO: 325891 - DNA, 20 bp, Artificial Sequence
  Description of Artificial Sequence: Synthetic oligonucleotide
  Target: LAMA2; (+) strand; PAM type: YTN; PAM sequence: TTG
caggaggcagaataataact

SEQ ID NO: 325892 - DNA, 20 bp, Artificial Sequence
  Description of Artificial Sequence: Synthetic oligonucleotide
  Target: LAMA2; (+) strand; PAM type: YTN; PAM sequence: CTC
aacaaaataaatagaatctc

SEQ ID NO: 325893 - DNA, 20 bp, Artificial Sequence
  Description of Artificial Sequence: Synthetic oligonucleotide
  Target: LAMA2; (+) strand; PAM type: YTN; PAM sequence: CTC
taatttcaaaatactattat

SEQ ID NO: 325894 - DNA, 20 bp, Artificial Sequence
  Description of Artificial Sequence: Synthetic oligonucleotide
  Target: LAMA2; (+) strand; PAM type: YTN; PAM sequence: CTA
atttcaaaatactattatcc

SEQ ID NO: 325895 - DNA, 20 bp, Artificial Sequence
  Description of Artificial Sequence: Synthetic oligonucleotide
  Target: LAMA2; (+) strand; PAM type: YTN; PAM sequence: TTT
caaaatactattatccccaa

SEQ ID NO: 325896 - DNA, 20 bp, Artificial Sequence
  Description of Artificial Sequence: Synthetic oligonucleotide
  Target: LAMA2; (+) strand; PAM type: YTN; PAM sequence: TTC
aaaatactattatccccaaa

SEQ ID NO: 325897 - DNA, 20 bp, Artificial Sequence
  Description of Artificial Sequence: Synthetic oligonucleotide
  Target: LAMA2; (+) strand; PAM type: YTN; PAM sequence: CTA
ttatccccaaaagtaatggg

SEQ ID NO: 325898 - DNA, 20 bp, Artificial Sequence
  Description of Artificial Sequence: Synthetic oligonucleotide
  Target: LAMA2; (+) strand; PAM type: YTN; PAM sequence: TTA
tccccaaaagtaatgggaat

SEQ ID NO: 325899 - DNA, 20 bp, Artificial Sequence
  Description of Artificial Sequence: Synthetic oligonucleotide
  Target: LAMA2; (+) strand; PAM type: YTN; PAM sequence: TTT
taaaaattatttagtgtttc

SEQ ID NO: 325900 - DNA, 20 bp, Artificial Sequence
  Description of Artificial Sequence: Synthetic oligonucleotide
  Target: LAMA2; (+) strand; PAM type: YTN; PAM sequence: TTT
aaaaattatttagtgtttcc

SEQ ID NO: 325901 - DNA, 20 bp, Artificial Sequence
  Description of Artificial Sequence: Synthetic oligonucleotide
  Target: LAMA2; (+) strand; PAM type: YTN; PAM sequence: TTA
aaaattatttagtgtttcca

SEQ ID NO: 325902 - DNA, 20 bp, Artificial Sequence
  Description of Artificial Sequence: Synthetic oligonucleotide
  Target: LAMA2; (+) strand; PAM type: YTN; PAM sequence: TTA
tttagtgtttccagtttaga

SEQ ID NO: 325903 - DNA, 20 bp, Artificial Sequence
  Description of Artificial Sequence: Synthetic oligonucleotide
  Target: LAMA2; (+) strand; PAM type: YTN; PAM sequence: TTT
agtgtttccagtttagatat

SEQ ID NO: 325904 - DNA, 20 bp, Artificial Sequence
  Description of Artificial Sequence: Synthetic oligonucleotide
  Target: LAMA2; (+) strand; PAM type: YTN; PAM sequence: TTA
gtgtttccagtttagatatt

SEQ ID NO: 325905 - DNA, 20 bp, Artificial Sequence
  Description of Artificial Sequence: Synthetic oligonucleotide
  Target: LAMA2; (+) strand; PAM type: YTN; PAM sequence: TTT
ccagtttagatatttaagaa

SEQ ID NO: 325906 - DNA, 20 bp, Artificial Sequence
  Description of Artificial Sequence: Synthetic oligonucleotide
  Target: LAMA2; (+) strand; PAM type: YTN; PAM sequence: TTC
cagtttagatatttaagaac

SEQ ID NO: 325907 - DNA, 20 bp, Artificial Sequence
  Description of Artificial Sequence: Synthetic oligonucleotide
  Target: LAMA2; (+) strand; PAM type: YTN; PAM sequence: TTT
agatatttaagaacaccact

SEQ ID NO: 325908 - DNA, 20 bp, Artificial Sequence
  Description of Artificial Sequence: Synthetic oligonucleotide
  Target: LAMA2; (+) strand; PAM type: YTN; PAM sequence: TTA
gatatttaagaacaccactc

SEQ ID NO: 325909 - DNA, 20 bp, Artificial Sequence
  Description of Artificial Sequence: Synthetic oligonucleotide
  Target: LAMA2; (+) strand; PAM type: YTN; PAM sequence: TTT
aagaacaccactcacatcta

SEQ ID NO: 325910 - DNA, 20 bp, Artificial Sequence
  Description of Artificial Sequence: Synthetic oligonucleotide
  Target: LAMA2; (+) strand; PAM type: YTN; PAM sequence: TTA
agaacaccactcacatctac

SEQ ID NO: 325911 - DNA, 20 bp, Artificial Sequence
  Description of Artificial Sequence: Synthetic oligonucleotide
  Target: LAMA2; (+) strand; PAM type: YTN; PAM sequence: CTC
acatctacatgccaaataaa

SEQ ID NO: 325912 - DNA, 20 bp, Artificial Sequence
  Description of Artificial Sequence: Synthetic oligonucleotide
  Target: LAMA2; (+) strand; PAM type: YTN; PAM sequence: CTA
catgccaaataaattgactc

SEQ ID NO: 325913 - DNA, 20 bp, Artificial Sequence
  Description of Artificial Sequence: Synthetic oligonucleotide
  Target: LAMA2; (+) strand; PAM type: YTN; PAM sequence: TTG
actccaccctccacccgtta

SEQ ID NO: 325914 - DNA, 20 bp, Artificial Sequence
  Description of Artificial Sequence: Synthetic oligonucleotide
  Target: LAMA2; (+) strand; PAM type: YTN; PAM sequence: CTC
caccctccacccgttatatc

SEQ ID NO: 325915 - DNA, 20 bp, Artificial Sequence
  Description of Artificial Sequence: Synthetic oligonucleotide
  Target: LAMA2; (+) strand; PAM type: YTN; PAM sequence: CTC
cacccgttatatcagggccc

SEQ ID NO: 325916 - DNA, 20 bp, Artificial Sequence
  Description of Artificial Sequence: Synthetic oligonucleotide
  Target: LAMA2; (+) strand; PAM type: YTN; PAM sequence: TTA
tatcagggccccactccatc

SEQ ID NO: 325917 - DNA, 20 bp, Artificial Sequence
  Description of Artificial Sequence: Synthetic oligonucleotide
  Target: LAMA2; (+) strand; PAM type: YTN; PAM sequence: CTC
catccattgtcttttttctt

SEQ ID NO: 325918 - DNA, 20 bp, Artificial Sequence
  Description of Artificial Sequence: Synthetic oligonucleotide
  Target: LAMA2; (+) strand; PAM type: YTN; PAM sequence: TTG
tcttttttcttagttatatc

SEQ ID NO: 325919 - DNA, 20 bp, Artificial Sequence
  Description of Artificial Sequence: Synthetic oligonucleotide
  Target: LAMA2; (+) strand; PAM type: YTN; PAM sequence: CTT
ttttcttagttatatcttga

SEQ ID NO: 325920 - DNA, 20 bp, Artificial Sequence
  Description of Artificial Sequence: Synthetic oligonucleotide
  Target: LAMA2; (+) strand; PAM type: YTN; PAM sequence: TTT
tttcttagttatatcttgat

SEQ ID NO: 325921 - DNA, 20 bp, Artificial Sequence
  Description of Artificial Sequence: Synthetic oligonucleotide
  Target: LAMA2; (+) strand; PAM type: YTN; PAM sequence: TTT
ttcttagttatatcttgata

SEQ ID NO: 325922 - DNA, 20 bp, Artificial Sequence
  Description of Artificial Sequence: Synthetic oligonucleotide
  Target: LAMA2; (+) strand; PAM type: YTN; PAM sequence: TTT
tcttagttatatcttgatat

SEQ ID NO: 325923 - DNA, 20 bp, Artificial Sequence
  Description of Artificial Sequence: Synthetic oligonucleotide
  Target: LAMA2; (+) strand; PAM type: YTN; PAM sequence: TTT
cttagttatatcttgatatg

SEQ ID NO: 325924 - DNA, 20 bp, Artificial Sequence
  Description of Artificial Sequence: Synthetic oligonucleotide
  Target: LAMA2; (+) strand; PAM type: YTN; PAM sequence: TTC
ttagttatatcttgatatgt

SEQ ID NO: 325925 - DNA, 20 bp, Artificial Sequence
  Description of Artificial Sequence: Synthetic oligonucleotide
  Target: LAMA2; (+) strand; PAM type: YTN; PAM sequence: CTT
agttatatcttgatatgtca

SEQ ID NO: 325926 - DNA, 20 bp, Artificial Sequence
  Description of Artificial Sequence: Synthetic oligonucleotide
  Target: LAMA2; (+) strand; PAM type: YTN; PAM sequence: TTA
gttatatcttgatatgtcac

SEQ ID NO: 325927 - DNA, 20 bp, Artificial Sequence
  Description of Artificial Sequence: Synthetic oligonucleotide
  Target: LAMA2; (+) strand; PAM type: YTN; PAM sequence: TTA
tatcttgatatgtcacccta

SEQ ID NO: 325928 - DNA, 20 bp, Artificial Sequence
  Description of Artificial Sequence: Synthetic oligonucleotide
  Target: LAMA2; (+) strand; PAM type: YTN; PAM sequence: CTT
gatatgtcaccctattagtt

SEQ ID NO: 325929 - DNA, 20 bp, Artificial Sequence
  Description of Artificial Sequence: Synthetic oligonucleotide
  Target: LAMA2; (+) strand; PAM type: YTN; PAM sequence: TTG
atatgtcaccctattagttt

SEQ ID NO: 325930 - DNA, 20 bp, Artificial Sequence
  Description of Artificial Sequence: Synthetic oligonucleotide
  Target: LAMA2; (+) strand; PAM type: YTN; PAM sequence: CTA
ttagttttttccttgcagca

SEQ ID NO: 325931 - DNA, 20 bp, Artificial Sequence
  Description of Artificial Sequence: Synthetic oligonucleotide
  Target: LAMA2; (+) strand; PAM type: YTN; PAM sequence: TTA
gttttttccttgcagcattt

SEQ ID NO: 325932 - DNA, 20 bp, Artificial Sequence
  Description of Artificial Sequence: Synthetic oligonucleotide
  Target: LAMA2; (+) strand; PAM type: YTN; PAM sequence: TTT
tttccttgcagcatttcact

SEQ ID NO: 325933 - DNA, 20 bp, Artificial Sequence
  Description of Artificial Sequence: Synthetic oligonucleotide
  Target: LAMA2; (+) strand; PAM type: YTN; PAM sequence: TTT
ttccttgcagcatttcactt

SEQ ID NO: 325934 - DNA, 20 bp, Artificial Sequence
  Description of Artificial Sequence: Synthetic oligonucleotide
  Target: LAMA2; (+) strand; PAM type: YTN; PAM sequence: TTT
tccttgcagcatttcacttg

SEQ ID NO: 325935 - DNA, 20 bp, Artificial Sequence
  Description of Artificial Sequence: Synthetic oligonucleotide
  Target: LAMA2; (+) strand; PAM type: YTN; PAM sequence: TTT
ccttgcagcatttcacttgc

SEQ ID NO: 325936 - DNA, 20 bp, Artificial Sequence
  Description of Artificial Sequence: Synthetic oligonucleotide
  Target: LAMA2; (+) strand; PAM type: YTN; PAM sequence: TTC
cttgcagcatttcacttgct

SEQ ID NO: 325937 - DNA, 20 bp, Artificial Sequence
  Description of Artificial Sequence: Synthetic oligonucleotide
  Target: LAMA2; (+) strand; PAM type: YTN; PAM sequence: CTT
gcagcatttcacttgcttct

SEQ ID NO: 325938 - DNA, 20 bp, Artificial Sequence
  Description of Artificial Sequence: Synthetic oligonucleotide
  Target: LAMA2; (+) strand; PAM type: YTN; PAM sequence: TTG
cagcatttcacttgcttctt

SEQ ID NO: 325939 - DNA, 20 bp, Artificial Sequence
  Description of Artificial Sequence: Synthetic oligonucleotide
  Target: LAMA2; (+) strand; PAM type: YTN; PAM sequence: TTT
cacttgcttcttgctttttt

SEQ ID NO: 325940 - DNA, 20 bp, Artificial Sequence
  Description of Artificial Sequence: Synthetic oligonucleotide
  Target: LAMA2; (+) strand; PAM type: YTN; PAM sequence: TTC
acttgcttcttgcttttttt

SEQ ID NO: 325941 - DNA, 20 bp, Artificial Sequence
  Description of Artificial Sequence: Synthetic oligonucleotide
  Target: LAMA2; (+) strand; PAM type: YTN; PAM sequence: CTT
gcttcttgctttttttaaac

SEQ ID NO: 325942 - DNA, 20 bp, Artificial Sequence
  Description of Artificial Sequence: Synthetic oligonucleotide
  Target: LAMA2; (+) strand; PAM type: YTN; PAM sequence: TTG
cttcttgctttttttaaaca

SEQ ID NO: 325943 - DNA, 20 bp, Artificial Sequence
  Description of Artificial Sequence: Synthetic oligonucleotide
  Target: LAMA2; (+) strand; PAM type: YTN; PAM sequence: CTT
cttgctttttttaaacaaaa

SEQ ID NO: 325944 - DNA, 20 bp, Artificial Sequence
  Description of Artificial Sequence: Synthetic oligonucleotide
  Target: LAMA2; (+) strand; PAM type: YTN; PAM sequence: TTC
ttgctttttttaaacaaaaa

SEQ ID NO: 325945 - DNA, 20 bp, Artificial Sequence
  Description of Artificial Sequence: Synthetic oligonucleotide
  Target: LAMA2; (+) strand; PAM type: YTN; PAM sequence: CTT
gctttttttaaacaaaaatt

SEQ ID NO: 325946 - DNA, 20 bp, Artificial Sequence
  Description of Artificial Sequence: Synthetic oligonucleotide
  Target: LAMA2; (+) strand; PAM type: YTN; PAM sequence: TTG
ctttttttaaacaaaaattt

SEQ ID NO: 325947 - DNA, 20 bp, Artificial Sequence
  Description of Artificial Sequence: Synthetic oligonucleotide
  Target: LAMA2; (+) strand; PAM type: YTN; PAM sequence: CTT
tttttaaacaaaaatttatg

SEQ ID NO: 325948 - DNA, 20 bp, Artificial Sequence
  Description of Artificial Sequence: Synthetic oligonucleotide
  Target: LAMA2; (+) strand; PAM type: YTN; PAM sequence: TTT
ttttaaacaaaaatttatgc

SEQ ID NO: 325949 - DNA, 20 bp, Artificial Sequence
  Description of Artificial Sequence: Synthetic oligonucleotide
  Target: LAMA2; (+) strand; PAM type: YTN; PAM sequence: TTT
tttaaacaaaaatttatgca

SEQ ID NO: 325950 - DNA, 20 bp, Artificial Sequence
  Description of Artificial Sequence: Synthetic oligonucleotide
  Target: LAMA2; (+) strand; PAM type: YTN; PAM sequence: TTT
ttaaacaaaaatttatgcac

SEQ ID NO: 325951 - DNA, 20 bp, Artificial Sequence
  Description of Artificial Sequence: Synthetic oligonucleotide
  Target: LAMA2; (+) strand; PAM type: YTN; PAM sequence: TTT
taaacaaaaatttatgcact

SEQ ID NO: 325952 - DNA, 20 bp, Artificial Sequence
  Description of Artificial Sequence: Synthetic oligonucleotide
  Target: LAMA2; (+) strand; PAM type: YTN; PAM sequence: TTT
aaacaaaaatttatgcacta

SEQ ID NO: 325953 - DNA, 20 bp, Artificial Sequence
  Description of Artificial Sequence: Synthetic oligonucleotide
  Target: LAMA2; (+) strand; PAM type: YTN; PAM sequence: TTA
aacaaaaatttatgcactac

SEQ ID NO: 325954 - DNA, 20 bp, Artificial Sequence
  Description of Artificial Sequence: Synthetic oligonucleotide
  Target: LAMA2; (+) strand; PAM type: YTN; PAM sequence: TTT
atgcactaccctccctgcat

SEQ ID NO: 325955 - DNA, 20 bp, Artificial Sequence
  Description of Artificial Sequence: Synthetic oligonucleotide
  Target: LAMA2; (+) strand; PAM type: YTN; PAM sequence: TTA
tgcactaccctccctgcatc

SEQ ID NO: 325956 - DNA, 20 bp, Artificial Sequence
  Description of Artificial Sequence: Synthetic oligonucleotide
  Target: LAMA2; (+) strand; PAM type: YTN; PAM sequence: CTA
ccctccctgcatccatgttc

SEQ ID NO: 325957 - DNA, 20 bp, Artificial Sequence
  Description of Artificial Sequence: Synthetic oligonucleotide
  Target: LAMA2; (+) strand; PAM type: YTN; PAM sequence: CTC
cctgcatccatgttcctgct

SEQ ID NO: 325958 - DNA, 20 bp, Artificial Sequence
  Description of Artificial Sequence: Synthetic oligonucleotide
  Target: LAMA2; (+) strand; PAM type: YTN; PAM sequence: CTG
catccatgttcctgctgcct

SEQ ID NO: 325959 - DNA, 20 bp, Artificial Sequence
  Description of Artificial Sequence: Synthetic oligonucleotide
  Target: LAMA2; (+) strand; PAM type: YTN; PAM sequence: TTC
ctgctgcctcatattcattc

SEQ ID NO: 325960 - DNA, 20 bp, Artificial Sequence
  Description of Artificial Sequence: Synthetic oligonucleotide
  Target: LAMA2; (+) strand; PAM type: YTN; PAM sequence: CTG
ctgcctcatattcattcatt

SEQ ID NO: 325961 - DNA, 20 bp, Artificial Sequence
  Description of Artificial Sequence: Synthetic oligonucleotide
  Target: LAMA2; (+) strand; PAM type: YTN; PAM sequence: CTG
cctcatattcattcattctt

SEQ ID NO: 325962 - DNA, 20 bp, Artificial Sequence
  Description of Artificial Sequence: Synthetic oligonucleotide
  Target: LAMA2; (+) strand; PAM type: YTN; PAM sequence: CTC
atattcattcattcttcagc

SEQ ID NO: 325963 - DNA, 20 bp, Artificial Sequence
  Description of Artificial Sequence: Synthetic oligonucleotide
  Target: LAMA2; (+) strand; PAM type: YTN; PAM sequence: TTC
attcattcttcagctggtgg

SEQ ID NO: 325964 - DNA, 20 bp, Artificial Sequence
  Description of Artificial Sequence: Synthetic oligonucleotide
  Target: LAMA2; (+) strand; PAM type: YTN; PAM sequence: TTC
attcttcagctggtggcaat

SEQ ID NO: 325965 - DNA, 20 bp, Artificial Sequence
  Description of Artificial Sequence: Synthetic oligonucleotide
  Target: LAMA2; (+) strand; PAM type: YTN; PAM sequence: TTC
ttcagctggtggcaatcagc

SEQ ID NO: 325966 - DNA, 20 bp, Artificial Sequence
  Description of Artificial Sequence: Synthetic oligonucleotide
  Target: LAMA2; (+) strand; PAM type: YTN; PAM sequence: CTT
cagctggtggcaatcagcat

SEQ ID NO: 325967 - DNA, 20 bp, Artificial Sequence
  Description of Artificial Sequence: Synthetic oligonucleotide
  Target: LAMA2; (+) strand; PAM type: YTN; PAM sequence: TTC
agctggtggcaatcagcatt

SEQ ID NO: 325968 - DNA, 20 bp, Artificial Sequence
  Description of Artificial Sequence: Synthetic oligonucleotide
  Target: LAMA2; (+) strand; PAM type: YTN; PAM sequence: CTG
gtggcaatcagcattcagtt

SEQ ID NO: 325969 - DNA, 20 bp, Artificial Sequence
  Description of Artificial Sequence: Synthetic oligonucleotide
  Target: LAMA2; (+) strand; PAM type: YTN; PAM sequence: TTC
agtttctctccataaaactg

SEQ ID NO: 325970 - DNA, 20 bp, Artificial Sequence
  Description of Artificial Sequence: Synthetic oligonucleotide
  Target: LAMA2; (+) strand; PAM type: YTN; PAM sequence: TTT
ctctccataaaactgttatt

SEQ ID NO: 325971 - DNA, 20 bp, Artificial Sequence
  Description of Artificial Sequence: Synthetic oligonucleotide
  Target: LAMA2; (+) strand; PAM type: YTN; PAM sequence: TTC
tctccataaaactgttatta

SEQ ID NO: 325972 - DNA, 20 bp, Artificial Sequence
  Description of Artificial Sequence: Synthetic oligonucleotide
  Target: LAMA2; (+) strand; PAM type: YTN; PAM sequence: CTC
tccataaaactgttattaaa

SEQ ID NO: 325973 - DNA, 20 bp, Artificial Sequence
  Description of Artificial Sequence: Synthetic oligonucleotide
  Target: LAMA2; (+) strand; PAM type: YTN; PAM sequence: CTC
cataaaactgttattaaatc

SEQ ID NO: 325974 - DNA, 20 bp, Artificial Sequence
  Description of Artificial Sequence: Synthetic oligonucleotide
  Target: LAMA2; (+) strand; PAM type: YTN; PAM sequence: CTG
ttattaaatccaataagcct

SEQ ID NO: 325975 - DNA, 20 bp, Artificial Sequence
  Description of Artificial Sequence: Synthetic oligonucleotide
  Target: LAMA2; (+) strand; PAM type: YTN; PAM sequence: TTA
ttaaatccaataagcctttc

SEQ ID NO: 325976 - DNA, 20 bp, Artificial Sequence
  Description of Artificial Sequence: Synthetic oligonucleotide
  Target: LAMA2; (+) strand; PAM type: YTN; PAM sequence: TTA
aatccaataagcctttcatt

SEQ ID NO: 325977 - DNA, 20 bp, Artificial Sequence
  Description of Artificial Sequence: Synthetic oligonucleotide
  Target: LAMA2; (+) strand; PAM type: YTN; PAM sequence: CTT
tcatttctgaatcaagtgaa

SEQ ID NO: 325978 - DNA, 20 bp, Artificial Sequence
  Description of Artificial Sequence: Synthetic oligonucleotide
  Target: LAMA2; (+) strand; PAM type: YTN; PAM sequence: TTT
catttctgaatcaagtgaag

SEQ ID NO: 325979 - DNA, 20 bp, Artificial Sequence
  Description of Artificial Sequence: Synthetic oligonucleotide
  Target: LAMA2; (+) strand; PAM type: YTN; PAM sequence: TTC
atttctgaatcaagtgaaga

SEQ ID NO: 325980 - DNA, 20 bp, Artificial Sequence
  Description of Artificial Sequence: Synthetic oligonucleotide
  Target: LAMA2; (+) strand; PAM type: YTN; PAM sequence: TTT
ctgaatcaagtgaagatttt

SEQ ID NO: 325981 - DNA, 20 bp, Artificial Sequence
  Description of Artificial Sequence: Synthetic oligonucleotide
  Target: LAMA2; (+) strand; PAM type: YTN; PAM sequence: TTC
tgaatcaagtgaagattttt

SEQ ID NO: 325982 - DNA, 20 bp, Artificial Sequence
  Description of Artificial Sequence: Synthetic oligonucleotide
  Target: LAMA2; (+) strand; PAM type: YTN; PAM sequence: CTG
aatcaagtgaagatttttct

SEQ ID NO: 325983 - DNA, 20 bp, Artificial Sequence
  Description of Artificial Sequence: Synthetic oligonucleotide
  Target: LAMA2; (+) strand; PAM type: YTN; PAM sequence: TTT
ttctctatctttgctgaatt

SEQ ID NO: 325984 - DNA, 20 bp, Artificial Sequence
  Description of Artificial Sequence: Synthetic oligonucleotide
  Target: LAMA2; (+) strand; PAM type: YTN; PAM sequence: TTT
tctctatctttgctgaattc

SEQ ID NO: 325985 - DNA, 20 bp, Artificial Sequence
  Description of Artificial Sequence: Synthetic oligonucleotide
  Target: LAMA2; (+) strand; PAM type: YTN; PAM sequence: TTT
ctctatctttgctgaattct

SEQ ID NO: 325986 - DNA, 20 bp, Artificial Sequence
  Description of Artificial Sequence: Synthetic oligonucleotide
  Target: LAMA2; (+) strand; PAM type: YTN; PAM sequence: TTC
tctatctttgctgaattctt

SEQ ID NO: 325987 - DNA, 20 bp, Artificial Sequence
  Description of Artificial Sequence: Synthetic oligonucleotide
  Target: LAMA2; (+) strand; PAM type: YTN; PAM sequence: CTC
tatctttgctgaattcttta

SEQ ID NO: 325988 - DNA, 20 bp, Artificial Sequence
  Description of Artificial Sequence: Synthetic oligonucleotide
  Target: LAMA2; (+) strand; PAM type: YTN; PAM sequence: CTA
tctttgctgaattctttatg

SEQ ID NO: 325989 - DNA, 20 bp, Artificial Sequence
  Description of Artificial Sequence: Synthetic oligonucleotide
  Target: LAMA2; (+) strand; PAM type: YTN; PAM sequence: CTT
tgctgaattctttatggcat

SEQ ID NO: 325990 - DNA, 20 bp, Artificial Sequence
  Description of Artificial Sequence: Synthetic oligonucleotide
  Target: LAMA2; (+) strand; PAM type: YTN; PAM sequence: TTT
gctgaattctttatggcatt

SEQ ID NO: 325991 - DNA, 20 bp, Artificial Sequence
  Description of Artificial Sequence: Synthetic oligonucleotide
  Target: LAMA2; (+) strand; PAM type: YTN; PAM sequence: TTG
ctgaattctttatggcattt

SEQ ID NO: 325992 - DNA, 20 bp, Artificial Sequence
  Description of Artificial Sequence: Synthetic oligonucleotide
  Target: LAMA2; (+) strand; PAM type: YTN; PAM sequence: CTG
aattctttatggcatttaac

SEQ ID NO: 325993 - DNA, 20 bp, Artificial Sequence
  Description of Artificial Sequence: Synthetic oligonucleotide
  Target: LAMA2; (+) strand; PAM type: YTN; PAM sequence: TTC
tttatggcatttaacatgtc

SEQ ID NO: 325994 - DNA, 20 bp, Artificial Sequence
  Description of Artificial Sequence: Synthetic oligonucleotide
  Target: LAMA2; (+) strand; PAM type: YTN; PAM sequence: CTT
tatggcatttaacatgtctt

SEQ ID NO: 325995 - DNA, 20 bp, Artificial Sequence
  Description of Artificial Sequence: Synthetic oligonucleotide
  Target: LAMA2; (+) strand; PAM type: YTN; PAM sequence: TTT
atggcatttaacatgtcttt

SEQ ID NO: 325996 - DNA, 20 bp, Artificial Sequence
  Description of Artificial Sequence: Synthetic oligonucleotide
  Target: LAMA2; (+) strand; PAM type: YTN; PAM sequence: TTA
tggcatttaacatgtctttt

SEQ ID NO: 325997 - DNA, 20 bp, Artificial Sequence
  Description of Artificial Sequence: Synthetic oligonucleotide
  Target: LAMA2; (+) strand; PAM type: YTN; PAM sequence: TTT
aacatgtcttttcactccat

SEQ ID NO: 325998 - DNA, 20 bp, Artificial Sequence
  Description of Artificial Sequence: Synthetic oligonucleotide
  Target: LAMA2; (+) strand; PAM type: YTN; PAM sequence: TTA
acatgtcttttcactccatc

SEQ ID NO: 325999 - DNA, 20 bp, Artificial Sequence
  Description of Artificial Sequence: Synthetic oligonucleotide
  Target: LAMA2; (+) strand; PAM type: YTN; PAM sequence: CTT
ttcactccatctttctttgg

SEQ ID NO: 326000 - DNA, 20 bp, Artificial Sequence
  Description of Artificial Sequence: Synthetic oligonucleotide
  Target: LAMA2; (+) strand; PAM type: YTN; PAM sequence: TTT
tcactccatctttctttggg

SEQ ID NO: 326001 - DNA, 20 bp, Artificial Sequence
  Description of Artificial Sequence: Synthetic oligonucleotide
  Target: LAMA2; (+) strand; PAM type: YTN; PAM sequence: TTT
cactccatctttctttgggg

SEQ ID NO: 326002 - DNA, 20 bp, Artificial Sequence
  Description of Artificial Sequence: Synthetic oligonucleotide
  Target: LAMA2; (+) strand; PAM type: YTN; PAM sequence: TTC
actccatctttctttgggga

SEQ ID NO: 326003 - DNA, 20 bp, Artificial Sequence
  Description of Artificial Sequence: Synthetic oligonucleotide
  Target: LAMA2; (+) strand; PAM type: YTN; PAM sequence: CTC
catctttctttggggactct

SEQ ID NO: 326004 - DNA, 20 bp, Artificial Sequence
  Description of Artificial Sequence: Synthetic oligonucleotide
  Target: LAMA2; (+) strand; PAM type: YTN; PAM sequence: CTT
tctttggggactctcttcca

SEQ ID NO: 326005 - DNA, 20 bp, Artificial Sequence
  Description of Artificial Sequence: Synthetic oligonucleotide
  Target: LAMA2; (+) strand; PAM type: YTN; PAM sequence: TTT
ctttggggactctcttccat

SEQ ID NO: 326006 - DNA, 20 bp, Artificial Sequence
  Description of Artificial Sequence: Synthetic oligonucleotide
  Target: LAMA2; (+) strand; PAM type: YTN; PAM sequence: TTC
tttggggactctcttccatg

SEQ ID NO: 326007 - DNA, 20 bp, Artificial Sequence
  Description of Artificial Sequence: Synthetic oligonucleotide
  Target: LAMA2; (+) strand; PAM type: YTN; PAM sequence: CTT
tggggactctcttccatgac

SEQ ID NO: 326008 - DNA, 20 bp, Artificial Sequence
  Description of Artificial Sequence: Synthetic oligonucleotide
  Target: LAMA2; (+) strand; PAM type: YTN; PAM sequence: TTT
ggggactctcttccatgact

SEQ ID NO: 326009 - DNA, 20 bp, Artificial Sequence
  Description of Artificial Sequence: Synthetic oligonucleotide
  Target: LAMA2; (+) strand; PAM type: YTN; PAM sequence: TTG
gggactctcttccatgactt

SEQ ID NO: 326010 - DNA, 20 bp, Artificial Sequence
  Description of Artificial Sequence: Synthetic oligonucleotide
  Target: LAMA2; (+) strand; PAM type: YTN; PAM sequence: CTC
tcttccatgacttctaagac

SEQ ID NO: 326011 - DNA, 20 bp, Artificial Sequence
  Description of Artificial Sequence: Synthetic oligonucleotide
  Target: LAMA2; (+) strand; PAM type: YTN; PAM sequence: CTC
ttccatgacttctaagacaa

SEQ ID NO: 326012 - DNA, 20 bp, Artificial Sequence
  Description of Artificial Sequence: Synthetic oligonucleotide
  Target: LAMA2; (+) strand; PAM type: YTN; PAM sequence: CTT
ccatgacttctaagacaaca

SEQ ID NO: 326013 - DNA, 20 bp, Artificial Sequence
  Description of Artificial Sequence: Synthetic oligonucleotide
  Target: LAMA2; (+) strand; PAM type: YTN; PAM sequence: TTC
catgacttctaagacaacac

SEQ ID NO: 326014 - DNA, 20 bp, Artificial Sequence
  Description of Artificial Sequence: Synthetic oligonucleotide
  Target: LAMA2; (+) strand; PAM type: YTN; PAM sequence: CTT
ctaagacaacactttttaat

SEQ ID NO: 326015 - DNA, 20 bp, Artificial Sequence
  Description of Artificial Sequence: Synthetic oligonucleotide
  Target: LAMA2; (+) strand; PAM type: YTN; PAM sequence: TTC
taagacaacactttttaatt

SEQ ID NO: 326016 - DNA, 20 bp, Artificial Sequence
  Description of Artificial Sequence: Synthetic oligonucleotide
  Target: LAMA2; (+) strand; PAM type: YTN; PAM sequence: CTA
agacaacactttttaattct

SEQ ID NO: 326017 - DNA, 20 bp, Artificial Sequence
  Description of Artificial Sequence: Synthetic oligonucleotide
  Target: LAMA2; (+) strand; PAM type: YTN; PAM sequence: CTT
tttaattctcttccaccatt

SEQ ID NO: 326018 - DNA, 20 bp, Artificial Sequence
  Description of Artificial Sequence: Synthetic oligonucleotide
  Target: LAMA2; (+) strand; PAM type: YTN; PAM sequence: TTT
ttaattctcttccaccattt

SEQ ID NO: 326019 - DNA, 20 bp, Artificial Sequence
  Description of Artificial Sequence: Synthetic oligonucleotide
  Target: LAMA2; (+) strand; PAM type: YTN; PAM sequence: TTT
taattctcttccaccatttt

SEQ ID NO: 326020 - DNA, 20 bp, Artificial Sequence
  Description of Artificial Sequence: Synthetic oligonucleotide
  Target: LAMA2; (+) strand; PAM type: YTN; PAM sequence: TTT
aattctcttccaccatttta

SEQ ID NO: 326021 - DNA, 20 bp, Artificial Sequence
  Description of Artificial Sequence: Synthetic oligonucleotide
  Target: LAMA2; (+) strand; PAM type: YTN; PAM sequence: TTA
attctcttccaccattttag

SEQ ID NO: 326022 - DNA, 20 bp, Artificial Sequence
  Description of Artificial Sequence: Synthetic oligonucleotide
  Target: LAMA2; (+) strand; PAM type: YTN; PAM sequence: TTC
tcttccaccattttaggttt

SEQ ID NO: 326023 - DNA, 20 bp, Artificial Sequence
  Description of Artificial Sequence: Synthetic oligonucleotide
  Target: LAMA2; (+) strand; PAM type: YTN; PAM sequence: CTC
ttccaccattttaggtttgt

SEQ ID NO: 326024 - DNA, 20 bp, Artificial Sequence
  Description of Artificial Sequence: Synthetic oligonucleotide
  Target: LAMA2; (+) strand; PAM type: YTN; PAM sequence: CTT
ccaccattttaggtttgtct

SEQ ID NO: 326025 - DNA, 20 bp, Artificial Sequence
  Description of Artificial Sequence: Synthetic oligonucleotide
  Target: LAMA2; (+) strand; PAM type: YTN; PAM sequence: TTC
caccattttaggtttgtctt

SEQ ID NO: 326026 - DNA, 20 bp, Artificial Sequence
  Description of Artificial Sequence: Synthetic oligonucleotide
  Target: LAMA2; (+) strand; PAM type: YTN; PAM sequence: TTT
taggtttgtctttgtaggta

SEQ ID NO: 326027 - DNA, 20 bp, Artificial Sequence
  Description of Artificial Sequence: Synthetic oligonucleotide
  Target: LAMA2; (+) strand; PAM type: YTN; PAM sequence: TTT
aggtttgtctttgtaggtaa

SEQ ID NO: 326028 - DNA, 20 bp, Artificial Sequence
  Description of Artificial Sequence: Synthetic oligonucleotide
  Target: LAMA2; (+) strand; PAM type: YTN; PAM sequence: TTA
ggtttgtctttgtaggtaac

SEQ ID NO: 326029 - DNA, 20 bp, Artificial Sequence
  Description of Artificial Sequence: Synthetic oligonucleotide
  Target: LAMA2; (+) strand; PAM type: YTN; PAM sequence: TTT
gtctttgtaggtaaccttta

SEQ ID NO: 326030 - DNA, 20 bp, Artificial Sequence
  Description of Artificial Sequence: Synthetic oligonucleotide
  Target: LAMA2; (+) strand; PAM type: YTN; PAM sequence: TTG
tctttgtaggtaacctttat

SEQ ID NO: 326031 - DNA, 20 bp, Artificial Sequence
  Description of Artificial Sequence: Synthetic oligonucleotide
  Target: LAMA2; (+) strand; PAM type: YTN; PAM sequence: CTT
tgtaggtaacctttatagat

SEQ ID NO: 326032 - DNA, 20 bp, Artificial Sequence
  Description of Artificial Sequence: Synthetic oligonucleotide
  Target: LAMA2; (+) strand; PAM type: YTN; PAM sequence: TTT
gtaggtaacctttatagatt

SEQ ID NO: 326033 - DNA, 20 bp, Artificial Sequence
  Description of Artificial Sequence: Synthetic oligonucleotide
  Target: LAMA2; (+) strand; PAM type: YTN; PAM sequence: TTG
taggtaacctttatagattc

SEQ ID NO: 326034 - DNA, 20 bp, Artificial Sequence
  Description of Artificial Sequence: Synthetic oligonucleotide
  Target: LAMA2; (+) strand; PAM type: YTN; PAM sequence: CTT
tatagattcttctgtgtaat

SEQ ID NO: 326035 - DNA, 20 bp, Artificial Sequence
  Description of Artificial Sequence: Synthetic oligonucleotide
  Target: LAMA2; (+) strand; PAM type: YTN; PAM sequence: TTT
atagattcttctgtgtaatc

SEQ ID NO: 326036 - DNA, 20 bp, Artificial Sequence
  Description of Artificial Sequence: Synthetic oligonucleotide
  Target: LAMA2; (+) strand; PAM type: YTN; PAM sequence: TTA
tagattcttctgtgtaatcc

SEQ ID NO: 326037 - DNA, 20 bp, Artificial Sequence
  Description of Artificial Sequence: Synthetic oligonucleotide
  Target: LAMA2; (+) strand; PAM type: YTN; PAM sequence: TTC
ttctgtgtaatccttacata

SEQ ID NO: 326038 - DNA, 20 bp, Artificial Sequence
  Description of Artificial Sequence: Synthetic oligonucleotide
  Target: LAMA2; (+) strand; PAM type: YTN; PAM sequence: CTT
ctgtgtaatccttacatacc

SEQ ID NO: 326039 - DNA, 20 bp, Artificial Sequence
  Description of Artificial Sequence: Synthetic oligonucleotide
  Target: LAMA2; (+) strand; PAM type: YTN; PAM sequence: TTC
tgtgtaatccttacatacca

SEQ ID NO: 326040 - DNA, 20 bp, Artificial Sequence
  Description of Artificial Sequence: Synthetic oligonucleotide
  Target: LAMA2; (+) strand; PAM type: YTN; PAM sequence: CTG
tgtaatccttacataccaat

SEQ ID NO: 326041 - DNA, 20 bp, Artificial Sequence
  Description of Artificial Sequence: Synthetic oligonucleotide
  Target: LAMA2; (+) strand; PAM type: YTN; PAM sequence: CTT
acataccaatgttctgaatt

SEQ ID NO: 326042 - DNA, 20 bp, Artificial Sequence
  Description of Artificial Sequence: Synthetic oligonucleotide
  Target: LAMA2; (+) strand; PAM type: YTN; PAM sequence: TTA
cataccaatgttctgaattc

SEQ ID NO: 326043 - DNA, 20 bp, Artificial Sequence
  Description of Artificial Sequence: Synthetic oligonucleotide
  Target: LAMA2; (+) strand; PAM type: YTN; PAM sequence: TTC
tgaattccattctgctcctc

SEQ ID NO: 326044 - DNA, 20 bp, Artificial Sequence
  Description of Artificial Sequence: Synthetic oligonucleotide
  Target: LAMA2; (+) strand; PAM type: YTN; PAM sequence: CTG
aattccattctgctcctctt

SEQ ID NO: 326045 - DNA, 20 bp, Artificial Sequence
  Description of Artificial Sequence: Synthetic oligonucleotide
  Target: LAMA2; (+) strand; PAM type: YTN; PAM sequence: TTC
cattctgctcctctttttcc

SEQ ID NO: 326046 - DNA, 20 bp, Artificial Sequence
  Description of Artificial Sequence: Synthetic oligonucleotide
  Target: LAMA2; (+) strand; PAM type: YTN; PAM sequence: TTC
tgctcctctttttccattcc

SEQ ID NO: 326047 - DNA, 20 bp, Artificial Sequence
  Description of Artificial Sequence: Synthetic oligonucleotide
  Target: LAMA2; (+) strand; PAM type: YTN; PAM sequence: CTG
ctcctctttttccattccat

SEQ ID NO: 326048 - DNA, 20 bp, Artificial Sequence
  Description of Artificial Sequence: Synthetic oligonucleotide
  Target: LAMA2; (+) strand; PAM type: YTN; PAM sequence: CTC
ctctttttccattccataga

SEQ ID NO: 326049 - DNA, 20 bp, Artificial Sequence
  Description of Artificial Sequence: Synthetic oligonucleotide
  Target: LAMA2; (+) strand; PAM type: YTN; PAM sequence: CTC
tttttccattccatagagtc

SEQ ID NO: 326050 - DNA, 20 bp, Artificial Sequence
  Description of Artificial Sequence: Synthetic oligonucleotide
  Target: LAMA2; (+) strand; PAM type: YTN; PAM sequence: CTT
tttccattccatagagtctg

SEQ ID NO: 326051 - DNA, 20 bp, Artificial Sequence
  Description of Artificial Sequence: Synthetic oligonucleotide
  Target: LAMA2; (+) strand; PAM type: YTN; PAM sequence: TTT
ttccattccatagagtctga

SEQ ID NO: 326052 - DNA, 20 bp, Artificial Sequence
  Description of Artificial Sequence: Synthetic oligonucleotide
  Target: LAMA2; (+) strand; PAM type: YTN; PAM sequence: TTT
tccattccatagagtctgat

SEQ ID NO: 326053 - DNA, 20 bp, Artificial Sequence
  Description of Artificial Sequence: Synthetic oligonucleotide
  Target: LAMA2; (+) strand; PAM type: YTN; PAM sequence: TTT
ccattccatagagtctgatt

SEQ ID NO: 326054 - DNA, 20 bp, Artificial Sequence
  Description of Artificial Sequence: Synthetic oligonucleotide
  Target: LAMA2; (+) strand; PAM type: YTN; PAM sequence: TTC
cattccatagagtctgattg

SEQ ID NO: 326055 - DNA, 20 bp, Artificial Sequence
  Description of Artificial Sequence: Synthetic oligonucleotide
  Target: LAMA2; (+) strand; PAM type: YTN; PAM sequence: TTC
catagagtctgattgtgtac

SEQ ID NO: 326056 - DNA, 20 bp, Artificial Sequence
  Description of Artificial Sequence: Synthetic oligonucleotide
  Target: LAMA2; (+) strand; PAM type: YTN; PAM sequence: CTG
attgtgtacttgcaaacact

SEQ ID NO: 326057 - DNA, 20 bp, Artificial Sequence
  Description of Artificial Sequence: Synthetic oligonucleotide
  Target: LAMA2; (+) strand; PAM type: YTN; PAM sequence: TTG
tgtacttgcaaacacttcca

SEQ ID NO: 326058 - DNA, 20 bp, Artificial Sequence
  Description of Artificial Sequence: Synthetic oligonucleotide
  Target: LAMA2; (+) strand; PAM type: YTN; PAM sequence: CTT
gcaaacacttccatggtatc

SEQ ID NO: 326059 - DNA, 20 bp, Artificial Sequence
  Description of Artificial Sequence: Synthetic oligonucleotide
  Target: LAMA2; (+) strand; PAM type: YTN; PAM sequence: TTG
caaacacttccatggtatct

SEQ ID NO: 326060 - DNA, 20 bp, Artificial Sequence
  Description of Artificial Sequence: Synthetic oligonucleotide
  Target: LAMA2; (+) strand; PAM type: YTN; PAM sequence: CTT
ccatggtatctatttcaagt

SEQ ID NO: 326061 - DNA, 20 bp, Artificial Sequence
  Description of Artificial Sequence: Synthetic oligonucleotide
  Target: LAMA2; (+) strand; PAM type: YTN; PAM sequence: TTC
catggtatctatttcaagtg

SEQ ID NO: 326062 - DNA, 20 bp, Artificial Sequence
  Description of Artificial Sequence: Synthetic oligonucleotide
  Target: LAMA2; (+) strand; PAM type: YTN; PAM sequence: CTA
tttcaagtgtattttgaaaa

SEQ ID NO: 326063 - DNA, 20 bp, Artificial Sequence
  Description of Artificial Sequence: Synthetic oligonucleotide
  Target: LAMA2; (+) strand; PAM type: YTN; PAM sequence: TTT
caagtgtattttgaaaagtc

SEQ ID NO: 326064 - DNA, 20 bp, Artificial Sequence
  Description of Artificial Sequence: Synthetic oligonucleotide
  Target: LAMA2; (+) strand; PAM type: YTN; PAM sequence: TTC
aagtgtattttgaaaagtct

SEQ ID NO: 326065 - DNA, 20 bp, Artificial Sequence
  Description of Artificial Sequence: Synthetic oligonucleotide
  Target: LAMA2; (+) strand; PAM type: YTN; PAM sequence: TTT
tgaaaagtctaacatctagg

SEQ ID NO: 326066 - DNA, 20 bp, Artificial Sequence
  Description of Artificial Sequence: Synthetic oligonucleotide
  Target: LAMA2; (+) strand; PAM type: YTN; PAM sequence: TTT
gaaaagtctaacatctaggc

SEQ ID NO: 326067 - DNA, 20 bp, Artificial Sequence
  Description of Artificial Sequence: Synthetic oligonucleotide
  Target: LAMA2; (+) strand; PAM type: YTN; PAM sequence: TTG
aaaagtctaacatctaggct

SEQ ID NO: 326068 - DNA, 20 bp, Artificial Sequence
  Description of Artificial Sequence: Synthetic oligonucleotide
  Target: LAMA2; (+) strand; PAM type: YTN; PAM sequence: CTA
acatctaggctttcaacttg

SEQ ID NO: 326069 - DNA, 20 bp, Artificial Sequence
  Description of Artificial Sequence: Synthetic oligonucleotide
  Target: LAMA2; (+) strand; PAM type: YTN; PAM sequence: CTA
ggctttcaacttgatctgtt

SEQ ID NO: 326070 - DNA, 20 bp, Artificial Sequence
  Description of Artificial Sequence: Synthetic oligonucleotide
  Target: LAMA2; (+) strand; PAM type: YTN; PAM sequence: CTT
tcaacttgatctgttgtact

SEQ ID NO: 326071 - DNA, 20 bp, Artificial Sequence
  Description of Artificial Sequence: Synthetic oligonucleotide
  Target: LAMA2; (+) strand; PAM type: YTN; PAM sequence: TTT
caacttgatctgttgtactt

SEQ ID NO: 326072 - DNA, 20 bp, Artificial Sequence
  Description of Artificial Sequence: Synthetic oligonucleotide
  Target: LAMA2; (+) strand; PAM type: YTN; PAM sequence: TTC
aacttgatctgttgtacttt

SEQ ID NO: 326073 - DNA, 20 bp, Artificial Sequence
  Description of Artificial Sequence: Synthetic oligonucleotide
  Target: LAMA2; (+) strand; PAM type: YTN; PAM sequence: CTT
gatctgttgtactttctgta

SEQ ID NO: 326074 - DNA, 20 bp, Artificial Sequence
  Description of Artificial Sequence: Synthetic oligonucleotide
  Target: LAMA2; (+) strand; PAM type: YTN; PAM sequence: TTG
atctgttgtactttctgtat

SEQ ID NO: 326075 - DNA, 20 bp, Artificial Sequence
  Description of Artificial Sequence: Synthetic oligonucleotide
  Target: LAMA2; (+) strand; PAM type: YTN; PAM sequence: CTG
ttgtactttctgtattctat

SEQ ID NO: 326076 - DNA, 20 bp, Artificial Sequence
  Description of Artificial Sequence: Synthetic oligonucleotide
  Target: LAMA2; (+) strand; PAM type: YTN; PAM sequence: TTG
tactttctgtattctatacc

SEQ ID NO: 326077 - DNA, 20 bp, Artificial Sequence
  Description of Artificial Sequence: Synthetic oligonucleotide
  Target: LAMA2; (+) strand; PAM type: YTN; PAM sequence: CTT
tctgtattctatacctgagt

SEQ ID NO: 326078 - DNA, 20 bp, Artificial Sequence
  Description of Artificial Sequence: Synthetic oligonucleotide
  Target: LAMA2; (+) strand; PAM type: YTN; PAM sequence: TTT
ctgtattctatacctgagtg

SEQ ID NO: 326079 - DNA, 20 bp, Artificial Sequence
  Description of Artificial Sequence: Synthetic oligonucleotide
  Target: LAMA2; (+) strand; PAM type: YTN; PAM sequence: TTC
tgtattctatacctgagtgt

SEQ ID NO: 326080 - DNA, 20 bp, Artificial Sequence
  Description of Artificial Sequence: Synthetic oligonucleotide
  Target: LAMA2; (+) strand; PAM type: YTN; PAM sequence: CTG
tattctatacctgagtgtca

SEQ ID NO: 326081 - DNA, 20 bp, Artificial Sequence
  Description of Artificial Sequence: Synthetic oligonucleotide
  Target: LAMA2; (+) strand; PAM type: YTN; PAM sequence: TTC
tatacctgagtgtcagcaaa

SEQ ID NO: 326082 - DNA, 20 bp, Artificial Sequence
  Description of Artificial Sequence: Synthetic oligonucleotide
  Target: LAMA2; (+) strand; PAM type: YTN; PAM sequence: CTA
tacctgagtgtcagcaaaga

SEQ ID NO: 326083 - DNA, 20 bp, Artificial Sequence
  Description of Artificial Sequence: Synthetic oligonucleotide
  Target: LAMA2; (+) strand; PAM type: YTN; PAM sequence: CTG
agtgtcagcaaagacgcctg

SEQ ID NO: 326084 - DNA, 20 bp, Artificial Sequence
  Description of Artificial Sequence: Synthetic oligonucleotide
  Target: LAMA2; (+) strand; PAM type: YTN; PAM sequence: CTG
ggagctgtctttgagtcttc

SEQ ID NO: 326085 - DNA, 20 bp, Artificial Sequence
  Description of Artificial Sequence: Synthetic oligonucleotide
  Target: LAMA2; (+) strand; PAM type: YTN; PAM sequence: CTG
tctttgagtcttccttctct

SEQ ID NO: 326086 - DNA, 20 bp, Artificial Sequence
  Description of Artificial Sequence: Synthetic oligonucleotide
  Target: LAMA2; (+) strand; PAM type: YTN; PAM sequence: CTT
tgagtcttccttctctctta

SEQ ID NO: 326087 - DNA, 20 bp, Artificial Sequence
  Description of Artificial Sequence: Synthetic oligonucleotide
  Target: LAMA2; (+) strand; PAM type: YTN; PAM sequence: TTT
gagtcttccttctctcttac

SEQ ID NO: 326088 - DNA, 20 bp, Artificial Sequence
  Description of Artificial Sequence: Synthetic oligonucleotide
  Target: LAMA2; (+) strand; PAM type: YTN; PAM sequence: TTG
agtcttccttctctcttacc

SEQ ID NO: 326089 - DNA, 20 bp, Artificial Sequence
  Description of Artificial Sequence: Synthetic oligonucleotide
  Target: LAMA2; (+) strand; PAM type: YTN; PAM sequence: CTT
ccttctctcttacctccata

SEQ ID NO: 326090 - DNA, 20 bp, Artificial Sequence
  Description of Artificial Sequence: Synthetic oligonucleotide
  Target: LAMA2; (+) strand; PAM type: YTN; PAM sequence: TTC
cttctctcttacctccatat

SEQ ID NO: 326091 - DNA, 20 bp, Artificial Sequence
  Description of Artificial Sequence: Synthetic oligonucleotide
  Target: LAMA2; (+) strand; PAM type: YTN; PAM sequence: CTT
ctctcttacctccatattta

SEQ ID NO: 326092 - DNA, 20 bp, Artificial Sequence
  Description of Artificial Sequence: Synthetic oligonucleotide
  Target: LAMA2; (+) strand; PAM type: YTN; PAM sequence: TTC
tctcttacctccatatttaa

SEQ ID NO: 326093 - DNA, 20 bp, Artificial Sequence
  Description of Artificial Sequence: Synthetic oligonucleotide
  Target: LAMA2; (+) strand; PAM type: YTN; PAM sequence: CTC
tcttacctccatatttaatg

SEQ ID NO: 326094 - DNA, 20 bp, Artificial Sequence
  Description of Artificial Sequence: Synthetic oligonucleotide
  Target: LAMA2; (+) strand; PAM type: YTN; PAM sequence: CTC
ttacctccatatttaatgga

SEQ ID NO: 326095 - DNA, 20 bp, Artificial Sequence
  Description of Artificial Sequence: Synthetic oligonucleotide
  Target: LAMA2; (+) strand; PAM type: YTN; PAM sequence: CTT
acctccatatttaatggatt

SEQ ID NO: 326096 - DNA, 20 bp, Artificial Sequence
  Description of Artificial Sequence: Synthetic oligonucleotide
  Target: LAMA2; (+) strand; PAM type: YTN; PAM sequence: TTA
cctccatatttaatggatta

SEQ ID NO: 326097 - DNA, 20 bp, Artificial Sequence
  Description of Artificial Sequence: Synthetic oligonucleotide
  Target: LAMA2; (+) strand; PAM type: YTN; PAM sequence: CTC
catatttaatggattaccat

SEQ ID NO: 326098 - DNA, 20 bp, Artificial Sequence
  Description of Artificial Sequence: Synthetic oligonucleotide
  Target: LAMA2; (+) strand; PAM type: YTN; PAM sequence: TTT
aatggattaccattctcatt

SEQ ID NO: 326099 - DNA, 20 bp, Artificial Sequence
  Description of Artificial Sequence: Synthetic oligonucleotide
  Target: LAMA2; (+) strand; PAM type: YTN; PAM sequence: TTA
atggattaccattctcattg

SEQ ID NO: 326100 - DNA, 20 bp, Artificial Sequence
  Description of Artificial Sequence: Synthetic oligonucleotide
  Target: LAMA2; (+) strand; PAM type: YTN; PAM sequence: TTA
ccattctcattgattttacc

SEQ ID NO: 326101 - DNA, 20 bp, Artificial Sequence
  Description of Artificial Sequence: Synthetic oligonucleotide
  Target: LAMA2; (+) strand; PAM type: YTN; PAM sequence: TTC
tcattgattttaccttctta

SEQ ID NO: 326102 - DNA, 20 bp, Artificial Sequence
  Description of Artificial Sequence: Synthetic oligonucleotide
  Target: LAMA2; (+) strand; PAM type: YTN; PAM sequence: CTC
attgattttaccttcttaat

SEQ ID NO: 326103 - DNA, 20 bp, Artificial Sequence
  Description of Artificial Sequence: Synthetic oligonucleotide
  Target: LAMA2; (+) strand; PAM type: YTN; PAM sequence: TTG
attttaccttcttaatttct

SEQ ID NO: 326104 - DNA, 20 bp, Artificial Sequence
  Description of Artificial Sequence: Synthetic oligonucleotide
  Target: LAMA2; (+) strand; PAM type: YTN; PAM sequence: TTT
taccttcttaatttctctta

SEQ ID NO: 326105 - DNA, 20 bp, Artificial Sequence
  Description of Artificial Sequence: Synthetic oligonucleotide
  Target: LAMA2; (+) strand; PAM type: YTN; PAM sequence: TTT
accttcttaatttctcttaa

SEQ ID NO: 326106 - DNA, 20 bp, Artificial Sequence
  Description of Artificial Sequence: Synthetic oligonucleotide
  Target: LAMA2; (+) strand; PAM type: YTN; PAM sequence: TTA
ccttcttaatttctcttaaa

SEQ ID NO: 326107 - DNA, 20 bp, Artificial Sequence
  Description of Artificial Sequence: Synthetic oligonucleotide
  Target: LAMA2; (+) strand; PAM type: YTN; PAM sequence: CTT
cttaatttctcttaaattga

SEQ ID NO: 326108 - DNA, 20 bp, Artificial Sequence
  Description of Artificial Sequence: Synthetic oligonucleotide
  Target: LAMA2; (+) strand; PAM type: YTN; PAM sequence: TTC
ttaatttctcttaaattgat

SEQ ID NO: 326109 - DNA, 20 bp, Artificial Sequence
  Description of Artificial Sequence: Synthetic oligonucleotide
  Target: LAMA2; (+) strand; PAM type: YTN; PAM sequence: CTT
aatttctcttaaattgattt

SEQ ID NO: 326110 - DNA, 20 bp, Artificial Sequence
  Description of Artificial Sequence: Synthetic oligonucleotide
  Target: LAMA2; (+) strand; PAM type: YTN; PAM sequence: TTA
atttctcttaaattgatttt

SEQ ID NO: 326111 - DNA, 20 bp, Artificial Sequence
  Description of Artificial Sequence: Synthetic oligonucleotide
  Target: LAMA2; (+) strand; PAM type: YTN; PAM sequence: TTT
ctcttaaattgattttcttt

SEQ ID NO: 326112 - DNA, 20 bp, Artificial Sequence
  Description of Artificial Sequence: Synthetic oligonucleotide
  Target: LAMA2; (+) strand; PAM type: YTN; PAM sequence: TTC
tcttaaattgattttctttc

SEQ ID NO: 326113 - DNA, 20 bp, Artificial Sequence
  Description of Artificial Sequence: Synthetic oligonucleotide
  Target: LAMA2; (+) strand; PAM type: YTN; PAM sequence: CTC
ttaaattgattttctttctc

SEQ ID NO: 326114 - DNA, 20 bp, Artificial Sequence
  Description of Artificial Sequence: Synthetic oligonucleotide
  Target: LAMA2; (+) strand; PAM type: YTN; PAM sequence: CTT
aaattgattttctttctcta

SEQ ID NO: 326115 - DNA, 20 bp, Artificial Sequence
  Description of Artificial Sequence: Synthetic oligonucleotide
  Target: LAMA2; (+) strand; PAM type: YTN; PAM sequence: TTA
aattgattttctttctctat

SEQ ID NO: 326116 - DNA, 20 bp, Artificial Sequence
  Description of Artificial Sequence: Synthetic oligonucleotide
  Target: LAMA2; (+) strand; PAM type: YTN; PAM sequence: TTG
attttctttctctataccta

SEQ ID NO: 326117 - DNA, 20 bp, Artificial Sequence
  Description of Artificial Sequence: Synthetic oligonucleotide
  Target: LAMA2; (+) strand; PAM type: YTN; PAM sequence: TTT
tctttctctatacctaatgt

SEQ ID NO: 326118 - DNA, 20 bp, Artificial Sequence
  Description of Artificial Sequence: Synthetic oligonucleotide
  Target: LAMA2; (+) strand; PAM type: YTN; PAM sequence: TTT
ctttctctatacctaatgtt

SEQ ID NO: 326119 - DNA, 20 bp, Artificial Sequence
  Description of Artificial Sequence: Synthetic oligonucleotide
  Target: LAMA2; (+) strand; PAM type: YTN; PAM sequence: TTC
tttctctatacctaatgtta

SEQ ID NO: 326120 - DNA, 20 bp, Artificial Sequence
  Description of Artificial Sequence: Synthetic oligonucleotide
  Target: LAMA2; (+) strand; PAM type: YTN; PAM sequence: CTT
tctctatacctaatgttagt

SEQ ID NO: 326121 - DNA, 20 bp, Artificial Sequence
  Description of Artificial Sequence: Synthetic oligonucleotide
  Target: LAMA2; (+) strand; PAM type: YTN; PAM sequence: TTT
ctctatacctaatgttagta

SEQ ID NO: 326122 - DNA, 20 bp, Artificial Sequence
  Description of Artificial Sequence: Synthetic oligonucleotide
  Target: LAMA2; (+) strand; PAM type: YTN; PAM sequence: TTC
tctatacctaatgttagtac

SEQ ID NO: 326123 - DNA, 20 bp, Artificial Sequence
  Description of Artificial Sequence: Synthetic oligonucleotide
  Target: LAMA2; (+) strand; PAM type: YTN; PAM sequence: CTC
tatacctaatgttagtacct

SEQ ID NO: 326124 - DNA, 20 bp, Artificial Sequence
  Description of Artificial Sequence: Synthetic oligonucleotide
  Target: LAMA2; (+) strand; PAM type: YTN; PAM sequence: CTA
tacctaatgttagtaccttt

SEQ ID NO: 326125 - DNA, 20 bp, Artificial Sequence
  Description of Artificial Sequence: Synthetic oligonucleotide
  Target: LAMA2; (+) strand; PAM type: YTN; PAM sequence: CTA
atgttagtacctttccgcca

SEQ ID NO: 326126 - DNA, 20 bp, Artificial Sequence
  Description of Artificial Sequence: Synthetic oligonucleotide
  Target: LAMA2; (+) strand; PAM type: YTN; PAM sequence: TTA
gtacctttccgccatgtttc

SEQ ID NO: 326127 - DNA, 20 bp, Artificial Sequence
  Description of Artificial Sequence: Synthetic oligonucleotide
  Target: LAMA2; (+) strand; PAM type: YTN; PAM sequence: CTT
tccgccatgtttctatctgg

SEQ ID NO: 326128 - DNA, 20 bp, Artificial Sequence
  Description of Artificial Sequence: Synthetic oligonucleotide
  Target: LAMA2; (+) strand; PAM type: YTN; PAM sequence: TTT
ccgccatgtttctatctggt

SEQ ID NO: 326129 - DNA, 20 bp, Artificial Sequence
  Description of Artificial Sequence: Synthetic oligonucleotide
  Target: LAMA2; (+) strand; PAM type: YTN; PAM sequence: TTC
cgccatgtttctatctggtt

SEQ ID NO: 326130 - DNA, 20 bp, Artificial Sequence
  Description of Artificial Sequence: Synthetic oligonucleotide
  Target: LAMA2; (+) strand; PAM type: YTN; PAM sequence: TTT
ctatctggtttacattgctg

SEQ ID NO: 326131 - DNA, 20 bp, Artificial Sequence
  Description of Artificial Sequence: Synthetic oligonucleotide
  Target: LAMA2; (+) strand; PAM type: YTN; PAM sequence: TTC
tatctggtttacattgctgg

SEQ ID NO: 326132 - DNA, 20 bp, Artificial Sequence
  Description of Artificial Sequence: Synthetic oligonucleotide
  Target: LAMA2; (+) strand; PAM type: YTN; PAM sequence: CTA
tctggtttacattgctggaa

SEQ ID NO: 326133 - DNA, 20 bp, Artificial Sequence
  Description of Artificial Sequence: Synthetic oligonucleotide
  Target: LAMA2; (+) strand; PAM type: YTN; PAM sequence: CTG
gtttacattgctggaacagc

SEQ ID NO: 326134 - DNA, 20 bp, Artificial Sequence
  Description of Artificial Sequence: Synthetic oligonucleotide
  Target: LAMA2; (+) strand; PAM type: YTN; PAM sequence: TTT
acattgctggaacagcacct

SEQ ID NO: 326135 - DNA, 20 bp, Artificial Sequence
  Description of Artificial Sequence: Synthetic oligonucleotide
  Target: LAMA2; (+) strand; PAM type: YTN; PAM sequence: TTA
cattgctggaacagcacctg

SEQ ID NO: 326136 - DNA, 20 bp, Artificial Sequence
  Description of Artificial Sequence: Synthetic oligonucleotide
  Target: LAMA2; (+) strand; PAM type: YTN; PAM sequence: TTG
ctggaacagcacctgatttg

SEQ ID NO: 326137 - DNA, 20 bp, Artificial Sequence
  Description of Artificial Sequence: Synthetic oligonucleotide
  Target: LAMA2; (+) strand; PAM type: YTN; PAM sequence: CTG
gaacagcacctgatttgcta

SEQ ID NO: 326138 - DNA, 20 bp, Artificial Sequence
  Description of Artificial Sequence: Synthetic oligonucleotide
  Target: LAMA2; (+) strand; PAM type: YTN; PAM sequence: CTG
atttgctatcttgttcttag

SEQ ID NO: 326139 - DNA, 20 bp, Artificial Sequence
  Description of Artificial Sequence: Synthetic oligonucleotide
  Target: LAMA2; (+) strand; PAM type: YTN; PAM sequence: TTT
gctatcttgttcttagtctt

SEQ ID NO: 326140 - DNA, 20 bp, Artificial Sequence
  Description of Artificial Sequence: Synthetic oligonucleotide
  Target: LAMA2; (+) strand; PAM type: YTN; PAM sequence: TTG
ctatcttgttcttagtcttg

SEQ ID NO: 326141 - DNA, 20 bp, Artificial Sequence
  Description of Artificial Sequence: Synthetic oligonucleotide
  Target: LAMA2; (+) strand; PAM type: YTN; PAM sequence: CTA
tcttgttcttagtcttgcca

SEQ ID NO: 326142 - DNA, 20 bp, Artificial Sequence
  Description of Artificial Sequence: Synthetic oligonucleotide
  Target: LAMA2; (+) strand; PAM type: YTN; PAM sequence: CTT
gttcttagtcttgccatccc

SEQ ID NO: 326143 - DNA, 20 bp, Artificial Sequence
  Description of Artificial Sequence: Synthetic oligonucleotide
  Target: LAMA2; (+) strand; PAM type: YTN; PAM sequence: TTG
ttcttagtcttgccatccca

SEQ ID NO: 326144 - DNA, 20 bp, Artificial Sequence
  Description of Artificial Sequence: Synthetic oligonucleotide
  Target: LAMA2; (+) strand; PAM type: YTN; PAM sequence: TTC
ttagtcttgccatcccaact

SEQ ID NO: 326145 - DNA, 20 bp, Artificial Sequence
  Description of Artificial Sequence: Synthetic oligonucleotide
  Target: LAMA2; (+) strand; PAM type: YTN; PAM sequence: CTT
agtcttgccatcccaactta

SEQ ID NO: 326146 - DNA, 20 bp, Artificial Sequence
  Description of Artificial Sequence: Synthetic oligonucleotide
  Target: LAMA2; (+) strand; PAM type: YTN; PAM sequence: TTA
gtcttgccatcccaacttag

SEQ ID NO: 326147 - DNA, 20 bp, Artificial Sequence
  Description of Artificial Sequence: Synthetic oligonucleotide
  Target: LAMA2; (+) strand; PAM type: YTN; PAM sequence: CTT
gccatcccaacttagtccat

SEQ ID NO: 326148 - DNA, 20 bp, Artificial Sequence
  Description of Artificial Sequence: Synthetic oligonucleotide
  Target: LAMA2; (+) strand; PAM type: YTN; PAM sequence: TTG
ccatcccaacttagtccatt

SEQ ID NO: 326149 - DNA, 20 bp, Artificial Sequence
  Description of Artificial Sequence: Synthetic oligonucleotide
  Target: LAMA2; (+) strand; PAM type: YTN; PAM sequence: CTT
agtccattcctctgatgtct

SEQ ID NO: 326150 - DNA, 20 bp, Artificial Sequence
  Description of Artificial Sequence: Synthetic oligonucleotide
  Target: LAMA2; (+) strand; PAM type: YTN; PAM sequence: TTA
gtccattcctctgatgtctt

SEQ ID NO: 326151 - DNA, 20 bp, Artificial Sequence
  Description of Artificial Sequence: Synthetic oligonucleotide
  Target: LAMA2; (+) strand; PAM type: YTN; PAM sequence: TTC
ctctgatgtcttttccttta

SEQ ID NO: 326152 - DNA, 20 bp, Artificial Sequence
  Description of Artificial Sequence: Synthetic oligonucleotide
  Target: LAMA2; (+) strand; PAM type: YTN; PAM sequence: CTC
tgatgtcttttcctttatac

SEQ ID NO: 326153 - DNA, 20 bp, Artificial Sequence
  Description of Artificial Sequence: Synthetic oligonucleotide
  Target: LAMA2; (+) strand; PAM type: YTN; PAM sequence: CTG
atgtcttttcctttatacag

SEQ ID NO: 326154 - DNA, 20 bp, Artificial Sequence
  Description of Artificial Sequence: Synthetic oligonucleotide
  Target: LAMA2; (+) strand; PAM type: YTN; PAM sequence: CTT
ttcctttatacagttatcat

SEQ ID NO: 326155 - DNA, 20 bp, Artificial Sequence
  Description of Artificial Sequence: Synthetic oligonucleotide
  Target: LAMA2; (+) strand; PAM type: YTN; PAM sequence: TTT
tcctttatacagttatcata

SEQ ID NO: 326156 - DNA, 20 bp, Artificial Sequence
  Description of Artificial Sequence: Synthetic oligonucleotide
  Target: LAMA2; (+) strand; PAM type: YTN; PAM sequence: TTT
cctttatacagttatcatac

SEQ ID NO: 326157 - DNA, 20 bp, Artificial Sequence
  Description of Artificial Sequence: Synthetic oligonucleotide
  Target: LAMA2; (+) strand; PAM type: YTN; PAM sequence: TTC
ctttatacagttatcatacc

SEQ ID NO: 326158 - DNA, 20 bp, Artificial Sequence
  Description of Artificial Sequence: Synthetic oligonucleotide
  Target: LAMA2; (+) strand; PAM type: YTN; PAM sequence: CTT
tatacagttatcataccatt

SEQ ID NO: 326159 - DNA, 20 bp, Artificial Sequence
  Description of Artificial Sequence: Synthetic oligonucleotide
  Target: LAMA2; (+) strand; PAM type: YTN; PAM sequence: TTT
atacagttatcataccattt

SEQ ID NO: 326160 - DNA, 20 bp, Artificial Sequence
  Description of Artificial Sequence: Synthetic oligonucleotide
  Target: LAMA2; (+) strand; PAM type: YTN; PAM sequence: TTA
tacagttatcataccattta

SEQ ID NO: 326161 - DNA, 20 bp, Artificial Sequence
  Description of Artificial Sequence: Synthetic oligonucleotide
  Target: LAMA2; (+) strand; PAM type: YTN; PAM sequence: TTA
tcataccatttatcaatttg

SEQ ID NO: 326162 - DNA, 20 bp, Artificial Sequence
  Description of Artificial Sequence: Synthetic oligonucleotide
  Target: LAMA2; (+) strand; PAM type: YTN; PAM sequence: TTT
atcaatttgcattatatatc

SEQ ID NO: 326163 - DNA, 20 bp, Artificial Sequence
  Description of Artificial Sequence: Synthetic oligonucleotide
  Target: LAMA2; (+) strand; PAM type: YTN; PAM sequence: TTA
tcaatttgcattatatatct

SEQ ID NO: 326164 - DNA, 20 bp, Artificial Sequence
  Description of Artificial Sequence: Synthetic oligonucleotide
  Target: LAMA2; (+) strand; PAM type: YTN; PAM sequence: TTT
gcattatatatctgatttta

SEQ ID NO: 326165 - DNA, 20 bp, Artificial Sequence
  Description of Artificial Sequence: Synthetic oligonucleotide
  Target: LAMA2; (+) strand; PAM type: YTN; PAM sequence: TTG
cattatatatctgattttat

SEQ ID NO: 326166 - DNA, 20 bp, Artificial Sequence
  Description of Artificial Sequence: Synthetic oligonucleotide
  Target: LAMA2; (+) strand; PAM type: YTN; PAM sequence: TTA
tatatctgattttatttact

SEQ ID NO: 326167 - DNA, 20 bp, Artificial Sequence
  Description of Artificial Sequence: Synthetic oligonucleotide
  Target: LAMA2; (+) strand; PAM type: YTN; PAM sequence: CTG
attttatttacttataagtc

SEQ ID NO: 326168 - DNA, 20 bp, Artificial Sequence
  Description of Artificial Sequence: Synthetic oligonucleotide
  Target: LAMA2; (+) strand; PAM type: YTN; PAM sequence: TTT
tatttacttataagtcatgt

SEQ ID NO: 326169 - DNA, 20 bp, Artificial Sequence
  Description of Artificial Sequence: Synthetic oligonucleotide
  Target: LAMA2; (+) strand; PAM type: YTN; PAM sequence: TTT
atttacttataagtcatgtt

SEQ ID NO: 326170 - DNA, 20 bp, Artificial Sequence
  Description of Artificial Sequence: Synthetic oligonucleotide
  Target: LAMA2; (+) strand; PAM type: YTN; PAM sequence: TTA
tttacttataagtcatgttc

SEQ ID NO: 326171 - DNA, 20 bp, Artificial Sequence
  Description of Artificial Sequence: Synthetic oligonucleotide
  Target: LAMA2; (+) strand; PAM type: YTN; PAM sequence: TTT
acttataagtcatgttcttt

SEQ ID NO: 326172 - DNA, 20 bp, Artificial Sequence
  Description of Artificial Sequence: Synthetic oligonucleotide
  Target: LAMA2; (+) strand; PAM type: YTN; PAM sequence: TTA
cttataagtcatgttctttg

SEQ ID NO: 326173 - DNA, 20 bp, Artificial Sequence
  Description of Artificial Sequence: Synthetic oligonucleotide
  Target: LAMA2; (+) strand; PAM type: YTN; PAM sequence: CTT
ataagtcatgttctttgtta

SEQ ID NO: 326174 - DNA, 20 bp, Artificial Sequence
  Description of Artificial Sequence: Synthetic oligonucleotide
  Target: LAMA2; (+) strand; PAM type: YTN; PAM sequence: TTA
taagtcatgttctttgttag

SEQ ID NO: 326175 - DNA, 20 bp, Artificial Sequence
  Description of Artificial Sequence: Synthetic oligonucleotide
  Target: LAMA2; (+) strand; PAM type: YTN; PAM sequence: TTC
tttgttagctcattaggtac

SEQ ID NO: 326176 - DNA, 20 bp, Artificial Sequence
  Description of Artificial Sequence: Synthetic oligonucleotide
  Target: LAMA2; (+) strand; PAM type: YTN; PAM sequence: CTT
tgttagctcattaggtacca

SEQ ID NO: 326177 - DNA, 20 bp, Artificial Sequence
  Description of Artificial Sequence: Synthetic oligonucleotide
  Target: LAMA2; (+) strand; PAM type: YTN; PAM sequence: TTT
gttagctcattaggtaccaa

SEQ ID NO: 326178 - DNA, 20 bp, Artificial Sequence
  Description of Artificial Sequence: Synthetic oligonucleotide
  Target: LAMA2; (+) strand; PAM type: YTN; PAM sequence: TTG
ttagctcattaggtaccaat

SEQ ID NO: 326179 - DNA, 20 bp, Artificial Sequence
  Description of Artificial Sequence: Synthetic oligonucleotide
  Target: LAMA2; (+) strand; PAM type: YTN; PAM sequence: TTA
gctcattaggtaccaatttt

SEQ ID NO: 326180 - DNA, 20 bp, Artificial Sequence
  Description of Artificial Sequence: Synthetic oligonucleotide
  Target: LAMA2; (+) strand; PAM type: YTN; PAM sequence: CTC
attaggtaccaattttatat

SEQ ID NO: 326181 - DNA, 20 bp, Artificial Sequence
  Description of Artificial Sequence: Synthetic oligonucleotide
  Target: LAMA2; (+) strand; PAM type: YTN; PAM sequence: TTA
ggtaccaattttatatcaat

SEQ ID NO: 326182 - DNA, 20 bp, Artificial Sequence
  Description of Artificial Sequence: Synthetic oligonucleotide
  Target: LAMA2; (+) strand; PAM type: YTN; PAM sequence: TTT
tatatcaatattatttttct

SEQ ID NO: 326183 - DNA, 20 bp, Artificial Sequence
  Description of Artificial Sequence: Synthetic oligonucleotide
  Target: LAMA2; (+) strand; PAM type: YTN; PAM sequence: TTT
atatcaatattatttttctg

SEQ ID NO: 326184 - DNA, 20 bp, Artificial Sequence
  Description of Artificial Sequence: Synthetic oligonucleotide
  Target: LAMA2; (+) strand; PAM type: YTN; PAM sequence: TTA
tatcaatattatttttctgt

SEQ ID NO: 326185 - DNA, 20 bp, Artificial Sequence
  Description of Artificial Sequence: Synthetic oligonucleotide
  Target: LAMA2; (+) strand; PAM type: YTN; PAM sequence: TTA
tttttctgtttgtcattcag

SEQ ID NO: 326186 - DNA, 20 bp, Artificial Sequence
  Description of Artificial Sequence: Synthetic oligonucleotide
  Target: LAMA2; (+) strand; PAM type: YTN; PAM sequence: TTT
ttctgtttgtcattcagtcc

SEQ ID NO: 326187 - DNA, 20 bp, Artificial Sequence
  Description of Artificial Sequence: Synthetic oligonucleotide
  Target: LAMA2; (+) strand; PAM type: YTN; PAM sequence: TTT
tctgtttgtcattcagtcca

SEQ ID NO: 326188 - DNA, 20 bp, Artificial Sequence
  Description of Artificial Sequence: Synthetic oligonucleotide
  Target: LAMA2; (+) strand; PAM type: YTN; PAM sequence: TTT
ctgtttgtcattcagtccat

SEQ ID NO: 326189 - DNA, 20 bp, Artificial Sequence
  Description of Artificial Sequence: Synthetic oligonucleotide
  Target: LAMA2; (+) strand; PAM type: YTN; PAM sequence: TTC
tgtttgtcattcagtccatt

SEQ ID NO: 326190 - DNA, 20 bp, Artificial Sequence
  Description of Artificial Sequence: Synthetic oligonucleotide
  Target: LAMA2; (+) strand; PAM type: YTN; PAM sequence: CTG
tttgtcattcagtccatttt

SEQ ID NO: 326191 - DNA, 20 bp, Artificial Sequence
  Description of Artificial Sequence: Synthetic oligonucleotide
  Target: LAMA2; (+) strand; PAM type: YTN; PAM sequence: TTT
gtcattcagtccatttttgt

SEQ ID NO: 326192 - DNA, 20 bp, Artificial Sequence
  Description of Artificial Sequence: Synthetic oligonucleotide
  Target: LAMA2; (+) strand; PAM type: YTN; PAM sequence: TTG
tcattcagtccatttttgtt

SEQ ID NO: 326193 - DNA, 20 bp, Artificial Sequence
  Description of Artificial Sequence: Synthetic oligonucleotide
  Target: LAMA2; (+) strand; PAM type: YTN; PAM sequence: TTC
agtccatttttgttgttgtt

SEQ ID NO: 326194 - DNA, 20 bp, Artificial Sequence
  Description of Artificial Sequence: Synthetic oligonucleotide
  Target: LAMA2; (+) strand; PAM type: YTN; PAM sequence: TTT
ttgttgttgttgttttggtt

SEQ ID NO: 326195 - DNA, 20 bp, Artificial Sequence
  Description of Artificial Sequence: Synthetic oligonucleotide
  Target: LAMA2; (+) strand; PAM type: YTN; PAM sequence: TTT
tgttgttgttgttttggttt

SEQ ID NO: 326196 - DNA, 20 bp, Artificial Sequence
  Description of Artificial Sequence: Synthetic oligonucleotide
  Target: LAMA2; (+) strand; PAM type: YTN; PAM sequence: TTT
gttgttgttgttttggtttg

SEQ ID NO: 326197 - DNA, 20 bp, Artificial Sequence
  Description of Artificial Sequence: Synthetic oligonucleotide
  Target: LAMA2; (+) strand; PAM type: YTN; PAM sequence: TTG
ttgttgttgttttggtttgg

SEQ ID NO: 326198 - DNA, 20 bp, Artificial Sequence
  Description of Artificial Sequence: Synthetic oligonucleotide
  Target: LAMA2; (+) strand; PAM type: YTN; PAM sequence: TTG
ttgttgttttggtttggttt

SEQ ID NO: 326199 - DNA, 20 bp, Artificial Sequence
  Description of Artificial Sequence: Synthetic oligonucleotide
  Target: LAMA2; (+) strand; PAM type: YTN; PAM sequence: TTG
ttgttttggtttggttttag

SEQ ID NO: 326200 - DNA, 20 bp, Artificial Sequence
  Description of Artificial Sequence: Synthetic oligonucleotide
  Target: LAMA2; (+) strand; PAM type: YTN; PAM sequence: TTG
ttttggtttggttttagaga

SEQ ID NO: 326201 - DNA, 20 bp, Artificial Sequence
  Description of Artificial Sequence: Synthetic oligonucleotide
  Target: LAMA2; (+) strand; PAM type: YTN; PAM sequence: TTT
tggtttggttttagagacga

SEQ ID NO: 326202 - DNA, 20 bp, Artificial Sequence
  Description of Artificial Sequence: Synthetic oligonucleotide
  Target: LAMA2; (+) strand; PAM type: YTN; PAM sequence: TTT
ggtttggttttagagacgag

SEQ ID NO: 326203 - DNA, 20 bp, Artificial Sequence
  Description of Artificial Sequence: Synthetic oligonucleotide
  Target: LAMA2; (+) strand; PAM type: YTN; PAM sequence: TTG
gtttggttttagagacgagg

SEQ ID NO: 326204 - DNA, 20 bp, Artificial Sequence
  Description of Artificial Sequence: Synthetic oligonucleotide
  Target: LAMA2; (+) strand; PAM type: YTN; PAM sequence: TTT
ggttttagagacgaggcagg

SEQ ID NO: 326205 - DNA, 20 bp, Artificial Sequence
  Description of Artificial Sequence: Synthetic oligonucleotide
  Target: LAMA2; (+) strand; PAM type: YTN; PAM sequence: TTG
gttttagagacgaggcaggt

SEQ ID NO: 326206 - DNA, 20 bp, Artificial Sequence
  Description of Artificial Sequence: Synthetic oligonucleotide
  Target: LAMA2; (+) strand; PAM type: YTN; PAM sequence: TTT
tagagacgaggcaggtgaat

SEQ ID NO: 326207 - DNA, 20 bp, Artificial Sequence
  Description of Artificial Sequence: Synthetic oligonucleotide
  Target: LAMA2; (+) strand; PAM type: YTN; PAM sequence: TTT
agagacgaggcaggtgaata

SEQ ID NO: 326208 - DNA, 20 bp, Artificial Sequence
  Description of Artificial Sequence: Synthetic oligonucleotide
  Target: LAMA2; (+) strand; PAM type: YTN; PAM sequence: TTA
gagacgaggcaggtgaatag

SEQ ID NO: 326209 - DNA, 20 bp, Artificial Sequence
  Description of Artificial Sequence: Synthetic oligonucleotide
  Target: LAMA2; (+) strand; PAM type: YTN; PAM sequence: CTG
aatgctcctaagctagatga

SEQ ID NO: 326210 - DNA, 20 bp, Artificial Sequence
  Description of Artificial Sequence: Synthetic oligonucleotide
  Target: LAMA2; (+) strand; PAM type: YTN; PAM sequence: CTC
ctaagctagatgataatgac

SEQ ID NO: 326211 - DNA, 20 bp, Artificial Sequence
  Description of Artificial Sequence: Synthetic oligonucleotide
  Target: LAMA2; (+) strand; PAM type: YTN; PAM sequence: CTA
agctagatgataatgaccaa

SEQ ID NO: 326212 - DNA, 20 bp, Artificial Sequence
  Description of Artificial Sequence: Synthetic oligonucleotide
  Target: LAMA2; (+) strand; PAM type: YTN; PAM sequence: CTA
gatgataatgaccaaatgat

SEQ ID NO: 326213 - DNA, 20 bp, Artificial Sequence
  Description of Artificial Sequence: Synthetic oligonucleotide
  Target: LAMA2; (+) strand; PAM type: YTN; PAM sequence: TTA
ctgagacagggatgagcgat

SEQ ID NO: 326214 - DNA, 20 bp, Artificial Sequence
  Description of Artificial Sequence: Synthetic oligonucleotide
  Target: LAMA2; (+) strand; PAM type: YTN; PAM sequence: CTG
agacagggatgagcgatggt

SEQ ID NO: 326215 - DNA, 20 bp, Artificial Sequence
  Description of Artificial Sequence: Synthetic oligonucleotide
  Target: LAMA2; (+) strand; PAM type: YTN; PAM sequence: TTG
aaaggatattttagcagctg

SEQ ID NO: 326216 - DNA, 20 bp, Artificial Sequence
  Description of Artificial Sequence: Synthetic oligonucleotide
  Target: LAMA2; (+) strand; PAM type: YTN; PAM sequence: TTT
tagcagctgctttaacaagt

SEQ ID NO: 326217 - DNA, 20 bp, Artificial Sequence
  Description of Artificial Sequence: Synthetic oligonucleotide
  Target: LAMA2; (+) strand; PAM type: YTN; PAM sequence: TTT
agcagctgctttaacaagta

SEQ ID NO: 326218 - DNA, 20 bp, Artificial Sequence
  Description of Artificial Sequence: Synthetic oligonucleotide
  Target: LAMA2; (+) strand; PAM type: YTN; PAM sequence: TTA
gcagctgctttaacaagtat

SEQ ID NO: 326219 - DNA, 20 bp, Artificial Sequence
  Description of Artificial Sequence: Synthetic oligonucleotide
  Target: LAMA2; (+) strand; PAM type: YTN; PAM sequence: CTG
ctttaacaagtatctgggaa

SEQ ID NO: 326220 - DNA, 20 bp, Artificial Sequence
  Description of Artificial Sequence: Synthetic oligonucleotide
  Target: LAMA2; (+) strand; PAM type: YTN; PAM sequence: CTT
taacaagtatctgggaaaag

SEQ ID NO: 326221 - DNA, 20 bp, Artificial Sequence
  Description of Artificial Sequence: Synthetic oligonucleotide
  Target: LAMA2; (+) strand; PAM type: YTN; PAM sequence: TTT
aacaagtatctgggaaaagt

SEQ ID NO: 326222 - DNA, 20 bp, Artificial Sequence
  Description of Artificial Sequence: Synthetic oligonucleotide
  Target: LAMA2; (+) strand; PAM type: YTN; PAM sequence: TTA
acaagtatctgggaaaagtc

SEQ ID NO: 326223 - DNA, 20 bp, Artificial Sequence
  Description of Artificial Sequence: Synthetic oligonucleotide
  Target: LAMA2; (+) strand; PAM type: YTN; PAM sequence: CTG
ggaaaagtccggtctcttcc

SEQ ID NO: 326224 - DNA, 20 bp, Artificial Sequence
  Description of Artificial Sequence: Synthetic oligonucleotide
  Target: LAMA2; (+) strand; PAM type: YTN; PAM sequence: CTC
ttccttgcatttctgaacgt

SEQ ID NO: 326225 - DNA, 20 bp, Artificial Sequence
  Description of Artificial Sequence: Synthetic oligonucleotide
  Target: LAMA2; (+) strand; PAM type: YTN; PAM sequence: CTT
ccttgcatttctgaacgtta

SEQ ID NO: 326226 - DNA, 20 bp, Artificial Sequence
  Description of Artificial Sequence: Synthetic oligonucleotide
  Target: LAMA2; (+) strand; PAM type: YTN; PAM sequence: TTC
cttgcatttctgaacgttaa

SEQ ID NO: 326227 - DNA, 20 bp, Artificial Sequence
  Description of Artificial Sequence: Synthetic oligonucleotide
  Target: LAMA2; (+) strand; PAM type: YTN; PAM sequence: CTT
gcatttctgaacgttaattt

SEQ ID NO: 326228 - DNA, 20 bp, Artificial Sequence
  Description of Artificial Sequence: Synthetic oligonucleotide
  Target: LAMA2; (+) strand; PAM type: YTN; PAM sequence: TTG
catttctgaacgttaatttg

SEQ ID NO: 326229 - DNA, 20 bp, Artificial Sequence
  Description of Artificial Sequence: Synthetic oligonucleotide
  Target: LAMA2; (+) strand; PAM type: YTN; PAM sequence: TTT
ctgaacgttaatttgtatta

SEQ ID NO: 326230 - DNA, 20 bp, Artificial Sequence
  Description of Artificial Sequence: Synthetic oligonucleotide
  Target: LAMA2; (+) strand; PAM type: YTN; PAM sequence: TTC
tgaacgttaatttgtattaa

SEQ ID NO: 326231 - DNA, 20 bp, Artificial Sequence
  Description of Artificial Sequence: Synthetic oligonucleotide
  Target: LAMA2; (+) strand; PAM type: YTN; PAM sequence: CTG
aacgttaatttgtattaaaa

SEQ ID NO: 326232 - DNA, 20 bp, Artificial Sequence
  Description of Artificial Sequence: Synthetic oligonucleotide
  Target: LAMA2; (+) strand; PAM type: YTN; PAM sequence: TTA
atttgtattaaaagcagcat

SEQ ID NO: 326233 - DNA, 20 bp, Artificial Sequence
  Description of Artificial Sequence: Synthetic oligonucleotide
  Target: LAMA2; (+) strand; PAM type: YTN; PAM sequence: TTT
gtattaaaagcagcatgact

SEQ ID NO: 326234 - DNA, 20 bp, Artificial Sequence
  Description of Artificial Sequence: Synthetic oligonucleotide
  Target: LAMA2; (+) strand; PAM type: YTN; PAM sequence: TTG
tattaaaagcagcatgactc

SEQ ID NO: 326235 - DNA, 20 bp, Artificial Sequence
  Description of Artificial Sequence: Synthetic oligonucleotide
  Target: LAMA2; (+) strand; PAM type: YTN; PAM sequence: TTA
aaagcagcatgactcagaaa

SEQ ID NO: 326236 - DNA, 20 bp, Artificial Sequence
  Description of Artificial Sequence: Synthetic oligonucleotide
  Target: LAMA2; (+) strand; PAM type: YTN; PAM sequence: CTC
agaaattttatataaaactc

SEQ ID NO: 326237 - DNA, 20 bp, Artificial Sequence
  Description of Artificial Sequence: Synthetic oligonucleotide
  Target: LAMA2; (+) strand; PAM type: YTN; PAM sequence: TTT
tatataaaactcaaataaac

SEQ ID NO: 326238 - DNA, 20 bp, Artificial Sequence
  Description of Artificial Sequence: Synthetic oligonucleotide
  Target: LAMA2; (+) strand; PAM type: YTN; PAM sequence: TTT
atataaaactcaaataaacc

SEQ ID NO: 326239 - DNA, 20 bp, Artificial Sequence
  Description of Artificial Sequence: Synthetic oligonucleotide
  Target: LAMA2; (+) strand; PAM type: YTN; PAM sequence: TTA
tataaaactcaaataaacct

SEQ ID NO: 326240 - DNA, 20 bp, Artificial Sequence
  Description of Artificial Sequence: Synthetic oligonucleotide
  Target: LAMA2; (+) strand; PAM type: YTN; PAM sequence: CTC
aaataaaccttagaattgga

SEQ ID NO: 326241 - DNA, 20 bp, Artificial Sequence
  Description of Artificial Sequence: Synthetic oligonucleotide
  Target: LAMA2; (+) strand; PAM type: YTN; PAM sequence: CTT
agaattggatcttatcgagt

SEQ ID NO: 326242 - DNA, 20 bp, Artificial Sequence
  Description of Artificial Sequence: Synthetic oligonucleotide
  Target: LAMA2; (+) strand; PAM type: YTN; PAM sequence: TTA
gaattggatcttatcgagta

SEQ ID NO: 326243 - DNA, 20 bp, Artificial Sequence
  Description of Artificial Sequence: Synthetic oligonucleotide
  Target: LAMA2; (+) strand; PAM type: YTN; PAM sequence: TTG
gatcttatcgagtattgtgt

SEQ ID NO: 326244 - DNA, 20 bp, Artificial Sequence
  Description of Artificial Sequence: Synthetic oligonucleotide
  Target: LAMA2; (+) strand; PAM type: YTN; PAM sequence: CTT
atcgagtattgtgttataca

SEQ ID NO: 326245 - DNA, 20 bp, Artificial Sequence
  Description of Artificial Sequence: Synthetic oligonucleotide
  Target: LAMA2; (+) strand; PAM type: YTN; PAM sequence: TTA
tcgagtattgtgttatacag

SEQ ID NO: 326246 - DNA, 20 bp, Artificial Sequence
  Description of Artificial Sequence: Synthetic oligonucleotide
  Target: LAMA2; (+) strand; PAM type: YTN; PAM sequence: TTG
tgttatacagagaatatgga

SEQ ID NO: 326247 - DNA, 20 bp, Artificial Sequence
  Description of Artificial Sequence: Synthetic oligonucleotide
  Target: LAMA2; (+) strand; PAM type: YTN; PAM sequence: TTA
tacagagaatatggagaata

SEQ ID NO: 326248 - DNA, 20 bp, Artificial Sequence
  Description of Artificial Sequence: Synthetic oligonucleotide
  Target: LAMA2; (+) strand; PAM type: YTN; PAM sequence: TTA
aaaaaaaaagtaggaagcat

SEQ ID NO: 326249 - DNA, 20 bp, Artificial Sequence
  Description of Artificial Sequence: Synthetic oligonucleotide
  Target: LAMA2; (+) strand; PAM type: YTN; PAM sequence: CTC
aattcttaattcctagagga

SEQ ID NO: 326250 - DNA, 20 bp, Artificial Sequence
  Description of Artificial Sequence: Synthetic oligonucleotide
  Target: LAMA2; (+) strand; PAM type: YTN; PAM sequence: TTC
ttaattcctagaggaaacag

SEQ ID NO: 326251 - DNA, 20 bp, Artificial Sequence
  Description of Artificial Sequence: Synthetic oligonucleotide
  Target: LAMA2; (+) strand; PAM type: YTN; PAM sequence: CTT
aattcctagaggaaacagag

SEQ ID NO: 326252 - DNA, 20 bp, Artificial Sequence
  Description of Artificial Sequence: Synthetic oligonucleotide
  Target: LAMA2; (+) strand; PAM type: YTN; PAM sequence: TTA
attcctagaggaaacagagt

SEQ ID NO: 326253 - DNA, 20 bp, Artificial Sequence
  Description of Artificial Sequence: Synthetic oligonucleotide
  Target: LAMA2; (+) strand; PAM type: YTN; PAM sequence: TTC
ctagaggaaacagagttatg

SEQ ID NO: 326254 - DNA, 20 bp, Artificial Sequence
  Description of Artificial Sequence: Synthetic oligonucleotide
  Target: LAMA2; (+) strand; PAM type: YTN; PAM sequence: CTA
gaggaaacagagttatgtcc

SEQ ID NO: 326255 - DNA, 20 bp, Artificial Sequence
  Description of Artificial Sequence: Synthetic oligonucleotide
  Target: LAMA2; (+) strand; PAM type: YTN; PAM sequence: TTA
tgtccaaggaacatattcaa

SEQ ID NO: 326256 - DNA, 20 bp, Artificial Sequence
  Description of Artificial Sequence: Synthetic oligonucleotide
  Target: LAMA2; (+) strand; PAM type: YTN; PAM sequence: TTC
aacccaatcactgtacagct

SEQ ID NO: 326257 - DNA, 20 bp, Artificial Sequence
  Description of Artificial Sequence: Synthetic oligonucleotide
  Target: LAMA2; (+) strand; PAM type: YTN; PAM sequence: CTG
tacagctgtagctttttctt

SEQ ID NO: 326258 - DNA, 20 bp, Artificial Sequence
  Description of Artificial Sequence: Synthetic oligonucleotide
  Target: LAMA2; (+) strand; PAM type: YTN; PAM sequence: CTG
tagctttttcttttctttct

SEQ ID NO: 326259 - DNA, 20 bp, Artificial Sequence
  Description of Artificial Sequence: Synthetic oligonucleotide
  Target: LAMA2; (+) strand; PAM type: YTN; PAM sequence: CTT
tttcttttctttcttttttt

SEQ ID NO: 326260 - DNA, 20 bp, Artificial Sequence
  Description of Artificial Sequence: Synthetic oligonucleotide
  Target: LAMA2; (+) strand; PAM type: YTN; PAM sequence: TTT
ttcttttctttctttttttt

SEQ ID NO: 326261 - DNA, 20 bp, Artificial Sequence
  Description of Artificial Sequence: Synthetic oligonucleotide
  Target: LAMA2; (+) strand; PAM type: YTN; PAM sequence: TTT
tcttttctttcttttttttt

SEQ ID NO: 326262 - DNA, 20 bp, Artificial Sequence
  Description of Artificial Sequence: Synthetic oligonucleotide
  Target: LAMA2; (+) strand; PAM type: YTN; PAM sequence: TTT
cttttctttctttttttttt

SEQ ID NO: 326263 - DNA, 20 bp, Artificial Sequence
  Description of Artificial Sequence: Synthetic oligonucleotide
  Target: LAMA2; (+) strand; PAM type: YTN; PAM sequence: TTC
ttttctttcttttttttttt

SEQ ID NO: 326264 - DNA, 20 bp, Artificial Sequence
  Description of Artificial Sequence: Synthetic oligonucleotide
  Target: LAMA2; (+) strand; PAM type: YTN; PAM sequence: CTT
ttctttcttttttttttttt

SEQ ID NO: 326265 - DNA, 20 bp, Artificial Sequence
  Description of Artificial Sequence: Synthetic oligonucleotide
  Target: LAMA2; (+) strand; PAM type: YTN; PAM sequence: TTT
tctttctttttttttttttt

SEQ ID NO: 326266 - DNA, 20 bp, Artificial Sequence
  Description of Artificial Sequence: Synthetic oligonucleotide
  Target: LAMA2; (+) strand; PAM type: YTN; PAM sequence: TTT
ctttcttttttttttttttt

SEQ ID NO: 326267 - DNA, 20 bp, Artificial Sequence
  Description of Artificial Sequence: Synthetic oligonucleotide
  Target: LAMA2; (+) strand; PAM type: YTN; PAM sequence: TTC
tttctttttttttttttttt

SEQ ID NO: 326268 - DNA, 20 bp, Artificial Sequence
  Description of Artificial Sequence: Synthetic oligonucleotide
  Target: LAMA2; (+) strand; PAM type: YTN; PAM sequence: CTT
tctttttttttttttttttt

SEQ ID NO: 326269 - DNA, 20 bp, Artificial Sequence
  Description of Artificial Sequence: Synthetic oligonucleotide
  Target: LAMA2; (+) strand; PAM type: YTN; PAM sequence: TTT
cttttttttttttttttttt

SEQ ID NO: 326270 - DNA, 20 bp, Artificial Sequence
  Description of Artificial Sequence: Synthetic oligonucleotide
  Target: LAMA2; (+) strand; PAM type: YTN; PAM sequence: TTC
tttttttttttttttttttt

SEQ ID NO: 326271 - DNA, 20 bp, Artificial Sequence
  Description of Artificial Sequence: Synthetic oligonucleotide
  Target: LAMA2; (+) strand; PAM type: YTN; PAM sequence: CTT
tttttttttttttttttttg

SEQ ID NO: 326272 - DNA, 20 bp, Artificial Sequence
  Description of Artificial Sequence: Synthetic oligonucleotide
  Target: LAMA2; (+) strand; PAM type: YTN; PAM sequence: TTT
ttttttttttttttttttga

SEQ ID NO: 326273 - DNA, 20 bp, Artificial Sequence
  Description of Artificial Sequence: Synthetic oligonucleotide
  Target: LAMA2; (+) strand; PAM type: YTN; PAM sequence: TTT
tttttttttttttttttgag

SEQ ID NO: 326274 - DNA, 20 bp, Artificial Sequence
  Description of Artificial Sequence: Synthetic oligonucleotide
  Target: LAMA2; (+) strand; PAM type: YTN; PAM sequence: TTT
ttttttttttttttttgaga

SEQ ID NO: 326275 - DNA, 20 bp, Artificial Sequence
  Description of Artificial Sequence: Synthetic oligonucleotide
  Target: LAMA2; (+) strand; PAM type: YTN; PAM sequence: TTT
tttttttttttttttgagac

SEQ ID NO: 326276 - DNA, 20 bp, Artificial Sequence
  Description of Artificial Sequence: Synthetic oligonucleotide
  Target: LAMA2; (+) strand; PAM type: YTN; PAM sequence: TTT
ttttttttttttttgagaca

SEQ ID NO: 326277 - DNA, 20 bp, Artificial Sequence
  Description of Artificial Sequence: Synthetic oligonucleotide
  Target: LAMA2; (+) strand; PAM type: YTN; PAM sequence: TTT
tttttttttttttgagacag

SEQ ID NO: 326278 - DNA, 20 bp, Artificial Sequence
  Description of Artificial Sequence: Synthetic oligonucleotide
  Target: LAMA2; (+) strand; PAM type: YTN; PAM sequence: TTT
ttttttttttttgagacagt

SEQ ID NO: 326279 - DNA, 20 bp, Artificial Sequence
  Description of Artificial Sequence: Synthetic oligonucleotide
  Target: LAMA2; (+) strand; PAM type: YTN; PAM sequence: TTT
tttttttttttgagacagtc

SEQ ID NO: 326280 - DNA, 20 bp, Artificial Sequence
  Description of Artificial Sequence: Synthetic oligonucleotide
  Target: LAMA2; (+) strand; PAM type: YTN; PAM sequence: TTT
ttttttttttgagacagtct

SEQ ID NO: 326281 - DNA, 20 bp, Artificial Sequence
  Description of Artificial Sequence: Synthetic oligonucleotide
  Target: LAMA2; (+) strand; PAM type: YTN; PAM sequence: TTT
tttttttttgagacagtctc

SEQ ID NO: 326282 - DNA, 20 bp, Artificial Sequence
  Description of Artificial Sequence: Synthetic oligonucleotide
  Target: LAMA2; (+) strand; PAM type: YTN; PAM sequence: TTT
ttttttttgagacagtctca

SEQ ID NO: 326283 - DNA, 20 bp, Artificial Sequence
  Description of Artificial Sequence: Synthetic oligonucleotide
  Target: LAMA2; (+) strand; PAM type: YTN; PAM sequence: TTT
tttttttgagacagtctcag

SEQ ID NO: 326284 - DNA, 20 bp, Artificial Sequence
  Description of Artificial Sequence: Synthetic oligonucleotide
  Target: LAMA2; (+) strand; PAM type: YTN; PAM sequence: TTT
ttttttgagacagtctcagt

SEQ ID NO: 326285 - DNA, 20 bp, Artificial Sequence
  Description of Artificial Sequence: Synthetic oligonucleotide
  Target: LAMA2; (+) strand; PAM type: YTN; PAM sequence: TTT
tttttgagacagtctcagtc

SEQ ID NO: 326286 - DNA, 20 bp, Artificial Sequence
  Description of Artificial Sequence: Synthetic oligonucleotide
  Target: LAMA2; (+) strand; PAM type: YTN; PAM sequence: TTT
ttttgagacagtctcagtcc

SEQ ID NO: 326287 - DNA, 20 bp, Artificial Sequence
  Description of Artificial Sequence: Synthetic oligonucleotide
  Target: LAMA2; (+) strand; PAM type: YTN; PAM sequence: TTT
tttgagacagtctcagtcca

SEQ ID NO: 326288 - DNA, 20 bp, Artificial Sequence
  Description of Artificial Sequence: Synthetic oligonucleotide
  Target: LAMA2; (+) strand; PAM type: YTN; PAM sequence: TTT
ttgagacagtctcagtccat

SEQ ID NO: 326289 - DNA, 20 bp, Artificial Sequence
  Description of Artificial Sequence: Synthetic oligonucleotide
  Target: LAMA2; (+) strand; PAM type: YTN; PAM sequence: TTT
tgagacagtctcagtccatt

SEQ ID NO: 326290 - DNA, 20 bp, Artificial Sequence
  Description of Artificial Sequence: Synthetic oligonucleotide
  Target: LAMA2; (+) strand; PAM type: YTN; PAM sequence: TTT
gagacagtctcagtccattg

SEQ ID NO: 326291 - DNA, 20 bp, Artificial Sequence
  Description of Artificial Sequence: Synthetic oligonucleotide
  Target: LAMA2; (+) strand; PAM type: YTN; PAM sequence: TTG
agacagtctcagtccattgc

SEQ ID NO: 326292 - DNA, 20 bp, Artificial Sequence
  Description of Artificial Sequence: Synthetic oligonucleotide
  Target: LAMA2; (+) strand; PAM type: YTN; PAM sequence: CTC
agtccattgcccaggctggt

SEQ ID NO: 326293 - DNA, 20 bp, Artificial Sequence
  Description of Artificial Sequence: Synthetic oligonucleotide
  Target: LAMA2; (+) strand; PAM type: YTN; PAM sequence: TTG
cccaggctggtgtgcaatgg

SEQ ID NO: 326294 - DNA, 20 bp, Artificial Sequence
  Description of Artificial Sequence: Synthetic oligonucleotide
  Target: LAMA2; (+) strand; PAM type: YTN; PAM sequence: CTG
gtgtgcaatggcatgatctc

SEQ ID NO: 326295 - DNA, 20 bp, Artificial Sequence
  Description of Artificial Sequence: Synthetic oligonucleotide
  Target: LAMA2; (+) strand; PAM type: YTN; PAM sequence: CTC
agctcactgcaacctctgcc

SEQ ID NO: 326296 - DNA, 20 bp, Artificial Sequence
  Description of Artificial Sequence: Synthetic oligonucleotide
  Target: LAMA2; (+) strand; PAM type: YTN; PAM sequence: CTC
actgcaacctctgcctccca

SEQ ID NO: 326297 - DNA, 20 bp, Artificial Sequence
  Description of Artificial Sequence: Synthetic oligonucleotide
  Target: LAMA2; (+) strand; PAM type: YTN; PAM sequence: CTG
caacctctgcctcccaggtt

SEQ ID NO: 326298 - DNA, 20 bp, Artificial Sequence
  Description of Artificial Sequence: Synthetic oligonucleotide
  Target: LAMA2; (+) strand; PAM type: YTN; PAM sequence: CTC
tgcctcccaggttaaaacaa

SEQ ID NO: 326299 - DNA, 20 bp, Artificial Sequence
  Description of Artificial Sequence: Synthetic oligonucleotide
  Target: LAMA2; (+) strand; PAM type: YTN; PAM sequence: CTG
cctcccaggttaaaacaatt

SEQ ID NO: 326300 - DNA, 20 bp, Artificial Sequence
  Description of Artificial Sequence: Synthetic oligonucleotide
  Target: LAMA2; (+) strand; PAM type: YTN; PAM sequence: CTC
ccaggttaaaacaattctcc

SEQ ID NO: 326301 - DNA, 20 bp, Artificial Sequence
  Description of Artificial Sequence: Synthetic oligonucleotide
  Target: LAMA2; (+) strand; PAM type: YTN; PAM sequence: TTA
aaacaattctcctgcctcag

SEQ ID NO: 326302 - DNA, 20 bp, Artificial Sequence
  Description of Artificial Sequence: Synthetic oligonucleotide
  Target: LAMA2; (+) strand; PAM type: YTN; PAM sequence: TTC
tcctgcctcagcctcccaag

SEQ ID NO: 326303 - DNA, 20 bp, Artificial Sequence
  Description of Artificial Sequence: Synthetic oligonucleotide
  Target: LAMA2; (+) strand; PAM type: YTN; PAM sequence: CTC
ctgcctcagcctcccaagta

SEQ ID NO: 326304 - DNA, 20 bp, Artificial Sequence
  Description of Artificial Sequence: Synthetic oligonucleotide
  Target: LAMA2; (+) strand; PAM type: YTN; PAM sequence: CTG
cctcagcctcccaagtagct

SEQ ID NO: 326305 - DNA, 20 bp, Artificial Sequence
  Description of Artificial Sequence: Synthetic oligonucleotide
  Target: LAMA2; (+) strand; PAM type: YTN; PAM sequence: CTC
agcctcccaagtagctggga

SEQ ID NO: 326306 - DNA, 20 bp, Artificial Sequence
  Description of Artificial Sequence: Synthetic oligonucleotide
  Target: LAMA2; (+) strand; PAM type: YTN; PAM sequence: CTC
ccaagtagctgggattacag

SEQ ID NO: 326307 - DNA, 20 bp, Artificial Sequence
  Description of Artificial Sequence: Synthetic oligonucleotide
  Target: LAMA2; (+) strand; PAM type: YTN; PAM sequence: CTG
ggattacaggcacctgccac

SEQ ID NO: 326308 - DNA, 20 bp, Artificial Sequence
  Description of Artificial Sequence: Synthetic oligonucleotide
  Target: LAMA2; (+) strand; PAM type: YTN; PAM sequence: TTA
caggcacctgccaccatgcc

SEQ ID NO: 326309 - DNA, 20 bp, Artificial Sequence
  Description of Artificial Sequence: Synthetic oligonucleotide
  Target: LAMA2; (+) strand; PAM type: YTN; PAM sequence: CTG
ccaccatgccagctaatttt

SEQ ID NO: 326310 - DNA, 20 bp, Artificial Sequence
  Description of Artificial Sequence: Synthetic oligonucleotide
  Target: LAMA2; (+) strand; PAM type: YTN; PAM sequence: CTA
atttttattttatttttttg

SEQ ID NO: 326311 - DNA, 20 bp, Artificial Sequence
  Description of Artificial Sequence: Synthetic oligonucleotide
  Target: LAMA2; (+) strand; PAM type: YTN; PAM sequence: TTT
ttattttatttttttgtatt

SEQ ID NO: 326312 - DNA, 20 bp, Artificial Sequence
  Description of Artificial Sequence: Synthetic oligonucleotide
  Target: LAMA2; (+) strand; PAM type: YTN; PAM sequence: TTT
tattttatttttttgtattt

SEQ ID NO: 326313 - DNA, 20 bp, Artificial Sequence
  Description of Artificial Sequence: Synthetic oligonucleotide
  Target: LAMA2; (+) strand; PAM type: YTN; PAM sequence: TTT
attttatttttttgtatttt

SEQ ID NO: 326314 - DNA, 20 bp, Artificial Sequence
  Description of Artificial Sequence: Synthetic oligonucleotide
  Target: LAMA2; (+) strand; PAM type: YTN; PAM sequence: TTA
ttttatttttttgtattttt

SEQ ID NO: 326315 - DNA, 20 bp, Artificial Sequence
  Description of Artificial Sequence: Synthetic oligonucleotide
  Target: LAMA2; (+) strand; PAM type: YTN; PAM sequence: TTT
tatttttttgtatttttagt

SEQ ID NO: 326316 - DNA, 20 bp, Artificial Sequence
  Description of Artificial Sequence: Synthetic oligonucleotide
  Target: LAMA2; (+) strand; PAM type: YTN; PAM sequence: TTT
atttttttgtatttttagta

SEQ ID NO: 326317 - DNA, 20 bp, Artificial Sequence
  Description of Artificial Sequence: Synthetic oligonucleotide
  Target: LAMA2; (+) strand; PAM type: YTN; PAM sequence: TTA
tttttttgtatttttagtag

SEQ ID NO: 326318 - DNA, 20 bp, Artificial Sequence
  Description of Artificial Sequence: Synthetic oligonucleotide
  Target: LAMA2; (+) strand; PAM type: YTN; PAM sequence: TTT
ttttgtatttttagtagaga

SEQ ID NO: 326319 - DNA, 20 bp, Artificial Sequence
  Description of Artificial Sequence: Synthetic oligonucleotide
  Target: LAMA2; (+) strand; PAM type: YTN; PAM sequence: TTT
tttgtatttttagtagagac

SEQ ID NO: 326320 - DNA, 20 bp, Artificial Sequence
  Description of Artificial Sequence: Synthetic oligonucleotide
  Target: LAMA2; (+) strand; PAM type: YTN; PAM sequence: TTT
ttgtatttttagtagagacg

SEQ ID NO: 326321 - DNA, 20 bp, Artificial Sequence
  Description of Artificial Sequence: Synthetic oligonucleotide
  Target: LAMA2; (+) strand; PAM type: YTN; PAM sequence: TTT
tgtatttttagtagagacgg

SEQ ID NO: 326322 - DNA, 20 bp, Artificial Sequence
  Description of Artificial Sequence: Synthetic oligonucleotide
  Target: LAMA2; (+) strand; PAM type: YTN; PAM sequence: TTT
gtatttttagtagagacggg

SEQ ID NO: 326323 - DNA, 20 bp, Artificial Sequence
  Description of Artificial Sequence: Synthetic oligonucleotide
  Target: LAMA2; (+) strand; PAM type: YTN; PAM sequence: TTG
tatttttagtagagacggga

SEQ ID NO: 326324 - DNA, 20 bp, Artificial Sequence
  Description of Artificial Sequence: Synthetic oligonucleotide
  Target: LAMA2; (+) strand; PAM type: YTN; PAM sequence: TTT
ttagtagagacgggacttca

SEQ ID NO: 326325 - DNA, 20 bp, Artificial Sequence
  Description of Artificial Sequence: Synthetic oligonucleotide
  Target: LAMA2; (+) strand; PAM type: YTN; PAM sequence: TTT
tagtagagacgggacttcac

SEQ ID NO: 326326 - DNA, 20 bp, Artificial Sequence
  Description of Artificial Sequence: Synthetic oligonucleotide
  Target: LAMA2; (+) strand; PAM type: YTN; PAM sequence: TTT
agtagagacgggacttcacc

SEQ ID NO: 326327 - DNA, 20 bp, Artificial Sequence
  Description of Artificial Sequence: Synthetic oligonucleotide
  Target: LAMA2; (+) strand; PAM type: YTN; PAM sequence: TTA
gtagagacgggacttcacca

SEQ ID NO: 326328 - DNA, 20 bp, Artificial Sequence
  Description of Artificial Sequence: Synthetic oligonucleotide
  Target: LAMA2; (+) strand; PAM type: YTN; PAM sequence: CTT
caccatgttggccagcctgg

SEQ ID NO: 326329 - DNA, 20 bp, Artificial Sequence
  Description of Artificial Sequence: Synthetic oligonucleotide
  Target: LAMA2; (+) strand; PAM type: YTN; PAM sequence: TTC
accatgttggccagcctggt

SEQ ID NO: 326330 - DNA, 20 bp, Artificial Sequence
  Description of Artificial Sequence: Synthetic oligonucleotide
  Target: LAMA2; (+) strand; PAM type: YTN; PAM sequence: TTG
gccagcctggtctcaaaccc

SEQ ID NO: 326331 - DNA, 20 bp, Artificial Sequence
  Description of Artificial Sequence: Synthetic oligonucleotide
  Target: LAMA2; (+) strand; PAM type: YTN; PAM sequence: CTG
gtctcaaacccctgacctca

SEQ ID NO: 326332 - DNA, 20 bp, Artificial Sequence
  Description of Artificial Sequence: Synthetic oligonucleotide
  Target: LAMA2; (+) strand; PAM type: YTN; PAM sequence: CTC
aaacccctgacctcaggtga

SEQ ID NO: 326333 - DNA, 20 bp, Artificial Sequence
  Description of Artificial Sequence: Synthetic oligonucleotide
  Target: LAMA2; (+) strand; PAM type: YTN; PAM sequence: CTG
acctcaggtgatcctcccac

SEQ ID NO: 326334 - DNA, 20 bp, Artificial Sequence
  Description of Artificial Sequence: Synthetic oligonucleotide
  Target: LAMA2; (+) strand; PAM type: YTN; PAM sequence: CTC
aggtgatcctcccaccttgg

SEQ ID NO: 326335 - DNA, 20 bp, Artificial Sequence
  Description of Artificial Sequence: Synthetic oligonucleotide
  Target: LAMA2; (+) strand; PAM type: YTN; PAM sequence: CTC
ccaccttggcctcccaaagt

SEQ ID NO: 326336 - DNA, 20 bp, Artificial Sequence
  Description of Artificial Sequence: Synthetic oligonucleotide
  Target: LAMA2; (+) strand; PAM type: YTN; PAM sequence: CTT
ggcctcccaaagtgctggga

SEQ ID NO: 326337 - DNA, 20 bp, Artificial Sequence
  Description of Artificial Sequence: Synthetic oligonucleotide
  Target: LAMA2; (+) strand; PAM type: YTN; PAM sequence: TTG
gcctcccaaagtgctgggat

SEQ ID NO: 326338 - DNA, 20 bp, Artificial Sequence
  Description of Artificial Sequence: Synthetic oligonucleotide
  Target: LAMA2; (+) strand; PAM type: YTN; PAM sequence: CTC
ccaaagtgctgggattacag

SEQ ID NO: 326339 - DNA, 20 bp, Artificial Sequence
  Description of Artificial Sequence: Synthetic oligonucleotide
  Target: LAMA2; (+) strand; PAM type: YTN; PAM sequence: CTG
ggattacaggcatgagccac

SEQ ID NO: 326340 - DNA, 20 bp, Artificial Sequence
  Description of Artificial Sequence: Synthetic oligonucleotide
  Target: LAMA2; (+) strand; PAM type: YTN; PAM sequence: TTA
caggcatgagccaccgtgcc

SEQ ID NO: 326341 - DNA, 20 bp, Artificial Sequence
  Description of Artificial Sequence: Synthetic oligonucleotide
  Target: LAMA2; (+) strand; PAM type: YTN; PAM sequence: CTG
gccaatttttctaaataaat

SEQ ID NO: 326342 - DNA, 20 bp, Artificial Sequence
  Description of Artificial Sequence: Synthetic oligonucleotide
  Target: LAMA2; (+) strand; PAM type: YTN; PAM sequence: TTT
ttctaaataaattaatatga

SEQ ID NO: 326343 - DNA, 20 bp, Artificial Sequence
  Description of Artificial Sequence: Synthetic oligonucleotide
  Target: LAMA2; (+) strand; PAM type: YTN; PAM sequence: TTT
tctaaataaattaatatgat

SEQ ID NO: 326344 - DNA, 20 bp, Artificial Sequence
  Description of Artificial Sequence: Synthetic oligonucleotide
  Target: LAMA2; (+) strand; PAM type: YTN; PAM sequence: TTT
ctaaataaattaatatgatg

SEQ ID NO: 326345 - DNA, 20 bp, Artificial Sequence
  Description of Artificial Sequence: Synthetic oligonucleotide
  Target: LAMA2; (+) strand; PAM type: YTN; PAM sequence: TTC
taaataaattaatatgatga

SEQ ID NO: 326346 - DNA, 20 bp, Artificial Sequence
  Description of Artificial Sequence: Synthetic oligonucleotide
  Target: LAMA2; (+) strand; PAM type: YTN; PAM sequence: CTA
aataaattaatatgatgatg

SEQ ID NO: 326347 - DNA, 20 bp, Artificial Sequence
  Description of Artificial Sequence: Synthetic oligonucleotide
  Target: LAMA2; (+) strand; PAM type: YTN; PAM sequence: TTA
atatgatgatgataatggta

SEQ ID NO: 326348 - DNA, 20 bp, Artificial Sequence
  Description of Artificial Sequence: Synthetic oligonucleotide
  Target: LAMA2; (+) strand; PAM type: YTN; PAM sequence: CTA
cccagtttttgattaggcag

SEQ ID NO: 326349 - DNA, 20 bp, Artificial Sequence
  Description of Artificial Sequence: Synthetic oligonucleotide
  Target: LAMA2; (+) strand; PAM type: YTN; PAM sequence: TTT
ttgattaggcagaagtatgc

SEQ ID NO: 326350 - DNA, 20 bp, Artificial Sequence
  Description of Artificial Sequence: Synthetic oligonucleotide
  Target: LAMA2; (+) strand; PAM type: YTN; PAM sequence: TTT
tgattaggcagaagtatgct

SEQ ID NO: 326351 - DNA, 20 bp, Artificial Sequence
  Description of Artificial Sequence: Synthetic oligonucleotide
  Target: LAMA2; (+) strand; PAM type: YTN; PAM sequence: TTT
gattaggcagaagtatgctt

SEQ ID NO: 326352 - DNA, 20 bp, Artificial Sequence
  Description of Artificial Sequence: Synthetic oligonucleotide
  Target: LAMA2; (+) strand; PAM type: YTN; PAM sequence: TTG
attaggcagaagtatgctta

SEQ ID NO: 326353 - DNA, 20 bp, Artificial Sequence
  Description of Artificial Sequence: Synthetic oligonucleotide
  Target: LAMA2; (+) strand; PAM type: YTN; PAM sequence: TTA
ggcagaagtatgcttatggt

SEQ ID NO: 326354 - DNA, 20 bp, Artificial Sequence
  Description of Artificial Sequence: Synthetic oligonucleotide
  Target: LAMA2; (+) strand; PAM type: YTN; PAM sequence: CTT
atggtcagtcagagtaaaaa

SEQ ID NO: 326355 - DNA, 20 bp, Artificial Sequence
  Description of Artificial Sequence: Synthetic oligonucleotide
  Target: LAMA2; (+) strand; PAM type: YTN; PAM sequence: TTA
tggtcagtcagagtaaaaag

SEQ ID NO: 326356 - DNA, 20 bp, Artificial Sequence
  Description of Artificial Sequence: Synthetic oligonucleotide
  Target: LAMA2; (+) strand; PAM type: YTN; PAM sequence: CTA
cttgggaggcggagacagga

SEQ ID NO: 326357 - DNA, 20 bp, Artificial Sequence
  Description of Artificial Sequence: Synthetic oligonucleotide
  Target: LAMA2; (+) strand; PAM type: YTN; PAM sequence: CTT
gggaggcggagacaggagga

SEQ ID NO: 326358 - DNA, 20 bp, Artificial Sequence
  Description of Artificial Sequence: Synthetic oligonucleotide
  Target: LAMA2; (+) strand; PAM type: YTN; PAM sequence: TTG
ggaggcggagacaggaggac

SEQ ID NO: 326359 - DNA, 20 bp, Artificial Sequence
  Description of Artificial Sequence: Synthetic oligonucleotide
  Target: LAMA2; (+) strand; PAM type: YTN; PAM sequence: CTT
tgagcttaggagtctgaggt

SEQ ID NO: 326360 - DNA, 20 bp, Artificial Sequence
  Description of Artificial Sequence: Synthetic oligonucleotide
  Target: LAMA2; (+) strand; PAM type: YTN; PAM sequence: TTT
gagcttaggagtctgaggtt

SEQ ID NO: 326361 - DNA, 20 bp, Artificial Sequence
  Description of Artificial Sequence: Synthetic oligonucleotide
  Target: LAMA2; (+) strand; PAM type: YTN; PAM sequence: TTG
agcttaggagtctgaggtta

SEQ ID NO: 326362 - DNA, 20 bp, Artificial Sequence
  Description of Artificial Sequence: Synthetic oligonucleotide
  Target: LAMA2; (+) strand; PAM type: YTN; PAM sequence: CTT
aggagtctgaggttatagca

SEQ ID NO: 326363 - DNA, 20 bp, Artificial Sequence
  Description of Artificial Sequence: Synthetic oligonucleotide
  Target: LAMA2; (+) strand; PAM type: YTN; PAM sequence: TTA
ggagtctgaggttatagcac

SEQ ID NO: 326364 - DNA, 20 bp, Artificial Sequence
  Description of Artificial Sequence: Synthetic oligonucleotide
  Target: LAMA2; (+) strand; PAM type: YTN; PAM sequence: CTG
aggttatagcacactatgat

SEQ ID NO: 326365 - DNA, 20 bp, Artificial Sequence
  Description of Artificial Sequence: Synthetic oligonucleotide
  Target: LAMA2; (+) strand; PAM type: YTN; PAM sequence: TTA
tagcacactatgattatgcc

SEQ ID NO: 326366 - DNA, 20 bp, Artificial Sequence
  Description of Artificial Sequence: Synthetic oligonucleotide
  Target: LAMA2; (+) strand; PAM type: YTN; PAM sequence: CTA
tgattatgcctatgaatagc

SEQ ID NO: 326367 - DNA, 20 bp, Artificial Sequence
  Description of Artificial Sequence: Synthetic oligonucleotide
  Target: LAMA2; (+) strand; PAM type: YTN; PAM sequence: TTA
tgcctatgaatagccactgc

SEQ ID NO: 326368 - DNA, 20 bp, Artificial Sequence
  Description of Artificial Sequence: Synthetic oligonucleotide
  Target: LAMA2; (+) strand; PAM type: YTN; PAM sequence: CTA
tgaatagccactgcactcca

SEQ ID NO: 326369 - DNA, 20 bp, Artificial Sequence
  Description of Artificial Sequence: Synthetic oligonucleotide
  Target: LAMA2; (+) strand; PAM type: YTN; PAM sequence: CTG
cactccagcctgggcagtgt

SEQ ID NO: 326370 - DNA, 20 bp, Artificial Sequence
  Description of Artificial Sequence: Synthetic oligonucleotide
  Target: LAMA2; (+) strand; PAM type: YTN; PAM sequence: CTC
cagcctgggcagtgtagcaa

SEQ ID NO: 326371 - DNA, 20 bp, Artificial Sequence
  Description of Artificial Sequence: Synthetic oligonucleotide
  Target: LAMA2; (+) strand; PAM type: YTN; PAM sequence: CTG
ggcagtgtagcaagacccta

SEQ ID NO: 326372 - DNA, 20 bp, Artificial Sequence
  Description of Artificial Sequence: Synthetic oligonucleotide
  Target: LAMA2; (+) strand; PAM type: YTN; PAM sequence: CTA
tctctgaaaaaagaatcaaa

SEQ ID NO: 326373 - DNA, 20 bp, Artificial Sequence
  Description of Artificial Sequence: Synthetic oligonucleotide
  Target: LAMA2; (+) strand; PAM type: YTN; PAM sequence: CTC
tgaaaaaagaatcaaaggcc

SEQ ID NO: 326374 - DNA, 20 bp, Artificial Sequence
  Description of Artificial Sequence: Synthetic oligonucleotide
  Target: LAMA2; (+) strand; PAM type: YTN; PAM sequence: CTG
aaaaaagaatcaaaggcctt

SEQ ID NO: 326375 - DNA, 20 bp, Artificial Sequence
  Description of Artificial Sequence: Synthetic oligonucleotide
  Target: LAMA2; (+) strand; PAM type: YTN; PAM sequence: CTT
aagaaatattttatttttac

SEQ ID NO: 326376 - DNA, 20 bp, Artificial Sequence
  Description of Artificial Sequence: Synthetic oligonucleotide
  Target: LAMA2; (+) strand; PAM type: YTN; PAM sequence: TTA
agaaatattttatttttacc

SEQ ID NO: 326377 - DNA, 20 bp, Artificial Sequence
  Description of Artificial Sequence: Synthetic oligonucleotide
  Target: LAMA2; (+) strand; PAM type: YTN; PAM sequence: TTT
tatttttacctcagaaaatt

SEQ ID NO: 326378 - DNA, 20 bp, Artificial Sequence
  Description of Artificial Sequence: Synthetic oligonucleotide
  Target: LAMA2; (+) strand; PAM type: YTN; PAM sequence: TTT
atttttacctcagaaaattt

SEQ ID NO: 326379 - DNA, 20 bp, Artificial Sequence
  Description of Artificial Sequence: Synthetic oligonucleotide
  Target: LAMA2; (+) strand; PAM type: YTN; PAM sequence: TTA
tttttacctcagaaaattta

SEQ ID NO: 326380 - DNA, 20 bp, Artificial Sequence
  Description of Artificial Sequence: Synthetic oligonucleotide
  Target: LAMA2; (+) strand; PAM type: YTN; PAM sequence: TTT
ttacctcagaaaatttaaaa

SEQ ID NO: 326381 - DNA, 20 bp, Artificial Sequence
  Description of Artificial Sequence: Synthetic oligonucleotide
  Target: LAMA2; (+) strand; PAM type: YTN; PAM sequence: TTT
tacctcagaaaatttaaaaa

SEQ ID NO: 326382 - DNA, 20 bp, Artificial Sequence
  Description of Artificial Sequence: Synthetic oligonucleotide
  Target: LAMA2; (+) strand; PAM type: YTN; PAM sequence: TTT
acctcagaaaatttaaaaat

SEQ ID NO: 326383 - DNA, 20 bp, Artificial Sequence
  Description of Artificial Sequence: Synthetic oligonucleotide
  Target: LAMA2; (+) strand; PAM type: YTN; PAM sequence: TTA
cctcagaaaatttaaaaatt

SEQ ID NO: 326384 - DNA, 20 bp, Artificial Sequence
  Description of Artificial Sequence: Synthetic oligonucleotide
  Target: LAMA2; (+) strand; PAM type: YTN; PAM sequence: CTC
agaaaatttaaaaattaact

SEQ ID NO: 326385 - DNA, 20 bp, Artificial Sequence
  Description of Artificial Sequence: Synthetic oligonucleotide
  Target: LAMA2; (+) strand; PAM type: YTN; PAM sequence: TTT
aaaaattaacttagagctaa

SEQ ID NO: 326386 - DNA, 20 bp, Artificial Sequence
  Description of Artificial Sequence: Synthetic oligonucleotide
  Target: LAMA2; (+) strand; PAM type: YTN; PAM sequence: TTA
aaaattaacttagagctaaa

SEQ ID NO: 326387 - DNA, 20 bp, Artificial Sequence
  Description of Artificial Sequence: Synthetic oligonucleotide
  Target: LAMA2; (+) strand; PAM type: YTN; PAM sequence: TTA
acttagagctaaatagtttg

SEQ ID NO: 326388 - DNA, 20 bp, Artificial Sequence
  Description of Artificial Sequence: Synthetic oligonucleotide
  Target: LAMA2; (+) strand; PAM type: YTN; PAM sequence: CTT
agagctaaatagtttgggtt

SEQ ID NO: 326389 - DNA, 20 bp, Artificial Sequence
  Description of Artificial Sequence: Synthetic oligonucleotide
  Target: LAMA2; (+) strand; PAM type: YTN; PAM sequence: TTA
gagctaaatagtttgggttt

SEQ ID NO: 326390 - DNA, 20 bp, Artificial Sequence
  Description of Artificial Sequence: Synthetic oligonucleotide
  Target: LAMA2; (+) strand; PAM type: YTN; PAM sequence: CTA
aatagtttgggtttcattat

SEQ ID NO: 326391 - DNA, 20 bp, Artificial Sequence
  Description of Artificial Sequence: Synthetic oligonucleotide
  Target: LAMA2; (+) strand; PAM type: YTN; PAM sequence: TTT
gggtttcattatgtgtagaa

SEQ ID NO: 326392 - DNA, 20 bp, Artificial Sequence
  Description of Artificial Sequence: Synthetic oligonucleotide
  Target: LAMA2; (+) strand; PAM type: YTN; PAM sequence: TTG
ggtttcattatgtgtagaaa

SEQ ID NO: 326393 - DNA, 20 bp, Artificial Sequence
  Description of Artificial Sequence: Synthetic oligonucleotide
  Target: LAMA2; (+) strand; PAM type: YTN; PAM sequence: TTT
cattatgtgtagaaatgaat

SEQ ID NO: 326394 - DNA, 20 bp, Artificial Sequence
  Description of Artificial Sequence: Synthetic oligonucleotide
  Target: LAMA2; (+) strand; PAM type: YTN; PAM sequence: TTC
attatgtgtagaaatgaatc

SEQ ID NO: 326395 - DNA, 20 bp, Artificial Sequence
  Description of Artificial Sequence: Synthetic oligonucleotide
  Target: LAMA2; (+) strand; PAM type: YTN; PAM sequence: TTA
tgtgtagaaatgaatcttgc

SEQ ID NO: 326396 - DNA, 20 bp, Artificial Sequence
  Description of Artificial Sequence: Synthetic oligonucleotide
  Target: LAMA2; (+) strand; PAM type: YTN; PAM sequence: CTT
gcaacagtaacagtttccca

SEQ ID NO: 326397 - DNA, 20 bp, Artificial Sequence
  Description of Artificial Sequence: Synthetic oligonucleotide
  Target: LAMA2; (+) strand; PAM type: YTN; PAM sequence: TTG
caacagtaacagtttcccat

SEQ ID NO: 326398 - DNA, 20 bp, Artificial Sequence
  Description of Artificial Sequence: Synthetic oligonucleotide
  Target: LAMA2; (+) strand; PAM type: YTN; PAM sequence: TTT
cccattacacattataagtg

SEQ ID NO: 326399 - DNA, 20 bp, Artificial Sequence
  Description of Artificial Sequence: Synthetic oligonucleotide
  Target: LAMA2; (+) strand; PAM type: YTN; PAM sequence: TTC
ccattacacattataagtgt

SEQ ID NO: 326400 - DNA, 20 bp, Artificial Sequence
  Description of Artificial Sequence: Synthetic oligonucleotide
  Target: LAMA2; (+) strand; PAM type: YTN; PAM sequence: TTA
cacattataagtgtctgttt

SEQ ID NO: 326401 - DNA, 20 bp, Artificial Sequence
  Description of Artificial Sequence: Synthetic oligonucleotide
  Target: LAMA2; (+) strand; PAM type: YTN; PAM sequence: TTA
taagtgtctgttttgagtaa

SEQ ID NO: 326402 - DNA, 20 bp, Artificial Sequence
  Description of Artificial Sequence: Synthetic oligonucleotide
  Target: LAMA2; (+) strand; PAM type: YTN; PAM sequence: CTG
ttttgagtaaatttgttgag

SEQ ID NO: 326403 - DNA, 20 bp, Artificial Sequence
  Description of Artificial Sequence: Synthetic oligonucleotide
  Target: LAMA2; (+) strand; PAM type: YTN; PAM sequence: TTT
tgagtaaatttgttgaggag

SEQ ID NO: 326404 - DNA, 20 bp, Artificial Sequence
  Description of Artificial Sequence: Synthetic oligonucleotide
  Target: LAMA2; (+) strand; PAM type: YTN; PAM sequence: TTT
gagtaaatttgttgaggagt

SEQ ID NO: 326405 - DNA, 20 bp, Artificial Sequence
  Description of Artificial Sequence: Synthetic oligonucleotide
  Target: LAMA2; (+) strand; PAM type: YTN; PAM sequence: TTG
agtaaatttgttgaggagtc

SEQ ID NO: 326406 - DNA, 20 bp, Artificial Sequence
  Description of Artificial Sequence: Synthetic oligonucleotide
  Target: LAMA2; (+) strand; PAM type: YTN; PAM sequence: TTT
gttgaggagtctaatttagt

SEQ ID NO: 326407 - DNA, 20 bp, Artificial Sequence
  Description of Artificial Sequence: Synthetic oligonucleotide
  Target: LAMA2; (+) strand; PAM type: YTN; PAM sequence: TTG
ttgaggagtctaatttagtt

SEQ ID NO: 326408 - DNA, 20 bp, Artificial Sequence
  Description of Artificial Sequence: Synthetic oligonucleotide
  Target: LAMA2; (+) strand; PAM type: YTN; PAM sequence: TTG
aggagtctaatttagtttga

SEQ ID NO: 326409 - DNA, 20 bp, Artificial Sequence
  Description of Artificial Sequence: Synthetic oligonucleotide
  Target: LAMA2; (+) strand; PAM type: YTN; PAM sequence: CTA
atttagtttgaatcactggg

SEQ ID NO: 326410 - DNA, 20 bp, Artificial Sequence
  Description of Artificial Sequence: Synthetic oligonucleotide
  Target: LAMA2; (+) strand; PAM type: YTN; PAM sequence: TTT
agtttgaatcactgggaaaa

SEQ ID NO: 326411 - DNA, 20 bp, Artificial Sequence
  Description of Artificial Sequence: Synthetic oligonucleotide
  Target: LAMA2; (+) strand; PAM type: YTN; PAM sequence: TTA
gtttgaatcactgggaaaag

SEQ ID NO: 326412 - DNA, 20 bp, Artificial Sequence
  Description of Artificial Sequence: Synthetic oligonucleotide
  Target: LAMA2; (+) strand; PAM type: YTN; PAM sequence: TTT
gaatcactgggaaaagacac

SEQ ID NO: 326413 - DNA, 20 bp, Artificial Sequence
  Description of Artificial Sequence: Synthetic oligonucleotide
  Target: LAMA2; (+) strand; PAM type: YTN; PAM sequence: TTG
aatcactgggaaaagacaca

SEQ ID NO: 326414 - DNA, 20 bp, Artificial Sequence
  Description of Artificial Sequence: Synthetic oligonucleotide
  Target: LAMA2; (+) strand; PAM type: YTN; PAM sequence: CTG
ggaaaagacacaattgaggt

SEQ ID NO: 326415 - DNA, 20 bp, Artificial Sequence
  Description of Artificial Sequence: Synthetic oligonucleotide
  Target: LAMA2; (+) strand; PAM type: YTN; PAM sequence: TTG
aggttttataaaatgtaaaa

SEQ ID NO: 326416 - DNA, 20 bp, Artificial Sequence
  Description of Artificial Sequence: Synthetic oligonucleotide
  Target: LAMA2; (+) strand; PAM type: YTN; PAM sequence: TTT
tataaaatgtaaaaaatcaa

SEQ ID NO: 326417 - DNA, 20 bp, Artificial Sequence
  Description of Artificial Sequence: Synthetic oligonucleotide
  Target: LAMA2; (+) strand; PAM type: YTN; PAM sequence: TTT
ataaaatgtaaaaaatcaaa

SEQ ID NO: 326418 - DNA, 20 bp, Artificial Sequence
  Description of Artificial Sequence: Synthetic oligonucleotide
  Target: LAMA2; (+) strand; PAM type: YTN; PAM sequence: TTA
taaaatgtaaaaaatcaaat

SEQ ID NO: 326419 - DNA, 20 bp, Artificial Sequence
  Description of Artificial Sequence: Synthetic oligonucleotide
  Target: LAMA2; (+) strand; PAM type: YTN; PAM sequence: CTC
tgtacttccacttttttaca

SEQ ID NO: 326420 - DNA, 20 bp, Artificial Sequence
  Description of Artificial Sequence: Synthetic oligonucleotide
  Target: LAMA2; (+) strand; PAM type: YTN; PAM sequence: CTG
tacttccacttttttacata

SEQ ID NO: 326421 - DNA, 20 bp, Artificial Sequence
  Description of Artificial Sequence: Synthetic oligonucleotide
  Target: LAMA2; (+) strand; PAM type: YTN; PAM sequence: CTT
ccacttttttacataaagta

SEQ ID NO: 326422 - DNA, 20 bp, Artificial Sequence
  Description of Artificial Sequence: Synthetic oligonucleotide
  Target: LAMA2; (+) strand; PAM type: YTN; PAM sequence: TTC
cacttttttacataaagtac

SEQ ID NO: 326423 - DNA, 20 bp, Artificial Sequence
  Description of Artificial Sequence: Synthetic oligonucleotide
  Target: LAMA2; (+) strand; PAM type: YTN; PAM sequence: CTT
ttttacataaagtacatctt

SEQ ID NO: 326424 - DNA, 20 bp, Artificial Sequence
  Description of Artificial Sequence: Synthetic oligonucleotide
  Target: LAMA2; (+) strand; PAM type: YTN; PAM sequence: TTT
tttacataaagtacatcttc

SEQ ID NO: 326425 - DNA, 20 bp, Artificial Sequence
  Description of Artificial Sequence: Synthetic oligonucleotide
  Target: LAMA2; (+) strand; PAM type: YTN; PAM sequence: TTT
ttacataaagtacatcttcc

SEQ ID NO: 326426 - DNA, 20 bp, Artificial Sequence
  Description of Artificial Sequence: Synthetic oligonucleotide
  Target: LAMA2; (+) strand; PAM type: YTN; PAM sequence: TTT
tacataaagtacatcttcca

SEQ ID NO: 326427 - DNA, 20 bp, Artificial Sequence
  Description of Artificial Sequence: Synthetic oligonucleotide
  Target: LAMA2; (+) strand; PAM type: YTN; PAM sequence: TTT
acataaagtacatcttccac

SEQ ID NO: 326428 - DNA, 20 bp, Artificial Sequence
  Description of Artificial Sequence: Synthetic oligonucleotide
  Target: LAMA2; (+) strand; PAM type: YTN; PAM sequence: TTA
cataaagtacatcttccact

SEQ ID NO: 326429 - DNA, 20 bp, Artificial Sequence
  Description of Artificial Sequence: Synthetic oligonucleotide
  Target: LAMA2; (+) strand; PAM type: YTN; PAM sequence: CTT
ccacttctagttacaaaaaa

SEQ ID NO: 326430 - DNA, 20 bp, Artificial Sequence
  Description of Artificial Sequence: Synthetic oligonucleotide
  Target: LAMA2; (+) strand; PAM type: YTN; PAM sequence: TTC
cacttctagttacaaaaaat

SEQ ID NO: 326431 - DNA, 20 bp, Artificial Sequence
  Description of Artificial Sequence: Synthetic oligonucleotide
  Target: LAMA2; (+) strand; PAM type: YTN; PAM sequence: CTT
ctagttacaaaaaatttttt

SEQ ID NO: 326432 - DNA, 20 bp, Artificial Sequence
  Description of Artificial Sequence: Synthetic oligonucleotide
  Target: LAMA2; (+) strand; PAM type: YTN; PAM sequence: TTC
tagttacaaaaaattttttt

SEQ ID NO: 326433 - DNA, 20 bp, Artificial Sequence
  Description of Artificial Sequence: Synthetic oligonucleotide
  Target: LAMA2; (+) strand; PAM type: YTN; PAM sequence: CTA
gttacaaaaaattttttttt

SEQ ID NO: 326434 - DNA, 20 bp, Artificial Sequence
  Description of Artificial Sequence: Synthetic oligonucleotide
  Target: LAMA2; (+) strand; PAM type: YTN; PAM sequence: TTA
caaaaaattttttttttctc

SEQ ID NO: 326435 - DNA, 20 bp, Artificial Sequence
  Description of Artificial Sequence: Synthetic oligonucleotide
  Target: LAMA2; (+) strand; PAM type: YTN; PAM sequence: TTT
tttttttctcacttgagtcg

SEQ ID NO: 326436 - DNA, 20 bp, Artificial Sequence
  Description of Artificial Sequence: Synthetic oligonucleotide
  Target: LAMA2; (+) strand; PAM type: YTN; PAM sequence: TTT
ttttttctcacttgagtcgt

SEQ ID NO: 326437 - DNA, 20 bp, Artificial Sequence
  Description of Artificial Sequence: Synthetic oligonucleotide
  Target: LAMA2; (+) strand; PAM type: YTN; PAM sequence: TTT
tttttctcacttgagtcgtt

SEQ ID NO: 326438 - DNA, 20 bp, Artificial Sequence
  Description of Artificial Sequence: Synthetic oligonucleotide
  Target: LAMA2; (+) strand; PAM type: YTN; PAM sequence: TTT
ttttctcacttgagtcgttt

SEQ ID NO: 326439 - DNA, 20 bp, Artificial Sequence
  Description of Artificial Sequence: Synthetic oligonucleotide
  Target: LAMA2; (+) strand; PAM type: YTN; PAM sequence: TTT
tttctcacttgagtcgttta

SEQ ID NO: 326440 - DNA, 20 bp, Artificial Sequence
  Description of Artificial Sequence: Synthetic oligonucleotide
  Target: LAMA2; (+) strand; PAM type: YTN; PAM sequence: TTT
ttctcacttgagtcgtttat

SEQ ID NO: 326441 - DNA, 20 bp, Artificial Sequence
  Description of Artificial Sequence: Synthetic oligonucleotide
  Target: LAMA2; (+) strand; PAM type: YTN; PAM sequence: TTT
tctcacttgagtcgtttatc

SEQ ID NO: 326442 - DNA, 20 bp, Artificial Sequence
  Description of Artificial Sequence: Synthetic oligonucleotide
  Target: LAMA2; (+) strand; PAM type: YTN; PAM sequence: TTT
ctcacttgagtcgtttatct

SEQ ID NO: 326443 - DNA, 20 bp, Artificial Sequence
  Description of Artificial Sequence: Synthetic oligonucleotide
  Target: LAMA2; (+) strand; PAM type: YTN; PAM sequence: TTC
tcacttgagtcgtttatctg

SEQ ID NO: 326444 - DNA, 20 bp, Artificial Sequence
  Description of Artificial Sequence: Synthetic oligonucleotide
  Target: LAMA2; (+) strand; PAM type: YTN; PAM sequence: CTC
acttgagtcgtttatctgta

SEQ ID NO: 326445 - DNA, 20 bp, Artificial Sequence
  Description of Artificial Sequence: Synthetic oligonucleotide
  Target: LAMA2; (+) strand; PAM type: YTN; PAM sequence: CTT
gagtcgtttatctgtagtaa

SEQ ID NO: 326446 - DNA, 20 bp, Artificial Sequence
  Description of Artificial Sequence: Synthetic oligonucleotide
  Target: LAMA2; (+) strand; PAM type: YTN; PAM sequence: TTG
agtcgtttatctgtagtaag

SEQ ID NO: 326447 - DNA, 20 bp, Artificial Sequence
  Description of Artificial Sequence: Synthetic oligonucleotide
  Target: LAMA2; (+) strand; PAM type: YTN; PAM sequence: TTT
atctgtagtaagtaaatttg

SEQ ID NO: 326448 - DNA, 20 bp, Artificial Sequence
  Description of Artificial Sequence: Synthetic oligonucleotide
  Target: LAMA2; (+) strand; PAM type: YTN; PAM sequence: TTA
tctgtagtaagtaaatttgg

SEQ ID NO: 326449 - DNA, 20 bp, Artificial Sequence
  Description of Artificial Sequence: Synthetic oligonucleotide
  Target: LAMA2; (+) strand; PAM type: YTN; PAM sequence: CTG
tagtaagtaaatttgggaaa

SEQ ID NO: 326450 - DNA, 20 bp, Artificial Sequence
  Description of Artificial Sequence: Synthetic oligonucleotide
  Target: LAMA2; (+) strand; PAM type: YTN; PAM sequence: TTT
gggaaaagtgcaagtattca

SEQ ID NO: 326451 - DNA, 20 bp, Artificial Sequence
  Description of Artificial Sequence: Synthetic oligonucleotide
  Target: LAMA2; (+) strand; PAM type: YTN; PAM sequence: TTG
ggaaaagtgcaagtattcat

SEQ ID NO: 326452 - DNA, 20 bp, Artificial Sequence
  Description of Artificial Sequence: Synthetic oligonucleotide
  Target: LAMA2; (+) strand; PAM type: YTN; PAM sequence: TTC
atatacattgttttgcattt

SEQ ID NO: 326453 - DNA, 20 bp, Artificial Sequence
  Description of Artificial Sequence: Synthetic oligonucleotide
  Target: LAMA2; (+) strand; PAM type: YTN; PAM sequence: TTG
ttttgcatttaaaagaaaag

SEQ ID NO: 326454 - DNA, 20 bp, Artificial Sequence
  Description of Artificial Sequence: Synthetic oligonucleotide
  Target: LAMA2; (+) strand; PAM type: YTN; PAM sequence: TTT
tgcatttaaaagaaaagtga

SEQ ID NO: 326455 - DNA, 20 bp, Artificial Sequence
  Description of Artificial Sequence: Synthetic oligonucleotide
  Target: LAMA2; (+) strand; PAM type: YTN; PAM sequence: TTT
gcatttaaaagaaaagtgat

SEQ ID NO: 326456 - DNA, 20 bp, Artificial Sequence
  Description of Artificial Sequence: Synthetic oligonucleotide
  Target: LAMA2; (+) strand; PAM type: YTN; PAM sequence: TTG
catttaaaagaaaagtgata

SEQ ID NO: 326457 - DNA, 20 bp, Artificial Sequence
  Description of Artificial Sequence: Synthetic oligonucleotide
  Target: LAMA2; (+) strand; PAM type: YTN; PAM sequence: TTT
aaaagaaaagtgataatgtt

SEQ ID NO: 326458 - DNA, 20 bp, Artificial Sequence
  Description of Artificial Sequence: Synthetic oligonucleotide
  Target: LAMA2; (+) strand; PAM type: YTN; PAM sequence: TTA
aaagaaaagtgataatgttc

SEQ ID NO: 326459 - DNA, 20 bp, Artificial Sequence
  Description of Artificial Sequence: Synthetic oligonucleotide
  Target: LAMA2; (+) strand; PAM type: YTN; PAM sequence: TTC
aaacccatgctatttacaaa

SEQ ID NO: 326460 - DNA, 20 bp, Artificial Sequence
  Description of Artificial Sequence: Synthetic oligonucleotide
  Target: LAMA2; (+) strand; PAM type: YTN; PAM sequence: CTA
tttacaaaaatcaaaagctc

SEQ ID NO: 326461 - DNA, 20 bp, Artificial Sequence
  Description of Artificial Sequence: Synthetic oligonucleotide
  Target: LAMA2; (+) strand; PAM type: YTN; PAM sequence: TTT
acaaaaatcaaaagctcaaa

SEQ ID NO: 326462 - DNA, 20 bp, Artificial Sequence
  Description of Artificial Sequence: Synthetic oligonucleotide
  Target: LAMA2; (+) strand; PAM type: YTN; PAM sequence: TTA
caaaaatcaaaagctcaaat

SEQ ID NO: 326463 - DNA, 20 bp, Artificial Sequence
  Description of Artificial Sequence: Synthetic oligonucleotide
  Target: LAMA2; (+) strand; PAM type: YTN; PAM sequence: CTC
aaatcatgaattctgtttgt

SEQ ID NO: 326464 - DNA, 20 bp, Artificial Sequence
  Description of Artificial Sequence: Synthetic oligonucleotide
  Target: LAMA2; (+) strand; PAM type: YTN; PAM sequence: TTC
tgtttgtgttaaggatttaa

SEQ ID NO: 326465 - DNA, 20 bp, Artificial Sequence
  Description of Artificial Sequence: Synthetic oligonucleotide
  Target: LAMA2; (+) strand; PAM type: YTN; PAM sequence: CTG
tttgtgttaaggatttaaaa

SEQ ID NO: 326466 - DNA, 20 bp, Artificial Sequence
  Description of Artificial Sequence: Synthetic oligonucleotide
  Target: LAMA2; (+) strand; PAM type: YTN; PAM sequence: TTT
gtgttaaggatttaaaaaaa

SEQ ID NO: 326467 - DNA, 20 bp, Artificial Sequence
  Description of Artificial Sequence: Synthetic oligonucleotide
  Target: LAMA2; (+) strand; PAM type: YTN; PAM sequence: TTG
tgttaaggatttaaaaaaat

SEQ ID NO: 326468 - DNA, 20 bp, Artificial Sequence
  Description of Artificial Sequence: Synthetic oligonucleotide
  Target: LAMA2; (+) strand; PAM type: YTN; PAM sequence: TTA
aggatttaaaaaaatagtgg

SEQ ID NO: 326469 - DNA, 20 bp, Artificial Sequence
  Description of Artificial Sequence: Synthetic oligonucleotide
  Target: LAMA2; (+) strand; PAM type: YTN; PAM sequence: TTT
aaaaaaatagtggcgtgaga

SEQ ID NO: 326470 - DNA, 20 bp, Artificial Sequence
  Description of Artificial Sequence: Synthetic oligonucleotide
  Target: LAMA2; (+) strand; PAM type: YTN; PAM sequence: TTA
aaaaaatagtggcgtgagaa

SEQ ID NO: 326471 - DNA, 20 bp, Artificial Sequence
  Description of Artificial Sequence: Synthetic oligonucleotide
  Target: LAMA2; (+) strand; PAM type: YTN; PAM sequence: TTA
ttgctcttcaataaagatag

SEQ ID NO: 326472 - DNA, 20 bp, Artificial Sequence
  Description of Artificial Sequence: Synthetic oligonucleotide
  Target: LAMA2; (+) strand; PAM type: YTN; PAM sequence: TTG
ctcttcaataaagatagaga

SEQ ID NO: 326473 - DNA, 20 bp, Artificial Sequence
  Description of Artificial Sequence: Synthetic oligonucleotide
  Target: LAMA2; (+) strand; PAM type: YTN; PAM sequence: CTC
ttcaataaagatagagatac

SEQ ID NO: 326474 - DNA, 20 bp, Artificial Sequence
  Description of Artificial Sequence: Synthetic oligonucleotide
  Target: LAMA2; (+) strand; PAM type: YTN; PAM sequence: CTT
caataaagatagagatacca

SEQ ID NO: 326475 - DNA, 20 bp, Artificial Sequence
  Description of Artificial Sequence: Synthetic oligonucleotide
  Target: LAMA2; (+) strand; PAM type: YTN; PAM sequence: TTC
aataaagatagagataccac

SEQ ID NO: 326476 - DNA, 20 bp, Artificial Sequence
  Description of Artificial Sequence: Synthetic oligonucleotide
  Target: LAMA2; (+) strand; PAM type: YTN; PAM sequence: TTT
tgctttaacatatctagagg

SEQ ID NO: 326477 - DNA, 20 bp, Artificial Sequence
  Description of Artificial Sequence: Synthetic oligonucleotide
  Target: LAMA2; (+) strand; PAM type: YTN; PAM sequence: TTT
gctttaacatatctagaggc

SEQ ID NO: 326478 - DNA, 20 bp, Artificial Sequence
  Description of Artificial Sequence: Synthetic oligonucleotide
  Target: LAMA2; (+) strand; PAM type: YTN; PAM sequence: TTG
ctttaacatatctagaggca

SEQ ID NO: 326479 - DNA, 20 bp, Artificial Sequence
  Description of Artificial Sequence: Synthetic oligonucleotide
  Target: LAMA2; (+) strand; PAM type: YTN; PAM sequence: CTT
taacatatctagaggcaact

SEQ ID NO: 326480 - DNA, 20 bp, Artificial Sequence
  Description of Artificial Sequence: Synthetic oligonucleotide
  Target: LAMA2; (+) strand; PAM type: YTN; PAM sequence: TTT
aacatatctagaggcaactt

SEQ ID NO: 326481 - DNA, 20 bp, Artificial Sequence
  Description of Artificial Sequence: Synthetic oligonucleotide
  Target: LAMA2; (+) strand; PAM type: YTN; PAM sequence: TTA
acatatctagaggcaacttt

SEQ ID NO: 326482 - DNA, 20 bp, Artificial Sequence
  Description of Artificial Sequence: Synthetic oligonucleotide
  Target: LAMA2; (+) strand; PAM type: YTN; PAM sequence: CTA
gaggcaactttttcatcgat

SEQ ID NO: 326483 - DNA, 20 bp, Artificial Sequence
  Description of Artificial Sequence: Synthetic oligonucleotide
  Target: LAMA2; (+) strand; PAM type: YTN; PAM sequence: CTT
tttcatcgatagctttatta

SEQ ID NO: 326484 - DNA, 20 bp, Artificial Sequence
  Description of Artificial Sequence: Synthetic oligonucleotide
  Target: LAMA2; (+) strand; PAM type: YTN; PAM sequence: TTT
ttcatcgatagctttattag

SEQ ID NO: 326485 - DNA, 20 bp, Artificial Sequence
  Description of Artificial Sequence: Synthetic oligonucleotide
  Target: LAMA2; (+) strand; PAM type: YTN; PAM sequence: TTT
tcatcgatagctttattagt

SEQ ID NO: 326486 - DNA, 20 bp, Artificial Sequence
  Description of Artificial Sequence: Synthetic oligonucleotide
  Target: LAMA2; (+) strand; PAM type: YTN; PAM sequence: TTT
catcgatagctttattagta

SEQ ID NO: 326487 - DNA, 20 bp, Artificial Sequence
  Description of Artificial Sequence: Synthetic oligonucleotide
  Target: LAMA2; (+) strand; PAM type: YTN; PAM sequence: TTC
atcgatagctttattagtag

SEQ ID NO: 326488 - DNA, 20 bp, Artificial Sequence
  Description of Artificial Sequence: Synthetic oligonucleotide
  Target: LAMA2; (+) strand; PAM type: YTN; PAM sequence: CTT
tattagtaggtcaaggagaa

SEQ ID NO: 326489 - DNA, 20 bp, Artificial Sequence
  Description of Artificial Sequence: Synthetic oligonucleotide
  Target: LAMA2; (+) strand; PAM type: YTN; PAM sequence: TTT
attagtaggtcaaggagaaa

SEQ ID NO: 326490 - DNA, 20 bp, Artificial Sequence
  Description of Artificial Sequence: Synthetic oligonucleotide
  Target: LAMA2; (+) strand; PAM type: YTN; PAM sequence: TTA
ttagtaggtcaaggagaaat

SEQ ID NO: 326491 - DNA, 20 bp, Artificial Sequence
  Description of Artificial Sequence: Synthetic oligonucleotide
  Target: LAMA2; (+) strand; PAM type: YTN; PAM sequence: TTA
gtaggtcaaggagaaatcat

SEQ ID NO: 326492 - DNA, 20 bp, Artificial Sequence
  Description of Artificial Sequence: Synthetic oligonucleotide
  Target: LAMA2; (+) strand; PAM type: YTN; PAM sequence: CTA
agtagaaaggtccgtggaga

SEQ ID NO: 326493 - DNA, 20 bp, Artificial Sequence
  Description of Artificial Sequence: Synthetic oligonucleotide
  Target: LAMA2; (+) strand; PAM type: YTN; PAM sequence: TTA
aaattaaattgaaaaaattt

SEQ ID NO: 326494 - DNA, 20 bp, Artificial Sequence
  Description of Artificial Sequence: Synthetic oligonucleotide
  Target: LAMA2; (+) strand; PAM type: YTN; PAM sequence: TTA
aattgaaaaaatttaaatca

SEQ ID NO: 326495 - DNA, 20 bp, Artificial Sequence
  Description of Artificial Sequence: Synthetic oligonucleotide
  Target: LAMA2; (+) strand; PAM type: YTN; PAM sequence: TTG
aaaaaatttaaatcaaggaa

SEQ ID NO: 326496 - DNA, 20 bp, Artificial Sequence
  Description of Artificial Sequence: Synthetic oligonucleotide
  Target: LAMA2; (+) strand; PAM type: YTN; PAM sequence: TTT
aaatcaaggaaaccattttc

SEQ ID NO: 326497 - DNA, 20 bp, Artificial Sequence
  Description of Artificial Sequence: Synthetic oligonucleotide
  Target: LAMA2; (+) strand; PAM type: YTN; PAM sequence: TTA
aatcaaggaaaccattttca

SEQ ID NO: 326498 - DNA, 20 bp, Artificial Sequence
  Description of Artificial Sequence: Synthetic oligonucleotide
  Target: LAMA2; (+) strand; PAM type: YTN; PAM sequence: TTT
tcacttctttcgatatgatg

SEQ ID NO: 326499 - DNA, 20 bp, Artificial Sequence
  Description of Artificial Sequence: Synthetic oligonucleotide
  Target: LAMA2; (+) strand; PAM type: YTN; PAM sequence: TTT
cacttctttcgatatgatgt

SEQ ID NO: 326500 - DNA, 20 bp, Artificial Sequence
  Description of Artificial Sequence: Synthetic oligonucleotide
  Target: LAMA2; (+) strand; PAM type: YTN; PAM sequence: TTC
acttctttcgatatgatgtg

SEQ ID NO: 326501 - DNA, 20 bp, Artificial Sequence
  Description of Artificial Sequence: Synthetic oligonucleotide
  Target: LAMA2; (+) strand; PAM type: YTN; PAM sequence: CTT
ctttcgatatgatgtgcaaa

SEQ ID NO: 326502 - DNA, 20 bp, Artificial Sequence
  Description of Artificial Sequence: Synthetic oligonucleotide
  Target: LAMA2; (+) strand; PAM type: YTN; PAM sequence: TTC
tttcgatatgatgtgcaaaa

SEQ ID NO: 326503 - DNA, 20 bp, Artificial Sequence
  Description of Artificial Sequence: Synthetic oligonucleotide
  Target: LAMA2; (+) strand; PAM type: YTN; PAM sequence: CTT
tcgatatgatgtgcaaaatc

SEQ ID NO: 326504 - DNA, 20 bp, Artificial Sequence
  Description of Artificial Sequence: Synthetic oligonucleotide
  Target: LAMA2; (+) strand; PAM type: YTN; PAM sequence: TTT
cgatatgatgtgcaaaatca

SEQ ID NO: 326505 - DNA, 20 bp, Artificial Sequence
  Description of Artificial Sequence: Synthetic oligonucleotide
  Target: LAMA2; (+) strand; PAM type: YTN; PAM sequence: TTC
gatatgatgtgcaaaatcat

SEQ ID NO: 326506 - DNA, 20 bp, Artificial Sequence
  Description of Artificial Sequence: Synthetic oligonucleotide
  Target: LAMA2; (+) strand; PAM type: YTN; PAM sequence: TTT
taaatgggaaatgggaaatt

SEQ ID NO: 326507 - DNA, 20 bp, Artificial Sequence
  Description of Artificial Sequence: Synthetic oligonucleotide
  Target: LAMA2; (+) strand; PAM type: YTN; PAM sequence: TTT
aaatgggaaatgggaaattt

SEQ ID NO: 326508 - DNA, 20 bp, Artificial Sequence
  Description of Artificial Sequence: Synthetic oligonucleotide
  Target: LAMA2; (+) strand; PAM type: YTN; PAM sequence: TTA
aatgggaaatgggaaatttc

SEQ ID NO: 326509 - DNA, 20 bp, Artificial Sequence
  Description of Artificial Sequence: Synthetic oligonucleotide
  Target: LAMA2; (+) strand; PAM type: YTN; PAM sequence: TTT
catagcttcttagcaatgat

SEQ ID NO: 326510 - DNA, 20 bp, Artificial Sequence
  Description of Artificial Sequence: Synthetic oligonucleotide
  Target: LAMA2; (+) strand; PAM type: YTN; PAM sequence: TTC
atagcttcttagcaatgatg

SEQ ID NO: 326511 - DNA, 20 bp, Artificial Sequence
  Description of Artificial Sequence: Synthetic oligonucleotide
  Target: LAMA2; (+) strand; PAM type: YTN; PAM sequence: CTT
cttagcaatgatgtgagctc

SEQ ID NO: 326512 - DNA, 20 bp, Artificial Sequence
  Description of Artificial Sequence: Synthetic oligonucleotide
  Target: LAMA2; (+) strand; PAM type: YTN; PAM sequence: TTC
ttagcaatgatgtgagctct

SEQ ID NO: 326513 - DNA, 20 bp, Artificial Sequence
  Description of Artificial Sequence: Synthetic oligonucleotide
  Target: LAMA2; (+) strand; PAM type: YTN; PAM sequence: CTT
agcaatgatgtgagctctgt

SEQ ID NO: 326514 - DNA, 20 bp, Artificial Sequence
  Description of Artificial Sequence: Synthetic oligonucleotide
  Target: LAMA2; (+) strand; PAM type: YTN; PAM sequence: TTA
gcaatgatgtgagctctgtg

SEQ ID NO: 326515 - DNA, 20 bp, Artificial Sequence
  Description of Artificial Sequence: Synthetic oligonucleotide
  Target: LAMA2; (+) strand; PAM type: YTN; PAM sequence: CTC
tgtggtctgggtggatgcag

SEQ ID NO: 326516 - DNA, 20 bp, Artificial Sequence
  Description of Artificial Sequence: Synthetic oligonucleotide
  Target: LAMA2; (+) strand; PAM type: YTN; PAM sequence: CTG
tggtctgggtggatgcaggg

SEQ ID NO: 326517 - DNA, 20 bp, Artificial Sequence
  Description of Artificial Sequence: Synthetic oligonucleotide
  Target: LAMA2; (+) strand; PAM type: YTN; PAM sequence: CTG
ggtggatgcagggcatgtgg

SEQ ID NO: 326518 - DNA, 20 bp, Artificial Sequence
  Description of Artificial Sequence: Synthetic oligonucleotide
  Target: LAMA2; (+) strand; PAM type: YTN; PAM sequence: CTT
ttgctcatttaaggaaattg

SEQ ID NO: 326519 - DNA, 20 bp, Artificial Sequence
  Description of Artificial Sequence: Synthetic oligonucleotide
  Target: LAMA2; (+) strand; PAM type: YTN; PAM sequence: TTT
tgctcatttaaggaaattgc

SEQ ID NO: 326520 - DNA, 20 bp, Artificial Sequence
  Description of Artificial Sequence: Synthetic oligonucleotide
  Target: LAMA2; (+) strand; PAM type: YTN; PAM sequence: TTT
gctcatttaaggaaattgca

SEQ ID NO: 326521 - DNA, 20 bp, Artificial Sequence
  Description of Artificial Sequence: Synthetic oligonucleotide
  Target: LAMA2; (+) strand; PAM type: YTN; PAM sequence: TTG
ctcatttaaggaaattgcat

SEQ ID NO: 326522 - DNA, 20 bp, Artificial Sequence
  Description of Artificial Sequence: Synthetic oligonucleotide
  Target: LAMA2; (+) strand; PAM type: YTN; PAM sequence: CTC
atttaaggaaattgcatttg

SEQ ID NO: 326523 - DNA, 20 bp, Artificial Sequence
  Description of Artificial Sequence: Synthetic oligonucleotide
  Target: LAMA2; (+) strand; PAM type: YTN; PAM sequence: TTT
aaggaaattgcatttgaaac

SEQ ID NO: 326524 - DNA, 20 bp, Artificial Sequence
  Description of Artificial Sequence: Synthetic oligonucleotide
  Target: LAMA2; (+) strand; PAM type: YTN; PAM sequence: TTA
aggaaattgcatttgaaaca

SEQ ID NO: 326525 - DNA, 20 bp, Artificial Sequence
  Description of Artificial Sequence: Synthetic oligonucleotide
  Target: LAMA2; (+) strand; PAM type: YTN; PAM sequence: TTG
catttgaaacattctcaata

SEQ ID NO: 326526 - DNA, 20 bp, Artificial Sequence
  Description of Artificial Sequence: Synthetic oligonucleotide
  Target: LAMA2; (+) strand; PAM type: YTN; PAM sequence: TTT
gaaacattctcaatacatta

SEQ ID NO: 326527 - DNA, 20 bp, Artificial Sequence
  Description of Artificial Sequence: Synthetic oligonucleotide
  Target: LAMA2; (+) strand; PAM type: YTN; PAM sequence: TTG
aaacattctcaatacattat

SEQ ID NO: 326528 - DNA, 20 bp, Artificial Sequence
  Description of Artificial Sequence: Synthetic oligonucleotide
  Target: LAMA2; (+) strand; PAM type: YTN; PAM sequence: TTC
tcaatacattatgtagccac

SEQ ID NO: 326529 - DNA, 20 bp, Artificial Sequence
  Description of Artificial Sequence: Synthetic oligonucleotide
  Target: LAMA2; (+) strand; PAM type: YTN; PAM sequence: CTC
aatacattatgtagccacaa

SEQ ID NO: 326530 - DNA, 20 bp, Artificial Sequence
  Description of Artificial Sequence: Synthetic oligonucleotide
  Target: LAMA2; (+) strand; PAM type: YTN; PAM sequence: TTA
tgtagccacaagaaaattta

SEQ ID NO: 326531 - DNA, 20 bp, Artificial Sequence
  Description of Artificial Sequence: Synthetic oligonucleotide
  Target: LAMA2; (+) strand; PAM type: YTN; PAM sequence: TTT
atagtgatttctttttggtg

SEQ ID NO: 326532 - DNA, 20 bp, Artificial Sequence
  Description of Artificial Sequence: Synthetic oligonucleotide
  Target: LAMA2; (+) strand; PAM type: YTN; PAM sequence: TTA
tagtgatttctttttggtgg

SEQ ID NO: 326533 - DNA, 20 bp, Artificial Sequence
  Description of Artificial Sequence: Synthetic oligonucleotide
  Target: LAMA2; (+) strand; PAM type: YTN; PAM sequence: TTT
ctttttggtggaacaaagta

SEQ ID NO: 326534 - DNA, 20 bp, Artificial Sequence
  Description of Artificial Sequence: Synthetic oligonucleotide
  Target: LAMA2; (+) strand; PAM type: YTN; PAM sequence: TTC
tttttggtggaacaaagtat

SEQ ID NO: 326535 - DNA, 20 bp, Artificial Sequence
  Description of Artificial Sequence: Synthetic oligonucleotide
  Target: LAMA2; (+) strand; PAM type: YTN; PAM sequence: CTT
tttggtggaacaaagtatat

SEQ ID NO: 326536 - DNA, 20 bp, Artificial Sequence
  Description of Artificial Sequence: Synthetic oligonucleotide
  Target: LAMA2; (+) strand; PAM type: YTN; PAM sequence: TTT
ttggtggaacaaagtatatg

SEQ ID NO: 326537 - DNA, 20 bp, Artificial Sequence
  Description of Artificial Sequence: Synthetic oligonucleotide
  Target: LAMA2; (+) strand; PAM type: YTN; PAM sequence: TTT
tggtggaacaaagtatatgc

SEQ ID NO: 326538 - DNA, 20 bp, Artificial Sequence
  Description of Artificial Sequence: Synthetic oligonucleotide
  Target: LAMA2; (+) strand; PAM type: YTN; PAM sequence: TTT
ggtggaacaaagtatatgct

SEQ ID NO: 326539 - DNA, 20 bp, Artificial Sequence
  Description of Artificial Sequence: Synthetic oligonucleotide
  Target: LAMA2; (+) strand; PAM type: YTN; PAM sequence: TTG
gtggaacaaagtatatgctc

SEQ ID NO: 326540 - DNA, 20 bp, Artificial Sequence
  Description of Artificial Sequence: Synthetic oligonucleotide
  Target: LAMA2; (+) strand; PAM type: YTN; PAM sequence: CTC
ttttccagctcaggatcctt

SEQ ID NO: 326541 - DNA, 20 bp, Artificial Sequence
  Description of Artificial Sequence: Synthetic oligonucleotide
  Target: LAMA2; (+) strand; PAM type: YTN; PAM sequence: CTT
ttccagctcaggatcctttt

SEQ ID NO: 326542 - DNA, 20 bp, Artificial Sequence
  Description of Artificial Sequence: Synthetic oligonucleotide
  Target: LAMA2; (+) strand; PAM type: YTN; PAM sequence: TTT
tccagctcaggatccttttc

SEQ ID NO: 326543 - DNA, 20 bp, Artificial Sequence
  Description of Artificial Sequence: Synthetic oligonucleotide
  Target: LAMA2; (+) strand; PAM type: YTN; PAM sequence: TTT
ccagctcaggatccttttcc

SEQ ID NO: 326544 - DNA, 20 bp, Artificial Sequence
  Description of Artificial Sequence: Synthetic oligonucleotide
  Target: LAMA2; (+) strand; PAM type: YTN; PAM sequence: TTC
cagctcaggatccttttcca

SEQ ID NO: 326545 - DNA, 20 bp, Artificial Sequence
  Description of Artificial Sequence: Synthetic oligonucleotide
  Target: LAMA2; (+) strand; PAM type: YTN; PAM sequence: CTC
aggatccttttccagtcttc

SEQ ID NO: 326546 - DNA, 20 bp, Artificial Sequence
  Description of Artificial Sequence: Synthetic oligonucleotide
  Target: LAMA2; (+) strand; PAM type: YTN; PAM sequence: CTT
ttccagtcttcctacactta

SEQ ID NO: 326547 - DNA, 20 bp, Artificial Sequence
  Description of Artificial Sequence: Synthetic oligonucleotide
  Target: LAMA2; (+) strand; PAM type: YTN; PAM sequence: TTT
tccagtcttcctacacttaa

SEQ ID NO: 326548 - DNA, 20 bp, Artificial Sequence
  Description of Artificial Sequence: Synthetic oligonucleotide
  Target: LAMA2; (+) strand; PAM type: YTN; PAM sequence: TTT
ccagtcttcctacacttaac

SEQ ID NO: 326549 - DNA, 20 bp, Artificial Sequence
  Description of Artificial Sequence: Synthetic oligonucleotide
  Target: LAMA2; (+) strand; PAM type: YTN; PAM sequence: TTC
cagtcttcctacacttaaca

SEQ ID NO: 326550 - DNA, 20 bp, Artificial Sequence
  Description of Artificial Sequence: Synthetic oligonucleotide
  Target: LAMA2; (+) strand; PAM type: YTN; PAM sequence: CTT
cctacacttaacagccagta

SEQ ID NO: 326551 - DNA, 20 bp, Artificial Sequence
  Description of Artificial Sequence: Synthetic oligonucleotide
  Target: LAMA2; (+) strand; PAM type: YTN; PAM sequence: TTC
ctacacttaacagccagtac

SEQ ID NO: 326552 - DNA, 20 bp, Artificial Sequence
  Description of Artificial Sequence: Synthetic oligonucleotide
  Target: LAMA2; (+) strand; PAM type: YTN; PAM sequence: CTA
cacttaacagccagtacaaa

SEQ ID NO: 326553 - DNA, 20 bp, Artificial Sequence
  Description of Artificial Sequence: Synthetic oligonucleotide
  Target: LAMA2; (+) strand; PAM type: YTN; PAM sequence: CTT
aacagccagtacaaacttag

SEQ ID NO: 326554 - DNA, 20 bp, Artificial Sequence
  Description of Artificial Sequence: Synthetic oligonucleotide
  Target: LAMA2; (+) strand; PAM type: YTN; PAM sequence: TTA
acagccagtacaaacttagt

SEQ ID NO: 326555 - DNA, 20 bp, Artificial Sequence
  Description of Artificial Sequence: Synthetic oligonucleotide
  Target: LAMA2; (+) strand; PAM type: YTN; PAM sequence: CTT
agtccatagaacgtatttgt

SEQ ID NO: 326556 - DNA, 20 bp, Artificial Sequence
  Description of Artificial Sequence: Synthetic oligonucleotide
  Target: LAMA2; (+) strand; PAM type: YTN; PAM sequence: TTA
gtccatagaacgtatttgtt

SEQ ID NO: 326557 - DNA, 20 bp, Artificial Sequence
  Description of Artificial Sequence: Synthetic oligonucleotide
  Target: LAMA2; (+) strand; PAM type: YTN; PAM sequence: TTT
gttgtgcacagacctgcaca

SEQ ID NO: 326558 - DNA, 20 bp, Artificial Sequence
  Description of Artificial Sequence: Synthetic oligonucleotide
  Target: LAMA2; (+) strand; PAM type: YTN; PAM sequence: TTG
ttgtgcacagacctgcacaa

SEQ ID NO: 326559 - DNA, 20 bp, Artificial Sequence
  Description of Artificial Sequence: Synthetic oligonucleotide
  Target: LAMA2; (+) strand; PAM type: YTN; PAM sequence: TTG
tgcacagacctgcacaaaca

SEQ ID NO: 326560 - DNA, 20 bp, Artificial Sequence
  Description of Artificial Sequence: Synthetic oligonucleotide
  Target: LAMA2; (+) strand; PAM type: YTN; PAM sequence: CTG
cacaaacacacacacatgca

SEQ ID NO: 326561 - DNA, 20 bp, Artificial Sequence
  Description of Artificial Sequence: Synthetic oligonucleotide
  Target: LAMA2; (+) strand; PAM type: YTN; PAM sequence: TTT
cacgaatcaggtatgtattt

SEQ ID NO: 326562 - DNA, 20 bp, Artificial Sequence
  Description of Artificial Sequence: Synthetic oligonucleotide
  Target: LAMA2; (+) strand; PAM type: YTN; PAM sequence: TTC
acgaatcaggtatgtatttt

SEQ ID NO: 326563 - DNA, 20 bp, Artificial Sequence
  Description of Artificial Sequence: Synthetic oligonucleotide
  Target: LAMA2; (+) strand; PAM type: YTN; PAM sequence: TTT
tgtgtatgtgtcaaacttag

SEQ ID NO: 326564 - DNA, 20 bp, Artificial Sequence
  Description of Artificial Sequence: Synthetic oligonucleotide
  Target: LAMA2; (+) strand; PAM type: YTN; PAM sequence: TTT
gtgtatgtgtcaaacttagc

SEQ ID NO: 326565 - DNA, 20 bp, Artificial Sequence
  Description of Artificial Sequence: Synthetic oligonucleotide
  Target: LAMA2; (+) strand; PAM type: YTN; PAM sequence: TTG
tgtatgtgtcaaacttagcc

SEQ ID NO: 326566 - DNA, 20 bp, Artificial Sequence
  Description of Artificial Sequence: Synthetic oligonucleotide
  Target: LAMA2; (+) strand; PAM type: YTN; PAM sequence: CTT
agccatcaactggaatttgt

SEQ ID NO: 326567 - DNA, 20 bp, Artificial Sequence
  Description of Artificial Sequence: Synthetic oligonucleotide
  Target: LAMA2; (+) strand; PAM type: YTN; PAM sequence: TTA
gccatcaactggaatttgtg

SEQ ID NO: 326568 - DNA, 20 bp, Artificial Sequence
  Description of Artificial Sequence: Synthetic oligonucleotide
  Target: LAMA2; (+) strand; PAM type: YTN; PAM sequence: CTG
gaatttgtgttttagtttgg

SEQ ID NO: 326569 - DNA, 20 bp, Artificial Sequence
  Description of Artificial Sequence: Synthetic oligonucleotide
  Target: LAMA2; (+) strand; PAM type: YTN; PAM sequence: TTT
gtgttttagtttggatgctg

SEQ ID NO: 326570 - DNA, 20 bp, Artificial Sequence
  Description of Artificial Sequence: Synthetic oligonucleotide
  Target: LAMA2; (+) strand; PAM type: YTN; PAM sequence: TTG
tgttttagtttggatgctga

SEQ ID NO: 326571 - DNA, 20 bp, Artificial Sequence
  Description of Artificial Sequence: Synthetic oligonucleotide
  Target: LAMA2; (+) strand; PAM type: YTN; PAM sequence: TTT
tagtttggatgctgatttac

SEQ ID NO: 326572 - DNA, 20 bp, Artificial Sequence
  Description of Artificial Sequence: Synthetic oligonucleotide
  Target: LAMA2; (+) strand; PAM type: YTN; PAM sequence: TTT
agtttggatgctgatttacc

SEQ ID NO: 326573 - DNA, 20 bp, Artificial Sequence
  Description of Artificial Sequence: Synthetic oligonucleotide
  Target: LAMA2; (+) strand; PAM type: YTN; PAM sequence: TTA
gtttggatgctgatttacct

SEQ ID NO: 326574 - DNA, 20 bp, Artificial Sequence
  Description of Artificial Sequence: Synthetic oligonucleotide
  Target: LAMA2; (+) strand; PAM type: YTN; PAM sequence: TTT
ggatgctgatttacctcatc

SEQ ID NO: 326575 - DNA, 20 bp, Artificial Sequence
  Description of Artificial Sequence: Synthetic oligonucleotide
  Target: LAMA2; (+) strand; PAM type: YTN; PAM sequence: TTG
gatgctgatttacctcatca

SEQ ID NO: 326576 - DNA, 20 bp, Artificial Sequence
  Description of Artificial Sequence: Synthetic oligonucleotide
  Target: LAMA2; (+) strand; PAM type: YTN; PAM sequence: CTG
atttacctcatcagtaaaat

SEQ ID NO: 326577 - DNA, 20 bp, Artificial Sequence
  Description of Artificial Sequence: Synthetic oligonucleotide
  Target: LAMA2; (+) strand; PAM type: YTN; PAM sequence: TTT
acctcatcagtaaaatgccc

SEQ ID NO: 326578 - DNA, 20 bp, Artificial Sequence
  Description of Artificial Sequence: Synthetic oligonucleotide
  Target: LAMA2; (+) strand; PAM type: YTN; PAM sequence: TTA
cctcatcagtaaaatgccct

SEQ ID NO: 326579 - DNA, 20 bp, Artificial Sequence
  Description of Artificial Sequence: Synthetic oligonucleotide
  Target: LAMA2; (+) strand; PAM type: YTN; PAM sequence: CTC
atcagtaaaatgcccttcac

SEQ ID NO: 326580 - DNA, 20 bp, Artificial Sequence
  Description of Artificial Sequence: Synthetic oligonucleotide
  Target: LAMA2; (+) strand; PAM type: YTN; PAM sequence: CTT
cacttactctccctagacat

SEQ ID NO: 326581 - DNA, 20 bp, Artificial Sequence
  Description of Artificial Sequence: Synthetic oligonucleotide
  Target: LAMA2; (+) strand; PAM type: YTN; PAM sequence: TTC
acttactctccctagacata

SEQ ID NO: 326582 - DNA, 20 bp, Artificial Sequence
  Description of Artificial Sequence: Synthetic oligonucleotide
  Target: LAMA2; (+) strand; PAM type: YTN; PAM sequence: CTT
actctccctagacatagact

SEQ ID NO: 326583 - DNA, 20 bp, Artificial Sequence
  Description of Artificial Sequence: Synthetic oligonucleotide
  Target: LAMA2; (+) strand; PAM type: YTN; PAM sequence: TTA
ctctccctagacatagacta

SEQ ID NO: 326584 - DNA, 20 bp, Artificial Sequence
  Description of Artificial Sequence: Synthetic oligonucleotide
  Target: LAMA2; (+) strand; PAM type: YTN; PAM sequence: CTC
tccctagacatagactattt

SEQ ID NO: 326585 - DNA, 20 bp, Artificial Sequence
  Description of Artificial Sequence: Synthetic oligonucleotide
  Target: LAMA2; (+) strand; PAM type: YTN; PAM sequence: CTC
cctagacatagactattttc

SEQ ID NO: 326586 - DNA, 20 bp, Artificial Sequence
  Description of Artificial Sequence: Synthetic oligonucleotide
  Target: LAMA2; (+) strand; PAM type: YTN; PAM sequence: CTA
gacatagactattttccgta

SEQ ID NO: 326587 - DNA, 20 bp, Artificial Sequence
  Description of Artificial Sequence: Synthetic oligonucleotide
  Target: LAMA2; (+) strand; PAM type: YTN; PAM sequence: CTA
ttttccgtaaaatatgttag

SEQ ID NO: 326588 - DNA, 20 bp, Artificial Sequence
  Description of Artificial Sequence: Synthetic oligonucleotide
  Target: LAMA2; (+) strand; PAM type: YTN; PAM sequence: TTT
tccgtaaaatatgttagtga

SEQ ID NO: 326589 - DNA, 20 bp, Artificial Sequence
  Description of Artificial Sequence: Synthetic oligonucleotide
  Target: LAMA2; (+) strand; PAM type: YTN; PAM sequence: TTT
ccgtaaaatatgttagtgat

SEQ ID NO: 326590 - DNA, 20 bp, Artificial Sequence
  Description of Artificial Sequence: Synthetic oligonucleotide
  Target: LAMA2; (+) strand; PAM type: YTN; PAM sequence: TTC
cgtaaaatatgttagtgatt

SEQ ID NO: 326591 - DNA, 20 bp, Artificial Sequence
  Description of Artificial Sequence: Synthetic oligonucleotide
  Target: LAMA2; (+) strand; PAM type: YTN; PAM sequence: TTA
gtgatttcatatttaatgtg

SEQ ID NO: 326592 - DNA, 20 bp, Artificial Sequence
  Description of Artificial Sequence: Synthetic oligonucleotide
  Target: LAMA2; (+) strand; PAM type: YTN; PAM sequence: TTT
catatttaatgtgatatgga

SEQ ID NO: 326593 - DNA, 20 bp, Artificial Sequence
  Description of Artificial Sequence: Synthetic oligonucleotide
  Target: LAMA2; (+) strand; PAM type: YTN; PAM sequence: TTC
atatttaatgtgatatggaa

SEQ ID NO: 326594 - DNA, 20 bp, Artificial Sequence
  Description of Artificial Sequence: Synthetic oligonucleotide
  Target: LAMA2; (+) strand; PAM type: YTN; PAM sequence: TTT
aatgtgatatggaatagaat

SEQ ID NO: 326595 - DNA, 20 bp, Artificial Sequence
  Description of Artificial Sequence: Synthetic oligonucleotide
  Target: LAMA2; (+) strand; PAM type: YTN; PAM sequence: TTA
atgtgatatggaatagaatg

SEQ ID NO: 326596 - DNA, 20 bp, Artificial Sequence
  Description of Artificial Sequence: Synthetic oligonucleotide
  Target: LAMA2; (+) strand; PAM type: YTN; PAM sequence: TTG
tgtgaaattaaaatcatgat

SEQ ID NO: 326597 - DNA, 20 bp, Artificial Sequence
  Description of Artificial Sequence: Synthetic oligonucleotide
  Target: LAMA2; (+) strand; PAM type: YTN; PAM sequence: TTA
aaatcatgatatcaattatc

SEQ ID NO: 326598 - DNA, 20 bp, Artificial Sequence
  Description of Artificial Sequence: Synthetic oligonucleotide
  Target: LAMA2; (+) strand; PAM type: YTN; PAM sequence: TTA
tctttctgtcatgcagaata

SEQ ID NO: 326599 - DNA, 20 bp, Artificial Sequence
  Description of Artificial Sequence: Synthetic oligonucleotide
  Target: LAMA2; (+) strand; PAM type: YTN; PAM sequence: CTT
tctgtcatgcagaataaaat

SEQ ID NO: 326600 - DNA, 20 bp, Artificial Sequence
  Description of Artificial Sequence: Synthetic oligonucleotide
  Target: LAMA2; (+) strand; PAM type: YTN; PAM sequence: TTT
ctgtcatgcagaataaaata

SEQ ID NO: 326601 - DNA, 20 bp, Artificial Sequence
  Description of Artificial Sequence: Synthetic oligonucleotide
  Target: LAMA2; (+) strand; PAM type: YTN; PAM sequence: TTC
tgtcatgcagaataaaataa

SEQ ID NO: 326602 - DNA, 20 bp, Artificial Sequence
  Description of Artificial Sequence: Synthetic oligonucleotide
  Target: LAMA2; (+) strand; PAM type: YTN; PAM sequence: CTG
tcatgcagaataaaataagt

SEQ ID NO: 326603 - DNA, 20 bp, Artificial Sequence
  Description of Artificial Sequence: Synthetic oligonucleotide
  Target: LAMA2; (+) strand; PAM type: YTN; PAM sequence: TTT
tgacaagatataaaaaatat

SEQ ID NO: 326604 - DNA, 20 bp, Artificial Sequence
  Description of Artificial Sequence: Synthetic oligonucleotide
  Target: LAMA2; (+) strand; PAM type: YTN; PAM sequence: TTT
gacaagatataaaaaatatt

SEQ ID NO: 326605 - DNA, 20 bp, Artificial Sequence
  Description of Artificial Sequence: Synthetic oligonucleotide
  Target: LAMA2; (+) strand; PAM type: YTN; PAM sequence: TTG
acaagatataaaaaatattt

SEQ ID NO: 326606 - DNA, 20 bp, Artificial Sequence
  Description of Artificial Sequence: Synthetic oligonucleotide
  Target: LAMA2; (+) strand; PAM type: YTN; PAM sequence: TTT
atggtaattaagtacattca

SEQ ID NO: 326607 - DNA, 20 bp, Artificial Sequence
  Description of Artificial Sequence: Synthetic oligonucleotide
  Target: LAMA2; (+) strand; PAM type: YTN; PAM sequence: TTA
tggtaattaagtacattcat

SEQ ID NO: 326608 - DNA, 20 bp, Artificial Sequence
  Description of Artificial Sequence: Synthetic oligonucleotide
  Target: LAMA2; (+) strand; PAM type: YTN; PAM sequence: TTA
agtacattcatactgtatca

SEQ ID NO: 326609 - DNA, 20 bp, Artificial Sequence
  Description of Artificial Sequence: Synthetic oligonucleotide
  Target: LAMA2; (+) strand; PAM type: YTN; PAM sequence: TTC
atactgtatcagctaaattt

SEQ ID NO: 326610 - DNA, 20 bp, Artificial Sequence
  Description of Artificial Sequence: Synthetic oligonucleotide
  Target: LAMA2; (+) strand; PAM type: YTN; PAM sequence: CTG
tatcagctaaatttgtagaa

SEQ ID NO: 326611 - DNA, 20 bp, Artificial Sequence
  Description of Artificial Sequence: Synthetic oligonucleotide
  Target: LAMA2; (+) strand; PAM type: YTN; PAM sequence: CTA
aatttgtagaatattgattt

SEQ ID NO: 326612 - DNA, 20 bp, Artificial Sequence
  Description of Artificial Sequence: Synthetic oligonucleotide
  Target: LAMA2; (+) strand; PAM type: YTN; PAM sequence: TTT
gtagaatattgatttctgta

SEQ ID NO: 326613 - DNA, 20 bp, Artificial Sequence
  Description of Artificial Sequence: Synthetic oligonucleotide
  Target: LAMA2; (+) strand; PAM type: YTN; PAM sequence: TTG
tagaatattgatttctgtat

SEQ ID NO: 326614 - DNA, 20 bp, Artificial Sequence
  Description of Artificial Sequence: Synthetic oligonucleotide
  Target: LAMA2; (+) strand; PAM type: YTN; PAM sequence: TTG
atttctgtattaaattatgt

SEQ ID NO: 326615 - DNA, 20 bp, Artificial Sequence
  Description of Artificial Sequence: Synthetic oligonucleotide
  Target: LAMA2; (+) strand; PAM type: YTN; PAM sequence: TTT
ctgtattaaattatgtaaca

SEQ ID NO: 326616 - DNA, 20 bp, Artificial Sequence
  Description of Artificial Sequence: Synthetic oligonucleotide
  Target: LAMA2; (+) strand; PAM type: YTN; PAM sequence: TTC
tgtattaaattatgtaacat

SEQ ID NO: 326617 - DNA, 20 bp, Artificial Sequence
  Description of Artificial Sequence: Synthetic oligonucleotide
  Target: LAMA2; (+) strand; PAM type: YTN; PAM sequence: CTG
tattaaattatgtaacattt

SEQ ID NO: 326618 - DNA, 20 bp, Artificial Sequence
  Description of Artificial Sequence: Synthetic oligonucleotide
  Target: LAMA2; (+) strand; PAM type: YTN; PAM sequence: TTA
aattatgtaacattttaatt

SEQ ID NO: 326619 - DNA, 20 bp, Artificial Sequence
  Description of Artificial Sequence: Synthetic oligonucleotide
  Target: LAMA2; (+) strand; PAM type: YTN; PAM sequence: TTA
tgtaacattttaattaaaat

SEQ ID NO: 326620 - DNA, 20 bp, Artificial Sequence
  Description of Artificial Sequence: Synthetic oligonucleotide
  Target: LAMA2; (+) strand; PAM type: YTN; PAM sequence: TTT
taattaaaataaatatattg

SEQ ID NO: 326621 - DNA, 20 bp, Artificial Sequence
  Description of Artificial Sequence: Synthetic oligonucleotide
  Target: LAMA2; (+) strand; PAM type: YTN; PAM sequence: TTT
aattaaaataaatatattgt

SEQ ID NO: 326622 - DNA, 20 bp, Artificial Sequence
  Description of Artificial Sequence: Synthetic oligonucleotide
  Target: LAMA2; (+) strand; PAM type: YTN; PAM sequence: TTA
attaaaataaatatattgtc

SEQ ID NO: 326623 - DNA, 20 bp, Artificial Sequence
  Description of Artificial Sequence: Synthetic oligonucleotide
  Target: LAMA2; (+) strand; PAM type: YTN; PAM sequence: TTA
aaataaatatattgtcgagt

SEQ ID NO: 326624 - DNA, 20 bp, Artificial Sequence
  Description of Artificial Sequence: Synthetic oligonucleotide
  Target: LAMA2; (+) strand; PAM type: YTN; PAM sequence: TTG
tcgagttgtgagcagcacag

SEQ ID NO: 326625 - DNA, 20 bp, Artificial Sequence
  Description of Artificial Sequence: Synthetic oligonucleotide
  Target: LAMA2; (+) strand; PAM type: YTN; PAM sequence: TTG
tgagcagcacagtggtaaga

SEQ ID NO: 326626 - DNA, 20 bp, Artificial Sequence
  Description of Artificial Sequence: Synthetic oligonucleotide
  Target: LAMA2; (+) strand; PAM type: YTN; PAM sequence: TTT
tgcatgaagatggttacata

SEQ ID NO: 326627 - DNA, 20 bp, Artificial Sequence
  Description of Artificial Sequence: Synthetic oligonucleotide
  Target: LAMA2; (+) strand; PAM type: YTN; PAM sequence: TTT
gcatgaagatggttacataa

SEQ ID NO: 326628 - DNA, 20 bp, Artificial Sequence
  Description of Artificial Sequence: Synthetic oligonucleotide
  Target: LAMA2; (+) strand; PAM type: YTN; PAM sequence: TTG
catgaagatggttacataaa

SEQ ID NO: 326629 - DNA, 20 bp, Artificial Sequence
  Description of Artificial Sequence: Synthetic oligonucleotide
  Target: LAMA2; (+) strand; PAM type: YTN; PAM sequence: TTA
cataaatatgcactaaaatt

SEQ ID NO: 326630 - DNA, 20 bp, Artificial Sequence
  Description of Artificial Sequence: Synthetic oligonucleotide
  Target: LAMA2; (+) strand; PAM type: YTN; PAM sequence: CTA
aaattgagtctaactgcaaa

SEQ ID NO: 326631 - DNA, 20 bp, Artificial Sequence
  Description of Artificial Sequence: Synthetic oligonucleotide
  Target: LAMA2; (+) strand; PAM type: YTN; PAM sequence: TTG
agtctaactgcaaaaaaatg

SEQ ID NO: 326632 - DNA, 20 bp, Artificial Sequence
  Description of Artificial Sequence: Synthetic oligonucleotide
  Target: LAMA2; (+) strand; PAM type: YTN; PAM sequence: CTA
actgcaaaaaaatgaatgca

SEQ ID NO: 326633 - DNA, 20 bp, Artificial Sequence
  Description of Artificial Sequence: Synthetic oligonucleotide
  Target: LAMA2; (+) strand; PAM type: YTN; PAM sequence: CTG
caaaaaaatgaatgcagtag

SEQ ID NO: 326634 - DNA, 20 bp, Artificial Sequence
  Description of Artificial Sequence: Synthetic oligonucleotide
  Target: LAMA2; (+) strand; PAM type: YTN; PAM sequence: CTA
cacatttagaaagaagttct

SEQ ID NO: 326635 - DNA, 20 bp, Artificial Sequence
  Description of Artificial Sequence: Synthetic oligonucleotide
  Target: LAMA2; (+) strand; PAM type: YTN; PAM sequence: TTT
agaaagaagttctaagaata

SEQ ID NO: 326636 - DNA, 20 bp, Artificial Sequence
  Description of Artificial Sequence: Synthetic oligonucleotide
  Target: LAMA2; (+) strand; PAM type: YTN; PAM sequence: TTA
gaaagaagttctaagaataa

SEQ ID NO: 326637 - DNA, 20 bp, Artificial Sequence
  Description of Artificial Sequence: Synthetic oligonucleotide
  Target: LAMA2; (+) strand; PAM type: YTN; PAM sequence: TTC
taagaataaagcagtttaca

SEQ ID NO: 326638 - DNA, 20 bp, Artificial Sequence
  Description of Artificial Sequence: Synthetic oligonucleotide
  Target: LAMA2; (+) strand; PAM type: YTN; PAM sequence: CTA
agaataaagcagtttacaaa

SEQ ID NO: 326639 - DNA, 20 bp, Artificial Sequence
  Description of Artificial Sequence: Synthetic oligonucleotide
  Target: LAMA2; (+) strand; PAM type: YTN; PAM sequence: TTT
acaaacaaatagtatatata

SEQ ID NO: 326640 - DNA, 20 bp, Artificial Sequence
  Description of Artificial Sequence: Synthetic oligonucleotide
  Target: LAMA2; (+) strand; PAM type: YTN; PAM sequence: TTA
caaacaaatagtatatatac

SEQ ID NO: 326641 - DNA, 20 bp, Artificial Sequence
  Description of Artificial Sequence: Synthetic oligonucleotide
  Target: LAMA2; (+) strand; PAM type: YTN; PAM sequence: CTT
tgttagaagaaagagaattt

SEQ ID NO: 326642 - DNA, 20 bp, Artificial Sequence
  Description of Artificial Sequence: Synthetic oligonucleotide
  Target: LAMA2; (+) strand; PAM type: YTN; PAM sequence: TTT
gttagaagaaagagaattta

SEQ ID NO: 326643 - DNA, 20 bp, Artificial Sequence
  Description of Artificial Sequence: Synthetic oligonucleotide
  Target: LAMA2; (+) strand; PAM type: YTN; PAM sequence: TTG
ttagaagaaagagaatttat

SEQ ID NO: 326644 - DNA, 20 bp, Artificial Sequence
  Description of Artificial Sequence: Synthetic oligonucleotide
  Target: LAMA2; (+) strand; PAM type: YTN; PAM sequence: TTA
gaagaaagagaatttattgt

SEQ ID NO: 326645 - DNA, 20 bp, Artificial Sequence
  Description of Artificial Sequence: Synthetic oligonucleotide
  Target: LAMA2; (+) strand; PAM type: YTN; PAM sequence: TTT
attgtgagtgggatacttta

SEQ ID NO: 326646 - DNA, 20 bp, Artificial Sequence
  Description of Artificial Sequence: Synthetic oligonucleotide
  Target: LAMA2; (+) strand; PAM type: YTN; PAM sequence: TTA
ttgtgagtgggatactttaa

SEQ ID NO: 326647 - DNA, 20 bp, Artificial Sequence
  Description of Artificial Sequence: Synthetic oligonucleotide
  Target: LAMA2; (+) strand; PAM type: YTN; PAM sequence: TTG
tgagtgggatactttaactc

SEQ ID NO: 326648 - DNA, 20 bp, Artificial Sequence
  Description of Artificial Sequence: Synthetic oligonucleotide
  Target: LAMA2; (+) strand; PAM type: YTN; PAM sequence: CTT
taactctttcagatgttaag

SEQ ID NO: 326649 - DNA, 20 bp, Artificial Sequence
  Description of Artificial Sequence: Synthetic oligonucleotide
  Target: LAMA2; (+) strand; PAM type: YTN; PAM sequence: TTT
aactctttcagatgttaagg

SEQ ID NO: 326650 - DNA, 20 bp, Artificial Sequence
  Description of Artificial Sequence: Synthetic oligonucleotide
  Target: LAMA2; (+) strand; PAM type: YTN; PAM sequence: TTA
actctttcagatgttaagga

SEQ ID NO: 326651 - DNA, 20 bp, Artificial Sequence
  Description of Artificial Sequence: Synthetic oligonucleotide
  Target: LAMA2; (+) strand; PAM type: YTN; PAM sequence: CTC
tttcagatgttaaggattct

SEQ ID NO: 326652 - DNA, 20 bp, Artificial Sequence
  Description of Artificial Sequence: Synthetic oligonucleotide
  Target: LAMA2; (+) strand; PAM type: YTN; PAM sequence: CTT
tcagatgttaaggattctat

SEQ ID NO: 326653 - DNA, 20 bp, Artificial Sequence
  Description of Artificial Sequence: Synthetic oligonucleotide
  Target: LAMA2; (+) strand; PAM type: YTN; PAM sequence: TTT
cagatgttaaggattctatt

SEQ ID NO: 326654 - DNA, 20 bp, Artificial Sequence
  Description of Artificial Sequence: Synthetic oligonucleotide
  Target: LAMA2; (+) strand; PAM type: YTN; PAM sequence: TTC
agatgttaaggattctattt

SEQ ID NO: 326655 - DNA, 20 bp, Artificial Sequence
  Description of Artificial Sequence: Synthetic oligonucleotide
  Target: LAMA2; (+) strand; PAM type: YTN; PAM sequence: TTA
aggattctatttcccaaata

SEQ ID NO: 326656 - DNA, 20 bp, Artificial Sequence
  Description of Artificial Sequence: Synthetic oligonucleotide
  Target: LAMA2; (+) strand; PAM type: YTN; PAM sequence: TTC
tatttcccaaataacttcat

SEQ ID NO: 326657 - DNA, 20 bp, Artificial Sequence
  Description of Artificial Sequence: Synthetic oligonucleotide
  Target: LAMA2; (+) strand; PAM type: YTN; PAM sequence: CTA
tttcccaaataacttcattc

SEQ ID NO: 326658 - DNA, 20 bp, Artificial Sequence
  Description of Artificial Sequence: Synthetic oligonucleotide
  Target: LAMA2; (+) strand; PAM type: YTN; PAM sequence: TTT
cccaaataacttcattcatg

SEQ ID NO: 326659 - DNA, 20 bp, Artificial Sequence
  Description of Artificial Sequence: Synthetic oligonucleotide
  Target: LAMA2; (+) strand; PAM type: YTN; PAM sequence: TTC
ccaaataacttcattcatgt

SEQ ID NO: 326660 - DNA, 20 bp, Artificial Sequence
  Description of Artificial Sequence: Synthetic oligonucleotide
  Target: LAMA2; (+) strand; PAM type: YTN; PAM sequence: CTT
cattcatgtaagaagtatat

SEQ ID NO: 326661 - DNA, 20 bp, Artificial Sequence
  Description of Artificial Sequence: Synthetic oligonucleotide
  Target: LAMA2; (+) strand; PAM type: YTN; PAM sequence: TTC
attcatgtaagaagtatatt

SEQ ID NO: 326662 - DNA, 20 bp, Artificial Sequence
  Description of Artificial Sequence: Synthetic oligonucleotide
  Target: LAMA2; (+) strand; PAM type: YTN; PAM sequence: TTC
atgtaagaagtatatttcat

SEQ ID NO: 326663 - DNA, 20 bp, Artificial Sequence
  Description of Artificial Sequence: Synthetic oligonucleotide
  Target: LAMA2; (+) strand; PAM type: YTN; PAM sequence: TTT
catgtgagtcaggttttatt

SEQ ID NO: 326664 - DNA, 20 bp, Artificial Sequence
  Description of Artificial Sequence: Synthetic oligonucleotide
  Target: LAMA2; (+) strand; PAM type: YTN; PAM sequence: TTC
atgtgagtcaggttttattc

SEQ ID NO: 326665 - DNA, 20 bp, Artificial Sequence
  Description of Artificial Sequence: Synthetic oligonucleotide
  Target: LAMA2; (+) strand; PAM type: YTN; PAM sequence: TTT
tattctctaggtgttttcta

SEQ ID NO: 326666 - DNA, 20 bp, Artificial Sequence
  Description of Artificial Sequence: Synthetic oligonucleotide
  Target: LAMA2; (+) strand; PAM type: YTN; PAM sequence: TTT
attctctaggtgttttctaa

SEQ ID NO: 326667 - DNA, 20 bp, Artificial Sequence
  Description of Artificial Sequence: Synthetic oligonucleotide
  Target: LAMA2; (+) strand; PAM type: YTN; PAM sequence: TTA
ttctctaggtgttttctaat

SEQ ID NO: 326668 - DNA, 20 bp, Artificial Sequence
  Description of Artificial Sequence: Synthetic oligonucleotide
  Target: LAMA2; (+) strand; PAM type: YTN; PAM sequence: TTC
tctaggtgttttctaatgtg

SEQ ID NO: 326669 - DNA, 20 bp, Artificial Sequence
  Description of Artificial Sequence: Synthetic oligonucleotide
  Target: LAMA2; (+) strand; PAM type: YTN; PAM sequence: CTC
taggtgttttctaatgtggg

SEQ ID NO: 326670 - DNA, 20 bp, Artificial Sequence
  Description of Artificial Sequence: Synthetic oligonucleotide
  Target: LAMA2; (+) strand; PAM type: YTN; PAM sequence: CTA
ggtgttttctaatgtgggaa

SEQ ID NO: 326671 - DNA, 20 bp, Artificial Sequence
  Description of Artificial Sequence: Synthetic oligonucleotide
  Target: LAMA2; (+) strand; PAM type: YTN; PAM sequence: TTT
tctaatgtgggaaagtgaaa

SEQ ID NO: 326672 - DNA, 20 bp, Artificial Sequence
  Description of Artificial Sequence: Synthetic oligonucleotide
  Target: LAMA2; (+) strand; PAM type: YTN; PAM sequence: TTT
ctaatgtgggaaagtgaaat

SEQ ID NO: 326673 - DNA, 20 bp, Artificial Sequence
  Description of Artificial Sequence: Synthetic oligonucleotide
  Target: LAMA2; (+) strand; PAM type: YTN; PAM sequence: TTC
taatgtgggaaagtgaaata

SEQ ID NO: 326674 - DNA, 20 bp, Artificial Sequence
  Description of Artificial Sequence: Synthetic oligonucleotide
  Target: LAMA2; (+) strand; PAM type: YTN; PAM sequence: CTA
atgtgggaaagtgaaataca

SEQ ID NO: 326675 - DNA, 20 bp, Artificial Sequence
  Description of Artificial Sequence: Synthetic oligonucleotide
  Target: LAMA2; (+) strand; PAM type: YTN; PAM sequence: TTT
gaaatggttctggggatgca

SEQ ID NO: 326676 - DNA, 20 bp, Artificial Sequence
  Description of Artificial Sequence: Synthetic oligonucleotide
  Target: LAMA2; (+) strand; PAM type: YTN; PAM sequence: TTG
aaatggttctggggatgcag

SEQ ID NO: 326677 - DNA, 20 bp, Artificial Sequence
  Description of Artificial Sequence: Synthetic oligonucleotide
  Target: LAMA2; (+) strand; PAM type: YTN; PAM sequence: TTC
tggggatgcagtctttcctg

SEQ ID NO: 326678 - DNA, 20 bp, Artificial Sequence
  Description of Artificial Sequence: Synthetic oligonucleotide
  Target: LAMA2; (+) strand; PAM type: YTN; PAM sequence: CTG
gggatgcagtctttcctgtc

SEQ ID NO: 326679 - DNA, 20 bp, Artificial Sequence
  Description of Artificial Sequence: Synthetic oligonucleotide
  Target: LAMA2; (+) strand; PAM type: YTN; PAM sequence: CTT
tcctgtcagattccagcaga

SEQ ID NO: 326680 - DNA, 20 bp, Artificial Sequence
  Description of Artificial Sequence: Synthetic oligonucleotide
  Target: LAMA2; (+) strand; PAM type: YTN; PAM sequence: TTT
cctgtcagattccagcagat

SEQ ID NO: 326681 - DNA, 20 bp, Artificial Sequence
  Description of Artificial Sequence: Synthetic oligonucleotide
  Target: LAMA2; (+) strand; PAM type: YTN; PAM sequence: TTC
ctgtcagattccagcagatg

SEQ ID NO: 326682 - DNA, 20 bp, Artificial Sequence
  Description of Artificial Sequence: Synthetic oligonucleotide
  Target: LAMA2; (+) strand; PAM type: YTN; PAM sequence: CTG
tcagattccagcagatgctg

SEQ ID NO: 326683 - DNA, 20 bp, Artificial Sequence
  Description of Artificial Sequence: Synthetic oligonucleotide
  Target: LAMA2; (+) strand; PAM type: YTN; PAM sequence: TTC
cagcagatgctgatataatt

SEQ ID NO: 326684 - DNA, 20 bp, Artificial Sequence
  Description of Artificial Sequence: Synthetic oligonucleotide
  Target: LAMA2; (+) strand; PAM type: YTN; PAM sequence: CTG
atataatttaatattcgtgg

SEQ ID NO: 326685 - DNA, 20 bp, Artificial Sequence
  Description of Artificial Sequence: Synthetic oligonucleotide
  Target: LAMA2; (+) strand; PAM type: YTN; PAM sequence: TTT
aatattcgtggaagacaggg

SEQ ID NO: 326686 - DNA, 20 bp, Artificial Sequence
  Description of Artificial Sequence: Synthetic oligonucleotide
  Target: LAMA2; (+) strand; PAM type: YTN; PAM sequence: TTA
atattcgtggaagacagggc

SEQ ID NO: 326687 - DNA, 20 bp, Artificial Sequence
  Description of Artificial Sequence: Synthetic oligonucleotide
  Target: LAMA2; (+) strand; PAM type: YTN; PAM sequence: TTC
gtggaagacagggcaaatat

SEQ ID NO: 326688 - DNA, 20 bp, Artificial Sequence
  Description of Artificial Sequence: Synthetic oligonucleotide
  Target: LAMA2; (+) strand; PAM type: YTN; PAM sequence: TTG
attttgcagagttttcaagc

SEQ ID NO: 326689 - DNA, 20 bp, Artificial Sequence
  Description of Artificial Sequence: Synthetic oligonucleotide
  Target: LAMA2; (+) strand; PAM type: YTN; PAM sequence: TTT
tgcagagttttcaagccaga

SEQ ID NO: 326690 - DNA, 20 bp, Artificial Sequence
  Description of Artificial Sequence: Synthetic oligonucleotide
  Target: LAMA2; (+) strand; PAM type: YTN; PAM sequence: TTT
gcagagttttcaagccagat

SEQ ID NO: 326691 - DNA, 20 bp, Artificial Sequence
  Description of Artificial Sequence: Synthetic oligonucleotide
  Target: LAMA2; (+) strand; PAM type: YTN; PAM sequence: TTG
cagagttttcaagccagatg

SEQ ID NO: 326692 - DNA, 20 bp, Artificial Sequence
  Description of Artificial Sequence: Synthetic oligonucleotide
  Target: LAMA2; (+) strand; PAM type: YTN; PAM sequence: TTT
tcaagccagatgtcccttgg

SEQ ID NO: 326693 - DNA, 20 bp, Artificial Sequence
  Description of Artificial Sequence: Synthetic oligonucleotide
  Target: LAMA2; (+) strand; PAM type: YTN; PAM sequence: TTT
caagccagatgtcccttggc

SEQ ID NO: 326694 - DNA, 20 bp, Artificial Sequence
  Description of Artificial Sequence: Synthetic oligonucleotide
  Target: LAMA2; (+) strand; PAM type: YTN; PAM sequence: TTC
aagccagatgtcccttggca

SEQ ID NO: 326695 - DNA, 20 bp, Artificial Sequence
  Description of Artificial Sequence: Synthetic oligonucleotide
  Target: LAMA2; (+) strand; PAM type: YTN; PAM sequence: CTT
ggcatttacatggaagaagt

SEQ ID NO: 326696 - DNA, 20 bp, Artificial Sequence
  Description of Artificial Sequence: Synthetic oligonucleotide
  Target: LAMA2; (+) strand; PAM type: YTN; PAM sequence: TTG
gcatttacatggaagaagtc

SEQ ID NO: 326697 - DNA, 20 bp, Artificial Sequence
  Description of Artificial Sequence: Synthetic oligonucleotide
  Target: LAMA2; (+) strand; PAM type: YTN; PAM sequence: TTT
acatggaagaagtctactgt

SEQ ID NO: 326698 - DNA, 20 bp, Artificial Sequence
  Description of Artificial Sequence: Synthetic oligonucleotide
  Target: LAMA2; (+) strand; PAM type: YTN; PAM sequence: TTA
catggaagaagtctactgtg

SEQ ID NO: 326699 - DNA, 20 bp, Artificial Sequence
  Description of Artificial Sequence: Synthetic oligonucleotide
  Target: LAMA2; (+) strand; PAM type: YTN; PAM sequence: CTA
ctgtgtaccaagttgcatat

SEQ ID NO: 326700 - DNA, 20 bp, Artificial Sequence
  Description of Artificial Sequence: Synthetic oligonucleotide
  Target: LAMA2; (+) strand; PAM type: YTN; PAM sequence: CTG
tgtaccaagttgcatatttt

SEQ ID NO: 326701 - DNA, 20 bp, Artificial Sequence
  Description of Artificial Sequence: Synthetic oligonucleotide
  Target: LAMA2; (+) strand; PAM type: YTN; PAM sequence: TTG
catatttttgtgtgtaagtt

SEQ ID NO: 326702 - DNA, 20 bp, Artificial Sequence
  Description of Artificial Sequence: Synthetic oligonucleotide
  Target: LAMA2; (+) strand; PAM type: YTN; PAM sequence: TTT
ttgtgtgtaagttctcagcc

SEQ ID NO: 326703 - DNA, 20 bp, Artificial Sequence
  Description of Artificial Sequence: Synthetic oligonucleotide
  Target: LAMA2; (+) strand; PAM type: YTN; PAM sequence: TTT
tgtgtgtaagttctcagcca

SEQ ID NO: 326704 - DNA, 20 bp, Artificial Sequence
  Description of Artificial Sequence: Synthetic oligonucleotide
  Target: LAMA2; (+) strand; PAM type: YTN; PAM sequence: TTT
gtgtgtaagttctcagccat

SEQ ID NO: 326705 - DNA, 20 bp, Artificial Sequence
  Description of Artificial Sequence: Synthetic oligonucleotide
  Target: LAMA2; (+) strand; PAM type: YTN; PAM sequence: TTG
tgtgtaagttctcagccatg

SEQ ID NO: 326706 - DNA, 20 bp, Artificial Sequence
  Description of Artificial Sequence: Synthetic oligonucleotide
  Target: LAMA2; (+) strand; PAM type: YTN; PAM sequence: TTC
tcagccatggtatgtagtca

SEQ ID NO: 326707 - DNA, 20 bp, Artificial Sequence
  Description of Artificial Sequence: Synthetic oligonucleotide
  Target: LAMA2; (+) strand; PAM type: YTN; PAM sequence: CTC
agccatggtatgtagtcatt

SEQ ID NO: 326708 - DNA, 20 bp, Artificial Sequence
  Description of Artificial Sequence: Synthetic oligonucleotide
  Target: LAMA2; (+) strand; PAM type: YTN; PAM sequence: TTG
gtgttttgacagccatctgc

SEQ ID NO: 326709 - DNA, 20 bp, Artificial Sequence
  Description of Artificial Sequence: Synthetic oligonucleotide
  Target: LAMA2; (+) strand; PAM type: YTN; PAM sequence: TTT
tgacagccatctgctcagac

SEQ ID NO: 326710 - DNA, 20 bp, Artificial Sequence
  Description of Artificial Sequence: Synthetic oligonucleotide
  Target: LAMA2; (+) strand; PAM type: YTN; PAM sequence: TTT
gacagccatctgctcagacc

SEQ ID NO: 326711 - DNA, 20 bp, Artificial Sequence
  Description of Artificial Sequence: Synthetic oligonucleotide
  Target: LAMA2; (+) strand; PAM type: YTN; PAM sequence: TTG
acagccatctgctcagacct

SEQ ID NO: 326712 - DNA, 20 bp, Artificial Sequence
  Description of Artificial Sequence: Synthetic oligonucleotide
  Target: LAMA2; (+) strand; PAM type: YTN; PAM sequence: CTG
ctcagacctttatttctctg

SEQ ID NO: 326713 - DNA, 20 bp, Artificial Sequence
  Description of Artificial Sequence: Synthetic oligonucleotide
  Target: LAMA2; (+) strand; PAM type: YTN; PAM sequence: CTC
agacctttatttctctgttc

SEQ ID NO: 326714 - DNA, 20 bp, Artificial Sequence
  Description of Artificial Sequence: Synthetic oligonucleotide
  Target: LAMA2; (+) strand; PAM type: YTN; PAM sequence: CTT
tatttctctgttcagccata

SEQ ID NO: 326715 - DNA, 20 bp, Artificial Sequence
  Description of Artificial Sequence: Synthetic oligonucleotide
  Target: LAMA2; (+) strand; PAM type: YTN; PAM sequence: TTT
atttctctgttcagccataa

SEQ ID NO: 326716 - DNA, 20 bp, Artificial Sequence
  Description of Artificial Sequence: Synthetic oligonucleotide
  Target: LAMA2; (+) strand; PAM type: YTN; PAM sequence: TTA
tttctctgttcagccataac

SEQ ID NO: 326717 - DNA, 20 bp, Artificial Sequence
  Description of Artificial Sequence: Synthetic oligonucleotide
  Target: LAMA2; (+) strand; PAM type: YTN; PAM sequence: TTT
ctctgttcagccataactaa

SEQ ID NO: 326718 - DNA, 20 bp, Artificial Sequence
  Description of Artificial Sequence: Synthetic oligonucleotide
  Target: LAMA2; (+) strand; PAM type: YTN; PAM sequence: TTC
tctgttcagccataactaaa

SEQ ID NO: 326719 - DNA, 20 bp, Artificial Sequence
  Description of Artificial Sequence: Synthetic oligonucleotide
  Target: LAMA2; (+) strand; PAM type: YTN; PAM sequence: CTC
tgttcagccataactaaaat

SEQ ID NO: 326720 - DNA, 20 bp, Artificial Sequence
  Description of Artificial Sequence: Synthetic oligonucleotide
  Target: LAMA2; (+) strand; PAM type: YTN; PAM sequence: CTG
ttcagccataactaaaattg

SEQ ID NO: 326721 - DNA, 20 bp, Artificial Sequence
  Description of Artificial Sequence: Synthetic oligonucleotide
  Target: LAMA2; (+) strand; PAM type: YTN; PAM sequence: TTC
agccataactaaaattgaac

SEQ ID NO: 326722 - DNA, 20 bp, Artificial Sequence
  Description of Artificial Sequence: Synthetic oligonucleotide
  Target: LAMA2; (+) strand; PAM type: YTN; PAM sequence: CTA
aaattgaacatttttcaaat

SEQ ID NO: 326723 - DNA, 20 bp, Artificial Sequence
  Description of Artificial Sequence: Synthetic oligonucleotide
  Target: LAMA2; (+) strand; PAM type: YTN; PAM sequence: TTG
aacatttttcaaatgttcca

SEQ ID NO: 326724 - DNA, 20 bp, Artificial Sequence
  Description of Artificial Sequence: Synthetic oligonucleotide
  Target: LAMA2; (+) strand; PAM type: YTN; PAM sequence: TTT
ttcaaatgttccaggtagtt

SEQ ID NO: 326725 - DNA, 20 bp, Artificial Sequence
  Description of Artificial Sequence: Synthetic oligonucleotide
  Target: LAMA2; (+) strand; PAM type: YTN; PAM sequence: TTT
tcaaatgttccaggtagttt

SEQ ID NO: 326726 - DNA, 20 bp, Artificial Sequence
  Description of Artificial Sequence: Synthetic oligonucleotide
  Target: LAMA2; (+) strand; PAM type: YTN; PAM sequence: TTT
caaatgttccaggtagtttc

SEQ ID NO: 326727 - DNA, 20 bp, Artificial Sequence
  Description of Artificial Sequence: Synthetic oligonucleotide
  Target: LAMA2; (+) strand; PAM type: YTN; PAM sequence: TTC
aaatgttccaggtagtttca

SEQ ID NO: 326728 - DNA, 20 bp, Artificial Sequence
  Description of Artificial Sequence: Synthetic oligonucleotide
  Target: LAMA2; (+) strand; PAM type: YTN; PAM sequence: TTC
caggtagtttcaattttaag

SEQ ID NO: 326729 - DNA, 20 bp, Artificial Sequence
  Description of Artificial Sequence: Synthetic oligonucleotide
  Target: LAMA2; (+) strand; PAM type: YTN; PAM sequence: TTT
caattttaagataacagaaa

SEQ ID NO: 326730 - DNA, 20 bp, Artificial Sequence
  Description of Artificial Sequence: Synthetic oligonucleotide
  Target: LAMA2; (+) strand; PAM type: YTN; PAM sequence: TTC
aattttaagataacagaaaa

SEQ ID NO: 326731 - DNA, 20 bp, Artificial Sequence
  Description of Artificial Sequence: Synthetic oligonucleotide
  Target: LAMA2; (+) strand; PAM type: YTN; PAM sequence: TTT
taagataacagaaaactagt

SEQ ID NO: 326732 - DNA, 20 bp, Artificial Sequence
  Description of Artificial Sequence: Synthetic oligonucleotide
  Target: LAMA2; (+) strand; PAM type: YTN; PAM sequence: TTT
aagataacagaaaactagta

SEQ ID NO: 326733 - DNA, 20 bp, Artificial Sequence
  Description of Artificial Sequence: Synthetic oligonucleotide
  Target: LAMA2; (+) strand; PAM type: YTN; PAM sequence: TTA
agataacagaaaactagtat

SEQ ID NO: 326734 - DNA, 20 bp, Artificial Sequence
  Description of Artificial Sequence: Synthetic oligonucleotide
  Target: LAMA2; (+) strand; PAM type: YTN; PAM sequence: CTA
gtattcaatggttaaaaaga

SEQ ID NO: 326735 - DNA, 20 bp, Artificial Sequence
  Description of Artificial Sequence: Synthetic oligonucleotide
  Target: LAMA2; (+) strand; PAM type: YTN; PAM sequence: TTC
aatggttaaaaagaaaaaaa

SEQ ID NO: 326736 - DNA, 20 bp, Artificial Sequence
  Description of Artificial Sequence: Synthetic oligonucleotide
  Target: LAMA2; (+) strand; PAM type: YTN; PAM sequence: TTA
aaaagaaaaaaagcaatacc

SEQ ID NO: 326737 - DNA, 20 bp, Artificial Sequence
  Description of Artificial Sequence: Synthetic oligonucleotide
  Target: LAMA2; (+) strand; PAM type: YTN; PAM sequence: CTA
tctttggcttagtaataacc

SEQ ID NO: 326738 - DNA, 20 bp, Artificial Sequence
  Description of Artificial Sequence: Synthetic oligonucleotide
  Target: LAMA2; (+) strand; PAM type: YTN; PAM sequence: CTT
tggcttagtaataaccccta

SEQ ID NO: 326739 - DNA, 20 bp, Artificial Sequence
  Description of Artificial Sequence: Synthetic oligonucleotide
  Target: LAMA2; (+) strand; PAM type: YTN; PAM sequence: TTT
ggcttagtaataacccctaa

SEQ ID NO: 326740 - DNA, 20 bp, Artificial Sequence
  Description of Artificial Sequence: Synthetic oligonucleotide
  Target: LAMA2; (+) strand; PAM type: YTN; PAM sequence: TTG
gcttagtaataacccctaaa

SEQ ID NO: 326741 - DNA, 20 bp, Artificial Sequence
  Description of Artificial Sequence: Synthetic oligonucleotide
  Target: LAMA2; (+) strand; PAM type: YTN; PAM sequence: CTT
agtaataacccctaaattga

SEQ ID NO: 326742 - DNA, 20 bp, Artificial Sequence
  Description of Artificial Sequence: Synthetic oligonucleotide
  Target: LAMA2; (+) strand; PAM type: YTN; PAM sequence: TTA
gtaataacccctaaattgaa

SEQ ID NO: 326743 - DNA, 20 bp, Artificial Sequence
  Description of Artificial Sequence: Synthetic oligonucleotide
  Target: LAMA2; (+) strand; PAM type: YTN; PAM sequence: CTA
aattgaaagttaatttctta

SEQ ID NO: 326744 - DNA, 20 bp, Artificial Sequence
  Description of Artificial Sequence: Synthetic oligonucleotide
  Target: LAMA2; (+) strand; PAM type: YTN; PAM sequence: TTG
aaagttaatttcttataaat

SEQ ID NO: 326745 - DNA, 20 bp, Artificial Sequence
  Description of Artificial Sequence: Synthetic oligonucleotide
  Target: LAMA2; (+) strand; PAM type: YTN; PAM sequence: TTA
atttcttataaatagcagtg

SEQ ID NO: 326746 - DNA, 20 bp, Artificial Sequence
  Description of Artificial Sequence: Synthetic oligonucleotide
  Target: LAMA2; (+) strand; PAM type: YTN; PAM sequence: TTT
cttataaatagcagtgcaaa

SEQ ID NO: 326747 - DNA, 20 bp, Artificial Sequence
  Description of Artificial Sequence: Synthetic oligonucleotide
  Target: LAMA2; (+) strand; PAM type: YTN; PAM sequence: TTC
ttataaatagcagtgcaaaa

SEQ ID NO: 326748 - DNA, 20 bp, Artificial Sequence
  Description of Artificial Sequence: Synthetic oligonucleotide
  Target: LAMA2; (+) strand; PAM type: YTN; PAM sequence: CTT
ataaatagcagtgcaaaatg

SEQ ID NO: 326749 - DNA, 20 bp, Artificial Sequence
  Description of Artificial Sequence: Synthetic oligonucleotide
  Target: LAMA2; (+) strand; PAM type: YTN; PAM sequence: TTA
taaatagcagtgcaaaatga

SEQ ID NO: 326750 - DNA, 20 bp, Artificial Sequence
  Description of Artificial Sequence: Synthetic oligonucleotide
  Target: LAMA2; (+) strand; PAM type: YTN; PAM sequence: CTT
tgagaacagaggcctcacct

SEQ ID NO: 326751 - DNA, 20 bp, Artificial Sequence
  Description of Artificial Sequence: Synthetic oligonucleotide
  Target: LAMA2; (+) strand; PAM type: YTN; PAM sequence: TTT
gagaacagaggcctcacctt

SEQ ID NO: 326752 - DNA, 20 bp, Artificial Sequence
  Description of Artificial Sequence: Synthetic oligonucleotide
  Target: LAMA2; (+) strand; PAM type: YTN; PAM sequence: TTG
agaacagaggcctcacctta

SEQ ID NO: 326753 - DNA, 20 bp, Artificial Sequence
  Description of Artificial Sequence: Synthetic oligonucleotide
  Target: LAMA2; (+) strand; PAM type: YTN; PAM sequence: CTC
accttattatcaaatgagtt

SEQ ID NO: 326754 - DNA, 20 bp, Artificial Sequence
  Description of Artificial Sequence: Synthetic oligonucleotide
  Target: LAMA2; (+) strand; PAM type: YTN; PAM sequence: CTT
attatcaaatgagtttgttt

SEQ ID NO: 326755 - DNA, 20 bp, Artificial Sequence
  Description of Artificial Sequence: Synthetic oligonucleotide
  Target: LAMA2; (+) strand; PAM type: YTN; PAM sequence: TTA
ttatcaaatgagtttgtttt

SEQ ID NO: 326756 - DNA, 20 bp, Artificial Sequence
  Description of Artificial Sequence: Synthetic oligonucleotide
  Target: LAMA2; (+) strand; PAM type: YTN; PAM sequence: TTA
tcaaatgagtttgttttaat

SEQ ID NO: 326757 - DNA, 20 bp, Artificial Sequence
  Description of Artificial Sequence: Synthetic oligonucleotide
  Target: LAMA2; (+) strand; PAM type: YTN; PAM sequence: TTT
gttttaatcatgtggaaggc

SEQ ID NO: 326758 - DNA, 20 bp, Artificial Sequence
  Description of Artificial Sequence: Synthetic oligonucleotide
  Target: LAMA2; (+) strand; PAM type: YTN; PAM sequence: TTG
ttttaatcatgtggaaggct

SEQ ID NO: 326759 - DNA, 20 bp, Artificial Sequence
  Description of Artificial Sequence: Synthetic oligonucleotide
  Target: LAMA2; (+) strand; PAM type: YTN; PAM sequence: TTT
taatcatgtggaaggctctc

SEQ ID NO: 326760 - DNA, 20 bp, Artificial Sequence
  Description of Artificial Sequence: Synthetic oligonucleotide
  Target: LAMA2; (+) strand; PAM type: YTN; PAM sequence: TTT
aatcatgtggaaggctctca

SEQ ID NO: 326761 - DNA, 20 bp, Artificial Sequence
  Description of Artificial Sequence: Synthetic oligonucleotide
  Target: LAMA2; (+) strand; PAM type: YTN; PAM sequence: TTA
atcatgtggaaggctctcag

SEQ ID NO: 326762 - DNA, 20 bp, Artificial Sequence
  Description of Artificial Sequence: Synthetic oligonucleotide
  Target: LAMA2; (+) strand; PAM type: YTN; PAM sequence: CTC
tcagctagacactgaggaag

SEQ ID NO: 326763 - DNA, 20 bp, Artificial Sequence
  Description of Artificial Sequence: Synthetic oligonucleotide
  Target: LAMA2; (+) strand; PAM type: YTN; PAM sequence: CTC
agctagacactgaggaagtt

SEQ ID NO: 326764 - DNA, 20 bp, Artificial Sequence
  Description of Artificial Sequence: Synthetic oligonucleotide
  Target: LAMA2; (+) strand; PAM type: YTN; PAM sequence: CTA
gacactgaggaagttataga

SEQ ID NO: 326765 - DNA, 20 bp, Artificial Sequence
  Description of Artificial Sequence: Synthetic oligonucleotide
  Target: LAMA2; (+) strand; PAM type: YTN; PAM sequence: CTG
aggaagttatagaaatgggt

SEQ ID NO: 326766 - DNA, 20 bp, Artificial Sequence
  Description of Artificial Sequence: Synthetic oligonucleotide
  Target: LAMA2; (+) strand; PAM type: YTN; PAM sequence: TTA
tagaaatgggtaattccaag

SEQ ID NO: 326767 - DNA, 20 bp, Artificial Sequence
  Description of Artificial Sequence: Synthetic oligonucleotide
  Target: LAMA2; (+) strand; PAM type: YTN; PAM sequence: TTC
caaggtgaatgttccaagga

SEQ ID NO: 326768 - DNA, 20 bp, Artificial Sequence
  Description of Artificial Sequence: Synthetic oligonucleotide
  Target: LAMA2; (+) strand; PAM type: YTN; PAM sequence: TTC
caaggatagctatgtcttat

SEQ ID NO: 326769 - DNA, 20 bp, Artificial Sequence
  Description of Artificial Sequence: Synthetic oligonucleotide
  Target: LAMA2; (+) strand; PAM type: YTN; PAM sequence: CTA
tgtcttatacataacaagca

SEQ ID NO: 326770 - DNA, 20 bp, Artificial Sequence
  Description of Artificial Sequence: Synthetic oligonucleotide
  Target: LAMA2; (+) strand; PAM type: YTN; PAM sequence: CTT
atacataacaagcacttcat

SEQ ID NO: 326771 - DNA, 20 bp, Artificial Sequence
  Description of Artificial Sequence: Synthetic oligonucleotide
  Target: LAMA2; (+) strand; PAM type: YTN; PAM sequence: TTA
tacataacaagcacttcatc

SEQ ID NO: 326772 - DNA, 20 bp, Artificial Sequence
  Description of Artificial Sequence: Synthetic oligonucleotide
  Target: LAMA2; (+) strand; PAM type: YTN; PAM sequence: CTT
catcattatttgctgaatga

SEQ ID NO: 326773 - DNA, 20 bp, Artificial Sequence
  Description of Artificial Sequence: Synthetic oligonucleotide
  Target: LAMA2; (+) strand; PAM type: YTN; PAM sequence: TTC
atcattatttgctgaatgaa

SEQ ID NO: 326774 - DNA, 20 bp, Artificial Sequence
  Description of Artificial Sequence: Synthetic oligonucleotide
  Target: LAMA2; (+) strand; PAM type: YTN; PAM sequence: TTA
tttgctgaatgaatgcgtat

SEQ ID NO: 326775 - DNA, 20 bp, Artificial Sequence
  Description of Artificial Sequence: Synthetic oligonucleotide
  Target: LAMA2; (+) strand; PAM type: YTN; PAM sequence: TTT
gctgaatgaatgcgtatgtt

SEQ ID NO: 326776 - DNA, 20 bp, Artificial Sequence
  Description of Artificial Sequence: Synthetic oligonucleotide
  Target: LAMA2; (+) strand; PAM type: YTN; PAM sequence: TTG
ctgaatgaatgcgtatgtta

SEQ ID NO: 326777 - DNA, 20 bp, Artificial Sequence
  Description of Artificial Sequence: Synthetic oligonucleotide
  Target: LAMA2; (+) strand; PAM type: YTN; PAM sequence: CTG
aatgaatgcgtatgttagaa

SEQ ID NO: 326778 - DNA, 20 bp, Artificial Sequence
  Description of Artificial Sequence: Synthetic oligonucleotide
  Target: LAMA2; (+) strand; PAM type: YTN; PAM sequence: TTA
gaatccatatgtaatagctt

SEQ ID NO: 326779 - DNA, 20 bp, Artificial Sequence
  Description of Artificial Sequence: Synthetic oligonucleotide
  Target: LAMA2; (+) strand; PAM type: YTN; PAM sequence: CTT
gtccatttgcacatattttc

SEQ ID NO: 326780 - DNA, 20 bp, Artificial Sequence
  Description of Artificial Sequence: Synthetic oligonucleotide
  Target: LAMA2; (+) strand; PAM type: YTN; PAM sequence: TTG
tccatttgcacatattttca

SEQ ID NO: 326781 - DNA, 20 bp, Artificial Sequence
  Description of Artificial Sequence: Synthetic oligonucleotide
  Target: LAMA2; (+) strand; PAM type: YTN; PAM sequence: TTT
gcacatattttcaccccact

SEQ ID NO: 326782 - DNA, 20 bp, Artificial Sequence
  Description of Artificial Sequence: Synthetic oligonucleotide
  Target: LAMA2; (+) strand; PAM type: YTN; PAM sequence: TTG
cacatattttcaccccactg

SEQ ID NO: 326783 - DNA, 20 bp, Artificial Sequence
  Description of Artificial Sequence: Synthetic oligonucleotide
  Target: LAMA2; (+) strand; PAM type: YTN; PAM sequence: TTT
tcaccccactgatagttttt

SEQ ID NO: 326784 - DNA, 20 bp, Artificial Sequence
  Description of Artificial Sequence: Synthetic oligonucleotide
  Target: LAMA2; (+) strand; PAM type: YTN; PAM sequence: TTT
caccccactgatagttttta

SEQ ID NO: 326785 - DNA, 20 bp, Artificial Sequence
  Description of Artificial Sequence: Synthetic oligonucleotide
  Target: LAMA2; (+) strand; PAM type: YTN; PAM sequence: TTC
accccactgatagtttttaa

SEQ ID NO: 326786 - DNA, 20 bp, Artificial Sequence
  Description of Artificial Sequence: Synthetic oligonucleotide
  Target: LAMA2; (+) strand; PAM type: YTN; PAM sequence: CTG
atagtttttaatatgtggag

SEQ ID NO: 326787 - DNA, 20 bp, Artificial Sequence
  Description of Artificial Sequence: Synthetic oligonucleotide
  Target: LAMA2; (+) strand; PAM type: YTN; PAM sequence: TTT
ttaatatgtggaggtacaca

SEQ ID NO: 326788 - DNA, 20 bp, Artificial Sequence
  Description of Artificial Sequence: Synthetic oligonucleotide
  Target: LAMA2; (+) strand; PAM type: YTN; PAM sequence: TTT
taatatgtggaggtacacat

SEQ ID NO: 326789 - DNA, 20 bp, Artificial Sequence
  Description of Artificial Sequence: Synthetic oligonucleotide
  Target: LAMA2; (+) strand; PAM type: YTN; PAM sequence: TTT
aatatgtggaggtacacata

SEQ ID NO: 326790 - DNA, 20 bp, Artificial Sequence
  Description of Artificial Sequence: Synthetic oligonucleotide
  Target: LAMA2; (+) strand; PAM type: YTN; PAM sequence: TTA
atatgtggaggtacacatac

SEQ ID NO: 326791 - DNA, 20 bp, Artificial Sequence
  Description of Artificial Sequence: Synthetic oligonucleotide
  Target: LAMA2; (+) strand; PAM type: YTN; PAM sequence: CTC
tgtgttttttgtgggtgaga

SEQ ID NO: 326792 - DNA, 20 bp, Artificial Sequence
  Description of Artificial Sequence: Synthetic oligonucleotide
  Target: LAMA2; (+) strand; PAM type: YTN; PAM sequence: CTG
tgttttttgtgggtgagata

SEQ ID NO: 326793 - DNA, 20 bp, Artificial Sequence
  Description of Artificial Sequence: Synthetic oligonucleotide
  Target: LAMA2; (+) strand; PAM type: YTN; PAM sequence: TTT
tttgtgggtgagatatgtag

SEQ ID NO: 326794 - DNA, 20 bp, Artificial Sequence
  Description of Artificial Sequence: Synthetic oligonucleotide
  Target: LAMA2; (+) strand; PAM type: YTN; PAM sequence: TTT
ttgtgggtgagatatgtagg

SEQ ID NO: 326795 - DNA, 20 bp, Artificial Sequence
  Description of Artificial Sequence: Synthetic oligonucleotide
  Target: LAMA2; (+) strand; PAM type: YTN; PAM sequence: TTT
tgtgggtgagatatgtaggc

SEQ ID NO: 326796 - DNA, 20 bp, Artificial Sequence
  Description of Artificial Sequence: Synthetic oligonucleotide
  Target: LAMA2; (+) strand; PAM type: YTN; PAM sequence: TTT
gtgggtgagatatgtaggct

SEQ ID NO: 326797 - DNA, 20 bp, Artificial Sequence
  Description of Artificial Sequence: Synthetic oligonucleotide
  Target: LAMA2; (+) strand; PAM type: YTN; PAM sequence: TTG
tgggtgagatatgtaggcta

SEQ ID NO: 326798 - DNA, 20 bp, Artificial Sequence
  Description of Artificial Sequence: Synthetic oligonucleotide
  Target: LAMA2; (+) strand; PAM type: YTN; PAM sequence: CTA
acatgtcgtaagtgaatgaa

SEQ ID NO: 326799 - DNA, 20 bp, Artificial Sequence
  Description of Artificial Sequence: Synthetic oligonucleotide
  Target: LAMA2; (+) strand; PAM type: YTN; PAM sequence: CTG
tgtttgataagaactgtcaa

SEQ ID NO: 326800 - DNA, 20 bp, Artificial Sequence
  Description of Artificial Sequence: Synthetic oligonucleotide
  Target: LAMA2; (+) strand; PAM type: YTN; PAM sequence: TTT
gataagaactgtcaagtgtt

SEQ ID NO: 326801 - DNA, 20 bp, Artificial Sequence
  Description of Artificial Sequence: Synthetic oligonucleotide
  Target: LAMA2; (+) strand; PAM type: YTN; PAM sequence: TTG
ataagaactgtcaagtgttg

SEQ ID NO: 326802 - DNA, 20 bp, Artificial Sequence
  Description of Artificial Sequence: Synthetic oligonucleotide
  Target: LAMA2; (+) strand; PAM type: YTN; PAM sequence: CTG
tcaagtgttgactatgcacc

SEQ ID NO: 326803 - DNA, 20 bp, Artificial Sequence
  Description of Artificial Sequence: Synthetic oligonucleotide
  Target: LAMA2; (+) strand; PAM type: YTN; PAM sequence: TTG
actatgcacctattggtgtg

SEQ ID NO: 326804 - DNA, 20 bp, Artificial Sequence
  Description of Artificial Sequence: Synthetic oligonucleotide
  Target: LAMA2; (+) strand; PAM type: YTN; PAM sequence: CTA
tgcacctattggtgtgctag

SEQ ID NO: 326805 - DNA, 20 bp, Artificial Sequence
  Description of Artificial Sequence: Synthetic oligonucleotide
  Target: LAMA2; (+) strand; PAM type: YTN; PAM sequence: CTA
ttggtgtgctagacattctg

SEQ ID NO: 326806 - DNA, 20 bp, Artificial Sequence
  Description of Artificial Sequence: Synthetic oligonucleotide
  Target: LAMA2; (+) strand; PAM type: YTN; PAM sequence: TTG
gtgtgctagacattctgaag

SEQ ID NO: 326807 - DNA, 20 bp, Artificial Sequence
  Description of Artificial Sequence: Synthetic oligonucleotide
  Target: LAMA2; (+) strand; PAM type: YTN; PAM sequence: CTA
gacattctgaagattcagaa

SEQ ID NO: 326808 - DNA, 20 bp, Artificial Sequence
  Description of Artificial Sequence: Synthetic oligonucleotide
  Target: LAMA2; (+) strand; PAM type: YTN; PAM sequence: TTC
tgaagattcagaagaagtat

SEQ ID NO: 326809 - DNA, 20 bp, Artificial Sequence
  Description of Artificial Sequence: Synthetic oligonucleotide
  Target: LAMA2; (+) strand; PAM type: YTN; PAM sequence: CTG
aagattcagaagaagtatac

SEQ ID NO: 326810 - DNA, 20 bp, Artificial Sequence
  Description of Artificial Sequence: Synthetic oligonucleotide
  Target: LAMA2; (+) strand; PAM type: YTN; PAM sequence: TTC
agaagaagtatacaacatta

SEQ ID NO: 326811 - DNA, 20 bp, Artificial Sequence
  Description of Artificial Sequence: Synthetic oligonucleotide
  Target: LAMA2; (+) strand; PAM type: YTN; PAM sequence: TTA
tttctaatgttatgattaca

SEQ ID NO: 326812 - DNA, 20 bp, Artificial Sequence
  Description of Artificial Sequence: Synthetic oligonucleotide
  Target: LAMA2; (+) strand; PAM type: YTN; PAM sequence: TTT
ctaatgttatgattacatct

SEQ ID NO: 326813 - DNA, 20 bp, Artificial Sequence
  Description of Artificial Sequence: Synthetic oligonucleotide
  Target: LAMA2; (+) strand; PAM type: YTN; PAM sequence: TTC
taatgttatgattacatcta

SEQ ID NO: 326814 - DNA, 20 bp, Artificial Sequence
  Description of Artificial Sequence: Synthetic oligonucleotide
  Target: LAMA2; (+) strand; PAM type: YTN; PAM sequence: CTA
atgttatgattacatctaca

SEQ ID NO: 326815 - DNA, 20 bp, Artificial Sequence
  Description of Artificial Sequence: Synthetic oligonucleotide
  Target: LAMA2; (+) strand; PAM type: YTN; PAM sequence: TTA
tgattacatctacagacaaa

SEQ ID NO: 326816 - DNA, 20 bp, Artificial Sequence
  Description of Artificial Sequence: Synthetic oligonucleotide
  Target: LAMA2; (+) strand; PAM type: YTN; PAM sequence: TTA
catctacagacaaagaatca

SEQ ID NO: 326817 - DNA, 20 bp, Artificial Sequence
  Description of Artificial Sequence: Synthetic oligonucleotide
  Target: LAMA2; (+) strand; PAM type: YTN; PAM sequence: CTA
cagacaaagaatcaaacaat

SEQ ID NO: 326818 - DNA, 20 bp, Artificial Sequence
  Description of Artificial Sequence: Synthetic oligonucleotide
  Target: LAMA2; (+) strand; PAM type: YTN; PAM sequence: TTC
tttttaatggtaacttgtgt

SEQ ID NO: 326819 - DNA, 20 bp, Artificial Sequence
  Description of Artificial Sequence: Synthetic oligonucleotide
  Target: LAMA2; (+) strand; PAM type: YTN; PAM sequence: CTT
tttaatggtaacttgtgttt

SEQ ID NO: 326820 - DNA, 20 bp, Artificial Sequence
  Description of Artificial Sequence: Synthetic oligonucleotide
  Target: LAMA2; (+) strand; PAM type: YTN; PAM sequence: TTT
ttaatggtaacttgtgtttt

SEQ ID NO: 326821 - DNA, 20 bp, Artificial Sequence
  Description of Artificial Sequence: Synthetic oligonucleotide
  Target: LAMA2; (+) strand; PAM type: YTN; PAM sequence: TTT
taatggtaacttgtgttttt

SEQ ID NO: 326822 - DNA, 20 bp, Artificial Sequence
  Description of Artificial Sequence: Synthetic oligonucleotide
  Target: LAMA2; (+) strand; PAM type: YTN; PAM sequence: TTT
aatggtaacttgtgtttttt

SEQ ID NO: 326823 - DNA, 20 bp, Artificial Sequence
  Description of Artificial Sequence: Synthetic oligonucleotide
  Target: LAMA2; (+) strand; PAM type: YTN; PAM sequence: TTA
atggtaacttgtgtttttta

SEQ ID NO: 326824 - DNA, 20 bp, Artificial Sequence
  Description of Artificial Sequence: Synthetic oligonucleotide
  Target: LAMA2; (+) strand; PAM type: YTN; PAM sequence: CTT
gtgttttttaatgttaaaga

SEQ ID NO: 326825 - DNA, 20 bp, Artificial Sequence
  Description of Artificial Sequence: Synthetic oligonucleotide
  Target: LAMA2; (+) strand; PAM type: YTN; PAM sequence: TTG
tgttttttaatgttaaagat

SEQ ID NO: 326826 - DNA, 20 bp, Artificial Sequence
  Description of Artificial Sequence: Synthetic oligonucleotide
  Target: LAMA2; (+) strand; PAM type: YTN; PAM sequence: TTT
tttaatgttaaagatatggg

SEQ ID NO: 326827 - DNA, 20 bp, Artificial Sequence
  Description of Artificial Sequence: Synthetic oligonucleotide
  Target: LAMA2; (+) strand; PAM type: YTN; PAM sequence: TTT
ttaatgttaaagatatgggc

SEQ ID NO: 326828 - DNA, 20 bp, Artificial Sequence
  Description of Artificial Sequence: Synthetic oligonucleotide
  Target: LAMA2; (+) strand; PAM type: YTN; PAM sequence: TTT
taatgttaaagatatgggcc

SEQ ID NO: 326829 - DNA, 20 bp, Artificial Sequence
  Description of Artificial Sequence: Synthetic oligonucleotide
  Target: LAMA2; (+) strand; PAM type: YTN; PAM sequence: TTT
aatgttaaagatatgggcca

SEQ ID NO: 326830 - DNA, 20 bp, Artificial Sequence
  Description of Artificial Sequence: Synthetic oligonucleotide
  Target: LAMA2; (+) strand; PAM type: YTN; PAM sequence: TTA
atgttaaagatatgggccaa

SEQ ID NO: 326831 - DNA, 20 bp, Artificial Sequence
  Description of Artificial Sequence: Synthetic oligonucleotide
  Target: LAMA2; (+) strand; PAM type: YTN; PAM sequence: TTA
aagatatgggccaaatgata

SEQ ID NO: 326832 - DNA, 20 bp, Artificial Sequence
  Description of Artificial Sequence: Synthetic oligonucleotide
  Target: LAMA2; (+) strand; PAM type: YTN; PAM sequence: TTT
ttttctctatcagaaggata

SEQ ID NO: 326833 - DNA, 20 bp, Artificial Sequence
  Description of Artificial Sequence: Synthetic oligonucleotide
  Target: LAMA2; (+) strand; PAM type: YTN; PAM sequence: TTT
tttctctatcagaaggatag

SEQ ID NO: 326834 - DNA, 20 bp, Artificial Sequence
  Description of Artificial Sequence: Synthetic oligonucleotide
  Target: LAMA2; (+) strand; PAM type: YTN; PAM sequence: TTT
ttctctatcagaaggataga

SEQ ID NO: 326835 - DNA, 20 bp, Artificial Sequence
  Description of Artificial Sequence: Synthetic oligonucleotide
  Target: LAMA2; (+) strand; PAM type: YTN; PAM sequence: TTT
tctctatcagaaggatagat

SEQ ID NO: 326836 - DNA, 20 bp, Artificial Sequence
  Description of Artificial Sequence: Synthetic oligonucleotide
  Target: LAMA2; (+) strand; PAM type: YTN; PAM sequence: TTT
ctctatcagaaggatagatt

SEQ ID NO: 326837 - DNA, 20 bp, Artificial Sequence
  Description of Artificial Sequence: Synthetic oligonucleotide
  Target: LAMA2; (+) strand; PAM type: YTN; PAM sequence: TTC
tctatcagaaggatagattt

SEQ ID NO: 326838 - DNA, 20 bp, Artificial Sequence
  Description of Artificial Sequence: Synthetic oligonucleotide
  Target: LAMA2; (+) strand; PAM type: YTN; PAM sequence: CTC
tatcagaaggatagattttg

SEQ ID NO: 326839 - DNA, 20 bp, Artificial Sequence
  Description of Artificial Sequence: Synthetic oligonucleotide
  Target: LAMA2; (+) strand; PAM type: YTN; PAM sequence: CTA
tcagaaggatagattttgag

SEQ ID NO: 326840 - DNA, 20 bp, Artificial Sequence
  Description of Artificial Sequence: Synthetic oligonucleotide
  Target: LAMA2; (+) strand; PAM type: YTN; PAM sequence: TTT
tgagctaatcttgaaagaaa

SEQ ID NO: 326841 - DNA, 20 bp, Artificial Sequence
  Description of Artificial Sequence: Synthetic oligonucleotide
  Target: LAMA2; (+) strand; PAM type: YTN; PAM sequence: TTT
gagctaatcttgaaagaaat

SEQ ID NO: 326842 - DNA, 20 bp, Artificial Sequence
  Description of Artificial Sequence: Synthetic oligonucleotide
  Target: LAMA2; (+) strand; PAM type: YTN; PAM sequence: TTG
agctaatcttgaaagaaata

SEQ ID NO: 326843 - DNA, 20 bp, Artificial Sequence
  Description of Artificial Sequence: Synthetic oligonucleotide
  Target: LAMA2; (+) strand; PAM type: YTN; PAM sequence: CTA
atcttgaaagaaatactaaa

SEQ ID NO: 326844 - DNA, 20 bp, Artificial Sequence
  Description of Artificial Sequence: Synthetic oligonucleotide
  Target: LAMA2; (+) strand; PAM type: YTN; PAM sequence: CTT
gaaagaaatactaaatttag

SEQ ID NO: 326845 - DNA, 20 bp, Artificial Sequence
  Description of Artificial Sequence: Synthetic oligonucleotide
  Target: LAMA2; (+) strand; PAM type: YTN; PAM sequence: TTG
aaagaaatactaaatttaga

SEQ ID NO: 326846 - DNA, 20 bp, Artificial Sequence
  Description of Artificial Sequence: Synthetic oligonucleotide
  Target: LAMA2; (+) strand; PAM type: YTN; PAM sequence: CTA
aatttagacttatggagaat

SEQ ID NO: 326847 - DNA, 20 bp, Artificial Sequence
  Description of Artificial Sequence: Synthetic oligonucleotide
  Target: LAMA2; (+) strand; PAM type: YTN; PAM sequence: TTT
agacttatggagaataattt

SEQ ID NO: 326848 - DNA, 20 bp, Artificial Sequence
  Description of Artificial Sequence: Synthetic oligonucleotide
  Target: LAMA2; (+) strand; PAM type: YTN; PAM sequence: TTA
gacttatggagaataattta

SEQ ID NO: 326849 - DNA, 20 bp, Artificial Sequence
  Description of Artificial Sequence: Synthetic oligonucleotide
  Target: LAMA2; (+) strand; PAM type: YTN; PAM sequence: CTT
atggagaataatttaggaaa

SEQ ID NO: 326850 - DNA, 20 bp, Artificial Sequence
  Description of Artificial Sequence: Synthetic oligonucleotide
  Target: LAMA2; (+) strand; PAM type: YTN; PAM sequence: TTA
tggagaataatttaggaaag

SEQ ID NO: 326851 - DNA, 20 bp, Artificial Sequence
  Description of Artificial Sequence: Synthetic oligonucleotide
  Target: LAMA2; (+) strand; PAM type: YTN; PAM sequence: TTT
aggaaagcaattgaacacta

SEQ ID NO: 326852 - DNA, 20 bp, Artificial Sequence
  Description of Artificial Sequence: Synthetic oligonucleotide
  Target: LAMA2; (+) strand; PAM type: YTN; PAM sequence: TTA
ggaaagcaattgaacactac

SEQ ID NO: 326853 - DNA, 20 bp, Artificial Sequence
  Description of Artificial Sequence: Synthetic oligonucleotide
  Target: LAMA2; (+) strand; PAM type: YTN; PAM sequence: TTG
aacactacccaggggaggtg

SEQ ID NO: 326854 - DNA, 20 bp, Artificial Sequence
  Description of Artificial Sequence: Synthetic oligonucleotide
  Target: LAMA2; (+) strand; PAM type: YTN; PAM sequence: CTA
cccaggggaggtgggaagtg

SEQ ID NO: 326855 - DNA, 20 bp, Artificial Sequence
  Description of Artificial Sequence: Synthetic oligonucleotide
  Target: LAMA2; (+) strand; PAM type: YTN; PAM sequence: CTG
tgttcagagtgagataagga

SEQ ID NO: 326856 - DNA, 20 bp, Artificial Sequence
  Description of Artificial Sequence: Synthetic oligonucleotide
  Target: LAMA2; (+) strand; PAM type: YTN; PAM sequence: TTC
agagtgagataaggaaataa

SEQ ID NO: 326857 - DNA, 20 bp, Artificial Sequence
  Description of Artificial Sequence: Synthetic oligonucleotide
  Target: LAMA2; (+) strand; PAM type: YTN; PAM sequence: TTT
gaccagagcatgggatttta

SEQ ID NO: 326858 - DNA, 20 bp, Artificial Sequence
  Description of Artificial Sequence: Synthetic oligonucleotide
  Target: LAMA2; (+) strand; PAM type: YTN; PAM sequence: TTG
accagagcatgggattttaa

SEQ ID NO: 326859 - DNA, 20 bp, Artificial Sequence
  Description of Artificial Sequence: Synthetic oligonucleotide
  Target: LAMA2; (+) strand; PAM type: YTN; PAM sequence: TTT
taattgagaatattaagaga

SEQ ID NO: 326860 - DNA, 20 bp, Artificial Sequence
  Description of Artificial Sequence: Synthetic oligonucleotide
  Target: LAMA2; (+) strand; PAM type: YTN; PAM sequence: TTT
aattgagaatattaagagat

SEQ ID NO: 326861 - DNA, 20 bp, Artificial Sequence
  Description of Artificial Sequence: Synthetic oligonucleotide
  Target: LAMA2; (+) strand; PAM type: YTN; PAM sequence: TTA
attgagaatattaagagata

SEQ ID NO: 326862 - DNA, 20 bp, Artificial Sequence
  Description of Artificial Sequence: Synthetic oligonucleotide
  Target: LAMA2; (+) strand; PAM type: YTN; PAM sequence: TTG
agaatattaagagataaaat

SEQ ID NO: 326863 - DNA, 20 bp, Artificial Sequence
  Description of Artificial Sequence: Synthetic oligonucleotide
  Target: LAMA2; (+) strand; PAM type: YTN; PAM sequence: TTA
agagataaaattataataaa

SEQ ID NO: 326864 - DNA, 20 bp, Artificial Sequence
  Description of Artificial Sequence: Synthetic oligonucleotide
  Target: LAMA2; (+) strand; PAM type: YTN; PAM sequence: TTA
taataaatgtagggaaggtg

SEQ ID NO: 326865 - DNA, 20 bp, Artificial Sequence
  Description of Artificial Sequence: Synthetic oligonucleotide
  Target: LAMA2; (+) strand; PAM type: YTN; PAM sequence: TTA
tgatatactatacttgaaat

SEQ ID NO: 326866 - DNA, 20 bp, Artificial Sequence
  Description of Artificial Sequence: Synthetic oligonucleotide
  Target: LAMA2; (+) strand; PAM type: YTN; PAM sequence: CTA
tacttgaaatatctaaatga

SEQ ID NO: 326867 - DNA, 20 bp, Artificial Sequence
  Description of Artificial Sequence: Synthetic oligonucleotide
  Target: LAMA2; (+) strand; PAM type: YTN; PAM sequence: CTT
gaaatatctaaatgaagtat

SEQ ID NO: 326868 - DNA, 20 bp, Artificial Sequence
  Description of Artificial Sequence: Synthetic oligonucleotide
  Target: LAMA2; (+) strand; PAM type: YTN; PAM sequence: TTG
aaatatctaaatgaagtatt

SEQ ID NO: 326869 - DNA, 20 bp, Artificial Sequence
  Description of Artificial Sequence: Synthetic oligonucleotide
  Target: LAMA2; (+) strand; PAM type: YTN; PAM sequence: CTA
aatgaagtatttatgtttac

SEQ ID NO: 326870 - DNA, 20 bp, Artificial Sequence
  Description of Artificial Sequence: Synthetic oligonucleotide
  Target: LAMA2; (+) strand; PAM type: YTN; PAM sequence: TTT
atgtttactctaaaagtcaa

SEQ ID NO: 326871 - DNA, 20 bp, Artificial Sequence
  Description of Artificial Sequence: Synthetic oligonucleotide
  Target: LAMA2; (+) strand; PAM type: YTN; PAM sequence: TTA
tgtttactctaaaagtcaag

SEQ ID NO: 326872 - DNA, 20 bp, Artificial Sequence
  Description of Artificial Sequence: Synthetic oligonucleotide
  Target: LAMA2; (+) strand; PAM type: YTN; PAM sequence: TTT
actctaaaagtcaagtgaga

SEQ ID NO: 326873 - DNA, 20 bp, Artificial Sequence
  Description of Artificial Sequence: Synthetic oligonucleotide
  Target: LAMA2; (+) strand; PAM type: YTN; PAM sequence: TTA
ctctaaaagtcaagtgagag

SEQ ID NO: 326874 - DNA, 20 bp, Artificial Sequence
  Description of Artificial Sequence: Synthetic oligonucleotide
  Target: LAMA2; (+) strand; PAM type: YTN; PAM sequence: CTC
taaaagtcaagtgagagaga

SEQ ID NO: 326875 - DNA, 20 bp, Artificial Sequence
  Description of Artificial Sequence: Synthetic oligonucleotide
  Target: LAMA2; (+) strand; PAM type: YTN; PAM sequence: CTA
aaagtcaagtgagagagatt

SEQ ID NO: 326876 - DNA, 20 bp, Artificial Sequence
  Description of Artificial Sequence: Synthetic oligonucleotide
  Target: LAMA2; (+) strand; PAM type: YTN; PAM sequence: TTC
tggagtgagacaagaatgtg

SEQ ID NO: 326877 - DNA, 20 bp, Artificial Sequence
  Description of Artificial Sequence: Synthetic oligonucleotide
  Target: LAMA2; (+) strand; PAM type: YTN; PAM sequence: CTG
gagtgagacaagaatgtgag

SEQ ID NO: 326878 - DNA, 20 bp, Artificial Sequence
  Description of Artificial Sequence: Synthetic oligonucleotide
  Target: LAMA2; (+) strand; PAM type: YTN; PAM sequence: CTT
ctgtggagtttaatctatag

SEQ ID NO: 326879 - DNA, 20 bp, Artificial Sequence
  Description of Artificial Sequence: Synthetic oligonucleotide
  Target: LAMA2; (+) strand; PAM type: YTN; PAM sequence: TTC
tgtggagtttaatctatagt

SEQ ID NO: 326880 - DNA, 20 bp, Artificial Sequence
  Description of Artificial Sequence: Synthetic oligonucleotide
  Target: LAMA2; (+) strand; PAM type: YTN; PAM sequence: CTG
tggagtttaatctatagtaa

SEQ ID NO: 326881 - DNA, 20 bp, Artificial Sequence
  Description of Artificial Sequence: Synthetic oligonucleotide
  Target: LAMA2; (+) strand; PAM type: YTN; PAM sequence: TTT
aatctatagtaatgcacatg

SEQ ID NO: 326882 - DNA, 20 bp, Artificial Sequence
  Description of Artificial Sequence: Synthetic oligonucleotide
  Target: LAMA2; (+) strand; PAM type: YTN; PAM sequence: TTA
atctatagtaatgcacatga

SEQ ID NO: 326883 - DNA, 20 bp, Artificial Sequence
  Description of Artificial Sequence: Synthetic oligonucleotide
  Target: LAMA2; (+) strand; PAM type: YTN; PAM sequence: CTA
tagtaatgcacatgaatctg

SEQ ID NO: 326884 - DNA, 20 bp, Artificial Sequence
  Description of Artificial Sequence: Synthetic oligonucleotide
  Target: LAMA2; (+) strand; PAM type: YTN; PAM sequence: CTG
ataaattattataatctttg

SEQ ID NO: 326885 - DNA, 20 bp, Artificial Sequence
  Description of Artificial Sequence: Synthetic oligonucleotide
  Target: LAMA2; (+) strand; PAM type: YTN; PAM sequence: TTA
ttataatctttgcttttagt

SEQ ID NO: 326886 - DNA, 20 bp, Artificial Sequence
  Description of Artificial Sequence: Synthetic oligonucleotide
  Target: LAMA2; (+) strand; PAM type: YTN; PAM sequence: TTA
taatctttgcttttagtaga

SEQ ID NO: 326887 - DNA, 20 bp, Artificial Sequence
  Description of Artificial Sequence: Synthetic oligonucleotide
  Target: LAMA2; (+) strand; PAM type: YTN; PAM sequence: CTT
tgcttttagtagaaatgggg

SEQ ID NO: 326888 - DNA, 20 bp, Artificial Sequence
  Description of Artificial Sequence: Synthetic oligonucleotide
  Target: LAMA2; (+) strand; PAM type: YTN; PAM sequence: TTT
gcttttagtagaaatgggga

SEQ ID NO: 326889 - DNA, 20 bp, Artificial Sequence
  Description of Artificial Sequence: Synthetic oligonucleotide
  Target: LAMA2; (+) strand; PAM type: YTN; PAM sequence: TTG
cttttagtagaaatggggat

SEQ ID NO: 326890 - DNA, 20 bp, Artificial Sequence
  Description of Artificial Sequence: Synthetic oligonucleotide
  Target: LAMA2; (+) strand; PAM type: YTN; PAM sequence: CTT
ttagtagaaatggggattta

SEQ ID NO: 326891 - DNA, 20 bp, Artificial Sequence
  Description of Artificial Sequence: Synthetic oligonucleotide
  Target: LAMA2; (+) strand; PAM type: YTN; PAM sequence: TTT
tagtagaaatggggatttag

SEQ ID NO: 326892 - DNA, 20 bp, Artificial Sequence
  Description of Artificial Sequence: Synthetic oligonucleotide
  Target: LAMA2; (+) strand; PAM type: YTN; PAM sequence: TTT
agtagaaatggggatttaga

SEQ ID NO: 326893 - DNA, 20 bp, Artificial Sequence
  Description of Artificial Sequence: Synthetic oligonucleotide
  Target: LAMA2; (+) strand; PAM type: YTN; PAM sequence: TTA
gtagaaatggggatttagag

SEQ ID NO: 326894 - DNA, 20 bp, Artificial Sequence
  Description of Artificial Sequence: Synthetic oligonucleotide
  Target: LAMA2; (+) strand; PAM type: YTN; PAM sequence: TTT
agagtacatcagtacaggtg

SEQ ID NO: 326895 - DNA, 20 bp, Artificial Sequence
  Description of Artificial Sequence: Synthetic oligonucleotide
  Target: LAMA2; (+) strand; PAM type: YTN; PAM sequence: TTA
gagtacatcagtacaggtgg

SEQ ID NO: 326896 - DNA, 20 bp, Artificial Sequence
  Description of Artificial Sequence: Synthetic oligonucleotide
  Target: LAMA2; (+) strand; PAM type: YTN; PAM sequence: TTT
aaaacatattttgaaaaaca

SEQ ID NO: 326897 - DNA, 20 bp, Artificial Sequence
  Description of Artificial Sequence: Synthetic oligonucleotide
  Target: LAMA2; (+) strand; PAM type: YTN; PAM sequence: TTA
aaacatattttgaaaaacaa

SEQ ID NO: 326898 - DNA, 20 bp, Artificial Sequence
  Description of Artificial Sequence: Synthetic oligonucleotide
  Target: LAMA2; (+) strand; PAM type: YTN; PAM sequence: TTT
tgaaaaacaaggataagaat

SEQ ID NO: 326899 - DNA, 20 bp, Artificial Sequence
  Description of Artificial Sequence: Synthetic oligonucleotide
  Target: LAMA2; (+) strand; PAM type: YTN; PAM sequence: TTT
gaaaaacaaggataagaatt

SEQ ID NO: 326900 - DNA, 20 bp, Artificial Sequence
  Description of Artificial Sequence: Synthetic oligonucleotide
  Target: LAMA2; (+) strand; PAM type: YTN; PAM sequence: TTG
aaaaacaaggataagaatta

SEQ ID NO: 326901 - DNA, 20 bp, Artificial Sequence
  Description of Artificial Sequence: Synthetic oligonucleotide
  Target: LAMA2; (+) strand; PAM type: YTN; PAM sequence: TTA
gtgtttaaaagctaaaagag

SEQ ID NO: 326902 - DNA, 20 bp, Artificial Sequence
  Description of Artificial Sequence: Synthetic oligonucleotide
  Target: LAMA2; (+) strand; PAM type: YTN; PAM sequence: TTT
aaaagctaaaagagaagaat

SEQ ID NO: 326903 - DNA, 20 bp, Artificial Sequence
  Description of Artificial Sequence: Synthetic oligonucleotide
  Target: LAMA2; (+) strand; PAM type: YTN; PAM sequence: TTA
aaagctaaaagagaagaatt

SEQ ID NO: 326904 - DNA, 20 bp, Artificial Sequence
  Description of Artificial Sequence: Synthetic oligonucleotide
  Target: LAMA2; (+) strand; PAM type: YTN; PAM sequence: CTA
aaagagaagaatttgtgtca

SEQ ID NO: 326905 - DNA, 20 bp, Artificial Sequence
  Description of Artificial Sequence: Synthetic oligonucleotide
  Target: LAMA2; (+) strand; PAM type: YTN; PAM sequence: TTT
gtgtcagctgcaaaataaag

SEQ ID NO: 326906 - DNA, 20 bp, Artificial Sequence
  Description of Artificial Sequence: Synthetic oligonucleotide
  Target: LAMA2; (+) strand; PAM type: YTN; PAM sequence: TTG
tgtcagctgcaaaataaagt

SEQ ID NO: 326907 - DNA, 20 bp, Artificial Sequence
  Description of Artificial Sequence: Synthetic oligonucleotide
  Target: LAMA2; (+) strand; PAM type: YTN; PAM sequence: CTG
caaaataaagtaaatacaca

SEQ ID NO: 326908 - DNA, 20 bp, Artificial Sequence
  Description of Artificial Sequence: Synthetic oligonucleotide
  Target: LAMA2; (+) strand; PAM type: YTN; PAM sequence: CTA
catacatgctcataatttaa

SEQ ID NO: 326909 - DNA, 20 bp, Artificial Sequence
  Description of Artificial Sequence: Synthetic oligonucleotide
  Target: LAMA2; (+) strand; PAM type: YTN; PAM sequence: CTC
ataatttaaattatgaacta

SEQ ID NO: 326910 - DNA, 20 bp, Artificial Sequence
  Description of Artificial Sequence: Synthetic oligonucleotide
  Target: LAMA2; (+) strand; PAM type: YTN; PAM sequence: TTT
aaattatgaactattttatc

SEQ ID NO: 326911 - DNA, 20 bp, Artificial Sequence
  Description of Artificial Sequence: Synthetic oligonucleotide
  Target: LAMA2; (+) strand; PAM type: YTN; PAM sequence: TTA
aattatgaactattttatca

SEQ ID NO: 326912 - DNA, 20 bp, Artificial Sequence
  Description of Artificial Sequence: Synthetic oligonucleotide
  Target: LAMA2; (+) strand; PAM type: YTN; PAM sequence: TTA
tgaactattttatcacactc

SEQ ID NO: 326913 - DNA, 20 bp, Artificial Sequence
  Description of Artificial Sequence: Synthetic oligonucleotide
  Target: LAMA2; (+) strand; PAM type: YTN; PAM sequence: CTA
ttttatcacactctgctgtg

SEQ ID NO: 326914 - DNA, 20 bp, Artificial Sequence
  Description of Artificial Sequence: Synthetic oligonucleotide
  Target: LAMA2; (+) strand; PAM type: YTN; PAM sequence: TTT
tatcacactctgctgtgtaa

SEQ ID NO: 326915 - DNA, 20 bp, Artificial Sequence
  Description of Artificial Sequence: Synthetic oligonucleotide
  Target: LAMA2; (+) strand; PAM type: YTN; PAM sequence: TTT
atcacactctgctgtgtaag

SEQ ID NO: 326916 - DNA, 20 bp, Artificial Sequence
  Description of Artificial Sequence: Synthetic oligonucleotide
  Target: LAMA2; (+) strand; PAM type: YTN; PAM sequence: TTA
tcacactctgctgtgtaagt

SEQ ID NO: 326917 - DNA, 20 bp, Artificial Sequence
  Description of Artificial Sequence: Synthetic oligonucleotide
  Target: LAMA2; (+) strand; PAM type: YTN; PAM sequence: CTC
tgctgtgtaagtttttctaa

SEQ ID NO: 326918 - DNA, 20 bp, Artificial Sequence
  Description of Artificial Sequence: Synthetic oligonucleotide
  Target: LAMA2; (+) strand; PAM type: YTN; PAM sequence: CTG
ctgtgtaagtttttctaact

SEQ ID NO: 326919 - DNA, 20 bp, Artificial Sequence
  Description of Artificial Sequence: Synthetic oligonucleotide
  Target: LAMA2; (+) strand; PAM type: YTN; PAM sequence: CTG
tgtaagtttttctaactcat

SEQ ID NO: 326920 - DNA, 20 bp, Artificial Sequence
  Description of Artificial Sequence: Synthetic oligonucleotide
  Target: LAMA2; (+) strand; PAM type: YTN; PAM sequence: TTT
ttctaactcatattgtatat

SEQ ID NO: 326921 - DNA, 20 bp, Artificial Sequence
  Description of Artificial Sequence: Synthetic oligonucleotide
  Target: LAMA2; (+) strand; PAM type: YTN; PAM sequence: TTT
tctaactcatattgtatatc

SEQ ID NO: 326922 - DNA, 20 bp, Artificial Sequence
  Description of Artificial Sequence: Synthetic oligonucleotide
  Target: LAMA2; (+) strand; PAM type: YTN; PAM sequence: TTT
ctaactcatattgtatatca

SEQ ID NO: 326923 - DNA, 20 bp, Artificial Sequence
  Description of Artificial Sequence: Synthetic oligonucleotide
  Target: LAMA2; (+) strand; PAM type: YTN; PAM sequence: TTC
taactcatattgtatatcag

SEQ ID NO: 326924 - DNA, 20 bp, Artificial Sequence
  Description of Artificial Sequence: Synthetic oligonucleotide
  Target: LAMA2; (+) strand; PAM type: YTN; PAM sequence: CTA
actcatattgtatatcagcc

SEQ ID NO: 326925 - DNA, 20 bp, Artificial Sequence
  Description of Artificial Sequence: Synthetic oligonucleotide
  Target: LAMA2; (+) strand; PAM type: YTN; PAM sequence: CTC
atattgtatatcagccatgt

SEQ ID NO: 326926 - DNA, 20 bp, Artificial Sequence
  Description of Artificial Sequence: Synthetic oligonucleotide
  Target: LAMA2; (+) strand; PAM type: YTN; PAM sequence: TTG
tatatcagccatgttgtatt

SEQ ID NO: 326927 - DNA, 20 bp, Artificial Sequence
  Description of Artificial Sequence: Synthetic oligonucleotide
  Target: LAMA2; (+) strand; PAM type: YTN; PAM sequence: TTG
tattcttgcattaattaatg

SEQ ID NO: 326928 - DNA, 20 bp, Artificial Sequence
  Description of Artificial Sequence: Synthetic oligonucleotide
  Target: LAMA2; (+) strand; PAM type: YTN; PAM sequence: TTC
ttgcattaattaatgtattc

SEQ ID NO: 326929 - DNA, 20 bp, Artificial Sequence
  Description of Artificial Sequence: Synthetic oligonucleotide
  Target: LAMA2; (+) strand; PAM type: YTN; PAM sequence: CTT
gcattaattaatgtattcat

SEQ ID NO: 326930 - DNA, 20 bp, Artificial Sequence
  Description of Artificial Sequence: Synthetic oligonucleotide
  Target: LAMA2; (+) strand; PAM type: YTN; PAM sequence: TTG
cattaattaatgtattcatt

SEQ ID NO: 326931 - DNA, 20 bp, Artificial Sequence
  Description of Artificial Sequence: Synthetic oligonucleotide
  Target: LAMA2; (+) strand; PAM type: YTN; PAM sequence: TTA
attaatgtattcattaaata

SEQ ID NO: 326932 - DNA, 20 bp, Artificial Sequence
  Description of Artificial Sequence: Synthetic oligonucleotide
  Target: LAMA2; (+) strand; PAM type: YTN; PAM sequence: TTA
atgtattcattaaatatgtc

SEQ ID NO: 326933 - DNA, 20 bp, Artificial Sequence
  Description of Artificial Sequence: Synthetic oligonucleotide
  Target: LAMA2; (+) strand; PAM type: YTN; PAM sequence: TTC
attaaatatgtcttcagtac

SEQ ID NO: 326934 - DNA, 20 bp, Artificial Sequence
  Description of Artificial Sequence: Synthetic oligonucleotide
  Target: LAMA2; (+) strand; PAM type: YTN; PAM sequence: TTA
aatatgtcttcagtactttt

SEQ ID NO: 326935 - DNA, 20 bp, Artificial Sequence
  Description of Artificial Sequence: Synthetic oligonucleotide
  Target: LAMA2; (+) strand; PAM type: YTN; PAM sequence: CTT
cagtacttttttgggtccag

SEQ ID NO: 326936 - DNA, 20 bp, Artificial Sequence
  Description of Artificial Sequence: Synthetic oligonucleotide
  Target: LAMA2; (+) strand; PAM type: YTN; PAM sequence: TTC
agtacttttttgggtccagc

SEQ ID NO: 326937 - DNA, 20 bp, Artificial Sequence
  Description of Artificial Sequence: Synthetic oligonucleotide
  Target: LAMA2; (+) strand; PAM type: YTN; PAM sequence: CTT
ttttgggtccagcattacat

SEQ ID NO: 326938 - DNA, 20 bp, Artificial Sequence
  Description of Artificial Sequence: Synthetic oligonucleotide
  Target: LAMA2; (+) strand; PAM type: YTN; PAM sequence: TTT
tttgggtccagcattacatt

SEQ ID NO: 326939 - DNA, 20 bp, Artificial Sequence
  Description of Artificial Sequence: Synthetic oligonucleotide
  Target: LAMA2; (+) strand; PAM type: YTN; PAM sequence: TTT
ttgggtccagcattacatta

SEQ ID NO: 326940 - DNA, 20 bp, Artificial Sequence
  Description of Artificial Sequence: Synthetic oligonucleotide
  Target: LAMA2; (+) strand; PAM type: YTN; PAM sequence: TTT
tgggtccagcattacattag

SEQ ID NO: 326941 - DNA, 20 bp, Artificial Sequence
  Description of Artificial Sequence: Synthetic oligonucleotide
  Target: LAMA2; (+) strand; PAM type: YTN; PAM sequence: TTT
gggtccagcattacattagg

SEQ ID NO: 326942 - DNA, 20 bp, Artificial Sequence
  Description of Artificial Sequence: Synthetic oligonucleotide
  Target: LAMA2; (+) strand; PAM type: YTN; PAM sequence: TTG
ggtccagcattacattaggc

SEQ ID NO: 326943 - DNA, 20 bp, Artificial Sequence
  Description of Artificial Sequence: Synthetic oligonucleotide
  Target: LAMA2; (+) strand; PAM type: YTN; PAM sequence: TTA
cattaggcagatatattatt

SEQ ID NO: 326944 - DNA, 20 bp, Artificial Sequence
  Description of Artificial Sequence: Synthetic oligonucleotide
  Target: LAMA2; (+) strand; PAM type: YTN; PAM sequence: TTA
ggcagatatattattcagca

SEQ ID NO: 326945 - DNA, 20 bp, Artificial Sequence
  Description of Artificial Sequence: Synthetic oligonucleotide
  Target: LAMA2; (+) strand; PAM type: YTN; PAM sequence: TTA
ttcagcaagttttcaattta

SEQ ID NO: 326946 - DNA, 20 bp, Artificial Sequence
  Description of Artificial Sequence: Synthetic oligonucleotide
  Target: LAMA2; (+) strand; PAM type: YTN; PAM sequence: TTC
agcaagttttcaatttagtt

SEQ ID NO: 326947 - DNA, 20 bp, Artificial Sequence
  Description of Artificial Sequence: Synthetic oligonucleotide
  Target: LAMA2; (+) strand; PAM type: YTN; PAM sequence: TTT
tcaatttagttcagggaaag

SEQ ID NO: 326948 - DNA, 20 bp, Artificial Sequence
  Description of Artificial Sequence: Synthetic oligonucleotide
  Target: LAMA2; (+) strand; PAM type: YTN; PAM sequence: TTT
caatttagttcagggaaaga

SEQ ID NO: 326949 - DNA, 20 bp, Artificial Sequence
  Description of Artificial Sequence: Synthetic oligonucleotide
  Target: LAMA2; (+) strand; PAM type: YTN; PAM sequence: TTC
aatttagttcagggaaagag

SEQ ID NO: 326950 - DNA, 20 bp, Artificial Sequence
  Description of Artificial Sequence: Synthetic oligonucleotide
  Target: LAMA2; (+) strand; PAM type: YTN; PAM sequence: TTT
agttcagggaaagagggatg

SEQ ID NO: 326951 - DNA, 20 bp, Artificial Sequence
  Description of Artificial Sequence: Synthetic oligonucleotide
  Target: LAMA2; (+) strand; PAM type: YTN; PAM sequence: TTA
gttcagggaaagagggatga

SEQ ID NO: 326952 - DNA, 20 bp, Artificial Sequence
  Description of Artificial Sequence: Synthetic oligonucleotide
  Target: LAMA2; (+) strand; PAM type: YTN; PAM sequence: TTC
agggaaagagggatgataaa

SEQ ID NO: 326953 - DNA, 20 bp, Artificial Sequence
  Description of Artificial Sequence: Synthetic oligonucleotide
  Target: LAMA2; (+) strand; PAM type: YTN; PAM sequence: TTA
ttatgagtgtttagaaatat

SEQ ID NO: 326954 - DNA, 20 bp, Artificial Sequence
  Description of Artificial Sequence: Synthetic oligonucleotide
  Target: LAMA2; (+) strand; PAM type: YTN; PAM sequence: TTA
tgagtgtttagaaatattaa

SEQ ID NO: 326955 - DNA, 20 bp, Artificial Sequence
  Description of Artificial Sequence: Synthetic oligonucleotide
  Target: LAMA2; (+) strand; PAM type: YTN; PAM sequence: TTT
agaaatattaagaacccgaa

SEQ ID NO: 326956 - DNA, 20 bp, Artificial Sequence
  Description of Artificial Sequence: Synthetic oligonucleotide
  Target: LAMA2; (+) strand; PAM type: YTN; PAM sequence: TTA
gaaatattaagaacccgaat

SEQ ID NO: 326957 - DNA, 20 bp, Artificial Sequence
  Description of Artificial Sequence: Synthetic oligonucleotide
  Target: LAMA2; (+) strand; PAM type: YTN; PAM sequence: TTA
agaacccgaatccatttatc

SEQ ID NO: 326958 - DNA, 20 bp, Artificial Sequence
  Description of Artificial Sequence: Synthetic oligonucleotide
  Target: LAMA2; (+) strand; PAM type: YTN; PAM sequence: TTT
atcagtttcataacaatgat

SEQ ID NO: 326959 - DNA, 20 bp, Artificial Sequence
  Description of Artificial Sequence: Synthetic oligonucleotide
  Target: LAMA2; (+) strand; PAM type: YTN; PAM sequence: TTA
tcagtttcataacaatgatt

SEQ ID NO: 326960 - DNA, 20 bp, Artificial Sequence
  Description of Artificial Sequence: Synthetic oligonucleotide
  Target: LAMA2; (+) strand; PAM type: YTN; PAM sequence: TTT
cataacaatgattttcaagc

SEQ ID NO: 326961 - DNA, 20 bp, Artificial Sequence
  Description of Artificial Sequence: Synthetic oligonucleotide
  Target: LAMA2; (+) strand; PAM type: YTN; PAM sequence: TTC
ataacaatgattttcaagct

SEQ ID NO: 326962 - DNA, 20 bp, Artificial Sequence
  Description of Artificial Sequence: Synthetic oligonucleotide
  Target: LAMA2; (+) strand; PAM type: YTN; PAM sequence: TTT
tcaagcttgtttcatttctc

SEQ ID NO: 326963 - DNA, 20 bp, Artificial Sequence
  Description of Artificial Sequence: Synthetic oligonucleotide
  Target: LAMA2; (+) strand; PAM type: YTN; PAM sequence: TTT
caagcttgtttcatttctca

SEQ ID NO: 326964 - DNA, 20 bp, Artificial Sequence
  Description of Artificial Sequence: Synthetic oligonucleotide
  Target: LAMA2; (+) strand; PAM type: YTN; PAM sequence: TTC
aagcttgtttcatttctcac

SEQ ID NO: 326965 - DNA, 20 bp, Artificial Sequence
  Description of Artificial Sequence: Synthetic oligonucleotide
  Target: LAMA2; (+) strand; PAM type: YTN; PAM sequence: CTT
gtttcatttctcacagggta

SEQ ID NO: 326966 - DNA, 20 bp, Artificial Sequence
  Description of Artificial Sequence: Synthetic oligonucleotide
  Target: LAMA2; (+) strand; PAM type: YTN; PAM sequence: TTG
tttcatttctcacagggtag

SEQ ID NO: 326967 - DNA, 20 bp, Artificial Sequence
  Description of Artificial Sequence: Synthetic oligonucleotide
  Target: LAMA2; (+) strand; PAM type: YTN; PAM sequence: TTT
catttctcacagggtagaca

SEQ ID NO: 326968 - DNA, 20 bp, Artificial Sequence
  Description of Artificial Sequence: Synthetic oligonucleotide
  Target: LAMA2; (+) strand; PAM type: YTN; PAM sequence: TTC
atttctcacagggtagacaa

SEQ ID NO: 326969 - DNA, 20 bp, Artificial Sequence
  Description of Artificial Sequence: Synthetic oligonucleotide
  Target: LAMA2; (+) strand; PAM type: YTN; PAM sequence: TTT
ctcacagggtagacaaagac

SEQ ID NO: 326970 - DNA, 20 bp, Artificial Sequence
  Description of Artificial Sequence: Synthetic oligonucleotide
  Target: LAMA2; (+) strand; PAM type: YTN; PAM sequence: TTC
tcacagggtagacaaagaca

SEQ ID NO: 326971 - DNA, 20 bp, Artificial Sequence
  Description of Artificial Sequence: Synthetic oligonucleotide
  Target: LAMA2; (+) strand; PAM type: YTN; PAM sequence: CTC
acagggtagacaaagacaaa

SEQ ID NO: 326972 - DNA, 20 bp, Artificial Sequence
  Description of Artificial Sequence: Synthetic oligonucleotide
  Target: LAMA2; (+) strand; PAM type: YTN; PAM sequence: CTC
ataaaagtaataatctacca

SEQ ID NO: 326973 - DNA, 20 bp, Artificial Sequence
  Description of Artificial Sequence: Synthetic oligonucleotide
  Target: LAMA2; (+) strand; PAM type: YTN; PAM sequence: CTA
ccaggcatgtttgttgtagc

SEQ ID NO: 326974 - DNA, 20 bp, Artificial Sequence
  Description of Artificial Sequence: Synthetic oligonucleotide
  Target: LAMA2; (+) strand; PAM type: YTN; PAM sequence: TTT
gttgtagccaagcaaatata

SEQ ID NO: 326975 - DNA, 20 bp, Artificial Sequence
  Description of Artificial Sequence: Synthetic oligonucleotide
  Target: LAMA2; (+) strand; PAM type: YTN; PAM sequence: TTG
ttgtagccaagcaaatatat

SEQ ID NO: 326976 - DNA, 20 bp, Artificial Sequence
  Description of Artificial Sequence: Synthetic oligonucleotide
  Target: LAMA2; (+) strand; PAM type: YTN; PAM sequence: TTG
tagccaagcaaatatataga

SEQ ID NO: 326977 - DNA, 20 bp, Artificial Sequence
  Description of Artificial Sequence: Synthetic oligonucleotide
  Target: LAMA2; (+) strand; PAM type: YTN; PAM sequence: TTC
taaaaatattgtttatagct

SEQ ID NO: 326978 - DNA, 20 bp, Artificial Sequence
  Description of Artificial Sequence: Synthetic oligonucleotide
  Target: LAMA2; (+) strand; PAM type: YTN; PAM sequence: CTA
aaaatattgtttatagctct

SEQ ID NO: 326979 - DNA, 20 bp, Artificial Sequence
  Description of Artificial Sequence: Synthetic oligonucleotide
  Target: LAMA2; (+) strand; PAM type: YTN; PAM sequence: TTG
tttatagctcttgtttcaac

SEQ ID NO: 326980 - DNA, 20 bp, Artificial Sequence
  Description of Artificial Sequence: Synthetic oligonucleotide
  Target: LAMA2; (+) strand; PAM type: YTN; PAM sequence: TTT
atagctcttgtttcaacatg

SEQ ID NO: 326981 - DNA, 20 bp, Artificial Sequence
  Description of Artificial Sequence: Synthetic oligonucleotide
  Target: LAMA2; (+) strand; PAM type: YTN; PAM sequence: TTA
tagctcttgtttcaacatgc

SEQ ID NO: 326982 - DNA, 20 bp, Artificial Sequence
  Description of Artificial Sequence: Synthetic oligonucleotide
  Target: LAMA2; (+) strand; PAM type: YTN; PAM sequence: CTC
ttgtttcaacatgcttggga

SEQ ID NO: 326983 - DNA, 20 bp, Artificial Sequence
  Description of Artificial Sequence: Synthetic oligonucleotide
  Target: LAMA2; (+) strand; PAM type: YTN; PAM sequence: CTT
gtttcaacatgcttgggaca

SEQ ID NO: 326984 - DNA, 20 bp, Artificial Sequence
  Description of Artificial Sequence: Synthetic oligonucleotide
  Target: LAMA2; (+) strand; PAM type: YTN; PAM sequence: TTG
tttcaacatgcttgggacaa

SEQ ID NO: 326985 - DNA, 20 bp, Artificial Sequence
  Description of Artificial Sequence: Synthetic oligonucleotide
  Target: LAMA2; (+) strand; PAM type: YTN; PAM sequence: TTT
caacatgcttgggacaagtt

SEQ ID NO: 326986 - DNA, 20 bp, Artificial Sequence
  Description of Artificial Sequence: Synthetic oligonucleotide
  Target: LAMA2; (+) strand; PAM type: YTN; PAM sequence: TTC
aacatgcttgggacaagtta

SEQ ID NO: 326987 - DNA, 20 bp, Artificial Sequence
  Description of Artificial Sequence: Synthetic oligonucleotide
  Target: LAMA2; (+) strand; PAM type: YTN; PAM sequence: CTT
gggacaagttaatgtttaca

SEQ ID NO: 326988 - DNA, 20 bp, Artificial Sequence
  Description of Artificial Sequence: Synthetic oligonucleotide
  Target: LAMA2; (+) strand; PAM type: YTN; PAM sequence: TTG
ggacaagttaatgtttacag

SEQ ID NO: 326989 - DNA, 20 bp, Artificial Sequence
  Description of Artificial Sequence: Synthetic oligonucleotide
  Target: LAMA2; (+) strand; PAM type: YTN; PAM sequence: TTA
atgtttacagttttgtgagt

SEQ ID NO: 326990 - DNA, 20 bp, Artificial Sequence
  Description of Artificial Sequence: Synthetic oligonucleotide
  Target: LAMA2; (+) strand; PAM type: YTN; PAM sequence: TTT
acagttttgtgagtgaatga

SEQ ID NO: 326991 - DNA, 20 bp, Artificial Sequence
  Description of Artificial Sequence: Synthetic oligonucleotide
  Target: LAMA2; (+) strand; PAM type: YTN; PAM sequence: TTA
cagttttgtgagtgaatgaa

SEQ ID NO: 326992 - DNA, 20 bp, Artificial Sequence
  Description of Artificial Sequence: Synthetic oligonucleotide
  Target: LAMA2; (+) strand; PAM type: YTN; PAM sequence: TTT
tgtgagtgaatgaatctata

SEQ ID NO: 326993 - DNA, 20 bp, Artificial Sequence
  Description of Artificial Sequence: Synthetic oligonucleotide
  Target: LAMA2; (+) strand; PAM type: YTN; PAM sequence: TTT
gtgagtgaatgaatctatat

SEQ ID NO: 326994 - DNA, 20 bp, Artificial Sequence
  Description of Artificial Sequence: Synthetic oligonucleotide
  Target: LAMA2; (+) strand; PAM type: YTN; PAM sequence: TTG
tgagtgaatgaatctatata

SEQ ID NO: 326995 - DNA, 20 bp, Artificial Sequence
  Description of Artificial Sequence: Synthetic oligonucleotide
  Target: LAMA2; (+) strand; PAM type: YTN; PAM sequence: CTA
tatactgaaaacatttcatt

SEQ ID NO: 326996 - DNA, 20 bp, Artificial Sequence
  Description of Artificial Sequence: Synthetic oligonucleotide
  Target: LAMA2; (+) strand; PAM type: YTN; PAM sequence: CTG
aaaacatttcattcaataag

SEQ ID NO: 326997 - DNA, 20 bp, Artificial Sequence
  Description of Artificial Sequence: Synthetic oligonucleotide
  Target: LAMA2; (+) strand; PAM type: YTN; PAM sequence: TTT
cattcaataagttgaccttc

SEQ ID NO: 326998 - DNA, 20 bp, Artificial Sequence
  Description of Artificial Sequence: Synthetic oligonucleotide
  Target: LAMA2; (+) strand; PAM type: YTN; PAM sequence: TTC
attcaataagttgaccttct

SEQ ID NO: 326999 - DNA, 20 bp, Artificial Sequence
  Description of Artificial Sequence: Synthetic oligonucleotide
  Target: LAMA2; (+) strand; PAM type: YTN; PAM sequence: TTC
aataagttgaccttcttgag

SEQ ID NO: 327000 - DNA, 20 bp, Artificial Sequence
  Description of Artificial Sequence: Synthetic oligonucleotide
  Target: LAMA2; (+) strand; PAM type: YTN; PAM sequence: TTG
accttcttgaggtttgaata

SEQ ID NO: 327001 - DNA, 20 bp, Artificial Sequence
  Description of Artificial Sequence: Synthetic oligonucleotide
  Target: LAMA2; (+) strand; PAM type: YTN; PAM sequence: CTT
cttgaggtttgaataaattt

SEQ ID NO: 327002 - DNA, 20 bp, Artificial Sequence
  Description of Artificial Sequence: Synthetic oligonucleotide
  Target: LAMA2; (+) strand; PAM type: YTN; PAM sequence: TTC
ttgaggtttgaataaatttt

SEQ ID NO: 327003 - DNA, 20 bp, Artificial Sequence
  Description of Artificial Sequence: Synthetic oligonucleotide
  Target: LAMA2; (+) strand; PAM type: YTN; PAM sequence: CTT
gaggtttgaataaattttgg

SEQ ID NO: 327004 - DNA, 20 bp, Artificial Sequence
  Description of Artificial Sequence: Synthetic oligonucleotide
  Target: LAMA2; (+) strand; PAM type: YTN; PAM sequence: TTG
aggtttgaataaattttgga

SEQ ID NO: 327005 - DNA, 20 bp, Artificial Sequence
  Description of Artificial Sequence: Synthetic oligonucleotide
  Target: LAMA2; (+) strand; PAM type: YTN; PAM sequence: TTT
gaataaattttggagcctga

SEQ ID NO: 327006 - DNA, 20 bp, Artificial Sequence
  Description of Artificial Sequence: Synthetic oligonucleotide
  Target: LAMA2; (+) strand; PAM type: YTN; PAM sequence: TTG
aataaattttggagcctgag

SEQ ID NO: 327007 - DNA, 20 bp, Artificial Sequence
  Description of Artificial Sequence: Synthetic oligonucleotide
  Target: LAMA2; (+) strand; PAM type: YTN; PAM sequence: TTT
tggagcctgagggaatcaat

SEQ ID NO: 327008 - DNA, 20 bp, Artificial Sequence
  Description of Artificial Sequence: Synthetic oligonucleotide
  Target: LAMA2; (+) strand; PAM type: YTN; PAM sequence: TTT
ggagcctgagggaatcaata

SEQ ID NO: 327009 - DNA, 20 bp, Artificial Sequence
  Description of Artificial Sequence: Synthetic oligonucleotide
  Target: LAMA2; (+) strand; PAM type: YTN; PAM sequence: TTG
gagcctgagggaatcaatat

SEQ ID NO: 327010 - DNA, 20 bp, Artificial Sequence
  Description of Artificial Sequence: Synthetic oligonucleotide
  Target: LAMA2; (+) strand; PAM type: YTN; PAM sequence: CTG
agggaatcaatatggttttt

SEQ ID NO: 327011 - DNA, 20 bp, Artificial Sequence
  Description of Artificial Sequence: Synthetic oligonucleotide
  Target: LAMA2; (+) strand; PAM type: YTN; PAM sequence: TTT
ttaagttgatctcctaggta

SEQ ID NO: 327012 - DNA, 20 bp, Artificial Sequence
  Description of Artificial Sequence: Synthetic oligonucleotide
  Target: LAMA2; (+) strand; PAM type: YTN; PAM sequence: TTT
taagttgatctcctaggtat

SEQ ID NO: 327013 - DNA, 20 bp, Artificial Sequence
  Description of Artificial Sequence: Synthetic oligonucleotide
  Target: LAMA2; (+) strand; PAM type: YTN; PAM sequence: TTT
aagttgatctcctaggtatg

SEQ ID NO: 327014 - DNA, 20 bp, Artificial Sequence
  Description of Artificial Sequence: Synthetic oligonucleotide
  Target: LAMA2; (+) strand; PAM type: YTN; PAM sequence: TTA
agttgatctcctaggtatgt

SEQ ID NO: 327015 - DNA, 20 bp, Artificial Sequence
  Description of Artificial Sequence: Synthetic oligonucleotide
  Target: LAMA2; (+) strand; PAM type: YTN; PAM sequence: TTG
atctcctaggtatgtctaag

SEQ ID NO: 327016 - DNA, 20 bp, Artificial Sequence
  Description of Artificial Sequence: Synthetic oligonucleotide
  Target: LAMA2; (+) strand; PAM type: YTN; PAM sequence: CTC
ctaggtatgtctaagtttaa

SEQ ID NO: 327017 - DNA, 20 bp, Artificial Sequence
  Description of Artificial Sequence: Synthetic oligonucleotide
  Target: LAMA2; (+) strand; PAM type: YTN; PAM sequence: CTA
ggtatgtctaagtttaagtt

SEQ ID NO: 327018 - DNA, 20 bp, Artificial Sequence
  Description of Artificial Sequence: Synthetic oligonucleotide
  Target: LAMA2; (+) strand; PAM type: YTN; PAM sequence: CTA
agtttaagttcttaatataa

SEQ ID NO: 327019 - DNA, 20 bp, Artificial Sequence
  Description of Artificial Sequence: Synthetic oligonucleotide
  Target: LAMA2; (+) strand; PAM type: YTN; PAM sequence: TTT
aagttcttaatataattatc

SEQ ID NO: 327020 - DNA, 20 bp, Artificial Sequence
  Description of Artificial Sequence: Synthetic oligonucleotide
  Target: LAMA2; (+) strand; PAM type: YTN; PAM sequence: TTA
agttcttaatataattatca

SEQ ID NO: 327021 - DNA, 20 bp, Artificial Sequence
  Description of Artificial Sequence: Synthetic oligonucleotide
  Target: LAMA2; (+) strand; PAM type: YTN; PAM sequence: TTC
ttaatataattatcaaccct

SEQ ID NO: 327022 - DNA, 20 bp, Artificial Sequence
  Description of Artificial Sequence: Synthetic oligonucleotide
  Target: LAMA2; (+) strand; PAM type: YTN; PAM sequence: CTT
aatataattatcaacccttt

SEQ ID NO: 327023 - DNA, 20 bp, Artificial Sequence
  Description of Artificial Sequence: Synthetic oligonucleotide
  Target: LAMA2; (+) strand; PAM type: YTN; PAM sequence: TTA
atataattatcaacccttta

SEQ ID NO: 327024 - DNA, 20 bp, Artificial Sequence
  Description of Artificial Sequence: Synthetic oligonucleotide
  Target: LAMA2; (+) strand; PAM type: YTN; PAM sequence: TTA
tcaaccctttattattttaa

SEQ ID NO: 327025 - DNA, 20 bp, Artificial Sequence
  Description of Artificial Sequence: Synthetic oligonucleotide
  Target: LAMA2; (+) strand; PAM type: YTN; PAM sequence: CTT
tattattttaatatttcatt

SEQ ID NO: 327026 - DNA, 20 bp, Artificial Sequence
  Description of Artificial Sequence: Synthetic oligonucleotide
  Target: LAMA2; (+) strand; PAM type: YTN; PAM sequence: TTT
attattttaatatttcatta

SEQ ID NO: 327027 - DNA, 20 bp, Artificial Sequence
  Description of Artificial Sequence: Synthetic oligonucleotide
  Target: LAMA2; (+) strand; PAM type: YTN; PAM sequence: TTA
ttattttaatatttcattac

SEQ ID NO: 327028 - DNA, 20 bp, Artificial Sequence
  Description of Artificial Sequence: Synthetic oligonucleotide
  Target: LAMA2; (+) strand; PAM type: YTN; PAM sequence: TTA
ttttaatatttcattacatt

SEQ ID NO: 327029 - DNA, 20 bp, Artificial Sequence
  Description of Artificial Sequence: Synthetic oligonucleotide
  Target: LAMA2; (+) strand; PAM type: YTN; PAM sequence: TTT
taatatttcattacattaat

SEQ ID NO: 327030 - DNA, 20 bp, Artificial Sequence
  Description of Artificial Sequence: Synthetic oligonucleotide
  Target: LAMA2; (+) strand; PAM type: YTN; PAM sequence: TTT
aatatttcattacattaatt

SEQ ID NO: 327031 - DNA, 20 bp, Artificial Sequence
  Description of Artificial Sequence: Synthetic oligonucleotide
  Target: LAMA2; (+) strand; PAM type: YTN; PAM sequence: TTA
atatttcattacattaatta

SEQ ID NO: 327032 - DNA, 20 bp, Artificial Sequence
  Description of Artificial Sequence: Synthetic oligonucleotide
  Target: LAMA2; (+) strand; PAM type: YTN; PAM sequence: TTT
cattacattaattatctttt

SEQ ID NO: 327033 - DNA, 20 bp, Artificial Sequence
  Description of Artificial Sequence: Synthetic oligonucleotide
  Target: LAMA2; (+) strand; PAM type: YTN; PAM sequence: TTC
attacattaattatcttttg

SEQ ID NO: 327034 - DNA, 20 bp, Artificial Sequence
  Description of Artificial Sequence: Synthetic oligonucleotide
  Target: LAMA2; (+) strand; PAM type: YTN; PAM sequence: TTA
cattaattatcttttggaat

SEQ ID NO: 327035 - DNA, 20 bp, Artificial Sequence
  Description of Artificial Sequence: Synthetic oligonucleotide
  Target: LAMA2; (+) strand; PAM type: YTN; PAM sequence: TTA
attatcttttggaatatttt

SEQ ID NO: 327036 - DNA, 20 bp, Artificial Sequence
  Description of Artificial Sequence: Synthetic oligonucleotide
  Target: LAMA2; (+) strand; PAM type: YTN; PAM sequence: TTA
tcttttggaatattttcact

SEQ ID NO: 327037 - DNA, 20 bp, Artificial Sequence
  Description of Artificial Sequence: Synthetic oligonucleotide
  Target: LAMA2; (+) strand; PAM type: YTN; PAM sequence: CTT
ttggaatattttcactgatc

SEQ ID NO: 327038 - DNA, 20 bp, Artificial Sequence
  Description of Artificial Sequence: Synthetic oligonucleotide
  Target: LAMA2; (+) strand; PAM type: YTN; PAM sequence: TTT
tggaatattttcactgatca

SEQ ID NO: 327039 - DNA, 20 bp, Artificial Sequence
  Description of Artificial Sequence: Synthetic oligonucleotide
  Target: LAMA2; (+) strand; PAM type: YTN; PAM sequence: TTT
ggaatattttcactgatcag

SEQ ID NO: 327040 - DNA, 20 bp, Artificial Sequence
  Description of Artificial Sequence: Synthetic oligonucleotide
  Target: LAMA2; (+) strand; PAM type: YTN; PAM sequence: TTG
gaatattttcactgatcagt

SEQ ID NO: 327041 - DNA, 20 bp, Artificial Sequence
  Description of Artificial Sequence: Synthetic oligonucleotide
  Target: LAMA2; (+) strand; PAM type: YTN; PAM sequence: TTT
tcactgatcagtaacttcta

SEQ ID NO: 327042 - DNA, 20 bp, Artificial Sequence
  Description of Artificial Sequence: Synthetic oligonucleotide
  Target: LAMA2; (+) strand; PAM type: YTN; PAM sequence: TTT
cactgatcagtaacttctag

SEQ ID NO: 327043 - DNA, 20 bp, Artificial Sequence
  Description of Artificial Sequence: Synthetic oligonucleotide
  Target: LAMA2; (+) strand; PAM type: YTN; PAM sequence: TTC
actgatcagtaacttctagt

SEQ ID NO: 327044 - DNA, 20 bp, Artificial Sequence
  Description of Artificial Sequence: Synthetic oligonucleotide
  Target: LAMA2; (+) strand; PAM type: YTN; PAM sequence: CTG
atcagtaacttctagtcata

SEQ ID NO: 327045 - DNA, 20 bp, Artificial Sequence
  Description of Artificial Sequence: Synthetic oligonucleotide
  Target: LAMA2; (+) strand; PAM type: YTN; PAM sequence: CTT
ctagtcataagccgttctgg

SEQ ID NO: 327046 - DNA, 20 bp, Artificial Sequence
  Description of Artificial Sequence: Synthetic oligonucleotide
  Target: LAMA2; (+) strand; PAM type: YTN; PAM sequence: TTC
tagtcataagccgttctggt

SEQ ID NO: 327047 - DNA, 20 bp, Artificial Sequence
  Description of Artificial Sequence: Synthetic oligonucleotide
  Target: LAMA2; (+) strand; PAM type: YTN; PAM sequence: CTA
gtcataagccgttctggtac

SEQ ID NO: 327048 - DNA, 20 bp, Artificial Sequence
  Description of Artificial Sequence: Synthetic oligonucleotide
  Target: LAMA2; (+) strand; PAM type: YTN; PAM sequence: TTC
tggtaccaatcatcaaattt

SEQ ID NO: 327049 - DNA, 20 bp, Artificial Sequence
  Description of Artificial Sequence: Synthetic oligonucleotide
  Target: LAMA2; (+) strand; PAM type: YTN; PAM sequence: CTG
gtaccaatcatcaaatttca

SEQ ID NO: 327050 - DNA, 20 bp, Artificial Sequence
  Description of Artificial Sequence: Synthetic oligonucleotide
  Target: LAMA2; (+) strand; PAM type: YTN; PAM sequence: TTT
catatttgtaagaaaaaatg

SEQ ID NO: 327051 - DNA, 20 bp, Artificial Sequence
  Description of Artificial Sequence: Synthetic oligonucleotide
  Target: LAMA2; (+) strand; PAM type: YTN; PAM sequence: TTC
atatttgtaagaaaaaatga

SEQ ID NO: 327052 - DNA, 20 bp, Artificial Sequence
  Description of Artificial Sequence: Synthetic oligonucleotide
  Target: LAMA2; (+) strand; PAM type: YTN; PAM sequence: TTT
gtaagaaaaaatgactagcc

SEQ ID NO: 327053 - DNA, 20 bp, Artificial Sequence
  Description of Artificial Sequence: Synthetic oligonucleotide
  Target: LAMA2; (+) strand; PAM type: YTN; PAM sequence: TTG
taagaaaaaatgactagcct

SEQ ID NO: 327054 - DNA, 20 bp, Artificial Sequence
  Description of Artificial Sequence: Synthetic oligonucleotide
  Target: LAMA2; (+) strand; PAM type: YTN; PAM sequence: CTA
gcctttggctgtcttgacat

SEQ ID NO: 327055 - DNA, 20 bp, Artificial Sequence
  Description of Artificial Sequence: Synthetic oligonucleotide
  Target: LAMA2; (+) strand; PAM type: YTN; PAM sequence: CTT
tggctgtcttgacatgccca

SEQ ID NO: 327056 - DNA, 20 bp, Artificial Sequence
  Description of Artificial Sequence: Synthetic oligonucleotide
  Target: LAMA2; (+) strand; PAM type: YTN; PAM sequence: TTT
ggctgtcttgacatgcccaa

SEQ ID NO: 327057 - DNA, 20 bp, Artificial Sequence
  Description of Artificial Sequence: Synthetic oligonucleotide
  Target: LAMA2; (+) strand; PAM type: YTN; PAM sequence: TTG
gctgtcttgacatgcccaaa

SEQ ID NO: 327058 - DNA, 20 bp, Artificial Sequence
  Description of Artificial Sequence: Synthetic oligonucleotide
  Target: LAMA2; (+) strand; PAM type: YTN; PAM sequence: CTG
tcttgacatgcccaaatcca

SEQ ID NO: 327059 - DNA, 20 bp, Artificial Sequence
  Description of Artificial Sequence: Synthetic oligonucleotide
  Target: LAMA2; (+) strand; PAM type: YTN; PAM sequence: CTT
gacatgcccaaatccaccaa

SEQ ID NO: 327060 - DNA, 20 bp, Artificial Sequence
  Description of Artificial Sequence: Synthetic oligonucleotide
  Target: LAMA2; (+) strand; PAM type: YTN; PAM sequence: TTG
acatgcccaaatccaccaag

SEQ ID NO: 327061 - DNA, 20 bp, Artificial Sequence
  Description of Artificial Sequence: Synthetic oligonucleotide
  Target: LAMA2; (+) strand; PAM type: YTN; PAM sequence: CTC
acttccaaaatagtctcagg

SEQ ID NO: 327062 - DNA, 20 bp, Artificial Sequence
  Description of Artificial Sequence: Synthetic oligonucleotide
  Target: LAMA2; (+) strand; PAM type: YTN; PAM sequence: CTT
ccaaaatagtctcaggatat

SEQ ID NO: 327063 - DNA, 20 bp, Artificial Sequence
  Description of Artificial Sequence: Synthetic oligonucleotide
  Target: LAMA2; (+) strand; PAM type: YTN; PAM sequence: TTC
caaaatagtctcaggatatg

SEQ ID NO: 327064 - DNA, 20 bp, Artificial Sequence
  Description of Artificial Sequence: Synthetic oligonucleotide
  Target: LAMA2; (+) strand; PAM type: YTN; PAM sequence: CTC
aggatatgttttctagatat

SEQ ID NO: 327065 - DNA, 20 bp, Artificial Sequence
  Description of Artificial Sequence: Synthetic oligonucleotide
  Target: LAMA2; (+) strand; PAM type: YTN; PAM sequence: TTT
tctagatatgatcttagatg

SEQ ID NO: 327066 - DNA, 20 bp, Artificial Sequence
  Description of Artificial Sequence: Synthetic oligonucleotide
  Target: LAMA2; (+) strand; PAM type: YTN; PAM sequence: TTT
ctagatatgatcttagatga

SEQ ID NO: 327067 - DNA, 20 bp, Artificial Sequence
  Description of Artificial Sequence: Synthetic oligonucleotide
  Target: LAMA2; (+) strand; PAM type: YTN; PAM sequence: TTC
tagatatgatcttagatgat

SEQ ID NO: 327068 - DNA, 20 bp, Artificial Sequence
  Description of Artificial Sequence: Synthetic oligonucleotide
  Target: LAMA2; (+) strand; PAM type: YTN; PAM sequence: CTA
gatatgatcttagatgatgg

SEQ ID NO: 327069 - DNA, 20 bp, Artificial Sequence
  Description of Artificial Sequence: Synthetic oligonucleotide
  Target: LAMA2; (+) strand; PAM type: YTN; PAM sequence: CTT
agatgatggagtgtattgtt

SEQ ID NO: 327070 - DNA, 20 bp, Artificial Sequence
  Description of Artificial Sequence: Synthetic oligonucleotide
  Target: LAMA2; (+) strand; PAM type: YTN; PAM sequence: TTA
gatgatggagtgtattgtta

SEQ ID NO: 327071 - DNA, 20 bp, Artificial Sequence
  Description of Artificial Sequence: Synthetic oligonucleotide
  Target: LAMA2; (+) strand; PAM type: YTN; PAM sequence: TTG
ttaaattaacaagtagtata

SEQ ID NO: 327072 - DNA, 20 bp, Artificial Sequence
  Description of Artificial Sequence: Synthetic oligonucleotide
  Target: LAMA2; (+) strand; PAM type: YTN; PAM sequence: TTA
aattaacaagtagtataaaa

SEQ ID NO: 327073 - DNA, 20 bp, Artificial Sequence
  Description of Artificial Sequence: Synthetic oligonucleotide
  Target: LAMA2; (+) strand; PAM type: YTN; PAM sequence: TTA
acaagtagtataaaaataga

SEQ ID NO: 327074 - DNA, 20 bp, Artificial Sequence
  Description of Artificial Sequence: Synthetic oligonucleotide
  Target: LAMA2; (+) strand; PAM type: YTN; PAM sequence: TTA
ttaaaaatacaaggagaaag

SEQ ID NO: 327075 - DNA, 20 bp, Artificial Sequence
  Description of Artificial Sequence: Synthetic oligonucleotide
  Target: LAMA2; (+) strand; PAM type: YTN; PAM sequence: TTA
aaaatacaaggagaaaggaa

SEQ ID NO: 327076 - DNA, 20 bp, Artificial Sequence
  Description of Artificial Sequence: Synthetic oligonucleotide
  Target: LAMA2; (+) strand; PAM type: YTN; PAM sequence: TTA
gaaacaagtaagaagttcca

SEQ ID NO: 327077 - DNA, 20 bp, Artificial Sequence
  Description of Artificial Sequence: Synthetic oligonucleotide
  Target: LAMA2; (+) strand; PAM type: YTN; PAM sequence: TTC
catatggaaaactgataagc

SEQ ID NO: 327078 - DNA, 20 bp, Artificial Sequence
  Description of Artificial Sequence: Synthetic oligonucleotide
  Target: LAMA2; (+) strand; PAM type: YTN; PAM sequence: CTG
ataagcaattttttagaagc

SEQ ID NO: 327079 - DNA, 20 bp, Artificial Sequence
  Description of Artificial Sequence: Synthetic oligonucleotide
  Target: LAMA2; (+) strand; PAM type: YTN; PAM sequence: TTT
tttagaagcaaaaatctcat

SEQ ID NO: 327080 - DNA, 20 bp, Artificial Sequence
  Description of Artificial Sequence: Synthetic oligonucleotide
  Target: LAMA2; (+) strand; PAM type: YTN; PAM sequence: TTT
ttagaagcaaaaatctcatg

SEQ ID NO: 327081 - DNA, 20 bp, Artificial Sequence
  Description of Artificial Sequence: Synthetic oligonucleotide
  Target: LAMA2; (+) strand; PAM type: YTN; PAM sequence: TTT
tagaagcaaaaatctcatga

SEQ ID NO: 327082 - DNA, 20 bp, Artificial Sequence
  Description of Artificial Sequence: Synthetic oligonucleotide
  Target: LAMA2; (+) strand; PAM type: YTN; PAM sequence: TTT
agaagcaaaaatctcatgac

SEQ ID NO: 327083 - DNA, 20 bp, Artificial Sequence
  Description of Artificial Sequence: Synthetic oligonucleotide
  Target: LAMA2; (+) strand; PAM type: YTN; PAM sequence: TTA
gaagcaaaaatctcatgacg

SEQ ID NO: 327084 - DNA, 20 bp, Artificial Sequence
  Description of Artificial Sequence: Synthetic oligonucleotide
  Target: LAMA2; (+) strand; PAM type: YTN; PAM sequence: CTC
atgacgctaaaacaagatga

SEQ ID NO: 327085 - DNA, 20 bp, Artificial Sequence
  Description of Artificial Sequence: Synthetic oligonucleotide
  Target: LAMA2; (+) strand; PAM type: YTN; PAM sequence: CTA
aaacaagatgatgaagaaat

SEQ ID NO: 327086 - DNA, 20 bp, Artificial Sequence
  Description of Artificial Sequence: Synthetic oligonucleotide
  Target: LAMA2; (+) strand; PAM type: YTN; PAM sequence: TTA
ctctgtgtgcaagtgtggag

SEQ ID NO: 327087 - DNA, 20 bp, Artificial Sequence
  Description of Artificial Sequence: Synthetic oligonucleotide
  Target: LAMA2; (+) strand; PAM type: YTN; PAM sequence: CTC
tgtgtgcaagtgtggagaaa

SEQ ID NO: 327088 - DNA, 20 bp, Artificial Sequence
  Description of Artificial Sequence: Synthetic oligonucleotide
  Target: LAMA2; (+) strand; PAM type: YTN; PAM sequence: CTG
tgtgcaagtgtggagaaaaa

SEQ ID NO: 327089 - DNA, 20 bp, Artificial Sequence
  Description of Artificial Sequence: Synthetic oligonucleotide
  Target: LAMA2; (+) strand; PAM type: YTN; PAM sequence: CTT
gtgataccatagtgatctta

SEQ ID NO: 327090 - DNA, 20 bp, Artificial Sequence
  Description of Artificial Sequence: Synthetic oligonucleotide
  Target: LAMA2; (+) strand; PAM type: YTN; PAM sequence: TTG
tgataccatagtgatcttag

SEQ ID NO: 327091 - DNA, 20 bp, Artificial Sequence
  Description of Artificial Sequence: Synthetic oligonucleotide
  Target: LAMA2; (+) strand; PAM type: YTN; PAM sequence: CTT
agagctcattatacatcagc

SEQ ID NO: 327092 - DNA, 20 bp, Artificial Sequence
  Description of Artificial Sequence: Synthetic oligonucleotide
  Target: LAMA2; (+) strand; PAM type: YTN; PAM sequence: TTA
gagctcattatacatcagca

SEQ ID NO: 327093 - DNA, 20 bp, Artificial Sequence
  Description of Artificial Sequence: Synthetic oligonucleotide
  Target: LAMA2; (+) strand; PAM type: YTN; PAM sequence: CTC
attatacatcagcaatgaag

SEQ ID NO: 327094 - DNA, 20 bp, Artificial Sequence
  Description of Artificial Sequence: Synthetic oligonucleotide
  Target: LAMA2; (+) strand; PAM type: YTN; PAM sequence: TTA
tacatcagcaatgaagagct

SEQ ID NO: 327095 - DNA, 20 bp, Artificial Sequence
  Description of Artificial Sequence: Synthetic oligonucleotide
  Target: LAMA2; (+) strand; PAM type: YTN; PAM sequence: CTT
taactaccatgcaattaaaa

SEQ ID NO: 327096 - DNA, 20 bp, Artificial Sequence
  Description of Artificial Sequence: Synthetic oligonucleotide
  Target: LAMA2; (+) strand; PAM type: YTN; PAM sequence: TTT
aactaccatgcaattaaaat

SEQ ID NO: 327097 - DNA, 20 bp, Artificial Sequence
  Description of Artificial Sequence: Synthetic oligonucleotide
  Target: LAMA2; (+) strand; PAM type: YTN; PAM sequence: TTA
actaccatgcaattaaaata

SEQ ID NO: 327098 - DNA, 20 bp, Artificial Sequence
  Description of Artificial Sequence: Synthetic oligonucleotide
  Target: LAMA2; (+) strand; PAM type: YTN; PAM sequence: CTA
ccatgcaattaaaatactag

SEQ ID NO: 327099 - DNA, 20 bp, Artificial Sequence
  Description of Artificial Sequence: Synthetic oligonucleotide
  Target: LAMA2; (+) strand; PAM type: YTN; PAM sequence: TTA
aaatactagagagtataaat

SEQ ID NO: 327100 - DNA, 20 bp, Artificial Sequence
  Description of Artificial Sequence: Synthetic oligonucleotide
  Target: LAMA2; (+) strand; PAM type: YTN; PAM sequence: CTA
gagagtataaataagattgt

SEQ ID NO: 327101 - DNA, 20 bp, Artificial Sequence
  Description of Artificial Sequence: Synthetic oligonucleotide
  Target: LAMA2; (+) strand; PAM type: YTN; PAM sequence: TTG
taccatgtgtatgtggcagc

SEQ ID NO: 327102 - DNA, 20 bp, Artificial Sequence
  Description of Artificial Sequence: Synthetic oligonucleotide
  Target: LAMA2; (+) strand; PAM type: YTN; PAM sequence: CTC
agaagtggaaggaattttag

SEQ ID NO: 327103 - DNA, 20 bp, Artificial Sequence
  Description of Artificial Sequence: Synthetic oligonucleotide
  Target: LAMA2; (+) strand; PAM type: YTN; PAM sequence: TTT
tagtcaagtgttactcttga

SEQ ID NO: 327104 - DNA, 20 bp, Artificial Sequence
  Description of Artificial Sequence: Synthetic oligonucleotide
  Target: LAMA2; (+) strand; PAM type: YTN; PAM sequence: TTT
agtcaagtgttactcttgaa

SEQ ID NO: 327105 - DNA, 20 bp, Artificial Sequence
  Description of Artificial Sequence: Synthetic oligonucleotide
  Target: LAMA2; (+) strand; PAM type: YTN; PAM sequence: TTA
gtcaagtgttactcttgaaa

SEQ ID NO: 327106 - DNA, 20 bp, Artificial Sequence
  Description of Artificial Sequence: Synthetic oligonucleotide
  Target: LAMA2; (+) strand; PAM type: YTN; PAM sequence: TTA
ctcttgaaaaagcaaacgga

SEQ ID NO: 327107 - DNA, 20 bp, Artificial Sequence
  Description of Artificial Sequence: Synthetic oligonucleotide
  Target: LAMA2; (+) strand; PAM type: YTN; PAM sequence: CTC
ttgaaaaagcaaacggatta

SEQ ID NO: 327108 - DNA, 20 bp, Artificial Sequence
  Description of Artificial Sequence: Synthetic oligonucleotide
  Target: LAMA2; (+) strand; PAM type: YTN; PAM sequence: CTT
gaaaaagcaaacggattagg

SEQ ID NO: 327109 - DNA, 20 bp, Artificial Sequence
  Description of Artificial Sequence: Synthetic oligonucleotide
  Target: LAMA2; (+) strand; PAM type: YTN; PAM sequence: TTG
aaaaagcaaacggattagga

SEQ ID NO: 327110 - DNA, 20 bp, Artificial Sequence
  Description of Artificial Sequence: Synthetic oligonucleotide
  Target: LAMA2; (+) strand; PAM type: YTN; PAM sequence: TTA
ggaatatttaattggagaac

SEQ ID NO: 327111 - DNA, 20 bp, Artificial Sequence
  Description of Artificial Sequence: Synthetic oligonucleotide
  Target: LAMA2; (+) strand; PAM type: YTN; PAM sequence: TTT
aattggagaacaacatagac

SEQ ID NO: 327112 - DNA, 20 bp, Artificial Sequence
  Description of Artificial Sequence: Synthetic oligonucleotide
  Target: LAMA2; (+) strand; PAM type: YTN; PAM sequence: TTA
attggagaacaacatagaca

SEQ ID NO: 327113 - DNA, 20 bp, Artificial Sequence
  Description of Artificial Sequence: Synthetic oligonucleotide
  Target: LAMA2; (+) strand; PAM type: YTN; PAM sequence: TTG
gagaacaacatagacacctt

SEQ ID NO: 327114 - DNA, 20 bp, Artificial Sequence
  Description of Artificial Sequence: Synthetic oligonucleotide
  Target: LAMA2; (+) strand; PAM type: YTN; PAM sequence: CTT
ctgtaatattattcaagtaa

SEQ ID NO: 327115 - DNA, 20 bp, Artificial Sequence
  Description of Artificial Sequence: Synthetic oligonucleotide
  Target: LAMA2; (+) strand; PAM type: YTN; PAM sequence: TTC
tgtaatattattcaagtaag

SEQ ID NO: 327116 - DNA, 20 bp, Artificial Sequence
  Description of Artificial Sequence: Synthetic oligonucleotide
  Target: LAMA2; (+) strand; PAM type: YTN; PAM sequence: CTG
taatattattcaagtaagaa

SEQ ID NO: 327117 - DNA, 20 bp, Artificial Sequence
  Description of Artificial Sequence: Synthetic oligonucleotide
  Target: LAMA2; (+) strand; PAM type: YTN; PAM sequence: TTA
ttcaagtaagaatgtctcat

SEQ ID NO: 327118 - DNA, 20 bp, Artificial Sequence
  Description of Artificial Sequence: Synthetic oligonucleotide
  Target: LAMA2; (+) strand; PAM type: YTN; PAM sequence: TTC
aagtaagaatgtctcatttt

SEQ ID NO: 327119 - DNA, 20 bp, Artificial Sequence
  Description of Artificial Sequence: Synthetic oligonucleotide
  Target: LAMA2; (+) strand; PAM type: YTN; PAM sequence: CTC
attttggacatcttacttat

SEQ ID NO: 327120 - DNA, 20 bp, Artificial Sequence
  Description of Artificial Sequence: Synthetic oligonucleotide
  Target: LAMA2; (+) strand; PAM type: YTN; PAM sequence: TTT
tggacatcttacttatagtc

SEQ ID NO: 327121 - DNA, 20 bp, Artificial Sequence
  Description of Artificial Sequence: Synthetic oligonucleotide
  Target: LAMA2; (+) strand; PAM type: YTN; PAM sequence: TTT
ggacatcttacttatagtca

SEQ ID NO: 327122 - DNA, 20 bp, Artificial Sequence
  Description of Artificial Sequence: Synthetic oligonucleotide
  Target: LAMA2; (+) strand; PAM type: YTN; PAM sequence: TTG
gacatcttacttatagtcag

SEQ ID NO: 327123 - DNA, 20 bp, Artificial Sequence
  Description of Artificial Sequence: Synthetic oligonucleotide
  Target: LAMA2; (+) strand; PAM type: YTN; PAM sequence: CTT
acttatagtcagattgattc

SEQ ID NO: 327124 - DNA, 20 bp, Artificial Sequence
  Description of Artificial Sequence: Synthetic oligonucleotide
  Target: LAMA2; (+) strand; PAM type: YTN; PAM sequence: TTA
cttatagtcagattgattct

SEQ ID NO: 327125 - DNA, 20 bp, Artificial Sequence
  Description of Artificial Sequence: Synthetic oligonucleotide
  Target: LAMA2; (+) strand; PAM type: YTN; PAM sequence: CTT
atagtcagattgattctcaa

SEQ ID NO: 327126 - DNA, 20 bp, Artificial Sequence
  Description of Artificial Sequence: Synthetic oligonucleotide
  Target: LAMA2; (+) strand; PAM type: YTN; PAM sequence: TTA
tagtcagattgattctcaaa

SEQ ID NO: 327127 - DNA, 20 bp, Artificial Sequence
  Description of Artificial Sequence: Synthetic oligonucleotide
  Target: LAMA2; (+) strand; PAM type: YTN; PAM sequence: TTG
attctcaaaacactttttaa

SEQ ID NO: 327128 - DNA, 20 bp, Artificial Sequence
  Description of Artificial Sequence: Synthetic oligonucleotide
  Target: LAMA2; (+) strand; PAM type: YTN; PAM sequence: TTC
tcaaaacactttttaaatgt

SEQ ID NO: 327129 - DNA, 20 bp, Artificial Sequence
  Description of Artificial Sequence: Synthetic oligonucleotide
  Target: LAMA2; (+) strand; PAM type: YTN; PAM sequence: CTC
aaaacactttttaaatgtct

SEQ ID NO: 327130 - DNA, 20 bp, Artificial Sequence
  Description of Artificial Sequence: Synthetic oligonucleotide
  Target: LAMA2; (+) strand; PAM type: YTN; PAM sequence: CTT
tttaaatgtctagaaatatt

SEQ ID NO: 327131 - DNA, 20 bp, Artificial Sequence
  Description of Artificial Sequence: Synthetic oligonucleotide
  Target: LAMA2; (+) strand; PAM type: YTN; PAM sequence: TTT
ttaaatgtctagaaatattt

SEQ ID NO: 327132 - DNA, 20 bp, Artificial Sequence
  Description of Artificial Sequence: Synthetic oligonucleotide
  Target: LAMA2; (+) strand; PAM type: YTN; PAM sequence: TTT
taaatgtctagaaatattta

SEQ ID NO: 327133 - DNA, 20 bp, Artificial Sequence
  Description of Artificial Sequence: Synthetic oligonucleotide
  Target: LAMA2; (+) strand; PAM type: YTN; PAM sequence: TTT
aaatgtctagaaatatttac

SEQ ID NO: 327134 - DNA, 20 bp, Artificial Sequence
  Description of Artificial Sequence: Synthetic oligonucleotide
  Target: LAMA2; (+) strand; PAM type: YTN; PAM sequence: TTA
aatgtctagaaatatttaca

SEQ ID NO: 327135 - DNA, 20 bp, Artificial Sequence
  Description of Artificial Sequence: Synthetic oligonucleotide
  Target: LAMA2; (+) strand; PAM type: YTN; PAM sequence: CTA
gaaatatttacaatggtatt

SEQ ID NO: 327136 - DNA, 20 bp, Artificial Sequence
  Description of Artificial Sequence: Synthetic oligonucleotide
  Target: LAMA2; (+) strand; PAM type: YTN; PAM sequence: TTT
acaatggtatttatcctgag

SEQ ID NO: 327137 - DNA, 20 bp, Artificial Sequence
  Description of Artificial Sequence: Synthetic oligonucleotide
  Target: LAMA2; (+) strand; PAM type: YTN; PAM sequence: TTA
caatggtatttatcctgaga

SEQ ID NO: 327138 - DNA, 20 bp, Artificial Sequence
  Description of Artificial Sequence: Synthetic oligonucleotide
  Target: LAMA2; (+) strand; PAM type: YTN; PAM sequence: TTT
atcctgagaaatgctaaaaa

SEQ ID NO: 327139 - DNA, 20 bp, Artificial Sequence
  Description of Artificial Sequence: Synthetic oligonucleotide
  Target: LAMA2; (+) strand; PAM type: YTN; PAM sequence: TTA
tcctgagaaatgctaaaaaa

SEQ ID NO: 327140 - DNA, 20 bp, Artificial Sequence
  Description of Artificial Sequence: Synthetic oligonucleotide
  Target: LAMA2; (+) strand; PAM type: YTN; PAM sequence: CTG
agaaatgctaaaaaaaatta

SEQ ID NO: 327141 - DNA, 20 bp, Artificial Sequence
  Description of Artificial Sequence: Synthetic oligonucleotide
  Target: LAMA2; (+) strand; PAM type: YTN; PAM sequence: CTA
aaaaaaattagaaaatgtaa

SEQ ID NO: 327142 - DNA, 20 bp, Artificial Sequence
  Description of Artificial Sequence: Synthetic oligonucleotide
  Target: LAMA2; (+) strand; PAM type: YTN; PAM sequence: TTA
gaaaatgtaaaggtgactga

SEQ ID NO: 327143 - DNA, 20 bp, Artificial Sequence
  Description of Artificial Sequence: Synthetic oligonucleotide
  Target: LAMA2; (+) strand; PAM type: YTN; PAM sequence: CTG
aagttaggaaataacataaa

SEQ ID NO: 327144 - DNA, 20 bp, Artificial Sequence
  Description of Artificial Sequence: Synthetic oligonucleotide
  Target: LAMA2; (+) strand; PAM type: YTN; PAM sequence: TTA
ggaaataacataaaattggt

SEQ ID NO: 327145 - DNA, 20 bp, Artificial Sequence
  Description of Artificial Sequence: Synthetic oligonucleotide
  Target: LAMA2; (+) strand; PAM type: YTN; PAM sequence: TTG
gtaatgatgagcaattttct

SEQ ID NO: 327146 - DNA, 20 bp, Artificial Sequence
  Description of Artificial Sequence: Synthetic oligonucleotide
  Target: LAMA2; (+) strand; PAM type: YTN; PAM sequence: TTT
tcttaatggctgttcataac

SEQ ID NO: 327147 - DNA, 20 bp, Artificial Sequence
  Description of Artificial Sequence: Synthetic oligonucleotide
  Target: LAMA2; (+) strand; PAM type: YTN; PAM sequence: TTT
cttaatggctgttcataact

SEQ ID NO: 327148 - DNA, 20 bp, Artificial Sequence
  Description of Artificial Sequence: Synthetic oligonucleotide
  Target: LAMA2; (+) strand; PAM type: YTN; PAM sequence: TTC
ttaatggctgttcataactg

SEQ ID NO: 327149 - DNA, 20 bp, Artificial Sequence
  Description of Artificial Sequence: Synthetic oligonucleotide
  Target: LAMA2; (+) strand; PAM type: YTN; PAM sequence: CTT
aatggctgttcataactgga

SEQ ID NO: 327150 - DNA, 20 bp, Artificial Sequence
  Description of Artificial Sequence: Synthetic oligonucleotide
  Target: LAMA2; (+) strand; PAM type: YTN; PAM sequence: TTA
atggctgttcataactggaa

SEQ ID NO: 327151 - DNA, 20 bp, Artificial Sequence
  Description of Artificial Sequence: Synthetic oligonucleotide
  Target: LAMA2; (+) strand; PAM type: YTN; PAM sequence: CTG
ttcataactggaaaaaaaca

SEQ ID NO: 327152 - DNA, 20 bp, Artificial Sequence
  Description of Artificial Sequence: Synthetic oligonucleotide
  Target: LAMA2; (+) strand; PAM type: YTN; PAM sequence: TTC
ataactggaaaaaaacagat

SEQ ID NO: 327153 - DNA, 20 bp, Artificial Sequence
  Description of Artificial Sequence: Synthetic oligonucleotide
  Target: LAMA2; (+) strand; PAM type: YTN; PAM sequence: CTG
gaaaaaaacagatatgctcc

SEQ ID NO: 327154 - DNA, 20 bp, Artificial Sequence
  Description of Artificial Sequence: Synthetic oligonucleotide
  Target: LAMA2; (+) strand; PAM type: YTN; PAM sequence: CTC
cgaaatatatgaattgtgag

SEQ ID NO: 327155 - DNA, 20 bp, Artificial Sequence
  Description of Artificial Sequence: Synthetic oligonucleotide
  Target: LAMA2; (+) strand; PAM type: YTN; PAM sequence: TTG
tgagataaactgcagtaaaa

SEQ ID NO: 327156 - DNA, 20 bp, Artificial Sequence
  Description of Artificial Sequence: Synthetic oligonucleotide
  Target: LAMA2; (+) strand; PAM type: YTN; PAM sequence: CTG
cagtaaaagaccccaagaaa

SEQ ID NO: 327157 - DNA, 20 bp, Artificial Sequence
  Description of Artificial Sequence: Synthetic oligonucleotide
  Target: LAMA2; (+) strand; PAM type: YTN; PAM sequence: TTG
agggaaactatggaaatgat

SEQ ID NO: 327158 - DNA, 20 bp, Artificial Sequence
  Description of Artificial Sequence: Synthetic oligonucleotide
  Target: LAMA2; (+) strand; PAM type: YTN; PAM sequence: CTA
tggaaatgattgtagcaagt

SEQ ID NO: 327159 - DNA, 20 bp, Artificial Sequence
  Description of Artificial Sequence: Synthetic oligonucleotide
  Target: LAMA2; (+) strand; PAM type: YTN; PAM sequence: TTG
tagcaagtggtagcaagcta

SEQ ID NO: 327160 - DNA, 20 bp, Artificial Sequence
  Description of Artificial Sequence: Synthetic oligonucleotide
  Target: LAMA2; (+) strand; PAM type: YTN; PAM sequence: CTA
tttttgtttgcattttgaaa

SEQ ID NO: 327161 - DNA, 20 bp, Artificial Sequence
  Description of Artificial Sequence: Synthetic oligonucleotide
  Target: LAMA2; (+) strand; PAM type: YTN; PAM sequence: TTT
ttgtttgcattttgaaagca

SEQ ID NO: 327162 - DNA, 20 bp, Artificial Sequence
  Description of Artificial Sequence: Synthetic oligonucleotide
  Target: LAMA2; (+) strand; PAM type: YTN; PAM sequence: TTT
tgtttgcattttgaaagcag

SEQ ID NO: 327163 - DNA, 20 bp, Artificial Sequence
  Description of Artificial Sequence: Synthetic oligonucleotide
  Target: LAMA2; (+) strand; PAM type: YTN; PAM sequence: TTT
gtttgcattttgaaagcagt

SEQ ID NO: 327164 - DNA, 20 bp, Artificial Sequence
  Description of Artificial Sequence: Synthetic oligonucleotide
  Target: LAMA2; (+) strand; PAM type: YTN; PAM sequence: TTG
tttgcattttgaaagcagtt

SEQ ID NO: 327165 - DNA, 20 bp, Artificial Sequence
  Description of Artificial Sequence: Synthetic oligonucleotide
  Target: LAMA2; (+) strand; PAM type: YTN; PAM sequence: TTT
gcattttgaaagcagttttt

SEQ ID NO: 327166 - DNA, 20 bp, Artificial Sequence
  Description of Artificial Sequence: Synthetic oligonucleotide
  Target: LAMA2; (+) strand; PAM type: YTN; PAM sequence: TTG
cattttgaaagcagttttta

SEQ ID NO: 327167 - DNA, 20 bp, Artificial Sequence
  Description of Artificial Sequence: Synthetic oligonucleotide
  Target: LAMA2; (+) strand; PAM type: YTN; PAM sequence: TTT
tgaaagcagtttttagaaat

SEQ ID NO: 327168 - DNA, 20 bp, Artificial Sequence
  Description of Artificial Sequence: Synthetic oligonucleotide
  Target: LAMA2; (+) strand; PAM type: YTN; PAM sequence: TTT
gaaagcagtttttagaaatt

SEQ ID NO: 327169 - DNA, 20 bp, Artificial Sequence
  Description of Artificial Sequence: Synthetic oligonucleotide
  Target: LAMA2; (+) strand; PAM type: YTN; PAM sequence: TTG
aaagcagtttttagaaattt

SEQ ID NO: 327170 - DNA, 20 bp, Artificial Sequence
  Description of Artificial Sequence: Synthetic oligonucleotide
  Target: LAMA2; (+) strand; PAM type: YTN; PAM sequence: TTT
ttagaaatttctaattttga

SEQ ID NO: 327171 - DNA, 20 bp, Artificial Sequence
  Description of Artificial Sequence: Synthetic oligonucleotide
  Target: LAMA2; (+) strand; PAM type: YTN; PAM sequence: TTT
tagaaatttctaattttgaa

SEQ ID NO: 327172 - DNA, 20 bp, Artificial Sequence
  Description of Artificial Sequence: Synthetic oligonucleotide
  Target: LAMA2; (+) strand; PAM type: YTN; PAM sequence: TTT
agaaatttctaattttgaaa

SEQ ID NO: 327173 - DNA, 20 bp, Artificial Sequence
  Description of Artificial Sequence: Synthetic oligonucleotide
  Target: LAMA2; (+) strand; PAM type: YTN; PAM sequence: TTA
gaaatttctaattttgaaaa

SEQ ID NO: 327174 - DNA, 20 bp, Artificial Sequence
  Description of Artificial Sequence: Synthetic oligonucleotide
  Target: LAMA2; (+) strand; PAM type: YTN; PAM sequence: TTT
ctaattttgaaaatcttaaa

SEQ ID NO: 327175 - DNA, 20 bp, Artificial Sequence
  Description of Artificial Sequence: Synthetic oligonucleotide
  Target: LAMA2; (+) strand; PAM type: YTN; PAM sequence: TTC
taattttgaaaatcttaaat

SEQ ID NO: 327176 - DNA, 20 bp, Artificial Sequence
  Description of Artificial Sequence: Synthetic oligonucleotide
  Target: LAMA2; (+) strand; PAM type: YTN; PAM sequence: CTA
attttgaaaatcttaaattg

SEQ ID NO: 327177 - DNA, 20 bp, Artificial Sequence
  Description of Artificial Sequence: Synthetic oligonucleotide
  Target: LAMA2; (+) strand; PAM type: YTN; PAM sequence: TTT
tgaaaatcttaaattgattt

SEQ ID NO: 327178 - DNA, 20 bp, Artificial Sequence
  Description of Artificial Sequence: Synthetic oligonucleotide
  Target: LAMA2; (+) strand; PAM type: YTN; PAM sequence: TTT
gaaaatcttaaattgatttt

SEQ ID NO: 327179 - DNA, 20 bp, Artificial Sequence
  Description of Artificial Sequence: Synthetic oligonucleotide
  Target: LAMA2; (+) strand; PAM type: YTN; PAM sequence: TTG
aaaatcttaaattgattttt

SEQ ID NO: 327180 - DNA, 20 bp, Artificial Sequence
  Description of Artificial Sequence: Synthetic oligonucleotide
  Target: LAMA2; (+) strand; PAM type: YTN; PAM sequence: CTT
aaattgatttttaggaattc

SEQ ID NO: 327181 - DNA, 20 bp, Artificial Sequence
  Description of Artificial Sequence: Synthetic oligonucleotide
  Target: LAMA2; (+) strand; PAM type: YTN; PAM sequence: TTA
aattgatttttaggaattct

SEQ ID NO: 327182 - DNA, 20 bp, Artificial Sequence
  Description of Artificial Sequence: Synthetic oligonucleotide
  Target: LAMA2; (+) strand; PAM type: YTN; PAM sequence: TTG
atttttaggaattctggggc

SEQ ID NO: 327183 - DNA, 20 bp, Artificial Sequence
  Description of Artificial Sequence: Synthetic oligonucleotide
  Target: LAMA2; (+) strand; PAM type: YTN; PAM sequence: TTT
ttaggaattctggggctact

SEQ ID NO: 327184 - DNA, 20 bp, Artificial Sequence
  Description of Artificial Sequence: Synthetic oligonucleotide
  Target: LAMA2; (+) strand; PAM type: YTN; PAM sequence: TTT
taggaattctggggctactt

SEQ ID NO: 327185 - DNA, 20 bp, Artificial Sequence
  Description of Artificial Sequence: Synthetic oligonucleotide
  Target: LAMA2; (+) strand; PAM type: YTN; PAM sequence: TTT
aggaattctggggctacttt

SEQ ID NO: 327186 - DNA, 20 bp, Artificial Sequence
  Description of Artificial Sequence: Synthetic oligonucleotide
  Target: LAMA2; (+) strand; PAM type: YTN; PAM sequence: TTA
ggaattctggggctactttt

SEQ ID NO: 327187 - DNA, 20 bp, Artificial Sequence
  Description of Artificial Sequence: Synthetic oligonucleotide
  Target: LAMA2; (+) strand; PAM type: YTN; PAM sequence: TTC
tggggctacttttttctcag

SEQ ID NO: 327188 - DNA, 20 bp, Artificial Sequence
  Description of Artificial Sequence: Synthetic oligonucleotide
  Target: LAMA2; (+) strand; PAM type: YTN; PAM sequence: CTG
gggctacttttttctcagac

SEQ ID NO: 327189 - DNA, 20 bp, Artificial Sequence
  Description of Artificial Sequence: Synthetic oligonucleotide
  Target: LAMA2; (+) strand; PAM type: YTN; PAM sequence: CTA
cttttttctcagacctctag

SEQ ID NO: 327190 - DNA, 20 bp, Artificial Sequence
  Description of Artificial Sequence: Synthetic oligonucleotide
  Target: LAMA2; (+) strand; PAM type: YTN; PAM sequence: CTT
ttttctcagacctctagggc

SEQ ID NO: 327191 - DNA, 20 bp, Artificial Sequence
  Description of Artificial Sequence: Synthetic oligonucleotide
  Target: LAMA2; (+) strand; PAM type: YTN; PAM sequence: TTT
tttctcagacctctagggca

SEQ ID NO: 327192 - DNA, 20 bp, Artificial Sequence
  Description of Artificial Sequence: Synthetic oligonucleotide
  Target: LAMA2; (+) strand; PAM type: YTN; PAM sequence: TTT
ttctcagacctctagggcaa

SEQ ID NO: 327193 - DNA, 20 bp, Artificial Sequence
  Description of Artificial Sequence: Synthetic oligonucleotide
  Target: LAMA2; (+) strand; PAM type: YTN; PAM sequence: TTT
tctcagacctctagggcaac

SEQ ID NO: 327194 - DNA, 20 bp, Artificial Sequence
  Description of Artificial Sequence: Synthetic oligonucleotide
  Target: LAMA2; (+) strand; PAM type: YTN; PAM sequence: TTT
ctcagacctctagggcaacc

SEQ ID NO: 327195 - DNA, 20 bp, Artificial Sequence
  Description of Artificial Sequence: Synthetic oligonucleotide
  Target: LAMA2; (+) strand; PAM type: YTN; PAM sequence: TTC
tcagacctctagggcaacca

SEQ ID NO: 327196 - DNA, 20 bp, Artificial Sequence
  Description of Artificial Sequence: Synthetic oligonucleotide
  Target: LAMA2; (+) strand; PAM type: YTN; PAM sequence: CTC
agacctctagggcaaccaat

SEQ ID NO: 327197 - DNA, 20 bp, Artificial Sequence
  Description of Artificial Sequence: Synthetic oligonucleotide
  Target: LAMA2; (+) strand; PAM type: YTN; PAM sequence: CTC
tagggcaaccaattgtagag

SEQ ID NO: 327198 - DNA, 20 bp, Artificial Sequence
  Description of Artificial Sequence: Synthetic oligonucleotide
  Target: LAMA2; (+) strand; PAM type: YTN; PAM sequence: CTA
gggcaaccaattgtagagac

SEQ ID NO: 327199 - DNA, 20 bp, Artificial Sequence
  Description of Artificial Sequence: Synthetic oligonucleotide
  Target: LAMA2; (+) strand; PAM type: YTN; PAM sequence: TTG
tagagacttcccccttctgt

SEQ ID NO: 327200 - DNA, 20 bp, Artificial Sequence
  Description of Artificial Sequence: Synthetic oligonucleotide
  Target: LAMA2; (+) strand; PAM type: YTN; PAM sequence: CTT
cccccttctgttaattgact

SEQ ID NO: 327201 - DNA, 20 bp, Artificial Sequence
  Description of Artificial Sequence: Synthetic oligonucleotide
  Target: LAMA2; (+) strand; PAM type: YTN; PAM sequence: TTC
ccccttctgttaattgactc

SEQ ID NO: 327202 - DNA, 20 bp, Artificial Sequence
  Description of Artificial Sequence: Synthetic oligonucleotide
  Target: LAMA2; (+) strand; PAM type: YTN; PAM sequence: CTT
ctgttaattgactcagatct

SEQ ID NO: 327203 - DNA, 20 bp, Artificial Sequence
  Description of Artificial Sequence: Synthetic oligonucleotide
  Target: LAMA2; (+) strand; PAM type: YTN; PAM sequence: TTC
tgttaattgactcagatctg

SEQ ID NO: 327204 - DNA, 20 bp, Artificial Sequence
  Description of Artificial Sequence: Synthetic oligonucleotide
  Target: LAMA2; (+) strand; PAM type: YTN; PAM sequence: CTG
ttaattgactcagatctgct

SEQ ID NO: 327205 - DNA, 20 bp, Artificial Sequence
  Description of Artificial Sequence: Synthetic oligonucleotide
  Target: LAMA2; (+) strand; PAM type: YTN; PAM sequence: TTA
attgactcagatctgcttac

SEQ ID NO: 327206 - DNA, 20 bp, Artificial Sequence
  Description of Artificial Sequence: Synthetic oligonucleotide
  Target: LAMA2; (+) strand; PAM type: YTN; PAM sequence: TTG
actcagatctgcttacatat

SEQ ID NO: 327207 - DNA, 20 bp, Artificial Sequence
  Description of Artificial Sequence: Synthetic oligonucleotide
  Target: LAMA2; (+) strand; PAM type: YTN; PAM sequence: CTC
agatctgcttacatattaaa

SEQ ID NO: 327208 - DNA, 20 bp, Artificial Sequence
  Description of Artificial Sequence: Synthetic oligonucleotide
  Target: LAMA2; (+) strand; PAM type: YTN; PAM sequence: CTG
cttacatattaaaggccacc

SEQ ID NO: 327209 - DNA, 20 bp, Artificial Sequence
  Description of Artificial Sequence: Synthetic oligonucleotide
  Target: LAMA2; (+) strand; PAM type: YTN; PAM sequence: CTT
acatattaaaggccacctct

SEQ ID NO: 327210 - DNA, 20 bp, Artificial Sequence
  Description of Artificial Sequence: Synthetic oligonucleotide
  Target: LAMA2; (+) strand; PAM type: YTN; PAM sequence: TTA
catattaaaggccacctctg

SEQ ID NO: 327211 - DNA, 20 bp, Artificial Sequence
  Description of Artificial Sequence: Synthetic oligonucleotide
  Target: LAMA2; (+) strand; PAM type: YTN; PAM sequence: TTA
aaggccacctctggttctca

SEQ ID NO: 327212 - DNA, 20 bp, Artificial Sequence
  Description of Artificial Sequence: Synthetic oligonucleotide
  Target: LAMA2; (+) strand; PAM type: YTN; PAM sequence: CTC
tggttctcagctggaaaaaa

SEQ ID NO: 327213 - DNA, 20 bp, Artificial Sequence
  Description of Artificial Sequence: Synthetic oligonucleotide
  Target: LAMA2; (+) strand; PAM type: YTN; PAM sequence: CTG
gttctcagctggaaaaaaga

SEQ ID NO: 327214 - DNA, 20 bp, Artificial Sequence
  Description of Artificial Sequence: Synthetic oligonucleotide
  Target: LAMA2; (+) strand; PAM type: YTN; PAM sequence: TTC
tcagctggaaaaaagagttc

SEQ ID NO: 327215 - DNA, 20 bp, Artificial Sequence
  Description of Artificial Sequence: Synthetic oligonucleotide
  Target: LAMA2; (+) strand; PAM type: YTN; PAM sequence: CTC
agctggaaaaaagagttcct

SEQ ID NO: 327216 - DNA, 20 bp, Artificial Sequence
  Description of Artificial Sequence: Synthetic oligonucleotide
  Target: LAMA2; (+) strand; PAM type: YTN; PAM sequence: CTG
gaaaaaagagttcctccctt

SEQ ID NO: 327217 - DNA, 20 bp, Artificial Sequence
  Description of Artificial Sequence: Synthetic oligonucleotide
  Target: LAMA2; (+) strand; PAM type: YTN; PAM sequence: TTC
ctcccttttgaaacagttga

SEQ ID NO: 327218 - DNA, 20 bp, Artificial Sequence
  Description of Artificial Sequence: Synthetic oligonucleotide
  Target: LAMA2; (+) strand; PAM type: YTN; PAM sequence: CTC
ccttttgaaacagttgactc

SEQ ID NO: 327219 - DNA, 20 bp, Artificial Sequence
  Description of Artificial Sequence: Synthetic oligonucleotide
  Target: LAMA2; (+) strand; PAM type: YTN; PAM sequence: CTT
ttgaaacagttgactcagaa

SEQ ID NO: 327220 - DNA, 20 bp, Artificial Sequence
  Description of Artificial Sequence: Synthetic oligonucleotide
  Target: LAMA2; (+) strand; PAM type: YTN; PAM sequence: TTT
tgaaacagttgactcagaat

SEQ ID NO: 327221 - DNA, 20 bp, Artificial Sequence
  Description of Artificial Sequence: Synthetic oligonucleotide
  Target: LAMA2; (+) strand; PAM type: YTN; PAM sequence: TTT
gaaacagttgactcagaatc

SEQ ID NO: 327222 - DNA, 20 bp, Artificial Sequence
  Description of Artificial Sequence: Synthetic oligonucleotide
  Target: LAMA2; (+) strand; PAM type: YTN; PAM sequence: TTG
aaacagttgactcagaatca

SEQ ID NO: 327223 - DNA, 20 bp, Artificial Sequence
  Description of Artificial Sequence: Synthetic oligonucleotide
  Target: LAMA2; (+) strand; PAM type: YTN; PAM sequence: TTG
actcagaatcagttccttcc

SEQ ID NO: 327224 - DNA, 20 bp, Artificial Sequence
  Description of Artificial Sequence: Synthetic oligonucleotide
  Target: LAMA2; (+) strand; PAM type: YTN; PAM sequence: CTC
agaatcagttccttcctttc

SEQ ID NO: 327225 - DNA, 20 bp, Artificial Sequence
  Description of Artificial Sequence: Synthetic oligonucleotide
  Target: LAMA2; (+) strand; PAM type: YTN; PAM sequence: TTC
cttcctttcagatccttatc

SEQ ID NO: 327226 - DNA, 20 bp, Artificial Sequence
  Description of Artificial Sequence: Synthetic oligonucleotide
  Target: LAMA2; (+) strand; PAM type: YTN; PAM sequence: CTT
cctttcagatccttatcttt

SEQ ID NO: 327227 - DNA, 20 bp, Artificial Sequence
  Description of Artificial Sequence: Synthetic oligonucleotide
  Target: LAMA2; (+) strand; PAM type: YTN; PAM sequence: TTC
ctttcagatccttatcttta

SEQ ID NO: 327228 - DNA, 20 bp, Artificial Sequence
  Description of Artificial Sequence: Synthetic oligonucleotide
  Target: LAMA2; (+) strand; PAM type: YTN; PAM sequence: CTT
tcagatccttatctttaatt

SEQ ID NO: 327229 - DNA, 20 bp, Artificial Sequence
  Description of Artificial Sequence: Synthetic oligonucleotide
  Target: LAMA2; (+) strand; PAM type: YTN; PAM sequence: TTT
cagatccttatctttaatta

SEQ ID NO: 327230 - DNA, 20 bp, Artificial Sequence
  Description of Artificial Sequence: Synthetic oligonucleotide
  Target: LAMA2; (+) strand; PAM type: YTN; PAM sequence: TTC
agatccttatctttaattac

SEQ ID NO: 327231 - DNA, 20 bp, Artificial Sequence
  Description of Artificial Sequence: Synthetic oligonucleotide
  Target: LAMA2; (+) strand; PAM type: YTN; PAM sequence: CTT
atctttaattactttgtctt

SEQ ID NO: 327232 - DNA, 20 bp, Artificial Sequence
  Description of Artificial Sequence: Synthetic oligonucleotide
  Target: LAMA2; (+) strand; PAM type: YTN; PAM sequence: TTA
tctttaattactttgtcttc

SEQ ID NO: 327233 - DNA, 20 bp, Artificial Sequence
  Description of Artificial Sequence: Synthetic oligonucleotide
  Target: LAMA2; (+) strand; PAM type: YTN; PAM sequence: CTT
taattactttgtcttctaac

SEQ ID NO: 327234 - DNA, 20 bp, Artificial Sequence
  Description of Artificial Sequence: Synthetic oligonucleotide
  Target: LAMA2; (+) strand; PAM type: YTN; PAM sequence: TTT
aattactttgtcttctaacc

SEQ ID NO: 327235 - DNA, 20 bp, Artificial Sequence
  Description of Artificial Sequence: Synthetic oligonucleotide
  Target: LAMA2; (+) strand; PAM type: YTN; PAM sequence: TTA
attactttgtcttctaacct

SEQ ID NO: 327236 - DNA, 20 bp, Artificial Sequence
  Description of Artificial Sequence: Synthetic oligonucleotide
  Target: LAMA2; (+) strand; PAM type: YTN; PAM sequence: TTA
ctttgtcttctaacctgggg

SEQ ID NO: 327237 - DNA, 20 bp, Artificial Sequence
  Description of Artificial Sequence: Synthetic oligonucleotide
  Target: LAMA2; (+) strand; PAM type: YTN; PAM sequence: CTT
tgtcttctaacctggggtcc

SEQ ID NO: 327238 - DNA, 20 bp, Artificial Sequence
  Description of Artificial Sequence: Synthetic oligonucleotide
  Target: LAMA2; (+) strand; PAM type: YTN; PAM sequence: TTT
gtcttctaacctggggtcct

SEQ ID NO: 327239 - DNA, 20 bp, Artificial Sequence
  Description of Artificial Sequence: Synthetic oligonucleotide
  Target: LAMA2; (+) strand; PAM type: YTN; PAM sequence: TTG
tcttctaacctggggtccta

SEQ ID NO: 327240 - DNA, 20 bp, Artificial Sequence
  Description of Artificial Sequence: Synthetic oligonucleotide
  Target: LAMA2; (+) strand; PAM type: YTN; PAM sequence: CTT
ctaacctggggtcctaatct

SEQ ID NO: 327241 - DNA, 20 bp, Artificial Sequence
  Description of Artificial Sequence: Synthetic oligonucleotide
  Target: LAMA2; (+) strand; PAM type: YTN; PAM sequence: TTC
taacctggggtcctaatctt

SEQ ID NO: 327242 - DNA, 20 bp, Artificial Sequence
  Description of Artificial Sequence: Synthetic oligonucleotide
  Target: LAMA2; (+) strand; PAM type: YTN; PAM sequence: CTA
acctggggtcctaatctttg

SEQ ID NO: 327243 - DNA, 20 bp, Artificial Sequence
  Description of Artificial Sequence: Synthetic oligonucleotide
  Target: LAMA2; (+) strand; PAM type: YTN; PAM sequence: CTG
gggtcctaatctttgcctag

SEQ ID NO: 327244 - DNA, 20 bp, Artificial Sequence
  Description of Artificial Sequence: Synthetic oligonucleotide
  Target: LAMA2; (+) strand; PAM type: YTN; PAM sequence: CTA
atctttgcctaggaatttaa

SEQ ID NO: 327245 - DNA, 20 bp, Artificial Sequence
  Description of Artificial Sequence: Synthetic oligonucleotide
  Target: LAMA2; (+) strand; PAM type: YTN; PAM sequence: CTT
tgcctaggaatttaaagtaa

SEQ ID NO: 327246 - DNA, 20 bp, Artificial Sequence
  Description of Artificial Sequence: Synthetic oligonucleotide
  Target: LAMA2; (+) strand; PAM type: YTN; PAM sequence: TTT
gcctaggaatttaaagtaaa

SEQ ID NO: 327247 - DNA, 20 bp, Artificial Sequence
  Description of Artificial Sequence: Synthetic oligonucleotide
  Target: LAMA2; (+) strand; PAM type: YTN; PAM sequence: TTG
cctaggaatttaaagtaaag

SEQ ID NO: 327248 - DNA, 20 bp, Artificial Sequence
  Description of Artificial Sequence: Synthetic oligonucleotide
  Target: LAMA2; (+) strand; PAM type: YTN; PAM sequence: CTA
ggaatttaaagtaaagattg

SEQ ID NO: 327249 - DNA, 20 bp, Artificial Sequence
  Description of Artificial Sequence: Synthetic oligonucleotide
  Target: LAMA2; (+) strand; PAM type: YTN; PAM sequence: TTT
aaagtaaagattggccgaat

SEQ ID NO: 327250 - DNA, 20 bp, Artificial Sequence
  Description of Artificial Sequence: Synthetic oligonucleotide
  Target: LAMA2; (+) strand; PAM type: YTN; PAM sequence: TTA
aagtaaagattggccgaatc

SEQ ID NO: 327251 - DNA, 20 bp, Artificial Sequence
  Description of Artificial Sequence: Synthetic oligonucleotide
  Target: LAMA2; (+) strand; PAM type: YTN; PAM sequence: TTG
gccgaatcttatttctcttg

SEQ ID NO: 327252 - DNA, 20 bp, Artificial Sequence
  Description of Artificial Sequence: Synthetic oligonucleotide
  Target: LAMA2; (+) strand; PAM type: YTN; PAM sequence: CTT
atttctcttgacttgtatct

SEQ ID NO: 327253 - DNA, 20 bp, Artificial Sequence
  Description of Artificial Sequence: Synthetic oligonucleotide
  Target: LAMA2; (+) strand; PAM type: YTN; PAM sequence: TTA
tttctcttgacttgtatcta

SEQ ID NO: 327254 - DNA, 20 bp, Artificial Sequence
  Description of Artificial Sequence: Synthetic oligonucleotide
  Target: LAMA2; (+) strand; PAM type: YTN; PAM sequence: TTT
ctcttgacttgtatctacct

SEQ ID NO: 327255 - DNA, 20 bp, Artificial Sequence
  Description of Artificial Sequence: Synthetic oligonucleotide
  Target: LAMA2; (+) strand; PAM type: YTN; PAM sequence: TTC
tcttgacttgtatctacctt

SEQ ID NO: 327256 - DNA, 20 bp, Artificial Sequence
  Description of Artificial Sequence: Synthetic oligonucleotide
  Target: LAMA2; (+) strand; PAM type: YTN; PAM sequence: CTC
ttgacttgtatctaccttta

SEQ ID NO: 327257 - DNA, 20 bp, Artificial Sequence
  Description of Artificial Sequence: Synthetic oligonucleotide
  Target: LAMA2; (+) strand; PAM type: YTN; PAM sequence: CTT
gacttgtatctacctttact

SEQ ID NO: 327258 - DNA, 20 bp, Artificial Sequence
  Description of Artificial Sequence: Synthetic oligonucleotide
  Target: LAMA2; (+) strand; PAM type: YTN; PAM sequence: TTG
acttgtatctacctttactt

SEQ ID NO: 327259 - DNA, 20 bp, Artificial Sequence
  Description of Artificial Sequence: Synthetic oligonucleotide
  Target: LAMA2; (+) strand; PAM type: YTN; PAM sequence: CTT
gtatctacctttactttagc

SEQ ID NO: 327260 - DNA, 20 bp, Artificial Sequence
  Description of Artificial Sequence: Synthetic oligonucleotide
  Target: LAMA2; (+) strand; PAM type: YTN; PAM sequence: TTG
tatctacctttactttagct

SEQ ID NO: 327261 - DNA, 20 bp, Artificial Sequence
  Description of Artificial Sequence: Synthetic oligonucleotide
  Target: LAMA2; (+) strand; PAM type: YTN; PAM sequence: CTA
cctttactttagctcaccct

SEQ ID NO: 327262 - DNA, 20 bp, Artificial Sequence
  Description of Artificial Sequence: Synthetic oligonucleotide
  Target: LAMA2; (+) strand; PAM type: YTN; PAM sequence: CTT
tactttagctcaccctctgg

SEQ ID NO: 327263 - DNA, 20 bp, Artificial Sequence
  Description of Artificial Sequence: Synthetic oligonucleotide
  Target: LAMA2; (+) strand; PAM type: YTN; PAM sequence: TTT
actttagctcaccctctggg

SEQ ID NO: 327264 - DNA, 20 bp, Artificial Sequence
  Description of Artificial Sequence: Synthetic oligonucleotide
  Target: LAMA2; (+) strand; PAM type: YTN; PAM sequence: TTA
ctttagctcaccctctgggc

SEQ ID NO: 327265 - DNA, 20 bp, Artificial Sequence
  Description of Artificial Sequence: Synthetic oligonucleotide
  Target: LAMA2; (+) strand; PAM type: YTN; PAM sequence: CTT
tagctcaccctctgggcgtg

SEQ ID NO: 327266 - DNA, 20 bp, Artificial Sequence
  Description of Artificial Sequence: Synthetic oligonucleotide
  Target: LAMA2; (+) strand; PAM type: YTN; PAM sequence: TTT
agctcaccctctgggcgtgg

SEQ ID NO: 327267 - DNA, 20 bp, Artificial Sequence
  Description of Artificial Sequence: Synthetic oligonucleotide
  Target: LAMA2; (+) strand; PAM type: YTN; PAM sequence: TTA
gctcaccctctgggcgtggc

SEQ ID NO: 327268 - DNA, 20 bp, Artificial Sequence
  Description of Artificial Sequence: Synthetic oligonucleotide
  Target: LAMA2; (+) strand; PAM type: YTN; PAM sequence: CTC
accctctgggcgtggcctct

SEQ ID NO: 327269 - DNA, 20 bp, Artificial Sequence
  Description of Artificial Sequence: Synthetic oligonucleotide
  Target: LAMA2; (+) strand; PAM type: YTN; PAM sequence: CTC
tgggcgtggcctctagccag

SEQ ID NO: 327270 - DNA, 20 bp, Artificial Sequence
  Description of Artificial Sequence: Synthetic oligonucleotide
  Target: LAMA2; (+) strand; PAM type: YTN; PAM sequence: CTG
ggcgtggcctctagccagtc

SEQ ID NO: 327271 - DNA, 20 bp, Artificial Sequence
  Description of Artificial Sequence: Synthetic oligonucleotide
  Target: LAMA2; (+) strand; PAM type: YTN; PAM sequence: CTC
tagccagtctcactttgagt

SEQ ID NO: 327272 - DNA, 20 bp, Artificial Sequence
  Description of Artificial Sequence: Synthetic oligonucleotide
  Target: LAMA2; (+) strand; PAM type: YTN; PAM sequence: CTA
gccagtctcactttgagtat

SEQ ID NO: 327273 - DNA, 20 bp, Artificial Sequence
  Description of Artificial Sequence: Synthetic oligonucleotide
  Target: LAMA2; (+) strand; PAM type: YTN; PAM sequence: CTC
actttgagtatctttgaaac

SEQ ID NO: 327274 - DNA, 20 bp, Artificial Sequence
  Description of Artificial Sequence: Synthetic oligonucleotide
  Target: LAMA2; (+) strand; PAM type: YTN; PAM sequence: CTT
tgagtatctttgaaactctc

SEQ ID NO: 327275 - DNA, 20 bp, Artificial Sequence
  Description of Artificial Sequence: Synthetic oligonucleotide
  Target: LAMA2; (+) strand; PAM type: YTN; PAM sequence: TTT
gagtatctttgaaactctct

SEQ ID NO: 327276 - DNA, 20 bp, Artificial Sequence
  Description of Artificial Sequence: Synthetic oligonucleotide
  Target: LAMA2; (+) strand; PAM type: YTN; PAM sequence: TTG
agtatctttgaaactctctc

SEQ ID NO: 327277 - DNA, 20 bp, Artificial Sequence
  Description of Artificial Sequence: Synthetic oligonucleotide
  Target: LAMA2; (+) strand; PAM type: YTN; PAM sequence: CTT
tgaaactctctccttattgt

SEQ ID NO: 327278 - DNA, 20 bp, Artificial Sequence
  Description of Artificial Sequence: Synthetic oligonucleotide
  Target: LAMA2; (+) strand; PAM type: YTN; PAM sequence: TTT
gaaactctctccttattgtc

SEQ ID NO: 327279 - DNA, 20 bp, Artificial Sequence
  Description of Artificial Sequence: Synthetic oligonucleotide
  Target: LAMA2; (+) strand; PAM type: YTN; PAM sequence: TTG
aaactctctccttattgtca

SEQ ID NO: 327280 - DNA, 20 bp, Artificial Sequence
  Description of Artificial Sequence: Synthetic oligonucleotide
  Target: LAMA2; (+) strand; PAM type: YTN; PAM sequence: CTC
tctccttattgtcaacccct

SEQ ID NO: 327281 - DNA, 20 bp, Artificial Sequence
  Description of Artificial Sequence: Synthetic oligonucleotide
  Target: LAMA2; (+) strand; PAM type: YTN; PAM sequence: CTC
tccttattgtcaacccctta

SEQ ID NO: 327282 - DNA, 20 bp, Artificial Sequence
  Description of Artificial Sequence: Synthetic oligonucleotide
  Target: LAMA2; (+) strand; PAM type: YTN; PAM sequence: CTC
cttattgtcaaccccttact

SEQ ID NO: 327283 - DNA, 20 bp, Artificial Sequence
  Description of Artificial Sequence: Synthetic oligonucleotide
  Target: LAMA2; (+) strand; PAM type: YTN; PAM sequence: CTT
attgtcaaccccttactttg

SEQ ID NO: 327284 - DNA, 20 bp, Artificial Sequence
  Description of Artificial Sequence: Synthetic oligonucleotide
  Target: LAMA2; (+) strand; PAM type: YTN; PAM sequence: TTA
ttgtcaaccccttactttga

SEQ ID NO: 327285 - DNA, 20 bp, Artificial Sequence
  Description of Artificial Sequence: Synthetic oligonucleotide
  Target: LAMA2; (+) strand; PAM type: YTN; PAM sequence: TTG
tcaaccccttactttgatta

SEQ ID NO: 327286 - DNA, 20 bp, Artificial Sequence
  Description of Artificial Sequence: Synthetic oligonucleotide
  Target: LAMA2; (+) strand; PAM type: YTN; PAM sequence: CTT
actttgattattttttttaa

SEQ ID NO: 327287 - DNA, 20 bp, Artificial Sequence
  Description of Artificial Sequence: Synthetic oligonucleotide
  Target: LAMA2; (+) strand; PAM type: YTN; PAM sequence: TTA
ctttgattattttttttaat

SEQ ID NO: 327288 - DNA, 20 bp, Artificial Sequence
  Description of Artificial Sequence: Synthetic oligonucleotide
  Target: LAMA2; (+) strand; PAM type: YTN; PAM sequence: CTT
tgattattttttttaattta

SEQ ID NO: 327289 - DNA, 20 bp, Artificial Sequence
  Description of Artificial Sequence: Synthetic oligonucleotide
  Target: LAMA2; (+) strand; PAM type: YTN; PAM sequence: TTT
gattattttttttaatttaa

SEQ ID NO: 327290 - DNA, 20 bp, Artificial Sequence
  Description of Artificial Sequence: Synthetic oligonucleotide
  Target: LAMA2; (+) strand; PAM type: YTN; PAM sequence: TTG
attattttttttaatttaat

SEQ ID NO: 327291 - DNA, 20 bp, Artificial Sequence
  Description of Artificial Sequence: Synthetic oligonucleotide
  Target: LAMA2; (+) strand; PAM type: YTN; PAM sequence: TTA
ttttttttaatttaatgttt

SEQ ID NO: 327292 - DNA, 20 bp, Artificial Sequence
  Description of Artificial Sequence: Synthetic oligonucleotide
  Target: LAMA2; (+) strand; PAM type: YTN; PAM sequence: TTT
tttttaatttaatgtttcca

SEQ ID NO: 327293 - DNA, 20 bp, Artificial Sequence
  Description of Artificial Sequence: Synthetic oligonucleotide
  Target: LAMA2; (+) strand; PAM type: YTN; PAM sequence: TTT
ttttaatttaatgtttccaa

SEQ ID NO: 327294 - DNA, 20 bp, Artificial Sequence
  Description of Artificial Sequence: Synthetic oligonucleotide
  Target: LAMA2; (+) strand; PAM type: YTN; PAM sequence: TTT
tttaatttaatgtttccaat

SEQ ID NO: 327295 - DNA, 20 bp, Artificial Sequence
  Description of Artificial Sequence: Synthetic oligonucleotide
  Target: LAMA2; (+) strand; PAM type: YTN; PAM sequence: TTT
ttaatttaatgtttccaatg

SEQ ID NO: 327296 - DNA, 20 bp, Artificial Sequence
  Description of Artificial Sequence: Synthetic oligonucleotide
  Target: LAMA2; (+) strand; PAM type: YTN; PAM sequence: TTT
taatttaatgtttccaatgt

SEQ ID NO: 327297 - DNA, 20 bp, Artificial Sequence
  Description of Artificial Sequence: Synthetic oligonucleotide
  Target: LAMA2; (+) strand; PAM type: YTN; PAM sequence: TTT
aatttaatgtttccaatgta

SEQ ID NO: 327298 - DNA, 20 bp, Artificial Sequence
  Description of Artificial Sequence: Synthetic oligonucleotide
  Target: LAMA2; (+) strand; PAM type: YTN; PAM sequence: TTA
atttaatgtttccaatgtag

SEQ ID NO: 327299 - DNA, 20 bp, Artificial Sequence
  Description of Artificial Sequence: Synthetic oligonucleotide
  Target: LAMA2; (+) strand; PAM type: YTN; PAM sequence: TTT
aatgtttccaatgtagaaat

SEQ ID NO: 327300 - DNA, 20 bp, Artificial Sequence
  Description of Artificial Sequence: Synthetic oligonucleotide
  Target: LAMA2; (+) strand; PAM type: YTN; PAM sequence: TTA
atgtttccaatgtagaaata

SEQ ID NO: 327301 - DNA, 20 bp, Artificial Sequence
  Description of Artificial Sequence: Synthetic oligonucleotide
  Target: LAMA2; (+) strand; PAM type: YTN; PAM sequence: TTT
ccaatgtagaaatacatctc

SEQ ID NO: 327302 - DNA, 20 bp, Artificial Sequence
  Description of Artificial Sequence: Synthetic oligonucleotide
  Target: LAMA2; (+) strand; PAM type: YTN; PAM sequence: TTC
caatgtagaaatacatctca

SEQ ID NO: 327303 - DNA, 20 bp, Artificial Sequence
  Description of Artificial Sequence: Synthetic oligonucleotide
  Target: LAMA2; (+) strand; PAM type: YTN; PAM sequence: CTC
aaaaattatgcagaagttct

SEQ ID NO: 327304 - DNA, 20 bp, Artificial Sequence
  Description of Artificial Sequence: Synthetic oligonucleotide
  Target: LAMA2; (+) strand; PAM type: YTN; PAM sequence: TTA
tgcagaagttctatcatata

SEQ ID NO: 327305 - DNA, 20 bp, Artificial Sequence
  Description of Artificial Sequence: Synthetic oligonucleotide
  Target: LAMA2; (+) strand; PAM type: YTN; PAM sequence: TTC
tatcatataatgttcttgca

SEQ ID NO: 327306 - DNA, 20 bp, Artificial Sequence
  Description of Artificial Sequence: Synthetic oligonucleotide
  Target: LAMA2; (+) strand; PAM type: YTN; PAM sequence: CTA
tcatataatgttcttgcatg

SEQ ID NO: 327307 - DNA, 20 bp, Artificial Sequence
  Description of Artificial Sequence: Synthetic oligonucleotide
  Target: LAMA2; (+) strand; PAM type: YTN; PAM sequence: TTC
ttgcatgggtctgaagctct

SEQ ID NO: 327308 - DNA, 20 bp, Artificial Sequence
  Description of Artificial Sequence: Synthetic oligonucleotide
  Target: LAMA2; (+) strand; PAM type: YTN; PAM sequence: CTT
gcatgggtctgaagctcttt

SEQ ID NO: 327309 - DNA, 20 bp, Artificial Sequence
  Description of Artificial Sequence: Synthetic oligonucleotide
  Target: LAMA2; (+) strand; PAM type: YTN; PAM sequence: TTG
catgggtctgaagctctttg

SEQ ID NO: 327310 - DNA, 20 bp, Artificial Sequence
  Description of Artificial Sequence: Synthetic oligonucleotide
  Target: LAMA2; (+) strand; PAM type: YTN; PAM sequence: CTG
aagctctttgaaggcaaggg

SEQ ID NO: 327311 - DNA, 20 bp, Artificial Sequence
  Description of Artificial Sequence: Synthetic oligonucleotide
  Target: LAMA2; (+) strand; PAM type: YTN; PAM sequence: CTC
tttgaaggcaagggtccttg

SEQ ID NO: 327312 - DNA, 20 bp, Artificial Sequence
  Description of Artificial Sequence: Synthetic oligonucleotide
  Target: LAMA2; (+) strand; PAM type: YTN; PAM sequence: CTT
tgaaggcaagggtccttgac

SEQ ID NO: 327313 - DNA, 20 bp, Artificial Sequence
  Description of Artificial Sequence: Synthetic oligonucleotide
  Target: LAMA2; (+) strand; PAM type: YTN; PAM sequence: TTT
gaaggcaagggtccttgact

SEQ ID NO: 327314 - DNA, 20 bp, Artificial Sequence
  Description of Artificial Sequence: Synthetic oligonucleotide
  Target: LAMA2; (+) strand; PAM type: YTN; PAM sequence: TTG
aaggcaagggtccttgacta

SEQ ID NO: 327315 - DNA, 20 bp, Artificial Sequence
  Description of Artificial Sequence: Synthetic oligonucleotide
  Target: LAMA2; (+) strand; PAM type: YTN; PAM sequence: CTT
gactatgttgttcattgttg

SEQ ID NO: 327316 - DNA, 20 bp, Artificial Sequence
  Description of Artificial Sequence: Synthetic oligonucleotide
  Target: LAMA2; (+) strand; PAM type: YTN; PAM sequence: TTG
actatgttgttcattgttgt

SEQ ID NO: 327317 - DNA, 20 bp, Artificial Sequence
  Description of Artificial Sequence: Synthetic oligonucleotide
  Target: LAMA2; (+) strand; PAM type: YTN; PAM sequence: CTA
tgttgttcattgttgtgtaa

SEQ ID NO: 327318 - DNA, 20 bp, Artificial Sequence
  Description of Artificial Sequence: Synthetic oligonucleotide
  Target: LAMA2; (+) strand; PAM type: YTN; PAM sequence: TTG
ttcattgttgtgtaattact

SEQ ID NO: 327319 - DNA, 20 bp, Artificial Sequence
  Description of Artificial Sequence: Synthetic oligonucleotide
  Target: LAMA2; (+) strand; PAM type: YTN; PAM sequence: TTC
attgttgtgtaattactgcc

SEQ ID NO: 327320 - DNA, 20 bp, Artificial Sequence
  Description of Artificial Sequence: Synthetic oligonucleotide
  Target: LAMA2; (+) strand; PAM type: YTN; PAM sequence: TTG
ttgtgtaattactgcctaga

SEQ ID NO: 327321 - DNA, 20 bp, Artificial Sequence
  Description of Artificial Sequence: Synthetic oligonucleotide
  Target: LAMA2; (+) strand; PAM type: YTN; PAM sequence: TTG
tgtaattactgcctagatga

SEQ ID NO: 327322 - DNA, 20 bp, Artificial Sequence
  Description of Artificial Sequence: Synthetic oligonucleotide
  Target: LAMA2; (+) strand; PAM type: YTN; PAM sequence: TTA
ctgcctagatgagtacttgg

SEQ ID NO: 327323 - DNA, 20 bp, Artificial Sequence
  Description of Artificial Sequence: Synthetic oligonucleotide
  Target: LAMA2; (+) strand; PAM type: YTN; PAM sequence: CTG
cctagatgagtacttggaaa

SEQ ID NO: 327324 - DNA, 20 bp, Artificial Sequence
  Description of Artificial Sequence: Synthetic oligonucleotide
  Target: LAMA2; (+) strand; PAM type: YTN; PAM sequence: CTA
gatgagtacttggaaaggtg

SEQ ID NO: 327325 - DNA, 20 bp, Artificial Sequence
  Description of Artificial Sequence: Synthetic oligonucleotide
  Target: LAMA2; (+) strand; PAM type: YTN; PAM sequence: CTT
ggaaaggtggagtgattcaa

SEQ ID NO: 327326 - DNA, 20 bp, Artificial Sequence
  Description of Artificial Sequence: Synthetic oligonucleotide
  Target: LAMA2; (+) strand; PAM type: YTN; PAM sequence: TTG
gaaaggtggagtgattcaat

SEQ ID NO: 327327 - DNA, 20 bp, Artificial Sequence
  Description of Artificial Sequence: Synthetic oligonucleotide
  Target: LAMA2; (+) strand; PAM type: YTN; PAM sequence: TTC
aatgaatatgtgttgcatat

SEQ ID NO: 327328 - DNA, 20 bp, Artificial Sequence
  Description of Artificial Sequence: Synthetic oligonucleotide
  Target: LAMA2; (+) strand; PAM type: YTN; PAM sequence: TTG
catatagtttaagaagaact

SEQ ID NO: 327329 - DNA, 20 bp, Artificial Sequence
  Description of Artificial Sequence: Synthetic oligonucleotide
  Target: LAMA2; (+) strand; PAM type: YTN; PAM sequence: TTT
aagaagaactgggactggaa

SEQ ID NO: 327330 - DNA, 20 bp, Artificial Sequence
  Description of Artificial Sequence: Synthetic oligonucleotide
  Target: LAMA2; (+) strand; PAM type: YTN; PAM sequence: TTA
agaagaactgggactggaat

SEQ ID NO: 327331 - DNA, 20 bp, Artificial Sequence
  Description of Artificial Sequence: Synthetic oligonucleotide
  Target: LAMA2; (+) strand; PAM type: YTN; PAM sequence: CTG
ggactggaattagaaacaca

SEQ ID NO: 327332 - DNA, 20 bp, Artificial Sequence
  Description of Artificial Sequence: Synthetic oligonucleotide
  Target: LAMA2; (+) strand; PAM type: YTN; PAM sequence: CTG
gaattagaaacacatgttcc

SEQ ID NO: 327333 - DNA, 20 bp, Artificial Sequence
  Description of Artificial Sequence: Synthetic oligonucleotide
  Target: LAMA2; (+) strand; PAM type: YTN; PAM sequence: TTA
gaaacacatgttccgtcttt

SEQ ID NO: 327334 - DNA, 20 bp, Artificial Sequence
  Description of Artificial Sequence: Synthetic oligonucleotide
  Target: LAMA2; (+) strand; PAM type: YTN; PAM sequence: TTC
cgtctttagcaaatcaccca

SEQ ID NO: 327335 - DNA, 20 bp, Artificial Sequence
  Description of Artificial Sequence: Synthetic oligonucleotide
  Target: LAMA2; (+) strand; PAM type: YTN; PAM sequence: CTT
tagcaaatcacccatcatta

SEQ ID NO: 327336 - DNA, 20 bp, Artificial Sequence
  Description of Artificial Sequence: Synthetic oligonucleotide
  Target: LAMA2; (+) strand; PAM type: YTN; PAM sequence: TTT
agcaaatcacccatcattac

SEQ ID NO: 327337 - DNA, 20 bp, Artificial Sequence
  Description of Artificial Sequence: Synthetic oligonucleotide
  Target: LAMA2; (+) strand; PAM type: YTN; PAM sequence: TTA
gcaaatcacccatcattact

SEQ ID NO: 327338 - DNA, 20 bp, Artificial Sequence
  Description of Artificial Sequence: Synthetic oligonucleotide
  Target: LAMA2; (+) strand; PAM type: YTN; PAM sequence: TTA
ctaatcttccattattttat

SEQ ID NO: 327339 - DNA, 20 bp, Artificial Sequence
  Description of Artificial Sequence: Synthetic oligonucleotide
  Target: LAMA2; (+) strand; PAM type: YTN; PAM sequence: CTA
atcttccattattttatcta

SEQ ID NO: 327340 - DNA, 20 bp, Artificial Sequence
  Description of Artificial Sequence: Synthetic oligonucleotide
  Target: LAMA2; (+) strand; PAM type: YTN; PAM sequence: CTT
ccattattttatctatgata

SEQ ID NO: 327341 - DNA, 20 bp, Artificial Sequence
  Description of Artificial Sequence: Synthetic oligonucleotide
  Target: LAMA2; (+) strand; PAM type: YTN; PAM sequence: TTC
cattattttatctatgatat

SEQ ID NO: 327342 - DNA, 20 bp, Artificial Sequence
  Description of Artificial Sequence: Synthetic oligonucleotide
  Target: LAMA2; (+) strand; PAM type: YTN; PAM sequence: TTA
ttttatctatgatattgagc

SEQ ID NO: 327343 - DNA, 20 bp, Artificial Sequence
  Description of Artificial Sequence: Synthetic oligonucleotide
  Target: LAMA2; (+) strand; PAM type: YTN; PAM sequence: TTT
tatctatgatattgagcaag

SEQ ID NO: 327344 - DNA, 20 bp, Artificial Sequence
  Description of Artificial Sequence: Synthetic oligonucleotide
  Target: LAMA2; (+) strand; PAM type: YTN; PAM sequence: TTT
atctatgatattgagcaagt

SEQ ID NO: 327345 - DNA, 20 bp, Artificial Sequence
  Description of Artificial Sequence: Synthetic oligonucleotide
  Target: LAMA2; (+) strand; PAM type: YTN; PAM sequence: TTA
tctatgatattgagcaagta

SEQ ID NO: 327346 - DNA, 20 bp, Artificial Sequence
  Description of Artificial Sequence: Synthetic oligonucleotide
  Target: LAMA2; (+) strand; PAM type: YTN; PAM sequence: CTA
tgatattgagcaagtaatgc

SEQ ID NO: 327347 - DNA, 20 bp, Artificial Sequence
  Description of Artificial Sequence: Synthetic oligonucleotide
  Target: LAMA2; (+) strand; PAM type: YTN; PAM sequence: TTG
agcaagtaatgcctatccca

SEQ ID NO: 327348 - DNA, 20 bp, Artificial Sequence
  Description of Artificial Sequence: Synthetic oligonucleotide
  Target: LAMA2; (+) strand; PAM type: YTN; PAM sequence: CTA
tcccatctatattatagctt

SEQ ID NO: 327349 - DNA, 20 bp, Artificial Sequence
  Description of Artificial Sequence: Synthetic oligonucleotide
  Target: LAMA2; (+) strand; PAM type: YTN; PAM sequence: CTA
tattatagctttgttggaag

SEQ ID NO: 327350 - DNA, 20 bp, Artificial Sequence
  Description of Artificial Sequence: Synthetic oligonucleotide
  Target: LAMA2; (+) strand; PAM type: YTN; PAM sequence: TTA
tagctttgttggaagactca

SEQ ID NO: 327351 - DNA, 20 bp, Artificial Sequence
  Description of Artificial Sequence: Synthetic oligonucleotide
  Target: LAMA2; (+) strand; PAM type: YTN; PAM sequence: CTT
tgttggaagactcaagggat

SEQ ID NO: 327352 - DNA, 20 bp, Artificial Sequence
  Description of Artificial Sequence: Synthetic oligonucleotide
  Target: LAMA2; (+) strand; PAM type: YTN; PAM sequence: TTT
gttggaagactcaagggata

SEQ ID NO: 327353 - DNA, 20 bp, Artificial Sequence
  Description of Artificial Sequence: Synthetic oligonucleotide
  Target: LAMA2; (+) strand; PAM type: YTN; PAM sequence: TTG
ttggaagactcaagggataa

SEQ ID NO: 327354 - DNA, 20 bp, Artificial Sequence
  Description of Artificial Sequence: Synthetic oligonucleotide
  Target: LAMA2; (+) strand; PAM type: YTN; PAM sequence: TTG
gaagactcaagggataaagt

SEQ ID NO: 327355 - DNA, 20 bp, Artificial Sequence
  Description of Artificial Sequence: Synthetic oligonucleotide
  Target: LAMA2; (+) strand; PAM type: YTN; PAM sequence: CTC
aagggataaagtgaaaatgc

SEQ ID NO: 327356 - DNA, 20 bp, Artificial Sequence
  Description of Artificial Sequence: Synthetic oligonucleotide
  Target: LAMA2; (+) strand; PAM type: YTN; PAM sequence: CTT
tgtagagttcagtgctacac

SEQ ID NO: 327357 - DNA, 20 bp, Artificial Sequence
  Description of Artificial Sequence: Synthetic oligonucleotide
  Target: LAMA2; (+) strand; PAM type: YTN; PAM sequence: TTT
gtagagttcagtgctacaca

SEQ ID NO: 327358 - DNA, 20 bp, Artificial Sequence
  Description of Artificial Sequence: Synthetic oligonucleotide
  Target: LAMA2; (+) strand; PAM type: YTN; PAM sequence: TTG
tagagttcagtgctacacat

SEQ ID NO: 327359 - DNA, 20 bp, Artificial Sequence
  Description of Artificial Sequence: Synthetic oligonucleotide
  Target: LAMA2; (+) strand; PAM type: YTN; PAM sequence: TTC
agtgctacacatttattatg

SEQ ID NO: 327360 - DNA, 20 bp, Artificial Sequence
  Description of Artificial Sequence: Synthetic oligonucleotide
  Target: LAMA2; (+) strand; PAM type: YTN; PAM sequence: CTA
cacatttattatggtcaatg

SEQ ID NO: 327361 - DNA, 20 bp, Artificial Sequence
  Description of Artificial Sequence: Synthetic oligonucleotide
  Target: LAMA2; (+) strand; PAM type: YTN; PAM sequence: TTT
attatggtcaatgaactgca

SEQ ID NO: 327362 - DNA, 20 bp, Artificial Sequence
  Description of Artificial Sequence: Synthetic oligonucleotide
  Target: LAMA2; (+) strand; PAM type: YTN; PAM sequence: TTA
ttatggtcaatgaactgcat

SEQ ID NO: 327363 - DNA, 20 bp, Artificial Sequence
  Description of Artificial Sequence: Synthetic oligonucleotide
  Target: LAMA2; (+) strand; PAM type: YTN; PAM sequence: TTA
tggtcaatgaactgcattac

SEQ ID NO: 327364 - DNA, 20 bp, Artificial Sequence
  Description of Artificial Sequence: Synthetic oligonucleotide
  Target: LAMA2; (+) strand; PAM type: YTN; PAM sequence: CTG
cattacccaaaccaacatta

SEQ ID NO: 327365 - DNA, 20 bp, Artificial Sequence
  Description of Artificial Sequence: Synthetic oligonucleotide
  Target: LAMA2; (+) strand; PAM type: YTN; PAM sequence: TTA
cccaaaccaacattaattgt

SEQ ID NO: 327366 - DNA, 20 bp, Artificial Sequence
  Description of Artificial Sequence: Synthetic oligonucleotide
  Target: LAMA2; (+) strand; PAM type: YTN; PAM sequence: TTA
attgtacataacatgtgaca

SEQ ID NO: 327367 - DNA, 20 bp, Artificial Sequence
  Description of Artificial Sequence: Synthetic oligonucleotide
  Target: LAMA2; (+) strand; PAM type: YTN; PAM sequence: TTG
tacataacatgtgacaaaga

SEQ ID NO: 327368 - DNA, 20 bp, Artificial Sequence
  Description of Artificial Sequence: Synthetic oligonucleotide
  Target: LAMA2; (+) strand; PAM type: YTN; PAM sequence: CTT
atggttttggagtttgttta

SEQ ID NO: 327369 - DNA, 20 bp, Artificial Sequence
  Description of Artificial Sequence: Synthetic oligonucleotide
  Target: LAMA2; (+) strand; PAM type: YTN; PAM sequence: TTA
tggttttggagtttgtttat

SEQ ID NO: 327370 - DNA, 20 bp, Artificial Sequence
  Description of Artificial Sequence: Synthetic oligonucleotide
  Target: LAMA2; (+) strand; PAM type: YTN; PAM sequence: TTT
tggagtttgtttattttaga

SEQ ID NO: 327371 - DNA, 20 bp, Artificial Sequence
  Description of Artificial Sequence: Synthetic oligonucleotide
  Target: LAMA2; (+) strand; PAM type: YTN; PAM sequence: TTT
ggagtttgtttattttagaa

SEQ ID NO: 327372 - DNA, 20 bp, Artificial Sequence
  Description of Artificial Sequence: Synthetic oligonucleotide
  Target: LAMA2; (+) strand; PAM type: YTN; PAM sequence: TTG
gagtttgtttattttagaag

SEQ ID NO: 327373 - DNA, 20 bp, Artificial Sequence
  Description of Artificial Sequence: Synthetic oligonucleotide
  Target: LAMA2; (+) strand; PAM type: YTN; PAM sequence: TTT
gtttattttagaagaccaga

SEQ ID NO: 327374 - DNA, 20 bp, Artificial Sequence
  Description of Artificial Sequence: Synthetic oligonucleotide
  Target: LAMA2; (+) strand; PAM type: YTN; PAM sequence: TTG
tttattttagaagaccagat

SEQ ID NO: 327375 - DNA, 20 bp, Artificial Sequence
  Description of Artificial Sequence: Synthetic oligonucleotide
  Target: LAMA2; (+) strand; PAM type: YTN; PAM sequence: TTT
attttagaagaccagataaa

SEQ ID NO: 327376 - DNA, 20 bp, Artificial Sequence
  Description of Artificial Sequence: Synthetic oligonucleotide
  Target: LAMA2; (+) strand; PAM type: YTN; PAM sequence: TTA
ttttagaagaccagataaac

SEQ ID NO: 327377 - DNA, 20 bp, Artificial Sequence
  Description of Artificial Sequence: Synthetic oligonucleotide
  Target: LAMA2; (+) strand; PAM type: YTN; PAM sequence: TTT
tagaagaccagataaactag

SEQ ID NO: 327378 - DNA, 20 bp, Artificial Sequence
  Description of Artificial Sequence: Synthetic oligonucleotide
  Target: LAMA2; (+) strand; PAM type: YTN; PAM sequence: TTT
agaagaccagataaactaga

SEQ ID NO: 327379 - DNA, 20 bp, Artificial Sequence
  Description of Artificial Sequence: Synthetic oligonucleotide
  Target: LAMA2; (+) strand; PAM type: YTN; PAM sequence: TTA
gaagaccagataaactagaa

SEQ ID NO: 327380 - DNA, 20 bp, Artificial Sequence
  Description of Artificial Sequence: Synthetic oligonucleotide
  Target: LAMA2; (+) strand; PAM type: YTN; PAM sequence: CTA
gaacaaatattttccatgaa

SEQ ID NO: 327381 - DNA, 20 bp, Artificial Sequence
  Description of Artificial Sequence: Synthetic oligonucleotide
  Target: LAMA2; (+) strand; PAM type: YTN; PAM sequence: TTT
tccatgaagaagtttttttt

SEQ ID NO: 327382 - DNA, 20 bp, Artificial Sequence
  Description of Artificial Sequence: Synthetic oligonucleotide
  Target: LAMA2; (+) strand; PAM type: YTN; PAM sequence: TTT
ccatgaagaagttttttttc

SEQ ID NO: 327383 - DNA, 20 bp, Artificial Sequence
  Description of Artificial Sequence: Synthetic oligonucleotide
  Target: LAMA2; (+) strand; PAM type: YTN; PAM sequence: TTC
catgaagaagttttttttcg

SEQ ID NO: 327384 - DNA, 20 bp, Artificial Sequence
  Description of Artificial Sequence: Synthetic oligonucleotide
  Target: LAMA2; (+) strand; PAM type: YTN; PAM sequence: TTT
tttttcgtgttagaactcat

SEQ ID NO: 327385 - DNA, 20 bp, Artificial Sequence
  Description of Artificial Sequence: Synthetic oligonucleotide
  Target: LAMA2; (+) strand; PAM type: YTN; PAM sequence: TTT
ttttcgtgttagaactcatg

SEQ ID NO: 327386 - DNA, 20 bp, Artificial Sequence
  Description of Artificial Sequence: Synthetic oligonucleotide
  Target: LAMA2; (+) strand; PAM type: YTN; PAM sequence: TTT
tttcgtgttagaactcatgt

SEQ ID NO: 327387 - DNA, 20 bp, Artificial Sequence
  Description of Artificial Sequence: Synthetic oligonucleotide
  Target: LAMA2; (+) strand; PAM type: YTN; PAM sequence: TTT
ttcgtgttagaactcatgtg

SEQ ID NO: 327388 - DNA, 20 bp, Artificial Sequence
  Description of Artificial Sequence: Synthetic oligonucleotide
  Target: LAMA2; (+) strand; PAM type: YTN; PAM sequence: TTT
tcgtgttagaactcatgtga

SEQ ID NO: 327389 - DNA, 20 bp, Artificial Sequence
  Description of Artificial Sequence: Synthetic oligonucleotide
  Target: LAMA2; (+) strand; PAM type: YTN; PAM sequence: TTT
cgtgttagaactcatgtgat

SEQ ID NO: 327390 - DNA, 20 bp, Artificial Sequence
  Description of Artificial Sequence: Synthetic oligonucleotide
  Target: LAMA2; (+) strand; PAM type: YTN; PAM sequence: TTC
gtgttagaactcatgtgatt

SEQ ID NO: 327391 - DNA, 20 bp, Artificial Sequence
  Description of Artificial Sequence: Synthetic oligonucleotide
  Target: LAMA2; (+) strand; PAM type: YTN; PAM sequence: TTA
gaactcatgtgattaaattg

SEQ ID NO: 327392 - DNA, 20 bp, Artificial Sequence
  Description of Artificial Sequence: Synthetic oligonucleotide
  Target: LAMA2; (+) strand; PAM type: YTN; PAM sequence: CTC
atgtgattaaattgattcac

SEQ ID NO: 327393 - DNA, 20 bp, Artificial Sequence
  Description of Artificial Sequence: Synthetic oligonucleotide
  Target: LAMA2; (+) strand; PAM type: YTN; PAM sequence: TTA
aattgattcacaaaatttga

SEQ ID NO: 327394 - DNA, 20 bp, Artificial Sequence
  Description of Artificial Sequence: Synthetic oligonucleotide
  Target: LAMA2; (+) strand; PAM type: YTN; PAM sequence: TTG
attcacaaaatttgaggtca

SEQ ID NO: 327395 - DNA, 20 bp, Artificial Sequence
  Description of Artificial Sequence: Synthetic oligonucleotide
  Target: LAMA2; (+) strand; PAM type: YTN; PAM sequence: TTC
acaaaatttgaggtcattta

SEQ ID NO: 327396 - DNA, 20 bp, Artificial Sequence
  Description of Artificial Sequence: Synthetic oligonucleotide
  Target: LAMA2; (+) strand; PAM type: YTN; PAM sequence: TTT
gaggtcatttattaatttta

SEQ ID NO: 327397 - DNA, 20 bp, Artificial Sequence
  Description of Artificial Sequence: Synthetic oligonucleotide
  Target: LAMA2; (+) strand; PAM type: YTN; PAM sequence: TTG
aggtcatttattaattttat

SEQ ID NO: 327398 - DNA, 20 bp, Artificial Sequence
  Description of Artificial Sequence: Synthetic oligonucleotide
  Target: LAMA2; (+) strand; PAM type: YTN; PAM sequence: TTT
attaattttatgaatatttt

SEQ ID NO: 327399 - DNA, 20 bp, Artificial Sequence
  Description of Artificial Sequence: Synthetic oligonucleotide
  Target: LAMA2; (+) strand; PAM type: YTN; PAM sequence: TTA
ttaattttatgaatatttta

SEQ ID NO: 327400 - DNA, 20 bp, Artificial Sequence
  Description of Artificial Sequence: Synthetic oligonucleotide
  Target: LAMA2; (+) strand; PAM type: YTN; PAM sequence: TTA
attttatgaatattttactg

SEQ ID NO: 327401 - DNA, 20 bp, Artificial Sequence
  Description of Artificial Sequence: Synthetic oligonucleotide
  Target: LAMA2; (+) strand; PAM type: YTN; PAM sequence: TTT
tatgaatattttactgagca

SEQ ID NO: 327402 - DNA, 20 bp, Artificial Sequence
  Description of Artificial Sequence: Synthetic oligonucleotide
  Target: LAMA2; (+) strand; PAM type: YTN; PAM sequence: TTT
atgaatattttactgagcac

SEQ ID NO: 327403 - DNA, 20 bp, Artificial Sequence
  Description of Artificial Sequence: Synthetic oligonucleotide
  Target: LAMA2; (+) strand; PAM type: YTN; PAM sequence: TTA
tgaatattttactgagcacc

SEQ ID NO: 327404 - DNA, 20 bp, Artificial Sequence
  Description of Artificial Sequence: Synthetic oligonucleotide
  Target: LAMA2; (+) strand; PAM type: YTN; PAM sequence: TTT
tactgagcacctatatgatg

SEQ ID NO: 327405 - DNA, 20 bp, Artificial Sequence
  Description of Artificial Sequence: Synthetic oligonucleotide
  Target: LAMA2; (+) strand; PAM type: YTN; PAM sequence: TTT
actgagcacctatatgatgt

SEQ ID NO: 327406 - DNA, 20 bp, Artificial Sequence
  Description of Artificial Sequence: Synthetic oligonucleotide
  Target: LAMA2; (+) strand; PAM type: YTN; PAM sequence: TTA
ctgagcacctatatgatgtc

SEQ ID NO: 327407 - DNA, 20 bp, Artificial Sequence
  Description of Artificial Sequence: Synthetic oligonucleotide
  Target: LAMA2; (+) strand; PAM type: YTN; PAM sequence: CTG
agcacctatatgatgtcagt

SEQ ID NO: 327408 - DNA, 20 bp, Artificial Sequence
  Description of Artificial Sequence: Synthetic oligonucleotide
  Target: LAMA2; (+) strand; PAM type: YTN; PAM sequence: CTA
tatgatgtcagtgactctaa

SEQ ID NO: 327409 - DNA, 20 bp, Artificial Sequence
  Description of Artificial Sequence: Synthetic oligonucleotide
  Target: LAMA2; (+) strand; PAM type: YTN; PAM sequence: CTC
taattgtctctgaaaataaa

SEQ ID NO: 327410 - DNA, 20 bp, Artificial Sequence
  Description of Artificial Sequence: Synthetic oligonucleotide
  Target: LAMA2; (+) strand; PAM type: YTN; PAM sequence: CTA
attgtctctgaaaataaaaa

SEQ ID NO: 327411 - DNA, 20 bp, Artificial Sequence
  Description of Artificial Sequence: Synthetic oligonucleotide
  Target: LAMA2; (+) strand; PAM type: YTN; PAM sequence: TTG
tctctgaaaataaaaagatt

SEQ ID NO: 327412 - DNA, 20 bp, Artificial Sequence
  Description of Artificial Sequence: Synthetic oligonucleotide
  Target: LAMA2; (+) strand; PAM type: YTN; PAM sequence: CTC
tgaaaataaaaagattaata

SEQ ID NO: 327413 - DNA, 20 bp, Artificial Sequence
  Description of Artificial Sequence: Synthetic oligonucleotide
  Target: LAMA2; (+) strand; PAM type: YTN; PAM sequence: CTG
aaaataaaaagattaataaa

SEQ ID NO: 327414 - DNA, 20 bp, Artificial Sequence
  Description of Artificial Sequence: Synthetic oligonucleotide
  Target: LAMA2; (+) strand; PAM type: YTN; PAM sequence: TTA
ataaatcatggcttctgcct

SEQ ID NO: 327415 - DNA, 20 bp, Artificial Sequence
  Description of Artificial Sequence: Synthetic oligonucleotide
  Target: LAMA2; (+) strand; PAM type: YTN; PAM sequence: CTT
ctgccttcaaggaacttaga

SEQ ID NO: 327416 - DNA, 20 bp, Artificial Sequence
  Description of Artificial Sequence: Synthetic oligonucleotide
  Target: LAMA2; (+) strand; PAM type: YTN; PAM sequence: TTC
tgccttcaaggaacttagag

SEQ ID NO: 327417 - DNA, 20 bp, Artificial Sequence
  Description of Artificial Sequence: Synthetic oligonucleotide
  Target: LAMA2; (+) strand; PAM type: YTN; PAM sequence: CTG
ccttcaaggaacttagagtt

SEQ ID NO: 327418 - DNA, 20 bp, Artificial Sequence
  Description of Artificial Sequence: Synthetic oligonucleotide
  Target: LAMA2; (+) strand; PAM type: YTN; PAM sequence: CTT
caaggaacttagagtttagt

SEQ ID NO: 327419 - DNA, 20 bp, Artificial Sequence
  Description of Artificial Sequence: Synthetic oligonucleotide
  Target: LAMA2; (+) strand; PAM type: YTN; PAM sequence: TTC
aaggaacttagagtttagtg

SEQ ID NO: 327420 - DNA, 20 bp, Artificial Sequence
  Description of Artificial Sequence: Synthetic oligonucleotide
  Target: LAMA2; (+) strand; PAM type: YTN; PAM sequence: CTT
agagtttagtggttatagaa

SEQ ID NO: 327421 - DNA, 20 bp, Artificial Sequence
  Description of Artificial Sequence: Synthetic oligonucleotide
  Target: LAMA2; (+) strand; PAM type: YTN; PAM sequence: TTA
gagtttagtggttatagaat

SEQ ID NO: 327422 - DNA, 20 bp, Artificial Sequence
  Description of Artificial Sequence: Synthetic oligonucleotide
  Target: LAMA2; (+) strand; PAM type: YTN; PAM sequence: TTT
agtggttatagaatgttggt

SEQ ID NO: 327423 - DNA, 20 bp, Artificial Sequence
  Description of Artificial Sequence: Synthetic oligonucleotide
  Target: LAMA2; (+) strand; PAM type: YTN; PAM sequence: TTA
gtggttatagaatgttggtt

SEQ ID NO: 327424 - DNA, 20 bp, Artificial Sequence
  Description of Artificial Sequence: Synthetic oligonucleotide
  Target: LAMA2; (+) strand; PAM type: YTN; PAM sequence: TTA
tagaatgttggtttaaaaaa

SEQ ID NO: 327425 - DNA, 20 bp, Artificial Sequence
  Description of Artificial Sequence: Synthetic oligonucleotide
  Target: LAMA2; (+) strand; PAM type: YTN; PAM sequence: TTG
gtttaaaaaaaatggcaaaa

SEQ ID NO: 327426 - DNA, 20 bp, Artificial Sequence
  Description of Artificial Sequence: Synthetic oligonucleotide
  Target: LAMA2; (+) strand; PAM type: YTN; PAM sequence: TTT
aaaaaaaatggcaaaaataa

SEQ ID NO: 327427 - DNA, 20 bp, Artificial Sequence
  Description of Artificial Sequence: Synthetic oligonucleotide
  Target: LAMA2; (+) strand; PAM type: YTN; PAM sequence: TTA
aaaaaaatggcaaaaataaa

SEQ ID NO: 327428 - DNA, 20 bp, Artificial Sequence
  Description of Artificial Sequence: Synthetic oligonucleotide
  Target: LAMA2; (+) strand; PAM type: YTN; PAM sequence: TTC
tgacaaaaactcataatatc

SEQ ID NO: 327429 - DNA, 20 bp, Artificial Sequence
  Description of Artificial Sequence: Synthetic oligonucleotide
  Target: LAMA2; (+) strand; PAM type: YTN; PAM sequence: CTG
acaaaaactcataatatctg

SEQ ID NO: 327430 - DNA, 20 bp, Artificial Sequence
  Description of Artificial Sequence: Synthetic oligonucleotide
  Target: LAMA2; (+) strand; PAM type: YTN; PAM sequence: CTC
ataatatctgagagtttata

SEQ ID NO: 327431 - DNA, 20 bp, Artificial Sequence
  Description of Artificial Sequence: Synthetic oligonucleotide
  Target: LAMA2; (+) strand; PAM type: YTN; PAM sequence: CTG
agagtttatatgtgcttgct

SEQ ID NO: 327432 - DNA, 20 bp, Artificial Sequence
  Description of Artificial Sequence: Synthetic oligonucleotide
  Target: LAMA2; (+) strand; PAM type: YTN; PAM sequence: TTT
atatgtgcttgctaaatgaa

SEQ ID NO: 327433 - DNA, 20 bp, Artificial Sequence
  Description of Artificial Sequence: Synthetic oligonucleotide
  Target: LAMA2; (+) strand; PAM type: YTN; PAM sequence: TTA
tatgtgcttgctaaatgaaa

SEQ ID NO: 327434 - DNA, 20 bp, Artificial Sequence
  Description of Artificial Sequence: Synthetic oligonucleotide
  Target: LAMA2; (+) strand; PAM type: YTN; PAM sequence: CTT
gctaaatgaaaagaattatt

SEQ ID NO: 327435 - DNA, 20 bp, Artificial Sequence
  Description of Artificial Sequence: Synthetic oligonucleotide
  Target: LAMA2; (+) strand; PAM type: YTN; PAM sequence: TTG
ctaaatgaaaagaattatta

SEQ ID NO: 327436 - DNA, 20 bp, Artificial Sequence
  Description of Artificial Sequence: Synthetic oligonucleotide
  Target: LAMA2; (+) strand; PAM type: YTN; PAM sequence: CTA
aatgaaaagaattattagca

SEQ ID NO: 327437 - DNA, 20 bp, Artificial Sequence
  Description of Artificial Sequence: Synthetic oligonucleotide
  Target: LAMA2; (+) strand; PAM type: YTN; PAM sequence: TTA
ttagcaatactatgctgaat

SEQ ID NO: 327438 - DNA, 20 bp, Artificial Sequence
  Description of Artificial Sequence: Synthetic oligonucleotide
  Target: LAMA2; (+) strand; PAM type: YTN; PAM sequence: TTA
gcaatactatgctgaatgac

SEQ ID NO: 327439 - DNA, 20 bp, Artificial Sequence
  Description of Artificial Sequence: Synthetic oligonucleotide
  Target: LAMA2; (+) strand; PAM type: YTN; PAM sequence: CTA
tgctgaatgactgtaaaatg

SEQ ID NO: 327440 - DNA, 20 bp, Artificial Sequence
  Description of Artificial Sequence: Synthetic oligonucleotide
  Target: LAMA2; (+) strand; PAM type: YTN; PAM sequence: CTG
aatgactgtaaaatgctgac

SEQ ID NO: 327441 - DNA, 20 bp, Artificial Sequence
  Description of Artificial Sequence: Synthetic oligonucleotide
  Target: LAMA2; (+) strand; PAM type: YTN; PAM sequence: CTG
taaaatgctgactttttact

SEQ ID NO: 327442 - DNA, 20 bp, Artificial Sequence
  Description of Artificial Sequence: Synthetic oligonucleotide
  Target: LAMA2; (+) strand; PAM type: YTN; PAM sequence: CTG
actttttacttgaaatattt

SEQ ID NO: 327443 - DNA, 20 bp, Artificial Sequence
  Description of Artificial Sequence: Synthetic oligonucleotide
  Target: LAMA2; (+) strand; PAM type: YTN; PAM sequence: CTT
tttacttgaaatatttacaa

SEQ ID NO: 327444 - DNA, 20 bp, Artificial Sequence
  Description of Artificial Sequence: Synthetic oligonucleotide
  Target: LAMA2; (+) strand; PAM type: YTN; PAM sequence: TTT
ttacttgaaatatttacaag

SEQ ID NO: 327445 - DNA, 20 bp, Artificial Sequence
  Description of Artificial Sequence: Synthetic oligonucleotide
  Target: LAMA2; (+) strand; PAM type: YTN; PAM sequence: TTT
tacttgaaatatttacaaga

SEQ ID NO: 327446 - DNA, 20 bp, Artificial Sequence
  Description of Artificial Sequence: Synthetic oligonucleotide
  Target: LAMA2; (+) strand; PAM type: YTN; PAM sequence: TTT
acttgaaatatttacaagag

SEQ ID NO: 327447 - DNA, 20 bp, Artificial Sequence
  Description of Artificial Sequence: Synthetic oligonucleotide
  Target: LAMA2; (+) strand; PAM type: YTN; PAM sequence: TTA
cttgaaatatttacaagagg

SEQ ID NO: 327448 - DNA, 20 bp, Artificial Sequence
  Description of Artificial Sequence: Synthetic oligonucleotide
  Target: LAMA2; (+) strand; PAM type: YTN; PAM sequence: CTT
gaaatatttacaagaggaaa

SEQ ID NO: 327449 - DNA, 20 bp, Artificial Sequence
  Description of Artificial Sequence: Synthetic oligonucleotide
  Target: LAMA2; (+) strand; PAM type: YTN; PAM sequence: TTG
aaatatttacaagaggaaac

SEQ ID NO: 327450 - DNA, 20 bp, Artificial Sequence
  Description of Artificial Sequence: Synthetic oligonucleotide
  Target: LAMA2; (+) strand; PAM type: YTN; PAM sequence: TTT
acaagaggaaacagaatatt

SEQ ID NO: 327451 - DNA, 20 bp, Artificial Sequence
  Description of Artificial Sequence: Synthetic oligonucleotide
  Target: LAMA2; (+) strand; PAM type: YTN; PAM sequence: TTA
caagaggaaacagaatattt

SEQ ID NO: 327452 - DNA, 20 bp, Artificial Sequence
  Description of Artificial Sequence: Synthetic oligonucleotide
  Target: LAMA2; (+) strand; PAM type: YTN; PAM sequence: TTT
gtgggtttccctgcatattt

SEQ ID NO: 327453 - DNA, 20 bp, Artificial Sequence
  Description of Artificial Sequence: Synthetic oligonucleotide
  Target: LAMA2; (+) strand; PAM type: YTN; PAM sequence: TTG
tgggtttccctgcatattta

SEQ ID NO: 327454 - DNA, 20 bp, Artificial Sequence
  Description of Artificial Sequence: Synthetic oligonucleotide
  Target: LAMA2; (+) strand; PAM type: YTN; PAM sequence: TTT
ccctgcatatttatgtgtgt

SEQ ID NO: 327455 - DNA, 20 bp, Artificial Sequence
  Description of Artificial Sequence: Synthetic oligonucleotide
  Target: LAMA2; (+) strand; PAM type: YTN; PAM sequence: TTC
cctgcatatttatgtgtgtg

SEQ ID NO: 327456 - DNA, 20 bp, Artificial Sequence
  Description of Artificial Sequence: Synthetic oligonucleotide
  Target: LAMA2; (+) strand; PAM type: YTN; PAM sequence: CTG
catatttatgtgtgtgttca

SEQ ID NO: 327457 - DNA, 20 bp, Artificial Sequence
  Description of Artificial Sequence: Synthetic oligonucleotide
  Target: LAMA2; (+) strand; PAM type: YTN; PAM sequence: TTT
atgtgtgtgttcaaacagct

SEQ ID NO: 327458 - DNA, 20 bp, Artificial Sequence
  Description of Artificial Sequence: Synthetic oligonucleotide
  Target: LAMA2; (+) strand; PAM type: YTN; PAM sequence: TTA
tgtgtgtgttcaaacagctg

SEQ ID NO: 327459 - DNA, 20 bp, Artificial Sequence
  Description of Artificial Sequence: Synthetic oligonucleotide
  Target: LAMA2; (+) strand; PAM type: YTN; PAM sequence: TTC
aaacagctgctagagaacaa

SEQ ID NO: 327460 - DNA, 20 bp, Artificial Sequence
  Description of Artificial Sequence: Synthetic oligonucleotide
  Target: LAMA2; (+) strand; PAM type: YTN; PAM sequence: CTG
ctagagaacaaagtgttttg

SEQ ID NO: 327461 - DNA, 20 bp, Artificial Sequence
  Description of Artificial Sequence: Synthetic oligonucleotide
  Target: LAMA2; (+) strand; PAM type: YTN; PAM sequence: CTA
gagaacaaagtgttttgcta

SEQ ID NO: 327462 - DNA, 20 bp, Artificial Sequence
  Description of Artificial Sequence: Synthetic oligonucleotide
  Target: LAMA2; (+) strand; PAM type: YTN; PAM sequence: TTT
tgctataaacactgtcaaat

SEQ ID NO: 327463 - DNA, 20 bp, Artificial Sequence
  Description of Artificial Sequence: Synthetic oligonucleotide
  Target: LAMA2; (+) strand; PAM type: YTN; PAM sequence: TTT
gctataaacactgtcaaatc

SEQ ID NO: 327464 - DNA, 20 bp, Artificial Sequence
  Description of Artificial Sequence: Synthetic oligonucleotide
  Target: LAMA2; (+) strand; PAM type: YTN; PAM sequence: TTG
ctataaacactgtcaaatct

SEQ ID NO: 327465 - DNA, 20 bp, Artificial Sequence
  Description of Artificial Sequence: Synthetic oligonucleotide
  Target: LAMA2; (+) strand; PAM type: YTN; PAM sequence: CTA
taaacactgtcaaatctcac

SEQ ID NO: 327466 - DNA, 20 bp, Artificial Sequence
  Description of Artificial Sequence: Synthetic oligonucleotide
  Target: LAMA2; (+) strand; PAM type: YTN; PAM sequence: CTG
tcaaatctcactgtgaaaaa

SEQ ID NO: 327467 - DNA, 20 bp, Artificial Sequence
  Description of Artificial Sequence: Synthetic oligonucleotide
  Target: LAMA2; (+) strand; PAM type: YTN; PAM sequence: CTC
actgtgaaaaaaatttgtct

SEQ ID NO: 327468 - DNA, 20 bp, Artificial Sequence
  Description of Artificial Sequence: Synthetic oligonucleotide
  Target: LAMA2; (+) strand; PAM type: YTN; PAM sequence: CTG
tgaaaaaaatttgtctataa

SEQ ID NO: 327469 - DNA, 20 bp, Artificial Sequence
  Description of Artificial Sequence: Synthetic oligonucleotide
  Target: LAMA2; (+) strand; PAM type: YTN; PAM sequence: TTT
gtctataaaacaagtatttt

SEQ ID NO: 327470 - DNA, 20 bp, Artificial Sequence
  Description of Artificial Sequence: Synthetic oligonucleotide
  Target: LAMA2; (+) strand; PAM type: YTN; PAM sequence: TTG
tctataaaacaagtattttc

SEQ ID NO: 327471 - DNA, 20 bp, Artificial Sequence
  Description of Artificial Sequence: Synthetic oligonucleotide
  Target: LAMA2; (+) strand; PAM type: YTN; PAM sequence: CTA
taaaacaagtattttcatag

SEQ ID NO: 327472 - DNA, 20 bp, Artificial Sequence
  Description of Artificial Sequence: Synthetic oligonucleotide
  Target: LAMA2; (+) strand; PAM type: YTN; PAM sequence: TTT
tcatagatatactaaagctg

SEQ ID NO: 327473 - DNA, 20 bp, Artificial Sequence
  Description of Artificial Sequence: Synthetic oligonucleotide
  Target: LAMA2; (+) strand; PAM type: YTN; PAM sequence: TTT
catagatatactaaagctgc

SEQ ID NO: 327474 - DNA, 20 bp, Artificial Sequence
  Description of Artificial Sequence: Synthetic oligonucleotide
  Target: LAMA2; (+) strand; PAM type: YTN; PAM sequence: TTC
atagatatactaaagctgca

SEQ ID NO: 327475 - DNA, 20 bp, Artificial Sequence
  Description of Artificial Sequence: Synthetic oligonucleotide
  Target: LAMA2; (+) strand; PAM type: YTN; PAM sequence: CTA
aagctgcatagaatttgctt

SEQ ID NO: 327476 - DNA, 20 bp, Artificial Sequence
  Description of Artificial Sequence: Synthetic oligonucleotide
  Target: LAMA2; (+) strand; PAM type: YTN; PAM sequence: CTG
catagaatttgcttttatag

SEQ ID NO: 327477 - DNA, 20 bp, Artificial Sequence
  Description of Artificial Sequence: Synthetic oligonucleotide
  Target: LAMA2; (+) strand; PAM type: YTN; PAM sequence: TTT
gcttttatagcataaaacag

SEQ ID NO: 327478 - DNA, 20 bp, Artificial Sequence
  Description of Artificial Sequence: Synthetic oligonucleotide
  Target: LAMA2; (+) strand; PAM type: YTN; PAM sequence: TTG
cttttatagcataaaacaga

SEQ ID NO: 327479 - DNA, 20 bp, Artificial Sequence
  Description of Artificial Sequence: Synthetic oligonucleotide
  Target: LAMA2; (+) strand; PAM type: YTN; PAM sequence: CTT
ttatagcataaaacagaatt

SEQ ID NO: 327480 - DNA, 20 bp, Artificial Sequence
  Description of Artificial Sequence: Synthetic oligonucleotide
  Target: LAMA2; (+) strand; PAM type: YTN; PAM sequence: TTT
tatagcataaaacagaatta

SEQ ID NO: 327481 - DNA, 20 bp, Artificial Sequence
  Description of Artificial Sequence: Synthetic oligonucleotide
  Target: LAMA2; (+) strand; PAM type: YTN; PAM sequence: TTT
atagcataaaacagaattag

SEQ ID NO: 327482 - DNA, 20 bp, Artificial Sequence
  Description of Artificial Sequence: Synthetic oligonucleotide
  Target: LAMA2; (+) strand; PAM type: YTN; PAM sequence: TTA
tagcataaaacagaattaga

SEQ ID NO: 327483 - DNA, 20 bp, Artificial Sequence
  Description of Artificial Sequence: Synthetic oligonucleotide
  Target: LAMA2; (+) strand; PAM type: YTN; PAM sequence: TTA
gatgcttgagtcagctatga

SEQ ID NO: 327484 - DNA, 20 bp, Artificial Sequence
  Description of Artificial Sequence: Synthetic oligonucleotide
  Target: LAMA2; (+) strand; PAM type: YTN; PAM sequence: CTT
gagtcagctatgaaatactt

SEQ ID NO: 327485 - DNA, 20 bp, Artificial Sequence
  Description of Artificial Sequence: Synthetic oligonucleotide
  Target: LAMA2; (+) strand; PAM type: YTN; PAM sequence: TTG
agtcagctatgaaatacttt

SEQ ID NO: 327486 - DNA, 20 bp, Artificial Sequence
  Description of Artificial Sequence: Synthetic oligonucleotide
  Target: LAMA2; (+) strand; PAM type: YTN; PAM sequence: CTA
tgaaatactttttcatgcaa

SEQ ID NO: 327487 - DNA, 20 bp, Artificial Sequence
  Description of Artificial Sequence: Synthetic oligonucleotide
  Target: LAMA2; (+) strand; PAM type: YTN; PAM sequence: CTT
tttcatgcaacactcattct

SEQ ID NO: 327488 - DNA, 20 bp, Artificial Sequence
  Description of Artificial Sequence: Synthetic oligonucleotide
  Target: LAMA2; (+) strand; PAM type: YTN; PAM sequence: TTT
ttcatgcaacactcattcta

SEQ ID NO: 327489 - DNA, 20 bp, Artificial Sequence
  Description of Artificial Sequence: Synthetic oligonucleotide
  Target: LAMA2; (+) strand; PAM type: YTN; PAM sequence: TTT
tcatgcaacactcattctaa

SEQ ID NO: 327490 - DNA, 20 bp, Artificial Sequence
  Description of Artificial Sequence: Synthetic oligonucleotide
  Target: LAMA2; (+) strand; PAM type: YTN; PAM sequence: TTT
catgcaacactcattctaat

SEQ ID NO: 327491 - DNA, 20 bp, Artificial Sequence
  Description of Artificial Sequence: Synthetic oligonucleotide
  Target: LAMA2; (+) strand; PAM type: YTN; PAM sequence: TTC
atgcaacactcattctaatt

SEQ ID NO: 327492 - DNA, 20 bp, Artificial Sequence
  Description of Artificial Sequence: Synthetic oligonucleotide
  Target: LAMA2; (+) strand; PAM type: YTN; PAM sequence: CTC
attctaattctttacactat

SEQ ID NO: 327493 - DNA, 20 bp, Artificial Sequence
  Description of Artificial Sequence: Synthetic oligonucleotide
  Target: LAMA2; (+) strand; PAM type: YTN; PAM sequence: TTC
taattctttacactatgcat

SEQ ID NO: 327494 - DNA, 20 bp, Artificial Sequence
  Description of Artificial Sequence: Synthetic oligonucleotide
  Target: LAMA2; (+) strand; PAM type: YTN; PAM sequence: CTA
attctttacactatgcatta

SEQ ID NO: 327495 - DNA, 20 bp, Artificial Sequence
  Description of Artificial Sequence: Synthetic oligonucleotide
  Target: LAMA2; (+) strand; PAM type: YTN; PAM sequence: TTC
tttacactatgcattaggct

SEQ ID NO: 327496 - DNA, 20 bp, Artificial Sequence
  Description of Artificial Sequence: Synthetic oligonucleotide
  Target: LAMA2; (+) strand; PAM type: YTN; PAM sequence: CTT
tacactatgcattaggctga

SEQ ID NO: 327497 - DNA, 20 bp, Artificial Sequence
  Description of Artificial Sequence: Synthetic oligonucleotide
  Target: LAMA2; (+) strand; PAM type: YTN; PAM sequence: TTT
acactatgcattaggctgag

SEQ ID NO: 327498 - DNA, 20 bp, Artificial Sequence
  Description of Artificial Sequence: Synthetic oligonucleotide
  Target: LAMA2; (+) strand; PAM type: YTN; PAM sequence: TTA
cactatgcattaggctgagg

SEQ ID NO: 327499 - DNA, 20 bp, Artificial Sequence
  Description of Artificial Sequence: Synthetic oligonucleotide
  Target: LAMA2; (+) strand; PAM type: YTN; PAM sequence: CTA
tgcattaggctgaggcctgg

SEQ ID NO: 327500 - DNA, 20 bp, Artificial Sequence
  Description of Artificial Sequence: Synthetic oligonucleotide
  Target: LAMA2; (+) strand; PAM type: YTN; PAM sequence: TTA
ggctgaggcctggtgtaatt

SEQ ID NO: 327501 - DNA, 20 bp, Artificial Sequence
  Description of Artificial Sequence: Synthetic oligonucleotide
  Target: LAMA2; (+) strand; PAM type: YTN; PAM sequence: CTG
aggcctggtgtaatttgaaa

SEQ ID NO: 327502 - DNA, 20 bp, Artificial Sequence
  Description of Artificial Sequence: Synthetic oligonucleotide
  Target: LAMA2; (+) strand; PAM type: YTN; PAM sequence: CTG
gtgtaatttgaaagtgataa

SEQ ID NO: 327503 - DNA, 20 bp, Artificial Sequence
  Description of Artificial Sequence: Synthetic oligonucleotide
  Target: LAMA2; (+) strand; PAM type: YTN; PAM sequence: TTT
gaaagtgataatgcaataga

SEQ ID NO: 327504 - DNA, 20 bp, Artificial Sequence
  Description of Artificial Sequence: Synthetic oligonucleotide
  Target: LAMA2; (+) strand; PAM type: YTN; PAM sequence: TTG
aaagtgataatgcaatagag

SEQ ID NO: 327505 - DNA, 20 bp, Artificial Sequence
  Description of Artificial Sequence: Synthetic oligonucleotide
  Target: LAMA2; (+) strand; PAM type: YTN; PAM sequence: TTC
cagaagctgggggtgggggg

SEQ ID NO: 327506 - DNA, 20 bp, Artificial Sequence
  Description of Artificial Sequence: Synthetic oligonucleotide
  Target: LAMA2; (+) strand; PAM type: YTN; PAM sequence: CTG
ggggtggggggaatagactg

SEQ ID NO: 327507 - DNA, 20 bp, Artificial Sequence
  Description of Artificial Sequence: Synthetic oligonucleotide
  Target: LAMA2; (+) strand; PAM type: YTN; PAM sequence: CTG
gatattgcaaaatgcatcag

SEQ ID NO: 327508 - DNA, 20 bp, Artificial Sequence
  Description of Artificial Sequence: Synthetic oligonucleotide
  Target: LAMA2; (+) strand; PAM type: YTN; PAM sequence: TTG
caaaatgcatcagttagtca

SEQ ID NO: 327509 - DNA, 20 bp, Artificial Sequence
  Description of Artificial Sequence: Synthetic oligonucleotide
  Target: LAMA2; (+) strand; PAM type: YTN; PAM sequence: TTA
gtcaatcaaactcctaattt

SEQ ID NO: 327510 - DNA, 20 bp, Artificial Sequence
  Description of Artificial Sequence: Synthetic oligonucleotide
  Target: LAMA2; (+) strand; PAM type: YTN; PAM sequence: CTC
ctaatttatcaaccaaacca

SEQ ID NO: 327511 - DNA, 20 bp, Artificial Sequence
  Description of Artificial Sequence: Synthetic oligonucleotide
  Target: LAMA2; (+) strand; PAM type: YTN; PAM sequence: CTA
atttatcaaccaaaccaacc

SEQ ID NO: 327512 - DNA, 20 bp, Artificial Sequence
  Description of Artificial Sequence: Synthetic oligonucleotide
  Target: LAMA2; (+) strand; PAM type: YTN; PAM sequence: TTT
atcaaccaaaccaacctaat

SEQ ID NO: 327513 - DNA, 20 bp, Artificial Sequence
  Description of Artificial Sequence: Synthetic oligonucleotide
  Target: LAMA2; (+) strand; PAM type: YTN; PAM sequence: TTA
tcaaccaaaccaacctaatc

SEQ ID NO: 327514 - DNA, 20 bp, Artificial Sequence
  Description of Artificial Sequence: Synthetic oligonucleotide
  Target: LAMA2; (+) strand; PAM type: YTN; PAM sequence: CTA
atcccatagagaattcaaag

SEQ ID NO: 327515 - DNA, 20 bp, Artificial Sequence
  Description of Artificial Sequence: Synthetic oligonucleotide
  Target: LAMA2; (+) strand; PAM type: YTN; PAM sequence: TTC
aaagtgactcacgaaaagac

SEQ ID NO: 327516 - DNA, 20 bp, Artificial Sequence
  Description of Artificial Sequence: Synthetic oligonucleotide
  Target: LAMA2; (+) strand; PAM type: YTN; PAM sequence: CTC
acgaaaagacacacaaaaga

SEQ ID NO: 327517 - DNA, 20 bp, Artificial Sequence
  Description of Artificial Sequence: Synthetic oligonucleotide
  Target: LAMA2; (+) strand; PAM type: YTN; PAM sequence: TTT
tgtttattttccaagatgga

SEQ ID NO: 327518 - DNA, 20 bp, Artificial Sequence
  Description of Artificial Sequence: Synthetic oligonucleotide
  Target: LAMA2; (+) strand; PAM type: YTN; PAM sequence: TTT
gtttattttccaagatggaa

SEQ ID NO: 327519 - DNA, 20 bp, Artificial Sequence
  Description of Artificial Sequence: Synthetic oligonucleotide
  Target: LAMA2; (+) strand; PAM type: YTN; PAM sequence: TTG
tttattttccaagatggaaa

SEQ ID NO: 327520 - DNA, 20 bp, Artificial Sequence
  Description of Artificial Sequence: Synthetic oligonucleotide
  Target: LAMA2; (+) strand; PAM type: YTN; PAM sequence: TTT
attttccaagatggaaaatg

SEQ ID NO: 327521 - DNA, 20 bp, Artificial Sequence
  Description of Artificial Sequence: Synthetic oligonucleotide
  Target: LAMA2; (+) strand; PAM type: YTN; PAM sequence: TTA
ttttccaagatggaaaatgt

SEQ ID NO: 327522 - DNA, 20 bp, Artificial Sequence
  Description of Artificial Sequence: Synthetic oligonucleotide
  Target: LAMA2; (+) strand; PAM type: YTN; PAM sequence: TTT
tccaagatggaaaatgtaaa

SEQ ID NO: 327523 - DNA, 20 bp, Artificial Sequence
  Description of Artificial Sequence: Synthetic oligonucleotide
  Target: LAMA2; (+) strand; PAM type: YTN; PAM sequence: TTT
ccaagatggaaaatgtaaac

SEQ ID NO: 327524 - DNA, 20 bp, Artificial Sequence
  Description of Artificial Sequence: Synthetic oligonucleotide
  Target: LAMA2; (+) strand; PAM type: YTN; PAM sequence: TTC
caagatggaaaatgtaaact

SEQ ID NO: 327525 - DNA, 20 bp, Artificial Sequence
  Description of Artificial Sequence: Synthetic oligonucleotide
  Target: LAMA2; (+) strand; PAM type: YTN; PAM sequence: CTA
tccagaggacagtggtatgg

SEQ ID NO: 327526 - DNA, 20 bp, Artificial Sequence
  Description of Artificial Sequence: Synthetic oligonucleotide
  Target: LAMA2; (+) strand; PAM type: YTN; PAM sequence: TTT
agaaagacaattcacacaat

SEQ ID NO: 327527 - DNA, 20 bp, Artificial Sequence
  Description of Artificial Sequence: Synthetic oligonucleotide
  Target: LAMA2; (+) strand; PAM type: YTN; PAM sequence: TTA
gaaagacaattcacacaata

SEQ ID NO: 327528 - DNA, 20 bp, Artificial Sequence
  Description of Artificial Sequence: Synthetic oligonucleotide
  Target: LAMA2; (+) strand; PAM type: YTN; PAM sequence: TTC
acacaataaattttaaggaa

SEQ ID NO: 327529 - DNA, 20 bp, Artificial Sequence
  Description of Artificial Sequence: Synthetic oligonucleotide
  Target: LAMA2; (+) strand; PAM type: YTN; PAM sequence: TTT
taaggaaataatggttttag

SEQ ID NO: 327530 - DNA, 20 bp, Artificial Sequence
  Description of Artificial Sequence: Synthetic oligonucleotide
  Target: LAMA2; (+) strand; PAM type: YTN; PAM sequence: TTT
aaggaaataatggttttagt

SEQ ID NO: 327531 - DNA, 20 bp, Artificial Sequence
  Description of Artificial Sequence: Synthetic oligonucleotide
  Target: LAMA2; (+) strand; PAM type: YTN; PAM sequence: TTA
aggaaataatggttttagtc

SEQ ID NO: 327532 - DNA, 20 bp, Artificial Sequence
  Description of Artificial Sequence: Synthetic oligonucleotide
  Target: LAMA2; (+) strand; PAM type: YTN; PAM sequence: TTT
tagtctttgatgctaacatt

SEQ ID NO: 327533 - DNA, 20 bp, Artificial Sequence
  Description of Artificial Sequence: Synthetic oligonucleotide
  Target: LAMA2; (+) strand; PAM type: YTN; PAM sequence: TTT
agtctttgatgctaacatta

SEQ ID NO: 327534 - DNA, 20 bp, Artificial Sequence
  Description of Artificial Sequence: Synthetic oligonucleotide
  Target: LAMA2; (+) strand; PAM type: YTN; PAM sequence: TTA
gtctttgatgctaacattat

SEQ ID NO: 327535 - DNA, 20 bp, Artificial Sequence
  Description of Artificial Sequence: Synthetic oligonucleotide
  Target: LAMA2; (+) strand; PAM type: YTN; PAM sequence: CTT
tgatgctaacattatttctg

SEQ ID NO: 327536 - DNA, 20 bp, Artificial Sequence
  Description of Artificial Sequence: Synthetic oligonucleotide
  Target: LAMA2; (+) strand; PAM type: YTN; PAM sequence: TTT
gatgctaacattatttctgg

SEQ ID NO: 327537 - DNA, 20 bp, Artificial Sequence
  Description of Artificial Sequence: Synthetic oligonucleotide
  Target: LAMA2; (+) strand; PAM type: YTN; PAM sequence: TTG
atgctaacattatttctggg

SEQ ID NO: 327538 - DNA, 20 bp, Artificial Sequence
  Description of Artificial Sequence: Synthetic oligonucleotide
  Target: LAMA2; (+) strand; PAM type: YTN; PAM sequence: CTA
acattatttctgggcttcca

SEQ ID NO: 327539 - DNA, 20 bp, Artificial Sequence
  Description of Artificial Sequence: Synthetic oligonucleotide
  Target: LAMA2; (+) strand; PAM type: YTN; PAM sequence: TTA
tttctgggcttccaagtcac

SEQ ID NO: 327540 - DNA, 20 bp, Artificial Sequence
  Description of Artificial Sequence: Synthetic oligonucleotide
  Target: LAMA2; (+) strand; PAM type: YTN; PAM sequence: TTT
ctgggcttccaagtcactaa

SEQ ID NO: 327541 - DNA, 20 bp, Artificial Sequence
  Description of Artificial Sequence: Synthetic oligonucleotide
  Target: LAMA2; (+) strand; PAM type: YTN; PAM sequence: TTC
tgggcttccaagtcactaaa

SEQ ID NO: 327542 - DNA, 20 bp, Artificial Sequence
  Description of Artificial Sequence: Synthetic oligonucleotide
  Target: LAMA2; (+) strand; PAM type: YTN; PAM sequence: CTG
ggcttccaagtcactaaaac

SEQ ID NO: 327543 - DNA, 20 bp, Artificial Sequence
  Description of Artificial Sequence: Synthetic oligonucleotide
  Target: LAMA2; (+) strand; PAM type: YTN; PAM sequence: CTT
ccaagtcactaaaacaatac

SEQ ID NO: 327544 - DNA, 20 bp, Artificial Sequence
  Description of Artificial Sequence: Synthetic oligonucleotide
  Target: LAMA2; (+) strand; PAM type: YTN; PAM sequence: TTC
caagtcactaaaacaataca

SEQ ID NO: 327545 - DNA, 20 bp, Artificial Sequence
  Description of Artificial Sequence: Synthetic oligonucleotide
  Target: LAMA2; (+) strand; PAM type: YTN; PAM sequence: CTA
aaacaatacatacatctttt

SEQ ID NO: 327546 - DNA, 20 bp, Artificial Sequence
  Description of Artificial Sequence: Synthetic oligonucleotide
  Target: LAMA2; (+) strand; PAM type: YTN; PAM sequence: CTT
tttaaaatgttatttttgtt

SEQ ID NO: 327547 - DNA, 20 bp, Artificial Sequence
  Description of Artificial Sequence: Synthetic oligonucleotide
  Target: LAMA2; (+) strand; PAM type: YTN; PAM sequence: TTT
ttaaaatgttatttttgttg

SEQ ID NO: 327548 - DNA, 20 bp, Artificial Sequence
  Description of Artificial Sequence: Synthetic oligonucleotide
  Target: LAMA2; (+) strand; PAM type: YTN; PAM sequence: TTT
taaaatgttatttttgttgt

SEQ ID NO: 327549 - DNA, 20 bp, Artificial Sequence
  Description of Artificial Sequence: Synthetic oligonucleotide
  Target: LAMA2; (+) strand; PAM type: YTN; PAM sequence: TTT
aaaatgttatttttgttgtg

SEQ ID NO: 327550 - DNA, 20 bp, Artificial Sequence
  Description of Artificial Sequence: Synthetic oligonucleotide
  Target: LAMA2; (+) strand; PAM type: YTN; PAM sequence: TTA
aaatgttatttttgttgtgt

SEQ ID NO: 327551 - DNA, 20 bp, Artificial Sequence
  Description of Artificial Sequence: Synthetic oligonucleotide
  Target: LAMA2; (+) strand; PAM type: YTN; PAM sequence: TTA
tttttgttgtgttgtttggt

SEQ ID NO: 327552 - DNA, 20 bp, Artificial Sequence
  Description of Artificial Sequence: Synthetic oligonucleotide
  Target: LAMA2; (+) strand; PAM type: YTN; PAM sequence: TTT
ttgttgtgttgtttggtttt

SEQ ID NO: 327553 - DNA, 20 bp, Artificial Sequence
  Description of Artificial Sequence: Synthetic oligonucleotide
  Target: LAMA2; (+) strand; PAM type: YTN; PAM sequence: TTT
tgttgtgttgtttggttttg

SEQ ID NO: 327554 - DNA, 20 bp, Artificial Sequence
  Description of Artificial Sequence: Synthetic oligonucleotide
  Target: LAMA2; (+) strand; PAM type: YTN; PAM sequence: TTT
gttgtgttgtttggttttgt

SEQ ID NO: 327555 - DNA, 20 bp, Artificial Sequence
  Description of Artificial Sequence: Synthetic oligonucleotide
  Target: LAMA2; (+) strand; PAM type: YTN; PAM sequence: TTG
ttgtgttgtttggttttgtg

SEQ ID NO: 327556 - DNA, 20 bp, Artificial Sequence
  Description of Artificial Sequence: Synthetic oligonucleotide
  Target: LAMA2; (+) strand; PAM type: YTN; PAM sequence: TTG
tgttgtttggttttgtgttt

SEQ ID NO: 327557 - DNA, 20 bp, Artificial Sequence
  Description of Artificial Sequence: Synthetic oligonucleotide
  Target: LAMA2; (+) strand; PAM type: YTN; PAM sequence: TTG
tttggttttgtgttttagtc

SEQ ID NO: 327558 - DNA, 20 bp, Artificial Sequence
  Description of Artificial Sequence: Synthetic oligonucleotide
  Target: LAMA2; (+) strand; PAM type: YTN; PAM sequence: TTT
ggttttgtgttttagtcttt

SEQ ID NO: 327559 - DNA, 20 bp, Artificial Sequence
  Description of Artificial Sequence: Synthetic oligonucleotide
  Target: LAMA2; (+) strand; PAM type: YTN; PAM sequence: TTG
gttttgtgttttagtctttt

SEQ ID NO: 327560 - DNA, 20 bp, Artificial Sequence
  Description of Artificial Sequence: Synthetic oligonucleotide
  Target: LAMA2; (+) strand; PAM type: YTN; PAM sequence: TTT
tgtgttttagtctttttatt

SEQ ID NO: 327561 - DNA, 20 bp, Artificial Sequence
  Description of Artificial Sequence: Synthetic oligonucleotide
  Target: LAMA2; (+) strand; PAM type: YTN; PAM sequence: TTT
gtgttttagtctttttattt

SEQ ID NO: 327562 - DNA, 20 bp, Artificial Sequence
  Description of Artificial Sequence: Synthetic oligonucleotide
  Target: LAMA2; (+) strand; PAM type: YTN; PAM sequence: TTG
tgttttagtctttttatttt

SEQ ID NO: 327563 - DNA, 20 bp, Artificial Sequence
  Description of Artificial Sequence: Synthetic oligonucleotide
  Target: LAMA2; (+) strand; PAM type: YTN; PAM sequence: TTT
tagtctttttattttctgac

SEQ ID NO: 327564 - DNA, 20 bp, Artificial Sequence
  Description of Artificial Sequence: Synthetic oligonucleotide
  Target: LAMA2; (+) strand; PAM type: YTN; PAM sequence: TTT
agtctttttattttctgaca

SEQ ID NO: 327565 - DNA, 20 bp, Artificial Sequence
  Description of Artificial Sequence: Synthetic oligonucleotide
  Target: LAMA2; (+) strand; PAM type: YTN; PAM sequence: TTA
gtctttttattttctgacaa

SEQ ID NO: 327566 - DNA, 20 bp, Artificial Sequence
  Description of Artificial Sequence: Synthetic oligonucleotide
  Target: LAMA2; (+) strand; PAM type: YTN; PAM sequence: CTT
tttattttctgacaaaagaa

SEQ ID NO: 327567 - DNA, 20 bp, Artificial Sequence
  Description of Artificial Sequence: Synthetic oligonucleotide
  Target: LAMA2; (+) strand; PAM type: YTN; PAM sequence: TTT
ttattttctgacaaaagaaa

SEQ ID NO: 327568 - DNA, 20 bp, Artificial Sequence
  Description of Artificial Sequence: Synthetic oligonucleotide
  Target: LAMA2; (+) strand; PAM type: YTN; PAM sequence: TTT
tattttctgacaaaagaaag

SEQ ID NO: 327569 - DNA, 20 bp, Artificial Sequence
  Description of Artificial Sequence: Synthetic oligonucleotide
  Target: LAMA2; (+) strand; PAM type: YTN; PAM sequence: TTT
attttctgacaaaagaaagt

SEQ ID NO: 327570 - DNA, 20 bp, Artificial Sequence
  Description of Artificial Sequence: Synthetic oligonucleotide
  Target: LAMA2; (+) strand; PAM type: YTN; PAM sequence: TTA
ttttctgacaaaagaaagtt

SEQ ID NO: 327571 - DNA, 20 bp, Artificial Sequence
  Description of Artificial Sequence: Synthetic oligonucleotide
  Target: LAMA2; (+) strand; PAM type: YTN; PAM sequence: TTT
tctgacaaaagaaagtttgc

SEQ ID NO: 327572 - DNA, 20 bp, Artificial Sequence
  Description of Artificial Sequence: Synthetic oligonucleotide
  Target: LAMA2; (+) strand; PAM type: YTN; PAM sequence: TTT
ctgacaaaagaaagtttgcc

SEQ ID NO: 327573 - DNA, 20 bp, Artificial Sequence
  Description of Artificial Sequence: Synthetic oligonucleotide
  Target: LAMA2; (+) strand; PAM type: YTN; PAM sequence: TTC
tgacaaaagaaagtttgcca

SEQ ID NO: 327574 - DNA, 20 bp, Artificial Sequence
  Description of Artificial Sequence: Synthetic oligonucleotide
  Target: LAMA2; (+) strand; PAM type: YTN; PAM sequence: CTG
acaaaagaaagtttgccatg

SEQ ID NO: 327575 - DNA, 20 bp, Artificial Sequence
  Description of Artificial Sequence: Synthetic oligonucleotide
  Target: LAMA2; (+) strand; PAM type: YTN; PAM sequence: TTT
gccatgtctccagaacaggc

SEQ ID NO: 327576 - DNA, 20 bp, Artificial Sequence
  Description of Artificial Sequence: Synthetic oligonucleotide
  Target: LAMA2; (+) strand; PAM type: YTN; PAM sequence: TTG
ccatgtctccagaacaggca

SEQ ID NO: 327577 - DNA, 20 bp, Artificial Sequence
  Description of Artificial Sequence: Synthetic oligonucleotide
  Target: LAMA2; (+) strand; PAM type: YTN; PAM sequence: CTC
cagaacaggcacacaattta

SEQ ID NO: 327578 - DNA, 20 bp, Artificial Sequence
  Description of Artificial Sequence: Synthetic oligonucleotide
  Target: LAMA2; (+) strand; PAM type: YTN; PAM sequence: TTT
atgtactaaatcctgatatg

SEQ ID NO: 327579 - DNA, 20 bp, Artificial Sequence
  Description of Artificial Sequence: Synthetic oligonucleotide
  Target: LAMA2; (+) strand; PAM type: YTN; PAM sequence: TTA
tgtactaaatcctgatatga

SEQ ID NO: 327580 - DNA, 20 bp, Artificial Sequence
  Description of Artificial Sequence: Synthetic oligonucleotide
  Target: LAMA2; (+) strand; PAM type: YTN; PAM sequence: CTA
aatcctgatatgaatttctt

SEQ ID NO: 327581 - DNA, 20 bp, Artificial Sequence
  Description of Artificial Sequence: Synthetic oligonucleotide
  Target: LAMA2; (+) strand; PAM type: YTN; PAM sequence: CTG
atatgaatttcttttctttt

SEQ ID NO: 327582 - DNA, 20 bp, Artificial Sequence
  Description of Artificial Sequence: Synthetic oligonucleotide
  Target: LAMA2; (+) strand; PAM type: YTN; PAM sequence: TTT
cttttcttttcttttctttt

SEQ ID NO: 327583 - DNA, 20 bp, Artificial Sequence
  Description of Artificial Sequence: Synthetic oligonucleotide
  Target: LAMA2; (+) strand; PAM type: YTN; PAM sequence: TTC
ttttcttttcttttcttttt

SEQ ID NO: 327584 - DNA, 20 bp, Artificial Sequence
  Description of Artificial Sequence: Synthetic oligonucleotide
  Target: LAMA2; (+) strand; PAM type: YTN; PAM sequence: CTT
ttcttttcttttcttttttt

SEQ ID NO: 327585 - DNA, 20 bp, Artificial Sequence
  Description of Artificial Sequence: Synthetic oligonucleotide
  Target: LAMA2; (+) strand; PAM type: YTN; PAM sequence: TTT
tcttttcttttctttttttt

SEQ ID NO: 327586 - DNA, 20 bp, Artificial Sequence
  Description of Artificial Sequence: Synthetic oligonucleotide
  Target: LAMA2; (+) strand; PAM type: YTN; PAM sequence: TTT
cttttcttttcttttttttt

SEQ ID NO: 327587 - DNA, 20 bp, Artificial Sequence
  Description of Artificial Sequence: Synthetic oligonucleotide
  Target: LAMA2; (+) strand; PAM type: YTN; PAM sequence: TTC
ttttcttttctttttttttg

SEQ ID NO: 327588 - DNA, 20 bp, Artificial Sequence
  Description of Artificial Sequence: Synthetic oligonucleotide
  Target: LAMA2; (+) strand; PAM type: YTN; PAM sequence: CTT
ttcttttctttttttttgaa

SEQ ID NO: 327589 - DNA, 20 bp, Artificial Sequence
  Description of Artificial Sequence: Synthetic oligonucleotide
  Target: LAMA2; (+) strand; PAM type: YTN; PAM sequence: TTT
tcttttctttttttttgaaa

SEQ ID NO: 327590 - DNA, 20 bp, Artificial Sequence
  Description of Artificial Sequence: Synthetic oligonucleotide
  Target: LAMA2; (+) strand; PAM type: YTN; PAM sequence: TTT
cttttctttttttttgaaat

SEQ ID NO: 327591 - DNA, 20 bp, Artificial Sequence
  Description of Artificial Sequence: Synthetic oligonucleotide
  Target: LAMA2; (+) strand; PAM type: YTN; PAM sequence: TTC
ttttctttttttttgaaatg

SEQ ID NO: 327592 - DNA, 20 bp, Artificial Sequence
  Description of Artificial Sequence: Synthetic oligonucleotide
  Target: LAMA2; (+) strand; PAM type: YTN; PAM sequence: CTT
ttctttttttttgaaatgga

SEQ ID NO: 327593 - DNA, 20 bp, Artificial Sequence
  Description of Artificial Sequence: Synthetic oligonucleotide
  Target: LAMA2; (+) strand; PAM type: YTN; PAM sequence: TTT
tctttttttttgaaatggag

SEQ ID NO: 327594 - DNA, 20 bp, Artificial Sequence
  Description of Artificial Sequence: Synthetic oligonucleotide
  Target: LAMA2; (+) strand; PAM type: YTN; PAM sequence: TTT
ctttttttttgaaatggagt

SEQ ID NO: 327595 - DNA, 20 bp, Artificial Sequence
  Description of Artificial Sequence: Synthetic oligonucleotide
  Target: LAMA2; (+) strand; PAM type: YTN; PAM sequence: TTC
tttttttttgaaatggagtc

SEQ ID NO: 327596 - DNA, 20 bp, Artificial Sequence
  Description of Artificial Sequence: Synthetic oligonucleotide
  Target: LAMA2; (+) strand; PAM type: YTN; PAM sequence: CTT
tttttttgaaatggagtctt

SEQ ID NO: 327597 - DNA, 20 bp, Artificial Sequence
  Description of Artificial Sequence: Synthetic oligonucleotide
  Target: LAMA2; (+) strand; PAM type: YTN; PAM sequence: TTT
ttttttgaaatggagtctta

SEQ ID NO: 327598 - DNA, 20 bp, Artificial Sequence
  Description of Artificial Sequence: Synthetic oligonucleotide
  Target: LAMA2; (+) strand; PAM type: YTN; PAM sequence: TTT
tttttgaaatggagtcttac

SEQ ID NO: 327599 - DNA, 20 bp, Artificial Sequence
  Description of Artificial Sequence: Synthetic oligonucleotide
  Target: LAMA2; (+) strand; PAM type: YTN; PAM sequence: TTT
ttttgaaatggagtcttact

SEQ ID NO: 327600 - DNA, 20 bp, Artificial Sequence
  Description of Artificial Sequence: Synthetic oligonucleotide
  Target: LAMA2; (+) strand; PAM type: YTN; PAM sequence: TTT
tttgaaatggagtcttactc

SEQ ID NO: 327601 - DNA, 20 bp, Artificial Sequence
  Description of Artificial Sequence: Synthetic oligonucleotide
  Target: LAMA2; (+) strand; PAM type: YTN; PAM sequence: TTT
ttgaaatggagtcttactct

SEQ ID NO: 327602 - DNA, 20 bp, Artificial Sequence
  Description of Artificial Sequence: Synthetic oligonucleotide
  Target: LAMA2; (+) strand; PAM type: YTN; PAM sequence: TTT
tgaaatggagtcttactctg

SEQ ID NO: 327603 - DNA, 20 bp, Artificial Sequence
  Description of Artificial Sequence: Synthetic oligonucleotide
  Target: LAMA2; (+) strand; PAM type: YTN; PAM sequence: TTT
gaaatggagtcttactctgt

SEQ ID NO: 327604 - DNA, 20 bp, Artificial Sequence
  Description of Artificial Sequence: Synthetic oligonucleotide
  Target: LAMA2; (+) strand; PAM type: YTN; PAM sequence: TTG
aaatggagtcttactctgtt

SEQ ID NO: 327605 - DNA, 20 bp, Artificial Sequence
  Description of Artificial Sequence: Synthetic oligonucleotide
  Target: LAMA2; (+) strand; PAM type: YTN; PAM sequence: CTT
actctgttgcccaggctgga

SEQ ID NO: 327606 - DNA, 20 bp, Artificial Sequence
  Description of Artificial Sequence: Synthetic oligonucleotide
  Target: LAMA2; (+) strand; PAM type: YTN; PAM sequence: TTA
ctctgttgcccaggctggag

SEQ ID NO: 327607 - DNA, 20 bp, Artificial Sequence
  Description of Artificial Sequence: Synthetic oligonucleotide
  Target: LAMA2; (+) strand; PAM type: YTN; PAM sequence: CTC
tgttgcccaggctggagtac

SEQ ID NO: 327608 - DNA, 20 bp, Artificial Sequence
  Description of Artificial Sequence: Synthetic oligonucleotide
  Target: LAMA2; (+) strand; PAM type: YTN; PAM sequence: CTG
ttgcccaggctggagtacag

SEQ ID NO: 327609 - DNA, 20 bp, Artificial Sequence
  Description of Artificial Sequence: Synthetic oligonucleotide
  Target: LAMA2; (+) strand; PAM type: YTN; PAM sequence: TTG
cccaggctggagtacagtgg

SEQ ID NO: 327610 - DNA, 20 bp, Artificial Sequence
  Description of Artificial Sequence: Synthetic oligonucleotide
  Target: LAMA2; (+) strand; PAM type: YTN; PAM sequence: CTG
gagtacagtggcacgatctc

SEQ ID NO: 327611 - DNA, 20 bp, Artificial Sequence
  Description of Artificial Sequence: Synthetic oligonucleotide
  Target: LAMA2; (+) strand; PAM type: YTN; PAM sequence: CTC
tgcaacctctacctcctggg

SEQ ID NO: 327612 - DNA, 20 bp, Artificial Sequence
  Description of Artificial Sequence: Synthetic oligonucleotide
  Target: LAMA2; (+) strand; PAM type: YTN; PAM sequence: CTG
caacctctacctcctgggtt

SEQ ID NO: 327613 - DNA, 20 bp, Artificial Sequence
  Description of Artificial Sequence: Synthetic oligonucleotide
  Target: LAMA2; (+) strand; PAM type: YTN; PAM sequence: CTC
tacctcctgggttcaaaatg

SEQ ID NO: 327614 - DNA, 20 bp, Artificial Sequence
  Description of Artificial Sequence: Synthetic oligonucleotide
  Target: LAMA2; (+) strand; PAM type: YTN; PAM sequence: CTA
cctcctgggttcaaaatgat

SEQ ID NO: 327615 - DNA, 20 bp, Artificial Sequence
  Description of Artificial Sequence: Synthetic oligonucleotide
  Target: LAMA2; (+) strand; PAM type: YTN; PAM sequence: CTC
ctgggttcaaaatgattctc

SEQ ID NO: 327616 - DNA, 20 bp, Artificial Sequence
  Description of Artificial Sequence: Synthetic oligonucleotide
  Target: LAMA2; (+) strand; PAM type: YTN; PAM sequence: CTG
ggttcaaaatgattctcctg

SEQ ID NO: 327617 - DNA, 20 bp, Artificial Sequence
  Description of Artificial Sequence: Synthetic oligonucleotide
  Target: LAMA2; (+) strand; PAM type: YTN; PAM sequence: TTC
aaaatgattctcctgcctta

SEQ ID NO: 327618 - DNA, 20 bp, Artificial Sequence
  Description of Artificial Sequence: Synthetic oligonucleotide
  Target: LAMA2; (+) strand; PAM type: YTN; PAM sequence: TTC
tcctgccttatcctcccgag

SEQ ID NO: 327619 - DNA, 20 bp, Artificial Sequence
  Description of Artificial Sequence: Synthetic oligonucleotide
  Target: LAMA2; (+) strand; PAM type: YTN; PAM sequence: CTC
ctgccttatcctcccgagta

SEQ ID NO: 327620 - DNA, 20 bp, Artificial Sequence
  Description of Artificial Sequence: Synthetic oligonucleotide
  Target: LAMA2; (+) strand; PAM type: YTN; PAM sequence: CTG
ccttatcctcccgagtagct

SEQ ID NO: 327621 - DNA, 20 bp, Artificial Sequence
  Description of Artificial Sequence: Synthetic oligonucleotide
  Target: LAMA2; (+) strand; PAM type: YTN; PAM sequence: CTT
atcctcccgagtagctggga

SEQ ID NO: 327622 - DNA, 20 bp, Artificial Sequence
  Description of Artificial Sequence: Synthetic oligonucleotide
  Target: LAMA2; (+) strand; PAM type: YTN; PAM sequence: TTA
tcctcccgagtagctgggat

SEQ ID NO: 327623 - DNA, 20 bp, Artificial Sequence
  Description of Artificial Sequence: Synthetic oligonucleotide
  Target: LAMA2; (+) strand; PAM type: YTN; PAM sequence: CTC
ccgagtagctgggattacag

SEQ ID NO: 327624 - DNA, 20 bp, Artificial Sequence
  Description of Artificial Sequence: Synthetic oligonucleotide
  Target: LAMA2; (+) strand; PAM type: YTN; PAM sequence: CTG
ggattacaggcatacactac

SEQ ID NO: 327625 - DNA, 20 bp, Artificial Sequence
  Description of Artificial Sequence: Synthetic oligonucleotide
  Target: LAMA2; (+) strand; PAM type: YTN; PAM sequence: TTA
caggcatacactaccatgcc

SEQ ID NO: 327626 - DNA, 20 bp, Artificial Sequence
  Description of Artificial Sequence: Synthetic oligonucleotide
  Target: LAMA2; (+) strand; PAM type: YTN; PAM sequence: CTA
ccatgcctggccaatttttg

SEQ ID NO: 327627 - DNA, 20 bp, Artificial Sequence
  Description of Artificial Sequence: Synthetic oligonucleotide
  Target: LAMA2; (+) strand; PAM type: YTN; PAM sequence: CTG
gccaatttttgtatttttag

SEQ ID NO: 327628 - DNA, 20 bp, Artificial Sequence
  Description of Artificial Sequence: Synthetic oligonucleotide
  Target: LAMA2; (+) strand; PAM type: YTN; PAM sequence: TTT
ttgtatttttagtagagaca

SEQ ID NO: 327629 - DNA, 20 bp, Artificial Sequence
  Description of Artificial Sequence: Synthetic oligonucleotide
  Target: LAMA2; (+) strand; PAM type: YTN; PAM sequence: TTT
tgtatttttagtagagacag

SEQ ID NO: 327630 - DNA, 20 bp, Artificial Sequence
  Description of Artificial Sequence: Synthetic oligonucleotide
  Target: LAMA2; (+) strand; PAM type: YTN; PAM sequence: TTT
gtatttttagtagagacagg

SEQ ID NO: 327631 - DNA, 20 bp, Artificial Sequence
  Description of Artificial Sequence: Synthetic oligonucleotide
  Target: LAMA2; (+) strand; PAM type: YTN; PAM sequence: TTG
tatttttagtagagacaggg

SEQ ID NO: 327632 - DNA, 20 bp, Artificial Sequence
  Description of Artificial Sequence: Synthetic oligonucleotide
  Target: LAMA2; (+) strand; PAM type: YTN; PAM sequence: TTT
ttagtagagacagggtttgg

SEQ ID NO: 327633 - DNA, 20 bp, Artificial Sequence
  Description of Artificial Sequence: Synthetic oligonucleotide
  Target: LAMA2; (+) strand; PAM type: YTN; PAM sequence: TTT
tagtagagacagggtttggc

SEQ ID NO: 327634 - DNA, 20 bp, Artificial Sequence
  Description of Artificial Sequence: Synthetic oligonucleotide
  Target: LAMA2; (+) strand; PAM type: YTN; PAM sequence: TTT
agtagagacagggtttggcc

SEQ ID NO: 327635 - DNA, 20 bp, Artificial Sequence
  Description of Artificial Sequence: Synthetic oligonucleotide
  Target: LAMA2; (+) strand; PAM type: YTN; PAM sequence: TTA
gtagagacagggtttggcca

SEQ ID NO: 327636 - DNA, 20 bp, Artificial Sequence
  Description of Artificial Sequence: Synthetic oligonucleotide
  Target: LAMA2; (+) strand; PAM type: YTN; PAM sequence: TTT
ggccatgttggccaggctgg

SEQ ID NO: 327637 - DNA, 20 bp, Artificial Sequence
  Description of Artificial Sequence: Synthetic oligonucleotide
  Target: LAMA2; (+) strand; PAM type: YTN; PAM sequence: TTG
gccatgttggccaggctggt

SEQ ID NO: 327638 - DNA, 20 bp, Artificial Sequence
  Description of Artificial Sequence: Synthetic oligonucleotide
  Target: LAMA2; (+) strand; PAM type: YTN; PAM sequence: TTG
gccaggctggtcttgaactc

SEQ ID NO: 327639 - DNA, 20 bp, Artificial Sequence
  Description of Artificial Sequence: Synthetic oligonucleotide
  Target: LAMA2; (+) strand; PAM type: YTN; PAM sequence: CTG
gtcttgaactcctactcagg

SEQ ID NO: 327640 - DNA, 20 bp, Artificial Sequence
  Description of Artificial Sequence: Synthetic oligonucleotide
  Target: LAMA2; (+) strand; PAM type: YTN; PAM sequence: CTT
gaactcctactcaggtgatc

SEQ ID NO: 327641 - DNA, 20 bp, Artificial Sequence
  Description of Artificial Sequence: Synthetic oligonucleotide
  Target: LAMA2; (+) strand; PAM type: YTN; PAM sequence: TTG
aactcctactcaggtgatcc

SEQ ID NO: 327642 - DNA, 20 bp, Artificial Sequence
  Description of Artificial Sequence: Synthetic oligonucleotide
  Target: LAMA2; (+) strand; PAM type: YTN; PAM sequence: CTC
ctactcaggtgatcctcctg

SEQ ID NO: 327643 - DNA, 20 bp, Artificial Sequence
  Description of Artificial Sequence: Synthetic oligonucleotide
  Target: LAMA2; (+) strand; PAM type: YTN; PAM sequence: CTA
ctcaggtgatcctcctgcct

SEQ ID NO: 327644 - DNA, 20 bp, Artificial Sequence
  Description of Artificial Sequence: Synthetic oligonucleotide
  Target: LAMA2; (+) strand; PAM type: YTN; PAM sequence: CTC
aggtgatcctcctgcctcgg

SEQ ID NO: 327645 - DNA, 20 bp, Artificial Sequence
  Description of Artificial Sequence: Synthetic oligonucleotide
  Target: LAMA2; (+) strand; PAM type: YTN; PAM sequence: CTC
ctgcctcggcctcccaaagt

SEQ ID NO: 327646 - DNA, 20 bp, Artificial Sequence
  Description of Artificial Sequence: Synthetic oligonucleotide
  Target: LAMA2; (+) strand; PAM type: YTN; PAM sequence: CTG
cctcggcctcccaaagtgct

SEQ ID NO: 327647 - DNA, 20 bp, Artificial Sequence
  Description of Artificial Sequence: Synthetic oligonucleotide
  Target: LAMA2; (+) strand; PAM type: YTN; PAM sequence: CTC
ggcctcccaaagtgctggga

SEQ ID NO: 327648 - DNA, 20 bp, Artificial Sequence
  Description of Artificial Sequence: Synthetic oligonucleotide
  Target: LAMA2; (+) strand; PAM type: YTN; PAM sequence: CTC
ccaaagtgctgggattacag

SEQ ID NO: 327649 - DNA, 20 bp, Artificial Sequence
  Description of Artificial Sequence: Synthetic oligonucleotide
  Target: LAMA2; (+) strand; PAM type: YTN; PAM sequence: CTG
ggattacaggcgtgagccac

SEQ ID NO: 327650 - DNA, 20 bp, Artificial Sequence
  Description of Artificial Sequence: Synthetic oligonucleotide
  Target: LAMA2; (+) strand; PAM type: YTN; PAM sequence: TTA
caggcgtgagccaccaggcc

SEQ ID NO: 327651 - DNA, 20 bp, Artificial Sequence
  Description of Artificial Sequence: Synthetic oligonucleotide
  Target: LAMA2; (+) strand; PAM type: YTN; PAM sequence: CTC
tgatatgaatttcttattgg

SEQ ID NO: 327652 - DNA, 20 bp, Artificial Sequence
  Description of Artificial Sequence: Synthetic oligonucleotide
  Target: LAMA2; (+) strand; PAM type: YTN; PAM sequence: CTG
atatgaatttcttattggag

SEQ ID NO: 327653 - DNA, 20 bp, Artificial Sequence
  Description of Artificial Sequence: Synthetic oligonucleotide
  Target: LAMA2; (+) strand; PAM type: YTN; PAM sequence: TTT
cttattggagaatcccttta

SEQ ID NO: 327654 - DNA, 20 bp, Artificial Sequence
  Description of Artificial Sequence: Synthetic oligonucleotide
  Target: LAMA2; (+) strand; PAM type: YTN; PAM sequence: TTC
ttattggagaatccctttat

SEQ ID NO: 327655 - DNA, 20 bp, Artificial Sequence
  Description of Artificial Sequence: Synthetic oligonucleotide
  Target: LAMA2; (+) strand; PAM type: YTN; PAM sequence: CTT
attggagaatccctttatgt

SEQ ID NO: 327656 - DNA, 20 bp, Artificial Sequence
  Description of Artificial Sequence: Synthetic oligonucleotide
  Target: LAMA2; (+) strand; PAM type: YTN; PAM sequence: TTA
ttggagaatccctttatgtg

SEQ ID NO: 327657 - DNA, 20 bp, Artificial Sequence
  Description of Artificial Sequence: Synthetic oligonucleotide
  Target: LAMA2; (+) strand; PAM type: YTN; PAM sequence: TTG
gagaatccctttatgtgtcc

SEQ ID NO: 327658 - DNA, 20 bp, Artificial Sequence
  Description of Artificial Sequence: Synthetic oligonucleotide
  Target: LAMA2; (+) strand; PAM type: YTN; PAM sequence: CTT
tatgtgtccagccctgtggt

SEQ ID NO: 327659 - DNA, 20 bp, Artificial Sequence
  Description of Artificial Sequence: Synthetic oligonucleotide
  Target: LAMA2; (+) strand; PAM type: YTN; PAM sequence: TTT
atgtgtccagccctgtggta

SEQ ID NO: 327660 - DNA, 20 bp, Artificial Sequence
  Description of Artificial Sequence: Synthetic oligonucleotide
  Target: LAMA2; (+) strand; PAM type: YTN; PAM sequence: TTA
tgtgtccagccctgtggtag

SEQ ID NO: 327661 - DNA, 20 bp, Artificial Sequence
  Description of Artificial Sequence: Synthetic oligonucleotide
  Target: LAMA2; (+) strand; PAM type: YTN; PAM sequence: CTG
tggtaggctctgagaatata

SEQ ID NO: 327662 - DNA, 20 bp, Artificial Sequence
  Description of Artificial Sequence: Synthetic oligonucleotide
  Target: LAMA2; (+) strand; PAM type: YTN; PAM sequence: CTC
tgagaatatagtaatgaaca

SEQ ID NO: 327663 - DNA, 20 bp, Artificial Sequence
  Description of Artificial Sequence: Synthetic oligonucleotide
  Target: LAMA2; (+) strand; PAM type: YTN; PAM sequence: CTG
agaatatagtaatgaacaag

SEQ ID NO: 327664 - DNA, 20 bp, Artificial Sequence
  Description of Artificial Sequence: Synthetic oligonucleotide
  Target: LAMA2; (+) strand; PAM type: YTN; PAM sequence: CTC
tcccatcatgaagcttacgt

SEQ ID NO: 327665 - DNA, 20 bp, Artificial Sequence
  Description of Artificial Sequence: Synthetic oligonucleotide
  Target: LAMA2; (+) strand; PAM type: YTN; PAM sequence: CTC
ccatcatgaagcttacgttc

SEQ ID NO: 327666 - DNA, 20 bp, Artificial Sequence
  Description of Artificial Sequence: Synthetic oligonucleotide
  Target: LAMA2; (+) strand; PAM type: YTN; PAM sequence: CTT
acgttccagcaaggaagcta

SEQ ID NO: 327667 - DNA, 20 bp, Artificial Sequence
  Description of Artificial Sequence: Synthetic oligonucleotide
  Target: LAMA2; (+) strand; PAM type: YTN; PAM sequence: TTA
cgttccagcaaggaagctag

SEQ ID NO: 327668 - DNA, 20 bp, Artificial Sequence
  Description of Artificial Sequence: Synthetic oligonucleotide
  Target: LAMA2; (+) strand; PAM type: YTN; PAM sequence: TTC
cagcaaggaagctagacctt

SEQ ID NO: 327669 - DNA, 20 bp, Artificial Sequence
  Description of Artificial Sequence: Synthetic oligonucleotide
  Target: LAMA2; (+) strand; PAM type: YTN; PAM sequence: CTA
gaccttcaatagataattat

SEQ ID NO: 327670 - DNA, 20 bp, Artificial Sequence
  Description of Artificial Sequence: Synthetic oligonucleotide
  Target: LAMA2; (+) strand; PAM type: YTN; PAM sequence: CTT
caatagataattatcattta

SEQ ID NO: 327671 - DNA, 20 bp, Artificial Sequence
  Description of Artificial Sequence: Synthetic oligonucleotide
  Target: LAMA2; (+) strand; PAM type: YTN; PAM sequence: TTC
aatagataattatcatttaa

SEQ ID NO: 327672 - DNA, 20 bp, Artificial Sequence
  Description of Artificial Sequence: Synthetic oligonucleotide
  Target: LAMA2; (+) strand; PAM type: YTN; PAM sequence: TTA
tcatttaaaattataccttg

SEQ ID NO: 327673 - DNA, 20 bp, Artificial Sequence
  Description of Artificial Sequence: Synthetic oligonucleotide
  Target: LAMA2; (+) strand; PAM type: YTN; PAM sequence: TTT
aaaattataccttgtaatca

SEQ ID NO: 327674 - DNA, 20 bp, Artificial Sequence
  Description of Artificial Sequence: Synthetic oligonucleotide
  Target: LAMA2; (+) strand; PAM type: YTN; PAM sequence: TTA
aaattataccttgtaatcag

SEQ ID NO: 327675 - DNA, 20 bp, Artificial Sequence
  Description of Artificial Sequence: Synthetic oligonucleotide
  Target: LAMA2; (+) strand; PAM type: YTN; PAM sequence: TTA
taccttgtaatcagtgctat

SEQ ID NO: 327676 - DNA, 20 bp, Artificial Sequence
  Description of Artificial Sequence: Synthetic oligonucleotide
  Target: LAMA2; (+) strand; PAM type: YTN; PAM sequence: CTT
gtaatcagtgctatgcaaga

SEQ ID NO: 327677 - DNA, 20 bp, Artificial Sequence
  Description of Artificial Sequence: Synthetic oligonucleotide
  Target: LAMA2; (+) strand; PAM type: YTN; PAM sequence: TTG
taatcagtgctatgcaagaa

SEQ ID NO: 327678 - DNA, 20 bp, Artificial Sequence
  Description of Artificial Sequence: Synthetic oligonucleotide
  Target: LAMA2; (+) strand; PAM type: YTN; PAM sequence: CTA
tgcaagaaaaataaggcaga

SEQ ID NO: 327679 - DNA, 20 bp, Artificial Sequence
  Description of Artificial Sequence: Synthetic oligonucleotide
  Target: LAMA2; (+) strand; PAM type: YTN; PAM sequence: TTA
ggggctgtaatgaaggacct

SEQ ID NO: 327680 - DNA, 20 bp, Artificial Sequence
  Description of Artificial Sequence: Synthetic oligonucleotide
  Target: LAMA2; (+) strand; PAM type: YTN; PAM sequence: CTG
taatgaaggacctgtttaca

SEQ ID NO: 327681 - DNA, 20 bp, Artificial Sequence
  Description of Artificial Sequence: Synthetic oligonucleotide
  Target: LAMA2; (+) strand; PAM type: YTN; PAM sequence: CTG
tttacaaagcattaggaaag

SEQ ID NO: 327682 - DNA, 20 bp, Artificial Sequence
  Description of Artificial Sequence: Synthetic oligonucleotide
  Target: LAMA2; (+) strand; PAM type: YTN; PAM sequence: TTT
acaaagcattaggaaagccc

SEQ ID NO: 327683 - DNA, 20 bp, Artificial Sequence
  Description of Artificial Sequence: Synthetic oligonucleotide
  Target: LAMA2; (+) strand; PAM type: YTN; PAM sequence: TTA
caaagcattaggaaagccct

SEQ ID NO: 327684 - DNA, 20 bp, Artificial Sequence
  Description of Artificial Sequence: Synthetic oligonucleotide
  Target: LAMA2; (+) strand; PAM type: YTN; PAM sequence: TTA
ggaaagccctcatggaggaa

SEQ ID NO: 327685 - DNA, 20 bp, Artificial Sequence
  Description of Artificial Sequence: Synthetic oligonucleotide
  Target: LAMA2; (+) strand; PAM type: YTN; PAM sequence: CTC
atggaggaaataagacaagg

SEQ ID NO: 327686 - DNA, 20 bp, Artificial Sequence
  Description of Artificial Sequence: Synthetic oligonucleotide
  Target: LAMA2; (+) strand; PAM type: YTN; PAM sequence: CTT
gtgaacaataggaaggtatg

SEQ ID NO: 327687 - DNA, 20 bp, Artificial Sequence
  Description of Artificial Sequence: Synthetic oligonucleotide
  Target: LAMA2; (+) strand; PAM type: YTN; PAM sequence: TTG
tgaacaataggaaggtatgt

SEQ ID NO: 327688 - DNA, 20 bp, Artificial Sequence
  Description of Artificial Sequence: Synthetic oligonucleotide
  Target: LAMA2; (+) strand; PAM type: YTN; PAM sequence: TTA
aggaacagagatttctagac

SEQ ID NO: 327689 - DNA, 20 bp, Artificial Sequence
  Description of Artificial Sequence: Synthetic oligonucleotide
  Target: LAMA2; (+) strand; PAM type: YTN; PAM sequence: TTT
ctagacaagccctaagcaag

SEQ ID NO: 327690 - DNA, 20 bp, Artificial Sequence
  Description of Artificial Sequence: Synthetic oligonucleotide
  Target: LAMA2; (+) strand; PAM type: YTN; PAM sequence: TTC
tagacaagccctaagcaagg

SEQ ID NO: 327691 - DNA, 20 bp, Artificial Sequence
  Description of Artificial Sequence: Synthetic oligonucleotide
  Target: LAMA2; (+) strand; PAM type: YTN; PAM sequence: CTA
gacaagccctaagcaaggaa

SEQ ID NO: 327692 - DNA, 20 bp, Artificial Sequence
  Description of Artificial Sequence: Synthetic oligonucleotide
  Target: LAMA2; (+) strand; PAM type: YTN; PAM sequence: CTA
agcaaggaaaaagcagagct

SEQ ID NO: 327693 - DNA, 20 bp, Artificial Sequence
  Description of Artificial Sequence: Synthetic oligonucleotide
  Target: LAMA2; (+) strand; PAM type: YTN; PAM sequence: CTT
tattctagaatcggactaaa

SEQ ID NO: 327694 - DNA, 20 bp, Artificial Sequence
  Description of Artificial Sequence: Synthetic oligonucleotide
  Target: LAMA2; (+) strand; PAM type: YTN; PAM sequence: TTT
attctagaatcggactaaag

SEQ ID NO: 327695 - DNA, 20 bp, Artificial Sequence
  Description of Artificial Sequence: Synthetic oligonucleotide
  Target: LAMA2; (+) strand; PAM type: YTN; PAM sequence: TTA
ttctagaatcggactaaagg

SEQ ID NO: 327696 - DNA, 20 bp, Artificial Sequence
  Description of Artificial Sequence: Synthetic oligonucleotide
  Target: LAMA2; (+) strand; PAM type: YTN; PAM sequence: TTC
tagaatcggactaaaggcag

SEQ ID NO: 327697 - DNA, 20 bp, Artificial Sequence
  Description of Artificial Sequence: Synthetic oligonucleotide
  Target: LAMA2; (+) strand; PAM type: YTN; PAM sequence: CTA
gaatcggactaaaggcagta

SEQ ID NO: 327698 - DNA, 20 bp, Artificial Sequence
  Description of Artificial Sequence: Synthetic oligonucleotide
  Target: LAMA2; (+) strand; PAM type: YTN; PAM sequence: CTA
aaggcagtattcgttgaatg

SEQ ID NO: 327699 - DNA, 20 bp, Artificial Sequence
  Description of Artificial Sequence: Synthetic oligonucleotide
  Target: LAMA2; (+) strand; PAM type: YTN; PAM sequence: TTC
gttgaatgtgatcagaggac

SEQ ID NO: 327700 - DNA, 20 bp, Artificial Sequence
  Description of Artificial Sequence: Synthetic oligonucleotide
  Target: LAMA2; (+) strand; PAM type: YTN; PAM sequence: TTG
aatgtgatcagaggacattg

SEQ ID NO: 327701 - DNA, 20 bp, Artificial Sequence
  Description of Artificial Sequence: Synthetic oligonucleotide
  Target: LAMA2; (+) strand; PAM type: YTN; PAM sequence: TTG
taagccaggataatcatttt

SEQ ID NO: 327702 - DNA, 20 bp, Artificial Sequence
  Description of Artificial Sequence: Synthetic oligonucleotide
  Target: LAMA2; (+) strand; PAM type: YTN; PAM sequence: TTT
tgaattttaacctaggtaca

SEQ ID NO: 327703 - DNA, 20 bp, Artificial Sequence
  Description of Artificial Sequence: Synthetic oligonucleotide
  Target: LAMA2; (+) strand; PAM type: YTN; PAM sequence: TTT
gaattttaacctaggtacaa

SEQ ID NO: 327704 - DNA, 20 bp, Artificial Sequence
  Description of Artificial Sequence: Synthetic oligonucleotide
  Target: LAMA2; (+) strand; PAM type: YTN; PAM sequence: TTG
aattttaacctaggtacaat

SEQ ID NO: 327705 - DNA, 20 bp, Artificial Sequence
  Description of Artificial Sequence: Synthetic oligonucleotide
  Target: LAMA2; (+) strand; PAM type: YTN; PAM sequence: TTT
taacctaggtacaattatga

SEQ ID NO: 327706 - DNA, 20 bp, Artificial Sequence
  Description of Artificial Sequence: Synthetic oligonucleotide
  Target: LAMA2; (+) strand; PAM type: YTN; PAM sequence: TTT
aacctaggtacaattatgat

SEQ ID NO: 327707 - DNA, 20 bp, Artificial Sequence
  Description of Artificial Sequence: Synthetic oligonucleotide
  Target: LAMA2; (+) strand; PAM type: YTN; PAM sequence: TTA
acctaggtacaattatgatc

SEQ ID NO: 327708 - DNA, 20 bp, Artificial Sequence
  Description of Artificial Sequence: Synthetic oligonucleotide
  Target: LAMA2; (+) strand; PAM type: YTN; PAM sequence: CTA
ggtacaattatgatctattt

SEQ ID NO: 327709 - DNA, 20 bp, Artificial Sequence
  Description of Artificial Sequence: Synthetic oligonucleotide
  Target: LAMA2; (+) strand; PAM type: YTN; PAM sequence: TTA
tgatctatttttaagaagac

SEQ ID NO: 327710 - DNA, 20 bp, Artificial Sequence
  Description of Artificial Sequence: Synthetic oligonucleotide
  Target: LAMA2; (+) strand; PAM type: YTN; PAM sequence: CTA
tttttaagaagactgacttg

SEQ ID NO: 327711 - DNA, 20 bp, Artificial Sequence
  Description of Artificial Sequence: Synthetic oligonucleotide
  Target: LAMA2; (+) strand; PAM type: YTN; PAM sequence: TTT
ttaagaagactgacttgatc

SEQ ID NO: 327712 - DNA, 20 bp, Artificial Sequence
  Description of Artificial Sequence: Synthetic oligonucleotide
  Target: LAMA2; (+) strand; PAM type: YTN; PAM sequence: TTT
taagaagactgacttgatca

SEQ ID NO: 327713 - DNA, 20 bp, Artificial Sequence
  Description of Artificial Sequence: Synthetic oligonucleotide
  Target: LAMA2; (+) strand; PAM type: YTN; PAM sequence: TTT
aagaagactgacttgatcag

SEQ ID NO: 327714 - DNA, 20 bp, Artificial Sequence
  Description of Artificial Sequence: Synthetic oligonucleotide
  Target: LAMA2; (+) strand; PAM type: YTN; PAM sequence: TTA
agaagactgacttgatcaga

SEQ ID NO: 327715 - DNA, 20 bp, Artificial Sequence
  Description of Artificial Sequence: Synthetic oligonucleotide
  Target: LAMA2; (+) strand; PAM type: YTN; PAM sequence: CTG
acttgatcagatttgaatct

SEQ ID NO: 327716 - DNA, 20 bp, Artificial Sequence
  Description of Artificial Sequence: Synthetic oligonucleotide
  Target: LAMA2; (+) strand; PAM type: YTN; PAM sequence: CTT
gatcagatttgaatcttaag

SEQ ID NO: 327717 - DNA, 20 bp, Artificial Sequence
  Description of Artificial Sequence: Synthetic oligonucleotide
  Target: LAMA2; (+) strand; PAM type: YTN; PAM sequence: TTG
atcagatttgaatcttaaga

SEQ ID NO: 327718 - DNA, 20 bp, Artificial Sequence
  Description of Artificial Sequence: Synthetic oligonucleotide
  Target: LAMA2; (+) strand; PAM type: YTN; PAM sequence: TTT
gaatcttaagaaaactcatt

SEQ ID NO: 327719 - DNA, 20 bp, Artificial Sequence
  Description of Artificial Sequence: Synthetic oligonucleotide
  Target: LAMA2; (+) strand; PAM type: YTN; PAM sequence: TTG
aatcttaagaaaactcatta

SEQ ID NO: 327720 - DNA, 20 bp, Artificial Sequence
  Description of Artificial Sequence: Synthetic oligonucleotide
  Target: LAMA2; (+) strand; PAM type: YTN; PAM sequence: CTT
aagaaaactcattatgtaaa

SEQ ID NO: 327721 - DNA, 20 bp, Artificial Sequence
  Description of Artificial Sequence: Synthetic oligonucleotide
  Target: LAMA2; (+) strand; PAM type: YTN; PAM sequence: TTA
agaaaactcattatgtaaaa

SEQ ID NO: 327722 - DNA, 20 bp, Artificial Sequence
  Description of Artificial Sequence: Synthetic oligonucleotide
  Target: LAMA2; (+) strand; PAM type: YTN; PAM sequence: CTC
attatgtaaaaaaagggcta

SEQ ID NO: 327723 - DNA, 20 bp, Artificial Sequence
  Description of Artificial Sequence: Synthetic oligonucleotide
  Target: LAMA2; (+) strand; PAM type: YTN; PAM sequence: TTA
tgtaaaaaaagggctaaaga

SEQ ID NO: 327724 - DNA, 20 bp, Artificial Sequence
  Description of Artificial Sequence: Synthetic oligonucleotide
  Target: LAMA2; (+) strand; PAM type: YTN; PAM sequence: CTA
aagaaaggataagggtagtc

SEQ ID NO: 327725 - DNA, 20 bp, Artificial Sequence
  Description of Artificial Sequence: Synthetic oligonucleotide
  Target: LAMA2; (+) strand; PAM type: YTN; PAM sequence: TTC
aggaggctattgcagatgtc

SEQ ID NO: 327726 - DNA, 20 bp, Artificial Sequence
  Description of Artificial Sequence: Synthetic oligonucleotide
  Target: LAMA2; (+) strand; PAM type: YTN; PAM sequence: CTA
ttgcagatgtccagatgtta

SEQ ID NO: 327727 - DNA, 20 bp, Artificial Sequence
  Description of Artificial Sequence: Synthetic oligonucleotide
  Target: LAMA2; (+) strand; PAM type: YTN; PAM sequence: TTG
cagatgtccagatgttacaa

SEQ ID NO: 327728 - DNA, 20 bp, Artificial Sequence
  Description of Artificial Sequence: Synthetic oligonucleotide
  Target: LAMA2; (+) strand; PAM type: YTN; PAM sequence: TTA
caaatgcttgtgacttggcc

SEQ ID NO: 327729 - DNA, 20 bp, Artificial Sequence
  Description of Artificial Sequence: Synthetic oligonucleotide
  Target: LAMA2; (+) strand; PAM type: YTN; PAM sequence: CTT
gtgacttggccccaagtatt

SEQ ID NO: 327730 - DNA, 20 bp, Artificial Sequence
  Description of Artificial Sequence: Synthetic oligonucleotide
  Target: LAMA2; (+) strand; PAM type: YTN; PAM sequence: TTG
tgacttggccccaagtattg

SEQ ID NO: 327731 - DNA, 20 bp, Artificial Sequence
  Description of Artificial Sequence: Synthetic oligonucleotide
  Target: LAMA2; (+) strand; PAM type: YTN; PAM sequence: CTT
ggccccaagtattggcaatg

SEQ ID NO: 327732 - DNA, 20 bp, Artificial Sequence
  Description of Artificial Sequence: Synthetic oligonucleotide
  Target: LAMA2; (+) strand; PAM type: YTN; PAM sequence: TTG
gccccaagtattggcaatga

SEQ ID NO: 327733 - DNA, 20 bp, Artificial Sequence
  Description of Artificial Sequence: Synthetic oligonucleotide
  Target: LAMA2; (+) strand; PAM type: YTN; PAM sequence: TTG
gcaatgaccctggagagaag

SEQ ID NO: 327734 - DNA, 20 bp, Artificial Sequence
  Description of Artificial Sequence: Synthetic oligonucleotide
  Target: LAMA2; (+) strand; PAM type: YTN; PAM sequence: CTG
gagagaagcagatggatctg

SEQ ID NO: 327735 - DNA, 20 bp, Artificial Sequence
  Description of Artificial Sequence: Synthetic oligonucleotide
  Target: LAMA2; (+) strand; PAM type: YTN; PAM sequence: CTG
atatttatttcggagttagc

SEQ ID NO: 327736 - DNA, 20 bp, Artificial Sequence
  Description of Artificial Sequence: Synthetic oligonucleotide
  Target: LAMA2; (+) strand; PAM type: YTN; PAM sequence: TTT
atttcggagttagcataata

SEQ ID NO: 327737 - DNA, 20 bp, Artificial Sequence
  Description of Artificial Sequence: Synthetic oligonucleotide
  Target: LAMA2; (+) strand; PAM type: YTN; PAM sequence: TTA
tttcggagttagcataatat

SEQ ID NO: 327738 - DNA, 20 bp, Artificial Sequence
  Description of Artificial Sequence: Synthetic oligonucleotide
  Target: LAMA2; (+) strand; PAM type: YTN; PAM sequence: TTT
cggagttagcataatatgaa

SEQ ID NO: 327739 - DNA, 20 bp, Artificial Sequence
  Description of Artificial Sequence: Synthetic oligonucleotide
  Target: LAMA2; (+) strand; PAM type: YTN; PAM sequence: TTC
ggagttagcataatatgaaa

SEQ ID NO: 327740 - DNA, 20 bp, Artificial Sequence
  Description of Artificial Sequence: Synthetic oligonucleotide
  Target: LAMA2; (+) strand; PAM type: YTN; PAM sequence: TTA
gcataatatgaaatgatgca

SEQ ID NO: 327741 - DNA, 20 bp, Artificial Sequence
  Description of Artificial Sequence: Synthetic oligonucleotide
  Target: LAMA2; (+) strand; PAM type: YTN; PAM sequence: CTC
ccggttttctctatgagaca

SEQ ID NO: 327742 - DNA, 20 bp, Artificial Sequence
  Description of Artificial Sequence: Synthetic oligonucleotide
  Target: LAMA2; (+) strand; PAM type: YTN; PAM sequence: TTT
tctctatgagacactgggtg

SEQ ID NO: 327743 - DNA, 20 bp, Artificial Sequence
  Description of Artificial Sequence: Synthetic oligonucleotide
  Target: LAMA2; (+) strand; PAM type: YTN; PAM sequence: TTT
ctctatgagacactgggtgg

SEQ ID NO: 327744 - DNA, 20 bp, Artificial Sequence
  Description of Artificial Sequence: Synthetic oligonucleotide
  Target: LAMA2; (+) strand; PAM type: YTN; PAM sequence: TTC
tctatgagacactgggtggg

SEQ ID NO: 327745 - DNA, 20 bp, Artificial Sequence
  Description of Artificial Sequence: Synthetic oligonucleotide
  Target: LAMA2; (+) strand; PAM type: YTN; PAM sequence: CTC
tatgagacactgggtgggta

SEQ ID NO: 327746 - DNA, 20 bp, Artificial Sequence
  Description of Artificial Sequence: Synthetic oligonucleotide
  Target: LAMA2; (+) strand; PAM type: YTN; PAM sequence: CTA
tgagacactgggtgggtaaa

SEQ ID NO: 327747 - DNA, 20 bp, Artificial Sequence
  Description of Artificial Sequence: Synthetic oligonucleotide
  Target: LAMA2; (+) strand; PAM type: YTN; PAM sequence: CTG
ggtgggtaaactaagatgtg

SEQ ID NO: 327748 - DNA, 20 bp, Artificial Sequence
  Description of Artificial Sequence: Synthetic oligonucleotide
  Target: LAMA2; (+) strand; PAM type: YTN; PAM sequence: CTA
agatgtgttgagcttgagag

SEQ ID NO: 327749 - DNA, 20 bp, Artificial Sequence
  Description of Artificial Sequence: Synthetic oligonucleotide
  Target: LAMA2; (+) strand; PAM type: YTN; PAM sequence: TTG
agcttgagagaattcaggag

SEQ ID NO: 327750 - DNA, 20 bp, Artificial Sequence
  Description of Artificial Sequence: Synthetic oligonucleotide
  Target: LAMA2; (+) strand; PAM type: YTN; PAM sequence: CTT
gagagaattcaggagtagct

SEQ ID NO: 327751 - DNA, 20 bp, Artificial Sequence
  Description of Artificial Sequence: Synthetic oligonucleotide
  Target: LAMA2; (+) strand; PAM type: YTN; PAM sequence: TTG
agagaattcaggagtagcta

SEQ ID NO: 327752 - DNA, 20 bp, Artificial Sequence
  Description of Artificial Sequence: Synthetic oligonucleotide
  Target: LAMA2; (+) strand; PAM type: YTN; PAM sequence: TTC
aggagtagctaaatctgggt

SEQ ID NO: 327753 - DNA, 20 bp, Artificial Sequence
  Description of Artificial Sequence: Synthetic oligonucleotide
  Target: LAMA2; (+) strand; PAM type: YTN; PAM sequence: CTA
aatctgggtgtcccttcggg

SEQ ID NO: 327754 - DNA, 20 bp, Artificial Sequence
  Description of Artificial Sequence: Synthetic oligonucleotide
  Target: LAMA2; (+) strand; PAM type: YTN; PAM sequence: CTG
ggtgtcccttcgggtgggga

SEQ ID NO: 327755 - DNA, 20 bp, Artificial Sequence
  Description of Artificial Sequence: Synthetic oligonucleotide
  Target: LAMA2; (+) strand; PAM type: YTN; PAM sequence: CTT
cgggtggggattagaacgct

SEQ ID NO: 327756 - DNA, 20 bp, Artificial Sequence
  Description of Artificial Sequence: Synthetic oligonucleotide
  Target: LAMA2; (+) strand; PAM type: YTN; PAM sequence: TTC
gggtggggattagaacgctg

SEQ ID NO: 327757 - DNA, 20 bp, Artificial Sequence
  Description of Artificial Sequence: Synthetic oligonucleotide
  Target: LAMA2; (+) strand; PAM type: YTN; PAM sequence: TTA
gaacgctgaaaaccacgaac

SEQ ID NO: 327758 - DNA, 20 bp, Artificial Sequence
  Description of Artificial Sequence: Synthetic oligonucleotide
  Target: LAMA2; (+) strand; PAM type: YTN; PAM sequence: CTG
aaaaccacgaactctacttt

SEQ ID NO: 327759 - DNA, 20 bp, Artificial Sequence
  Description of Artificial Sequence: Synthetic oligonucleotide
  Target: LAMA2; (+) strand; PAM type: YTN; PAM sequence: CTC
tactttggagagtaatatta

SEQ ID NO: 327760 - DNA, 20 bp, Artificial Sequence
  Description of Artificial Sequence: Synthetic oligonucleotide
  Target: LAMA2; (+) strand; PAM type: YTN; PAM sequence: CTA
ctttggagagtaatattaaa

SEQ ID NO: 327761 - DNA, 20 bp, Artificial Sequence
  Description of Artificial Sequence: Synthetic oligonucleotide
  Target: LAMA2; (+) strand; PAM type: YTN; PAM sequence: CTT
tggagagtaatattaaattt

SEQ ID NO: 327762 - DNA, 20 bp, Artificial Sequence
  Description of Artificial Sequence: Synthetic oligonucleotide
  Target: LAMA2; (+) strand; PAM type: YTN; PAM sequence: TTT
ggagagtaatattaaatttg

SEQ ID NO: 327763 - DNA, 20 bp, Artificial Sequence
  Description of Artificial Sequence: Synthetic oligonucleotide
  Target: LAMA2; (+) strand; PAM type: YTN; PAM sequence: TTG
gagagtaatattaaatttgt

SEQ ID NO: 327764 - DNA, 20 bp, Artificial Sequence
  Description of Artificial Sequence: Synthetic oligonucleotide
  Target: LAMA2; (+) strand; PAM type: YTN; PAM sequence: TTA
aatttgtgatgttcctgaga

SEQ ID NO: 327765 - DNA, 20 bp, Artificial Sequence
  Description of Artificial Sequence: Synthetic oligonucleotide
  Target: LAMA2; (+) strand; PAM type: YTN; PAM sequence: TTT
gtgatgttcctgagacgtct

SEQ ID NO: 327766 - DNA, 20 bp, Artificial Sequence
  Description of Artificial Sequence: Synthetic oligonucleotide
  Target: LAMA2; (+) strand; PAM type: YTN; PAM sequence: TTG
tgatgttcctgagacgtcta

SEQ ID NO: 327767 - DNA, 20 bp, Artificial Sequence
  Description of Artificial Sequence: Synthetic oligonucleotide
  Target: LAMA2; (+) strand; PAM type: YTN; PAM sequence: TTC
ctgagacgtctaaaaaaatg

SEQ ID NO: 327768 - DNA, 20 bp, Artificial Sequence
  Description of Artificial Sequence: Synthetic oligonucleotide
  Target: LAMA2; (+) strand; PAM type: YTN; PAM sequence: CTG
agacgtctaaaaaaatggag

SEQ ID NO: 327769 - DNA, 20 bp, Artificial Sequence
  Description of Artificial Sequence: Synthetic oligonucleotide
  Target: LAMA2; (+) strand; PAM type: YTN; PAM sequence: CTA
aaaaaatggagatttaacca

SEQ ID NO: 327770 - DNA, 20 bp, Artificial Sequence
  Description of Artificial Sequence: Synthetic oligonucleotide
  Target: LAMA2; (+) strand; PAM type: YTN; PAM sequence: TTT
aaccaggcatttggatatat

SEQ ID NO: 327771 - DNA, 20 bp, Artificial Sequence
  Description of Artificial Sequence: Synthetic oligonucleotide
  Target: LAMA2; (+) strand; PAM type: YTN; PAM sequence: TTA
accaggcatttggatatata

SEQ ID NO: 327772 - DNA, 20 bp, Artificial Sequence
  Description of Artificial Sequence: Synthetic oligonucleotide
  Target: LAMA2; (+) strand; PAM type: YTN; PAM sequence: TTT
ggatatatagctctatactt

SEQ ID NO: 327773 - DNA, 20 bp, Artificial Sequence
  Description of Artificial Sequence: Synthetic oligonucleotide
  Target: LAMA2; (+) strand; PAM type: YTN; PAM sequence: TTG
gatatatagctctatacttt

SEQ ID NO: 327774 - DNA, 20 bp, Artificial Sequence
  Description of Artificial Sequence: Synthetic oligonucleotide
  Target: LAMA2; (+) strand; PAM type: YTN; PAM sequence: CTC
tatactttcagaaagatacc

SEQ ID NO: 327775 - DNA, 20 bp, Artificial Sequence
  Description of Artificial Sequence: Synthetic oligonucleotide
  Target: LAMA2; (+) strand; PAM type: YTN; PAM sequence: CTA
tactttcagaaagatacctg

SEQ ID NO: 327776 - DNA, 20 bp, Artificial Sequence
  Description of Artificial Sequence: Synthetic oligonucleotide
  Target: LAMA2; (+) strand; PAM type: YTN; PAM sequence: CTT
tcagaaagatacctggtctg

SEQ ID NO: 327777 - DNA, 20 bp, Artificial Sequence
  Description of Artificial Sequence: Synthetic oligonucleotide
  Target: LAMA2; (+) strand; PAM type: YTN; PAM sequence: TTT
cagaaagatacctggtctgg

SEQ ID NO: 327778 - DNA, 20 bp, Artificial Sequence
  Description of Artificial Sequence: Synthetic oligonucleotide
  Target: LAMA2; (+) strand; PAM type: YTN; PAM sequence: TTC
agaaagatacctggtctgga

SEQ ID NO: 327779 - DNA, 20 bp, Artificial Sequence
  Description of Artificial Sequence: Synthetic oligonucleotide
  Target: LAMA2; (+) strand; PAM type: YTN; PAM sequence: CTG
gtctggagatataacttggg

SEQ ID NO: 327780 - DNA, 20 bp, Artificial Sequence
  Description of Artificial Sequence: Synthetic oligonucleotide
  Target: LAMA2; (+) strand; PAM type: YTN; PAM sequence: CTG
gagatataacttgggagtta

SEQ ID NO: 327781 - DNA, 20 bp, Artificial Sequence
  Description of Artificial Sequence: Synthetic oligonucleotide
  Target: LAMA2; (+) strand; PAM type: YTN; PAM sequence: CTT
gggagttattgactctacag

SEQ ID NO: 327782 - DNA, 20 bp, Artificial Sequence
  Description of Artificial Sequence: Synthetic oligonucleotide
  Target: LAMA2; (+) strand; PAM type: YTN; PAM sequence: TTG
ggagttattgactctacaga

SEQ ID NO: 327783 - DNA, 20 bp, Artificial Sequence
  Description of Artificial Sequence: Synthetic oligonucleotide
  Target: LAMA2; (+) strand; PAM type: YTN; PAM sequence: TTA
ttgactctacagatggtgtg

SEQ ID NO: 327784 - DNA, 20 bp, Artificial Sequence
  Description of Artificial Sequence: Synthetic oligonucleotide
  Target: LAMA2; (+) strand; PAM type: YTN; PAM sequence: TTG
actctacagatggtgtgtaa

SEQ ID NO: 327785 - DNA, 20 bp, Artificial Sequence
  Description of Artificial Sequence: Synthetic oligonucleotide
  Target: LAMA2; (+) strand; PAM type: YTN; PAM sequence: CTC
tacagatggtgtgtaaatgg

SEQ ID NO: 327786 - DNA, 20 bp, Artificial Sequence
  Description of Artificial Sequence: Synthetic oligonucleotide
  Target: LAMA2; (+) strand; PAM type: YTN; PAM sequence: CTA
cagatggtgtgtaaatgggt

SEQ ID NO: 327787 - DNA, 20 bp, Artificial Sequence
  Description of Artificial Sequence: Synthetic oligonucleotide
  Target: LAMA2; (+) strand; PAM type: YTN; PAM sequence: TTG
gaagtgggtaagatttgggg

SEQ ID NO: 327788 - DNA, 20 bp, Artificial Sequence
  Description of Artificial Sequence: Synthetic oligonucleotide
  Target: LAMA2; (+) strand; PAM type: YTN; PAM sequence: TTT
ggggaagagaagaatgaaat

SEQ ID NO: 327789 - DNA, 20 bp, Artificial Sequence
  Description of Artificial Sequence: Synthetic oligonucleotide
  Target: LAMA2; (+) strand; PAM type: YTN; PAM sequence: TTG
gggaagagaagaatgaaata

SEQ ID NO: 327790 - DNA, 20 bp, Artificial Sequence
  Description of Artificial Sequence: Synthetic oligonucleotide
  Target: LAMA2; (+) strand; PAM type: YTN; PAM sequence: TTA
agccctgaggaacgataata

SEQ ID NO: 327791 - DNA, 20 bp, Artificial Sequence
  Description of Artificial Sequence: Synthetic oligonucleotide
  Target: LAMA2; (+) strand; PAM type: YTN; PAM sequence: CTG
aggaacgataatagttactg

SEQ ID NO: 327792 - DNA, 20 bp, Artificial Sequence
  Description of Artificial Sequence: Synthetic oligonucleotide
  Target: LAMA2; (+) strand; PAM type: YTN; PAM sequence: TTA
ctgataaaaaaaaaaaaaga

SEQ ID NO: 327793 - DNA, 20 bp, Artificial Sequence
  Description of Artificial Sequence: Synthetic oligonucleotide
  Target: LAMA2; (+) strand; PAM type: YTN; PAM sequence: CTG
ataaaaaaaaaaaaagaaaa

SEQ ID NO: 327794 - DNA, 20 bp, Artificial Sequence
  Description of Artificial Sequence: Synthetic oligonucleotide
  Target: LAMA2; (+) strand; PAM type: YTN; PAM sequence: CTT
ttctgtttcattttttctaa

SEQ ID NO: 327795 - DNA, 20 bp, Artificial Sequence
  Description of Artificial Sequence: Synthetic oligonucleotide
  Target: LAMA2; (+) strand; PAM type: YTN; PAM sequence: TTT
tctgtttcattttttctaag

SEQ ID NO: 327796 - DNA, 20 bp, Artificial Sequence
  Description of Artificial Sequence: Synthetic oligonucleotide
  Target: LAMA2; (+) strand; PAM type: YTN; PAM sequence: TTT
ctgtttcattttttctaagt

SEQ ID NO: 327797 - DNA, 20 bp, Artificial Sequence
  Description of Artificial Sequence: Synthetic oligonucleotide
  Target: LAMA2; (+) strand; PAM type: YTN; PAM sequence: TTC
tgtttcattttttctaagtc

SEQ ID NO: 327798 - DNA, 20 bp, Artificial Sequence
  Description of Artificial Sequence: Synthetic oligonucleotide
  Target: LAMA2; (+) strand; PAM type: YTN; PAM sequence: CTG
tttcattttttctaagtctt

SEQ ID NO: 327799 - DNA, 20 bp, Artificial Sequence
  Description of Artificial Sequence: Synthetic oligonucleotide
  Target: LAMA2; (+) strand; PAM type: YTN; PAM sequence: TTT
cattttttctaagtctttta

SEQ ID NO: 327800 - DNA, 20 bp, Artificial Sequence
  Description of Artificial Sequence: Synthetic oligonucleotide
  Target: LAMA2; (+) strand; PAM type: YTN; PAM sequence: TTC
attttttctaagtcttttaa

SEQ ID NO: 327801 - DNA, 20 bp, Artificial Sequence
  Description of Artificial Sequence: Synthetic oligonucleotide
  Target: LAMA2; (+) strand; PAM type: YTN; PAM sequence: TTT
tttctaagtcttttaagcca

SEQ ID NO: 327802 - DNA, 20 bp, Artificial Sequence
  Description of Artificial Sequence: Synthetic oligonucleotide
  Target: LAMA2; (+) strand; PAM type: YTN; PAM sequence: TTT
ttctaagtcttttaagccag

SEQ ID NO: 327803 - DNA, 20 bp, Artificial Sequence
  Description of Artificial Sequence: Synthetic oligonucleotide
  Target: LAMA2; (+) strand; PAM type: YTN; PAM sequence: TTT
tctaagtcttttaagccaga

SEQ ID NO: 327804 - DNA, 20 bp, Artificial Sequence
  Description of Artificial Sequence: Synthetic oligonucleotide
  Target: LAMA2; (+) strand; PAM type: YTN; PAM sequence: TTT
ctaagtcttttaagccagag

SEQ ID NO: 327805 - DNA, 20 bp, Artificial Sequence
  Description of Artificial Sequence: Synthetic oligonucleotide
  Target: LAMA2; (+) strand; PAM type: YTN; PAM sequence: TTC
taagtcttttaagccagaga

SEQ ID NO: 327806 - DNA, 20 bp, Artificial Sequence
  Description of Artificial Sequence: Synthetic oligonucleotide
  Target: LAMA2; (+) strand; PAM type: YTN; PAM sequence: CTA
agtcttttaagccagagaaa

SEQ ID NO: 327807 - DNA, 20 bp, Artificial Sequence
  Description of Artificial Sequence: Synthetic oligonucleotide
  Target: LAMA2; (+) strand; PAM type: YTN; PAM sequence: CTT
ttaagccagagaaaacataa

SEQ ID NO: 327808 - DNA, 20 bp, Artificial Sequence
  Description of Artificial Sequence: Synthetic oligonucleotide
  Target: LAMA2; (+) strand; PAM type: YTN; PAM sequence: TTT
taagccagagaaaacataat

SEQ ID NO: 327809 - DNA, 20 bp, Artificial Sequence
  Description of Artificial Sequence: Synthetic oligonucleotide
  Target: LAMA2; (+) strand; PAM type: YTN; PAM sequence: TTT
aagccagagaaaacataatg

SEQ ID NO: 327810 - DNA, 20 bp, Artificial Sequence
  Description of Artificial Sequence: Synthetic oligonucleotide
  Target: LAMA2; (+) strand; PAM type: YTN; PAM sequence: TTA
agccagagaaaacataatgt

SEQ ID NO: 327811 - DNA, 20 bp, Artificial Sequence
  Description of Artificial Sequence: Synthetic oligonucleotide
  Target: LAMA2; (+) strand; PAM type: YTN; PAM sequence: TTT
ttatgtgtgttttatcacta

SEQ ID NO: 327812 - DNA, 20 bp, Artificial Sequence
  Description of Artificial Sequence: Synthetic oligonucleotide
  Target: LAMA2; (+) strand; PAM type: YTN; PAM sequence: TTT
tatgtgtgttttatcactag

SEQ ID NO: 327813 - DNA, 20 bp, Artificial Sequence
  Description of Artificial Sequence: Synthetic oligonucleotide
  Target: LAMA2; (+) strand; PAM type: YTN; PAM sequence: TTT
atgtgtgttttatcactaga

SEQ ID NO: 327814 - DNA, 20 bp, Artificial Sequence
  Description of Artificial Sequence: Synthetic oligonucleotide
  Target: LAMA2; (+) strand; PAM type: YTN; PAM sequence: TTA
tgtgtgttttatcactagag

SEQ ID NO: 327815 - DNA, 20 bp, Artificial Sequence
  Description of Artificial Sequence: Synthetic oligonucleotide
  Target: LAMA2; (+) strand; PAM type: YTN; PAM sequence: TTT
tatcactagagataagaaat

SEQ ID NO: 327816 - DNA, 20 bp, Artificial Sequence
  Description of Artificial Sequence: Synthetic oligonucleotide
  Target: LAMA2; (+) strand; PAM type: YTN; PAM sequence: TTT
atcactagagataagaaatt

SEQ ID NO: 327817 - DNA, 20 bp, Artificial Sequence
  Description of Artificial Sequence: Synthetic oligonucleotide
  Target: LAMA2; (+) strand; PAM type: YTN; PAM sequence: TTA
tcactagagataagaaattg

SEQ ID NO: 327818 - DNA, 20 bp, Artificial Sequence
  Description of Artificial Sequence: Synthetic oligonucleotide
  Target: LAMA2; (+) strand; PAM type: YTN; PAM sequence: CTA
gagataagaaattgtcaagc

SEQ ID NO: 327819 - DNA, 20 bp, Artificial Sequence
  Description of Artificial Sequence: Synthetic oligonucleotide
  Target: LAMA2; (+) strand; PAM type: YTN; PAM sequence: TTG
tcaagctgtccttaaggacc

SEQ ID NO: 327820 - DNA, 20 bp, Artificial Sequence
  Description of Artificial Sequence: Synthetic oligonucleotide
  Target: LAMA2; (+) strand; PAM type: YTN; PAM sequence: CTG
tccttaaggaccagggaggg

SEQ ID NO: 327821 - DNA, 20 bp, Artificial Sequence
  Description of Artificial Sequence: Synthetic oligonucleotide
  Target: LAMA2; (+) strand; PAM type: YTN; PAM sequence: CTT
aaggaccagggagggcccat

SEQ ID NO: 327822 - DNA, 20 bp, Artificial Sequence
  Description of Artificial Sequence: Synthetic oligonucleotide
  Target: LAMA2; (+) strand; PAM type: YTN; PAM sequence: TTA
aggaccagggagggcccatg

SEQ ID NO: 327823 - DNA, 20 bp, Artificial Sequence
  Description of Artificial Sequence: Synthetic oligonucleotide
  Target: LAMA2; (+) strand; PAM type: YTN; PAM sequence: CTT
tcctgatgctgttgtattca

SEQ ID NO: 327824 - DNA, 20 bp, Artificial Sequence
  Description of Artificial Sequence: Synthetic oligonucleotide
  Target: LAMA2; (+) strand; PAM type: YTN; PAM sequence: TTT
cctgatgctgttgtattcat

SEQ ID NO: 327825 - DNA, 20 bp, Artificial Sequence
  Description of Artificial Sequence: Synthetic oligonucleotide
  Target: LAMA2; (+) strand; PAM type: YTN; PAM sequence: TTC
ctgatgctgttgtattcatc

SEQ ID NO: 327826 - DNA, 20 bp, Artificial Sequence
  Description of Artificial Sequence: Synthetic oligonucleotide
  Target: LAMA2; (+) strand; PAM type: YTN; PAM sequence: CTG
atgctgttgtattcatcaaa

SEQ ID NO: 327827 - DNA, 20 bp, Artificial Sequence
  Description of Artificial Sequence: Synthetic oligonucleotide
  Target: LAMA2; (+) strand; PAM type: YTN; PAM sequence: CTG
ttgtattcatcaaagcatag

SEQ ID NO: 327828 - DNA, 20 bp, Artificial Sequence
  Description of Artificial Sequence: Synthetic oligonucleotide
  Target: LAMA2; (+) strand; PAM type: YTN; PAM sequence: TTG
tattcatcaaagcatagatg

SEQ ID NO: 327829 - DNA, 20 bp, Artificial Sequence
  Description of Artificial Sequence: Synthetic oligonucleotide
  Target: LAMA2; (+) strand; PAM type: YTN; PAM sequence: TTC
atcaaagcatagatgagtct

SEQ ID NO: 327830 - DNA, 20 bp, Artificial Sequence
  Description of Artificial Sequence: Synthetic oligonucleotide
  Target: LAMA2; (+) strand; PAM type: YTN; PAM sequence: CTC
ttctgatatttttgtttgag

SEQ ID NO: 327831 - DNA, 20 bp, Artificial Sequence
  Description of Artificial Sequence: Synthetic oligonucleotide
  Target: LAMA2; (+) strand; PAM type: YTN; PAM sequence: CTT
ctgatatttttgtttgagga

SEQ ID NO: 327832 - DNA, 20 bp, Artificial Sequence
  Description of Artificial Sequence: Synthetic oligonucleotide
  Target: LAMA2; (+) strand; PAM type: YTN; PAM sequence: TTC
tgatatttttgtttgaggaa

SEQ ID NO: 327833 - DNA, 20 bp, Artificial Sequence
  Description of Artificial Sequence: Synthetic oligonucleotide
  Target: LAMA2; (+) strand; PAM type: YTN; PAM sequence: CTG
atatttttgtttgaggaaca

SEQ ID NO: 327834 - DNA, 20 bp, Artificial Sequence
  Description of Artificial Sequence: Synthetic oligonucleotide
  Target: LAMA2; (+) strand; PAM type: YTN; PAM sequence: TTT
ttgtttgaggaacatgaata

SEQ ID NO: 327835 - DNA, 20 bp, Artificial Sequence
  Description of Artificial Sequence: Synthetic oligonucleotide
  Target: LAMA2; (+) strand; PAM type: YTN; PAM sequence: TTT
tgtttgaggaacatgaatat

SEQ ID NO: 327836 - DNA, 20 bp, Artificial Sequence
  Description of Artificial Sequence: Synthetic oligonucleotide
  Target: LAMA2; (+) strand; PAM type: YTN; PAM sequence: TTT
gtttgaggaacatgaatata

SEQ ID NO: 327837 - DNA, 20 bp, Artificial Sequence
  Description of Artificial Sequence: Synthetic oligonucleotide
  Target: LAMA2; (+) strand; PAM type: YTN; PAM sequence: TTG
tttgaggaacatgaatataa

SEQ ID NO: 327838 - DNA, 20 bp, Artificial Sequence
  Description of Artificial Sequence: Synthetic oligonucleotide
  Target: LAMA2; (+) strand; PAM type: YTN; PAM sequence: TTT
gaggaacatgaatataagct

SEQ ID NO: 327839 - DNA, 20 bp, Artificial Sequence
  Description of Artificial Sequence: Synthetic oligonucleotide
  Target: LAMA2; (+) strand; PAM type: YTN; PAM sequence: TTG
aggaacatgaatataagctc

SEQ ID NO: 327840 - DNA, 20 bp, Artificial Sequence
  Description of Artificial Sequence: Synthetic oligonucleotide
  Target: LAMA2; (+) strand; PAM type: YTN; PAM sequence: CTC
atgctcctagcatagcaatt

SEQ ID NO: 327841 - DNA, 20 bp, Artificial Sequence
  Description of Artificial Sequence: Synthetic oligonucleotide
  Target: LAMA2; (+) strand; PAM type: YTN; PAM sequence: CTC
ctagcatagcaattagttta

SEQ ID NO: 327842 - DNA, 20 bp, Artificial Sequence
  Description of Artificial Sequence: Synthetic oligonucleotide
  Target: LAMA2; (+) strand; PAM type: YTN; PAM sequence: CTA
gcatagcaattagtttagag

SEQ ID NO: 327843 - DNA, 20 bp, Artificial Sequence
  Description of Artificial Sequence: Synthetic oligonucleotide
  Target: LAMA2; (+) strand; PAM type: YTN; PAM sequence: TTA
gtttagagatttatcattgt

SEQ ID NO: 327844 - DNA, 20 bp, Artificial Sequence
  Description of Artificial Sequence: Synthetic oligonucleotide
  Target: LAMA2; (+) strand; PAM type: YTN; PAM sequence: TTT
agagatttatcattgtttta

SEQ ID NO: 327845 - DNA, 20 bp, Artificial Sequence
  Description of Artificial Sequence: Synthetic oligonucleotide
  Target: LAMA2; (+) strand; PAM type: YTN; PAM sequence: TTA
gagatttatcattgttttat

SEQ ID NO: 327846 - DNA, 20 bp, Artificial Sequence
  Description of Artificial Sequence: Synthetic oligonucleotide
  Target: LAMA2; (+) strand; PAM type: YTN; PAM sequence: TTT
atcattgttttatttttatt

SEQ ID NO: 327847 - DNA, 20 bp, Artificial Sequence
  Description of Artificial Sequence: Synthetic oligonucleotide
  Target: LAMA2; (+) strand; PAM type: YTN; PAM sequence: TTA
tcattgttttatttttattt

SEQ ID NO: 327848 - DNA, 20 bp, Artificial Sequence
  Description of Artificial Sequence: Synthetic oligonucleotide
  Target: LAMA2; (+) strand; PAM type: YTN; PAM sequence: TTG
ttttatttttattttttgaa

SEQ ID NO: 327849 - DNA, 20 bp, Artificial Sequence
  Description of Artificial Sequence: Synthetic oligonucleotide
  Target: LAMA2; (+) strand; PAM type: YTN; PAM sequence: TTT
tatttttattttttgaatta

SEQ ID NO: 327850 - DNA, 20 bp, Artificial Sequence
  Description of Artificial Sequence: Synthetic oligonucleotide
  Target: LAMA2; (+) strand; PAM type: YTN; PAM sequence: TTT
atttttattttttgaattat

SEQ ID NO: 327851 - DNA, 20 bp, Artificial Sequence
  Description of Artificial Sequence: Synthetic oligonucleotide
  Target: LAMA2; (+) strand; PAM type: YTN; PAM sequence: TTA
tttttattttttgaattatt

SEQ ID NO: 327852 - DNA, 20 bp, Artificial Sequence
  Description of Artificial Sequence: Synthetic oligonucleotide
  Target: LAMA2; (+) strand; PAM type: YTN; PAM sequence: TTT
ttattttttgaattattaac

SEQ ID NO: 327853 - DNA, 20 bp, Artificial Sequence
  Description of Artificial Sequence: Synthetic oligonucleotide
  Target: LAMA2; (+) strand; PAM type: YTN; PAM sequence: TTT
tattttttgaattattaact

SEQ ID NO: 327854 - DNA, 20 bp, Artificial Sequence
  Description of Artificial Sequence: Synthetic oligonucleotide
  Target: LAMA2; (+) strand; PAM type: YTN; PAM sequence: TTT
attttttgaattattaactg

SEQ ID NO: 327855 - DNA, 20 bp, Artificial Sequence
  Description of Artificial Sequence: Synthetic oligonucleotide
  Target: LAMA2; (+) strand; PAM type: YTN; PAM sequence: TTA
ttttttgaattattaactgc

SEQ ID NO: 327856 - DNA, 20 bp, Artificial Sequence
  Description of Artificial Sequence: Synthetic oligonucleotide
  Target: LAMA2; (+) strand; PAM type: YTN; PAM sequence: TTT
tttgaattattaactgcaga

SEQ ID NO: 327857 - DNA, 20 bp, Artificial Sequence
  Description of Artificial Sequence: Synthetic oligonucleotide
  Target: LAMA2; (+) strand; PAM type: YTN; PAM sequence: TTT
ttgaattattaactgcagac

SEQ ID NO: 327858 - DNA, 20 bp, Artificial Sequence
  Description of Artificial Sequence: Synthetic oligonucleotide
  Target: LAMA2; (+) strand; PAM type: YTN; PAM sequence: TTT
tgaattattaactgcagaca

SEQ ID NO: 327859 - DNA, 20 bp, Artificial Sequence
  Description of Artificial Sequence: Synthetic oligonucleotide
  Target: LAMA2; (+) strand; PAM type: YTN; PAM sequence: TTT
gaattattaactgcagacaa

SEQ ID NO: 327860 - DNA, 20 bp, Artificial Sequence
  Description of Artificial Sequence: Synthetic oligonucleotide
  Target: LAMA2; (+) strand; PAM type: YTN; PAM sequence: TTG
aattattaactgcagacaaa

SEQ ID NO: 327861 - DNA, 20 bp, Artificial Sequence
  Description of Artificial Sequence: Synthetic oligonucleotide
  Target: LAMA2; (+) strand; PAM type: YTN; PAM sequence: TTA
ttaactgcagacaaagccct

SEQ ID NO: 327862 - DNA, 20 bp, Artificial Sequence
  Description of Artificial Sequence: Synthetic oligonucleotide
  Target: LAMA2; (+) strand; PAM type: YTN; PAM sequence: TTA
actgcagacaaagccctaaa

SEQ ID NO: 327863 - DNA, 20 bp, Artificial Sequence
  Description of Artificial Sequence: Synthetic oligonucleotide
  Target: LAMA2; (+) strand; PAM type: YTN; PAM sequence: CTG
cagacaaagccctaaatttt

SEQ ID NO: 327864 - DNA, 20 bp, Artificial Sequence
  Description of Artificial Sequence: Synthetic oligonucleotide
  Target: LAMA2; (+) strand; PAM type: YTN; PAM sequence: CTA
aattttttttgttttctata

SEQ ID NO: 327865 - DNA, 20 bp, Artificial Sequence
  Description of Artificial Sequence: Synthetic oligonucleotide
  Target: LAMA2; (+) strand; PAM type: YTN; PAM sequence: TTT
tttttgttttctatatcaca

SEQ ID NO: 327866 - DNA, 20 bp, Artificial Sequence
  Description of Artificial Sequence: Synthetic oligonucleotide
  Target: LAMA2; (+) strand; PAM type: YTN; PAM sequence: TTT
ttttgttttctatatcacaa

SEQ ID NO: 327867 - DNA, 20 bp, Artificial Sequence
  Description of Artificial Sequence: Synthetic oligonucleotide
  Target: LAMA2; (+) strand; PAM type: YTN; PAM sequence: TTT
tttgttttctatatcacaag

SEQ ID NO: 327868 - DNA, 20 bp, Artificial Sequence
  Description of Artificial Sequence: Synthetic oligonucleotide
  Target: LAMA2; (+) strand; PAM type: YTN; PAM sequence: TTT
ttgttttctatatcacaagt

SEQ ID NO: 327869 - DNA, 20 bp, Artificial Sequence
  Description of Artificial Sequence: Synthetic oligonucleotide
  Target: LAMA2; (+) strand; PAM type: YTN; PAM sequence: TTT
tgttttctatatcacaagta

SEQ ID NO: 327870 - DNA, 20 bp, Artificial Sequence
  Description of Artificial Sequence: Synthetic oligonucleotide
  Target: LAMA2; (+) strand; PAM type: YTN; PAM sequence: TTT
gttttctatatcacaagtac

SEQ ID NO: 327871 - DNA, 20 bp, Artificial Sequence
  Description of Artificial Sequence: Synthetic oligonucleotide
  Target: LAMA2; (+) strand; PAM type: YTN; PAM sequence: TTG
ttttctatatcacaagtacc

SEQ ID NO: 327872 - DNA, 20 bp, Artificial Sequence
  Description of Artificial Sequence: Synthetic oligonucleotide
  Target: LAMA2; (+) strand; PAM type: YTN; PAM sequence: TTT
tctatatcacaagtaccttt

SEQ ID NO: 327873 - DNA, 20 bp, Artificial Sequence
  Description of Artificial Sequence: Synthetic oligonucleotide
  Target: LAMA2; (+) strand; PAM type: YTN; PAM sequence: TTT
ctatatcacaagtacctttt

SEQ ID NO: 327874 - DNA, 20 bp, Artificial Sequence
  Description of Artificial Sequence: Synthetic oligonucleotide
  Target: LAMA2; (+) strand; PAM type: YTN; PAM sequence: TTC
tatatcacaagtaccttttt

SEQ ID NO: 327875 - DNA, 20 bp, Artificial Sequence
  Description of Artificial Sequence: Synthetic oligonucleotide
  Target: LAMA2; (+) strand; PAM type: YTN; PAM sequence: CTA
tatcacaagtaccttttttt

SEQ ID NO: 327876 - DNA, 20 bp, Artificial Sequence
  Description of Artificial Sequence: Synthetic oligonucleotide
  Target: LAMA2; (+) strand; PAM type: YTN; PAM sequence: CTT
tttttggtttaaggttctaa

SEQ ID NO: 327877 - DNA, 20 bp, Artificial Sequence
  Description of Artificial Sequence: Synthetic oligonucleotide
  Target: LAMA2; (+) strand; PAM type: YTN; PAM sequence: TTT
ttttggtttaaggttctaaa

SEQ ID NO: 327878 - DNA, 20 bp, Artificial Sequence
  Description of Artificial Sequence: Synthetic oligonucleotide
  Target: LAMA2; (+) strand; PAM type: YTN; PAM sequence: TTT
tttggtttaaggttctaaat

SEQ ID NO: 327879 - DNA, 20 bp, Artificial Sequence
  Description of Artificial Sequence: Synthetic oligonucleotide
  Target: LAMA2; (+) strand; PAM type: YTN; PAM sequence: TTT
ttggtttaaggttctaaatt

SEQ ID NO: 327880 - DNA, 20 bp, Artificial Sequence
  Description of Artificial Sequence: Synthetic oligonucleotide
  Target: LAMA2; (+) strand; PAM type: YTN; PAM sequence: TTT
tggtttaaggttctaaattt

SEQ ID NO: 327881 - DNA, 20 bp, Artificial Sequence
  Description of Artificial Sequence: Synthetic oligonucleotide
  Target: LAMA2; (+) strand; PAM type: YTN; PAM sequence: TTT
ggtttaaggttctaaatttc

SEQ ID NO: 327882 - DNA, 20 bp, Artificial Sequence
  Description of Artificial Sequence: Synthetic oligonucleotide
  Target: LAMA2; (+) strand; PAM type: YTN; PAM sequence: TTG
gtttaaggttctaaatttca

SEQ ID NO: 327883 - DNA, 20 bp, Artificial Sequence
  Description of Artificial Sequence: Synthetic oligonucleotide
  Target: LAMA2; (+) strand; PAM type: YTN; PAM sequence: TTT
aaggttctaaatttcatttt

SEQ ID NO: 327884 - DNA, 20 bp, Artificial Sequence
  Description of Artificial Sequence: Synthetic oligonucleotide
  Target: LAMA2; (+) strand; PAM type: YTN; PAM sequence: TTA
aggttctaaatttcattttc

SEQ ID NO: 327885 - DNA, 20 bp, Artificial Sequence
  Description of Artificial Sequence: Synthetic oligonucleotide
  Target: LAMA2; (+) strand; PAM type: YTN; PAM sequence: TTC
taaatttcattttccgtgac

SEQ ID NO: 327886 - DNA, 20 bp, Artificial Sequence
  Description of Artificial Sequence: Synthetic oligonucleotide
  Target: LAMA2; (+) strand; PAM type: YTN; PAM sequence: CTA
aatttcattttccgtgactt

SEQ ID NO: 327887 - DNA, 20 bp, Artificial Sequence
  Description of Artificial Sequence: Synthetic oligonucleotide
  Target: LAMA2; (+) strand; PAM type: YTN; PAM sequence: TTT
cattttccgtgacttgaaac

SEQ ID NO: 327888 - DNA, 20 bp, Artificial Sequence
  Description of Artificial Sequence: Synthetic oligonucleotide
  Target: LAMA2; (+) strand; PAM type: YTN; PAM sequence: TTC
attttccgtgacttgaaact

SEQ ID NO: 327889 - DNA, 20 bp, Artificial Sequence
  Description of Artificial Sequence: Synthetic oligonucleotide
  Target: LAMA2; (+) strand; PAM type: YTN; PAM sequence: TTT
tccgtgacttgaaactgttt

SEQ ID NO: 327890 - DNA, 20 bp, Artificial Sequence
  Description of Artificial Sequence: Synthetic oligonucleotide
  Target: LAMA2; (+) strand; PAM type: YTN; PAM sequence: TTT
ccgtgacttgaaactgtttt

SEQ ID NO: 327891 - DNA, 20 bp, Artificial Sequence
  Description of Artificial Sequence: Synthetic oligonucleotide
  Target: LAMA2; (+) strand; PAM type: YTN; PAM sequence: TTC
cgtgacttgaaactgttttg

SEQ ID NO: 327892 - DNA, 20 bp, Artificial Sequence
  Description of Artificial Sequence: Synthetic oligonucleotide
  Target: LAMA2; (+) strand; PAM type: YTN; PAM sequence: CTT
gaaactgttttgcacttcct

SEQ ID NO: 327893 - DNA, 20 bp, Artificial Sequence
  Description of Artificial Sequence: Synthetic oligonucleotide
  Target: LAMA2; (+) strand; PAM type: YTN; PAM sequence: TTG
aaactgttttgcacttcctc

SEQ ID NO: 327894 - DNA, 20 bp, Artificial Sequence
  Description of Artificial Sequence: Synthetic oligonucleotide
  Target: LAMA2; (+) strand; PAM type: YTN; PAM sequence: CTG
ttttgcacttcctctccttg

SEQ ID NO: 327895 - DNA, 20 bp, Artificial Sequence
  Description of Artificial Sequence: Synthetic oligonucleotide
  Target: LAMA2; (+) strand; PAM type: YTN; PAM sequence: TTT
tgcacttcctctccttgctt

SEQ ID NO: 327896 - DNA, 20 bp, Artificial Sequence
  Description of Artificial Sequence: Synthetic oligonucleotide
  Target: LAMA2; (+) strand; PAM type: YTN; PAM sequence: TTT
gcacttcctctccttgcttt

SEQ ID NO: 327897 - DNA, 20 bp, Artificial Sequence
  Description of Artificial Sequence: Synthetic oligonucleotide
  Target: LAMA2; (+) strand; PAM type: YTN; PAM sequence: TTG
cacttcctctccttgcttta

SEQ ID NO: 327898 - DNA, 20 bp, Artificial Sequence
  Description of Artificial Sequence: Synthetic oligonucleotide
  Target: LAMA2; (+) strand; PAM type: YTN; PAM sequence: CTT
cctctccttgctttatattt

SEQ ID NO: 327899 - DNA, 20 bp, Artificial Sequence
  Description of Artificial Sequence: Synthetic oligonucleotide
  Target: LAMA2; (+) strand; PAM type: YTN; PAM sequence: TTC
ctctccttgctttatatttt

SEQ ID NO: 327900 - DNA, 20 bp, Artificial Sequence
  Description of Artificial Sequence: Synthetic oligonucleotide
  Target: LAMA2; (+) strand; PAM type: YTN; PAM sequence: CTC
tccttgctttatattttgag

SEQ ID NO: 327901 - DNA, 20 bp, Artificial Sequence
  Description of Artificial Sequence: Synthetic oligonucleotide
  Target: LAMA2; (+) strand; PAM type: YTN; PAM sequence: CTC
cttgctttatattttgagtt

SEQ ID NO: 327902 - DNA, 20 bp, Artificial Sequence
  Description of Artificial Sequence: Synthetic oligonucleotide
  Target: LAMA2; (+) strand; PAM type: YTN; PAM sequence: CTT
gctttatattttgagtttac

SEQ ID NO: 327903 - DNA, 20 bp, Artificial Sequence
  Description of Artificial Sequence: Synthetic oligonucleotide
  Target: LAMA2; (+) strand; PAM type: YTN; PAM sequence: TTG
ctttatattttgagtttaca

SEQ ID NO: 327904 - DNA, 20 bp, Artificial Sequence
  Description of Artificial Sequence: Synthetic oligonucleotide
  Target: LAMA2; (+) strand; PAM type: YTN; PAM sequence: CTT
tatattttgagtttacacac

SEQ ID NO: 327905 - DNA, 20 bp, Artificial Sequence
  Description of Artificial Sequence: Synthetic oligonucleotide
  Target: LAMA2; (+) strand; PAM type: YTN; PAM sequence: TTT
atattttgagtttacacact

SEQ ID NO: 327906 - DNA, 20 bp, Artificial Sequence
  Description of Artificial Sequence: Synthetic oligonucleotide
  Target: LAMA2; (+) strand; PAM type: YTN; PAM sequence: TTA
tattttgagtttacacacta

SEQ ID NO: 327907 - DNA, 20 bp, Artificial Sequence
  Description of Artificial Sequence: Synthetic oligonucleotide
  Target: LAMA2; (+) strand; PAM type: YTN; PAM sequence: TTT
tgagtttacacactaacctg

SEQ ID NO: 327908 - DNA, 20 bp, Artificial Sequence
  Description of Artificial Sequence: Synthetic oligonucleotide
  Target: LAMA2; (+) strand; PAM type: YTN; PAM sequence: TTT
gagtttacacactaacctgc

SEQ ID NO: 327909 - DNA, 20 bp, Artificial Sequence
  Description of Artificial Sequence: Synthetic oligonucleotide
  Target: LAMA2; (+) strand; PAM type: YTN; PAM sequence: TTG
agtttacacactaacctgcc

SEQ ID NO: 327910 - DNA, 20 bp, Artificial Sequence
  Description of Artificial Sequence: Synthetic oligonucleotide
  Target: LAMA2; (+) strand; PAM type: YTN; PAM sequence: TTT
acacactaacctgccaaaga

SEQ ID NO: 327911 - DNA, 20 bp, Artificial Sequence
  Description of Artificial Sequence: Synthetic oligonucleotide
  Target: LAMA2; (+) strand; PAM type: YTN; PAM sequence: TTA
cacactaacctgccaaagag

SEQ ID NO: 327912 - DNA, 20 bp, Artificial Sequence
  Description of Artificial Sequence: Synthetic oligonucleotide
  Target: LAMA2; (+) strand; PAM type: YTN; PAM sequence: CTA
acctgccaaagagacatcta

SEQ ID NO: 327913 - DNA, 20 bp, Artificial Sequence
  Description of Artificial Sequence: Synthetic oligonucleotide
  Target: LAMA2; (+) strand; PAM type: YTN; PAM sequence: CTG
ccaaagagacatctagttta

SEQ ID NO: 327914 - DNA, 20 bp, Artificial Sequence
  Description of Artificial Sequence: Synthetic oligonucleotide
  Target: LAMA2; (+) strand; PAM type: YTN; PAM sequence: CTA
gtttataggcttgattttgg

SEQ ID NO: 327915 - DNA, 20 bp, Artificial Sequence
  Description of Artificial Sequence: Synthetic oligonucleotide
  Target: LAMA2; (+) strand; PAM type: YTN; PAM sequence: TTT
ataggcttgattttggaaga

SEQ ID NO: 327916 - DNA, 20 bp, Artificial Sequence
  Description of Artificial Sequence: Synthetic oligonucleotide
  Target: LAMA2; (+) strand; PAM type: YTN; PAM sequence: TTA
taggcttgattttggaagaa

SEQ ID NO: 327917 - DNA, 20 bp, Artificial Sequence
  Description of Artificial Sequence: Synthetic oligonucleotide
  Target: LAMA2; (+) strand; PAM type: YTN; PAM sequence: CTT
gattttggaagaaagacaga

SEQ ID NO: 327918 - DNA, 20 bp, Artificial Sequence
  Description of Artificial Sequence: Synthetic oligonucleotide
  Target: LAMA2; (+) strand; PAM type: YTN; PAM sequence: TTG
attttggaagaaagacagaa

SEQ ID NO: 327919 - DNA, 20 bp, Artificial Sequence
  Description of Artificial Sequence: Synthetic oligonucleotide
  Target: LAMA2; (+) strand; PAM type: YTN; PAM sequence: TTT
tggaagaaagacagaagaga

SEQ ID NO: 327920 - DNA, 20 bp, Artificial Sequence
  Description of Artificial Sequence: Synthetic oligonucleotide
  Target: LAMA2; (+) strand; PAM type: YTN; PAM sequence: TTT
ggaagaaagacagaagagag

SEQ ID NO: 327921 - DNA, 20 bp, Artificial Sequence
  Description of Artificial Sequence: Synthetic oligonucleotide
  Target: LAMA2; (+) strand; PAM type: YTN; PAM sequence: TTG
gaagaaagacagaagagagc

SEQ ID NO: 327922 - DNA, 20 bp, Artificial Sequence
  Description of Artificial Sequence: Synthetic oligonucleotide
  Target: LAMA2; (+) strand; PAM type: YTN; PAM sequence: CTG
aacatatgttccgctgatat

SEQ ID NO: 327923 - DNA, 20 bp, Artificial Sequence
  Description of Artificial Sequence: Synthetic oligonucleotide
  Target: LAMA2; (+) strand; PAM type: YTN; PAM sequence: TTC
cgctgatattgatgaagtga

SEQ ID NO: 327924 - DNA, 20 bp, Artificial Sequence
  Description of Artificial Sequence: Synthetic oligonucleotide
  Target: LAMA2; (+) strand; PAM type: YTN; PAM sequence: CTG
atattgatgaagtgaggttg

SEQ ID NO: 327925 - DNA, 20 bp, Artificial Sequence
  Description of Artificial Sequence: Synthetic oligonucleotide
  Target: LAMA2; (+) strand; PAM type: YTN; PAM sequence: TTG
atgaagtgaggttggaagaa

SEQ ID NO: 327926 - DNA, 20 bp, Artificial Sequence
  Description of Artificial Sequence: Synthetic oligonucleotide
  Target: LAMA2; (+) strand; PAM type: YTN; PAM sequence: TTG
gaagaagcttggaagcagtc

SEQ ID NO: 327927 - DNA, 20 bp, Artificial Sequence
  Description of Artificial Sequence: Synthetic oligonucleotide
  Target: LAMA2; (+) strand; PAM type: YTN; PAM sequence: CTT
ggaagcagtctatttctctc

SEQ ID NO: 327928 - DNA, 20 bp, Artificial Sequence
  Description of Artificial Sequence: Synthetic oligonucleotide
  Target: LAMA2; (+) strand; PAM type: YTN; PAM sequence: TTG
gaagcagtctatttctctcc

SEQ ID NO: 327929 - DNA, 20 bp, Artificial Sequence
  Description of Artificial Sequence: Synthetic oligonucleotide
  Target: LAMA2; (+) strand; PAM type: YTN; PAM sequence: CTA
tttctctccaactgccaccc

SEQ ID NO: 327930 - DNA, 20 bp, Artificial Sequence
  Description of Artificial Sequence: Synthetic oligonucleotide
  Target: LAMA2; (+) strand; PAM type: YTN; PAM sequence: TTT
ctctccaactgccaccccct

SEQ ID NO: 327931 - DNA, 20 bp, Artificial Sequence
  Description of Artificial Sequence: Synthetic oligonucleotide
  Target: LAMA2; (+) strand; PAM type: YTN; PAM sequence: TTC
tctccaactgccaccccctc

SEQ ID NO: 327932 - DNA, 20 bp, Artificial Sequence
  Description of Artificial Sequence: Synthetic oligonucleotide
  Target: LAMA2; (+) strand; PAM type: YTN; PAM sequence: CTC
tccaactgccaccccctcta

SEQ ID NO: 327933 - DNA, 20 bp, Artificial Sequence
  Description of Artificial Sequence: Synthetic oligonucleotide
  Target: LAMA2; (+) strand; PAM type: YTN; PAM sequence: CTC
caactgccaccccctctatg

SEQ ID NO: 327934 - DNA, 20 bp, Artificial Sequence
  Description of Artificial Sequence: Synthetic oligonucleotide
  Target: LAMA2; (+) strand; PAM type: YTN; PAM sequence: CTG
ccaccccctctatgaatatt

SEQ ID NO: 327935 - DNA, 20 bp, Artificial Sequence
  Description of Artificial Sequence: Synthetic oligonucleotide
  Target: LAMA2; (+) strand; PAM type: YTN; PAM sequence: CTC
tatgaatattttgggtaccc

SEQ ID NO: 327936 - DNA, 20 bp, Artificial Sequence
  Description of Artificial Sequence: Synthetic oligonucleotide
  Target: LAMA2; (+) strand; PAM type: YTN; PAM sequence: CTA
tgaatattttgggtaccctt

SEQ ID NO: 327937 - DNA, 20 bp, Artificial Sequence
  Description of Artificial Sequence: Synthetic oligonucleotide
  Target: LAMA2; (+) strand; PAM type: YTN; PAM sequence: TTT
tgggtacccttatgctggaa

SEQ ID NO: 327938 - DNA, 20 bp, Artificial Sequence
  Description of Artificial Sequence: Synthetic oligonucleotide
  Target: LAMA2; (+) strand; PAM type: YTN; PAM sequence: TTT
gggtacccttatgctggaac

SEQ ID NO: 327939 - DNA, 20 bp, Artificial Sequence
  Description of Artificial Sequence: Synthetic oligonucleotide
  Target: LAMA2; (+) strand; PAM type: YTN; PAM sequence: TTG
ggtacccttatgctggaaca

SEQ ID NO: 327940 - DNA, 20 bp, Artificial Sequence
  Description of Artificial Sequence: Synthetic oligonucleotide
  Target: LAMA2; (+) strand; PAM type: YTN; PAM sequence: CTT
atgctggaacattccaaata

SEQ ID NO: 327941 - DNA, 20 bp, Artificial Sequence
  Description of Artificial Sequence: Synthetic oligonucleotide
  Target: LAMA2; (+) strand; PAM type: YTN; PAM sequence: TTA
tgctggaacattccaaataa

SEQ ID NO: 327942 - DNA, 20 bp, Artificial Sequence
  Description of Artificial Sequence: Synthetic oligonucleotide
  Target: LAMA2; (+) strand; PAM type: YTN; PAM sequence: CTG
gaacattccaaataagtgcc

SEQ ID NO: 327943 - DNA, 20 bp, Artificial Sequence
  Description of Artificial Sequence: Synthetic oligonucleotide
  Target: LAMA2; (+) strand; PAM type: YTN; PAM sequence: TTC
caaataagtgccccagctat

SEQ ID NO: 327944 - DNA, 20 bp, Artificial Sequence
  Description of Artificial Sequence: Synthetic oligonucleotide
  Target: LAMA2; (+) strand; PAM type: YTN; PAM sequence: CTA
tgggttttttttttttctca

SEQ ID NO: 327945 - DNA, 20 bp, Artificial Sequence
  Description of Artificial Sequence: Synthetic oligonucleotide
  Target: LAMA2; (+) strand; PAM type: YTN; PAM sequence: TTT
tttttttttctcataatgat

SEQ ID NO: 327946 - DNA, 20 bp, Artificial Sequence
  Description of Artificial Sequence: Synthetic oligonucleotide
  Target: LAMA2; (+) strand; PAM type: YTN; PAM sequence: TTT
ttttttttctcataatgatt

SEQ ID NO: 327947 - DNA, 20 bp, Artificial Sequence
  Description of Artificial Sequence: Synthetic oligonucleotide
  Target: LAMA2; (+) strand; PAM type: YTN; PAM sequence: TTT
tttttttctcataatgattc

SEQ ID NO: 327948 - DNA, 20 bp, Artificial Sequence
  Description of Artificial Sequence: Synthetic oligonucleotide
  Target: LAMA2; (+) strand; PAM type: YTN; PAM sequence: TTT
ttttttctcataatgattct

SEQ ID NO: 327949 - DNA, 20 bp, Artificial Sequence
  Description of Artificial Sequence: Synthetic oligonucleotide
  Target: LAMA2; (+) strand; PAM type: YTN; PAM sequence: TTT
tttttctcataatgattctg

SEQ ID NO: 327950 - DNA, 20 bp, Artificial Sequence
  Description of Artificial Sequence: Synthetic oligonucleotide
  Target: LAMA2; (+) strand; PAM type: YTN; PAM sequence: TTT
ttttctcataatgattctga

SEQ ID NO: 327951 - DNA, 20 bp, Artificial Sequence
  Description of Artificial Sequence: Synthetic oligonucleotide
  Target: LAMA2; (+) strand; PAM type: YTN; PAM sequence: TTT
tttctcataatgattctgaa

SEQ ID NO: 327952 - DNA, 20 bp, Artificial Sequence
  Description of Artificial Sequence: Synthetic oligonucleotide
  Target: LAMA2; (+) strand; PAM type: YTN; PAM sequence: TTT
ttctcataatgattctgaaa

SEQ ID NO: 327953 - DNA, 20 bp, Artificial Sequence
  Description of Artificial Sequence: Synthetic oligonucleotide
  Target: LAMA2; (+) strand; PAM type: YTN; PAM sequence: TTT
tctcataatgattctgaaag

SEQ ID NO: 327954 - DNA, 20 bp, Artificial Sequence
  Description of Artificial Sequence: Synthetic oligonucleotide
  Target: LAMA2; (+) strand; PAM type: YTN; PAM sequence: TTT
ctcataatgattctgaaagc

SEQ ID NO: 327955 - DNA, 20 bp, Artificial Sequence
  Description of Artificial Sequence: Synthetic oligonucleotide
  Target: LAMA2; (+) strand; PAM type: YTN; PAM sequence: TTC
tcataatgattctgaaagcc

SEQ ID NO: 327956 - DNA, 20 bp, Artificial Sequence
  Description of Artificial Sequence: Synthetic oligonucleotide
  Target: LAMA2; (+) strand; PAM type: YTN; PAM sequence: CTC
ataatgattctgaaagcctt

SEQ ID NO: 327957 - DNA, 20 bp, Artificial Sequence
  Description of Artificial Sequence: Synthetic oligonucleotide
  Target: LAMA2; (+) strand; PAM type: YTN; PAM sequence: TTC
tgaaagcctttgggatgatt

SEQ ID NO: 327958 - DNA, 20 bp, Artificial Sequence
  Description of Artificial Sequence: Synthetic oligonucleotide
  Target: LAMA2; (+) strand; PAM type: YTN; PAM sequence: CTG
aaagcctttgggatgattta

SEQ ID NO: 327959 - DNA, 20 bp, Artificial Sequence
  Description of Artificial Sequence: Synthetic oligonucleotide
  Target: LAMA2; (+) strand; PAM type: YTN; PAM sequence: CTT
tgggatgatttaggattgtt

SEQ ID NO: 327960 - DNA, 20 bp, Artificial Sequence
  Description of Artificial Sequence: Synthetic oligonucleotide
  Target: LAMA2; (+) strand; PAM type: YTN; PAM sequence: TTT
gggatgatttaggattgttc

SEQ ID NO: 327961 - DNA, 20 bp, Artificial Sequence
  Description of Artificial Sequence: Synthetic oligonucleotide
  Target: LAMA2; (+) strand; PAM type: YTN; PAM sequence: TTG
ggatgatttaggattgttct

SEQ ID NO: 327962 - DNA, 20 bp, Artificial Sequence
  Description of Artificial Sequence: Synthetic oligonucleotide
  Target: LAMA2; (+) strand; PAM type: YTN; PAM sequence: TTT
aggattgttctacaagtgga

SEQ ID NO: 327963 - DNA, 20 bp, Artificial Sequence
  Description of Artificial Sequence: Synthetic oligonucleotide
  Target: LAMA2; (+) strand; PAM type: YTN; PAM sequence: TTA
ggattgttctacaagtggaa

SEQ ID NO: 327964 - DNA, 20 bp, Artificial Sequence
  Description of Artificial Sequence: Synthetic oligonucleotide
  Target: LAMA2; (+) strand; PAM type: YTN; PAM sequence: TTG
ttctacaagtggaacataaa

SEQ ID NO: 327965 - DNA, 20 bp, Artificial Sequence
  Description of Artificial Sequence: Synthetic oligonucleotide
  Target: LAMA2; (+) strand; PAM type: YTN; PAM sequence: TTC
tacaagtggaacataaacca

SEQ ID NO: 327966 - DNA, 20 bp, Artificial Sequence
  Description of Artificial Sequence: Synthetic oligonucleotide
  Target: LAMA2; (+) strand; PAM type: YTN; PAM sequence: CTA
caagtggaacataaaccaaa

SEQ ID NO: 327967 - DNA, 20 bp, Artificial Sequence
  Description of Artificial Sequence: Synthetic oligonucleotide
  Target: LAMA2; (+) strand; PAM type: YTN; PAM sequence: TTC
gtggactctaattttaaatg

SEQ ID NO: 327968 - DNA, 20 bp, Artificial Sequence
  Description of Artificial Sequence: Synthetic oligonucleotide
  Target: LAMA2; (+) strand; PAM type: YTN; PAM sequence: CTC
taattttaaatgggtgatgg

SEQ ID NO: 327969 - DNA, 20 bp, Artificial Sequence
  Description of Artificial Sequence: Synthetic oligonucleotide
  Target: LAMA2; (+) strand; PAM type: YTN; PAM sequence: CTA
attttaaatgggtgatggat

SEQ ID NO: 327970 - DNA, 20 bp, Artificial Sequence
  Description of Artificial Sequence: Synthetic oligonucleotide
  Target: LAMA2; (+) strand; PAM type: YTN; PAM sequence: TTT
taaatgggtgatggatgaga

SEQ ID NO: 327971 - DNA, 20 bp, Artificial Sequence
  Description of Artificial Sequence: Synthetic oligonucleotide
  Target: LAMA2; (+) strand; PAM type: YTN; PAM sequence: TTT
aaatgggtgatggatgagat

SEQ ID NO: 327972 - DNA, 20 bp, Artificial Sequence
  Description of Artificial Sequence: Synthetic oligonucleotide
  Target: LAMA2; (+) strand; PAM type: YTN; PAM sequence: TTA
aatgggtgatggatgagatt

SEQ ID NO: 327973 - DNA, 20 bp, Artificial Sequence
  Description of Artificial Sequence: Synthetic oligonucleotide
  Target: LAMA2; (+) strand; PAM type: YTN; PAM sequence: TTT
caatgcaaattgtaaagact

SEQ ID NO: 327974 - DNA, 20 bp, Artificial Sequence
  Description of Artificial Sequence: Synthetic oligonucleotide
  Target: LAMA2; (+) strand; PAM type: YTN; PAM sequence: TTC
aatgcaaattgtaaagactg

SEQ ID NO: 327975 - DNA, 20 bp, Artificial Sequence
  Description of Artificial Sequence: Synthetic oligonucleotide
  Target: LAMA2; (+) strand; PAM type: YTN; PAM sequence: TTG
taaagactgaaaatgatgtg

SEQ ID NO: 327976 - DNA, 20 bp, Artificial Sequence
  Description of Artificial Sequence: Synthetic oligonucleotide
  Target: LAMA2; (+) strand; PAM type: YTN; PAM sequence: CTG
aaaatgatgtgaccagagaa

SEQ ID NO: 327977 - DNA, 20 bp, Artificial Sequence
  Description of Artificial Sequence: Synthetic oligonucleotide
  Target: LAMA2; (+) strand; PAM type: YTN; PAM sequence: CTA
gatagtaagtactcaataaa

SEQ ID NO: 327978 - DNA, 20 bp, Artificial Sequence
  Description of Artificial Sequence: Synthetic oligonucleotide
  Target: LAMA2; (+) strand; PAM type: YTN; PAM sequence: CTC
aataaatgacagaagcaggg

SEQ ID NO: 327979 - DNA, 20 bp, Artificial Sequence
  Description of Artificial Sequence: Synthetic oligonucleotide
  Target: LAMA2; (+) strand; PAM type: YTN; PAM sequence: CTG
tttcttgggaaaatagactt

SEQ ID NO: 327980 - DNA, 20 bp, Artificial Sequence
  Description of Artificial Sequence: Synthetic oligonucleotide
  Target: LAMA2; (+) strand; PAM type: YTN; PAM sequence: TTT
cttgggaaaatagacttgaa

SEQ ID NO: 327981 - DNA, 20 bp, Artificial Sequence
  Description of Artificial Sequence: Synthetic oligonucleotide
  Target: LAMA2; (+) strand; PAM type: YTN; PAM sequence: TTC
ttgggaaaatagacttgaag

SEQ ID NO: 327982 - DNA, 20 bp, Artificial Sequence
  Description of Artificial Sequence: Synthetic oligonucleotide
  Target: LAMA2; (+) strand; PAM type: YTN; PAM sequence: CTT
gggaaaatagacttgaagtt

SEQ ID NO: 327983 - DNA, 20 bp, Artificial Sequence
  Description of Artificial Sequence: Synthetic oligonucleotide
  Target: LAMA2; (+) strand; PAM type: YTN; PAM sequence: TTG
ggaaaatagacttgaagtta

SEQ ID NO: 327984 - DNA, 20 bp, Artificial Sequence
  Description of Artificial Sequence: Synthetic oligonucleotide
  Target: LAMA2; (+) strand; PAM type: YTN; PAM sequence: CTT
gaagttagacaagaatctat

SEQ ID NO: 327985 - DNA, 20 bp, Artificial Sequence
  Description of Artificial Sequence: Synthetic oligonucleotide
  Target: LAMA2; (+) strand; PAM type: YTN; PAM sequence: TTG
aagttagacaagaatctatt

SEQ ID NO: 327986 - DNA, 20 bp, Artificial Sequence
  Description of Artificial Sequence: Synthetic oligonucleotide
  Target: LAMA2; (+) strand; PAM type: YTN; PAM sequence: TTA
gacaagaatctatttaatca

SEQ ID NO: 327987 - DNA, 20 bp, Artificial Sequence
  Description of Artificial Sequence: Synthetic oligonucleotide
  Target: LAMA2; (+) strand; PAM type: YTN; PAM sequence: CTA
tttaatcaaactctagatat

SEQ ID NO: 327988 - DNA, 20 bp, Artificial Sequence
  Description of Artificial Sequence: Synthetic oligonucleotide
  Target: LAMA2; (+) strand; PAM type: YTN; PAM sequence: TTT
aatcaaactctagatatgat

SEQ ID NO: 327989 - DNA, 20 bp, Artificial Sequence
  Description of Artificial Sequence: Synthetic oligonucleotide
  Target: LAMA2; (+) strand; PAM type: YTN; PAM sequence: TTA
atcaaactctagatatgatg

SEQ ID NO: 327990 - DNA, 20 bp, Artificial Sequence
  Description of Artificial Sequence: Synthetic oligonucleotide
  Target: LAMA2; (+) strand; PAM type: YTN; PAM sequence: CTC
tagatatgatgttttgctaa

SEQ ID NO: 327991 - DNA, 20 bp, Artificial Sequence
  Description of Artificial Sequence: Synthetic oligonucleotide
  Target: LAMA2; (+) strand; PAM type: YTN; PAM sequence: CTA
gatatgatgttttgctaact

SEQ ID NO: 327992 - DNA, 20 bp, Artificial Sequence
  Description of Artificial Sequence: Synthetic oligonucleotide
  Target: LAMA2; (+) strand; PAM type: YTN; PAM sequence: TTT
tgctaacttttgttttttgt

SEQ ID NO: 327993 - DNA, 20 bp, Artificial Sequence
  Description of Artificial Sequence: Synthetic oligonucleotide
  Target: LAMA2; (+) strand; PAM type: YTN; PAM sequence: TTT
gctaacttttgttttttgtt

SEQ ID NO: 327994 - DNA, 20 bp, Artificial Sequence
  Description of Artificial Sequence: Synthetic oligonucleotide
  Target: LAMA2; (+) strand; PAM type: YTN; PAM sequence: TTG
ctaacttttgttttttgttg

SEQ ID NO: 327995 - DNA, 20 bp, Artificial Sequence
  Description of Artificial Sequence: Synthetic oligonucleotide
  Target: LAMA2; (+) strand; PAM type: YTN; PAM sequence: CTA
acttttgttttttgttgctt

SEQ ID NO: 327996 - DNA, 20 bp, Artificial Sequence
  Description of Artificial Sequence: Synthetic oligonucleotide
  Target: LAMA2; (+) strand; PAM type: YTN; PAM sequence: CTT
ttgttttttgttgctttggt

SEQ ID NO: 327997 - DNA, 20 bp, Artificial Sequence
  Description of Artificial Sequence: Synthetic oligonucleotide
  Target: LAMA2; (+) strand; PAM type: YTN; PAM sequence: TTT
tgttttttgttgctttggtt

SEQ ID NO: 327998 - DNA, 20 bp, Artificial Sequence
  Description of Artificial Sequence: Synthetic oligonucleotide
  Target: LAMA2; (+) strand; PAM type: YTN; PAM sequence: TTT
gttttttgttgctttggttt

SEQ ID NO: 327999 - DNA, 20 bp, Artificial Sequence
  Description of Artificial Sequence: Synthetic oligonucleotide
  Target: LAMA2; (+) strand; PAM type: YTN; PAM sequence: TTG
ttttttgttgctttggtttt

SEQ ID NO: 328000 - DNA, 20 bp, Artificial Sequence
  Description of Artificial Sequence: Synthetic oligonucleotide
  Target: LAMA2; (+) strand; PAM type: YTN; PAM sequence: TTT
tttgttgctttggttttttg

SEQ ID NO: 328001 - DNA, 20 bp, Artificial Sequence
  Description of Artificial Sequence: Synthetic oligonucleotide
  Target: LAMA2; (+) strand; PAM type: YTN; PAM sequence: TTT
ttgttgctttggttttttgg

SEQ ID NO: 328002 - DNA, 20 bp, Artificial Sequence
  Description of Artificial Sequence: Synthetic oligonucleotide
  Target: LAMA2; (+) strand; PAM type: YTN; PAM sequence: TTT
tgttgctttggttttttgga

SEQ ID NO: 328003 - DNA, 20 bp, Artificial Sequence
  Description of Artificial Sequence: Synthetic oligonucleotide
  Target: LAMA2; (+) strand; PAM type: YTN; PAM sequence: TTT
gttgctttggttttttggag

SEQ ID NO: 328004 - DNA, 20 bp, Artificial Sequence
  Description of Artificial Sequence: Synthetic oligonucleotide
  Target: LAMA2; (+) strand; PAM type: YTN; PAM sequence: TTG
ttgctttggttttttggagt

SEQ ID NO: 328005 - DNA, 20 bp, Artificial Sequence
  Description of Artificial Sequence: Synthetic oligonucleotide
  Target: LAMA2; (+) strand; PAM type: YTN; PAM sequence: TTG
ctttggttttttggagtttt

SEQ ID NO: 328006 - DNA, 20 bp, Artificial Sequence
  Description of Artificial Sequence: Synthetic oligonucleotide
  Target: LAMA2; (+) strand; PAM type: YTN; PAM sequence: CTT
tggttttttggagttttttt

SEQ ID NO: 328007 - DNA, 20 bp, Artificial Sequence
  Description of Artificial Sequence: Synthetic oligonucleotide
  Target: LAMA2; (+) strand; PAM type: YTN; PAM sequence: TTT
ggttttttggagtttttttg

SEQ ID NO: 328008 - DNA, 20 bp, Artificial Sequence
  Description of Artificial Sequence: Synthetic oligonucleotide
  Target: LAMA2; (+) strand; PAM type: YTN; PAM sequence: TTG
gttttttggagtttttttgc

SEQ ID NO: 328009 - DNA, 20 bp, Artificial Sequence
  Description of Artificial Sequence: Synthetic oligonucleotide
  Target: LAMA2; (+) strand; PAM type: YTN; PAM sequence: TTT
tttggagtttttttgcactt

SEQ ID NO: 328010 - DNA, 20 bp, Artificial Sequence
  Description of Artificial Sequence: Synthetic oligonucleotide
  Target: LAMA2; (+) strand; PAM type: YTN; PAM sequence: TTT
ttggagtttttttgcacttc

SEQ ID NO: 328011 - DNA, 20 bp, Artificial Sequence
  Description of Artificial Sequence: Synthetic oligonucleotide
  Target: LAMA2; (+) strand; PAM type: YTN; PAM sequence: TTT
tggagtttttttgcacttca

SEQ ID NO: 328012 - DNA, 20 bp, Artificial Sequence
  Description of Artificial Sequence: Synthetic oligonucleotide
  Target: LAMA2; (+) strand; PAM type: YTN; PAM sequence: TTT
ggagtttttttgcacttcaa

SEQ ID NO: 328013 - DNA, 20 bp, Artificial Sequence
  Description of Artificial Sequence: Synthetic oligonucleotide
  Target: LAMA2; (+) strand; PAM type: YTN; PAM sequence: TTG
gagtttttttgcacttcaag

SEQ ID NO: 328014 - DNA, 20 bp, Artificial Sequence
  Description of Artificial Sequence: Synthetic oligonucleotide
  Target: LAMA2; (+) strand; PAM type: YTN; PAM sequence: TTT
ttttgcacttcaagaagtct

SEQ ID NO: 328015 - DNA, 20 bp, Artificial Sequence
  Description of Artificial Sequence: Synthetic oligonucleotide
  Target: LAMA2; (+) strand; PAM type: YTN; PAM sequence: TTT
tttgcacttcaagaagtctt

SEQ ID NO: 328016 - DNA, 20 bp, Artificial Sequence
  Description of Artificial Sequence: Synthetic oligonucleotide
  Target: LAMA2; (+) strand; PAM type: YTN; PAM sequence: TTT
ttgcacttcaagaagtcttt

SEQ ID NO: 328017 - DNA, 20 bp, Artificial Sequence
  Description of Artificial Sequence: Synthetic oligonucleotide
  Target: LAMA2; (+) strand; PAM type: YTN; PAM sequence: TTT
tgcacttcaagaagtctttt

SEQ ID NO: 328018 - DNA, 20 bp, Artificial Sequence
  Description of Artificial Sequence: Synthetic oligonucleotide
  Target: LAMA2; (+) strand; PAM type: YTN; PAM sequence: TTT
gcacttcaagaagtcttttt

SEQ ID NO: 328019 - DNA, 20 bp, Artificial Sequence
  Description of Artificial Sequence: Synthetic oligonucleotide
  Target: LAMA2; (+) strand; PAM type: YTN; PAM sequence: TTG
cacttcaagaagtctttttg

SEQ ID NO: 328020 - DNA, 20 bp, Artificial Sequence
  Description of Artificial Sequence: Synthetic oligonucleotide
  Target: LAMA2; (+) strand; PAM type: YTN; PAM sequence: CTT
caagaagtctttttgatctg

SEQ ID NO: 328021 - DNA, 20 bp, Artificial Sequence
  Description of Artificial Sequence: Synthetic oligonucleotide
  Target: LAMA2; (+) strand; PAM type: YTN; PAM sequence: TTC
aagaagtctttttgatctga

SEQ ID NO: 328022 - DNA, 20 bp, Artificial Sequence
  Description of Artificial Sequence: Synthetic oligonucleotide
  Target: LAMA2; (+) strand; PAM type: YTN; PAM sequence: CTT
tttgatctgaggtagtgtag

SEQ ID NO: 328023 - DNA, 20 bp, Artificial Sequence
  Description of Artificial Sequence: Synthetic oligonucleotide
  Target: LAMA2; (+) strand; PAM type: YTN; PAM sequence: TTT
ttgatctgaggtagtgtagt

SEQ ID NO: 328024 - DNA, 20 bp, Artificial Sequence
  Description of Artificial Sequence: Synthetic oligonucleotide
  Target: LAMA2; (+) strand; PAM type: YTN; PAM sequence: TTT
tgatctgaggtagtgtagtc

SEQ ID NO: 328025 - DNA, 20 bp, Artificial Sequence
  Description of Artificial Sequence: Synthetic oligonucleotide
  Target: LAMA2; (+) strand; PAM type: YTN; PAM sequence: TTT
gatctgaggtagtgtagtca

SEQ ID NO: 328026 - DNA, 20 bp, Artificial Sequence
  Description of Artificial Sequence: Synthetic oligonucleotide
  Target: LAMA2; (+) strand; PAM type: YTN; PAM sequence: TTG
atctgaggtagtgtagtcaa

SEQ ID NO: 328027 - DNA, 20 bp, Artificial Sequence
  Description of Artificial Sequence: Synthetic oligonucleotide
  Target: LAMA2; (+) strand; PAM type: YTN; PAM sequence: CTG
aggtagtgtagtcaactcta

SEQ ID NO: 328028 - DNA, 20 bp, Artificial Sequence
  Description of Artificial Sequence: Synthetic oligonucleotide
  Target: LAMA2; (+) strand; PAM type: YTN; PAM sequence: CTC
taatttattaagcatgaagt

SEQ ID NO: 328029 - DNA, 20 bp, Artificial Sequence
  Description of Artificial Sequence: Synthetic oligonucleotide
  Target: LAMA2; (+) strand; PAM type: YTN; PAM sequence: CTA
atttattaagcatgaagtga

SEQ ID NO: 328030 - DNA, 20 bp, Artificial Sequence
  Description of Artificial Sequence: Synthetic oligonucleotide
  Target: LAMA2; (+) strand; PAM type: YTN; PAM sequence: TTT
attaagcatgaagtgattgg

SEQ ID NO: 328031 - DNA, 20 bp, Artificial Sequence
  Description of Artificial Sequence: Synthetic oligonucleotide
  Target: LAMA2; (+) strand; PAM type: YTN; PAM sequence: TTA
ttaagcatgaagtgattggt

SEQ ID NO: 328032 - DNA, 20 bp, Artificial Sequence
  Description of Artificial Sequence: Synthetic oligonucleotide
  Target: LAMA2; (+) strand; PAM type: YTN; PAM sequence: TTA
agcatgaagtgattggttac

SEQ ID NO: 328033 - DNA, 20 bp, Artificial Sequence
  Description of Artificial Sequence: Synthetic oligonucleotide
  Target: LAMA2; (+) strand; PAM type: YTN; PAM sequence: TTG
gttacaggtattttaacaag

SEQ ID NO: 328034 - DNA, 20 bp, Artificial Sequence
  Description of Artificial Sequence: Synthetic oligonucleotide
  Target: LAMA2; (+) strand; PAM type: YTN; PAM sequence: TTA
caggtattttaacaagtatt

SEQ ID NO: 328035 - DNA, 20 bp, Artificial Sequence
  Description of Artificial Sequence: Synthetic oligonucleotide
  Target: LAMA2; (+) strand; PAM type: YTN; PAM sequence: TTT
taacaagtatttggaggagt

SEQ ID NO: 328036 - DNA, 20 bp, Artificial Sequence
  Description of Artificial Sequence: Synthetic oligonucleotide
  Target: LAMA2; (+) strand; PAM type: YTN; PAM sequence: TTT
aacaagtatttggaggagtt

SEQ ID NO: 328037 - DNA, 20 bp, Artificial Sequence
  Description of Artificial Sequence: Synthetic oligonucleotide
  Target: LAMA2; (+) strand; PAM type: YTN; PAM sequence: TTA
acaagtatttggaggagttt

SEQ ID NO: 328038 - DNA, 20 bp, Artificial Sequence
  Description of Artificial Sequence: Synthetic oligonucleotide
  Target: LAMA2; (+) strand; PAM type: YTN; PAM sequence: TTT
ggaggagtttggggaagttg

SEQ ID NO: 328039 - DNA, 20 bp, Artificial Sequence
  Description of Artificial Sequence: Synthetic oligonucleotide
  Target: LAMA2; (+) strand; PAM type: YTN; PAM sequence: TTG
gaggagtttggggaagttga

SEQ ID NO: 328040 - DNA, 20 bp, Artificial Sequence
  Description of Artificial Sequence: Synthetic oligonucleotide
  Target: LAMA2; (+) strand; PAM type: YTN; PAM sequence: TTT
ggggaagttgaagtacgaac

SEQ ID NO: 328041 - DNA, 20 bp, Artificial Sequence
  Description of Artificial Sequence: Synthetic oligonucleotide
  Target: LAMA2; (+) strand; PAM type: YTN; PAM sequence: TTG
gggaagttgaagtacgaaca

SEQ ID NO: 328042 - DNA, 20 bp, Artificial Sequence
  Description of Artificial Sequence: Synthetic oligonucleotide
  Target: LAMA2; (+) strand; PAM type: YTN; PAM sequence: TTG
aagtacgaacacattatttg

SEQ ID NO: 328043 - DNA, 20 bp, Artificial Sequence
  Description of Artificial Sequence: Synthetic oligonucleotide
  Target: LAMA2; (+) strand; PAM type: YTN; PAM sequence: TTA
tttgaagtcactgttacaga

SEQ ID NO: 328044 - DNA, 20 bp, Artificial Sequence
  Description of Artificial Sequence: Synthetic oligonucleotide
  Target: LAMA2; (+) strand; PAM type: YTN; PAM sequence: TTT
gaagtcactgttacagaggt

SEQ ID NO: 328045 - DNA, 20 bp, Artificial Sequence
  Description of Artificial Sequence: Synthetic oligonucleotide
  Target: LAMA2; (+) strand; PAM type: YTN; PAM sequence: TTG
aagtcactgttacagaggtg

SEQ ID NO: 328046 - DNA, 20 bp, Artificial Sequence
  Description of Artificial Sequence: Synthetic oligonucleotide
  Target: LAMA2; (+) strand; PAM type: YTN; PAM sequence: CTG
ttacagaggtgcactatttt

SEQ ID NO: 328047 - DNA, 20 bp, Artificial Sequence
  Description of Artificial Sequence: Synthetic oligonucleotide
  Target: LAMA2; (+) strand; PAM type: YTN; PAM sequence: TTA
cagaggtgcactattttgtc

SEQ ID NO: 328048 - DNA, 20 bp, Artificial Sequence
  Description of Artificial Sequence: Synthetic oligonucleotide
  Target: LAMA2; (+) strand; PAM type: YTN; PAM sequence: CTA
ttttgtccttcctgatgtag

SEQ ID NO: 328049 - DNA, 20 bp, Artificial Sequence
  Description of Artificial Sequence: Synthetic oligonucleotide
  Target: LAMA2; (+) strand; PAM type: YTN; PAM sequence: TTT
tgtccttcctgatgtagcca

SEQ ID NO: 328050 - DNA, 20 bp, Artificial Sequence
  Description of Artificial Sequence: Synthetic oligonucleotide
  Target: LAMA2; (+) strand; PAM type: YTN; PAM sequence: TTT
gtccttcctgatgtagccat

SEQ ID NO: 328051 - DNA, 20 bp, Artificial Sequence
  Description of Artificial Sequence: Synthetic oligonucleotide
  Target: LAMA2; (+) strand; PAM type: YTN; PAM sequence: TTG
tccttcctgatgtagccatt

SEQ ID NO: 328052 - DNA, 20 bp, Artificial Sequence
  Description of Artificial Sequence: Synthetic oligonucleotide
  Target: LAMA2; (+) strand; PAM type: YTN; PAM sequence: CTT
cctgatgtagccattagtgt

SEQ ID NO: 328053 - DNA, 20 bp, Artificial Sequence
  Description of Artificial Sequence: Synthetic oligonucleotide
  Target: LAMA2; (+) strand; PAM type: YTN; PAM sequence: TTC
ctgatgtagccattagtgtt

SEQ ID NO: 328054 - DNA, 20 bp, Artificial Sequence
  Description of Artificial Sequence: Synthetic oligonucleotide
  Target: LAMA2; (+) strand; PAM type: YTN; PAM sequence: CTG
atgtagccattagtgttcct

SEQ ID NO: 328055 - DNA, 20 bp, Artificial Sequence
  Description of Artificial Sequence: Synthetic oligonucleotide
  Target: LAMA2; (+) strand; PAM type: YTN; PAM sequence: TTA
gtgttcctacaagaaatctg

SEQ ID NO: 328056 - DNA, 20 bp, Artificial Sequence
  Description of Artificial Sequence: Synthetic oligonucleotide
  Target: LAMA2; (+) strand; PAM type: YTN; PAM sequence: TTC
ctacaagaaatctggattat

SEQ ID NO: 328057 - DNA, 20 bp, Artificial Sequence
  Description of Artificial Sequence: Synthetic oligonucleotide
  Target: LAMA2; (+) strand; PAM type: YTN; PAM sequence: CTA
caagaaatctggattatcat

SEQ ID NO: 328058 - DNA, 20 bp, Artificial Sequence
  Description of Artificial Sequence: Synthetic oligonucleotide
  Target: LAMA2; (+) strand; PAM type: YTN; PAM sequence: CTG
gattatcatgacagtttttt

SEQ ID NO: 328059 - DNA, 20 bp, Artificial Sequence
  Description of Artificial Sequence: Synthetic oligonucleotide
  Target: LAMA2; (+) strand; PAM type: YTN; PAM sequence: TTA
tcatgacagtttttttttct

SEQ ID NO: 328060 - DNA, 20 bp, Artificial Sequence
  Description of Artificial Sequence: Synthetic oligonucleotide
  Target: LAMA2; (+) strand; PAM type: YTN; PAM sequence: TTT
ttttttcttttttccttttt

SEQ ID NO: 328061 - DNA, 20 bp, Artificial Sequence
  Description of Artificial Sequence: Synthetic oligonucleotide
  Target: LAMA2; (+) strand; PAM type: YTN; PAM sequence: TTT
tttttcttttttcctttttc

SEQ ID NO: 328062 - DNA, 20 bp, Artificial Sequence
  Description of Artificial Sequence: Synthetic oligonucleotide
  Target: LAMA2; (+) strand; PAM type: YTN; PAM sequence: TTT
ttttcttttttcctttttct

SEQ ID NO: 328063 - DNA, 20 bp, Artificial Sequence
  Description of Artificial Sequence: Synthetic oligonucleotide
  Target: LAMA2; (+) strand; PAM type: YTN; PAM sequence: TTT
tttcttttttcctttttctt

SEQ ID NO: 328064 - DNA, 20 bp, Artificial Sequence
  Description of Artificial Sequence: Synthetic oligonucleotide
  Target: LAMA2; (+) strand; PAM type: YTN; PAM sequence: TTT
ttcttttttcctttttcttt

SEQ ID NO: 328065 - DNA, 20 bp, Artificial Sequence
  Description of Artificial Sequence: Synthetic oligonucleotide
  Target: LAMA2; (+) strand; PAM type: YTN; PAM sequence: TTT
tcttttttcctttttctttt

SEQ ID NO: 328066 - DNA, 20 bp, Artificial Sequence
  Description of Artificial Sequence: Synthetic oligonucleotide
  Target: LAMA2; (+) strand; PAM type: YTN; PAM sequence: TTT
cttttttcctttttcttttt

SEQ ID NO: 328067 - DNA, 20 bp, Artificial Sequence
  Description of Artificial Sequence: Synthetic oligonucleotide
  Target: LAMA2; (+) strand; PAM type: YTN; PAM sequence: TTC
ttttttcctttttctttttt

SEQ ID NO: 328068 - DNA, 20 bp, Artificial Sequence
  Description of Artificial Sequence: Synthetic oligonucleotide
  Target: LAMA2; (+) strand; PAM type: YTN; PAM sequence: CTT
ttttcctttttcttttttta

SEQ ID NO: 328069 - DNA, 20 bp, Artificial Sequence
  Description of Artificial Sequence: Synthetic oligonucleotide
  Target: LAMA2; (+) strand; PAM type: YTN; PAM sequence: TTT
tttcctttttctttttttaa

SEQ ID NO: 328070 - DNA, 20 bp, Artificial Sequence
  Description of Artificial Sequence: Synthetic oligonucleotide
  Target: LAMA2; (+) strand; PAM type: YTN; PAM sequence: TTT
ttcctttttctttttttaat

SEQ ID NO: 328071 - DNA, 20 bp, Artificial Sequence
  Description of Artificial Sequence: Synthetic oligonucleotide
  Target: LAMA2; (+) strand; PAM type: YTN; PAM sequence: TTT
tcctttttctttttttaatt

SEQ ID NO: 328072 - DNA, 20 bp, Artificial Sequence
  Description of Artificial Sequence: Synthetic oligonucleotide
  Target: LAMA2; (+) strand; PAM type: YTN; PAM sequence: TTT
cctttttctttttttaattt

SEQ ID NO: 328073 - DNA, 20 bp, Artificial Sequence
  Description of Artificial Sequence: Synthetic oligonucleotide
  Target: LAMA2; (+) strand; PAM type: YTN; PAM sequence: TTC
ctttttctttttttaatttt

SEQ ID NO: 328074 - DNA, 20 bp, Artificial Sequence
  Description of Artificial Sequence: Synthetic oligonucleotide
  Target: LAMA2; (+) strand; PAM type: YTN; PAM sequence: CTT
tttctttttttaattttaga

SEQ ID NO: 328075 - DNA, 20 bp, Artificial Sequence
  Description of Artificial Sequence: Synthetic oligonucleotide
  Target: LAMA2; (+) strand; PAM type: YTN; PAM sequence: TTT
ttctttttttaattttagat

SEQ ID NO: 328076 - DNA, 20 bp, Artificial Sequence
  Description of Artificial Sequence: Synthetic oligonucleotide
  Target: LAMA2; (+) strand; PAM type: YTN; PAM sequence: TTT
tctttttttaattttagatt

SEQ ID NO: 328077 - DNA, 20 bp, Artificial Sequence
  Description of Artificial Sequence: Synthetic oligonucleotide
  Target: LAMA2; (+) strand; PAM type: YTN; PAM sequence: TTT
ctttttttaattttagattt

SEQ ID NO: 328078 - DNA, 20 bp, Artificial Sequence
  Description of Artificial Sequence: Synthetic oligonucleotide
  Target: LAMA2; (+) strand; PAM type: YTN; PAM sequence: TTC
tttttttaattttagattta

SEQ ID NO: 328079 - DNA, 20 bp, Artificial Sequence
  Description of Artificial Sequence: Synthetic oligonucleotide
  Target: LAMA2; (+) strand; PAM type: YTN; PAM sequence: CTT
tttttaattttagatttagg

SEQ ID NO: 328080 - DNA, 20 bp, Artificial Sequence
  Description of Artificial Sequence: Synthetic oligonucleotide
  Target: LAMA2; (+) strand; PAM type: YTN; PAM sequence: TTT
ttttaattttagatttaggg

SEQ ID NO: 328081 - DNA, 20 bp, Artificial Sequence
  Description of Artificial Sequence: Synthetic oligonucleotide
  Target: LAMA2; (+) strand; PAM type: YTN; PAM sequence: TTT
tttaattttagatttagggg

SEQ ID NO: 328082 - DNA, 20 bp, Artificial Sequence
  Description of Artificial Sequence: Synthetic oligonucleotide
  Target: LAMA2; (+) strand; PAM type: YTN; PAM sequence: TTT
ttaattttagatttagggga

SEQ ID NO: 328083 - DNA, 20 bp, Artificial Sequence
  Description of Artificial Sequence: Synthetic oligonucleotide
  Target: LAMA2; (+) strand; PAM type: YTN; PAM sequence: TTT
taattttagatttaggggat

SEQ ID NO: 328084 - DNA, 20 bp, Artificial Sequence
  Description of Artificial Sequence: Synthetic oligonucleotide
  Target: LAMA2; (+) strand; PAM type: YTN; PAM sequence: TTT
aattttagatttaggggata

SEQ ID NO: 328085 - DNA, 20 bp, Artificial Sequence
  Description of Artificial Sequence: Synthetic oligonucleotide
  Target: LAMA2; (+) strand; PAM type: YTN; PAM sequence: TTA
attttagatttaggggatac

SEQ ID NO: 328086 - DNA, 20 bp, Artificial Sequence
  Description of Artificial Sequence: Synthetic oligonucleotide
  Target: LAMA2; (+) strand; PAM type: YTN; PAM sequence: TTT
tagatttaggggatacatgt

SEQ ID NO: 328087 - DNA, 20 bp, Artificial Sequence
  Description of Artificial Sequence: Synthetic oligonucleotide
  Target: LAMA2; (+) strand; PAM type: YTN; PAM sequence: TTT
agatttaggggatacatgtg

SEQ ID NO: 328088 - DNA, 20 bp, Artificial Sequence
  Description of Artificial Sequence: Synthetic oligonucleotide
  Target: LAMA2; (+) strand; PAM type: YTN; PAM sequence: TTA
gatttaggggatacatgtgt

SEQ ID NO: 328089 - DNA, 20 bp, Artificial Sequence
  Description of Artificial Sequence: Synthetic oligonucleotide
  Target: LAMA2; (+) strand; PAM type: YTN; PAM sequence: TTT
aggggatacatgtgtgggtt

SEQ ID NO: 328090 - DNA, 20 bp, Artificial Sequence
  Description of Artificial Sequence: Synthetic oligonucleotide
  Target: LAMA2; (+) strand; PAM type: YTN; PAM sequence: TTA
ggggatacatgtgtgggttt

SEQ ID NO: 328091 - DNA, 20 bp, Artificial Sequence
  Description of Artificial Sequence: Synthetic oligonucleotide
  Target: LAMA2; (+) strand; PAM type: YTN; PAM sequence: TTT
gtgacatgggtatattgtgt

SEQ ID NO: 328092 - DNA, 20 bp, Artificial Sequence
  Description of Artificial Sequence: Synthetic oligonucleotide
  Target: LAMA2; (+) strand; PAM type: YTN; PAM sequence: TTG
tgacatgggtatattgtgta

SEQ ID NO: 328093 - DNA, 20 bp, Artificial Sequence
  Description of Artificial Sequence: Synthetic oligonucleotide
  Target: LAMA2; (+) strand; PAM type: YTN; PAM sequence: TTG
tgtaatggtgaggtttgggc

SEQ ID NO: 328094 - DNA, 20 bp, Artificial Sequence
  Description of Artificial Sequence: Synthetic oligonucleotide
  Target: LAMA2; (+) strand; PAM type: YTN; PAM sequence: TTT
gggcttctactgaacccatc

SEQ ID NO: 328095 - DNA, 20 bp, Artificial Sequence
  Description of Artificial Sequence: Synthetic oligonucleotide
  Target: LAMA2; (+) strand; PAM type: YTN; PAM sequence: TTG
ggcttctactgaacccatca

SEQ ID NO: 328096 - DNA, 20 bp, Artificial Sequence
  Description of Artificial Sequence: Synthetic oligonucleotide
  Target: LAMA2; (+) strand; PAM type: YTN; PAM sequence: CTT
ctactgaacccatcacccaa

SEQ ID NO: 328097 - DNA, 20 bp, Artificial Sequence
  Description of Artificial Sequence: Synthetic oligonucleotide
  Target: LAMA2; (+) strand; PAM type: YTN; PAM sequence: TTC
tactgaacccatcacccaaa

SEQ ID NO: 328098 - DNA, 20 bp, Artificial Sequence
  Description of Artificial Sequence: Synthetic oligonucleotide
  Target: LAMA2; (+) strand; PAM type: YTN; PAM sequence: CTA
ctgaacccatcacccaaatg

SEQ ID NO: 328099 - DNA, 20 bp, Artificial Sequence
  Description of Artificial Sequence: Synthetic oligonucleotide
  Target: LAMA2; (+) strand; PAM type: YTN; PAM sequence: CTG
aacccatcacccaaatggtg

SEQ ID NO: 328100 - DNA, 20 bp, Artificial Sequence
  Description of Artificial Sequence: Synthetic oligonucleotide
  Target: LAMA2; (+) strand; PAM type: YTN; PAM sequence: TTG
tattcagtcagtaatttttc

SEQ ID NO: 328101 - DNA, 20 bp, Artificial Sequence
  Description of Artificial Sequence: Synthetic oligonucleotide
  Target: LAMA2; (+) strand; PAM type: YTN; PAM sequence: TTC
agtcagtaatttttcagtcc

SEQ ID NO: 328102 - DNA, 20 bp, Artificial Sequence
  Description of Artificial Sequence: Synthetic oligonucleotide
  Target: LAMA2; (+) strand; PAM type: YTN; PAM sequence: TTT
ttcagtcctcattcctctcc

SEQ ID NO: 328103 - DNA, 20 bp, Artificial Sequence
  Description of Artificial Sequence: Synthetic oligonucleotide
  Target: LAMA2; (+) strand; PAM type: YTN; PAM sequence: TTT
tcagtcctcattcctctccc

SEQ ID NO: 328104 - DNA, 20 bp, Artificial Sequence
  Description of Artificial Sequence: Synthetic oligonucleotide
  Target: LAMA2; (+) strand; PAM type: YTN; PAM sequence: TTT
cagtcctcattcctctccca

SEQ ID NO: 328105 - DNA, 20 bp, Artificial Sequence
  Description of Artificial Sequence: Synthetic oligonucleotide
  Target: LAMA2; (+) strand; PAM type: YTN; PAM sequence: TTC
agtcctcattcctctcccag

SEQ ID NO: 328106 - DNA, 20 bp, Artificial Sequence
  Description of Artificial Sequence: Synthetic oligonucleotide
  Target: LAMA2; (+) strand; PAM type: YTN; PAM sequence: CTC
attcctctcccagcctcttc

SEQ ID NO: 328107 - DNA, 20 bp, Artificial Sequence
  Description of Artificial Sequence: Synthetic oligonucleotide
  Target: LAMA2; (+) strand; PAM type: YTN; PAM sequence: TTC
ctctcccagcctcttccctt

SEQ ID NO: 328108 - DNA, 20 bp, Artificial Sequence
  Description of Artificial Sequence: Synthetic oligonucleotide
  Target: LAMA2; (+) strand; PAM type: YTN; PAM sequence: CTC
tcccagcctcttcccttttg

SEQ ID NO: 328109 - DNA, 20 bp, Artificial Sequence
  Description of Artificial Sequence: Synthetic oligonucleotide
  Target: LAMA2; (+) strand; PAM type: YTN; PAM sequence: CTC
ccagcctcttcccttttgta

SEQ ID NO: 328110 - DNA, 20 bp, Artificial Sequence
  Description of Artificial Sequence: Synthetic oligonucleotide
  Target: LAMA2; (+) strand; PAM type: YTN; PAM sequence: CTC
ttcccttttgtattcctggg

SEQ ID NO: 328111 - DNA, 20 bp, Artificial Sequence
  Description of Artificial Sequence: Synthetic oligonucleotide
  Target: LAMA2; (+) strand; PAM type: YTN; PAM sequence: CTT
cccttttgtattcctgggtg

SEQ ID NO: 328112 - DNA, 20 bp, Artificial Sequence
  Description of Artificial Sequence: Synthetic oligonucleotide
  Target: LAMA2; (+) strand; PAM type: YTN; PAM sequence: TTC
ccttttgtattcctgggtgt

SEQ ID NO: 328113 - DNA, 20 bp, Artificial Sequence
  Description of Artificial Sequence: Synthetic oligonucleotide
  Target: LAMA2; (+) strand; PAM type: YTN; PAM sequence: CTT
ttgtattcctgggtgtctat

SEQ ID NO: 328114 - DNA, 20 bp, Artificial Sequence
  Description of Artificial Sequence: Synthetic oligonucleotide
  Target: LAMA2; (+) strand; PAM type: YTN; PAM sequence: TTT
tgtattcctgggtgtctatt

SEQ ID NO: 328115 - DNA, 20 bp, Artificial Sequence
  Description of Artificial Sequence: Synthetic oligonucleotide
  Target: LAMA2; (+) strand; PAM type: YTN; PAM sequence: TTT
gtattcctgggtgtctatta

SEQ ID NO: 328116 - DNA, 20 bp, Artificial Sequence
  Description of Artificial Sequence: Synthetic oligonucleotide
  Target: LAMA2; (+) strand; PAM type: YTN; PAM sequence: TTG
tattcctgggtgtctattat

SEQ ID NO: 328117 - DNA, 20 bp, Artificial Sequence
  Description of Artificial Sequence: Synthetic oligonucleotide
  Target: LAMA2; (+) strand; PAM type: YTN; PAM sequence: TTC
ctgggtgtctattatttcca

SEQ ID NO: 328118 - DNA, 20 bp, Artificial Sequence
  Description of Artificial Sequence: Synthetic oligonucleotide
  Target: LAMA2; (+) strand; PAM type: YTN; PAM sequence: CTG
ggtgtctattatttccatct

SEQ ID NO: 328119 - DNA, 20 bp, Artificial Sequence
  Description of Artificial Sequence: Synthetic oligonucleotide
  Target: LAMA2; (+) strand; PAM type: YTN; PAM sequence: CTA
ttatttccatctttgtttcc

SEQ ID NO: 328120 - DNA, 20 bp, Artificial Sequence
  Description of Artificial Sequence: Synthetic oligonucleotide
  Target: LAMA2; (+) strand; PAM type: YTN; PAM sequence: TTA
tttccatctttgtttccatg

SEQ ID NO: 328121 - DNA, 20 bp, Artificial Sequence
  Description of Artificial Sequence: Synthetic oligonucleotide
  Target: LAMA2; (+) strand; PAM type: YTN; PAM sequence: TTT
ccatctttgtttccatgtgt

SEQ ID NO: 328122 - DNA, 20 bp, Artificial Sequence
  Description of Artificial Sequence: Synthetic oligonucleotide
  Target: LAMA2; (+) strand; PAM type: YTN; PAM sequence: TTC
catctttgtttccatgtgta

SEQ ID NO: 328123 - DNA, 20 bp, Artificial Sequence
  Description of Artificial Sequence: Synthetic oligonucleotide
  Target: LAMA2; (+) strand; PAM type: YTN; PAM sequence: CTT
tgtttccatgtgtatccatt

SEQ ID NO: 328124 - DNA, 20 bp, Artificial Sequence
  Description of Artificial Sequence: Synthetic oligonucleotide
  Target: LAMA2; (+) strand; PAM type: YTN; PAM sequence: TTT
gtttccatgtgtatccattg

SEQ ID NO: 328125 - DNA, 20 bp, Artificial Sequence
  Description of Artificial Sequence: Synthetic oligonucleotide
  Target: LAMA2; (+) strand; PAM type: YTN; PAM sequence: TTG
tttccatgtgtatccattgt

SEQ ID NO: 328126 - DNA, 20 bp, Artificial Sequence
  Description of Artificial Sequence: Synthetic oligonucleotide
  Target: LAMA2; (+) strand; PAM type: YTN; PAM sequence: TTT
ccatgtgtatccattgttta

SEQ ID NO: 328127 - DNA, 20 bp, Artificial Sequence
  Description of Artificial Sequence: Synthetic oligonucleotide
  Target: LAMA2; (+) strand; PAM type: YTN; PAM sequence: TTC
catgtgtatccattgtttag

SEQ ID NO: 328128 - DNA, 20 bp, Artificial Sequence
  Description of Artificial Sequence: Synthetic oligonucleotide
  Target: LAMA2; (+) strand; PAM type: YTN; PAM sequence: TTG
tttagctcccacttagaagt

SEQ ID NO: 328129 - DNA, 20 bp, Artificial Sequence
  Description of Artificial Sequence: Synthetic oligonucleotide
  Target: LAMA2; (+) strand; PAM type: YTN; PAM sequence: TTT
agctcccacttagaagtgaa

SEQ ID NO: 328130 - DNA, 20 bp, Artificial Sequence
  Description of Artificial Sequence: Synthetic oligonucleotide
  Target: LAMA2; (+) strand; PAM type: YTN; PAM sequence: TTA
gctcccacttagaagtgaaa

SEQ ID NO: 328131 - DNA, 20 bp, Artificial Sequence
  Description of Artificial Sequence: Synthetic oligonucleotide
  Target: LAMA2; (+) strand; PAM type: YTN; PAM sequence: CTC
ccacttagaagtgaaaatgt

SEQ ID NO: 328132 - DNA, 20 bp, Artificial Sequence
  Description of Artificial Sequence: Synthetic oligonucleotide
  Target: LAMA2; (+) strand; PAM type: YTN; PAM sequence: CTT
agaagtgaaaatgtcatatt

SEQ ID NO: 328133 - DNA, 20 bp, Artificial Sequence
  Description of Artificial Sequence: Synthetic oligonucleotide
  Target: LAMA2; (+) strand; PAM type: YTN; PAM sequence: TTA
gaagtgaaaatgtcatattc

SEQ ID NO: 328134 - DNA, 20 bp, Artificial Sequence
  Description of Artificial Sequence: Synthetic oligonucleotide
  Target: LAMA2; (+) strand; PAM type: YTN; PAM sequence: TTC
aattttctgcttctgagtta

SEQ ID NO: 328135 - DNA, 20 bp, Artificial Sequence
  Description of Artificial Sequence: Synthetic oligonucleotide
  Target: LAMA2; (+) strand; PAM type: YTN; PAM sequence: TTT
tctgcttctgagttatttca

SEQ ID NO: 328136 - DNA, 20 bp, Artificial Sequence
  Description of Artificial Sequence: Synthetic oligonucleotide
  Target: LAMA2; (+) strand; PAM type: YTN; PAM sequence: TTT
ctgcttctgagttatttcac

SEQ ID NO: 328137 - DNA, 20 bp, Artificial Sequence
  Description of Artificial Sequence: Synthetic oligonucleotide
  Target: LAMA2; (+) strand; PAM type: YTN; PAM sequence: TTC
tgcttctgagttatttcact

SEQ ID NO: 328138 - DNA, 20 bp, Artificial Sequence
  Description of Artificial Sequence: Synthetic oligonucleotide
  Target: LAMA2; (+) strand; PAM type: YTN; PAM sequence: CTG
cttctgagttatttcactta

SEQ ID NO: 328139 - DNA, 20 bp, Artificial Sequence
  Description of Artificial Sequence: Synthetic oligonucleotide
  Target: LAMA2; (+) strand; PAM type: YTN; PAM sequence: CTT
ctgagttatttcacttagga

SEQ ID NO: 328140 - DNA, 20 bp, Artificial Sequence
  Description of Artificial Sequence: Synthetic oligonucleotide
  Target: LAMA2; (+) strand; PAM type: YTN; PAM sequence: TTC
tgagttatttcacttaggat

SEQ ID NO: 328141 - DNA, 20 bp, Artificial Sequence
  Description of Artificial Sequence: Synthetic oligonucleotide
  Target: LAMA2; (+) strand; PAM type: YTN; PAM sequence: CTG
agttatttcacttaggataa

SEQ ID NO: 328142 - DNA, 20 bp, Artificial Sequence
  Description of Artificial Sequence: Synthetic oligonucleotide
  Target: LAMA2; (+) strand; PAM type: YTN; PAM sequence: TTA
tttcacttaggataatggcc

SEQ ID NO: 328143 - DNA, 20 bp, Artificial Sequence
  Description of Artificial Sequence: Synthetic oligonucleotide
  Target: LAMA2; (+) strand; PAM type: YTN; PAM sequence: TTT
cacttaggataatggcctcc

SEQ ID NO: 328144 - DNA, 20 bp, Artificial Sequence
  Description of Artificial Sequence: Synthetic oligonucleotide
  Target: LAMA2; (+) strand; PAM type: YTN; PAM sequence: TTC
acttaggataatggcctcca

SEQ ID NO: 328145 - DNA, 20 bp, Artificial Sequence
  Description of Artificial Sequence: Synthetic oligonucleotide
  Target: LAMA2; (+) strand; PAM type: YTN; PAM sequence: CTT
aggataatggcctccagctc

SEQ ID NO: 328146 - DNA, 20 bp, Artificial Sequence
  Description of Artificial Sequence: Synthetic oligonucleotide
  Target: LAMA2; (+) strand; PAM type: YTN; PAM sequence: TTA
ggataatggcctccagctcc

SEQ ID NO: 328147 - DNA, 20 bp, Artificial Sequence
  Description of Artificial Sequence: Synthetic oligonucleotide
  Target: LAMA2; (+) strand; PAM type: YTN; PAM sequence: CTC
cagctccatccatgttgctg

SEQ ID NO: 328148 - DNA, 20 bp, Artificial Sequence
  Description of Artificial Sequence: Synthetic oligonucleotide
  Target: LAMA2; (+) strand; PAM type: YTN; PAM sequence: CTC
catccatgttgctgcaaagg

SEQ ID NO: 328149 - DNA, 20 bp, Artificial Sequence
  Description of Artificial Sequence: Synthetic oligonucleotide
  Target: LAMA2; (+) strand; PAM type: YTN; PAM sequence: TTG
ctgcaaaggacatgatttca

SEQ ID NO: 328150 - DNA, 20 bp, Artificial Sequence
  Description of Artificial Sequence: Synthetic oligonucleotide
  Target: LAMA2; (+) strand; PAM type: YTN; PAM sequence: CTG
caaaggacatgatttcatta

SEQ ID NO: 328151 - DNA, 20 bp, Artificial Sequence
  Description of Artificial Sequence: Synthetic oligonucleotide
  Target: LAMA2; (+) strand; PAM type: YTN; PAM sequence: TTT
cattattttttatggctgca

SEQ ID NO: 328152 - DNA, 20 bp, Artificial Sequence
  Description of Artificial Sequence: Synthetic oligonucleotide
  Target: LAMA2; (+) strand; PAM type: YTN; PAM sequence: TTC
attattttttatggctgcac

SEQ ID NO: 328153 - DNA, 20 bp, Artificial Sequence
  Description of Artificial Sequence: Synthetic oligonucleotide
  Target: LAMA2; (+) strand; PAM type: YTN; PAM sequence: TTA
ttttttatggctgcacagta

SEQ ID NO: 328154 - DNA, 20 bp, Artificial Sequence
  Description of Artificial Sequence: Synthetic oligonucleotide
  Target: LAMA2; (+) strand; PAM type: YTN; PAM sequence: TTT
tttatggctgcacagtattc

SEQ ID NO: 328155 - DNA, 20 bp, Artificial Sequence
  Description of Artificial Sequence: Synthetic oligonucleotide
  Target: LAMA2; (+) strand; PAM type: YTN; PAM sequence: TTT
ttatggctgcacagtattcc

SEQ ID NO: 328156 - DNA, 20 bp, Artificial Sequence
  Description of Artificial Sequence: Synthetic oligonucleotide
  Target: LAMA2; (+) strand; PAM type: YTN; PAM sequence: TTT
tatggctgcacagtattcca

SEQ ID NO: 328157 - DNA, 20 bp, Artificial Sequence
  Description of Artificial Sequence: Synthetic oligonucleotide
  Target: LAMA2; (+) strand; PAM type: YTN; PAM sequence: TTT
atggctgcacagtattccat

SEQ ID NO: 328158 - DNA, 20 bp, Artificial Sequence
  Description of Artificial Sequence: Synthetic oligonucleotide
  Target: LAMA2; (+) strand; PAM type: YTN; PAM sequence: TTA
tggctgcacagtattccatg

SEQ ID NO: 328159 - DNA, 20 bp, Artificial Sequence
  Description of Artificial Sequence: Synthetic oligonucleotide
  Target: LAMA2; (+) strand; PAM type: YTN; PAM sequence: CTG
cacagtattccatggtgttc

SEQ ID NO: 328160 - DNA, 20 bp, Artificial Sequence
  Description of Artificial Sequence: Synthetic oligonucleotide
  Target: LAMA2; (+) strand; PAM type: YTN; PAM sequence: TTC
catggtgttcatataccaca

SEQ ID NO: 328161 - DNA, 20 bp, Artificial Sequence
  Description of Artificial Sequence: Synthetic oligonucleotide
  Target: LAMA2; (+) strand; PAM type: YTN; PAM sequence: TTC
atataccacaccacattttc

SEQ ID NO: 328162 - DNA, 20 bp, Artificial Sequence
  Description of Artificial Sequence: Synthetic oligonucleotide
  Target: LAMA2; (+) strand; PAM type: YTN; PAM sequence: TTT
tctttgtccaaccaacacat

SEQ ID NO: 328163 - DNA, 20 bp, Artificial Sequence
  Description of Artificial Sequence: Synthetic oligonucleotide
  Target: LAMA2; (+) strand; PAM type: YTN; PAM sequence: TTT
ctttgtccaaccaacacata

SEQ ID NO: 328164 - DNA, 20 bp, Artificial Sequence
  Description of Artificial Sequence: Synthetic oligonucleotide
  Target: LAMA2; (+) strand; PAM type: YTN; PAM sequence: TTC
tttgtccaaccaacacatag

SEQ ID NO: 328165 - DNA, 20 bp, Artificial Sequence
  Description of Artificial Sequence: Synthetic oligonucleotide
  Target: LAMA2; (+) strand; PAM type: YTN; PAM sequence: CTT
tgtccaaccaacacatagat

SEQ ID NO: 328166 - DNA, 20 bp, Artificial Sequence
  Description of Artificial Sequence: Synthetic oligonucleotide
  Target: LAMA2; (+) strand; PAM type: YTN; PAM sequence: TTT
gtccaaccaacacatagatt

SEQ ID NO: 328167 - DNA, 20 bp, Artificial Sequence
  Description of Artificial Sequence: Synthetic oligonucleotide
  Target: LAMA2; (+) strand; PAM type: YTN; PAM sequence: TTG
tccaaccaacacatagattg

SEQ ID NO: 328168 - DNA, 20 bp, Artificial Sequence
  Description of Artificial Sequence: Synthetic oligonucleotide
  Target: LAMA2; (+) strand; PAM type: YTN; PAM sequence: TTG
ttgagcacatagattgagtc

SEQ ID NO: 328169 - DNA, 20 bp, Artificial Sequence
  Description of Artificial Sequence: Synthetic oligonucleotide
  Target: LAMA2; (+) strand; PAM type: YTN; PAM sequence: TTG
agcacatagattgagtccat

SEQ ID NO: 328170 - DNA, 20 bp, Artificial Sequence
  Description of Artificial Sequence: Synthetic oligonucleotide
  Target: LAMA2; (+) strand; PAM type: YTN; PAM sequence: TTG
agtccatgactttgctattg

SEQ ID NO: 328171 - DNA, 20 bp, Artificial Sequence
  Description of Artificial Sequence: Synthetic oligonucleotide
  Target: LAMA2; (+) strand; PAM type: YTN; PAM sequence: CTT
tgctattgtgaatagtgctg

SEQ ID NO: 328172 - DNA, 20 bp, Artificial Sequence
  Description of Artificial Sequence: Synthetic oligonucleotide
  Target: LAMA2; (+) strand; PAM type: YTN; PAM sequence: TTT
gctattgtgaatagtgctgc

SEQ ID NO: 328173 - DNA, 20 bp, Artificial Sequence
  Description of Artificial Sequence: Synthetic oligonucleotide
  Target: LAMA2; (+) strand; PAM type: YTN; PAM sequence: TTG
ctattgtgaatagtgctgca

SEQ ID NO: 328174 - DNA, 20 bp, Artificial Sequence
  Description of Artificial Sequence: Synthetic oligonucleotide
  Target: LAMA2; (+) strand; PAM type: YTN; PAM sequence: CTA
ttgtgaatagtgctgcaaca

SEQ ID NO: 328175 - DNA, 20 bp, Artificial Sequence
  Description of Artificial Sequence: Synthetic oligonucleotide
  Target: LAMA2; (+) strand; PAM type: YTN; PAM sequence: TTG
tgaatagtgctgcaacaaac

SEQ ID NO: 328176 - DNA, 20 bp, Artificial Sequence
  Description of Artificial Sequence: Synthetic oligonucleotide
  Target: LAMA2; (+) strand; PAM type: YTN; PAM sequence: CTG
caacaaacacacaaatgtag

SEQ ID NO: 328177 - DNA, 20 bp, Artificial Sequence
  Description of Artificial Sequence: Synthetic oligonucleotide
  Target: LAMA2; (+) strand; PAM type: YTN; PAM sequence: CTT
tttgatatagttagttcttt

SEQ ID NO: 328178 - DNA, 20 bp, Artificial Sequence
  Description of Artificial Sequence: Synthetic oligonucleotide
  Target: LAMA2; (+) strand; PAM type: YTN; PAM sequence: TTT
ttgatatagttagttctttt

SEQ ID NO: 328179 - DNA, 20 bp, Artificial Sequence
  Description of Artificial Sequence: Synthetic oligonucleotide
  Target: LAMA2; (+) strand; PAM type: YTN; PAM sequence: TTT
tgatatagttagttcttttc

SEQ ID NO: 328180 - DNA, 20 bp, Artificial Sequence
  Description of Artificial Sequence: Synthetic oligonucleotide
  Target: LAMA2; (+) strand; PAM type: YTN; PAM sequence: TTT
gatatagttagttcttttcc

SEQ ID NO: 328181 - DNA, 20 bp, Artificial Sequence
  Description of Artificial Sequence: Synthetic oligonucleotide
  Target: LAMA2; (+) strand; PAM type: YTN; PAM sequence: TTG
atatagttagttcttttcct

SEQ ID NO: 328182 - DNA, 20 bp, Artificial Sequence
  Description of Artificial Sequence: Synthetic oligonucleotide
  Target: LAMA2; (+) strand; PAM type: YTN; PAM sequence: TTA
gttcttttcctttgggtaga

SEQ ID NO: 328183 - DNA, 20 bp, Artificial Sequence
  Description of Artificial Sequence: Synthetic oligonucleotide
  Target: LAMA2; (+) strand; PAM type: YTN; PAM sequence: TTC
ttttcctttgggtagatacc

SEQ ID NO: 328184 - DNA, 20 bp, Artificial Sequence
  Description of Artificial Sequence: Synthetic oligonucleotide
  Target: LAMA2; (+) strand; PAM type: YTN; PAM sequence: CTT
ttcctttgggtagataccca

SEQ ID NO: 328185 - DNA, 20 bp, Artificial Sequence
  Description of Artificial Sequence: Synthetic oligonucleotide
  Target: LAMA2; (+) strand; PAM type: YTN; PAM sequence: TTT
tcctttgggtagatacccag

SEQ ID NO: 328186 - DNA, 20 bp, Artificial Sequence
  Description of Artificial Sequence: Synthetic oligonucleotide
  Target: LAMA2; (+) strand; PAM type: YTN; PAM sequence: TTT
cctttgggtagatacccagt

SEQ ID NO: 328187 - DNA, 20 bp, Artificial Sequence
  Description of Artificial Sequence: Synthetic oligonucleotide
  Target: LAMA2; (+) strand; PAM type: YTN; PAM sequence: TTC
ctttgggtagatacccagta

SEQ ID NO: 328188 - DNA, 20 bp, Artificial Sequence
  Description of Artificial Sequence: Synthetic oligonucleotide
  Target: LAMA2; (+) strand; PAM type: YTN; PAM sequence: CTT
tgggtagatacccagtaatg

SEQ ID NO: 328189 - DNA, 20 bp, Artificial Sequence
  Description of Artificial Sequence: Synthetic oligonucleotide
  Target: LAMA2; (+) strand; PAM type: YTN; PAM sequence: TTT
gggtagatacccagtaatgg

SEQ ID NO: 328190 - DNA, 20 bp, Artificial Sequence
  Description of Artificial Sequence: Synthetic oligonucleotide
  Target: LAMA2; (+) strand; PAM type: YTN; PAM sequence: TTG
ggtagatacccagtaatggg

SEQ ID NO: 328191 - DNA, 20 bp, Artificial Sequence
  Description of Artificial Sequence: Synthetic oligonucleotide
  Target: LAMA2; (+) strand; PAM type: YTN; PAM sequence: TTG
ctatatcaaatagtagttct

SEQ ID NO: 328192 - DNA, 20 bp, Artificial Sequence
  Description of Artificial Sequence: Synthetic oligonucleotide
  Target: LAMA2; (+) strand; PAM type: YTN; PAM sequence: CTA
tatcaaatagtagttctctt

SEQ ID NO: 328193 - DNA, 20 bp, Artificial Sequence
  Description of Artificial Sequence: Synthetic oligonucleotide
  Target: LAMA2; (+) strand; PAM type: YTN; PAM sequence: TTC
tcttttttgttctttaagaa

SEQ ID NO: 328194 - DNA, 20 bp, Artificial Sequence
  Description of Artificial Sequence: Synthetic oligonucleotide
  Target: LAMA2; (+) strand; PAM type: YTN; PAM sequence: CTC
ttttttgttctttaagaact

SEQ ID NO: 328195 - DNA, 20 bp, Artificial Sequence
  Description of Artificial Sequence: Synthetic oligonucleotide
  Target: LAMA2; (+) strand; PAM type: YTN; PAM sequence: CTT
ttttgttctttaagaactct

SEQ ID NO: 328196 - DNA, 20 bp, Artificial Sequence
  Description of Artificial Sequence: Synthetic oligonucleotide
  Target: LAMA2; (+) strand; PAM type: YTN; PAM sequence: TTT
tttgttctttaagaactctc

SEQ ID NO: 328197 - DNA, 20 bp, Artificial Sequence
  Description of Artificial Sequence: Synthetic oligonucleotide
  Target: LAMA2; (+) strand; PAM type: YTN; PAM sequence: TTT
ttgttctttaagaactctcc

SEQ ID NO: 328198 - DNA, 20 bp, Artificial Sequence
  Description of Artificial Sequence: Synthetic oligonucleotide
  Target: LAMA2; (+) strand; PAM type: YTN; PAM sequence: TTT
tgttctttaagaactctcca

SEQ ID NO: 328199 - DNA, 20 bp, Artificial Sequence
  Description of Artificial Sequence: Synthetic oligonucleotide
  Target: LAMA2; (+) strand; PAM type: YTN; PAM sequence: TTT
gttctttaagaactctccat

SEQ ID NO: 328200 - DNA, 20 bp, Artificial Sequence
  Description of Artificial Sequence: Synthetic oligonucleotide
  Target: LAMA2; (+) strand; PAM type: YTN; PAM sequence: TTG
ttctttaagaactctccata

SEQ ID NO: 328201 - DNA, 20 bp, Artificial Sequence
  Description of Artificial Sequence: Synthetic oligonucleotide
  Target: LAMA2; (+) strand; PAM type: YTN; PAM sequence: TTC
tttaagaactctccatattg

SEQ ID NO: 328202 - DNA, 20 bp, Artificial Sequence
  Description of Artificial Sequence: Synthetic oligonucleotide
  Target: LAMA2; (+) strand; PAM type: YTN; PAM sequence: CTT
taagaactctccatattgat

SEQ ID NO: 328203 - DNA, 20 bp, Artificial Sequence
  Description of Artificial Sequence: Synthetic oligonucleotide
  Target: LAMA2; (+) strand; PAM type: YTN; PAM sequence: TTT
aagaactctccatattgatt

SEQ ID NO: 328204 - DNA, 20 bp, Artificial Sequence
  Description of Artificial Sequence: Synthetic oligonucleotide
  Target: LAMA2; (+) strand; PAM type: YTN; PAM sequence: TTA
agaactctccatattgattt

SEQ ID NO: 328205 - DNA, 20 bp, Artificial Sequence
  Description of Artificial Sequence: Synthetic oligonucleotide
  Target: LAMA2; (+) strand; PAM type: YTN; PAM sequence: CTC
tccatattgatttccatagg

SEQ ID NO: 328206 - DNA, 20 bp, Artificial Sequence
  Description of Artificial Sequence: Synthetic oligonucleotide
  Target: LAMA2; (+) strand; PAM type: YTN; PAM sequence: CTC
catattgatttccatagggg

SEQ ID NO: 328207 - DNA, 20 bp, Artificial Sequence
  Description of Artificial Sequence: Synthetic oligonucleotide
  Target: LAMA2; (+) strand; PAM type: YTN; PAM sequence: TTG
atttccataggggttgaact

SEQ ID NO: 328208 - DNA, 20 bp, Artificial Sequence
  Description of Artificial Sequence: Synthetic oligonucleotide
  Target: LAMA2; (+) strand; PAM type: YTN; PAM sequence: TTT
ccataggggttgaactaatt

SEQ ID NO: 328209 - DNA, 20 bp, Artificial Sequence
  Description of Artificial Sequence: Synthetic oligonucleotide
  Target: LAMA2; (+) strand; PAM type: YTN; PAM sequence: TTC
cataggggttgaactaattt

SEQ ID NO: 328210 - DNA, 20 bp, Artificial Sequence
  Description of Artificial Sequence: Synthetic oligonucleotide
  Target: LAMA2; (+) strand; PAM type: YTN; PAM sequence: TTG
aactaatttacattcccacc

SEQ ID NO: 328211 - DNA, 20 bp, Artificial Sequence
  Description of Artificial Sequence: Synthetic oligonucleotide
  Target: LAMA2; (+) strand; PAM type: YTN; PAM sequence: CTA
atttacattcccaccagcag

SEQ ID NO: 328212 - DNA, 20 bp, Artificial Sequence
  Description of Artificial Sequence: Synthetic oligonucleotide
  Target: LAMA2; (+) strand; PAM type: YTN; PAM sequence: TTT
acattcccaccagcagcgta

SEQ ID NO: 328213 - DNA, 20 bp, Artificial Sequence
  Description of Artificial Sequence: Synthetic oligonucleotide
  Target: LAMA2; (+) strand; PAM type: YTN; PAM sequence: TTA
cattcccaccagcagcgtat

SEQ ID NO: 328214 - DNA, 20 bp, Artificial Sequence
  Description of Artificial Sequence: Synthetic oligonucleotide
  Target: LAMA2; (+) strand; PAM type: YTN; PAM sequence: TTC
ccaccagcagcgtataagca

SEQ ID NO: 328215 - DNA, 20 bp, Artificial Sequence
  Description of Artificial Sequence: Synthetic oligonucleotide
  Target: LAMA2; (+) strand; PAM type: YTN; PAM sequence: TTC
ccttttctctgcaacctcac

SEQ ID NO: 328216 - DNA, 20 bp, Artificial Sequence
  Description of Artificial Sequence: Synthetic oligonucleotide
  Target: LAMA2; (+) strand; PAM type: YTN; PAM sequence: CTT
ttctctgcaacctcaccgat

SEQ ID NO: 328217 - DNA, 20 bp, Artificial Sequence
  Description of Artificial Sequence: Synthetic oligonucleotide
  Target: LAMA2; (+) strand; PAM type: YTN; PAM sequence: TTT
tctctgcaacctcaccgata

SEQ ID NO: 328218 - DNA, 20 bp, Artificial Sequence
  Description of Artificial Sequence: Synthetic oligonucleotide
  Target: LAMA2; (+) strand; PAM type: YTN; PAM sequence: TTT
ctctgcaacctcaccgatat

SEQ ID NO: 328219 - DNA, 20 bp, Artificial Sequence
  Description of Artificial Sequence: Synthetic oligonucleotide
  Target: LAMA2; (+) strand; PAM type: YTN; PAM sequence: TTC
tctgcaacctcaccgatatc

SEQ ID NO: 328220 - DNA, 20 bp, Artificial Sequence
  Description of Artificial Sequence: Synthetic oligonucleotide
  Target: LAMA2; (+) strand; PAM type: YTN; PAM sequence: CTC
tgcaacctcaccgatatcta

SEQ ID NO: 328221 - DNA, 20 bp, Artificial Sequence
  Description of Artificial Sequence: Synthetic oligonucleotide
  Target: LAMA2; (+) strand; PAM type: YTN; PAM sequence: CTG
caacctcaccgatatctaat

SEQ ID NO: 328222 - DNA, 20 bp, Artificial Sequence
  Description of Artificial Sequence: Synthetic oligonucleotide
  Target: LAMA2; (+) strand; PAM type: YTN; PAM sequence: CTC
accgatatctaatatttttt

SEQ ID NO: 328223 - DNA, 20 bp, Artificial Sequence
  Description of Artificial Sequence: Synthetic oligonucleotide
  Target: LAMA2; (+) strand; PAM type: YTN; PAM sequence: CTA
atattttttgactttttaat

SEQ ID NO: 328224 - DNA, 20 bp, Artificial Sequence
  Description of Artificial Sequence: Synthetic oligonucleotide
  Target: LAMA2; (+) strand; PAM type: YTN; PAM sequence: TTT
tttgactttttaatactagc

SEQ ID NO: 328225 - DNA, 20 bp, Artificial Sequence
  Description of Artificial Sequence: Synthetic oligonucleotide
  Target: LAMA2; (+) strand; PAM type: YTN; PAM sequence: TTT
ttgactttttaatactagct

SEQ ID NO: 328226 - DNA, 20 bp, Artificial Sequence
  Description of Artificial Sequence: Synthetic oligonucleotide
  Target: LAMA2; (+) strand; PAM type: YTN; PAM sequence: TTT
tgactttttaatactagcta

SEQ ID NO: 328227 - DNA, 20 bp, Artificial Sequence
  Description of Artificial Sequence: Synthetic oligonucleotide
  Target: LAMA2; (+) strand; PAM type: YTN; PAM sequence: TTT
gactttttaatactagctat

SEQ ID NO: 328228 - DNA, 20 bp, Artificial Sequence
  Description of Artificial Sequence: Synthetic oligonucleotide
  Target: LAMA2; (+) strand; PAM type: YTN; PAM sequence: TTG
actttttaatactagctatt

SEQ ID NO: 328229 - DNA, 20 bp, Artificial Sequence
  Description of Artificial Sequence: Synthetic oligonucleotide
  Target: LAMA2; (+) strand; PAM type: YTN; PAM sequence: CTT
tttaatactagctattctaa

SEQ ID NO: 328230 - DNA, 20 bp, Artificial Sequence
  Description of Artificial Sequence: Synthetic oligonucleotide
  Target: LAMA2; (+) strand; PAM type: YTN; PAM sequence: TTT
ttaatactagctattctaat

SEQ ID NO: 328231 - DNA, 20 bp, Artificial Sequence
  Description of Artificial Sequence: Synthetic oligonucleotide
  Target: LAMA2; (+) strand; PAM type: YTN; PAM sequence: TTT
taatactagctattctaatt

SEQ ID NO: 328232 - DNA, 20 bp, Artificial Sequence
  Description of Artificial Sequence: Synthetic oligonucleotide
  Target: LAMA2; (+) strand; PAM type: YTN; PAM sequence: TTT
aatactagctattctaattt

SEQ ID NO: 328233 - DNA, 20 bp, Artificial Sequence
  Description of Artificial Sequence: Synthetic oligonucleotide
  Target: LAMA2; (+) strand; PAM type: YTN; PAM sequence: TTA
atactagctattctaatttg

SEQ ID NO: 328234 - DNA, 20 bp, Artificial Sequence
  Description of Artificial Sequence: Synthetic oligonucleotide
  Target: LAMA2; (+) strand; PAM type: YTN; PAM sequence: CTA
gctattctaatttgtatgac

SEQ ID NO: 328235 - DNA, 20 bp, Artificial Sequence
  Description of Artificial Sequence: Synthetic oligonucleotide
  Target: LAMA2; (+) strand; PAM type: YTN; PAM sequence: CTA
ttctaatttgtatgacttgg

SEQ ID NO: 328236 - DNA, 20 bp, Artificial Sequence
  Description of Artificial Sequence: Synthetic oligonucleotide
  Target: LAMA2; (+) strand; PAM type: YTN; PAM sequence: TTC
taatttgtatgacttggtat

SEQ ID NO: 328237 - DNA, 20 bp, Artificial Sequence
  Description of Artificial Sequence: Synthetic oligonucleotide
  Target: LAMA2; (+) strand; PAM type: YTN; PAM sequence: CTA
atttgtatgacttggtatct

SEQ ID NO: 328238 - DNA, 20 bp, Artificial Sequence
  Description of Artificial Sequence: Synthetic oligonucleotide
  Target: LAMA2; (+) strand; PAM type: YTN; PAM sequence: TTT
gtatgacttggtatctcatt

SEQ ID NO: 328239 - DNA, 20 bp, Artificial Sequence
  Description of Artificial Sequence: Synthetic oligonucleotide
  Target: LAMA2; (+) strand; PAM type: YTN; PAM sequence: TTG
tatgacttggtatctcattg

SEQ ID NO: 328240 - DNA, 20 bp, Artificial Sequence
  Description of Artificial Sequence: Synthetic oligonucleotide
  Target: LAMA2; (+) strand; PAM type: YTN; PAM sequence: CTT
ggtatctcattgtggtttta

SEQ ID NO: 328241 - DNA, 20 bp, Artificial Sequence
  Description of Artificial Sequence: Synthetic oligonucleotide
  Target: LAMA2; (+) strand; PAM type: YTN; PAM sequence: TTG
gtatctcattgtggttttaa

SEQ ID NO: 328242 - DNA, 20 bp, Artificial Sequence
  Description of Artificial Sequence: Synthetic oligonucleotide
  Target: LAMA2; (+) strand; PAM type: YTN; PAM sequence: CTC
attgtggttttaatttgcat

SEQ ID NO: 328243 - DNA, 20 bp, Artificial Sequence
  Description of Artificial Sequence: Synthetic oligonucleotide
  Target: LAMA2; (+) strand; PAM type: YTN; PAM sequence: TTG
tggttttaatttgcatctcc

SEQ ID NO: 328244 - DNA, 20 bp, Artificial Sequence
  Description of Artificial Sequence: Synthetic oligonucleotide
  Target: LAMA2; (+) strand; PAM type: YTN; PAM sequence: TTT
taatttgcatctccctgatg

SEQ ID NO: 328245 - DNA, 20 bp, Artificial Sequence
  Description of Artificial Sequence: Synthetic oligonucleotide
  Target: LAMA2; (+) strand; PAM type: YTN; PAM sequence: TTT
aatttgcatctccctgatga

SEQ ID NO: 328246 - DNA, 20 bp, Artificial Sequence
  Description of Artificial Sequence: Synthetic oligonucleotide
  Target: LAMA2; (+) strand; PAM type: YTN; PAM sequence: TTA
atttgcatctccctgatgat

SEQ ID NO: 328247 - DNA, 20 bp, Artificial Sequence
  Description of Artificial Sequence: Synthetic oligonucleotide
  Target: LAMA2; (+) strand; PAM type: YTN; PAM sequence: TTT
gcatctccctgatgattagt

SEQ ID NO: 328248 - DNA, 20 bp, Artificial Sequence
  Description of Artificial Sequence: Synthetic oligonucleotide
  Target: LAMA2; (+) strand; PAM type: YTN; PAM sequence: TTG
catctccctgatgattagtg

SEQ ID NO: 328249 - DNA, 20 bp, Artificial Sequence
  Description of Artificial Sequence: Synthetic oligonucleotide
  Target: LAMA2; (+) strand; PAM type: YTN; PAM sequence: CTC
cctgatgattagtgatactg

SEQ ID NO: 328250 - DNA, 20 bp, Artificial Sequence
  Description of Artificial Sequence: Synthetic oligonucleotide
  Target: LAMA2; (+) strand; PAM type: YTN; PAM sequence: CTG
atgattagtgatactgagca

SEQ ID NO: 328251 - DNA, 20 bp, Artificial Sequence
  Description of Artificial Sequence: Synthetic oligonucleotide
  Target: LAMA2; (+) strand; PAM type: YTN; PAM sequence: TTA
gtgatactgagcattttttc

SEQ ID NO: 328252 - DNA, 20 bp, Artificial Sequence
  Description of Artificial Sequence: Synthetic oligonucleotide
  Target: LAMA2; (+) strand; PAM type: YTN; PAM sequence: CTG
agcattttttcatttgcttt

SEQ ID NO: 328253 - DNA, 20 bp, Artificial Sequence
  Description of Artificial Sequence: Synthetic oligonucleotide
  Target: LAMA2; (+) strand; PAM type: YTN; PAM sequence: TTT
tttcatttgctttttggcca

SEQ ID NO: 328254 - DNA, 20 bp, Artificial Sequence
  Description of Artificial Sequence: Synthetic oligonucleotide
  Target: LAMA2; (+) strand; PAM type: YTN; PAM sequence: TTT
ttcatttgctttttggccac

SEQ ID NO: 328255 - DNA, 20 bp, Artificial Sequence
  Description of Artificial Sequence: Synthetic oligonucleotide
  Target: LAMA2; (+) strand; PAM type: YTN; PAM sequence: TTT
tcatttgctttttggccact

SEQ ID NO: 328256 - DNA, 20 bp, Artificial Sequence
  Description of Artificial Sequence: Synthetic oligonucleotide
  Target: LAMA2; (+) strand; PAM type: YTN; PAM sequence: TTT
catttgctttttggccactt

SEQ ID NO: 328257 - DNA, 20 bp, Artificial Sequence
  Description of Artificial Sequence: Synthetic oligonucleotide
  Target: LAMA2; (+) strand; PAM type: YTN; PAM sequence: TTC
atttgctttttggccacttg

SEQ ID NO: 328258 - DNA, 20 bp, Artificial Sequence
  Description of Artificial Sequence: Synthetic oligonucleotide
  Target: LAMA2; (+) strand; PAM type: YTN; PAM sequence: TTT
gctttttggccacttgtatg

SEQ ID NO: 328259 - DNA, 20 bp, Artificial Sequence
  Description of Artificial Sequence: Synthetic oligonucleotide
  Target: LAMA2; (+) strand; PAM type: YTN; PAM sequence: TTG
ctttttggccacttgtatgt

SEQ ID NO: 328260 - DNA, 20 bp, Artificial Sequence
  Description of Artificial Sequence: Synthetic oligonucleotide
  Target: LAMA2; (+) strand; PAM type: YTN; PAM sequence: CTT
tttggccacttgtatgtctt

SEQ ID NO: 328261 - DNA, 20 bp, Artificial Sequence
  Description of Artificial Sequence: Synthetic oligonucleotide
  Target: LAMA2; (+) strand; PAM type: YTN; PAM sequence: TTT
ttggccacttgtatgtcttt

SEQ ID NO: 328262 - DNA, 20 bp, Artificial Sequence
  Description of Artificial Sequence: Synthetic oligonucleotide
  Target: LAMA2; (+) strand; PAM type: YTN; PAM sequence: TTT
tggccacttgtatgtctttt

SEQ ID NO: 328263 - DNA, 20 bp, Artificial Sequence
  Description of Artificial Sequence: Synthetic oligonucleotide
  Target: LAMA2; (+) strand; PAM type: YTN; PAM sequence: TTT
ggccacttgtatgtcttttt

SEQ ID NO: 328264 - DNA, 20 bp, Artificial Sequence
  Description of Artificial Sequence: Synthetic oligonucleotide
  Target: LAMA2; (+) strand; PAM type: YTN; PAM sequence: TTG
gccacttgtatgtctttttc

SEQ ID NO: 328265 - DNA, 20 bp, Artificial Sequence
  Description of Artificial Sequence: Synthetic oligonucleotide
  Target: LAMA2; (+) strand; PAM type: YTN; PAM sequence: CTT
gtatgtctttttcttttctt

SEQ ID NO: 328266 - DNA, 20 bp, Artificial Sequence
  Description of Artificial Sequence: Synthetic oligonucleotide
  Target: LAMA2; (+) strand; PAM type: YTN; PAM sequence: TTG
tatgtctttttcttttcttt

SEQ ID NO: 328267 - DNA, 20 bp, Artificial Sequence
  Description of Artificial Sequence: Synthetic oligonucleotide
  Target: LAMA2; (+) strand; PAM type: YTN; PAM sequence: CTT
tttcttttcttttcttttct

SEQ ID NO: 328268 - DNA, 20 bp, Artificial Sequence
  Description of Artificial Sequence: Synthetic oligonucleotide
  Target: LAMA2; (+) strand; PAM type: YTN; PAM sequence: TTT
ttcttttcttttcttttctt

SEQ ID NO: 328269 - DNA, 20 bp, Artificial Sequence
  Description of Artificial Sequence: Synthetic oligonucleotide
  Target: LAMA2; (+) strand; PAM type: YTN; PAM sequence: TTT
tcttttcttttcttttcttt

SEQ ID NO: 328270 - DNA, 20 bp, Artificial Sequence
  Description of Artificial Sequence: Synthetic oligonucleotide
  Target: LAMA2; (+) strand; PAM type: YTN; PAM sequence: TTT
cttttcttttcttttctttt

SEQ ID NO: 328271 - DNA, 20 bp, Artificial Sequence
  Description of Artificial Sequence: Synthetic oligonucleotide
  Target: LAMA2; (+) strand; PAM type: YTN; PAM sequence: TTC
ttttcttttcttttcttttt

SEQ ID NO: 328272 - DNA, 20 bp, Artificial Sequence
  Description of Artificial Sequence: Synthetic oligonucleotide
  Target: LAMA2; (+) strand; PAM type: YTN; PAM sequence: CTT
ttcttttcttttcttttttt

SEQ ID NO: 328273 - DNA, 20 bp, Artificial Sequence
  Description of Artificial Sequence: Synthetic oligonucleotide
  Target: LAMA2; (+) strand; PAM type: YTN; PAM sequence: TTT
tcttttcttttctttttttt

SEQ ID NO: 328274 - DNA, 20 bp, Artificial Sequence
  Description of Artificial Sequence: Synthetic oligonucleotide
  Target: LAMA2; (+) strand; PAM type: YTN; PAM sequence: TTT
cttttcttttcttttttttt

SEQ ID NO: 328275 - DNA, 20 bp, Artificial Sequence
  Description of Artificial Sequence: Synthetic oligonucleotide
  Target: LAMA2; (+) strand; PAM type: YTN; PAM sequence: TTC
ttttcttttctttttttttt

SEQ ID NO: 328276 - DNA, 20 bp, Artificial Sequence
  Description of Artificial Sequence: Synthetic oligonucleotide
  Target: LAMA2; (+) strand; PAM type: YTN; PAM sequence: CTT
ttcttttctttttttttttt

SEQ ID NO: 328277 - DNA, 20 bp, Artificial Sequence
  Description of Artificial Sequence: Synthetic oligonucleotide
  Target: LAMA2; (+) strand; PAM type: YTN; PAM sequence: TTT
tcttttcttttttttttttt

SEQ ID NO: 328278 - DNA, 20 bp, Artificial Sequence
  Description of Artificial Sequence: Synthetic oligonucleotide
  Target: LAMA2; (+) strand; PAM type: YTN; PAM sequence: TTT
cttttctttttttttttttt

SEQ ID NO: 328279 - DNA, 20 bp, Artificial Sequence
  Description of Artificial Sequence: Synthetic oligonucleotide
  Target: LAMA2; (+) strand; PAM type: YTN; PAM sequence: TTC
ttttctttttttttttttta

SEQ ID NO: 328280 - DNA, 20 bp, Artificial Sequence
  Description of Artificial Sequence: Synthetic oligonucleotide
  Target: LAMA2; (+) strand; PAM type: YTN; PAM sequence: CTT
ttcttttttttttttttaga

SEQ ID NO: 328281 - DNA, 20 bp, Artificial Sequence
  Description of Artificial Sequence: Synthetic oligonucleotide
  Target: LAMA2; (+) strand; PAM type: YTN; PAM sequence: TTT
tcttttttttttttttagaa

SEQ ID NO: 328282 - DNA, 20 bp, Artificial Sequence
  Description of Artificial Sequence: Synthetic oligonucleotide
  Target: LAMA2; (+) strand; PAM type: YTN; PAM sequence: TTT
cttttttttttttttagaag

SEQ ID NO: 328283 - DNA, 20 bp, Artificial Sequence
  Description of Artificial Sequence: Synthetic oligonucleotide
  Target: LAMA2; (+) strand; PAM type: YTN; PAM sequence: TTC
ttttttttttttttagaagt

SEQ ID NO: 328284 - DNA, 20 bp, Artificial Sequence
  Description of Artificial Sequence: Synthetic oligonucleotide
  Target: LAMA2; (+) strand; PAM type: YTN; PAM sequence: CTT
ttttttttttttagaagtgt

SEQ ID NO: 328285 - DNA, 20 bp, Artificial Sequence
  Description of Artificial Sequence: Synthetic oligonucleotide
  Target: LAMA2; (+) strand; PAM type: YTN; PAM sequence: TTT
tttttttttttagaagtgtc

SEQ ID NO: 328286 - DNA, 20 bp, Artificial Sequence
  Description of Artificial Sequence: Synthetic oligonucleotide
  Target: LAMA2; (+) strand; PAM type: YTN; PAM sequence: TTT
ttttttttttagaagtgtct

SEQ ID NO: 328287 - DNA, 20 bp, Artificial Sequence
  Description of Artificial Sequence: Synthetic oligonucleotide
  Target: LAMA2; (+) strand; PAM type: YTN; PAM sequence: TTT
tttttttttagaagtgtctg

SEQ ID NO: 328288 - DNA, 20 bp, Artificial Sequence
  Description of Artificial Sequence: Synthetic oligonucleotide
  Target: LAMA2; (+) strand; PAM type: YTN; PAM sequence: TTT
ttttttttagaagtgtctgt

SEQ ID NO: 328289 - DNA, 20 bp, Artificial Sequence
  Description of Artificial Sequence: Synthetic oligonucleotide
  Target: LAMA2; (+) strand; PAM type: YTN; PAM sequence: TTT
tttttttagaagtgtctgtt

SEQ ID NO: 328290 - DNA, 20 bp, Artificial Sequence
  Description of Artificial Sequence: Synthetic oligonucleotide
  Target: LAMA2; (+) strand; PAM type: YTN; PAM sequence: TTT
ttttttagaagtgtctgtta

SEQ ID NO: 328291 - DNA, 20 bp, Artificial Sequence
  Description of Artificial Sequence: Synthetic oligonucleotide
  Target: LAMA2; (+) strand; PAM type: YTN; PAM sequence: TTT
tttttagaagtgtctgttaa

SEQ ID NO: 328292 - DNA, 20 bp, Artificial Sequence
  Description of Artificial Sequence: Synthetic oligonucleotide
  Target: LAMA2; (+) strand; PAM type: YTN; PAM sequence: TTT
ttttagaagtgtctgttaat

SEQ ID NO: 328293 - DNA, 20 bp, Artificial Sequence
  Description of Artificial Sequence: Synthetic oligonucleotide
  Target: LAMA2; (+) strand; PAM type: YTN; PAM sequence: TTT
tttagaagtgtctgttaatt

SEQ ID NO: 328294 - DNA, 20 bp, Artificial Sequence
  Description of Artificial Sequence: Synthetic oligonucleotide
  Target: LAMA2; (+) strand; PAM type: YTN; PAM sequence: TTT
ttagaagtgtctgttaattt

SEQ ID NO: 328295 - DNA, 20 bp, Artificial Sequence
  Description of Artificial Sequence: Synthetic oligonucleotide
  Target: LAMA2; (+) strand; PAM type: YTN; PAM sequence: TTT
tagaagtgtctgttaatttc

SEQ ID NO: 328296 - DNA, 20 bp, Artificial Sequence
  Description of Artificial Sequence: Synthetic oligonucleotide
  Target: LAMA2; (+) strand; PAM type: YTN; PAM sequence: TTT
agaagtgtctgttaatttcc

SEQ ID NO: 328297 - DNA, 20 bp, Artificial Sequence
  Description of Artificial Sequence: Synthetic oligonucleotide
  Target: LAMA2; (+) strand; PAM type: YTN; PAM sequence: TTA
gaagtgtctgttaatttcct

SEQ ID NO: 328298 - DNA, 20 bp, Artificial Sequence
  Description of Artificial Sequence: Synthetic oligonucleotide
  Target: LAMA2; (+) strand; PAM type: YTN; PAM sequence: CTG
ttaatttcctttgcccactt

SEQ ID NO: 328299 - DNA, 20 bp, Artificial Sequence
  Description of Artificial Sequence: Synthetic oligonucleotide
  Target: LAMA2; (+) strand; PAM type: YTN; PAM sequence: TTA
atttcctttgcccactttta

SEQ ID NO: 328300 - DNA, 20 bp, Artificial Sequence
  Description of Artificial Sequence: Synthetic oligonucleotide
  Target: LAMA2; (+) strand; PAM type: YTN; PAM sequence: TTT
cctttgcccacttttaatgg

SEQ ID NO: 328301 - DNA, 20 bp, Artificial Sequence
  Description of Artificial Sequence: Synthetic oligonucleotide
  Target: LAMA2; (+) strand; PAM type: YTN; PAM sequence: TTC
ctttgcccacttttaatgga

SEQ ID NO: 328302 - DNA, 20 bp, Artificial Sequence
  Description of Artificial Sequence: Synthetic oligonucleotide
  Target: LAMA2; (+) strand; PAM type: YTN; PAM sequence: CTT
tgcccacttttaatggagct

SEQ ID NO: 328303 - DNA, 20 bp, Artificial Sequence
  Description of Artificial Sequence: Synthetic oligonucleotide
  Target: LAMA2; (+) strand; PAM type: YTN; PAM sequence: TTT
gcccacttttaatggagcta

SEQ ID NO: 328304 - DNA, 20 bp, Artificial Sequence
  Description of Artificial Sequence: Synthetic oligonucleotide
  Target: LAMA2; (+) strand; PAM type: YTN; PAM sequence: TTG
cccacttttaatggagctat

SEQ ID NO: 328305 - DNA, 20 bp, Artificial Sequence
  Description of Artificial Sequence: Synthetic oligonucleotide
  Target: LAMA2; (+) strand; PAM type: YTN; PAM sequence: CTT
ttaatggagctatttgtttt

SEQ ID NO: 328306 - DNA, 20 bp, Artificial Sequence
  Description of Artificial Sequence: Synthetic oligonucleotide
  Target: LAMA2; (+) strand; PAM type: YTN; PAM sequence: TTT
taatggagctatttgttttt

SEQ ID NO: 328307 - DNA, 20 bp, Artificial Sequence
  Description of Artificial Sequence: Synthetic oligonucleotide
  Target: LAMA2; (+) strand; PAM type: YTN; PAM sequence: TTT
aatggagctatttgtttttt

SEQ ID NO: 328308 - DNA, 20 bp, Artificial Sequence
  Description of Artificial Sequence: Synthetic oligonucleotide
  Target: LAMA2; (+) strand; PAM type: YTN; PAM sequence: TTA
atggagctatttgttttttt

SEQ ID NO: 328309 - DNA, 20 bp, Artificial Sequence
  Description of Artificial Sequence: Synthetic oligonucleotide
  Target: LAMA2; (+) strand; PAM type: YTN; PAM sequence: CTA
tttgtttttttcttgttgat

SEQ ID NO: 328310 - DNA, 20 bp, Artificial Sequence
  Description of Artificial Sequence: Synthetic oligonucleotide
  Target: LAMA2; (+) strand; PAM type: YTN; PAM sequence: TTT
gtttttttcttgttgattta

SEQ ID NO: 328311 - DNA, 20 bp, Artificial Sequence
  Description of Artificial Sequence: Synthetic oligonucleotide
  Target: LAMA2; (+) strand; PAM type: YTN; PAM sequence: TTG
tttttttcttgttgatttaa

SEQ ID NO: 328312 - DNA, 20 bp, Artificial Sequence
  Description of Artificial Sequence: Synthetic oligonucleotide
  Target: LAMA2; (+) strand; PAM type: YTN; PAM sequence: TTT
ttttcttgttgatttaagtt

SEQ ID NO: 328313 - DNA, 20 bp, Artificial Sequence
  Description of Artificial Sequence: Synthetic oligonucleotide
  Target: LAMA2; (+) strand; PAM type: YTN; PAM sequence: TTT
tttcttgttgatttaagttt

SEQ ID NO: 328314 - DNA, 20 bp, Artificial Sequence
  Description of Artificial Sequence: Synthetic oligonucleotide
  Target: LAMA2; (+) strand; PAM type: YTN; PAM sequence: TTT
ttcttgttgatttaagtttc

SEQ ID NO: 328315 - DNA, 20 bp, Artificial Sequence
  Description of Artificial Sequence: Synthetic oligonucleotide
  Target: LAMA2; (+) strand; PAM type: YTN; PAM sequence: TTT
tcttgttgatttaagtttct

SEQ ID NO: 328316 - DNA, 20 bp, Artificial Sequence
  Description of Artificial Sequence: Synthetic oligonucleotide
  Target: LAMA2; (+) strand; PAM type: YTN; PAM sequence: TTT
cttgttgatttaagtttctt

SEQ ID NO: 328317 - DNA, 20 bp, Artificial Sequence
  Description of Artificial Sequence: Synthetic oligonucleotide
  Target: LAMA2; (+) strand; PAM type: YTN; PAM sequence: TTC
ttgttgatttaagtttctta

SEQ ID NO: 328318 - DNA, 20 bp, Artificial Sequence
  Description of Artificial Sequence: Synthetic oligonucleotide
  Target: LAMA2; (+) strand; PAM type: YTN; PAM sequence: CTT
gttgatttaagtttcttata

SEQ ID NO: 328319 - DNA, 20 bp, Artificial Sequence
  Description of Artificial Sequence: Synthetic oligonucleotide
  Target: LAMA2; (+) strand; PAM type: YTN; PAM sequence: TTG
ttgatttaagtttcttatag

SEQ ID NO: 328320 - DNA, 20 bp, Artificial Sequence
  Description of Artificial Sequence: Synthetic oligonucleotide
  Target: LAMA2; (+) strand; PAM type: YTN; PAM sequence: TTG
atttaagtttcttatagttt

SEQ ID NO: 328321 - DNA, 20 bp, Artificial Sequence
  Description of Artificial Sequence: Synthetic oligonucleotide
  Target: LAMA2; (+) strand; PAM type: YTN; PAM sequence: TTT
aagtttcttatagtttctgg

SEQ ID NO: 328322 - DNA, 20 bp, Artificial Sequence
  Description of Artificial Sequence: Synthetic oligonucleotide
  Target: LAMA2; (+) strand; PAM type: YTN; PAM sequence: TTA
agtttcttatagtttctgga

SEQ ID NO: 328323 - DNA, 20 bp, Artificial Sequence
  Description of Artificial Sequence: Synthetic oligonucleotide
  Target: LAMA2; (+) strand; PAM type: YTN; PAM sequence: TTT
cttatagtttctggatatta

SEQ ID NO: 328324 - DNA, 20 bp, Artificial Sequence
  Description of Artificial Sequence: Synthetic oligonucleotide
  Target: LAMA2; (+) strand; PAM type: YTN; PAM sequence: TTC
ttatagtttctggatattag

SEQ ID NO: 328325 - DNA, 20 bp, Artificial Sequence
  Description of Artificial Sequence: Synthetic oligonucleotide
  Target: LAMA2; (+) strand; PAM type: YTN; PAM sequence: CTT
atagtttctggatattagtc

SEQ ID NO: 328326 - DNA, 20 bp, Artificial Sequence
  Description of Artificial Sequence: Synthetic oligonucleotide
  Target: LAMA2; (+) strand; PAM type: YTN; PAM sequence: TTA
tagtttctggatattagtca

SEQ ID NO: 328327 - DNA, 20 bp, Artificial Sequence
  Description of Artificial Sequence: Synthetic oligonucleotide
  Target: LAMA2; (+) strand; PAM type: YTN; PAM sequence: TTT
ctggatattagtcatttgtc

SEQ ID NO: 328328 - DNA, 20 bp, Artificial Sequence
  Description of Artificial Sequence: Synthetic oligonucleotide
  Target: LAMA2; (+) strand; PAM type: YTN; PAM sequence: TTC
tggatattagtcatttgtca

SEQ ID NO: 328329 - DNA, 20 bp, Artificial Sequence
  Description of Artificial Sequence: Synthetic oligonucleotide
  Target: LAMA2; (+) strand; PAM type: YTN; PAM sequence: CTG
gatattagtcatttgtcaga

SEQ ID NO: 328330 - DNA, 20 bp, Artificial Sequence
  Description of Artificial Sequence: Synthetic oligonucleotide
  Target: LAMA2; (+) strand; PAM type: YTN; PAM sequence: TTA
gtcatttgtcagatgcacag

SEQ ID NO: 328331 - DNA, 20 bp, Artificial Sequence
  Description of Artificial Sequence: Synthetic oligonucleotide
  Target: LAMA2; (+) strand; PAM type: YTN; PAM sequence: TTT
gtcagatgcacagttagcaa

SEQ ID NO: 328332 - DNA, 20 bp, Artificial Sequence
  Description of Artificial Sequence: Synthetic oligonucleotide
  Target: LAMA2; (+) strand; PAM type: YTN; PAM sequence: TTG
tcagatgcacagttagcaaa

SEQ ID NO: 328333 - DNA, 20 bp, Artificial Sequence
  Description of Artificial Sequence: Synthetic oligonucleotide
  Target: LAMA2; (+) strand; PAM type: YTN; PAM sequence: TTA
gcaaatattttctgtcattc

SEQ ID NO: 328334 - DNA, 20 bp, Artificial Sequence
  Description of Artificial Sequence: Synthetic oligonucleotide
  Target: LAMA2; (+) strand; PAM type: YTN; PAM sequence: TTT
tctgtcattctgcagttgtc

SEQ ID NO: 328335 - DNA, 20 bp, Artificial Sequence
  Description of Artificial Sequence: Synthetic oligonucleotide
  Target: LAMA2; (+) strand; PAM type: YTN; PAM sequence: TTT
ctgtcattctgcagttgtct

SEQ ID NO: 328336 - DNA, 20 bp, Artificial Sequence
  Description of Artificial Sequence: Synthetic oligonucleotide
  Target: LAMA2; (+) strand; PAM type: YTN; PAM sequence: TTC
tgtcattctgcagttgtctg

SEQ ID NO: 328337 - DNA, 20 bp, Artificial Sequence
  Description of Artificial Sequence: Synthetic oligonucleotide
  Target: LAMA2; (+) strand; PAM type: YTN; PAM sequence: CTG
tcattctgcagttgtctgtt

SEQ ID NO: 328338 - DNA, 20 bp, Artificial Sequence
  Description of Artificial Sequence: Synthetic oligonucleotide
  Target: LAMA2; (+) strand; PAM type: YTN; PAM sequence: TTC
tgcagttgtctgtttatttt

SEQ ID NO: 328339 - DNA, 20 bp, Artificial Sequence
  Description of Artificial Sequence: Synthetic oligonucleotide
  Target: LAMA2; (+) strand; PAM type: YTN; PAM sequence: CTG
cagttgtctgtttattttgt

SEQ ID NO: 328340 - DNA, 20 bp, Artificial Sequence
  Description of Artificial Sequence: Synthetic oligonucleotide
  Target: LAMA2; (+) strand; PAM type: YTN; PAM sequence: TTG
tctgtttattttgttaattg

SEQ ID NO: 328341 - DNA, 20 bp, Artificial Sequence
  Description of Artificial Sequence: Synthetic oligonucleotide
  Target: LAMA2; (+) strand; PAM type: YTN; PAM sequence: CTG
tttattttgttaattgttta

SEQ ID NO: 328342 - DNA, 20 bp, Artificial Sequence
  Description of Artificial Sequence: Synthetic oligonucleotide
  Target: LAMA2; (+) strand; PAM type: YTN; PAM sequence: TTT
attttgttaattgtttattt

SEQ ID NO: 328343 - DNA, 20 bp, Artificial Sequence
  Description of Artificial Sequence: Synthetic oligonucleotide
  Target: LAMA2; (+) strand; PAM type: YTN; PAM sequence: TTA
ttttgttaattgtttatttt

SEQ ID NO: 328344 - DNA, 20 bp, Artificial Sequence
  Description of Artificial Sequence: Synthetic oligonucleotide
  Target: LAMA2; (+) strand; PAM type: YTN; PAM sequence: TTT
tgttaattgtttattttgct

SEQ ID NO: 328345 - DNA, 20 bp, Artificial Sequence
  Description of Artificial Sequence: Synthetic oligonucleotide
  Target: LAMA2; (+) strand; PAM type: YTN; PAM sequence: TTT
gttaattgtttattttgctg

SEQ ID NO: 328346 - DNA, 20 bp, Artificial Sequence
  Description of Artificial Sequence: Synthetic oligonucleotide
  Target: LAMA2; (+) strand; PAM type: YTN; PAM sequence: TTG
ttaattgtttattttgctgt

SEQ ID NO: 328347 - DNA, 20 bp, Artificial Sequence
  Description of Artificial Sequence: Synthetic oligonucleotide
  Target: LAMA2; (+) strand; PAM type: YTN; PAM sequence: TTA
attgtttattttgctgtgca

SEQ ID NO: 328348 - DNA, 20 bp, Artificial Sequence
  Description of Artificial Sequence: Synthetic oligonucleotide
  Target: LAMA2; (+) strand; PAM type: YTN; PAM sequence: TTG
tttattttgctgtgcaaacg

SEQ ID NO: 328349 - DNA, 20 bp, Artificial Sequence
  Description of Artificial Sequence: Synthetic oligonucleotide
  Target: LAMA2; (+) strand; PAM type: YTN; PAM sequence: TTT
attttgctgtgcaaacgccg

SEQ ID NO: 328350 - DNA, 20 bp, Artificial Sequence
  Description of Artificial Sequence: Synthetic oligonucleotide
  Target: LAMA2; (+) strand; PAM type: YTN; PAM sequence: TTA
ttttgctgtgcaaacgccgt

SEQ ID NO: 328351 - DNA, 20 bp, Artificial Sequence
  Description of Artificial Sequence: Synthetic oligonucleotide
  Target: LAMA2; (+) strand; PAM type: YTN; PAM sequence: TTT
tgctgtgcaaacgccgttta

SEQ ID NO: 328352 - DNA, 20 bp, Artificial Sequence
  Description of Artificial Sequence: Synthetic oligonucleotide
  Target: LAMA2; (+) strand; PAM type: YTN; PAM sequence: TTT
gctgtgcaaacgccgtttag

SEQ ID NO: 328353 - DNA, 20 bp, Artificial Sequence
  Description of Artificial Sequence: Synthetic oligonucleotide
  Target: LAMA2; (+) strand; PAM type: YTN; PAM sequence: TTG
ctgtgcaaacgccgtttagt

SEQ ID NO: 328354 - DNA, 20 bp, Artificial Sequence
  Description of Artificial Sequence: Synthetic oligonucleotide
  Target: LAMA2; (+) strand; PAM type: YTN; PAM sequence: CTG
tgcaaacgccgtttagttta

SEQ ID NO: 328355 - DNA, 20 bp, Artificial Sequence
  Description of Artificial Sequence: Synthetic oligonucleotide
  Target: LAMA2; (+) strand; PAM type: YTN; PAM sequence: TTT
agtttaattaagtcccattt

SEQ ID NO: 328356 - DNA, 20 bp, Artificial Sequence
  Description of Artificial Sequence: Synthetic oligonucleotide
  Target: LAMA2; (+) strand; PAM type: YTN; PAM sequence: TTA
gtttaattaagtcccatttg

SEQ ID NO: 328357 - DNA, 20 bp, Artificial Sequence
  Description of Artificial Sequence: Synthetic oligonucleotide
  Target: LAMA2; (+) strand; PAM type: YTN; PAM sequence: TTT
aattaagtcccatttgttca

SEQ ID NO: 328358 - DNA, 20 bp, Artificial Sequence
  Description of Artificial Sequence: Synthetic oligonucleotide
  Target: LAMA2; (+) strand; PAM type: YTN; PAM sequence: TTA
attaagtcccatttgttcat

SEQ ID NO: 328359 - DNA, 20 bp, Artificial Sequence
  Description of Artificial Sequence: Synthetic oligonucleotide
  Target: LAMA2; (+) strand; PAM type: YTN; PAM sequence: TTA
agtcccatttgttcattttt

SEQ ID NO: 328360 - DNA, 20 bp, Artificial Sequence
  Description of Artificial Sequence: Synthetic oligonucleotide
  Target: LAMA2; (+) strand; PAM type: YTN; PAM sequence: TTT
gttcattttttttttttttt

SEQ ID NO: 328361 - DNA, 20 bp, Artificial Sequence
  Description of Artificial Sequence: Synthetic oligonucleotide
  Target: LAMA2; (+) strand; PAM type: YTN; PAM sequence: TTG
ttcatttttttttttttttg

SEQ ID NO: 328362 - DNA, 20 bp, Artificial Sequence
  Description of Artificial Sequence: Synthetic oligonucleotide
  Target: LAMA2; (+) strand; PAM type: YTN; PAM sequence: TTC
atttttttttttttttgcat

SEQ ID NO: 328363 - DNA, 20 bp, Artificial Sequence
  Description of Artificial Sequence: Synthetic oligonucleotide
  Target: LAMA2; (+) strand; PAM type: YTN; PAM sequence: TTT
ttttttttttttgcatttgc

SEQ ID NO: 328364 - DNA, 20 bp, Artificial Sequence
  Description of Artificial Sequence: Synthetic oligonucleotide
  Target: LAMA2; (+) strand; PAM type: YTN; PAM sequence: TTT
tttttttttttgcatttgct

SEQ ID NO: 328365 - DNA, 20 bp, Artificial Sequence
  Description of Artificial Sequence: Synthetic oligonucleotide
  Target: LAMA2; (+) strand; PAM type: YTN; PAM sequence: TTT
ttttttttttgcatttgctt

SEQ ID NO: 328366 - DNA, 20 bp, Artificial Sequence
  Description of Artificial Sequence: Synthetic oligonucleotide
  Target: LAMA2; (+) strand; PAM type: YTN; PAM sequence: TTT
tttttttttgcatttgcttt

SEQ ID NO: 328367 - DNA, 20 bp, Artificial Sequence
  Description of Artificial Sequence: Synthetic oligonucleotide
  Target: LAMA2; (+) strand; PAM type: YTN; PAM sequence: TTT
ttttttttgcatttgctttt

SEQ ID NO: 328368 - DNA, 20 bp, Artificial Sequence
  Description of Artificial Sequence: Synthetic oligonucleotide
  Target: LAMA2; (+) strand; PAM type: YTN; PAM sequence: TTT
tttttttgcatttgcttttg

SEQ ID NO: 328369 - DNA, 20 bp, Artificial Sequence
  Description of Artificial Sequence: Synthetic oligonucleotide
  Target: LAMA2; (+) strand; PAM type: YTN; PAM sequence: TTT
ttttttgcatttgcttttgc

SEQ ID NO: 328370 - DNA, 20 bp, Artificial Sequence
  Description of Artificial Sequence: Synthetic oligonucleotide
  Target: LAMA2; (+) strand; PAM type: YTN; PAM sequence: TTT
tttttgcatttgcttttgca

SEQ ID NO: 328371 - DNA, 20 bp, Artificial Sequence
  Description of Artificial Sequence: Synthetic oligonucleotide
  Target: LAMA2; (+) strand; PAM type: YTN; PAM sequence: TTT
ttttgcatttgcttttgcaa

SEQ ID NO: 328372 - DNA, 20 bp, Artificial Sequence
  Description of Artificial Sequence: Synthetic oligonucleotide
  Target: LAMA2; (+) strand; PAM type: YTN; PAM sequence: TTT
tttgcatttgcttttgcaat

SEQ ID NO: 328373 - DNA, 20 bp, Artificial Sequence
  Description of Artificial Sequence: Synthetic oligonucleotide
  Target: LAMA2; (+) strand; PAM type: YTN; PAM sequence: TTT
ttgcatttgcttttgcaatt

SEQ ID NO: 328374 - DNA, 20 bp, Artificial Sequence
  Description of Artificial Sequence: Synthetic oligonucleotide
  Target: LAMA2; (+) strand; PAM type: YTN; PAM sequence: TTT
tgcatttgcttttgcaatta

SEQ ID NO: 328375 - DNA, 20 bp, Artificial Sequence
  Description of Artificial Sequence: Synthetic oligonucleotide
  Target: LAMA2; (+) strand; PAM type: YTN; PAM sequence: TTT
gcatttgcttttgcaattag

SEQ ID NO: 328376 - DNA, 20 bp, Artificial Sequence
  Description of Artificial Sequence: Synthetic oligonucleotide
  Target: LAMA2; (+) strand; PAM type: YTN; PAM sequence: TTG
catttgcttttgcaattagt

SEQ ID NO: 328377 - DNA, 20 bp, Artificial Sequence
  Description of Artificial Sequence: Synthetic oligonucleotide
  Target: LAMA2; (+) strand; PAM type: YTN; PAM sequence: TTT
gcttttgcaattagtcttag

SEQ ID NO: 328378 - DNA, 20 bp, Artificial Sequence
  Description of Artificial Sequence: Synthetic oligonucleotide
  Target: LAMA2; (+) strand; PAM type: YTN; PAM sequence: TTG
cttttgcaattagtcttagt

SEQ ID NO: 328379 - DNA, 20 bp, Artificial Sequence
  Description of Artificial Sequence: Synthetic oligonucleotide
  Target: LAMA2; (+) strand; PAM type: YTN; PAM sequence: CTT
ttgcaattagtcttagtcat

SEQ ID NO: 328380 - DNA, 20 bp, Artificial Sequence
  Description of Artificial Sequence: Synthetic oligonucleotide
  Target: LAMA2; (+) strand; PAM type: YTN; PAM sequence: TTT
tgcaattagtcttagtcatt

SEQ ID NO: 328381 - DNA, 20 bp, Artificial Sequence
  Description of Artificial Sequence: Synthetic oligonucleotide
  Target: LAMA2; (+) strand; PAM type: YTN; PAM sequence: TTT
gcaattagtcttagtcatta

SEQ ID NO: 328382 - DNA, 20 bp, Artificial Sequence
  Description of Artificial Sequence: Synthetic oligonucleotide
  Target: LAMA2; (+) strand; PAM type: YTN; PAM sequence: TTG
caattagtcttagtcattaa

SEQ ID NO: 328383 - DNA, 20 bp, Artificial Sequence
  Description of Artificial Sequence: Synthetic oligonucleotide
  Target: LAMA2; (+) strand; PAM type: YTN; PAM sequence: TTA
gtcttagtcattaattcttt

SEQ ID NO: 328384 - DNA, 20 bp, Artificial Sequence
  Description of Artificial Sequence: Synthetic oligonucleotide
  Target: LAMA2; (+) strand; PAM type: YTN; PAM sequence: CTT
agtcattaattctttaccta

SEQ ID NO: 328385 - DNA, 20 bp, Artificial Sequence
  Description of Artificial Sequence: Synthetic oligonucleotide
  Target: LAMA2; (+) strand; PAM type: YTN; PAM sequence: TTA
gtcattaattctttacctag

SEQ ID NO: 328386 - DNA, 20 bp, Artificial Sequence
  Description of Artificial Sequence: Synthetic oligonucleotide
  Target: LAMA2; (+) strand; PAM type: YTN; PAM sequence: TTA
attctttacctaggccaatg

SEQ ID NO: 328387 - DNA, 20 bp, Artificial Sequence
  Description of Artificial Sequence: Synthetic oligonucleotide
  Target: LAMA2; (+) strand; PAM type: YTN; PAM sequence: TTC
tttacctaggccaatgtcga

SEQ ID NO: 328388 - DNA, 20 bp, Artificial Sequence
  Description of Artificial Sequence: Synthetic oligonucleotide
  Target: LAMA2; (+) strand; PAM type: YTN; PAM sequence: CTT
tacctaggccaatgtcgaga

SEQ ID NO: 328389 - DNA, 20 bp, Artificial Sequence
  Description of Artificial Sequence: Synthetic oligonucleotide
  Target: LAMA2; (+) strand; PAM type: YTN; PAM sequence: TTT
acctaggccaatgtcgagaa

SEQ ID NO: 328390 - DNA, 20 bp, Artificial Sequence
  Description of Artificial Sequence: Synthetic oligonucleotide
  Target: LAMA2; (+) strand; PAM type: YTN; PAM sequence: TTA
cctaggccaatgtcgagaat

SEQ ID NO: 328391 - DNA, 20 bp, Artificial Sequence
  Description of Artificial Sequence: Synthetic oligonucleotide
  Target: LAMA2; (+) strand; PAM type: YTN; PAM sequence: CTA
ggccaatgtcgagaataatt

SEQ ID NO: 328392 - DNA, 20 bp, Artificial Sequence
  Description of Artificial Sequence: Synthetic oligonucleotide
  Target: LAMA2; (+) strand; PAM type: YTN; PAM sequence: TTT
ttcctaggttttctttttat

SEQ ID NO: 328393 - DNA, 20 bp, Artificial Sequence
  Description of Artificial Sequence: Synthetic oligonucleotide
  Target: LAMA2; (+) strand; PAM type: YTN; PAM sequence: TTT
tcctaggttttctttttatg

SEQ ID NO: 328394 - DNA, 20 bp, Artificial Sequence
  Description of Artificial Sequence: Synthetic oligonucleotide
  Target: LAMA2; (+) strand; PAM type: YTN; PAM sequence: TTT
cctaggttttctttttatgg

SEQ ID NO: 328395 - DNA, 20 bp, Artificial Sequence
  Description of Artificial Sequence: Synthetic oligonucleotide
  Target: LAMA2; (+) strand; PAM type: YTN; PAM sequence: TTC
ctaggttttctttttatggt

SEQ ID NO: 328396 - DNA, 20 bp, Artificial Sequence
  Description of Artificial Sequence: Synthetic oligonucleotide
  Target: LAMA2; (+) strand; PAM type: YTN; PAM sequence: CTA
ggttttctttttatggtttc

SEQ ID NO: 328397 - DNA, 20 bp, Artificial Sequence
  Description of Artificial Sequence: Synthetic oligonucleotide
  Target: LAMA2; (+) strand; PAM type: YTN; PAM sequence: TTT
tctttttatggtttcaggtc

SEQ ID NO: 328398 - DNA, 20 bp, Artificial Sequence
  Description of Artificial Sequence: Synthetic oligonucleotide
  Target: LAMA2; (+) strand; PAM type: YTN; PAM sequence: TTT
ctttttatggtttcaggtct

SEQ ID NO: 328399 - DNA, 20 bp, Artificial Sequence
  Description of Artificial Sequence: Synthetic oligonucleotide
  Target: LAMA2; (+) strand; PAM type: YTN; PAM sequence: TTC
tttttatggtttcaggtctt

SEQ ID NO: 328400 - DNA, 20 bp, Artificial Sequence
  Description of Artificial Sequence: Synthetic oligonucleotide
  Target: LAMA2; (+) strand; PAM type: YTN; PAM sequence: CTT
tttatggtttcaggtcttgc

SEQ ID NO: 328401 - DNA, 20 bp, Artificial Sequence
  Description of Artificial Sequence: Synthetic oligonucleotide
  Target: LAMA2; (+) strand; PAM type: YTN; PAM sequence: TTT
ttatggtttcaggtcttgca

SEQ ID NO: 328402 - DNA, 20 bp, Artificial Sequence
  Description of Artificial Sequence: Synthetic oligonucleotide
  Target: LAMA2; (+) strand; PAM type: YTN; PAM sequence: TTT
tatggtttcaggtcttgcat

SEQ ID NO: 328403 - DNA, 20 bp, Artificial Sequence
  Description of Artificial Sequence: Synthetic oligonucleotide
  Target: LAMA2; (+) strand; PAM type: YTN; PAM sequence: TTT
atggtttcaggtcttgcatt

SEQ ID NO: 328404 - DNA, 20 bp, Artificial Sequence
  Description of Artificial Sequence: Synthetic oligonucleotide
  Target: LAMA2; (+) strand; PAM type: YTN; PAM sequence: TTA
tggtttcaggtcttgcattt

SEQ ID NO: 328405 - DNA, 20 bp, Artificial Sequence
  Description of Artificial Sequence: Synthetic oligonucleotide
  Target: LAMA2; (+) strand; PAM type: YTN; PAM sequence: TTT
caggtcttgcatttaagtct

SEQ ID NO: 328406 - DNA, 20 bp, Artificial Sequence
  Description of Artificial Sequence: Synthetic oligonucleotide
  Target: LAMA2; (+) strand; PAM type: YTN; PAM sequence: TTC
aggtcttgcatttaagtctt

SEQ ID NO: 328407 - DNA, 20 bp, Artificial Sequence
  Description of Artificial Sequence: Synthetic oligonucleotide
  Target: LAMA2; (+) strand; PAM type: YTN; PAM sequence: CTT
gcatttaagtctttaattga

SEQ ID NO: 328408 - DNA, 20 bp, Artificial Sequence
  Description of Artificial Sequence: Synthetic oligonucleotide
  Target: LAMA2; (+) strand; PAM type: YTN; PAM sequence: TTG
catttaagtctttaattgat

SEQ ID NO: 328409 - DNA, 20 bp, Artificial Sequence
  Description of Artificial Sequence: Synthetic oligonucleotide
  Target: LAMA2; (+) strand; PAM type: YTN; PAM sequence: TTT
aagtctttaattgatcttga

SEQ ID NO: 328410 - DNA, 20 bp, Artificial Sequence
  Description of Artificial Sequence: Synthetic oligonucleotide
  Target: LAMA2; (+) strand; PAM type: YTN; PAM sequence: TTA
agtctttaattgatcttgag

SEQ ID NO: 328411 - DNA, 20 bp, Artificial Sequence
  Description of Artificial Sequence: Synthetic oligonucleotide
  Target: LAMA2; (+) strand; PAM type: YTN; PAM sequence: CTT
taattgatcttgagttaatt

SEQ ID NO: 328412 - DNA, 20 bp, Artificial Sequence
  Description of Artificial Sequence: Synthetic oligonucleotide
  Target: LAMA2; (+) strand; PAM type: YTN; PAM sequence: TTT
aattgatcttgagttaattt

SEQ ID NO: 328413 - DNA, 20 bp, Artificial Sequence
  Description of Artificial Sequence: Synthetic oligonucleotide
  Target: LAMA2; (+) strand; PAM type: YTN; PAM sequence: TTA
attgatcttgagttaatttt

SEQ ID NO: 328414 - DNA, 20 bp, Artificial Sequence
  Description of Artificial Sequence: Synthetic oligonucleotide
  Target: LAMA2; (+) strand; PAM type: YTN; PAM sequence: TTG
atcttgagttaatttttgta

SEQ ID NO: 328415 - DNA, 20 bp, Artificial Sequence
  Description of Artificial Sequence: Synthetic oligonucleotide
  Target: LAMA2; (+) strand; PAM type: YTN; PAM sequence: CTT
gagttaatttttgtatatgg

SEQ ID NO: 328416 - DNA, 20 bp, Artificial Sequence
  Description of Artificial Sequence: Synthetic oligonucleotide
  Target: LAMA2; (+) strand; PAM type: YTN; PAM sequence: TTG
agttaatttttgtatatggt

SEQ ID NO: 328417 - DNA, 20 bp, Artificial Sequence
  Description of Artificial Sequence: Synthetic oligonucleotide
  Target: LAMA2; (+) strand; PAM type: YTN; PAM sequence: TTA
atttttgtatatggtgacac

SEQ ID NO: 328418 - DNA, 20 bp, Artificial Sequence
  Description of Artificial Sequence: Synthetic oligonucleotide
  Target: LAMA2; (+) strand; PAM type: YTN; PAM sequence: TTT
ttgtatatggtgacacatag

SEQ ID NO: 328419 - DNA, 20 bp, Artificial Sequence
  Description of Artificial Sequence: Synthetic oligonucleotide
  Target: LAMA2; (+) strand; PAM type: YTN; PAM sequence: TTT
tgtatatggtgacacatagg

SEQ ID NO: 328420 - DNA, 20 bp, Artificial Sequence
  Description of Artificial Sequence: Synthetic oligonucleotide
  Target: LAMA2; (+) strand; PAM type: YTN; PAM sequence: TTT
gtatatggtgacacataggg

SEQ ID NO: 328421 - DNA, 20 bp, Artificial Sequence
  Description of Artificial Sequence: Synthetic oligonucleotide
  Target: LAMA2; (+) strand; PAM type: YTN; PAM sequence: TTG
tatatggtgacacatagggt

SEQ ID NO: 328422 - DNA, 20 bp, Artificial Sequence
  Description of Artificial Sequence: Synthetic oligonucleotide
  Target: LAMA2; (+) strand; PAM type: YTN; PAM sequence: TTT
cattcttccgctagccagtt

SEQ ID NO: 328423 - DNA, 20 bp, Artificial Sequence
  Description of Artificial Sequence: Synthetic oligonucleotide
  Target: LAMA2; (+) strand; PAM type: YTN; PAM sequence: TTC
attcttccgctagccagtta

SEQ ID NO: 328424 - DNA, 20 bp, Artificial Sequence
  Description of Artificial Sequence: Synthetic oligonucleotide
  Target: LAMA2; (+) strand; PAM type: YTN; PAM sequence: TTC
ttccgctagccagttattaa

SEQ ID NO: 328425 - DNA, 20 bp, Artificial Sequence
  Description of Artificial Sequence: Synthetic oligonucleotide
  Target: LAMA2; (+) strand; PAM type: YTN; PAM sequence: CTT
ccgctagccagttattaaat

SEQ ID NO: 328426 - DNA, 20 bp, Artificial Sequence
  Description of Artificial Sequence: Synthetic oligonucleotide
  Target: LAMA2; (+) strand; PAM type: YTN; PAM sequence: TTC
cgctagccagttattaaata

SEQ ID NO: 328427 - DNA, 20 bp, Artificial Sequence
  Description of Artificial Sequence: Synthetic oligonucleotide
  Target: LAMA2; (+) strand; PAM type: YTN; PAM sequence: CTA
gccagttattaaatagggtg

SEQ ID NO: 328428 - DNA, 20 bp, Artificial Sequence
  Description of Artificial Sequence: Synthetic oligonucleotide
  Target: LAMA2; (+) strand; PAM type: YTN; PAM sequence: TTA
ttaaatagggtgtcctttcc

SEQ ID NO: 328429 - DNA, 20 bp, Artificial Sequence
  Description of Artificial Sequence: Synthetic oligonucleotide
  Target: LAMA2; (+) strand; PAM type: YTN; PAM sequence: TTA
aatagggtgtcctttcccca

SEQ ID NO: 328430 - DNA, 20 bp, Artificial Sequence
  Description of Artificial Sequence: Synthetic oligonucleotide
  Target: LAMA2; (+) strand; PAM type: YTN; PAM sequence: CTT
tccccattgcttatttttat

SEQ ID NO: 328431 - DNA, 20 bp, Artificial Sequence
  Description of Artificial Sequence: Synthetic oligonucleotide
  Target: LAMA2; (+) strand; PAM type: YTN; PAM sequence: TTT
ccccattgcttatttttatt

SEQ ID NO: 328432 - DNA, 20 bp, Artificial Sequence
  Description of Artificial Sequence: Synthetic oligonucleotide
  Target: LAMA2; (+) strand; PAM type: YTN; PAM sequence: TTC
cccattgcttatttttattg

SEQ ID NO: 328433 - DNA, 20 bp, Artificial Sequence
  Description of Artificial Sequence: Synthetic oligonucleotide
  Target: LAMA2; (+) strand; PAM type: YTN; PAM sequence: TTG
cttatttttattgactttgt

SEQ ID NO: 328434 - DNA, 20 bp, Artificial Sequence
  Description of Artificial Sequence: Synthetic oligonucleotide
  Target: LAMA2; (+) strand; PAM type: YTN; PAM sequence: CTT
atttttattgactttgtcga

SEQ ID NO: 328435 - DNA, 20 bp, Artificial Sequence
  Description of Artificial Sequence: Synthetic oligonucleotide
  Target: LAMA2; (+) strand; PAM type: YTN; PAM sequence: TTA
tttttattgactttgtcgaa

SEQ ID NO: 328436 - DNA, 20 bp, Artificial Sequence
  Description of Artificial Sequence: Synthetic oligonucleotide
  Target: LAMA2; (+) strand; PAM type: YTN; PAM sequence: TTT
ttattgactttgtcgaagat

SEQ ID NO: 328437 - DNA, 20 bp, Artificial Sequence
  Description of Artificial Sequence: Synthetic oligonucleotide
  Target: LAMA2; (+) strand; PAM type: YTN; PAM sequence: TTT
tattgactttgtcgaagatt

SEQ ID NO: 328438 - DNA, 20 bp, Artificial Sequence
  Description of Artificial Sequence: Synthetic oligonucleotide
  Target: LAMA2; (+) strand; PAM type: YTN; PAM sequence: TTT
attgactttgtcgaagatta

SEQ ID NO: 328439 - DNA, 20 bp, Artificial Sequence
  Description of Artificial Sequence: Synthetic oligonucleotide
  Target: LAMA2; (+) strand; PAM type: YTN; PAM sequence: TTA
ttgactttgtcgaagattag

SEQ ID NO: 328440 - DNA, 20 bp, Artificial Sequence
  Description of Artificial Sequence: Synthetic oligonucleotide
  Target: LAMA2; (+) strand; PAM type: YTN; PAM sequence: TTG
actttgtcgaagattagttg

SEQ ID NO: 328441 - DNA, 20 bp, Artificial Sequence
  Description of Artificial Sequence: Synthetic oligonucleotide
  Target: LAMA2; (+) strand; PAM type: YTN; PAM sequence: CTT
tgtcgaagattagttgtagg

SEQ ID NO: 328442 - DNA, 20 bp, Artificial Sequence
  Description of Artificial Sequence: Synthetic oligonucleotide
  Target: LAMA2; (+) strand; PAM type: YTN; PAM sequence: TTT
gtcgaagattagttgtagga

SEQ ID NO: 328443 - DNA, 20 bp, Artificial Sequence
  Description of Artificial Sequence: Synthetic oligonucleotide
  Target: LAMA2; (+) strand; PAM type: YTN; PAM sequence: TTG
tcgaagattagttgtaggaa

SEQ ID NO: 328444 - DNA, 20 bp, Artificial Sequence
  Description of Artificial Sequence: Synthetic oligonucleotide
  Target: LAMA2; (+) strand; PAM type: YTN; PAM sequence: TTA
gttgtaggaatatggattta

SEQ ID NO: 328445 - DNA, 20 bp, Artificial Sequence
  Description of Artificial Sequence: Synthetic oligonucleotide
  Target: LAMA2; (+) strand; PAM type: YTN; PAM sequence: TTG
taggaatatggatttatttt

SEQ ID NO: 328446 - DNA, 20 bp, Artificial Sequence
  Description of Artificial Sequence: Synthetic oligonucleotide
  Target: LAMA2; (+) strand; PAM type: YTN; PAM sequence: TTT
atttttgcattctctatttt

SEQ ID NO: 328447 - DNA, 20 bp, Artificial Sequence
  Description of Artificial Sequence: Synthetic oligonucleotide
  Target: LAMA2; (+) strand; PAM type: YTN; PAM sequence: TTA
tttttgcattctctattttg

SEQ ID NO: 328448 - DNA, 20 bp, Artificial Sequence
  Description of Artificial Sequence: Synthetic oligonucleotide
  Target: LAMA2; (+) strand; PAM type: YTN; PAM sequence: TTT
ttgcattctctattttgtct

SEQ ID NO: 328449 - DNA, 20 bp, Artificial Sequence
  Description of Artificial Sequence: Synthetic oligonucleotide
  Target: LAMA2; (+) strand; PAM type: YTN; PAM sequence: TTT
tgcattctctattttgtctc

SEQ ID NO: 328450 - DNA, 20 bp, Artificial Sequence
  Description of Artificial Sequence: Synthetic oligonucleotide
  Target: LAMA2; (+) strand; PAM type: YTN; PAM sequence: TTT
gcattctctattttgtctca

SEQ ID NO: 328451 - DNA, 20 bp, Artificial Sequence
  Description of Artificial Sequence: Synthetic oligonucleotide
  Target: LAMA2; (+) strand; PAM type: YTN; PAM sequence: TTG
cattctctattttgtctcat

SEQ ID NO: 328452 - DNA, 20 bp, Artificial Sequence
  Description of Artificial Sequence: Synthetic oligonucleotide
  Target: LAMA2; (+) strand; PAM type: YTN; PAM sequence: TTC
tctattttgtctcattgcct

SEQ ID NO: 328453 - DNA, 20 bp, Artificial Sequence
  Description of Artificial Sequence: Synthetic oligonucleotide
  Target: LAMA2; (+) strand; PAM type: YTN; PAM sequence: CTC
tattttgtctcattgcctta

SEQ ID NO: 328454 - DNA, 20 bp, Artificial Sequence
  Description of Artificial Sequence: Synthetic oligonucleotide
  Target: LAMA2; (+) strand; PAM type: YTN; PAM sequence: CTA
ttttgtctcattgccttatg

SEQ ID NO: 328455 - DNA, 20 bp, Artificial Sequence
  Description of Artificial Sequence: Synthetic oligonucleotide
  Target: LAMA2; (+) strand; PAM type: YTN; PAM sequence: TTT
tgtctcattgccttatgtgc

SEQ ID NO: 328456 - DNA, 20 bp, Artificial Sequence
  Description of Artificial Sequence: Synthetic oligonucleotide
  Target: LAMA2; (+) strand; PAM type: YTN; PAM sequence: TTT
gtctcattgccttatgtgcc

SEQ ID NO: 328457 - DNA, 20 bp, Artificial Sequence
  Description of Artificial Sequence: Synthetic oligonucleotide
  Target: LAMA2; (+) strand; PAM type: YTN; PAM sequence: TTG
tctcattgccttatgtgcca

SEQ ID NO: 328458 - DNA, 20 bp, Artificial Sequence
  Description of Artificial Sequence: Synthetic oligonucleotide
  Target: LAMA2; (+) strand; PAM type: YTN; PAM sequence: CTC
attgccttatgtgccatttt

SEQ ID NO: 328459 - DNA, 20 bp, Artificial Sequence
  Description of Artificial Sequence: Synthetic oligonucleotide
  Target: LAMA2; (+) strand; PAM type: YTN; PAM sequence: TTG
ccttatgtgccatttttata

SEQ ID NO: 328460 - DNA, 20 bp, Artificial Sequence
  Description of Artificial Sequence: Synthetic oligonucleotide
  Target: LAMA2; (+) strand; PAM type: YTN; PAM sequence: CTT
atgtgccatttttataccat

SEQ ID NO: 328461 - DNA, 20 bp, Artificial Sequence
  Description of Artificial Sequence: Synthetic oligonucleotide
  Target: LAMA2; (+) strand; PAM type: YTN; PAM sequence: TTA
tgtgccatttttataccatt

SEQ ID NO: 328462 - DNA, 20 bp, Artificial Sequence
  Description of Artificial Sequence: Synthetic oligonucleotide
  Target: LAMA2; (+) strand; PAM type: YTN; PAM sequence: TTT
ttataccattaccatgctgt

SEQ ID NO: 328463 - DNA, 20 bp, Artificial Sequence
  Description of Artificial Sequence: Synthetic oligonucleotide
  Target: LAMA2; (+) strand; PAM type: YTN; PAM sequence: TTT
tataccattaccatgctgtt

SEQ ID NO: 328464 - DNA, 20 bp, Artificial Sequence
  Description of Artificial Sequence: Synthetic oligonucleotide
  Target: LAMA2; (+) strand; PAM type: YTN; PAM sequence: TTT
ataccattaccatgctgttt

SEQ ID NO: 328465 - DNA, 20 bp, Artificial Sequence
  Description of Artificial Sequence: Synthetic oligonucleotide
  Target: LAMA2; (+) strand; PAM type: YTN; PAM sequence: TTA
taccattaccatgctgtttt

SEQ ID NO: 328466 - DNA, 20 bp, Artificial Sequence
  Description of Artificial Sequence: Synthetic oligonucleotide
  Target: LAMA2; (+) strand; PAM type: YTN; PAM sequence: TTA
ccatgctgttttagttacta

SEQ ID NO: 328467 - DNA, 20 bp, Artificial Sequence
  Description of Artificial Sequence: Synthetic oligonucleotide
  Target: LAMA2; (+) strand; PAM type: YTN; PAM sequence: CTG
ttttagttactatagcctca

SEQ ID NO: 328468 - DNA, 20 bp, Artificial Sequence
  Description of Artificial Sequence: Synthetic oligonucleotide
  Target: LAMA2; (+) strand; PAM type: YTN; PAM sequence: TTT
tagttactatagcctcatag

SEQ ID NO: 328469 - DNA, 20 bp, Artificial Sequence
  Description of Artificial Sequence: Synthetic oligonucleotide
  Target: LAMA2; (+) strand; PAM type: YTN; PAM sequence: TTT
agttactatagcctcatagt

SEQ ID NO: 328470 - DNA, 20 bp, Artificial Sequence
  Description of Artificial Sequence: Synthetic oligonucleotide
  Target: LAMA2; (+) strand; PAM type: YTN; PAM sequence: TTA
gttactatagcctcatagtc

SEQ ID NO: 328471 - DNA, 20 bp, Artificial Sequence
  Description of Artificial Sequence: Synthetic oligonucleotide
  Target: LAMA2; (+) strand; PAM type: YTN; PAM sequence: TTA
ctatagcctcatagtctcag

SEQ ID NO: 328472 - DNA, 20 bp, Artificial Sequence
  Description of Artificial Sequence: Synthetic oligonucleotide
  Target: LAMA2; (+) strand; PAM type: YTN; PAM sequence: CTA
tagcctcatagtctcagagc

SEQ ID NO: 328473 - DNA, 20 bp, Artificial Sequence
  Description of Artificial Sequence: Synthetic oligonucleotide
  Target: LAMA2; (+) strand; PAM type: YTN; PAM sequence: CTC
atagtctcagagcatagtgt

SEQ ID NO: 328474 - DNA, 20 bp, Artificial Sequence
  Description of Artificial Sequence: Synthetic oligonucleotide
  Target: LAMA2; (+) strand; PAM type: YTN; PAM sequence: CTC
agagcatagtgtgaagtcag

SEQ ID NO: 328475 - DNA, 20 bp, Artificial Sequence
  Description of Artificial Sequence: Synthetic oligonucleotide
  Target: LAMA2; (+) strand; PAM type: YTN; PAM sequence: TTG
atctttttgcttagaattgc

SEQ ID NO: 328476 - DNA, 20 bp, Artificial Sequence
  Description of Artificial Sequence: Synthetic oligonucleotide
  Target: LAMA2; (+) strand; PAM type: YTN; PAM sequence: CTT
tttgcttagaattgctttgg

SEQ ID NO: 328477 - DNA, 20 bp, Artificial Sequence
  Description of Artificial Sequence: Synthetic oligonucleotide
  Target: LAMA2; (+) strand; PAM type: YTN; PAM sequence: TTT
ttgcttagaattgctttggt

SEQ ID NO: 328478 - DNA, 20 bp, Artificial Sequence
  Description of Artificial Sequence: Synthetic oligonucleotide
  Target: LAMA2; (+) strand; PAM type: YTN; PAM sequence: TTT
tgcttagaattgctttggtt

SEQ ID NO: 328479 - DNA, 20 bp, Artificial Sequence
  Description of Artificial Sequence: Synthetic oligonucleotide
  Target: LAMA2; (+) strand; PAM type: YTN; PAM sequence: TTT
gcttagaattgctttggtta

SEQ ID NO: 328480 - DNA, 20 bp, Artificial Sequence
  Description of Artificial Sequence: Synthetic oligonucleotide
  Target: LAMA2; (+) strand; PAM type: YTN; PAM sequence: TTG
cttagaattgctttggttat

SEQ ID NO: 328481 - DNA, 20 bp, Artificial Sequence
  Description of Artificial Sequence: Synthetic oligonucleotide
  Target: LAMA2; (+) strand; PAM type: YTN; PAM sequence: CTT
agaattgctttggttatttg

SEQ ID NO: 328482 - DNA, 20 bp, Artificial Sequence
  Description of Artificial Sequence: Synthetic oligonucleotide
  Target: LAMA2; (+) strand; PAM type: YTN; PAM sequence: TTA
gaattgctttggttatttgg

SEQ ID NO: 328483 - DNA, 20 bp, Artificial Sequence
  Description of Artificial Sequence: Synthetic oligonucleotide
  Target: LAMA2; (+) strand; PAM type: YTN; PAM sequence: TTG
ctttggttatttgggctcct

SEQ ID NO: 328484 - DNA, 20 bp, Artificial Sequence
  Description of Artificial Sequence: Synthetic oligonucleotide
  Target: LAMA2; (+) strand; PAM type: YTN; PAM sequence: CTT
tggttatttgggctcctttt

SEQ ID NO: 328485 - DNA, 20 bp, Artificial Sequence
  Description of Artificial Sequence: Synthetic oligonucleotide
  Target: LAMA2; (+) strand; PAM type: YTN; PAM sequence: TTT
ggttatttgggctccttttt

SEQ ID NO: 328486 - DNA, 20 bp, Artificial Sequence
  Description of Artificial Sequence: Synthetic oligonucleotide
  Target: LAMA2; (+) strand; PAM type: YTN; PAM sequence: TTG
gttatttgggctcctttttg

SEQ ID NO: 328487 - DNA, 20 bp, Artificial Sequence
  Description of Artificial Sequence: Synthetic oligonucleotide
  Target: LAMA2; (+) strand; PAM type: YTN; PAM sequence: TTA
tttgggctcctttttgtttc

SEQ ID NO: 328488 - DNA, 20 bp, Artificial Sequence
  Description of Artificial Sequence: Synthetic oligonucleotide
  Target: LAMA2; (+) strand; PAM type: YTN; PAM sequence: TTT
gggctcctttttgtttccat

SEQ ID NO: 328489 - DNA, 20 bp, Artificial Sequence
  Description of Artificial Sequence: Synthetic oligonucleotide
  Target: LAMA2; (+) strand; PAM type: YTN; PAM sequence: TTG
ggctcctttttgtttccata

SEQ ID NO: 328490 - DNA, 20 bp, Artificial Sequence
  Description of Artificial Sequence: Synthetic oligonucleotide
  Target: LAMA2; (+) strand; PAM type: YTN; PAM sequence: CTC
ctttttgtttccatattaat

SEQ ID NO: 328491 - DNA, 20 bp, Artificial Sequence
  Description of Artificial Sequence: Synthetic oligonucleotide
  Target: LAMA2; (+) strand; PAM type: YTN; PAM sequence: CTT
tttgtttccatattaatttt

SEQ ID NO: 328492 - DNA, 20 bp, Artificial Sequence
  Description of Artificial Sequence: Synthetic oligonucleotide
  Target: LAMA2; (+) strand; PAM type: YTN; PAM sequence: TTT
ttgtttccatattaatttta

SEQ ID NO: 328493 - DNA, 20 bp, Artificial Sequence
  Description of Artificial Sequence: Synthetic oligonucleotide
  Target: LAMA2; (+) strand; PAM type: YTN; PAM sequence: TTT
tgtttccatattaattttag

SEQ ID NO: 328494 - DNA, 20 bp, Artificial Sequence
  Description of Artificial Sequence: Synthetic oligonucleotide
  Target: LAMA2; (+) strand; PAM type: YTN; PAM sequence: TTT
gtttccatattaattttaga

SEQ ID NO: 328495 - DNA, 20 bp, Artificial Sequence
  Description of Artificial Sequence: Synthetic oligonucleotide
  Target: LAMA2; (+) strand; PAM type: YTN; PAM sequence: TTG
tttccatattaattttagaa

SEQ ID NO: 328496 - DNA, 20 bp, Artificial Sequence
  Description of Artificial Sequence: Synthetic oligonucleotide
  Target: LAMA2; (+) strand; PAM type: YTN; PAM sequence: TTT
ccatattaattttagaattg

SEQ ID NO: 328497 - DNA, 20 bp, Artificial Sequence
  Description of Artificial Sequence: Synthetic oligonucleotide
  Target: LAMA2; (+) strand; PAM type: YTN; PAM sequence: TTC
catattaattttagaattgt

SEQ ID NO: 328498 - DNA, 20 bp, Artificial Sequence
  Description of Artificial Sequence: Synthetic oligonucleotide
  Target: LAMA2; (+) strand; PAM type: YTN; PAM sequence: TTA
attttagaattgttttttct

SEQ ID NO: 328499 - DNA, 20 bp, Artificial Sequence
  Description of Artificial Sequence: Synthetic oligonucleotide
  Target: LAMA2; (+) strand; PAM type: YTN; PAM sequence: TTT
tagaattgttttttctaatt

SEQ ID NO: 328500 - DNA, 20 bp, Artificial Sequence
  Description of Artificial Sequence: Synthetic oligonucleotide
  Target: LAMA2; (+) strand; PAM type: YTN; PAM sequence: TTT
agaattgttttttctaattc

SEQ ID NO: 328501 - DNA, 20 bp, Artificial Sequence
  Description of Artificial Sequence: Synthetic oligonucleotide
  Target: LAMA2; (+) strand; PAM type: YTN; PAM sequence: TTA
gaattgttttttctaattct

SEQ ID NO: 328502 - DNA, 20 bp, Artificial Sequence
  Description of Artificial Sequence: Synthetic oligonucleotide
  Target: LAMA2; (+) strand; PAM type: YTN; PAM sequence: TTG
ttttttctaattctgtgaaa

SEQ ID NO: 328503 - DNA, 20 bp, Artificial Sequence
  Description of Artificial Sequence: Synthetic oligonucleotide
  Target: LAMA2; (+) strand; PAM type: YTN; PAM sequence: TTT
tttctaattctgtgaaaaat

SEQ ID NO: 328504 - DNA, 20 bp, Artificial Sequence
  Description of Artificial Sequence: Synthetic oligonucleotide
  Target: LAMA2; (+) strand; PAM type: YTN; PAM sequence: TTT
ttctaattctgtgaaaaatg

SEQ ID NO: 328505 - DNA, 20 bp, Artificial Sequence
  Description of Artificial Sequence: Synthetic oligonucleotide
  Target: LAMA2; (+) strand; PAM type: YTN; PAM sequence: TTT
tctaattctgtgaaaaatga

SEQ ID NO: 328506 - DNA, 20 bp, Artificial Sequence
  Description of Artificial Sequence: Synthetic oligonucleotide
  Target: LAMA2; (+) strand; PAM type: YTN; PAM sequence: TTT
ctaattctgtgaaaaatgac

SEQ ID NO: 328507 - DNA, 20 bp, Artificial Sequence
  Description of Artificial Sequence: Synthetic oligonucleotide
  Target: LAMA2; (+) strand; PAM type: YTN; PAM sequence: TTC
taattctgtgaaaaatgaca

SEQ ID NO: 328508 - DNA, 20 bp, Artificial Sequence
  Description of Artificial Sequence: Synthetic oligonucleotide
  Target: LAMA2; (+) strand; PAM type: YTN; PAM sequence: CTA
attctgtgaaaaatgacatt

SEQ ID NO: 328509 - DNA, 20 bp, Artificial Sequence
  Description of Artificial Sequence: Synthetic oligonucleotide
  Target: LAMA2; (+) strand; PAM type: YTN; PAM sequence: TTC
tgtgaaaaatgacattggta

SEQ ID NO: 328510 - DNA, 20 bp, Artificial Sequence
  Description of Artificial Sequence: Synthetic oligonucleotide
  Target: LAMA2; (+) strand; PAM type: YTN; PAM sequence: CTG
tgaaaaatgacattggtaat

SEQ ID NO: 328511 - DNA, 20 bp, Artificial Sequence
  Description of Artificial Sequence: Synthetic oligonucleotide
  Target: LAMA2; (+) strand; PAM type: YTN; PAM sequence: TTG
gtaatttgatagggattgca

SEQ ID NO: 328512 - DNA, 20 bp, Artificial Sequence
  Description of Artificial Sequence: Synthetic oligonucleotide
  Target: LAMA2; (+) strand; PAM type: YTN; PAM sequence: TTT
gatagggattgcactgaatc

SEQ ID NO: 328513 - DNA, 20 bp, Artificial Sequence
  Description of Artificial Sequence: Synthetic oligonucleotide
  Target: LAMA2; (+) strand; PAM type: YTN; PAM sequence: TTG
atagggattgcactgaatct

SEQ ID NO: 328514 - DNA, 20 bp, Artificial Sequence
  Description of Artificial Sequence: Synthetic oligonucleotide
  Target: LAMA2; (+) strand; PAM type: YTN; PAM sequence: TTG
cactgaatctgtagattgtt

SEQ ID NO: 328515 - DNA, 20 bp, Artificial Sequence
  Description of Artificial Sequence: Synthetic oligonucleotide
  Target: LAMA2; (+) strand; PAM type: YTN; PAM sequence: CTG
aatctgtagattgttttggg

SEQ ID NO: 328516 - DNA, 20 bp, Artificial Sequence
  Description of Artificial Sequence: Synthetic oligonucleotide
  Target: LAMA2; (+) strand; PAM type: YTN; PAM sequence: CTG
tagattgttttgggtagcat

SEQ ID NO: 328517 - DNA, 20 bp, Artificial Sequence
  Description of Artificial Sequence: Synthetic oligonucleotide
  Target: LAMA2; (+) strand; PAM type: YTN; PAM sequence: TTG
ttttgggtagcatagtcatt

SEQ ID NO: 328518 - DNA, 20 bp, Artificial Sequence
  Description of Artificial Sequence: Synthetic oligonucleotide
  Target: LAMA2; (+) strand; PAM type: YTN; PAM sequence: TTT
tgggtagcatagtcatttta

SEQ ID NO: 328519 - DNA, 20 bp, Artificial Sequence
  Description of Artificial Sequence: Synthetic oligonucleotide
  Target: LAMA2; (+) strand; PAM type: YTN; PAM sequence: TTT
gggtagcatagtcattttaa

SEQ ID NO: 328520 - DNA, 20 bp, Artificial Sequence
  Description of Artificial Sequence: Synthetic oligonucleotide
  Target: LAMA2; (+) strand; PAM type: YTN; PAM sequence: TTG
ggtagcatagtcattttaat

SEQ ID NO: 328521 - DNA, 20 bp, Artificial Sequence
  Description of Artificial Sequence: Synthetic oligonucleotide
  Target: LAMA2; (+) strand; PAM type: YTN; PAM sequence: TTT
taatgatattgattctttct

SEQ ID NO: 328522 - DNA, 20 bp, Artificial Sequence
  Description of Artificial Sequence: Synthetic oligonucleotide
  Target: LAMA2; (+) strand; PAM type: YTN; PAM sequence: TTT
aatgatattgattctttcta

SEQ ID NO: 328523 - DNA, 20 bp, Artificial Sequence
  Description of Artificial Sequence: Synthetic oligonucleotide
  Target: LAMA2; (+) strand; PAM type: YTN; PAM sequence: TTA
atgatattgattctttctat

SEQ ID NO: 328524 - DNA, 20 bp, Artificial Sequence
  Description of Artificial Sequence: Synthetic oligonucleotide
  Target: LAMA2; (+) strand; PAM type: YTN; PAM sequence: TTG
attctttctatccatgagca

SEQ ID NO: 328525 - DNA, 20 bp, Artificial Sequence
  Description of Artificial Sequence: Synthetic oligonucleotide
  Target: LAMA2; (+) strand; PAM type: YTN; PAM sequence: TTC
tttctatccatgagcatgga

SEQ ID NO: 328526 - DNA, 20 bp, Artificial Sequence
  Description of Artificial Sequence: Synthetic oligonucleotide
  Target: LAMA2; (+) strand; PAM type: YTN; PAM sequence: CTT
tctatccatgagcatggaat

SEQ ID NO: 328527 - DNA, 20 bp, Artificial Sequence
  Description of Artificial Sequence: Synthetic oligonucleotide
  Target: LAMA2; (+) strand; PAM type: YTN; PAM sequence: TTT
ctatccatgagcatggaatg

SEQ ID NO: 328528 - DNA, 20 bp, Artificial Sequence
  Description of Artificial Sequence: Synthetic oligonucleotide
  Target: LAMA2; (+) strand; PAM type: YTN; PAM sequence: TTC
tatccatgagcatggaatgt

SEQ ID NO: 328529 - DNA, 20 bp, Artificial Sequence
  Description of Artificial Sequence: Synthetic oligonucleotide
  Target: LAMA2; (+) strand; PAM type: YTN; PAM sequence: CTA
tccatgagcatggaatgttt

SEQ ID NO: 328530 - DNA, 20 bp, Artificial Sequence
  Description of Artificial Sequence: Synthetic oligonucleotide
  Target: LAMA2; (+) strand; PAM type: YTN; PAM sequence: TTT
ttccatttgtccatgtcatt

SEQ ID NO: 328531 - DNA, 20 bp, Artificial Sequence
  Description of Artificial Sequence: Synthetic oligonucleotide
  Target: LAMA2; (+) strand; PAM type: YTN; PAM sequence: TTT
tccatttgtccatgtcattt

SEQ ID NO: 328532 - DNA, 20 bp, Artificial Sequence
  Description of Artificial Sequence: Synthetic oligonucleotide
  Target: LAMA2; (+) strand; PAM type: YTN; PAM sequence: TTT
ccatttgtccatgtcattta

SEQ ID NO: 328533 - DNA, 20 bp, Artificial Sequence
  Description of Artificial Sequence: Synthetic oligonucleotide
  Target: LAMA2; (+) strand; PAM type: YTN; PAM sequence: TTC
catttgtccatgtcatttat

SEQ ID NO: 328534 - DNA, 20 bp, Artificial Sequence
  Description of Artificial Sequence: Synthetic oligonucleotide
  Target: LAMA2; (+) strand; PAM type: YTN; PAM sequence: TTT
gtccatgtcatttatgattt

SEQ ID NO: 328535 - DNA, 20 bp, Artificial Sequence
  Description of Artificial Sequence: Synthetic oligonucleotide
  Target: LAMA2; (+) strand; PAM type: YTN; PAM sequence: TTG
tccatgtcatttatgatttc

SEQ ID NO: 328536 - DNA, 20 bp, Artificial Sequence
  Description of Artificial Sequence: Synthetic oligonucleotide
  Target: LAMA2; (+) strand; PAM type: YTN; PAM sequence: TTT
atgatttctttcctcagtgt

SEQ ID NO: 328537 - DNA, 20 bp, Artificial Sequence
  Description of Artificial Sequence: Synthetic oligonucleotide
  Target: LAMA2; (+) strand; PAM type: YTN; PAM sequence: TTA
tgatttctttcctcagtgtt

SEQ ID NO: 328538 - DNA, 20 bp, Artificial Sequence
  Description of Artificial Sequence: Synthetic oligonucleotide
  Target: LAMA2; (+) strand; PAM type: YTN; PAM sequence: TTT
ctttcctcagtgttttgaag

SEQ ID NO: 328539 - DNA, 20 bp, Artificial Sequence
  Description of Artificial Sequence: Synthetic oligonucleotide
  Target: LAMA2; (+) strand; PAM type: YTN; PAM sequence: TTC
tttcctcagtgttttgaaga

SEQ ID NO: 328540 - DNA, 20 bp, Artificial Sequence
  Description of Artificial Sequence: Synthetic oligonucleotide
  Target: LAMA2; (+) strand; PAM type: YTN; PAM sequence: CTT
tcctcagtgttttgaagaaa

SEQ ID NO: 328541 - DNA, 20 bp, Artificial Sequence
  Description of Artificial Sequence: Synthetic oligonucleotide
  Target: LAMA2; (+) strand; PAM type: YTN; PAM sequence: TTT
cctcagtgttttgaagaaat

SEQ ID NO: 328542 - DNA, 20 bp, Artificial Sequence
  Description of Artificial Sequence: Synthetic oligonucleotide
  Target: LAMA2; (+) strand; PAM type: YTN; PAM sequence: TTC
ctcagtgttttgaagaaatc

SEQ ID NO: 328543 - DNA, 20 bp, Artificial Sequence
  Description of Artificial Sequence: Synthetic oligonucleotide
  Target: LAMA2; (+) strand; PAM type: YTN; PAM sequence: CTC
agtgttttgaagaaatcata

SEQ ID NO: 328544 - DNA, 20 bp, Artificial Sequence
  Description of Artificial Sequence: Synthetic oligonucleotide
  Target: LAMA2; (+) strand; PAM type: YTN; PAM sequence: TTT
tgaagaaatcataatcaatt

SEQ ID NO: 328545 - DNA, 20 bp, Artificial Sequence
  Description of Artificial Sequence: Synthetic oligonucleotide
  Target: LAMA2; (+) strand; PAM type: YTN; PAM sequence: TTT
gaagaaatcataatcaattc

SEQ ID NO: 328546 - DNA, 20 bp, Artificial Sequence
  Description of Artificial Sequence: Synthetic oligonucleotide
  Target: LAMA2; (+) strand; PAM type: YTN; PAM sequence: TTG
aagaaatcataatcaattcc

SEQ ID NO: 328547 - DNA, 20 bp, Artificial Sequence
  Description of Artificial Sequence: Synthetic oligonucleotide
  Target: LAMA2; (+) strand; PAM type: YTN; PAM sequence: TTC
ctggtagagatcttttacct

SEQ ID NO: 328548 - DNA, 20 bp, Artificial Sequence
  Description of Artificial Sequence: Synthetic oligonucleotide
  Target: LAMA2; (+) strand; PAM type: YTN; PAM sequence: CTG
gtagagatcttttacctcct

SEQ ID NO: 328549 - DNA, 20 bp, Artificial Sequence
  Description of Artificial Sequence: Synthetic oligonucleotide
  Target: LAMA2; (+) strand; PAM type: YTN; PAM sequence: CTT
ttacctccttggttaaatgt

SEQ ID NO: 328550 - DNA, 20 bp, Artificial Sequence
  Description of Artificial Sequence: Synthetic oligonucleotide
  Target: LAMA2; (+) strand; PAM type: YTN; PAM sequence: TTT
tacctccttggttaaatgta

SEQ ID NO: 328551 - DNA, 20 bp, Artificial Sequence
  Description of Artificial Sequence: Synthetic oligonucleotide
  Target: LAMA2; (+) strand; PAM type: YTN; PAM sequence: TTT
acctccttggttaaatgtat

SEQ ID NO: 328552 - DNA, 20 bp, Artificial Sequence
  Description of Artificial Sequence: Synthetic oligonucleotide
  Target: LAMA2; (+) strand; PAM type: YTN; PAM sequence: TTA
cctccttggttaaatgtatt

SEQ ID NO: 328553 - DNA, 20 bp, Artificial Sequence
  Description of Artificial Sequence: Synthetic oligonucleotide
  Target: LAMA2; (+) strand; PAM type: YTN; PAM sequence: CTC
cttggttaaatgtattccta

SEQ ID NO: 328554 - DNA, 20 bp, Artificial Sequence
  Description of Artificial Sequence: Synthetic oligonucleotide
  Target: LAMA2; (+) strand; PAM type: YTN; PAM sequence: CTT
ggttaaatgtattcctaggt

SEQ ID NO: 328555 - DNA, 20 bp, Artificial Sequence
  Description of Artificial Sequence: Synthetic oligonucleotide
  Target: LAMA2; (+) strand; PAM type: YTN; PAM sequence: TTG
gttaaatgtattcctaggta

SEQ ID NO: 328556 - DNA, 20 bp, Artificial Sequence
  Description of Artificial Sequence: Synthetic oligonucleotide
  Target: LAMA2; (+) strand; PAM type: YTN; PAM sequence: TTA
aatgtattcctaggtatttc

SEQ ID NO: 328557 - DNA, 20 bp, Artificial Sequence
  Description of Artificial Sequence: Synthetic oligonucleotide
  Target: LAMA2; (+) strand; PAM type: YTN; PAM sequence: TTC
ctaggtatttcacttttaat

SEQ ID NO: 328558 - DNA, 20 bp, Artificial Sequence
  Description of Artificial Sequence: Synthetic oligonucleotide
  Target: LAMA2; (+) strand; PAM type: YTN; PAM sequence: CTA
ggtatttcacttttaatagt

SEQ ID NO: 328559 - DNA, 20 bp, Artificial Sequence
  Description of Artificial Sequence: Synthetic oligonucleotide
  Target: LAMA2; (+) strand; PAM type: YTN; PAM sequence: TTT
cacttttaatagttattttc

SEQ ID NO: 328560 - DNA, 20 bp, Artificial Sequence
  Description of Artificial Sequence: Synthetic oligonucleotide
  Target: LAMA2; (+) strand; PAM type: YTN; PAM sequence: TTC
acttttaatagttattttct

SEQ ID NO: 328561 - DNA, 20 bp, Artificial Sequence
  Description of Artificial Sequence: Synthetic oligonucleotide
  Target: LAMA2; (+) strand; PAM type: YTN; PAM sequence: CTT
ttaatagttattttcttatg

SEQ ID NO: 328562 - DNA, 20 bp, Artificial Sequence
  Description of Artificial Sequence: Synthetic oligonucleotide
  Target: LAMA2; (+) strand; PAM type: YTN; PAM sequence: TTT
taatagttattttcttatgt

SEQ ID NO: 328563 - DNA, 20 bp, Artificial Sequence
  Description of Artificial Sequence: Synthetic oligonucleotide
  Target: LAMA2; (+) strand; PAM type: YTN; PAM sequence: TTT
aatagttattttcttatgta

SEQ ID NO: 328564 - DNA, 20 bp, Artificial Sequence
  Description of Artificial Sequence: Synthetic oligonucleotide
  Target: LAMA2; (+) strand; PAM type: YTN; PAM sequence: TTA
atagttattttcttatgtat

SEQ ID NO: 328565 - DNA, 20 bp, Artificial Sequence
  Description of Artificial Sequence: Synthetic oligonucleotide
  Target: LAMA2; (+) strand; PAM type: YTN; PAM sequence: TTA
ttttcttatgtatgtctaaa

SEQ ID NO: 328566 - DNA, 20 bp, Artificial Sequence
  Description of Artificial Sequence: Synthetic oligonucleotide
  Target: LAMA2; (+) strand; PAM type: YTN; PAM sequence: TTT
tcttatgtatgtctaaattt

SEQ ID NO: 328567 - DNA, 20 bp, Artificial Sequence
  Description of Artificial Sequence: Synthetic oligonucleotide
  Target: LAMA2; (+) strand; PAM type: YTN; PAM sequence: TTT
cttatgtatgtctaaatttt

SEQ ID NO: 328568 - DNA, 20 bp, Artificial Sequence
  Description of Artificial Sequence: Synthetic oligonucleotide
  Target: LAMA2; (+) strand; PAM type: YTN; PAM sequence: TTC
ttatgtatgtctaaatttta

SEQ ID NO: 328569 - DNA, 20 bp, Artificial Sequence
  Description of Artificial Sequence: Synthetic oligonucleotide
  Target: LAMA2; (+) strand; PAM type: YTN; PAM sequence: CTT
atgtatgtctaaattttaat

SEQ ID NO: 328570 - DNA, 20 bp, Artificial Sequence
  Description of Artificial Sequence: Synthetic oligonucleotide
  Target: LAMA2; (+) strand; PAM type: YTN; PAM sequence: TTA
tgtatgtctaaattttaatc

SEQ ID NO: 328571 - DNA, 20 bp, Artificial Sequence
  Description of Artificial Sequence: Synthetic oligonucleotide
  Target: LAMA2; (+) strand; PAM type: YTN; PAM sequence: CTA
aattttaatcacagcaaatt

SEQ ID NO: 328572 - DNA, 20 bp, Artificial Sequence
  Description of Artificial Sequence: Synthetic oligonucleotide
  Target: LAMA2; (+) strand; PAM type: YTN; PAM sequence: TTT
taatcacagcaaatttatgg

SEQ ID NO: 328573 - DNA, 20 bp, Artificial Sequence
  Description of Artificial Sequence: Synthetic oligonucleotide
  Target: LAMA2; (+) strand; PAM type: YTN; PAM sequence: TTT
aatcacagcaaatttatggt

SEQ ID NO: 328574 - DNA, 20 bp, Artificial Sequence
  Description of Artificial Sequence: Synthetic oligonucleotide
  Target: LAMA2; (+) strand; PAM type: YTN; PAM sequence: TTA
atcacagcaaatttatggtg

SEQ ID NO: 328575 - DNA, 20 bp, Artificial Sequence
  Description of Artificial Sequence: Synthetic oligonucleotide
  Target: LAMA2; (+) strand; PAM type: YTN; PAM sequence: TTT
atggtgtaatcctatcttaa

SEQ ID NO: 328576 - DNA, 20 bp, Artificial Sequence
  Description of Artificial Sequence: Synthetic oligonucleotide
  Target: LAMA2; (+) strand; PAM type: YTN; PAM sequence: TTA
tggtgtaatcctatcttaat

SEQ ID NO: 328577 - DNA, 20 bp, Artificial Sequence
  Description of Artificial Sequence: Synthetic oligonucleotide
  Target: LAMA2; (+) strand; PAM type: YTN; PAM sequence: CTA
tcttaattagatggatgatg

SEQ ID NO: 328578 - DNA, 20 bp, Artificial Sequence
  Description of Artificial Sequence: Synthetic oligonucleotide
  Target: LAMA2; (+) strand; PAM type: YTN; PAM sequence: CTT
aattagatggatgatgtcct

SEQ ID NO: 328579 - DNA, 20 bp, Artificial Sequence
  Description of Artificial Sequence: Synthetic oligonucleotide
  Target: LAMA2; (+) strand; PAM type: YTN; PAM sequence: TTA
attagatggatgatgtcctt

SEQ ID NO: 328580 - DNA, 20 bp, Artificial Sequence
  Description of Artificial Sequence: Synthetic oligonucleotide
  Target: LAMA2; (+) strand; PAM type: YTN; PAM sequence: TTA
gatggatgatgtcctttgtt

SEQ ID NO: 328581 - DNA, 20 bp, Artificial Sequence
  Description of Artificial Sequence: Synthetic oligonucleotide
  Target: LAMA2; (+) strand; PAM type: YTN; PAM sequence: CTT
tgttgggaatttaataaaat

SEQ ID NO: 328582 - DNA, 20 bp, Artificial Sequence
  Description of Artificial Sequence: Synthetic oligonucleotide
  Target: LAMA2; (+) strand; PAM type: YTN; PAM sequence: TTT
gttgggaatttaataaaatc

SEQ ID NO: 328583 - DNA, 20 bp, Artificial Sequence
  Description of Artificial Sequence: Synthetic oligonucleotide
  Target: LAMA2; (+) strand; PAM type: YTN; PAM sequence: TTG
ttgggaatttaataaaatct

SEQ ID NO: 328584 - DNA, 20 bp, Artificial Sequence
  Description of Artificial Sequence: Synthetic oligonucleotide
  Target: LAMA2; (+) strand; PAM type: YTN; PAM sequence: TTG
ggaatttaataaaatctaat

SEQ ID NO: 328585 - DNA, 20 bp, Artificial Sequence
  Description of Artificial Sequence: Synthetic oligonucleotide
  Target: LAMA2; (+) strand; PAM type: YTN; PAM sequence: TTT
aataaaatctaatactgctt

SEQ ID NO: 328586 - DNA, 20 bp, Artificial Sequence
  Description of Artificial Sequence: Synthetic oligonucleotide
  Target: LAMA2; (+) strand; PAM type: YTN; PAM sequence: TTA
ataaaatctaatactgctta

SEQ ID NO: 328587 - DNA, 20 bp, Artificial Sequence
  Description of Artificial Sequence: Synthetic oligonucleotide
  Target: LAMA2; (+) strand; PAM type: YTN; PAM sequence: CTA
atactgcttagctggaccaa

SEQ ID NO: 328588 - DNA, 20 bp, Artificial Sequence
  Description of Artificial Sequence: Synthetic oligonucleotide
  Target: LAMA2; (+) strand; PAM type: YTN; PAM sequence: CTG
cttagctggaccaagtggat

SEQ ID NO: 328589 - DNA, 20 bp, Artificial Sequence
  Description of Artificial Sequence: Synthetic oligonucleotide
  Target: LAMA2; (+) strand; PAM type: YTN; PAM sequence: CTT
agctggaccaagtggataag

SEQ ID NO: 328590 - DNA, 20 bp, Artificial Sequence
  Description of Artificial Sequence: Synthetic oligonucleotide
  Target: LAMA2; (+) strand; PAM type: YTN; PAM sequence: TTA
gctggaccaagtggataaga

SEQ ID NO: 328591 - DNA, 20 bp, Artificial Sequence
  Description of Artificial Sequence: Synthetic oligonucleotide
  Target: LAMA2; (+) strand; PAM type: YTN; PAM sequence: CTG
gaccaagtggataagatgac

SEQ ID NO: 328592 - DNA, 20 bp, Artificial Sequence
  Description of Artificial Sequence: Synthetic oligonucleotide
  Target: LAMA2; (+) strand; PAM type: YTN; PAM sequence: TTT
gaatccatagtggaccttgt

SEQ ID NO: 328593 - DNA, 20 bp, Artificial Sequence
  Description of Artificial Sequence: Synthetic oligonucleotide
  Target: LAMA2; (+) strand; PAM type: YTN; PAM sequence: TTG
aatccatagtggaccttgta

SEQ ID NO: 328594 - DNA, 20 bp, Artificial Sequence
  Description of Artificial Sequence: Synthetic oligonucleotide
  Target: LAMA2; (+) strand; PAM type: YTN; PAM sequence: CTT
gtagcccttcttttatttgg

SEQ ID NO: 328595 - DNA, 20 bp, Artificial Sequence
  Description of Artificial Sequence: Synthetic oligonucleotide
  Target: LAMA2; (+) strand; PAM type: YTN; PAM sequence: TTG
tagcccttcttttatttggg

SEQ ID NO: 328596 - DNA, 20 bp, Artificial Sequence
  Description of Artificial Sequence: Synthetic oligonucleotide
  Target: LAMA2; (+) strand; PAM type: YTN; PAM sequence: CTT
cttttatttgggtatctact

SEQ ID NO: 328597 - DNA, 20 bp, Artificial Sequence
  Description of Artificial Sequence: Synthetic oligonucleotide
  Target: LAMA2; (+) strand; PAM type: YTN; PAM sequence: TTC
ttttatttgggtatctacta

SEQ ID NO: 328598 - DNA, 20 bp, Artificial Sequence
  Description of Artificial Sequence: Synthetic oligonucleotide
  Target: LAMA2; (+) strand; PAM type: YTN; PAM sequence: CTT
ttatttgggtatctactata

SEQ ID NO: 328599 - DNA, 20 bp, Artificial Sequence
  Description of Artificial Sequence: Synthetic oligonucleotide
  Target: LAMA2; (+) strand; PAM type: YTN; PAM sequence: TTT
tatttgggtatctactatat

SEQ ID NO: 328600 - DNA, 20 bp, Artificial Sequence
  Description of Artificial Sequence: Synthetic oligonucleotide
  Target: LAMA2; (+) strand; PAM type: YTN; PAM sequence: TTT
atttgggtatctactatata

SEQ ID NO: 328601 - DNA, 20 bp, Artificial Sequence
  Description of Artificial Sequence: Synthetic oligonucleotide
  Target: LAMA2; (+) strand; PAM type: YTN; PAM sequence: TTA
tttgggtatctactatatag

SEQ ID NO: 328602 - DNA, 20 bp, Artificial Sequence
  Description of Artificial Sequence: Synthetic oligonucleotide
  Target: LAMA2; (+) strand; PAM type: YTN; PAM sequence: TTT
gggtatctactatatagaga

SEQ ID NO: 328603 - DNA, 20 bp, Artificial Sequence
  Description of Artificial Sequence: Synthetic oligonucleotide
  Target: LAMA2; (+) strand; PAM type: YTN; PAM sequence: TTG
ggtatctactatatagagaa

SEQ ID NO: 328604 - DNA, 20 bp, Artificial Sequence
  Description of Artificial Sequence: Synthetic oligonucleotide
  Target: LAMA2; (+) strand; PAM type: YTN; PAM sequence: CTA
ctatatagagaaaacattgg

SEQ ID NO: 328605 - DNA, 20 bp, Artificial Sequence
  Description of Artificial Sequence: Synthetic oligonucleotide
  Target: LAMA2; (+) strand; PAM type: YTN; PAM sequence: CTA
tatagagaaaacattggtat

SEQ ID NO: 328606 - DNA, 20 bp, Artificial Sequence
  Description of Artificial Sequence: Synthetic oligonucleotide
  Target: LAMA2; (+) strand; PAM type: YTN; PAM sequence: TTG
gtattctataaacatgccta

SEQ ID NO: 328607 - DNA, 20 bp, Artificial Sequence
  Description of Artificial Sequence: Synthetic oligonucleotide
  Target: LAMA2; (+) strand; PAM type: YTN; PAM sequence: TTC
tataaacatgcctaagatcc

SEQ ID NO: 328608 - DNA, 20 bp, Artificial Sequence
  Description of Artificial Sequence: Synthetic oligonucleotide
  Target: LAMA2; (+) strand; PAM type: YTN; PAM sequence: CTA
taaacatgcctaagatccat

SEQ ID NO: 328609 - DNA, 20 bp, Artificial Sequence
  Description of Artificial Sequence: Synthetic oligonucleotide
  Target: LAMA2; (+) strand; PAM type: YTN; PAM sequence: CTA
agatccattggagtatgtat

SEQ ID NO: 328610 - DNA, 20 bp, Artificial Sequence
  Description of Artificial Sequence: Synthetic oligonucleotide
  Target: LAMA2; (+) strand; PAM type: YTN; PAM sequence: TTG
gagtatgtatggttagctct

SEQ ID NO: 328611 - DNA, 20 bp, Artificial Sequence
  Description of Artificial Sequence: Synthetic oligonucleotide
  Target: LAMA2; (+) strand; PAM type: YTN; PAM sequence: TTA
gctctgtttattttcttttt

SEQ ID NO: 328612 - DNA, 20 bp, Artificial Sequence
  Description of Artificial Sequence: Synthetic oligonucleotide
  Target: LAMA2; (+) strand; PAM type: YTN; PAM sequence: CTC
tgtttattttctttttggtt

SEQ ID NO: 328613 - DNA, 20 bp, Artificial Sequence
  Description of Artificial Sequence: Synthetic oligonucleotide
  Target: LAMA2; (+) strand; PAM type: YTN; PAM sequence: CTG
tttattttctttttggttac

SEQ ID NO: 328614 - DNA, 20 bp, Artificial Sequence
  Description of Artificial Sequence: Synthetic oligonucleotide
  Target: LAMA2; (+) strand; PAM type: YTN; PAM sequence: TTT
attttctttttggttacaat

SEQ ID NO: 328615 - DNA, 20 bp, Artificial Sequence
  Description of Artificial Sequence: Synthetic oligonucleotide
  Target: LAMA2; (+) strand; PAM type: YTN; PAM sequence: TTA
ttttctttttggttacaata

SEQ ID NO: 328616 - DNA, 20 bp, Artificial Sequence
  Description of Artificial Sequence: Synthetic oligonucleotide
  Target: LAMA2; (+) strand; PAM type: YTN; PAM sequence: TTT
tctttttggttacaataaaa

SEQ ID NO: 328617 - DNA, 20 bp, Artificial Sequence
  Description of Artificial Sequence: Synthetic oligonucleotide
  Target: LAMA2; (+) strand; PAM type: YTN; PAM sequence: TTT
ctttttggttacaataaaaa

SEQ ID NO: 328618 - DNA, 20 bp, Artificial Sequence
  Description of Artificial Sequence: Synthetic oligonucleotide
  Target: LAMA2; (+) strand; PAM type: YTN; PAM sequence: TTC
tttttggttacaataaaaat

SEQ ID NO: 328619 - DNA, 20 bp, Artificial Sequence
  Description of Artificial Sequence: Synthetic oligonucleotide
  Target: LAMA2; (+) strand; PAM type: YTN; PAM sequence: CTT
tttggttacaataaaaatac

SEQ ID NO: 328620 - DNA, 20 bp, Artificial Sequence
  Description of Artificial Sequence: Synthetic oligonucleotide
  Target: LAMA2; (+) strand; PAM type: YTN; PAM sequence: TTT
ttggttacaataaaaatact

SEQ ID NO: 328621 - DNA, 20 bp, Artificial Sequence
  Description of Artificial Sequence: Synthetic oligonucleotide
  Target: LAMA2; (+) strand; PAM type: YTN; PAM sequence: TTT
tggttacaataaaaatactt

SEQ ID NO: 328622 - DNA, 20 bp, Artificial Sequence
  Description of Artificial Sequence: Synthetic oligonucleotide
  Target: LAMA2; (+) strand; PAM type: YTN; PAM sequence: TTT
ggttacaataaaaatactta

SEQ ID NO: 328623 - DNA, 20 bp, Artificial Sequence
  Description of Artificial Sequence: Synthetic oligonucleotide
  Target: LAMA2; (+) strand; PAM type: YTN; PAM sequence: TTG
gttacaataaaaatacttaa

SEQ ID NO: 328624 - DNA, 20 bp, Artificial Sequence
  Description of Artificial Sequence: Synthetic oligonucleotide
  Target: LAMA2; (+) strand; PAM type: YTN; PAM sequence: TTA
caataaaaatacttaacatt

SEQ ID NO: 328625 - DNA, 20 bp, Artificial Sequence
  Description of Artificial Sequence: Synthetic oligonucleotide
  Target: LAMA2; (+) strand; PAM type: YTN; PAM sequence: CTT
aacattttcactgtaacctg

SEQ ID NO: 328626 - DNA, 20 bp, Artificial Sequence
  Description of Artificial Sequence: Synthetic oligonucleotide
  Target: LAMA2; (+) strand; PAM type: YTN; PAM sequence: TTA
acattttcactgtaacctgt

SEQ ID NO: 328627 - DNA, 20 bp, Artificial Sequence
  Description of Artificial Sequence: Synthetic oligonucleotide
  Target: LAMA2; (+) strand; PAM type: YTN; PAM sequence: TTT
tcactgtaacctgtttggaa

SEQ ID NO: 328628 - DNA, 20 bp, Artificial Sequence
  Description of Artificial Sequence: Synthetic oligonucleotide
  Target: LAMA2; (+) strand; PAM type: YTN; PAM sequence: TTT
cactgtaacctgtttggaag

SEQ ID NO: 328629 - DNA, 20 bp, Artificial Sequence
  Description of Artificial Sequence: Synthetic oligonucleotide
  Target: LAMA2; (+) strand; PAM type: YTN; PAM sequence: TTC
actgtaacctgtttggaagg

SEQ ID NO: 328630 - DNA, 20 bp, Artificial Sequence
  Description of Artificial Sequence: Synthetic oligonucleotide
  Target: LAMA2; (+) strand; PAM type: YTN; PAM sequence: CTG
taacctgtttggaaggaaga

SEQ ID NO: 328631 - DNA, 20 bp, Artificial Sequence
  Description of Artificial Sequence: Synthetic oligonucleotide
  Target: LAMA2; (+) strand; PAM type: YTN; PAM sequence: CTG
tttggaaggaagagagtaag

SEQ ID NO: 328632 - DNA, 20 bp, Artificial Sequence
  Description of Artificial Sequence: Synthetic oligonucleotide
  Target: LAMA2; (+) strand; PAM type: YTN; PAM sequence: TTT
ggaaggaagagagtaagcaa

SEQ ID NO: 328633 - DNA, 20 bp, Artificial Sequence
  Description of Artificial Sequence: Synthetic oligonucleotide
  Target: LAMA2; (+) strand; PAM type: YTN; PAM sequence: TTG
gaaggaagagagtaagcaat

SEQ ID NO: 328634 - DNA, 20 bp, Artificial Sequence
  Description of Artificial Sequence: Synthetic oligonucleotide
  Target: LAMA2; (+) strand; PAM type: YTN; PAM sequence: TTT
taaaaattaattcaacagag

SEQ ID NO: 328635 - DNA, 20 bp, Artificial Sequence
  Description of Artificial Sequence: Synthetic oligonucleotide
  Target: LAMA2; (+) strand; PAM type: YTN; PAM sequence: TTT
aaaaattaattcaacagaga

SEQ ID NO: 328636 - DNA, 20 bp, Artificial Sequence
  Description of Artificial Sequence: Synthetic oligonucleotide
  Target: LAMA2; (+) strand; PAM type: YTN; PAM sequence: TTA
aaaattaattcaacagagaa

SEQ ID NO: 328637 - DNA, 20 bp, Artificial Sequence
  Description of Artificial Sequence: Synthetic oligonucleotide
  Target: LAMA2; (+) strand; PAM type: YTN; PAM sequence: TTA
attcaacagagaaacatgta

SEQ ID NO: 328638 - DNA, 20 bp, Artificial Sequence
  Description of Artificial Sequence: Synthetic oligonucleotide
  Target: LAMA2; (+) strand; PAM type: YTN; PAM sequence: TTC
aacagagaaacatgtactac

SEQ ID NO: 328639 - DNA, 20 bp, Artificial Sequence
  Description of Artificial Sequence: Synthetic oligonucleotide
  Target: LAMA2; (+) strand; PAM type: YTN; PAM sequence: CTA
ctttttctgattaaaaaaaa

SEQ ID NO: 328640 - DNA, 20 bp, Artificial Sequence
  Description of Artificial Sequence: Synthetic oligonucleotide
  Target: LAMA2; (+) strand; PAM type: YTN; PAM sequence: CTT
tttctgattaaaaaaaaaaa

SEQ ID NO: 328641 - DNA, 20 bp, Artificial Sequence
  Description of Artificial Sequence: Synthetic oligonucleotide
  Target: LAMA2; (+) strand; PAM type: YTN; PAM sequence: TTT
ttctgattaaaaaaaaaaag

SEQ ID NO: 328642 - DNA, 20 bp, Artificial Sequence
  Description of Artificial Sequence: Synthetic oligonucleotide
  Target: LAMA2; (+) strand; PAM type: YTN; PAM sequence: TTT
tctgattaaaaaaaaaaaga

SEQ ID NO: 328643 - DNA, 20 bp, Artificial Sequence
  Description of Artificial Sequence: Synthetic oligonucleotide
  Target: LAMA2; (+) strand; PAM type: YTN; PAM sequence: TTT
ctgattaaaaaaaaaaagaa

SEQ ID NO: 328644 - DNA, 20 bp, Artificial Sequence
  Description of Artificial Sequence: Synthetic oligonucleotide
  Target: LAMA2; (+) strand; PAM type: YTN; PAM sequence: TTC
tgattaaaaaaaaaaagaag

SEQ ID NO: 328645 - DNA, 20 bp, Artificial Sequence
  Description of Artificial Sequence: Synthetic oligonucleotide
  Target: LAMA2; (+) strand; PAM type: YTN; PAM sequence: CTG
attaaaaaaaaaaagaagaa

SEQ ID NO: 328646 - DNA, 20 bp, Artificial Sequence
  Description of Artificial Sequence: Synthetic oligonucleotide
  Target: LAMA2; (+) strand; PAM type: YTN; PAM sequence: TTA
aaaaaaaaaagaagaagaag

SEQ ID NO: 328647 - DNA, 20 bp, Artificial Sequence
  Description of Artificial Sequence: Synthetic oligonucleotide
  Target: LAMA2; (+) strand; PAM type: YTN; PAM sequence: CTC
agaagcctccaaaaatactc

SEQ ID NO: 328648 - DNA, 20 bp, Artificial Sequence
  Description of Artificial Sequence: Synthetic oligonucleotide
  Target: LAMA2; (+) strand; PAM type: YTN; PAM sequence: CTC
caaaaatactcttttatttt

SEQ ID NO: 328649 - DNA, 20 bp, Artificial Sequence
  Description of Artificial Sequence: Synthetic oligonucleotide
  Target: LAMA2; (+) strand; PAM type: YTN; PAM sequence: CTC
ttttattttagaagctgaaa

SEQ ID NO: 328650 - DNA, 20 bp, Artificial Sequence
  Description of Artificial Sequence: Synthetic oligonucleotide
  Target: LAMA2; (+) strand; PAM type: YTN; PAM sequence: CTT
ttattttagaagctgaaaag

SEQ ID NO: 328651 - DNA, 20 bp, Artificial Sequence
  Description of Artificial Sequence: Synthetic oligonucleotide
  Target: LAMA2; (+) strand; PAM type: YTN; PAM sequence: TTT
tattttagaagctgaaaagg

SEQ ID NO: 328652 - DNA, 20 bp, Artificial Sequence
  Description of Artificial Sequence: Synthetic oligonucleotide
  Target: LAMA2; (+) strand; PAM type: YTN; PAM sequence: TTT
attttagaagctgaaaaggg

SEQ ID NO: 328653 - DNA, 20 bp, Artificial Sequence
  Description of Artificial Sequence: Synthetic oligonucleotide
  Target: LAMA2; (+) strand; PAM type: YTN; PAM sequence: TTA
ttttagaagctgaaaagggc

SEQ ID NO: 328654 - DNA, 20 bp, Artificial Sequence
  Description of Artificial Sequence: Synthetic oligonucleotide
  Target: LAMA2; (+) strand; PAM type: YTN; PAM sequence: TTT
tagaagctgaaaagggcaga

SEQ ID NO: 328655 - DNA, 20 bp, Artificial Sequence
  Description of Artificial Sequence: Synthetic oligonucleotide
  Target: LAMA2; (+) strand; PAM type: YTN; PAM sequence: TTT
agaagctgaaaagggcagat

SEQ ID NO: 328656 - DNA, 20 bp, Artificial Sequence
  Description of Artificial Sequence: Synthetic oligonucleotide
  Target: LAMA2; (+) strand; PAM type: YTN; PAM sequence: TTA
gaagctgaaaagggcagatc

SEQ ID NO: 328657 - DNA, 20 bp, Artificial Sequence
  Description of Artificial Sequence: Synthetic oligonucleotide
  Target: LAMA2; (+) strand; PAM type: YTN; PAM sequence: CTG
aaaagggcagatctaactaa

SEQ ID NO: 328658 - DNA, 20 bp, Artificial Sequence
  Description of Artificial Sequence: Synthetic oligonucleotide
  Target: LAMA2; (+) strand; PAM type: YTN; PAM sequence: CTA
actaatggtacaagacaaat

SEQ ID NO: 328659 - DNA, 20 bp, Artificial Sequence
  Description of Artificial Sequence: Synthetic oligonucleotide
  Target: LAMA2; (+) strand; PAM type: YTN; PAM sequence: CTA
atggtacaagacaaattgaa

SEQ ID NO: 328660 - DNA, 20 bp, Artificial Sequence
  Description of Artificial Sequence: Synthetic oligonucleotide
  Target: LAMA2; (+) strand; PAM type: YTN; PAM sequence: TTG
aaagtcctataaacaggaat

SEQ ID NO: 328661 - DNA, 20 bp, Artificial Sequence
  Description of Artificial Sequence: Synthetic oligonucleotide
  Target: LAMA2; (+) strand; PAM type: YTN; PAM sequence: CTA
taaacaggaatagaatactt

SEQ ID NO: 328662 - DNA, 20 bp, Artificial Sequence
  Description of Artificial Sequence: Synthetic oligonucleotide
  Target: LAMA2; (+) strand; PAM type: YTN; PAM sequence: CTT
actctctttggttttgtttg

SEQ ID NO: 328663 - DNA, 20 bp, Artificial Sequence
  Description of Artificial Sequence: Synthetic oligonucleotide
  Target: LAMA2; (+) strand; PAM type: YTN; PAM sequence: TTA
ctctctttggttttgtttgc

SEQ ID NO: 328664 - DNA, 20 bp, Artificial Sequence
  Description of Artificial Sequence: Synthetic oligonucleotide
  Target: LAMA2; (+) strand; PAM type: YTN; PAM sequence: CTC
tctttggttttgtttgcttc

SEQ ID NO: 328665 - DNA, 20 bp, Artificial Sequence
  Description of Artificial Sequence: Synthetic oligonucleotide
  Target: LAMA2; (+) strand; PAM type: YTN; PAM sequence: CTC
tttggttttgtttgcttctg

SEQ ID NO: 328666 - DNA, 20 bp, Artificial Sequence
  Description of Artificial Sequence: Synthetic oligonucleotide
  Target: LAMA2; (+) strand; PAM type: YTN; PAM sequence: CTT
tggttttgtttgcttctgaa

SEQ ID NO: 328667 - DNA, 20 bp, Artificial Sequence
  Description of Artificial Sequence: Synthetic oligonucleotide
  Target: LAMA2; (+) strand; PAM type: YTN; PAM sequence: TTT
ggttttgtttgcttctgaac

SEQ ID NO: 328668 - DNA, 20 bp, Artificial Sequence
  Description of Artificial Sequence: Synthetic oligonucleotide
  Target: LAMA2; (+) strand; PAM type: YTN; PAM sequence: TTG
gttttgtttgcttctgaaca

SEQ ID NO: 328669 - DNA, 20 bp, Artificial Sequence
  Description of Artificial Sequence: Synthetic oligonucleotide
  Target: LAMA2; (+) strand; PAM type: YTN; PAM sequence: TTT
tgtttgcttctgaacaactg

SEQ ID NO: 328670 - DNA, 20 bp, Artificial Sequence
  Description of Artificial Sequence: Synthetic oligonucleotide
  Target: LAMA2; (+) strand; PAM type: YTN; PAM sequence: TTT
gtttgcttctgaacaactgg

SEQ ID NO: 328671 - DNA, 20 bp, Artificial Sequence
  Description of Artificial Sequence: Synthetic oligonucleotide
  Target: LAMA2; (+) strand; PAM type: YTN; PAM sequence: TTG
tttgcttctgaacaactgga

SEQ ID NO: 328672 - DNA, 20 bp, Artificial Sequence
  Description of Artificial Sequence: Synthetic oligonucleotide
  Target: LAMA2; (+) strand; PAM type: YTN; PAM sequence: TTT
gcttctgaacaactggattc

SEQ ID NO: 328673 - DNA, 20 bp, Artificial Sequence
  Description of Artificial Sequence: Synthetic oligonucleotide
  Target: LAMA2; (+) strand; PAM type: YTN; PAM sequence: TTG
cttctgaacaactggattca

SEQ ID NO: 328674 - DNA, 20 bp, Artificial Sequence
  Description of Artificial Sequence: Synthetic oligonucleotide
  Target: LAMA2; (+) strand; PAM type: YTN; PAM sequence: CTT
ctgaacaactggattcaacc

SEQ ID NO: 328675 - DNA, 20 bp, Artificial Sequence
  Description of Artificial Sequence: Synthetic oligonucleotide
  Target: LAMA2; (+) strand; PAM type: YTN; PAM sequence: TTC
tgaacaactggattcaacct

SEQ ID NO: 328676 - DNA, 20 bp, Artificial Sequence
  Description of Artificial Sequence: Synthetic oligonucleotide
  Target: LAMA2; (+) strand; PAM type: YTN; PAM sequence: CTG
aacaactggattcaaccttc

SEQ ID NO: 328677 - DNA, 20 bp, Artificial Sequence
  Description of Artificial Sequence: Synthetic oligonucleotide
  Target: LAMA2; (+) strand; PAM type: YTN; PAM sequence: CTG
gattcaaccttctttctttc

SEQ ID NO: 328678 - DNA, 20 bp, Artificial Sequence
  Description of Artificial Sequence: Synthetic oligonucleotide
  Target: LAMA2; (+) strand; PAM type: YTN; PAM sequence: TTC
aaccttctttctttcccccc

SEQ ID NO: 328679 - DNA, 20 bp, Artificial Sequence
  Description of Artificial Sequence: Synthetic oligonucleotide
  Target: LAMA2; (+) strand; PAM type: YTN; PAM sequence: CTT
ctttctttccccccagctct

SEQ ID NO: 328680 - DNA, 20 bp, Artificial Sequence
  Description of Artificial Sequence: Synthetic oligonucleotide
  Target: LAMA2; (+) strand; PAM type: YTN; PAM sequence: TTC
tttctttccccccagctctt

SEQ ID NO: 328681 - DNA, 20 bp, Artificial Sequence
  Description of Artificial Sequence: Synthetic oligonucleotide
  Target: LAMA2; (+) strand; PAM type: YTN; PAM sequence: CTT
tctttccccccagctcttag

SEQ ID NO: 328682 - DNA, 20 bp, Artificial Sequence
  Description of Artificial Sequence: Synthetic oligonucleotide
  Target: LAMA2; (+) strand; PAM type: YTN; PAM sequence: TTT
ctttccccccagctcttagg

SEQ ID NO: 328683 - DNA, 20 bp, Artificial Sequence
  Description of Artificial Sequence: Synthetic oligonucleotide
  Target: LAMA2; (+) strand; PAM type: YTN; PAM sequence: TTC
tttccccccagctcttaggc

SEQ ID NO: 328684 - DNA, 20 bp, Artificial Sequence
  Description of Artificial Sequence: Synthetic oligonucleotide
  Target: LAMA2; (+) strand; PAM type: YTN; PAM sequence: CTT
tccccccagctcttaggcat

SEQ ID NO: 328685 - DNA, 20 bp, Artificial Sequence
  Description of Artificial Sequence: Synthetic oligonucleotide
  Target: LAMA2; (+) strand; PAM type: YTN; PAM sequence: TTT
ccccccagctcttaggcatt

SEQ ID NO: 328686 - DNA, 20 bp, Artificial Sequence
  Description of Artificial Sequence: Synthetic oligonucleotide
  Target: LAMA2; (+) strand; PAM type: YTN; PAM sequence: TTC
cccccagctcttaggcattg

SEQ ID NO: 328687 - DNA, 20 bp, Artificial Sequence
  Description of Artificial Sequence: Synthetic oligonucleotide
  Target: LAMA2; (+) strand; PAM type: YTN; PAM sequence: CTC
ttaggcattgttgtgtcagg

SEQ ID NO: 328688 - DNA, 20 bp, Artificial Sequence
  Description of Artificial Sequence: Synthetic oligonucleotide
  Target: LAMA2; (+) strand; PAM type: YTN; PAM sequence: CTT
aggcattgttgtgtcaggac

SEQ ID NO: 328689 - DNA, 20 bp, Artificial Sequence
  Description of Artificial Sequence: Synthetic oligonucleotide
  Target: LAMA2; (+) strand; PAM type: YTN; PAM sequence: TTA
ggcattgttgtgtcaggaca

SEQ ID NO: 328690 - DNA, 20 bp, Artificial Sequence
  Description of Artificial Sequence: Synthetic oligonucleotide
  Target: LAMA2; (+) strand; PAM type: YTN; PAM sequence: TTG
ttgtgtcaggacagctatgg

SEQ ID NO: 328691 - DNA, 20 bp, Artificial Sequence
  Description of Artificial Sequence: Synthetic oligonucleotide
  Target: LAMA2; (+) strand; PAM type: YTN; PAM sequence: TTG
tgtcaggacagctatggttc

SEQ ID NO: 328692 - DNA, 20 bp, Artificial Sequence
  Description of Artificial Sequence: Synthetic oligonucleotide
  Target: LAMA2; (+) strand; PAM type: YTN; PAM sequence: CTA
tggttcaaattgggctgatt

SEQ ID NO: 328693 - DNA, 20 bp, Artificial Sequence
  Description of Artificial Sequence: Synthetic oligonucleotide
  Target: LAMA2; (+) strand; PAM type: YTN; PAM sequence: TTC
aaattgggctgattttccag

SEQ ID NO: 328694 - DNA, 20 bp, Artificial Sequence
  Description of Artificial Sequence: Synthetic oligonucleotide
  Target: LAMA2; (+) strand; PAM type: YTN; PAM sequence: TTG
ggctgattttccagttctat

SEQ ID NO: 328695 - DNA, 20 bp, Artificial Sequence
  Description of Artificial Sequence: Synthetic oligonucleotide
  Target: LAMA2; (+) strand; PAM type: YTN; PAM sequence: CTG
attttccagttctattaaac

SEQ ID NO: 328696 - DNA, 20 bp, Artificial Sequence
  Description of Artificial Sequence: Synthetic oligonucleotide
  Target: LAMA2; (+) strand; PAM type: YTN; PAM sequence: TTT
tccagttctattaaaccctt

SEQ ID NO: 328697 - DNA, 20 bp, Artificial Sequence
  Description of Artificial Sequence: Synthetic oligonucleotide
  Target: LAMA2; (+) strand; PAM type: YTN; PAM sequence: TTT
ccagttctattaaacccttc

SEQ ID NO: 328698 - DNA, 20 bp, Artificial Sequence
  Description of Artificial Sequence: Synthetic oligonucleotide
  Target: LAMA2; (+) strand; PAM type: YTN; PAM sequence: TTC
cagttctattaaacccttca

SEQ ID NO: 328699 - DNA, 20 bp, Artificial Sequence
  Description of Artificial Sequence: Synthetic oligonucleotide
  Target: LAMA2; (+) strand; PAM type: YTN; PAM sequence: TTC
tattaaacccttcatctgca

SEQ ID NO: 328700 - DNA, 20 bp, Artificial Sequence
  Description of Artificial Sequence: Synthetic oligonucleotide
  Target: LAMA2; (+) strand; PAM type: YTN; PAM sequence: CTA
ttaaacccttcatctgcatc

SEQ ID NO: 328701 - DNA, 20 bp, Artificial Sequence
  Description of Artificial Sequence: Synthetic oligonucleotide
  Target: LAMA2; (+) strand; PAM type: YTN; PAM sequence: TTA
aacccttcatctgcatcgtg

SEQ ID NO: 328702 - DNA, 20 bp, Artificial Sequence
  Description of Artificial Sequence: Synthetic oligonucleotide
  Target: LAMA2; (+) strand; PAM type: YTN; PAM sequence: CTT
catctgcatcgtggatcaaa

SEQ ID NO: 328703 - DNA, 20 bp, Artificial Sequence
  Description of Artificial Sequence: Synthetic oligonucleotide
  Target: LAMA2; (+) strand; PAM type: YTN; PAM sequence: TTC
atctgcatcgtggatcaaat

SEQ ID NO: 328704 - DNA, 20 bp, Artificial Sequence
  Description of Artificial Sequence: Synthetic oligonucleotide
  Target: LAMA2; (+) strand; PAM type: YTN; PAM sequence: CTG
catcgtggatcaaatacatt

SEQ ID NO: 328705 - DNA, 20 bp, Artificial Sequence
  Description of Artificial Sequence: Synthetic oligonucleotide
  Target: LAMA2; (+) strand; PAM type: YTN; PAM sequence: TTA
actagctgtctgcagtgcac

SEQ ID NO: 328706 - DNA, 20 bp, Artificial Sequence
  Description of Artificial Sequence: Synthetic oligonucleotide
  Target: LAMA2; (+) strand; PAM type: YTN; PAM sequence: CTA
gctgtctgcagtgcacagct

SEQ ID NO: 328707 - DNA, 20 bp, Artificial Sequence
  Description of Artificial Sequence: Synthetic oligonucleotide
  Target: LAMA2; (+) strand; PAM type: YTN; PAM sequence: CTG
tctgcagtgcacagctggaa

SEQ ID NO: 328708 - DNA, 20 bp, Artificial Sequence
  Description of Artificial Sequence: Synthetic oligonucleotide
  Target: LAMA2; (+) strand; PAM type: YTN; PAM sequence: CTG
cagtgcacagctggaaatca

SEQ ID NO: 328709 - DNA, 20 bp, Artificial Sequence
  Description of Artificial Sequence: Synthetic oligonucleotide
  Target: LAMA2; (+) strand; PAM type: YTN; PAM sequence: CTG
gaaatcattctcttccacat

SEQ ID NO: 328710 - DNA, 20 bp, Artificial Sequence
  Description of Artificial Sequence: Synthetic oligonucleotide
  Target: LAMA2; (+) strand; PAM type: YTN; PAM sequence: TTC
tcttccacattttgctttgt

SEQ ID NO: 328711 - DNA, 20 bp, Artificial Sequence
  Description of Artificial Sequence: Synthetic oligonucleotide
  Target: LAMA2; (+) strand; PAM type: YTN; PAM sequence: CTC
ttccacattttgctttgtgc

SEQ ID NO: 328712 - DNA, 20 bp, Artificial Sequence
  Description of Artificial Sequence: Synthetic oligonucleotide
  Target: LAMA2; (+) strand; PAM type: YTN; PAM sequence: CTT
ccacattttgctttgtgcca

SEQ ID NO: 328713 - DNA, 20 bp, Artificial Sequence
  Description of Artificial Sequence: Synthetic oligonucleotide
  Target: LAMA2; (+) strand; PAM type: YTN; PAM sequence: TTC
cacattttgctttgtgccat

SEQ ID NO: 328714 - DNA, 20 bp, Artificial Sequence
  Description of Artificial Sequence: Synthetic oligonucleotide
  Target: LAMA2; (+) strand; PAM type: YTN; PAM sequence: TTT
tgctttgtgccatttttgtt

SEQ ID NO: 328715 - DNA, 20 bp, Artificial Sequence
  Description of Artificial Sequence: Synthetic oligonucleotide
  Target: LAMA2; (+) strand; PAM type: YTN; PAM sequence: TTT
gctttgtgccatttttgttt

SEQ ID NO: 328716 - DNA, 20 bp, Artificial Sequence
  Description of Artificial Sequence: Synthetic oligonucleotide
  Target: LAMA2; (+) strand; PAM type: YTN; PAM sequence: TTG
ctttgtgccatttttgtttt

SEQ ID NO: 328717 - DNA, 20 bp, Artificial Sequence
  Description of Artificial Sequence: Synthetic oligonucleotide
  Target: LAMA2; (+) strand; PAM type: YTN; PAM sequence: CTT
tgtgccatttttgttttata

SEQ ID NO: 328718 - DNA, 20 bp, Artificial Sequence
  Description of Artificial Sequence: Synthetic oligonucleotide
  Target: LAMA2; (+) strand; PAM type: YTN; PAM sequence: TTT
gtgccatttttgttttatac

SEQ ID NO: 328719 - DNA, 20 bp, Artificial Sequence
  Description of Artificial Sequence: Synthetic oligonucleotide
  Target: LAMA2; (+) strand; PAM type: YTN; PAM sequence: TTG
tgccatttttgttttatacc

SEQ ID NO: 328720 - DNA, 20 bp, Artificial Sequence
  Description of Artificial Sequence: Synthetic oligonucleotide
  Target: LAMA2; (+) strand; PAM type: YTN; PAM sequence: TTT
ttgttttataccaatatgct

SEQ ID NO: 328721 - DNA, 20 bp, Artificial Sequence
  Description of Artificial Sequence: Synthetic oligonucleotide
  Target: LAMA2; (+) strand; PAM type: YTN; PAM sequence: TTT
tgttttataccaatatgctc

SEQ ID NO: 328722 - DNA, 20 bp, Artificial Sequence
  Description of Artificial Sequence: Synthetic oligonucleotide
  Target: LAMA2; (+) strand; PAM type: YTN; PAM sequence: TTT
gttttataccaatatgctct

SEQ ID NO: 328723 - DNA, 20 bp, Artificial Sequence
  Description of Artificial Sequence: Synthetic oligonucleotide
  Target: LAMA2; (+) strand; PAM type: YTN; PAM sequence: TTG
ttttataccaatatgctctg

SEQ ID NO: 328724 - DNA, 20 bp, Artificial Sequence
  Description of Artificial Sequence: Synthetic oligonucleotide
  Target: LAMA2; (+) strand; PAM type: YTN; PAM sequence: TTT
tataccaatatgctctgaca

SEQ ID NO: 328725 - DNA, 20 bp, Artificial Sequence
  Description of Artificial Sequence: Synthetic oligonucleotide
  Target: LAMA2; (+) strand; PAM type: YTN; PAM sequence: TTT
ataccaatatgctctgacac

SEQ ID NO: 328726 - DNA, 20 bp, Artificial Sequence
  Description of Artificial Sequence: Synthetic oligonucleotide
  Target: LAMA2; (+) strand; PAM type: YTN; PAM sequence: TTA
taccaatatgctctgacaca

SEQ ID NO: 328727 - DNA, 20 bp, Artificial Sequence
  Description of Artificial Sequence: Synthetic oligonucleotide
  Target: LAMA2; (+) strand; PAM type: YTN; PAM sequence: CTC
tgacacacccacatagctca

SEQ ID NO: 328728 - DNA, 20 bp, Artificial Sequence
  Description of Artificial Sequence: Synthetic oligonucleotide
  Target: LAMA2; (+) strand; PAM type: YTN; PAM sequence: CTG
acacacccacatagctcagg

SEQ ID NO: 328729 - DNA, 20 bp, Artificial Sequence
  Description of Artificial Sequence: Synthetic oligonucleotide
  Target: LAMA2; (+) strand; PAM type: YTN; PAM sequence: CTC
aggatttcagcagtcaatta

SEQ ID NO: 328730 - DNA, 20 bp, Artificial Sequence
  Description of Artificial Sequence: Synthetic oligonucleotide
  Target: LAMA2; (+) strand; PAM type: YTN; PAM sequence: TTT
cagcagtcaattatctcctt

SEQ ID NO: 328731 - DNA, 20 bp, Artificial Sequence
  Description of Artificial Sequence: Synthetic oligonucleotide
  Target: LAMA2; (+) strand; PAM type: YTN; PAM sequence: TTC
agcagtcaattatctccttt

SEQ ID NO: 328732 - DNA, 20 bp, Artificial Sequence
  Description of Artificial Sequence: Synthetic oligonucleotide
  Target: LAMA2; (+) strand; PAM type: YTN; PAM sequence: TTA
tctccttttcttccttgata

SEQ ID NO: 328733 - DNA, 20 bp, Artificial Sequence
  Description of Artificial Sequence: Synthetic oligonucleotide
  Target: LAMA2; (+) strand; PAM type: YTN; PAM sequence: CTC
cttttcttccttgataggtc

SEQ ID NO: 328734 - DNA, 20 bp, Artificial Sequence
  Description of Artificial Sequence: Synthetic oligonucleotide
  Target: LAMA2; (+) strand; PAM type: YTN; PAM sequence: CTT
ttcttccttgataggtctta

SEQ ID NO: 328735 - DNA, 20 bp, Artificial Sequence
  Description of Artificial Sequence: Synthetic oligonucleotide
  Target: LAMA2; (+) strand; PAM type: YTN; PAM sequence: TTT
tcttccttgataggtcttag

SEQ ID NO: 328736 - DNA, 20 bp, Artificial Sequence
  Description of Artificial Sequence: Synthetic oligonucleotide
  Target: LAMA2; (+) strand; PAM type: YTN; PAM sequence: TTT
cttccttgataggtcttaga

SEQ ID NO: 328737 - DNA, 20 bp, Artificial Sequence
  Description of Artificial Sequence: Synthetic oligonucleotide
  Target: LAMA2; (+) strand; PAM type: YTN; PAM sequence: TTC
ttccttgataggtcttagaa

SEQ ID NO: 328738 - DNA, 20 bp, Artificial Sequence
  Description of Artificial Sequence: Synthetic oligonucleotide
  Target: LAMA2; (+) strand; PAM type: YTN; PAM sequence: CTT
ccttgataggtcttagaaca

SEQ ID NO: 328739 - DNA, 20 bp, Artificial Sequence
  Description of Artificial Sequence: Synthetic oligonucleotide
  Target: LAMA2; (+) strand; PAM type: YTN; PAM sequence: TTC
cttgataggtcttagaacat

SEQ ID NO: 328740 - DNA, 20 bp, Artificial Sequence
  Description of Artificial Sequence: Synthetic oligonucleotide
  Target: LAMA2; (+) strand; PAM type: YTN; PAM sequence: CTT
gataggtcttagaacatttt

SEQ ID NO: 328741 - DNA, 20 bp, Artificial Sequence
  Description of Artificial Sequence: Synthetic oligonucleotide
  Target: LAMA2; (+) strand; PAM type: YTN; PAM sequence: TTG
ataggtcttagaacatttta

SEQ ID NO: 328742 - DNA, 20 bp, Artificial Sequence
  Description of Artificial Sequence: Synthetic oligonucleotide
  Target: LAMA2; (+) strand; PAM type: YTN; PAM sequence: CTT
agaacattttaaattggtgt

SEQ ID NO: 328743 - DNA, 20 bp, Artificial Sequence
  Description of Artificial Sequence: Synthetic oligonucleotide
  Target: LAMA2; (+) strand; PAM type: YTN; PAM sequence: TTA
gaacattttaaattggtgta

SEQ ID NO: 328744 - DNA, 20 bp, Artificial Sequence
  Description of Artificial Sequence: Synthetic oligonucleotide
  Target: LAMA2; (+) strand; PAM type: YTN; PAM sequence: TTT
taaattggtgtattctcttt

SEQ ID NO: 328745 - DNA, 20 bp, Artificial Sequence
  Description of Artificial Sequence: Synthetic oligonucleotide
  Target: LAMA2; (+) strand; PAM type: YTN; PAM sequence: TTT
aaattggtgtattctctttt

SEQ ID NO: 328746 - DNA, 20 bp, Artificial Sequence
  Description of Artificial Sequence: Synthetic oligonucleotide
  Target: LAMA2; (+) strand; PAM type: YTN; PAM sequence: TTA
aattggtgtattctcttttg

SEQ ID NO: 328747 - DNA, 20 bp, Artificial Sequence
  Description of Artificial Sequence: Synthetic oligonucleotide
  Target: LAMA2; (+) strand; PAM type: YTN; PAM sequence: TTG
gtgtattctcttttgtcttt

SEQ ID NO: 328748 - DNA, 20 bp, Artificial Sequence
  Description of Artificial Sequence: Synthetic oligonucleotide
  Target: LAMA2; (+) strand; PAM type: YTN; PAM sequence: TTC
tcttttgtcttttaaatatt

SEQ ID NO: 328749 - DNA, 20 bp, Artificial Sequence
  Description of Artificial Sequence: Synthetic oligonucleotide
  Target: LAMA2; (+) strand; PAM type: YTN; PAM sequence: CTC
ttttgtcttttaaatattga

SEQ ID NO: 328750 - DNA, 20 bp, Artificial Sequence
  Description of Artificial Sequence: Synthetic oligonucleotide
  Target: LAMA2; (+) strand; PAM type: YTN; PAM sequence: CTT
ttgtcttttaaatattgaat

SEQ ID NO: 328751 - DNA, 20 bp, Artificial Sequence
  Description of Artificial Sequence: Synthetic oligonucleotide
  Target: LAMA2; (+) strand; PAM type: YTN; PAM sequence: TTT
tgtcttttaaatattgaatc

SEQ ID NO: 328752 - DNA, 20 bp, Artificial Sequence
  Description of Artificial Sequence: Synthetic oligonucleotide
  Target: LAMA2; (+) strand; PAM type: YTN; PAM sequence: TTT
gtcttttaaatattgaatca

SEQ ID NO: 328753 - DNA, 20 bp, Artificial Sequence
  Description of Artificial Sequence: Synthetic oligonucleotide
  Target: LAMA2; (+) strand; PAM type: YTN; PAM sequence: TTG
tcttttaaatattgaatcac

SEQ ID NO: 328754 - DNA, 20 bp, Artificial Sequence
  Description of Artificial Sequence: Synthetic oligonucleotide
  Target: LAMA2; (+) strand; PAM type: YTN; PAM sequence: CTT
ttaaatattgaatcacttgc

SEQ ID NO: 328755 - DNA, 20 bp, Artificial Sequence
  Description of Artificial Sequence: Synthetic oligonucleotide
  Target: LAMA2; (+) strand; PAM type: YTN; PAM sequence: TTT
taaatattgaatcacttgca

SEQ ID NO: 328756 - DNA, 20 bp, Artificial Sequence
  Description of Artificial Sequence: Synthetic oligonucleotide
  Target: LAMA2; (+) strand; PAM type: YTN; PAM sequence: TTT
aaatattgaatcacttgcaa

SEQ ID NO: 328757 - DNA, 20 bp, Artificial Sequence
  Description of Artificial Sequence: Synthetic oligonucleotide
  Target: LAMA2; (+) strand; PAM type: YTN; PAM sequence: TTA
aatattgaatcacttgcaaa

SEQ ID NO: 328758 - DNA, 20 bp, Artificial Sequence
  Description of Artificial Sequence: Synthetic oligonucleotide
  Target: LAMA2; (+) strand; PAM type: YTN; PAM sequence: TTG
aatcacttgcaaacatctct

SEQ ID NO: 328759 - DNA, 20 bp, Artificial Sequence
  Description of Artificial Sequence: Synthetic oligonucleotide
  Target: LAMA2; (+) strand; PAM type: YTN; PAM sequence: CTT
gcaaacatctctgcttgcat

SEQ ID NO: 328760 - DNA, 20 bp, Artificial Sequence
  Description of Artificial Sequence: Synthetic oligonucleotide
  Target: LAMA2; (+) strand; PAM type: YTN; PAM sequence: TTG
caaacatctctgcttgcatg

SEQ ID NO: 328761 - DNA, 20 bp, Artificial Sequence
  Description of Artificial Sequence: Synthetic oligonucleotide
  Target: LAMA2; (+) strand; PAM type: YTN; PAM sequence: CTC
tgcttgcatgaatatttttc

SEQ ID NO: 328762 - DNA, 20 bp, Artificial Sequence
  Description of Artificial Sequence: Synthetic oligonucleotide
  Target: LAMA2; (+) strand; PAM type: YTN; PAM sequence: CTG
cttgcatgaatatttttcaa

SEQ ID NO: 328763 - DNA, 20 bp, Artificial Sequence
  Description of Artificial Sequence: Synthetic oligonucleotide
  Target: LAMA2; (+) strand; PAM type: YTN; PAM sequence: CTT
gcatgaatatttttcaaaat

SEQ ID NO: 328764 - DNA, 20 bp, Artificial Sequence
  Description of Artificial Sequence: Synthetic oligonucleotide
  Target: LAMA2; (+) strand; PAM type: YTN; PAM sequence: TTG
catgaatatttttcaaaatg

SEQ ID NO: 328765 - DNA, 20 bp, Artificial Sequence
  Description of Artificial Sequence: Synthetic oligonucleotide
  Target: LAMA2; (+) strand; PAM type: YTN; PAM sequence: TTT
ttcaaaatgctccatagacc

SEQ ID NO: 328766 - DNA, 20 bp, Artificial Sequence
  Description of Artificial Sequence: Synthetic oligonucleotide
  Target: LAMA2; (+) strand; PAM type: YTN; PAM sequence: TTT
tcaaaatgctccatagacct

SEQ ID NO: 328767 - DNA, 20 bp, Artificial Sequence
  Description of Artificial Sequence: Synthetic oligonucleotide
  Target: LAMA2; (+) strand; PAM type: YTN; PAM sequence: TTT
caaaatgctccatagaccta

SEQ ID NO: 328768 - DNA, 20 bp, Artificial Sequence
  Description of Artificial Sequence: Synthetic oligonucleotide
  Target: LAMA2; (+) strand; PAM type: YTN; PAM sequence: TTC
aaaatgctccatagacctag

SEQ ID NO: 328769 - DNA, 20 bp, Artificial Sequence
  Description of Artificial Sequence: Synthetic oligonucleotide
  Target: LAMA2; (+) strand; PAM type: YTN; PAM sequence: CTC
catagacctagaagctgaaa

SEQ ID NO: 328770 - DNA, 20 bp, Artificial Sequence
  Description of Artificial Sequence: Synthetic oligonucleotide
  Target: LAMA2; (+) strand; PAM type: YTN; PAM sequence: CTA
gaagctgaaatggaaagtta

SEQ ID NO: 328771 - DNA, 20 bp, Artificial Sequence
  Description of Artificial Sequence: Synthetic oligonucleotide
  Target: LAMA2; (+) strand; PAM type: YTN; PAM sequence: CTG
aaatggaaagttagaatcat

SEQ ID NO: 328772 - DNA, 20 bp, Artificial Sequence
  Description of Artificial Sequence: Synthetic oligonucleotide
  Target: LAMA2; (+) strand; PAM type: YTN; PAM sequence: TTA
gaatcattcaaacacaaatt

SEQ ID NO: 328773 - DNA, 20 bp, Artificial Sequence
  Description of Artificial Sequence: Synthetic oligonucleotide
  Target: LAMA2; (+) strand; PAM type: YTN; PAM sequence: TTC
aaacacaaattttgatttta

SEQ ID NO: 328774 - DNA, 20 bp, Artificial Sequence
  Description of Artificial Sequence: Synthetic oligonucleotide
  Target: LAMA2; (+) strand; PAM type: YTN; PAM sequence: TTT
tgattttattcctttgagag

SEQ ID NO: 328775 - DNA, 20 bp, Artificial Sequence
  Description of Artificial Sequence: Synthetic oligonucleotide
  Target: LAMA2; (+) strand; PAM type: YTN; PAM sequence: TTT
gattttattcctttgagaga

SEQ ID NO: 328776 - DNA, 20 bp, Artificial Sequence
  Description of Artificial Sequence: Synthetic oligonucleotide
  Target: LAMA2; (+) strand; PAM type: YTN; PAM sequence: TTG
attttattcctttgagagat

SEQ ID NO: 328777 - DNA, 20 bp, Artificial Sequence
  Description of Artificial Sequence: Synthetic oligonucleotide
  Target: LAMA2; (+) strand; PAM type: YTN; PAM sequence: TTT
tattcctttgagagatggta

SEQ ID NO: 328778 - DNA, 20 bp, Artificial Sequence
  Description of Artificial Sequence: Synthetic oligonucleotide
  Target: LAMA2; (+) strand; PAM type: YTN; PAM sequence: TTT
attcctttgagagatggtag

SEQ ID NO: 328779 - DNA, 20 bp, Artificial Sequence
  Description of Artificial Sequence: Synthetic oligonucleotide
  Target: LAMA2; (+) strand; PAM type: YTN; PAM sequence: TTA
ttcctttgagagatggtagg

SEQ ID NO: 328780 - DNA, 20 bp, Artificial Sequence
  Description of Artificial Sequence: Synthetic oligonucleotide
  Target: LAMA2; (+) strand; PAM type: YTN; PAM sequence: TTC
ctttgagagatggtaggtga

SEQ ID NO: 328781 - DNA, 20 bp, Artificial Sequence
  Description of Artificial Sequence: Synthetic oligonucleotide
  Target: LAMA2; (+) strand; PAM type: YTN; PAM sequence: CTT
tgagagatggtaggtgattg

SEQ ID NO: 328782 - DNA, 20 bp, Artificial Sequence
  Description of Artificial Sequence: Synthetic oligonucleotide
  Target: LAMA2; (+) strand; PAM type: YTN; PAM sequence: TTT
gagagatggtaggtgattgg

SEQ ID NO: 328783 - DNA, 20 bp, Artificial Sequence
  Description of Artificial Sequence: Synthetic oligonucleotide
  Target: LAMA2; (+) strand; PAM type: YTN; PAM sequence: TTG
agagatggtaggtgattggc

SEQ ID NO: 328784 - DNA, 20 bp, Artificial Sequence
  Description of Artificial Sequence: Synthetic oligonucleotide
  Target: LAMA2; (+) strand; PAM type: YTN; PAM sequence: TTG
gcatgaaatagcaggataaa

SEQ ID NO: 328785 - DNA, 20 bp, Artificial Sequence
  Description of Artificial Sequence: Synthetic oligonucleotide
  Target: LAMA2; (+) strand; PAM type: YTN; PAM sequence: TTG
tctaccaaaagtaagatgag

SEQ ID NO: 328786 - DNA, 20 bp, Artificial Sequence
  Description of Artificial Sequence: Synthetic oligonucleotide
  Target: LAMA2; (+) strand; PAM type: YTN; PAM sequence: CTA
ccaaaagtaagatgagagag

SEQ ID NO: 328787 - DNA, 20 bp, Artificial Sequence
  Description of Artificial Sequence: Synthetic oligonucleotide
  Target: LAMA2; (+) strand; PAM type: YTN; PAM sequence: TTA
ttgtaaacagtatatgatat

SEQ ID NO: 328788 - DNA, 20 bp, Artificial Sequence
  Description of Artificial Sequence: Synthetic oligonucleotide
  Target: LAMA2; (+) strand; PAM type: YTN; PAM sequence: TTG
taaacagtatatgatatctt

SEQ ID NO: 328789 - DNA, 20 bp, Artificial Sequence
  Description of Artificial Sequence: Synthetic oligonucleotide
  Target: LAMA2; (+) strand; PAM type: YTN; PAM sequence: CTT
agagattattttaaaatgaa

SEQ ID NO: 328790 - DNA, 20 bp, Artificial Sequence
  Description of Artificial Sequence: Synthetic oligonucleotide
  Target: LAMA2; (+) strand; PAM type: YTN; PAM sequence: TTA
gagattattttaaaatgaat

SEQ ID NO: 328791 - DNA, 20 bp, Artificial Sequence
  Description of Artificial Sequence: Synthetic oligonucleotide
  Target: LAMA2; (+) strand; PAM type: YTN; PAM sequence: TTA
ttttaaaatgaatatattga

SEQ ID NO: 328792 - DNA, 20 bp, Artificial Sequence
  Description of Artificial Sequence: Synthetic oligonucleotide
  Target: LAMA2; (+) strand; PAM type: YTN; PAM sequence: TTT
taaaatgaatatattgaagt

SEQ ID NO: 328793 - DNA, 20 bp, Artificial Sequence
  Description of Artificial Sequence: Synthetic oligonucleotide
  Target: LAMA2; (+) strand; PAM type: YTN; PAM sequence: TTT
aaaatgaatatattgaagtg

SEQ ID NO: 328794 - DNA, 20 bp, Artificial Sequence
  Description of Artificial Sequence: Synthetic oligonucleotide
  Target: LAMA2; (+) strand; PAM type: YTN; PAM sequence: TTA
aaatgaatatattgaagtga

SEQ ID NO: 328795 - DNA, 20 bp, Artificial Sequence
  Description of Artificial Sequence: Synthetic oligonucleotide
  Target: LAMA2; (+) strand; PAM type: YTN; PAM sequence: TTG
aagtgaattgttgcattgac

SEQ ID NO: 328796 - DNA, 20 bp, Artificial Sequence
  Description of Artificial Sequence: Synthetic oligonucleotide
  Target: LAMA2; (+) strand; PAM type: YTN; PAM sequence: TTG
ttgcattgactgaatggctt

SEQ ID NO: 328797 - DNA, 20 bp, Artificial Sequence
  Description of Artificial Sequence: Synthetic oligonucleotide
  Target: LAMA2; (+) strand; PAM type: YTN; PAM sequence: TTG
cattgactgaatggcttttc

SEQ ID NO: 328798 - DNA, 20 bp, Artificial Sequence
  Description of Artificial Sequence: Synthetic oligonucleotide
  Target: LAMA2; (+) strand; PAM type: YTN; PAM sequence: TTG
actgaatggcttttccatag

SEQ ID NO: 328799 - DNA, 20 bp, Artificial Sequence
  Description of Artificial Sequence: Synthetic oligonucleotide
  Target: LAMA2; (+) strand; PAM type: YTN; PAM sequence: CTG
aatggcttttccatagaaag

SEQ ID NO: 328800 - DNA, 20 bp, Artificial Sequence
  Description of Artificial Sequence: Synthetic oligonucleotide
  Target: LAMA2; (+) strand; PAM type: YTN; PAM sequence: CTT
ttccatagaaagactccagc

SEQ ID NO: 328801 - DNA, 20 bp, Artificial Sequence
  Description of Artificial Sequence: Synthetic oligonucleotide
  Target: LAMA2; (+) strand; PAM type: YTN; PAM sequence: TTT
tccatagaaagactccagct

SEQ ID NO: 328802 - DNA, 20 bp, Artificial Sequence
  Description of Artificial Sequence: Synthetic oligonucleotide
  Target: LAMA2; (+) strand; PAM type: YTN; PAM sequence: TTT
ccatagaaagactccagcta

SEQ ID NO: 328803 - DNA, 20 bp, Artificial Sequence
  Description of Artificial Sequence: Synthetic oligonucleotide
  Target: LAMA2; (+) strand; PAM type: YTN; PAM sequence: TTC
catagaaagactccagctat

SEQ ID NO: 328804 - DNA, 20 bp, Artificial Sequence
  Description of Artificial Sequence: Synthetic oligonucleotide
  Target: LAMA2; (+) strand; PAM type: YTN; PAM sequence: CTC
cagctatcatcagttatcaa

SEQ ID NO: 328805 - DNA, 20 bp, Artificial Sequence
  Description of Artificial Sequence: Synthetic oligonucleotide
  Target: LAMA2; (+) strand; PAM type: YTN; PAM sequence: CTA
tcatcagttatcaattacat

SEQ ID NO: 328806 - DNA, 20 bp, Artificial Sequence
  Description of Artificial Sequence: Synthetic oligonucleotide
  Target: LAMA2; (+) strand; PAM type: YTN; PAM sequence: TTA
tcaattacattattggtggt

SEQ ID NO: 328807 - DNA, 20 bp, Artificial Sequence
  Description of Artificial Sequence: Synthetic oligonucleotide
  Target: LAMA2; (+) strand; PAM type: YTN; PAM sequence: TTA
cattattggtggtctttaca

SEQ ID NO: 328808 - DNA, 20 bp, Artificial Sequence
  Description of Artificial Sequence: Synthetic oligonucleotide
  Target: LAMA2; (+) strand; PAM type: YTN; PAM sequence: TTA
ttggtggtctttacaaactt

SEQ ID NO: 328809 - DNA, 20 bp, Artificial Sequence
  Description of Artificial Sequence: Synthetic oligonucleotide
  Target: LAMA2; (+) strand; PAM type: YTN; PAM sequence: TTG
gtggtctttacaaacttgac

SEQ ID NO: 328810 - DNA, 20 bp, Artificial Sequence
  Description of Artificial Sequence: Synthetic oligonucleotide
  Target: LAMA2; (+) strand; PAM type: YTN; PAM sequence: CTT
tacaaacttgactataaatg

SEQ ID NO: 328811 - DNA, 20 bp, Artificial Sequence
  Description of Artificial Sequence: Synthetic oligonucleotide
  Target: LAMA2; (+) strand; PAM type: YTN; PAM sequence: TTT
acaaacttgactataaatgt

SEQ ID NO: 328812 - DNA, 20 bp, Artificial Sequence
  Description of Artificial Sequence: Synthetic oligonucleotide
  Target: LAMA2; (+) strand; PAM type: YTN; PAM sequence: TTA
caaacttgactataaatgtt

SEQ ID NO: 328813 - DNA, 20 bp, Artificial Sequence
  Description of Artificial Sequence: Synthetic oligonucleotide
  Target: LAMA2; (+) strand; PAM type: YTN; PAM sequence: CTT
gactataaatgttgagacat

SEQ ID NO: 328814 - DNA, 20 bp, Artificial Sequence
  Description of Artificial Sequence: Synthetic oligonucleotide
  Target: LAMA2; (+) strand; PAM type: YTN; PAM sequence: TTG
actataaatgttgagacatt

SEQ ID NO: 328815 - DNA, 20 bp, Artificial Sequence
  Description of Artificial Sequence: Synthetic oligonucleotide
  Target: LAMA2; (+) strand; PAM type: YTN; PAM sequence: CTA
taaatgttgagacatttttc

SEQ ID NO: 328816 - DNA, 20 bp, Artificial Sequence
  Description of Artificial Sequence: Synthetic oligonucleotide
  Target: LAMA2; (+) strand; PAM type: YTN; PAM sequence: TTG
agacatttttcgagaaatac

SEQ ID NO: 328817 - DNA, 20 bp, Artificial Sequence
  Description of Artificial Sequence: Synthetic oligonucleotide
  Target: LAMA2; (+) strand; PAM type: YTN; PAM sequence: TTT
ttcgagaaatacatacacat

SEQ ID NO: 328818 - DNA, 20 bp, Artificial Sequence
  Description of Artificial Sequence: Synthetic oligonucleotide
  Target: LAMA2; (+) strand; PAM type: YTN; PAM sequence: TTT
tcgagaaatacatacacatg

SEQ ID NO: 328819 - DNA, 20 bp, Artificial Sequence
  Description of Artificial Sequence: Synthetic oligonucleotide
  Target: LAMA2; (+) strand; PAM type: YTN; PAM sequence: TTT
cgagaaatacatacacatgt

SEQ ID NO: 328820 - DNA, 20 bp, Artificial Sequence
  Description of Artificial Sequence: Synthetic oligonucleotide
  Target: LAMA2; (+) strand; PAM type: YTN; PAM sequence: TTC
gagaaatacatacacatgtg

SEQ ID NO: 328821 - DNA, 20 bp, Artificial Sequence
  Description of Artificial Sequence: Synthetic oligonucleotide
  Target: LAMA2; (+) strand; PAM type: YTN; PAM sequence: CTA
ttggtatctccgcatgttag

SEQ ID NO: 328822 - DNA, 20 bp, Artificial Sequence
  Description of Artificial Sequence: Synthetic oligonucleotide
  Target: LAMA2; (+) strand; PAM type: YTN; PAM sequence: TTG
gtatctccgcatgttagtta

SEQ ID NO: 328823 - DNA, 20 bp, Artificial Sequence
  Description of Artificial Sequence: Synthetic oligonucleotide
  Target: LAMA2; (+) strand; PAM type: YTN; PAM sequence: CTC
cgcatgttagttaaaaatat

SEQ ID NO: 328824 - DNA, 20 bp, Artificial Sequence
  Description of Artificial Sequence: Synthetic oligonucleotide
  Target: LAMA2; (+) strand; PAM type: YTN; PAM sequence: TTA
gttaaaaatataataatatg

SEQ ID NO: 328825 - DNA, 20 bp, Artificial Sequence
  Description of Artificial Sequence: Synthetic oligonucleotide
  Target: LAMA2; (+) strand; PAM type: YTN; PAM sequence: TTA
aaaatataataatatgccaa

SEQ ID NO: 328826 - DNA, 20 bp, Artificial Sequence
  Description of Artificial Sequence: Synthetic oligonucleotide
  Target: LAMA2; (+) strand; PAM type: YTN; PAM sequence: CTA
ctccacaatattcatttaat

SEQ ID NO: 328827 - DNA, 20 bp, Artificial Sequence
  Description of Artificial Sequence: Synthetic oligonucleotide
  Target: LAMA2; (+) strand; PAM type: YTN; PAM sequence: CTC
cacaatattcatttaattta

SEQ ID NO: 328828 - DNA, 20 bp, Artificial Sequence
  Description of Artificial Sequence: Synthetic oligonucleotide
  Target: LAMA2; (+) strand; PAM type: YTN; PAM sequence: TTC
atttaatttaattttttttt

SEQ ID NO: 328829 - DNA, 20 bp, Artificial Sequence
  Description of Artificial Sequence: Synthetic oligonucleotide
  Target: LAMA2; (+) strand; PAM type: YTN; PAM sequence: TTT
aatttaattttttttttttt

SEQ ID NO: 328830 - DNA, 20 bp, Artificial Sequence
  Description of Artificial Sequence: Synthetic oligonucleotide
  Target: LAMA2; (+) strand; PAM type: YTN; PAM sequence: TTA
atttaatttttttttttttt

SEQ ID NO: 328831 - DNA, 20 bp, Artificial Sequence
  Description of Artificial Sequence: Synthetic oligonucleotide
  Target: LAMA2; (+) strand; PAM type: YTN; PAM sequence: TTT
aatttttttttttttttttg

SEQ ID NO: 328832 - DNA, 20 bp, Artificial Sequence
  Description of Artificial Sequence: Synthetic oligonucleotide
  Target: LAMA2; (+) strand; PAM type: YTN; PAM sequence: TTA
atttttttttttttttttga

SEQ ID NO: 328833 - DNA, 20 bp, Artificial Sequence
  Description of Artificial Sequence: Synthetic oligonucleotide
  Target: LAMA2; (+) strand; PAM type: YTN; PAM sequence: TTT
ttttttttttttttgagacg

SEQ ID NO: 328834 - DNA, 20 bp, Artificial Sequence
  Description of Artificial Sequence: Synthetic oligonucleotide
  Target: LAMA2; (+) strand; PAM type: YTN; PAM sequence: TTT
tttttttttttttgagacgg

SEQ ID NO: 328835 - DNA, 20 bp, Artificial Sequence
  Description of Artificial Sequence: Synthetic oligonucleotide
  Target: LAMA2; (+) strand; PAM type: YTN; PAM sequence: TTT
ttttttttttttgagacgga

SEQ ID NO: 328836 - DNA, 20 bp, Artificial Sequence
  Description of Artificial Sequence: Synthetic oligonucleotide
  Target: LAMA2; (+) strand; PAM type: YTN; PAM sequence: TTT
tttttttttttgagacggag

SEQ ID NO: 328837 - DNA, 20 bp, Artificial Sequence
  Description of Artificial Sequence: Synthetic oligonucleotide
  Target: LAMA2; (+) strand; PAM type: YTN; PAM sequence: TTT
ttttttttttgagacggagt

SEQ ID NO: 328838 - DNA, 20 bp, Artificial Sequence
  Description of Artificial Sequence: Synthetic oligonucleotide
  Target: LAMA2; (+) strand; PAM type: YTN; PAM sequence: TTT
tttttttttgagacggagtc

SEQ ID NO: 328839 - DNA, 20 bp, Artificial Sequence
  Description of Artificial Sequence: Synthetic oligonucleotide
  Target: LAMA2; (+) strand; PAM type: YTN; PAM sequence: TTT
ttttttttgagacggagtct

SEQ ID NO: 328840 - DNA, 20 bp, Artificial Sequence
  Description of Artificial Sequence: Synthetic oligonucleotide
  Target: LAMA2; (+) strand; PAM type: YTN; PAM sequence: TTT
tttttttgagacggagtctc

SEQ ID NO: 328841 - DNA, 20 bp, Artificial Sequence
  Description of Artificial Sequence: Synthetic oligonucleotide
  Target: LAMA2; (+) strand; PAM type: YTN; PAM sequence: TTT
ttttttgagacggagtctcg

SEQ ID NO: 328842 - DNA, 20 bp, Artificial Sequence
  Description of Artificial Sequence: Synthetic oligonucleotide
  Target: LAMA2; (+) strand; PAM type: YTN; PAM sequence: TTT
tttttgagacggagtctcgc

SEQ ID NO: 328843 - DNA, 20 bp, Artificial Sequence
  Description of Artificial Sequence: Synthetic oligonucleotide
  Target: LAMA2; (+) strand; PAM type: YTN; PAM sequence: TTT
ttttgagacggagtctcgct

SEQ ID NO: 328844 - DNA, 20 bp, Artificial Sequence
  Description of Artificial Sequence: Synthetic oligonucleotide
  Target: LAMA2; (+) strand; PAM type: YTN; PAM sequence: TTT
tttgagacggagtctcgctc

SEQ ID NO: 328845 - DNA, 20 bp, Artificial Sequence
  Description of Artificial Sequence: Synthetic oligonucleotide
  Target: LAMA2; (+) strand; PAM type: YTN; PAM sequence: TTT
ttgagacggagtctcgctct

SEQ ID NO: 328846 - DNA, 20 bp, Artificial Sequence
  Description of Artificial Sequence: Synthetic oligonucleotide
  Target: LAMA2; (+) strand; PAM type: YTN; PAM sequence: TTT
tgagacggagtctcgctctg

SEQ ID NO: 328847 - DNA, 20 bp, Artificial Sequence
  Description of Artificial Sequence: Synthetic oligonucleotide
  Target: LAMA2; (+) strand; PAM type: YTN; PAM sequence: TTT
gagacggagtctcgctctgt

SEQ ID NO: 328848 - DNA, 20 bp, Artificial Sequence
  Description of Artificial Sequence: Synthetic oligonucleotide
  Target: LAMA2; (+) strand; PAM type: YTN; PAM sequence: TTG
agacggagtctcgctctgtc

SEQ ID NO: 328849 - DNA, 20 bp, Artificial Sequence
  Description of Artificial Sequence: Synthetic oligonucleotide
  Target: LAMA2; (+) strand; PAM type: YTN; PAM sequence: CTC
gctctgtcgcccaggctgga

SEQ ID NO: 328850 - DNA, 20 bp, Artificial Sequence
  Description of Artificial Sequence: Synthetic oligonucleotide
  Target: LAMA2; (+) strand; PAM type: YTN; PAM sequence: CTC
tgtcgcccaggctggatgga

SEQ ID NO: 328851 - DNA, 20 bp, Artificial Sequence
  Description of Artificial Sequence: Synthetic oligonucleotide
  Target: LAMA2; (+) strand; PAM type: YTN; PAM sequence: CTG
tcgcccaggctggatggagt

SEQ ID NO: 328852 - DNA, 20 bp, Artificial Sequence
  Description of Artificial Sequence: Synthetic oligonucleotide
  Target: LAMA2; (+) strand; PAM type: YTN; PAM sequence: CTG
gatggagtgcagtggcgcga

SEQ ID NO: 328853 - DNA, 20 bp, Artificial Sequence
  Description of Artificial Sequence: Synthetic oligonucleotide
  Target: LAMA2; (+) strand; PAM type: YTN; PAM sequence: CTC
tgctcactgcaagctccgcc

SEQ ID NO: 328854 - DNA, 20 bp, Artificial Sequence
  Description of Artificial Sequence: Synthetic oligonucleotide
  Target: LAMA2; (+) strand; PAM type: YTN; PAM sequence: CTG
ctcactgcaagctccgcctc

SEQ ID NO: 328855 - DNA, 20 bp, Artificial Sequence
  Description of Artificial Sequence: Synthetic oligonucleotide
  Target: LAMA2; (+) strand; PAM type: YTN; PAM sequence: CTC
actgcaagctccgcctccca

SEQ ID NO: 328856 - DNA, 20 bp, Artificial Sequence
  Description of Artificial Sequence: Synthetic oligonucleotide
  Target: LAMA2; (+) strand; PAM type: YTN; PAM sequence: CTG
caagctccgcctcccaggtt

SEQ ID NO: 328857 - DNA, 20 bp, Artificial Sequence
  Description of Artificial Sequence: Synthetic oligonucleotide
  Target: LAMA2; (+) strand; PAM type: YTN; PAM sequence: CTC
cgcctcccaggttcacgcca

SEQ ID NO: 328858 - DNA, 20 bp, Artificial Sequence
  Description of Artificial Sequence: Synthetic oligonucleotide
  Target: LAMA2; (+) strand; PAM type: YTN; PAM sequence: CTC
ccaggttcacgccattctcc

SEQ ID NO: 328859 - DNA, 20 bp, Artificial Sequence
  Description of Artificial Sequence: Synthetic oligonucleotide
  Target: LAMA2; (+) strand; PAM type: YTN; PAM sequence: TTC
acgccattctcccgcctcag

SEQ ID NO: 328860 - DNA, 20 bp, Artificial Sequence
  Description of Artificial Sequence: Synthetic oligonucleotide
  Target: LAMA2; (+) strand; PAM type: YTN; PAM sequence: TTC
tcccgcctcagcctcccgag

SEQ ID NO: 328861 - DNA, 20 bp, Artificial Sequence
  Description of Artificial Sequence: Synthetic oligonucleotide
  Target: LAMA2; (+) strand; PAM type: YTN; PAM sequence: CTC
ccgcctcagcctcccgagta

SEQ ID NO: 328862 - DNA, 20 bp, Artificial Sequence
  Description of Artificial Sequence: Synthetic oligonucleotide
  Target: LAMA2; (+) strand; PAM type: YTN; PAM sequence: CTC
agcctcccgagtagctgcaa

SEQ ID NO: 328863 - DNA, 20 bp, Artificial Sequence
  Description of Artificial Sequence: Synthetic oligonucleotide
  Target: LAMA2; (+) strand; PAM type: YTN; PAM sequence: CTC
ccgagtagctgcaactacag

SEQ ID NO: 328864 - DNA, 20 bp, Artificial Sequence
  Description of Artificial Sequence: Synthetic oligonucleotide
  Target: LAMA2; (+) strand; PAM type: YTN; PAM sequence: CTG
caactacaggtgcttgccac

SEQ ID NO: 328865 - DNA, 20 bp, Artificial Sequence
  Description of Artificial Sequence: Synthetic oligonucleotide
  Target: LAMA2; (+) strand; PAM type: YTN; PAM sequence: CTA
caggtgcttgccaccacacc

SEQ ID NO: 328866 - DNA, 20 bp, Artificial Sequence
  Description of Artificial Sequence: Synthetic oligonucleotide
  Target: LAMA2; (+) strand; PAM type: YTN; PAM sequence: CTT
gccaccacacctggctaatt

SEQ ID NO: 328867 - DNA, 20 bp, Artificial Sequence
  Description of Artificial Sequence: Synthetic oligonucleotide
  Target: LAMA2; (+) strand; PAM type: YTN; PAM sequence: TTG
ccaccacacctggctaattt

SEQ ID NO: 328868 - DNA, 20 bp, Artificial Sequence
  Description of Artificial Sequence: Synthetic oligonucleotide
  Target: LAMA2; (+) strand; PAM type: YTN; PAM sequence: CTG
gctaattttttgtattttta

SEQ ID NO: 328869 - DNA, 20 bp, Artificial Sequence
  Description of Artificial Sequence: Synthetic oligonucleotide
  Target: LAMA2; (+) strand; PAM type: YTN; PAM sequence: CTA
attttttgtatttttagtag

SEQ ID NO: 328870 - DNA, 20 bp, Artificial Sequence
  Description of Artificial Sequence: Synthetic oligonucleotide
  Target: LAMA2; (+) strand; PAM type: YTN; PAM sequence: TTT
tttgtatttttagtagagac

SEQ ID NO: 328871 - DNA, 20 bp, Artificial Sequence
  Description of Artificial Sequence: Synthetic oligonucleotide
  Target: LAMA2; (+) strand; PAM type: YTN; PAM sequence: TTT
ttgtatttttagtagagaca

SEQ ID NO: 328872 - DNA, 20 bp, Artificial Sequence
  Description of Artificial Sequence: Synthetic oligonucleotide
  Target: LAMA2; (+) strand; PAM type: YTN; PAM sequence: TTT
tgtatttttagtagagacag

SEQ ID NO: 328873 - DNA, 20 bp, Artificial Sequence
  Description of Artificial Sequence: Synthetic oligonucleotide
  Target: LAMA2; (+) strand; PAM type: YTN; PAM sequence: TTT
gtatttttagtagagacagg

SEQ ID NO: 328874 - DNA, 20 bp, Artificial Sequence
  Description of Artificial Sequence: Synthetic oligonucleotide
  Target: LAMA2; (+) strand; PAM type: YTN; PAM sequence: TTG
tatttttagtagagacaggg

SEQ ID NO: 328875 - DNA, 20 bp, Artificial Sequence
  Description of Artificial Sequence: Synthetic oligonucleotide
  Target: LAMA2; (+) strand; PAM type: YTN; PAM sequence: TTT
ttagtagagacagggtttca

SEQ ID NO: 328876 - DNA, 20 bp, Artificial Sequence
  Description of Artificial Sequence: Synthetic oligonucleotide
  Target: LAMA2; (+) strand; PAM type: YTN; PAM sequence: TTT
tagtagagacagggtttcac

SEQ ID NO: 328877 - DNA, 20 bp, Artificial Sequence
  Description of Artificial Sequence: Synthetic oligonucleotide
  Target: LAMA2; (+) strand; PAM type: YTN; PAM sequence: TTT
agtagagacagggtttcacc

SEQ ID NO: 328878 - DNA, 20 bp, Artificial Sequence
  Description of Artificial Sequence: Synthetic oligonucleotide
  Target: LAMA2; (+) strand; PAM type: YTN; PAM sequence: TTA
gtagagacagggtttcaccg

SEQ ID NO: 328879 - DNA, 20 bp, Artificial Sequence
  Description of Artificial Sequence: Synthetic oligonucleotide
  Target: LAMA2; (+) strand; PAM type: YTN; PAM sequence: TTT
caccgtgttagccaggatgg

SEQ ID NO: 328880 - DNA, 20 bp, Artificial Sequence
  Description of Artificial Sequence: Synthetic oligonucleotide
  Target: LAMA2; (+) strand; PAM type: YTN; PAM sequence: TTC
accgtgttagccaggatggt

SEQ ID NO: 328881 - DNA, 20 bp, Artificial Sequence
  Description of Artificial Sequence: Synthetic oligonucleotide
  Target: LAMA2; (+) strand; PAM type: YTN; PAM sequence: TTA
gccaggatggtcttgatctc

SEQ ID NO: 328882 - DNA, 20 bp, Artificial Sequence
  Description of Artificial Sequence: Synthetic oligonucleotide
  Target: LAMA2; (+) strand; PAM type: YTN; PAM sequence: CTT
gatctcctgacctcgtgatc

SEQ ID NO: 328883 - DNA, 20 bp, Artificial Sequence
  Description of Artificial Sequence: Synthetic oligonucleotide
  Target: LAMA2; (+) strand; PAM type: YTN; PAM sequence: TTG
atctcctgacctcgtgatct

SEQ ID NO: 328884 - DNA, 20 bp, Artificial Sequence
  Description of Artificial Sequence: Synthetic oligonucleotide
  Target: LAMA2; (+) strand; PAM type: YTN; PAM sequence: CTC
ctgacctcgtgatctgccca

SEQ ID NO: 328885 - DNA, 20 bp, Artificial Sequence
  Description of Artificial Sequence: Synthetic oligonucleotide
  Target: LAMA2; (+) strand; PAM type: YTN; PAM sequence: CTG
acctcgtgatctgcccacct

SEQ ID NO: 328886 - DNA, 20 bp, Artificial Sequence
  Description of Artificial Sequence: Synthetic oligonucleotide
  Target: LAMA2; (+) strand; PAM type: YTN; PAM sequence: CTC
gtgatctgcccaccttggcc

SEQ ID NO: 328887 - DNA, 20 bp, Artificial Sequence
  Description of Artificial Sequence: Synthetic oligonucleotide
  Target: LAMA2; (+) strand; PAM type: YTN; PAM sequence: CTG
cccaccttggcctcccaaag

SEQ ID NO: 328888 - DNA, 20 bp, Artificial Sequence
  Description of Artificial Sequence: Synthetic oligonucleotide
  Target: LAMA2; (+) strand; PAM type: YTN; PAM sequence: CTT
ggcctcccaaagtgtagttt

SEQ ID NO: 328889 - DNA, 20 bp, Artificial Sequence
  Description of Artificial Sequence: Synthetic oligonucleotide
  Target: LAMA2; (+) strand; PAM type: YTN; PAM sequence: TTG
gcctcccaaagtgtagttta

SEQ ID NO: 328890 - DNA, 20 bp, Artificial Sequence
  Description of Artificial Sequence: Synthetic oligonucleotide
  Target: LAMA2; (+) strand; PAM type: YTN; PAM sequence: CTC
ccaaagtgtagtttaatatt

SEQ ID NO: 328891 - DNA, 20 bp, Artificial Sequence
  Description of Artificial Sequence: Synthetic oligonucleotide
  Target: LAMA2; (+) strand; PAM type: YTN; PAM sequence: TTT
aatatttaagctgataaaac

SEQ ID NO: 328892 - DNA, 20 bp, Artificial Sequence
  Description of Artificial Sequence: Synthetic oligonucleotide
  Target: LAMA2; (+) strand; PAM type: YTN; PAM sequence: TTA
atatttaagctgataaaaca

SEQ ID NO: 328893 - DNA, 20 bp, Artificial Sequence
  Description of Artificial Sequence: Synthetic oligonucleotide
  Target: LAMA2; (+) strand; PAM type: YTN; PAM sequence: TTT
aagctgataaaacaagaaaa

SEQ ID NO: 328894 - DNA, 20 bp, Artificial Sequence
  Description of Artificial Sequence: Synthetic oligonucleotide
  Target: LAMA2; (+) strand; PAM type: YTN; PAM sequence: TTA
agctgataaaacaagaaaat

SEQ ID NO: 328895 - DNA, 20 bp, Artificial Sequence
  Description of Artificial Sequence: Synthetic oligonucleotide
  Target: LAMA2; (+) strand; PAM type: YTN; PAM sequence: CTG
ataaaacaagaaaatatatt

SEQ ID NO: 328896 - DNA, 20 bp, Artificial Sequence
  Description of Artificial Sequence: Synthetic oligonucleotide
  Target: LAMA2; (+) strand; PAM type: YTN; PAM sequence: TTT
aaaaaatttttgctagacta

SEQ ID NO: 328897 - DNA, 20 bp, Artificial Sequence
  Description of Artificial Sequence: Synthetic oligonucleotide
  Target: LAMA2; (+) strand; PAM type: YTN; PAM sequence: TTA
aaaaatttttgctagactac

SEQ ID NO: 328898 - DNA, 20 bp, Artificial Sequence
  Description of Artificial Sequence: Synthetic oligonucleotide
  Target: LAMA2; (+) strand; PAM type: YTN; PAM sequence: TTT
ttgctagactacattagaaa

SEQ ID NO: 328899 - DNA, 20 bp, Artificial Sequence
  Description of Artificial Sequence: Synthetic oligonucleotide
  Target: LAMA2; (+) strand; PAM type: YTN; PAM sequence: TTT
tgctagactacattagaaag

SEQ ID NO: 328900 - DNA, 20 bp, Artificial Sequence
  Description of Artificial Sequence: Synthetic oligonucleotide
  Target: LAMA2; (+) strand; PAM type: YTN; PAM sequence: TTT
gctagactacattagaaaga

SEQ ID NO: 328901 - DNA, 20 bp, Artificial Sequence
  Description of Artificial Sequence: Synthetic oligonucleotide
  Target: LAMA2; (+) strand; PAM type: YTN; PAM sequence: TTG
ctagactacattagaaagat

SEQ ID NO: 328902 - DNA, 20 bp, Artificial Sequence
  Description of Artificial Sequence: Synthetic oligonucleotide
  Target: LAMA2; (+) strand; PAM type: YTN; PAM sequence: CTA
gactacattagaaagatttt

SEQ ID NO: 328903 - DNA, 20 bp, Artificial Sequence
  Description of Artificial Sequence: Synthetic oligonucleotide
  Target: LAMA2; (+) strand; PAM type: YTN; PAM sequence: CTA
cattagaaagattttcttta

SEQ ID NO: 328904 - DNA, 20 bp, Artificial Sequence
  Description of Artificial Sequence: Synthetic oligonucleotide
  Target: LAMA2; (+) strand; PAM type: YTN; PAM sequence: TTA
gaaagattttctttaaagat

SEQ ID NO: 328905 - DNA, 20 bp, Artificial Sequence
  Description of Artificial Sequence: Synthetic oligonucleotide
  Target: LAMA2; (+) strand; PAM type: YTN; PAM sequence: TTT
tctttaaagatgtgagctag

SEQ ID NO: 328906 - DNA, 20 bp, Artificial Sequence
  Description of Artificial Sequence: Synthetic oligonucleotide
  Target: LAMA2; (+) strand; PAM type: YTN; PAM sequence: TTT
ctttaaagatgtgagctaga

SEQ ID NO: 328907 - DNA, 20 bp, Artificial Sequence
  Description of Artificial Sequence: Synthetic oligonucleotide
  Target: LAMA2; (+) strand; PAM type: YTN; PAM sequence: TTC
tttaaagatgtgagctagat

SEQ ID NO: 328908 - DNA, 20 bp, Artificial Sequence
  Description of Artificial Sequence: Synthetic oligonucleotide
  Target: LAMA2; (+) strand; PAM type: YTN; PAM sequence: CTT
taaagatgtgagctagatag

SEQ ID NO: 328909 - DNA, 20 bp, Artificial Sequence
  Description of Artificial Sequence: Synthetic oligonucleotide
  Target: LAMA2; (+) strand; PAM type: YTN; PAM sequence: TTT
aaagatgtgagctagataga

SEQ ID NO: 328910 - DNA, 20 bp, Artificial Sequence
  Description of Artificial Sequence: Synthetic oligonucleotide
  Target: LAMA2; (+) strand; PAM type: YTN; PAM sequence: TTA
aagatgtgagctagatagag

SEQ ID NO: 328911 - DNA, 20 bp, Artificial Sequence
  Description of Artificial Sequence: Synthetic oligonucleotide
  Target: LAMA2; (+) strand; PAM type: YTN; PAM sequence: CTA
gatagaggtcattttaaaat

SEQ ID NO: 328912 - DNA, 20 bp, Artificial Sequence
  Description of Artificial Sequence: Synthetic oligonucleotide
  Target: LAMA2; (+) strand; PAM type: YTN; PAM sequence: TTT
taaaatgatgatttatcaaa

SEQ ID NO: 328913 - DNA, 20 bp, Artificial Sequence
  Description of Artificial Sequence: Synthetic oligonucleotide
  Target: LAMA2; (+) strand; PAM type: YTN; PAM sequence: TTT
aaaatgatgatttatcaaat

SEQ ID NO: 328914 - DNA, 20 bp, Artificial Sequence
  Description of Artificial Sequence: Synthetic oligonucleotide
  Target: LAMA2; (+) strand; PAM type: YTN; PAM sequence: TTA
aaatgatgatttatcaaatt

SEQ ID NO: 328915 - DNA, 20 bp, Artificial Sequence
  Description of Artificial Sequence: Synthetic oligonucleotide
  Target: LAMA2; (+) strand; PAM type: YTN; PAM sequence: TTT
atcaaattttacacagttaa

SEQ ID NO: 328916 - DNA, 20 bp, Artificial Sequence
  Description of Artificial Sequence: Synthetic oligonucleotide
  Target: LAMA2; (+) strand; PAM type: YTN; PAM sequence: TTA
tcaaattttacacagttaaa

SEQ ID NO: 328917 - DNA, 20 bp, Artificial Sequence
  Description of Artificial Sequence: Synthetic oligonucleotide
  Target: LAMA2; (+) strand; PAM type: YTN; PAM sequence: TTT
tacacagttaaagatagtga

SEQ ID NO: 328918 - DNA, 20 bp, Artificial Sequence
  Description of Artificial Sequence: Synthetic oligonucleotide
  Target: LAMA2; (+) strand; PAM type: YTN; PAM sequence: TTT
acacagttaaagatagtgaa

SEQ ID NO: 328919 - DNA, 20 bp, Artificial Sequence
  Description of Artificial Sequence: Synthetic oligonucleotide
  Target: LAMA2; (+) strand; PAM type: YTN; PAM sequence: TTA
cacagttaaagatagtgaaa

SEQ ID NO: 328920 - DNA, 20 bp, Artificial Sequence
  Description of Artificial Sequence: Synthetic oligonucleotide
  Target: LAMA2; (+) strand; PAM type: YTN; PAM sequence: TTA
aagatagtgaaaataaagag

SEQ ID NO: 328921 - DNA, 20 bp, Artificial Sequence
  Description of Artificial Sequence: Synthetic oligonucleotide
  Target: LAMA2; (+) strand; PAM type: YTN; PAM sequence: TTA
aaaaataactagatggaaat

SEQ ID NO: 328922 - DNA, 20 bp, Artificial Sequence
  Description of Artificial Sequence: Synthetic oligonucleotide
  Target: LAMA2; (+) strand; PAM type: YTN; PAM sequence: CTA
gatggaaattttcactgtga

SEQ ID NO: 328923 - DNA, 20 bp, Artificial Sequence
  Description of Artificial Sequence: Synthetic oligonucleotide
  Target: LAMA2; (+) strand; PAM type: YTN; PAM sequence: TTT
tcactgtgaaacagaatttc

SEQ ID NO: 328924 - DNA, 20 bp, Artificial Sequence
  Description of Artificial Sequence: Synthetic oligonucleotide
  Target: LAMA2; (+) strand; PAM type: YTN; PAM sequence: TTT
cactgtgaaacagaatttct

SEQ ID NO: 328925 - DNA, 20 bp, Artificial Sequence
  Description of Artificial Sequence: Synthetic oligonucleotide
  Target: LAMA2; (+) strand; PAM type: YTN; PAM sequence: TTC
actgtgaaacagaatttctg

SEQ ID NO: 328926 - DNA, 20 bp, Artificial Sequence
  Description of Artificial Sequence: Synthetic oligonucleotide
  Target: LAMA2; (+) strand; PAM type: YTN; PAM sequence: CTG
tgaaacagaatttctgaagt

SEQ ID NO: 328927 - DNA, 20 bp, Artificial Sequence
  Description of Artificial Sequence: Synthetic oligonucleotide
  Target: LAMA2; (+) strand; PAM type: YTN; PAM sequence: TTT
ctgaagtgacacggtgttca

SEQ ID NO: 328928 - DNA, 20 bp, Artificial Sequence
  Description of Artificial Sequence: Synthetic oligonucleotide
  Target: LAMA2; (+) strand; PAM type: YTN; PAM sequence: TTC
tgaagtgacacggtgttcac

SEQ ID NO: 328929 - DNA, 20 bp, Artificial Sequence
  Description of Artificial Sequence: Synthetic oligonucleotide
  Target: LAMA2; (+) strand; PAM type: YTN; PAM sequence: CTG
aagtgacacggtgttcactt

SEQ ID NO: 328930 - DNA, 20 bp, Artificial Sequence
  Description of Artificial Sequence: Synthetic oligonucleotide
  Target: LAMA2; (+) strand; PAM type: YTN; PAM sequence: TTC
acttctgatcatggtcattg

SEQ ID NO: 328931 - DNA, 20 bp, Artificial Sequence
  Description of Artificial Sequence: Synthetic oligonucleotide
  Target: LAMA2; (+) strand; PAM type: YTN; PAM sequence: CTT
ctgatcatggtcattgtaca

SEQ ID NO: 328932 - DNA, 20 bp, Artificial Sequence
  Description of Artificial Sequence: Synthetic oligonucleotide
  Target: LAMA2; (+) strand; PAM type: YTN; PAM sequence: TTC
tgatcatggtcattgtacaa

SEQ ID NO: 328933 - DNA, 20 bp, Artificial Sequence
  Description of Artificial Sequence: Synthetic oligonucleotide
  Target: LAMA2; (+) strand; PAM type: YTN; PAM sequence: CTG
atcatggtcattgtacaacc

SEQ ID NO: 328934 - DNA, 20 bp, Artificial Sequence
  Description of Artificial Sequence: Synthetic oligonucleotide
  Target: LAMA2; (+) strand; PAM type: YTN; PAM sequence: TTG
tacaaccattgagtctttgt

SEQ ID NO: 328935 - DNA, 20 bp, Artificial Sequence
  Description of Artificial Sequence: Synthetic oligonucleotide
  Target: LAMA2; (+) strand; PAM type: YTN; PAM sequence: TTG
agtctttgtataattgctgt

SEQ ID NO: 328936 - DNA, 20 bp, Artificial Sequence
  Description of Artificial Sequence: Synthetic oligonucleotide
  Target: LAMA2; (+) strand; PAM type: YTN; PAM sequence: CTT
tgtataattgctgtgagtag

SEQ ID NO: 328937 - DNA, 20 bp, Artificial Sequence
  Description of Artificial Sequence: Synthetic oligonucleotide
  Target: LAMA2; (+) strand; PAM type: YTN; PAM sequence: TTT
gtataattgctgtgagtagt

SEQ ID NO: 328938 - DNA, 20 bp, Artificial Sequence
  Description of Artificial Sequence: Synthetic oligonucleotide
  Target: LAMA2; (+) strand; PAM type: YTN; PAM sequence: TTG
tataattgctgtgagtagtg

SEQ ID NO: 328939 - DNA, 20 bp, Artificial Sequence
  Description of Artificial Sequence: Synthetic oligonucleotide
  Target: LAMA2; (+) strand; PAM type: YTN; PAM sequence: TTG
ctgtgagtagtgtcactacc

SEQ ID NO: 328940 - DNA, 20 bp, Artificial Sequence
  Description of Artificial Sequence: Synthetic oligonucleotide
  Target: LAMA2; (+) strand; PAM type: YTN; PAM sequence: CTG
tgagtagtgtcactaccatt

SEQ ID NO: 328941 - DNA, 20 bp, Artificial Sequence
  Description of Artificial Sequence: Synthetic oligonucleotide
  Target: LAMA2; (+) strand; PAM type: YTN; PAM sequence: CTA
ccattttcccttcacttttt

SEQ ID NO: 328942 - DNA, 20 bp, Artificial Sequence
  Description of Artificial Sequence: Synthetic oligonucleotide
  Target: LAMA2; (+) strand; PAM type: YTN; PAM sequence: TTT
tcccttcactttttttctat

SEQ ID NO: 328943 - DNA, 20 bp, Artificial Sequence
  Description of Artificial Sequence: Synthetic oligonucleotide
  Target: LAMA2; (+) strand; PAM type: YTN; PAM sequence: TTT
cccttcactttttttctata

SEQ ID NO: 328944 - DNA, 20 bp, Artificial Sequence
  Description of Artificial Sequence: Synthetic oligonucleotide
  Target: LAMA2; (+) strand; PAM type: YTN; PAM sequence: TTC
ccttcactttttttctatag

SEQ ID NO: 328945 - DNA, 20 bp, Artificial Sequence
  Description of Artificial Sequence: Synthetic oligonucleotide
  Target: LAMA2; (+) strand; PAM type: YTN; PAM sequence: CTT
cactttttttctatagatat

SEQ ID NO: 328946 - DNA, 20 bp, Artificial Sequence
  Description of Artificial Sequence: Synthetic oligonucleotide
  Target: LAMA2; (+) strand; PAM type: YTN; PAM sequence: TTC
actttttttctatagatatt

SEQ ID NO: 328947 - DNA, 20 bp, Artificial Sequence
  Description of Artificial Sequence: Synthetic oligonucleotide
  Target: LAMA2; (+) strand; PAM type: YTN; PAM sequence: CTT
tttttctatagatatttaaa

SEQ ID NO: 328948 - DNA, 20 bp, Artificial Sequence
  Description of Artificial Sequence: Synthetic oligonucleotide
  Target: LAMA2; (+) strand; PAM type: YTN; PAM sequence: TTT
ttttctatagatatttaaat

SEQ ID NO: 328949 - DNA, 20 bp, Artificial Sequence
  Description of Artificial Sequence: Synthetic oligonucleotide
  Target: LAMA2; (+) strand; PAM type: YTN; PAM sequence: TTT
tttctatagatatttaaatg

SEQ ID NO: 328950 - DNA, 20 bp, Artificial Sequence
  Description of Artificial Sequence: Synthetic oligonucleotide
  Target: LAMA2; (+) strand; PAM type: YTN; PAM sequence: TTT
ttctatagatatttaaatga

SEQ ID NO: 328951 - DNA, 20 bp, Artificial Sequence
  Description of Artificial Sequence: Synthetic oligonucleotide
  Target: LAMA2; (+) strand; PAM type: YTN; PAM sequence: TTT
tctatagatatttaaatgaa

SEQ ID NO: 328952 - DNA, 20 bp, Artificial Sequence
  Description of Artificial Sequence: Synthetic oligonucleotide
  Target: LAMA2; (+) strand; PAM type: YTN; PAM sequence: TTT
ctatagatatttaaatgaag

SEQ ID NO: 328953 - DNA, 20 bp, Artificial Sequence
  Description of Artificial Sequence: Synthetic oligonucleotide
  Target: LAMA2; (+) strand; PAM type: YTN; PAM sequence: TTC
tatagatatttaaatgaagc

SEQ ID NO: 328954 - DNA, 20 bp, Artificial Sequence
  Description of Artificial Sequence: Synthetic oligonucleotide
  Target: LAMA2; (+) strand; PAM type: YTN; PAM sequence: CTA
tagatatttaaatgaagcaa

SEQ ID NO: 328955 - DNA, 20 bp, Artificial Sequence
  Description of Artificial Sequence: Synthetic oligonucleotide
  Target: LAMA2; (+) strand; PAM type: YTN; PAM sequence: TTT
aaatgaagcaactgtataca

SEQ ID NO: 328956 - DNA, 20 bp, Artificial Sequence
  Description of Artificial Sequence: Synthetic oligonucleotide
  Target: LAMA2; (+) strand; PAM type: YTN; PAM sequence: TTA
aatgaagcaactgtatacat

SEQ ID NO: 328957 - DNA, 20 bp, Artificial Sequence
  Description of Artificial Sequence: Synthetic oligonucleotide
  Target: LAMA2; (+) strand; PAM type: YTN; PAM sequence: CTG
tatacatatttattcatttt

SEQ ID NO: 328958 - DNA, 20 bp, Artificial Sequence
  Description of Artificial Sequence: Synthetic oligonucleotide
  Target: LAMA2; (+) strand; PAM type: YTN; PAM sequence: TTT
attcattttgtcagttataa

SEQ ID NO: 328959 - DNA, 20 bp, Artificial Sequence
  Description of Artificial Sequence: Synthetic oligonucleotide
  Target: LAMA2; (+) strand; PAM type: YTN; PAM sequence: TTA
ttcattttgtcagttataat

SEQ ID NO: 328960 - DNA, 20 bp, Artificial Sequence
  Description of Artificial Sequence: Synthetic oligonucleotide
  Target: LAMA2; (+) strand; PAM type: YTN; PAM sequence: TTC
attttgtcagttataatcaa

SEQ ID NO: 328961 - DNA, 20 bp, Artificial Sequence
  Description of Artificial Sequence: Synthetic oligonucleotide
  Target: LAMA2; (+) strand; PAM type: YTN; PAM sequence: TTT
tgtcagttataatcaagtta

SEQ ID NO: 328962 - DNA, 20 bp, Artificial Sequence
  Description of Artificial Sequence: Synthetic oligonucleotide
  Target: LAMA2; (+) strand; PAM type: YTN; PAM sequence: TTT
gtcagttataatcaagttat

SEQ ID NO: 328963 - DNA, 20 bp, Artificial Sequence
  Description of Artificial Sequence: Synthetic oligonucleotide
  Target: LAMA2; (+) strand; PAM type: YTN; PAM sequence: TTG
tcagttataatcaagttatt

SEQ ID NO: 328964 - DNA, 20 bp, Artificial Sequence
  Description of Artificial Sequence: Synthetic oligonucleotide
  Target: LAMA2; (+) strand; PAM type: YTN; PAM sequence: TTA
taatcaagttattctatcct

SEQ ID NO: 328965 - DNA, 20 bp, Artificial Sequence
  Description of Artificial Sequence: Synthetic oligonucleotide
  Target: LAMA2; (+) strand; PAM type: YTN; PAM sequence: TTA
ttctatcctaatctttctat

SEQ ID NO: 328966 - DNA, 20 bp, Artificial Sequence
  Description of Artificial Sequence: Synthetic oligonucleotide
  Target: LAMA2; (+) strand; PAM type: YTN; PAM sequence: TTC
tatcctaatctttctatctt

SEQ ID NO: 328967 - DNA, 20 bp, Artificial Sequence
  Description of Artificial Sequence: Synthetic oligonucleotide
  Target: LAMA2; (+) strand; PAM type: YTN; PAM sequence: CTA
tcctaatctttctatcttca

SEQ ID NO: 328968 - DNA, 20 bp, Artificial Sequence
  Description of Artificial Sequence: Synthetic oligonucleotide
  Target: LAMA2; (+) strand; PAM type: YTN; PAM sequence: CTA
atctttctatcttcactctg

SEQ ID NO: 328969 - DNA, 20 bp, Artificial Sequence
  Description of Artificial Sequence: Synthetic oligonucleotide
  Target: LAMA2; (+) strand; PAM type: YTN; PAM sequence: CTT
tctatcttcactctgtgtgt

SEQ ID NO: 328970 - DNA, 20 bp, Artificial Sequence
  Description of Artificial Sequence: Synthetic oligonucleotide
  Target: LAMA2; (+) strand; PAM type: YTN; PAM sequence: TTT
ctatcttcactctgtgtgtg

SEQ ID NO: 328971 - DNA, 20 bp, Artificial Sequence
  Description of Artificial Sequence: Synthetic oligonucleotide
  Target: LAMA2; (+) strand; PAM type: YTN; PAM sequence: TTC
tatcttcactctgtgtgtga

SEQ ID NO: 328972 - DNA, 20 bp, Artificial Sequence
  Description of Artificial Sequence: Synthetic oligonucleotide
  Target: LAMA2; (+) strand; PAM type: YTN; PAM sequence: CTA
tcttcactctgtgtgtgagt

SEQ ID NO: 328973 - DNA, 20 bp, Artificial Sequence
  Description of Artificial Sequence: Synthetic oligonucleotide
  Target: LAMA2; (+) strand; PAM type: YTN; PAM sequence: CTT
cactctgtgtgtgagtctgt

SEQ ID NO: 328974 - DNA, 20 bp, Artificial Sequence
  Description of Artificial Sequence: Synthetic oligonucleotide
  Target: LAMA2; (+) strand; PAM type: YTN; PAM sequence: TTC
actctgtgtgtgagtctgtg

SEQ ID NO: 328975 - DNA, 20 bp, Artificial Sequence
  Description of Artificial Sequence: Synthetic oligonucleotide
  Target: LAMA2; (+) strand; PAM type: YTN; PAM sequence: CTC
tgtgtgtgagtctgtgtgta

SEQ ID NO: 328976 - DNA, 20 bp, Artificial Sequence
  Description of Artificial Sequence: Synthetic oligonucleotide
  Target: LAMA2; (+) strand; PAM type: YTN; PAM sequence: CTG
tgtgtgagtctgtgtgtaca

SEQ ID NO: 328977 - DNA, 20 bp, Artificial Sequence
  Description of Artificial Sequence: Synthetic oligonucleotide
  Target: LAMA2; (+) strand; PAM type: YTN; PAM sequence: CTG
tgtgtacataacatgtgata

SEQ ID NO: 328978 - DNA, 20 bp, Artificial Sequence
  Description of Artificial Sequence: Synthetic oligonucleotide
  Target: LAMA2; (+) strand; PAM type: YTN; PAM sequence: TTT
atatccatcttccttcttga

SEQ ID NO: 328979 - DNA, 20 bp, Artificial Sequence
  Description of Artificial Sequence: Synthetic oligonucleotide
  Target: LAMA2; (+) strand; PAM type: YTN; PAM sequence: TTA
tatccatcttccttcttgat

SEQ ID NO: 328980 - DNA, 20 bp, Artificial Sequence
  Description of Artificial Sequence: Synthetic oligonucleotide
  Target: LAMA2; (+) strand; PAM type: YTN; PAM sequence: CTT
ccttcttgatcatgagcaac

SEQ ID NO: 328981 - DNA, 20 bp, Artificial Sequence
  Description of Artificial Sequence: Synthetic oligonucleotide
  Target: LAMA2; (+) strand; PAM type: YTN; PAM sequence: TTC
cttcttgatcatgagcaaca

SEQ ID NO: 328982 - DNA, 20 bp, Artificial Sequence
  Description of Artificial Sequence: Synthetic oligonucleotide
  Target: LAMA2; (+) strand; PAM type: YTN; PAM sequence: CTT
cttgatcatgagcaacagga

SEQ ID NO: 328983 - DNA, 20 bp, Artificial Sequence
  Description of Artificial Sequence: Synthetic oligonucleotide
  Target: LAMA2; (+) strand; PAM type: YTN; PAM sequence: TTC
ttgatcatgagcaacaggaa

SEQ ID NO: 328984 - DNA, 20 bp, Artificial Sequence
  Description of Artificial Sequence: Synthetic oligonucleotide
  Target: LAMA2; (+) strand; PAM type: YTN; PAM sequence: CTT
gatcatgagcaacaggaacc

SEQ ID NO: 328985 - DNA, 20 bp, Artificial Sequence
  Description of Artificial Sequence: Synthetic oligonucleotide
  Target: LAMA2; (+) strand; PAM type: YTN; PAM sequence: TTG
atcatgagcaacaggaacca

SEQ ID NO: 328986 - DNA, 20 bp, Artificial Sequence
  Description of Artificial Sequence: Synthetic oligonucleotide
  Target: LAMA2; (+) strand; PAM type: YTN; PAM sequence: CTA
ttttacttaagctgaaatac

SEQ ID NO: 328987 - DNA, 20 bp, Artificial Sequence
  Description of Artificial Sequence: Synthetic oligonucleotide
  Target: LAMA2; (+) strand; PAM type: YTN; PAM sequence: TTT
tacttaagctgaaatacatt

SEQ ID NO: 328988 - DNA, 20 bp, Artificial Sequence
  Description of Artificial Sequence: Synthetic oligonucleotide
  Target: LAMA2; (+) strand; PAM type: YTN; PAM sequence: TTT
acttaagctgaaatacattt

SEQ ID NO: 328989 - DNA, 20 bp, Artificial Sequence
  Description of Artificial Sequence: Synthetic oligonucleotide
  Target: LAMA2; (+) strand; PAM type: YTN; PAM sequence: TTA
cttaagctgaaatacatttg

SEQ ID NO: 328990 - DNA, 20 bp, Artificial Sequence
  Description of Artificial Sequence: Synthetic oligonucleotide
  Target: LAMA2; (+) strand; PAM type: YTN; PAM sequence: CTT
aagctgaaatacatttgaaa

SEQ ID NO: 328991 - DNA, 20 bp, Artificial Sequence
  Description of Artificial Sequence: Synthetic oligonucleotide
  Target: LAMA2; (+) strand; PAM type: YTN; PAM sequence: TTA
agctgaaatacatttgaaat

SEQ ID NO: 328992 - DNA, 20 bp, Artificial Sequence
  Description of Artificial Sequence: Synthetic oligonucleotide
  Target: LAMA2; (+) strand; PAM type: YTN; PAM sequence: CTG
aaatacatttgaaatatacc

SEQ ID NO: 328993 - DNA, 20 bp, Artificial Sequence
  Description of Artificial Sequence: Synthetic oligonucleotide
  Target: LAMA2; (+) strand; PAM type: YTN; PAM sequence: TTT
gaaatataccatataacttg

SEQ ID NO: 328994 - DNA, 20 bp, Artificial Sequence
  Description of Artificial Sequence: Synthetic oligonucleotide
  Target: LAMA2; (+) strand; PAM type: YTN; PAM sequence: TTG
aaatataccatataacttgc

SEQ ID NO: 328995 - DNA, 20 bp, Artificial Sequence
  Description of Artificial Sequence: Synthetic oligonucleotide
  Target: LAMA2; (+) strand; PAM type: YTN; PAM sequence: CTT
gcagagttgatgggaaaatt

SEQ ID NO: 328996 - DNA, 20 bp, Artificial Sequence
  Description of Artificial Sequence: Synthetic oligonucleotide
  Target: LAMA2; (+) strand; PAM type: YTN; PAM sequence: TTG
cagagttgatgggaaaattt

SEQ ID NO: 328997 - DNA, 20 bp, Artificial Sequence
  Description of Artificial Sequence: Synthetic oligonucleotide
  Target: LAMA2; (+) strand; PAM type: YTN; PAM sequence: TTG
atgggaaaatttgaaaacca

SEQ ID NO: 328998 - DNA, 20 bp, Artificial Sequence
  Description of Artificial Sequence: Synthetic oligonucleotide
  Target: LAMA2; (+) strand; PAM type: YTN; PAM sequence: TTT
gaaaaccagggtgagaagat

SEQ ID NO: 328999 - DNA, 20 bp, Artificial Sequence
  Description of Artificial Sequence: Synthetic oligonucleotide
  Target: LAMA2; (+) strand; PAM type: YTN; PAM sequence: TTG
aaaaccagggtgagaagatg

SEQ ID NO: 329000 - DNA, 20 bp, Artificial Sequence
  Description of Artificial Sequence: Synthetic oligonucleotide
  Target: LAMA2; (+) strand; PAM type: YTN; PAM sequence: CTA
ggttttgatacctgtacaga

SEQ ID NO: 329001 - DNA, 20 bp, Artificial Sequence
  Description of Artificial Sequence: Synthetic oligonucleotide
  Target: LAMA2; (+) strand; PAM type: YTN; PAM sequence: TTT
tgatacctgtacagaatagt

SEQ ID NO: 329002 - DNA, 20 bp, Artificial Sequence
  Description of Artificial Sequence: Synthetic oligonucleotide
  Target: LAMA2; (+) strand; PAM type: YTN; PAM sequence: TTT
gatacctgtacagaatagtc

SEQ ID NO: 329003 - DNA, 20 bp, Artificial Sequence
  Description of Artificial Sequence: Synthetic oligonucleotide
  Target: LAMA2; (+) strand; PAM type: YTN; PAM sequence: TTG
atacctgtacagaatagtca

SEQ ID NO: 329004 - DNA, 20 bp, Artificial Sequence
  Description of Artificial Sequence: Synthetic oligonucleotide
  Target: LAMA2; (+) strand; PAM type: YTN; PAM sequence: CTG
tacagaatagtcattgctta

SEQ ID NO: 329005 - DNA, 20 bp, Artificial Sequence
  Description of Artificial Sequence: Synthetic oligonucleotide
  Target: LAMA2; (+) strand; PAM type: YTN; PAM sequence: TTG
cttactgctgccgccatcac

SEQ ID NO: 329006 - DNA, 20 bp, Artificial Sequence
  Description of Artificial Sequence: Synthetic oligonucleotide
  Target: LAMA2; (+) strand; PAM type: YTN; PAM sequence: CTT
actgctgccgccatcactac

SEQ ID NO: 329007 - DNA, 20 bp, Artificial Sequence
  Description of Artificial Sequence: Synthetic oligonucleotide
  Target: LAMA2; (+) strand; PAM type: YTN; PAM sequence: TTA
ctgctgccgccatcactact

SEQ ID NO: 329008 - DNA, 20 bp, Artificial Sequence
  Description of Artificial Sequence: Synthetic oligonucleotide
  Target: LAMA2; (+) strand; PAM type: YTN; PAM sequence: CTG
ctgccgccatcactactttc

SEQ ID NO: 329009 - DNA, 20 bp, Artificial Sequence
  Description of Artificial Sequence: Synthetic oligonucleotide
  Target: LAMA2; (+) strand; PAM type: YTN; PAM sequence: CTG
ccgccatcactactttctct

SEQ ID NO: 329010 - DNA, 20 bp, Artificial Sequence
  Description of Artificial Sequence: Synthetic oligonucleotide
  Target: LAMA2; (+) strand; PAM type: YTN; PAM sequence: CTA
ctttctctttcattcctctg

SEQ ID NO: 329011 - DNA, 20 bp, Artificial Sequence
  Description of Artificial Sequence: Synthetic oligonucleotide
  Target: LAMA2; (+) strand; PAM type: YTN; PAM sequence: CTT
tctctttcattcctctgata

SEQ ID NO: 329012 - DNA, 20 bp, Artificial Sequence
  Description of Artificial Sequence: Synthetic oligonucleotide
  Target: LAMA2; (+) strand; PAM type: YTN; PAM sequence: TTT
ctctttcattcctctgatat

SEQ ID NO: 329013 - DNA, 20 bp, Artificial Sequence
  Description of Artificial Sequence: Synthetic oligonucleotide
  Target: LAMA2; (+) strand; PAM type: YTN; PAM sequence: TTC
tctttcattcctctgatatg

SEQ ID NO: 329014 - DNA, 20 bp, Artificial Sequence
  Description of Artificial Sequence: Synthetic oligonucleotide
  Target: LAMA2; (+) strand; PAM type: YTN; PAM sequence: CTC
tttcattcctctgatatgac

SEQ ID NO: 329015 - DNA, 20 bp, Artificial Sequence
  Description of Artificial Sequence: Synthetic oligonucleotide
  Target: LAMA2; (+) strand; PAM type: YTN; PAM sequence: CTT
tcattcctctgatatgacta

SEQ ID NO: 329016 - DNA, 20 bp, Artificial Sequence
  Description of Artificial Sequence: Synthetic oligonucleotide
  Target: LAMA2; (+) strand; PAM type: YTN; PAM sequence: TTT
cattcctctgatatgactat

SEQ ID NO: 329017 - DNA, 20 bp, Artificial Sequence
  Description of Artificial Sequence: Synthetic oligonucleotide
  Target: LAMA2; (+) strand; PAM type: YTN; PAM sequence: TTC
attcctctgatatgactatc

SEQ ID NO: 329018 - DNA, 20 bp, Artificial Sequence
  Description of Artificial Sequence: Synthetic oligonucleotide
  Target: LAMA2; (+) strand; PAM type: YTN; PAM sequence: TTC
ctctgatatgactatctcta

SEQ ID NO: 329019 - DNA, 20 bp, Artificial Sequence
  Description of Artificial Sequence: Synthetic oligonucleotide
  Target: LAMA2; (+) strand; PAM type: YTN; PAM sequence: CTC
tgatatgactatctctactc

SEQ ID NO: 329020 - DNA, 20 bp, Artificial Sequence
  Description of Artificial Sequence: Synthetic oligonucleotide
  Target: LAMA2; (+) strand; PAM type: YTN; PAM sequence: CTG
atatgactatctctactcct

SEQ ID NO: 329021 - DNA, 20 bp, Artificial Sequence
  Description of Artificial Sequence: Synthetic oligonucleotide
  Target: LAMA2; (+) strand; PAM type: YTN; PAM sequence: CTA
tctctactcctatcattatc

SEQ ID NO: 329022 - DNA, 20 bp, Artificial Sequence
  Description of Artificial Sequence: Synthetic oligonucleotide
  Target: LAMA2; (+) strand; PAM type: YTN; PAM sequence: CTC
tactcctatcattatctgat

SEQ ID NO: 329023 - DNA, 20 bp, Artificial Sequence
  Description of Artificial Sequence: Synthetic oligonucleotide
  Target: LAMA2; (+) strand; PAM type: YTN; PAM sequence: CTA
ctcctatcattatctgattt

SEQ ID NO: 329024 - DNA, 20 bp, Artificial Sequence
  Description of Artificial Sequence: Synthetic oligonucleotide
  Target: LAMA2; (+) strand; PAM type: YTN; PAM sequence: CTC
ctatcattatctgattttcc

SEQ ID NO: 329025 - DNA, 20 bp, Artificial Sequence
  Description of Artificial Sequence: Synthetic oligonucleotide
  Target: LAMA2; (+) strand; PAM type: YTN; PAM sequence: CTA
tcattatctgattttcctta

SEQ ID NO: 329026 - DNA, 20 bp, Artificial Sequence
  Description of Artificial Sequence: Synthetic oligonucleotide
  Target: LAMA2; (+) strand; PAM type: YTN; PAM sequence: TTA
tctgattttccttatctctc

SEQ ID NO: 329027 - DNA, 20 bp, Artificial Sequence
  Description of Artificial Sequence: Synthetic oligonucleotide
  Target: LAMA2; (+) strand; PAM type: YTN; PAM sequence: CTG
attttccttatctctctagt

SEQ ID NO: 329028 - DNA, 20 bp, Artificial Sequence
  Description of Artificial Sequence: Synthetic oligonucleotide
  Target: LAMA2; (+) strand; PAM type: YTN; PAM sequence: TTT
tccttatctctctagtctgt

SEQ ID NO: 329029 - DNA, 20 bp, Artificial Sequence
  Description of Artificial Sequence: Synthetic oligonucleotide
  Target: LAMA2; (+) strand; PAM type: YTN; PAM sequence: TTT
ccttatctctctagtctgtg

SEQ ID NO: 329030 - DNA, 20 bp, Artificial Sequence
  Description of Artificial Sequence: Synthetic oligonucleotide
  Target: LAMA2; (+) strand; PAM type: YTN; PAM sequence: TTC
cttatctctctagtctgtgc

SEQ ID NO: 329031 - DNA, 20 bp, Artificial Sequence
  Description of Artificial Sequence: Synthetic oligonucleotide
  Target: LAMA2; (+) strand; PAM type: YTN; PAM sequence: CTT
atctctctagtctgtgcttc

SEQ ID NO: 329032 - DNA, 20 bp, Artificial Sequence
  Description of Artificial Sequence: Synthetic oligonucleotide
  Target: LAMA2; (+) strand; PAM type: YTN; PAM sequence: TTA
tctctctagtctgtgcttca

SEQ ID NO: 329033 - DNA, 20 bp, Artificial Sequence
  Description of Artificial Sequence: Synthetic oligonucleotide
  Target: LAMA2; (+) strand; PAM type: YTN; PAM sequence: CTC
tctagtctgtgcttcacatg

SEQ ID NO: 329034 - DNA, 20 bp, Artificial Sequence
  Description of Artificial Sequence: Synthetic oligonucleotide
  Target: LAMA2; (+) strand; PAM type: YTN; PAM sequence: CTC
tagtctgtgcttcacatgct

SEQ ID NO: 329035 - DNA, 20 bp, Artificial Sequence
  Description of Artificial Sequence: Synthetic oligonucleotide
  Target: LAMA2; (+) strand; PAM type: YTN; PAM sequence: CTA
gtctgtgcttcacatgctta

SEQ ID NO: 329036 - DNA, 20 bp, Artificial Sequence
  Description of Artificial Sequence: Synthetic oligonucleotide
  Target: LAMA2; (+) strand; PAM type: YTN; PAM sequence: CTG
tgcttcacatgcttaatatt

SEQ ID NO: 329037 - DNA, 20 bp, Artificial Sequence
  Description of Artificial Sequence: Synthetic oligonucleotide
  Target: LAMA2; (+) strand; PAM type: YTN; PAM sequence: CTT
cacatgcttaatattcaaat

SEQ ID NO: 329038 - DNA, 20 bp, Artificial Sequence
  Description of Artificial Sequence: Synthetic oligonucleotide
  Target: LAMA2; (+) strand; PAM type: YTN; PAM sequence: TTC
acatgcttaatattcaaatt

SEQ ID NO: 329039 - DNA, 20 bp, Artificial Sequence
  Description of Artificial Sequence: Synthetic oligonucleotide
  Target: LAMA2; (+) strand; PAM type: YTN; PAM sequence: CTT
aatattcaaattcctaggcc

SEQ ID NO: 329040 - DNA, 20 bp, Artificial Sequence
  Description of Artificial Sequence: Synthetic oligonucleotide
  Target: LAMA2; (+) strand; PAM type: YTN; PAM sequence: TTA
atattcaaattcctaggcca

SEQ ID NO: 329041 - DNA, 20 bp, Artificial Sequence
  Description of Artificial Sequence: Synthetic oligonucleotide
  Target: LAMA2; (+) strand; PAM type: YTN; PAM sequence: TTC
aaattcctaggccaaagtca

SEQ ID NO: 329042 - DNA, 20 bp, Artificial Sequence
  Description of Artificial Sequence: Synthetic oligonucleotide
  Target: LAMA2; (+) strand; PAM type: YTN; PAM sequence: TTC
ctaggccaaagtcacatgta

SEQ ID NO: 329043 - DNA, 20 bp, Artificial Sequence
  Description of Artificial Sequence: Synthetic oligonucleotide
  Target: LAMA2; (+) strand; PAM type: YTN; PAM sequence: CTA
ggccaaagtcacatgtacat

SEQ ID NO: 329044 - DNA, 20 bp, Artificial Sequence
  Description of Artificial Sequence: Synthetic oligonucleotide
  Target: LAMA2; (+) strand; PAM type: YTN; PAM sequence: CTA
actgctatagggtagggaga

SEQ ID NO: 329045 - DNA, 20 bp, Artificial Sequence
  Description of Artificial Sequence: Synthetic oligonucleotide
  Target: LAMA2; (+) strand; PAM type: YTN; PAM sequence: CTG
ctatagggtagggagaagaa

SEQ ID NO: 329046 - DNA, 20 bp, Artificial Sequence
  Description of Artificial Sequence: Synthetic oligonucleotide
  Target: LAMA2; (+) strand; PAM type: YTN; PAM sequence: CTA
tagggtagggagaagaaagg

SEQ ID NO: 329047 - DNA, 20 bp, Artificial Sequence
  Description of Artificial Sequence: Synthetic oligonucleotide
  Target: LAMA2; (+) strand; PAM type: YTN; PAM sequence: CTC
ctctatttacatttccttgg

SEQ ID NO: 329048 - DNA, 20 bp, Artificial Sequence
  Description of Artificial Sequence: Synthetic oligonucleotide
  Target: LAMA2; (+) strand; PAM type: YTN; PAM sequence: CTC
tatttacatttccttggcag

SEQ ID NO: 329049 - DNA, 20 bp, Artificial Sequence
  Description of Artificial Sequence: Synthetic oligonucleotide
  Target: LAMA2; (+) strand; PAM type: YTN; PAM sequence: CTA
tttacatttccttggcagga

SEQ ID NO: 329050 - DNA, 20 bp, Artificial Sequence
  Description of Artificial Sequence: Synthetic oligonucleotide
  Target: LAMA2; (+) strand; PAM type: YTN; PAM sequence: TTT
acatttccttggcaggaggt

SEQ ID NO: 329051 - DNA, 20 bp, Artificial Sequence
  Description of Artificial Sequence: Synthetic oligonucleotide
  Target: LAMA2; (+) strand; PAM type: YTN; PAM sequence: TTA
catttccttggcaggaggta

SEQ ID NO: 329052 - DNA, 20 bp, Artificial Sequence
  Description of Artificial Sequence: Synthetic oligonucleotide
  Target: LAMA2; (+) strand; PAM type: YTN; PAM sequence: TTT
ccttggcaggaggtaggaca

SEQ ID NO: 329053 - DNA, 20 bp, Artificial Sequence
  Description of Artificial Sequence: Synthetic oligonucleotide
  Target: LAMA2; (+) strand; PAM type: YTN; PAM sequence: TTC
cttggcaggaggtaggacac

SEQ ID NO: 329054 - DNA, 20 bp, Artificial Sequence
  Description of Artificial Sequence: Synthetic oligonucleotide
  Target: LAMA2; (+) strand; PAM type: YTN; PAM sequence: CTT
ggcaggaggtaggacactgc

SEQ ID NO: 329055 - DNA, 20 bp, Artificial Sequence
  Description of Artificial Sequence: Synthetic oligonucleotide
  Target: LAMA2; (+) strand; PAM type: YTN; PAM sequence: TTG
gcaggaggtaggacactgca

SEQ ID NO: 329056 - DNA, 20 bp, Artificial Sequence
  Description of Artificial Sequence: Synthetic oligonucleotide
  Target: LAMA2; (+) strand; PAM type: YTN; PAM sequence: CTG
cataccctcaatagtagaca

SEQ ID NO: 329057 - DNA, 20 bp, Artificial Sequence
  Description of Artificial Sequence: Synthetic oligonucleotide
  Target: LAMA2; (+) strand; PAM type: YTN; PAM sequence: CTC
aatagtagacacaatgccaa

SEQ ID NO: 329058 - DNA, 20 bp, Artificial Sequence
  Description of Artificial Sequence: Synthetic oligonucleotide
  Target: LAMA2; (+) strand; PAM type: YTN; PAM sequence: TTA
ctcaagaaaagaaatggagg

SEQ ID NO: 329059 - DNA, 20 bp, Artificial Sequence
  Description of Artificial Sequence: Synthetic oligonucleotide
  Target: LAMA2; (+) strand; PAM type: YTN; PAM sequence: CTC
aagaaaagaaatggaggatg

SEQ ID NO: 329060 - DNA, 20 bp, Artificial Sequence
  Description of Artificial Sequence: Synthetic oligonucleotide
  Target: LAMA2; (+) strand; PAM type: YTN; PAM sequence: TTG
gacagccaagaaatgatgaa

SEQ ID NO: 329061 - DNA, 20 bp, Artificial Sequence
  Description of Artificial Sequence: Synthetic oligonucleotide
  Target: LAMA2; (+) strand; PAM type: YTN; PAM sequence: CTG
ccacatttttcatataggtt

SEQ ID NO: 329062 - DNA, 20 bp, Artificial Sequence
  Description of Artificial Sequence: Synthetic oligonucleotide
  Target: LAMA2; (+) strand; PAM type: YTN; PAM sequence: TTT
ttcatataggttggcttttt

SEQ ID NO: 329063 - DNA, 20 bp, Artificial Sequence
  Description of Artificial Sequence: Synthetic oligonucleotide
  Target: LAMA2; (+) strand; PAM type: YTN; PAM sequence: TTT
tcatataggttggctttttc

SEQ ID NO: 329064 - DNA, 20 bp, Artificial Sequence
  Description of Artificial Sequence: Synthetic oligonucleotide
  Target: LAMA2; (+) strand; PAM type: YTN; PAM sequence: TTT
catataggttggctttttct

SEQ ID NO: 329065 - DNA, 20 bp, Artificial Sequence
  Description of Artificial Sequence: Synthetic oligonucleotide
  Target: LAMA2; (+) strand; PAM type: YTN; PAM sequence: TTC
atataggttggctttttctt

SEQ ID NO: 329066 - DNA, 20 bp, Artificial Sequence
  Description of Artificial Sequence: Synthetic oligonucleotide
  Target: LAMA2; (+) strand; PAM type: YTN; PAM sequence: TTG
gctttttctttgaatgtttt

SEQ ID NO: 329067 - DNA, 20 bp, Artificial Sequence
  Description of Artificial Sequence: Synthetic oligonucleotide
  Target: LAMA2; (+) strand; PAM type: YTN; PAM sequence: CTT
tttctttgaatgttttcact

SEQ ID NO: 329068 - DNA, 20 bp, Artificial Sequence
  Description of Artificial Sequence: Synthetic oligonucleotide
  Target: LAMA2; (+) strand; PAM type: YTN; PAM sequence: TTT
ttctttgaatgttttcactt

SEQ ID NO: 329069 - DNA, 20 bp, Artificial Sequence
  Description of Artificial Sequence: Synthetic oligonucleotide
  Target: LAMA2; (+) strand; PAM type: YTN; PAM sequence: TTT
tctttgaatgttttcactta

SEQ ID NO: 329070 - DNA, 20 bp, Artificial Sequence
  Description of Artificial Sequence: Synthetic oligonucleotide
  Target: LAMA2; (+) strand; PAM type: YTN; PAM sequence: TTT
ctttgaatgttttcacttag

SEQ ID NO: 329071 - DNA, 20 bp, Artificial Sequence
  Description of Artificial Sequence: Synthetic oligonucleotide
  Target: LAMA2; (+) strand; PAM type: YTN; PAM sequence: TTC
tttgaatgttttcacttagc

SEQ ID NO: 329072 - DNA, 20 bp, Artificial Sequence
  Description of Artificial Sequence: Synthetic oligonucleotide
  Target: LAMA2; (+) strand; PAM type: YTN; PAM sequence: CTT
tgaatgttttcacttagcta

SEQ ID NO: 329073 - DNA, 20 bp, Artificial Sequence
  Description of Artificial Sequence: Synthetic oligonucleotide
  Target: LAMA2; (+) strand; PAM type: YTN; PAM sequence: TTT
gaatgttttcacttagctag

SEQ ID NO: 329074 - DNA, 20 bp, Artificial Sequence
  Description of Artificial Sequence: Synthetic oligonucleotide
  Target: LAMA2; (+) strand; PAM type: YTN; PAM sequence: TTG
aatgttttcacttagctagt

SEQ ID NO: 329075 - DNA, 20 bp, Artificial Sequence
  Description of Artificial Sequence: Synthetic oligonucleotide
  Target: LAMA2; (+) strand; PAM type: YTN; PAM sequence: TTT
tcacttagctagtgtaccaa

SEQ ID NO: 329076 - DNA, 20 bp, Artificial Sequence
  Description of Artificial Sequence: Synthetic oligonucleotide
  Target: LAMA2; (+) strand; PAM type: YTN; PAM sequence: TTT
cacttagctagtgtaccaaa

SEQ ID NO: 329077 - DNA, 20 bp, Artificial Sequence
  Description of Artificial Sequence: Synthetic oligonucleotide
  Target: LAMA2; (+) strand; PAM type: YTN; PAM sequence: TTC
acttagctagtgtaccaaaa

SEQ ID NO: 329078 - DNA, 20 bp, Artificial Sequence
  Description of Artificial Sequence: Synthetic oligonucleotide
  Target: LAMA2; (+) strand; PAM type: YTN; PAM sequence: CTT
agctagtgtaccaaaacagt

SEQ ID NO: 329079 - DNA, 20 bp, Artificial Sequence
  Description of Artificial Sequence: Synthetic oligonucleotide
  Target: LAMA2; (+) strand; PAM type: YTN; PAM sequence: TTA
gctagtgtaccaaaacagtt

SEQ ID NO: 329080 - DNA, 20 bp, Artificial Sequence
  Description of Artificial Sequence: Synthetic oligonucleotide
  Target: LAMA2; (+) strand; PAM type: YTN; PAM sequence: CTA
gtgtaccaaaacagttctac

SEQ ID NO: 329081 - DNA, 20 bp, Artificial Sequence
  Description of Artificial Sequence: Synthetic oligonucleotide
  Target: LAMA2; (+) strand; PAM type: YTN; PAM sequence: TTC
tacatttccaccaaattaaa

SEQ ID NO: 329082 - DNA, 20 bp, Artificial Sequence
  Description of Artificial Sequence: Synthetic oligonucleotide
  Target: LAMA2; (+) strand; PAM type: YTN; PAM sequence: CTA
catttccaccaaattaaagg

SEQ ID NO: 329083 - DNA, 20 bp, Artificial Sequence
  Description of Artificial Sequence: Synthetic oligonucleotide
  Target: LAMA2; (+) strand; PAM type: YTN; PAM sequence: TTT
ccaccaaattaaaggtctga

SEQ ID NO: 329084 - DNA, 20 bp, Artificial Sequence
  Description of Artificial Sequence: Synthetic oligonucleotide
  Target: LAMA2; (+) strand; PAM type: YTN; PAM sequence: TTC
caccaaattaaaggtctgat

SEQ ID NO: 329085 - DNA, 20 bp, Artificial Sequence
  Description of Artificial Sequence: Synthetic oligonucleotide
  Target: LAMA2; (+) strand; PAM type: YTN; PAM sequence: TTA
aaggtctgattagtttaatg

SEQ ID NO: 329086 - DNA, 20 bp, Artificial Sequence
  Description of Artificial Sequence: Synthetic oligonucleotide
  Target: LAMA2; (+) strand; PAM type: YTN; PAM sequence: CTG
attagtttaatgcccttcat

SEQ ID NO: 329087 - DNA, 20 bp, Artificial Sequence
  Description of Artificial Sequence: Synthetic oligonucleotide
  Target: LAMA2; (+) strand; PAM type: YTN; PAM sequence: TTA
gtttaatgcccttcatttgc

SEQ ID NO: 329088 - DNA, 20 bp, Artificial Sequence
  Description of Artificial Sequence: Synthetic oligonucleotide
  Target: LAMA2; (+) strand; PAM type: YTN; PAM sequence: TTT
aatgcccttcatttgccata

SEQ ID NO: 329089 - DNA, 20 bp, Artificial Sequence
  Description of Artificial Sequence: Synthetic oligonucleotide
  Target: LAMA2; (+) strand; PAM type: YTN; PAM sequence: TTA
atgcccttcatttgccatat

SEQ ID NO: 329090 - DNA, 20 bp, Artificial Sequence
  Description of Artificial Sequence: Synthetic oligonucleotide
  Target: LAMA2; (+) strand; PAM type: YTN; PAM sequence: CTT
catttgccatatttttctca

SEQ ID NO: 329091 - DNA, 20 bp, Artificial Sequence
  Description of Artificial Sequence: Synthetic oligonucleotide
  Target: LAMA2; (+) strand; PAM type: YTN; PAM sequence: TTC
atttgccatatttttctcaa

SEQ ID NO: 329092 - DNA, 20 bp, Artificial Sequence
  Description of Artificial Sequence: Synthetic oligonucleotide
  Target: LAMA2; (+) strand; PAM type: YTN; PAM sequence: TTT
gccatatttttctcaagaaa

SEQ ID NO: 329093 - DNA, 20 bp, Artificial Sequence
  Description of Artificial Sequence: Synthetic oligonucleotide
  Target: LAMA2; (+) strand; PAM type: YTN; PAM sequence: TTG
ccatatttttctcaagaaag

SEQ ID NO: 329094 - DNA, 20 bp, Artificial Sequence
  Description of Artificial Sequence: Synthetic oligonucleotide
  Target: LAMA2; (+) strand; PAM type: YTN; PAM sequence: TTT
ttctcaagaaagattataca

SEQ ID NO: 329095 - DNA, 20 bp, Artificial Sequence
  Description of Artificial Sequence: Synthetic oligonucleotide
  Target: LAMA2; (+) strand; PAM type: YTN; PAM sequence: TTT
tctcaagaaagattatacag

SEQ ID NO: 329096 - DNA, 20 bp, Artificial Sequence
  Description of Artificial Sequence: Synthetic oligonucleotide
  Target: LAMA2; (+) strand; PAM type: YTN; PAM sequence: TTT
ctcaagaaagattatacagt

SEQ ID NO: 329097 - DNA, 20 bp, Artificial Sequence
  Description of Artificial Sequence: Synthetic oligonucleotide
  Target: LAMA2; (+) strand; PAM type: YTN; PAM sequence: TTC
tcaagaaagattatacagtg

SEQ ID NO: 329098 - DNA, 20 bp, Artificial Sequence
  Description of Artificial Sequence: Synthetic oligonucleotide
  Target: LAMA2; (+) strand; PAM type: YTN; PAM sequence: CTC
aagaaagattatacagtgca

SEQ ID NO: 329099 - DNA, 20 bp, Artificial Sequence
  Description of Artificial Sequence: Synthetic oligonucleotide
  Target: LAMA2; (+) strand; PAM type: YTN; PAM sequence: TTA
tacagtgcatgaactcattc

SEQ ID NO: 329100 - DNA, 20 bp, Artificial Sequence
  Description of Artificial Sequence: Synthetic oligonucleotide
  Target: LAMA2; (+) strand; PAM type: YTN; PAM sequence: CTC
attcttattcagtaaattta

SEQ ID NO: 329101 - DNA, 20 bp, Artificial Sequence
  Description of Artificial Sequence: Synthetic oligonucleotide
  Target: LAMA2; (+) strand; PAM type: YTN; PAM sequence: TTC
ttattcagtaaatttaaatt

SEQ ID NO: 329102 - DNA, 20 bp, Artificial Sequence
  Description of Artificial Sequence: Synthetic oligonucleotide
  Target: LAMA2; (+) strand; PAM type: YTN; PAM sequence: CTT
attcagtaaatttaaatttg

SEQ ID NO: 329103 - DNA, 20 bp, Artificial Sequence
  Description of Artificial Sequence: Synthetic oligonucleotide
  Target: LAMA2; (+) strand; PAM type: YTN; PAM sequence: TTA
ttcagtaaatttaaatttga

SEQ ID NO: 329104 - DNA, 20 bp, Artificial Sequence
  Description of Artificial Sequence: Synthetic oligonucleotide
  Target: LAMA2; (+) strand; PAM type: YTN; PAM sequence: TTC
agtaaatttaaatttgagtg

SEQ ID NO: 329105 - DNA, 20 bp, Artificial Sequence
  Description of Artificial Sequence: Synthetic oligonucleotide
  Target: LAMA2; (+) strand; PAM type: YTN; PAM sequence: TTT
aaatttgagtggcattatat

SEQ ID NO: 329106 - DNA, 20 bp, Artificial Sequence
  Description of Artificial Sequence: Synthetic oligonucleotide
  Target: LAMA2; (+) strand; PAM type: YTN; PAM sequence: TTA
aatttgagtggcattatatt

SEQ ID NO: 329107 - DNA, 20 bp, Artificial Sequence
  Description of Artificial Sequence: Synthetic oligonucleotide
  Target: LAMA2; (+) strand; PAM type: YTN; PAM sequence: TTT
gagtggcattatattccaac

SEQ ID NO: 329108 - DNA, 20 bp, Artificial Sequence
  Description of Artificial Sequence: Synthetic oligonucleotide
  Target: LAMA2; (+) strand; PAM type: YTN; PAM sequence: TTG
agtggcattatattccaact

SEQ ID NO: 329109 - DNA, 20 bp, Artificial Sequence
  Description of Artificial Sequence: Synthetic oligonucleotide
  Target: LAMA2; (+) strand; PAM type: YTN; PAM sequence: TTA
tattccaactagtgctatcc

SEQ ID NO: 329110 - DNA, 20 bp, Artificial Sequence
  Description of Artificial Sequence: Synthetic oligonucleotide
  Target: LAMA2; (+) strand; PAM type: YTN; PAM sequence: TTC
caactagtgctatccatgcc

SEQ ID NO: 329111 - DNA, 20 bp, Artificial Sequence
  Description of Artificial Sequence: Synthetic oligonucleotide
  Target: LAMA2; (+) strand; PAM type: YTN; PAM sequence: CTA
gtgctatccatgccctcagt

SEQ ID NO: 329112 - DNA, 20 bp, Artificial Sequence
  Description of Artificial Sequence: Synthetic oligonucleotide
  Target: LAMA2; (+) strand; PAM type: YTN; PAM sequence: CTA
tccatgccctcagtaatttt

SEQ ID NO: 329113 - DNA, 20 bp, Artificial Sequence
  Description of Artificial Sequence: Synthetic oligonucleotide
  Target: LAMA2; (+) strand; PAM type: YTN; PAM sequence: CTC
agtaattttatagacttgag

SEQ ID NO: 329114 - DNA, 20 bp, Artificial Sequence
  Description of Artificial Sequence: Synthetic oligonucleotide
  Target: LAMA2; (+) strand; PAM type: YTN; PAM sequence: TTT
tatagacttgagagccaccg

SEQ ID NO: 329115 - DNA, 20 bp, Artificial Sequence
  Description of Artificial Sequence: Synthetic oligonucleotide
  Target: LAMA2; (+) strand; PAM type: YTN; PAM sequence: TTT
atagacttgagagccaccgt

SEQ ID NO: 329116 - DNA, 20 bp, Artificial Sequence
  Description of Artificial Sequence: Synthetic oligonucleotide
  Target: LAMA2; (+) strand; PAM type: YTN; PAM sequence: TTA
tagacttgagagccaccgta

SEQ ID NO: 329117 - DNA, 20 bp, Artificial Sequence
  Description of Artificial Sequence: Synthetic oligonucleotide
  Target: LAMA2; (+) strand; PAM type: YTN; PAM sequence: CTT
gagagccaccgtaaaaaata

SEQ ID NO: 329118 - DNA, 20 bp, Artificial Sequence
  Description of Artificial Sequence: Synthetic oligonucleotide
  Target: LAMA2; (+) strand; PAM type: YTN; PAM sequence: TTG
agagccaccgtaaaaaatac

SEQ ID NO: 329119 - DNA, 20 bp, Artificial Sequence
  Description of Artificial Sequence: Synthetic oligonucleotide
  Target: LAMA2; (+) strand; PAM type: YTN; PAM sequence: CTA
aagttacagtatgatgaggg

SEQ ID NO: 329120 - DNA, 20 bp, Artificial Sequence
  Description of Artificial Sequence: Synthetic oligonucleotide
  Target: LAMA2; (+) strand; PAM type: YTN; PAM sequence: TTA
cagtatgatgagggttctac

SEQ ID NO: 329121 - DNA, 20 bp, Artificial Sequence
  Description of Artificial Sequence: Synthetic oligonucleotide
  Target: LAMA2; (+) strand; PAM type: YTN; PAM sequence: TTC
tactaaatatcaactaagta

SEQ ID NO: 329122 - DNA, 20 bp, Artificial Sequence
  Description of Artificial Sequence: Synthetic oligonucleotide
  Target: LAMA2; (+) strand; PAM type: YTN; PAM sequence: CTA
ctaaatatcaactaagtaat

SEQ ID NO: 329123 - DNA, 20 bp, Artificial Sequence
  Description of Artificial Sequence: Synthetic oligonucleotide
  Target: LAMA2; (+) strand; PAM type: YTN; PAM sequence: CTA
aatatcaactaagtaatata

SEQ ID NO: 329124 - DNA, 20 bp, Artificial Sequence
  Description of Artificial Sequence: Synthetic oligonucleotide
  Target: LAMA2; (+) strand; PAM type: YTN; PAM sequence: CTA
agtaatatacggacaccaag

SEQ ID NO: 329125 - DNA, 20 bp, Artificial Sequence
  Description of Artificial Sequence: Synthetic oligonucleotide
  Target: LAMA2; (+) strand; PAM type: YTN; PAM sequence: TTC
tgtgtggcaaagtcagaaaa

SEQ ID NO: 329126 - DNA, 20 bp, Artificial Sequence
  Description of Artificial Sequence: Synthetic oligonucleotide
  Target: LAMA2; (+) strand; PAM type: YTN; PAM sequence: CTG
tgtggcaaagtcagaaaaca

SEQ ID NO: 329127 - DNA, 20 bp, Artificial Sequence
  Description of Artificial Sequence: Synthetic oligonucleotide
  Target: LAMA2; (+) strand; PAM type: YTN; PAM sequence: CTT
tcacagagcagggaatattt

SEQ ID NO: 329128 - DNA, 20 bp, Artificial Sequence
  Description of Artificial Sequence: Synthetic oligonucleotide
  Target: LAMA2; (+) strand; PAM type: YTN; PAM sequence: TTT
cacagagcagggaatatttg

SEQ ID NO: 329129 - DNA, 20 bp, Artificial Sequence
  Description of Artificial Sequence: Synthetic oligonucleotide
  Target: LAMA2; (+) strand; PAM type: YTN; PAM sequence: TTC
acagagcagggaatatttga

SEQ ID NO: 329130 - DNA, 20 bp, Artificial Sequence
  Description of Artificial Sequence: Synthetic oligonucleotide
  Target: LAMA2; (+) strand; PAM type: YTN; PAM sequence: TTT
gagctatgaaagatgaacat

SEQ ID NO: 329131 - DNA, 20 bp, Artificial Sequence
  Description of Artificial Sequence: Synthetic oligonucleotide
  Target: LAMA2; (+) strand; PAM type: YTN; PAM sequence: TTG
agctatgaaagatgaacatg

SEQ ID NO: 329132 - DNA, 20 bp, Artificial Sequence
  Description of Artificial Sequence: Synthetic oligonucleotide
  Target: LAMA2; (+) strand; PAM type: YTN; PAM sequence: CTA
tgaaagatgaacatgcaaca

SEQ ID NO: 329133 - DNA, 20 bp, Artificial Sequence
  Description of Artificial Sequence: Synthetic oligonucleotide
  Target: LAMA2; (+) strand; PAM type: YTN; PAM sequence: TTC
tttgttgaagggacaagata

SEQ ID NO: 329134 - DNA, 20 bp, Artificial Sequence
  Description of Artificial Sequence: Synthetic oligonucleotide
  Target: LAMA2; (+) strand; PAM type: YTN; PAM sequence: CTT
tgttgaagggacaagataat

SEQ ID NO: 329135 - DNA, 20 bp, Artificial Sequence
  Description of Artificial Sequence: Synthetic oligonucleotide
  Target: LAMA2; (+) strand; PAM type: YTN; PAM sequence: TTT
gttgaagggacaagataatg

SEQ ID NO: 329136 - DNA, 20 bp, Artificial Sequence
  Description of Artificial Sequence: Synthetic oligonucleotide
  Target: LAMA2; (+) strand; PAM type: YTN; PAM sequence: TTG
ttgaagggacaagataatgt

SEQ ID NO: 329137 - DNA, 20 bp, Artificial Sequence
  Description of Artificial Sequence: Synthetic oligonucleotide
  Target: LAMA2; (+) strand; PAM type: YTN; PAM sequence: TTG
aagggacaagataatgtcat

SEQ ID NO: 329138 - DNA, 20 bp, Artificial Sequence
  Description of Artificial Sequence: Synthetic oligonucleotide
  Target: LAMA2; (+) strand; PAM type: YTN; PAM sequence: TTT
tcaaaatgcctgctatattt

SEQ ID NO: 329139 - DNA, 20 bp, Artificial Sequence
  Description of Artificial Sequence: Synthetic oligonucleotide
  Target: LAMA2; (+) strand; PAM type: YTN; PAM sequence: TTT
caaaatgcctgctatatttg

SEQ ID NO: 329140 - DNA, 20 bp, Artificial Sequence
  Description of Artificial Sequence: Synthetic oligonucleotide
  Target: LAMA2; (+) strand; PAM type: YTN; PAM sequence: TTC
aaaatgcctgctatatttgt

SEQ ID NO: 329141 - DNA, 20 bp, Artificial Sequence
  Description of Artificial Sequence: Synthetic oligonucleotide
  Target: LAMA2; (+) strand; PAM type: YTN; PAM sequence: CTG
ctatatttgtaaataggaag

SEQ ID NO: 329142 - DNA, 20 bp, Artificial Sequence
  Description of Artificial Sequence: Synthetic oligonucleotide
  Target: LAMA2; (+) strand; PAM type: YTN; PAM sequence: CTA
tatttgtaaataggaagaga

SEQ ID NO: 329143 - DNA, 20 bp, Artificial Sequence
  Description of Artificial Sequence: Synthetic oligonucleotide
  Target: LAMA2; (+) strand; PAM type: YTN; PAM sequence: TTT
gtaaataggaagagatcagt

SEQ ID NO: 329144 - DNA, 20 bp, Artificial Sequence
  Description of Artificial Sequence: Synthetic oligonucleotide
  Target: LAMA2; (+) strand; PAM type: YTN; PAM sequence: TTG
taaataggaagagatcagtt

SEQ ID NO: 329145 - DNA, 20 bp, Artificial Sequence
  Description of Artificial Sequence: Synthetic oligonucleotide
  Target: LAMA2; (+) strand; PAM type: YTN; PAM sequence: TTC
actagatgtataagaaggca

SEQ ID NO: 329146 - DNA, 20 bp, Artificial Sequence
  Description of Artificial Sequence: Synthetic oligonucleotide
  Target: LAMA2; (+) strand; PAM type: YTN; PAM sequence: CTA
gatgtataagaaggcatgaa

SEQ ID NO: 329147 - DNA, 20 bp, Artificial Sequence
  Description of Artificial Sequence: Synthetic oligonucleotide
  Target: LAMA2; (+) strand; PAM type: YTN; PAM sequence: TTC
agacaggtagaaagcaggcc

SEQ ID NO: 329148 - DNA, 20 bp, Artificial Sequence
  Description of Artificial Sequence: Synthetic oligonucleotide
  Target: LAMA2; (+) strand; PAM type: YTN; PAM sequence: CTG
attataaatgtttagatcac

SEQ ID NO: 329149 - DNA, 20 bp, Artificial Sequence
  Description of Artificial Sequence: Synthetic oligonucleotide
  Target: LAMA2; (+) strand; PAM type: YTN; PAM sequence: TTA
taaatgtttagatcaccaag

SEQ ID NO: 329150 - DNA, 20 bp, Artificial Sequence
  Description of Artificial Sequence: Synthetic oligonucleotide
  Target: LAMA2; (+) strand; PAM type: YTN; PAM sequence: TTT
agatcaccaaggagtttgtc

SEQ ID NO: 329151 - DNA, 20 bp, Artificial Sequence
  Description of Artificial Sequence: Synthetic oligonucleotide
  Target: LAMA2; (+) strand; PAM type: YTN; PAM sequence: TTA
gatcaccaaggagtttgtct

SEQ ID NO: 329152 - DNA, 20 bp, Artificial Sequence
  Description of Artificial Sequence: Synthetic oligonucleotide
  Target: LAMA2; (+) strand; PAM type: YTN; PAM sequence: TTT
gtctacgacactacaggtga

SEQ ID NO: 329153 - DNA, 20 bp, Artificial Sequence
  Description of Artificial Sequence: Synthetic oligonucleotide
  Target: LAMA2; (+) strand; PAM type: YTN; PAM sequence: TTG
tctacgacactacaggtgac

SEQ ID NO: 329154 - DNA, 20 bp, Artificial Sequence
  Description of Artificial Sequence: Synthetic oligonucleotide
  Target: LAMA2; (+) strand; PAM type: YTN; PAM sequence: CTA
cgacactacaggtgacaggc

SEQ ID NO: 329155 - DNA, 20 bp, Artificial Sequence
  Description of Artificial Sequence: Synthetic oligonucleotide
  Target: LAMA2; (+) strand; PAM type: YTN; PAM sequence: CTA
caggtgacaggcaactcaca

SEQ ID NO: 329156 - DNA, 20 bp, Artificial Sequence
  Description of Artificial Sequence: Synthetic oligonucleotide
  Target: LAMA2; (+) strand; PAM type: YTN; PAM sequence: CTC
acaaaagtctttaaaaaaga

SEQ ID NO: 329157 - DNA, 20 bp, Artificial Sequence
  Description of Artificial Sequence: Synthetic oligonucleotide
  Target: LAMA2; (+) strand; PAM type: YTN; PAM sequence: CTT
taaaaaagaaagtgagtttt

SEQ ID NO: 329158 - DNA, 20 bp, Artificial Sequence
  Description of Artificial Sequence: Synthetic oligonucleotide
  Target: LAMA2; (+) strand; PAM type: YTN; PAM sequence: TTT
aaaaaagaaagtgagtttta

SEQ ID NO: 329159 - DNA, 20 bp, Artificial Sequence
  Description of Artificial Sequence: Synthetic oligonucleotide
  Target: LAMA2; (+) strand; PAM type: YTN; PAM sequence: TTA
aaaaagaaagtgagttttag

SEQ ID NO: 329160 - DNA, 20 bp, Artificial Sequence
  Description of Artificial Sequence: Synthetic oligonucleotide
  Target: LAMA2; (+) strand; PAM type: YTN; PAM sequence: TTT
tagggaagataatttcaaca

SEQ ID NO: 329161 - DNA, 20 bp, Artificial Sequence
  Description of Artificial Sequence: Synthetic oligonucleotide
  Target: LAMA2; (+) strand; PAM type: YTN; PAM sequence: TTT
agggaagataatttcaacaa

SEQ ID NO: 329162 - DNA, 20 bp, Artificial Sequence
  Description of Artificial Sequence: Synthetic oligonucleotide
  Target: LAMA2; (+) strand; PAM type: YTN; PAM sequence: TTA
gggaagataatttcaacaac

SEQ ID NO: 329163 - DNA, 20 bp, Artificial Sequence
  Description of Artificial Sequence: Synthetic oligonucleotide
  Target: LAMA2; (+) strand; PAM type: YTN; PAM sequence: TTT
caacaacaatggggaagatt

SEQ ID NO: 329164 - DNA, 20 bp, Artificial Sequence
  Description of Artificial Sequence: Synthetic oligonucleotide
  Target: LAMA2; (+) strand; PAM type: YTN; PAM sequence: TTC
aacaacaatggggaagatta

SEQ ID NO: 329165 - DNA, 20 bp, Artificial Sequence
  Description of Artificial Sequence: Synthetic oligonucleotide
  Target: LAMA2; (+) strand; PAM type: YTN; PAM sequence: TTA
atgggagtagagtcacgcag

SEQ ID NO: 329166 - DNA, 20 bp, Artificial Sequence
  Description of Artificial Sequence: Synthetic oligonucleotide
  Target: LAMA2; (+) strand; PAM type: YTN; PAM sequence: CTA
ggaagggcagtggtgctcaa

SEQ ID NO: 329167 - DNA, 20 bp, Artificial Sequence
  Description of Artificial Sequence: Synthetic oligonucleotide
  Target: LAMA2; (+) strand; PAM type: YTN; PAM sequence: CTC
aacctgtttggcaccaggga

SEQ ID NO: 329168 - DNA, 20 bp, Artificial Sequence
  Description of Artificial Sequence: Synthetic oligonucleotide
  Target: LAMA2; (+) strand; PAM type: YTN; PAM sequence: CTG
tttggcaccagggaccagtt

SEQ ID NO: 329169 - DNA, 20 bp, Artificial Sequence
  Description of Artificial Sequence: Synthetic oligonucleotide
  Target: LAMA2; (+) strand; PAM type: YTN; PAM sequence: TTT
ggcaccagggaccagttttg

SEQ ID NO: 329170 - DNA, 20 bp, Artificial Sequence
  Description of Artificial Sequence: Synthetic oligonucleotide
  Target: LAMA2; (+) strand; PAM type: YTN; PAM sequence: TTG
gcaccagggaccagttttgt

SEQ ID NO: 329171 - DNA, 20 bp, Artificial Sequence
  Description of Artificial Sequence: Synthetic oligonucleotide
  Target: LAMA2; (+) strand; PAM type: YTN; PAM sequence: TTT
tgtggaagacaatttttcca

SEQ ID NO: 329172 - DNA, 20 bp, Artificial Sequence
  Description of Artificial Sequence: Synthetic oligonucleotide
  Target: LAMA2; (+) strand; PAM type: YTN; PAM sequence: TTT
gtggaagacaatttttccat

SEQ ID NO: 329173 - DNA, 20 bp, Artificial Sequence
  Description of Artificial Sequence: Synthetic oligonucleotide
  Target: LAMA2; (+) strand; PAM type: YTN; PAM sequence: TTG
tggaagacaatttttccatt

SEQ ID NO: 329174 - DNA, 20 bp, Artificial Sequence
  Description of Artificial Sequence: Synthetic oligonucleotide
  Target: LAMA2; (+) strand; PAM type: YTN; PAM sequence: TTT
ttccattgacagggataggg

SEQ ID NO: 329175 - DNA, 20 bp, Artificial Sequence
  Description of Artificial Sequence: Synthetic oligonucleotide
  Target: LAMA2; (+) strand; PAM type: YTN; PAM sequence: TTT
tccattgacagggatagggg

SEQ ID NO: 329176 - DNA, 20 bp, Artificial Sequence
  Description of Artificial Sequence: Synthetic oligonucleotide
  Target: LAMA2; (+) strand; PAM type: YTN; PAM sequence: TTT
ccattgacagggataggggt

SEQ ID NO: 329177 - DNA, 20 bp, Artificial Sequence
  Description of Artificial Sequence: Synthetic oligonucleotide
  Target: LAMA2; (+) strand; PAM type: YTN; PAM sequence: TTC
cattgacagggataggggtg

SEQ ID NO: 329178 - DNA, 20 bp, Artificial Sequence
  Description of Artificial Sequence: Synthetic oligonucleotide
  Target: LAMA2; (+) strand; PAM type: YTN; PAM sequence: TTG
acagggataggggtggatgg

SEQ ID NO: 329179 - DNA, 20 bp, Artificial Sequence
  Description of Artificial Sequence: Synthetic oligonucleotide
  Target: LAMA2; (+) strand; PAM type: YTN; PAM sequence: TTT
caggatgaaactgttccacc

SEQ ID NO: 329180 - DNA, 20 bp, Artificial Sequence
  Description of Artificial Sequence: Synthetic oligonucleotide
  Target: LAMA2; (+) strand; PAM type: YTN; PAM sequence: TTC
aggatgaaactgttccacct

SEQ ID NO: 329181 - DNA, 20 bp, Artificial Sequence
  Description of Artificial Sequence: Synthetic oligonucleotide
  Target: LAMA2; (+) strand; PAM type: YTN; PAM sequence: CTG
ttccacctcagatcatcagc

SEQ ID NO: 329182 - DNA, 20 bp, Artificial Sequence
  Description of Artificial Sequence: Synthetic oligonucleotide
  Target: LAMA2; (+) strand; PAM type: YTN; PAM sequence: TTC
cacctcagatcatcagccat

SEQ ID NO: 329183 - DNA, 20 bp, Artificial Sequence
  Description of Artificial Sequence: Synthetic oligonucleotide
  Target: LAMA2; (+) strand; PAM type: YTN; PAM sequence: CTC
agatcatcagccattagatt

SEQ ID NO: 329184 - DNA, 20 bp, Artificial Sequence
  Description of Artificial Sequence: Synthetic oligonucleotide
  Target: LAMA2; (+) strand; PAM type: YTN; PAM sequence: TTA
gattcttataagtagctcac

SEQ ID NO: 329185 - DNA, 20 bp, Artificial Sequence
  Description of Artificial Sequence: Synthetic oligonucleotide
  Target: LAMA2; (+) strand; PAM type: YTN; PAM sequence: TTC
ttataagtagctcacaacct

SEQ ID NO: 329186 - DNA, 20 bp, Artificial Sequence
  Description of Artificial Sequence: Synthetic oligonucleotide
  Target: LAMA2; (+) strand; PAM type: YTN; PAM sequence: CTT
ataagtagctcacaacctag

SEQ ID NO: 329187 - DNA, 20 bp, Artificial Sequence
  Description of Artificial Sequence: Synthetic oligonucleotide
  Target: LAMA2; (+) strand; PAM type: YTN; PAM sequence: TTA
taagtagctcacaacctaga

SEQ ID NO: 329188 - DNA, 20 bp, Artificial Sequence
  Description of Artificial Sequence: Synthetic oligonucleotide
  Target: LAMA2; (+) strand; PAM type: YTN; PAM sequence: CTC
acaacctagatccctcgcat

SEQ ID NO: 329189 - DNA, 20 bp, Artificial Sequence
  Description of Artificial Sequence: Synthetic oligonucleotide
  Target: LAMA2; (+) strand; PAM type: YTN; PAM sequence: CTA
gatccctcgcatgcacagtt

SEQ ID NO: 329190 - DNA, 20 bp, Artificial Sequence
  Description of Artificial Sequence: Synthetic oligonucleotide
  Target: LAMA2; (+) strand; PAM type: YTN; PAM sequence: CTC
gcatgcacagttcacaatat

SEQ ID NO: 329191 - DNA, 20 bp, Artificial Sequence
  Description of Artificial Sequence: Synthetic oligonucleotide
  Target: LAMA2; (+) strand; PAM type: YTN; PAM sequence: TTC
acaatatggttcacgttcct

SEQ ID NO: 329192 - DNA, 20 bp, Artificial Sequence
  Description of Artificial Sequence: Synthetic oligonucleotide
  Target: LAMA2; (+) strand; PAM type: YTN; PAM sequence: TTC
acgttcctgtgagagtctaa

SEQ ID NO: 329193 - DNA, 20 bp, Artificial Sequence
  Description of Artificial Sequence: Synthetic oligonucleotide
  Target: LAMA2; (+) strand; PAM type: YTN; PAM sequence: TTC
ctgtgagagtctaatgctgt

SEQ ID NO: 329194 - DNA, 20 bp, Artificial Sequence
  Description of Artificial Sequence: Synthetic oligonucleotide
  Target: LAMA2; (+) strand; PAM type: YTN; PAM sequence: CTG
tgagagtctaatgctgttgc

SEQ ID NO: 329195 - DNA, 20 bp, Artificial Sequence
  Description of Artificial Sequence: Synthetic oligonucleotide
  Target: LAMA2; (+) strand; PAM type: YTN; PAM sequence: CTA
atgctgttgcttatctgaca

SEQ ID NO: 329196 - DNA, 20 bp, Artificial Sequence
  Description of Artificial Sequence: Synthetic oligonucleotide
  Target: LAMA2; (+) strand; PAM type: YTN; PAM sequence: CTG
ttgcttatctgacaggaggc

SEQ ID NO: 329197 - DNA, 20 bp, Artificial Sequence
  Description of Artificial Sequence: Synthetic oligonucleotide
  Target: LAMA2; (+) strand; PAM type: YTN; PAM sequence: TTG
cttatctgacaggaggcaga

SEQ ID NO: 329198 - DNA, 20 bp, Artificial Sequence
  Description of Artificial Sequence: Synthetic oligonucleotide
  Target: LAMA2; (+) strand; PAM type: YTN; PAM sequence: CTT
atctgacaggaggcagagct

SEQ ID NO: 329199 - DNA, 20 bp, Artificial Sequence
  Description of Artificial Sequence: Synthetic oligonucleotide
  Target: LAMA2; (+) strand; PAM type: YTN; PAM sequence: TTA
tctgacaggaggcagagctc

SEQ ID NO: 329200 - DNA, 20 bp, Artificial Sequence
  Description of Artificial Sequence: Synthetic oligonucleotide
  Target: LAMA2; (+) strand; PAM type: YTN; PAM sequence: CTG
acaggaggcagagctcaggt

SEQ ID NO: 329201 - DNA, 20 bp, Artificial Sequence
  Description of Artificial Sequence: Synthetic oligonucleotide
  Target: LAMA2; (+) strand; PAM type: YTN; PAM sequence: CTC
aggtggtaatgcttgtttgc

SEQ ID NO: 329202 - DNA, 20 bp, Artificial Sequence
  Description of Artificial Sequence: Synthetic oligonucleotide
  Target: LAMA2; (+) strand; PAM type: YTN; PAM sequence: CTT
gtttgccagccactcacttc

SEQ ID NO: 329203 - DNA, 20 bp, Artificial Sequence
  Description of Artificial Sequence: Synthetic oligonucleotide
  Target: LAMA2; (+) strand; PAM type: YTN; PAM sequence: TTG
tttgccagccactcacttcc

SEQ ID NO: 329204 - DNA, 20 bp, Artificial Sequence
  Description of Artificial Sequence: Synthetic oligonucleotide
  Target: LAMA2; (+) strand; PAM type: YTN; PAM sequence: TTT
gccagccactcacttcctgc

SEQ ID NO: 329205 - DNA, 20 bp, Artificial Sequence
  Description of Artificial Sequence: Synthetic oligonucleotide
  Target: LAMA2; (+) strand; PAM type: YTN; PAM sequence: TTG
ccagccactcacttcctgct

SEQ ID NO: 329206 - DNA, 20 bp, Artificial Sequence
  Description of Artificial Sequence: Synthetic oligonucleotide
  Target: LAMA2; (+) strand; PAM type: YTN; PAM sequence: CTC
acttcctgctgtgcagccct

SEQ ID NO: 329207 - DNA, 20 bp, Artificial Sequence
  Description of Artificial Sequence: Synthetic oligonucleotide
  Target: LAMA2; (+) strand; PAM type: YTN; PAM sequence: CTT
cctgctgtgcagccctgttc

SEQ ID NO: 329208 - DNA, 20 bp, Artificial Sequence
  Description of Artificial Sequence: Synthetic oligonucleotide
  Target: LAMA2; (+) strand; PAM type: YTN; PAM sequence: TTC
ctgctgtgcagccctgttcc

SEQ ID NO: 329209 - DNA, 20 bp, Artificial Sequence
  Description of Artificial Sequence: Synthetic oligonucleotide
  Target: LAMA2; (+) strand; PAM type: YTN; PAM sequence: CTG
ctgtgcagccctgttcctaa

SEQ ID NO: 329210 - DNA, 20 bp, Artificial Sequence
  Description of Artificial Sequence: Synthetic oligonucleotide
  Target: LAMA2; (+) strand; PAM type: YTN; PAM sequence: CTG
tgcagccctgttcctaacag

SEQ ID NO: 329211 - DNA, 20 bp, Artificial Sequence
  Description of Artificial Sequence: Synthetic oligonucleotide
  Target: LAMA2; (+) strand; PAM type: YTN; PAM sequence: CTG
ttcctaacaggccacaggct

SEQ ID NO: 329212 - DNA, 20 bp, Artificial Sequence
  Description of Artificial Sequence: Synthetic oligonucleotide
  Target: LAMA2; (+) strand; PAM type: YTN; PAM sequence: TTC
ctaacaggccacaggctggt

SEQ ID NO: 329213 - DNA, 20 bp, Artificial Sequence
  Description of Artificial Sequence: Synthetic oligonucleotide
  Target: LAMA2; (+) strand; PAM type: YTN; PAM sequence: CTA
acaggccacaggctggtact

SEQ ID NO: 329214 - DNA, 20 bp, Artificial Sequence
  Description of Artificial Sequence: Synthetic oligonucleotide
  Target: LAMA2; (+) strand; PAM type: YTN; PAM sequence: CTG
gtactggtctgcagccctgg

SEQ ID NO: 329215 - DNA, 20 bp, Artificial Sequence
  Description of Artificial Sequence: Synthetic oligonucleotide
  Target: LAMA2; (+) strand; PAM type: YTN; PAM sequence: CTG
gtctgcagccctggggttgg

SEQ ID NO: 329216 - DNA, 20 bp, Artificial Sequence
  Description of Artificial Sequence: Synthetic oligonucleotide
  Target: LAMA2; (+) strand; PAM type: YTN; PAM sequence: CTG
cagccctggggttggggacc

SEQ ID NO: 329217 - DNA, 20 bp, Artificial Sequence
  Description of Artificial Sequence: Synthetic oligonucleotide
  Target: LAMA2; (+) strand; PAM type: YTN; PAM sequence: CTG
gggttggggaccccgggtta

SEQ ID NO: 329218 - DNA, 20 bp, Artificial Sequence
  Description of Artificial Sequence: Synthetic oligonucleotide
  Target: LAMA2; (+) strand; PAM type: YTN; PAM sequence: TTG
gggaccccgggttaggatgc

SEQ ID NO: 329219 - DNA, 20 bp, Artificial Sequence
  Description of Artificial Sequence: Synthetic oligonucleotide
  Target: LAMA2; (+) strand; PAM type: YTN; PAM sequence: TTA
ggatgctactgtaataaatg

SEQ ID NO: 329220 - DNA, 20 bp, Artificial Sequence
  Description of Artificial Sequence: Synthetic oligonucleotide
  Target: LAMA2; (+) strand; PAM type: YTN; PAM sequence: CTA
ctgtaataaatgtaaagtaa

SEQ ID NO: 329221 - DNA, 20 bp, Artificial Sequence
  Description of Artificial Sequence: Synthetic oligonucleotide
  Target: LAMA2; (+) strand; PAM type: YTN; PAM sequence: CTG
taataaatgtaaagtaaggt

SEQ ID NO: 329222 - DNA, 20 bp, Artificial Sequence
  Description of Artificial Sequence: Synthetic oligonucleotide
  Target: LAMA2; (+) strand; PAM type: YTN; PAM sequence: TTA
ggatatctgaatataaatgt

SEQ ID NO: 329223 - DNA, 20 bp, Artificial Sequence
  Description of Artificial Sequence: Synthetic oligonucleotide
  Target: LAMA2; (+) strand; PAM type: YTN; PAM sequence: CTG
aatataaatgttgatgtgtt

SEQ ID NO: 329224 - DNA, 20 bp, Artificial Sequence
  Description of Artificial Sequence: Synthetic oligonucleotide
  Target: LAMA2; (+) strand; PAM type: YTN; PAM sequence: TTG
atgtgtttgtgtggcgggga

SEQ ID NO: 329225 - DNA, 20 bp, Artificial Sequence
  Description of Artificial Sequence: Synthetic oligonucleotide
  Target: LAMA2; (+) strand; PAM type: YTN; PAM sequence: TTT
gtgtggcggggagcggtgtg

SEQ ID NO: 329226 - DNA, 20 bp, Artificial Sequence
  Description of Artificial Sequence: Synthetic oligonucleotide
  Target: LAMA2; (+) strand; PAM type: YTN; PAM sequence: TTG
tgtggcggggagcggtgtgt

SEQ ID NO: 329227 - DNA, 20 bp, Artificial Sequence
  Description of Artificial Sequence: Synthetic oligonucleotide
  Target: LAMA2; (+) strand; PAM type: YTN; PAM sequence: CTG
aatttgaggtagagacaaaa

SEQ ID NO: 329228 - DNA, 20 bp, Artificial Sequence
  Description of Artificial Sequence: Synthetic oligonucleotide
  Target: LAMA2; (+) strand; PAM type: YTN; PAM sequence: TTT
gaggtagagacaaaaagtaa

SEQ ID NO: 329229 - DNA, 20 bp, Artificial Sequence
  Description of Artificial Sequence: Synthetic oligonucleotide
  Target: LAMA2; (+) strand; PAM type: YTN; PAM sequence: TTG
aggtagagacaaaaagtaat

SEQ ID NO: 329230 - DNA, 20 bp, Artificial Sequence
  Description of Artificial Sequence: Synthetic oligonucleotide
  Target: LAMA2; (+) strand; PAM type: YTN; PAM sequence: TTA
aactggaagcagaaatctta

SEQ ID NO: 329231 - DNA, 20 bp, Artificial Sequence
  Description of Artificial Sequence: Synthetic oligonucleotide
  Target: LAMA2; (+) strand; PAM type: YTN; PAM sequence: CTG
gaagcagaaatcttagaatg

SEQ ID NO: 329232 - DNA, 20 bp, Artificial Sequence
  Description of Artificial Sequence: Synthetic oligonucleotide
  Target: LAMA2; (+) strand; PAM type: YTN; PAM sequence: CTT
agaatggggaaaagtaaggc

SEQ ID NO: 329233 - DNA, 20 bp, Artificial Sequence
  Description of Artificial Sequence: Synthetic oligonucleotide
  Target: LAMA2; (+) strand; PAM type: YTN; PAM sequence: TTA
gaatggggaaaagtaaggca

SEQ ID NO: 329234 - DNA, 20 bp, Artificial Sequence
  Description of Artificial Sequence: Synthetic oligonucleotide
  Target: LAMA2; (+) strand; PAM type: YTN; PAM sequence: TTT
gttcacaaagtatcttttaa

SEQ ID NO: 329235 - DNA, 20 bp, Artificial Sequence
  Description of Artificial Sequence: Synthetic oligonucleotide
  Target: LAMA2; (+) strand; PAM type: YTN; PAM sequence: TTG
ttcacaaagtatcttttaac

SEQ ID NO: 329236 - DNA, 20 bp, Artificial Sequence
  Description of Artificial Sequence: Synthetic oligonucleotide
  Target: LAMA2; (+) strand; PAM type: YTN; PAM sequence: TTC
acaaagtatcttttaacatt

SEQ ID NO: 329237 - DNA, 20 bp, Artificial Sequence
  Description of Artificial Sequence: Synthetic oligonucleotide
  Target: LAMA2; (+) strand; PAM type: YTN; PAM sequence: CTT
ttaacattttctggtttctg

SEQ ID NO: 329238 - DNA, 20 bp, Artificial Sequence
  Description of Artificial Sequence: Synthetic oligonucleotide
  Target: LAMA2; (+) strand; PAM type: YTN; PAM sequence: TTT
taacattttctggtttctgt

SEQ ID NO: 329239 - DNA, 20 bp, Artificial Sequence
  Description of Artificial Sequence: Synthetic oligonucleotide
  Target: LAMA2; (+) strand; PAM type: YTN; PAM sequence: TTT
aacattttctggtttctgtg

SEQ ID NO: 329240 - DNA, 20 bp, Artificial Sequence
  Description of Artificial Sequence: Synthetic oligonucleotide
  Target: LAMA2; (+) strand; PAM type: YTN; PAM sequence: TTA
acattttctggtttctgtgg

SEQ ID NO: 329241 - DNA, 20 bp, Artificial Sequence
  Description of Artificial Sequence: Synthetic oligonucleotide
  Target: LAMA2; (+) strand; PAM type: YTN; PAM sequence: TTT
tctggtttctgtggagtcac

SEQ ID NO: 329242 - DNA, 20 bp, Artificial Sequence
  Description of Artificial Sequence: Synthetic oligonucleotide
  Target: LAMA2; (+) strand; PAM type: YTN; PAM sequence: TTT
ctggtttctgtggagtcaca

SEQ ID NO: 329243 - DNA, 20 bp, Artificial Sequence
  Description of Artificial Sequence: Synthetic oligonucleotide
  Target: LAMA2; (+) strand; PAM type: YTN; PAM sequence: TTC
tggtttctgtggagtcacat

SEQ ID NO: 329244 - DNA, 20 bp, Artificial Sequence
  Description of Artificial Sequence: Synthetic oligonucleotide
  Target: LAMA2; (+) strand; PAM type: YTN; PAM sequence: CTG
gtttctgtggagtcacattt

SEQ ID NO: 329245 - DNA, 20 bp, Artificial Sequence
  Description of Artificial Sequence: Synthetic oligonucleotide
  Target: LAMA2; (+) strand; PAM type: YTN; PAM sequence: TTT
ctgtggagtcacattttatt

SEQ ID NO: 329246 - DNA, 20 bp, Artificial Sequence
  Description of Artificial Sequence: Synthetic oligonucleotide
  Target: LAMA2; (+) strand; PAM type: YTN; PAM sequence: TTC
tgtggagtcacattttatta

SEQ ID NO: 329247 - DNA, 20 bp, Artificial Sequence
  Description of Artificial Sequence: Synthetic oligonucleotide
  Target: LAMA2; (+) strand; PAM type: YTN; PAM sequence: CTG
tggagtcacattttattaat

SEQ ID NO: 329248 - DNA, 20 bp, Artificial Sequence
  Description of Artificial Sequence: Synthetic oligonucleotide
  Target: LAMA2; (+) strand; PAM type: YTN; PAM sequence: TTT
tattaatgctggttgacatt

SEQ ID NO: 329249 - DNA, 20 bp, Artificial Sequence
  Description of Artificial Sequence: Synthetic oligonucleotide
  Target: LAMA2; (+) strand; PAM type: YTN; PAM sequence: TTT
attaatgctggttgacattt

SEQ ID NO: 329250 - DNA, 20 bp, Artificial Sequence
  Description of Artificial Sequence: Synthetic oligonucleotide
  Target: LAMA2; (+) strand; PAM type: YTN; PAM sequence: TTA
ttaatgctggttgacattta

SEQ ID NO: 329251 - DNA, 20 bp, Artificial Sequence
  Description of Artificial Sequence: Synthetic oligonucleotide
  Target: LAMA2; (+) strand; PAM type: YTN; PAM sequence: TTA
atgctggttgacatttatct

SEQ ID NO: 329252 - DNA, 20 bp, Artificial Sequence
  Description of Artificial Sequence: Synthetic oligonucleotide
  Target: LAMA2; (+) strand; PAM type: YTN; PAM sequence: CTG
gttgacatttatctacctag

SEQ ID NO: 329253 - DNA, 20 bp, Artificial Sequence
  Description of Artificial Sequence: Synthetic oligonucleotide
  Target: LAMA2; (+) strand; PAM type: YTN; PAM sequence: TTG
acatttatctacctagaaaa

SEQ ID NO: 329254 - DNA, 20 bp, Artificial Sequence
  Description of Artificial Sequence: Synthetic oligonucleotide
  Target: LAMA2; (+) strand; PAM type: YTN; PAM sequence: TTT
atctacctagaaaaaaatga

SEQ ID NO: 329255 - DNA, 20 bp, Artificial Sequence
  Description of Artificial Sequence: Synthetic oligonucleotide
  Target: LAMA2; (+) strand; PAM type: YTN; PAM sequence: TTA
tctacctagaaaaaaatgac

SEQ ID NO: 329256 - DNA, 20 bp, Artificial Sequence
  Description of Artificial Sequence: Synthetic oligonucleotide
  Target: LAMA2; (+) strand; PAM type: YTN; PAM sequence: CTA
cctagaaaaaaatgacagaa

SEQ ID NO: 329257 - DNA, 20 bp, Artificial Sequence
  Description of Artificial Sequence: Synthetic oligonucleotide
  Target: LAMA2; (+) strand; PAM type: YTN; PAM sequence: CTA
gaaaaaaatgacagaaattt

SEQ ID NO: 329258 - DNA, 20 bp, Artificial Sequence
  Description of Artificial Sequence: Synthetic oligonucleotide
  Target: LAMA2; (+) strand; PAM type: YTN; PAM sequence: TTT
caggaacaaaggtgactatg

SEQ ID NO: 329259 - DNA, 20 bp, Artificial Sequence
  Description of Artificial Sequence: Synthetic oligonucleotide
  Target: LAMA2; (+) strand; PAM type: YTN; PAM sequence: TTC
aggaacaaaggtgactatga

SEQ ID NO: 329260 - DNA, 20 bp, Artificial Sequence
  Description of Artificial Sequence: Synthetic oligonucleotide
  Target: LAMA2; (+) strand; PAM type: YTN; PAM sequence: CTA
tgaattaggtaccaatattt

SEQ ID NO: 329261 - DNA, 20 bp, Artificial Sequence
  Description of Artificial Sequence: Synthetic oligonucleotide
  Target: LAMA2; (+) strand; PAM type: YTN; PAM sequence: TTA
ggtaccaatatttttgtgga

SEQ ID NO: 329262 - DNA, 20 bp, Artificial Sequence
  Description of Artificial Sequence: Synthetic oligonucleotide
  Target: LAMA2; (+) strand; PAM type: YTN; PAM sequence: TTT
ttgtggatgatcttcatgaa

SEQ ID NO: 329263 - DNA, 20 bp, Artificial Sequence
  Description of Artificial Sequence: Synthetic oligonucleotide
  Target: LAMA2; (+) strand; PAM type: YTN; PAM sequence: TTT
tgtggatgatcttcatgaag

SEQ ID NO: 329264 - DNA, 20 bp, Artificial Sequence
  Description of Artificial Sequence: Synthetic oligonucleotide
  Target: LAMA2; (+) strand; PAM type: YTN; PAM sequence: TTT
gtggatgatcttcatgaagt

SEQ ID NO: 329265 - DNA, 20 bp, Artificial Sequence
  Description of Artificial Sequence: Synthetic oligonucleotide
  Target: LAMA2; (+) strand; PAM type: YTN; PAM sequence: TTG
tggatgatcttcatgaagtc

SEQ ID NO: 329266 - DNA, 20 bp, Artificial Sequence
  Description of Artificial Sequence: Synthetic oligonucleotide
  Target: LAMA2; (+) strand; PAM type: YTN; PAM sequence: CTT
catgaagtcagccaataatg

SEQ ID NO: 329267 - DNA, 20 bp, Artificial Sequence
  Description of Artificial Sequence: Synthetic oligonucleotide
  Target: LAMA2; (+) strand; PAM type: YTN; PAM sequence: TTC
atgaagtcagccaataatgg

SEQ ID NO: 329268 - DNA, 20 bp, Artificial Sequence
  Description of Artificial Sequence: Synthetic oligonucleotide
  Target: LAMA2; (+) strand; PAM type: YTN; PAM sequence: TTA
tttggactttttgaaaagaa

SEQ ID NO: 329269 - DNA, 20 bp, Artificial Sequence
  Description of Artificial Sequence: Synthetic oligonucleotide
  Target: LAMA2; (+) strand; PAM type: YTN; PAM sequence: TTT
ggactttttgaaaagaagtt

SEQ ID NO: 329270 - DNA, 20 bp, Artificial Sequence
  Description of Artificial Sequence: Synthetic oligonucleotide
  Target: LAMA2; (+) strand; PAM type: YTN; PAM sequence: TTG
gactttttgaaaagaagtta

SEQ ID NO: 329271 - DNA, 20 bp, Artificial Sequence
  Description of Artificial Sequence: Synthetic oligonucleotide
  Target: LAMA2; (+) strand; PAM type: YTN; PAM sequence: CTT
tttgaaaagaagttattggg

SEQ ID NO: 329272 - DNA, 20 bp, Artificial Sequence
  Description of Artificial Sequence: Synthetic oligonucleotide
  Target: LAMA2; (+) strand; PAM type: YTN; PAM sequence: TTT
ttgaaaagaagttattgggt

SEQ ID NO: 329273 - DNA, 20 bp, Artificial Sequence
  Description of Artificial Sequence: Synthetic oligonucleotide
  Target: LAMA2; (+) strand; PAM type: YTN; PAM sequence: TTT
tgaaaagaagttattgggtg

SEQ ID NO: 329274 - DNA, 20 bp, Artificial Sequence
  Description of Artificial Sequence: Synthetic oligonucleotide
  Target: LAMA2; (+) strand; PAM type: YTN; PAM sequence: TTT
gaaaagaagttattgggtga

SEQ ID NO: 329275 - DNA, 20 bp, Artificial Sequence
  Description of Artificial Sequence: Synthetic oligonucleotide
  Target: LAMA2; (+) strand; PAM type: YTN; PAM sequence: TTG
aaaagaagttattgggtgaa

SEQ ID NO: 329276 - DNA, 20 bp, Artificial Sequence
  Description of Artificial Sequence: Synthetic oligonucleotide
  Target: LAMA2; (+) strand; PAM type: YTN; PAM sequence: TTA
ttgggtgaacatgatggctc

SEQ ID NO: 329277 - DNA, 20 bp, Artificial Sequence
  Description of Artificial Sequence: Synthetic oligonucleotide
  Target: LAMA2; (+) strand; PAM type: YTN; PAM sequence: TTG
ggtgaacatgatggctcatg

SEQ ID NO: 329278 - DNA, 20 bp, Artificial Sequence
  Description of Artificial Sequence: Synthetic oligonucleotide
  Target: LAMA2; (+) strand; PAM type: YTN; PAM sequence: CTC
atgcctgtaatctcaacagt

SEQ ID NO: 329279 - DNA, 20 bp, Artificial Sequence
  Description of Artificial Sequence: Synthetic oligonucleotide
  Target: LAMA2; (+) strand; PAM type: YTN; PAM sequence: CTG
taatctcaacagtttgggag

SEQ ID NO: 329280 - DNA, 20 bp, Artificial Sequence
  Description of Artificial Sequence: Synthetic oligonucleotide
  Target: LAMA2; (+) strand; PAM type: YTN; PAM sequence: CTC
aacagtttgggaggttgagg

SEQ ID NO: 329281 - DNA, 20 bp, Artificial Sequence
  Description of Artificial Sequence: Synthetic oligonucleotide
  Target: LAMA2; (+) strand; PAM type: YTN; PAM sequence: TTT
gggaggttgaggtgggagga

SEQ ID NO: 329282 - DNA, 20 bp, Artificial Sequence
  Description of Artificial Sequence: Synthetic oligonucleotide
  Target: LAMA2; (+) strand; PAM type: YTN; PAM sequence: TTG
ggaggttgaggtgggaggat

SEQ ID NO: 329283 - DNA, 20 bp, Artificial Sequence
  Description of Artificial Sequence: Synthetic oligonucleotide
  Target: LAMA2; (+) strand; PAM type: YTN; PAM sequence: TTG
aggtgggaggatcacttgag

SEQ ID NO: 329284 - DNA, 20 bp, Artificial Sequence
  Description of Artificial Sequence: Synthetic oligonucleotide
  Target: LAMA2; (+) strand; PAM type: YTN; PAM sequence: CTT
gaggccaggagtttgagata

SEQ ID NO: 329285 - DNA, 20 bp, Artificial Sequence
  Description of Artificial Sequence: Synthetic oligonucleotide
  Target: LAMA2; (+) strand; PAM type: YTN; PAM sequence: TTG
aggccaggagtttgagataa

SEQ ID NO: 329286 - DNA, 20 bp, Artificial Sequence
  Description of Artificial Sequence: Synthetic oligonucleotide
  Target: LAMA2; (+) strand; PAM type: YTN; PAM sequence: TTT
gagataaacttgggcaacag

SEQ ID NO: 329287 - DNA, 20 bp, Artificial Sequence
  Description of Artificial Sequence: Synthetic oligonucleotide
  Target: LAMA2; (+) strand; PAM type: YTN; PAM sequence: TTG
agataaacttgggcaacaga

SEQ ID NO: 329288 - DNA, 20 bp, Artificial Sequence
  Description of Artificial Sequence: Synthetic oligonucleotide
  Target: LAMA2; (+) strand; PAM type: YTN; PAM sequence: CTT
gggcaacagagcaagatcca

SEQ ID NO: 329289 - DNA, 20 bp, Artificial Sequence
  Description of Artificial Sequence: Synthetic oligonucleotide
  Target: LAMA2; (+) strand; PAM type: YTN; PAM sequence: TTG
ggcaacagagcaagatccat

SEQ ID NO: 329290 - DNA, 20 bp, Artificial Sequence
  Description of Artificial Sequence: Synthetic oligonucleotide
  Target: LAMA2; (+) strand; PAM type: YTN; PAM sequence: CTT
tacaataattaaaaaaaaaa

SEQ ID NO: 329291 - DNA, 20 bp, Artificial Sequence
  Description of Artificial Sequence: Synthetic oligonucleotide
  Target: LAMA2; (+) strand; PAM type: YTN; PAM sequence: TTT
acaataattaaaaaaaaaat

SEQ ID NO: 329292 - DNA, 20 bp, Artificial Sequence
  Description of Artificial Sequence: Synthetic oligonucleotide
  Target: LAMA2; (+) strand; PAM type: YTN; PAM sequence: TTA
caataattaaaaaaaaaata

SEQ ID NO: 329293 - DNA, 20 bp, Artificial Sequence
  Description of Artificial Sequence: Synthetic oligonucleotide
  Target: LAMA2; (+) strand; PAM type: YTN; PAM sequence: TTA
aaaaaaaaatagaaattagc

SEQ ID NO: 329294 - DNA, 20 bp, Artificial Sequence
  Description of Artificial Sequence: Synthetic oligonucleotide
  Target: LAMA2; (+) strand; PAM type: YTN; PAM sequence: TTA
gctgtatgtgatggcttgca

SEQ ID NO: 329295 - DNA, 20 bp, Artificial Sequence
  Description of Artificial Sequence: Synthetic oligonucleotide
  Target: LAMA2; (+) strand; PAM type: YTN; PAM sequence: CTG
tatgtgatggcttgcacctg

SEQ ID NO: 329296 - DNA, 20 bp, Artificial Sequence
  Description of Artificial Sequence: Synthetic oligonucleotide
  Target: LAMA2; (+) strand; PAM type: YTN; PAM sequence: CTT
gcacctgtagttctagctac

SEQ ID NO: 329297 - DNA, 20 bp, Artificial Sequence
  Description of Artificial Sequence: Synthetic oligonucleotide
  Target: LAMA2; (+) strand; PAM type: YTN; PAM sequence: TTG
cacctgtagttctagctact

SEQ ID NO: 329298 - DNA, 20 bp, Artificial Sequence
  Description of Artificial Sequence: Synthetic oligonucleotide
  Target: LAMA2; (+) strand; PAM type: YTN; PAM sequence: CTG
tagttctagctactcaggat

SEQ ID NO: 329299 - DNA, 20 bp, Artificial Sequence
  Description of Artificial Sequence: Synthetic oligonucleotide
  Target: LAMA2; (+) strand; PAM type: YTN; PAM sequence: TTC
tagctactcaggatgctcag

SEQ ID NO: 329300 - DNA, 20 bp, Artificial Sequence
  Description of Artificial Sequence: Synthetic oligonucleotide
  Target: LAMA2; (+) strand; PAM type: YTN; PAM sequence: CTA
gctactcaggatgctcaggc

SEQ ID NO: 329301 - DNA, 20 bp, Artificial Sequence
  Description of Artificial Sequence: Synthetic oligonucleotide
  Target: LAMA2; (+) strand; PAM type: YTN; PAM sequence: CTA
ctcaggatgctcaggcaaga

SEQ ID NO: 329302 - DNA, 20 bp, Artificial Sequence
  Description of Artificial Sequence: Synthetic oligonucleotide
  Target: LAMA2; (+) strand; PAM type: YTN; PAM sequence: CTC
aggatgctcaggcaagagga

SEQ ID NO: 329303 - DNA, 20 bp, Artificial Sequence
  Description of Artificial Sequence: Synthetic oligonucleotide
  Target: LAMA2; (+) strand; PAM type: YTN; PAM sequence: CTC
aggcaagaggatcacttgag

SEQ ID NO: 329304 - DNA, 20 bp, Artificial Sequence
  Description of Artificial Sequence: Synthetic oligonucleotide
  Target: LAMA2; (+) strand; PAM type: YTN; PAM sequence: CTT
gagcctaggaggcagaggct

SEQ ID NO: 329305 - DNA, 20 bp, Artificial Sequence
  Description of Artificial Sequence: Synthetic oligonucleotide
  Target: LAMA2; (+) strand; PAM type: YTN; PAM sequence: TTG
agcctaggaggcagaggctt

SEQ ID NO: 329306 - DNA, 20 bp, Artificial Sequence
  Description of Artificial Sequence: Synthetic oligonucleotide
  Target: LAMA2; (+) strand; PAM type: YTN; PAM sequence: CTA
ggaggcagaggcttcagtgt

SEQ ID NO: 329307 - DNA, 20 bp, Artificial Sequence
  Description of Artificial Sequence: Synthetic oligonucleotide
  Target: LAMA2; (+) strand; PAM type: YTN; PAM sequence: CTT
cagtgtgccatgatcatgcc

SEQ ID NO: 329308 - DNA, 20 bp, Artificial Sequence
  Description of Artificial Sequence: Synthetic oligonucleotide
  Target: LAMA2; (+) strand; PAM type: YTN; PAM sequence: TTC
agtgtgccatgatcatgcca

SEQ ID NO: 329309 - DNA, 20 bp, Artificial Sequence
  Description of Artificial Sequence: Synthetic oligonucleotide
  Target: LAMA2; (+) strand; PAM type: YTN; PAM sequence: CTG
cactccagcctgggcaacaa

SEQ ID NO: 329310 - DNA, 20 bp, Artificial Sequence
  Description of Artificial Sequence: Synthetic oligonucleotide
  Target: LAMA2; (+) strand; PAM type: YTN; PAM sequence: CTC
cagcctgggcaacaagagtg

SEQ ID NO: 329311 - DNA, 20 bp, Artificial Sequence
  Description of Artificial Sequence: Synthetic oligonucleotide
  Target: LAMA2; (+) strand; PAM type: YTN; PAM sequence: CTG
ggcaacaagagtgagaccct

SEQ ID NO: 329312 - DNA, 20 bp, Artificial Sequence
  Description of Artificial Sequence: Synthetic oligonucleotide
  Target: LAMA2; (+) strand; PAM type: YTN; PAM sequence: CTG
tcttaaaaaaattaaacaaa

SEQ ID NO: 329313 - DNA, 20 bp, Artificial Sequence
  Description of Artificial Sequence: Synthetic oligonucleotide
  Target: LAMA2; (+) strand; PAM type: YTN; PAM sequence: CTT
aaaaaaattaaacaaattaa

SEQ ID NO: 329314 - DNA, 20 bp, Artificial Sequence
  Description of Artificial Sequence: Synthetic oligonucleotide
  Target: LAMA2; (+) strand; PAM type: YTN; PAM sequence: TTA
aaaaaattaaacaaattaaa

SEQ ID NO: 329315 - DNA, 20 bp, Artificial Sequence
  Description of Artificial Sequence: Synthetic oligonucleotide
  Target: LAMA2; (+) strand; PAM type: YTN; PAM sequence: TTA
aacaaattaaaaagaaatga

SEQ ID NO: 329316 - DNA, 20 bp, Artificial Sequence
  Description of Artificial Sequence: Synthetic oligonucleotide
  Target: LAMA2; (+) strand; PAM type: YTN; PAM sequence: TTA
aaaagaaatgaagttattga

SEQ ID NO: 329317 - DNA, 20 bp, Artificial Sequence
  Description of Artificial Sequence: Synthetic oligonucleotide
  Target: LAMA2; (+) strand; PAM type: YTN; PAM sequence: TTA
ttgagtgacagttaaagaaa

SEQ ID NO: 329318 - DNA, 20 bp, Artificial Sequence
  Description of Artificial Sequence: Synthetic oligonucleotide
  Target: LAMA2; (+) strand; PAM type: YTN; PAM sequence: TTG
agtgacagttaaagaaactg

SEQ ID NO: 329319 - DNA, 20 bp, Artificial Sequence
  Description of Artificial Sequence: Synthetic oligonucleotide
  Target: LAMA2; (+) strand; PAM type: YTN; PAM sequence: TTA
aagaaactgatttgcaagtg

SEQ ID NO: 329320 - DNA, 20 bp, Artificial Sequence
  Description of Artificial Sequence: Synthetic oligonucleotide
  Target: LAMA2; (+) strand; PAM type: YTN; PAM sequence: CTG
atttgcaagtggccttcagg

SEQ ID NO: 329321 - DNA, 20 bp, Artificial Sequence
  Description of Artificial Sequence: Synthetic oligonucleotide
  Target: LAMA2; (+) strand; PAM type: YTN; PAM sequence: TTT
gcaagtggccttcaggaggc

SEQ ID NO: 329322 - DNA, 20 bp, Artificial Sequence
  Description of Artificial Sequence: Synthetic oligonucleotide
  Target: LAMA2; (+) strand; PAM type: YTN; PAM sequence: TTG
caagtggccttcaggaggca

SEQ ID NO: 329323 - DNA, 20 bp, Artificial Sequence
  Description of Artificial Sequence: Synthetic oligonucleotide
  Target: LAMA2; (+) strand; PAM type: YTN; PAM sequence: CTT
caggaggcagaagaaggcta

SEQ ID NO: 329324 - DNA, 20 bp, Artificial Sequence
  Description of Artificial Sequence: Synthetic oligonucleotide
  Target: LAMA2; (+) strand; PAM type: YTN; PAM sequence: TTC
aggaggcagaagaaggctac

SEQ ID NO: 329325 - DNA, 20 bp, Artificial Sequence
  Description of Artificial Sequence: Synthetic oligonucleotide
  Target: LAMA2; (+) strand; PAM type: YTN; PAM sequence: CTA
cttgtctttccccagtgatt

SEQ ID NO: 329326 - DNA, 20 bp, Artificial Sequence
  Description of Artificial Sequence: Synthetic oligonucleotide
  Target: LAMA2; (+) strand; PAM type: YTN; PAM sequence: CTT
gtctttccccagtgatttta

SEQ ID NO: 329327 - DNA, 20 bp, Artificial Sequence
  Description of Artificial Sequence: Synthetic oligonucleotide
  Target: LAMA2; (+) strand; PAM type: YTN; PAM sequence: TTG
tctttccccagtgattttat

SEQ ID NO: 329328 - DNA, 20 bp, Artificial Sequence
  Description of Artificial Sequence: Synthetic oligonucleotide
  Target: LAMA2; (+) strand; PAM type: YTN; PAM sequence: CTT
tccccagtgattttatgaat

SEQ ID NO: 329329 - DNA, 20 bp, Artificial Sequence
  Description of Artificial Sequence: Synthetic oligonucleotide
  Target: LAMA2; (+) strand; PAM type: YTN; PAM sequence: TTT
ccccagtgattttatgaatc

SEQ ID NO: 329330 - DNA, 20 bp, Artificial Sequence
  Description of Artificial Sequence: Synthetic oligonucleotide
  Target: LAMA2; (+) strand; PAM type: YTN; PAM sequence: TTC
cccagtgattttatgaatcc

SEQ ID NO: 329331 - DNA, 20 bp, Artificial Sequence
  Description of Artificial Sequence: Synthetic oligonucleotide
  Target: LAMA2; (+) strand; PAM type: YTN; PAM sequence: TTT
tatgaatccattgaggagat

SEQ ID NO: 329332 - DNA, 20 bp, Artificial Sequence
  Description of Artificial Sequence: Synthetic oligonucleotide
  Target: LAMA2; (+) strand; PAM type: YTN; PAM sequence: TTT
atgaatccattgaggagatc

SEQ ID NO: 329333 - DNA, 20 bp, Artificial Sequence
  Description of Artificial Sequence: Synthetic oligonucleotide
  Target: LAMA2; (+) strand; PAM type: YTN; PAM sequence: TTA
tgaatccattgaggagatct

SEQ ID NO: 329334 - DNA, 20 bp, Artificial Sequence
  Description of Artificial Sequence: Synthetic oligonucleotide
  Target: LAMA2; (+) strand; PAM type: YTN; PAM sequence: TTG
aggagatctgcagaagtgtt

SEQ ID NO: 329335 - DNA, 20 bp, Artificial Sequence
  Description of Artificial Sequence: Synthetic oligonucleotide
  Target: LAMA2; (+) strand; PAM type: YTN; PAM sequence: CTG
cagaagtgttgtcactgctg

SEQ ID NO: 329336 - DNA, 20 bp, Artificial Sequence
  Description of Artificial Sequence: Synthetic oligonucleotide
  Target: LAMA2; (+) strand; PAM type: YTN; PAM sequence: TTG
tcactgctggagaaaaccaa

SEQ ID NO: 329337 - DNA, 20 bp, Artificial Sequence
  Description of Artificial Sequence: Synthetic oligonucleotide
  Target: LAMA2; (+) strand; PAM type: YTN; PAM sequence: CTG
ctggagaaaaccaaggcttc

SEQ ID NO: 329338 - DNA, 20 bp, Artificial Sequence
  Description of Artificial Sequence: Synthetic oligonucleotide
  Target: LAMA2; (+) strand; PAM type: YTN; PAM sequence: CTG
gagaaaaccaaggcttcact

SEQ ID NO: 329339 - DNA, 20 bp, Artificial Sequence
  Description of Artificial Sequence: Synthetic oligonucleotide
  Target: LAMA2; (+) strand; PAM type: YTN; PAM sequence: CTT
cacttgcaaaaaggagtact

SEQ ID NO: 329340 - DNA, 20 bp, Artificial Sequence
  Description of Artificial Sequence: Synthetic oligonucleotide
  Target: LAMA2; (+) strand; PAM type: YTN; PAM sequence: TTC
acttgcaaaaaggagtactt

SEQ ID NO: 329341 - DNA, 20 bp, Artificial Sequence
  Description of Artificial Sequence: Synthetic oligonucleotide
  Target: LAMA2; (+) strand; PAM type: YTN; PAM sequence: CTT
gcaaaaaggagtactttctt

SEQ ID NO: 329342 - DNA, 20 bp, Artificial Sequence
  Description of Artificial Sequence: Synthetic oligonucleotide
  Target: LAMA2; (+) strand; PAM type: YTN; PAM sequence: TTG
caaaaaggagtactttctta

SEQ ID NO: 329343 - DNA, 20 bp, Artificial Sequence
  Description of Artificial Sequence: Synthetic oligonucleotide
  Target: LAMA2; (+) strand; PAM type: YTN; PAM sequence: CTT
tcttaaaactgagaaatttg

SEQ ID NO: 329344 - DNA, 20 bp, Artificial Sequence
  Description of Artificial Sequence: Synthetic oligonucleotide
  Target: LAMA2; (+) strand; PAM type: YTN; PAM sequence: TTT
cttaaaactgagaaatttgg

SEQ ID NO: 329345 - DNA, 20 bp, Artificial Sequence
  Description of Artificial Sequence: Synthetic oligonucleotide
  Target: LAMA2; (+) strand; PAM type: YTN; PAM sequence: TTC
ttaaaactgagaaatttgga

SEQ ID NO: 329346 - DNA, 20 bp, Artificial Sequence
  Description of Artificial Sequence: Synthetic oligonucleotide
  Target: LAMA2; (+) strand; PAM type: YTN; PAM sequence: CTT
aaaactgagaaatttggaaa

SEQ ID NO: 329347 - DNA, 20 bp, Artificial Sequence
  Description of Artificial Sequence: Synthetic oligonucleotide
  Target: LAMA2; (+) strand; PAM type: YTN; PAM sequence: TTA
aaactgagaaatttggaaat

SEQ ID NO: 329348 - DNA, 20 bp, Artificial Sequence
  Description of Artificial Sequence: Synthetic oligonucleotide
  Target: LAMA2; (+) strand; PAM type: YTN; PAM sequence: CTG
agaaatttggaaatatatca

SEQ ID NO: 329349 - DNA, 20 bp, Artificial Sequence
  Description of Artificial Sequence: Synthetic oligonucleotide
  Target: LAMA2; (+) strand; PAM type: YTN; PAM sequence: TTT
ggaaatatatcataggactt

SEQ ID NO: 329350 - DNA, 20 bp, Artificial Sequence
  Description of Artificial Sequence: Synthetic oligonucleotide
  Target: LAMA2; (+) strand; PAM type: YTN; PAM sequence: TTG
gaaatatatcataggacttg

SEQ ID NO: 329351 - DNA, 20 bp, Artificial Sequence
  Description of Artificial Sequence: Synthetic oligonucleotide
  Target: LAMA2; (+) strand; PAM type: YTN; PAM sequence: CTT
gtaaagctatgatggaagtt

SEQ ID NO: 329352 - DNA, 20 bp, Artificial Sequence
  Description of Artificial Sequence: Synthetic oligonucleotide
  Target: LAMA2; (+) strand; PAM type: YTN; PAM sequence: TTG
taaagctatgatggaagtta

SEQ ID NO: 329353 - DNA, 20 bp, Artificial Sequence
  Description of Artificial Sequence: Synthetic oligonucleotide
  Target: LAMA2; (+) strand; PAM type: YTN; PAM sequence: CTA
tgatggaagttagcccatga

SEQ ID NO: 329354 - DNA, 20 bp, Artificial Sequence
  Description of Artificial Sequence: Synthetic oligonucleotide
  Target: LAMA2; (+) strand; PAM type: YTN; PAM sequence: TTA
gcccatgagtgtgtttacag

SEQ ID NO: 329355 - DNA, 20 bp, Artificial Sequence
  Description of Artificial Sequence: Synthetic oligonucleotide
  Target: LAMA2; (+) strand; PAM type: YTN; PAM sequence: TTT
acagaaggcagagctagatg

SEQ ID NO: 329356 - DNA, 20 bp, Artificial Sequence
  Description of Artificial Sequence: Synthetic oligonucleotide
  Target: LAMA2; (+) strand; PAM type: YTN; PAM sequence: TTA
cagaaggcagagctagatgg

SEQ ID NO: 329357 - DNA, 20 bp, Artificial Sequence
  Description of Artificial Sequence: Synthetic oligonucleotide
  Target: LAMA2; (+) strand; PAM type: YTN; PAM sequence: CTA
gatggcataagactcaggga

SEQ ID NO: 329358 - DNA, 20 bp, Artificial Sequence
  Description of Artificial Sequence: Synthetic oligonucleotide
  Target: LAMA2; (+) strand; PAM type: YTN; PAM sequence: CTC
agggatgatgcaggaggtga

SEQ ID NO: 329359 - DNA, 20 bp, Artificial Sequence
  Description of Artificial Sequence: Synthetic oligonucleotide
  Target: LAMA2; (+) strand; PAM type: YTN; PAM sequence: TTT
ttgtttagagtagtgagaag

SEQ ID NO: 329360 - DNA, 20 bp, Artificial Sequence
  Description of Artificial Sequence: Synthetic oligonucleotide
  Target: LAMA2; (+) strand; PAM type: YTN; PAM sequence: TTT
tgtttagagtagtgagaaga

SEQ ID NO: 329361 - DNA, 20 bp, Artificial Sequence
  Description of Artificial Sequence: Synthetic oligonucleotide
  Target: LAMA2; (+) strand; PAM type: YTN; PAM sequence: TTT
gtttagagtagtgagaagag

SEQ ID NO: 329362 - DNA, 20 bp, Artificial Sequence
  Description of Artificial Sequence: Synthetic oligonucleotide
  Target: LAMA2; (+) strand; PAM type: YTN; PAM sequence: TTG
tttagagtagtgagaagagt

SEQ ID NO: 329363 - DNA, 20 bp, Artificial Sequence
  Description of Artificial Sequence: Synthetic oligonucleotide
  Target: LAMA2; (+) strand; PAM type: YTN; PAM sequence: TTT
agagtagtgagaagagtgaa

SEQ ID NO: 329364 - DNA, 20 bp, Artificial Sequence
  Description of Artificial Sequence: Synthetic oligonucleotide
  Target: LAMA2; (+) strand; PAM type: YTN; PAM sequence: TTA
gagtagtgagaagagtgaaa

SEQ ID NO: 329365 - DNA, 20 bp, Artificial Sequence
  Description of Artificial Sequence: Synthetic oligonucleotide
  Target: LAMA2; (+) strand; PAM type: YTN; PAM sequence: CTT
taataataaaattttcactc

SEQ ID NO: 329366 - DNA, 20 bp, Artificial Sequence
  Description of Artificial Sequence: Synthetic oligonucleotide
  Target: LAMA2; (+) strand; PAM type: YTN; PAM sequence: TTT
aataataaaattttcactca

SEQ ID NO: 329367 - DNA, 20 bp, Artificial Sequence
  Description of Artificial Sequence: Synthetic oligonucleotide
  Target: LAMA2; (+) strand; PAM type: YTN; PAM sequence: TTA
ataataaaattttcactcat

SEQ ID NO: 329368 - DNA, 20 bp, Artificial Sequence
  Description of Artificial Sequence: Synthetic oligonucleotide
  Target: LAMA2; (+) strand; PAM type: YTN; PAM sequence: TTT
tcactcatttggaattatga

SEQ ID NO: 329369 - DNA, 20 bp, Artificial Sequence
  Description of Artificial Sequence: Synthetic oligonucleotide
  Target: LAMA2; (+) strand; PAM type: YTN; PAM sequence: TTT
cactcatttggaattatgaa

SEQ ID NO: 329370 - DNA, 20 bp, Artificial Sequence
  Description of Artificial Sequence: Synthetic oligonucleotide
  Target: LAMA2; (+) strand; PAM type: YTN; PAM sequence: TTC
actcatttggaattatgaaa

SEQ ID NO: 329371 - DNA, 20 bp, Artificial Sequence
  Description of Artificial Sequence: Synthetic oligonucleotide
  Target: LAMA2; (+) strand; PAM type: YTN; PAM sequence: CTC
atttggaattatgaaaattg

SEQ ID NO: 329372 - DNA, 20 bp, Artificial Sequence
  Description of Artificial Sequence: Synthetic oligonucleotide
  Target: LAMA2; (+) strand; PAM type: YTN; PAM sequence: TTT
ggaattatgaaaattgtgtt

SEQ ID NO: 329373 - DNA, 20 bp, Artificial Sequence
  Description of Artificial Sequence: Synthetic oligonucleotide
  Target: LAMA2; (+) strand; PAM type: YTN; PAM sequence: TTG
gaattatgaaaattgtgttt

SEQ ID NO: 329374 - DNA, 20 bp, Artificial Sequence
  Description of Artificial Sequence: Synthetic oligonucleotide
  Target: LAMA2; (+) strand; PAM type: YTN; PAM sequence: TTA
tgaaaattgtgtttgaaaac

SEQ ID NO: 329375 - DNA, 20 bp, Artificial Sequence
  Description of Artificial Sequence: Synthetic oligonucleotide
  Target: LAMA2; (+) strand; PAM type: YTN; PAM sequence: TTG
tgtttgaaaaccagctgtgc

SEQ ID NO: 329376 - DNA, 20 bp, Artificial Sequence
  Description of Artificial Sequence: Synthetic oligonucleotide
  Target: LAMA2; (+) strand; PAM type: YTN; PAM sequence: TTT
gaaaaccagctgtgccattt

SEQ ID NO: 329377 - DNA, 20 bp, Artificial Sequence
  Description of Artificial Sequence: Synthetic oligonucleotide
  Target: LAMA2; (+) strand; PAM type: YTN; PAM sequence: TTG
aaaaccagctgtgccattta

SEQ ID NO: 329378 - DNA, 20 bp, Artificial Sequence
  Description of Artificial Sequence: Synthetic oligonucleotide
  Target: LAMA2; (+) strand; PAM type: YTN; PAM sequence: CTG
tgccatttaaattctgggta

SEQ ID NO: 329379 - DNA, 20 bp, Artificial Sequence
  Description of Artificial Sequence: Synthetic oligonucleotide
  Target: LAMA2; (+) strand; PAM type: YTN; PAM sequence: TTT
aaattctgggtatatgtttc

SEQ ID NO: 329380 - DNA, 20 bp, Artificial Sequence
  Description of Artificial Sequence: Synthetic oligonucleotide
  Target: LAMA2; (+) strand; PAM type: YTN; PAM sequence: TTA
aattctgggtatatgtttct

SEQ ID NO: 329381 - DNA, 20 bp, Artificial Sequence
  Description of Artificial Sequence: Synthetic oligonucleotide
  Target: LAMA2; (+) strand; PAM type: YTN; PAM sequence: TTC
tgggtatatgtttcttcatt

SEQ ID NO: 329382 - DNA, 20 bp, Artificial Sequence
  Description of Artificial Sequence: Synthetic oligonucleotide
  Target: LAMA2; (+) strand; PAM type: YTN; PAM sequence: CTG
ggtatatgtttcttcatttg

SEQ ID NO: 329383 - DNA, 20 bp, Artificial Sequence
  Description of Artificial Sequence: Synthetic oligonucleotide
  Target: LAMA2; (+) strand; PAM type: YTN; PAM sequence: TTT
cttcatttgtaaaattcaag

SEQ ID NO: 329384 - DNA, 20 bp, Artificial Sequence
  Description of Artificial Sequence: Synthetic oligonucleotide
  Target: LAMA2; (+) strand; PAM type: YTN; PAM sequence: TTC
ttcatttgtaaaattcaagt

SEQ ID NO: 329385 - DNA, 20 bp, Artificial Sequence
  Description of Artificial Sequence: Synthetic oligonucleotide
  Target: LAMA2; (+) strand; PAM type: YTN; PAM sequence: CTT
catttgtaaaattcaagttt

SEQ ID NO: 329386 - DNA, 20 bp, Artificial Sequence
  Description of Artificial Sequence: Synthetic oligonucleotide
  Target: LAMA2; (+) strand; PAM type: YTN; PAM sequence: TTC
atttgtaaaattcaagtttg

SEQ ID NO: 329387 - DNA, 20 bp, Artificial Sequence
  Description of Artificial Sequence: Synthetic oligonucleotide
  Target: LAMA2; (+) strand; PAM type: YTN; PAM sequence: TTT
gtaaaattcaagtttgaact

SEQ ID NO: 329388 - DNA, 20 bp, Artificial Sequence
  Description of Artificial Sequence: Synthetic oligonucleotide
  Target: LAMA2; (+) strand; PAM type: YTN; PAM sequence: TTG
taaaattcaagtttgaacta

SEQ ID NO: 329389 - DNA, 20 bp, Artificial Sequence
  Description of Artificial Sequence: Synthetic oligonucleotide
  Target: LAMA2; (+) strand; PAM type: YTN; PAM sequence: TTC
aagtttgaactaggcttctt

SEQ ID NO: 329390 - DNA, 20 bp, Artificial Sequence
  Description of Artificial Sequence: Synthetic oligonucleotide
  Target: LAMA2; (+) strand; PAM type: YTN; PAM sequence: TTT
gaactaggcttctttgaact

SEQ ID NO: 329391 - DNA, 20 bp, Artificial Sequence
  Description of Artificial Sequence: Synthetic oligonucleotide
  Target: LAMA2; (+) strand; PAM type: YTN; PAM sequence: TTG
aactaggcttctttgaacta

SEQ ID NO: 329392 - DNA, 20 bp, Artificial Sequence
  Description of Artificial Sequence: Synthetic oligonucleotide
  Target: LAMA2; (+) strand; PAM type: YTN; PAM sequence: CTA
ggcttctttgaactaaattc

SEQ ID NO: 329393 - DNA, 20 bp, Artificial Sequence
  Description of Artificial Sequence: Synthetic oligonucleotide
  Target: LAMA2; (+) strand; PAM type: YTN; PAM sequence: CTT
ctttgaactaaattcttctt

SEQ ID NO: 329394 - DNA, 20 bp, Artificial Sequence
  Description of Artificial Sequence: Synthetic oligonucleotide
  Target: LAMA2; (+) strand; PAM type: YTN; PAM sequence: TTC
tttgaactaaattcttcttg

SEQ ID NO: 329395 - DNA, 20 bp, Artificial Sequence
  Description of Artificial Sequence: Synthetic oligonucleotide
  Target: LAMA2; (+) strand; PAM type: YTN; PAM sequence: CTT
tgaactaaattcttcttgcc

SEQ ID NO: 329396 - DNA, 20 bp, Artificial Sequence
  Description of Artificial Sequence: Synthetic oligonucleotide
  Target: LAMA2; (+) strand; PAM type: YTN; PAM sequence: TTT
gaactaaattcttcttgcca

SEQ ID NO: 329397 - DNA, 20 bp, Artificial Sequence
  Description of Artificial Sequence: Synthetic oligonucleotide
  Target: LAMA2; (+) strand; PAM type: YTN; PAM sequence: TTG
aactaaattcttcttgccac

SEQ ID NO: 329398 - DNA, 20 bp, Artificial Sequence
  Description of Artificial Sequence: Synthetic oligonucleotide
  Target: LAMA2; (+) strand; PAM type: YTN; PAM sequence: CTA
aattcttcttgccaccagac

SEQ ID NO: 329399 - DNA, 20 bp, Artificial Sequence
  Description of Artificial Sequence: Synthetic oligonucleotide
  Target: LAMA2; (+) strand; PAM type: YTN; PAM sequence: TTC
ttcttgccaccagacaacaa

SEQ ID NO: 329400 - DNA, 20 bp, Artificial Sequence
  Description of Artificial Sequence: Synthetic oligonucleotide
  Target: LAMA2; (+) strand; PAM type: YTN; PAM sequence: CTT
cttgccaccagacaacaacc

SEQ ID NO: 329401 - DNA, 20 bp, Artificial Sequence
  Description of Artificial Sequence: Synthetic oligonucleotide
  Target: LAMA2; (+) strand; PAM type: YTN; PAM sequence: TTC
ttgccaccagacaacaacct

SEQ ID NO: 329402 - DNA, 20 bp, Artificial Sequence
  Description of Artificial Sequence: Synthetic oligonucleotide
  Target: LAMA2; (+) strand; PAM type: YTN; PAM sequence: CTT
gccaccagacaacaaccttc

SEQ ID NO: 329403 - DNA, 20 bp, Artificial Sequence
  Description of Artificial Sequence: Synthetic oligonucleotide
  Target: LAMA2; (+) strand; PAM type: YTN; PAM sequence: TTG
ccaccagacaacaaccttct

SEQ ID NO: 329404 - DNA, 20 bp, Artificial Sequence
  Description of Artificial Sequence: Synthetic oligonucleotide
  Target: LAMA2; (+) strand; PAM type: YTN; PAM sequence: CTT
cttcttcatcacctagagga

SEQ ID NO: 329405 - DNA, 20 bp, Artificial Sequence
  Description of Artificial Sequence: Synthetic oligonucleotide
  Target: LAMA2; (+) strand; PAM type: YTN; PAM sequence: TTC
ttcttcatcacctagaggaa

SEQ ID NO: 329406 - DNA, 20 bp, Artificial Sequence
  Description of Artificial Sequence: Synthetic oligonucleotide
  Target: LAMA2; (+) strand; PAM type: YTN; PAM sequence: CTT
cttcatcacctagaggaaca

SEQ ID NO: 329407 - DNA, 20 bp, Artificial Sequence
  Description of Artificial Sequence: Synthetic oligonucleotide
  Target: LAMA2; (+) strand; PAM type: YTN; PAM sequence: TTC
ttcatcacctagaggaacat

SEQ ID NO: 329408 - DNA, 20 bp, Artificial Sequence
  Description of Artificial Sequence: Synthetic oligonucleotide
  Target: LAMA2; (+) strand; PAM type: YTN; PAM sequence: CTT
catcacctagaggaacattg

SEQ ID NO: 329409 - DNA, 20 bp, Artificial Sequence
  Description of Artificial Sequence: Synthetic oligonucleotide
  Target: LAMA2; (+) strand; PAM type: YTN; PAM sequence: TTC
atcacctagaggaacattgc

SEQ ID NO: 329410 - DNA, 20 bp, Artificial Sequence
  Description of Artificial Sequence: Synthetic oligonucleotide
  Target: LAMA2; (+) strand; PAM type: YTN; PAM sequence: CTA
gaggaacattgcctgaagcc

SEQ ID NO: 329411 - DNA, 20 bp, Artificial Sequence
  Description of Artificial Sequence: Synthetic oligonucleotide
  Target: LAMA2; (+) strand; PAM type: YTN; PAM sequence: TTG
cctgaagcctaaggaagcag

SEQ ID NO: 329412 - DNA, 20 bp, Artificial Sequence
  Description of Artificial Sequence: Synthetic oligonucleotide
  Target: LAMA2; (+) strand; PAM type: YTN; PAM sequence: CTG
aagcctaaggaagcagcctt

SEQ ID NO: 329413 - DNA, 20 bp, Artificial Sequence
  Description of Artificial Sequence: Synthetic oligonucleotide
  Target: LAMA2; (+) strand; PAM type: YTN; PAM sequence: CTA
aggaagcagccttccctgtg

SEQ ID NO: 329414 - DNA, 20 bp, Artificial Sequence
  Description of Artificial Sequence: Synthetic oligonucleotide
  Target: LAMA2; (+) strand; PAM type: YTN; PAM sequence: CTT
ccctgtgccacacagaagac

SEQ ID NO: 329415 - DNA, 20 bp, Artificial Sequence
  Description of Artificial Sequence: Synthetic oligonucleotide
  Target: LAMA2; (+) strand; PAM type: YTN; PAM sequence: TTC
cctgtgccacacagaagacc

SEQ ID NO: 329416 - DNA, 20 bp, Artificial Sequence
  Description of Artificial Sequence: Synthetic oligonucleotide
  Target: LAMA2; (+) strand; PAM type: YTN; PAM sequence: CTG
tgccacacagaagacccctt

SEQ ID NO: 329417 - DNA, 20 bp, Artificial Sequence
  Description of Artificial Sequence: Synthetic oligonucleotide
  Target: LAMA2; (+) strand; PAM type: YTN; PAM sequence: CTT
aattgttcaatgaatttctc

SEQ ID NO: 329418 - DNA, 20 bp, Artificial Sequence
  Description of Artificial Sequence: Synthetic oligonucleotide
  Target: LAMA2; (+) strand; PAM type: YTN; PAM sequence: TTA
attgttcaatgaatttctca

SEQ ID NO: 329419 - DNA, 20 bp, Artificial Sequence
  Description of Artificial Sequence: Synthetic oligonucleotide
  Target: LAMA2; (+) strand; PAM type: YTN; PAM sequence: TTG
ttcaatgaatttctcattga

SEQ ID NO: 329420 - DNA, 20 bp, Artificial Sequence
  Description of Artificial Sequence: Synthetic oligonucleotide
  Target: LAMA2; (+) strand; PAM type: YTN; PAM sequence: TTC
aatgaatttctcattgactt

SEQ ID NO: 329421 - DNA, 20 bp, Artificial Sequence
  Description of Artificial Sequence: Synthetic oligonucleotide
  Target: LAMA2; (+) strand; PAM type: YTN; PAM sequence: TTT
ctcattgacttgtgtagtgc

SEQ ID NO: 329422 - DNA, 20 bp, Artificial Sequence
  Description of Artificial Sequence: Synthetic oligonucleotide
  Target: LAMA2; (+) strand; PAM type: YTN; PAM sequence: TTC
tcattgacttgtgtagtgct

SEQ ID NO: 329423 - DNA, 20 bp, Artificial Sequence
  Description of Artificial Sequence: Synthetic oligonucleotide
  Target: LAMA2; (+) strand; PAM type: YTN; PAM sequence: CTC
attgacttgtgtagtgcttc

SEQ ID NO: 329424 - DNA, 20 bp, Artificial Sequence
  Description of Artificial Sequence: Synthetic oligonucleotide
  Target: LAMA2; (+) strand; PAM type: YTN; PAM sequence: TTG
acttgtgtagtgcttcaaaa

SEQ ID NO: 329425 - DNA, 20 bp, Artificial Sequence
  Description of Artificial Sequence: Synthetic oligonucleotide
  Target: LAMA2; (+) strand; PAM type: YTN; PAM sequence: CTT
gtgtagtgcttcaaaagaaa

SEQ ID NO: 329426 - DNA, 20 bp, Artificial Sequence
  Description of Artificial Sequence: Synthetic oligonucleotide
  Target: LAMA2; (+) strand; PAM type: YTN; PAM sequence: TTG
tgtagtgcttcaaaagaaaa

SEQ ID NO: 329427 - DNA, 20 bp, Artificial Sequence
  Description of Artificial Sequence: Synthetic oligonucleotide
  Target: LAMA2; (+) strand; PAM type: YTN; PAM sequence: CTT
caaaagaaaacacttacaca

SEQ ID NO: 329428 - DNA, 20 bp, Artificial Sequence
  Description of Artificial Sequence: Synthetic oligonucleotide
  Target: LAMA2; (+) strand; PAM type: YTN; PAM sequence: TTC
aaaagaaaacacttacacat

SEQ ID NO: 329429 - DNA, 20 bp, Artificial Sequence
  Description of Artificial Sequence: Synthetic oligonucleotide
  Target: LAMA2; (+) strand; PAM type: YTN; PAM sequence: CTT
acacatcaaacatgattcta

SEQ ID NO: 329430 - DNA, 20 bp, Artificial Sequence
  Description of Artificial Sequence: Synthetic oligonucleotide
  Target: LAMA2; (+) strand; PAM type: YTN; PAM sequence: TTA
cacatcaaacatgattctaa

SEQ ID NO: 329431 - DNA, 20 bp, Artificial Sequence
  Description of Artificial Sequence: Synthetic oligonucleotide
  Target: LAMA2; (+) strand; PAM type: YTN; PAM sequence: TTC
taagtcaaagttcttcattt

SEQ ID NO: 329432 - DNA, 20 bp, Artificial Sequence
  Description of Artificial Sequence: Synthetic oligonucleotide
  Target: LAMA2; (+) strand; PAM type: YTN; PAM sequence: CTA
agtcaaagttcttcatttat

SEQ ID NO: 329433 - DNA, 20 bp, Artificial Sequence
  Description of Artificial Sequence: Synthetic oligonucleotide
  Target: LAMA2; (+) strand; PAM type: YTN; PAM sequence: TTC
ttcatttatatgagattaaa

SEQ ID NO: 329434 - DNA, 20 bp, Artificial Sequence
  Description of Artificial Sequence: Synthetic oligonucleotide
  Target: LAMA2; (+) strand; PAM type: YTN; PAM sequence: CTT
catttatatgagattaaaga

SEQ ID NO: 329435 - DNA, 20 bp, Artificial Sequence
  Description of Artificial Sequence: Synthetic oligonucleotide
  Target: LAMA2; (+) strand; PAM type: YTN; PAM sequence: TTC
atttatatgagattaaagaa

SEQ ID NO: 329436 - DNA, 20 bp, Artificial Sequence
  Description of Artificial Sequence: Synthetic oligonucleotide
  Target: LAMA2; (+) strand; PAM type: YTN; PAM sequence: TTT
atatgagattaaagaactgg

SEQ ID NO: 329437 - DNA, 20 bp, Artificial Sequence
  Description of Artificial Sequence: Synthetic oligonucleotide
  Target: LAMA2; (+) strand; PAM type: YTN; PAM sequence: TTA
tatgagattaaagaactgga

SEQ ID NO: 329438 - DNA, 20 bp, Artificial Sequence
  Description of Artificial Sequence: Synthetic oligonucleotide
  Target: LAMA2; (+) strand; PAM type: YTN; PAM sequence: TTA
aagaactggaaaactgtaca

SEQ ID NO: 329439 - DNA, 20 bp, Artificial Sequence
  Description of Artificial Sequence: Synthetic oligonucleotide
  Target: LAMA2; (+) strand; PAM type: YTN; PAM sequence: CTG
gaaaactgtacaagagaaat

SEQ ID NO: 329440 - DNA, 20 bp, Artificial Sequence
  Description of Artificial Sequence: Synthetic oligonucleotide
  Target: LAMA2; (+) strand; PAM type: YTN; PAM sequence: CTG
tacaagagaaatagtcacct

SEQ ID NO: 329441 - DNA, 20 bp, Artificial Sequence
  Description of Artificial Sequence: Synthetic oligonucleotide
  Target: LAMA2; (+) strand; PAM type: YTN; PAM sequence: CTG
ctgattgcaggcctgtgggt

SEQ ID NO: 329442 - DNA, 20 bp, Artificial Sequence
  Description of Artificial Sequence: Synthetic oligonucleotide
  Target: LAMA2; (+) strand; PAM type: YTN; PAM sequence: CTG
attgcaggcctgtgggtttc

SEQ ID NO: 329443 - DNA, 20 bp, Artificial Sequence
  Description of Artificial Sequence: Synthetic oligonucleotide
  Target: LAMA2; (+) strand; PAM type: YTN; PAM sequence: TTG
caggcctgtgggtttcttgg

SEQ ID NO: 329444 - DNA, 20 bp, Artificial Sequence
  Description of Artificial Sequence: Synthetic oligonucleotide
  Target: LAMA2; (+) strand; PAM type: YTN; PAM sequence: CTG
tgggtttcttggaaaaactc

SEQ ID NO: 329445 - DNA, 20 bp, Artificial Sequence
  Description of Artificial Sequence: Synthetic oligonucleotide
  Target: LAMA2; (+) strand; PAM type: YTN; PAM sequence: TTT
cttggaaaaactcagcaatt

SEQ ID NO: 329446 - DNA, 20 bp, Artificial Sequence
  Description of Artificial Sequence: Synthetic oligonucleotide
  Target: LAMA2; (+) strand; PAM type: YTN; PAM sequence: TTC
ttggaaaaactcagcaattt

SEQ ID NO: 329447 - DNA, 20 bp, Artificial Sequence
  Description of Artificial Sequence: Synthetic oligonucleotide
  Target: LAMA2; (+) strand; PAM type: YTN; PAM sequence: CTT
ggaaaaactcagcaattttg

SEQ ID NO: 329448 - DNA, 20 bp, Artificial Sequence
  Description of Artificial Sequence: Synthetic oligonucleotide
  Target: LAMA2; (+) strand; PAM type: YTN; PAM sequence: TTG
gaaaaactcagcaattttgc

SEQ ID NO: 329449 - DNA, 20 bp, Artificial Sequence
  Description of Artificial Sequence: Synthetic oligonucleotide
  Target: LAMA2; (+) strand; PAM type: YTN; PAM sequence: CTC
agcaattttgcttatccagg

SEQ ID NO: 329450 - DNA, 20 bp, Artificial Sequence
  Description of Artificial Sequence: Synthetic oligonucleotide
  Target: LAMA2; (+) strand; PAM type: YTN; PAM sequence: TTT
tgcttatccaggactatctt

SEQ ID NO: 329451 - DNA, 20 bp, Artificial Sequence
  Description of Artificial Sequence: Synthetic oligonucleotide
  Target: LAMA2; (+) strand; PAM type: YTN; PAM sequence: TTT
gcttatccaggactatcttt

SEQ ID NO: 329452 - DNA, 20 bp, Artificial Sequence
  Description of Artificial Sequence: Synthetic oligonucleotide
  Target: LAMA2; (+) strand; PAM type: YTN; PAM sequence: TTG
cttatccaggactatctttt

SEQ ID NO: 329453 - DNA, 20 bp, Artificial Sequence
  Description of Artificial Sequence: Synthetic oligonucleotide
  Target: LAMA2; (+) strand; PAM type: YTN; PAM sequence: CTT
atccaggactatctttttgc

SEQ ID NO: 329454 - DNA, 20 bp, Artificial Sequence
  Description of Artificial Sequence: Synthetic oligonucleotide
  Target: LAMA2; (+) strand; PAM type: YTN; PAM sequence: TTA
tccaggactatctttttgcc

SEQ ID NO: 329455 - DNA, 20 bp, Artificial Sequence
  Description of Artificial Sequence: Synthetic oligonucleotide
  Target: LAMA2; (+) strand; PAM type: YTN; PAM sequence: CTA
tctttttgcccagttcctct

SEQ ID NO: 329456 - DNA, 20 bp, Artificial Sequence
  Description of Artificial Sequence: Synthetic oligonucleotide
  Target: LAMA2; (+) strand; PAM type: YTN; PAM sequence: CTT
tttgcccagttcctctgatt

SEQ ID NO: 329457 - DNA, 20 bp, Artificial Sequence
  Description of Artificial Sequence: Synthetic oligonucleotide
  Target: LAMA2; (+) strand; PAM type: YTN; PAM sequence: TTT
ttgcccagttcctctgattc

SEQ ID NO: 329458 - DNA, 20 bp, Artificial Sequence
  Description of Artificial Sequence: Synthetic oligonucleotide
  Target: LAMA2; (+) strand; PAM type: YTN; PAM sequence: TTT
tgcccagttcctctgattct

SEQ ID NO: 329459 - DNA, 20 bp, Artificial Sequence
  Description of Artificial Sequence: Synthetic oligonucleotide
  Target: LAMA2; (+) strand; PAM type: YTN; PAM sequence: TTT
gcccagttcctctgattctg

SEQ ID NO: 329460 - DNA, 20 bp, Artificial Sequence
  Description of Artificial Sequence: Synthetic oligonucleotide
  Target: LAMA2; (+) strand; PAM type: YTN; PAM sequence: TTG
cccagttcctctgattctga

SEQ ID NO: 329461 - DNA, 20 bp, Artificial Sequence
  Description of Artificial Sequence: Synthetic oligonucleotide
  Target: LAMA2; (+) strand; PAM type: YTN; PAM sequence: TTC
ctctgattctgaaggaagtt

SEQ ID NO: 329462 - DNA, 20 bp, Artificial Sequence
  Description of Artificial Sequence: Synthetic oligonucleotide
  Target: LAMA2; (+) strand; PAM type: YTN; PAM sequence: CTC
tgattctgaaggaagttgaa

SEQ ID NO: 329463 - DNA, 20 bp, Artificial Sequence
  Description of Artificial Sequence: Synthetic oligonucleotide
  Target: LAMA2; (+) strand; PAM type: YTN; PAM sequence: CTG
attctgaaggaagttgaaaa

SEQ ID NO: 329464 - DNA, 20 bp, Artificial Sequence
  Description of Artificial Sequence: Synthetic oligonucleotide
  Target: LAMA2; (+) strand; PAM type: YTN; PAM sequence: TTC
tgaaggaagttgaaaagata

SEQ ID NO: 329465 - DNA, 20 bp, Artificial Sequence
  Description of Artificial Sequence: Synthetic oligonucleotide
  Target: LAMA2; (+) strand; PAM type: YTN; PAM sequence: CTG
aaggaagttgaaaagatagt

SEQ ID NO: 329466 - DNA, 20 bp, Artificial Sequence
  Description of Artificial Sequence: Synthetic oligonucleotide
  Target: LAMA2; (+) strand; PAM type: YTN; PAM sequence: TTG
aaaagatagttttcctttgc

SEQ ID NO: 329467 - DNA, 20 bp, Artificial Sequence
  Description of Artificial Sequence: Synthetic oligonucleotide
  Target: LAMA2; (+) strand; PAM type: YTN; PAM sequence: TTT
tcctttgctgtatccaacat

SEQ ID NO: 329468 - DNA, 20 bp, Artificial Sequence
  Description of Artificial Sequence: Synthetic oligonucleotide
  Target: LAMA2; (+) strand; PAM type: YTN; PAM sequence: TTT
cctttgctgtatccaacatc

SEQ ID NO: 329469 - DNA, 20 bp, Artificial Sequence
  Description of Artificial Sequence: Synthetic oligonucleotide
  Target: LAMA2; (+) strand; PAM type: YTN; PAM sequence: TTC
ctttgctgtatccaacatcc

SEQ ID NO: 329470 - DNA, 20 bp, Artificial Sequence
  Description of Artificial Sequence: Synthetic oligonucleotide
  Target: LAMA2; (+) strand; PAM type: YTN; PAM sequence: CTT
tgctgtatccaacatccttt

SEQ ID NO: 329471 - DNA, 20 bp, Artificial Sequence
  Description of Artificial Sequence: Synthetic oligonucleotide
  Target: LAMA2; (+) strand; PAM type: YTN; PAM sequence: TTT
gctgtatccaacatcctttt

SEQ ID NO: 329472 - DNA, 20 bp, Artificial Sequence
  Description of Artificial Sequence: Synthetic oligonucleotide
  Target: LAMA2; (+) strand; PAM type: YTN; PAM sequence: TTG
ctgtatccaacatccttttc

SEQ ID NO: 329473 - DNA, 20 bp, Artificial Sequence
  Description of Artificial Sequence: Synthetic oligonucleotide
  Target: LAMA2; (+) strand; PAM type: YTN; PAM sequence: CTG
tatccaacatccttttctac

SEQ ID NO: 329474 - DNA, 20 bp, Artificial Sequence
  Description of Artificial Sequence: Synthetic oligonucleotide
  Target: LAMA2; (+) strand; PAM type: YTN; PAM sequence: CTT
ttctacatttgatttaagaa

SEQ ID NO: 329475 - DNA, 20 bp, Artificial Sequence
  Description of Artificial Sequence: Synthetic oligonucleotide
  Target: LAMA2; (+) strand; PAM type: YTN; PAM sequence: TTT
tctacatttgatttaagaaa

SEQ ID NO: 329476 - DNA, 20 bp, Artificial Sequence
  Description of Artificial Sequence: Synthetic oligonucleotide
  Target: LAMA2; (+) strand; PAM type: YTN; PAM sequence: TTT
ctacatttgatttaagaaat

SEQ ID NO: 329477 - DNA, 20 bp, Artificial Sequence
  Description of Artificial Sequence: Synthetic oligonucleotide
  Target: LAMA2; (+) strand; PAM type: YTN; PAM sequence: TTC
tacatttgatttaagaaatg

SEQ ID NO: 329478 - DNA, 20 bp, Artificial Sequence
  Description of Artificial Sequence: Synthetic oligonucleotide
  Target: LAMA2; (+) strand; PAM type: YTN; PAM sequence: CTA
catttgatttaagaaatgtc

SEQ ID NO: 329479 - DNA, 20 bp, Artificial Sequence
  Description of Artificial Sequence: Synthetic oligonucleotide
  Target: LAMA2; (+) strand; PAM type: YTN; PAM sequence: TTT
gatttaagaaatgtcaattt

SEQ ID NO: 329480 - DNA, 20 bp, Artificial Sequence
  Description of Artificial Sequence: Synthetic oligonucleotide
  Target: LAMA2; (+) strand; PAM type: YTN; PAM sequence: TTG
atttaagaaatgtcaattta

SEQ ID NO: 329481 - DNA, 20 bp, Artificial Sequence
  Description of Artificial Sequence: Synthetic oligonucleotide
  Target: LAMA2; (+) strand; PAM type: YTN; PAM sequence: TTT
aagaaatgtcaatttaactt

SEQ ID NO: 329482 - DNA, 20 bp, Artificial Sequence
  Description of Artificial Sequence: Synthetic oligonucleotide
  Target: LAMA2; (+) strand; PAM type: YTN; PAM sequence: TTA
agaaatgtcaatttaacttt

SEQ ID NO: 329483 - DNA, 20 bp, Artificial Sequence
  Description of Artificial Sequence: Synthetic oligonucleotide
  Target: LAMA2; (+) strand; PAM type: YTN; PAM sequence: TTT
aactttttattgatactgat

SEQ ID NO: 329484 - DNA, 20 bp, Artificial Sequence
  Description of Artificial Sequence: Synthetic oligonucleotide
  Target: LAMA2; (+) strand; PAM type: YTN; PAM sequence: TTA
actttttattgatactgata

SEQ ID NO: 329485 - DNA, 20 bp, Artificial Sequence
  Description of Artificial Sequence: Synthetic oligonucleotide
  Target: LAMA2; (+) strand; PAM type: YTN; PAM sequence: CTT
tttattgatactgatattga

SEQ ID NO: 329486 - DNA, 20 bp, Artificial Sequence
  Description of Artificial Sequence: Synthetic oligonucleotide
  Target: LAMA2; (+) strand; PAM type: YTN; PAM sequence: TTT
ttattgatactgatattgaa

SEQ ID NO: 329487 - DNA, 20 bp, Artificial Sequence
  Description of Artificial Sequence: Synthetic oligonucleotide
  Target: LAMA2; (+) strand; PAM type: YTN; PAM sequence: TTT
tattgatactgatattgaaa

SEQ ID NO: 329488 - DNA, 20 bp, Artificial Sequence
  Description of Artificial Sequence: Synthetic oligonucleotide
  Target: LAMA2; (+) strand; PAM type: YTN; PAM sequence: TTT
attgatactgatattgaaaa

SEQ ID NO: 329489 - DNA, 20 bp, Artificial Sequence
  Description of Artificial Sequence: Synthetic oligonucleotide
  Target: LAMA2; (+) strand; PAM type: YTN; PAM sequence: TTA
ttgatactgatattgaaaat

SEQ ID NO: 329490 - DNA, 20 bp, Artificial Sequence
  Description of Artificial Sequence: Synthetic oligonucleotide
  Target: LAMA2; (+) strand; PAM type: YTN; PAM sequence: TTG
atactgatattgaaaataca

SEQ ID NO: 329491 - DNA, 20 bp, Artificial Sequence
  Description of Artificial Sequence: Synthetic oligonucleotide
  Target: LAMA2; (+) strand; PAM type: YTN; PAM sequence: CTG
atattgaaaatacataaaat

SEQ ID NO: 329492 - DNA, 20 bp, Artificial Sequence
  Description of Artificial Sequence: Synthetic oligonucleotide
  Target: LAMA2; (+) strand; PAM type: YTN; PAM sequence: TTG
aaaatacataaaatccaaag

SEQ ID NO: 329493 - DNA, 20 bp, Artificial Sequence
  Description of Artificial Sequence: Synthetic oligonucleotide
  Target: LAMA2; (+) strand; PAM type: YTN; PAM sequence: CTT
acatatgtgtcatatttcta

SEQ ID NO: 329494 - DNA, 20 bp, Artificial Sequence
  Description of Artificial Sequence: Synthetic oligonucleotide
  Target: LAMA2; (+) strand; PAM type: YTN; PAM sequence: TTA
catatgtgtcatatttctat

SEQ ID NO: 329495 - DNA, 20 bp, Artificial Sequence
  Description of Artificial Sequence: Synthetic oligonucleotide
  Target: LAMA2; (+) strand; PAM type: YTN; PAM sequence: TTT
ctatagatttttttgaccaa

SEQ ID NO: 329496 - DNA, 20 bp, Artificial Sequence
  Description of Artificial Sequence: Synthetic oligonucleotide
  Target: LAMA2; (+) strand; PAM type: YTN; PAM sequence: TTC
tatagatttttttgaccaac

SEQ ID NO: 329497 - DNA, 20 bp, Artificial Sequence
  Description of Artificial Sequence: Synthetic oligonucleotide
  Target: LAMA2; (+) strand; PAM type: YTN; PAM sequence: CTA
tagatttttttgaccaacat

SEQ ID NO: 329498 - DNA, 20 bp, Artificial Sequence
  Description of Artificial Sequence: Synthetic oligonucleotide
  Target: LAMA2; (+) strand; PAM type: YTN; PAM sequence: TTT
ttttgaccaacattttattt

SEQ ID NO: 329499 - DNA, 20 bp, Artificial Sequence
  Description of Artificial Sequence: Synthetic oligonucleotide
  Target: LAMA2; (+) strand; PAM type: YTN; PAM sequence: TTT
tttgaccaacattttatttt

SEQ ID NO: 329500 - DNA, 20 bp, Artificial Sequence
  Description of Artificial Sequence: Synthetic oligonucleotide
  Target: LAMA2; (+) strand; PAM type: YTN; PAM sequence: TTT
ttgaccaacattttattttg

SEQ ID NO: 329501 - DNA, 20 bp, Artificial Sequence
  Description of Artificial Sequence: Synthetic oligonucleotide
  Target: LAMA2; (+) strand; PAM type: YTN; PAM sequence: TTT
tgaccaacattttattttga

SEQ ID NO: 329502 - DNA, 20 bp, Artificial Sequence
  Description of Artificial Sequence: Synthetic oligonucleotide
  Target: LAMA2; (+) strand; PAM type: YTN; PAM sequence: TTT
gaccaacattttattttgaa

SEQ ID NO: 329503 - DNA, 20 bp, Artificial Sequence
  Description of Artificial Sequence: Synthetic oligonucleotide
  Target: LAMA2; (+) strand; PAM type: YTN; PAM sequence: TTG
accaacattttattttgaaa

SEQ ID NO: 329504 - DNA, 20 bp, Artificial Sequence
  Description of Artificial Sequence: Synthetic oligonucleotide
  Target: LAMA2; (+) strand; PAM type: YTN; PAM sequence: TTT
tattttgaaaattttcatgc

SEQ ID NO: 329505 - DNA, 20 bp, Artificial Sequence
  Description of Artificial Sequence: Synthetic oligonucleotide
  Target: LAMA2; (+) strand; PAM type: YTN; PAM sequence: TTT
attttgaaaattttcatgca

SEQ ID NO: 329506 - DNA, 20 bp, Artificial Sequence
  Description of Artificial Sequence: Synthetic oligonucleotide
  Target: LAMA2; (+) strand; PAM type: YTN; PAM sequence: TTA
ttttgaaaattttcatgcac

SEQ ID NO: 329507 - DNA, 20 bp, Artificial Sequence
  Description of Artificial Sequence: Synthetic oligonucleotide
  Target: LAMA2; (+) strand; PAM type: YTN; PAM sequence: TTT
tgaaaattttcatgcacttg

SEQ ID NO: 329508 - DNA, 20 bp, Artificial Sequence
  Description of Artificial Sequence: Synthetic oligonucleotide
  Target: LAMA2; (+) strand; PAM type: YTN; PAM sequence: TTT
gaaaattttcatgcacttgg

SEQ ID NO: 329509 - DNA, 20 bp, Artificial Sequence
  Description of Artificial Sequence: Synthetic oligonucleotide
  Target: LAMA2; (+) strand; PAM type: YTN; PAM sequence: TTG
aaaattttcatgcacttggt

SEQ ID NO: 329510 - DNA, 20 bp, Artificial Sequence
  Description of Artificial Sequence: Synthetic oligonucleotide
  Target: LAMA2; (+) strand; PAM type: YTN; PAM sequence: TTT
tcatgcacttggtaaggttg

SEQ ID NO: 329511 - DNA, 20 bp, Artificial Sequence
  Description of Artificial Sequence: Synthetic oligonucleotide
  Target: LAMA2; (+) strand; PAM type: YTN; PAM sequence: TTT
catgcacttggtaaggttga

SEQ ID NO: 329512 - DNA, 20 bp, Artificial Sequence
  Description of Artificial Sequence: Synthetic oligonucleotide
  Target: LAMA2; (+) strand; PAM type: YTN; PAM sequence: TTC
atgcacttggtaaggttgaa

SEQ ID NO: 329513 - DNA, 20 bp, Artificial Sequence
  Description of Artificial Sequence: Synthetic oligonucleotide
  Target: LAMA2; (+) strand; PAM type: YTN; PAM sequence: CTT
ggtaaggttgaaagaatcat

SEQ ID NO: 329514 - DNA, 20 bp, Artificial Sequence
  Description of Artificial Sequence: Synthetic oligonucleotide
  Target: LAMA2; (+) strand; PAM type: YTN; PAM sequence: TTG
gtaaggttgaaagaatcata

SEQ ID NO: 329515 - DNA, 20 bp, Artificial Sequence
  Description of Artificial Sequence: Synthetic oligonucleotide
  Target: LAMA2; (+) strand; PAM type: YTN; PAM sequence: TTG
aaagaatcatacagtgaaca

SEQ ID NO: 329516 - DNA, 20 bp, Artificial Sequence
  Description of Artificial Sequence: Synthetic oligonucleotide
  Target: LAMA2; (+) strand; PAM type: YTN; PAM sequence: CTA
tgtactcgaaatctagattc

SEQ ID NO: 329517 - DNA, 20 bp, Artificial Sequence
  Description of Artificial Sequence: Synthetic oligonucleotide
  Target: LAMA2; (+) strand; PAM type: YTN; PAM sequence: CTC
gaaatctagattctaaaatt

SEQ ID NO: 329518 - DNA, 20 bp, Artificial Sequence
  Description of Artificial Sequence: Synthetic oligonucleotide
  Target: LAMA2; (+) strand; PAM type: YTN; PAM sequence: CTA
gattctaaaattaggccaag

SEQ ID NO: 329519 - DNA, 20 bp, Artificial Sequence
  Description of Artificial Sequence: Synthetic oligonucleotide
  Target: LAMA2; (+) strand; PAM type: YTN; PAM sequence: TTC
taaaattaggccaagcatag

SEQ ID NO: 329520 - DNA, 20 bp, Artificial Sequence
  Description of Artificial Sequence: Synthetic oligonucleotide
  Target: LAMA2; (+) strand; PAM type: YTN; PAM sequence: CTA
aaattaggccaagcatagtg

SEQ ID NO: 329521 - DNA, 20 bp, Artificial Sequence
  Description of Artificial Sequence: Synthetic oligonucleotide
  Target: LAMA2; (+) strand; PAM type: YTN; PAM sequence: TTA
ggccaagcatagtggctgat

SEQ ID NO: 329522 - DNA, 20 bp, Artificial Sequence
  Description of Artificial Sequence: Synthetic oligonucleotide
  Target: LAMA2; (+) strand; PAM type: YTN; PAM sequence: CTG
atgcctgtaatcccagggat

SEQ ID NO: 329523 - DNA, 20 bp, Artificial Sequence
  Description of Artificial Sequence: Synthetic oligonucleotide
  Target: LAMA2; (+) strand; PAM type: YTN; PAM sequence: CTG
taatcccagggatttgggag

SEQ ID NO: 329524 - DNA, 20 bp, Artificial Sequence
  Description of Artificial Sequence: Synthetic oligonucleotide
  Target: LAMA2; (+) strand; PAM type: YTN; PAM sequence: TTT
gggaggctgaggtgggagca

SEQ ID NO: 329525 - DNA, 20 bp, Artificial Sequence
  Description of Artificial Sequence: Synthetic oligonucleotide
  Target: LAMA2; (+) strand; PAM type: YTN; PAM sequence: TTG
ggaggctgaggtgggagcat

SEQ ID NO: 329526 - DNA, 20 bp, Artificial Sequence
  Description of Artificial Sequence: Synthetic oligonucleotide
  Target: LAMA2; (+) strand; PAM type: YTN; PAM sequence: CTG
aggtgggagcattgcctgag

SEQ ID NO: 329527 - DNA, 20 bp, Artificial Sequence
  Description of Artificial Sequence: Synthetic oligonucleotide
  Target: LAMA2; (+) strand; PAM type: YTN; PAM sequence: TTG
cctgagggcaggattttaag

SEQ ID NO: 329528 - DNA, 20 bp, Artificial Sequence
  Description of Artificial Sequence: Synthetic oligonucleotide
  Target: LAMA2; (+) strand; PAM type: YTN; PAM sequence: CTG
agggcaggattttaagacca

SEQ ID NO: 329529 - DNA, 20 bp, Artificial Sequence
  Description of Artificial Sequence: Synthetic oligonucleotide
  Target: LAMA2; (+) strand; PAM type: YTN; PAM sequence: TTT
taagaccagcatgggcaaca

SEQ ID NO: 329530 - DNA, 20 bp, Artificial Sequence
  Description of Artificial Sequence: Synthetic oligonucleotide
  Target: LAMA2; (+) strand; PAM type: YTN; PAM sequence: TTT
aagaccagcatgggcaacat

SEQ ID NO: 329531 - DNA, 20 bp, Artificial Sequence
  Description of Artificial Sequence: Synthetic oligonucleotide
  Target: LAMA2; (+) strand; PAM type: YTN; PAM sequence: TTA
agaccagcatgggcaacata

SEQ ID NO: 329532 - DNA, 20 bp, Artificial Sequence
  Description of Artificial Sequence: Synthetic oligonucleotide
  Target: LAMA2; (+) strand; PAM type: YTN; PAM sequence: CTC
taccaaaaaaaagtaaggcc

SEQ ID NO: 329533 - DNA, 20 bp, Artificial Sequence
  Description of Artificial Sequence: Synthetic oligonucleotide
  Target: LAMA2; (+) strand; PAM type: YTN; PAM sequence: CTA
ccaaaaaaaagtaaggccag

SEQ ID NO: 329534 - DNA, 20 bp, Artificial Sequence
  Description of Artificial Sequence: Synthetic oligonucleotide
  Target: LAMA2; (+) strand; PAM type: YTN; PAM sequence: CTG
catgcctgtagttacagcta

SEQ ID NO: 329535 - DNA, 20 bp, Artificial Sequence
  Description of Artificial Sequence: Synthetic oligonucleotide
  Target: LAMA2; (+) strand; PAM type: YTN; PAM sequence: CTG
tagttacagctactcaggaa

SEQ ID NO: 329536 - DNA, 20 bp, Artificial Sequence
  Description of Artificial Sequence: Synthetic oligonucleotide
  Target: LAMA2; (+) strand; PAM type: YTN; PAM sequence: TTA
cagctactcaggaagctgag

SEQ ID NO: 329537 - DNA, 20 bp, Artificial Sequence
  Description of Artificial Sequence: Synthetic oligonucleotide
  Target: LAMA2; (+) strand; PAM type: YTN; PAM sequence: CTA
ctcaggaagctgaggcagga

SEQ ID NO: 329538 - DNA, 20 bp, Artificial Sequence
  Description of Artificial Sequence: Synthetic oligonucleotide
  Target: LAMA2; (+) strand; PAM type: YTN; PAM sequence: CTC
aggaagctgaggcaggagga

SEQ ID NO: 329539 - DNA, 20 bp, Artificial Sequence
  Description of Artificial Sequence: Synthetic oligonucleotide
  Target: LAMA2; (+) strand; PAM type: YTN; PAM sequence: CTG
aggcaggaggattgcttgag

SEQ ID NO: 329540 - DNA, 20 bp, Artificial Sequence
  Description of Artificial Sequence: Synthetic oligonucleotide
  Target: LAMA2; (+) strand; PAM type: YTN; PAM sequence: TTG
cttgagcccaggagttcaag

SEQ ID NO: 329541 - DNA, 20 bp, Artificial Sequence
  Description of Artificial Sequence: Synthetic oligonucleotide
  Target: LAMA2; (+) strand; PAM type: YTN; PAM sequence: CTT
gagcccaggagttcaaggtt

SEQ ID NO: 329542 - DNA, 20 bp, Artificial Sequence
  Description of Artificial Sequence: Synthetic oligonucleotide
  Target: LAMA2; (+) strand; PAM type: YTN; PAM sequence: TTG
agcccaggagttcaaggtta

SEQ ID NO: 329543 - DNA, 20 bp, Artificial Sequence
  Description of Artificial Sequence: Synthetic oligonucleotide
  Target: LAMA2; (+) strand; PAM type: YTN; PAM sequence: TTC
aaggttacagtgaagtatta

SEQ ID NO: 329544 - DNA, 20 bp, Artificial Sequence
  Description of Artificial Sequence: Synthetic oligonucleotide
  Target: LAMA2; (+) strand; PAM type: YTN; PAM sequence: TTA
cagtgaagtattataatcat

SEQ ID NO: 329545 - DNA, 20 bp, Artificial Sequence
  Description of Artificial Sequence: Synthetic oligonucleotide
  Target: LAMA2; (+) strand; PAM type: YTN; PAM sequence: TTA
taatcatgctattgcactcc

SEQ ID NO: 329546 - DNA, 20 bp, Artificial Sequence
  Description of Artificial Sequence: Synthetic oligonucleotide
  Target: LAMA2; (+) strand; PAM type: YTN; PAM sequence: CTA
ttgcactccaacctgggcaa

SEQ ID NO: 329547 - DNA, 20 bp, Artificial Sequence
  Description of Artificial Sequence: Synthetic oligonucleotide
  Target: LAMA2; (+) strand; PAM type: YTN; PAM sequence: TTG
cactccaacctgggcaacag

SEQ ID NO: 329548 - DNA, 20 bp, Artificial Sequence
  Description of Artificial Sequence: Synthetic oligonucleotide
  Target: LAMA2; (+) strand; PAM type: YTN; PAM sequence: CTC
caacctgggcaacagaatga

SEQ ID NO: 329549 - DNA, 20 bp, Artificial Sequence
  Description of Artificial Sequence: Synthetic oligonucleotide
  Target: LAMA2; (+) strand; PAM type: YTN; PAM sequence: CTG
ggcaacagaatgagaccctg

SEQ ID NO: 329550 - DNA, 20 bp, Artificial Sequence
  Description of Artificial Sequence: Synthetic oligonucleotide
  Target: LAMA2; (+) strand; PAM type: YTN; PAM sequence: CTG
tctcaaaaaaaaaaaaaata

SEQ ID NO: 329551 - DNA, 20 bp, Artificial Sequence
  Description of Artificial Sequence: Synthetic oligonucleotide
  Target: LAMA2; (+) strand; PAM type: YTN; PAM sequence: CTC
aaaaaaaaaaaaaatagtta

SEQ ID NO: 329552 - DNA, 20 bp, Artificial Sequence
  Description of Artificial Sequence: Synthetic oligonucleotide
  Target: LAMA2; (+) strand; PAM type: YTN; PAM sequence: TTA
atgccaggcgtggtgactca

SEQ ID NO: 329553 - DNA, 20 bp, Artificial Sequence
  Description of Artificial Sequence: Synthetic oligonucleotide
  Target: LAMA2; (+) strand; PAM type: YTN; PAM sequence: CTC
atgcctgtaatcctaacact

SEQ ID NO: 329554 - DNA, 20 bp, Artificial Sequence
  Description of Artificial Sequence: Synthetic oligonucleotide
  Target: LAMA2; (+) strand; PAM type: YTN; PAM sequence: CTG
taatcctaacactttcagag

SEQ ID NO: 329555 - DNA, 20 bp, Artificial Sequence
  Description of Artificial Sequence: Synthetic oligonucleotide
  Target: LAMA2; (+) strand; PAM type: YTN; PAM sequence: CTA
acactttcagaggctgaggc

SEQ ID NO: 329556 - DNA, 20 bp, Artificial Sequence
  Description of Artificial Sequence: Synthetic oligonucleotide
  Target: LAMA2; (+) strand; PAM type: YTN; PAM sequence: CTT
tcagaggctgaggcaggtgg

SEQ ID NO: 329557 - DNA, 20 bp, Artificial Sequence
  Description of Artificial Sequence: Synthetic oligonucleotide
  Target: LAMA2; (+) strand; PAM type: YTN; PAM sequence: TTT
cagaggctgaggcaggtgga

SEQ ID NO: 329558 - DNA, 20 bp, Artificial Sequence
  Description of Artificial Sequence: Synthetic oligonucleotide
  Target: LAMA2; (+) strand; PAM type: YTN; PAM sequence: TTC
agaggctgaggcaggtggat

SEQ ID NO: 329559 - DNA, 20 bp, Artificial Sequence
  Description of Artificial Sequence: Synthetic oligonucleotide
  Target: LAMA2; (+) strand; PAM type: YTN; PAM sequence: CTG
aggcaggtggatcagttgag

SEQ ID NO: 329560 - DNA, 20 bp, Artificial Sequence
  Description of Artificial Sequence: Synthetic oligonucleotide
  Target: LAMA2; (+) strand; PAM type: YTN; PAM sequence: TTG
aggtcaggagttcaaaacca

SEQ ID NO: 329561 - DNA, 20 bp, Artificial Sequence
  Description of Artificial Sequence: Synthetic oligonucleotide
  Target: LAMA2; (+) strand; PAM type: YTN; PAM sequence: TTC
aaaaccagcctggctgatat

SEQ ID NO: 329562 - DNA, 20 bp, Artificial Sequence
  Description of Artificial Sequence: Synthetic oligonucleotide
  Target: LAMA2; (+) strand; PAM type: YTN; PAM sequence: CTG
gctgatatggcaaaaccccg

SEQ ID NO: 329563 - DNA, 20 bp, Artificial Sequence
  Description of Artificial Sequence: Synthetic oligonucleotide
  Target: LAMA2; (+) strand; PAM type: YTN; PAM sequence: CTG
atatggcaaaaccccgtctc

SEQ ID NO: 329564 - DNA, 20 bp, Artificial Sequence
  Description of Artificial Sequence: Synthetic oligonucleotide
  Target: LAMA2; (+) strand; PAM type: YTN; PAM sequence: CTC
tactaaaaatacaaaaatta

SEQ ID NO: 329565 - DNA, 20 bp, Artificial Sequence
  Description of Artificial Sequence: Synthetic oligonucleotide
  Target: LAMA2; (+) strand; PAM type: YTN; PAM sequence: CTA
ctaaaaatacaaaaattagc

SEQ ID NO: 329566 - DNA, 20 bp, Artificial Sequence
  Description of Artificial Sequence: Synthetic oligonucleotide
  Target: LAMA2; (+) strand; PAM type: YTN; PAM sequence: CTA
aaaatacaaaaattagctgg

SEQ ID NO: 329567 - DNA, 20 bp, Artificial Sequence
  Description of Artificial Sequence: Synthetic oligonucleotide
  Target: LAMA2; (+) strand; PAM type: YTN; PAM sequence: TTA
gctgggcgtggtggcaggct

SEQ ID NO: 329568 - DNA, 20 bp, Artificial Sequence
  Description of Artificial Sequence: Synthetic oligonucleotide
  Target: LAMA2; (+) strand; PAM type: YTN; PAM sequence: CTG
ggcgtggtggcaggctcctg

SEQ ID NO: 329569 - DNA, 20 bp, Artificial Sequence
  Description of Artificial Sequence: Synthetic oligonucleotide
  Target: LAMA2; (+) strand; PAM type: YTN; PAM sequence: CTC
ctgtaatcccagctactcgg

SEQ ID NO: 329570 - DNA, 20 bp, Artificial Sequence
  Description of Artificial Sequence: Synthetic oligonucleotide
  Target: LAMA2; (+) strand; PAM type: YTN; PAM sequence: CTG
taatcccagctactcgggag

SEQ ID NO: 329571 - DNA, 20 bp, Artificial Sequence
  Description of Artificial Sequence: Synthetic oligonucleotide
  Target: LAMA2; (+) strand; PAM type: YTN; PAM sequence: CTA
ctcgggaggctgaggcagga

SEQ ID NO: 329572 - DNA, 20 bp, Artificial Sequence
  Description of Artificial Sequence: Synthetic oligonucleotide
  Target: LAMA2; (+) strand; PAM type: YTN; PAM sequence: CTC
gggaggctgaggcaggagaa

SEQ ID NO: 329573 - DNA, 20 bp, Artificial Sequence
  Description of Artificial Sequence: Synthetic oligonucleotide
  Target: LAMA2; (+) strand; PAM type: YTN; PAM sequence: CTG
aggcaggagaatcacttgaa

SEQ ID NO: 329574 - DNA, 20 bp, Artificial Sequence
  Description of Artificial Sequence: Synthetic oligonucleotide
  Target: LAMA2; (+) strand; PAM type: YTN; PAM sequence: CTT
gaacctgagaggcggaggtt

SEQ ID NO: 329575 - DNA, 20 bp, Artificial Sequence
  Description of Artificial Sequence: Synthetic oligonucleotide
  Target: LAMA2; (+) strand; PAM type: YTN; PAM sequence: TTG
aacctgagaggcggaggttg

SEQ ID NO: 329576 - DNA, 20 bp, Artificial Sequence
  Description of Artificial Sequence: Synthetic oligonucleotide
  Target: LAMA2; (+) strand; PAM type: YTN; PAM sequence: CTG
agaggcggaggttgcagtga

SEQ ID NO: 329577 - DNA, 20 bp, Artificial Sequence
  Description of Artificial Sequence: Synthetic oligonucleotide
  Target: LAMA2; (+) strand; PAM type: YTN; PAM sequence: TTG
cagtgagttgggatcatact

SEQ ID NO: 329578 - DNA, 20 bp, Artificial Sequence
  Description of Artificial Sequence: Synthetic oligonucleotide
  Target: LAMA2; (+) strand; PAM type: YTN; PAM sequence: TTG
ggatcatactactgcactcc

SEQ ID NO: 329579 - DNA, 20 bp, Artificial Sequence
  Description of Artificial Sequence: Synthetic oligonucleotide
  Target: LAMA2; (+) strand; PAM type: YTN; PAM sequence: CTA
ctgcactccatcctgggcaa

SEQ ID NO: 329580 - DNA, 20 bp, Artificial Sequence
  Description of Artificial Sequence: Synthetic oligonucleotide
  Target: LAMA2; (+) strand; PAM type: YTN; PAM sequence: CTG
cactccatcctgggcaacag

SEQ ID NO: 329581 - DNA, 20 bp, Artificial Sequence
  Description of Artificial Sequence: Synthetic oligonucleotide
  Target: LAMA2; (+) strand; PAM type: YTN; PAM sequence: CTC
catcctgggcaacagagcga

SEQ ID NO: 329582 - DNA, 20 bp, Artificial Sequence
  Description of Artificial Sequence: Synthetic oligonucleotide
  Target: LAMA2; (+) strand; PAM type: YTN; PAM sequence: CTG
ggcaacagagcgagactcca

SEQ ID NO: 329583 - DNA, 20 bp, Artificial Sequence
  Description of Artificial Sequence: Synthetic oligonucleotide
  Target: LAMA2; (+) strand; PAM type: YTN; PAM sequence: CTC
catgtcaataatagtaataa

SEQ ID NO: 329584 - DNA, 20 bp, Artificial Sequence
  Description of Artificial Sequence: Synthetic oligonucleotide
  Target: LAMA2; (+) strand; PAM type: YTN; PAM sequence: TTA
atttaacatgtttgagtagg

SEQ ID NO: 329585 - DNA, 20 bp, Artificial Sequence
  Description of Artificial Sequence: Synthetic oligonucleotide
  Target: LAMA2; (+) strand; PAM type: YTN; PAM sequence: TTT
aacatgtttgagtagggagg

SEQ ID NO: 329586 - DNA, 20 bp, Artificial Sequence
  Description of Artificial Sequence: Synthetic oligonucleotide
  Target: LAMA2; (+) strand; PAM type: YTN; PAM sequence: TTA
acatgtttgagtagggagga

SEQ ID NO: 329587 - DNA, 20 bp, Artificial Sequence
  Description of Artificial Sequence: Synthetic oligonucleotide
  Target: LAMA2; (+) strand; PAM type: YTN; PAM sequence: TTT
gagtagggaggagatatgtg

SEQ ID NO: 329588 - DNA, 20 bp, Artificial Sequence
  Description of Artificial Sequence: Synthetic oligonucleotide
  Target: LAMA2; (+) strand; PAM type: YTN; PAM sequence: TTG
agtagggaggagatatgtgc

SEQ ID NO: 329589 - DNA, 20 bp, Artificial Sequence
  Description of Artificial Sequence: Synthetic oligonucleotide
  Target: LAMA2; (+) strand; PAM type: YTN; PAM sequence: CTT
tatcacatatctatccatct

SEQ ID NO: 329590 - DNA, 20 bp, Artificial Sequence
  Description of Artificial Sequence: Synthetic oligonucleotide
  Target: LAMA2; (+) strand; PAM type: YTN; PAM sequence: TTT
atcacatatctatccatctg

SEQ ID NO: 329591 - DNA, 20 bp, Artificial Sequence
  Description of Artificial Sequence: Synthetic oligonucleotide
  Target: LAMA2; (+) strand; PAM type: YTN; PAM sequence: TTA
tcacatatctatccatctga

SEQ ID NO: 329592 - DNA, 20 bp, Artificial Sequence
  Description of Artificial Sequence: Synthetic oligonucleotide
  Target: LAMA2; (+) strand; PAM type: YTN; PAM sequence: CTA
tccatctgaacatatctacc

SEQ ID NO: 329593 - DNA, 20 bp, Artificial Sequence
  Description of Artificial Sequence: Synthetic oligonucleotide
  Target: LAMA2; (+) strand; PAM type: YTN; PAM sequence: CTG
aacatatctacccataaatc

SEQ ID NO: 329594 - DNA, 20 bp, Artificial Sequence
  Description of Artificial Sequence: Synthetic oligonucleotide
  Target: LAMA2; (+) strand; PAM type: YTN; PAM sequence: CTA
cccataaatccattttatct

SEQ ID NO: 329595 - DNA, 20 bp, Artificial Sequence
  Description of Artificial Sequence: Synthetic oligonucleotide
  Target: LAMA2; (+) strand; PAM type: YTN; PAM sequence: TTT
tatcttttaatatactgcaa

SEQ ID NO: 329596 - DNA, 20 bp, Artificial Sequence
  Description of Artificial Sequence: Synthetic oligonucleotide
  Target: LAMA2; (+) strand; PAM type: YTN; PAM sequence: TTT
atcttttaatatactgcaaa

SEQ ID NO: 329597 - DNA, 20 bp, Artificial Sequence
  Description of Artificial Sequence: Synthetic oligonucleotide
  Target: LAMA2; (+) strand; PAM type: YTN; PAM sequence: TTA
tcttttaatatactgcaaac

SEQ ID NO: 329598 - DNA, 20 bp, Artificial Sequence
  Description of Artificial Sequence: Synthetic oligonucleotide
  Target: LAMA2; (+) strand; PAM type: YTN; PAM sequence: CTT
ttaatatactgcaaacctca

SEQ ID NO: 329599 - DNA, 20 bp, Artificial Sequence
  Description of Artificial Sequence: Synthetic oligonucleotide
  Target: LAMA2; (+) strand; PAM type: YTN; PAM sequence: TTT
taatatactgcaaacctcat

SEQ ID NO: 329600 - DNA, 20 bp, Artificial Sequence
  Description of Artificial Sequence: Synthetic oligonucleotide
  Target: LAMA2; (+) strand; PAM type: YTN; PAM sequence: TTT
aatatactgcaaacctcatt

SEQ ID NO: 329601 - DNA, 20 bp, Artificial Sequence
  Description of Artificial Sequence: Synthetic oligonucleotide
  Target: LAMA2; (+) strand; PAM type: YTN; PAM sequence: TTA
atatactgcaaacctcattc

SEQ ID NO: 329602 - DNA, 20 bp, Artificial Sequence
  Description of Artificial Sequence: Synthetic oligonucleotide
  Target: LAMA2; (+) strand; PAM type: YTN; PAM sequence: CTG
caaacctcattcctatacac

SEQ ID NO: 329603 - DNA, 20 bp, Artificial Sequence
  Description of Artificial Sequence: Synthetic oligonucleotide
  Target: LAMA2; (+) strand; PAM type: YTN; PAM sequence: CTC
attcctatacacatgatcat

SEQ ID NO: 329604 - DNA, 20 bp, Artificial Sequence
  Description of Artificial Sequence: Synthetic oligonucleotide
  Target: LAMA2; (+) strand; PAM type: YTN; PAM sequence: TTC
ctatacacatgatcatgaat

SEQ ID NO: 329605 - DNA, 20 bp, Artificial Sequence
  Description of Artificial Sequence: Synthetic oligonucleotide
  Target: LAMA2; (+) strand; PAM type: YTN; PAM sequence: CTA
tacacatgatcatgaatatc

SEQ ID NO: 329606 - DNA, 20 bp, Artificial Sequence
  Description of Artificial Sequence: Synthetic oligonucleotide
  Target: LAMA2; (+) strand; PAM type: YTN; PAM sequence: TTA
actggagttaaatactgcta

SEQ ID NO: 329607 - DNA, 20 bp, Artificial Sequence
  Description of Artificial Sequence: Synthetic oligonucleotide
  Target: LAMA2; (+) strand; PAM type: YTN; PAM sequence: CTG
gagttaaatactgctaattt

SEQ ID NO: 329608 - DNA, 20 bp, Artificial Sequence
  Description of Artificial Sequence: Synthetic oligonucleotide
  Target: LAMA2; (+) strand; PAM type: YTN; PAM sequence: TTA
aatactgctaatttttttca

SEQ ID NO: 329609 - DNA, 20 bp, Artificial Sequence
  Description of Artificial Sequence: Synthetic oligonucleotide
  Target: LAMA2; (+) strand; PAM type: YTN; PAM sequence: CTG
ctaatttttttcaagctcaa

SEQ ID NO: 329610 - DNA, 20 bp, Artificial Sequence
  Description of Artificial Sequence: Synthetic oligonucleotide
  Target: LAMA2; (+) strand; PAM type: YTN; PAM sequence: CTA
atttttttcaagctcaaatt

SEQ ID NO: 329611 - DNA, 20 bp, Artificial Sequence
  Description of Artificial Sequence: Synthetic oligonucleotide
  Target: LAMA2; (+) strand; PAM type: YTN; PAM sequence: TTT
ttttcaagctcaaatttatc

SEQ ID NO: 329612 - DNA, 20 bp, Artificial Sequence
  Description of Artificial Sequence: Synthetic oligonucleotide
  Target: LAMA2; (+) strand; PAM type: YTN; PAM sequence: TTT
tttcaagctcaaatttatct

SEQ ID NO: 329613 - DNA, 20 bp, Artificial Sequence
  Description of Artificial Sequence: Synthetic oligonucleotide
  Target: LAMA2; (+) strand; PAM type: YTN; PAM sequence: TTT
ttcaagctcaaatttatcta

SEQ ID NO: 329614 - DNA, 20 bp, Artificial Sequence
  Description of Artificial Sequence: Synthetic oligonucleotide
  Target: LAMA2; (+) strand; PAM type: YTN; PAM sequence: TTT
tcaagctcaaatttatctac

SEQ ID NO: 329615 - DNA, 20 bp, Artificial Sequence
  Description of Artificial Sequence: Synthetic oligonucleotide
  Target: LAMA2; (+) strand; PAM type: YTN; PAM sequence: TTT
caagctcaaatttatctaca

SEQ ID NO: 329616 - DNA, 20 bp, Artificial Sequence
  Description of Artificial Sequence: Synthetic oligonucleotide
  Target: LAMA2; (+) strand; PAM type: YTN; PAM sequence: TTC
aagctcaaatttatctacat

SEQ ID NO: 329617 - DNA, 20 bp, Artificial Sequence
  Description of Artificial Sequence: Synthetic oligonucleotide
  Target: LAMA2; (+) strand; PAM type: YTN; PAM sequence: CTC
aaatttatctacattgaaat

SEQ ID NO: 329618 - DNA, 20 bp, Artificial Sequence
  Description of Artificial Sequence: Synthetic oligonucleotide
  Target: LAMA2; (+) strand; PAM type: YTN; PAM sequence: TTT
atctacattgaaatgcataa

SEQ ID NO: 329619 - DNA, 20 bp, Artificial Sequence
  Description of Artificial Sequence: Synthetic oligonucleotide
  Target: LAMA2; (+) strand; PAM type: YTN; PAM sequence: TTA
tctacattgaaatgcataaa

SEQ ID NO: 329620 - DNA, 20 bp, Artificial Sequence
  Description of Artificial Sequence: Synthetic oligonucleotide
  Target: LAMA2; (+) strand; PAM type: YTN; PAM sequence: CTA
cattgaaatgcataaattat

SEQ ID NO: 329621 - DNA, 20 bp, Artificial Sequence
  Description of Artificial Sequence: Synthetic oligonucleotide
  Target: LAMA2; (+) strand; PAM type: YTN; PAM sequence: TTG
aaatgcataaattatcaccc

SEQ ID NO: 329622 - DNA, 20 bp, Artificial Sequence
  Description of Artificial Sequence: Synthetic oligonucleotide
  Target: LAMA2; (+) strand; PAM type: YTN; PAM sequence: TTA
tcaccccgtgtaacattcac

SEQ ID NO: 329623 - DNA, 20 bp, Artificial Sequence
  Description of Artificial Sequence: Synthetic oligonucleotide
  Target: LAMA2; (+) strand; PAM type: YTN; PAM sequence: TTC
actcactgaatgtaatattt

SEQ ID NO: 329624 - DNA, 20 bp, Artificial Sequence
  Description of Artificial Sequence: Synthetic oligonucleotide
  Target: LAMA2; (+) strand; PAM type: YTN; PAM sequence: CTC
actgaatgtaatatttaatt

SEQ ID NO: 329625 - DNA, 20 bp, Artificial Sequence
  Description of Artificial Sequence: Synthetic oligonucleotide
  Target: LAMA2; (+) strand; PAM type: YTN; PAM sequence: CTG
aatgtaatatttaattaaca

SEQ ID NO: 329626 - DNA, 20 bp, Artificial Sequence
  Description of Artificial Sequence: Synthetic oligonucleotide
  Target: LAMA2; (+) strand; PAM type: YTN; PAM sequence: TTT
aattaacaaatacatacacc

SEQ ID NO: 329627 - DNA, 20 bp, Artificial Sequence
  Description of Artificial Sequence: Synthetic oligonucleotide
  Target: LAMA2; (+) strand; PAM type: YTN; PAM sequence: TTA
attaacaaatacatacacca

SEQ ID NO: 329628 - DNA, 20 bp, Artificial Sequence
  Description of Artificial Sequence: Synthetic oligonucleotide
  Target: LAMA2; (+) strand; PAM type: YTN; PAM sequence: TTA
acaaatacatacaccattat

SEQ ID NO: 329629 - DNA, 20 bp, Artificial Sequence
  Description of Artificial Sequence: Synthetic oligonucleotide
  Target: LAMA2; (+) strand; PAM type: YTN; PAM sequence: TTA
taatacaaactgctatcaag

SEQ ID NO: 329630 - DNA, 20 bp, Artificial Sequence
  Description of Artificial Sequence: Synthetic oligonucleotide
  Target: LAMA2; (+) strand; PAM type: YTN; PAM sequence: CTG
ctatcaagaatattatcatc

SEQ ID NO: 329631 - DNA, 20 bp, Artificial Sequence
  Description of Artificial Sequence: Synthetic oligonucleotide
  Target: LAMA2; (+) strand; PAM type: YTN; PAM sequence: CTA
tcaagaatattatcatcatc

SEQ ID NO: 329632 - DNA, 20 bp, Artificial Sequence
  Description of Artificial Sequence: Synthetic oligonucleotide
  Target: LAMA2; (+) strand; PAM type: YTN; PAM sequence: TTA
tcatcatcccagaaattttc

SEQ ID NO: 329633 - DNA, 20 bp, Artificial Sequence
  Description of Artificial Sequence: Synthetic oligonucleotide
  Target: LAMA2; (+) strand; PAM type: YTN; PAM sequence: TTT
tctttatgcctcttcccagt

SEQ ID NO: 329634 - DNA, 20 bp, Artificial Sequence
  Description of Artificial Sequence: Synthetic oligonucleotide
  Target: LAMA2; (+) strand; PAM type: YTN; PAM sequence: TTT
ctttatgcctcttcccagtc

SEQ ID NO: 329635 - DNA, 20 bp, Artificial Sequence
  Description of Artificial Sequence: Synthetic oligonucleotide
  Target: LAMA2; (+) strand; PAM type: YTN; PAM sequence: TTC
tttatgcctcttcccagtca

SEQ ID NO: 329636 - DNA, 20 bp, Artificial Sequence
  Description of Artificial Sequence: Synthetic oligonucleotide
  Target: LAMA2; (+) strand; PAM type: YTN; PAM sequence: CTT
tatgcctcttcccagtcagt

SEQ ID NO: 329637 - DNA, 20 bp, Artificial Sequence
  Description of Artificial Sequence: Synthetic oligonucleotide
  Target: LAMA2; (+) strand; PAM type: YTN; PAM sequence: TTT
atgcctcttcccagtcagtc

SEQ ID NO: 329638 - DNA, 20 bp, Artificial Sequence
  Description of Artificial Sequence: Synthetic oligonucleotide
  Target: LAMA2; (+) strand; PAM type: YTN; PAM sequence: TTA
tgcctcttcccagtcagtct

SEQ ID NO: 329639 - DNA, 20 bp, Artificial Sequence
  Description of Artificial Sequence: Synthetic oligonucleotide
  Target: LAMA2; (+) strand; PAM type: YTN; PAM sequence: CTC
ttcccagtcagtctctgccc

SEQ ID NO: 329640 - DNA, 20 bp, Artificial Sequence
  Description of Artificial Sequence: Synthetic oligonucleotide
  Target: LAMA2; (+) strand; PAM type: YTN; PAM sequence: CTT
cccagtcagtctctgccccc

SEQ ID NO: 329641 - DNA, 20 bp, Artificial Sequence
  Description of Artificial Sequence: Synthetic oligonucleotide
  Target: LAMA2; (+) strand; PAM type: YTN; PAM sequence: TTC
ccagtcagtctctgccccca

SEQ ID NO: 329642 - DNA, 20 bp, Artificial Sequence
  Description of Artificial Sequence: Synthetic oligonucleotide
  Target: LAMA2; (+) strand; PAM type: YTN; PAM sequence: CTC
tgcccccaagctcccaaagg

SEQ ID NO: 329643 - DNA, 20 bp, Artificial Sequence
  Description of Artificial Sequence: Synthetic oligonucleotide
  Target: LAMA2; (+) strand; PAM type: YTN; PAM sequence: CTG
cccccaagctcccaaaggca

SEQ ID NO: 329644 - DNA, 20 bp, Artificial Sequence
  Description of Artificial Sequence: Synthetic oligonucleotide
  Target: LAMA2; (+) strand; PAM type: YTN; PAM sequence: CTC
ccaaaggcaaccatttttcc

SEQ ID NO: 329645 - DNA, 20 bp, Artificial Sequence
  Description of Artificial Sequence: Synthetic oligonucleotide
  Target: LAMA2; (+) strand; PAM type: YTN; PAM sequence: TTT
ttcctgttttattttcctaa

SEQ ID NO: 329646 - DNA, 20 bp, Artificial Sequence
  Description of Artificial Sequence: Synthetic oligonucleotide
  Target: LAMA2; (+) strand; PAM type: YTN; PAM sequence: TTT
tcctgttttattttcctaaa

SEQ ID NO: 329647 - DNA, 20 bp, Artificial Sequence
  Description of Artificial Sequence: Synthetic oligonucleotide
  Target: LAMA2; (+) strand; PAM type: YTN; PAM sequence: TTT
cctgttttattttcctaaaa

SEQ ID NO: 329648 - DNA, 20 bp, Artificial Sequence
  Description of Artificial Sequence: Synthetic oligonucleotide
  Target: LAMA2; (+) strand; PAM type: YTN; PAM sequence: TTC
ctgttttattttcctaaaag

SEQ ID NO: 329649 - DNA, 20 bp, Artificial Sequence
  Description of Artificial Sequence: Synthetic oligonucleotide
  Target: LAMA2; (+) strand; PAM type: YTN; PAM sequence: CTG
ttttattttcctaaaagatt

SEQ ID NO: 329650 - DNA, 20 bp, Artificial Sequence
  Description of Artificial Sequence: Synthetic oligonucleotide
  Target: LAMA2; (+) strand; PAM type: YTN; PAM sequence: TTT
tattttcctaaaagattagg

SEQ ID NO: 329651 - DNA, 20 bp, Artificial Sequence
  Description of Artificial Sequence: Synthetic oligonucleotide
  Target: LAMA2; (+) strand; PAM type: YTN; PAM sequence: TTT
attttcctaaaagattaggt

SEQ ID NO: 329652 - DNA, 20 bp, Artificial Sequence
  Description of Artificial Sequence: Synthetic oligonucleotide
  Target: LAMA2; (+) strand; PAM type: YTN; PAM sequence: TTA
ttttcctaaaagattaggta

SEQ ID NO: 329653 - DNA, 20 bp, Artificial Sequence
  Description of Artificial Sequence: Synthetic oligonucleotide
  Target: LAMA2; (+) strand; PAM type: YTN; PAM sequence: TTT
tcctaaaagattaggtatgt

SEQ ID NO: 329654 - DNA, 20 bp, Artificial Sequence
  Description of Artificial Sequence: Synthetic oligonucleotide
  Target: LAMA2; (+) strand; PAM type: YTN; PAM sequence: TTT
cctaaaagattaggtatgtt

SEQ ID NO: 329655 - DNA, 20 bp, Artificial Sequence
  Description of Artificial Sequence: Synthetic oligonucleotide
  Target: LAMA2; (+) strand; PAM type: YTN; PAM sequence: TTC
ctaaaagattaggtatgttt

SEQ ID NO: 329656 - DNA, 20 bp, Artificial Sequence
  Description of Artificial Sequence: Synthetic oligonucleotide
  Target: LAMA2; (+) strand; PAM type: YTN; PAM sequence: CTA
aaagattaggtatgtttaaa

SEQ ID NO: 329657 - DNA, 20 bp, Artificial Sequence
  Description of Artificial Sequence: Synthetic oligonucleotide
  Target: LAMA2; (+) strand; PAM type: YTN; PAM sequence: TTA
ggtatgtttaaaaagatcat

SEQ ID NO: 329658 - DNA, 20 bp, Artificial Sequence
  Description of Artificial Sequence: Synthetic oligonucleotide
  Target: LAMA2; (+) strand; PAM type: YTN; PAM sequence: TTT
aaaaagatcatataaatgaa

SEQ ID NO: 329659 - DNA, 20 bp, Artificial Sequence
  Description of Artificial Sequence: Synthetic oligonucleotide
  Target: LAMA2; (+) strand; PAM type: YTN; PAM sequence: TTA
aaaagatcatataaatgaat

SEQ ID NO: 329660 - DNA, 20 bp, Artificial Sequence
  Description of Artificial Sequence: Synthetic oligonucleotide
  Target: LAMA2; (+) strand; PAM type: YTN; PAM sequence: CTC
tttggtgtaaacttatatta

SEQ ID NO: 329661 - DNA, 20 bp, Artificial Sequence
  Description of Artificial Sequence: Synthetic oligonucleotide
  Target: LAMA2; (+) strand; PAM type: YTN; PAM sequence: CTT
tggtgtaaacttatattatg

SEQ ID NO: 329662 - DNA, 20 bp, Artificial Sequence
  Description of Artificial Sequence: Synthetic oligonucleotide
  Target: LAMA2; (+) strand; PAM type: YTN; PAM sequence: TTT
ggtgtaaacttatattatgt

SEQ ID NO: 329663 - DNA, 20 bp, Artificial Sequence
  Description of Artificial Sequence: Synthetic oligonucleotide
  Target: LAMA2; (+) strand; PAM type: YTN; PAM sequence: TTG
gtgtaaacttatattatgtg

SEQ ID NO: 329664 - DNA, 20 bp, Artificial Sequence
  Description of Artificial Sequence: Synthetic oligonucleotide
  Target: LAMA2; (+) strand; PAM type: YTN; PAM sequence: CTT
atattatgtggcataatcct

SEQ ID NO: 329665 - DNA, 20 bp, Artificial Sequence
  Description of Artificial Sequence: Synthetic oligonucleotide
  Target: LAMA2; (+) strand; PAM type: YTN; PAM sequence: TTA
tattatgtggcataatcctt

SEQ ID NO: 329666 - DNA, 20 bp, Artificial Sequence
  Description of Artificial Sequence: Synthetic oligonucleotide
  Target: LAMA2; (+) strand; PAM type: YTN; PAM sequence: TTA
tgtggcataatcctttttgg

SEQ ID NO: 329667 - DNA, 20 bp, Artificial Sequence
  Description of Artificial Sequence: Synthetic oligonucleotide
  Target: LAMA2; (+) strand; PAM type: YTN; PAM sequence: CTT
tttggagtcatcagcattgt

SEQ ID NO: 329668 - DNA, 20 bp, Artificial Sequence
  Description of Artificial Sequence: Synthetic oligonucleotide
  Target: LAMA2; (+) strand; PAM type: YTN; PAM sequence: TTT
ttggagtcatcagcattgtt

SEQ ID NO: 329669 - DNA, 20 bp, Artificial Sequence
  Description of Artificial Sequence: Synthetic oligonucleotide
  Target: LAMA2; (+) strand; PAM type: YTN; PAM sequence: TTT
tggagtcatcagcattgttg

SEQ ID NO: 329670 - DNA, 20 bp, Artificial Sequence
  Description of Artificial Sequence: Synthetic oligonucleotide
  Target: LAMA2; (+) strand; PAM type: YTN; PAM sequence: TTT
ggagtcatcagcattgttgt

SEQ ID NO: 329671 - DNA, 20 bp, Artificial Sequence
  Description of Artificial Sequence: Synthetic oligonucleotide
  Target: LAMA2; (+) strand; PAM type: YTN; PAM sequence: TTG
gagtcatcagcattgttgtg

SEQ ID NO: 329672 - DNA, 20 bp, Artificial Sequence
  Description of Artificial Sequence: Synthetic oligonucleotide
  Target: LAMA2; (+) strand; PAM type: YTN; PAM sequence: TTG
ttgtgtgtatcagtaatttg

SEQ ID NO: 329673 - DNA, 20 bp, Artificial Sequence
  Description of Artificial Sequence: Synthetic oligonucleotide
  Target: LAMA2; (+) strand; PAM type: YTN; PAM sequence: TTG
tgtgtatcagtaatttgttc

SEQ ID NO: 329674 - DNA, 20 bp, Artificial Sequence
  Description of Artificial Sequence: Synthetic oligonucleotide
  Target: LAMA2; (+) strand; PAM type: YTN; PAM sequence: TTT
gttccatttttatgttgaat

SEQ ID NO: 329675 - DNA, 20 bp, Artificial Sequence
  Description of Artificial Sequence: Synthetic oligonucleotide
  Target: LAMA2; (+) strand; PAM type: YTN; PAM sequence: TTG
ttccatttttatgttgaata

SEQ ID NO: 329676 - DNA, 20 bp, Artificial Sequence
  Description of Artificial Sequence: Synthetic oligonucleotide
  Target: LAMA2; (+) strand; PAM type: YTN; PAM sequence: TTC
catttttatgttgaatagta

SEQ ID NO: 329677 - DNA, 20 bp, Artificial Sequence
  Description of Artificial Sequence: Synthetic oligonucleotide
  Target: LAMA2; (+) strand; PAM type: YTN; PAM sequence: TTT
ttatgttgaatagtatttca

SEQ ID NO: 329678 - DNA, 20 bp, Artificial Sequence
  Description of Artificial Sequence: Synthetic oligonucleotide
  Target: LAMA2; (+) strand; PAM type: YTN; PAM sequence: TTT
tatgttgaatagtatttcat

SEQ ID NO: 329679 - DNA, 20 bp, Artificial Sequence
  Description of Artificial Sequence: Synthetic oligonucleotide
  Target: LAMA2; (+) strand; PAM type: YTN; PAM sequence: TTT
atgttgaatagtatttcatt

SEQ ID NO: 329680 - DNA, 20 bp, Artificial Sequence
  Description of Artificial Sequence: Synthetic oligonucleotide
  Target: LAMA2; (+) strand; PAM type: YTN; PAM sequence: TTA
tgttgaatagtatttcattg

SEQ ID NO: 329681 - DNA, 20 bp, Artificial Sequence
  Description of Artificial Sequence: Synthetic oligonucleotide
  Target: LAMA2; (+) strand; PAM type: YTN; PAM sequence: TTG
aatagtatttcattgtttaa

SEQ ID NO: 329682 - DNA, 20 bp, Artificial Sequence
  Description of Artificial Sequence: Synthetic oligonucleotide
  Target: LAMA2; (+) strand; PAM type: YTN; PAM sequence: TTT
cattgtttaaatacaccaca

SEQ ID NO: 329683 - DNA, 20 bp, Artificial Sequence
  Description of Artificial Sequence: Synthetic oligonucleotide
  Target: LAMA2; (+) strand; PAM type: YTN; PAM sequence: TTC
attgtttaaatacaccacag

SEQ ID NO: 329684 - DNA, 20 bp, Artificial Sequence
  Description of Artificial Sequence: Synthetic oligonucleotide
  Target: LAMA2; (+) strand; PAM type: YTN; PAM sequence: TTG
tttaaatacaccacagtttt

SEQ ID NO: 329685 - DNA, 20 bp, Artificial Sequence
  Description of Artificial Sequence: Synthetic oligonucleotide
  Target: LAMA2; (+) strand; PAM type: YTN; PAM sequence: TTT
aaatacaccacagtttttgt

SEQ ID NO: 329686 - DNA, 20 bp, Artificial Sequence
  Description of Artificial Sequence: Synthetic oligonucleotide
  Target: LAMA2; (+) strand; PAM type: YTN; PAM sequence: TTA
aatacaccacagtttttgta

SEQ ID NO: 329687 - DNA, 20 bp, Artificial Sequence
  Description of Artificial Sequence: Synthetic oligonucleotide
  Target: LAMA2; (+) strand; PAM type: YTN; PAM sequence: TTT
ttgtatcatttcccccattc

SEQ ID NO: 329688 - DNA, 20 bp, Artificial Sequence
  Description of Artificial Sequence: Synthetic oligonucleotide
  Target: LAMA2; (+) strand; PAM type: YTN; PAM sequence: TTT
tgtatcatttcccccattca

SEQ ID NO: 329689 - DNA, 20 bp, Artificial Sequence
  Description of Artificial Sequence: Synthetic oligonucleotide
  Target: LAMA2; (+) strand; PAM type: YTN; PAM sequence: TTT
gtatcatttcccccattcat

SEQ ID NO: 329690 - DNA, 20 bp, Artificial Sequence
  Description of Artificial Sequence: Synthetic oligonucleotide
  Target: LAMA2; (+) strand; PAM type: YTN; PAM sequence: TTG
tatcatttcccccattcatg

SEQ ID NO: 329691 - DNA, 20 bp, Artificial Sequence
  Description of Artificial Sequence: Synthetic oligonucleotide
  Target: LAMA2; (+) strand; PAM type: YTN; PAM sequence: TTT
cccccattcatggaaaccta

SEQ ID NO: 329692 - DNA, 20 bp, Artificial Sequence
  Description of Artificial Sequence: Synthetic oligonucleotide
  Target: LAMA2; (+) strand; PAM type: YTN; PAM sequence: TTC
ccccattcatggaaacctaa

SEQ ID NO: 329693 - DNA, 20 bp, Artificial Sequence
  Description of Artificial Sequence: Synthetic oligonucleotide
  Target: LAMA2; (+) strand; PAM type: YTN; PAM sequence: TTC
atggaaacctaaggtgtttc

SEQ ID NO: 329694 - DNA, 20 bp, Artificial Sequence
  Description of Artificial Sequence: Synthetic oligonucleotide
  Target: LAMA2; (+) strand; PAM type: YTN; PAM sequence: CTA
aggtgtttccaggtttggct

SEQ ID NO: 329695 - DNA, 20 bp, Artificial Sequence
  Description of Artificial Sequence: Synthetic oligonucleotide
  Target: LAMA2; (+) strand; PAM type: YTN; PAM sequence: TTT
ccaggtttggctattatgat

SEQ ID NO: 329696 - DNA, 20 bp, Artificial Sequence
  Description of Artificial Sequence: Synthetic oligonucleotide
  Target: LAMA2; (+) strand; PAM type: YTN; PAM sequence: TTC
caggtttggctattatgata

SEQ ID NO: 329697 - DNA, 20 bp, Artificial Sequence
  Description of Artificial Sequence: Synthetic oligonucleotide
  Target: LAMA2; (+) strand; PAM type: YTN; PAM sequence: TTT
ggctattatgataaaaactt

SEQ ID NO: 329698 - DNA, 20 bp, Artificial Sequence
  Description of Artificial Sequence: Synthetic oligonucleotide
  Target: LAMA2; (+) strand; PAM type: YTN; PAM sequence: TTG
gctattatgataaaaacttc

SEQ ID NO: 329699 - DNA, 20 bp, Artificial Sequence
  Description of Artificial Sequence: Synthetic oligonucleotide
  Target: LAMA2; (+) strand; PAM type: YTN; PAM sequence: CTA
ttatgataaaaacttctatg

SEQ ID NO: 329700 - DNA, 20 bp, Artificial Sequence
  Description of Artificial Sequence: Synthetic oligonucleotide
  Target: LAMA2; (+) strand; PAM type: YTN; PAM sequence: TTA
tgataaaaacttctatgaac

SEQ ID NO: 329701 - DNA, 20 bp, Artificial Sequence
  Description of Artificial Sequence: Synthetic oligonucleotide
  Target: LAMA2; (+) strand; PAM type: YTN; PAM sequence: CTT
ctatgaacatttttgtttag

SEQ ID NO: 329702 - DNA, 20 bp, Artificial Sequence
  Description of Artificial Sequence: Synthetic oligonucleotide
  Target: LAMA2; (+) strand; PAM type: YTN; PAM sequence: TTC
tatgaacatttttgtttagg

SEQ ID NO: 329703 - DNA, 20 bp, Artificial Sequence
  Description of Artificial Sequence: Synthetic oligonucleotide
  Target: LAMA2; (+) strand; PAM type: YTN; PAM sequence: CTA
tgaacatttttgtttaggtc

SEQ ID NO: 329704 - DNA, 20 bp, Artificial Sequence
  Description of Artificial Sequence: Synthetic oligonucleotide
  Target: LAMA2; (+) strand; PAM type: YTN; PAM sequence: TTT
ttgtttaggtctttttaagg

SEQ ID NO: 329705 - DNA, 20 bp, Artificial Sequence
  Description of Artificial Sequence: Synthetic oligonucleotide
  Target: LAMA2; (+) strand; PAM type: YTN; PAM sequence: TTT
tgtttaggtctttttaagga

SEQ ID NO: 329706 - DNA, 20 bp, Artificial Sequence
  Description of Artificial Sequence: Synthetic oligonucleotide
  Target: LAMA2; (+) strand; PAM type: YTN; PAM sequence: TTT
gtttaggtctttttaaggac

SEQ ID NO: 329707 - DNA, 20 bp, Artificial Sequence
  Description of Artificial Sequence: Synthetic oligonucleotide
  Target: LAMA2; (+) strand; PAM type: YTN; PAM sequence: TTG
tttaggtctttttaaggaca

SEQ ID NO: 329708 - DNA, 20 bp, Artificial Sequence
  Description of Artificial Sequence: Synthetic oligonucleotide
  Target: LAMA2; (+) strand; PAM type: YTN; PAM sequence: TTT
aggtctttttaaggacatgt

SEQ ID NO: 329709 - DNA, 20 bp, Artificial Sequence
  Description of Artificial Sequence: Synthetic oligonucleotide
  Target: LAMA2; (+) strand; PAM type: YTN; PAM sequence: TTA
ggtctttttaaggacatgta

SEQ ID NO: 329710 - DNA, 20 bp, Artificial Sequence
  Description of Artificial Sequence: Synthetic oligonucleotide
  Target: LAMA2; (+) strand; PAM type: YTN; PAM sequence: CTT
tttaaggacatgtaatgtca

SEQ ID NO: 329711 - DNA, 20 bp, Artificial Sequence
  Description of Artificial Sequence: Synthetic oligonucleotide
  Target: LAMA2; (+) strand; PAM type: YTN; PAM sequence: TTT
ttaaggacatgtaatgtcat

SEQ ID NO: 329712 - DNA, 20 bp, Artificial Sequence
  Description of Artificial Sequence: Synthetic oligonucleotide
  Target: LAMA2; (+) strand; PAM type: YTN; PAM sequence: TTT
taaggacatgtaatgtcatt

SEQ ID NO: 329713 - DNA, 20 bp, Artificial Sequence
  Description of Artificial Sequence: Synthetic oligonucleotide
  Target: LAMA2; (+) strand; PAM type: YTN; PAM sequence: TTT
aaggacatgtaatgtcattt

SEQ ID NO: 329714 - DNA, 20 bp, Artificial Sequence
  Description of Artificial Sequence: Synthetic oligonucleotide
  Target: LAMA2; (+) strand; PAM type: YTN; PAM sequence: TTA
aggacatgtaatgtcattta

SEQ ID NO: 329715 - DNA, 20 bp, Artificial Sequence
  Description of Artificial Sequence: Synthetic oligonucleotide
  Target: LAMA2; (+) strand; PAM type: YTN; PAM sequence: TTT
atcttggatatgtacctaac

SEQ ID NO: 329716 - DNA, 20 bp, Artificial Sequence
  Description of Artificial Sequence: Synthetic oligonucleotide
  Target: LAMA2; (+) strand; PAM type: YTN; PAM sequence: TTA
tcttggatatgtacctaaca

SEQ ID NO: 329717 - DNA, 20 bp, Artificial Sequence
  Description of Artificial Sequence: Synthetic oligonucleotide
  Target: LAMA2; (+) strand; PAM type: YTN; PAM sequence: CTT
ggatatgtacctaacagggg

SEQ ID NO: 329718 - DNA, 20 bp, Artificial Sequence
  Description of Artificial Sequence: Synthetic oligonucleotide
  Target: LAMA2; (+) strand; PAM type: YTN; PAM sequence: TTG
gatatgtacctaacagggga

SEQ ID NO: 329719 - DNA, 20 bp, Artificial Sequence
  Description of Artificial Sequence: Synthetic oligonucleotide
  Target: LAMA2; (+) strand; PAM type: YTN; PAM sequence: CTA
acaggggaaaatttgaagga

SEQ ID NO: 329720 - DNA, 20 bp, Artificial Sequence
  Description of Artificial Sequence: Synthetic oligonucleotide
  Target: LAMA2; (+) strand; PAM type: YTN; PAM sequence: TTT
gaaggacttttatatttatt

SEQ ID NO: 329721 - DNA, 20 bp, Artificial Sequence
  Description of Artificial Sequence: Synthetic oligonucleotide
  Target: LAMA2; (+) strand; PAM type: YTN; PAM sequence: TTG
aaggacttttatatttatta

SEQ ID NO: 329722 - DNA, 20 bp, Artificial Sequence
  Description of Artificial Sequence: Synthetic oligonucleotide
  Target: LAMA2; (+) strand; PAM type: YTN; PAM sequence: CTT
ttatatttattaaaaactac

SEQ ID NO: 329723 - DNA, 20 bp, Artificial Sequence
  Description of Artificial Sequence: Synthetic oligonucleotide
  Target: LAMA2; (+) strand; PAM type: YTN; PAM sequence: TTT
tatatttattaaaaactacc

SEQ ID NO: 329724 - DNA, 20 bp, Artificial Sequence
  Description of Artificial Sequence: Synthetic oligonucleotide
  Target: LAMA2; (+) strand; PAM type: YTN; PAM sequence: TTT
atatttattaaaaactacct

SEQ ID NO: 329725 - DNA, 20 bp, Artificial Sequence
  Description of Artificial Sequence: Synthetic oligonucleotide
  Target: LAMA2; (+) strand; PAM type: YTN; PAM sequence: TTA
tatttattaaaaactacctg

SEQ ID NO: 329726 - DNA, 20 bp, Artificial Sequence
  Description of Artificial Sequence: Synthetic oligonucleotide
  Target: LAMA2; (+) strand; PAM type: YTN; PAM sequence: TTT
attaaaaactacctgttttc

SEQ ID NO: 329727 - DNA, 20 bp, Artificial Sequence
  Description of Artificial Sequence: Synthetic oligonucleotide
  Target: LAMA2; (+) strand; PAM type: YTN; PAM sequence: TTA
ttaaaaactacctgttttct

SEQ ID NO: 329728 - DNA, 20 bp, Artificial Sequence
  Description of Artificial Sequence: Synthetic oligonucleotide
  Target: LAMA2; (+) strand; PAM type: YTN; PAM sequence: TTA
aaaactacctgttttctaaa

SEQ ID NO: 329729 - DNA, 20 bp, Artificial Sequence
  Description of Artificial Sequence: Synthetic oligonucleotide
  Target: LAMA2; (+) strand; PAM type: YTN; PAM sequence: CTA
cctgttttctaaaagggttg

SEQ ID NO: 329730 - DNA, 20 bp, Artificial Sequence
  Description of Artificial Sequence: Synthetic oligonucleotide
  Target: LAMA2; (+) strand; PAM type: YTN; PAM sequence: CTG
ttttctaaaagggttgtgct

SEQ ID NO: 329731 - DNA, 20 bp, Artificial Sequence
  Description of Artificial Sequence: Synthetic oligonucleotide
  Target: LAMA2; (+) strand; PAM type: YTN; PAM sequence: TTT
tctaaaagggttgtgctaat

SEQ ID NO: 329732 - DNA, 20 bp, Artificial Sequence
  Description of Artificial Sequence: Synthetic oligonucleotide
  Target: LAMA2; (+) strand; PAM type: YTN; PAM sequence: TTT
ctaaaagggttgtgctaatt

SEQ ID NO: 329733 - DNA, 20 bp, Artificial Sequence
  Description of Artificial Sequence: Synthetic oligonucleotide
  Target: LAMA2; (+) strand; PAM type: YTN; PAM sequence: TTC
taaaagggttgtgctaattt

SEQ ID NO: 329734 - DNA, 20 bp, Artificial Sequence
  Description of Artificial Sequence: Synthetic oligonucleotide
  Target: LAMA2; (+) strand; PAM type: YTN; PAM sequence: CTA
aaagggttgtgctaatttac

SEQ ID NO: 329735 - DNA, 20 bp, Artificial Sequence
  Description of Artificial Sequence: Synthetic oligonucleotide
  Target: LAMA2; (+) strand; PAM type: YTN; PAM sequence: TTG
tgctaatttacattcccaac

SEQ ID NO: 329736 - DNA, 20 bp, Artificial Sequence
  Description of Artificial Sequence: Synthetic oligonucleotide
  Target: LAMA2; (+) strand; PAM type: YTN; PAM sequence: CTA
atttacattcccaacagcaa

SEQ ID NO: 329737 - DNA, 20 bp, Artificial Sequence
  Description of Artificial Sequence: Synthetic oligonucleotide
  Target: LAMA2; (+) strand; PAM type: YTN; PAM sequence: TTT
acattcccaacagcaatgca

SEQ ID NO: 329738 - DNA, 20 bp, Artificial Sequence
  Description of Artificial Sequence: Synthetic oligonucleotide
  Target: LAMA2; (+) strand; PAM type: YTN; PAM sequence: TTA
cattcccaacagcaatgcag

SEQ ID NO: 329739 - DNA, 20 bp, Artificial Sequence
  Description of Artificial Sequence: Synthetic oligonucleotide
  Target: LAMA2; (+) strand; PAM type: YTN; PAM sequence: TTC
ccaacagcaatgcagcagac

SEQ ID NO: 329740 - DNA, 20 bp, Artificial Sequence
  Description of Artificial Sequence: Synthetic oligonucleotide
  Target: LAMA2; (+) strand; PAM type: YTN; PAM sequence: CTT
ttgattgttctacaaacttt

SEQ ID NO: 329741 - DNA, 20 bp, Artificial Sequence
  Description of Artificial Sequence: Synthetic oligonucleotide
  Target: LAMA2; (+) strand; PAM type: YTN; PAM sequence: TTT
tgattgttctacaaactttt

SEQ ID NO: 329742 - DNA, 20 bp, Artificial Sequence
  Description of Artificial Sequence: Synthetic oligonucleotide
  Target: LAMA2; (+) strand; PAM type: YTN; PAM sequence: TTT
gattgttctacaaacttttt

SEQ ID NO: 329743 - DNA, 20 bp, Artificial Sequence
  Description of Artificial Sequence: Synthetic oligonucleotide
  Target: LAMA2; (+) strand; PAM type: YTN; PAM sequence: TTG
attgttctacaaacttttta

SEQ ID NO: 329744 - DNA, 20 bp, Artificial Sequence
  Description of Artificial Sequence: Synthetic oligonucleotide
  Target: LAMA2; (+) strand; PAM type: YTN; PAM sequence: TTG
ttctacaaactttttaatat

SEQ ID NO: 329745 - DNA, 20 bp, Artificial Sequence
  Description of Artificial Sequence: Synthetic oligonucleotide
  Target: LAMA2; (+) strand; PAM type: YTN; PAM sequence: TTC
tacaaactttttaatatttg

SEQ ID NO: 329746 - DNA, 20 bp, Artificial Sequence
  Description of Artificial Sequence: Synthetic oligonucleotide
  Target: LAMA2; (+) strand; PAM type: YTN; PAM sequence: CTA
caaactttttaatatttgat

SEQ ID NO: 329747 - DNA, 20 bp, Artificial Sequence
  Description of Artificial Sequence: Synthetic oligonucleotide
  Target: LAMA2; (+) strand; PAM type: YTN; PAM sequence: CTT
tttaatatttgatgttgtca

SEQ ID NO: 329748 - DNA, 20 bp, Artificial Sequence
  Description of Artificial Sequence: Synthetic oligonucleotide
  Target: LAMA2; (+) strand; PAM type: YTN; PAM sequence: TTT
ttaatatttgatgttgtcaa

SEQ ID NO: 329749 - DNA, 20 bp, Artificial Sequence
  Description of Artificial Sequence: Synthetic oligonucleotide
  Target: LAMA2; (+) strand; PAM type: YTN; PAM sequence: TTT
taatatttgatgttgtcaat

SEQ ID NO: 329750 - DNA, 20 bp, Artificial Sequence
  Description of Artificial Sequence: Synthetic oligonucleotide
  Target: LAMA2; (+) strand; PAM type: YTN; PAM sequence: TTT
aatatttgatgttgtcaatc

SEQ ID NO: 329751 - DNA, 20 bp, Artificial Sequence
  Description of Artificial Sequence: Synthetic oligonucleotide
  Target: LAMA2; (+) strand; PAM type: YTN; PAM sequence: TTA
atatttgatgttgtcaatct

SEQ ID NO: 329752 - DNA, 20 bp, Artificial Sequence
  Description of Artificial Sequence: Synthetic oligonucleotide
  Target: LAMA2; (+) strand; PAM type: YTN; PAM sequence: TTT
gatgttgtcaatctttttaa

SEQ ID NO: 329753 - DNA, 20 bp, Artificial Sequence
  Description of Artificial Sequence: Synthetic oligonucleotide
  Target: LAMA2; (+) strand; PAM type: YTN; PAM sequence: TTG
atgttgtcaatctttttaat

SEQ ID NO: 329754 - DNA, 20 bp, Artificial Sequence
  Description of Artificial Sequence: Synthetic oligonucleotide
  Target: LAMA2; (+) strand; PAM type: YTN; PAM sequence: TTG
tcaatctttttaatataatg

SEQ ID NO: 329755 - DNA, 20 bp, Artificial Sequence
  Description of Artificial Sequence: Synthetic oligonucleotide
  Target: LAMA2; (+) strand; PAM type: YTN; PAM sequence: CTT
tttaatataatgccatttaa

SEQ ID NO: 329756 - DNA, 20 bp, Artificial Sequence
  Description of Artificial Sequence: Synthetic oligonucleotide
  Target: LAMA2; (+) strand; PAM type: YTN; PAM sequence: TTT
ttaatataatgccatttaat

SEQ ID NO: 329757 - DNA, 20 bp, Artificial Sequence
  Description of Artificial Sequence: Synthetic oligonucleotide
  Target: LAMA2; (+) strand; PAM type: YTN; PAM sequence: TTT
taatataatgccatttaatc

SEQ ID NO: 329758 - DNA, 20 bp, Artificial Sequence
  Description of Artificial Sequence: Synthetic oligonucleotide
  Target: LAMA2; (+) strand; PAM type: YTN; PAM sequence: TTT
aatataatgccatttaatct

SEQ ID NO: 329759 - DNA, 20 bp, Artificial Sequence
  Description of Artificial Sequence: Synthetic oligonucleotide
  Target: LAMA2; (+) strand; PAM type: YTN; PAM sequence: TTA
atataatgccatttaatcta

SEQ ID NO: 329760 - DNA, 20 bp, Artificial Sequence
  Description of Artificial Sequence: Synthetic oligonucleotide
  Target: LAMA2; (+) strand; PAM type: YTN; PAM sequence: TTT
aatctaaaacatgagaactt

SEQ ID NO: 329761 - DNA, 20 bp, Artificial Sequence
  Description of Artificial Sequence: Synthetic oligonucleotide
  Target: LAMA2; (+) strand; PAM type: YTN; PAM sequence: TTA
atctaaaacatgagaacttt

SEQ ID NO: 329762 - DNA, 20 bp, Artificial Sequence
  Description of Artificial Sequence: Synthetic oligonucleotide
  Target: LAMA2; (+) strand; PAM type: YTN; PAM sequence: CTA
aaacatgagaactttgtcaa

SEQ ID NO: 329763 - DNA, 20 bp, Artificial Sequence
  Description of Artificial Sequence: Synthetic oligonucleotide
  Target: LAMA2; (+) strand; PAM type: YTN; PAM sequence: CTT
tgtcaatatataggtccagt

SEQ ID NO: 329764 - DNA, 20 bp, Artificial Sequence
  Description of Artificial Sequence: Synthetic oligonucleotide
  Target: LAMA2; (+) strand; PAM type: YTN; PAM sequence: TTT
gtcaatatataggtccagtt

SEQ ID NO: 329765 - DNA, 20 bp, Artificial Sequence
  Description of Artificial Sequence: Synthetic oligonucleotide
  Target: LAMA2; (+) strand; PAM type: YTN; PAM sequence: TTG
tcaatatataggtccagtta

SEQ ID NO: 329766 - DNA, 20 bp, Artificial Sequence
  Description of Artificial Sequence: Synthetic oligonucleotide
  Target: LAMA2; (+) strand; PAM type: YTN; PAM sequence: TTA
ctgtgatctctcacccacca

SEQ ID NO: 329767 - DNA, 20 bp, Artificial Sequence
  Description of Artificial Sequence: Synthetic oligonucleotide
  Target: LAMA2; (+) strand; PAM type: YTN; PAM sequence: CTG
tgatctctcacccaccattt

SEQ ID NO: 329768 - DNA, 20 bp, Artificial Sequence
  Description of Artificial Sequence: Synthetic oligonucleotide
  Target: LAMA2; (+) strand; PAM type: YTN; PAM sequence: CTC
tcacccaccatttctttatt

SEQ ID NO: 329769 - DNA, 20 bp, Artificial Sequence
  Description of Artificial Sequence: Synthetic oligonucleotide
  Target: LAMA2; (+) strand; PAM type: YTN; PAM sequence: CTC
acccaccatttctttattat

SEQ ID NO: 329770 - DNA, 20 bp, Artificial Sequence
  Description of Artificial Sequence: Synthetic oligonucleotide
  Target: LAMA2; (+) strand; PAM type: YTN; PAM sequence: TTT
ctttattatagttgtcatat

SEQ ID NO: 329771 - DNA, 20 bp, Artificial Sequence
  Description of Artificial Sequence: Synthetic oligonucleotide
  Target: LAMA2; (+) strand; PAM type: YTN; PAM sequence: TTC
tttattatagttgtcatata

SEQ ID NO: 329772 - DNA, 20 bp, Artificial Sequence
  Description of Artificial Sequence: Synthetic oligonucleotide
  Target: LAMA2; (+) strand; PAM type: YTN; PAM sequence: CTT
tattatagttgtcatatata

SEQ ID NO: 329773 - DNA, 20 bp, Artificial Sequence
  Description of Artificial Sequence: Synthetic oligonucleotide
  Target: LAMA2; (+) strand; PAM type: YTN; PAM sequence: TTT
attatagttgtcatatatat

SEQ ID NO: 329774 - DNA, 20 bp, Artificial Sequence
  Description of Artificial Sequence: Synthetic oligonucleotide
  Target: LAMA2; (+) strand; PAM type: YTN; PAM sequence: TTA
ttatagttgtcatatatatt

SEQ ID NO: 329775 - DNA, 20 bp, Artificial Sequence
  Description of Artificial Sequence: Synthetic oligonucleotide
  Target: LAMA2; (+) strand; PAM type: YTN; PAM sequence: TTA
tagttgtcatatatattcta

SEQ ID NO: 329776 - DNA, 20 bp, Artificial Sequence
  Description of Artificial Sequence: Synthetic oligonucleotide
  Target: LAMA2; (+) strand; PAM type: YTN; PAM sequence: TTG
tcatatatattctatttaca

SEQ ID NO: 329777 - DNA, 20 bp, Artificial Sequence
  Description of Artificial Sequence: Synthetic oligonucleotide
  Target: LAMA2; (+) strand; PAM type: YTN; PAM sequence: TTC
tatttacaaacatatgcaat

SEQ ID NO: 329778 - DNA, 20 bp, Artificial Sequence
  Description of Artificial Sequence: Synthetic oligonucleotide
  Target: LAMA2; (+) strand; PAM type: YTN; PAM sequence: CTA
tttacaaacatatgcaatga

SEQ ID NO: 329779 - DNA, 20 bp, Artificial Sequence
  Description of Artificial Sequence: Synthetic oligonucleotide
  Target: LAMA2; (+) strand; PAM type: YTN; PAM sequence: TTT
acaaacatatgcaatgatgt

SEQ ID NO: 329780 - DNA, 20 bp, Artificial Sequence
  Description of Artificial Sequence: Synthetic oligonucleotide
  Target: LAMA2; (+) strand; PAM type: YTN; PAM sequence: TTA
caaacatatgcaatgatgtg

SEQ ID NO: 329781 - DNA, 20 bp, Artificial Sequence
  Description of Artificial Sequence: Synthetic oligonucleotide
  Target: LAMA2; (+) strand; PAM type: YTN; PAM sequence: TTT
tttgccttaaatattaatat

SEQ ID NO: 329782 - DNA, 20 bp, Artificial Sequence
  Description of Artificial Sequence: Synthetic oligonucleotide
  Target: LAMA2; (+) strand; PAM type: YTN; PAM sequence: TTT
ttgccttaaatattaatatg

SEQ ID NO: 329783 - DNA, 20 bp, Artificial Sequence
  Description of Artificial Sequence: Synthetic oligonucleotide
  Target: LAMA2; (+) strand; PAM type: YTN; PAM sequence: TTT
tgccttaaatattaatatgc

SEQ ID NO: 329784 - DNA, 20 bp, Artificial Sequence
  Description of Artificial Sequence: Synthetic oligonucleotide
  Target: LAMA2; (+) strand; PAM type: YTN; PAM sequence: TTT
gccttaaatattaatatgca

SEQ ID NO: 329785 - DNA, 20 bp, Artificial Sequence
  Description of Artificial Sequence: Synthetic oligonucleotide
  Target: LAMA2; (+) strand; PAM type: YTN; PAM sequence: TTG
ccttaaatattaatatgcat

SEQ ID NO: 329786 - DNA, 20 bp, Artificial Sequence
  Description of Artificial Sequence: Synthetic oligonucleotide
  Target: LAMA2; (+) strand; PAM type: YTN; PAM sequence: CTT
aaatattaatatgcatttaa

SEQ ID NO: 329787 - DNA, 20 bp, Artificial Sequence
  Description of Artificial Sequence: Synthetic oligonucleotide
  Target: LAMA2; (+) strand; PAM type: YTN; PAM sequence: TTA
aatattaatatgcatttaaa

SEQ ID NO: 329788 - DNA, 20 bp, Artificial Sequence
  Description of Artificial Sequence: Synthetic oligonucleotide
  Target: LAMA2; (+) strand; PAM type: YTN; PAM sequence: TTA
atatgcatttaaaagaattt

SEQ ID NO: 329789 - DNA, 20 bp, Artificial Sequence
  Description of Artificial Sequence: Synthetic oligonucleotide
  Target: LAMA2; (+) strand; PAM type: YTN; PAM sequence: TTT
aaaagaatttaacagggaaa

SEQ ID NO: 329790 - DNA, 20 bp, Artificial Sequence
  Description of Artificial Sequence: Synthetic oligonucleotide
  Target: LAMA2; (+) strand; PAM type: YTN; PAM sequence: TTA
aaagaatttaacagggaaaa

SEQ ID NO: 329791 - DNA, 20 bp, Artificial Sequence
  Description of Artificial Sequence: Synthetic oligonucleotide
  Target: LAMA2; (+) strand; PAM type: YTN; PAM sequence: TTT
aacagggaaaaagtctattg

SEQ ID NO: 329792 - DNA, 20 bp, Artificial Sequence
  Description of Artificial Sequence: Synthetic oligonucleotide
  Target: LAMA2; (+) strand; PAM type: YTN; PAM sequence: TTA
acagggaaaaagtctattga

SEQ ID NO: 329793 - DNA, 20 bp, Artificial Sequence
  Description of Artificial Sequence: Synthetic oligonucleotide
  Target: LAMA2; (+) strand; PAM type: YTN; PAM sequence: CTA
ttgacatcaaatgtacttat

SEQ ID NO: 329794 - DNA, 20 bp, Artificial Sequence
  Description of Artificial Sequence: Synthetic oligonucleotide
  Target: LAMA2; (+) strand; PAM type: YTN; PAM sequence: TTG
acatcaaatgtacttatact

SEQ ID NO: 329795 - DNA, 20 bp, Artificial Sequence
  Description of Artificial Sequence: Synthetic oligonucleotide
  Target: LAMA2; (+) strand; PAM type: YTN; PAM sequence: CTT
atactgtcttttatcatctc

SEQ ID NO: 329796 - DNA, 20 bp, Artificial Sequence
  Description of Artificial Sequence: Synthetic oligonucleotide
  Target: LAMA2; (+) strand; PAM type: YTN; PAM sequence: TTA
tactgtcttttatcatctcc

SEQ ID NO: 329797 - DNA, 20 bp, Artificial Sequence
  Description of Artificial Sequence: Synthetic oligonucleotide
  Target: LAMA2; (+) strand; PAM type: YTN; PAM sequence: CTG
tcttttatcatctccaattt

SEQ ID NO: 329798 - DNA, 20 bp, Artificial Sequence
  Description of Artificial Sequence: Synthetic oligonucleotide
  Target: LAMA2; (+) strand; PAM type: YTN; PAM sequence: CTT
ttatcatctccaattttcta

SEQ ID NO: 329799 - DNA, 20 bp, Artificial Sequence
  Description of Artificial Sequence: Synthetic oligonucleotide
  Target: LAMA2; (+) strand; PAM type: YTN; PAM sequence: TTT
tatcatctccaattttctat

SEQ ID NO: 329800 - DNA, 20 bp, Artificial Sequence
  Description of Artificial Sequence: Synthetic oligonucleotide
  Target: LAMA2; (+) strand; PAM type: YTN; PAM sequence: TTT
atcatctccaattttctatt

SEQ ID NO: 329801 - DNA, 20 bp, Artificial Sequence
  Description of Artificial Sequence: Synthetic oligonucleotide
  Target: LAMA2; (+) strand; PAM type: YTN; PAM sequence: TTA
tcatctccaattttctatta

SEQ ID NO: 329802 - DNA, 20 bp, Artificial Sequence
  Description of Artificial Sequence: Synthetic oligonucleotide
  Target: LAMA2; (+) strand; PAM type: YTN; PAM sequence: CTC
caattttctattaatcacat

SEQ ID NO: 329803 - DNA, 20 bp, Artificial Sequence
  Description of Artificial Sequence: Synthetic oligonucleotide
  Target: LAMA2; (+) strand; PAM type: YTN; PAM sequence: TTT
tctattaatcacatgtagtg

SEQ ID NO: 329804 - DNA, 20 bp, Artificial Sequence
  Description of Artificial Sequence: Synthetic oligonucleotide
  Target: LAMA2; (+) strand; PAM type: YTN; PAM sequence: TTT
ctattaatcacatgtagtgg

SEQ ID NO: 329805 - DNA, 20 bp, Artificial Sequence
  Description of Artificial Sequence: Synthetic oligonucleotide
  Target: LAMA2; (+) strand; PAM type: YTN; PAM sequence: TTC
tattaatcacatgtagtgga

SEQ ID NO: 329806 - DNA, 20 bp, Artificial Sequence
  Description of Artificial Sequence: Synthetic oligonucleotide
  Target: LAMA2; (+) strand; PAM type: YTN; PAM sequence: CTA
ttaatcacatgtagtggatt

SEQ ID NO: 329807 - DNA, 20 bp, Artificial Sequence
  Description of Artificial Sequence: Synthetic oligonucleotide
  Target: LAMA2; (+) strand; PAM type: YTN; PAM sequence: TTA
atcacatgtagtggattttt

SEQ ID NO: 329808 - DNA, 20 bp, Artificial Sequence
  Description of Artificial Sequence: Synthetic oligonucleotide
  Target: LAMA2; (+) strand; PAM type: YTN; PAM sequence: TTT
ttttttcattctagatactg

SEQ ID NO: 329809 - DNA, 20 bp, Artificial Sequence
  Description of Artificial Sequence: Synthetic oligonucleotide
  Target: LAMA2; (+) strand; PAM type: YTN; PAM sequence: TTT
tttttcattctagatactgt

SEQ ID NO: 329810 - DNA, 20 bp, Artificial Sequence
  Description of Artificial Sequence: Synthetic oligonucleotide
  Target: LAMA2; (+) strand; PAM type: YTN; PAM sequence: TTT
ttttcattctagatactgtg

SEQ ID NO: 329811 - DNA, 20 bp, Artificial Sequence
  Description of Artificial Sequence: Synthetic oligonucleotide
  Target: LAMA2; (+) strand; PAM type: YTN; PAM sequence: TTT
tttcattctagatactgtgt

SEQ ID NO: 329812 - DNA, 20 bp, Artificial Sequence
  Description of Artificial Sequence: Synthetic oligonucleotide
  Target: LAMA2; (+) strand; PAM type: YTN; PAM sequence: TTT
ttcattctagatactgtgtt

SEQ ID NO: 329813 - DNA, 20 bp, Artificial Sequence
  Description of Artificial Sequence: Synthetic oligonucleotide
  Target: LAMA2; (+) strand; PAM type: YTN; PAM sequence: TTT
tcattctagatactgtgtta

SEQ ID NO: 329814 - DNA, 20 bp, Artificial Sequence
  Description of Artificial Sequence: Synthetic oligonucleotide
  Target: LAMA2; (+) strand; PAM type: YTN; PAM sequence: TTT
cattctagatactgtgttac

SEQ ID NO: 329815 - DNA, 20 bp, Artificial Sequence
  Description of Artificial Sequence: Synthetic oligonucleotide
  Target: LAMA2; (+) strand; PAM type: YTN; PAM sequence: TTC
attctagatactgtgttaca

SEQ ID NO: 329816 - DNA, 20 bp, Artificial Sequence
  Description of Artificial Sequence: Synthetic oligonucleotide
  Target: LAMA2; (+) strand; PAM type: YTN; PAM sequence: TTC
tagatactgtgttacatttt

SEQ ID NO: 329817 - DNA, 20 bp, Artificial Sequence
  Description of Artificial Sequence: Synthetic oligonucleotide
  Target: LAMA2; (+) strand; PAM type: YTN; PAM sequence: CTA
gatactgtgttacatttttc

SEQ ID NO: 329818 - DNA, 20 bp, Artificial Sequence
  Description of Artificial Sequence: Synthetic oligonucleotide
  Target: LAMA2; (+) strand; PAM type: YTN; PAM sequence: CTG
tgttacatttttcagtcaca

SEQ ID NO: 329819 - DNA, 20 bp, Artificial Sequence
  Description of Artificial Sequence: Synthetic oligonucleotide
  Target: LAMA2; (+) strand; PAM type: YTN; PAM sequence: TTA
catttttcagtcacagaatt

SEQ ID NO: 329820 - DNA, 20 bp, Artificial Sequence
  Description of Artificial Sequence: Synthetic oligonucleotide
  Target: LAMA2; (+) strand; PAM type: YTN; PAM sequence: TTT
ttcagtcacagaatttatat

SEQ ID NO: 329821 - DNA, 20 bp, Artificial Sequence
  Description of Artificial Sequence: Synthetic oligonucleotide
  Target: LAMA2; (+) strand; PAM type: YTN; PAM sequence: TTT
tcagtcacagaatttatatt

SEQ ID NO: 329822 - DNA, 20 bp, Artificial Sequence
  Description of Artificial Sequence: Synthetic oligonucleotide
  Target: LAMA2; (+) strand; PAM type: YTN; PAM sequence: TTT
cagtcacagaatttatattc

SEQ ID NO: 329823 - DNA, 20 bp, Artificial Sequence
  Description of Artificial Sequence: Synthetic oligonucleotide
  Target: LAMA2; (+) strand; PAM type: YTN; PAM sequence: TTC
agtcacagaatttatattca

SEQ ID NO: 329824 - DNA, 20 bp, Artificial Sequence
  Description of Artificial Sequence: Synthetic oligonucleotide
  Target: LAMA2; (+) strand; PAM type: YTN; PAM sequence: TTT
atattcaatattttttgttg

SEQ ID NO: 329825 - DNA, 20 bp, Artificial Sequence
  Description of Artificial Sequence: Synthetic oligonucleotide
  Target: LAMA2; (+) strand; PAM type: YTN; PAM sequence: TTA
tattcaatattttttgttgt

SEQ ID NO: 329826 - DNA, 20 bp, Artificial Sequence
  Description of Artificial Sequence: Synthetic oligonucleotide
  Target: LAMA2; (+) strand; PAM type: YTN; PAM sequence: TTC
aatattttttgttgttacca

SEQ ID NO: 329827 - DNA, 20 bp, Artificial Sequence
  Description of Artificial Sequence: Synthetic oligonucleotide
  Target: LAMA2; (+) strand; PAM type: YTN; PAM sequence: TTT
tttgttgttaccatttcttt

SEQ ID NO: 329828 - DNA, 20 bp, Artificial Sequence
  Description of Artificial Sequence: Synthetic oligonucleotide
  Target: LAMA2; (+) strand; PAM type: YTN; PAM sequence: TTT
ttgttgttaccatttctttt

SEQ ID NO: 329829 - DNA, 20 bp, Artificial Sequence
  Description of Artificial Sequence: Synthetic oligonucleotide
  Target: LAMA2; (+) strand; PAM type: YTN; PAM sequence: TTT
tgttgttaccatttcttttt

SEQ ID NO: 329830 - DNA, 20 bp, Artificial Sequence
  Description of Artificial Sequence: Synthetic oligonucleotide
  Target: LAMA2; (+) strand; PAM type: YTN; PAM sequence: TTT
gttgttaccatttctttttt

SEQ ID NO: 329831 - DNA, 20 bp, Artificial Sequence
  Description of Artificial Sequence: Synthetic oligonucleotide
  Target: LAMA2; (+) strand; PAM type: YTN; PAM sequence: TTG
ttgttaccatttcttttttg

SEQ ID NO: 329832 - DNA, 20 bp, Artificial Sequence
  Description of Artificial Sequence: Synthetic oligonucleotide
  Target: LAMA2; (+) strand; PAM type: YTN; PAM sequence: TTG
ttaccatttcttttttgcta

SEQ ID NO: 329833 - DNA, 20 bp, Artificial Sequence
  Description of Artificial Sequence: Synthetic oligonucleotide
  Target: LAMA2; (+) strand; PAM type: YTN; PAM sequence: TTA
ccatttcttttttgctacaa

SEQ ID NO: 329834 - DNA, 20 bp, Artificial Sequence
  Description of Artificial Sequence: Synthetic oligonucleotide
  Target: LAMA2; (+) strand; PAM type: YTN; PAM sequence: TTT
cttttttgctacaagaattt

SEQ ID NO: 329835 - DNA, 20 bp, Artificial Sequence
  Description of Artificial Sequence: Synthetic oligonucleotide
  Target: LAMA2; (+) strand; PAM type: YTN; PAM sequence: TTC
ttttttgctacaagaatttt

SEQ ID NO: 329836 - DNA, 20 bp, Artificial Sequence
  Description of Artificial Sequence: Synthetic oligonucleotide
  Target: LAMA2; (+) strand; PAM type: YTN; PAM sequence: CTT
ttttgctacaagaattttcg

SEQ ID NO: 329837 - DNA, 20 bp, Artificial Sequence
  Description of Artificial Sequence: Synthetic oligonucleotide
  Target: LAMA2; (+) strand; PAM type: YTN; PAM sequence: TTT
tttgctacaagaattttcgt

SEQ ID NO: 329838 - DNA, 20 bp, Artificial Sequence
  Description of Artificial Sequence: Synthetic oligonucleotide
  Target: LAMA2; (+) strand; PAM type: YTN; PAM sequence: TTT
ttgctacaagaattttcgta

SEQ ID NO: 329839 - DNA, 20 bp, Artificial Sequence
  Description of Artificial Sequence: Synthetic oligonucleotide
  Target: LAMA2; (+) strand; PAM type: YTN; PAM sequence: TTT
tgctacaagaattttcgtat

SEQ ID NO: 329840 - DNA, 20 bp, Artificial Sequence
  Description of Artificial Sequence: Synthetic oligonucleotide
  Target: LAMA2; (+) strand; PAM type: YTN; PAM sequence: TTT
gctacaagaattttcgtatg

SEQ ID NO: 329841 - DNA, 20 bp, Artificial Sequence
  Description of Artificial Sequence: Synthetic oligonucleotide
  Target: LAMA2; (+) strand; PAM type: YTN; PAM sequence: TTG
ctacaagaattttcgtatgt

SEQ ID NO: 329842 - DNA, 20 bp, Artificial Sequence
  Description of Artificial Sequence: Synthetic oligonucleotide
  Target: LAMA2; (+) strand; PAM type: YTN; PAM sequence: CTA
caagaattttcgtatgtgtg

SEQ ID NO: 329843 - DNA, 20 bp, Artificial Sequence
  Description of Artificial Sequence: Synthetic oligonucleotide
  Target: LAMA2; (+) strand; PAM type: YTN; PAM sequence: TTT
tcgtatgtgtgtatgtcctt

SEQ ID NO: 329844 - DNA, 20 bp, Artificial Sequence
  Description of Artificial Sequence: Synthetic oligonucleotide
  Target: LAMA2; (+) strand; PAM type: YTN; PAM sequence: TTT
cgtatgtgtgtatgtccttg

SEQ ID NO: 329845 - DNA, 20 bp, Artificial Sequence
  Description of Artificial Sequence: Synthetic oligonucleotide
  Target: LAMA2; (+) strand; PAM type: YTN; PAM sequence: TTC
gtatgtgtgtatgtccttga

SEQ ID NO: 329846 - DNA, 20 bp, Artificial Sequence
  Description of Artificial Sequence: Synthetic oligonucleotide
  Target: LAMA2; (+) strand; PAM type: YTN; PAM sequence: CTT
gagtatagtttaaaagctgc

SEQ ID NO: 329847 - DNA, 20 bp, Artificial Sequence
  Description of Artificial Sequence: Synthetic oligonucleotide
  Target: LAMA2; (+) strand; PAM type: YTN; PAM sequence: TTG
agtatagtttaaaagctgct

SEQ ID NO: 329848 - DNA, 20 bp, Artificial Sequence
  Description of Artificial Sequence: Synthetic oligonucleotide
  Target: LAMA2; (+) strand; PAM type: YTN; PAM sequence: TTT
aaaagctgcttgaagatgct

SEQ ID NO: 329849 - DNA, 20 bp, Artificial Sequence
  Description of Artificial Sequence: Synthetic oligonucleotide
  Target: LAMA2; (+) strand; PAM type: YTN; PAM sequence: TTA
aaagctgcttgaagatgctt

SEQ ID NO: 329850 - DNA, 20 bp, Artificial Sequence
  Description of Artificial Sequence: Synthetic oligonucleotide
  Target: LAMA2; (+) strand; PAM type: YTN; PAM sequence: CTG
cttgaagatgcttgtttgct

SEQ ID NO: 329851 - DNA, 20 bp, Artificial Sequence
  Description of Artificial Sequence: Synthetic oligonucleotide
  Target: LAMA2; (+) strand; PAM type: YTN; PAM sequence: CTT
gaagatgcttgtttgcttat

SEQ ID NO: 329852 - DNA, 20 bp, Artificial Sequence
  Description of Artificial Sequence: Synthetic oligonucleotide
  Target: LAMA2; (+) strand; PAM type: YTN; PAM sequence: TTG
aagatgcttgtttgcttatt

SEQ ID NO: 329853 - DNA, 20 bp, Artificial Sequence
  Description of Artificial Sequence: Synthetic oligonucleotide
  Target: LAMA2; (+) strand; PAM type: YTN; PAM sequence: CTT
gtttgcttattccaacatct

SEQ ID NO: 329854 - DNA, 20 bp, Artificial Sequence
  Description of Artificial Sequence: Synthetic oligonucleotide
  Target: LAMA2; (+) strand; PAM type: YTN; PAM sequence: TTG
tttgcttattccaacatctg

SEQ ID NO: 329855 - DNA, 20 bp, Artificial Sequence
  Description of Artificial Sequence: Synthetic oligonucleotide
  Target: LAMA2; (+) strand; PAM type: YTN; PAM sequence: TTT
gcttattccaacatctggtt

SEQ ID NO: 329856 - DNA, 20 bp, Artificial Sequence
  Description of Artificial Sequence: Synthetic oligonucleotide
  Target: LAMA2; (+) strand; PAM type: YTN; PAM sequence: TTG
cttattccaacatctggttg

SEQ ID NO: 329857 - DNA, 20 bp, Artificial Sequence
  Description of Artificial Sequence: Synthetic oligonucleotide
  Target: LAMA2; (+) strand; PAM type: YTN; PAM sequence: CTT
attccaacatctggttgatc

SEQ ID NO: 329858 - DNA, 20 bp, Artificial Sequence
  Description of Artificial Sequence: Synthetic oligonucleotide
  Target: LAMA2; (+) strand; PAM type: YTN; PAM sequence: TTA
ttccaacatctggttgatct

SEQ ID NO: 329859 - DNA, 20 bp, Artificial Sequence
  Description of Artificial Sequence: Synthetic oligonucleotide
  Target: LAMA2; (+) strand; PAM type: YTN; PAM sequence: TTC
caacatctggttgatctcag

SEQ ID NO: 329860 - DNA, 20 bp, Artificial Sequence
  Description of Artificial Sequence: Synthetic oligonucleotide
  Target: LAMA2; (+) strand; PAM type: YTN; PAM sequence: CTG
gttgatctcagtacaatctc

SEQ ID NO: 329861 - DNA, 20 bp, Artificial Sequence
  Description of Artificial Sequence: Synthetic oligonucleotide
  Target: LAMA2; (+) strand; PAM type: YTN; PAM sequence: TTG
atctcagtacaatctccgtt

SEQ ID NO: 329862 - DNA, 20 bp, Artificial Sequence
  Description of Artificial Sequence: Synthetic oligonucleotide
  Target: LAMA2; (+) strand; PAM type: YTN; PAM sequence: CTC
agtacaatctccgttgattg

SEQ ID NO: 329863 - DNA, 20 bp, Artificial Sequence
  Description of Artificial Sequence: Synthetic oligonucleotide
  Target: LAMA2; (+) strand; PAM type: YTN; PAM sequence: CTC
cgttgattgctttttctcat

SEQ ID NO: 329864 - DNA, 20 bp, Artificial Sequence
  Description of Artificial Sequence: Synthetic oligonucleotide
  Target: LAMA2; (+) strand; PAM type: YTN; PAM sequence: TTG
attgctttttctcataagta

SEQ ID NO: 329865 - DNA, 20 bp, Artificial Sequence
  Description of Artificial Sequence: Synthetic oligonucleotide
  Target: LAMA2; (+) strand; PAM type: YTN; PAM sequence: TTG
ctttttctcataagtatgag

SEQ ID NO: 329866 - DNA, 20 bp, Artificial Sequence
  Description of Artificial Sequence: Synthetic oligonucleotide
  Target: LAMA2; (+) strand; PAM type: YTN; PAM sequence: CTT
tttctcataagtatgagtta

SEQ ID NO: 329867 - DNA, 20 bp, Artificial Sequence
  Description of Artificial Sequence: Synthetic oligonucleotide
  Target: LAMA2; (+) strand; PAM type: YTN; PAM sequence: TTT
ttctcataagtatgagttac

SEQ ID NO: 329868 - DNA, 20 bp, Artificial Sequence
  Description of Artificial Sequence: Synthetic oligonucleotide
  Target: LAMA2; (+) strand; PAM type: YTN; PAM sequence: TTT
tctcataagtatgagttact

SEQ ID NO: 329869 - DNA, 20 bp, Artificial Sequence
  Description of Artificial Sequence: Synthetic oligonucleotide
  Target: LAMA2; (+) strand; PAM type: YTN; PAM sequence: TTT
ctcataagtatgagttactt

SEQ ID NO: 329870 - DNA, 20 bp, Artificial Sequence
  Description of Artificial Sequence: Synthetic oligonucleotide
  Target: LAMA2; (+) strand; PAM type: YTN; PAM sequence: TTC
tcataagtatgagttacttt

SEQ ID NO: 329871 - DNA, 20 bp, Artificial Sequence
  Description of Artificial Sequence: Synthetic oligonucleotide
  Target: LAMA2; (+) strand; PAM type: YTN; PAM sequence: CTC
ataagtatgagttacttttt

SEQ ID NO: 329872 - DNA, 20 bp, Artificial Sequence
  Description of Artificial Sequence: Synthetic oligonucleotide
  Target: LAMA2; (+) strand; PAM type: YTN; PAM sequence: TTA
ctttttattgcttccttgta

SEQ ID NO: 329873 - DNA, 20 bp, Artificial Sequence
  Description of Artificial Sequence: Synthetic oligonucleotide
  Target: LAMA2; (+) strand; PAM type: YTN; PAM sequence: CTT
tttattgcttccttgtatgt

SEQ ID NO: 329874 - DNA, 20 bp, Artificial Sequence
  Description of Artificial Sequence: Synthetic oligonucleotide
  Target: LAMA2; (+) strand; PAM type: YTN; PAM sequence: TTT
ttattgcttccttgtatgtc

SEQ ID NO: 329875 - DNA, 20 bp, Artificial Sequence
  Description of Artificial Sequence: Synthetic oligonucleotide
  Target: LAMA2; (+) strand; PAM type: YTN; PAM sequence: TTT
tattgcttccttgtatgtct

SEQ ID NO: 329876 - DNA, 20 bp, Artificial Sequence
  Description of Artificial Sequence: Synthetic oligonucleotide
  Target: LAMA2; (+) strand; PAM type: YTN; PAM sequence: TTT
attgcttccttgtatgtcta

SEQ ID NO: 329877 - DNA, 20 bp, Artificial Sequence
  Description of Artificial Sequence: Synthetic oligonucleotide
  Target: LAMA2; (+) strand; PAM type: YTN; PAM sequence: TTA
ttgcttccttgtatgtctag

SEQ ID NO: 329878 - DNA, 20 bp, Artificial Sequence
  Description of Artificial Sequence: Synthetic oligonucleotide
  Target: LAMA2; (+) strand; PAM type: YTN; PAM sequence: TTG
cttccttgtatgtctagtat

SEQ ID NO: 329879 - DNA, 20 bp, Artificial Sequence
  Description of Artificial Sequence: Synthetic oligonucleotide
  Target: LAMA2; (+) strand; PAM type: YTN; PAM sequence: CTT
ccttgtatgtctagtatttt

SEQ ID NO: 329880 - DNA, 20 bp, Artificial Sequence
  Description of Artificial Sequence: Synthetic oligonucleotide
  Target: LAMA2; (+) strand; PAM type: YTN; PAM sequence: TTC
cttgtatgtctagtattttt

SEQ ID NO: 329881 - DNA, 20 bp, Artificial Sequence
  Description of Artificial Sequence: Synthetic oligonucleotide
  Target: LAMA2; (+) strand; PAM type: YTN; PAM sequence: CTT
gtatgtctagtatttttttt

SEQ ID NO: 329882 - DNA, 20 bp, Artificial Sequence
  Description of Artificial Sequence: Synthetic oligonucleotide
  Target: LAMA2; (+) strand; PAM type: YTN; PAM sequence: TTG
tatgtctagtattttttttt

SEQ ID NO: 329883 - DNA, 20 bp, Artificial Sequence
  Description of Artificial Sequence: Synthetic oligonucleotide
  Target: LAMA2; (+) strand; PAM type: YTN; PAM sequence: CTA
gtatttttttttaattgcaa

SEQ ID NO: 329884 - DNA, 20 bp, Artificial Sequence
  Description of Artificial Sequence: Synthetic oligonucleotide
  Target: LAMA2; (+) strand; PAM type: YTN; PAM sequence: TTT
ttttttaattgcaacctgga

SEQ ID NO: 329885 - DNA, 20 bp, Artificial Sequence
  Description of Artificial Sequence: Synthetic oligonucleotide
  Target: LAMA2; (+) strand; PAM type: YTN; PAM sequence: TTT
tttttaattgcaacctggat

SEQ ID NO: 329886 - DNA, 20 bp, Artificial Sequence
  Description of Artificial Sequence: Synthetic oligonucleotide
  Target: LAMA2; (+) strand; PAM type: YTN; PAM sequence: TTT
ttttaattgcaacctggatg

SEQ ID NO: 329887 - DNA, 20 bp, Artificial Sequence
  Description of Artificial Sequence: Synthetic oligonucleotide
  Target: LAMA2; (+) strand; PAM type: YTN; PAM sequence: TTT
tttaattgcaacctggatgt

SEQ ID NO: 329888 - DNA, 20 bp, Artificial Sequence
  Description of Artificial Sequence: Synthetic oligonucleotide
  Target: LAMA2; (+) strand; PAM type: YTN; PAM sequence: TTT
ttaattgcaacctggatgtc

SEQ ID NO: 329889 - DNA, 20 bp, Artificial Sequence
  Description of Artificial Sequence: Synthetic oligonucleotide
  Target: LAMA2; (+) strand; PAM type: YTN; PAM sequence: TTT
taattgcaacctggatgtca

SEQ ID NO: 329890 - DNA, 20 bp, Artificial Sequence
  Description of Artificial Sequence: Synthetic oligonucleotide
  Target: LAMA2; (+) strand; PAM type: YTN; PAM sequence: TTT
aattgcaacctggatgtcat

SEQ ID NO: 329891 - DNA, 20 bp, Artificial Sequence
  Description of Artificial Sequence: Synthetic oligonucleotide
  Target: LAMA2; (+) strand; PAM type: YTN; PAM sequence: TTA
attgcaacctggatgtcatg

SEQ ID NO: 329892 - DNA, 20 bp, Artificial Sequence
  Description of Artificial Sequence: Synthetic oligonucleotide
  Target: LAMA2; (+) strand; PAM type: YTN; PAM sequence: TTG
caacctggatgtcatgaata

SEQ ID NO: 329893 - DNA, 20 bp, Artificial Sequence
  Description of Artificial Sequence: Synthetic oligonucleotide
  Target: LAMA2; (+) strand; PAM type: YTN; PAM sequence: CTG
gatgtcatgaataatagcac

SEQ ID NO: 329894 - DNA, 20 bp, Artificial Sequence
  Description of Artificial Sequence: Synthetic oligonucleotide
  Target: LAMA2; (+) strand; PAM type: YTN; PAM sequence: TTG
tagaaactctgggttttgtt

SEQ ID NO: 329895 - DNA, 20 bp, Artificial Sequence
  Description of Artificial Sequence: Synthetic oligonucleotide
  Target: LAMA2; (+) strand; PAM type: YTN; PAM sequence: CTC
tgggttttgttatgttcctc

SEQ ID NO: 329896 - DNA, 20 bp, Artificial Sequence
  Description of Artificial Sequence: Synthetic oligonucleotide
  Target: LAMA2; (+) strand; PAM type: YTN; PAM sequence: CTG
ggttttgttatgttcctctg

SEQ ID NO: 329897 - DNA, 20 bp, Artificial Sequence
  Description of Artificial Sequence: Synthetic oligonucleotide
  Target: LAMA2; (+) strand; PAM type: YTN; PAM sequence: TTT
tgttatgttcctctgaagag

SEQ ID NO: 329898 - DNA, 20 bp, Artificial Sequence
  Description of Artificial Sequence: Synthetic oligonucleotide
  Target: LAMA2; (+) strand; PAM type: YTN; PAM sequence: TTT
gttatgttcctctgaagagc

SEQ ID NO: 329899 - DNA, 20 bp, Artificial Sequence
  Description of Artificial Sequence: Synthetic oligonucleotide
  Target: LAMA2; (+) strand; PAM type: YTN; PAM sequence: TTG
ttatgttcctctgaagagca

SEQ ID NO: 329900 - DNA, 20 bp, Artificial Sequence
  Description of Artificial Sequence: Synthetic oligonucleotide
  Target: LAMA2; (+) strand; PAM type: YTN; PAM sequence: TTA
tgttcctctgaagagcactc

SEQ ID NO: 329901 - DNA, 20 bp, Artificial Sequence
  Description of Artificial Sequence: Synthetic oligonucleotide
  Target: LAMA2; (+) strand; PAM type: YTN; PAM sequence: TTC
ctctgaagagcactcaccca

SEQ ID NO: 329902 - DNA, 20 bp, Artificial Sequence
  Description of Artificial Sequence: Synthetic oligonucleotide
  Target: LAMA2; (+) strand; PAM type: YTN; PAM sequence: CTC
tgaagagcactcacccattc

SEQ ID NO: 329903 - DNA, 20 bp, Artificial Sequence
  Description of Artificial Sequence: Synthetic oligonucleotide
  Target: LAMA2; (+) strand; PAM type: YTN; PAM sequence: CTG
aagagcactcacccattctt

SEQ ID NO: 329904 - DNA, 20 bp, Artificial Sequence
  Description of Artificial Sequence: Synthetic oligonucleotide
  Target: LAMA2; (+) strand; PAM type: YTN; PAM sequence: CTC
acccattcttttttgttgtc

SEQ ID NO: 329905 - DNA, 20 bp, Artificial Sequence
  Description of Artificial Sequence: Synthetic oligonucleotide
  Target: LAMA2; (+) strand; PAM type: YTN; PAM sequence: TTC
ttttttgttgtcgcatcagt

SEQ ID NO: 329906 - DNA, 20 bp, Artificial Sequence
  Description of Artificial Sequence: Synthetic oligonucleotide
  Target: LAMA2; (+) strand; PAM type: YTN; PAM sequence: CTT
ttttgttgtcgcatcagttg

SEQ ID NO: 329907 - DNA, 20 bp, Artificial Sequence
  Description of Artificial Sequence: Synthetic oligonucleotide
  Target: LAMA2; (+) strand; PAM type: YTN; PAM sequence: TTT
tttgttgtcgcatcagttgg

SEQ ID NO: 329908 - DNA, 20 bp, Artificial Sequence
  Description of Artificial Sequence: Synthetic oligonucleotide
  Target: LAMA2; (+) strand; PAM type: YTN; PAM sequence: TTT
ttgttgtcgcatcagttggt

SEQ ID NO: 329909 - DNA, 20 bp, Artificial Sequence
  Description of Artificial Sequence: Synthetic oligonucleotide
  Target: LAMA2; (+) strand; PAM type: YTN; PAM sequence: TTT
tgttgtcgcatcagttggtt

SEQ ID NO: 329910 - DNA, 20 bp, Artificial Sequence
  Description of Artificial Sequence: Synthetic oligonucleotide
  Target: LAMA2; (+) strand; PAM type: YTN; PAM sequence: TTT
gttgtcgcatcagttggtta

SEQ ID NO: 329911 - DNA, 20 bp, Artificial Sequence
  Description of Artificial Sequence: Synthetic oligonucleotide
  Target: LAMA2; (+) strand; PAM type: YTN; PAM sequence: TTG
ttgtcgcatcagttggttaa

SEQ ID NO: 329912 - DNA, 20 bp, Artificial Sequence
  Description of Artificial Sequence: Synthetic oligonucleotide
  Target: LAMA2; (+) strand; PAM type: YTN; PAM sequence: TTG
tcgcatcagttggttaactt

SEQ ID NO: 329913 - DNA, 20 bp, Artificial Sequence
  Description of Artificial Sequence: Synthetic oligonucleotide
  Target: LAMA2; (+) strand; PAM type: YTN; PAM sequence: TTG
gttaacttgactgggctcaa

SEQ ID NO: 329914 - DNA, 20 bp, Artificial Sequence
  Description of Artificial Sequence: Synthetic oligonucleotide
  Target: LAMA2; (+) strand; PAM type: YTN; PAM sequence: TTA
acttgactgggctcaaagtc

SEQ ID NO: 329915 - DNA, 20 bp, Artificial Sequence
  Description of Artificial Sequence: Synthetic oligonucleotide
  Target: LAMA2; (+) strand; PAM type: YTN; PAM sequence: CTT
gactgggctcaaagtcccaa

SEQ ID NO: 329916 - DNA, 20 bp, Artificial Sequence
  Description of Artificial Sequence: Synthetic oligonucleotide
  Target: LAMA2; (+) strand; PAM type: YTN; PAM sequence: TTG
actgggctcaaagtcccaac

SEQ ID NO: 329917 - DNA, 20 bp, Artificial Sequence
  Description of Artificial Sequence: Synthetic oligonucleotide
  Target: LAMA2; (+) strand; PAM type: YTN; PAM sequence: CTG
ggctcaaagtcccaactttt

SEQ ID NO: 329918 - DNA, 20 bp, Artificial Sequence
  Description of Artificial Sequence: Synthetic oligonucleotide
  Target: LAMA2; (+) strand; PAM type: YTN; PAM sequence: CTC
aaagtcccaacttttttctt

SEQ ID NO: 329919 - DNA, 20 bp, Artificial Sequence
  Description of Artificial Sequence: Synthetic oligonucleotide
  Target: LAMA2; (+) strand; PAM type: YTN; PAM sequence: CTT
ttttctttcctgtagagtgc

SEQ ID NO: 329920 - DNA, 20 bp, Artificial Sequence
  Description of Artificial Sequence: Synthetic oligonucleotide
  Target: LAMA2; (+) strand; PAM type: YTN; PAM sequence: TTT
tttctttcctgtagagtgca

SEQ ID NO: 329921 - DNA, 20 bp, Artificial Sequence
  Description of Artificial Sequence: Synthetic oligonucleotide
  Target: LAMA2; (+) strand; PAM type: YTN; PAM sequence: TTT
ttctttcctgtagagtgcag

SEQ ID NO: 329922 - DNA, 20 bp, Artificial Sequence
  Description of Artificial Sequence: Synthetic oligonucleotide
  Target: LAMA2; (+) strand; PAM type: YTN; PAM sequence: TTT
tctttcctgtagagtgcaga

SEQ ID NO: 329923 - DNA, 20 bp, Artificial Sequence
  Description of Artificial Sequence: Synthetic oligonucleotide
  Target: LAMA2; (+) strand; PAM type: YTN; PAM sequence: TTT
ctttcctgtagagtgcagaa

SEQ ID NO: 329924 - DNA, 20 bp, Artificial Sequence
  Description of Artificial Sequence: Synthetic oligonucleotide
  Target: LAMA2; (+) strand; PAM type: YTN; PAM sequence: TTC
tttcctgtagagtgcagaac

SEQ ID NO: 329925 - DNA, 20 bp, Artificial Sequence
  Description of Artificial Sequence: Synthetic oligonucleotide
  Target: LAMA2; (+) strand; PAM type: YTN; PAM sequence: CTT
tcctgtagagtgcagaacct

SEQ ID NO: 329926 - DNA, 20 bp, Artificial Sequence
  Description of Artificial Sequence: Synthetic oligonucleotide
  Target: LAMA2; (+) strand; PAM type: YTN; PAM sequence: TTT
cctgtagagtgcagaaccta

SEQ ID NO: 329927 - DNA, 20 bp, Artificial Sequence
  Description of Artificial Sequence: Synthetic oligonucleotide
  Target: LAMA2; (+) strand; PAM type: YTN; PAM sequence: TTC
ctgtagagtgcagaacctaa

SEQ ID NO: 329928 - DNA, 20 bp, Artificial Sequence
  Description of Artificial Sequence: Synthetic oligonucleotide
  Target: LAMA2; (+) strand; PAM type: YTN; PAM sequence: CTG
tagagtgcagaacctaaaat

SEQ ID NO: 329929 - DNA, 20 bp, Artificial Sequence
  Description of Artificial Sequence: Synthetic oligonucleotide
  Target: LAMA2; (+) strand; PAM type: YTN; PAM sequence: CTA
aaatctctgttcagtttttc

SEQ ID NO: 329930 - DNA, 20 bp, Artificial Sequence
  Description of Artificial Sequence: Synthetic oligonucleotide
  Target: LAMA2; (+) strand; PAM type: YTN; PAM sequence: CTC
tgttcagtttttcagcccta

SEQ ID NO: 329931 - DNA, 20 bp, Artificial Sequence
  Description of Artificial Sequence: Synthetic oligonucleotide
  Target: LAMA2; (+) strand; PAM type: YTN; PAM sequence: CTG
ttcagtttttcagccctagc

SEQ ID NO: 329932 - DNA, 20 bp, Artificial Sequence
  Description of Artificial Sequence: Synthetic oligonucleotide
  Target: LAMA2; (+) strand; PAM type: YTN; PAM sequence: TTC
agtttttcagccctagctgg

SEQ ID NO: 329933 - DNA, 20 bp, Artificial Sequence
  Description of Artificial Sequence: Synthetic oligonucleotide
  Target: LAMA2; (+) strand; PAM type: YTN; PAM sequence: TTT
ttcagccctagctgggctac

SEQ ID NO: 329934 - DNA, 20 bp, Artificial Sequence
  Description of Artificial Sequence: Synthetic oligonucleotide
  Target: LAMA2; (+) strand; PAM type: YTN; PAM sequence: TTT
tcagccctagctgggctact

SEQ ID NO: 329935 - DNA, 20 bp, Artificial Sequence
  Description of Artificial Sequence: Synthetic oligonucleotide
  Target: LAMA2; (+) strand; PAM type: YTN; PAM sequence: TTT
cagccctagctgggctactt

SEQ ID NO: 329936 - DNA, 20 bp, Artificial Sequence
  Description of Artificial Sequence: Synthetic oligonucleotide
  Target: LAMA2; (+) strand; PAM type: YTN; PAM sequence: TTC
agccctagctgggctacttg

SEQ ID NO: 329937 - DNA, 20 bp, Artificial Sequence
  Description of Artificial Sequence: Synthetic oligonucleotide
  Target: LAMA2; (+) strand; PAM type: YTN; PAM sequence: CTA
gctgggctacttggaatctg

SEQ ID NO: 329938 - DNA, 20 bp, Artificial Sequence
  Description of Artificial Sequence: Synthetic oligonucleotide
  Target: LAMA2; (+) strand; PAM type: YTN; PAM sequence: CTG
ggctacttggaatctgacta

SEQ ID NO: 329939 - DNA, 20 bp, Artificial Sequence
  Description of Artificial Sequence: Synthetic oligonucleotide
  Target: LAMA2; (+) strand; PAM type: YTN; PAM sequence: CTA
cttggaatctgactagggca

SEQ ID NO: 329940 - DNA, 20 bp, Artificial Sequence
  Description of Artificial Sequence: Synthetic oligonucleotide
  Target: LAMA2; (+) strand; PAM type: YTN; PAM sequence: CTT
ggaatctgactagggcaggt

SEQ ID NO: 329941 - DNA, 20 bp, Artificial Sequence
  Description of Artificial Sequence: Synthetic oligonucleotide
  Target: LAMA2; (+) strand; PAM type: YTN; PAM sequence: TTG
gaatctgactagggcaggtg

SEQ ID NO: 329942 - DNA, 20 bp, Artificial Sequence
  Description of Artificial Sequence: Synthetic oligonucleotide
  Target: LAMA2; (+) strand; PAM type: YTN; PAM sequence: CTG
actagggcaggtgtaggtct

SEQ ID NO: 329943 - DNA, 20 bp, Artificial Sequence
  Description of Artificial Sequence: Synthetic oligonucleotide
  Target: LAMA2; (+) strand; PAM type: YTN; PAM sequence: CTA
gggcaggtgtaggtctggca

SEQ ID NO: 329944 - DNA, 20 bp, Artificial Sequence
  Description of Artificial Sequence: Synthetic oligonucleotide
  Target: LAMA2; (+) strand; PAM type: YTN; PAM sequence: CTG
gcatcagtgagcaatttgga

SEQ ID NO: 329945 - DNA, 20 bp, Artificial Sequence
  Description of Artificial Sequence: Synthetic oligonucleotide
  Target: LAMA2; (+) strand; PAM type: YTN; PAM sequence: TTT
ggacagagtttatgcacaga

SEQ ID NO: 329946 - DNA, 20 bp, Artificial Sequence
  Description of Artificial Sequence: Synthetic oligonucleotide
  Target: LAMA2; (+) strand; PAM type: YTN; PAM sequence: TTG
gacagagtttatgcacagat

SEQ ID NO: 329947 - DNA, 20 bp, Artificial Sequence
  Description of Artificial Sequence: Synthetic oligonucleotide
  Target: LAMA2; (+) strand; PAM type: YTN; PAM sequence: TTT
atgcacagattgaggctccc

SEQ ID NO: 329948 - DNA, 20 bp, Artificial Sequence
  Description of Artificial Sequence: Synthetic oligonucleotide
  Target: LAMA2; (+) strand; PAM type: YTN; PAM sequence: TTA
tgcacagattgaggctccct

SEQ ID NO: 329949 - DNA, 20 bp, Artificial Sequence
  Description of Artificial Sequence: Synthetic oligonucleotide
  Target: LAMA2; (+) strand; PAM type: YTN; PAM sequence: TTG
aggctccctttctgtggacc

SEQ ID NO: 329950 - DNA, 20 bp, Artificial Sequence
  Description of Artificial Sequence: Synthetic oligonucleotide
  Target: LAMA2; (+) strand; PAM type: YTN; PAM sequence: CTC
cctttctgtggacctctctt

SEQ ID NO: 329951 - DNA, 20 bp, Artificial Sequence
  Description of Artificial Sequence: Synthetic oligonucleotide
  Target: LAMA2; (+) strand; PAM type: YTN; PAM sequence: CTT
tctgtggacctctctttaca

SEQ ID NO: 329952 - DNA, 20 bp, Artificial Sequence
  Description of Artificial Sequence: Synthetic oligonucleotide
  Target: LAMA2; (+) strand; PAM type: YTN; PAM sequence: TTT
ctgtggacctctctttacac

SEQ ID NO: 329953 - DNA, 20 bp, Artificial Sequence
  Description of Artificial Sequence: Synthetic oligonucleotide
  Target: LAMA2; (+) strand; PAM type: YTN; PAM sequence: TTC
tgtggacctctctttacacc

SEQ ID NO: 329954 - DNA, 20 bp, Artificial Sequence
  Description of Artificial Sequence: Synthetic oligonucleotide
  Target: LAMA2; (+) strand; PAM type: YTN; PAM sequence: CTG
tggacctctctttacacctg

SEQ ID NO: 329955 - DNA, 20 bp, Artificial Sequence
  Description of Artificial Sequence: Synthetic oligonucleotide
  Target: LAMA2; (+) strand; PAM type: YTN; PAM sequence: CTC
tctttacacctgctgtggct

SEQ ID NO: 329956 - DNA, 20 bp, Artificial Sequence
  Description of Artificial Sequence: Synthetic oligonucleotide
  Target: LAMA2; (+) strand; PAM type: YTN; PAM sequence: CTC
tttacacctgctgtggctat

SEQ ID NO: 329957 - DNA, 20 bp, Artificial Sequence
  Description of Artificial Sequence: Synthetic oligonucleotide
  Target: LAMA2; (+) strand; PAM type: YTN; PAM sequence: CTT
tacacctgctgtggctattt

SEQ ID NO: 329958 - DNA, 20 bp, Artificial Sequence
  Description of Artificial Sequence: Synthetic oligonucleotide
  Target: LAMA2; (+) strand; PAM type: YTN; PAM sequence: TTT
acacctgctgtggctatttt

SEQ ID NO: 329959 - DNA, 20 bp, Artificial Sequence
  Description of Artificial Sequence: Synthetic oligonucleotide
  Target: LAMA2; (+) strand; PAM type: YTN; PAM sequence: TTA
cacctgctgtggctattttt

SEQ ID NO: 329960 - DNA, 20 bp, Artificial Sequence
  Description of Artificial Sequence: Synthetic oligonucleotide
  Target: LAMA2; (+) strand; PAM type: YTN; PAM sequence: CTG
ctgtggctatttttagtttt

SEQ ID NO: 329961 - DNA, 20 bp, Artificial Sequence
  Description of Artificial Sequence: Synthetic oligonucleotide
  Target: LAMA2; (+) strand; PAM type: YTN; PAM sequence: CTG
tggctatttttagttttgtt

SEQ ID NO: 329962 - DNA, 20 bp, Artificial Sequence
  Description of Artificial Sequence: Synthetic oligonucleotide
  Target: LAMA2; (+) strand; PAM type: YTN; PAM sequence: CTA
tttttagttttgttcactag

SEQ ID NO: 329963 - DNA, 20 bp, Artificial Sequence
  Description of Artificial Sequence: Synthetic oligonucleotide
  Target: LAMA2; (+) strand; PAM type: YTN; PAM sequence: TTT
ttagttttgttcactagttc

SEQ ID NO: 329964 - DNA, 20 bp, Artificial Sequence
  Description of Artificial Sequence: Synthetic oligonucleotide
  Target: LAMA2; (+) strand; PAM type: YTN; PAM sequence: TTT
tagttttgttcactagttct

SEQ ID NO: 329965 - DNA, 20 bp, Artificial Sequence
  Description of Artificial Sequence: Synthetic oligonucleotide
  Target: LAMA2; (+) strand; PAM type: YTN; PAM sequence: TTT
agttttgttcactagttctt

SEQ ID NO: 329966 - DNA, 20 bp, Artificial Sequence
  Description of Artificial Sequence: Synthetic oligonucleotide
  Target: LAMA2; (+) strand; PAM type: YTN; PAM sequence: TTA
gttttgttcactagttcttc

SEQ ID NO: 329967 - DNA, 20 bp, Artificial Sequence
  Description of Artificial Sequence: Synthetic oligonucleotide
  Target: LAMA2; (+) strand; PAM type: YTN; PAM sequence: TTT
tgttcactagttcttcaagc

SEQ ID NO: 329968 - DNA, 20 bp, Artificial Sequence
  Description of Artificial Sequence: Synthetic oligonucleotide
  Target: LAMA2; (+) strand; PAM type: YTN; PAM sequence: TTT
gttcactagttcttcaagcc

SEQ ID NO: 329969 - DNA, 20 bp, Artificial Sequence
  Description of Artificial Sequence: Synthetic oligonucleotide
  Target: LAMA2; (+) strand; PAM type: YTN; PAM sequence: TTG
ttcactagttcttcaagcca

SEQ ID NO: 329970 - DNA, 20 bp, Artificial Sequence
  Description of Artificial Sequence: Synthetic oligonucleotide
  Target: LAMA2; (+) strand; PAM type: YTN; PAM sequence: TTC
actagttcttcaagccagta

SEQ ID NO: 329971 - DNA, 20 bp, Artificial Sequence
  Description of Artificial Sequence: Synthetic oligonucleotide
  Target: LAMA2; (+) strand; PAM type: YTN; PAM sequence: CTA
gttcttcaagccagtaaaac

SEQ ID NO: 329972 - DNA, 20 bp, Artificial Sequence
  Description of Artificial Sequence: Synthetic oligonucleotide
  Target: LAMA2; (+) strand; PAM type: YTN; PAM sequence: TTC
ttcaagccagtaaaactgtg

SEQ ID NO: 329973 - DNA, 20 bp, Artificial Sequence
  Description of Artificial Sequence: Synthetic oligonucleotide
  Target: LAMA2; (+) strand; PAM type: YTN; PAM sequence: CTT
caagccagtaaaactgtggg

SEQ ID NO: 329974 - DNA, 20 bp, Artificial Sequence
  Description of Artificial Sequence: Synthetic oligonucleotide
  Target: LAMA2; (+) strand; PAM type: YTN; PAM sequence: TTC
aagccagtaaaactgtgggt

SEQ ID NO: 329975 - DNA, 20 bp, Artificial Sequence
  Description of Artificial Sequence: Synthetic oligonucleotide
  Target: LAMA2; (+) strand; PAM type: YTN; PAM sequence: CTG
tgggtttctatttgagtttt

SEQ ID NO: 329976 - DNA, 20 bp, Artificial Sequence
  Description of Artificial Sequence: Synthetic oligonucleotide
  Target: LAMA2; (+) strand; PAM type: YTN; PAM sequence: TTT
ctatttgagttttagccatt

SEQ ID NO: 329977 - DNA, 20 bp, Artificial Sequence
  Description of Artificial Sequence: Synthetic oligonucleotide
  Target: LAMA2; (+) strand; PAM type: YTN; PAM sequence: TTC
tatttgagttttagccattc

SEQ ID NO: 329978 - DNA, 20 bp, Artificial Sequence
  Description of Artificial Sequence: Synthetic oligonucleotide
  Target: LAMA2; (+) strand; PAM type: YTN; PAM sequence: CTA
tttgagttttagccattctg

SEQ ID NO: 329979 - DNA, 20 bp, Artificial Sequence
  Description of Artificial Sequence: Synthetic oligonucleotide
  Target: LAMA2; (+) strand; PAM type: YTN; PAM sequence: TTT
gagttttagccattctggag

SEQ ID NO: 329980 - DNA, 20 bp, Artificial Sequence
  Description of Artificial Sequence: Synthetic oligonucleotide
  Target: LAMA2; (+) strand; PAM type: YTN; PAM sequence: TTG
agttttagccattctggagc

SEQ ID NO: 329981 - DNA, 20 bp, Artificial Sequence
  Description of Artificial Sequence: Synthetic oligonucleotide
  Target: LAMA2; (+) strand; PAM type: YTN; PAM sequence: TTT
tagccattctggagctcatc

SEQ ID NO: 329982 - DNA, 20 bp, Artificial Sequence
  Description of Artificial Sequence: Synthetic oligonucleotide
  Target: LAMA2; (+) strand; PAM type: YTN; PAM sequence: TTT
agccattctggagctcatcc

SEQ ID NO: 329983 - DNA, 20 bp, Artificial Sequence
  Description of Artificial Sequence: Synthetic oligonucleotide
  Target: LAMA2; (+) strand; PAM type: YTN; PAM sequence: TTA
gccattctggagctcatcca

SEQ ID NO: 329984 - DNA, 20 bp, Artificial Sequence
  Description of Artificial Sequence: Synthetic oligonucleotide
  Target: LAMA2; (+) strand; PAM type: YTN; PAM sequence: TTC
tggagctcatccagtgcctt

SEQ ID NO: 329985 - DNA, 20 bp, Artificial Sequence
  Description of Artificial Sequence: Synthetic oligonucleotide
  Target: LAMA2; (+) strand; PAM type: YTN; PAM sequence: CTG
gagctcatccagtgcctttt

SEQ ID NO: 329986 - DNA, 20 bp, Artificial Sequence
  Description of Artificial Sequence: Synthetic oligonucleotide
  Target: LAMA2; (+) strand; PAM type: YTN; PAM sequence: CTC
atccagtgccttttccttct

SEQ ID NO: 329987 - DNA, 20 bp, Artificial Sequence
  Description of Artificial Sequence: Synthetic oligonucleotide
  Target: LAMA2; (+) strand; PAM type: YTN; PAM sequence: CTT
ttccttctaagtattcatag

SEQ ID NO: 329988 - DNA, 20 bp, Artificial Sequence
  Description of Artificial Sequence: Synthetic oligonucleotide
  Target: LAMA2; (+) strand; PAM type: YTN; PAM sequence: TTT
tccttctaagtattcatagt

SEQ ID NO: 329989 - DNA, 20 bp, Artificial Sequence
  Description of Artificial Sequence: Synthetic oligonucleotide
  Target: LAMA2; (+) strand; PAM type: YTN; PAM sequence: TTT
ccttctaagtattcatagtc

SEQ ID NO: 329990 - DNA, 20 bp, Artificial Sequence
  Description of Artificial Sequence: Synthetic oligonucleotide
  Target: LAMA2; (+) strand; PAM type: YTN; PAM sequence: TTC
cttctaagtattcatagtct

SEQ ID NO: 329991 - DNA, 20 bp, Artificial Sequence
  Description of Artificial Sequence: Synthetic oligonucleotide
  Target: LAMA2; (+) strand; PAM type: YTN; PAM sequence: CTT
ctaagtattcatagtcttcc

SEQ ID NO: 329992 - DNA, 20 bp, Artificial Sequence
  Description of Artificial Sequence: Synthetic oligonucleotide
  Target: LAMA2; (+) strand; PAM type: YTN; PAM sequence: TTC
taagtattcatagtcttcct

SEQ ID NO: 329993 - DNA, 20 bp, Artificial Sequence
  Description of Artificial Sequence: Synthetic oligonucleotide
  Target: LAMA2; (+) strand; PAM type: YTN; PAM sequence: CTA
agtattcatagtcttcctgg

SEQ ID NO: 329994 - DNA, 20 bp, Artificial Sequence
  Description of Artificial Sequence: Synthetic oligonucleotide
  Target: LAMA2; (+) strand; PAM type: YTN; PAM sequence: TTC
atagtcttcctggcttacct

SEQ ID NO: 329995 - DNA, 20 bp, Artificial Sequence
  Description of Artificial Sequence: Synthetic oligonucleotide
  Target: LAMA2; (+) strand; PAM type: YTN; PAM sequence: CTT
cctggcttacctgttcttag

SEQ ID NO: 329996 - DNA, 20 bp, Artificial Sequence
  Description of Artificial Sequence: Synthetic oligonucleotide
  Target: LAMA2; (+) strand; PAM type: YTN; PAM sequence: TTC
ctggcttacctgttcttagg

SEQ ID NO: 329997 - DNA, 20 bp, Artificial Sequence
  Description of Artificial Sequence: Synthetic oligonucleotide
  Target: LAMA2; (+) strand; PAM type: YTN; PAM sequence: CTG
gcttacctgttcttaggtgc

SEQ ID NO: 329998 - DNA, 20 bp, Artificial Sequence
  Description of Artificial Sequence: Synthetic oligonucleotide
  Target: LAMA2; (+) strand; PAM type: YTN; PAM sequence: CTT
acctgttcttaggtgcactc

SEQ ID NO: 329999 - DNA, 20 bp, Artificial Sequence
  Description of Artificial Sequence: Synthetic oligonucleotide
  Target: LAMA2; (+) strand; PAM type: YTN; PAM sequence: TTA
cctgttcttaggtgcactcc

SEQ ID NO: 330000 - DNA, 20 bp, Artificial Sequence
  Description of Artificial Sequence: Synthetic oligonucleotide
  Target: LAMA2; (+) strand; PAM type: YTN; PAM sequence: CTG
ttcttaggtgcactccagat

SEQ ID NO: 330001 - DNA, 20 bp, Artificial Sequence
  Description of Artificial Sequence: Synthetic oligonucleotide
  Target: LAMA2; (+) strand; PAM type: YTN; PAM sequence: TTC
ttaggtgcactccagatatc

SEQ ID NO: 330002 - DNA, 20 bp, Artificial Sequence
  Description of Artificial Sequence: Synthetic oligonucleotide
  Target: LAMA2; (+) strand; PAM type: YTN; PAM sequence: CTT
aggtgcactccagatatctg

SEQ ID NO: 330003 - DNA, 20 bp, Artificial Sequence
  Description of Artificial Sequence: Synthetic oligonucleotide
  Target: LAMA2; (+) strand; PAM type: YTN; PAM sequence: TTA
ggtgcactccagatatctgg

SEQ ID NO: 330004 - DNA, 20 bp, Artificial Sequence
  Description of Artificial Sequence: Synthetic oligonucleotide
  Target: LAMA2; (+) strand; PAM type: YTN; PAM sequence: CTC
cagatatctggtgtttgctg

SEQ ID NO: 330005 - DNA, 20 bp, Artificial Sequence
  Description of Artificial Sequence: Synthetic oligonucleotide
  Target: LAMA2; (+) strand; PAM type: YTN; PAM sequence: CTG
gtgtttgctgtgtgtatata

SEQ ID NO: 330006 - DNA, 20 bp, Artificial Sequence
  Description of Artificial Sequence: Synthetic oligonucleotide
  Target: LAMA2; (+) strand; PAM type: YTN; PAM sequence: TTT
gctgtgtgtatatatatata

SEQ ID NO: 330007 - DNA, 20 bp, Artificial Sequence
  Description of Artificial Sequence: Synthetic oligonucleotide
  Target: LAMA2; (+) strand; PAM type: YTN; PAM sequence: TTG
ctgtgtgtatatatatatat

SEQ ID NO: 330008 - DNA, 20 bp, Artificial Sequence
  Description of Artificial Sequence: Synthetic oligonucleotide
  Target: LAMA2; (+) strand; PAM type: YTN; PAM sequence: CTG
tgtgtatatatatatatata

SEQ ID NO: 330009 - DNA, 20 bp, Artificial Sequence
  Description of Artificial Sequence: Synthetic oligonucleotide
  Target: LAMA2; (+) strand; PAM type: YTN; PAM sequence: TTT
atagctgttatctctgggag

SEQ ID NO: 330010 - DNA, 20 bp, Artificial Sequence
  Description of Artificial Sequence: Synthetic oligonucleotide
  Target: LAMA2; (+) strand; PAM type: YTN; PAM sequence: TTA
tagctgttatctctgggagc

SEQ ID NO: 330011 - DNA, 20 bp, Artificial Sequence
  Description of Artificial Sequence: Synthetic oligonucleotide
  Target: LAMA2; (+) strand; PAM type: YTN; PAM sequence: CTG
ttatctctgggagctttgct

SEQ ID NO: 330012 - DNA, 20 bp, Artificial Sequence
  Description of Artificial Sequence: Synthetic oligonucleotide
  Target: LAMA2; (+) strand; PAM type: YTN; PAM sequence: TTA
tctctgggagctttgctcca

SEQ ID NO: 330013 - DNA, 20 bp, Artificial Sequence
  Description of Artificial Sequence: Synthetic oligonucleotide
  Target: LAMA2; (+) strand; PAM type: YTN; PAM sequence: CTC
tgggagctttgctccaataa

SEQ ID NO: 330014 - DNA, 20 bp, Artificial Sequence
  Description of Artificial Sequence: Synthetic oligonucleotide
  Target: LAMA2; (+) strand; PAM type: YTN; PAM sequence: CTG
ggagctttgctccaataaaa

SEQ ID NO: 330015 - DNA, 20 bp, Artificial Sequence
  Description of Artificial Sequence: Synthetic oligonucleotide
  Target: LAMA2; (+) strand; PAM type: YTN; PAM sequence: CTT
tgctccaataaaagctactt

SEQ ID NO: 330016 - DNA, 20 bp, Artificial Sequence
  Description of Artificial Sequence: Synthetic oligonucleotide
  Target: LAMA2; (+) strand; PAM type: YTN; PAM sequence: TTT
gctccaataaaagctacttc

SEQ ID NO: 330017 - DNA, 20 bp, Artificial Sequence
  Description of Artificial Sequence: Synthetic oligonucleotide
  Target: LAMA2; (+) strand; PAM type: YTN; PAM sequence: TTG
ctccaataaaagctacttca

SEQ ID NO: 330018 - DNA, 20 bp, Artificial Sequence
  Description of Artificial Sequence: Synthetic oligonucleotide
  Target: LAMA2; (+) strand; PAM type: YTN; PAM sequence: CTC
caataaaagctacttcacaa

SEQ ID NO: 330019 - DNA, 20 bp, Artificial Sequence
  Description of Artificial Sequence: Synthetic oligonucleotide
  Target: LAMA2; (+) strand; PAM type: YTN; PAM sequence: CTA
cttcacaattattaaaaata

SEQ ID NO: 330020 - DNA, 20 bp, Artificial Sequence
  Description of Artificial Sequence: Synthetic oligonucleotide
  Target: LAMA2; (+) strand; PAM type: YTN; PAM sequence: CTT
cacaattattaaaaatagaa

SEQ ID NO: 330021 - DNA, 20 bp, Artificial Sequence
  Description of Artificial Sequence: Synthetic oligonucleotide
  Target: LAMA2; (+) strand; PAM type: YTN; PAM sequence: TTC
acaattattaaaaatagaac

SEQ ID NO: 330022 - DNA, 20 bp, Artificial Sequence
  Description of Artificial Sequence: Synthetic oligonucleotide
  Target: LAMA2; (+) strand; PAM type: YTN; PAM sequence: TTA
ttaaaaatagaacctccata

SEQ ID NO: 330023 - DNA, 20 bp, Artificial Sequence
  Description of Artificial Sequence: Synthetic oligonucleotide
  Target: LAMA2; (+) strand; PAM type: YTN; PAM sequence: TTA
aaaatagaacctccataagt

SEQ ID NO: 330024 - DNA, 20 bp, Artificial Sequence
  Description of Artificial Sequence: Synthetic oligonucleotide
  Target: LAMA2; (+) strand; PAM type: YTN; PAM sequence: CTC
cataagtagattttaaaatg

SEQ ID NO: 330025 - DNA, 20 bp, Artificial Sequence
  Description of Artificial Sequence: Synthetic oligonucleotide
  Target: LAMA2; (+) strand; PAM type: YTN; PAM sequence: TTT
taaaatgtttctgccatttg

SEQ ID NO: 330026 - DNA, 20 bp, Artificial Sequence
  Description of Artificial Sequence: Synthetic oligonucleotide
  Target: LAMA2; (+) strand; PAM type: YTN; PAM sequence: TTT
aaaatgtttctgccatttga

SEQ ID NO: 330027 - DNA, 20 bp, Artificial Sequence
  Description of Artificial Sequence: Synthetic oligonucleotide
  Target: LAMA2; (+) strand; PAM type: YTN; PAM sequence: TTA
aaatgtttctgccatttgaa

SEQ ID NO: 330028 - DNA, 20 bp, Artificial Sequence
  Description of Artificial Sequence: Synthetic oligonucleotide
  Target: LAMA2; (+) strand; PAM type: YTN; PAM sequence: TTT
ctgccatttgaaaccaaaaa

SEQ ID NO: 330029 - DNA, 20 bp, Artificial Sequence
  Description of Artificial Sequence: Synthetic oligonucleotide
  Target: LAMA2; (+) strand; PAM type: YTN; PAM sequence: TTC
tgccatttgaaaccaaaaag

SEQ ID NO: 330030 - DNA, 20 bp, Artificial Sequence
  Description of Artificial Sequence: Synthetic oligonucleotide
  Target: LAMA2; (+) strand; PAM type: YTN; PAM sequence: CTG
ccatttgaaaccaaaaagtg

SEQ ID NO: 330031 - DNA, 20 bp, Artificial Sequence
  Description of Artificial Sequence: Synthetic oligonucleotide
  Target: LAMA2; (+) strand; PAM type: YTN; PAM sequence: TTT
gaaaccaaaaagtgggattt

SEQ ID NO: 330032 - DNA, 20 bp, Artificial Sequence
  Description of Artificial Sequence: Synthetic oligonucleotide
  Target: LAMA2; (+) strand; PAM type: YTN; PAM sequence: TTG
aaaccaaaaagtgggatttt

SEQ ID NO: 330033 - DNA, 20 bp, Artificial Sequence
  Description of Artificial Sequence: Synthetic oligonucleotide
  Target: LAMA2; (+) strand; PAM type: YTN; PAM sequence: TTT
tgagaatgtagatcatcaaa

SEQ ID NO: 330034 - DNA, 20 bp, Artificial Sequence
  Description of Artificial Sequence: Synthetic oligonucleotide
  Target: LAMA2; (+) strand; PAM type: YTN; PAM sequence: TTT
gagaatgtagatcatcaaaa

SEQ ID NO: 330035 - DNA, 20 bp, Artificial Sequence
  Description of Artificial Sequence: Synthetic oligonucleotide
  Target: LAMA2; (+) strand; PAM type: YTN; PAM sequence: TTG
agaatgtagatcatcaaaat

SEQ ID NO: 330036 - DNA, 20 bp, Artificial Sequence
  Description of Artificial Sequence: Synthetic oligonucleotide
  Target: LAMA2; (+) strand; PAM type: YTN; PAM sequence: CTA
cattatttgagaaagcaaat

SEQ ID NO: 330037 - DNA, 20 bp, Artificial Sequence
  Description of Artificial Sequence: Synthetic oligonucleotide
  Target: LAMA2; (+) strand; PAM type: YTN; PAM sequence: TTA
tttgagaaagcaaatatggt

SEQ ID NO: 330038 - DNA, 20 bp, Artificial Sequence
  Description of Artificial Sequence: Synthetic oligonucleotide
  Target: LAMA2; (+) strand; PAM type: YTN; PAM sequence: TTT
gagaaagcaaatatggtata

SEQ ID NO: 330039 - DNA, 20 bp, Artificial Sequence
  Description of Artificial Sequence: Synthetic oligonucleotide
  Target: LAMA2; (+) strand; PAM type: YTN; PAM sequence: TTG
agaaagcaaatatggtataa

SEQ ID NO: 330040 - DNA, 20 bp, Artificial Sequence
  Description of Artificial Sequence: Synthetic oligonucleotide
  Target: LAMA2; (+) strand; PAM type: YTN; PAM sequence: TTA
ggtgatttttttcaaatgtt

SEQ ID NO: 330041 - DNA, 20 bp, Artificial Sequence
  Description of Artificial Sequence: Synthetic oligonucleotide
  Target: LAMA2; (+) strand; PAM type: YTN; PAM sequence: TTT
ttttcaaatgtttgccatat

SEQ ID NO: 330042 - DNA, 20 bp, Artificial Sequence
  Description of Artificial Sequence: Synthetic oligonucleotide
  Target: LAMA2; (+) strand; PAM type: YTN; PAM sequence: TTT
tttcaaatgtttgccatatt

SEQ ID NO: 330043 - DNA, 20 bp, Artificial Sequence
  Description of Artificial Sequence: Synthetic oligonucleotide
  Target: LAMA2; (+) strand; PAM type: YTN; PAM sequence: TTT
ttcaaatgtttgccatattg

SEQ ID NO: 330044 - DNA, 20 bp, Artificial Sequence
  Description of Artificial Sequence: Synthetic oligonucleotide
  Target: LAMA2; (+) strand; PAM type: YTN; PAM sequence: TTT
tcaaatgtttgccatattgt

SEQ ID NO: 330045 - DNA, 20 bp, Artificial Sequence
  Description of Artificial Sequence: Synthetic oligonucleotide
  Target: LAMA2; (+) strand; PAM type: YTN; PAM sequence: TTT
caaatgtttgccatattgta

SEQ ID NO: 330046 - DNA, 20 bp, Artificial Sequence
  Description of Artificial Sequence: Synthetic oligonucleotide
  Target: LAMA2; (+) strand; PAM type: YTN; PAM sequence: TTC
aaatgtttgccatattgtag

SEQ ID NO: 330047 - DNA, 20 bp, Artificial Sequence
  Description of Artificial Sequence: Synthetic oligonucleotide
  Target: LAMA2; (+) strand; PAM type: YTN; PAM sequence: TTT
gccatattgtagcagaattt

SEQ ID NO: 330048 - DNA, 20 bp, Artificial Sequence
  Description of Artificial Sequence: Synthetic oligonucleotide
  Target: LAMA2; (+) strand; PAM type: YTN; PAM sequence: TTG
ccatattgtagcagaatttc

SEQ ID NO: 330049 - DNA, 20 bp, Artificial Sequence
  Description of Artificial Sequence: Synthetic oligonucleotide
  Target: LAMA2; (+) strand; PAM type: YTN; PAM sequence: TTG
tagcagaatttcagtttttc

SEQ ID NO: 330050 - DNA, 20 bp, Artificial Sequence
  Description of Artificial Sequence: Synthetic oligonucleotide
  Target: LAMA2; (+) strand; PAM type: YTN; PAM sequence: TTT
cagtttttcaaattttcaca

SEQ ID NO: 330051 - DNA, 20 bp, Artificial Sequence
  Description of Artificial Sequence: Synthetic oligonucleotide
  Target: LAMA2; (+) strand; PAM type: YTN; PAM sequence: TTC
agtttttcaaattttcacat

SEQ ID NO: 330052 - DNA, 20 bp, Artificial Sequence
  Description of Artificial Sequence: Synthetic oligonucleotide
  Target: LAMA2; (+) strand; PAM type: YTN; PAM sequence: TTT
ttcaaattttcacatgatat

SEQ ID NO: 330053 - DNA, 20 bp, Artificial Sequence
  Description of Artificial Sequence: Synthetic oligonucleotide
  Target: LAMA2; (+) strand; PAM type: YTN; PAM sequence: TTT
tcaaattttcacatgatata

SEQ ID NO: 330054 - DNA, 20 bp, Artificial Sequence
  Description of Artificial Sequence: Synthetic oligonucleotide
  Target: LAMA2; (+) strand; PAM type: YTN; PAM sequence: TTT
caaattttcacatgatatac

SEQ ID NO: 330055 - DNA, 20 bp, Artificial Sequence
  Description of Artificial Sequence: Synthetic oligonucleotide
  Target: LAMA2; (+) strand; PAM type: YTN; PAM sequence: TTC
aaattttcacatgatataca

SEQ ID NO: 330056 - DNA, 20 bp, Artificial Sequence
  Description of Artificial Sequence: Synthetic oligonucleotide
  Target: LAMA2; (+) strand; PAM type: YTN; PAM sequence: TTT
tcacatgatatacacttagc

SEQ ID NO: 330057 - DNA, 20 bp, Artificial Sequence
  Description of Artificial Sequence: Synthetic oligonucleotide
  Target: LAMA2; (+) strand; PAM type: YTN; PAM sequence: TTT
cacatgatatacacttagcc

SEQ ID NO: 330058 - DNA, 20 bp, Artificial Sequence
  Description of Artificial Sequence: Synthetic oligonucleotide
  Target: LAMA2; (+) strand; PAM type: YTN; PAM sequence: TTC
acatgatatacacttagcct

SEQ ID NO: 330059 - DNA, 20 bp, Artificial Sequence
  Description of Artificial Sequence: Synthetic oligonucleotide
  Target: LAMA2; (+) strand; PAM type: YTN; PAM sequence: CTT
agcctttttctagatatcct

SEQ ID NO: 330060 - DNA, 20 bp, Artificial Sequence
  Description of Artificial Sequence: Synthetic oligonucleotide
  Target: LAMA2; (+) strand; PAM type: YTN; PAM sequence: TTA
gcctttttctagatatccta

SEQ ID NO: 330061 - DNA, 20 bp, Artificial Sequence
  Description of Artificial Sequence: Synthetic oligonucleotide
  Target: LAMA2; (+) strand; PAM type: YTN; PAM sequence: CTT
tttctagatatcctattacc

SEQ ID NO: 330062 - DNA, 20 bp, Artificial Sequence
  Description of Artificial Sequence: Synthetic oligonucleotide
  Target: LAMA2; (+) strand; PAM type: YTN; PAM sequence: TTT
ttctagatatcctattacca

SEQ ID NO: 330063 - DNA, 20 bp, Artificial Sequence
  Description of Artificial Sequence: Synthetic oligonucleotide
  Target: LAMA2; (+) strand; PAM type: YTN; PAM sequence: TTT
tctagatatcctattaccat

SEQ ID NO: 330064 - DNA, 20 bp, Artificial Sequence
  Description of Artificial Sequence: Synthetic oligonucleotide
  Target: LAMA2; (+) strand; PAM type: YTN; PAM sequence: TTT
ctagatatcctattaccata

SEQ ID NO: 330065 - DNA, 20 bp, Artificial Sequence
  Description of Artificial Sequence: Synthetic oligonucleotide
  Target: LAMA2; (+) strand; PAM type: YTN; PAM sequence: TTC
tagatatcctattaccatat

SEQ ID NO: 330066 - DNA, 20 bp, Artificial Sequence
  Description of Artificial Sequence: Synthetic oligonucleotide
  Target: LAMA2; (+) strand; PAM type: YTN; PAM sequence: CTA
gatatcctattaccatatat

SEQ ID NO: 330067 - DNA, 20 bp, Artificial Sequence
  Description of Artificial Sequence: Synthetic oligonucleotide
  Target: LAMA2; (+) strand; PAM type: YTN; PAM sequence: CTA
ttaccatatatatatatata

SEQ ID NO: 330068 - DNA, 20 bp, Artificial Sequence
  Description of Artificial Sequence: Synthetic oligonucleotide
  Target: LAMA2; (+) strand; PAM type: YTN; PAM sequence: TTA
ccatatatatatatatacac

SEQ ID NO: 330069 - DNA, 20 bp, Artificial Sequence
  Description of Artificial Sequence: Synthetic oligonucleotide
  Target: LAMA2; (+) strand; PAM type: YTN; PAM sequence: CTA
tagaacagaatatattattc

SEQ ID NO: 330070 - DNA, 20 bp, Artificial Sequence
  Description of Artificial Sequence: Synthetic oligonucleotide
  Target: LAMA2; (+) strand; PAM type: YTN; PAM sequence: TTA
ttctatatataatatgaata

SEQ ID NO: 330071 - DNA, 20 bp, Artificial Sequence
  Description of Artificial Sequence: Synthetic oligonucleotide
  Target: LAMA2; (+) strand; PAM type: YTN; PAM sequence: TTC
tatatataatatgaatattc

SEQ ID NO: 330072 - DNA, 20 bp, Artificial Sequence
  Description of Artificial Sequence: Synthetic oligonucleotide
  Target: LAMA2; (+) strand; PAM type: YTN; PAM sequence: CTA
tatataatatgaatattcta

SEQ ID NO: 330073 - DNA, 20 bp, Artificial Sequence
  Description of Artificial Sequence: Synthetic oligonucleotide
  Target: LAMA2; (+) strand; PAM type: YTN; PAM sequence: TTC
taatctctaataaaatacat

SEQ ID NO: 330074 - DNA, 20 bp, Artificial Sequence
  Description of Artificial Sequence: Synthetic oligonucleotide
  Target: LAMA2; (+) strand; PAM type: YTN; PAM sequence: CTA
atctctaataaaatacatag

SEQ ID NO: 330075 - DNA, 20 bp, Artificial Sequence
  Description of Artificial Sequence: Synthetic oligonucleotide
  Target: LAMA2; (+) strand; PAM type: YTN; PAM sequence: CTC
taataaaatacatagtataa

SEQ ID NO: 330076 - DNA, 20 bp, Artificial Sequence
  Description of Artificial Sequence: Synthetic oligonucleotide
  Target: LAMA2; (+) strand; PAM type: YTN; PAM sequence: CTA
ataaaatacatagtataaac

SEQ ID NO: 330077 - DNA, 20 bp, Artificial Sequence
  Description of Artificial Sequence: Synthetic oligonucleotide
  Target: LAMA2; (+) strand; PAM type: YTN; PAM sequence: TTG
tttgatttttgttcagacat

SEQ ID NO: 330078 - DNA, 20 bp, Artificial Sequence
  Description of Artificial Sequence: Synthetic oligonucleotide
  Target: LAMA2; (+) strand; PAM type: YTN; PAM sequence: TTT
gatttttgttcagacattgt

SEQ ID NO: 330079 - DNA, 20 bp, Artificial Sequence
  Description of Artificial Sequence: Synthetic oligonucleotide
  Target: LAMA2; (+) strand; PAM type: YTN; PAM sequence: TTG
atttttgttcagacattgtt

SEQ ID NO: 330080 - DNA, 20 bp, Artificial Sequence
  Description of Artificial Sequence: Synthetic oligonucleotide
  Target: LAMA2; (+) strand; PAM type: YTN; PAM sequence: TTT
ttgttcagacattgttcctt

SEQ ID NO: 330081 - DNA, 20 bp, Artificial Sequence
  Description of Artificial Sequence: Synthetic oligonucleotide
  Target: LAMA2; (+) strand; PAM type: YTN; PAM sequence: TTT
tgttcagacattgttcctta

SEQ ID NO: 330082 - DNA, 20 bp, Artificial Sequence
  Description of Artificial Sequence: Synthetic oligonucleotide
  Target: LAMA2; (+) strand; PAM type: YTN; PAM sequence: TTT
gttcagacattgttccttat

SEQ ID NO: 330083 - DNA, 20 bp, Artificial Sequence
  Description of Artificial Sequence: Synthetic oligonucleotide
  Target: LAMA2; (+) strand; PAM type: YTN; PAM sequence: TTG
ttcagacattgttccttata

SEQ ID NO: 330084 - DNA, 20 bp, Artificial Sequence
  Description of Artificial Sequence: Synthetic oligonucleotide
  Target: LAMA2; (+) strand; PAM type: YTN; PAM sequence: TTC
agacattgttccttataacc

SEQ ID NO: 330085 - DNA, 20 bp, Artificial Sequence
  Description of Artificial Sequence: Synthetic oligonucleotide
  Target: LAMA2; (+) strand; PAM type: YTN; PAM sequence: TTG
ttccttataaccagaactcc

SEQ ID NO: 330086 - DNA, 20 bp, Artificial Sequence
  Description of Artificial Sequence: Synthetic oligonucleotide
  Target: LAMA2; (+) strand; PAM type: YTN; PAM sequence: TTC
cttataaccagaactccaac

SEQ ID NO: 330087 - DNA, 20 bp, Artificial Sequence
  Description of Artificial Sequence: Synthetic oligonucleotide
  Target: LAMA2; (+) strand; PAM type: YTN; PAM sequence: CTT
ataaccagaactccaactaa

SEQ ID NO: 330088 - DNA, 20 bp, Artificial Sequence
  Description of Artificial Sequence: Synthetic oligonucleotide
  Target: LAMA2; (+) strand; PAM type: YTN; PAM sequence: TTA
taaccagaactccaactaaa

SEQ ID NO: 330089 - DNA, 20 bp, Artificial Sequence
  Description of Artificial Sequence: Synthetic oligonucleotide
  Target: LAMA2; (+) strand; PAM type: YTN; PAM sequence: CTC
caactaaacttatttagtct

SEQ ID NO: 330090 - DNA, 20 bp, Artificial Sequence
  Description of Artificial Sequence: Synthetic oligonucleotide
  Target: LAMA2; (+) strand; PAM type: YTN; PAM sequence: CTA
aacttatttagtctagtgct

SEQ ID NO: 330091 - DNA, 20 bp, Artificial Sequence
  Description of Artificial Sequence: Synthetic oligonucleotide
  Target: LAMA2; (+) strand; PAM type: YTN; PAM sequence: CTT
atttagtctagtgctattca

SEQ ID NO: 330092 - DNA, 20 bp, Artificial Sequence
  Description of Artificial Sequence: Synthetic oligonucleotide
  Target: LAMA2; (+) strand; PAM type: YTN; PAM sequence: TTA
tttagtctagtgctattcag

SEQ ID NO: 330093 - DNA, 20 bp, Artificial Sequence
  Description of Artificial Sequence: Synthetic oligonucleotide
  Target: LAMA2; (+) strand; PAM type: YTN; PAM sequence: TTT
agtctagtgctattcagaaa

SEQ ID NO: 330094 - DNA, 20 bp, Artificial Sequence
  Description of Artificial Sequence: Synthetic oligonucleotide
  Target: LAMA2; (+) strand; PAM type: YTN; PAM sequence: TTA
gtctagtgctattcagaaaa

SEQ ID NO: 330095 - DNA, 20 bp, Artificial Sequence
  Description of Artificial Sequence: Synthetic oligonucleotide
  Target: LAMA2; (+) strand; PAM type: YTN; PAM sequence: CTA
gtgctattcagaaaaaaaat

SEQ ID NO: 330096 - DNA, 20 bp, Artificial Sequence
  Description of Artificial Sequence: Synthetic oligonucleotide
  Target: LAMA2; (+) strand; PAM type: YTN; PAM sequence: CTA
ttcagaaaaaaaatgtcaat

SEQ ID NO: 330097 - DNA, 20 bp, Artificial Sequence
  Description of Artificial Sequence: Synthetic oligonucleotide
  Target: LAMA2; (+) strand; PAM type: YTN; PAM sequence: TTC
agaaaaaaaatgtcaatcat

SEQ ID NO: 330098 - DNA, 20 bp, Artificial Sequence
  Description of Artificial Sequence: Synthetic oligonucleotide
  Target: LAMA2; (+) strand; PAM type: YTN; PAM sequence: TTG
tatggataatgatcactggc

SEQ ID NO: 330099 - DNA, 20 bp, Artificial Sequence
  Description of Artificial Sequence: Synthetic oligonucleotide
  Target: LAMA2; (+) strand; PAM type: YTN; PAM sequence: CTG
gcttttatgtcattaacatt

SEQ ID NO: 330100 - DNA, 20 bp, Artificial Sequence
  Description of Artificial Sequence: Synthetic oligonucleotide
  Target: LAMA2; (+) strand; PAM type: YTN; PAM sequence: CTT
ttatgtcattaacattacag

SEQ ID NO: 330101 - DNA, 20 bp, Artificial Sequence
  Description of Artificial Sequence: Synthetic oligonucleotide
  Target: LAMA2; (+) strand; PAM type: YTN; PAM sequence: TTT
tatgtcattaacattacagg

SEQ ID NO: 330102 - DNA, 20 bp, Artificial Sequence
  Description of Artificial Sequence: Synthetic oligonucleotide
  Target: LAMA2; (+) strand; PAM type: YTN; PAM sequence: TTT
atgtcattaacattacagga

SEQ ID NO: 330103 - DNA, 20 bp, Artificial Sequence
  Description of Artificial Sequence: Synthetic oligonucleotide
  Target: LAMA2; (+) strand; PAM type: YTN; PAM sequence: TTA
tgtcattaacattacaggac

SEQ ID NO: 330104 - DNA, 20 bp, Artificial Sequence
  Description of Artificial Sequence: Synthetic oligonucleotide
  Target: LAMA2; (+) strand; PAM type: YTN; PAM sequence: TTA
acattacaggaccttaagtt

SEQ ID NO: 330105 - DNA, 20 bp, Artificial Sequence
  Description of Artificial Sequence: Synthetic oligonucleotide
  Target: LAMA2; (+) strand; PAM type: YTN; PAM sequence: TTA
caggaccttaagttgagtta

SEQ ID NO: 330106 - DNA, 20 bp, Artificial Sequence
  Description of Artificial Sequence: Synthetic oligonucleotide
  Target: LAMA2; (+) strand; PAM type: YTN; PAM sequence: CTT
aagttgagttaagaagatgt

SEQ ID NO: 330107 - DNA, 20 bp, Artificial Sequence
  Description of Artificial Sequence: Synthetic oligonucleotide
  Target: LAMA2; (+) strand; PAM type: YTN; PAM sequence: TTA
agttgagttaagaagatgta

SEQ ID NO: 330108 - DNA, 20 bp, Artificial Sequence
  Description of Artificial Sequence: Synthetic oligonucleotide
  Target: LAMA2; (+) strand; PAM type: YTN; PAM sequence: TTG
agttaagaagatgtaagtca

SEQ ID NO: 330109 - DNA, 20 bp, Artificial Sequence
  Description of Artificial Sequence: Synthetic oligonucleotide
  Target: LAMA2; (+) strand; PAM type: YTN; PAM sequence: TTA
agaagatgtaagtcaatact

SEQ ID NO: 330110 - DNA, 20 bp, Artificial Sequence
  Description of Artificial Sequence: Synthetic oligonucleotide
  Target: LAMA2; (+) strand; PAM type: YTN; PAM sequence: CTC
tctaaaggttcatcagctat

SEQ ID NO: 330111 - DNA, 20 bp, Artificial Sequence
  Description of Artificial Sequence: Synthetic oligonucleotide
  Target: LAMA2; (+) strand; PAM type: YTN; PAM sequence: CTC
taaaggttcatcagctattt

SEQ ID NO: 330112 - DNA, 20 bp, Artificial Sequence
  Description of Artificial Sequence: Synthetic oligonucleotide
  Target: LAMA2; (+) strand; PAM type: YTN; PAM sequence: CTA
aaggttcatcagctatttat

SEQ ID NO: 330113 - DNA, 20 bp, Artificial Sequence
  Description of Artificial Sequence: Synthetic oligonucleotide
  Target: LAMA2; (+) strand; PAM type: YTN; PAM sequence: TTC
atcagctatttatagttaat

SEQ ID NO: 330114 - DNA, 20 bp, Artificial Sequence
  Description of Artificial Sequence: Synthetic oligonucleotide
  Target: LAMA2; (+) strand; PAM type: YTN; PAM sequence: CTA
tttatagttaatttacactc

SEQ ID NO: 330115 - DNA, 20 bp, Artificial Sequence
  Description of Artificial Sequence: Synthetic oligonucleotide
  Target: LAMA2; (+) strand; PAM type: YTN; PAM sequence: TTT
atagttaatttacactccta

SEQ ID NO: 330116 - DNA, 20 bp, Artificial Sequence
  Description of Artificial Sequence: Synthetic oligonucleotide
  Target: LAMA2; (+) strand; PAM type: YTN; PAM sequence: TTA
tagttaatttacactcctaa

SEQ ID NO: 330117 - DNA, 20 bp, Artificial Sequence
  Description of Artificial Sequence: Synthetic oligonucleotide
  Target: LAMA2; (+) strand; PAM type: YTN; PAM sequence: TTA
atttacactcctaatgttta

SEQ ID NO: 330118 - DNA, 20 bp, Artificial Sequence
  Description of Artificial Sequence: Synthetic oligonucleotide
  Target: LAMA2; (+) strand; PAM type: YTN; PAM sequence: TTT
acactcctaatgtttacata

SEQ ID NO: 330119 - DNA, 20 bp, Artificial Sequence
  Description of Artificial Sequence: Synthetic oligonucleotide
  Target: LAMA2; (+) strand; PAM type: YTN; PAM sequence: TTA
cactcctaatgtttacataa

SEQ ID NO: 330120 - DNA, 20 bp, Artificial Sequence
  Description of Artificial Sequence: Synthetic oligonucleotide
  Target: LAMA2; (+) strand; PAM type: YTN; PAM sequence: CTC
ctaatgtttacataatctta

SEQ ID NO: 330121 - DNA, 20 bp, Artificial Sequence
  Description of Artificial Sequence: Synthetic oligonucleotide
  Target: LAMA2; (+) strand; PAM type: YTN; PAM sequence: CTA
atgtttacataatcttaacc

SEQ ID NO: 330122 - DNA, 20 bp, Artificial Sequence
  Description of Artificial Sequence: Synthetic oligonucleotide
  Target: LAMA2; (+) strand; PAM type: YTN; PAM sequence: TTT
acataatcttaaccaagtaa

SEQ ID NO: 330123 - DNA, 20 bp, Artificial Sequence
  Description of Artificial Sequence: Synthetic oligonucleotide
  Target: LAMA2; (+) strand; PAM type: YTN; PAM sequence: TTA
cataatcttaaccaagtaac

SEQ ID NO: 330124 - DNA, 20 bp, Artificial Sequence
  Description of Artificial Sequence: Synthetic oligonucleotide
  Target: LAMA2; (+) strand; PAM type: YTN; PAM sequence: CTT
aaccaagtaacacatattga

SEQ ID NO: 330125 - DNA, 20 bp, Artificial Sequence
  Description of Artificial Sequence: Synthetic oligonucleotide
  Target: LAMA2; (+) strand; PAM type: YTN; PAM sequence: TTA
accaagtaacacatattgaa

SEQ ID NO: 330126 - DNA, 20 bp, Artificial Sequence
  Description of Artificial Sequence: Synthetic oligonucleotide
  Target: LAMA2; (+) strand; PAM type: YTN; PAM sequence: TTG
aatatggaaataaatattgc

SEQ ID NO: 330127 - DNA, 20 bp, Artificial Sequence
  Description of Artificial Sequence: Synthetic oligonucleotide
  Target: LAMA2; (+) strand; PAM type: YTN; PAM sequence: TTG
ccctggtgcttttgaatggg

SEQ ID NO: 330128 - DNA, 20 bp, Artificial Sequence
  Description of Artificial Sequence: Synthetic oligonucleotide
  Target: LAMA2; (+) strand; PAM type: YTN; PAM sequence: CTG
gtgcttttgaatgggaataa

SEQ ID NO: 330129 - DNA, 20 bp, Artificial Sequence
  Description of Artificial Sequence: Synthetic oligonucleotide
  Target: LAMA2; (+) strand; PAM type: YTN; PAM sequence: CTT
ttgaatgggaataagtaggc

SEQ ID NO: 330130 - DNA, 20 bp, Artificial Sequence
  Description of Artificial Sequence: Synthetic oligonucleotide
  Target: LAMA2; (+) strand; PAM type: YTN; PAM sequence: TTT
tgaatgggaataagtaggca

SEQ ID NO: 330131 - DNA, 20 bp, Artificial Sequence
  Description of Artificial Sequence: Synthetic oligonucleotide
  Target: LAMA2; (+) strand; PAM type: YTN; PAM sequence: TTT
gaatgggaataagtaggcac

SEQ ID NO: 330132 - DNA, 20 bp, Artificial Sequence
  Description of Artificial Sequence: Synthetic oligonucleotide
  Target: LAMA2; (+) strand; PAM type: YTN; PAM sequence: TTG
aatgggaataagtaggcaca

SEQ ID NO: 330133 - DNA, 20 bp, Artificial Sequence
  Description of Artificial Sequence: Synthetic oligonucleotide
  Target: LAMA2; (+) strand; PAM type: YTN; PAM sequence: TTT
aacatataatgaaaatgggt

SEQ ID NO: 330134 - DNA, 20 bp, Artificial Sequence
  Description of Artificial Sequence: Synthetic oligonucleotide
  Target: LAMA2; (+) strand; PAM type: YTN; PAM sequence: TTA
acatataatgaaaatgggtt

SEQ ID NO: 330135 - DNA, 20 bp, Artificial Sequence
  Description of Artificial Sequence: Synthetic oligonucleotide
  Target: LAMA2; (+) strand; PAM type: YTN; PAM sequence: TTG
caatctataataagacatgc

SEQ ID NO: 330136 - DNA, 20 bp, Artificial Sequence
  Description of Artificial Sequence: Synthetic oligonucleotide
  Target: LAMA2; (+) strand; PAM type: YTN; PAM sequence: CTA
taataagacatgctgaagat

SEQ ID NO: 330137 - DNA, 20 bp, Artificial Sequence
  Description of Artificial Sequence: Synthetic oligonucleotide
  Target: LAMA2; (+) strand; PAM type: YTN; PAM sequence: CTG
aagattcaataaaagctcag

SEQ ID NO: 330138 - DNA, 20 bp, Artificial Sequence
  Description of Artificial Sequence: Synthetic oligonucleotide
  Target: LAMA2; (+) strand; PAM type: YTN; PAM sequence: TTC
aataaaagctcagatattga

SEQ ID NO: 330139 - DNA, 20 bp, Artificial Sequence
  Description of Artificial Sequence: Synthetic oligonucleotide
  Target: LAMA2; (+) strand; PAM type: YTN; PAM sequence: CTC
agatattgattcattcttca

SEQ ID NO: 330140 - DNA, 20 bp, Artificial Sequence
  Description of Artificial Sequence: Synthetic oligonucleotide
  Target: LAMA2; (+) strand; PAM type: YTN; PAM sequence: TTG
attcattcttcaaattggtc

SEQ ID NO: 330141 - DNA, 20 bp, Artificial Sequence
  Description of Artificial Sequence: Synthetic oligonucleotide
  Target: LAMA2; (+) strand; PAM type: YTN; PAM sequence: TTC
attcttcaaattggtcattc

SEQ ID NO: 330142 - DNA, 20 bp, Artificial Sequence
  Description of Artificial Sequence: Synthetic oligonucleotide
  Target: LAMA2; (+) strand; PAM type: YTN; PAM sequence: TTC
ttcaaattggtcattcatta

SEQ ID NO: 330143 - DNA, 20 bp, Artificial Sequence
  Description of Artificial Sequence: Synthetic oligonucleotide
  Target: LAMA2; (+) strand; PAM type: YTN; PAM sequence: CTT
caaattggtcattcattagc

SEQ ID NO: 330144 - DNA, 20 bp, Artificial Sequence
  Description of Artificial Sequence: Synthetic oligonucleotide
  Target: LAMA2; (+) strand; PAM type: YTN; PAM sequence: TTC
aaattggtcattcattagca

SEQ ID NO: 330145 - DNA, 20 bp, Artificial Sequence
  Description of Artificial Sequence: Synthetic oligonucleotide
  Target: LAMA2; (+) strand; PAM type: YTN; PAM sequence: TTG
gtcattcattagcaactaat

SEQ ID NO: 330146 - DNA, 20 bp, Artificial Sequence
  Description of Artificial Sequence: Synthetic oligonucleotide
  Target: LAMA2; (+) strand; PAM type: YTN; PAM sequence: TTC
attagcaactaattggagac

SEQ ID NO: 330147 - DNA, 20 bp, Artificial Sequence
  Description of Artificial Sequence: Synthetic oligonucleotide
  Target: LAMA2; (+) strand; PAM type: YTN; PAM sequence: TTA
gcaactaattggagaccttt

SEQ ID NO: 330148 - DNA, 20 bp, Artificial Sequence
  Description of Artificial Sequence: Synthetic oligonucleotide
  Target: LAMA2; (+) strand; PAM type: YTN; PAM sequence: CTA
attggagacctttgctgacc

SEQ ID NO: 330149 - DNA, 20 bp, Artificial Sequence
  Description of Artificial Sequence: Synthetic oligonucleotide
  Target: LAMA2; (+) strand; PAM type: YTN; PAM sequence: TTG
gagacctttgctgaccaata

SEQ ID NO: 330150 - DNA, 20 bp, Artificial Sequence
  Description of Artificial Sequence: Synthetic oligonucleotide
  Target: LAMA2; (+) strand; PAM type: YTN; PAM sequence: CTT
tgctgaccaatatgcttaac

SEQ ID NO: 330151 - DNA, 20 bp, Artificial Sequence
  Description of Artificial Sequence: Synthetic oligonucleotide
  Target: LAMA2; (+) strand; PAM type: YTN; PAM sequence: TTT
gctgaccaatatgcttaacc

SEQ ID NO: 330152 - DNA, 20 bp, Artificial Sequence
  Description of Artificial Sequence: Synthetic oligonucleotide
  Target: LAMA2; (+) strand; PAM type: YTN; PAM sequence: TTG
ctgaccaatatgcttaaccg

SEQ ID NO: 330153 - DNA, 20 bp, Artificial Sequence
  Description of Artificial Sequence: Synthetic oligonucleotide
  Target: LAMA2; (+) strand; PAM type: YTN; PAM sequence: CTG
accaatatgcttaaccgatt

SEQ ID NO: 330154 - DNA, 20 bp, Artificial Sequence
  Description of Artificial Sequence: Synthetic oligonucleotide
  Target: LAMA2; (+) strand; PAM type: YTN; PAM sequence: CTT
aaccgatttttaaaaataaa

SEQ ID NO: 330155 - DNA, 20 bp, Artificial Sequence
  Description of Artificial Sequence: Synthetic oligonucleotide
  Target: LAMA2; (+) strand; PAM type: YTN; PAM sequence: TTA
accgatttttaaaaataaac

SEQ ID NO: 330156 - DNA, 20 bp, Artificial Sequence
  Description of Artificial Sequence: Synthetic oligonucleotide
  Target: LAMA2; (+) strand; PAM type: YTN; PAM sequence: TTT
ttaaaaataaacagcaaaat

SEQ ID NO: 330157 - DNA, 20 bp, Artificial Sequence
  Description of Artificial Sequence: Synthetic oligonucleotide
  Target: LAMA2; (+) strand; PAM type: YTN; PAM sequence: TTT
taaaaataaacagcaaaata

SEQ ID NO: 330158 - DNA, 20 bp, Artificial Sequence
  Description of Artificial Sequence: Synthetic oligonucleotide
  Target: LAMA2; (+) strand; PAM type: YTN; PAM sequence: TTT
aaaaataaacagcaaaatag

SEQ ID NO: 330159 - DNA, 20 bp, Artificial Sequence
  Description of Artificial Sequence: Synthetic oligonucleotide
  Target: LAMA2; (+) strand; PAM type: YTN; PAM sequence: TTA
aaaataaacagcaaaatagc

SEQ ID NO: 330160 - DNA, 20 bp, Artificial Sequence
  Description of Artificial Sequence: Synthetic oligonucleotide
  Target: LAMA2; (+) strand; PAM type: YTN; PAM sequence: TTT
cataaagcaactattccctg

SEQ ID NO: 330161 - DNA, 20 bp, Artificial Sequence
  Description of Artificial Sequence: Synthetic oligonucleotide
  Target: LAMA2; (+) strand; PAM type: YTN; PAM sequence: TTC
ataaagcaactattccctga

SEQ ID NO: 330162 - DNA, 20 bp, Artificial Sequence
  Description of Artificial Sequence: Synthetic oligonucleotide
  Target: LAMA2; (+) strand; PAM type: YTN; PAM sequence: CTA
ttccctgaccataaaacaag

SEQ ID NO: 330163 - DNA, 20 bp, Artificial Sequence
  Description of Artificial Sequence: Synthetic oligonucleotide
  Target: LAMA2; (+) strand; PAM type: YTN; PAM sequence: TTC
cctgaccataaaacaaggca

SEQ ID NO: 330164 - DNA, 20 bp, Artificial Sequence
  Description of Artificial Sequence: Synthetic oligonucleotide
  Target: LAMA2; (+) strand; PAM type: YTN; PAM sequence: CTG
accataaaacaaggcaatta

SEQ ID NO: 330165 - DNA, 20 bp, Artificial Sequence
  Description of Artificial Sequence: Synthetic oligonucleotide
  Target: LAMA2; (+) strand; PAM type: YTN; PAM sequence: TTA
aattgtgcaaaggttaattt

SEQ ID NO: 330166 - DNA, 20 bp, Artificial Sequence
  Description of Artificial Sequence: Synthetic oligonucleotide
  Target: LAMA2; (+) strand; PAM type: YTN; PAM sequence: TTG
tgcaaaggttaattttgagc

SEQ ID NO: 330167 - DNA, 20 bp, Artificial Sequence
  Description of Artificial Sequence: Synthetic oligonucleotide
  Target: LAMA2; (+) strand; PAM type: YTN; PAM sequence: TTA
attttgagcacataatcagt

SEQ ID NO: 330168 - DNA, 20 bp, Artificial Sequence
  Description of Artificial Sequence: Synthetic oligonucleotide
  Target: LAMA2; (+) strand; PAM type: YTN; PAM sequence: TTT
tgagcacataatcagtaact

SEQ ID NO: 330169 - DNA, 20 bp, Artificial Sequence
  Description of Artificial Sequence: Synthetic oligonucleotide
  Target: LAMA2; (+) strand; PAM type: YTN; PAM sequence: TTT
gagcacataatcagtaactg

SEQ ID NO: 330170 - DNA, 20 bp, Artificial Sequence
  Description of Artificial Sequence: Synthetic oligonucleotide
  Target: LAMA2; (+) strand; PAM type: YTN; PAM sequence: TTG
agcacataatcagtaactgt

SEQ ID NO: 330171 - DNA, 20 bp, Artificial Sequence
  Description of Artificial Sequence: Synthetic oligonucleotide
  Target: LAMA2; (+) strand; PAM type: YTN; PAM sequence: CTG
taatagaaacaaatcaaaga

SEQ ID NO: 330172 - DNA, 20 bp, Artificial Sequence
  Description of Artificial Sequence: Synthetic oligonucleotide
  Target: LAMA2; (+) strand; PAM type: YTN; PAM sequence: TTG
aaagatcctaaatgtaaatt

SEQ ID NO: 330173 - DNA, 20 bp, Artificial Sequence
  Description of Artificial Sequence: Synthetic oligonucleotide
  Target: LAMA2; (+) strand; PAM type: YTN; PAM sequence: CTA
aatgtaaattttattagtgt

SEQ ID NO: 330174 - DNA, 20 bp, Artificial Sequence
  Description of Artificial Sequence: Synthetic oligonucleotide
  Target: LAMA2; (+) strand; PAM type: YTN; PAM sequence: TTT
tattagtgtctttagtttta

SEQ ID NO: 330175 - DNA, 20 bp, Artificial Sequence
  Description of Artificial Sequence: Synthetic oligonucleotide
  Target: LAMA2; (+) strand; PAM type: YTN; PAM sequence: TTT
attagtgtctttagttttat

SEQ ID NO: 330176 - DNA, 20 bp, Artificial Sequence
  Description of Artificial Sequence: Synthetic oligonucleotide
  Target: LAMA2; (+) strand; PAM type: YTN; PAM sequence: TTA
ttagtgtctttagttttatg

SEQ ID NO: 330177 - DNA, 20 bp, Artificial Sequence
  Description of Artificial Sequence: Synthetic oligonucleotide
  Target: LAMA2; (+) strand; PAM type: YTN; PAM sequence: TTA
gtgtctttagttttatggtt

SEQ ID NO: 330178 - DNA, 20 bp, Artificial Sequence
  Description of Artificial Sequence: Synthetic oligonucleotide
  Target: LAMA2; (+) strand; PAM type: YTN; PAM sequence: CTT
tagttttatggttagaaaac

SEQ ID NO: 330179 - DNA, 20 bp, Artificial Sequence
  Description of Artificial Sequence: Synthetic oligonucleotide
  Target: LAMA2; (+) strand; PAM type: YTN; PAM sequence: TTT
agttttatggttagaaaact

SEQ ID NO: 330180 - DNA, 20 bp, Artificial Sequence
  Description of Artificial Sequence: Synthetic oligonucleotide
  Target: LAMA2; (+) strand; PAM type: YTN; PAM sequence: TTA
gttttatggttagaaaactc

SEQ ID NO: 330181 - DNA, 20 bp, Artificial Sequence
  Description of Artificial Sequence: Synthetic oligonucleotide
  Target: LAMA2; (+) strand; PAM type: YTN; PAM sequence: TTT
tatggttagaaaactctatg

SEQ ID NO: 330182 - DNA, 20 bp, Artificial Sequence
  Description of Artificial Sequence: Synthetic oligonucleotide
  Target: LAMA2; (+) strand; PAM type: YTN; PAM sequence: TTT
atggttagaaaactctatga

SEQ ID NO: 330183 - DNA, 20 bp, Artificial Sequence
  Description of Artificial Sequence: Synthetic oligonucleotide
  Target: LAMA2; (+) strand; PAM type: YTN; PAM sequence: TTA
tggttagaaaactctatgaa

SEQ ID NO: 330184 - DNA, 20 bp, Artificial Sequence
  Description of Artificial Sequence: Synthetic oligonucleotide
  Target: LAMA2; (+) strand; PAM type: YTN; PAM sequence: TTA
gaaaactctatgaagcaaca

SEQ ID NO: 330185 - DNA, 20 bp, Artificial Sequence
  Description of Artificial Sequence: Synthetic oligonucleotide
  Target: LAMA2; (+) strand; PAM type: YTN; PAM sequence: CTC
tatgaagcaacaatggcatg

SEQ ID NO: 330186 - DNA, 20 bp, Artificial Sequence
  Description of Artificial Sequence: Synthetic oligonucleotide
  Target: LAMA2; (+) strand; PAM type: YTN; PAM sequence: CTA
tgaagcaacaatggcatggt

SEQ ID NO: 330187 - DNA, 20 bp, Artificial Sequence
  Description of Artificial Sequence: Synthetic oligonucleotide
  Target: LAMA2; (+) strand; PAM type: YTN; PAM sequence: TTA
tttgttttattaaagattta

SEQ ID NO: 330188 - DNA, 20 bp, Artificial Sequence
  Description of Artificial Sequence: Synthetic oligonucleotide
  Target: LAMA2; (+) strand; PAM type: YTN; PAM sequence: TTT
gttttattaaagatttaaat

SEQ ID NO: 330189 - DNA, 20 bp, Artificial Sequence
  Description of Artificial Sequence: Synthetic oligonucleotide
  Target: LAMA2; (+) strand; PAM type: YTN; PAM sequence: TTG
ttttattaaagatttaaata

SEQ ID NO: 330190 - DNA, 20 bp, Artificial Sequence
  Description of Artificial Sequence: Synthetic oligonucleotide
  Target: LAMA2; (+) strand; PAM type: YTN; PAM sequence: TTT
tattaaagatttaaataagc

SEQ ID NO: 330191 - DNA, 20 bp, Artificial Sequence
  Description of Artificial Sequence: Synthetic oligonucleotide
  Target: LAMA2; (+) strand; PAM type: YTN; PAM sequence: TTT
attaaagatttaaataagct

SEQ ID NO: 330192 - DNA, 20 bp, Artificial Sequence
  Description of Artificial Sequence: Synthetic oligonucleotide
  Target: LAMA2; (+) strand; PAM type: YTN; PAM sequence: TTA
ttaaagatttaaataagctt

SEQ ID NO: 330193 - DNA, 20 bp, Artificial Sequence
  Description of Artificial Sequence: Synthetic oligonucleotide
  Target: LAMA2; (+) strand; PAM type: YTN; PAM sequence: TTA
aagatttaaataagctttac

SEQ ID NO: 330194 - DNA, 20 bp, Artificial Sequence
  Description of Artificial Sequence: Synthetic oligonucleotide
  Target: LAMA2; (+) strand; PAM type: YTN; PAM sequence: TTT
aaataagctttaccaaggac

SEQ ID NO: 330195 - DNA, 20 bp, Artificial Sequence
  Description of Artificial Sequence: Synthetic oligonucleotide
  Target: LAMA2; (+) strand; PAM type: YTN; PAM sequence: TTA
aataagctttaccaaggacc

SEQ ID NO: 330196 - DNA, 20 bp, Artificial Sequence
  Description of Artificial Sequence: Synthetic oligonucleotide
  Target: LAMA2; (+) strand; PAM type: YTN; PAM sequence: CTT
taccaaggaccagattttgg

SEQ ID NO: 330197 - DNA, 20 bp, Artificial Sequence
  Description of Artificial Sequence: Synthetic oligonucleotide
  Target: LAMA2; (+) strand; PAM type: YTN; PAM sequence: TTT
accaaggaccagattttggt

SEQ ID NO: 330198 - DNA, 20 bp, Artificial Sequence
  Description of Artificial Sequence: Synthetic oligonucleotide
  Target: LAMA2; (+) strand; PAM type: YTN; PAM sequence: TTA
ccaaggaccagattttggtt

SEQ ID NO: 330199 - DNA, 20 bp, Artificial Sequence
  Description of Artificial Sequence: Synthetic oligonucleotide
  Target: LAMA2; (+) strand; PAM type: YTN; PAM sequence: TTT
tggttctactttaggccctg

SEQ ID NO: 330200 - DNA, 20 bp, Artificial Sequence
  Description of Artificial Sequence: Synthetic oligonucleotide
  Target: LAMA2; (+) strand; PAM type: YTN; PAM sequence: TTT
ggttctactttaggccctga

SEQ ID NO: 330201 - DNA, 20 bp, Artificial Sequence
  Description of Artificial Sequence: Synthetic oligonucleotide
  Target: LAMA2; (+) strand; PAM type: YTN; PAM sequence: TTG
gttctactttaggccctgac

SEQ ID NO: 330202 - DNA, 20 bp, Artificial Sequence
  Description of Artificial Sequence: Synthetic oligonucleotide
  Target: LAMA2; (+) strand; PAM type: YTN; PAM sequence: TTC
tactttaggccctgacaaga

SEQ ID NO: 330203 - DNA, 20 bp, Artificial Sequence
  Description of Artificial Sequence: Synthetic oligonucleotide
  Target: LAMA2; (+) strand; PAM type: YTN; PAM sequence: CTA
ctttaggccctgacaagaag

SEQ ID NO: 330204 - DNA, 20 bp, Artificial Sequence
  Description of Artificial Sequence: Synthetic oligonucleotide
  Target: LAMA2; (+) strand; PAM type: YTN; PAM sequence: CTT
taggccctgacaagaagtct

SEQ ID NO: 330205 - DNA, 20 bp, Artificial Sequence
  Description of Artificial Sequence: Synthetic oligonucleotide
  Target: LAMA2; (+) strand; PAM type: YTN; PAM sequence: TTT
aggccctgacaagaagtctt

SEQ ID NO: 330206 - DNA, 20 bp, Artificial Sequence
  Description of Artificial Sequence: Synthetic oligonucleotide
  Target: LAMA2; (+) strand; PAM type: YTN; PAM sequence: TTA
ggccctgacaagaagtcttg

SEQ ID NO: 330207 - DNA, 20 bp, Artificial Sequence
  Description of Artificial Sequence: Synthetic oligonucleotide
  Target: LAMA2; (+) strand; PAM type: YTN; PAM sequence: CTG
acaagaagtcttgtaagctt

SEQ ID NO: 330208 - DNA, 20 bp, Artificial Sequence
  Description of Artificial Sequence: Synthetic oligonucleotide
  Target: LAMA2; (+) strand; PAM type: YTN; PAM sequence: CTT
gtaagctttttaaagagctc

SEQ ID NO: 330209 - DNA, 20 bp, Artificial Sequence
  Description of Artificial Sequence: Synthetic oligonucleotide
  Target: LAMA2; (+) strand; PAM type: YTN; PAM sequence: TTG
taagctttttaaagagctca

SEQ ID NO: 330210 - DNA, 20 bp, Artificial Sequence
  Description of Artificial Sequence: Synthetic oligonucleotide
  Target: LAMA2; (+) strand; PAM type: YTN; PAM sequence: CTT
tttaaagagctcacttcaaa

SEQ ID NO: 330211 - DNA, 20 bp, Artificial Sequence
  Description of Artificial Sequence: Synthetic oligonucleotide
  Target: LAMA2; (+) strand; PAM type: YTN; PAM sequence: TTT
ttaaagagctcacttcaaat

SEQ ID NO: 330212 - DNA, 20 bp, Artificial Sequence
  Description of Artificial Sequence: Synthetic oligonucleotide
  Target: LAMA2; (+) strand; PAM type: YTN; PAM sequence: TTT
taaagagctcacttcaaatc

SEQ ID NO: 330213 - DNA, 20 bp, Artificial Sequence
  Description of Artificial Sequence: Synthetic oligonucleotide
  Target: LAMA2; (+) strand; PAM type: YTN; PAM sequence: TTT
aaagagctcacttcaaatca

SEQ ID NO: 330214 - DNA, 20 bp, Artificial Sequence
  Description of Artificial Sequence: Synthetic oligonucleotide
  Target: LAMA2; (+) strand; PAM type: YTN; PAM sequence: TTA
aagagctcacttcaaatcat

SEQ ID NO: 330215 - DNA, 20 bp, Artificial Sequence
  Description of Artificial Sequence: Synthetic oligonucleotide
  Target: LAMA2; (+) strand; PAM type: YTN; PAM sequence: CTC
acttcaaatcatagttatca

SEQ ID NO: 330216 - DNA, 20 bp, Artificial Sequence
  Description of Artificial Sequence: Synthetic oligonucleotide
  Target: LAMA2; (+) strand; PAM type: YTN; PAM sequence: CTT
caaatcatagttatcaatct

SEQ ID NO: 330217 - DNA, 20 bp, Artificial Sequence
  Description of Artificial Sequence: Synthetic oligonucleotide
  Target: LAMA2; (+) strand; PAM type: YTN; PAM sequence: TTC
aaatcatagttatcaatctt

SEQ ID NO: 330218 - DNA, 20 bp, Artificial Sequence
  Description of Artificial Sequence: Synthetic oligonucleotide
  Target: LAMA2; (+) strand; PAM type: YTN; PAM sequence: TTA
tcaatcttactaattcataa

SEQ ID NO: 330219 - DNA, 20 bp, Artificial Sequence
  Description of Artificial Sequence: Synthetic oligonucleotide
  Target: LAMA2; (+) strand; PAM type: YTN; PAM sequence: CTT
actaattcataactttgtac

SEQ ID NO: 330220 - DNA, 20 bp, Artificial Sequence
  Description of Artificial Sequence: Synthetic oligonucleotide
  Target: LAMA2; (+) strand; PAM type: YTN; PAM sequence: TTA
ctaattcataactttgtaca

SEQ ID NO: 330221 - DNA, 20 bp, Artificial Sequence
  Description of Artificial Sequence: Synthetic oligonucleotide
  Target: LAMA2; (+) strand; PAM type: YTN; PAM sequence: CTA
attcataactttgtacatat

SEQ ID NO: 330222 - DNA, 20 bp, Artificial Sequence
  Description of Artificial Sequence: Synthetic oligonucleotide
  Target: LAMA2; (+) strand; PAM type: YTN; PAM sequence: TTC
ataactttgtacatatcatt

SEQ ID NO: 330223 - DNA, 20 bp, Artificial Sequence
  Description of Artificial Sequence: Synthetic oligonucleotide
  Target: LAMA2; (+) strand; PAM type: YTN; PAM sequence: CTT
tgtacatatcatttatcttc

SEQ ID NO: 330224 - DNA, 20 bp, Artificial Sequence
  Description of Artificial Sequence: Synthetic oligonucleotide
  Target: LAMA2; (+) strand; PAM type: YTN; PAM sequence: TTT
gtacatatcatttatcttct

SEQ ID NO: 330225 - DNA, 20 bp, Artificial Sequence
  Description of Artificial Sequence: Synthetic oligonucleotide
  Target: LAMA2; (+) strand; PAM type: YTN; PAM sequence: TTG
tacatatcatttatcttctc

SEQ ID NO: 330226 - DNA, 20 bp, Artificial Sequence
  Description of Artificial Sequence: Synthetic oligonucleotide
  Target: LAMA2; (+) strand; PAM type: YTN; PAM sequence: TTT
atcttctctgagctgcactt

SEQ ID NO: 330227 - DNA, 20 bp, Artificial Sequence
  Description of Artificial Sequence: Synthetic oligonucleotide
  Target: LAMA2; (+) strand; PAM type: YTN; PAM sequence: TTA
tcttctctgagctgcacttc

SEQ ID NO: 330228 - DNA, 20 bp, Artificial Sequence
  Description of Artificial Sequence: Synthetic oligonucleotide
  Target: LAMA2; (+) strand; PAM type: YTN; PAM sequence: CTT
ctctgagctgcacttccttc

SEQ ID NO: 330229 - DNA, 20 bp, Artificial Sequence
  Description of Artificial Sequence: Synthetic oligonucleotide
  Target: LAMA2; (+) strand; PAM type: YTN; PAM sequence: TTC
tctgagctgcacttccttca

SEQ ID NO: 330230 - DNA, 20 bp, Artificial Sequence
  Description of Artificial Sequence: Synthetic oligonucleotide
  Target: LAMA2; (+) strand; PAM type: YTN; PAM sequence: CTC
tgagctgcacttccttcatt

SEQ ID NO: 330231 - DNA, 20 bp, Artificial Sequence
  Description of Artificial Sequence: Synthetic oligonucleotide
  Target: LAMA2; (+) strand; PAM type: YTN; PAM sequence: CTG
agctgcacttccttcatttt

SEQ ID NO: 330232 - DNA, 20 bp, Artificial Sequence
  Description of Artificial Sequence: Synthetic oligonucleotide
  Target: LAMA2; (+) strand; PAM type: YTN; PAM sequence: CTG
cacttccttcatttttataa

SEQ ID NO: 330233 - DNA, 20 bp, Artificial Sequence
  Description of Artificial Sequence: Synthetic oligonucleotide
  Target: LAMA2; (+) strand; PAM type: YTN; PAM sequence: CTT
ccttcatttttataaagtgg

SEQ ID NO: 330234 - DNA, 20 bp, Artificial Sequence
  Description of Artificial Sequence: Synthetic oligonucleotide
  Target: LAMA2; (+) strand; PAM type: YTN; PAM sequence: TTC
cttcatttttataaagtgga

SEQ ID NO: 330235 - DNA, 20 bp, Artificial Sequence
  Description of Artificial Sequence: Synthetic oligonucleotide
  Target: LAMA2; (+) strand; PAM type: YTN; PAM sequence: CTT
catttttataaagtggaaag

SEQ ID NO: 330236 - DNA, 20 bp, Artificial Sequence
  Description of Artificial Sequence: Synthetic oligonucleotide
  Target: LAMA2; (+) strand; PAM type: YTN; PAM sequence: TTC
atttttataaagtggaaaga

SEQ ID NO: 330237 - DNA, 20 bp, Artificial Sequence
  Description of Artificial Sequence: Synthetic oligonucleotide
  Target: LAMA2; (+) strand; PAM type: YTN; PAM sequence: TTT
ttataaagtggaaagaatta

SEQ ID NO: 330238 - DNA, 20 bp, Artificial Sequence
  Description of Artificial Sequence: Synthetic oligonucleotide
  Target: LAMA2; (+) strand; PAM type: YTN; PAM sequence: TTT
tataaagtggaaagaattaa

SEQ ID NO: 330239 - DNA, 20 bp, Artificial Sequence
  Description of Artificial Sequence: Synthetic oligonucleotide
  Target: LAMA2; (+) strand; PAM type: YTN; PAM sequence: TTT
ataaagtggaaagaattaat

SEQ ID NO: 330240 - DNA, 20 bp, Artificial Sequence
  Description of Artificial Sequence: Synthetic oligonucleotide
  Target: LAMA2; (+) strand; PAM type: YTN; PAM sequence: TTA
taaagtggaaagaattaata

SEQ ID NO: 330241 - DNA, 20 bp, Artificial Sequence
  Description of Artificial Sequence: Synthetic oligonucleotide
  Target: LAMA2; (+) strand; PAM type: YTN; PAM sequence: TTA
ataaaatttatacaatgggt

SEQ ID NO: 330242 - DNA, 20 bp, Artificial Sequence
  Description of Artificial Sequence: Synthetic oligonucleotide
  Target: LAMA2; (+) strand; PAM type: YTN; PAM sequence: TTT
atacaatgggttatatggga

SEQ ID NO: 330243 - DNA, 20 bp, Artificial Sequence
  Description of Artificial Sequence: Synthetic oligonucleotide
  Target: LAMA2; (+) strand; PAM type: YTN; PAM sequence: TTA
tacaatgggttatatgggaa

SEQ ID NO: 330244 - DNA, 20 bp, Artificial Sequence
  Description of Artificial Sequence: Synthetic oligonucleotide
  Target: LAMA2; (+) strand; PAM type: YTN; PAM sequence: TTA
tatgggaattaaataatatg

SEQ ID NO: 330245 - DNA, 20 bp, Artificial Sequence
  Description of Artificial Sequence: Synthetic oligonucleotide
  Target: LAMA2; (+) strand; PAM type: YTN; PAM sequence: TTA
aataatatgaagaatataga

SEQ ID NO: 330246 - DNA, 20 bp, Artificial Sequence
  Description of Artificial Sequence: Synthetic oligonucleotide
  Target: LAMA2; (+) strand; PAM type: YTN; PAM sequence: CTT
cagaatcaatgtttcttgta

SEQ ID NO: 330247 - DNA, 20 bp, Artificial Sequence
  Description of Artificial Sequence: Synthetic oligonucleotide
  Target: LAMA2; (+) strand; PAM type: YTN; PAM sequence: TTC
agaatcaatgtttcttgtac

SEQ ID NO: 330248 - DNA, 20 bp, Artificial Sequence
  Description of Artificial Sequence: Synthetic oligonucleotide
  Target: LAMA2; (+) strand; PAM type: YTN; PAM sequence: TTT
cttgtactctgtaatccctt

SEQ ID NO: 330249 - DNA, 20 bp, Artificial Sequence
  Description of Artificial Sequence: Synthetic oligonucleotide
  Target: LAMA2; (+) strand; PAM type: YTN; PAM sequence: TTC
ttgtactctgtaatcccttt

SEQ ID NO: 330250 - DNA, 20 bp, Artificial Sequence
  Description of Artificial Sequence: Synthetic oligonucleotide
  Target: LAMA2; (+) strand; PAM type: YTN; PAM sequence: CTT
gtactctgtaatccctttgt

SEQ ID NO: 330251 - DNA, 20 bp, Artificial Sequence
  Description of Artificial Sequence: Synthetic oligonucleotide
  Target: LAMA2; (+) strand; PAM type: YTN; PAM sequence: TTG
tactctgtaatccctttgta

SEQ ID NO: 330252 - DNA, 20 bp, Artificial Sequence
  Description of Artificial Sequence: Synthetic oligonucleotide
  Target: LAMA2; (+) strand; PAM type: YTN; PAM sequence: CTC
tgtaatccctttgtagctgt

SEQ ID NO: 330253 - DNA, 20 bp, Artificial Sequence
  Description of Artificial Sequence: Synthetic oligonucleotide
  Target: LAMA2; (+) strand; PAM type: YTN; PAM sequence: CTG
taatccctttgtagctgtat

SEQ ID NO: 330254 - DNA, 20 bp, Artificial Sequence
  Description of Artificial Sequence: Synthetic oligonucleotide
  Target: LAMA2; (+) strand; PAM type: YTN; PAM sequence: CTT
tgtagctgtatgcttttgct

SEQ ID NO: 330255 - DNA, 20 bp, Artificial Sequence
  Description of Artificial Sequence: Synthetic oligonucleotide
  Target: LAMA2; (+) strand; PAM type: YTN; PAM sequence: TTT
gtagctgtatgcttttgctc

SEQ ID NO: 330256 - DNA, 20 bp, Artificial Sequence
  Description of Artificial Sequence: Synthetic oligonucleotide
  Target: LAMA2; (+) strand; PAM type: YTN; PAM sequence: TTG
tagctgtatgcttttgctct

SEQ ID NO: 330257 - DNA, 20 bp, Artificial Sequence
  Description of Artificial Sequence: Synthetic oligonucleotide
  Target: LAMA2; (+) strand; PAM type: YTN; PAM sequence: CTG
tatgcttttgctctctttat

SEQ ID NO: 330258 - DNA, 20 bp, Artificial Sequence
  Description of Artificial Sequence: Synthetic oligonucleotide
  Target: LAMA2; (+) strand; PAM type: YTN; PAM sequence: CTT
ttgctctctttatttattta

SEQ ID NO: 330259 - DNA, 20 bp, Artificial Sequence
  Description of Artificial Sequence: Synthetic oligonucleotide
  Target: LAMA2; (+) strand; PAM type: YTN; PAM sequence: TTT
tgctctctttatttatttaa

SEQ ID NO: 330260 - DNA, 20 bp, Artificial Sequence
  Description of Artificial Sequence: Synthetic oligonucleotide
  Target: LAMA2; (+) strand; PAM type: YTN; PAM sequence: TTT
gctctctttatttatttaat

SEQ ID NO: 330261 - DNA, 20 bp, Artificial Sequence
  Description of Artificial Sequence: Synthetic oligonucleotide
  Target: LAMA2; (+) strand; PAM type: YTN; PAM sequence: TTG
ctctctttatttatttaatt

SEQ ID NO: 330262 - DNA, 20 bp, Artificial Sequence
  Description of Artificial Sequence: Synthetic oligonucleotide
  Target: LAMA2; (+) strand; PAM type: YTN; PAM sequence: CTC
tctttatttatttaattatg

SEQ ID NO: 330263 - DNA, 20 bp, Artificial Sequence
  Description of Artificial Sequence: Synthetic oligonucleotide
  Target: LAMA2; (+) strand; PAM type: YTN; PAM sequence: CTC
tttatttatttaattatgtg

SEQ ID NO: 330264 - DNA, 20 bp, Artificial Sequence
  Description of Artificial Sequence: Synthetic oligonucleotide
  Target: LAMA2; (+) strand; PAM type: YTN; PAM sequence: CTT
tatttatttaattatgtggg

SEQ ID NO: 330265 - DNA, 20 bp, Artificial Sequence
  Description of Artificial Sequence: Synthetic oligonucleotide
  Target: LAMA2; (+) strand; PAM type: YTN; PAM sequence: TTT
atttatttaattatgtggga

SEQ ID NO: 330266 - DNA, 20 bp, Artificial Sequence
  Description of Artificial Sequence: Synthetic oligonucleotide
  Target: LAMA2; (+) strand; PAM type: YTN; PAM sequence: TTA
tttatttaattatgtgggat

SEQ ID NO: 330267 - DNA, 20 bp, Artificial Sequence
  Description of Artificial Sequence: Synthetic oligonucleotide
  Target: LAMA2; (+) strand; PAM type: YTN; PAM sequence: TTT
atttaattatgtgggataat

SEQ ID NO: 330268 - DNA, 20 bp, Artificial Sequence
  Description of Artificial Sequence: Synthetic oligonucleotide
  Target: LAMA2; (+) strand; PAM type: YTN; PAM sequence: TTA
tttaattatgtgggataatt

SEQ ID NO: 330269 - DNA, 20 bp, Artificial Sequence
  Description of Artificial Sequence: Synthetic oligonucleotide
  Target: LAMA2; (+) strand; PAM type: YTN; PAM sequence: TTT
aattatgtgggataattggt

SEQ ID NO: 330270 - DNA, 20 bp, Artificial Sequence
  Description of Artificial Sequence: Synthetic oligonucleotide
  Target: LAMA2; (+) strand; PAM type: YTN; PAM sequence: TTA
attatgtgggataattggta

SEQ ID NO: 330271 - DNA, 20 bp, Artificial Sequence
  Description of Artificial Sequence: Synthetic oligonucleotide
  Target: LAMA2; (+) strand; PAM type: YTN; PAM sequence: TTA
tgtgggataattggtacata

SEQ ID NO: 330272 - DNA, 20 bp, Artificial Sequence
  Description of Artificial Sequence: Synthetic oligonucleotide
  Target: LAMA2; (+) strand; PAM type: YTN; PAM sequence: TTG
gtacataatccaattctata

SEQ ID NO: 330273 - DNA, 20 bp, Artificial Sequence
  Description of Artificial Sequence: Synthetic oligonucleotide
  Target: LAMA2; (+) strand; PAM type: YTN; PAM sequence: TTC
tatattttctgaacatacaa

SEQ ID NO: 330274 - DNA, 20 bp, Artificial Sequence
  Description of Artificial Sequence: Synthetic oligonucleotide
  Target: LAMA2; (+) strand; PAM type: YTN; PAM sequence: CTA
tattttctgaacatacaaca

SEQ ID NO: 330275 - DNA, 20 bp, Artificial Sequence
  Description of Artificial Sequence: Synthetic oligonucleotide
  Target: LAMA2; (+) strand; PAM type: YTN; PAM sequence: TTT
tctgaacatacaacataaag

SEQ ID NO: 330276 - DNA, 20 bp, Artificial Sequence
  Description of Artificial Sequence: Synthetic oligonucleotide
  Target: LAMA2; (+) strand; PAM type: YTN; PAM sequence: TTT
ctgaacatacaacataaaga

SEQ ID NO: 330277 - DNA, 20 bp, Artificial Sequence
  Description of Artificial Sequence: Synthetic oligonucleotide
  Target: LAMA2; (+) strand; PAM type: YTN; PAM sequence: TTC
tgaacatacaacataaagaa

SEQ ID NO: 330278 - DNA, 20 bp, Artificial Sequence
  Description of Artificial Sequence: Synthetic oligonucleotide
  Target: LAMA2; (+) strand; PAM type: YTN; PAM sequence: CTG
aacatacaacataaagaaaa

SEQ ID NO: 330279 - DNA, 20 bp, Artificial Sequence
  Description of Artificial Sequence: Synthetic oligonucleotide
  Target: LAMA2; (+) strand; PAM type: YTN; PAM sequence: CTT
tatccctggtctcttttctt

SEQ ID NO: 330280 - DNA, 20 bp, Artificial Sequence
  Description of Artificial Sequence: Synthetic oligonucleotide
  Target: LAMA2; (+) strand; PAM type: YTN; PAM sequence: TTT
atccctggtctcttttcttg

SEQ ID NO: 330281 - DNA, 20 bp, Artificial Sequence
  Description of Artificial Sequence: Synthetic oligonucleotide
  Target: LAMA2; (+) strand; PAM type: YTN; PAM sequence: TTA
tccctggtctcttttcttgg

SEQ ID NO: 330282 - DNA, 20 bp, Artificial Sequence
  Description of Artificial Sequence: Synthetic oligonucleotide
  Target: LAMA2; (+) strand; PAM type: YTN; PAM sequence: CTG
gtctcttttcttggcttcct

SEQ ID NO: 330283 - DNA, 20 bp, Artificial Sequence
  Description of Artificial Sequence: Synthetic oligonucleotide
  Target: LAMA2; (+) strand; PAM type: YTN; PAM sequence: CTC
ttttcttggcttcctcccat

SEQ ID NO: 330284 - DNA, 20 bp, Artificial Sequence
  Description of Artificial Sequence: Synthetic oligonucleotide
  Target: LAMA2; (+) strand; PAM type: YTN; PAM sequence: CTT
ttcttggcttcctcccatga

SEQ ID NO: 330285 - DNA, 20 bp, Artificial Sequence
  Description of Artificial Sequence: Synthetic oligonucleotide
  Target: LAMA2; (+) strand; PAM type: YTN; PAM sequence: TTT
tcttggcttcctcccatgat

SEQ ID NO: 330286 - DNA, 20 bp, Artificial Sequence
  Description of Artificial Sequence: Synthetic oligonucleotide
  Target: LAMA2; (+) strand; PAM type: YTN; PAM sequence: TTT
cttggcttcctcccatgatt

SEQ ID NO: 330287 - DNA, 20 bp, Artificial Sequence
  Description of Artificial Sequence: Synthetic oligonucleotide
  Target: LAMA2; (+) strand; PAM type: YTN; PAM sequence: TTC
ttggcttcctcccatgattg

SEQ ID NO: 330288 - DNA, 20 bp, Artificial Sequence
  Description of Artificial Sequence: Synthetic oligonucleotide
  Target: LAMA2; (+) strand; PAM type: YTN; PAM sequence: CTT
ggcttcctcccatgattgct

SEQ ID NO: 330289 - DNA, 20 bp, Artificial Sequence
  Description of Artificial Sequence: Synthetic oligonucleotide
  Target: LAMA2; (+) strand; PAM type: YTN; PAM sequence: TTG
gcttcctcccatgattgctg

SEQ ID NO: 330290 - DNA, 20 bp, Artificial Sequence
  Description of Artificial Sequence: Synthetic oligonucleotide
  Target: LAMA2; (+) strand; PAM type: YTN; PAM sequence: CTT
cctcccatgattgctgaggc

SEQ ID NO: 330291 - DNA, 20 bp, Artificial Sequence
  Description of Artificial Sequence: Synthetic oligonucleotide
  Target: LAMA2; (+) strand; PAM type: YTN; PAM sequence: TTC
ctcccatgattgctgaggcc

SEQ ID NO: 330292 - DNA, 20 bp, Artificial Sequence
  Description of Artificial Sequence: Synthetic oligonucleotide
  Target: LAMA2; (+) strand; PAM type: YTN; PAM sequence: CTC
ccatgattgctgaggcctgg

SEQ ID NO: 330293 - DNA, 20 bp, Artificial Sequence
  Description of Artificial Sequence: Synthetic oligonucleotide
  Target: LAMA2; (+) strand; PAM type: YTN; PAM sequence: TTG
ctgaggcctgggaaagtaca

SEQ ID NO: 330294 - DNA, 20 bp, Artificial Sequence
  Description of Artificial Sequence: Synthetic oligonucleotide
  Target: LAMA2; (+) strand; PAM type: YTN; PAM sequence: CTG
aggcctgggaaagtacaggc

SEQ ID NO: 330295 - DNA, 20 bp, Artificial Sequence
  Description of Artificial Sequence: Synthetic oligonucleotide
  Target: LAMA2; (+) strand; PAM type: YTN; PAM sequence: CTG
ggaaagtacaggcctggcct

SEQ ID NO: 330296 - DNA, 20 bp, Artificial Sequence
  Description of Artificial Sequence: Synthetic oligonucleotide
  Target: LAMA2; (+) strand; PAM type: YTN; PAM sequence: CTG
gcctgctccaatcaggtctt

SEQ ID NO: 330297 - DNA, 20 bp, Artificial Sequence
  Description of Artificial Sequence: Synthetic oligonucleotide
  Target: LAMA2; (+) strand; PAM type: YTN; PAM sequence: CTG
ctccaatcaggtctttcagg

SEQ ID NO: 330298 - DNA, 20 bp, Artificial Sequence
  Description of Artificial Sequence: Synthetic oligonucleotide
  Target: LAMA2; (+) strand; PAM type: YTN; PAM sequence: CTC
caatcaggtctttcagggca

SEQ ID NO: 330299 - DNA, 20 bp, Artificial Sequence
  Description of Artificial Sequence: Synthetic oligonucleotide
  Target: LAMA2; (+) strand; PAM type: YTN; PAM sequence: CTT
tcagggcagaccaaagcagg

SEQ ID NO: 330300 - DNA, 20 bp, Artificial Sequence
  Description of Artificial Sequence: Synthetic oligonucleotide
  Target: LAMA2; (+) strand; PAM type: YTN; PAM sequence: TTT
cagggcagaccaaagcaggg

SEQ ID NO: 330301 - DNA, 20 bp, Artificial Sequence
  Description of Artificial Sequence: Synthetic oligonucleotide
  Target: LAMA2; (+) strand; PAM type: YTN; PAM sequence: TTC
agggcagaccaaagcagggc

SEQ ID NO: 330302 - DNA, 20 bp, Artificial Sequence
  Description of Artificial Sequence: Synthetic oligonucleotide
  Target: LAMA2; (+) strand; PAM type: YTN; PAM sequence: CTT
acccatacctgcaaaacagg

SEQ ID NO: 330303 - DNA, 20 bp, Artificial Sequence
  Description of Artificial Sequence: Synthetic oligonucleotide
  Target: LAMA2; (+) strand; PAM type: YTN; PAM sequence: TTA
cccatacctgcaaaacagga

SEQ ID NO: 330304 - DNA, 20 bp, Artificial Sequence
  Description of Artificial Sequence: Synthetic oligonucleotide
  Target: LAMA2; (+) strand; PAM type: YTN; PAM sequence: CTG
caaaacaggaatgaggccat

SEQ ID NO: 330305 - DNA, 20 bp, Artificial Sequence
  Description of Artificial Sequence: Synthetic oligonucleotide
  Target: LAMA2; (+) strand; PAM type: YTN; PAM sequence: CTA
gtcagtgctgagggaggagg

SEQ ID NO: 330306 - DNA, 20 bp, Artificial Sequence
  Description of Artificial Sequence: Synthetic oligonucleotide
  Target: LAMA2; (+) strand; PAM type: YTN; PAM sequence: CTG
agggaggaggcaaaaatccg

SEQ ID NO: 330307 - DNA, 20 bp, Artificial Sequence
  Description of Artificial Sequence: Synthetic oligonucleotide
  Target: LAMA2; (+) strand; PAM type: YTN; PAM sequence: CTG
gtgaagttttagaaatgtta

SEQ ID NO: 330308 - DNA, 20 bp, Artificial Sequence
  Description of Artificial Sequence: Synthetic oligonucleotide
  Target: LAMA2; (+) strand; PAM type: YTN; PAM sequence: TTT
tagaaatgttagcacctgcc

SEQ ID NO: 330309 - DNA, 20 bp, Artificial Sequence
  Description of Artificial Sequence: Synthetic oligonucleotide
  Target: LAMA2; (+) strand; PAM type: YTN; PAM sequence: TTT
agaaatgttagcacctgcct

SEQ ID NO: 330310 - DNA, 20 bp, Artificial Sequence
  Description of Artificial Sequence: Synthetic oligonucleotide
  Target: LAMA2; (+) strand; PAM type: YTN; PAM sequence: TTA
gaaatgttagcacctgcctg

SEQ ID NO: 330311 - DNA, 20 bp, Artificial Sequence
  Description of Artificial Sequence: Synthetic oligonucleotide
  Target: LAMA2; (+) strand; PAM type: YTN; PAM sequence: TTA
gcacctgcctgagatggctt

SEQ ID NO: 330312 - DNA, 20 bp, Artificial Sequence
  Description of Artificial Sequence: Synthetic oligonucleotide
  Target: LAMA2; (+) strand; PAM type: YTN; PAM sequence: CTG
cctgagatggcttttgtgta

SEQ ID NO: 330313 - DNA, 20 bp, Artificial Sequence
  Description of Artificial Sequence: Synthetic oligonucleotide
  Target: LAMA2; (+) strand; PAM type: YTN; PAM sequence: CTG
agatggcttttgtgtaagta

SEQ ID NO: 330314 - DNA, 20 bp, Artificial Sequence
  Description of Artificial Sequence: Synthetic oligonucleotide
  Target: LAMA2; (+) strand; PAM type: YTN; PAM sequence: CTT
ttgtgtaagtaagctggctg

SEQ ID NO: 330315 - DNA, 20 bp, Artificial Sequence
  Description of Artificial Sequence: Synthetic oligonucleotide
  Target: LAMA2; (+) strand; PAM type: YTN; PAM sequence: TTT
tgtgtaagtaagctggctgt

SEQ ID NO: 330316 - DNA, 20 bp, Artificial Sequence
  Description of Artificial Sequence: Synthetic oligonucleotide
  Target: LAMA2; (+) strand; PAM type: YTN; PAM sequence: TTT
gtgtaagtaagctggctgtc

SEQ ID NO: 330317 - DNA, 20 bp, Artificial Sequence
  Description of Artificial Sequence: Synthetic oligonucleotide
  Target: LAMA2; (+) strand; PAM type: YTN; PAM sequence: TTG
tgtaagtaagctggctgtct

SEQ ID NO: 330318 - DNA, 20 bp, Artificial Sequence
  Description of Artificial Sequence: Synthetic oligonucleotide
  Target: LAMA2; (+) strand; PAM type: YTN; PAM sequence: CTG
gctgtctttgaagggggcag

SEQ ID NO: 330319 - DNA, 20 bp, Artificial Sequence
  Description of Artificial Sequence: Synthetic oligonucleotide
  Target: LAMA2; (+) strand; PAM type: YTN; PAM sequence: CTG
tctttgaagggggcagatgg

SEQ ID NO: 330320 - DNA, 20 bp, Artificial Sequence
  Description of Artificial Sequence: Synthetic oligonucleotide
  Target: LAMA2; (+) strand; PAM type: YTN; PAM sequence: CTT
tgaagggggcagatggagct

SEQ ID NO: 330321 - DNA, 20 bp, Artificial Sequence
  Description of Artificial Sequence: Synthetic oligonucleotide
  Target: LAMA2; (+) strand; PAM type: YTN; PAM sequence: TTT
gaagggggcagatggagcta

SEQ ID NO: 330322 - DNA, 20 bp, Artificial Sequence
  Description of Artificial Sequence: Synthetic oligonucleotide
  Target: LAMA2; (+) strand; PAM type: YTN; PAM sequence: TTG
aagggggcagatggagctag

SEQ ID NO: 330323 - DNA, 20 bp, Artificial Sequence
  Description of Artificial Sequence: Synthetic oligonucleotide
  Target: LAMA2; (+) strand; PAM type: YTN; PAM sequence: CTA
gactgcttaaactcatcata

SEQ ID NO: 330324 - DNA, 20 bp, Artificial Sequence
  Description of Artificial Sequence: Synthetic oligonucleotide
  Target: LAMA2; (+) strand; PAM type: YTN; PAM sequence: CTG
cttaaactcatcatataagc

SEQ ID NO: 330325 - DNA, 20 bp, Artificial Sequence
  Description of Artificial Sequence: Synthetic oligonucleotide
  Target: LAMA2; (+) strand; PAM type: YTN; PAM sequence: CTT
aaactcatcatataagcgag

SEQ ID NO: 330326 - DNA, 20 bp, Artificial Sequence
  Description of Artificial Sequence: Synthetic oligonucleotide
  Target: LAMA2; (+) strand; PAM type: YTN; PAM sequence: TTA
aactcatcatataagcgagc

SEQ ID NO: 330327 - DNA, 20 bp, Artificial Sequence
  Description of Artificial Sequence: Synthetic oligonucleotide
  Target: LAMA2; (+) strand; PAM type: YTN; PAM sequence: CTC
atcatataagcgagcaagag

SEQ ID NO: 330328 - DNA, 20 bp, Artificial Sequence
  Description of Artificial Sequence: Synthetic oligonucleotide
  Target: LAMA2; (+) strand; PAM type: YTN; PAM sequence: TTT
tgctctcctttaaacagaat

SEQ ID NO: 330329 - DNA, 20 bp, Artificial Sequence
  Description of Artificial Sequence: Synthetic oligonucleotide
  Target: LAMA2; (+) strand; PAM type: YTN; PAM sequence: TTT
gctctcctttaaacagaatt

SEQ ID NO: 330330 - DNA, 20 bp, Artificial Sequence
  Description of Artificial Sequence: Synthetic oligonucleotide
  Target: LAMA2; (+) strand; PAM type: YTN; PAM sequence: TTG
ctctcctttaaacagaattc

SEQ ID NO: 330331 - DNA, 20 bp, Artificial Sequence
  Description of Artificial Sequence: Synthetic oligonucleotide
  Target: LAMA2; (+) strand; PAM type: YTN; PAM sequence: CTC
tcctttaaacagaattccca

SEQ ID NO: 330332 - DNA, 20 bp, Artificial Sequence
  Description of Artificial Sequence: Synthetic oligonucleotide
  Target: LAMA2; (+) strand; PAM type: YTN; PAM sequence: CTC
ctttaaacagaattcccagc

SEQ ID NO: 330333 - DNA, 20 bp, Artificial Sequence
  Description of Artificial Sequence: Synthetic oligonucleotide
  Target: LAMA2; (+) strand; PAM type: YTN; PAM sequence: CTT
taaacagaattcccagcatg

SEQ ID NO: 330334 - DNA, 20 bp, Artificial Sequence
  Description of Artificial Sequence: Synthetic oligonucleotide
  Target: LAMA2; (+) strand; PAM type: YTN; PAM sequence: TTT
aaacagaattcccagcatgt

SEQ ID NO: 330335 - DNA, 20 bp, Artificial Sequence
  Description of Artificial Sequence: Synthetic oligonucleotide
  Target: LAMA2; (+) strand; PAM type: YTN; PAM sequence: TTA
aacagaattcccagcatgtc

SEQ ID NO: 330336 - DNA, 20 bp, Artificial Sequence
  Description of Artificial Sequence: Synthetic oligonucleotide
  Target: LAMA2; (+) strand; PAM type: YTN; PAM sequence: TTC
ccagcatgtctctttgttct

SEQ ID NO: 330337 - DNA, 20 bp, Artificial Sequence
  Description of Artificial Sequence: Synthetic oligonucleotide
  Target: LAMA2; (+) strand; PAM type: YTN; PAM sequence: CTC
tttgttcttactacttattt

SEQ ID NO: 330338 - DNA, 20 bp, Artificial Sequence
  Description of Artificial Sequence: Synthetic oligonucleotide
  Target: LAMA2; (+) strand; PAM type: YTN; PAM sequence: CTT
tgttcttactacttattttt

SEQ ID NO: 330339 - DNA, 20 bp, Artificial Sequence
  Description of Artificial Sequence: Synthetic oligonucleotide
  Target: LAMA2; (+) strand; PAM type: YTN; PAM sequence: TTT
gttcttactacttatttttc

SEQ ID NO: 330340 - DNA, 20 bp, Artificial Sequence
  Description of Artificial Sequence: Synthetic oligonucleotide
  Target: LAMA2; (+) strand; PAM type: YTN; PAM sequence: TTG
ttcttactacttatttttct

SEQ ID NO: 330341 - DNA, 20 bp, Artificial Sequence
  Description of Artificial Sequence: Synthetic oligonucleotide
  Target: LAMA2; (+) strand; PAM type: YTN; PAM sequence: TTC
ttactacttatttttctata

SEQ ID NO: 330342 - DNA, 20 bp, Artificial Sequence
  Description of Artificial Sequence: Synthetic oligonucleotide
  Target: LAMA2; (+) strand; PAM type: YTN; PAM sequence: CTT
actacttatttttctatact

SEQ ID NO: 330343 - DNA, 20 bp, Artificial Sequence
  Description of Artificial Sequence: Synthetic oligonucleotide
  Target: LAMA2; (+) strand; PAM type: YTN; PAM sequence: TTA
ctacttatttttctatactg

SEQ ID NO: 330344 - DNA, 20 bp, Artificial Sequence
  Description of Artificial Sequence: Synthetic oligonucleotide
  Target: LAMA2; (+) strand; PAM type: YTN; PAM sequence: CTA
cttatttttctatactgtaa

SEQ ID NO: 330345 - DNA, 20 bp, Artificial Sequence
  Description of Artificial Sequence: Synthetic oligonucleotide
  Target: LAMA2; (+) strand; PAM type: YTN; PAM sequence: CTT
atttttctatactgtaaatt

SEQ ID NO: 330346 - DNA, 20 bp, Artificial Sequence
  Description of Artificial Sequence: Synthetic oligonucleotide
  Target: LAMA2; (+) strand; PAM type: YTN; PAM sequence: TTA
tttttctatactgtaaatta

SEQ ID NO: 330347 - DNA, 20 bp, Artificial Sequence
  Description of Artificial Sequence: Synthetic oligonucleotide
  Target: LAMA2; (+) strand; PAM type: YTN; PAM sequence: TTT
ttctatactgtaaattaaat

SEQ ID NO: 330348 - DNA, 20 bp, Artificial Sequence
  Description of Artificial Sequence: Synthetic oligonucleotide
  Target: LAMA2; (+) strand; PAM type: YTN; PAM sequence: TTT
tctatactgtaaattaaatt

SEQ ID NO: 330349 - DNA, 20 bp, Artificial Sequence
  Description of Artificial Sequence: Synthetic oligonucleotide
  Target: LAMA2; (+) strand; PAM type: YTN; PAM sequence: TTT
ctatactgtaaattaaattt

SEQ ID NO: 330350 - DNA, 20 bp, Artificial Sequence
  Description of Artificial Sequence: Synthetic oligonucleotide
  Target: LAMA2; (+) strand; PAM type: YTN; PAM sequence: TTC
tatactgtaaattaaatttt

SEQ ID NO: 330351 - DNA, 20 bp, Artificial Sequence
  Description of Artificial Sequence: Synthetic oligonucleotide
  Target: LAMA2; (+) strand; PAM type: YTN; PAM sequence: CTA
tactgtaaattaaattttta

SEQ ID NO: 330352 - DNA, 20 bp, Artificial Sequence
  Description of Artificial Sequence: Synthetic oligonucleotide
  Target: LAMA2; (+) strand; PAM type: YTN; PAM sequence: CTG
taaattaaatttttaaagaa

SEQ ID NO: 330353 - DNA, 20 bp, Artificial Sequence
  Description of Artificial Sequence: Synthetic oligonucleotide
  Target: LAMA2; (+) strand; PAM type: YTN; PAM sequence: TTA
aatttttaaagaactggaga

SEQ ID NO: 330354 - DNA, 20 bp, Artificial Sequence
  Description of Artificial Sequence: Synthetic oligonucleotide
  Target: LAMA2; (+) strand; PAM type: YTN; PAM sequence: TTT
ttaaagaactggagaaaagt

SEQ ID NO: 330355 - DNA, 20 bp, Artificial Sequence
  Description of Artificial Sequence: Synthetic oligonucleotide
  Target: LAMA2; (+) strand; PAM type: YTN; PAM sequence: TTT
taaagaactggagaaaagtc

SEQ ID NO: 330356 - DNA, 20 bp, Artificial Sequence
  Description of Artificial Sequence: Synthetic oligonucleotide
  Target: LAMA2; (+) strand; PAM type: YTN; PAM sequence: TTT
aaagaactggagaaaagtcc

SEQ ID NO: 330357 - DNA, 20 bp, Artificial Sequence
  Description of Artificial Sequence: Synthetic oligonucleotide
  Target: LAMA2; (+) strand; PAM type: YTN; PAM sequence: TTA
aagaactggagaaaagtcca

SEQ ID NO: 330358 - DNA, 20 bp, Artificial Sequence
  Description of Artificial Sequence: Synthetic oligonucleotide
  Target: LAMA2; (+) strand; PAM type: YTN; PAM sequence: CTG
gagaaaagtccactaaaaca

SEQ ID NO: 330359 - DNA, 20 bp, Artificial Sequence
  Description of Artificial Sequence: Synthetic oligonucleotide
  Target: LAMA2; (+) strand; PAM type: YTN; PAM sequence: CTA
aaacaaattactaacagtga

SEQ ID NO: 330360 - DNA, 20 bp, Artificial Sequence
  Description of Artificial Sequence: Synthetic oligonucleotide
  Target: LAMA2; (+) strand; PAM type: YTN; PAM sequence: TTA
ctaacagtgacaaataagca

SEQ ID NO: 330361 - DNA, 20 bp, Artificial Sequence
  Description of Artificial Sequence: Synthetic oligonucleotide
  Target: LAMA2; (+) strand; PAM type: YTN; PAM sequence: CTA
acagtgacaaataagcagtg

SEQ ID NO: 330362 - DNA, 20 bp, Artificial Sequence
  Description of Artificial Sequence: Synthetic oligonucleotide
  Target: LAMA2; (+) strand; PAM type: YTN; PAM sequence: CTT
tatgttaatatgtaagtgca

SEQ ID NO: 330363 - DNA, 20 bp, Artificial Sequence
  Description of Artificial Sequence: Synthetic oligonucleotide
  Target: LAMA2; (+) strand; PAM type: YTN; PAM sequence: TTT
atgttaatatgtaagtgcac

SEQ ID NO: 330364 - DNA, 20 bp, Artificial Sequence
  Description of Artificial Sequence: Synthetic oligonucleotide
  Target: LAMA2; (+) strand; PAM type: YTN; PAM sequence: TTA
tgttaatatgtaagtgcacc

SEQ ID NO: 330365 - DNA, 20 bp, Artificial Sequence
  Description of Artificial Sequence: Synthetic oligonucleotide
  Target: LAMA2; (+) strand; PAM type: YTN; PAM sequence: TTA
atatgtaagtgcaccattgt

SEQ ID NO: 330366 - DNA, 20 bp, Artificial Sequence
  Description of Artificial Sequence: Synthetic oligonucleotide
  Target: LAMA2; (+) strand; PAM type: YTN; PAM sequence: TTG
tattagtccattctcatgct

SEQ ID NO: 330367 - DNA, 20 bp, Artificial Sequence
  Description of Artificial Sequence: Synthetic oligonucleotide
  Target: LAMA2; (+) strand; PAM type: YTN; PAM sequence: TTA
gtccattctcatgctactaa

SEQ ID NO: 330368 - DNA, 20 bp, Artificial Sequence
  Description of Artificial Sequence: Synthetic oligonucleotide
  Target: LAMA2; (+) strand; PAM type: YTN; PAM sequence: TTC
tcatgctactaataaagaca

SEQ ID NO: 330369 - DNA, 20 bp, Artificial Sequence
  Description of Artificial Sequence: Synthetic oligonucleotide
  Target: LAMA2; (+) strand; PAM type: YTN; PAM sequence: CTC
atgctactaataaagacata

SEQ ID NO: 330370 - DNA, 20 bp, Artificial Sequence
  Description of Artificial Sequence: Synthetic oligonucleotide
  Target: LAMA2; (+) strand; PAM type: YTN; PAM sequence: CTA
ctaataaagacatacccaag

SEQ ID NO: 330371 - DNA, 20 bp, Artificial Sequence
  Description of Artificial Sequence: Synthetic oligonucleotide
  Target: LAMA2; (+) strand; PAM type: YTN; PAM sequence: CTA
ataaagacatacccaagact

SEQ ID NO: 330372 - DNA, 20 bp, Artificial Sequence
  Description of Artificial Sequence: Synthetic oligonucleotide
  Target: LAMA2; (+) strand; PAM type: YTN; PAM sequence: CTG
gataatttatagagaaaaat

SEQ ID NO: 330373 - DNA, 20 bp, Artificial Sequence
  Description of Artificial Sequence: Synthetic oligonucleotide
  Target: LAMA2; (+) strand; PAM type: YTN; PAM sequence: TTT
atagagaaaaataggtttaa

SEQ ID NO: 330374 - DNA, 20 bp, Artificial Sequence
  Description of Artificial Sequence: Synthetic oligonucleotide
  Target: LAMA2; (+) strand; PAM type: YTN; PAM sequence: TTA
tagagaaaaataggtttaat

SEQ ID NO: 330375 - DNA, 20 bp, Artificial Sequence
  Description of Artificial Sequence: Synthetic oligonucleotide
  Target: LAMA2; (+) strand; PAM type: YTN; PAM sequence: TTT
aatagactcacagttccaca

SEQ ID NO: 330376 - DNA, 20 bp, Artificial Sequence
  Description of Artificial Sequence: Synthetic oligonucleotide
  Target: LAMA2; (+) strand; PAM type: YTN; PAM sequence: TTA
atagactcacagttccacat

SEQ ID NO: 330377 - DNA, 20 bp, Artificial Sequence
  Description of Artificial Sequence: Synthetic oligonucleotide
  Target: LAMA2; (+) strand; PAM type: YTN; PAM sequence: CTC
acagttccacatggctgggg

SEQ ID NO: 330378 - DNA, 20 bp, Artificial Sequence
  Description of Artificial Sequence: Synthetic oligonucleotide
  Target: LAMA2; (+) strand; PAM type: YTN; PAM sequence: TTC
cacatggctggggaggtctc

SEQ ID NO: 330379 - DNA, 20 bp, Artificial Sequence
  Description of Artificial Sequence: Synthetic oligonucleotide
  Target: LAMA2; (+) strand; PAM type: YTN; PAM sequence: CTG
gggaggtctcacaatcatgg

SEQ ID NO: 330380 - DNA, 20 bp, Artificial Sequence
  Description of Artificial Sequence: Synthetic oligonucleotide
  Target: LAMA2; (+) strand; PAM type: YTN; PAM sequence: CTC
acaatcatggtggaaggcaa

SEQ ID NO: 330381 - DNA, 20 bp, Artificial Sequence
  Description of Artificial Sequence: Synthetic oligonucleotide
  Target: LAMA2; (+) strand; PAM type: YTN; PAM sequence: CTT
acatggtggcaggcaagaga

SEQ ID NO: 330382 - DNA, 20 bp, Artificial Sequence
  Description of Artificial Sequence: Synthetic oligonucleotide
  Target: LAMA2; (+) strand; PAM type: YTN; PAM sequence: TTA
catggtggcaggcaagagag

SEQ ID NO: 330383 - DNA, 20 bp, Artificial Sequence
  Description of Artificial Sequence: Synthetic oligonucleotide
  Target: LAMA2; (+) strand; PAM type: YTN; PAM sequence: CTG
cactttataaaatcgccaga

SEQ ID NO: 330384 - DNA, 20 bp, Artificial Sequence
  Description of Artificial Sequence: Synthetic oligonucleotide
  Target: LAMA2; (+) strand; PAM type: YTN; PAM sequence: CTT
tataaaatcgccagatatta

SEQ ID NO: 330385 - DNA, 20 bp, Artificial Sequence
  Description of Artificial Sequence: Synthetic oligonucleotide
  Target: LAMA2; (+) strand; PAM type: YTN; PAM sequence: TTT
ataaaatcgccagatattat

SEQ ID NO: 330386 - DNA, 20 bp, Artificial Sequence
  Description of Artificial Sequence: Synthetic oligonucleotide
  Target: LAMA2; (+) strand; PAM type: YTN; PAM sequence: TTA
taaaatcgccagatattatg

SEQ ID NO: 330387 - DNA, 20 bp, Artificial Sequence
  Description of Artificial Sequence: Synthetic oligonucleotide
  Target: LAMA2; (+) strand; PAM type: YTN; PAM sequence: TTA
tgagacttatttactatcac

SEQ ID NO: 330388 - DNA, 20 bp, Artificial Sequence
  Description of Artificial Sequence: Synthetic oligonucleotide
  Target: LAMA2; (+) strand; PAM type: YTN; PAM sequence: CTT
atttactatcacgagaacag

SEQ ID NO: 330389 - DNA, 20 bp, Artificial Sequence
  Description of Artificial Sequence: Synthetic oligonucleotide
  Target: LAMA2; (+) strand; PAM type: YTN; PAM sequence: TTA
tttactatcacgagaacagc

SEQ ID NO: 330390 - DNA, 20 bp, Artificial Sequence
  Description of Artificial Sequence: Synthetic oligonucleotide
  Target: LAMA2; (+) strand; PAM type: YTN; PAM sequence: TTT
actatcacgagaacagcatg

SEQ ID NO: 330391 - DNA, 20 bp, Artificial Sequence
  Description of Artificial Sequence: Synthetic oligonucleotide
  Target: LAMA2; (+) strand; PAM type: YTN; PAM sequence: TTA
ctatcacgagaacagcatga

SEQ ID NO: 330392 - DNA, 20 bp, Artificial Sequence
  Description of Artificial Sequence: Synthetic oligonucleotide
  Target: LAMA2; (+) strand; PAM type: YTN; PAM sequence: CTA
tcacgagaacagcatgagaa

SEQ ID NO: 330393 - DNA, 20 bp, Artificial Sequence
  Description of Artificial Sequence: Synthetic oligonucleotide
  Target: LAMA2; (+) strand; PAM type: YTN; PAM sequence: CTG
ccctcatgattcaaatacct

SEQ ID NO: 330394 - DNA, 20 bp, Artificial Sequence
  Description of Artificial Sequence: Synthetic oligonucleotide
  Target: LAMA2; (+) strand; PAM type: YTN; PAM sequence: CTC
atgattcaaatacctcccaa

SEQ ID NO: 330395 - DNA, 20 bp, Artificial Sequence
  Description of Artificial Sequence: Synthetic oligonucleotide
  Target: LAMA2; (+) strand; PAM type: YTN; PAM sequence: TTC
aaatacctcccaacgtgtcc

SEQ ID NO: 330396 - DNA, 20 bp, Artificial Sequence
  Description of Artificial Sequence: Synthetic oligonucleotide
  Target: LAMA2; (+) strand; PAM type: YTN; PAM sequence: CTC
ccaacgtgtccctcccacaa

SEQ ID NO: 330397 - DNA, 20 bp, Artificial Sequence
  Description of Artificial Sequence: Synthetic oligonucleotide
  Target: LAMA2; (+) strand; PAM type: YTN; PAM sequence: CTC
ccacaacacatggggattac

SEQ ID NO: 330398 - DNA, 20 bp, Artificial Sequence
  Description of Artificial Sequence: Synthetic oligonucleotide
  Target: LAMA2; (+) strand; PAM type: YTN; PAM sequence: TTA
caggcgctacaattcaagat

SEQ ID NO: 330399 - DNA, 20 bp, Artificial Sequence
  Description of Artificial Sequence: Synthetic oligonucleotide
  Target: LAMA2; (+) strand; PAM type: YTN; PAM sequence: CTA
caattcaagatgagatttgg

SEQ ID NO: 330400 - DNA, 20 bp, Artificial Sequence
  Description of Artificial Sequence: Synthetic oligonucleotide
  Target: LAMA2; (+) strand; PAM type: YTN; PAM sequence: TTC
aagatgagatttgggtaggg

SEQ ID NO: 330401 - DNA, 20 bp, Artificial Sequence
  Description of Artificial Sequence: Synthetic oligonucleotide
  Target: LAMA2; (+) strand; PAM type: YTN; PAM sequence: TTT
gggtagggacacagccaaac

SEQ ID NO: 330402 - DNA, 20 bp, Artificial Sequence
  Description of Artificial Sequence: Synthetic oligonucleotide
  Target: LAMA2; (+) strand; PAM type: YTN; PAM sequence: TTG
ggtagggacacagccaaacc

SEQ ID NO: 330403 - DNA, 20 bp, Artificial Sequence
  Description of Artificial Sequence: Synthetic oligonucleotide
  Target: LAMA2; (+) strand; PAM type: YTN; PAM sequence: TTA
tgtttattcaatgtgtaacc

SEQ ID NO: 330404 - DNA, 20 bp, Artificial Sequence
  Description of Artificial Sequence: Synthetic oligonucleotide
  Target: LAMA2; (+) strand; PAM type: YTN; PAM sequence: TTT
attcaatgtgtaacctatat

SEQ ID NO: 330405 - DNA, 20 bp, Artificial Sequence
  Description of Artificial Sequence: Synthetic oligonucleotide
  Target: LAMA2; (+) strand; PAM type: YTN; PAM sequence: TTA
ttcaatgtgtaacctatatg

SEQ ID NO: 330406 - DNA, 20 bp, Artificial Sequence
  Description of Artificial Sequence: Synthetic oligonucleotide
  Target: LAMA2; (+) strand; PAM type: YTN; PAM sequence: TTC
aatgtgtaacctatatgtat

SEQ ID NO: 330407 - DNA, 20 bp, Artificial Sequence
  Description of Artificial Sequence: Synthetic oligonucleotide
  Target: LAMA2; (+) strand; PAM type: YTN; PAM sequence: CTA
tatgtatctgtatctatagc

SEQ ID NO: 330408 - DNA, 20 bp, Artificial Sequence
  Description of Artificial Sequence: Synthetic oligonucleotide
  Target: LAMA2; (+) strand; PAM type: YTN; PAM sequence: CTG
tatctatagccacatctata

SEQ ID NO: 330409 - DNA, 20 bp, Artificial Sequence
  Description of Artificial Sequence: Synthetic oligonucleotide
  Target: LAMA2; (+) strand; PAM type: YTN; PAM sequence: CTA
tagccacatctatatccaga

SEQ ID NO: 330410 - DNA, 20 bp, Artificial Sequence
  Description of Artificial Sequence: Synthetic oligonucleotide
  Target: LAMA2; (+) strand; PAM type: YTN; PAM sequence: CTA
tatccagacaattacataat

SEQ ID NO: 330411 - DNA, 20 bp, Artificial Sequence
  Description of Artificial Sequence: Synthetic oligonucleotide
  Target: LAMA2; (+) strand; PAM type: YTN; PAM sequence: TTA
cataatcttatatgttgaaa

SEQ ID NO: 330412 - DNA, 20 bp, Artificial Sequence
  Description of Artificial Sequence: Synthetic oligonucleotide
  Target: LAMA2; (+) strand; PAM type: YTN; PAM sequence: CTT
atatgttgaaacaattacag

SEQ ID NO: 330413 - DNA, 20 bp, Artificial Sequence
  Description of Artificial Sequence: Synthetic oligonucleotide
  Target: LAMA2; (+) strand; PAM type: YTN; PAM sequence: TTA
tatgttgaaacaattacaga

SEQ ID NO: 330414 - DNA, 20 bp, Artificial Sequence
  Description of Artificial Sequence: Synthetic oligonucleotide
  Target: LAMA2; (+) strand; PAM type: YTN; PAM sequence: TTG
aaacaattacagattcaagt

SEQ ID NO: 330415 - DNA, 20 bp, Artificial Sequence
  Description of Artificial Sequence: Synthetic oligonucleotide
  Target: LAMA2; (+) strand; PAM type: YTN; PAM sequence: TTA
cagattcaagtactctgact

SEQ ID NO: 330416 - DNA, 20 bp, Artificial Sequence
  Description of Artificial Sequence: Synthetic oligonucleotide
  Target: LAMA2; (+) strand; PAM type: YTN; PAM sequence: TTC
aagtactctgactcactcat

SEQ ID NO: 330417 - DNA, 20 bp, Artificial Sequence
  Description of Artificial Sequence: Synthetic oligonucleotide
  Target: LAMA2; (+) strand; PAM type: YTN; PAM sequence: CTC
tgactcactcatcatttaca

SEQ ID NO: 330418 - DNA, 20 bp, Artificial Sequence
  Description of Artificial Sequence: Synthetic oligonucleotide
  Target: LAMA2; (+) strand; PAM type: YTN; PAM sequence: CTG
actcactcatcatttacata

SEQ ID NO: 330419 - DNA, 20 bp, Artificial Sequence
  Description of Artificial Sequence: Synthetic oligonucleotide
  Target: LAMA2; (+) strand; PAM type: YTN; PAM sequence: CTC
actcatcatttacataagct

SEQ ID NO: 330420 - DNA, 20 bp, Artificial Sequence
  Description of Artificial Sequence: Synthetic oligonucleotide
  Target: LAMA2; (+) strand; PAM type: YTN; PAM sequence: CTC
atcatttacataagctttca

SEQ ID NO: 330421 - DNA, 20 bp, Artificial Sequence
  Description of Artificial Sequence: Synthetic oligonucleotide
  Target: LAMA2; (+) strand; PAM type: YTN; PAM sequence: TTT
acataagctttcagcagaga

SEQ ID NO: 330422 - DNA, 20 bp, Artificial Sequence
  Description of Artificial Sequence: Synthetic oligonucleotide
  Target: LAMA2; (+) strand; PAM type: YTN; PAM sequence: TTA
cataagctttcagcagagag

SEQ ID NO: 330423 - DNA, 20 bp, Artificial Sequence
  Description of Artificial Sequence: Synthetic oligonucleotide
  Target: LAMA2; (+) strand; PAM type: YTN; PAM sequence: CTT
tcagcagagagaccatactt

SEQ ID NO: 330424 - DNA, 20 bp, Artificial Sequence
  Description of Artificial Sequence: Synthetic oligonucleotide
  Target: LAMA2; (+) strand; PAM type: YTN; PAM sequence: TTT
cagcagagagaccatactta

SEQ ID NO: 330425 - DNA, 20 bp, Artificial Sequence
  Description of Artificial Sequence: Synthetic oligonucleotide
  Target: LAMA2; (+) strand; PAM type: YTN; PAM sequence: TTC
agcagagagaccatacttat

SEQ ID NO: 330426 - DNA, 20 bp, Artificial Sequence
  Description of Artificial Sequence: Synthetic oligonucleotide
  Target: LAMA2; (+) strand; PAM type: YTN; PAM sequence: CTT
atatgccattccctctgcct

SEQ ID NO: 330427 - DNA, 20 bp, Artificial Sequence
  Description of Artificial Sequence: Synthetic oligonucleotide
  Target: LAMA2; (+) strand; PAM type: YTN; PAM sequence: TTA
tatgccattccctctgcctg

SEQ ID NO: 330428 - DNA, 20 bp, Artificial Sequence
  Description of Artificial Sequence: Synthetic oligonucleotide
  Target: LAMA2; (+) strand; PAM type: YTN; PAM sequence: TTC
cctctgcctgatatgtttgt

SEQ ID NO: 330429 - DNA, 20 bp, Artificial Sequence
  Description of Artificial Sequence: Synthetic oligonucleotide
  Target: LAMA2; (+) strand; PAM type: YTN; PAM sequence: CTC
tgcctgatatgtttgttttt

SEQ ID NO: 330430 - DNA, 20 bp, Artificial Sequence
  Description of Artificial Sequence: Synthetic oligonucleotide
  Target: LAMA2; (+) strand; PAM type: YTN; PAM sequence: CTG
cctgatatgtttgttttttc

SEQ ID NO: 330431 - DNA, 20 bp, Artificial Sequence
  Description of Artificial Sequence: Synthetic oligonucleotide
  Target: LAMA2; (+) strand; PAM type: YTN; PAM sequence: CTG
atatgtttgttttttctttc

SEQ ID NO: 330432 - DNA, 20 bp, Artificial Sequence
  Description of Artificial Sequence: Synthetic oligonucleotide
  Target: LAMA2; (+) strand; PAM type: YTN; PAM sequence: TTT
gttttttctttcttcatttt

SEQ ID NO: 330433 - DNA, 20 bp, Artificial Sequence
  Description of Artificial Sequence: Synthetic oligonucleotide
  Target: LAMA2; (+) strand; PAM type: YTN; PAM sequence: TTG
ttttttctttcttcattttc

SEQ ID NO: 330434 - DNA, 20 bp, Artificial Sequence
  Description of Artificial Sequence: Synthetic oligonucleotide
  Target: LAMA2; (+) strand; PAM type: YTN; PAM sequence: TTT
tttctttcttcattttccct

SEQ ID NO: 330435 - DNA, 20 bp, Artificial Sequence
  Description of Artificial Sequence: Synthetic oligonucleotide
  Target: LAMA2; (+) strand; PAM type: YTN; PAM sequence: TTT
ttctttcttcattttcccta

SEQ ID NO: 330436 - DNA, 20 bp, Artificial Sequence
  Description of Artificial Sequence: Synthetic oligonucleotide
  Target: LAMA2; (+) strand; PAM type: YTN; PAM sequence: TTT
tctttcttcattttccctaa

SEQ ID NO: 330437 - DNA, 20 bp, Artificial Sequence
  Description of Artificial Sequence: Synthetic oligonucleotide
  Target: LAMA2; (+) strand; PAM type: YTN; PAM sequence: TTT
ctttcttcattttccctaac

SEQ ID NO: 330438 - DNA, 20 bp, Artificial Sequence
  Description of Artificial Sequence: Synthetic oligonucleotide
  Target: LAMA2; (+) strand; PAM type: YTN; PAM sequence: TTC
tttcttcattttccctaaca

SEQ ID NO: 330439 - DNA, 20 bp, Artificial Sequence
  Description of Artificial Sequence: Synthetic oligonucleotide
  Target: LAMA2; (+) strand; PAM type: YTN; PAM sequence: CTT
tcttcattttccctaacaga

SEQ ID NO: 330440 - DNA, 20 bp, Artificial Sequence
  Description of Artificial Sequence: Synthetic oligonucleotide
  Target: LAMA2; (+) strand; PAM type: YTN; PAM sequence: TTT
cttcattttccctaacagat

SEQ ID NO: 330441 - DNA, 20 bp, Artificial Sequence
  Description of Artificial Sequence: Synthetic oligonucleotide
  Target: LAMA2; (+) strand; PAM type: YTN; PAM sequence: TTC
ttcattttccctaacagata

SEQ ID NO: 330442 - DNA, 20 bp, Artificial Sequence
  Description of Artificial Sequence: Synthetic oligonucleotide
  Target: LAMA2; (+) strand; PAM type: YTN; PAM sequence: CTT
cattttccctaacagataaa

SEQ ID NO: 330443 - DNA, 20 bp, Artificial Sequence
  Description of Artificial Sequence: Synthetic oligonucleotide
  Target: LAMA2; (+) strand; PAM type: YTN; PAM sequence: TTC
attttccctaacagataaac

SEQ ID NO: 330444 - DNA, 20 bp, Artificial Sequence
  Description of Artificial Sequence: Synthetic oligonucleotide
  Target: LAMA2; (+) strand; PAM type: YTN; PAM sequence: TTT
tccctaacagataaacttct

SEQ ID NO: 330445 - DNA, 20 bp, Artificial Sequence
  Description of Artificial Sequence: Synthetic oligonucleotide
  Target: LAMA2; (+) strand; PAM type: YTN; PAM sequence: TTT
ccctaacagataaacttcta

SEQ ID NO: 330446 - DNA, 20 bp, Artificial Sequence
  Description of Artificial Sequence: Synthetic oligonucleotide
  Target: LAMA2; (+) strand; PAM type: YTN; PAM sequence: TTC
cctaacagataaacttctat

SEQ ID NO: 330447 - DNA, 20 bp, Artificial Sequence
  Description of Artificial Sequence: Synthetic oligonucleotide
  Target: LAMA2; (+) strand; PAM type: YTN; PAM sequence: CTA
acagataaacttctatttct

SEQ ID NO: 330448 - DNA, 20 bp, Artificial Sequence
  Description of Artificial Sequence: Synthetic oligonucleotide
  Target: LAMA2; (+) strand; PAM type: YTN; PAM sequence: CTT
ctatttctccttgaaaattc

SEQ ID NO: 330449 - DNA, 20 bp, Artificial Sequence
  Description of Artificial Sequence: Synthetic oligonucleotide
  Target: LAMA2; (+) strand; PAM type: YTN; PAM sequence: TTC
tatttctccttgaaaattca

SEQ ID NO: 330450 - DNA, 20 bp, Artificial Sequence
  Description of Artificial Sequence: Synthetic oligonucleotide
  Target: LAMA2; (+) strand; PAM type: YTN; PAM sequence: CTA
tttctccttgaaaattcagc

SEQ ID NO: 330451 - DNA, 20 bp, Artificial Sequence
  Description of Artificial Sequence: Synthetic oligonucleotide
  Target: LAMA2; (+) strand; PAM type: YTN; PAM sequence: TTT
ctccttgaaaattcagctca

SEQ ID NO: 330452 - DNA, 20 bp, Artificial Sequence
  Description of Artificial Sequence: Synthetic oligonucleotide
  Target: LAMA2; (+) strand; PAM type: YTN; PAM sequence: TTC
tccttgaaaattcagctcaa

SEQ ID NO: 330453 - DNA, 20 bp, Artificial Sequence
  Description of Artificial Sequence: Synthetic oligonucleotide
  Target: LAMA2; (+) strand; PAM type: YTN; PAM sequence: CTC
cttgaaaattcagctcaaga

SEQ ID NO: 330454 - DNA, 20 bp, Artificial Sequence
  Description of Artificial Sequence: Synthetic oligonucleotide
  Target: LAMA2; (+) strand; PAM type: YTN; PAM sequence: CTT
gaaaattcagctcaagatta

SEQ ID NO: 330455 - DNA, 20 bp, Artificial Sequence
  Description of Artificial Sequence: Synthetic oligonucleotide
  Target: LAMA2; (+) strand; PAM type: YTN; PAM sequence: TTG
aaaattcagctcaagattac

SEQ ID NO: 330456 - DNA, 20 bp, Artificial Sequence
  Description of Artificial Sequence: Synthetic oligonucleotide
  Target: LAMA2; (+) strand; PAM type: YTN; PAM sequence: TTC
agctcaagattacttcccat

SEQ ID NO: 330457 - DNA, 20 bp, Artificial Sequence
  Description of Artificial Sequence: Synthetic oligonucleotide
  Target: LAMA2; (+) strand; PAM type: YTN; PAM sequence: CTC
aagattacttcccatgataa

SEQ ID NO: 330458 - DNA, 20 bp, Artificial Sequence
  Description of Artificial Sequence: Synthetic oligonucleotide
  Target: LAMA2; (+) strand; PAM type: YTN; PAM sequence: TTA
cttcccatgataagcccatc

SEQ ID NO: 330459 - DNA, 20 bp, Artificial Sequence
  Description of Artificial Sequence: Synthetic oligonucleotide
  Target: LAMA2; (+) strand; PAM type: YTN; PAM sequence: CTT
cccatgataagcccatctta

SEQ ID NO: 330460 - DNA, 20 bp, Artificial Sequence
  Description of Artificial Sequence: Synthetic oligonucleotide
  Target: LAMA2; (+) strand; PAM type: YTN; PAM sequence: TTC
ccatgataagcccatcttag

SEQ ID NO: 330461 - DNA, 20 bp, Artificial Sequence
  Description of Artificial Sequence: Synthetic oligonucleotide
  Target: LAMA2; (+) strand; PAM type: YTN; PAM sequence: CTT
agtaatatttttattctcag

SEQ ID NO: 330462 - DNA, 20 bp, Artificial Sequence
  Description of Artificial Sequence: Synthetic oligonucleotide
  Target: LAMA2; (+) strand; PAM type: YTN; PAM sequence: TTA
gtaatatttttattctcaga

SEQ ID NO: 330463 - DNA, 20 bp, Artificial Sequence
  Description of Artificial Sequence: Synthetic oligonucleotide
  Target: LAMA2; (+) strand; PAM type: YTN; PAM sequence: TTT
ttattctcagatcctttact

SEQ ID NO: 330464 - DNA, 20 bp, Artificial Sequence
  Description of Artificial Sequence: Synthetic oligonucleotide
  Target: LAMA2; (+) strand; PAM type: YTN; PAM sequence: TTT
tattctcagatcctttactg

SEQ ID NO: 330465 - DNA, 20 bp, Artificial Sequence
  Description of Artificial Sequence: Synthetic oligonucleotide
  Target: LAMA2; (+) strand; PAM type: YTN; PAM sequence: TTT
attctcagatcctttactgt

SEQ ID NO: 330466 - DNA, 20 bp, Artificial Sequence
  Description of Artificial Sequence: Synthetic oligonucleotide
  Target: LAMA2; (+) strand; PAM type: YTN; PAM sequence: TTA
ttctcagatcctttactgtc

SEQ ID NO: 330467 - DNA, 20 bp, Artificial Sequence
  Description of Artificial Sequence: Synthetic oligonucleotide
  Target: LAMA2; (+) strand; PAM type: YTN; PAM sequence: TTC
tcagatcctttactgtctgg

SEQ ID NO: 330468 - DNA, 20 bp, Artificial Sequence
  Description of Artificial Sequence: Synthetic oligonucleotide
  Target: LAMA2; (+) strand; PAM type: YTN; PAM sequence: CTC
agatcctttactgtctggca

SEQ ID NO: 330469 - DNA, 20 bp, Artificial Sequence
  Description of Artificial Sequence: Synthetic oligonucleotide
  Target: LAMA2; (+) strand; PAM type: YTN; PAM sequence: CTT
tactgtctggcataatatgt

SEQ ID NO: 330470 - DNA, 20 bp, Artificial Sequence
  Description of Artificial Sequence: Synthetic oligonucleotide
  Target: LAMA2; (+) strand; PAM type: YTN; PAM sequence: TTT
actgtctggcataatatgtg

SEQ ID NO: 330471 - DNA, 20 bp, Artificial Sequence
  Description of Artificial Sequence: Synthetic oligonucleotide
  Target: LAMA2; (+) strand; PAM type: YTN; PAM sequence: TTA
ctgtctggcataatatgtgc

SEQ ID NO: 330472 - DNA, 20 bp, Artificial Sequence
  Description of Artificial Sequence: Synthetic oligonucleotide
  Target: LAMA2; (+) strand; PAM type: YTN; PAM sequence: CTG
tctggcataatatgtgctca

SEQ ID NO: 330473 - DNA, 20 bp, Artificial Sequence
  Description of Artificial Sequence: Synthetic oligonucleotide
  Target: LAMA2; (+) strand; PAM type: YTN; PAM sequence: CTG
gcataatatgtgctcaaaac

SEQ ID NO: 330474 - DNA, 20 bp, Artificial Sequence
  Description of Artificial Sequence: Synthetic oligonucleotide
  Target: LAMA2; (+) strand; PAM type: YTN; PAM sequence: CTC
aaaacatatttgatgaagga

SEQ ID NO: 330475 - DNA, 20 bp, Artificial Sequence
  Description of Artificial Sequence: Synthetic oligonucleotide
  Target: LAMA2; (+) strand; PAM type: YTN; PAM sequence: TTT
gatgaaggaatagttgtacc

SEQ ID NO: 330476 - DNA, 20 bp, Artificial Sequence
  Description of Artificial Sequence: Synthetic oligonucleotide
  Target: LAMA2; (+) strand; PAM type: YTN; PAM sequence: TTG
atgaaggaatagttgtaccg

SEQ ID NO: 330477 - DNA, 20 bp, Artificial Sequence
  Description of Artificial Sequence: Synthetic oligonucleotide
  Target: LAMA2; (+) strand; PAM type: YTN; PAM sequence: TTG
taccgttaaatgcaaaatgg

SEQ ID NO: 330478 - DNA, 20 bp, Artificial Sequence
  Description of Artificial Sequence: Synthetic oligonucleotide
  Target: LAMA2; (+) strand; PAM type: YTN; PAM sequence: TTA
aatgcaaaatggtgatgaat

SEQ ID NO: 330479 - DNA, 20 bp, Artificial Sequence
  Description of Artificial Sequence: Synthetic oligonucleotide
  Target: LAMA2; (+) strand; PAM type: YTN; PAM sequence: CTT
tatttaatcgcatatcattt

SEQ ID NO: 330480 - DNA, 20 bp, Artificial Sequence
  Description of Artificial Sequence: Synthetic oligonucleotide
  Target: LAMA2; (+) strand; PAM type: YTN; PAM sequence: TTT
atttaatcgcatatcattta

SEQ ID NO: 330481 - DNA, 20 bp, Artificial Sequence
  Description of Artificial Sequence: Synthetic oligonucleotide
  Target: LAMA2; (+) strand; PAM type: YTN; PAM sequence: TTA
tttaatcgcatatcatttat

SEQ ID NO: 330482 - DNA, 20 bp, Artificial Sequence
  Description of Artificial Sequence: Synthetic oligonucleotide
  Target: LAMA2; (+) strand; PAM type: YTN; PAM sequence: TTT
aatcgcatatcatttattaa

SEQ ID NO: 330483 - DNA, 20 bp, Artificial Sequence
  Description of Artificial Sequence: Synthetic oligonucleotide
  Target: LAMA2; (+) strand; PAM type: YTN; PAM sequence: TTA
atcgcatatcatttattaac

SEQ ID NO: 330484 - DNA, 20 bp, Artificial Sequence
  Description of Artificial Sequence: Synthetic oligonucleotide
  Target: LAMA2; (+) strand; PAM type: YTN; PAM sequence: TTT
attaacctagaaaataaaat

SEQ ID NO: 330485 - DNA, 20 bp, Artificial Sequence
  Description of Artificial Sequence: Synthetic oligonucleotide
  Target: LAMA2; (+) strand; PAM type: YTN; PAM sequence: TTA
ttaacctagaaaataaaatg

SEQ ID NO: 330486 - DNA, 20 bp, Artificial Sequence
  Description of Artificial Sequence: Synthetic oligonucleotide
  Target: LAMA2; (+) strand; PAM type: YTN; PAM sequence: TTA
acctagaaaataaaatgtct

SEQ ID NO: 330487 - DNA, 20 bp, Artificial Sequence
  Description of Artificial Sequence: Synthetic oligonucleotide
  Target: LAMA2; (+) strand; PAM type: YTN; PAM sequence: CTA
gaaaataaaatgtctaagat

SEQ ID NO: 330488 - DNA, 20 bp, Artificial Sequence
  Description of Artificial Sequence: Synthetic oligonucleotide
  Target: LAMA2; (+) strand; PAM type: YTN; PAM sequence: CTA
agatagataatggcgtggag

SEQ ID NO: 330489 - DNA, 20 bp, Artificial Sequence
  Description of Artificial Sequence: Synthetic oligonucleotide
  Target: LAMA2; (+) strand; PAM type: YTN; PAM sequence: CTA
attatttttaaatttgtaac

SEQ ID NO: 330490 - DNA, 20 bp, Artificial Sequence
  Description of Artificial Sequence: Synthetic oligonucleotide
  Target: LAMA2; (+) strand; PAM type: YTN; PAM sequence: TTA
tttttaaatttgtaacctga

SEQ ID NO: 330491 - DNA, 20 bp, Artificial Sequence
  Description of Artificial Sequence: Synthetic oligonucleotide
  Target: LAMA2; (+) strand; PAM type: YTN; PAM sequence: TTT
ttaaatttgtaacctgacaa

SEQ ID NO: 330492 - DNA, 20 bp, Artificial Sequence
  Description of Artificial Sequence: Synthetic oligonucleotide
  Target: LAMA2; (+) strand; PAM type: YTN; PAM sequence: TTT
taaatttgtaacctgacaaa

SEQ ID NO: 330493 - DNA, 20 bp, Artificial Sequence
  Description of Artificial Sequence: Synthetic oligonucleotide
  Target: LAMA2; (+) strand; PAM type: YTN; PAM sequence: TTT
aaatttgtaacctgacaaac

SEQ ID NO: 330494 - DNA, 20 bp, Artificial Sequence
  Description of Artificial Sequence: Synthetic oligonucleotide
  Target: LAMA2; (+) strand; PAM type: YTN; PAM sequence: TTA
aatttgtaacctgacaaacg

SEQ ID NO: 330495 - DNA, 20 bp, Artificial Sequence
  Description of Artificial Sequence: Synthetic oligonucleotide
  Target: LAMA2; (+) strand; PAM type: YTN; PAM sequence: TTT
gtaacctgacaaacgtcaca

SEQ ID NO: 330496 - DNA, 20 bp, Artificial Sequence
  Description of Artificial Sequence: Synthetic oligonucleotide
  Target: LAMA2; (+) strand; PAM type: YTN; PAM sequence: TTG
taacctgacaaacgtcacaa

SEQ ID NO: 330497 - DNA, 20 bp, Artificial Sequence
  Description of Artificial Sequence: Synthetic oligonucleotide
  Target: LAMA2; (+) strand; PAM type: YTN; PAM sequence: CTG
acaaacgtcacaaaattgtt

SEQ ID NO: 330498 - DNA, 20 bp, Artificial Sequence
  Description of Artificial Sequence: Synthetic oligonucleotide
  Target: LAMA2; (+) strand; PAM type: YTN; PAM sequence: TTG
ttaggaagttttcactaagg

SEQ ID NO: 330499 - DNA, 20 bp, Artificial Sequence
  Description of Artificial Sequence: Synthetic oligonucleotide
  Target: LAMA2; (+) strand; PAM type: YTN; PAM sequence: TTA
ggaagttttcactaaggctt

SEQ ID NO: 330500 - DNA, 20 bp, Artificial Sequence
  Description of Artificial Sequence: Synthetic oligonucleotide
  Target: LAMA2; (+) strand; PAM type: YTN; PAM sequence: TTT
tcactaaggcttatatcatg

SEQ ID NO: 330501 - DNA, 20 bp, Artificial Sequence
  Description of Artificial Sequence: Synthetic oligonucleotide
  Target: LAMA2; (+) strand; PAM type: YTN; PAM sequence: TTT
cactaaggcttatatcatgg

SEQ ID NO: 330502 - DNA, 20 bp, Artificial Sequence
  Description of Artificial Sequence: Synthetic oligonucleotide
  Target: LAMA2; (+) strand; PAM type: YTN; PAM sequence: TTC
actaaggcttatatcatgga

SEQ ID NO: 330503 - DNA, 20 bp, Artificial Sequence
  Description of Artificial Sequence: Synthetic oligonucleotide
  Target: LAMA2; (+) strand; PAM type: YTN; PAM sequence: CTA
aggcttatatcatggaaaag

SEQ ID NO: 330504 - DNA, 20 bp, Artificial Sequence
  Description of Artificial Sequence: Synthetic oligonucleotide
  Target: LAMA2; (+) strand; PAM type: YTN; PAM sequence: CTT
atatcatggaaaagataaaa

SEQ ID NO: 330505 - DNA, 20 bp, Artificial Sequence
  Description of Artificial Sequence: Synthetic oligonucleotide
  Target: LAMA2; (+) strand; PAM type: YTN; PAM sequence: TTA
tatcatggaaaagataaaaa

SEQ ID NO: 330506 - DNA, 20 bp, Artificial Sequence
  Description of Artificial Sequence: Synthetic oligonucleotide
  Target: LAMA2; (+) strand; PAM type: YTN; PAM sequence: CTT
ttaaatggtactctactttt

SEQ ID NO: 330507 - DNA, 20 bp, Artificial Sequence
  Description of Artificial Sequence: Synthetic oligonucleotide
  Target: LAMA2; (+) strand; PAM type: YTN; PAM sequence: TTT
taaatggtactctacttttt

SEQ ID NO: 330508 - DNA, 20 bp, Artificial Sequence
  Description of Artificial Sequence: Synthetic oligonucleotide
  Target: LAMA2; (+) strand; PAM type: YTN; PAM sequence: TTT
aaatggtactctacttttta

SEQ ID NO: 330509 - DNA, 20 bp, Artificial Sequence
  Description of Artificial Sequence: Synthetic oligonucleotide
  Target: LAMA2; (+) strand; PAM type: YTN; PAM sequence: TTA
aatggtactctactttttat

SEQ ID NO: 330510 - DNA, 20 bp, Artificial Sequence
  Description of Artificial Sequence: Synthetic oligonucleotide
  Target: LAMA2; (+) strand; PAM type: YTN; PAM sequence: CTC
tactttttataaaacattac

SEQ ID NO: 330511 - DNA, 20 bp, Artificial Sequence
  Description of Artificial Sequence: Synthetic oligonucleotide
  Target: LAMA2; (+) strand; PAM type: YTN; PAM sequence: CTA
ctttttataaaacattacat

SEQ ID NO: 330512 - DNA, 20 bp, Artificial Sequence
  Description of Artificial Sequence: Synthetic oligonucleotide
  Target: LAMA2; (+) strand; PAM type: YTN; PAM sequence: CTT
tttataaaacattacatttt

SEQ ID NO: 330513 - DNA, 20 bp, Artificial Sequence
  Description of Artificial Sequence: Synthetic oligonucleotide
  Target: LAMA2; (+) strand; PAM type: YTN; PAM sequence: TTT
ttataaaacattacattttc

SEQ ID NO: 330514 - DNA, 20 bp, Artificial Sequence
  Description of Artificial Sequence: Synthetic oligonucleotide
  Target: LAMA2; (+) strand; PAM type: YTN; PAM sequence: TTT
tataaaacattacattttct

SEQ ID NO: 330515 - DNA, 20 bp, Artificial Sequence
  Description of Artificial Sequence: Synthetic oligonucleotide
  Target: LAMA2; (+) strand; PAM type: YTN; PAM sequence: TTT
ataaaacattacattttcta

SEQ ID NO: 330516 - DNA, 20 bp, Artificial Sequence
  Description of Artificial Sequence: Synthetic oligonucleotide
  Target: LAMA2; (+) strand; PAM type: YTN; PAM sequence: TTA
taaaacattacattttctaa

SEQ ID NO: 330517 - DNA, 20 bp, Artificial Sequence
  Description of Artificial Sequence: Synthetic oligonucleotide
  Target: LAMA2; (+) strand; PAM type: YTN; PAM sequence: TTA
cattttctaatgaaataaat

SEQ ID NO: 330518 - DNA, 20 bp, Artificial Sequence
  Description of Artificial Sequence: Synthetic oligonucleotide
  Target: LAMA2; (+) strand; PAM type: YTN; PAM sequence: TTT
tctaatgaaataaataatac

SEQ ID NO: 330519 - DNA, 20 bp, Artificial Sequence
  Description of Artificial Sequence: Synthetic oligonucleotide
  Target: LAMA2; (+) strand; PAM type: YTN; PAM sequence: TTT
ctaatgaaataaataatact

SEQ ID NO: 330520 - DNA, 20 bp, Artificial Sequence
  Description of Artificial Sequence: Synthetic oligonucleotide
  Target: LAMA2; (+) strand; PAM type: YTN; PAM sequence: TTC
taatgaaataaataatactt

SEQ ID NO: 330521 - DNA, 20 bp, Artificial Sequence
  Description of Artificial Sequence: Synthetic oligonucleotide
  Target: LAMA2; (+) strand; PAM type: YTN; PAM sequence: CTA
atgaaataaataatacttta

SEQ ID NO: 330522 - DNA, 20 bp, Artificial Sequence
  Description of Artificial Sequence: Synthetic oligonucleotide
  Target: LAMA2; (+) strand; PAM type: YTN; PAM sequence: CTT
tatgaatgtttaatatttct

SEQ ID NO: 330523 - DNA, 20 bp, Artificial Sequence
  Description of Artificial Sequence: Synthetic oligonucleotide
  Target: LAMA2; (+) strand; PAM type: YTN; PAM sequence: TTT
atgaatgtttaatatttctc

SEQ ID NO: 330524 - DNA, 20 bp, Artificial Sequence
  Description of Artificial Sequence: Synthetic oligonucleotide
  Target: LAMA2; (+) strand; PAM type: YTN; PAM sequence: TTA
tgaatgtttaatatttctct

SEQ ID NO: 330525 - DNA, 20 bp, Artificial Sequence
  Description of Artificial Sequence: Synthetic oligonucleotide
  Target: LAMA2; (+) strand; PAM type: YTN; PAM sequence: TTT
aatatttctctaaccaacaa

SEQ ID NO: 330526 - DNA, 20 bp, Artificial Sequence
  Description of Artificial Sequence: Synthetic oligonucleotide
  Target: LAMA2; (+) strand; PAM type: YTN; PAM sequence: TTA
atatttctctaaccaacaat

SEQ ID NO: 330527 - DNA, 20 bp, Artificial Sequence
  Description of Artificial Sequence: Synthetic oligonucleotide
  Target: LAMA2; (+) strand; PAM type: YTN; PAM sequence: TTT
ctctaaccaacaattacatt

SEQ ID NO: 330528 - DNA, 20 bp, Artificial Sequence
  Description of Artificial Sequence: Synthetic oligonucleotide
  Target: LAMA2; (+) strand; PAM type: YTN; PAM sequence: TTC
tctaaccaacaattacatta

SEQ ID NO: 330529 - DNA, 20 bp, Artificial Sequence
  Description of Artificial Sequence: Synthetic oligonucleotide
  Target: LAMA2; (+) strand; PAM type: YTN; PAM sequence: CTC
taaccaacaattacattagc

SEQ ID NO: 330530 - DNA, 20 bp, Artificial Sequence
  Description of Artificial Sequence: Synthetic oligonucleotide
  Target: LAMA2; (+) strand; PAM type: YTN; PAM sequence: CTA
accaacaattacattagctt

SEQ ID NO: 330531 - DNA, 20 bp, Artificial Sequence
  Description of Artificial Sequence: Synthetic oligonucleotide
  Target: LAMA2; (+) strand; PAM type: YTN; PAM sequence: TTA
cattagctttccttatgtca

SEQ ID NO: 330532 - DNA, 20 bp, Artificial Sequence
  Description of Artificial Sequence: Synthetic oligonucleotide
  Target: LAMA2; (+) strand; PAM type: YTN; PAM sequence: TTA
gctttccttatgtcacactg

SEQ ID NO: 330533 - DNA, 20 bp, Artificial Sequence
  Description of Artificial Sequence: Synthetic oligonucleotide
  Target: LAMA2; (+) strand; PAM type: YTN; PAM sequence: CTT
tccttatgtcacactgacag

SEQ ID NO: 330534 - DNA, 20 bp, Artificial Sequence
  Description of Artificial Sequence: Synthetic oligonucleotide
  Target: LAMA2; (+) strand; PAM type: YTN; PAM sequence: TTT
ccttatgtcacactgacaga

SEQ ID NO: 330535 - DNA, 20 bp, Artificial Sequence
  Description of Artificial Sequence: Synthetic oligonucleotide
  Target: LAMA2; (+) strand; PAM type: YTN; PAM sequence: TTC
cttatgtcacactgacagaa

SEQ ID NO: 330536 - DNA, 20 bp, Artificial Sequence
  Description of Artificial Sequence: Synthetic oligonucleotide
  Target: LAMA2; (+) strand; PAM type: YTN; PAM sequence: CTT
atgtcacactgacagaatgt

SEQ ID NO: 330537 - DNA, 20 bp, Artificial Sequence
  Description of Artificial Sequence: Synthetic oligonucleotide
  Target: LAMA2; (+) strand; PAM type: YTN; PAM sequence: TTA
tgtcacactgacagaatgtc

SEQ ID NO: 330538 - DNA, 20 bp, Artificial Sequence
  Description of Artificial Sequence: Synthetic oligonucleotide
  Target: LAMA2; (+) strand; PAM type: YTN; PAM sequence: CTG
acagaatgtctcattgtgtt

SEQ ID NO: 330539 - DNA, 20 bp, Artificial Sequence
  Description of Artificial Sequence: Synthetic oligonucleotide
  Target: LAMA2; (+) strand; PAM type: YTN; PAM sequence: CTC
attgtgttggggccagagag

SEQ ID NO: 330540 - DNA, 20 bp, Artificial Sequence
  Description of Artificial Sequence: Synthetic oligonucleotide
  Target: LAMA2; (+) strand; PAM type: YTN; PAM sequence: TTG
tgttggggccagagagcaca

SEQ ID NO: 330541 - DNA, 20 bp, Artificial Sequence
  Description of Artificial Sequence: Synthetic oligonucleotide
  Target: LAMA2; (+) strand; PAM type: YTN; PAM sequence: TTG
gggccagagagcacagagat

SEQ ID NO: 330542 - DNA, 20 bp, Artificial Sequence
  Description of Artificial Sequence: Synthetic oligonucleotide
  Target: LAMA2; (+) strand; PAM type: YTN; PAM sequence: TTA
agtgaaaaagtaagtaccat

SEQ ID NO: 330543 - DNA, 20 bp, Artificial Sequence
  Description of Artificial Sequence: Synthetic oligonucleotide
  Target: LAMA2; (+) strand; PAM type: YTN; PAM sequence: TTG
gcaaatcaggaaaaattggg

SEQ ID NO: 330544 - DNA, 20 bp, Artificial Sequence
  Description of Artificial Sequence: Synthetic oligonucleotide
  Target: LAMA2; (+) strand; PAM type: YTN; PAM sequence: TTG
ggaacctcaactttcagctg

SEQ ID NO: 330545 - DNA, 20 bp, Artificial Sequence
  Description of Artificial Sequence: Synthetic oligonucleotide
  Target: LAMA2; (+) strand; PAM type: YTN; PAM sequence: CTC
aactttcagctgaagaaaaa

SEQ ID NO: 330546 - DNA, 20 bp, Artificial Sequence
  Description of Artificial Sequence: Synthetic oligonucleotide
  Target: LAMA2; (+) strand; PAM type: YTN; PAM sequence: CTT
tcagctgaagaaaaacacaa

SEQ ID NO: 330547 - DNA, 20 bp, Artificial Sequence
  Description of Artificial Sequence: Synthetic oligonucleotide
  Target: LAMA2; (+) strand; PAM type: YTN; PAM sequence: TTT
cagctgaagaaaaacacaag

SEQ ID NO: 330548 - DNA, 20 bp, Artificial Sequence
  Description of Artificial Sequence: Synthetic oligonucleotide
  Target: LAMA2; (+) strand; PAM type: YTN; PAM sequence: TTC
agctgaagaaaaacacaagg

SEQ ID NO: 330549 - DNA, 20 bp, Artificial Sequence
  Description of Artificial Sequence: Synthetic oligonucleotide
  Target: LAMA2; (+) strand; PAM type: YTN; PAM sequence: CTG
aagaaaaacacaaggcagga

SEQ ID NO: 330550 - DNA, 20 bp, Artificial Sequence
  Description of Artificial Sequence: Synthetic oligonucleotide
  Target: LAMA2; (+) strand; PAM type: YTN; PAM sequence: TTG
ggggtcactattttggagga

SEQ ID NO: 330551 - DNA, 20 bp, Artificial Sequence
  Description of Artificial Sequence: Synthetic oligonucleotide
  Target: LAMA2; (+) strand; PAM type: YTN; PAM sequence: CTA
ttttggaggaacaggattaa

SEQ ID NO: 330552 - DNA, 20 bp, Artificial Sequence
  Description of Artificial Sequence: Synthetic oligonucleotide
  Target: LAMA2; (+) strand; PAM type: YTN; PAM sequence: TTT
tggaggaacaggattaaggg

SEQ ID NO: 330553 - DNA, 20 bp, Artificial Sequence
  Description of Artificial Sequence: Synthetic oligonucleotide
  Target: LAMA2; (+) strand; PAM type: YTN; PAM sequence: TTT
ggaggaacaggattaaggga

SEQ ID NO: 330554 - DNA, 20 bp, Artificial Sequence
  Description of Artificial Sequence: Synthetic oligonucleotide
  Target: LAMA2; (+) strand; PAM type: YTN; PAM sequence: TTG
gaggaacaggattaagggat

SEQ ID NO: 330555 - DNA, 20 bp, Artificial Sequence
  Description of Artificial Sequence: Synthetic oligonucleotide
  Target: LAMA2; (+) strand; PAM type: YTN; PAM sequence: TTA
agggatttttaaagacatat

SEQ ID NO: 330556 - DNA, 20 bp, Artificial Sequence
  Description of Artificial Sequence: Synthetic oligonucleotide
  Target: LAMA2; (+) strand; PAM type: YTN; PAM sequence: TTT
ttaaagacatatgtataagg

SEQ ID NO: 330557 - DNA, 20 bp, Artificial Sequence
  Description of Artificial Sequence: Synthetic oligonucleotide
  Target: LAMA2; (+) strand; PAM type: YTN; PAM sequence: TTT
taaagacatatgtataagga

SEQ ID NO: 330558 - DNA, 20 bp, Artificial Sequence
  Description of Artificial Sequence: Synthetic oligonucleotide
  Target: LAMA2; (+) strand; PAM type: YTN; PAM sequence: TTT
aaagacatatgtataaggag

SEQ ID NO: 330559 - DNA, 20 bp, Artificial Sequence
  Description of Artificial Sequence: Synthetic oligonucleotide
  Target: LAMA2; (+) strand; PAM type: YTN; PAM sequence: TTA
aagacatatgtataaggagg

SEQ ID NO: 330560 - DNA, 20 bp, Artificial Sequence
  Description of Artificial Sequence: Synthetic oligonucleotide
  Target: LAMA2; (+) strand; PAM type: YTN; PAM sequence: TTC
tttgggggcagctctttggg

SEQ ID NO: 330561 - DNA, 20 bp, Artificial Sequence
  Description of Artificial Sequence: Synthetic oligonucleotide
  Target: LAMA2; (+) strand; PAM type: YTN; PAM sequence: CTT
tgggggcagctctttgggag

SEQ ID NO: 330562 - DNA, 20 bp, Artificial Sequence
  Description of Artificial Sequence: Synthetic oligonucleotide
  Target: LAMA2; (+) strand; PAM type: YTN; PAM sequence: TTT
gggggcagctctttgggaga

SEQ ID NO: 330563 - DNA, 20 bp, Artificial Sequence
  Description of Artificial Sequence: Synthetic oligonucleotide
  Target: LAMA2; (+) strand; PAM type: YTN; PAM sequence: TTG
ggggcagctctttgggagat

SEQ ID NO: 330564 - DNA, 20 bp, Artificial Sequence
  Description of Artificial Sequence: Synthetic oligonucleotide
  Target: LAMA2; (+) strand; PAM type: YTN; PAM sequence: CTC
tttgggagatcttaagaatg

SEQ ID NO: 330565 - DNA, 20 bp, Artificial Sequence
  Description of Artificial Sequence: Synthetic oligonucleotide
  Target: LAMA2; (+) strand; PAM type: YTN; PAM sequence: CTT
tgggagatcttaagaatgac

SEQ ID NO: 330566 - DNA, 20 bp, Artificial Sequence
  Description of Artificial Sequence: Synthetic oligonucleotide
  Target: LAMA2; (+) strand; PAM type: YTN; PAM sequence: TTT
gggagatcttaagaatgact

SEQ ID NO: 330567 - DNA, 20 bp, Artificial Sequence
  Description of Artificial Sequence: Synthetic oligonucleotide
  Target: LAMA2; (+) strand; PAM type: YTN; PAM sequence: TTG
ggagatcttaagaatgactg

SEQ ID NO: 330568 - DNA, 20 bp, Artificial Sequence
  Description of Artificial Sequence: Synthetic oligonucleotide
  Target: LAMA2; (+) strand; PAM type: YTN; PAM sequence: CTT
aagaatgactgagacaagaa

SEQ ID NO: 330569 - DNA, 20 bp, Artificial Sequence
  Description of Artificial Sequence: Synthetic oligonucleotide
  Target: LAMA2; (+) strand; PAM type: YTN; PAM sequence: TTA
agaatgactgagacaagaac

SEQ ID NO: 330570 - DNA, 20 bp, Artificial Sequence
  Description of Artificial Sequence: Synthetic oligonucleotide
  Target: LAMA2; (+) strand; PAM type: YTN; PAM sequence: CTG
agacaagaactgagttgtca

SEQ ID NO: 330571 - DNA, 20 bp, Artificial Sequence
  Description of Artificial Sequence: Synthetic oligonucleotide
  Target: LAMA2; (+) strand; PAM type: YTN; PAM sequence: CTG
agttgtcacttgatcttttg

SEQ ID NO: 330572 - DNA, 20 bp, Artificial Sequence
  Description of Artificial Sequence: Synthetic oligonucleotide
  Target: LAMA2; (+) strand; PAM type: YTN; PAM sequence: TTG
tcacttgatcttttgaattc

SEQ ID NO: 330573 - DNA, 20 bp, Artificial Sequence
  Description of Artificial Sequence: Synthetic oligonucleotide
  Target: LAMA2; (+) strand; PAM type: YTN; PAM sequence: CTT
gatcttttgaattcatttac

SEQ ID NO: 330574 - DNA, 20 bp, Artificial Sequence
  Description of Artificial Sequence: Synthetic oligonucleotide
  Target: LAMA2; (+) strand; PAM type: YTN; PAM sequence: TTG
atcttttgaattcatttacc

SEQ ID NO: 330575 - DNA, 20 bp, Artificial Sequence
  Description of Artificial Sequence: Synthetic oligonucleotide
  Target: LAMA2; (+) strand; PAM type: YTN; PAM sequence: CTT
ttgaattcatttacctgtgg

SEQ ID NO: 330576 - DNA, 20 bp, Artificial Sequence
  Description of Artificial Sequence: Synthetic oligonucleotide
  Target: LAMA2; (+) strand; PAM type: YTN; PAM sequence: TTT
tgaattcatttacctgtgga

SEQ ID NO: 330577 - DNA, 20 bp, Artificial Sequence
  Description of Artificial Sequence: Synthetic oligonucleotide
  Target: LAMA2; (+) strand; PAM type: YTN; PAM sequence: TTT
gaattcatttacctgtggaa

SEQ ID NO: 330578 - DNA, 20 bp, Artificial Sequence
  Description of Artificial Sequence: Synthetic oligonucleotide
  Target: LAMA2; (+) strand; PAM type: YTN; PAM sequence: TTG
aattcatttacctgtggaat

SEQ ID NO: 330579 - DNA, 20 bp, Artificial Sequence
  Description of Artificial Sequence: Synthetic oligonucleotide
  Target: LAMA2; (+) strand; PAM type: YTN; PAM sequence: TTC
atttacctgtggaatttttt

SEQ ID NO: 330580 - DNA, 20 bp, Artificial Sequence
  Description of Artificial Sequence: Synthetic oligonucleotide
  Target: LAMA2; (+) strand; PAM type: YTN; PAM sequence: TTT
acctgtggaattttttggag

SEQ ID NO: 330581 - DNA, 20 bp, Artificial Sequence
  Description of Artificial Sequence: Synthetic oligonucleotide
  Target: LAMA2; (+) strand; PAM type: YTN; PAM sequence: TTA
cctgtggaattttttggagt

SEQ ID NO: 330582 - DNA, 20 bp, Artificial Sequence
  Description of Artificial Sequence: Synthetic oligonucleotide
  Target: LAMA2; (+) strand; PAM type: YTN; PAM sequence: CTG
tggaattttttggagtgatt

SEQ ID NO: 330583 - DNA, 20 bp, Artificial Sequence
  Description of Artificial Sequence: Synthetic oligonucleotide
  Target: LAMA2; (+) strand; PAM type: YTN; PAM sequence: TTT
tttggagtgattacaataaa

SEQ ID NO: 330584 - DNA, 20 bp, Artificial Sequence
  Description of Artificial Sequence: Synthetic oligonucleotide
  Target: LAMA2; (+) strand; PAM type: YTN; PAM sequence: TTT
ttggagtgattacaataaag

SEQ ID NO: 330585 - DNA, 20 bp, Artificial Sequence
  Description of Artificial Sequence: Synthetic oligonucleotide
  Target: LAMA2; (+) strand; PAM type: YTN; PAM sequence: TTT
tggagtgattacaataaaga

SEQ ID NO: 330586 - DNA, 20 bp, Artificial Sequence
  Description of Artificial Sequence: Synthetic oligonucleotide
  Target: LAMA2; (+) strand; PAM type: YTN; PAM sequence: TTT
ggagtgattacaataaagat

SEQ ID NO: 330587 - DNA, 20 bp, Artificial Sequence
  Description of Artificial Sequence: Synthetic oligonucleotide
  Target: LAMA2; (+) strand; PAM type: YTN; PAM sequence: TTG
gagtgattacaataaagatt

SEQ ID NO: 330588 - DNA, 20 bp, Artificial Sequence
  Description of Artificial Sequence: Synthetic oligonucleotide
  Target: LAMA2; (+) strand; PAM type: YTN; PAM sequence: TTA
caataaagatttaaactatt

SEQ ID NO: 330589 - DNA, 20 bp, Artificial Sequence
  Description of Artificial Sequence: Synthetic oligonucleotide
  Target: LAMA2; (+) strand; PAM type: YTN; PAM sequence: TTT
aaactatttataattgcaat

SEQ ID NO: 330590 - DNA, 20 bp, Artificial Sequence
  Description of Artificial Sequence: Synthetic oligonucleotide
  Target: LAMA2; (+) strand; PAM type: YTN; PAM sequence: TTA
aactatttataattgcaatt

SEQ ID NO: 330591 - DNA, 20 bp, Artificial Sequence
  Description of Artificial Sequence: Synthetic oligonucleotide
  Target: LAMA2; (+) strand; PAM type: YTN; PAM sequence: CTA
tttataattgcaatttttac

SEQ ID NO: 330592 - DNA, 20 bp, Artificial Sequence
  Description of Artificial Sequence: Synthetic oligonucleotide
  Target: LAMA2; (+) strand; PAM type: YTN; PAM sequence: TTT
ataattgcaatttttactgt

SEQ ID NO: 330593 - DNA, 20 bp, Artificial Sequence
  Description of Artificial Sequence: Synthetic oligonucleotide
  Target: LAMA2; (+) strand; PAM type: YTN; PAM sequence: TTA
taattgcaatttttactgta

SEQ ID NO: 330594 - DNA, 20 bp, Artificial Sequence
  Description of Artificial Sequence: Synthetic oligonucleotide
  Target: LAMA2; (+) strand; PAM type: YTN; PAM sequence: TTG
caatttttactgtactatta

SEQ ID NO: 330595 - DNA, 20 bp, Artificial Sequence
  Description of Artificial Sequence: Synthetic oligonucleotide
  Target: LAMA2; (+) strand; PAM type: YTN; PAM sequence: TTT
ttactgtactattatctttt

SEQ ID NO: 330596 - DNA, 20 bp, Artificial Sequence
  Description of Artificial Sequence: Synthetic oligonucleotide
  Target: LAMA2; (+) strand; PAM type: YTN; PAM sequence: TTT
tactgtactattatcttttt

SEQ ID NO: 330597 - DNA, 20 bp, Artificial Sequence
  Description of Artificial Sequence: Synthetic oligonucleotide
  Target: LAMA2; (+) strand; PAM type: YTN; PAM sequence: TTT
actgtactattatctttttt

SEQ ID NO: 330598 - DNA, 20 bp, Artificial Sequence
  Description of Artificial Sequence: Synthetic oligonucleotide
  Target: LAMA2; (+) strand; PAM type: YTN; PAM sequence: TTA
ctgtactattatcttttttt

SEQ ID NO: 330599 - DNA, 20 bp, Artificial Sequence
  Description of Artificial Sequence: Synthetic oligonucleotide
  Target: LAMA2; (+) strand; PAM type: YTN; PAM sequence: CTG
tactattatctttttttaac

SEQ ID NO: 330600 - DNA, 20 bp, Artificial Sequence
  Description of Artificial Sequence: Synthetic oligonucleotide
  Target: LAMA2; (+) strand; PAM type: YTN; PAM sequence: CTA
ttatctttttttaacagaaa

SEQ ID NO: 330601 - DNA, 20 bp, Artificial Sequence
  Description of Artificial Sequence: Synthetic oligonucleotide
  Target: LAMA2; (+) strand; PAM type: YTN; PAM sequence: TTA
tctttttttaacagaaaaga

SEQ ID NO: 330602 - DNA, 20 bp, Artificial Sequence
  Description of Artificial Sequence: Synthetic oligonucleotide
  Target: LAMA2; (+) strand; PAM type: YTN; PAM sequence: CTT
tttttaacagaaaagaaaac

SEQ ID NO: 330603 - DNA, 20 bp, Artificial Sequence
  Description of Artificial Sequence: Synthetic oligonucleotide
  Target: LAMA2; (+) strand; PAM type: YTN; PAM sequence: TTT
ttttaacagaaaagaaaact

SEQ ID NO: 330604 - DNA, 20 bp, Artificial Sequence
  Description of Artificial Sequence: Synthetic oligonucleotide
  Target: LAMA2; (+) strand; PAM type: YTN; PAM sequence: TTT
tttaacagaaaagaaaactt

SEQ ID NO: 330605 - DNA, 20 bp, Artificial Sequence
  Description of Artificial Sequence: Synthetic oligonucleotide
  Target: LAMA2; (+) strand; PAM type: YTN; PAM sequence: TTT
ttaacagaaaagaaaactta

SEQ ID NO: 330606 - DNA, 20 bp, Artificial Sequence
  Description of Artificial Sequence: Synthetic oligonucleotide
  Target: LAMA2; (+) strand; PAM type: YTN; PAM sequence: TTT
taacagaaaagaaaacttaa

SEQ ID NO: 330607 - DNA, 20 bp, Artificial Sequence
  Description of Artificial Sequence: Synthetic oligonucleotide
  Target: LAMA2; (+) strand; PAM type: YTN; PAM sequence: TTT
aacagaaaagaaaacttaat

SEQ ID NO: 330608 - DNA, 20 bp, Artificial Sequence
  Description of Artificial Sequence: Synthetic oligonucleotide
  Target: LAMA2; (+) strand; PAM type: YTN; PAM sequence: TTA
acagaaaagaaaacttaata

SEQ ID NO: 330609 - DNA, 20 bp, Artificial Sequence
  Description of Artificial Sequence: Synthetic oligonucleotide
  Target: LAMA2; (+) strand; PAM type: YTN; PAM sequence: CTT
aatagtcaatacatactcta

SEQ ID NO: 330610 - DNA, 20 bp, Artificial Sequence
  Description of Artificial Sequence: Synthetic oligonucleotide
  Target: LAMA2; (+) strand; PAM type: YTN; PAM sequence: TTA
atagtcaatacatactctaa

SEQ ID NO: 330611 - DNA, 20 bp, Artificial Sequence
  Description of Artificial Sequence: Synthetic oligonucleotide
  Target: LAMA2; (+) strand; PAM type: YTN; PAM sequence: CTC
taataatcaaatattataaa

SEQ ID NO: 330612 - DNA, 20 bp, Artificial Sequence
  Description of Artificial Sequence: Synthetic oligonucleotide
  Target: LAMA2; (+) strand; PAM type: YTN; PAM sequence: CTA
ataatcaaatattataaaaa

SEQ ID NO: 330613 - DNA, 20 bp, Artificial Sequence
  Description of Artificial Sequence: Synthetic oligonucleotide
  Target: LAMA2; (+) strand; PAM type: YTN; PAM sequence: TTA
taaaaatcttcctaatttac

SEQ ID NO: 330614 - DNA, 20 bp, Artificial Sequence
  Description of Artificial Sequence: Synthetic oligonucleotide
  Target: LAMA2; (+) strand; PAM type: YTN; PAM sequence: CTT
cctaatttactttctttttt

SEQ ID NO: 330615 - DNA, 20 bp, Artificial Sequence
  Description of Artificial Sequence: Synthetic oligonucleotide
  Target: LAMA2; (+) strand; PAM type: YTN; PAM sequence: TTC
ctaatttactttctttttta

SEQ ID NO: 330616 - DNA, 20 bp, Artificial Sequence
  Description of Artificial Sequence: Synthetic oligonucleotide
  Target: LAMA2; (+) strand; PAM type: YTN; PAM sequence: CTA
atttactttcttttttaatt

SEQ ID NO: 330617 - DNA, 20 bp, Artificial Sequence
  Description of Artificial Sequence: Synthetic oligonucleotide
  Target: LAMA2; (+) strand; PAM type: YTN; PAM sequence: TTT
actttcttttttaatttttt

SEQ ID NO: 330618 - DNA, 20 bp, Artificial Sequence
  Description of Artificial Sequence: Synthetic oligonucleotide
  Target: LAMA2; (+) strand; PAM type: YTN; PAM sequence: TTA
ctttcttttttaattttttg

SEQ ID NO: 330619 - DNA, 20 bp, Artificial Sequence
  Description of Artificial Sequence: Synthetic oligonucleotide
  Target: LAMA2; (+) strand; PAM type: YTN; PAM sequence: CTT
tcttttttaattttttgttt

SEQ ID NO: 330620 - DNA, 20 bp, Artificial Sequence
  Description of Artificial Sequence: Synthetic oligonucleotide
  Target: LAMA2; (+) strand; PAM type: YTN; PAM sequence: TTT
cttttttaattttttgtttc

SEQ ID NO: 330621 - DNA, 20 bp, Artificial Sequence
  Description of Artificial Sequence: Synthetic oligonucleotide
  Target: LAMA2; (+) strand; PAM type: YTN; PAM sequence: TTC
ttttttaattttttgtttct

SEQ ID NO: 330622 - DNA, 20 bp, Artificial Sequence
  Description of Artificial Sequence: Synthetic oligonucleotide
  Target: LAMA2; (+) strand; PAM type: YTN; PAM sequence: CTT
ttttaattttttgtttcttt

SEQ ID NO: 330623 - DNA, 20 bp, Artificial Sequence
  Description of Artificial Sequence: Synthetic oligonucleotide
  Target: LAMA2; (+) strand; PAM type: YTN; PAM sequence: TTT
tttaattttttgtttctttc

SEQ ID NO: 330624 - DNA, 20 bp, Artificial Sequence
  Description of Artificial Sequence: Synthetic oligonucleotide
  Target: LAMA2; (+) strand; PAM type: YTN; PAM sequence: TTT
ttaattttttgtttctttca

SEQ ID NO: 330625 - DNA, 20 bp, Artificial Sequence
  Description of Artificial Sequence: Synthetic oligonucleotide
  Target: LAMA2; (+) strand; PAM type: YTN; PAM sequence: TTT
taattttttgtttctttcaa

SEQ ID NO: 330626 - DNA, 20 bp, Artificial Sequence
  Description of Artificial Sequence: Synthetic oligonucleotide
  Target: LAMA2; (+) strand; PAM type: YTN; PAM sequence: TTT
aattttttgtttctttcaat

SEQ ID NO: 330627 - DNA, 20 bp, Artificial Sequence
  Description of Artificial Sequence: Synthetic oligonucleotide
  Target: LAMA2; (+) strand; PAM type: YTN; PAM sequence: TTA
attttttgtttctttcaatg

SEQ ID NO: 330628 - DNA, 20 bp, Artificial Sequence
  Description of Artificial Sequence: Synthetic oligonucleotide
  Target: LAMA2; (+) strand; PAM type: YTN; PAM sequence: TTT
tttgtttctttcaatgcaat

SEQ ID NO: 330629 - DNA, 20 bp, Artificial Sequence
  Description of Artificial Sequence: Synthetic oligonucleotide
  Target: LAMA2; (+) strand; PAM type: YTN; PAM sequence: TTT
ttgtttctttcaatgcaatt

SEQ ID NO: 330630 - DNA, 20 bp, Artificial Sequence
  Description of Artificial Sequence: Synthetic oligonucleotide
  Target: LAMA2; (+) strand; PAM type: YTN; PAM sequence: TTT
tgtttctttcaatgcaattc

SEQ ID NO: 330631 - DNA, 20 bp, Artificial Sequence
  Description of Artificial Sequence: Synthetic oligonucleotide
  Target: LAMA2; (+) strand; PAM type: YTN; PAM sequence: TTT
gtttctttcaatgcaattct

SEQ ID NO: 330632 - DNA, 20 bp, Artificial Sequence
  Description of Artificial Sequence: Synthetic oligonucleotide
  Target: LAMA2; (+) strand; PAM type: YTN; PAM sequence: TTG
tttctttcaatgcaattcta

SEQ ID NO: 330633 - DNA, 20 bp, Artificial Sequence
  Description of Artificial Sequence: Synthetic oligonucleotide
  Target: LAMA2; (+) strand; PAM type: YTN; PAM sequence: TTT
ctttcaatgcaattctaagg

SEQ ID NO: 330634 - DNA, 20 bp, Artificial Sequence
  Description of Artificial Sequence: Synthetic oligonucleotide
  Target: LAMA2; (+) strand; PAM type: YTN; PAM sequence: TTC
tttcaatgcaattctaaggc

SEQ ID NO: 330635 - DNA, 20 bp, Artificial Sequence
  Description of Artificial Sequence: Synthetic oligonucleotide
  Target: LAMA2; (+) strand; PAM type: YTN; PAM sequence: CTT
tcaatgcaattctaaggcca

SEQ ID NO: 330636 - DNA, 20 bp, Artificial Sequence
  Description of Artificial Sequence: Synthetic oligonucleotide
  Target: LAMA2; (+) strand; PAM type: YTN; PAM sequence: TTT
caatgcaattctaaggccaa

SEQ ID NO: 330637 - DNA, 20 bp, Artificial Sequence
  Description of Artificial Sequence: Synthetic oligonucleotide
  Target: LAMA2; (+) strand; PAM type: YTN; PAM sequence: TTC
aatgcaattctaaggccaac

SEQ ID NO: 330638 - DNA, 20 bp, Artificial Sequence
  Description of Artificial Sequence: Synthetic oligonucleotide
  Target: LAMA2; (+) strand; PAM type: YTN; PAM sequence: TTC
taaggccaaccaggtccgca

SEQ ID NO: 330639 - DNA, 20 bp, Artificial Sequence
  Description of Artificial Sequence: Synthetic oligonucleotide
  Target: LAMA2; (+) strand; PAM type: YTN; PAM sequence: CTA
aggccaaccaggtccgcaag

SEQ ID NO: 330640 - DNA, 20 bp, Artificial Sequence
  Description of Artificial Sequence: Synthetic oligonucleotide
  Target: LAMA2; (+) strand; PAM type: YTN; PAM sequence: CTA
gatctatgctggtttcataa

SEQ ID NO: 330641 - DNA, 20 bp, Artificial Sequence
  Description of Artificial Sequence: Synthetic oligonucleotide
  Target: LAMA2; (+) strand; PAM type: YTN; PAM sequence: CTA
tgctggtttcataaaacatt

SEQ ID NO: 330642 - DNA, 20 bp, Artificial Sequence
  Description of Artificial Sequence: Synthetic oligonucleotide
  Target: LAMA2; (+) strand; PAM type: YTN; PAM sequence: CTG
gtttcataaaacattgtaga

SEQ ID NO: 330643 - DNA, 20 bp, Artificial Sequence
  Description of Artificial Sequence: Synthetic oligonucleotide
  Target: LAMA2; (+) strand; PAM type: YTN; PAM sequence: TTT
cataaaacattgtagatgcc

SEQ ID NO: 330644 - DNA, 20 bp, Artificial Sequence
  Description of Artificial Sequence: Synthetic oligonucleotide
  Target: LAMA2; (+) strand; PAM type: YTN; PAM sequence: TTC
ataaaacattgtagatgcca

SEQ ID NO: 330645 - DNA, 20 bp, Artificial Sequence
  Description of Artificial Sequence: Synthetic oligonucleotide
  Target: LAMA2; (+) strand; PAM type: YTN; PAM sequence: TTG
tagatgccattcagtagagt

SEQ ID NO: 330646 - DNA, 20 bp, Artificial Sequence
  Description of Artificial Sequence: Synthetic oligonucleotide
  Target: LAMA2; (+) strand; PAM type: YTN; PAM sequence: TTC
agtagagtgattaagaggat

SEQ ID NO: 330647 - DNA, 20 bp, Artificial Sequence
  Description of Artificial Sequence: Synthetic oligonucleotide
  Target: LAMA2; (+) strand; PAM type: YTN; PAM sequence: TTA
agaggatagactctggagcc

SEQ ID NO: 330648 - DNA, 20 bp, Artificial Sequence
  Description of Artificial Sequence: Synthetic oligonucleotide
  Target: LAMA2; (+) strand; PAM type: YTN; PAM sequence: CTC
tggagccagattgctttggt

SEQ ID NO: 330649 - DNA, 20 bp, Artificial Sequence
  Description of Artificial Sequence: Synthetic oligonucleotide
  Target: LAMA2; (+) strand; PAM type: YTN; PAM sequence: CTG
gagccagattgctttggttc

SEQ ID NO: 330650 - DNA, 20 bp, Artificial Sequence
  Description of Artificial Sequence: Synthetic oligonucleotide
  Target: LAMA2; (+) strand; PAM type: YTN; PAM sequence: TTG
ctttggttcaaatcatagct

SEQ ID NO: 330651 - DNA, 20 bp, Artificial Sequence
  Description of Artificial Sequence: Synthetic oligonucleotide
  Target: LAMA2; (+) strand; PAM type: YTN; PAM sequence: CTT
tggttcaaatcatagctctg

SEQ ID NO: 330652 - DNA, 20 bp, Artificial Sequence
  Description of Artificial Sequence: Synthetic oligonucleotide
  Target: LAMA2; (+) strand; PAM type: YTN; PAM sequence: TTT
ggttcaaatcatagctctgc

SEQ ID NO: 330653 - DNA, 20 bp, Artificial Sequence
  Description of Artificial Sequence: Synthetic oligonucleotide
  Target: LAMA2; (+) strand; PAM type: YTN; PAM sequence: TTG
gttcaaatcatagctctgct

SEQ ID NO: 330654 - DNA, 20 bp, Artificial Sequence
  Description of Artificial Sequence: Synthetic oligonucleotide
  Target: LAMA2; (+) strand; PAM type: YTN; PAM sequence: TTC
aaatcatagctctgctactt

SEQ ID NO: 330655 - DNA, 20 bp, Artificial Sequence
  Description of Artificial Sequence: Synthetic oligonucleotide
  Target: LAMA2; (+) strand; PAM type: YTN; PAM sequence: CTC
tgctacttgctagctgtaat

SEQ ID NO: 330656 - DNA, 20 bp, Artificial Sequence
  Description of Artificial Sequence: Synthetic oligonucleotide
  Target: LAMA2; (+) strand; PAM type: YTN; PAM sequence: CTG
ctacttgctagctgtaatca

SEQ ID NO: 330657 - DNA, 20 bp, Artificial Sequence
  Description of Artificial Sequence: Synthetic oligonucleotide
  Target: LAMA2; (+) strand; PAM type: YTN; PAM sequence: CTA
cttgctagctgtaatcagga

SEQ ID NO: 330658 - DNA, 20 bp, Artificial Sequence
  Description of Artificial Sequence: Synthetic oligonucleotide
  Target: LAMA2; (+) strand; PAM type: YTN; PAM sequence: CTT
gctagctgtaatcaggagcg

SEQ ID NO: 330659 - DNA, 20 bp, Artificial Sequence
  Description of Artificial Sequence: Synthetic oligonucleotide
  Target: LAMA2; (+) strand; PAM type: YTN; PAM sequence: TTG
ctagctgtaatcaggagcga

SEQ ID NO: 330660 - DNA, 20 bp, Artificial Sequence
  Description of Artificial Sequence: Synthetic oligonucleotide
  Target: LAMA2; (+) strand; PAM type: YTN; PAM sequence: CTA
gctgtaatcaggagcgagtt

SEQ ID NO: 330661 - DNA, 20 bp, Artificial Sequence
  Description of Artificial Sequence: Synthetic oligonucleotide
  Target: LAMA2; (+) strand; PAM type: YTN; PAM sequence: CTG
taatcaggagcgagttactt

SEQ ID NO: 330662 - DNA, 20 bp, Artificial Sequence
  Description of Artificial Sequence: Synthetic oligonucleotide
  Target: LAMA2; (+) strand; PAM type: YTN; PAM sequence: TTA
cttaacacctctctgccttc

SEQ ID NO: 330663 - DNA, 20 bp, Artificial Sequence
  Description of Artificial Sequence: Synthetic oligonucleotide
  Target: LAMA2; (+) strand; PAM type: YTN; PAM sequence: CTT
aacacctctctgccttctta

SEQ ID NO: 330664 - DNA, 20 bp, Artificial Sequence
  Description of Artificial Sequence: Synthetic oligonucleotide
  Target: LAMA2; (+) strand; PAM type: YTN; PAM sequence: TTA
acacctctctgccttcttaa

SEQ ID NO: 330665 - DNA, 20 bp, Artificial Sequence
  Description of Artificial Sequence: Synthetic oligonucleotide
  Target: LAMA2; (+) strand; PAM type: YTN; PAM sequence: CTC
tctgccttcttaataaaata

SEQ ID NO: 330666 - DNA, 20 bp, Artificial Sequence
  Description of Artificial Sequence: Synthetic oligonucleotide
  Target: LAMA2; (+) strand; PAM type: YTN; PAM sequence: CTC
tgccttcttaataaaataga

SEQ ID NO: 330667 - DNA, 20 bp, Artificial Sequence
  Description of Artificial Sequence: Synthetic oligonucleotide
  Target: LAMA2; (+) strand; PAM type: YTN; PAM sequence: CTG
ccttcttaataaaatagaga

SEQ ID NO: 330668 - DNA, 20 bp, Artificial Sequence
  Description of Artificial Sequence: Synthetic oligonucleotide
  Target: LAMA2; (+) strand; PAM type: YTN; PAM sequence: CTT
cttaataaaatagagataat

SEQ ID NO: 330669 - DNA, 20 bp, Artificial Sequence
  Description of Artificial Sequence: Synthetic oligonucleotide
  Target: LAMA2; (+) strand; PAM type: YTN; PAM sequence: TTC
ttaataaaatagagataata

SEQ ID NO: 330670 - DNA, 20 bp, Artificial Sequence
  Description of Artificial Sequence: Synthetic oligonucleotide
  Target: LAMA2; (+) strand; PAM type: YTN; PAM sequence: CTT
aataaaatagagataatagt

SEQ ID NO: 330671 - DNA, 20 bp, Artificial Sequence
  Description of Artificial Sequence: Synthetic oligonucleotide
  Target: LAMA2; (+) strand; PAM type: YTN; PAM sequence: TTA
ataaaatagagataatagtg

SEQ ID NO: 330672 - DNA, 20 bp, Artificial Sequence
  Description of Artificial Sequence: Synthetic oligonucleotide
  Target: LAMA2; (+) strand; PAM type: YTN; PAM sequence: CTC
atgtggatgttttgtgtagc

SEQ ID NO: 330673 - DNA, 20 bp, Artificial Sequence
  Description of Artificial Sequence: Synthetic oligonucleotide
  Target: LAMA2; (+) strand; PAM type: YTN; PAM sequence: TTT
tgtgtagcaaatcattgtag

SEQ ID NO: 330674 - DNA, 20 bp, Artificial Sequence
  Description of Artificial Sequence: Synthetic oligonucleotide
  Target: LAMA2; (+) strand; PAM type: YTN; PAM sequence: TTT
gtgtagcaaatcattgtagg

SEQ ID NO: 330675 - DNA, 20 bp, Artificial Sequence
  Description of Artificial Sequence: Synthetic oligonucleotide
  Target: LAMA2; (+) strand; PAM type: YTN; PAM sequence: TTG
tgtagcaaatcattgtagga

SEQ ID NO: 330676 - DNA, 20 bp, Artificial Sequence
  Description of Artificial Sequence: Synthetic oligonucleotide
  Target: LAMA2; (+) strand; PAM type: YTN; PAM sequence: TTG
taggaacagtgtctgacaat

SEQ ID NO: 330677 - DNA, 20 bp, Artificial Sequence
  Description of Artificial Sequence: Synthetic oligonucleotide
  Target: LAMA2; (+) strand; PAM type: YTN; PAM sequence: CTG
acaatagtgcttggcacatt

SEQ ID NO: 330678 - DNA, 20 bp, Artificial Sequence
  Description of Artificial Sequence: Synthetic oligonucleotide
  Target: LAMA2; (+) strand; PAM type: YTN; PAM sequence: CTT
ggcacattgcaaacattcaa

SEQ ID NO: 330679 - DNA, 20 bp, Artificial Sequence
  Description of Artificial Sequence: Synthetic oligonucleotide
  Target: LAMA2; (+) strand; PAM type: YTN; PAM sequence: TTG
gcacattgcaaacattcaac

SEQ ID NO: 330680 - DNA, 20 bp, Artificial Sequence
  Description of Artificial Sequence: Synthetic oligonucleotide
  Target: LAMA2; (+) strand; PAM type: YTN; PAM sequence: TTG
caaacattcaacgatgctgg

SEQ ID NO: 330681 - DNA, 20 bp, Artificial Sequence
  Description of Artificial Sequence: Synthetic oligonucleotide
  Target: LAMA2; (+) strand; PAM type: YTN; PAM sequence: TTC
aacgatgctggctattatga

SEQ ID NO: 330682 - DNA, 20 bp, Artificial Sequence
  Description of Artificial Sequence: Synthetic oligonucleotide
  Target: LAMA2; (+) strand; PAM type: YTN; PAM sequence: CTG
gctattatgattataattat

SEQ ID NO: 330683 - DNA, 20 bp, Artificial Sequence
  Description of Artificial Sequence: Synthetic oligonucleotide
  Target: LAMA2; (+) strand; PAM type: YTN; PAM sequence: CTA
ttatgattataattattatt

SEQ ID NO: 330684 - DNA, 20 bp, Artificial Sequence
  Description of Artificial Sequence: Synthetic oligonucleotide
  Target: LAMA2; (+) strand; PAM type: YTN; PAM sequence: TTA
tgattataattattattatt

SEQ ID NO: 330685 - DNA, 20 bp, Artificial Sequence
  Description of Artificial Sequence: Synthetic oligonucleotide
  Target: LAMA2; (+) strand; PAM type: YTN; PAM sequence: TTA
taattattattattatatgc

SEQ ID NO: 330686 - DNA, 20 bp, Artificial Sequence
  Description of Artificial Sequence: Synthetic oligonucleotide
  Target: LAMA2; (+) strand; PAM type: YTN; PAM sequence: TTA
ttattattatatgcagatga

SEQ ID NO: 330687 - DNA, 20 bp, Artificial Sequence
  Description of Artificial Sequence: Synthetic oligonucleotide
  Target: LAMA2; (+) strand; PAM type: YTN; PAM sequence: TTA
ttattatatgcagatgatac

SEQ ID NO: 330688 - DNA, 20 bp, Artificial Sequence
  Description of Artificial Sequence: Synthetic oligonucleotide
  Target: LAMA2; (+) strand; PAM type: YTN; PAM sequence: TTA
ttatatgcagatgatacaga

SEQ ID NO: 330689 - DNA, 20 bp, Artificial Sequence
  Description of Artificial Sequence: Synthetic oligonucleotide
  Target: LAMA2; (+) strand; PAM type: YTN; PAM sequence: TTA
tatgcagatgatacagacaa

SEQ ID NO: 330690 - DNA, 20 bp, Artificial Sequence
  Description of Artificial Sequence: Synthetic oligonucleotide
  Target: LAMA2; (+) strand; PAM type: YTN; PAM sequence: TTT
atgagtccaatatttataat

SEQ ID NO: 330691 - DNA, 20 bp, Artificial Sequence
  Description of Artificial Sequence: Synthetic oligonucleotide
  Target: LAMA2; (+) strand; PAM type: YTN; PAM sequence: TTA
tgagtccaatatttataatc

SEQ ID NO: 330692 - DNA, 20 bp, Artificial Sequence
  Description of Artificial Sequence: Synthetic oligonucleotide
  Target: LAMA2; (+) strand; PAM type: YTN; PAM sequence: TTT
ataatctaattattcgttta

SEQ ID NO: 330693 - DNA, 20 bp, Artificial Sequence
  Description of Artificial Sequence: Synthetic oligonucleotide
  Target: LAMA2; (+) strand; PAM type: YTN; PAM sequence: TTA
taatctaattattcgtttat

SEQ ID NO: 330694 - DNA, 20 bp, Artificial Sequence
  Description of Artificial Sequence: Synthetic oligonucleotide
  Target: LAMA2; (+) strand; PAM type: YTN; PAM sequence: CTA
attattcgtttattttacaa

SEQ ID NO: 330695 - DNA, 20 bp, Artificial Sequence
  Description of Artificial Sequence: Synthetic oligonucleotide
  Target: LAMA2; (+) strand; PAM type: YTN; PAM sequence: TTA
ttcgtttattttacaaatac

SEQ ID NO: 330696 - DNA, 20 bp, Artificial Sequence
  Description of Artificial Sequence: Synthetic oligonucleotide
  Target: LAMA2; (+) strand; PAM type: YTN; PAM sequence: TTC
gtttattttacaaatacatt

SEQ ID NO: 330697 - DNA, 20 bp, Artificial Sequence
  Description of Artificial Sequence: Synthetic oligonucleotide
  Target: LAMA2; (+) strand; PAM type: YTN; PAM sequence: TTT
attttacaaatacattgagt

SEQ ID NO: 330698 - DNA, 20 bp, Artificial Sequence
  Description of Artificial Sequence: Synthetic oligonucleotide
  Target: LAMA2; (+) strand; PAM type: YTN; PAM sequence: TTA
ttttacaaatacattgagtg

SEQ ID NO: 330699 - DNA, 20 bp, Artificial Sequence
  Description of Artificial Sequence: Synthetic oligonucleotide
  Target: LAMA2; (+) strand; PAM type: YTN; PAM sequence: TTT
tacaaatacattgagtgcct

SEQ ID NO: 330700 - DNA, 20 bp, Artificial Sequence
  Description of Artificial Sequence: Synthetic oligonucleotide
  Target: LAMA2; (+) strand; PAM type: YTN; PAM sequence: TTT
acaaatacattgagtgccta

SEQ ID NO: 330701 - DNA, 20 bp, Artificial Sequence
  Description of Artificial Sequence: Synthetic oligonucleotide
  Target: LAMA2; (+) strand; PAM type: YTN; PAM sequence: TTA
caaatacattgagtgcctac

SEQ ID NO: 330702 - DNA, 20 bp, Artificial Sequence
  Description of Artificial Sequence: Synthetic oligonucleotide
  Target: LAMA2; (+) strand; PAM type: YTN; PAM sequence: TTG
agtgcctactctgtccctac

SEQ ID NO: 330703 - DNA, 20 bp, Artificial Sequence
  Description of Artificial Sequence: Synthetic oligonucleotide
  Target: LAMA2; (+) strand; PAM type: YTN; PAM sequence: CTA
ctctgtccctactatgtgcc

SEQ ID NO: 330704 - DNA, 20 bp, Artificial Sequence
  Description of Artificial Sequence: Synthetic oligonucleotide
  Target: LAMA2; (+) strand; PAM type: YTN; PAM sequence: CTC
tgtccctactatgtgccaag

SEQ ID NO: 330705 - DNA, 20 bp, Artificial Sequence
  Description of Artificial Sequence: Synthetic oligonucleotide
  Target: LAMA2; (+) strand; PAM type: YTN; PAM sequence: CTG
tccctactatgtgccaagct

SEQ ID NO: 330706 - DNA, 20 bp, Artificial Sequence
  Description of Artificial Sequence: Synthetic oligonucleotide
  Target: LAMA2; (+) strand; PAM type: YTN; PAM sequence: CTA
ctatgtgccaagctttgagg

SEQ ID NO: 330707 - DNA, 20 bp, Artificial Sequence
  Description of Artificial Sequence: Synthetic oligonucleotide
  Target: LAMA2; (+) strand; PAM type: YTN; PAM sequence: CTA
tgtgccaagctttgaggata

SEQ ID NO: 330708 - DNA, 20 bp, Artificial Sequence
  Description of Artificial Sequence: Synthetic oligonucleotide
  Target: LAMA2; (+) strand; PAM type: YTN; PAM sequence: CTT
tgaggataaggcagaaaata

SEQ ID NO: 330709 - DNA, 20 bp, Artificial Sequence
  Description of Artificial Sequence: Synthetic oligonucleotide
  Target: LAMA2; (+) strand; PAM type: YTN; PAM sequence: TTT
gaggataaggcagaaaatac

SEQ ID NO: 330710 - DNA, 20 bp, Artificial Sequence
  Description of Artificial Sequence: Synthetic oligonucleotide
  Target: LAMA2; (+) strand; PAM type: YTN; PAM sequence: TTG
aggataaggcagaaaataca

SEQ ID NO: 330711 - DNA, 20 bp, Artificial Sequence
  Description of Artificial Sequence: Synthetic oligonucleotide
  Target: LAMA2; (+) strand; PAM type: YTN; PAM sequence: TTC
aagatctagagatcttggta

SEQ ID NO: 330712 - DNA, 20 bp, Artificial Sequence
  Description of Artificial Sequence: Synthetic oligonucleotide
  Target: LAMA2; (+) strand; PAM type: YTN; PAM sequence: CTA
gagatcttggtaaaaaaggc

SEQ ID NO: 330713 - DNA, 20 bp, Artificial Sequence
  Description of Artificial Sequence: Synthetic oligonucleotide
  Target: LAMA2; (+) strand; PAM type: YTN; PAM sequence: CTT
ggtaaaaaaggcagaaaaca

SEQ ID NO: 330714 - DNA, 20 bp, Artificial Sequence
  Description of Artificial Sequence: Synthetic oligonucleotide
  Target: LAMA2; (+) strand; PAM type: YTN; PAM sequence: TTG
gtaaaaaaggcagaaaacac

SEQ ID NO: 330715 - DNA, 20 bp, Artificial Sequence
  Description of Artificial Sequence: Synthetic oligonucleotide
  Target: LAMA2; (+) strand; PAM type: YTN; PAM sequence: CTC
aagatctagggatctcagta

SEQ ID NO: 330716 - DNA, 20 bp, Artificial Sequence
  Description of Artificial Sequence: Synthetic oligonucleotide
  Target: LAMA2; (+) strand; PAM type: YTN; PAM sequence: CTA
gggatctcagtaaaatatca

SEQ ID NO: 330717 - DNA, 20 bp, Artificial Sequence
  Description of Artificial Sequence: Synthetic oligonucleotide
  Target: LAMA2; (+) strand; PAM type: YTN; PAM sequence: CTC
agtaaaatatcaagccatga

SEQ ID NO: 330718 - DNA, 20 bp, Artificial Sequence
  Description of Artificial Sequence: Synthetic oligonucleotide
  Target: LAMA2; (+) strand; PAM type: YTN; PAM sequence: TTT
agtcaggaaggtttcttttt

SEQ ID NO: 330719 - DNA, 20 bp, Artificial Sequence
  Description of Artificial Sequence: Synthetic oligonucleotide
  Target: LAMA2; (+) strand; PAM type: YTN; PAM sequence: TTA
gtcaggaaggtttctttttt

SEQ ID NO: 330720 - DNA, 20 bp, Artificial Sequence
  Description of Artificial Sequence: Synthetic oligonucleotide
  Target: LAMA2; (+) strand; PAM type: YTN; PAM sequence: TTT
cttttttcttttctttcttt

SEQ ID NO: 330721 - DNA, 20 bp, Artificial Sequence
  Description of Artificial Sequence: Synthetic oligonucleotide
  Target: LAMA2; (+) strand; PAM type: YTN; PAM sequence: TTC
ttttttcttttctttctttc

SEQ ID NO: 330722 - DNA, 20 bp, Artificial Sequence
  Description of Artificial Sequence: Synthetic oligonucleotide
  Target: LAMA2; (+) strand; PAM type: YTN; PAM sequence: CTT
ttttcttttctttctttctt

SEQ ID NO: 330723 - DNA, 20 bp, Artificial Sequence
  Description of Artificial Sequence: Synthetic oligonucleotide
  Target: LAMA2; (+) strand; PAM type: YTN; PAM sequence: TTT
tttcttttctttctttcttt

SEQ ID NO: 330724 - DNA, 20 bp, Artificial Sequence
  Description of Artificial Sequence: Synthetic oligonucleotide
  Target: LAMA2; (+) strand; PAM type: YTN; PAM sequence: TTT
ttcttttctttctttctttc

SEQ ID NO: 330725 - DNA, 20 bp, Artificial Sequence
  Description of Artificial Sequence: Synthetic oligonucleotide
  Target: LAMA2; (+) strand; PAM type: YTN; PAM sequence: TTT
tcttttctttctttctttct

SEQ ID NO: 330726 - DNA, 20 bp, Artificial Sequence
  Description of Artificial Sequence: Synthetic oligonucleotide
  Target: LAMA2; (+) strand; PAM type: YTN; PAM sequence: TTT
cttttctttctttctttctt

SEQ ID NO: 330727 - DNA, 20 bp, Artificial Sequence
  Description of Artificial Sequence: Synthetic oligonucleotide
  Target: LAMA2; (+) strand; PAM type: YTN; PAM sequence: TTC
ttttctttctttctttcttt

SEQ ID NO: 330728 - DNA, 20 bp, Artificial Sequence
  Description of Artificial Sequence: Synthetic oligonucleotide
  Target: LAMA2; (+) strand; PAM type: YTN; PAM sequence: CTT
ttctttctttctttctttct

SEQ ID NO: 330729 - DNA, 20 bp, Artificial Sequence
  Description of Artificial Sequence: Synthetic oligonucleotide
  Target: LAMA2; (+) strand; PAM type: YTN; PAM sequence: TTT
tctttctttctttctttctt

SEQ ID NO: 330730 - DNA, 20 bp, Artificial Sequence
  Description of Artificial Sequence: Synthetic oligonucleotide
  Target: LAMA2; (+) strand; PAM type: YTN; PAM sequence: TTT
ctttctttctttctttcttt

SEQ ID NO: 330731 - DNA, 20 bp, Artificial Sequence
  Description of Artificial Sequence: Synthetic oligonucleotide
  Target: LAMA2; (+) strand; PAM type: YTN; PAM sequence: TTC
tttctttctttctttctttc

SEQ ID NO: 330732 - DNA, 20 bp, Artificial Sequence
  Description of Artificial Sequence: Synthetic oligonucleotide
  Target: LAMA2; (+) strand; PAM type: YTN; PAM sequence: CTT
tctttctttctttctttctt

SEQ ID NO: 330733 - DNA, 20 bp, Artificial Sequence
  Description of Artificial Sequence: Synthetic oligonucleotide
  Target: LAMA2; (+) strand; PAM type: YTN; PAM sequence: TTT
ctttctttctttctttcttt

SEQ ID NO: 330734 - DNA, 20 bp, Artificial Sequence
  Description of Artificial Sequence: Synthetic oligonucleotide
  Target: LAMA2; (+) strand; PAM type: YTN; PAM sequence: TTC
tttctttctttctttctttc

SEQ ID NO: 330735 - DNA, 20 bp, Artificial Sequence
  Description of Artificial Sequence: Synthetic oligonucleotide
  Target: LAMA2; (+) strand; PAM type: YTN; PAM sequence: CTT
tctttctttctttctttctt

SEQ ID NO: 330736 - DNA, 20 bp, Artificial Sequence
  Description of Artificial Sequence: Synthetic oligonucleotide
  Target: LAMA2; (+) strand; PAM type: YTN; PAM sequence: TTT
ctttctttctttctttcttt

SEQ ID NO: 330737 - DNA, 20 bp, Artificial Sequence
  Description of Artificial Sequence: Synthetic oligonucleotide
  Target: LAMA2; (+) strand; PAM type: YTN; PAM sequence: TTC
tttctttctttctttctttc

SEQ ID NO: 330738 - DNA, 20 bp, Artificial Sequence
  Description of Artificial Sequence: Synthetic oligonucleotide
  Target: LAMA2; (+) strand; PAM type: YTN; PAM sequence: CTT
tctttctttctttctttctt

SEQ ID NO: 330739 - DNA, 20 bp, Artificial Sequence
  Description of Artificial Sequence: Synthetic oligonucleotide
  Target: LAMA2; (+) strand; PAM type: YTN; PAM sequence: TTT
ctttctttctttctttcttt

SEQ ID NO: 330740 - DNA, 20 bp, Artificial Sequence
  Description of Artificial Sequence: Synthetic oligonucleotide
  Target: LAMA2; (+) strand; PAM type: YTN; PAM sequence: TTC
tttctttctttctttctttc

SEQ ID NO: 330741 - DNA, 20 bp, Artificial Sequence
  Description of Artificial Sequence: Synthetic oligonucleotide
  Target: LAMA2; (+) strand; PAM type: YTN; PAM sequence: CTT
tctttctttctttctttctt

SEQ ID NO: 330742 - DNA, 20 bp, Artificial Sequence
  Description of Artificial Sequence: Synthetic oligonucleotide
  Target: LAMA2; (+) strand; PAM type: YTN; PAM sequence: TTT
ctttctttctttctttcttt

SEQ ID NO: 330743 - DNA, 20 bp, Artificial Sequence
  Description of Artificial Sequence: Synthetic oligonucleotide
  Target: LAMA2; (+) strand; PAM type: YTN; PAM sequence: TTC
tttctttctttctttctttc

SEQ ID NO: 330744 - DNA, 20 bp, Artificial Sequence
  Description of Artificial Sequence: Synthetic oligonucleotide
  Target: LAMA2; (+) strand; PAM type: YTN; PAM sequence: CTT
tctttctttctttctttctt

SEQ ID NO: 330745 - DNA, 20 bp, Artificial Sequence
  Description of Artificial Sequence: Synthetic oligonucleotide
  Target: LAMA2; (+) strand; PAM type: YTN; PAM sequence: TTT
ctttctttctttctttcttt

SEQ ID NO: 330746 - DNA, 20 bp, Artificial Sequence
  Description of Artificial Sequence: Synthetic oligonucleotide
  Target: LAMA2; (+) strand; PAM type: YTN; PAM sequence: TTC
tttctttctttctttctttc

SEQ ID NO: 330747 - DNA, 20 bp, Artificial Sequence
  Description of Artificial Sequence: Synthetic oligonucleotide
  Target: LAMA2; (+) strand; PAM type: YTN; PAM sequence: CTT
tctttctttctttctttctt

SEQ ID NO: 330748 - DNA, 20 bp, Artificial Sequence
  Description of Artificial Sequence: Synthetic oligonucleotide
  Target: LAMA2; (+) strand; PAM type: YTN; PAM sequence: TTT
ctttctttctttctttcttt

SEQ ID NO: 330749 - DNA, 20 bp, Artificial Sequence
  Description of Artificial Sequence: Synthetic oligonucleotide
  Target: LAMA2; (+) strand; PAM type: YTN; PAM sequence: TTC
tttctttctttctttctttc

SEQ ID NO: 330750 - DNA, 20 bp, Artificial Sequence
  Description of Artificial Sequence: Synthetic oligonucleotide
  Target: LAMA2; (+) strand; PAM type: YTN; PAM sequence: CTT
tctttctttctttctttctt

SEQ ID NO: 330751 - DNA, 20 bp, Artificial Sequence
  Description of Artificial Sequence: Synthetic oligonucleotide
  Target: LAMA2; (+) strand; PAM type: YTN; PAM sequence: TTT
ctttctttctttctttcttt

SEQ ID NO: 330752 - DNA, 20 bp, Artificial Sequence
  Description of Artificial Sequence: Synthetic oligonucleotide
  Target: LAMA2; (+) strand; PAM type: YTN; PAM sequence: TTC
tttctttctttctttctttc

SEQ ID NO: 330753 - DNA, 20 bp, Artificial Sequence
  Description of Artificial Sequence: Synthetic oligonucleotide
  Target: LAMA2; (+) strand; PAM type: YTN; PAM sequence: CTT
tctttctttctttctttctt

SEQ ID NO: 330754 - DNA, 20 bp, Artificial Sequence
  Description of Artificial Sequence: Synthetic oligonucleotide
  Target: LAMA2; (+) strand; PAM type: YTN; PAM sequence: TTT
ctttctttctttctttcttt

SEQ ID NO: 330755 - DNA, 20 bp, Artificial Sequence
  Description of Artificial Sequence: Synthetic oligonucleotide
  Target: LAMA2; (+) strand; PAM type: YTN; PAM sequence: TTC
tttctttctttctttctttc

SEQ ID NO: 330756 - DNA, 20 bp, Artificial Sequence
  Description of Artificial Sequence: Synthetic oligonucleotide
  Target: LAMA2; (+) strand; PAM type: YTN; PAM sequence: CTT
tctttctttctttctttcct

SEQ ID NO: 330757 - DNA, 20 bp, Artificial Sequence
  Description of Artificial Sequence: Synthetic oligonucleotide
  Target: LAMA2; (+) strand; PAM type: YTN; PAM sequence: TTT
ctttctttctttctttcctt

SEQ ID NO: 330758 - DNA, 20 bp, Artificial Sequence
  Description of Artificial Sequence: Synthetic oligonucleotide
  Target: LAMA2; (+) strand; PAM type: YTN; PAM sequence: TTC
tttctttctttctttccttc

SEQ ID NO: 330759 - DNA, 20 bp, Artificial Sequence
  Description of Artificial Sequence: Synthetic oligonucleotide
  Target: LAMA2; (+) strand; PAM type: YTN; PAM sequence: CTT
tctttctttctttccttcct

SEQ ID NO: 330760 - DNA, 20 bp, Artificial Sequence
  Description of Artificial Sequence: Synthetic oligonucleotide
  Target: LAMA2; (+) strand; PAM type: YTN; PAM sequence: TTT
ctttctttctttccttcctt

SEQ ID NO: 330761 - DNA, 20 bp, Artificial Sequence
  Description of Artificial Sequence: Synthetic oligonucleotide
  Target: LAMA2; (+) strand; PAM type: YTN; PAM sequence: TTC
tttctttctttccttccttc

SEQ ID NO: 330762 - DNA, 20 bp, Artificial Sequence
  Description of Artificial Sequence: Synthetic oligonucleotide
  Target: LAMA2; (+) strand; PAM type: YTN; PAM sequence: CTT
tctttctttccttccttcct

SEQ ID NO: 330763 - DNA, 20 bp, Artificial Sequence
  Description of Artificial Sequence: Synthetic oligonucleotide
  Target: LAMA2; (+) strand; PAM type: YTN; PAM sequence: TTT
ctttctttccttccttcctt

SEQ ID NO: 330764 - DNA, 20 bp, Artificial Sequence
  Description of Artificial Sequence: Synthetic oligonucleotide
  Target: LAMA2; (+) strand; PAM type: YTN; PAM sequence: TTC
tttctttccttccttccttc

SEQ ID NO: 330765 - DNA, 20 bp, Artificial Sequence
  Description of Artificial Sequence: Synthetic oligonucleotide
  Target: LAMA2; (+) strand; PAM type: YTN; PAM sequence: CTT
tctttccttccttccttcct

SEQ ID NO: 330766 - DNA, 20 bp, Artificial Sequence
  Description of Artificial Sequence: Synthetic oligonucleotide
  Target: LAMA2; (+) strand; PAM type: YTN; PAM sequence: TTT
ctttccttccttccttcctt

SEQ ID NO: 330767 - DNA, 20 bp, Artificial Sequence
  Description of Artificial Sequence: Synthetic oligonucleotide
  Target: LAMA2; (+) strand; PAM type: YTN; PAM sequence: TTC
tttccttccttccttccttc

SEQ ID NO: 330768 - DNA, 20 bp, Artificial Sequence
  Description of Artificial Sequence: Synthetic oligonucleotide
  Target: LAMA2; (+) strand; PAM type: YTN; PAM sequence: CTT
tccttccttccttccttcct

SEQ ID NO: 330769 - DNA, 20 bp, Artificial Sequence
  Description of Artificial Sequence: Synthetic oligonucleotide
  Target: LAMA2; (+) strand; PAM type: YTN; PAM sequence: TTT
ccttccttccttccttcctt

SEQ ID NO: 330770 - DNA, 20 bp, Artificial Sequence
  Description of Artificial Sequence: Synthetic oligonucleotide
  Target: LAMA2; (+) strand; PAM type: YTN; PAM sequence: TTC
cttccttccttccttccttc

SEQ ID NO: 330771 - DNA, 20 bp, Artificial Sequence
  Description of Artificial Sequence: Synthetic oligonucleotide
  Target: LAMA2; (+) strand; PAM type: YTN; PAM sequence: CTT
ccttccttccttccttcctt

SEQ ID NO: 330772 - DNA, 20 bp, Artificial Sequence
  Description of Artificial Sequence: Synthetic oligonucleotide
  Target: LAMA2; (+) strand; PAM type: YTN; PAM sequence: TTC
cttccttccttccttccttc

SEQ ID NO: 330773 - DNA, 20 bp, Artificial Sequence
  Description of Artificial Sequence: Synthetic oligonucleotide
  Target: LAMA2; (+) strand; PAM type: YTN; PAM sequence: CTT
ccttccttccttccttcctt

SEQ ID NO: 330774 - DNA, 20 bp, Artificial Sequence
  Description of Artificial Sequence: Synthetic oligonucleotide
  Target: LAMA2; (+) strand; PAM type: YTN; PAM sequence: TTC
cttccttccttccttccttc

SEQ ID NO: 330775 - DNA, 20 bp, Artificial Sequence
  Description of Artificial Sequence: Synthetic oligonucleotide
  Target: LAMA2; (+) strand; PAM type: YTN; PAM sequence: CTT
ccttccttccttccttcctt

SEQ ID NO: 330776 - DNA, 20 bp, Artificial Sequence
  Description of Artificial Sequence: Synthetic oligonucleotide
  Target: LAMA2; (+) strand; PAM type: YTN; PAM sequence: TTC
cttccttccttccttccttc

SEQ ID NO: 330777 - DNA, 20 bp, Artificial Sequence
  Description of Artificial Sequence: Synthetic oligonucleotide
  Target: LAMA2; (+) strand; PAM type: YTN; PAM sequence: CTT
ccttccttccttccttcctt

SEQ ID NO: 330778 - DNA, 20 bp, Artificial Sequence
  Description of Artificial Sequence: Synthetic oligonucleotide
  Target: LAMA2; (+) strand; PAM type: YTN; PAM sequence: TTC
cttccttccttccttccttc

SEQ ID NO: 330779 - DNA, 20 bp, Artificial Sequence
  Description of Artificial Sequence: Synthetic oligonucleotide
  Target: LAMA2; (+) strand; PAM type: YTN; PAM sequence: CTT
ccttccttccttccttcctt

SEQ ID NO: 330780 - DNA, 20 bp, Artificial Sequence
  Description of Artificial Sequence: Synthetic oligonucleotide
  Target: LAMA2; (+) strand; PAM type: YTN; PAM sequence: TTC
cttccttccttccttccttc

SEQ ID NO: 330781 - DNA, 20 bp, Artificial Sequence
  Description of Artificial Sequence: Synthetic oligonucleotide
  Target: LAMA2; (+) strand; PAM type: YTN; PAM sequence: CTT
ccttccttccttccttcctt

SEQ ID NO: 330782 - DNA, 20 bp, Artificial Sequence
  Description of Artificial Sequence: Synthetic oligonucleotide
  Target: LAMA2; (+) strand; PAM type: YTN; PAM sequence: TTC
cttccttccttccttccttc

SEQ ID NO: 330783 - DNA, 20 bp, Artificial Sequence
  Description of Artificial Sequence: Synthetic oligonucleotide
  Target: LAMA2; (+) strand; PAM type: YTN; PAM sequence: CTT
ccttccttccttccttcctt

SEQ ID NO: 330784 - DNA, 20 bp, Artificial Sequence
  Description of Artificial Sequence: Synthetic oligonucleotide
  Target: LAMA2; (+) strand; PAM type: YTN; PAM sequence: TTC
cttccttccttccttccttt

SEQ ID NO: 330785 - DNA, 20 bp, Artificial Sequence
  Description of Artificial Sequence: Synthetic oligonucleotide
  Target: LAMA2; (+) strand; PAM type: YTN; PAM sequence: CTT
ccttccttccttcctttctt

SEQ ID NO: 330786 - DNA, 20 bp, Artificial Sequence
  Description of Artificial Sequence: Synthetic oligonucleotide
  Target: LAMA2; (+) strand; PAM type: YTN; PAM sequence: TTC
cttccttccttcctttcttt

SEQ ID NO: 330787 - DNA, 20 bp, Artificial Sequence
  Description of Artificial Sequence: Synthetic oligonucleotide
  Target: LAMA2; (+) strand; PAM type: YTN; PAM sequence: CTT
ccttccttcctttctttctt

SEQ ID NO: 330788 - DNA, 20 bp, Artificial Sequence
  Description of Artificial Sequence: Synthetic oligonucleotide
  Target: LAMA2; (+) strand; PAM type: YTN; PAM sequence: TTC
cttccttcctttctttcttt

SEQ ID NO: 330789 - DNA, 20 bp, Artificial Sequence
  Description of Artificial Sequence: Synthetic oligonucleotide
  Target: LAMA2; (+) strand; PAM type: YTN; PAM sequence: CTT
ccttcctttctttctttctc

SEQ ID NO: 330790 - DNA, 20 bp, Artificial Sequence
  Description of Artificial Sequence: Synthetic oligonucleotide
  Target: LAMA2; (+) strand; PAM type: YTN; PAM sequence: TTC
cttcctttctttctttctct

SEQ ID NO: 330791 - DNA, 20 bp, Artificial Sequence
  Description of Artificial Sequence: Synthetic oligonucleotide
  Target: LAMA2; (+) strand; PAM type: YTN; PAM sequence: CTT
cctttctttctttctctctc

SEQ ID NO: 330792 - DNA, 20 bp, Artificial Sequence
  Description of Artificial Sequence: Synthetic oligonucleotide
  Target: LAMA2; (+) strand; PAM type: YTN; PAM sequence: TTC
ctttctttctttctctctct

SEQ ID NO: 330793 - DNA, 20 bp, Artificial Sequence
  Description of Artificial Sequence: Synthetic oligonucleotide
  Target: LAMA2; (+) strand; PAM type: YTN; PAM sequence: CTT
tctttctttctctctctctc

SEQ ID NO: 330794 - DNA, 20 bp, Artificial Sequence
  Description of Artificial Sequence: Synthetic oligonucleotide
  Target: LAMA2; (+) strand; PAM type: YTN; PAM sequence: TTT
ctttctttctctctctctct

SEQ ID NO: 330795 - DNA, 20 bp, Artificial Sequence
  Description of Artificial Sequence: Synthetic oligonucleotide
  Target: LAMA2; (+) strand; PAM type: YTN; PAM sequence: TTC
tttctttctctctctctctc

SEQ ID NO: 330796 - DNA, 20 bp, Artificial Sequence
  Description of Artificial Sequence: Synthetic oligonucleotide
  Target: LAMA2; (+) strand; PAM type: YTN; PAM sequence: CTT
tctttctctctctctctctc

SEQ ID NO: 330797 - DNA, 20 bp, Artificial Sequence
  Description of Artificial Sequence: Synthetic oligonucleotide
  Target: LAMA2; (+) strand; PAM type: YTN; PAM sequence: TTT
ctttctctctctctctctct

SEQ ID NO: 330798 - DNA, 20 bp, Artificial Sequence
  Description of Artificial Sequence: Synthetic oligonucleotide
  Target: LAMA2; (+) strand; PAM type: YTN; PAM sequence: TTC
tttctctctctctctctctt

SEQ ID NO: 330799 - DNA, 20 bp, Artificial Sequence
  Description of Artificial Sequence: Synthetic oligonucleotide
  Target: LAMA2; (+) strand; PAM type: YTN; PAM sequence: CTT
tctctctctctctctctttc

SEQ ID NO: 330800 - DNA, 20 bp, Artificial Sequence
  Description of Artificial Sequence: Synthetic oligonucleotide
  Target: LAMA2; (+) strand; PAM type: YTN; PAM sequence: TTT
ctctctctctctctctttct

SEQ ID NO: 330801 - DNA, 20 bp, Artificial Sequence
  Description of Artificial Sequence: Synthetic oligonucleotide
  Target: LAMA2; (+) strand; PAM type: YTN; PAM sequence: TTC
tctctctctctctctttctt

SEQ ID NO: 330802 - DNA, 20 bp, Artificial Sequence
  Description of Artificial Sequence: Synthetic oligonucleotide
  Target: LAMA2; (+) strand; PAM type: YTN; PAM sequence: CTC
tctctctctctctttctttc

SEQ ID NO: 330803 - DNA, 20 bp, Artificial Sequence
  Description of Artificial Sequence: Synthetic oligonucleotide
  Target: LAMA2; (+) strand; PAM type: YTN; PAM sequence: CTC
tctctctctctttctttctc

SEQ ID NO: 330804 - DNA, 20 bp, Artificial Sequence
  Description of Artificial Sequence: Synthetic oligonucleotide
  Target: LAMA2; (+) strand; PAM type: YTN; PAM sequence: CTC
tctctctctttctttctcct

SEQ ID NO: 330805 - DNA, 20 bp, Artificial Sequence
  Description of Artificial Sequence: Synthetic oligonucleotide
  Target: LAMA2; (+) strand; PAM type: YTN; PAM sequence: CTC
tctctctttctttctccttc

SEQ ID NO: 330806 - DNA, 20 bp, Artificial Sequence
  Description of Artificial Sequence: Synthetic oligonucleotide
  Target: LAMA2; (+) strand; PAM type: YTN; PAM sequence: CTC
tctctttctttctccttcct

SEQ ID NO: 330807 - DNA, 20 bp, Artificial Sequence
  Description of Artificial Sequence: Synthetic oligonucleotide
  Target: LAMA2; (+) strand; PAM type: YTN; PAM sequence: CTC
tctttctttctccttccttc

SEQ ID NO: 330808 - DNA, 20 bp, Artificial Sequence
  Description of Artificial Sequence: Synthetic oligonucleotide
  Target: LAMA2; (+) strand; PAM type: YTN; PAM sequence: CTC
tttctttctccttccttctt

SEQ ID NO: 330809 - DNA, 20 bp, Artificial Sequence
  Description of Artificial Sequence: Synthetic oligonucleotide
  Target: LAMA2; (+) strand; PAM type: YTN; PAM sequence: CTT
tctttctccttccttctttg

SEQ ID NO: 330810 - DNA, 20 bp, Artificial Sequence
  Description of Artificial Sequence: Synthetic oligonucleotide
  Target: LAMA2; (+) strand; PAM type: YTN; PAM sequence: TTT
ctttctccttccttctttgc

SEQ ID NO: 330811 - DNA, 20 bp, Artificial Sequence
  Description of Artificial Sequence: Synthetic oligonucleotide
  Target: LAMA2; (+) strand; PAM type: YTN; PAM sequence: TTC
tttctccttccttctttgct

SEQ ID NO: 330812 - DNA, 20 bp, Artificial Sequence
  Description of Artificial Sequence: Synthetic oligonucleotide
  Target: LAMA2; (+) strand; PAM type: YTN; PAM sequence: CTT
tctccttccttctttgcttc

SEQ ID NO: 330813 - DNA, 20 bp, Artificial Sequence
  Description of Artificial Sequence: Synthetic oligonucleotide
  Target: LAMA2; (+) strand; PAM type: YTN; PAM sequence: TTT
ctccttccttctttgcttcc

SEQ ID NO: 330814 - DNA, 20 bp, Artificial Sequence
  Description of Artificial Sequence: Synthetic oligonucleotide
  Target: LAMA2; (+) strand; PAM type: YTN; PAM sequence: TTC
tccttccttctttgcttcct

SEQ ID NO: 330815 - DNA, 20 bp, Artificial Sequence
  Description of Artificial Sequence: Synthetic oligonucleotide
  Target: LAMA2; (+) strand; PAM type: YTN; PAM sequence: CTC
cttccttctttgcttccttc

SEQ ID NO: 330816 - DNA, 20 bp, Artificial Sequence
  Description of Artificial Sequence: Synthetic oligonucleotide
  Target: LAMA2; (+) strand; PAM type: YTN; PAM sequence: CTT
ccttctttgcttccttcctt

SEQ ID NO: 330817 - DNA, 20 bp, Artificial Sequence
  Description of Artificial Sequence: Synthetic oligonucleotide
  Target: LAMA2; (+) strand; PAM type: YTN; PAM sequence: TTC
cttctttgcttccttccttc

SEQ ID NO: 330818 - DNA, 20 bp, Artificial Sequence
  Description of Artificial Sequence: Synthetic oligonucleotide
  Target: LAMA2; (+) strand; PAM type: YTN; PAM sequence: CTT
ctttgcttccttccttcctt

SEQ ID NO: 330819 - DNA, 20 bp, Artificial Sequence
  Description of Artificial Sequence: Synthetic oligonucleotide
  Target: LAMA2; (+) strand; PAM type: YTN; PAM sequence: TTC
tttgcttccttccttccttt

SEQ ID NO: 330820 - DNA, 20 bp, Artificial Sequence
  Description of Artificial Sequence: Synthetic oligonucleotide
  Target: LAMA2; (+) strand; PAM type: YTN; PAM sequence: CTT
tgcttccttccttcctttct

SEQ ID NO: 330821 - DNA, 20 bp, Artificial Sequence
  Description of Artificial Sequence: Synthetic oligonucleotide
  Target: LAMA2; (+) strand; PAM type: YTN; PAM sequence: TTT
gcttccttccttcctttctc

SEQ ID NO: 330822 - DNA, 20 bp, Artificial Sequence
  Description of Artificial Sequence: Synthetic oligonucleotide
  Target: LAMA2; (+) strand; PAM type: YTN; PAM sequence: TTG
cttccttccttcctttctct

SEQ ID NO: 330823 - DNA, 20 bp, Artificial Sequence
  Description of Artificial Sequence: Synthetic oligonucleotide
  Target: LAMA2; (+) strand; PAM type: YTN; PAM sequence: CTT
ccttccttcctttctctctc

SEQ ID NO: 330824 - DNA, 20 bp, Artificial Sequence
  Description of Artificial Sequence: Synthetic oligonucleotide
  Target: LAMA2; (+) strand; PAM type: YTN; PAM sequence: TTC
cttccttcctttctctctct

SEQ ID NO: 330825 - DNA, 20 bp, Artificial Sequence
  Description of Artificial Sequence: Synthetic oligonucleotide
  Target: LAMA2; (+) strand; PAM type: YTN; PAM sequence: CTT
ccttcctttctctctctctc

SEQ ID NO: 330826 - DNA, 20 bp, Artificial Sequence
  Description of Artificial Sequence: Synthetic oligonucleotide
  Target: LAMA2; (+) strand; PAM type: YTN; PAM sequence: TTC
cttcctttctctctctctct

SEQ ID NO: 330827 - DNA, 20 bp, Artificial Sequence
  Description of Artificial Sequence: Synthetic oligonucleotide
  Target: LAMA2; (+) strand; PAM type: YTN; PAM sequence: CTT
cctttctctctctctctctc

SEQ ID NO: 330828 - DNA, 20 bp, Artificial Sequence
  Description of Artificial Sequence: Synthetic oligonucleotide
  Target: LAMA2; (+) strand; PAM type: YTN; PAM sequence: TTC
ctttctctctctctctctct

SEQ ID NO: 330829 - DNA, 20 bp, Artificial Sequence
  Description of Artificial Sequence: Synthetic oligonucleotide
  Target: LAMA2; (+) strand; PAM type: YTN; PAM sequence: CTT
tctctctctctctctctctc

SEQ ID NO: 330830 - DNA, 20 bp, Artificial Sequence
  Description of Artificial Sequence: Synthetic oligonucleotide
  Target: LAMA2; (+) strand; PAM type: YTN; PAM sequence: TTT
ctctctctctctctctctct

SEQ ID NO: 330831 - DNA, 20 bp, Artificial Sequence
  Description of Artificial Sequence: Synthetic oligonucleotide
  Target: LAMA2; (+) strand; PAM type: YTN; PAM sequence: TTC
tctctctctctctctctctc

SEQ ID NO: 330832 - DNA, 20 bp, Artificial Sequence
  Description of Artificial Sequence: Synthetic oligonucleotide
  Target: LAMA2; (+) strand; PAM type: YTN; PAM sequence: CTC
tctctctctctctctctctc

SEQ ID NO: 330833 - DNA, 20 bp, Artificial Sequence
  Description of Artificial Sequence: Synthetic oligonucleotide
  Target: LAMA2; (+) strand; PAM type: YTN; PAM sequence: CTC
tctctctctctctctctctt

SEQ ID NO: 330834 - DNA, 20 bp, Artificial Sequence
  Description of Artificial Sequence: Synthetic oligonucleotide
  Target: LAMA2; (+) strand; PAM type: YTN; PAM sequence: CTC
tctctctctctctctctttc

SEQ ID NO: 330835 - DNA, 20 bp, Artificial Sequence
  Description of Artificial Sequence: Synthetic oligonucleotide
  Target: LAMA2; (+) strand; PAM type: YTN; PAM sequence: CTC
tctctctctctctctttctt

SEQ ID NO: 330836 - DNA, 20 bp, Artificial Sequence
  Description of Artificial Sequence: Synthetic oligonucleotide
  Target: LAMA2; (+) strand; PAM type: YTN; PAM sequence: CTC
tctctctctctctttcttga

SEQ ID NO: 330837 - DNA, 20 bp, Artificial Sequence
  Description of Artificial Sequence: Synthetic oligonucleotide
  Target: LAMA2; (+) strand; PAM type: YTN; PAM sequence: CTC
tctctctctctttcttgaca

SEQ ID NO: 330838 - DNA, 20 bp, Artificial Sequence
  Description of Artificial Sequence: Synthetic oligonucleotide
  Target: LAMA2; (+) strand; PAM type: YTN; PAM sequence: CTC
tctctctctttcttgacaga

SEQ ID NO: 330839 - DNA, 20 bp, Artificial Sequence
  Description of Artificial Sequence: Synthetic oligonucleotide
  Target: LAMA2; (+) strand; PAM type: YTN; PAM sequence: CTC
tctctctttcttgacagagt

SEQ ID NO: 330840 - DNA, 20 bp, Artificial Sequence
  Description of Artificial Sequence: Synthetic oligonucleotide
  Target: LAMA2; (+) strand; PAM type: YTN; PAM sequence: CTC
tctctttcttgacagagtct

SEQ ID NO: 330841 - DNA, 20 bp, Artificial Sequence
  Description of Artificial Sequence: Synthetic oligonucleotide
  Target: LAMA2; (+) strand; PAM type: YTN; PAM sequence: CTC
tctttcttgacagagtcttc

SEQ ID NO: 330842 - DNA, 20 bp, Artificial Sequence
  Description of Artificial Sequence: Synthetic oligonucleotide
  Target: LAMA2; (+) strand; PAM type: YTN; PAM sequence: CTC
tttcttgacagagtcttcct

SEQ ID NO: 330843 - DNA, 20 bp, Artificial Sequence
  Description of Artificial Sequence: Synthetic oligonucleotide
  Target: LAMA2; (+) strand; PAM type: YTN; PAM sequence: CTT
tcttgacagagtcttcctct

SEQ ID NO: 330844 - DNA, 20 bp, Artificial Sequence
  Description of Artificial Sequence: Synthetic oligonucleotide
  Target: LAMA2; (+) strand; PAM type: YTN; PAM sequence: TTT
cttgacagagtcttcctctg

SEQ ID NO: 330845 - DNA, 20 bp, Artificial Sequence
  Description of Artificial Sequence: Synthetic oligonucleotide
  Target: LAMA2; (+) strand; PAM type: YTN; PAM sequence: TTC
ttgacagagtcttcctctgt

SEQ ID NO: 330846 - DNA, 20 bp, Artificial Sequence
  Description of Artificial Sequence: Synthetic oligonucleotide
  Target: LAMA2; (+) strand; PAM type: YTN; PAM sequence: CTT
gacagagtcttcctctgtct

SEQ ID NO: 330847 - DNA, 20 bp, Artificial Sequence
  Description of Artificial Sequence: Synthetic oligonucleotide
  Target: LAMA2; (+) strand; PAM type: YTN; PAM sequence: TTG
acagagtcttcctctgtctc

SEQ ID NO: 330848 - DNA, 20 bp, Artificial Sequence
  Description of Artificial Sequence: Synthetic oligonucleotide
  Target: LAMA2; (+) strand; PAM type: YTN; PAM sequence: CTT
cctctgtctcccaggctgga

SEQ ID NO: 330849 - DNA, 20 bp, Artificial Sequence
  Description of Artificial Sequence: Synthetic oligonucleotide
  Target: LAMA2; (+) strand; PAM type: YTN; PAM sequence: TTC
ctctgtctcccaggctggag

SEQ ID NO: 330850 - DNA, 20 bp, Artificial Sequence
  Description of Artificial Sequence: Synthetic oligonucleotide
  Target: LAMA2; (+) strand; PAM type: YTN; PAM sequence: CTC
tgtctcccaggctggagtgc

SEQ ID NO: 330851 - DNA, 20 bp, Artificial Sequence
  Description of Artificial Sequence: Synthetic oligonucleotide
  Target: LAMA2; (+) strand; PAM type: YTN; PAM sequence: CTG
tctcccaggctggagtgcag

SEQ ID NO: 330852 - DNA, 20 bp, Artificial Sequence
  Description of Artificial Sequence: Synthetic oligonucleotide
  Target: LAMA2; (+) strand; PAM type: YTN; PAM sequence: CTC
ccaggctggagtgcagtgat

SEQ ID NO: 330853 - DNA, 20 bp, Artificial Sequence
  Description of Artificial Sequence: Synthetic oligonucleotide
  Target: LAMA2; (+) strand; PAM type: YTN; PAM sequence: CTG
gagtgcagtgatgtgatctc

SEQ ID NO: 330854 - DNA, 20 bp, Artificial Sequence
  Description of Artificial Sequence: Synthetic oligonucleotide
  Target: LAMA2; (+) strand; PAM type: YTN; PAM sequence: CTC
agctcactgcaacctccacc

SEQ ID NO: 330855 - DNA, 20 bp, Artificial Sequence
  Description of Artificial Sequence: Synthetic oligonucleotide
  Target: LAMA2; (+) strand; PAM type: YTN; PAM sequence: CTC
actgcaacctccacctcccg

SEQ ID NO: 330856 - DNA, 20 bp, Artificial Sequence
  Description of Artificial Sequence: Synthetic oligonucleotide
  Target: LAMA2; (+) strand; PAM type: YTN; PAM sequence: CTG
caacctccacctcccgggct

SEQ ID NO: 330857 - DNA, 20 bp, Artificial Sequence
  Description of Artificial Sequence: Synthetic oligonucleotide
  Target: LAMA2; (+) strand; PAM type: YTN; PAM sequence: CTC
cacctcccgggctcaagcaa

SEQ ID NO: 330858 - DNA, 20 bp, Artificial Sequence
  Description of Artificial Sequence: Synthetic oligonucleotide
  Target: LAMA2; (+) strand; PAM type: YTN; PAM sequence: CTC
ccgggctcaagcaattctcc

SEQ ID NO: 330859 - DNA, 20 bp, Artificial Sequence
  Description of Artificial Sequence: Synthetic oligonucleotide
  Target: LAMA2; (+) strand; PAM type: YTN; PAM sequence: CTC
aagcaattctcctgcctcag

SEQ ID NO: 330860 - DNA, 20 bp, Artificial Sequence
  Description of Artificial Sequence: Synthetic oligonucleotide
  Target: LAMA2; (+) strand; PAM type: YTN; PAM sequence: TTC
tcctgcctcaggtttccaag

SEQ ID NO: 330861 - DNA, 20 bp, Artificial Sequence
  Description of Artificial Sequence: Synthetic oligonucleotide
  Target: LAMA2; (+) strand; PAM type: YTN; PAM sequence: CTC
ctgcctcaggtttccaagta

SEQ ID NO: 330862 - DNA, 20 bp, Artificial Sequence
  Description of Artificial Sequence: Synthetic oligonucleotide
  Target: LAMA2; (+) strand; PAM type: YTN; PAM sequence: CTG
cctcaggtttccaagtagct

SEQ ID NO: 330863 - DNA, 20 bp, Artificial Sequence
  Description of Artificial Sequence: Synthetic oligonucleotide
  Target: LAMA2; (+) strand; PAM type: YTN; PAM sequence: CTC
aggtttccaagtagctggga

SEQ ID NO: 330864 - DNA, 20 bp, Artificial Sequence
  Description of Artificial Sequence: Synthetic oligonucleotide
  Target: LAMA2; (+) strand; PAM type: YTN; PAM sequence: TTT
ccaagtagctgggattacag

SEQ ID NO: 330865 - DNA, 20 bp, Artificial Sequence
  Description of Artificial Sequence: Synthetic oligonucleotide
  Target: LAMA2; (+) strand; PAM type: YTN; PAM sequence: TTC
caagtagctgggattacaga

SEQ ID NO: 330866 - DNA, 20 bp, Artificial Sequence
  Description of Artificial Sequence: Synthetic oligonucleotide
  Target: LAMA2; (+) strand; PAM type: YTN; PAM sequence: CTG
ggattacagatgcccaccac

SEQ ID NO: 330867 - DNA, 20 bp, Artificial Sequence
  Description of Artificial Sequence: Synthetic oligonucleotide
  Target: LAMA2; (+) strand; PAM type: YTN; PAM sequence: TTA
cagatgcccaccaccacgcc

SEQ ID NO: 330868 - DNA, 20 bp, Artificial Sequence
  Description of Artificial Sequence: Synthetic oligonucleotide
  Target: LAMA2; (+) strand; PAM type: YTN; PAM sequence: CTG
ctaatttttgtatttttagt

SEQ ID NO: 330869 - DNA, 20 bp, Artificial Sequence
  Description of Artificial Sequence: Synthetic oligonucleotide
  Target: LAMA2; (+) strand; PAM type: YTN; PAM sequence: CTA
atttttgtatttttagtaga

SEQ ID NO: 330870 - DNA, 20 bp, Artificial Sequence
  Description of Artificial Sequence: Synthetic oligonucleotide
  Target: LAMA2; (+) strand; PAM type: YTN; PAM sequence: TTT
ttgtatttttagtagagaca

SEQ ID NO: 330871 - DNA, 20 bp, Artificial Sequence
  Description of Artificial Sequence: Synthetic oligonucleotide
  Target: LAMA2; (+) strand; PAM type: YTN; PAM sequence: TTT
tgtatttttagtagagacag

SEQ ID NO: 330872 - DNA, 20 bp, Artificial Sequence
  Description of Artificial Sequence: Synthetic oligonucleotide
  Target: LAMA2; (+) strand; PAM type: YTN; PAM sequence: TTT
gtatttttagtagagacagg

SEQ ID NO: 330873 - DNA, 20 bp, Artificial Sequence
  Description of Artificial Sequence: Synthetic oligonucleotide
  Target: LAMA2; (+) strand; PAM type: YTN; PAM sequence: TTG
tatttttagtagagacaggg

SEQ ID NO: 330874 - DNA, 20 bp, Artificial Sequence
  Description of Artificial Sequence: Synthetic oligonucleotide
  Target: LAMA2; (+) strand; PAM type: YTN; PAM sequence: TTT
ttagtagagacagggtttca

SEQ ID NO: 330875 - DNA, 20 bp, Artificial Sequence
  Description of Artificial Sequence: Synthetic oligonucleotide
  Target: LAMA2; (+) strand; PAM type: YTN; PAM sequence: TTT
tagtagagacagggtttcac

SEQ ID NO: 330876 - DNA, 20 bp, Artificial Sequence
  Description of Artificial Sequence: Synthetic oligonucleotide
  Target: LAMA2; (+) strand; PAM type: YTN; PAM sequence: TTT
agtagagacagggtttcacc

SEQ ID NO: 330877 - DNA, 20 bp, Artificial Sequence
  Description of Artificial Sequence: Synthetic oligonucleotide
  Target: LAMA2; (+) strand; PAM type: YTN; PAM sequence: TTA
gtagagacagggtttcacca

SEQ ID NO: 330878 - DNA, 20 bp, Artificial Sequence
  Description of Artificial Sequence: Synthetic oligonucleotide
  Target: LAMA2; (+) strand; PAM type: YTN; PAM sequence: TTT
caccatgttggccagactgg

SEQ ID NO: 330879 - DNA, 20 bp, Artificial Sequence
  Description of Artificial Sequence: Synthetic oligonucleotide
  Target: LAMA2; (+) strand; PAM type: YTN; PAM sequence: TTC
accatgttggccagactggt

SEQ ID NO: 330880 - DNA, 20 bp, Artificial Sequence
  Description of Artificial Sequence: Synthetic oligonucleotide
  Target: LAMA2; (+) strand; PAM type: YTN; PAM sequence: TTG
gccagactggtcttgaactc

SEQ ID NO: 330881 - DNA, 20 bp, Artificial Sequence
  Description of Artificial Sequence: Synthetic oligonucleotide
  Target: LAMA2; (+) strand; PAM type: YTN; PAM sequence: CTG
gtcttgaactcctgacctca

SEQ ID NO: 330882 - DNA, 20 bp, Artificial Sequence
  Description of Artificial Sequence: Synthetic oligonucleotide
  Target: LAMA2; (+) strand; PAM type: YTN; PAM sequence: CTT
gaactcctgacctcaagtga

SEQ ID NO: 330883 - DNA, 20 bp, Artificial Sequence
  Description of Artificial Sequence: Synthetic oligonucleotide
  Target: LAMA2; (+) strand; PAM type: YTN; PAM sequence: TTG
aactcctgacctcaagtgat

SEQ ID NO: 330884 - DNA, 20 bp, Artificial Sequence
  Description of Artificial Sequence: Synthetic oligonucleotide
  Target: LAMA2; (+) strand; PAM type: YTN; PAM sequence: CTC
ctgacctcaagtgatccgcc

SEQ ID NO: 330885 - DNA, 20 bp, Artificial Sequence
  Description of Artificial Sequence: Synthetic oligonucleotide
  Target: LAMA2; (+) strand; PAM type: YTN; PAM sequence: CTG
acctcaagtgatccgcccac

SEQ ID NO: 330886 - DNA, 20 bp, Artificial Sequence
  Description of Artificial Sequence: Synthetic oligonucleotide
  Target: LAMA2; (+) strand; PAM type: YTN; PAM sequence: CTC
aagtgatccgcccacctcag

SEQ ID NO: 330887 - DNA, 20 bp, Artificial Sequence
  Description of Artificial Sequence: Synthetic oligonucleotide
  Target: LAMA2; (+) strand; PAM type: YTN; PAM sequence: CTC
agcctcccaaagtgctggga

SEQ ID NO: 330888 - DNA, 20 bp, Artificial Sequence
  Description of Artificial Sequence: Synthetic oligonucleotide
  Target: LAMA2; (+) strand; PAM type: YTN; PAM sequence: CTC
ccaaagtgctgggattacag

SEQ ID NO: 330889 - DNA, 20 bp, Artificial Sequence
  Description of Artificial Sequence: Synthetic oligonucleotide
  Target: LAMA2; (+) strand; PAM type: YTN; PAM sequence: CTG
ggattacaggcgtgagtcac

SEQ ID NO: 330890 - DNA, 20 bp, Artificial Sequence
  Description of Artificial Sequence: Synthetic oligonucleotide
  Target: LAMA2; (+) strand; PAM type: YTN; PAM sequence: TTA
caggcgtgagtcaccacacc

SEQ ID NO: 330891 - DNA, 20 bp, Artificial Sequence
  Description of Artificial Sequence: Synthetic oligonucleotide
  Target: LAMA2; (+) strand; PAM type: YTN; PAM sequence: CTT
tctatcagaagttgaattga

SEQ ID NO: 330892 - DNA, 20 bp, Artificial Sequence
  Description of Artificial Sequence: Synthetic oligonucleotide
  Target: LAMA2; (+) strand; PAM type: YTN; PAM sequence: TTT
ctatcagaagttgaattgat

SEQ ID NO: 330893 - DNA, 20 bp, Artificial Sequence
  Description of Artificial Sequence: Synthetic oligonucleotide
  Target: LAMA2; (+) strand; PAM type: YTN; PAM sequence: TTC
tatcagaagttgaattgata

SEQ ID NO: 330894 - DNA, 20 bp, Artificial Sequence
  Description of Artificial Sequence: Synthetic oligonucleotide
  Target: LAMA2; (+) strand; PAM type: YTN; PAM sequence: CTA
tcagaagttgaattgatata

SEQ ID NO: 330895 - DNA, 20 bp, Artificial Sequence
  Description of Artificial Sequence: Synthetic oligonucleotide
  Target: LAMA2; (+) strand; PAM type: YTN; PAM sequence: TTG
aattgatatagacctacttg

SEQ ID NO: 330896 - DNA, 20 bp, Artificial Sequence
  Description of Artificial Sequence: Synthetic oligonucleotide
  Target: LAMA2; (+) strand; PAM type: YTN; PAM sequence: TTG
atatagacctacttggcaca

SEQ ID NO: 330897 - DNA, 20 bp, Artificial Sequence
  Description of Artificial Sequence: Synthetic oligonucleotide
  Target: LAMA2; (+) strand; PAM type: YTN; PAM sequence: CTA
cttggcacatatatagagct

SEQ ID NO: 330898 - DNA, 20 bp, Artificial Sequence
  Description of Artificial Sequence: Synthetic oligonucleotide
  Target: LAMA2; (+) strand; PAM type: YTN; PAM sequence: CTT
ggcacatatatagagctgaa

SEQ ID NO: 330899 - DNA, 20 bp, Artificial Sequence
  Description of Artificial Sequence: Synthetic oligonucleotide
  Target: LAMA2; (+) strand; PAM type: YTN; PAM sequence: TTG
gcacatatatagagctgaaa

SEQ ID NO: 330900 - DNA, 20 bp, Artificial Sequence
  Description of Artificial Sequence: Synthetic oligonucleotide
  Target: LAMA2; (+) strand; PAM type: YTN; PAM sequence: CTG
aaacaacctagatggtcggc

SEQ ID NO: 330901 - DNA, 20 bp, Artificial Sequence
  Description of Artificial Sequence: Synthetic oligonucleotide
  Target: LAMA2; (+) strand; PAM type: YTN; PAM sequence: CTA
gatggtcggcatattttctc

SEQ ID NO: 330902 - DNA, 20 bp, Artificial Sequence
  Description of Artificial Sequence: Synthetic oligonucleotide
  Target: LAMA2; (+) strand; PAM type: YTN; PAM sequence: TTT
tctccataaatagagtcaaa

SEQ ID NO: 330903 - DNA, 20 bp, Artificial Sequence
  Description of Artificial Sequence: Synthetic oligonucleotide
  Target: LAMA2; (+) strand; PAM type: YTN; PAM sequence: TTT
ctccataaatagagtcaaat

SEQ ID NO: 330904 - DNA, 20 bp, Artificial Sequence
  Description of Artificial Sequence: Synthetic oligonucleotide
  Target: LAMA2; (+) strand; PAM type: YTN; PAM sequence: TTC
tccataaatagagtcaaatt

SEQ ID NO: 330905 - DNA, 20 bp, Artificial Sequence
  Description of Artificial Sequence: Synthetic oligonucleotide
  Target: LAMA2; (+) strand; PAM type: YTN; PAM sequence: CTC
cataaatagagtcaaattat

SEQ ID NO: 330906 - DNA, 20 bp, Artificial Sequence
  Description of Artificial Sequence: Synthetic oligonucleotide
  Target: LAMA2; (+) strand; PAM type: YTN; PAM sequence: TTA
tctgtaatttcaaatgtact

SEQ ID NO: 330907 - DNA, 20 bp, Artificial Sequence
  Description of Artificial Sequence: Synthetic oligonucleotide
  Target: LAMA2; (+) strand; PAM type: YTN; PAM sequence: CTG
taatttcaaatgtactttct

SEQ ID NO: 330908 - DNA, 20 bp, Artificial Sequence
  Description of Artificial Sequence: Synthetic oligonucleotide
  Target: LAMA2; (+) strand; PAM type: YTN; PAM sequence: TTT
caaatgtactttctccaaga

SEQ ID NO: 330909 - DNA, 20 bp, Artificial Sequence
  Description of Artificial Sequence: Synthetic oligonucleotide
  Target: LAMA2; (+) strand; PAM type: YTN; PAM sequence: TTC
aaatgtactttctccaagaa

SEQ ID NO: 330910 - DNA, 20 bp, Artificial Sequence
  Description of Artificial Sequence: Synthetic oligonucleotide
  Target: LAMA2; (+) strand; PAM type: YTN; PAM sequence: CTT
tctccaagaacagatttttc

SEQ ID NO: 330911 - DNA, 20 bp, Artificial Sequence
  Description of Artificial Sequence: Synthetic oligonucleotide
  Target: LAMA2; (+) strand; PAM type: YTN; PAM sequence: TTT
ctccaagaacagatttttca

SEQ ID NO: 330912 - DNA, 20 bp, Artificial Sequence
  Description of Artificial Sequence: Synthetic oligonucleotide
  Target: LAMA2; (+) strand; PAM type: YTN; PAM sequence: TTC
tccaagaacagatttttcag

SEQ ID NO: 330913 - DNA, 20 bp, Artificial Sequence
  Description of Artificial Sequence: Synthetic oligonucleotide
  Target: LAMA2; (+) strand; PAM type: YTN; PAM sequence: CTC
caagaacagatttttcagtt

SEQ ID NO: 330914 - DNA, 20 bp, Artificial Sequence
  Description of Artificial Sequence: Synthetic oligonucleotide
  Target: LAMA2; (+) strand; PAM type: YTN; PAM sequence: TTT
ttcagttaaagagtggcttt

SEQ ID NO: 330915 - DNA, 20 bp, Artificial Sequence
  Description of Artificial Sequence: Synthetic oligonucleotide
  Target: LAMA2; (+) strand; PAM type: YTN; PAM sequence: TTT
tcagttaaagagtggctttt

SEQ ID NO: 330916 - DNA, 20 bp, Artificial Sequence
  Description of Artificial Sequence: Synthetic oligonucleotide
  Target: LAMA2; (+) strand; PAM type: YTN; PAM sequence: TTT
cagttaaagagtggcttttg

SEQ ID NO: 330917 - DNA, 20 bp, Artificial Sequence
  Description of Artificial Sequence: Synthetic oligonucleotide
  Target: LAMA2; (+) strand; PAM type: YTN; PAM sequence: TTC
agttaaagagtggcttttga

SEQ ID NO: 330918 - DNA, 20 bp, Artificial Sequence
  Description of Artificial Sequence: Synthetic oligonucleotide
  Target: LAMA2; (+) strand; PAM type: YTN; PAM sequence: TTA
aagagtggcttttgatgagt

SEQ ID NO: 330919 - DNA, 20 bp, Artificial Sequence
  Description of Artificial Sequence: Synthetic oligonucleotide
  Target: LAMA2; (+) strand; PAM type: YTN; PAM sequence: CTT
ttgatgagtgactttgctat

SEQ ID NO: 330920 - DNA, 20 bp, Artificial Sequence
  Description of Artificial Sequence: Synthetic oligonucleotide
  Target: LAMA2; (+) strand; PAM type: YTN; PAM sequence: TTT
tgatgagtgactttgctata

SEQ ID NO: 330921 - DNA, 20 bp, Artificial Sequence
  Description of Artificial Sequence: Synthetic oligonucleotide
  Target: LAMA2; (+) strand; PAM type: YTN; PAM sequence: TTT
gatgagtgactttgctatac

SEQ ID NO: 330922 - DNA, 20 bp, Artificial Sequence
  Description of Artificial Sequence: Synthetic oligonucleotide
  Target: LAMA2; (+) strand; PAM type: YTN; PAM sequence: TTG
atgagtgactttgctatact

SEQ ID NO: 330923 - DNA, 20 bp, Artificial Sequence
  Description of Artificial Sequence: Synthetic oligonucleotide
  Target: LAMA2; (+) strand; PAM type: YTN; PAM sequence: CTT
tgctatactgttattgaaaa

SEQ ID NO: 330924 - DNA, 20 bp, Artificial Sequence
  Description of Artificial Sequence: Synthetic oligonucleotide
  Target: LAMA2; (+) strand; PAM type: YTN; PAM sequence: TTT
gctatactgttattgaaaaa

SEQ ID NO: 330925 - DNA, 20 bp, Artificial Sequence
  Description of Artificial Sequence: Synthetic oligonucleotide
  Target: LAMA2; (+) strand; PAM type: YTN; PAM sequence: TTG
ctatactgttattgaaaaag

SEQ ID NO: 330926 - DNA, 20 bp, Artificial Sequence
  Description of Artificial Sequence: Synthetic oligonucleotide
  Target: LAMA2; (+) strand; PAM type: YTN; PAM sequence: CTA
tactgttattgaaaaagggt

SEQ ID NO: 330927 - DNA, 20 bp, Artificial Sequence
  Description of Artificial Sequence: Synthetic oligonucleotide
  Target: LAMA2; (+) strand; PAM type: YTN; PAM sequence: CTG
ttattgaaaaagggtctata

SEQ ID NO: 330928 - DNA, 20 bp, Artificial Sequence
  Description of Artificial Sequence: Synthetic oligonucleotide
  Target: LAMA2; (+) strand; PAM type: YTN; PAM sequence: TTA
ttgaaaaagggtctataata

SEQ ID NO: 330929 - DNA, 20 bp, Artificial Sequence
  Description of Artificial Sequence: Synthetic oligonucleotide
  Target: LAMA2; (+) strand; PAM type: YTN; PAM sequence: TTG
aaaaagggtctataatatgc

SEQ ID NO: 330930 - DNA, 20 bp, Artificial Sequence
  Description of Artificial Sequence: Synthetic oligonucleotide
  Target: LAMA2; (+) strand; PAM type: YTN; PAM sequence: CTA
taatatgcaaatgctagaca

SEQ ID NO: 330931 - DNA, 20 bp, Artificial Sequence
  Description of Artificial Sequence: Synthetic oligonucleotide
  Target: LAMA2; (+) strand; PAM type: YTN; PAM sequence: CTA
gacatgtatgaagcacaatt

SEQ ID NO: 330932 - DNA, 20 bp, Artificial Sequence
  Description of Artificial Sequence: Synthetic oligonucleotide
  Target: LAMA2; (+) strand; PAM type: YTN; PAM sequence: TTG
acattaacttacaggaagaa

SEQ ID NO: 330933 - DNA, 20 bp, Artificial Sequence
  Description of Artificial Sequence: Synthetic oligonucleotide
  Target: LAMA2; (+) strand; PAM type: YTN; PAM sequence: TTA
acttacaggaagaaaagaga

SEQ ID NO: 330934 - DNA, 20 bp, Artificial Sequence
  Description of Artificial Sequence: Synthetic oligonucleotide
  Target: LAMA2; (+) strand; PAM type: YTN; PAM sequence: CTT
acaggaagaaaagagactga

SEQ ID NO: 330935 - DNA, 20 bp, Artificial Sequence
  Description of Artificial Sequence: Synthetic oligonucleotide
  Target: LAMA2; (+) strand; PAM type: YTN; PAM sequence: TTA
caggaagaaaagagactgaa

SEQ ID NO: 330936 - DNA, 20 bp, Artificial Sequence
  Description of Artificial Sequence: Synthetic oligonucleotide
  Target: LAMA2; (+) strand; PAM type: YTN; PAM sequence: CTG
aatttggttctcagagggaa

SEQ ID NO: 330937 - DNA, 20 bp, Artificial Sequence
  Description of Artificial Sequence: Synthetic oligonucleotide
  Target: LAMA2; (+) strand; PAM type: YTN; PAM sequence: TTT
ggttctcagagggaataaaa

SEQ ID NO: 330938 - DNA, 20 bp, Artificial Sequence
  Description of Artificial Sequence: Synthetic oligonucleotide
  Target: LAMA2; (+) strand; PAM type: YTN; PAM sequence: TTG
gttctcagagggaataaaaa

SEQ ID NO: 330939 - DNA, 20 bp, Artificial Sequence
  Description of Artificial Sequence: Synthetic oligonucleotide
  Target: LAMA2; (+) strand; PAM type: YTN; PAM sequence: TTC
tcagagggaataaaaaaatc

SEQ ID NO: 330940 - DNA, 20 bp, Artificial Sequence
  Description of Artificial Sequence: Synthetic oligonucleotide
  Target: LAMA2; (+) strand; PAM type: YTN; PAM sequence: CTC
agagggaataaaaaaatctc

SEQ ID NO: 330941 - DNA, 20 bp, Artificial Sequence
  Description of Artificial Sequence: Synthetic oligonucleotide
  Target: LAMA2; (+) strand; PAM type: YTN; PAM sequence: CTC
cccagccctacacttagatg

SEQ ID NO: 330942 - DNA, 20 bp, Artificial Sequence
  Description of Artificial Sequence: Synthetic oligonucleotide
  Target: LAMA2; (+) strand; PAM type: YTN; PAM sequence: CTA
cacttagatggacctctgag

SEQ ID NO: 330943 - DNA, 20 bp, Artificial Sequence
  Description of Artificial Sequence: Synthetic oligonucleotide
  Target: LAMA2; (+) strand; PAM type: YTN; PAM sequence: CTT
agatggacctctgagatcgt

SEQ ID NO: 330944 - DNA, 20 bp, Artificial Sequence
  Description of Artificial Sequence: Synthetic oligonucleotide
  Target: LAMA2; (+) strand; PAM type: YTN; PAM sequence: TTA
gatggacctctgagatcgta

SEQ ID NO: 330945 - DNA, 20 bp, Artificial Sequence
  Description of Artificial Sequence: Synthetic oligonucleotide
  Target: LAMA2; (+) strand; PAM type: YTN; PAM sequence: CTC
tgagatcgtatctatgaaag

SEQ ID NO: 330946 - DNA, 20 bp, Artificial Sequence
  Description of Artificial Sequence: Synthetic oligonucleotide
  Target: LAMA2; (+) strand; PAM type: YTN; PAM sequence: CTG
agatcgtatctatgaaagtt

SEQ ID NO: 330947 - DNA, 20 bp, Artificial Sequence
  Description of Artificial Sequence: Synthetic oligonucleotide
  Target: LAMA2; (+) strand; PAM type: YTN; PAM sequence: CTA
tgaaagttaaaaacttctat

SEQ ID NO: 330948 - DNA, 20 bp, Artificial Sequence
  Description of Artificial Sequence: Synthetic oligonucleotide
  Target: LAMA2; (+) strand; PAM type: YTN; PAM sequence: TTA
aaaacttctattatatctaa

SEQ ID NO: 330949 - DNA, 20 bp, Artificial Sequence
  Description of Artificial Sequence: Synthetic oligonucleotide
  Target: LAMA2; (+) strand; PAM type: YTN; PAM sequence: CTT
ctattatatctaagacataa

SEQ ID NO: 330950 - DNA, 20 bp, Artificial Sequence
  Description of Artificial Sequence: Synthetic oligonucleotide
  Target: LAMA2; (+) strand; PAM type: YTN; PAM sequence: TTC
tattatatctaagacataat

SEQ ID NO: 330951 - DNA, 20 bp, Artificial Sequence
  Description of Artificial Sequence: Synthetic oligonucleotide
  Target: LAMA2; (+) strand; PAM type: YTN; PAM sequence: CTA
ttatatctaagacataatta

SEQ ID NO: 330952 - DNA, 20 bp, Artificial Sequence
  Description of Artificial Sequence: Synthetic oligonucleotide
  Target: LAMA2; (+) strand; PAM type: YTN; PAM sequence: TTA
tatctaagacataattactg

SEQ ID NO: 330953 - DNA, 20 bp, Artificial Sequence
  Description of Artificial Sequence: Synthetic oligonucleotide
  Target: LAMA2; (+) strand; PAM type: YTN; PAM sequence: CTA
agacataattactggtgtat

SEQ ID NO: 330954 - DNA, 20 bp, Artificial Sequence
  Description of Artificial Sequence: Synthetic oligonucleotide
  Target: LAMA2; (+) strand; PAM type: YTN; PAM sequence: TTA
ctggtgtatgatcatggacc

SEQ ID NO: 330955 - DNA, 20 bp, Artificial Sequence
  Description of Artificial Sequence: Synthetic oligonucleotide
  Target: LAMA2; (+) strand; PAM type: YTN; PAM sequence: CTG
gtgtatgatcatggaccact

SEQ ID NO: 330956 - DNA, 20 bp, Artificial Sequence
  Description of Artificial Sequence: Synthetic oligonucleotide
  Target: LAMA2; (+) strand; PAM type: YTN; PAM sequence: CTA
taatggcttgtttctggcaa

SEQ ID NO: 330957 - DNA, 20 bp, Artificial Sequence
  Description of Artificial Sequence: Synthetic oligonucleotide
  Target: LAMA2; (+) strand; PAM type: YTN; PAM sequence: CTT
gtttctggcaatatattgct

SEQ ID NO: 330958 - DNA, 20 bp, Artificial Sequence
  Description of Artificial Sequence: Synthetic oligonucleotide
  Target: LAMA2; (+) strand; PAM type: YTN; PAM sequence: TTG
tttctggcaatatattgctt

SEQ ID NO: 330959 - DNA, 20 bp, Artificial Sequence
  Description of Artificial Sequence: Synthetic oligonucleotide
  Target: LAMA2; (+) strand; PAM type: YTN; PAM sequence: TTT
ctggcaatatattgctttat

SEQ ID NO: 330960 - DNA, 20 bp, Artificial Sequence
  Description of Artificial Sequence: Synthetic oligonucleotide
  Target: LAMA2; (+) strand; PAM type: YTN; PAM sequence: TTC
tggcaatatattgctttatt

SEQ ID NO: 330961 - DNA, 20 bp, Artificial Sequence
  Description of Artificial Sequence: Synthetic oligonucleotide
  Target: LAMA2; (+) strand; PAM type: YTN; PAM sequence: CTG
gcaatatattgctttattat

SEQ ID NO: 330962 - DNA, 20 bp, Artificial Sequence
  Description of Artificial Sequence: Synthetic oligonucleotide
  Target: LAMA2; (+) strand; PAM type: YTN; PAM sequence: TTG
ctttattatattgctggatg

SEQ ID NO: 330963 - DNA, 20 bp, Artificial Sequence
  Description of Artificial Sequence: Synthetic oligonucleotide
  Target: LAMA2; (+) strand; PAM type: YTN; PAM sequence: CTT
tattatattgctggatggca

SEQ ID NO: 330964 - DNA, 20 bp, Artificial Sequence
  Description of Artificial Sequence: Synthetic oligonucleotide
  Target: LAMA2; (+) strand; PAM type: YTN; PAM sequence: TTT
attatattgctggatggcat

SEQ ID NO: 330965 - DNA, 20 bp, Artificial Sequence
  Description of Artificial Sequence: Synthetic oligonucleotide
  Target: LAMA2; (+) strand; PAM type: YTN; PAM sequence: TTA
ttatattgctggatggcatg

SEQ ID NO: 330966 - DNA, 20 bp, Artificial Sequence
  Description of Artificial Sequence: Synthetic oligonucleotide
  Target: LAMA2; (+) strand; PAM type: YTN; PAM sequence: TTA
tattgctggatggcatggaa

SEQ ID NO: 330967 - DNA, 20 bp, Artificial Sequence
  Description of Artificial Sequence: Synthetic oligonucleotide
  Target: LAMA2; (+) strand; PAM type: YTN; PAM sequence: TTG
ctggatggcatggaaagcag

SEQ ID NO: 330968 - DNA, 20 bp, Artificial Sequence
  Description of Artificial Sequence: Synthetic oligonucleotide
  Target: LAMA2; (+) strand; PAM type: YTN; PAM sequence: CTG
gatggcatggaaagcagtaa

SEQ ID NO: 330969 - DNA, 20 bp, Artificial Sequence
  Description of Artificial Sequence: Synthetic oligonucleotide
  Target: LAMA2; (+) strand; PAM type: YTN; PAM sequence: TTG
gtattccaaagtaaacatta

SEQ ID NO: 330970 - DNA, 20 bp, Artificial Sequence
  Description of Artificial Sequence: Synthetic oligonucleotide
  Target: LAMA2; (+) strand; PAM type: YTN; PAM sequence: TTC
caaagtaaacattatctatc

SEQ ID NO: 330971 - DNA, 20 bp, Artificial Sequence
  Description of Artificial Sequence: Synthetic oligonucleotide
  Target: LAMA2; (+) strand; PAM type: YTN; PAM sequence: TTA
tctatcttctctagtctggg

SEQ ID NO: 330972 - DNA, 20 bp, Artificial Sequence
  Description of Artificial Sequence: Synthetic oligonucleotide
  Target: LAMA2; (+) strand; PAM type: YTN; PAM sequence: CTA
tcttctctagtctgggataa

SEQ ID NO: 330973 - DNA, 20 bp, Artificial Sequence
  Description of Artificial Sequence: Synthetic oligonucleotide
  Target: LAMA2; (+) strand; PAM type: YTN; PAM sequence: CTT
ctctagtctgggataaagaa

SEQ ID NO: 330974 - DNA, 20 bp, Artificial Sequence
  Description of Artificial Sequence: Synthetic oligonucleotide
  Target: LAMA2; (+) strand; PAM type: YTN; PAM sequence: TTC
tctagtctgggataaagaag

SEQ ID NO: 330975 - DNA, 20 bp, Artificial Sequence
  Description of Artificial Sequence: Synthetic oligonucleotide
  Target: LAMA2; (+) strand; PAM type: YTN; PAM sequence: CTC
tagtctgggataaagaagtt

SEQ ID NO: 330976 - DNA, 20 bp, Artificial Sequence
  Description of Artificial Sequence: Synthetic oligonucleotide
  Target: LAMA2; (+) strand; PAM type: YTN; PAM sequence: CTA
gtctgggataaagaagtttt

SEQ ID NO: 330977 - DNA, 20 bp, Artificial Sequence
  Description of Artificial Sequence: Synthetic oligonucleotide
  Target: LAMA2; (+) strand; PAM type: YTN; PAM sequence: CTG
ggataaagaagttttaataa

SEQ ID NO: 330978 - DNA, 20 bp, Artificial Sequence
  Description of Artificial Sequence: Synthetic oligonucleotide
  Target: LAMA2; (+) strand; PAM type: YTN; PAM sequence: TTT
taataattatttacactgaa

SEQ ID NO: 330979 - DNA, 20 bp, Artificial Sequence
  Description of Artificial Sequence: Synthetic oligonucleotide
  Target: LAMA2; (+) strand; PAM type: YTN; PAM sequence: TTT
aataattatttacactgaag

SEQ ID NO: 330980 - DNA, 20 bp, Artificial Sequence
  Description of Artificial Sequence: Synthetic oligonucleotide
  Target: LAMA2; (+) strand; PAM type: YTN; PAM sequence: TTA
ataattatttacactgaagg

SEQ ID NO: 330981 - DNA, 20 bp, Artificial Sequence
  Description of Artificial Sequence: Synthetic oligonucleotide
  Target: LAMA2; (+) strand; PAM type: YTN; PAM sequence: TTA
tttacactgaaggataatta

SEQ ID NO: 330982 - DNA, 20 bp, Artificial Sequence
  Description of Artificial Sequence: Synthetic oligonucleotide
  Target: LAMA2; (+) strand; PAM type: YTN; PAM sequence: TTT
acactgaaggataattagag

SEQ ID NO: 330983 - DNA, 20 bp, Artificial Sequence
  Description of Artificial Sequence: Synthetic oligonucleotide
  Target: LAMA2; (+) strand; PAM type: YTN; PAM sequence: TTA
cactgaaggataattagagc

SEQ ID NO: 330984 - DNA, 20 bp, Artificial Sequence
  Description of Artificial Sequence: Synthetic oligonucleotide
  Target: LAMA2; (+) strand; PAM type: YTN; PAM sequence: CTG
aaggataattagagcatgaa

SEQ ID NO: 330985 - DNA, 20 bp, Artificial Sequence
  Description of Artificial Sequence: Synthetic oligonucleotide
  Target: LAMA2; (+) strand; PAM type: YTN; PAM sequence: TTA
gagcatgaaatgaccatgaa

SEQ ID NO: 330986 - DNA, 20 bp, Artificial Sequence
  Description of Artificial Sequence: Synthetic oligonucleotide
  Target: LAMA2; (+) strand; PAM type: YTN; PAM sequence: TTT
gcatagttgtgcagaaacat

SEQ ID NO: 330987 - DNA, 20 bp, Artificial Sequence
  Description of Artificial Sequence: Synthetic oligonucleotide
  Target: LAMA2; (+) strand; PAM type: YTN; PAM sequence: TTG
catagttgtgcagaaacatt

SEQ ID NO: 330988 - DNA, 20 bp, Artificial Sequence
  Description of Artificial Sequence: Synthetic oligonucleotide
  Target: LAMA2; (+) strand; PAM type: YTN; PAM sequence: TTG
tgcagaaacattaacatgca

SEQ ID NO: 330989 - DNA, 20 bp, Artificial Sequence
  Description of Artificial Sequence: Synthetic oligonucleotide
  Target: LAMA2; (+) strand; PAM type: YTN; PAM sequence: TTA
acatgcaattatgtcttgat

SEQ ID NO: 330990 - DNA, 20 bp, Artificial Sequence
  Description of Artificial Sequence: Synthetic oligonucleotide
  Target: LAMA2; (+) strand; PAM type: YTN; PAM sequence: TTA
tgtcttgatactagatataa

SEQ ID NO: 330991 - DNA, 20 bp, Artificial Sequence
  Description of Artificial Sequence: Synthetic oligonucleotide
  Target: LAMA2; (+) strand; PAM type: YTN; PAM sequence: CTT
gatactagatataaaatatc

SEQ ID NO: 330992 - DNA, 20 bp, Artificial Sequence
  Description of Artificial Sequence: Synthetic oligonucleotide
  Target: LAMA2; (+) strand; PAM type: YTN; PAM sequence: TTG
atactagatataaaatatct

SEQ ID NO: 330993 - DNA, 20 bp, Artificial Sequence
  Description of Artificial Sequence: Synthetic oligonucleotide
  Target: LAMA2; (+) strand; PAM type: YTN; PAM sequence: CTA
gatataaaatatctgaaatg

SEQ ID NO: 330994 - DNA, 20 bp, Artificial Sequence
  Description of Artificial Sequence: Synthetic oligonucleotide
  Target: LAMA2; (+) strand; PAM type: YTN; PAM sequence: CTG
aaatggaagatggaagattt

SEQ ID NO: 330995 - DNA, 20 bp, Artificial Sequence
  Description of Artificial Sequence: Synthetic oligonucleotide
  Target: LAMA2; (+) strand; PAM type: YTN; PAM sequence: TTT
agtgggatcttttaccaata

SEQ ID NO: 330996 - DNA, 20 bp, Artificial Sequence
  Description of Artificial Sequence: Synthetic oligonucleotide
  Target: LAMA2; (+) strand; PAM type: YTN; PAM sequence: TTA
gtgggatcttttaccaataa

SEQ ID NO: 330997 - DNA, 20 bp, Artificial Sequence
  Description of Artificial Sequence: Synthetic oligonucleotide
  Target: LAMA2; (+) strand; PAM type: YTN; PAM sequence: CTT
ttaccaataacttcaacaga

SEQ ID NO: 330998 - DNA, 20 bp, Artificial Sequence
  Description of Artificial Sequence: Synthetic oligonucleotide
  Target: LAMA2; (+) strand; PAM type: YTN; PAM sequence: TTT
taccaataacttcaacagaa

SEQ ID NO: 330999 - DNA, 20 bp, Artificial Sequence
  Description of Artificial Sequence: Synthetic oligonucleotide
  Target: LAMA2; (+) strand; PAM type: YTN; PAM sequence: TTT
accaataacttcaacagaag

SEQ ID NO: 331000 - DNA, 20 bp, Artificial Sequence
  Description of Artificial Sequence: Synthetic oligonucleotide
  Target: LAMA2; (+) strand; PAM type: YTN; PAM sequence: TTA
ccaataacttcaacagaaga

SEQ ID NO: 331001 - DNA, 20 bp, Artificial Sequence
  Description of Artificial Sequence: Synthetic oligonucleotide
  Target: LAMA2; (+) strand; PAM type: YTN; PAM sequence: CTT
caacagaagatttgtgtttt

SEQ ID NO: 331002 - DNA, 20 bp, Artificial Sequence
  Description of Artificial Sequence: Synthetic oligonucleotide
  Target: LAMA2; (+) strand; PAM type: YTN; PAM sequence: TTC
aacagaagatttgtgtttta

SEQ ID NO: 331003 - DNA, 20 bp, Artificial Sequence
  Description of Artificial Sequence: Synthetic oligonucleotide
  Target: LAMA2; (+) strand; PAM type: YTN; PAM sequence: TTT
gtgttttagaatgtgtccta

SEQ ID NO: 331004 - DNA, 20 bp, Artificial Sequence
  Description of Artificial Sequence: Synthetic oligonucleotide
  Target: LAMA2; (+) strand; PAM type: YTN; PAM sequence: TTG
tgttttagaatgtgtcctag

SEQ ID NO: 331005 - DNA, 20 bp, Artificial Sequence
  Description of Artificial Sequence: Synthetic oligonucleotide
  Target: LAMA2; (+) strand; PAM type: YTN; PAM sequence: TTT
tagaatgtgtcctagagaca

SEQ ID NO: 331006 - DNA, 20 bp, Artificial Sequence
  Description of Artificial Sequence: Synthetic oligonucleotide
  Target: LAMA2; (+) strand; PAM type: YTN; PAM sequence: TTT
agaatgtgtcctagagacag

SEQ ID NO: 331007 - DNA, 20 bp, Artificial Sequence
  Description of Artificial Sequence: Synthetic oligonucleotide
  Target: LAMA2; (+) strand; PAM type: YTN; PAM sequence: TTA
gaatgtgtcctagagacagg

SEQ ID NO: 331008 - DNA, 20 bp, Artificial Sequence
  Description of Artificial Sequence: Synthetic oligonucleotide
  Target: LAMA2; (+) strand; PAM type: YTN; PAM sequence: CTA
gagacaggaccttcttccta

SEQ ID NO: 331009 - DNA, 20 bp, Artificial Sequence
  Description of Artificial Sequence: Synthetic oligonucleotide
  Target: LAMA2; (+) strand; PAM type: YTN; PAM sequence: CTT
cttcctagctaaatattaga

SEQ ID NO: 331010 - DNA, 20 bp, Artificial Sequence
  Description of Artificial Sequence: Synthetic oligonucleotide
  Target: LAMA2; (+) strand; PAM type: YTN; PAM sequence: TTC
ttcctagctaaatattagag

SEQ ID NO: 331011 - DNA, 20 bp, Artificial Sequence
  Description of Artificial Sequence: Synthetic oligonucleotide
  Target: LAMA2; (+) strand; PAM type: YTN; PAM sequence: CTT
cctagctaaatattagagat

SEQ ID NO: 331012 - DNA, 20 bp, Artificial Sequence
  Description of Artificial Sequence: Synthetic oligonucleotide
  Target: LAMA2; (+) strand; PAM type: YTN; PAM sequence: TTC
ctagctaaatattagagata

SEQ ID NO: 331013 - DNA, 20 bp, Artificial Sequence
  Description of Artificial Sequence: Synthetic oligonucleotide
  Target: LAMA2; (+) strand; PAM type: YTN; PAM sequence: CTA
gctaaatattagagataaaa

SEQ ID NO: 331014 - DNA, 20 bp, Artificial Sequence
  Description of Artificial Sequence: Synthetic oligonucleotide
  Target: LAMA2; (+) strand; PAM type: YTN; PAM sequence: CTA
aatattagagataaaaaatt

SEQ ID NO: 331015 - DNA, 20 bp, Artificial Sequence
  Description of Artificial Sequence: Synthetic oligonucleotide
  Target: LAMA2; (+) strand; PAM type: YTN; PAM sequence: TTA
gagataaaaaattaaaaaga

SEQ ID NO: 331016 - DNA, 20 bp, Artificial Sequence
  Description of Artificial Sequence: Synthetic oligonucleotide
  Target: LAMA2; (+) strand; PAM type: YTN; PAM sequence: TTA
aaaagaggcttaaagtccat

SEQ ID NO: 331017 - DNA, 20 bp, Artificial Sequence
  Description of Artificial Sequence: Synthetic oligonucleotide
  Target: LAMA2; (+) strand; PAM type: YTN; PAM sequence: CTT
aaagtccatacttaagaccc

SEQ ID NO: 331018 - DNA, 20 bp, Artificial Sequence
  Description of Artificial Sequence: Synthetic oligonucleotide
  Target: LAMA2; (+) strand; PAM type: YTN; PAM sequence: TTA
aagtccatacttaagaccca

SEQ ID NO: 331019 - DNA, 20 bp, Artificial Sequence
  Description of Artificial Sequence: Synthetic oligonucleotide
  Target: LAMA2; (+) strand; PAM type: YTN; PAM sequence: CTT
aagacccagaaagaaaaata

SEQ ID NO: 331020 - DNA, 20 bp, Artificial Sequence
  Description of Artificial Sequence: Synthetic oligonucleotide
  Target: LAMA2; (+) strand; PAM type: YTN; PAM sequence: TTA
agacccagaaagaaaaatag

SEQ ID NO: 331021 - DNA, 20 bp, Artificial Sequence
  Description of Artificial Sequence: Synthetic oligonucleotide
  Target: LAMA2; (+) strand; PAM type: YTN; PAM sequence: TTC
ttttgataacacatagtatt

SEQ ID NO: 331022 - DNA, 20 bp, Artificial Sequence
  Description of Artificial Sequence: Synthetic oligonucleotide
  Target: LAMA2; (+) strand; PAM type: YTN; PAM sequence: CTT
ttgataacacatagtattta

SEQ ID NO: 331023 - DNA, 20 bp, Artificial Sequence
  Description of Artificial Sequence: Synthetic oligonucleotide
  Target: LAMA2; (+) strand; PAM type: YTN; PAM sequence: TTT
tgataacacatagtatttat

SEQ ID NO: 331024 - DNA, 20 bp, Artificial Sequence
  Description of Artificial Sequence: Synthetic oligonucleotide
  Target: LAMA2; (+) strand; PAM type: YTN; PAM sequence: TTT
gataacacatagtatttatg

SEQ ID NO: 331025 - DNA, 20 bp, Artificial Sequence
  Description of Artificial Sequence: Synthetic oligonucleotide
  Target: LAMA2; (+) strand; PAM type: YTN; PAM sequence: TTG
ataacacatagtatttatgt

SEQ ID NO: 331026 - DNA, 20 bp, Artificial Sequence
  Description of Artificial Sequence: Synthetic oligonucleotide
  Target: LAMA2; (+) strand; PAM type: YTN; PAM sequence: TTT
atgtagtatactgaattgtc

SEQ ID NO: 331027 - DNA, 20 bp, Artificial Sequence
  Description of Artificial Sequence: Synthetic oligonucleotide
  Target: LAMA2; (+) strand; PAM type: YTN; PAM sequence: TTA
tgtagtatactgaattgtca

SEQ ID NO: 331028 - DNA, 20 bp, Artificial Sequence
  Description of Artificial Sequence: Synthetic oligonucleotide
  Target: LAMA2; (+) strand; PAM type: YTN; PAM sequence: CTG
aattgtcaggtatttatcat

SEQ ID NO: 331029 - DNA, 20 bp, Artificial Sequence
  Description of Artificial Sequence: Synthetic oligonucleotide
  Target: LAMA2; (+) strand; PAM type: YTN; PAM sequence: TTG
tcaggtatttatcattaatt

SEQ ID NO: 331030 - DNA, 20 bp, Artificial Sequence
  Description of Artificial Sequence: Synthetic oligonucleotide
  Target: LAMA2; (+) strand; PAM type: YTN; PAM sequence: TTT
atcattaattatctcatgtt

SEQ ID NO: 331031 - DNA, 20 bp, Artificial Sequence
  Description of Artificial Sequence: Synthetic oligonucleotide
  Target: LAMA2; (+) strand; PAM type: YTN; PAM sequence: TTA
tcattaattatctcatgttg

SEQ ID NO: 331032 - DNA, 20 bp, Artificial Sequence
  Description of Artificial Sequence: Synthetic oligonucleotide
  Target: LAMA2; (+) strand; PAM type: YTN; PAM sequence: TTA
attatctcatgttgggttac

SEQ ID NO: 331033 - DNA, 20 bp, Artificial Sequence
  Description of Artificial Sequence: Synthetic oligonucleotide
  Target: LAMA2; (+) strand; PAM type: YTN; PAM sequence: TTA
tctcatgttgggttacttta

SEQ ID NO: 331034 - DNA, 20 bp, Artificial Sequence
  Description of Artificial Sequence: Synthetic oligonucleotide
  Target: LAMA2; (+) strand; PAM type: YTN; PAM sequence: CTC
atgttgggttactttaatgc

SEQ ID NO: 331035 - DNA, 20 bp, Artificial Sequence
  Description of Artificial Sequence: Synthetic oligonucleotide
  Target: LAMA2; (+) strand; PAM type: YTN; PAM sequence: TTG
ggttactttaatgctccgaa

SEQ ID NO: 331036 - DNA, 20 bp, Artificial Sequence
  Description of Artificial Sequence: Synthetic oligonucleotide
  Target: LAMA2; (+) strand; PAM type: YTN; PAM sequence: TTA
ctttaatgctccgaaaaata

SEQ ID NO: 331037 - DNA, 20 bp, Artificial Sequence
  Description of Artificial Sequence: Synthetic oligonucleotide
  Target: LAMA2; (+) strand; PAM type: YTN; PAM sequence: CTT
taatgctccgaaaaatattt

SEQ ID NO: 331038 - DNA, 20 bp, Artificial Sequence
  Description of Artificial Sequence: Synthetic oligonucleotide
  Target: LAMA2; (+) strand; PAM type: YTN; PAM sequence: TTT
aatgctccgaaaaatatttt

SEQ ID NO: 331039 - DNA, 20 bp, Artificial Sequence
  Description of Artificial Sequence: Synthetic oligonucleotide
  Target: LAMA2; (+) strand; PAM type: YTN; PAM sequence: TTA
atgctccgaaaaatatttta

SEQ ID NO: 331040 - DNA, 20 bp, Artificial Sequence
  Description of Artificial Sequence: Synthetic oligonucleotide
  Target: LAMA2; (+) strand; PAM type: YTN; PAM sequence: CTC
cgaaaaatattttatctcaa

SEQ ID NO: 331041 - DNA, 20 bp, Artificial Sequence
  Description of Artificial Sequence: Synthetic oligonucleotide
  Target: LAMA2; (+) strand; PAM type: YTN; PAM sequence: TTT
tatctcaattgcttttaaaa

SEQ ID NO: 331042 - DNA, 20 bp, Artificial Sequence
  Description of Artificial Sequence: Synthetic oligonucleotide
  Target: LAMA2; (+) strand; PAM type: YTN; PAM sequence: TTT
atctcaattgcttttaaaat

SEQ ID NO: 331043 - DNA, 20 bp, Artificial Sequence
  Description of Artificial Sequence: Synthetic oligonucleotide
  Target: LAMA2; (+) strand; PAM type: YTN; PAM sequence: TTA
tctcaattgcttttaaaatg

SEQ ID NO: 331044 - DNA, 20 bp, Artificial Sequence
  Description of Artificial Sequence: Synthetic oligonucleotide
  Target: LAMA2; (+) strand; PAM type: YTN; PAM sequence: CTC
aattgcttttaaaatgtatc

SEQ ID NO: 331045 - DNA, 20 bp, Artificial Sequence
  Description of Artificial Sequence: Synthetic oligonucleotide
  Target: LAMA2; (+) strand; PAM type: YTN; PAM sequence: TTG
cttttaaaatgtatcaaaat

SEQ ID NO: 331046 - DNA, 20 bp, Artificial Sequence
  Description of Artificial Sequence: Synthetic oligonucleotide
  Target: LAMA2; (+) strand; PAM type: YTN; PAM sequence: CTT
ttaaaatgtatcaaaatcct

SEQ ID NO: 331047 - DNA, 20 bp, Artificial Sequence
  Description of Artificial Sequence: Synthetic oligonucleotide
  Target: LAMA2; (+) strand; PAM type: YTN; PAM sequence: TTT
taaaatgtatcaaaatccta

SEQ ID NO: 331048 - DNA, 20 bp, Artificial Sequence
  Description of Artificial Sequence: Synthetic oligonucleotide
  Target: LAMA2; (+) strand; PAM type: YTN; PAM sequence: TTT
aaaatgtatcaaaatcctaa

SEQ ID NO: 331049 - DNA, 20 bp, Artificial Sequence
  Description of Artificial Sequence: Synthetic oligonucleotide
  Target: LAMA2; (+) strand; PAM type: YTN; PAM sequence: TTA
aaatgtatcaaaatcctaac

SEQ ID NO: 331050 - DNA, 20 bp, Artificial Sequence
  Description of Artificial Sequence: Synthetic oligonucleotide
  Target: LAMA2; (+) strand; PAM type: YTN; PAM sequence: CTA
actttgtttctggtctacac

SEQ ID NO: 331051 - DNA, 20 bp, Artificial Sequence
  Description of Artificial Sequence: Synthetic oligonucleotide
  Target: LAMA2; (+) strand; PAM type: YTN; PAM sequence: CTT
tgtttctggtctacacacct

SEQ ID NO: 331052 - DNA, 20 bp, Artificial Sequence
  Description of Artificial Sequence: Synthetic oligonucleotide
  Target: LAMA2; (+) strand; PAM type: YTN; PAM sequence: TTT
gtttctggtctacacacctt

SEQ ID NO: 331053 - DNA, 20 bp, Artificial Sequence
  Description of Artificial Sequence: Synthetic oligonucleotide
  Target: LAMA2; (+) strand; PAM type: YTN; PAM sequence: TTG
tttctggtctacacaccttc

SEQ ID NO: 331054 - DNA, 20 bp, Artificial Sequence
  Description of Artificial Sequence: Synthetic oligonucleotide
  Target: LAMA2; (+) strand; PAM type: YTN; PAM sequence: TTT
ctggtctacacaccttcatt

SEQ ID NO: 331055 - DNA, 20 bp, Artificial Sequence
  Description of Artificial Sequence: Synthetic oligonucleotide
  Target: LAMA2; (+) strand; PAM type: YTN; PAM sequence: TTC
tggtctacacaccttcattt

SEQ ID NO: 331056 - DNA, 20 bp, Artificial Sequence
  Description of Artificial Sequence: Synthetic oligonucleotide
  Target: LAMA2; (+) strand; PAM type: YTN; PAM sequence: CTG
gtctacacaccttcatttgt

SEQ ID NO: 331057 - DNA, 20 bp, Artificial Sequence
  Description of Artificial Sequence: Synthetic oligonucleotide
  Target: LAMA2; (+) strand; PAM type: YTN; PAM sequence: CTA
cacaccttcatttgtccatc

SEQ ID NO: 331058 - DNA, 20 bp, Artificial Sequence
  Description of Artificial Sequence: Synthetic oligonucleotide
  Target: LAMA2; (+) strand; PAM type: YTN; PAM sequence: CTT
catttgtccatctttttcag

SEQ ID NO: 331059 - DNA, 20 bp, Artificial Sequence
  Description of Artificial Sequence: Synthetic oligonucleotide
  Target: LAMA2; (+) strand; PAM type: YTN; PAM sequence: TTC
atttgtccatctttttcagg

SEQ ID NO: 331060 - DNA, 20 bp, Artificial Sequence
  Description of Artificial Sequence: Synthetic oligonucleotide
  Target: LAMA2; (+) strand; PAM type: YTN; PAM sequence: TTT
gtccatctttttcaggttta

SEQ ID NO: 331061 - DNA, 20 bp, Artificial Sequence
  Description of Artificial Sequence: Synthetic oligonucleotide
  Target: LAMA2; (+) strand; PAM type: YTN; PAM sequence: TTG
tccatctttttcaggtttat

SEQ ID NO: 331062 - DNA, 20 bp, Artificial Sequence
  Description of Artificial Sequence: Synthetic oligonucleotide
  Target: LAMA2; (+) strand; PAM type: YTN; PAM sequence: CTT
tttcaggtttattccctgct

SEQ ID NO: 331063 - DNA, 20 bp, Artificial Sequence
  Description of Artificial Sequence: Synthetic oligonucleotide
  Target: LAMA2; (+) strand; PAM type: YTN; PAM sequence: TTT
ttcaggtttattccctgctg

SEQ ID NO: 331064 - DNA, 20 bp, Artificial Sequence
  Description of Artificial Sequence: Synthetic oligonucleotide
  Target: LAMA2; (+) strand; PAM type: YTN; PAM sequence: TTT
tcaggtttattccctgctgt

SEQ ID NO: 331065 - DNA, 20 bp, Artificial Sequence
  Description of Artificial Sequence: Synthetic oligonucleotide
  Target: LAMA2; (+) strand; PAM type: YTN; PAM sequence: TTT
caggtttattccctgctgtc

SEQ ID NO: 331066 - DNA, 20 bp, Artificial Sequence
  Description of Artificial Sequence: Synthetic oligonucleotide
  Target: LAMA2; (+) strand; PAM type: YTN; PAM sequence: TTC
aggtttattccctgctgtcc

SEQ ID NO: 331067 - DNA, 20 bp, Artificial Sequence
  Description of Artificial Sequence: Synthetic oligonucleotide
  Target: LAMA2; (+) strand; PAM type: YTN; PAM sequence: TTT
attccctgctgtcctgaatc

SEQ ID NO: 331068 - DNA, 20 bp, Artificial Sequence
  Description of Artificial Sequence: Synthetic oligonucleotide
  Target: LAMA2; (+) strand; PAM type: YTN; PAM sequence: TTA
ttccctgctgtcctgaatct

SEQ ID NO: 331069 - DNA, 20 bp, Artificial Sequence
  Description of Artificial Sequence: Synthetic oligonucleotide
  Target: LAMA2; (+) strand; PAM type: YTN; PAM sequence: TTC
cctgctgtcctgaatcttgc

SEQ ID NO: 331070 - DNA, 20 bp, Artificial Sequence
  Description of Artificial Sequence: Synthetic oligonucleotide
  Target: LAMA2; (+) strand; PAM type: YTN; PAM sequence: CTG
ctgtcctgaatcttgcttct

SEQ ID NO: 331071 - DNA, 20 bp, Artificial Sequence
  Description of Artificial Sequence: Synthetic oligonucleotide
  Target: LAMA2; (+) strand; PAM type: YTN; PAM sequence: CTG
tcctgaatcttgcttctaat

SEQ ID NO: 331072 - DNA, 20 bp, Artificial Sequence
  Description of Artificial Sequence: Synthetic oligonucleotide
  Target: LAMA2; (+) strand; PAM type: YTN; PAM sequence: CTG
aatcttgcttctaatgctct

SEQ ID NO: 331073 - DNA, 20 bp, Artificial Sequence
  Description of Artificial Sequence: Synthetic oligonucleotide
  Target: LAMA2; (+) strand; PAM type: YTN; PAM sequence: CTT
gcttctaatgctcttatcac

SEQ ID NO: 331074 - DNA, 20 bp, Artificial Sequence
  Description of Artificial Sequence: Synthetic oligonucleotide
  Target: LAMA2; (+) strand; PAM type: YTN; PAM sequence: TTG
cttctaatgctcttatcacg

SEQ ID NO: 331075 - DNA, 20 bp, Artificial Sequence
  Description of Artificial Sequence: Synthetic oligonucleotide
  Target: LAMA2; (+) strand; PAM type: YTN; PAM sequence: CTT
ctaatgctcttatcacgacc

SEQ ID NO: 331076 - DNA, 20 bp, Artificial Sequence
  Description of Artificial Sequence: Synthetic oligonucleotide
  Target: LAMA2; (+) strand; PAM type: YTN; PAM sequence: TTC
taatgctcttatcacgacca

SEQ ID NO: 331077 - DNA, 20 bp, Artificial Sequence
  Description of Artificial Sequence: Synthetic oligonucleotide
  Target: LAMA2; (+) strand; PAM type: YTN; PAM sequence: CTA
atgctcttatcacgaccaat

SEQ ID NO: 331078 - DNA, 20 bp, Artificial Sequence
  Description of Artificial Sequence: Synthetic oligonucleotide
  Target: LAMA2; (+) strand; PAM type: YTN; PAM sequence: CTC
ttatcacgaccaatgcaaca

SEQ ID NO: 331079 - DNA, 20 bp, Artificial Sequence
  Description of Artificial Sequence: Synthetic oligonucleotide
  Target: LAMA2; (+) strand; PAM type: YTN; PAM sequence: CTT
atcacgaccaatgcaacatg

SEQ ID NO: 331080 - DNA, 20 bp, Artificial Sequence
  Description of Artificial Sequence: Synthetic oligonucleotide
  Target: LAMA2; (+) strand; PAM type: YTN; PAM sequence: TTA
tcacgaccaatgcaacatgt

SEQ ID NO: 331081 - DNA, 20 bp, Artificial Sequence
  Description of Artificial Sequence: Synthetic oligonucleotide
  Target: LAMA2; (+) strand; PAM type: YTN; PAM sequence: CTG
aaatgtactgcaaattggta

SEQ ID NO: 331082 - DNA, 20 bp, Artificial Sequence
  Description of Artificial Sequence: Synthetic oligonucleotide
  Target: LAMA2; (+) strand; PAM type: YTN; PAM sequence: CTG
caaattggtagaacatgtcc

SEQ ID NO: 331083 - DNA, 20 bp, Artificial Sequence
  Description of Artificial Sequence: Synthetic oligonucleotide
  Target: LAMA2; (+) strand; PAM type: YTN; PAM sequence: TTG
gtagaacatgtccctgggca

SEQ ID NO: 331084 - DNA, 20 bp, Artificial Sequence
  Description of Artificial Sequence: Synthetic oligonucleotide
  Target: LAMA2; (+) strand; PAM type: YTN; PAM sequence: CTG
ggcagcctgtgaggaacccg

SEQ ID NO: 331085 - DNA, 20 bp, Artificial Sequence
  Description of Artificial Sequence: Synthetic oligonucleotide
  Target: LAMA2; (+) strand; PAM type: YTN; PAM sequence: CTG
tgaggaacccgcagtgtcga

SEQ ID NO: 331086 - DNA, 20 bp, Artificial Sequence
  Description of Artificial Sequence: Synthetic oligonucleotide
  Target: LAMA2; (+) strand; PAM type: YTN; PAM sequence: CTG
caatcaaaacagcagcaatc

SEQ ID NO: 331087 - DNA, 20 bp, Artificial Sequence
  Description of Artificial Sequence: Synthetic oligonucleotide
  Target: LAMA2; (+) strand; PAM type: YTN; PAM sequence: TTT
tagtgtgtaggtgtgtggcg

SEQ ID NO: 331088 - DNA, 20 bp, Artificial Sequence
  Description of Artificial Sequence: Synthetic oligonucleotide
  Target: LAMA2; (+) strand; PAM type: YTN; PAM sequence: TTT
agtgtgtaggtgtgtggcgc

SEQ ID NO: 331089 - DNA, 20 bp, Artificial Sequence
  Description of Artificial Sequence: Synthetic oligonucleotide
  Target: LAMA2; (+) strand; PAM type: YTN; PAM sequence: TTA
gtgtgtaggtgtgtggcgct

SEQ ID NO: 331090 - DNA, 20 bp, Artificial Sequence
  Description of Artificial Sequence: Synthetic oligonucleotide
  Target: LAMA2; (+) strand; PAM type: YTN; PAM sequence: CTG
ggtaggatctataattgtga

SEQ ID NO: 331091 - DNA, 20 bp, Artificial Sequence
  Description of Artificial Sequence: Synthetic oligonucleotide
  Target: LAMA2; (+) strand; PAM type: YTN; PAM sequence: CTA
taattgtgagatgttgaggc

SEQ ID NO: 331092 - DNA, 20 bp, Artificial Sequence
  Description of Artificial Sequence: Synthetic oligonucleotide
  Target: LAMA2; (+) strand; PAM type: YTN; PAM sequence: TTG
tgagatgttgaggccaagtt

SEQ ID NO: 331093 - DNA, 20 bp, Artificial Sequence
  Description of Artificial Sequence: Synthetic oligonucleotide
  Target: LAMA2; (+) strand; PAM type: YTN; PAM sequence: TTG
aggccaagttgcattaaatt

SEQ ID NO: 331094 - DNA, 20 bp, Artificial Sequence
  Description of Artificial Sequence: Synthetic oligonucleotide
  Target: LAMA2; (+) strand; PAM type: YTN; PAM sequence: TTG
cattaaattcaagggtttgt

SEQ ID NO: 331095 - DNA, 20 bp, Artificial Sequence
  Description of Artificial Sequence: Synthetic oligonucleotide
  Target: LAMA2; (+) strand; PAM type: YTN; PAM sequence: TTA
aattcaagggtttgtaatac

SEQ ID NO: 331096 - DNA, 20 bp, Artificial Sequence
  Description of Artificial Sequence: Synthetic oligonucleotide
  Target: LAMA2; (+) strand; PAM type: YTN; PAM sequence: TTC
aagggtttgtaatactaaga

SEQ ID NO: 331097 - DNA, 20 bp, Artificial Sequence
  Description of Artificial Sequence: Synthetic oligonucleotide
  Target: LAMA2; (+) strand; PAM type: YTN; PAM sequence: TTT
gtaatactaagaattcctag

SEQ ID NO: 331098 - DNA, 20 bp, Artificial Sequence
  Description of Artificial Sequence: Synthetic oligonucleotide
  Target: LAMA2; (+) strand; PAM type: YTN; PAM sequence: TTG
taatactaagaattcctaga

SEQ ID NO: 331099 - DNA, 20 bp, Artificial Sequence
  Description of Artificial Sequence: Synthetic oligonucleotide
  Target: LAMA2; (+) strand; PAM type: YTN; PAM sequence: CTA
agaattcctagaattctttt

SEQ ID NO: 331100 - DNA, 20 bp, Artificial Sequence
  Description of Artificial Sequence: Synthetic oligonucleotide
  Target: LAMA2; (+) strand; PAM type: YTN; PAM sequence: TTC
ctagaattctttttaccatt

SEQ ID NO: 331101 - DNA, 20 bp, Artificial Sequence
  Description of Artificial Sequence: Synthetic oligonucleotide
  Target: LAMA2; (+) strand; PAM type: YTN; PAM sequence: CTA
gaattctttttaccattaag

SEQ ID NO: 331102 - DNA, 20 bp, Artificial Sequence
  Description of Artificial Sequence: Synthetic oligonucleotide
  Target: LAMA2; (+) strand; PAM type: YTN; PAM sequence: TTC
tttttaccattaagagcttc

SEQ ID NO: 331103 - DNA, 20 bp, Artificial Sequence
  Description of Artificial Sequence: Synthetic oligonucleotide
  Target: LAMA2; (+) strand; PAM type: YTN; PAM sequence: CTT
tttaccattaagagcttctt

SEQ ID NO: 331104 - DNA, 20 bp, Artificial Sequence
  Description of Artificial Sequence: Synthetic oligonucleotide
  Target: LAMA2; (+) strand; PAM type: YTN; PAM sequence: TTT
ttaccattaagagcttcttc

SEQ ID NO: 331105 - DNA, 20 bp, Artificial Sequence
  Description of Artificial Sequence: Synthetic oligonucleotide
  Target: LAMA2; (+) strand; PAM type: YTN; PAM sequence: TTT
taccattaagagcttcttcc

SEQ ID NO: 331106 - DNA, 20 bp, Artificial Sequence
  Description of Artificial Sequence: Synthetic oligonucleotide
  Target: LAMA2; (+) strand; PAM type: YTN; PAM sequence: TTT
accattaagagcttcttcct

SEQ ID NO: 331107 - DNA, 20 bp, Artificial Sequence
  Description of Artificial Sequence: Synthetic oligonucleotide
  Target: LAMA2; (+) strand; PAM type: YTN; PAM sequence: TTA
ccattaagagcttcttcctg

SEQ ID NO: 331108 - DNA, 20 bp, Artificial Sequence
  Description of Artificial Sequence: Synthetic oligonucleotide
  Target: LAMA2; (+) strand; PAM type: YTN; PAM sequence: TTA
agagcttcttcctggcccct

SEQ ID NO: 331109 - DNA, 20 bp, Artificial Sequence
  Description of Artificial Sequence: Synthetic oligonucleotide
  Target: LAMA2; (+) strand; PAM type: YTN; PAM sequence: CTT
cttcctggcccctctctgtc

SEQ ID NO: 331110 - DNA, 20 bp, Artificial Sequence
  Description of Artificial Sequence: Synthetic oligonucleotide
  Target: LAMA2; (+) strand; PAM type: YTN; PAM sequence: TTC
ttcctggcccctctctgtca

SEQ ID NO: 331111 - DNA, 20 bp, Artificial Sequence
  Description of Artificial Sequence: Synthetic oligonucleotide
  Target: LAMA2; (+) strand; PAM type: YTN; PAM sequence: CTT
cctggcccctctctgtcatt

SEQ ID NO: 331112 - DNA, 20 bp, Artificial Sequence
  Description of Artificial Sequence: Synthetic oligonucleotide
  Target: LAMA2; (+) strand; PAM type: YTN; PAM sequence: TTC
ctggcccctctctgtcattc

SEQ ID NO: 331113 - DNA, 20 bp, Artificial Sequence
  Description of Artificial Sequence: Synthetic oligonucleotide
  Target: LAMA2; (+) strand; PAM type: YTN; PAM sequence: CTG
gcccctctctgtcattcagc

SEQ ID NO: 331114 - DNA, 20 bp, Artificial Sequence
  Description of Artificial Sequence: Synthetic oligonucleotide
  Target: LAMA2; (+) strand; PAM type: YTN; PAM sequence: CTC
tctgtcattcagcaaacatt

SEQ ID NO: 331115 - DNA, 20 bp, Artificial Sequence
  Description of Artificial Sequence: Synthetic oligonucleotide
  Target: LAMA2; (+) strand; PAM type: YTN; PAM sequence: CTC
tgtcattcagcaaacattat

SEQ ID NO: 331116 - DNA, 20 bp, Artificial Sequence
  Description of Artificial Sequence: Synthetic oligonucleotide
  Target: LAMA2; (+) strand; PAM type: YTN; PAM sequence: CTG
tcattcagcaaacattattg

SEQ ID NO: 331117 - DNA, 20 bp, Artificial Sequence
  Description of Artificial Sequence: Synthetic oligonucleotide
  Target: LAMA2; (+) strand; PAM type: YTN; PAM sequence: TTC
agcaaacattattggagttc

SEQ ID NO: 331118 - DNA, 20 bp, Artificial Sequence
  Description of Artificial Sequence: Synthetic oligonucleotide
  Target: LAMA2; (+) strand; PAM type: YTN; PAM sequence: TTA
ttggagttcctgctatgtgc

SEQ ID NO: 331119 - DNA, 20 bp, Artificial Sequence
  Description of Artificial Sequence: Synthetic oligonucleotide
  Target: LAMA2; (+) strand; PAM type: YTN; PAM sequence: TTG
gagttcctgctatgtgctaa

SEQ ID NO: 331120 - DNA, 20 bp, Artificial Sequence
  Description of Artificial Sequence: Synthetic oligonucleotide
  Target: LAMA2; (+) strand; PAM type: YTN; PAM sequence: TTC
ctgctatgtgctaagtacag

SEQ ID NO: 331121 - DNA, 20 bp, Artificial Sequence
  Description of Artificial Sequence: Synthetic oligonucleotide
  Target: LAMA2; (+) strand; PAM type: YTN; PAM sequence: CTG
ctatgtgctaagtacagtga

SEQ ID NO: 331122 - DNA, 20 bp, Artificial Sequence
  Description of Artificial Sequence: Synthetic oligonucleotide
  Target: LAMA2; (+) strand; PAM type: YTN; PAM sequence: CTA
tgtgctaagtacagtgattg

SEQ ID NO: 331123 - DNA, 20 bp, Artificial Sequence
  Description of Artificial Sequence: Synthetic oligonucleotide
  Target: LAMA2; (+) strand; PAM type: YTN; PAM sequence: CTA
agtacagtgattggagatga

SEQ ID NO: 331124 - DNA, 20 bp, Artificial Sequence
  Description of Artificial Sequence: Synthetic oligonucleotide
  Target: LAMA2; (+) strand; PAM type: YTN; PAM sequence: TTG
gagatgattcgccagctgaa

SEQ ID NO: 331125 - DNA, 20 bp, Artificial Sequence
  Description of Artificial Sequence: Synthetic oligonucleotide
  Target: LAMA2; (+) strand; PAM type: YTN; PAM sequence: TTC
gccagctgaaggcctgtggc

SEQ ID NO: 331126 - DNA, 20 bp, Artificial Sequence
  Description of Artificial Sequence: Synthetic oligonucleotide
  Target: LAMA2; (+) strand; PAM type: YTN; PAM sequence: CTG
aaggcctgtggcagtcattg

SEQ ID NO: 331127 - DNA, 20 bp, Artificial Sequence
  Description of Artificial Sequence: Synthetic oligonucleotide
  Target: LAMA2; (+) strand; PAM type: YTN; PAM sequence: CTG
tggcagtcattgggtttact

SEQ ID NO: 331128 - DNA, 20 bp, Artificial Sequence
  Description of Artificial Sequence: Synthetic oligonucleotide
  Target: LAMA2; (+) strand; PAM type: YTN; PAM sequence: TTG
ggtttactaactccagatac

SEQ ID NO: 331129 - DNA, 20 bp, Artificial Sequence
  Description of Artificial Sequence: Synthetic oligonucleotide
  Target: LAMA2; (+) strand; PAM type: YTN; PAM sequence: TTT
actaactccagataccaaag

SEQ ID NO: 331130 - DNA, 20 bp, Artificial Sequence
  Description of Artificial Sequence: Synthetic oligonucleotide
  Target: LAMA2; (+) strand; PAM type: YTN; PAM sequence: TTA
ctaactccagataccaaagt

SEQ ID NO: 331131 - DNA, 20 bp, Artificial Sequence
  Description of Artificial Sequence: Synthetic oligonucleotide
  Target: LAMA2; (+) strand; PAM type: YTN; PAM sequence: CTA
actccagataccaaagtggt

SEQ ID NO: 331132 - DNA, 20 bp, Artificial Sequence
  Description of Artificial Sequence: Synthetic oligonucleotide
  Target: LAMA2; (+) strand; PAM type: YTN; PAM sequence: CTC
cagataccaaagtggtttct

SEQ ID NO: 331133 - DNA, 20 bp, Artificial Sequence
  Description of Artificial Sequence: Synthetic oligonucleotide
  Target: LAMA2; (+) strand; PAM type: YTN; PAM sequence: TTT
ctgagggtgtggttattaac

SEQ ID NO: 331134 - DNA, 20 bp, Artificial Sequence
  Description of Artificial Sequence: Synthetic oligonucleotide
  Target: LAMA2; (+) strand; PAM type: YTN; PAM sequence: TTC
tgagggtgtggttattaact

SEQ ID NO: 331135 - DNA, 20 bp, Artificial Sequence
  Description of Artificial Sequence: Synthetic oligonucleotide
  Target: LAMA2; (+) strand; PAM type: YTN; PAM sequence: CTG
agggtgtggttattaactca

SEQ ID NO: 331136 - DNA, 20 bp, Artificial Sequence
  Description of Artificial Sequence: Synthetic oligonucleotide
  Target: LAMA2; (+) strand; PAM type: YTN; PAM sequence: TTA
ttaactcaggctgtcatcat

SEQ ID NO: 331137 - DNA, 20 bp, Artificial Sequence
  Description of Artificial Sequence: Synthetic oligonucleotide
  Target: LAMA2; (+) strand; PAM type: YTN; PAM sequence: TTA
actcaggctgtcatcattca

SEQ ID NO: 331138 - DNA, 20 bp, Artificial Sequence
  Description of Artificial Sequence: Synthetic oligonucleotide
  Target: LAMA2; (+) strand; PAM type: YTN; PAM sequence: CTC
aggctgtcatcattcattgg

SEQ ID NO: 331139 - DNA, 20 bp, Artificial Sequence
  Description of Artificial Sequence: Synthetic oligonucleotide
  Target: LAMA2; (+) strand; PAM type: YTN; PAM sequence: CTG
tcatcattcattggtaattt

SEQ ID NO: 331140 - DNA, 20 bp, Artificial Sequence
  Description of Artificial Sequence: Synthetic oligonucleotide
  Target: LAMA2; (+) strand; PAM type: YTN; PAM sequence: TTC
attggtaatttatgtgccag

SEQ ID NO: 331141 - DNA, 20 bp, Artificial Sequence
  Description of Artificial Sequence: Synthetic oligonucleotide
  Target: LAMA2; (+) strand; PAM type: YTN; PAM sequence: TTG
gtaatttatgtgccagatat

SEQ ID NO: 331142 - DNA, 20 bp, Artificial Sequence
  Description of Artificial Sequence: Synthetic oligonucleotide
  Target: LAMA2; (+) strand; PAM type: YTN; PAM sequence: TTT
atgtgccagatattgtgcct

SEQ ID NO: 331143 - DNA, 20 bp, Artificial Sequence
  Description of Artificial Sequence: Synthetic oligonucleotide
  Target: LAMA2; (+) strand; PAM type: YTN; PAM sequence: TTA
tgtgccagatattgtgcctg

SEQ ID NO: 331144 - DNA, 20 bp, Artificial Sequence
  Description of Artificial Sequence: Synthetic oligonucleotide
  Target: LAMA2; (+) strand; PAM type: YTN; PAM sequence: TTG
tgcctgagatccaggaggaa

SEQ ID NO: 331145 - DNA, 20 bp, Artificial Sequence
  Description of Artificial Sequence: Synthetic oligonucleotide
  Target: LAMA2; (+) strand; PAM type: YTN; PAM sequence: CTG
agatccaggaggaataaggt

SEQ ID NO: 331146 - DNA, 20 bp, Artificial Sequence
  Description of Artificial Sequence: Synthetic oligonucleotide
  Target: LAMA2; (+) strand; PAM type: YTN; PAM sequence: CTT
tgagctactgatatatagtg

SEQ ID NO: 331147 - DNA, 20 bp, Artificial Sequence
  Description of Artificial Sequence: Synthetic oligonucleotide
  Target: LAMA2; (+) strand; PAM type: YTN; PAM sequence: TTT
gagctactgatatatagtgt

SEQ ID NO: 331148 - DNA, 20 bp, Artificial Sequence
  Description of Artificial Sequence: Synthetic oligonucleotide
  Target: LAMA2; (+) strand; PAM type: YTN; PAM sequence: TTG
agctactgatatatagtgtg

SEQ ID NO: 331149 - DNA, 20 bp, Artificial Sequence
  Description of Artificial Sequence: Synthetic oligonucleotide
  Target: LAMA2; (+) strand; PAM type: YTN; PAM sequence: CTA
ctgatatatagtgtggtaag

SEQ ID NO: 331150 - DNA, 20 bp, Artificial Sequence
  Description of Artificial Sequence: Synthetic oligonucleotide
  Target: LAMA2; (+) strand; PAM type: YTN; PAM sequence: CTG
atatatagtgtggtaagtac

SEQ ID NO: 331151 - DNA, 20 bp, Artificial Sequence
  Description of Artificial Sequence: Synthetic oligonucleotide
  Target: LAMA2; (+) strand; PAM type: YTN; PAM sequence: TTC
tgcagaagagagaggatggc

SEQ ID NO: 331152 - DNA, 20 bp, Artificial Sequence
  Description of Artificial Sequence: Synthetic oligonucleotide
  Target: LAMA2; (+) strand; PAM type: YTN; PAM sequence: CTG
cagaagagagaggatggcca

SEQ ID NO: 331153 - DNA, 20 bp, Artificial Sequence
  Description of Artificial Sequence: Synthetic oligonucleotide
  Target: LAMA2; (+) strand; PAM type: YTN; PAM sequence: CTT
ggtgtaagtaaaggcttgcc

SEQ ID NO: 331154 - DNA, 20 bp, Artificial Sequence
  Description of Artificial Sequence: Synthetic oligonucleotide
  Target: LAMA2; (+) strand; PAM type: YTN; PAM sequence: TTG
gtgtaagtaaaggcttgcca

SEQ ID NO: 331155 - DNA, 20 bp, Artificial Sequence
  Description of Artificial Sequence: Synthetic oligonucleotide
  Target: LAMA2; (+) strand; PAM type: YTN; PAM sequence: CTT
gccagaaggagcgatatcca

SEQ ID NO: 331156 - DNA, 20 bp, Artificial Sequence
  Description of Artificial Sequence: Synthetic oligonucleotide
  Target: LAMA2; (+) strand; PAM type: YTN; PAM sequence: TTG
ccagaaggagcgatatccaa

SEQ ID NO: 331157 - DNA, 20 bp, Artificial Sequence
  Description of Artificial Sequence: Synthetic oligonucleotide
  Target: LAMA2; (+) strand; PAM type: YTN; PAM sequence: CTG
atgaccaaggacatgagcta

SEQ ID NO: 331158 - DNA, 20 bp, Artificial Sequence
  Description of Artificial Sequence: Synthetic oligonucleotide
  Target: LAMA2; (+) strand; PAM type: YTN; PAM sequence: CTA
aacaagggtatgagataaac

SEQ ID NO: 331159 - DNA, 20 bp, Artificial Sequence
  Description of Artificial Sequence: Synthetic oligonucleotide
  Target: LAMA2; (+) strand; PAM type: YTN; PAM sequence: TTA
gacagaaaatcctagttact

SEQ ID NO: 331160 - DNA, 20 bp, Artificial Sequence
  Description of Artificial Sequence: Synthetic oligonucleotide
  Target: LAMA2; (+) strand; PAM type: YTN; PAM sequence: CTA
gttactcggggagctacaag

SEQ ID NO: 331161 - DNA, 20 bp, Artificial Sequence
  Description of Artificial Sequence: Synthetic oligonucleotide
  Target: LAMA2; (+) strand; PAM type: YTN; PAM sequence: TTA
ctcggggagctacaagtagg

SEQ ID NO: 331162 - DNA, 20 bp, Artificial Sequence
  Description of Artificial Sequence: Synthetic oligonucleotide
  Target: LAMA2; (+) strand; PAM type: YTN; PAM sequence: CTC
ggggagctacaagtaggaat

SEQ ID NO: 331163 - DNA, 20 bp, Artificial Sequence
  Description of Artificial Sequence: Synthetic oligonucleotide
  Target: LAMA2; (+) strand; PAM type: YTN; PAM sequence: CTA
caagtaggaatgactagaac

SEQ ID NO: 331164 - DNA, 20 bp, Artificial Sequence
  Description of Artificial Sequence: Synthetic oligonucleotide
  Target: LAMA2; (+) strand; PAM type: YTN; PAM sequence: CTA
gaactgaaagtgccaaaggg

SEQ ID NO: 331165 - DNA, 20 bp, Artificial Sequence
  Description of Artificial Sequence: Synthetic oligonucleotide
  Target: LAMA2; (+) strand; PAM type: YTN; PAM sequence: CTG
aaagtgccaaagggcagaga

SEQ ID NO: 331166 - DNA, 20 bp, Artificial Sequence
  Description of Artificial Sequence: Synthetic oligonucleotide
  Target: LAMA2; (+) strand; PAM type: YTN; PAM sequence: CTA
gagcaaaaggctggagccag

SEQ ID NO: 331167 - DNA, 20 bp, Artificial Sequence
  Description of Artificial Sequence: Synthetic oligonucleotide
  Target: LAMA2; (+) strand; PAM type: YTN; PAM sequence: CTG
gagccagattatgaaggcat

SEQ ID NO: 331168 - DNA, 20 bp, Artificial Sequence
  Description of Artificial Sequence: Synthetic oligonucleotide
  Target: LAMA2; (+) strand; PAM type: YTN; PAM sequence: TTA
tgaaggcatttaacaaccac

SEQ ID NO: 331169 - DNA, 20 bp, Artificial Sequence
  Description of Artificial Sequence: Synthetic oligonucleotide
  Target: LAMA2; (+) strand; PAM type: YTN; PAM sequence: TTT
aacaaccacaggagaagtga

SEQ ID NO: 331170 - DNA, 20 bp, Artificial Sequence
  Description of Artificial Sequence: Synthetic oligonucleotide
  Target: LAMA2; (+) strand; PAM type: YTN; PAM sequence: TTA
acaaccacaggagaagtgat

SEQ ID NO: 331171 - DNA, 20 bp, Artificial Sequence
  Description of Artificial Sequence: Synthetic oligonucleotide
  Target: LAMA2; (+) strand; PAM type: YTN; PAM sequence: TTT
agggagaggcaccatgtaaa

SEQ ID NO: 331172 - DNA, 20 bp, Artificial Sequence
  Description of Artificial Sequence: Synthetic oligonucleotide
  Target: LAMA2; (+) strand; PAM type: YTN; PAM sequence: TTA
gggagaggcaccatgtaaag

SEQ ID NO: 331173 - DNA, 20 bp, Artificial Sequence
  Description of Artificial Sequence: Synthetic oligonucleotide
  Target: LAMA2; (+) strand; PAM type: YTN; PAM sequence: CTC
tttccagcctctatgaacca

SEQ ID NO: 331174 - DNA, 20 bp, Artificial Sequence
  Description of Artificial Sequence: Synthetic oligonucleotide
  Target: LAMA2; (+) strand; PAM type: YTN; PAM sequence: CTT
tccagcctctatgaaccaca

SEQ ID NO: 331175 - DNA, 20 bp, Artificial Sequence
  Description of Artificial Sequence: Synthetic oligonucleotide
  Target: LAMA2; (+) strand; PAM type: YTN; PAM sequence: TTT
ccagcctctatgaaccacag

SEQ ID NO: 331176 - DNA, 20 bp, Artificial Sequence
  Description of Artificial Sequence: Synthetic oligonucleotide
  Target: LAMA2; (+) strand; PAM type: YTN; PAM sequence: TTC
cagcctctatgaaccacagt

SEQ ID NO: 331177 - DNA, 20 bp, Artificial Sequence
  Description of Artificial Sequence: Synthetic oligonucleotide
  Target: LAMA2; (+) strand; PAM type: YTN; PAM sequence: CTC
tatgaaccacagtgatacct

SEQ ID NO: 331178 - DNA, 20 bp, Artificial Sequence
  Description of Artificial Sequence: Synthetic oligonucleotide
  Target: LAMA2; (+) strand; PAM type: YTN; PAM sequence: CTA
tgaaccacagtgatacctca

SEQ ID NO: 331179 - DNA, 20 bp, Artificial Sequence
  Description of Artificial Sequence: Synthetic oligonucleotide
  Target: LAMA2; (+) strand; PAM type: YTN; PAM sequence: CTC
agactcattgatgtatttat

SEQ ID NO: 331180 - DNA, 20 bp, Artificial Sequence
  Description of Artificial Sequence: Synthetic oligonucleotide
  Target: LAMA2; (+) strand; PAM type: YTN; PAM sequence: CTC
attgatgtatttattcaaca

SEQ ID NO: 331181 - DNA, 20 bp, Artificial Sequence
  Description of Artificial Sequence: Synthetic oligonucleotide
  Target: LAMA2; (+) strand; PAM type: YTN; PAM sequence: TTG
atgtatttattcaacaggcc

SEQ ID NO: 331182 - DNA, 20 bp, Artificial Sequence
  Description of Artificial Sequence: Synthetic oligonucleotide
  Target: LAMA2; (+) strand; PAM type: YTN; PAM sequence: TTT
attcaacaggcctttgaaca

SEQ ID NO: 331183 - DNA, 20 bp, Artificial Sequence
  Description of Artificial Sequence: Synthetic oligonucleotide
  Target: LAMA2; (+) strand; PAM type: YTN; PAM sequence: TTA
ttcaacaggcctttgaacac

SEQ ID NO: 331184 - DNA, 20 bp, Artificial Sequence
  Description of Artificial Sequence: Synthetic oligonucleotide
  Target: LAMA2; (+) strand; PAM type: YTN; PAM sequence: TTC
aacaggcctttgaacacctc

SEQ ID NO: 331185 - DNA, 20 bp, Artificial Sequence
  Description of Artificial Sequence: Synthetic oligonucleotide
  Target: LAMA2; (+) strand; PAM type: YTN; PAM sequence: CTT
tgaacacctcctactagcaa

SEQ ID NO: 331186 - DNA, 20 bp, Artificial Sequence
  Description of Artificial Sequence: Synthetic oligonucleotide
  Target: LAMA2; (+) strand; PAM type: YTN; PAM sequence: TTT
gaacacctcctactagcaaa

SEQ ID NO: 331187 - DNA, 20 bp, Artificial Sequence
  Description of Artificial Sequence: Synthetic oligonucleotide
  Target: LAMA2; (+) strand; PAM type: YTN; PAM sequence: TTG
aacacctcctactagcaaag

SEQ ID NO: 331188 - DNA, 20 bp, Artificial Sequence
  Description of Artificial Sequence: Synthetic oligonucleotide
  Target: LAMA2; (+) strand; PAM type: YTN; PAM sequence: CTC
ctactagcaaagcattgtat

SEQ ID NO: 331189 - DNA, 20 bp, Artificial Sequence
  Description of Artificial Sequence: Synthetic oligonucleotide
  Target: LAMA2; (+) strand; PAM type: YTN; PAM sequence: CTA
ctagcaaagcattgtattgg

SEQ ID NO: 331190 - DNA, 20 bp, Artificial Sequence
  Description of Artificial Sequence: Synthetic oligonucleotide
  Target: LAMA2; (+) strand; PAM type: YTN; PAM sequence: CTA
gcaaagcattgtattggagc

SEQ ID NO: 331191 - DNA, 20 bp, Artificial Sequence
  Description of Artificial Sequence: Synthetic oligonucleotide
  Target: LAMA2; (+) strand; PAM type: YTN; PAM sequence: TTG
tattggagcataatgttaaa

SEQ ID NO: 331192 - DNA, 20 bp, Artificial Sequence
  Description of Artificial Sequence: Synthetic oligonucleotide
  Target: LAMA2; (+) strand; PAM type: YTN; PAM sequence: TTG
gagcataatgttaaattaca

SEQ ID NO: 331193 - DNA, 20 bp, Artificial Sequence
  Description of Artificial Sequence: Synthetic oligonucleotide
  Target: LAMA2; (+) strand; PAM type: YTN; PAM sequence: TTA
aattacacataacccctgat

SEQ ID NO: 331194 - DNA, 20 bp, Artificial Sequence
  Description of Artificial Sequence: Synthetic oligonucleotide
  Target: LAMA2; (+) strand; PAM type: YTN; PAM sequence: TTA
cacataacccctgattcaga

SEQ ID NO: 331195 - DNA, 20 bp, Artificial Sequence
  Description of Artificial Sequence: Synthetic oligonucleotide
  Target: LAMA2; (+) strand; PAM type: YTN; PAM sequence: CTG
attcagaggacctagagggg

SEQ ID NO: 331196 - DNA, 20 bp, Artificial Sequence
  Description of Artificial Sequence: Synthetic oligonucleotide
  Target: LAMA2; (+) strand; PAM type: YTN; PAM sequence: TTC
agaggacctagaggggaaat

SEQ ID NO: 331197 - DNA, 20 bp, Artificial Sequence
  Description of Artificial Sequence: Synthetic oligonucleotide
  Target: LAMA2; (+) strand; PAM type: YTN; PAM sequence: CTA
gaggggaaatagaggcaaaa

SEQ ID NO: 331198 - DNA, 20 bp, Artificial Sequence
  Description of Artificial Sequence: Synthetic oligonucleotide
  Target: LAMA2; (+) strand; PAM type: YTN; PAM sequence: TTC
agtgctaaaataacatgaat

SEQ ID NO: 331199 - DNA, 20 bp, Artificial Sequence
  Description of Artificial Sequence: Synthetic oligonucleotide
  Target: LAMA2; (+) strand; PAM type: YTN; PAM sequence: CTA
aaataacatgaatgctccat

SEQ ID NO: 331200 - DNA, 20 bp, Artificial Sequence
  Description of Artificial Sequence: Synthetic oligonucleotide
  Target: LAMA2; (+) strand; PAM type: YTN; PAM sequence: CTC
catgtagatgctaaagtcat

SEQ ID NO: 331201 - DNA, 20 bp, Artificial Sequence
  Description of Artificial Sequence: Synthetic oligonucleotide
  Target: LAMA2; (+) strand; PAM type: YTN; PAM sequence: CTA
aagtcatctaaagatttctg

SEQ ID NO: 331202 - DNA, 20 bp, Artificial Sequence
  Description of Artificial Sequence: Synthetic oligonucleotide
  Target: LAMA2; (+) strand; PAM type: YTN; PAM sequence: CTA
aagatttctggctaagaaat

SEQ ID NO: 331203 - DNA, 20 bp, Artificial Sequence
  Description of Artificial Sequence: Synthetic oligonucleotide
  Target: LAMA2; (+) strand; PAM type: YTN; PAM sequence: TTT
ctggctaagaaatctttata

SEQ ID NO: 331204 - DNA, 20 bp, Artificial Sequence
  Description of Artificial Sequence: Synthetic oligonucleotide
  Target: LAMA2; (+) strand; PAM type: YTN; PAM sequence: TTC
tggctaagaaatctttatat

SEQ ID NO: 331205 - DNA, 20 bp, Artificial Sequence
  Description of Artificial Sequence: Synthetic oligonucleotide
  Target: LAMA2; (+) strand; PAM type: YTN; PAM sequence: CTG
gctaagaaatctttatatct

SEQ ID NO: 331206 - DNA, 20 bp, Artificial Sequence
  Description of Artificial Sequence: Synthetic oligonucleotide
  Target: LAMA2; (+) strand; PAM type: YTN; PAM sequence: CTA
agaaatctttatatctatat

SEQ ID NO: 331207 - DNA, 20 bp, Artificial Sequence
  Description of Artificial Sequence: Synthetic oligonucleotide
  Target: LAMA2; (+) strand; PAM type: YTN; PAM sequence: CTT
tatatctatatatctctatc

SEQ ID NO: 331208 - DNA, 20 bp, Artificial Sequence
  Description of Artificial Sequence: Synthetic oligonucleotide
  Target: LAMA2; (+) strand; PAM type: YTN; PAM sequence: TTT
atatctatatatctctatct

SEQ ID NO: 331209 - DNA, 20 bp, Artificial Sequence
  Description of Artificial Sequence: Synthetic oligonucleotide
  Target: LAMA2; (+) strand; PAM type: YTN; PAM sequence: TTA
tatctatatatctctatctg

SEQ ID NO: 331210 - DNA, 20 bp, Artificial Sequence
  Description of Artificial Sequence: Synthetic oligonucleotide
  Target: LAMA2; (+) strand; PAM type: YTN; PAM sequence: CTA
tatatctctatctgtatcta

SEQ ID NO: 331211 - DNA, 20 bp, Artificial Sequence
  Description of Artificial Sequence: Synthetic oligonucleotide
  Target: LAMA2; (+) strand; PAM type: YTN; PAM sequence: CTC
tatctgtatctatctttctg

SEQ ID NO: 331212 - DNA, 20 bp, Artificial Sequence
  Description of Artificial Sequence: Synthetic oligonucleotide
  Target: LAMA2; (+) strand; PAM type: YTN; PAM sequence: CTA
tctgtatctatctttctgac

SEQ ID NO: 331213 - DNA, 20 bp, Artificial Sequence
  Description of Artificial Sequence: Synthetic oligonucleotide
  Target: LAMA2; (+) strand; PAM type: YTN; PAM sequence: CTG
tatctatctttctgacatgc

SEQ ID NO: 331214 - DNA, 20 bp, Artificial Sequence
  Description of Artificial Sequence: Synthetic oligonucleotide
  Target: LAMA2; (+) strand; PAM type: YTN; PAM sequence: CTA
tctttctgacatgccttctt

SEQ ID NO: 331215 - DNA, 20 bp, Artificial Sequence
  Description of Artificial Sequence: Synthetic oligonucleotide
  Target: LAMA2; (+) strand; PAM type: YTN; PAM sequence: CTT
tctgacatgccttcttctct

SEQ ID NO: 331216 - DNA, 20 bp, Artificial Sequence
  Description of Artificial Sequence: Synthetic oligonucleotide
  Target: LAMA2; (+) strand; PAM type: YTN; PAM sequence: TTT
ctgacatgccttcttctctt

SEQ ID NO: 331217 - DNA, 20 bp, Artificial Sequence
  Description of Artificial Sequence: Synthetic oligonucleotide
  Target: LAMA2; (+) strand; PAM type: YTN; PAM sequence: TTC
tgacatgccttcttctcttc

SEQ ID NO: 331218 - DNA, 20 bp, Artificial Sequence
  Description of Artificial Sequence: Synthetic oligonucleotide
  Target: LAMA2; (+) strand; PAM type: YTN; PAM sequence: CTG
acatgccttcttctcttctc

SEQ ID NO: 331219 - DNA, 20 bp, Artificial Sequence
  Description of Artificial Sequence: Synthetic oligonucleotide
  Target: LAMA2; (+) strand; PAM type: YTN; PAM sequence: CTT
cttctcttctcctcgcttac

SEQ ID NO: 331220 - DNA, 20 bp, Artificial Sequence
  Description of Artificial Sequence: Synthetic oligonucleotide
  Target: LAMA2; (+) strand; PAM type: YTN; PAM sequence: TTC
ttctcttctcctcgcttacc

SEQ ID NO: 331221 - DNA, 20 bp, Artificial Sequence
  Description of Artificial Sequence: Synthetic oligonucleotide
  Target: LAMA2; (+) strand; PAM type: YTN; PAM sequence: CTT
ctcttctcctcgcttacctc

SEQ ID NO: 331222 - DNA, 20 bp, Artificial Sequence
  Description of Artificial Sequence: Synthetic oligonucleotide
  Target: LAMA2; (+) strand; PAM type: YTN; PAM sequence: TTC
tcttctcctcgcttacctct

SEQ ID NO: 331223 - DNA, 20 bp, Artificial Sequence
  Description of Artificial Sequence: Synthetic oligonucleotide
  Target: LAMA2; (+) strand; PAM type: YTN; PAM sequence: CTC
ttctcctcgcttacctctct

SEQ ID NO: 331224 - DNA, 20 bp, Artificial Sequence
  Description of Artificial Sequence: Synthetic oligonucleotide
  Target: LAMA2; (+) strand; PAM type: YTN; PAM sequence: CTT
ctcctcgcttacctctctct

SEQ ID NO: 331225 - DNA, 20 bp, Artificial Sequence
  Description of Artificial Sequence: Synthetic oligonucleotide
  Target: LAMA2; (+) strand; PAM type: YTN; PAM sequence: TTC
tcctcgcttacctctctctc

SEQ ID NO: 331226 - DNA, 20 bp, Artificial Sequence
  Description of Artificial Sequence: Synthetic oligonucleotide
  Target: LAMA2; (+) strand; PAM type: YTN; PAM sequence: CTC
ctcgcttacctctctctctc

SEQ ID NO: 331227 - DNA, 20 bp, Artificial Sequence
  Description of Artificial Sequence: Synthetic oligonucleotide
  Target: LAMA2; (+) strand; PAM type: YTN; PAM sequence: CTC
gcttacctctctctctctgt

SEQ ID NO: 331228 - DNA, 20 bp, Artificial Sequence
  Description of Artificial Sequence: Synthetic oligonucleotide
  Target: LAMA2; (+) strand; PAM type: YTN; PAM sequence: CTT
acctctctctctctgtatat

SEQ ID NO: 331229 - DNA, 20 bp, Artificial Sequence
  Description of Artificial Sequence: Synthetic oligonucleotide
  Target: LAMA2; (+) strand; PAM type: YTN; PAM sequence: TTA
cctctctctctctgtatata

SEQ ID NO: 331230 - DNA, 20 bp, Artificial Sequence
  Description of Artificial Sequence: Synthetic oligonucleotide
  Target: LAMA2; (+) strand; PAM type: YTN; PAM sequence: CTC
tctctctctgtatatatata

SEQ ID NO: 331231 - DNA, 20 bp, Artificial Sequence
  Description of Artificial Sequence: Synthetic oligonucleotide
  Target: LAMA2; (+) strand; PAM type: YTN; PAM sequence: CTC
tctctctgtatatatataat

SEQ ID NO: 331232 - DNA, 20 bp, Artificial Sequence
  Description of Artificial Sequence: Synthetic oligonucleotide
  Target: LAMA2; (+) strand; PAM type: YTN; PAM sequence: CTC
tctctgtatatatataatat

SEQ ID NO: 331233 - DNA, 20 bp, Artificial Sequence
  Description of Artificial Sequence: Synthetic oligonucleotide
  Target: LAMA2; (+) strand; PAM type: YTN; PAM sequence: CTC
tctgtatatatataatatat

SEQ ID NO: 331234 - DNA, 20 bp, Artificial Sequence
  Description of Artificial Sequence: Synthetic oligonucleotide
  Target: LAMA2; (+) strand; PAM type: YTN; PAM sequence: CTC
tgtatatatataatatatat

SEQ ID NO: 331235 - DNA, 20 bp, Artificial Sequence
  Description of Artificial Sequence: Synthetic oligonucleotide
  Target: LAMA2; (+) strand; PAM type: YTN; PAM sequence: CTG
tatatatataatatatatat

SEQ ID NO: 331236 - DNA, 20 bp, Artificial Sequence
  Description of Artificial Sequence: Synthetic oligonucleotide
  Target: LAMA2; (+) strand; PAM type: YTN; PAM sequence: CTT
atatgtaatctacataaagg

SEQ ID NO: 331237 - DNA, 20 bp, Artificial Sequence
  Description of Artificial Sequence: Synthetic oligonucleotide
  Target: LAMA2; (+) strand; PAM type: YTN; PAM sequence: TTA
tatgtaatctacataaaggt

SEQ ID NO: 331238 - DNA, 20 bp, Artificial Sequence
  Description of Artificial Sequence: Synthetic oligonucleotide
  Target: LAMA2; (+) strand; PAM type: YTN; PAM sequence: CTA
cataaaggtaaaaatatata

SEQ ID NO: 331239 - DNA, 20 bp, Artificial Sequence
  Description of Artificial Sequence: Synthetic oligonucleotide
  Target: LAMA2; (+) strand; PAM type: YTN; PAM sequence: TTA
tttatatttatttatattat

SEQ ID NO: 331240 - DNA, 20 bp, Artificial Sequence
  Description of Artificial Sequence: Synthetic oligonucleotide
  Target: LAMA2; (+) strand; PAM type: YTN; PAM sequence: TTT
atatttatttatattatttt

SEQ ID NO: 331241 - DNA, 20 bp, Artificial Sequence
  Description of Artificial Sequence: Synthetic oligonucleotide
  Target: LAMA2; (+) strand; PAM type: YTN; PAM sequence: TTA
tatttatttatattattttt

SEQ ID NO: 331242 - DNA, 20 bp, Artificial Sequence
  Description of Artificial Sequence: Synthetic oligonucleotide
  Target: LAMA2; (+) strand; PAM type: YTN; PAM sequence: TTT
atttatattatttttaatga

SEQ ID NO: 331243 - DNA, 20 bp, Artificial Sequence
  Description of Artificial Sequence: Synthetic oligonucleotide
  Target: LAMA2; (+) strand; PAM type: YTN; PAM sequence: TTA
tttatattatttttaatgaa

SEQ ID NO: 331244 - DNA, 20 bp, Artificial Sequence
  Description of Artificial Sequence: Synthetic oligonucleotide
  Target: LAMA2; (+) strand; PAM type: YTN; PAM sequence: TTT
atattatttttaatgaacag

SEQ ID NO: 331245 - DNA, 20 bp, Artificial Sequence
  Description of Artificial Sequence: Synthetic oligonucleotide
  Target: LAMA2; (+) strand; PAM type: YTN; PAM sequence: TTA
tattatttttaatgaacaga

SEQ ID NO: 331246 - DNA, 20 bp, Artificial Sequence
  Description of Artificial Sequence: Synthetic oligonucleotide
  Target: LAMA2; (+) strand; PAM type: YTN; PAM sequence: TTA
tttttaatgaacagatatat

SEQ ID NO: 331247 - DNA, 20 bp, Artificial Sequence
  Description of Artificial Sequence: Synthetic oligonucleotide
  Target: LAMA2; (+) strand; PAM type: YTN; PAM sequence: TTT
ttaatgaacagatatattat

SEQ ID NO: 331248 - DNA, 20 bp, Artificial Sequence
  Description of Artificial Sequence: Synthetic oligonucleotide
  Target: LAMA2; (+) strand; PAM type: YTN; PAM sequence: TTT
taatgaacagatatattatt

SEQ ID NO: 331249 - DNA, 20 bp, Artificial Sequence
  Description of Artificial Sequence: Synthetic oligonucleotide
  Target: LAMA2; (+) strand; PAM type: YTN; PAM sequence: TTT
aatgaacagatatattattt

SEQ ID NO: 331250 - DNA, 20 bp, Artificial Sequence
  Description of Artificial Sequence: Synthetic oligonucleotide
  Target: LAMA2; (+) strand; PAM type: YTN; PAM sequence: TTA
atgaacagatatattatttt

SEQ ID NO: 331251 - DNA, 20 bp, Artificial Sequence
  Description of Artificial Sequence: Synthetic oligonucleotide
  Target: LAMA2; (+) strand; PAM type: YTN; PAM sequence: TTA
ttttatttttattttgtttt

SEQ ID NO: 331252 - DNA, 20 bp, Artificial Sequence
  Description of Artificial Sequence: Synthetic oligonucleotide
  Target: LAMA2; (+) strand; PAM type: YTN; PAM sequence: TTT
tatttttattttgtttttga

SEQ ID NO: 331253 - DNA, 20 bp, Artificial Sequence
  Description of Artificial Sequence: Synthetic oligonucleotide
  Target: LAMA2; (+) strand; PAM type: YTN; PAM sequence: TTT
atttttattttgtttttgag

SEQ ID NO: 331254 - DNA, 20 bp, Artificial Sequence
  Description of Artificial Sequence: Synthetic oligonucleotide
  Target: LAMA2; (+) strand; PAM type: YTN; PAM sequence: TTA
tttttattttgtttttgagg

SEQ ID NO: 331255 - DNA, 20 bp, Artificial Sequence
  Description of Artificial Sequence: Synthetic oligonucleotide
  Target: LAMA2; (+) strand; PAM type: YTN; PAM sequence: TTT
ttattttgtttttgaggcag

SEQ ID NO: 331256 - DNA, 20 bp, Artificial Sequence
  Description of Artificial Sequence: Synthetic oligonucleotide
  Target: LAMA2; (+) strand; PAM type: YTN; PAM sequence: TTT
tattttgtttttgaggcaga

SEQ ID NO: 331257 - DNA, 20 bp, Artificial Sequence
  Description of Artificial Sequence: Synthetic oligonucleotide
  Target: LAMA2; (+) strand; PAM type: YTN; PAM sequence: TTT
attttgtttttgaggcagaa

SEQ ID NO: 331258 - DNA, 20 bp, Artificial Sequence
  Description of Artificial Sequence: Synthetic oligonucleotide
  Target: LAMA2; (+) strand; PAM type: YTN; PAM sequence: TTA
ttttgtttttgaggcagaat

SEQ ID NO: 331259 - DNA, 20 bp, Artificial Sequence
  Description of Artificial Sequence: Synthetic oligonucleotide
  Target: LAMA2; (+) strand; PAM type: YTN; PAM sequence: TTT
tgtttttgaggcagaatctc

SEQ ID NO: 331260 - DNA, 20 bp, Artificial Sequence
  Description of Artificial Sequence: Synthetic oligonucleotide
  Target: LAMA2; (+) strand; PAM type: YTN; PAM sequence: TTT
gtttttgaggcagaatctca

SEQ ID NO: 331261 - DNA, 20 bp, Artificial Sequence
  Description of Artificial Sequence: Synthetic oligonucleotide
  Target: LAMA2; (+) strand; PAM type: YTN; PAM sequence: TTG
tttttgaggcagaatctcac

SEQ ID NO: 331262 - DNA, 20 bp, Artificial Sequence
  Description of Artificial Sequence: Synthetic oligonucleotide
  Target: LAMA2; (+) strand; PAM type: YTN; PAM sequence: TTT
ttgaggcagaatctcactct

SEQ ID NO: 331263 - DNA, 20 bp, Artificial Sequence
  Description of Artificial Sequence: Synthetic oligonucleotide
  Target: LAMA2; (+) strand; PAM type: YTN; PAM sequence: TTT
tgaggcagaatctcactctg

SEQ ID NO: 331264 - DNA, 20 bp, Artificial Sequence
  Description of Artificial Sequence: Synthetic oligonucleotide
  Target: LAMA2; (+) strand; PAM type: YTN; PAM sequence: TTT
gaggcagaatctcactctgt

SEQ ID NO: 331265 - DNA, 20 bp, Artificial Sequence
  Description of Artificial Sequence: Synthetic oligonucleotide
  Target: LAMA2; (+) strand; PAM type: YTN; PAM sequence: TTG
aggcagaatctcactctgtc

SEQ ID NO: 331266 - DNA, 20 bp, Artificial Sequence
  Description of Artificial Sequence: Synthetic oligonucleotide
  Target: LAMA2; (+) strand; PAM type: YTN; PAM sequence: CTC
actctgtcacccaggctgga

SEQ ID NO: 331267 - DNA, 20 bp, Artificial Sequence
  Description of Artificial Sequence: Synthetic oligonucleotide
  Target: LAMA2; (+) strand; PAM type: YTN; PAM sequence: CTC
tgtcacccaggctggagtgc

SEQ ID NO: 331268 - DNA, 20 bp, Artificial Sequence
  Description of Artificial Sequence: Synthetic oligonucleotide
  Target: LAMA2; (+) strand; PAM type: YTN; PAM sequence: CTG
tcacccaggctggagtgcag

SEQ ID NO: 331269 - DNA, 20 bp, Artificial Sequence
  Description of Artificial Sequence: Synthetic oligonucleotide
  Target: LAMA2; (+) strand; PAM type: YTN; PAM sequence: CTG
gagtgcagtggtgcgatctc

SEQ ID NO: 331270 - DNA, 20 bp, Artificial Sequence
  Description of Artificial Sequence: Synthetic oligonucleotide
  Target: LAMA2; (+) strand; PAM type: YTN; PAM sequence: CTC
agctcactgcaaccgccatc

SEQ ID NO: 331271 - DNA, 20 bp, Artificial Sequence
  Description of Artificial Sequence: Synthetic oligonucleotide
  Target: LAMA2; (+) strand; PAM type: YTN; PAM sequence: CTC
actgcaaccgccatctcccg

SEQ ID NO: 331272 - DNA, 20 bp, Artificial Sequence
  Description of Artificial Sequence: Synthetic oligonucleotide
  Target: LAMA2; (+) strand; PAM type: YTN; PAM sequence: CTG
caaccgccatctcccgggtt

SEQ ID NO: 331273 - DNA, 20 bp, Artificial Sequence
  Description of Artificial Sequence: Synthetic oligonucleotide
  Target: LAMA2; (+) strand; PAM type: YTN; PAM sequence: CTC
ccgggttcaagcaattctcc

SEQ ID NO: 331274 - DNA, 20 bp, Artificial Sequence
  Description of Artificial Sequence: Synthetic oligonucleotide
  Target: LAMA2; (+) strand; PAM type: YTN; PAM sequence: TTC
aagcaattctcctgcctcag

SEQ ID NO: 331275 - DNA, 20 bp, Artificial Sequence
  Description of Artificial Sequence: Synthetic oligonucleotide
  Target: LAMA2; (+) strand; PAM type: YTN; PAM sequence: TTC
tcctgcctcagcctcccgag

SEQ ID NO: 331276 - DNA, 20 bp, Artificial Sequence
  Description of Artificial Sequence: Synthetic oligonucleotide
  Target: LAMA2; (+) strand; PAM type: YTN; PAM sequence: CTC
ctgcctcagcctcccgagta

SEQ ID NO: 331277 - DNA, 20 bp, Artificial Sequence
  Description of Artificial Sequence: Synthetic oligonucleotide
  Target: LAMA2; (+) strand; PAM type: YTN; PAM sequence: CTG
cctcagcctcccgagtagct

SEQ ID NO: 331278 - DNA, 20 bp, Artificial Sequence
  Description of Artificial Sequence: Synthetic oligonucleotide
  Target: LAMA2; (+) strand; PAM type: YTN; PAM sequence: CTC
agcctcccgagtagctggat

SEQ ID NO: 331279 - DNA, 20 bp, Artificial Sequence
  Description of Artificial Sequence: Synthetic oligonucleotide
  Target: LAMA2; (+) strand; PAM type: YTN; PAM sequence: CTC
ccgagtagctggattacagg

SEQ ID NO: 331280 - DNA, 20 bp, Artificial Sequence
  Description of Artificial Sequence: Synthetic oligonucleotide
  Target: LAMA2; (+) strand; PAM type: YTN; PAM sequence: CTG
gattacaggcacgtgacacc

SEQ ID NO: 331281 - DNA, 20 bp, Artificial Sequence
  Description of Artificial Sequence: Synthetic oligonucleotide
  Target: LAMA2; (+) strand; PAM type: YTN; PAM sequence: TTA
caggcacgtgacaccatgcc

SEQ ID NO: 331282 - DNA, 20 bp, Artificial Sequence
  Description of Artificial Sequence: Synthetic oligonucleotide
  Target: LAMA2; (+) strand; PAM type: YTN; PAM sequence: CTG
gctattttttgtatttcaag

SEQ ID NO: 331283 - DNA, 20 bp, Artificial Sequence
  Description of Artificial Sequence: Synthetic oligonucleotide
  Target: LAMA2; (+) strand; PAM type: YTN; PAM sequence: CTA
ttttttgtatttcaagtaga

SEQ ID NO: 331284 - DNA, 20 bp, Artificial Sequence
  Description of Artificial Sequence: Synthetic oligonucleotide
  Target: LAMA2; (+) strand; PAM type: YTN; PAM sequence: TTT
tttgtatttcaagtagaaat

SEQ ID NO: 331285 - DNA, 20 bp, Artificial Sequence
  Description of Artificial Sequence: Synthetic oligonucleotide
  Target: LAMA2; (+) strand; PAM type: YTN; PAM sequence: TTT
ttgtatttcaagtagaaatg

SEQ ID NO: 331286 - DNA, 20 bp, Artificial Sequence
  Description of Artificial Sequence: Synthetic oligonucleotide
  Target: LAMA2; (+) strand; PAM type: YTN; PAM sequence: TTT
tgtatttcaagtagaaatgg

SEQ ID NO: 331287 - DNA, 20 bp, Artificial Sequence
  Description of Artificial Sequence: Synthetic oligonucleotide
  Target: LAMA2; (+) strand; PAM type: YTN; PAM sequence: TTT
gtatttcaagtagaaatggg

SEQ ID NO: 331288 - DNA, 20 bp, Artificial Sequence
  Description of Artificial Sequence: Synthetic oligonucleotide
  Target: LAMA2; (+) strand; PAM type: YTN; PAM sequence: TTG
tatttcaagtagaaatgggg

SEQ ID NO: 331289 - DNA, 20 bp, Artificial Sequence
  Description of Artificial Sequence: Synthetic oligonucleotide
  Target: LAMA2; (+) strand; PAM type: YTN; PAM sequence: TTT
caagtagaaatggggtttta

SEQ ID NO: 331290 - DNA, 20 bp, Artificial Sequence
  Description of Artificial Sequence: Synthetic oligonucleotide
  Target: LAMA2; (+) strand; PAM type: YTN; PAM sequence: TTC
aagtagaaatggggttttac

SEQ ID NO: 331291 - DNA, 20 bp, Artificial Sequence
  Description of Artificial Sequence: Synthetic oligonucleotide
  Target: LAMA2; (+) strand; PAM type: YTN; PAM sequence: TTT
taccatgttggccaggctgg

SEQ ID NO: 331292 - DNA, 20 bp, Artificial Sequence
  Description of Artificial Sequence: Synthetic oligonucleotide
  Target: LAMA2; (+) strand; PAM type: YTN; PAM sequence: TTT
accatgttggccaggctggt

SEQ ID NO: 331293 - DNA, 20 bp, Artificial Sequence
  Description of Artificial Sequence: Synthetic oligonucleotide
  Target: LAMA2; (+) strand; PAM type: YTN; PAM sequence: TTA
ccatgttggccaggctggtc

SEQ ID NO: 331294 - DNA, 20 bp, Artificial Sequence
  Description of Artificial Sequence: Synthetic oligonucleotide
  Target: LAMA2; (+) strand; PAM type: YTN; PAM sequence: TTG
gccaggctggtctcaaactc

SEQ ID NO: 331295 - DNA, 20 bp, Artificial Sequence
  Description of Artificial Sequence: Synthetic oligonucleotide
  Target: LAMA2; (+) strand; PAM type: YTN; PAM sequence: CTG
gtctcaaactcctgacctca

SEQ ID NO: 331296 - DNA, 20 bp, Artificial Sequence
  Description of Artificial Sequence: Synthetic oligonucleotide
  Target: LAMA2; (+) strand; PAM type: YTN; PAM sequence: CTC
aaactcctgacctcaagtga

SEQ ID NO: 331297 - DNA, 20 bp, Artificial Sequence
  Description of Artificial Sequence: Synthetic oligonucleotide
  Target: LAMA2; (+) strand; PAM type: YTN; PAM sequence: CTC
ctgacctcaagtgatcaccc

SEQ ID NO: 331298 - DNA, 20 bp, Artificial Sequence
  Description of Artificial Sequence: Synthetic oligonucleotide
  Target: LAMA2; (+) strand; PAM type: YTN; PAM sequence: CTG
acctcaagtgatcacccgct

SEQ ID NO: 331299 - DNA, 20 bp, Artificial Sequence
  Description of Artificial Sequence: Synthetic oligonucleotide
  Target: LAMA2; (+) strand; PAM type: YTN; PAM sequence: CTC
aagtgatcacccgcttcagc

SEQ ID NO: 331300 - DNA, 20 bp, Artificial Sequence
  Description of Artificial Sequence: Synthetic oligonucleotide
  Target: LAMA2; (+) strand; PAM type: YTN; PAM sequence: CTT
cagcctcccaatagatatat

SEQ ID NO: 331301 - DNA, 20 bp, Artificial Sequence
  Description of Artificial Sequence: Synthetic oligonucleotide
  Target: LAMA2; (+) strand; PAM type: YTN; PAM sequence: TTC
agcctcccaatagatatatt

SEQ ID NO: 331302 - DNA, 20 bp, Artificial Sequence
  Description of Artificial Sequence: Synthetic oligonucleotide
  Target: LAMA2; (+) strand; PAM type: YTN; PAM sequence: CTC
ccaatagatatattttttgt

SEQ ID NO: 331303 - DNA, 20 bp, Artificial Sequence
  Description of Artificial Sequence: Synthetic oligonucleotide
  Target: LAMA2; (+) strand; PAM type: YTN; PAM sequence: TTT
tttgttaatattatttcata

SEQ ID NO: 331304 - DNA, 20 bp, Artificial Sequence
  Description of Artificial Sequence: Synthetic oligonucleotide
  Target: LAMA2; (+) strand; PAM type: YTN; PAM sequence: TTT
ttgttaatattatttcatat

SEQ ID NO: 331305 - DNA, 20 bp, Artificial Sequence
  Description of Artificial Sequence: Synthetic oligonucleotide
  Target: LAMA2; (+) strand; PAM type: YTN; PAM sequence: TTT
tgttaatattatttcatata

SEQ ID NO: 331306 - DNA, 20 bp, Artificial Sequence
  Description of Artificial Sequence: Synthetic oligonucleotide
  Target: LAMA2; (+) strand; PAM type: YTN; PAM sequence: TTT
gttaatattatttcatatat

SEQ ID NO: 331307 - DNA, 20 bp, Artificial Sequence
  Description of Artificial Sequence: Synthetic oligonucleotide
  Target: LAMA2; (+) strand; PAM type: YTN; PAM sequence: TTG
ttaatattatttcatatata

SEQ ID NO: 331308 - DNA, 20 bp, Artificial Sequence
  Description of Artificial Sequence: Synthetic oligonucleotide
  Target: LAMA2; (+) strand; PAM type: YTN; PAM sequence: TTA
atattatttcatatataata

SEQ ID NO: 331309 - DNA, 20 bp, Artificial Sequence
  Description of Artificial Sequence: Synthetic oligonucleotide
  Target: LAMA2; (+) strand; PAM type: YTN; PAM sequence: TTA
tttcatatataatatattaa

SEQ ID NO: 331310 - DNA, 20 bp, Artificial Sequence
  Description of Artificial Sequence: Synthetic oligonucleotide
  Target: LAMA2; (+) strand; PAM type: YTN; PAM sequence: TTT
catatataatatattaaaag

SEQ ID NO: 331311 - DNA, 20 bp, Artificial Sequence
  Description of Artificial Sequence: Synthetic oligonucleotide
  Target: LAMA2; (+) strand; PAM type: YTN; PAM sequence: TTC
atatataatatattaaaagg

SEQ ID NO: 331312 - DNA, 20 bp, Artificial Sequence
  Description of Artificial Sequence: Synthetic oligonucleotide
  Target: LAMA2; (+) strand; PAM type: YTN; PAM sequence: TTA
aaaggtagatatatattata

SEQ ID NO: 331313 - DNA, 20 bp, Artificial Sequence
  Description of Artificial Sequence: Synthetic oligonucleotide
  Target: LAMA2; (+) strand; PAM type: YTN; PAM sequence: TTA
tatgtagagagatatatttt

SEQ ID NO: 331314 - DNA, 20 bp, Artificial Sequence
  Description of Artificial Sequence: Synthetic oligonucleotide
  Target: LAMA2; (+) strand; PAM type: YTN; PAM sequence: TTT
tacatatctatagatcgatc

SEQ ID NO: 331315 - DNA, 20 bp, Artificial Sequence
  Description of Artificial Sequence: Synthetic oligonucleotide
  Target: LAMA2; (+) strand; PAM type: YTN; PAM sequence: TTT
acatatctatagatcgatct

SEQ ID NO: 331316 - DNA, 20 bp, Artificial Sequence
  Description of Artificial Sequence: Synthetic oligonucleotide
  Target: LAMA2; (+) strand; PAM type: YTN; PAM sequence: TTA
catatctatagatcgatcta

SEQ ID NO: 331317 - DNA, 20 bp, Artificial Sequence
  Description of Artificial Sequence: Synthetic oligonucleotide
  Target: LAMA2; (+) strand; PAM type: YTN; PAM sequence: CTA
tagatcgatctatagatatc

SEQ ID NO: 331318 - DNA, 20 bp, Artificial Sequence
  Description of Artificial Sequence: Synthetic oligonucleotide
  Target: LAMA2; (+) strand; PAM type: YTN; PAM sequence: CTA
tagatatctatatctataga

SEQ ID NO: 331319 - DNA, 20 bp, Artificial Sequence
  Description of Artificial Sequence: Synthetic oligonucleotide
  Target: LAMA2; (+) strand; PAM type: YTN; PAM sequence: CTA
tatctatagatcgatctata

SEQ ID NO: 331320 - DNA, 20 bp, Artificial Sequence
  Description of Artificial Sequence: Synthetic oligonucleotide
  Target: LAMA2; (+) strand; PAM type: YTN; PAM sequence: CTA
tagatcgatctatagatatc

SEQ ID NO: 331321 - DNA, 20 bp, Artificial Sequence
  Description of Artificial Sequence: Synthetic oligonucleotide
  Target: LAMA2; (+) strand; PAM type: YTN; PAM sequence: CTA
tagatatctatatctataga

SEQ ID NO: 331322 - DNA, 20 bp, Artificial Sequence
  Description of Artificial Sequence: Synthetic oligonucleotide
  Target: LAMA2; (+) strand; PAM type: YTN; PAM sequence: CTA
tatctatagatagatatata

SEQ ID NO: 331323 - DNA, 20 bp, Artificial Sequence
  Description of Artificial Sequence: Synthetic oligonucleotide
  Target: LAMA2; (+) strand; PAM type: YTN; PAM sequence: CTA
tagatagatatatagaggcc

SEQ ID NO: 331324 - DNA, 20 bp, Artificial Sequence
  Description of Artificial Sequence: Synthetic oligonucleotide
  Target: LAMA2; (+) strand; PAM type: YTN; PAM sequence: TTG
atggattattagtttcaggt

SEQ ID NO: 331325 - DNA, 20 bp, Artificial Sequence
  Description of Artificial Sequence: Synthetic oligonucleotide
  Target: LAMA2; (+) strand; PAM type: YTN; PAM sequence: TTA
ttagtttcaggttcattagg

SEQ ID NO: 331326 - DNA, 20 bp, Artificial Sequence
  Description of Artificial Sequence: Synthetic oligonucleotide
  Target: LAMA2; (+) strand; PAM type: YTN; PAM sequence: TTA
gtttcaggttcattaggcaa

SEQ ID NO: 331327 - DNA, 20 bp, Artificial Sequence
  Description of Artificial Sequence: Synthetic oligonucleotide
  Target: LAMA2; (+) strand; PAM type: YTN; PAM sequence: TTT
caggttcattaggcaagatg

SEQ ID NO: 331328 - DNA, 20 bp, Artificial Sequence
  Description of Artificial Sequence: Synthetic oligonucleotide
  Target: LAMA2; (+) strand; PAM type: YTN; PAM sequence: TTC
aggttcattaggcaagatga

SEQ ID NO: 331329 - DNA, 20 bp, Artificial Sequence
  Description of Artificial Sequence: Synthetic oligonucleotide
  Target: LAMA2; (+) strand; PAM type: YTN; PAM sequence: TTC
attaggcaagatgataaagc

SEQ ID NO: 331330 - DNA, 20 bp, Artificial Sequence
  Description of Artificial Sequence: Synthetic oligonucleotide
  Target: LAMA2; (+) strand; PAM type: YTN; PAM sequence: TTA
ggcaagatgataaagcctga

SEQ ID NO: 331331 - DNA, 20 bp, Artificial Sequence
  Description of Artificial Sequence: Synthetic oligonucleotide
  Target: LAMA2; (+) strand; PAM type: YTN; PAM sequence: CTG
atggagggaaaccaccattg

SEQ ID NO: 331332 - DNA, 20 bp, Artificial Sequence
  Description of Artificial Sequence: Synthetic oligonucleotide
  Target: LAMA2; (+) strand; PAM type: YTN; PAM sequence: TTG
gttcagagactggtggcctt

SEQ ID NO: 331333 - DNA, 20 bp, Artificial Sequence
  Description of Artificial Sequence: Synthetic oligonucleotide
  Target: LAMA2; (+) strand; PAM type: YTN; PAM sequence: TTC
agagactggtggccttgaaa

SEQ ID NO: 331334 - DNA, 20 bp, Artificial Sequence
  Description of Artificial Sequence: Synthetic oligonucleotide
  Target: LAMA2; (+) strand; PAM type: YTN; PAM sequence: CTG
gtggccttgaaaatttcatg

SEQ ID NO: 331335 - DNA, 20 bp, Artificial Sequence
  Description of Artificial Sequence: Synthetic oligonucleotide
  Target: LAMA2; (+) strand; PAM type: YTN; PAM sequence: CTT
gaaaatttcatgaagaatat

SEQ ID NO: 331336 - DNA, 20 bp, Artificial Sequence
  Description of Artificial Sequence: Synthetic oligonucleotide
  Target: LAMA2; (+) strand; PAM type: YTN; PAM sequence: TTG
aaaatttcatgaagaatatg

SEQ ID NO: 331337 - DNA, 20 bp, Artificial Sequence
  Description of Artificial Sequence: Synthetic oligonucleotide
  Target: LAMA2; (+) strand; PAM type: YTN; PAM sequence: TTT
catgaagaatatgagaaagc

SEQ ID NO: 331338 - DNA, 20 bp, Artificial Sequence
  Description of Artificial Sequence: Synthetic oligonucleotide
  Target: LAMA2; (+) strand; PAM type: YTN; PAM sequence: TTC
atgaagaatatgagaaagcc

SEQ ID NO: 331339 - DNA, 20 bp, Artificial Sequence
  Description of Artificial Sequence: Synthetic oligonucleotide
  Target: LAMA2; (+) strand; PAM type: YTN; PAM sequence: TTG
tggggaggaggtgcgagtgt

SEQ ID NO: 331340 - DNA, 20 bp, Artificial Sequence
  Description of Artificial Sequence: Synthetic oligonucleotide
  Target: LAMA2; (+) strand; PAM type: YTN; PAM sequence: TTT
aggatgggctgtgcagacgg

SEQ ID NO: 331341 - DNA, 20 bp, Artificial Sequence
  Description of Artificial Sequence: Synthetic oligonucleotide
  Target: LAMA2; (+) strand; PAM type: YTN; PAM sequence: TTA
ggatgggctgtgcagacggg

SEQ ID NO: 331342 - DNA, 20 bp, Artificial Sequence
  Description of Artificial Sequence: Synthetic oligonucleotide
  Target: LAMA2; (+) strand; PAM type: YTN; PAM sequence: CTG
tgcagacggggagaattaga

SEQ ID NO: 331343 - DNA, 20 bp, Artificial Sequence
  Description of Artificial Sequence: Synthetic oligonucleotide
  Target: LAMA2; (+) strand; PAM type: YTN; PAM sequence: TTA
gagagataaaatatgtaaaa

SEQ ID NO: 331344 - DNA, 20 bp, Artificial Sequence
  Description of Artificial Sequence: Synthetic oligonucleotide
  Target: LAMA2; (+) strand; PAM type: YTN; PAM sequence: CTT
aatgccaagtgaggtgaact

SEQ ID NO: 331345 - DNA, 20 bp, Artificial Sequence
  Description of Artificial Sequence: Synthetic oligonucleotide
  Target: LAMA2; (+) strand; PAM type: YTN; PAM sequence: TTA
atgccaagtgaggtgaacta

SEQ ID NO: 331346 - DNA, 20 bp, Artificial Sequence
  Description of Artificial Sequence: Synthetic oligonucleotide
  Target: LAMA2; (+) strand; PAM type: YTN; PAM sequence: CTA
tgatgggggtaaagcttcac

SEQ ID NO: 331347 - DNA, 20 bp, Artificial Sequence
  Description of Artificial Sequence: Synthetic oligonucleotide
  Target: LAMA2; (+) strand; PAM type: YTN; PAM sequence: CTT
cacaattatattattttaaa

SEQ ID NO: 331348 - DNA, 20 bp, Artificial Sequence
  Description of Artificial Sequence: Synthetic oligonucleotide
  Target: LAMA2; (+) strand; PAM type: YTN; PAM sequence: TTC
acaattatattattttaaaa

SEQ ID NO: 331349 - DNA, 20 bp, Artificial Sequence
  Description of Artificial Sequence: Synthetic oligonucleotide
  Target: LAMA2; (+) strand; PAM type: YTN; PAM sequence: TTA
tattattttaaaatttgctt

SEQ ID NO: 331350 - DNA, 20 bp, Artificial Sequence
  Description of Artificial Sequence: Synthetic oligonucleotide
  Target: LAMA2; (+) strand; PAM type: YTN; PAM sequence: TTA
ttttaaaatttgcttagtat

SEQ ID NO: 331351 - DNA, 20 bp, Artificial Sequence
  Description of Artificial Sequence: Synthetic oligonucleotide
  Target: LAMA2; (+) strand; PAM type: YTN; PAM sequence: TTT
taaaatttgcttagtatttc

SEQ ID NO: 331352 - DNA, 20 bp, Artificial Sequence
  Description of Artificial Sequence: Synthetic oligonucleotide
  Target: LAMA2; (+) strand; PAM type: YTN; PAM sequence: TTT
aaaatttgcttagtatttct

SEQ ID NO: 331353 - DNA, 20 bp, Artificial Sequence
  Description of Artificial Sequence: Synthetic oligonucleotide
  Target: LAMA2; (+) strand; PAM type: YTN; PAM sequence: TTA
aaatttgcttagtatttctt

SEQ ID NO: 331354 - DNA, 20 bp, Artificial Sequence
  Description of Artificial Sequence: Synthetic oligonucleotide
  Target: LAMA2; (+) strand; PAM type: YTN; PAM sequence: TTT
gcttagtatttcttctcctt

SEQ ID NO: 331355 - DNA, 20 bp, Artificial Sequence
  Description of Artificial Sequence: Synthetic oligonucleotide
  Target: LAMA2; (+) strand; PAM type: YTN; PAM sequence: TTG
cttagtatttcttctccttt

SEQ ID NO: 331356 - DNA, 20 bp, Artificial Sequence
  Description of Artificial Sequence: Synthetic oligonucleotide
  Target: LAMA2; (+) strand; PAM type: YTN; PAM sequence: CTT
agtatttcttctcctttttt

SEQ ID NO: 331357 - DNA, 20 bp, Artificial Sequence
  Description of Artificial Sequence: Synthetic oligonucleotide
  Target: LAMA2; (+) strand; PAM type: YTN; PAM sequence: TTA
gtatttcttctccttttttt

SEQ ID NO: 331358 - DNA, 20 bp, Artificial Sequence
  Description of Artificial Sequence: Synthetic oligonucleotide
  Target: LAMA2; (+) strand; PAM type: YTN; PAM sequence: TTT
cttctccttttttttttttt

SEQ ID NO: 331359 - DNA, 20 bp, Artificial Sequence
  Description of Artificial Sequence: Synthetic oligonucleotide
  Target: LAMA2; (+) strand; PAM type: YTN; PAM sequence: TTC
ttctcctttttttttttttt

SEQ ID NO: 331360 - DNA, 20 bp, Artificial Sequence
  Description of Artificial Sequence: Synthetic oligonucleotide
  Target: LAMA2; (+) strand; PAM type: YTN; PAM sequence: CTT
ctcctttttttttttttttt

SEQ ID NO: 331361 - DNA, 20 bp, Artificial Sequence
  Description of Artificial Sequence: Synthetic oligonucleotide
  Target: LAMA2; (+) strand; PAM type: YTN; PAM sequence: TTC
tccttttttttttttttttt

SEQ ID NO: 331362 - DNA, 20 bp, Artificial Sequence
  Description of Artificial Sequence: Synthetic oligonucleotide
  Target: LAMA2; (+) strand; PAM type: YTN; PAM sequence: CTC
cttttttttttttttttttt

SEQ ID NO: 331363 - DNA, 20 bp, Artificial Sequence
  Description of Artificial Sequence: Synthetic oligonucleotide
  Target: LAMA2; (+) strand; PAM type: YTN; PAM sequence: CTT
tttttttttttttttttagg

SEQ ID NO: 331364 - DNA, 20 bp, Artificial Sequence
  Description of Artificial Sequence: Synthetic oligonucleotide
  Target: LAMA2; (+) strand; PAM type: YTN; PAM sequence: TTT
ttttttttttttttttaggc

SEQ ID NO: 331365 - DNA, 20 bp, Artificial Sequence
  Description of Artificial Sequence: Synthetic oligonucleotide
  Target: LAMA2; (+) strand; PAM type: YTN; PAM sequence: TTT
tttttttttttttttaggca

SEQ ID NO: 331366 - DNA, 20 bp, Artificial Sequence
  Description of Artificial Sequence: Synthetic oligonucleotide
  Target: LAMA2; (+) strand; PAM type: YTN; PAM sequence: TTT
ttttttttttttttaggcag

SEQ ID NO: 331367 - DNA, 20 bp, Artificial Sequence
  Description of Artificial Sequence: Synthetic oligonucleotide
  Target: LAMA2; (+) strand; PAM type: YTN; PAM sequence: TTT
tttttttttttttaggcaga

SEQ ID NO: 331368 - DNA, 20 bp, Artificial Sequence
  Description of Artificial Sequence: Synthetic oligonucleotide
  Target: LAMA2; (+) strand; PAM type: YTN; PAM sequence: TTT
ttttttttttttaggcagag

SEQ ID NO: 331369 - DNA, 20 bp, Artificial Sequence
  Description of Artificial Sequence: Synthetic oligonucleotide
  Target: LAMA2; (+) strand; PAM type: YTN; PAM sequence: TTT
tttttttttttaggcagagt

SEQ ID NO: 331370 - DNA, 20 bp, Artificial Sequence
  Description of Artificial Sequence: Synthetic oligonucleotide
  Target: LAMA2; (+) strand; PAM type: YTN; PAM sequence: TTT
ttttttttttaggcagagtt

SEQ ID NO: 331371 - DNA, 20 bp, Artificial Sequence
  Description of Artificial Sequence: Synthetic oligonucleotide
  Target: LAMA2; (+) strand; PAM type: YTN; PAM sequence: TTT
tttttttttaggcagagttt

SEQ ID NO: 331372 - DNA, 20 bp, Artificial Sequence
  Description of Artificial Sequence: Synthetic oligonucleotide
  Target: LAMA2; (+) strand; PAM type: YTN; PAM sequence: TTT
ttttttttaggcagagtttc

SEQ ID NO: 331373 - DNA, 20 bp, Artificial Sequence
  Description of Artificial Sequence: Synthetic oligonucleotide
  Target: LAMA2; (+) strand; PAM type: YTN; PAM sequence: TTT
tttttttaggcagagtttcg

SEQ ID NO: 331374 - DNA, 20 bp, Artificial Sequence
  Description of Artificial Sequence: Synthetic oligonucleotide
  Target: LAMA2; (+) strand; PAM type: YTN; PAM sequence: TTT
ttttttaggcagagtttcgc

SEQ ID NO: 331375 - DNA, 20 bp, Artificial Sequence
  Description of Artificial Sequence: Synthetic oligonucleotide
  Target: LAMA2; (+) strand; PAM type: YTN; PAM sequence: TTT
tttttaggcagagtttcgct

SEQ ID NO: 331376 - DNA, 20 bp, Artificial Sequence
  Description of Artificial Sequence: Synthetic oligonucleotide
  Target: LAMA2; (+) strand; PAM type: YTN; PAM sequence: TTT
ttttaggcagagtttcgctc

SEQ ID NO: 331377 - DNA, 20 bp, Artificial Sequence
  Description of Artificial Sequence: Synthetic oligonucleotide
  Target: LAMA2; (+) strand; PAM type: YTN; PAM sequence: TTT
tttaggcagagtttcgctct

SEQ ID NO: 331378 - DNA, 20 bp, Artificial Sequence
  Description of Artificial Sequence: Synthetic oligonucleotide
  Target: LAMA2; (+) strand; PAM type: YTN; PAM sequence: TTT
ttaggcagagtttcgctctg

SEQ ID NO: 331379 - DNA, 20 bp, Artificial Sequence
  Description of Artificial Sequence: Synthetic oligonucleotide
  Target: LAMA2; (+) strand; PAM type: YTN; PAM sequence: TTT
taggcagagtttcgctctgt

SEQ ID NO: 331380 - DNA, 20 bp, Artificial Sequence
  Description of Artificial Sequence: Synthetic oligonucleotide
  Target: LAMA2; (+) strand; PAM type: YTN; PAM sequence: TTT
aggcagagtttcgctctgtc

SEQ ID NO: 331381 - DNA, 20 bp, Artificial Sequence
  Description of Artificial Sequence: Synthetic oligonucleotide
  Target: LAMA2; (+) strand; PAM type: YTN; PAM sequence: TTA
ggcagagtttcgctctgtcg

SEQ ID NO: 331382 - DNA, 20 bp, Artificial Sequence
  Description of Artificial Sequence: Synthetic oligonucleotide
  Target: LAMA2; (+) strand; PAM type: YTN; PAM sequence: TTT
cgctctgtcgcccaggctgc

SEQ ID NO: 331383 - DNA, 20 bp, Artificial Sequence
  Description of Artificial Sequence: Synthetic oligonucleotide
  Target: LAMA2; (+) strand; PAM type: YTN; PAM sequence: TTC
gctctgtcgcccaggctgca

SEQ ID NO: 331384 - DNA, 20 bp, Artificial Sequence
  Description of Artificial Sequence: Synthetic oligonucleotide
  Target: LAMA2; (+) strand; PAM type: YTN; PAM sequence: CTC
tgtcgcccaggctgcagtgc

SEQ ID NO: 331385 - DNA, 20 bp, Artificial Sequence
  Description of Artificial Sequence: Synthetic oligonucleotide
  Target: LAMA2; (+) strand; PAM type: YTN; PAM sequence: CTG
tcgcccaggctgcagtgcag

SEQ ID NO: 331386 - DNA, 20 bp, Artificial Sequence
  Description of Artificial Sequence: Synthetic oligonucleotide
  Target: LAMA2; (+) strand; PAM type: YTN; PAM sequence: CTG
cagtgcagtggcgcgatctc

SEQ ID NO: 331387 - DNA, 20 bp, Artificial Sequence
  Description of Artificial Sequence: Synthetic oligonucleotide
  Target: LAMA2; (+) strand; PAM type: YTN; PAM sequence: CTC
ggctcactgcaagctccgcc

SEQ ID NO: 331388 - DNA, 20 bp, Artificial Sequence
  Description of Artificial Sequence: Synthetic oligonucleotide
  Target: LAMA2; (+) strand; PAM type: YTN; PAM sequence: CTC
actgcaagctccgcctcccg

SEQ ID NO: 331389 - DNA, 20 bp, Artificial Sequence
  Description of Artificial Sequence: Synthetic oligonucleotide
  Target: LAMA2; (+) strand; PAM type: YTN; PAM sequence: CTG
caagctccgcctcccgggtt

SEQ ID NO: 331390 - DNA, 20 bp, Artificial Sequence
  Description of Artificial Sequence: Synthetic oligonucleotide
  Target: LAMA2; (+) strand; PAM type: YTN; PAM sequence: CTC
cgcctcccgggttcacgcca

SEQ ID NO: 331391 - DNA, 20 bp, Artificial Sequence
  Description of Artificial Sequence: Synthetic oligonucleotide
  Target: LAMA2; (+) strand; PAM type: YTN; PAM sequence: CTC
ccgggttcacgccattctct

SEQ ID NO: 331392 - DNA, 20 bp, Artificial Sequence
  Description of Artificial Sequence: Synthetic oligonucleotide
  Target: LAMA2; (+) strand; PAM type: YTN; PAM sequence: TTC
acgccattctcttgcctcag

SEQ ID NO: 331393 - DNA, 20 bp, Artificial Sequence
  Description of Artificial Sequence: Synthetic oligonucleotide
  Target: LAMA2; (+) strand; PAM type: YTN; PAM sequence: TTC
tcttgcctcagcctccccag

SEQ ID NO: 331394 - DNA, 20 bp, Artificial Sequence
  Description of Artificial Sequence: Synthetic oligonucleotide
  Target: LAMA2; (+) strand; PAM type: YTN; PAM sequence: CTC
ttgcctcagcctccccagca

SEQ ID NO: 331395 - DNA, 20 bp, Artificial Sequence
  Description of Artificial Sequence: Synthetic oligonucleotide
  Target: LAMA2; (+) strand; PAM type: YTN; PAM sequence: CTT
gcctcagcctccccagcagc

SEQ ID NO: 331396 - DNA, 20 bp, Artificial Sequence
  Description of Artificial Sequence: Synthetic oligonucleotide
  Target: LAMA2; (+) strand; PAM type: YTN; PAM sequence: TTG
cctcagcctccccagcagct

SEQ ID NO: 331397 - DNA, 20 bp, Artificial Sequence
  Description of Artificial Sequence: Synthetic oligonucleotide
  Target: LAMA2; (+) strand; PAM type: YTN; PAM sequence: CTC
agcctccccagcagctggga

SEQ ID NO: 331398 - DNA, 20 bp, Artificial Sequence
  Description of Artificial Sequence: Synthetic oligonucleotide
  Target: LAMA2; (+) strand; PAM type: YTN; PAM sequence: CTC
cccagcagctgggactgcag

SEQ ID NO: 331399 - DNA, 20 bp, Artificial Sequence
  Description of Artificial Sequence: Synthetic oligonucleotide
  Target: LAMA2; (+) strand; PAM type: YTN; PAM sequence: CTG
ggactgcaggcgcacgttgc

SEQ ID NO: 331400 - DNA, 20 bp, Artificial Sequence
  Description of Artificial Sequence: Synthetic oligonucleotide
  Target: LAMA2; (+) strand; PAM type: YTN; PAM sequence: CTG
caggcgcacgttgccacgcc

SEQ ID NO: 331401 - DNA, 20 bp, Artificial Sequence
  Description of Artificial Sequence: Synthetic oligonucleotide
  Target: LAMA2; (+) strand; PAM type: YTN; PAM sequence: TTG
ccacgcccggctaattcttt

SEQ ID NO: 331402 - DNA, 20 bp, Artificial Sequence
  Description of Artificial Sequence: Synthetic oligonucleotide
  Target: LAMA2; (+) strand; PAM type: YTN; PAM sequence: CTA
attctttttttttttttttt

SEQ ID NO: 331403 - DNA, 20 bp, Artificial Sequence
  Description of Artificial Sequence: Synthetic oligonucleotide
  Target: LAMA2; (+) strand; PAM type: YTN; PAM sequence: TTC
ttttttttttttttttgtat

SEQ ID NO: 331404 - DNA, 20 bp, Artificial Sequence
  Description of Artificial Sequence: Synthetic oligonucleotide
  Target: LAMA2; (+) strand; PAM type: YTN; PAM sequence: CTT
ttttttttttttttgtattt

SEQ ID NO: 331405 - DNA, 20 bp, Artificial Sequence
  Description of Artificial Sequence: Synthetic oligonucleotide
  Target: LAMA2; (+) strand; PAM type: YTN; PAM sequence: TTT
tttttttttttttgtatttt

SEQ ID NO: 331406 - DNA, 20 bp, Artificial Sequence
  Description of Artificial Sequence: Synthetic oligonucleotide
  Target: LAMA2; (+) strand; PAM type: YTN; PAM sequence: TTT
ttttttttttttgtattttt

SEQ ID NO: 331407 - DNA, 20 bp, Artificial Sequence
  Description of Artificial Sequence: Synthetic oligonucleotide
  Target: LAMA2; (+) strand; PAM type: YTN; PAM sequence: TTT
tttttttttttgtattttta

SEQ ID NO: 331408 - DNA, 20 bp, Artificial Sequence
  Description of Artificial Sequence: Synthetic oligonucleotide
  Target: LAMA2; (+) strand; PAM type: YTN; PAM sequence: TTT
ttttttttttgtatttttag

SEQ ID NO: 331409 - DNA, 20 bp, Artificial Sequence
  Description of Artificial Sequence: Synthetic oligonucleotide
  Target: LAMA2; (+) strand; PAM type: YTN; PAM sequence: TTT
tttttttttgtatttttagt

SEQ ID NO: 331410 - DNA, 20 bp, Artificial Sequence
  Description of Artificial Sequence: Synthetic oligonucleotide
  Target: LAMA2; (+) strand; PAM type: YTN; PAM sequence: TTT
ttttttttgtatttttagtt

SEQ ID NO: 331411 - DNA, 20 bp, Artificial Sequence
  Description of Artificial Sequence: Synthetic oligonucleotide
  Target: LAMA2; (+) strand; PAM type: YTN; PAM sequence: TTT
tttttttgtatttttagttg

SEQ ID NO: 331412 - DNA, 20 bp, Artificial Sequence
  Description of Artificial Sequence: Synthetic oligonucleotide
  Target: LAMA2; (+) strand; PAM type: YTN; PAM sequence: TTT
ttttttgtatttttagttga

SEQ ID NO: 331413 - DNA, 20 bp, Artificial Sequence
  Description of Artificial Sequence: Synthetic oligonucleotide
  Target: LAMA2; (+) strand; PAM type: YTN; PAM sequence: TTT
tttttgtatttttagttgag

SEQ ID NO: 331414 - DNA, 20 bp, Artificial Sequence
  Description of Artificial Sequence: Synthetic oligonucleotide
  Target: LAMA2; (+) strand; PAM type: YTN; PAM sequence: TTT
ttttgtatttttagttgaga

SEQ ID NO: 331415 - DNA, 20 bp, Artificial Sequence
  Description of Artificial Sequence: Synthetic oligonucleotide
  Target: LAMA2; (+) strand; PAM type: YTN; PAM sequence: TTT
tttgtatttttagttgagac

SEQ ID NO: 331416 - DNA, 20 bp, Artificial Sequence
  Description of Artificial Sequence: Synthetic oligonucleotide
  Target: LAMA2; (+) strand; PAM type: YTN; PAM sequence: TTT
ttgtatttttagttgagacg

SEQ ID NO: 331417 - DNA, 20 bp, Artificial Sequence
  Description of Artificial Sequence: Synthetic oligonucleotide
  Target: LAMA2; (+) strand; PAM type: YTN; PAM sequence: TTT
tgtatttttagttgagacgg

SEQ ID NO: 331418 - DNA, 20 bp, Artificial Sequence
  Description of Artificial Sequence: Synthetic oligonucleotide
  Target: LAMA2; (+) strand; PAM type: YTN; PAM sequence: TTT
gtatttttagttgagacggg

SEQ ID NO: 331419 - DNA, 20 bp, Artificial Sequence
  Description of Artificial Sequence: Synthetic oligonucleotide
  Target: LAMA2; (+) strand; PAM type: YTN; PAM sequence: TTG
tatttttagttgagacgggg

SEQ ID NO: 331420 - DNA, 20 bp, Artificial Sequence
  Description of Artificial Sequence: Synthetic oligonucleotide
  Target: LAMA2; (+) strand; PAM type: YTN; PAM sequence: TTT
ttagttgagacggggtttca

SEQ ID NO: 331421 - DNA, 20 bp, Artificial Sequence
  Description of Artificial Sequence: Synthetic oligonucleotide
  Target: LAMA2; (+) strand; PAM type: YTN; PAM sequence: TTT
tagttgagacggggtttcac

SEQ ID NO: 331422 - DNA, 20 bp, Artificial Sequence
  Description of Artificial Sequence: Synthetic oligonucleotide
  Target: LAMA2; (+) strand; PAM type: YTN; PAM sequence: TTT
agttgagacggggtttcacc

SEQ ID NO: 331423 - DNA, 20 bp, Artificial Sequence
  Description of Artificial Sequence: Synthetic oligonucleotide
  Target: LAMA2; (+) strand; PAM type: YTN; PAM sequence: TTA
gttgagacggggtttcaccg

SEQ ID NO: 331424 - DNA, 20 bp, Artificial Sequence
  Description of Artificial Sequence: Synthetic oligonucleotide
  Target: LAMA2; (+) strand; PAM type: YTN; PAM sequence: TTG
agacggggtttcaccgtgtt

SEQ ID NO: 331425 - DNA, 20 bp, Artificial Sequence
  Description of Artificial Sequence: Synthetic oligonucleotide
  Target: LAMA2; (+) strand; PAM type: YTN; PAM sequence: TTT
caccgtgttagctagcacgg

SEQ ID NO: 331426 - DNA, 20 bp, Artificial Sequence
  Description of Artificial Sequence: Synthetic oligonucleotide
  Target: LAMA2; (+) strand; PAM type: YTN; PAM sequence: TTC
accgtgttagctagcacggt

SEQ ID NO: 331427 - DNA, 20 bp, Artificial Sequence
  Description of Artificial Sequence: Synthetic oligonucleotide
  Target: LAMA2; (+) strand; PAM type: YTN; PAM sequence: TTA
gctagcacggtctcaatctc

SEQ ID NO: 331428 - DNA, 20 bp, Artificial Sequence
  Description of Artificial Sequence: Synthetic oligonucleotide
  Target: LAMA2; (+) strand; PAM type: YTN; PAM sequence: CTA
gcacggtctcaatctcctga

SEQ ID NO: 331429 - DNA, 20 bp, Artificial Sequence
  Description of Artificial Sequence: Synthetic oligonucleotide
  Target: LAMA2; (+) strand; PAM type: YTN; PAM sequence: CTC
aatctcctgatctcgtgata

SEQ ID NO: 331430 - DNA, 20 bp, Artificial Sequence
  Description of Artificial Sequence: Synthetic oligonucleotide
  Target: LAMA2; (+) strand; PAM type: YTN; PAM sequence: CTC
ctgatctcgtgatatgcccg

SEQ ID NO: 331431 - DNA, 20 bp, Artificial Sequence
  Description of Artificial Sequence: Synthetic oligonucleotide
  Target: LAMA2; (+) strand; PAM type: YTN; PAM sequence: CTG
atctcgtgatatgcccgcct

SEQ ID NO: 331432 - DNA, 20 bp, Artificial Sequence
  Description of Artificial Sequence: Synthetic oligonucleotide
  Target: LAMA2; (+) strand; PAM type: YTN; PAM sequence: CTC
gtgatatgcccgcctcggcc

SEQ ID NO: 331433 - DNA, 20 bp, Artificial Sequence
  Description of Artificial Sequence: Synthetic oligonucleotide
  Target: LAMA2; (+) strand; PAM type: YTN; PAM sequence: CTC
ggcctcccaaagtgctggga

SEQ ID NO: 331434 - DNA, 20 bp, Artificial Sequence
  Description of Artificial Sequence: Synthetic oligonucleotide
  Target: LAMA2; (+) strand; PAM type: YTN; PAM sequence: CTC
ccaaagtgctgggattacag

SEQ ID NO: 331435 - DNA, 20 bp, Artificial Sequence
  Description of Artificial Sequence: Synthetic oligonucleotide
  Target: LAMA2; (+) strand; PAM type: YTN; PAM sequence: CTG
ggattacaggcgtgagccac

SEQ ID NO: 331436 - DNA, 20 bp, Artificial Sequence
  Description of Artificial Sequence: Synthetic oligonucleotide
  Target: LAMA2; (+) strand; PAM type: YTN; PAM sequence: TTA
caggcgtgagccaccgcgcc

SEQ ID NO: 331437 - DNA, 20 bp, Artificial Sequence
  Description of Artificial Sequence: Synthetic oligonucleotide
  Target: LAMA2; (+) strand; PAM type: YTN; PAM sequence: CTT
ttctctgtctttttaaatag

SEQ ID NO: 331438 - DNA, 20 bp, Artificial Sequence
  Description of Artificial Sequence: Synthetic oligonucleotide
  Target: LAMA2; (+) strand; PAM type: YTN; PAM sequence: TTT
tctctgtctttttaaataga

SEQ ID NO: 331439 - DNA, 20 bp, Artificial Sequence
  Description of Artificial Sequence: Synthetic oligonucleotide
  Target: LAMA2; (+) strand; PAM type: YTN; PAM sequence: TTT
ctctgtctttttaaatagac

SEQ ID NO: 331440 - DNA, 20 bp, Artificial Sequence
  Description of Artificial Sequence: Synthetic oligonucleotide
  Target: LAMA2; (+) strand; PAM type: YTN; PAM sequence: TTC
tctgtctttttaaatagacc

SEQ ID NO: 331441 - DNA, 20 bp, Artificial Sequence
  Description of Artificial Sequence: Synthetic oligonucleotide
  Target: LAMA2; (+) strand; PAM type: YTN; PAM sequence: CTC
tgtctttttaaatagacctt

SEQ ID NO: 331442 - DNA, 20 bp, Artificial Sequence
  Description of Artificial Sequence: Synthetic oligonucleotide
  Target: LAMA2; (+) strand; PAM type: YTN; PAM sequence: CTG
tctttttaaatagaccttat

SEQ ID NO: 331443 - DNA, 20 bp, Artificial Sequence
  Description of Artificial Sequence: Synthetic oligonucleotide
  Target: LAMA2; (+) strand; PAM type: YTN; PAM sequence: CTT
tttaaatagaccttattttt

SEQ ID NO: 331444 - DNA, 20 bp, Artificial Sequence
  Description of Artificial Sequence: Synthetic oligonucleotide
  Target: LAMA2; (+) strand; PAM type: YTN; PAM sequence: TTT
ttaaatagaccttattttta

SEQ ID NO: 331445 - DNA, 20 bp, Artificial Sequence
  Description of Artificial Sequence: Synthetic oligonucleotide
  Target: LAMA2; (+) strand; PAM type: YTN; PAM sequence: TTT
taaatagaccttatttttag

SEQ ID NO: 331446 - DNA, 20 bp, Artificial Sequence
  Description of Artificial Sequence: Synthetic oligonucleotide
  Target: LAMA2; (+) strand; PAM type: YTN; PAM sequence: TTT
aaatagaccttatttttaga

SEQ ID NO: 331447 - DNA, 20 bp, Artificial Sequence
  Description of Artificial Sequence: Synthetic oligonucleotide
  Target: LAMA2; (+) strand; PAM type: YTN; PAM sequence: TTA
aatagaccttatttttagag

SEQ ID NO: 331448 - DNA, 20 bp, Artificial Sequence
  Description of Artificial Sequence: Synthetic oligonucleotide
  Target: LAMA2; (+) strand; PAM type: YTN; PAM sequence: CTT
atttttagagcagtttgagg

SEQ ID NO: 331449 - DNA, 20 bp, Artificial Sequence
  Description of Artificial Sequence: Synthetic oligonucleotide
  Target: LAMA2; (+) strand; PAM type: YTN; PAM sequence: TTA
tttttagagcagtttgaggt

SEQ ID NO: 331450 - DNA, 20 bp, Artificial Sequence
  Description of Artificial Sequence: Synthetic oligonucleotide
  Target: LAMA2; (+) strand; PAM type: YTN; PAM sequence: TTT
ttagagcagtttgaggttca

SEQ ID NO: 331451 - DNA, 20 bp, Artificial Sequence
  Description of Artificial Sequence: Synthetic oligonucleotide
  Target: LAMA2; (+) strand; PAM type: YTN; PAM sequence: TTT
tagagcagtttgaggttcac

SEQ ID NO: 331452 - DNA, 20 bp, Artificial Sequence
  Description of Artificial Sequence: Synthetic oligonucleotide
  Target: LAMA2; (+) strand; PAM type: YTN; PAM sequence: TTT
agagcagtttgaggttcaca

SEQ ID NO: 331453 - DNA, 20 bp, Artificial Sequence
  Description of Artificial Sequence: Synthetic oligonucleotide
  Target: LAMA2; (+) strand; PAM type: YTN; PAM sequence: TTA
gagcagtttgaggttcacag

SEQ ID NO: 331454 - DNA, 20 bp, Artificial Sequence
  Description of Artificial Sequence: Synthetic oligonucleotide
  Target: LAMA2; (+) strand; PAM type: YTN; PAM sequence: TTT
gaggttcacagcaaaattaa

SEQ ID NO: 331455 - DNA, 20 bp, Artificial Sequence
  Description of Artificial Sequence: Synthetic oligonucleotide
  Target: LAMA2; (+) strand; PAM type: YTN; PAM sequence: TTG
aggttcacagcaaaattaag

SEQ ID NO: 331456 - DNA, 20 bp, Artificial Sequence
  Description of Artificial Sequence: Synthetic oligonucleotide
  Target: LAMA2; (+) strand; PAM type: YTN; PAM sequence: TTC
acagcaaaattaagaggaaa

SEQ ID NO: 331457 - DNA, 20 bp, Artificial Sequence
  Description of Artificial Sequence: Synthetic oligonucleotide
  Target: LAMA2; (+) strand; PAM type: YTN; PAM sequence: TTA
agaggaaagtacagaaattc

SEQ ID NO: 331458 - DNA, 20 bp, Artificial Sequence
  Description of Artificial Sequence: Synthetic oligonucleotide
  Target: LAMA2; (+) strand; PAM type: YTN; PAM sequence: TTC
cccatatttcccccgcccca

SEQ ID NO: 331459 - DNA, 20 bp, Artificial Sequence
  Description of Artificial Sequence: Synthetic oligonucleotide
  Target: LAMA2; (+) strand; PAM type: YTN; PAM sequence: TTT
cccccgccccaacacatgcg

SEQ ID NO: 331460 - DNA, 20 bp, Artificial Sequence
  Description of Artificial Sequence: Synthetic oligonucleotide
  Target: LAMA2; (+) strand; PAM type: YTN; PAM sequence: TTC
ccccgccccaacacatgcgt

SEQ ID NO: 331461 - DNA, 20 bp, Artificial Sequence
  Description of Artificial Sequence: Synthetic oligonucleotide
  Target: LAMA2; (+) strand; PAM type: YTN; PAM sequence: CTT
ctccattaccaaaatccccc

SEQ ID NO: 331462 - DNA, 20 bp, Artificial Sequence
  Description of Artificial Sequence: Synthetic oligonucleotide
  Target: LAMA2; (+) strand; PAM type: YTN; PAM sequence: TTC
tccattaccaaaatccccct

SEQ ID NO: 331463 - DNA, 20 bp, Artificial Sequence
  Description of Artificial Sequence: Synthetic oligonucleotide
  Target: LAMA2; (+) strand; PAM type: YTN; PAM sequence: CTC
cattaccaaaatccccctcc

SEQ ID NO: 331464 - DNA, 20 bp, Artificial Sequence
  Description of Artificial Sequence: Synthetic oligonucleotide
  Target: LAMA2; (+) strand; PAM type: YTN; PAM sequence: TTA
ccaaaatccccctccagagt

SEQ ID NO: 331465 - DNA, 20 bp, Artificial Sequence
  Description of Artificial Sequence: Synthetic oligonucleotide
  Target: LAMA2; (+) strand; PAM type: YTN; PAM sequence: CTC
cagagtgctacatttgttac

SEQ ID NO: 331466 - DNA, 20 bp, Artificial Sequence
  Description of Artificial Sequence: Synthetic oligonucleotide
  Target: LAMA2; (+) strand; PAM type: YTN; PAM sequence: CTA
catttgttacagtccatgaa

SEQ ID NO: 331467 - DNA, 20 bp, Artificial Sequence
  Description of Artificial Sequence: Synthetic oligonucleotide
  Target: LAMA2; (+) strand; PAM type: YTN; PAM sequence: TTT
gttacagtccatgaacctac

SEQ ID NO: 331468 - DNA, 20 bp, Artificial Sequence
  Description of Artificial Sequence: Synthetic oligonucleotide
  Target: LAMA2; (+) strand; PAM type: YTN; PAM sequence: TTG
ttacagtccatgaacctaca

SEQ ID NO: 331469 - DNA, 20 bp, Artificial Sequence
  Description of Artificial Sequence: Synthetic oligonucleotide
  Target: LAMA2; (+) strand; PAM type: YTN; PAM sequence: TTA
cagtccatgaacctacattg

SEQ ID NO: 331470 - DNA, 20 bp, Artificial Sequence
  Description of Artificial Sequence: Synthetic oligonucleotide
  Target: LAMA2; (+) strand; PAM type: YTN; PAM sequence: CTA
cattgacaacagcatcaccc

SEQ ID NO: 331471 - DNA, 20 bp, Artificial Sequence
  Description of Artificial Sequence: Synthetic oligonucleotide
  Target: LAMA2; (+) strand; PAM type: YTN; PAM sequence: TTG
acaacagcatcacccaaact

SEQ ID NO: 331472 - DNA, 20 bp, Artificial Sequence
  Description of Artificial Sequence: Synthetic oligonucleotide
  Target: LAMA2; (+) strand; PAM type: YTN; PAM sequence: CTT
catagactgcattagggttt

SEQ ID NO: 331473 - DNA, 20 bp, Artificial Sequence
  Description of Artificial Sequence: Synthetic oligonucleotide
  Target: LAMA2; (+) strand; PAM type: YTN; PAM sequence: TTC
atagactgcattagggttta

SEQ ID NO: 331474 - DNA, 20 bp, Artificial Sequence
  Description of Artificial Sequence: Synthetic oligonucleotide
  Target: LAMA2; (+) strand; PAM type: YTN; PAM sequence: CTG
cattagggtttacttttggt

SEQ ID NO: 331475 - DNA, 20 bp, Artificial Sequence
  Description of Artificial Sequence: Synthetic oligonucleotide
  Target: LAMA2; (+) strand; PAM type: YTN; PAM sequence: TTA
gggtttacttttggtggtgt

SEQ ID NO: 331476 - DNA, 20 bp, Artificial Sequence
  Description of Artificial Sequence: Synthetic oligonucleotide
  Target: LAMA2; (+) strand; PAM type: YTN; PAM sequence: TTT
acttttggtggtgtaccttt

SEQ ID NO: 331477 - DNA, 20 bp, Artificial Sequence
  Description of Artificial Sequence: Synthetic oligonucleotide
  Target: LAMA2; (+) strand; PAM type: YTN; PAM sequence: TTA
cttttggtggtgtacctttt

SEQ ID NO: 331478 - DNA, 20 bp, Artificial Sequence
  Description of Artificial Sequence: Synthetic oligonucleotide
  Target: LAMA2; (+) strand; PAM type: YTN; PAM sequence: CTT
ttggtggtgtaccttttatg

SEQ ID NO: 331479 - DNA, 20 bp, Artificial Sequence
  Description of Artificial Sequence: Synthetic oligonucleotide
  Target: LAMA2; (+) strand; PAM type: YTN; PAM sequence: TTT
tggtggtgtaccttttatgg

SEQ ID NO: 331480 - DNA, 20 bp, Artificial Sequence
  Description of Artificial Sequence: Synthetic oligonucleotide
  Target: LAMA2; (+) strand; PAM type: YTN; PAM sequence: TTT
ggtggtgtaccttttatggg

SEQ ID NO: 331481 - DNA, 20 bp, Artificial Sequence
  Description of Artificial Sequence: Synthetic oligonucleotide
  Target: LAMA2; (+) strand; PAM type: YTN; PAM sequence: TTG
gtggtgtaccttttatgggt

SEQ ID NO: 331482 - DNA, 20 bp, Artificial Sequence
  Description of Artificial Sequence: Synthetic oligonucleotide
  Target: LAMA2; (+) strand; PAM type: YTN; PAM sequence: CTT
ttatgggtttggacaaactt

SEQ ID NO: 331483 - DNA, 20 bp, Artificial Sequence
  Description of Artificial Sequence: Synthetic oligonucleotide
  Target: LAMA2; (+) strand; PAM type: YTN; PAM sequence: TTT
tatgggtttggacaaactta

SEQ ID NO: 331484 - DNA, 20 bp, Artificial Sequence
  Description of Artificial Sequence: Synthetic oligonucleotide
  Target: LAMA2; (+) strand; PAM type: YTN; PAM sequence: TTT
atgggtttggacaaacttat

SEQ ID NO: 331485 - DNA, 20 bp, Artificial Sequence
  Description of Artificial Sequence: Synthetic oligonucleotide
  Target: LAMA2; (+) strand; PAM type: YTN; PAM sequence: TTA
tgggtttggacaaacttata

SEQ ID NO: 331486 - DNA, 20 bp, Artificial Sequence
  Description of Artificial Sequence: Synthetic oligonucleotide
  Target: LAMA2; (+) strand; PAM type: YTN; PAM sequence: TTT
ggacaaacttataatgatat

SEQ ID NO: 331487 - DNA, 20 bp, Artificial Sequence
  Description of Artificial Sequence: Synthetic oligonucleotide
  Target: LAMA2; (+) strand; PAM type: YTN; PAM sequence: TTG
gacaaacttataatgatata

SEQ ID NO: 331488 - DNA, 20 bp, Artificial Sequence
  Description of Artificial Sequence: Synthetic oligonucleotide
  Target: LAMA2; (+) strand; PAM type: YTN; PAM sequence: CTT
ataatgatatatatctacca

SEQ ID NO: 331489 - DNA, 20 bp, Artificial Sequence
  Description of Artificial Sequence: Synthetic oligonucleotide
  Target: LAMA2; (+) strand; PAM type: YTN; PAM sequence: TTA
taatgatatatatctaccat

SEQ ID NO: 331490 - DNA, 20 bp, Artificial Sequence
  Description of Artificial Sequence: Synthetic oligonucleotide
  Target: LAMA2; (+) strand; PAM type: YTN; PAM sequence: CTA
ccattagagtatcacgcaaa

SEQ ID NO: 331491 - DNA, 20 bp, Artificial Sequence
  Description of Artificial Sequence: Synthetic oligonucleotide
  Target: LAMA2; (+) strand; PAM type: YTN; PAM sequence: TTA
gagtatcacgcaaagtagtt

SEQ ID NO: 331492 - DNA, 20 bp, Artificial Sequence
  Description of Artificial Sequence: Synthetic oligonucleotide
  Target: LAMA2; (+) strand; PAM type: YTN; PAM sequence: TTT
cattgctcttttttttttaa

SEQ ID NO: 331493 - DNA, 20 bp, Artificial Sequence
  Description of Artificial Sequence: Synthetic oligonucleotide
  Target: LAMA2; (+) strand; PAM type: YTN; PAM sequence: TTC
attgctcttttttttttaaa

SEQ ID NO: 331494 - DNA, 20 bp, Artificial Sequence
  Description of Artificial Sequence: Synthetic oligonucleotide
  Target: LAMA2; (+) strand; PAM type: YTN; PAM sequence: TTG
ctcttttttttttaaattat

SEQ ID NO: 331495 - DNA, 20 bp, Artificial Sequence
  Description of Artificial Sequence: Synthetic oligonucleotide
  Target: LAMA2; (+) strand; PAM type: YTN; PAM sequence: CTC
ttttttttttaaattataaa

SEQ ID NO: 331496 - DNA, 20 bp, Artificial Sequence
  Description of Artificial Sequence: Synthetic oligonucleotide
  Target: LAMA2; (+) strand; PAM type: YTN; PAM sequence: CTT
ttttttttaaattataaaat

SEQ ID NO: 331497 - DNA, 20 bp, Artificial Sequence
  Description of Artificial Sequence: Synthetic oligonucleotide
  Target: LAMA2; (+) strand; PAM type: YTN; PAM sequence: TTT
tttttttaaattataaaatg

SEQ ID NO: 331498 - DNA, 20 bp, Artificial Sequence
  Description of Artificial Sequence: Synthetic oligonucleotide
  Target: LAMA2; (+) strand; PAM type: YTN; PAM sequence: TTT
ttttttaaattataaaatgt

SEQ ID NO: 331499 - DNA, 20 bp, Artificial Sequence
  Description of Artificial Sequence: Synthetic oligonucleotide
  Target: LAMA2; (+) strand; PAM type: YTN; PAM sequence: TTT
tttttaaattataaaatgta

SEQ ID NO: 331500 - DNA, 20 bp, Artificial Sequence
  Description of Artificial Sequence: Synthetic oligonucleotide
  Target: LAMA2; (+) strand; PAM type: YTN; PAM sequence: TTT
ttttaaattataaaatgtat

SEQ ID NO: 331501 - DNA, 20 bp, Artificial Sequence
  Description of Artificial Sequence: Synthetic oligonucleotide
  Target: LAMA2; (+) strand; PAM type: YTN; PAM sequence: TTT
tttaaattataaaatgtata

SEQ ID NO: 331502 - DNA, 20 bp, Artificial Sequence
  Description of Artificial Sequence: Synthetic oligonucleotide
  Target: LAMA2; (+) strand; PAM type: YTN; PAM sequence: TTT
ttaaattataaaatgtataa

SEQ ID NO: 331503 - DNA, 20 bp, Artificial Sequence
  Description of Artificial Sequence: Synthetic oligonucleotide
  Target: LAMA2; (+) strand; PAM type: YTN; PAM sequence: TTT
taaattataaaatgtataaa

SEQ ID NO: 331504 - DNA, 20 bp, Artificial Sequence
  Description of Artificial Sequence: Synthetic oligonucleotide
  Target: LAMA2; (+) strand; PAM type: YTN; PAM sequence: TTT
aaattataaaatgtataaaa

SEQ ID NO: 331505 - DNA, 20 bp, Artificial Sequence
  Description of Artificial Sequence: Synthetic oligonucleotide
  Target: LAMA2; (+) strand; PAM type: YTN; PAM sequence: TTA
aattataaaatgtataaaat

SEQ ID NO: 331506 - DNA, 20 bp, Artificial Sequence
  Description of Artificial Sequence: Synthetic oligonucleotide
  Target: LAMA2; (+) strand; PAM type: YTN; PAM sequence: TTA
taaaatgtataaaatgagag

SEQ ID NO: 331507 - DNA, 20 bp, Artificial Sequence
  Description of Artificial Sequence: Synthetic oligonucleotide
  Target: LAMA2; (+) strand; PAM type: YTN; PAM sequence: CTT
tttctcacaatttacatttt

SEQ ID NO: 331508 - DNA, 20 bp, Artificial Sequence
  Description of Artificial Sequence: Synthetic oligonucleotide
  Target: LAMA2; (+) strand; PAM type: YTN; PAM sequence: TTT
ttctcacaatttacattttt

SEQ ID NO: 331509 - DNA, 20 bp, Artificial Sequence
  Description of Artificial Sequence: Synthetic oligonucleotide
  Target: LAMA2; (+) strand; PAM type: YTN; PAM sequence: TTT
tctcacaatttacatttttt

SEQ ID NO: 331510 - DNA, 20 bp, Artificial Sequence
  Description of Artificial Sequence: Synthetic oligonucleotide
  Target: LAMA2; (+) strand; PAM type: YTN; PAM sequence: TTT
ctcacaatttacatttttta

SEQ ID NO: 331511 - DNA, 20 bp, Artificial Sequence
  Description of Artificial Sequence: Synthetic oligonucleotide
  Target: LAMA2; (+) strand; PAM type: YTN; PAM sequence: TTC
tcacaatttacattttttat

SEQ ID NO: 331512 - DNA, 20 bp, Artificial Sequence
  Description of Artificial Sequence: Synthetic oligonucleotide
  Target: LAMA2; (+) strand; PAM type: YTN; PAM sequence: CTC
acaatttacattttttatcc

SEQ ID NO: 331513 - DNA, 20 bp, Artificial Sequence
  Description of Artificial Sequence: Synthetic oligonucleotide
  Target: LAMA2; (+) strand; PAM type: YTN; PAM sequence: TTT
acattttttatcccaaaaag

SEQ ID NO: 331514 - DNA, 20 bp, Artificial Sequence
  Description of Artificial Sequence: Synthetic oligonucleotide
  Target: LAMA2; (+) strand; PAM type: YTN; PAM sequence: TTA
cattttttatcccaaaaaga

SEQ ID NO: 331515 - DNA, 20 bp, Artificial Sequence
  Description of Artificial Sequence: Synthetic oligonucleotide
  Target: LAMA2; (+) strand; PAM type: YTN; PAM sequence: TTT
tttatcccaaaaagaaaatt

SEQ ID NO: 331516 - DNA, 20 bp, Artificial Sequence
  Description of Artificial Sequence: Synthetic oligonucleotide
  Target: LAMA2; (+) strand; PAM type: YTN; PAM sequence: TTT
ttatcccaaaaagaaaattg

SEQ ID NO: 331517 - DNA, 20 bp, Artificial Sequence
  Description of Artificial Sequence: Synthetic oligonucleotide
  Target: LAMA2; (+) strand; PAM type: YTN; PAM sequence: TTT
tatcccaaaaagaaaattga

SEQ ID NO: 331518 - DNA, 20 bp, Artificial Sequence
  Description of Artificial Sequence: Synthetic oligonucleotide
  Target: LAMA2; (+) strand; PAM type: YTN; PAM sequence: TTT
atcccaaaaagaaaattgaa

SEQ ID NO: 331519 - DNA, 20 bp, Artificial Sequence
  Description of Artificial Sequence: Synthetic oligonucleotide
  Target: LAMA2; (+) strand; PAM type: YTN; PAM sequence: TTA
tcccaaaaagaaaattgaaa

SEQ ID NO: 331520 - DNA, 20 bp, Artificial Sequence
  Description of Artificial Sequence: Synthetic oligonucleotide
  Target: LAMA2; (+) strand; PAM type: YTN; PAM sequence: TTG
aaaggcattgtgcctttttt

SEQ ID NO: 331521 - DNA, 20 bp, Artificial Sequence
  Description of Artificial Sequence: Synthetic oligonucleotide
  Target: LAMA2; (+) strand; PAM type: YTN; PAM sequence: TTG
tgccttttttcttggagctg

SEQ ID NO: 331522 - DNA, 20 bp, Artificial Sequence
  Description of Artificial Sequence: Synthetic oligonucleotide
  Target: LAMA2; (+) strand; PAM type: YTN; PAM sequence: CTT
ttttcttggagctggttaaa

SEQ ID NO: 331523 - DNA, 20 bp, Artificial Sequence
  Description of Artificial Sequence: Synthetic oligonucleotide
  Target: LAMA2; (+) strand; PAM type: YTN; PAM sequence: TTT
tttcttggagctggttaaag

SEQ ID NO: 331524 - DNA, 20 bp, Artificial Sequence
  Description of Artificial Sequence: Synthetic oligonucleotide
  Target: LAMA2; (+) strand; PAM type: YTN; PAM sequence: TTT
ttcttggagctggttaaaga

SEQ ID NO: 331525 - DNA, 20 bp, Artificial Sequence
  Description of Artificial Sequence: Synthetic oligonucleotide
  Target: LAMA2; (+) strand; PAM type: YTN; PAM sequence: TTT
tcttggagctggttaaagag

SEQ ID NO: 331526 - DNA, 20 bp, Artificial Sequence
  Description of Artificial Sequence: Synthetic oligonucleotide
  Target: LAMA2; (+) strand; PAM type: YTN; PAM sequence: TTT
cttggagctggttaaagaga

SEQ ID NO: 331527 - DNA, 20 bp, Artificial Sequence
  Description of Artificial Sequence: Synthetic oligonucleotide
  Target: LAMA2; (+) strand; PAM type: YTN; PAM sequence: TTC
ttggagctggttaaagagag

SEQ ID NO: 331528 - DNA, 20 bp, Artificial Sequence
  Description of Artificial Sequence: Synthetic oligonucleotide
  Target: LAMA2; (+) strand; PAM type: YTN; PAM sequence: CTT
ggagctggttaaagagaggc

SEQ ID NO: 331529 - DNA, 20 bp, Artificial Sequence
  Description of Artificial Sequence: Synthetic oligonucleotide
  Target: LAMA2; (+) strand; PAM type: YTN; PAM sequence: TTG
gagctggttaaagagaggca

SEQ ID NO: 331530 - DNA, 20 bp, Artificial Sequence
  Description of Artificial Sequence: Synthetic oligonucleotide
  Target: LAMA2; (+) strand; PAM type: YTN; PAM sequence: CTG
gttaaagagaggcatgcata

SEQ ID NO: 331531 - DNA, 20 bp, Artificial Sequence
  Description of Artificial Sequence: Synthetic oligonucleotide
  Target: LAMA2; (+) strand; PAM type: YTN; PAM sequence: TTA
aagagaggcatgcatagtcc

SEQ ID NO: 331532 - DNA, 20 bp, Artificial Sequence
  Description of Artificial Sequence: Synthetic oligonucleotide
  Target: LAMA2; (+) strand; PAM type: YTN; PAM sequence: CTC
attatataatttaggaatgc

SEQ ID NO: 331533 - DNA, 20 bp, Artificial Sequence
  Description of Artificial Sequence: Synthetic oligonucleotide
  Target: LAMA2; (+) strand; PAM type: YTN; PAM sequence: TTA
tataatttaggaatgcagaa

SEQ ID NO: 331534 - DNA, 20 bp, Artificial Sequence
  Description of Artificial Sequence: Synthetic oligonucleotide
  Target: LAMA2; (+) strand; PAM type: YTN; PAM sequence: TTT
aggaatgcagaaaacattac

SEQ ID NO: 331535 - DNA, 20 bp, Artificial Sequence
  Description of Artificial Sequence: Synthetic oligonucleotide
  Target: LAMA2; (+) strand; PAM type: YTN; PAM sequence: TTA
ggaatgcagaaaacattact

SEQ ID NO: 331536 - DNA, 20 bp, Artificial Sequence
  Description of Artificial Sequence: Synthetic oligonucleotide
  Target: LAMA2; (+) strand; PAM type: YTN; PAM sequence: TTA
ctatatttcagcaattgaca

SEQ ID NO: 331537 - DNA, 20 bp, Artificial Sequence
  Description of Artificial Sequence: Synthetic oligonucleotide
  Target: LAMA2; (+) strand; PAM type: YTN; PAM sequence: CTA
tatttcagcaattgacactt

SEQ ID NO: 331538 - DNA, 20 bp, Artificial Sequence
  Description of Artificial Sequence: Synthetic oligonucleotide
  Target: LAMA2; (+) strand; PAM type: YTN; PAM sequence: TTT
cagcaattgacacttgtttg

SEQ ID NO: 331539 - DNA, 20 bp, Artificial Sequence
  Description of Artificial Sequence: Synthetic oligonucleotide
  Target: LAMA2; (+) strand; PAM type: YTN; PAM sequence: TTC
agcaattgacacttgtttga

SEQ ID NO: 331540 - DNA, 20 bp, Artificial Sequence
  Description of Artificial Sequence: Synthetic oligonucleotide
  Target: LAMA2; (+) strand; PAM type: YTN; PAM sequence: TTG
acacttgtttgattaaaatt

SEQ ID NO: 331541 - DNA, 20 bp, Artificial Sequence
  Description of Artificial Sequence: Synthetic oligonucleotide
  Target: LAMA2; (+) strand; PAM type: YTN; PAM sequence: CTT
gtttgattaaaattagtggt

SEQ ID NO: 331542 - DNA, 20 bp, Artificial Sequence
  Description of Artificial Sequence: Synthetic oligonucleotide
  Target: LAMA2; (+) strand; PAM type: YTN; PAM sequence: TTG
tttgattaaaattagtggtc

SEQ ID NO: 331543 - DNA, 20 bp, Artificial Sequence
  Description of Artificial Sequence: Synthetic oligonucleotide
  Target: LAMA2; (+) strand; PAM type: YTN; PAM sequence: TTT
gattaaaattagtggtcgtg

SEQ ID NO: 331544 - DNA, 20 bp, Artificial Sequence
  Description of Artificial Sequence: Synthetic oligonucleotide
  Target: LAMA2; (+) strand; PAM type: YTN; PAM sequence: TTG
attaaaattagtggtcgtgt

SEQ ID NO: 331545 - DNA, 20 bp, Artificial Sequence
  Description of Artificial Sequence: Synthetic oligonucleotide
  Target: LAMA2; (+) strand; PAM type: YTN; PAM sequence: TTA
aaattagtggtcgtgtgtat

SEQ ID NO: 331546 - DNA, 20 bp, Artificial Sequence
  Description of Artificial Sequence: Synthetic oligonucleotide
  Target: LAMA2; (+) strand; PAM type: YTN; PAM sequence: TTA
gtggtcgtgtgtatcacaga

SEQ ID NO: 331547 - DNA, 20 bp, Artificial Sequence
  Description of Artificial Sequence: Synthetic oligonucleotide
  Target: LAMA2; (+) strand; PAM type: YTN; PAM sequence: TTA
agacaccaaagaaggcaacc

SEQ ID NO: 331548 - DNA, 20 bp, Artificial Sequence
  Description of Artificial Sequence: Synthetic oligonucleotide
  Target: LAMA2; (+) strand; PAM type: YTN; PAM sequence: CTT
tcctattaatgactctggtt

SEQ ID NO: 331549 - DNA, 20 bp, Artificial Sequence
  Description of Artificial Sequence: Synthetic oligonucleotide
  Target: LAMA2; (+) strand; PAM type: YTN; PAM sequence: TTT
cctattaatgactctggtta

SEQ ID NO: 331550 - DNA, 20 bp, Artificial Sequence
  Description of Artificial Sequence: Synthetic oligonucleotide
  Target: LAMA2; (+) strand; PAM type: YTN; PAM sequence: TTC
ctattaatgactctggttaa

SEQ ID NO: 331551 - DNA, 20 bp, Artificial Sequence
  Description of Artificial Sequence: Synthetic oligonucleotide
  Target: LAMA2; (+) strand; PAM type: YTN; PAM sequence: CTA
ttaatgactctggttaattt

SEQ ID NO: 331552 - DNA, 20 bp, Artificial Sequence
  Description of Artificial Sequence: Synthetic oligonucleotide
  Target: LAMA2; (+) strand; PAM type: YTN; PAM sequence: TTA
atgactctggttaatttctt

SEQ ID NO: 331553 - DNA, 20 bp, Artificial Sequence
  Description of Artificial Sequence: Synthetic oligonucleotide
  Target: LAMA2; (+) strand; PAM type: YTN; PAM sequence: CTC
tggttaatttctttcttttt

SEQ ID NO: 331554 - DNA, 20 bp, Artificial Sequence
  Description of Artificial Sequence: Synthetic oligonucleotide
  Target: LAMA2; (+) strand; PAM type: YTN; PAM sequence: CTG
gttaatttctttcttttttg

SEQ ID NO: 331555 - DNA, 20 bp, Artificial Sequence
  Description of Artificial Sequence: Synthetic oligonucleotide
  Target: LAMA2; (+) strand; PAM type: YTN; PAM sequence: TTA
atttctttcttttttgtttt

SEQ ID NO: 331556 - DNA, 20 bp, Artificial Sequence
  Description of Artificial Sequence: Synthetic oligonucleotide
  Target: LAMA2; (+) strand; PAM type: YTN; PAM sequence: TTT
ctttcttttttgttttgttt

SEQ ID NO: 331557 - DNA, 20 bp, Artificial Sequence
  Description of Artificial Sequence: Synthetic oligonucleotide
  Target: LAMA2; (+) strand; PAM type: YTN; PAM sequence: TTC
tttcttttttgttttgtttt

SEQ ID NO: 331558 - DNA, 20 bp, Artificial Sequence
  Description of Artificial Sequence: Synthetic oligonucleotide
  Target: LAMA2; (+) strand; PAM type: YTN; PAM sequence: CTT
tcttttttgttttgttttgt

SEQ ID NO: 331559 - DNA, 20 bp, Artificial Sequence
  Description of Artificial Sequence: Synthetic oligonucleotide
  Target: LAMA2; (+) strand; PAM type: YTN; PAM sequence: TTT
cttttttgttttgttttgtt

SEQ ID NO: 331560 - DNA, 20 bp, Artificial Sequence
  Description of Artificial Sequence: Synthetic oligonucleotide
  Target: LAMA2; (+) strand; PAM type: YTN; PAM sequence: TTC
ttttttgttttgttttgttt

SEQ ID NO: 331561 - DNA, 20 bp, Artificial Sequence
  Description of Artificial Sequence: Synthetic oligonucleotide
  Target: LAMA2; (+) strand; PAM type: YTN; PAM sequence: CTT
ttttgttttgttttgttttg

SEQ ID NO: 331562 - DNA, 20 bp, Artificial Sequence
  Description of Artificial Sequence: Synthetic oligonucleotide
  Target: LAMA2; (+) strand; PAM type: YTN; PAM sequence: TTT
tttgttttgttttgttttgt

SEQ ID NO: 331563 - DNA, 20 bp, Artificial Sequence
  Description of Artificial Sequence: Synthetic oligonucleotide
  Target: LAMA2; (+) strand; PAM type: YTN; PAM sequence: TTT
ttgttttgttttgttttgtt

SEQ ID NO: 331564 - DNA, 20 bp, Artificial Sequence
  Description of Artificial Sequence: Synthetic oligonucleotide
  Target: LAMA2; (+) strand; PAM type: YTN; PAM sequence: TTT
tgttttgttttgttttgttt

SEQ ID NO: 331565 - DNA, 20 bp, Artificial Sequence
  Description of Artificial Sequence: Synthetic oligonucleotide
  Target: LAMA2; (+) strand; PAM type: YTN; PAM sequence: TTT
gttttgttttgttttgtttt

SEQ ID NO: 331566 - DNA, 20 bp, Artificial Sequence
  Description of Artificial Sequence: Synthetic oligonucleotide
  Target: LAMA2; (+) strand; PAM type: YTN; PAM sequence: TTG
ttttgttttgttttgtttta

SEQ ID NO: 331567 - DNA, 20 bp, Artificial Sequence
  Description of Artificial Sequence: Synthetic oligonucleotide
  Target: LAMA2; (+) strand; PAM type: YTN; PAM sequence: TTT
tgttttgttttgttttattt

SEQ ID NO: 331568 - DNA, 20 bp, Artificial Sequence
  Description of Artificial Sequence: Synthetic oligonucleotide
  Target: LAMA2; (+) strand; PAM type: YTN; PAM sequence: TTT
gttttgttttgttttatttt

SEQ ID NO: 331569 - DNA, 20 bp, Artificial Sequence
  Description of Artificial Sequence: Synthetic oligonucleotide
  Target: LAMA2; (+) strand; PAM type: YTN; PAM sequence: TTG
ttttgttttgttttattttg

SEQ ID NO: 331570 - DNA, 20 bp, Artificial Sequence
  Description of Artificial Sequence: Synthetic oligonucleotide
  Target: LAMA2; (+) strand; PAM type: YTN; PAM sequence: TTT
tgttttgttttattttgaga

SEQ ID NO: 331571 - DNA, 20 bp, Artificial Sequence
  Description of Artificial Sequence: Synthetic oligonucleotide
  Target: LAMA2; (+) strand; PAM type: YTN; PAM sequence: TTT
gttttgttttattttgagac

SEQ ID NO: 331572 - DNA, 20 bp, Artificial Sequence
  Description of Artificial Sequence: Synthetic oligonucleotide
  Target: LAMA2; (+) strand; PAM type: YTN; PAM sequence: TTG
ttttgttttattttgagacg

SEQ ID NO: 331573 - DNA, 20 bp, Artificial Sequence
  Description of Artificial Sequence: Synthetic oligonucleotide
  Target: LAMA2; (+) strand; PAM type: YTN; PAM sequence: TTT
tgttttattttgagacggag

SEQ ID NO: 331574 - DNA, 20 bp, Artificial Sequence
  Description of Artificial Sequence: Synthetic oligonucleotide
  Target: LAMA2; (+) strand; PAM type: YTN; PAM sequence: TTT
gttttattttgagacggagt

SEQ ID NO: 331575 - DNA, 20 bp, Artificial Sequence
  Description of Artificial Sequence: Synthetic oligonucleotide
  Target: LAMA2; (+) strand; PAM type: YTN; PAM sequence: TTG
ttttattttgagacggagtt

SEQ ID NO: 331576 - DNA, 20 bp, Artificial Sequence
  Description of Artificial Sequence: Synthetic oligonucleotide
  Target: LAMA2; (+) strand; PAM type: YTN; PAM sequence: TTT
tattttgagacggagttttg

SEQ ID NO: 331577 - DNA, 20 bp, Artificial Sequence
  Description of Artificial Sequence: Synthetic oligonucleotide
  Target: LAMA2; (+) strand; PAM type: YTN; PAM sequence: TTT
attttgagacggagttttgc

SEQ ID NO: 331578 - DNA, 20 bp, Artificial Sequence
  Description of Artificial Sequence: Synthetic oligonucleotide
  Target: LAMA2; (+) strand; PAM type: YTN; PAM sequence: TTA
ttttgagacggagttttgct

SEQ ID NO: 331579 - DNA, 20 bp, Artificial Sequence
  Description of Artificial Sequence: Synthetic oligonucleotide
  Target: LAMA2; (+) strand; PAM type: YTN; PAM sequence: TTT
tgagacggagttttgctctt

SEQ ID NO: 331580 - DNA, 20 bp, Artificial Sequence
  Description of Artificial Sequence: Synthetic oligonucleotide
  Target: LAMA2; (+) strand; PAM type: YTN; PAM sequence: TTT
gagacggagttttgctcttg

SEQ ID NO: 331581 - DNA, 20 bp, Artificial Sequence
  Description of Artificial Sequence: Synthetic oligonucleotide
  Target: LAMA2; (+) strand; PAM type: YTN; PAM sequence: TTG
agacggagttttgctcttgt

SEQ ID NO: 331582 - DNA, 20 bp, Artificial Sequence
  Description of Artificial Sequence: Synthetic oligonucleotide
  Target: LAMA2; (+) strand; PAM type: YTN; PAM sequence: TTT
tgctcttgttgcccaggctg

SEQ ID NO: 331583 - DNA, 20 bp, Artificial Sequence
  Description of Artificial Sequence: Synthetic oligonucleotide
  Target: LAMA2; (+) strand; PAM type: YTN; PAM sequence: TTT
gctcttgttgcccaggctgg

SEQ ID NO: 331584 - DNA, 20 bp, Artificial Sequence
  Description of Artificial Sequence: Synthetic oligonucleotide
  Target: LAMA2; (+) strand; PAM type: YTN; PAM sequence: TTG
ctcttgttgcccaggctgga

SEQ ID NO: 331585 - DNA, 20 bp, Artificial Sequence
  Description of Artificial Sequence: Synthetic oligonucleotide
  Target: LAMA2; (+) strand; PAM type: YTN; PAM sequence: CTC
ttgttgcccaggctggagtg

SEQ ID NO: 331586 - DNA, 20 bp, Artificial Sequence
  Description of Artificial Sequence: Synthetic oligonucleotide
  Target: LAMA2; (+) strand; PAM type: YTN; PAM sequence: CTT
gttgcccaggctggagtgca

SEQ ID NO: 331587 - DNA, 20 bp, Artificial Sequence
  Description of Artificial Sequence: Synthetic oligonucleotide
  Target: LAMA2; (+) strand; PAM type: YTN; PAM sequence: TTG
ttgcccaggctggagtgcaa

SEQ ID NO: 331588 - DNA, 20 bp, Artificial Sequence
  Description of Artificial Sequence: Synthetic oligonucleotide
  Target: LAMA2; (+) strand; PAM type: YTN; PAM sequence: TTG
cccaggctggagtgcaatgg

SEQ ID NO: 331589 - DNA, 20 bp, Artificial Sequence
  Description of Artificial Sequence: Synthetic oligonucleotide
  Target: LAMA2; (+) strand; PAM type: YTN; PAM sequence: CTG
gagtgcaatggcacgacctc

SEQ ID NO: 331590 - DNA, 20 bp, Artificial Sequence
  Description of Artificial Sequence: Synthetic oligonucleotide
  Target: LAMA2; (+) strand; PAM type: YTN; PAM sequence: CTC
ggctcaccgcaacctccgcc

SEQ ID NO: 331591 - DNA, 20 bp, Artificial Sequence
  Description of Artificial Sequence: Synthetic oligonucleotide
  Target: LAMA2; (+) strand; PAM type: YTN; PAM sequence: CTC
accgcaacctccgcctcccg

SEQ ID NO: 331592 - DNA, 20 bp, Artificial Sequence
  Description of Artificial Sequence: Synthetic oligonucleotide
  Target: LAMA2; (+) strand; PAM type: YTN; PAM sequence: CTC
cgcctcccgggttcaagaga

SEQ ID NO: 331593 - DNA, 20 bp, Artificial Sequence
  Description of Artificial Sequence: Synthetic oligonucleotide
  Target: LAMA2; (+) strand; PAM type: YTN; PAM sequence: CTC
ccgggttcaagagattcttc

SEQ ID NO: 331594 - DNA, 20 bp, Artificial Sequence
  Description of Artificial Sequence: Synthetic oligonucleotide
  Target: LAMA2; (+) strand; PAM type: YTN; PAM sequence: TTC
aagagattcttctgcctcag

SEQ ID NO: 331595 - DNA, 20 bp, Artificial Sequence
  Description of Artificial Sequence: Synthetic oligonucleotide
  Target: LAMA2; (+) strand; PAM type: YTN; PAM sequence: TTC
ttctgcctcagcctcctgag

SEQ ID NO: 331596 - DNA, 20 bp, Artificial Sequence
  Description of Artificial Sequence: Synthetic oligonucleotide
  Target: LAMA2; (+) strand; PAM type: YTN; PAM sequence: CTT
ctgcctcagcctcctgagag

SEQ ID NO: 331597 - DNA, 20 bp, Artificial Sequence
  Description of Artificial Sequence: Synthetic oligonucleotide
  Target: LAMA2; (+) strand; PAM type: YTN; PAM sequence: TTC
tgcctcagcctcctgagagg

SEQ ID NO: 331598 - DNA, 20 bp, Artificial Sequence
  Description of Artificial Sequence: Synthetic oligonucleotide
  Target: LAMA2; (+) strand; PAM type: YTN; PAM sequence: CTG
cctcagcctcctgagaggca

SEQ ID NO: 331599 - DNA, 20 bp, Artificial Sequence
  Description of Artificial Sequence: Synthetic oligonucleotide
  Target: LAMA2; (+) strand; PAM type: YTN; PAM sequence: CTC
agcctcctgagaggcatgcg

SEQ ID NO: 331600 - DNA, 20 bp, Artificial Sequence
  Description of Artificial Sequence: Synthetic oligonucleotide
  Target: LAMA2; (+) strand; PAM type: YTN; PAM sequence: CTC
ctgagaggcatgcgccacca

SEQ ID NO: 331601 - DNA, 20 bp, Artificial Sequence
  Description of Artificial Sequence: Synthetic oligonucleotide
  Target: LAMA2; (+) strand; PAM type: YTN; PAM sequence: CTG
agaggcatgcgccaccatgc

SEQ ID NO: 331602 - DNA, 20 bp, Artificial Sequence
  Description of Artificial Sequence: Synthetic oligonucleotide
  Target: LAMA2; (+) strand; PAM type: YTN; PAM sequence: CTA
attttgtatttttagtagag

SEQ ID NO: 331603 - DNA, 20 bp, Artificial Sequence
  Description of Artificial Sequence: Synthetic oligonucleotide
  Target: LAMA2; (+) strand; PAM type: YTN; PAM sequence: TTT
tgtatttttagtagagacga

SEQ ID NO: 331604 - DNA, 20 bp, Artificial Sequence
  Description of Artificial Sequence: Synthetic oligonucleotide
  Target: LAMA2; (+) strand; PAM type: YTN; PAM sequence: TTT
gtatttttagtagagacgag

SEQ ID NO: 331605 - DNA, 20 bp, Artificial Sequence
  Description of Artificial Sequence: Synthetic oligonucleotide
  Target: LAMA2; (+) strand; PAM type: YTN; PAM sequence: TTG
tatttttagtagagacgagg

SEQ ID NO: 331606 - DNA, 20 bp, Artificial Sequence
  Description of Artificial Sequence: Synthetic oligonucleotide
  Target: LAMA2; (+) strand; PAM type: YTN; PAM sequence: TTT
ttagtagagacgaggtttct

SEQ ID NO: 331607 - DNA, 20 bp, Artificial Sequence
  Description of Artificial Sequence: Synthetic oligonucleotide
  Target: LAMA2; (+) strand; PAM type: YTN; PAM sequence: TTT
tagtagagacgaggtttctc

SEQ ID NO: 331608 - DNA, 20 bp, Artificial Sequence
  Description of Artificial Sequence: Synthetic oligonucleotide
  Target: LAMA2; (+) strand; PAM type: YTN; PAM sequence: TTT
agtagagacgaggtttctcc

SEQ ID NO: 331609 - DNA, 20 bp, Artificial Sequence
  Description of Artificial Sequence: Synthetic oligonucleotide
  Target: LAMA2; (+) strand; PAM type: YTN; PAM sequence: TTA
gtagagacgaggtttctcca

SEQ ID NO: 331610 - DNA, 20 bp, Artificial Sequence
  Description of Artificial Sequence: Synthetic oligonucleotide
  Target: LAMA2; (+) strand; PAM type: YTN; PAM sequence: TTT
ctccatgttggttaggctgg

SEQ ID NO: 331611 - DNA, 20 bp, Artificial Sequence
  Description of Artificial Sequence: Synthetic oligonucleotide
  Target: LAMA2; (+) strand; PAM type: YTN; PAM sequence: TTC
tccatgttggttaggctggt

SEQ ID NO: 331612 - DNA, 20 bp, Artificial Sequence
  Description of Artificial Sequence: Synthetic oligonucleotide
  Target: LAMA2; (+) strand; PAM type: YTN; PAM sequence: CTC
catgttggttaggctggtcc

SEQ ID NO: 331613 - DNA, 20 bp, Artificial Sequence
  Description of Artificial Sequence: Synthetic oligonucleotide
  Target: LAMA2; (+) strand; PAM type: YTN; PAM sequence: TTG
gttaggctggtcccgaactc

SEQ ID NO: 331614 - DNA, 20 bp, Artificial Sequence
  Description of Artificial Sequence: Synthetic oligonucleotide
  Target: LAMA2; (+) strand; PAM type: YTN; PAM sequence: TTA
ggctggtcccgaactccaga

SEQ ID NO: 331615 - DNA, 20 bp, Artificial Sequence
  Description of Artificial Sequence: Synthetic oligonucleotide
  Target: LAMA2; (+) strand; PAM type: YTN; PAM sequence: CTG
gtcccgaactccagacctca

SEQ ID NO: 331616 - DNA, 20 bp, Artificial Sequence
  Description of Artificial Sequence: Synthetic oligonucleotide
  Target: LAMA2; (+) strand; PAM type: YTN; PAM sequence: CTC
cagacctcagttgatccaac

SEQ ID NO: 331617 - DNA, 20 bp, Artificial Sequence
  Description of Artificial Sequence: Synthetic oligonucleotide
  Target: LAMA2; (+) strand; PAM type: YTN; PAM sequence: CTC
agttgatccaactgcctcgg

SEQ ID NO: 331618 - DNA, 20 bp, Artificial Sequence
  Description of Artificial Sequence: Synthetic oligonucleotide
  Target: LAMA2; (+) strand; PAM type: YTN; PAM sequence: TTG
atccaactgcctcggcctcc

SEQ ID NO: 331619 - DNA, 20 bp, Artificial Sequence
  Description of Artificial Sequence: Synthetic oligonucleotide
  Target: LAMA2; (+) strand; PAM type: YTN; PAM sequence: CTG
cctcggcctcccaaagtgct

SEQ ID NO: 331620 - DNA, 20 bp, Artificial Sequence
  Description of Artificial Sequence: Synthetic oligonucleotide
  Target: LAMA2; (+) strand; PAM type: YTN; PAM sequence: CTC
ggcctcccaaagtgctggga

SEQ ID NO: 331621 - DNA, 20 bp, Artificial Sequence
  Description of Artificial Sequence: Synthetic oligonucleotide
  Target: LAMA2; (+) strand; PAM type: YTN; PAM sequence: CTC
ccaaagtgctgggattacag

SEQ ID NO: 331622 - DNA, 20 bp, Artificial Sequence
  Description of Artificial Sequence: Synthetic oligonucleotide
  Target: LAMA2; (+) strand; PAM type: YTN; PAM sequence: CTG
ggattacagacatgagccac

SEQ ID NO: 331623 - DNA, 20 bp, Artificial Sequence
  Description of Artificial Sequence: Synthetic oligonucleotide
  Target: LAMA2; (+) strand; PAM type: YTN; PAM sequence: TTA
cagacatgagccactgcgcc

SEQ ID NO: 331624 - DNA, 20 bp, Artificial Sequence
  Description of Artificial Sequence: Synthetic oligonucleotide
  Target: LAMA2; (+) strand; PAM type: YTN; PAM sequence: CTG
cgcccggccgactctggtga

SEQ ID NO: 331625 - DNA, 20 bp, Artificial Sequence
  Description of Artificial Sequence: Synthetic oligonucleotide
  Target: LAMA2; (+) strand; PAM type: YTN; PAM sequence: CTC
tggtgaatttctcggatgta

SEQ ID NO: 331626 - DNA, 20 bp, Artificial Sequence
  Description of Artificial Sequence: Synthetic oligonucleotide
  Target: LAMA2; (+) strand; PAM type: YTN; PAM sequence: CTG
gtgaatttctcggatgtaag

SEQ ID NO: 331627 - DNA, 20 bp, Artificial Sequence
  Description of Artificial Sequence: Synthetic oligonucleotide
  Target: LAMA2; (+) strand; PAM type: YTN; PAM sequence: TTT
ctcggatgtaagttgttatg

SEQ ID NO: 331628 - DNA, 20 bp, Artificial Sequence
  Description of Artificial Sequence: Synthetic oligonucleotide
  Target: LAMA2; (+) strand; PAM type: YTN; PAM sequence: TTC
tcggatgtaagttgttatgg

SEQ ID NO: 331629 - DNA, 20 bp, Artificial Sequence
  Description of Artificial Sequence: Synthetic oligonucleotide
  Target: LAMA2; (+) strand; PAM type: YTN; PAM sequence: CTC
ggatgtaagttgttatggta

SEQ ID NO: 331630 - DNA, 20 bp, Artificial Sequence
  Description of Artificial Sequence: Synthetic oligonucleotide
  Target: LAMA2; (+) strand; PAM type: YTN; PAM sequence: TTG
ttatggtatgtgtgtaggag

SEQ ID NO: 331631 - DNA, 20 bp, Artificial Sequence
  Description of Artificial Sequence: Synthetic oligonucleotide
  Target: LAMA2; (+) strand; PAM type: YTN; PAM sequence: TTA
tggtatgtgtgtaggagtgg

SEQ ID NO: 331632 - DNA, 20 bp, Artificial Sequence
  Description of Artificial Sequence: Synthetic oligonucleotide
  Target: LAMA2; (+) strand; PAM type: YTN; PAM sequence: TTG
catacccatgtgtttgctag

SEQ ID NO: 331633 - DNA, 20 bp, Artificial Sequence
  Description of Artificial Sequence: Synthetic oligonucleotide
  Target: LAMA2; (+) strand; PAM type: YTN; PAM sequence: TTT
gctagctcttgtatagaatg

SEQ ID NO: 331634 - DNA, 20 bp, Artificial Sequence
  Description of Artificial Sequence: Synthetic oligonucleotide
  Target: LAMA2; (+) strand; PAM type: YTN; PAM sequence: TTG
ctagctcttgtatagaatgt

SEQ ID NO: 331635 - DNA, 20 bp, Artificial Sequence
  Description of Artificial Sequence: Synthetic oligonucleotide
  Target: LAMA2; (+) strand; PAM type: YTN; PAM sequence: CTA
gctcttgtatagaatgtaag

SEQ ID NO: 331636 - DNA, 20 bp, Artificial Sequence
  Description of Artificial Sequence: Synthetic oligonucleotide
  Target: LAMA2; (+) strand; PAM type: YTN; PAM sequence: CTC
ttgtatagaatgtaagagga

SEQ ID NO: 331637 - DNA, 20 bp, Artificial Sequence
  Description of Artificial Sequence: Synthetic oligonucleotide
  Target: LAMA2; (+) strand; PAM type: YTN; PAM sequence: CTT
gtatagaatgtaagaggaaa

SEQ ID NO: 331638 - DNA, 20 bp, Artificial Sequence
  Description of Artificial Sequence: Synthetic oligonucleotide
  Target: LAMA2; (+) strand; PAM type: YTN; PAM sequence: TTG
tatagaatgtaagaggaaag

SEQ ID NO: 331639 - DNA, 20 bp, Artificial Sequence
  Description of Artificial Sequence: Synthetic oligonucleotide
  Target: LAMA2; (+) strand; PAM type: YTN; PAM sequence: CTT
tgcttttatgtaaaagccaa

SEQ ID NO: 331640 - DNA, 20 bp, Artificial Sequence
  Description of Artificial Sequence: Synthetic oligonucleotide
  Target: LAMA2; (+) strand; PAM type: YTN; PAM sequence: TTT
gcttttatgtaaaagccaag

SEQ ID NO: 331641 - DNA, 20 bp, Artificial Sequence
  Description of Artificial Sequence: Synthetic oligonucleotide
  Target: LAMA2; (+) strand; PAM type: YTN; PAM sequence: TTG
cttttatgtaaaagccaagg

SEQ ID NO: 331642 - DNA, 20 bp, Artificial Sequence
  Description of Artificial Sequence: Synthetic oligonucleotide
  Target: LAMA2; (+) strand; PAM type: YTN; PAM sequence: CTT
ttatgtaaaagccaagggag

SEQ ID NO: 331643 - DNA, 20 bp, Artificial Sequence
  Description of Artificial Sequence: Synthetic oligonucleotide
  Target: LAMA2; (+) strand; PAM type: YTN; PAM sequence: TTT
tatgtaaaagccaagggagt

SEQ ID NO: 331644 - DNA, 20 bp, Artificial Sequence
  Description of Artificial Sequence: Synthetic oligonucleotide
  Target: LAMA2; (+) strand; PAM type: YTN; PAM sequence: TTT
atgtaaaagccaagggagtt

SEQ ID NO: 331645 - DNA, 20 bp, Artificial Sequence
  Description of Artificial Sequence: Synthetic oligonucleotide
  Target: LAMA2; (+) strand; PAM type: YTN; PAM sequence: TTA
tgtaaaagccaagggagttc

SEQ ID NO: 331646 - DNA, 20 bp, Artificial Sequence
  Description of Artificial Sequence: Synthetic oligonucleotide
  Target: LAMA2; (+) strand; PAM type: YTN; PAM sequence: TTC
aggtaaatggagtcaaggca

SEQ ID NO: 331647 - DNA, 20 bp, Artificial Sequence
  Description of Artificial Sequence: Synthetic oligonucleotide
  Target: LAMA2; (+) strand; PAM type: YTN; PAM sequence: TTT
caagggaaaaaaatcaggaa

SEQ ID NO: 331648 - DNA, 20 bp, Artificial Sequence
  Description of Artificial Sequence: Synthetic oligonucleotide
  Target: LAMA2; (+) strand; PAM type: YTN; PAM sequence: TTC
aagggaaaaaaatcaggaaa

SEQ ID NO: 331649 - DNA, 20 bp, Artificial Sequence
  Description of Artificial Sequence: Synthetic oligonucleotide
  Target: LAMA2; (+) strand; PAM type: YTN; PAM sequence: TTA
ggtatgtgatgaaggaaaga

SEQ ID NO: 331650 - DNA, 20 bp, Artificial Sequence
  Description of Artificial Sequence: Synthetic oligonucleotide
  Target: LAMA2; (+) strand; PAM type: YTN; PAM sequence: TTT
ttaggaagaaaaagtaacag

SEQ ID NO: 331651 - DNA, 20 bp, Artificial Sequence
  Description of Artificial Sequence: Synthetic oligonucleotide
  Target: LAMA2; (+) strand; PAM type: YTN; PAM sequence: TTT
taggaagaaaaagtaacagt

SEQ ID NO: 331652 - DNA, 20 bp, Artificial Sequence
  Description of Artificial Sequence: Synthetic oligonucleotide
  Target: LAMA2; (+) strand; PAM type: YTN; PAM sequence: TTT
aggaagaaaaagtaacagtt

SEQ ID NO: 331653 - DNA, 20 bp, Artificial Sequence
  Description of Artificial Sequence: Synthetic oligonucleotide
  Target: LAMA2; (+) strand; PAM type: YTN; PAM sequence: TTA
ggaagaaaaagtaacagttt

SEQ ID NO: 331654 - DNA, 20 bp, Artificial Sequence
  Description of Artificial Sequence: Synthetic oligonucleotide
  Target: LAMA2; (+) strand; PAM type: YTN; PAM sequence: TTT
taaatgcttcgaagataatt

SEQ ID NO: 331655 - DNA, 20 bp, Artificial Sequence
  Description of Artificial Sequence: Synthetic oligonucleotide
  Target: LAMA2; (+) strand; PAM type: YTN; PAM sequence: TTT
aaatgcttcgaagataattg

SEQ ID NO: 331656 - DNA, 20 bp, Artificial Sequence
  Description of Artificial Sequence: Synthetic oligonucleotide
  Target: LAMA2; (+) strand; PAM type: YTN; PAM sequence: TTA
aatgcttcgaagataattga

SEQ ID NO: 331657 - DNA, 20 bp, Artificial Sequence
  Description of Artificial Sequence: Synthetic oligonucleotide
  Target: LAMA2; (+) strand; PAM type: YTN; PAM sequence: CTT
cgaagataattgagtaagaa

SEQ ID NO: 331658 - DNA, 20 bp, Artificial Sequence
  Description of Artificial Sequence: Synthetic oligonucleotide
  Target: LAMA2; (+) strand; PAM type: YTN; PAM sequence: TTC
gaagataattgagtaagaaa

SEQ ID NO: 331659 - DNA, 20 bp, Artificial Sequence
  Description of Artificial Sequence: Synthetic oligonucleotide
  Target: LAMA2; (+) strand; PAM type: YTN; PAM sequence: TTG
agtaagaaaagcataaaata

SEQ ID NO: 331660 - DNA, 20 bp, Artificial Sequence
  Description of Artificial Sequence: Synthetic oligonucleotide
  Target: LAMA2; (+) strand; PAM type: YTN; PAM sequence: TTT
cccttgcttttgacaacatg

SEQ ID NO: 331661 - DNA, 20 bp, Artificial Sequence
  Description of Artificial Sequence: Synthetic oligonucleotide
  Target: LAMA2; (+) strand; PAM type: YTN; PAM sequence: TTC
ccttgcttttgacaacatgg

SEQ ID NO: 331662 - DNA, 20 bp, Artificial Sequence
  Description of Artificial Sequence: Synthetic oligonucleotide
  Target: LAMA2; (+) strand; PAM type: YTN; PAM sequence: CTT
gcttttgacaacatggccat

SEQ ID NO: 331663 - DNA, 20 bp, Artificial Sequence
  Description of Artificial Sequence: Synthetic oligonucleotide
  Target: LAMA2; (+) strand; PAM type: YTN; PAM sequence: TTG
cttttgacaacatggccatc

SEQ ID NO: 331664 - DNA, 20 bp, Artificial Sequence
  Description of Artificial Sequence: Synthetic oligonucleotide
  Target: LAMA2; (+) strand; PAM type: YTN; PAM sequence: CTT
ttgacaacatggccatccat

SEQ ID NO: 331665 - DNA, 20 bp, Artificial Sequence
  Description of Artificial Sequence: Synthetic oligonucleotide
  Target: LAMA2; (+) strand; PAM type: YTN; PAM sequence: TTT
tgacaacatggccatccatt

SEQ ID NO: 331666 - DNA, 20 bp, Artificial Sequence
  Description of Artificial Sequence: Synthetic oligonucleotide
  Target: LAMA2; (+) strand; PAM type: YTN; PAM sequence: TTT
gacaacatggccatccattg

SEQ ID NO: 331667 - DNA, 20 bp, Artificial Sequence
  Description of Artificial Sequence: Synthetic oligonucleotide
  Target: LAMA2; (+) strand; PAM type: YTN; PAM sequence: TTG
acaacatggccatccattga

SEQ ID NO: 331668 - DNA, 20 bp, Artificial Sequence
  Description of Artificial Sequence: Synthetic oligonucleotide
  Target: LAMA2; (+) strand; PAM type: YTN; PAM sequence: TTG
aacacctttctaaagtactc

SEQ ID NO: 331669 - DNA, 20 bp, Artificial Sequence
  Description of Artificial Sequence: Synthetic oligonucleotide
  Target: LAMA2; (+) strand; PAM type: YTN; PAM sequence: CTT
tctaaagtactcagcagatt

SEQ ID NO: 331670 - DNA, 20 bp, Artificial Sequence
  Description of Artificial Sequence: Synthetic oligonucleotide
  Target: LAMA2; (+) strand; PAM type: YTN; PAM sequence: TTT
ctaaagtactcagcagattc

SEQ ID NO: 331671 - DNA, 20 bp, Artificial Sequence
  Description of Artificial Sequence: Synthetic oligonucleotide
  Target: LAMA2; (+) strand; PAM type: YTN; PAM sequence: TTC
taaagtactcagcagattca

SEQ ID NO: 331672 - DNA, 20 bp, Artificial Sequence
  Description of Artificial Sequence: Synthetic oligonucleotide
  Target: LAMA2; (+) strand; PAM type: YTN; PAM sequence: CTA
aagtactcagcagattcata

SEQ ID NO: 331673 - DNA, 20 bp, Artificial Sequence
  Description of Artificial Sequence: Synthetic oligonucleotide
  Target: LAMA2; (+) strand; PAM type: YTN; PAM sequence: CTC
agcagattcatagtggcaag

SEQ ID NO: 331674 - DNA, 20 bp, Artificial Sequence
  Description of Artificial Sequence: Synthetic oligonucleotide
  Target: LAMA2; (+) strand; PAM type: YTN; PAM sequence: TTC
atagtggcaagaggcacact

SEQ ID NO: 331675 - DNA, 20 bp, Artificial Sequence
  Description of Artificial Sequence: Synthetic oligonucleotide
  Target: LAMA2; (+) strand; PAM type: YTN; PAM sequence: CTG
aagaggtaataaatgaatga

SEQ ID NO: 331676 - DNA, 20 bp, Artificial Sequence
  Description of Artificial Sequence: Synthetic oligonucleotide
  Target: LAMA2; (+) strand; PAM type: YTN; PAM sequence: CTA
tagaaatattctgtcaagta

SEQ ID NO: 331677 - DNA, 20 bp, Artificial Sequence
  Description of Artificial Sequence: Synthetic oligonucleotide
  Target: LAMA2; (+) strand; PAM type: YTN; PAM sequence: TTC
tgtcaagtatccttgatgtg

SEQ ID NO: 331678 - DNA, 20 bp, Artificial Sequence
  Description of Artificial Sequence: Synthetic oligonucleotide
  Target: LAMA2; (+) strand; PAM type: YTN; PAM sequence: CTG
tcaagtatccttgatgtgaa

SEQ ID NO: 331679 - DNA, 20 bp, Artificial Sequence
  Description of Artificial Sequence: Synthetic oligonucleotide
  Target: LAMA2; (+) strand; PAM type: YTN; PAM sequence: CTT
gatgtgaaagagaatgaagg

SEQ ID NO: 331680 - DNA, 20 bp, Artificial Sequence
  Description of Artificial Sequence: Synthetic oligonucleotide
  Target: LAMA2; (+) strand; PAM type: YTN; PAM sequence: TTG
atgtgaaagagaatgaagga

SEQ ID NO: 331681 - DNA, 20 bp, Artificial Sequence
  Description of Artificial Sequence: Synthetic oligonucleotide
  Target: LAMA2; (+) strand; PAM type: YTN; PAM sequence: TTG
tggagttgcaaaggttttca

SEQ ID NO: 331682 - DNA, 20 bp, Artificial Sequence
  Description of Artificial Sequence: Synthetic oligonucleotide
  Target: LAMA2; (+) strand; PAM type: YTN; PAM sequence: TTG
caaaggttttcaaagataag

SEQ ID NO: 331683 - DNA, 20 bp, Artificial Sequence
  Description of Artificial Sequence: Synthetic oligonucleotide
  Target: LAMA2; (+) strand; PAM type: YTN; PAM sequence: TTT
tcaaagataagagacatttg

SEQ ID NO: 331684 - DNA, 20 bp, Artificial Sequence
  Description of Artificial Sequence: Synthetic oligonucleotide
  Target: LAMA2; (+) strand; PAM type: YTN; PAM sequence: TTT
caaagataagagacatttga

SEQ ID NO: 331685 - DNA, 20 bp, Artificial Sequence
  Description of Artificial Sequence: Synthetic oligonucleotide
  Target: LAMA2; (+) strand; PAM type: YTN; PAM sequence: TTC
aaagataagagacatttgag

SEQ ID NO: 331686 - DNA, 20 bp, Artificial Sequence
  Description of Artificial Sequence: Synthetic oligonucleotide
  Target: LAMA2; (+) strand; PAM type: YTN; PAM sequence: TTT
gagttggtttagatgcttgg

SEQ ID NO: 331687 - DNA, 20 bp, Artificial Sequence
  Description of Artificial Sequence: Synthetic oligonucleotide
  Target: LAMA2; (+) strand; PAM type: YTN; PAM sequence: TTG
agttggtttagatgcttggg

SEQ ID NO: 331688 - DNA, 20 bp, Artificial Sequence
  Description of Artificial Sequence: Synthetic oligonucleotide
  Target: LAMA2; (+) strand; PAM type: YTN; PAM sequence: TTG
gtttagatgcttggggggaa

SEQ ID NO: 331689 - DNA, 20 bp, Artificial Sequence
  Description of Artificial Sequence: Synthetic oligonucleotide
  Target: LAMA2; (+) strand; PAM type: YTN; PAM sequence: TTT
agatgcttggggggaaaggc

SEQ ID NO: 331690 - DNA, 20 bp, Artificial Sequence
  Description of Artificial Sequence: Synthetic oligonucleotide
  Target: LAMA2; (+) strand; PAM type: YTN; PAM sequence: TTA
gatgcttggggggaaaggca

SEQ ID NO: 331691 - DNA, 20 bp, Artificial Sequence
  Description of Artificial Sequence: Synthetic oligonucleotide
  Target: LAMA2; (+) strand; PAM type: YTN; PAM sequence: CTT
ggggggaaaggcagggaagt

SEQ ID NO: 331692 - DNA, 20 bp, Artificial Sequence
  Description of Artificial Sequence: Synthetic oligonucleotide
  Target: LAMA2; (+) strand; PAM type: YTN; PAM sequence: TTG
gggggaaaggcagggaagtt

SEQ ID NO: 331693 - DNA, 20 bp, Artificial Sequence
  Description of Artificial Sequence: Synthetic oligonucleotide
  Target: LAMA2; (+) strand; PAM type: YTN; PAM sequence: TTG
aagaccaagtggtggtgggc

SEQ ID NO: 331694 - DNA, 20 bp, Artificial Sequence
  Description of Artificial Sequence: Synthetic oligonucleotide
  Target: LAMA2; (+) strand; PAM type: YTN; PAM sequence: CTC
tctagaagtaaaaacatatg

SEQ ID NO: 331695 - DNA, 20 bp, Artificial Sequence
  Description of Artificial Sequence: Synthetic oligonucleotide
  Target: LAMA2; (+) strand; PAM type: YTN; PAM sequence: CTC
tagaagtaaaaacatatggg

SEQ ID NO: 331696 - DNA, 20 bp, Artificial Sequence
  Description of Artificial Sequence: Synthetic oligonucleotide
  Target: LAMA2; (+) strand; PAM type: YTN; PAM sequence: CTA
gaagtaaaaacatatgggtc

SEQ ID NO: 331697 - DNA, 20 bp, Artificial Sequence
  Description of Artificial Sequence: Synthetic oligonucleotide
  Target: LAMA2; (+) strand; PAM type: YTN; PAM sequence: TTA
agcataggcaaaaaccttat

SEQ ID NO: 331698 - DNA, 20 bp, Artificial Sequence
  Description of Artificial Sequence: Synthetic oligonucleotide
  Target: LAMA2; (+) strand; PAM type: YTN; PAM sequence: CTT
atattagaagatacatactt

SEQ ID NO: 331699 - DNA, 20 bp, Artificial Sequence
  Description of Artificial Sequence: Synthetic oligonucleotide
  Target: LAMA2; (+) strand; PAM type: YTN; PAM sequence: TTA
tattagaagatacatacttt

SEQ ID NO: 331700 - DNA, 20 bp, Artificial Sequence
  Description of Artificial Sequence: Synthetic oligonucleotide
  Target: LAMA2; (+) strand; PAM type: YTN; PAM sequence: TTA
gaagatacatacttttaact

SEQ ID NO: 331701 - DNA, 20 bp, Artificial Sequence
  Description of Artificial Sequence: Synthetic oligonucleotide
  Target: LAMA2; (+) strand; PAM type: YTN; PAM sequence: CTT
ttaactcaccaaatcagaaa

SEQ ID NO: 331702 - DNA, 20 bp, Artificial Sequence
  Description of Artificial Sequence: Synthetic oligonucleotide
  Target: LAMA2; (+) strand; PAM type: YTN; PAM sequence: TTT
taactcaccaaatcagaaag

SEQ ID NO: 331703 - DNA, 20 bp, Artificial Sequence
  Description of Artificial Sequence: Synthetic oligonucleotide
  Target: LAMA2; (+) strand; PAM type: YTN; PAM sequence: TTT
aactcaccaaatcagaaaga

SEQ ID NO: 331704 - DNA, 20 bp, Artificial Sequence
  Description of Artificial Sequence: Synthetic oligonucleotide
  Target: LAMA2; (+) strand; PAM type: YTN; PAM sequence: TTA
actcaccaaatcagaaagaa

SEQ ID NO: 331705 - DNA, 20 bp, Artificial Sequence
  Description of Artificial Sequence: Synthetic oligonucleotide
  Target: LAMA2; (+) strand; PAM type: YTN; PAM sequence: CTC
accaaatcagaaagaagaaa

SEQ ID NO: 331706 - DNA, 20 bp, Artificial Sequence
  Description of Artificial Sequence: Synthetic oligonucleotide
  Target: LAMA2; (+) strand; PAM type: YTN; PAM sequence: TTG
ggagaaatttcttatttgat

SEQ ID NO: 331707 - DNA, 20 bp, Artificial Sequence
  Description of Artificial Sequence: Synthetic oligonucleotide
  Target: LAMA2; (+) strand; PAM type: YTN; PAM sequence: TTT
cttatttgatgatcttgatt

SEQ ID NO: 331708 - DNA, 20 bp, Artificial Sequence
  Description of Artificial Sequence: Synthetic oligonucleotide
  Target: LAMA2; (+) strand; PAM type: YTN; PAM sequence: TTC
ttatttgatgatcttgattt

SEQ ID NO: 331709 - DNA, 20 bp, Artificial Sequence
  Description of Artificial Sequence: Synthetic oligonucleotide
  Target: LAMA2; (+) strand; PAM type: YTN; PAM sequence: CTT
atttgatgatcttgatttct

SEQ ID NO: 331710 - DNA, 20 bp, Artificial Sequence
  Description of Artificial Sequence: Synthetic oligonucleotide
  Target: LAMA2; (+) strand; PAM type: YTN; PAM sequence: TTA
tttgatgatcttgatttctt

SEQ ID NO: 331711 - DNA, 20 bp, Artificial Sequence
  Description of Artificial Sequence: Synthetic oligonucleotide
  Target: LAMA2; (+) strand; PAM type: YTN; PAM sequence: TTT
gatgatcttgatttcttcat

SEQ ID NO: 331712 - DNA, 20 bp, Artificial Sequence
  Description of Artificial Sequence: Synthetic oligonucleotide
  Target: LAMA2; (+) strand; PAM type: YTN; PAM sequence: TTG
atgatcttgatttcttcatt

SEQ ID NO: 331713 - DNA, 20 bp, Artificial Sequence
  Description of Artificial Sequence: Synthetic oligonucleotide
  Target: LAMA2; (+) strand; PAM type: YTN; PAM sequence: CTT
gatttcttcattaagatgta

SEQ ID NO: 331714 - DNA, 20 bp, Artificial Sequence
  Description of Artificial Sequence: Synthetic oligonucleotide
  Target: LAMA2; (+) strand; PAM type: YTN; PAM sequence: TTG
atttcttcattaagatgtaa

SEQ ID NO: 331715 - DNA, 20 bp, Artificial Sequence
  Description of Artificial Sequence: Synthetic oligonucleotide
  Target: LAMA2; (+) strand; PAM type: YTN; PAM sequence: TTT
cttcattaagatgtaaatct

SEQ ID NO: 331716 - DNA, 20 bp, Artificial Sequence
  Description of Artificial Sequence: Synthetic oligonucleotide
  Target: LAMA2; (+) strand; PAM type: YTN; PAM sequence: TTC
ttcattaagatgtaaatctg

SEQ ID NO: 331717 - DNA, 20 bp, Artificial Sequence
  Description of Artificial Sequence: Synthetic oligonucleotide
  Target: LAMA2; (+) strand; PAM type: YTN; PAM sequence: CTT
cattaagatgtaaatctggg

SEQ ID NO: 331718 - DNA, 20 bp, Artificial Sequence
  Description of Artificial Sequence: Synthetic oligonucleotide
  Target: LAMA2; (+) strand; PAM type: YTN; PAM sequence: TTC
attaagatgtaaatctgggt

SEQ ID NO: 331719 - DNA, 20 bp, Artificial Sequence
  Description of Artificial Sequence: Synthetic oligonucleotide
  Target: LAMA2; (+) strand; PAM type: YTN; PAM sequence: TTA
agatgtaaatctgggttacc

SEQ ID NO: 331720 - DNA, 20 bp, Artificial Sequence
  Description of Artificial Sequence: Synthetic oligonucleotide
  Target: LAMA2; (+) strand; PAM type: YTN; PAM sequence: CTG
ggttacctgctgaggaaaga

SEQ ID NO: 331721 - DNA, 20 bp, Artificial Sequence
  Description of Artificial Sequence: Synthetic oligonucleotide
  Target: LAMA2; (+) strand; PAM type: YTN; PAM sequence: TTA
cctgctgaggaaagaagcaa

SEQ ID NO: 331722 - DNA, 20 bp, Artificial Sequence
  Description of Artificial Sequence: Synthetic oligonucleotide
  Target: LAMA2; (+) strand; PAM type: YTN; PAM sequence: CTG
ctgaggaaagaagcaaacat

SEQ ID NO: 331723 - DNA, 20 bp, Artificial Sequence
  Description of Artificial Sequence: Synthetic oligonucleotide
  Target: LAMA2; (+) strand; PAM type: YTN; PAM sequence: CTG
aggaaagaagcaaacattta

SEQ ID NO: 331724 - DNA, 20 bp, Artificial Sequence
  Description of Artificial Sequence: Synthetic oligonucleotide
  Target: LAMA2; (+) strand; PAM type: YTN; PAM sequence: TTT
agattatgagcctctcaggg

SEQ ID NO: 331725 - DNA, 20 bp, Artificial Sequence
  Description of Artificial Sequence: Synthetic oligonucleotide
  Target: LAMA2; (+) strand; PAM type: YTN; PAM sequence: TTA
gattatgagcctctcagggg

SEQ ID NO: 331726 - DNA, 20 bp, Artificial Sequence
  Description of Artificial Sequence: Synthetic oligonucleotide
  Target: LAMA2; (+) strand; PAM type: YTN; PAM sequence: TTA
tgagcctctcaggggaatag

SEQ ID NO: 331727 - DNA, 20 bp, Artificial Sequence
  Description of Artificial Sequence: Synthetic oligonucleotide
  Target: LAMA2; (+) strand; PAM type: YTN; PAM sequence: CTC
tcaggggaataggaggggat

SEQ ID NO: 331728 - DNA, 20 bp, Artificial Sequence
  Description of Artificial Sequence: Synthetic oligonucleotide
  Target: LAMA2; (+) strand; PAM type: YTN; PAM sequence: CTC
aggggaataggaggggatca

SEQ ID NO: 331729 - DNA, 20 bp, Artificial Sequence
  Description of Artificial Sequence: Synthetic oligonucleotide
  Target: LAMA2; (+) strand; PAM type: YTN; PAM sequence: CTG
agccgtaatcagaataaagt

SEQ ID NO: 331730 - DNA, 20 bp, Artificial Sequence
  Description of Artificial Sequence: Synthetic oligonucleotide
  Target: LAMA2; (+) strand; PAM type: YTN; PAM sequence: TTC
catatggagtaaaataaaga

SEQ ID NO: 331731 - DNA, 20 bp, Artificial Sequence
  Description of Artificial Sequence: Synthetic oligonucleotide
  Target: LAMA2; (+) strand; PAM type: YTN; PAM sequence: CTG
atactcttggagcattacag

SEQ ID NO: 331732 - DNA, 20 bp, Artificial Sequence
  Description of Artificial Sequence: Synthetic oligonucleotide
  Target: LAMA2; (+) strand; PAM type: YTN; PAM sequence: CTC
ttggagcattacagggaaag

SEQ ID NO: 331733 - DNA, 20 bp, Artificial Sequence
  Description of Artificial Sequence: Synthetic oligonucleotide
  Target: LAMA2; (+) strand; PAM type: YTN; PAM sequence: CTT
ggagcattacagggaaagta

SEQ ID NO: 331734 - DNA, 20 bp, Artificial Sequence
  Description of Artificial Sequence: Synthetic oligonucleotide
  Target: LAMA2; (+) strand; PAM type: YTN; PAM sequence: TTG
gagcattacagggaaagtag

SEQ ID NO: 331735 - DNA, 20 bp, Artificial Sequence
  Description of Artificial Sequence: Synthetic oligonucleotide
  Target: LAMA2; (+) strand; PAM type: YTN; PAM sequence: TTA
cagggaaagtagaatggaaa

SEQ ID NO: 331736 - DNA, 20 bp, Artificial Sequence
  Description of Artificial Sequence: Synthetic oligonucleotide
  Target: LAMA2; (+) strand; PAM type: YTN; PAM sequence: TTG
aagaaaaggtcagaaagtaa

SEQ ID NO: 331737 - DNA, 20 bp, Artificial Sequence
  Description of Artificial Sequence: Synthetic oligonucleotide
  Target: LAMA2; (+) strand; PAM type: YTN; PAM sequence: TTG
atggattattagtttcaggt

SEQ ID NO: 331738 - DNA, 20 bp, Artificial Sequence
  Description of Artificial Sequence: Synthetic oligonucleotide
  Target: LAMA2; (+) strand; PAM type: YTN; PAM sequence: TTA
ttagtttcaggttcattagg

SEQ ID NO: 331739 - DNA, 20 bp, Artificial Sequence
  Description of Artificial Sequence: Synthetic oligonucleotide
  Target: LAMA2; (+) strand; PAM type: YTN; PAM sequence: TTA
gtttcaggttcattaggcaa

SEQ ID NO: 331740 - DNA, 20 bp, Artificial Sequence
  Description of Artificial Sequence: Synthetic oligonucleotide
  Target: LAMA2; (+) strand; PAM type: YTN; PAM sequence: TTT
caggttcattaggcaagatg

SEQ ID NO: 331741 - DNA, 20 bp, Artificial Sequence
  Description of Artificial Sequence: Synthetic oligonucleotide
  Target: LAMA2; (+) strand; PAM type: YTN; PAM sequence: TTC
aggttcattaggcaagatga

SEQ ID NO: 331742 - DNA, 20 bp, Artificial Sequence
  Description of Artificial Sequence: Synthetic oligonucleotide
  Target: LAMA2; (+) strand; PAM type: YTN; PAM sequence: TTC
attaggcaagatgacaaagc

SEQ ID NO: 331743 - DNA, 20 bp, Artificial Sequence
  Description of Artificial Sequence: Synthetic oligonucleotide
  Target: LAMA2; (+) strand; PAM type: YTN; PAM sequence: TTA
ggcaagatgacaaagcctga

SEQ ID NO: 331744 - DNA, 20 bp, Artificial Sequence
  Description of Artificial Sequence: Synthetic oligonucleotide
  Target: LAMA2; (+) strand; PAM type: YTN; PAM sequence: CTG
atggagggaaactaccattg

SEQ ID NO: 331745 - DNA, 20 bp, Artificial Sequence
  Description of Artificial Sequence: Synthetic oligonucleotide
  Target: LAMA2; (+) strand; PAM type: YTN; PAM sequence: CTA
ccattggttcagggactggt

SEQ ID NO: 331746 - DNA, 20 bp, Artificial Sequence
  Description of Artificial Sequence: Synthetic oligonucleotide
  Target: LAMA2; (+) strand; PAM type: YTN; PAM sequence: TTG
gttcagggactggtggcctt

SEQ ID NO: 331747 - DNA, 20 bp, Artificial Sequence
  Description of Artificial Sequence: Synthetic oligonucleotide
  Target: LAMA2; (+) strand; PAM type: YTN; PAM sequence: TTC
agggactggtggccttgaaa

SEQ ID NO: 331748 - DNA, 20 bp, Artificial Sequence
  Description of Artificial Sequence: Synthetic oligonucleotide
  Target: LAMA2; (+) strand; PAM type: YTN; PAM sequence: CTG
gtggccttgaaaatttcata

SEQ ID NO: 331749 - DNA, 20 bp, Artificial Sequence
  Description of Artificial Sequence: Synthetic oligonucleotide
  Target: LAMA2; (+) strand; PAM type: YTN; PAM sequence: CTT
gaaaatttcatagagaatgt

SEQ ID NO: 331750 - DNA, 20 bp, Artificial Sequence
  Description of Artificial Sequence: Synthetic oligonucleotide
  Target: LAMA2; (+) strand; PAM type: YTN; PAM sequence: TTG
aaaatttcatagagaatgtg

SEQ ID NO: 331751 - DNA, 20 bp, Artificial Sequence
  Description of Artificial Sequence: Synthetic oligonucleotide
  Target: LAMA2; (+) strand; PAM type: YTN; PAM sequence: TTT
catagagaatgtgagaaagc

SEQ ID NO: 331752 - DNA, 20 bp, Artificial Sequence
  Description of Artificial Sequence: Synthetic oligonucleotide
  Target: LAMA2; (+) strand; PAM type: YTN; PAM sequence: TTC
atagagaatgtgagaaagcc

SEQ ID NO: 331753 - DNA, 20 bp, Artificial Sequence
  Description of Artificial Sequence: Synthetic oligonucleotide
  Target: LAMA2; (+) strand; PAM type: YTN; PAM sequence: TTG
tggggaggaggtgcgagtgt

SEQ ID NO: 331754 - DNA, 20 bp, Artificial Sequence
  Description of Artificial Sequence: Synthetic oligonucleotide
  Target: LAMA2; (+) strand; PAM type: YTN; PAM sequence: TTT
aggatggactgtgcagacag

SEQ ID NO: 331755 - DNA, 20 bp, Artificial Sequence
  Description of Artificial Sequence: Synthetic oligonucleotide
  Target: LAMA2; (+) strand; PAM type: YTN; PAM sequence: TTA
ggatggactgtgcagacagg

SEQ ID NO: 331756 - DNA, 20 bp, Artificial Sequence
  Description of Artificial Sequence: Synthetic oligonucleotide
  Target: LAMA2; (+) strand; PAM type: YTN; PAM sequence: CTG
tgcagacagggagaattaga

SEQ ID NO: 331757 - DNA, 20 bp, Artificial Sequence
  Description of Artificial Sequence: Synthetic oligonucleotide
  Target: LAMA2; (+) strand; PAM type: YTN; PAM sequence: TTA
gagagataaaatatgtaaaa

SEQ ID NO: 331758 - DNA, 20 bp, Artificial Sequence
  Description of Artificial Sequence: Synthetic oligonucleotide
  Target: LAMA2; (+) strand; PAM type: YTN; PAM sequence: CTT
atgtatttattaaatattta

SEQ ID NO: 331759 - DNA, 20 bp, Artificial Sequence
  Description of Artificial Sequence: Synthetic oligonucleotide
  Target: LAMA2; (+) strand; PAM type: YTN; PAM sequence: TTA
tgtatttattaaatatttaa

SEQ ID NO: 331760 - DNA, 20 bp, Artificial Sequence
  Description of Artificial Sequence: Synthetic oligonucleotide
  Target: LAMA2; (+) strand; PAM type: YTN; PAM sequence: TTT
attaaatatttaaattaaac

SEQ ID NO: 331761 - DNA, 20 bp, Artificial Sequence
  Description of Artificial Sequence: Synthetic oligonucleotide
  Target: LAMA2; (+) strand; PAM type: YTN; PAM sequence: TTA
ttaaatatttaaattaaaca

SEQ ID NO: 331762 - DNA, 20 bp, Artificial Sequence
  Description of Artificial Sequence: Synthetic oligonucleotide
  Target: LAMA2; (+) strand; PAM type: YTN; PAM sequence: TTA
aatatttaaattaaacatga

SEQ ID NO: 331763 - DNA, 20 bp, Artificial Sequence
  Description of Artificial Sequence: Synthetic oligonucleotide
  Target: LAMA2; (+) strand; PAM type: YTN; PAM sequence: TTT
aaattaaacatgaaatatat

SEQ ID NO: 331764 - DNA, 20 bp, Artificial Sequence
  Description of Artificial Sequence: Synthetic oligonucleotide
  Target: LAMA2; (+) strand; PAM type: YTN; PAM sequence: TTA
aattaaacatgaaatatatg

SEQ ID NO: 331765 - DNA, 20 bp, Artificial Sequence
  Description of Artificial Sequence: Synthetic oligonucleotide
  Target: LAMA2; (+) strand; PAM type: YTN; PAM sequence: TTA
aacatgaaatatatgatatg

SEQ ID NO: 331766 - DNA, 20 bp, Artificial Sequence
  Description of Artificial Sequence: Synthetic oligonucleotide
  Target: LAMA2; (+) strand; PAM type: YTN; PAM sequence: CTT
atataatattaaataaattt

SEQ ID NO: 331767 - DNA, 20 bp, Artificial Sequence
  Description of Artificial Sequence: Synthetic oligonucleotide
  Target: LAMA2; (+) strand; PAM type: YTN; PAM sequence: TTA
tataatattaaataaattta

SEQ ID NO: 331768 - DNA, 20 bp, Artificial Sequence
  Description of Artificial Sequence: Synthetic oligonucleotide
  Target: LAMA2; (+) strand; PAM type: YTN; PAM sequence: TTA
aataaatttatataaataat

SEQ ID NO: 331769 - DNA, 20 bp, Artificial Sequence
  Description of Artificial Sequence: Synthetic oligonucleotide
  Target: LAMA2; (+) strand; PAM type: YTN; PAM sequence: TTT
atataaataatatacacata

SEQ ID NO: 331770 - DNA, 20 bp, Artificial Sequence
  Description of Artificial Sequence: Synthetic oligonucleotide
  Target: LAMA2; (+) strand; PAM type: YTN; PAM sequence: TTA
tataaataatatacacatat

SEQ ID NO: 331771 - DNA, 20 bp, Artificial Sequence
  Description of Artificial Sequence: Synthetic oligonucleotide
  Target: LAMA2; (+) strand; PAM type: YTN; PAM sequence: TTA
tgtatatataataatatgta

SEQ ID NO: 331772 - DNA, 20 bp, Artificial Sequence
  Description of Artificial Sequence: Synthetic oligonucleotide
  Target: LAMA2; (+) strand; PAM type: YTN; PAM sequence: CTA
tgtgtatataatatttacac

SEQ ID NO: 331773 - DNA, 20 bp, Artificial Sequence
  Description of Artificial Sequence: Synthetic oligonucleotide
  Target: LAMA2; (+) strand; PAM type: YTN; PAM sequence: TTT
acactagaaaggcaagaaat

SEQ ID NO: 331774 - DNA, 20 bp, Artificial Sequence
  Description of Artificial Sequence: Synthetic oligonucleotide
  Target: LAMA2; (+) strand; PAM type: YTN; PAM sequence: TTA
cactagaaaggcaagaaata

SEQ ID NO: 331775 - DNA, 20 bp, Artificial Sequence
  Description of Artificial Sequence: Synthetic oligonucleotide
  Target: LAMA2; (+) strand; PAM type: YTN; PAM sequence: CTA
gaaaggcaagaaataagaaa

SEQ ID NO: 331776 - DNA, 20 bp, Artificial Sequence
  Description of Artificial Sequence: Synthetic oligonucleotide
  Target: LAMA2; (+) strand; PAM type: YTN; PAM sequence: TTG
gggtagaaaataatttagtt

SEQ ID NO: 331777 - DNA, 20 bp, Artificial Sequence
  Description of Artificial Sequence: Synthetic oligonucleotide
  Target: LAMA2; (+) strand; PAM type: YTN; PAM sequence: TTT
agttctccactcaattattt

SEQ ID NO: 331778 - DNA, 20 bp, Artificial Sequence
  Description of Artificial Sequence: Synthetic oligonucleotide
  Target: LAMA2; (+) strand; PAM type: YTN; PAM sequence: TTA
gttctccactcaattatttt

SEQ ID NO: 331779 - DNA, 20 bp, Artificial Sequence
  Description of Artificial Sequence: Synthetic oligonucleotide
  Target: LAMA2; (+) strand; PAM type: YTN; PAM sequence: TTC
tccactcaattatttttatt

SEQ ID NO: 331780 - DNA, 20 bp, Artificial Sequence
  Description of Artificial Sequence: Synthetic oligonucleotide
  Target: LAMA2; (+) strand; PAM type: YTN; PAM sequence: CTC
cactcaattatttttattct

SEQ ID NO: 331781 - DNA, 20 bp, Artificial Sequence
  Description of Artificial Sequence: Synthetic oligonucleotide
  Target: LAMA2; (+) strand; PAM type: YTN; PAM sequence: CTC
aattatttttattcttggct

SEQ ID NO: 331782 - DNA, 20 bp, Artificial Sequence
  Description of Artificial Sequence: Synthetic oligonucleotide
  Target: LAMA2; (+) strand; PAM type: YTN; PAM sequence: TTA
tttttattcttggctggaaa

SEQ ID NO: 331783 - DNA, 20 bp, Artificial Sequence
  Description of Artificial Sequence: Synthetic oligonucleotide
  Target: LAMA2; (+) strand; PAM type: YTN; PAM sequence: TTT
ttattcttggctggaaaaat

SEQ ID NO: 331784 - DNA, 20 bp, Artificial Sequence
  Description of Artificial Sequence: Synthetic oligonucleotide
  Target: LAMA2; (+) strand; PAM type: YTN; PAM sequence: TTT
tattcttggctggaaaaatg

SEQ ID NO: 331785 - DNA, 20 bp, Artificial Sequence
  Description of Artificial Sequence: Synthetic oligonucleotide
  Target: LAMA2; (+) strand; PAM type: YTN; PAM sequence: TTT
attcttggctggaaaaatgg

SEQ ID NO: 331786 - DNA, 20 bp, Artificial Sequence
  Description of Artificial Sequence: Synthetic oligonucleotide
  Target: LAMA2; (+) strand; PAM type: YTN; PAM sequence: TTA
ttcttggctggaaaaatgga

SEQ ID NO: 331787 - DNA, 20 bp, Artificial Sequence
  Description of Artificial Sequence: Synthetic oligonucleotide
  Target: LAMA2; (+) strand; PAM type: YTN; PAM sequence: TTC
ttggctggaaaaatggatga

SEQ ID NO: 331788 - DNA, 20 bp, Artificial Sequence
  Description of Artificial Sequence: Synthetic oligonucleotide
  Target: LAMA2; (+) strand; PAM type: YTN; PAM sequence: CTT
ggctggaaaaatggatgaga

SEQ ID NO: 331789 - DNA, 20 bp, Artificial Sequence
  Description of Artificial Sequence: Synthetic oligonucleotide
  Target: LAMA2; (+) strand; PAM type: YTN; PAM sequence: TTG
gctggaaaaatggatgagat

SEQ ID NO: 331790 - DNA, 20 bp, Artificial Sequence
  Description of Artificial Sequence: Synthetic oligonucleotide
  Target: LAMA2; (+) strand; PAM type: YTN; PAM sequence: CTG
gaaaaatggatgagatgcat

SEQ ID NO: 331791 - DNA, 20 bp, Artificial Sequence
  Description of Artificial Sequence: Synthetic oligonucleotide
  Target: LAMA2; (+) strand; PAM type: YTN; PAM sequence: TTG
tcagattgagtccaaaagct

SEQ ID NO: 331792 - DNA, 20 bp, Artificial Sequence
  Description of Artificial Sequence: Synthetic oligonucleotide
  Target: LAMA2; (+) strand; PAM type: YTN; PAM sequence: TTG
agtccaaaagctattctgtc

SEQ ID NO: 331793 - DNA, 20 bp, Artificial Sequence
  Description of Artificial Sequence: Synthetic oligonucleotide
  Target: LAMA2; (+) strand; PAM type: YTN; PAM sequence: CTA
ttctgtctttcaccctcttg

SEQ ID NO: 331794 - DNA, 20 bp, Artificial Sequence
  Description of Artificial Sequence: Synthetic oligonucleotide
  Target: LAMA2; (+) strand; PAM type: YTN; PAM sequence: TTC
tgtctttcaccctcttgaaa

SEQ ID NO: 331795 - DNA, 20 bp, Artificial Sequence
  Description of Artificial Sequence: Synthetic oligonucleotide
  Target: LAMA2; (+) strand; PAM type: YTN; PAM sequence: CTG
tctttcaccctcttgaaagt

SEQ ID NO: 331796 - DNA, 20 bp, Artificial Sequence
  Description of Artificial Sequence: Synthetic oligonucleotide
  Target: LAMA2; (+) strand; PAM type: YTN; PAM sequence: CTT
tcaccctcttgaaagttcta

SEQ ID NO: 331797 - DNA, 20 bp, Artificial Sequence
  Description of Artificial Sequence: Synthetic oligonucleotide
  Target: LAMA2; (+) strand; PAM type: YTN; PAM sequence: TTT
caccctcttgaaagttctac

SEQ ID NO: 331798 - DNA, 20 bp, Artificial Sequence
  Description of Artificial Sequence: Synthetic oligonucleotide
  Target: LAMA2; (+) strand; PAM type: YTN; PAM sequence: TTC
accctcttgaaagttctaca

SEQ ID NO: 331799 - DNA, 20 bp, Artificial Sequence
  Description of Artificial Sequence: Synthetic oligonucleotide
  Target: LAMA2; (+) strand; PAM type: YTN; PAM sequence: CTC
ttgaaagttctacattcaga

SEQ ID NO: 331800 - DNA, 20 bp, Artificial Sequence
  Description of Artificial Sequence: Synthetic oligonucleotide
  Target: LAMA2; (+) strand; PAM type: YTN; PAM sequence: CTT
gaaagttctacattcagagt

SEQ ID NO: 331801 - DNA, 20 bp, Artificial Sequence
  Description of Artificial Sequence: Synthetic oligonucleotide
  Target: LAMA2; (+) strand; PAM type: YTN; PAM sequence: TTG
aaagttctacattcagagta

SEQ ID NO: 331802 - DNA, 20 bp, Artificial Sequence
  Description of Artificial Sequence: Synthetic oligonucleotide
  Target: LAMA2; (+) strand; PAM type: YTN; PAM sequence: TTC
tacattcagagtatcttttg

SEQ ID NO: 331803 - DNA, 20 bp, Artificial Sequence
  Description of Artificial Sequence: Synthetic oligonucleotide
  Target: LAMA2; (+) strand; PAM type: YTN; PAM sequence: CTA
cattcagagtatcttttgtc

SEQ ID NO: 331804 - DNA, 20 bp, Artificial Sequence
  Description of Artificial Sequence: Synthetic oligonucleotide
  Target: LAMA2; (+) strand; PAM type: YTN; PAM sequence: TTC
agagtatcttttgtctcgtg

SEQ ID NO: 331805 - DNA, 20 bp, Artificial Sequence
  Description of Artificial Sequence: Synthetic oligonucleotide
  Target: LAMA2; (+) strand; PAM type: YTN; PAM sequence: CTT
ttgtctcgtggaagataaat

SEQ ID NO: 331806 - DNA, 20 bp, Artificial Sequence
  Description of Artificial Sequence: Synthetic oligonucleotide
  Target: LAMA2; (+) strand; PAM type: YTN; PAM sequence: TTT
tgtctcgtggaagataaata

SEQ ID NO: 331807 - DNA, 20 bp, Artificial Sequence
  Description of Artificial Sequence: Synthetic oligonucleotide
  Target: LAMA2; (+) strand; PAM type: YTN; PAM sequence: TTT
gtctcgtggaagataaatat

SEQ ID NO: 331808 - DNA, 20 bp, Artificial Sequence
  Description of Artificial Sequence: Synthetic oligonucleotide
  Target: LAMA2; (+) strand; PAM type: YTN; PAM sequence: TTG
tctcgtggaagataaatata

SEQ ID NO: 331809 - DNA, 20 bp, Artificial Sequence
  Description of Artificial Sequence: Synthetic oligonucleotide
  Target: LAMA2; (+) strand; PAM type: YTN; PAM sequence: CTC
gtggaagataaatatattca

SEQ ID NO: 331810 - DNA, 20 bp, Artificial Sequence
  Description of Artificial Sequence: Synthetic oligonucleotide
  Target: LAMA2; (+) strand; PAM type: YTN; PAM sequence: TTC
agccaatactatccatgttt

SEQ ID NO: 331811 - DNA, 20 bp, Artificial Sequence
  Description of Artificial Sequence: Synthetic oligonucleotide
  Target: LAMA2; (+) strand; PAM type: YTN; PAM sequence: CTA
tccatgttttcacattgaaa

SEQ ID NO: 331812 - DNA, 20 bp, Artificial Sequence
  Description of Artificial Sequence: Synthetic oligonucleotide
  Target: LAMA2; (+) strand; PAM type: YTN; PAM sequence: TTT
tcacattgaaaccaaaaatg

SEQ ID NO: 331813 - DNA, 20 bp, Artificial Sequence
  Description of Artificial Sequence: Synthetic oligonucleotide
  Target: LAMA2; (+) strand; PAM type: YTN; PAM sequence: TTT
cacattgaaaccaaaaatga

SEQ ID NO: 331814 - DNA, 20 bp, Artificial Sequence
  Description of Artificial Sequence: Synthetic oligonucleotide
  Target: LAMA2; (+) strand; PAM type: YTN; PAM sequence: TTC
acattgaaaccaaaaatgaa

SEQ ID NO: 331815 - DNA, 20 bp, Artificial Sequence
  Description of Artificial Sequence: Synthetic oligonucleotide
  Target: LAMA2; (+) strand; PAM type: YTN; PAM sequence: TTG
aaaccaaaaatgaatcaatt

SEQ ID NO: 331816 - DNA, 20 bp, Artificial Sequence
  Description of Artificial Sequence: Synthetic oligonucleotide
  Target: LAMA2; (+) strand; PAM type: YTN; PAM sequence: TTA
tttcagtaaagcaaggtgta

SEQ ID NO: 331817 - DNA, 20 bp, Artificial Sequence
  Description of Artificial Sequence: Synthetic oligonucleotide
  Target: LAMA2; (+) strand; PAM type: YTN; PAM sequence: TTT
cagtaaagcaaggtgtatat

SEQ ID NO: 331818 - DNA, 20 bp, Artificial Sequence
  Description of Artificial Sequence: Synthetic oligonucleotide
  Target: LAMA2; (+) strand; PAM type: YTN; PAM sequence: TTC
agtaaagcaaggtgtatata

SEQ ID NO: 331819 - DNA, 20 bp, Artificial Sequence
  Description of Artificial Sequence: Synthetic oligonucleotide
  Target: LAMA2; (+) strand; PAM type: YTN; PAM sequence: TTA
tgatttgtatttccccattt

SEQ ID NO: 331820 - DNA, 20 bp, Artificial Sequence
  Description of Artificial Sequence: Synthetic oligonucleotide
  Target: LAMA2; (+) strand; PAM type: YTN; PAM sequence: TTT
gtatttccccatttttattt

SEQ ID NO: 331821 - DNA, 20 bp, Artificial Sequence
  Description of Artificial Sequence: Synthetic oligonucleotide
  Target: LAMA2; (+) strand; PAM type: YTN; PAM sequence: TTG
tatttccccatttttattta

SEQ ID NO: 331822 - DNA, 20 bp, Artificial Sequence
  Description of Artificial Sequence: Synthetic oligonucleotide
  Target: LAMA2; (+) strand; PAM type: YTN; PAM sequence: TTT
ccccatttttatttacctgt

SEQ ID NO: 331823 - DNA, 20 bp, Artificial Sequence
  Description of Artificial Sequence: Synthetic oligonucleotide
  Target: LAMA2; (+) strand; PAM type: YTN; PAM sequence: TTC
cccatttttatttacctgta

SEQ ID NO: 331824 - DNA, 20 bp, Artificial Sequence
  Description of Artificial Sequence: Synthetic oligonucleotide
  Target: LAMA2; (+) strand; PAM type: YTN; PAM sequence: TTT
ttatttacctgtagtgtttt
